United States Patent Application Publication US 2021/0199660 A1 - sequence listing, part 67

SEQ ID NO: 966435 - DNA, 120 bp, Artificial Sequence
  ENSG00000174680_9 (sequence is synthesized)
catacaacgccaagattcaaatttctcttagaagggcttttagtaattcagatggaaaagactttccagacagattccaaaggattatgtttggggactgcaaaggaagaatttccaaaa

SEQ ID NO: 966436 - DNA, 120 bp, Artificial Sequence
  ENSG00000174680_10 (sequence is synthesized)
ttttgtgggcttacttttttagttttacaacaacatttacctttcctgtgtgatacttgctgatcacaagggcaataccctgtcctcggtaatctattgtgggcttgctgttgatgataa

SEQ ID NO: 966437 - DNA, 120 bp, Artificial Sequence
  ENSG00000174680_11 (sequence is synthesized)
taagtttcaccatgaagcctgtgactagcccaagttgtcagaaactcctcatttctccgataagcactttgccaagctggcaaatgcccctaggagccacagtgcccctgttgcctgcac

SEQ ID NO: 966438 - DNA, 120 bp, Artificial Sequence
  ENSG00000174680_12 (sequence is synthesized)
actttggacccttttcattagcttctgactcattgcacttgcacttagcgcacgctctgatgtggacttccagctcagaacccaggttctcgaactcatgaacgcattcagcatcccttg

SEQ ID NO: 966439 - DNA, 120 bp, Artificial Sequence
  ENSG00000174680_13 (sequence is synthesized)
ctatcacaaccagcttgacagaaagaccacaggccaagtgcagcagagttccagaaagtgaatgcagcaaaatacccttgctctctttgaggtactgaaaacagtcctgccatttagctt

SEQ ID NO: 966440 - DNA, 120 bp, Artificial Sequence
  ENSG00000174680_14 (sequence is synthesized)
caacaagaaaaccaattctgaaatgaaaaaaaagcaaatcatgctatatattaagataaatattttttagaaaaagttcttatatttcacaaggattcactgtgtgtgaaattcaattaa

SEQ ID NO: 966441 - DNA, 120 bp, Artificial Sequence
  ENSG00000174680_15 (sequence is synthesized)
gtcttttaaatcagattctatttatgcctttacaattacagttagaattttaaaaatgtttctttctttcttctcttcttttctttctctctttctttccttccttccttctttctcttt

SEQ ID NO: 966442 - DNA, 90 bp, Artificial Sequence
  ENSG00000174680_16 (sequence is synthesized)
ttctttctctctttctttccttccttccttctttctctttctttcgttctttttttttttttctcacaaatggcgtgatctcagctcact

SEQ ID NO: 966443 - DNA, 120 bp, Artificial Sequence
  ENSG00000174680_17 (sequence is synthesized)
acaggcatgagccactgcacctggcaagaaacgtttctatcgcacaaaataaagtaaagctgtgcagtacagtattttttccacatggcaatttttgaaacttggagattttcaatgttc

SEQ ID NO: 966444 - DNA, 120 bp, Artificial Sequence
  ENSG00000174680_18 (sequence is synthesized)
atggcaatttttgaaacttggagattttcaatgttcacagtttccttcatgcaatgctctatcctagttcaggggacaggatttctctagttaacagatattctgtctttggaaatgact

SEQ ID NO: 966445 - DNA, 120 bp, Artificial Sequence
  ENSG00000174680_19 (sequence is synthesized)
gatctaaatgtcagtctgcatgtctttccaggaaggcatcatcatcgtaaggtgccattatgaataacattctgagatcacctgaaacactaacttaaaaataagacatgctaagtttta

SEQ ID NO: 966446 - DNA, 120 bp, Artificial Sequence
  ENSG00000174680_20 (sequence is synthesized)
aaatcatagcattttctctcatttttaaaatgattaatttatcataaaggaaacactaggttcactgtctcattctgcaaattgtgaggaattacatttgaaggtaagcaggccacttac

SEQ ID NO: 966447 - DNA, 120 bp, Artificial Sequence
  ENSG00000174680_21 (sequence is synthesized)
aacttattcatcctagtcttcaattattacagctatttaagtgataattgctattctaatttcactagaattccaactataataggaaaagaggtaaataacttttcaggggctcatgct

SEQ ID NO: 966448 - DNA, 120 bp, Artificial Sequence
  ENSG00000174680_22 (sequence is synthesized)
tgcatttctttgattatacaagagaaaagaagacaatatgtgagtttctcttcactcacttttggcaacttctgtctgtgcattaagaattctagagctgtagcaccaggaggacaggac

SEQ ID NO: 966449 - DNA, 120 bp, Artificial Sequence
  ENSG00000174680_23 (sequence is synthesized)
caccctgtattcaaattgggagcctctacaaagtcacctttagactgcagagtcatgcttttctcatcaaaccagccagccctaattttctttaggtgtcatttgtttacatttcaaaat

SEQ ID NO: 966450 - DNA, 120 bp, Artificial Sequence
  ENSG00000174680_24 (sequence is synthesized)
gaataaattcctgtcaacgtgttcaatgtagtacttgaaatgaaatactggatatgtcacacagacagctgagattatcttctgaagtcctaagattctgattaatgagaaaacgatgta

SEQ ID NO: 966451 - DNA, 120 bp, Artificial Sequence
  ENSG00000174680_25 (sequence is synthesized)
aagccagattcttctcccattcctccaggtttctagcttgaaatttgccttctgaaagtaagccagcttttctcctccaaagtagtgccaggtttctgtctgctaaggggactgatatgg

SEQ ID NO: 966452 - DNA, 120 bp, Artificial Sequence
  ENSG00000174680_26 (sequence is synthesized)
tgatatggtttgactctgtgtccccacctaaatctcatcttgaattgtaatctccatgtgttgagggagggatctggtgggaagtgactggatcatgggggtggttcccccatgctgttc

SEQ ID NO: 966453 - DNA, 120 bp, Artificial Sequence
  ENSG00000174680_27 (sequence is synthesized)
agttacactctgttgattcaaaagaaggttgtttgtccaagcttgtccaagtcagtttcaagaggctcagccaccaaaagtttcatcaaagaggaagccaaggtcatcagtaaagcctca

SEQ ID NO: 966454 - DNA, 120 bp, Artificial Sequence
  ENSG00000174680_28 (sequence is synthesized)
cgagagctacctggaacgggcaggaaagaaaaatgcagataagaaaattaaaaccacagactcctgggcagcgaacaagagccttctgatcctaattcgatctggagttaagaatgaagg

SEQ ID NO: 966455 - DNA, 120 bp, Artificial Sequence
  ENSG00000174680_29 (sequence is synthesized)
ggatttctgtagcagtttcttttgcatagcagagctccgacttttccagcaacagcgtgtccctggaagctacacaaagtcctctttgattgcctgtgatcaaagccacgaaggctctcc

SEQ ID NO: 966456 - DNA, 120 bp, Artificial Sequence
  ENSG00000174680_30 (sequence is synthesized)
tgttcttctgtttatagggtatcagagccaggagggtggctgactctgatgatagaacaagagccaaatatgctcctgatgctccagtagagtggtcttcaggtgatcgagattccgagc

SEQ ID NO: 966457 - DNA, 120 bp, Artificial Sequence
  ENSG00000174680_31 (sequence is synthesized)
tccagtagagtggtcttcaggtgatcgagattccgagctcccaaaccaaggcaagaataaggaaactggaacaggagggcatgctgggctccagcctcccgtgacagtgaaacattgcct

SEQ ID NO: 966458 - DNA, 120 bp, Artificial Sequence
  ENSG00000174680_32 (sequence is synthesized)
tagaatgactgttgttaatacaattgaggaaatataacacgtaatcttgtgattaagttatacacaatttgatttaaatttagttcctggcagttgctaggtttcactctggcatactct

SEQ ID NO: 966459 - DNA, 120 bp, Artificial Sequence
  ENSG00000174680_33 (sequence is synthesized)
ctcagtgtggaagctgctgattcagaaagagatgttccaaagctcatgtatttcctggacacatccaagtactgaataaaatgctggttaaataaatgagttaattttccaagaaagaca

SEQ ID NO: 966460 - DNA, 71 bp, Artificial Sequence
  ENSG00000174680_34 (sequence is synthesized)
atgaaattgtgagttcattaaacctcttttcttcataaattaccccattcaggcattctttacatgaaaat

SEQ ID NO: 966461 - DNA, 120 bp, Artificial Sequence
  ENSG00000174680_35 (sequence is synthesized)
ttcataaattaccccattcaggcattctttacatgaaaatggactaatacagggactaagcgtcacaagaaggcataaagccttcagtgtattgcagctctgtccaatggtggtcaaatt

SEQ ID NO: 966462 - DNA, 120 bp, Artificial Sequence
  ENSG00000174680_36 (sequence is synthesized)
atttgaggagtgggtgggctggggttagtattagagtttacatcatggtcctgtcttttgacttttgtccttccctttctcctgcccttagggtatcagagccaggagggtggctgactc

SEQ ID NO: 966463 - DNA, 120 bp, Artificial Sequence
  ENSG00000174680_37 (sequence is synthesized)
ctcaacatataagccaagagagtgccaggcctttaaataagaaacactggatgttttctgcaacttaaatacaaggtatcagagccaggagggtggctgactctgatgatagaacaagag

SEQ ID NO: 966464 - DNA, 120 bp, Artificial Sequence
  ENSG00000226263_0 (sequence is synthesized)
atggagtgcaggtgggttggagcacagatgaagccccggtccaacctgggcattcctgcagccatgtgcagtgacccttgtgtatgtgagtacctgtcatgtgcccacgtatcctggtgg

SEQ ID NO: 966465 - DNA, 120 bp, Artificial Sequence
  ENSG00000226263_1 (sequence is synthesized)
cacaaaaggtacttcatgtagattgtcaggaccaagacacagaacgttcttggggcacaccacaataattcccccactagcattcaccttaagatgaaagaatttttttctagttgatgt

SEQ ID NO: 966466 - DNA, 120 bp, Artificial Sequence
  ENSG00000226263_2 (sequence is synthesized)
ccaccatcacacttcacactctcagtaaggagctctcagttgtctcacctgttattgctcctctttattgtaaacgatgtcctataaagaagatatatgtctacaattgagctttgaagg

SEQ ID NO: 966467 - DNA, 120 bp, Artificial Sequence
  ENSG00000226263_3 (sequence is synthesized)
aggaccatggagccagttccttttaaggggaatgaagtcaagcagtaaatttgctggtcactcttttcatatggaccgcatctcagccagcagttggtctttgatgttgtaacaatggca

SEQ ID NO: 966468 - DNA, 120 bp, Artificial Sequence
  ENSG00000226263_4 (sequence is synthesized)
ctgggacctgaggcagaggagcacccccataatactgaaaccagcctgcattcattctaatttggagaacaatctgtgggatagtacgcacatcagggagcccagagagtgaactccagg

SEQ ID NO: 966469 - DNA, 120 bp, Artificial Sequence
  ENSG00000226266_0 (sequence is synthesized)
cccgcttgcttccctgcccgccctgtgtgatctaactgcaagccctttcccttaagagttggagcctgtttgtccaaccttgtgatcatttccttgtggtctcttagacatcttctcaag

SEQ ID NO: 966470 - DNA, 120 bp, Artificial Sequence
  ENSG00000226266_1 (sequence is synthesized)
atgactgcacccttttcctgagctatggcagtcagacctggcagtggtaactactctacagaactcccaaacctggcaaggatggtgcagattttggcagattatggctttgtccccacc

SEQ ID NO: 966471 - DNA, 120 bp, Artificial Sequence
  ENSG00000226266_2 (sequence is synthesized)
cagcactgatgatattataaaacctatactacaagaaatgataatggaagttcttcaactgagcaagaaatgatattaacagaaaacttggatcttcagaagcaaatgaagaacatcaga

SEQ ID NO: 966472 - DNA, 120 bp, Artificial Sequence
  ENSG00000226266_3 (sequence is synthesized)
gagtggcggcgcggcggggaccgagagctgcgggcgggctggaggtaccccaccgcggggtggtgctctgactgcgggaaccgttgaagagctgcccccggggagtcagcgaggcgccac

SEQ ID NO: 966473 - DNA, 120 bp, Artificial Sequence
  ENSG00000226266_4 (sequence is synthesized)
aaaacaaacaaaaaccttttgcttcaaaggataccactaagcaagcgaaaagacaacacatagaatgtgagaaaaaggttgtaaatcctatatatgacaaggcacctgtatccagaataa

SEQ ID NO: 966474 - DNA, 120 bp, Artificial Sequence
  ENSG00000226266_5 (sequence is synthesized)
agaacctcttaaaactcaacaataaaaacacaaataatctaattgtaaaatagcttacaatcattattgtaaaattggcaaaggatttaaatagatatttttctaaagaagatataaaaa

SEQ ID NO: 966475 - DNA, 120 bp, Artificial Sequence
  ENSG00000226266_6 (sequence is synthesized)
tagtcaataaatgcataaaaaatagacaataaatatatgctcagcctcagcagtcattagggaaatgtaaatcaaaaccacaagggaagtatttattcacacacactaatatggctacaa

SEQ ID NO: 966476 - DNA, 120 bp, Artificial Sequence
  ENSG00000226266_7 (sequence is synthesized)
taaaaaacctagacagtaaaaaatgttgatgaggatgtagaaagttggtacctgcatatattgctgttaggaatgtaaaatggtacagctgtttgggaaagcagtttagcagtcctcaaa

SEQ ID NO: 966477 - DNA, 120 bp, Artificial Sequence
  ENSG00000226266_8 (sequence is synthesized)
agtttaattatagttaccatatgactcagcaatatcgttactaagtatatactcaggaggactgaaaacacatgtcacacaaaaccctatacacaaatgttcatgtcatagtagtcaaaa

SEQ ID NO: 966478 - DNA, 120 bp, Artificial Sequence
  ENSG00000226266_9 (sequence is synthesized)
tgtggaaacaactgaaatgtgcaacaatggatgaatggataaacaaaatgtggtatatccatccagtggaatattatttagccttaaaaaggaatgaagttctgctgcatgctgcaacat

SEQ ID NO: 966479 - DNA, 120 bp, Artificial Sequence
  ENSG00000226266_10 (sequence is synthesized)
ggatgaaccttgaaaacattatcattagagatggaaaccaaacataaaaggtcacattgtattattccatttatatcactgtccagaataggcaaatccatagagatacaaaacagataa

SEQ ID NO: 966480 - DNA, 120 bp, Artificial Sequence
  ENSG00000226266_11 (sequence is synthesized)
gtggttcccaggtactgggaaaagcaagaggtaggagtgactgctaatgagtatagggtttctttttgaggtgatgaaaatgttctgcaactagatagtggtgtttgttttatgaacttg

SEQ ID NO: 966481 - DNA, 120 bp, Artificial Sequence
  ENSG00000226266_12 (sequence is synthesized)
tgaatatactaaaagccactggattatatattttatgtatttgtttgttaggactgtcataacaaataatactacaggctggtggcaacagaaatgtattttctcaccgtgtggagtcta

SEQ ID NO: 966482 - DNA, 120 bp, Artificial Sequence
  ENSG00000226266_13 (sequence is synthesized)
gaagtccacagtcaaaatgtctcaagggttgttttcattctcaggcctcttttttggcttgtagatggctaacttccctgtggcctcacatggtcaccccttggtctgtgtgttgtctgt

SEQ ID NO: 966483 - DNA, 120 bp, Artificial Sequence
  ENSG00000226266_14 (sequence is synthesized)
gtcctaacctcctcttataaggacaccagtcatattgaattagggcccacatatatgacattttaccttacttgtctctttaaaggtcccatctccaaattcaatcacattctaaggtac

SEQ ID NO: 966484 - DNA, 120 bp, Artificial Sequence
  ENSG00000226266_15 (sequence is synthesized)
tagaggtgttaggacttccacacgtgaatttagttggggagggagacacaacacttgaaaacctaggggtgaattttatgatatgtaaattatacctcaattttgaaaaatataagaacc

SEQ ID NO: 966485 - DNA, 120 bp, Artificial Sequence
  ENSG00000226266_16 (sequence is synthesized)
tacttttctttccaaataagtttgaaaacttaaatgaaaaaagtaattttcagctgggcacagtagtacacacctgtcagtcccagttactcaagaggctgaggaaggaggattgcttga

SEQ ID NO: 966486 - DNA, 120 bp, Artificial Sequence
  ENSG00000226266_17 (sequence is synthesized)
gaccaggagtttaaggctgcatctgtgaatagtcacggtactccagcctgggcaacataatgagaccccatctcttaaaaaaaaaaaaaagatggtcaggtgcaatgactcacactttga

SEQ ID NO: 966487 - DNA, 90 bp, Artificial Sequence
  ENSG00000226266_18 (sequence is synthesized)
actctacaaaaaataaaaacttagccaggtatggtggcacatgcctatggtcgcagctacttgggagactcagatgggaggatcgcttga

SEQ ID NO: 966488 - DNA, 120 bp, Artificial Sequence
  ENSG00000226266_19 (sequence is synthesized)
tcgcagctacttgggagactcagatgggaggatcgcttgagccttggaggtggagactgcagtgagccatgatctcaccattgcgcttagcctgggaggcagggtgagaccctgtctcaa

SEQ ID NO: 966489 - DNA, 120 bp, Artificial Sequence
  ENSG00000226266_20 (sequence is synthesized)
aaaaaaaaaaaaaaaagtttatttttaaggcaaatatatttcatcaaaattggccacatttgagaaagtttaatttctgtagaagaaatagaaaagaatatcaaggatccacctcataaa

SEQ ID NO: 966490 - DNA, 120 bp, Artificial Sequence
  ENSG00000226266_21 (sequence is synthesized)
aaagcaccagtcccagatggttttatagagataatctgtgaaacactcaaagatattctcaatgctccgtaaactggtgctgagcattgaacatggataataccaattcctaaagacagc

SEQ ID NO: 966491 - DNA, 120 bp, Artificial Sequence
  ENSG00000226266_22 (sequence is synthesized)
gatgatattataaacagacctatactacaagaaatgataatggaagttcttcaactgagcaagaaatgatattaacagaaaacttggatcttcagaagcaaatgaagaacatcagaaatg

SEQ ID NO: 966492 - DNA, 120 bp, Artificial Sequence
  ENSG00000266642_0 (sequence is synthesized)
gcggagggcggggccggcgcgttgaggcaggagtgagcgcagcttcggcggtcaacgcgctttattccgaggggcttcagatacagatgaccccagccctgcatccgcccggaaggcgtc

SEQ ID NO: 966493 - DNA, 120 bp, Artificial Sequence
  ENSG00000266642_1 (sequence is synthesized)
cccttactcccatggggcacctcgataccagctgccctgccctgactcacttctcagcacccatcttacggcagtcggccctggcctcagacccttgggttcagatcccaggccctcctc

SEQ ID NO: 966494 - DNA, 120 bp, Artificial Sequence
  ENSG00000266642_2 (sequence is synthesized)
cacatccgaggttttcaaggaccatgaagtgccatggcaagcatcctggcctgagggttaggagagctggatctcaggctcaactttagcctgaattcggtgcgtcatcttagacaaatc

SEQ ID NO: 966495 - DNA, 120 bp, Artificial Sequence
  ENSG00000266642_3 (sequence is synthesized)
tgctcaagtcctgttccttgtttaaccagcatttattaagtacttgcagtataccagccactattttggacattagtgatatggagtgtaataaagacttaataaaggctaattgtgatc

SEQ ID NO: 966496 - DNA, 120 bp, Artificial Sequence
  ENSG00000266642_4 (sequence is synthesized)
ctaattccgcttcattaacatgggggtaatttaactacctagctagacggttgcaaagggatcagttcactaattctcaatgttggcagtgcatcacattgcaaactccctgcctctgct

SEQ ID NO: 966497 - DNA, 120 bp, Artificial Sequence
  ENSG00000266642_5 (sequence is synthesized)
ccagagctgatcagaatcaataagggtggggcctgaaaatactacatccaaatttccgagaagcacagtgtctagcatacccctatctctccatctggggttactgtcactctcaggaag

SEQ ID NO: 966498 - DNA, 120 bp, Artificial Sequence
  ENSG00000266642_6 (sequence is synthesized)
ggtaaggttgagaaactgtgggctcctcagggtggggggtgcttagagaagatggggcctctgagtcctcagactgggggtcttcatcgggttcagcatcctccccaggcccaagccctg

SEQ ID NO: 966499 - DNA, 120 bp, Artificial Sequence
  ENSG00000266642_7 (sequence is synthesized)
ccagcctcttgctggcctcccatagccgatgggctgcccggtcgtctcgggcagctggaggcacctcttccacatggcagttggcaaaatatctcccactgaggggctcgatgccctctt

SEQ ID NO: 966500 - DNA, 120 bp, Artificial Sequence
  ENSG00000266642_8 (sequence is synthesized)
gtagagcacaatacaggggtgtctgggcaccccctcttggtgcccggagcaccagccaagccaatgggcgcaaaagtgggcgcagccatccaggaacatggcgcaggaacagctccgagt

SEQ ID NO: 966501 - DNA, 120 bp, Artificial Sequence
  ENSG00000273618_0 (sequence is synthesized)
taaagtgttaaagttccttaactccattcagccctgcgccaggatcgttagctattgatctgggcccctccggcacttaactccagccagcatattggcaattcaattagcaccagtcaa

SEQ ID NO: 966502 - DNA, 120 bp, Artificial Sequence
  ENSG00000273618_1 (sequence is synthesized)
tgctgcgtgttcctggctcctgctgcccatgccctcgcccttgcccaccactggctctgcaaagcccgacgcccatgcccacctctggcagccccttgcaggctcttctcctgtaccctc

SEQ ID NO: 966503 - DNA, 120 bp, Artificial Sequence
  ENSG00000273618_2 (sequence is synthesized)
tggatcaatggtgcctggctggctgttcccggcctctgctggtacaacctcagctgcctaagggtgactctaagcccagccttagggctgaagacctcctaggagacaggaagaggctgg

SEQ ID NO: 966504 - DNA, 120 bp, Artificial Sequence
  ENSG00000273618_3 (sequence is synthesized)
gaagcttgtcaggggcctcttcccatccctgctgcctttggatcatgcccacagctcctatctccttccaagaagccctggcccagcacaaaacaggttctctctccttcctacccagct

SEQ ID NO: 966505 - DNA, 120 bp, Artificial Sequence
  ENSG00000273618_4 (sequence is synthesized)
ccagcctgccaccctccagcattaccaggacactagtcactactcagaatcactgggtggttcctcttcaccctcttcctgttctatgtcatccacccagcaaagcccctgcccttcttt

SEQ ID NO: 966506 - DNA, 120 bp, Artificial Sequence
  ENSG00000273618_5 (sequence is synthesized)
gcccctccactcaaggtagcctccacagtgcctgacacgctcattctgtcttatcccttcgcagcttcttcccatttagtataggtggcctacaggccctcttcgccttccttgtatctc

SEQ ID NO: 966507 - DNA, 120 bp, Artificial Sequence
  ENSG00000273618_6 (sequence is synthesized)
taactccgcagcccccctgctccccacatcctgctgccctccctgcccagctcttattctccagtcccttcttcctcaccgggagtccggagctgcccgtggctgaagctcaggatgctc

SEQ ID NO: 966508 - DNA, 120 bp, Artificial Sequence
  ENSG00000273618_7 (sequence is synthesized)
gctgcgagtccttcctcagtggttgggccattctgtagcagctgcagacgcctctgggcctgggcatcgcggtgggcaggtgtgcgcaggtgttgcagcacagccaagcgggagggtgtc

SEQ ID NO: 966509 - DNA, 120 bp, Artificial Sequence
  ENSG00000273618_8 (sequence is synthesized)
tcccacgcacacaacaggcagtggtatagccccagctctgcccctgcctccgctccctccatgtccagcagaaactagaaccatgggaagaggctggctcaggcccagaagggacatgcc

SEQ ID NO: 966510 - DNA, 72 bp, Artificial Sequence
  ENSG00000273618_9 (sequence is synthesized)
ccatgggaagaggctggctcaggcccagaagggacatgccagacctcaggggactttttttttttttctaga

SEQ ID NO: 966511 - DNA, 120 bp, Artificial Sequence
  ENSG00000273618_10 (sequence is synthesized)
tcctcccgcctcggcctcccaaagtgccgggactacaggcgtgagccaccgcacctagcctcaggggacttctttgccttccctaagggagactgactagcagcagccccctccccaccc

SEQ ID NO: 966512 - DNA, 120 bp, Artificial Sequence
  ENSG00000273618_11 (sequence is synthesized)
ccccacccctcgcttcctgctcctgaaaccccccctttccctcctatggccacctaagtattattgcttgctctccccaaccctttctctttctcctaccactcctggactccctcccag

SEQ ID NO: 966513 - DNA, 120 bp, Artificial Sequence
  ENSG00000273618_12 (sequence is synthesized)
catgcaaatggagtctggttccatcctcttgaacctctggtgacatgacaaactgagctgataccacccctccctccagggccaaacaccagaagagctgaataaagtctgtttcacttg

SEQ ID NO: 966514 - DNA, 120 bp, Artificial Sequence
  ENSG00000266644_0 (sequence is synthesized)
actcctggagcggggggagactaacccctctcctgtgtccacaactgtagtaacacaatcctcggttctgctctccaaacttcaaataaggggtcagagccaagggtcaagactttagga

SEQ ID NO: 966515 - DNA, 120 bp, Artificial Sequence; identical to SEQ ID NO: 893437
  ENSG00000266644_1 (sequence is synthesized)

SEQ ID NO: 966516 - DNA, 65 bp, Artificial Sequence
  ENSG00000266644_2 (sequence is synthesized)
cctgggttcaagtggttttcatgttacctttgagtttttatctccacatacttatattaaaccgt

SEQ ID NO: 966517 - DNA, 120 bp, Artificial Sequence; identical to SEQ ID NO: 893439
  ENSG00000266644_3 (sequence is synthesized)

SEQ ID NO: 966518 - DNA, 120 bp, Artificial Sequence
  ENSG00000268333_0 (sequence is synthesized)
gaggctcctaaaccagttggacaggaaagcgcagttcccagctcactacagtatcatacagtaagcttctgattcggataaattgtgaagaatattgtctctagctccttaaaggatttt

SEQ ID NO: 966519 - DNA, 120 bp, Artificial Sequence
  ENSG00000268333_1 (sequence is synthesized)
catgtggaagaggccttaagatttattatatatggctctagagggcaaaattagaacctatcggtggtagttgtagcagaaagccttcagcgcaacccaaagaagaatctgacatggagt

SEQ ID NO: 966520 - DNA, 120 bp, Artificial Sequence
  ENSG00000268333_2 (sequence is synthesized)
gggctgtcagaaagttggcgctttgtcagaagcaatgtgaagtcaaaggacaggaggagcaatttctagactctggatccaacgggaagcatctagaagcccccttgctcaggcaaagca

SEQ ID NO: 966521 - DNA, 120 bp, Artificial Sequence
  ENSG00000268333_3 (sequence is synthesized)
tcagtacccaagaggggtacaggccctcttggacgtggtgtctcatttctctcccgtggccctggagcttggcattctgtattctccggttcagaccctggactctgacaccctgccttg

SEQ ID NO: 966522 - DNA, 120 bp, Artificial Sequence
  ENSG00000268333_4 (sequence is synthesized)
tgagacatcattgtcccaggacacccccagtctacggggttctggccccagatgtccacctctgccctgcccaccagcagccatgccagccagtgagctgtgggtgaaaacactgctgat

SEQ ID NO: 966523 - DNA, 120 bp, Artificial Sequence
  ENSG00000268333_5 (sequence is synthesized)
tgcaaaggaccactcaaccgtcaggaaagctctcggctcatagctttgtcttttgtccagctgtcctggacatcctatctttcctctagcccctagccctgacagagagcctcaaagttg

SEQ ID NO: 966524 - DNA, 120 bp, Artificial Sequence
  ENSG00000268333_6 (sequence is synthesized)
ttttcatcttatctgctgaggatctgactcaccccatcagacttctgggagggagagagcgagcgcgcctcgagcccggaggggagaaacccttagtgttgtcacggtttaggcacacgc

SEQ ID NO: 966525 - DNA, 120 bp, Artificial Sequence
  ENSG00000268333_7 (sequence is synthesized)
tcatagaaatccttgcagctcgagctcttcaaaatatgattagaccaattttacatgtctagtcactgaggctccagtagattgggactatttctatatgtgcaaagtgaagtggataat

SEQ ID NO: 966526 - DNA, 120 bp, Artificial Sequence
  ENSG00000268333_8 (sequence is synthesized)
tgaggcaattatcttcaggcaaatgaatctgggcactgtaatcagtccatcctgataactggggagaaatcggcgtcattcactgtagcattgctttgcgttaaagagaattctaaggta

SEQ ID NO: 966527 - DNA, 120 bp, Artificial Sequence
  ENSG00000214548_0 (sequence is synthesized)
gtcagtcccttcccacccctcttgcttgtcttacttgtcttatttattctccaacagcactccaggcagcccttgtccacgggctctccttgcatcaggtaggggctttgcagagaccat

SEQ ID NO: 966528 - DNA, 120 bp, Artificial Sequence
  ENSG00000214548_1 (sequence is synthesized)
cgacgggctgacttgagtaagaacacgaattatgcatgtggccatttccagagcactttctatgtgatatgaacatgtgatttttatgtaatatgtgtatgtaaacgaggcagcctcatt

SEQ ID NO: 966529 - DNA, 120 bp, Artificial Sequence
  ENSG00000214548_2 (sequence is synthesized)
tccaggtgaggatgcatttggtagtgttgatttttgtaatttaaagaagctgaaagggagagaggacccgtgaggactgaactctctgtcccatggggtagggcttacatttacattaaa

SEQ ID NO: 966530 - DNA, 120 bp, Artificial Sequence
  ENSG00000214548_3 (sequence is synthesized)
gaaacagaaacttgctgggaggtgtaagtatttggtcacattgctggcaacagaaggggttggagttggacccagggtgccacgctagctgccctcaccccttcttcccctctggcccag

SEQ ID NO: 966531 - DNA, 120 bp, Artificial Sequence
  ENSG00000214548_4 (sequence is synthesized)
agttatactaagagtccttttatttcaaaccaaatgtttgacaatgggacagtctgtttgaaatcccagctgcctggggtggtcttgggggtctgggtggccccagtgctggtaccatgt

SEQ ID NO: 966532 - DNA, 120 bp, Artificial Sequence
  ENSG00000214548_5 (sequence is synthesized)
taccatgtgctggcttcaccttttaataacagtgtgaccttaaacaagtcgcttaactactctaagtttcagtttctttcatggtctaaatggagattaaaacacacacacacacacaca

SEQ ID NO: 966533 - DNA, 120 bp, Artificial Sequence
  ENSG00000214548_6 (sequence is synthesized)
cacacacacacaccccctcgtgtatctaccccacagggcgcttttgaagaccaaatgctgtaactactatgaaagtgctttgtaaattgctgtggaaagtgtgagctactcaagcacccg

SEQ ID NO: 966534 - DNA, 120 bp, Artificial Sequence
  ENSG00000214548_7 (sequence is synthesized)
aggctgtccctccttgctcacatgtccagcccaattctcccttagtgagaacagcactcagtaggtgctgtgtgtgtttgtgttcaattaagaaattccagaataaataaaaatgaatta

SEQ ID NO: 966535 - DNA, 120 bp, Artificial Sequence
  ENSG00000214548_8 (sequence is synthesized)
attcaacaaacattttctggggcaccgacaatctgcccagtgcaccaggctaggtatctgatacaaagataatgaaaacagtctcttggaacctaattggggtcctcatttgaccaggaa

SEQ ID NO: 966536 - DNA, 120 bp, Artificial Sequence
  ENSG00000214548_9 (sequence is synthesized)
tagagaagcccagctcagtgtagacaatagctgcccagcctctgaaaggggctgattggattatgtggcaaatggaggtgcaaggatgacttggacggtgacaaatgaagtgggcggaga

SEQ ID NO: 966537 - DNA, 120 bp, Artificial Sequence
  ENSG00000214548_10 (sequence is synthesized)
cctgctttgagttaatccaggctattaggaggggaccttttgtcttccagagactggcaggagcttttaccagtggtttttacatccttaatgttcaggacgaataatttatggtcagtg

SEQ ID NO: 966538 - DNA, 120 bp, Artificial Sequence
  ENSG00000214548_11 (sequence is synthesized)
aaaatccaggccccagtgagattcgagtgggctgtaaaatcgagagtcctgctcccagtgagtaatggtagtgaatgtttctgtcactttttgcaaccgtccattcatttgatcctcaca

SEQ ID NO: 966539 - DNA, 120 bp, Artificial Sequence
  ENSG00000214548_12 (sequence is synthesized)
actccctgtcctgagccaggaccggccactgccactcccagggaaacagaggctgtcaagaggctccacagattgggccccactggatcattgaacccctgttccctgagttctagagga

SEQ ID NO: 966540 - DNA, 120 bp, Artificial Sequence
  ENSG00000214548_13 (sequence is synthesized)
agaattgtacctgtctcagtcccggccacctccagaaggcctccctctgcatttctgactttgctgtgccggcagcctggagcctcccaggtccctgctgtcatcttttctagccactac

SEQ ID NO: 966541 - DNA, 120 bp, Artificial Sequence
  ENSG00000214548_14 (sequence is synthesized)
agtctctgtctttcctttcacagccaagcttcttgaaaggcctgtctacacttgctgtcttccttcctcacctccaatttcctcttcaacccactgcttcctgactcgctctactccgtg

SEQ ID NO: 966542 - DNA, 120 bp, Artificial Sequence
  ENSG00000214548_15 (sequence is synthesized)
gaagcacgctcacaaagttcctgacctggccatcccggggtgcccttgaccagccccgtgtctcctcagggtgtcccagcaccagcctggcacagagtggggctcagttagagtatgtgg

SEQ ID NO: 966543 - DNA, 120 bp, Artificial Sequence
  ENSG00000214548_16 (sequence is synthesized)
gatgttggtttcgccaggcacgtgggccgtggcccggctgggtcggctgaagaactgcggatggaagctgcggaagaggccctgatggggcccaccatcccggacccaagtcttcttcct

SEQ ID NO: 966544 - DNA, 120 bp, Artificial Sequence
  ENSG00000214548_17 (sequence is synthesized)
ggcgggcctctcgtctccttcctggtttgggcggaagccatcacctggatgcctacgtgggaagggacctcgaatgtgggaccccagcccctctccagctcgaaatcccataggtcacct

SEQ ID NO: 966545 - DNA, 120 bp, Artificial Sequence
  ENSG00000214548_18 (sequence is synthesized)
gaaagcctacctcacagggctgttgtgagggccgaggcctccacagccacggggacaccctgcacctattcccacgggacaggctggacccagagactctggacccggggcctccccttg

SEQ ID NO: 966546 - DNA, 120 bp, Artificial Sequence
  ENSG00000214548_19 (sequence is synthesized)
tcacaaagggctaatctcgggccttgtcgaaggaagaggctgcagacgttaatgaggttagctgctggattccagtattcgtcgcataaggatccttctttgtctgcgaaggaaaaacac

SEQ ID NO: 966547 - DNA, 120 bp, Artificial Sequence
  ENSG00000214548_20 (sequence is synthesized)
gtgtgtgagcagcttccgacccctgccccatttgaacgggggccttgctggtcgcgtccctgcattcacccgcgcggccatcccgtcatccaacagttgatcctaactgagcacgcccac

SEQ ID NO: 966548 - DNA, 120 bp, Artificial Sequence
  ENSG00000214548_21 (sequence is synthesized)
ggccctggtctggcctgggcaccggccaccgtagcccatcccttgatggcctctgtgtccccaggagggcgggccggggggttgcccaggggctggagcagtggactgtggctccataga

SEQ ID NO: 966549 - DNA, 120 bp, Artificial Sequence
  ENSG00000214548_22 (sequence is synthesized)
cttccccgccccattcctgatgctgaactgttctggacccctggccctgagtctctcaggaccaaagtgggcacgggaacagctgtagtgtgtgcccccccgggctttggccacaggtct

SEQ ID NO: 966550 - DNA, 120 bp, Artificial Sequence
  ENSG00000214548_23 (sequence is synthesized)
ccctctcgaggtgtggttgtgactgcgacccttcccttgccgtgatgccttcctcccccggggcttggtccagctccttcactctctagcagctgctggggcccacctcccatgccgagg

SEQ ID NO: 966551 - DNA, 120 bp, Artificial Sequence
  ENSG00000214548_24 (sequence is synthesized)
accagcaggggaaacctccagggagcatctgcaggctctgcttctgcccggctgctggcttgctctccctggtggctctccagcggccagcttcctcacccacccggcactccgctttgc

SEQ ID NO: 966552 - DNA, 120 bp, Artificial Sequence
  ENSG00000214548_25 (sequence is synthesized)
tctgtctcctgaggttcccagtgcccccgacaagcccctgctggtgtctccatctcctgccaagcatcctccagtgcctcctcctgtgggcctggcctcagggctatggacagactcctg

SEQ ID NO: 966553 - DNA, 120 bp, Artificial Sequence
  ENSG00000214548_26 (sequence is synthesized)
cctctgactgatggacgccgctgacctggggtcagacccgtgggctggacccctgcccaccccgcaggaaccctgaggcctaggggagctgttgagccttcagtgtctgcatgtgggaag

SEQ ID NO: 966554 - DNA, 120 bp, Artificial Sequence
  ENSG00000214548_27 (sequence is synthesized)
tgggctccttcacctacctcacagggctgttgtgaggggcgctgtgatgcggttccaaagcacagggcttggcgcaccccactgtgctctcaataaatgtgtttcctgtcttaacaaaaa

SEQ ID NO: 966555 - DNA, 120 bp, Artificial Sequence
  ENSG00000214548_28 (sequence is synthesized)
gcagacggcggagagcagagagggagcgcgccttggctcgctggccttggcggcggctcctcaggagagctggggcgcccacgagaggatccctcacccgggtctctcctcagggatgac

SEQ ID NO: 966556 - DNA, 120 bp, Artificial Sequence
  ENSG00000214548_29 (sequence is synthesized)
atcatccgtccacctccttgtcttcaaggaccacctcctctccatgctgagctgctgccaaggggcctgctgcccatctacacctcacgagggcactaggagcacggtttcctggatccc

SEQ ID NO: 966557 - DNA, 120 bp, Artificial Sequence
  ENSG00000214548_30 (sequence is synthesized)
accaacatacaaagcagccactcactgacccccaggaccaggatggcaaaggatgaagaggaccggaactgaccagccagctgtccctcttacctaaagacttaaaccaatgccctagtg

SEQ ID NO: 966558 - DNA, 120 bp, Artificial Sequence
  ENSG00000214548_31 (sequence is synthesized)
agggggcattgggcattaagccctgacctttgctatgctcatactttgactctatgagtactttcctataagtctttgcttgtgttcacctgctagcaaactggagtgtttccctcccca

SEQ ID NO: 966559 - DNA, 120 bp, Artificial Sequence
  ENSG00000214548_32 (sequence is synthesized)
agggggtgtcagtctttgtcgactgactctgtcatcacccttatgatgtcctgaatggaaggatccctttgggaaattctcaggagggggacctgggccaagggcttggccagcatcctg

SEQ ID NO: 966560 - DNA, 120 bp, Artificial Sequence
  ENSG00000214548_33 (sequence is synthesized)
ctggcaactccaaggccctgggtgggcttctggaatgagcatgctactgaatcaccaaaggcacgcccgacctctctgaagatcttcctatccttttctgggggaatggggtcgatgaga

SEQ ID NO: 966561 - DNA, 120 bp, Artificial Sequence
  ENSG00000214548_34 (sequence is synthesized)
ggcttcaagctccaatgacctccgctcgccccctcgaaatgtctggaaaacataatgggcagattttctgtcttcaaagtttccggctaaacctcttcaagttctttattgtttgggact

SEQ ID NO: 966562 - DNA, 120 bp, Artificial Sequence
  ENSG00000214548_35 (sequence is synthesized)
gagacactcagccatgttaatgggtagtttcttttgtatttgccttgaaaggccaaaatatttttatattgccacagacaaagccacctatttaaaaatgaactccatgtccgtcgtttc

SEQ ID NO: 966563 - DNA, 120 bp, Artificial Sequence
  ENSG00000214548_36 (sequence is synthesized)
ccaccaggagactatgtaccatgtgtgtgtctctatgtattctggggtcttgaaacaggtttctcatggggatggtcattcaccacggtccagaggggcagaacaggcggcgcttgcctt

SEQ ID NO: 966564 - DNA, 120 bp, Artificial Sequence
  ENSG00000214548_37 (sequence is synthesized)
gcccagggggcctggggaacgtgggccctcatctcagatctgcccccagtatgtttaggacgcgagccccagaaggatctgggagtaaacttaacattcactgtgtctctgctctgcatc

SEQ ID NO: 966565 - DNA, 120 bp, Artificial Sequence
  ENSG00000214548_38 (sequence is synthesized)
cgccatttgtgtgtgtttctggactgtgggctgtgtgtaccttggttggtgactcagtgagaagaagcaggaatgccaaagatactgtgaatgttctgagttttgttgctgttgttgttg

SEQ ID NO: 966566 - DNA, 120 bp, Artificial Sequence
  ENSG00000214548_39 (sequence is synthesized)
agaggttgtttcactggtatctattgcattgtataataaatgaccagatgaatgaatgagtgaagcaagagagaatgaataaacaagtaaataggtaaagaagtaagcaagccaggatga

SEQ ID NO: 966567 - DNA, 120 bp, Artificial Sequence
  ENSG00000214548_40 (sequence is synthesized)
gagtgtgtgtacacaagaccatggttcatccgctttgatggctaggcaatcaatatataaatagaaaaaaaccagtgaatcactaagtaatagggcaacacacaaagcgatatcaggtga

SEQ ID NO: 966568 - DNA, 120 bp, Artificial Sequence
  ENSG00000214548_41 (sequence is synthesized)
ttatggactaaggggtatgtgtaactcaaatatatgcctctgacatttgacaatgaaaaagaacctaaatgaaagaaagaatggatgtatgagtagtgaagtgcagaatgagacatagat

SEQ ID NO: 966569 - DNA, 120 bp, Artificial Sequence
  ENSG00000214548_42 (sequence is synthesized)
tttgaggcccgtcaaaatgaaaagatgcaagttagggaacaagtgatcaaaagggagaagggaaaggttttttttaaaaaaccaaaacaacaaagaaaggttaaaaaaaaaaacagacta

SEQ ID NO: 966570 - DNA, 120 bp, Artificial Sequence
  ENSG00000214548_43 (sequence is synthesized)
gaggatgagtaatgagtaactctgtaaggaggaccatgtcagactattgtaagctaagcattaggactgatacaaataatatatgctcctggcatagaaaaataaaccacagagaacgag

SEQ ID NO: 966571 - DNA, 120 bp, Artificial Sequence
  ENSG00000214548_44 (sequence is synthesized)
ttcaaagaatagcaaagaaagaaagaggacccagtgggcgaaagatgagagtgtacttttaccaaaagttatctaagcctgagcacttgaagtctgcacataaataaataaatgacaaaa

SEQ ID NO: 966572 - DNA, 120 bp, Artificial Sequence
  ENSG00000214548_45 (sequence is synthesized)
gattcgtttacccaagagggaacagttttgagaccccccggattcactgcggagtggccgcagaggccggggtcggcctttgcgccgtggcttcgggtgttgtggaggcgcacagagggt

SEQ ID NO: 966573 - DNA, 120 bp, Artificial Sequence
  ENSG00000214548_46 (sequence is synthesized)
acggcggagagcagagagggagcgcgccttggctcgctggccttggcggcggctcctcaggagagctggggcgcccacgagaggatccctcacccggaccacctcctctccatgctgagc

SEQ ID NO: 966574 - DNA, 120 bp, Artificial Sequence
  ENSG00000214548_47 (sequence is synthesized)
tcactccaattaaactttaggctccagtcagaccttcagccaaatggaaaaaaaaactaggggataagggaggtagttggagcaagaaaatgttattagttgaaaccttacgggaccttc

SEQ ID NO: 966575 - DNA, 120 bp, Artificial Sequence
  ENSG00000214548_48 (sequence is synthesized)
ctcccttagtgagtctgttggctaaaggttctctggcttcgtgaattagaatcggatactgtttccaagttagcaaaaccaactctaccccagcaccccacgaggaagaatgtggaagga

SEQ ID NO: 966576 - DNA, 120 bp, Artificial Sequence
  ENSG00000214548_49 (sequence is synthesized)
tctcccattggccggttggggcaaaagcctgaggcaatctttcatccccttttgccaaggcgagactttcccagtgacggtgatgtagttggccactctgactatgggtggactcgggtg

SEQ ID NO: 966577 - DNA, 120 bp, Artificial Sequence
  ENSG00000214548_50 (sequence is synthesized)
tagacctctgaagctgagatcacacgaaaacctggcctccccgccatgtagctgttggagagtagaaaaatagagcacgcctgatgtttctaaatgagaagactttcaatagtaatgaag

SEQ ID NO: 966578 - DNA, 120 bp, Artificial Sequence
  ENSG00000214548_51 (sequence is synthesized)
aatccatggcactctcctcaccctcaaacacatggcagtcattcacatacaggccccaaagccactgttagtgctgcagtagctcctgtggacattggaaagcccggagagggcgtggaa

SEQ ID NO: 966579 - DNA, 120 bp, Artificial Sequence
  ENSG00000214548_52 (sequence is synthesized)
gaaatcagctggcccccggcaggttctctggggttttgtgcccaaggctcctggagccctaaaaactttcaaaagttaactccccacgtccccatcctgcttgggtttctggacttttct

SEQ ID NO: 966580 - DNA, 120 bp, Artificial Sequence
  ENSG00000214548_53 (sequence is synthesized)
gaggcaccggcagaggggtctcgttgctcccttgagtgtaggggcagccctttaacctggctccttgagtccctgctttttctgcttctgttgccttcttcctcgtcttcctctctctca

SEQ ID NO: 966581 - DNA, 120 bp, Artificial Sequence
  ENSG00000214548_54 (sequence is synthesized)
tctgtctcctgaggtgggcctgaccaacctccccttctctgcctcagtccctgggctccagggctcagctccacagccctctgcctagcaggctggttctccctgccaagcccatacctg

SEQ ID NO: 966582 - DNA, 120 bp, Artificial Sequence
  ENSG00000214548_55 (sequence is synthesized)
ctgcctttgcctccgccgtggccctgagagtcctgggctctgccccgcccggtcccttgctccccactcagttctggatttggggctgcccctaacccagcccgttgctgctttgcacct

SEQ ID NO: 966583 - DNA, 120 bp, Artificial Sequence
  ENSG00000214548_56 (sequence is synthesized)
gctcgaaatcagtttgccctgccccccattccaacgtgggctgctgcttctccccagcgggttgtagctggcagggccgttgtgctttggggtttgctgtacctgtcgctgccgtgaggg

SEQ ID NO: 966584 - DNA, 120 bp, Artificial Sequence
  ENSG00000214548_57 (sequence is synthesized)
acgtgggaagggacctcgaatgtgggaccccagcccctctccagctcgaaatcgagctacaactctccttggcctcctcttgtgactcccaactccctccttgggaagcttggcctcagg

SEQ ID NO: 966585 - DNA, 120 bp, Artificial Sequence
  ENSG00000214548_58 (sequence is synthesized)
acctctgggatagacaggccacgaatcctgctgtgtcccgttgtgttcctaatataaatggtgtggatggcacttgacctagagcagtgggaaatgcatgcaccactcaacattctgaca

SEQ ID NO: 966586 - DNA, 120 bp, Artificial Sequence
  ENSG00000214548_59 (sequence is synthesized)
tgtcacccattttacattcttacaggcatactttttttaaaaaaagagtgtctattctttaatgagcatcccttctttaaaaaaacctaattgccattattcaccacatacacttttttt

SEQ ID NO: 966587 - DNA, 120 bp, Artificial Sequence
  ENSG00000214548_60 (sequence is synthesized)
tttttgtatcctgcctcttctatttaattttctgtcatcaacattttcccttgttccatgaatcttcataacctcacttgctgcgttgtgccttgttgagtggctatggcatcattcaca

SEQ ID NO: 966588 - DNA, 120 bp, Artificial Sequence
  ENSG00000214548_61 (sequence is synthesized)
tttttcattcttaagaattatgttcttccacccagaaattatcattgcttcactacagatcagtttcccctgctagactgtgagccccataagggcaaggagcttattgaattggccttt

SEQ ID NO: 966589 - DNA, 120 bp, Artificial Sequence
  ENSG00000214548_62 (sequence is synthesized)
gtatctctgatgcccaacatgttgtagactataaataaatgatgaatgagtggatggaagaatggaggaaggagcgagtgagtgagtgtttggctgatggataagagggtggaaggatag

SEQ ID NO: 966590 - DNA, 120 bp, Artificial Sequence
  ENSG00000214548_63 (sequence is synthesized)
gcggaaggatggattggtgaatgaatgaatgaatttcctttggttaagtctcttgaaagaaaggctatggatctttgtatggatgttgaataatttcagtaagcttacagcattttacaa

SEQ ID NO: 966591 - DNA, 120 bp, Artificial Sequence
  ENSG00000214548_64 (sequence is synthesized)
tgttcagcaatgtatgaccacttaattaagatatggctagtttgtctctgttataaagtacttttgcattactttaacttgcattgctttaattactaatgatgggtgaacactttgacc

SEQ ID NO: 966592 - DNA, 120 bp, Artificial Sequence
  ENSG00000214548_65 (sequence is synthesized)
gcgtgcaggagagacaggagaagagaataactaaacaaagacattaaagacaaaaaaaaagtaggaaagggagacttagaaaatattaaaagccaccaaaaacacatccaaagacggttt

SEQ ID NO: 966593 - DNA, 120 bp, Artificial Sequence
  ENSG00000214548_66 (sequence is synthesized)
ccccttacgttagttgggctaaaagaaagcaaatgggaagaaggttttaaattgattatcccagtgacaaatcccaggaagctttcacatcaaatcaccctattctgggtttttaactcc

SEQ ID NO: 966594 - DNA, 120 bp, Artificial Sequence
  ENSG00000214548_67 (sequence is synthesized)
tggtaaaccctgccccctccctaccgccccctttgctggtgattaaatcctgaaggtacacgaagtatttcagtgaatgaatggctaacagaaaagggcctcccctcccccttaccctgg

SEQ ID NO: 966595 - DNA, 120 bp, Artificial Sequence
  ENSG00000214548_68 (sequence is synthesized)
ggctgcttctggccgggagcaggttttcaagtcattagaacactctggcctttcctggaggtgatcttggagccattcctgcccctttcaagaggagttaatgcccagctctgtttagag

SEQ ID NO: 966596 - DNA, 120 bp, Artificial Sequence
  ENSG00000214548_69 (sequence is synthesized)
aaaattgggggagatgattgctcatgtgggtgataagaatcacctcccgtgcaggggtctgcatagaacactccataggcaaacctgggtgtccaaggcacgtggcattttgcaaactct

SEQ ID NO: 966597 - DNA, 120 bp, Artificial Sequence
  ENSG00000214548_70 (sequence is synthesized)
acttgcaaagtctcggcttagttcctggcactctgaggtccacctccttcctgaggctggtggttaccgtgctaatgagctaggccgcagcggctattagacatggctgcgtggggtgtc

SEQ ID NO: 966598 - DNA, 120 bp, Artificial Sequence
  ENSG00000214548_71 (sequence is synthesized)
ctgccagcccagccccgtcaccacgggctgcctcgagcagctcccccagcaccaggcactccagatgctgagcagcagagtctgcccatgaaggatggatgcactacccctgcctccata

SEQ ID NO: 966599 - DNA, 120 bp, Artificial Sequence
  ENSG00000214548_72 (sequence is synthesized)
cacccatagcttcttccccatggtgctttccatgtgtcacacaccacgactgtgacccagggtcggggtcaagagtagcctggggccaagccctcccacccatgagcggagaagtcctcc

SEQ ID NO: 966600 - DNA, 120 bp, Artificial Sequence
  ENSG00000214548_73 (sequence is synthesized)
ccaggcctcaccttgcctggcgcatggtccctcccatgagctttgctttcagcctttcagcttcctccacagggtggcagtggttgtaactcatccattcatcccttcatcccttcattc

SEQ ID NO: 966601 - DNA, 120 bp, Artificial Sequence
  ENSG00000214548_74 (sequence is synthesized)
attcactcacagccaacagacgtttttaaaaaattagccagtgctatactagagctggctcccaaggacccgctgccgcattgccttttgaaacaaaacaatgaacacgttggtaaaggg

SEQ ID NO: 966602 - DNA, 120 bp, Artificial Sequence
  ENSG00000214548_75 (sequence is synthesized)
gccgtgcttgtgtgtcggtgacaaggcgagatccctgagtcaggtcaggcttgtagattcgagttctgttgcgagtttgattgcccctctgactttgtcccctgtacaactaggttgatt

SEQ ID NO: 966603 - DNA, 120 bp, Artificial Sequence
  ENSG00000214548_76 (sequence is synthesized)
tcccagaccaggtgagaactccctgagttcctgctgcctgggtcgggggtgaggcataggtcttgggggttcaacctggaattctgaatgtcattcattgcattggagaggaaggagagt

SEQ ID NO: 966604 - DNA, 120 bp, Artificial Sequence
  ENSG00000214548_77 (sequence is synthesized)
tcgtgtggtttaaagtcactgtgagagctggagttgagtctgcctacgggggaggactgcggcacctacctcgcagggctgttgtgaggagcaatgtaaccgtgattttgaactgtgatt

SEQ ID NO: 966605 - DNA, 120 bp, Artificial Sequence
  ENSG00000214548_78 (sequence is synthesized)
ctggaagggcggtgtgcgtgtccccgggggtgtgccaggggagtgaggagaaaaggccagggagacagcctcactcaggcagctgagtgggagagcatttatctctaaacctggaggggt

SEQ ID NO: 966606 - DNA, 120 bp, Artificial Sequence
  ENSG00000214548_79 (sequence is synthesized)
atatggtgggacaggaggaatttgggcaggaactttcatgctaggggtttgggggactcgctggacaatgcccctggaccccccgggggtacgcgttcacgctcacctctgagaggctgg

SEQ ID NO: 966607 - DNA, 120 bp, Artificial Sequence
  ENSG00000214548_80 (sequence is synthesized)
aaacgcctggctgtgctttctgaatgctgtgtgcttcctgcctctgtgcctggcctgtgtgcagcacctacttgtgtccgccttcaaaaggcccttctgggtggcgtccttttccccaaa

SEQ ID NO: 966608 - DNA, 120 bp, Artificial Sequence
  ENSG00000214548_81 (sequence is synthesized)
atattaggcaccagccatcaaagatactgcattgttgcctcccccacccctccccccaactgacaacatttgggctcaaatgcagcaggctgggtgcccaacacagtgcctggcgagtgg

SEQ ID NO: 966609 - DNA, 120 bp, Artificial Sequence
  ENSG00000214548_82 (sequence is synthesized)
tagcgcttacgtttcttttctgttgaatggatggatagctaatgaaattgtaaccaatgacaagccttgatgtttataacctttactaagagattattattttgctcttcatggacctgt

SEQ ID NO: 966610 - DNA, 120 bp, Artificial Sequence
  ENSG00000214548_83 (sequence is synthesized)
taacaaccaccatattgtatcttacggacgtttgtatgccacgtttgaagagcaggagccttgtttcggcgtcatgttgatggaacttgagctgtctgatgcgaatctgtgttttatgtt

SEQ ID NO: 966611 - DNA, 120 bp, Artificial Sequence
  ENSG00000214548_84 (sequence is synthesized)
acaaaggtaaagacttttctgtggcttaatccttgtcatgttttcggctcatggacacaaggacacattttcatgccttctctcacagggctctgcgtctccggttcacttctgtgtctt

SEQ ID NO: 966612 - DNA, 120 bp, Artificial Sequence
  ENSG00000214548_85 (sequence is synthesized)
tacactcccttcacagagacacttgctcccccttctctcgttcttagcatcccctaggaacttgcacacccaggtctctcgacttctggacctgcttcttaccatgccgtcttaagcagt

SEQ ID NO: 966613 - DNA, 120 bp, Artificial Sequence
  ENSG00000214548_86 (sequence is synthesized)
caggagtcgctgcctgggttcgagtcctagttaaattacttagtgctgagaccttggggtaggtaaacttttccaagccaggtttatctcagtttcaaaatagggttaatcgtctttatc

SEQ ID NO: 966614 - DNA, 120 bp, Artificial Sequence
  ENSG00000214548_87 (sequence is synthesized)
tggcaggtcaggtgggatgtctcacaggtaagcaccagatgccatttgaaaggcttgaagcaaagtcaataaagcattcatgggaaaatacaactggaggcaccactagattttcgtata

SEQ ID NO: 966615 - DNA, 120 bp, Artificial Sequence
  ENSG00000214548_88 (sequence is synthesized)
ctcatttaagtctttgcctctgtcccagtgcgaagtccattcagcggggttgaaagttgcaggcagctttgggaaggggggcgtcggacagggttgcattgtagaaagtggctttgttcg

SEQ ID NO: 966616 - DNA, 120 bp, Artificial Sequence
  ENSG00000214548_89 (sequence is synthesized)
atccttcgcacagatgcaaatggccagagcattcattccctttcttcaagagctgaggactgggggggccactggtgatcagttcccaactctagctctcctctgactcatctcaggacc

SEQ ID NO: 966617 - DNA, 120 bp, Artificial Sequence
  ENSG00000214548_90 (sequence is synthesized)
cattgaggacatccaaaactcactcaagatcaccaagtggtaggaaagtactaactcctgggcatagccctaggggagtgactacaatgtgaatactcatggaatgcctagccaggtgaa

SEQ ID NO: 966618 - DNA, 120 bp, Artificial Sequence
  ENSG00000214548_91 (sequence is synthesized)
gaagtgaatgcatgttggcatcccagagggaccccccttaagagggcatagtttggggttcagatttgactccagcatactgttgaaattgggcacagggggctagtgattagtcaggat

SEQ ID NO: 966619 - DNA, 120 bp, Artificial Sequence
  ENSG00000214548_92 (sequence is synthesized)
ttgggcacagggggctagtgattagtcaggatcaatcagtggagaggagattaaaactcacatctgggagtccggaatcagaacttgtagttcttttttttgaaatggagtctcgctctg

SEQ ID NO: 966620 - DNA, 120 bp, Artificial Sequence
  ENSG00000214548_93 (sequence is synthesized)
ggaagccatcacctggatgcctacgtgggaagggacctcgaatgtgggaccccagcccctctccagctcgaaatcaatctggggctccaggctatgccttggctggactgaggtctgggg

SEQ ID NO: 966621 - DNA, 120 bp, Artificial Sequence
  ENSG00000214548_94 (sequence is synthesized)
gtgcacttattatccctggggacacctgctgaagcttctccctgacaagctgtgtcactgttggatgaggatggggcgggaggggttcagggcagaagaagaccgggagggtctttcaaa

SEQ ID NO: 966622 - DNA, 120 bp, Artificial Sequence
  ENSG00000214548_95 (sequence is synthesized)
agaactcatgtacggctgttaaaaaaagtcagcagaggctcaggaagacttaaagtgtgcagaaggcggggaagggagggcccattgcatgcaccaagaggaaattggaaggaacaagcg

SEQ ID NO: 966623 - DNA, 120 bp, Artificial Sequence
  ENSG00000214548_96 (sequence is synthesized)
catctaggggctgtcctgacgggtcacagtgggtcgaactgagccaatgagagcagctctggggagacccactggtgccctggaggctgggtgggtttgggttggatgaattctgtgtgt

SEQ ID NO: 966624 - DNA, 120 bp, Artificial Sequence
  ENSG00000214548_97 (sequence is synthesized)
ccttttggaaatgtggaggccatgaggggggatcagggctcttagggttttgacccttaagagttttgtatctgtaattcaaaggttctttagttctgggatgctgagattcgggatagg

SEQ ID NO: 966625 - DNA, 120 bp, Artificial Sequence
  ENSG00000214548_98 (sequence is synthesized)
gttcctaatggcacaaaagccagagataaaacatccttcacgtgctccctacccggttctttctgtaccagacccacaaggtccgagttgggatcctagtgctcctgtctggtcagggcc

SEQ ID NO: 966626 - DNA, 120 bp, Artificial Sequence
  ENSG00000214548_99 (sequence is synthesized)
tccttgcatcaggacgaataatttatggtcagtgaaaatccaggccccagtgagattcgagtgggctgtaaaatcgagagtcctgctcccaccaagcttcttgaaaggcctgtctacact

SEQ ID NO: 966627 - DNA, 120 bp, Artificial Sequence
  ENSG00000214548_100 (sequence is synthesized)
aggcgtgagccaccatgcccagccctatagtagttcttcttttgccccttaatatcttcacccacatgtcctgtaccctgcctgaaccctcctcctctttttgttctgatctttgagctc

SEQ ID NO: 966628 - DNA, 120 bp, Artificial Sequence
  ENSG00000214548_101 (sequence is synthesized)
tctgatctttgagctccctagagcccataattctttagagcaggtatgtcccgagtctgaaacatgcccttatttgtcccaagctctggacatttctcaccccaaggcggatcaatcatg

SEQ ID NO: 966629 - DNA, 120 bp, Artificial Sequence
  ENSG00000214548_102 (sequence is synthesized)
gtggaggggctggcgggcactggccgggggtctgtgcaccgggaggtgggtgcccatcgagtcaagccaagtgcagacctgggggctcctgttttctaagacaggagccccctgcctcct

SEQ ID NO: 966630 - DNA, 120 bp, Artificial Sequence
  ENSG00000214548_103 (sequence is synthesized)
tgtgttgtctctgtggcaaaagaattctataggcgggcttcaaatgtcggaccccaaaagaatttcttctttttcactcttctaaatgaatggctctttcattattgagtctccctttgg

SEQ ID NO: 966631 - DNA, 120 bp, Artificial Sequence
  ENSG00000214548_104 (sequence is synthesized)
tcatccagtcctgggcactgaggtctgttagatgaaaggatatgagaaaggtaatattggtaaataaagaaataggaaacaatgtaacaaatgttaagtacagaaatacattaatgggtg

SEQ ID NO: 966632 - DNA, 120 bp, Artificial Sequence
  ENSG00000214548_105 (sequence is synthesized)
gtaaataaagatgtaaaagaaggcaatgcgatcgatggtggcaaaagatcatcacagattaagggctatggctggtccacttctagaaaaccacaggctgtccattaaataatgaacatc

SEQ ID NO: 966633 - DNA, 120 bp, Artificial Sequence
  ENSG00000214548_106 (sequence is synthesized)
taagtgaacaagtcagtgagtacctaaatagacaaggatgaggtgaatgagaagacatggccccatgggtcctcctgatgagggtgttggggtcccccctgggcaccccagctgcatgaa

SEQ ID NO: 966634 - DNA, 120 bp, Artificial Sequence
  ENSG00000214548_107 (sequence is synthesized)
aatgaaggacaggaggtatggaaagctatgacagaagagagaaaggaacggtaaaaagaaataacaaccaaatggataaatgggtagatccacgagaagagttaggctaggacttgtcat

SEQ ID NO: 966635 - DNA, 120 bp, Artificial Sequence
  ENSG00000214548_108 (sequence is synthesized)
aagggcacctgactccactaatagaggaataaatgcctaataaaaagagagcaagcaggaaggaaggatgctatgaatgcaggaaggaagtaatgagtgagacgtggaaccgcacggcca

SEQ ID NO: 966636 - DNA, 120 bp, Artificial Sequence
  ENSG00000214548_109 (sequence is synthesized)
aggatggacgtttgcgggtggctttttgatgcgtacagccaagccactccatggcaatgagctccgaagacaaagtgcaagagagaatgagtgagagagtgagagagagagaaacaataa

SEQ ID NO: 966637 - DNA, 120 bp, Artificial Sequence
  ENSG00000214548_110 (sequence is synthesized)
aaaatgggaagaaatgtaaaaaggaagaaaggaagagaggtaatatattaaggaataaatacatgcatgcagatttaagacagagccatgctagaacaggaatgaaaggctgtgtgaacc

SEQ ID NO: 966638 - DNA, 120 bp, Artificial Sequence
  ENSG00000214548_111 (sequence is synthesized)
aagcagaccgcttaattggcaccagtgctgctggtatggtcaatcacctactcaactaaggaacggctcaaagcatacacatgggagggaggagtggggccacagagagagggcccatta

SEQ ID NO: 966639 - DNA, 120 bp, Artificial Sequence
  ENSG00000214548_112 (sequence is synthesized)
gttgcagattacgatgtatccagttaggtgcacctgccttcgagaagtgtaaaaataagtatttacatagaaagaaagactgaatggatgcacggtgaatgcatgaatgattgaacgaca

SEQ ID NO: 966640 - DNA, 120 bp, Artificial Sequence
  ENSG00000214548_113 (sequence is synthesized)
gaaaagatttgcattgaccgatgaggagggcattgtagacagggatgagggtcattgatcctgggtgcagatctccaaaagaatgacagaaagaaagagggagtggtggaaagaaacaat

SEQ ID NO: 966641 - DNA, 120 bp, Artificial Sequence
  ENSG00000214548_114 (sequence is synthesized)
aggatgggaaaaaatgaaaatagaaaaaaggaagtgaaagagataataaataattagatcaaataagttgatgaaaggggactggtttagcacaagccatccacattaattcaaacctgt

SEQ ID NO: 966642 - DNA, 120 bp, Artificial Sequence
  ENSG00000214548_115 (sequence is synthesized)
ggctctgaagtttgttttttaaatgaccacaagtgtaagactgaatgaaagaataaatgcgtgcattccataggatgcaagaaaaggagtgaggaatgggaaaattggaagaacgagaga

SEQ ID NO: 966643 - DNA, 120 bp, Artificial Sequence
  ENSG00000214548_116 (sequence is synthesized)
gggagagatgtaagaaaagaaaggaaaagtgaagtaggcatatgaaagaaaaggcacttcttggacaagcactgaaatataatgagacagttttacccattaaatataataaacagtaaa

SEQ ID NO: 966644 - DNA, 120 bp, Artificial Sequence
  ENSG00000214548_117 (sequence is synthesized)
cgttgaggttcatcaataaaagcacagatacctgaatagaggagtgacctgaatagaattcgttcagccgaacgaatgagaatggatgattttcactatcctgtgcactcaaggcccaaa

SEQ ID NO: 966645 - DNA, 120 bp, Artificial Sequence
  ENSG00000214548_118 (sequence is synthesized)
agagaaagcaagagaggagagaatatggaaacgtatgacaggatgtatataagcaatacaaacatattgaatgaataaataaagacataaatatgtgggagagtggaccacgcaaggaca

SEQ ID NO: 966646 - DNA, 120 bp, Artificial Sequence
  ENSG00000214548_119 (sequence is synthesized)
aaaagaggagagaaggcagcaagaattatgactaattcaaaactgggttcctgagatagttaaataaatcctgcaccaaatccccagggggagaaattaacaaacaaaagacagccccac

SEQ ID NO: 966647 - DNA, 120 bp, Artificial Sequence
  ENSG00000214548_120 (sequence is synthesized)
acggaccagtgtgcagaaggctccaggaaccgcagattatggttaatccaattctgtgcacctgaggtccataaataaaagaataagtattgaaatgaaagaatgacagaaagaatgaat

SEQ ID NO: 966648 - DNA, 120 bp, Artificial Sequence
  ENSG00000214548_121 (sequence is synthesized)
ggacacatgaacgactgaattagaaatggaaatgcctggcacagccaggaaggagctgcccatgggattgtcattcatctcactctgggcacctgaggtccataagcgtgaaaagaggca

SEQ ID NO: 966649 - DNA, 120 bp, Artificial Sequence
  ENSG00000214548_122 (sequence is synthesized)
ggaagagaagtgtcagggagtcaaagatagagctaaggaaaggcaaaaatgaaactaaatgaaagcgaaagggaaaataaagaaaaaccaataaaaaagagaacgaatacgtgggtgtat

SEQ ID NO: 966650 - DNA, 120 bp, Artificial Sequence
  ENSG00000214548_123 (sequence is synthesized)
ctgtaagagtaggatctgttaggattagtcataagactgtcagtaatcctgaagatggatgagataatccaggcccaggttcccagggggagggaaaatggagaaaatataaaaagatgt

SEQ ID NO: 966651 - DNA, 120 bp, Artificial Sequence
  ENSG00000214548_124 (sequence is synthesized)
gaaaaaggaaaaaggaaaggtaataaacaaacaaccaaagtgataaatggatagttaagggaggttgtctgaacagggattataattagtttacatacatactccttaaacagataaata

SEQ ID NO: 966652 - DNA, 120 bp, Artificial Sequence
  ENSG00000214548_125 (sequence is synthesized)
cattacacctttcaaagaataaatgaaaaatagagagacatacctggctccaaaacaaggctgtatcttctgccactgtaataaaatagatgcaattgaggttcataaataaaagaataa

SEQ ID NO: 966653 - DNA, 120 bp, Artificial Sequence
  ENSG00000214548_126 (sequence is synthesized)
atacttaaacgtgaaaggtgactaaatgcggggaagaaagattgcaaataaatacatgggccaaagatgtttggtttgcccatggagttttaattaaaaaaattaataaggaaaacaaat

SEQ ID NO: 966654 - DNA, 120 bp, Artificial Sequence
  ENSG00000214548_127 (sequence is synthesized)
acccaaaataaggaagactgacaaatgagtgagtggatgagagagtgaatggtgcttgacgtaggagcagtagtgctttagggaccagcatgaaggtggtgaccgggagccctgattcat

SEQ ID NO: 966655 - DNA, 77 bp, Artificial Sequence
  ENSG00000214548_128 (sequence is synthesized)
gggaccagcatgaaggtggtgaccgggagccctgattcatgggattctgtccacctgactttataagaaccaagaat

SEQ ID NO: 966656 - DNA, 70 bp, Artificial Sequence
  ENSG00000214548_129 (sequence is synthesized)
tttgagaccagccaatacaaaaattatgggcgtggtggcacctgtctgtaatcctagctactcgggaggc

SEQ ID NO: 966657 - DNA, 120 bp, Artificial Sequence
  ENSG00000214548_130 (sequence is synthesized)
ggagaaagaaccagagaaacataaggaagagtgagaggaagaaagaaagatgcaatttgggaagaaatgaaaaagaaatgaataaagaataaaataatgtaacggtcaataaataggact

SEQ ID NO: 966658 - DNA, 120 bp, Artificial Sequence
  ENSG00000214548_131 (sequence is synthesized)
tgtgaatggaggcctttaggccaaaggctatgattaatttcaagctatgttactgaagtccataaacaaaggactcagatctaaatggatgaacgaatgactggaagaaagggtggtagg

SEQ ID NO: 966659 - DNA, 120 bp, Artificial Sequence
  ENSG00000214548_132 (sequence is synthesized)
aaggtaggaagaaaggaaggagggaaaaagggaagagaggaaggaaccttctttccagtcctgtgttctagacagtggaatgaagtggtccccagggagggtggctgtaggcatgtcatg

SEQ ID NO: 966660 - DNA, 120 bp, Artificial Sequence
  ENSG00000214548_133 (sequence is synthesized)
tgcttgtcacatgcacttgccctggcagggaggagctggctcaggaagaccctggtcttggggtgctgttgccctatcttggctgtgtgggccatttcactgcatctgtctcttcctcag

SEQ ID NO: 966661 - DNA, 120 bp, Artificial Sequence
  ENSG00000214548_134 (sequence is synthesized)
actagagttgatcttatgtgtctctgttgatggtaccccatctatggcctggataggcaggaagggcttggaccctgagccccgcagaaggttgcatgaacgagtggtgtgaagcctgtt

SEQ ID NO: 966662 - DNA, 120 bp, Artificial Sequence
  ENSG00000214548_135 (sequence is synthesized)
gggtagcttggccactcccgcggcatgggtcacctgcacaggaggttttgcccaccagggggcagcagagggtcagggagcaataggccctgggtggagcatgggccccgcctgctgtgt

SEQ ID NO: 966663 - DNA, 120 bp, Artificial Sequence
  ENSG00000214548_136 (sequence is synthesized)
gccaccctgggtgtggcacctactcacatccaggggttggtgcagggaaaggccagaaggtggccaggcgcacctgagaagggggacccagaagccccgggacccaggagccctgggcaa

SEQ ID NO: 966664 - DNA, 120 bp, Artificial Sequence
  ENSG00000214548_137 (sequence is synthesized)
gccaccagaaaccttgttcttgcaactctctgcagtgtgcccaggccaccctctggcctggtcttccatggggcagggcgcccacccttctcaactcaggtttccctgggcagcaggtgc

SEQ ID NO: 966665 - DNA, 120 bp, Artificial Sequence
  ENSG00000214548_138 (sequence is synthesized)
acctcagcacccctggggttgcagaagtggtccggggaccctggcttccttgacatgccatccccagagcctggttcaaggcctctctgtcttctcggctgtttcacgacgtgttttgta

SEQ ID NO: 966666 - DNA, 120 bp, Artificial Sequence
  ENSG00000214548_139 (sequence is synthesized)
acttggcgggattgcgtttcgctgtgtcgaggttgtctcttctctgactcgccctccgggggactgccggggtaaatctggagagttgctcgtgctgacagtcctcccccagggcctccc

SEQ ID NO: 966667 - DNA, 120 bp, Artificial Sequence
  ENSG00000214548_140 (sequence is synthesized)
cggttctgttgagtctcctttctctgtagtggaggaaatgtgtgtagttttgtgttgtgtgcctgtgtttgtctgtaaaagcaaggaccaaagtctcccttgttgacctctcaattccta

SEQ ID NO: 966668 - DNA, 120 bp, Artificial Sequence
  ENSG00000214548_141 (sequence is synthesized)
tttgggacatataaaaacactggattcttaacaagcgcccggagcagtaggagcacagcttggatggactcaggacttgtggcagggagcacgtgggaggcaggggagtggggtggggcc

SEQ ID NO: 966669 - DNA, 120 bp, Artificial Sequence
  ENSG00000214548_142 (sequence is synthesized)
aggccatctggagtgggaggcgtcatgctcagagtgactctgtagacgctgggtgggatggggagtgcgggcgcaggcatggatggggctgttagctagtgtgatgcttgaggtctgagc

SEQ ID NO: 966670 - DNA, 120 bp, Artificial Sequence
  ENSG00000214548_143 (sequence is synthesized)
tgatggcagcaaagtggggtgctcaggaatcaaagctatggggttatagacaggatatgaaggagggagggaggcaagaagaagggggtggttcccacgcttctagctccggccgagtgg

SEQ ID NO: 966671 - DNA, 120 bp, Artificial Sequence
  ENSG00000214548_144 (sequence is synthesized)
atggcaacagcatttggaaggcggaggacatggaattcatgtgtcaggagccaccttccgagcctccagtaccacgtgtcagggccacatgagctgggcctcgtgggcctgatgtggtgc

SEQ ID NO: 966672 - DNA, 120 bp, Artificial Sequence
  ENSG00000214548_145 (sequence is synthesized)
tgttcgttaaacttttaacaatgagaattaattctgtctcttgacattgtcatttgcatgctccccacacacaaatcctttcctggtgacaccaggagctacaactctccttggcctcct

SEQ ID NO: 966673 - DNA, 120 bp, Artificial Sequence
  ENSG00000214548_146 (sequence is synthesized)
ctcactggaggcattcaaggaaccagccaggcagccctcagagaaagtagtgtttaggagattctcatggtgtggggttggcctaggtggcctttcaggtctgtttgatgttaggatttg

SEQ ID NO: 966674 - DNA, 120 bp, Artificial Sequence
  ENSG00000214548_147 (sequence is synthesized)
cttctccctgggaagtgggtgatggggaaaaagacaccttccattggcaggtgtagacactgcaggctggacctcctgggtgtgcttgtggactccgatcttgcccttgataaaacccct

SEQ ID NO: 966675 - DNA, 120 bp, Artificial Sequence
  ENSG00000214548_148 (sequence is synthesized)
gtgggacaggaatagctctttgaacctccaaggtccagacagccacatcctagcaccctgtacaatcagttagtggccttcccaccagcgcagtcactcattcctattagatcccgatga

SEQ ID NO: 966676 - DNA, 120 bp, Artificial Sequence
  ENSG00000214548_149 (sequence is synthesized)
agccaggccctggggtttccattttcccacctcttaggggaattgggttccccgcgtcctgtgatatgtcagcaaatgtcctcagccctggcctgcacatgtggcctcagtggtggtctt

SEQ ID NO: 966677 - DNA, 120 bp, Artificial Sequence
  ENSG00000214548_150 (sequence is synthesized)
tggggtttaactgacgaatggaacattttggatcaggactgatgggagaatctcctttcatttttcttcacctggggcaattacattctaaggagcggaataaagggcatgttctgccca

SEQ ID NO: 966678 - DNA, 120 bp, Artificial Sequence
  ENSG00000214548_151 (sequence is synthesized)
aagcatcagggctcacaggtcagtcacagccatttagggagggcatgtcacccaaggagggctcgcccttctttccagagcatcctccgctctcagcagagctgcttctgcccacccatc

SEQ ID NO: 966679 - DNA, 120 bp, Artificial Sequence
  ENSG00000214548_152 (sequence is synthesized)
cctctactatagcactgagcactgtttgcccgtgtcagaatccctcacccacatgtttagcttggtatccgagtttgggaggccggcaatgactttcaacatgaattgctccatctaccc

SEQ ID NO: 966680 - DNA, 120 bp, Artificial Sequence
  ENSG00000214548_153 (sequence is synthesized)
atccatgcatttggcctacttatcttgaccccgtgcttttggccttttcttctcctgaaagcaaaccctttcattttgggtgggctgtgtagcgccatgggctgtggttatgaagcaaac

SEQ ID NO: 966681 - DNA, 120 bp, Artificial Sequence
  ENSG00000214548_154 (sequence is synthesized)
gagggtgggtgtgtttcaacagtgtgcagatgctggctttccctgggaatgggcatatgttgggatttgtcttgaaagcatgagtgatggctttactagtcctaagtgaataaaaagtca

SEQ ID NO: 966682 - DNA, 120 bp, Artificial Sequence
  ENSG00000214548_155 (sequence is synthesized)
gccctgaccttacgctgggattgcatttcccacagtcagtggcatgtgcagaccactggcagagcagcctgcaggtgcttagcgatgtgggcccagagtaaatatttgtttgattgatga

SEQ ID NO: 966683 - DNA, 120 bp, Artificial Sequence
  ENSG00000214548_156 (sequence is synthesized)
gagagaggatgaggaaggggttctgggtggcatccttggggtaccaaccctgcttccatcctgcgctctgaatttcctcacagcccttttctgtctctggtagaaggtgcagaaggtagg

SEQ ID NO: 966684 - DNA, 120 bp, Artificial Sequence
  ENSG00000214548_157 (sequence is synthesized)
ctttgccaccttccctgggcctggcaccaagctcgggggtcttgtacacactttcccttctctaactggggtgtgggcccatttcctagatgagcttgctgagaatcaggacagctggta

SEQ ID NO: 966685 - DNA, 120 bp, Artificial Sequence
  ENSG00000214548_158 (sequence is synthesized)
tcagagccaggacttcccagtcttgcacaaacaacctgtgcatttttgagtccaccaaataaggcctcctgcctggtccggctcacccctgccagcccccagcaaatgcagcctggtgcg

SEQ ID NO: 966686 - DNA, 120 bp, Artificial Sequence
  ENSG00000214548_159 (sequence is synthesized)
tccccacccctgccaagagcccaggagtgctctggcagagaagtgcagggatgaggaaggaggctgtgccctccaggggactcagctgcgttagaggaggtgctgctgcagtggcagggg

SEQ ID NO: 966687 - DNA, 120 bp, Artificial Sequence
  ENSG00000214548_160 (sequence is synthesized)
tctccagacatcccacgcaggggtcctttcagatcaggcatctcttcaccagaccaccgtattcctttttcagccctcgtctcttgcacgtgggggtgcagtgtttggctctcacatccc

SEQ ID NO: 966688 - DNA, 120 bp, Artificial Sequence
  ENSG00000214548_161 (sequence is synthesized)
cacattccagctggtgggggtttgagctgggtgttccttctgctccccactccccactcacggcccccaccccacgcaagcctcccttgcccccactctttgtctccagctttcacagcc

SEQ ID NO: 966689 - DNA, 120 bp, Artificial Sequence
  ENSG00000214548_162 (sequence is synthesized)
ttggcgggcaggctgctgcgcctgttgctgccccggctctcttccacccgcctcttctttctcagcctgagctttaccgtgaggtctgggcgccacaccttggcccctgccatgcctgct

SEQ ID NO: 966690 - DNA, 120 bp, Artificial Sequence
  ENSG00000214548_163 (sequence is synthesized)
cccagaagcacccacgtgggtcccctgattctctcctcccctgggctttgctaaggagccctttcattgtggcctttggtgtctgcctcatgcccatcccctgttcttgagaacttggaa

SEQ ID NO: 966691 - DNA, 120 bp, Artificial Sequence
  ENSG00000214548_164 (sequence is synthesized)
gcagagggggcccctcctattgctcccaagaggctccacagtagggagcccctcccaggagattctgagtctgtgtttaggtgtcgattcctgggtgggccttggggtcccctcaggcca

SEQ ID NO: 966692 - DNA, 120 bp, Artificial Sequence
  ENSG00000214548_165 (sequence is synthesized)
ggggggctctgtcaggcacctagtgtcccttggaggtgggcggggctgggtcctggtctcctgaggacgggtggggagacaggctcagggagatttccacgaagctgcccttgaacccct

SEQ ID NO: 966693 - DNA, 120 bp, Artificial Sequence
  ENSG00000214548_166 (sequence is synthesized)
cctctgaggcccacactgccctggccctttacaccctgcctcctgcactagtaggcacataatagatgctcgccacctgtggagggcagggtttaaatggctggaaagagctgagtgggc

SEQ ID NO: 966694 - DNA, 120 bp, Artificial Sequence
  ENSG00000214548_167 (sequence is synthesized)
tgtttggctagcgtacgcgcatttgtttaaaaggaaagggtgtgtttcttggcaaagactcttcggaggaaacgctgaactggggatgggtctctacctgttctggggcctcactgccct

SEQ ID NO: 966695 - DNA, 120 bp, Artificial Sequence
  ENSG00000214548_168 (sequence is synthesized)
tcctgccggggacaggcagtcactggtgggtttccccccagtggaaacacaatattttggaaatatttgtatctaggataaaacttcatctggaccaacatgtctttgttggtgttgtgg

SEQ ID NO: 966696 - DNA, 120 bp, Artificial Sequence
  ENSG00000214548_169 (sequence is synthesized)
cccaggtgattttgagaatgtagaatacatttggcaatttccaaacggagtgatgacctgctcctccgccccccatgccctccctgaggctggaggcttcagaagcccctgccttgggag

SEQ ID NO: 966697 - DNA, 120 bp, Artificial Sequence
  ENSG00000214548_170 (sequence is synthesized)
gaggctgttctacctgagaagtctttgtccccaccgttggtgacaatcagcattgacctgtgaggcacctgccaggttcgggacgcagctttagacatccagaaaaccgggggtggaggg

SEQ ID NO: 966698 - DNA, 120 bp, Artificial Sequence
  ENSG00000214548_171 (sequence is synthesized)
gtggggtgggggcttaagaccccagagcttgattccttttaactgtctcatccccaaagaatggtacatgggtaccaggtaggttacttgaatcaccctgagcctcgattttcccacccg

SEQ ID NO: 966699 - DNA, 120 bp, Artificial Sequence
  ENSG00000214548_172 (sequence is synthesized)
ttagaaacagggtaattcatgacagtgtccgcttgggagacggctgtgacccctgagaattctcgctgcatgccgtgggctggctcgtgagactcaaggtctgggttcgaggcccccgca

SEQ ID NO: 966700 - DNA, 120 bp, Artificial Sequence
  ENSG00000214548_173 (sequence is synthesized)
accccttctgactgtgtggcctgggcgagtttgttgtttgtaacctggaaagcgtcacacctgcctggcacggttattgtgggcttcaatgagattgtttgtgtgaaataaacgctttgt

SEQ ID NO: 966701 - DNA, 120 bp, Artificial Sequence
  ENSG00000214548_174 (sequence is synthesized)
gactggcacacaggcgctctcatcccggctctcctggtgggcccggaccgctgggtgctggctgcggaggccctgtgctccctggaactgtctgcgctggtcccagggactcttgggcag

SEQ ID NO: 966702 - DNA, 120 bp, Artificial Sequence
  ENSG00000214548_175 (sequence is synthesized)
agtggagggcaagggggaaagcaccagcctgctctggggagacagtggcagagggaagtgtttgcttttaaatacactcagcaggttcagacaggagaggatccgaggggaaatgtttag

SEQ ID NO: 966703 - DNA, 120 bp, Artificial Sequence
  ENSG00000214548_176 (sequence is synthesized)
agccctcaggaggaggaagagaccgagttttaggaaaaacatcaaagctggataggttgggcagaagagctggggatagcatttagagagactctggacccggggcctccccttgagtag

SEQ ID NO: 966704 - DNA, 120 bp, Artificial Sequence
  ENSG00000264869_0 (sequence is synthesized)
ttttttttttttcttgttaacaatgacagcaaaccttctggagtctgaaccagcaacgtagcacacaatatactacaaaactccttctcatgtcctctcactccagcacttccattctcc

SEQ ID NO: 966705 - DNA, 120 bp, Artificial Sequence
  ENSG00000264869_1 (sequence is synthesized)
ccaccaatggccctatttgtttactgccatgttgctgttgcgtttcacaaggttgctgatttcttctccaaagatttgtttcccgggggcctcccagtgttgtagaacctacagtgtatg

SEQ ID NO: 966706 - DNA, 120 bp, Artificial Sequence
  ENSG00000264869_2 (sequence is synthesized)
tgtagaacctacagtgtatgacttggaggagtcaatgagatttcctctccattctaatcacatataagtctcgcttgttgcccaggctggaatgcagtgcagtggtgtgatctcggctca

SEQ ID NO: 966707 - DNA, 83 bp, Artificial Sequence
  ENSG00000264869_3 (sequence is synthesized)
ggataatttttctaatccaccagcctcggcctcctgaagtccggggaactacaggcgtgagccaccatgcctcgcctgttttc

SEQ ID NO: 966708 - DNA, 120 bp, Artificial Sequence
  ENSG00000264869_4 (sequence is synthesized)
gggaactacaggcgtgagccaccatgcctcgcctgttttctcttttcattcttttaaacatgtaaaaagtaactttgaactggaaagcacttccattttaaataaaaatgaagtaatttg

SEQ ID NO: 966709 - DNA, 120 bp, Artificial Sequence
  ENSG00000264869_5 (sequence is synthesized)
agggattaatcatctcacgtaacaatcttgagtgatgagaattgacagaattcattgttttgtttttcagttacaaccaataaaaatgtggatcgttaagttcatgtgctcttggggcct

SEQ ID NO: 966710 - DNA, 120 bp, Artificial Sequence
  ENSG00000264869_6 (sequence is synthesized)
acttatgggcttgagctccatcgtttacattaatgtctcaattaaataatttcccataacttttttttacatatttctccatatgaaaataaagaaaataaaaatcataaatccttcaaa

SEQ ID NO: 966711 - DNA, 120 bp, Artificial Sequence
  ENSG00000250748_0 (sequence is synthesized)
gctgcgctgaatatggatatggtgagtgaatctagagcagccatttggaggtatgaagagatcttggaaatagaggccatgtgtgttgaaacaagaccgaacaactccaagttcctgaag

SEQ ID NO: 966712 - DNA, 120 bp, Artificial Sequence
  ENSG00000250748_1 (sequence is synthesized)
acttcatttcaccaacccagaacctccttgatcatcacagcctttgcatggatgattgtctgtcctctgttgggccccttctgaagagttggagttggctttatacaattattcccaaat

SEQ ID NO: 966713 - DNA, 120 bp, Artificial Sequence
  ENSG00000250748_2 (sequence is synthesized)
tttcctggcatctattctgctctcctggacttttcaaaaacaatttctttcagatccctggaggcctctcccagggcctgtggtgtggagagttggacttgaccctactgtaagagaccc

SEQ ID NO: 966714 - DNA, 120 bp, Artificial Sequence
  ENSG00000250748_3 (sequence is synthesized)
aacttccaaagactgcatcagatgaaaggctctccatatagactacagacttgtcagctggttaaggaggcaaacagaacagtctgctacaaactccagtccatgtatctgtgctgaaaa

SEQ ID NO: 966715 - DNA, 120 bp, Artificial Sequence
  ENSG00000250748_4 (sequence is synthesized)
taaaaggagtcttcaggaatcaaagaagaaaatatttttataaagaaattttattgcataattcttgtatacaataaacataggaaaagggtttttaatgaaaattcatgtcatttttca

SEQ ID NO: 966716 - DNA, 120 bp, Artificial Sequence
  ENSG00000250748_5 (sequence is synthesized)
atcatcataacagagtctattgaaagtcctcagcaggcggtgtgacgatgtgaccagctctggccaaggagctgtaggcagaagtgtcttgcagcagctcctgtaaatcttaaaagacag

SEQ ID NO: 966717 - DNA, 120 bp, Artificial Sequence
  ENSG00000250748_6 (sequence is synthesized)
ggtactgtcagcgttttggatattagccgtcctaatagcctttgcatggatgattgtctgtcctctgttgggccccttctgaagagttggagttggactctgaatacctcaagagtggga

SEQ ID NO: 966718 - DNA, 120 bp, Artificial Sequence
  ENSG00000250748_7 (sequence is synthesized)
gattggtcttgccaatcagagaagctccagggctagcctagtgcctggcacatgctttatacaattattcccaaatcttctaaactgacagtgagggagagtaatttgaaaggactgctc

SEQ ID NO: 966719 - DNA, 120 bp, Artificial Sequence
  ENSG00000250748_8 (sequence is synthesized)
ctgaagagttggagttgggttgctgctgctgtgcagctgaggtacaatccctctcgttctttgggcatcagcctctgttctccctacatgtgctgtttgcaaactatagaaaccatttgg

SEQ ID NO: 966720 - DNA, 120 bp, Artificial Sequence
  ENSG00000250748_9 (sequence is synthesized)
gctggtttgagcataaaaggaaattactgggagttattaggtgctcggtgattcattgggaggtctggcaaaaaagaagctcaaggctaagctcataggaacacagcccggcatctcaca

SEQ ID NO: 966721 - DNA, 120 bp, Artificial Sequence
  ENSG00000250748_10 (sequence is synthesized)
cagaagtggcttgatgaggattctactgcctccacagctcctgccatcatcttcatctgcaccatagatgctcagaacccagtctgtgtctgcatgttgctgacttccaaatgagagctt

SEQ ID NO: 966722 - DNA, 120 bp, Artificial Sequence
  ENSG00000250748_11 (sequence is synthesized)
catgagagtgtatttggttggtagaacataggtcccagaccttctccctgggagctggaagagatgctgggaaattctgccctggaaaaataaaactcacaatgtgggaaacaaagaaaa

SEQ ID NO: 966723 - DNA, 120 bp, Artificial Sequence
  ENSG00000250748_12 (sequence is synthesized)
tagtgcctggcacatgcagtccagcctctgttgcctgtcaagcaagtctgtgtaggccagattgattcaaaccagatctacttccaggccctgtttcacaccgtttccaataggatatga

SEQ ID NO: 966724 - DNA, 120 bp, Artificial Sequence
  ENSG00000250748_13 (sequence is synthesized)
atcagacaagataccatcaaccaagcattcagtcaggaaacagggccctggtcagacttttggggtgacctgccttacacggccaggatccagctctagtgacagcatctattataatgc

SEQ ID NO: 966725 - DNA, 120 bp, Artificial Sequence
  ENSG00000250748_14 (sequence is synthesized)
tggagccaggcggccggcagccatgggaagcgtgctaagtgtggaaattccttcaagcctttcaagcaactcaaagtcataagctaaggagagatttcaaaactccaaagagaaattcca

SEQ ID NO: 966726 - DNA, 120 bp, Artificial Sequence
  ENSG00000250748_15 (sequence is synthesized)
ctttccttttcctcagctccagtctttccattccaaacacgagtcctgctggtttgagccacttcatgaatgtgggattgttagggtcgttgcagagacttgccactatttttcttaggt

SEQ ID NO: 966727 - DNA, 120 bp, Artificial Sequence
  ENSG00000250748_16 (sequence is synthesized)
ggcctttagatgagccaaccgcaagcctggactcatctttgacatctcctgcttccctccataatgaccgtcgttgctcctcttgcccaagcctttgcatggatgattgtctgtcctctg

SEQ ID NO: 966728 - DNA, 120 bp, Artificial Sequence
  ENSG00000250748_17 (sequence is synthesized)
tttaaaaaaaaaaaagacaattttccctttagagccccagaaagattcaggccttagaggcactaagtactatagaaaatgaggctgaagcatggggctgaaacttggtttggttgaagg

SEQ ID NO: 966729 - DNA, 120 bp, Artificial Sequence
  ENSG00000250748_18 (sequence is synthesized)
tctctggaaggcagagcagtttaacctctaggttccctcatccacccccatacagccagacaattatccctccacccttctgttctcctcccctcttcccttagaaaacttgaagtttat

SEQ ID NO: 966730 - DNA, 120 bp, Artificial Sequence
  ENSG00000250748_19 (sequence is synthesized)
gttcaaatggtttccagcaacattcctaccacctactttgctgacacaaaggtgcataaacagaagtcctatgtggtcgaaccattttacattttcaccagcaatgaaggagggttcctg

SEQ ID NO: 966731 - DNA, 120 bp, Artificial Sequence
  ENSG00000250748_20 (sequence is synthesized)
attgtaagtggatgaataaatataataactgattccattgatactcttagaccatcctttggactttctgcttttggacattttacagtttaaaatttatttatcatctatcgatgtttc

SEQ ID NO: 966732 - DNA, 120 bp, Artificial Sequence
  ENSG00000250748_21 (sequence is synthesized)
ccaaagaaggactcaaagtacacattgtcaaagatctcatggatctaattaaggacagggaacaggtacagaatcatacattgtctctacacagaggggataatttctgaaggaaagaag

SEQ ID NO: 966733 - DNA, 120 bp, Artificial Sequence
  ENSG00000250748_22 (sequence is synthesized)
ctgacgccacgcgccatctgctggccttgagctgcatagctctagagtaacttcagaggccacgggggaacaaagagcactcgcctacttgactgagctccgacaggccgtccctctgct

SEQ ID NO: 966734 - DNA, 120 bp, Artificial Sequence
  ENSG00000250748_23 (sequence is synthesized)
cctactcaagatggagtcgctctggtttgaacgcctctgacacttccactctcaaggaatggtgtttttattctcttctccccagaatgtacttctggtctgtcccgctgttccattcca

SEQ ID NO: 966735 - DNA, 120 bp, Artificial Sequence
  ENSG00000250748_24 (sequence is synthesized)
cagcattttaggaggttctcaagagtgtcctaaacaagcagagaagaatggtgagacttacccattcctagtttaagaaatgagtgaaatggggtctgagttatatcacagctacagttt

SEQ ID NO: 966736 - DNA, 120 bp, Artificial Sequence
  ENSG00000250748_25 (sequence is synthesized)
cacatgtccttggtctagaaaggatggaggagccacagacagctgaggtgcaggctccagctcaatggcctgtcattacaagaggctcttggagtttctgatcttcttcgcctctctcta

SEQ ID NO: 966737 - DNA, 120 bp, Artificial Sequence
  ENSG00000250748_26 (sequence is synthesized)
tgcccaaccctgtctagagtgcacctcagcatgattttagaaaacagcatggagaaagagaagttgaggccagtctttctcctccgatcaccaagtatctattaaaagccattccctcca

SEQ ID NO: 966738 - DNA, 120 bp, Artificial Sequence
  ENSG00000250748_27 (sequence is synthesized)
tgctctaccatttggtactgtcagcgttttggatattagccgtcctaataggtgcaatgaatgtgtcctgctcttacttgggataggttcaaaaataaatgcaattgaaaaaaaatctcc

SEQ ID NO: 966739 - DNA, 120 bp, Artificial Sequence
  ENSG00000250748_28 (sequence is synthesized)
gactccgtctaaacaaacaaaaaaaatctcctggaagtcccatttgatcttggttacatgagcttactagagaattttgttgttcccaacattagctgagaaatgtactctaagaagtga

SEQ ID NO: 966740 - DNA, 120 bp, Artificial Sequence
  ENSG00000250748_29 (sequence is synthesized)
atagactaaagtggaaccagggtgcagtggagaacgagagctgttatctagaaaacctttctcaggcatgtttcagcacactctgctcctgacgatggctctatcatcaaagaattctgt

SEQ ID NO: 966741 - DNA, 120 bp, Artificial Sequence
  ENSG00000250748_30 (sequence is synthesized)
ggtcaggtgtatgggatatgctgcataggctccctatgagcctccaaattgtaagttaaaggctctgagagcttggcagtaagtagaagactcctggtcacatttgtttaacccagtgtt

SEQ ID NO: 966742 - DNA, 120 bp, Artificial Sequence
  ENSG00000250748_31 (sequence is synthesized)
tcccaaactcatttggccttggaactctatttcttgggacatttattagctgctggtggaaccagtgttcaaaaaattactccctagacaatttaggcaaaacatcttttctataaataa

SEQ ID NO: 966743 - DNA, 120 bp, Artificial Sequence
  ENSG00000214546_0 (sequence is synthesized)
tggagtggagtttgaacccagacagtccagctgtgtgtgggttctttccagcacaccacctctccccaccaccatttctgcagctcctgctctgaaccacatcctttgctaagaacttca

SEQ ID NO: 966744 - DNA, 120 bp, Artificial Sequence
  ENSG00000214546_1 (sequence is synthesized)
tgggcagtatcccatccaaaccttgcaacaacccagaagggcctcttcttcagggaatggaagcagccgactggaccgggattggagtgtgtctcccacctgggggcgccagagggcaca

SEQ ID NO: 966745 - DNA, 120 bp, Artificial Sequence
  ENSG00000214546_2 (sequence is synthesized)
tatactgctgtactcgtttgtgccaccagagggcagcctccgcacatcgatctctactgcttccgagaactgtccaaaccggcgggactgagagagagaaacctggtccagggcagagaa

SEQ ID NO: 966746 - DNA, 120 bp, Artificial Sequence
  ENSG00000214546_3 (sequence is synthesized)
gcagttaaagagggagggctctggagttggactgtttgcgtttgaacccagactctgggcaaaagctgctgaacctctctgaatctaatagcctcatctgtgaattggaaggatactagc

SEQ ID NO: 966747 - DNA, 120 bp, Artificial Sequence
  ENSG00000214546_4 (sequence is synthesized)
gaggattaaatgagagtgcataggaagggcctagccccggtgcccagcacagaggctccatatgtgtcaccgttgtcaatttctgactcatgtattcatctattcattcacttctcaaac

SEQ ID NO: 966748 - DNA, 120 bp, Artificial Sequence
  ENSG00000214546_5 (sequence is synthesized)
catcctctcggcgtcatgcagtgcctgctgtattctgggtactgtggcaggtcggtgatgatgtaaacagagatggcggccagggacggtggctcaagcctgtaatcccaggcctttggg

SEQ ID NO: 966749 - DNA, 120 bp, Artificial Sequence
  ENSG00000250742_0 (sequence is synthesized)
tgggctggggcacaccagcacggcagaaactggagaaagcgagagacgtcgccagggacccagggacctctccctccagttccccgggcccgcccggccctgatggccactcacgctata

SEQ ID NO: 966750 - DNA, 120 bp, Artificial Sequence
  ENSG00000250742_1 (sequence is synthesized)
gcgcccactctgtcctgggccatcccgcgccagcagtgtagcccccagcccgggcgcctgaatgctctccctccggatcgctgctcgggtccccactttggcgaccgtgcccccgagtcc

SEQ ID NO: 966751 - DNA, 120 bp, Artificial Sequence
  ENSG00000250742_2 (sequence is synthesized)
tgcttccccggggcctgctctgtatcaggcgcctgcgccttcaagggtacccggcccgcctgccctccccaagagccgagtttgcgctcctcccggaatcgtttgagagaaggacaaact

SEQ ID NO: 966752 - DNA, 120 bp, Artificial Sequence
  ENSG00000250742_3 (sequence is synthesized)
tttggcaggatggaaatctagatgagcctgtccggagcagaacattggtcatgggaggaatgggctccagcagcagcagggtagcatcaccgagcacctgctcgctgccaggcactgtgc

SEQ ID NO: 966753 - DNA, 120 bp, Artificial Sequence
  ENSG00000250742_4 (sequence is synthesized)
tgggaactaggaacacagagaagaacaaggaggtccatgtcatcaaggcaccgacagtctggatggggaaagaaaccacggatctttacaaagcaaggtgaaaagaaccaagactatagg

SEQ ID NO: 966754 - DNA, 120 bp, Artificial Sequence
  ENSG00000250742_5 (sequence is synthesized)
tccagagaagagaagaggatccataagggggcattcccagctccttgatggtttgctgtgtgactgtccaaaaatgtctctacatctctgtttttctggcaccataagctgaagttggtt

SEQ ID NO: 966755 - DNA, 120 bp, Artificial Sequence
  ENSG00000250742_6 (sequence is synthesized)
cctaaagatggttcccaggtcatgggaggaataggacagggaattccagaaccaaatttctgtctaagaaagaaacaattatctaagaaattgtgagtggaattggactgaacgtggatg

SEQ ID NO: 966756 - DNA, 120 bp, Artificial Sequence
  ENSG00000250742_7 (sequence is synthesized)
agtcagggctcttgaaaaagaaagtggccgtccctctttgagtcagttctgcaagagtggacagaaacttttccagactcccaggcctctctgctccctcagagcttgaaaagattaaag

SEQ ID NO: 966757 - DNA, 120 bp, Artificial Sequence
  ENSG00000250742_8 (sequence is synthesized)
tcattcctcctcaaggtcttcagtgaaaccctggaaatctttccttcaattttaagagattacagttcttcccattgtctagcctctgtcactacttgctgtagcatgaggtggcttccc

SEQ ID NO: 966758 - DNA, 120 bp, Artificial Sequence
  ENSG00000250742_9 (sequence is synthesized)
tgggggaaagtgtaccagtcccgctcattggtcgtctaagacctcccagcattcctcaagacatttctgcctcatgatgtcagaagaagggctgtcaaatagattttaaaaccccaggct

SEQ ID NO: 966759 - DNA, 78 bp, Artificial Sequence
  ENSG00000250742_10 (sequence is synthesized)
agaagggctgtcaaatagattttaaaaccccaggctcgggaatcacgagagcagaagatcgagaccatcctggctaac

SEQ ID NO: 966760 - DNA, 88 bp, Artificial Sequence
  ENSG00000250742_11 (sequence is synthesized)
ttggctcctcacttgtattgtgggaatcccagcctaaattggacatgtggatgttgagcaatagaggacagacaaacaaaggaatctc

SEQ ID NO: 966761 - DNA, 120 bp, Artificial Sequence
  ENSG00000250742_12 (sequence is synthesized)
ggatgttgagcaatagaggacagacaaacaaaggaatctccagaccctgcaggacccaaggcagcagcccacgagtggatcctaaaggattttcatcagctgcaagtctggggttactag

SEQ ID NO: 966762 - DNA, 120 bp, Artificial Sequence
  ENSG00000250742_13 (sequence is synthesized)
agcctgaccaaaattctctactgaccagagacagacagacagacctgttccctgttccccaacttccagtggtgctgcgcatggagacgctgagatccacagagtcatcccaccaaaacc

SEQ ID NO: 966763 - DNA, 120 bp, Artificial Sequence
  ENSG00000250742_14 (sequence is synthesized)
ccccccaggatgtatgtgagaccactggactcattggcactggcaaataagaagatggccagaaagcaatcaacaccgaacgcccactgcgtgcttggcactgggccagactctgctggg

SEQ ID NO: 966764 - DNA, 120 bp, Artificial Sequence
  ENSG00000250742_15 (sequence is synthesized)
ggagactggaggaaaggcccatttcactggtcttgagctctacataccatgttaagccagagagctgtcccttctcccagtgccagaggaggcttggattgagcacccatgctctatgga

SEQ ID NO: 966765 - DNA, 120 bp, Artificial Sequence
  ENSG00000250742_16 (sequence is synthesized)
caacagcaagttgagcagaccttaacatcattcccggggaggcaacgggtcatctgctggctggggttatcaaaggccccatctcctactcctctcccatgccccacagtgaagagcccc

SEQ ID NO: 966766 - DNA, 120 bp, Artificial Sequence
  ENSG00000250742_17 (sequence is synthesized)
agagctggctgtggttatgaagccggctgccatgtgggcgacctggagtcagagcacggggcagtcacatatgacaattggttgaaatatcacagccactctccccccacccccactggt

SEQ ID NO: 966767 - DNA, 120 bp, Artificial Sequence
  ENSG00000250742_18 (sequence is synthesized)
tgatttagtgccgctgcctctggggccttggggcctgcctgtccaccagagtctaagcgttaaacgacgctaaaaagttaaacagccaacgctgggggctcactcgaggaggcaccataa

SEQ ID NO: 966768 - DNA, 120 bp, Artificial Sequence
  ENSG00000250742_19 (sequence is synthesized)
agctgtcggagctgcttaaatcaggagcgaggattccctgggacgtcttctctccatacgccgcaagccaagaaggctctccttacccctctgccactcacccatacccagaagcccaca

SEQ ID NO: 966769 - DNA, 120 bp, Artificial Sequence
  ENSG00000250742_20 (sequence is synthesized)
gagggcaggggacacgtgggccgggggcctggaacagagcccaaaaggaggccacggatgacctcctctgcagggctttctccagcagaacaggggccgtggctcaagagggtaggggtc

SEQ ID NO: 966770 - DNA, 120 bp, Artificial Sequence
  ENSG00000250742_21 (sequence is synthesized)
atgttgtccagctcaccaactctgggcaggggtctccttgttccggtccagtttttaaagacttccaacaaaaggcactgccaaagtctctcccaggggcccctggggagaagttgtttc

SEQ ID NO: 966771 - DNA, 120 bp, Artificial Sequence
  ENSG00000250742_22 (sequence is synthesized)
ccaagtctgtctcacttcaatccacgcttctgtgtgttgaatccactggaactcagtgtcttcccactcaggtttggagaggctgtgctggccacaccagcctgtgacttcttgcctcct

SEQ ID NO: 966772 - DNA, 120 bp, Artificial Sequence
  ENSG00000250742_23 (sequence is synthesized)
ttcacccctccacacccacttgcatggctctctgaggaacagagccccacccttccatcaccaccctccgccaacgcacccctgggtgctggcataacacgcaagcttcacagatggctt

SEQ ID NO: 966773 - DNA, 120 bp, Artificial Sequence
  ENSG00000250742_24 (sequence is synthesized)
ttctcagctgaagcccagtccctgctgccaccacccggccgccgagcaagagggaaggtgggtctctgcatgctgcctatcacaccttctttcagcagcaataaaactcactcttaaaac

SEQ ID NO: 966774 - DNA, 120 bp, Artificial Sequence
  ENSG00000250742_25 (sequence is synthesized)
ggagaaagggggggctgtggcgtgggggctgaggaggggctaaggcgggaggggcgcctcatcccttcaccctcccttttcgccatgtgggggccctgagcgccgccccagaagaggtcg

SEQ ID NO: 966775 - DNA, 120 bp, Artificial Sequence
  ENSG00000250742_26 (sequence is synthesized)
cttgcttcgcaggatctggaagctcagccggcagagctgagagccgcagttgcatcctggagcctgatgctagaagcagcttccgtctttgggttcttgctgcctcggcctctgctctgt

SEQ ID NO: 966776 - DNA, 120 bp, Artificial Sequence
  ENSG00000250742_27 (sequence is synthesized)
tcagtttgctgttgtgtttttctcccccatgttggggtggtggggtacagggaaataaaatgctttctcccaggcccctaatccttccccatgcctccatcagcctcaaagctgctgaca

SEQ ID NO: 966777 - DNA, 120 bp, Artificial Sequence
  ENSG00000250742_28 (sequence is synthesized)
gtcatgaactgcaccttccagccctgcccataagctactcaaagcaaattcaaattctcttctggccaggaggaagggcagatgctccctccttcctcaagcctccctggctcattgatc

SEQ ID NO: 966778 - DNA, 120 bp, Artificial Sequence
  ENSG00000250742_29 (sequence is synthesized)
cattttgagggcatttgggggtcaaagttgagaccagattgcttcagtttgtataaaattagcatttcttatcacaccaaggccacacctgttctctggcctcacaaaccagtgaggatg

SEQ ID NO: 966779 - DNA, 120 bp, Artificial Sequence
  ENSG00000250742_30 (sequence is synthesized)
taaaggtttgttgaggtggaggaacagaagtgaaatgagcaatctgctccatttagaagtcagtcgcttcggctgttcattccactaatatttatctagtacctattctgtgccaagcat

SEQ ID NO: 966780 - DNA, 120 bp, Artificial Sequence
  ENSG00000250742_31 (sequence is synthesized)
tgtctctacctcagtttgccacaaatatgaaaaaaaaaaaattcttggaactgtgaggcttcaatgtgttgtggaccaatatacaaataaaccaatggaaaagaaagtgtggttcggagt

SEQ ID NO: 966781 - DNA, 120 bp, Artificial Sequence
  ENSG00000250742_32 (sequence is synthesized)
caggatggaaatctagatgagcctgtccggagcagaacacccctgattagccaggcccaccgccatccacatctgctcggcaaagaaggaaggcagcttgttccagaccttggtgagcag

SEQ ID NO: 966782 - DNA, 120 bp, Artificial Sequence
  ENSG00000250740_0 (sequence is synthesized)
ctacctgcaaacttatgctggggaagaaaaatcaagtggagttttttaaggagcaaactgagataataagagcatcacttatttaaaaagattatgcaggtttttccagcataaccagga

SEQ ID NO: 966783 - DNA, 120 bp, Artificial Sequence
  ENSG00000250740_1 (sequence is synthesized)
aacgaaacaccaatcatatagcattgatgtcgtgcactagtttaataataaaagaaaaaaaactagaacttacaacaaagtagccaaagtatacaaaatcagtttcctataaacactctg

SEQ ID NO: 966784 - DNA, 120 bp, Artificial Sequence
  ENSG00000250740_2 (sequence is synthesized)
taagctacacacacacacatgtgttatgtatgtatatgtgtgtgtatcagttggggctgaaaaaaattttaaattcaaggacaatactcaaatagacaaataaaactaggtaaaactatg

SEQ ID NO: 966785 - DNA, 120 bp, Artificial Sequence
  ENSG00000250740_3 (sequence is synthesized)
tgggacaatgcacgctcaccccttgaaggcaaacttgtggcttggtgatccaggggttggaaaagaggctgttcactgccttggtcaagaggagctgggatgtgctcgtcttcacaccag

SEQ ID NO: 966786 - DNA, 120 bp, Artificial Sequence
  ENSG00000258512_0 (sequence is synthesized)
tgcctttcaccttctgccatgattgtaaggcttccccaggcccgtggaactgggaggagccggaagagagcagtgcttcacaataaaaggaagaattgcttgaacggaggcgtttcaggc

SEQ ID NO: 966787 - DNA, 120 bp, Artificial Sequence
  ENSG00000258512_1 (sequence is synthesized)
atgagtcacaggccgggtgtggaagaggaaagtgtgaagcaagggacaggtaccagctgggatgttggcagcagccgctcccctgcaaggagaacctcccacttcctgtcccgcacacct

SEQ ID NO: 966788 - DNA, 120 bp, Artificial Sequence
  ENSG00000258512_2 (sequence is synthesized)
cagcctgatgtttctcatcacacaggaagacggtcatgctacaggaagacctcggactttgcatccagcagatggttgttctagagattgtcagaccgagaccacgccacacacccagaa

SEQ ID NO: 966789 - DNA, 120 bp, Artificial Sequence
  ENSG00000258512_3 (sequence is synthesized)
ggcacccaagtcacagagcctgatattgttcctggagcgccattgcatcatccttgaccacaagatctgcgtcattggatttgtctcaaaaacttgggactctggagataaaacctcatt

SEQ ID NO: 966790 - DNA, 120 bp, Artificial Sequence
  ENSG00000258512_4 (sequence is synthesized)
gcaaggctacctttgccactgtatcttagcagcttttgaagcaaagcatttcaatatttagacactgtgtttctaatgggtactgggatcaaaataataaaaactcagtctgcaaaggga

SEQ ID NO: 966791 - DNA, 120 bp, Artificial Sequence
  ENSG00000258511_0 (sequence is synthesized)
gccaagacgccaggtgacaatcggggctctccaaggccgctcctgccattgtctccagctgtggggcccaagaaaccacacacgtgagatgcacagtctgatatggccggctctgcccct

SEQ ID NO: 966792 - DNA, 120 bp, Artificial Sequence
  ENSG00000258511_1 (sequence is synthesized)
ttttcaaagtgattcattgaaagctgtggctgttgtcagctgggtgctgggagcactgaacaaattccctgcctaggttgtgtagacaacgtggggaatgggagacccttgggatcctga

SEQ ID NO: 966793 - DNA, 120 bp, Artificial Sequence
  ENSG00000258511_2 (sequence is synthesized)
tggtctcgccaggcctactgagacaagtgtccagtgccatcggacctgtgctcatgcagttacttactaccatgtgaatctgaccatcaaaattcttcctacatttcaattcccccaact

SEQ ID NO: 966794 - DNA, 120 bp, Artificial Sequence
  ENSG00000258517_0 (sequence is synthesized)
gtgccaaaagtatggagagaagatgtcaggaacgtgtgagaactcccccagacggtcttttggagtcaccctgccctccagacaattttggtgccggctgcctccaggaacctgactctc

SEQ ID NO: 966795 - DNA, 120 bp, Artificial Sequence
  ENSG00000258517_1 (sequence is synthesized)
tcagtctcttactgtttcgctccgtgggtcaagtctctgcaaagccttcacgctgagccttgccttgcaggcagcctttgtgaggcagtcatcatggctcagctaactgcagcaggaaga

SEQ ID NO: 966796 - DNA, 120 bp, Artificial Sequence
  ENSG00000258517_2 (sequence is synthesized)
ggcagacatggagctaaaagcacagcagctgggattccaggaaagcaggaagttctgcagttagcatcaggaacacagtgagaaggcaatcatctgtaaagcaggaagagagccttcccc

SEQ ID NO: 966797 - DNA, 120 bp, Artificial Sequence
  ENSG00000258517_3 (sequence is synthesized)
atcttggacttcccagcctccagaaccaccagagagaaatgcctgttgtctgaaccaccgtatgttaccctgttacagcagcctgagctaagatgatactggaggcccagttaatctacc

SEQ ID NO: 966798 - DNA, 120 bp, Artificial Sequence
  ENSG00000258517_4 (sequence is synthesized)
tactggaggcccagttaatctacctcaacatgacccttttgtaacacaggctggacaaaggctgtgaaaacactcagtatctagagttttccaatgtgtgtgtccttccctatacacttc

SEQ ID NO: 966799 - DNA, 120 bp, Artificial Sequence
  ENSG00000258517_5 (sequence is synthesized)
cctatacacttcatttgcttatccccttattcattcaacaaaggagttccttttcttttcttttctttccttccttccttcctttctttcttttgacagggtttcaccatgttggccagg

SEQ ID NO: 966800 - DNA, 120 bp, Artificial Sequence
  ENSG00000258516_0 (sequence is synthesized)
caggcctcttctcaggatattgttgacacaatttagctccttgagggtgctggactgagggcctcacttcctagatgactgttggccagtggccaccagcaattctttgccacatgagcc

SEQ ID NO: 966801 - DNA, 120 bp, Artificial Sequence
  ENSG00000258516_1 (sequence is synthesized)
tctccagtattgcagcttgcttcatcaaagtgtgcaagacaagaagacaaaaaagagagctgcaagaaagacggaaaccaagatctcatgtaacctaatgacagaggtgacctcccatta

SEQ ID NO: 966802 - DNA, 120 bp, Artificial Sequence
  ENSG00000258516_2 (sequence is synthesized)
ccattgctgtattctattaaaagcaggtcttgctcacattcaagaagaagggattatacaagggtgtgaatcccaggagacaaggaccagtggggacatcttacagcctgcccaccatac

SEQ ID NO: 966803 - DNA, 120 bp, Artificial Sequence
  ENSG00000258516_3 (sequence is synthesized)
acctcctgggcccaagcaatcctcctgcttcagcctaccaaagtgttgggattacaggaatgagctaccatgcccagccaaaagcccagggttttgttggatggtagtacaaggagatgc

SEQ ID NO: 966804 - DNA, 120 bp, Artificial Sequence
  ENSG00000258516_4 (sequence is synthesized)
tttctcactgcacccccacctcccatctttgaggataaacaaggaagcacgtcttcccaagaggcaggggctatcttgaaaccatgaagaaagactcatcctgagaagaacgcaaacacc

SEQ ID NO: 966805 - DNA, 120 bp, Artificial Sequence
  ENSG00000258516_5 (sequence is synthesized)
aaacaagtggaacctggagatactgagagaaacagggtcctggttgtgtcccctgagctgctgaacttttcagatgcacaaacccattacatttttttattaaaaatggtttgagtccgg

SEQ ID NO: 966806 - DNA, 120 bp, Artificial Sequence
  ENSG00000258516_6 (sequence is synthesized)
ccctacgggccacaggcacatggatgagaacaggagaaccgcctaactgagcccagcctggatcagagctgatacccagccaacaacttgtgagaaccaatacatggttattttaaggca

SEQ ID NO: 966807 - DNA, 120 bp, Artificial Sequence
  ENSG00000258515_0 (sequence is synthesized)
attattttgaagatttcaatccttttcaatcccattcattcctttcctgaagtagaaattcctaatctttataatcagatataaagtctgataatgataagccatctaatgttctgatca

SEQ ID NO: 966808 - DNA, 120 bp, Artificial Sequence
  ENSG00000258515_1 (sequence is synthesized)
tgctgccaaaatttgcaatgttacaaactctgttgggggttttctggtctacagtattttaggttcagataagtccatctttgttcctgacattcccatgactcagatagaacaaagaaa

SEQ ID NO: 966809 - DNA, 120 bp, Artificial Sequence
  ENSG00000263072_0 (sequence is synthesized)
acctgcacccgggaggaaaggcgaggctctgcatctagatttacctcgttctcttttgtctccgcttttttttcacatttccttgcgaccctggcccttgagcgacaaaaaggggaagcc

SEQ ID NO: 966810 - DNA, 120 bp, Artificial Sequence
  ENSG00000263072_1 (sequence is synthesized)
aaggctggcccgaggaacggagagggcacatggcctagccacaagtggagcttctgctccgcccgaagggatgcgctggagcggcctcttccttctgccacggtctttctttgccaacta

SEQ ID NO: 966811 - DNA, 90 bp, Artificial Sequence
  ENSG00000263072_2 (sequence is synthesized)
gatggggtttcaccaggttagccaggctggtcttgaactccagacctcaagggatccgcctggtggagactggacctcagaagagggagt

SEQ ID NO: 966812 - DNA, 120 bp, Artificial Sequence
  ENSG00000263072_3 (sequence is synthesized)
gagggagtgggtgccccgagaactcacagctagcggacagtggaaagggcaggagccggaccaaggtgaggacagtggaactgaaggccgctggttacctctcctgccctccgctggcca

SEQ ID NO: 966813 - DNA, 120 bp, Artificial Sequence
  ENSG00000263072_4 (sequence is synthesized)
cagtggagaagacagcccctccctcctgctctgacctgacagtgttcatccatcgccctgtattagcgaagaacaacatcaagctggctagcaaggaactgtatacagggtccagctggg

SEQ ID NO: 966814 - DNA, 120 bp, Artificial Sequence
  ENSG00000263072_5 (sequence is synthesized)
tatcacactggatctcacccaaagcttagatgtgatccagctcagtatcacaaagcagaacgaaaaggatgtgtttgggctgagaggccatacattggctccggcatgacgggtgacttc

SEQ ID NO: 966815 - DNA, 120 bp, Artificial Sequence
  ENSG00000263072_6 (sequence is synthesized)
ctgcagcatgggcagctcctgtgacagcaggcgcccgcagcctgcaaagcgtctccagtgccgccgcctcagtgaacctcaaccagcggcacctagcagctttctctgccaccctcttca

SEQ ID NO: 966816 - DNA, 120 bp, Artificial Sequence
  ENSG00000263072_7 (sequence is synthesized)
ggtagttctgtagcagcgcgtttctcatgagacacttccctgtgagcagctttttctacccttgaggatggatttccagcaaattctgcccatgtggtaccacagccacttctctgccat

SEQ ID NO: 966817 - DNA, 120 bp, Artificial Sequence
  ENSG00000263072_8 (sequence is synthesized)
tcagtgaaactgccgttgtgccctcttcaaggtctggatctaagcccagggaccaggaaacctcttgcttgagtgctggaactcaggccagaaggtatggctgctgctatgtgctgtgac

SEQ ID NO: 966818 - DNA, 120 bp, Artificial Sequence
  ENSG00000263072_9 (sequence is synthesized)
actcaggccagaaggtatggctgctgctatgtgctgtgaccagagaatcagagttctctttacttcttaccagccaacctcttgaaaatgcctttttgttttttgtttttttttgagacg

SEQ ID NO: 966819 - DNA, 64 bp, Artificial Sequence
  ENSG00000263072_10 (sequence is synthesized)
catgttggtcaggttggtctcaaactctagccagagcgcccagtctaagccctttatagcttaa

SEQ ID NO: 966820 - DNA, 120 bp, Artificial Sequence
  ENSG00000263072_11 (sequence is synthesized)
gattacagacgtgagccaccgtgcctggcggaattttcatattttaagtcccccacccttggacatttagattttttccatctttctgtatttgcagatatgcttctacgtacaccttta

SEQ ID NO: 966821 - DNA, 120 bp, Artificial Sequence
  ENSG00000263072_12 (sequence is synthesized)
ttcatttgcttgaacatttccctgagaaaaactagaaatggaattgccagattactttgtgtacatgtttccaaactgtcctccagaaagaatgtaatgctttgaacttccacttgagaa

SEQ ID NO: 966822 - DNA, 120 bp, Artificial Sequence
  ENSG00000263072_13 (sequence is synthesized)
tcaaatgtttaccttcctctgttcctccagatttggacatttacagtgttcagccgttgttgtggcattccaattcaattgggaaacagcttgatgtagcgtccccataaggtccacagt

SEQ ID NO: 966823 - DNA, 84 bp, Artificial Sequence
  ENSG00000263072_14 (sequence is synthesized)
gggaaacagcttgatgtagcgtccccataaggtccacagtaattaaattttttttttttttttttggtgcggtagtgcaatttc

SEQ ID NO: 966824 - DNA, 120 bp, Artificial Sequence
  ENSG00000263072_15 (sequence is synthesized)
acaaggccacatcctcgaaagtcactggcatctgaaacaatgtgaaacatccactctccaggacatgacgtggacacggtggagggacaccatggcatgagatgtgtggtgagaccccgg

SEQ ID NO: 966825 - DNA, 120 bp, Artificial Sequence
  ENSG00000263072_16 (sequence is synthesized)
actcccaacccactgtgtcgagtgaggcctgccacttccatctgatcgggaagcaggtgagccacccaaggccttctggggagttgagaaagaacaaagaccaagaggtattttcaggga

SEQ ID NO: 966826 - DNA, 120 bp, Artificial Sequence
  ENSG00000263072_17 (sequence is synthesized)
tcacagttaagacttaggatgtccatgcagcccccagcctcagctgagacctcggaggacggttcccaacggctaccagcgagaggccctgtgtctctaattcctgctgcttctcctcca

SEQ ID NO: 966827 - DNA, 120 bp, Artificial Sequence
  ENSG00000263072_18 (sequence is synthesized)
gctttggcccaggcctgaccatgggccttgagcctggacaattccagcaacactagcaagagccccaggcttcaggcttggctgcaagtggggccagcggggtcctggctttcacacaga

SEQ ID NO: 966828 - DNA, 120 bp, Artificial Sequence
  ENSG00000263072_19 (sequence is synthesized)
accagcagatgcaggaagggctgagtaccatgcaggggccggggaagggccactcacctgggaccaggcagtgaggagcgctgcagccatctgccggtctctggtcctcccctctcggga

SEQ ID NO: 966829 - DNA, 120 bp, Artificial Sequence
  ENSG00000263072_20 (sequence is synthesized)
aagcacggggatccggggggaggggagggctgtgggaggagagaggtcctcacggtgatcagctcatcctgctggacctgctgctacttcagctgcctcaaactccacccctggcccgac

SEQ ID NO: 966830 - DNA, 120 bp, Artificial Sequence
  ENSG00000263072_21 (sequence is synthesized)
ccatggggggatagcgtcccctgctggcatagagaccctcagccccacctggacctgggccaaacctccacctccccacagctgcctccctgggaaagcgcctcttccccgtccctctcc

SEQ ID NO: 966831 - DNA, 120 bp, Artificial Sequence
  ENSG00000263072_22 (sequence is synthesized)
tacctccgccaggcaggaagagagctttctccttagagccgtgacttaggggtgcccagccccaggcaccttgagccccatcctcctgcgatgccccctcggagtgtggctcttcgggct

SEQ ID NO: 966832 - DNA, 120 bp, Artificial Sequence
  ENSG00000263072_23 (sequence is synthesized)
ccatcttaatgtgcagtgactcctgagtgtcccctgaaggtaccgcctcccccagcttagaaggcatttcctgatgaggatgtccacgatctggaacctagaaaggacagccccatcagc

SEQ ID NO: 966833 - DNA, 120 bp, Artificial Sequence
  ENSG00000263072_24 (sequence is synthesized)
acccagatgagtgggagagacacccagggccacatggcagtgcgctccggcagcgtcggaaaccaacatgcaagacgcagcttgaaggactgtccttgctgcattcatccagctcacccc

SEQ ID NO: 966834 - DNA, 120 bp, Artificial Sequence
  ENSG00000263072_25 (sequence is synthesized)
agcaaggacgggcggcaagaggaggaatattcaccaagccgcctccacagtgccggtgggcgtggtgcccaagggcagctaccccttctcagctccagcctcacactgacctcagcagtg

SEQ ID NO: 966835 - DNA, 120 bp, Artificial Sequence
  ENSG00000263072_26 (sequence is synthesized)
tagactgctgtctattagtgtatgaagaaaccaagtgtagtggcttgaatagtgtcctctaagaatccgtgtcctccctggacctcagaatgggaccttattggggaaaagggtctttat

SEQ ID NO: 966836 - DNA, 120 bp, Artificial Sequence
  ENSG00000263072_27 (sequence is synthesized)
acaggagaggacacagagacacagagaaggaagcagagactggagggatgcccacaccaaggacaccaggagcccccaaggagttggaagaggtaagggagggtcctcttagtctagagc

SEQ ID NO: 966837 - DNA, 120 bp, Artificial Sequence
  ENSG00000263072_28 (sequence is synthesized)
tttcaaaaggagtgtgaccctgctgacacctagattttggactgcaggcctccaggactgtgagagagccaattctggttgttttcagccccccagagagtggaaacttgttacagcagc

SEQ ID NO: 966838 - DNA, 120 bp, Artificial Sequence
  ENSG00000263072_29 (sequence is synthesized)
cacgggagactaacacaccatggctggggatgagacaatgccccgtgaccacatagctcaaaagctttgggaaagtcagggagggccctggtggggcctcatccacagcacaggaactgg

SEQ ID NO: 966839 - DNA, 120 bp, Artificial Sequence
  ENSG00000263072_30 (sequence is synthesized)
ccggacttctgctggggtctcacactccttcctccacgccctgtctgtgtttgggtcttgaagggaaagaacctcaggccaggaatcagagtgcctgggtgccagacccagcgacacccc

SEQ ID NO: 966840 - DNA, 120 bp, Artificial Sequence
  ENSG00000263072_31 (sequence is synthesized)
tccccaatcaggcagccttcaggacgcagctgctctgcccctgcacagaatggtcatgaggttcacgcagataatgatggagaaggagctgccagctcaggaaagtcctggataaacaca

SEQ ID NO: 966841 - DNA, 120 bp, Artificial Sequence
  ENSG00000263072_32 (sequence is synthesized)
gggtggcgctggtcattaatcccccccgccgtgcgcaccagacagaagccagtgccagcagagaatgccaacatgtggggctctactgacatgcccaaggtgttcaaggcacacgggaag

SEQ ID NO: 966842 - DNA, 120 bp, Artificial Sequence
  ENSG00000263072_33 (sequence is synthesized)
tggatgggaaactgaaccatgctaacaattctttgtgcttctatggcatgaaaaccatagatgatggcgtctcatgcctattatccttagagcctcccagtgaccctgcgagacaggtgg

SEQ ID NO: 966843 - DNA, 120 bp, Artificial Sequence
  ENSG00000263072_34 (sequence is synthesized)
aaatggcaggcatgtggtctgcattttacagatgacacatctggttcccagaggccagggactggcccctggcctgtcgctgactcatactcctccaactccaagcccggagacccaggt

SEQ ID NO: 966844 - DNA, 120 bp, Artificial Sequence
  ENSG00000263072_35 (sequence is synthesized)
cccccacaaatagtaattacacacacacactcaaccacgcacgcacacacacacgggtagcaggtacaggaaggagaaaggaccgggagctcagacccacagagatgagaagctgtggtt

SEQ ID NO: 966845 - DNA, 120 bp, Artificial Sequence
  ENSG00000263072_36 (sequence is synthesized)
ccaggtggagaagcacggggaaggagaacaggtttccctgtgtgctctgagcgctgctcagaaagaaaacctcactgataggacctccacccagacctcttccatctcctgtggccactg

SEQ ID NO: 966846 - DNA, 120 bp, Artificial Sequence
  ENSG00000263072_37 (sequence is synthesized)
gctagagaattcaccagcaaagcaaaactgttatgctgtaaattccagacagagggtactacccagcatgccaccttctctttgatctccccaccccagtgagtctaactcttccagggg

SEQ ID NO: 966847 - DNA, 120 bp, Artificial Sequence
  ENSG00000263072_38 (sequence is synthesized)
tccagactctgtgccttgaaaatctcctccgcaccagcctcttctaccgcacacctccctcagccagccccatctgtacctccgggggtgtctccttgtcctgggtgtcctggatgcctc

SEQ ID NO: 966848 - DNA, 120 bp, Artificial Sequence
  ENSG00000263072_39 (sequence is synthesized)
cgccgtctgcagacattttctatttcagagctagaaagaacagctgagttgtttctccctctttttggccaagccccctccagcttctggccaggagcctagaagagcagacagaaacca

SEQ ID NO: 966849 - DNA, 120 bp, Artificial Sequence
  ENSG00000263072_40 (sequence is synthesized)
gccctcgcttcctggacacccccaaagagccctgaaaatccccacgagtaccagcgctccctggtcccaatcggaaagaaagtctcccagatcctatccgatggtcccactctctgtgat

SEQ ID NO: 966850 - DNA, 120 bp, Artificial Sequence
  ENSG00000263072_41 (sequence is synthesized)
aggcagttctggctcaagatctctcatgatactgcagacaccacaccaacgaggaccccagtcctctggcactggaggacccacttagaaggcggatgactcacgtggctcttggcagga

SEQ ID NO: 966851 - DNA, 120 bp, Artificial Sequence
  ENSG00000263072_42 (sequence is synthesized)
gacctcagttcctccccacataggcctccctataggactgcttgagtgtcccgtttaccaaatgatctaaatatgttccggttttgattggctgctctgcaatgtgggccgttatctagc

SEQ ID NO: 966852 - DNA, 120 bp, Artificial Sequence
  ENSG00000263072_43 (sequence is synthesized)
tgattcggtggggcctgaagtgtcagttcctgccgcagggatgttatatggaacctttggcaggccgctacagacgaatcataatataaacctgtgctagttattgattacgtcccagct

SEQ ID NO: 966853 - DNA, 120 bp, Artificial Sequence
  ENSG00000263072_44 (sequence is synthesized)
cctgcgttgcctgctctgtgaaatggttctggccctttagtttttcctttaccagctggcatgatcttaagctttgtcagtagagggcgctggagagacattgcaggagacgagtttccc

SEQ ID NO: 966854 - DNA, 120 bp, Artificial Sequence
  ENSG00000263072_45 (sequence is synthesized)
ccagaaggcaggaagcccgcctgaccccatgtctcaggctgccagaggagcgtgcgatgaggaaggctggactgtcttcacaggacaccagggagaagcctcaagccactgccccctgac

SEQ ID NO: 966855 - DNA, 120 bp, Artificial Sequence
  ENSG00000263072_46 (sequence is synthesized)
ggcacggtctccttcctggccgctctctgccggccgtaccgcacgacagctggcagcaccgtcagcccctgctcgggagctcggaagatgctctagctccgcggccagtgcagcgaaccc

SEQ ID NO: 966856 - DNA, 120 bp, Artificial Sequence
  ENSG00000263072_47 (sequence is synthesized)
acccaaccctggtgcaggagccattgcagcaaattgacagggagtcctctgggccggaagtggccctggccctgcgccgtatgctctctaggactgcaggaggctcggcatctcggtgat

SEQ ID NO: 966857 - DNA, 120 bp, Artificial Sequence
  ENSG00000263072_48 (sequence is synthesized)
agacccaggaagtcagtggctgggcggggcgggctgtgaggactgaggtctgtagcgaaggtccagccccgtggtcttcgcttcgttcggcaacgaacgcccagcgaagggtaagacgaa

SEQ ID NO: 966858 - DNA, 120 bp, Artificial Sequence
  ENSG00000263072_49 (sequence is synthesized)
atgcttcaaagacaggatcctggagcagttgccggggcaaccgtgcggcttggggcgtggcggtgaggggaaaagggccgggcacaaacttcagccgtgattggctggttctgctggagc

SEQ ID NO: 966859 - DNA, 120 bp, Artificial Sequence
  ENSG00000263072_50 (sequence is synthesized)
cgcctttctccccgccccgatgcctgaatggctaagggcaggggggcgtggcctcctggattcagtcatgccggcgacggggccgccgagcgagaggctgggtccatgggaccctgcagg

SEQ ID NO: 966860 - DNA, 120 bp, Artificial Sequence
  ENSG00000263072_51 (sequence is synthesized)
ctctgggcttcgctacacggccgggcccgggaactgggagacggtgtcctaggctaggacggcgctgaggccgacgcccccggcccagaggggcagcgccgacagccgatccctgagcgc

SEQ ID NO: 966861 - DNA, 120 bp, Artificial Sequence
  ENSG00000263072_52 (sequence is synthesized)
ttgcaacaggaacctggggccgcagggaagcaggtgggaagccaggatgcatacatcctgcctctccgcctccgccctcaccgtgctcctgacaccgcatcagtgatgatctggtggagt

SEQ ID NO: 966862 - DNA, 120 bp, Artificial Sequence
  ENSG00000263072_53 (sequence is synthesized)
tctccagtggccgagaagccccgaggaagccagggaaaccgctgaacctcctcatcctctacccagggagacaccaagacccttacctggcttcttccctccagcctcctacctctcagt

SEQ ID NO: 966863 - DNA, 120 bp, Artificial Sequence
  ENSG00000263072_54 (sequence is synthesized)
gacgcccatcacctaccaaactatgagcacccttcagcctggcgttccaggtccttccctggcacagcccctactcctccctgtcttatttgtgcttgtcgaatatttccgaaactgcca

SEQ ID NO: 966864 - DNA, 120 bp, Artificial Sequence
  ENSG00000263072_55 (sequence is synthesized)
gagaaccactgcacccatcctattaaacttttaaatcatgatagttaccatgtatagagtgtttatatgccaggcattgagctaagtcttttacgtcttgcgctcattctgtgcaacagc

SEQ ID NO: 966865 - DNA, 120 bp, Artificial Sequence
  ENSG00000263072_56 (sequence is synthesized)
ccaatgggagaaattccatgaatatagttaccatttccttgatttctagagaagctggatatgttttctttttttccagtattatttctatttatccttttgtgaattgtctgttgttat

SEQ ID NO: 966866 - DNA, 120 bp, Artificial Sequence
  ENSG00000263072_57 (sequence is synthesized)
cccaaagtactgggattacaggcgtgagcacctgtgcccggccacaccattattttgaagagaaaatttgataaaaataattggtcagttgtaaagatggttaactacccaactggtaag

SEQ ID NO: 966867 - DNA, 120 bp, Artificial Sequence
  ENSG00000263072_58 (sequence is synthesized)
atggttaactacccaactggtaagagagatttctaagagttacagaatagcaactgcaggaaggaacttgtgcccttaggactgaggaagtaaaaaggagggaaacttggaaacacgaaa

SEQ ID NO: 966868 - DNA, 73 bp, Artificial Sequence
  ENSG00000263072_59 (sequence is synthesized)
aattgattctttaaaaaaaattagaacatttaccgatgctggacccaccttccccaccttcagggtccacttt

SEQ ID NO: 966869 - DNA, 120 bp, Artificial Sequence
  ENSG00000263072_60 (sequence is synthesized)
cgatgctggacccaccttccccaccttcagggtccactttctaggtggccacagtgcctgcttggcccctgtagcatttgagtttgcaactctgcttttggagttaaacatgttttagga

SEQ ID NO: 966870 - DNA, 120 bp, Artificial Sequence
  ENSG00000263072_61 (sequence is synthesized)
acaaaattagtacaaggagtggtctcaagagatagatgcacaaagaagggatatggggacggatttgggtatttgggcttgagtgcagactgagctccttgacaatgagaaataggatat

SEQ ID NO: 966871 - DNA, 120 bp, Artificial Sequence
  ENSG00000263072_62 (sequence is synthesized)
attttgtattgtcccctttattgctgaagcaagagcctcgcatctcagtgtaaccggctcagggaaagccgaggctaaattggaatcgctatttcctgtcatcaggagcagaaagttctg

SEQ ID NO: 966872 - DNA, 120 bp, Artificial Sequence
  ENSG00000263072_63 (sequence is synthesized)
cagagatcctgcagaacaggtgctggtggggccccgcccgtcaaggccagggtaatccaggacctgctgtcccccgaccccaggacatacaccgtgtgtccctacctgactcccatgccc

SEQ ID NO: 966873 - DNA, 120 bp, Artificial Sequence
  ENSG00000263072_64 (sequence is synthesized)
gggtcatttcagctactgggcaccagtctcctcctcatgtttatcctgttccctttgcttgaaaggttcgtactccagatccttgtaaaaccgcttctcaccctttgagtctcagcttaa

SEQ ID NO: 966874 - DNA, 120 bp, Artificial Sequence
  ENSG00000263072_65 (sequence is synthesized)
atgtcccctccttggaggggtcttccctgacaatgaagctccgaccgtcctctcctgttttacccagttcatttctttctggcatttgtaactacttgaagttaaagtgtgtgccatgta

SEQ ID NO: 966875 - DNA, 120 bp, Artificial Sequence
  ENSG00000263072_66 (sequence is synthesized)
tatggcaaatttgcataaaattatattgaaattgactaccggattgcactttcttgttccttctgataatttttcacgtgttctttttctttcttactttagatggagtcttgctctgtc

SEQ ID NO: 966876 - DNA, 84 bp, Artificial Sequence
  ENSG00000263072_67 (sequence is synthesized)
agactgagctccttgacaatgagaaataggatatgtattagggttctccagaaacagaataacagaatctatatatacatgtgt

SEQ ID NO: 966877 - DNA, 120 bp, Artificial Sequence
  ENSG00000263072_68 (sequence is synthesized)
cacacacactaaggtattgcctcacatgattatggcagtcgagaagccccacaatctgctatctgcaagctggagacccaaggtcagtggtgcagcatttttttttcagatggggtctcc

SEQ ID NO: 966878 - DNA, 120 bp, Artificial Sequence
  ENSG00000263072_69 (sequence is synthesized)
atcacagctcactgcagccttgacttccccagctcaagcaagcttcccatctcagcctcctgaacagctgggactacaggtggacaccaccatacccagctaatttgttctatatatata

SEQ ID NO: 966879 - DNA, 120 bp, Artificial Sequence
  ENSG00000263072_70 (sequence is synthesized)
accatacccagctaatttgttctatatatatatttttatatagagatggcctctccctgtatgtcctaggctgatctcgaactcccctgggctcaagctatccgcctgcctccgcctcct

SEQ ID NO: 966880 - DNA, 120 bp, Artificial Sequence
  ENSG00000263072_71 (sequence is synthesized)
aacagttttgtaattttaaggcctgagagccaaaggccaatggtgtagattccaattcaagactcaaggcctgagaatcaggagcacaagaccaggagatcaatgtcccagtacccaggt

SEQ ID NO: 966881 - DNA, 120 bp, Artificial Sequence
  ENSG00000263072_72 (sequence is synthesized)
ctcaagtactcaggcacagagagaattcagccttcctctgccttgctgttctgtttaattccatacggatggatgatgcccacccgtggtgagggccgtctgctttactcactcagccaa

SEQ ID NO: 966882 - DNA, 120 bp, Artificial Sequence
  ENSG00000263072_73 (sequence is synthesized)
ttcaaacgttaatctcttcttgagaagccctcacagacacacccagaaagaatgtttaagcagctgtctgggcatgccttggcccagtatagtttaacatgaaattaaccatcacagggt

SEQ ID NO: 966883 - DNA, 120 bp, Artificial Sequence
  ENSG00000263072_74 (sequence is synthesized)
gctggttatccacggcttgcagcgatatcacaattaatcaagcagccacctgcaggtgatgatgaagtgccaatgaaagcatgtacctggtgggaacaagtagctgctgcactcagccat

SEQ ID NO: 966884 - DNA, 120 bp, Artificial Sequence
  ENSG00000263072_75 (sequence is synthesized)
tatggtgtccacagatgtataatgatgattatacaaccatggtatgggatacattatttttagtgcacttgagcatttacagtgagaaaatgacaagcccaagtcccttagctcagttca

SEQ ID NO: 966885 - DNA, 120 bp, Artificial Sequence
  ENSG00000263072_76 (sequence is synthesized)
agtcatggtctgagaacctgagaacttctgtgatagcttagaagcagctcttatagccacaatactgtcactgaaaatcaaacacaaaacttaactgtagagtcgctgaataataatgac

SEQ ID NO: 966886 - DNA, 120 bp, Artificial Sequence
  ENSG00000263072_77 (sequence is synthesized)
tgacagctaaattcccaggcccaacaaatctcacgtgaaggttactgcgctgattggtaaagaaggtgatcctggccaggcacagtggtgcagtcctgtaatcccagttactcgggaggc

SEQ ID NO: 966887 - DNA, 120 bp, Artificial Sequence
  ENSG00000263072_78 (sequence is synthesized)
gagaatcgcttgaacctgggaggtgaggttgcagggggccgagatggcgccactgcacttccagactgggcgacagagcgagactctatcaaaaaaacaaaacaaaacgaaaaaacagaa

SEQ ID NO: 966888 - DNA, 120 bp, Artificial Sequence
  ENSG00000263072_79 (sequence is synthesized)
agaaggtgatcctgaaattcaaagtggggatatatgtttggacccagatgaaattgacagtcttgattccttaggtcactctgagcctcctttaccagtagaagtagtttgccctcagta

SEQ ID NO: 966889 - DNA, 120 bp, Artificial Sequence
  ENSG00000263072_80 (sequence is synthesized)
tctgaatagaatagcctttctctgcttgaaaaccttaggataaccttcccaggggcagaagacctaaaaggggatgtccattctcctgaaaacccaccacaattgcgctccattgccagt

SEQ ID NO: 966890 - DNA, 120 bp, Artificial Sequence
  ENSG00000263072_81 (sequence is synthesized)
aaactcataacaactagggtcaaatctcaacacaatctatatatgtgtgtgtgtggagagagaggctgcacaagcgtgtgcaagagacagagagagaggggaaagatacacgttatgacc

SEQ ID NO: 966891 - DNA, 120 bp, Artificial Sequence
  ENSG00000263072_82 (sequence is synthesized)
caggaggaaatagcttatacactaaaataattcactttgctgatataaactagcagaaacctgggggatagatgcaagagtagattctaaggatagcataccaaagtggacagaatataa

SEQ ID NO: 966892 - DNA, 120 bp, Artificial Sequence
  ENSG00000263072_83 (sequence is synthesized)
aaagagatgagattagaccgggtgcagtagctcatgcctgtagtcccagcactttaggaggcagaggctggaggatcatcacttgagcccaggagtttgttatcagtttgggcaacatag

SEQ ID NO: 966893 - DNA, 120 bp, Artificial Sequence
  ENSG00000263072_84 (sequence is synthesized)
ttgaaacataaaatacaaaaattagcggggtgttgtggtgagcacctatagtcccagctactcagaaagctgaggtgggagggtcgcttgagcctgagaggtcaaggctgcagtgaactg

SEQ ID NO: 966894 - DNA, 120 bp, Artificial Sequence
  ENSG00000263072_85 (sequence is synthesized)
tgatcatgccactgcacttcagcctgcgtgacagaacaagactctgtcacacacacacacaaaatgagaaatcaaattcaatgatataggtgcatttagtagacttcaaatttaatgtta

SEQ ID NO: 966895 - DNA, 120 bp, Artificial Sequence
  ENSG00000263072_86 (sequence is synthesized)
gtggagtctcgagcctgggttgcacctgctcttggccgggaggtgactcccagagccgcaatgccagctcatgaggatggctttacccaggacgcgttcatgatgccagcaaggcagagc

SEQ ID NO: 966896 - DNA, 120 bp, Artificial Sequence
  ENSG00000263072_87 (sequence is synthesized)
caccaaaacagaaaaatggaagatgcattttgtggaaagattgtgttatttgaaatttcaaagcgagcactgcagttgtcctcacagacggagtttcgctcttcttcccatgctggagtg

SEQ ID NO: 966897 - DNA, 120 bp, Artificial Sequence
  ENSG00000227131_0 (sequence is synthesized)
gtgctaagctgggcccattacgcttggaaaatcctggagcccagaaaggtgaagcaaactgcctgaggtcaagctcataatgtgaagtggagctgcaatgtctactcaagagtgtctgac

SEQ ID NO: 966898 - DNA, 120 bp, Artificial Sequence
  ENSG00000227131_1 (sequence is synthesized)
atctgcactttttactctgccaggtaagaagaccctcaccagatgtggcccctcactcctggacttccaagcctccagaatcatgaactaaatacatttctatttgttataaattactca

SEQ ID NO: 966899 - DNA, 120 bp, Artificial Sequence
  ENSG00000227131_2 (sequence is synthesized)
agactgaaggatctttgtgatcagatgctgtgtctatatcctttgttcatttgtttgatatttgctgaggaccttttaagtgccaggcactattctagattcagaatactatgttgaaaa

SEQ ID NO: 966900 - DNA, 120 bp, Artificial Sequence
  ENSG00000227131_3 (sequence is synthesized)
gacagacaaaaccactggtctcatggaacttacaagttagttgcgacaaatgacaataaacaacaaacaattttaggttacaataagtactaagaagcaaataaaagcagcataatcgtc

SEQ ID NO: 966901 - DNA, 120 bp, Artificial Sequence
  ENSG00000267510_0 (sequence is synthesized)
cacaccttgatcctacctcacacgctacaaaaaattattcaaagtagatcacagacctacataaaaaaacaataaagaatctagaaggaaacataggagagtagattcattatcttggtc

SEQ ID NO: 966902 - DNA, 68 bp, Artificial Sequence
  ENSG00000267510_1 (sequence is synthesized)
aaataattcttaaacaggtgtcagatctcaagttgatctttatgctcattaaagattaagcagcaatc

SEQ ID NO: 966903 - DNA, 89 bp, Artificial Sequence
  ENSG00000267510_2 (sequence is synthesized)
ctgggctcaagtgatcctccagcctcagctctcacgtccagctataacattcagttttgagcaaatattgatcaatgagtccaacagtc

SEQ ID NO: 966904 - DNA, 120 bp, Artificial Sequence
  ENSG00000267512_0 (sequence is synthesized)
gctgttacaaaggcgtttagtttattctcatcagtatcactgatattctcatggttcacatttgccaacgccgctcctctccttacagtagttaaatgtgcaatctcacttgggggccca

SEQ ID NO: 966905 - DNA, 120 bp, Artificial Sequence
  ENSG00000267512_1 (sequence is synthesized)
catagggggatggggagttaaaaaagaaaaaaaactgccttcacatgaaaatctaaaacaacaacaaaaaaccacccactctgggcgagaacaaaaagagaggaatggtaaaagagaaaa

SEQ ID NO: 966906 - DNA, 120 bp, Artificial Sequence
  ENSG00000267512_2 (sequence is synthesized)
ttctgcaaacaactgctaacaatggaagtggacccggccctgccctgccctgcccagcccccaggagctgggcccagccaaccagccaaggcctgggacacccttaaactatagccctgt

SEQ ID NO: 966907 - DNA, 120 bp, Artificial Sequence
  ENSG00000267517_0 (sequence is synthesized)
gaagctggcttaatgaacaccttgggcagaaaacaaggaggcctccctacctccacttcatcccacacaggagtcttgatgctgggtgggagtccaggagtctgtctaggaatccaggaa

SEQ ID NO: 966908 - DNA, 120 bp, Artificial Sequence
  ENSG00000267517_1 (sequence is synthesized)
gaaggatgaatagaagtttcctaggcagcgaagggccaggtactcagaagaccacagacaagacccagccccatggcctgccccaaagagttcacatctcataaatgatgcttgaataat

SEQ ID NO: 966909 - DNA, 120 bp, Artificial Sequence
  ENSG00000267517_2 (sequence is synthesized)
aacaataatagtaacagctcccacatgctgagtgtgcgctgctaggacacagcatgtgacaggaattcagtgcctgaatgaatgagccaataaattaaactttctctttaaaaaaaaaaa

SEQ ID NO: 966910 - DNA, 120 bp, Artificial Sequence
  ENSG00000267519_0 (sequence is synthesized)
cggagtgcgcgcccggctcccctccccccgcgggtaagtggaagtcaggagggacccaggagggaggccgggagcgatcggcgcctcggcggcagcggcgccggcaacttttccgcgcct

SEQ ID NO: 966911 - DNA, 120 bp, Artificial Sequence
  ENSG00000267519_1 (sequence is synthesized)
ctcggcggcagcggcgccggcaacttttccgcgcctggctcgtgggcggagtggggctgcgcccggcgggtccccaagagcgttgcgagaaggcgagggcgccgccccgcgcgccttgag

SEQ ID NO: 966912 - DNA, 120 bp, Artificial Sequence
  ENSG00000267519_2 (sequence is synthesized)
tcggggacagtgcgtctgacggtggcgacggcggccgcggagtcccggggcgccccctacggagcgggggaagggcggcccggcctctgttcccttcccagtggcccctccaccccgacc

SEQ ID NO: 966913 - DNA, 120 bp, Artificial Sequence
  ENSG00000267519_3 (sequence is synthesized)
gacgcatgggaatgcggtggggagggcgggtccccgcgcgacttgggcaggtcaaggtgggcagagagttgtcagggtgggagggcttgtgtccggctcggacatggggcttgggttgag

SEQ ID NO: 966914 - DNA, 120 bp, Artificial Sequence
  ENSG00000267519_4 (sequence is synthesized)
gggcttggatatgcatatgcctaccccactcctagccccccgacctggcctttggacgggaggaatgggttgggggggtctctcagagttctttgggtgggggcgggggtggataccggt

SEQ ID NO: 966915 - DNA, 120 bp, Artificial Sequence
  ENSG00000267519_5 (sequence is synthesized)
ccaagttcttgacgtgtcgcccgctgggtagggggaaggtctcttgttgggcaggggctggtgggagctggggggatgtctcctttcccttcggagaaaagcgctcattcaaggttgcat

SEQ ID NO: 966916 - DNA, 120 bp, Artificial Sequence
  ENSG00000267519_6 (sequence is synthesized)
aggaaggaaagccaggttggggaccagccctgtgcagcttggggtccccgtgccttttggctgaaggaggaggttaaaagggcccagactgaaccccgacccctctgtcttagccccaga

SEQ ID NO: 966917 - DNA, 120 bp, Artificial Sequence
  ENSG00000267519_7 (sequence is synthesized)
ctgttttctgattttagcactagatttggctgcccctaaagcccttagccctaactgaccttcctgcccagcccagcccagcccagcccagccaggccccagacccagtggcttcttgaa

SEQ ID NO: 966918 - DNA, 120 bp, Artificial Sequence
  ENSG00000267519_8 (sequence is synthesized)
tgttttggctgtgcagctggctccttgtcacctgcccccttcccaaccttccccagctggcagcctctgactcctggtctatgagggtgaggctgggggctgggggacccctggcataag

SEQ ID NO: 966919 - DNA, 120 bp, Artificial Sequence
  ENSG00000267519_9 (sequence is synthesized)
gggtgtcctctggcagtcctgccccagctggagggctgtacccaacaggtgcccaggcttagaggcgaggtgatgttggacacaccctgtccgctcgcccacatgccctgcccgggccag

SEQ ID NO: 966920 - DNA, 120 bp, Artificial Sequence
  ENSG00000267519_10 (sequence is synthesized)
cctgggtacatgtgttcacatgccgatgtcctgggaaggcacaggccctggggctggtgctagctttgttctctgatcccgtgaggcacccatggccctctgcccttgcagcacgtcctc

SEQ ID NO: 966921 - DNA, 120 bp, Artificial Sequence
  ENSG00000267519_11 (sequence is synthesized)
tgggagctccttcaagaccccaacaggcaggccttgcctgtggatctagagggggccctaaaataggtgccggcctggcctggggctggcacgcggagcacatgcgtgacagggcgtgtc

SEQ ID NO: 966922 - DNA, 120 bp, Artificial Sequence
  ENSG00000267519_12 (sequence is synthesized)
cagagggtcgggcctgtctgtgctggcctggccactgagcctccgccgacccttgctcgctggagaaagacagcagaggcggatgctttaggagggacccccgtgtcgtgcccaccctct

SEQ ID NO: 966923 - DNA, 120 bp, Artificial Sequence
  ENSG00000267519_13 (sequence is synthesized)
aacaatgcaagtggacgccagatgttccatgcagaccgcagctgcggggcaggcccccatctatctgcaatcccagggtaattagcccggtgggtacactggggtgacccgctcgcccga

SEQ ID NO: 966924 - DNA, 120 bp, Artificial Sequence
  ENSG00000267519_14 (sequence is synthesized)
tctaggtggtgctttgatacctcttaaagcattttttggagtttgcccttcaccttggaaagctgggtgggggattctgtcctccatgaataacggcgccaggaaccttgggcgatcttg

SEQ ID NO: 966925 - DNA, 120 bp, Artificial Sequence
  ENSG00000267519_15 (sequence is synthesized)
agaaaactccttcctgtaacctctgttttccacgttggatgtgttttaggccacagtcaggcctggcttttttttttttttttttttaagacttattccatgaccttaagccccagtctg

SEQ ID NO: 966926 - DNA, 120 bp, Artificial Sequence
  ENSG00000267519_16 (sequence is synthesized)
aatctctgagccttaattattctatctataaatgggaagcatttggaaatgggacggagagaagtgtacactttgcccctggccgccttcttccctcctggtgtcctgggtggacacgga

SEQ ID NO: 966927 - DNA, 120 bp, Artificial Sequence
  ENSG00000267519_17 (sequence is synthesized)
ggtgtgtctggggaaggtgtgtcctttagggccggtcgcctgggaaggatgttgagcggagggcagtgggtgtgggtgagaatccctgggcagagaagggcgccgccatgctgggcacgg

SEQ ID NO: 966928 - DNA, 120 bp, Artificial Sequence
  ENSG00000267519_18 (sequence is synthesized)
ctgagtcacgctccagcgacgccttgccccagggtgctggagctggcgccaccctgggtgtggtcactgagctgtggccctgggcagagcagggctgggtggtctaggatgtggggcctc

SEQ ID NO: 966929 - DNA, 120 bp, Artificial Sequence
  ENSG00000267519_19 (sequence is synthesized)
ggtgcctggggaactgacttcgaagatgccaagccccctggcctcccgcctggcctaggttctggggtcaccctccaggactgtggtggcccacaccctgagaatgccttggagagccta

SEQ ID NO: 966930 - DNA, 120 bp, Artificial Sequence
  ENSG00000267519_20 (sequence is synthesized)
gaggccctgagccttgggcctgggaatcggtgcgttgagggaggtggatagggcgcagacaccagtgactgcattcaaggccaggggacccccacagccaggccctcactgcaaaatgta

SEQ ID NO: 966931 - DNA, 120 bp, Artificial Sequence
  ENSG00000267519_21 (sequence is synthesized)
cctatgtggggagaaggcaggggtggacctgatgacggggtgtaccactctactaagggttcccaacatgaaggtgagggggcccctgggaattctgtgattggtctgggaaagattaaa

SEQ ID NO: 966932 - DNA, 120 bp, Artificial Sequence
  ENSG00000267519_22 (sequence is synthesized)
gtctaagtgggggttagagtgtggactggcgggacgcaatgggggctgggatgtcactttcatggttcccctatttataacaagtgattcagccctcacttactcaccccttcctgagcc

SEQ ID NO: 966933 - DNA, 120 bp, Artificial Sequence
  ENSG00000267519_23 (sequence is synthesized)
tccccccaccccagccctgggtgggcagcggggcccacccacttgtcagtgccctgactttccctacccagtgccaccctctgagggctgcccatcggggcggttgttattgtcgctgca

SEQ ID NO: 966934 - DNA, 120 bp, Artificial Sequence
  ENSG00000267519_24 (sequence is synthesized)
ctgggattggggcagaggggcggggggctcctggtcaggcggcgcttggccgggcagcccaggttggcggctggctcgaggcccagcccacggagcttctgctgagagtctgggcccatt

SEQ ID NO: 966935 - DNA, 120 bp, Artificial Sequence
  ENSG00000267519_25 (sequence is synthesized)
aggcaaagcgttagtgacaggctgggagggcgggtggcgcggcgggcagggcggggcctgcagcccttggtattttccgatcccagctgctctgtgagggtggaaagtatttggggacca

SEQ ID NO: 966936 - DNA, 120 bp, Artificial Sequence
  ENSG00000267519_26 (sequence is synthesized)
ggcttgggggcggaggtggtggtggcgcccccggcggaagctgcccctgattcattcttggagcatggggttgggggggtagcggtacacatacatacccttgtgtgtctggtccacgca

SEQ ID NO: 966937 - DNA, 120 bp, Artificial Sequence
  ENSG00000267519_27 (sequence is synthesized)
cacgctgtctggagggggtattcaggcatacccacatgcattggctggccggggtgtcctgatgcagcctggggcctgctttgctccccagcccaggggcccgccctctccctcatgcct

SEQ ID NO: 966938 - DNA, 120 bp, Artificial Sequence
  ENSG00000267519_28 (sequence is synthesized)
ccagctgctaggagcttggtttccccctggacaccatctcccaagagcctgagaagtgcaccatgattggtaaaggggaccctgtctcctgggcacctgcatggcagcaccccttccact

SEQ ID NO: 966939 - DNA, 120 bp, Artificial Sequence
  ENSG00000267519_29 (sequence is synthesized)
caagacccagaccttttgtgcctgcggggatggggagtggccttggccccggccctgggctctgtgcaggggaaaccccacaggaaacgagcctggccaaatggccgcccttcccgttct

SEQ ID NO: 966940 - DNA, 120 bp, Artificial Sequence
  ENSG00000267519_30 (sequence is synthesized)
cgtccctgggacacgaatgtgctgtctcacttccggaggcggcccagggaggctggccgccctgcggggcctcgcctgctcccagttggcgcctccagaccctaaggggacagggctggg

SEQ ID NO: 966941 - DNA, 120 bp, Artificial Sequence
  ENSG00000267519_31 (sequence is synthesized)
ctggggcctgatgggaaagagtggctggtatgtgtgtatgtgtgtatagggaggggacaaaacaggacatcactcgccgcctgtctcgaagtggtgagcgccaccacatcgggcggacac

SEQ ID NO: 966942 - DNA, 120 bp, Artificial Sequence
  ENSG00000267519_32 (sequence is synthesized)
tggggtcctggtgtgagacacccacgtttccgttatcctttgccttggcaaagacagcagcagctctgtcgtgatcatgtttatcactcatggggtcctcaccatgacttatgaagtcca

SEQ ID NO: 966943 - DNA, 120 bp, Artificial Sequence
  ENSG00000267519_33 (sequence is synthesized)
tacttattatccctgttttgcagatggggaagctgaggcccagagaggttgagtgacttgcccagagtcacccagctcagaagctgcagagctggggctttcaaatctgggcagacttgg

SEQ ID NO: 966944 - DNA, 120 bp, Artificial Sequence
  ENSG00000267519_34 (sequence is synthesized)
gctccaaaactggagtctgctagccaggtgttgggctcttatcaaaagaagctccactcactaaagacttagggctggcttcatgcatttgtgaaacgggcagtctcacggcagccctgc

SEQ ID NO: 966945 - DNA, 120 bp, Artificial Sequence
  ENSG00000267519_35 (sequence is synthesized)
cggcagccctgcttggagggacctggaggttagtttaatgttgcactgctggggtcatgaatttttttttattattattaatttttttgtcttgtattgcccaggctggtctcgaactcc

SEQ ID NO: 966946 - DNA, 120 bp, Artificial Sequence
  ENSG00000267519_36 (sequence is synthesized)
atcttcctgtcttggcctcccgaagtgccgggattatagggatgagccaccgcgctcagcctgaaattattttctttttttaaacttgtttttgtttattttagagatagggtcttgctc

SEQ ID NO: 966947 - DNA, 81 bp, Artificial Sequence
  ENSG00000267519_37 (sequence is synthesized)
taaacttgtttttgtttattttagagatagggtcttgctctgtcacttaggctggagttcagtggcatggtcatagatcac

SEQ ID NO: 966948 - DNA, 120 bp, Artificial Sequence
  ENSG00000267519_38 (sequence is synthesized)
tcagccgcctgagtagctggggctacagatgtgtaccaccactcctggctgattttttagtgaattttttgtgggccagacactgtggctcaggcctgtaagcccagcactttgggaggc

SEQ ID NO: 966949 - DNA, 120 bp, Artificial Sequence
  ENSG00000267519_39 (sequence is synthesized)
ccgggcatggtggtgcatagctgtagtcccagctaccccggaggctaaggtgggaggatcacttgaacctgggaggctgaggctgcagtgagctgtgattgcacccctgcactctagccg

SEQ ID NO: 966950 - DNA, 88 bp, Artificial Sequence
  ENSG00000267519_40 (sequence is synthesized)
gagaccctgtctcaaaaaagaaaaaatattttttttttttgtagagatggggtattgtcgtattgcgctctcctgcctcggcctccca

SEQ ID NO: 966951 - DNA, 120 bp, Artificial Sequence
  ENSG00000267519_41 (sequence is synthesized)
gctgggattacaggcgtgagccgccatgcttggcctgaaattcttagttttcgaactagaggaccacgtgttcattttgcaccgggtcctgaaaatcctgtatcttgccctggtgctggg

SEQ ID NO: 966952 - DNA, 120 bp, Artificial Sequence
  ENSG00000267519_42 (sequence is synthesized)
ttgccctggtgctgggcacttactgagtgacatacatactcggtgacatctcactgggctatgcaaaagaggctcttggctccattttacagatggggaaactgaagctttggagagtct

SEQ ID NO: 966953 - DNA, 120 bp, Artificial Sequence
  ENSG00000267519_43 (sequence is synthesized)
ttgggaaactgtggagcaaggatttgaaccttgggctgtttgggtggagaggcctgtatcttggagcttggatcctgtgctctggggggcggggggtgcgtgtctagaaagagagggggg

SEQ ID NO: 966954 - DNA, 120 bp, Artificial Sequence
  ENSG00000267519_44 (sequence is synthesized)
tgccttgctgccggcatccgccctggtgggtgtgggctaagccctggccactgaggagaccgggccacggggggggaggccctggtggtttcctcctgccctccaggcttctaggaagtg

SEQ ID NO: 966955 - DNA, 120 bp, Artificial Sequence
  ENSG00000267519_45 (sequence is synthesized)
gcgccagctggggtgagatcacttcctcacccgcctgcctggccccccttggcttcctctccccatggccccatttggcctgcccagggctcaatgaggggggagcttggccatgcaagt

SEQ ID NO: 966956 - DNA, 120 bp, Artificial Sequence
  ENSG00000267519_46 (sequence is synthesized)
tgctgtagcctccttgtcccgcatgggccctctaggtatctctgcctctccagtcctggggctggaacggagggcacagctaggctccagctccccgtgtggtggctcctgcatatgaga

SEQ ID NO: 966957 - DNA, 120 bp, Artificial Sequence
  ENSG00000267519_47 (sequence is synthesized)
aaagagcttccctgtgatcaaaggaagcatctggggacctggaggggaggtgtccccaaatctcattacctcctttgctctctctctctttctcccctccaggtgccagcctctggcccc

SEQ ID NO: 966958 - DNA, 120 bp, Artificial Sequence
  ENSG00000267519_48 (sequence is synthesized)
gcccggtgcccccctcacccctgtgccacggccggctggggttcctggggatgggatttgcttcctgtcacaaatcacattgccagggatttccaaccgaccctgagctctgccaccgag

SEQ ID NO: 966959 - DNA, 120 bp, Artificial Sequence
  ENSG00000267519_49 (sequence is synthesized)
gatgctgcccggggacggggtggcagagaggccccgaagcctgtgcctggcctgaggagcagggcttagctgcttgtgagcagggtccacaccaagtcgtgttcacagtggctaagttcc

SEQ ID NO: 966960 - DNA, 120 bp, Artificial Sequence
  ENSG00000267519_50 (sequence is synthesized)
gccccccaggccctcacctcctctggccttgccgcctgtcccctgctgccgcctgtctgcctgccatcctgctgcctggcctccctgggctctgcctcccgtgcctactgagctgaaaca

SEQ ID NO: 966961 - DNA, 120 bp, Artificial Sequence
  ENSG00000267519_51 (sequence is synthesized)
cagttggtttgtgtacactggctcagttcagcaggaacaggggtcaagcccccttggagcctgcagcccctgccttccctgggtgggctgatgcttggagcagagatgaggactcagaat

SEQ ID NO: 966962 - DNA, 120 bp, Artificial Sequence
  ENSG00000267519_52 (sequence is synthesized)
cagacctgtgtctggaggagggatgtggtgggtggggttggctgggcccaaatgtgtgctgcaggccctgatccccaactctgcaactggggacccctgcatggccacagctcaggctgg

SEQ ID NO: 966963 - DNA, 120 bp, Artificial Sequence
  ENSG00000267519_53 (sequence is synthesized)
gctgtggtgccagcatagataggtgggtgagtgggtggcccttccattaaaagggaagccagctgtgtcctttccgggcctggaggcttggcccctcctctcccaagcctggcaggggca

SEQ ID NO: 966964 - DNA, 120 bp, Artificial Sequence
  ENSG00000267519_54 (sequence is synthesized)
ctggcccggcccgcaccttcctagcagccagttacccaagaggaagctgccttgggcctccagaccgttaaatgccaactcctggcttccggtatcaggctgggttgacctgacctggcc

SEQ ID NO: 966965 - DNA, 120 bp, Artificial Sequence
  ENSG00000267519_55 (sequence is synthesized)
ccttcttgctgggccctgcagctttctaacttgccgggaggagcagtgacacccgccccacatgtggggcatggaacaagttccttgtggacccagaagggacacaagcaggtgtgctta

SEQ ID NO: 966966 - DNA, 120 bp, Artificial Sequence
  ENSG00000267519_56 (sequence is synthesized)
aagggacacaagcaggtgtgcttagtcctgaggcgctgggaatagctgatcctccctgccttgagggggttctcagggcagggaagagttaggactctgtttttttttttttgttttttt

SEQ ID NO: 966967 - DNA, 85 bp, Artificial Sequence
  ENSG00000267519_57 (sequence is synthesized)
atgagccactgcgcccggccaatttttttttatgttttgtagagacggggtttcgccatgttactgctcgtcttagcctcccaaa

SEQ ID NO: 966968 - DNA, 120 bp, Artificial Sequence
  ENSG00000267519_58 (sequence is synthesized)
atcttggccaggctggtgtgatcatggctcattgcaaccttgaattcctgggcacaagtgatcctcctgccttagcctccccagtagagctgggactacaggtatgcgccaccacacctg

SEQ ID NO: 966969 - DNA, 120 bp, Artificial Sequence
  ENSG00000267519_59 (sequence is synthesized)
gctaatttttttaattttaatttttgtagagatgggggggcaggtctcactatgttgcccaggctgttctcgaactcctggccacaagccatcctcccaccttagtctcccaatgcgccg

SEQ ID NO: 966970 - DNA, 120 bp, Artificial Sequence
  ENSG00000267519_60 (sequence is synthesized)
gaattacaggtggctcaggtgtgagccaccgtgcctggcttttctccactatcttgaaatcagatgggaggaggcttttttctgggtgggactgaggaggcacactgaagtcccccaggt

SEQ ID NO: 966971 - DNA, 120 bp, Artificial Sequence
  ENSG00000267519_61 (sequence is synthesized)
catcggggctgggccattgcctttttccccaccctgggtagtcgtggacagaagcttgggatgggatggagaggagagatcgtgctgtgtgtcatgtctgttgttcaagtaaataaaagt

SEQ ID NO: 966972 - DNA, 120 bp, Artificial Sequence
  ENSG00000267519_62 (sequence is synthesized)
tgccctgacttcattcctgaaggtctggtctgtgattcactcctgcctcccatcgctggagtttcagcttttgattggcctgaatttaccatcctggcactccgggctcctgcctgccca

SEQ ID NO: 966973 - DNA, 120 bp, Artificial Sequence
  ENSG00000267519_63 (sequence is synthesized)
tccctgccccacctgctctgtgcagcagggtatcctgtgcttggaaaggtgaccttgggggtgtcctggatcgtggggtgaccatgagggaaaccctagagtggaaagattttcacatcg

SEQ ID NO: 966974 - DNA, 120 bp, Artificial Sequence
  ENSG00000267519_64 (sequence is synthesized)
ctgatcaagggaggatggaagctgatctgaagtggtggtggtggggtgaccctgagggaaacgctgagcctgaggggtgacatgtggcgataaccaggatctgagggtcttgagctagtg

SEQ ID NO: 966975 - DNA, 120 bp, Artificial Sequence
  ENSG00000267519_65 (sequence is synthesized)
acatttgggggcaacttggacctacgggattactcaggcctcaggggaagatttggggtgcctggtatctgagaatgctggaggggaacttgggtttgagggatgtgacatgaaggaaac

SEQ ID NO: 966976 - DNA, 120 bp, Artificial Sequence
  ENSG00000267519_66 (sequence is synthesized)
cccagttcttaaggggggacatttggatgtggctgggacctgcgtgacgccccaggaacatgggaacattcgtgggtgacacctgaggggcacagtaaagggtcccccaggtccgaaggc

SEQ ID NO: 966977 - DNA, 120 bp, Artificial Sequence
  ENSG00000267519_67 (sequence is synthesized)
ggcagggaccacaaggggtgcactccgggctctccacccacctccaccgtcccagacctcgaggcggcgccacggagcgcgcggggcagtcccgggtccgcccgcacatacctgctggaa

SEQ ID NO: 966978 - DNA, 120 bp, Artificial Sequence
  ENSG00000267519_68 (sequence is synthesized)
tacgcgcggcggggcaggaggtggggccgtctccgattggcccactcgagcggaggggcggtgcgaaaagccaatccccatgcacagcgccgccaaagtcccgcccccgactgcgggccc

SEQ ID NO: 966979 - DNA, 120 bp, Artificial Sequence
  ENSG00000267519_69 (sequence is synthesized)
cgccctctagcgacgggccctgccgctccgggaagcctctgtcctctcctgccccggctctggcagtgacccagacacagcatctccattcatccaaaaggcaggaaggccccgaggaaa

SEQ ID NO: 966980 - DNA, 120 bp, Artificial Sequence
  ENSG00000267519_70 (sequence is synthesized)
ctgcttctcggggagccagggacgtttagacaaccacgggctttctcgccgtcctttggatcccatccctcactctatttgacgactgggagcctcttcagtggcgcaagatcccagaca

SEQ ID NO: 966981 - DNA, 120 bp, Artificial Sequence
  ENSG00000267519_71 (sequence is synthesized)
tcgagtctaaacccggggttcccgcttttgatcggggtgtcttccccatccagctgcaccaacacctgccacagcctcccatgctcagcaatttggagacaaggacccccaacattggtg

SEQ ID NO: 966982 - DNA, 120 bp, Artificial Sequence
  ENSG00000267519_72 (sequence is synthesized)
tctggagccagggcgccccccacccccatcttggcccttcctaggggctcaaggaccctgcagtcaggggtgggcaggggtcagtggccccaaccaggtcctaaatcaaacgtcctagct

SEQ ID NO: 966983 - DNA, 67 bp, Artificial Sequence
  ENSG00000267519_73 (sequence is synthesized)
tcagtggccccaaccaggtcctaaatcaaacgtcctagctaggtgcccttcccccctgccccccacc

SEQ ID NO: 966984 - DNA, 90 bp, Artificial Sequence
  ENSG00000267519_74 (sequence is synthesized)
ctgggtgccctttctttccactttgcaacctcagttttctcatctgtaaaatggaaaagataatcctaccaactcatagggctgtggtga

SEQ ID NO: 966985 - DNA, 120 bp, Artificial Sequence
  ENSG00000267519_75 (sequence is synthesized)
atggaaaagataatcctaccaactcatagggctgtggtgacgattaaatgacagcggtaacgcattcagccctgtgttccctcatggtgagctgtccatctctgttttgaaatatttaca

SEQ ID NO: 966986 - DNA, 120 bp, Artificial Sequence
  ENSG00000267519_76 (sequence is synthesized)
ctccagcctgggcaacagagaaagaccaaaaaaaaaaaaagggaaatatttacataattaccatggaatgaagccagcagtcgctcccatcccacccctcgcttggcgctgcacccagaa

SEQ ID NO: 966987 - DNA, 120 bp, Artificial Sequence
  ENSG00000267519_77 (sequence is synthesized)
ctgcacccagaaataaggccagacattttttttttttttttttttttttgcggaggaaacgaggttgagggtgtgagtggctctggagatgcaccccagtctcaaaataaaattaaaaag

SEQ ID NO: 966988 - DNA, 120 bp, Artificial Sequence
  ENSG00000267519_78 (sequence is synthesized)
aaaaatttctgttcaatctttgaaaaaaaaaaaggaaaaggacatgtaatacaccgttcaataaatagaaaaaaagttacaaaatgatgtggtattttgtccttaatatacaagaaggga

SEQ ID NO: 966989 - DNA, 120 bp, Artificial Sequence
  ENSG00000267519_79 (sequence is synthesized)
aaagatgtgggggtgacttgggggggtgatgttctcccttctcctccctgggtcaaggtgggggaaaggaaggatggccaaagagagagggcggcagggacttaggtgcagagagaaagg

SEQ ID NO: 966990 - DNA, 120 bp, Artificial Sequence
  ENSG00000267519_80 (sequence is synthesized)
caggtaagtgccgggaaaaatggaaacagagtaagatgaaggggcgaagcagaaagacaggaggcgaaagggtgaaaaagccagaaaaacaccaagatacaggtctctttcctttccaga

SEQ ID NO: 966991 - DNA, 120 bp, Artificial Sequence
  ENSG00000267519_81 (sequence is synthesized)
tcgggggtgggggtctccggctctctcgcgtctgtgtcccccaaccccaggttggaaggggcagtgtgagcctcgctcagttcctgagttgtacgtccagtgactagcaggtgagaagag

SEQ ID NO: 966992 - DNA, 120 bp, Artificial Sequence
  ENSG00000267519_82 (sequence is synthesized)
agggcagcgaggacttccccaaccctgagcccaccctgggaccctagtgcccaaggaaatgggggtcctggccggataggataagggggtgaggtatgaggctgaggcctgaggcctctt

SEQ ID NO: 966993 - DNA, 120 bp, Artificial Sequence
  ENSG00000267519_83 (sequence is synthesized)
caattccttcagtgggggtgagccaatggtcctggctgggcagccactttggaggtggcataatggggggccctgagcagtagggggtgggggaggacccttggccacccagggtggggt

SEQ ID NO: 966994 - DNA, 120 bp, Artificial Sequence
  ENSG00000267519_84 (sequence is synthesized)
tgggggaaaatgtgctacattgacttagagggtcgatttctggaaagtcctgcctcccagcctccctcctggagcccaagccagtctgggtaaggggagtttgcctattgcttttggggt

SEQ ID NO: 966995 - DNA, 120 bp, Artificial Sequence
  ENSG00000267519_85 (sequence is synthesized)
gcccaaagtggggtcataccagcagcccaagcacacaccccttccaggcttctgggtggcagtatggcttctgcttctggagtcttgcacacttgctcacagactcccaggcacacacgt

SEQ ID NO: 966996 - DNA, 120 bp, Artificial Sequence
  ENSG00000267519_86 (sequence is synthesized)
ggcaggatgctgctccccctgcccccatctccagccgggctccttccctgacttaataatactgaaatgccacgtgggcctaattggagagcaagggtgggggacgcaggggcgaggggg

SEQ ID NO: 966997 - DNA, 120 bp, Artificial Sequence
  ENSG00000267519_87 (sequence is synthesized)
atccccactcccacgcaccccactgtccctcaaccaaaacgctcccgcaccaaaagcatgagtttcttcttgcccttgtaggtctgtttgaggttctccaagaactgtgagaactggagg

SEQ ID NO: 966998 - DNA, 120 bp, Artificial Sequence
  ENSG00000267519_88 (sequence is synthesized)
tgcccgtcgggcgccagcaggaaggtctcccgggccttgcccaggaattcgatgaaatccccatagtgccgcgggctgatgtgcgtgaggcgcgagtggctggtggtgatgtaggcggtg

SEQ ID NO: 966999 - DNA, 120 bp, Artificial Sequence
  ENSG00000267519_89 (sequence is synthesized)
actgccgcgtccaggagctggcagagcggcgcccggtcggcacccagtggcttggcggcccggcgtgcccctaaggggcccagaccgggcgccgagagagtccagcggcgcagaatatcg

SEQ ID NO: 967000 - DNA, 120 bp, Artificial Sequence
  ENSG00000267519_90 (sequence is synthesized)
gacagcattggggcacagtggatgctgcgaatgatgagggggacgatggcagagagctcgtgccggcccagggagtggctgagagagcaggcccaaagcacgtcgttgacggcagggtgg

SEQ ID NO: 967001 - DNA, 120 bp, Artificial Sequence
  ENSG00000267519_91 (sequence is synthesized)
ctgtcctggttgaaggcgatgctgagctgcgccagggccagcgtcgccagcttgtaggcccggagcggcagcccgcggtgctccatatagcgggccacagtgaagaggtgggcgtggccc

SEQ ID NO: 967002 - DNA, 120 bp, Artificial Sequence
  ENSG00000267519_92 (sequence is synthesized)
aggccgccggccgccgcgtccagcacgatctggtaggccgcctcgaaggccgagtggttcttctcgcacagggtcagggcaggcaaggcgcagttctgagggtccttcatcgcgcactgc

SEQ ID NO: 967003 - DNA, 120 bp, Artificial Sequence
  ENSG00000267519_93 (sequence is synthesized)
aaggccagggtgcgggcgcaggcccagagctcctccctccgcgatgtgtccagctgcagtcgcagcagagtggcgtgtgtggtgcccgtcactgccacgatggtagccgcctccactggt

SEQ ID NO: 967004 - DNA, 120 bp, Artificial Sequence
  ENSG00000267519_94 (sequence is synthesized)
gtgaataaggaataccagttctgcatgatattcatcagggcttgcgggcctggtgggaggtgagggagggaaatccgtcaggagcgggggcagacacacgtacatgtatgcgtgggttaa

SEQ ID NO: 967005 - DNA, 120 bp, Artificial Sequence
  ENSG00000267519_95 (sequence is synthesized)
ccatgacactgccacctccacttccacctccacaccatgctgaacagaaacttcctttccaaatcatcagggcgcacctggactaggtgggaatcacgtgtgtagaaggctaagctttgg

SEQ ID NO: 967006 - DNA, 120 bp, Artificial Sequence
  ENSG00000267519_96 (sequence is synthesized)
agcctctttctgcaaccccctcaaccccctgcagccacattagcctggccagcctctaggcctttgtccagctccatgctggccagccattccctcccggccaagccctgagcacaggct

SEQ ID NO: 967007 - DNA, 81 bp, Artificial Sequence
  ENSG00000267519_97 (sequence is synthesized)
ggccagccattccctcccggccaagccctgagcacaggctggaatcggagaagagtctctgaagagtctctacttctcttt

SEQ ID NO: 967008 - DNA, 68 bp, Artificial Sequence
  ENSG00000267519_98 (sequence is synthesized)
tctttctttttgttaaacaattttttagagacagggtctcaccctgccactcaggctggagtgcagtg

SEQ ID NO: 967009 - DNA, 88 bp, Artificial Sequence
  ENSG00000267519_99 (sequence is synthesized)
gcacaatcacagctcactgcaacctcaatctcctgggctcaagtgattttcccacctcagccctccggatagcttctctctctctctc

SEQ ID NO: 967010 - DNA, 88 bp, Artificial Sequence
  ENSG00000267519_100 (sequence is synthesized)
tcagccctccggatagcttctctctctctctctctcttttttttttcccagaggaggttttcctctgttgcccaggctggagtgcagt

SEQ ID NO: 967011 - DNA, 120 bp, Artificial Sequence
  ENSG00000267519_101 (sequence is synthesized)
tagcgttgacctcctgggctcaagcaatctatcctcctgcttcagcctcccaagcagctggaactacaggcacttgccaccacgcccagctaatttttaattttttgtagagatggggtc

SEQ ID NO: 967012 - DNA, 120 bp, Artificial Sequence
  ENSG00000267519_102 (sequence is synthesized)
gcctggttctctcagtgcgctctgcagaaccagaacagcgaagtgggtggcaggtccccttaggggctctcaccaatctctgtggcacagctgaccagccagcgcaccatctccctccgc

SEQ ID NO: 967013 - DNA, 120 bp, Artificial Sequence
  ENSG00000267519_103 (sequence is synthesized)
cgccaggtcattacgttcagagtcatccgcatcacctgcaaggtaggggtggggagaagggggttagcctgagtcttgggctggcctatggaggggcgttgggagatggaggaccccaga

SEQ ID NO: 967014 - DNA, 120 bp, Artificial Sequence
  ENSG00000267519_104 (sequence is synthesized)
aacacttggaggttaaagctgatccaatgaacccgggtaagtgatctcaactttctgggcctcaattacctagaaaatggagataaaatagtatctgtctcataggattgttgttttttc

SEQ ID NO: 967015 - DNA, 61 bp, Artificial Sequence
  ENSG00000267519_105 (sequence is synthesized)
agataaaatagtatctgtctcataggattgttgttttttcaatggcatgcagtggtgcgat

SEQ ID NO: 967016 - DNA, 86 bp, Artificial Sequence
  ENSG00000267519_106 (sequence is synthesized)
gattgttgtgagaagtaaacaaaattgcgtaggtgaagctttctgcaaggtgcttattgcttgaaaatgctctcaggtaatgtcag

SEQ ID NO: 967017 - DNA, 120 bp, Artificial Sequence
  ENSG00000267519_107 (sequence is synthesized)
aaggtgcttattgcttgaaaatgctctcaggtaatgtcagctcttaatatcactgctgttgttgctgttcttctgaagtgagtcctcacagatcctaccccagatcccacctcatagatc

SEQ ID NO: 967018 - DNA, 120 bp, Artificial Sequence
  ENSG00000267519_108 (sequence is synthesized)
ctatgccggaacaaaccaacctgtcccttcgctcctgaaacctccatgcttcctgttggctcctctctcttgcctctaagtacctgctgtataagccccaccttcactaggtcccaccac

SEQ ID NO: 967019 - DNA, 120 bp, Artificial Sequence
  ENSG00000267519_109 (sequence is synthesized)
caatcagcagctcacgtgtttgcctctcccctgaggccccatccacaggtcctgtcctgcagaccctgccttctgtaagctcctacctcttgagtagcctctgaaagctccttgtcttgc

SEQ ID NO: 967020 - DNA, 120 bp, Artificial Sequence
  ENSG00000267519_110 (sequence is synthesized)
tccccacactacaacggctccaatcaggaggctgtccagggctgattctgcaccctgctggcccttgtttgttctagctgggaaggtccccagtttctttttttttcttttctttttttt

SEQ ID NO: 967021 - DNA, 86 bp, Artificial Sequence
  ENSG00000267519_111 (sequence is synthesized)
ggtctcactctgtcgccggggctgaagtgcagttgtggtctcttggctcactgtaacctacacctcctgggttcatgtgattctcc

SEQ ID NO: 967022 - DNA, 73 bp, Artificial Sequence
  ENSG00000267519_112 (sequence is synthesized)
tcagcctcccgagcagctgggactacacgcgtccaccaccatgcatggctgatttttgggagagacgggtttt

SEQ ID NO: 967023 - DNA, 120 bp, Artificial Sequence
  ENSG00000267519_113 (sequence is synthesized)
gtgctgggattacaggtgtgaaccacagggcctggccccaacttcttttttcttttctatttttttcttttagagttggggtcttcttgctctgttacctggagtacagtggcgcgatca

SEQ ID NO: 967024 - DNA, 88 bp, Artificial Sequence
  ENSG00000267519_114 (sequence is synthesized)
gtcttcttgctctgttacctggagtacagtggcgcgatcatagctcactgctgcagcctcaaactcctggcctcaagcgatcctctcg

SEQ ID NO: 967025 - DNA, 68 bp, Artificial Sequence
  ENSG00000267519_115 (sequence is synthesized)
ctcctggcccgcactgtgcccggccctattccttatcttcttagtgaacttctgccaccctttgaggc

SEQ ID NO: 967026 - DNA, 120 bp, Artificial Sequence
  ENSG00000267519_116 (sequence is synthesized)
ttccttatcttcttagtgaacttctgccaccctttgaggccccgccccttacctgtctatcctgcagaccccaccctcctccaggtcccatggcactcacaccctaccaatgacaccttt

SEQ ID NO: 967027 - DNA, 120 bp, Artificial Sequence
  ENSG00000267519_117 (sequence is synthesized)
ccagcaagctgcacccaagatttggccttgcaggaccaccctttgttcagcccctggggatgacccagacactcagttgcaggccctgcatacaggacttttttttttcttccccaagac

SEQ ID NO: 967028 - DNA, 69 bp, Artificial Sequence
  ENSG00000267519_118 (sequence is synthesized)
aggccctgcatacaggacttttttttttcttccccaagacggagtcttgctccgtccttcaggctggaa

SEQ ID NO: 967029 - DNA, 120 bp, Artificial Sequence
  ENSG00000267519_119 (sequence is synthesized)
gattacagatgtgagccaccacacccgggctcatacagggctttcaaccacagaccccacccctagagttggcatctcatcttcaagaccttccgccaggccagcccttcagtggtgaat

SEQ ID NO: 967030 - DNA, 120 bp, Artificial Sequence
  ENSG00000267519_120 (sequence is synthesized)
gaatccctctccttaggcggcaatcctcttcaggccctgcccccaaggaagctctttattgctaggctctgcctcaccctcagcttcaaactcacccacccatgatccttaaccaatagc

SEQ ID NO: 967031 - DNA, 120 bp, Artificial Sequence
  ENSG00000267519_121 (sequence is synthesized)
acatcactcccaggccccacccccaggctccgcttgcgatccatctgctggcttgcaggccctgcctctccgctccagtgacaactctcccctagacctcagtctcctccatagacggat

SEQ ID NO: 967032 - DNA, 120 bp, Artificial Sequence
  ENSG00000267519_122 (sequence is synthesized)
tctattaataattcataggcttcatccctactgggaaccccattcccacactcccatgacttacagaccttggccttctgtggccccgcccctaaaggtgaggttcacactcaggcccca

SEQ ID NO: 967033 - DNA, 120 bp, Artificial Sequence
  ENSG00000267519_123 (sequence is synthesized)
cctgcagaggtgtggcccaagtgaagaccccatccccagagacacgattcatccagtccccattcccaggggagtggctcactcatgccacgcccccaaggaagtggcccacactcaggc

SEQ ID NO: 967034 - DNA, 120 bp, Artificial Sequence
  ENSG00000267519_124 (sequence is synthesized)
cacgcccccagaggtgtgtctcactcacagtccccgccccaagagtggttctcgctcagtccccagccacagaggaatagctcacgcaaatgccgggcccccagcgaagtggctcacact

SEQ ID NO: 967035 - DNA, 120 bp, Artificial Sequence
  ENSG00000267519_125 (sequence is synthesized)
cagcccatgccccgggaggcgcagctcacagtcagtcctggccccgagccaccatcgccctcccgcatccacctggcagccctcacctgcagccccagctccagtgcgatgcccagcagc

SEQ ID NO: 967036 - DNA, 120 bp, Artificial Sequence
  ENSG00000267519_126 (sequence is synthesized)
gtggtgtctggtggggcgctgaccggggtggctgtcttgcaggcgtcctgcgccagcttaaagagcagggccggagagtggatgttctgctggatggagcccagtaccgtgtgcagccac

SEQ ID NO: 967037 - DNA, 120 bp, Artificial Sequence
  ENSG00000267519_127 (sequence is synthesized)
ttggggtctcctgggtgaagggcgggacagaggacaccatcggatacacctcagcaccagcctctgaccaccacccgacctgttcacacagatccttccacccaggggcacatgtgtgag

SEQ ID NO: 967038 - DNA, 120 bp, Artificial Sequence
  ENSG00000267519_128 (sequence is synthesized)
tgtggagggatgtgtactgggccatggttctgtgaagattcagacctcagtgcccctagcccttgccaattatctcctctctggccctttcctgttacagaaagccacctaggggccggg

SEQ ID NO: 967039 - DNA, 120 bp, Artificial Sequence
  ENSG00000267519_129 (sequence is synthesized)
caaaaaaaaaaaaaagaaaagaaaagccacctagggatcctatggacctctccctcatctcaagggcattggttgcacacccagaatgccagggttcaaatcctggtcctgccacccact

SEQ ID NO: 967040 - DNA, 120 bp, Artificial Sequence
  ENSG00000267519_130 (sequence is synthesized)
tcctggtcctgccacccactagctgtgtgaccctgagcaagtcacttcacctctctgtgccctggctgccccatctgtaaaatgggtaacactcaggcaatggaacccacctcacagggt

SEQ ID NO: 967041 - DNA, 120 bp, Artificial Sequence
  ENSG00000267519_131 (sequence is synthesized)
ggtaacactcaggcaatggaacccacctcacagggtggtggtgggcccatacttggcaaggccttaacatggcaaggagctgctcaaatgttagcttttattattattattattattatt

SEQ ID NO: 967042 - DNA, 64 bp, Artificial Sequence
  ENSG00000267519_132 (sequence is synthesized)
ggcctcggcctcccaaatcgctgggattacaggcgtgcaccactgtgcctggctaatttttgca

SEQ ID NO: 967043 - DNA, 68 bp, Artificial Sequence
  ENSG00000267519_133 (sequence is synthesized)
gaacttctggcctcaagtgatttgctggtcccgaactcctggcctcaagtgatttgcccgcctcagcc

SEQ ID NO: 967044 - DNA, 79 bp, Artificial Sequence
  ENSG00000267519_134 (sequence is synthesized)
ataattaggtttagatgaggtcatgaagttcaggtactcatgagagggttagtgaccttagaagaagatacactggaga

SEQ ID NO: 967045 - DNA, 120 bp, Artificial Sequence
  ENSG00000267519_135 (sequence is synthesized)
atgagagggttagtgaccttagaagaagatacactggagaaatttaacttctcctctctgtctctcctctctccctcttctctttcttctctctctcctctctggcacctgactcctctc

SEQ ID NO: 967046 - DNA, 120 bp, Artificial Sequence
  ENSG00000267519_136 (sequence is synthesized)
tctccctctctctctatccccccctactatctctcctttctccctctctctctctcccagcctcctctctctcactttcctctctactccccacttcactccccccaactctcaacaaag

SEQ ID NO: 967047 - DNA, 120 bp, Artificial Sequence
  ENSG00000267519_137 (sequence is synthesized)
caagaaggtggccgtctgtaagctgagaagagagccctcaccaggagctagccatactgacatagtgatcttagacttctagcctacagaaatgtgagaaaataaatttttgttgttgaa

SEQ ID NO: 967048 - DNA, 120 bp, Artificial Sequence
  ENSG00000242207_0 (sequence is synthesized)
ccttaagacccaagcaaagcaggcactgcgctctgactgccgtcttcctggttccccttccctctcctgccctgactttgcagctgcctctctgcaacaagagaggagtcaagaggacca

SEQ ID NO: 967049 - DNA, 120 bp, Artificial Sequence
  ENSG00000242207_1 (sequence is synthesized)
ctcagtttagggaagaagttagaggaagaagaacacttgggctgatggcttgtgctctacaaggcggccagacctttgcccagccctgcccgtttattgccgggtacttgctggaagggg

SEQ ID NO: 967050 - DNA, 120 bp, Artificial Sequence
  ENSG00000242207_2 (sequence is synthesized)
tcggtcttcctcggcgtggaagtgagagccacgcggcgtggcggagctccaccaccgtctccttatctctttaaagcctcaaaatcaaacaaaaccactactacccaggcctcaagtttc

SEQ ID NO: 967051 - DNA, 120 bp, Artificial Sequence
  ENSG00000242207_3 (sequence is synthesized)
cacagtttttgtctgctctggaccgtttactttttttgaaaaaagagaacttggtggaatccaaattctctactaggcctccgaaccaaaacgaaggaaaatccgttttcttcttgggct

SEQ ID NO: 967052 - DNA, 120 bp, Artificial Sequence
  ENSG00000242207_4 (sequence is synthesized)
gaccagccgcggccagacctttgcccagccctgcccgtttattgccgggtacttgctggaaggggacagaagataagactcggggtgactcccaaggcctgaagggggctgattgggccg

SEQ ID NO: 967053 - DNA, 120 bp, Artificial Sequence
  ENSG00000267425_0 (sequence is synthesized)
aattggcaaacattttctctaaagctcaacacagtaaatattttaagctttacagggccataccaaacaggtgctggaccagacctggactccctggggccacagagcttcatttgaact

SEQ ID NO: 967054 - DNA, 120 bp, Artificial Sequence
  ENSG00000267425_1 (sequence is synthesized)
aagtagaagactgctctggttagggaggcaatcggtaaagaaaatgaagcatccatctagcatcatcccactgggaggaaagaaggagaccaaaagaaggtaaacaatagcaaaaaaatc

SEQ ID NO: 967055 - DNA, 120 bp, Artificial Sequence
  ENSG00000267425_2 (sequence is synthesized)
gttgatggataaggaggaataaaactactccaattatctggaacttacactaaatgaaaagcaagtctccaagatagaagctgagcatgacaaacaaatgctgacaatatcaggtagtgc

SEQ ID NO: 967056 - DNA, 120 bp, Artificial Sequence
  ENSG00000267425_3 (sequence is synthesized)
ttcagttcaactatgagggattctttctcccacaacttccctactccaggaacttggaaagtggatcatctctgacagctaaattccaaaacaaacacttagcagattggaacataatta

SEQ ID NO: 967057 - DNA, 120 bp, Artificial Sequence
  ENSG00000282914_0 (sequence is synthesized)
ctgggaagtgcccaggaaagctgaggaagttgtgatcatacttagctctctcttttccctgggggagaaaccacaggctgagggaacctctctaggcatggagctgtgatggcctgcaga

SEQ ID NO: 967058 - DNA, 120 bp, Artificial Sequence
  ENSG00000282914_1 (sequence is synthesized)
atgctggaataagctaagaccttgagggactgttggaaagactctcctacctacaaatgctgccactgctggatgctgtcaccaggaccaaatcatgagccactggcagtaattctgcaa

SEQ ID NO: 967059 - DNA, 120 bp, Artificial Sequence
  ENSG00000282914_2 (sequence is synthesized)
cccccaacactggggaagccacacatttacaaataccccaaggacagatgaactcacccacagataacacctgcagccaaagcatgcactccccagctgcctgcctacagttgctccaac

SEQ ID NO: 967060 - DNA, 120 bp, Artificial Sequence
  ENSG00000282915_0 (sequence is synthesized)
ttgcaaacatttatttcttgatttaacccaccaccactatgaccaccgacatctaatcactaaaaattgggtaaatgactatcttacttgtttttatcaatctttcttagatctatatat

SEQ ID NO: 967061 - DNA, 73 bp, Artificial Sequence
  ENSG00000282915_1 (sequence is synthesized)
cactccttacgttttaagaagcacgagtgtcaattatctaaaggtaaattaggtatgattcagaggataacag

SEQ ID NO: 967062 - DNA, 120 bp, Artificial Sequence
  ENSG00000282916_0 (sequence is synthesized)
gagctcgtgggtctgcgggttcttgaagatgccggcctccgcccagccgcctgccacgaagagcaccgcgcagtcggcctgcaccgcggggatacacaaacacaccgggttgcgggaggg

SEQ ID NO: 967063 - DNA, 120 bp, Artificial Sequence
  ENSG00000282916_1 (sequence is synthesized)
ggcatcggactgactttgggaggttccgaatcccattgtaaagctggggaatgccctccagaactcagatggccaaatgggattcatggaccaccctagatgcggtgcatgggggtcctg

SEQ ID NO: 967064 - DNA, 120 bp, Artificial Sequence
  ENSG00000282916_2 (sequence is synthesized)
cttcccagttcctctcatttaatctcatctaaatcagcttttagtcccttctttctggaccaactgatctactagtctgagtgtaagaaaacctggtccctctaggcccccccaggacaa

SEQ ID NO: 967065 - DNA, 120 bp, Artificial Sequence
  ENSG00000282916_3 (sequence is synthesized)
caggatctgagcttcatgagagtgatgggactttcagtcctgtcctccctaattctttcaggattgatggatgatggccataggaatgtttctgaaggcatggactgctttacctgggaa

SEQ ID NO: 967066 - DNA, 120 bp, Artificial Sequence
  ENSG00000282916_4 (sequence is synthesized)
gtgcccctgatcatggtcatgatgaagtctctgtggcctggagcatcgatgataatgctgtaatccttttccttcccgtctccacatgtccagaagtttggtccccataaaattacagtg

SEQ ID NO: 967067 - DNA, 120 bp, Artificial Sequence
  ENSG00000282916_5 (sequence is synthesized)
tcacgcctgtaatctcagcactttgggagcctgaagcaggaggatcacttgaacttaggaaaagaaggccagcctgggcaatatgatttaacccatctctacaaaaaattaaaaatagag

SEQ ID NO: 967068 - DNA, 120 bp, Artificial Sequence
  ENSG00000282916_6 (sequence is synthesized)
atatgatttaacccatctctacaaaaaattaaaaatagagaaaagaaaaattagccaggcacagtagtgtgcacctgagggggctgaagtgggagaatcacttgagcctgggaagcagag

SEQ ID NO: 967069 - DNA, 120 bp, Artificial Sequence
  ENSG00000282916_7 (sequence is synthesized)
aaaagtatattcagcctcacccaccctccctttatccaatcacccagtcaaggaagaagtctctgacattgggcctaagggtaaggagtggcattttttaagctgaacaggttctcattt

SEQ ID NO: 967070 - DNA, 120 bp, Artificial Sequence
  ENSG00000282916_8 (sequence is synthesized)
cagatttggtgagaaccagaaggaggggcagtgcaggtagggctgggctcataaaagcaggaggcaaagagttcactctgttgacagttgttgtggttcttgttgatctctggatcagtt

SEQ ID NO: 967071 - DNA, 120 bp, Artificial Sequence
  ENSG00000282916_9 (sequence is synthesized)
ctgctgcttcttttttagaagtaggacttaaaggagcaagctgcagactacagagggtcaggatctcttgtactagaaatgggtcagaggtggggggatagaagttgattggatgaacag

SEQ ID NO: 967072 - DNA, 120 bp, Artificial Sequence
  ENSG00000282916_10 (sequence is synthesized)
gggctgtctaagctcccagtggtcaggggatggccaatgcaggagaaaggtcagggtcaggactgcttggaagtacccgatatagccaaggaattagtccaggagatgtgagcctgggca

SEQ ID NO: 967073 - DNA, 120 bp, Artificial Sequence
  ENSG00000282916_11 (sequence is synthesized)
aatcagttttacttttcagtttaacctttcatgtccctggctctgagctaggcaccgaagtgggaagaggcaatgcaggagcggtggtaggaggctgcccctacaagatgtgtgcaagat

SEQ ID NO: 967074 - DNA, 120 bp, Artificial Sequence
  ENSG00000282916_12 (sequence is synthesized)
gggaggtgacccaggcctgagtggggctgagggtagactactctgttagggattctggaattgatccttaattgaatccccaagaagtcctccactgctggcaaggtcaccaagtttgca

SEQ ID NO: 967075 - DNA, 120 bp, Artificial Sequence
  ENSG00000282916_13 (sequence is synthesized)
gcaaaagccagcaagaaatgaagcccaccctcctctctgcagtgtcctcagctcctccttcccccccaataactaaacattcaatgaatgtatgtatttcctaaataaagtggataaaac

SEQ ID NO: 967076 - DNA, 120 bp, Artificial Sequence
  ENSG00000282917_0 (sequence is synthesized)
agagctcagagcagaccaaacgccaatgcagaaggctcaagaaagaggcaaacagactagccactgctccaggatgactgtggctctttatgagtgaagagaaagggtggagactgaaga

SEQ ID NO: 967077 - DNA, 120 bp, Artificial Sequence
  ENSG00000282917_1 (sequence is synthesized)
cagaactggggacagtgacaggcttggggaagaacagctgattcagcagtcccaagcatctgaacacaaggtggacattctccagggtgacatcgcaaaatacatgggtgaagacaacct

SEQ ID NO: 967078 - DNA, 120 bp, Artificial Sequence
  ENSG00000282917_2 (sequence is synthesized)
agtggccgtgacttggagcacccttcctcacaatgaaggcattctgggccagcctgaaaaacagcatggaaataaatcacctaagtacaagggacctcggtgacaacgctgtgaacatct

SEQ ID NO: 967079 - DNA, 120 bp, Artificial Sequence
  ENSG00000282917_3 (sequence is synthesized)
caagtactttgtcacaactgtctccacaagttggtacatcttctgtacaaggcaaagaaaactctaaaaacatacaaaaagtcaatgttaataatgagacattattattaaacatcaaca

SEQ ID NO: 967080 - DNA, 120 bp, Artificial Sequence
  ENSG00000282917_4 (sequence is synthesized)
aagtgccatgttcttcaggctccctaaggaatgctagcactttcagactataaatttttgtatccacataatcattgggaaaaattaactttaatgaaaataatccctaatatttgtgaa

SEQ ID NO: 967081 - DNA, 120 bp, Artificial Sequence
  ENSG00000282917_5 (sequence is synthesized)
gtttatggtttttaaaaagaaatttgacacaagttactatcctcaagaaacacatttttatgggctatctacttcagaaatagttatctaaagaaatgagtaaagactacataaaccatt

SEQ ID NO: 967082 - DNA, 120 bp, Artificial Sequence
  ENSG00000282917_6 (sequence is synthesized)
ctccctttggaaactttcatgtctgggttgagaagttaacagaaaggcaaacagcctgaggtcaaagatgacacactgaggataacaaaatggaaagacaatctgagctcttgatgatgt

SEQ ID NO: 967083 - DNA, 120 bp, Artificial Sequence
  ENSG00000282917_7 (sequence is synthesized)
gtgactgaatgagccaaattaaacaactatagagctgttctacttccaatctaattatgtgagggataaatgttaatgcgctttttctttaggttttcatttagattttgtagtttctac

SEQ ID NO: 967084 - DNA, 120 bp, Artificial Sequence
  ENSG00000282917_8 (sequence is synthesized)
ggtacaaatcttatattcttttattgaatttcttaaacaaaatgttcttttcagactatataagtggaattgttttcttaatttcattttcagattgtttgtttccagtgtacagaaatt

SEQ ID NO: 967085 - DNA, 120 bp, Artificial Sequence
  ENSG00000282917_9 (sequence is synthesized)
aatgtaaaaatttgttttaaaaaacttgctctgaactaccccacaaagacaaaaagaaaggtttagtctttaaaacaccacctggctgacacttataatctcagcactttgggaggccga

SEQ ID NO: 967086 - DNA, 120 bp, Artificial Sequence
  ENSG00000282917_10 (sequence is synthesized)
agcctgggaaacatagggagagcccatctctacaaaaaatttttttaaatgagccaggcatggtgacaggtgcctgtattcccagctactgagacggctgaggcaggaggatcacttgag

SEQ ID NO: 967087 - DNA, 120 bp, Artificial Sequence
  ENSG00000282917_11 (sequence is synthesized)
ccactgcactccagcctgggcgacaggataaaaccacctctcttaaaaaactgtaacaactacaaaattataaaattcacctgtaacataaacatattgtgacaagtattagaagtagtc

SEQ ID NO: 967088 - DNA, 120 bp, Artificial Sequence
  ENSG00000282917_12 (sequence is synthesized)
ttgtgacaagtattagaagtagtcttatacatatgatgctgttatttgtggagagtcaaaaaagcttactcaaagtgccatcctactatgcctttatctcaaagcagcctaaaataaact

SEQ ID NO: 967089 - DNA, 120 bp, Artificial Sequence
  ENSG00000282917_13 (sequence is synthesized)
cacctataacctattacataataatgacaatagcacagcctcccctattgtcaaaccccaccagactggtacatttgttataactgatgtacttacattgacacatcataatcacccaaa

SEQ ID NO: 967090 - DNA, 120 bp, Artificial Sequence
  ENSG00000282917_14 (sequence is synthesized)
ggtcatagtttatataaaggttcactcatggtgttgtatattttataggtttggacaaatgtataatgacatatatccaccattatagtatcacacggaggagtttccctgccctgaaaa

SEQ ID NO: 967091 - DNA, 120 bp, Artificial Sequence
  ENSG00000282917_15 (sequence is synthesized)
tcttctatgtctctcctattcatctctctctctctccccaacccctggatgccattgatcaccacagtttggacctttccagaatgtcatatagttgggggcttaaattttgtagctttt

SEQ ID NO: 967092 - DNA, 120 bp, Artificial Sequence
  ENSG00000282917_16 (sequence is synthesized)
tcagactggcttctttcatttagtaatatgcacttaagtttcctggaggacgtcttttgaatgtcttttcatggcttgacagatcatttcctatataaatataaaaaaaaacaagtctta

SEQ ID NO: 967093 - DNA, 120 bp, Artificial Sequence
  ENSG00000203865_0 (sequence is synthesized)
tccttgcctgtgagatggcactgtgacggtgcccacctcgtggggtgtgtgagggccgagtgaaatcgtgcatttgcgctaacgatgagaaccactgcttgagggccttcctatttcttc

SEQ ID NO: 967094 - DNA, 120 bp, Artificial Sequence
  ENSG00000203865_1 (sequence is synthesized)
caccatgcatctggaaatgcccatgaccttcatcgcagcagcgtatgtgcgttggtcttctccagggatgccgaaagtagacatacagggagtcgcagtacggataccaccagtgccagc

SEQ ID NO: 967095 - DNA, 120 bp, Artificial Sequence
  ENSG00000203865_2 (sequence is synthesized)
ctgacctcacaagagacgtcttgtgtgactggccctgccgtcacagctgggccagtaaagtaccttccaggaggctccagttgctacctgactcacaaccttctaatcccatgatctttt

SEQ ID NO: 967096 - DNA, 120 bp, Artificial Sequence
  ENSG00000203865_3 (sequence is synthesized)
tgcagacaaatgtagagatcatcccaggggaaagtgccccaagaaaggagagtccaagaccacctgcccctcccagttctgcggctggagtgggtgggtgcagcaaccacagccccagtg

SEQ ID NO: 967097 - DNA, 120 bp, Artificial Sequence
  ENSG00000203865_4 (sequence is synthesized)
tacaggagtcaccactgtctcctcccgcattggcccagcttggaagtgcacagcaaccaagcatgaggactgagttaagcttttcggagaaaaaagacactatgatcatctggcagatca

SEQ ID NO: 967098 - DNA, 120 bp, Artificial Sequence
  ENSG00000203865_5 (sequence is synthesized)
cgatcactgtttggtgccagaggtaaggagtttgcttgttgtgtttgcttggaggcgacagttggcaatgacagcctgggagaagcaccggcagttaacagcactctgcaccactcatgg

SEQ ID NO: 967099 - DNA, 120 bp, Artificial Sequence
  ENSG00000203865_6 (sequence is synthesized)
ggcgcatcctcagggcctgggcctggcctccttgcctgtgagatggcactgtgacggtgcccacctcgtggggtgtgtgagggccgagtgaaatcgtgcatttgcgatgtctaggacaca

SEQ ID NO: 967100 - DNA, 120 bp, Artificial Sequence
  ENSG00000203865_7 (sequence is synthesized)
ctggatttgtacatctggggctcaggagaggaccagatcagagctggaaatcatgccaggaagagtatgaagcagggagagaaggtgtggaggcctccctgaggaaacgaggggtcgagc

SEQ ID NO: 967101 - DNA, 120 bp, Artificial Sequence
  ENSG00000203865_8 (sequence is synthesized)
aggtgaagagggggctgagagctaaggagtgcacagagacaatgacagaaagacgggaggtctggtttcaggaagggtgtgatggacagaagagatgcagcagaggtcaaggaaggacca

SEQ ID NO: 967102 - DNA, 120 bp, Artificial Sequence
  ENSG00000203865_9 (sequence is synthesized)
gtagcgcagagacgaatccgcgctcccccaggctgtcgcgcgagctccccggaagctcccacctgagcggcgcatcctcagggcctgggcctggcctccttgcctgtgagatggcactgt

SEQ ID NO: 967103 - DNA, 120 bp, Artificial Sequence
  ENSG00000203865_10 (sequence is synthesized)
gacggtgcccacctcgtggggtgtgtgagggccgagtgaaatcgtgcatttgcggtctgaaatgcagaagacagaagatgagctctggctcttcacctgcatggctggtggcagtgtggc

SEQ ID NO: 967104 - DNA, 120 bp, Artificial Sequence
  ENSG00000203865_11 (sequence is synthesized)
ctcagtcttctggggcttgaggagctctgacactggtcaggtcagaggtgcccactcacccactgctgcccgtagctgtcttccacatcgttgatccagcggtcatcccagtccactcgg

SEQ ID NO: 967105 - DNA, 120 bp, Artificial Sequence
  ENSG00000203865_12 (sequence is synthesized)
aggcccaacaggtgaattgggaggaagccgttctcagccagaatcacaaacttgccctcgccctccgtgtacccatcgatcttcagacctggtacttgttggtggagttgaagggtatct

SEQ ID NO: 967106 - DNA, 120 bp, Artificial Sequence
  ENSG00000203865_13 (sequence is synthesized)
cgacgattttggcgtatctttctctcatctccttcacggaaccacagcacagctctatgcactttaagagtgctgactcagaggcatctcctgcaactgcccgctgtgaacagagacatc

SEQ ID NO: 967107 - DNA, 120 bp, Artificial Sequence
  ENSG00000203865_14 (sequence is synthesized)
atctgtaaattatctccaaaaaatttcactgaggcatcactaaaaaacaggaaaaataactcaagacacattccaatcttgtcagaggtagcagaggatgggcaagaaggaagcagcggt

SEQ ID NO: 967108 - DNA, 120 bp, Artificial Sequence
  ENSG00000203865_15 (sequence is synthesized)
gttaagtgggacaggagtccctctagccccgaccactgctgttcacagtgcttcagactcaaaccccaacgtccttccccaccccacagcagcttctagtgaaagaagggtgtgggaagg

SEQ ID NO: 967109 - DNA, 120 bp, Artificial Sequence
  ENSG00000203865_16 (sequence is synthesized)
tgtcaccttccctagaagaggtattaacacacccttccaacctactgcagtctatttctatcttcccctggcctactgaaaagtctcaaagccaatgctattcccaactacctacttctg

SEQ ID NO: 967110 - DNA, 120 bp, Artificial Sequence
  ENSG00000203865_17 (sequence is synthesized)
gttacttatctgaaaataccaagtgagagattaaacatttatagcacctttcattaccgtagaattcgtaagaaaatgcttaaggtctcaggactggggacaagctgcctgtgtcaaggg

SEQ ID NO: 967111 - DNA, 120 bp, Artificial Sequence
  ENSG00000203865_18 (sequence is synthesized)
caaagtagaagactgtgcattctaatcataactgtgcaaaattaactgggcctgaaggatgtgaactgaaagctattaccaactccaacagtaataaaatcgaaccacgtaacattttag

SEQ ID NO: 967112 - DNA, 120 bp, Artificial Sequence
  ENSG00000203865_19 (sequence is synthesized)
ttaaagcccatgcttcagtgacacacatattttctatgatacatgatgacacacttatattttgacatactgaaagcattttcagttgtaaacaaattttatataggtaaaccttttaga

SEQ ID NO: 967113 - DNA, 120 bp, Artificial Sequence
  ENSG00000203865_20 (sequence is synthesized)
aaataagtgggggacattttaaataaaagccacttattttaataaaagccatttttaataaaagcagaatagggctgcttctccctccccgctttttagtaataatgccatcaacatggc

SEQ ID NO: 967114 - DNA, 120 bp, Artificial Sequence
  ENSG00000203865_21 (sequence is synthesized)
cgaactccagaaatacttggaatacagcttctgctacctttctggggttttttaatcaggaaagatttgatacttgtgggacctgatgctcaaagcctagaacatttccactttgaggta

SEQ ID NO: 967115 - DNA, 120 bp, Artificial Sequence
  ENSG00000203865_22 (sequence is synthesized)
aagaaaaacatgaaacatttatctcaagttttatcctcaagatacacaacattatcctcaaatcaacatcaattcaatgccaagaaaatctcctttgcagaataaatgaaccctatcctc

SEQ ID NO: 967116 - DNA, 120 bp, Artificial Sequence
  ENSG00000203865_23 (sequence is synthesized)
atcacagaaggcatctgagttacatccaagccatattccctttggcaacttagtttatacccacaactactacaggcagcttcacagagaatgtgggacccagagagcctcacatagctt

SEQ ID NO: 967117 - DNA, 120 bp, Artificial Sequence
  ENSG00000203865_24 (sequence is synthesized)
tcttctcctacaggactttgtacaattcatgatccttctgagactgcatcttcacttgggcagcatagtaaaatctcaatcatttcaaactgcatcagaattccacaggctaaggctggg

SEQ ID NO: 967118 - DNA, 120 bp, Artificial Sequence
  ENSG00000203865_25 (sequence is synthesized)
cttattttggcctggagcttatttttacatcattagtaaacaagctaagaaccaataagataagataagctgagctatttcaggaaaataaatggcttaaaggagttactggaatctact

SEQ ID NO: 967119 - DNA, 120 bp, Artificial Sequence
  ENSG00000203865_26 (sequence is synthesized)
gtatcctaatatgcaaatacgattatggagtcactgcagccctcagctctcactgtccactaggttaggtgataacatataaactcaagagtagtaaaagcagatgaattaggtttttca

SEQ ID NO: 967120 - DNA, 120 bp, Artificial Sequence
  ENSG00000203865_27 (sequence is synthesized)
ccaataaagactgtcttccgtctcctcccctcccactttggtcagatttttactgcatcttccctttttaatcaacctatatggagcagggggtcctataatacatcaggatctacaggc

SEQ ID NO: 967121 - DNA, 120 bp, Artificial Sequence
  ENSG00000203865_28 (sequence is synthesized)
aacacaatgtaagttacacacagcaaagtactgcacagaccactccaggtgttctacagtgaacagtcacacagaccacaaaggtaatttgctacttttaacactcaaatggcagttctc

SEQ ID NO: 967122 - DNA, 120 bp, Artificial Sequence
  ENSG00000203865_29 (sequence is synthesized)
atgtgctgtctacatccctccattagttaactcttgagcataccttaagaataggtaggttttcctggttagcctgaaacactgccctgttacaaagacctgcaattctggacagagcaa

SEQ ID NO: 967123 - DNA, 120 bp, Artificial Sequence
  ENSG00000203865_30 (sequence is synthesized)
gccaggtagctgaagtcttgtcaaaagagacacctgatggaggcaagaaaacacaacagaacaacaatgcattaacttcaaaggctgtgttctcagttctcctattaaagtcccatagaa

SEQ ID NO: 967124 - DNA, 120 bp, Artificial Sequence
  ENSG00000203865_31 (sequence is synthesized)
atctgcagtgatacatctcatttcccaattaatgaaaccaatcacattttaggcattcttcagtcacgtttgtagggcaatttaaagtttctactgacatgcaaaaaatcaatatcccat

SEQ ID NO: 967125 - DNA, 120 bp, Artificial Sequence
  ENSG00000203865_32 (sequence is synthesized)
aatactgattctgtgaagccgggattgggacacacactggatactggtcctgagaatttcttttcccaacgccagcctcatggatgctgggagcatagtgccagtgaatgaagacacagc

SEQ ID NO: 967126 - DNA, 120 bp, Artificial Sequence
  ENSG00000203865_33 (sequence is synthesized)
tcacacctcactactatcgatctgtgactgttgtgacactcaccatgtcagtgcccaagtcaatgcagaggatggtgacagtccccagtggtagtggaatgtttgcaataataaatatca

SEQ ID NO: 967127 - DNA, 120 bp, Artificial Sequence
  ENSG00000203865_34 (sequence is synthesized)
ggaacggggtgatctcgggaatgttactggttaaggtataagcaatggatttcttcaagttatcaaagatcagacgacctatgaaaaccaagattttttactgttagcttatgagacaag

SEQ ID NO: 967128 - DNA, 120 bp, Artificial Sequence
  ENSG00000203865_35 (sequence is synthesized)
cacactggaaactgaacatatccaagaagtatacagaaatggatgctaatgggcagtatctgaataagatcttggtgtacaccttaaatagctctcaccttcctctactccagtcacaat

SEQ ID NO: 967129 - DNA, 120 bp, Artificial Sequence
  ENSG00000203865_36 (sequence is synthesized)
tgaggcaaagttgtcatccagaagaatcatgtcagcagcttgcttggacacatctgagccagcaatccccatagcaaccccaatgtctgctttcttcaaagctggagagtcattcacacc

SEQ ID NO: 967130 - DNA, 120 bp, Artificial Sequence
  ENSG00000203865_37 (sequence is synthesized)
gtcaccagtcacagccacgatagcaccctaccccagaaaagggaaaacgggttaataccaatcacttttcctagcgatggaaatagtgcgatgcatgcccccactgagcactcattacag

SEQ ID NO: 967131 - DNA, 120 bp, Artificial Sequence
  ENSG00000203865_38 (sequence is synthesized)
acactgctcctttcctattgagactatttatgaagcctgagaaccgtcacaggcaagtattcacacaggccctacaccaaataacagaactgagaagtgacaacaaacatagcccccagc

SEQ ID NO: 967132 - DNA, 120 bp, Artificial Sequence
  ENSG00000203865_39 (sequence is synthesized)
attaacaagagctactcaaagtaatgactctggtgggtggcactccagaaaatgccattcctgtatgcacgccctgtagtctgaccactcacatctctattgcaaatactaggaccccat

SEQ ID NO: 967133 - DNA, 120 bp, Artificial Sequence
  ENSG00000203865_40 (sequence is synthesized)
ctatgcctatgagcttcctactggcctatttatactgagtctaatacagcgaggtatgcatccatccatcaccgttgctctgtttccactggaactccaatccctaaagccaatagtgcc

SEQ ID NO: 967134 - DNA, 120 bp, Artificial Sequence
  ENSG00000203865_41 (sequence is synthesized)
caaagcagcctgatccttgtgctggctgacctgtctttggcagccttccacaatgatgagcttctgctgaggggaggtcctggcaaacactatctcagtgtggtacttcaaaatgtcatc

SEQ ID NO: 967135 - DNA, 120 bp, Artificial Sequence
  ENSG00000203865_42 (sequence is synthesized)
cagctgctcggaggtcatgtcctttagatcactgccgtgtactacgcaggccttggcatccctagaattaggacaaaaaaaaaaaaaaagtcacgcatcacatcaccagcatgtgtccat

SEQ ID NO: 967136 - DNA, 120 bp, Artificial Sequence
  ENSG00000203865_43 (sequence is synthesized)
cacctcaagaggggatattcttatgcagatcactttgtaaacaaaacaaagaaggaattttccccagcacataaaagctattaagtgttcagtactttacaggttacagagcattttcat

SEQ ID NO: 967137 - DNA, 120 bp, Artificial Sequence
  ENSG00000203865_44 (sequence is synthesized)
atattttatctcatttgaggctcatgatgatctctaaggcaggcctgtctgtattcttcctttccctatctttattagacatgctgaaatataaccaagttttagctgggtgtgtggctc

SEQ ID NO: 967138 - DNA, 74 bp, Artificial Sequence
  ENSG00000203865_45 (sequence is synthesized)
ccaaaatggtggtctaaaaattcaaaaattagccgggcatggtggttggggcctgtaatcccagctacttggga

SEQ ID NO: 967139 - DNA, 120 bp, Artificial Sequence
  ENSG00000203865_46 (sequence is synthesized)
gactccatcaaagaaaaaaagaaatataaccaagttttagaaagtggcagagctgatacaagaccaaaccctcctctaaccgtaacatagggtgaaagggccctaaaccttaaaacaaaa

SEQ ID NO: 967140 - DNA, 120 bp, Artificial Sequence
  ENSG00000203865_47 (sequence is synthesized)
ccaatttgctattatctgttttacttcattgccaaatgtctcctgtgtttgcctgaatggcctaagtaattgtcccttccttattttattttgttagtgtggacctggaaagtgtcaaga

SEQ ID NO: 967141 - DNA, 120 bp, Artificial Sequence
  ENSG00000203865_48 (sequence is synthesized)
tgctaggtgctaggcagtagagctcagtggttaacagcatgaaatcagaagctagactgctgaatttactgcatgatttcaccagttctgaggtacttcaaaagcctcttgaatccttac

SEQ ID NO: 967142 - DNA, 120 bp, Artificial Sequence
  ENSG00000203865_49 (sequence is synthesized)
cttccctgctctgcaaataataggtcaccatatcaagctcttagaacagtaaataccatctaagtgctaattattatgacttgctcttacttaaaacccttcttaggaatgacaaggttg

SEQ ID NO: 967143 - DNA, 120 bp, Artificial Sequence
  ENSG00000203865_50 (sequence is synthesized)
ctttctggcagtgcaggtacatttcctactcagagcaagcctagatgcaaaccattatagaaccacgctgaagattttaaaccatcactatttgcttgttcacagcagactgtgatttga

SEQ ID NO: 967144 - DNA, 120 bp, Artificial Sequence
  ENSG00000203865_51 (sequence is synthesized)
gcttcctgccttacctggggttcacctggctgactgggatgttgaggcgggcagcaatgtcttccacggtctcattgccttctgagatgatgcccacacctttggcaatagctttagctg

SEQ ID NO: 967145 - DNA, 120 bp, Artificial Sequence
  ENSG00000203864_0 (sequence is synthesized)
ttgacaaagaacccaggaatggcgttaaagacttctttgggcagtgtccaatttatggagcaattttgttggccacatctacggagcttttgtgaaacttgcgtaggctcatggagtatc

SEQ ID NO: 967146 - DNA, 120 bp, Artificial Sequence
  ENSG00000203864_1 (sequence is synthesized)
ctccttccctggctcactgcctcaggaaaccaacctgaccctgaaggtatgtaagcctcaggccccacaaaagttggatccaaccttgagcagttgctttttcattgagtcctgtggagc

SEQ ID NO: 967147 - DNA, 120 bp, Artificial Sequence
  ENSG00000203864_2 (sequence is synthesized)
tcaggttcctgtggagggtagcagaagggaaacttcaattacagtataactggtctgatctgttctacatattaaagttcatgctattttctttgtgataaataaagactgttctgctgc

SEQ ID NO: 967148 - DNA, 120 bp, Artificial Sequence
  ENSG00000225613_0 (sequence is synthesized)
atgaggaaacccaggcctggagaggtcaagcaacttgctcaagtggcacagctggagagtggggagctgggacttgagcccaggtagtgtgtccccagcaccttcaactaaactccattc

SEQ ID NO: 967149 - DNA, 120 bp, Artificial Sequence
  ENSG00000225613_1 (sequence is synthesized)
caggatattgaagatgggaggtgtgagctgtgggagagagctgactaagaagaagaaactccccagaaaggtggcctgccagtcttcacgatgtatgggagcaggtgggaaaagagctgc

SEQ ID NO: 967150 - DNA, 120 bp, Artificial Sequence
  ENSG00000225613_2 (sequence is synthesized)
aagtgtttgcacttcatcattgaaattgttgaaactgctgatcaggaaacacagaatgagtttaaccagcgatgccaacttctgcaagatggactccagcttgggagctctgtatggaat

SEQ ID NO: 967151 - DNA, 120 bp, Artificial Sequence
  ENSG00000256377_0 (sequence is synthesized)
taggccttcacattcactcaccactcactgattcacccagagcaacttccagtcctgcaagccccatttgttagtggtactcagcagaacaacaactatatcgtataagctgcatcagag

SEQ ID NO: 967152 - DNA, 120 bp, Artificial Sequence
  ENSG00000256377_1 (sequence is synthesized)
tcgtataagctgcatcagagacaaatgaagatgaaaaaactatcctcctatataactaatctgtgctgtgccccaacaaagcctgctttaaatttccgtgccaattacaacccccattct

SEQ ID NO: 967153 - DNA, 120 bp, Artificial Sequence
  ENSG00000256377_2 (sequence is synthesized)
gtatcaggcaaggaagactcctctacccttgattctggattggaaaggtcacaaggcttagattccacaggaggaggtgaagacatctgcagagtctgtactgcgagctgaagctttatt

SEQ ID NO: 967154 - DNA, 120 bp, Artificial Sequence
  ENSG00000256377_3 (sequence is synthesized)
cagtctgcaccaaacaggaaggcttggtgcttggtcatcttggtggtggtcagccactcatcaactcccttttcttggcagaaagtgatgaaatggattaagaagatctcattcagagta

SEQ ID NO: 967155 - DNA, 120 bp, Artificial Sequence
  ENSG00000256377_4 (sequence is synthesized)
tttgcagctgggcagagtttacttggaggatattcaaatccaaggtactccttcagtttctgagctgcatggactatagcttcactgaccacctcacagacgacgggcacctctttgctg

SEQ ID NO: 967156 - DNA, 120 bp, Artificial Sequence
  ENSG00000256377_5 (sequence is synthesized)
tccttcagagccaactgttgcgatgctttctgccccattttctctgcatccaaatatcaaacatgtgaatctggttcagacgtacttctttttcaaagtaaaagttctgcagggaggcca

SEQ ID NO: 967157 - DNA, 120 bp, Artificial Sequence
  ENSG00000256377_6 (sequence is synthesized)
ggaaacacgttggtctgcgcactcagagccgagtcaaatgtgcaggaagattcccccaaactgaaagaagtaatgaaaagaaaacaaaaaaaatccttaaaaatcgagtgaatcagttcg

SEQ ID NO: 967158 - DNA, 120 bp, Artificial Sequence
  ENSG00000256377_7 (sequence is synthesized)
atataaaccttgcccacctctctcagcccgtctttcttactcagacaatttctgagcagctctttgatgaacacacaatcttcagtttccaggacaaactgagccacagccttccctcct

SEQ ID NO: 967159 - DNA, 120 bp, Artificial Sequence
  ENSG00000256377_8 (sequence is synthesized)
ggcagatggctcctcaccatctgacttttgacactgtccaggacaactcccctgatgtctttaggctttcctggcataccaaagatgataaacagacccaggcaatcctctcctattaag

SEQ ID NO: 967160 - DNA, 120 bp, Artificial Sequence
  ENSG00000256377_9 (sequence is synthesized)
ttacagaattcttccagcttatcaaatctacttttcttccaggaagactcctctacccttgattctggattggaaaggtcacaaggcttagattccacaggaggaggtgaagacatctgc

SEQ ID NO: 967161 - DNA, 120 bp, Artificial Sequence
  ENSG00000256377_10 (sequence is synthesized)
agtgtcaggggcgggcctggggccgctaagcgcaggctccctgggctggcaccgccctaggctggagaaagaggaaacacgttggtctgcgcactcagagccgagtcaaatgtgcaggaa

SEQ ID NO: 967162 - DNA, 120 bp, Artificial Sequence
  ENSG00000256377_11 (sequence is synthesized)
gattcccccaaactgaaagaaggtcaacagcaaatttgaggcagtggatatgaggatagaggagacactcctgaagacttcactttctccatttctgtacttgaatttttacaccaagca

SEQ ID NO: 967163 - DNA, 120 bp, Artificial Sequence
  ENSG00000256379_0 (sequence is synthesized)
atgctcctggtgctcatcccactgctggggatacattttgtcctgagaactgtcagagcccagtcagtgacccagcctgacatccgcatcactgtctctgaaggagcctcactggagttg

SEQ ID NO: 967164 - DNA, 120 bp, Artificial Sequence
  ENSG00000256379_1 (sequence is synthesized)
tctggttcaaggcattgaaggctttgaagctgaatttaagaggagtcaatcttccttcaacctgaggagaccctctgtgcattggagtgatgctgctgagtacttctgtgctgcaggtac

SEQ ID NO: 967165 - DNA, 80 bp, Artificial Sequence
  ENSG00000230452_0 (sequence is synthesized)
gcctctgcgcggcgctcgcccgggactgggacgcagagccgcggacggctttggggacgccagggctccggacttccccg

SEQ ID NO: 967166 - DNA, 120 bp, Artificial Sequence
  ENSG00000230452_1 (sequence is synthesized)
gcgcctgcaggatattatcagccaagctagaacacaaggcagcccaccaacccagcacagatttgaacaggcagctgaggagagagcctgggatgccagctctgaagtgttcaccgctag

SEQ ID NO: 967167 - DNA, 84 bp, Artificial Sequence
  ENSG00000230452_2 (sequence is synthesized)
agagagcctgggatgccagctctgaagtgttcaccgctagaagtgttcccttgtcaaagaaagaagccatcccttgtcagtaga

SEQ ID NO: 967168 - DNA, 120 bp, Artificial Sequence
  ENSG00000273305_0 (sequence is synthesized)
tgttagctgtgttctcaccctagaaatatacttatggtctcactgatacttgcagtagaagtaataatataaagtctgatcagggatcagggcctcaccatatagtgatagtagctttca

SEQ ID NO: 967169 - DNA, 120 bp, Artificial Sequence
  ENSG00000273305_1 (sequence is synthesized)
gacatcttcacagccagttccgaagccactctgtgtgtcccagagaagaatgagtttggctccttgtacctctttgtattgaatctctgaaaaatcacagcccttttgaaaaggttgtat

SEQ ID NO: 967170 - DNA, 120 bp, Artificial Sequence
  ENSG00000273305_2 (sequence is synthesized)
ccattagggttcttgattaggtttcaccagaggagaaaaaatgattgattcgacaccttggctaatttccataaataaactttaaacttcctctcatcaagaaccactgagtttacaaca

SEQ ID NO: 967171 - DNA, 120 bp, Artificial Sequence
  ENSG00000273305_3 (sequence is synthesized)
aaagaaccctcaaataccaaatttgtagataatttttggggtactttattttactcatcaaaagatgagaaagaggataccatcaatttatgattttaataaatgtcttcaaaagtctgg

SEQ ID NO: 967172 - DNA, 120 bp, Artificial Sequence
  ENSG00000228372_0 (sequence is synthesized)
gcatttgcagctttatactgtggtgctgggggagagagggctgtgtgttccagaaggctgataccatggaagacatcaccttggcttcctggctgtctggttagtgatttgagcaatgag

SEQ ID NO: 967173 - DNA, 120 bp, Artificial Sequence
  ENSG00000228372_1 (sequence is synthesized)
aggcagcagctagaaatgaaagagtagaagaagagagtgtctcctgacactgtgtgcatggtctccagtcagcctctgattcctccactttcctcctgaatttcttccttgtgagtgtca

SEQ ID NO: 967174 - DNA, 120 bp, Artificial Sequence
  ENSG00000228372_2 (sequence is synthesized)
cttctggaaacaaaagtcaagttctctaggtgaacactgagtagccccaaccttccagtgaatttgaagtgtaggaagttttcctcgtttaaactcggcacagcctccaatccctgggaa

SEQ ID NO: 967175 - DNA, 120 bp, Artificial Sequence
  ENSG00000228372_3 (sequence is synthesized)
ccaagtgaagtcatagtcactatggtgactcacaattgtcctcagaacctagtgccaacagtctgcaagattcaaacactggccaccatgcctggcttccttctggttcaagcctgaata

SEQ ID NO: 967176 - DNA, 120 bp, Artificial Sequence
  ENSG00000228372_4 (sequence is synthesized)
aggtccctcttctgtgctgtcttcctgaagccatctgtggagtcaagcagtcatggctcagggacactctgaagtaggtcccagcacatctgcgtggagcatcaggaggaaggtggatga

SEQ ID NO: 967177 - DNA, 120 bp, Artificial Sequence
  ENSG00000228372_5 (sequence is synthesized)
atacttaagacccagcctggcctctaaatcggtgctgagcgttttactcagtagacagcttgggaatcatagaaacgatgtggatctgacagagtggctgtggacactgaagcaagccat

SEQ ID NO: 967178 - DNA, 120 bp, Artificial Sequence
  ENSG00000228372_6 (sequence is synthesized)
accagggtggacctggcctttgccgacacgccacacaatcaacccacctctgccccctggggaggatagaaaatccaagaaaatggtgtggatcaataaatccttcccctgatgcaacca

SEQ ID NO: 967179 - DNA, 120 bp, Artificial Sequence
  ENSG00000228372_7 (sequence is synthesized)
acctactgccctccgagaaggtgtttactaacgttgtagagtctggggatgttggagacacgaggggccctgcttagagaagctggaagggcagctgagtggaacatggagaggccctgc

SEQ ID NO: 967180 - DNA, 120 bp, Artificial Sequence
  ENSG00000228372_8 (sequence is synthesized)
aaccctaaatttctagggggaggggactttcaggagcccacttagaggtcttgatttgtctcccttgaagtttgggggagagcatgggtagaaattgaaatcaaataaatttaaaatgag

SEQ ID NO: 967181 - DNA, 120 bp, Artificial Sequence
  ENSG00000228379_0 (sequence is synthesized)
acaggaagaaagtggtggagtcagaggtcacaatccaaagcaaggtgacagtctcttgaagaagacaccctgagtgctgaattaaggggctaaataacagtgctatagtggtttcataat

SEQ ID NO: 967182 - DNA, 120 bp, Artificial Sequence
  ENSG00000228379_1 (sequence is synthesized)
ccagcaatttggcaagccaagctttgatggctctggcagaaagccttcctgttccaaactcaccacttatcatcatagtacccgcgttcaggcattaagaagaaaagagcatccaatccc

SEQ ID NO: 967183 - DNA, 120 bp, Artificial Sequence; identical to SEQ ID NO: 897394
  ENSG00000228379_2 (sequence is synthesized)

SEQ ID NO: 967184 - DNA, 120 bp, Artificial Sequence
  ENSG00000253427_0 (sequence is synthesized)
agataagagaataattaacaatgaagagaggcctttgcttgaagacaacttgagtaagaactttcacgggctcggggtatggatttgagagaacaaaagatgggactttctcctccttgc

SEQ ID NO: 967185 - DNA, 120 bp, Artificial Sequence
  ENSG00000253427_1 (sequence is synthesized)
ctggaactggtatactataatcttcctggaataagaatatggattacacaaagtttatactcaataaatacttgagaagggaagaaagggactaagggaggagagaagagaaagaggagg

SEQ ID NO: 967186 - DNA, 120 bp, Artificial Sequence
  ENSG00000253427_2 (sequence is synthesized)
aaaaagaagaaaataggtttaaaggaaagaaaggaagagatggaaaaaaagtttctcacaaacacagaggctccagctctgagttgaggcaccagttgagaacaataggaaaaagcaagt

SEQ ID NO: 967187 - DNA, 120 bp, Artificial Sequence
  ENSG00000235139_0 (sequence is synthesized)
actttctttttaaatgtttatggtagaagaacatcaagtatagttgtcaacagacttcttaatattactggttgtgcctgtgcctccaaagcatggatttgatagctccaatattgtaat

SEQ ID NO: 967188 - DNA, 120 bp, Artificial Sequence
  ENSG00000235139_1 (sequence is synthesized)
ctaaatttcctggcaatgcccccactgctggatagattgctgttgacagcttttgaccagagggagccattagattttgctggctagcaaacaattacagctttgatatgagctacaagg

SEQ ID NO: 967189 - DNA, 120 bp, Artificial Sequence
  ENSG00000235139_2 (sequence is synthesized)
ctctacctctcccctgagtattagaagtctgaaaagaagagctgtctccatgaagatgggccaaatgccctccctcctgtggctgattgtgctacatcatcccaacatgataaaccagaa

SEQ ID NO: 967190 - DNA, 120 bp, Artificial Sequence
  ENSG00000235139_3 (sequence is synthesized)
atctttgagtgagtttaacttcctatccgtccctgatcctgcaacacccaactagtcatataatttgtgcattacttatatccatcccctagccaacctgttgaggttttgtaacaaact

SEQ ID NO: 967191 - DNA, 120 bp, Artificial Sequence
  ENSG00000235139_4 (sequence is synthesized)
ctttgcccaaggcctgtccccttaaaaatctgtgacagtattttcaaactggtacttctgcaacatgtgcttaactatttctttctttttcataaaaccactgtcctctttttcacagca

SEQ ID NO: 967192 - DNA, 120 bp, Artificial Sequence
  ENSG00000235139_5 (sequence is synthesized)
ttgtgaagtcagcatgtgatggtcataagaacacaagacttggggaaggtgacaagccagggtttatattgatgctctccattgttagctacatagtcacagaaagtagctgactatgtt

SEQ ID NO: 967193 - DNA, 120 bp, Artificial Sequence
  ENSG00000235139_6 (sequence is synthesized)
tgaaaggcaggtattaaaaacattactttaggggaaagaggtatataggttttacgtgtcaccacagaaggcaaaactaggacttcctgatagatatgataggagtatatattttcaacg

SEQ ID NO: 967194 - DNA, 120 bp, Artificial Sequence
  ENSG00000235139_7 (sequence is synthesized)
taatacactgaaaaatcttcattgaagcaacttcaaaatgaaatttaatgttttatgaaacacaatttcttcatccttaaatgtattttagtagagaaaatgtgactacgagttaaagaa

SEQ ID NO: 967195 - DNA, 120 bp, Artificial Sequence
  ENSG00000235139_8 (sequence is synthesized)
agaaatgcatgtatcagatgagaaagaagggaggttgcatgaggaagcagcaaaagatgtttccaatctgagattttcaaattctctagttttagtttaattgaattggcttaaattaaa

SEQ ID NO: 967196 - DNA, 120 bp, Artificial Sequence
  ENSG00000235139_9 (sequence is synthesized)
attggcttaaattaaactctcattcaagtatattttatacttgaatttcaggactatattcgtttatagaaacaaagtgtactaaatgtaaaacttctttatcaaatggatatatactat

SEQ ID NO: 967197 - DNA, 120 bp, Artificial Sequence
  ENSG00000235139_10 (sequence is synthesized)
ttaatttgtgtagaatttgtacttggatttagggatgtatgagccaatattatgtttaattctttagtggttgagaaaattttaatacatttcttggggaatctatacgcatgtacatac

SEQ ID NO: 967198 - DNA, 120 bp, Artificial Sequence
  ENSG00000235139_11 (sequence is synthesized)
acaacagattttgtgataattctgtacaactatctactgctctacttttctcattgttcccaaatactgaaaaattcagaacattatattttctttgaaatgaatagattatttatcaaa

SEQ ID NO: 967199 - DNA, 120 bp, Artificial Sequence
  ENSG00000235139_12 (sequence is synthesized)
tatgtttttcagaatctaaacaatttttgtccttgaaaaaatttgttgttgttgttttgaaataatgtttttgtttcatttaggcctaaatgtaaggagataaattgctacaaacgctaa

SEQ ID NO: 967200 - DNA, 120 bp, Artificial Sequence
  ENSG00000235139_13 (sequence is synthesized)
tggtcttttttatgatgtgaatacctgtccgtgtgattgagaccaccaaccaatttcctataaaccatcaagcaacatcatgtgttaacaattttcggttgcttttaatctggtttggat

SEQ ID NO: 967201 - DNA, 120 bp, Artificial Sequence
  ENSG00000235139_14 (sequence is synthesized)
tcaaaatggtaaaacagaggtgaaaggtcggatttaaaaaaaaaaagaagaaattctcctgggctagccagccttttgaattttctgaatttaagttaattatatcattagaatttaatg

SEQ ID NO: 967202 - DNA, 120 bp, Artificial Sequence
  ENSG00000235139_15 (sequence is synthesized)
aaattatcaacatgttcaccttcatttcacagtaacacttccctgttcagattagaatcaatcttttaatgtttatctaggtgttgataaagagaactacagagcacctagtgctttttt

SEQ ID NO: 967203 - DNA, 120 bp, Artificial Sequence
  ENSG00000235139_16 (sequence is synthesized)
aagtgagaccataatttaagatttggtgagggaaatgttttttttaatggtaaatgaacaatatttttgttatgttcttttggaatttgcatttaaaatttactcactggttaaatattc

SEQ ID NO: 967204 - DNA, 120 bp, Artificial Sequence
  ENSG00000235139_17 (sequence is synthesized)
attcatctcaatgctgcagtgttaatttttgacctgagtgttattatatttttatcacgcttatttgtaaaattaagaaaatatttaatattaagtagtttaataaaatgactatttctt

SEQ ID NO: 967205 - DNA, 120 bp, Artificial Sequence
  ENSG00000235139_18 (sequence is synthesized)
ccaatataaatataagataaatatgtcttctaaactttcatatatggataaccttttgaacttagattccaaaaagtgaggataaatttataactatattacaggtttcatacttcacat

SEQ ID NO: 967206 - DNA, 120 bp, Artificial Sequence
  ENSG00000235139_19 (sequence is synthesized)
attattagtgtttttagattatcttaccaaaatagatgattctgtgaagggcttaatggctccagcttaactttatgaacttagtcacttttaaaaaaaaaatttaaaaatttttagtca

SEQ ID NO: 967207 - DNA, 120 bp, Artificial Sequence
  ENSG00000235139_20 (sequence is synthesized)
gtcacatttttattattgtatgttgctttctcttgtcattttaaaatttatttattaaataacagaaaagtttagataaatattaatggaatgtgacataaaagtgatcaagatgaaaga

SEQ ID NO: 967208 - DNA, 120 bp, Artificial Sequence
  ENSG00000235139_21 (sequence is synthesized)
atgaaagataacagtatttgtaacatttgtttatttttcagatgatactaaatgaagtaattaattacagggatataaatttcaaaaaaaatattaaataggctcttggattttttacaa

SEQ ID NO: 967209 - DNA, 120 bp, Artificial Sequence
  ENSG00000235139_22 (sequence is synthesized)
cagtaatgaaatgtgaacactttttaaaaattttaaatggcaatttgataaaaaatgcattggtaaagagactatacaaatcagaatacacctcaaaagaaggacaaccataagtatttc

SEQ ID NO: 967210 - DNA, 120 bp, Artificial Sequence
  ENSG00000235139_23 (sequence is synthesized)
tttcatgatttaataaaaatataagttgaaatacttaaatcttaaaattaaaaacaacttataatcaactatgatcaattgtgatcattctcttctactaagatgataaaggtgaccttt

SEQ ID NO: 967211 - DNA, 120 bp, Artificial Sequence
  ENSG00000235139_24 (sequence is synthesized)
gttttacagctgttaaatatttgtatgtttggcattttttttctcttcaaaaaatcctttaacacccaaagttgtatttataattttatcctcgctttatcttaaagaggataaaaacat

SEQ ID NO: 967212 - DNA, 120 bp, Artificial Sequence
  ENSG00000235139_25 (sequence is synthesized)
tttttaagcttcaggctccacaaaacttagatcatctcctttgttcaaagtaatactggttaagaaatatttaaaattcactcagatgacgaatggtttaaatttctaaacaagaaggaa

SEQ ID NO: 967213 - DNA, 120 bp, Artificial Sequence
  ENSG00000235139_26 (sequence is synthesized)
ttacaatcactttggctttgttttacattcttcctccccttccattttcatctctgcgcagtgctaagctgtctaatgcaaagccttctctaactgtgcaatcagaaaaaggtttgcata

SEQ ID NO: 967214 - DNA, 120 bp, Artificial Sequence
  ENSG00000235139_27 (sequence is synthesized)
tgtggaatgagaaagttcataaataccaacaaaatgtctcagcccaatttctgagacaagagattcttatgatagtcattatttcctatttattttattccttcaatgacacattgttta

SEQ ID NO: 967215 - DNA, 120 bp, Artificial Sequence
  ENSG00000235139_28 (sequence is synthesized)
tcaatataactaacttgaaacacaatttcaactctgccaactgacttttgctttggaagataaattaatctgtaattaacagaaaatccaaaataagtgtggcttaagcaatagaaaagt

SEQ ID NO: 967216 - DNA, 120 bp, Artificial Sequence
  ENSG00000235139_29 (sequence is synthesized)
ttataacattctgaattaattgtaagcagtctaacactggtcttgaagccccacattatcaggaatgccagctctttctccttttatgatctgttgatcacaatatacagtttctacatc

SEQ ID NO: 967217 - DNA, 120 bp, Artificial Sequence
  ENSG00000235139_30 (sequence is synthesized)
attttctaaggcagctcctcaagtaaatgcctgaagtaagaaaaaacatggtagtaacagattcctcctttaagacacttcccggatattccacaaggcacttctacttataggtcattg

SEQ ID NO: 967218 - DNA, 120 bp, Artificial Sequence
  ENSG00000235139_31 (sequence is synthesized)
gtcagaatcgtgttacatggaaaatgaattatttatcctgagtgtcccagggcatagctaacctccagcggttatataagatgtccatgccgtataaactacgttatgtttgtaactacc

SEQ ID NO: 967219 - DNA, 120 bp, Artificial Sequence
  ENSG00000235139_32 (sequence is synthesized)
gttttccagttcattatctttattgtggctatctaataatttgaaagtaccatgctcaattcttgttactgcacagtttccatttgtatagaaatgaataaattattggtgtcattcaca

SEQ ID NO: 967220 - DNA, 120 bp, Artificial Sequence
  ENSG00000235139_33 (sequence is synthesized)
gtaagcatgcaaaaatatgtaaactgctcttaccaaagcaatctgaaagcataatttttgtgacaagaataataactgtgtgagaaataaaagcattaatttttcagtgtttccaattca

SEQ ID NO: 967221 - DNA, 120 bp, Artificial Sequence
  ENSG00000286222_0 (sequence is synthesized)
agaatcactgagaaggaagagagagaaaaggcagagtgagaatgacaggcttttacatacactttaaagtcaacgtcatttttgatttagttcatcagcctgaaaggcatgcatacacat

SEQ ID NO: 967222 - DNA, 120 bp, Artificial Sequence
  ENSG00000286222_1 (sequence is synthesized)
cacaagtggaagcaaaaaggtgaaggctgggagacatttcctagtagggaagaagataaagaggaaacaaggaactgcatctgggcttgctgagatttcaggccaaggagtgcctgcata

SEQ ID NO: 967223 - DNA, 120 bp, Artificial Sequence
  ENSG00000286222_2 (sequence is synthesized)
atagaccacttaaaactcctggaattgtagtgagctcattttgacagatggttatgaagctgttggaaatggtttgctgagatgagtgtggaattccaaagcactgcttgcttgctgaat

SEQ ID NO: 967224 - DNA, 120 bp, Artificial Sequence
  ENSG00000286222_3 (sequence is synthesized)
caaagcactgcttgcttgctgaattccaatggatggtgaacagcccgctttggaaagggtcttactctgttgcccagtctggaatgcagcaatgtgatctcagctcactgcaacttctgc

SEQ ID NO: 967225 - DNA, 120 bp, Artificial Sequence
  ENSG00000286222_4 (sequence is synthesized)
gcctcagaacccaagtagctgggaataaaggagtgcaccatcacacccagctaactgttgtatattttgtagagatgggattcaccatgttactcaagctcatctggaactcctgagctc

SEQ ID NO: 967226 - DNA, 120 bp, Artificial Sequence
  ENSG00000286222_5 (sequence is synthesized)
actacatttaaaaataataaagtaatgtattatttctgtttagaatttatagaaagaaatctttctttccttcaaggaactttaaagttcttctagctctttagattattagaggtaagc

SEQ ID NO: 967227 - DNA, 120 bp, Artificial Sequence
  ENSG00000286222_6 (sequence is synthesized)
aaaaccaatccaatttcaaatgactggtgtggtctatcattttttggagtcttgacaaaggtaacttaggaattttaaatagatagagctaatgatgaattgttgaaaatgcttaggaaa

SEQ ID NO: 967228 - DNA, 120 bp, Artificial Sequence
  ENSG00000286222_7 (sequence is synthesized)
taaaatgactatttatagaaccaaatacaagccttccattagaaactaaataaatcaatggttttacatatatatatatgtacacacacatgcacacatgtaaaaccaatgagttatacg

SEQ ID NO: 967229 - DNA, 120 bp, Artificial Sequence
  ENSG00000286222_8 (sequence is synthesized)
cacacacacacacacatgtatatatgtaaaacccaaagtaaaacaaacagtaaatacgtgaaaataatagcaaatatatatgtgtgttatgtatattaatgtctttaagtccaccaacac

SEQ ID NO: 967230 - DNA, 120 bp, Artificial Sequence
  ENSG00000286222_9 (sequence is synthesized)
cactatatattttgtgcagttaagaaatgttctttaagcacacgaccagttttttaacacaatttactatttatgcagaatagcaaatatagtatgaaacctagcaatataagcatttat

SEQ ID NO: 967231 - DNA, 120 bp, Artificial Sequence
  ENSG00000286222_10 (sequence is synthesized)
gtgaaatttggctccatgctaaatctgacttcatgcttaactatattaaaacaaaatttccaaaagtcaatgtatttttgtaatattttatattttatctttattaagactaagagattt

SEQ ID NO: 967232 - DNA, 120 bp, Artificial Sequence
  ENSG00000246451_0 (sequence is synthesized)
cttattgtcattttttaaaaataaaaattcatctatttctaaccatatattccattccccaataatcctaggtaagaatttagtgtcttcgaaacgtgtagaaatcttaacatgggagca

SEQ ID NO: 967233 - DNA, 120 bp, Artificial Sequence
  ENSG00000246451_1 (sequence is synthesized)
gtgtgaaaagaatggcaagacggagagaggctgcttcagaaggccccagcagagctggcgacctgcagacagacaaaggtggtgcagctgggaggcagaccccgggctccacctaggata

SEQ ID NO: 967234 - DNA, 120 bp, Artificial Sequence
  ENSG00000246451_2 (sequence is synthesized)
gaggatgtgtgatgtggctctgtgtgtctttacagaggatgggaccactgtaaagacaactgctaaatgatgagacagcccaaggggctcccacatcccaacagggacctggtgctggtg

SEQ ID NO: 967235 - DNA, 120 bp, Artificial Sequence
  ENSG00000246451_3 (sequence is synthesized)
gctgacacatgcacatcacaccatgaacatgaagccacacggacagcagttatagaagacccagttttacccagaaaaggatttctgtgcacaatgcagttgcattttcagaggcaagac

SEQ ID NO: 967236 - DNA, 120 bp, Artificial Sequence
  ENSG00000246451_4 (sequence is synthesized)
cgctgtcaagtagtttaatcatagtccctaccgtgtgtacctaaagaagagaactgtccttccctggacaaaccacccaccaggtcgagactccgatccggacgctccctgcacattacc

SEQ ID NO: 967237 - DNA, 120 bp, Artificial Sequence
  ENSG00000246451_5 (sequence is synthesized)
agggtctgtcaccacccgctttgcttctcagttctgtgtgacaccaacgcccagggcccacaggggacgattatcattaaccagtttgtcctttctttgaccacataactctttgttttc

SEQ ID NO: 967238 - DNA, 120 bp, Artificial Sequence
  ENSG00000246451_6 (sequence is synthesized)
aatgttacttatgaatattgagaaaaactgagccgaatatctggtgtatgtggttattataacttaatcaaaagctgtcacattcattcctggcagtcacttctgctgaagctgtaactt

SEQ ID NO: 967239 - DNA, 120 bp, Artificial Sequence
  ENSG00000246451_7 (sequence is synthesized)
ttctgctgaagctgtaacttcccaacagggaggcacaatgtttttccctatggtagtagttttcaaccttttaaaaagcattaaaatgccttctaggctgaggcaggagaatcgctggaa

SEQ ID NO: 967240 - DNA, 68 bp, Artificial Sequence
  ENSG00000246451_8 (sequence is synthesized)
agagtttccccatgttggccaagctggtctcaaactactaacctcaaatgatccacccgccttggcct

SEQ ID NO: 967241 - DNA, 63 bp, Artificial Sequence
  ENSG00000246451_9 (sequence is synthesized)
aactactatacagcaaccgggcacaggtatactctttttttttttttttctttttgagacaga

SEQ ID NO: 967242 - DNA, 120 bp, Artificial Sequence
  ENSG00000238022_0 (sequence is synthesized)
tggcactcaggcggctcttaatagatggtatgaaaagggtgtcttttccctctgcctcacccctctcaatagtacaaataaaaccccccacaagattaaagaagagagttaaagcaagaa

SEQ ID NO: 967243 - DNA, 120 bp, Artificial Sequence
  ENSG00000238022_1 (sequence is synthesized)
tcctcatgacaaggggtggctactctggcattttcaagtcttgaggttgctgttttccagggggtgatgtgcaggggcagacctgcctgacttggatatcagcttctccatgaaaatatg

SEQ ID NO: 967244 - DNA, 120 bp, Artificial Sequence
  ENSG00000238022_2 (sequence is synthesized)
tttctaaaagagccaggagactgcccccagaaccaagaggagtactggagagcagaagatgaagaaaaacctttaaacagcagagcagtgaagtggagggagaggcggcccctctccttt

SEQ ID NO: 967245 - DNA, 120 bp, Artificial Sequence
  ENSG00000238022_3 (sequence is synthesized)
gccagagactcccactcccagatgcaggctggagcgatccctcataatttaagctgacacccctcagcggagatgaaaggaacaccactcgctgctctccaacaacaaatgtcagcatcc

SEQ ID NO: 967246 - DNA, 120 bp, Artificial Sequence
  ENSG00000238022_4 (sequence is synthesized)
ctggaggccgtttagacacaaacgcagcataaatctgactcctagtggggaagtccagagattaagtctccacacacagcctaccagagtgaaatgaatttgcttggcacaaagtttgaa

SEQ ID NO: 967247 - DNA, 120 bp, Artificial Sequence
  ENSG00000238022_5 (sequence is synthesized)
agtacagatagatgccacaagccagctgccaacaggaatccagaccctggctaaccatcacccagcttccatctactgtgttcaggggcagacctgcctgacttggatatcagcttctcc

SEQ ID NO: 967248 - DNA, 120 bp, Artificial Sequence
  ENSG00000280660_0 (sequence is synthesized)
ggaaaaaatatccatggcctcctttacctttaaagcaattgctacctttttctattcctccttatattagaagcctacaatttagcagtcttcaatgaccactcaagccaaacctatcag

SEQ ID NO: 967249 - DNA, 120 bp, Artificial Sequence
  ENSG00000280660_1 (sequence is synthesized)
ccaagggtgtttttggaggaattattagctggttataggtgagcacgttttggtttgtatccagctgatgcccccatgatggaccaaaaagcaaaaatttcagtcatctaggctgttttg

SEQ ID NO: 967250 - DNA, 120 bp, Artificial Sequence
  ENSG00000280660_2 (sequence is synthesized)
tctacagtttgcccaatgatccatagatctaatctttaactttttaattaattacttcttttttgtttttactttcttaaaaataattttaaattttattttagattcgagggtccatgt

SEQ ID NO: 967251 - DNA, 120 bp, Artificial Sequence
  ENSG00000280660_3 (sequence is synthesized)
acaggtttgttacttgaagtgaattaattctcgtaactgcacaaactagcactcaccacaattgttttctctgaaagtgtatttcatcctttcagttattcaggcaagaaacttcagagt

SEQ ID NO: 967252 - DNA, 120 bp, Artificial Sequence
  ENSG00000280660_4 (sequence is synthesized)
tacctgacccctctctttcactctccacttccacctggacaagcatcctgtccgacagcatgagaatctgcctcctcctcttcaccacagcaccactgctttcactgaggctgcatttca

SEQ ID NO: 967253 - DNA, 120 bp, Artificial Sequence
  ENSG00000280660_5 (sequence is synthesized)
ttcactgtttcacaggctgtggcaggagcctccacgcctcactgtctgctttcagttcccatctgacccatctccattagcgctgcctttcctgagacacagctctccgtgctttcatga

SEQ ID NO: 967254 - DNA, 120 bp, Artificial Sequence
  ENSG00000280660_6 (sequence is synthesized)
ctccctagaaacagagaaagtccagacacctgagctggcatccatagtgtttggccctttctatttgtccaaggttatcactcacatcattgactctacacacacagacacacacacaca

SEQ ID NO: 967255 - DNA, 120 bp, Artificial Sequence
  ENSG00000280660_7 (sequence is synthesized)
cacagacacacacacacacacgtgcccaaacaagttctgcaggatctcattctatgacctctgttgattctcaaattctctagactttactgatgtctggcactgtgtgccatttgctag

SEQ ID NO: 967256 - DNA, 120 bp, Artificial Sequence
  ENSG00000280660_8 (sequence is synthesized)
agttatggtgcttgtatctgccttgtgtctttcatggaggatcaccaataaactgtggtcccagagaaaaacccagacatgttttcccatgtatttgttgaatccagtttatgtttccat

SEQ ID NO: 967257 - DNA, 120 bp, Artificial Sequence
  ENSG00000280660_9 (sequence is synthesized)
cgattttgtgctgaagactcctgtgttactctcagcagataatgctggtcatgttcacactctttctgatgtttggtgcaccctatctgaattcacgtggactaatagtgtggaggtctg

SEQ ID NO: 967258 - DNA, 120 bp, Artificial Sequence
  ENSG00000280660_10 (sequence is synthesized)
ggaagtgagccgaactaaaaaaactcgaggagatatttgctcatgaagttgtgaattcaaacttcctcagcagagatttccagcataccagatttcaaaggcaaagcatctaagcctttc

SEQ ID NO: 967259 - DNA, 120 bp, Artificial Sequence
  ENSG00000280660_11 (sequence is synthesized)
cttagacccaccgctcgaatctcttgtgtcccacgctgacttcacatttggtctccttggtttttagtcagactgcagaggccgactagtctgtcctgggaagggtaagatgctccttta

SEQ ID NO: 967260 - DNA, 120 bp, Artificial Sequence
  ENSG00000280660_12 (sequence is synthesized)
tccagcctgaccggacatccagagggaaatgttagttaagcattattaatatgaaaagaaaaatcaataacacaaagataatttcctttttgatttaagtactgcttagccaaaataagt

SEQ ID NO: 967261 - DNA, 120 bp, Artificial Sequence
  ENSG00000280660_13 (sequence is synthesized)
atttatttattgtatagttgcaagcagcaacaaaatgaaaacaaaagcctcccattttagcagacatgttttgaggctctactgggtagcaggtacaatgttgggctttgtgaaggacac

SEQ ID NO: 967262 - DNA, 120 bp, Artificial Sequence
  ENSG00000280660_14 (sequence is synthesized)
aaagatgagtgacacgctgtcacttttcaccctgatatggcagctccaagctggtagtgattcttgatatggtaaattatactttgcctgtatttgaatgcattagtttcatttaaaaaa

SEQ ID NO: 967263 - DNA, 120 bp, Artificial Sequence
  ENSG00000280660_15 (sequence is synthesized)
agagatgaggtcttgctatgttgcccacgctggtctcgaactcctggcctcaaacaatcctcccacctcacccttccaaagtgctgggattatgggtatgtgcctggcctccttaaatgt

SEQ ID NO: 967264 - DNA, 120 bp, Artificial Sequence
  ENSG00000280660_16 (sequence is synthesized)
tggcctccttaaatgtattataaggtagtcttgataagcattctcattttgttcaaaatgagattcagttgattagtgatgatggtgatgcttgctggttgttgatcctgtggctaatac

SEQ ID NO: 967265 - DNA, 120 bp, Artificial Sequence
  ENSG00000280660_17 (sequence is synthesized)
gggctacagaatgtctgcaagggctttacagcatcagctgtaatatcaaaacagctgaccctggtgagctggcaatgaggcagacaacacagacttgtgggcagataagcatgggttcaa

SEQ ID NO: 967266 - DNA, 120 bp, Artificial Sequence
  ENSG00000280660_18 (sequence is synthesized)
atccccactctgcttcttcctagttgtatgatttggggcaagcttaatcaagtcttgatatctatatctacaaaatgaggaagaaccgtagtacctattgcacagaattacagtaaggat

SEQ ID NO: 967267 - DNA, 120 bp, Artificial Sequence
  ENSG00000280660_19 (sequence is synthesized)
taagtaaaacaatgcatgaaaaatgctttgcaaggttcctgtaactcaatacacattagctttattacagtatctgaaaatcactttaattggaactaccataacatcagattagtgtct

SEQ ID NO: 967268 - DNA, 120 bp, Artificial Sequence
  ENSG00000280660_20 (sequence is synthesized)
gattgtataatctgggtttgccgataatctcagctttaaacattttgtggttctacacacagttccccagcagaacttgctgagaaatcttttctttaaatacttcttacaggaaacatg

SEQ ID NO: 967269 - DNA, 120 bp, Artificial Sequence
  ENSG00000280660_21 (sequence is synthesized)
aactatttacctttcaaaaaaaagtcataaccctctcctttcttcctcatgaataaaatgactggcaccacgttttgtaaaacatgccagattttgtttaaataattaatattggcagtc

SEQ ID NO: 967270 - DNA, 120 bp, Artificial Sequence
  ENSG00000280660_22 (sequence is synthesized)
ttcagatgagtggttctatggtagcatagaaagaggcctaaactagaaatcaggaaacatgggtttgaaactcagtttggccactattgggctgcgtgatccaatagtttgggtaggtca

SEQ ID NO: 967271 - DNA, 120 bp, Artificial Sequence
  ENSG00000280660_23 (sequence is synthesized)
caaaactacctaatagtttgggtaggtcacaaaatatcactggacctcagcttttattgcataaaatattagaggtagattaaactgtggttctgaaactcaaatgctagtggggtttgg

SEQ ID NO: 967272 - DNA, 120 bp, Artificial Sequence
  ENSG00000280660_24 (sequence is synthesized)
ggcggtaagaccaatgaaggaagcagttgagtataagacaataaggagtagtggtgactgaggtaaaccagagaagacatgtcttacctaaaaatcctctgctccaactgactattgctg

SEQ ID NO: 967273 - DNA, 120 bp, Artificial Sequence
  ENSG00000280660_25 (sequence is synthesized)
atgggattgtggtacatgcacatggagccctatcttcctcatttttaggggaaggtggaattctggaagtagatttttaaacaggataaagaccaaacaaatataagttggcattttgag

SEQ ID NO: 967274 - DNA, 120 bp, Artificial Sequence
  ENSG00000280660_26 (sequence is synthesized)
acccttgcattcaattacatctaaggtctcctcctatcttaaaattctgttgtattctacaaacagttacgttaatataatatagaaatggcatggttaaagaaatggacaacgatggcg

SEQ ID NO: 967275 - DNA, 120 bp, Artificial Sequence
  ENSG00000280660_27 (sequence is synthesized)
tgagccaccacgcccggcctatagatctcatttttaatgtcatcatcatggtaaccttttgaggtagatataattatctccattttgcaaatgaagcgctgagtcctaaaagataacctc

SEQ ID NO: 967276 - DNA, 120 bp, Artificial Sequence
  ENSG00000280660_28 (sequence is synthesized)
ctcaatgtcacgcccctattaagtagcagagttggagtttaaacccatgtcctcacttttaaccacttctgtctacttcctcctgaacatgaatcatcatgcttcactttgcatagtttt

SEQ ID NO: 967277 - DNA, 120 bp, Artificial Sequence
  ENSG00000280660_29 (sequence is synthesized)
gttcccaaaatcaaatcccctctcaaagggtcaacctttgccattaacaagagttttcaggagaatgtgccctaattcctggagacaatgactgaaaggagtttcaaaagccctttgaaa

SEQ ID NO: 967278 - DNA, 120 bp, Artificial Sequence
  ENSG00000280660_30 (sequence is synthesized)
gagtggccgcattgctggcaagagcagctagtttccctaggttgcaactctcatttatatgtgtaagctctgatctccttgcttaaacaaaaatagagagaaagaaaagaaaaaagcaaa

SEQ ID NO: 967279 - DNA, 120 bp, Artificial Sequence
  ENSG00000280660_31 (sequence is synthesized)
agaaaaaggccttatttactttaaagttacaccttagactactgttgtctaaacttgtgtcctgtggagcagttgacctgaaagaagagttctgtgctcaaataaatttgggaaactgca

SEQ ID NO: 967280 - DNA, 120 bp, Artificial Sequence
  ENSG00000280660_32 (sequence is synthesized)
cgttctatccctgcttggttatttacaatgaagttaccttggcatagaaacatctctgaaattattcaaaattgtttcacttttcttaacatcccatagaatattggttctatggaacat

SEQ ID NO: 967281 - DNA, 120 bp, Artificial Sequence
  ENSG00000280660_33 (sequence is synthesized)
acagtactttggaaatatatgcatgtgataattcatcttatttttagcttaactatttgtaccccacctcattctagagaggttggatagcaaaggatacgcaggtggaaagaatctcat

SEQ ID NO: 967282 - DNA, 120 bp, Artificial Sequence
  ENSG00000280660_34 (sequence is synthesized)
cctagtggatacattaaacggtctgtctccatataaggagcaactcaagaccattttgttagtgtggattcgttgatgtgacctctgggagtcaggctcctcagtaggctctctacctgg

SEQ ID NO: 967283 - DNA, 120 bp, Artificial Sequence
  ENSG00000280660_35 (sequence is synthesized)
gatctccatctttgggaggaaggagatgacttcttgcagctcattcaacaggaaaaggcttctgagtgtgtaaatatacactgtcactgtttttatttggagcagatttcatcacagcta

SEQ ID NO: 967284 - DNA, 120 bp, Artificial Sequence
  ENSG00000280660_36 (sequence is synthesized)
ttttctaaatggctaaacaagcatttccctgggtatgttccatggaatattcattttgtaggaagctcaatgataaaagagtcgcattgtcaatgagaccaggaaactgtatatttaatt

SEQ ID NO: 967285 - DNA, 120 bp, Artificial Sequence
  ENSG00000280660_37 (sequence is synthesized)
ccattttgaagagtctcaatttacttaaggatagaaaaggcacagttaagaaccctgattaacttctttaacccacttttcctaaatgtatctgccagtttttgtgtacataaacctctc

SEQ ID NO: 967286 - DNA, 120 bp, Artificial Sequence
  ENSG00000280660_38 (sequence is synthesized)
aaccctttgaagatcgtgcgttccagggaatacactctgggaaattctgggcaagactgttgcaggtttgcagcagatactaggcagagctgatactaaaaagagggagctggcttcctc

SEQ ID NO: 967287 - DNA, 120 bp, Artificial Sequence
  ENSG00000280660_39 (sequence is synthesized)
atggccactcaccagtcctggggaagtcggggagggagagaggaagcctgagcctggaatcccagctctgccacttacaagcttcaaatcacttcacctccctcacctcggttttcttta

SEQ ID NO: 967288 - DNA, 120 bp, Artificial Sequence
  ENSG00000280660_40 (sequence is synthesized)
tctcttacgtggagaatataaaacctacatcttagtattcatttgaggattaaaatcagatgtcaagctgttgaagatgaggcctggcatggagtagacccttctccttgatgttccagg

SEQ ID NO: 967289 - DNA, 120 bp, Artificial Sequence
  ENSG00000280660_41 (sequence is synthesized)
actggggagatccagggtgattttataaacacatggggagggtgggctgctgactagctgtgccaattcctagaaaggaagagtttccactgctctgggatgagagataatcccaggagg

SEQ ID NO: 967290 - DNA, 120 bp, Artificial Sequence
  ENSG00000280660_42 (sequence is synthesized)
attgaggattaccaaaagggggttaccactccaaaaggagagggtccatgctcgaatgtttgctagtgtgcatgtcaaggacatccctgcaaatctgaaatccacatcctaaatcctagc

SEQ ID NO: 967291 - DNA, 120 bp, Artificial Sequence
  ENSG00000280660_43 (sequence is synthesized)
cccaccactgacaaaagatgtgaccttggttaagtcacttaacctctgccagcctcagtctcctcatctgtaaaaagaggagttggactacgtatctctctggagtacccccaaccctca

SEQ ID NO: 967292 - DNA, 120 bp, Artificial Sequence
  ENSG00000280660_44 (sequence is synthesized)
gattagtgtggaaccaaattaaggttattccaatcaatccaggttgaagagttggtaatctaattaaggatcagctgaattttcaaggttgagagtcaaaaagaactgtcaaataatgta

SEQ ID NO: 967293 - DNA, 120 bp, Artificial Sequence
  ENSG00000280660_45 (sequence is synthesized)
cttgtgtgtgatgcttccaattttaatgcttttctgtgttaggagcatatttttaaatattcaaatgtgaattattcacatggcacatgcacttataatgtgtgcatttaactaaagtga

SEQ ID NO: 967294 - DNA, 120 bp, Artificial Sequence
  ENSG00000280660_46 (sequence is synthesized)
atcatcagcctattattaattatcatttaaccagccctattcttttggataaaggagagtgttagtaaaaaccaaagggtttggatcatttaagcaaagccagctctaagcaatttggca

SEQ ID NO: 967295 - DNA, 120 bp, Artificial Sequence
  ENSG00000280660_47 (sequence is synthesized)
agcccctccagctgtccctccatatcttccaacagctataacctgtgcatcctgtgctctttcatttacatatacatatacatatgcaaataaacccatgttcacttgggagtgtgcaca

SEQ ID NO: 967296 - DNA, 120 bp, Artificial Sequence
  ENSG00000280660_48 (sequence is synthesized)
ctcatgtttgtacacactgtccgtgtcctacctaatatcctagatgtccatcaaagtcttcttggggcaggtgacatcctcacgggacctgagtttccttagcagttaaacacgtgttct

SEQ ID NO: 967297 - DNA, 120 bp, Artificial Sequence
  ENSG00000280660_49 (sequence is synthesized)
tttcctagatctaagtaagagctcttccagctctgacatttgatgtctgtgctctttacttagctattccttggcagaagcattggagacatgctcatacacattatctcacataattct

SEQ ID NO: 967298 - DNA, 120 bp, Artificial Sequence
  ENSG00000280660_50 (sequence is synthesized)
taaaatcatccaggaagtctttttgcatcctcaatcctattttaacagatgatgaaacagatttacctacttgatgtgtaaacatacaataataactggcagttacaagcttagaaacct

SEQ ID NO: 967299 - DNA, 120 bp, Artificial Sequence
  ENSG00000280660_51 (sequence is synthesized)
gattctctattctgaatccaatcaattcattctccaagtgacaaccaggcactggctactcacttttcccttcttaatcagagtggtttttgtggagttgggaatcatctggaagagcct

SEQ ID NO: 967300 - DNA, 120 bp, Artificial Sequence
  ENSG00000280660_52 (sequence is synthesized)
cctagatcatctcccctccatagccaggaaaatctgctctaggctgaaacatgggatgtaggccactcatgggccagatacaattctaatggcaatcaagatattataggtgactggaga

SEQ ID NO: 967301 - DNA, 120 bp, Artificial Sequence
  ENSG00000280660_53 (sequence is synthesized)
gagtctgaagaagtacatgtcattagagccagggtgcctggcacgggaccaaatgagcagtctagtttgagacaatgggaagttttcttagcaggagtcacccttcccccaaccattcag

SEQ ID NO: 967302 - DNA, 120 bp, Artificial Sequence
  ENSG00000280660_54 (sequence is synthesized)
ccatctgcagaccagcctccccgctccccagattccacatgcctactctttcatgaatgaaggctacagtgctataagcatagactcacacatctttagagctacaaaagacctcacaaa

SEQ ID NO: 967303 - DNA, 120 bp, Artificial Sequence
  ENSG00000280660_55 (sequence is synthesized)
tgatctagtctagtctcctcgctttacaacatagagaaaagtggtatgctctaggacacagaaggtatggtcaaatttatattaggcttcctgattcactcttcagtgtgctgcttccct

SEQ ID NO: 967304 - DNA, 120 bp, Artificial Sequence
  ENSG00000280660_56 (sequence is synthesized)
ggcctctgaagaggcgaggccccagggcaggaaagcacctcagtggcccaccagacttagcaccaacacatgagcctgcccagtcctttcgctcttatgcattcccgtctctggcctctc

SEQ ID NO: 967305 - DNA, 120 bp, Artificial Sequence
  ENSG00000280660_57 (sequence is synthesized)
acccggtatttgggcagccttacccttgaccccttgtagctatatcctcattcttagatcctctgcttcttcatttacttctctgttgctggccctggttccctctgaactctgagctcc

SEQ ID NO: 967306 - DNA, 120 bp, Artificial Sequence
  ENSG00000280660_58 (sequence is synthesized)
atgttaaccctgttgcctacttttccgttccttttgaagtaaattctgtgtgtcctacctctccgttcaaccaggaaccccctaatagctttatgaccttggtgtgaaagtgtcacttag

SEQ ID NO: 967307 - DNA, 120 bp, Artificial Sequence
  ENSG00000280660_59 (sequence is synthesized)
tcatgacccgtccctacagacagcagaatctggaggaattagagcttaatgttagcattttacaggtcacatcctctgatcccagagcaatattaataatgaaattatgaaagctttttt

SEQ ID NO: 967308 - DNA, 120 bp, Artificial Sequence
  ENSG00000280660_60 (sequence is synthesized)
ttaaaaaaaacaattacaggcaattttaagaatattattctaaattcccattgaaatcaaatacgcaattttaaaagatgagtacagagcaaaacttactggatgcattacacaaagtaa

SEQ ID NO: 967309 - DNA, 120 bp, Artificial Sequence
  ENSG00000280660_61 (sequence is synthesized)
agttccatttctaaatactttcattttttaatcagaaagaataaaagtatattattgagcactaaacttaataagtatcctaaggaaatcaggagaaaagcaataaagaaaagataaaat

SEQ ID NO: 967310 - DNA, 120 bp, Artificial Sequence
  ENSG00000280660_62 (sequence is synthesized)
aataaattagaaaacagtgggaataaaaaaataaatcgaagatttgatccttggaaaatgccaaaaaaaaatgtgccagacatttgaaggatatcacatactcaaataggggagattctg

SEQ ID NO: 967311 - DNA, 120 bp, Artificial Sequence
  ENSG00000280660_63 (sequence is synthesized)
ttaattctgttaattattcaacagaaagccttgggtaaatttgggtaaatatttagaaaatatcaaggctgtgtcttacctcacatcatacataaaagtaagtcccaaatgtattgaaga

SEQ ID NO: 967312 - DNA, 120 bp, Artificial Sequence
  ENSG00000280660_64 (sequence is synthesized)
gttaaatattaaaaagaaaatgttaaggggaagatgtaggcaatatttccttgatctcaagacaggaaaggatatttaaagaatgaaatcatgtcttttgcagcaacatggatgggttgg

SEQ ID NO: 967313 - DNA, 120 bp, Artificial Sequence
  ENSG00000280660_65 (sequence is synthesized)
aggccattatcttgagtaaaataactcagaaagtcaaataccgcatgttttcacttataagtgggggctaaataatatgtactcatggacataaagtgtggaatgatagacatgggagac

SEQ ID NO: 967314 - DNA, 120 bp, Artificial Sequence
  ENSG00000280660_66 (sequence is synthesized)
tgagaagggtgggggtgtaggaggaagggagggatgatgcaatacttaacgagtgcattgcacactattcgggtgacggttacaccaaaagcccagacttcaccactacacaatatatcc

SEQ ID NO: 967315 - DNA, 120 bp, Artificial Sequence
  ENSG00000280660_67 (sequence is synthesized)
acttcaccactacacaatatatccatgtaacaaaactacacttgcaccccctaaatttataatttttttaaaaaaggattaaaggcaggccaggcgcgctggctcatgcctgtaatccca

SEQ ID NO: 967316 - DNA, 67 bp, Artificial Sequence
  ENSG00000280660_68 (sequence is synthesized)
tggcacatgcctgtaatcccggtggtgagccgagatcgtgccatggcactccagcctgggcaacaag

SEQ ID NO: 967317 - DNA, 120 bp, Artificial Sequence
  ENSG00000205837_0 (sequence is synthesized)
gactgaccttcacgcagctgcacaatgctgcatttggaagccggacctgaccacattcgtttccctctagattcatgttctggagaaatgaaaatgctgtctcagtggaatgttgattag

SEQ ID NO: 967318 - DNA, 120 bp, Artificial Sequence
  ENSG00000205837_1 (sequence is synthesized)
ctggagtggagacccaagatctctgtccaggcagggccatcaactagaggtggccctgtgattgatgagtgaccagccatgtgtggagaaaagcaatgtgaacaacttctgacttcgctg

SEQ ID NO: 967319 - DNA, 120 bp, Artificial Sequence
  ENSG00000205837_2 (sequence is synthesized)
aaagaaaattggtctgtcccccatttccttgcattcccattcttactggctgaaattcaaagctgataaatggagctagagcagatagctgggaaaatgagttgagggtcttacattaag

SEQ ID NO: 967320 - DNA, 120 bp, Artificial Sequence
  ENSG00000205837_3 (sequence is synthesized)
acttgccagcaagaagaagaatttttccagggttcctgacaccgccaaattgttcgatcagctctgaactctatactgagattctttaagtatgagagacatgaactttgactggcttaa

SEQ ID NO: 967321 - DNA, 120 bp, Artificial Sequence
  ENSG00000205837_4 (sequence is synthesized)
gtgagctattgaggtctctttgctattgtgacctaactcaggggtcagcaaataacactctgtgcgcaaaatctgactacgatctgtttttgtaactaaataaaatttcactgaaacaca

SEQ ID NO: 967322 - DNA, 120 bp, Artificial Sequence
  ENSG00000205837_5 (sequence is synthesized)
gaagatgcgctgttccaggggcctgggtgggagcagcccaggagcctgcgtctcccctcctcggccctgggaggcggctggactgtgccacacgggacgggtgctgagggaccgctgggt

SEQ ID NO: 967323 - DNA, 120 bp, Artificial Sequence
  ENSG00000205837_6 (sequence is synthesized)
gcccacctccctgacccctcctgcaggggtgcctgccaagcagcctgggcactgccgtctggaagatgcgccgtgccggttctacacggtgttcccttgctccaggcagaaaggcagagg

SEQ ID NO: 967324 - DNA, 120 bp, Artificial Sequence
  ENSG00000205837_7 (sequence is synthesized)
agcctggcaaccatgtcccaagttggaaggaagctctgagaaccctgctccccagaaatcctgagcaaaggctggctggcctacaggagcagtctagagtaagagctgtttcctggcaga

SEQ ID NO: 967325 - DNA, 120 bp, Artificial Sequence
  ENSG00000205837_8 (sequence is synthesized)
ggatcaagtatccaggtcacattgaagagacatgtgaggactccaatggagaacaatttgagagtgagaaaccagttctggaggccaggaagttcaagatcaaggtgttggcaagttcag

SEQ ID NO: 967326 - DNA, 120 bp, Artificial Sequence
  ENSG00000205837_9 (sequence is synthesized)
tgtctgctgaggacctgatctctcttctttcaagatggcatcttgttgctcttccctccagagagtagaaatgctggaacctcacatggaggaaaaaatgaaaaggaccaatgctagttc

SEQ ID NO: 967327 - DNA, 120 bp, Artificial Sequence
  ENSG00000205837_10 (sequence is synthesized)
ccttcagcctttttatgaactcactaattcccattgagggctccacatacatgacttaatcacctcctaaatgcctgacttcctaatactctcattttgaagattaagtttcaacatatg

SEQ ID NO: 967328 - DNA, 120 bp, Artificial Sequence
  ENSG00000205837_11 (sequence is synthesized)
aatttgggggtcatattcagaacatagcacttatgatactatctcaaatcatagactgctttctcggtgggcatctatctcagtttcttttctgttgttattacagagtacctgagcctg

SEQ ID NO: 967329 - DNA, 120 bp, Artificial Sequence
  ENSG00000205837_12 (sequence is synthesized)
agtaatttataaagaaaatacatttattttggctcatggctctataggctgggaagtccaagattgggcggttacatctggttggctcctggtgcgggcctcctgccgcatcataacaag

SEQ ID NO: 967330 - DNA, 120 bp, Artificial Sequence
  ENSG00000205837_13 (sequence is synthesized)
caggatgagtgtataaaggctagacagacaaggggattgttgtgttgaacctgaaaagtcccctcacctggcaatgctctctgttccctgtgagaagaaggggtttcttttcttctggga

SEQ ID NO: 967331 - DNA, 120 bp, Artificial Sequence
  ENSG00000205837_14 (sequence is synthesized)
tgattcatcccttcacctgtggccttccctagagcccatccttgtgccattctgctctccaggcacatctctctcagatgaattccctcttccctcttcctctggcccctcctgtttatt

SEQ ID NO: 967332 - DNA, 120 bp, Artificial Sequence
  ENSG00000205837_15 (sequence is synthesized)
tatctgtttcctcaccactgtgtaatcaggtaggccccactgctgtgacctctggaataatgattgaatctgccctatcctctccacagtgatgcctgggacccagctgagatctccatc

SEQ ID NO: 967333 - DNA, 120 bp, Artificial Sequence
  ENSG00000205837_16 (sequence is synthesized)
atctctcaaaacaactgtgcactgacctcctgacctaagcccagcctctgcccactcagactgaccttcacgcagctgcacaatgctgcatttggaagccggacctgaccacattcgttt

SEQ ID NO: 967334 - DNA, 120 bp, Artificial Sequence
  ENSG00000205830_0 (sequence is synthesized)
cattgaggcaatttcttccctaatctattcctttgtgctgaacttttttaagtttgacactctagatatccgtctgcctcaagcaaaacagttgacagaaacccatgaacccatcatgcc

SEQ ID NO: 967335 - DNA, 120 bp, Artificial Sequence
  ENSG00000205830_1 (sequence is synthesized)
ctgattcataggaagtaattactaataatcctaattctggttcatagtttgcttgtcagtaattacagctgcagttgaatgctttcagcattaaccatcagcccagagttgcagctccct

SEQ ID NO: 967336 - DNA, 120 bp, Artificial Sequence
  ENSG00000205830_2 (sequence is synthesized)
cctcatctcagggaaatggaacttctcacatatcacagacaacttggaggaagctcagctggaccagaagagccagaaatcgggagcatgcaatggcagatcatcagggcaaggccactc

SEQ ID NO: 967337 - DNA, 120 bp, Artificial Sequence
  ENSG00000205830_3 (sequence is synthesized)
accagcagggaggcccagtgaatgcagagcaggtggcaacaggaaagactggaggccagtctgataggaaggcaaacaccagcaagaggcaattccgggatcatttatgggaaaccgagg

SEQ ID NO: 967338 - DNA, 120 bp, Artificial Sequence
  ENSG00000205830_4 (sequence is synthesized)
catggtctgcagaggcaaccgccccccccaccgtcacttccagagagatgaacggaaacctgatctctgagaacccagtcttctcaacaagttgtcaacatgctaataagcatagtgtct

SEQ ID NO: 967339 - DNA, 120 bp, Artificial Sequence
  ENSG00000205830_5 (sequence is synthesized)
tactctgtagcaggtacttttactttatgtgttattaactctccatcttctcaacaatcatatcaagcaagtgctacttctatccccgatgtatgtataaatttgtccaaccatgtagct

SEQ ID NO: 967340 - DNA, 120 bp, Artificial Sequence
  ENSG00000205830_6 (sequence is synthesized)
cataagtaaattaactgtaatttccaaacctagatacaccgaccctagaaactacactctcactactttcctacccaccaacacctcttaaagttgaggtgagaactaagtaacaagcac

SEQ ID NO: 967341 - DNA, 120 bp, Artificial Sequence
  ENSG00000205830_7 (sequence is synthesized)
ttatgagctgcaaatttcagtggaaagcactagtccaagcatttgtttgaaaccccccacacaatttgtacaacaaccctatgagatagtgtgtccgtcagcatttggtcacaaaaacaa

SEQ ID NO: 967342 - DNA, 120 bp, Artificial Sequence
  ENSG00000205830_8 (sequence is synthesized)
aaggtattttgcatgttctaagtatccacagttctaatgcaggaaattagaggtttgcagtcttttggaaagacttagcaatgaattcagggaagccaccaggacctttctgcctgctgc

SEQ ID NO: 967343 - DNA, 120 bp, Artificial Sequence
  ENSG00000205830_9 (sequence is synthesized)
tgtatctatgcaagtgggagtcgacactcacccagaggccactgaacaccttaagggcctctgggagggtctctctggcttctcagccagcattcctgagataggtgattcttaggctta

SEQ ID NO: 967344 - DNA, 120 bp, Artificial Sequence
  ENSG00000205830_10 (sequence is synthesized)
aagtccctctccttggcagactctacacaaagccatacacaaaaagatgttctaagaaccatagttattggcttctccacagtacaggggagacttagaaggcagtaaagatgcatcaag

SEQ ID NO: 967345 - DNA, 120 bp, Artificial Sequence
  ENSG00000205830_11 (sequence is synthesized)
ttgagaacaaatgatctggtagaattaggtagaattcatatacccattttacagttgatgaaactgaggcagaggcacaaagcagttaatcaatttacgcctaatcacataactttagta

SEQ ID NO: 967346 - DNA, 120 bp, Artificial Sequence
  ENSG00000205830_12 (sequence is synthesized)
aatgataaagccatgattcaaatgtagagggactggctccataatctatgctcttgccattgcatgagattgttttcatggaagacttaactcagcacagcttggcacacccgttagtgc

SEQ ID NO: 967347 - DNA, 120 bp, Artificial Sequence
  ENSG00000205830_13 (sequence is synthesized)
tacactcattgtggtggctgggttttattcttattgatacatttcttgtgttactatatttgtttttctcataattagcacaactgggattgctcagccaatacccatggaatgttgaat

SEQ ID NO: 967348 - DNA, 120 bp, Artificial Sequence
  ENSG00000205830_14 (sequence is synthesized)
acccccacccacagtctgccccatatctcaaggcaacctagacaggttttcttcctctaatgaattatcattatgacttagtccaagatttctaaataattaccagttccaaaaaaccag

SEQ ID NO: 967349 - DNA, 120 bp, Artificial Sequence
  ENSG00000205830_15 (sequence is synthesized)
catcctgagtatccacagatatgtgcatgaatacaagcatacatgcacacacatatgcacgcacacacacacactcagtctttatgagcagcaacgtaactgtatttcaatggatgcgat

SEQ ID NO: 967350 - DNA, 120 bp, Artificial Sequence
  ENSG00000205830_16 (sequence is synthesized)
tgatgagggcgagttccaggagcttcacccaggcaatcccggctggccaattattgcagacagcctgctcccacctattcaccacacagaacacatgtcaaaatgcactcggaaacaaca

SEQ ID NO: 967351 - DNA, 120 bp, Artificial Sequence
  ENSG00000205830_17 (sequence is synthesized)
ctaggctgcagcacactgagaaggtgaggctgagcattggacttgctgactttgggctgcccggcattgcccggaacacgtttgtggtccctgattccatctctagatactgcagggaag

SEQ ID NO: 967352 - DNA, 120 bp, Artificial Sequence
  ENSG00000205830_18 (sequence is synthesized)
gctctgtaattggaaaatgctgcccaagcagaaagtctgccttgcttaataaacagggctctctgaagaagttcaaaattaccagaggagaaacacagcctggtgttaccatcagtgttc

SEQ ID NO: 967353 - DNA, 120 bp, Artificial Sequence
  ENSG00000205830_19 (sequence is synthesized)
tagaactggctgaaattgatcaaaggttttagctgcgatctttctcctacagctcatttaaccatgcaattaggcagttaagtagatgcaaaatatttaaaattaaagatgcttctcatc

SEQ ID NO: 967354 - DNA, 120 bp, Artificial Sequence
  ENSG00000281398_0 (sequence is synthesized)
tctgccggtgctgctgcgccctgcggagctccgaacacgtgcgcagaggctggctgtggcagatgcaactgcaggatgacttgaaagtagggcatccttcacccatctgaagggaggaaa

SEQ ID NO: 967355 - DNA, 120 bp, Artificial Sequence
  ENSG00000281398_1 (sequence is synthesized)
tagtggcaggtgacagtctgcatgtgcagttttcagatgccttcacctgaatgacatctacctccatcaggaccccagatgtctgacagccctgtgtgacaccaagataagtaacaatct

SEQ ID NO: 967356 - DNA, 120 bp, Artificial Sequence
  ENSG00000281398_2 (sequence is synthesized)
ggctgctgactaccctattggacaactccaatattagagaacatttccaccaattcagaaagtttattatgcactgctgttctagagcagggatcagcaaacttgctgtaaagagccagg

SEQ ID NO: 967357 - DNA, 120 bp, Artificial Sequence
  ENSG00000281398_3 (sequence is synthesized)
aggatcccgttgaagataccacattacacttaggctcctgttggccatgacagcttcttagacttgtttttaatgaccttgacagttttgtttttttgtttgtttgtttttgagacggag

SEQ ID NO: 967358 - DNA, 120 bp, Artificial Sequence
  ENSG00000281398_4 (sequence is synthesized)
attctcaaaacattccatttttattctgtggtcttactttattctgtcatgtagagaatagtggttgagcctgttgtcttttgagagtggatgctgtagtccttacatggctgactttca

SEQ ID NO: 967359 - DNA, 120 bp, Artificial Sequence
  ENSG00000281398_5 (sequence is synthesized)
gcccgtaagcttatagtagaggatggggattttgttatcagctgctaaaagggagaagccaagcccagaactaagggttctgatgagttgaaggagagggaagatgcccctcaaggcaaa

SEQ ID NO: 967360 - DNA, 120 bp, Artificial Sequence
  ENSG00000281398_6 (sequence is synthesized)
taggggacttaaaattatgatgtgaaaaattatgtagagtatcagacttttttttggggggggacggagtcttgctcagttgcccaggctagagtacagtggctcgatctcggctcactg

SEQ ID NO: 967361 - DNA, 66 bp, Artificial Sequence
  ENSG00000281398_7 (sequence is synthesized)
cctgccaccatgccaggctaatttttttatttttgcgatttgcctgccttggcctcccaaaatgct

SEQ ID NO: 967362 - DNA, 120 bp, Artificial Sequence
  ENSG00000281398_8 (sequence is synthesized)
tttcccctccggcctctgccggtgctgctgcgccctgcggagctccgaacacgtgcgcgtgaggagtcccatagagcctgactccgagagcctcgatctcccagggccagaggcagggac

SEQ ID NO: 967363 - DNA, 120 bp, Artificial Sequence
  ENSG00000281398_9 (sequence is synthesized)
aaggggattcctgttaaagggtttgacaacagggtctgcaattagtgcttccacgcctgttttgcagtcaatattcaactgatacgtcttctacctggagtgcctagatgccttcacctg

SEQ ID NO: 967364 - DNA, 120 bp, Artificial Sequence
  ENSG00000281398_10 (sequence is synthesized)
gcctgtgggctagttggtatctatcaggaaacaaatgggagatgccttcacctgaatgacatctacctccatcaggaccccagatgtctgacagccctgtgtgacaccaagataagtaac

SEQ ID NO: 967365 - DNA, 120 bp, Artificial Sequence
  ENSG00000281398_11 (sequence is synthesized)
ctttcccctccggcctctgccggtgctgctgcgccctgcggagctccgaacacgtgcgcggagtcccatagagcctgactccgagagcctcgatctcccagggccagaggcagggacttt

SEQ ID NO: 967366 - DNA, 120 bp, Artificial Sequence
  ENSG00000281398_12 (sequence is synthesized)
gttctaatagaacattatttatggacactgaattagaatttcataaaattttcagtgtcaaaattgttttcaatgatttacaaatttaaagaccattcttattttgagagccatacaaaa

SEQ ID NO: 967367 - DNA, 120 bp, Artificial Sequence
  ENSG00000281398_13 (sequence is synthesized)
aggccttgaaagttgaacagctcattagtgacaggttcagagccaatagcaatgtgtctttctgaaaagtttaatgttatcaatagctttgccttagagcatcatactcttcatctttta

SEQ ID NO: 967368 - DNA, 120 bp, Artificial Sequence
  ENSG00000281398_14 (sequence is synthesized)
gggcactaaggtgactgcaagaaattaaccagtagtaaaaatagtctgttttttgtgtgtttgggatttgtttatgtgtttttttgcatgggttacttacagcagttctctccactttta

SEQ ID NO: 967369 - DNA, 120 bp, Artificial Sequence
  ENSG00000281398_15 (sequence is synthesized)
atgtgctccaaagggagaggtcttaagaaagaatagcagtctgcacttatcaaactcagccacaatctcagtctgagttggtaaaaccgaaatggctcctaaggaaagaggaaaatttta

SEQ ID NO: 967370 - DNA, 120 bp, Artificial Sequence
  ENSG00000281398_16 (sequence is synthesized)
tgtcatgaatagtcacagtactttaaatctgaggcctcaagttctaagcatacaggttgtcttcctgactacagtagcgctatccatgtgcagagacgttcctatattgctacttgaaaa

SEQ ID NO: 967371 - DNA, 120 bp, Artificial Sequence
  ENSG00000281398_17 (sequence is synthesized)
tagataattcattggtattcctgtattcaatatcccaaaaggcatcaatggtgtaatcatgtgcatttaaataatttgatgggatttcctacttgataaataaagttactcacctactta

SEQ ID NO: 967372 - DNA, 120 bp, Artificial Sequence
  ENSG00000281398_18 (sequence is synthesized)
ggctgactaccccagcaagtgatgggttggacataaggcaaagaacaggaggggtgaaagggggcagaacagacaagttctgtcccagcctctgctacctctaaccccatggcattctat

SEQ ID NO: 967373 - DNA, 120 bp, Artificial Sequence
  ENSG00000281398_19 (sequence is synthesized)
ccttttctacactgggcttccatttcttaccccaacaatgatctgttcttccaggtgccgtcatttaatttcccagacacttgacctccttctgatttgtgtactccctccaaggctgag

SEQ ID NO: 967374 - DNA, 120 bp, Artificial Sequence
  ENSG00000281398_20 (sequence is synthesized)
aatggttaacaggacacagttcttgcttatcttgctatggtctgtcaagccttatacaatctagccttatctctctcaccgtcttatctttatcacccgtagattcccttgttggccact

SEQ ID NO: 967375 - DNA, 120 bp, Artificial Sequence
  ENSG00000281398_21 (sequence is synthesized)
ggtttctttcagtccttaattagccttttgtcactacctgtctacacatgctgtttttcccttctcattccatcttgacattgtctattttgagatctcagctcagttgcagagaagctg

SEQ ID NO: 967376 - DNA, 120 bp, Artificial Sequence
  ENSG00000281398_22 (sequence is synthesized)
ccttccccatctggcaacccattatatgtgtcatagtaccatgttgtaccatagagctagacacaggtgccatgttgtgtcttgaaatgtattcaccagcttccaaaggtttacctcaat

SEQ ID NO: 967377 - DNA, 120 bp, Artificial Sequence
  ENSG00000281398_23 (sequence is synthesized)
cccctttactcaagaagcctcagttctactgacagttggtaataataacctctctgtcataatgtacccaaaatagagtaagaatatcatgcttttcagtaatactccagtgaatgaggc

SEQ ID NO: 967378 - DNA, 120 bp, Artificial Sequence
  ENSG00000281398_24 (sequence is synthesized)
taagagtaccatttttgttcttataaaagaatttttttggacatgaatacaaagatgtcaggttaccaaatcatttgctagtagatcctaacaatatcacctataggaaactgaacgtag

SEQ ID NO: 967379 - DNA, 120 bp, Artificial Sequence
  ENSG00000281398_25 (sequence is synthesized)
taacaatatcacctataggaaactgaacgtagcctttaaacattaagtgatgataatggatttggccgggcgcggttgcctataatcccaacactgagaggctgaggtgggtggatcact

SEQ ID NO: 967380 - DNA, 88 bp, Artificial Sequence
  ENSG00000281398_26 (sequence is synthesized)
aaagaatatgcctgtaatcccaactatttgggtggctgaggcacgagaatcgcttgaacttggaaggcagaggttgcagtgagctgag

SEQ ID NO: 967381 - DNA, 120 bp, Artificial Sequence
  ENSG00000281398_27 (sequence is synthesized)
cactccagcctgggtgacagactgagacagtctcaaaaaaaaaaaaagaaaataatggatttgcagagacttgctatttagatttcagacatctgttaactaaaacacatgtgtaggctt

SEQ ID NO: 967382 - DNA, 120 bp, Artificial Sequence
  ENSG00000281398_28 (sequence is synthesized)
acatctgttaactaaaacacatgtgtaggcttttgttacttatttcagtaatctgtaaatatctttatatttgagaaaatttgtgagacatctttgtgtaaattataacttgaagaacct

SEQ ID NO: 967383 - DNA, 120 bp, Artificial Sequence
  ENSG00000281398_29 (sequence is synthesized)
ctcttacaagcaggcatattggtaagtagctgcgaggatataacttataaccagattgaagtgtataattataatatgttattattctggggttctataaaaaataaaatctttgaatct

SEQ ID NO: 967384 - DNA, 120 bp, Artificial Sequence
  ENSG00000229425_0 (sequence is synthesized)
gcagtgtgtggttgctcaagtttagctacaaggccatataagagtccttccaagaggaggatggggcgaactttccagctagagtttgacctaaggaaggatttcaaaacttacccctgc

SEQ ID NO: 967385 - DNA, 120 bp, Artificial Sequence
  ENSG00000229425_1 (sequence is synthesized)
aatgctttaacagcattcaagtcaaatggaggcttttcatacagtgaaatccacagtagctctctgtggtatgtagggctactagccagatatacctgaaagcaagcgcttgccttgctc

SEQ ID NO: 967386 - DNA, 120 bp, Artificial Sequence
  ENSG00000229425_2 (sequence is synthesized)
tccctctgccacagaacgatgacacagggataacaaagggaaataccagggaatgtcaagtcaaacaaatcgtagatcttctctggcggcttctttgaccttgttctgagtgaacaccgt

SEQ ID NO: 967387 - DNA, 120 bp, Artificial Sequence
  ENSG00000229425_3 (sequence is synthesized)
gtacatcaaggaagataattacaactttttcaagtcttctaaaatcgaactccctgtggtggcgaccagtatcttcaaactcataccagagtaaagccttatccatttggagttctttct

SEQ ID NO: 967388 - DNA, 120 bp, Artificial Sequence
  ENSG00000229425_4 (sequence is synthesized)
gatatctttatgaagctgcataatcctatccaaggacagacgtctccttccatttgcttttgctttactaatttgaatctatgttatttgttttggatacatctggaattgacttttttg

SEQ ID NO: 967389 - DNA, 120 bp, Artificial Sequence
  ENSG00000229425_5 (sequence is synthesized)
catggtgtaagagccagctcttcttcaggataagcatgcctggtttcttcaacttattccacaagagtgaacaagtaagaaataacagttcttcctggatcagccctctcccgtctgtca

SEQ ID NO: 967390 - DNA, 120 bp, Artificial Sequence
  ENSG00000229425_6 (sequence is synthesized)
tctccaacagatacaaagccagctttaagaagaccaaacctacaaaaatcattcatgctttctgcctccatgtttttctttccaacctagttcctccagaaaatgtaaaagagcaaccga

SEQ ID NO: 967391 - DNA, 120 bp, Artificial Sequence
  ENSG00000229425_7 (sequence is synthesized)
accgtcaactggtacaatgacttctacacatcagacctcggccacgccacagtcatcagattattctatcacagggtctctcaaccgtggaatatggtctccaagggaaacaagccacag

SEQ ID NO: 967392 - DNA, 120 bp, Artificial Sequence
  ENSG00000229425_8 (sequence is synthesized)
agggctcaggagcattgctataaagagtaggcaaatggaaatctttccccaaagggcacactgggattgttaggcgagggctgctcaatccattaaaagtttaaactcgaaaaaaaaaaa

SEQ ID NO: 967393 - DNA, 120 bp, Artificial Sequence
  ENSG00000229425_9 (sequence is synthesized)
cagtacatctgtaccacattcatgtggcaaatgctgctttatggagatgtttctaatactgacctacaataattcagccaagatcacgtttctactgtcttcaggaaatgagaaaaatga

SEQ ID NO: 967394 - DNA, 120 bp, Artificial Sequence
  ENSG00000229425_10 (sequence is synthesized)
atccaggaaatttccatctttaactatactctgtaaatgtgctgtccaatacacagatagctactgagcactggaatatagctagtctgaatggagatgttctaaggacgtgtttgcttc

SEQ ID NO: 967395 - DNA, 120 bp, Artificial Sequence
  ENSG00000229425_11 (sequence is synthesized)
cctgaggcctccccagccctgcagaactagccttggaaagaagaaccacgcagagagacaacatatgtaacctcatgctttttatgtacaagtggtggaatttttccattctccattttc

SEQ ID NO: 967396 - DNA, 120 bp, Artificial Sequence
  ENSG00000229425_12 (sequence is synthesized)
ctatcttcctgtatctttgtcaccatgttaaggtaacatccagccacatgccccaaatcttcaatacgttatgccaattcagggtgacttaaagatgctttgtaaatgctcttttgcaaa

SEQ ID NO: 967397 - DNA, 120 bp, Artificial Sequence
  ENSG00000229425_13 (sequence is synthesized)
aaagtatgattaaaggatttcagcgtattctctcactgggacatcttatgttattctgaaatgaagagtttactaaaattatatttgatcatgatgaatctttttaaaaccacttaagga

SEQ ID NO: 967398 - DNA, 120 bp, Artificial Sequence
  ENSG00000229425_14 (sequence is synthesized)
aacaggaagaatttcttatattctggaaattttgtctgtgataataattgtcatggattgttgtccttagaatcaagggggttcatcacaaaacaactttttatggtaatgaggaagcag

SEQ ID NO: 967399 - DNA, 120 bp, Artificial Sequence
  ENSG00000229425_15 (sequence is synthesized)
atcattcaagtttgtttttcctcctcaagaattctttgtaaatgtgtttggaaaagtttggtagccttattttctatattaatttttgaatatttaaaataaattgtttctaggtttgaa

SEQ ID NO: 967400 - DNA, 120 bp, Artificial Sequence
  ENSG00000229425_16 (sequence is synthesized)
tacggtttctctccaccctcctctaattctgcattagaaatgaaaaaaagcttgactggtaaaattctgaaacagacaatgagctatttaagtgataattactgaatctcatttttagaa

SEQ ID NO: 967401 - DNA, 120 bp, Artificial Sequence
  ENSG00000229425_17 (sequence is synthesized)
gcccattaacaggtatctctttagtcatgagaaaattattcataaatattaaattgtgtgatcacattgcaagtttctttcaaattatagaatctgactaatttcacagtaactgtttgc

SEQ ID NO: 967402 - DNA, 120 bp, Artificial Sequence
  ENSG00000229425_18 (sequence is synthesized)
cattaattggctttaagatttaatcaagtaaagacatcattgtttaattctaatttgtaaagccaaaaaaagtgtaacattattatctttagtcaaacttcttcaaatgtttatgcaagg

SEQ ID NO: 967403 - DNA, 120 bp, Artificial Sequence
  ENSG00000229425_19 (sequence is synthesized)
tagaaattgaaaacaacaggtactcctgtgcttacagtttctccagttcaaagaacaaaattcatcaatgggaagctgcagtggattgtagagtaaaatcttgctgcccaactagagaat

SEQ ID NO: 967404 - DNA, 120 bp, Artificial Sequence
  ENSG00000229425_20 (sequence is synthesized)
aaaaagagtttgaccagacttataacaatgacataatggccattttgttgagttcttaatgagtttagtaggtagtgaaatgggaaaggttcccttgtcccccttgcagggtgtgtggtg

SEQ ID NO: 967405 - DNA, 120 bp, Artificial Sequence
  ENSG00000229425_21 (sequence is synthesized)
tgcagggtgtgtggtgggggtgtagcttgcttcttcagtgccccactgctcaaacttctaggggagcatacagatgggcaggttgtggggctccaaccccacggcagtgtctaggggtga

SEQ ID NO: 967406 - DNA, 88 bp, Artificial Sequence
  ENSG00000229425_22 (sequence is synthesized)
tcagttggactttgttgcaaggatagaagactttctgtatctccaggttcttgccttggtgtaccagaagaatcaatcacacatggtc

SEQ ID NO: 967407 - DNA, 120 bp, Artificial Sequence
  ENSG00000229425_23 (sequence is synthesized)
aaccagccgcttgtgtgttcttccactgatgtgtcctctcaatgtccagacgcttctgtctctgccttgctaggatcttgggcttttatagaccttggatggggaggtggtgagccaggg

SEQ ID NO: 967408 - DNA, 120 bp, Artificial Sequence
  ENSG00000229425_24 (sequence is synthesized)
tggtcttgggaaatgcaacatttgggcgtgaagtcaggagtgcctgttctcacctaggtccgtgggggtaaagccctagctagggaccatgccttcctctacccagcacttcccttcctc

SEQ ID NO: 967409 - DNA, 120 bp, Artificial Sequence
  ENSG00000229425_25 (sequence is synthesized)
attctgtatcatttaaagagaccacactcctcccttcccagcactcctgtatcagtaggaagatagaagaaaactctagatcaccatcaagttcaagtcatttcagattttcagtgaata

SEQ ID NO: 967410 - DNA, 120 bp, Artificial Sequence
  ENSG00000229425_26 (sequence is synthesized)
tatgtttgctgtgtccttcaggtaccaagatgcagggaaatgattaaaaggccctgagatatacaatactgaatggtagggaggaggaggccttctaggttggaaagtcccgtagctgac

SEQ ID NO: 967411 - DNA, 120 bp, Artificial Sequence
  ENSG00000229425_27 (sequence is synthesized)
tagctactaaatgttctatcagctattgataagaccgtgttcagaacatacggaaattgtaggatataatttttgtatgttacttgtcaccagctgttcaatattatgaattattcctga

SEQ ID NO: 967412 - DNA, 120 bp, Artificial Sequence
  ENSG00000229425_28 (sequence is synthesized)
gacattacagaagttgagaatgaattgtgcccataaacagaaaacatattaacctatacaatacactcgttttccttttagagacacgaatacccctagctcaaggagtcgatatgtata

SEQ ID NO: 967413 - DNA, 120 bp, Artificial Sequence
  ENSG00000229425_29 (sequence is synthesized)
aaataggcaactaggggcatgcaaatattgtggaaatggtgtttctgattggcactggcagatttattattcgaaataatcctgttggcaaaaaaaggaaattttttttccgtatcataa

SEQ ID NO: 967414 - DNA, 120 bp, Artificial Sequence
  ENSG00000229425_30 (sequence is synthesized)
aatctgatttcaaaaacttgctcctttttgactttctctataagcttgtaagtctgcattcttctctcatttttatatccaggctctattgtaatttatctgttgctaaccagttttcaa

SEQ ID NO: 967415 - DNA, 120 bp, Artificial Sequence
  ENSG00000229425_31 (sequence is synthesized)
tcttataatggatctctcagtcacatcaacgcccgagtctatggtgatgataatgtttgtgcaaagtggatgccaagtgactgcacaatcaaggtttctgagtagttgaaatagataagt

SEQ ID NO: 967416 - DNA, 120 bp, Artificial Sequence
  ENSG00000229425_32 (sequence is synthesized)
cttcacagaaagagtcgaaattgacaacatgcttattgctttggctttggatgttggttgggaacatggttcttgaatatccacacttcaaagtagatcttactttttggaagagtagaa

SEQ ID NO: 967417 - DNA, 120 bp, Artificial Sequence
  ENSG00000229425_33 (sequence is synthesized)
agctcattacgttggttaatttgagaagtaagacaagggctcagaaaggtactagttattagtaccttatacactagcctgcctggcattcttaccatgacagtgaattgtcatggtaag

SEQ ID NO: 967418 - DNA, 120 bp, Artificial Sequence
  ENSG00000229425_34 (sequence is synthesized)
agttgtggttttaaacctcttttccccagatgttacatggagtaatatatgtatccacatacatattaaagtaggaggtagatattatattgactggtgacttgaggacatgatacacaa

SEQ ID NO: 967419 - DNA, 120 bp, Artificial Sequence
  ENSG00000229425_35 (sequence is synthesized)
aataggtaacgtttgatgaagcttgaaatgagccaagaaaggacaaatctggataacacactgtagccttggtgatgagaaaggagaaaggaaagataatgaagatgggtatcatattgc

SEQ ID NO: 967420 - DNA, 120 bp, Artificial Sequence
  ENSG00000229425_36 (sequence is synthesized)
tttgccttgaatttgcagaaagagatatttggattatgatgttaccttaaaaaaggcagttgatattactcagtgaaagttcagaagccaagaaaactatgtgtgtgtacatatatgtat

SEQ ID NO: 967421 - DNA, 120 bp, Artificial Sequence
  ENSG00000229425_37 (sequence is synthesized)
tgtacatatgtttatttctttttttaaaaaattcttacctacctctctactataacaaaattaatttcattcttttttgttgcatttaaactttatcttggtaatgttcatattacaaat

SEQ ID NO: 967422 - DNA, 120 bp, Artificial Sequence
  ENSG00000229425_38 (sequence is synthesized)
ttgcctatattgttggtattatattgttactatatagatatatttgtaagcataaatgcttggtattcaaatgtttaactagtaatattcatattacaaatttgcatatatgtttggtat

SEQ ID NO: 967423 - DNA, 120 bp, Artificial Sequence
  ENSG00000229425_39 (sequence is synthesized)
gtatgatattgttactatatagatatgttatatttgtaagcatcaatgcgtggtattcaaatgtttaacaactctccatttttttctcaagtaaccctctgacaaaaggctgtatttata

SEQ ID NO: 967424 - DNA, 120 bp, Artificial Sequence
  ENSG00000229425_40 (sequence is synthesized)
taaaactgacagatttttatggtggatcatttttcttacattaattacataggtagtattattttagttggaggtcaaataacatactatcaatgacaatttagagataaattgtttgaa

SEQ ID NO: 967425 - DNA, 120 bp, Artificial Sequence
  ENSG00000229425_41 (sequence is synthesized)
atcctgatatggaagagctatagaaataacatgggtgacctcacgtttttaagatagcctctctgcaccatatggctagtcccaaatggagatcaagaaagcaaggtcatttttaatctc

SEQ ID NO: 967426 - DNA, 120 bp, Artificial Sequence
  ENSG00000229425_42 (sequence is synthesized)
tacatacatcttgctttcctggtttaacactaatcattcattgtattctgcatattggaagggagcagatgaaggatactaagaattcactttgaaaacatgtactcaatgtttcatatc

SEQ ID NO: 967427 - DNA, 120 bp, Artificial Sequence
  ENSG00000229425_43 (sequence is synthesized)
caaaaactcccagggattaaacaatcagaaaaccctacatcatttgcattttaatggatacaaataagagttgaaacatttctttacacttaaactaccatgaacaagcttatatagcta

SEQ ID NO: 967428 - DNA, 120 bp, Artificial Sequence
  ENSG00000229425_44 (sequence is synthesized)
ttaggagtgaaaatggggaggaggaggaagaaggggactctgaaatttaaggaaaattcatttcttttacagagttggagctaggctgattaagtcaaggtgcctaactctgctagagac

SEQ ID NO: 967429 - DNA, 120 bp, Artificial Sequence
  ENSG00000229425_45 (sequence is synthesized)
tcattatcacatttatcattacttgtaaaacaatgaggtggcagcagggggggaaaggactaaaatagaattgaaaaaaaaattggtactagctaaggtaatttaaatgaagcttttttt

SEQ ID NO: 967430 - DNA, 120 bp, Artificial Sequence
  ENSG00000229425_46 (sequence is synthesized)
agttctcctccttcagtggaaccagctattgttccttccaaggttcttgtgtattgcttcaaaggcacccagagaaactatttggtgtaagaagagaatacaatattaaggcatgatgaa

SEQ ID NO: 967431 - DNA, 120 bp, Artificial Sequence
  ENSG00000229425_47 (sequence is synthesized)
tacaaagaagatttctatttttaagagggaggtattgactttcatctgcatcttgatttaatttttgttctggaaaacaaaggtctccataggaattagtagtgaacctctagaaataca

SEQ ID NO: 967432 - DNA, 120 bp, Artificial Sequence
  ENSG00000229425_48 (sequence is synthesized)
ctccagtctttatgaagaggacaaatggatttgagtagagaaataacgagatgaaagacaaatcagactgtacagaaatcccttaaatgctctgatctccagttccagtatctgaacaaa

SEQ ID NO: 967433 - DNA, 120 bp, Artificial Sequence
  ENSG00000229425_49 (sequence is synthesized)
aggatagtgatacctgaggatttgtgaggcttaaatgagatccatttggagttctttctgatgcattatgtgagggggtacatgtgcagtttatgtgattacactgcatgatgctgagaa

SEQ ID NO: 967434 - DNA, 120 bp, Artificial Sequence
  ENSG00000229425_50 (sequence is synthesized)
gccctgcagaacttgaacaccgtgtacatcaaggaagataattacaactttttcaagtcttctaaaatcgaatcaagagctgccaacagctaggcccagtgaaatgtggaaatcactcat

SEQ ID NO: 967435 - DNA, 120 bp, Artificial Sequence
  ENSG00000229425_51 (sequence is synthesized)
gtcttcctaccttgtaataagcctaacctcttaggttatttcctggcctcccttctgtgacctttgaccaaggccaacctttagctggagaatgtgacattttgttctcctctggctgac

SEQ ID NO: 967436 - DNA, 120 bp, Artificial Sequence
  ENSG00000229425_52 (sequence is synthesized)
atgtgatgctctcattattcaaaggaaaagtgttgtcatttgaacgtcaagggtttctcagaccaccagaaaagattatctccttttgatatctctgcttagaggaatacagaatgtggc

SEQ ID NO: 967437 - DNA, 120 bp, Artificial Sequence
  ENSG00000229425_53 (sequence is synthesized)
taccaatgtcaggataaagcatgcattaggatccctcagtggagaactatgtccattccatgctccttccaactagtttgagaaatggctccaaattttccttaatattattctgaattg

SEQ ID NO: 967438 - DNA, 120 bp, Artificial Sequence
  ENSG00000229425_54 (sequence is synthesized)
ctctatgaagtaaatgtcaggcattttatttccatttccctaaaatagagaatgggttgctagggaaaatgcctaagccagccataaagcatttccaaagggaggacatagtgaataaaa

SEQ ID NO: 967439 - DNA, 120 bp, Artificial Sequence
  ENSG00000229425_55 (sequence is synthesized)
aatgttaattcctgtcttgtttaacaagctctcatggcagctccaaggggtagtaaaatttatactcctaccaggacagctctagactatggcatcagcatgggatggaaagtagccctg

SEQ ID NO: 967440 - DNA, 120 bp, Artificial Sequence
  ENSG00000229425_56 (sequence is synthesized)
ggaaacagaatagtgtggttgcctgctaccctttacttatctgaatagtttgtctctgctgtgcccaggaggtttgcacctcatggggtgggaggtggtgcaatcaggtaagaatgctct

SEQ ID NO: 967441 - DNA, 120 bp, Artificial Sequence
  ENSG00000229425_57 (sequence is synthesized)
ttacttactcctttgtcggaaaaaggatgactgtaatgtgtgggctggagtggagtggaactgagtttaaaatctgcagtaacataaaattaaagactaggtattaacaatggctttgca

SEQ ID NO: 967442 - DNA, 120 bp, Artificial Sequence
  ENSG00000229425_58 (sequence is synthesized)
ctctgagttgccatgggctgagagggacagctggacagccagagggattccagagggacttggcaggacagagcagtgtaagccatcttactgcctcgaaaaacacaggtaggagcacat

SEQ ID NO: 967443 - DNA, 120 bp, Artificial Sequence
  ENSG00000229425_59 (sequence is synthesized)
cagacttcagtaacacaggatttatctcagtatccattttttctgattctcagttttcttatccataaaatagattaaataatatatgctttgtgaggttcttgtgaagattaaatgaga

SEQ ID NO: 967444 - DNA, 120 bp, Artificial Sequence
  ENSG00000229425_60 (sequence is synthesized)
aatatatgctttgtgaggttcttgtgaagattaaatgagatgaaaaatgcaaagtgctggaggaacacctgcaggagctctatccatgaaaaactgttggccgggcacggtggctcacgc

SEQ ID NO: 967445 - DNA, 73 bp, Artificial Sequence
  ENSG00000229425_61 (sequence is synthesized)
gatcacctgaggtagggagttaaaaatatcagccagacgtggttgcgggcgcctgtaatcccagctacttggg

SEQ ID NO: 967446 - DNA, 120 bp, Artificial Sequence
  ENSG00000229425_62 (sequence is synthesized)
tttctgtgcctggcttatttcacttagcgtaatgtcctccaggctcatccaggttgttgcaaaaggcaggattttcttcttttttaaggcttggagagtcatttgttttcataagagcga

SEQ ID NO: 967447 - DNA, 120 bp, Artificial Sequence
  ENSG00000229425_63 (sequence is synthesized)
acaccagcaggaggggcattcaggataagcgtgtttgtcatttgaggcttctatctgctccaaaaggaactctaaatcttccttatgaaggcactgacatttagtttggcacattttcag

SEQ ID NO: 967448 - DNA, 120 bp, Artificial Sequence
  ENSG00000229425_64 (sequence is synthesized)
atactagaaaaagaaccatgacttgacaaaaaaaaaaaaaaaaaagtttagttaatacaaagcagaagaggcaattatttcaagccatttagagaataatttgaacataaatgtgcaaat

SEQ ID NO: 967449 - DNA, 120 bp, Artificial Sequence
  ENSG00000229425_65 (sequence is synthesized)
gttctatcaagaaatagaatatactggcttcccagagcccttctttctagtcacaatcctcccaaagcgagcagttaaagtgaaaacaagatcacggaaaaggagatatattttggtaga

SEQ ID NO: 967450 - DNA, 120 bp, Artificial Sequence
  ENSG00000229425_66 (sequence is synthesized)
tttgtttcttttcctttttttgttctctttgaggttttaaactaacctctattattttctactgagattttacactgtttcttttcacttttcagttttggatacatctggaattgactt

SEQ ID NO: 967451 - DNA, 120 bp, Artificial Sequence
  ENSG00000229425_67 (sequence is synthesized)
gagtttattcaggggactgaaatgttgacagtgaatcaactgggaggatattttcaatcagaaccgtctgactgacagctttcatattattaatgcacatactaggagacatcaaatttg

SEQ ID NO: 967452 - DNA, 120 bp, Artificial Sequence
  ENSG00000229425_68 (sequence is synthesized)
ggtcagttattaaattaaggtgctctcatccctaaatactttattccatcatcgtgtgtaattaatcacaaaccccttacttggggttctttagaaagtgatgagcaaaacccataaaaa

SEQ ID NO: 967453 - DNA, 120 bp, Artificial Sequence
  ENSG00000229425_69 (sequence is synthesized)
aaaaaataacaggtatcttttaaaaaacagggaataagtgcaaggaaatttaagtataagtaaaaaaatttgcacgattctttaaatagataatagatataataataataattttgcagc

SEQ ID NO: 967454 - DNA, 120 bp, Artificial Sequence
  ENSG00000229425_70 (sequence is synthesized)
tttgcagccctacaattccacagcatattaatcttttcaaatctgttatttttcaccattaaaacaatcatgtaaaacaggtggagtacttcaatattccaatttcacagatgcatacac

SEQ ID NO: 967455 - DNA, 120 bp, Artificial Sequence
  ENSG00000229425_71 (sequence is synthesized)
tgagtcaaggaaaagttaagtatctattaagtcatccagcttactggatatggaactgagacttgaaagcatatcttctaaatccgacctcttctctaaagatagtgtcacctttctcca

SEQ ID NO: 967456 - DNA, 120 bp, Artificial Sequence
  ENSG00000229425_72 (sequence is synthesized)
aagatagtgtcaggacatagaaagcagaagttaaactgtatgcgctattctgccttccatacttatttttcccaagaagtaatttaaaaaacacattggagataatgcttgtgaagcact

SEQ ID NO: 967457 - DNA, 120 bp, Artificial Sequence
  ENSG00000229425_73 (sequence is synthesized)
ttgctaaatgctaaattgtccgaacactttggaaaaaagtggcagtttcttaaaaaattaacaaagaattaccatatgacccagcaattccactcctagccatgtactgaggagaactga

SEQ ID NO: 967458 - DNA, 120 bp, Artificial Sequence
  ENSG00000229425_74 (sequence is synthesized)
aaatatatgtccatgtaaaaacttagagttaaatatttgtagcagctttatttaaaatagccaaaaagtggaaacaaccccccaaaaatgtgcctcagtgatggatgtataaataaaaca

SEQ ID NO: 967459 - DNA, 120 bp, Artificial Sequence
  ENSG00000229425_75 (sequence is synthesized)
aagtactggattagcacttacctatcttttgattagaaatatcaaaaatatcttgccaaagaccttcttttgaatacttctaaatatctacaactttgcatattataaacttccatttct

SEQ ID NO: 967460 - DNA, 120 bp, Artificial Sequence
  ENSG00000229425_76 (sequence is synthesized)
attttggaaggatttttaaaaattcagtcttatgaaatttagaattgaaaccatgcctgtaaggaacattttacttttgtatcaataaacatttacaggtgattgtggatggagatagta

SEQ ID NO: 967461 - DNA, 120 bp, Artificial Sequence
  ENSG00000229425_77 (sequence is synthesized)
gtagaagaacagagtctgtctgtactactcttagtaaactactaggttataaattaggtcattgacaaatatcgactgactatgccaggaaaaatttctgcacactaagtcattagaggg

SEQ ID NO: 967462 - DNA, 120 bp, Artificial Sequence
  ENSG00000229425_78 (sequence is synthesized)
atcatgttaagagaaacaaataaaactgcaaataattgtggaccaagatcattttgtcaaattgaagttggacacaggattatgtgagctgaaggaacatttcaatagcttacagtcgta

SEQ ID NO: 967463 - DNA, 120 bp, Artificial Sequence
  ENSG00000229425_79 (sequence is synthesized)
agatggaggtgtgggaatggacactggttatcagcaaacatgagacaacttcagtatctacggatcaactgccaaggcccacgtcctctgcctgagctacattcagtctccagagactgg

SEQ ID NO: 967464 - DNA, 120 bp, Artificial Sequence
  ENSG00000229425_80 (sequence is synthesized)
gcagcagaccaccaggaactgctagaatatgttttttgaaaactttgcatattacctgccacccttgttagctttataatttaatttaatttaatttttttataattgacatacaataat

SEQ ID NO: 967465 - DNA, 120 bp, Artificial Sequence
  ENSG00000229425_81 (sequence is synthesized)
tgtacttatttatggagtacatagtgatatttcaatacatataatgtatagttatcagtgtaattagcatattcatcatcttaaacatttattatttctttacattgggaatactcagtg

SEQ ID NO: 967466 - DNA, 120 bp, Artificial Sequence
  ENSG00000229425_82 (sequence is synthesized)
tctttattctagctatttgaaactatataacatattgctatcattctccttctagtcacatttcccctcttcttatttttggctgattttccccctgaccacctatacactgcctcaaat

SEQ ID NO: 967467 - DNA, 120 bp, Artificial Sequence
  ENSG00000229425_83 (sequence is synthesized)
ccattgacctgatggaaggtgctggagattatagcctataaaaactcttgaacgacgagatttaatgagcttcctggttattgaacatgtggaggtgctgagagggtggcaaaccgagag

SEQ ID NO: 967468 - DNA, 120 bp, Artificial Sequence
  ENSG00000229425_84 (sequence is synthesized)
aaagatgaaaactgtgacatcccctaccccagacttgtagccatctcttaaatctagctgttcatccatatcctgtatatcctttaaaacaaaccagtaaattctgaatcaggaaggcag

SEQ ID NO: 967469 - DNA, 120 bp, Artificial Sequence
  ENSG00000229425_85 (sequence is synthesized)
tgtgcctcattgttctgattgcacagacttggcttatatccctgacatgaacccaaacacgatgaccaggcagtgaaacaagcaggttgacttaaccttggtcgtacaccaaaccctcgt

SEQ ID NO: 967470 - DNA, 120 bp, Artificial Sequence
  ENSG00000229425_86 (sequence is synthesized)
agattgagagagagttagcctcatgctaagcacataagctgaatgtggggaagtcagcacactgtgttccaaaaacagagaatagataatgagtgtcaaggacaacagatgaaacctccg

SEQ ID NO: 967471 - DNA, 120 bp, Artificial Sequence
  ENSG00000229425_87 (sequence is synthesized)
tgtattatctttgttttgtccaaaatgtaaaacctcaaagggagacagttcaaggtctcatttaattaatgtatccatcttcaagtctaaactctctgagggatgtgcacccagtgagat

SEQ ID NO: 967472 - DNA, 120 bp, Artificial Sequence
  ENSG00000229425_88 (sequence is synthesized)
taggatacaggtccccatggttcactgatccatggctagtaagtttaaccatccctacatacccactgtgcaatggggaggaaggacccagtacctataaccaaaacacatatagaaagg

SEQ ID NO: 967473 - DNA, 120 bp, Artificial Sequence
  ENSG00000229425_89 (sequence is synthesized)
atgagggggagtggaaaacaatgcacaatgaatcctacttcatagtacacacctatcccatgggcaggaaaagcaatgactcactgctctggccagacaaagtccaatgtggctgacctt

SEQ ID NO: 967474 - DNA, 120 bp, Artificial Sequence
  ENSG00000229425_90 (sequence is synthesized)
ggctctgacctcttaaatcattgcccatttccatttatttccccatagctcctggttctcgtctgtggaaggatccccccttgagtattgtcctacttaagagctgggtactgaggatga

SEQ ID NO: 967475 - DNA, 120 bp, Artificial Sequence
  ENSG00000229425_91 (sequence is synthesized)
tgtcctttcagggagctgcaccttttttgaagcccacttcattttggtgtatgtcaggagccctgataattattttagacgttgaccagaaacctttggtgacttatctcctcttctcag

SEQ ID NO: 967476 - DNA, 120 bp, Artificial Sequence
  ENSG00000229425_92 (sequence is synthesized)
aaatttcacattctaggttcaagagtttctaatacaacattccagaagttaattttaatacatgtagtgcccttttacttgaaaaagataaaaagctcaaatcaatctggcttaagcaaa

SEQ ID NO: 967477 - DNA, 120 bp, Artificial Sequence
  ENSG00000229425_93 (sequence is synthesized)
aggggaattttttggtgtagataaccgagaagtccagggatagcattggcttcaggtagaacttgatttcagctgtgcacaatgcatggtctattgatctgcttcctctatgtctatttc

SEQ ID NO: 967478 - DNA, 120 bp, Artificial Sequence
  ENSG00000229425_94 (sequence is synthesized)
ggcgaccagtatcttcaaactcataccagagtaaagcctttagagatcgggttttgccatgtgggccaggctggtcttgaactactagccttaagagatccacctgcctcagcctcccaa

SEQ ID NO: 967479 - DNA, 120 bp, Artificial Sequence
  ENSG00000229425_95 (sequence is synthesized)
ctgtttgaaaaagatttgggaaaaaattggagctgcctaagttgtaaattggggccacttgtcagaaccctgaggactgaaaagtatgtcttgaattaaaatatggtcttgtgcctgtga

SEQ ID NO: 967480 - DNA, 120 bp, Artificial Sequence
  ENSG00000229425_96 (sequence is synthesized)
atcagtaaaggatgtttatagatgtgaaatgttctaatgttatctggaaacagctgctaatcttggatgaatatcaggttatttcctggcctcccttctgtgacctttgaccaaggccaa

SEQ ID NO: 967481 - DNA, 120 bp, Artificial Sequence
  ENSG00000229425_97 (sequence is synthesized)
gatgctctcattattcaaaggctcttgaaagagtagaaagggggcagcccatgaaagggacagggaactgataacataacatttctaagaccatgaattacaaagtttgggcttagcatg

SEQ ID NO: 967482 - DNA, 120 bp, Artificial Sequence
  ENSG00000229425_98 (sequence is synthesized)
cagtttgggtaggttaaaagaaagtcattaaaaaataaaaaaaaaaaatgcattttgttctttttgtgtaagtgatatcattcactggagatttttttttttccctgaagaaagggaaaa

SEQ ID NO: 967483 - DNA, 120 bp, Artificial Sequence
  ENSG00000229425_99 (sequence is synthesized)
atagttgaacatcatcttcattgatataccccttttatgttttttcaatgaacctcatctgtaaatcattaactggattattagataagtgctaaataatccccagctgtaaaattctaa

SEQ ID NO: 967484 - DNA, 120 bp, Artificial Sequence
  ENSG00000229425_100 (sequence is synthesized)
gaataattaaaacttcctttcttaacattcttagtgaacaacttacaggttaaaaaacaaacccaaagagattatttcctgcaaagagcctttagtatggtagcacctacttctagaagg

SEQ ID NO: 967485 - DNA, 120 bp, Artificial Sequence
  ENSG00000229425_101 (sequence is synthesized)
cctgtcataaactgtcatctagtgaaagtgatgaagaagagtggctgggagtcaatcttatcaggagctggaacaggtgaagccctcaccagtgaaaaatcttgacagatgcagctacta

SEQ ID NO: 967486 - DNA, 120 bp, Artificial Sequence
  ENSG00000229425_102 (sequence is synthesized)
agatttcctactacaaagaataacagcagttagaaaagcaggttagagagttttttttgttcaacaatacttcattatcttacttatcccaataaaatttactcccataggataagagac

SEQ ID NO: 967487 - DNA, 120 bp, Artificial Sequence
  ENSG00000229425_103 (sequence is synthesized)
ttatatttgttggaatacttttacctttggaggtgactggcaacttacatcaaaaagacttaagtaatgtatgacatatatctagagttatatttgtttgaagagagagagcaagttgtt

SEQ ID NO: 967488 - DNA, 120 bp, Artificial Sequence
  ENSG00000229425_104 (sequence is synthesized)
tagataagagcttgattccttgttcaaatgatgtcaacagattcatttcttggttttgcttctgagttggctccatttataggtgagccagatttaggcccccagcagcacaaaagagag

SEQ ID NO: 967489 - DNA, 120 bp, Artificial Sequence
  ENSG00000229425_105 (sequence is synthesized)
ttttgttttgttttgttttgtttttttgtagcatgtactgacctggaaaacctcatgctaagtgaaagaaggcagttacaaaggaccacatatttttgataccatttatataacatgtct

SEQ ID NO: 967490 - DNA, 120 bp, Artificial Sequence
  ENSG00000229425_106 (sequence is synthesized)
tgataccatttatataacatgtctagaacaggcaaatctagagagatggaaagtaggttagtggttggctagtactagagtaagcaagcagggattggagggtattggctaaggaataca

SEQ ID NO: 967491 - DNA, 120 bp, Artificial Sequence
  ENSG00000229425_107 (sequence is synthesized)
gggtttctttctgtggtgcttttcttaaaaagttctaaaattgattgttgtgttgtttgcacaatgctgtgaatatcctaaaagctactgaatgatacactttaaatgggtgaattatat

SEQ ID NO: 967492 - DNA, 120 bp, Artificial Sequence
  ENSG00000229425_108 (sequence is synthesized)
tgaggcaaagaagagagcctcactcaagtcattgtgcgccgcagggtttctctcaggacacgtgtgtgggaatcaagaaaaactgaaccatctggtcaaggaatcttgggaattctggaa

SEQ ID NO: 967493 - DNA, 120 bp, Artificial Sequence
  ENSG00000229425_109 (sequence is synthesized)
accccaggacaggagctgaaaatcttccttacatttcattctctttcaaataacctgcaattttgcatagtaggcattcacaactttaaccacttttcatttgccatattcagtctgata

SEQ ID NO: 967494 - DNA, 120 bp, Artificial Sequence
  ENSG00000229425_110 (sequence is synthesized)
aattaactgattaatgaatcctttcttctttccttcatcctttcctacctccttttcattctttcctcctttatttccttctttggttttgctacctggacactgtgcaatgttgagtaa

SEQ ID NO: 967495 - DNA, 120 bp, Artificial Sequence
  ENSG00000229425_111 (sequence is synthesized)
gctacttagctcttctatgctttagcttcttctctaattgaaatagtaatattaacattaataataataatatatcctctagggctgttgtgatgattaaatgagttaatacatctgtaa

SEQ ID NO: 967496 - DNA, 120 bp, Artificial Sequence
  ENSG00000229425_112 (sequence is synthesized)
aggaaagatgacaatatgaagaccttgaatactgccttagttttgcaaaagaccttgctaggccttcctgtttaggtcaagaaaagtccccagagaaggtcttaaggaagaagaaagagg

SEQ ID NO: 967497 - DNA, 120 bp, Artificial Sequence
  ENSG00000229425_113 (sequence is synthesized)
ttaagaaaactggacataacctgagccaaaattttgacatggatatatcctcatagaacaagacaaaatactgtaagcagggtggatggctctgtgtgatggtcttggttgcatactccc

SEQ ID NO: 967498 - DNA, 120 bp, Artificial Sequence
  ENSG00000229425_114 (sequence is synthesized)
cttcactaaggtcaaacaaaacccaaaagtctcttgtaaacacctctcattttcattgtccatgtggagaagctcaaagctttcatttggcccaagtgacatcctaaccactttacagcc

SEQ ID NO: 967499 - DNA, 120 bp, Artificial Sequence
  ENSG00000229425_115 (sequence is synthesized)
tgttcaggtccactttataatattgcacacgttggaaatgaaactggcgcttatgactcccagaagtataaattttaatgaagattctaaaaactttatcttggccctgtgatggtgcag

SEQ ID NO: 967500 - DNA, 120 bp, Artificial Sequence
  ENSG00000229425_116 (sequence is synthesized)
attgaaaaaaatttccatttctgacatgtctataatgaacttcattgctgctttttaaaaatttttccttttgataagaaattaaagactgatttcctctctacaaaagaaaatgccact

SEQ ID NO: 967501 - DNA, 120 bp, Artificial Sequence
  ENSG00000229425_117 (sequence is synthesized)
ttattccccatacacaccctctctcttagtaaaacaactctgatttttatagctgggcatcttgccacccagttaaagatgtattcccttgcagctaaataaggccaagtgactatgctc

SEQ ID NO: 967502 - DNA, 120 bp, Artificial Sequence
  ENSG00000229425_118 (sequence is synthesized)
ttgccaataatatgtaaactgaagtgtagcaaggtacttttgggaagtctctttaaaaagcatcatttcttttgtatttgtcccttcatcttcctgctactcaagatgtgcatataatgg

SEQ ID NO: 967503 - DNA, 120 bp, Artificial Sequence
  ENSG00000229425_119 (sequence is synthesized)
caggcacttctgtaggcattttggatcatgaaatgtctttgatggaaactaagaaaagtagagaaacagaattgaaggtttcacaattctaaaacctttgtaaaagttttgtaaaaggtt

SEQ ID NO: 967504 - DNA, 120 bp, Artificial Sequence
  ENSG00000229425_120 (sequence is synthesized)
ttacaattgaaggtaattaatattacactattaattatagtaaaggtcatgcttctgtggaaaaaaaaaagagtcccttgacatgatggttcaaacaagttaggaaaggcagactgtgct

SEQ ID NO: 967505 - DNA, 120 bp, Artificial Sequence
  ENSG00000229425_121 (sequence is synthesized)
tctcaaaatcagccagagaatcagactggctgagcacactgccatcctcaatgcatggcttctagattgctttagcctttatcatttgaagccaataggaagcaaggagaacatcaaagc

SEQ ID NO: 967506 - DNA, 120 bp, Artificial Sequence
  ENSG00000229425_122 (sequence is synthesized)
acataattaatgaccgaaagcatccatcacttctgctcaaatcattttgggaatgtcatagtcttcttgatcacacttgaatgctggggaagctaagcagtgtagtacaactggacaatc

SEQ ID NO: 967507 - DNA, 120 bp, Artificial Sequence
  ENSG00000229425_123 (sequence is synthesized)
tggtgtaagagccagctcttcttcaggataagcatgcctggtttcttcaacttattccacaagagtgaacaagtaaggtctcccctggactattgtgtcttctacctgaaagtcaagact

SEQ ID NO: 967508 - DNA, 120 bp, Artificial Sequence
  ENSG00000229425_124 (sequence is synthesized)
tcttgctgtcttctctccattccaacctccatgggaagaagagataataacattttctggctgtataaaaaaaaagtaccaggaattttttgttgattgcagaaataacagttcttcctg

SEQ ID NO: 967509 - DNA, 120 bp, Artificial Sequence
  ENSG00000229425_125 (sequence is synthesized)
tttgttttcataagagattcacactctatgtgatgccttctgccatgggatgtccctcaccagattctagtgccatgctcttggacttcctagcctccagaaccataagccaaataaact

SEQ ID NO: 967510 - DNA, 120 bp, Artificial Sequence
  ENSG00000229425_126 (sequence is synthesized)
caattatgatcttattattcaatttttgatttcaggaactctttctcctttctactcctaaggataatagaatacattttagtcttttgtttatgagagcaagtatacattaattttttt

SEQ ID NO: 967511 - DNA, 120 bp, Artificial Sequence
  ENSG00000229425_127 (sequence is synthesized)
tttcttttagagtttcatgacagttgttaacataactggagaccccctgaagtgtgacaagaaaaaaattattgctctaactgtagggtggttgtagctacatctgaataagacactttt

SEQ ID NO: 967512 - DNA, 120 bp, Artificial Sequence
  ENSG00000229425_128 (sequence is synthesized)
ggaaaatgagatagtaatcccctacaaattctttgctggagttcttagatctgtagaagtagtttcatcatgcattgtgattatttgggaaagtcctattgtgcctttttaagatgatag

SEQ ID NO: 967513 - DNA, 120 bp, Artificial Sequence
  ENSG00000229425_129 (sequence is synthesized)
tgtggagctgatgggggaaaataatcaggaacagctggaggctttgaaagtgttttcatgagcagaaaaattccatgcaaggagggaatgcattttactggaatttttaaataaaagtgt

SEQ ID NO: 967514 - DNA, 120 bp, Artificial Sequence
  ENSG00000229425_130 (sequence is synthesized)
tctacttcttgaatatgttttttattagtattatttagaaatttcagtactggctttattttctgtaataacaaggacagatatacttattgctaaagatgtagttaacacagtttggtt

SEQ ID NO: 967515 - DNA, 120 bp, Artificial Sequence
  ENSG00000229425_131 (sequence is synthesized)
ttcaggtatgtccttaacagtagcatgaaaatgaactaatacactactatagtatacctggtctaccctgattaatgcagtgaccttagggaaattgtcaattttttaaatcaagggcaa

SEQ ID NO: 967516 - DNA, 120 bp, Artificial Sequence
  ENSG00000229425_132 (sequence is synthesized)
tagcactaccaggttttagatggttacactaaggactttatgggaagccagaataaatgatgataacctacatctgttatctggtcatggcttggttctgtgtcaatgagtttaggtttg

SEQ ID NO: 967517 - DNA, 120 bp, Artificial Sequence
  ENSG00000229425_133 (sequence is synthesized)
gagtgaactatcccatgtgtcagggtgatcttaaatatattgcattgattttttagtcaattttattgaggtataatccacatacagtaaaattcaccattttttaaacatgtagcttta

SEQ ID NO: 967518 - DNA, 120 bp, Artificial Sequence
  ENSG00000229425_134 (sequence is synthesized)
taaatcttgatgaatgtagatatttgtataactactactatcatcaagatatacatagaatattttcatcgctccaaaaatgtcctctatccttctttgtaacacagcctcttcccccat

SEQ ID NO: 967519 - DNA, 120 bp, Artificial Sequence
  ENSG00000229425_135 (sequence is synthesized)
ccccaactccctgacaatcacgtcttggatctatgtccctttaaatttgcttttctcagataatcatgtaactggaatcacatggcatataagcttttgtgtctggctttcttcagttag

SEQ ID NO: 967520 - DNA, 120 bp, Artificial Sequence
  ENSG00000229425_136 (sequence is synthesized)
catgatgtttttgagattcatccatgttgttgcatcaattgttcatctagttttgcttttgagtagcactttgttttatggaattatcacaatttgtttatccattcactccatcactaa

SEQ ID NO: 967521 - DNA, 120 bp, Artificial Sequence
  ENSG00000229425_137 (sequence is synthesized)
tgatgaacatttgtattgttttcagtttgaggcaattatgagtaaaaatgctgtgaacattcacatagaggtttttgtgaggacatgggttttcattactcttgggtaaatacttagatg

SEQ ID NO: 967522 - DNA, 120 bp, Artificial Sequence
  ENSG00000229425_138 (sequence is synthesized)
agctattgattgatcatatggtaagtgtatacttatttttcaaaattatgtttcaaagtgatggtaacatttgcattactactagaaaaatgtatgagttctagatgttccacaccttta

SEQ ID NO: 967523 - DNA, 120 bp, Artificial Sequence
  ENSG00000229425_139 (sequence is synthesized)
ccagtactttgtattttcagcttttaaagttttatccactctctagtataagtgtggtaatatcttactttgattttaattgggattcccctaatgactcgtggtattgagtatcttttc

SEQ ID NO: 967524 - DNA, 120 bp, Artificial Sequence
  ENSG00000229425_140 (sequence is synthesized)
atgtgcttacttacctcttggatttcttccttggtgagttgtttattcaagttctttgttaattttttcatatttggttttgtgtcttcttttattattcagttacagatagtccagata

SEQ ID NO: 967525 - DNA, 120 bp, Artificial Sequence
  ENSG00000229425_141 (sequence is synthesized)
ttttagtttatatgttttaaacataactcccttttaatgtgtataaagtaaacactgcatcatgttttaaattcgacaaactcagccaaatgggagaatattgaaaggcagtggtacagt

SEQ ID NO: 967526 - DNA, 120 bp, Artificial Sequence
  ENSG00000229425_142 (sequence is synthesized)
ttgaattgtaatttcccacataatatacgtatttttgctcaatctctcttgggttaggaagagctgaactcagaagtttgtttccttctgtcatcaataatatttataatagttcaatta

SEQ ID NO: 967527 - DNA, 120 bp, Artificial Sequence
  ENSG00000229425_143 (sequence is synthesized)
catttcatctattatttatgagtattgagagataaaaagatttttcctacattggagtagataagtatgtcatgattaagaaattaatcacttaagcaccaacttaaaaattgattcaaa

SEQ ID NO: 967528 - DNA, 120 bp, Artificial Sequence
  ENSG00000229425_144 (sequence is synthesized)
aaatattgtgaattaaaaaaataaatactgtgtggtcaagactatcccagggaaagtattcattttatgcaatttgaatatcatcagccccttagtgaaaacctgcttctatgagggagc

SEQ ID NO: 967529 - DNA, 120 bp, Artificial Sequence
  ENSG00000229425_145 (sequence is synthesized)
attacgttgtttttcaccatgcttgatttatgtcacacaaaataatcctcctcctctttctattatctgtccaatgataactttaaattctttactctgggctaaccaaatttttatcta

SEQ ID NO: 967530 - DNA, 120 bp, Artificial Sequence
  ENSG00000229425_146 (sequence is synthesized)
ttgtcatgtattattatgtagtctcaatatgacttaatatataatggaagtaaatatgattgaaacagaacttgtaaaatgcagcagaaagatatggaccccaaaggccataaagacaaa

SEQ ID NO: 967531 - DNA, 120 bp, Artificial Sequence
  ENSG00000229425_147 (sequence is synthesized)
ctaggagactgaaaagtgcagcttgccaaaagtctttggagtcaaatgttttatttcttaacgtgaagtctttagggaattggatcaaatcaaataaaaagagacatgagaaaagtgaaa

SEQ ID NO: 967532 - DNA, 120 bp, Artificial Sequence
  ENSG00000229425_148 (sequence is synthesized)
caatcacagaaataatcatttattgaacatctactacatactagactctactcttcatgctttatgtgcattaacttgtaatctttacagcaacttaatgaggttgttactattattaga

SEQ ID NO: 967533 - DNA, 120 bp, Artificial Sequence
  ENSG00000229425_149 (sequence is synthesized)
ccaattttacagagtagaaaaccaaggtcacacagttgataactgacagagtcacaattgcatcctagcagttgagctactaagcccatggttttattcagtatgctatgctacctctca

SEQ ID NO: 967534 - DNA, 120 bp, Artificial Sequence
  ENSG00000229425_150 (sequence is synthesized)
acctctcaattcagttaattaatagctcaaaaagatcttctctcataataaattattataattgttatttgaaattagtattgttagctataactggaaaaaaatctgatttctgttttc

SEQ ID NO: 967535 - DNA, 120 bp, Artificial Sequence
  ENSG00000229425_151 (sequence is synthesized)
tttagctaatgggttatctatagattggatctgtaaaataatgcaatttattttcttaaaagtagcaacatttataaatccaaatgcttattgtccttctcagagcggttaccttgggag

SEQ ID NO: 967536 - DNA, 120 bp, Artificial Sequence
  ENSG00000229425_152 (sequence is synthesized)
accttatatttatgtcaaagaagctatcattactcaaaatatttttgctttgtctttttaaattgtcttggaaaactgggaatcttaaaaatatttctgttggtagtaacattaaacttt

SEQ ID NO: 967537 - DNA, 120 bp, Artificial Sequence
  ENSG00000229425_153 (sequence is synthesized)
taaacttttattttattttattatcatcttattttttaaattaatttatttatttttgaaatggaatctcactctgttgcccaggctagagttcagtggcatgatctccactcactgcaa

SEQ ID NO: 967538 - DNA, 68 bp, Artificial Sequence
  ENSG00000229425_154 (sequence is synthesized)
tattaaacttttaaatgtggatttgaatgttggaaacaagttttgtagataaaaatccagttaaccaa

SEQ ID NO: 967539 - DNA, 120 bp, Artificial Sequence
  ENSG00000229425_155 (sequence is synthesized)
gttggaaacaagttttgtagataaaaatccagttaaccaaaattagatgtaattctaaacaaaaatgagttcttgttgagactcaggatggcctttatttcaggtctacaacatttaaaa

SEQ ID NO: 967540 - DNA, 120 bp, Artificial Sequence
  ENSG00000229425_156 (sequence is synthesized)
tggttggagaatggggcaatgacagttttggagtttactaaattgtctagcttactaaggtgtctacaaccttgaagcaacaacttttgttagtgtaagctctgatatgttttattaaaa

SEQ ID NO: 967541 - DNA, 120 bp, Artificial Sequence
  ENSG00000229425_157 (sequence is synthesized)
cagacaatattaatagctcatagatctgtgcctaatatcttgctttaactcataagtgggttggatgtttctgaattaataacagaaccattgtttgagtgttccatgttgatcctaatg

SEQ ID NO: 967542 - DNA, 120 bp, Artificial Sequence
  ENSG00000229424_0 (sequence is synthesized)
aggggtgacacaaggcatgcagaaaccctcgaggtcccctggagggcagagtaaaccatcaacaacaggtagtcagagcccagccttatggtctggaattaagcatctagaaggataggg

SEQ ID NO: 967543 - DNA, 120 bp, Artificial Sequence
  ENSG00000229424_1 (sequence is synthesized)
atgacagggggagggcaagaacagttaggacctcgcttctggagtagctagaaaaacatggagagatggaaacaaaccaaggactgggacatgagggaagacaagctagaagcccacttg

SEQ ID NO: 967544 - DNA, 120 bp, Artificial Sequence
  ENSG00000229424_2 (sequence is synthesized)
tgaaaatgacctggaaccggaagacagtaaaggtcataaatgatgtaccttttacatctggcagagggccaggacagttctggggttcatatttctctccttctctactctgaggtttat

SEQ ID NO: 967545 - DNA, 120 bp, Artificial Sequence
  ENSG00000229424_3 (sequence is synthesized)
acggcccccccaccgcccccaagatcaccttgatgggacaatttggcctatccaggcaggatcaacaagaggaattcaaggagaaagcaaattgttttgcaaatagagtaagatatgttt

SEQ ID NO: 967546 - DNA, 71 bp, Artificial Sequence
  ENSG00000229422_0 (sequence is synthesized)
tcgctcgcgctgtcagcatcgcagaactagggccaggtgtcccagtggctgcggccaagccaggcattctg

SEQ ID NO: 967547 - DNA, 120 bp, Artificial Sequence
  ENSG00000229422_1 (sequence is synthesized)
gccaggtgtcccagtggctgcggccaagccaggcattctgaccggcggcggcggctgcacaggagcgagaactgagaagccgccgctcaaccccacacggggtgactgctgagggcccat

SEQ ID NO: 967548 - DNA, 120 bp, Artificial Sequence
  ENSG00000229422_2 (sequence is synthesized)
accaacggccccgatctccctcaggtggaggactgggcgggaggcacagcctgggggccctcaggctgggcgcgctggcgatcccgaggccgaccaggccatgcacctccagcccgcctg

SEQ ID NO: 967549 - DNA, 120 bp, Artificial Sequence
  ENSG00000229422_3 (sequence is synthesized)
ggcacccaagctgcagccgccttctgtgtgcaggcagcaacctccaggcaactcccgagtccgccctcacttcccacatctcggaacgagggccagatgtccgtgtggctgcggccaagc

SEQ ID NO: 967550 - DNA, 120 bp, Artificial Sequence
  ENSG00000229422_4 (sequence is synthesized)
agaggtgtcgagctctggcataggaggagccgggcgggggcagggtctggcgggctctcaggccaggagcacttgcgatccagaggccgcccaggccatgctcaccacctgggcgcccag

SEQ ID NO: 967551 - DNA, 120 bp, Artificial Sequence
  ENSG00000229422_5 (sequence is synthesized)
ctacaggcgccaggcaactcccaagctggctggcgcgcccagcctcgcagacccgggcctggatgtcgccgtggctgcggccaagccaggcggtctgctcggcggcggctgcaccggggc

SEQ ID NO: 967552 - DNA, 120 bp, Artificial Sequence
  ENSG00000229422_6 (sequence is synthesized)
accctcagccccatccccggtggctgcggacggcccctggagcggccccgacgtctcttcggaggagaagaggggtgggagtcacggccaggcaggccctcaggcgggaagggatgcgcg

SEQ ID NO: 967553 - DNA, 120 bp, Artificial Sequence
  ENSG00000229422_7 (sequence is synthesized)
gatgcgcgcctgcgattccgggacgtaccgcgccagcccaggagaacccggaagccagcagctcttgtttctctgtgtgtttctgtgaggaaccaccaaattgttttccacggcaagtgc

SEQ ID NO: 967554 - DNA, 120 bp, Artificial Sequence
  ENSG00000261009_0 (sequence is synthesized)
acctaggtgctcagctctgagatgtgtcacaacattgcccaatacaggcaggccacaggcgggagagtcacatttcctgggtgcttggcccagtggtatgtcacatttccttatgtagga

SEQ ID NO: 967555 - DNA, 120 bp, Artificial Sequence
  ENSG00000261009_1 (sequence is synthesized)
agggcacacgtagcaagagagagtcacattacctaggtactgtgctagagctatcagtctctgtgtcgttcaatgtgagagttatgatctctttagacatccatgtaacagagcctcaac

SEQ ID NO: 967556 - DNA, 120 bp, Artificial Sequence
  ENSG00000261009_2 (sequence is synthesized)
tccttcatcctcagatgtaaaggctagtgaagaccaaataagccttgaaaggtaattcccctaaaaaggcagaatgtcttaggctttggcctctccccttcaagcacaatgagatcataa

SEQ ID NO: 967557 - DNA, 120 bp, Artificial Sequence
  ENSG00000261009_3 (sequence is synthesized)
cctctcttttgacttctcactatgcccagcactggaacaaagctcctgactccacaccctcacctttccacccttgtgccttcactgggcagacaagagatgagaagacctgaactctgg

SEQ ID NO: 967558 - DNA, 120 bp, Artificial Sequence
  ENSG00000261009_4 (sequence is synthesized)
gacagtctggggagaaaagaatccaaaaagggttgaggcggcaagggctgagctcccacgggtgccccggcccaaaggtgcaggtccaggctgttttccaggtggcattcagtgcaggtt

SEQ ID NO: 967559 - DNA, 120 bp, Artificial Sequence
  ENSG00000261009_5 (sequence is synthesized)
cttcaatgccactggaaggcatgaaaaacccactgtagctgctgctgcttccttttcttaagctgtgaaaatgcaaacactttttcaaggttttcagatatgcccaggtacccccaactg

SEQ ID NO: 967560 - DNA, 120 bp, Artificial Sequence
  ENSG00000261009_6 (sequence is synthesized)
aaaaggaggataatggcattgttcatcatggcttattgtcttgcccaggcaggagccagcccctgactcgccaatccagctgccccaggctggaggtgatcctttcgagcctcctccctg

SEQ ID NO: 967561 - DNA, 120 bp, Artificial Sequence
  ENSG00000261009_7 (sequence is synthesized)
caactccactcctcttttttctcttcctcaaccaccggcatacttttggtcatcctccttgttgtcacaatgggggcgtgatgccataaagacctgggaaccccaatgatctcaggtccc

SEQ ID NO: 967562 - DNA, 120 bp, Artificial Sequence
  ENSG00000261009_8 (sequence is synthesized)
gcaggggtcaggtgagcatataggaagtccagaaggacagtcatctgccacctccagttgaaaaagaacaaaaccctcgcactccagaaatgagtcaagaacccagcgaaggccacaggt

SEQ ID NO: 967563 - DNA, 120 bp, Artificial Sequence; identical to SEQ ID NO: 900172
  ENSG00000261009_9 (sequence is synthesized)

SEQ ID NO: 967564 - DNA, 120 bp, Artificial Sequence
  ENSG00000261009_10 (sequence is synthesized)
gaccagtccggcctgtgcatggcaccagcagccgcaggctagaggcagtcatgtcaggcctcctccatacagcatctctcctgcttttttttcaaacggccctaatcacttaatttggtc

SEQ ID NO: 967565 - DNA, 120 bp, Artificial Sequence; identical to SEQ ID NO: 900174
  ENSG00000261009_11 (sequence is synthesized)

SEQ ID NO: 967566 - DNA, 87 bp, Artificial Sequence; identical to SEQ ID NO: 900175
  ENSG00000261009_12 (sequence is synthesized)

SEQ ID NO: 967567 - DNA, 120 bp, Artificial Sequence
  ENSG00000261009_13 (sequence is synthesized)
ctcatcacccagtgattccaaaagaaacgatctacaatggcatgactaagttccagaaacaaataaacaaaatactgagggaagcccgttggtcactttgattcttcaaaggtgacaatt

SEQ ID NO: 967568 - DNA, 120 bp, Artificial Sequence; identical to SEQ ID NO: 900177
  ENSG00000261009_14 (sequence is synthesized)

SEQ ID NO: 967569 - DNA, 120 bp, Artificial Sequence; identical to SEQ ID NO: 900178
  ENSG00000261009_15 (sequence is synthesized)

SEQ ID NO: 967570 - DNA, 120 bp, Artificial Sequence; identical to SEQ ID NO: 900179
  ENSG00000261009_16 (sequence is synthesized)

SEQ ID NO: 967571 - DNA, 120 bp, Artificial Sequence; identical to SEQ ID NO: 900180
  ENSG00000261009_17 (sequence is synthesized)

SEQ ID NO: 967572 - DNA, 120 bp, Artificial Sequence
  ENSG00000261008_0 (sequence is synthesized)
tgtccgcgagttgccgaatgaagctgagcgtctcagtggaaccagggatctcagggaggggaaggtataaaattttcaaatggaggagtatacctgaacctaatcatggatgtgatttta

SEQ ID NO: 967573 - DNA, 120 bp, Artificial Sequence
  ENSG00000261008_1 (sequence is synthesized)
tgtaagtaatatgtgagatacagataagctgattctaaaacttacaagaatggcaaagaaacaagaagagcttaaactgcaatcatcaacagagaagctttctgcaaccaaagtgaagac

SEQ ID NO: 967574 - DNA, 120 bp, Artificial Sequence
  ENSG00000261008_2 (sequence is synthesized)
tgaagccttaggctatggcagaagttgggcgcctgaagtacacgtggaaatatgccaactgaacattggactaccacgtcaagggtctcctacccctgggccatggatcaataccagtct

SEQ ID NO: 967575 - DNA, 120 bp, Artificial Sequence
  ENSG00000261008_3 (sequence is synthesized)
gtgacctgttaggaaccggtagcaggagcgcctgcccctggctcagcgcccggtgccaacagaacacctttcaggatccacagcaacgcagacaacattttaaagcacctgatggatttg

SEQ ID NO: 967576 - DNA, 120 bp, Artificial Sequence
  ENSG00000261008_4 (sequence is synthesized)
gaaaatatttaatgaagacaatgatgctgacatctcaagttaaaaggttctacagagaaggcaaagattttgaaggcacaggagactatcatagatattcacaacggcatctccctaaag

SEQ ID NO: 967577 - DNA, 120 bp, Artificial Sequence
  ENSG00000261008_5 (sequence is synthesized)
gatttgaaagctttgcatcaaccaaaggaaaagcaccagtgagagtcaagatacagttccagacagatgtaattggttaagataagatcatactggatgtggatgggtcctagatctgac

SEQ ID NO: 967578 - DNA, 120 bp, Artificial Sequence
  ENSG00000261008_6 (sequence is synthesized)
tgctgatatccttataagaagaagaaaggacacgcggagactacagtgatgttgccacaagccaagaaatgccaagaatttcgggagccaccagaagatggaagaggcagggaaaaatcc

SEQ ID NO: 967579 - DNA, 120 bp, Artificial Sequence
  ENSG00000261008_7 (sequence is synthesized)
tcccctaaagccttcagagagagcatagctctgccaacaccttgattctggacatctagcctcttaaacttcctcaggtgtctcatttcttctgtctcagaagtcatggatgtcaatgaa

SEQ ID NO: 967580 - DNA, 120 bp, Artificial Sequence
  ENSG00000261008_8 (sequence is synthesized)
gatatggaattcacttattcattcttataaatattacttagtgtccttgtgcttggcactgtgcttggtcattgagatctactgttcaaaagcaagataacatacaggctggaatagcga

SEQ ID NO: 967581 - DNA, 120 bp, Artificial Sequence
  ENSG00000261008_9 (sequence is synthesized)
gatgcaagaatcccaagccttcaaagccagctcctgcagaagagagagggcctggcagctgagctggatgcttcaggagcagaggatctatcaactgcagaccaagcacagggagacgca

SEQ ID NO: 967582 - DNA, 120 bp, Artificial Sequence
  ENSG00000261008_10 (sequence is synthesized)
ggcaaacctggaacagtaacccagccagctccaattgctccgacagtacttggtggccagagagtcggcagcagaaagcatgccccgggccgtgaagcaggaaatcgactctgactcaat

SEQ ID NO: 967583 - DNA, 120 bp, Artificial Sequence
  ENSG00000261008_11 (sequence is synthesized)
ggaaaaagaaaggatgctgaggaggaactgttgggggcagagcccttgaagccagctggcaagactgagaccactgatcaatgctttgcccactgaaaggacaaccttataaagaattgg

SEQ ID NO: 967584 - DNA, 120 bp, Artificial Sequence
  ENSG00000261008_12 (sequence is synthesized)
aaccattaagctttaatttttagaaatttggatgctagagggaatggtctttagggaccgctgcggtccctaaacccatcatctgctctggtgccaggatacaaatctgttcgccctgaa

SEQ ID NO: 967585 - DNA, 120 bp, Artificial Sequence
  ENSG00000261008_13 (sequence is synthesized)
tccttcatctgcttggatgtccaggatacaatcttttcagtttgggaacttctgactgtttttctcaggtgtctgccttgcttcaatgcttatatcttgaacattgtgtctttacgtgtc

SEQ ID NO: 967586 - DNA, 120 bp, Artificial Sequence
  ENSG00000261008_14 (sequence is synthesized)
tgccttcggcaggtttcattaatttgtaatttatgcctacaaaattgtttaagcacttctggatcttacactggtcaagggtgtgtattagtgggtgtgtgtgcactatacagactgtgg

SEQ ID NO: 967587 - DNA, 120 bp, Artificial Sequence
  ENSG00000261008_15 (sequence is synthesized)
ggcagaatctactgggttttgtttttcctgattttaaaatgtttagtcattctgatccatacgtgtgagttaataagtgtgtgtctctgtatcttggtgcaagtgtctgtactcgggaag

SEQ ID NO: 967588 - DNA, 120 bp, Artificial Sequence
  ENSG00000261008_16 (sequence is synthesized)
cagtgaacacaagcagtttagaatagtattccacatttctctaccatttgcattaactgtgtctttccaaaatgcatattcagcttcattttttttttttattcagaggtggtagttttc

SEQ ID NO: 967589 - DNA, 120 bp, Artificial Sequence
  ENSG00000261008_17 (sequence is synthesized)
aaactcaaatctagctcatttgtctcttttagcacatgattgaggattagggactattctaactggcagtcaagggtcagtattttggactccatttggcttagataatttatatagaat

SEQ ID NO: 967590 - DNA, 120 bp, Artificial Sequence
  ENSG00000261008_18 (sequence is synthesized)
aaaagtctaacaggtataatcacaatagccttggcttaataattttccaagcatacttgaagttgaaaaacacttcaaactaaaattggaagaatgttctggttagtaagttgtatgctt

SEQ ID NO: 967591 - DNA, 120 bp, Artificial Sequence
  ENSG00000261008_19 (sequence is synthesized)
ctgtaataatggagagaattggaatgcagttctctttgtttgatttatatggcaacaccaagaatgtgagacgtgtgttttactgtagaaataaactttcaacattgacctagagaacag

SEQ ID NO: 967592 - DNA, 120 bp, Artificial Sequence
  ENSG00000261008_20 (sequence is synthesized)
aagactcaggttggtacttaaatcctgctctgctaggttataatgaaaagcatcttaataagaatagattttttaggaagaaaaatcttaagattcatgtctttctctcattgtttgcaa

SEQ ID NO: 967593 - DNA, 120 bp, Artificial Sequence
  ENSG00000261008_21 (sequence is synthesized)
tatttgtcaacatttgcttgcatgattcctacgaagaacaagcttatttggagaaagtgatctaaattttagaattgaatgtactccactaattaaatgtgtatgtccttgtgatcttag

SEQ ID NO: 967594 - DNA, 120 bp, Artificial Sequence
  ENSG00000261008_22 (sequence is synthesized)
aagcgcaatattcgggtgggagtgacccgcttttccagagaacctttttgtgatgaaaacgagatgaaactatggaagaaccagagaagcatcagcctgagaaggactcaactgattatt

SEQ ID NO: 967595 - DNA, 120 bp, Artificial Sequence
  ENSG00000261008_23 (sequence is synthesized)
ccagagaagcatcagcctgagaaggactcaactgattattgctggctttgaagacaggaaggagccatgagccagggaatgctggtgacctctggaagctggaaaagggaaggaagtaga

SEQ ID NO: 967596 - DNA, 120 bp, Artificial Sequence
  ENSG00000261008_24 (sequence is synthesized)
gattaccttgaaggaatgtatgttcttcacgtggatggagagagatgcagtgtgtgtttattttagaaatactgtaggaatatagaaaacataagtaaaagttgtgatggatagttgaaa

SEQ ID NO: 967597 - DNA, 120 bp, Artificial Sequence
  ENSG00000261008_25 (sequence is synthesized)
tgacctcgtaattcacctgcctaagcctctcaacgtgttgggattacaggcgtgagacactgcacccggcctgatgcatgatttctttcccccgaactcagacatcagatcaaggtcact

SEQ ID NO: 967598 - DNA, 120 bp, Artificial Sequence
  ENSG00000261008_26 (sequence is synthesized)
gttatcttcccaagaacgtgtaaagtgcctgacatacagtaggtgccagtaaataattattgaatgaaagaataaacatatcaaaatggtatctactttttaaaggttaaaaaaaactaa

SEQ ID NO: 967599 - DNA, 120 bp, Artificial Sequence
  ENSG00000261008_27 (sequence is synthesized)
caaatttttctttacaatttgagaaaaaaattcttgtttcctggagagctaatgaaaggaaacacacattcacacatacaatactttttttttttttcaaactttggggaatggatccat

SEQ ID NO: 967600 - DNA, 120 bp, Artificial Sequence
  ENSG00000261008_28 (sequence is synthesized)
agtaaatactcctccccatacattcgcctgcttcacgattttttattttttaatatattatcaaaagtcctgaggtgacatctcaacttcttctctactcaacttacaggcagagaaaac

SEQ ID NO: 967601 - DNA, 120 bp, Artificial Sequence
  ENSG00000261008_29 (sequence is synthesized)
aaaagctcagctggaagacactgaaatggaggcacctactttcaagcccagactttaagagagagatccctgcatggtgacagtggccactctcctgtcctgctggcagatgaaacctcc

SEQ ID NO: 967602 - DNA, 120 bp, Artificial Sequence
  ENSG00000261008_30 (sequence is synthesized)
caaatcctcccaaagtgctgcagcatccacgtgcagaagggtatttgcattcacttggtgcctcattgtaaggaaggacaccattgacagcacataacatcactattattattgctaaac

SEQ ID NO: 967603 - DNA, 120 bp, Artificial Sequence
  ENSG00000261008_31 (sequence is synthesized)
agatggaaaataattgtttatggaatttgtgttttaatcgcattaatgtctttggcaggaagatccacctaagtacacaattcaaagcctgcctttgatctgggccccttgggggcattt

SEQ ID NO: 967604 - DNA, 120 bp, Artificial Sequence
  ENSG00000261008_32 (sequence is synthesized)
tccatgactgataaaatgctcctctgagttcataggcaaatgatgaaaatgataaaaagacaaaagtcaggcaccaacctcccatttggatattttgtctccttggagaatcacaagctc

SEQ ID NO: 967605 - DNA, 120 bp, Artificial Sequence
  ENSG00000261008_33 (sequence is synthesized)
accaggcttgcagtcatgctgacgatacaacacatctcaccctgttatacccacccagggctcaatatgaacgccttcgtcgctctcctcccttcttttccagttccctcctcccctttg

SEQ ID NO: 967606 - DNA, 120 bp, Artificial Sequence
  ENSG00000261008_34 (sequence is synthesized)
cacacaaacacacacatgcttgatgcaagaattcatgtgctctctcttttcaaagattcttactgcctttttatatgggccagtttagatgcttataaagtatttctcaataatagccct

SEQ ID NO: 967607 - DNA, 120 bp, Artificial Sequence
  ENSG00000261008_35 (sequence is synthesized)
tacacatattttcccctttcatccatcacgcatttcttggttagcattatattgtgacaagatagaaatcaaaagcattgcttttaatgaaaatgaacgttctagttcggaaacagtttg

SEQ ID NO: 967608 - DNA, 120 bp, Artificial Sequence
  ENSG00000261008_36 (sequence is synthesized)
gaaaacttgacaatttccctcttaccaagacccaaaggacagaagctaatgtagaaattttgatagctagtgaaaaagaaaaggttctatagatttttgtctcacaagcacaatccccat

SEQ ID NO: 967609 - DNA, 120 bp, Artificial Sequence
  ENSG00000261008_37 (sequence is synthesized)
cttttcttctcctgagaaggttaattagatactttcctttactcttagaataaagagaactaaggaggttttaaattcataaatgtatttttttgtttatttgtttggtgtatttttccc

SEQ ID NO: 967610 - DNA, 120 bp, Artificial Sequence
  ENSG00000261008_38 (sequence is synthesized)
tctcattctttctcctctgcagaacacaactagtaaatgattggatctttgacagaacaaaggtatttttgatgggctctgtaatctagtgcgctaatgcgcccagtcccctcattgtct

SEQ ID NO: 967611 - DNA, 120 bp, Artificial Sequence
  ENSG00000261008_39 (sequence is synthesized)
tgctgtctgatcccatcccttctgccagacagtcactgcgggatgagtcacttttaatgtctgataatcaaggtgaattttcaaaaagctgccattttggaattatgcactatatcacgg

SEQ ID NO: 967612 - DNA, 120 bp, Artificial Sequence
  ENSG00000261008_40 (sequence is synthesized)
tgtcagggaggagaagagaaggaaggatgaagggaaggctaagatagacacctactgcacattgagagaactgcaggacacaaccagcaccgtgccagacaagatgtgtccggagggtcc

SEQ ID NO: 967613 - DNA, 120 bp, Artificial Sequence
  ENSG00000261008_41 (sequence is synthesized)
aagtcgatcaaggcatacataatgagaaggagactatgttaattataaattaaaaataacttctatgataatgaagattatatgcacaggaggaaatgtcttagttaaaacagactggag

SEQ ID NO: 967614 - DNA, 120 bp, Artificial Sequence
  ENSG00000261008_42 (sequence is synthesized)
ggatgcaattaaacaccagccatttgggggtatgaattctgtacctactgaatatattgtggtccattaaataacctaatacaaacttacatttgaaaaagaatagaagtgaactgtggc

SEQ ID NO: 967615 - DNA, 120 bp, Artificial Sequence
  ENSG00000261008_43 (sequence is synthesized)
tgtctccatggatgctgaattgtctgccatccttatttaaagcaacacaagcgaagggatgttacttagtagatgaaaacagccttccttcaactagggagactggttatttctggaatc

SEQ ID NO: 967616 - DNA, 120 bp, Artificial Sequence
  ENSG00000261008_44 (sequence is synthesized)
atttaaagaactgaacccacccccatgaagtagagagggagatactggaaaccctcggtaaacaaaggccaatcaaatattcttgcaaggctttggctgttcaaatatatggcagtcagt

SEQ ID NO: 967617 - DNA, 120 bp, Artificial Sequence
  ENSG00000261008_45 (sequence is synthesized)
gtcttctctaaggtaattaactgaacccactgttaggtatgatggctttgaaatttttttaattattggcattatattaaatagtagggtagctgaaggaaaatgacataatatgagaat

SEQ ID NO: 967618 - DNA, 120 bp, Artificial Sequence
  ENSG00000261008_46 (sequence is synthesized)
agcctgctacttttgtttattattcagagaagtgaacacctataaatagaaccaggatgttttgactagggaaatgctatcctcattacagctgggagatgctggagtgatttaaagcca

SEQ ID NO: 967619 - DNA, 120 bp, Artificial Sequence
  ENSG00000261008_47 (sequence is synthesized)
aagcttcaaagctttgtcctgctgtataaaagcatgagggttttcatggctgtttcagtggtcggtgagagcctgcaggtgctttatctgtcctggaggagggaggagagccatttctga

SEQ ID NO: 967620 - DNA, 120 bp, Artificial Sequence
  ENSG00000261008_48 (sequence is synthesized)
gagtgctattttgtaaccatgatgagtacttacatattcctccaagaggtatttaaatacctacatatcttctttaacataagttatgtttacagattattacaccttcatattgtctac

SEQ ID NO: 967621 - DNA, 120 bp, Artificial Sequence
  ENSG00000261008_49 (sequence is synthesized)
ttgtctaccaaggttaagtagtccctcctccccttaaccccctccacctgcacctttgccactctctctctctctctcttgcacgctctccctgtctctctctctctctctctcacacac

SEQ ID NO: 967622 - DNA, 120 bp, Artificial Sequence
  ENSG00000261008_50 (sequence is synthesized)
taagctccacctcctgtcagatcagtagtgacatgagattttcataggagcagaaaccctattgtgaactccaaacacaagggatctaggttatgcactacttatgagaatctaatgcct

SEQ ID NO: 967623 - DNA, 83 bp, Artificial Sequence
  ENSG00000261008_51 (sequence is synthesized)
ccccatgaccaaaaaggtcagggaccactgctgtaggtaaacctgcactggtacaaaatgacagaaatatacacagtcattta

SEQ ID NO: 967624 - DNA, 120 bp, Artificial Sequence
  ENSG00000261008_52 (sequence is synthesized)
tgcactggtacaaaatgacagaaatatacacagtcatttattatagcattgttatattgttatattgttattatagcattgttgcatgaatacaggattggaaataaatcaaggatctag

SEQ ID NO: 967625 - DNA, 120 bp, Artificial Sequence
  ENSG00000261008_53 (sequence is synthesized)
taataagggactggttgaataaaccatggaacacacgcaaacacacacacacatatacaaaatagagctgtatatactggtatggagagatatacagaatgtatgaagctggtggggtga

SEQ ID NO: 967626 - DNA, 120 bp, Artificial Sequence
  ENSG00000261008_54 (sequence is synthesized)
gtattttcttgtatttttgtaaagaaactggaaaaataaaaaaaaagcaactaataaaatggttacctataaggagttgacaggaaatatggtggcaggagtgggacaaagattcatctg

SEQ ID NO: 967627 - DNA, 120 bp, Artificial Sequence
  ENSG00000261008_55 (sequence is synthesized)
ttgcattttttgtataacattgactgtttaaaaactttttgttgtgtactttacacaaaagaagaaagaataggttaactaaccttgatacccatcacctagcctcaacaattatcaatg

SEQ ID NO: 967628 - DNA, 120 bp, Artificial Sequence
  ENSG00000261008_56 (sequence is synthesized)
catgagctatattacttcatccataattccacacccatttcccttcactaaattattttaaagtcagtgtcagacatcatattatttcatctgtatatatccgtaaatatttcactgtgt

SEQ ID NO: 967629 - DNA, 120 bp, Artificial Sequence
  ENSG00000261008_57 (sequence is synthesized)
atcgctgacagataaaggctgttttttaagaaatcatatcacactaaaaattattgtaatttcttatgtctaatggaaatttaaataatatctaattagactacatttttgtgaccatta

SEQ ID NO: 967630 - DNA, 120 bp, Artificial Sequence
  ENSG00000261008_58 (sequence is synthesized)
ccttatatttcagctgccctgcttccttctttatttatagtgtctaagtttattgtgggtcttcttagtacaaattagcaataaattttctcttggaaataatcttaatctcagagaaaa

SEQ ID NO: 967631 - DNA, 120 bp, Artificial Sequence
  ENSG00000261008_59 (sequence is synthesized)
gcctcaagaatattacaaagaatttctgtatactcttcccccagatacccaaatttaccatatttgctttgtatcgtcctcacagtctgtctctatgtatgatattatatatttaattat

SEQ ID NO: 967632 - DNA, 120 bp, Artificial Sequence
  ENSG00000261008_60 (sequence is synthesized)
atatgtgttatgtttttctgaaccatttaagggtaagttgcagacataacgcctctttcccccaaaatacgttcatttgtattttctaagaatattctgatatataaccacaggggaaat

SEQ ID NO: 967633 - DNA, 120 bp, Artificial Sequence
  ENSG00000261008_61 (sequence is synthesized)
taacatgatacaatactattatgaaatctacaaatctgattcatattacacctttttttcccttgtatttctttgcccttacaggaaataaataaattttttttctgtatcagagtgcaa

SEQ ID NO: 967634 - DNA, 120 bp, Artificial Sequence
  ENSG00000261008_62 (sequence is synthesized)
aagcttgttgccagccctaagaaagtgattttattatggagttatctaatggcttcagataacacgtttcattgtctacagtcttgtaagaatttaactcttatgttatagatatttcat

SEQ ID NO: 967635 - DNA, 120 bp, Artificial Sequence
  ENSG00000261008_63 (sequence is synthesized)
tattcaaaacataaagtgttataatattgatatttcacctttatttccattttaataacatgtattatgtttcaaacctttctaagcatcttgacatactcatttgatctttagagcaat

SEQ ID NO: 967636 - DNA, 120 bp, Artificial Sequence
  ENSG00000261008_64 (sequence is synthesized)
ttacaagataagttagagcagaagtcattatcttcattttaccaataataaaacatgcacaaggtgacacagatattagtgtcagacttgaagctgtggcctgaagctaaggactcctgg

SEQ ID NO: 967637 - DNA, 120 bp, Artificial Sequence
  ENSG00000261008_65 (sequence is synthesized)
tcaagtactctttccacagctactgctgcttctgttaatgtttgataactttttagcatactctgtatttccagtacctattataaccattacaatgcatgtaacgcaaatgttggttgc

SEQ ID NO: 967638 - DNA, 120 bp, Artificial Sequence
  ENSG00000261008_66 (sequence is synthesized)
tcttagacgatccttagcattctaaccacataagaaaaagtagcaaataagtatttcaggcatctttcttgggcttttatcacagcacaacctgctgcagagtctgatgtcatgatggac

SEQ ID NO: 967639 - DNA, 120 bp, Artificial Sequence
  ENSG00000261008_67 (sequence is synthesized)
ctttattgtcagcttcagaaattctgggtgagctattaatatgcttaatgattttgctccccagcaacatgttcctatgaaaacatggtgagtatatattactcactatgtttcacaaaa

SEQ ID NO: 967640 - DNA, 120 bp, Artificial Sequence
  ENSG00000261008_68 (sequence is synthesized)
caattgtgtacatattttgtcttcatacctatcaacatttgccttaaagacacattatgtataatttgaaacatccatgaggcttttccttttcctggaataactagcaccccttctcca

SEQ ID NO: 967641 - DNA, 120 bp, Artificial Sequence
  ENSG00000261008_69 (sequence is synthesized)
acctcttccccattcaggggttcttgaccttcactgtgttatggaccccactgccaatctgccatagacctaaagcctatggacctttcttagtataatgcttttaaatatataaaataa

SEQ ID NO: 967642 - DNA, 120 bp, Artificial Sequence
  ENSG00000261008_70 (sequence is synthesized)
aatattcgggtgggagtgacccgcttttccagcagtagaaaacagatgaatacacctagatttcttcctgcgtgaatccagttgaggggaaggtataaaattttcaaatggaggagtata

SEQ ID NO: 967643 - DNA, 120 bp, Artificial Sequence
  ENSG00000261008_71 (sequence is synthesized)
tgtcctaaccccataacctcgacatcactgtgagtaaaactctttttaattatatgactgtgtagtgtgcacattagcattgctaatcagcttactgcagtggatttgtatcttcactac

SEQ ID NO: 967644 - DNA, 120 bp, Artificial Sequence
  ENSG00000261008_72 (sequence is synthesized)
taatgttcatagaatgtccattgacataattgcaggtctgtatcagtgcttagatgctactgtatttaaaaccacaggtcggaatttattagtgcataccacagtatatggaaaaatttt

SEQ ID NO: 967645 - DNA, 120 bp, Artificial Sequence
  ENSG00000261008_73 (sequence is synthesized)
aaacccgatacaattgtatgtcactaacttgagtttacatagttttatctgaaatcttcatggtacataatgctataatacactggatctttagcttaaaaataaaaagacactatctca

SEQ ID NO: 967646 - DNA, 120 bp, Artificial Sequence
  ENSG00000261008_74 (sequence is synthesized)
gggagacgtttgagacccagcgtctctagatctcgtatttgaatttgtggcgcttggtgtccgcgagttgccgaatgaagctgagcgtctcagtggaaccagggatctcagggagacagg

SEQ ID NO: 967647 - DNA, 120 bp, Artificial Sequence
  ENSG00000261008_75 (sequence is synthesized)
gtgattttcctgcctcagcctcctgaagtgctggaattacaggcatgagctgccacacctgcgcctgcccctggctcagcgcccggtgccaacagaacacctttcaggatccacagcaac

SEQ ID NO: 967648 - DNA, 120 bp, Artificial Sequence
  ENSG00000261008_76 (sequence is synthesized)
agagacaagcctctttccccttcttctcccctgcgttatgccaccagtgtttcctcagtagccccttccaaatcgctctgccttcaagtttgtgcatgtctgtgtggcatccctcctcct

SEQ ID NO: 967649 - DNA, 120 bp, Artificial Sequence
  ENSG00000261008_77 (sequence is synthesized)
ccttcactcccatagtggatcttgtaaaagggcttcagatcggccccattcatctccctggtgatagcagtgaatgtagataaatctctggctgcctgcttgctgctggagtatgatttt

SEQ ID NO: 967650 - DNA, 120 bp, Artificial Sequence
  ENSG00000261008_78 (sequence is synthesized)
tattttgtcttctgtgtatacctgggtcaaaaagtgggatgtatgcatacacatacatgcacatacacatatttccttctctctcctctctctccctcctttttctcacacatgcataca

SEQ ID NO: 967651 - DNA, 120 bp, Artificial Sequence
  ENSG00000261008_79 (sequence is synthesized)
tcctacatatgtgtgtatatgcataaacatatacacctatatacatacccatacctgtagcacaaaatatatacatatctaaacgtttgtctgaaaatatgcatatttatatacacatac

SEQ ID NO: 967652 - DNA, 120 bp, Artificial Sequence
  ENSG00000261008_80 (sequence is synthesized)
aaccttacacatgtgtttatacgcaatcgataggtgcctatcttttaatttatacccatctatatctccatttaaatattccctctcttctcccagcagaggctgtgtgcaattgcaatc

SEQ ID NO: 967653 - DNA, 120 bp, Artificial Sequence
  ENSG00000261008_81 (sequence is synthesized)
caggattatacaagcagtattctttccttatgatttctagttgtagacctttatcctcctttctctgccttcttcgcagctgtagaattggcatctttccctgaggttttccgagtggca

SEQ ID NO: 967654 - DNA, 120 bp, Artificial Sequence
  ENSG00000261008_82 (sequence is synthesized)
tcctatggcatttctcttccgatgtctgctttttctttgtttgttgttgactaggctgaatggtggggttttttttaagttaattataaacgaagttgaaatagcaaacaagccaacagc

SEQ ID NO: 967655 - DNA, 120 bp, Artificial Sequence
  ENSG00000261008_83 (sequence is synthesized)
ttgtcccccccaccaaaagaaaaattagccccacacaagcgccttctgctgcaacagatgcccagatcacccctggcacgggcaaacgggcaaacgattttggtggttttcagttttttc

SEQ ID NO: 967656 - DNA, 120 bp, Artificial Sequence
  ENSG00000261008_84 (sequence is synthesized)
tgtttgttgctgtatttgttgtttgttttccttgtttctttttgatttttcgaggagtccagaatcccggcctctgcttggaacggaacagtgtcatggcggagacgacggcctttgtct

SEQ ID NO: 967657 - DNA, 120 bp, Artificial Sequence
  ENSG00000261008_85 (sequence is synthesized)
tgctgggtgtgaaaacatccgctgtgctggctccactgcggcagaatcaagtttaaaggaaaaaaagtgattaaagtcagctttgtgcctctgtggtgtggaagacccccaaaccccaag

SEQ ID NO: 967658 - DNA, 120 bp, Artificial Sequence
  ENSG00000261008_86 (sequence is synthesized)
tagccgagtcccagggtccgaggaagggctcatagttggagcagcctaggctgtaatcctggcacttgcgccttcggttgctgcttgctgttcgctcctgggggtctggataatctccct

SEQ ID NO: 967659 - DNA, 120 bp, Artificial Sequence
  ENSG00000261008_87 (sequence is synthesized)
tggctttaccgcactgtctggcccgcatacagggccccgtatcatatacccgctgctgctatcacacgaaactgtggcgttgcccctgaatggatggcacggtgccaactcttctgccat

SEQ ID NO: 967660 - DNA, 120 bp, Artificial Sequence
  ENSG00000261008_88 (sequence is synthesized)
ccgcccttgcagcttttttcttttctccctccctccccttcttcttctcctcctcccgtcgacttgacgttaattaacactcgggttaattgattttaaaagccgaagaattacagttaa

SEQ ID NO: 967661 - DNA, 120 bp, Artificial Sequence
  ENSG00000261008_89 (sequence is synthesized)
cttttcccacagggtacagacgccagccgcttggcacactctgcttttcgcactggtgcaggggaacagggaaagcccgcagcaaagctagcaactgctgagggagcgttgcctgcttat

SEQ ID NO: 967662 - DNA, 120 bp, Artificial Sequence
  ENSG00000261008_90 (sequence is synthesized)
tggagtagagccgatagaagtcgacgtggcattgcctcatcctttacaatatatgtatccattatatattttgttaaataatcaaaacaccaccctgtttttcttcttctccgttcctct

SEQ ID NO: 967663 - DNA, 120 bp, Artificial Sequence
  ENSG00000261008_91 (sequence is synthesized)
ccaaaagaaaggaaggaaaggcagagaaaacaaaagctcagctggaagacactgaaatggaggcacctactttcaagcccagactttaagagagcacctatccatatgagatgactgtct

SEQ ID NO: 967664 - DNA, 120 bp, Artificial Sequence
  ENSG00000261008_92 (sequence is synthesized)
ttcttttgccagtgaaatgtggatataagtgaggtgtacaacttgccagcagaagcttacacagccatgttatggtttgatcatcgttttgttttgttttgtttttcccccaaagtgggg

SEQ ID NO: 967665 - DNA, 120 bp, Artificial Sequence
  ENSG00000261008_93 (sequence is synthesized)
gtttcagtcactttgtccaactgaaaacatttagtgggtactgccaaatcaattcagagattacagcagaaggaatgatggccttaatcttgatcatgtcttgggtgtggggcttttaaa

SEQ ID NO: 967666 - DNA, 120 bp, Artificial Sequence
  ENSG00000261008_94 (sequence is synthesized)
aaaaatgagccttattactaaaggcatttctcaattttatcttttgctggttggaaattaaaaatagttacatttttcaatcccacttacaaactagcaagttcctttgagctctctctt

SEQ ID NO: 967667 - DNA, 120 bp, Artificial Sequence
  ENSG00000261008_95 (sequence is synthesized)
tcttgtagtaccttgttaaatgtagcgaacagaaactaagacacactagtaacattttgtttcctatcctcttcacttaagtttacaagttcattaagtacatgatctgccttcctggaa

SEQ ID NO: 967668 - DNA, 120 bp, Artificial Sequence
  ENSG00000261008_96 (sequence is synthesized)
gaacattggactaccactaacctggattcttccatcttttgaagtggaaactgtcctaaccccataacctcgacatcactagacagggtctggctttgttgccctggtcttgaactcctg

SEQ ID NO: 967669 - DNA, 120 bp, Artificial Sequence
  ENSG00000261000_0 (sequence is synthesized)
cagtgattccatgtagacagttgtgcaactgtcagaatccctgggagttccctgaaagcttcggggatttcaggcgacttcagacgcctcaaagtcaaacaaaaccaaaaatgtcccctt

SEQ ID NO: 967670 - DNA, 120 bp, Artificial Sequence
  ENSG00000261000_1 (sequence is synthesized)
caggaagtcaggccatgttctgtccttccgttttccttcttactagggaacttggggagggaggctgggcggcagcagttaaacaactcacccaatgggaaaaccagcacgctctgggac

SEQ ID NO: 967671 - DNA, 120 bp, Artificial Sequence
  ENSG00000261000_2 (sequence is synthesized)
acacactctaaactcactgtcataatccttccccttggtcaaaaataaaagcagcacacccactctgctgggagtgagtcacaaacagaaaaaagtcaatgggtctgagccaagaggatc

SEQ ID NO: 967672 - DNA, 120 bp, Artificial Sequence
  ENSG00000261000_3 (sequence is synthesized)
tactaacaaggggaaagatctcccagtggaggtgtttcagcggatgctgcggtcttacccttgtagcctggatgaccagacagatcaaaaaaaatgttaaagtccaggcatctgacacta

SEQ ID NO: 967673 - DNA, 120 bp, Artificial Sequence
  ENSG00000261003_0 (sequence is synthesized)
tctgaggaaattgtgtcagtagttttattttgttatttcatagtgtcctttgtagatactatttttaccaagtttctttttctgtttatttggttgtttcggtctgttttcattttcagt

SEQ ID NO: 967674 - DNA, 120 bp, Artificial Sequence
  ENSG00000261003_1 (sequence is synthesized)
tttttcctccaatgcctggtgattcttgaatgtcttgtgttgtgtaggagctgggctttaaaaaggtggccaaaaacctgcctgcctggttgggccttcagctgtcttgtcagtcatggg

SEQ ID NO: 967675 - DNA, 120 bp, Artificial Sequence
  ENSG00000261003_2 (sequence is synthesized)
gtccttggggaagtcctgatcctagaattcttagctctttcatggtgggctgtcagtttccttagataagagtcctctggtctgttcttggagacacaaagagaatgatacagtttagaa

SEQ ID NO: 967676 - DNA, 120 bp, Artificial Sequence
  ENSG00000261003_3 (sequence is synthesized)
attctagagaagctctgagcctttgaaactaggggaggataggaggtgacagaggagggccttgggacgatctctaggcttctgacttgagttgggctcagattccgctcccccccccca

SEQ ID NO: 967677 - DNA, 120 bp, Artificial Sequence
  ENSG00000261003_4 (sequence is synthesized)
ccctcccgcatgaccttaggaaacgcaggggaggaggacacaagcagaggagaaagacacagctttgaggacccctatggctgggcagctggtgtagggccagaggtcttggctcagtgt

SEQ ID NO: 967678 - DNA, 120 bp, Artificial Sequence
  ENSG00000261003_5 (sequence is synthesized)
ctgccgcctgttagcacagggcgtgggcaggacagccaccttgaatctgcacgtgtgtctgagaggataacacctcccccaggattaaacaagagaatgtgtatccataaagcatctagc

SEQ ID NO: 967679 - DNA, 120 bp, Artificial Sequence
  ENSG00000261003_6 (sequence is synthesized)
cttacacagcacggtgagcaaacaccaccgtattcgcagtggcacagcttctttccaacactagaggcgcgcaggcccgtcaggctggacacaggcatggcagggactggcaccactcag

SEQ ID NO: 967680 - DNA, 120 bp, Artificial Sequence
  ENSG00000261003_7 (sequence is synthesized)
gaatcttgtagagacccaagaatagaacctgggaacaccagcactcatgggtctattggaaagggtgagtctacaaagaggggcagggagaaaactgatcacacagcaccacaggccatt

SEQ ID NO: 967681 - DNA, 120 bp, Artificial Sequence
  ENSG00000261003_8 (sequence is synthesized)
agaaagggcacatcccaaggaaagacatgcggtgtccctgagatgccagtgatccataattagtcataggttaaaatggctgaaaatgtgatctttggtttcagcaattaggagatccat

SEQ ID NO: 967682 - DNA, 120 bp, Artificial Sequence
  ENSG00000261003_9 (sequence is synthesized)
agtgatggcttcgatcttcctttcaggaagggagggagcaggtctgaagggcattctagaattaggtcagatatgtacataaaaaatagaacagttttcccaaccaatcttaacatttct

SEQ ID NO: 967683 - DNA, 120 bp, Artificial Sequence
  ENSG00000261003_10 (sequence is synthesized)
tacaaatccacagattggtcactttgccacatttacacacacctggagttcagccagtgtactcagaaagggaactacaagtgacagatccacaagtccacagtcgacagatgctcagcc

SEQ ID NO: 967684 - DNA, 120 bp, Artificial Sequence
  ENSG00000261003_11 (sequence is synthesized)
tcagccacttgcctttcctggggctgcgtcccacgccccagaccctcctgttgcagcctcactctctacaggatgagggagaggttgattctgtcacccatcccaggagtcagcttggac

SEQ ID NO: 967685 - DNA, 120 bp, Artificial Sequence
  ENSG00000261003_12 (sequence is synthesized)
tatcacatgattgctggtgttttaggtggcccagctgatacctacttgccggaataggacagaaccctttcagggctgaagaaagcattgtttaaaaacttggacattgaacataaagtc

SEQ ID NO: 967686 - DNA, 120 bp, Artificial Sequence
  ENSG00000261003_13 (sequence is synthesized)
aatacatcttgcttattctacaatcaaggcatatgatgaaattcaccgtgcattttacacagatgcccagtacagatgtgttgcgtggcatcacgtggacgtggcttaagctgctctgct

SEQ ID NO: 967687 - DNA, 120 bp, Artificial Sequence
  ENSG00000261003_14 (sequence is synthesized)
gtgctgtgcatcctacatgcagcagttagagtggggctgactcttagaacaacaaggagttgaagcagagtggagacacagctcagggggcttcaaaggaccttctggcagacacttcat

SEQ ID NO: 967688 - DNA, 120 bp, Artificial Sequence
  ENSG00000261003_15 (sequence is synthesized)
caaaaacaacctgctggccacataacagtctcactgatcttcacccttaaatacaatgattgtgtttaacttaaatatttgtaaatttttacataaacatggtgaatgtgttttcagaaa

SEQ ID NO: 967689 - DNA, 120 bp, Artificial Sequence
  ENSG00000261003_16 (sequence is synthesized)
agaataaagaaaggaagaaccatcttcctgtggtcagcagaggtttgtgctctactaagtagctgagagcagcctctgtgagctctctcctttggaaaggtggaaaacagcaggaacacc

SEQ ID NO: 967690 - DNA, 120 bp, Artificial Sequence
  ENSG00000261003_17 (sequence is synthesized)
tctcctccattccacatgtgccctggccacatttgcagcaccagctcagcatgcggtgtcctctgacagctgccctcaaacccgtcacccttgggttaggatgcgatttcatgcaagtca

SEQ ID NO: 967691 - DNA, 120 bp, Artificial Sequence
  ENSG00000261003_18 (sequence is synthesized)
ttgtcacactggctggcttgatacatacgtgtctggtgcaagtttatggagatgtgcacatcagtgcatatgctgtgacttcttgtttaagtttgtcttcttagaaatgcccttgtcatt

SEQ ID NO: 967692 - DNA, 120 bp, Artificial Sequence
  ENSG00000261003_19 (sequence is synthesized)
agctcatgagctctctattggagagaggaagtgactggcctgactcggggctcatagaagatgacctggtggcacacacaggggtgggcaggagtgtgcccgaggcccctcctccattcc

SEQ ID NO: 967693 - DNA, 120 bp, Artificial Sequence
  ENSG00000261003_20 (sequence is synthesized)
agcatttcatctgccagcgcctcggacgaggccaccacacagaggaagcactacagcctcacagactgagggcttggcggctctcctgggtgtgtggcaatgtccaataatgcagccttg

SEQ ID NO: 967694 - DNA, 120 bp, Artificial Sequence
  ENSG00000261003_21 (sequence is synthesized)
tattactcgcaagaaaacataactgtttgcttttggttttcatcaagacctgttactaaagttcgagagttggtaaggctgtagggcttctaagacagccctcccaggtgacaagcggag

SEQ ID NO: 967695 - DNA, 120 bp, Artificial Sequence
  ENSG00000261003_22 (sequence is synthesized)
tccagtgaggtttgcatggggtattgtgacagcgtcatcacctggctcagctctgcactcggccacccttggtttttgactccctaagacagtgtcatcatcctcagggaagtgggtttg

SEQ ID NO: 967696 - DNA, 120 bp, Artificial Sequence
  ENSG00000261003_23 (sequence is synthesized)
ctgcagttcaggatttctccaattcaactcatgtgtacattcccttggaaagaagaaaaagtgtggagtcctgtgttgatttgtgattgctaacctaatgttatttaaatatgtgcaaac

SEQ ID NO: 967697 - DNA, 120 bp, Artificial Sequence
  ENSG00000261003_24 (sequence is synthesized)
ataaattagattccttatgcttagggttctttcttaatacaactttcaatctaaggcatcacagaagtgaaatgaaaacaaaattataaacacacactgttgttgccacaacccccagta

SEQ ID NO: 967698 - DNA, 120 bp, Artificial Sequence
  ENSG00000261003_25 (sequence is synthesized)
gctctccgggccagccagtggcttctgaggccaacccatgagcttcacccaggaagagggcttcacaccccatgatggttgactggaacctccttctgggggctgcagggcaggggacag

SEQ ID NO: 967699 - DNA, 120 bp, Artificial Sequence
  ENSG00000261003_26 (sequence is synthesized)
cagagcagagaggcccagggaggggccaggtgtcaggagctgcagaagcttaagactgtgcccagggcacccaccataccaccgtctgggccctgttccttcctacccctccttccccac

SEQ ID NO: 967700 - DNA, 120 bp, Artificial Sequence
  ENSG00000261003_27 (sequence is synthesized)
gtacctgcgatgtgagcctcacctgagccagagcaccccccgacgtgccacccagctgcacgccaagtgttgactaaggtcggtggtaccggggacaggattgcgagggggaccctgctt

SEQ ID NO: 967701 - DNA, 120 bp, Artificial Sequence
  ENSG00000261003_28 (sequence is synthesized)
catctacattgtttaaatgtctgcagcaagaatgacttcatgcatcatgtgattgaagatacagaaaaagaggatggccagcaaccgtttgtaagcctcagataaagtgtcaatttttaa

SEQ ID NO: 967702 - DNA, 120 bp, Artificial Sequence
  ENSG00000261003_29 (sequence is synthesized)
agtactcattgcttggatttaattaatcggacttttttttctttaagtttcagcaccctagggacgtgtatgttaacttttttcatccattgaactttttgtttaaactttcaagctctc

SEQ ID NO: 967703 - DNA, 120 bp, Artificial Sequence
  ENSG00000261003_30 (sequence is synthesized)
agaaagaaaactaagtaggccctggcatttcctgactgccacacaaatgcctaccttctgtgtgtggtgggtccatctctgctcccatggtatggaagtaagacctgtgaccgtgagctg

SEQ ID NO: 967704 - DNA, 120 bp, Artificial Sequence
  ENSG00000261003_31 (sequence is synthesized)
gctgcacacacatgtggcatgtggtgtagctttcacttacttccatcttctcagaaagagctgcactgtggccccagctttccaccgtgccaaggctccttacacgcatcctcatttttg

SEQ ID NO: 967705 - DNA, 120 bp, Artificial Sequence
  ENSG00000261003_32 (sequence is synthesized)
gcttcaggaggagaaggcgcatggctgggtcacgtgctcactcagcagaggaggcactggccacttctgtgtcctccggatgcccctgctatagggagaggcagcagcacatgcgggtca

SEQ ID NO: 967706 - DNA, 120 bp, Artificial Sequence
  ENSG00000261003_33 (sequence is synthesized)
tcttcccagaagtcggcggctcttggggttctggagcattgaacttcctcctgtttgatgctacattgaacccccagggtacagcctcgttctcaccatctgcttcctgtcacacaagca

SEQ ID NO: 967707 - DNA, 120 bp, Artificial Sequence
  ENSG00000261003_34 (sequence is synthesized)
agagctgctgggtgccttttccatcttggttcccattttccaaatggtcccagagggacttagtaaagcattagaagagcccagaggctggaagcaaacacaaaattgaccatgaaattt

SEQ ID NO: 967708 - DNA, 120 bp, Artificial Sequence
  ENSG00000261003_35 (sequence is synthesized)
agtcaaacggtgatgaaatttagtcaaatgttgatgagatttagtcagtgatgagatttagtcaaacggtgatgaaatttagtcaaactgtcttgaaaccagccagtcattggaaatgcc

SEQ ID NO: 967709 - DNA, 120 bp, Artificial Sequence
  ENSG00000261003_36 (sequence is synthesized)
ctgatttcttccttttccctcacgttgagccaagtgcacgagctggtcctggctgcctggaaggctgctggccatgtgcctctgcagcctcccgtgccgtcctcgggccccgtggcctgt

SEQ ID NO: 967710 - DNA, 120 bp, Artificial Sequence
  ENSG00000261003_37 (sequence is synthesized)
gctcctgctccagcccccatttccctgacggcccttgctgcctgcatggctgattttgctcctgccattgctgcagtaacgaagcgcagtgggaaagcccctcagcctgtagaaacagcc

SEQ ID NO: 967711 - DNA, 71 bp, Artificial Sequence
  ENSG00000261003_38 (sequence is synthesized)
tccaggaggtggagcctgcagtgagccaagatgcaccactgcaccccagcctgggcgacggagcgagactc

SEQ ID NO: 967712 - DNA, 86 bp, Artificial Sequence
  ENSG00000261003_39 (sequence is synthesized)
cgtctgcccttggcttgcaagctgttcatttttctgaaggaggaaattgaagggtgaaatcagcctttctaagaatctgattcatc

SEQ ID NO: 967713 - DNA, 120 bp, Artificial Sequence
  ENSG00000261003_40 (sequence is synthesized)
ttgaagggtgaaatcagcctttctaagaatctgattcatctcattattgccagcattattagatgttagataaaaaacagttaatttcaaccttttctacctggcacgttatctgaacta

SEQ ID NO: 967714 - DNA, 120 bp, Artificial Sequence
  ENSG00000261003_41 (sequence is synthesized)
aaaagaaagagaagcagcagcccttcaaaaatagatttatctttatttctttatggcttcccaaaaagtctcttttatctgtggaagctggagtaagaataaaccccataagacacatta

SEQ ID NO: 967715 - DNA, 120 bp, Artificial Sequence
  ENSG00000261002_0 (sequence is synthesized)
gacccatagctactccatcccgagtagccatgggcttaccatagaaggaacaaactcttaatcttagaactgctttaggcagtgggcgtgatggttaaaaactcggcctttggcgtcgac

SEQ ID NO: 967716 - DNA, 120 bp, Artificial Sequence
  ENSG00000261002_1 (sequence is synthesized)
ctcagacggagatctaccaattaggaaattagctgtgatttagaaaatttaatatttcgatgccatactttcctaatctgcaaaatttttgtaaatacctgtgacctagtgtcgtgagcg

SEQ ID NO: 967717 - DNA, 120 bp, Artificial Sequence
  ENSG00000261002_2 (sequence is synthesized)
cttagcaacacctgacacccactaagctctcagccagtggttctgaaagtggttctagaccagcaacaacagcagtagcagcagcacctgtgaacttgttagaaatgcaaagtttcaggc

SEQ ID NO: 967718 - DNA, 120 bp, Artificial Sequence
  ENSG00000261002_3 (sequence is synthesized)
agaaacaatgtgttactacatttttgttgctggggaaaagaactgacttgatgtacttcctcagaagagagaccgaacaccaggaaagaaaatacagatttccccagactctacctgcta

SEQ ID NO: 967719 - DNA, 120 bp, Artificial Sequence
  ENSG00000261002_4 (sequence is synthesized)
tcaccattttgttgtaatacaccttaactcagagtaaacagaagagtccaagaacctctggttgtttgcagatggtcgccagagaaccatgatgacaaagaggatcatggagaacagcaa

SEQ ID NO: 967720 - DNA, 120 bp, Artificial Sequence
  ENSG00000261002_5 (sequence is synthesized)
gcgccagatggcatcgtctacccacagctcccgccagtcctacaatacaggggagaagtacaacatttatacacattatcttaaccccttgttcataaagcctttggcatagaacaaaaa

SEQ ID NO: 967721 - DNA, 120 bp, Artificial Sequence
  ENSG00000261002_6 (sequence is synthesized)
cctctgcaagatgtaaccttgacttcccaggaaaatgaaaggtagttaacaatttcccccatcacctatgtaactccctaaataaataaaaattacaggcagttgctcctggagattaca

SEQ ID NO: 967722 - DNA, 120 bp, Artificial Sequence
  ENSG00000255050_0 (sequence is synthesized)
gtctggaagtgcgtggcaccgccccaccccttcctccggccatgtaagacctgcccgcttccgcttccaccaagatgctcgtactccccggggctggctggactgggcctctgctccaag

SEQ ID NO: 967723 - DNA, 120 bp, Artificial Sequence
  ENSG00000255050_1 (sequence is synthesized)
tccccaccctccaccctcagccaaccacacagtggtgctgcccaccctgaagcccggggagccagggcctgtgctttcactgggatgcaaatcttcctgctacctcgagctcagattccc

SEQ ID NO: 967724 - DNA, 120 bp, Artificial Sequence
  ENSG00000255050_2 (sequence is synthesized)
gactccagcccagccgcagcccgggaggcgcagcccgtgggctgggtgaacaaacgacacaaacaacacaggacaagctgtggggaaaaggctccgcagccgcctgtgctcagggctgag

SEQ ID NO: 967725 - DNA, 120 bp, Artificial Sequence
  ENSG00000255050_3 (sequence is synthesized)
tcggctcagggacagctgggccaaggctctagactctgccagggatgggagcggctcacacagctgcagggaggaggtgtccaggaggccctggaaggcccggggaaaagccaaggcata

SEQ ID NO: 967726 - DNA, 120 bp, Artificial Sequence
  ENSG00000255050_4 (sequence is synthesized)
cgccaggtccaccccagggccctcaccagctgctggcgccaacatctgtggaacagagtcggtgaagaatgggggccaggaatgcaggatgaggcctgggagcagccagggacaccctag

SEQ ID NO: 967727 - DNA, 120 bp, Artificial Sequence
  ENSG00000255050_5 (sequence is synthesized)
tttgagagcaaaggtaatgcagcccgtgccagcttcctgggacagcactggggtgacctgcctgggtggcacacctctcgccagggcaagggctggcttggggcctgtcgcctggagaca

SEQ ID NO: 967728 - DNA, 120 bp, Artificial Sequence
  ENSG00000255050_6 (sequence is synthesized)
gcagggtttagaggagggactgaccgggtcagggggcacctcgctgcctgaaaaggaagtgacgaaggagtgggccagggtcccggccaccggcacacctcgcagctggcccgctagcac

SEQ ID NO: 967729 - DNA, 120 bp, Artificial Sequence
  ENSG00000255050_7 (sequence is synthesized)
gttgctgctgctgtcgaagcctggggaggaaggcggtgggattgggggacctcgggccaagatggggctcctccttcccggcccttgccttgccccgcaccagacactcaccgcccaggt

SEQ ID NO: 967730 - DNA, 120 bp, Artificial Sequence
  ENSG00000255050_8 (sequence is synthesized)
agctgtaggtggaggctgtcaggcccccatcggggccctgagcccgcctcaggcccatctctagcagccgcttctctggccctgcgatcaagcgaagccgcgctgcgttggtggccacca

SEQ ID NO: 967731 - DNA, 120 bp, Artificial Sequence
  ENSG00000255052_0 (sequence is synthesized)
ctcccgcggcgggccgggtctccagggaggacctgagttttcttcacccattgtcagggaggcgccatcgccctggctttggggctggggcctccggggaggttccggtaggggcgttgg

SEQ ID NO: 967732 - DNA, 120 bp, Artificial Sequence
  ENSG00000255052_1 (sequence is synthesized)
agaggccgctctttttgcaaggcccgagacggcgggccttgcgcaggccgccctattccgcgccctcagggcgtcagtatcagcctgaggctggatacccccgctgggcccagatgcccc

SEQ ID NO: 967733 - DNA, 120 bp, Artificial Sequence
  ENSG00000255052_2 (sequence is synthesized)
ggatacccccgctgggcccagatgcccccgctgggcccggagcatcctccggcgctgccctcccagagccacgcagaggctgaggtggcgcgggggcggccctggctccgcgagaagcgg

SEQ ID NO: 967734 - DNA, 120 bp, Artificial Sequence
  ENSG00000255052_3 (sequence is synthesized)
gcggggctccggggcgtctggcctgggtgggactgagcccatccagggactgggactccggggttctggtgtaggtggatccggggcaggctcaggaccaagtccctctccttccaccaa

SEQ ID NO: 967735 - DNA, 120 bp, Artificial Sequence
  ENSG00000255052_4 (sequence is synthesized)
ggagcgcccagaggccggcgggagctccaggttcacctcctcctcctccaggaaatcccacttccaactggatgtctggatgaactactgaaagctgctgagtgtcctgcagcaggtgag

SEQ ID NO: 967736 - DNA, 120 bp, Artificial Sequence
  ENSG00000255052_5 (sequence is synthesized)
ctgtggccagagcccaaggatgaagggggctccctcactctgtgactgtgaagaggaaccctgaggtgtagcaggcccaggccccagaagtatggaaaaaatgaggccatttccaatcca

SEQ ID NO: 967737 - DNA, 120 bp, Artificial Sequence
  ENSG00000255052_6 (sequence is synthesized)
gcggaagaccttctagaagagatgatggtgggagagtgctgacatactatgtgaagctactatttggagttggacacgagtgcatgtgtccttgtgccacaacgggaatgtgagctggat

SEQ ID NO: 967738 - DNA, 120 bp, Artificial Sequence
  ENSG00000255052_7 (sequence is synthesized)
gacaaatggagatttggacttgtgataattggcctctgtgtcattgtgtggaagactgactggtccctttatttcctgtagcttgactacaacacaaatgaatccactcaaatgttggca

SEQ ID NO: 967739 - DNA, 120 bp, Artificial Sequence
  ENSG00000255052_8 (sequence is synthesized)
agtggagcagagtcccagaacaggtacagaaacacccccagttcaaggatcttcacacctggatttaggcctactcctgcaactaccccagctacttacaccaagatgaagataatttat

SEQ ID NO: 967740 - DNA, 120 bp, Artificial Sequence
  ENSG00000255052_9 (sequence is synthesized)
tagttcaggaagaatctgcattctgaagacaaatagaagttccagctacagatgggcagacacatgccctctcaattcctgatggacctcctagtgccttctggacctaaggggcctccc

SEQ ID NO: 967741 - DNA, 120 bp, Artificial Sequence
  ENSG00000255052_10 (sequence is synthesized)
tcaatgttccaaggtgccaccaaggcagggatcagctcgtgcattcctgagaacatcccggatgaagtgaggctctggaaaaatgcaagagtttccacataatcccaaaaaacactacag

SEQ ID NO: 967742 - DNA, 120 bp, Artificial Sequence
  ENSG00000255052_11 (sequence is synthesized)
gtgaactggatgccacagaaagaggagtggtctttgtcacaacgaaatcaacaaaattatttcgaagtcaattaggaaactcagaaatcactcttgctaccattaagaggaagaacagga

SEQ ID NO: 967743 - DNA, 120 bp, Artificial Sequence
  ENSG00000255052_12 (sequence is synthesized)
gcctgtgaatggcatccctggcctacctgagactccaaagatatttctctgtggcttctgacagcagaaatctctgtgattttcagaaaggcagggacagctcctgccagcccatccttc

SEQ ID NO: 967744 - DNA, 120 bp, Artificial Sequence
  ENSG00000255052_13 (sequence is synthesized)
tgcagaatgtgtcccagcagatcagtggcatggaaccatcatggacagcacaaaggctcaagggcagcatcccaggccggcctgtgactctagataagttctgagtccccatgggggctc

SEQ ID NO: 967745 - DNA, 120 bp, Artificial Sequence
  ENSG00000255052_14 (sequence is synthesized)
aggaaaggttagtgatgacctggaaagaagggacaggctgaaaccgcccctaagcaatctgcaggattccaacttcagcaggaagccaaggaccagctattaccacacctgcgccccctg

SEQ ID NO: 967746 - DNA, 120 bp, Artificial Sequence
  ENSG00000255052_15 (sequence is synthesized)
aaaacgctggatacaatcccactctgcagaaagttccacatagaagtggctgggaattttgccttctagactgcattttacactgcctctggacatgtgatgagaaatttaacattggtg

SEQ ID NO: 967747 - DNA, 120 bp, Artificial Sequence
  ENSG00000255052_16 (sequence is synthesized)
tagactcaccttgagatgcaatcttggacaacctccatcttaagaatatctagtttttcaaaccaaaactctccaaccaaaaatcaataacatcaaaagtttgcaactacaagccgacgg

SEQ ID NO: 967748 - DNA, 120 bp, Artificial Sequence
  ENSG00000255052_17 (sequence is synthesized)
aaaataaatacatgaattctaccacagtgaattggactgcactgggaaacacagatgaagaaagccaacaccgctttgtccttcagtacctggctcccttttcagctcgtcttgcgactc

SEQ ID NO: 967749 - DNA, 120 bp, Artificial Sequence
  ENSG00000255052_18 (sequence is synthesized)
gaggctctaattccctgggtcccattgtcatgtctctggatttgcgaagattaaccggaccttctgtggaactcccgtgtccctcaacttttgtgacatgtcccctaattctgcccatgg

SEQ ID NO: 967750 - DNA, 81 bp, Artificial Sequence
  ENSG00000255052_19 (sequence is synthesized)
cgaagattaaccggaccttctgtggaactcccgtgtccctcaacttttgtgacatgtcccctaattctgcccatggtcatc

SEQ ID NO: 967751 - DNA, 83 bp, Artificial Sequence
  ENSG00000255052_20 (sequence is synthesized)
gggctgagctttggaaccagtcgcgtcccccttgacactgcacccgactcccagtttctcaatcttgttggccctccggcgat

SEQ ID NO: 967752 - DNA, 76 bp, Artificial Sequence
  ENSG00000255052_21 (sequence is synthesized)
gcctgctgacgaccccctgtggccgttttccgagctttccggtcacatcgtttccttccaccctctttggttcctt

SEQ ID NO: 967753 - DNA, 120 bp, Artificial Sequence
  ENSG00000255052_22 (sequence is synthesized)
ggataatcaagataacgaccctcaaaagcggcggaaagggagcagccatttggtgtgtctcagcaaatcccgctgagttccgaggccgcctaggtatgcaatcctgctgagagttgttcc

SEQ ID NO: 967754 - DNA, 70 bp, Artificial Sequence
  ENSG00000255052_23 (sequence is synthesized)
cttaggatcagggggagaaccatggaaaggcccggtgtcagacatccggaaagaagagggatgaatgttt

SEQ ID NO: 967755 - DNA, 75 bp, Artificial Sequence
  ENSG00000255052_24 (sequence is synthesized)
tcccctcagtcaactctgtttcggagacataacgatttggattgctaacaagtcaagaaatgttcaagtccttgg

SEQ ID NO: 967756 - DNA, 63 bp, Artificial Sequence
  ENSG00000255052_25 (sequence is synthesized)
ccgctttgacccaacttggagcacacaaaaacctatgttgtataaaatcaaggtttaagggat

SEQ ID NO: 967757 - DNA, 71 bp, Artificial Sequence
  ENSG00000255052_26 (sequence is synthesized)
tagtctcaataaaccagggacacaatgcaccgtttctccccatgcgatagtctgaaatatggcctcgtggg

SEQ ID NO: 967758 - DNA, 120 bp, Artificial Sequence
  ENSG00000255052_27 (sequence is synthesized)
ggtaaggcactttccctgctttttcttaagatcaatcctcatgcctacaaattaaagtcacatcccacacgatcattaaagtagagagtgcattctgcaggatgagtgaaaaggcattta

SEQ ID NO: 967759 - DNA, 120 bp, Artificial Sequence
  ENSG00000255052_28 (sequence is synthesized)
tgattcttgggggcagatgttctacagttgcctgtgctagttcatgtctttctgcagatcacattcttaacctctagagagtctggcaggaccagagccttacctttcccagtctgcaat

SEQ ID NO: 967760 - DNA, 120 bp, Artificial Sequence
  ENSG00000255052_29 (sequence is synthesized)
tcaaactccaggcaacaagcaacatctagggaatgtgcttttaggtagggtcagcataatatcccaccctgggagacatttttattttaaagttgtagagggtgttgctgctgtcggctc

SEQ ID NO: 967761 - DNA, 120 bp, Artificial Sequence
  ENSG00000255052_30 (sequence is synthesized)
cctgccaatcagcaccatttgcagcctcttttgaagacagagaactgagggctgtccttcgaatggagcagtgtgattccaaaaaaagagatgctccttgtggtcctgggaccagggata

SEQ ID NO: 967762 - DNA, 120 bp, Artificial Sequence
  ENSG00000255052_31 (sequence is synthesized)
cagttgagcctggtggaagaggtccttgtcctaccccaacggagagccatgcagctgagcttgggcgatgtggtccacgtggttgtttctgagtgtgtcctgaggttgcaggatggcttg

SEQ ID NO: 967763 - DNA, 120 bp, Artificial Sequence
  ENSG00000255052_32 (sequence is synthesized)
cagttccctatgcagatccaatgcatcttttgcttttttgcttctacaacctggaatttatatgttcaagatggagccatcccagccatgacaacagagaatgtaccactctcacttgag

SEQ ID NO: 967764 - DNA, 120 bp, Artificial Sequence
  ENSG00000255052_33 (sequence is synthesized)
gaagaggggtaggcagtgctcctgtatcaccagcccttaatgagaccctgaggaaaccacatcatggagatcagcccttctctcctgtaaggaactcatcctatgaaagagcaattagtg

SEQ ID NO: 967765 - DNA, 120 bp, Artificial Sequence
  ENSG00000255052_34 (sequence is synthesized)
cctgcaagagctgtctctgggacagcggttcatgtctatatctgcagggtaaccctcatagtcatatgcagtcatatccatagtcatatcgggagtcagattccagtttgactgagtgag

SEQ ID NO: 967766 - DNA, 120 bp, Artificial Sequence
  ENSG00000255052_35 (sequence is synthesized)
tgagtgagtggagaaactaaacatttattactgaataataacattaataaaccatcttaatgatagtaataataaacatattgatgagtattaacaggaatgatgatgattattatgata

SEQ ID NO: 967767 - DNA, 120 bp, Artificial Sequence
  ENSG00000255052_36 (sequence is synthesized)
cataattaacaattttaatattgataataatacaaccctgtggacttgggacctaaacagcagtttccccttacaattatcccatatttggccacagggggtaatgttgagttccagaag

SEQ ID NO: 967768 - DNA, 120 bp, Artificial Sequence
  ENSG00000255052_37 (sequence is synthesized)
gcaaggattaacattcagaaaataggaaaaacaacctgcaggtaagcatgtgcacacattgggactctatggataaatactaaagtgactcttgttctggatctccatgctaacaaacat

SEQ ID NO: 967769 - DNA, 120 bp, Artificial Sequence
  ENSG00000255052_38 (sequence is synthesized)
gcaccagctttcaggaggtagtacagctggctgatggggcaaggcttcttgaggacatggcaggagtcagaaatcacacatgctgcccagcagcagagctcatgacaaacagtaaacccc

SEQ ID NO: 967770 - DNA, 120 bp, Artificial Sequence
  ENSG00000255052_39 (sequence is synthesized)
agcgaaaggacctggctgccctttctgccatctgctctcccatgacctctcttgactggtacatctaggcactggaataaccttcactggctataggagggcataatcctcagtattctc

SEQ ID NO: 967771 - DNA, 120 bp, Artificial Sequence
  ENSG00000255052_40 (sequence is synthesized)
ccacctgcaagaaagacaaaaattaattgaataccatggcttctgggtatccttagtgggcttagcgtattttgcatttgctttaacaggccagttatccaggcagtgactttcagtgca

SEQ ID NO: 967772 - DNA, 120 bp, Artificial Sequence
  ENSG00000255052_41 (sequence is synthesized)
gctacagtcacctctggaaacctgtggagactttaaaaatttccaaaaggtcaggaatttttggagacctttctcatggctacgtttcctgcaaacgtgaatcaataagcttctgaactg

SEQ ID NO: 967773 - DNA, 120 bp, Artificial Sequence
  ENSG00000255052_42 (sequence is synthesized)
acttagaaaatgttgcagagactcttgtgaacagatagaccctctcctgccactcagatagatgtatctgggtcacacacacctgatttaacatctcattatctcaggtgggcaacagac

SEQ ID NO: 967774 - DNA, 120 bp, Artificial Sequence
  ENSG00000255052_43 (sequence is synthesized)
agcaatttaggacctatcccagtgtggatgaaagacattgagttggcttagaaaaatgttagatagactagatggggcaagaaagcccattctggggctcaaaagccttcacatagagtt

SEQ ID NO: 967775 - DNA, 120 bp, Artificial Sequence
  ENSG00000255052_44 (sequence is synthesized)
gctgacacataaagggtatgtataaattctttctcagaccatgagatcaggatgtacttcatcagtataccatgctggtataaagagattcttgcctccaaagggactcagaatatttca

SEQ ID NO: 967776 - DNA, 120 bp, Artificial Sequence
  ENSG00000255052_45 (sequence is synthesized)
gggaacctgtattagtccatttttacactgttgtaaagacactaccccacactgggtaatttacaaagggaagttgtttaattaattcacagttctgcatcactggggaggcctcaggaa

SEQ ID NO: 967777 - DNA, 120 bp, Artificial Sequence
  ENSG00000255052_46 (sequence is synthesized)
aaatgaatccactcaaatgttggcaagtggagcagagtcccagaacaggtgctggagcagcccccctggaagtgatgcagcatccaggaagacggaggaaggggcggagaaggacctctg

SEQ ID NO: 967778 - DNA, 120 bp, Artificial Sequence
  ENSG00000255052_47 (sequence is synthesized)
ccttttatactgcctctggtcacctgacgtggaacgtaccctaacctaatcagttacatgaggcgcttggaaaccaccgtcaattggaccgcactgggaaacacagatgaacaaagtcaa

SEQ ID NO: 967779 - DNA, 69 bp, Artificial Sequence
  ENSG00000255052_48 (sequence is synthesized)
gaacaaagtcaacaaggtattggagtccagggaggggtacgtcgcctttaccctgtgcttgccacgatc

SEQ ID NO: 967780 - DNA, 120 bp, Artificial Sequence
  ENSG00000227906_0 (sequence is synthesized)
gggctcccggagcccggcggaggcgcccaggcgtgaatgatgtcccttggaatgttcactctgggggaagccagctgccacgctgtaaggacactcgggcagtcctatgaagaggcccgt

SEQ ID NO: 967781 - DNA, 120 bp, Artificial Sequence
  ENSG00000227906_1 (sequence is synthesized)
gtggtgagaaagagaggcctccagccaacagccatgtgagtgggccattgaggaagcagcctcagtgcctgcagccctgactggcatcctgaactaccaccttaaatgagaccctgagcc

SEQ ID NO: 967782 - DNA, 120 bp, Artificial Sequence
  ENSG00000227906_2 (sequence is synthesized)
agagtcactacttccaaattcttgacccacagaaattgtgaaataatatttgttgttttaagccgccaagttttgggagtaatttgttatatagcaaaagataattaatacattcacttc

SEQ ID NO: 967783 - DNA, 120 bp, Artificial Sequence
  ENSG00000227906_3 (sequence is synthesized)
ctaagattatggtgaagaattaaggatacagcatgaaaagaactttgctattatttttattatctgatccaatttatgttgaagggccttcagtactttcttcttttactctatcttgac

SEQ ID NO: 967784 - DNA, 120 bp, Artificial Sequence
  ENSG00000227906_4 (sequence is synthesized)
tttgtttgtttgtttgtttgttttttagagatggggtcttgctatgtttcccagttggagtgcagtgattattcacagacatgatcccactactgatcagcatgggagttttcacctgct

SEQ ID NO: 967785 - DNA, 120 bp, Artificial Sequence
  ENSG00000227906_5 (sequence is synthesized)
tcagcatgggagttttcacctgctccatttcccacctgggaggtcatcatattgatggcgagctaagtgtggacacctgatcagcatagcacagtacagcccagaacccctgggctccag

SEQ ID NO: 967786 - DNA, 120 bp, Artificial Sequence
  ENSG00000227906_6 (sequence is synthesized)
tgatcctcttacttcagcctcttgagtagctggaactacaggcctgcaccactgcacccggctagtttgtttttgttagagttttgtctctaggattttcctcagctgagtatgtgaagg

SEQ ID NO: 967787 - DNA, 120 bp, Artificial Sequence
  ENSG00000227906_7 (sequence is synthesized)
cctttattttaccatgtatcatttacaggtaaatgatatcttagctgtgtattgaatttctgttttttgttttttcttcagtactctataaatattactccagtatcttctagcttctcc

SEQ ID NO: 967788 - DNA, 120 bp, Artificial Sequence
  ENSG00000227906_8 (sequence is synthesized)
cattttctcctagtgaatggttattctgctcttatctagcaggtgataaatctgtcaacagatagtttttcctttttgttttatgtgtaagttgttatttcttccttaaagttcataatc

SEQ ID NO: 967789 - DNA, 120 bp, Artificial Sequence
  ENSG00000227906_9 (sequence is synthesized)
ttttcccatttattctctaaattttagactataaccaggatgtgtttaggttgatatctttgcttatctattctgcctggaaatcaggaacctcttccaatattcagacttgtgttttca

SEQ ID NO: 967790 - DNA, 120 bp, Artificial Sequence
  ENSG00000227906_10 (sequence is synthesized)
gctcagaataattattttatcatttgtttgattattcctttagttgcactggatcttagttaaaatgcccattctgattcaaagtatctggaaggcaagtatttgtcaactaagggaaag

SEQ ID NO: 967791 - DNA, 120 bp, Artificial Sequence
  ENSG00000227906_11 (sequence is synthesized)
gtgaccatgcatcattggttttgctgagactacctggtttacaccttcaggctttatacttagaaaatattgcgatcatcttctggtcatgaagttacaaacttcaggacaaaggctaac

SEQ ID NO: 967792 - DNA, 120 bp, Artificial Sequence
  ENSG00000227906_12 (sequence is synthesized)
cagctaagactagcagagcaaattccaagaacttggggctttaattaacttgaattgatttggacttgccctacctttaacttcacactgagataaaaattccccacattttcaagccat

SEQ ID NO: 967793 - DNA, 120 bp, Artificial Sequence
  ENSG00000227906_13 (sequence is synthesized)
ttttgagatgagtctcttatggttgaaagcatcctaatttatacaacatccttttggtacctaactaaatattcaccaatatttggcacatttgttaaatcttttggtgtgtgcctcttc

SEQ ID NO: 967794 - DNA, 120 bp, Artificial Sequence
  ENSG00000227906_14 (sequence is synthesized)
tatgtaatgtaaatatggtctgaatatccattcagaaattatagttgatttgcaaaaataactactatatcacctatattaattgatagttattccttcccaaccttctttcactcttcc

SEQ ID NO: 967795 - DNA, 120 bp, Artificial Sequence
  ENSG00000227906_15 (sequence is synthesized)
gacgtggagcaggcggcataaatcaagtccgcggggcatggaggctgctgtcgctgcagcagctcagcttgcccggggcgggaactccccctttctcctttcgcctccccagcacccaca

SEQ ID NO: 967796 - DNA, 120 bp, Artificial Sequence
  ENSG00000227906_16 (sequence is synthesized)
ccctgtctcccccttaattcttccctggataatagcaccctaacgacaacagtcataataatagggttagaacgacaggggaggaaaactcaacagcctaaatatctctgaaaactgcat

SEQ ID NO: 967797 - DNA, 120 bp, Artificial Sequence
  ENSG00000227906_17 (sequence is synthesized)
cgcaaaatggaagaaagagggggtcccactactgtttcaaaagagagccatggaagtcaaatgctgaggatggtggcatcataggatgaatggagctgggttcttgaaacactgcctgga

SEQ ID NO: 967798 - DNA, 120 bp, Artificial Sequence
  ENSG00000227906_18 (sequence is synthesized)
ggaaagacagcaaaaatgcctcatgaatccaactggactgttagctcatctttacccttcaaatctcaactcaaatgtccttcctctgagaggccttctctgcctgccctcccatgtaaa

SEQ ID NO: 967799 - DNA, 120 bp, Artificial Sequence
  ENSG00000227906_19 (sequence is synthesized)
gaaaccagctccatttctgggatgctcacccttggagaccagcaacaatgtgtgcagaaacccaggccatgtggagaggccccacatacgtgtccaactgaggtcccagctgacagctgg

SEQ ID NO: 967800 - DNA, 120 bp, Artificial Sequence
  ENSG00000227906_20 (sequence is synthesized)
tttatttcaattatggaaaaagccaacactttactcccttatttaacacttctgtagaaaagcagttgaaataacctagtgtcattctaaaatgatttgtatactatgtagaccagaatc

SEQ ID NO: 967801 - DNA, 120 bp, Artificial Sequence
  ENSG00000227906_21 (sequence is synthesized)
tagggctatacctaaaaatacataaatgaaattattctagaagttaaatcttcatgaaaaaacaaattaaatggtttactaacctcaagctgattaaatgtttttattaaatgcagcctc

SEQ ID NO: 967802 - DNA, 120 bp, Artificial Sequence
  ENSG00000227906_22 (sequence is synthesized)
agccagcacctcttttcatggctgcaataattaagtataataaatattcaaatcagtaattgaatttgttaaaaaaaacatgctcagctcagtgaagactttctaataaatagaattcag

SEQ ID NO: 967803 - DNA, 120 bp, Artificial Sequence
  ENSG00000227906_23 (sequence is synthesized)
gtaccatattttcatacttcatgacacttgcctcatcttagtttgatgactgccgtttcttgcactgtaacaagattttatttttattttgttttacgctattcaaacaaatacattcaa

SEQ ID NO: 967804 - DNA, 120 bp, Artificial Sequence
  ENSG00000227906_24 (sequence is synthesized)
agtcataggctacacctatgtataaccatattctgagagttggcttatgtgtttgtttattttctcacaattaaagataggtcagatgttgccaaattagtaaataactaaacttgagat

SEQ ID NO: 967805 - DNA, 120 bp, Artificial Sequence
  ENSG00000227906_25 (sequence is synthesized)
gggaaatactctagagacacaatctgcttagttttgcatagttttgcatagttttagtcacttttcccgttactctgtccagctttccagtaatactcataacattgccttgatttcata

SEQ ID NO: 967806 - DNA, 120 bp, Artificial Sequence
  ENSG00000227906_26 (sequence is synthesized)
tgaccacgcagtaaagtgattactgcacttagaattttgttgcttttgctgtgctaacaacttaaaagtttaaaataactgatgttcaaaacagtgaagatttccttttataaacaagtt

SEQ ID NO: 967807 - DNA, 120 bp, Artificial Sequence
  ENSG00000227906_27 (sequence is synthesized)
ggaaaggaaagtttttatgttattatcctcaagtattctaactaatataaaatgtctttcagtcttttaggcaaaccatttagacaaaaagtacaaataataaatttacattgtgttaag

SEQ ID NO: 967808 - DNA, 120 bp, Artificial Sequence
  ENSG00000227906_28 (sequence is synthesized)
ctgcgatcatatttctttctcttgatttacttttgaaattttccttatgcacctggtgatactgaaagatgagtcaaatagtgtaatacaatagggcaatatgaacttctgttgtagttt

SEQ ID NO: 967809 - DNA, 120 bp, Artificial Sequence
  ENSG00000227906_29 (sequence is synthesized)
ccattagttgcatcaattcaaattgcacctggaaaagatctaagcacgacataaagccaagacagcacataagggtgatggcaaacaataataatatttacatctttttttttttttttt

SEQ ID NO: 967810 - DNA, 120 bp, Artificial Sequence
  ENSG00000227906_30 (sequence is synthesized)
catctttccaaactcttgcatgaaacttgatctattcctgttttctacttcagaataaggtcaattttcattatttgtaatttgttacacaatcttctgtgtcctctcagttttcaaatt

SEQ ID NO: 967811 - DNA, 120 bp, Artificial Sequence
  ENSG00000227906_31 (sequence is synthesized)
tattgccatgtaactgcaattctttgaaacttctttgattgtgaagttatatctcctttcttaatacatacacacacacgtacacaaactttttttctttaatctgaaccataaggcttt

SEQ ID NO: 967812 - DNA, 120 bp, Artificial Sequence
  ENSG00000227906_32 (sequence is synthesized)
ctttctgttttacagattctttaaaagagcagatttttaaaatcctttttatcctttctaatatattttattgttttctatttcatgaaattcagtaattttgcctttatttcttagtag

SEQ ID NO: 967813 - DNA, 120 bp, Artificial Sequence
  ENSG00000227906_33 (sequence is synthesized)
tttcacttcatttgcttttttcctaatttcctaggataaaaactatttttttctttcatttactttattaatgtaagcatttaaggctatacattctcccctgaacacagtttcatctgt

SEQ ID NO: 967814 - DNA, 120 bp, Artificial Sequence
  ENSG00000227906_34 (sequence is synthesized)
gtctcataggttttggatttagtgttctttaaattgcttcctagaaaattagtaacattagttgtgattttctctttgatgtggagaggatgtttcttaatttgcaagtacttaaacttt

SEQ ID NO: 967815 - DNA, 120 bp, Artificial Sequence
  ENSG00000227906_35 (sequence is synthesized)
tttgcaagtacttaaactttaggccacctttaaatcatttatcttcaacagcctatgatcagataatatgtctattaaatcccgattttttagaaaaggtgtgtgtgtgtgtgtgtgtgt

SEQ ID NO: 967816 - DNA, 120 bp, Artificial Sequence
  ENSG00000227906_36 (sequence is synthesized)
agtatactatctggaaaatgaatatatgtaatcaactttgttgtgttgttctattttcctaaatatttgattatatttaaatttaccacatcagcctaatttttatatgttaaatccctt

SEQ ID NO: 967817 - DNA, 120 bp, Artificial Sequence
  ENSG00000227906_37 (sequence is synthesized)
gtaatcagtgtattttaatcaaagtcatcttatatttctagtaatttttaattaatgtattttgtggccatactgtttgtgcatatagatttatgtcatctgcttcctaacttttgccac

SEQ ID NO: 967818 - DNA, 120 bp, Artificial Sequence
  ENSG00000227906_38 (sequence is synthesized)
tgtaactctatgtcatccttttccttaggtaatgtccgtagcctttaatttctccttgtttaacatttatttctttttgcttgccttgcctcaaatctcttatttttaatctttcattat

SEQ ID NO: 967819 - DNA, 120 bp, Artificial Sequence
  ENSG00000227906_39 (sequence is synthesized)
ttcattatcaatttgtttataagaatgtttctgataaatactatatagctaactttttgttcttatttaatccaatttgactttctctgtttttttaatgagagaatctggtatattaat

SEQ ID NO: 967820 - DNA, 120 bp, Artificial Sequence
  ENSG00000227906_40 (sequence is synthesized)
taacaaatgatatacttgattttattttttcagtctcattgattgcttattatctagattattctactatgacatctttttttttatttttatcaatttggtcttcaagtccctcctaac

SEQ ID NO: 967821 - DNA, 120 bp, Artificial Sequence
  ENSG00000227906_41 (sequence is synthesized)
ttggagaatctgattaactttttcatctcattaataatcaccttccgttctcaggcattaatagtcaaacatttattttcttttaaataaaataaggtaactctttgtgcccatttctag

SEQ ID NO: 967822 - DNA, 120 bp, Artificial Sequence
  ENSG00000227906_42 (sequence is synthesized)
atgcttgattctcccagtcctttcccaacctaaaaaagcattttgtcttctacttccccattttgttttcttctcctagatgagatcttgagaatgaccttacatccctccaaccttcta

SEQ ID NO: 967823 - DNA, 120 bp, Artificial Sequence
  ENSG00000227906_43 (sequence is synthesized)
cccagccctaagtctttagtttggccaagataagttagaacttctaattccatataactatggtactgtcactggcagtatgaatgctccatgtgaatgcatatgccagatttgaaggga

SEQ ID NO: 967824 - DNA, 120 bp, Artificial Sequence
  ENSG00000227906_44 (sequence is synthesized)
atctttctttcttttttaattgaaaagcagttagattcacattgtggttatgagtttgggtgcttgtatcagactacatggatttttttctcaaaggtgttgcttgctaactgtgtaaac

SEQ ID NO: 967825 - DNA, 120 bp, Artificial Sequence
  ENSG00000227906_45 (sequence is synthesized)
ggagcctcattctccttcacttttctgtttggtgaatttagtctctcacttctggtgaatgggatacagtggaagtgacagcatgccttctaactctctctttctctctctctcagaatg

SEQ ID NO: 967826 - DNA, 120 bp, Artificial Sequence
  ENSG00000227906_46 (sequence is synthesized)
gcagatttcatgaagaaaataagtgttgttgacttaagccagtaagttttgacatactatgttacacagccatagtagctggaagagtgtgaaacaaatactattctcttgtgtctcatt

SEQ ID NO: 967827 - DNA, 120 bp, Artificial Sequence
  ENSG00000227906_47 (sequence is synthesized)
tctctataaagtatatcttcccccttccttgcatagggattctttctccttttctctcagacagttctgctattatccctgctagtgatgctattactacttcaaatactattgttttta

SEQ ID NO: 967828 - DNA, 120 bp, Artificial Sequence
  ENSG00000227906_48 (sequence is synthesized)
tatctgttgctactactgaaaataagataattttataactaatgttgagtatgcatctactatatagatttacatccttaacatgtattaaatcacgtaattcttacatcaaaagcatgg

SEQ ID NO: 967829 - DNA, 120 bp, Artificial Sequence
  ENSG00000227906_49 (sequence is synthesized)
aattgtatcaccccaagattcatatgttgaagtcctcacctttagtattcacaatgtgacctgtttggagatatggtctttaaagatgtgaaatgaagccattaaagtagtccttaatcc

SEQ ID NO: 967830 - DNA, 120 bp, Artificial Sequence
  ENSG00000227906_50 (sequence is synthesized)
aggaccctcaggagtattttgaataatggggatttgtggaattattgccttgcctgtgattttaatgagaataagtctaacattttatcactggtatttgacagtttttttgaaggcaat

SEQ ID NO: 967831 - DNA, 120 bp, Artificial Sequence
  ENSG00000227906_51 (sequence is synthesized)
ctgtcaaatttaggaaatgtcttctttttcccaactccctgagagtttttaattttttagacaggggtggctaatatagtctgtcaaatacttttccaaagactgttgagatagtatatg

SEQ ID NO: 967832 - DNA, 120 bp, Artificial Sequence
  ENSG00000227906_52 (sequence is synthesized)
ttctgctcatttattctattaatccagtgctttaaacatgcatgcgtttcctattactacaacattcttgcattcctaaaataaaccttccttgatcgccatgcattgttaatactttaa

SEQ ID NO: 967833 - DNA, 120 bp, Artificial Sequence
  ENSG00000227906_53 (sequence is synthesized)
gatgttgctgcagtaaatttgaaaatattgtattcattatttttatttgcatcgagcttaatgtctattctctttactggtgctctctttattgggcataatattagcattcgtcaagcc

SEQ ID NO: 967834 - DNA, 120 bp, Artificial Sequence
  ENSG00000227906_54 (sequence is synthesized)
acatgtaattatttaggaaggttttcatctttttaatgttctggaatagattataaatgttaaagggattatttattcgttaaaatttttatagaaatccctccccacaaaccagtaagg

SEQ ID NO: 967835 - DNA, 120 bp, Artificial Sequence
  ENSG00000227906_55 (sequence is synthesized)
aaaccagtaaggcttgctgtcaaattagggaatatggcggtgcaaagactagatctttgactttcatctcaagttcttcaataatgttgattttctaagctgggcatggtggctcatgcc

SEQ ID NO: 967836 - DNA, 79 bp, Artificial Sequence
  ENSG00000227906_56 (sequence is synthesized)
cattaaaaatacaaaaaagttagccaggcatggtggtgggtacctgtagtcccagctccttggaaggcggaggcacaaa

SEQ ID NO: 967837 - DNA, 88 bp, Artificial Sequence
  ENSG00000227906_57 (sequence is synthesized)
ccattaaaaatacaaaaaagttagccaggcatggtggtgggtacctgtagtcccagctccttggaaggcggaggcacaaaaattgctg

SEQ ID NO: 967838 - DNA, 120 bp, Artificial Sequence
  ENSG00000227906_58 (sequence is synthesized)
ataataatgttgattttctaatttgaagtatatttaaagtcaataagcaaacattcaaaaacacttgtatgactctcctaaatctttattatttaaatagttttctattgtactcgaaaa

SEQ ID NO: 967839 - DNA, 120 bp, Artificial Sequence
  ENSG00000227906_59 (sequence is synthesized)
atagttttctattgtactcgaaaagatttgaaggtatatccttctgtgtccaaaaggtcagtataatattatgtatacattatcttcgtagcacaactatttggaataagcttttcttca

SEQ ID NO: 967840 - DNA, 120 bp, Artificial Sequence
  ENSG00000227906_60 (sequence is synthesized)
gagatgtatcggcataaaggagctctgatttgtttaaatattttaaaaggtattaaaatatattttcatttgagaacctcccctatatactcaggaaagctcaccttttcaaaacctgag

SEQ ID NO: 967841 - DNA, 120 bp, Artificial Sequence
  ENSG00000227906_61 (sequence is synthesized)
tgttaactctttccaaacgttctgtaatgtttatcaaaaacaaaaaataatgaaaagaggtgaacattattttggagagcctcattgtcttcatctactcagatcatccacaatcactgg

SEQ ID NO: 967842 - DNA, 120 bp, Artificial Sequence
  ENSG00000227906_62 (sequence is synthesized)
agaggaggcagaattttgtcaatgggacagcagtcacttgacccagaatcctctacagattccctccagggagcccttcccattggctctttcctaataatttcatgtttttgggtttcc

SEQ ID NO: 967843 - DNA, 120 bp, Artificial Sequence
  ENSG00000227906_63 (sequence is synthesized)
tcagtaaaactttggtcttaacaaaagtctttattcccctgttataattatcaccctaactacaggcaagaaaaaaaataatctaccacttatatcagtcaactactgccgctataatgt

SEQ ID NO: 967844 - DNA, 120 bp, Artificial Sequence
  ENSG00000227906_64 (sequence is synthesized)
tacctcatagattcacccacaaatttagtggtcacagaagtaagcatctgctgtcatgcttggattcttgagttgactgctattgactcatttagaatatgcttgattgggcagctctat

SEQ ID NO: 967845 - DNA, 120 bp, Artificial Sequence
  ENSG00000227906_65 (sequence is synthesized)
ttccgtatttatgttccaagactgaagctcttggctatgatgggttcaagtttgctccacgtttccttccagggcctaggctgaaggagaagacatagcagcccatgggacatgttcgtc

SEQ ID NO: 967846 - DNA, 120 bp, Artificial Sequence
  ENSG00000227906_66 (sequence is synthesized)
tcatggatgatcacaattgccaagaagataagccagcatacaggttatgccagatgctagaagaagactgttgctattgtttttctccatgctcaaggatttttgtcctttgcaaaataa

SEQ ID NO: 967847 - DNA, 120 bp, Artificial Sequence
  ENSG00000227906_67 (sequence is synthesized)
tctcagaatgtattgtagaagctactgatgccccaatctatgtccgtcagccaaatgtctggattcactgcagctgcgcgacacacccatgtctttctacctcaactatccacgcctctc

SEQ ID NO: 967848 - DNA, 120 bp, Artificial Sequence
  ENSG00000227906_68 (sequence is synthesized)
tgcttgcttctctgcctgtggggctttcttggcagtacaggagtttgctctgcctagaagtgtaatgagtttaatttcccagcagcaattttcaaccagtgagaaactggaactggtgca

SEQ ID NO: 967849 - DNA, 120 bp, Artificial Sequence
  ENSG00000227906_69 (sequence is synthesized)
taaacagcccagattccctatcaccctttgggccacactctcagaaagcttgagattgcggttacctgctccctgctcccttgtgcacacacctttcattggctgtcttcccttttctac

SEQ ID NO: 967850 - DNA, 120 bp, Artificial Sequence
  ENSG00000227906_70 (sequence is synthesized)
ttcactcctcactcccttgttgcacttcctgggatcacctgtcaaactacctggggcatggtgacatgcatctgtagtcccaactacacaggaggttgaggtgagaagatcacttgaacc

SEQ ID NO: 967851 - DNA, 120 bp, Artificial Sequence
  ENSG00000227906_71 (sequence is synthesized)
ctgggcaacatagcaagactcctgtctcttaaaaaataaaataaaatacatgtatctacatcattttctcagggttggcttttggaggagcctaaactaagactgtaagcaggaaacact

SEQ ID NO: 967852 - DNA, 120 bp, Artificial Sequence
  ENSG00000227906_72 (sequence is synthesized)
gagagctctccctaaaatgcacaaaactcagagaaactaaagcaataaagtaacttaatttatgtgtagataaaaagtgtctcagagatggcattgttctgtcagagctggcaagttaaa

SEQ ID NO: 967853 - DNA, 120 bp, Artificial Sequence
  ENSG00000227906_73 (sequence is synthesized)
aagcagccaaatacaaaaaatatgcacagaagaaaaagaaaaacactcatccaggtgctggtctgtgtttaaagcacagagaggtgcagtttagtcttaggcttcttctgtgccctggta

SEQ ID NO: 967854 - DNA, 120 bp, Artificial Sequence
  ENSG00000227906_74 (sequence is synthesized)
tattagtctgttctcactctgctatgaggacatacccgagactgagtaatttataaagtaaagaggtttagttgactcacagttcaacatggctgggtaggcctcaggaaacttacaatc

SEQ ID NO: 967855 - DNA, 120 bp, Artificial Sequence
  ENSG00000227906_75 (sequence is synthesized)
atgacagaaggggaagcaaacacgcccttgttcacatggcagtagcaaggagaagtgccacgcaaaagggggaaaagcctgttataaaaccatcagatcccgtgagaactcactatcata

SEQ ID NO: 967856 - DNA, 120 bp, Artificial Sequence
  ENSG00000227906_76 (sequence is synthesized)
agaacagcatgagggtaacgacccccatgattaaattacctcccaccaggtcgcagctctaacacatgggaattacaattcagattacaattcacaatgagattttgtgtggggacacag

SEQ ID NO: 967857 - DNA, 120 bp, Artificial Sequence
  ENSG00000227906_77 (sequence is synthesized)
ccaaactatatcacctggcttcttccactccctaactagtattaccagatcttttctctctgtgggtgctcctttctctgactattgtccagaagggacaaatatggtcctgtgctcatt

SEQ ID NO: 967858 - DNA, 120 bp, Artificial Sequence
  ENSG00000227906_78 (sequence is synthesized)
atttcaagaacaatagatttgcatcagactcatgtgcttctgagaaatgatgtcgaaccactcttgcgttgtagctcacatcctcttggccacatttttacagcaaccagctttgtgata

SEQ ID NO: 967859 - DNA, 120 bp, Artificial Sequence
  ENSG00000227906_79 (sequence is synthesized)
gtgtcactgccagcaccttgcatcagctgcagcacttatctcttgcttctctgttaccatctgttaagatgccttctgcaaactactcagccattctgaagcaggtgcaatctttgaagt

SEQ ID NO: 967860 - DNA, 120 bp, Artificial Sequence
  ENSG00000227906_80 (sequence is synthesized)
ccacggtcgtgaacagcctttcggccaacatgaccaatggtagaagacagtcaatggatcatcccttctctcatttgtctttctggtggacaattttgaagtgtattctgtgtagtttct

SEQ ID NO: 967861 - DNA, 120 bp, Artificial Sequence
  ENSG00000227906_81 (sequence is synthesized)
cagagtgtcccctggagacctgtgtctcatttgctcacagcattgtttagattaacacatcttcttgattttactttttcctgcatgtacactcttgtgtccaacccaagtttctgggga

SEQ ID NO: 967862 - DNA, 120 bp, Artificial Sequence
  ENSG00000227906_82 (sequence is synthesized)
acactatgctgtttgggtccacatttccctgtttctcccttcctagtggctcctcacacaaccctggaccaattgctctgacatcaacatggtctccatcttgccttaaaatgaacaaag

SEQ ID NO: 967863 - DNA, 120 bp, Artificial Sequence
  ENSG00000227906_83 (sequence is synthesized)
gggtaaagatttaaaaatgagaatcttgctgctaactgctctgaaggtattaaccacgtgtaaaattttgaacaaatgtttataactctaacttgttgaatacttgttgacatacttgtt

SEQ ID NO: 967864 - DNA, 120 bp, Artificial Sequence
  ENSG00000227906_84 (sequence is synthesized)
gaatttgttaaattttaaaaaacttactgattgtaattgttgaatttttgagaaccctaattcttcctcaaaattggtccttcattcatttccacttttctttggaatgtacggtattta

SEQ ID NO: 967865 - DNA, 120 bp, Artificial Sequence
  ENSG00000227906_85 (sequence is synthesized)
caaccatggctgcagattttttgggggttggttattgattcagaaaaaatgcttattaatatgtcatttgggcaggcactataaagaatatagagtgactaaaatgcagttgctaaaata

SEQ ID NO: 967866 - DNA, 120 bp, Artificial Sequence
  ENSG00000227906_86 (sequence is synthesized)
caaggataatttaatgatgaaataggaaaagctttacaaataaccagagcaagtgaaatacagagtatgatcagcataatgaataaagtgttgacataatacataatacatgaagtccta

SEQ ID NO: 967867 - DNA, 120 bp, Artificial Sequence
  ENSG00000227906_87 (sequence is synthesized)
atacataatgttatggtgacaagagaagcccatctggtcagaagcatagactacacactgtttttcagttggctcatgaaggatgctcctcttgggctgtgctgagactagcaaagacaa

SEQ ID NO: 967868 - DNA, 120 bp, Artificial Sequence
  ENSG00000227906_88 (sequence is synthesized)
ttggtgagctttttttttgtcacaatgacaaaaatgtttgtatttggttggctaagacattttgaagcaacatttttcaatttaattcttgagaacattttgatggctcgctctcgacat

SEQ ID NO: 967869 - DNA, 120 bp, Artificial Sequence
  ENSG00000227906_89 (sequence is synthesized)
ctcaagctccaaggatatttcaacaagtttctgtgctatgtcatcaaacagcatgtttctcctctccaagattgagcttttaagagttacggagtctacttttcctgaggtcgtgaagtc

SEQ ID NO: 967870 - DNA, 120 bp, Artificial Sequence
  ENSG00000227906_90 (sequence is synthesized)
ctaatacatgtacttttgaagcatgatgactcttcatgcctcctgggtatttctgcttctttatgagaatttcattgttattcatgtgtagatgacagtttgaatgacctagaaagaaca

SEQ ID NO: 967871 - DNA, 120 bp, Artificial Sequence
  ENSG00000227906_91 (sequence is synthesized)
aaacataaaagtaatgattacataattcctgccatccctaattaactatgttttattttctaagagctgcagatgttatattactcataaaagtctgttcatgtattatttatgccacac

SEQ ID NO: 967872 - DNA, 120 bp, Artificial Sequence
  ENSG00000227906_92 (sequence is synthesized)
acccaacctaaggaactggaatctgcattttaacaagatgccctggtgatttgtgtgtaccgagtttgggacaccacttgaggccaagacctctgagtgtaacaacagactgagagaatt

SEQ ID NO: 967873 - DNA, 120 bp, Artificial Sequence
  ENSG00000227906_93 (sequence is synthesized)
ccctggcacatccagccccggccaggcatttctgccgcaggcagatgaggcgctgcggccggaccgctgtccccggtgctgaaaggtcgagggcgcccgcgcgagccctcggtgttgcta

SEQ ID NO: 967874 - DNA, 120 bp, Artificial Sequence
  ENSG00000227906_94 (sequence is synthesized)
tgggttcttgaaacactgcctggaggaaagacagcaaaaatgcctcatgaatccaactggactgttaggagtttccctgcacaagctctcttttttgcctgctgccatccatgtaagatg

SEQ ID NO: 967875 - DNA, 60 bp, Artificial Sequence
  ENSG00000227906_95 (sequence is synthesized)
atcttcattgcatcatttaactttcattggtatcacagtaattcactaacattcattcct

SEQ ID NO: 967876 - DNA, 120 bp, Artificial Sequence
  ENSG00000227906_96 (sequence is synthesized)
ctttcattggtatcacagtaattcactaacattcattccttacaggcagttatgaataattgaaaaatttttaacatcatctcatgggcaaaagaatatttattcattggcttagcttaa

SEQ ID NO: 967877 - DNA, 120 bp, Artificial Sequence
  ENSG00000227906_97 (sequence is synthesized)
caaatcattattaaacacctactgtgtgccaggcactgttctagacactggagttacagcagtgaacaaaataaacacgctctccagtctggtggagttcacatactggtgcggggagag

SEQ ID NO: 967878 - DNA, 120 bp, Artificial Sequence
  ENSG00000227906_98 (sequence is synthesized)
agatgcatacaaacaaaaatgcatatttaatacttcaccaattgataggtgctatgaagaaaaataaaccatagtaaggatgacatagagtgctggatggaggttttagtacatatacgt

SEQ ID NO: 967879 - DNA, 120 bp, Artificial Sequence
  ENSG00000227906_99 (sequence is synthesized)
tagccagagaaggcatctctgagaagttgccatttgagaaaaagagggagtaggctcagtggattctgagggaagaataagtttgagattctgagtcattcatgtccttggcagatcaat

SEQ ID NO: 967880 - DNA, 120 bp, Artificial Sequence
  ENSG00000227906_100 (sequence is synthesized)
aaagaggaagcagatgctgtggccggaactcagtgtgcatgttggggcagtggtaggaggctatggttgtaagacagggctacctcccatagggtcttgaagaccatagtaaagactgtg

SEQ ID NO: 967881 - DNA, 120 bp, Artificial Sequence
  ENSG00000227906_101 (sequence is synthesized)
gcatctcctctccagtagtttgagcagaggaatggtagcattctacttaggatttaaaaggtttgctctagctgatttgtggagaataggtttgtaaggcagcatagtgaatgaaaggag

SEQ ID NO: 967882 - DNA, 120 bp, Artificial Sequence
  ENSG00000227906_102 (sequence is synthesized)
aaaagttaggcgattgcaaacatccaggtgagagttgatatcagacggtgatggtgtcacagatgcgtttcatgcgatgggctcaattaatggcctccatgtttcacccttctctttctt

SEQ ID NO: 967883 - DNA, 120 bp, Artificial Sequence
  ENSG00000227906_103 (sequence is synthesized)
gggactggcttgcctgctggaaggtgaggaaacagcctgtcatcccagctgaggccatcctagatcagccaactgtcagctgcttgtgtgtcagtgaaccccagccaagaccggaagacc

SEQ ID NO: 967884 - DNA, 120 bp, Artificial Sequence
  ENSG00000227906_104 (sequence is synthesized)
tgcccagctgagctcagccaagatcagcaaaacctctcagcttataaccttataaacttaccaatttaggtgtggttgtgacacagaattattgtattattgtatgcatggtgagtattg

SEQ ID NO: 967885 - DNA, 120 bp, Artificial Sequence
  ENSG00000227906_105 (sequence is synthesized)
tatattacacatgggaatcatagaaacagtgaaaagccagtaatttctgagtatatattaaagttagggcaaattgtgtgaggtggagaagccacatactccaaatttctggcctgagac

SEQ ID NO: 967886 - DNA, 120 bp, Artificial Sequence
  ENSG00000227906_106 (sequence is synthesized)
attggaagaatgaatatggatgatggaggtggatattgaatctgaaatgaatttttcattttgtgaaattttgtgaagtttcattttgtgttgaatatcttgtgactcaccgaaatgaaa

SEQ ID NO: 967887 - DNA, 120 bp, Artificial Sequence
  ENSG00000227906_107 (sequence is synthesized)
tccttgtgaatctgcaaatatccttattttaccctttattttaccatgtatcatttacagacaaacttccagtcctgcaagcttcattcataggagtgaattctcatgagatctgatgat

SEQ ID NO: 967888 - DNA, 120 bp, Artificial Sequence
  ENSG00000227906_108 (sequence is synthesized)
tgattttattacaagtggcttcccccttctctcggctctcattcttgctcctgccaccatgtgaagaagggcgtgtttgcttccctttccaccgggattgtaagtttcctgaggcctccc

SEQ ID NO: 967889 - DNA, 120 bp, Artificial Sequence
  ENSG00000227906_109 (sequence is synthesized)
ccatttcttcttgccagtgcagcacactcccaggggacacgtggcttcactcctgaacaagttcagtaagcagtgctggagagaatactgaaaacgttaaagaattatgaatacagctca

SEQ ID NO: 967890 - DNA, 120 bp, Artificial Sequence
  ENSG00000227906_110 (sequence is synthesized)
gatctcactttcctgttttttagattttgggaattcattcaggtggaaacagcatttcttgccatcacatgatgggggtgtccccctctgccatgtttcccatcagttctatcttcctcc

SEQ ID NO: 967891 - DNA, 120 bp, Artificial Sequence
  ENSG00000227906_111 (sequence is synthesized)
tgtttcaaaagagatcgacagaacttgacttagaaagctggcacacagcttcacggaagcagcttctagaggaatgctatccaacataactttctgtgatgacagaaatgtactacagct

SEQ ID NO: 967892 - DNA, 120 bp, Artificial Sequence
  ENSG00000227906_112 (sequence is synthesized)
cagaatgttcactctgggggaagccagctgccacgctgtaaggacactcgggcagtcctatgaagaggcccgtgtggtgagaaagagaggcctccagccaacagccatgtgaggaaacag

SEQ ID NO: 967893 - DNA, 120 bp, Artificial Sequence
  ENSG00000227907_0 (sequence is synthesized)
cttccttcaagcacgtggaccgacacccaggcctcctggtgtcctgacactgcagactcctggaatatacctccaccagcaggcaggaatctgtcctattcccagcaaccactagaggca

SEQ ID NO: 967894 - DNA, 120 bp, Artificial Sequence
  ENSG00000227907_1 (sequence is synthesized)
tatgaaaatctttagctgctgatcacagctataaacgagatgaggagggtccctgtcctcttggtgtttccagtctcccaaagaagacagacatgaaacaatgatggttacagttcaaga

SEQ ID NO: 967895 - DNA, 120 bp, Artificial Sequence
  ENSG00000227907_2 (sequence is synthesized)
tggaggtactatctgagcttatggcaaggggttttaatctcatccaaagggccaaggaatgcctctttaaagaagagagaacaaataaaaatcattcataattccatcacctataaataa

SEQ ID NO: 967896 - DNA, 120 bp, Artificial Sequence
  ENSG00000227902_0 (sequence is synthesized)
gcctcctgagtagctgggactacagatattaatcatctttaggattagaacctaaagcgtaagtctaattgtgcccagaattgcttccttccagtgggttcctggtctcgttgacttcaa

SEQ ID NO: 967897 - DNA, 120 bp, Artificial Sequence
  ENSG00000227902_1 (sequence is synthesized)
ttcattggtattgcattggatccataaattagttggaaaaaactgccacctttaacagttctgagccttccaatccatgagcatgttgcagaggatgagaagttcaaaatcaaggcactg

SEQ ID NO: 967898 - DNA, 120 bp, Artificial Sequence
  ENSG00000227908_0 (sequence is synthesized)
agcgattcccgtaacgcggctcttcgcgtcccggattccggtggctgcgtccgcgtcgcctctcccagactagatcgaagggttccccccacctcccctctgtgggcggaaagagcggaa

SEQ ID NO: 967899 - DNA, 120 bp, Artificial Sequence
  ENSG00000227908_1 (sequence is synthesized)
tgttccatttttctgtggaataacggggtcatgaactggagcccgggtgctgcccgccgcccgctgcccccgccctcccttctcgccagggcgcctgcggcctctcttcgcggccttccc

SEQ ID NO: 967900 - DNA, 120 bp, Artificial Sequence
  ENSG00000227908_2 (sequence is synthesized)
cgagggactcagagccgcgagggaccgcctagctcccttggggatggggaaggcgtgggagcctcttggggaaagtgaagagctcggtggccgtgactccgcacgagactgcggcagatt

SEQ ID NO: 967901 - DNA, 120 bp, Artificial Sequence
  ENSG00000227908_3 (sequence is synthesized)
gtggcggcggcttctctccaagacttacgatttacggaatggccatcttccataattaacaaataaataaatgaaatttaatgtcagggtcaaatgaaactggaaacaaagcttatctgg

SEQ ID NO: 967902 - DNA, 120 bp, Artificial Sequence
  ENSG00000227908_4 (sequence is synthesized)
tgatatatcaaattatgagagtcattatttggatgtaaggatatatgacagatagactcttaggagaaatgctatgacctcctgcttcttggtattccttgtgtgatttcctcctcttga

SEQ ID NO: 967903 - DNA, 120 bp, Artificial Sequence
  ENSG00000227908_5 (sequence is synthesized)
gtgtgaaggcatgtatgtcattgagttatataagatagtgcccatcttgctagtgtctctctctctcttgtggctctgaaaaatcaagctgcctgccatgtttgagctttgatatggaaa

SEQ ID NO: 967904 - DNA, 120 bp, Artificial Sequence
  ENSG00000227908_6 (sequence is synthesized)
ctgccatgtttgagctttgatatggaaagacccacatgttaaggaactgagggcagactctgccaacagctagctttgaaactgaatctcccggccaggcacagtggctcatgcctttaa

SEQ ID NO: 967905 - DNA, 120 bp, Artificial Sequence
  ENSG00000227908_7 (sequence is synthesized)
aaccaaatctctcagtcctacaacctcaaggaactgaattttgccaacaaaagcagatccttccccagtcaagcctcagatgagacagcatcctcagctaacaacttgtttgcagcctca

SEQ ID NO: 967906 - DNA, 120 bp, Artificial Sequence
  ENSG00000227908_8 (sequence is synthesized)
tgagaactgaagcagagaacccagctaaactgtgcctagactcctgaccacagaaactgagataataaatgtgtgttgttttaagctgccaagtatgtgataatttgttatgtagtggag

SEQ ID NO: 967907 - DNA, 120 bp, Artificial Sequence
  ENSG00000227908_9 (sequence is synthesized)
aactaatacaacagggaaaagttaaaagctattcacataaatatttataatggatactatttctacacatttaaatcaagcttctcttacgttcataagaagatacgaatctggagaagg

SEQ ID NO: 967908 - DNA, 120 bp, Artificial Sequence
  ENSG00000227908_10 (sequence is synthesized)
aaattatatcaagcagaacgctgctctggtgttgtgaagacgggatcccaccattctaatgtattcaatttatttattcaataagttttgagcatcaactatgttccaggcactgagata

SEQ ID NO: 967909 - DNA, 120 bp, Artificial Sequence
  ENSG00000227908_11 (sequence is synthesized)
ttaatctaaggaagacacacgtgttgtcctcattgaggagctcaaaagtctaatacataaaccaacaatcatacaaaaatcatagccatgttacagtgctatgaggaagatgttaagaga

SEQ ID NO: 967910 - DNA, 120 bp, Artificial Sequence
  ENSG00000227908_12 (sequence is synthesized)
atattctggaagtactcatacataaatacttcagaaactgggcattataagaagtcagttgcctctctctactttcagttctacatttttataccttgtagtggatttaaaatggccaca

SEQ ID NO: 967911 - DNA, 120 bp, Artificial Sequence
  ENSG00000227908_13 (sequence is synthesized)
aattcttcaatactcttctatggagagatttgagggctatttcccttcatcttgaatttaggcaggcttgttcagggtctggcttttaagaggagctttcaccttggtctgtggaagtcc

SEQ ID NO: 967912 - DNA, 120 bp, Artificial Sequence
  ENSG00000227908_14 (sequence is synthesized)
tgagtcactgtgtacaaagtccatctaccttattacaccatctggagagagctgagactacagggagagggggagtggcccggctgatcccagtcttcctagtgaccctgcccaggaact

SEQ ID NO: 967913 - DNA, 120 bp, Artificial Sequence
  ENSG00000227908_15 (sequence is synthesized)
tggcatgtgagtaaagccatcttggaacctccataccagaccagccacgagatgaataatactaactgatcccagtcaatgccacatagagcagaagaactgcctaactgaattctttcc

SEQ ID NO: 967914 - DNA, 120 bp, Artificial Sequence
  ENSG00000227908_16 (sequence is synthesized)
aaactgctgactcaaaaatttgtatggtataataaaatgtttgttttaagtcactgttttgttaggagtaataagcaaccagaataaaattctaatctttatcatgtaccgtgctgaaaa

SEQ ID NO: 967915 - DNA, 120 bp, Artificial Sequence
  ENSG00000281538_0 (sequence is synthesized)
gggtccagacagcagcatccctgagggcccagagaggtggccagtcctgtggtgaggttgagaggtgtcaacgtgctggtggtcctcgctcgctctcagcgcctcctcggcctcagcttc

SEQ ID NO: 967916 - DNA, 120 bp, Artificial Sequence
  ENSG00000281538_1 (sequence is synthesized)
tgctctgaccacacttgaggagcccttcagcccagcgctgcactgtgggagcccctctctggactggtggaggctggagccggctccgtctgcttgcggggagtaagtcttgctgctgct

SEQ ID NO: 967917 - DNA, 120 bp, Artificial Sequence
  ENSG00000281538_2 (sequence is synthesized)
agttgtaacactggaaggactgcagtttcactcctgaggccagtgagaccacaaacccaccaggaagaatgaacaactccgtacgtgcagccttaagagccgtaacactcactgtgaagg

SEQ ID NO: 967918 - DNA, 85 bp, Artificial Sequence
  ENSG00000281538_3 (sequence is synthesized)
cacccaccagaaggaagaaactctgaacacgtcttaacatcagaaggaacaaactctgaacacaccatctttaagaactgtaaca

SEQ ID NO: 967919 - DNA, 120 bp, Artificial Sequence
  ENSG00000281530_0 (sequence is synthesized)
tagagctccctatttgtgtggctcaacgtgcaaggggccccacagcatcccggagctccacggaggtgaccatgtgccactgcctgcttgtgcccagttaaatggattcgggaactctgt

SEQ ID NO: 967920 - DNA, 120 bp, Artificial Sequence
  ENSG00000281530_1 (sequence is synthesized)
tagcggatttaaatagtggtcacaaaacaaatagtaacaataacaataattcttctgctgcaggataactggcccttgatgcagctcagcatcatgagtggttctgggcttaaagagatt

SEQ ID NO: 967921 - DNA, 120 bp, Artificial Sequence
  ENSG00000281530_2 (sequence is synthesized)
aaagaaacataaaaccaaatgtggcacaagaacccttatggtgtcctaggttgggaggcttataaaatcttccacaggacaattcaagaaatgagtggggacttgtggaagattcatttt

SEQ ID NO: 967922 - DNA, 120 bp, Artificial Sequence
  ENSG00000281530_3 (sequence is synthesized)
tagggcagagaggagccaagcagcagggtgcggtcagcaccgaggtggctcgggtgcacgcactcctctctccatagtggaatcgttttaaaaattcctgtaccaaaagcaagctgcaga

SEQ ID NO: 967923 - DNA, 120 bp, Artificial Sequence
  ENSG00000281530_4 (sequence is synthesized)
gtgaagacagtactgagtataaaacaagctagcaagagcacgtctagcccagcccagcccaccccagcctttctcctgcctggggacatggtgcaaagcagaggggtcattggggtctga

SEQ ID NO: 967924 - DNA, 120 bp, Artificial Sequence
  ENSG00000281530_5 (sequence is synthesized)
ggtgttggcccccccaaaaatacccaaaaaaccatgggaaatggatgtaagtcatttgttactcattctgaacccttccctaagaaaatattgtacctgagaatatcagctaatgatggt

SEQ ID NO: 967925 - DNA, 120 bp, Artificial Sequence
  ENSG00000225213_0 (sequence is synthesized)
agaagacatggtgacagaagcaagaggctggagtcactcatggaaggggccacgagccgagaagtacaggcagcctccagaaactggaaaggcatgcagccggatgtcccccctgcaatc

SEQ ID NO: 967926 - DNA, 120 bp, Artificial Sequence
  ENSG00000225213_1 (sequence is synthesized)
ccgaagcctccagaaggaatgcagctttattggcacctcaattttagctccataaaatccagtttttggacttgtgcactctacaacattcaccaaaatggtacccacagttgaaaacac

SEQ ID NO: 967927 - DNA, 120 bp, Artificial Sequence
  ENSG00000225213_2 (sequence is synthesized)
tgatttgccacccacgtctgtcccactcagaaaagcctattgcaatgcaagagaatgagcgtgataccattaaagggttgatcttggatctagtctaatttgtgaagaacattttataag

SEQ ID NO: 967928 - DNA, 120 bp, Artificial Sequence
  ENSG00000225213_3 (sequence is synthesized)
tcactcaaccatcatgagtaacaaatcgctggggaagtggcttaggcctcccagccacatgccaggaagcctgtgtttggcaatgactgttgctctgtacagaatggctcaagtgttcta

SEQ ID NO: 967929 - DNA, 120 bp, Artificial Sequence
  ENSG00000225213_4 (sequence is synthesized)
ttggaagcagttggaccttgtggctttcatgctgtcacccttgtattatttcttggtgtgtccaggtaaagctggagctccttagcccagccagaaaggcagctcatggtgcagcccctg

SEQ ID NO: 967930 - DNA, 120 bp, Artificial Sequence
  ENSG00000276166_0 (sequence is synthesized)
cccccggggcagctgaggcacagggagggggctgcaggggctgctctggagggggcttactgcacaggctcagccagcccatgctcagagagcagggtcccagggtagagtcagcacccc

SEQ ID NO: 967931 - DNA, 120 bp, Artificial Sequence
  ENSG00000276166_1 (sequence is synthesized)
cggctgagaggctggggtctccttacactgcccccttcccacagaccttccatttcccacctgcagaacggacacagcactgtctgccctgactactgcctgggggcaggggaggttgta

SEQ ID NO: 967932 - DNA, 120 bp, Artificial Sequence
  ENSG00000276166_2 (sequence is synthesized)
agggcagcctggtgactattaccctggggagactccccacccacactgccactccaggctcacccgagggctgcagcttcctccggatggatccagggcggctactggtcccagagctgg

SEQ ID NO: 967933 - DNA, 120 bp, Artificial Sequence
  ENSG00000276166_3 (sequence is synthesized)
gggctgagtgggcccgtgccgagggctgtggcgtctgacaagccggctcccactgtgagcagggaagggcggatgggcgggggccacggctgccctggctccccaccctgctgtgcttct

SEQ ID NO: 967934 - DNA, 120 bp, Artificial Sequence
  ENSG00000276166_4 (sequence is synthesized)
ctctactcccctgccctgcctcctaacacccagtttcctcatctgcaaaatgggcatgatgtttgtgccccagcctcagttatggcaagaattaaatgagataattcatgtaaagaagtc

SEQ ID NO: 967935 - DNA, 120 bp, Artificial Sequence
  ENSG00000225216_0 (sequence is synthesized)
ctttttgctcaccccacctggtactccatgtcgtagctgggcaggatgatccgcccgtgcttccactcgccgccctggtcctcacggatgacccacagcaacttgctctcctggctggct

SEQ ID NO: 967936 - DNA, 120 bp, Artificial Sequence
  ENSG00000225216_1 (sequence is synthesized)
tcccgcaccacctgcagcgccaccccgcggccgcccgtggcctgggactgtgaatatcctggacttgtcagggtagatgggctaggattctagagcctagaatcaatgcaatactccctg

SEQ ID NO: 967937 - DNA, 120 bp, Artificial Sequence
  ENSG00000225216_2 (sequence is synthesized)
tactgactgtactgctgattttatgtttttaaaaggacttcaggcaggccattttccatggatttcagcagttatctagtgagggagaatgagacagctataaagataccagccactgaa

SEQ ID NO: 967938 - DNA, 120 bp, Artificial Sequence
  ENSG00000225216_3 (sequence is synthesized)
cactccatcaagggatcccacagaagacacatccctccattacttgcttcttggttcataccaaaaccagggaactaaagaatcatcaagggcccctggtggttgctctcatgtgagtgt

SEQ ID NO: 967939 - DNA, 120 bp, Artificial Sequence
  ENSG00000225216_4 (sequence is synthesized)
cacagcaacttgctctcctggctggcttcccgcaccacctgcagcgccaccccgcggccgcccgtggcctgtttcacaaataagacccacttgctgcctgaaaattgtttggcagagata

SEQ ID NO: 967940 - DNA, 120 bp, Artificial Sequence
  ENSG00000225216_5 (sequence is synthesized)
tctatgcactgaccaatacagtgtagctactgtgcccttggaatgtggctggtgggacagcagaaccgaagttttggctgtaatcattttaattaattaaaataaaattgccacacatgg

SEQ ID NO: 967941 - DNA, 120 bp, Artificial Sequence
  ENSG00000225216_6 (sequence is synthesized)
accacctgcagcgccaccccgcggccgcccgtggcctggtgagagctgagcctgtgctggacctcccatcagtggcccagaaacagctctttccttcttgactccccagctgcctcacct

SEQ ID NO: 967942 - DNA, 120 bp, Artificial Sequence
  ENSG00000225216_7 (sequence is synthesized)
ttagtgcttcagaagctatgcttccctgaagtcaaatgagaccagtttagtatgcgtatatgggattccagtttgtgcctcttcaaccatccaaagccacatctgtctacataccctaca

SEQ ID NO: 967943 - DNA, 120 bp, Artificial Sequence
  ENSG00000225216_8 (sequence is synthesized)
aggtgtgacctctgcaaggccaaaatcagcacagataactaaaaggcagctgtctacagaagagaattaataatggtgtctgctgagggaggatacactgatgccaaatcagaccctcaa

SEQ ID NO: 967944 - DNA, 120 bp, Artificial Sequence
  ENSG00000225216_9 (sequence is synthesized)
cacagcaacttgctctcctggctggcttcccgcaccacctgcagcgccaccccgcggccgcccgtggcctgtttgtgcctcttcaaccatccaaagccacatctgtctacataccctaca

SEQ ID NO: 967945 - DNA, 120 bp, Artificial Sequence
  ENSG00000225216_10 (sequence is synthesized)
cacagcaacttgctctcctggctggcttcccgcaccacctgcagcgccaccccgcggccgcccgtggcctgctgcctcacctacctccctgctcccctaagctccttcctgtttaggctc

SEQ ID NO: 967946 - DNA, 120 bp, Artificial Sequence
  ENSG00000225216_11 (sequence is synthesized)
ccaccaataacccaggaaggccaatccaagactcaaaaagaagtatgtttggcatgagggcagtaaagatgttctctggacaaagactggttccccttatctgctctttctccagaaacc

SEQ ID NO: 967947 - DNA, 120 bp, Artificial Sequence
  ENSG00000225216_12 (sequence is synthesized)
agccggccccaagttttccatcaccacaggtcttttgtgttgcttcacagtagatgaaataaaatattacatgatcctggaacaagagtgggacctcaagtgatcttagggcaggccagt

SEQ ID NO: 967948 - DNA, 120 bp, Artificial Sequence
  ENSG00000225218_0 (sequence is synthesized)
ctttgggaggctgaggcaggatcacctgaggcctgaagatggacctgggagagcacgacctcgccacaacatcaccatcctgatcagaggcgagaggggacaaggtcataggtgtggaga

SEQ ID NO: 967949 - DNA, 120 bp, Artificial Sequence
  ENSG00000225218_1 (sequence is synthesized)
ttccacggaaatgagaagaaaaatattttccaaggaccaagtacccaccggccaccgtgggaaatgttttcacggccgctacactgaagtttcactgccacctagggaagttgctatcac

SEQ ID NO: 967950 - DNA, 120 bp, Artificial Sequence
  ENSG00000286628_0 (sequence is synthesized)
ttattttgaacaaaaggacacgttgccgaatgggcttcttgctggcgggattgcactatttttattgcaatttagctccgtcgtgtgatcctgagtgaaaagcacactctaaaaataaat

SEQ ID NO: 967951 - DNA, 120 bp, Artificial Sequence
  ENSG00000286628_1 (sequence is synthesized)
ggattataccctcaagttcagaggcagaaatggtcacactggatcaaagaagcaagacccgacagcatgctgtgcccaggagacacacttggaagacccagggtggtagaaggtacaaag

SEQ ID NO: 967952 - DNA, 120 bp, Artificial Sequence
  ENSG00000286628_2 (sequence is synthesized)
cacaaggattatgcattatgaccgaggaatatttatctctagaatgcaagattggttcaatattcaaaaatcagtgattttatttttaccatattaacgtaaaggagaaatctatatgat

SEQ ID NO: 967953 - DNA, 120 bp, Artificial Sequence
  ENSG00000286628_3 (sequence is synthesized)
catctaaacagatgcagaccgaaaatttcaattcgactggtacctggatctacctccgtgtcacgaagggcatggacagaaatcctgcagcttccctctaacattatgaactaggccaag

SEQ ID NO: 967954 - DNA, 120 bp, Artificial Sequence
  ENSG00000286628_4 (sequence is synthesized)
acatgcttttgatcttgacataggcaaagattccctagaaaaggtacaaaaagcgttaacccaaaattaacccaaactggtaaattggtaagttgttcttcaatcaaaattttaaaagac

SEQ ID NO: 967955 - DNA, 120 bp, Artificial Sequence
  ENSG00000286629_0 (sequence is synthesized)
aacaaaaaaacaccctgaaagtcagacctgaaccactgacactgtcccatcagattcacaaaggagtcctcagagaaaaacgaaaatattctaggtccttgacaagaaaaagcagagtcc

SEQ ID NO: 967956 - DNA, 120 bp, Artificial Sequence
  ENSG00000286629_1 (sequence is synthesized)
aactttgataccaatgttaaggtggcaaattggtttttagttttcatttgagttgggtgaatgttaactgcagaaataactagggatgagtcacatttgcagagtggccttcttgacagg

SEQ ID NO: 967957 - DNA, 120 bp, Artificial Sequence
  ENSG00000286629_2 (sequence is synthesized)
gttgttaatgtcctatgctgattttacttctactttccatgggcttgcagtaaattccttctgtgacatagaaagactcaacgagggatgtcctccttcctctctggctaagcttgtcac

SEQ ID NO: 967958 - DNA, 120 bp, Artificial Sequence
  ENSG00000286629_3 (sequence is synthesized)
cattttacttcggtttcccttcagacttcaccaaggcccctgcacattgactgtgggaagtatttatgataagcccatgaaaagtccatggaaagaaagaacctggtgacaaagagtatc

SEQ ID NO: 967959 - DNA, 120 bp, Artificial Sequence
  ENSG00000286629_4 (sequence is synthesized)
ttaaaagaaaatcctactttctggagccactgtttccacataggtcaaaagtactggcccaagcttgtgaaatccagcagagagcacttactgtagtccacgtcgtcctcaggcagtgag

SEQ ID NO: 967960 - DNA, 120 bp, Artificial Sequence
  ENSG00000286629_5 (sequence is synthesized)
catagtacctactgaggtgtggtccttatctaattataacaaacaaatcctccctaaactgtaggccaaaaagtccagactatccatgtcgatagagaaaggcaatgtgaggagaactga

SEQ ID NO: 967961 - DNA, 120 bp, Artificial Sequence
  ENSG00000286629_6 (sequence is synthesized)
aggcccagacacatgagtgaaactggctgacagcatgtggaagcagagacgacccaccctcgctatgcccttggactcatggctcacagaagtgtctccgatcaagaggtgccacacttg

SEQ ID NO: 967962 - DNA, 120 bp, Artificial Sequence
  ENSG00000286629_7 (sequence is synthesized)
aggagcatcatctacctccagacctcatgcagataatgagaggtgagattttgggactgatgctgggattggactttgggggtctttggagggagtgggagggttgtaaactactgcagc

SEQ ID NO: 967963 - DNA, 120 bp, Artificial Sequence
  ENSG00000286629_8 (sequence is synthesized)
ctgagggaggactgcagtagaacatctctaaaggtcactaccaccaattcttcccattcctgtaatgcatgttactcttcccatcaagaagccgagtctatatctctacccttgattctc

SEQ ID NO: 967964 - DNA, 120 bp, Artificial Sequence
  ENSG00000286629_9 (sequence is synthesized)
agctggccttgagacttgctttgaccaacagactgcagtggaaggaaggttctggaacttttgagcccagaccttaggaggcactgtaacacccatttttactcaagagggagcccgctg

SEQ ID NO: 967965 - DNA, 120 bp, Artificial Sequence
  ENSG00000286629_10 (sequence is synthesized)
ccatatcaagagtccaggctatctgtatggagaaaggtcacacggaactgaactgaagtctcagatacatgagtgaggccaaccaagcatgtggaataaagatgatgggttcttgttgag

SEQ ID NO: 967966 - DNA, 120 bp, Artificial Sequence
  ENSG00000286622_0 (sequence is synthesized)
agaggagacaagaaaggagggcgcaggcacagcgccgcgggcgcccgcgagcaaggccagaccccagcggcacatttcctgcccaaaacttggggccgcgacggtatgcactccgggact

SEQ ID NO: 967967 - DNA, 120 bp, Artificial Sequence
  ENSG00000286622_1 (sequence is synthesized)
caaaccccaggatcaagtactaagaaaacagccagagagagacttttccaatcacctcccacaactggagtgaagaatcaggatacagtggacaaaataagacatgaagtgtaaggatgt

SEQ ID NO: 967968 - DNA, 120 bp, Artificial Sequence
  ENSG00000286622_2 (sequence is synthesized)
tgtttcaggctgcacacgtgtcccagagaagaagaaaccaagcatcgtgatagaactctgttgagccaggcaaagtatgaatggtctgatcttcctccatcatggaaagaaacttatact

SEQ ID NO: 967969 - DNA, 120 bp, Artificial Sequence
  ENSG00000286622_3 (sequence is synthesized)
gattcatcaagaagcagggatagaagcctgtttatattgttatttattttagagactataaaagtgactaaccaaaagaaccaaaacagggatggttgggaaaaacgtggttatctttgg

SEQ ID NO: 967970 - DNA, 120 bp, Artificial Sequence
  ENSG00000286622_4 (sequence is synthesized)
gcagtgaggccaccttgactggaagactgcccaagagtgaaggtgacaaaggaaccaagatcaggagaccaagaaaagaggacaatccagatccaacaatatcgctagagtcccttggtc

SEQ ID NO: 967971 - DNA, 120 bp, Artificial Sequence
  ENSG00000286622_5 (sequence is synthesized)
aagctgaatatggaaatgagcttttccctatgtaagccaataaagtctgcttttgagttgggtttctggaacttgccattaaaaatgcccaatacatgccaactactcctcccctttccc

SEQ ID NO: 967972 - DNA, 120 bp, Artificial Sequence
  ENSG00000286622_6 (sequence is synthesized)
tcccacctcccctccagttaaggtctttgccttctcatctttataaacttgcattgccagatgccttgtgtatatatttacataagaagttcaaagttcctaggtatgcgagttaatagt

SEQ ID NO: 967973 - DNA, 120 bp, Artificial Sequence
  ENSG00000286622_7 (sequence is synthesized)
tagtggaattatttaattgataagtccaagtttatctagcagtgctgtaaggaagtccaggtgcagtcgcttatgcctgtaaccccaacaccttgggaggccgaggcaggaggatcgctt

SEQ ID NO: 967974 - DNA, 120 bp, Artificial Sequence
  ENSG00000286622_8 (sequence is synthesized)
ccagaagctcaagaccagcctgagcaatatagtggagaccccgtctttaaaattttttgtttaattagctgggcatgatggcagatgcctgcagttccaactactctgaaggctgagaca

SEQ ID NO: 967975 - DNA, 120 bp, Artificial Sequence
  ENSG00000286622_9 (sequence is synthesized)
ggaggatcacttgaggccaggaattggaggctgtagtaagctacgatttcaccactgcattctagcctggatgatggagcaagaccctgtttctaaacaagaataaaaataaacagtaat

SEQ ID NO: 967976 - DNA, 83 bp, Artificial Sequence
  ENSG00000286622_10 (sequence is synthesized)
atgctggattgcagtggtcaagcaattctcctgccttagcctcctgggtagctgggattagagacacccaccaccactcctgg

SEQ ID NO: 967977 - DNA, 120 bp, Artificial Sequence
  ENSG00000286622_11 (sequence is synthesized)
agtcaagcaattctcctgccttagcctcctgggtagctgggattagagacacccaccaccactcctggctattttttatttttttattttttattgttagtagagatggggtttcaccat

SEQ ID NO: 967978 - DNA, 85 bp, Artificial Sequence
  ENSG00000286622_12 (sequence is synthesized)
ttaaaagtaaggaggaggccttaggcaacatgacaaaatcctgtctctgcaaaaaatataaaaattagttgggcatggtggcatg

SEQ ID NO: 967979 - DNA, 120 bp, Artificial Sequence
  ENSG00000286622_13 (sequence is synthesized)
tgtaatcccagctacttggaggttgaggtgagagaatcacctgagcccagaaggccaaggctgcattgagccatgatgaagccactgtactccagcctgagcgtcggagtgagaccatgt

SEQ ID NO: 967980 - DNA, 120 bp, Artificial Sequence
  ENSG00000286622_14 (sequence is synthesized)
ctcaaaaaaaaaaaaaaaaaaaaggaggcaatgatgatttgaagcgaccagattgtctgcctcagttgagtttctgggtttggagcctctctggtagccacaacaagaatattcttggat

SEQ ID NO: 967981 - DNA, 120 bp, Artificial Sequence
  ENSG00000286622_15 (sequence is synthesized)
tgagccccaaagttctgctggttgaacaaaatgcatggctgtcttcttccatttttagaatcatagagtcctggaataccagaaatgaaagggttttagagatcacctagtgtaacaccc

SEQ ID NO: 967982 - DNA, 120 bp, Artificial Sequence
  ENSG00000286622_16 (sequence is synthesized)
ccatttttacacatgagaaactgggaccctgggagcttccatggtttgctcagaggacactctgagggtgagtggcagaaccaagactggaagctgggtttctccaggctcacagtccct

SEQ ID NO: 967983 - DNA, 120 bp, Artificial Sequence
  ENSG00000286622_17 (sequence is synthesized)
ggctccttgtgttgagtctttggggaggaggaagaaaaatgagagcaaaatgatagggtcaggactgcagaatcaaatgagaagcaccaaccgagataggaaggtttcttgaatgacaat

SEQ ID NO: 967984 - DNA, 120 bp, Artificial Sequence
  ENSG00000286622_18 (sequence is synthesized)
gactgacacctgggtctatgcagggggcctccctgctcaggactttctctgagtgtggcccaggctaaggaattctgaggcccttctgatgctaagaccttggatctgggagactaagac

SEQ ID NO: 967985 - DNA, 120 bp, Artificial Sequence
  ENSG00000286622_19 (sequence is synthesized)
atgtggactggtaaatccttcctgtgtcttctaggtgtgcagaagcgcacaaggacacctcccagctggcgtcattgaggccggcagcattttgacatgtgggtcagggttctctgggtc

SEQ ID NO: 967986 - DNA, 120 bp, Artificial Sequence
  ENSG00000286622_20 (sequence is synthesized)
atactgtcatgttttgaactcttttctgttggagaaaattttactattttttcaaacccaatcaatagtatggtatagtcttgtttaaatgtcacataatcgcactgaagaaacatctaa

SEQ ID NO: 967987 - DNA, 120 bp, Artificial Sequence
  ENSG00000286622_21 (sequence is synthesized)
aggagaaaaaaagaactacctttagcctcacaaccttcaccctataactgacttcccttttgctttttctcttctggcccttgtccatgtgcacacataattttgcttggttgtaatgag

SEQ ID NO: 967988 - DNA, 120 bp, Artificial Sequence
  ENSG00000286622_22 (sequence is synthesized)
aagacacatacaattttgtattaaagcaataaagttttaatgatgtatagatatacaaagaaaatagctataaagcaatatttatgcaggtttgtaggggaaaaatccattttaaaggag

SEQ ID NO: 967989 - DNA, 120 bp, Artificial Sequence
  ENSG00000286622_23 (sequence is synthesized)
acagtatggaataatagaacatcttagagtagtccatttgggatagtgcttataagactttaataacatttcttctctttcctttttatattgttccttaaccaagtcatgatgaaataa

SEQ ID NO: 967990 - DNA, 120 bp, Artificial Sequence
  ENSG00000286623_0 (sequence is synthesized)
gaggagaggcctctagactggccgtccgcttcctctacaggacctccgggccctgcctcctgaaacagctctgatgtgggaggaggggccgacgtgactctcagctgcggagaaggctcc

SEQ ID NO: 967991 - DNA, 120 bp, Artificial Sequence
  ENSG00000286623_1 (sequence is synthesized)
caagattccatctgctcctgggagcctcgacccatccacgaccttcctaaagggatccggtccacgcccccagggtcctggggaaatgcactcgggcagtgagatgtcggaaaggggaga

SEQ ID NO: 967992 - DNA, 120 bp, Artificial Sequence
  ENSG00000286623_2 (sequence is synthesized)
gcaggagcaatggcagaggagtccggagaggctcctgaggagtgtacttcgccttggaagttctccaggccctccgaggtggacgcgtgcagcacgggcactgaaccctgagcccaggag

SEQ ID NO: 967993 - DNA, 120 bp, Artificial Sequence
  ENSG00000286623_3 (sequence is synthesized)
tccgtcgtgcatgccgaaggctcctcgtcctcaccccatgtggggtcctcagctactgcagattctccctcgtcccgggccaggaagcgccactcggtgatctgcagcatggcctcccgg

SEQ ID NO: 967994 - DNA, 120 bp, Artificial Sequence
  ENSG00000286623_4 (sequence is synthesized)
gcctggctgatggtgaatggaatgcactgcggaggcgagagaggatctcaggtcggcagggaggggcgggagagggagacgagtctgaaggacccggatcccggcccacctgctgagtca

SEQ ID NO: 967995 - DNA, 120 bp, Artificial Sequence
  ENSG00000286623_5 (sequence is synthesized)
gtcggccaagatgtcccctacgacgtcctcgccctcctcgagggctgtaagcgccatccactcggcctcactgagccgcccaggcacaatatccacctgcggcactggcacagtgggcgg

SEQ ID NO: 967996 - DNA, 120 bp, Artificial Sequence
  ENSG00000286623_6 (sequence is synthesized)
ccgcactttttccgccttggaccgggtcaccccgcggtctcggacctgcctctcctgcctctgtgagaacaaaacatggcaatcagagcaggaaaccaagaagtggaacggaagagtagc

SEQ ID NO: 967997 - DNA, 120 bp, Artificial Sequence
  ENSG00000286623_7 (sequence is synthesized)
tataggctaggaggaagctttctcaagttgtctagtgggaaggaaaagggccaattgacgaagagcctactatgtgacagatacttagtagatgtttgacctaataattttcattaacag

SEQ ID NO: 967998 - DNA, 120 bp, Artificial Sequence
  ENSG00000286623_8 (sequence is synthesized)
ttagtagatgtttgacctaataattttcattaacagcccactaaccacaattgacagataaagaaactgaagtggggaggctgaggaaggagagtcacttgaacccgggagatggaggtt

SEQ ID NO: 967999 - DNA, 85 bp, Artificial Sequence
  ENSG00000286623_9 (sequence is synthesized)
ccgaagtctgacagaagttaaccagccttgcttaggagcacacagtgagcaagcccagacaatgtgaaggtttaacttcatggcc

SEQ ID NO: 968000 - DNA, 120 bp, Artificial Sequence
  ENSG00000286623_10 (sequence is synthesized)
tgagcaagcccagacaatgtgaaggtttaacttcatggcccttataccagagcaaagtgttcaaaattcttgagtgttcaaattacttgagaaagacaattcagtaaacagtcctggaat

SEQ ID NO: 968001 - DNA, 120 bp, Artificial Sequence
  ENSG00000286621_0 (sequence is synthesized)
ttacccctgtgttattgtctctaatatccagggtcaggggaggggggggagaggataacattccctcaaatttagcaggtgctttgaggccccttgcttgtggtgttgttttaaatatcc

SEQ ID NO: 968002 - DNA, 120 bp, Artificial Sequence
  ENSG00000286621_1 (sequence is synthesized)
gttgttttaaatatccagcggggaagataatagtactatttttgatagtctgattcatccgctccaactttccggaactcttaggccgggaggtggcatgcagtttccgtgtgatcccca

SEQ ID NO: 968003 - DNA, 120 bp, Artificial Sequence
  ENSG00000286621_2 (sequence is synthesized)
ctgtaccaaggcagccaaagacgcaggcccgttatctgagccaatccataaggccagtcaaaatctcggaatcagatctcgaagaagcacaggggttacttcacgagatttctcagttca

SEQ ID NO: 968004 - DNA, 120 bp, Artificial Sequence
  ENSG00000286621_3 (sequence is synthesized)
tgttggataggcctccacccacccagagtaggtatgtgcaagaactagtaaatacgtgttatctccacactttgtcatctctgtgaagtctacctggagattttcaaagggggctgctcc

SEQ ID NO: 968005 - DNA, 120 bp, Artificial Sequence
  ENSG00000286621_4 (sequence is synthesized)
gtaagcttgtatgccgggtggaacggctggaccttgcctcgcattatgctgttggcaggtaacacactgctgcctcaccgttttggcgagggctgacaaatgcgagatgtacaaatacca

SEQ ID NO: 968006 - DNA, 120 bp, Artificial Sequence
  ENSG00000286621_5 (sequence is synthesized)
gcctaacaacttttccagtgactcctgacctacatgcgtggtttcatgcacagccagtataactgcacctcctagcaagtgtggcacggctactctcccatctggtaaccgaatccatcc

SEQ ID NO: 968007 - DNA, 120 bp, Artificial Sequence
  ENSG00000286621_6 (sequence is synthesized)
agtccttttcttctttagaagaagtaagtccaagatcaggtgcttgagggagcactgatgcctggaagggggcagatgctgcttttcgagcctctgagtcagtgcgggaattccccaaac

SEQ ID NO: 968008 - DNA, 60 bp, Artificial Sequence
  ENSG00000286621_7 (sequence is synthesized)
gtgtcttctgcaatgcacaactgccaccttgtggggtttccatactgcttctaataattg

SEQ ID NO: 968009 - DNA, 61 bp, Artificial Sequence
  ENSG00000286621_8 (sequence is synthesized)
agcgatctggcttcaacaacagtgtccagggttaccacggcacaccctgcacctctctctc

SEQ ID NO: 968010 - DNA, 86 bp, Artificial Sequence
  ENSG00000286621_9 (sequence is synthesized)
tagttccaagtctactgatgcccaaggctggtcctggaagtcaggtctgctagagtcaactgagtccaacagttctacacaatcag

SEQ ID NO: 968011 - DNA, 120 bp, Artificial Sequence
  ENSG00000286621_10 (sequence is synthesized)
tgcccaaggctggtcctggaagtcaggtctgctagagtcaactgagtccaacagttctacacaatcaggctcgacagggctctctgataccaggagcaaggtggcggggtgtagggtgtt

SEQ ID NO: 968012 - DNA, 79 bp, Artificial Sequence
  ENSG00000286621_11 (sequence is synthesized)
ggttatacggggattttcacagagcaaaatttggtacttggtgagtctggcattcgttagccaaggcctttatgctcag

SEQ ID NO: 968013 - DNA, 120 bp, Artificial Sequence
  ENSG00000286626_0 (sequence is synthesized)
ggcggggcatcgccgcgccggccgccaacggccactgcaacggtccctaccggggagggccggcttttgccggcttccggagaagggaggaaagagagaggtttacctaacactgtaaag

SEQ ID NO: 968014 - DNA, 120 bp, Artificial Sequence
  ENSG00000286626_1 (sequence is synthesized)
agaacgttcaatgaaatacaaagaaaaagatgatttttttgctccaagagaattattccagccttggggtggagtgggtgtggacagtgagcagaaaaacaagaaaccaagttctgggag

SEQ ID NO: 968015 - DNA, 120 bp, Artificial Sequence
  ENSG00000286626_2 (sequence is synthesized)
gaaataaaatgaatataatcagtggaaaattcagcaacgcaatattgtgtgacaacagtaaatgaccaatttataatttaaattctatgaaaaagagatttagaagagagttctaccaaa

SEQ ID NO: 968016 - DNA, 120 bp, Artificial Sequence
  ENSG00000286626_3 (sequence is synthesized)
cccactgttccctagggaataaaatgagtaacgctgactggcaacagtgcatcctgagggagcctggagaaacaacagcagcctccgacctcaagatatcctggttagctgcaaagtctg

SEQ ID NO: 968017 - DNA, 120 bp, Artificial Sequence
  ENSG00000286626_4 (sequence is synthesized)
atggagcttacaatctaagtaaggggaagacaagtaaatacatgtcagatagtgaaatggtagagaaaagaaaaaacggtggtcagggaaagccttactgacatttgagctagtactgaa

SEQ ID NO: 968018 - DNA, 120 bp, Artificial Sequence
  ENSG00000286626_5 (sequence is synthesized)
ggaagtgaggaagaaggctaagcagctaccttggaggaggaattttccaggtagaggaaacaccaagtactaagatctgagacggagtgtgctttttgggttcaaggaacagcacggaaa

SEQ ID NO: 968019 - DNA, 120 bp, Artificial Sequence
  ENSG00000286626_6 (sequence is synthesized)
ccatagtggcaagagcagagagtaggagatgaggtcaaacatattaaagggggctggtcttgtagggcctgaaagaccacggtaaggactttggcttttgctgcattagatggggagtca

SEQ ID NO: 968020 - DNA, 120 bp, Artificial Sequence
  ENSG00000286626_7 (sequence is synthesized)
tagtttcaaaatttagtcacctaaaccatccttagcactacgctgagcaattatgccaggcctagaggctagaaacggagatgataatcctttagctccttgcaactcaaagtttattca

SEQ ID NO: 968021 - DNA, 120 bp, Artificial Sequence
  ENSG00000286626_8 (sequence is synthesized)
gcccaacctctctcactaccactatcactactatcttggactgcatagcagacttaactgaatctacattttaacaagatcttcaggagatttgtgtgtacattaaagtttcagaaatca

SEQ ID NO: 968022 - DNA, 81 bp, Artificial Sequence
  ENSG00000286627_0 (sequence is synthesized)
tcttggctcactgcaacctccgcctccgcctccgccatgagaggttcaagtgactctcatgcctcgacctggctaactttt

SEQ ID NO: 968023 - DNA, 88 bp, Artificial Sequence
  ENSG00000286627_1 (sequence is synthesized)
agcctcactcctggccttttaagttttctttaggtgaggttaattatgatgtttatgtcaaatattcagaagcaaaaacttgatcacc

SEQ ID NO: 968024 - DNA, 120 bp, Artificial Sequence
  ENSG00000286627_2 (sequence is synthesized)
atgtttatgtcaaatattcagaagcaaaaacttgatcacccattttcttccatcagccagcaggagttcaggttcttgcttcttcctgtgtatccatccaccctttccaccaattatatc

SEQ ID NO: 968025 - DNA, 120 bp, Artificial Sequence
  ENSG00000286627_3 (sequence is synthesized)
tttttctagtaacacagcacttcaggaccaccttaggttcattccaaaatttcatttcagtgtttacacaggaagaaggatcctagttaaaagactacacttcttagaagacattttagg

SEQ ID NO: 968026 - DNA, 120 bp, Artificial Sequence
  ENSG00000286627_4 (sequence is synthesized)
tactattttttgttaattgatatttcgaggtctcatacatttcaggagcttttccaactaactttagtattcactccaagattaattcagataaatgcaatttttcctacctgtaggcac

SEQ ID NO: 968027 - DNA, 120 bp, Artificial Sequence
  ENSG00000286627_5 (sequence is synthesized)
ctaaagagttgttggggtttgtgtgtgtgggatggggagtgcatttttcattataattctaatttaaaaggtttaaaaatgataaatgatcaattctacacttatctttaaattcattag

SEQ ID NO: 968028 - DNA, 120 bp, Artificial Sequence
  ENSG00000286627_6 (sequence is synthesized)
taataatacactttcaaagttcaggataaattatttctttcttcaacacttcagtatttaaccattcttgtcacagatcccttggaaaggttctgctctaaattaatttaaaaactatca

SEQ ID NO: 968029 - DNA, 120 bp, Artificial Sequence
  ENSG00000286627_7 (sequence is synthesized)
tactaagtatagtaagccctatcaaagtaagcaaggttgtcaatcagagttgtcaatctggttgtcaatcagcctttcagggactcaagtccccaagtgttatccagagttagcaacatt

SEQ ID NO: 968030 - DNA, 120 bp, Artificial Sequence
  ENSG00000286627_8 (sequence is synthesized)
ctctttgttggatttgaagctatgtttcatatttcaaattgagtataaacagctttaaatgagaagaagacttcacttaatttgaaaaaggtagaggtttgagaagcatatttagttttt

SEQ ID NO: 968031 - DNA, 120 bp, Artificial Sequence
  ENSG00000286627_9 (sequence is synthesized)
gtcatctttaaaataaaatgaaatagaaaacctaactagagaaatattatatttatttaaaaatatgtgtcaatcaactgtttctgttatcagtaaggcttctagtcaacagtaggccac

SEQ ID NO: 968032 - DNA, 120 bp, Artificial Sequence
  ENSG00000286627_10 (sequence is synthesized)
tgtagcatgtggagcaattttgtttcattttgtctcattttgtcatacacctttgtgttagggtagaggttggggttggtgatggagaatctgttccctgatatttgtagtcacatagac

SEQ ID NO: 968033 - DNA, 120 bp, Artificial Sequence
  ENSG00000286627_11 (sequence is synthesized)
atgagatgccctttcttgctatgactgagtcaccagtaagttcactaagccacatgcacaagtgtggagttattgaaaggaggctactcctgaaatttggtgagcttatcagaataagtt

SEQ ID NO: 968034 - DNA, 120 bp, Artificial Sequence
  ENSG00000286627_12 (sequence is synthesized)
ctggcgcagccaaacaatagtcccaaacatgaacagtgaggggcagagatgaacaaccattttctctgaggcaccaagcaaatactagatcatgaaaaaaattctgtaattgacaatctc

SEQ ID NO: 968035 - DNA, 120 bp, Artificial Sequence
  ENSG00000286627_13 (sequence is synthesized)
ctctggattcacagcaatgccttattgaaatgcaacttaaagaatgagctattacaaaggataatcccactggtttttcatcacaatttttggcactaaatatggacatttcagtgtatt

SEQ ID NO: 968036 - DNA, 120 bp, Artificial Sequence
  ENSG00000286627_14 (sequence is synthesized)
tggtgtgtgtgttcacatatgtgagatacgcacaagggtataaatgagtgtgtatatatccttcttaatttattcttgttaatttagacccatctacaaattttcagacagaacacaatt

SEQ ID NO: 968037 - DNA, 120 bp, Artificial Sequence
  ENSG00000286627_15 (sequence is synthesized)
tcctttgtatttagatctattttgtacactattccttagtctaatatatacttttacatttcatttagcagtaaacaactgaagcattatgtatccataaaaggcaattatcctaaccgt

SEQ ID NO: 968038 - DNA, 120 bp, Artificial Sequence
  ENSG00000286627_16 (sequence is synthesized)
tctaattatcttataacacttgcacttttttccttcagtgtgtgagtatacaaatgtttgctttgtttaagaaagggaaaaaatggagacagaaaggatgtactttttaacaattcacta

SEQ ID NO: 968039 - DNA, 120 bp, Artificial Sequence
  ENSG00000286627_17 (sequence is synthesized)
atccaggaaaatgtcacttcttcaaaaacaaacaaaaaaacctttgaaataacaaaacaggaaaaataagattttcagtcaaaagattacttatcatgaaaaaccaaataatttgcttaa

SEQ ID NO: 968040 - DNA, 120 bp, Artificial Sequence
  ENSG00000286627_18 (sequence is synthesized)
aaagggctttctaaattgctttaacttttgcatgttattttttaaagtttaattgcctaaattcctggtgataaatttttttcaaaaaattgaccgaatattaattttttgtattctaaa

SEQ ID NO: 968041 - DNA, 120 bp, Artificial Sequence
  ENSG00000286627_19 (sequence is synthesized)
ggtcatgaaaaaagttacctaatttcctgaaatcctaattaaatgaagcaaaccaaaataagatctcattattcttatactgcctctgttttaaaaaagagagaaaaaactggaattcat

SEQ ID NO: 968042 - DNA, 120 bp, Artificial Sequence
  ENSG00000286627_20 (sequence is synthesized)
gctaaaaaccttaggtttattcattttaacttgaatttgttgtttatgatgaaatcttgagtttcgggatgatatgtttagatataattttcactaatggatgtaaaagagctctgtacc

SEQ ID NO: 968043 - DNA, 120 bp, Artificial Sequence
  ENSG00000286627_21 (sequence is synthesized)
taaaacatgtattcatacttttttcttaaaaggtctaaattcttaatgctaagaagtatattatctaaaagtggagttttataactcctacagtttgatatttttgaagctacagaaaaa

SEQ ID NO: 968044 - DNA, 120 bp, Artificial Sequence
  ENSG00000286627_22 (sequence is synthesized)
ctttgacaagctcaaatagatttttctccccaaaatgagtacatggtcatttcaaactgaccctgttatccttgaactaatggcgttcctccttcacagtggccaacagaggggatggta

SEQ ID NO: 968045 - DNA, 120 bp, Artificial Sequence
  ENSG00000286627_23 (sequence is synthesized)
tgtaccccaggaggctgtgcagctgacccttgaacaacacagatttgaactgtacgagtccacttctatgtggattttcctccatctctggcacctgagacagccaaaccaacttcccac

SEQ ID NO: 968046 - DNA, 120 bp, Artificial Sequence
  ENSG00000286627_24 (sequence is synthesized)
tcactcctgggcccactcaacctgaagacaaccaggatgaagatccacctccacttgatgaatagcatgattgtaattagaaggctgaagaaagccagaggaaggtcctggcagatgcca

SEQ ID NO: 968047 - DNA, 120 bp, Artificial Sequence
  ENSG00000286627_25 (sequence is synthesized)
agttaccattctggagaaaatcttcatggcctgtcgatctgtcacagaaatgaaaatcctttagagcctctggaaacaaaaaatggcatttctaaagtaactcttcagtttaaaataaaa

SEQ ID NO: 968048 - DNA, 120 bp, Artificial Sequence
  ENSG00000235527_0 (sequence is synthesized)
acgacagtgcctagcagaggagcttcactgccggtgagggattacctcaggttaggctttaatgtttcgttgccgtctagagacgttctagcaatgtgacatctgtgtaccatatctgga

SEQ ID NO: 968049 - DNA, 120 bp, Artificial Sequence
  ENSG00000235527_1 (sequence is synthesized)
agtctccctgtacgtcaagagccccttaggggagtctcccattgccgccgtgggaacctgtgtttacattacgaggagagagaatagctgtactctgaactcaaacgctcaaaacatgca

SEQ ID NO: 968050 - DNA, 120 bp, Artificial Sequence
  ENSG00000235527_2 (sequence is synthesized)
gtgagcgaatgctagcataattttcttgcctctaccagaaggaaggctgggtatttaggaaacagaacgcgttgggcacaacattctgagaaaatggacacagaaaattaggttatccta

SEQ ID NO: 968051 - DNA, 120 bp, Artificial Sequence
  ENSG00000235527_3 (sequence is synthesized)
atagaaaagcagttgcatctcccaaagtcaagagattctgtaggacttccgatgtatctcctgctgtgtaaaatattcaggttcctgaagtgggggacatttttagggcaactgtaattt

SEQ ID NO: 968052 - DNA, 120 bp, Artificial Sequence
  ENSG00000235527_4 (sequence is synthesized)
cttcattttttccatcccacaagtgctggaggcagcagtgatctgagctctagaaagtgactgtccgtcaccatcgaaacttccttctactacttaaagtcctcacattgggctgacctg

SEQ ID NO: 968053 - DNA, 120 bp, Artificial Sequence
  ENSG00000235527_5 (sequence is synthesized)
ggaaacatgaagataaaaagagtgggtaaacatgcctgcttgatgagccagaaaaaaaggcagaaacctgtggtctgggtagaacagatcctgctcagaatggaccttacagtctaatga

SEQ ID NO: 968054 - DNA, 120 bp, Artificial Sequence
  ENSG00000235527_6 (sequence is synthesized)
ggaaaaaacgtgtgcagacatatataagataagtgagagagtcggagaagaacatcagaagtgatatttgagcatagtaaggtcaaagaagtttcaaagtttagtcatttgtccattcag

SEQ ID NO: 968055 - DNA, 89 bp, Artificial Sequence
  ENSG00000235527_7 (sequence is synthesized)
ggtcaaagaagtttcaaagtttagtcatttgtccattcagtaactatttatagagcatcttctgtgtgctaggcactatataagaaatt

SEQ ID NO: 968056 - DNA, 88 bp, Artificial Sequence
  ENSG00000235527_8 (sequence is synthesized)
attagccaacctggaggcttaagcagaagaaccgctggaacccaggagaagaaggctaccatgagccgagattgcaccattgcactcc

SEQ ID NO: 968057 - DNA, 120 bp, Artificial Sequence
  ENSG00000235527_9 (sequence is synthesized)
aagaaagaaagaaataaaaaaaaaagaaattaaggatacacagaagaaaaggcatggtctgtgccctgaaggagcttacagttaagcagagaagttgcacgatttggaagtagtaaggta

SEQ ID NO: 968058 - DNA, 120 bp, Artificial Sequence
  ENSG00000235527_10 (sequence is synthesized)
agcagagaagttgcacgatttggaagtagtaaggtaaattgagtcagattttgaaaggcaatgtagagctgttagaagtttattcgcacaggtagccaggcacagtggctcatgcctgta

SEQ ID NO: 968059 - DNA, 61 bp, Artificial Sequence
  ENSG00000235527_11 (sequence is synthesized)
taggctgggcaaacagagccagactctgtctcaaaaaagaagtttattcagacaggaaaga

SEQ ID NO: 968060 - DNA, 120 bp, Artificial Sequence
  ENSG00000235527_12 (sequence is synthesized)
gactctgtctcaaaaaagaagtttattcagacaggaaagaaggcgagaaggggcagatatgtgaaatacatcctcctaaaccaagtcagagcaactggagagggaggtggagcagttagc

SEQ ID NO: 968061 - DNA, 120 bp, Artificial Sequence
  ENSG00000235527_13 (sequence is synthesized)
aatcggaagcattcaagtttcattcagggtataaaccaggaaaagttgttctggcccctcatctggtttcatgaaggacaatatctagcatgagagtgacaggggttagaataatggaca

SEQ ID NO: 968062 - DNA, 120 bp, Artificial Sequence
  ENSG00000235527_14 (sequence is synthesized)
ttttggggactgggtcctagcagaaatgatggaataatggaacaggagtttggatgaatgggcatattatgggattaaagaagatttgaatacaagctttcctaataaatgaaaggggag

SEQ ID NO: 968063 - DNA, 120 bp, Artificial Sequence
  ENSG00000235527_15 (sequence is synthesized)
gtgaaactagagcatgctgatggctgcacagcattgtgaatgcactaaatgcactaactgtccactttaaaatgtttagtaatatgtcgattttacctaaataaaaaaaaggaagcaaca

SEQ ID NO: 968064 - DNA, 120 bp, Artificial Sequence
  ENSG00000235527_16 (sequence is synthesized)
agctagtgtgacatcaccacagtttagtgtgacacccccagagcttgggcagtgtacgggacgacagtgcctagcagaggagcttcactgccgaaacttccttctactacttaaagtcct

SEQ ID NO: 968065 - DNA, 120 bp, Artificial Sequence
  ENSG00000235527_17 (sequence is synthesized)
gagtaggtgggcctccgtagggagccagcgtggatcgagtgcggggcctggacttcccgccccctccgcactgcagactctgcggtgatttaaaggtgcctggcggtggtacgggatcca

SEQ ID NO: 968066 - DNA, 120 bp, Artificial Sequence
  ENSG00000235527_18 (sequence is synthesized)
ttcctcttttcaaatatctctcagaattcaccctttcgggaacctttgctgattgactcctattttatttgaattctgcatcatcatctgattacttaaattaacctgtaccttctttat

SEQ ID NO: 968067 - DNA, 120 bp, Artificial Sequence
  ENSG00000235527_19 (sequence is synthesized)
ttctattttcattgctcttaggtcctcagtctttctcactatacggagagcttcttaaagtctgtattttctcctctttagtatcattcactcattcatccagcaaactgcttgtgtgcc

SEQ ID NO: 968068 - DNA, 120 bp, Artificial Sequence
  ENSG00000235527_20 (sequence is synthesized)
ctcaaatctcactcattaacatctttgatttccttggatccccataacacacacagaaaactatgatttgtgtaaaatgcgctgaagtaccttttaagggaagtcatttggctttctctc

SEQ ID NO: 968069 - DNA, 120 bp, Artificial Sequence
  ENSG00000235527_21 (sequence is synthesized)
tggcttaacaacacggggagcagttccattttatctggaacagggaagtttatttccctagagaactagggttaccaaaaatgttcgatcccacaaggcagttttgtttgcatattttca

SEQ ID NO: 968070 - DNA, 120 bp, Artificial Sequence
  ENSG00000286625_0 (sequence is synthesized)
atttctgtcctgtgaatctcgtctagaattctcggactccttcctcttgatattacattttttccaaattgaagatttctgacaaccctgtattgagcaagtctatttgcatcattttta

SEQ ID NO: 968071 - DNA, 120 bp, Artificial Sequence
  ENSG00000286625_1 (sequence is synthesized)
caatagcatgtgctcactttgtgttttctgtgtcacattttggtaattttaataatatttcaaatgttttcattattgctatatttgttatggtgatctgtgatcagtagtctttgatgt

SEQ ID NO: 968072 - DNA, 120 bp, Artificial Sequence
  ENSG00000286625_2 (sequence is synthesized)
tactgttgtaattattttgtggtcccataactacagccatataagacaccaaacataaccaacacagagctatgatggagttgtacaaggacatttatcttcttttcctttttttttttt

SEQ ID NO: 968073 - DNA, 69 bp, Artificial Sequence
  ENSG00000286625_3 (sequence is synthesized)
tctcgctctgtcatgagttcaagcgattattctgcctcagactcccaagtagctgagattacaggtgcc

SEQ ID NO: 968074 - DNA, 120 bp, Artificial Sequence
  ENSG00000286625_4 (sequence is synthesized)
aaactgctgggattacaggcatgagcccagctgattaatcttattttcatgcctgctaacacaacgtccattgtgaagcccatgaatcaaggagtaattttgttttaaattcttattatt

SEQ ID NO: 968075 - DNA, 120 bp, Artificial Sequence
  ENSG00000286625_5 (sequence is synthesized)
tatttaataaatacattttccaaggctatggctaccagagaatactgattcttctgaaggatctgggccatgtcctttgaaatattttgggaaagggttcaacattcttgatgtcagtaa

SEQ ID NO: 968076 - DNA, 120 bp, Artificial Sequence
  ENSG00000286625_6 (sequence is synthesized)
ggatatttgtgactcattggacaaggtcaaattatcaacactaacagtagttttgaagaagttgtttccagtcctcatggattcctttgaggtattcaagacttccgtgtaggaagcagc

SEQ ID NO: 968077 - DNA, 120 bp, Artificial Sequence
  ENSG00000286625_7 (sequence is synthesized)
ttgataggtaagccaagaaagtgtttttgagatgatgtttgcttctgatgaagatgctgtgtctctctgaccttcagcaaccaccactctgatcattcagcagctgtcacactgaggaaa

SEQ ID NO: 968078 - DNA, 120 bp, Artificial Sequence
  ENSG00000286625_8 (sequence is synthesized)
gactctccaccaacaaaaagattacaacttgctgaagactcaaatgattgctgtcattttctagtagtaaagtatttttaattaaggtatgtgcattggttgttttagacgtaatattat

SEQ ID NO: 968079 - DNA, 80 bp, Artificial Sequence
  ENSG00000286625_9 (sequence is synthesized)
tgttttagacgtaatattattgcacacttaataaaatacaatgcaatgtaaatggctttttttgttttgttttttgtttt

SEQ ID NO: 968080 - DNA, 84 bp, Artificial Sequence
  ENSG00000286625_10 (sequence is synthesized)
ggtgtttggtttcttgtccttgcgatagtttgctcataatgattgtttccagcttcatctacgtccctacaaaggacatgaact

SEQ ID NO: 968081 - DNA, 120 bp, Artificial Sequence
  ENSG00000286625_11 (sequence is synthesized)
acacgtgcacacatatgtaaacagctttttatgtgtactgggaaaccaaaaaaaaacttgtgtgccttgctgtattgtcattttcattttattgtggtggtttggaatcgaaccctcaat

SEQ ID NO: 968082 - DNA, 120 bp, Artificial Sequence
  ENSG00000286625_12 (sequence is synthesized)
atatacgaataatgcctgcaactgtattctgactttatttttttcacctttatattcctgtataatatccttgatattcccatataatgtcagtaataataataattatgcataataaat

SEQ ID NO: 968083 - DNA, 120 bp, Artificial Sequence
  ENSG00000286625_13 (sequence is synthesized)
gtccactgggaatccagcacaatggtgactgagccctttgttctctctgtttccaagagtcacatttctgtcctgtgaatctcgtctagaattctcggactccttcctcttgcaaaaaca

SEQ ID NO: 968084 - DNA, 120 bp, Artificial Sequence
  ENSG00000286625_14 (sequence is synthesized)
ccgcttagatcatctcattcaagaaagcctctgtccacctgaaaagtgcatattggctcaaagtctccagtgctcagaactttgagaatcttcctatgccttccagcagcatccatgcag

SEQ ID NO: 968085 - DNA, 120 bp, Artificial Sequence
  ENSG00000286625_15 (sequence is synthesized)
gtatcaaggaggcccccagccaatggctgaccaagatgatattaaaaggatttgcctatttccactccaaacaggagctgctttaaggaacaatatttgctctgaagactgtccattgga

SEQ ID NO: 968086 - DNA, 120 bp, Artificial Sequence
  ENSG00000286625_16 (sequence is synthesized)
ctggctcagaatttttggggccagggtcatggtctcattgttggcgttgcccaattctacctatttttctttcatttttttcacaagtgttactacccaatataattttgcaattgtgtt

SEQ ID NO: 968087 - DNA, 120 bp, Artificial Sequence
  ENSG00000286625_17 (sequence is synthesized)
tctatagtgtgatgaggtgatatctacatacattgtagtgatgtgtaatgattaccacaatcaaattgaccaactcatctgtcatcaaacgtagatatcttgcctgtgtgtgtgcattta

SEQ ID NO: 968088 - DNA, 120 bp, Artificial Sequence
  ENSG00000286625_18 (sequence is synthesized)
tgtgtgtatggtgaggatacttaagatcttcactgttagcaaatttcaagtaaagaatgcagtattattaactaagtaaccacacactacattagatctcctgtacttattcatcttata

SEQ ID NO: 968089 - DNA, 120 bp, Artificial Sequence
  ENSG00000286625_19 (sequence is synthesized)
actcaaagtttgtaacctttgatcatctccccatttcttccaaacccgaactcctggtaaccatcaatccactctctgattctgtgatttagactattaaactccatatattagagacat

SEQ ID NO: 968090 - DNA, 120 bp, Artificial Sequence
  ENSG00000286625_20 (sequence is synthesized)
aatacagtatttgtctttctgtggctggcttatttcacttagcgtaatgttctttacattcatacaggcaggattttcttttttttttttttaatgggtgaagaatgtttcatttcacac

SEQ ID NO: 968091 - DNA, 120 bp, Artificial Sequence
  ENSG00000286625_21 (sequence is synthesized)
acacacacacaaacacacacacaatgacatatcatatatatatagtgtgtttgcacataaatatacacaattttatttatatattatatatattttttatccattcatctgttgcggaca

SEQ ID NO: 968092 - DNA, 120 bp, Artificial Sequence
  ENSG00000250751_0 (sequence is synthesized)
cgggcggccaggcttctgctgggtcctaatgccaaattccttactggagcttcagcgccgtctagctgctgcccagcgtcagcgactttacctgctcattacctaggcacatcactaggc

SEQ ID NO: 968093 - DNA, 120 bp, Artificial Sequence
  ENSG00000250751_1 (sequence is synthesized)
ttccaagggggagagcggcacagctggtgtttgtatgctgctgtttgcgtagccatagcctgtgaggccccagagagcaggactcccagttcccctcgcccaggccaagtgaggcacgga

SEQ ID NO: 968094 - DNA, 120 bp, Artificial Sequence
  ENSG00000250751_2 (sequence is synthesized)
ccttccaggctcctgtgcaggcaggggctgagtcgcaagacaggggaccctgaggggaagctgggaggggacgcctgaggaagaggcaaatgacaaaatcacacacagccccaccaggcc

SEQ ID NO: 968095 - DNA, 120 bp, Artificial Sequence
  ENSG00000250751_3 (sequence is synthesized)
tagacagtctttcattctgaccaggggtaatggtcatgtccacacagcagaactgagtgaatgaagggtgatttggggacagttacagattgcaataggtccactcagggcagttttctc

SEQ ID NO: 968096 - DNA, 120 bp, Artificial Sequence
  ENSG00000268573_0 (sequence is synthesized)
agcagtgccttagccagggacctgcttggccagcgacagatcctttgctgctctgtctgccggttcttgagatggagtctctcactctgttgcccaggctggagtgttgttgatggcaac

SEQ ID NO: 968097 - DNA, 120 bp, Artificial Sequence
  ENSG00000268573_1 (sequence is synthesized)
agtgggccatctggaccatctggagtggccactgccaagatgctggctgcagccaggaggctctgcccatgctgtgagcttcacagagccagagggagcggggacaagcaggagcccagc

SEQ ID NO: 968098 - DNA, 120 bp, Artificial Sequence
  ENSG00000268573_2 (sequence is synthesized)
tccttccaagttggcgggtgggagctccccaggcatagctgcagctgcccaagtcatggctgctggctgagcctccctgtgttcttggagaccaggagcaggcaggagccctgctctcct

SEQ ID NO: 968099 - DNA, 120 bp, Artificial Sequence
  ENSG00000268573_3 (sequence is synthesized)
gggtgcaactgcagccacccaagtccttgctacagaccgtgttcttggaggctgggagcaggcaggagtgccaaagcaggcaggagtgctggagcaggcatgagcccttcctgcatcccc

SEQ ID NO: 968100 - DNA, 120 bp, Artificial Sequence
  ENSG00000268573_4 (sequence is synthesized)
cacctcctttgtgcagctgtagccacccaggttgtggctgcggaccaacctggatatctctgcactctaggggcctgggaaggcacccccacctcagcaggcttggaggtatctgcttct

SEQ ID NO: 968101 - DNA, 120 bp, Artificial Sequence
  ENSG00000268573_5 (sequence is synthesized)
gctgcctggcctctccctgctcctggtgactgctctgatctaggagcaaggttggggccgagccagggtgctgttgcagcccagccagttgtgcgcatacttgaggcagtgctgacaggc

SEQ ID NO: 968102 - DNA, 120 bp, Artificial Sequence
  ENSG00000268573_6 (sequence is synthesized)
cattcctctgctgcttcagccccctccagactttgggtgctgacaaacatagaagggaggctgagggaaggctgaaggcagttcagcatttgcctgcaggtgcttgtccccacgaacagc

SEQ ID NO: 968103 - DNA, 120 bp, Artificial Sequence
  ENSG00000268573_7 (sequence is synthesized)
ctgggcaccatagaaagcagtaggaggcgacatgctctgaggcagaaaggggcgggtccccagaaggcctgaagcctaatggccaggccaccagtccccctgactggagggggaactggt

SEQ ID NO: 968104 - DNA, 120 bp, Artificial Sequence
  ENSG00000268573_8 (sequence is synthesized)
ggtgctttttcttggacctgcccatggccaccaatggaccaatcagcatgcacttcttcctctctgaggcccataaaattccctggactcagccagactgggggagaagacctgccagca

SEQ ID NO: 968105 - DNA, 120 bp, Artificial Sequence
  ENSG00000268573_9 (sequence is synthesized)
gagaggagctacctactccagggcctcttttctgctgagagctgcagagacaacaggaggaccaacctgcagagaggagctacccacttcagggcctcctctttgctgacagctgcagcg

SEQ ID NO: 968106 - DNA, 120 bp, Artificial Sequence
  ENSG00000268573_10 (sequence is synthesized)
atgatgggacaagctgcctgcagagaggagctacccactccagggtctcctctgagctattctgttgctcagtaaagctcctccttctcagtaaagctcctcttcactttgctcagcctc

SEQ ID NO: 968107 - DNA, 120 bp, Artificial Sequence
  ENSG00000268573_11 (sequence is synthesized)
cacttgtctacatacctcattctatctggatgcaggacaagaacttgagacctgctgaatggtggggctgaaagagctgtaacacaaacagagctgaaacatgccccttgctcaccacat

SEQ ID NO: 968108 - DNA, 120 bp, Artificial Sequence
  ENSG00000268573_12 (sequence is synthesized)
tgcaggcaaagaggagagaagagctgtggcccttcaggaagcccagaccaggaagctccctgagccaggattgtgactcccgttggggccctgcatttcctggagtctccaagcttctgg

SEQ ID NO: 968109 - DNA, 120 bp, Artificial Sequence
  ENSG00000268573_13 (sequence is synthesized)
gcaccactgtggtgtacttagtccagtcacagccttgcagtgagccagggcccgtactggcacctggagctgcccaccctgctgcagcagccagcgtgcctgactgtgtgcagtggccag

SEQ ID NO: 968110 - DNA, 120 bp, Artificial Sequence
  ENSG00000268573_14 (sequence is synthesized)
accccacactctttcgctcacacatcccttgctacttcacgcctggctcacccttggcaggggcgagatacaggctggtagcattagccaagcacagcctgccaggctgagtgggcagaa

SEQ ID NO: 968111 - DNA, 81 bp, Artificial Sequence
  ENSG00000268573_15 (sequence is synthesized)
gactagaaaagcaacaccccaagtatcctgtgacacagtggcatgatctcatctcattgcaacctccacctcctgggttca

SEQ ID NO: 968112 - DNA, 87 bp, Artificial Sequence
  ENSG00000268573_16 (sequence is synthesized)
acctccacctcctgggttcaagctattcttgtgcctcagcttctggtgtagctggggctacaggtgcgtgccaccacatctatctaa

SEQ ID NO: 968113 - DNA, 78 bp, Artificial Sequence
  ENSG00000268573_17 (sequence is synthesized)
tcaggtgtggcctaccatgcccagcctgttatgcctcttgattgactcctttttcataatgaaatgaccttctttatc

SEQ ID NO: 968114 - DNA, 120 bp, Artificial Sequence
  ENSG00000268573_18 (sequence is synthesized)
aaccagagacacaaaacaagtaattgaatatatgtatatgtacatatggatttgttaaagagaattggcttacacaattatgagagctagttaggcactcttataatgctgttgtgtctg

SEQ ID NO: 968115 - DNA, 120 bp, Artificial Sequence
  ENSG00000268573_19 (sequence is synthesized)
atgctagaatttgatgttggcagagtagtcagaaaggaagatggaagtaaagtgggagaagtcaaggtcaggctggaagtcacaagtacaaacttgaacctcatgaaaatggactgaaat

SEQ ID NO: 968116 - DNA, 120 bp, Artificial Sequence
  ENSG00000268573_20 (sequence is synthesized)
ccatgttagttcttgttgcctttgaccttggtggtgagggtatccttcagaagctggggctgtttgtcataaacacacatacataggccaggagttggagaagctgaaggaggatctaga

SEQ ID NO: 968117 - DNA, 120 bp, Artificial Sequence
  ENSG00000268573_21 (sequence is synthesized)
ggatggtagagtagttgcaggccaagctgctacaaaatgagtcaacaaagtgagtcaccagtcagcaacaacatatgtgaactacaaatggctactatttcctttccacattacacatct

SEQ ID NO: 968118 - DNA, 120 bp, Artificial Sequence
  ENSG00000268573_22 (sequence is synthesized)
cccaaaaattgcctttttggcccgcccaaactgtaaacataaaataaataattctaggaaaactggtgcactttaagcaagatgacacattataaaagcatcatggtctgccccttgtca

SEQ ID NO: 968119 - DNA, 120 bp, Artificial Sequence
  ENSG00000268573_23 (sequence is synthesized)
acttagtaccatacatgtttctttaagccatactttaattctccaaattatgataacaatgaagttgtgctttcaccttacataacactactatcacataactattaacatgctaaccat

SEQ ID NO: 968120 - DNA, 120 bp, Artificial Sequence
  ENSG00000268573_24 (sequence is synthesized)
ttcccaaaagaggaaaatagtctttttgttggtccatgaatggcattcattctgctcccagatgataaccctccttctttcatatcctataacttaaatactgacatataaagttaacta

SEQ ID NO: 968121 - DNA, 120 bp, Artificial Sequence
  ENSG00000268573_25 (sequence is synthesized)
ttaacacatattgtgttagatgataagatgagagaaggaagaaacataaattttcaagtagtttccaaaagaagctgggtgtatatcattgcccaccagaatgttcttcttgaattcaac

SEQ ID NO: 968122 - DNA, 120 bp, Artificial Sequence
  ENSG00000268573_26 (sequence is synthesized)
tagacttttagaccttcaagactactgcagatcacccttggcatcagattaacttagaaggataggacagaagccacagctgaccagtaggcagcacctacccctcttcggtggtagtgg

SEQ ID NO: 968123 - DNA, 120 bp, Artificial Sequence
  ENSG00000268573_27 (sequence is synthesized)
tactcacagtattttacacaagcatgcagggtttttttttttttttggccttcccattccaagttgacagctcagatgcaaggagatgagacttacattgggaacctgtgggatgcatct

SEQ ID NO: 968124 - DNA, 120 bp, Artificial Sequence
  ENSG00000268573_28 (sequence is synthesized)
ggattagaaacttccacaggagctaatatgtcttatagcaactccatggacatagcttctagaatttctgtaagagacatgccaattacaagagtcactatactcagggaggcccaaagt

SEQ ID NO: 968125 - DNA, 120 bp, Artificial Sequence
  ENSG00000268573_29 (sequence is synthesized)
tatagtatccattagcatagtcaatatttatagttcatttataattcttttggtaatcaggaaacatttttaccataaacaatattgttgggtaacataattgacctattaataagtttt

SEQ ID NO: 968126 - DNA, 120 bp, Artificial Sequence
  ENSG00000268573_30 (sequence is synthesized)
caataaaacagaatgagaaaattaaccaaaggttaattctcatgtacaaaggtaaagtgttttgttaaccttttacccaaaagtgatgatatgaatgtagatttttttgggtgtttgacc

SEQ ID NO: 968127 - DNA, 120 bp, Artificial Sequence
  ENSG00000268573_31 (sequence is synthesized)
aaggaagccaaaccattctttcagattatgttagatttgtagctttgtggagtgttgccagagatgttgctttctgtgtgtgagtttgatgagctaacctggagtttgtttgttggactg

SEQ ID NO: 968128 - DNA, 120 bp, Artificial Sequence
  ENSG00000268573_32 (sequence is synthesized)
gccaaaacaaatctgagccaactatggtccatatcagctgacactgaagaagttcctctcaatgaagtaaatggaattgaagggtttccagagagattagcagtgataatacaggcatgg

SEQ ID NO: 968129 - DNA, 120 bp, Artificial Sequence
  ENSG00000268573_33 (sequence is synthesized)
gaagtgatataaaattctcaagaatgaaactgataggccaccaccaatattctacctgaattctatttctcatttcacttgggggaaactaggtcaaactaacatgtgtactaatatatg

SEQ ID NO: 968130 - DNA, 120 bp, Artificial Sequence
  ENSG00000268573_34 (sequence is synthesized)
tctaacttaggcatacgctctagagcagtgattctcaatctttttgagatagtaaatttatttgagaaaaggatgaaaactgcagacttcttcctcagataaatgaacataaagacctac

SEQ ID NO: 968131 - DNA, 120 bp, Artificial Sequence
  ENSG00000268573_35 (sequence is synthesized)
atgtggacttttgcttatcatgtattgtattggaaattaattttctttgatacttagactgtgtaaacaattttcacaaggaagggatttcaatttaaaaatcaatttccagttctgggg

SEQ ID NO: 968132 - DNA, 120 bp, Artificial Sequence
  ENSG00000255947_0 (sequence is synthesized)
acagtcagacagagagagatcaaaatattttcctgtgacttaagagcaatggccaagctggcttcctgctatcctacccttgaacttgacattcacccactgaaaatgcccagtccctgg

SEQ ID NO: 968133 - DNA, 120 bp, Artificial Sequence
  ENSG00000255947_1 (sequence is synthesized)
ctcagtggggataccagaggctgctaactgccaggcagcaacagaccaataaaggcttccaaaagagatggtgcgctgggctgggcatgcccaggagctcctcccacgcttggccatcag

SEQ ID NO: 968134 - DNA, 120 bp, Artificial Sequence
  ENSG00000255946_0 (sequence is synthesized)
ggaagccatctcggtctctttctggtcttcagtgcacagtggccaggacagcctcccccacttcaccgaatcacatttcttcagcagtttccaacagtgaaatcatttctaggacaatgg

SEQ ID NO: 968135 - DNA, 120 bp, Artificial Sequence
  ENSG00000255946_1 (sequence is synthesized)
ctgctaacacgtgtcagctgaagcactgcagatcgagtcatccaactcaagcttcttcctcttattggaagggataaaccaggtggaagggctcaaatgcgctgcttctggaagcatcct

SEQ ID NO: 968136 - DNA, 120 bp, Artificial Sequence
  ENSG00000255946_2 (sequence is synthesized)
ctgcggcacttacctggagccaggaggaaagcccagggacccaaacttctgcaggcggcacttacctggagccaggaggaaagcccagggacccaaacttctgcagactgcgcaggacgc

SEQ ID NO: 968137 - DNA, 120 bp, Artificial Sequence
  ENSG00000255946_3 (sequence is synthesized)
cactgacctcgggagcccaggaggacgcgcttcccagaagccacagctgctgagatcgacactggcccagagggttaagagcttggaccttggcttcaggggcacctttgcccagagaaa

SEQ ID NO: 968138 - DNA, 120 bp, Artificial Sequence
  ENSG00000255945_0 (sequence is synthesized)
actatcaaggacagcattatgccacaggccataaaatgtcagctcttgggacaaatacagtcctaacacttgccttgtttgactagcacactactttatggattccctgctagtggctaa

SEQ ID NO: 968139 - DNA, 80 bp, Artificial Sequence
  ENSG00000255945_1 (sequence is synthesized)
aaatacctaatgcatgcggggcttaaaaacctaaatgacgggttgataggtacagtacactctgcacatgtatcccggaa

SEQ ID NO: 968140 - DNA, 120 bp, Artificial Sequence
  ENSG00000255945_2 (sequence is synthesized)
tcttgacgtagcagatgctgtagaaggacagaaccagcattcccacaagggcataattaggtctgatgaagtggtggttgcctcttttgagttaaatatgctcattccagtttgcctggc

SEQ ID NO: 968141 - DNA, 120 bp, Artificial Sequence
  ENSG00000255945_3 (sequence is synthesized)
tctctgcatccccaggttcagcgagtgcagctagagctggagccggaagccgggcagcaccatatgctgggctttcaccagataatcaactcccaatcccttctggggcaccgtttgatg

SEQ ID NO: 968142 - DNA, 120 bp, Artificial Sequence
  ENSG00000255944_0 (sequence is synthesized)
acccatgctgggctaagacaaggggcagaggcagagagagagagaggagccaccctgagaaggaagagaccaggtgggctctgagacagggagaccctttctacgtcggtgccttgacat

SEQ ID NO: 968143 - DNA, 120 bp, Artificial Sequence
  ENSG00000255944_1 (sequence is synthesized)
tgaccttgtcttttctcgggccttctgaactgatcatctcttccttctgatacaagaggatcttccctggaagaccactgcacaccttctagtaacactgcgaccctggacttggaggta

SEQ ID NO: 968144 - DNA, 120 bp, Artificial Sequence
  ENSG00000255944_2 (sequence is synthesized)
atgtgctgaatcagtctttctgcaagaccttctctgagacagaactatgacctgttggattcagatcagacattctggagaacataaaatgctccagggacttttgtggctgatcacgag

SEQ ID NO: 968145 - DNA, 120 bp, Artificial Sequence
  ENSG00000255949_0 (sequence is synthesized)
tgattcagccctttaatcttccacgggagcagttgagcgcggggcgtggcgggcggccctccgtgcccatgattcaggggcacagctgccccagcagacacacactttcatacgcactca

SEQ ID NO: 968146 - DNA, 120 bp, Artificial Sequence
  ENSG00000255949_1 (sequence is synthesized)
ctagcgccctggacgcccacggcccctcttggacttcttggtccctgaggggggacggatggggagaggggcggtggtcgagggcggcggcggtggcaggagtggaggtagaggtagagt

SEQ ID NO: 968147 - DNA, 120 bp, Artificial Sequence
  ENSG00000255949_2 (sequence is synthesized)
ttgccaccagtctggaaggcataggccagttccacaataaaggggtgcttcactgactctagaatgttccgctcagcccgtgtgtgtgctgtgtccttggcattgcgcacaattttggcc

SEQ ID NO: 968148 - DNA, 120 bp, Artificial Sequence
  ENSG00000279321_0 (sequence is synthesized)
tcttgtgtcttgtctataggaagggagtgtatcctggtgtatgacagcatatagtagagaccactgtcaattagggcctgtgaactgagacagggtgactggctaagtccacaacccatt

SEQ ID NO: 968149 - DNA, 120 bp, Artificial Sequence
  ENSG00000279321_1 (sequence is synthesized)
agaaacccagaaataatcaaatcatggagagattagaccagggacaataaatatggattaggcaagaatgtgttaactcagcaggccagggtttcttcaaccctgcacattcaaagaggg

SEQ ID NO: 968150 - DNA, 120 bp, Artificial Sequence
  ENSG00000279321_2 (sequence is synthesized)
aacctgggacatcaaataataaataagctgctctaattgccaagaattcacatgtggttgtatgcagcattactgggagattgaagtgtatctgcatgtgattctactgtgatggacact

SEQ ID NO: 968151 - DNA, 120 bp, Artificial Sequence
  ENSG00000279321_3 (sequence is synthesized)
tgtaagtttgtgcctggagtctcctggactttgccctgagaatctttttcctttgttgatatgactctgcatccttttgttttaataaactgtaaacatgagtataattgcttctctgag

SEQ ID NO: 968152 - DNA, 120 bp, Artificial Sequence
  ENSG00000279321_4 (sequence is synthesized)
ttctgagagttttttaaataaataatcaaagctgaagagcaatggaaacccccaccaaaacatctttaaacatttcaattttgtattgaagtaaattttattttcttttttatacctccc

SEQ ID NO: 968153 - DNA, 120 bp, Artificial Sequence
  ENSG00000279321_5 (sequence is synthesized)
ggtaatgagcttgtattatgactgaatagcatcactttatcactttaacgcagatggaggcctaaataaccatagggcaatggttcttcttagatgcagaaggacacatttatataatct

SEQ ID NO: 968154 - DNA, 120 bp, Artificial Sequence
  ENSG00000279321_6 (sequence is synthesized)
tagggaccccatctctgaggtcactcataatttatattaattcattgttattgccattgccccaagaatagataaggctaagacatcccgtagtacaggtagcagagatataaactattc

SEQ ID NO: 968155 - DNA, 120 bp, Artificial Sequence
  ENSG00000279325_0 (sequence is synthesized)
tataggcactgaactagggactgggatacaaatttgatgaagacatggttcataccctagaaggactcagaatggggggtggagtcatggactgttcttcattttcagtatgctgaatga

SEQ ID NO: 968156 - DNA, 120 bp, Artificial Sequence
  ENSG00000279325_1 (sequence is synthesized)
tttttctgatcatggataatcagaaaaacagtaatgctgaagactagctgagagtaggcctggcaggaactgtgtgagctaaaggagaagaggaagacatgagacttggactgtggttaa

SEQ ID NO: 968157 - DNA, 120 bp, Artificial Sequence
  ENSG00000279325_2 (sequence is synthesized)
acatatagcaattatgatgttcggtggaagaaccagattctcttgtcttccctgagacccagaggctgaataaccaggaacttccagagatacttggttctcagaaagaaagaaagctgt

SEQ ID NO: 968158 - DNA, 120 bp, Artificial Sequence
  ENSG00000279325_3 (sequence is synthesized)
ccaacatgccattgaggatactggcttaaaagaagtctgttcttaccaggctgaagtagagctcttctcttcctcagacagatgcctcattaggcaaaattaaaaatctaggaaaataga

SEQ ID NO: 968159 - DNA, 120 bp, Artificial Sequence
  ENSG00000254098_0 (sequence is synthesized)
atgaggctccctgctcagctcttggggctgctaatgctctgggtccctggatccagtgcagagattgtgatgacccagactccactctccttgtctatcacccctggagagcaggcctcc

SEQ ID NO: 968160 - DNA, 120 bp, Artificial Sequence
  ENSG00000254098_1 (sequence is synthesized)
gaagtttccaaccggttctctggagtgccagataggttcagtggcagcgggtcagggacagatttcacactgaaaatcagccgggtggaggctgaggatgttggagtttattactgcatg

SEQ ID NO: 968161 - DNA, 120 bp, Artificial Sequence
  ENSG00000254099_0 (sequence is synthesized)
gtgctgaaaagttttccctcgatactcttcaatctggcttctactgctctatcatttaactgaaatggaacagacacggggttttgccatagtgtcaaactcttggactcaagcaatccg

SEQ ID NO: 968162 - DNA, 120 bp, Artificial Sequence
  ENSG00000254099_1 (sequence is synthesized)
taagaggccaagatgtggaactcatactacatatattatgaaaatcctgccatctgcagaaaagaaatacaaaagatggtgttaggaccctctccaaattaaaattctgaatttccatga

SEQ ID NO: 968163 - DNA, 120 bp, Artificial Sequence
  ENSG00000226747_0 (sequence is synthesized)
gaggggcggctcgcgccagcgcgtagagcgcccgcagagctgggaaaatcggtccgagaggcctgatctgagaggaccacagttgaaacttcatctttctctgaaaccatcacgccttag

SEQ ID NO: 968164 - DNA, 120 bp, Artificial Sequence
  ENSG00000226747_1 (sequence is synthesized)
ccaatcctaacgaaaacgtataagctttgttgagttggagggaatcattgctgtgagaagctgacagtggtggatgacaagcttgaatttccagaggaaatagcatgtctgtgaaactca

SEQ ID NO: 968165 - DNA, 120 bp, Artificial Sequence
  ENSG00000226747_2 (sequence is synthesized)
cccatgccatctggaaaggaaaaagttaagttgcatttctgcaatacattctctcccttccctgagctgctcctggaatataaagaaagcaaggaaatatttactgggccttcagctttc

SEQ ID NO: 968166 - DNA, 120 bp, Artificial Sequence
  ENSG00000226747_3 (sequence is synthesized)
tgtactacttcggaacagcactagcatctatctcagggtttaaaatatggaagttcttgccttccttgaatcttttctcccagaaataacatattggctctcttccctgtgacatgcctc

SEQ ID NO: 968167 - DNA, 120 bp, Artificial Sequence
  ENSG00000226747_4 (sequence is synthesized)
tggttgtcaatgtaaaagttgacatttttacattcaactttaatttaaatgctgaatttaaatttaaatgctgaaaatttatttaaacacttaaaatgatattagaagaggtattttatg

SEQ ID NO: 968168 - DNA, 120 bp, Artificial Sequence
  ENSG00000226747_5 (sequence is synthesized)
tatttcatttttatatgcagtcaacagatcacatgtgtatgtctcttatgtgttcctgtgtgggaatagcttgaattactacataagttctctgagaatattaagttcatttaggggaac

SEQ ID NO: 968169 - DNA, 120 bp, Artificial Sequence
  ENSG00000226747_6 (sequence is synthesized)
aggacatatctatatgaaaaacagaaataatactacaaacaaaagagagatcacgagataacatgtaattaattctcagtgaatgacatgtcatgaaatcatcagaagagatgaggatat

SEQ ID NO: 968170 - DNA, 120 bp, Artificial Sequence
  ENSG00000226747_7 (sequence is synthesized)
gggaaaagctttatgaaagtagtcagaaccataaggaagattcggttttgttaaacagaaagacctttttccattgtggtattaagtttaatatgattttcattgtattaaaatactaat

SEQ ID NO: 968171 - DNA, 120 bp, Artificial Sequence
  ENSG00000226747_8 (sequence is synthesized)
agggcgacgccgcccagcttgcggccactcacgtctctgcactgctgggtgtccgcggccaggacgctggcgaccgtcttggtgacggcgactttggcaggcttggagcaggcgccgagc

SEQ ID NO: 968172 - DNA, 120 bp, Artificial Sequence
  ENSG00000226747_9 (sequence is synthesized)
cttctgggccagtcattgagctaagcactgggcaggacacagccaacagagttggagggaatcattgctgtgagaagctgacagtggtggatgacaagcttgaatttccagaggaaatag

SEQ ID NO: 968173 - DNA, 120 bp, Artificial Sequence
  ENSG00000254097_0 (sequence is synthesized)
gtaccagaagaaacctgagcgggctcccaggctcctcatctatggtacagccctgatttgtgatagtgggtcaggacagggcttactctcaccatcggcaggctggagcctgaagatttg

SEQ ID NO: 968174 - DNA, 120 bp, Artificial Sequence
  ENSG00000254094_0 (sequence is synthesized)
ggtctaggcttgggaggaagatggtgagtgccgtcagcatgtcaagatcagggtgagcccactgcccatgcccagcacacttgggcccacaggatggcagccgcaggaccgggcccctat

SEQ ID NO: 968175 - DNA, 120 bp, Artificial Sequence
  ENSG00000254094_1 (sequence is synthesized)
gccagcccctgtcactgttgcctagtgggctgcgtgggggctgccggctggggtcacgggcacttccctgtggctcacattgaggccctttcaaggtcactgcccggtctccacggcatg

SEQ ID NO: 968176 - DNA, 120 bp, Artificial Sequence
  ENSG00000254094_2 (sequence is synthesized)
caccggtgcacctgctgccctggactcacctggcacggcttctgcagtctgcagacagttttgtctgaaggtggccggtgggcctttgcctggcagtggcaacccctgggtcagctggct

SEQ ID NO: 968177 - DNA, 120 bp, Artificial Sequence
  ENSG00000254094_3 (sequence is synthesized)
tattggtcccggggaccccgccgacactgttagctgtctctgagcttctgagtgactctcacatgagcatctcacgccccacgtggtggagccgccagcactgtccctccgtggcgcgtg

SEQ ID NO: 968178 - DNA, 120 bp, Artificial Sequence
  ENSG00000254092_0 (sequence is synthesized)
cacagccctctctggtcctcttgtgccctgtttctcctctgcagctcctccagggttgatcttagggagggatccagatgtcctaatggtttaccatcttggaaggaatgacaatcagca

SEQ ID NO: 968179 - DNA, 120 bp, Artificial Sequence
  ENSG00000254092_1 (sequence is synthesized)
ctggcacctcaaagtgggatcctgcggcccactgccttcatgggcagatattcctaagatacgacttatccccgggtcctgggattcgggtgtgctgtcatagccttgcctattgcttta

SEQ ID NO: 968180 - DNA, 120 bp, Artificial Sequence
  ENSG00000254092_2 (sequence is synthesized)
ctcctggtgccttgtgagacctccactgtgccgagttgttcccccagctctggctgtaggggaaggaacactgctctccactagtccagtttgtctccaaggtggtgcagtttctgtctt

SEQ ID NO: 968181 - DNA, 120 bp, Artificial Sequence
  ENSG00000254092_3 (sequence is synthesized)
gaatttcccacaccacaatgatagcacgttgaatggacctgcctcaaaaaaaatcatgtccgactggaatctgtgagtgtgacctttggaaataggatccttgcaaagtaatgaaattaa

SEQ ID NO: 968182 - DNA, 120 bp, Artificial Sequence
  ENSG00000254092_4 (sequence is synthesized)
gcatctcaagatgagatcatcctagattaccagggtgcactctaattccagtgacggtgttcacataggagaagaagagggaaaacaggcacggaggcaaggccacgtggagacagacag

SEQ ID NO: 968183 - DNA, 120 bp, Artificial Sequence
  ENSG00000254092_5 (sequence is synthesized)
cgtagagtgatgctgccacaagccaagaacacaggggcctaaagcgggagacagaaagaaggattctccccaagccgttgtaataagcacagtcctgccgacatcttgattttagctttt

SEQ ID NO: 968184 - DNA, 120 bp, Artificial Sequence
  ENSG00000254092_6 (sequence is synthesized)
ggcctccagcactgcgagataacaaatttctgttgtgttaagacaagtttgtgaatctgttcagcagtcattggaaactaactcaaataagaaagaccaggctgtaacctttaagtgtct

SEQ ID NO: 968185 - DNA, 120 bp, Artificial Sequence
  ENSG00000254092_7 (sequence is synthesized)
ttagtaaaagcctgaggataggcccagcgcggtggctcacgcctacagtctcagcactttgcgaggccgaggagttgggcagatcacctgaggttgggagattgagacaagcctggccaa

SEQ ID NO: 968186 - DNA, 89 bp, Artificial Sequence
  ENSG00000254092_8 (sequence is synthesized)
ggggtttgagggggaagtctacggataatggaaggaagaagagtatggagaataatttgtaagcacaaaataggcccagagccatcctg

SEQ ID NO: 968187 - DNA, 120 bp, Artificial Sequence
  ENSG00000254092_9 (sequence is synthesized)
gaataatttgtaagcacaaaataggcccagagccatcctgggaccctcccaggactgtcccacaccagggatacttcctgcctccctgtggccagagcggcatttggaagttgtcggggt

SEQ ID NO: 968188 - DNA, 120 bp, Artificial Sequence
  ENSG00000254092_10 (sequence is synthesized)
gtggagatactggcccaatttctacccctcagcctagagagaggaggaagttcttttgctcacagctgaccaagactggcctttcaacccctcccagtcccaggattgacctttcccttg

SEQ ID NO: 968189 - DNA, 120 bp, Artificial Sequence
  ENSG00000254092_11 (sequence is synthesized)
tttcaagagaagcttactcccacctgcaagctctgagctccaatacaaccaatcatcaaattacccaaagggcagaggagggcggcagcaggaagctgtgcagagcccagcaggaggaac

SEQ ID NO: 968190 - DNA, 120 bp, Artificial Sequence
  ENSG00000254092_12 (sequence is synthesized)
ctggatgcccccaggcactggggcagcggctatccccacctggaacacacttcttcatctccgcctgttggcgtcccaagggtccgccgccgtgtaagaagtacctttcaccttccacca

SEQ ID NO: 968191 - DNA, 120 bp, Artificial Sequence
  ENSG00000254092_13 (sequence is synthesized)
tgtgaggcctccccagccacgtggaaatggcaggtgcagaggatccagcatgttattctgaaaccccagaagacgctgcagctaccaaatagaaggagcctggatccctgaatgtcttca

SEQ ID NO: 968192 - DNA, 120 bp, Artificial Sequence
  ENSG00000254092_14 (sequence is synthesized)
ttcatggaacagaacattctcctcactccagtctgtttgaaccagaatatgacctgagcaagaaataagccttaattatatttgaccatagaattctggtgatatttctatggctgtaag

SEQ ID NO: 968193 - DNA, 120 bp, Artificial Sequence
  ENSG00000254092_15 (sequence is synthesized)
tccatgttgattaatacaaagggatgctgtaaagcctcttctattaaaaaaagttgcccaaggagtgaaaggagagatattttctgtaattaagattttcataatacatagaacaggcta

SEQ ID NO: 968194 - DNA, 120 bp, Artificial Sequence
  ENSG00000254092_16 (sequence is synthesized)
tagcacctggcaatcaatcatatggggtacaacagaaagaggaaacattcctgctattaaattaaccaaactggagttcttgttatataatatagtaaaatttcctcaatctttcagcca

SEQ ID NO: 968195 - DNA, 76 bp, Artificial Sequence
  ENSG00000254092_17 (sequence is synthesized)
aggtgatccaccagccttagacgaacatagatcattttttaaaaaagtttcactgagatgaagttcataaaacata

SEQ ID NO: 968196 - DNA, 120 bp, Artificial Sequence
  ENSG00000254092_18 (sequence is synthesized)
ttttaaaaaagtttcactgagatgaagttcataaaacataacatcaagtattttaaaaagaacaatcaagtggtgttttgtacatccacagtgtctgatcatcatgtgtatttagctcaa

SEQ ID NO: 968197 - DNA, 120 bp, Artificial Sequence
  ENSG00000254092_19 (sequence is synthesized)
aaacatttttattgcccccaaaggaagctatgccccatgaagcaatcgctctctattttcccctcaccccaacccctggcagtcaccaatctgctttctggttctatggatttggcaatt

SEQ ID NO: 968198 - DNA, 120 bp, Artificial Sequence
  ENSG00000254092_20 (sequence is synthesized)
ctagatattttatacaaatggatttatgcaatacatactgttttgtgtctggcttcattcacttagcataatacttttgaagtccatccacagttttgcatgtattagtacttcattctc

SEQ ID NO: 968199 - DNA, 120 bp, Artificial Sequence
  ENSG00000254092_21 (sequence is synthesized)
tttatggctgaaaatacttcatgctatgtatataccacagtttgtttattcatctgttgacggacatttgggctgtttccacctttttgctatttcaaatggtggtgctatgaaggtgta

SEQ ID NO: 968200 - DNA, 120 bp, Artificial Sequence
  ENSG00000254092_22 (sequence is synthesized)
tgtagatggatttgtctagtccctgttttcaattccttggcggtatattcgaggtgtggaattgttgaaccatatggtaattctattttgagcttcttgaggaactgccaaacttttcct

SEQ ID NO: 968201 - DNA, 120 bp, Artificial Sequence
  ENSG00000254092_23 (sequence is synthesized)
cagaggctgaaccattttatattcaatgtgcaagttttccaattttgccacatccttgccaacacttgtcattttccggggttttgttttgttttgttttgtgaacacagattttgactt

SEQ ID NO: 968202 - DNA, 120 bp, Artificial Sequence
  ENSG00000254092_24 (sequence is synthesized)
tcagcgttcttatcttaagaggttacaggatttgtcttacattttccacttgtaattttttttatcattataatacttggcatatttcaaggcacgtgactcatatcattaaatgtttta

SEQ ID NO: 968203 - DNA, 120 bp, Artificial Sequence
  ENSG00000254092_25 (sequence is synthesized)
ttgataagttttctccagaaagtataaattctcatgaagtgctcacagatcttaataacaataaaatttcaaaatattgtttaaacaaagttagttgtaattcattttcaagtttaagaa

SEQ ID NO: 968204 - DNA, 120 bp, Artificial Sequence
  ENSG00000254092_26 (sequence is synthesized)
tcacagttgaaataacagctgaatctctttataattctcattctaggagaaataggaaggctgcagtgcccatctgcgagggttgatgtggaggtgtttacttccttgggtaggatattg

SEQ ID NO: 968205 - DNA, 120 bp, Artificial Sequence
  ENSG00000254092_27 (sequence is synthesized)
gacaagatggttgctaacgtcctttccaactatgtttttaaaattagaatttgaatatttatggaggcctttctgagaaagtacaaagccctgagaatattgtaatgcatatggattttg

SEQ ID NO: 968206 - DNA, 120 bp, Artificial Sequence
  ENSG00000254092_28 (sequence is synthesized)
ctatcttgttacatagaggagaatgggagctgatgaccccaaatccaaccaagatggggtgttacaagtcagaaggttaagggtcactgctctgtgtgttaccagtggagggtgtccagg

SEQ ID NO: 968207 - DNA, 64 bp, Artificial Sequence
  ENSG00000254092_29 (sequence is synthesized)
acaaaaggtgggagcaggcctgagcatagggggtcaagagcctggttacagaatgttctggttt

SEQ ID NO: 968208 - DNA, 120 bp, Artificial Sequence
  ENSG00000254092_30 (sequence is synthesized)
catagggggtcaagagcctggttacagaatgttctggtttgaataccctctaaaggtttcccagtggccacttggtgtacgcttcatgcaaatgaagtagtagactgcagtcagtttgat

SEQ ID NO: 968209 - DNA, 120 bp, Artificial Sequence
  ENSG00000254092_31 (sequence is synthesized)
tggttgtggagagcaaccaataagaggctaaagtgaagttacaaagttacacttctatgcaaatgaagacttggccccaatcagtctgattggttgcagaaggcaaccaattagaggtac

SEQ ID NO: 968210 - DNA, 120 bp, Artificial Sequence
  ENSG00000254092_32 (sequence is synthesized)
attggttgcagaaggcaaccaattagaggtactttgaattttccatctgccatgcagaaaaggtgggggcgatttgcaaagggaatagcctctggtccttttgttacttaggtgtggaaa

SEQ ID NO: 968211 - DNA, 120 bp, Artificial Sequence
  ENSG00000254092_33 (sequence is synthesized)
agtcagtgtgattcagccataggtttcctgcctccagaacctattctcctgcctcatgtggagagcctgagagtataacaggaatgaatattatacatatggaaactctttgagacaccc

SEQ ID NO: 968212 - DNA, 120 bp, Artificial Sequence
  ENSG00000254092_34 (sequence is synthesized)
ataccatttgatacacaatccaaacccaattcttaattaataacgtgtatccactgtatcttaccacatcccaaatcatctaatacttaaccacctagtttctatgttccacttacatca

SEQ ID NO: 968213 - DNA, 120 bp, Artificial Sequence
  ENSG00000254092_35 (sequence is synthesized)
aacatattcatgtttggaaaattgagccagcatctactgccttatcagctgatgcataacaatttactttgtctgtgctctataataatgcaagtctgcttggaaagataacacgttaaa

SEQ ID NO: 968214 - DNA, 120 bp, Artificial Sequence
  ENSG00000254092_36 (sequence is synthesized)
gggttatcagaccctaacaccttcgtatagatgaatttatcagatcctctgctaaaccactttcgaatccttggccagttctctacatttcatgaagagttagcatagccagtccaggag

SEQ ID NO: 968215 - DNA, 120 bp, Artificial Sequence
  ENSG00000254092_37 (sequence is synthesized)
atattatcttcaggatgtggtcagttgtggaaaggaagatagctctgaggatctctttccagggaaaagaaagacatgaggattgctccaaagatcctctttctgggggaaaacgcacat

SEQ ID NO: 968216 - DNA, 120 bp, Artificial Sequence
  ENSG00000254092_38 (sequence is synthesized)
actacagaaaggctacagaaaaaaaagcactccctcagcaacatattcacaatctattttgttggaattacaggccaatccttttcagacagttgagtccagagaggactgggagactgc

SEQ ID NO: 968217 - DNA, 120 bp, Artificial Sequence
  ENSG00000254092_39 (sequence is synthesized)
ctgaccccatggggtgcttgacaaggtcagattccagggcctggtaggctgttaaaaccaaagggggccagtgctcatggacagtgagttaagaggctcctgacactgggggtcctttca

SEQ ID NO: 968218 - DNA, 120 bp, Artificial Sequence
  ENSG00000254092_40 (sequence is synthesized)
gagcacatacagaaggaggagtgtccttctgttacacaacctgaattactggagaagggcccgctggtgtcgttctcctcaatacaatgcacctcctacaatgcacctccacttctggga

SEQ ID NO: 968219 - DNA, 120 bp, Artificial Sequence
  ENSG00000254092_41 (sequence is synthesized)
gaggggaagggggaaaaagagacagagaaggagggagagagagagagaaagagagcgctgtctccctcccttccttcttccttcccttctctctttcccttcctcttatctctctgtgga

SEQ ID NO: 968220 - DNA, 120 bp, Artificial Sequence
  ENSG00000254092_42 (sequence is synthesized)
tctctttcaagtattcctagaagaatctggagctaaaatgagcctgcgtctgaattttactcctggctctgcaactgataagctatgtaatcaagtcccttccctgcttctttctttctc

SEQ ID NO: 968221 - DNA, 120 bp, Artificial Sequence
  ENSG00000254092_43 (sequence is synthesized)
acacacacacacacacacagtctctcatcaaatgctttgtgggttcttactctgacaagccaggcattgtgctagttacaggagataatctgaaagaaaatagctccttcttataaaatg

SEQ ID NO: 968222 - DNA, 120 bp, Artificial Sequence
  ENSG00000254092_44 (sequence is synthesized)
ataaaatgatgatagaccaggtgatctcacaggtatatgttgatgatggctagtttagtcttgctagctctgctcatgcacctccctccttcaatcatgtacctccctccttcaaatcaa

SEQ ID NO: 968223 - DNA, 120 bp, Artificial Sequence
  ENSG00000254092_45 (sequence is synthesized)
tatcctcacctgctttcccaaagccctcttgctattccttctccctctgaggtaccatttttagcctagtatcaaaaggcaccacagctctttccgtcccccacgccacccatcctcttc

SEQ ID NO: 968224 - DNA, 120 bp, Artificial Sequence
  ENSG00000254092_46 (sequence is synthesized)
cccagcatcaacaccaagctgccctgaatgctatgctttcactctttccatcagcatgcagttactaatcccttaatgtgaccggagcagaagtctaaataactgctccataatccccta

SEQ ID NO: 968225 - DNA, 120 bp, Artificial Sequence
  ENSG00000254092_47 (sequence is synthesized)
gtatttgagcatccaaaataacatttgcattttcatcagggtcttaaatggtctggtggctttctttttataaattagtaatttaagtatttattttttaaaaattcaaacacagatata

SEQ ID NO: 968226 - DNA, 120 bp, Artificial Sequence
  ENSG00000254092_48 (sequence is synthesized)
tgtttatgtaggactacataaagatttataattttatagaattacataaacgtgattatattatatatagcttttcattttctttctctctctctttcttttctttgtatcttcttcctc

SEQ ID NO: 968227 - DNA, 120 bp, Artificial Sequence
  ENSG00000254092_49 (sequence is synthesized)
cctctctccaacctcctccatactaataattctcagccacaaatcctccacaaaaccatggaacccatgttaaccttttatgtatccttccatatttttctctatttgtctagactcaca

SEQ ID NO: 968228 - DNA, 120 bp, Artificial Sequence
  ENSG00000254092_50 (sequence is synthesized)
ccagtgtctaatgacatatgtgaagggatgttcttggagtactcttgttcgtggcaaagaatgattgaatgaattctggtacaataatatatttcagttaggctaggctgcttgttgata

SEQ ID NO: 968229 - DNA, 120 bp, Artificial Sequence
  ENSG00000254092_51 (sequence is synthesized)
gcggagctgcttttcagcagagacctgcagcatcagaaagagccagtgagctggtgacctgggaaaagagagttgcaggcaaagggaacggccagtgcagaggccgtggggtaagaataa

SEQ ID NO: 968230 - DNA, 120 bp, Artificial Sequence
  ENSG00000254092_52 (sequence is synthesized)
gattgtgaggcctccccagccacgtggaaatgctgcgtcaatgattgtagtgctaattgttacagacatgaccacaatgccaaggcgaatggggacaatgaaatccatggctggttttaa

SEQ ID NO: 968231 - DNA, 120 bp, Artificial Sequence
  ENSG00000254092_53 (sequence is synthesized)
caactccaaaagcttaataacttaaaacaataacaatggattgattgctcatactatatgtccaagtcaagccagtaaaggactctattcctcagggtcattcagggacccaggctgatg

SEQ ID NO: 968232 - DNA, 120 bp, Artificial Sequence
  ENSG00000254092_54 (sequence is synthesized)
gaacaactattaccttaaatatttccagttgctgtgccatggggaaatgagttctggagggtctcgaaccaggtgattaaatgcttcaaggcagaagtcataattccttggctatgacta

SEQ ID NO: 968233 - DNA, 120 bp, Artificial Sequence
  ENSG00000254092_55 (sequence is synthesized)
gtcacatggccccattcagccaaaggtgagccaggaagtgcaattctaccatgtgtctggaagagaagaaaaaaaaaaaagtattggtgaatagcactaacaaccactacacaccctgca

SEQ ID NO: 968234 - DNA, 120 bp, Artificial Sequence
  ENSG00000254092_56 (sequence is synthesized)
ctgtatcttgtatctattaataaagaggaaagaataatagcatgtcaagcaacttagagggattctacaaggaattgttgagtgagaagatacagataaatgagtaaaaggaattgcatt

SEQ ID NO: 968235 - DNA, 89 bp, Artificial Sequence
  ENSG00000254092_57 (sequence is synthesized)
agtgagaagatacagataaatgagtaaaaggaattgcattttttgaaatgatggctcaaaaatctctacatatggatttgcaagtgttt

SEQ ID NO: 968236 - DNA, 120 bp, Artificial Sequence
  ENSG00000254092_58 (sequence is synthesized)
ttattatcatacattcttacaccataattaccctggggcccttgttaaatgttagaattcccggcccccaaccccaatctagtgaatccaatctgttctgtgcattagtgagagagccag

SEQ ID NO: 968237 - DNA, 120 bp, Artificial Sequence
  ENSG00000254092_59 (sequence is synthesized)
ggcctgatacccaaggctgagtcctttattccaccacatgtagccctcaccatagtgatccactgattcctaacaacttcctaaagaaaaatattgattcattgatttatccatttgtcc

SEQ ID NO: 968238 - DNA, 120 bp, Artificial Sequence
  ENSG00000254092_60 (sequence is synthesized)
atccttttatctaccaaatatttacggagactcgactatctgcagggacattgctagatgctagggatgcagtaggggacaaagcaaacttggtcctgttttgatcttacagtctagggt

SEQ ID NO: 968239 - DNA, 120 bp, Artificial Sequence
  ENSG00000254092_61 (sequence is synthesized)
aggaaaaacatttaaaaagaggacaccacattaattcacatgtatgtacaaattgtgataatgcctaggtaggaagagagtgtcgtggacaaatatagtagagggacaacatttaaattg

SEQ ID NO: 968240 - DNA, 120 bp, Artificial Sequence
  ENSG00000254092_62 (sequence is synthesized)
gggagctaatgatgatgactcagagcaaaggctaagtagagaactatcggggtggtgaccctataggcaagggacacagagctgagcatagagcagtctaggcaggggcgctacctgtgg

SEQ ID NO: 968241 - DNA, 120 bp, Artificial Sequence
  ENSG00000254092_63 (sequence is synthesized)
ggagggccacagaagggaataacagcaggcaagtgtgcctggaagacaatgaccttggaaacagtggtgagagatggcaccagaccatgcagggccctgtagaatgcggtgacaagtcta

SEQ ID NO: 968242 - DNA, 120 bp, Artificial Sequence
  ENSG00000254092_64 (sequence is synthesized)
ggctttaagtgcagtgggaactgtagtagttagaagcaagcaggtcagaaagacttgatatatgttgtctttttacagcaactttagtgagttatagcttacatacaataaaatgcacac

SEQ ID NO: 968243 - DNA, 120 bp, Artificial Sequence
  ENSG00000254092_65 (sequence is synthesized)
acacacttcagatgttcattttgatgagtacataatacaaatatatattcagatatatgtatatatgtgtatactcacataaatgtatatatctttacatccaccactacaatcaagata

SEQ ID NO: 968244 - DNA, 120 bp, Artificial Sequence
  ENSG00000254092_66 (sequence is synthesized)
gccaaatgaacctggttgcagtgagaggtttcagcccccatcagccaaatgctcttgagcaggcctcatctggaaaataatgactgtgtctcaaaggatgacgaagaggaataaatgagc

SEQ ID NO: 968245 - DNA, 120 bp, Artificial Sequence
  ENSG00000254092_67 (sequence is synthesized)
ggctggcaactggtaaatgccagaatccaagcccacatttttcctactccagaacccataacagtgaccattgctctctgtggcttctgtgggggatgagcctgtggtcccttaggctgg

SEQ ID NO: 968246 - DNA, 120 bp, Artificial Sequence
  ENSG00000254092_68 (sequence is synthesized)
ggtctctgggagagtaactgggtatctcatcgcagattcccacaagggccacaagtgaaatgggacttagaagggctacagtcaggacaatttgtcaccttttctctctttctgtctaaa

SEQ ID NO: 968247 - DNA, 120 bp, Artificial Sequence
  ENSG00000254092_69 (sequence is synthesized)
tactggattccacgtagccccaaatgagaagtccaagggaaaagcctcccccaaggatggcattggcatttaatgttaccctccgagaatcgaagacatagggacatggtctagaaccaa

SEQ ID NO: 968248 - DNA, 120 bp, Artificial Sequence
  ENSG00000254092_70 (sequence is synthesized)
ctaagaagatcggagaaggagataggagatgaggagtgaggtctgacacggatcctccgacattaagctctgtgccatctgcatgcagacctgtgtttagtacaggaactgagtccagtc

SEQ ID NO: 968249 - DNA, 120 bp, Artificial Sequence
  ENSG00000254092_71 (sequence is synthesized)
tattctatcctctgtattacctcctgtagaagataagagtcaaaagatggttaaaatagagaccgcttagtccgatttcccacccaggggagagtgctctcaggaatgactctaccagac

SEQ ID NO: 968250 - DNA, 120 bp, Artificial Sequence
  ENSG00000254092_72 (sequence is synthesized)
tctttttaaacacctccattgttggggatttcactgccttattggacaattggctctattattaggcagctacaatcattagggtttttccttaagcattgctgaaacctgctttttttt

SEQ ID NO: 968251 - DNA, 120 bp, Artificial Sequence
  ENSG00000254092_73 (sequence is synthesized)
acgctccccactaactggctgtagtgatgtagtcacacctgctgtgaaagtcaggcttttgaaatttctgaatgattcatcctaagtagcttcagtggaggcagaggagaatacttcttt

SEQ ID NO: 968252 - DNA, 120 bp, Artificial Sequence
  ENSG00000254092_74 (sequence is synthesized)
ctactagcttgtaagctcatgtggtagtcataagagaaggaacagacaacggctgagggggtctctgctttaccgagcacttggctgtgatgctttggaccttctgagtaggcagaggaa

SEQ ID NO: 968253 - DNA, 120 bp, Artificial Sequence
  ENSG00000254092_75 (sequence is synthesized)
gactagatttggtgtaagctctgactctacctcgatgtcctgtaacttgaacaactcagtttccttcatctgcatgggcctgctttgccatgattctcttagcagtgcttgtctggaaga

SEQ ID NO: 968254 - DNA, 120 bp, Artificial Sequence
  ENSG00000254092_76 (sequence is synthesized)
tggtgggccaagaggctccctgactgccccttctcttcccaccagacttctttgatttaccttgagtactccttgcttgtaatgccccatccttgggggaactctgactttctcacttat

SEQ ID NO: 968255 - DNA, 120 bp, Artificial Sequence
  ENSG00000254092_77 (sequence is synthesized)
caaagtgacacatagcttgaaagagaagctgtcaactcggaaatgccatctttcttgcagaaagaagatctgtgaggtgccaggggcaatgatggtaaatggtctggacatggcatgtgt

SEQ ID NO: 968256 - DNA, 120 bp, Artificial Sequence
  ENSG00000254092_78 (sequence is synthesized)
tcttcctgccttgtcacagagtagacaggaaaaagctattgtatagagctccccaaaagtgcgctaccactccgggcccccggtatgcccaggaagacccattgctgcactgaggtaaaa

SEQ ID NO: 968257 - DNA, 120 bp, Artificial Sequence
  ENSG00000254092_79 (sequence is synthesized)
aaggggcatattttctccccctttttcttcctggaatctctaaattgtttctacccattataatttttctcccttagaacagctctgtgaataagccatgaattaacagaacataatgtt

SEQ ID NO: 968258 - DNA, 120 bp, Artificial Sequence
  ENSG00000254092_80 (sequence is synthesized)
caaaccatgtccgttgtgggcatgaagttctgctttcgaaggggacaccagaaggggtccccgggcagaaattcaaatgctctgcccggctggttgttcccttgcctctcccacagccgt

SEQ ID NO: 968259 - DNA, 120 bp, Artificial Sequence
  ENSG00000254092_81 (sequence is synthesized)
gtcccagacgttacagcccagaagccaacactgacagggagagctataggtagctgggctgccagtggccaaaggatggtccacctgagtttggaaagtagaggacatggtaagatgttt

SEQ ID NO: 968260 - DNA, 120 bp, Artificial Sequence
  ENSG00000254092_82 (sequence is synthesized)
gggcatgaaaagtggaaggaacatttccatttaagcccattctgtgataccttagtgaaaacgtttccaggctgacaaactcttctgtgcctctgaaaagacctcggtatttagtattca

SEQ ID NO: 968261 - DNA, 120 bp, Artificial Sequence
  ENSG00000254092_83 (sequence is synthesized)
gaaactgaaacatgtcctgaacaagtaccatagcccaggtaccatgctaaatactttcacatatgctagcacatttaatcctccttcttgtgaaaagcaagatattactgaatctcccag

SEQ ID NO: 968262 - DNA, 120 bp, Artificial Sequence
  ENSG00000254092_84 (sequence is synthesized)
ataagataaccaaagcttacaaatgttgtataacttagtaaagggctgagctttggttgatttaaggtttatgatttaaggttgtttaatcctagattgaaacataaggtgtttcccctg

SEQ ID NO: 968263 - DNA, 120 bp, Artificial Sequence
  ENSG00000254092_85 (sequence is synthesized)
catacgtcaaattatgtttgtgataaattctagagaagtatcttgattcttctctggattttgattgtacgttgcactgtttgcaataagtgggctaatagggatttggtacctataatt

SEQ ID NO: 968264 - DNA, 120 bp, Artificial Sequence
  ENSG00000254092_86 (sequence is synthesized)
tgttttaggatttataggatgtttttctttggagtcagtactatcttttggagggtgtgtcatggaggaattgtcaataaatcctatcctggagacaaagtggacctaaactttgctttc

SEQ ID NO: 968265 - DNA, 120 bp, Artificial Sequence
  ENSG00000254092_87 (sequence is synthesized)
aactcagttgaatgggaatgtattaggcacacattgtggtctagccatctatgagagaccaaagtacagacataatctctttcattaagcaattcacaaattgcttgaaaggacacagga

SEQ ID NO: 968266 - DNA, 120 bp, Artificial Sequence
  ENSG00000254092_88 (sequence is synthesized)
ttcagctgtacagatacacagagcaatgccggtaagttataacaaaggctcaagtgagtcctggagacagtgagagttataggaggtcagaggagtgagtgatgaaacagctgtggtatt

SEQ ID NO: 968267 - DNA, 120 bp, Artificial Sequence
  ENSG00000254092_89 (sequence is synthesized)
caggaaacatttgatgcaagagggaagcttgagatgagcttgaaaatgcatagaattgctcttgggaagaaagaagtagagattttctaaatgagaggagggggaactgcttaagtgtgg

SEQ ID NO: 968268 - DNA, 120 bp, Artificial Sequence
  ENSG00000254092_90 (sequence is synthesized)
aggtaaaaatgctactagtgtgtttaggggatgaggagaagcccatttttgttggaaccacacaggaaaccgttgaagatatgataggaaaggcaatgagaccttgaacgctaactggaa

SEQ ID NO: 968269 - DNA, 120 bp, Artificial Sequence
  ENSG00000254092_91 (sequence is synthesized)
cgtaaaccttattccaatagctatgcaaagccccagcaggttcttgagcagagaaaggttgtaagaaaaggagttttcagaaactgaatctacaaatggcaagcataggaagcagtggaa

SEQ ID NO: 968270 - DNA, 120 bp, Artificial Sequence
  ENSG00000254092_92 (sequence is synthesized)
caatattaagagaaaggagatcatttaggaaggcattgtcatgatttaggagtgaagtcatgagcacttaacccaggtgaaggtgggggaaaaaaaagaaaggggtgggcagggcccaac

SEQ ID NO: 968271 - DNA, 120 bp, Artificial Sequence
  ENSG00000254092_93 (sequence is synthesized)
tcaggagatattaacagcaggcccagggactttctatggagggaagggagaaggaggaatcaagggagagatcgtggattaagcttggatagagtcaaagttattctcatttgggaccag

SEQ ID NO: 968272 - DNA, 120 bp, Artificial Sequence
  ENSG00000254092_94 (sequence is synthesized)
gctccatgtgaagggctgtcttgtctgggagctccaggagccttgggctgaagccttatctctgtactagttatagccaagtcaccttcccacccacaggcttcacattctttctatgta

SEQ ID NO: 968273 - DNA, 120 bp, Artificial Sequence
  ENSG00000254092_95 (sequence is synthesized)
aggcaaagacagttggcaaaatgcactttggaaaagtctcttccagcaccttcatatagaattttgtatgacaaagtcctaaaaagtatgcatctttctcatccctccttatccccatgc

SEQ ID NO: 968274 - DNA, 120 bp, Artificial Sequence
  ENSG00000254092_96 (sequence is synthesized)
ctagcatagattaatctccaaaaggacagaggctccagcgacccgacttcgatgtgcaagaggcactgtgctccattctgcaccaccatgggctgactgagcatttatgttgcagacttt

SEQ ID NO: 968275 - DNA, 78 bp, Artificial Sequence
  ENSG00000254092_97 (sequence is synthesized)
caccaccatgggctgactgagcatttatgttgcagactttgaagttaactaatattcagaggccgccgtgtaagaagt

SEQ ID NO: 968276 - DNA, 120 bp, Artificial Sequence
  ENSG00000254092_98 (sequence is synthesized)
ggttctcagcccattgggcttggataactacaccactatttccctggacctccagcttgcagatggcagacttgggacttctcagcctgcacaagcatatgagtcaatccctcataataa

SEQ ID NO: 968277 - DNA, 120 bp, Artificial Sequence
  ENSG00000254092_99 (sequence is synthesized)
tcgccctttataggaatgacatcaagtggatgggaccacacaggaaagccacctgatgaagatgggaggggtgttggaggagaatgagcggctcatctaggtctactccccagaaccagg

SEQ ID NO: 968278 - DNA, 120 bp, Artificial Sequence
  ENSG00000254092_100 (sequence is synthesized)
acagtggcccagattggatttgcctgaagacccctcggggagaaaaaagcaagcaagttcctcccctccttccaaactttacgtctgcctgagccctgagggatctgactctaatttgaa

SEQ ID NO: 968279 - DNA, 120 bp, Artificial Sequence
  ENSG00000254092_101 (sequence is synthesized)
gaactcaggagagaccttctagcttcgctataagcatctctacccaaccgctactatgccccacctccgcaaagttcctggctccactttaatgaaagaatgatggggaaagagcagcat

SEQ ID NO: 968280 - DNA, 120 bp, Artificial Sequence
  ENSG00000254092_102 (sequence is synthesized)
attgcttttactttggccaccccacccaccgccctgctgagaagcaaccacagcacctgtgaacctgcagcaatcaagaatagaactcacctgctggtctctgactcctcttgggccaca

SEQ ID NO: 968281 - DNA, 120 bp, Artificial Sequence
  ENSG00000254092_103 (sequence is synthesized)
atcagcacttggggaccgtggggtgctataaattaggcagcctcccttgtaccattgtctcagctattgctggactctgctgcctgtctgccccctgttcctctaaaccacatgtctgct

SEQ ID NO: 968282 - DNA, 120 bp, Artificial Sequence
  ENSG00000254092_104 (sequence is synthesized)
gtccttgcaacatcctctgggcctccagtggcttgactggactcctagtttgtttcctcttgggtctatctgttcccactgaggcctccaaattcaggaatcctccctccacactgcact

SEQ ID NO: 968283 - DNA, 120 bp, Artificial Sequence
  ENSG00000254092_105 (sequence is synthesized)
ttgggcgaacttgagggtgcgctcataatcagaggcactgcctggcggagacaagaggtgaacagagagcgttagcccaggacactgatctgcatggcacagagataaacgttacgataa

SEQ ID NO: 968284 - DNA, 120 bp, Artificial Sequence
  ENSG00000226741_0 (sequence is synthesized)
gtccctggcatgagctacccatcactgtcttatgctcagtgacccaggaccacctatgagcatctgggcccaagagatgatctcaaacttttcacaattatttcaggtatcaacaagatg

SEQ ID NO: 968285 - DNA, 120 bp, Artificial Sequence
  ENSG00000226741_1 (sequence is synthesized)
gaaataaagccaaaagctgtgctgagattcaaccatcaacatcccaaaaggaatattctgtttcccagcatttcttgccaaggatgatctcagattcgtctgtttccattcactataaga

SEQ ID NO: 968286 - DNA, 120 bp, Artificial Sequence
  ENSG00000226741_2 (sequence is synthesized)
aaaatattctgagcacctgctatgcgccaagcgttgtgctatgtagtgggggcacaactgcagggaaaccagacatggtccctccctgcctcctggcatttagagccaagacagagggtc

SEQ ID NO: 968287 - DNA, 120 bp, Artificial Sequence
  ENSG00000226741_3 (sequence is synthesized)
agattataaatgaacacaggcaccatgattatttcatctcaaactctggttggtgctatgggaaaggagcagtgatctttgagacctgagagggggtcctgatggagcagacaccagcag

SEQ ID NO: 968288 - DNA, 120 bp, Artificial Sequence
  ENSG00000226741_4 (sequence is synthesized)
gcaaggggcctgatctcccttgaaccaagagccctgccactcgccccagctgcctaaaggctgacaggagaagagggagtcagaatggtgctccaaacagagctcactggaatctcagct

SEQ ID NO: 968289 - DNA, 120 bp, Artificial Sequence
  ENSG00000226741_5 (sequence is synthesized)
cagccatttacttgctctgtcaacttgggctctcgctgcagatgtcattagtgaagacgaagtcacactggagtaggctgggccctaaatcaaatggctgttagttttataagaagaggg

SEQ ID NO: 968290 - DNA, 120 bp, Artificial Sequence
  ENSG00000226741_6 (sequence is synthesized)
aaatttggacacagacacacacaaagaggaacaaccagcgtgtgaagacagaggcagagattggaatgaggcagccacaagccaatgaaccgctgcagctcccagaggccagaagaggca

SEQ ID NO: 968291 - DNA, 120 bp, Artificial Sequence
  ENSG00000226741_7 (sequence is synthesized)
agggaatatcctcccctagaggctgcagagggagcacagccctgccagtgccttgattcgagacttcgagacttccagcctccagaactgggaaagaataaatatctgctgttttaagca

SEQ ID NO: 968292 - DNA, 120 bp, Artificial Sequence
  ENSG00000226741_8 (sequence is synthesized)
tgctcaggacggccctctgagcaggcactgatgtcgtccccctcacatgcagagaaaccaagacatgagcgtggtcaggtcgttcgtgcagagccaccgggctggggatgggcagagctg

SEQ ID NO: 968293 - DNA, 120 bp, Artificial Sequence
  ENSG00000226741_9 (sequence is synthesized)
gagtgtgtgggcacaggatcggggtttgtcaccactgtgctgcactgcctctgcaccccaactaggcctcacgctgatggagacatcgcagtgcatgggagaacattcactgcgtggtgc

SEQ ID NO: 968294 - DNA, 120 bp, Artificial Sequence
  ENSG00000226741_10 (sequence is synthesized)
attctcttaattcaaccgaagcctctccctgtccccattaggacggccactcccaacaggagttcccggcctgtgaaggccaaccggtcggggctcagcaccccattatcattctgccac

SEQ ID NO: 968295 - DNA, 120 bp, Artificial Sequence
  ENSG00000226741_11 (sequence is synthesized)
tttccaaaggaaattataagcactttgtgtcaaccctcatctgtcccggcagccgcaccgcaggaaagcgattgaggtcagagaaggcagacagcctacccatcacacccgccgcggcca

SEQ ID NO: 968296 - DNA, 120 bp, Artificial Sequence
  ENSG00000226741_12 (sequence is synthesized)
ttcctcatgtagtgacatgcaatctcccgccaagggtcacctctggggaagcgattccttcaagcctagaacaagtgccgaattgcagctttgccgaatgatcatgtggaacacattgaa

SEQ ID NO: 968297 - DNA, 120 bp, Artificial Sequence
  ENSG00000226741_13 (sequence is synthesized)
aatagccgcctcagtaataaatgcttaaccaaagcagccccttcctccggcataaccaggagcatatttactgtaaatatgttaaccaattcatgctgcagcacatggccgaggagtcag

SEQ ID NO: 968298 - DNA, 120 bp, Artificial Sequence
  ENSG00000226741_14 (sequence is synthesized)
cttcccaggcagcaaagagcaaacccccgctgggctgagaaggagcaagccgcaaaggagaggattgtgtccgccaggaaaaggaagaggcaggaaaaggcacctgggacagaggagcct

SEQ ID NO: 968299 - DNA, 120 bp, Artificial Sequence
  ENSG00000226741_15 (sequence is synthesized)
cctgcaggccccacagccccacccgacagaggagtggcgagaaggggacttggcattctgcatcttgccgtcacctctgtgccccacggaatctgtgagttaagactggctccaagagaa

SEQ ID NO: 968300 - DNA, 120 bp, Artificial Sequence
  ENSG00000226741_16 (sequence is synthesized)
caggagacaaacctcggaagggctgcccctcagagacatcaagtggaatatgaatactgatttctaaccccacttccaactcctgagtgctttacgctgggctacaaggttctcaatgtc

SEQ ID NO: 968301 - DNA, 120 bp, Artificial Sequence
  ENSG00000226741_17 (sequence is synthesized)
tcagtgcctcagcgttctgatttatcttatggaagcctgcctcatctattcatatattgcattcttaaacacagaataacaacaacagcaatgacaacaatgctaatagcgctccaacag

SEQ ID NO: 968302 - DNA, 120 bp, Artificial Sequence
  ENSG00000226741_18 (sequence is synthesized)
atgaatcagggtcaggggagaggacaggaggaaagaaggagcgagagaaaggggagagagagagaggagacgggagagtgatggcgagagacagaaatatgaatgagaaacgggaaaaaa

SEQ ID NO: 968303 - DNA, 120 bp, Artificial Sequence
  ENSG00000226741_19 (sequence is synthesized)
atcgagaagatgatgagaagcctgaaagacagagaaagcaatctaagatgagaaaaagagcactgagaaagaaaacattctggaggagagagaaggaggggcagagaggggaacaaggag

SEQ ID NO: 968304 - DNA, 120 bp, Artificial Sequence
  ENSG00000226741_20 (sequence is synthesized)
ggggtggagagagggagattgagagggcatgagttgtctctggaaggctgggttttgtttccactgggaagaaaaaatgttctttgttatcaaaagccttgagtgacaccagcagctcct

SEQ ID NO: 968305 - DNA, 120 bp, Artificial Sequence
  ENSG00000226741_21 (sequence is synthesized)
ccccacccctctctaacacactagcacctaggctggtgtacacatacacatgcatactcaagtgtgcacacacacacactaacatgcacatatttgtacacacacaaacatatgcatgca

SEQ ID NO: 968306 - DNA, 120 bp, Artificial Sequence
  ENSG00000226741_22 (sequence is synthesized)
cacacatatgcacattcatgtgcacgcatgcatactcgtgcacatacacactaacatgcacacatactcaaggtacacatatattcacatgcaccacacatacacacatgcatgtgcatg

SEQ ID NO: 968307 - DNA, 120 bp, Artificial Sequence
  ENSG00000226741_23 (sequence is synthesized)
cacatacaagcacacacacgcatatgcgcacacctactcaaggcacacacatacacgcacacattcacacattcatacatgcacactcatgtgtacacacacatgcataggcacacacac

SEQ ID NO: 968308 - DNA, 120 bp, Artificial Sequence
  ENSG00000226741_24 (sequence is synthesized)
atacattcacacacacgtatgtgcacacacatactcacatgcacacattcacatgcacacactcgtgcacatacactcacgtgccctcatacatgcacatatatgcacacatgcatgcac

SEQ ID NO: 968309 - DNA, 120 bp, Artificial Sequence
  ENSG00000226741_25 (sequence is synthesized)
acatacatcacatccaggcacacagccatctagaggcacacatacactcttacagcacacagtcaattccctccccctacccctgaacctaattcagtcccagaacagagagagcaatac

SEQ ID NO: 968310 - DNA, 120 bp, Artificial Sequence
  ENSG00000226741_26 (sequence is synthesized)
aaggtctgagccaaaggaaacagaccaaagccagactgggtctgggtgtgggggaggaggaggaaaggggtcgggaggaggcagcccaggtcaggggcccagagtggaccagcaatgcaa

SEQ ID NO: 968311 - DNA, 120 bp, Artificial Sequence
  ENSG00000226741_27 (sequence is synthesized)
agaaccgtagagccccctgagaggctgcagcccctcaggcctggccctcaggcctgggcctcccttcatcccagtttcaggctgcattcttaatcgggccacggccccggctacctagag

SEQ ID NO: 968312 - DNA, 120 bp, Artificial Sequence
  ENSG00000226741_28 (sequence is synthesized)
agacagtcacacactggcttcaagaccagagaaaccccagcaaagggcagccagcttctgggcaaagagtgaagccaccggctccctccggcttgcagcttctcctttctgaagtgggtg

SEQ ID NO: 968313 - DNA, 120 bp, Artificial Sequence
  ENSG00000226741_29 (sequence is synthesized)
ggcagtttccggccaaccttttgcctccttctctccagccgcccctgctaactcccagtaatttgccaaaattaacagatttatggcagcatgttggtttggatcaacttttcgtatgta

SEQ ID NO: 968314 - DNA, 120 bp, Artificial Sequence
  ENSG00000226741_30 (sequence is synthesized)
ctttgcaagagaaaaacattttcttctcccccgacttactgtttgcccattaatacgctccacattcactggtgcttaatgactgttcaaattttctctgttcatagagaatgttgttgt

SEQ ID NO: 968315 - DNA, 120 bp, Artificial Sequence
  ENSG00000226741_31 (sequence is synthesized)
tgtgattaagggtgccagggtgcttgcaagtacaaacacaccaaagccatgaaaagggcaattaattctttaaaaaaatgcaagagagtgggagagattggatgctctgtttacagaaaa

SEQ ID NO: 968316 - DNA, 120 bp, Artificial Sequence
  ENSG00000226741_32 (sequence is synthesized)
gcaagaaagaaaacagatatttctaagaagtgtccttccaggacagcaacgtctcctgtaaaaatgtctcctggaaaaaatgttgaaatacaaatgttcatggaaactgctgtccagcag

SEQ ID NO: 968317 - DNA, 120 bp, Artificial Sequence
  ENSG00000226741_33 (sequence is synthesized)
acatttggttattcaacaaccatgtgtcaactactcattatgggcctggttctggggtaattcataaaggaagccacagggtgtgggcgaagtggacatctgggccaggactgaaatccc

SEQ ID NO: 968318 - DNA, 120 bp, Artificial Sequence
  ENSG00000226741_34 (sequence is synthesized)
agctcaagataagtcatcccttgcctctgagcctcagtttacccatctgaaaattaggaggtggaaatcccaagggtggctatcaaaattcaagaggacatgtgtatcaagggcttagct

SEQ ID NO: 968319 - DNA, 120 bp, Artificial Sequence
  ENSG00000226741_35 (sequence is synthesized)
tgctgctagcacatagtaagtgtacaagaactgcctggttcattattcgttcactctcctgaacaaatcagtggccgttttaatggctttggtgtgtttggacttgcaagcaccctggca

SEQ ID NO: 968320 - DNA, 120 bp, Artificial Sequence
  ENSG00000226741_36 (sequence is synthesized)
cccttaatcacagcaacagcactctctagcaccagagtacgttctctgggccatgggccatgccatggggctggattttgaagttacaacttcaagaaaggcaagtttctgcccatgtat

SEQ ID NO: 968321 - DNA, 120 bp, Artificial Sequence
  ENSG00000226741_37 (sequence is synthesized)
ggctgatgatccaacggtgggagacagaaactactaaacatctgcaatggcaacgtgtccaacagtgataaatgcctgaagggaaataaaacaaagtaagatacaaagcagggccaaagt

SEQ ID NO: 968322 - DNA, 120 bp, Artificial Sequence
  ENSG00000226741_38 (sequence is synthesized)
agataaggccctgctgagctgtgttggatgatgtcatcaggggcctggggaggccagcaaggtgacttgtgcagacacccgagtcgggtgtcgatatcttcctccataccttttatcttt

SEQ ID NO: 968323 - DNA, 120 bp, Artificial Sequence
  ENSG00000226741_39 (sequence is synthesized)
cctaaaaatatggttgggaagccctggtccatctgcaaaggacaggggcaagttggcctatgcgctagcaattgctacatattgtgagagctcttaaaccaaaggtcaggacacacccag

SEQ ID NO: 968324 - DNA, 120 bp, Artificial Sequence
  ENSG00000226741_40 (sequence is synthesized)
tttacttgctctgtcaacttgggctctcgctgcaggtacctgagactgttttctcgcctgtaaaattggaaggtgttatgggttgaattgcttcccccaaaaatatgttgaggtcttaac

SEQ ID NO: 968325 - DNA, 120 bp, Artificial Sequence
  ENSG00000226741_41 (sequence is synthesized)
gagggttccccagggtcccattcttaacagatcctccttgaatgccctgcagccaccgctgatgtgctggaagtcacttctgctggctttgatgaagggaaggaagcagatgagaaagag

SEQ ID NO: 968326 - DNA, 120 bp, Artificial Sequence
  ENSG00000226741_42 (sequence is synthesized)
ggtgtatatgagtgactcattgaacctattgtctatccatagagagaggggacgagagagtgccttgtccccaagacctgggcccacagtggccccttaagtaagttcaggccctctcac

SEQ ID NO: 968327 - DNA, 120 bp, Artificial Sequence
  ENSG00000226741_43 (sequence is synthesized)
ctgggcaggggtcagaagcctagagcaacagcaaccactgaaagccctcagcactccacttaggcctccactccagagcctcagagctgccagcttcttctccctgatacccctgcagaa

SEQ ID NO: 968328 - DNA, 120 bp, Artificial Sequence
  ENSG00000226741_44 (sequence is synthesized)
actcagccaccttctatttagaaggatcagccatcagatgcttctaaataaatccaatccctccaccctcctgctttccacttgcaactgtctctgtccactggcacttggacccaagag

SEQ ID NO: 968329 - DNA, 120 bp, Artificial Sequence
  ENSG00000226741_45 (sequence is synthesized)
ctaattgcagaagcttcatcttaaaggaaaccacaaacacgctctcacccacgttttacgactttataactcaccaaataaacctgattcctataaccataaaacaaagccgaaatgagt

SEQ ID NO: 968330 - DNA, 120 bp, Artificial Sequence
  ENSG00000226741_46 (sequence is synthesized)
tggacatgtaccagcgaggagaagcaggaggcgggtggagattgccagagggggctctcagctgtggagtcgcggctctccgtgtggatttcggcatctcagtcttgcagaaacttaata

SEQ ID NO: 968331 - DNA, 120 bp, Artificial Sequence
  ENSG00000226741_47 (sequence is synthesized)
ttccaatcagcacccaagcaaggcgttggaagccaaggagtgcatgagtgcccccatagctgggggaatattactcaccaggtcatggtcggctgcgtaaaatacaaccctcatatatca

SEQ ID NO: 968332 - DNA, 120 bp, Artificial Sequence
  ENSG00000226741_48 (sequence is synthesized)
ttataactgccagccaacgacagttataattgagacggcaataactaggagagagttctttaatttaacatccaattattacaagttatcacttcttaataaatgtaatataacagacaa

SEQ ID NO: 968333 - DNA, 120 bp, Artificial Sequence
  ENSG00000260440_0 (sequence is synthesized)
gaaacgccacagttctggcaccaggaatgaaggcgccatctggcccctcttgggctccttggcttgaattcctggggtcattgttacactcagcattctctaggcgaaggagaacaataa

SEQ ID NO: 968334 - DNA, 120 bp, Artificial Sequence
  ENSG00000260440_1 (sequence is synthesized)
gaggcaggtaaagctggagcccgtaacaggaggaaacgtgagcattgaaaacccgccctttggatgaactgaccacagctggacaacaccagtgccaggccagggttccaagcactgcag

SEQ ID NO: 968335 - DNA, 120 bp, Artificial Sequence
  ENSG00000260440_2 (sequence is synthesized)
agatgaagcaccttcttccaggagttcctggagttctcagaagccagagtggacttgttcctccgttttatttgatgaggttctaaatatagctgggcaaggcttcggattttagtggga

SEQ ID NO: 968336 - DNA, 120 bp, Artificial Sequence
  ENSG00000260440_3 (sequence is synthesized)
gatggccagaggcgaagcaactgataaaagtagctgaatagctctccctctctgagctaggtgcaagctcctgacgtaggaagcgatccctccttgccacagataacccacgtagccagg

SEQ ID NO: 968337 - DNA, 120 bp, Artificial Sequence
  ENSG00000260440_4 (sequence is synthesized)
tgctgccaagcagcttccacctggaggagggcagctgctctgcgcatgaccagtagctgtggatggcatcgtcgaggcatctggaggaagctgcagccccacaaggcccctgacccctct

SEQ ID NO: 968338 - DNA, 120 bp, Artificial Sequence
  ENSG00000260440_5 (sequence is synthesized)
gcctttccctctgctggctcctcttcctccctctttccctgctgtcccctgtagagaactttctaccagtccacacaccaacctaggtgcagcccccctgcgtgactccctccctgacta

SEQ ID NO: 968339 - DNA, 120 bp, Artificial Sequence
  ENSG00000260440_6 (sequence is synthesized)
tcataaccatggccagcagtatctccacatctctgcccagatccccctgggaaggcttatcccaggccccaggtttggggcaatgcccagtggcatcggatggggtcccccttgaaagga

SEQ ID NO: 968340 - DNA, 120 bp, Artificial Sequence
  ENSG00000260440_7 (sequence is synthesized)
agcacagaaagactgagccatcaacgtagtcccctccatcacctgccactgtccccaaaatctcccacaccggaagtgtttagattgtctaaggacaatattgtctagggtttgaggacc

SEQ ID NO: 968341 - DNA, 120 bp, Artificial Sequence
  ENSG00000260440_8 (sequence is synthesized)
accccacagcaaaaacactagaaagctagttccaaaatgcaaatcccaggccaagcccctcacctcctgaggcagcatccctgggtatagatctcagaaatctgcagttttaatacaaag

SEQ ID NO: 968342 - DNA, 120 bp, Artificial Sequence
  ENSG00000260440_9 (sequence is synthesized)
gccccctaaacttaaagaaacagcctgaattcacatgggcacaccttacctgagcaggcaatacagtgacaagggtggaaacagaggggacgagacctgacactgggaaggcctgacaga

SEQ ID NO: 968343 - DNA, 120 bp, Artificial Sequence
  ENSG00000260440_10 (sequence is synthesized)
gggaaggaaggaaagctctcaggctaagggcgctgggaaccccactcttccctctagggagttgccgttccctgaggggcctgaggagcctcctcctgaagccccagctattcaaattac

SEQ ID NO: 968344 - DNA, 120 bp, Artificial Sequence
  ENSG00000260440_11 (sequence is synthesized)
accttttcttattaggacatcaggaggtgttgccccttagctttccattctaacctcctcaatgtaggggccttgctggtgtcgaggacagagcggaggcctcaagggtatgtgcagtct

SEQ ID NO: 968345 - DNA, 120 bp, Artificial Sequence
  ENSG00000260440_12 (sequence is synthesized)
aggtggccttggtggaggggcaggattctacatttgggaggggacttcttgctgaactccttccagatgggtcaaatggggtagactgagggagtggtgtgggaggtggtaaagaaccaa

SEQ ID NO: 968346 - DNA, 120 bp, Artificial Sequence
  ENSG00000260440_13 (sequence is synthesized)
gtagggactggatggatcctgggagtttacagggctgcctcggagagggagggtgctgagagagaggagaccagggtgggcaccaacgcgatccctgcaggctatgagtgtaggatcaga

SEQ ID NO: 968347 - DNA, 120 bp, Artificial Sequence
  ENSG00000260440_14 (sequence is synthesized)
gagggttaagggccagaagcccctgtgtgtttaggactgtggcaccatgggtgcatcccctgagaagcgaagctcaggcaggagcagcagtgggcaaagagcctggtggtgcaggtgcag

SEQ ID NO: 968348 - DNA, 120 bp, Artificial Sequence
  ENSG00000260440_15 (sequence is synthesized)
gccctgtagaggaggcagtgacaacacccagcccaggccgactctctctgcctgtcccctgagtcccctggcacctctccacatctgctcagccctcccagttaacctagcactggtaga

SEQ ID NO: 968349 - DNA, 86 bp, Artificial Sequence
  ENSG00000260440_16 (sequence is synthesized)
acatctgctcagccctcccagttaacctagcactggtagatggttgatatgatttggatctgtgtccccaaatctcatgttgaatt

SEQ ID NO: 968350 - DNA, 120 bp, Artificial Sequence
  ENSG00000260440_17 (sequence is synthesized)
tagctttatccccttaatgctgttcttgtggtagtgagggaattcttgcaatatctggttgtttaaaagtgtgtagcacttcccccccaacactcttttgttcctgttccaactgtgtga

SEQ ID NO: 968351 - DNA, 120 bp, Artificial Sequence
  ENSG00000260440_18 (sequence is synthesized)
agtgctcactccccctttgccttctgctatgactgttaagtttcctgaggccttcccagaagctgagcaggtgtcagcatcatgctttctgtatagcctgaggaaccataagccaattaa

SEQ ID NO: 968352 - DNA, 83 bp, Artificial Sequence
  ENSG00000260440_19 (sequence is synthesized)
taagccaattaaacctcttttctttaaaaattacccagtctgagatatttcttttcttttccgtagctgcacctctgcctcca

SEQ ID NO: 968353 - DNA, 120 bp, Artificial Sequence
  ENSG00000260440_20 (sequence is synthesized)
tcctcccacctcagcctcacaagtcactgggaccacagcacgtgccaccacacccagctaatgtttgctttctttgtagagacagggtttcaccatgttgcacaggctggtctcaaactc

SEQ ID NO: 968354 - DNA, 120 bp, Artificial Sequence
  ENSG00000260440_21 (sequence is synthesized)
aaactaatacgaaggtgaatccatctgcagatccagactccacaggaagccagcaagtgtgattgcgggctctgctgcatttcaggggcggttctatacttggcacgtgcatgctttccc

SEQ ID NO: 968355 - DNA, 120 bp, Artificial Sequence
  ENSG00000260440_22 (sequence is synthesized)
cagcctagcatattagcctgctggggctactataacaaaataccacaaactgagtggcttaatacaactgaaatgcattctctcacacttctagtggccaaagtccaagatcaaagtttt

SEQ ID NO: 968356 - DNA, 120 bp, Artificial Sequence
  ENSG00000260440_23 (sequence is synthesized)
ggcagggttggctccttctggacactcagagggagagtctgtcctgtgtctctcccctggcttctcctggttgctggcaacccttggcattttttgcttataaatgcatccctcttatct

SEQ ID NO: 968357 - DNA, 120 bp, Artificial Sequence
  ENSG00000260440_24 (sequence is synthesized)
cagcctgtactgtcacgtgaccttcttccctgtgcatctgtctcttgtcctcttcttctaaggacagcagtcatattggattaagggcccagccactccagcatgacctcctcttaactt

SEQ ID NO: 968358 - DNA, 120 bp, Artificial Sequence
  ENSG00000260440_25 (sequence is synthesized)
gatggcattcaaagccatcaggtttggaaacaaggtcacattaccagggaccggaggctaggacttgaagataccctttgggaggagacacctgcaacgtttggattggagaagactcag

SEQ ID NO: 968359 - DNA, 120 bp, Artificial Sequence
  ENSG00000260440_26 (sequence is synthesized)
tgaccttctgggatgtcgtttaccctccctgggctgcagcttccttgtttgtagaggaagaggttaaattaaacaatctcttccaggtctcatggtcttcgaatctgttttctcctctgc

SEQ ID NO: 968360 - DNA, 120 bp, Artificial Sequence
  ENSG00000260440_27 (sequence is synthesized)
tgttttctcagcttccttctcccgatggaaatagggggccagtgtatttcccctgcctcccctccctctcagccctgctttcaagtcttagagctggcaagggctttgtgcaatactcca

SEQ ID NO: 968361 - DNA, 120 bp, Artificial Sequence
  ENSG00000260440_28 (sequence is synthesized)
ggtcctaccctcaatttctggtggaacaacagaataagcggtctctgcatgcacacaaatcccttcagctccgtctgggcccagcggcagctgaccaaccagcccatcacacacctttct

SEQ ID NO: 968362 - DNA, 120 bp, Artificial Sequence
  ENSG00000260440_29 (sequence is synthesized)
gcaggccccttccccgcccggcctctttctctactctttttgtttatttttattccccagtctctcatctctcacctatacagtcaagtttccagcctctctttccacccactgttcagc

SEQ ID NO: 968363 - DNA, 120 bp, Artificial Sequence
  ENSG00000260440_30 (sequence is synthesized)
catcagtcagcctaaacattctactttctgcctttctccccacaagcaactttgtttgcagagaacccacagagtttgacatgttgtctgcagactctctgtccacaggctgcaggtgta

SEQ ID NO: 968364 - DNA, 120 bp, Artificial Sequence
  ENSG00000260440_31 (sequence is synthesized)
gtggagcccgctccagactgagacagaggcccaggtttttaccaggctgtgctgctgccagcctggtgtgactacccatcccacccccttcgatacctgtgcctcagtttctcccatgga

SEQ ID NO: 968365 - DNA, 120 bp, Artificial Sequence
  ENSG00000260440_32 (sequence is synthesized)
taatggagtgggactcaatgggagtaacagactccaagaacatgaatgggggtgagcagggaccaccaaacacgtcctctgcccatctcatgtccgacccactcacctcccaagtaacag

SEQ ID NO: 968366 - DNA, 120 bp, Artificial Sequence
  ENSG00000260440_33 (sequence is synthesized)
gcacaacttcaccaaatctgtggccccccaactgggtggataaggccaggacttgcttctgatttgcacagcacatccccccagcattggaataaaagctgctcaggatggccctcgaga

SEQ ID NO: 968367 - DNA, 120 bp, Artificial Sequence
  ENSG00000260440_34 (sequence is synthesized)
taaggttttcagagctctagggatccagacccaaaactgcgggacctctgaggaagcacaggttcctgcactgaaggcagagcactggccatctattttgactctaaatatttggaggaa

SEQ ID NO: 968368 - DNA, 120 bp, Artificial Sequence
  ENSG00000260440_35 (sequence is synthesized)
ttctgcgagctgttttgtaagctgcactgaggtaatgctgtgtcatggaaaccagtgcaggcaagatttctagggagaggcagtgtttacccttgttacatggactagaggtcagcaaaa

SEQ ID NO: 968369 - DNA, 120 bp, Artificial Sequence
  ENSG00000260440_36 (sequence is synthesized)
gcagaagcccctcaagagcgtgcgcagagctgcagaggtaagctggcaggtcccaaccagtctccagcaaatttggccatgaaatgaggaatccctgggacctccgtttttcttggccat

SEQ ID NO: 968370 - DNA, 120 bp, Artificial Sequence
  ENSG00000260440_37 (sequence is synthesized)
gtcccttgctgggcacctatatgcgtgatcttatttcagcttcatgattcttgcaggcatcattatcaatgtttttgttgctgttttaactggcggggtgggcggggagagaggggaaat

SEQ ID NO: 968371 - DNA, 120 bp, Artificial Sequence
  ENSG00000260440_38 (sequence is synthesized)
cacgttcccagagacatatagctaaagagaaagtgaagatttgagcctgacaccagccatgcttttcctgacattcctggcagtgtgaaaggaaggacagcaatatggttttcttgaagg

SEQ ID NO: 968372 - DNA, 120 bp, Artificial Sequence
  ENSG00000260440_39 (sequence is synthesized)
ggtaacaagtttcagcaaataattttgcttatatcttacgagagaggcatggatgtttgctgggagggaaaggagctagtagcaagtggaagaggaaagactccaaaaccaagaggaggg

SEQ ID NO: 968373 - DNA, 120 bp, Artificial Sequence
  ENSG00000260440_40 (sequence is synthesized)
ctcttctctcccagagttgaggggggaaggatgggagggaggtaaaggtcagaaatctctctttatttggaatggtttgcacagcggctcacaatcggagcttccctctgcctcagacag

SEQ ID NO: 968374 - DNA, 120 bp, Artificial Sequence
  ENSG00000260440_41 (sequence is synthesized)
gcctcttctctaacaggtgtaatgcagtgatgttttcctttggcttccttgctgagtcatgactagatttgcctgggaaagctcagatattactgattcagtgttcattcctttttcctc

SEQ ID NO: 968375 - DNA, 120 bp, Artificial Sequence
  ENSG00000260440_42 (sequence is synthesized)
cttaccaccagccttcaacactccatatgacgccttcaataggaagggaggaagataaataacatggaaacagagagaatcacctggaccaattttggtattaaaaaacctggaaaaagc

SEQ ID NO: 968376 - DNA, 120 bp, Artificial Sequence
  ENSG00000260440_43 (sequence is synthesized)
tcaataggaagggaggaagataaataacatggaaacagagagaatcacctggaccaattttggtattaaaaaacctggaaaaagcattacatgtttgtctttaatttttctgccctcaga

SEQ ID NO: 968377 - DNA, 120 bp, Artificial Sequence
  ENSG00000260440_44 (sequence is synthesized)
gtgaatcttggtcatcgttacagaactgtagagctccaagatgataccttttatttctaaggatcctgcatgcagtgtgagaagctggctgacgttgctagctccacttcaaaggtaaag

SEQ ID NO: 968378 - DNA, 120 bp, Artificial Sequence
  ENSG00000260440_45 (sequence is synthesized)
aaactgagtcaggcagagagagcaccagatctgtctgagctcagtggaggcgaacaatcagagactcgactgaataacagcctcagaaaaaggatgcagtttagtcttccagctacgggc

SEQ ID NO: 968379 - DNA, 120 bp, Artificial Sequence
  ENSG00000260440_46 (sequence is synthesized)
taaggtgtcttattttttctagagtaataaaaatcagaattttaaagtatattcccttacttaccctggagggctcaagaactctttcttcttgctttttatgactccgattttacctgt

SEQ ID NO: 968380 - DNA, 120 bp, Artificial Sequence
  ENSG00000260440_47 (sequence is synthesized)
agaagtaagtggcactataaatcccaaacagcttcctacctgctgttcttccctagtgaggcttgaagtgattactagatatggtttcaggctctgcaaaatgataggaaacttagggag

SEQ ID NO: 968381 - DNA, 120 bp, Artificial Sequence
  ENSG00000260440_48 (sequence is synthesized)
tttgctttcttctcagatttaccaggaagagagggtaatttaaatggcatttcattatctcaaaagagatgacaataaatatattcttctgttactgagaacagacaagtaatttctatt

SEQ ID NO: 968382 - DNA, 120 bp, Artificial Sequence
  ENSG00000260440_49 (sequence is synthesized)
gtcacagttgaaactcatctcttccttaacaatgggtggaggtagagaggagaggaattcagaaccctacagaccctaatgcccatgaaacccccctcatgcttgaccactttagaggct

SEQ ID NO: 968383 - DNA, 120 bp, Artificial Sequence
  ENSG00000260440_50 (sequence is synthesized)
gtctccccactaccagatgggaagaaactggttgacaatctgcaagttgtcttaaagaggacagcacctgctccaggccccaagttattaagaagtacacgttaaaccagaatctcatta

SEQ ID NO: 968384 - DNA, 120 bp, Artificial Sequence
  ENSG00000260440_51 (sequence is synthesized)
cggctgtcagaattataatgattgacagctggaaaatcttatcatgcatttccgcaggattgcagcaaagctttgattagcatttaggcattcacatttgcagaagcagcatttttattt

SEQ ID NO: 968385 - DNA, 120 bp, Artificial Sequence
  ENSG00000260440_52 (sequence is synthesized)
gctcttaaataattttttataacactcagacccagcactgaaatgctatagtgtactgatgaggaggctggtgccacacaaaaccaagatgggctttgttttgtttctcctcaatattat

SEQ ID NO: 968386 - DNA, 120 bp, Artificial Sequence
  ENSG00000260440_53 (sequence is synthesized)
cctggctagcatgaccctggtttcccatctcttggataaagaaggagctgaacagaagttattcagcttgtgatttgcgccaggagatgacacagacttgctcttgacctctaaaaagca

SEQ ID NO: 968387 - DNA, 120 bp, Artificial Sequence
  ENSG00000260440_54 (sequence is synthesized)
cttccaaattctcaagtgtaatagaaatgaacagcacagaggatggttttaagataaataaatcaaagtgccatcttaatttacaaccaagaaggggcatgtctatacattagactaaat

SEQ ID NO: 968388 - DNA, 120 bp, Artificial Sequence
  ENSG00000260440_55 (sequence is synthesized)
aaaaccccatggttacaagaaaattagcatatggccagtaaaggtattttcatataatctcggcttaatatttaaagtcattggtaactaatggtgaaaaatgagattttttttccccaa

SEQ ID NO: 968389 - DNA, 120 bp, Artificial Sequence
  ENSG00000260440_56 (sequence is synthesized)
aactactcctactggcagagaatatggtactattgtatcataaaggctatgagctccacttattgccatagtttttggaaatagtaattgtgttggtttttagctattgcttcccagatc

SEQ ID NO: 968390 - DNA, 120 bp, Artificial Sequence
  ENSG00000260440_57 (sequence is synthesized)
caaatccactattccatactgtgctttatgattctggcattgggatgccataaatgtcatttctcctttttctatgctgctaactgatatagagagttttattttcctgatgcctattgc

SEQ ID NO: 968391 - DNA, 120 bp, Artificial Sequence
  ENSG00000283662_0 (sequence is synthesized)
agccactggagctggggagagcagggagccgggagagccgccagtcgcagccgagccgggaccgggactccaggggtcagaacttttctcgaggacagcgtgggcaccgtgccagcctca

SEQ ID NO: 968392 - DNA, 120 bp, Artificial Sequence
  ENSG00000283662_1 (sequence is synthesized)
cctggcccttgcccgtctttcagctgcaggtcccaaccctctctcctggaggccacccatgccactcaccccagccgaggagaacaaactttcttagggaaggcacctctgcggccgtgc

SEQ ID NO: 968393 - DNA, 120 bp, Artificial Sequence
  ENSG00000283662_2 (sequence is synthesized)
tggctggaccaggaggagcagacggctggacagacagggggactggggcacgggacacctgcaagcctgccctcctagtcctgcctctgacagacagccacagagtgggcagccggaggg

SEQ ID NO: 968394 - DNA, 120 bp, Artificial Sequence
  ENSG00000283662_3 (sequence is synthesized)
cctagggctccacaggggcagttgggggggcactcccagacctccgtctgcccaccagccacctcggaatccaggtggctggacaccgcttcgcacggcccagccccgtggctggaaccc

SEQ ID NO: 968395 - DNA, 120 bp, Artificial Sequence
  ENSG00000283662_4 (sequence is synthesized)
ccacgggtcaagacaggagcccccgccagacagagcccccggctcctccacccaccgaggcgacgggcaacctgagtgagaaggcacaggtggcgggcgggcaagtgcagagccctgaag

SEQ ID NO: 968396 - DNA, 120 bp, Artificial Sequence
  ENSG00000283662_5 (sequence is synthesized)
ccgacgggctgctgaccctggagcgccctggctcggggactcctgcccaggctggcgatgatgctgcggaggccacccctggccacccctgccctgtcctggagctgcctccggcctggc

SEQ ID NO: 968397 - DNA, 120 bp, Artificial Sequence
  ENSG00000283662_6 (sequence is synthesized)
ccatgggctgcggagtcgatgatgtgccggccttctgcttcgtctgcttccacagggaggaggaagaggagctgctggaagaagtcccattgcggagacctgatgatcccaaaggatttg

SEQ ID NO: 968398 - DNA, 60 bp, Artificial Sequence
  ENSG00000283662_7 (sequence is synthesized)
gaagtcccattgcggagacctgatgatcccaaaggatttggattctagaaaaaagacaat

SEQ ID NO: 968399 - DNA, 120 bp, Artificial Sequence
  ENSG00000283662_8 (sequence is synthesized)
tgcggtgaggcaagatcgtgccattgcactccaggctgggcagcagagcaagactctgtcaaaaaaagaaggaaggtaggaaggcaggaaggaaggaaagaagaaaggaaggaaggaagg

SEQ ID NO: 968400 - DNA, 120 bp, Artificial Sequence
  ENSG00000283662_9 (sequence is synthesized)
gcggggagagaaaaagaaagaaaggagaagagaagagaagaaaagaaaagagaaaaaagacaatctagacagaggcaggaggccgacaagttaagaactgaaacaatattctcaatggta

SEQ ID NO: 968401 - DNA, 120 bp, Artificial Sequence
  ENSG00000283662_10 (sequence is synthesized)
aagtgtgtttcatttggcccattcaatatttccgaattttgggaattcgtttcaaacatttaaaagttggaagatttctggatgtcctgcttctctttgaatatcatccagccacgcaca

SEQ ID NO: 968402 - DNA, 120 bp, Artificial Sequence
  ENSG00000283662_11 (sequence is synthesized)
gcccacgatgtctccagttcccctcttctccaccctctctatcactttacatgcgaccccagtcgctcatgtctgcgcctgtaggtacttgcgtttgcaatccctggctcctaaagctct

SEQ ID NO: 968403 - DNA, 120 bp, Artificial Sequence
  ENSG00000283662_12 (sequence is synthesized)
tggctcctaaagctctggaaacagtcgggagtggctgggaggattacgctgggttgagaaaacagcctgatcaaaaacttagaagaaataggggcagtcataaaaaatgatgagttcatg

SEQ ID NO: 968404 - DNA, 88 bp, Artificial Sequence
  ENSG00000283662_13 (sequence is synthesized)
tgaaaaagaaatgcttttgaagcttgaagctaaaaaaacaaaaaaaaaagaaagaaatagggaaggcgtcctattggggctttctcac

SEQ ID NO: 968405 - DNA, 120 bp, Artificial Sequence
  ENSG00000283662_14 (sequence is synthesized)
agaaagaaatagggaaggcgtcctattggggctttctcactagggaaagagtgagctgcagggaggagaaagaacagggcctggaaggacgagctgtccctatctcatctctgtccccat

SEQ ID NO: 968406 - DNA, 120 bp, Artificial Sequence
  ENSG00000283662_15 (sequence is synthesized)
ccacccacttcatccaggccaccaatttccggttatcaaacagacaatgcaacatcccttacacctgctgtacctctgcctagaatctcctttcttcccttctatccggcgagcagttcc

SEQ ID NO: 968407 - DNA, 120 bp, Artificial Sequence
  ENSG00000283662_16 (sequence is synthesized)
tcccagctgcactcctggactagtcactgcctatttgcagcagggatcgcaaaggcgacctcagttggatagggcaaccacccaggcccaagtttatgacctcttccccaagaagactgt

SEQ ID NO: 968408 - DNA, 120 bp, Artificial Sequence
  ENSG00000283662_17 (sequence is synthesized)
gatggatggatggatggacggacggatggatggatggatggaagcgcaggcaggcaggcggacgcatggatgaatgaaatgcatatccgaatgcagaacctggatttgttttccctcctt

SEQ ID NO: 968409 - DNA, 120 bp, Artificial Sequence
  ENSG00000283662_18 (sequence is synthesized)
gcatatccgaatgcagaacctggatttgttttccctccttcaaacacacacaggctccgccccactagcacagaccgggacagtctggggcagtctcgtcccgcagggcccagaaagctg

SEQ ID NO: 968410 - DNA, 120 bp, Artificial Sequence
  ENSG00000283667_0 (sequence is synthesized)
gaggcccccacctcctgctgctgctgctgctgccgccgccgccgccgccgctgctgctttgactattcctcctttgtagatgcttcacgtccgccttgattgagggcaaggcttccggca

SEQ ID NO: 968411 - DNA, 120 bp, Artificial Sequence
  ENSG00000283667_1 (sequence is synthesized)
gatgactcagaaccgttcgattgctctggcttgtgcaatccctgattctttgggcctgtgtggatgtctgtgggcaccggagagagggccagtgcctggtccttggagggtggtttttat

SEQ ID NO: 968412 - DNA, 120 bp, Artificial Sequence
  ENSG00000283667_2 (sequence is synthesized)
aaaaagtgtacacattggctattgtccttttttcaccgttgattcacgtttgactccactgtagttagacgtccacccaaacattctctgaaattgctcctgataaggatactaatcatt

SEQ ID NO: 968413 - DNA, 120 bp, Artificial Sequence
  ENSG00000283667_3 (sequence is synthesized)
ttctaattgccttggccaaaaaatacatcccaggtcttatttcattttgtttgttggcgacatttagccctttcttctttgaccttcccaggatttccagagcacccttcccttctttcc

SEQ ID NO: 968414 - DNA, 120 bp, Artificial Sequence
  ENSG00000283667_4 (sequence is synthesized)
tgactcctttgcttggtatcctgattcctttcctaccattctaagccctcttcttttcattataatatgatcttcttgtatgacctccactatatccataggttcatgtttcaactttta

SEQ ID NO: 968415 - DNA, 120 bp, Artificial Sequence
  ENSG00000283667_5 (sequence is synthesized)
acttatttcttcaaaatctctaacctgtctcgagccgtagatgttacctgtgtactactggacatctctcagaaacctgggtgtgtccctccgcagttcttttaactaaatgatcaacag

SEQ ID NO: 968416 - DNA, 120 bp, Artificial Sequence
  ENSG00000283667_6 (sequence is synthesized)
ctctatcatgtctcatgtctctcctaaacaattaattttcctacctacagttctgatccatgccaacctattgcctactctgaagttcaggtccctctggctgcaacatggagtatattg

SEQ ID NO: 968417 - DNA, 120 bp, Artificial Sequence
  ENSG00000283667_7 (sequence is synthesized)
taggagggtaccattgcctgcagtgaggcgttaaggacgcagcatggatgagagatgaggaaagctgaaatgaaacagaggcaggagaaatggagaggaggacatggccttgaggaattt

SEQ ID NO: 968418 - DNA, 120 bp, Artificial Sequence
  ENSG00000283667_8 (sequence is synthesized)
ccaggacataaatttggcatcacttcttggaccatgagaggaagagggagcaggaagaatcaaagatgaatccaagaatgaacaaatctaatttttgaaataatgcaatgaaaagtagaa

SEQ ID NO: 968419 - DNA, 120 bp, Artificial Sequence
  ENSG00000283667_9 (sequence is synthesized)
ctggtctgttttcctaggagaggatggtgaaatagaggtagtttgtgtgatttgcccagagtcccatgaagaattcacagaagaattgagactacagtcagtatggccacattcccagag

SEQ ID NO: 968420 - DNA, 120 bp, Artificial Sequence
  ENSG00000283667_10 (sequence is synthesized)
aactgctttttctgccataccctgtggtaataatattgtcacaagacaattggacagtgtttcacatattcagtgatggaagaagagtttaattgaaataaataaatgtcaggaaaaatt

SEQ ID NO: 968421 - DNA, 120 bp, Artificial Sequence
  ENSG00000283667_11 (sequence is synthesized)
aattcgattgtgataacacttaaggaatggagtgttcactctctaggagaagttgggctaaatgatgaaatggagtgtccgtgtatgtgatctgtggtgctgttttgctgtagttaattc

SEQ ID NO: 968422 - DNA, 120 bp, Artificial Sequence
  ENSG00000283667_12 (sequence is synthesized)
ctatttttaacttgaaatgtgttctgactgcgttagtgccaatttttttgagaccggtgtacctatcctatcaggtacattcgatttacacaagtacattctcttttcagttctcccacc

SEQ ID NO: 968423 - DNA, 120 bp, Artificial Sequence
  ENSG00000286856_0 (sequence is synthesized)
actttcagcagtctggttgccgagggtgagctcgctggcagaggaacttgcgccttccaactcttaggtttgttgcgttcgggtcgcagtcgactttaatgggaaccaagcaaagcaccc

SEQ ID NO: 968424 - DNA, 120 bp, Artificial Sequence
  ENSG00000286856_1 (sequence is synthesized)
gtcagcacatctggagtgtaatggatgagccgtgccctggaaaaaccacctttgtgattgtgatagctcctctgccaggacctcaggaatctgtaactaagcaccatggaactccaaaat

SEQ ID NO: 968425 - DNA, 120 bp, Artificial Sequence
  ENSG00000286856_2 (sequence is synthesized)
gcttttggtcctggaaaggtgaagaccttgatcctagctatttagcatgaattacacactatccttaatctcaacagatttgtgaaaagacacaaaaagtaatgaggaccaaaaaaaaaa

SEQ ID NO: 968426 - DNA, 120 bp, Artificial Sequence
  ENSG00000254020_0 (sequence is synthesized)
gaagacagaaataaaactaaaagctaattctctctggacttggaaaggaaggagtatcagagaagcagagaagagaaaaaagcttagaaagcaggaaagaagctgaaagcatttggaaga

SEQ ID NO: 968427 - DNA, 120 bp, Artificial Sequence
  ENSG00000254020_1 (sequence is synthesized)
atgaaattcaccttcatatttacagggaccagcacagcctctagaacagaatgggtgctcaaatcaatatttctttaaaagaataaatgaatgaataaataaatgaatgcaagtggaaga

SEQ ID NO: 968428 - DNA, 120 bp, Artificial Sequence
  ENSG00000254326_0 (sequence is synthesized)
atgtactggacctggaggatcctcttcttggtggcagcagcaacaggtgtccactcacaggtgcagctggtgcagtctgggcctgaggtgaagaagcctggagcctcattgaaggtttcc

SEQ ID NO: 968429 - DNA, 120 bp, Artificial Sequence
  ENSG00000254326_1 (sequence is synthesized)
aacaccaacactgggaacctaacgtatgcccagggcttcacaggacggtttgtcttctccatggacacctccgtcagcatggcatatcttcatatcagcagcctaaaggctgaggacacg

SEQ ID NO: 968430 - DNA, 120 bp, Artificial Sequence
  ENSG00000259321_0 (sequence is synthesized)
gattatccaactgagtggacaaagatgggcaagtggcctgcggggatcgggcctgctggatgcttgatgcacgactgcttgatgcttgagtgctgtgggagacaggtgctcagatattgc

SEQ ID NO: 968431 - DNA, 120 bp, Artificial Sequence
  ENSG00000259321_1 (sequence is synthesized)
tggtgagagtggaaaccaaaggtggtctttttggaaggtaatttggcataaccatccaaattgaaactgtatacatactatacatatgctgacccagaaattctacttataaagaattta

SEQ ID NO: 968432 - DNA, 120 bp, Artificial Sequence
  ENSG00000259321_2 (sequence is synthesized)
tggtaatcataggacagtgtctgtaataaaacactggaaacaacctcaatgtttaaagtattaaataaattagagtacattcatattcagactatatagctgttacggtagatcttggtg

SEQ ID NO: 968433 - DNA, 120 bp, Artificial Sequence
  ENSG00000259321_3 (sequence is synthesized)
ttaagtgagggagaaacgcaaattacaaaacagtacctctaattgctccatgtatatgattaatatatatatatatatatatatgtcttttcctatatgtatatatataaggaaactgcc

SEQ ID NO: 968434 - DNA, 120 bp, Artificial Sequence
  ENSG00000259321_4 (sequence is synthesized)
tgccttatttttgaagttgctggttgggatttctctgttctttcagcccctgggggacacctcagttaaagcaagatcagtctgttggccgagagtggtggctcacgcctgtaatcccag

SEQ ID NO: 968435 - DNA, 61 bp, Artificial Sequence
  ENSG00000259321_5 (sequence is synthesized)
aatcccagcactttgggagtccgaggcgcgtggatcacctgaggtcaataataaattaaaa

SEQ ID NO: 968436 - DNA, 120 bp, Artificial Sequence
  ENSG00000259320_0 (sequence is synthesized)
tggtagagaaggagacacatttgtgcaatatttaggaagcaaaattgtagagcaggaatggatctgaagtcaatgaaaaactcttcatagctctagttgttgggcttccccagaagatga

SEQ ID NO: 968437 - DNA, 120 bp, Artificial Sequence
  ENSG00000259320_1 (sequence is synthesized)
cattgaaaggaaggtttggatgcaagttgttcatttaggaggagatctcaggaagcacaaagtatttccttgagtcaggacctccaagtcctcccctaactccaggtatgctgggtgctg

SEQ ID NO: 968438 - DNA, 120 bp, Artificial Sequence
  ENSG00000259320_2 (sequence is synthesized)
gagagagccctggacttggagtcaaaagactgcagttggagcagaggatcttccctcagaagttctgctgtgggctgagtcgtttcacctctctgggccccagatggacctttgtaaaac

SEQ ID NO: 968439 - DNA, 120 bp, Artificial Sequence
  ENSG00000259320_3 (sequence is synthesized)
catcacatgctggtaccagagagcaagatgactgaaggggaggaaagagagcatgtgcttgtctcgtgaagagatttcctggaagttacacaaaacatttctgttttcagcttgttgact

SEQ ID NO: 968440 - DNA, 120 bp, Artificial Sequence
  ENSG00000259320_4 (sequence is synthesized)
agaacatagtcgtctgtcatacttagtgtggagggtgaccaaagagggagtgttttgtctgaatagcattgcatccagccagatagcgagggcaagtagctggagggaagaggaagacag

SEQ ID NO: 968441 - DNA, 120 bp, Artificial Sequence
  ENSG00000259320_5 (sequence is synthesized)
acattgtagaggaagctagcagtgactcccccccagattatatcctattaataaaagtaagaacctaatttatgccatgtgcctgggcctcacagggccatcacacctccatgaaacaaa

SEQ ID NO: 968442 - DNA, 120 bp, Artificial Sequence
  ENSG00000259320_6 (sequence is synthesized)
acagaaatgcacagagggaggaccctatgaagactcagagagaagatggccatctgtaagctaaggagagaggcatcagcagaaaccaactctgtggacaccttgatcttggacttccag

SEQ ID NO: 968443 - DNA, 120 bp, Artificial Sequence
  ENSG00000259320_7 (sequence is synthesized)
cctccggaagtgtgagacactgaatttcggtatataagccagtcaatccatggtacatggttatggaagccctagtaagcaaatacaaatttatgtccaaataaactacttgcatgtgaa

SEQ ID NO: 968444 - DNA, 120 bp, Artificial Sequence
  ENSG00000259320_8 (sequence is synthesized)
tgagtggaggcgaggaggtgggtgatgtggaatctctgtgatgcctcggagccataagtgttcatgacactccatgtctgattctcctcaaggggatcttcgtcacttgtggtcacatgt

SEQ ID NO: 968445 - DNA, 120 bp, Artificial Sequence
  ENSG00000259320_9 (sequence is synthesized)
ctacactatgtcacatgaggctagtttttagtaagtgctctctggttggtttctatgatgtaagcttctcttcatgtagctaagagatgatactttaaatggataaaaagggatattttt

SEQ ID NO: 968446 - DNA, 120 bp, Artificial Sequence
  ENSG00000259320_10 (sequence is synthesized)
aaagctgctttctcaaattcatcctggctgcattgctatggaacatggccctggagctggcatttcactgtctattgaccatgcaacctggggcaagggacttaatttcaaacaactcag

SEQ ID NO: 968447 - DNA, 120 bp, Artificial Sequence
  ENSG00000259320_11 (sequence is synthesized)
ggtcaggaagcaactacctcattggactaaatgagagagtccttgcccagaaggagctgggtgcttcttatcctcatgcctctggcactgtgcttcagactccatcctgacacttctcat

SEQ ID NO: 968448 - DNA, 120 bp, Artificial Sequence
  ENSG00000259320_12 (sequence is synthesized)
tctgcactggactcccttggactcccctgaggacaggtaccacagcttactcatccatggtggccatgcttctcacccaagacggcagctcatcaaccacagttgacccataaaacttct

SEQ ID NO: 968449 - DNA, 120 bp, Artificial Sequence
  ENSG00000259320_13 (sequence is synthesized)
gactttgcctttttcccctccttttctcttatgtcccctctgaagcctgttcgccaacctctctgggaattctaatgtctccttcttgccctttttatttaaaattttaggctcagtaaa

SEQ ID NO: 968450 - DNA, 120 bp, Artificial Sequence
  ENSG00000253479_0 (sequence is synthesized)
aggggaaaaaatgaggagtggaaaagctcgatttaacctttaagtacagataactatcagggtatgaaaaggcaagaaaacatgacaaaatgaaaggattattgatgggcaataaaggaa

SEQ ID NO: 968451 - DNA, 120 bp, Artificial Sequence
  ENSG00000253479_1 (sequence is synthesized)
gcgtagtaggtttaccttgagatttcactgagctaatatactggctcccatttctatgtttattgtaggaaaaagagaaaaacactaatccagggatagagctgactagggatgcccaag

SEQ ID NO: 968452 - DNA, 120 bp, Artificial Sequence
  ENSG00000253479_2 (sequence is synthesized)
tcaaaaagactttgtagcactgggcttggcagagggtcctgaagctaaatgcagaaaactgcgggaaatgtcttcaactggggctaaaggtcgtaagcaaggacaatgaacctggaattt

SEQ ID NO: 968453 - DNA, 120 bp, Artificial Sequence
  ENSG00000253479_3 (sequence is synthesized)
ggaggaattcatactccagtgaagaatttccagacccctcatgaaaatagcagattgcctactcaccagagaatactcaagctgaaactaagcagcccctggagggtaagcaaatgatta

SEQ ID NO: 968454 - DNA, 120 bp, Artificial Sequence
  ENSG00000253479_4 (sequence is synthesized)
gaagggtagatttcaggcaagcaaaagggtgagagcccagaatctccatgtgaatgaccctaaaattacaggtaatataggaagtggcttccttgtacctctagaaattgaactctcaga

SEQ ID NO: 968455 - DNA, 120 bp, Artificial Sequence
  ENSG00000253479_5 (sequence is synthesized)
acctgactgacagtctgctcttaagaacattacctcaatctggagagaaatgtgtgtttcctctcctatatggatttcagacagaagcagaaggaggcttagaggttcttcgtcacaagt

SEQ ID NO: 968456 - DNA, 120 bp, Artificial Sequence
  ENSG00000253479_6 (sequence is synthesized)
aactgtgaaaagaaaatggagatgcttcttcaggaggtgcccgtgatgtgatttacttgatgattatggcctgcagggtattgagatgggattatgtaacttaaataaactggatatgag

SEQ ID NO: 968457 - DNA, 120 bp, Artificial Sequence
  ENSG00000253479_7 (sequence is synthesized)
tagagatctgaaagatttttcaaaaacattcagctttacttttttttttctcctaaggaacaagttgttcactcatagagctgaaaaggataaatgaagtgttcagttcacagaagcaaa

SEQ ID NO: 968458 - DNA, 120 bp, Artificial Sequence
  ENSG00000253479_8 (sequence is synthesized)
atatgagtagttcatatatcttttgtaaatgttctatgtatcactgtaaactagacatcttccacatgcccctatgtttttccattttgaaatcaatttctagttcaaacttgtcaatag

SEQ ID NO: 968459 - DNA, 120 bp, Artificial Sequence
  ENSG00000253479_9 (sequence is synthesized)
acaatgaatatttgcaaagttatagtttcactgaattaggatgtaacctgtagctcacaatgaaaatgccattagcttgagtttaaaatttatgttgctatttttttcttttgtcaatat

SEQ ID NO: 968460 - DNA, 120 bp, Artificial Sequence
  ENSG00000253479_10 (sequence is synthesized)
tttccttctgtgggacttattgcacaagggtcggatatcacaactgagggaaactgcagaacaatggttcttccaatcattcagacccatttaagccatagtctttgttggctttgccaa

SEQ ID NO: 968461 - DNA, 120 bp, Artificial Sequence
  ENSG00000253479_11 (sequence is synthesized)
atgactgaatgcttgggtctattagcactgtcaaatagtgttgagtacatacttgtggcataagcaagttaatatttatagggagcacttttgcatgtcttttaagtcacatactaattt

SEQ ID NO: 968462 - DNA, 120 bp, Artificial Sequence
  ENSG00000253479_12 (sequence is synthesized)
aacagatattctagtttaaaaatgttaatttagtgattagaaaccgctgtatatattattacatatattgtctaacaattgaagataattatgtttattaattgcaaataacaggacaca

SEQ ID NO: 968463 - DNA, 120 bp, Artificial Sequence
  ENSG00000253475_0 (sequence is synthesized)
ggtattttaaaatatttggtagtcacttaaaatgcataatgacagacaatagggtgtcataatatggtttattaatcttttttcattttccactagatgtggcaactacatagttggaag

SEQ ID NO: 968464 - DNA, 120 bp, Artificial Sequence
  ENSG00000253477_0 (sequence is synthesized)
ccgcgctggacgctgagaatgtgcggaaggatcctgaggggaggacgcgagacagcgcgaggagagacgaggagagttagggttggccgggagggtgcgaagatgaagcgaccactggag

SEQ ID NO: 968465 - DNA, 120 bp, Artificial Sequence
  ENSG00000253477_1 (sequence is synthesized)
gctgtgagggtgaaaggagcaagaatcgtctagagacgggctgggccggtgctggggccaaaggcttctgtctgtcaggccctttttggcgctcactctagaaagaagaggcggagacgc

SEQ ID NO: 968466 - DNA, 120 bp, Artificial Sequence
  ENSG00000253477_2 (sequence is synthesized)
gaagagatcggagttcaacaatttttatgaatttctaatccaacctcatcatcctatgggaaacagaagaccaccaagaacagccagctgagacagaatttcactgtgttgcccaagcca

SEQ ID NO: 968467 - DNA, 120 bp, Artificial Sequence
  ENSG00000253477_3 (sequence is synthesized)
caagcgatcctcctgccttggcctcccactgtgcctggcctatggactctgaatttttttaaaagactggaaaaaacttttataagagaattggaaatttggacaatggaatctcattct

SEQ ID NO: 968468 - DNA, 68 bp, Artificial Sequence
  ENSG00000253477_4 (sequence is synthesized)
gactggaaaaaacttttataagagaattggaaatttggacaatggaatctcattctgtcaccaggctg

SEQ ID NO: 968469 - DNA, 120 bp, Artificial Sequence
  ENSG00000253477_5 (sequence is synthesized)
aggtatcttggcagtaacctcctccatatatttccttggccctcagcttacatctagcaaaatgactctactggttccaggcttcacatgcatacaacatggtgttggaggaacagagat

SEQ ID NO: 968470 - DNA, 120 bp, Artificial Sequence
  ENSG00000253477_6 (sequence is synthesized)
ggaggggctggaagatggcggcggacgcacacccacccgaccgcgacagagcttaggcccctagcccgcgccgccgcccgctgctcgcagccactgtgggcagccctgctctgtcccgcg

SEQ ID NO: 968471 - DNA, 120 bp, Artificial Sequence
  ENSG00000253477_7 (sequence is synthesized)
gcacctgtgcacggccatattggattctgtgccccagtcactgcctcagcgcggcgggaaaggagaggagttcaacaatttttatgaatttctaatccaacctcatcatcctatgggaaa

SEQ ID NO: 968472 - DNA, 120 bp, Artificial Sequence
  ENSG00000253477_8 (sequence is synthesized)
cagaagaccaccaagaacagccagctggtatcttggcagtaacctcctccatatatttccttggccctcagcttacatctagcaaaatgactctactggttccaggcttcacatgcatac

SEQ ID NO: 968473 - DNA, 77 bp, Artificial Sequence
  ENSG00000253476_0 (sequence is synthesized)
atcaaagttcttcagctttgggactcagactggctttccttgctcctcagcttgcggacggcctactgtgggacctt

SEQ ID NO: 968474 - DNA, 120 bp, Artificial Sequence
  ENSG00000253476_1 (sequence is synthesized)
ttatactttaaagtgtactcccttctctatcctatcatgaggactggacagcctccacagagatggctggacaaagcaagggaatttacttaggtaagacaccatttctctttactctga

SEQ ID NO: 968475 - DNA, 120 bp, Artificial Sequence
  ENSG00000253476_2 (sequence is synthesized)
aatccctgcaaatgtagttattccagaggagactgtgcaatgactgatgggtttagcatcctacatgaggggaaattgccattcccagctgtaaaatgaacaaatatccagttatttttt

SEQ ID NO: 968476 - DNA, 120 bp, Artificial Sequence
  ENSG00000253471_0 (sequence is synthesized)
agacagctgggacccgcggaatttgaggcgcgcgctgggatcttacgtgcgcagaggccggaccgcagagtagaagaaacgtttgaatgggaatgggagaggagagcagaaatgggaagg

SEQ ID NO: 968477 - DNA, 120 bp, Artificial Sequence
  ENSG00000253471_1 (sequence is synthesized)
ccagagcagtaacgtaattaaacattctcaatccacaaaatgactgcaaagcagataaccagagtcctgatgattaactgccgtcagtggaactgcctgtttttcctcaagtggatcttt

SEQ ID NO: 968478 - DNA, 120 bp, Artificial Sequence
  ENSG00000253470_0 (sequence is synthesized)
gttgccgctgccacacagcaattaccatgcagaaaaaggagttgagaagggagtagcctctgatatgtagtcagcatgaatcagccttaggttccctgcctccatacccaattcttctgc

SEQ ID NO: 968479 - DNA, 120 bp, Artificial Sequence
  ENSG00000253470_1 (sequence is synthesized)
ctcattatgattccactatgaggcatccagagtagtcaaacttataaagacagaaagtagagctgtggctgccaggtgggtggaaggagagagaagtagttattgcttaatgagtaggaa

SEQ ID NO: 968480 - DNA, 120 bp, Artificial Sequence
  ENSG00000253470_2 (sequence is synthesized)
ggatggtggtgatggtcgtgcaacaatgtgaatgtacttgatgccacataaaaagtggctaacatgaccacatggaaggagagaaaacacctgaacagctccaactgtggcagccatacc

SEQ ID NO: 968481 - DNA, 120 bp, Artificial Sequence
  ENSG00000253470_3 (sequence is synthesized)
agcccagatgccagacagtgaatgaagacgggcatcccattcccagtagaaatgacgtgaagaaccgaaaaaaactcaccgacagccctagatatacacctccaggtgaccaacccagac

SEQ ID NO: 968482 - DNA, 120 bp, Artificial Sequence
  ENSG00000253470_4 (sequence is synthesized)
accaccaacagttagcgctactccagctgaatactccccaacaaaaatctatccttgctatgtgttgcctgaattcatgaccaacaacggtatgaacataataaaatgattgttatttta

SEQ ID NO: 968483 - DNA, 120 bp, Artificial Sequence
  ENSG00000257548_0 (sequence is synthesized)
gacggcccgagccggcacggacggccccaggagattcgtcacggaaacctcgccccaccaaggcggcccctaaagacaaaacggcccgcccgaggcttataggtggaagggacttgcctt

SEQ ID NO: 968484 - DNA, 120 bp, Artificial Sequence
  ENSG00000257548_1 (sequence is synthesized)
gtctcaggtgatgtctgatgaccctgacctgtcttcaggaaaaatcctgttagatcaggtccctgctgaagatgaggaggaagaattactggtgaaaacctgaagtttgaaaaagtaaat

SEQ ID NO: 968485 - DNA, 120 bp, Artificial Sequence
  ENSG00000257548_2 (sequence is synthesized)
gttttgggaaacaaggaagagggaatgaaatctctgttttaaaattttattatttctgttattgcacattcacaattcactatatttcatgcattctttaaagatctaatttttttaatt

SEQ ID NO: 968486 - DNA, 120 bp, Artificial Sequence
  ENSG00000257548_3 (sequence is synthesized)
ggatattgaatatctacaatgtgataactataaaacacctgtaaaacttaaataacaataccatgatacctatatattcaatatctagtttaagcataggctattattaccataacttcg

SEQ ID NO: 968487 - DNA, 120 bp, Artificial Sequence
  ENSG00000257545_0 (sequence is synthesized)
accttgtcgctgtaatccctcaggacccgctcgatagcccctgcttcgccggcccggacgatgtagagggcgcgctcctcatccatggccgcaggtgcgggggagccgcggccgctctgc

SEQ ID NO: 968488 - DNA, 120 bp, Artificial Sequence
  ENSG00000257545_1 (sequence is synthesized)
gcgcccaagccgctgcctccagaaaagaaaagcaagaactgaggctgagaatgtgcacgtggtggtggtaactatgcagacagagtttcctgaggaggagaatgggagaagactaaccct

SEQ ID NO: 968489 - DNA, 120 bp, Artificial Sequence
  ENSG00000257545_2 (sequence is synthesized)
ggaagcaactaccatgtgctacttaatccacacaacgatccagggaggaagaactgtcacctctattttgaagatgaagaaatggacacagagcgcccgacagatgaagaaactgaagta

SEQ ID NO: 968490 - DNA, 120 bp, Artificial Sequence
  ENSG00000257545_3 (sequence is synthesized)
tgggaaggataagcaacttgtccaaggccacacagctggtaagaggtggagccaggatcactaaaaataatcactgaaagggagatccatttaggttcaagacaagggattctcttttgc

SEQ ID NO: 968491 - DNA, 120 bp, Artificial Sequence
  ENSG00000257545_4 (sequence is synthesized)
agaaaattgaggcccaagaggttaaatgacttgctcagatcttggactgaatcctttaacccaggggtccccaaccccagggccagtaccggaccgtggcctgttaggaactgggccgca

SEQ ID NO: 968492 - DNA, 120 bp, Artificial Sequence
  ENSG00000257545_5 (sequence is synthesized)
caagaggatcgactttatagagaatgctccagtgttttgctcctttgcattgatcagaaatccgatattgacaacacaggccctggagacaactacctcatctttaaatgggaataaaaa

SEQ ID NO: 968493 - DNA, 120 bp, Artificial Sequence
  ENSG00000257545_6 (sequence is synthesized)
cagcattttgacttccagtttctggttttctgtatataagaagctttgaagtcaccactccatcctaacaagtaaaaagcaaaacaaactgaaaaatcaacaattcttcttgggttctta

SEQ ID NO: 968494 - DNA, 120 bp, Artificial Sequence
  ENSG00000257545_7 (sequence is synthesized)
agagaggggaggacacagagcaaactgctgccctcaagattggagagacgggtaaatacagggaatcgtggctccctggagcagagactcaggagtgggaactgcctcaggacccagtac

SEQ ID NO: 968495 - DNA, 120 bp, Artificial Sequence
  ENSG00000257545_8 (sequence is synthesized)
tgtggtaggaacacctgaattgtaattgacaagttgtgaaggcttaatgcagacaaggctgagagttaaaaaataactctagggagacccaatcataggggaacccacacaatattgaga

SEQ ID NO: 968496 - DNA, 120 bp, Artificial Sequence
  ENSG00000257545_9 (sequence is synthesized)
gagtaaaggaaccattttgaaatacgctggagcactctgttcttcttaacaaggcctgctttcaggagaagctagttaaccagagcctaatctgctggggtattatcagagcctaactga

SEQ ID NO: 968497 - DNA, 120 bp, Artificial Sequence
  ENSG00000257545_10 (sequence is synthesized)
cttgggagaagggaaatacccaactccagtcagctctagccttccatgcggagaagggaaataacccaacaccagtcccctctaaccttccatgtgaaagaagggaaatatccaattcta

SEQ ID NO: 968498 - DNA, 120 bp, Artificial Sequence
  ENSG00000257545_11 (sequence is synthesized)
gccaactttagccatcctatgacatctaagaggggagggaaaaaatggagaaacacttgtagtaaagttcacagtccagaggcataggcttactaaaggattgagacctaatcacaggac

SEQ ID NO: 968499 - DNA, 120 bp, Artificial Sequence
  ENSG00000257545_12 (sequence is synthesized)
aatagattgcttcccccaccaacaacacgccttaccaccatatgactaaaggtgatttacagcaattccttttttacctggcatatcatgttcggccaccaagaaagaattacaaggcat

SEQ ID NO: 968500 - DNA, 120 bp, Artificial Sequence
  ENSG00000257545_13 (sequence is synthesized)
gctaaaacacaatttaaagaaacagcaaggctcagaaccagacaaggcaaggatgtcagaattatcagaccaggaatttaaaacaactgtgatcaatttgctaagggttctaattgatag

SEQ ID NO: 968501 - DNA, 120 bp, Artificial Sequence
  ENSG00000257545_14 (sequence is synthesized)
attagacagcctgcaagaacagatggaccatgtgagcagagagatagaaatcctaagaaagaaccaaaaagaaatgctaaagatcaaaaacactgtaacagaaattaagagtgactttga

SEQ ID NO: 968502 - DNA, 120 bp, Artificial Sequence
  ENSG00000257545_15 (sequence is synthesized)
tggatttgcaggtgactagacacagctgaagactctctgagcttgtgtagatatcaacagaaacttcaaaaactaaaaagcgaagagaacaaagactgaaaaaccgaacagaacatccaa

SEQ ID NO: 968503 - DNA, 120 bp, Artificial Sequence
  ENSG00000257545_16 (sequence is synthesized)
cgacaggcaatgcctctgaaaaacctacaggtcactgaccgtcattcgtgatgggaagccgtgtgggttcatgatgatgtccggacagatgccagaatcacaaaatggcatgtcttcctg

SEQ ID NO: 968504 - DNA, 120 bp, Artificial Sequence
  ENSG00000257545_17 (sequence is synthesized)
ggggacgatcaagccacaaacacctgggggagagaagatttcatgccacataaagcaagttggcagaaaggaagaatacagtacttaattgggatctccccgctgctatctctatttcca

SEQ ID NO: 968505 - DNA, 120 bp, Artificial Sequence
  ENSG00000257541_0 (sequence is synthesized)
gccccgggagcccagggcagggctcaggccgggtagccctgagaagcagggcccattgaatatgtgtgaaatgcagaacactcagtaaatgggctgtagtggaaatcccgcatctgtgat

SEQ ID NO: 968506 - DNA, 120 bp, Artificial Sequence
  ENSG00000257541_1 (sequence is synthesized)
accggaggggtttgtgtatttctggctgctggtagataagaaccagaaatttctgtgtgctgaaaactagagcacagaaagattggtgcttgttatatgagtttgcttggggacttcccc

SEQ ID NO: 968507 - DNA, 120 bp, Artificial Sequence
  ENSG00000257541_2 (sequence is synthesized)
agttctgtgctcctcaaggcgggaaaccatgcttgccaatcttttggactcatttttaatcggcttggaaatttaatcagaataatgccaggtatggaaaccaccgcctgggattaaagc

SEQ ID NO: 968508 - DNA, 120 bp, Artificial Sequence
  ENSG00000257541_3 (sequence is synthesized)
atcagtgaagatgctgcttaggaggaattcagattttagagaagaaaggaggtcatgagagctcattactggatcactgaactggtgcctcagccatgaacctggtgaagaatgagaaaa

SEQ ID NO: 968509 - DNA, 120 bp, Artificial Sequence
  ENSG00000257543_0 (sequence is synthesized)
cactgtaaatatatacaatttttatttaaagctagaaaaattcttttaaaataaactaaaaaggcagtccataagcttctgttgaatggatgaaaatctctaccataaataaaaacataa

SEQ ID NO: 968510 - DNA, 120 bp, Artificial Sequence
  ENSG00000257543_1 (sequence is synthesized)
gatttggaagaaaacctaagagagtattaacagtagtgactactggggatcaccgagatacagggtattagggatggaaggttcacttttcaatggatctttgggaagtttcaaaacata

SEQ ID NO: 968511 - DNA, 120 bp, Artificial Sequence
  ENSG00000257543_2 (sequence is synthesized)
catgctcaacctttaaaaatttctctaggggaaatcccttctccacatcctataggtgtgcttccttcttcctctccacacacttcactatcaaaacctacattacttccaacagtcgac

SEQ ID NO: 968512 - DNA, 120 bp, Artificial Sequence
  ENSG00000259623_0 (sequence is synthesized)
ccagccctcaaatttactcttaatgctcagttaatataaaggattcctaacagtttacaatgtggttttcttgtttttgttgttgttttggttttttaagatgtgaggtctcaccttatt

SEQ ID NO: 968513 - DNA, 120 bp, Artificial Sequence
  ENSG00000259623_1 (sequence is synthesized)
caatcctcccaccttggcctcccaaagagccacctgtccaatgatttatcctgtttcttaagaactgtctttaccttcttagacattttgtcataccattctagaagtcaaattccaagt

SEQ ID NO: 968514 - DNA, 120 bp, Artificial Sequence
  ENSG00000259623_2 (sequence is synthesized)
tgtcataccattctagaagtcaaattccaagtgcagtgattttttttttccctagtccattatagttaatcttcttgttagtgatcaaataccaaaagagaaaagcacaaccagaaattt

SEQ ID NO: 968515 - DNA, 120 bp, Artificial Sequence
  ENSG00000259623_3 (sequence is synthesized)
tggctatttgctgcaagttgtaggtcttgggctctatactaagaacttgaaatttttaaattagtatccctgcctaggtgaaaagtttttaataaatgtgttgaaaatcaactttaaatc

SEQ ID NO: 968516 - DNA, 120 bp, Artificial Sequence
  ENSG00000259623_4 (sequence is synthesized)
catttaatttagactggagtgggcgtgagaaactgcaagtctatttctacatataaggatatattattatattgtcccatcccaccactacctttttctcaatttctatttctttgtagt

SEQ ID NO: 968517 - DNA, 120 bp, Artificial Sequence
  ENSG00000259623_5 (sequence is synthesized)
tattttagtaaaagccatttggattctgagaagcactaattcttagctgtgataggtctatgcaagtaagacagaatcattaaatgaagctcactaaatgaagttctcatttctctccaa

SEQ ID NO: 968518 - DNA, 120 bp, Artificial Sequence
  ENSG00000259623_6 (sequence is synthesized)
cagactgtgctagcaaacttcgttttcttgattgtatttaaataatttagtatctcactacgataatagtttttaactggaagggtgtgatgtgttttttgttttttgttctcagagttg

SEQ ID NO: 968519 - DNA, 120 bp, Artificial Sequence
  ENSG00000259623_7 (sequence is synthesized)
tcttctgagataattattaccaagtcatttgtggggttgtgtttttttcacatcatgtgacagaaattataactcataagatttaggcataatctggttttaaaaccttgattgaaactg

SEQ ID NO: 968520 - DNA, 120 bp, Artificial Sequence
  ENSG00000259623_8 (sequence is synthesized)
ttgttttttaacttagcaggcagcctaggccatggctgaaaagaaggggtaagtccttcattgcatgatgatgtgtgcaggttttcctgattttctaatttttatttttgaattcacatg

SEQ ID NO: 968521 - DNA, 120 bp, Artificial Sequence
  ENSG00000259623_9 (sequence is synthesized)
tgtaatttcacatcaataacttgtgtttctgaaatatcctaactaacttgttaataaggaaagaaaccagatttgcttaaatctgttcaaggctgacattctgaaattctaaactggaaa

SEQ ID NO: 968522 - DNA, 120 bp, Artificial Sequence
  ENSG00000259623_10 (sequence is synthesized)
taacttcccagagtatttggaaaggttctaagtacaaggatcaggcctaaaatagctccttgggaaagaaatttcctttttgatgagaaaacttaaaatattgtttttggtaatgtaagc

SEQ ID NO: 968523 - DNA, 120 bp, Artificial Sequence; identical to SEQ ID NO: 624632
  ENSG00000259623_11 (sequence is synthesized)

SEQ ID NO: 968524 - DNA, 120 bp, Artificial Sequence; identical to SEQ ID NO: 624633
  ENSG00000259623_12 (sequence is synthesized)

SEQ ID NO: 968525 - DNA, 120 bp, Artificial Sequence; identical to SEQ ID NO: 624634
  ENSG00000259623_13 (sequence is synthesized)

SEQ ID NO: 968526 - DNA, 120 bp, Artificial Sequence; identical to SEQ ID NO: 624635
  ENSG00000259623_14 (sequence is synthesized)

SEQ ID NO: 968527 - DNA, 120 bp, Artificial Sequence; identical to SEQ ID NO: 624636
  ENSG00000259623_15 (sequence is synthesized)

SEQ ID NO: 968528 - DNA, 120 bp, Artificial Sequence; identical to SEQ ID NO: 624637
  ENSG00000259623_16 (sequence is synthesized)

SEQ ID NO: 968529 - DNA, 120 bp, Artificial Sequence; identical to SEQ ID NO: 624638
  ENSG00000259623_17 (sequence is synthesized)

SEQ ID NO: 968530 - DNA, 120 bp, Artificial Sequence; identical to SEQ ID NO: 624639
  ENSG00000259623_18 (sequence is synthesized)

SEQ ID NO: 968531 - DNA, 120 bp, Artificial Sequence; identical to SEQ ID NO: 624640
  ENSG00000259623_19 (sequence is synthesized)

SEQ ID NO: 968532 - DNA, 120 bp, Artificial Sequence; identical to SEQ ID NO: 624641
  ENSG00000259623_20 (sequence is synthesized)

SEQ ID NO: 968533 - DNA, 120 bp, Artificial Sequence; identical to SEQ ID NO: 624642
  ENSG00000259623_21 (sequence is synthesized)

SEQ ID NO: 968534 - DNA, 120 bp, Artificial Sequence; identical to SEQ ID NO: 624643
  ENSG00000259623_22 (sequence is synthesized)

SEQ ID NO: 968535 - DNA, 120 bp, Artificial Sequence
  ENSG00000260683_0 (sequence is synthesized)
ggcaacgtgttccggtcctcttccacatcacggaagatttgctctttcctctttgcgatgaatcttgctgctggtcaccctttgggtccacacagcatttatgagctgtaactttcagtg

SEQ ID NO: 968536 - DNA, 90 bp, Artificial Sequence
  ENSG00000260683_1 (sequence is synthesized)
cgaaggtctgcagcttcatgggaggaaagaacagctccaggcgcgccgccttaagcgctgtagcactcaccgcgaaggtctgcagcttca

SEQ ID NO: 968537 - DNA, 72 bp, Artificial Sequence
  ENSG00000260683_2 (sequence is synthesized)
catcagaaggaacaaactccggacacgcctcctttaagaactggaaaggaacccaccaattccggacgcact

SEQ ID NO: 968538 - DNA, 120 bp, Artificial Sequence
  ENSG00000260683_3 (sequence is synthesized)
aagtcagtgagaccaggaacccaccaattccggacgcacttcctccggactgttggtgcactgagtgatctgaagtgctccctggccaccatgaatgtaagcaggtgaggcaaagtaccc

SEQ ID NO: 968539 - DNA, 120 bp, Artificial Sequence
  ENSG00000260683_4 (sequence is synthesized)
aggcttggcagcagaggctgggctatgcacacactcttagcagccagacagtggacctgggcgtagctacaggtcaggagggcctgcagaacagatgtgcccagtgctgcagagaactcg

SEQ ID NO: 968540 - DNA, 120 bp, Artificial Sequence
  ENSG00000260683_5 (sequence is synthesized)
gccccactttctcctggcctggtagtcagattaggctagagctccgtcagagaaagatggggagcccagggagataggtccctatggccgtattctgctggaggtgtgtggtgcacaaag

SEQ ID NO: 968541 - DNA, 120 bp, Artificial Sequence
  ENSG00000260683_6 (sequence is synthesized)
gccgggatcctggaggtccacagcaacagtggcctgtcccacagtttcttcactcattcattccccaggagcctttccaggctggcaactagccccagcatttgagtatcccatgcaggg

SEQ ID NO: 968542 - DNA, 120 bp, Artificial Sequence
  ENSG00000260683_7 (sequence is synthesized)
atcccatgcagcatctgtgtcacatctccacccacttttggaattttctctccttagatctgtccaaattatgtcggtttactcaaaaccttgctcgctctagggagtggcactgaggaa

SEQ ID NO: 968543 - DNA, 120 bp, Artificial Sequence
  ENSG00000260683_8 (sequence is synthesized)
catttgttccaagctgtggtagacttgaacccgggtctcctaccagagatcagtgctgatttcgatcttcttaaatttgttaagacttgttttgtgatttaacatatcatcatgtgtttg

SEQ ID NO: 968544 - DNA, 120 bp, Artificial Sequence
  ENSG00000260683_9 (sequence is synthesized)
aggaaaatgttcttcctttcctgggtgagaagttctatatacgtctgttaagtctatttggtctatagttttattcaaatcagctgtttctttattggttttctatttatatgttcaatt

SEQ ID NO: 968545 - DNA, 120 bp, Artificial Sequence
  ENSG00000260683_10 (sequence is synthesized)
tctttattggttttctatttatatgttcaattcattattgaaagcacagcaagtgaaggccgtatatcacaggtacttgtttatttttttattttatttttttaaattatactttaagtt

SEQ ID NO: 968546 - DNA, 120 bp, Artificial Sequence
  ENSG00000260683_11 (sequence is synthesized)
tacatgtgtttatttttatccattcagctactctatgcattttgtctggggaacttaatttatttacttttaaagtaattattgataggtgatgacttactattgctattttttattttt

SEQ ID NO: 968547 - DNA, 120 bp, Artificial Sequence
  ENSG00000260683_12 (sequence is synthesized)
tctctttcacagttgttttgttcctctctcttttgctgtcttcctttatttaatgattttacacagtatatatagacttttaaaatttatttgtcttgtttacccatatgtttaatattt

SEQ ID NO: 968548 - DNA, 120 bp, Artificial Sequence
  ENSG00000260683_13 (sequence is synthesized)
tgtgttcttacttccttcatgctgttatttatttctacttggtattgtaaattttcaaaatggttgaatttattttcgcaggtcttctagtgcaggtctgctagtaaagaattatttcta

SEQ ID NO: 968549 - DNA, 120 bp, Artificial Sequence
  ENSG00000259620_0 (sequence is synthesized)
caagacatttaccaatgaaaccttggtgtatatttactaacaaaaccacaaagggatccaccaattgagatcaacatctactggcagatagtgatcagcaaaagctcagaaagagtggta

SEQ ID NO: 968550 - DNA, 120 bp, Artificial Sequence
  ENSG00000259620_1 (sequence is synthesized)
ctgatggagaggataaatgcttacccaaactcacataagttggcatatctgcagggaaacatcacgttagcctttgaggagagaggctatgcagggatccaaacaagaaaatgtgtaaca

SEQ ID NO: 968551 - DNA, 120 bp, Artificial Sequence
  ENSG00000259620_2 (sequence is synthesized)
gcaacaacgagatggaaaaagatgtgaaggatgtgacagtgaatgtgggtcacccccaaggctctttgtggcaagacaacgctggagcttctcctttgcatgaaactgattgatgctgca

SEQ ID NO: 968552 - DNA, 120 bp, Artificial Sequence
  ENSG00000259620_3 (sequence is synthesized)
aggtcctgaaggaagacagatgttttttgttttgttttgttttagtgcagttctccagtaaaaagaaaacccaggcggtgaataaattcagtcttctcctttgggagaagttcacttcta

SEQ ID NO: 968553 - DNA, 120 bp, Artificial Sequence
  ENSG00000276984_0 (sequence is synthesized)
aagaaccaaaggaacggaacctctgcttccaagtgtacggtcaggagcagcgtgttaattaagtgagtcatcttccgtggcagaatcccagggtacatgggaccagacttcgcgaggctg

SEQ ID NO: 968554 - DNA, 120 bp, Artificial Sequence
  ENSG00000276984_1 (sequence is synthesized)
gagctgtacgtgttcatgaggaagatactgcattcaaagaacgaaatcaccagcagctttggcaagaattcaaatttgggctgatgccttcggccggataaaattttcagaagcagtgat

SEQ ID NO: 968555 - DNA, 120 bp, Artificial Sequence
  ENSG00000276980_0 (sequence is synthesized)
cacacaacacacacaacacaatacacaacatacacaaccacgcaatacacacaaaacacacacaacacaacacaacatacataaccacaccacacacaacacacaaccacacaacactat

SEQ ID NO: 968556 - DNA, 120 bp, Artificial Sequence
  ENSG00000276980_1 (sequence is synthesized)
cacacaacacacacaaacacacacaacacacaacacacacaacacacacaaaacacaacacacacacaacatacacaaccacacaacacacaaccacacaacatacacgaccacacaaca

SEQ ID NO: 968557 - DNA, 120 bp, Artificial Sequence
  ENSG00000276980_2 (sequence is synthesized)
accacacaacatacacgaccacacaacacagtgcacacaaacatagcacacacaacacacaacccaacacacaaccacacaatacaccatatggcgcgcacacacacacacacacacaca

SEQ ID NO: 968558 - DNA, 120 bp, Artificial Sequence
  ENSG00000276980_3 (sequence is synthesized)
ggagaccccagggagcagtgcaggtgtccgtggattctgctttcagttaaacccctgatcacttcacctccctgagcctcagttaccttatctgaatatcgggatcatgacggataattg

SEQ ID NO: 968559 - DNA, 120 bp, Artificial Sequence
  ENSG00000276980_4 (sequence is synthesized)
tatgtcatctattctaccgacggcagccagaggacgcctgtgagcacctgagtcagggcccatccctgctctgcctacagccctccatggctcccaccttcctatgcgtcaaagcccaag

SEQ ID NO: 968560 - DNA, 120 bp, Artificial Sequence
  ENSG00000276980_5 (sequence is synthesized)
ctgtcccttccctgccctcccctcctccctctctccccctcgttcactcttctggagccacacgggccatcctccctgttcctccaacacccaggtgcagtcctgccttggcgccttggc

SEQ ID NO: 968561 - DNA, 120 bp, Artificial Sequence
  ENSG00000276980_6 (sequence is synthesized)
acgggctgtgccctcttctcaagaaaaccctcttcttccaaatatccacacagcttgttctctctcctcctttaagtctttgctcaaatgtcaccaatgtctcaattttacaatgaggtc

SEQ ID NO: 968562 - DNA, 120 bp, Artificial Sequence
  ENSG00000276980_7 (sequence is synthesized)
tctctgagtaacctataaagtcgcaaatacccaccctgagcgtcccccctccccgctacacacactcctccttcctgccatgtcctgcaaatgagatttattcatttgataattgcttct

SEQ ID NO: 968563 - DNA, 120 bp, Artificial Sequence
  ENSG00000276980_8 (sequence is synthesized)
cccatcgcctcgccctctattgaacctaaatccctccaggaaggaattgttatgtttgttgagggttttgtcacctgaactcagcacaatgctggtatatagttgggtttaataaaaaac

SEQ ID NO: 968564 - DNA, 120 bp, Artificial Sequence
  ENSG00000276980_9 (sequence is synthesized)
ttactggaagaagcgagaaggatgggaggagagaaggggaaggagggtgttctcatagaattatcatgaggatgtgttgaaatcatacaaggctaggtgcagtggctcacacttgtaatc

SEQ ID NO: 968565 - DNA, 86 bp, Artificial Sequence
  ENSG00000276980_10 (sequence is synthesized)
ccagctgcaagagtccaagaccagcctgggcaacacagccagaccctgtctctacaaaaaagaaaagttaaaaacaaacaaaaaaa

SEQ ID NO: 968566 - DNA, 120 bp, Artificial Sequence
  ENSG00000284391_0 (sequence is synthesized)
aactacatccgaaccccaatgagcagctcccccgggtcctccgcccttaagtttttgtcagtgtcagtctccagcccagggcccagggcctataggttaaaccgctttagctgtccagtt

SEQ ID NO: 968567 - DNA, 120 bp, Artificial Sequence
  ENSG00000284391_1 (sequence is synthesized)
ctcctgggaagagagtgaggatttccggtggcaggctcaaggctgcgtacccaaggctaggggctaggagaaaggggtcagaggctggcgctgggttggggggccagacgctgggtttag

SEQ ID NO: 968568 - DNA, 120 bp, Artificial Sequence
  ENSG00000284391_2 (sequence is synthesized)
agggccgcagctgagagtgtgagagctgagaggttggggctgcagggatggagttgctggaggtcttcagggtgaggttgggaggtgaggggaggaagagactgggcgattgggaaggga

SEQ ID NO: 968569 - DNA, 120 bp, Artificial Sequence
  ENSG00000284391_3 (sequence is synthesized)
cagaaaagtagggatgggggaggaggtacgtgctgagaggtgacagcccggcagtaccgggcagactgggggccctagagctaaggctggtagccagcctgaaagagaggggatggatcg

SEQ ID NO: 968570 - DNA, 120 bp, Artificial Sequence
  ENSG00000284391_4 (sequence is synthesized)
ggaaccaggaaaagtaaggaaatgctgctcgaaaaggcagagtgtaggagagacctgcccggtacacagcggcgtggactcccaggaagaccaggaccaggaccggattgcggcgttcgc

SEQ ID NO: 968571 - DNA, 120 bp, Artificial Sequence
  ENSG00000284391_5 (sequence is synthesized)
tctccgcgcgcctccagcctccccgtgcgtcgcatgctggcacccccgcccaccgcgccagctgcaggtcagactcttcatcctccgtcagctccgcactggccaccttagctgcggagc

SEQ ID NO: 968572 - DNA, 120 bp, Artificial Sequence
  ENSG00000284391_6 (sequence is synthesized)
ggagcgaaaacttgtggaaatcggaccttgccctcggagtcctgagtcaaggacacgagtccccaagcggcacggaaaacaggtggcattcagcaaatacgtcacggcgacgacggatgc

SEQ ID NO: 968573 - DNA, 120 bp, Artificial Sequence
  ENSG00000284391_7 (sequence is synthesized)
ggccctcctcttggggcggccacaaggtggagctacagtgcaaccctgcaccgcgcgcccggcctccggacgcccccgaggtggctgctctcctgcgggcctcccgcgagcctcccgcga

SEQ ID NO: 968574 - DNA, 120 bp, Artificial Sequence
  ENSG00000284391_8 (sequence is synthesized)
gtccttcattgccgcaggattgaagttgacacttctgggccaggcattcggagctcttcaaggccaagcctctgctccctaccactcccatgaattgtctctctcagttacattcagcca

SEQ ID NO: 968575 - DNA, 120 bp, Artificial Sequence
  ENSG00000284391_9 (sequence is synthesized)
cattttattcctggaaacaccctttttcagacttctgggctttacgtgtcctcttccctctgaaggagttcctgttccctgctttgtgcatcttagaagaagactttcatcctctcctgt

SEQ ID NO: 968576 - DNA, 120 bp, Artificial Sequence
  ENSG00000284391_10 (sequence is synthesized)
atgaatccactcctgattctctcccaggcaggaaaatgtttttattgctctgggtttcctgaatcgtctgctgcctaggctctctactaggtggaagtgacttgagagcacagactatgt

SEQ ID NO: 968577 - DNA, 120 bp, Artificial Sequence
  ENSG00000284391_11 (sequence is synthesized)
tcttattgcctagcacagggctgagcaaatgcttatcaacagaatgaactctgccctctctgagtgtccctgcagatggctgcctctttgcagaggctgtcctcacctctaggaaccagg

SEQ ID NO: 968578 - DNA, 120 bp, Artificial Sequence
  ENSG00000285627_0 (sequence is synthesized)
tgttttgttttgttttttttattttttgggggggggcagtggagttagtgggggagacaaggtcttactctgttgcccagactagagtgcaaggacatgatcacagttcattgcaacctc

SEQ ID NO: 968579 - DNA, 90 bp, Artificial Sequence
  ENSG00000285627_1 (sequence is synthesized)
taacaggggtgcaataacatgcccagctaattttttaatttttagtagagacaagggatcttcaaaaagttcgtgtaacatatgttttat

SEQ ID NO: 968580 - DNA, 120 bp, Artificial Sequence
  ENSG00000285627_2 (sequence is synthesized)
acaagggatcttcaaaaagttcgtgtaacatatgttttatgaaaacactatgcatgaatttcaataaaattttgcaccaaaataagctggtactaacttgttataacacatctgaacaag

SEQ ID NO: 968581 - DNA, 120 bp, Artificial Sequence
  ENSG00000285627_3 (sequence is synthesized)
aataagctggtactaacttgttataacacatctgaacaagatgtagtttgaggcactaagaaggataagacattggtttgaaaagcaccctaacagagcaacatgaattctgctaaaatt

SEQ ID NO: 968582 - DNA, 120 bp, Artificial Sequence
  ENSG00000285627_4 (sequence is synthesized)
tggaagaatggtaaaatcactggtgctttacgaaaactttatagaaacaatgcccctaagaaatcagcagtttataaataggataattcattgtaagaagggacaagatgatattgaaga

SEQ ID NO: 968583 - DNA, 120 bp, Artificial Sequence
  ENSG00000285627_5 (sequence is synthesized)
tgaagcctgcagtagcagactatcaacataaattttttaggaaaaaattcatcccgtttgtaacctaaatgtagagatccaatgattaacagcacaaacaacagccaataccatagacat

SEQ ID NO: 968584 - DNA, 120 bp, Artificial Sequence
  ENSG00000285627_6 (sequence is synthesized)
ataaattcattcagcgtatacaaatctaacaaaaaaatttaagttgaacaaactttctgcttgatgggtactaaaaccattgtgctcagatcggccacagacaaaagcagtgccttcaat

SEQ ID NO: 968585 - DNA, 120 bp, Artificial Sequence
  ENSG00000285627_7 (sequence is synthesized)
gcaaattttaaacaagtggcaacaagagcatgtggaatttctttgaaaaattttaacaggagatgaaacatgactttaccagtgtgatcctgaagacaaagaaaaaaacaaagcaatggg

SEQ ID NO: 968586 - DNA, 120 bp, Artificial Sequence
  ENSG00000285627_8 (sequence is synthesized)
taccaagagatgaaagtgatccagttagagcaaaagcaaacccatcaagagcgaaggtcatgacaaaagctttttggaatgctcaaggaatcttgttgactttcaccaccacaaggttcc

SEQ ID NO: 968587 - DNA, 120 bp, Artificial Sequence
  ENSG00000285627_9 (sequence is synthesized)
tgctcattcctctcaaatgggcagttttgctagggtttcaatgggaaatcactgggcatccaccaaacagtgctgattggctccttctgacttctttttgtttccgaaccttaaaaaaaa

SEQ ID NO: 968588 - DNA, 120 bp, Artificial Sequence
  ENSG00000285627_10 (sequence is synthesized)
atttaaagggcacccatttttctttaattaataatgcaaaaaaaagactgcacatactgatatggttacaggacttctttaggagtggactaaatggctagcattattgcttacaaaatt

SEQ ID NO: 968589 - DNA, 120 bp, Artificial Sequence
  ENSG00000285627_11 (sequence is synthesized)
ttcttgaactcgatagagcttatattgagaataaagtttatattttgtatttttatcttttaattccatttttccacaaactttttgaggtcccctcatatctatccaaagataaatata

SEQ ID NO: 968590 - DNA, 120 bp, Artificial Sequence
  ENSG00000285627_12 (sequence is synthesized)
aaaggattttttaattgtaaggttagcaaataatgaaaatagttccgaacattaaaatagtgcttttattaccagaaagtataaggcaccatttaagaattttcaagtaggtcagatgtg

SEQ ID NO: 968591 - DNA, 120 bp, Artificial Sequence
  ENSG00000285627_13 (sequence is synthesized)
gtgactcataaaatttcttacacaaggaaaattttgaatgtttccccaagagctatagtttgcaaatccctctaggactgctatattctcccttaaaaagagagtagcataactaaaccc

SEQ ID NO: 968592 - DNA, 120 bp, Artificial Sequence
  ENSG00000285627_14 (sequence is synthesized)
acacttgccttgcttttgtattcagtcagccctctatatcaatggggttctgcatctgtggattcaaccaacaacagatggaaattatccagatttttaaaattacatctattctgaaca

SEQ ID NO: 968593 - DNA, 120 bp, Artificial Sequence
  ENSG00000285627_15 (sequence is synthesized)
tgtagacttttttccctaaacaatacagtatagtaactatttacagggcatttacattgtatttggtactacaagtaatctagacatgatttacaatatacaggaagatgtgcttaggtt

SEQ ID NO: 968594 - DNA, 120 bp, Artificial Sequence
  ENSG00000285627_16 (sequence is synthesized)
atatgcaaacgctatgccattctctatcaggaacttgagcatccacagattttggtatccatgggaggtcctggaaccaatcccccatggataccaaaggatgactgtattctactcaga

SEQ ID NO: 968595 - DNA, 120 bp, Artificial Sequence
  ENSG00000285627_17 (sequence is synthesized)
acttagaattactgtgcatctctgaatgctctcgctctttcaaaattagccatctagtggttacctgccttatggatggggaataaggctcagaggtagatttctaaacatagaaaaaag

SEQ ID NO: 968596 - DNA, 68 bp, Artificial Sequence
  ENSG00000285627_18 (sequence is synthesized)
ctttgggaggcccaggtgactccgtctctacaaaaaatgcaaaaataagccaggcgtggtggtgtgca

SEQ ID NO: 968597 - DNA, 120 bp, Artificial Sequence
  ENSG00000285627_19 (sequence is synthesized)
tacaaaaaatgcaaaaataagccaggcgtggtggtgtgcacctgcagtcccaactactcaggacactgaggtgggaggatcgcttgagcttaagagttcaaagctgcaagcagctgtgat

SEQ ID NO: 968598 - DNA, 120 bp, Artificial Sequence
  ENSG00000285627_20 (sequence is synthesized)
cgcaccactgcacttcagcctgcagatagcaagatgctatcttaaaaaaagagagagagaaaagtgacaaaaaacagaccctggctctcacaattctctgactcctcattgggagttcaa

SEQ ID NO: 968599 - DNA, 120 bp, Artificial Sequence
  ENSG00000285627_21 (sequence is synthesized)
caatcataagattttgtctttttttttttttaacttttcagtcaagtccagcctagaggtaataaaattctttttgaaagagatatagttcaaattttcaagaagacactcttaacctat

SEQ ID NO: 968600 - DNA, 120 bp, Artificial Sequence
  ENSG00000285627_22 (sequence is synthesized)
tccattcatctttagctaacattattttatgtaacatatctactttcacaaagtctggtccattttttaaaatgatttacctaagaaaaaagaactctagcactaaagaaaatcacttaa

SEQ ID NO: 968601 - DNA, 120 bp, Artificial Sequence
  ENSG00000285627_23 (sequence is synthesized)
ttgcatgcatagtcattccatcaaacctgacatttgttattttacaatactctccagggctttttcattccaaacaggttatgtgtcccaaaggcattctctatggcaaactatgaattc

SEQ ID NO: 968602 - DNA, 120 bp, Artificial Sequence
  ENSG00000285627_24 (sequence is synthesized)
cccattggttgtctagtagttataagcctgtaagttgaacataattaaaccatagcattgtttacctgccttctgttttcctatttaatgattgaaggcttttttcctttccaaattata

SEQ ID NO: 968603 - DNA, 120 bp, Artificial Sequence
  ENSG00000285627_25 (sequence is synthesized)
ttctgtaacttgctgctgcagcaatcatctatctgatttgctaacactataggttcacttgctacagtggacagtattacacaacactattgccaaagatattcctccctcttcctaagc

SEQ ID NO: 968604 - DNA, 120 bp, Artificial Sequence
  ENSG00000285627_26 (sequence is synthesized)
ccccatacttaatccattagtaaataatacatggattttatctcccaaaatatctctcaaattatttccctttctttttctcttccctgccatgatcttagctaaaccaccaatatctct

SEQ ID NO: 968605 - DNA, 120 bp, Artificial Sequence
  ENSG00000285627_27 (sequence is synthesized)
gacctacaatactttgataatcccctaacaggcctccctatcctctactctcatacctgcagtttcctctctttatttagcagccaaagtgctctttcgaacagaaaaatcatgtcactc

SEQ ID NO: 968606 - DNA, 120 bp, Artificial Sequence
  ENSG00000285624_0 (sequence is synthesized)
cagtcactgccccacaactggagccagcaactggttcagaggtggccatgtggcccaacttacatccatgatctggaaagggtctgaaggatctgcgccctgtgttcaaggacgacgctg

SEQ ID NO: 968607 - DNA, 120 bp, Artificial Sequence
  ENSG00000285624_1 (sequence is synthesized)
aaacattcttttctgcgtgcctgatctgaggcctcacaactcaggtgagcaagactgtgtccctttcacatggagaagccgagttccacggaggttgagtgaggagccggcatcacacaa

SEQ ID NO: 968608 - DNA, 120 bp, Artificial Sequence
  ENSG00000285624_2 (sequence is synthesized)
tccagtattcacagtgagaacttggtgggcatcctggaggtaaaacacaaaagtgtgaagaccttctgagactgagcacccaagagttttaaactgtcaagtttgtctacactgagtctc

SEQ ID NO: 968609 - DNA, 120 bp, Artificial Sequence
  ENSG00000285624_3 (sequence is synthesized)
aacaattcatgaattattacatgtttgtatgttgctaaaaatactggcttcatctgtggtcctctgaacctgggctttagtttctagaattgagaataaattgtgattatctgtctttaa

SEQ ID NO: 968610 - DNA, 120 bp, Artificial Sequence
  ENSG00000285623_0 (sequence is synthesized)
ggagggacctggagggacgtgagtgaatcacgggaaggggtttggagggacctggaaggaggatcaacacttaaaggtgactctttgtggcaaggcaggaattcgggatggggctggcgg

SEQ ID NO: 968611 - DNA, 120 bp, Artificial Sequence
  ENSG00000285623_1 (sequence is synthesized)
tgagtggactcggagcccttggacaccggctgttcttgcctccacgcccgtggttcagagtacacgggtggatctccatgccatggttcagagacacgggtggatctccatgccgtggtt

SEQ ID NO: 968612 - DNA, 120 bp, Artificial Sequence
  ENSG00000285623_2 (sequence is synthesized)
cagagcatgcgggtggatctccacgccatggttcagagacacgggtggatctccacgccatggttcagagtacacgggcggatctccatgctgtggttcagagacatgggtggatctcca

SEQ ID NO: 968613 - DNA, 120 bp, Artificial Sequence
  ENSG00000285623_3 (sequence is synthesized)
cgctgcggttcagagacacgggtggatctccacgctgcggttcagagacaggggtggatctccacgctgcggttcagagacgggtggatctccacgctgcggttcagagacgggtggatc

SEQ ID NO: 968614 - DNA, 120 bp, Artificial Sequence
  ENSG00000285623_4 (sequence is synthesized)
gatctccacgccgtggttcagagcacgcaggcggatctccacgcagtggttcagagacacaggtggatctccacgccatggttcagagacacgggcggatctccatgccgtggttcagag

SEQ ID NO: 968615 - DNA, 120 bp, Artificial Sequence
  ENSG00000285623_5 (sequence is synthesized)
cacgcgggcagatcccacacctgcttcgtgtagctcggtttctgaaatgttccaagaagacaacattcagatggttttaaactgtgcacagtatcgatgctgtgaccggctgtgctccac

SEQ ID NO: 968616 - DNA, 120 bp, Artificial Sequence
  ENSG00000285623_6 (sequence is synthesized)
tgtaagatgtggaaagggctgccaagtgagcagatataacttcccagataagccacccaaagtgtttctgagaactgctcgctgtgttgaaaaacaacttcgggaaagaaacttcatctg

SEQ ID NO: 968617 - DNA, 120 bp, Artificial Sequence
  ENSG00000285623_7 (sequence is synthesized)
ccgaagtcgacgtgcctcgtccttggacaatttgtgaagttcagtgattctcagggctgattttgtagggactgtccatcctggaaccgtggaggatcttctgtggaggctcggtgggcg

SEQ ID NO: 968618 - DNA, 120 bp, Artificial Sequence
  ENSG00000285621_0 (sequence is synthesized)
taagtcatgagagtcatgctgctctctcaaacctacatagctacaagtagtgggtatgtgccttgcacacgccacttaacctctcccagccttggaggtctcttccgcctaaagtaggtt

SEQ ID NO: 968619 - DNA, 78 bp, Artificial Sequence
  ENSG00000285621_1 (sequence is synthesized)
ctctcccagccttggaggtctcttccgcctaaagtaggttagtaacggaaatcttttcttggcactaaaagaaagaca

SEQ ID NO: 968620 - DNA, 120 bp, Artificial Sequence
  ENSG00000285621_2 (sequence is synthesized)
cgagactctgtctcaaagaaaaaaaaaaaaggaaaatactatttattaccaagactatgaggacaacaccttgtggccaggaaaggtgcaatccatcattgttttctagttggttgttaa

SEQ ID NO: 968621 - DNA, 120 bp, Artificial Sequence
  ENSG00000285621_3 (sequence is synthesized)
gttgttaagatttctgtgatgaatacaactcaacatcagatctctgccatattgtgtgtcaggcacacagggcaagaaattgaagctgccagccaacagccagagagaaaccaaggcctg

SEQ ID NO: 968622 - DNA, 120 bp, Artificial Sequence
  ENSG00000285621_4 (sequence is synthesized)
ccaacaactagctaccttagcaagaaaatccaagaaaatcaatttgcatctaaaagcgccttcacggagttggcctggttttgtggcaggcatcccagcttgcttagagaaggagaagtt

SEQ ID NO: 968623 - DNA, 120 bp, Artificial Sequence
  ENSG00000285621_5 (sequence is synthesized)
caggttctataaaaacccagcacagccttggcaggcctcctggaatgacttcttgtttcctgaggacccattgatttaacaaactaacaaacgtaaataacagaagctatgaaagaaaca

SEQ ID NO: 968624 - DNA, 120 bp, Artificial Sequence
  ENSG00000285621_6 (sequence is synthesized)
tttgcagcatcagaccttcttctctagaactttcttctgccccatgtggtggtcactgcccagctcaagagatagtcctggagaggacacagaggcaacaaggtccagagacttgcctca

SEQ ID NO: 968625 - DNA, 120 bp, Artificial Sequence
  ENSG00000285621_7 (sequence is synthesized)
gggtcacctcaggggcccttccaatcatgcttcccccagtccccgaagcatcttccagcagccaacatgttggtgaatggggtcctaaaccctgcactgcccaggaactgtgctgtggag

SEQ ID NO: 968626 - DNA, 120 bp, Artificial Sequence
  ENSG00000285621_8 (sequence is synthesized)
tctggccacgttcccttattggggcaggcatgaggcagtgactaaagtgtcctaaagctcccagtgaaggctctgagatggctggaccgcccactgcatccttggccctacagaaagagg

SEQ ID NO: 968627 - DNA, 120 bp, Artificial Sequence
  ENSG00000285621_9 (sequence is synthesized)
gctccatggagcatgcacagaagcagcaaggggcagtgtgacactgggagaggtactaaggagggggcggccttctgatccacgcaaggattcttaaggacctcctggctcaaaacaatc

SEQ ID NO: 968628 - DNA, 120 bp, Artificial Sequence
  ENSG00000260686_0 (sequence is synthesized)
gaaaacaattctaatcaaagaacttctattaagtaaaacaagacaaaatgtgtgtaaaaatatgcctaacacatagatttccttgattgtattttctactgaactattttcaagtattca

SEQ ID NO: 968629 - DNA, 120 bp, Artificial Sequence
  ENSG00000260686_1 (sequence is synthesized)
gctttatactaatatattaatctcaaaatacctttgtttcattgttgctactccttaaacttttttctttattatctagatctagtaaagttttctgcattcattgtattaatgttggtt

SEQ ID NO: 968630 - DNA, 120 bp, Artificial Sequence
  ENSG00000260686_2 (sequence is synthesized)
caaaagtaattgcgtcctttgtcgttatataaattgttttataaatggctttaactatgacataagccttttaacataatcagctttctttaaaggaggaagtcagatgagtagagaagg

SEQ ID NO: 968631 - DNA, 120 bp, Artificial Sequence
  ENSG00000260686_3 (sequence is synthesized)
aaagttatattcctttacaaatgctcttaattttaatgtcttaagggaattatagagacttccattattctgccttaaataagggatgttacttcagttttcttgtcatggctccctgca

SEQ ID NO: 968632 - DNA, 120 bp, Artificial Sequence
  ENSG00000260686_4 (sequence is synthesized)
tgggcagtcatgttaacaagagtcagggagatagcagatattccataatagtgactgcagataggccagtcaaagtcattttgttttaaaggaagggaggttgctggtagttaggtggga

SEQ ID NO: 968633 - DNA, 120 bp, Artificial Sequence
  ENSG00000260686_5 (sequence is synthesized)
aaataacacctgtgaaaaggaagtccaagtcactggctcagggactttggaggcattttcatatcatattcactagtcaagaaacgtgtagattatatgtgtgagtgacatagtctgttt

SEQ ID NO: 968634 - DNA, 120 bp, Artificial Sequence
  ENSG00000260686_6 (sequence is synthesized)
caaagtattagaaaagagacaatagaatcacccaccctcccttcgacacacacttccttatgtaaaatcagaatcaaataattatcattcctaaccctcacagtgaaggatttggtttca

SEQ ID NO: 968635 - DNA, 120 bp, Artificial Sequence
  ENSG00000260686_7 (sequence is synthesized)
tgtaacaatgaaagtagataatgggtcagacatggaaatagcaataaaagggaattacaacaagataaatgtgagtaatagttcattttcctgcatttttgatgagggccatgaagatag

SEQ ID NO: 968636 - DNA, 120 bp, Artificial Sequence
  ENSG00000260686_8 (sequence is synthesized)
gtcatggtaatctatggagaaggtccttaagagcatagaacaatataaatataatatgggccatatatataattttaaaattttctacagccaaatgttaaaaagtaaaaaacaatttta

SEQ ID NO: 968637 - DNA, 120 bp, Artificial Sequence
  ENSG00000260686_9 (sequence is synthesized)
aatattattttaatatgtaatccaatatattgaagttataagatattttacattctttttttgatatctgatgtatattttacactttcatcacatctccattcagaccggctacaattt

SEQ ID NO: 968638 - DNA, 120 bp, Artificial Sequence
  ENSG00000260686_10 (sequence is synthesized)
gatcagttgtcacatgtggatgactagtggctatgataatggacagcataggtttagacaatgcctattcaactattcaacttgttttacatttataaatctcaaaatgcctttatttca

SEQ ID NO: 968639 - DNA, 120 bp, Artificial Sequence
  ENSG00000260686_11 (sequence is synthesized)
ttgttggtactcttttttattacccagatacaataaagttttccaagtttcattgtacacatgaaatgagtttactgtggaaatgaaaatgcagagtaagtccaacagctagtttatcat

SEQ ID NO: 968640 - DNA, 120 bp, Artificial Sequence
  ENSG00000260686_12 (sequence is synthesized)
cctgaacccagtgaagaaatcaaagctgaataaaagcgactcctagttgttactctcaagggcaggtataatttatgtgcaagactttgtagcataatgttttgcaagtagtggatgttc

SEQ ID NO: 968641 - DNA, 120 bp, Artificial Sequence
  ENSG00000260686_13 (sequence is synthesized)
aatatctacaataaatgaattgtagtactatattgcttgaaggaagtttataacctgtctagaacaactttctcaattttacaactaaactaggagatccagggcttaaatcatgattga

SEQ ID NO: 968642 - DNA, 120 bp, Artificial Sequence
  ENSG00000260686_14 (sequence is synthesized)
actgattattcctgttaaatttatgtgtgaaccatatgtgaacattctttgaaaatgtatgataagcatttcaagatttctgttttaattattaacatttagaattctaggaaatctttt

SEQ ID NO: 968643 - DNA, 120 bp, Artificial Sequence
  ENSG00000260686_15 (sequence is synthesized)
gggatacagagaacttatttcttccaactgttgcttcagacgctgataagattgtagaagatagggaagctgtagtttactatctagttttttaatgcacatgaagtaatttaaaatgct

SEQ ID NO: 968644 - DNA, 120 bp, Artificial Sequence
  ENSG00000260686_16 (sequence is synthesized)
cttcttcctttcttgtcacatacttttaaaaaattctctaaagattgaataattttaagtatttcttaactgggcaaaatggaaactttgtaactgaagccagtcaaggtgaatacacag

SEQ ID NO: 968645 - DNA, 120 bp, Artificial Sequence
  ENSG00000260686_17 (sequence is synthesized)
aaaatcattttcttattaaggtcagttaatgggataaaccgttttaagagagttgagaaaaaataaagttctattttaaatttatacatgtaactttaataaaaactaagtcagacaaaa

SEQ ID NO: 968646 - DNA, 120 bp, Artificial Sequence
  ENSG00000274354_0 (sequence is synthesized)
ggcgtcctgctgggcagaggccaggcctaattaagaccctgaataatgcccagctcttgtttctggtttttttccccaccagggatgcagaattaataagagcccaagcaaaccgtgaat

SEQ ID NO: 968647 - DNA, 120 bp, Artificial Sequence
  ENSG00000274354_1 (sequence is synthesized)
ccttttgttggcagaagggtcagtagccacagggggtcggtcctcaggagggaatcagggtgccctggatcctgcagaagtgacaaagcacgacagagggtggcttggcggctgcaccga

SEQ ID NO: 968648 - DNA, 120 bp, Artificial Sequence
  ENSG00000274354_2 (sequence is synthesized)
gtctcaaagactctggcatgatagtaatcagggtacgctggtattagaggggccttgtgtccaggggtggggttctagaaggacactgttctggctcagattctgctcatgagcaagcct

SEQ ID NO: 968649 - DNA, 120 bp, Artificial Sequence
  ENSG00000274354_3 (sequence is synthesized)
ctgtgtcctcttcatgaagtgaaggggattctcacagtttccaggaaatgctcctaaatggcacaggaggatgcctgtgtgcccgtcaaagggtctgggggcttcatccaaattagctgg

SEQ ID NO: 968650 - DNA, 120 bp, Artificial Sequence
  ENSG00000274354_4 (sequence is synthesized)
cccgcaggtgtaatttctttgaagtgtaatattttatagcttttaaattctattgaatgttgtgtcctccttcctttatgactatatttgttttaataaaaaataatgtttttccaagca

SEQ ID NO: 968651 - DNA, 120 bp, Artificial Sequence
  ENSG00000256637_0 (sequence is synthesized)
gagatgccttaagccttggatagaaaaataacacttccccaaaatccagtccagcctgaagctggaaagccttgctcttcaatgacaaagctcgcagtgggaaaactggaaagattgaat

SEQ ID NO: 968652 - DNA, 120 bp, Artificial Sequence
  ENSG00000256637_1 (sequence is synthesized)
gtcctttggagttcacagaggtttggcagtgggaggagaaaaacaaaacgaagcatagtgggagtgttgaacagactttcccaagatccccagatcctgaaattcaagaaaatatttgtc

SEQ ID NO: 968653 - DNA, 120 bp, Artificial Sequence
  ENSG00000256637_2 (sequence is synthesized)
atactttgtctcaagacaaatagaacacagcagactttaataatcaaaacagaaacaccaacatagagaacctaaggaacgaagagaatctgatttccaaagtcaccacattataaaaat

SEQ ID NO: 968654 - DNA, 120 bp, Artificial Sequence
  ENSG00000256637_3 (sequence is synthesized)
caaatgccaatcttcaacaacaacgaaaacaacaaaattcacaagacacataaagaaacaggaaaatggctcattcaaaggaataaagtgattaattggcataaactgtccctgagaaag

SEQ ID NO: 968655 - DNA, 120 bp, Artificial Sequence
  ENSG00000256637_4 (sequence is synthesized)
gcagtaagtgggcttcttggtcactttcagagcctttctttatggttctcactgtggtcttgcagaaagagcttggagggggagggtagttaagacagaagaacaaagctggggggtacg

SEQ ID NO: 968656 - DNA, 120 bp, Artificial Sequence
  ENSG00000256637_5 (sequence is synthesized)
ctttgggcccgaaaccgagagaaaagtgatcctttcattaagacgagtgttcttttgtacctgcactgtatccttttgatgtgttgaggtagaaaggatatgaggaaagaagaaacaatg

SEQ ID NO: 968657 - DNA, 120 bp, Artificial Sequence
  ENSG00000256637_6 (sequence is synthesized)
ggaaggcagtggcttgaattcctgccaccatccccttgataatgaacaagcctaatgaatgtgggtgggaaaactggaaagattgaatgtcctttggagttcacagaggtttggcagtgg

SEQ ID NO: 968658 - DNA, 120 bp, Artificial Sequence
  ENSG00000256637_7 (sequence is synthesized)
gaggagaaaaacaaaacgaagcatagtgggagtgttgaacagactttcccaagatccccaggatcagtggagtgttgctgttctggccataaacctctgtggacagtggctcctttgcca

SEQ ID NO: 968659 - DNA, 120 bp, Artificial Sequence
  ENSG00000256637_8 (sequence is synthesized)
gggttcctaaggacggcccgtctgtcagcaggcaagcaggccctgctagagtgcccagagaagcttgaggtgggaaaactggaaagattgaatgtcctttggagttcacagaggtttggc

SEQ ID NO: 968660 - DNA, 120 bp, Artificial Sequence
  ENSG00000256637_9 (sequence is synthesized)
ctggctgaattatcttacctgggctattgttcacagctagaaccaaatctacaaagctacagtttatctaaagaattctttggaaagaaaactatttcactatccacacatctagatccc

SEQ ID NO: 968661 - DNA, 120 bp, Artificial Sequence
  ENSG00000256637_10 (sequence is synthesized)
acatattggacagcgcaggctgtagcctcagtctctaaagtccagactataaaattaaaaaaaaaaaagttcacagtgtgaaatcatatttattctaaaagtaaagaataaaaccttttc

SEQ ID NO: 968662 - DNA, 120 bp, Artificial Sequence
  ENSG00000256637_11 (sequence is synthesized)
tggccattggtgcataatagcaaaattttgcttgaaactcagccaaagatgccataaactataataaaacgaaagatacctcatgttcatcaaagtatattcacaacgagtagtcaggag

SEQ ID NO: 968663 - DNA, 120 bp, Artificial Sequence
  ENSG00000256637_12 (sequence is synthesized)
actcactactttcacattggaagagatatttctggtaatggccactgaaattcactactgggcttccacattaaaaaattaaagcctgtcaaattccttgggccagggtagaagtaaaat

SEQ ID NO: 968664 - DNA, 120 bp, Artificial Sequence
  ENSG00000256637_13 (sequence is synthesized)
agaaaataaatagctagagttccaaaccattatctgttttaaagattgtgatgtggagcattgaagtgctaatctatattgtaatgccatccaatcttttgaatggagtgcatgtatgtg

SEQ ID NO: 968665 - DNA, 120 bp, Artificial Sequence
  ENSG00000256637_14 (sequence is synthesized)
gactatgctatgtgcaagtgtgacaaaaactcaaaatcagaaaaaaattaattagaacagatcaagttcatataaaactgctatccttctggccgctggagttaaactgaaacattttcc

SEQ ID NO: 968666 - DNA, 120 bp, Artificial Sequence
  ENSG00000256637_15 (sequence is synthesized)
tgtacttgccatatctccacattcatttctccttaccaaaagaagaagtagagaatgtctctcctcgtaaaagtcgtatataaattttagctaacaaccattcagtgttggcaatttcaa

SEQ ID NO: 968667 - DNA, 120 bp, Artificial Sequence
  ENSG00000256637_16 (sequence is synthesized)
gtgttggcaatttcaacttataaaagaatccattaccccaagagccatttacactgggaatgtgaataagaagaatcttgacacacacacaggcaggcacacacacacacacacacacac

SEQ ID NO: 968668 - DNA, 120 bp, Artificial Sequence
  ENSG00000256637_17 (sequence is synthesized)
cctactatgggtcatttaatccagctagttgatgttatctgcttcttaacaaccacaaactcagcaactgtagttattttctacaacattcaattaggggtttagtaatcataaatatca

SEQ ID NO: 968669 - DNA, 120 bp, Artificial Sequence
  ENSG00000256637_18 (sequence is synthesized)
acaaaatagagattttaattaaatttagtaaggcagaaattatacaggtataattatactcttttctaccactgagctatgcagaggtataatcactaagtggagaaattaaagtagcat

SEQ ID NO: 968670 - DNA, 120 bp, Artificial Sequence
  ENSG00000256637_19 (sequence is synthesized)
tctaatagaacttggaagttctatgagatgaattcctatatatttagatactatcccctgaaacttctgcttctgtacctctccatcatcctttaactttatgacaatgatattggctaa

SEQ ID NO: 968671 - DNA, 120 bp, Artificial Sequence
  ENSG00000256637_20 (sequence is synthesized)
aaagaacacctgactgtcctcatgtaaggagaaatctttaatgtaggacattgaggtttcaattttatgttcaatatttatcatttatgctctacatctataaagtgagggagacagata

SEQ ID NO: 968672 - DNA, 120 bp, Artificial Sequence
  ENSG00000256637_21 (sequence is synthesized)
cagagagggagagacaggcatacacacacacatgcacacacacaagcacacacatatatacacatccacacatggttaaaataaatattaaatgttatcccaagacaataagtagaaaaa

SEQ ID NO: 968673 - DNA, 120 bp, Artificial Sequence
  ENSG00000256637_22 (sequence is synthesized)
catttgctcaactagataagagtgagtttcgacaaagaagtaaaggaaatttggaacataatattttatctaaaggagaatatcatcaaacaaagaaattatataaaagaaccacacaaa

SEQ ID NO: 968674 - DNA, 120 bp, Artificial Sequence
  ENSG00000256637_23 (sequence is synthesized)
caacggatttgcagattagtgaactcgaagataggaaaattgaaattattgagtctgaggagcagaagagaaaaaggaatgaataaaagtgaatagaacctaaggaaactgagggacacc

SEQ ID NO: 968675 - DNA, 120 bp, Artificial Sequence
  ENSG00000256637_24 (sequence is synthesized)
atcaagcagatcaaggagaagagagaggtaaaaaagagtggtaagataaataatagccaaataccttccaaatatgaagaaagacatgaatatacagataaaataagcccagcaatacca

SEQ ID NO: 968676 - DNA, 120 bp, Artificial Sequence
  ENSG00000256637_25 (sequence is synthesized)
aattggataaacccaaaaacatctacaccaaagcacattataatcaaattgttgaaagccaaacaatgacagaatcttaaaagcaataacagcaaggcaattcaacaaaataaaagggat

SEQ ID NO: 968677 - DNA, 120 bp, Artificial Sequence
  ENSG00000256637_26 (sequence is synthesized)
gttcaatacaagtatcagccaatttctcatcagaagcctggaggcaagaaggcagagaaataatatatttaaagtgctgaaaaaagccaggcacggtgactcatgcctgtaatccctgca

SEQ ID NO: 968678 - DNA, 120 bp, Artificial Sequence
  ENSG00000256637_27 (sequence is synthesized)
ctttgggagtctgagatgggtgaatcacttgagtcaggagtttgagaccagcctggcaaccatggcaaaactctgtctctactaaagatagaaaaattagtcgggtgcagtggcatgcac

SEQ ID NO: 968679 - DNA, 120 bp, Artificial Sequence
  ENSG00000256637_28 (sequence is synthesized)
ctatttgctttctctgaatctgtatcagttcatgcagttctgccaagtggggaagctttgcaggacactgccactgtagcacttgaaatattaagatgaacagaacaagcaaaaggtggg

SEQ ID NO: 968680 - DNA, 120 bp, Artificial Sequence
  ENSG00000256637_29 (sequence is synthesized)
ctactgggctagttctgctcactcagcctgccaggctgtgctcagcacacactacatgcctggatcccatgtctgccaagggctagtcaggggtggagcagtgaggggtgtgtgagtgaa

SEQ ID NO: 968681 - DNA, 120 bp, Artificial Sequence
  ENSG00000256637_30 (sequence is synthesized)
catgaagtctggccactgcagctgggtgggcagctccaggtgccggcatgggcaccagctctctgtgatgctgtggctgaaccagatgcactgcaagcagcttccacagctggcactgga

SEQ ID NO: 968682 - DNA, 120 bp, Artificial Sequence
  ENSG00000256637_31 (sequence is synthesized)
aaagagtgcagaaaaaacaagttaattcaaggataaaactgtgaataagtagaagagaagactacaccaggaaaagagacggagatagaggcccaatagagatcagtggagtgttgctgt

SEQ ID NO: 968683 - DNA, 120 bp, Artificial Sequence
  ENSG00000256637_32 (sequence is synthesized)
ctatttgctttctctgaatctgtatcagttcatgcagttctgccaagtggggaagctttgcaggacactgccactgtagcacttgaaatattaagatgaacagaacaagcaaaagccaaa

SEQ ID NO: 968684 - DNA, 120 bp, Artificial Sequence
  ENSG00000256637_33 (sequence is synthesized)
agaattacacaaatgtccctctgtgggtcctctgaagatctcggcattccctgtgctgcaaggcgggctggtaaccactagaggggaggagacagccggatttattgaaggcctcaccac

SEQ ID NO: 968685 - DNA, 120 bp, Artificial Sequence
  ENSG00000256637_34 (sequence is synthesized)
agaaactgatggtggggaagctgtcagaggacgagatgccaagcaaaagggtttaagtatattataaaggtccccaaaaatggaaaaaaaaataggcttcttaaagtatgcaagaaattt

SEQ ID NO: 968686 - DNA, 120 bp, Artificial Sequence
  ENSG00000256637_35 (sequence is synthesized)
gcttctaataaatttgaaatgactgggaaggtagttagaatgctagaatgtggttacctgttaacccgtagtcttaagcattagcaagatgatctatgaaatcagagttaacccttatga

SEQ ID NO: 968687 - DNA, 120 bp, Artificial Sequence
  ENSG00000256637_36 (sequence is synthesized)
aaataaatggctctctccttaggcctatagctaatgcacatacaagttaggaaaagtagctataggggaaggatgagggagggaatcaaagatgatttggctgttcagggtaaagtggaa

SEQ ID NO: 968688 - DNA, 120 bp, Artificial Sequence
  ENSG00000256637_37 (sequence is synthesized)
agagaaagagacatcacagatagtaaaatattgatatagtaaacaaagagagagggggcagaggagagaaactttatttaaccttcctgatcattccaaagtacaatatcctaatgcggg

SEQ ID NO: 968689 - DNA, 120 bp, Artificial Sequence
  ENSG00000256637_38 (sequence is synthesized)
taacttaaataaaaaatagtcatccaggatttatgaggtagcatatataccatgtgagcattatttttgttgatttttaaaatccaacttgacctttttaatctttcatttaaaaaaata

SEQ ID NO: 968690 - DNA, 120 bp, Artificial Sequence
  ENSG00000256637_39 (sequence is synthesized)
aaatatacttaatattagtattgttaaagcactataatgtagaactagaggttgttctatgtactctcctgagtgtaattgcactaagatcattcagtttccatttggaaagccagtggc

SEQ ID NO: 968691 - DNA, 120 bp, Artificial Sequence
  ENSG00000256637_40 (sequence is synthesized)
aattactggaatacaatgtatcatgcatttgctcactggatataaaatgtatatactaattcgcaataaaatgtaacagctgtcagtgcattttctgctctgttacttcaataaattgga

SEQ ID NO: 968692 - DNA, 120 bp, Artificial Sequence
  ENSG00000256637_41 (sequence is synthesized)
actctgactagaaaatgggaatattgcatttttacacactctgtaatgtgtttgctttttgcaaatacaatttatttttttcatggcaaaaattgtggtttgttattactgctagtggat

SEQ ID NO: 968693 - DNA, 120 bp, Artificial Sequence
  ENSG00000256637_42 (sequence is synthesized)
aaatattcctatatcagaatgaattacatatggtatctgtaaagaagtagtaatattttctgctttttattgtagcctgtctccagtaaacaaaatacacttaacctacttctgtcacac

SEQ ID NO: 968694 - DNA, 120 bp, Artificial Sequence
  ENSG00000256633_0 (sequence is synthesized)
ggaagcagaggatgttgcgcgtgcggaagccggtgctgtcgtccacgccgcggtagaaaagcggatgggcatatgcgtcagggatgttcaggatctggcccgtggtcgccacgtgtcccg

SEQ ID NO: 968695 - DNA, 120 bp, Artificial Sequence
  ENSG00000256633_1 (sequence is synthesized)
cgatgccctgatcggccgggatgcggatctcatagctctgccggagcagagatggagtcgagaggaagaagttagtgacccggccacagaggggactgttaaacctcgggccgctcccca

SEQ ID NO: 968696 - DNA, 120 bp, Artificial Sequence
  ENSG00000256633_2 (sequence is synthesized)
tcatccaccacgcccccgtcgaacaccttggccaccagctcattctgatccagcaggaacacagagcagctgtggagggaggggtttggtcctctggggcctgacaaccccctctgatcg

SEQ ID NO: 968697 - DNA, 120 bp, Artificial Sequence
  ENSG00000256633_3 (sequence is synthesized)
ccctcacgtcccataaggaggcaaaggccggatttccgaggcctgggaggagtgctccaaggcccacccaactgtcaacacagttccatgctggtaggttctgcagctcagacctaggac

SEQ ID NO: 968698 - DNA, 120 bp, Artificial Sequence
  ENSG00000256633_4 (sequence is synthesized)
tcctggatctccaccctaccccagcagacctcaggcccgggctctgacacctacctagtcccaggctctctagtgtccacctcctgcaggagctccaggccctgaaacccagcctgtttg

SEQ ID NO: 968699 - DNA, 120 bp, Artificial Sequence
  ENSG00000215039_0 (sequence is synthesized)
acacaggaaagggccctgacaagaggatgggactgcagttgtggctgccagggccccggccagggtgaaaacaaggaacattccagagaagatcacaaggatgcgaataaaatcggagct

SEQ ID NO: 968700 - DNA, 120 bp, Artificial Sequence
  ENSG00000215039_1 (sequence is synthesized)
gcacagggatctttgggctgtaataggaggggacacacaggggttaggggagggtctagcccttggctccctcagcccagccctcctgtcaccttgcctctcccctttcccccaccttat

SEQ ID NO: 968701 - DNA, 120 bp, Artificial Sequence
  ENSG00000215039_2 (sequence is synthesized)
tctatcccacccgccaccgttggccaactcctctcctaaacagtggactctgctttttcccctcctcttatccctaatcctaggagctttctgtctggcttccctcctggcccctcgtgt

SEQ ID NO: 968702 - DNA, 120 bp, Artificial Sequence
  ENSG00000215039_3 (sequence is synthesized)
atgcattctctctagcggtggggattaaggagaaaactcacgtggccagtgggtagagagagtccgggcaggcagctgcctgaagtcagccagagtctgcatgtgcccagctgtcctggc

SEQ ID NO: 968703 - DNA, 120 bp, Artificial Sequence
  ENSG00000215039_4 (sequence is synthesized)
ctccagcatctctggaaaaacagagacagaatgagtagcagcaggggaccccatagggcacatctgaaggcctgagaggtgctggatgggatgggaaggcagaaacaggctgaccttatc

SEQ ID NO: 968704 - DNA, 120 bp, Artificial Sequence
  ENSG00000215039_5 (sequence is synthesized)
tatctaggggtaggagtggggagtactggttggggtatcaccgctaccccacgtgatggcacagagagttgcctggaacttaccactgacataaggttggagtgcagtggcacgatctcg

SEQ ID NO: 968705 - DNA, 89 bp, Artificial Sequence
  ENSG00000215039_6 (sequence is synthesized)
caaggagagggacaaattccttcttggcatccttatggccctgtgacctgctaatgaatgctgactctgagttgctactagaatttggt

SEQ ID NO: 968706 - DNA, 120 bp, Artificial Sequence
  ENSG00000215039_7 (sequence is synthesized)
gctaatgaatgctgactctgagttgctactagaatttggtttccttgtggcttcccaggaattgtgagccatgttggataaggacctgcaagggaagaatgaggaagcctgggacagtgc

SEQ ID NO: 968707 - DNA, 120 bp, Artificial Sequence
  ENSG00000215039_8 (sequence is synthesized)
aggaggggagagcactggtggtagagaggagtgatgacaagggtctccgccaaaagggaaatggaggggttaaagaagctgctggggagggttaaaaacaatgtgttctcactcgtaggt

SEQ ID NO: 968708 - DNA, 120 bp, Artificial Sequence
  ENSG00000215039_9 (sequence is synthesized)
aaaaacaaaacaaaacaaaacaaaaacaatgaggtgctattgttttagtggtgagtatccggagacctgggagttctatttaccaggtataacctgggctcaaaattccaggctgacttc

SEQ ID NO: 968709 - DNA, 120 bp, Artificial Sequence
  ENSG00000215039_10 (sequence is synthesized)
caggctgacttcaggcatgtcctcatctcatagatgccagcactaaggcccagagagggccgagctcattcagcccacccatcttctcacccctgactgcatttcccgggggtccttctg

SEQ ID NO: 968710 - DNA, 120 bp, Artificial Sequence
  ENSG00000215039_11 (sequence is synthesized)
cagccaggtgctgctgtggtactttgggatctattggctgagctcccagagaagggtcatggattgggctagtttggaacaagtgaagggactgaagatgggctcagtatggggcgaaga

SEQ ID NO: 968711 - DNA, 120 bp, Artificial Sequence
  ENSG00000215039_12 (sequence is synthesized)
ccttcaggaagggtctgcagagtgagtaggggggttttgactaggaaaagttccaaccctgccggggccgctgtcaagagaaaagcatctattacagttacatttttaagttaagtagac

SEQ ID NO: 968712 - DNA, 120 bp, Artificial Sequence
  ENSG00000215039_13 (sequence is synthesized)
tgaagaatatttcttgtgtattaaagacgttcctttttggttgatttgcaatggaaaagcttttgttttctttttttttttggaaacagggtctcactctgctcactctgtctcccaagc

SEQ ID NO: 968713 - DNA, 120 bp, Artificial Sequence
  ENSG00000215039_14 (sequence is synthesized)
ctcactctgctcactctgtctcccaagctggagtgcagtggtacagtcacggctcactgcagcctccacttcctggactcaagtgatcttctcacttcagccttctgagtagctgggact

SEQ ID NO: 968714 - DNA, 120 bp, Artificial Sequence
  ENSG00000215039_15 (sequence is synthesized)
gtccactcaagtcagaagccacatttgggtgtgattcagagagctgtttatgcaaaaccagctttgtcaccatcaggcaaggcacctgaattcccaccgcagagagtgttgtggccgtga

SEQ ID NO: 968715 - DNA, 120 bp, Artificial Sequence
  ENSG00000215039_16 (sequence is synthesized)
ggacttttctgtcaccagccatttccaggtagacccagtgtaatcacaagcatccttgtaagtggcaaagaggcagaggagacagcgccagagaggcagctgcatgagaaggatcaagat

SEQ ID NO: 968716 - DNA, 120 bp, Artificial Sequence
  ENSG00000215039_17 (sequence is synthesized)
gttgctgactttgaagttggaagaagaaggccatgagcctcagtatgtgggcggcttctagaagctggaaggggcaaggagatggatttgacccttcagcctccaggggcagctgtacct

SEQ ID NO: 968717 - DNA, 120 bp, Artificial Sequence
  ENSG00000215039_18 (sequence is synthesized)
gccatcactgattgtagcctggtgaggcctgttttagacttctgacctgtagagctgtaacataatacatttgggttgttttcaaccactaagtttgtggtaatttgttgtagcagctgt

SEQ ID NO: 968718 - DNA, 120 bp, Artificial Sequence
  ENSG00000215039_19 (sequence is synthesized)
agaaaatgaatacatatgaatcctctggcatttgtttgagatttgctctatggcctagtatgtggttgtaaatgttccatctgtgcctgaaaaaatgtatatttctaattcagtagtctc

SEQ ID NO: 968719 - DNA, 120 bp, Artificial Sequence
  ENSG00000215039_20 (sequence is synthesized)
ggtcggcggggtgggggtggaggccagggctgtagtgcagctcccgcaggtgctggctcagggggagcaggcaggctccggttttcgggccccggccagggtgaaaacaaggaacattcc

SEQ ID NO: 968720 - DNA, 120 bp, Artificial Sequence
  ENSG00000215039_21 (sequence is synthesized)
gtggagctggtgggtttcagtgagattccaggcgtgggcagtggggttgagccagtggggtgtggtgcaggggcaggaccggaggcctgtgttctgtctcttacttgatctatatttcct

SEQ ID NO: 968721 - DNA, 88 bp, Artificial Sequence
  ENSG00000215039_22 (sequence is synthesized)
agtctcgaaaaggcactctgtcacgtgtacacaggaaagggccctgacaagaggatgggactgcagttgtggctgccagagtcttgct

SEQ ID NO: 968722 - DNA, 120 bp, Artificial Sequence
  ENSG00000215039_23 (sequence is synthesized)
agtctcgaaaaggcactctgtcacgtgtacacaggaaagggccctgacaagaggatgggactgcagttgtggctgccaggacaaggagagggacaaattccttcttggcatccttatggc

SEQ ID NO: 968723 - DNA, 120 bp, Artificial Sequence
  ENSG00000215039_24 (sequence is synthesized)
acaggaaagggccctgacaagaggatgggactgcagttgtggctgccaggtctcactctcccttggatggtcggcggggtgggggtggaggccagggctgtagtgcagctcccgcaggtg

SEQ ID NO: 968724 - DNA, 120 bp, Artificial Sequence
  ENSG00000215039_25 (sequence is synthesized)
ctggctcagggggagcaggcaggctccggttttcggtaatcctcctggatggggatggtgctgccctcctcctccctggggcagctgtaatgacaaggctctgcaggctccacaggactt

SEQ ID NO: 968725 - DNA, 120 bp, Artificial Sequence
  ENSG00000215039_26 (sequence is synthesized)
tctcctttgtctgcagaaggagatccgatgagtcttggccagcagtgggggcagggggagacgggagaaggagatgggtagaggcgggtgcgcttgggggaggggtgtcaggagcacgcc

SEQ ID NO: 968726 - DNA, 120 bp, Artificial Sequence
  ENSG00000215039_27 (sequence is synthesized)
taatgatagcttgcttttcacagaggtgacttcggagacttctaatctataatccaggagtatataaccatgcagcacagaccaattagtcacatgtaaaataaactagattcttaccac

SEQ ID NO: 968727 - DNA, 120 bp, Artificial Sequence
  ENSG00000230285_0 (sequence is synthesized)
ctgagtgcagacaggacaccacatcatctgggacaagagagcagactgctatgacaggttggtctcaggccgacaggacccagcctgggcctgacccactggttaagcactgggaggcac

SEQ ID NO: 968728 - DNA, 120 bp, Artificial Sequence
  ENSG00000230285_1 (sequence is synthesized)
tgccatctaggagtcagagaatcagcacatatcttgtcatgtcatagctgaagagctgccacctagacctgttcctgctgcttcactctggttttcccatggcccatatggaagggaacc

SEQ ID NO: 968729 - DNA, 120 bp, Artificial Sequence
  ENSG00000230286_0 (sequence is synthesized)
actgggtcttgaaggagaaactcatcaggcagataatttggcaaccttgtccctggaaatctggcaccactggggctcctgtctctcagaattaaaaaaaaaaaaaaatccagtctctgc

SEQ ID NO: 968730 - DNA, 120 bp, Artificial Sequence
  ENSG00000230286_1 (sequence is synthesized)
gaagccttgcccagccaccgtagaagagatctctgccaaactccctcctctttgaagaaacacaacagagtccaagtgagaagtagctacagtttaatacaaacctgcaccagaacacaa

SEQ ID NO: 968731 - DNA, 120 bp, Artificial Sequence
  ENSG00000243305_0 (sequence is synthesized)
tgtgtgtctggtaaatatagaccaaaaagtcatatagtcctgaaagacagattcaccaggacaggatgttgcacccaacagtgtagaagcatcaaggatggggctgtcgaaacataccaa

SEQ ID NO: 968732 - DNA, 120 bp, Artificial Sequence
  ENSG00000243305_1 (sequence is synthesized)
atacatatgtatgtatatgtagatataatatatgtgtgtatatatatatccattcccttttctttcttttggttgtcaaatagtatgaagatccaagattatgcatgaaatggtcacagc

SEQ ID NO: 968733 - DNA, 120 bp, Artificial Sequence
  ENSG00000243305_2 (sequence is synthesized)
acaatgcaaaaagtaaagtgtcccctacaacccaggtggccaagggcatgttgaaatttgctctgctatagttctgcttacaccagcaattctacagtcatacatggtagacgcatgaga

SEQ ID NO: 968734 - DNA, 120 bp, Artificial Sequence
  ENSG00000231487_0 (sequence is synthesized)
cagaaatgaaaagtctgccttatggaagacaaggcacagacgctttccctgacagcatcatcatcacccaactagggcagctgacccgcgtcttcctcacgacgtggaaagttttgagtc

SEQ ID NO: 968735 - DNA, 120 bp, Artificial Sequence; identical to SEQ ID NO: 813962
  ENSG00000231487_1 (sequence is synthesized)

SEQ ID NO: 968736 - DNA, 120 bp, Artificial Sequence
  ENSG00000231487_2 (sequence is synthesized)
ttcttgtcccgccaagactgactgcgagctgttgtggcgttgccactttgcttggaaaggaccccttatctttcatttcccttgcatttctttcaattctaccattgaccatttctcata

SEQ ID NO: 968737 - DNA, 120 bp, Artificial Sequence; identical to SEQ ID NO: 813964
  ENSG00000231487_3 (sequence is synthesized)

SEQ ID NO: 968738 - DNA, 120 bp, Artificial Sequence
  ENSG00000231482_0 (sequence is synthesized)
ctgtgaggccgttgcaggaagcccccttcactgtgggaggatccacagctgccgcagcacagtcccacctccaggaatctcataggatcccttgaggaaaagcctaaagctgccgccatt

SEQ ID NO: 968739 - DNA, 120 bp, Artificial Sequence
  ENSG00000231482_1 (sequence is synthesized)
agaaatccccgaaagagcatggcattgtcaggattctgggggtgaaatggttgtcacgaaccacccaagaggagaactggcctctgcttggtttattcattccctccgttcgctttgatt

SEQ ID NO: 968740 - DNA, 120 bp, Artificial Sequence
  ENSG00000231482_2 (sequence is synthesized)
ttaaacttcttttggagagatatttattgggtttcttttgtgagaaaagtttgttcccgctaaaagaagagaatattttcaatgctacaaactccaaagcataaggactttgggtgaact

SEQ ID NO: 968741 - DNA, 120 bp, Artificial Sequence
  ENSG00000231482_3 (sequence is synthesized)
ttctgttgaagtacagcatttagacagcaaagcccgcaaatcttagcttttagcccagtggagttggacagtttattaacaccttcaagcaacaaccactcagtcaagacagaatgctgg

SEQ ID NO: 968742 - DNA, 120 bp, Artificial Sequence
  ENSG00000231482_4 (sequence is synthesized)
ctgcacattcgttaccacagattcatcttgcctcgttttatgaactccatgcaaataaaatcagacagggatcctgctctggaacaagagtctctcctgcacccacccagtctgagcacc

SEQ ID NO: 968743 - DNA, 120 bp, Artificial Sequence
  ENSG00000231482_5 (sequence is synthesized)
agccaagatctttcccttcttattctcaccttcctacagtttgcagagatgaacatggatgagaggagactcagggacctgatgacccccgacggccgtgggctgcacagtgccaggact

SEQ ID NO: 968744 - DNA, 120 bp, Artificial Sequence
  ENSG00000231482_6 (sequence is synthesized)
ggatcctggaagaggaaaggatgcagatggaaaagctggggataccagggtgagctctgagatgtaatcaccagcattggatccacgtccactccctggtcctggttgctgtgctgtggc

SEQ ID NO: 968745 - DNA, 120 bp, Artificial Sequence
  ENSG00000231482_7 (sequence is synthesized)
cgtgcatagagttaacactgagcagcactcaacagaaacaacctttagctgctgtacatgtattttctggcaagactctgactgtccatgaagccggggtccacggaggccaccttggct

SEQ ID NO: 968746 - DNA, 120 bp, Artificial Sequence
  ENSG00000231482_8 (sequence is synthesized)
ttataattgttggaagaacacgttacaaaaatatttaacaaagtttggaccttgtgaactccaagaaagtccctccaaaaaaataataatagacaggaaatatgtatggtttaaagtaaa

SEQ ID NO: 968747 - DNA, 120 bp, Artificial Sequence
  ENSG00000231482_9 (sequence is synthesized)
aggcagagtaacatgatccaaatcatgatccaaattggttataaacatgaatatactgggtattttttattacaacgctgagaatgtaacttacttgttttcttgcacctaacgggggct

SEQ ID NO: 968748 - DNA, 120 bp, Artificial Sequence
  ENSG00000231482_10 (sequence is synthesized)
aatgctcacttcctttattttgcatcttcagtgatgggtcttgattaagtcagaccccgtaatctgggccaggactcagtcttccccacctgcccagcacctgtggtgattttgtgatgt

SEQ ID NO: 968749 - DNA, 120 bp, Artificial Sequence
  ENSG00000231482_11 (sequence is synthesized)
ggatcccgtcgcagcagacccctgtgctgtgtgagttggcagaactagccattgtgtctcaggccgccgtgccttttgtatgggtgcgtgtgggcttcatgccaaggccgcccttgggag

SEQ ID NO: 968750 - DNA, 120 bp, Artificial Sequence
  ENSG00000231482_12 (sequence is synthesized)
gaacagtgcctgctgtgtgggtgcatgtgggcttcatgccaaggccacgcttgggaggaacagcgcctgctgtgtgggtgcgtgtgggcttcatgccaaggccacgcttgggaggaacag

SEQ ID NO: 968751 - DNA, 120 bp, Artificial Sequence
  ENSG00000231482_13 (sequence is synthesized)
cgcctgctgtgtggcgcagaataggcagtgtgcacagcacggcgggaagcgaggaggggccttgttcacccaccctgtccccatggctacgggagagcaggaaagggtgccccagggaga

SEQ ID NO: 968752 - DNA, 120 bp, Artificial Sequence
  ENSG00000231482_14 (sequence is synthesized)
gtttcctagagagacggttatacccctaccccctcccaataaaaaaactgaaacaaactcctggatccttacctccgcatgttacagacactaaatgtcctgtaaaagcaaaaatgaccc

SEQ ID NO: 968753 - DNA, 120 bp, Artificial Sequence
  ENSG00000231482_15 (sequence is synthesized)
acaaaaggttcatcttctctccacaaactgccccacataaagtccctgtgtcaaatcaacagaaaagtccacagtgaaccccaaagctgacacagaagttaaagaaactgtttttagaag

SEQ ID NO: 968754 - DNA, 120 bp, Artificial Sequence
  ENSG00000231482_16 (sequence is synthesized)
ttattcagttactggggaaaaatcatcttcctgtttttgatggtaaaatacgaatcttgccgtcctgccacccccattctattggtagaaaagaaggtctaagtgcattcttctaatgtt

SEQ ID NO: 968755 - DNA, 120 bp, Artificial Sequence
  ENSG00000231482_17 (sequence is synthesized)
taacaccttcaagcaacaaccactcagtcaagacagaatgctggctgcacattcgttaccacagattcatcttgcctcgttttatgaactccatgcaaataaaatcagacaccttgccct

SEQ ID NO: 968756 - DNA, 120 bp, Artificial Sequence
  ENSG00000231482_18 (sequence is synthesized)
tcaggaggcagagggcggttgagtcactgtggtcgtctaagaactaaggacatctagttacgtacagagtcttcgccatcctcctccgacctccaatatccaaggaacaacttgcaaagt

SEQ ID NO: 968757 - DNA, 120 bp, Artificial Sequence
  ENSG00000231482_19 (sequence is synthesized)
aggggtgagattcttgaagcttgaattgtccgagctgttgtttcctccccttcttggtcactgcaaatgcaattatgaaataattctcggggaagcatgagcaacatactctgcagtgac

SEQ ID NO: 968758 - DNA, 120 bp, Artificial Sequence
  ENSG00000231482_20 (sequence is synthesized)
tccagactggaccttccagctttgatcatttgcaggactcaagtccacacaggagattgagagaagaaaaaaggactcagaggcaaagacagctctgagcccctaagggaaagctcaaag

SEQ ID NO: 968759 - DNA, 120 bp, Artificial Sequence
  ENSG00000231483_0 (sequence is synthesized)
acggactctgattcaccatttagagaggactcactggttttctcttcctgggccgtgcgtgcaaagaagcacctgccttgcctccttccctcctttgcctgtccaaaggtgaatgatatg

SEQ ID NO: 968760 - DNA, 120 bp, Artificial Sequence
  ENSG00000231483_1 (sequence is synthesized)
agtcgggcagtgtgcatgtcttcccagaagaaaaaatgaggctcagatgtgactcggtgtccccgttccaggaaggtgcagagtgctgacagccacgccctggagcttgcgcttgccagt

SEQ ID NO: 968761 - DNA, 120 bp, Artificial Sequence
  ENSG00000231483_2 (sequence is synthesized)
actgactcctgagggaaggcaagtgtttgaattgactttctccaaggttctcactcttaggaagatgcaggtggagttatctgtgattctccctgtaggtcagtgtctctgggatgcctt

SEQ ID NO: 968762 - DNA, 120 bp, Artificial Sequence
  ENSG00000231483_3 (sequence is synthesized)
ccccttccttgacctccatggggccttcctcagctgatcactcactgttcctgcctcccagccgatggctctgattctcaatggcttctgcatagtgaatgctgtcaggcaatcttcctg

SEQ ID NO: 968763 - DNA, 120 bp, Artificial Sequence
  ENSG00000231483_4 (sequence is synthesized)
gatatctccttcacgacgttgctccttctgcctgagaatctgtaacgagcacggaaggtctctggatgttgtggggacatgctgggttgttctgatgggccttttgggggctcctgtccg

SEQ ID NO: 968764 - DNA, 120 bp, Artificial Sequence
  ENSG00000274859_0 (sequence is synthesized)
cagctttccttctcaaagcttttaaacatcattgggaaaacttagagcaaatcaaaccaatgtttttcaatacatggaaggaaagatgtgtgtgcttggttttgttttttgctgagaccc

SEQ ID NO: 968765 - DNA, 120 bp, Artificial Sequence
  ENSG00000274859_1 (sequence is synthesized)
tcagagcaagacaaccatggaccatcctcttcttcagactggcctgtcttcttcttgaacaatgtcactttgctcctcactgctgtcatctgtatggggggaaataaacccaatgctttg

SEQ ID NO: 968766 - DNA, 120 bp, Artificial Sequence
  ENSG00000237886_0 (sequence is synthesized)
aggagggaagctgaggctcagagacatcatgaggatgccagctcaaggcccagccaggccttggtcctcagctgctgtcatccagtaggctcaagcccagaggcctccagggtgtccagc

SEQ ID NO: 968767 - DNA, 120 bp, Artificial Sequence
  ENSG00000237886_1 (sequence is synthesized)
cgctggccgccgggcctcaggttctgctgcaccaagtgatttttaaagccccatctgcctttctccacttataaagaacttgggacatttcctcgaggttgggcatttttccagatgtgg

SEQ ID NO: 968768 - DNA, 120 bp, Artificial Sequence
  ENSG00000237886_2 (sequence is synthesized)
tttcagtgtctcgcttgctacctggtcccctgtgctgggcggtccgctgtgacgcacctggcagtccttgctctaggatggattcgggccggcccttgttctgagaacagagaacggccc

SEQ ID NO: 968769 - DNA, 120 bp, Artificial Sequence
  ENSG00000237886_3 (sequence is synthesized)
ggaggagggacccggcggcgcggcgtgggtcgggagcgggcgcctgggactacttctcgtttgaaagttttcagaggccaaaagtttgagccggggctgcggaaggatccggctctggcg

SEQ ID NO: 968770 - DNA, 120 bp, Artificial Sequence
  ENSG00000237886_4 (sequence is synthesized)
gttgccgcgctcggcgacaactggcgactgaaatttgcatagaagagagtggcccattcggtgtccacccgtcaggccacccagcagccaggcacgctcataagcccgcgttacggatgg

SEQ ID NO: 968771 - DNA, 120 bp, Artificial Sequence
  ENSG00000237886_5 (sequence is synthesized)
tgcggccgggtgcacaggcccgagggaagcacaggcctcggcctcccagctcccaacccctgcaccacccacagccgggagtaccccatggacagctgtggccgaggagaagccagggat

SEQ ID NO: 968772 - DNA, 120 bp, Artificial Sequence
  ENSG00000237886_6 (sequence is synthesized)
ctccccaccagcctgggaagggggtaggcccctggcaagtaggagggaagctgaggctcagagacatcatgaggatgccagctcaaggcccagccaggccttggtcctcagctgctgtca

SEQ ID NO: 968773 - DNA, 120 bp, Artificial Sequence
  ENSG00000237886_7 (sequence is synthesized)
tccagtagggtaagtgggacccccaggaggtgttgggggacactcctcccctcccccacactcacagtctgttcaccgcccaaggcagcaggctggactcggtgcagggaccatggcttg

SEQ ID NO: 968774 - DNA, 120 bp, Artificial Sequence
  ENSG00000237886_8 (sequence is synthesized)
gcgtggccaggttggagtggcccctgggactgaaagcagggggcgtgggggctctgaggcggggccgagtgcggggacgtcctgtggcgggtaccctgctgggtcctgggtgggggccac

SEQ ID NO: 968775 - DNA, 120 bp, Artificial Sequence
  ENSG00000237883_0 (sequence is synthesized)
aggcgactgctcccgcgaggtcagagccgggctgtgccgctgcccccgggactagaaagggaaatctccttgctagaggaggaagccctaagaactcaagggagataggggtggcagggg

SEQ ID NO: 968776 - DNA, 120 bp, Artificial Sequence
  ENSG00000237883_1 (sequence is synthesized)
catttccctggatgcctggagcatggagggtgcgaaataaggaggctttcctaccccattgatgagctgaagttgattccgcacgggggaggaaagggacaggaagcataattggatgtg

SEQ ID NO: 968777 - DNA, 120 bp, Artificial Sequence
  ENSG00000237883_2 (sequence is synthesized)
aagcctgtggttcttcaggaagttaacacgtggaactaacactgttggatgctgctgaactctcaggaggctttccggaagcactaagaaatagaactagtttgtctaatttggaattaa

SEQ ID NO: 968778 - DNA, 120 bp, Artificial Sequence
  ENSG00000237883_3 (sequence is synthesized)
aagagtaaccaactgagtgtcttcagcagtgacaatgaaaatgtaccacttcccattttgataattcaaagagccttaagaaagatcgttttgcttgaaagcactatttcacactgacac

SEQ ID NO: 968779 - DNA, 120 bp, Artificial Sequence
  ENSG00000237883_4 (sequence is synthesized)
tggtcattcataggcttcagataagaaaaactccagcagtgtccagatcaagccatcctgactttgtctctaggcggcttaacctcaagtcacagcctggtctctgcagcagagccaggc

SEQ ID NO: 968780 - DNA, 120 bp, Artificial Sequence
  ENSG00000237883_5 (sequence is synthesized)
agaaaaatcatcattgacatccaacaccagcactggaatgttcatcagagcctcaaagtggagcctataagaagcgtgaacgtttgggggacagaaaaaaagaaatgtaacttgagtcaa

SEQ ID NO: 968781 - DNA, 120 bp, Artificial Sequence
  ENSG00000237883_6 (sequence is synthesized)
gtttcacatactcgccaagtcttactcagagaacagatctaaattcaacatgacttttcaaagaaactgcatgtaaactgcatttaaaaaaacaaattcaataaagttggccggaaacag

SEQ ID NO: 968782 - DNA, 120 bp, Artificial Sequence
  ENSG00000237883_7 (sequence is synthesized)
acttcacatctcactccctcaggtggtcaggatgatgcccatccctgatctgacacaggcactgatgtccactagactctggccagcaaaaagccctctcacagaagaaggggtcaaaaa

SEQ ID NO: 968783 - DNA, 120 bp, Artificial Sequence
  ENSG00000237883_8 (sequence is synthesized)
gggctaaatctgagacagaagccagtttctcagatgtgctatttctgcctaagcatcctttcttgaacaataaaaaaaaaaggctgaaaatatctcttatatcattttcaggaacacaaa

SEQ ID NO: 968784 - DNA, 120 bp, Artificial Sequence
  ENSG00000237880_0 (sequence is synthesized)
aatgtgctttaatgctgtagcccagacattcctattgccgcagagcataccacctgggggtggggatgctgctgtctggggatcctcagctgcagtgcaagtggtgcccgtgaattttga

SEQ ID NO: 968785 - DNA, 120 bp, Artificial Sequence
  ENSG00000237880_1 (sequence is synthesized)
gactccttctgctccaggcagctttcctgaaccttgaggaggactggctggtgataaatcctaggcttctgttgtccctcattgcctgtctgttcagggaatgcatgtggaggtttggta

SEQ ID NO: 968786 - DNA, 120 bp, Artificial Sequence
  ENSG00000237880_2 (sequence is synthesized)
catggcgatattgcttgttgctgaggctcagtgtaagaatgatcctgtcaccaaggtttgaccttggaagtcctcatggagaaaattgcatctgagctggaccatgaaaaatgagtagga

SEQ ID NO: 968787 - DNA, 120 bp, Artificial Sequence
  ENSG00000237880_3 (sequence is synthesized)
tttcaacagataacaatggaagagagaaagcaaatcaaccacctttcttcgctcatctgacaaagtgcctgattccagccagagactatgtaagcccttggagtgatatcagtctctatt

SEQ ID NO: 968788 - DNA, 120 bp, Artificial Sequence
  ENSG00000237880_4 (sequence is synthesized)
gactgaatgctaacccatggaattagatatccatgtgagtctattctacacatccataagaaaaccttataccgaggcttactggttttaaaagaggagatgtcaaactaaagaatggag

SEQ ID NO: 968789 - DNA, 120 bp, Artificial Sequence
  ENSG00000237880_5 (sequence is synthesized)
aagaattttcaaggagtgggaaaatgccactaccctgctcagaaccttcactgcaacccagactgtgcctgtatcttaggagtgcagatgattgagatggtccaagggtatccggaagag

SEQ ID NO: 968790 - DNA, 120 bp, Artificial Sequence
  ENSG00000237880_6 (sequence is synthesized)
agaggagaggacccaacagcatggatggtgcatgctgagcacttctcaaaggaaaacccatggcagaggattcgacgaagcctcatcatggtttttgagctgctgtgcacagaaagaaga

SEQ ID NO: 968791 - DNA, 120 bp, Artificial Sequence
  ENSG00000237880_7 (sequence is synthesized)
cggcacatcatttgccaggcccaggccggccagcacagacacatgcctctgcagcactgtaagacatcagtgaaggctgaagcattttgccatctgggcagcgtgggtggtgtgctttaa

SEQ ID NO: 968792 - DNA, 120 bp, Artificial Sequence
  ENSG00000237880_8 (sequence is synthesized)
tttcctcatgctttgtattagaaagggagagaatagattacaggagacaatgacaatgataagatgatttctatgggttactgcaattcaaccccttgtaataacacattgatttcaacg

SEQ ID NO: 968793 - DNA, 120 bp, Artificial Sequence
  ENSG00000237880_9 (sequence is synthesized)
tttcccctacacaaagaattctcatatgttgctgatggtaaatgatgccccaatattcagtcaatctaggcaaaaataaagtccactaaatgaaagaaaatcactcaagctgaattggcc

SEQ ID NO: 968794 - DNA, 120 bp, Artificial Sequence
  ENSG00000237880_10 (sequence is synthesized)
tcatatagaaatggctcaagggttaagagagggagcacatgctaagataaagattacaggggaaattgtgtttatttaatcaaggcccagatgggctgaaggcagaaacacagcgtcctg

SEQ ID NO: 968795 - DNA, 120 bp, Artificial Sequence
  ENSG00000237880_11 (sequence is synthesized)
atttgcataactttttctctctgagccataagcaagggcttttccaatatccaaggataacctctgaattcaaacaaatcattcttctgacctatggccaatctttcagcctcacacaga

SEQ ID NO: 968796 - DNA, 120 bp, Artificial Sequence
  ENSG00000237880_12 (sequence is synthesized)
tgtctccctttatgtataaggaaggaataatcatatcactcaaactcaaatgttcacttgggattaactaatatttaaagtgctcttcttttaagagccacgccatgcaaaagggaagtg

SEQ ID NO: 968797 - DNA, 120 bp, Artificial Sequence
  ENSG00000237880_13 (sequence is synthesized)
gcttatacatataatacagcagtttatggaaaaagactccatggtatggtggaaaaaacacttttctaacagagcaacctggatcccagtcctggtctgccacggtttagcaacatgacc

SEQ ID NO: 968798 - DNA, 120 bp, Artificial Sequence
  ENSG00000237880_14 (sequence is synthesized)
atgggtaactcacaaaaacactgagtctcagtttcctcatctatgaagcaaaacatccttatctgaggagtttttctttgtcaaattactatatcaccatgaccaatgcatacatatgta

SEQ ID NO: 968799 - DNA, 120 bp, Artificial Sequence
  ENSG00000237880_15 (sequence is synthesized)
ttacatatgatagtgatacgattattcctttcatatagatagacagaagatatagatagaaaatagataatagaagatattgatggacgaaagaagatatagacatgaatagatgataga

SEQ ID NO: 968800 - DNA, 120 bp, Artificial Sequence
  ENSG00000237880_16 (sequence is synthesized)
ggatatagacacgtatagttgtgataatgtagcatagttttttcccaaaatgtgataaaataaagaaatgtttgacctaaagacttcccattttattgaaaagtatgaaatatattgaaa

SEQ ID NO: 968801 - DNA, 87 bp, Artificial Sequence
  ENSG00000237880_17 (sequence is synthesized)
cacccagtttttccatggagtgatagaatttaattgatgagcttgacgagcttaattacagaagggagagctccaaaatacatgaga

SEQ ID NO: 968802 - DNA, 120 bp, Artificial Sequence
  ENSG00000237880_18 (sequence is synthesized)
gagcttaattacagaagggagagctccaaaatacatgagattttccatgtctactctggtgccattactggaagatccttccattttctacaagggatttttacctatattgttgagaag

SEQ ID NO: 968803 - DNA, 120 bp, Artificial Sequence
  ENSG00000231731_0 (sequence is synthesized)
gacagtactcactcagcccaggcttccaggccctcctgggccctcctatccactgaaggaaatgggagatgagtgggtaatggaaaagcctttggagtcagatgtaaatccatgacttga

SEQ ID NO: 968804 - DNA, 120 bp, Artificial Sequence
  ENSG00000231731_1 (sequence is synthesized)
ccacttattgctgtgagaccctggacagctggatatagagttcttgttctagcatccgccctgggaatccccggaactgggcctcttaccgacaccattgcctgtaatccacaaacctag

SEQ ID NO: 968805 - DNA, 120 bp, Artificial Sequence
  ENSG00000231731_2 (sequence is synthesized)
gagttactccagttactgtcctactgaaggacccccatcccatctgggctactataaccacatggaccatcccttgcttcaatcatagaattctttcttcagatcaaagtatattcagac

SEQ ID NO: 968806 - DNA, 120 bp, Artificial Sequence
  ENSG00000231731_3 (sequence is synthesized)
actcgatacagtaacaaaagcaagctatcctggaaggaagaaggaatcaggaggcagagcacatggttaaagcatgagatgtgaaaccaggaagaaccaggtctgaaccttagctccacc

SEQ ID NO: 968807 - DNA, 120 bp, Artificial Sequence
  ENSG00000231731_4 (sequence is synthesized)
gtaagggaacgctacacttccttagaaattaagagtgtgtgctacactgctttaccagagcaaggccaaaagcagcttcaattatggtacaactgtgtgaagacacaatgcaaaaccact

SEQ ID NO: 968808 - DNA, 120 bp, Artificial Sequence
  ENSG00000231731_5 (sequence is synthesized)
caagaatgctcactcaaatggatttttaccatgataagcgaccagaaaacagtcctctctgaatcagacaaacttcaagagctacaagggttattaacacatgaagtaaagagtcaaaca

SEQ ID NO: 968809 - DNA, 120 bp, Artificial Sequence
  ENSG00000231731_6 (sequence is synthesized)
gtaatctgcaggaactcggaaacgggacccagaaagttgttttctcaagtggatggaacaacacaagcaatcagtatcctgaaacaggccctgttccaacaaactgacccagaaaggtct

SEQ ID NO: 968810 - DNA, 120 bp, Artificial Sequence
  ENSG00000231731_7 (sequence is synthesized)
ggttaggaggacaggaccctcactatacactatcacatttaaactaaaaggatattatgaattatgtacacatatcaagctgagaggaaaggaaatcctatcatcttgcaggcttcctaa

SEQ ID NO: 968811 - DNA, 120 bp, Artificial Sequence
  ENSG00000231731_8 (sequence is synthesized)
acaaatctcaggaatcgcttgcaggaggctctgcacgttcctcagattcagagtcgctgtccttttgcctgtgaagctcctcactttcagagtcactagcattaagatttaagggctcat

SEQ ID NO: 968812 - DNA, 120 bp, Artificial Sequence
  ENSG00000231731_9 (sequence is synthesized)
cgttctcagagtctgtcacatgatgtcctttggggaggccatcttctcgatcactagtttcattctgaaaaataaagtgagaaaaaattaggaaagtgcaaaaaaaaaaaaaccattaat

SEQ ID NO: 968813 - DNA, 120 bp, Artificial Sequence
  ENSG00000231731_10 (sequence is synthesized)
atcccacctgtggacccagcctcaactatgacatgaagccagctgagcactaggcaaggaactctaagtcattcttgaccaagagccatgttgacctgtctttctaggaatatctcaatt

SEQ ID NO: 968814 - DNA, 120 bp, Artificial Sequence
  ENSG00000231731_11 (sequence is synthesized)
caaatattattctgtatcgtctcaatacttggcattcgtactctgagtaagcataaaaagtgtcagatgagaaagagctatgccaccatcacactatctcccagatttcctggacagtcc

SEQ ID NO: 968815 - DNA, 120 bp, Artificial Sequence
  ENSG00000231731_12 (sequence is synthesized)
caaatatctgacttccttttagaggatgtgccgtgatcttagtacttgtacttggtccacatcggaagctttacctgctcaaatctctgccaactacacaattcccagcagcttcacaca

SEQ ID NO: 968816 - DNA, 120 bp, Artificial Sequence
  ENSG00000231731_13 (sequence is synthesized)
aaactgacccagaaagaggttataccaattatctctccagcaagtatgaggactcctgtttccctacgtactcactactacagcaaagatatcaaacattgatacccaccaatctctgga

SEQ ID NO: 968817 - DNA, 120 bp, Artificial Sequence
  ENSG00000231731_14 (sequence is synthesized)
aaccgtaagctcatcccctattctcttcttgcaatcgggatgctgcctgactaccaacacacctgcacaaagccctctgcagcacctgccactggcccatgcttttgtcattgccacctc

SEQ ID NO: 968818 - DNA, 120 bp, Artificial Sequence
  ENSG00000231731_15 (sequence is synthesized)
acaacacaagcaatcactgcagtttactgacaagatcaaagatggtagtatatctctggtttatagaagaaatttacatttctctaaaagcttttgataaacttaacaattcaaaagaaa

SEQ ID NO: 968819 - DNA, 120 bp, Artificial Sequence
  ENSG00000231731_16 (sequence is synthesized)
ttctcagagagctggtttcatatggctggattcttttgtcacagtctgcatttcatcctaggattgtcctgattccctaaatgaattgtatttttttgagacagggtctggcagcctcga

SEQ ID NO: 968820 - DNA, 89 bp, Artificial Sequence
  ENSG00000231731_17 (sequence is synthesized)
agcaatcctcctgccttagcctccacatccggctaaacaacctctcttcttgcaacactgtttccttgtgagctcattaacatgctaat

SEQ ID NO: 968821 - DNA, 120 bp, Artificial Sequence
  ENSG00000231731_18 (sequence is synthesized)
ttgcaacactgtttccttgtgagctcattaacatgctaattaccacattccacaggaagatggattacagagcaataagacaggctgggttcaccctggaacgtgaccagtagtgacagc

SEQ ID NO: 968822 - DNA, 120 bp, Artificial Sequence
  ENSG00000231731_19 (sequence is synthesized)
agagagagacatgtgaacaactacaacgtctgcggtctaagaaaacactaaattggagacgtgttcaaagcagtgcaggggagggagcggagtgagacttccggggtcacccagaagggc

SEQ ID NO: 968823 - DNA, 120 bp, Artificial Sequence
  ENSG00000231731_20 (sequence is synthesized)
tatcaaacattgatacccaccaatctctggatggaaaaacaaatctcagggaaaagcacttgggacccgccaaacggaggatgcaaaaaggggtgtctaacactgtacccctccctcccg

SEQ ID NO: 968824 - DNA, 120 bp, Artificial Sequence
  ENSG00000231731_21 (sequence is synthesized)
cttacccagcaatgggggagaaaaagtcgctgggcatggcataccaccgttcaccaacgccgtgggcagcaggaacaaataagagctgtagtgcttcttgagagcccagacctcgagact

SEQ ID NO: 968825 - DNA, 120 bp, Artificial Sequence
  ENSG00000231731_22 (sequence is synthesized)
ctccaaaacagggttgtaatatgcccctgctcaccaagcccttggcagtgggaactgagctgtgacatccttggggctctgcagttcctggcatctccgagttttcaggcaccaccacat

SEQ ID NO: 968826 - DNA, 70 bp, Artificial Sequence
  ENSG00000231731_23 (sequence is synthesized)
tgtctcagattctgtatctggtaaaactatccttcaaaatcaagggagaaactaagatatccctaaataa

SEQ ID NO: 968827 - DNA, 120 bp, Artificial Sequence
  ENSG00000231731_24 (sequence is synthesized)
gatggactttgtgcaacataatgtgacagttaaggctgtggaatttagagtcagaaagacctgaggtccaagccccagctctgctattttctactatgtgatcaaaggacattttcctaa

SEQ ID NO: 968828 - DNA, 120 bp, Artificial Sequence
  ENSG00000231731_25 (sequence is synthesized)
ctcttcaaagcttccatgtccttgatctgatggaattaggaatactatctataccgtagagggcagttctgaggactaaaagcatgcaaagccgttagcacagagcctgtgaatattcaa

SEQ ID NO: 968829 - DNA, 120 bp, Artificial Sequence
  ENSG00000231731_26 (sequence is synthesized)
tcttcaaccgtaaggtgtgactacactgagcagtaacagcaaaacctgaaagagaatggatacaggtgttcatttcagatggtacaagtttaacaaagtacaagagcaacttaaggtttg

SEQ ID NO: 968830 - DNA, 120 bp, Artificial Sequence
  ENSG00000231731_27 (sequence is synthesized)
tagtatttcatccagaaaacaccacagcataactgagagcactggaggcagaaataattcagtttagatccatggattgcttgctatttactgtgtgactctgggtagccacttacttta

SEQ ID NO: 968831 - DNA, 120 bp, Artificial Sequence
  ENSG00000231731_28 (sequence is synthesized)
aatctatttttcccacttatagaaaggtaatgatgaccacttgttggaaaacttgagggtaatacttgtaaaggtcatagtaagacccaacaacttgggcccaacacctggtaggcacaa

SEQ ID NO: 968832 - DNA, 120 bp, Artificial Sequence
  ENSG00000231731_29 (sequence is synthesized)
agtctgttctgcttcctttccctttctgtagagaaatgcacaggatattccttatatgccacttatgttatgggattgacataggttttgtccctcatgctatgggattgattaggtttt

SEQ ID NO: 968833 - DNA, 88 bp, Artificial Sequence
  ENSG00000231731_30 (sequence is synthesized)
caatcaatgcaattttaccagaccaaaaactgtctataaagaacaaaattagtggccaggtgagaggatgaggtgggaggattactta

SEQ ID NO: 968834 - DNA, 87 bp, Artificial Sequence
  ENSG00000231731_31 (sequence is synthesized)
tcctgtctttaccttagtagtttccaagtttttctttcgttagtatcaattttttatttgttctgtttgcaccaggcatcaaggctt

SEQ ID NO: 968835 - DNA, 120 bp, Artificial Sequence
  ENSG00000231731_32 (sequence is synthesized)
tgttcattgttcatctgttcatacagtcattcttgcatgagtttactggacacctgctgtgagcaggcactgagtggcataaaaattcctagaacagtctcatcagagaaaagacacaca

SEQ ID NO: 968836 - DNA, 120 bp, Artificial Sequence
  ENSG00000231731_33 (sequence is synthesized)
cagaaagagaaattatactacaatgcagttatggaaactcattcaacaaaattttactgaatgcttactatttgtcaggtaccgttatcgatgctgggagaagagaaaaggacatcattt

SEQ ID NO: 968837 - DNA, 120 bp, Artificial Sequence
  ENSG00000231731_34 (sequence is synthesized)
ctcaaatggatttttaccatgcgtctacaatgtggaagcaagtcctgagtgaatatgcaaccctgctccacctatggggaagtgggaccagaaccagaaacatcagcacacagggacaca

SEQ ID NO: 968838 - DNA, 120 bp, Artificial Sequence
  ENSG00000231731_35 (sequence is synthesized)
gccctggaaacacaacctctgctttcaaagcagattggccactaagagtttttattacctattttctttgccatattgtagttcccaattctcaaaaataaaaatgttaagagaaatatg

SEQ ID NO: 968839 - DNA, 120 bp, Artificial Sequence
  ENSG00000231731_36 (sequence is synthesized)
acaagcaatcattctctgcatcttaattccctcatctgtaaaatggaaataatacacctaccttctcagtttactgtgaggaaaaaacgaatcaatacatatataaagcacctggcacag

SEQ ID NO: 968840 - DNA, 120 bp, Artificial Sequence
  ENSG00000231731_37 (sequence is synthesized)
tgcgtggcataggaggtttccttgggaattccttcagaagttaaatagcttacccaaggtgtcacaactacgtaaggtggcccagctcaagattcaaatgcaagttcatatgattctgaa

SEQ ID NO: 968841 - DNA, 120 bp, Artificial Sequence
  ENSG00000234640_0 (sequence is synthesized)
ttccctcagagcggaccaccgagagcccaggccaaggccgaaatggccgagccttcctctgcatctgggcagcctgtgatgcaccaggtcaggcatggcgggaatgggaggacttctgca

SEQ ID NO: 968842 - DNA, 120 bp, Artificial Sequence
  ENSG00000234640_1 (sequence is synthesized)
gagatcgagaccatcctggctaacaagacatgaaaacccctcatggaccattccggagccatgccagaaaattacccttgctaattacaatgaaataaagagtacttctgtgccaagcag

SEQ ID NO: 968843 - DNA, 120 bp, Artificial Sequence
  ENSG00000176593_0 (sequence is synthesized)
aggttcctgggccgcgccgcctcgccctgcctgggcggggttgggacctttctggcacctgcgtcgaagccggcggcaggatggactttgttgtcccggtcccagaccaccctcctccac

SEQ ID NO: 968844 - DNA, 120 bp, Artificial Sequence
  ENSG00000176593_1 (sequence is synthesized)
cgtcgcctcccactgcaaaaaggcctgggtaagtcgcggccccgcgggcctcggtttgcccatccgcaaaatggcgcctcgtggtaccgggtttcccgggaggagctcggcgagttctca

SEQ ID NO: 968845 - DNA, 120 bp, Artificial Sequence
  ENSG00000176593_2 (sequence is synthesized)
gcgctctcgagggatccttccatttggcgttcgcaagattgtgagaaagtgactgctgttattctctttaagataaggaacctaattcgagctacccttctctgtgaagctcgacggctg

SEQ ID NO: 968846 - DNA, 120 bp, Artificial Sequence
  ENSG00000176593_3 (sequence is synthesized)
agaacgtcagggctcgttcccaagtctctttccagaggccaggctttatgggagcatgggttaccagcgacgcaccctgatcaagcagagaaagagaggctggagaaggaagagtgacag

SEQ ID NO: 968847 - DNA, 120 bp, Artificial Sequence
  ENSG00000176593_4 (sequence is synthesized)
aagtaagaagagagtgtctctccacttccactccagccccctacagctcatcctccagcaggcagccaagggcacttttaggatctcacatcaggtccttgcctcacattctgcactggc

SEQ ID NO: 968848 - DNA, 120 bp, Artificial Sequence
  ENSG00000176593_5 (sequence is synthesized)
ttcccaagtaattaaagtaaaatccaaattccagctcacagcttagaaaactcagcaggactggcctctgtcctatcccacaccccacctcagtccctcaagctcatctcctgtcattcc

SEQ ID NO: 968849 - DNA, 120 bp, Artificial Sequence
  ENSG00000176593_6 (sequence is synthesized)
tgcccatttctggaccccagccactcctcaaacagggtgaggatgcagtgtccaaggcaccatcttgaactcatcatcgccaaatatgtgagcaccttgatgttggacttcccaacctcc

SEQ ID NO: 968850 - DNA, 120 bp, Artificial Sequence
  ENSG00000176593_7 (sequence is synthesized)
agaccgtaaggcagtacatttctttgtaaattacgcagtctcagctattctgttacagcagcacaaatggactaagacaacccccgagataggaaggggtaaggtaaatgcaatgagagt

SEQ ID NO: 968851 - DNA, 120 bp, Artificial Sequence
  ENSG00000176593_8 (sequence is synthesized)
ataaaggacattgccactacacatcctctagaatgaccaaaaataaaaatacagcatcaaatgggacgacatggtgccaactggaattctcataccctgctgatgggagtataatgtggt

SEQ ID NO: 968852 - DNA, 120 bp, Artificial Sequence
  ENSG00000176593_9 (sequence is synthesized)
acagtcactttggaaaaaagtttgacaatttcttataaaattatacataaacctgtactatgacctagagattctactcctgtttgttcaaaagaaaggcaaacatctgtccactaaaag

SEQ ID NO: 968853 - DNA, 120 bp, Artificial Sequence
  ENSG00000176593_10 (sequence is synthesized)
atatgtacaagaatgctcacagtggcattatttatgacggtccaaaccaggagataatccaaatgtctgtaaccaagagaatggataaagaaattttgatacgtcaatttaatggattac

SEQ ID NO: 968854 - DNA, 76 bp, Artificial Sequence
  ENSG00000176593_11 (sequence is synthesized)
taattagccacatatccacacaacaatattgcattatcacaggtatagtgataaatactgtatgattccatttata

SEQ ID NO: 968855 - DNA, 120 bp, Artificial Sequence
  ENSG00000176593_12 (sequence is synthesized)
tcacaggtatagtgataaatactgtatgattccatttatatgaagttcaagaacaggcaagtaatccatgatgaaagaagtacttacctctgggggtggcagcattgactaaagaggtac

SEQ ID NO: 968856 - DNA, 120 bp, Artificial Sequence
  ENSG00000176593_13 (sequence is synthesized)
aagggagtcttctggggcctggaaatgttctatatcttgatctgggtggtggttacacaggtatacgcgtgttaagaaatcatcaggctgtatacttagtgtactgtaatggcattacac

SEQ ID NO: 968857 - DNA, 120 bp, Artificial Sequence
  ENSG00000176593_14 (sequence is synthesized)
atgggagcatgggttaccagcgacgcaccctgtgagttttcctctatcgatatgcatggagcggttcgggagcggtggctcattcctgtagtcccagcacttcgggaagctgtggcggga

SEQ ID NO: 968858 - DNA, 120 bp, Artificial Sequence
  ENSG00000176593_15 (sequence is synthesized)
cattcctgtagtcccagcacttcgggaagctgtggcgggaggatcagttgagttcaggagttcgacaccaccctgggcaacatagcgagaccacatctctacaaaaaaaatacaaaaatt

SEQ ID NO: 968859 - DNA, 61 bp, Artificial Sequence
  ENSG00000176593_16 (sequence is synthesized)
gggaggtcacggcattaaaacaaacaaaaacgggccgggcgcggtggctcacagctgtaat

SEQ ID NO: 968860 - DNA, 86 bp, Artificial Sequence
  ENSG00000176593_17 (sequence is synthesized)
aggtggatcgcctgaggtcaggagttccgagaccagtctgggcaacatgataaaacctttggtggagggcacctgtacccagctac

SEQ ID NO: 968861 - DNA, 63 bp, Artificial Sequence
  ENSG00000176593_18 (sequence is synthesized)
tactaaaaataccaaaaattagccgggcttggtggagggcacctgctacagtaagccgagatc

SEQ ID NO: 968862 - DNA, 120 bp, Artificial Sequence
  ENSG00000176593_19 (sequence is synthesized)
gcctgggcagcagggcaagactctgtctcaaaaaaagggactgagggactgtaggtggtgataccaaagaaagcatggccatttaggaagctagacttgagtgagcagtgggcaagagag

SEQ ID NO: 968863 - DNA, 120 bp, Artificial Sequence
  ENSG00000176593_20 (sequence is synthesized)
attttgaagatatttccactagtaatggaggatcattttaaaaagctggcctgtgggttgggcttttgttgttgggtggtgttggcactcactgtgggtgggcaaaggggagtagccctt

SEQ ID NO: 968864 - DNA, 120 bp, Artificial Sequence
  ENSG00000176593_21 (sequence is synthesized)
agaacacacagtgggcctcaggagcaccggaatcagcgcgaaaacgcagaatgcaaaccgtactttgcaccattatttgcaacttgacagtgaccgccgccgtcactgcatgtttaaggg

SEQ ID NO: 968865 - DNA, 120 bp, Artificial Sequence
  ENSG00000176593_22 (sequence is synthesized)
aacccggagctgtttccaacccaggtctgacgtccttcacagtgctttgtgtgaactggcagggggagaaacgacggctggggaacgaacggggttattcgtcccatcaatggcctcaga

SEQ ID NO: 968866 - DNA, 120 bp, Artificial Sequence
  ENSG00000176593_23 (sequence is synthesized)
agcatccttatcacctgcttccagagctcccgacccaaatttcctcctcaagaccgacgcggccgcgacgctgcaaaagctcgtcccggcctcacctggctcgcggccggcggtccccct

SEQ ID NO: 968867 - DNA, 120 bp, Artificial Sequence
  ENSG00000176593_24 (sequence is synthesized)
tgaaggcggcgcagcaggatcggggtctgcccgcctggggcgtttggcttttgtcccgcgccgaggtccggcccaggagtgcgcttgggagctcccggcgcggcctcggggacaaaggcc

SEQ ID NO: 968868 - DNA, 120 bp, Artificial Sequence
  ENSG00000176593_25 (sequence is synthesized)
cgcggagccgacgtgcagcagagttcacccaggcccgtccgaccagaaaacgaagaacgcccggaggcgggaggccggaggcaggctgctggctggagaaccgacggcaacgacggcgca

SEQ ID NO: 968869 - DNA, 120 bp, Artificial Sequence
  ENSG00000176593_26 (sequence is synthesized)
aagccggcgcggaaagggcaggcgcaggacccaccctgacgccgcctctcccagccggctctcctgaccccccaagccccgcagctacggcggccccacagcctgagcaaaggcctcacc

SEQ ID NO: 968870 - DNA, 120 bp, Artificial Sequence
  ENSG00000176593_27 (sequence is synthesized)
aaaatgtgaaagaaaaaacgggggtgtcttttgcttccacatttgtagccccagcttctgtatctcctgcgtgataatggttggatgaattaaaaggtaggaggaatagaagaggagaaa

SEQ ID NO: 968871 - DNA, 120 bp, Artificial Sequence
  ENSG00000176593_28 (sequence is synthesized)
agcaataggaagaggaaggctggaagaaaagcccagctccactgtctcacttgggtgtcactgggtactggggaatttggaagcactagggaacagagaggaaggtgctcccttaggctt

SEQ ID NO: 968872 - DNA, 120 bp, Artificial Sequence
  ENSG00000176593_29 (sequence is synthesized)
ccacttctcagcccagtagtgagaggctatgaagctgttgccccctggtgggggacaagtgagaccagtgagagagggtttttgccttagaattgccccttccctggagacagcagcaag

SEQ ID NO: 968873 - DNA, 120 bp, Artificial Sequence
  ENSG00000176593_30 (sequence is synthesized)
atgaaggcctctcaagaagtgcttcatcctctggaaaccagcggaggaaatgactttcccaagagaaggatcatacatcactcaatcatcagcaaacatttatgaagcacctgctctgtg

SEQ ID NO: 968874 - DNA, 120 bp, Artificial Sequence
  ENSG00000176593_31 (sequence is synthesized)
ccagaccctaaagtgaaaaaaaacaaacactgcacttacggaagcacgagataaacaataaacataagtaaattaaagagtagttagaaggcaacaactttggaagaaagaaaaaagagt

SEQ ID NO: 968875 - DNA, 120 bp, Artificial Sequence
  ENSG00000176593_32 (sequence is synthesized)
aggtgatgtagtgcccagatgggaagggcaagttgccgtataaaattgggtgctaagagtgagtcagagtcacctcattgaggtgacatctgaacaaggactggaaagaagggatgcaga

SEQ ID NO: 968876 - DNA, 120 bp, Artificial Sequence
  ENSG00000176593_33 (sequence is synthesized)
gagatcgcgccactgcactctagcctaggcaacagagcaagactccgtctaaataaataaataaataaaaataagagatgcagacatcggagggaagagctagaacaaaagccctggtgt

SEQ ID NO: 968877 - DNA, 120 bp, Artificial Sequence
  ENSG00000176593_34 (sequence is synthesized)
ggagggaagagctagaacaaaagccctggtgtgagggcctgcctagtcagctgcgggaacaacagtggtcatagaggcaataagggggccagatggtagagaaagttgaaggcatcatga

SEQ ID NO: 968878 - DNA, 120 bp, Artificial Sequence
  ENSG00000176593_35 (sequence is synthesized)
gggctctggcagggttctgagtagagcattgatgagctctagcctctgtatggagagtaaccaaggaaagcagtagagtcatgtgtgaaaccaatgtagtaattaggtggaagatgatag

SEQ ID NO: 968879 - DNA, 120 bp, Artificial Sequence
  ENSG00000176593_36 (sequence is synthesized)
ccgctcggatcagattggtgatcagtggctggattgcggacatgctgatactttaaaggtagagccaacagaccgtaggttcaaggttttgcatcataaggggcaatatagcctgtaatg

SEQ ID NO: 968880 - DNA, 120 bp, Artificial Sequence
  ENSG00000176593_37 (sequence is synthesized)
ttcagaaggagtcaagaaataaaggaggcctctcaatacagagctattcaccaagggccttgatggggaggaagtaagttgcaagtgtgtggagatactgctcccttctggcccaagctc

SEQ ID NO: 968881 - DNA, 120 bp, Artificial Sequence
  ENSG00000176593_38 (sequence is synthesized)
cctcccactccagttacccagtgttgcgggcagcaccctattctcttctgggaggtagcggaggcagagccacaccatcattttggatgcacctattatgggaggctggagtgcaatggt

SEQ ID NO: 968882 - DNA, 75 bp, Artificial Sequence
  ENSG00000176593_39 (sequence is synthesized)
tggtgccgcctcagcctcctgagtaactggggttacaggcgcgcgataccacgcctggctaatttttctattttt

SEQ ID NO: 968883 - DNA, 120 bp, Artificial Sequence
  ENSG00000176593_40 (sequence is synthesized)
cttgccttttacctcatccgtggtgtcttttgaagaaaaagattctttagaaatgttttttctttcatagcttgtgttttatgtattactttcaagatcccaactagatctaggtcctaa

SEQ ID NO: 968884 - DNA, 120 bp, Artificial Sequence
  ENSG00000176593_41 (sequence is synthesized)
aaatagtatcctacctattgtttttttaatcaacttaattgtggtataattgcacactgcagataaactgcacatgtttgaagtgagtaatgtaagtttttttgtcttggagccctgagg

SEQ ID NO: 968885 - DNA, 120 bp, Artificial Sequence
  ENSG00000176593_42 (sequence is synthesized)
taaacttttatttcttagctgacaggacttccacacccatgctcctctcggcacctttcacccagcccaagcagcggcggcccagtggtggaaaaggtgccacggccaaacggattggag

SEQ ID NO: 968886 - DNA, 120 bp, Artificial Sequence
  ENSG00000176593_43 (sequence is synthesized)
actcaccccgcattctaggccggagaagcgggcgggcttgggatgccggcaggaggcaatgactctccccaggcgctgcatcctggctccggggcacaagcgcctctccgccctgacgct

SEQ ID NO: 968887 - DNA, 120 bp, Artificial Sequence
  ENSG00000176593_44 (sequence is synthesized)
gatgctcgtctggctgcccgttctttggcatcaaaataccagacgatggtggcgcaccctgtggcctgggctgcctcacctcattcggtcccgcctagaaagaccagaggaccagaaaac

SEQ ID NO: 968888 - DNA, 120 bp, Artificial Sequence
  ENSG00000176593_45 (sequence is synthesized)
cagaagcctgtcagagcgactagaggctggctccagccaacagccgcgcgcctcagcgtccacgagggttacctgggtaacgcgccgcttgggctcggcgcccagccgatgacgtaaccc

SEQ ID NO: 968889 - DNA, 120 bp, Artificial Sequence
  ENSG00000176593_46 (sequence is synthesized)
gcgcttgcgtagtggcgccgccctgatgtgtagtctccaggccgccccgaacaccagcccagcgggtcctggacccctaggtcatgtggctacagtggaatccaggcttggccgaatcca

SEQ ID NO: 968890 - DNA, 120 bp, Artificial Sequence
  ENSG00000176593_47 (sequence is synthesized)
tggccgaatccaggacgaccaggccagacccaccggcagtaccttgcccgcccgctttagtcacttgctctaggtggatctaaacctctaggcctgggcgcggtggctcacgcttgtaat

SEQ ID NO: 968891 - DNA, 120 bp, Artificial Sequence
  ENSG00000176593_48 (sequence is synthesized)
ggagggcaaggcggcagaatcgcttgagcccccggcagcatggagaggtggcagaggcagggccataccatcatcttgggtgcacctattatgggaggctggagtgcaatggtgccatct

SEQ ID NO: 968892 - DNA, 87 bp, Artificial Sequence
  ENSG00000176593_49 (sequence is synthesized)
tgcctcagcctcctgagtaactgggatcataggcgcacgctacatggggtttcgccacccccggcagcatgggtagacatggccctc

SEQ ID NO: 968893 - DNA, 120 bp, Artificial Sequence
  ENSG00000176593_50 (sequence is synthesized)
ggtttcgccacccccggcagcatgggtagacatggccctcccgcctgatctcttaaaaaaactttaaataattcgtggggggggttaccgcccacctgttttcccagctactccggaggc

SEQ ID NO: 968894 - DNA, 73 bp, Artificial Sequence
  ENSG00000176593_51 (sequence is synthesized)
caggaggtcaagacgtgagatcctgtctccaaaataaataaaattatgtacatatgtatgtatatttaattac

SEQ ID NO: 968895 - DNA, 120 bp, Artificial Sequence
  ENSG00000176593_52 (sequence is synthesized)
taatttgtatatagtttataatatatacatgtatgtgtacacatacataaatatatgcgtaaatatatatatgcatatatatatgtaataaaatattaagaacccgcccagccgaagcca

SEQ ID NO: 968896 - DNA, 120 bp, Artificial Sequence
  ENSG00000176593_53 (sequence is synthesized)
gtaataaaatattaagaacccgcccagccgaagccacgggcgctttgggccctcggttggcctcagccacttcagtcgcggccccggggatgttgggggaaccctgtcaggcagcaagcg

SEQ ID NO: 968897 - DNA, 120 bp, Artificial Sequence
  ENSG00000176593_54 (sequence is synthesized)
cgtcctccagccccgggcggccggcggctgtgcacccgccctccctccctcccacggcgctcgcctgcatgcgttttggcaaatatctaaacccgcaaaaccatcactagctctggtttc

SEQ ID NO: 968898 - DNA, 120 bp, Artificial Sequence
  ENSG00000176593_55 (sequence is synthesized)
ccaagatccttgaagcccctccgttcagcattccacgcccctctctgccctgctttcaaaccaccgccaatctgctttctgttatatatacagattagtttggattttctaacagttgta

SEQ ID NO: 968899 - DNA, 120 bp, Artificial Sequence
  ENSG00000176593_56 (sequence is synthesized)
tataaatgcagtgacacatttgagtgtactcttttgtgatctggtttattttactcagcataattattttgagattatccattttgttgcatatgtaagtagctcattccttctattgct

SEQ ID NO: 968900 - DNA, 120 bp, Artificial Sequence
  ENSG00000176593_57 (sequence is synthesized)
gagtggtgttccatctcatggatgcaccaccattgtttatcacgcatctgtccgtggacatgtaaactgttttctatttgcggctgttaaaaataaacttctgtgaacattcgtgtacaa

SEQ ID NO: 968901 - DNA, 120 bp, Artificial Sequence
  ENSG00000176593_58 (sequence is synthesized)
ggtaagtccattcctgcttcagggcctttgtacgtattgtttcctcttcctggaatcttcttccttgtacagccccagggttttctttttttcatccagatcacagcacagatgtcacat

SEQ ID NO: 968902 - DNA, 120 bp, Artificial Sequence
  ENSG00000176593_59 (sequence is synthesized)
cctggtaacagccagctgtgactcatctccctaattctcaattgtattactctctttttattttcttcgtatcgtaactgatagtctcatacagtacagaagccaagttttaagatatgc

SEQ ID NO: 968903 - DNA, 120 bp, Artificial Sequence
  ENSG00000176593_60 (sequence is synthesized)
aatcaccaaatacctgctacacaaacctcaatgttcatataaaataagactagaattcatattctaaagagagatgaggtagctctgttcacttttgagagggaactcaaatgagagaga

SEQ ID NO: 968904 - DNA, 120 bp, Artificial Sequence
  ENSG00000176593_61 (sequence is synthesized)
tacctttgacctaaaggtgtcaggaaaccagatgaagaaaaacacccctgctatgatttgaatgtttttatcctctccaaaattcatgttgaaacttactccccagtgcagtagtgttgg

SEQ ID NO: 968905 - DNA, 120 bp, Artificial Sequence
  ENSG00000176593_62 (sequence is synthesized)
cataaggctctgctgtcatgaatggattaatgttgtaaaccaaaaaataaaattctaagccccccaccccccaaccatatgaatagacccctcctctcagccaagggcattccaaagtta

SEQ ID NO: 968906 - DNA, 120 bp, Artificial Sequence
  ENSG00000176593_63 (sequence is synthesized)
attccaaagttaatttgaaaaatgagttcgggccatgatgggaagcagaagctggacttgcctcattataccctcctcccttctagaattagtgatagaacagactctttaagtctgata

SEQ ID NO: 968907 - DNA, 120 bp, Artificial Sequence
  ENSG00000176593_64 (sequence is synthesized)
agtctgttatctccggaggtttcatctgcttggtaaaaccttgagttccacaaccccagacattcctttctattgacaataactctttaaatcaattggcaatcagaaatctttaaatct

SEQ ID NO: 968908 - DNA, 90 bp, Artificial Sequence
  ENSG00000176593_65 (sequence is synthesized)
tagatgtataaaagcaagctgaaccctaaccaccctgggcatgtcctcaggatctcctgagagctgcgtcaggggccactggtcaccata

SEQ ID NO: 968909 - DNA, 120 bp, Artificial Sequence
  ENSG00000176593_66 (sequence is synthesized)
aaagcaagctgaaccctaaccaccctgggcatgtcctcaggatctcctgagagctgcgtcaggggccactggtcaccatatttggctcagagtaaatctcttcaaatattttacagagtt

SEQ ID NO: 968910 - DNA, 120 bp, Artificial Sequence
  ENSG00000176593_67 (sequence is synthesized)
gagattctgcatgtgcttgcattctctttctctctctctctttctttctctccccccacccccaccctccaccaccctgccctttaccttctgtcaggtgaggatgcagtgtccaaggca

SEQ ID NO: 968911 - DNA, 120 bp, Artificial Sequence
  ENSG00000176593_68 (sequence is synthesized)
aggctgaattcaagggagaggaaaatttcaagtaggacaggctgaattcgagggagaggaccatgagagaggtaaggtggaaggggcaaggtgttgggacaggccccagctggcaggaag

SEQ ID NO: 968912 - DNA, 120 bp, Artificial Sequence
  ENSG00000177640_0 (sequence is synthesized)
cagggctccccgacttccctatggctgatgtcaaaacgcctcgcgggggcagcccaggggcacggccgctccgggggtcccctttcgtctggagaaacacagaggcccaccatcacctgg

SEQ ID NO: 968913 - DNA, 120 bp, Artificial Sequence
  ENSG00000177640_1 (sequence is synthesized)
tctgcgcggacccccgcccctgtctccaccttccccaggcctgcggggcacgtgaggcctggccacacggacccgggcggagggctgcgggggtgaagggagcccccgccccaattctgc

SEQ ID NO: 968914 - DNA, 120 bp, Artificial Sequence
  ENSG00000177640_2 (sequence is synthesized)
ccgcccggcgttcgtccgcaggctcggcccggctcctcctcccgaccccgatggagattcagaaacataaggacaacaagaaacttccccaaggtatcattatagtctttagacttcaga

SEQ ID NO: 968915 - DNA, 120 bp, Artificial Sequence
  ENSG00000177640_3 (sequence is synthesized)
cacacaccacacctcaaatatatacacaactgaaaggaaaattaaggaagtttttcaaagaaccctattccgagtaagaagtgtgttgcatgaatttctaagagccagaaaatgcatgac

SEQ ID NO: 968916 - DNA, 120 bp, Artificial Sequence
  ENSG00000177640_4 (sequence is synthesized)
acaggagaagatgtaccctcatctgttcagtgagagatgtgcaaatcaacatcaacacagaactgctgaagaaaaaaaatatgtgtgtggattatatatatacatataagtgtgtgtata

SEQ ID NO: 968917 - DNA, 120 bp, Artificial Sequence
  ENSG00000177640_5 (sequence is synthesized)
ggttgccgtggcgactggaggcgcgcgacgcgggcgcaatggcggggacccggggcttgatgctgcttgggcctggcccagtggcgggtcctagggacgtgggtacctgcagaggccggc

SEQ ID NO: 968918 - DNA, 120 bp, Artificial Sequence
  ENSG00000177640_6 (sequence is synthesized)
gcaagctgggagccattaagtaatggctaccaccactcccccacccccttcagtaaaacacatcctgaacattgggcccatgttttcaagaagaatgtgccccactgccccttggaaact

SEQ ID NO: 968919 - DNA, 120 bp, Artificial Sequence
  ENSG00000177640_7 (sequence is synthesized)
ccatttcatttacttggttcagttagttaatgacggtccattttgactcaaatatccagttccctttcatcaatcatgtctttctggactgtcagttttagggcaaggattacaaagccc

SEQ ID NO: 968920 - DNA, 120 bp, Artificial Sequence
  ENSG00000177640_8 (sequence is synthesized)
ttccatgcagatatccacagagaaagacccagacccacatccccatttaggattgcttagggactcatttcttccgcttccttccaaatgaaaagaatgagctatgtgaaaggggaaaac

SEQ ID NO: 968921 - DNA, 120 bp, Artificial Sequence
  ENSG00000177640_9 (sequence is synthesized)
cccactggaaaatgaatgttggtgactcaagtgttaatctagaaagtcttatgatttggtgctggaaaagggcattgtaataagatggttctttataccatgcaaaccaggggaatacaa

SEQ ID NO: 968922 - DNA, 120 bp, Artificial Sequence
  ENSG00000177640_10 (sequence is synthesized)
aacactgtcaaccatgaaaataagatttaatttggaatcacaacacatagggttttttccactttaaattctttttattcattcatatttgttataaatattcaatagaaatgcagtttt

SEQ ID NO: 968923 - DNA, 120 bp, Artificial Sequence
  ENSG00000177640_11 (sequence is synthesized)
tcaagactgaaatggtctttaatgaagcaagccatgtgtggcttttcaggcgagcattttcatgcttggttaactgtaaggatgttcatgttcctttcccaaaaaatatgatttgtgatt

SEQ ID NO: 968924 - DNA, 120 bp, Artificial Sequence
  ENSG00000177640_12 (sequence is synthesized)
ctgcttaggtctctgaaaagcaacttattcactggagatgtgaggagccatccgcacatcacaattctatagacatcaaacgcatgaagcatttcggatctgctttaagactgaggcaga

SEQ ID NO: 968925 - DNA, 120 bp, Artificial Sequence
  ENSG00000177640_13 (sequence is synthesized)
ctttccatctggacacagccgaccatccatgtgtcattacaatgaatccagcacttccctggaagctggaagggtcaaattcaacttcaactctgccacttcctgcttaacttgctgttt

SEQ ID NO: 968926 - DNA, 120 bp, Artificial Sequence
  ENSG00000177640_14 (sequence is synthesized)
aaccttgggcaagctgccatcccacacgaggccgaaggtgtcggtttttaaaatacagaaatttggttccatgagggattatcaatatactgctggtgggccaaattccatctgctactt

SEQ ID NO: 968927 - DNA, 120 bp, Artificial Sequence
  ENSG00000177640_15 (sequence is synthesized)
gcctttgtaaataaagttttattgaaacacaaacatgcccattagtttactcttgtctgtgactacaagggcaaagttgaatagttgttacagagaccatcaggctcacaaagcctaggt

SEQ ID NO: 968928 - DNA, 120 bp, Artificial Sequence
  ENSG00000177640_16 (sequence is synthesized)
tatttactatctgcccatttacagagtaagtttgccagccctggactggataattttttgagttctttctaattctagaattctttatatattttatgaaacccctaatgtttatatatt

SEQ ID NO: 968929 - DNA, 120 bp, Artificial Sequence
  ENSG00000177640_17 (sequence is synthesized)
aattatttcaatacccgtgtctttactgagtccctcctatgaagcatacatcaagacatatgtgtgatacattaactaaacttttaacagtatcttaaataggatttcaatgactaacag

SEQ ID NO: 968930 - DNA, 120 bp, Artificial Sequence
  ENSG00000177640_18 (sequence is synthesized)
aatgtttaagaagttaaaaaaaaatcaagaaaaccccgtatggcactagagacttattgcattaagacatcatcttaacagattgtttagttttggtaatataatttgacatctaaacat

SEQ ID NO: 968931 - DNA, 120 bp, Artificial Sequence
  ENSG00000177640_19 (sequence is synthesized)
aagctgagagggatctccctcaaaacctttgataatatgattcattgtcaaatgtttgttttgcctatctggcactcattaattaattctttttaatatagcttggatttactgattttg

SEQ ID NO: 968932 - DNA, 120 bp, Artificial Sequence
  ENSG00000177640_20 (sequence is synthesized)
aaaaagagaattattcttattgatgttgctaaaatatccaggtggcttgaatttcaccaactagatagtttaatctagcacatttgtgtagccctaatcaaatctttactaacagatgtg

SEQ ID NO: 968933 - DNA, 120 bp, Artificial Sequence
  ENSG00000177640_21 (sequence is synthesized)
agaagcccagtactggagctaatgtttgtgtctcaatgataattaaattagcttaataaggaaaataaatgaacaataatcaccaaaatttttccctaaacctgtgttatagtcttaaaa

SEQ ID NO: 968934 - DNA, 120 bp, Artificial Sequence
  ENSG00000177640_22 (sequence is synthesized)
acattttttcccctatggaggcttttggtaataaaacacaaattgagggattttaattaaaagaaatttttttttcaagaactggtcatgtactaaattgcttataatcaaataatcaag

SEQ ID NO: 968935 - DNA, 120 bp, Artificial Sequence
  ENSG00000177640_23 (sequence is synthesized)
tagcatttcttttattataagagcaaaacctataattaagccaaaattcaaatttgtttttaaaggttgaataatcttttgttttggccaatagtatgtggattttttttttaagtatta

SEQ ID NO: 968936 - DNA, 120 bp, Artificial Sequence
  ENSG00000177640_24 (sequence is synthesized)
tctctttgtagtattttctaatggataggaaatgcctttctcaggttgaatgattatttccacatagaattagttcctgcttacaacagtgctccactaatgtaatggctcggtgaattg

SEQ ID NO: 968937 - DNA, 120 bp, Artificial Sequence
  ENSG00000177640_25 (sequence is synthesized)
gctttataattcattaatcatagctcacattgagcttttggctccaggtgacagtgcccaccacaggccaaataacttctcatttaaaggcaatttgtacaaatagggaaggtgagaatt

SEQ ID NO: 968938 - DNA, 120 bp, Artificial Sequence
  ENSG00000177640_26 (sequence is synthesized)
ctcacagtcccagagggattgaagagttttaaaaaaccaagataaggcattttatggaagacaggttgatggaagaaaagtggccattggaggatgaggcagatggctttccagggaggc

SEQ ID NO: 968939 - DNA, 120 bp, Artificial Sequence
  ENSG00000177640_27 (sequence is synthesized)
cctggagctgccaccatggggaaggccatgttgcagctgctgatcagagcacattggacggtgtttccgtgtgaacatgaagacaatgctgcctctgtttctgtgacgctgtgctctgat

SEQ ID NO: 968940 - DNA, 120 bp, Artificial Sequence
  ENSG00000177640_28 (sequence is synthesized)
cttgctggaggcgaagtggtgtcagctgtgcttacaggacagtcagtggtggtagaaaagaggccagtgtgacctgtgaaggactgggcccctctcactcaacctgagtgcctgcagttg

SEQ ID NO: 968941 - DNA, 120 bp, Artificial Sequence
  ENSG00000177640_29 (sequence is synthesized)
tggccacctttatttgtgtattctactgtatttatttatttgcctggctaattagctctgtgccacattcctaagctagatgtgtcccttcatgtaagtgagagggagacagaaagaaag

SEQ ID NO: 968942 - DNA, 120 bp, Artificial Sequence
  ENSG00000177640_30 (sequence is synthesized)
actgaggtggggggtaggagaaagagaggaaagcaagcaagaagaaagagaaagagagaagaagaaaggaagaggaaagaaagagagaaagagaaagagaaggaaggaaggagaaagaga

SEQ ID NO: 968943 - DNA, 120 bp, Artificial Sequence
  ENSG00000177640_31 (sequence is synthesized)
aggaaagaaggagccttctaattttatttcatttctccaataaatgttcctatattaagactttagacaaagattagaaatatgatttgacagaaagtgtatggatgtgttgttctattg

SEQ ID NO: 968944 - DNA, 120 bp, Artificial Sequence
  ENSG00000177640_32 (sequence is synthesized)
cattgtaagtaaagtatccatggcaatatacaaataatacagctcctacccctattctctgttgttactttcatgtgttgtcttaactttttaaatttcaagataatattgcgcttattt

SEQ ID NO: 968945 - DNA, 120 bp, Artificial Sequence
  ENSG00000177640_33 (sequence is synthesized)
atttttccatgaggaggcctaggatttagcttgattagaaaagctgtggaaaatgaatgtgctaattactttaaatcaaattgaaaataaattttatcctgtttcatgcaaaacatagtg

SEQ ID NO: 968946 - DNA, 120 bp, Artificial Sequence
  ENSG00000177640_34 (sequence is synthesized)
gaaaattaaggaagtttttcaaagaaccctattccgagtaagaagtgtgttgcatgaatttctaagggtgggagtggcacagagggaaatccaaccagtctcagacttggccacagcagg

SEQ ID NO: 968947 - DNA, 120 bp, Artificial Sequence
  ENSG00000177640_35 (sequence is synthesized)
attcactgccagaggaagatggaaaggtgtacggcatgatccaaccgcaagaaagacccatgaatactacacccatcgaaactgtctggaaacaggcagatattggaaccccagagcccc

SEQ ID NO: 968948 - DNA, 120 bp, Artificial Sequence
  ENSG00000177640_36 (sequence is synthesized)
gcgagactccatctcaaaaaaaaaaaattcatgatgaaatctagctcaccaagatgactcaaaataaagatttcaagcacagagaattgatggtaaaaggatgggccaagtccctttaga

SEQ ID NO: 968949 - DNA, 120 bp, Artificial Sequence
  ENSG00000177640_37 (sequence is synthesized)
gatggtaaaaggatgggccaagtccctttagaaacagaagtaaaaccaaacgccagggtatagatggcctcttgtgcagatgtccctaatgtatctatgaaaccttcctgaaaaaccaaa

SEQ ID NO: 968950 - DNA, 120 bp, Artificial Sequence
  ENSG00000177640_38 (sequence is synthesized)
agcaaacccagaagaatcctcccggaacaaacaaaccgagaaccttaaagatgttctacatctaagaaaggaacttataaatcacataaataagaaagtattggtatgaattaactgcat

SEQ ID NO: 968951 - DNA, 120 bp, Artificial Sequence
  ENSG00000177640_39 (sequence is synthesized)
taaaagtaaataactttgtgaatataattacaaataaatgcaaatgtgataatttgtgaaaggaaatgtatatactgtaaacaatgattggagcagaaaaaagaagttaattatatgctg

SEQ ID NO: 968952 - DNA, 120 bp, Artificial Sequence
  ENSG00000177640_40 (sequence is synthesized)
acatttctaaagctggctaaagtttgagagacactatccaagggaaatttctccgtaactctttttctcagaagaaaagtaaactaaaagtaaaaataagcagtaccactaagtttcaag

SEQ ID NO: 968953 - DNA, 120 bp, Artificial Sequence
  ENSG00000177640_41 (sequence is synthesized)
tgatcttctcctaaaagaagaaaaggcctatattcaggcacaagaaaagtatattctcttttatccatgcagaaaacagctagtggttgaaaatcaacacttcagacctcttgtctacat

SEQ ID NO: 968954 - DNA, 120 bp, Artificial Sequence
  ENSG00000177640_42 (sequence is synthesized)
aaagccaactgcccctttgttttactgatgtcttcaatgattttacttagatttttctacggcatttactgaattagctaagcagacacagatccagtccttcatgaatatggtttggag

SEQ ID NO: 968955 - DNA, 120 bp, Artificial Sequence
  ENSG00000177640_43 (sequence is synthesized)
actctctactgaatcagcactcttagcttcaccgacatagtctcttggtagaccagaaggtgtatcttatctggaaagactgctatatctacacccacaaaaagcattatttatctgaac

SEQ ID NO: 968956 - DNA, 120 bp, Artificial Sequence
  ENSG00000177640_44 (sequence is synthesized)
actaaattctgacttccttgccattttagggagccactttaaaacattttcaatatttgctattttgtagcagcaaatccttcagaaggaggtcaagtgatggcctttatctgttcccag

SEQ ID NO: 968957 - DNA, 120 bp, Artificial Sequence
  ENSG00000177640_45 (sequence is synthesized)
tgtcttgcccttaggtcctcagggcaccccctggacagcagccttaggaaccaggtacaaagcacaagcactgctggtccgcatggtaaggaatcacttccagactgggccttcccatgg

SEQ ID NO: 968958 - DNA, 120 bp, Artificial Sequence
  ENSG00000177640_46 (sequence is synthesized)
gcttccctgagcttcctggactcaaatcatagtccttcttttcctctcccctttggacttgataaacgcagtcccattcatttaatctccaacttagaaatccggagaatgtgagccctg

SEQ ID NO: 968959 - DNA, 120 bp, Artificial Sequence
  ENSG00000177640_47 (sequence is synthesized)
ggatttactttcagacaccctcgtcgataaccttggccacttaggttgctgcagcctgtccccagggagacagttagaatggaacaatgacacaaacaacaccaacaataacaacagcag

SEQ ID NO: 968960 - DNA, 120 bp, Artificial Sequence
  ENSG00000177640_48 (sequence is synthesized)
cagaagcagaagcaacaatagtagaacgagaaataatttataacatgcttactacatgccaggcactaagtgcttacccatattaactcagttaattcttataacaaccagatgagatag

SEQ ID NO: 968961 - DNA, 120 bp, Artificial Sequence
  ENSG00000177640_49 (sequence is synthesized)
attttcttattatcccgattttacaaatgagcaaacagaggcacaagcaggttaagaaacctccccaaggttaaacagtgagaaacagcaaagatttgaacagtgagaaacagcaaagat

SEQ ID NO: 968962 - DNA, 120 bp, Artificial Sequence
  ENSG00000177640_50 (sequence is synthesized)
ttgaaacagcaaagatttgaacctattgttcgggagtccatgctgttactcatttctttatgctgccataatctaatataaaattgaataacaataaatgcaccttatatttgtatagct

SEQ ID NO: 968963 - DNA, 120 bp, Artificial Sequence
  ENSG00000177640_51 (sequence is synthesized)
atacacactaatttacatgatcttcataagaactatgaaatggctgtgattatccccatttttaaaatgatactataaaggcataaaatgctgtatttatggtatgcaaccctttggtga

SEQ ID NO: 968964 - DNA, 120 bp, Artificial Sequence
  ENSG00000177640_52 (sequence is synthesized)
acaaccctataaatatttaattacttatattgatgttcttcctacgtctaagaaaaatgttatttccattcccaagatgttagtagagacgaagatttttcaatttgtctccttgatttt

SEQ ID NO: 968965 - DNA, 120 bp, Artificial Sequence
  ENSG00000177640_53 (sequence is synthesized)
gttggattatagcattaaagttatttttacaaagccatctacggtaacccagtagaaagggtaagcctgttggcttaggaaaactgaatggcattcagtttcttcaaagaaatttgggac

SEQ ID NO: 968966 - DNA, 120 bp, Artificial Sequence
  ENSG00000177640_54 (sequence is synthesized)
agatgtgggttttttttcttcttcttcttcaacaaatccagaagatgaaaaatgtattttatttcttgtgaaatgcatttttctgttcatctcagtatgtgggactgttgaagtttataa

SEQ ID NO: 968967 - DNA, 120 bp, Artificial Sequence
  ENSG00000177640_55 (sequence is synthesized)
gtttggcagtgttctaacatggccatcctgttctcctttagcaacttattaaatgtattttttttaatgaaaacagaacatagtggaaaacttttttcatcttttgacatttacttgttg

SEQ ID NO: 968968 - DNA, 120 bp, Artificial Sequence
  ENSG00000177640_56 (sequence is synthesized)
gttagtgttttctaccaacaagatctcaaaccagtatgacaaaacatccacaactcatttccaaaggcattgcagatgatggtgcccggctcttctgtacaatgttttattatttattta

SEQ ID NO: 968969 - DNA, 62 bp, Artificial Sequence
  ENSG00000177640_57 (sequence is synthesized)
tctacattaggtttttctcctaatgctatccctcacctactccccacccccgacaaacccta

SEQ ID NO: 968970 - DNA, 74 bp, Artificial Sequence
  ENSG00000177640_58 (sequence is synthesized)
ggtttgctgcacccatcatctacattaggtttttctcctaatgctatccctcacctactccccacccccgacaa

SEQ ID NO: 968971 - DNA, 120 bp, Artificial Sequence
  ENSG00000177640_59 (sequence is synthesized)
gttaactaattctttttagatcaatgttggtttattggaagggaaaatttttctcaaggtttcttacacaacaatgctactaaattgcaatgtggatactccacgggattttaaaaaagt

SEQ ID NO: 968972 - DNA, 120 bp, Artificial Sequence
  ENSG00000177640_60 (sequence is synthesized)
tttagtgtggtcttgcttggaggcaggtgggcagacagaatggcattttccatttcttcctggatttaggaccctaagagattttcccaagtcattttctggaactcacgaagctccctt

SEQ ID NO: 968973 - DNA, 120 bp, Artificial Sequence
  ENSG00000177640_61 (sequence is synthesized)
cctttgatttttcaggcctatttcagctctcattttcatatcccagctttgcctttacactcgatattttaaagagcttcagagttgaccaaaattgtgtcctagtgcatggagaagtta

SEQ ID NO: 968974 - DNA, 120 bp, Artificial Sequence
  ENSG00000177640_62 (sequence is synthesized)
ttccattctctccaaattgttatcctggatgattggatttaacaacctctaggaggatttgtggaggttttagtttgatttccctgtgatcattgatggtatttttattttcatttgcta

SEQ ID NO: 968975 - DNA, 120 bp, Artificial Sequence
  ENSG00000177640_63 (sequence is synthesized)
agaagctttctgcagtacagggaatagctaatcatgccattcctatctttggctcatcttaacttccttcttactaaacatccacctttaaatactatgatctaagaatcataattattc

SEQ ID NO: 968976 - DNA, 120 bp, Artificial Sequence
  ENSG00000177640_64 (sequence is synthesized)
ctatacaatgtgctaaccaaatcacagcacaagtgatagatgtgatttaataggtagtgcatgccatcacatgaaattcagtgttagatataaccatatctaatgctgtcttgttcctgt

SEQ ID NO: 968977 - DNA, 120 bp, Artificial Sequence
  ENSG00000177640_65 (sequence is synthesized)
cttgtagttcacctattaaacctactaggctgacagagcacaatcttgggggaagcatggaaagagaagagaaagaattctccgtagacatgcatgaacattcataggatagggaaaaaa

SEQ ID NO: 968978 - DNA, 120 bp, Artificial Sequence
  ENSG00000177640_66 (sequence is synthesized)
aaaggagttctataagcacttttctatattccctaaactgtaataggctgaattttttgtgcccctttattttctgttgggtgcaggaaaaaataactattctacagatagctcacagaa

SEQ ID NO: 968979 - DNA, 120 bp, Artificial Sequence
  ENSG00000177640_67 (sequence is synthesized)
gagtggccaacaactacggttacatagcctgcttttacacaattttttccagaacccataacttgaatgaaaagctctttttttttctttgctccacttgtgatgagaatagtttgtttg

SEQ ID NO: 968980 - DNA, 120 bp, Artificial Sequence
  ENSG00000177640_68 (sequence is synthesized)
actcataccaaaccaaatcaagcatttctgtgggcacaaagaggaatgtggagcaaagaaagattttcttcctaaaaaagagtgtgtgcatggaaaacaaaattgcttcagatttcacaa

SEQ ID NO: 968981 - DNA, 120 bp, Artificial Sequence
  ENSG00000177640_69 (sequence is synthesized)
catcctttaccattaaacactgaaggcggtttcgggtcagtccaatttcctttgcagatatttgactttaaaaatcacatattcaacttttaaaaatggatttgtgtgaaatgatatata

SEQ ID NO: 968982 - DNA, 120 bp, Artificial Sequence
  ENSG00000177640_70 (sequence is synthesized)
aaaaaaatctcatggtatataagtcatgatgagtttcagcttatgtttaacctctgcctcttcatctttaagagatgcaaattgcctccaggcaatagtggaaatgtctcgtatatcttg

SEQ ID NO: 968983 - DNA, 120 bp, Artificial Sequence
  ENSG00000177640_71 (sequence is synthesized)
tcctgcttcctccaaatcagcccccaaagacgtttacattaggaactcagagtgatgctgaaataaatgagtttcttcaaaaggctgactgccccctatctaggaaattaaaaatcactg

SEQ ID NO: 968984 - DNA, 120 bp, Artificial Sequence
  ENSG00000177640_72 (sequence is synthesized)
gagagattttttttttaaaaagggcaataacagataagtacatagttcttgctttctcagccagccctattaatactttttagaatctcaaatgactgatactgttaactatgtggctaa

SEQ ID NO: 968985 - DNA, 120 bp, Artificial Sequence
  ENSG00000177640_73 (sequence is synthesized)
ttttaagagggagagtaaaactttttctaaacgactcaagtatcatactctctcagttgttccaagatctcagatttgtgactgtacttattcaaagaatgtcatgcatttgcttttctc

SEQ ID NO: 968986 - DNA, 120 bp, Artificial Sequence
  ENSG00000177640_74 (sequence is synthesized)
ttcaagaatgtaacattacaaatgtcttttaaatatgatttgatgtgaagctacaataattctttgcatgcatttgagaactacagattctggcagttgactcagaagagcttctctgct

SEQ ID NO: 968987 - DNA, 120 bp, Artificial Sequence
  ENSG00000177640_75 (sequence is synthesized)
tccttaaaacaatgaaaacaatctcacttaccttctcccaaggctgctgtgaacactaaaattgcgaaaaatcagaaaactgaggtatagagtgagttctggatggttctccggggcccg

SEQ ID NO: 968988 - DNA, 120 bp, Artificial Sequence
  ENSG00000177640_76 (sequence is synthesized)
tggccatgctgtacctggcaacaacctctgggaagtgagaacaacaggtatcaccatgattattacaattttatagacaaggaaagcaactcaacatggagaaatgacttgtctaacatc

SEQ ID NO: 968989 - DNA, 120 bp, Artificial Sequence
  ENSG00000177640_77 (sequence is synthesized)
actgggcagagttagtacctgaaagaaccaagatgcaagtgcaatgcctttgattctaacctccatgcccttttaataaggttccatgagattcctttataaactgtaaagtgccctata

SEQ ID NO: 968990 - DNA, 120 bp, Artificial Sequence
  ENSG00000177640_78 (sequence is synthesized)
aataagaggtattacatgatcagacccctttgaccttactcctatctgaggccaaactaggaaaagtcagagaaatattggaatgttcccattcctgactcgtcactggatttttcatag

SEQ ID NO: 968991 - DNA, 120 bp, Artificial Sequence
  ENSG00000177640_79 (sequence is synthesized)
gacagttcagagagaaccaaaacagaaatggcagtgaaataccagatatttggagcagaaaactcagctctgggacaaaggctggtcatccgctgagaaaagaggtgataatttgggagc

SEQ ID NO: 968992 - DNA, 120 bp, Artificial Sequence
  ENSG00000177640_80 (sequence is synthesized)
tggaagagcaaggtcacaagaaggaaagatagctaaaggaatgagagacactgggaggaaaggaagggtggccaagctggtacatgggctggtgcagaagagtctgacagatggctttca

SEQ ID NO: 968993 - DNA, 120 bp, Artificial Sequence
  ENSG00000177640_81 (sequence is synthesized)
tcactgagttcttttacatgatggttagaatccttaaagtgatggcctcccaggtgctctatctgaccccaggtgtgctgggggagcctgcacatatcccttctatctcaccgctggcct

SEQ ID NO: 968994 - DNA, 120 bp, Artificial Sequence
  ENSG00000177640_82 (sequence is synthesized)
tcatgctctttgtcaccaaccctggcacctctctacctgagggtcttctctggtgggcagaatccactctgtctaagcatgggtgggtaggaagtgcctgagaattaaaaaccctctctt

SEQ ID NO: 968995 - DNA, 120 bp, Artificial Sequence
  ENSG00000177640_83 (sequence is synthesized)
tcactggatgatgatgtgagttggtgcataaataccccagctccctcacccgtcagggccgtaatgctgagcacatgctctccattggcttccagagttccctttggcattaaggtccag

SEQ ID NO: 968996 - DNA, 120 bp, Artificial Sequence
  ENSG00000177640_84 (sequence is synthesized)
gtattcaccatggtcatggtagcctgcttgataatgctccatgttttggttaaattacctccctgtctgttttttctacttcccttttcctgtttccttcacctcccaaataaactactt

SEQ ID NO: 968997 - DNA, 120 bp, Artificial Sequence
  ENSG00000177640_85 (sequence is synthesized)
gggctgcagggctgcgggcgcttggttcggcctggcccggccggcggctcctaacaccgggcgggcggctgcggcggcacttccgggttggccttctccatgttggtctcgggaacgtga

SEQ ID NO: 968998 - DNA, 120 bp, Artificial Sequence
  ENSG00000177640_86 (sequence is synthesized)
cttcctcctagatgacagtctttgcactgtgtcctcaagggtagaaggaatgagccagctctctggggtctcttttataaaagtgctaatcccagtcaagagggctctgccaggggccct

SEQ ID NO: 968999 - DNA, 120 bp, Artificial Sequence
  ENSG00000177640_87 (sequence is synthesized)
gcctcccaatattatcaccttggtgctaaccaatattttctaacttccatttgctactctaatgttaactctgttatctcaattttaataataataatagctgacatttgctgatgacat

SEQ ID NO: 969000 - DNA, 120 bp, Artificial Sequence
  ENSG00000177640_88 (sequence is synthesized)
gccttacactgcattcattaacatctcaatctcatttaatttgaaagagataaagcaacagccaatacacacattaccactttttttcctatcctgttacaaaggagatgaggttgtggg

SEQ ID NO: 969001 - DNA, 120 bp, Artificial Sequence
  ENSG00000177640_89 (sequence is synthesized)
agaactctctttaggcattgttcacatcaggacacttgagaaacagatccttcatatcctttggacaactcttgtacttcagttggctttaagcattatcagagcatccttgacatgatg

SEQ ID NO: 969002 - DNA, 120 bp, Artificial Sequence
  ENSG00000177640_90 (sequence is synthesized)
ccaggtcctaacaccgcttcagtgaaagctcagagacaagcaaaagataattgatctattttgtgccgcatgacatactcgatgagcagcaacatatactgtggtgtttggcctccataa

SEQ ID NO: 969003 - DNA, 120 bp, Artificial Sequence
  ENSG00000177640_91 (sequence is synthesized)
actgcagagaaattgaaatatagtaataaactttatgcacggacaaagggtgacctaggatatcactgaactcttctgccttcataaccaaatgtcaaaatgctaatagtctgttccttg

SEQ ID NO: 969004 - DNA, 120 bp, Artificial Sequence
  ENSG00000177640_92 (sequence is synthesized)
tggaaaaatgttgagttttcattcgggagatcaggacttacacactaactcaacctacagtagacacttgctagagaataaaacacaataatgcacgtagaatcgttctgtaaactgtaa

SEQ ID NO: 969005 - DNA, 120 bp, Artificial Sequence
  ENSG00000177640_93 (sequence is synthesized)
agaattttacaaatatgaaattttattatggttttagtcttgtatctattaaatgtatacctattagcatgcacacttttttcttctagcatcaaaggttgcttaaaataacagtggaac

SEQ ID NO: 969006 - DNA, 120 bp, Artificial Sequence
  ENSG00000177640_94 (sequence is synthesized)
atttaaaagcaagagaattctaatttaccatcattcaaattatgttaaatccaactcaactttataagctaaggaacatgtgaaggataaataaaaatttgatagttaagaagataaata

SEQ ID NO: 969007 - DNA, 120 bp, Artificial Sequence
  ENSG00000177640_95 (sequence is synthesized)
tatgcagataaattatgtgatgagtcaaattgattattacaggacaatatactgtattaataaaacagactaaatttaaatgtattgtgcaatggcaaacctagtgccttcttggaaaaa

SEQ ID NO: 969008 - DNA, 120 bp, Artificial Sequence
  ENSG00000177640_96 (sequence is synthesized)
ggcagtagctaggagagctagactaactgctccagagaagtgaggccaaggcatgcaacagagtcacttctccgcttttccatttcaaagtagacaataggggaagatataacaaaagcc

SEQ ID NO: 969009 - DNA, 120 bp, Artificial Sequence
  ENSG00000177640_97 (sequence is synthesized)
aaaatttatgcagtaaagaaaaaattggggaagaatgcaattaatgaaagacctacactatacaaggatttcactggacgaagtgaagaatagggagcttgtaaagaagatcaagatagt

SEQ ID NO: 969010 - DNA, 120 bp, Artificial Sequence
  ENSG00000177640_98 (sequence is synthesized)
tggacaggtggaatgtctccaagacctttccactcgcctccccacttgttgagcatgggagctgggcaaatggatgatagaccatccagataaattttggcatctaaaagtaattgtcac

SEQ ID NO: 969011 - DNA, 120 bp, Artificial Sequence
  ENSG00000177640_99 (sequence is synthesized)
ttgcatcttgtttctcaagaaggaccttgaaagtaagcaaactcctagagctccctaatcccatgcaccacattggcttggagcagcaacagtagcagtagaatagcagagcagggggac

SEQ ID NO: 969012 - DNA, 120 bp, Artificial Sequence
  ENSG00000177640_100 (sequence is synthesized)
tcaaggccaagacggtcttgttacaggcaactccctgagcctccttccatccgagaggtacctgagaacctctaaaaatttcatttccccctgaaaggtgagaaagtgactgagagaggg

SEQ ID NO: 969013 - DNA, 120 bp, Artificial Sequence
  ENSG00000177640_101 (sequence is synthesized)
ctgataaactagggtcctccaggtcgggattgggaaaattcagaatatacatggataaagaaccagggactggccatgataggacctacacctattacttcatatgacttgctaatagga

SEQ ID NO: 969014 - DNA, 120 bp, Artificial Sequence
  ENSG00000177640_102 (sequence is synthesized)
gtcaatgctgacagccatagaccttcctgggcttctccctggggcctcaatttcagtccagcgttaagaacttagttttggtctcagggagaaggatagggagatggaaattttacctga

SEQ ID NO: 969015 - DNA, 120 bp, Artificial Sequence
  ENSG00000177640_103 (sequence is synthesized)
gtttaaaaacctgaatttatgcagatatgacattttctggatacattttgacaagagtagaactaggggaatcaaaatagagattatgttgagtaacagggaaatagagttacagttctt

SEQ ID NO: 969016 - DNA, 120 bp, Artificial Sequence
  ENSG00000177640_104 (sequence is synthesized)
gcctatcatctgagtatatggactgaaatactgtacctgctacatacattgtaagcaaagtgaggtcatggccagagcccaagggtttgaggagccttctatgacgtgatgagatggtct

SEQ ID NO: 969017 - DNA, 120 bp, Artificial Sequence
  ENSG00000177640_105 (sequence is synthesized)
tgggtcccctatatgattagcttgtggtggtacattaggactaaatattccaaatgcattaacataaagctgaagtgatgtccttagtgaacttggtcttaaaaattaagagcattttgg

SEQ ID NO: 969018 - DNA, 120 bp, Artificial Sequence
  ENSG00000177640_106 (sequence is synthesized)
ttgggtgacctaccaacaacatacagggaagagatacaggatcttggttgattctcactgcagtagacattgattttgtggtgtagcagcttgtaaaattaatgcaaatttgagatgaac

SEQ ID NO: 969019 - DNA, 120 bp, Artificial Sequence
  ENSG00000177640_107 (sequence is synthesized)
taataaaaatatagttcatgaaggtgccccactacttgccctacctctcctctcctgttacaatagatcacccatctttgttcccatctgaggactcaggtaatggacttcatctcttct

SEQ ID NO: 969020 - DNA, 120 bp, Artificial Sequence
  ENSG00000177640_108 (sequence is synthesized)
tgtcttctcaaggattttgcatctgccattatcctttctccctcctgtatcctcagttgttttcttctctactggatcaatgtcatcaacatacaaatattatctagtatttctcatatt

SEQ ID NO: 969021 - DNA, 120 bp, Artificial Sequence
  ENSG00000177640_109 (sequence is synthesized)
aatattatatcctgaactcatttcaactgcgtgtgtaaatcaccacctgtatctgcagagaaagtgttttaacccagcctgctgcccccaaccaacattatttccagctttgaacttatc

SEQ ID NO: 969022 - DNA, 120 bp, Artificial Sequence
  ENSG00000177640_110 (sequence is synthesized)
ctgggattgcttttgctagccagctactctgcagctaaagtgctattgttccctttaataatagcctaagcaactgttcctttttaatgcaaagtcctggaacttaacaagttgattaca

SEQ ID NO: 969023 - DNA, 120 bp, Artificial Sequence
  ENSG00000177640_111 (sequence is synthesized)
ctcactttttatctctttctgtgcctccaccccacctagatctttctgctcctgcaaattttagtgagtgggttacctagaacaccagtccaataaaggttggagtagaataccagacaa

SEQ ID NO: 969024 - DNA, 120 bp, Artificial Sequence
  ENSG00000177640_112 (sequence is synthesized)
gaaaaggatgagctcatttctcctctatgctgtcagtctttgaacacagtgagacctattagccagaaaatgcatgacacaggagaagatgtaccctcatctgttcagtgagagatgtgc

SEQ ID NO: 969025 - DNA, 120 bp, Artificial Sequence
  ENSG00000177640_113 (sequence is synthesized)
tcccacacactggctgtgaacttgttcccaacaaatgagtctgtgggttgggaatgtcatctatctgagcagatatctgcccatatactatctcagtaccagcaaaactctgagcctaaa

SEQ ID NO: 969026 - DNA, 120 bp, Artificial Sequence
  ENSG00000177640_114 (sequence is synthesized)
ggtgacacatggccaagggctgctctgctgttaaccatgcacaatcgatggcagcaaaggttgaagtgagcataatctgcaacctttccatggaagtcttaaacctttctcacagtggtt

SEQ ID NO: 969027 - DNA, 120 bp, Artificial Sequence
  ENSG00000177640_115 (sequence is synthesized)
ctgcccattgtcagacaattatattggagaaaggttttcattttcatagcatgttcagattttggagggaaatgcaaagagcagtgaaggaggaaaggcaaacccttcctcccaggcttc

SEQ ID NO: 969028 - DNA, 120 bp, Artificial Sequence
  ENSG00000177640_116 (sequence is synthesized)
gacagatgcctgaatatccactcaatagtcaggcttaatgaactaacacaggaagagcaattagagaattcattaattatactctaagttcactttcattgttaattctaatcctttatt

SEQ ID NO: 969029 - DNA, 120 bp, Artificial Sequence
  ENSG00000177640_117 (sequence is synthesized)
tgggctaatgacttcagcttttcttataataatttgtgcccgtcagtgaatgataacatcttcaaatttccataattgtgtaaaattcaaactatatgtgtagctctaaattggacctaa

SEQ ID NO: 969030 - DNA, 120 bp, Artificial Sequence
  ENSG00000177640_118 (sequence is synthesized)
agtagcttctaagggtacataagacacttcaagataacataaatgaggagaaaaacaaaaagccagaaaatgcatgacacaggagaagatgtaccctcatctgttcagtgagagatgtgc

SEQ ID NO: 969031 - DNA, 120 bp, Artificial Sequence
  ENSG00000272189_0 (sequence is synthesized)
ctcagtccggagcttccggtcgccgcggccgaccagctgagggctcccggagatatggagcggggtcagcgaggcctggtggcgcctcctggagtctgggacgagcggcggtccgaggag

SEQ ID NO: 969032 - DNA, 120 bp, Artificial Sequence
  ENSG00000272189_1 (sequence is synthesized)
cagcccaggtggggcgagggtacggagacgctatttccctccgaactctgaagtagccaggtcagtgtcggctccgcgagggctggagttcacggtgacagccggcagagcatctgatgc

SEQ ID NO: 969033 - DNA, 120 bp, Artificial Sequence
  ENSG00000272189_2 (sequence is synthesized)
cacgtggagaggcgaagtacatgggtcggattccacgctgggagccggcctggatctgcgctttaggaagccactgcgggcgaccctatcttgtcgccaggacttcgcatctgatgagcc

SEQ ID NO: 969034 - DNA, 120 bp, Artificial Sequence
  ENSG00000272189_3 (sequence is synthesized)
tcagggcacacaagttagagaggcttgtgccggctgatgtggcttttctttttcttagtttccgtttagtaaacgaccttgtgacttctggcttgctcaggaagaccagaaaaaaaggca

SEQ ID NO: 969035 - DNA, 120 bp, Artificial Sequence
  ENSG00000272189_4 (sequence is synthesized)
ataggtaacgaatttttctttttttaaagaaacagattattggccgaggaaaaaccaatttcgctctaaaggataagcaacaaaatactgaggggggaaaaagcctacacaaatggaaac

SEQ ID NO: 969036 - DNA, 120 bp, Artificial Sequence
  ENSG00000272189_5 (sequence is synthesized)
atacggcacaaaatcaaggagcgaccagttccgcatggttacactaaaatgcactgcactcccactctctggcttggctgaagataaccagcaagctctgaacagtttaaaagccttcca

SEQ ID NO: 969037 - DNA, 120 bp, Artificial Sequence
  ENSG00000272189_6 (sequence is synthesized)
aggactgcagcagcactggacacacaagagagtcgagaacagtattggatttattgttagggttacaattttcacgatctttgcatgcaaaacttgccactctgagcccagtgaactatt

SEQ ID NO: 969038 - DNA, 120 bp, Artificial Sequence
  ENSG00000272189_7 (sequence is synthesized)
agtgtcatttctataatggaataggcaaactgaccatttagaatgtgatattcctaaatcacattcaaatcagtcttatcagagacttctaatcaataaaaataaagcaccagatggcta

SEQ ID NO: 969039 - DNA, 120 bp, Artificial Sequence
  ENSG00000272189_8 (sequence is synthesized)
gaggtagtttttgacctcagcttgggcctcagcaaagattttttgtgttttttttaactacattaaaacatcagagtttaagacacttttctttgagcatcagaaatactctcagctgaa

SEQ ID NO: 969040 - DNA, 120 bp, Artificial Sequence
  ENSG00000272189_9 (sequence is synthesized)
tttagagttgaactatccggaagaaccctggagaaggagggtgatttattttcaactttctgatttaccaccgacttaaatcaaccaatgagttctttctttgaccaaaaaaaaaaaaaa

SEQ ID NO: 969041 - DNA, 120 bp, Artificial Sequence
  ENSG00000272189_10 (sequence is synthesized)
aaaaaaaaaaaaaaaaaaattcaagacttgtgatgtttctatttgttttgttttgtttagtttggtgtgtgcttactcattgtcccattcttttgataacctgtatttatctgccacaag

SEQ ID NO: 969042 - DNA, 120 bp, Artificial Sequence
  ENSG00000272189_11 (sequence is synthesized)
caagttaaacaaaaataaatgaaataaggaacacaccaaaatcctgcacttaggccctgtatagacagtgtgttccaaacctaaggaggtgtctgcaacaggggaggctgctgagtgact

SEQ ID NO: 969043 - DNA, 120 bp, Artificial Sequence
  ENSG00000272189_12 (sequence is synthesized)
ctgcagagaacagatgacatctgttaaatgtcaaacaccatcacgtcgtacttcaagttgtactttacttggaacatggaagccatctgtctggagctcccacatccatttcaaatcttc

SEQ ID NO: 969044 - DNA, 120 bp, Artificial Sequence
  ENSG00000272189_13 (sequence is synthesized)
agggttccccattccaggggaggagctgaacctcctgacaccgtccacttccctcctgcctccttcaaacatcatcccttttttctcccgaatccctaaatgtttctgcacccaagggct

SEQ ID NO: 969045 - DNA, 120 bp, Artificial Sequence
  ENSG00000272189_14 (sequence is synthesized)
ctaccccaataaacacagctaagactctttgattcttaaaatgtcttcctttaacgtcccaccctccagaatctattgtcgtatgttttgttcaccaaaggtaataaaaataaatgtgga

SEQ ID NO: 969046 - DNA, 120 bp, Artificial Sequence
  ENSG00000237772_0 (sequence is synthesized)
agggaagaggccatgtgaatgaagatggaggcagagactgaatttaggttcccacaaaccaaggaatgccagaaaccaccaaaagctggaagaggaaaaggaggattcttccttacagac

SEQ ID NO: 969047 - DNA, 120 bp, Artificial Sequence
  ENSG00000237772_1 (sequence is synthesized)
ttcagagagagcatggccctgaaaacacattgatttcagactttcagcctccagaatcatgagagaaaaaatgtctgttgttttaagtcacagcagctgtaagaaaccagtacaagtatc

SEQ ID NO: 969048 - DNA, 120 bp, Artificial Sequence
  ENSG00000237772_2 (sequence is synthesized)
actgtgttttaagcctgtgggcctgactcatgagtgtctatcagaaatgccctctcctctatattcacttagatgtttcatatttctcctttgcatgtcattcatggctttcaggaagac

SEQ ID NO: 969049 - DNA, 120 bp, Artificial Sequence
  ENSG00000237772_3 (sequence is synthesized)
ttttttggcagcccagggcaggtctggctttatgctaccagcagcccagggcaggtctagctttatgctgtcagatggagtgggctataagtagaatgtgaccaggctgatggtgatgct

SEQ ID NO: 969050 - DNA, 120 bp, Artificial Sequence
  ENSG00000237772_4 (sequence is synthesized)
gctgcttctagcctggcatcatactggttttcctctgcagttgagaagagtcatgtgcaagctcgtggcagcagcaagtcctcctaatatgtccctggtatcaaactaactcattagact

SEQ ID NO: 969051 - DNA, 120 bp, Artificial Sequence
  ENSG00000237772_5 (sequence is synthesized)
agctgctcatggtctaggaaggacagctgtcttaacacccattcatctgtagagagcagccttttggatcagcggatggctccaccagatgctcagcttgttttcagttctggagtctga

SEQ ID NO: 969052 - DNA, 120 bp, Artificial Sequence
  ENSG00000237772_6 (sequence is synthesized)
aatccccagtgccatctacctggcatcagtctcagggtgaaacatctcacagtggaagaggagcattctgtgttgagaatttccattgacgaagccaactgagtggcctgattcccttgg

SEQ ID NO: 969053 - DNA, 120 bp, Artificial Sequence
  ENSG00000237772_7 (sequence is synthesized)
accagcaatctagagctagggaagatgttgccccaaggaagaggcacagcagacacttggctctcctcttgggtttctgctttctctgagaaaacagaagtttgaggcctctagaagcac

SEQ ID NO: 969054 - DNA, 120 bp, Artificial Sequence
  ENSG00000237772_8 (sequence is synthesized)
tgcattccctccaaagggaggttgtagatacattaattaatatgattttaattcaaaacttcctgaggcagataattctaaatgattatcccaaaaatatttccaacacccttcttttta

SEQ ID NO: 969055 - DNA, 120 bp, Artificial Sequence
  ENSG00000237772_9 (sequence is synthesized)
ccacccactggcccccaaatcctcaattttccagtctcccttgagctaagtgtggccctatgactcacttccagccatgaaaacaagtgcaaatctgttaggagtatgttctggggcaat

SEQ ID NO: 969056 - DNA, 120 bp, Artificial Sequence
  ENSG00000237772_10 (sequence is synthesized)
ttttgctctcctgatgaagacaaaggctgttgatccactgaacccacccaggtaatcacttattttgttcttgttctaagagaaaaatgaccccaactattaaagttactgtgagttgat

SEQ ID NO: 969057 - DNA, 120 bp, Artificial Sequence
  ENSG00000237772_11 (sequence is synthesized)
ttgatccactgaacccacccaggtcttcgccatgcctcccaaggactattcagctgagtgatgatttatcatgaaggtttagtacatgaagcttaggagtcacactgcctgggttcagat

SEQ ID NO: 969058 - DNA, 120 bp, Artificial Sequence
  ENSG00000237772_12 (sequence is synthesized)
ctgacctgccacattctgtctggtcttggtcaaactatttatgtctctaagcctcagtttatggagctataaacaagagatcatattaatatgatgattaaataagatgatgcatgtaaa

SEQ ID NO: 969059 - DNA, 120 bp, Artificial Sequence
  ENSG00000237772_13 (sequence is synthesized)
cccagacactatgtggtttcttgaatgtcctacgtacattttgatggattacccaaggactatctgatgaagaataatagagacatataaatacatatgggctacatcttggcaaaataa

SEQ ID NO: 969060 - DNA, 120 bp, Artificial Sequence
  ENSG00000237772_14 (sequence is synthesized)
agtaatcctgaagtaaattctaaggatgttctgaattgacacctcttaagcacaaccgaatgtcctggtggctttgcctcccactggggctttttggctcttgtttggccccagcggctg

SEQ ID NO: 969061 - DNA, 120 bp, Artificial Sequence
  ENSG00000237772_15 (sequence is synthesized)
ctgcagctctgtctgaattcacacaggagcaacatgatggtgctcagccctcgccgaagtgtcttgctgaagagttgggagatgcttggactattcagatagaagccagctggaagtaca

SEQ ID NO: 969062 - DNA, 120 bp, Artificial Sequence
  ENSG00000237772_16 (sequence is synthesized)
gggcagtcaacacaaaccagagaggcaaacttttggccagtgagacatggaaagggagaagaaatacattcttctttctcccctagagtgaggaccaacctgagtcccagtcacctggaa

SEQ ID NO: 969063 - DNA, 120 bp, Artificial Sequence
  ENSG00000237772_17 (sequence is synthesized)
tcccctcagacgagcgtcccttgagatccagcacatggcagccagcgtgctgacgattccttcctgcctactggctccttcttatttctgcctccgtggaactgtattctctaatcaata

SEQ ID NO: 969064 - DNA, 120 bp, Artificial Sequence
  ENSG00000237772_18 (sequence is synthesized)
ttagcacatacatattgccccagactgtacctcctgggaacccaggataaagcactatctaaacattttgtcttggaattgtaataaacttcaaaagaaaaatacaacttgaaagttaaa

SEQ ID NO: 969065 - DNA, 120 bp, Artificial Sequence
  ENSG00000237773_0 (sequence is synthesized)
ggtagccatcttcgtgcataggcaaacttattgtagctagactgtacaaagtatatcaagatatgccaaatattgagcttaacttcacctgtttgagagacggtgcacatcatggagaca

SEQ ID NO: 969066 - DNA, 120 bp, Artificial Sequence
  ENSG00000237773_1 (sequence is synthesized)
atctgactggtacagagaaatgaagagacaacattttctttccaaatctgagtggagatactcagagtttcttctcaaatgtacactgataaatactcaactgaagattcaactgaaatc

SEQ ID NO: 969067 - DNA, 120 bp, Artificial Sequence
  ENSG00000237773_2 (sequence is synthesized)
ctctatgggtctccagactcccccattctggaactcttccctgcaaattccagctgcctaaactcccttccatctctcagtttctctataactgaggaacaccgtcaggctccagctgga

SEQ ID NO: 969068 - DNA, 120 bp, Artificial Sequence
  ENSG00000237773_3 (sequence is synthesized)
ttttccttccttgtgcactgatctggaaagtctttcacatcagatagaagaggccctggttagcagcttcagatgatggatacataaaaatgggagagagaaaacatataagagtgacta

SEQ ID NO: 969069 - DNA, 120 bp, Artificial Sequence
  ENSG00000237773_4 (sequence is synthesized)
ggaacctgctggagaaacggcctctggtatctctatctgaaatatgattatcttaagttcgcaaagcattgtgtctgcagtgtgagtttgaaaacaacaatgttaaggcaacttcgcagc

SEQ ID NO: 969070 - DNA, 120 bp, Artificial Sequence
  ENSG00000237773_5 (sequence is synthesized)
ttcttaatcaagcccttctccatctctccgtgtggtttttggggtggtggaggtggagccaaaaaagagagggcagtttcccagggctgaagatgctaccatgactcataggatctatgc

SEQ ID NO: 969071 - DNA, 120 bp, Artificial Sequence
  ENSG00000237773_6 (sequence is synthesized)
aaaccctgtgagtgaattctgaggaagaagaatgagtaatattttgattttattactgatggtaataagatagtatcatcagtgtggtatattctgattactgaattctattccctattt

SEQ ID NO: 969072 - DNA, 120 bp, Artificial Sequence
  ENSG00000237773_7 (sequence is synthesized)
tcttcctgtggccaaataaaatttgtgtgtgtaagctatgatatttagtgttgttatctgatgagacaggtttagtggaaaagttcattttaaataaacattaaaattgtttcagcctca

SEQ ID NO: 969073 - DNA, 120 bp, Artificial Sequence
  ENSG00000237773_8 (sequence is synthesized)
atcttcgtgcataggcaaacttattgtagctagactgtacaaagtatatcaagatatgccaaatattgagcttaacttcacctgtttgagagacgtgttgtgaaccacttgtcatgggat

SEQ ID NO: 969074 - DNA, 120 bp, Artificial Sequence
  ENSG00000237773_9 (sequence is synthesized)
aaccaaaattaaacctggaatcgcagaagaaacaaattttttgaagaaattggatgtacttttttaaaatttttcattcaactaaaactttgttaactgtttcttggttgtggtcttctc

SEQ ID NO: 969075 - DNA, 120 bp, Artificial Sequence
  ENSG00000237773_10 (sequence is synthesized)
taaattgtaatctttggcattcacttccaaagtatccaccactaaacttcataacatttattgtgtctcttcatcattaaactttgatgaatttacagagtgtcttttgaaattatgttc

SEQ ID NO: 969076 - DNA, 120 bp, Artificial Sequence
  ENSG00000237773_11 (sequence is synthesized)
ttgagaaagccaggggattggacggtgtcatggaaatgtcaaagaaaaagtgacacctgagagaaaatttgaaagatgaaagtgctgttaatacggaaactggtctaatatggaaaacag

SEQ ID NO: 969077 - DNA, 120 bp, Artificial Sequence
  ENSG00000237773_12 (sequence is synthesized)
gtgaacatggagctgctttgtttgactcagggatgagagatacccaggtcctaattacttgtctttaactttccttagggagtactaatttgggagtcattgttctaaacaattaaagtg

SEQ ID NO: 969078 - DNA, 120 bp, Artificial Sequence
  ENSG00000237773_13 (sequence is synthesized)
aagtaactgtcctgtttttctcttttacccttgtgaacgaggaagctcagggttaaagtctatgtctttacttatacatttctgtgttgtaggatcttttaataaagattttctcctttt

SEQ ID NO: 969079 - DNA, 120 bp, Artificial Sequence
  ENSG00000237773_14 (sequence is synthesized)
gcccccgcgatgaggacgcgctcgggacactcacgttttctgcaccggcttccgccgcttgcgactggcgtaggtgatgttggcgctgctgctgttcatggtgcccagccgacggcggcg

SEQ ID NO: 969080 - DNA, 120 bp, Artificial Sequence
  ENSG00000237773_15 (sequence is synthesized)
gctactccccgggcactggcggccgggtccccggaacccggtgtaggctgggaccactgcggcggccggcgccgggttccgcgaagccgcgcccgctccacctgcgtcctctcgggacag

SEQ ID NO: 969081 - DNA, 120 bp, Artificial Sequence
  ENSG00000237773_16 (sequence is synthesized)
atcagtaagtgagggaaatcatagagttctcctggtgagttcccagctctcaaaattactgtgttctgtcatagacaatgtttgaaaataagtgtttcttatattttgtccaatttttat

SEQ ID NO: 969082 - DNA, 120 bp, Artificial Sequence
  ENSG00000237773_17 (sequence is synthesized)
ttgcttccggcaggtggttatattcagtcccaggtacttcatctaggctgaaaatagaagttgcctttacaagttttagtgcacagtaaaattatcagatgtatcaccccaagccctagc

SEQ ID NO: 969083 - DNA, 120 bp, Artificial Sequence
  ENSG00000237773_18 (sequence is synthesized)
aggaggcagaaacagagtaaccataaagatataacgagaactctaacaggtattctggggaagtagaatactcaaggaaggacaaactttggagggaaatcagactttattgaagattgg

SEQ ID NO: 969084 - DNA, 120 bp, Artificial Sequence
  ENSG00000237773_19 (sequence is synthesized)
ttgtagcccagtagatgctggagaaattatctgggtattccaggccagagataacccataggagccaaacaaaaaaggaaagaacttctgttcattcaggcaagctgatggttgtaggca

SEQ ID NO: 969085 - DNA, 75 bp, Artificial Sequence
  ENSG00000237773_20 (sequence is synthesized)
atcctgggtgtgtctgtcaaggcaggcccacccttaatctgggtgggtaccatctaatcagctgccagcaaatat

SEQ ID NO: 969086 - DNA, 120 bp, Artificial Sequence
  ENSG00000237773_21 (sequence is synthesized)
cagaaaaatgtgaaaaggctagactgacctaacctctctgcctacatgtttctcccatgctagatgctttctgccctcaaacatcagactccaagtctgatacatatatatatatatata

SEQ ID NO: 969087 - DNA, 120 bp, Artificial Sequence
  ENSG00000237773_22 (sequence is synthesized)
aagtctgatacatatatatatatatatatatatctcctattagctctgaccctctagagaaccctgactaataaactcatggtatctgcaataagaggatcacaggaaacaaacttgcag

SEQ ID NO: 969088 - DNA, 120 bp, Artificial Sequence
  ENSG00000237773_23 (sequence is synthesized)
gacacaggtgagctaaggctgatgagcaggtagacagaggaaattgggcttacagagggaatttgggagctgttgtaggcactgctagattcaggagcttgacaggtctccctcttcagg

SEQ ID NO: 969089 - DNA, 120 bp, Artificial Sequence
  ENSG00000237773_24 (sequence is synthesized)
aatatagcccacttctttgtatgacttgggccaaggtcactgctacccaagtggatacttacagaaaacactcaacagttaaatgctgcagaagggtgcaccctggaggtgcctagccct

SEQ ID NO: 969090 - DNA, 120 bp, Artificial Sequence
  ENSG00000237773_25 (sequence is synthesized)
gaagaaaaccacgtgggctgtgcagtgtagaaaaaagcacaccctggaaaaacctggtgagacagccatagcagaaccgagaaagaatactctctcctccagtaatgacttttctcagca

SEQ ID NO: 969091 - DNA, 120 bp, Artificial Sequence
  ENSG00000237773_26 (sequence is synthesized)
cttctatcaaagtttaacatccacaactggcaaagaaaacagtttataggccctgctacaatttgaatgtgtcccctaaagttcatgtggtagaaacttaatccccagtgtaacagtgct

SEQ ID NO: 969092 - DNA, 120 bp, Artificial Sequence
  ENSG00000237773_27 (sequence is synthesized)
gataggtgggacctttacaaggtcatgacggctctgcaatcatgaatagatcagtgatgttactgcaggagtaggttcgttattctgagagtgggattgttaggaaaaaaagttgggtcc

SEQ ID NO: 969093 - DNA, 120 bp, Artificial Sequence
  ENSG00000237773_28 (sequence is synthesized)
tcttgctgtatctcctgtactctcttgttatgtgatgccttcagccacaggatgaagcagccagaaggtcctcacaagaagcagccacttccagcctcaagaactatgagccaaataaat

SEQ ID NO: 969094 - DNA, 120 bp, Artificial Sequence
  ENSG00000237773_29 (sequence is synthesized)
cccgccggtagccatcttcgtgcataggcaaacttattgtagctagactgtacaaagtatatcaagatatgccaaatattgagcttaacttcacctgtttgagagacggtgtttctttta

SEQ ID NO: 969095 - DNA, 120 bp, Artificial Sequence
  ENSG00000237773_30 (sequence is synthesized)
gcttgcaacaccatgaaaaaattactgagacactaggaatgctgtgaactgagaaagtttgggacctttggcataactaaatccttcatttaacagatggagtctcagtctgtcactaag

SEQ ID NO: 969096 - DNA, 120 bp, Artificial Sequence
  ENSG00000237773_31 (sequence is synthesized)
tgctgtgaactgagaaagtttgggacctttggcataactaaatccttcatttaacagttactcttgaacagttcagacaaatgttaatttcagtaagaactgcattaacaagatgagaaa

SEQ ID NO: 969097 - DNA, 120 bp, Artificial Sequence
  ENSG00000237773_32 (sequence is synthesized)
ataaagtgaaagtgatctgggaagtgacaacaaggaagtagatggacatccaccctgtatcctgtgataagagaaaataattaggcagtattggggagacctttaggaaagtgatagcct

SEQ ID NO: 969098 - DNA, 120 bp, Artificial Sequence
  ENSG00000237773_33 (sequence is synthesized)
cagtaagccacctttcagtttaaggaaaaagatggagcaaattcccaaagaagacagtgtacactgggaaagtttgatgtttatgaattagcaattgcagaggcagaatcaaccatctct

SEQ ID NO: 969099 - DNA, 120 bp, Artificial Sequence
  ENSG00000237773_34 (sequence is synthesized)
atttttcccttctctttcatttcttcatttatctgtgcttacttatagccattctatctaaaacgtgtaagtgtaaaagaataatttcctcctagctaggaactttaagggtgaaaaatt

SEQ ID NO: 969100 - DNA, 120 bp, Artificial Sequence
  ENSG00000237773_35 (sequence is synthesized)
tatatcaaaacataatttattgattctgtagcttataactcctcttcataaaagagatgtactaaatgcaatgaaccaatcttaatttagtgatttaaaaaaatcctaccctttttaagg

SEQ ID NO: 969101 - DNA, 120 bp, Artificial Sequence
  ENSG00000237773_36 (sequence is synthesized)
ttgttggctatttggtgcagtcattttctaccttattttgactttcatacccttatttttttatggttaagtttaggattattttcattatccagaagtcatatgctatattatgttaca

SEQ ID NO: 969102 - DNA, 120 bp, Artificial Sequence
  ENSG00000237773_37 (sequence is synthesized)
tagtcttagttaagtaacagatctttgcataattaagattaaaattgaatatcaacaaaattcccagaattcattttattttaatagtgacatgaacttaccttaacagttttgctggca

SEQ ID NO: 969103 - DNA, 120 bp, Artificial Sequence
  ENSG00000237773_38 (sequence is synthesized)
tgtgaatacagtatagtgtagtgccatttttaaaaaatgagctgccattatctagaaacttcctgtattggcactgtggaacatggttctcaaagtatggtttgtgtccatctgctaaga

SEQ ID NO: 969104 - DNA, 120 bp, Artificial Sequence
  ENSG00000237773_39 (sequence is synthesized)
tttaaaaacttttttgtgagcagtttttttttttgtagttacgtgatttttatctcataataattaatttggctataagagtcggtgaacatttgattaccttatccaaagaacatcctt

SEQ ID NO: 969105 - DNA, 120 bp, Artificial Sequence
  ENSG00000237773_40 (sequence is synthesized)
ttaatcaattgggttgagcttagtttctgaggtttcagatgcagctgtatgtgtatgggtttctttctcctgcgaaatagtatgagaaaaatgttttaggaatgctattataaatatcag

SEQ ID NO: 969106 - DNA, 120 bp, Artificial Sequence
  ENSG00000237773_41 (sequence is synthesized)
taatataccagacactgtgggttacagtagtgatatcagacatgttctttcctcttagagcttacattctaatgagagagacaagaattaaccagatagttacacaaatgaatgtataat

SEQ ID NO: 969107 - DNA, 120 bp, Artificial Sequence
  ENSG00000237773_42 (sequence is synthesized)
tacaactgggacaagtactgtgaaatgaatactgtgagaatgtataataggtggatttaacttggtaagggtaacttggtaacctccctgagggagcttgagctgagttttgaggcatag

SEQ ID NO: 969108 - DNA, 120 bp, Artificial Sequence
  ENSG00000237773_43 (sequence is synthesized)
gtaggcattttataggtaggcataggtaggcattttataggtgacctggggaggaaggggaatttcatgcagactgaacatgtatcactttttaatctcctcttcaattctgcagctcct

SEQ ID NO: 969109 - DNA, 120 bp, Artificial Sequence
  ENSG00000237773_44 (sequence is synthesized)
tacttcaggccctcagaattgtcttttacagtttacaacacacattgtagctatatgaagtattttacagagggtagtccatgcttcctaaactatgtactgaggcaccccaggagcacc

SEQ ID NO: 969110 - DNA, 120 bp, Artificial Sequence
  ENSG00000237773_45 (sequence is synthesized)
acaacaaactcacaggggcactatcatgggatattttaaattttcaaggccaacacagtgacatcagttggacaccgtgcaaaccactatcttgaggtagttcagaacttctacacatta

SEQ ID NO: 969111 - DNA, 120 bp, Artificial Sequence
  ENSG00000237773_46 (sequence is synthesized)
aattgtacttcattccttttgacatcgtatctttgtgaggctgtgtttttgtaaattgctgtaataaaacacaaggactatgggaaaattactgtagaacaggaatgagggtagcggttt

SEQ ID NO: 969112 - DNA, 120 bp, Artificial Sequence
  ENSG00000237773_47 (sequence is synthesized)
ccaagtttattcctaagtttgagaagttatgaagtgcccaacagatgtgcacatcccattaagaataaaaaatgttaatgtatattattttttaaatagctactaagttgttaggataga

SEQ ID NO: 969113 - DNA, 120 bp, Artificial Sequence
  ENSG00000237773_48 (sequence is synthesized)
ggtctgagtgagtcttctttgctttctgttttgaataaagagttgtctgtcctctccttcaaaactaactcccctcactttttccaagaacctatccaattatccttacagcattttata

SEQ ID NO: 969114 - DNA, 120 bp, Artificial Sequence
  ENSG00000237773_49 (sequence is synthesized)
tgtgtttcataaatctcatctgcactcaagtaggcacaagctgacatagctttaaaatatatttgcagattatagccacctagcaaaaggatggctacaggacacaatttctatttctct

SEQ ID NO: 969115 - DNA, 120 bp, Artificial Sequence
  ENSG00000237773_50 (sequence is synthesized)
ctatttctatttctctcttctctatgaaaagaggtatcggaacaccaagttgagatgactgaagtctactgacttcttctaaccagcaatgtgtgcatatcctagaatcactacgggaat

SEQ ID NO: 969116 - DNA, 120 bp, Artificial Sequence
  ENSG00000237773_51 (sequence is synthesized)
ccccctcagaaggggaggaacagatgtgcgagatcacccagggcaacctcctttagaaatgtcggcaagtaatccccttatccagggaaagcatggcattctatacccattgttctgcac

SEQ ID NO: 969117 - DNA, 120 bp, Artificial Sequence
  ENSG00000237773_52 (sequence is synthesized)
agcttgctcattctatttctttttctttgcagatgcaaacaattcctttggatggctgaatcataatttatttaaccatatactttgtgttctgaagcaaaacagaaaattgttttatct

SEQ ID NO: 969118 - DNA, 120 bp, Artificial Sequence
  ENSG00000237773_53 (sequence is synthesized)
ttgggggaagagggaaacaagtggaatcagggatgaaccagccaagtaccatcccagtagggagccctccctggaagtcacacagtgcaggatgcagcttccacccccgaccctgtgggt

SEQ ID NO: 969119 - DNA, 120 bp, Artificial Sequence
  ENSG00000237773_54 (sequence is synthesized)
cagagacagcagtggcacttgattgttcatactgctcagggtagaccgacaccctgcatggattgtgttagcccatgggagtcctgtataattgaagaggagggtgttgacttggaagga

SEQ ID NO: 969120 - DNA, 120 bp, Artificial Sequence
  ENSG00000237773_55 (sequence is synthesized)
agaaccgaagtacctactaaaaaggcaggtgaatgcttgaataacttattagaaaggcgaagaatgcggccctattaggtctaaagtggtagagtgctttctacagaaaataaaagcaca

SEQ ID NO: 969121 - DNA, 120 bp, Artificial Sequence
  ENSG00000237773_56 (sequence is synthesized)
gtatgactctctctacagccaaatttcataaataatatgtctcaacctgctccttctattttcttgtcactatctttttaaacctgcttcctgttatctactataagattactcaaaaaa

SEQ ID NO: 969122 - DNA, 120 bp, Artificial Sequence
  ENSG00000237773_57 (sequence is synthesized)
taatgaatgaatgcatgactgctacctaatgggctttcctttgtgtctatttgacctagtatctatctctacagcacttgacatgtgcctctgctaaaacagcagtgcaggcttcatcat

SEQ ID NO: 969123 - DNA, 120 bp, Artificial Sequence
  ENSG00000237773_58 (sequence is synthesized)
ccatcctccttgaaattattatttcgtagtttcatgaattcctttctagcctattctcctactcctctgtctctttttctttctatcttctgcctctttcctatctttgcctgctcctcc

SEQ ID NO: 969124 - DNA, 120 bp, Artificial Sequence
  ENSG00000237773_59 (sequence is synthesized)
attggacggtgtcatggaaatgtcaaagaaaaagtgacacctgagagaaaatttgaaagatgaaagcagatgcactaaagaggccaatcagtcatccagacaagaatttacctcatgaga

SEQ ID NO: 969125 - DNA, 120 bp, Artificial Sequence
  ENSG00000237773_60 (sequence is synthesized)
ggacggtgtcatggaaatgtcaaagaaaaagtgacacctgagagaaaatttgaaagatgaaagatgcactaaagaggccaatcagtcatccagacaagaatttacctcatgagagtcaac

SEQ ID NO: 969126 - DNA, 120 bp, Artificial Sequence
  ENSG00000237773_61 (sequence is synthesized)
tgtgcgcatctcttcccaacattgtgattggttatgtcatgttgatagcttgaaattggacatagtatgtacatttacaccccagaaatctcaggtactacaaactaaaccttcccttct

SEQ ID NO: 969127 - DNA, 120 bp, Artificial Sequence
  ENSG00000237773_62 (sequence is synthesized)
gcacatcatggagacaatctgactggtacagagaaatgaagagacaacattttctttccaaatctgagtggagatgaagattcctgaaacaacaatcaaaaggaactttggactctgact

SEQ ID NO: 969128 - DNA, 120 bp, Artificial Sequence
  ENSG00000237773_63 (sequence is synthesized)
gaggacacatccagcaatggcaaagcactctagccactgcccagacccatggaaacttcaggaagaggcagtttagtgcttctggtagttgtctaatcaagattaggactcttatttatc

SEQ ID NO: 969129 - DNA, 120 bp, Artificial Sequence
  ENSG00000237773_64 (sequence is synthesized)
atcttcctctggcatttttgcaccagtcttcaggttttagcatagtaaatatgttccagtctgtgaaatctctctgttttattccaaataaataaaaaagcataatagtagaaattaaaa

SEQ ID NO: 969130 - DNA, 120 bp, Artificial Sequence
  ENSG00000237773_65 (sequence is synthesized)
agttacctatttttgtcttttgtctggagtccacttgtcctcaaaacaaaattaatgttgtattcccttttggtcaaggacacattaaacatttcgtgcagcatgcacatttttcaggga

SEQ ID NO: 969131 - DNA, 82 bp, Artificial Sequence
  ENSG00000237773_66 (sequence is synthesized)
gcaacctccacctcccgggttcacgcgattctccagcctcagccttccacttcctcaataggtgaactcagaaaacaggaga

SEQ ID NO: 969132 - DNA, 120 bp, Artificial Sequence
  ENSG00000237773_67 (sequence is synthesized)
acctgtgaaaagattataggttagctttgataatttaaaatatttttgctacagccagtagctctattaacgatgatatgaaactctgacgttgttgtgattacattgtattttttcata

SEQ ID NO: 969133 - DNA, 120 bp, Artificial Sequence
  ENSG00000237773_68 (sequence is synthesized)
tctgttatgtgatatagcaaccaacatattagttataataataattaggtaatgagttcacacagttattggatggagtgctgtgtccatccctaggtgtttgttattgtagtgatactt

SEQ ID NO: 969134 - DNA, 120 bp, Artificial Sequence
  ENSG00000237773_69 (sequence is synthesized)
ataagaagtacagcttggtgtacctacattagcgcaaatttcactagtcaggaaaatgtggataaagtggtccctttgattcattagccctatacgaagtattttgaaaaaaatatttta

SEQ ID NO: 969135 - DNA, 120 bp, Artificial Sequence
  ENSG00000237773_70 (sequence is synthesized)
acagatttgtatcctctttccatatctcatataaactgtaattatttttaattcccccaaatgaatgaaagccatctttaccattcgattctttaaaaaaaaaataagaattagtattta

SEQ ID NO: 969136 - DNA, 120 bp, Artificial Sequence
  ENSG00000237773_71 (sequence is synthesized)
tcgattacaggtcctgtgcactttacatactttctttaatttagtcttacaacaatgctatgtaaaaagtactttttgaaaaaatgaaataaaatttatgtaccataacatttatcactt

SEQ ID NO: 969137 - DNA, 120 bp, Artificial Sequence
  ENSG00000237773_72 (sequence is synthesized)
actcactagcagtcactacccattcctccttctgccagctattagaaaacgctgatctattttctgcttctgtggattggcatattgtggaaatttcatataaataggctcataaaaggc

SEQ ID NO: 969138 - DNA, 73 bp, Artificial Sequence
  ENSG00000237773_73 (sequence is synthesized)
atcccagcactttgggaggccacggtgagcagatcacttgaggtcagaaattcaagaccagggccaggcatgg

SEQ ID NO: 969139 - DNA, 120 bp, Artificial Sequence
  ENSG00000237773_74 (sequence is synthesized)
ctgcactccagcctgagtgacagagggagactccatctcagaaaaaaggccggggtgggggtggcttatacaatatatggtctttttttattagcttcattcacttaccataatgttttc

SEQ ID NO: 969140 - DNA, 120 bp, Artificial Sequence
  ENSG00000237773_75 (sequence is synthesized)
aaggttcgtctatgttgtagcatgtattaatacttcattttttatgcctgaatattatttcattgtgtagatataccgcatttgtctattcccttcatcagttgatgggcaattgggttg

SEQ ID NO: 969141 - DNA, 120 bp, Artificial Sequence
  ENSG00000237773_76 (sequence is synthesized)
tttctatttttggctattttgagtaatgctgctatgtatatttatatacaagttttggtgagaacatgtattttcatttctcttaagtatatatctaggaataaaattactgtgttatat

SEQ ID NO: 969142 - DNA, 120 bp, Artificial Sequence
  ENSG00000237773_77 (sequence is synthesized)
gataactatatgtttaactttttgaggaactgccaaactgttttccaagtggctatacctttttacattcccatcagcaacatatgaaagtccaaatttttctacatctttcccagcatt

SEQ ID NO: 969143 - DNA, 120 bp, Artificial Sequence
  ENSG00000237773_78 (sequence is synthesized)
tgttattgttgtcctttttattgtagtagggataaagtgatatttcattgtggttttgatttccataatatgagcatgttttcctgtgtttattggccattttttattgtctttggaggt

SEQ ID NO: 969144 - DNA, 120 bp, Artificial Sequence
  ENSG00000237773_79 (sequence is synthesized)
atgtttattcaaactcttggctcatttttaaattcggttattttattattgagttgtaggagttacttatacgttctggatactagactcttagatatgtgatttgcaaatattttctcc

SEQ ID NO: 969145 - DNA, 120 bp, Artificial Sequence
  ENSG00000237773_80 (sequence is synthesized)
cattctgtgggttttctttatactcgacagtgtaattctttatatctcgacagtgttctttgatgcacaaaagtttttaattttgataaagtccaatttatgtaatttctataattgctt

SEQ ID NO: 969146 - DNA, 120 bp, Artificial Sequence
  ENSG00000237773_81 (sequence is synthesized)
atgcttatcactgcttgtacttttatcattgtccaatttgtctaattttttaaaatcattgcttatttcatcaattttatgtcgtatttaagaaaccattgtcaaaactgaaatcataaa

SEQ ID NO: 969147 - DNA, 120 bp, Artificial Sequence
  ENSG00000237775_0 (sequence is synthesized)
agtaggtataaactaaacctgggccatcaagagtctccaaggaaaacttgcaatgatggagtccctgttaaaggtcaaaaatctccccgaccctcaagatccagtgcaagtgaagcagcc

SEQ ID NO: 969148 - DNA, 120 bp, Artificial Sequence
  ENSG00000237775_1 (sequence is synthesized)
agttgtctggggtaaatacccggggtttgccatcccatgccaggaaaatgtaggacacggacacacgcgaggagtcgcgaggagtttaagagggaaggtttaataggcaaaagaaagaga

SEQ ID NO: 969149 - DNA, 120 bp, Artificial Sequence
  ENSG00000237775_2 (sequence is synthesized)
aaggaaaacagctctctctctagtgagagaggggacttccgagagaaaaggggcagctggaggcagatgagccgaatttatagtccagcttgaggaggcggcgtctgatttacttaggac

SEQ ID NO: 969150 - DNA, 120 bp, Artificial Sequence
  ENSG00000237775_3 (sequence is synthesized)
tcacagattggtttgatcaggtgtttgtttacatagctgggaaggctggccgccccaccctaagcttattatgcaaatgaactctctcggagggtgccattttgtcggctccttactgca

SEQ ID NO: 969151 - DNA, 120 bp, Artificial Sequence
  ENSG00000237775_4 (sequence is synthesized)
cctgtggctgacagagaagggatgatggggccgccattttgaacatgattggcacaactgccgtcatctatgtctgcagcccgattttacaggctgctctttgttagaaggaaaaatgat

SEQ ID NO: 969152 - DNA, 120 bp, Artificial Sequence
  ENSG00000237775_5 (sequence is synthesized)
ttgggcctgctttccattaaaagagaaaccttaccaagaacttcggtaacctcactgtctacctaagtaatttcttcttaactcctgtgtcacaaggaagttagaacctggggtttctgg

SEQ ID NO: 969153 - DNA, 120 bp, Artificial Sequence
  ENSG00000237775_6 (sequence is synthesized)
gctactaagagaggaagatgtgaaggactgattcacaaagtgaagaagtcagagggcagtcacctggggaaaactccaaggacagtttacaggatagaatcaagaattggccaggtgagg

SEQ ID NO: 969154 - DNA, 120 bp, Artificial Sequence
  ENSG00000237775_7 (sequence is synthesized)
tccatctcaaaaaaaaaaaaaaaaggccagtgtcggctggtctgagaaataaagagaaacagtacaaagagagaaattttacaactgggcctccagcggtgacatcacatactggtagga

SEQ ID NO: 969155 - DNA, 120 bp, Artificial Sequence
  ENSG00000237775_8 (sequence is synthesized)
agtacaaagagagaaattttacaactgggcctccagcggtgacatcacatactggtaggaccgtgatgacaaccccgagctgcaaaaccagcaggtttttattagggattttaaaagggg

SEQ ID NO: 969156 - DNA, 81 bp, Artificial Sequence
  ENSG00000237775_9 (sequence is synthesized)
ttttaaaaggggaggggatgtacgaacagggagtaagccacaaggatcacatgcttcgaagggcaataaagatcacaaagc

SEQ ID NO: 969157 - DNA, 120 bp, Artificial Sequence
  ENSG00000237775_10 (sequence is synthesized)
ataagacagacactcccagagcagccatctacagacctcccccgaggaatgcattccttccccagggttattccttcctgggaaaagaattcagcgatatttctcctcgcacatctgttt

SEQ ID NO: 969158 - DNA, 120 bp, Artificial Sequence
  ENSG00000237775_11 (sequence is synthesized)
aaaatatggctctattctgcccaaccctgcaagcagtcagactttatggttatcttttcttgttacctgaaaattgctgttactttgttctttttcagagtgcactgatttcatattgtt

SEQ ID NO: 969159 - DNA, 75 bp, Artificial Sequence
  ENSG00000237775_12 (sequence is synthesized)
tgttacctgaaaattgctgttactttgttctttttcagagtgcactgatttcatattgttcaaaccctacaacca

SEQ ID NO: 969160 - DNA, 120 bp, Artificial Sequence
  ENSG00000237775_13 (sequence is synthesized)
atcttcacaatttatgttcttctgccttggctccagctggtccctccattcagggtccctgacttcccacaacaaattaatgatatttttgtgtcaaagactagctgaaccctatgttgt

SEQ ID NO: 969161 - DNA, 120 bp, Artificial Sequence
  ENSG00000237775_14 (sequence is synthesized)
ctagctgaaccctatgttgttcccggttaccaactgacataaataagtatgtttgtaatgagccttaagaatggttctatggagttgcccatgtaagaagcagccggatggcaaattagt

SEQ ID NO: 969162 - DNA, 120 bp, Artificial Sequence
  ENSG00000237775_15 (sequence is synthesized)
tattgtaatttgaagtgctcacagttataacttcctatataaggttcctacttgcaatttctgtttgttttctatattcacaatatcttaaaaggcatagactatctttccaagcctcac

SEQ ID NO: 969163 - DNA, 120 bp, Artificial Sequence
  ENSG00000237775_16 (sequence is synthesized)
attatacatcactttaatttgctctggtgtaaaactgctaatttctttgaggtgataccacagaaccactaaattagatacgctgtatgccacatagcatatattttaagtcatttttta

SEQ ID NO: 969164 - DNA, 120 bp, Artificial Sequence
  ENSG00000237775_17 (sequence is synthesized)
attaaaaaaaaacaaaccttaaaatttggtgaaaatccattgtgtttgttatctattgctgcataataaattgccccaaaagtaagtagcttcaaacaataagaaacatttattttctat

SEQ ID NO: 969165 - DNA, 120 bp, Artificial Sequence
  ENSG00000237775_18 (sequence is synthesized)
ctctcttaaacacatacacacacacatacatacacacacaaacacagtattaatttgttattgttgaagttttaaaaagtgatttgtatgtcaaaaacaaaccccaaccttctctccttg

SEQ ID NO: 969166 - DNA, 120 bp, Artificial Sequence
  ENSG00000237775_19 (sequence is synthesized)
ccacccaaaccaaagaaggccagctccataacataaaagtgcgaggtgaagcagcaagtgatgatgaagaagctgcatcaagttatccagaagatctagccaagataattggtgaaggtg

SEQ ID NO: 969167 - DNA, 120 bp, Artificial Sequence
  ENSG00000237775_20 (sequence is synthesized)
actacactaaacaacagattttccatgtagataaaatagctttatattggaagaagaggccatctaggacattcatagctacagaggaaaagtcaatgcctgcctggcttcaaagcttca

SEQ ID NO: 969168 - DNA, 120 bp, Artificial Sequence
  ENSG00000237775_21 (sequence is synthesized)
aaggacagtctgactctcttgttagaggctaatatagctgatggctttaagttgaagctaatcctcatttaccactctgaaaaccctctggctcttaagaattatgctaaatctactctg

SEQ ID NO: 969169 - DNA, 120 bp, Artificial Sequence
  ENSG00000237775_22 (sequence is synthesized)
cctgtgttttataaatggaacaacaaagcttggatgacagcatatctgtttacagcatggtttgttgaatattttaagcccactgttgagagacctactgctcaggaaaaaaaagatttc

SEQ ID NO: 969170 - DNA, 120 bp, Artificial Sequence
  ENSG00000237775_23 (sequence is synthesized)
tttcaaaatattactgctcattgacaatgtagttggccacccaagagctctgatgcagagatacaaggagataaatgttgttttcatgcttggtaacacagtgtccattctgcagcctat

SEQ ID NO: 969171 - DNA, 120 bp, Artificial Sequence
  ENSG00000237775_24 (sequence is synthesized)
ggatcaaggagtgatttcaactttcaagtcttattatttaagaataaattttgtaaggttatagctgcaatggatagtgatttttctgacatatctgggcaaaatacattgaaaatcttt

SEQ ID NO: 969172 - DNA, 88 bp, Artificial Sequence
  ENSG00000237775_25 (sequence is synthesized)
tttttctgacatatctgggcaaaatacattgaaaatcttttggaaagcattcatcattctagatgccattaagaacacttgtgagctg

SEQ ID NO: 969173 - DNA, 120 bp, Artificial Sequence
  ENSG00000272180_0 (sequence is synthesized)
gccatgtgaagacagaagcagagatttgagtaacgcatgtataaactaaggaacacaaaggatttccaggacctccaaaaaggaagtatggtgttgatgagcttgagtgagaaaaaaaat

SEQ ID NO: 969174 - DNA, 120 bp, Artificial Sequence
  ENSG00000272180_1 (sequence is synthesized)
ggatttgggttagaagacttgggatcttgcacttaccaggtgctgaatgtggagaggcaaataaaatggacacacaagccttgacctcttggagtgattatgatcaagattatgatcatt

SEQ ID NO: 969175 - DNA, 120 bp, Artificial Sequence
  ENSG00000272180_2 (sequence is synthesized)
gtgacacacattaatccaggaagcaaacaagtgtgaaaacagagctgcagaggtgacacttggatgccccctggccaggtggtgactagaggtcagatctcttctctagttgagtggtag

SEQ ID NO: 969176 - DNA, 120 bp, Artificial Sequence
  ENSG00000272180_3 (sequence is synthesized)
tccaggttcctgggctctttccgccctgacctacaggcctgacagagccgtcaaaacatgagagccctctttctaatcatctcacttcttggaaaaaatagaatgggtggtgttctatac

SEQ ID NO: 969177 - DNA, 120 bp, Artificial Sequence
  ENSG00000272180_4 (sequence is synthesized)
tatcaacaacagtaattctcaaattgctgcatatcagaatcatgtggacagttttgaaatacctagtgtccagactgcaccccagacaaactaaatctagtgaggggccatctgaaactc

SEQ ID NO: 969178 - DNA, 120 bp, Artificial Sequence
  ENSG00000272180_5 (sequence is synthesized)
gtggctcagactgaaggaacagcagctacccaaggttagctcttctcctggtgaagcgtggaaagaacagacggggtctcactctttcgaccagagtggagtgcagtggcacgatcctgg

SEQ ID NO: 969179 - DNA, 70 bp, Artificial Sequence
  ENSG00000272180_6 (sequence is synthesized)
actctttcgaccagagtggagtgcagtggcacgatcctggctcaccacaacctccgcgtaggcacgcacc

SEQ ID NO: 969180 - DNA, 120 bp, Artificial Sequence
  ENSG00000272180_7 (sequence is synthesized)
gaattcctgacctcaaatgatccacctgcatcggacgcccaaagtgctgggattacagttatgagccaccgcccccggccaccaggaaaagtttttaaaggggcatgtgcccctttgcag

SEQ ID NO: 969181 - DNA, 120 bp, Artificial Sequence
  ENSG00000272180_8 (sequence is synthesized)
ttttaaaggggcatgtgcccctttgcagttgttattaccttcttcctgccttacacgtagctggatggctagagttccaccaaccatgttatggacacgaggcaatcatcccaaagggga

SEQ ID NO: 969182 - DNA, 120 bp, Artificial Sequence
  ENSG00000272180_9 (sequence is synthesized)
ctgagctgagagaaggagcctaagattttgacgacctcatgaagataccataccagccctcagctgcctctctttagaataccaggtaggtgagaaaaaataaatgacttttttaaagtg

SEQ ID NO: 969183 - DNA, 120 bp, Artificial Sequence
  ENSG00000272181_0 (sequence is synthesized)
ctgggattttcttcaaaggttgagggaagaggtaggagtagaagtacaacaagatggccattaactgttaattgttgaagctgggtgataagtacacaagggtttattattctactttct

SEQ ID NO: 969184 - DNA, 120 bp, Artificial Sequence
  ENSG00000272181_1 (sequence is synthesized)
ggaaaacaatttaagaaaaatatattcacaattgttaagtatttttctctgttctatatattcaatgttttctctcataatcacaatacactacatcaaaataacatcatctgaagggtt

SEQ ID NO: 969185 - DNA, 120 bp, Artificial Sequence
  ENSG00000272181_2 (sequence is synthesized)
ttggaaattgtatcttagtcgctattagaatatgactaaatttgtaaatatataattttctctcaaagcactgtggaatgtttcctttgctttgaatatgaataaaataatttgttcaca

SEQ ID NO: 969186 - DNA, 120 bp, Artificial Sequence
  ENSG00000272182_0 (sequence is synthesized)
gaccaggaagagaaaatgtaaggaatgctaattatggggaaccgctttctggatttgcttttaaaaatatctgcctgaagagaaatgccaaacttacaagtttaaagttgaagtcgtttg

SEQ ID NO: 969187 - DNA, 120 bp, Artificial Sequence
  ENSG00000272182_1 (sequence is synthesized)
gccactcctagctttcaatctctttatcctgtacgtattcaggtacatgatgtttactatagcttgactgtattctagaaccagtttctttgaaataccttccatgatcctggcacagat

SEQ ID NO: 969188 - DNA, 120 bp, Artificial Sequence
  ENSG00000272182_2 (sequence is synthesized)
ttccatgtccattggtctaatggtacgcatatttatcacctaaacaggtaatataatcaagtttacagagctattgcagcacaaatagagccttatccccataataccatttcctttttt

SEQ ID NO: 969189 - DNA, 120 bp, Artificial Sequence
  ENSG00000272182_3 (sequence is synthesized)
gtttcctgttaatctttgtatctaggaaaatctaatctgcctatgaatacctattcatgaatgtacaaactgtaaaaggaaaaattttaattaaaacaaagatctgtatgtctaccacaa

SEQ ID NO: 969190 - DNA, 120 bp, Artificial Sequence
  ENSG00000272183_0 (sequence is synthesized)
agtccaggggatcgtggggccacagaaggggacttttctcagtactggaactcgagctggggcgaaatcggatccacagagaggggtaggagggtgagtgattaatgaggaagattaaga

SEQ ID NO: 969191 - DNA, 120 bp, Artificial Sequence
  ENSG00000272183_1 (sequence is synthesized)
gattaaaacttgttctgggttggggaggggacactcactcggctgtcctataggttaccccccaccccagcttggaagcacagaagctcctgggtgctcgcctcttcccacccgcgggta

SEQ ID NO: 969192 - DNA, 120 bp, Artificial Sequence
  ENSG00000272183_2 (sequence is synthesized)
ttcaccgctggccccgcggggccaacggttttccttttcaggcagtctcttgtgtttcccaccttctcagattcctttgattgtccattcagacatttcggggccctgcgctccctcccc

SEQ ID NO: 969193 - DNA, 120 bp, Artificial Sequence
  ENSG00000272183_3 (sequence is synthesized)
ttgtagagatccccacattccaaattcgctgtcttgggaaggcaccccattcccgcttaaggatgcttcctcacacctcccctttcagatttcccattctcacccctcagccctaccccc

SEQ ID NO: 969194 - DNA, 120 bp, Artificial Sequence
  ENSG00000272183_4 (sequence is synthesized)
accttatcttgcacccacacaccccatcggcgggttcctccaccccgggccgcccccgctcgaccccgttccccactggtggcacggaggcctgctcaataaacgacctttagtctcgga

SEQ ID NO: 969195 - DNA, 120 bp, Artificial Sequence
  ENSG00000272186_0 (sequence is synthesized)
gctgggaaagtgggcggggccgcgcggggtagtcctagatctgcagtgtgcgagtttgccggatgtgactgtaacttcgctagctaaaatgcttgagagcggacccttcatccctttgag

SEQ ID NO: 969196 - DNA, 120 bp, Artificial Sequence
  ENSG00000272186_1 (sequence is synthesized)
agtgaatgacgttttgacctcacaggactgttttggggcataaatgaaacagtgtatgttaaaccaggttttcggctgtatgagaggagaaataaaattagaagtttgtgtctgccacca

SEQ ID NO: 969197 - DNA, 120 bp, Artificial Sequence
  ENSG00000249937_0 (sequence is synthesized)
ttggaaacaacggcaagacttcaaagcagatcaatagagaaataccaagacctgaacttcctagcaaatgctctcttctattttaaatatccttttcaacaaatgtttgcttatgtgatt

SEQ ID NO: 969198 - DNA, 120 bp, Artificial Sequence
  ENSG00000249937_1 (sequence is synthesized)
tctgtttagtgggcagtagcaaggcaaaattgaatgtgtaataagtcgagcccagtatttttcaagctctggctcttggagatctgtggtttttggtagatgctttgagtgtgggattgt

SEQ ID NO: 969199 - DNA, 120 bp, Artificial Sequence
  ENSG00000249937_2 (sequence is synthesized)
gcaggaacagcaggatggagatggattgatatcaggtttaaaaagagatgctgcatttatggcttcattcgagggaaaggttccactcactaaaaaatgtagattctttcctcatgcaac

SEQ ID NO: 969200 - DNA, 120 bp, Artificial Sequence
  ENSG00000249937_3 (sequence is synthesized)
acacttcattactcatgtgtccacattagtgagatttttttaatttctgaaaatgtcttgtcatatcttaggtttatgcacatttttgtgtcactaaagaatatttcattcatgtattca

SEQ ID NO: 969201 - DNA, 120 bp, Artificial Sequence
  ENSG00000249937_4 (sequence is synthesized)
tgggggactcaatctgaagaagaaagcagatacggaaataaaacagtggaatcacttgcagaggaaacacaaggaaatgcttataattttttcctggggaggtaccatgtgaaggcctgg

SEQ ID NO: 969202 - DNA, 120 bp, Artificial Sequence
  ENSG00000249937_5 (sequence is synthesized)
gcatataacatgaaacaagaaagataaggcccgtgcttacatagaacttggtgaagaatctagaccataacaagcacacagagaaaacgtatcacaaattgtgctaaagttctgtaaagg

SEQ ID NO: 969203 - DNA, 120 bp, Artificial Sequence
  ENSG00000249937_6 (sequence is synthesized)
gattaagatgaagtgtcacaagactgaattagacagagtgcccttgaaagagtgccaatttttagaatggagggtgtagatccatcctttgcaactggtgaggacctcctcagtaaggca

SEQ ID NO: 969204 - DNA, 120 bp, Artificial Sequence
  ENSG00000249937_7 (sequence is synthesized)
ctgagccaggagtctatacagccatgccagcagggagcactgtctttcattgtctgatgtttattgcaaacctgttcttttcagctttttgttgtttcagcctagtccaaagacgtttac

SEQ ID NO: 969205 - DNA, 120 bp, Artificial Sequence
  ENSG00000249937_8 (sequence is synthesized)
atcctggaagagaacttgctggcttttcacctcagcatgtatgggccaaactaatataacaagaagtcttgagaggagtcagcggccaagctccatgtcttgcagccaaacaatgctgtg

SEQ ID NO: 969206 - DNA, 120 bp, Artificial Sequence
  ENSG00000249937_9 (sequence is synthesized)
gaatttctgggagtagcattaggatacaggacccctgctgagctcaccagttccttgctctacacagctgctttctcagctggggttttgaaataagcactgtgagaaaagacagaaatg

SEQ ID NO: 969207 - DNA, 120 bp, Artificial Sequence
  ENSG00000249937_10 (sequence is synthesized)
accatgatgcatctttctcactatgagaaaaagaatactgagtatgttcctgtgtcaccttatttgccaatagtgccaatttttagaatggagggtgtagatccatcctttgcaactggt

SEQ ID NO: 969208 - DNA, 120 bp, Artificial Sequence
  ENSG00000249937_11 (sequence is synthesized)
gaggacctcctcagtaaggcactgagccaggagtctatacagccatgccagcagcctagtccaaagacgtttacatcctggaagagaacttgctggcttttcacctcagcatgtatgggc

SEQ ID NO: 969209 - DNA, 120 bp, Artificial Sequence
  ENSG00000249937_12 (sequence is synthesized)
gttggcagttaacggaagtgctactgattgtaacagtggaagcaatttgaaatgaaatacaacacttaaagcaaatgaaacggaagtgaatgccagcagtaaatggcaagaagaaatcca

SEQ ID NO: 969210 - DNA, 120 bp, Artificial Sequence
  ENSG00000249937_13 (sequence is synthesized)
gttcagtgtgttcctcagaaatcttgcctcttgggactaaatgctgcaaatgtaactcttatccttgtttttcaagttttaccatctcaaagctatccactttatattaaattagttctg

SEQ ID NO: 969211 - DNA, 120 bp, Artificial Sequence
  ENSG00000249937_14 (sequence is synthesized)
agtttggcctcaaatagacctgagctgagatccaattctttaatttatctgtgttgttttctttttccttagctttaaagtggaaaaaatgctacttacattttatttatgaaggttaaa

SEQ ID NO: 969212 - DNA, 120 bp, Artificial Sequence
  ENSG00000249937_15 (sequence is synthesized)
gataaagtgtctgatatgggacctatcatatgtggtaggcacttagtacatggtagcaattatgattattatatctgatattagcattattattatgatttgttttaatcttcaaagtat

SEQ ID NO: 969213 - DNA, 120 bp, Artificial Sequence
  ENSG00000249937_16 (sequence is synthesized)
caactgtttctattacatttgtggtaaatactcctaaacagagtttttaagttcaagtgtccaaagttgttagaaacaaagatatttgacaataacataatcatatcacatgacctcatg

SEQ ID NO: 969214 - DNA, 120 bp, Artificial Sequence
  ENSG00000249937_17 (sequence is synthesized)
atttaaccacctcccaaagttgccacctcctaatattatcaccttgggggtgaggtttcaacatatgaattttagaggaacataaacattcagaccatagcaataatgaagataaagagt

SEQ ID NO: 969215 - DNA, 120 bp, Artificial Sequence
  ENSG00000249937_18 (sequence is synthesized)
ttattcatagataaatgttaagaagtagatactgtttgttaggagaagtgtccacagttagggagaagttagaggtctggtgtcatctttgatttttgtgtttcttccggaaccctgttg

SEQ ID NO: 969216 - DNA, 120 bp, Artificial Sequence
  ENSG00000249937_19 (sequence is synthesized)
cctggcttcctacactatttcttgtgtctttttcttgtagctaaacttgaacattttttccttgagtaccattttacaatcaactgtgcttttatgcagtggactttcactgaatgtccc

SEQ ID NO: 969217 - DNA, 120 bp, Artificial Sequence
  ENSG00000249937_20 (sequence is synthesized)
ctattggaaattttaacaacaatttaacaactatttatttgatactttctgtataaccaatattattgaacatcctaggaacacatacataaataaaacttgatctctgctttcagaaaa

SEQ ID NO: 969218 - DNA, 120 bp, Artificial Sequence
  ENSG00000249937_21 (sequence is synthesized)
agctagtgagcaaaaatgaatactaattctagctgctcctgagtccagagagcggcacactccatctcagtgaagtagctctttctgagattcctcatccgtggggcttttcagttaatc

SEQ ID NO: 969219 - DNA, 120 bp, Artificial Sequence
  ENSG00000249937_22 (sequence is synthesized)
aagagagtatgtccaggctagtctacttaggcaaggtcgaggcaagaggaagctaaatggctctgcctgaaaagagaagacaggaatttttaaagtggaggtcattggaagagccttcca

SEQ ID NO: 969220 - DNA, 120 bp, Artificial Sequence
  ENSG00000249937_23 (sequence is synthesized)
gtcacactgaaggttgtaaagcagagaaacatgttaagatgaagtggaccatggcagctgggagaccaaaccacacctaacagataagaggctgcaggggacaatgcagaaggtgcacag

SEQ ID NO: 969221 - DNA, 120 bp, Artificial Sequence
  ENSG00000249937_24 (sequence is synthesized)
gaaagcacttcacatacagaagaggggcctacaaatttgagaactagtccagcatattctggttgggttcaccttctctctgatcatccaccattggccacctttgggtgacatctcacg

SEQ ID NO: 969222 - DNA, 120 bp, Artificial Sequence
  ENSG00000249937_25 (sequence is synthesized)
agctctgaagaaatactaacgaaaaatgaaaattaccattcaagagaattaccatttcaagagttggtatgttttaggaacaaaacatacttaatcatgcatctgcgatggatttcctaa

SEQ ID NO: 969223 - DNA, 120 bp, Artificial Sequence
  ENSG00000249937_26 (sequence is synthesized)
tttggcctcccgagtaggacaccttgagaggcaaatagttccacaattatatgggaaggagatgggaaggtgccagccaagagagtctctcatgtgtatgaagtaaaggaatgaagcaag

SEQ ID NO: 969224 - DNA, 120 bp, Artificial Sequence
  ENSG00000249937_27 (sequence is synthesized)
cgtcttctcttttttcatctctactcccatcaccatctcactgaagttgtacaacatcatgcagtcatttatattcacctatttaaaataaaaacctaatcataccaagcagaagaaaaa

SEQ ID NO: 969225 - DNA, 120 bp, Artificial Sequence
  ENSG00000249937_28 (sequence is synthesized)
caacattatcacatggttttataataacataatttcttaggggttctgtggttggggcaggaaacaccaggaactgtcttggaggaagctgaagtttttttgcagtctttatgaatgaaa

SEQ ID NO: 969226 - DNA, 120 bp, Artificial Sequence
  ENSG00000249937_29 (sequence is synthesized)
agtttataagaaggacaagtatagaactagagtttctggaattgggaacatcataaataaaagtacagatgcagaatatcaccaggtaatatgtggaaaactgaaattggcttgtaaatt

SEQ ID NO: 969227 - DNA, 120 bp, Artificial Sequence
  ENSG00000249937_30 (sequence is synthesized)
atagggttgggggtagtaattgataaagccatagagatgcacagatgccccatgtgagagggtcctgtgtagaaggctgaagtgcatgcatttcatctcaaagacaatgagaagctcctg

SEQ ID NO: 969228 - DNA, 120 bp, Artificial Sequence
  ENSG00000249937_31 (sequence is synthesized)
caagggctgtttaagtgaagaataatgtgccatttagagtttataagtactgagtagcagtcattcacaattcaaaccaattctgattcatactaacaaaattgagagttcagaagtaat

SEQ ID NO: 969229 - DNA, 120 bp, Artificial Sequence
  ENSG00000249937_32 (sequence is synthesized)
ttggcaaacatagaaagacgtattcaaagtcaagattcaattctccacatgtatcccattccattcgctcaagccctggatccctgagagaaatccagtgaaactgcccttcactaagga

SEQ ID NO: 969230 - DNA, 120 bp, Artificial Sequence
  ENSG00000249937_33 (sequence is synthesized)
tttgagaaatacagtgttgaggaaatcacatggtctttttataatagtgatttactcattgttttctccaaggtagaaatgctggtggcaaacactatgaataaaatgggttgttacttt

SEQ ID NO: 969231 - DNA, 120 bp, Artificial Sequence
  ENSG00000249937_34 (sequence is synthesized)
gagtgttaataacaggctggcagtaaaactgatagctggatcttgtaggagtatgctgtcaactacatctcaggacagtacatcttggaggatgaaagaagaatttattcatcaactact

SEQ ID NO: 969232 - DNA, 120 bp, Artificial Sequence
  ENSG00000249937_35 (sequence is synthesized)
gtctccattgtattctcattgtgtgtccctaacactatctacttgggtttgcatcttaaaatccaccagggaagccctgggtgggaaatgaagcatatgtagggtaatggcatgagggaa

SEQ ID NO: 969233 - DNA, 120 bp, Artificial Sequence
  ENSG00000249937_36 (sequence is synthesized)
tgtactattgggttatacttacatgaagtcaatagaacccatacagattgagccacttctattgtggccaggtgtgggtggtggtgatcaacagccctgaggttgagacaaatctgaaga

SEQ ID NO: 969234 - DNA, 120 bp, Artificial Sequence
  ENSG00000249937_37 (sequence is synthesized)
ctctcatatagacaccctatggtcaatggggatgaaacaatcacagtgtgcagagactgtgttggagcacattcgtcttcaatagctaagtggatgtggtgtttaaagcagagggtagga

SEQ ID NO: 969235 - DNA, 120 bp, Artificial Sequence
  ENSG00000249937_38 (sequence is synthesized)
ctggcattaccatcacatctctgtggtttgtaggatctgctgagttctttcacactggctagttggtagtaaggtatctaggattgtttctgatagtccttatgttcttcttcagttgtt

SEQ ID NO: 969236 - DNA, 120 bp, Artificial Sequence
  ENSG00000249937_39 (sequence is synthesized)
taaatataggaattccagctgtcacgcatagagatctgacttgagtaaacatgatcgagattatatacaccttttcccagtatcagatgaaggctcagggtggtcatagacatagacact

SEQ ID NO: 969237 - DNA, 120 bp, Artificial Sequence
  ENSG00000249937_40 (sequence is synthesized)
ttgaaggaaaaaaaaccaattgggtttcctgaaacagggcttcatgatggctgagtagaggcattcagtacttccctccctcacaaaaaacaaaattgtgaggagatcattatacttcaa

SEQ ID NO: 969238 - DNA, 120 bp, Artificial Sequence
  ENSG00000249937_41 (sequence is synthesized)
atagaacatctaagagagaacgatgctggaattaaacagagaagtgacaggaaacacctaaggcaagaaaggagaggaaagtgaggaaatctgcccacctaggatcagccaggaatctgg

SEQ ID NO: 969239 - DNA, 120 bp, Artificial Sequence
  ENSG00000249937_42 (sequence is synthesized)
agaggcttccgatccagggaaagagtaaatgagtgaccttcagtggttcatatttccaccacagactcttgtaaaccttgccacaaaagaaactgtcaacccatacgggccctgagacta

SEQ ID NO: 969240 - DNA, 120 bp, Artificial Sequence
  ENSG00000249937_43 (sequence is synthesized)
agataggtggcttcctgtagtcaggagcatcatggattgctccaaagagggatctcacaccaggttccacacctgcctcctgagtcctgagaagctatagaaaggcactattttgagatc

SEQ ID NO: 969241 - DNA, 120 bp, Artificial Sequence
  ENSG00000249937_44 (sequence is synthesized)
ccagcccctaccaaattgcatcttaccctggggcccaatagcccttcatctccacatccttggagcccaattaccaccactgaaagcaaccccaccttccccagcagcaagactgaagca

SEQ ID NO: 969242 - DNA, 120 bp, Artificial Sequence
  ENSG00000249937_45 (sequence is synthesized)
tagccagtgccacccaatctgaacaatcaaccaggagcctagggatcaccccacccttgcctaccacagccagcacccacatgtcccactggagaaactgaggactggtctcctgacctg

SEQ ID NO: 969243 - DNA, 120 bp, Artificial Sequence
  ENSG00000249937_46 (sequence is synthesized)
gtttccatcatcccccacccagcatcagactcctaggtgttaccctacttattcactacaattggcaacttagcactccccatgagggcctgatgatgggcccaaccaacctgttgctac

SEQ ID NO: 969244 - DNA, 120 bp, Artificial Sequence
  ENSG00000249937_47 (sequence is synthesized)
cacaatagctggcacccaccctcatgcaccacatccaggcctaggaactgacatgcacagctcattgcagtcactgctaacaccaatgtggaccccttgggaaccagaagattgttcaat

SEQ ID NO: 969245 - DNA, 120 bp, Artificial Sequence
  ENSG00000249937_48 (sequence is synthesized)
aattgctactgccatttcccatgtcatgtctaatattcaagaacctaaggaccttctcactcagccaacttctgccactcctcagcacctaaacaagctgcctggaggcccaggaattag

SEQ ID NO: 969246 - DNA, 120 bp, Artificial Sequence
  ENSG00000249937_49 (sequence is synthesized)
actgccttgattcaataacatgagtgacagcaagtgccatcttggggccttaggacagccaggcttgggccccactgggccaccaccgggacctgaggactggtcaactgatgtccctgt

SEQ ID NO: 969247 - DNA, 120 bp, Artificial Sequence
  ENSG00000249937_50 (sequence is synthesized)
ccccagcaaaagtttacccctagaaaccatgccctaagtcattgaggaaatcaaagacaccactgacactttttacagccaaataaatcatgtggagactacactacagcacaaacccag

SEQ ID NO: 969248 - DNA, 120 bp, Artificial Sequence
  ENSG00000249937_51 (sequence is synthesized)
aataaaagccaaagtgccctacccaccatagttacatcttcaggaaaaagttatcctataagaaagaaaactttaaaaactgaaaaaaattacaccagatgcacaggtatgaatgtaagc

SEQ ID NO: 969249 - DNA, 120 bp, Artificial Sequence
  ENSG00000249937_52 (sequence is synthesized)
acaaaagaaacatgaaaaaacaagaaaatatgatacctccaaagaaacacaatgattctgcaacgagattccaatgaaaaagaaatgtataaaatcctagatagataattcaaaataatg

SEQ ID NO: 969250 - DNA, 120 bp, Artificial Sequence
  ENSG00000249937_53 (sequence is synthesized)
gggagggagggagagagagaaagaaagtatttgtctttctggcttttatgaagtaagcaaccatgttgaggcagtccatctgacaaggtactgcaggtggcttctagaagctgtgagcag

SEQ ID NO: 969251 - DNA, 120 bp, Artificial Sequence
  ENSG00000249937_54 (sequence is synthesized)
gctccagctgatggccagaaaaaaatgttggggtcttcagtcatacatccttaaggaaatgaattctggcacaaacatgagagagctttgaagcagattctgatccagttgagtttccag

SEQ ID NO: 969252 - DNA, 120 bp, Artificial Sequence
  ENSG00000249937_55 (sequence is synthesized)
tccctttaaaaaacgctcagttggcttaggttgcgtggcaaccaaatattaggacaagataggaaatcttggagtagcagattttatccatgattctacctgccaggtctgcaaggtacc

SEQ ID NO: 969253 - DNA, 120 bp, Artificial Sequence
  ENSG00000249937_56 (sequence is synthesized)
agccttaagccagcataaggcgtaaaatgagtgagcctagactctgcctgcaacatgttactgtacacctcatgaagaaccctggaagtatgtttagaagtaaaatattttaatgcaatt

SEQ ID NO: 969254 - DNA, 120 bp, Artificial Sequence
  ENSG00000249937_57 (sequence is synthesized)
cccgtgatgagttgttgtcctgtccaagcctggctccccaaccttgtaccctgagctgctgagattggctctggctaatcacgaccctgagctggaataattgggcaaaacaagaatgat

SEQ ID NO: 969255 - DNA, 120 bp, Artificial Sequence
  ENSG00000249937_58 (sequence is synthesized)
tggaaggtgggatgtcatgtgtctggtttacagcactcacgtatcagttggcagttaacggaagtgctactgattggtgatatgcctactcccccttcaccttcgatcatgattgtaaac

SEQ ID NO: 969256 - DNA, 120 bp, Artificial Sequence
  ENSG00000249937_59 (sequence is synthesized)
ttcgtgaggacatcaccaaaggctgacattggcaacatgcttcctgtacaatctgcagaacaacgatggaacaaaataaacaccttttctttataaattacccggcttcatgtattcctt

SEQ ID NO: 969257 - DNA, 120 bp, Artificial Sequence
  ENSG00000249937_60 (sequence is synthesized)
aactcacagatgaccccgcagcttgcttttaaaagtgaatgacactttgcaggctgaataagctgaaaatgacattattctgaaccatcaatatctcccgatttaaaaatgtcttccctc

SEQ ID NO: 969258 - DNA, 79 bp, Artificial Sequence
  ENSG00000249937_61 (sequence is synthesized)
aagggaggaactggataaatctaagaactgcacaatgttaactcacaaagaagaattaaaaacagaagacgttttccta

SEQ ID NO: 969259 - DNA, 120 bp, Artificial Sequence
  ENSG00000248335_0 (sequence is synthesized)
ggctccctcaaaaacacacttccttggagagggacctggcgtttacattttagaaatttttttttgaagttcattttttccctctggtatacggagttcatcaatgctacaaactgcctt

SEQ ID NO: 969260 - DNA, 120 bp, Artificial Sequence
  ENSG00000248335_1 (sequence is synthesized)
attttgtgatggataacgtgggagcaatcttcagctaaagtctagataaagccttaaagagaaaattgagctcggaagacctgaaaataaagaaaacaccctggcaccaacaagggagag

SEQ ID NO: 969261 - DNA, 120 bp, Artificial Sequence
  ENSG00000248335_2 (sequence is synthesized)
aaacaaaacaaagaagctcaccaaagatggtttgactgtgcaaaaccatgggtacggtaaccagtaacacccttattttatcaagatgtctattgtaacaggatgtgttttcaataaatg

SEQ ID NO: 969262 - DNA, 120 bp, Artificial Sequence
  ENSG00000248332_0 (sequence is synthesized)
acattgccagaaaacaggaggaagagcaggtctggagtaaggctgggggactcaagcgccaatgtgaagctgaagagcgtcctggagacagggggcggtgagacggagtctgcccaggcc

SEQ ID NO: 969263 - DNA, 120 bp, Artificial Sequence
  ENSG00000248332_1 (sequence is synthesized)
acaccagtggccggggtttggacctgggcctggggagggtcgctgtttgagaggaggacgcagctttataaaatgactccgctgtcgtaaagattaaatgggaccctatatgctgttagc

SEQ ID NO: 969264 - DNA, 120 bp, Artificial Sequence
  ENSG00000248332_2 (sequence is synthesized)
atggtgcctggcacagggcactgtactaggcactggggatacagcagggagcaaaacagtgaaaacccctgtcctcaaggagcttctatgctggattccacagccacacactcaagtctt

SEQ ID NO: 969265 - DNA, 120 bp, Artificial Sequence
  ENSG00000248332_3 (sequence is synthesized)
tgttgtcagccctcctctcccttagtctgcaccctcccctgagcctctgcctcagcctcctcccgggctcaggattccctgaatttccctctcctcacacatcctgtctctaagctccag

SEQ ID NO: 969266 - DNA, 120 bp, Artificial Sequence
  ENSG00000248332_4 (sequence is synthesized)
atgcgcttttccagtcacttgcaatggggtgacctgcagacgctcaaacctggcacatctgaatagtaactcacaatgcccaaccccttctcaaacctgctattcccactgggttccctg

SEQ ID NO: 969267 - DNA, 120 bp, Artificial Sequence
  ENSG00000248332_5 (sequence is synthesized)
aggagccactgtccagacccctcttcctccaacatgcagctcttctatcgccatcgccaccatgaatagagcacttagtgcaggcaccatgctaaaagcttttatttattaaatcatgga

SEQ ID NO: 969268 - DNA, 120 bp, Artificial Sequence
  ENSG00000248332_6 (sequence is synthesized)
atcccctgacgtccctaaaaaccattccacttgtttgcagataagaaaaccgaggcggaaatcgttaaacagccttaggttacacagttaggcagagcccggacaaagagcccaggctgt

SEQ ID NO: 969269 - DNA, 120 bp, Artificial Sequence
  ENSG00000248332_7 (sequence is synthesized)
ctggcctcagttgtgcttttcctgccgctgtgctgtcctgcctcgggtcccatgggcttgcctcagctgtaccactgacctcaggcccctcctgggccgcatctagctctgccctgggct

SEQ ID NO: 969270 - DNA, 120 bp, Artificial Sequence
  ENSG00000248332_8 (sequence is synthesized)
ttccccagcaccaccacacccctgcacccctgcaattttccattgtttacaggcagcctggccctgttccagaccaacttccccagtcccatataacctctccaagacccttcttctccc

SEQ ID NO: 969271 - DNA, 120 bp, Artificial Sequence
  ENSG00000248332_9 (sequence is synthesized)
tactcattccccacgtgttacagccaggcaggccgtccaccccaatgctttcctaactcccgtggcttcctcaccccgtctacctttactgagctctgtatcctttaatacccagcctca

SEQ ID NO: 969272 - DNA, 120 bp, Artificial Sequence
  ENSG00000248332_10 (sequence is synthesized)
aaggccgtctctgctgcaaagccctgcctggttccctgtcagactcctctggctctctctgctgtgcccccacgggtcttcacctctggctgggttgacttcataccacctgggattatt

SEQ ID NO: 969273 - DNA, 120 bp, Artificial Sequence
  ENSG00000248332_11 (sequence is synthesized)
gtttgttatctgtgtccatctgtgtcctccagtaacccatgatcttcacaggccagtgccctgtgttagtcatctctgggtccccgtgactgacggggctgggtgcagtgcgagcctcag

SEQ ID NO: 969274 - DNA, 120 bp, Artificial Sequence
  ENSG00000248332_12 (sequence is synthesized)
tactgaaatgaacagggccggcctacgaggtcactccgcgatttggggcaggaaagatctgagtttctttctgcactcccgtcgagtcctgctgtagaaaccacaaatggggaatgatcg

SEQ ID NO: 969275 - DNA, 120 bp, Artificial Sequence
  ENSG00000248332_13 (sequence is synthesized)
ttgaatcccagaagactgagcaggaagggccgctgcaggtcatctgtgttaattctttatctttgaaatgttggagtgaggcccagaaatgagaaagacctagcccacgatcactccaca

SEQ ID NO: 969276 - DNA, 120 bp, Artificial Sequence
  ENSG00000248332_14 (sequence is synthesized)
gggaggagttgtggttggaattcagacccctggcttctagcccagtgtgctttctgctttgctgaaccattccatctttgctttttctctacacaaaccacctactacaataacaacaat

SEQ ID NO: 969277 - DNA, 120 bp, Artificial Sequence
  ENSG00000248332_15 (sequence is synthesized)
tgcttatgctgaaaatcagcccagtctcatagctctggaacctctctttgtccccttccagataaccacaggacactttattttacacttttgtcataatgattttacactctcattttt

SEQ ID NO: 969278 - DNA, 120 bp, Artificial Sequence
  ENSG00000248330_0 (sequence is synthesized)
ctcttgtggaacaatgagaaatcagagaaagaacaagaggtcatctgcagccaaacctggtcaaagaacagaaaaaaatatttgaagaaaagaagaaaagatctaaccttcattatacag

SEQ ID NO: 969279 - DNA, 120 bp, Artificial Sequence
  ENSG00000248330_1 (sequence is synthesized)
atggtctctcacactttatgaagatctttgtgtaaaagtattaagcagtccatttaacagagaagtatgtttgtttcacatgtatcagaaaatgtgagtcttaattaaaatagatcctga

SEQ ID NO: 969280 - DNA, 120 bp, Artificial Sequence
  ENSG00000248330_2 (sequence is synthesized)
caaagaacagaaaaaaatatttgaagaaaagaagaaaagatctaaccttcattatacaggattgcacagattgccttttgtgataaaaagaggaagaaaaatggcagcaacccagattat

SEQ ID NO: 969281 - DNA, 120 bp, Artificial Sequence
  ENSG00000248330_3 (sequence is synthesized)
agctcgcacttacgcatttataatccaaagaaggccaagggtaactggtaactctcagaagcagaaaaagaagcttgggacggactccccttcagagctctgtagggaccaattttgctg

SEQ ID NO: 969282 - DNA, 120 bp, Artificial Sequence
  ENSG00000259910_0 (sequence is synthesized)
acaggcggctggacggacggcctggccgacatctgcataaacaaagctccaggagcccggcctggtggggccgcatcgccctcggctctcagcccttgggggaggtgaggggagtatgca

SEQ ID NO: 969283 - DNA, 120 bp, Artificial Sequence
  ENSG00000259910_1 (sequence is synthesized)
gctggcagcagccacgccctctgggcctgagtgtgtgggacaccagtgctccccactcccagcctctgtccctgtgcggccctcacctgcccttccagccccgtctctctcatcgacttc

SEQ ID NO: 969284 - DNA, 120 bp, Artificial Sequence
  ENSG00000259910_2 (sequence is synthesized)
ctgctaagcccggcccccaggcctcccctccctaaggagcagttgtgacgccagttggaggcaagctgagccctgggcccccaggccagcccaccacctgctgtccccacccgcactctg

SEQ ID NO: 969285 - DNA, 120 bp, Artificial Sequence
  ENSG00000259912_0 (sequence is synthesized)
ccatgccaagaggaagcccagccccttcatgtttgaaagaggggattgaatggaattgctgtgtttccggaagaacgtgcatcttgcaagaagccctggaatctgctgcccggcacagaa

SEQ ID NO: 969286 - DNA, 120 bp, Artificial Sequence
  ENSG00000259912_1 (sequence is synthesized)
catttcattcagaattcctgttggtttctgcgctggaatccctgattttcctcaagtgtggaaaacacagcactgatgagataccagttgcttttcagcggtaaactgacagacttgtaa

SEQ ID NO: 969287 - DNA, 120 bp, Artificial Sequence
  ENSG00000259914_0 (sequence is synthesized)
aatgaatggaccctatctagggtccttgtttctccaaaacccgaacagacaccccggtcttgtcacaaacttggcctgtgacctgcagcacatgactgtcactcttgggcctcagtttcc

SEQ ID NO: 969288 - DNA, 120 bp, Artificial Sequence
  ENSG00000259914_1 (sequence is synthesized)
ccatctaaaaaacagaggtcatgtgaaatgatggtctctaaggtgccttctaactgatacattatgacaatctttccaaaagcaattgttattcaatggctgagcaaaaaagttataaaa

SEQ ID NO: 969289 - DNA, 120 bp, Artificial Sequence
  ENSG00000259914_2 (sequence is synthesized)
taaaaagctgagaaaaataaagtcaggaaagaatgctacataaatcgctcagtctgacttcaaagggaaatttttttccaaagtaagatcatgagaattgatttatgtcctcagagccaa

SEQ ID NO: 969290 - DNA, 120 bp, Artificial Sequence
  ENSG00000259914_3 (sequence is synthesized)
tgcaaatgcaggatttgtacaatatccatttatcagttccaaaggagctgatttacggcccacctcttctagtttgtattctgtccagctcagaaagttaactgacaacacagaaagaaa

SEQ ID NO: 969291 - DNA, 120 bp, Artificial Sequence
  ENSG00000259914_4 (sequence is synthesized)
tatcctctgtctcattgcagatgacgggttataaatgagcacaacttgattctctgttctggaaaattagtgttttgaaactctcattagaaattagtcattaaagctgttcccaaactt

SEQ ID NO: 969292 - DNA, 120 bp, Artificial Sequence
  ENSG00000248339_0 (sequence is synthesized)
ctgtgaggactgccagcacgctgtcactatgatgtgtcatggctaggacttcccaaagctgccatggaagaataatggcttctgtcttttccatcatcctggtctacatttggccattca

SEQ ID NO: 969293 - DNA, 120 bp, Artificial Sequence
  ENSG00000248339_1 (sequence is synthesized)
atcatcctggtctacatttggccattcattggtggaatctgatgaaaattctcctggtaggtgagttgggaaaattgagttttcaggctctgtacctccatggggaaaagggaggagctt

SEQ ID NO: 969294 - DNA, 120 bp, Artificial Sequence
  ENSG00000248339_2 (sequence is synthesized)
taaaaagcaggaatggcattgttttcaatgaaataactaaaaaacactggacctctctttttaccatgatttcacatctgcttgtttaaaggaaactttatgattttttatgttgattaa

SEQ ID NO: 969295 - DNA, 120 bp, Artificial Sequence
  ENSG00000248339_3 (sequence is synthesized)
tgttcttataaatcaagtaattacatcttggtgtggttctttatgtaattttacatattcatggagtatatacatctttgacaaatgtagcttaggcttaatgttttgacatttcactca

SEQ ID NO: 969296 - DNA, 120 bp, Artificial Sequence
  ENSG00000248339_4 (sequence is synthesized)
ttctaacaatttgatgcaaatactctattgaaattcttcctgctaaggtcaacaaggactagttgtcaatgcccatggctcatttaaaattcttgttacattttctttttctgtgttatt

SEQ ID NO: 969297 - DNA, 120 bp, Artificial Sequence
  ENSG00000248339_5 (sequence is synthesized)
attagtagtaacagttcacattcttgaaatcattgttcacttgacctttgttcagtagggttgaactttattatgagccctgtccttactcagcctccatttctattactattccttttt

SEQ ID NO: 969298 - DNA, 120 bp, Artificial Sequence
  ENSG00000248339_6 (sequence is synthesized)
ttgcctccattttactcctttttctttaccaacatcatgttttttcctaagtcttgttttcttctcccttacagctctataaattatctctgtctagcattactctgaatagctctattt

SEQ ID NO: 969299 - DNA, 120 bp, Artificial Sequence
  ENSG00000248339_7 (sequence is synthesized)
agctcacaaaaatgataattcataatctttatatatataagaataactttaatattcaatgacttctctttctgtattctctcttttggttacttcattatttattcagtgaactaaaag

SEQ ID NO: 969300 - DNA, 120 bp, Artificial Sequence
  ENSG00000248339_8 (sequence is synthesized)
aaagatcaaattcaataccacagttaaaggcacacatggaaactatgctttctttgactttttaccctggtctagaacacagcacaatgtcaaaaatgatggttaaacaaataagatatt

SEQ ID NO: 969301 - DNA, 120 bp, Artificial Sequence
  ENSG00000248339_9 (sequence is synthesized)
tatctaaagaaaacaaaaaacatatatcatgtaaataaatttgagaaaatgaagtggcagcaaaattgttcaaaacctcatctgttagaaactcatttcccataccagaccaactcattc

SEQ ID NO: 969302 - DNA, 120 bp, Artificial Sequence
  ENSG00000248339_10 (sequence is synthesized)
caacagaagcatgtggtgtacatgataaggaatctctaagtgatcaagacagaaataaaaagcgatgcaagttagtgaatataagttttcatatgtcgatgagtgacaagtatttattta

SEQ ID NO: 969303 - DNA, 120 bp, Artificial Sequence
  ENSG00000248339_11 (sequence is synthesized)
agaagatgtactagtctcggaagtgtttacattaatgaaataaactggaaggttatcaaaagctaactgcaaaatcacaaagaagaccaatcaccttgttcgctaaggcggctgtctgag

SEQ ID NO: 969304 - DNA, 120 bp, Artificial Sequence
  ENSG00000248339_12 (sequence is synthesized)
aacgtctccagattaggaagcacacaggcaccttgcttttcgaatttgcaggagccacatataagtatatttaacataggcattaggattatagacaatagcaaatctattctagtgatg

SEQ ID NO: 969305 - DNA, 120 bp, Artificial Sequence
  ENSG00000248339_13 (sequence is synthesized)
taaagtatatgttccttaatatatcattcagaactcaccctttctaccacatctaatgtggattgcgtgccttatcccacctttttattttttacattcctggagcacctggtcacaact

SEQ ID NO: 969306 - DNA, 120 bp, Artificial Sequence
  ENSG00000248339_14 (sequence is synthesized)
tgaacatcagtggtatcactgactgcatggaaattacctggctacttgtatgccttcaaacagaagactgaaccatttggagggatgtgtgactatacttttttttaaatctttatatca

SEQ ID NO: 969307 - DNA, 120 bp, Artificial Sequence
  ENSG00000248339_15 (sequence is synthesized)
cttcacatggctcttattagttgttcaatagttgctgaatattgacactcgtatgagtgagaagtcctgacaatgactgcaataaactcaagtcacccttgaaatagacagaaatgcttg

SEQ ID NO: 969308 - DNA, 120 bp, Artificial Sequence
  ENSG00000248339_16 (sequence is synthesized)
agagatgccactcagtgaatcaatttgataagcaagatgtaggatttgtagaacagtaaaggaaatggaatccagatttggggtgttgatggggagattctgaacaattggtaagtatgt

SEQ ID NO: 969309 - DNA, 120 bp, Artificial Sequence
  ENSG00000248339_17 (sequence is synthesized)
taaatgaaagattttcaaatttctaaatgagctttttaaaagtacaatttacatacaaagaaaattcacttttaatgtagttctgtgagtacagatatatgtatatagtagtgtaaccat

SEQ ID NO: 969310 - DNA, 120 bp, Artificial Sequence
  ENSG00000248339_18 (sequence is synthesized)
ccatcaccataatgaaaatttaaagtggttctaacccccaaattcctgcatgtctgttgtagacaactcctccctcacactctcaatctttgttagccactgctatgttttctatctcta

SEQ ID NO: 969311 - DNA, 120 bp, Artificial Sequence
  ENSG00000248339_19 (sequence is synthesized)
aatataatcttactagactctcagattgtctactttcacttaacataataaatttgagattcttgcacgtatgagtttttttttttcctttttgagtattattgcctcatttaaagacat

SEQ ID NO: 969312 - DNA, 120 bp, Artificial Sequence
  ENSG00000248339_20 (sequence is synthesized)
tgtagtttgtttattagctcaccatttaaacatttcggttgattctagtttggagtaattattttaaaaatcaactggaaccattcaaatacaggtaggttttgtgagaatgtaagtttt

SEQ ID NO: 969313 - DNA, 120 bp, Artificial Sequence
  ENSG00000248339_21 (sequence is synthesized)
tatttcacttgtgtaaatactagactaaaattgtgatgccacttagtgtttaactttctataaaattgccaaactgttttctaaagtggggtgccgttttttttctttgtaggatctatg

SEQ ID NO: 969314 - DNA, 120 bp, Artificial Sequence
  ENSG00000248339_22 (sequence is synthesized)
agaattccagttgctccacttgtagacactaagtattgtcaatttttaaagctattctaccaagtgcataattatatcttattgtggttttatttgcacttatctgataactaataatat

SEQ ID NO: 969315 - DNA, 80 bp, Artificial Sequence
  ENSG00000248339_23 (sequence is synthesized)
tcattatatatatattccataaattgtcttcaaaagttttgcctattattacacttggttattttatggaggtaaagtgg

SEQ ID NO: 969316 - DNA, 120 bp, Artificial Sequence
  ENSG00000248339_24 (sequence is synthesized)
gcctattattacacttggttattttatggaggtaaagtgggattttcttgaggtaaagttaatataacataaaattgataattttaatgtgcacaaaagcatttagaacatatacaatgt

SEQ ID NO: 969317 - DNA, 120 bp, Artificial Sequence
  ENSG00000248339_25 (sequence is synthesized)
tatgtaactgtcacctctatatagtaccaaaacattttcatcaccccaaagaaaattctgcattgattaagcagttaccctgaattccaatctctgccccagctgctggcaaacatcaat

SEQ ID NO: 969318 - DNA, 120 bp, Artificial Sequence
  ENSG00000248339_26 (sequence is synthesized)
ctgtctgtctctaaagatgtacctattctggatatttcaaataagtcatatctcagatcacatacaatatgtgatcttactggctggcttccttcactaagcaagatgtttttgaggttc

SEQ ID NO: 969319 - DNA, 120 bp, Artificial Sequence
  ENSG00000248339_27 (sequence is synthesized)
acccatattgcattatctattaatacttcatttattttttatggctgaataaaattccattaagattatatattgcaatttgtttttccattcatctgctgatggacagctgtgtcattt

SEQ ID NO: 969320 - DNA, 120 bp, Artificial Sequence
  ENSG00000248339_28 (sequence is synthesized)
ctatcttttggctattgtgaatatcgcactgtaaactgtgaacatacgtatacaagtatttgagtacctgtttttaatttttgggtatgtatctagaagtggaattactgggttaattgt

SEQ ID NO: 969321 - DNA, 120 bp, Artificial Sequence
  ENSG00000248339_29 (sequence is synthesized)
taattctaattaattttttatgtagccaccaaattgttttctatactggctaaacaattttatgtatttctatatattttcaccattgccgatttcattttaaaaagaattatatccatc

SEQ ID NO: 969322 - DNA, 120 bp, Artificial Sequence
  ENSG00000248339_30 (sequence is synthesized)
ttagtagatgtgaagtagtacctcattgtggattaaatttatgttttcccagtgagaccaatgggattgagaattatctcctatgttttttgtctatttctctattttctttgaagagat

SEQ ID NO: 969323 - DNA, 120 bp, Artificial Sequence
  ENSG00000248339_31 (sequence is synthesized)
gtctattcaagttctttgcccatttttcagttgggctatttgtatttttgttgttcagttgcaagagttatttatatattctggataacacatattcagataggtgatttgcaaatgttt

SEQ ID NO: 969324 - DNA, 120 bp, Artificial Sequence
  ENSG00000248339_32 (sequence is synthesized)
tttctcattgtgtttgtgatttactttttttttacaatgtattttgatgcacacattttttattttgaagtcaaatttatctgtttttaaaaatttcattgccaatgcttttgatattac

SEQ ID NO: 969325 - DNA, 120 bp, Artificial Sequence
  ENSG00000248339_33 (sequence is synthesized)
atttatgttattgacccattttgaaatcagaaaatataagtcttccaaatttattatttttttaaagattgtttttgctactcaggaccacttgcaattcattatgaatttaagaatagg

SEQ ID NO: 969326 - DNA, 120 bp, Artificial Sequence
  ENSG00000248339_34 (sequence is synthesized)
cttttccattttttcaaaataaaaggctattgatattttgatagagattgctttcagtctgcagattccttaggaagtattgatatgtaaatagtaatgtcttcctatccggaacactgg

SEQ ID NO: 969327 - DNA, 120 bp, Artificial Sequence
  ENSG00000248339_35 (sequence is synthesized)
atttatttccatttattaaggtcttccttaagcaatgctttcttgtatttattgcacagattttacctttttggaccaacttatttctaagtataagattctattggaacctactgtaaa

SEQ ID NO: 969328 - DNA, 82 bp, Artificial Sequence
  ENSG00000248339_36 (sequence is synthesized)
tattcattttcttttgggggtatttgctggtaatttaaaggaaaacaactcattttttgtgcattgatcttgtatcctggac

SEQ ID NO: 969329 - DNA, 120 bp, Artificial Sequence
  ENSG00000248339_37 (sequence is synthesized)
aaacaactcattttttgtgcattgatcttgtatcctggactgttaattcgtttactattattaaataacaaattattaataataaattaattatcaattgtgtgtgtgttctttattatt

SEQ ID NO: 969330 - DNA, 120 bp, Artificial Sequence
  ENSG00000227617_0 (sequence is synthesized)
tagtgcgcatgcttgagcccacttacctaacacctgagatcttattgggacgctgctgataaccagtttcagagacagggtttcaccatgttgtacaggctagtctccaacccctgggct

SEQ ID NO: 969331 - DNA, 120 bp, Artificial Sequence
  ENSG00000227617_1 (sequence is synthesized)
gcctcccaaagtgctgggattacagagatgctcaagcactgaattgtcttaagaaaacaagtaaggttttgtcacctatcctatttctcactgcaagttgaaaaaaatcaaatccaaaca

SEQ ID NO: 969332 - DNA, 120 bp, Artificial Sequence
  ENSG00000227617_2 (sequence is synthesized)
gtaatcttattttcctaagggtagtttcatgatgacagtgtcaaaaaattactgtggataaagaaaaaattgtctcaatgaaatagaatttttcactgaacacagaaaccatctcaatag

SEQ ID NO: 969333 - DNA, 120 bp, Artificial Sequence
  ENSG00000227617_3 (sequence is synthesized)
ttgctgctccctggtttccaggccacgcaacagacatcaaaccaggaagccaaactttcatggacctgtgttaagaaaaacacacatacatgggcatactactttttccagaaaaacgga

SEQ ID NO: 969334 - DNA, 120 bp, Artificial Sequence
  ENSG00000227617_4 (sequence is synthesized)
aaaaattaacggaggtagattaaaaaaaaaagccaatggagaatttgaaatgcagtagaaatcttggcagcccacatcttcagaaacaaatgcaaacactggaatctgtgtaatgaacca

SEQ ID NO: 969335 - DNA, 120 bp, Artificial Sequence
  ENSG00000227617_5 (sequence is synthesized)
tccaagttaacgtaacattactttctcaatgatcacaatgatactgggagttgacgaggcttgtaacaatctactgggatgatgtgagcctttattaacctcatcagagatgctcaagca

SEQ ID NO: 969336 - DNA, 120 bp, Artificial Sequence
  ENSG00000227617_6 (sequence is synthesized)
tagaaccaaactgggactggaaagtacaccaacagctctcctacctctcaggtctttggacttagactggaactgtaccatcaactctcctggttttacagtttgtaaccgaagatcttg

SEQ ID NO: 969337 - DNA, 120 bp, Artificial Sequence
  ENSG00000227617_7 (sequence is synthesized)
ccgaagatcttgggacttctcggcctccatcatcttggtgtgaaccaatccccataataaatctctctctccttccctccctttctctccttctctctgcacacacacacacacacacac

SEQ ID NO: 969338 - DNA, 120 bp, Artificial Sequence
  ENSG00000227617_8 (sequence is synthesized)
tgtgggcaaagagttgatgaaaatcatgagcttaggggctttatgaaactttgggaaatcaaactcagaggttgttttccattcttaaagtaatgaagctctaagttaaagtttcagaat

SEQ ID NO: 969339 - DNA, 120 bp, Artificial Sequence
  ENSG00000227617_9 (sequence is synthesized)
agagaaggaagtgtgggtgtacaactgatccacaagctattgggaaatcaatagctaaaaaatgtccacaccctggcttccttttatcaggaactccaggaggctgaaggaatgtgagtg

SEQ ID NO: 969340 - DNA, 120 bp, Artificial Sequence
  ENSG00000227617_10 (sequence is synthesized)
catgagataagcaagacagatcttaacggtcccctcacatccctttctgggcaatctccagaatgcctagttttgtggagacaccatgtactatctggctgcagagactttcttaggtcc

SEQ ID NO: 969341 - DNA, 120 bp, Artificial Sequence
  ENSG00000227617_11 (sequence is synthesized)
cgtgttagaccccatggggtctcagcatgtggtcatgtggtaatgcattcctttcaaaggctttgggttgaactcaagttggaaatacctggaaaagaccaagcttctcctttgggtgtc

SEQ ID NO: 969342 - DNA, 120 bp, Artificial Sequence
  ENSG00000227617_12 (sequence is synthesized)
tgcggatcctattaaaaatattcgtgatgttttaagttctccaatacaattttctccacgaaaacaagcatcagatacactacctctaagtatttattggaggggttccaacagcctcgt

SEQ ID NO: 969343 - DNA, 120 bp, Artificial Sequence
  ENSG00000227617_13 (sequence is synthesized)
ggacaggccttctcagcagctactgagtgccccctaggggtggggaggggccagtgcacatggaggcaaaccacagagcccttttgtggcctattattatgaagaactaaaatgtggcca

SEQ ID NO: 969344 - DNA, 120 bp, Artificial Sequence
  ENSG00000227617_14 (sequence is synthesized)
gtgaaccagtcagtgctcatcactacggggtactttgacaatggcacaatttcattttaccaaaagaaaccttcactggctctggggactgcaatatcttcattttaaaatattttgctg

SEQ ID NO: 969345 - DNA, 120 bp, Artificial Sequence
  ENSG00000227617_15 (sequence is synthesized)
cgttttcttcaagggcggcttgtgacaactgaactgctgattattccttccatggacagcatggtagtggcaagtgcagtaactgggctcattgcattttctctttccatacaagttact

SEQ ID NO: 969346 - DNA, 120 bp, Artificial Sequence
  ENSG00000227617_16 (sequence is synthesized)
gcaactgccatgtgatcacttttccagcaggctgacttcgatttgatttttttcttatttaaatgttagaaacatctcagggctattattatttatctacaaagcagaaatcagccaaag

SEQ ID NO: 969347 - DNA, 120 bp, Artificial Sequence
  ENSG00000227617_17 (sequence is synthesized)
aataccacatgaaatgtaaacatttaactttttatttccaaaggatttcttgaagcctctctggagataatgacatcaccacacatactgttaaacaatcttttaatacctttggaatta

SEQ ID NO: 969348 - DNA, 120 bp, Artificial Sequence
  ENSG00000227617_18 (sequence is synthesized)
ctctttataatttttatacttcaaattaagaaaaccgcccaatgttcaggcaactttggcattaacatttccaagaaagggacaaaaacaactattaatgcaacatcatgaagagattgg

SEQ ID NO: 969349 - DNA, 120 bp, Artificial Sequence
  ENSG00000227617_19 (sequence is synthesized)
ggacaattgtgggtgtctataaagctctctttgaaaagctctttaaagcgaactcaggtaaatggaaatgaaatctgactttttacttaggccaaataacaatgaggtttgaatataaaa

SEQ ID NO: 969350 - DNA, 120 bp, Artificial Sequence
  ENSG00000227617_20 (sequence is synthesized)
tggaagattcaggccctttctacctaagatgaaggcatttagtttgctcaaattcaaactccaccaaatactctgaatggaaagtttggcaacagaactggacatgtggaggttcaccaa

SEQ ID NO: 969351 - DNA, 120 bp, Artificial Sequence
  ENSG00000227617_21 (sequence is synthesized)
ccattttgatcaaaggtgatctgattttatctcacttcttgcctaacctttctggcttctttaccttgactagatgcctgtggcattatataatgatgcagcccagcagaagtaggatgc

SEQ ID NO: 969352 - DNA, 120 bp, Artificial Sequence
  ENSG00000227617_22 (sequence is synthesized)
taataaaccctggggtaaagcagcaatcatctgcatttttaccacatacacttgaataatccaaaatactgagagttgcttccctatgctcaacatccataggaccaaatttggaaaggt

SEQ ID NO: 969353 - DNA, 120 bp, Artificial Sequence
  ENSG00000227617_23 (sequence is synthesized)
gaactgtagttggcttatatgctggccttaggtgctcttatgacctgtgcttagccatatttagctcactggctaagaggctgaaaagattctaccaccttcaggtgtgtggggaacatg

SEQ ID NO: 969354 - DNA, 120 bp, Artificial Sequence
  ENSG00000227617_24 (sequence is synthesized)
aacaggaggctgacaaacaaggagggaagtttctattgtacctggtgagtgggttttatgaaaagaatatgggtagggatgagtcagtgatattttggttttatcactttttggagaaac

SEQ ID NO: 969355 - DNA, 120 bp, Artificial Sequence
  ENSG00000227617_25 (sequence is synthesized)
atacatatatatacataaatagaacacatgtttttatatcatttattgacctgaggccaaattctactcgattttctactttccccctactaagagatccagaaaagctattaacattag

SEQ ID NO: 969356 - DNA, 120 bp, Artificial Sequence
  ENSG00000227617_26 (sequence is synthesized)
agaataaagtattacttcttctggaatcctttctacatacccctttgtactctgggaaggtttgaatgtgaccaggaaggaggagatatcaacacaggctaagttaattaacgaaaaaca

SEQ ID NO: 969357 - DNA, 120 bp, Artificial Sequence
  ENSG00000227617_27 (sequence is synthesized)
gcattctgactaacctatagttgaatttacaaaatacacttcaaagctatggcctggtacagggggaggatgagatactgcacatatttttctctctcagccttatcaggctaccatggg

SEQ ID NO: 969358 - DNA, 120 bp, Artificial Sequence
  ENSG00000227617_28 (sequence is synthesized)
aaagctatagacagagatatattattcttcaccataaaaagcctgcaaaccccattttaattagccccaaagaactgtgccctaaaatgtaaaatgaaataaaaatctctggataacata

SEQ ID NO: 969359 - DNA, 80 bp, Artificial Sequence
  ENSG00000227617_29 (sequence is synthesized)
gacagggtttcaccatgttgtacaggctagtctccaacccctgggcttaagcaatccttctgcctcggcctcccaaagtg

SEQ ID NO: 969360 - DNA, 120 bp, Artificial Sequence
  ENSG00000271989_0 (sequence is synthesized)
ccgggggcggggtgccgatgagaagccgccgggggctgccgggtacttttctgtccagaaactcgacgccgtcctgccccagcccagcccgacccccgttttcctgtacctgttggtaag

SEQ ID NO: 969361 - DNA, 120 bp, Artificial Sequence
  ENSG00000271989_1 (sequence is synthesized)
agaatcgctgctgctcctcggtctccgcctcctcctccatcactgcgggccgaccctgggcaaacgcaggagggccgagaaggggcggtggtgcgcggccaggtcggattttcccgccgc

SEQ ID NO: 969362 - DNA, 120 bp, Artificial Sequence
  ENSG00000271989_2 (sequence is synthesized)
ggcgcgagcgacgggccgcgcgggcggacaaagtacgcagctccgccctgcctcgcgcgccccctggcggcgctccgttgaggggattccgccgtcggcctccagccagccccctgctca

SEQ ID NO: 969363 - DNA, 120 bp, Artificial Sequence
  ENSG00000271989_3 (sequence is synthesized)
gcgcctggcacaacgctgagcaccactctccgcgaaacacgtgtgcgcataggtgcaaagcgtgttccagtcgggtgtagaggatgcgtagcccacgatttacagatcatgtaacgcagt

SEQ ID NO: 969364 - DNA, 120 bp, Artificial Sequence
  ENSG00000271989_4 (sequence is synthesized)
acacattatcaggagctccatgcacctgtacctcaggtgtatcttgcaaaatcgaccatcaactttatcattctatcaccaacaatagcgtcacaaagactacaatgagtgaacgacccg

SEQ ID NO: 969365 - DNA, 120 bp, Artificial Sequence
  ENSG00000271989_5 (sequence is synthesized)
tgacctcattcagcgagtggaacaggaactgcgttgttgccattggcaggagtatagttctgacacaagtgttactgtttttcctttatgttaacgatgaagtgagaccatcaaacccaa

SEQ ID NO: 969366 - DNA, 67 bp, Artificial Sequence
  ENSG00000249684_0 (sequence is synthesized)
ctcatcacgcccagctaatgtttgtatttgttgtagagacagggtatcaccagactcctgggacctc

SEQ ID NO: 969367 - DNA, 88 bp, Artificial Sequence
  ENSG00000249684_1 (sequence is synthesized)
attacaggtgcctctcatcacgcccagctaatgtttgtatttgttgtagagacagggtatcaccagactcctgggacctccgcctccc

SEQ ID NO: 969368 - DNA, 120 bp, Artificial Sequence
  ENSG00000249684_2 (sequence is synthesized)
agccaccgcgcccggccagatgggctcaaggacagcttgcctgactgcagccataaggatgaagcctcttcaggtagagaaggactccaggtggggcctgtgcagagggttcttacgggc

SEQ ID NO: 969369 - DNA, 120 bp, Artificial Sequence
  ENSG00000249684_3 (sequence is synthesized)
aggtggggcctgtgcagagggttcttacgggcgcagtaggattggggctataaaatcagtaaatggaaaaggagccaggtgcagaagtctgatttattccttttttttttctttttcttt

SEQ ID NO: 969370 - DNA, 120 bp, Artificial Sequence
  ENSG00000249684_4 (sequence is synthesized)
tagagtgcagtcagtgtgccactgtggctcaacctccgtctcctgggctcaatcaatcgttccacctcagcctccagaaagtagctgagaatacaggtgcatgccaccatgcttggctaa

SEQ ID NO: 969371 - DNA, 76 bp, Artificial Sequence
  ENSG00000249684_5 (sequence is synthesized)
acagggtttcgccatgttgcccaggctagtcttgaaatcctggactcgagatctgtcgagcccggcctccttttgt

SEQ ID NO: 969372 - DNA, 120 bp, Artificial Sequence
  ENSG00000249684_6 (sequence is synthesized)
cgagcccggcctccttttgtattttaattaagacagagtcctaagaggttgtgtttgcatggatgttgtgtgtgctctgcttgtcatattcatttcttgctctggtgtttaaagatgacc

SEQ ID NO: 969373 - DNA, 120 bp, Artificial Sequence
  ENSG00000249684_7 (sequence is synthesized)
ttttgcagaaaaccagatctttcctgcctgtgccacagaaagcactaaatccttgggttttgatgggatggcatcctttgtgaatggagaacacgggattagtatgtgggtgtggcattt

SEQ ID NO: 969374 - DNA, 120 bp, Artificial Sequence
  ENSG00000249684_8 (sequence is synthesized)
ggtgctatgcggggagtgatgtgggacacagcccctcacagcccctaagtctccctggagacaaagtctcccacgtgtgtgccaggaggtgggaggagtccaccctctccctctgcaccc

SEQ ID NO: 969375 - DNA, 120 bp, Artificial Sequence
  ENSG00000249684_9 (sequence is synthesized)
ttgggacctgcagcagcaccttcctgtcccgtcctcaccatcggctccgggttgaaaggcacccacagggttggatgatgcagagaatccttcctctgggatgaatatgtatgccccggc

SEQ ID NO: 969376 - DNA, 120 bp, Artificial Sequence
  ENSG00000249684_10 (sequence is synthesized)
aagcccacgcttcagcatgtttctggccactcctcacccaatcccaaatccttgggttaggaatgaagccttaattgggtttcatttgagaagtcagtgtccagctgtcaccgaggccct

SEQ ID NO: 969377 - DNA, 120 bp, Artificial Sequence
  ENSG00000249684_11 (sequence is synthesized)
ccgtggctggcaggaatcctaggggacatgcgtggaggggctgctgtgttgctgcaggcactggctctcaccctccccgtgacctggctccaggaatccaccacgcccaggacggggcca

SEQ ID NO: 969378 - DNA, 120 bp, Artificial Sequence
  ENSG00000249684_12 (sequence is synthesized)
ctgggcagccggcacagggctcaattttttgtcacgccctttgctctggcctggcagccttgtcctgttccccacgctgccatcaggcccagcgtgttccctgggtcaggccggccaggt

SEQ ID NO: 969379 - DNA, 120 bp, Artificial Sequence
  ENSG00000249684_13 (sequence is synthesized)
gcccttccgcccagtcctcccacagctcaggcaaaccctggcagggccccttcgttcatatgctaacaaccacggcttcacctgcggattaaggcaatgggaaaacgggctttccctgga

SEQ ID NO: 969380 - DNA, 120 bp, Artificial Sequence
  ENSG00000249684_14 (sequence is synthesized)
atcccgttctgtccttgccaatcattgagatgctagtgggattcttgttaggcttgaatagtttacatttccagggtcatcccaggctttggtcatcatcatctctcacagatcccaaca

SEQ ID NO: 969381 - DNA, 120 bp, Artificial Sequence
  ENSG00000249684_15 (sequence is synthesized)
caacccaggcctgtggccatgtccctgacctagggtgggatccatggatttactggaaggactggcagtgcccttctttccaatgttgttctattggagaccagtagcactggtggaggt

SEQ ID NO: 969382 - DNA, 120 bp, Artificial Sequence
  ENSG00000249684_16 (sequence is synthesized)
tgacatggagaaaggaaacgggcatcaatcaggagaacaaaatcaggccctaacggttagagcagagagggaagtctgtgccaggcacagagcatcatggagacagtggccgcctcctgg

SEQ ID NO: 969383 - DNA, 120 bp, Artificial Sequence
  ENSG00000249684_17 (sequence is synthesized)
ggaaaggggatgacacgggcctcccctccctggggaatttgagggttatggaatttgaaggctgggaaagcatgtgggaaatcagaggcccctccctcgctgtagggaggaagtgatcca

SEQ ID NO: 969384 - DNA, 120 bp, Artificial Sequence
  ENSG00000249684_18 (sequence is synthesized)
ggctgtggagaggactctagagatgagcacactagagcctctggggttggcgtcacagccccaggacagcggggcccaaatggcccctcgactctaactctcccctttccttcccatggc

SEQ ID NO: 969385 - DNA, 120 bp, Artificial Sequence
  ENSG00000249684_19 (sequence is synthesized)
tgccccatcaccgctgctgctctggacaccctgaaggtcatttggccaatttaatgccgacagaagaggccaccatctgaatgtaatttatctcctctttcatctcctttcattcccctc

SEQ ID NO: 969386 - DNA, 120 bp, Artificial Sequence
  ENSG00000249684_20 (sequence is synthesized)
tgcaagaggatgggctcaaggacagcttgcctgactgcagccataaggatgaagcctcttcaggtagagaaggactccaggtcatttggccaatttaatgccgacagaagaggccaccat

SEQ ID NO: 969387 - DNA, 88 bp, Artificial Sequence
  ENSG00000249684_21 (sequence is synthesized)
gtcatttggccaatttaatgccgacagaagaggccaccatctgaatgtaatttatctcctctttcatctcctttcattcccctcctcc

SEQ ID NO: 969388 - DNA, 68 bp, Artificial Sequence
  ENSG00000249684_22 (sequence is synthesized)
agcgtgtctatgtgacaccccaggattttagcagatacacaagtgaaaaaccatgttgctaaaaagta

SEQ ID NO: 969389 - DNA, 120 bp, Artificial Sequence
  ENSG00000249684_23 (sequence is synthesized)
tagcagatacacaagtgaaaaaccatgttgctaaaaagtatttcccatcttccaattttcttatcatcatcttggaaataaaatctgtacgtacttgggaataaaatttattgaattatc

SEQ ID NO: 969390 - DNA, 120 bp, Artificial Sequence
  ENSG00000249684_24 (sequence is synthesized)
tggagtgaaagctagttcataaccacgctgtttggagcgaagaaaactacctggaattcttgttctccaaagatatggaattatcccagcaacagccgtccttcactgctctgtcctgag

SEQ ID NO: 969391 - DNA, 120 bp, Artificial Sequence
  ENSG00000249684_25 (sequence is synthesized)
gaccctcaggtgtggcccatccagcccctcagtgtttacctctgtcctaaggactctcaggtgtgggcgatccagccccttagtgtttccctctgttttggagatcctcagtcttcccac

SEQ ID NO: 969392 - DNA, 120 bp, Artificial Sequence
  ENSG00000249684_26 (sequence is synthesized)
ggaggggatccaattgcctgtgaggaggacacggctcctgggtggaccctgcagattgtgaagttcaagtcacagctcctgggaaggtctctgtgtgtaaagatcgtgggggtgagacag

SEQ ID NO: 969393 - DNA, 120 bp, Artificial Sequence
  ENSG00000249684_27 (sequence is synthesized)
tcaggtgtggcccatccagcccctcagtgttttcctcggtcctggggatgctcaggtgtggtccatccagcccctcagtgtttccctcggtcctgaggatgctcagtcttcccacacagg

SEQ ID NO: 969394 - DNA, 120 bp, Artificial Sequence
  ENSG00000249684_28 (sequence is synthesized)
cacaacaaaacccatgactggaagccatccccgataagtcttctgcggccagcttcctgtggtgagcctccccatcaagggtaactgcagcctccttggaaataaaggagatcaggactc

SEQ ID NO: 969395 - DNA, 120 bp, Artificial Sequence
  ENSG00000271984_0 (sequence is synthesized)
ctgctcataaacctgggctgggcctgtcatatcatgtgcctggaggacagacctgagatcatgtgacctgcctcaccccagagattgcccaactgccctatcccatacctgttccccaga

SEQ ID NO: 969396 - DNA, 120 bp, Artificial Sequence
  ENSG00000271984_1 (sequence is synthesized)
aggccatggtagtaggcaaagtagaccagggagttgtcattctgctcataggaggagagtccattgcccacagccagcccctgtgaaacacccagggtgctcagctcatgtggagggcaa

SEQ ID NO: 969397 - DNA, 120 bp, Artificial Sequence
  ENSG00000271984_2 (sequence is synthesized)
agaggccactcaatgcaaaacacagagctggcagcctgacagctaccctgcacctgaaggttcatgctgggatcctgcatgaccagcacggccagggtggggatgtagatgccagcatag

SEQ ID NO: 969398 - DNA, 120 bp, Artificial Sequence
  ENSG00000271984_3 (sequence is synthesized)
ctctccccggtcaggaaaagtttgttgttcttgtactccggaaagaggcggaagaaatcttgaagggcctcaaaattgctctgggcgacctggggatggcagagcaagacagagggaatc

SEQ ID NO: 969399 - DNA, 120 bp, Artificial Sequence
  ENSG00000271981_0 (sequence is synthesized)
ttgaaaggttttaattagtatactgttagatgcagcacagatctaaaatgatgtctagtcgtttttcatgtaatttgatcaagacctttttgttttggataaaatgcaatgaagactgtg

SEQ ID NO: 969400 - DNA, 120 bp, Artificial Sequence
  ENSG00000271981_1 (sequence is synthesized)
ggggcctccattctgactaagtactaaactaaatcagaatttccaactatcattcttcgtgtattaggaagaaaaagatctaaatcatttatcaaacctttaaaatacaaagagaaatgg

SEQ ID NO: 969401 - DNA, 120 bp, Artificial Sequence
  ENSG00000271981_2 (sequence is synthesized)
aaaaattaacaattgcttcaccccaggattttaagagactggattccatgtgtagattgtttctaaaagtaaatcctatcccctcaaaagataccataaaataaactattttaaaatacc

SEQ ID NO: 969402 - DNA, 120 bp, Artificial Sequence
  ENSG00000271980_0 (sequence is synthesized)
tagatgaccccattctgccaagactgcctgcaaggaacacctaggttggagaaacttctccatgcttacaaattactgattagtcagttactaccgtgtcaccttcctctggccacaccc

SEQ ID NO: 969403 - DNA, 120 bp, Artificial Sequence
  ENSG00000271980_1 (sequence is synthesized)
cccaaccctcaatctgttggagctgtttcacctagagaaagaaaatgagagtcaagaaattcagtccaatgtaacagagagatgggcctcttagccctccctgtgacatttgtgcctcac

SEQ ID NO: 969404 - DNA, 120 bp, Artificial Sequence
  ENSG00000271980_2 (sequence is synthesized)
agcggctgcttgcagagttgaccctcatctgaattcaaccaacctcaggttgagaacattcagagaaaaaaattgcatctgtactgaacatgtagattttttcttgtcattactccctaa

SEQ ID NO: 969405 - DNA, 89 bp, Artificial Sequence
  ENSG00000271980_3 (sequence is synthesized)
tgaataaatgttatatgcaaataccacgatttttatcagggacttgagcgtccatgaaatctggcacctacaggacatcctggaactgc

SEQ ID NO: 969406 - DNA, 120 bp, Artificial Sequence
  ENSG00000271980_4 (sequence is synthesized)
gtccatgaaatctggcacctacaggacatcctggaactgcccccacatagaaattgagtaggctgaaattaaaaacaggacatttaacaaacctccaatgaatctagcaggtgtagaaat

SEQ ID NO: 969407 - DNA, 120 bp, Artificial Sequence
  ENSG00000271980_5 (sequence is synthesized)
cgggaaccagcagtaatacatggggacttacatgggaatctagcctttgggtcaagcaccctaagttgcttttgctccacatggggaaggagagggtgtggccaaagtaccagcaaaata

SEQ ID NO: 969408 - DNA, 120 bp, Artificial Sequence
  ENSG00000271980_6 (sequence is synthesized)
aaacttgagtgatctggaacgtgaaaaataaaagacatcacgtggaagaggtttattacaaataaatgaaacaaaaatcaaaggcttgtgaaacatctctaagtcttcctgttcattgac

SEQ ID NO: 969409 - DNA, 120 bp, Artificial Sequence
  ENSG00000271980_7 (sequence is synthesized)
cagtttctcaatcacaaaaaacaggaacgtctgtgaggttcaattttggaaagggggattggtttagtggctcttctgatacaaccacagacccctcggataagactgtggtccaaagaa

SEQ ID NO: 969410 - DNA, 120 bp, Artificial Sequence
  ENSG00000271980_8 (sequence is synthesized)
ggctgctgtatgttctctgtaggctagactcagtccttgtaaataaactcagtttaaagctttcaatactcaactgcatagttccatataaacatgaaaattaggaagattgctattagc

SEQ ID NO: 969411 - DNA, 120 bp, Artificial Sequence
  ENSG00000271980_9 (sequence is synthesized)
acacattcctaaatccacaggagttatttagcaaaacatccaatgcatgaatgtagagaaaacacaatgacccaaaagttaagactggtgaatctccaggttcacatgagacggtaaccc

SEQ ID NO: 969412 - DNA, 120 bp, Artificial Sequence
  ENSG00000271980_10 (sequence is synthesized)
agtcaccatttcctaattctaggaaatctgactagttaaggtggcataactagtgataaagttcatcatgagctttatcatcacaatgctaagaaacattattttagaaaatctagagaa

SEQ ID NO: 969413 - DNA, 120 bp, Artificial Sequence
  ENSG00000271980_11 (sequence is synthesized)
tcattaacaagcaaataacagagtaggggatgagctgggccactctggggtcagactgcctgggattgacctggccctactacttgctggtggtgagatgctggccaattatgagtactc

SEQ ID NO: 969414 - DNA, 120 bp, Artificial Sequence
  ENSG00000271980_12 (sequence is synthesized)
acctgtaagatgtgagcagtaagaaagtgtatctgcctcactgggttgtcagaacagacaatcccggtagagttctcggagcgtcttggcccatcactgttagctagttaatactttagt

SEQ ID NO: 969415 - DNA, 120 bp, Artificial Sequence
  ENSG00000271980_13 (sequence is synthesized)
aagtacaattaatttcagtcactctatctgaacatggtaactgcaagatttctcccttatttcctgtaatttactttaacctccacttcactgtgtccctctgatagggaaacaagtggg

SEQ ID NO: 969416 - DNA, 120 bp, Artificial Sequence
  ENSG00000271980_14 (sequence is synthesized)
ttctgaactgccctaagcctgtgctggtggccagctctgcacatgctggtcctgattctgtgtatgagctgtgttcagggtggggccggggccagaggaaagcaaaggctcacatgggtc

SEQ ID NO: 969417 - DNA, 120 bp, Artificial Sequence
  ENSG00000271980_15 (sequence is synthesized)
tccatcagccctaaacaacacgccaggttaggctgtgagcaacctagtaacagcacttaaggcatcccataattctgtggtggaccctctacaatcaaatggcccacccatttagatagg

SEQ ID NO: 969418 - DNA, 120 bp, Artificial Sequence
  ENSG00000271980_16 (sequence is synthesized)
aagaggatcaagcccatattcctctcaatatgaaagtgcatcttgagagctcctgtttaagctgttaaaatagtccctacagcttattttgagaaaaaaaaatccacccaaaccccttca

SEQ ID NO: 969419 - DNA, 120 bp, Artificial Sequence
  ENSG00000271980_17 (sequence is synthesized)
attaaggcagcatttaattactgttacaataaacgtttcttaaacccgaagagaagataaaggttgtttaaacagattcttttaatacaatgaatacaaaagcagttgagatggtacccc

SEQ ID NO: 969420 - DNA, 120 bp, Artificial Sequence
  ENSG00000271980_18 (sequence is synthesized)
cacgattacacagctttgaacaagtgaaactatggttaccaaacagctatttttattatagcatctacagtgtctggaaaaggatgtaacaataaataactgtagatgcatcacgagaca

SEQ ID NO: 969421 - DNA, 120 bp, Artificial Sequence
  ENSG00000271980_19 (sequence is synthesized)
tccatttacttaatcacagaagtggatcttgctacatagttttctcaatgtcttcattcttcagattctccaggcttacgaatgtcatcaatcttcaaaatcattctaaccatttgtgtt

SEQ ID NO: 969422 - DNA, 120 bp, Artificial Sequence
  ENSG00000271980_20 (sequence is synthesized)
gcaagagatatctgttgctttttgccaatcaaggtttctatgacatgctgttgcttcatatctgaaaaatacaaggacactgattatcctaaaatagcatacaataaactatcaataacc

SEQ ID NO: 969423 - DNA, 120 bp, Artificial Sequence
  ENSG00000271983_0 (sequence is synthesized)
acaaagcctgtccagattgcatatttgaagtctgttttgaaggttttcacacttggtgaaactcttcacataaagcccaattctagctttgcaggtttgcatttcctttttttttttttt

SEQ ID NO: 969424 - DNA, 89 bp, Artificial Sequence
  ENSG00000271983_1 (sequence is synthesized)
ttgcaggaaaaaaagaatttttctgcgaaaatcctttaaaaagaaaaaaaagctttatacagctgggcacagtgactcacgcctgtaat

SEQ ID NO: 969425 - DNA, 120 bp, Artificial Sequence
  ENSG00000273855_0 (sequence is synthesized)
gaggaacaggaacagaaatgaagctcagttgtctcagggaggaggggctcttcaggaccaagaaagtgcccattctgggtttctgctgcttctctcctccacctgggggggtgtgagtca

SEQ ID NO: 969426 - DNA, 120 bp, Artificial Sequence
  ENSG00000273855_1 (sequence is synthesized)
tttccctcacagtgctgaaaagagaagttgagtcataaagggaagaaaagcctttcttctgctgagtaaaggagagcattcctgcccagttactgggggtggagagtctctatccattcc

SEQ ID NO: 969427 - DNA, 120 bp, Artificial Sequence
  ENSG00000273855_2 (sequence is synthesized)
tctatccattcctgggggccaccccagaagggggccctagctctggggcgggagcagctttgagggctgcactctaaataactatgcagctctagaaaacaaaacaaaacaaaataaaaa

SEQ ID NO: 969428 - DNA, 120 bp, Artificial Sequence
  ENSG00000273853_0 (sequence is synthesized)
accgatattaatgactttttttccttagatggaccttgatgtatgttatgatctactgtctaatttattattccattgttgactagataacatgacagtcaatttttaaaaccttgtaaa

SEQ ID NO: 969429 - DNA, 120 bp, Artificial Sequence
  ENSG00000273853_1 (sequence is synthesized)
tgtcaatttgtccataccacaatattgtcttaattaaacaaggactattgttttctcttcagtatttattaatattattcccttagtgatgttttagtagtcatggatttataggactaa

SEQ ID NO: 969430 - DNA, 120 bp, Artificial Sequence
  ENSG00000273853_2 (sequence is synthesized)
ctgagaagtggttttaacatcatgcttttattcaagcaatatttattgagcgcttactatgtgaaagccactgtgccaagcattaagtgtactagagccattaattaaatgtatgtgatg

SEQ ID NO: 969431 - DNA, 120 bp, Artificial Sequence
  ENSG00000273853_3 (sequence is synthesized)
atgtgatgctatgtgtgatgttcaagttaatgtaaatatatgagtaatatacagtcaccaattataaataatttactcaattatgagcatatgtaaagctttttaataaatttagatatt

SEQ ID NO: 969432 - DNA, 120 bp, Artificial Sequence
  ENSG00000272729_0 (sequence is synthesized)
gcttctcatttcttccaagtcctcagctgccctttcctctccctcctcctctcctccaccctctagcccggggaactggccagggcagcctccccaaactccgccggcgccatcccctgc

SEQ ID NO: 969433 - DNA, 120 bp, Artificial Sequence
  ENSG00000272729_1 (sequence is synthesized)
tcctcctgggaaaggggtgccaaataggtctggctcgccctttcttgcggtgctgggaagttgcccaactcagcttggaggcccaaccgcaggcccggaatacagggccaaacggtctcc

SEQ ID NO: 969434 - DNA, 120 bp, Artificial Sequence
  ENSG00000272729_2 (sequence is synthesized)
tgccggaaggaaggtattctctgagcggccaccgcccgcttccccgggcccgccggcccgccgcaaccgctgcgcctccaaagcagccgaaccctgatacttgctcaccgcacttaatgc

SEQ ID NO: 969435 - DNA, 120 bp, Artificial Sequence
  ENSG00000272729_3 (sequence is synthesized)
tactagagatcaatacctaatatgataccaaataaataaaaggcgctcacagcgaccaggggacggggttattaagcagctggagctctcacggtgcatatcaatgcacctgtcattgtg

SEQ ID NO: 969436 - DNA, 120 bp, Artificial Sequence
  ENSG00000272729_4 (sequence is synthesized)
gtttgtagcaaaatttatgactgcgaccacggcggcagtaaacgcttcggtaaggaatgaaaagaaaaacacttcccaaggcccggcacttttcagcagtggaaagcaggctccgcgtag

SEQ ID NO: 969437 - DNA, 120 bp, Artificial Sequence
  ENSG00000272729_5 (sequence is synthesized)
gaggcagcgcagcaaaagaattccctactccgcacttttcccgctcttgcaccctgcgagcagcaggattatataaagtgaccggcgcctgcttctgctagcagctctgctcggcggtcg

SEQ ID NO: 969438 - DNA, 120 bp, Artificial Sequence
  ENSG00000272729_6 (sequence is synthesized)
tacgccggtggcagtggaaaagctgagggggcttgggaagggaggggacaccaggcgccaggctgtgactagcgctgcaatcgtcgtaaatcaccgacgggtagagtcagcccatccaag

SEQ ID NO: 969439 - DNA, 120 bp, Artificial Sequence
  ENSG00000272729_7 (sequence is synthesized)
ttgaaagagagggggaaggcgatggaggttgcggtcagtttctctcaaaatccgctagtgctcgagctggtctcggcgcctccccctgttttgcctaaaccagggtcagaagcccacgga

SEQ ID NO: 969440 - DNA, 120 bp, Artificial Sequence
  ENSG00000272729_8 (sequence is synthesized)
tctctttctggcggccaagacttttgctgagcatccccacgaattcactggaaccgagcaacgattctccctttcctgttggctttgctacttcgggattcgaaaccactggtttttggg

SEQ ID NO: 969441 - DNA, 120 bp, Artificial Sequence
  ENSG00000272729_9 (sequence is synthesized)
tttgctcgaaaggagacttctttacgttccgcccaagttctcccgatctctaagcttgagcctcttttgctctataagaagacctggacgcgccttctaaatcactcttatttagcccag

SEQ ID NO: 969442 - DNA, 120 bp, Artificial Sequence
  ENSG00000272729_10 (sequence is synthesized)
ataactcaatactgtaatgcaccctgtatttaaggcactgggcttgccccattaaagcgccataaatttgaaggccaatgatcggttttcatgtaacgggtggtacttcatactgaagtg

SEQ ID NO: 969443 - DNA, 120 bp, Artificial Sequence
  ENSG00000272729_11 (sequence is synthesized)
acccacttcaaagctgccctttgttctatgtcttgatgtatgaattttgagatggccaccttgagttgcagagggaaatgtactggaaattattatttaaatgatgcccactcaccacaa

SEQ ID NO: 969444 - DNA, 120 bp, Artificial Sequence
  ENSG00000272721_0 (sequence is synthesized)
ttgtcccggcccctgaggcgcaggcctatcagcctcctgtgtcttaagcagagtggagacgggggtggatccaggcgcaccagttccacgccacaggcttctgcagttcctgcaaactgt

SEQ ID NO: 969445 - DNA, 120 bp, Artificial Sequence
  ENSG00000272721_1 (sequence is synthesized)
cctagggggaccgaggagtttgtcatttcttgcctcgttagggtgcggaacgaaaaccatttgatttatcctagaaaaggaaaggctgaagccaactaagtaaaagttttccattaaatg

SEQ ID NO: 969446 - DNA, 120 bp, Artificial Sequence
  ENSG00000188825_0 (sequence is synthesized)
ccggaaaccccggaactagaactggtatctcttcaactacctgtgaaaactgatgtgatgaaaaggggaatttgaaggagccattccagaagacagggcgaaaactgaagtgcaatcagg

SEQ ID NO: 969447 - DNA, 120 bp, Artificial Sequence
  ENSG00000188825_1 (sequence is synthesized)
gccaagaaaaacagaaatagcaggacctggagttgcataggttgaatagttgaataggctgctctcctcagctggcaggaaacctggcagcctcctggtgcccaaggactgaaaacctta

SEQ ID NO: 969448 - DNA, 120 bp, Artificial Sequence
  ENSG00000188825_2 (sequence is synthesized)
gaagcacctggagttggcagccttggcatggtcaggttggcacctctggaggtgcccaggcttccctggcagcattgtgagcagtggatggtgttgaagggcagccagaggaggaatgga

SEQ ID NO: 969449 - DNA, 120 bp, Artificial Sequence
  ENSG00000188825_3 (sequence is synthesized)
acgttcacaggtacacaaaggcaacgcagttgctcaggtgcttcggtatcacagccaagaccccttcgggggaagctagtcggatactgggacccacattccagactactgagccgcggt

SEQ ID NO: 969450 - DNA, 120 bp, Artificial Sequence
  ENSG00000188825_4 (sequence is synthesized)
cgcgccctcggctccgtttctgctccctccaccccacgaggacgggggtggaaggccaccttcgatgggtgcatcctccacgatgacctgctaacaaaggtgcatggatttcagagtctg

SEQ ID NO: 969451 - DNA, 120 bp, Artificial Sequence
  ENSG00000188825_5 (sequence is synthesized)
attggcctacaacagcatttggcttgtggagacagtggttccctgatgaaaaactgccatgatgaacttaatcagcacaaggagacagcttcaactccctatgatttcatccctgaccaa

SEQ ID NO: 969452 - DNA, 120 bp, Artificial Sequence
  ENSG00000188825_6 (sequence is synthesized)
tcagcactcctgggctcactggcttccccctacccaccaagttgtccttaaaaagtctgctccccaaatgctcgggtagactgatttgggtaataataaaactccggtctcccacacagc

SEQ ID NO: 969453 - DNA, 120 bp, Artificial Sequence
  ENSG00000188825_7 (sequence is synthesized)
ccctgatgaaaaactgccatgatgggaatagaaacaatcagaggaaacttccgtgagttcccaggacacatccacccacctcctccacgtgtaaccaccacctctaccttcccctctggt

SEQ ID NO: 969454 - DNA, 120 bp, Artificial Sequence
  ENSG00000188825_8 (sequence is synthesized)
gctgtggatgagccatccgtgctcctggcaaaggcccacctgccacttgggcacaggaacccatccatccctccttacctctggtaactctccctctctctctcctgcatccttcatatt

SEQ ID NO: 969455 - DNA, 120 bp, Artificial Sequence
  ENSG00000188825_9 (sequence is synthesized)
ctctgggttgtattctcttccagcccccaccccctgcccacctccagcatgtaaaagtgctgttattgtttccactttaaaacaaaccctaaaaataagtaaataaaataaaccctaccc

SEQ ID NO: 969456 - DNA, 120 bp, Artificial Sequence
  ENSG00000188825_10 (sequence is synthesized)
gcagccatctgcacccaaaccagatgccaaaataaccagggaagcccaagagtgacggggcccaagaccttccgctacacctcccgtcggacaactagccatatcttctgagaagcctca

SEQ ID NO: 969457 - DNA, 120 bp, Artificial Sequence
  ENSG00000188825_11 (sequence is synthesized)
gataacccttgacatgacaggaaaaggacaacaacctgtgtgggttccctcccgacaactgaaattgcaccataactcccaagaagaaacactcccagaaacaaaaggcaaagacccctc

SEQ ID NO: 969458 - DNA, 120 bp, Artificial Sequence
  ENSG00000188825_12 (sequence is synthesized)
tgaaaccaaagagcaagtatcaccgcctgacacataaacttcatgacctcgacattgagacaaaatctcgccgtgtgacctacaacaccactcatttaactccaccaacttggggtcaaa

SEQ ID NO: 969459 - DNA, 120 bp, Artificial Sequence
  ENSG00000188825_13 (sequence is synthesized)
taaaggtcttatcccatcaacagaaaaatcattaagagaaaaatgaatccccaaaacgacagtctgcagatcccgcaaggaatccgaagacaagtccaaagtcaacgacaagcaatgatg

SEQ ID NO: 969460 - DNA, 120 bp, Artificial Sequence
  ENSG00000188825_14 (sequence is synthesized)
gagagcacgagctgttccagtgtaataaaatatataaaataacaagagttatactgatatagctcatagatatgattatatataaataccattaatcattagtttgtagtaattactctt

SEQ ID NO: 969461 - DNA, 120 bp, Artificial Sequence
  ENSG00000188825_15 (sequence is synthesized)
atcataacctagaaaaaggcaggccatgcagagataggagctgaggggacatggtgagaagtgacaagaagacaagagtgtgagccttttgttatgcccaggcagggccaccagagggct

SEQ ID NO: 969462 - DNA, 120 bp, Artificial Sequence
  ENSG00000188825_16 (sequence is synthesized)
ccttggtctagcagtaatgccagcgtctgggaagatgcccgtaccaagcggaccatggtctagtggtagcgtcagtgccaaggaaaagcacctgctactgagcagaccaggaaagggagt

SEQ ID NO: 969463 - DNA, 120 bp, Artificial Sequence
  ENSG00000188825_17 (sequence is synthesized)
aggggagtttagagaagactctactccaccatctcttatggagggcctgacataagtcaggcctgcctgcagttatccagaggcctgaccgtctccctgtgatgctgtgcttcagtagtc

SEQ ID NO: 969464 - DNA, 73 bp, Artificial Sequence
  ENSG00000188825_18 (sequence is synthesized)
gcagttatccagaggcctgaccgtctccctgtgatgctgtgcttcagtagtcatgctcctggtctatagcaga

SEQ ID NO: 969465 - DNA, 120 bp, Artificial Sequence
  ENSG00000188825_19 (sequence is synthesized)
aaacgtttactgagcgccttcaacttgccaggcactaattagactagcgcagagaaacggggataagtactgatgagggtcccagccctcagcgatcggatttcagagggggagataaag

SEQ ID NO: 969466 - DNA, 120 bp, Artificial Sequence
  ENSG00000188825_20 (sequence is synthesized)
gactgcccagaagggtggtgagtggagtagttgatataaacaacgaggtgcgatgaaatacacaggagggctgctaatcacatatggggtgggtgccgagggcccttaattaagggaggc

SEQ ID NO: 969467 - DNA, 120 bp, Artificial Sequence
  ENSG00000188825_21 (sequence is synthesized)
ttcctggacgggtgacacccaagcggagtcctgacgacccgcgtcagaagtagtcaggcgaggaggagggtaaaggaatccacgtcccaagcagagaagcagctttccctacacagcaca

SEQ ID NO: 969468 - DNA, 78 bp, Artificial Sequence
  ENSG00000188825_22 (sequence is synthesized)
caggggctggggagaatccttgctgggccctcgccgtccatgcgccgcctccctctgcccggtgtctggtggaagctc

SEQ ID NO: 969469 - DNA, 120 bp, Artificial Sequence
  ENSG00000188825_23 (sequence is synthesized)
tggcagaggaactccagcccctgctccccgaagctcctccaggccttctgcttccctgactcggaatgggcccgctgtccagtgggtacaaggctggtctccccgcccactggtgacgac

SEQ ID NO: 969470 - DNA, 120 bp, Artificial Sequence
  ENSG00000188825_24 (sequence is synthesized)
cgacgtaaagatccagctcagcctggtttcccctggtgatgatatcttgcgactcgtctttctccaggaaaacagggaccgctctccgcctacagatggagtctcactctgtcgcccagg

SEQ ID NO: 969471 - DNA, 82 bp, Artificial Sequence
  ENSG00000188825_25 (sequence is synthesized)
ttagtagagatggggtttcaccgtgttccccaggctggtctcgagctcctgagtcgagacgggatttctccgtgtttgccag

SEQ ID NO: 969472 - DNA, 120 bp, Artificial Sequence
  ENSG00000188825_26 (sequence is synthesized)
gcctcggcctcccaaagtgttaggattactggcgtgagccactgcgcccggcagatttttcttttaaaacgtggagaataagaaatcagcccgagtgtgtaatggcgtcaatattggtgt

SEQ ID NO: 969473 - DNA, 120 bp, Artificial Sequence
  ENSG00000188825_27 (sequence is synthesized)
gcccgagtgtgtaatggcgtcaatattggtgtggacaagacaaagtgaatgaggcaaggagcgaggctggggctctcaccgcgtcttgaatgtagatgagagtgggacggtgatggcagg

SEQ ID NO: 969474 - DNA, 67 bp, Artificial Sequence
  ENSG00000188825_28 (sequence is synthesized)
gagaacaattatattagatagatttttggagcagggagatgaaataggagcttgctctgtccactcc

SEQ ID NO: 969475 - DNA, 120 bp, Artificial Sequence
  ENSG00000188825_29 (sequence is synthesized)
gatgaaataggagcttgctctgtccactccacgcgtcgacctggtattgcagtacctccaggaatggggctccctctcctgggatacaacctgtttgcaaggttagaaagaaaagactgc

SEQ ID NO: 969476 - DNA, 120 bp, Artificial Sequence
  ENSG00000188825_30 (sequence is synthesized)
gccgggtagtttaggatagttggtaggttttcttactcctttaagtatcataaggttcatgatttatggagagtatcctaggacccaaaacaagaatattcatttccaagtagggaacat

SEQ ID NO: 969477 - DNA, 120 bp, Artificial Sequence
  ENSG00000188825_31 (sequence is synthesized)
gttcgactttacttggagggctttaaatctcagcttggctgtggaggggtgatgacctttcaaagggatggattccagtggtgtgttgcccaggctggacttcaacttactctgtttgtt

SEQ ID NO: 969478 - DNA, 120 bp, Artificial Sequence
  ENSG00000188825_32 (sequence is synthesized)
cccaggctggacttcaacttactctgtttgtttgtttgttttttgtttttgagatggagtttagctcttggtacccaggctggagtgcaacggcaccatctcggctcactgcaacctctg

SEQ ID NO: 969479 - DNA, 120 bp, Artificial Sequence
  ENSG00000188825_33 (sequence is synthesized)
attacaggtgtgagccactacgcccagctgaacttcctcttcagcccatggagtagttctactttaaggcaggcaccaatgtactggctacaaacttccttttttccccaggaaaaatcg

SEQ ID NO: 969480 - DNA, 120 bp, Artificial Sequence
  ENSG00000188825_34 (sequence is synthesized)
tacaaacttccttttttccccaggaaaaatcgaggcacaggtagtttaagttaccgaggaatgcacaggagcagaactcgagtccaagcatcgtggctccacccttcatgcttgatgctt

SEQ ID NO: 969481 - DNA, 120 bp, Artificial Sequence
  ENSG00000188825_35 (sequence is synthesized)
ttttaggctctgttctaggtatgtgtatcctttacgggatcagccaccggcagttgccttgcaaccatgatgacaaatctctcccagcttttttgggtctcatccctgtatctataaatt

SEQ ID NO: 969482 - DNA, 120 bp, Artificial Sequence
  ENSG00000188825_36 (sequence is synthesized)
gcatcccagcataaagatcagaatgtgtcttttgctgacccaatctctcaccctttccaaactccagaaatcttgtctggccttggcaaaactacccgctgcttctttctctaaaggata

SEQ ID NO: 969483 - DNA, 90 bp, Artificial Sequence
  ENSG00000188825_37 (sequence is synthesized)
cactttgggaggccccacagtgaggtgagatcacgccattacactccagcctaggcggcaaagccagagccccatctcgaaacaaacgaa

SEQ ID NO: 969484 - DNA, 120 bp, Artificial Sequence
  ENSG00000188825_38 (sequence is synthesized)
ctaggcggcaaagccagagccccatctcgaaacaaacgaacgaacaaacaaagcacaaaagaaacagcctaggcaaggtagtgaagccctgttcagggtgacgaatatctgtacaacagc

SEQ ID NO: 969485 - DNA, 120 bp, Artificial Sequence
  ENSG00000188825_39 (sequence is synthesized)
gtgaagccctgttcagggtgacgaatatctgtacaacagctatttcagaggctgaggcaggaggatcagttgagtctgggaggtggatgctccagtgagccgtgattgcaccactgcact

SEQ ID NO: 969486 - DNA, 120 bp, Artificial Sequence
  ENSG00000188825_40 (sequence is synthesized)
gctggggtgctgcgtgttggggaggtggaggtgtggcttcccgggagaagctccacccgctggctgagtctggcacataaaccagtctgtgaggggatggatgtgggtgtaatgggggca

SEQ ID NO: 969487 - DNA, 120 bp, Artificial Sequence
  ENSG00000188825_41 (sequence is synthesized)
attacagtaggaaggagcccacgtggagcctgcattctctgggacagggcattactgcattctctgggacaggctaaggcccagatcctaccttcccaggtggctggatgggtcatagat

SEQ ID NO: 969488 - DNA, 120 bp, Artificial Sequence
  ENSG00000188825_42 (sequence is synthesized)
gtatgaaccggtcccctcattttctgattgccctgtgcttaacgtttctgtacctttactgaggctctttcctccaactccagtgcccagaccccccttctcctgaacatgaatgcctgt

SEQ ID NO: 969489 - DNA, 65 bp, Artificial Sequence
  ENSG00000188825_43 (sequence is synthesized)
cagtgcccagaccccccttctcctgaacatgaatgcctgtccatggaaattcgagtctctctctc

SEQ ID NO: 969490 - DNA, 89 bp, Artificial Sequence
  ENSG00000188825_44 (sequence is synthesized)
tctaggatcacaggtgcgtgccaccatgtctggctaatgttttgtatttatagtagagatgggtttcgacctcaaagtgatctacccac

SEQ ID NO: 969491 - DNA, 120 bp, Artificial Sequence
  ENSG00000188825_45 (sequence is synthesized)
cacacccagcctgtccctgaaattctaatgaaatgtgcgataaagttgttttgtttttctttttgttttcccttcttggcaaagcctggtgtttctattttagtggatttgcctggcact

SEQ ID NO: 969492 - DNA, 120 bp, Artificial Sequence
  ENSG00000188825_46 (sequence is synthesized)
cctggtgtttctattttagtggatttgcctggcactgaggactgctatggtggtcttcagaggctcctggtattgactgcttgtgaaaccgcttttgcaaaattatgactgagacagtga

SEQ ID NO: 969493 - DNA, 120 bp, Artificial Sequence
  ENSG00000188825_47 (sequence is synthesized)
acctccaaattgtccttattcattcctgagcatagcctgaactaactttgggagaagcttagtttatattttattttatagtttaaaacaaagatgttaacagccctttcccaaggcaga

SEQ ID NO: 969494 - DNA, 120 bp, Artificial Sequence
  ENSG00000188825_48 (sequence is synthesized)
tcccaaggcagacttccttcttgcctggggactaggttgcctttggaggactaacattagccacgagattagaaattatgggctgggcctcgtggctcacccctgtaatcccagcacttt

SEQ ID NO: 969495 - DNA, 69 bp, Artificial Sequence
  ENSG00000188825_49 (sequence is synthesized)
gaatacaaaaattagccggttatggtggcacatgcctatactgccagctacttgggaagctgaggtggg

SEQ ID NO: 969496 - DNA, 71 bp, Artificial Sequence
  ENSG00000188825_50 (sequence is synthesized)
acatgcctatactgggcgtggaggttgcagtgagccaggatcttgccactgcactccagcttgggcgacag

SEQ ID NO: 969497 - DNA, 68 bp, Artificial Sequence
  ENSG00000188825_51 (sequence is synthesized)
ggaaaccccggaactagaactggtgtaagatttctcttggtttttgtgttgttgttgttgttttgttg

SEQ ID NO: 969498 - DNA, 120 bp, Artificial Sequence
  ENSG00000188825_52 (sequence is synthesized)
cttgatggatcagctggcaccacccagactgattaactggctcatgtgatcttgtggtccccacccaggaacttaatcagcacaaggagacagcttcaactccctatgatttcatccctg

SEQ ID NO: 969499 - DNA, 120 bp, Artificial Sequence
  ENSG00000188825_53 (sequence is synthesized)
taagagaaaaatgaatccccaaaacgacaggtaatataattctggctgcctttatggtagtcagtgcagtggtgagtataccaccagtttgggcaactcaaaattatacctactgggcat

SEQ ID NO: 969500 - DNA, 120 bp, Artificial Sequence
  ENSG00000188825_54 (sequence is synthesized)
gtgttcttttccccctttaattcagtctgtctcctggatggactcctcagtagaagtttacactaataatagtgcattcatgccggtccctaatgatgataggtttccagctcaaccaga

SEQ ID NO: 969501 - DNA, 120 bp, Artificial Sequence
  ENSG00000188825_55 (sequence is synthesized)
ataagaaggtatgcactttaatctgtcaattggctataaatatccaccactatgcactgggatgtcgcctggctgtttagtttattcttaccagaattggatgtggacagtaccgtcctt

SEQ ID NO: 969502 - DNA, 120 bp, Artificial Sequence
  ENSG00000188825_56 (sequence is synthesized)
tacaaatgattcttatcaagtacataatgtgttcagtagcaattcttttcaacttctgttaaacttaatccacaagaggaatggtgggttctggtcactactaacagcaataaaacaaaa

SEQ ID NO: 969503 - DNA, 120 bp, Artificial Sequence
  ENSG00000188825_57 (sequence is synthesized)
actgccagactgcccaaaggaatctacaaagggaccttttctggtgaattcaattttatggaataattgtaatgccattattggcgggattgctccagccagaatacgacatgctcagag

SEQ ID NO: 969504 - DNA, 120 bp, Artificial Sequence
  ENSG00000188825_58 (sequence is synthesized)
ttcaattatttgttacaatattagaggacggatggcagtcctacaggttgagagaatgggtgtctccttacccattcaaatggatgaacacaggcattgttccttctagaccaaaaatga

SEQ ID NO: 969505 - DNA, 120 bp, Artificial Sequence
  ENSG00000188825_59 (sequence is synthesized)
ttcatcccattgttaccccagaacatcctgaattatggaaattagctgcagctatgacaggaataaggatatggagtgctacctatcaactctctcccactaatatcaaaacacccacat

SEQ ID NO: 969506 - DNA, 120 bp, Artificial Sequence
  ENSG00000188825_60 (sequence is synthesized)
tcaacatcaccttgatgtctgaacaggtgatacgtatcaggagctgtgtcaaacccccttacatgctgttggttggaaatataattatcattcccaatacacaaaatatagaatgtgata

SEQ ID NO: 969507 - DNA, 120 bp, Artificial Sequence
  ENSG00000188825_61 (sequence is synthesized)
attgtaagctgttcatgtgcattgatgctacttttaatcccacaacaagtattctattcgtaagggctagggagggggtatggataccagtttctttacatcatccatgggagtcttccc

SEQ ID NO: 969508 - DNA, 120 bp, Artificial Sequence
  ENSG00000188825_62 (sequence is synthesized)
cctctatacacatagtcaatgaagttcttaaaggtatcctgaaaagaacaaagtgatttatttttactgttattgtagtcattgcaggtctaattgcggtttctgcaacagtggcaaccg

SEQ ID NO: 969509 - DNA, 120 bp, Artificial Sequence
  ENSG00000188825_63 (sequence is synthesized)
ctggagttgagatccacagttctgttcaaaccactcaatatgttgaagcatggcaaaaaaactcctccagactttggaattctcagactcaaattgatcaaaagttagctaatcaaatta

SEQ ID NO: 969510 - DNA, 120 bp, Artificial Sequence
  ENSG00000188825_64 (sequence is synthesized)
attatctccaccaaagtgtaatatggctgggagatacagttatgaatttggaacaccgtatgcaattacaatgtgattggaatacttctgattactgtataacaccttatgcttataata

SEQ ID NO: 969511 - DNA, 120 bp, Artificial Sequence
  ENSG00000188825_65 (sequence is synthesized)
aagatcagcatagctgggaatcggtctcaagacatttaaaaacctgggatgataacttaaccttggatatttcaaaacttaaagaacaaatttttgaggcttcacaggctcatttatcca

SEQ ID NO: 969512 - DNA, 120 bp, Artificial Sequence
  ENSG00000188825_66 (sequence is synthesized)
ctgttctgggctcagacatttttgaaggaatagctaaagaattatctgatcttaatccctttaaatggatcaaacccctcagaggatcattgttgtcactggcattattaatattggtat

SEQ ID NO: 969513 - DNA, 120 bp, Artificial Sequence
  ENSG00000188825_67 (sequence is synthesized)
tacaaaggtaggtacacaatcaatcaaaagtttaaaaaacagccatgataccagaaggctcttttgtttaaaagaaagtttcagaaatagacctaagtatatatgaggcctttattatat

SEQ ID NO: 969514 - DNA, 120 bp, Artificial Sequence
  ENSG00000188825_68 (sequence is synthesized)
gataaaagtggcatctcagactgatgaaaaggtgggctgctccatatatgatgctgaggcaactggttagccatcttaaaaaaacaaaagttggatgtgtaactgaaatcatagactaga

SEQ ID NO: 969515 - DNA, 120 bp, Artificial Sequence
  ENSG00000188825_69 (sequence is synthesized)
acaagtaggttagggatgcaaatacaaaggatcaacaattcaaaaaggccaatggggaaaggatctgagcagtcagctcatagaaaagaaaatagaagatcttaagcatgcaaaaaggta

SEQ ID NO: 969516 - DNA, 120 bp, Artificial Sequence
  ENSG00000188825_70 (sequence is synthesized)
ctccttggtctagcagtaacaccagcatctgggaagacacctgttaccaagtggaccatggtctagtagtagcatcagtgccaaggaaaagcacccgctactgagcagaccaggaaaggg

SEQ ID NO: 969517 - DNA, 80 bp, Artificial Sequence
  ENSG00000188825_71 (sequence is synthesized)
tgtgcttcagtggtcacactcctggtccacttttaggagaattactgaaagtattaaaagtctctgaaatgcagaaataa

SEQ ID NO: 969518 - DNA, 120 bp, Artificial Sequence
  ENSG00000188825_72 (sequence is synthesized)
cgtctttctccaggaaaacagggaccgctctccgcctacaggtctcttccacagacctatcttgttttcaccccctgtctcttttggttcagtcttttcgctcatacaaacaaggaagtc

SEQ ID NO: 969519 - DNA, 120 bp, Artificial Sequence
  ENSG00000188825_73 (sequence is synthesized)
acccatccatccctccttacctctggaaaactcctccaaacacttgtctatatttgtccctgtcattctctctctctcccccctctctctattttttattttattttattttatttattt

SEQ ID NO: 969520 - DNA, 87 bp, Artificial Sequence
  ENSG00000188825_74 (sequence is synthesized)
agtgcagtggcataatcttggctcactggaacccctacctcttgtgttaaagcaattctcctgcctcaaccatcgctgggctaattt

SEQ ID NO: 969521 - DNA, 87 bp, Artificial Sequence
  ENSG00000188825_75 (sequence is synthesized)
ctgcctcaaccatcgctgggctaatttttgaatttgtaattgagatggggtttcaccatggtagccaggctggtctcaaactcctga

SEQ ID NO: 969522 - DNA, 120 bp, Artificial Sequence
  ENSG00000188825_76 (sequence is synthesized)
acctcagcctctcaaagtgctgggattacgggcatgagctgctgtgcccagcctcaattattttaatctttgaataacttcggacttgcagaaaagttaaaagacttacatggagaactt

SEQ ID NO: 969523 - DNA, 120 bp, Artificial Sequence
  ENSG00000188825_77 (sequence is synthesized)
cagaaaagttaaaagacttacatggagaacttctctaccctcttccccatccccgcaaggtacacagttggtaaagcgagaagtctggggttcagtgacacacttcttaactcccaagtt

SEQ ID NO: 969524 - DNA, 120 bp, Artificial Sequence
  ENSG00000188825_78 (sequence is synthesized)
cgtgctctttcttttctctctctctctctctctgttgtctctccctccctccttcactccctctctctccccttgatggccacatttactttataattttctctctcactctttctctgt

SEQ ID NO: 969525 - DNA, 120 bp, Artificial Sequence
  ENSG00000188825_79 (sequence is synthesized)
ctcactctctcttacacaacacacacactcataagaagacacctatatacatttttttcctgaaccattggtaagtaatttgcacacaggatgtcccttcaccccccagtccaccaatac

SEQ ID NO: 969526 - DNA, 120 bp, Artificial Sequence
  ENSG00000188825_80 (sequence is synthesized)
ttcggtgtgtttcctaagaacaaaggccttctggaagtttcacattaattccatactggatctacagtccgagttcagatttcaccaattgtcccaataaagtcctttaggtttttctgg

SEQ ID NO: 969527 - DNA, 120 bp, Artificial Sequence
  ENSG00000188825_81 (sequence is synthesized)
agactagcgcagagaaacggggataagtactgatgagggtcccagccctcagcgatcggatttcagagggggagataaaggactgcccagaagggtgatctcttcaactacctgtgaaaa

SEQ ID NO: 969528 - DNA, 120 bp, Artificial Sequence
  ENSG00000233256_0 (sequence is synthesized)
cagcattgcacaggagagccccagagagatatgtccaggatatacgatcagtctggtgttctgagccttaaggtatggttgcagcgatgacgcattgcagaaccaaaggaatttgtcctt

SEQ ID NO: 969529 - DNA, 120 bp, Artificial Sequence
  ENSG00000233256_1 (sequence is synthesized)
tgctttattgatgaaatgcaaggaaaactacgttagaatctactgattctctttgagatctaataatacgctttattcaaatcttattcacaaaccacttcctccacgggtctttcacag

SEQ ID NO: 969530 - DNA, 120 bp, Artificial Sequence
  ENSG00000233256_2 (sequence is synthesized)
gaactgaaattggccagttacaaacagaattggttctactgtcctttgaaatcacagacgcagacatgttttagaatacaaaagacaccaagctttctttgggaaacacgtcctgtttgg

SEQ ID NO: 969531 - DNA, 120 bp, Artificial Sequence
  ENSG00000233251_0 (sequence is synthesized)
gcgctcaccttgaggccgcggatctcgccgaggtgcagctgcaggcggcggttcacctcgcggatgaggttgctgtggtccagcatcgcgctcaccttctccgcctcggcgcgccgcagg

SEQ ID NO: 969532 - DNA, 120 bp, Artificial Sequence
  ENSG00000233251_1 (sequence is synthesized)
ctgcggatcagctcctccttgctccactgcagcagctcctcgtccgacactttggacaggtcctccaccggcgcgggcggggccgcggacgagccggccggggctggggaacaactttcc

SEQ ID NO: 969533 - DNA, 120 bp, Artificial Sequence
  ENSG00000233251_2 (sequence is synthesized)
gccgccgccgcagccgccgccgcgcctccggccgccttcgacatggtactatggcagaaatggccagggaagggtttatctaaccaccaggagtacgcaaagaagagaggtccagccagc

SEQ ID NO: 969534 - DNA, 120 bp, Artificial Sequence
  ENSG00000233251_3 (sequence is synthesized)
ctgcctctcagattgttaagatgccaggtgtcttttggctcatggaaacagctgttctgccccctcccgaaccctagactcacagctacactctatggggaaaggacaaagggaaggctg

SEQ ID NO: 969535 - DNA, 120 bp, Artificial Sequence
  ENSG00000233251_4 (sequence is synthesized)
cttcctgaagagatctccatatggaagagctgcagatcacaaacaacccacacagccattgtaacgcctgcttgcctggtcacttgtgtttctgagaagccataactccaagaatagcga

SEQ ID NO: 969536 - DNA, 120 bp, Artificial Sequence
  ENSG00000233251_5 (sequence is synthesized)
agggaagaaaatgccaaaaagcaggggctgcctaacaggtctgacttgcaaggcaaactcctggcaggcctggccagcttctgcttgtcccagtgcaatcccacccccataggatctgga

SEQ ID NO: 969537 - DNA, 120 bp, Artificial Sequence
  ENSG00000233251_6 (sequence is synthesized)
atttttcagtccctttgctaagattcctgaaatagacttaatgaagagcctcagaagtgaaaattcctcttcacacatttgctcaagaagattgcttttctcctaacacagaaatcagct

SEQ ID NO: 969538 - DNA, 120 bp, Artificial Sequence
  ENSG00000233251_7 (sequence is synthesized)
gccttgaggatgtgcaagtttgattagggagtctgctcttgcctatttctcaaacggttcaggccctgacagaatcagtgtcacccctaaggtatttgcttcaaatgccccccatataat

SEQ ID NO: 969539 - DNA, 120 bp, Artificial Sequence
  ENSG00000233251_8 (sequence is synthesized)
caaaacttataaatgataaaccaaaagttgaggtacactcattgcctttcagaatgaaaccttccaaggggccatgatcatattgtgactggacaagaactatcatggatgaggcacatc

SEQ ID NO: 969540 - DNA, 120 bp, Artificial Sequence
  ENSG00000233251_9 (sequence is synthesized)
atcttttggaaccatctatggaacagatattattattccattttgcggaagaggaatctgaggctcaggccagacagatgcagctaacgttgagtggcatcctgatgatcaccttcatca

SEQ ID NO: 969541 - DNA, 120 bp, Artificial Sequence
  ENSG00000233251_10 (sequence is synthesized)
caaaaggaaggagtgctctgaggactgtaggtggctctcagaaccctgacctccacggcagccatcaaggagtggcaaagggggtccacagtggcatatgcagtgagatccaagttttag

SEQ ID NO: 969542 - DNA, 120 bp, Artificial Sequence
  ENSG00000233251_11 (sequence is synthesized)
cagtggcatatgcagtgagatccaagttttaggcattcggagtagagcaagccacgaatgagaacaggttctgaaagtgacagaaaaggagtcacttttttggttccatatgaactttaa

SEQ ID NO: 969543 - DNA, 120 bp, Artificial Sequence
  ENSG00000233251_12 (sequence is synthesized)
tgaagatctgcagcatgaagcagagctatgctcacagactcacagatctgtgtgtgagaaaacaagactgttgtttaagctaccgacttttggggagatttattgtgcagcattactaat

SEQ ID NO: 969544 - DNA, 120 bp, Artificial Sequence
  ENSG00000233251_13 (sequence is synthesized)
gcaatagttagcagatacaactcccctgcctaaatccctttgggggcatctcagcacctttctgtggagtgaagctacatttcttagcagagcatgtaagatggacacagtctgatgctt

SEQ ID NO: 969545 - DNA, 120 bp, Artificial Sequence
  ENSG00000233251_14 (sequence is synthesized)
gcttactttttcagctccaactcctaccatactttgcctgcctcatatttcatactttttcagttctaaactgccttgtagctccctgtcagcattcaatatacctccgtaccacactga

SEQ ID NO: 969546 - DNA, 120 bp, Artificial Sequence
  ENSG00000233251_15 (sequence is synthesized)
tgctcttttctcatgcatgaaatgccttccttgccttatccttctgaataacttccaaccagatccttcaaaaggcatcatcttatccagagtgctggcatcagcccacatttccctggc

SEQ ID NO: 969547 - DNA, 120 bp, Artificial Sequence
  ENSG00000233251_16 (sequence is synthesized)
agaacaatgagaggaaggaataccaggaggcaccagcgctagctggaaggagaggaagtttgtggtgctcgccagcagggcggttcccggccactagtgtactgcagctgggcaggcaca

SEQ ID NO: 969548 - DNA, 120 bp, Artificial Sequence
  ENSG00000233251_17 (sequence is synthesized)
caattgcatatttctttataagcaggagatttcacaaagaaaaggagaaggcaagaaccacagaggcaaagattggagagatgtggctgcaagtcaggcagtatctagctgccactagat

SEQ ID NO: 969549 - DNA, 120 bp, Artificial Sequence
  ENSG00000233251_18 (sequence is synthesized)
actggaagagtcaaggaatggactctccctggagactccagagaaaacctagcccttctgactccttgattgttgccttataagactcatttcagactttaggctgcgtatgagagaata

SEQ ID NO: 969550 - DNA, 120 bp, Artificial Sequence
  ENSG00000233251_19 (sequence is synthesized)
aatttctgttgttttaagccacaaagtttgtgaccacaataataatatagcaccatttataacaaagcactatgtttttatctgtattagtatagttatcaccgtctttcttactttata

SEQ ID NO: 969551 - DNA, 120 bp, Artificial Sequence
  ENSG00000233251_20 (sequence is synthesized)
cctggtggatacctattgattttctttttagagggcagggatctgtcttattcatgagtgaatactctgctgcacctgggaactaaagtgtttgccataggagtgcagtaaagtttgttc

SEQ ID NO: 969552 - DNA, 120 bp, Artificial Sequence
  ENSG00000233258_0 (sequence is synthesized)
ggaaatgcctgaggaggtgccactcctgcggggctgttttgaaggggctggaagtcttttctgtcaccacctttacctacctgtcatctgtgaacgtgactggagatgccaaggctttcc

SEQ ID NO: 969553 - DNA, 120 bp, Artificial Sequence
  ENSG00000233258_1 (sequence is synthesized)
catgtgagcacagtgagaaggtggccatctgtaagccaggaagagagctctcatcagaacctgaccatgctgacactctgatcttgacctttcagcctccagaactgtgagaaataaatg

SEQ ID NO: 969554 - DNA, 120 bp, Artificial Sequence
  ENSG00000172965_0 (sequence is synthesized)
agtcgtgtgtacatcattgggaatggagggaaataaatgactggatggtcgctgctttttaagtttcaaattgacattccagacaagcggtgcctgagcccgtgcctgtcttcagatctt

SEQ ID NO: 969555 - DNA, 120 bp, Artificial Sequence
  ENSG00000172965_1 (sequence is synthesized)
cacagcacagttcctgggaaggtggagccaccagcctctccctgccctagcagatgctaatccagcgtgcgtcctggcagaggttgaagggggctcctcaagtcccaggtccagcttggt

SEQ ID NO: 969556 - DNA, 120 bp, Artificial Sequence
  ENSG00000172965_2 (sequence is synthesized)
gtggttcagctactcgagagacatctgctgctaatggatgagcagtcaacctggacgcaggaaatcattttttatttggacaagcaaagtggatcagcaaaggctgcagtcaccagcatc

SEQ ID NO: 969557 - DNA, 120 bp, Artificial Sequence
  ENSG00000172965_3 (sequence is synthesized)
ttttccaaccttaatgaactgtatcctcaaaagaacactatcagactggctctgccgacttccagttctggaacaagatggttaaactcatttttccctgctctgctcctctaaatacaa

SEQ ID NO: 969558 - DNA, 120 bp, Artificial Sequence
  ENSG00000172965_4 (sequence is synthesized)
ctaagtaccttggaaactattcagcagacaatgataaagggctctgaaagctagaagaaaaggtgtacttgcaagaaacctcaggacttgagtaacagcaacatgtcttggacgagcctg

SEQ ID NO: 969559 - DNA, 120 bp, Artificial Sequence
  ENSG00000172965_5 (sequence is synthesized)
aggatgtctacaagtggaagaaaagaagccactggagcagaaggtggggaggataaaatttggagcaagattctcaaggaagcaacaagatcctaagctcaccaagctcctgtatctact

SEQ ID NO: 969560 - DNA, 120 bp, Artificial Sequence
  ENSG00000172965_6 (sequence is synthesized)
ttgtgtctattttttgagagagataaacttttcatggtgttacattttggaaaaaaaaaaaaaagactaggtgaacagtcaggtaggaaagcagcataacagtcccttaaattctgatca

SEQ ID NO: 969561 - DNA, 120 bp, Artificial Sequence
  ENSG00000172965_7 (sequence is synthesized)
tgtaggacattcttctttgccctgggcctgggaaaatgcagcatgttccagagcaaaagtcctaatgaggggaactaaaccagtgggacccaaaccaatgtcctggctcactgaggaccc

SEQ ID NO: 969562 - DNA, 120 bp, Artificial Sequence
  ENSG00000172965_8 (sequence is synthesized)
gttagaaccaaatctctgggtgtggacaggctcccatacttttcaaaaattcccctgatgactaatgaacaaccagaggtaagaaccagtggcccagaggaataaccagcccagctgttg

SEQ ID NO: 969563 - DNA, 120 bp, Artificial Sequence
  ENSG00000172965_9 (sequence is synthesized)
tacgagctcgctaagctggctcaggtcaatgttgaattctctgctaggcagctcctcataagaactggcagagatggttcttacacaacaacaggtgacaactccagactctgccggaag

SEQ ID NO: 969564 - DNA, 120 bp, Artificial Sequence
  ENSG00000172965_10 (sequence is synthesized)
ttccaggatctgggttcccggacaatgcatgacactcagtccagcattgcaggtggaagagcgacggtgaaaagaccaaagtcaattaaaatgtgttaaccaaaacaggaaacatgagtg

SEQ ID NO: 969565 - DNA, 120 bp, Artificial Sequence
  ENSG00000172965_11 (sequence is synthesized)
aggtgattgagagtgtgtttaacttagatgtgtgattttatcaatactttcattgttcaaaaactcttattttttaaagatattttcaaaacaaatccaaactttacttttcattccaaa

SEQ ID NO: 969566 - DNA, 120 bp, Artificial Sequence
  ENSG00000172965_12 (sequence is synthesized)
tcatccccctccagcacctctacctgttgcccgccgatcacagccggaatgcagctgaaagattccctggggcctggttccaactgcccactgtggactctgaggcctctgcatttgcgg

SEQ ID NO: 969567 - DNA, 120 bp, Artificial Sequence
  ENSG00000172965_13 (sequence is synthesized)
gtggtctgcctgtgatattttggtcatgggctggtctggtcggtttcccatttgtctggccagtctctgtgtgtcttaatcccttgtccttcattaaaagcaaaactaaagaaaacagaa

SEQ ID NO: 969568 - DNA, 120 bp, Artificial Sequence
  ENSG00000172965_14 (sequence is synthesized)
caggccagaaagcagacccagggaggatagcacatgtcttcggctacactggtgaaggcatcgtgcctgctccacagcacatttttattcaaggaaaggagaaagagactacctactgca

SEQ ID NO: 969569 - DNA, 120 bp, Artificial Sequence
  ENSG00000172965_15 (sequence is synthesized)
tttctgtcactcgctgaaaaggacactctgtcagaaaatcttctagcaaacttcaaagggcaaaatcaccccttgttactgataaagcccagagagcttcagcagctaacattccctgga

SEQ ID NO: 969570 - DNA, 120 bp, Artificial Sequence
  ENSG00000172965_16 (sequence is synthesized)
gaacctaggtcagtctggccagaacacccacaagctttccttaactcagtgtgctatctccccacgactaggtcactactgctttataatcacctttgtagccaccagtggattttgctc

SEQ ID NO: 969571 - DNA, 120 bp, Artificial Sequence
  ENSG00000172965_17 (sequence is synthesized)
atcagtatttttcaggcaattgatactttagatattcagctgcaagacgtatgcagttttcattgacatcttttggagaaactgacaaacctggacttgacttaatgcctttggaacctt

SEQ ID NO: 969572 - DNA, 120 bp, Artificial Sequence
  ENSG00000172965_18 (sequence is synthesized)
ccaagatgttatataactctagatagaaggctgggcctccatgatgtcaggaatgttgcattcttatttccccatagataaacccatttgtccacaaagtcaaggagtcaggcagaggcc

SEQ ID NO: 969573 - DNA, 120 bp, Artificial Sequence
  ENSG00000172965_19 (sequence is synthesized)
cttgccatggggctttttaggataaagcaacaagcctggactttgctctacaacagggttttgcatagggagtggtatgaccagatccctcaagaaagaaagcttagagaccaggccaga

SEQ ID NO: 969574 - DNA, 120 bp, Artificial Sequence
  ENSG00000172965_20 (sequence is synthesized)
gtccactgcagtagcccagtcaagagaggatggtgacttggacttgtagtagagccagttagaatgaaagaaattgacacattcagaaatggttttagagatagagtcaaactggacctg

SEQ ID NO: 969575 - DNA, 120 bp, Artificial Sequence
  ENSG00000172965_21 (sequence is synthesized)
ataaagaactagagaagcggagtgaggataaagagaagagccatgactgactcggaagattttgtcttgaaaaacttgagaactcaagacagagtgaaataaaatcacatgtgggaaaaa

SEQ ID NO: 969576 - DNA, 120 bp, Artificial Sequence
  ENSG00000172965_22 (sequence is synthesized)
aagggctatttttgacaccctaaatgtgctgagacaagtcattaaggtggtcctgccaggacacagccatctaaagcagcaatctgcttcttgccagaaaatctcgtgcctctgcagagc

SEQ ID NO: 969577 - DNA, 120 bp, Artificial Sequence
  ENSG00000172965_23 (sequence is synthesized)
tgggaaggtggagccaccagcctctccctgtcctggaggctggaagtgcaaaaggaaggtgtcggcaagatcgtttttttctgagagctctctccttggcttgcagatggcagcttgctc

SEQ ID NO: 969578 - DNA, 120 bp, Artificial Sequence
  ENSG00000172965_24 (sequence is synthesized)
ctggcacagtcttttctctactcacgcccaaagttacggaggacccagcaaccatctcctgcagcccctgaaaacctcttgactcttctgtgatgtccccagtgatccagcagccccggc

SEQ ID NO: 969579 - DNA, 120 bp, Artificial Sequence
  ENSG00000172965_25 (sequence is synthesized)
gtttgtatattggaaacttgccagcctccatccacattccaacctccgtctgcatccctcgaataactgggagatgaaacaggaagctctatgacacacttgatcgaatatgacagacac

SEQ ID NO: 969580 - DNA, 120 bp, Artificial Sequence
  ENSG00000172965_26 (sequence is synthesized)
caagacgccttaaaggaaccaacaaccaaatccaagagagctggacagaccattgaacacacagtaggctgtgtctcgtggctttcgttgtctggtgcctcaaagaaaacaccagaaaga

SEQ ID NO: 969581 - DNA, 120 bp, Artificial Sequence
  ENSG00000172965_27 (sequence is synthesized)
ttgtttctaagctagagccaccccagattgcttaaagtgcaaagctcactgctgttgggggtacccttgtgagacactggaaagctggttttaccgtggccctatgaagaggaagactga

SEQ ID NO: 969582 - DNA, 120 bp, Artificial Sequence
  ENSG00000172965_28 (sequence is synthesized)
aatttagacagtaatacctttactaggattggaaaagatttggttaatgacagccctgtcatttctaaaacccattatcactgtatgagagattcctttgcgctgcatcctcgacagtgc

SEQ ID NO: 969583 - DNA, 120 bp, Artificial Sequence
  ENSG00000172965_29 (sequence is synthesized)
acaaaatggttcaatctgtctacctcctttcacattccaccaagatattccaaggtccagggttcctttgaccacctcacacctaacaagttccctcactgtctctcactctcccctgaa

SEQ ID NO: 969584 - DNA, 120 bp, Artificial Sequence
  ENSG00000172965_30 (sequence is synthesized)
gattctaagctgcctctgtcctgctaaaactgtagacctgagaatgaagtaaggtgcttcagaataactgggagatgaaacaggaagctctatgacacacttgatcgaatatgacagaca

SEQ ID NO: 969585 - DNA, 120 bp, Artificial Sequence
  ENSG00000172965_31 (sequence is synthesized)
ctggagcagatgaggaggagatggaggtcccaggaagggctgtgatctgcctggggtcccacaatgggaaacaggcatgagctctccacactccctgtccaatgctctttccactacaac

SEQ ID NO: 969586 - DNA, 120 bp, Artificial Sequence
  ENSG00000172965_32 (sequence is synthesized)
tggctgtcggtctcccataggacaagaaaaaacagtcaaaaaggaaatcgaagggatttttgtttttatccctgttcttttgttggttctatctgttctgttttgggtattttgtttgtt

SEQ ID NO: 969587 - DNA, 120 bp, Artificial Sequence
  ENSG00000172965_33 (sequence is synthesized)
tttatttgtgtactttttttttttttaaatggagcttccatcatgtaggagtagggtgtagaaatctgagttggtggctccctggtataagaccatagccttcattttggtgagtaacaa

SEQ ID NO: 969588 - DNA, 120 bp, Artificial Sequence
  ENSG00000172965_34 (sequence is synthesized)
gggcctccccacatcatgggaggagaaggatgagtagatgatgtctcatggagaggacctgccaggatccctcatcgctggccttcagctttctcatctgccctcaaccacagaaccctg

SEQ ID NO: 969589 - DNA, 120 bp, Artificial Sequence
  ENSG00000172965_35 (sequence is synthesized)
ggaggaggctccctcagtggctcgtgcactcttgcaggccctgtgaacatatatacttcctggtgggaagagcaagggagcctctggtggaaagcagccccagggtccaagaaccacaca

SEQ ID NO: 969590 - DNA, 120 bp, Artificial Sequence
  ENSG00000172965_36 (sequence is synthesized)
gccctgcattagggcccccagggagggagaagaccaaggtcatgcttttgaacctggatgccagaagagaacagctgtggggaaaagcatgcctggaaccaagaaaaacatgtttaccag

SEQ ID NO: 969591 - DNA, 120 bp, Artificial Sequence
  ENSG00000172965_37 (sequence is synthesized)
gggccattcctcacaccagctgcaggcagggtcaggaaagccacaggctgcactgtagttgcaaccttgcatgcggacgcaaggctcagaatgttcctcaaagatcctaaaatgttccca

SEQ ID NO: 969592 - DNA, 120 bp, Artificial Sequence
  ENSG00000172965_38 (sequence is synthesized)
gagtcaggctgagtccattcaaatgttcactcaccctggccacactcactacacctgacttccctgtatcatgagttagagaaatagtatagagtctggttgatgctggcaggtgggagg

SEQ ID NO: 969593 - DNA, 120 bp, Artificial Sequence
  ENSG00000172965_39 (sequence is synthesized)
gaatgggataggaaggagagagagagagagcaagaaagaaggctgtttgggtttttgtctataacatatgtatatacactcatcaagtccattatttaaaacctctttcatggtttcaat

SEQ ID NO: 969594 - DNA, 120 bp, Artificial Sequence
  ENSG00000172965_40 (sequence is synthesized)
ttcctgtggaccacttttcatgcccattttaagttccttgaaggcgaggagatacatgtgtatctgccagcttcactgtgccttatatcttaggcaatcaataaatattagtaaatcaaa

SEQ ID NO: 969595 - DNA, 120 bp, Artificial Sequence
  ENSG00000172965_41 (sequence is synthesized)
cacttctcacaactaatggagccaagattctgtccttatggctccagagacctcttttttttcccactgtaccacaacactcaccaggactggagtgccacctatgacctcattgcataa

SEQ ID NO: 969596 - DNA, 120 bp, Artificial Sequence
  ENSG00000172965_42 (sequence is synthesized)
tggatggcttgtcctcaaatgggcccggctggaggtaccatgcacctttgagggaccaaggacccaagacttgaggtagacactattcccagctggatactctcaatgttgaggatatag

SEQ ID NO: 969597 - DNA, 120 bp, Artificial Sequence
  ENSG00000172965_43 (sequence is synthesized)
atgcacaaaccaatgcagggaggcctccaggagccactggagaagaaatcttcagatcctaccaggcccatagctgttgcctttgtgggctcctgggttaatttccacacatcagtggcc

SEQ ID NO: 969598 - DNA, 120 bp, Artificial Sequence
  ENSG00000172965_44 (sequence is synthesized)
caccttatgatatcctccctgcatgccacactcccggccatgctctgtggacagccattatttccagtaattgctaatgggagccagtctccaaagagtaatgaatcagaggtgttcctt

SEQ ID NO: 969599 - DNA, 120 bp, Artificial Sequence
  ENSG00000172965_45 (sequence is synthesized)
ggaatgtgttacactaggacttcgccgatctcacaggctcctttccagatgagctgactgtaatctctgggaagctggatctggaggaacaatgggatgggatttgcggtgacccttcct

SEQ ID NO: 969600 - DNA, 120 bp, Artificial Sequence
  ENSG00000172965_46 (sequence is synthesized)
gcccttcttgagcagcttgtgaaccagaagatgtgcctggagagaaagcctcatttggggaagtgcagtagtcgaagttctttattttgaaaatggagaacaacccttctcacaatcctg

SEQ ID NO: 969601 - DNA, 120 bp, Artificial Sequence
  ENSG00000172965_47 (sequence is synthesized)
aactttgtccttcaagctgtgggtctctgaagtgtagagccagcagatcccccagtgtagggactgggccttccttgcccattgaatgctttctatacatgaagacttggagctctttac

SEQ ID NO: 969602 - DNA, 120 bp, Artificial Sequence
  ENSG00000172965_48 (sequence is synthesized)
agatgacagtagccagtgaggaagataaaagaagagaaaagacccaaaatgcgggtttgccactcttttttgccagcaccgtggggacagtcactctgccttctttccaccacctccaac

SEQ ID NO: 969603 - DNA, 120 bp, Artificial Sequence
  ENSG00000172965_49 (sequence is synthesized)
ttcacactcacacgcacactctggtcccacagagcctgtttggtacttgcctgacagcccaccttgaaaccagatggtcatgaacctgtcaccaagtcatctgaagatcttccactgcaa

SEQ ID NO: 969604 - DNA, 120 bp, Artificial Sequence
  ENSG00000172965_50 (sequence is synthesized)
cctgtatggcatctgccacagggaccatgggacatgattgaagaaccactccagtgcagttgatgaaggggtgggtctgcactggagttaggtgcaccagggcctgggccaagggtgggc

SEQ ID NO: 969605 - DNA, 120 bp, Artificial Sequence
  ENSG00000172965_51 (sequence is synthesized)
tgggtccatcttgtgtgtggtggtcttcttcagagtagcagctgattcagagggattccatagaactgcacaggctaggtctagtcagatatcttggacattttctatttctagattaga

SEQ ID NO: 969606 - DNA, 120 bp, Artificial Sequence
  ENSG00000172965_52 (sequence is synthesized)
gaatatagcatacgctgattttaatataactgtgtatgtgactttttcagtgagaaaaattttaagtgatgttctaaacaatttttggcatgtagacagaatagtcaaatatctgtttaa

SEQ ID NO: 969607 - DNA, 88 bp, Artificial Sequence
  ENSG00000172965_53 (sequence is synthesized)
atttttggcatgtagacagaatagtcaaatatctgtttaactagcaacatagttactcgtgcatatttaaaatactacatgagtatag

SEQ ID NO: 969608 - DNA, 120 bp, Artificial Sequence
  ENSG00000172965_54 (sequence is synthesized)
ctgggaggccgaggtgagcatattgcctgagttcagtttgagaccactttggacaacatggtgaaaccctgactctataaaaatacaaaaatgtagccaggtgtggtggtgcgtgcctgt

SEQ ID NO: 969609 - DNA, 86 bp, Artificial Sequence
  ENSG00000172965_55 (sequence is synthesized)
ctgtagtcccggctacttgggaagctgaggtgcaagaattgcctgaacctgagaggcagaggttgcagtgacctgagattgtgtac

SEQ ID NO: 969610 - DNA, 120 bp, Artificial Sequence
  ENSG00000172965_56 (sequence is synthesized)
tatcagactggtaagacaagcattattgtcccacttcacagatgaagagcttgggggccctgtggatgtgtaggagagtcggccttcctttttataggccttttgctgagctcagaggac

SEQ ID NO: 969611 - DNA, 120 bp, Artificial Sequence
  ENSG00000172965_57 (sequence is synthesized)
agagcagaagacaaagccgaatgcagccctaagcagacactatcccagcccaaggagctatgcagacagctcctgcctagaggagaaacaattctctccttcagccaggcatgtggcaca

SEQ ID NO: 969612 - DNA, 120 bp, Artificial Sequence
  ENSG00000172965_58 (sequence is synthesized)
gaggtgaacaggaaatgcttagggagacagttcacagatatatatgtacttcacagggcacaatttaatccataaatcaatcatggatcaccgctaaagaaaacaaaatatgctgccact

SEQ ID NO: 969613 - DNA, 120 bp, Artificial Sequence
  ENSG00000172965_59 (sequence is synthesized)
aatttgccaccaccctgtgagcatgattggatgatgtttattttgattaggagattgctccatttataaatcttcaatacatcctgtccccctaaaacggcatctgggtcttttgagggt

SEQ ID NO: 969614 - DNA, 120 bp, Artificial Sequence
  ENSG00000172965_60 (sequence is synthesized)
taaaaaaaaaaaaaagtgaaattggatgagggatgagagctggacttctgtgtgtcccggggtccctggatccacagcctggtgcctagcatcagttaagcccacgctggggtcgcatca

SEQ ID NO: 969615 - DNA, 120 bp, Artificial Sequence
  ENSG00000172965_61 (sequence is synthesized)
catcccgcaaagccacgtgctctgtgaggccaacaggagccccgccgggtggaccagctggaatctcagagagcgccgactctgaaactacccggctctgcagaagcacgctgggcccag

SEQ ID NO: 969616 - DNA, 120 bp, Artificial Sequence
  ENSG00000172965_62 (sequence is synthesized)
gggcttctagactgacagctccatttatcaactacctattggttttaaaaattggagtgtcttttccgcgttgactgattttggctctaagagatgtcgctggtcatttcagagtgactg

SEQ ID NO: 969617 - DNA, 120 bp, Artificial Sequence
  ENSG00000172965_63 (sequence is synthesized)
aacctcccctctaacagatcccgggaattgttttcaggaaaggtaaaaggcagccttttctgtcacaacacaacgctgagccggcagcctggctctgtcaggatctggggctcccgcgcc

SEQ ID NO: 969618 - DNA, 120 bp, Artificial Sequence
  ENSG00000172965_64 (sequence is synthesized)
ccaagttcaccgcgaggccccgcgctgcctgcgctgcgctcccggacccgcaccgaccgcagcgcgcgccgccggtgcttctcccaccccagcctggaagctgcctccctccgcctatgc

SEQ ID NO: 969619 - DNA, 120 bp, Artificial Sequence
  ENSG00000172965_65 (sequence is synthesized)
gaagctgcctccctccgcctatgcctgcaggataagaagcccgaggaggcggagcatggaactcgacagttaaaacatttaagagagaaaacctagtgtcttgctggcctgaaatcgagt

SEQ ID NO: 969620 - DNA, 120 bp, Artificial Sequence
  ENSG00000172965_66 (sequence is synthesized)
acgcagcccggggtgatcagggtctcccggcccggatgtgtgagacttgcttcccctgggcaataggcgatacgatgctttaggaggaaggtgtctctccctcctaagccccggagggga

SEQ ID NO: 969621 - DNA, 120 bp, Artificial Sequence
  ENSG00000172965_67 (sequence is synthesized)
tcctctaactgcaggcagagaggcagacagaaaagcacttgctgaaacacaaagttttgttctgtcctcaacgaactgtctagagctgattgctgatagtcgtggtgcattatgccttcc

SEQ ID NO: 969622 - DNA, 120 bp, Artificial Sequence
  ENSG00000172965_68 (sequence is synthesized)
accctcactacatggctggggtcacaagtggcctgacaatatccaactgtcctggaaaaatgaaaaaaaacagacttctgcccagaattattcttctatggtgctggtggaagtgggatg

SEQ ID NO: 969623 - DNA, 120 bp, Artificial Sequence
  ENSG00000172965_69 (sequence is synthesized)
aggcctgtttcaaagtgaatttaaaggagtgaagctagtggactgtgagttggactaaaatgcaggaggccaagcaaatggccatcagaagccctgccccaggcctgtgccaattcccat

SEQ ID NO: 969624 - DNA, 120 bp, Artificial Sequence
  ENSG00000172965_70 (sequence is synthesized)
gagggcgtgagctggatgctgcagctggactctgctgtaatggacacggtggccctctgggacctgatgctgacagtgcatcctgtgaccatgggaaagcctgcaaccagaaaagccagc

SEQ ID NO: 969625 - DNA, 120 bp, Artificial Sequence
  ENSG00000172965_71 (sequence is synthesized)
agcacaaaggggcgtagcacttaagtctgttgttattactgctattgcctcttcagaatacttcccaataacatgctcgtcgaaatggaatgaaaaccaacaccaaatgcttcccagtta

SEQ ID NO: 969626 - DNA, 120 bp, Artificial Sequence
  ENSG00000172965_72 (sequence is synthesized)
ataacagatcgctcgaactgtgcaagatacaggcagatattaactcttgttctgactcaatttcactttatcatgaaaatacactggaccaaatctatgcatctgagtccagactggagt

SEQ ID NO: 969627 - DNA, 120 bp, Artificial Sequence
  ENSG00000172965_73 (sequence is synthesized)
gacgcaaaaatagtctgaaattttgccacagatgcaactgaatttataaagaaaaccagaatcatggtattctgaggactacaaatgattcaacaaagcctgagaatctccctcatttgg

SEQ ID NO: 969628 - DNA, 120 bp, Artificial Sequence
  ENSG00000172965_74 (sequence is synthesized)
aattccactgtgcccgatttattttccattgccaaggcactactggtaaagctatacaaaatgaagcacacccactgaaggttcagggaccatggcagaagagcaaggcacatgagactg

SEQ ID NO: 969629 - DNA, 120 bp, Artificial Sequence
  ENSG00000172965_75 (sequence is synthesized)
taagagccagattgggagctggagtgtggaggccaaacaactccatcttgtatgctaatctgctgtgttaacttctgattaaccctggttttgcgaatgcctccaagatttctattttat

SEQ ID NO: 969630 - DNA, 120 bp, Artificial Sequence
  ENSG00000172965_76 (sequence is synthesized)
ctactgttccttgggtatgagcatgtacttaccatcaatcctgtccttagtttgatattatctttccataaatcctgaacttaagccaactgtcctatacatcccttctgaagcatatat

SEQ ID NO: 969631 - DNA, 120 bp, Artificial Sequence
  ENSG00000172965_77 (sequence is synthesized)
acactttccctatggctcataagccctgggtctggagtgtaaccatgcacggatctaccatctcatcttgaggctgcccgagatagggtttctgtttgtaaatacctattaaatgtttct

SEQ ID NO: 969632 - DNA, 120 bp, Artificial Sequence
  ENSG00000172965_78 (sequence is synthesized)
ttctgagaaaacaataagaagaaaagagaggaaaggtctcaaaacattattccaagtgtctgtctcaagaaactaggaaaagaacctagcacaaagcaagcaaaaggaaataataaacaa

SEQ ID NO: 969633 - DNA, 120 bp, Artificial Sequence
  ENSG00000172965_79 (sequence is synthesized)
taaatttaataataggaaagtagagaaaaatcagtggaacaaaaagctgattaaaaaaatcaaaactgataaacttttggaaagactgacagagataaaaaagacacaaattaccagtat

SEQ ID NO: 969634 - DNA, 120 bp, Artificial Sequence
  ENSG00000172965_80 (sequence is synthesized)
tagaaatgaagcaggggttatcacaacagatcctgcatccattaaaaatattggaatgctacaaatacttttcacattcataaattcaacaacttagaagaaagggaccaattcttcaaa

SEQ ID NO: 969635 - DNA, 120 bp, Artificial Sequence
  ENSG00000172965_81 (sequence is synthesized)
agtgcatgtggtgattcatgtgcatggaaagtaccttgggctgaccacaaactagagttccctacaactacatcaatgtcaaaactaaccactgtctcctagcttgtttgtttaaaaaaa

SEQ ID NO: 969636 - DNA, 120 bp, Artificial Sequence
  ENSG00000172965_82 (sequence is synthesized)
aaaatcccatggtcttcaatttggtcatttaaaaataatctacaaggtatactgtttttctgttcttgttatttcctaacttttaaggtttctatttttccaccctgtagatcttgttct

SEQ ID NO: 969637 - DNA, 120 bp, Artificial Sequence
  ENSG00000172965_83 (sequence is synthesized)
aagtttcaaattgacattccagacaagcggtgcctgagcccgtgcctgtcttcagatcttcacagcacagttcctgggaaggtggagccaccagcctctccctgggcaaagaggcagagg

SEQ ID NO: 969638 - DNA, 120 bp, Artificial Sequence
  ENSG00000172965_84 (sequence is synthesized)
aatggagctcagagcttttagagaatatgggccagaaacaggaaggagtcaggacctgataacgggaaccagcggacagtgaacgcagtggagggccactggggccggagcagccgagag

SEQ ID NO: 969639 - DNA, 120 bp, Artificial Sequence
  ENSG00000172965_85 (sequence is synthesized)
aaatagtctgaaattttgccacagatgcaactgaatttataaagggtcctcaggtcttccacagcgcccactttcaggttctaatccattttgtgagtatgtgcaaggtataaattcaca

SEQ ID NO: 969640 - DNA, 120 bp, Artificial Sequence
  ENSG00000172965_86 (sequence is synthesized)
gtcaccaaaggcagcggcaacacaacacctcaacctcgacgccatgagctacaacctggttcactgttcaagtctgaaatctgccctggacatttcttaatgactaatccacacgagacc

SEQ ID NO: 969641 - DNA, 120 bp, Artificial Sequence
  ENSG00000172965_87 (sequence is synthesized)
gggctacatgactgtctctccacaaacccccttctcattgggtgggggatacctccaacacaccgtcgcgggaaccacctgccatgcatcaggctgagacaactgtcccctcagaccccg

SEQ ID NO: 969642 - DNA, 120 bp, Artificial Sequence
  ENSG00000172965_88 (sequence is synthesized)
aatggcccccacagacaccagccgcagctgcagctccactgtttacacaagctctgccgcgcttgtttgacagaatgggattgtgataaggccagggcatttccccttttccttccataa

SEQ ID NO: 969643 - DNA, 120 bp, Artificial Sequence
  ENSG00000172965_89 (sequence is synthesized)
caagattggaggaaatcagctttatgtaagcgattcctgtagaggcactctgtaaccacagtctgtgatttttatctgttttacacacaagattgctttgttttgatttaactttcaaaa

SEQ ID NO: 969644 - DNA, 120 bp, Artificial Sequence
  ENSG00000172965_90 (sequence is synthesized)
ttactttgctgcctctgtgtgagaataatttaggggaaggttaattttagtgtagactaatattaataggttgaaagagacttattcaaaataaaaccacaacttactaaaatgaagaaa

SEQ ID NO: 969645 - DNA, 120 bp, Artificial Sequence
  ENSG00000172965_91 (sequence is synthesized)
aagtatgaagagaatgtcgggagaggaagtggtggctatgagtcagcatgagtcatctcgttccaatgagaatgaaggctgagacaagcggtgcctgagcccgtgcctgtcttcagatct

SEQ ID NO: 969646 - DNA, 120 bp, Artificial Sequence
  ENSG00000172965_92 (sequence is synthesized)
aggtagggtagaaggggcagtacaccaataggcctgggtattctagaacaataggcctagaacttctcatcagctcctgtttcttttcatctctaggaaaggagaaagagactacctact

SEQ ID NO: 969647 - DNA, 120 bp, Artificial Sequence
  ENSG00000172965_93 (sequence is synthesized)
gcaatgttggagtgtcatgttctttgcagagggacaggaaaaaaaaaggatttttttttcttatcaagagatactgtttcctcaaggagaaagggcatcagtccaaggcactggtttgct

SEQ ID NO: 969648 - DNA, 120 bp, Artificial Sequence
  ENSG00000172965_94 (sequence is synthesized)
caaaaagattagtaaagaacaagcatattttgtctgtggtgacaacatgatctccccccccccactagtaaactcacagcatcagtacgcaggcagtgtgatgcattttcaaagttcctc

SEQ ID NO: 969649 - DNA, 120 bp, Artificial Sequence
  ENSG00000172965_95 (sequence is synthesized)
acttttccagatccaacaggactcttgtgcacatactcggtgtttccatggcaaatccactgtgtatgaaaattagacccttccaaaaaacaaatttactagtcagtaaccatcatcagc

SEQ ID NO: 969650 - DNA, 120 bp, Artificial Sequence
  ENSG00000172965_96 (sequence is synthesized)
cctccatgctcctacttctgctggtctccatttcaccaggcgcctccctccgacttccaattggccacaagcttcgtcgctctctctcaaagcaattttgtgtgtgagtatagtcagaag

SEQ ID NO: 969651 - DNA, 120 bp, Artificial Sequence
  ENSG00000172965_97 (sequence is synthesized)
tcggggaactccggcacagacctgtagtcagtgccccacagcgccccagccttctctcccgacaggagcggccaggacagggagcagaaggtgactgctgtgctgcctggagctcttctg

SEQ ID NO: 969652 - DNA, 120 bp, Artificial Sequence
  ENSG00000172965_98 (sequence is synthesized)
tccggaggtttagtgaaactagagaaactcagtggacacactacaagacttcagagatactttttgtaaacccaggaagaatcaaagatatgaaacatgcagtaggcactcactaaatgt

SEQ ID NO: 969653 - DNA, 120 bp, Artificial Sequence
  ENSG00000172965_99 (sequence is synthesized)
taattttcttcctttttaaatatttgcattatgatagttaaattaatgactgcacgactggaagaatacacactctaatgattcttttccctaaaataaatgtgtccactatttgctgtc

SEQ ID NO: 969654 - DNA, 62 bp, Artificial Sequence
  ENSG00000172965_100 (sequence is synthesized)
atactaaatacaaaaaattagccaggtatggtgatgcatgcctgtagtccaagctacttggg

SEQ ID NO: 969655 - DNA, 120 bp, Artificial Sequence
  ENSG00000172965_101 (sequence is synthesized)
actgacaaaactaccgaaccacgttcctggttgaggatacctgaaggtcgacatttatctgggatcttttgctgctgctttggtatgacttctatcaagatagctttcgacgagaataac

SEQ ID NO: 969656 - DNA, 120 bp, Artificial Sequence
  ENSG00000172965_102 (sequence is synthesized)
acaccagtgccttacgtgctcgtggaacagtcctggttggcaggctctctcctttcccttgtgattcggagaccctggttccttccatctcacgccctccaccattccctgagacctcgg

SEQ ID NO: 969657 - DNA, 80 bp, Artificial Sequence
  ENSG00000172965_103 (sequence is synthesized)
gtggttcagctactcgagagacatctgctgctaatggatgagcagtcaacctggacgcaggaaatcattttttatttgga

SEQ ID NO: 969658 - DNA, 120 bp, Artificial Sequence
  ENSG00000172965_104 (sequence is synthesized)
tactctaaaaatgtcttattatttttaggtgatttgggcaaagcacacgcattgtatttgcatctgggaaccacatttttaatttaaaaaagttatttgtaggccggacacggtggctca

SEQ ID NO: 969659 - DNA, 120 bp, Artificial Sequence
  ENSG00000172965_105 (sequence is synthesized)
agctactcgggaggctgaggcatgagaatatcttgaactgctcctttttattgctgagtgatattccattctatgaagctcagtttgcttatccgttctcctgttgatgaacatctgatg

SEQ ID NO: 969660 - DNA, 120 bp, Artificial Sequence
  ENSG00000172965_106 (sequence is synthesized)
ccgttctcctgttgatgaacatctgatgtttgcagttctcctctccgtgagtcttcttgtaaacataattttcatttctcttgggaaaaaccctaggagtggtactgctgggtcaagggg

SEQ ID NO: 969661 - DNA, 120 bp, Artificial Sequence
  ENSG00000172965_107 (sequence is synthesized)
gtaggtgtttgtatagctttataagaagttaccacatccttactaatatttggtgatagctattctttaagttaaaagtgtagaggcatctcgttgtggttttaatttttatctcccaaa

SEQ ID NO: 969662 - DNA, 120 bp, Artificial Sequence
  ENSG00000172965_108 (sequence is synthesized)
gccccaggctcagccagagcagggcagaggacagatgacagaggacagatggcctgctgcagtgaggaactactctctcttctgagagcttcagagacctgcagagacatagggactacc

SEQ ID NO: 969663 - DNA, 120 bp, Artificial Sequence
  ENSG00000172965_109 (sequence is synthesized)
agctgcagagagaagtaactttctcgagggcctcctttctggtgagagcagcagatgtcaggatgatgaccaatagcagagaggagctaccctctccagggcctcctctctgcttgagag

SEQ ID NO: 969664 - DNA, 120 bp, Artificial Sequence
  ENSG00000172965_110 (sequence is synthesized)
ctgagcactcaatgggaagatctgcttacagagaagatgatctgcctacagagaggagctatgcactaagggtttcctctgagctgttctaacacttagtaaagctttctttgtcttgtt

SEQ ID NO: 969665 - DNA, 120 bp, Artificial Sequence
  ENSG00000172965_111 (sequence is synthesized)
ggagatgagatggggatccaagtcttgtgcccccaaagacagggcaccaggcagcgtagaggtggccagtaccagagcaacagcctaacaatggctctgccgacttccagttctggaaca

SEQ ID NO: 969666 - DNA, 120 bp, Artificial Sequence
  ENSG00000172965_112 (sequence is synthesized)
attcaggagttgtgagcaaatagaacttaaagccatgagagaagaagggatcaccaagagagacagtgtggcatagagaagaaaaggggtggaagacgatccctgggcagaaaagtcctt

SEQ ID NO: 969667 - DNA, 120 bp, Artificial Sequence
  ENSG00000172965_113 (sequence is synthesized)
agagcagaggcaacaggcatgaccaagaagactaagaaagaacattcagtacagcaggaggagagcaaaaaatgtgtggtattctagaagcaaagagaataaagggcttcaggaaggagc

SEQ ID NO: 969668 - DNA, 120 bp, Artificial Sequence
  ENSG00000172965_114 (sequence is synthesized)
acactcagggagtgcaccatgtgaagactggacttaaacagctacaccaccagaagccgagagagaggctggaacatagccttccctttggagccctagcagatgctaatccagcgtgcg

SEQ ID NO: 969669 - DNA, 120 bp, Artificial Sequence
  ENSG00000172965_115 (sequence is synthesized)
tacatgtatacttatgtctataggggagaggggaaattgacccactttcctccactctaactccagatctcagctgccgagtggaaaccccattctcacaccatagctatgggactgggg

SEQ ID NO: 969670 - DNA, 120 bp, Artificial Sequence
  ENSG00000172965_116 (sequence is synthesized)
gaaaggggaggaaataactaaagagtaaggaattgggggaggctttgaggtttggatgtgacaggtagtttgcatgtagttggaatgcagtaacattggtccacaaggtttgtcagaaac

SEQ ID NO: 969671 - DNA, 120 bp, Artificial Sequence
  ENSG00000172965_117 (sequence is synthesized)
cctggttattttggaaggttccaaagttttgtcctcttcagatatcatgaaaacaggaaattctgtaaacatggccactgaagggctagctcatttcttggaaaaggagtttctggagag

SEQ ID NO: 969672 - DNA, 120 bp, Artificial Sequence
  ENSG00000172965_118 (sequence is synthesized)
ttctcagagcatataaatagcagggccataaagacaaaggtaaccattcaaggaatagagaagtatattctcaaaaattacacgccaagccagagctgtggttcagaaagggggttttat

SEQ ID NO: 969673 - DNA, 120 bp, Artificial Sequence
  ENSG00000172965_119 (sequence is synthesized)
gttgtttctgttgttgtttcagttttggcctcagaaaggatgcgcggccctgctgtaaacagcctctcagcactgggaaggggtgtgcttacgaggctggtgtagacatccagagcctag

SEQ ID NO: 969674 - DNA, 120 bp, Artificial Sequence
  ENSG00000172965_120 (sequence is synthesized)
cctagataggaaggcccaggcacccacagggaggcctgctttgacagagaagcatttctgtttagaagagggcacctgggagatatttccagagagcttcttatgacttgtcatgtagct

SEQ ID NO: 969675 - DNA, 120 bp, Artificial Sequence
  ENSG00000172965_121 (sequence is synthesized)
cacaataatttaaacagctttcttatttcttaacttctctgggtattttgtgtgctactgtatcttgtgaatgaatctcaagaggaaggatgaagcttttccaaaatcacatgccttcat

SEQ ID NO: 969676 - DNA, 120 bp, Artificial Sequence
  ENSG00000172965_122 (sequence is synthesized)
ctcattttacagaaaaatttgtgcctaatattaaccaaaggaaatggggagcggcagggccagtgggttttcatggtgaactgagggttgcatcttggacaggttgcatgtggaagggac

SEQ ID NO: 969677 - DNA, 120 bp, Artificial Sequence
  ENSG00000172965_123 (sequence is synthesized)
agcagggttcccaaggaagctttgcacggtcatgggtagagccatcccttcttcatccatagtgaatatggctggaaatagcgggtagtcttggatttgacctccctcccatggaagtgc

SEQ ID NO: 969678 - DNA, 120 bp, Artificial Sequence
  ENSG00000172965_124 (sequence is synthesized)
tgtctccagctcactcctggaaaaactgctttctccccaaagtgtgtctgagcagcagatttaagcatgaagttggttttgtggggctacagtatggactttgggaagatggtgccatct

SEQ ID NO: 969679 - DNA, 120 bp, Artificial Sequence
  ENSG00000172965_125 (sequence is synthesized)
gtatttctgattctaccgtccctctgtctgtctttggaagtatcctttcacttgtttgggagactgagaatgattttctgcaaacagtgagccagaccatgctggtctcaagcggcagag

SEQ ID NO: 969680 - DNA, 120 bp, Artificial Sequence
  ENSG00000172965_126 (sequence is synthesized)
cagttattaacagaatcacagtctttctggagctgctgtcagtcctgtgctgtcctcagggcctttgcttggtcaggggccccacttcttatccacccttccctctacctcaccgaggct

SEQ ID NO: 969681 - DNA, 120 bp, Artificial Sequence
  ENSG00000172965_127 (sequence is synthesized)
tgatgcacctgggaggccatgtctcccggggagtctcaggacctcattgggctggaattccacggggatctctcattgggtctctttgggcctttggagaggggagtgcagggcaccacc

SEQ ID NO: 969682 - DNA, 120 bp, Artificial Sequence
  ENSG00000172965_128 (sequence is synthesized)
tgggcgaacacctgtgccatcctgtaagtccttgtgtgactcttcatccaagtcaacaggggcatgtaggggaagagcctcagggcccatcaggagtcagaccctgaccaggaagtcaga

SEQ ID NO: 969683 - DNA, 120 bp, Artificial Sequence
  ENSG00000172965_129 (sequence is synthesized)
actgaatcaacttttcaataaacacacaggctggccccaaacaaagcagcaggcttttgggaacatctgccttttcagtctcttctgaattctgtttatgtggacaccccatgtcccgca

SEQ ID NO: 969684 - DNA, 120 bp, Artificial Sequence
  ENSG00000172965_130 (sequence is synthesized)
ccaccattgccgccagcaatgtttgttgcttgccaatatttgaatagatgctgataaatttgattctctggcttattgtggcattcatgatatgtctttcccttttcagtttccatgtac

SEQ ID NO: 969685 - DNA, 120 bp, Artificial Sequence
  ENSG00000232611_0 (sequence is synthesized)
tttttcaggttttactgtttgattatgctccaaatcaattttattgcccactaaggtaaccagcggctgagtttctgactcttcactcactttcttcactaatcttctaaaaattctcaa

SEQ ID NO: 969686 - DNA, 120 bp, Artificial Sequence
  ENSG00000232611_1 (sequence is synthesized)
agctttgataacttgtaataccatataccaagatgatttcctgtgctccatagatggatctgtccaacattttgcttcttattgtccggcctcctgtatcccaaactagagagtaacatt

SEQ ID NO: 969687 - DNA, 120 bp, Artificial Sequence
  ENSG00000232611_2 (sequence is synthesized)
caagtttcctggcaatgttatccttctcaaaagaaatccagtcctatagtttgtactggttcctgaaagttttttgagcaaaatctgtagctaaggaggtcttccgggaggtgctgttcc

SEQ ID NO: 969688 - DNA, 120 bp, Artificial Sequence
  ENSG00000232611_3 (sequence is synthesized)
ctagcacgatgattttcagtgctggtcctggctctcttccttagagtcctacatgatgtcccaggaaccatgcctgccccgctcccccgggtggagggaggaggggaaggagaaggtctc

SEQ ID NO: 969689 - DNA, 120 bp, Artificial Sequence
  ENSG00000232611_4 (sequence is synthesized)
caggggtgagggaggaagaagggagggtagtggggacagtacctcacttgtctgctcgatgtcagcagtggctggagaatctctcgccaggtgccatcttgccaatctcttctccctctg

SEQ ID NO: 969690 - DNA, 120 bp, Artificial Sequence
  ENSG00000232611_5 (sequence is synthesized)
ccctctgtgggtcttttgttgagggctgggctgtacatgcatagtatgagattctgtgaggcctagaaaagagcagctgctatggggttgaaagaagaatggagaaggccgggtgcagtg

SEQ ID NO: 969691 - DNA, 120 bp, Artificial Sequence
  ENSG00000232611_6 (sequence is synthesized)
aaaaaaaaaaaaaaaaagaatggagatactagaggttgcacagtgctgagaaatatgaggttctgacctagccagagtggagagaactttttaacatcataggcatgcgccaccacgccc

SEQ ID NO: 969692 - DNA, 120 bp, Artificial Sequence
  ENSG00000232611_7 (sequence is synthesized)
gattacaggcgtgagccaccttgcctggcacctcttccacttttatgattagattgggcccatgtggataaaccagggcaatctcctatttttagtaaactgattagcatctttaatttc

SEQ ID NO: 969693 - DNA, 120 bp, Artificial Sequence
  ENSG00000232611_8 (sequence is synthesized)
aaactgattagcatctttaatttcatctgcaatcttaattcctctttgccatgtatcataagatatatacaggttccaaagattaagatgtagacatctttgggtggccattattctgcc

SEQ ID NO: 969694 - DNA, 120 bp, Artificial Sequence
  ENSG00000232611_9 (sequence is synthesized)
ctctgactgtaatggaaccaaactggaaatcagtaatagaaatacataccaccacgcctggctaattttatttttgtagagatggggtctcgctgctcaggccagtctggagctcctggg

SEQ ID NO: 969695 - DNA, 120 bp, Artificial Sequence
  ENSG00000232611_10 (sequence is synthesized)
cttatgtgatcctcttgccttggcatcccaaagtggtgggattataggcatgaaccactgcacccggcttaatttacgttttatagtgtgcaattcaatgttttgggtttttttttcttt

SEQ ID NO: 969696 - DNA, 120 bp, Artificial Sequence
  ENSG00000232611_11 (sequence is synthesized)
ttaaagcatatttacagagttgtgcaaccgtcaccactatctaacttaagaatattttagccaggcatggtaggtagcacgtgcctgtagtccatgctacttgggaggctgaggcaagag

SEQ ID NO: 969697 - DNA, 120 bp, Artificial Sequence
  ENSG00000232611_12 (sequence is synthesized)
gattgctcgagcccaggaggttaaggctgcagtgagctatgatcacacccactgtacgtcagtctgcttgacagagtgagaccttgtttcaaaaaaaaaaaataaaatttctatcaccct

SEQ ID NO: 969698 - DNA, 120 bp, Artificial Sequence
  ENSG00000232611_13 (sequence is synthesized)
aaaaagaaaccccatacttactcttagtcacttgctattcctttttgtccctgggcccggaaataactacgttctgtttctatgaattttcctattctgtacttgcatataaattgaatc

SEQ ID NO: 969699 - DNA, 120 bp, Artificial Sequence
  ENSG00000232611_14 (sequence is synthesized)
atacaatatttagtctttcatgactggcttcttagaatgtttttgaagttcatgcacattgaggtacacatcagtacttcatctcttggtcaaataatattacattgtatgaatgtatca

SEQ ID NO: 969700 - DNA, 120 bp, Artificial Sequence
  ENSG00000232611_15 (sequence is synthesized)
catttgctttgtccattcatcagttgatagatatttgggagttacactttttgtctatgatgaataatgctgctgtgaacattcctgagcaggttttggtaagaacccctgtgttttcag

SEQ ID NO: 969701 - DNA, 120 bp, Artificial Sequence
  ENSG00000232611_16 (sequence is synthesized)
ttcttcggggtatatacctcagagtagaattgctgggtcctaaggtaactaactcattgtttaccattttgaggaaatacaaaactattttccaaagtggctataccattttacaatttc

SEQ ID NO: 969702 - DNA, 120 bp, Artificial Sequence
  ENSG00000232611_17 (sequence is synthesized)
atgaaagagaaatttataatactaaatgatgcttatattagaaaaaaggaaagatctcaaattaataatctaaattaataatctaagttcctgattcaagcaactagaaaaagaaaagca

SEQ ID NO: 969703 - DNA, 86 bp, Artificial Sequence
  ENSG00000232611_18 (sequence is synthesized)
tgcttgatcccaggagttcaagaccagcccagacaactagtgggaccctatctctactaaaaaaaaagttaaaaaataaaccaaag

SEQ ID NO: 969704 - DNA, 120 bp, Artificial Sequence
  ENSG00000232611_19 (sequence is synthesized)
agacaactagtgggaccctatctctactaaaaaaaaagttaaaaaataaaccaaagaaagcagaagaaacagtgcaagaagagaaatcactgaggccgagcgtggtggctcatgcctgta

SEQ ID NO: 969705 - DNA, 120 bp, Artificial Sequence
  ENSG00000232613_0 (sequence is synthesized)
gtaaagctgatggtgctgttcacatcagaaattgcagcactgaagaacagagttcatgcagacttttacaacatgcatcagctacagcatttgtttgttgatggtaccagctgtcaaaaa

SEQ ID NO: 969706 - DNA, 120 bp, Artificial Sequence
  ENSG00000232613_1 (sequence is synthesized)
ccaagcaagtggcagtgctagaggtgccacaaaagtgcgaaggaagtgtcaggctggatgtcaaaatgaacaccttggagaactggatgatggaacagacggtaaaaatcagctaaacat

SEQ ID NO: 969707 - DNA, 120 bp, Artificial Sequence
  ENSG00000232613_2 (sequence is synthesized)
aagaggtcaaaactgtgaacaggaactagaagaaagtgtagcagaaaaagacttgtcacaaacttcgagagatttggagaaaatgatgtcaaaacacatcttcctcaagcccatgctgag

SEQ ID NO: 969708 - DNA, 120 bp, Artificial Sequence
  ENSG00000232613_3 (sequence is synthesized)
tatctctgatttggttaatttcttgacccagagatgctgggtggcctctggccgctgacctcctgattgccatccctcccccatcaccacaactcaataatcaaaccagcaactgaggag

SEQ ID NO: 969709 - DNA, 120 bp, Artificial Sequence
  ENSG00000232613_4 (sequence is synthesized)
caagcccatgctgagtatctctgatttggttaatttcttgttactttatatggatgttggttgctgttctgtttagttcaaaatacctcggatctgaccaggtgtggtggctcacacctg

SEQ ID NO: 969710 - DNA, 88 bp, Artificial Sequence
  ENSG00000232613_5 (sequence is synthesized)
taccaacatgatgaaaccatctctttgggtgactctaatcccaggtacttgggaggctgaagcaggagaatcccttgaacctgggagg

SEQ ID NO: 969711 - DNA, 90 bp, Artificial Sequence
  ENSG00000232613_6 (sequence is synthesized)
tgacagagtgagacactgtctccctgtcaatatcactggggaaagagtttgtcaaactccaaggcaattttcagtgagaatgacactaag

SEQ ID NO: 969712 - DNA, 120 bp, Artificial Sequence
  ENSG00000232613_7 (sequence is synthesized)
gtcaaactccaaggcaattttcagtgagaatgacactaagtttcagacttcagggcaataggaatgatgtcagacttcaattacattccccatgaagaaccagacagctagagtgtcgct

SEQ ID NO: 969713 - DNA, 120 bp, Artificial Sequence
  ENSG00000232613_8 (sequence is synthesized)
atgtacttttaaaagatgactgaggatggagacaagtgagttggcagacagtggcaacctctggaagacagaatcttctctgctggttcccaggctgctgctccgaaagtcccaaaacac

SEQ ID NO: 969714 - DNA, 120 bp, Artificial Sequence
  ENSG00000236472_0 (sequence is synthesized)
ggccagctccgactcctccagaacccgacgctgtgcagtctcctttttcaggaactcgatctccctgggcacaggcaagggacagatggcagagccccatgccagcgtgtgatgatgaca

SEQ ID NO: 969715 - DNA, 120 bp, Artificial Sequence
  ENSG00000236472_1 (sequence is synthesized)
acctctccacacgcttctccagctcgtactcagcagaggctgccatgggatccacatcctcgttgcgacgatcgtaatcctcgttggaggggcccaggagactgaggaggggacagcctc

SEQ ID NO: 969716 - DNA, 120 bp, Artificial Sequence
  ENSG00000236472_2 (sequence is synthesized)
tgacactgcccacagcgaacccaggcgccatggggctccgaggccacccctgccttggcatctcctgtacccctctgttgtctctctccaatgtctctcagcaaaaagaggaattcctca

SEQ ID NO: 969717 - DNA, 120 bp, Artificial Sequence
  ENSG00000221949_0 (sequence is synthesized)
gccagggccatggtgtcggggaggcacgggaccacgcggagggcagcaaagcggctccggcgctcctccgtccttcctcgccgccgacgtcggcccgccgccccttcttttcctttgcct

SEQ ID NO: 969718 - DNA, 120 bp, Artificial Sequence
  ENSG00000221949_1 (sequence is synthesized)
ctttgccttccccccgcgccgcgcccggagaccccgcccagcacccagcggctcggctactcccggcgcgccccgagagctacggggatgagaggcggcgccggcgcccgggtgatacag

SEQ ID NO: 969719 - DNA, 120 bp, Artificial Sequence
  ENSG00000221949_2 (sequence is synthesized)
ctgtacgtcagccaccgctctgaagagagaaaagcggcggtgtcctgcggagagagccgctccctccactgcccgaggggagcgcgtcgcctcagccgctcgaaagcaggaaatgggcgg

SEQ ID NO: 969720 - DNA, 120 bp, Artificial Sequence
  ENSG00000221949_3 (sequence is synthesized)
caaaagcgcagtcagacaccaactggttctggactgcccccgagaggcagcgagcagcgctcccgcgcttcgcccgctaggagctgccgccacgtcccgagctgcgccgctcgcgcccct

SEQ ID NO: 969721 - DNA, 80 bp, Artificial Sequence
  ENSG00000221949_4 (sequence is synthesized)
ccctgctccgagtccccggtgggggctgggctgcggccgagtccggtacccgggcccccacccgcgccgcgctgtcgaac

SEQ ID NO: 969722 - DNA, 120 bp, Artificial Sequence
  ENSG00000221949_5 (sequence is synthesized)
gcatcccgcagaggctgccgccggctccgccaaacagcagccaaggcatagccgggaagtccccaggccacccgttccccagcacccttcggggaattcccgttcagctctacaggaggc

SEQ ID NO: 969723 - DNA, 120 bp, Artificial Sequence
  ENSG00000221949_6 (sequence is synthesized)
gaaaacggaacaaacgaaaaccccttaacagtgaaaccgggcccggcgatggcccgggtggcgactgcgacgactcgacgcgtgcggacacaagacccgtctcgcgctccgctgctcctg

SEQ ID NO: 969724 - DNA, 120 bp, Artificial Sequence
  ENSG00000221949_7 (sequence is synthesized)
tgcgtccggacgaaccttagagatcacttaaggaggctcgcgcgctactcctcaccacgtgaccgccccgccaggccgccccccgcgccgccatcttacatccgggacagaggcggcgtc

SEQ ID NO: 969725 - DNA, 120 bp, Artificial Sequence
  ENSG00000221949_8 (sequence is synthesized)
gcgtcagcgtgctaccagaaatcagccctgaaagaggggaccccgattccacgtcaccagagtgctgaggcagcgggcgatgccctccatcggctcagcgggggggagtggagtcccaaa

SEQ ID NO: 969726 - DNA, 120 bp, Artificial Sequence
  ENSG00000221949_9 (sequence is synthesized)
cttttttcggcctttgcccgcaaagaagatggcggcgcatatcgccgcctaagcggacacgttgtaccctggccgtggtttgaagtttccggcacctcctttcccaaccagcaaggacac

SEQ ID NO: 969727 - DNA, 120 bp, Artificial Sequence
  ENSG00000221949_10 (sequence is synthesized)
aaccatacgagccccacccacgcggggtggctgccgtgctacattccgcagaaaacaggcgggaaagctgcggcacagcccgctttaaacgcaagcttttgggacttctggttttggctt

SEQ ID NO: 969728 - DNA, 120 bp, Artificial Sequence
  ENSG00000221949_11 (sequence is synthesized)
tttctttttaagccaagttagggagaaggctgactgccatggagccacttctgcttttggcccagacaacttacgggattttttttttcctcccatttagagattttttgtaggaagtta

SEQ ID NO: 969729 - DNA, 120 bp, Artificial Sequence
  ENSG00000221949_12 (sequence is synthesized)
acaaattattttaaagaagtagttagggcttgtcagataaaatacaggacgcccagttaaattggaatttcagataaccagtgttttggcatatgtgtgttacatatatttttaaaattg

SEQ ID NO: 969730 - DNA, 120 bp, Artificial Sequence
  ENSG00000221949_13 (sequence is synthesized)
tttatctgatattccaatttaactgcacattctcaatttttaatgactgtatctggcaaccctatcagcctttacccctgaaaatccagactgcttatgacaaaagtaaggaatggaggg

SEQ ID NO: 969731 - DNA, 120 bp, Artificial Sequence
  ENSG00000221949_14 (sequence is synthesized)
aaatgaaaagcatgtttacctacaacttagaattgtctttgcccagactttgatccttcatggaggccagagggccgtggtctagaacaaaatttggcagcaactcataaagatatcctt

SEQ ID NO: 969732 - DNA, 120 bp, Artificial Sequence
  ENSG00000221949_15 (sequence is synthesized)
gtataattccctttctggcaaagtaagattttttttttcttaagctatcacgatgtaattttggacaacagatcctcttggccaagagtttaattgcaaattaaaaattaaataactggc

SEQ ID NO: 969733 - DNA, 120 bp, Artificial Sequence
  ENSG00000232618_0 (sequence is synthesized)
gggaggaagagggagagactcagccaacgacgtcatcggatcccccagcgcgtcccagggagggaggctgaaccagaaaaaccagtctggagccaagtattgtcagaaaatcatttcgaa

SEQ ID NO: 969734 - DNA, 120 bp, Artificial Sequence
  ENSG00000232618_1 (sequence is synthesized)
ctgaaattttcattcaaaaatatttattgaatgccggctatgtgctgaagattcttaagatacatcagtgaacaaatcaaagttccctgctttcttggagcttgcattccagcgggagga

SEQ ID NO: 969735 - DNA, 120 bp, Artificial Sequence
  ENSG00000232618_2 (sequence is synthesized)
gaggatttggaggaagaatgggatagacaataaatcacaagacctcctgccacagagcatgggacctgatatatccaggcaggagaactgggtaccaggagacactgtacatgaagtttc

SEQ ID NO: 969736 - DNA, 120 bp, Artificial Sequence
  ENSG00000232618_3 (sequence is synthesized)
cagaaccagccatgtccatcttactaatcaagactctctctgttaaatctgcaactcaaatgactttaaggaaaaatggatttcattgattcacataaccatcactcaaggactaacttt

SEQ ID NO: 969737 - DNA, 120 bp, Artificial Sequence
  ENSG00000232618_4 (sequence is synthesized)
caacatagtgagatcctgaggctcaaatattattacccgggttccatgaactgcttcctctgacatgagatctaacaaggctaaagactaaaatgcagctgtttacagcgtaagtaggag

SEQ ID NO: 969738 - DNA, 120 bp, Artificial Sequence
  ENSG00000232618_5 (sequence is synthesized)
gccgtcccgtgcagtgcaaaatcaacagagaggagacagtcctatgccttcgagagacagtctgctgatactgtcatgatgtctagtgacaggccagagatcaaaacccaacaccctcat

SEQ ID NO: 969739 - DNA, 120 bp, Artificial Sequence
  ENSG00000232618_6 (sequence is synthesized)
ttacctgacagtgatttggccaatcccttaacatctctaagagcttcatttttctacaaaattgagacaatagtatttgtttcatagtgttactgtcagggttaaatgttatacattaag

SEQ ID NO: 969740 - DNA, 120 bp, Artificial Sequence
  ENSG00000232618_7 (sequence is synthesized)
catttaatatatgctgcttgtttatctaaatattcatggtcaggcactaacttcttatgtgactctgagcaatgcattcatctctgtacctgtttcctcatccataaattgggagttgaa

SEQ ID NO: 969741 - DNA, 120 bp, Artificial Sequence
  ENSG00000232618_8 (sequence is synthesized)
gagccctaagtttcgttccaacttcaatattctataattcttgcaacttatatggcctcagttttcttatctttataatgggcataagagtacctacctcacagaatttttgagaggata

SEQ ID NO: 969742 - DNA, 120 bp, Artificial Sequence
  ENSG00000232618_9 (sequence is synthesized)
aaatgaattaagacaggtagaaaattcttagaacagtgcctgccacattggaagtgcttaatatgtattagctgtgatgatgctgctaatgatgaagatgataatgaccctatttgcaga

SEQ ID NO: 969743 - DNA, 120 bp, Artificial Sequence
  ENSG00000232618_10 (sequence is synthesized)
tagtatggcagccataaaacattcagtatcagattgattacattctcttattttctgagtcaatgccagagctaccaagattttattctttaaaggttcttcaagactaaattcttttta

SEQ ID NO: 969744 - DNA, 68 bp, Artificial Sequence
  ENSG00000232618_11 (sequence is synthesized)
aaggttcttcaagactaaattctttttacatgatatgattattacacattgtatgtccgtatcgcagg

SEQ ID NO: 969745 - DNA, 120 bp, Artificial Sequence
  ENSG00000232618_12 (sequence is synthesized)
aaataaataaataaataaatctcatgtactccatagatatggggtacctactatgtactcacaaaaattaatttttttttagaaaagcctaagctcatttgcttcttagtaagaattatg

SEQ ID NO: 969746 - DNA, 120 bp, Artificial Sequence
  ENSG00000232618_13 (sequence is synthesized)
cttagtaagaattatgttaagatttcccagtgtagataccctaggctgctaattttttttcttttgttatcagtatcttaagaaattaattggcccgggagtggtggctcatgcctgtaa

SEQ ID NO: 969747 - DNA, 87 bp, Artificial Sequence
  ENSG00000232618_14 (sequence is synthesized)
ttgtttgaggccaatactatctgtatataaaataaaaaaattagtgaggcatggtgtcataagcctgtggtcccagctacttgggag

SEQ ID NO: 969748 - DNA, 120 bp, Artificial Sequence
  ENSG00000232618_15 (sequence is synthesized)
ccacctcagcctcccgagtggagggggagccactgcagatctggagcaaatcagcaccagccactccagagcctgacctacataggactcagaaagcattgtctattgtgattgattatt

SEQ ID NO: 969749 - DNA, 120 bp, Artificial Sequence
  ENSG00000232618_16 (sequence is synthesized)
cctgtgttcagtcccaatggcctattgattgggggtttctctccaaaaggctgcatggcttttcttctctaagtgaatctcctttataacccatattttatgtctatataccaaacatgc

SEQ ID NO: 969750 - DNA, 120 bp, Artificial Sequence
  ENSG00000232618_17 (sequence is synthesized)
tatccatatttagtcaatgtccagttgcttgcatgtaagggcaatagagtaatcagaaaactcttcccagaaagcccccgaagacaaaactagtactggtagaaaactgggcatgcagct

SEQ ID NO: 969751 - DNA, 120 bp, Artificial Sequence
  ENSG00000232618_18 (sequence is synthesized)
ctaagaaactctatgggaagtgaggctgggtggggcacagctgccccagcctggcacccatatggagcatcagcaaggaagtaggaactttcttttcatcatgcatccttcttatcactt

SEQ ID NO: 969752 - DNA, 120 bp, Artificial Sequence
  ENSG00000232618_19 (sequence is synthesized)
ctcagtttcaaagggaaagaaaatttggtaatctgcattttgagacattaagaaaataaaataattaatggcttcatggttatatggcatttttcagagtattgtcagaaaatcatttcg

SEQ ID NO: 969753 - DNA, 120 bp, Artificial Sequence
  ENSG00000232618_20 (sequence is synthesized)
gagggttgtcctgatgctgtattaaataggaacatcagagtaagacttgttgaaaagggagatttctgccatggtttgaaggaaatacctggagatatctggaggacagagcttttcaca

SEQ ID NO: 969754 - DNA, 120 bp, Artificial Sequence
  ENSG00000232618_21 (sequence is synthesized)
tggagggaacagccaagatacagctccaatacctggaatttttatagacatcaatgggaatggtgtggctagaataaaatgagacagccagtgaacagaaggcctctcaggtcaccgtaa

SEQ ID NO: 969755 - DNA, 120 bp, Artificial Sequence
  ENSG00000232618_22 (sequence is synthesized)
gaattccagaaaagcttcataaaaggcaaattttgggcctttatcactcagccccatggaatctgaatctttgtgggcccaggactctgcatttttaacatgtaaagcaattgttactta

SEQ ID NO: 969756 - DNA, 120 bp, Artificial Sequence
  ENSG00000224879_0 (sequence is synthesized)
aatgctcttcaccagggaggacacgaaggatccctcagccccactgagcacagacaccaggtttccagagggccgcttctggcaggccagctttgagggcaacaaagagaatgagaggga

SEQ ID NO: 969757 - DNA, 120 bp, Artificial Sequence
  ENSG00000224879_1 (sequence is synthesized)
gcctgagacctgctgagggagggcagggcaaagagaaaagtgttcgctcatcctgctgagattcaaggagagtcacccctggctagaagctacaatcatccaagtgggaagtaatgtcta

SEQ ID NO: 969758 - DNA, 120 bp, Artificial Sequence
  ENSG00000224879_2 (sequence is synthesized)
atttaagtgaatgaaggtcttctttccacctcgggaaatcttgagggttatgtaacagcagctttgaaaggcttgtgagatgtactttgtgctagtccatctcaaatcttcaccggctgt

SEQ ID NO: 969759 - DNA, 120 bp, Artificial Sequence
  ENSG00000224879_3 (sequence is synthesized)
accaagaacagaaaaaaaaaggaatttggtgagtactttataaagctaaatttactcaattaatttcacctctgattatgtttttcatgtatcttgggacattagaatgtcctgtattta

SEQ ID NO: 969760 - DNA, 89 bp, Artificial Sequence
  ENSG00000270760_0 (sequence is synthesized)
tcccgactatcagccttcttgctggtagatccagtggctatttcctggcccctcttatgtgacttgtggcatcaaccttgtctgtccac

SEQ ID NO: 969761 - DNA, 120 bp, Artificial Sequence
  ENSG00000270760_1 (sequence is synthesized)
gcatcaaccttgtctgtccactcccttcacctccctgctatctcacatacctgcttcttttcctctgttacttttcatgcattgtgggctctctggaggccaagggatctttttttcttt

SEQ ID NO: 969762 - DNA, 120 bp, Artificial Sequence
  ENSG00000270761_0 (sequence is synthesized)
ctccccccggaggctcggaacagcttgggcgggcgtttggtctggtttgtcgcctcagatggatcaaaaggtttctgctgataggcaaagttgccccactttccgcggcggcgacgcgga

SEQ ID NO: 969763 - DNA, 120 bp, Artificial Sequence
  ENSG00000270761_1 (sequence is synthesized)
gaggcccagatgctgccaggcccctcagtttaccttgcgaagttacttacggatcagcagcatttggtcttcgtcgggtgagggagaaacctaggcatcaaataaattctgtttcacaga

SEQ ID NO: 969764 - DNA, 90 bp, Artificial Sequence
  ENSG00000283913_0 (sequence is synthesized)
atttatttattatagagacaggatctccgtatgttgtccaggctggtctttaactcctgacctcaagtgatcctccccaatcatccctct

SEQ ID NO: 969765 - DNA, 120 bp, Artificial Sequence
  ENSG00000283913_1 (sequence is synthesized)
ctgtgccttggttttcatatttggaaaatgacgaggaggatttaactagattatctctaaggttgaatggggaaagaacattcctggaatcaccaggcaagaagaggattggaggaatgc

SEQ ID NO: 969766 - DNA, 120 bp, Artificial Sequence
  ENSG00000283913_2 (sequence is synthesized)
cccctggcacctggacttccctggggacccatggctccagcagaccctggggtaaaagaagaactggagatggggtctcactctgttgcccacgctggtctcaaactcctggtctcaagc

SEQ ID NO: 969767 - DNA, 120 bp, Artificial Sequence
  ENSG00000283913_3 (sequence is synthesized)
cctaccgaagttctgagattacaagtgtaagccatcatacccagcaccaatctgtatcttttaagtggaacatttactccatttattatcaaggttaatattgatatgtgatgttttgtt

SEQ ID NO: 969768 - DNA, 120 bp, Artificial Sequence
  ENSG00000283913_4 (sequence is synthesized)
cctgtcatgataattgttacccagttgctttttagtctcaattatgtaattgctttatataatctgtgagtttttcactttaatgtgcttttatgatgaggagtattgtccattcatttc

SEQ ID NO: 969769 - DNA, 120 bp, Artificial Sequence
  ENSG00000283913_5 (sequence is synthesized)
gacgagtctttcttccagctctaccctgaaagtcctccaggcaccggtcttttttttctgccttttgtttccctcccggcgagtcggcgcgacagtgaatttccgtttcccgcggtgtcc

SEQ ID NO: 969770 - DNA, 120 bp, Artificial Sequence
  ENSG00000283913_6 (sequence is synthesized)
aagcggacctgaggagttgcagctgtgagcaggttagagttacttgttattggtaaatagccactatggagactaaggaccagaagaaacaaagaaagaaaaacagtggacccaaagatg

SEQ ID NO: 969771 - DNA, 120 bp, Artificial Sequence
  ENSG00000283913_7 (sequence is synthesized)
aaaagaaaaagaagcggcatctgcaggatctccagctaggagacgaagaagatgcccagaagagaaatcccaaagcttttgcagttcagtctgctgtgtggatggctcgatcctttcaca

SEQ ID NO: 969772 - DNA, 120 bp, Artificial Sequence
  ENSG00000283913_8 (sequence is synthesized)
ggactcaggatttgaagacaaaaaagcatcgtattccagtggttgatcgaactccactagagcccccaccaatagtggtagtggtgacggggcctccaaagttggaaagagcactttgat

SEQ ID NO: 969773 - DNA, 120 bp, Artificial Sequence
  ENSG00000283913_9 (sequence is synthesized)
ataatgcctcattcagaacttcattggcagaagttgactgagatcagaggccctgtgatgatcgtgtcaggtcaagggctcagaggtttgcagggccctcctgggaagatggggccccca

SEQ ID NO: 969774 - DNA, 120 bp, Artificial Sequence
  ENSG00000283913_10 (sequence is synthesized)
ggaaacacagggacttctggaattccaggacctaggggccaaaaaggagatcgtggggacaattcagttgctgaggctaagctggccaacttagagagaaagctatagagcctgagatca

SEQ ID NO: 969775 - DNA, 120 bp, Artificial Sequence
  ENSG00000283913_11 (sequence is synthesized)
tcatttatgcagcttagtttagcaggatacaaaattcttggctggcaggatttttgtttaagtagattaaacataagaccccaatctcttctggcttgtaaggtttctgctaagaagtcc

SEQ ID NO: 969776 - DNA, 120 bp, Artificial Sequence
  ENSG00000283913_12 (sequence is synthesized)
attgttagtctgttgggttttcctgtatagattagacatttctctcttgctgcttttaggatgttttccttcacattgactttggatagtctgatgacgatatgcctttatgaggtttct

SEQ ID NO: 969777 - DNA, 120 bp, Artificial Sequence
  ENSG00000283913_13 (sequence is synthesized)
cttgtaaagcatcttccaggtgttctctgagcatctcctatctggatgtctaattctctagcaagaccagggaagttttcctgaattattccctcaaataggttttccaagcttttaatt

SEQ ID NO: 969778 - DNA, 120 bp, Artificial Sequence
  ENSG00000283913_14 (sequence is synthesized)
ttttttcttctccctcaggaatgtctatatattgtatatttggtaactttatgtaattctatatttttcaaagtctttgttcatttttaaaaatttattttttctgtatttctgtctgac

SEQ ID NO: 969779 - DNA, 120 bp, Artificial Sequence
  ENSG00000283913_15 (sequence is synthesized)
taggttaattcaaatgactggccttcaggctctgaaattatttcttctgcttggtctagtcttttgctaaaagtttcaactatattttatagttccttcaataaatttttatttctagaa

SEQ ID NO: 969780 - DNA, 120 bp, Artificial Sequence
  ENSG00000224870_0 (sequence is synthesized)
ggggactccgcggtgccggccgacccggaagcatgtctgtccctagcggaggcgcgggtgccgtgctgagagcgcctgcctgtgcgccccgagcggggctgggactcttccaagatgccc

SEQ ID NO: 969781 - DNA, 120 bp, Artificial Sequence
  ENSG00000224870_1 (sequence is synthesized)
acgttcgcacagagaccccggatcgcggaagctcgcgtctcgaaaggcctgcggtctcacgccctgcccgtcctgggttcacggtttttcatcacctgcggctgtcctgcgatcgaccac

SEQ ID NO: 969782 - DNA, 120 bp, Artificial Sequence
  ENSG00000224870_2 (sequence is synthesized)
agctgtgcaggaggggcaggaggtatctgttgctgcagttaccggaacctttgccaggactagtacaggaccacgggctggtagctcagggatgtctcgtctgtgagttacagctgcacg

SEQ ID NO: 969783 - DNA, 120 bp, Artificial Sequence
  ENSG00000224870_3 (sequence is synthesized)
ctctccaggaaagaaggaatttcctcttctctggaaaccccaccacacagctggtttctcattggtgctgcttgcccattccctgagctgtgactgccagaggagtgggaggttggtggt

SEQ ID NO: 969784 - DNA, 120 bp, Artificial Sequence
  ENSG00000224870_4 (sequence is synthesized)
gcctccagcccatcaggggcaggccctgggaccgcctgggaacaggaggactatggcacaaaccgagtgagtgatgggagcaacccgcagggctctgccacatccctgtcttccttcact

SEQ ID NO: 969785 - DNA, 120 bp, Artificial Sequence
  ENSG00000224870_5 (sequence is synthesized)
gacatgaaacgcagaaaaggcagctttgccacaacacaggagcacgcaccgaatgtggccgcccagggctctgtccttgaccctgttgtccaggactgtttaccaagggctgacaggcac

SEQ ID NO: 969786 - DNA, 120 bp, Artificial Sequence
  ENSG00000224870_6 (sequence is synthesized)
tgagtgccccgtgcacctggccagacactgcactcatgcagcggaaaggacagtgaacgagactttgtccctggcctccaaaggcttagggcgtagtggctgtcatgaggcacagtgaca

SEQ ID NO: 969787 - DNA, 120 bp, Artificial Sequence
  ENSG00000224870_7 (sequence is synthesized)
tgaggatggagtggtcggcctgaagccatctctagcaagtggtcaggacgctgattgttctgcgcaggttggaggtaggtggtgagtctgagaaaggggccggaaagactccccagcaac

SEQ ID NO: 969788 - DNA, 120 bp, Artificial Sequence
  ENSG00000224870_8 (sequence is synthesized)
tgctggcaaagggtgaagggcacgttcccacaggattcaagccagctgcctttggaggggagacgggcactcagtttaggcgctcctacagcagggtcagcaagacaagcaggttgcggc

SEQ ID NO: 969789 - DNA, 120 bp, Artificial Sequence
  ENSG00000224870_9 (sequence is synthesized)
aagggtctgcgcactgctgtgtaaatgtaggggcatcggggggcagaaagaccaggggagaagtgtgcatcacccttggggttaagggacagttgtctgctaggtgttgcttcctggaga

SEQ ID NO: 969790 - DNA, 120 bp, Artificial Sequence
  ENSG00000224870_10 (sequence is synthesized)
tggctgaaaagccagtccagtctgcagggaccaggccaccacccacctgatgtgggagcatttcccccaatccctgctgggctgctgaatctgggggacatagggaagctgaggctggtg

SEQ ID NO: 969791 - DNA, 120 bp, Artificial Sequence
  ENSG00000224870_11 (sequence is synthesized)
ttctgagtagtggcagagctgagccacagggcatgtctgaggtcagccccgagcaaaatggaatagggactcagggtgggtcaggtaactggaaagcgggcactgtgcacgcagcccttg

SEQ ID NO: 969792 - DNA, 120 bp, Artificial Sequence
  ENSG00000224870_12 (sequence is synthesized)
aggggagccagggtgggtggggatcccccactgtgtgcagaaggcagcagccttggaagcagggtgtgctcctcggtgtggtcgctcgataccagaaaatgactctaaaaactgaagagt

SEQ ID NO: 969793 - DNA, 120 bp, Artificial Sequence
  ENSG00000224870_13 (sequence is synthesized)
gtttgagtttcattcacacaaaacatggacatcatctgtgaggctctgtcccagagagacagggccatccctcatgtctgttattgggttgtagataaacaaaagtataaatcaaacaaa

SEQ ID NO: 969794 - DNA, 120 bp, Artificial Sequence
  ENSG00000224870_14 (sequence is synthesized)
tgaggatggtggggaagcctgcgtggggcagggaacggtgaggcaggaagagggaagggcagcagaggcctgagtggttgcaggttcacacactgagctgccagtaactgcccagctcag

SEQ ID NO: 969795 - DNA, 120 bp, Artificial Sequence
  ENSG00000224870_15 (sequence is synthesized)
acgggctcaaattcagaagccaccattgctcctcacccccacccccaggtcagctgtccactagctctgccatgacttgatactgcagctcaaacagtgccaaccaaaacccactctcct

SEQ ID NO: 969796 - DNA, 120 bp, Artificial Sequence
  ENSG00000224870_16 (sequence is synthesized)
atgcccggtgtcccccggccgccgtcggcgtcgtgtcttcagtccttatcgactccagactttggggatgcgtattaacgccagactcctgcaaagtcttgccttcaacactcagcccct

SEQ ID NO: 969797 - DNA, 120 bp, Artificial Sequence
  ENSG00000224870_17 (sequence is synthesized)
ggggagagacgggtggagggatgactggaaacgtggcctcgacgtccctacagagcccctccagcgtggggaggcctaagtacctcaaggttcaggcccacggaaggagtcgggggagcg

SEQ ID NO: 969798 - DNA, 120 bp, Artificial Sequence
  ENSG00000224870_18 (sequence is synthesized)
aggcccggtgatctacgtgtgaaggagcttggacaggacctcacaaacgccagggagacggcgagggggttcgtgcgtttgtaacgtcttgacatcgctgatcctcccgcaggcggtctc

SEQ ID NO: 969799 - DNA, 120 bp, Artificial Sequence
  ENSG00000224870_19 (sequence is synthesized)
cgcgggtgccgtgctgagagcgcctgcctgtgcgccccgagcggggctgggactcttccaagatgcccacgttcgcacagagaccccggatcgcggaagctcgcgtctcgaaaggcctcc

SEQ ID NO: 969800 - DNA, 120 bp, Artificial Sequence
  ENSG00000224870_20 (sequence is synthesized)
agagaccccggatcgcggaagctcgcgtctcgaaaggcctgtgggtcaaggggggccatctcggtgggatctggggcgggacgacccccactgctgaaccctgggcgcggggcagggtca

SEQ ID NO: 969801 - DNA, 120 bp, Artificial Sequence
  ENSG00000224876_0 (sequence is synthesized)
aatgaatgtttgttgagtgaccaaacgactgaattgatgagtggagatggttgatctctgaatctcctctgaattatgagtttcttgagggcagggtatgagtctaattaatcctcatgt

SEQ ID NO: 969802 - DNA, 120 bp, Artificial Sequence
  ENSG00000224876_1 (sequence is synthesized)
tgcctcccatgtttgccacatgggaagctgatggagtcagtgacatggagcatgagaatcccaagatggttcctgggacacgtgtgcaatgaatgcaggagccacctctatcaagtactt

SEQ ID NO: 969803 - DNA, 120 bp, Artificial Sequence
  ENSG00000224876_2 (sequence is synthesized)
tcacgaatgaaatgcaactccagaaggcaggcaggaatgatagagaggctgagatggcagtgagggtgtgatggtcctggagtgagcttgcgcgtggctgttcagatggtgggctttgct

SEQ ID NO: 969804 - DNA, 120 bp, Artificial Sequence
  ENSG00000224875_0 (sequence is synthesized)
cttcctttcctgcattaagcaaatgatgctccgatgcttctaggtctctccaccactgcaaaatgctcagagaagtggagggattgaaaaggaagttgcctactactctgaaggatactg

SEQ ID NO: 969805 - DNA, 120 bp, Artificial Sequence
  ENSG00000224875_1 (sequence is synthesized)
gaaagtcgccttcaaatctaaagtgaagacttgggggcgggggatgcccccttcctgaagagggaatgagggtccctcccctaaaaaggagcctctgttcgggtgaaggcgatccccacc

SEQ ID NO: 969806 - DNA, 120 bp, Artificial Sequence
  ENSG00000224875_2 (sequence is synthesized)
tgtcccaactctgaagggggaagacgcaggactccccagccgtactcaccgagactgccggcgaaaccgtccatcttgcggggaaagcgccgggctccgggcttagaggggcgggcactt

SEQ ID NO: 969807 - DNA, 120 bp, Artificial Sequence
  ENSG00000224875_3 (sequence is synthesized)
cattcagcggaccgacagagtggccgacgctgagcctgacccgctcgttctctaggtcgcccggctcggctaccggctcccgcctccgtcgtccgtccgttcgccctggggtagtaagcc

SEQ ID NO: 969808 - DNA, 120 bp, Artificial Sequence
  ENSG00000224875_4 (sequence is synthesized)
agcgattctcctgcctcagtgtcccaaatagctgggactacaggctgtctgctgccctgcattgtgagtttgctcagtgggccagcgtggcacagaagcacagttgagagaccagacccg

SEQ ID NO: 969809 - DNA, 120 bp, Artificial Sequence
  ENSG00000224875_5 (sequence is synthesized)
cagttgagagaccagacccggggcctctggaggaacgtgctggtatcatcgctgaagagctttctcaatgctggctggctgttgtcaggagcagtccttagacaggctcgcttctggtag

SEQ ID NO: 969810 - DNA, 120 bp, Artificial Sequence
  ENSG00000224875_6 (sequence is synthesized)
ttcaaagaatcagtgccctctctagccttgggagtcctaatgagctataatcacagagacgccagactagtcaaaattggaagaaagagctataatcacaggaaaagaactctctccaca

SEQ ID NO: 969811 - DNA, 120 bp, Artificial Sequence
  ENSG00000269037_0 (sequence is synthesized)
ggagttcccactccactccaaggatccaacagcgcacaagctgctcttcacgggcaactacctctgcaagcttcacccccggccccgccacgccccgcagggttccctgtctggtctgga

SEQ ID NO: 969812 - DNA, 120 bp, Artificial Sequence
  ENSG00000269037_1 (sequence is synthesized)
tcacctcgctctccctgcgcctctctccttggcctagctagacaagtgcttctcacgatccagcgcgtttaccgctcggtttcgtcgccgctaaggggtggtggtgtctgatccgtcagg

SEQ ID NO: 969813 - DNA, 120 bp, Artificial Sequence
  ENSG00000269037_2 (sequence is synthesized)
ctctgcgcttctctctcggatccatcctcaatgtccaggcaggactctcacatgaagccggtgctgtctgctgttcactctaagatgtccagccactcaggacagttacgatctgtcatc

SEQ ID NO: 969814 - DNA, 120 bp, Artificial Sequence
  ENSG00000269037_3 (sequence is synthesized)
cagggcccaaaccgactctcctctattgctatctgaggtaggcagtctcctctgtgaggtcggtcccatccatactgcctagatccctgcgcaggaagactgagatgaggaccctaggag

SEQ ID NO: 969815 - DNA, 120 bp, Artificial Sequence
  ENSG00000269037_4 (sequence is synthesized)
acagcagccagggatagcgaaggtggaggatgagtataaatagcgaccccagcgcgatcagagaagctcccttacccccacccatcgcagtgggagtgagtcttcagatctacccccaag

SEQ ID NO: 969816 - DNA, 120 bp, Artificial Sequence
  ENSG00000269037_5 (sequence is synthesized)
acaacgaaatcctacccgggccattgaagggaaacctccactccaacccccagaagacgccttagatgagaaagtgaagagatattgtatgagctcattcatcaaaggccatgccatcac

SEQ ID NO: 969817 - DNA, 120 bp, Artificial Sequence
  ENSG00000269037_6 (sequence is synthesized)
actctcaacccacgtctgccagttgtagactctgtaaacaaagttccaactcgcccgctgctgccactgccgctgctattttttgaggtcaagactcttccacctgtatgcccatcttca

SEQ ID NO: 969818 - DNA, 120 bp, Artificial Sequence
  ENSG00000269037_7 (sequence is synthesized)
tagaccggcccatcactggtgcctcaagcattttcactatcacagccagtaatctgcagactcaacctcaagcctactttgtactttggtataaactgcatggataccaatcccttttca

SEQ ID NO: 969819 - DNA, 120 bp, Artificial Sequence
  ENSG00000269037_8 (sequence is synthesized)
caggttttcatctcctggtctcccataggatccaggatgagtatcctcccatttgaccagttccatcccagtatggagcagatatcccttgtaaagaacacagtctccaccagcccacct

SEQ ID NO: 969820 - DNA, 120 bp, Artificial Sequence
  ENSG00000269037_9 (sequence is synthesized)
gcttttatggtcaacagccctacctgaatttccaacattgccttttgacccaagaaacacctatcacctgaaatctagggttccagacaggcatcaacaggaaaccactctcttcaatgc

SEQ ID NO: 969821 - DNA, 120 bp, Artificial Sequence
  ENSG00000269037_10 (sequence is synthesized)
cctgtcttttctggcccacctaccactgcttctgcagtcacctccactatagtaagcagaccctcttcagacttggcatccaagcctgccttttactctgatgaaatcaacatggatacc

SEQ ID NO: 969822 - DNA, 120 bp, Artificial Sequence
  ENSG00000269037_11 (sequence is synthesized)
atgcccatttccccatctgttatcttcctgtctctccctgcaatgttaacagctgtttccctttgaagaacctggcagcccccagaaatccttcctacttaacctctactgcagccctgg

SEQ ID NO: 969823 - DNA, 120 bp, Artificial Sequence
  ENSG00000269037_12 (sequence is synthesized)
aacccaatgacagcaccactcaggcagcttttgggaatttgactcccccatgtccacctttggcatctgctatggtttgaatgtgtcaaccaaatttcgtgtattaaaaactcaatcccc

SEQ ID NO: 969824 - DNA, 120 bp, Artificial Sequence
  ENSG00000260447_0 (sequence is synthesized)
gcaaagctgatggaagcccccacagctgagcagcaagaggcggtgccgccagcccacccggagtgagccccgcatgctggcacgactgggggacactcacagctctgccagcgccgagag

SEQ ID NO: 969825 - DNA, 120 bp, Artificial Sequence
  ENSG00000260447_1 (sequence is synthesized)
gttcgccaggagcccaacgtccagcgcccggagcaggttgtgggagacgtctctgaggaggtggtcccactgtgggaccacaaccaggtatgactgtgtgagaagcaggctcactaccag

SEQ ID NO: 969826 - DNA, 120 bp, Artificial Sequence
  ENSG00000260447_2 (sequence is synthesized)
gccacctcgaggcataaacccagagaaacaagacctccaagacggccaggcactggggcacacgccggtaacacagcaccgtgggagctgagacggaaggatcgcctgggcccaggattt

SEQ ID NO: 969827 - DNA, 120 bp, Artificial Sequence
  ENSG00000260447_3 (sequence is synthesized)
tgaaaccaccctgggcaacacagtgagaccccgtatctacaaaaaatacacattagccaggcatggcggcatgcgcctggggtcccaagtactcgggaggtagaggagagaaaaatcact

SEQ ID NO: 969828 - DNA, 120 bp, Artificial Sequence
  ENSG00000260447_4 (sequence is synthesized)
tgagcccagagaggtcaaggctacagggagctgagatcgcatcactgtactccagcctgggtgaaacggcgagactctacctcaaaaataaataaatacatacataattaataaataaaa

SEQ ID NO: 969829 - DNA, 120 bp, Artificial Sequence
  ENSG00000269038_0 (sequence is synthesized)
tttctccgggattaagcgagagtcgcggcggaaaaggcccagccggaacgagatttacggcgggggagtcctggagcaggaagtgcgcatgcgtagatggagcaaaaccgcctctccacc

SEQ ID NO: 969830 - DNA, 120 bp, Artificial Sequence
  ENSG00000269038_1 (sequence is synthesized)
gagcaggggaggggctggcgcgcgccggaaaaccggctcagttgacgctgcaggtaaaaagacttcctgtttttttggaaaaaaaaaaaaaaaaaaaaagtgacccaaaaagctacgaat

SEQ ID NO: 969831 - DNA, 120 bp, Artificial Sequence
  ENSG00000269038_2 (sequence is synthesized)
agagacgacttatcgaaggatttaaaacagtatttgaactgatgcaacaacatattagatgaaaggtaacagaaggttgtcagttcaaaaattacaaatacacacttctattggaatctc

SEQ ID NO: 969832 - DNA, 120 bp, Artificial Sequence
  ENSG00000223478_0 (sequence is synthesized)
gtagctccctgggcgcttcgaagatccagcggcttgctgtgagtccgggaggcaaaattgtacccatttcaaagatgtgatgactaaagtctcgagagggccaaggctcgcccaaggttg

SEQ ID NO: 969833 - DNA, 120 bp, Artificial Sequence
  ENSG00000223478_1 (sequence is synthesized)
ctctgtggtgacagctttacctccttgctatgtattctcagatattgcaaacggacgagagaaaagtggagaatgaatcctggagaaaacaaggtcgttcgacgatttcgacacgtcgca

SEQ ID NO: 969834 - DNA, 120 bp, Artificial Sequence
  ENSG00000223478_2 (sequence is synthesized)
cagtgaaagccacagagccacggaaggccgagactccaccatgtttgtgatcttcacattcagcaaactcactcgcactctgcctcatcttatctctagaatgtattttaccacactgtg

SEQ ID NO: 969835 - DNA, 120 bp, Artificial Sequence
  ENSG00000223478_3 (sequence is synthesized)
tcccttctttagtgggaatgtctttggccaaaaataatgaatagttctgacctgacttgctaatacccagtgataaaaggatggaatttgttgggaataaaagaaaactaagcttacaaa

SEQ ID NO: 969836 - DNA, 120 bp, Artificial Sequence
  ENSG00000223479_0 (sequence is synthesized)
tctactgataccagcagcaatcaaagatgggtggtatgtcctctttcttcatgtcaccagatgggatggctactttgtggaaaaatggagagaagagaagactacagtgatgggaccagg

SEQ ID NO: 969837 - DNA, 120 bp, Artificial Sequence
  ENSG00000223479_1 (sequence is synthesized)
aaacaggatatctgtggtcagaagttgcctcttaggactaaaccagtgaaagatgggaaaatccatgatggaagcttgcttgaactctgaagaaacactggcttctttgtaatccaattt

SEQ ID NO: 969838 - DNA, 120 bp, Artificial Sequence
  ENSG00000223479_2 (sequence is synthesized)
ggcagaaaaggggctccttgattccagggaaatcttcaaccctccttgattccaggaaaatctttatcccttcctaagaaaagcgtaagtattcctgcctttgctttcaattcccaaccc

SEQ ID NO: 969839 - DNA, 120 bp, Artificial Sequence
  ENSG00000223479_3 (sequence is synthesized)
cttcattaaagctatcctacatctgtaacttcctggttctcaggagccaagaagttgattggtgggccactctcccacttctccattttatgaccatcaaataaagcctgcacttctcaa

SEQ ID NO: 969840 - DNA, 120 bp, Artificial Sequence
  ENSG00000223479_4 (sequence is synthesized)
gggaaatcttcaaccctccttgattccaggaaaatctttatcccttcctaagaaaagcgaggtacaagttcaatctctgaagatgatggaggaatatatctacgcttgaatccatctgga

SEQ ID NO: 969841 - DNA, 120 bp, Artificial Sequence
  ENSG00000223479_5 (sequence is synthesized)
tatgtgtaattccagcctatttgaactggaataggagtaatcaaccaaatcagtgttgttttcaacagtaagctctaaagatgagatatattttaataaacatgtatcttttttattata

SEQ ID NO: 969842 - DNA, 120 bp, Artificial Sequence
  ENSG00000223470_0 (sequence is synthesized)
ctagactccatgtggcttcttctgcctgcatcatggcctggaaaccgtccacatgatagcctaaatcaatcataggactcaccagattcagtgagtacatgtgcaggttcattatcagca

SEQ ID NO: 969843 - DNA, 86 bp, Artificial Sequence
  ENSG00000223470_1 (sequence is synthesized)
accagattcagtgagtacatgtgcaggttcattatcagcatgtattgcatgatgctgagatttggagtacaaatgatctcatcacc

SEQ ID NO: 969844 - DNA, 120 bp, Artificial Sequence
  ENSG00000223470_2 (sequence is synthesized)
acctaggattacaggcgcacaccaccacgaccgaaaagtgacctggaaggaacaggcgtaaacatggaggatccagttgggctttgcatttgcatccaggtggtcgcattttaaagaact

SEQ ID NO: 969845 - DNA, 120 bp, Artificial Sequence
  ENSG00000223470_3 (sequence is synthesized)
gaaccgatgccaaatacagacagcaatttttatgggagagacaaacagagagaagaaaaggaaaaccaaaagacaataaaaagacgggatacatcagaggataaaaggagctcatttcct

SEQ ID NO: 969846 - DNA, 120 bp, Artificial Sequence
  ENSG00000223470_4 (sequence is synthesized)
gtagaggaacaaactcctttcctgtcttcctgtctcactcccccaaccaggacagctcctctatctacagcaggccctaagtcacacctccattgacctaataaaaactggttcctatca

SEQ ID NO: 969847 - DNA, 120 bp, Artificial Sequence
  ENSG00000223475_0 (sequence is synthesized)
attcaacaaacactattaaacttgtaagatgtaccagatcctgagttggaggctgagaggaggacaagaaaactgctcccgtagcctagagggagggagagtcgcttaaaccacctgatg

SEQ ID NO: 969848 - DNA, 120 bp, Artificial Sequence
  ENSG00000223475_1 (sequence is synthesized)
cagaatgctgagtgcggagaccaggagggaacatcgggtggtgatggcctccatgatcccccagagaaagggtgtgacttgagtgccttcttcctctgtgctccccagggagcagcagca

SEQ ID NO: 969849 - DNA, 120 bp, Artificial Sequence
  ENSG00000223475_2 (sequence is synthesized)
tgacaatggattgaggtgggtatagaagaagtcaaggaaaagcccctgtcatgaagagttggatggagacaggcacagagtggccgcaggtccaagcagagtgaacatgcgtccaaactg

SEQ ID NO: 969850 - DNA, 120 bp, Artificial Sequence
  ENSG00000223475_3 (sequence is synthesized)
gcagtggcagcccctagaagggagacaccaacagcaccgagatctgtggtctccagagctgacatctcctgcacttgccacgtgcaggcgctgtgcgggacctcctctccatcctgtgag

SEQ ID NO: 969851 - DNA, 120 bp, Artificial Sequence
  ENSG00000236911_0 (sequence is synthesized)
gaccaagtaaaaattaaagggtaaaatggaatgccatataatgatgaggcagtaactgcaacagttaagaacttttcctcttgattatctggaaatcctaactgatataccagctcttcc

SEQ ID NO: 969852 - DNA, 120 bp, Artificial Sequence
  ENSG00000236911_1 (sequence is synthesized)
cgaaacagtgacagaaagctaaagggaactgtgtgactatggcaatgaccgtcaatgtttttgtagacacaatctaatggccaatctggttgggatggtgaccatcctctttctccctga

SEQ ID NO: 969853 - DNA, 120 bp, Artificial Sequence
  ENSG00000236911_2 (sequence is synthesized)
gagttaacacctgtgttcaagcctcttaagagcaggtggcaatagcctagtttccttgctgagatgtggctagaaagtactatcgctgtgctggaactcttaaaccaagagatgttgctg

SEQ ID NO: 969854 - DNA, 120 bp, Artificial Sequence
  ENSG00000236911_3 (sequence is synthesized)
ccaactcaccctgtagtacaagaatagttgattctggatccaacctggatgtctgtgatcacatgcaccatgccattcactggatctggaggagttttacatgatttacctgtgggaaag

SEQ ID NO: 969855 - DNA, 120 bp, Artificial Sequence
  ENSG00000236911_4 (sequence is synthesized)
aatcaaggatgcctacaagaaaaactcttacatccatctatccgaacacttttcagaaaaggtttctcatatcccacatttgaaataattccataagaagcttttgcagacatgggaaag

SEQ ID NO: 969856 - DNA, 120 bp, Artificial Sequence
  ENSG00000236911_5 (sequence is synthesized)
atccaacgcaagtttacgcacgtttacagacatctttgggacttgaccagaccaggttatctagacatgtgatagagaatggcctcccgtagtactcaggacggcattcgtactttaaag

SEQ ID NO: 969857 - DNA, 120 bp, Artificial Sequence
  ENSG00000236911_6 (sequence is synthesized)
atgtcccaatgggaaagtcagatgcattggtttgggttttcaacttggcaaacagaaaatgatctggggcttgacagtgacctagagaccaagaaatcaagaatatttgagttaataaaa

SEQ ID NO: 969858 - DNA, 120 bp, Artificial Sequence
  ENSG00000236911_7 (sequence is synthesized)
gaccaagtaaaaattaaagggtaaaatggaatgccatataatgatgaggcagtaactgcaacactggaaatcctaactgatataccagctcttcccgaaacagtgacagaaagctaaagg

SEQ ID NO: 969859 - DNA, 120 bp, Artificial Sequence
  ENSG00000236911_8 (sequence is synthesized)
gaactgtgtgactatggcaatgaccgtcaatgtttttgtagacacagttgttgaagctgactggcgatattctaattctaacctcaacctgtcacatgaatttggacaaattagttaacc

SEQ ID NO: 969860 - DNA, 120 bp, Artificial Sequence
  ENSG00000236911_9 (sequence is synthesized)
taaagactaagtaaatcaattcaagtaaaggacttagaagaatgcttgaggcacatgcacttgaggatcattagcgattgttattctccagatctaatggccaatctggttgggatggtg

SEQ ID NO: 969861 - DNA, 120 bp, Artificial Sequence
  ENSG00000237713_0 (sequence is synthesized)
gtgatttccatgtattctcaacaaaaatactctgctagtgatacagctctaatgaatggaggaacaccaggttcttgtctcgcacgatttagataaaacaacatggacacatgtggagtg

SEQ ID NO: 969862 - DNA, 120 bp, Artificial Sequence
  ENSG00000237713_1 (sequence is synthesized)
gagcagagtttaataagcaagaaagaaaagagaaggcaaaaggaagaggctccccaataaagacacagagggaggggggctccaaagctaaaagaggagactccacgtcccacagatacc

SEQ ID NO: 969863 - DNA, 120 bp, Artificial Sequence
  ENSG00000237713_2 (sequence is synthesized)
agccaggaagacatgagacattcaatcaacatatgcaaaatgaacattggtttggtctggaaaagtgggacaactcaaagcaaaagggagacaacttgaagcaagaggaggcttccaggt

SEQ ID NO: 969864 - DNA, 89 bp, Artificial Sequence
  ENSG00000237713_3 (sequence is synthesized)
caatggtgtaatcttggctcactgcagccttgatctcctgggttcaagcaatcctcccccgctttgctcgtttttaattaagaaaccac

SEQ ID NO: 969865 - DNA, 120 bp, Artificial Sequence
  ENSG00000237713_4 (sequence is synthesized)
agatgcatgctcgtttttaattaagaaaccacctctaagagctatgtgaataagaactccaggtttctttctcaaagaaagcacagacagagaaagaattatggttagagaatgggagag

SEQ ID NO: 969866 - DNA, 120 bp, Artificial Sequence
  ENSG00000237713_5 (sequence is synthesized)
gagaaagtaaatgaaaaataaaaaatatgggaatgtccttgcatcaacagaaatttcctccgaagccaactctgctgaaaatataatatacctgttctccaggaaagaaaacaacaatat

SEQ ID NO: 969867 - DNA, 120 bp, Artificial Sequence
  ENSG00000237713_6 (sequence is synthesized)
attttctgattcttcaagaaatgacatgggatcttgaaaagcactaatttctaggagcatctatcctgagatttgaaacttgcttcataaagttcaagatctcaaattttgtgtagttga

SEQ ID NO: 969868 - DNA, 120 bp, Artificial Sequence
  ENSG00000234519_0 (sequence is synthesized)
gggataaagagaagcagacatggagccctgcaaacttggcctaaacattgctctcggtgttctagcatcataatgtgacttttctttttaaccacagtttgttgttaatttataaagtta

SEQ ID NO: 969869 - DNA, 120 bp, Artificial Sequence
  ENSG00000234519_1 (sequence is synthesized)
cactaacttccacctccgatacagagcttctaaaagaatcaaagtataaaatatatgtggttgtaaaaaagtgccttgtaaattctaaagcactagagagtaagtcatattctctctctc

SEQ ID NO: 969870 - DNA, 120 bp, Artificial Sequence
  ENSG00000234519_2 (sequence is synthesized)
tcttttttttttatgactgctagaggtcttcgttggtaccgagttgctattgctctgaaatctttcaatggagtatgttaaaacatacattagaatatagaaatataaaaacatacatta

SEQ ID NO: 969871 - DNA, 120 bp, Artificial Sequence
  ENSG00000234519_3 (sequence is synthesized)
ttctgttctttcattaaaagctcatttcctacacaaaattaacataattacttatatttttatcctacaatgatattctgaattgattttgcaaaatacttaagacctgtcttctacctt

SEQ ID NO: 969872 - DNA, 120 bp, Artificial Sequence
  ENSG00000234519_4 (sequence is synthesized)
ggtgaatacatctccaggatgaggccacccattttggcttccactaacccggaggaacctggagcaaggaaaccaaaggaagtattcaggaagcttcagatttgactgctggcattatag

SEQ ID NO: 969873 - DNA, 120 bp, Artificial Sequence
  ENSG00000234519_5 (sequence is synthesized)
gcaagaattacacacacatgacttactgttcactattggtgagaactcgtgttctcatttcgggcaatgtttagaatgaagctccattaaacatgcttgctccgaggaatatccttagaa

SEQ ID NO: 969874 - DNA, 120 bp, Artificial Sequence
  ENSG00000237316_0 (sequence is synthesized)
cttcaggcctgaagatatctctctatatactgcactgcatgggcttgtgagaggagtgctgtggccacctggattgggtgtcccatcatagtacccctgcaggactctgttccctccatc

SEQ ID NO: 969875 - DNA, 120 bp, Artificial Sequence
  ENSG00000237316_1 (sequence is synthesized)
tcaaaacctgttacactgcaatgaaatggactgctgacttgtctctttttctacatgtcccctctgaggctcctagcaatggatgccgggaaggtgactgaagctctgagagccaactct

SEQ ID NO: 969876 - DNA, 120 bp, Artificial Sequence
  ENSG00000237316_2 (sequence is synthesized)
ccaggttatgtcacagacagatcagggctcttagggtccaagagaacaggcaattgggaagaaagatggacatggagtcagggataccaatgatgttcgtgaccagcaggagaagctgac

SEQ ID NO: 969877 - DNA, 120 bp, Artificial Sequence
  ENSG00000237316_3 (sequence is synthesized)
accttttgccatgaagttgcacacactggccccaaatctgaagtaactaaagaagaagatccaataggagtgagagttgctgctgcgatgtcatcagagcgagctagcaggacagtggca

SEQ ID NO: 969878 - DNA, 120 bp, Artificial Sequence
  ENSG00000261244_0 (sequence is synthesized)
gggatgtttggcgtgggccgaggcgcctcctcctcctcactgtccagatgttctcctccatctcctgtggggaggtggccagaggggtcctcagacaacccaacaaggaaggaagaggaa

SEQ ID NO: 969879 - DNA, 87 bp, Artificial Sequence
  ENSG00000261244_1 (sequence is synthesized)
gtggggatggggtggaatctgacaagatgagactggcacctctgcatctgagtgccccccaaacccagcagtcatgttgtaagcaaa

SEQ ID NO: 969880 - DNA, 120 bp, Artificial Sequence
  ENSG00000261243_0 (sequence is synthesized)
gtgccatgtaactggcctccatccccccaccgatggtcaccaagactgctgaggaggctgcaaaggacctcgcggcctcactaccttttggacttctctggccttcacgggaccttctgt

SEQ ID NO: 969881 - DNA, 120 bp, Artificial Sequence
  ENSG00000261243_1 (sequence is synthesized)
ggcagaaatcattttcataatcatgagactcttctcctcggagtttcctttcaacagggtctccctctgtcacccaggatggagtgtggtggctcaatcacagctcactggatgtaaccc

SEQ ID NO: 969882 - DNA, 120 bp, Artificial Sequence
  ENSG00000261243_2 (sequence is synthesized)
cttgcctcagtccgagcactcaaacctgcagctgagagccccatggaacggggaaaaacatgggcaaatgggcagttttaactccctgcaagatgagccttgaatctaaaatgtgattat

SEQ ID NO: 969883 - DNA, 120 bp, Artificial Sequence
  ENSG00000261243_3 (sequence is synthesized)
tttgttaggaatatcatgaaattcctagccatcaaacacatacacattctagaggcaacggtgcacctgacacgtcatggttcctggaccgacgagtccaggagggcagacccatcaccg

SEQ ID NO: 969884 - DNA, 120 bp, Artificial Sequence
  ENSG00000261241_0 (sequence is synthesized)
agggatgtggggagagagagggtcttcgaaatcagcagctgaaggaccatccttcctgttattgggaaccagcccgcctggtgtcagagctgatgcagaggagagctgagacatggagag

SEQ ID NO: 969885 - DNA, 120 bp, Artificial Sequence
  ENSG00000261241_1 (sequence is synthesized)
agaggcgggtttttgaggacactgcttgaacccctgaatccagccatgcctgaagtgcccactttgttcatctctgctcactgggggagccaggacacggatccaggttttctgactcca

SEQ ID NO: 969886 - DNA, 120 bp, Artificial Sequence
  ENSG00000261241_2 (sequence is synthesized)
ggtctcaggcttgctccatagcgccacctgctggtaggcacccaaatcaagactcagatttcctcatctcagaagttgtccacttcttctccgacctccacggtaactcggaaccacacc

SEQ ID NO: 969887 - DNA, 120 bp, Artificial Sequence
  ENSG00000261241_3 (sequence is synthesized)
gtggagttatccctgtgtcctctttctcggaagttccacatccaacccctcagcaggtctcagcggcactctcaccacctcctctgctctgttcctgtttctcttggatggtcgaatgtt

SEQ ID NO: 969888 - DNA, 120 bp, Artificial Sequence
  ENSG00000261241_4 (sequence is synthesized)
tcctaaggagtgtctgctgcttcacgcttgccccctggagtggcatctaaaaggataccctacaactaacaggcatgatgccatcaagacatcttgagcctggctacctcccgtggcctg

SEQ ID NO: 969889 - DNA, 120 bp, Artificial Sequence
  ENSG00000261241_5 (sequence is synthesized)
gaaactcgcgcagtctcactacagcaaattgaggtggtatggggtgcctgctgctgcctctctcttcacctttccacagagggctgccccagcctgactcccacttccagagtttctcca

SEQ ID NO: 969890 - DNA, 120 bp, Artificial Sequence
  ENSG00000261241_6 (sequence is synthesized)
gccaggagaatcctgaaatctctgtaaataagcaatccaggagccagagaatcatgggatctcatataaacaaatcatcaaggaaaaacacagccagagtctccatttggtaaacctccg

SEQ ID NO: 969891 - DNA, 120 bp, Artificial Sequence
  ENSG00000261241_7 (sequence is synthesized)
tgactggggatccccggccacccagaaagcagtattgcctgccatgcatgtcatcactgatttttactgctgcagcagactccgtcagacctgcctgctgcttcagcgaattgttcagtg

SEQ ID NO: 969892 - DNA, 120 bp, Artificial Sequence
  ENSG00000261241_8 (sequence is synthesized)
cacaccaccagctacctgctgtaagcattcacactcctctacctgcctggcagcatttctcagctgaacacaggccaggccagaagtgccagggatttaatgcccttagaagtagctctc

SEQ ID NO: 969893 - DNA, 120 bp, Artificial Sequence
  ENSG00000261241_9 (sequence is synthesized)
taccaatgacaaatggagctggtggatacattctcagcttcctcccctctcaggtggaacagccctgagatgtgctctatgcaatctcccacaagtccccagcaggctcaagctcccatt

SEQ ID NO: 969894 - DNA, 120 bp, Artificial Sequence
  ENSG00000261241_10 (sequence is synthesized)
gtccaaccctggtaacctgctcattgacacccctgtcttgccttcccttcctggcctcactttctcactctcttactgttgcctcctgagatcgcatccaaaataaatgacctgcaccca

SEQ ID NO: 969895 - DNA, 120 bp, Artificial Sequence
  ENSG00000261241_11 (sequence is synthesized)
agagctcaccctctctgaaggagagcaggtgcctcctgagagcagggcttctctaccttggggcactatgaacattctgagtggggcgccctgaacgagtgcccagatgcttgtgaggcc

SEQ ID NO: 969896 - DNA, 120 bp, Artificial Sequence
  ENSG00000261241_12 (sequence is synthesized)
cagatcttggggtgtgcagccaggaagggctctgctagctttcccacctccctcctgacctcttctgcccctcactggacccagcccgttggcttcaggatgggccccacgggacatgct

SEQ ID NO: 969897 - DNA, 120 bp, Artificial Sequence
  ENSG00000261241_13 (sequence is synthesized)
ttcatggaacctgaggaaagaatgcacttacaacagcgccgggagcacagaggcttcccactaccctttccgagaagcacgtctattttctctaatttattcagtgccgctgtgcgtgtg

SEQ ID NO: 969898 - DNA, 120 bp, Artificial Sequence
  ENSG00000261241_14 (sequence is synthesized)
cctaaggagtgtctgctgcttcacgcttgccccctggagtggcatctaaaaggtgcaggtcagatgaatctttcttctgccagggctcccggcttagccaaggaaaagcacaagtccctg

SEQ ID NO: 969899 - DNA, 120 bp, Artificial Sequence
  ENSG00000261241_15 (sequence is synthesized)
accatatcctgcaaaattccacatctgggaactcaggcatatcaggcctggtctctttttcttcttccttttaaaataacgaatacattgacatgccccttattacaccatgctgaaatg

SEQ ID NO: 969900 - DNA, 120 bp, Artificial Sequence
  ENSG00000261241_16 (sequence is synthesized)
aaattcataggcaatatcacctatctatagacacaatttacataaatccatgtaagccacataatgccctaattgtattctagaggagaattaaaaggaaacgaatttataataaaataa

SEQ ID NO: 969901 - DNA, 120 bp, Artificial Sequence
  ENSG00000261241_17 (sequence is synthesized)
cattggggtgggctgtctgcatgcacagcagcctgccagcgcttgggaggggaccatgcacagtatatttactgaagttgataccctacaactaacaggcatgatgccatcaagacatct

SEQ ID NO: 969902 - DNA, 120 bp, Artificial Sequence
  ENSG00000261241_18 (sequence is synthesized)
gaggctttccaaggggcctgacagcttctgctttctcgggcccctgctatcaccatgtgaacaagcctgggttggcctgctgctggatgagaggccatgtagaacccagccaaggtgtcc

SEQ ID NO: 969903 - DNA, 120 bp, Artificial Sequence
  ENSG00000261241_19 (sequence is synthesized)
cagttaaggccatctcagagcagccagcacccagcacccagcagcctgccattggtctccagatgcacgcatgagcccaaccaagatcagccaatcctgcctcagaccagcagaactgtg

SEQ ID NO: 969904 - DNA, 120 bp, Artificial Sequence
  ENSG00000261241_20 (sequence is synthesized)
cagtgcccactttgttcatctctgctcactgggggagccaggacacggatccaggttttctgactccaggtctcaggcttgctccatagcgccacctgctggtgacggcaatcggtaggc

SEQ ID NO: 969905 - DNA, 120 bp, Artificial Sequence
  ENSG00000261241_21 (sequence is synthesized)
agagctcaccctctctgaaggagagcaggtgcctcctgagagcagggcttctctaccttggggcactatgaacattctgagtggggtaagtgtttactgtgggaggccctattcatggca

SEQ ID NO: 969906 - DNA, 120 bp, Artificial Sequence
  ENSG00000261241_22 (sequence is synthesized)
ggaggtttagcaatctccctggcctctagccactagatgacaatagcacccctgccacacccactgtgtaacaaccaaaaatgtctccagacattgccaaatgccccctgggtcggggac

SEQ ID NO: 969907 - DNA, 120 bp, Artificial Sequence
  ENSG00000261241_23 (sequence is synthesized)
gagagggcaaaagcagccccagttgggagccactgctttagagaatggagcttggagctgatttctgggacaaatcccatgggatagccaggacgtgcacctgggcgccctgaacgagtg

SEQ ID NO: 969908 - DNA, 120 bp, Artificial Sequence
  ENSG00000261241_24 (sequence is synthesized)
actttctgattcaaattccatttgacacagattctgaaagtgtgccttgcgagggccctggcctgccatcctcattatactcagaagcccagaagtagcagtggcaggggcaccctggaa

SEQ ID NO: 969909 - DNA, 120 bp, Artificial Sequence
  ENSG00000261241_25 (sequence is synthesized)
gccccggggttctcattaggtgacagatgccaccacaggcctctgccatttgccaagcttcctattacaagccacctgggaacattcactcagggctttttcagacagagctgcacatct

SEQ ID NO: 969910 - DNA, 120 bp, Artificial Sequence
  ENSG00000261241_26 (sequence is synthesized)
ggcactatcttgagtctgtgcctctggggaccccgtctgtactcagtttccctatctgcaaaatgaaaaacataatacttatttctcagggatgaatagagataattcagcatgtttttc

SEQ ID NO: 969911 - DNA, 120 bp, Artificial Sequence
  ENSG00000261241_27 (sequence is synthesized)
aaatttcagtgtgttgcctgcgccctcatgagttttactatgaccacatgccacctgtaccattatgtttattttattttttagagatggaaggtctcattctgttgcccaggctgtagg

SEQ ID NO: 969912 - DNA, 120 bp, Artificial Sequence
  ENSG00000261241_28 (sequence is synthesized)
cactgcatcttcaaactcccgggctcaagggatcctctcaccttagtctctagtactacaggtacacactaccaaacttggctgactcctttatttatatagagatgaggtctcgctatg

SEQ ID NO: 969913 - DNA, 120 bp, Artificial Sequence
  ENSG00000261241_29 (sequence is synthesized)
ttgcctaggcagctctggaactcctggcctcaagccatactcccatcttggcctcccaaactgttgggattacagacataagccaccacacccaacttcattatttatttaattaatatt

SEQ ID NO: 969914 - DNA, 120 bp, Artificial Sequence
  ENSG00000261241_30 (sequence is synthesized)
tccttaaatgaatccatgttgaaagacttgagctgatctatttcaaaaggaaatttttatattattagcattagaggaaaattgatatcacttgtcacaaatgcaaagcaataagaaaag

SEQ ID NO: 969915 - DNA, 120 bp, Artificial Sequence
  ENSG00000261241_31 (sequence is synthesized)
acaaagaagacgacgtcataactgtttatctgtgtaccaactaaactcatgatgaagagccatgctgtgcctcctgtgcttttggaagcacatgaatataaaggatgcctagggtctggc

SEQ ID NO: 969916 - DNA, 120 bp, Artificial Sequence
  ENSG00000261241_32 (sequence is synthesized)
acatagtaagtactcaatgaatgatcactgctatgaagaaaatgaggccaacgtggtgtcggcccttggaaacatttctctgagttggtcaaggggaacaattttgctccaagaaactgt

SEQ ID NO: 969917 - DNA, 120 bp, Artificial Sequence
  ENSG00000261241_33 (sequence is synthesized)
catatttattcttctctgataattagagctccacaatttatcatggtcgtaagttgcaaaaatggcaacaaccatcactcttcccaataagaagtgaagtccatttcctgcccctaaaat

SEQ ID NO: 969918 - DNA, 120 bp, Artificial Sequence
  ENSG00000261241_34 (sequence is synthesized)
cagcttctagatgttggggagatttgttatgcagcaacagctggccttcccattttgtcttgtttgttgcgatggtgcccagtcatagcagctccatttgtgctagaattatttatctat

SEQ ID NO: 969919 - DNA, 120 bp, Artificial Sequence
  ENSG00000261241_35 (sequence is synthesized)
ttcctcttcttaattgtcttcccttcctttttcactcctttgtgtgtgtttttgaaagacacctcaagtatctttggaaaggagctggatatagataataaattgaaaatcgaactgaga

SEQ ID NO: 969920 - DNA, 120 bp, Artificial Sequence
  ENSG00000261241_36 (sequence is synthesized)
gctgcagccttccggtgccgcagtcgcagccgtgggggccgcctccgctgtagcaattccgaggttttgccgtttccagtatgtcgtagagttgaaatcataccatatggagcctgttca

SEQ ID NO: 969921 - DNA, 120 bp, Artificial Sequence
  ENSG00000261241_37 (sequence is synthesized)
aaggtcagaagggctgcaatggtggcttgaactgagagcatggataacagagcctggcgtccttagaggcaaaatatttaggcagccaataaggctgctgcctaacatttacaaacagaa

SEQ ID NO: 969922 - DNA, 120 bp, Artificial Sequence
  ENSG00000261241_38 (sequence is synthesized)
ggggtatggactcagggttggttggtttgcatatgaaaggcgtgtagtcaggtggagtttattatctctaggaatcagctagtcctgggagaggcagtttctctccagttagagaggcca

SEQ ID NO: 969923 - DNA, 120 bp, Artificial Sequence
  ENSG00000261241_39 (sequence is synthesized)
caaatgccagagcatcaatactacagaaaataagcaaatattgttaatacaattggcccaatgagtggatgcccaatagatgaataccgactctaagaaaacacaggacatcctgcgagc

SEQ ID NO: 969924 - DNA, 120 bp, Artificial Sequence
  ENSG00000261241_40 (sequence is synthesized)
atctttttcttcctagctttgatgggatggagtcctgtgattggtcagtcctgagagacgcacctacgccgggaaggccaggccaacctcgttgggaacacaggaacatgttactgcaat

SEQ ID NO: 969925 - DNA, 120 bp, Artificial Sequence
  ENSG00000261241_41 (sequence is synthesized)
ggttggagggatgatgatgatgcttggctgaaaaccctgtgtctaggggagagaaaggattctgctgtggtgggctgagggcaggggcatttcagacataggaggaagaggcaggacaga

SEQ ID NO: 969926 - DNA, 120 bp, Artificial Sequence
  ENSG00000261241_42 (sequence is synthesized)
gatgttagccatttatgaaacagtcttcatacattactgtcttcaaactatcttgcctgctccttcccttgtcaatatctcagatgaatgggttagctttcctgttaacttctgtaattg

SEQ ID NO: 969927 - DNA, 120 bp, Artificial Sequence
  ENSG00000261241_43 (sequence is synthesized)
actcattttcaggtattaaaatgtccagcctagtttctatcaaatccagtcttgcagccttttccagtcttcttccttcctcttgtctcagcttgacttgagctggaatcctggaggagg

SEQ ID NO: 969928 - DNA, 120 bp, Artificial Sequence
  ENSG00000261241_44 (sequence is synthesized)
ggaggttggggaactgggactgtctggcatcttcctccctccttgccctcttatctgctgctgtgggtgttctgtcccctgtgtgtgagccctgaggtgagaggacagatgttatcctgg

SEQ ID NO: 969929 - DNA, 120 bp, Artificial Sequence
  ENSG00000261241_45 (sequence is synthesized)
aaggcatcaattctatcagggagtggcatcttctgttggctttcatggggcatcatggttttctcaggaaggatctctgtgtgacactatttctgggtatgggtttcctgttctctgggt

SEQ ID NO: 969930 - DNA, 120 bp, Artificial Sequence
  ENSG00000261241_46 (sequence is synthesized)
acacagtgagccagcatcccgtgtgtacagcatgtgtacatgcatacaacgcagtggatgctgacgagggtgtgcaggccagtgtaggatggctctgggatggaaggagcatctctcatg

SEQ ID NO: 969931 - DNA, 120 bp, Artificial Sequence
  ENSG00000261241_47 (sequence is synthesized)
cacctgtgcaggtgcaacgtgtcctctgctggcttgacgtggacgctccccagtaccagagaatggcagcagctttgtgcccctgcaagccctgattcgagaggaggctggaggcgtgct

SEQ ID NO: 969932 - DNA, 120 bp, Artificial Sequence
  ENSG00000261241_48 (sequence is synthesized)
tgggggaggcgggatgggctgggggaggcgggatgggggtttgctcctggcattaccactgggctctttctgtttgctgggcacaggataccctacaactaacaggcatgatgccatcaa

SEQ ID NO: 969933 - DNA, 120 bp, Artificial Sequence
  ENSG00000261241_49 (sequence is synthesized)
tgtgcaccgttctatgcatagagttcgtcatggaagtccagttccaacattgctgatgggccaatgaagggaggtggggttttctgggctgcgaggttttctgggctgcaatgtggaggt

SEQ ID NO: 969934 - DNA, 120 bp, Artificial Sequence
  ENSG00000261241_50 (sequence is synthesized)
tcatttgcaagtcactgcgcggcgcatgcagaagcagccgcgggccggcggggcgcgcagataaggtctgggggcgtgggtttcgggctgtacctgcattatcgcggcttccttaagctc

SEQ ID NO: 969935 - DNA, 120 bp, Artificial Sequence
  ENSG00000261240_0 (sequence is synthesized)
ctcacctggggcagcgtaggtgtgcatgacattgtgctccaccagcacctgggccaccgaggggtctggaaccgggaaggactcgttgtacggaggctggaactggtggagggcctgctc

SEQ ID NO: 969936 - DNA, 120 bp, Artificial Sequence
  ENSG00000261240_1 (sequence is synthesized)
agcccgcccccgccctgccccgccccatcccctcccctccccacccccgcccacctactgagagcttgaagaccgccgcgctctgataaatgacattgaagaccacgttctggaaggtca

SEQ ID NO: 969937 - DNA, 120 bp, Artificial Sequence
  ENSG00000261240_2 (sequence is synthesized)
gggactgcttgtcgttgatggtccaccggaagaccatgtccgagccggcctccaccacggggctgtacctctgcggggggaatggtgtcagcctgggctctgtggaggactctgccctta

SEQ ID NO: 969938 - DNA, 120 bp, Artificial Sequence
  ENSG00000261249_0 (sequence is synthesized)
cgggtgatcctggatcgtcaagccatgttgatgttgattggatgtcaggagcagacgatgtccagcactaacagaatgaatctaccaggagcacagactttgggatcaccattgtgtctg

SEQ ID NO: 969939 - DNA, 120 bp, Artificial Sequence
  ENSG00000261249_1 (sequence is synthesized)
ttttaagtgtgcgtgtgtgtgtgtgcacgtgcgcatgcgtgcgtgtgtcttccattttgaaacaataagctagtggttttctaacctggcttctcattagaattcatgcagagtttagct

SEQ ID NO: 969940 - DNA, 120 bp, Artificial Sequence
  ENSG00000261249_2 (sequence is synthesized)
tataaaaagtacaccagttttggcccccacccaccaggactgaactgaagtctctagtgattaaaactgacagataaaatacaagatactgaattaaatttggattctacataaacagtg

SEQ ID NO: 969941 - DNA, 120 bp, Artificial Sequence
  ENSG00000261249_3 (sequence is synthesized)
aaaaaaaatacaagtatgttccataatatttagaacgtacacttaaaaattatttttatctaaaatttaaatgtatccgggcatctcagttttttgttctattttatttttgtcttcttc

SEQ ID NO: 969942 - DNA, 120 bp, Artificial Sequence
  ENSG00000261249_4 (sequence is synthesized)
tttcctgtctagtaaattaactctaccaagggtccaaattgggaatctctattttcagcaattcccatgctaattatattaaatctaggtctttttttcccaaattttcttctttattta

SEQ ID NO: 969943 - DNA, 120 bp, Artificial Sequence
  ENSG00000261249_5 (sequence is synthesized)
ttcttcttttttaaattcatatttcagacttaaaccgaagcactatcacacaatatacatgtttttaaaattgaggagttaaatatttcttatataagtaaccatctcaaaagtgtattc

SEQ ID NO: 969944 - DNA, 120 bp, Artificial Sequence
  ENSG00000261249_6 (sequence is synthesized)
atgattccaggtaagcgtttttattttaataaaatgcttgtttcaaatgtcttattatttacattgtatccatcattgtattcaaaaatatttctacactatatttactgttacatgaga

SEQ ID NO: 969945 - DNA, 120 bp, Artificial Sequence
  ENSG00000261249_7 (sequence is synthesized)
aagataataaagttctatcttttctccagtagaagtagtgcagtttcaaaagttttatcacaattatttagaatgaggaaaataataactagagcttctttcaaaattaccctaaagggg

SEQ ID NO: 969946 - DNA, 120 bp, Artificial Sequence
  ENSG00000261249_8 (sequence is synthesized)
aggaaaaataaaaatcaacccagagaagaacaaatgggcaattaaggcaagtgcaaccaggtctcagggaggaatttcttaatccccacagcttgtaatcgggggttaggacccaagagt

SEQ ID NO: 969947 - DNA, 120 bp, Artificial Sequence
  ENSG00000261249_9 (sequence is synthesized)
gtgaaaattgtcagtgcagcaacacaaaatcctggaaagactcagtaggtgcagagactcgagatggtatatgagcagttgctgagaacctagagtctgggaaacacagcacattccaac

SEQ ID NO: 969948 - DNA, 120 bp, Artificial Sequence
  ENSG00000261249_10 (sequence is synthesized)
acaaatcccggagcccaggtaccatgggaacagctgatcctccacaaacatctattgatatgtggagatgagatgggccctgacatgctgtctggatattatgagcaaggtggagggtaa

SEQ ID NO: 969949 - DNA, 120 bp, Artificial Sequence
  ENSG00000261249_11 (sequence is synthesized)
ccaaggggaccaggccaacagcatggagctgcataaatcccagctgtgaattcaaaagggatgcctaggcttgaatattccttttgcccccagctaatgtgtgtactgacctctgcttaa

SEQ ID NO: 969950 - DNA, 120 bp, Artificial Sequence
  ENSG00000261249_12 (sequence is synthesized)
agagcttggaaatatttttaagtaatttggttcccataaatagaatgtcctcttcaggtgttacgtgaggaagaactaaaaataattagtgcaaatgatcctcagaccttccaccacctg

SEQ ID NO: 969951 - DNA, 120 bp, Artificial Sequence
  ENSG00000261249_13 (sequence is synthesized)
aaagagctttaaaaaaaaagggaggtggcggggaaaggaataaagtttggtgctttaaaaagaaaataaaaagtgttttgtactggaggaagctggtagaaagtttatctgaaaaaaaaa

SEQ ID NO: 969952 - DNA, 120 bp, Artificial Sequence
  ENSG00000261248_0 (sequence is synthesized)
atggagtctctctctgtcacccaggactccgtctcaaaaaaaaaaaaagaaagcgcagagtttgggatcacagtacctaccgacataggacacaaacttaactcagttaacctgacgttc

SEQ ID NO: 969953 - DNA, 120 bp, Artificial Sequence
  ENSG00000261248_1 (sequence is synthesized)
gattgcctgaggctggagtttgagaccagactgggcaacacagcaagaccaccatctctacaaaaacaaaattaaattaaatattcaaattggtttaaagcaagcaatctctttagaaat

SEQ ID NO: 969954 - DNA, 120 bp, Artificial Sequence
  ENSG00000267373_0 (sequence is synthesized)
caggtgtgagccaccgcacctggcctcctctagtctttagtggctctccactcctgactaaattaagttcaggctgtcatcagtgtgggctcagcctaccttccagcttttctgcttctg

SEQ ID NO: 969955 - DNA, 120 bp, Artificial Sequence
  ENSG00000267373_1 (sequence is synthesized)
taccttccagcttttctgcttctgctttgctttatttatttacttattttgagacagggtcttgctcagagacggtcccccaggctggagtgcacaggccaatcatagctcactgcatcc

SEQ ID NO: 969956 - DNA, 120 bp, Artificial Sequence
  ENSG00000239641_0 (sequence is synthesized)
tacaagtttacagatcacaaggtcactgaaataaatcactatgtgaaaaaaaacagctatgaaatagttgaagaattttccttctagtttaaaggaaaacctggaaaatattttcatcta

SEQ ID NO: 969957 - DNA, 120 bp, Artificial Sequence
  ENSG00000239641_1 (sequence is synthesized)
caacagtttatgggaaatgtgccaccaactgacaagaggagatgaagagtttctatacgtcaataaccagttctcttcattcacttacccatttatttattcaacaacaacttattgagc

SEQ ID NO: 969958 - DNA, 120 bp, Artificial Sequence
  ENSG00000267375_0 (sequence is synthesized)
ccctcaacccgaagaggcaaagccctctctactctggggcgctgattaagaaacaaacattcggcagacacagggcaaccgagtggttccagtgggcagagcgatggccctgtgtgagct

SEQ ID NO: 969959 - DNA, 120 bp, Artificial Sequence
  ENSG00000267375_1 (sequence is synthesized)
ttcacatggttcctctcatttgatctactctaaggaagacacaaaaccaagggcagtcccaggaggtccttggcagattccagcagccacagtgcagcaggccccatgctgagccactgg

SEQ ID NO: 969960 - DNA, 120 bp, Artificial Sequence
  ENSG00000267374_0 (sequence is synthesized)
gtgtggaacttgggattcgaacggcaggcgggaagtgctctagcaggggagtctgaccttgtgagggaatacctgtgtccccccttttttcccctttttacccaataaaaccctgcctta

SEQ ID NO: 969961 - DNA, 120 bp, Artificial Sequence
  ENSG00000267374_1 (sequence is synthesized)
ctcaccctttaaatcatctgcgagcctgaattttcatggccgtgggacggacaagaactttatcttcagctgaactaagaaaaagtcctgcaacatttttggcgcgcaatgtgggggcac

SEQ ID NO: 969962 - DNA, 120 bp, Artificial Sequence
  ENSG00000267374_2 (sequence is synthesized)
cagaagcgaaagaacaccccctcttaaacatggagatcgttatatagaatgtccaaggcaaattaaggaaaataattattgtagctgatgaagcagaaaccctattagagctaaatgcta

SEQ ID NO: 969963 - DNA, 120 bp, Artificial Sequence
  ENSG00000267374_3 (sequence is synthesized)
tccataatgggtcaagtgagccaagagaactgactctgagaaggcgttccaagctctttgtgcaatggtgtttaaaatgcaagattcctgtctgagagagaaatgacttgaagagcgtta

SEQ ID NO: 969964 - DNA, 120 bp, Artificial Sequence
  ENSG00000267374_4 (sequence is synthesized)
atgcaaacccccgttctgctcttcaagcagctgtgtgcctggcagaccccataggcagagaagggacttgcatgggccatgatgatacatattcagcagtgaagaagacttgattctgca

SEQ ID NO: 969965 - DNA, 120 bp, Artificial Sequence
  ENSG00000267374_5 (sequence is synthesized)
ccttgccggttacagctgccagattgtgagtgattgatagagaactttgttaatgatgtggaattcacttctggcatgctctgcccaaatacgtatgcaatatattattagtgccctcaa

SEQ ID NO: 969966 - DNA, 120 bp, Artificial Sequence
  ENSG00000267374_6 (sequence is synthesized)
caacaggcctgtccagatgtgatttaattcaaagcctgattacctttttctctttttactcttataattggaatgttgttgatcagattctgcttctaataaaaatggcaaagcacgcag

SEQ ID NO: 969967 - DNA, 120 bp, Artificial Sequence
  ENSG00000267374_7 (sequence is synthesized)
acatgcagaccatattgaaatacgcagagaattccatggagactctgatggctaggtaagctcactttagctgcacacccacttcaagaaggtgaaggagacaattctgggataataaag

SEQ ID NO: 969968 - DNA, 120 bp, Artificial Sequence
  ENSG00000267374_8 (sequence is synthesized)
atctaggaaggcaccgttgagctgttgcaactgttctgctggagccttatgtatgtggttgaaaccacctgtactactggaatgaaagcacctttacagaagaggcaatgcaagttgtat

SEQ ID NO: 969969 - DNA, 120 bp, Artificial Sequence
  ENSG00000267374_9 (sequence is synthesized)
tcatcacatgtgtagaatgaattaagatttatgccagttgcaaagaagaatattggctcactatttttcctctgggcataaagagacctcaagtaaacctccagcagccatctggacttc

SEQ ID NO: 969970 - DNA, 120 bp, Artificial Sequence
  ENSG00000267374_10 (sequence is synthesized)
catgaaaacagaacaatcagtgagatgcagagcttggaggagacagtttccatagactgaagcacgtgctgaagcaaagttcacacttgcaggattagaagaggttgaccgaaagaagga

SEQ ID NO: 969971 - DNA, 120 bp, Artificial Sequence
  ENSG00000267374_11 (sequence is synthesized)
aggacatggacagctatgttgttgtggagtcctgttttatagtcataaccttgagtcaagtgagtttgtctggacagacagagcttgttgcctttacttatagggaaggcaccggacaca

SEQ ID NO: 969972 - DNA, 120 bp, Artificial Sequence
  ENSG00000267374_12 (sequence is synthesized)
gacagcctcaaggacatttgttctagcctttcagtatcctttctcttaattatctcacctcatccatgaagctggtatgtacgatttttcctttctttctcaatcctttaaaaaattaaa

SEQ ID NO: 969973 - DNA, 120 bp, Artificial Sequence
  ENSG00000267374_13 (sequence is synthesized)
tctaaatctcatttccacttagattttaatgttgcattgtaacttaagataaaaccttgctctgatgttaaaaatactaaagtaagaagcaatatggcatagtgcttatgagcaggacta

SEQ ID NO: 969974 - DNA, 120 bp, Artificial Sequence
  ENSG00000267374_14 (sequence is synthesized)
catagttctttctgaatacaaatctcagataaaacactatctcagtgatcaaccaggttaagcaacctttttagtgcctcaattattccatttgtaaaattgtaataatgatagtactaa

SEQ ID NO: 969975 - DNA, 120 bp, Artificial Sequence
  ENSG00000267374_15 (sequence is synthesized)
cctataagattgtggtgaggattaagtcagataatacaaaagaagcatttagagtatttcctggcattatctaccatttattgaatttttatggttaagaagaataaggaaaagcagaag

SEQ ID NO: 969976 - DNA, 120 bp, Artificial Sequence
  ENSG00000267374_16 (sequence is synthesized)
aaaaggaaaagagaaaaaatacataagaagaaggaagagtggtaagctctagtaaattacaacaaacggtaacgtagaaaacatttgttagcccttaatataggccaggcactgtgttca

SEQ ID NO: 969977 - DNA, 120 bp, Artificial Sequence
  ENSG00000267374_17 (sequence is synthesized)
atgcttaaacctcattactgttctttgaagtggataacattattccttccattttaaagaaaggaatactaaagacaactttgtcaatattattcatgtaataaatgacagaatttgacc

SEQ ID NO: 969978 - DNA, 120 bp, Artificial Sequence
  ENSG00000267374_18 (sequence is synthesized)
aagacaatagagaatgaactcttaatcactatattgttttattttttgaaaatagattttaagttcttattaaatgttaatgactcacatcaaaataaagccaatcaaaattgacagcaa

SEQ ID NO: 969979 - DNA, 120 bp, Artificial Sequence
  ENSG00000267374_19 (sequence is synthesized)
aagaatattggctcactatttttcctctgggcatctattactaacaaagaaaagactgcttctgtaatacaacaataaatttattgaactaaaagttgagactgacatctgggcacattg

SEQ ID NO: 969980 - DNA, 120 bp, Artificial Sequence
  ENSG00000267374_20 (sequence is synthesized)
ggctcctcatgcctctgaataaacagacaaacaaatgagttactataccagcagaggggtacaagcaattttccagtcttgaccctttatctgttgaccaagctaaggcagaaaccagct

SEQ ID NO: 969981 - DNA, 120 bp, Artificial Sequence
  ENSG00000267374_21 (sequence is synthesized)
aaattctggatttaatcttgagcagcaaaaaagatcagcttttgaagtggatctgcttttattcttggcaaaagttcagcggagaccaaccagagtggtgacaaagttcttcaacatcaa

SEQ ID NO: 969982 - DNA, 120 bp, Artificial Sequence
  ENSG00000267374_22 (sequence is synthesized)
gccaaatgtaatacaaggaattacggatagtgcttaatctaaaataaagaaattccacatctccctaaaaagttattggcttcaagaatgaaaacaaaagaagcatatttgtctcaatcc

SEQ ID NO: 969983 - DNA, 120 bp, Artificial Sequence
  ENSG00000267374_23 (sequence is synthesized)
aaacacagacaccagaaagacaaaccaggagtatacagcaaagtagcttgcaggataatacattgaaaaatgtaattgtgcataaatcatgcacaaagtagaaaccacaaattctgtatt

SEQ ID NO: 969984 - DNA, 120 bp, Artificial Sequence
  ENSG00000267374_24 (sequence is synthesized)
tggcaaggcttcggttcctttgcataattctttcattttcatcttgctgcttccattctcttttcatcaaaaaaagctacataaaacaaagacataaactgtatgcaattaaaatgagaa

SEQ ID NO: 969985 - DNA, 120 bp, Artificial Sequence
  ENSG00000267374_25 (sequence is synthesized)
aatagctgaaaggaatgtattgataattatgttaaaatctataccataagtattcttgcattgttaagcatctaatttttcatgtgttgacatcagcatctcagttctctctaacatctg

SEQ ID NO: 969986 - DNA, 120 bp, Artificial Sequence
  ENSG00000267374_26 (sequence is synthesized)
aagtacgatttactattgttgcttgcttacttactcttatcaatttctatgagagagttgtactgcgacattagctcttttgactagatgtgatgacagactgtctttggtccattctct

SEQ ID NO: 969987 - DNA, 120 bp, Artificial Sequence
  ENSG00000267374_27 (sequence is synthesized)
tcttttgccaagaccacatactagcagcctccacataaagttgtgtaggtgcagcagtctcaatgaaagattaaggacattgccacaaaaggaaattaaactacgtgaggaagataattt

SEQ ID NO: 969988 - DNA, 120 bp, Artificial Sequence
  ENSG00000267374_28 (sequence is synthesized)
tgaatgtctaccgacagaaaaatatgcccaagattaggaaatggtcaaaaaggcttactgtattttctttcactggagtgttggacattgtctaacagatccttcaggggtctgaacctg

SEQ ID NO: 969989 - DNA, 120 bp, Artificial Sequence
  ENSG00000267374_29 (sequence is synthesized)
tcaggatgtatacctttgattgtctttctgttgaaggtgctacattataattctgtaggggaagaagtgaagtagtagaacactgatattactacaaattattctcgttcttaagaatac

SEQ ID NO: 969990 - DNA, 120 bp, Artificial Sequence
  ENSG00000267374_30 (sequence is synthesized)
aaataatttttgtcaagtaaagatataattgatttctatcctgtagaaaagatgagtctaaacatcacattgtattgtcctatagattattaatatgttttacatctattagcaaattca

SEQ ID NO: 969991 - DNA, 120 bp, Artificial Sequence
  ENSG00000267374_31 (sequence is synthesized)
ttcattattgctgattatatatctatatatggctgtttttctactatttatttcaactgactttaatatcttactggcttctcattaattagtgagatgaataaaatgtttgcaacatgt

SEQ ID NO: 969992 - DNA, 120 bp, Artificial Sequence
  ENSG00000267374_32 (sequence is synthesized)
ggcattgggaacagaagattatcagtatgatccgtacgcttaaggaaagatctcatattattgaaatgaatattttatttgataaattgaactacagaataaagtacttttaacaaacca

SEQ ID NO: 969993 - DNA, 120 bp, Artificial Sequence
  ENSG00000267374_33 (sequence is synthesized)
gaattccaaatgtgctaccatccatgtagttttacttgaaaaacccccttggaaattaacaataaggcactgactggagctgaatttgcaaatgttttaggaagaaactttatctcagac

SEQ ID NO: 969994 - DNA, 120 bp, Artificial Sequence
  ENSG00000267374_34 (sequence is synthesized)
tacccttgatgtatcaaaatatttaaagcaattggcaaaggcagtgagcaattcactctcaggcacatgaatatcaccgggagagggctgaatgttcagatatgcaagagggaaagctaa

SEQ ID NO: 969995 - DNA, 120 bp, Artificial Sequence
  ENSG00000267374_35 (sequence is synthesized)
agcacacaagtccttttagacccaggctcagaagtgatacaccgtctctttcaactcattctattggccaaataatcagaccatatgatgtcctgaaaattcttccacaatatttaacca

SEQ ID NO: 969996 - DNA, 120 bp, Artificial Sequence
  ENSG00000267374_36 (sequence is synthesized)
acactttccagaaaaacttcatttatctccatgtaccaatattttggggtccagcccaattcctgtcccttcagtgaagccttatttaattttaccaataaataatagctctcttttttg

SEQ ID NO: 969997 - DNA, 120 bp, Artificial Sequence
  ENSG00000267374_37 (sequence is synthesized)
agctgttgcaactgttctgctgatttctatcatggaaaatatccctgcaagcagtaaccactatttgaatggtgaaatcagcagcacagcaaacatggttcttaatgaggaagtcgggac

SEQ ID NO: 969998 - DNA, 120 bp, Artificial Sequence
  ENSG00000267374_38 (sequence is synthesized)
gattttttaaaattgtaagtcaagttccaagttctgtgaatctactgattttaagtctgtgactcaaactgtgccacaaggagtgcgtcttttctgtttccctaggctgctaacaatcta

SEQ ID NO: 969999 - DNA, 120 bp, Artificial Sequence
  ENSG00000267374_39 (sequence is synthesized)
aattcctcacatcatatctccctatcatctctaaattgtacacctgcctggccaatgtctttactttcctagaatacgaaaggtatttgtttaagctttatgaaagggaagaagaaagga

SEQ ID NO: 970000 - DNA, 120 bp, Artificial Sequence
  ENSG00000267374_40 (sequence is synthesized)
aagaaagaaggaaggaaggaaaaaggaagaaatgagaaagagagagaaagaaagaaagcaagaaagaaagagaaagaaagcaagaaagaaagagaaagaaagaaagagaaagaaagaaaa

SEQ ID NO: 970001 - DNA, 120 bp, Artificial Sequence
  ENSG00000267374_41 (sequence is synthesized)
aatcttgaatttctattatagattcatgtttatatatgtgttatatttgtttgtgcaataacctcatgataattatttttctactggtttcatgttcctgaatgacatactagtagtaac

SEQ ID NO: 970002 - DNA, 120 bp, Artificial Sequence
  ENSG00000267374_42 (sequence is synthesized)
aatacctcaagctataaagtatatttttaaatatatatgattgtgattttttgaattttttttcttttaataattggattctgttaccctaaaaagaatctagttttcaggcaagctttt

SEQ ID NO: 970003 - DNA, 120 bp, Artificial Sequence
  ENSG00000267374_43 (sequence is synthesized)
atttaatctcttttggctttatagacaggaatatatttctgcttccattttccaaagtgtttgcttgtgaaacataggatttggaaaatctgagtacaaaattatcaggaagaagtaaaa

SEQ ID NO: 970004 - DNA, 120 bp, Artificial Sequence
  ENSG00000267374_44 (sequence is synthesized)
atctctgataatatatcacttaatcatgatttctacatgaattaatgctgatcctaggcttcaagaaaacaaagatttttgtcaggttttaaaataatacattggtggtgtcataaacaa

SEQ ID NO: 970005 - DNA, 120 bp, Artificial Sequence
  ENSG00000267374_45 (sequence is synthesized)
cctctccactgagggctgatttcatcactcaacaaaattctccgaattcaccatccttcagttcatccacatgacctcattcctcttgggcaccggacaagaatttgggatgcaccaaat

SEQ ID NO: 970006 - DNA, 120 bp, Artificial Sequence
  ENSG00000267374_46 (sequence is synthesized)
caaatgatcttgctttttaagccaatattatccttttaagataattttgataatgtagatatcgttcatcgtgttttgatataagttttaatcaggcaatatttcaattagatagaagta

SEQ ID NO: 970007 - DNA, 120 bp, Artificial Sequence
  ENSG00000267374_47 (sequence is synthesized)
tgtacaaaagtaataaactatatctctgaatgaacaacttggtattaacacatggaaatctttttgctgtattttagatttctctcttccttactttttctttctttaatactaggaaac

SEQ ID NO: 970008 - DNA, 120 bp, Artificial Sequence
  ENSG00000267374_48 (sequence is synthesized)
attccctagaagtaaccattactctgaagttaatatgtgtcatttccatgcatgtttttacaattttattattaatgtatcattctgcaaataatataatttatgagtatttatagtatg

SEQ ID NO: 970009 - DNA, 120 bp, Artificial Sequence
  ENSG00000267374_49 (sequence is synthesized)
ttatcaaattcaactatatttaaaatattcatatacacaacaagttggaaagaattttacagtgagcacctacataccttttacttagatttatcaacattttgctattctggctttatt

SEQ ID NO: 970010 - DNA, 120 bp, Artificial Sequence
  ENSG00000267374_50 (sequence is synthesized)
acacacccattaatacatattcgtttttggatgcatctcagactaaattgcagaaatcacttacatgttcttttgcaattgcatttttgctcattatatttagttgatttgttttaactg

SEQ ID NO: 970011 - DNA, 120 bp, Artificial Sequence
  ENSG00000267374_51 (sequence is synthesized)
ttagtaagtaattgattaaaacagtaaacatttacctatatctactagtggttcgaaattatatggactataatttttcgctgttattaataatagtgaaataaatataatttcacgtca

SEQ ID NO: 970012 - DNA, 120 bp, Artificial Sequence
  ENSG00000267374_52 (sequence is synthesized)
agaggatcaggctgacatcttcaggaggcatatggaggtaatggttaactttgctacagtgaagaccaaggtaaattgggtgcactgaagagaaaaacctgaccacttctgcagctgtgc

SEQ ID NO: 970013 - DNA, 120 bp, Artificial Sequence
  ENSG00000267374_53 (sequence is synthesized)
gttgcaactgttctgctgctatagttcctgtggcctcctttgcactcctgtttcaatctgaggacacacacacccacccgggaaccacaccctggacgctacctgctgcctgtactccaa

SEQ ID NO: 970014 - DNA, 120 bp, Artificial Sequence
  ENSG00000267374_54 (sequence is synthesized)
tagtaattttcaggctggtttgctatgcaattgagttgttattttggggtgtttccacctgtagagtgaaactgcagtgagcccagctaaggaaaacgtaggaaagtatatatatccttg

SEQ ID NO: 970015 - DNA, 120 bp, Artificial Sequence
  ENSG00000267374_55 (sequence is synthesized)
agatggctatcttactctccatcccatgtattgataaatttcctcagcctttttaaagaaaaaaacaaaacataacaaaacaaagcagtaatctacaatttgttcttttattttgactga

SEQ ID NO: 970016 - DNA, 120 bp, Artificial Sequence
  ENSG00000267374_56 (sequence is synthesized)
tttaattttaaatctgaaatcaacaccatcctgtgtgtctatttgtattttctccccttttatggatattaataagtgggtcatctgaatgtcctaggaaaaagtaaaatgaaaaaattt

SEQ ID NO: 970017 - DNA, 120 bp, Artificial Sequence
  ENSG00000267374_57 (sequence is synthesized)
tctttatcttgattcaaatagatttctatccaatacaaatattggcaaaataaatgaagcaaagtaaatgcagaatggactgaggtggaaatgtaaatcagtccatgttactcacctcgg

SEQ ID NO: 970018 - DNA, 120 bp, Artificial Sequence
  ENSG00000267374_58 (sequence is synthesized)
agaagcagaagtacgatttactattgttgcttgcttacttactcttatcaatttctatgagagcagcatatgatcccctgttgaagacagacaagtacatctttctggtggctcctagac

SEQ ID NO: 970019 - DNA, 120 bp, Artificial Sequence
  ENSG00000267374_59 (sequence is synthesized)
aatcagtaccgatttcttttctttcctccaactccctcttgctcccatgacccagtttcttgtccaaaggtaggaatcgtaagagtgtacagaaataagtcacatgcagaccatattgaa

SEQ ID NO: 970020 - DNA, 120 bp, Artificial Sequence
  ENSG00000267374_60 (sequence is synthesized)
ccacatactagcagcaatgttatttatgaacaacaaaattatagaaaaagtgagaaaaagtcaattatcaattattttctgatgaacaacaacaaagacaaaaaaatggtgggattgatt

SEQ ID NO: 970021 - DNA, 120 bp, Artificial Sequence
  ENSG00000267374_61 (sequence is synthesized)
tattttcccctgacagaattgattgtttctttaggttctatgcaacttgcagactcactgagggtgaatggaatgtgctgaaaattcagcctgacttggcagctccaagggacacacctc

SEQ ID NO: 970022 - DNA, 120 bp, Artificial Sequence
  ENSG00000267374_62 (sequence is synthesized)
aatgtagagaaagcaggaattagagatgaggttttttaatccctgtctcagttttgccttatagatgaaccacaatgagtctcaagcaatctgagttgaagtaagttggtattaagcagg

SEQ ID NO: 970023 - DNA, 120 bp, Artificial Sequence
  ENSG00000267374_63 (sequence is synthesized)
agtggtttggccatgagtataaaaatctagttgtgtcttaccagtggatgaggaggcaacagcctgtgctacctcatttgggagagggtgagcaatacctcattctgaaaggtgacatgt

SEQ ID NO: 970024 - DNA, 120 bp, Artificial Sequence
  ENSG00000267374_64 (sequence is synthesized)
attccatcaatggaaatcactgagttcatactccaccattagtggctttaccattggtcttcctcaaggctgtcagagaactagtaacttgtatggaaaggagtatgcaggtatagacag

SEQ ID NO: 970025 - DNA, 120 bp, Artificial Sequence
  ENSG00000267374_65 (sequence is synthesized)
acagaagaagggtttgaaaaagggagtcggaggatattaaaaacaaatcttatcagtcacattttcatgtaggcctgccttgcaggaaccagttacaaaaattaaaaaaaaaaaaaaaaa

SEQ ID NO: 970026 - DNA, 120 bp, Artificial Sequence
  ENSG00000267374_66 (sequence is synthesized)
tgcctgcatcatgaagcctcaacagaaactcttgaacaatgaggtttgagaagcttctgcgtctgtgaccatatcaatggcctgggaggctggcacacacagagggcatggaagtgctgt

SEQ ID NO: 970027 - DNA, 120 bp, Artificial Sequence
  ENSG00000267374_67 (sequence is synthesized)
gtactcctccccatacatttccctatacatcttttccttttggctgcttgtgagttgtattcttttttgttgttgttgtttttaagatgggggtcttgctctgttgccagactggagtgc

SEQ ID NO: 970028 - DNA, 120 bp, Artificial Sequence
  ENSG00000267374_68 (sequence is synthesized)
aagttgtattctttataacaaaactgtaatcttaaatatagcactttcccaagttctgtgaattgtgctagtgaattattgaactttagggtgaaatgttttgggaaccccaaatttgca

SEQ ID NO: 970029 - DNA, 120 bp, Artificial Sequence
  ENSG00000267374_69 (sequence is synthesized)
gtcttttggaaaaaaagtgaaggtaacttggagataccgaaaacttgcaactgaagtctgaagtgggagcagttttgtgggactgagcccttaaccggtagggtctccactaaccctgga

SEQ ID NO: 970030 - DNA, 120 bp, Artificial Sequence
  ENSG00000267374_70 (sequence is synthesized)
tacttcatatcagaattaaaggactttgtctttaacttgtagggtctatactaacttcaggttaaactgaattgtaggacatccctttggtgtcagaaagttgttgtggaaaagatgcaa

SEQ ID NO: 970031 - DNA, 120 bp, Artificial Sequence
  ENSG00000267374_71 (sequence is synthesized)
tttttaagatattttgatatgttaaaagaacattgaaaataagaaaaagacattgaatttttaaaaattattgatttactctgaaaatctttgcttggggacatcacagggacttatact

SEQ ID NO: 970032 - DNA, 120 bp, Artificial Sequence
  ENSG00000267374_72 (sequence is synthesized)
attttatacacactttaggaaatcatttgataaaaactgcttccatatacttaatattctgtgtctaccctatgttaggcacttgtgaataaagcaagaggaataaaatgtttaaatgca

SEQ ID NO: 970033 - DNA, 120 bp, Artificial Sequence
  ENSG00000267374_73 (sequence is synthesized)
ctttcacactggccttttgcctttgctggcagagggcagccatctcacaatgaggcaaacggtccactgagctgataacacactgtgtctgtggacaacagagttaagagggcaatgtaa

SEQ ID NO: 970034 - DNA, 120 bp, Artificial Sequence
  ENSG00000267374_74 (sequence is synthesized)
caagtcctctggggccttgggatcacaggcacccacccacacctggatgctgccatggggcctgcacagagtttgctcctgctgtcgctaaagctgccagccccgttcctgcactcgcct

SEQ ID NO: 970035 - DNA, 120 bp, Artificial Sequence
  ENSG00000267374_75 (sequence is synthesized)
cttctttcttttcacttcctttttttttttcttgattagaattctagaatttctacttaattcaagagattcctaccatctgaaatgcttggtttcaaagggtgagaatagtaacccaca

SEQ ID NO: 970036 - DNA, 120 bp, Artificial Sequence
  ENSG00000267374_76 (sequence is synthesized)
cattttttttcaatacaagggaaataatagaaagatttgtgccttacatttcttcccattcttcctacgactatatgttattcacaaaagcacatggcacttgaattctaacaaaattgt

SEQ ID NO: 970037 - DNA, 120 bp, Artificial Sequence
  ENSG00000267374_77 (sequence is synthesized)
attactgttaaagtgagcttctcaaatgcactctgcatgtaacactccaacaattcatgatggatttgctgccttaaaaataaaataatcttaataatttttaaaaccaataagcagaaa

SEQ ID NO: 970038 - DNA, 120 bp, Artificial Sequence
  ENSG00000267374_78 (sequence is synthesized)
agctgttgcaactgttctgctggtatcagatggtctttgagctcagaaaactcaagcatggcgattttaagccaagcacagtgagtagccgcatacaaagatggaagcaaatctggaaga

SEQ ID NO: 970039 - DNA, 120 bp, Artificial Sequence
  ENSG00000267374_79 (sequence is synthesized)
aaaccaccttaaaggcagcaatcctcagcaggcccacggtagctgtttagctaagagaggatgagagacactgggcctcactacacatcatttccaggaagtcgggactccaaaaatgag

SEQ ID NO: 970040 - DNA, 120 bp, Artificial Sequence
  ENSG00000267374_80 (sequence is synthesized)
ttacaccagatctgtctacttctcttcacctccactgatgaccaattcagccatcatcactcatctctcagctgggcaacttcaagaccatttcaaccggtctccagatttctaatcttg

SEQ ID NO: 970041 - DNA, 120 bp, Artificial Sequence
  ENSG00000267374_81 (sequence is synthesized)
acaacctaccagccattcaccatagcagcagttacttagaaacatgtaacttccctgcctgaaccttaccaatgacttcttatttcccatagaataaaatccaatgccatattttgcgca

SEQ ID NO: 970042 - DNA, 120 bp, Artificial Sequence
  ENSG00000267374_82 (sequence is synthesized)
ggaaagactgtgtgtaaaaggcatattgactccaccttttacagattggaaagattggtgcaattctgttccaacatattactttttcaaaggatcattttatagccattttctttttct

SEQ ID NO: 970043 - DNA, 120 bp, Artificial Sequence
  ENSG00000267374_83 (sequence is synthesized)
attacttcattattcttgcttctttatttagactctttgccatgcaaatattatttaagccttgctcagctaatgtagtgatttttaaatgttttaatgttccatttgacattcccgctg

SEQ ID NO: 970044 - DNA, 120 bp, Artificial Sequence
  ENSG00000267374_84 (sequence is synthesized)
gtcccatttcttgtgctgaaaatgtattaattcccatatcaatatatatgtatatacattttttgcccatcagaggtacaaaaagatattttctgtgcatacattagagaagttattaca

SEQ ID NO: 970045 - DNA, 120 bp, Artificial Sequence
  ENSG00000267374_85 (sequence is synthesized)
ggtagatgatagaagaagagagagaaagcagggagataaaaaggcaaataagaaattgagaaaaatataaaccaaaagcaaatgaaagttagaatttcaaaatatggaaaaagcaagaaa

SEQ ID NO: 970046 - DNA, 120 bp, Artificial Sequence
  ENSG00000267374_86 (sequence is synthesized)
gtagttctcacccattgcagctgaggcatcacacctgtaatgggattaacaagatgataatatatcttttgccaagaccacatactagcaggtaagtcaactgatgctgcatgtcattca

SEQ ID NO: 970047 - DNA, 120 bp, Artificial Sequence
  ENSG00000267374_87 (sequence is synthesized)
aacccctgcattcatgtctgcaatggtcctttgcttactggaaatggacagatcttttgcaaagtcctcacataatcttaattactacatagaaacactaaacatcgaacaaaatcaaaa

SEQ ID NO: 970048 - DNA, 120 bp, Artificial Sequence
  ENSG00000267379_0 (sequence is synthesized)
ttctgtatgcatgtgtttaattttaagtgtcaacactgaaaaattttaacagataaaaacacattacacaacgtctacaaccttcacaacagtgagaacctcctgcccggccaggagggt

SEQ ID NO: 970049 - DNA, 120 bp, Artificial Sequence
  ENSG00000267379_1 (sequence is synthesized)
ccccatcggaggactcaaggtgggagaaggcgaaaaggatgggggagttgagttccttggtgttgttgtggctcagaaagatggagttgacggcagagaggcgtctgagttggacaccac

SEQ ID NO: 970050 - DNA, 120 bp, Artificial Sequence
  ENSG00000267378_0 (sequence is synthesized)
tttcttcctggatctctgaccttccatatggaatccttttccttctgcctaaagaactccctttatctcctggagtgttgatctatctgctggtgccgaactgctggaaccaaggaggtc

SEQ ID NO: 970051 - DNA, 120 bp, Artificial Sequence
  ENSG00000267378_1 (sequence is synthesized)
ctcagatctggccacatgagaaagcagcaaggtgcaggaaaacagccacagacattacagtccaccagaccagggtccgcgaccatttgtgcctgtcactcactcatggcttcggccaaa

SEQ ID NO: 970052 - DNA, 120 bp, Artificial Sequence
  ENSG00000267378_2 (sequence is synthesized)
caacatttctctaagcttcaagcaagatcttgacacagacatggactgccatgcattactgggaatgatgaccacatcaaaggtgcaaggatgtggattaagtgtcagctgtagctctca

SEQ ID NO: 970053 - DNA, 120 bp, Artificial Sequence
  ENSG00000267378_3 (sequence is synthesized)
ttcaggcttcacagccaccgtgtggggcaggtgggaccacacctggcaggtttcacatgggaactccgagagcatattaggttatgggcaccattagaactgaaaggattattttcaagt

SEQ ID NO: 970054 - DNA, 80 bp, Artificial Sequence
  ENSG00000224128_0 (sequence is synthesized)
cagggctggctccggagcgggctctgggtcccgcaggctccagcaagcccgcgccccgcccggcgtccctgcgaggggcc

SEQ ID NO: 970055 - DNA, 120 bp, Artificial Sequence
  ENSG00000224128_1 (sequence is synthesized)
cagcctcgtcctgaaatcgtgcgattgtgagctagaagccttctgggtcactcataaaccaaagagaaaataaggaattccttggggcttaatacaaatccttgagagttctagcccaga

SEQ ID NO: 970056 - DNA, 120 bp, Artificial Sequence
  ENSG00000224128_2 (sequence is synthesized)
tgcagcctagaaatgtgaagatgaaggaggtaggtagtagggttgttattaatcctaggggaaaccctccactatgggattctgaaatcagcagataaatgctgcagcccccagacttgt

SEQ ID NO: 970057 - DNA, 120 bp, Artificial Sequence
  ENSG00000224122_0 (sequence is synthesized)
ggaaacgaggctggaaggaaaatgttggggagcttggtggagtctgggtttagggctagcccaggagggaacgagcctgaacttcaggggtgagtttctttcagggacatcgagcgaggc

SEQ ID NO: 970058 - DNA, 120 bp, Artificial Sequence
  ENSG00000224122_1 (sequence is synthesized)
aggtgttccaccccactttcttgtttgaggggagaaggaaaccaaagccagtagaaatggaatttatggcctccgtgctctcagagggagaaaaaaattctcactcatcagcctaaagag

SEQ ID NO: 970059 - DNA, 120 bp, Artificial Sequence
  ENSG00000224122_2 (sequence is synthesized)
aaaccctgtcttatcccagattaccaccatgggatttaaaattcagtgagaagactgcttgggaaatactgtctccgaactgccggtacagacactgcccattggtacaatatttttagg

SEQ ID NO: 970060 - DNA, 120 bp, Artificial Sequence
  ENSG00000224122_3 (sequence is synthesized)
tcatctgtcaattgccatgtttgcatttctttcatgcaatacaagttgaaatcataatgaatttcttgagtttcaggaatatctcaaaataaacttcttcatcctcaacaaatgattaaa

SEQ ID NO: 970061 - DNA, 120 bp, Artificial Sequence
  ENSG00000224122_4 (sequence is synthesized)
accgtgaaaaccaccgagaggcacaggcacagcacacggacacaacattgactctggggaggtagttctcgcctcaattcgctcatgcaaagggcctggaacccaccggaggggcgtggc

SEQ ID NO: 970062 - DNA, 120 bp, Artificial Sequence
  ENSG00000224127_0 (sequence is synthesized)
agattggggtggactgacttttcaaaaagctaacttgtgcgtgggaaccagaaagacttgtgtttttcatcaaatgcagaaatcggtattgggggtggtggagaaattcacataatgcat

SEQ ID NO: 970063 - DNA, 120 bp, Artificial Sequence
  ENSG00000224127_1 (sequence is synthesized)
tttccatgaaatagcatcgttgtggagaccgctcttccgaatggaaagtcagagtcgtgcagaacattggcgccatcaggtcgtgtatagagcaggatttcgttgaaagtggaattaaac

SEQ ID NO: 970064 - DNA, 120 bp, Artificial Sequence
  ENSG00000224127_2 (sequence is synthesized)
tcgatctccgtacagactgaggtccaaaggtctgcgctcacttctggaactttccttttgggccttgaccgaactcctgttattgtgtgcagtagcagaggctgcgctgcgtggttcagt

SEQ ID NO: 970065 - DNA, 120 bp, Artificial Sequence
  ENSG00000224127_3 (sequence is synthesized)
ttgtgcaaaggctatttattgtttctcatttactgaccactcgggagaagcctttagcaatagtttttcccgacacaaacttgaataaagtcgacccctgcagttcttcctgaggctcta

SEQ ID NO: 970066 - DNA, 120 bp, Artificial Sequence
  ENSG00000224127_4 (sequence is synthesized)
caagcttcctggatgcaggaaccatgtgctgttctgacgacgctccgaaacctagttcagtgcctggcactagacaataaaaaattgctttctgaatgaaagtatatgctggcaggcgca

SEQ ID NO: 970067 - DNA, 120 bp, Artificial Sequence
  ENSG00000261790_0 (sequence is synthesized)
agacccggggaggaggtaggggtagaggcgaccggcggtgacctctcaaggtccctctccggcgccgccggcccctcctccgcccgcaggtgggcgcgccctgcccggtgacgtcacccc

SEQ ID NO: 970068 - DNA, 120 bp, Artificial Sequence
  ENSG00000261790_1 (sequence is synthesized)
aacctgaggccggcgggggaggggccggcgaggatgagagaccccagcaggaaatgcagctgagcacagagggatggaacaagccctgtctactgctttattaagccccagcagaaaata

SEQ ID NO: 970069 - DNA, 120 bp, Artificial Sequence
  ENSG00000261790_2 (sequence is synthesized)
tactgaagccaggttctcagtcacttcagcgtttcatttgggcttcaaactctgatgaagtgagccccacgaatcccctgtggacaggcatgacacaacgctggcaggcatgtgccaggc

SEQ ID NO: 970070 - DNA, 120 bp, Artificial Sequence
  ENSG00000261790_3 (sequence is synthesized)
agggagagggtaggatggctggtggaccctcagaaagacccgacctgagctttccctgtagggactgagcagagtggagaattgagccccctaaagtgagcagcacagagccatgggggg

SEQ ID NO: 970071 - DNA, 120 bp, Artificial Sequence
  ENSG00000261790_4 (sequence is synthesized)
caggggcatccctggctgcatagtgggaaggcaatggcctggccgccagggacaggcacagggatgcccagccaggcccgctgtcttcccgtgtgaggagtgaggcgccagggtatgcgg

SEQ ID NO: 970072 - DNA, 120 bp, Artificial Sequence
  ENSG00000261790_5 (sequence is synthesized)
tgggcaggaagctacatcctgaatgtcaaggggcagcccaggctgctcctccttccctcccctgcagttcagctgcagctccttggggtctccactgaggagggggccagtgggtacctg

SEQ ID NO: 970073 - DNA, 120 bp, Artificial Sequence
  ENSG00000261790_6 (sequence is synthesized)
ctgtgggcacctccacttctgctccaaacctaagaggggcagggcaggtccccacaggcagtgtcctggggaccacccaactgagacacaacaggctctggctgtgatgcactttaatga

SEQ ID NO: 970074 - DNA, 120 bp, Artificial Sequence
  ENSG00000261790_7 (sequence is synthesized)
gtgccctgcccctatccaaccatgcctggctagctgtcccatgagctctggctgaccaccctctagtcacaggagccatccttccagccgtcgcgccagcgctcatccacttttgagcag

SEQ ID NO: 970075 - DNA, 120 bp, Artificial Sequence
  ENSG00000261790_8 (sequence is synthesized)
tcgaagtcaggcttgcccagcttgcggttcacttcattgtgcaggtggcacagccactgtgtgaagcatgcccgggtgcgggtgtctgggtggttcctgcacagcctgtgtagggagagc

SEQ ID NO: 970076 - DNA, 120 bp, Artificial Sequence
  ENSG00000261790_9 (sequence is synthesized)
aggtaaagaatgagaggacgcagcggctccactgcccctgccagttccctgtctgctgtcaaggaaggagagctggggcactgctgtgaactacacctgggagtgcccttatgctccaag

SEQ ID NO: 970077 - DNA, 120 bp, Artificial Sequence
  ENSG00000261790_10 (sequence is synthesized)
gtacaggcactcccagaacagggctgaccctgcagctccccgggtgtgatgaactcccagggctgcgcaaacacccacctggacagcttggcaaactccaacgaggcctcaaggcaacac

SEQ ID NO: 970078 - DNA, 120 bp, Artificial Sequence
  ENSG00000261790_11 (sequence is synthesized)
attacagcacagacctggcaattttataagctcctaacacccaggaagcggcatccagtgtccctggcctcaggcagagtgtggcctgggtggggctgggcacagccttgtaactgaaaa

SEQ ID NO: 970079 - DNA, 120 bp, Artificial Sequence
  ENSG00000261790_12 (sequence is synthesized)
ctggacttgtttcttagcatctgagggcaggccctggtgcgtcagttcagcaagagacttcattctaactgaccagccttatagcaacaatggcggctctaccctatacatctggcctag

SEQ ID NO: 970080 - DNA, 120 bp, Artificial Sequence
  ENSG00000261790_13 (sequence is synthesized)
aaacacctgcaagggccagtgctggctcttggatccctcagtgaggaagagatggctcttgggagcaaaagcagtggatttccaagattttaaaaccagaagtcctactctagaagtcag

SEQ ID NO: 970081 - DNA, 120 bp, Artificial Sequence
  ENSG00000261790_14 (sequence is synthesized)
gcaaagtggagtcttccctaacttgcgggaaaccgccttcagtgccagacaaggcagggaatcccttcctggaagccctgtggctgtggcaggagcagtacccagcagcagatcccgaca

SEQ ID NO: 970082 - DNA, 120 bp, Artificial Sequence
  ENSG00000261790_15 (sequence is synthesized)
gcttggcttctgagacgagaggaggaggctcagatagccccagtcctcacctgttggaggtccctgctcctcagcaaacttctgccacctctgcatccgtttctctacgttccccgctat

SEQ ID NO: 970083 - DNA, 120 bp, Artificial Sequence
  ENSG00000261790_16 (sequence is synthesized)
aacgtcagccaggagccccaggcccaggctccagtgcaaagctctgctgcgtgcaaacacatcttacctttttcttaggtcttcagcacactcctcacaggggtaaaacttagaaaataa

SEQ ID NO: 970084 - DNA, 120 bp, Artificial Sequence
  ENSG00000261790_17 (sequence is synthesized)
ggcccccctgccccaaccaatcaacgtccttgctgttcctggctcactctcaccctgtggtctctctctcctgaggaaccaggaccccagcaggaaatgcagctgagcacagagggatgg

SEQ ID NO: 970085 - DNA, 120 bp, Artificial Sequence
  ENSG00000261790_18 (sequence is synthesized)
aacctgaggccggcgggggaggggccggcgaggatgagacgccaagcgcttgacctgtgtagtggcggagactgttaccaccctgtacttcagataataagcaacccaggtccctgctac

SEQ ID NO: 970086 - DNA, 120 bp, Artificial Sequence
  ENSG00000261795_0 (sequence is synthesized)
aggccagccactcaggatggggccctgtgccctgctcacatgggctgtgctggtcttcaaaccggcctgagggtcagcagaacatttgcaggtggagatggaaggagaaacagcatccgg

SEQ ID NO: 970087 - DNA, 120 bp, Artificial Sequence
  ENSG00000261795_1 (sequence is synthesized)
tcagcacaaaccgtaaacagcaggtgctcgggtgtggagctggagccatgtgtctctgtggggaggaacaggggtttgaggggaacatggggactggggctcaaggcacctggatttaat

SEQ ID NO: 970088 - DNA, 120 bp, Artificial Sequence
  ENSG00000261795_2 (sequence is synthesized)
cttagagacgaaggggtggggagggagtgcccacgtgggatctgagaggagactcgctggcagagactgggcagatgtgagccctccctgcgatggtcagccctgctcctgatggccatg

SEQ ID NO: 970089 - DNA, 120 bp, Artificial Sequence
  ENSG00000261795_3 (sequence is synthesized)
gaaggaacatttttctccaccccactaaggtgggctttgaccacgtggacgctggtggatgtccgcaggccctgcaatgtgttccagggaatcggcttcaggaaaaacatgcctggagct

SEQ ID NO: 970090 - DNA, 120 bp, Artificial Sequence
  ENSG00000261795_4 (sequence is synthesized)
cagcagagtgaggggcacacagagcagacctgacttgagcctcagcctggacccccacctgacactcagagccctggggagagaggccgtggaaccgcccggcagcatcactgcctcagc

SEQ ID NO: 970091 - DNA, 120 bp, Artificial Sequence
  ENSG00000261795_5 (sequence is synthesized)
acctgccaagatggaaatgggcacgttcaggtcagataggaggctggggcacactcctccctcgcccccgaccacccaccctccaagccttagtttagatgttccctcctcagatcagca

SEQ ID NO: 970092 - DNA, 120 bp, Artificial Sequence
  ENSG00000261795_6 (sequence is synthesized)
ttctctgccctgagccacggtggcgcctcactccggggcctgcgtgcctcctgcctgtctgagtccaacctcagcttcccagccagcagctcaggaacccacaaggtcgtgcagctgccg

SEQ ID NO: 970093 - DNA, 120 bp, Artificial Sequence
  ENSG00000261795_7 (sequence is synthesized)
agccgaaaaacgaatgagcagctctcgcgtgcaggtcggctgggtgggtgtacggcttcatggcgaggcatctggagtgagggaggcttgcttctcctgcggggcccttgctttgtgtgt

SEQ ID NO: 970094 - DNA, 120 bp, Artificial Sequence
  ENSG00000261795_8 (sequence is synthesized)
ctggacaggcgccgtcctcgtggctgcctgggactggggcctctctccatcatcacagtccaggaagaggggtggccagtcctagagcttgagctgagctgcccttggtggctgtggaga

SEQ ID NO: 970095 - DNA, 120 bp, Artificial Sequence
  ENSG00000261795_9 (sequence is synthesized)
tgaggaactgatgttgatggtgcagtcgggaagggagatgtgacggatgaaaaggagaccccgatttagcaggaagtgtggaattctgtgatcctgtgctgctggtccctgcagaggttt

SEQ ID NO: 970096 - DNA, 120 bp, Artificial Sequence
  ENSG00000261795_10 (sequence is synthesized)
tggcagtccccagacactgctgtcttgagaggaagaggagtccaggcagccacagcagaacgctgacccctcactggtctgctgactcctcactggtctgctgaccacacagcacggcct

SEQ ID NO: 970097 - DNA, 120 bp, Artificial Sequence
  ENSG00000261795_11 (sequence is synthesized)
tggtctccaggctggccccctggagtcctcaaccagccccagagggaaaggaggtttgccagagggaccttgcagccacacgtgtggccccaggatggcaaggacaaggcccctggcgag

SEQ ID NO: 970098 - DNA, 120 bp, Artificial Sequence
  ENSG00000261795_12 (sequence is synthesized)
gtggtgctcattccataaggagtggttagagtcactcagcaaatccatcccacgcctgccacgggcttccccctcccctgggcaccaccggccaccctaagctcagagacgtggtggaac

SEQ ID NO: 970099 - DNA, 120 bp, Artificial Sequence
  ENSG00000261795_13 (sequence is synthesized)
gaaccaagcagatcgtgtgaaactgcaggccgatgtgatacggagaccagggtgcaacttgctctgttttcaagaggagagactttggagaactgttataaaaaatggttgctgtgtctg

SEQ ID NO: 970100 - DNA, 120 bp, Artificial Sequence
  ENSG00000261795_14 (sequence is synthesized)
caggctcacacgggaactctgctgtaaatatttctgtgccaaggcagcacagtgttgcatgggggcctgagggcctgtgggtttgattcatcctttctaggatgtctgcaacatttcttg

SEQ ID NO: 970101 - DNA, 120 bp, Artificial Sequence
  ENSG00000261795_15 (sequence is synthesized)
gatgtgaaagtttgttctgagcacgacagttggaaaatcaccgtccgtgtcctctgagctaggactcacctgctgcagggaaggagctttgcttagcagaccacgtcacactcccaggat

SEQ ID NO: 970102 - DNA, 120 bp, Artificial Sequence
  ENSG00000261795_16 (sequence is synthesized)
gatgaagaggggatctcctgcagggtcctggggacaaaccctgctggcatctggccatgggggaaagagcatccggagtgaaggggacgacaatagtcaccacagtggctggagatgagc

SEQ ID NO: 970103 - DNA, 120 bp, Artificial Sequence
  ENSG00000261795_17 (sequence is synthesized)
ccacacggtcgtcttccccagcggagacgttccctcccgtaggagggtgggtcagaggatacagaaggcgccggcagtgaccaggagcaatgtgcagcctcctctcccccagctcctgga

SEQ ID NO: 970104 - DNA, 120 bp, Artificial Sequence
  ENSG00000261795_18 (sequence is synthesized)
agcagattccgtccgggcacaggaagctttcccggtaattggctaacgcgccacatgactgctgtctgccaggctctaggaggtgagaattcctcctcaaattaacctcatacccagaaa

SEQ ID NO: 970105 - DNA, 120 bp, Artificial Sequence
  ENSG00000261795_19 (sequence is synthesized)
cccatcatcgccacttaccaggatgggaaagcacagtgtcctctaaagaaacttacattcaagctgatgatcatactcagacagctaattaagagctaattattcaaatgacggatcaaa

SEQ ID NO: 970106 - DNA, 120 bp, Artificial Sequence
  ENSG00000261795_20 (sequence is synthesized)
gaaccgtgcatgcacccagctttccccggagactcgggtcccctggcacttgcatcctgagtcggggaagaatcctcagccacataagtgaggacacatgtttgccaagaaacctcaagt

SEQ ID NO: 970107 - DNA, 76 bp, Artificial Sequence
  ENSG00000261795_21 (sequence is synthesized)
ggagtccttgcaaatggtcccaggcttcatgagaagtccgtgctggtgacagttggaacgtgttactctggggata

SEQ ID NO: 970108 - DNA, 120 bp, Artificial Sequence
  ENSG00000261795_22 (sequence is synthesized)
tccgtgctggtgacagttggaacgtgttactctggggatagcctaatcactacgaaattaattttctgagctcctgagaaacttgccttcctaaaaaccaagatggatgcaaatgaacaa

SEQ ID NO: 970109 - DNA, 120 bp, Artificial Sequence
  ENSG00000261795_23 (sequence is synthesized)
ggactgagcagcccgaagcgggtccatgggggtggcagcggcacccctaactctggccgggtgaggggccccgtccaggcagcctcagtccaggctctaagcaaacgccgtggcccacag

SEQ ID NO: 970110 - DNA, 120 bp, Artificial Sequence
  ENSG00000261795_24 (sequence is synthesized)
gtgctgcttctgggatggcgtcgggacactcctgcgggggtagcagagagctcggcccaccgactagccgctctgcccgctgacctgagtgcttctccgacctccgcagtggacgttcac

SEQ ID NO: 970111 - DNA, 120 bp, Artificial Sequence
  ENSG00000261795_25 (sequence is synthesized)
ctctaaaccttccttcatgtaaatgtttggttcccatagctgaggcaaatgcccttgaaaatgcttccatcaggaaacattcagacacctaaatatatactttgtatcaagtttaatgaa

SEQ ID NO: 970112 - DNA, 76 bp, Artificial Sequence
  ENSG00000264546_0 (sequence is synthesized)
tcttcaacttctgatctcgcctgagccaccgcacccagcctcaaatcataaacttttttttgttttttgagacgaa

SEQ ID NO: 970113 - DNA, 72 bp, Artificial Sequence
  ENSG00000264546_1 (sequence is synthesized)
tcccaaagtgctgggattatacgcctgagccaccgcacccagcctcaaatcataaacttttttttacacaat

SEQ ID NO: 970114 - DNA, 89 bp, Artificial Sequence
  ENSG00000264546_2 (sequence is synthesized)
agcctcaaatcataaactttttaaaggtttatccctgaccctctaaattaggttatgtgccttgttatatgctcttttagcacttatcc

SEQ ID NO: 970115 - DNA, 120 bp, Artificial Sequence
  ENSG00000264546_3 (sequence is synthesized)
aggttatgtgccttgttatatgctcttttagcacttatcctaattgtgattgtgtatttattatatgattgtttattcaacagtttctttcaacaaatatttaccaagtgtttagtaaat

SEQ ID NO: 970116 - DNA, 120 bp, Artificial Sequence
  ENSG00000264546_4 (sequence is synthesized)
cttgttttggattgtaagcttcattaaggcagagtaaggactgggtctgtggtttctcttaccatgtgtacctagcacctagcacagtgcttagacatagggagtacttaataaatagtc

SEQ ID NO: 970117 - DNA, 120 bp, Artificial Sequence
  ENSG00000264546_5 (sequence is synthesized)
aataatgctgcctatctgatgaggctgttgtgagccttcaatgaaatcgtgtgtaggaagtgctagtttgctcacaggctggtggtaacagtctactgtggtcattgagagcagttattg

SEQ ID NO: 970118 - DNA, 120 bp, Artificial Sequence
  ENSG00000264546_6 (sequence is synthesized)
tggacacaacccccagttctggtcaccccacccactagctctgtgaactcacataggtacttaatatctctgatttttattttatttatttgtaaaatggaactaataattacaaccacc

SEQ ID NO: 970119 - DNA, 120 bp, Artificial Sequence
  ENSG00000264546_7 (sequence is synthesized)
gtgacagagcaagactacatctcaaaagaaaaaaaaaaaaaagtattattgagaatataatataattaacctgaataggttaattatattgtggaacctaaaccgtataaatttaaaatg

SEQ ID NO: 970120 - DNA, 120 bp, Artificial Sequence
  ENSG00000264546_8 (sequence is synthesized)
taattatattgtggaacctaaaccgtataaatttaaaatgccttagaatgcccagtcagcaagtgacagtattagaaatcaacctggattttagaccgctgtgtgttcatggataatgtt

SEQ ID NO: 970121 - DNA, 120 bp, Artificial Sequence
  ENSG00000264546_9 (sequence is synthesized)
tgtgtgtttaggagactattctgaatagtggttcacagtcctttacatgcatcccctgtgcattggatgcttcactagccttttctgactaaagcatatgaaaatacaagtgaaaaaggc

SEQ ID NO: 970122 - DNA, 120 bp, Artificial Sequence
  ENSG00000264546_10 (sequence is synthesized)
aagttattacaggaataacttttcattttctctaattttcatattttaaaaattcatttgtaagcatttgatactttaaacctgtttacaggaacttggtataaaccaccatgtccagcc

SEQ ID NO: 970123 - DNA, 120 bp, Artificial Sequence
  ENSG00000261797_0 (sequence is synthesized)
gtatccaggatccttctactgtgtttctcctccattgcgaagtccttcacttccagcacctgagacattttttgggtatatctacaagtggcatatatcacttctgcccacattcacctg

SEQ ID NO: 970124 - DNA, 120 bp, Artificial Sequence
  ENSG00000261797_1 (sequence is synthesized)
cctaactgcaagtgaggctgtggaatatagtctccctatgtgcccaagcagaagaaacaggattgtgtgactctacaatgtgtgattgctcctggtgaatcaaaaggataaagctgctga

SEQ ID NO: 970125 - DNA, 120 bp, Artificial Sequence
  ENSG00000261797_2 (sequence is synthesized)
ttctgcaatttgataacccaaccatgctgacctcaaagtgtagtcaatccatgaagttcctcccaccacagctcatcctgaacactgcccacctgagtcatcaagaaaggtttaagtaca

SEQ ID NO: 970126 - DNA, 84 bp, Artificial Sequence
  ENSG00000275846_0 (sequence is synthesized)
gatcgcgccactgcactccagcgtgggtggcagagcaagactccgttcagaggtttgtaataatacagatattattcttaggaa

SEQ ID NO: 970127 - DNA, 120 bp, Artificial Sequence
  ENSG00000275846_1 (sequence is synthesized)
acacagaggtttgtaataatacagatattattcttaggaacataagagtgttaattgggtggagagcaggacgcgggactggtgcgttttgcaaaataagtatgagtagaatcaaaggaa

SEQ ID NO: 970128 - DNA, 120 bp, Artificial Sequence
  ENSG00000275846_2 (sequence is synthesized)
agaatttattttcggttcaataaggaagttttcactgatagttcagttgagagagaaaccactggaaggctgttgcatagaaggaaatatattaaatgagaaagacaccagcaagagcag

SEQ ID NO: 970129 - DNA, 120 bp, Artificial Sequence
  ENSG00000275846_3 (sequence is synthesized)
aggggaaaaccatttaatggaaaatctgatacaaatattaagggaaagtaaggggccaaacaccaggacatgaaaccagaaactcctatacattagtgcttgtccaccaaactgcgagcc

SEQ ID NO: 970130 - DNA, 120 bp, Artificial Sequence
  ENSG00000275846_4 (sequence is synthesized)
tgaaattgcgatcatactttatatttgtgttttaaagagtaagttggtgacagattttatttcttttctgcctgtcttcctgcttcctctttttctttctgccttcctctcattctccag

SEQ ID NO: 970131 - DNA, 120 bp, Artificial Sequence
  ENSG00000275846_5 (sequence is synthesized)
tatgtataccttctaatcattttcttctgggttttattctgaatattaggattttctaaatttgttcctgtttttctcattttcttaagcatatgtgggttgacctttgaagtacgatga

SEQ ID NO: 970132 - DNA, 120 bp, Artificial Sequence
  ENSG00000275846_6 (sequence is synthesized)
tgggtagggggtgggtggatgttgtgatattcactaccctatttgtctttctagtcctttcagtgacatttaagcccaagagtcaggttacattaggatgatgtcctcaacttgaactgt

SEQ ID NO: 970133 - DNA, 120 bp, Artificial Sequence
  ENSG00000275846_7 (sequence is synthesized)
tgactcttggatgtcctctattcgtttagtctcccaactaacagttattgagtgtctgctaaaagctaggcacagttctaggcattcggatacatcaacagtacacagcagagactaggg

SEQ ID NO: 970134 - DNA, 120 bp, Artificial Sequence
  ENSG00000275846_8 (sequence is synthesized)
tggatttttcaagctggggagaaacacataataaacacaaataagtaattgtatctatttgaaggtaataagttctatggagcaaagaaaaagtcaagcagggtaaggggaccagggagt

SEQ ID NO: 970135 - DNA, 120 bp, Artificial Sequence
  ENSG00000275846_9 (sequence is synthesized)
gggaggtatgtggtttgcaatattaaacaggcaagttagggtggcctctttgtttatgatattttggaatggcttattggagttttgatatatccatctttgtctttaaaagatgtctct

SEQ ID NO: 970136 - DNA, 120 bp, Artificial Sequence
  ENSG00000275846_10 (sequence is synthesized)
ctgagaacctaggctgaaacagacaaaagaaactggatagatctttcaacagcaattatggggagttttgagaggaggtgctccctgggattggatgaagataccagttaggaaggatgt

SEQ ID NO: 970137 - DNA, 120 bp, Artificial Sequence
  ENSG00000275846_11 (sequence is synthesized)
aaatgtctattatttaggaatagacaaacctcataatctattttacgaccaagaattctgtatttgccattttcagagatttgggttggtggctcaatgtagaatgcccttttctacgga

SEQ ID NO: 970138 - DNA, 120 bp, Artificial Sequence
  ENSG00000275846_12 (sequence is synthesized)
tcactatattccatgttggacttctggttggcttgtttagttttttctttggaattcagtgctaccacacagacgtgtgcaaacacacccacacacacaccattaaacaaacaaaggcca

SEQ ID NO: 970139 - DNA, 120 bp, Artificial Sequence
  ENSG00000275846_13 (sequence is synthesized)
agagtggataaagctgaccaatctagctgctatacttggagaggataatatggatggtgtaaattagaattgtatataagcaataagttagaatatggacagtcttttttttcccccttt

SEQ ID NO: 970140 - DNA, 120 bp, Artificial Sequence
  ENSG00000275846_14 (sequence is synthesized)
tttttttttttaaagaaaatggacattctttcatgattcatcaaaagaatcattggagaaactgatttatcatgtgacctcaagtgtttcttggaaaccttttggaggaaaaagaaatta

SEQ ID NO: 970141 - DNA, 120 bp, Artificial Sequence
  ENSG00000275846_15 (sequence is synthesized)
aacatgctgaactggctgaaaaaaatatagaagaagcactttcagatcatattaaatatatacaaactggaaagaatctatgcacacagaaaacacccaatttgaagtgacttttaaagt

SEQ ID NO: 970142 - DNA, 120 bp, Artificial Sequence
  ENSG00000275846_16 (sequence is synthesized)
cttcagcagagttagcggcatgacaacagaaagaaatgaaagtctggacaatgtttgctccacttaatatggagaaaaaaaatgtcccaaaatagatgatgatctgagccatgcacatga

SEQ ID NO: 970143 - DNA, 120 bp, Artificial Sequence
  ENSG00000275846_17 (sequence is synthesized)
aagttgcatttctacagaaaatgggccaaacgtcttacagaaaatcctgaaagtgctatttgttcttcacaatgccagatgagttcccatgaggaaaaattatgataactggaggtcatc

SEQ ID NO: 970144 - DNA, 120 bp, Artificial Sequence
  ENSG00000275846_18 (sequence is synthesized)
tatgataactggaggtcatcgaatctgcttgctgagaaaaacttagttacataagaaaataaaatgagccaggcattgtggctcatgcctttaatcccagcacttggggaggccaaggtg

SEQ ID NO: 970145 - DNA, 120 bp, Artificial Sequence
  ENSG00000275846_19 (sequence is synthesized)
agttcagaaccatcctggccaacatagtgagacctcatctctattttttaaaaaattaaaaatttgttgtatgcattttatatttattttatattttatatataaaggaacataaaatgc

SEQ ID NO: 970146 - DNA, 120 bp, Artificial Sequence
  ENSG00000275846_20 (sequence is synthesized)
atacaaccaacaaagtatattgaagccaagatcacatgcagcttttgggaagaggatccacatgctcctgttctaacagggccactttggaaaggcccaggacaatatgtttccctggaa

SEQ ID NO: 970147 - DNA, 120 bp, Artificial Sequence
  ENSG00000275846_21 (sequence is synthesized)
tatcagatcactaaggaaggttaagctaggtgggctcagaaatctagaatccatagttgtcctgtgaggacctgaagaaacttaggataaaagacaaatgatttccctagaacgattcca

SEQ ID NO: 970148 - DNA, 120 bp, Artificial Sequence
  ENSG00000275846_22 (sequence is synthesized)
ttctgatccagatcttgctccaaaaagccttttgactttgatagacttgctgaatctgaagacttcagaagtttcagtacaccttaaatggaaataaagtccgatagaaatactacaaag

SEQ ID NO: 970149 - DNA, 120 bp, Artificial Sequence
  ENSG00000275846_23 (sequence is synthesized)
atgtacctgatgagaacaagtgacttgtctcccccacctgaaagtggaatggctggctcaagcatagttctgccatctcacagtcagagtcccaaacattctcatgaactccaggggcat

SEQ ID NO: 970150 - DNA, 120 bp, Artificial Sequence
  ENSG00000275846_24 (sequence is synthesized)
ttcatgttccaaagacttctgtttgctcgcccttctttggagagtatatatggatgttccccaagtgcttgttctcctaagtgatttccaggacctaacacactctccatttacaatgcc

SEQ ID NO: 970151 - DNA, 120 bp, Artificial Sequence
  ENSG00000275846_25 (sequence is synthesized)
aagttattctctcctaattgctgtattcctcccctcccatttgaaaaccctgaaggtagatgtgacccgcacttagggttagctgagctttcaaataaaactcaatccaaagatccaaaa

SEQ ID NO: 970152 - DNA, 120 bp, Artificial Sequence
  ENSG00000275846_26 (sequence is synthesized)
agctcagtgtagggggcaagctctgcaagaccttggccgagtgacttctgctgctttttgctgtggggactctactggatggaccagcacatgagagagatggagtttggaaacaaaaca

SEQ ID NO: 970153 - DNA, 120 bp, Artificial Sequence
  ENSG00000275846_27 (sequence is synthesized)
agtggttcagaaacatgggattgctttcatatctactggcatttagaaggagcttggtaaatttaatcaagaaacaaggaaatgaaaatacccaaggaacaccaggggaagaataatggt

SEQ ID NO: 970154 - DNA, 120 bp, Artificial Sequence
  ENSG00000275846_28 (sequence is synthesized)
tggattttcatttaatttgccagacacaatccctgaagtaagaaaataccgtttctcatgaaattccggcacccgaggctcaaacggccaaccctacggttaacagccgaacgcgctaac

SEQ ID NO: 970155 - DNA, 120 bp, Artificial Sequence
  ENSG00000275846_29 (sequence is synthesized)
caattgtgccacagaaatgaatgtggtggaatatctccattccaacaaggttattttactttttttcagtctaaacaatacattagaaaggaggctacttctccgtgtattggaaaaatg

SEQ ID NO: 970156 - DNA, 120 bp, Artificial Sequence
  ENSG00000275846_30 (sequence is synthesized)
attggaaaaatgttttccctttttttgactctcattgttgctatgttaatgtgttttaaaaacggaggtttataggcttgccgccgtggctcacactgtaatcccagcactgtgggaggc

SEQ ID NO: 970157 - DNA, 120 bp, Artificial Sequence
  ENSG00000264548_0 (sequence is synthesized)
gttgacccgactttggctgcacatttgactggcccctggatcagctctaggactagatgtacccaaaaggatgcccacatccttgcctcagctcctgcctctgcccacccagagagctgc

SEQ ID NO: 970158 - DNA, 120 bp, Artificial Sequence
  ENSG00000264548_1 (sequence is synthesized)
cttgcccccatgtccacgatgcagccaccaggcctgggtaagcgtgggtgtccgagacgggctgggacacccagaagaggagccaggacttgcttggtctgtatcccggctctgcatgcc

SEQ ID NO: 970159 - DNA, 120 bp, Artificial Sequence
  ENSG00000264548_2 (sequence is synthesized)
tcagtgtccctgcctgtaaagtgggatctatgggaacccatgtgtgggccgggcacagtgctcacacctgtgaacccagcaccttgggaggccaaagggaggatcctttgagctcgggag

SEQ ID NO: 970160 - DNA, 120 bp, Artificial Sequence
  ENSG00000264548_3 (sequence is synthesized)
agtgctgtgattacaggtgtgagtcatcatgcctggccaaaaaaaatttttttaaattaaccgggtgtgatggcacatgcctgtggtcccagctacctgaggccaaggtgggaagatcac

SEQ ID NO: 970161 - DNA, 72 bp, Artificial Sequence
  ENSG00000264548_4 (sequence is synthesized)
ctgtggtcccagctacctgaggccaaggtgggaagatcacttgaacacagcacttcgaggccacagtgaact

SEQ ID NO: 970162 - DNA, 120 bp, Artificial Sequence
  ENSG00000264548_5 (sequence is synthesized)
gcctctaagaaggtaattaaagttacgtgagtcctaagggtgggaccctgaactgttgtccttaaaagaagaggaagagacaccaggagtgagcacacagaggagaggccacatgaggac

SEQ ID NO: 970163 - DNA, 120 bp, Artificial Sequence
  ENSG00000264548_6 (sequence is synthesized)
gcagggagagggtgccgtctgcaagccatggagaggcctcaggaggaacccaccctgccggcagcctgatccctgacatccagactccggaagtgagaaaataaatgtcgtttaagccgc

SEQ ID NO: 970164 - DNA, 120 bp, Artificial Sequence
  ENSG00000264548_7 (sequence is synthesized)
cagcagcatggcacccatggtcaccccttcagctgagccacatgcccgggtgccccagggacagagcagggtgtgccacgggcactgcctggttcctgaagctgtggggcaggccggtct

SEQ ID NO: 970165 - DNA, 120 bp, Artificial Sequence
  ENSG00000264548_8 (sequence is synthesized)
ggccctcacagcctgtgctctgattcgagggccgttccgttgggttgagctccacggtcccagagcgcccgccgtcagctcaggccgagggcccttcctggtgccccggtgagtgacacg

SEQ ID NO: 970166 - DNA, 120 bp, Artificial Sequence
  ENSG00000264548_9 (sequence is synthesized)
gccaggacctgaccctcccatgcctctgtggcagagcaaggtgggtggggaactggctgtcctgctcccagctgcgttcctggcacctatgccccacccacccagacacacatctgggtg

SEQ ID NO: 970167 - DNA, 120 bp, Artificial Sequence
  ENSG00000264548_10 (sequence is synthesized)
tcaggcagccgcatgtcactgagtggggtaaacaagggagggtgagaggaaggtcagaaggccatggctgagggcgtaagtgtgggctgaggctcttgcttcccagaacacagactgacc

SEQ ID NO: 970168 - DNA, 120 bp, Artificial Sequence
  ENSG00000264548_11 (sequence is synthesized)
ttggtggcagacctcaccatgggagcccccaaaagctgcttgcttgaggcctccaggcctcttgcagggccctaaaagcacagggatccaggacaagaggtgcgggggcccccgcctggg

SEQ ID NO: 970169 - DNA, 120 bp, Artificial Sequence
  ENSG00000264548_12 (sequence is synthesized)
caccagcctgcatgggccagagcaagccacttcctctcaggtttggggaatgcccacgtcagacttgcagaggcaacttctccatctgtctggctcacaggccctgtggcaggagaggag

SEQ ID NO: 970170 - DNA, 120 bp, Artificial Sequence
  ENSG00000264548_13 (sequence is synthesized)
ccaagaaatgaaagggcccggtgggtgtgggcgggccctgctccgatctggatctggccagtgcctgtggcacgccctgctctgtccctggggcacccgggcgtgtggctcagctgaaag

SEQ ID NO: 970171 - DNA, 120 bp, Artificial Sequence
  ENSG00000264548_14 (sequence is synthesized)
ggtgaccatgggcaccatttgcctggctcccaggtcctgaggccagagaggagccaagaaatgaaagggcctggtgggtgtgagtgggcctcagtgtctggctgctccaggaggaggggg

SEQ ID NO: 970172 - DNA, 120 bp, Artificial Sequence
  ENSG00000264548_15 (sequence is synthesized)
gtgggcactgactcctgcctgagggctggaggcagggaggctcctctggacaggaagaccctccaggaacagaccagcaagactggcactgtccagatgggaccaggagccggacagcgg

SEQ ID NO: 970173 - DNA, 120 bp, Artificial Sequence
  ENSG00000264548_16 (sequence is synthesized)
cgtcagacatgccccacagcggccgtgaccacagccacttcctggaggtcaagacctggaggcagggccagtgctgccagggatcctggtgtggacacgggcaggaccaggggatgctcc

SEQ ID NO: 970174 - DNA, 120 bp, Artificial Sequence
  ENSG00000267089_0 (sequence is synthesized)
aaatgcccaaggcctatttattttttggggtggtatgtgtctgagtattcatatttttattattttgacttggcataaaacagcttatttcaagaactcattttccttcttcaaacatta

SEQ ID NO: 970175 - DNA, 120 bp, Artificial Sequence
  ENSG00000267089_1 (sequence is synthesized)
gtgcaatggctaatgcctgtaatcctagaacttcgggaggctgagattatgggcatgagccaccacgaccagtggcccctgaatttctgactgacccattctaagcctatatacaacccc

SEQ ID NO: 970176 - DNA, 90 bp, Artificial Sequence
  ENSG00000267089_2 (sequence is synthesized)
cattctaagcctatatacaacccccggggggacgaagtctagctcttccacccaggctggattacaatggcgtgatcttggctcattgca

SEQ ID NO: 970177 - DNA, 120 bp, Artificial Sequence
  ENSG00000262265_0 (sequence is synthesized)
ggggagaaaagatgaacttgactttgaatttactaagctttagataaggaagtaaaacctagatgaaattgcccatcaggcaaaggaaaggtaaggttgaagttagaagtagatttagtt

SEQ ID NO: 970178 - DNA, 120 bp, Artificial Sequence
  ENSG00000262265_1 (sequence is synthesized)
taaagaagggactgaggcctgagggaatggctttacttaggaactacaagaagaaaaaaaaaaaaaatgaagaaatggtcattgacctatttgaagcttaggataatcctcaaacaatga

SEQ ID NO: 970179 - DNA, 75 bp, Artificial Sequence
  ENSG00000262265_2 (sequence is synthesized)
attgacctatttgaagcttaggataatcctcaaacaatgagatttcactgtattttgtgaatcacttaaggccag

SEQ ID NO: 970180 - DNA, 120 bp, Artificial Sequence
  ENSG00000262265_3 (sequence is synthesized)
gggggaattagaaaacccagactatggttagtattatgagacagaaggggcctagatagatgaattgaagggatgaagaggcaagacattaattaggaatctattgatggtttagatgag

SEQ ID NO: 970181 - DNA, 120 bp, Artificial Sequence
  ENSG00000262265_4 (sequence is synthesized)
aagcaataaggatcctaacagtgaaaataaagagggaacttaagccagaaataaaatgaaagtacatgaattatggcttcgttgctgattggctgtgaaggtcagaggagaagaagaagg

SEQ ID NO: 970182 - DNA, 84 bp, Artificial Sequence
  ENSG00000262265_5 (sequence is synthesized)
ccaggtatgtattttcttttgcttagccttatgttaaaagctcccaagcactgatttgccacgttccaccctattactttcagc

SEQ ID NO: 970183 - DNA, 120 bp, Artificial Sequence
  ENSG00000262265_6 (sequence is synthesized)
tatttctaaattaccactctatccctggtgggtgattatgtcagtcttatgacaattatatttaagaaatttcaggccagttgtggtggctcacacctgtaatcccaggtttgagaccag

SEQ ID NO: 970184 - DNA, 88 bp, Artificial Sequence
  ENSG00000262265_7 (sequence is synthesized)
gctcacacctgtaatcccagaccgctaacttttttttttttttttaattagccagccatggtagcatgcacttgtagtcccagctact

SEQ ID NO: 970185 - DNA, 120 bp, Artificial Sequence
  ENSG00000262265_8 (sequence is synthesized)
caggagtccagcctgggcaacatagcaggatcctatccctttaaaaaaaaaaaaaagaaagaaatttttgatctaaatgatcttagatacagactttgataaaacttatttatgttttcc

SEQ ID NO: 970186 - DNA, 120 bp, Artificial Sequence
  ENSG00000262265_9 (sequence is synthesized)
aaaagtctgcatcctacttctgcttcctactttgtccatttgtttattggcttaaattacacaagtgtgggaagctagatatccttcaactggtagtactttctttgtcatatcacttat

SEQ ID NO: 970187 - DNA, 120 bp, Artificial Sequence
  ENSG00000262265_10 (sequence is synthesized)
ttctagtttttactcacttgaaaatttggcagtgaggcaaactaatatctggttccccaagggtaccttcttcatagttctctgaggttatactgacattccgcacataaacagatgatg

SEQ ID NO: 970188 - DNA, 120 bp, Artificial Sequence
  ENSG00000262265_11 (sequence is synthesized)
tatacattttacctgatagtttcagttgaggatctcggttagatttcttctggtcctttatatataaaaccttagaattttggaagaattgctgttctgaatttttttccatttgatatt

SEQ ID NO: 970189 - DNA, 120 bp, Artificial Sequence
  ENSG00000262265_12 (sequence is synthesized)
gaagcatttgaacttcagaccaggtaagttgtattttttacctgaatgctttaattggtctcactagccactaaccccttccatcctcctatttaaaagctaaggaggaggcgaccaggt

SEQ ID NO: 970190 - DNA, 64 bp, Artificial Sequence
  ENSG00000262265_13 (sequence is synthesized)
ttgagtccaggagttcaaaaacagcctggccaacctggtgaaaccctatctctactaaaatata

SEQ ID NO: 970191 - DNA, 120 bp, Artificial Sequence
  ENSG00000225458_0 (sequence is synthesized)
attcagggacacctgcggctccaggtcagagatgcacctgctagtcctgcctctacaggacccaacccatcagttcctagcttgtccttctggtgagaattgagcacactatactgtgga

SEQ ID NO: 970192 - DNA, 120 bp, Artificial Sequence
  ENSG00000225458_1 (sequence is synthesized)
cataaagacaaaccttgctggaactgactggtggaatgtagcaggaatcggagggaagctttactcatcattccagtccagggaccaacataggaaattatattaaaattggttcttctc

SEQ ID NO: 970193 - DNA, 120 bp, Artificial Sequence
  ENSG00000225458_2 (sequence is synthesized)
gaggtgagaagaccaggagtagtaaaacagaccaaagatttcccaatttctcttggggaagtggctgggattggggatggtggccaatgggagcccaactttattggtaaaattctgatt

SEQ ID NO: 970194 - DNA, 120 bp, Artificial Sequence
  ENSG00000225458_3 (sequence is synthesized)
attttatgagaagaatgtatttttgtatcatttgtgtaattaaaaaattaagcaaatgaataatatgaacacttcagttcttaaacattgacaatgtatatactggatgtaataaaacgc

SEQ ID NO: 970195 - DNA, 120 bp, Artificial Sequence
  ENSG00000262267_0 (sequence is synthesized)
atccacgtggctggcaaagagaagggagcatgaagctgtcattttgaacatgcctagtcccagagatgcatgcggggagaactctatgtgaaggtgaaggcagagatgcttcattaagcc

SEQ ID NO: 970196 - DNA, 120 bp, Artificial Sequence
  ENSG00000262267_1 (sequence is synthesized)
aaggaatgccaaaggtggccagcaaaccaccagaaaccaggcaagatgcatggaacagattctgtctcgtagctctcagaaggaaccaaccctgccatcgcacattgattttggacttct

SEQ ID NO: 970197 - DNA, 120 bp, Artificial Sequence
  ENSG00000262267_2 (sequence is synthesized)
tcttctggctgtgtctagggagccaagagagtgagagaaaactctttgaggaattggaaatggaagaaaataattctaaaatttgtatggaaccacaaagactgctaatagccaaagcta

SEQ ID NO: 970198 - DNA, 120 bp, Artificial Sequence
  ENSG00000262267_3 (sequence is synthesized)
gtttgaacaagaagaacaaatctggaggcctcacactttctgatttcaaaatatattacaaagctacagtagtagcataaaaacagatgcataaaccaatgggtagaatagacagcccag

SEQ ID NO: 970199 - DNA, 120 bp, Artificial Sequence
  ENSG00000262267_4 (sequence is synthesized)
tgaggaattggctcagacagaggagggagacaaggtaccacgttaacaacaggactgaaatttcgcccagagtacagagagctcagcagattcctggcatttctgaaaaacaatcccttg

SEQ ID NO: 970200 - DNA, 120 bp, Artificial Sequence
  ENSG00000262267_5 (sequence is synthesized)
tattcaagagaaataatgtggcttaacaactgaagttccacttctgatggacctgagaagccttgcaaatgacgtttgattttcacactctttgaagagacaacagatttcattgtgcag

SEQ ID NO: 970201 - DNA, 120 bp, Artificial Sequence
  ENSG00000262267_6 (sequence is synthesized)
caagtatggagaaaattggatatctacatgcaaaatgatgaaactggaccattttcttgcaccaaaaaatcaactaaaatgggctaaaggcttaattgtaagacctgcaatcataaaact

SEQ ID NO: 970202 - DNA, 120 bp, Artificial Sequence
  ENSG00000262267_7 (sequence is synthesized)
cctagaaaaaagcataagggaaaagcttcttgatattggccttggctataattttatgaatgtgacactaaaagcacagagaacaaaggcaaaatagaagacagggactacagcaaacta

SEQ ID NO: 970203 - DNA, 120 bp, Artificial Sequence
  ENSG00000262267_8 (sequence is synthesized)
aaaagcttctgcacagcaaaggaaacagtcaagaaaatgaaaaagcatctaatggaatgggagacaatatcggcaaaccatacaactgataaagggttagtattaaaaatacataaagaa

SEQ ID NO: 970204 - DNA, 120 bp, Artificial Sequence
  ENSG00000262267_9 (sequence is synthesized)
ccttgggcaaaggaactgaatagacacttttccaaagaagatatataagtggccaacaggcgtatgaaagtgttccacatctctcatcatcaggaaaattcaaatcaagaccataatgag

SEQ ID NO: 970205 - DNA, 120 bp, Artificial Sequence
  ENSG00000262267_10 (sequence is synthesized)
atattgcctcatccctgttagaatggctattacaaaaaaacccggaagataggtgttggcaaagatttggggaaaaggaaattcatatacactgtcggtgggaattggtgcagccaccat

SEQ ID NO: 970206 - DNA, 120 bp, Artificial Sequence
  ENSG00000262267_11 (sequence is synthesized)
gtatggaggttcctcaaaaaattaaaagtagaactatcatatatatgatctggcagtccctctcctgagtatgtattcagaggaattgaaacaaggatcttgaagagatatctgccctcc

SEQ ID NO: 970207 - DNA, 120 bp, Artificial Sequence
  ENSG00000262267_12 (sequence is synthesized)
tgccctcccacggtaattgcagcattacctcaatagccaagacacagaagcaacctaaatgtccatggatggatgaatggatgaataaaatgtggtctgtatgtacaataaaatattatt

SEQ ID NO: 970208 - DNA, 120 bp, Artificial Sequence
  ENSG00000262267_13 (sequence is synthesized)
cagtcttaaaaaggatgaaaatcctgctatttgtgccagtataaatgaacctaaactgaagggcactatgctaagtgaagcaaaccagatagaaggacaaaagccataggatcccactta

SEQ ID NO: 970209 - DNA, 120 bp, Artificial Sequence
  ENSG00000262267_14 (sequence is synthesized)
taggaggaattgaaaataatgcaatttgtagaagctgagagtagaatggtggttgccaagggctggtttggggtgggggtgggaagacggggagatattagtcaaagggtgtaaagtttc

SEQ ID NO: 970210 - DNA, 120 bp, Artificial Sequence
  ENSG00000262267_15 (sequence is synthesized)
agttatgcaggatgaatatgctctagagatctaccaaacagcatattgcttgtagtaaatactgtgttgtatacttcataatttgctaagtaggtagatcatatgttaagtgttctctct

SEQ ID NO: 970211 - DNA, 120 bp, Artificial Sequence
  ENSG00000262267_16 (sequence is synthesized)
ctctctctctctctcacacacacacacatacacacacacgcacacaaacacacacaatgacaaaatgtgtggaaggaaacttttggaagtgatgtgtatgtttctggcacagattgtggt

SEQ ID NO: 970212 - DNA, 120 bp, Artificial Sequence
  ENSG00000262267_17 (sequence is synthesized)
acagattgtggtgatggtttaaggggtatatacttacttctatagtcatcaatatgtattcattacatacatatacctttgtgtatatcaataatacctcaataaagtggcttaaaattg

SEQ ID NO: 970213 - DNA, 120 bp, Artificial Sequence
  ENSG00000267082_0 (sequence is synthesized)
attaaccagaaatgaggagcagagagcctgggggaggctggaagctgggtacgcagggagagacagagactaagagacagtgagataccaagatagggagagccacgtgatagactgggg

SEQ ID NO: 970214 - DNA, 120 bp, Artificial Sequence
  ENSG00000267082_1 (sequence is synthesized)
agagatgagaaagagaccaagagaccatgagggagtcaagagtcaccccgccacccccctgcagtgaccaagctggccctggcagagggaggggtgtctctggagagctcccagctggag

SEQ ID NO: 970215 - DNA, 120 bp, Artificial Sequence
  ENSG00000267082_2 (sequence is synthesized)
aagcgtgagccaccgcacctggcccttcctctgaggccttcgtctccaagaatccagcaaagtgacaataatgaaaataatgtcactaaagggccagcaccacagaagaaatctcactgg

SEQ ID NO: 970216 - DNA, 120 bp, Artificial Sequence
  ENSG00000267082_3 (sequence is synthesized)
aacacctgacttcaagtgtgaccttgaatctcactgagctctcaaatgtaactgccagttccccaaaatgtgaggaactgagaaacagggtgaagagcagtggcatgatcttggctcatt

SEQ ID NO: 970217 - DNA, 120 bp, Artificial Sequence
  ENSG00000267081_0 (sequence is synthesized)
gtttcggagctagtagctgcaggaactattggggagcaacatcatttagcagcaaagatattctttctcagcaaattgcttgaagccaaggggaagaagcttccaggaaatgtggtgtcc

SEQ ID NO: 970218 - DNA, 120 bp, Artificial Sequence
  ENSG00000267081_1 (sequence is synthesized)
tctgatcctccttccttcctgagaactggggtccttgcagatccgccaagtccagaggtgcccagtggccctgcatttccttccaccagagtcagctgaattcagatcaaaacttagaag

SEQ ID NO: 970219 - DNA, 120 bp, Artificial Sequence
  ENSG00000267081_2 (sequence is synthesized)
tcatctctgatctcaggcactcaggtcccaaccgttctcttcctagcctctttacttctatggaaatcactcagacattgagagacccctgttgtgagaggttgggagactcaagctcta

SEQ ID NO: 970220 - DNA, 120 bp, Artificial Sequence
  ENSG00000267081_3 (sequence is synthesized)
caagcacaagccaatctcagctgaggctgagcctgaactattccttgtgtccctgcaacaattctccttctcagcactggcaaatgatgtttgtttcccaaaagcaaggaacatgtgagg

SEQ ID NO: 970221 - DNA, 120 bp, Artificial Sequence
  ENSG00000267080_0 (sequence is synthesized)
gcgactgcggaaggttgcccgggctggcgccgctgggcagagccggtgcgacgtttccctttccagctttgttcttccggccctgctgtctgcctccccggctgattggattcgttactg

SEQ ID NO: 970222 - DNA, 82 bp, Artificial Sequence
  ENSG00000267080_1 (sequence is synthesized)
gctgtgacctcagctctctgcgacctctgcttgctggactcaagcgatcctcccaccacctcagcctcctgagtagctggaa

SEQ ID NO: 970223 - DNA, 90 bp, Artificial Sequence
  ENSG00000267080_2 (sequence is synthesized)
tgcgacctctgcttgctggactcaagcgatcctcccatcatatgcaccagcacgcctggctaaagttttgctcttgtcacccaggctgga

SEQ ID NO: 970224 - DNA, 120 bp, Artificial Sequence
  ENSG00000267080_3 (sequence is synthesized)
tcagcctcctaagtagctgggactacaggggccctcctgctgctccctccatgaggctggtcctgaaggaataggcctgtggctcgtccctcctccccatctcggccctgaggcaaacat

SEQ ID NO: 970225 - DNA, 120 bp, Artificial Sequence
  ENSG00000267080_4 (sequence is synthesized)
ggctcgtccctcctccccatctcggccctgaggcaaacataccttccacagctctgggagcaccgcctccacccaggtctcacaggatgggacacaaggataggcattaagcaggacttc

SEQ ID NO: 970226 - DNA, 120 bp, Artificial Sequence
  ENSG00000267080_5 (sequence is synthesized)
cagggcccgagggaagttggcgcagtgtttcagcatctaggggtcaaaagagggtcttgggcacatgcctcccccacccgagggcagacccaagtcttgcctcacccacatggccaatcc

SEQ ID NO: 970227 - DNA, 120 bp, Artificial Sequence
  ENSG00000267080_6 (sequence is synthesized)
tagcctaatctggggggctaaggtctgagtctctcttcccttttttgtgcctctgtctaccccaccctcaagtatgctccaaccttttggccccagttttcctctggggctcttccctcc

SEQ ID NO: 970228 - DNA, 120 bp, Artificial Sequence
  ENSG00000267080_7 (sequence is synthesized)
cttggactctctctcccagaatcctctctccccctcccaagctggggacagccccctggccactgagggcaggctttcagtctcttggaccctctgtcttccccagaagcggagcagttc

SEQ ID NO: 970229 - DNA, 120 bp, Artificial Sequence
  ENSG00000267080_8 (sequence is synthesized)
cttcaggctcccagttgggggagtcctggacggcctgcagcgcacagtccatgggcgtgtggcccgccccattggggacctcagcgcgggccccgtaacgcagcagcagctcggccaggc

SEQ ID NO: 970230 - DNA, 120 bp, Artificial Sequence
  ENSG00000267080_9 (sequence is synthesized)
ccccgcagccgttggcacaagcgttgtgcagcggcgtgtggcgcttgcgcccggccgcccgggcatcagctccagcctccaggagccggcgcgccgcagcctggtgtcgcctgcagctac

SEQ ID NO: 970231 - DNA, 120 bp, Artificial Sequence
  ENSG00000267080_10 (sequence is synthesized)
ctgggccctcggccccagcgcacgccgtgttcagcgcagtctcgccctggctggtgcgcaggcccacgtcggcgccatgctccaggtacagagccacatgttgctccaggccgcgcgccg

SEQ ID NO: 970232 - DNA, 120 bp, Artificial Sequence
  ENSG00000267080_11 (sequence is synthesized)
ccgccacgtgcaggggcgtctcctggctctcgcctgctgccaggttcaccgtcgctcctgcttccagcagcaacttggcgcacctggggacaagagagcaaggtcctgaggaaaatcctg

SEQ ID NO: 970233 - DNA, 120 bp, Artificial Sequence
  ENSG00000267080_12 (sequence is synthesized)
aaggcttgggaccccttcagcttgctgtgacactcccttgcctttccacccctctcagcttgaggtcctacctggtgtcctccatgagaatcatacaagccccgctacagacaacagaat

SEQ ID NO: 970234 - DNA, 120 bp, Artificial Sequence
  ENSG00000267080_13 (sequence is synthesized)
tggaaggtcctgagagctaccagaagcatcttcagttttcatatgaaaaacttaagcccaggagtgatttgtgcagccaaggacacacagcaagttagtggctgcaccagaaatagtact

SEQ ID NO: 970235 - DNA, 120 bp, Artificial Sequence
  ENSG00000267080_14 (sequence is synthesized)
atagtactcactgcctcagacagtccctcccacagtctactctgtctccaccccaaggtctggttctgaatcattcagttgtcagttgtctccttttttttttttttttttggagacagg

SEQ ID NO: 970236 - DNA, 120 bp, Artificial Sequence
  ENSG00000267080_15 (sequence is synthesized)
tttggagacagggtctctctctgtggcccaggctgaagtgcagtggtgtgattacagctcatgtagcctggacctcccaagctcaagcaatcctcctgcctctgcctcccaagtagctgg

SEQ ID NO: 970237 - DNA, 83 bp, Artificial Sequence
  ENSG00000267080_16 (sequence is synthesized)
ctcctaacattttgatagcacaaaattttgaaaacccacttctgtgtacgttatgaagcatagaaaattaaacagtatgcacc

SEQ ID NO: 970238 - DNA, 120 bp, Artificial Sequence
  ENSG00000267080_17 (sequence is synthesized)
cagcaacatagtgagacccgttgtggtgcatgcctgtagtaccacctacttgggaggagtattgcttgagtgtggaaggttgaggctgctatgagcagtgatcgcgccaccacactccaa

SEQ ID NO: 970239 - DNA, 120 bp, Artificial Sequence
  ENSG00000267080_18 (sequence is synthesized)
cctaggcaacacagagagcccctgtctcaaaaaaaaattgttttagggacagtgtctcactcttgcccagactggtctcaaactcctggggtccagtgatcctcctgcctcagcctccct

SEQ ID NO: 970240 - DNA, 120 bp, Artificial Sequence
  ENSG00000267080_19 (sequence is synthesized)
tgtaggtgggactacacggcacctggcccttgtgttgttcttgtaacagttgctcaatgcagaaaacttggaaaccacagaacagcaccagggggtggggaatgaacatggaatgatggg

SEQ ID NO: 970241 - DNA, 120 bp, Artificial Sequence
  ENSG00000267080_20 (sequence is synthesized)
catccatactttggttccatggactaatcatttatttgcactcataaaaactggcttgctttgaaaagcttcctccaaaagctgtattgtggtacttttgactctgggacaagaggaaga

SEQ ID NO: 970242 - DNA, 120 bp, Artificial Sequence
  ENSG00000267080_21 (sequence is synthesized)
agttggggaattcgggcagttggtggctgggccctcagagactgtatgtggtgaccactgtttaagacaccattcatcacttggggacggagggagcacatagatggaccccaggctcat

SEQ ID NO: 970243 - DNA, 120 bp, Artificial Sequence
  ENSG00000267080_22 (sequence is synthesized)
ggatgttcctccttccgcagtcatttactaaaatacctgttcaaggaatatagttccagtctcagcctagttgagacaaccacaggcacttaaataagtaccaaggaagcctctgcagag

SEQ ID NO: 970244 - DNA, 120 bp, Artificial Sequence
  ENSG00000267080_23 (sequence is synthesized)
atagtgctattggaactgagtcctgagggccagatcagccttgaccaggccaaaaaatgtggaagagtattccaagcggtaggaataacacatgcaaacacctgaaagcaaagaggagca

SEQ ID NO: 970245 - DNA, 120 bp, Artificial Sequence
  ENSG00000267080_24 (sequence is synthesized)
ggtcacatccagcaactggtgacttgtttactaaggctggagatgaaccttggaaggaagaagggaagtcaagaggccagataatttggcagaggctagaggctctgttctactgagttg

SEQ ID NO: 970246 - DNA, 120 bp, Artificial Sequence
  ENSG00000267080_25 (sequence is synthesized)
gcttcccaaccgagcgcgcacagctagtcgggccaggtgctgcagctgccttggctggttcaccatgcacagggccgagctgtagaaggcttcgtgctcctaggccaggagtgaaagaag

SEQ ID NO: 970247 - DNA, 120 bp, Artificial Sequence
  ENSG00000225450_0 (sequence is synthesized)
gaaggcagggtgggctcccgcacgggaggagggccccgctcaggccattggctgtctcctcgctgaaggtggacggcagatgccccaggcctagcctttaaccctaaccgagatgctcag

SEQ ID NO: 970248 - DNA, 120 bp, Artificial Sequence
  ENSG00000225450_1 (sequence is synthesized)
agcagctttaaaggtcagcctctccctggcccaggatggtactcggctcaccatacgtcaggcacgtcagcaagagcagcggcagcaggaaccagaggaacgtcttcagggacgagaagc

SEQ ID NO: 970249 - DNA, 120 bp, Artificial Sequence
  ENSG00000225450_2 (sequence is synthesized)
caggacgggggaggcggaggtgtgaggggagctccaggcctccacgttccacccagggagtaccctgagatgttttcctgggtgctgaactagagctaaggaggatagcttgagcttctc

SEQ ID NO: 970250 - DNA, 120 bp, Artificial Sequence
  ENSG00000225450_3 (sequence is synthesized)
actgtgccagggccagcctggacacgtcagagcctttcctgctgggcaggtcttagagtgatgggacaattttgactgaattttactgatgttattaaaaatagtgtggtctttgaaaaa

SEQ ID NO: 970251 - DNA, 120 bp, Artificial Sequence
  ENSG00000263797_0 (sequence is synthesized)
ggaaagaaaatctcagcgtcaccatggactctggattttgctactgctccttttcccactccacctcttgctgactgtgtgtcttggctaagttttctcactcttctatccctcagttgc

SEQ ID NO: 970252 - DNA, 120 bp, Artificial Sequence
  ENSG00000263797_1 (sequence is synthesized)
ctcatcagtaaaagggcagtggtaacaccagcctctttgggctgctctgtgctgactagacgtggtattacataaacagcactggcacagccctgcctagggaagtcacccacagagggc

SEQ ID NO: 970253 - DNA, 120 bp, Artificial Sequence
  ENSG00000263797_2 (sequence is synthesized)
ctccagccaatcagtcacctgacttgagaagtatctcaatttgaggcactggtagcaaaatataggaagctaaacaagtgatgtatgattatcagtgtcagttgaattccaaaggcatca

SEQ ID NO: 970254 - DNA, 120 bp, Artificial Sequence
  ENSG00000263797_3 (sequence is synthesized)
aaaaaggcagtcaattcaatcagagagagatggcggattttcttcatgtcttcagcagacagatctcctgcttcagttaagccaaatctggttttctgaacattaaatttctaaaacaca

SEQ ID NO: 970255 - DNA, 120 bp, Artificial Sequence
  ENSG00000229743_0 (sequence is synthesized)
ggggcgaacgggccgtcgcgttcatttccataagaaagctgaaatcgcagttggaagcaggatttctcgcccctgcagcccttcccccatacccggttttctgcaagaagcgggctccag

SEQ ID NO: 970256 - DNA, 120 bp, Artificial Sequence
  ENSG00000229743_1 (sequence is synthesized)
agctcagagcccgaagtgtgtgctctggtctttgatgatgttgataaaatgtggtttcaaatgttgtcccgaagaggccggtttcctgtctgtatgtggaatggaaggaccgtgccgggg

SEQ ID NO: 970257 - DNA, 120 bp, Artificial Sequence
  ENSG00000229743_2 (sequence is synthesized)
caccaagaggcaccctgagaactcagaggacccagaggctcccctcaagcaaattccctgctgaccctggacaccccttgaaggagggggcaagaggctgccacaaggctcatcttataa

SEQ ID NO: 970258 - DNA, 120 bp, Artificial Sequence
  ENSG00000229743_3 (sequence is synthesized)
ctcccagcaaggactcccagcaaacaagttcagcttgggatctgcccaccaccaagcctggctgggaggtgggggggagcgaggggcggtggagaggcagagtccctgaacagggaaaag

SEQ ID NO: 970259 - DNA, 120 bp, Artificial Sequence
  ENSG00000229743_4 (sequence is synthesized)
tgttcccctttctggtgtcagaggcaaagaagcctgaagggctggtggtggtgctggctctgggtttattgactctgtgatcctgtccagctgtcctacagggagttccagagctctccc

SEQ ID NO: 970260 - DNA, 120 bp, Artificial Sequence
  ENSG00000229743_5 (sequence is synthesized)
aaagtgcatgaggaactgcacaagtaggactggggcacaataccagaagctatttgtctcctagaacctggcaccccctccacttaccttacaggagacccacatcactcagttcccagg

SEQ ID NO: 970261 - DNA, 120 bp, Artificial Sequence
  ENSG00000229743_6 (sequence is synthesized)
acacctggtgggagagtctggtgagatttggaggcagacttcctctactcacaacttgtttgaaaatggacataaagagaagaacagacactccatcgccccttcagggcctcctttgtg

SEQ ID NO: 970262 - DNA, 120 bp, Artificial Sequence
  ENSG00000229743_7 (sequence is synthesized)
tcacaaaacctatcccctcctagggcacccttgacattcccctaggtgggcctacacattgttcagaacctgtcccctgtaccaaaataaatataaatgagtttgtttctttaaaagaaa

SEQ ID NO: 970263 - DNA, 120 bp, Artificial Sequence
  ENSG00000229743_8 (sequence is synthesized)
ggagaaacactgctgcctgatgcttgcactgctgcactgttcttgcacctgctcctagccctgaactcgggccctgagctcctcactgccgcccgctctgcgctgagccccactcctgag

SEQ ID NO: 970264 - DNA, 120 bp, Artificial Sequence
  ENSG00000229743_9 (sequence is synthesized)
accgcgaggtgccagagcagcgcctctcccaccaactcctagacgcctgtaggagctgcgccggagccttcagaaccccatgggggtgtgggggtgaagttggaggtcatccgggtgatt

SEQ ID NO: 970265 - DNA, 120 bp, Artificial Sequence
  ENSG00000229743_10 (sequence is synthesized)
tttttcttactttttcctaattgttctcctgcgttgatttcaactcttccagtctcccggtgctggggcgccaatcctttcccaacaattcctacccaccagctggaggtcggggcccag

SEQ ID NO: 970266 - DNA, 120 bp, Artificial Sequence
  ENSG00000229743_11 (sequence is synthesized)
ggttaccccagagttctatggtggcagggggcgccgagtagaggggcgggaggagctgggtcctcgggaaccaaaggggacctcagcgggggcggagtgcgcagccttggctgctgggaa

SEQ ID NO: 970267 - DNA, 120 bp, Artificial Sequence
  ENSG00000229743_12 (sequence is synthesized)
atgcccaactagccgctgtgagtgcccacagcgcgtcgtgggggcgtccgttctgcagctcgggtgactcagacgccctgccaaccccaccagctcccggcttctcgaacgctcttctga

SEQ ID NO: 970268 - DNA, 120 bp, Artificial Sequence
  ENSG00000229743_13 (sequence is synthesized)
tcgcccagcggggagacttcagggcctgcctcgtcaggccagattgcagcccgcgaccttcccggattaaccaagggcggggcctgttgcccagcaaggctgctgcctaactgagcctcc

SEQ ID NO: 970269 - DNA, 120 bp, Artificial Sequence
  ENSG00000229743_14 (sequence is synthesized)
cggggaacagccatgaccaaagccccgcgggcccaggcgcgggcacctacccctacccgctcaggcctgtgggagcgcaggggcagaggccgagacgctggacttccagccccacacctc

SEQ ID NO: 970270 - DNA, 120 bp, Artificial Sequence
  ENSG00000229743_15 (sequence is synthesized)
tgacaacccgggcacgtctgcggagcccgggggaacagtcagcgggctctgcgtcccgggagctggggacacgcctgcaaggtgtgtgatcctttaaagatccttagtactagttttgta

SEQ ID NO: 970271 - DNA, 120 bp, Artificial Sequence
  ENSG00000229743_16 (sequence is synthesized)
gggagcctttgttatagctttgtcagcctgcgcgccttcagcagctccccctcccgggcccctcggttccctccgggctcgcccccagcggagagggcccggcgcaggggatctgcccag

SEQ ID NO: 970272 - DNA, 120 bp, Artificial Sequence
  ENSG00000229743_17 (sequence is synthesized)
gatcaactgccctcttccagatccccttctgcgagattcttttcctttggttacaatctcccctccgtgcctggggcagataaacacggttcgccccgcctgcagtattggggcgatgct

SEQ ID NO: 970273 - DNA, 120 bp, Artificial Sequence
  ENSG00000229743_18 (sequence is synthesized)
ggtgggcacagcagggcgcacagaggagggggtaatctgcccacccaggctaaggatttgagggttctgacaaaaaagagctggttgaggatgacacagttgtgaactaacctggctcct

SEQ ID NO: 970274 - DNA, 120 bp, Artificial Sequence
  ENSG00000229743_19 (sequence is synthesized)
actaccccacagggcagccaggtcccagtagtcttgggtaccactgcccccaccataccaccattgtaaagtatggactcctgcttagccaacgtgcagctctaggcaggatctctgaag

SEQ ID NO: 970275 - DNA, 120 bp, Artificial Sequence
  ENSG00000229743_20 (sequence is synthesized)
gatgctctggcacacagatggtgcaggtatgactttacctgcacacaagcttacatgtgccctgtcatatatggctacacgtttccccatttccccacagtcttcctatttaactggtct

SEQ ID NO: 970276 - DNA, 120 bp, Artificial Sequence
  ENSG00000229743_21 (sequence is synthesized)
tcaatcctcctttctagggctttccgcctgcacacagtcatttggagaaaatcaagtgagtgcacttctccccacagaggattctgtatgttatgtaacacactcacactgggattcctc

SEQ ID NO: 970277 - DNA, 120 bp, Artificial Sequence
  ENSG00000229743_22 (sequence is synthesized)
aagttaccattttgccccaactcagccagcacttggttttctggcgggggtgtcaggatgatgcaaatggaggtggaagcttcattccctgggggcttttattcccctccttgaagcccc

SEQ ID NO: 970278 - DNA, 120 bp, Artificial Sequence
  ENSG00000229743_23 (sequence is synthesized)
agttcaaggcccaggaacaaaggggaaaggtaactgatctctcttttggtctttctctcccctcacttccaccccttcacctgcaggccctcctctttgataaatagaggaaagcccgtg

SEQ ID NO: 970279 - DNA, 120 bp, Artificial Sequence
  ENSG00000229743_24 (sequence is synthesized)
ggatcaggtacatatgtaaatactgctgacctcggccgcccctcctcaccgaaaagcagaaagcccgtttcaggtgcaggctgctccgtgcctttgagtgtccaccacttctattccccc

SEQ ID NO: 970280 - DNA, 120 bp, Artificial Sequence
  ENSG00000229743_25 (sequence is synthesized)
agactgcttgggactcaaggccactcacttaatacccgtctcttgttaaaaacattcaggacaactattaaatagttattggaagagttaaagaccttctttcaggagtgaaacgttttt

SEQ ID NO: 970281 - DNA, 120 bp, Artificial Sequence
  ENSG00000229743_26 (sequence is synthesized)
aaagctgtgcttggcataagtctttaaggcgtacaaagtagaatcagtagacttgcctgagcgattttgaaatttgaaagatttctccccatgaaatggtaatttaaaatagtttgtaga

SEQ ID NO: 970282 - DNA, 120 bp, Artificial Sequence
  ENSG00000229743_27 (sequence is synthesized)
tgttgttttgttctgtgatggctttttcaccattgtcacctaaagattctcaagaccaagctactaagacatttcatttggttagtttctgggtgatactgtgctttctgattagaccta

SEQ ID NO: 970283 - DNA, 120 bp, Artificial Sequence
  ENSG00000229743_28 (sequence is synthesized)
tttaatttatttttaactctgcaggagagttttcaaccttggaaatgtaagtgaaacacagactcaccctccttctgagaccttgataggggcagaaaggaacaaatctggctagccccc

SEQ ID NO: 970284 - DNA, 120 bp, Artificial Sequence
  ENSG00000229743_29 (sequence is synthesized)
ctcacacctggaagtttccctgtctaaacctgggtacaatgagcgtggtgggttttgtcaccttttattttattgctggctcaaggaaaattctttgaaatgaacatctattctatttca

SEQ ID NO: 970285 - DNA, 120 bp, Artificial Sequence
  ENSG00000229743_30 (sequence is synthesized)
gtgtgcaatgttccagccgacttaatgggcttgccttatgcggagaggcagtcctgcaggacagagctaatgtgtggtctcccaggaagctcatcagaacacctcttgtcccttttcttt

SEQ ID NO: 970286 - DNA, 120 bp, Artificial Sequence
  ENSG00000229740_0 (sequence is synthesized)
agaaaatagtagtcatgttttggtcattctgagatagtcatggaaaattacaacacagatgttcatacgggatcttccttctattgcccagtgccccgtgaagcccttgaacaaaaccag

SEQ ID NO: 970287 - DNA, 120 bp, Artificial Sequence
  ENSG00000229740_1 (sequence is synthesized)
aagaaagtgaaaaataaacagccttatacggttgtcatcatcctatccccagtgatggagccatacttgggtctgaaatattttgacacagatgaagcaagtctttgcaatttccaaagg

SEQ ID NO: 970288 - DNA, 120 bp, Artificial Sequence
  ENSG00000229740_2 (sequence is synthesized)
aaaggcttctgtgacacactctcttgtttgaaggagtgacaataacctgagaattgctggtagtattatttgttgttattactgtcatcaaaagatatttaattagaatctcttttatat

SEQ ID NO: 970289 - DNA, 120 bp, Artificial Sequence
  ENSG00000229740_3 (sequence is synthesized)
gtgactgataaagccagtgaaatggtcacactgattctacagtaagccatttttgagcacctattatacacaaagcactgtgcaggaaggttgcatagtaagttgagtgtgacccagact

SEQ ID NO: 970290 - DNA, 120 bp, Artificial Sequence
  ENSG00000229740_4 (sequence is synthesized)
cttagccttaccttccgaaactccacactggcatgaggaatagtgatatgcacttgtggaggaatggtctatagaatgaggataaagaggttaaagttttgcgatatctttcaattagtg

SEQ ID NO: 970291 - DNA, 120 bp, Artificial Sequence
  ENSG00000229740_5 (sequence is synthesized)
attctgtaaccaaaacccagagaagcaggttatgatggagtcatcagcaacacatccctttttagcttaacttaggagttctcttaaatcagggtgctaagtgggaaccaaaaaaacccc

SEQ ID NO: 970292 - DNA, 120 bp, Artificial Sequence
  ENSG00000229740_6 (sequence is synthesized)
agctttgtctgtccgagcttgcactgactgggccacgtcgggtgggttgcttattcatttgcccaacgtattttattccagtaatcattcatggcagtcactcaatgtctctgagcacta

SEQ ID NO: 970293 - DNA, 120 bp, Artificial Sequence
  ENSG00000229740_7 (sequence is synthesized)
gtttctgcaaaactttatgtatgacataaagtataacatactttatgcccatagaagtatctactctgttgtgagggtaaattagacaacatagccaacctgaaaagtctaattctaatg

SEQ ID NO: 970294 - DNA, 120 bp, Artificial Sequence
  ENSG00000229740_8 (sequence is synthesized)
aatttgtaatgaaatattatcctaagtgattatttcctaaacctgtaaatgtaatcagtttcttaattatctgtgcatgttcacacatagttaaagacattaagttgatgtgtttctaaa

SEQ ID NO: 970295 - DNA, 120 bp, Artificial Sequence
  ENSG00000229740_9 (sequence is synthesized)
ccttatacgctcttgataaaaattccaacttcagtcgaaacaccaggcagactgtaccatggaaaaagttctcacttcagaagaacaattgtctgctgcagaaataaagttgtcatcatc

SEQ ID NO: 970296 - DNA, 120 bp, Artificial Sequence
  ENSG00000229740_10 (sequence is synthesized)
aacattcattctcttcttcatttccagtctcactggcttgcaaatagtgcttcctgcctctttcttgctgtttcctcatccttgattttcagggtggaaacctcaattcatttccttgaa

SEQ ID NO: 970297 - DNA, 120 bp, Artificial Sequence
  ENSG00000229740_11 (sequence is synthesized)
atggcaaattattgcaaaggcatcaattggttcttgtctaagtggacaagcaaaactgcactctggctgagatgatggagacactcacctaccatgatgaggggaagaagctggaagctg

SEQ ID NO: 970298 - DNA, 120 bp, Artificial Sequence
  ENSG00000229740_12 (sequence is synthesized)
ggtcatcttgccagccactttctatggttatttcactctttcttttactcatcccttttcttcttgcatttatgatattttgccaatcagttttgagttcataaagacacaaaccatgtc

SEQ ID NO: 970299 - DNA, 120 bp, Artificial Sequence
  ENSG00000286428_0 (sequence is synthesized)
acagccatcatcagcctgccactcgttgagtcctgatccatggcctaaacctcaaattcctgggaggaatcattccggaaccaagttactctccaagcctcagttttcttatctgtgcaa

SEQ ID NO: 970300 - DNA, 120 bp, Artificial Sequence
  ENSG00000286428_1 (sequence is synthesized)
tgggctaggagctgttctgagttgtcgtgagggccaatggcccaaagtctgagactggcaggggcaggcattccactagtgcccgtcctgtttaacactggcccctgggctgggcacagc

SEQ ID NO: 970301 - DNA, 120 bp, Artificial Sequence
  ENSG00000286428_2 (sequence is synthesized)
agctcgcacctatcatcccagtgctttgggaagccaaggtgggaaggttgcttgagaccaggagttcaggaccagcgtaggcaacagagactccgtgtctacagaaaaacttaaaaaatt

SEQ ID NO: 970302 - DNA, 120 bp, Artificial Sequence
  ENSG00000286428_3 (sequence is synthesized)
agctgggtatggtgacgtgtgcctgtagctccagctactcaggaggcttgggttggaggcttgcttgagcccaggagtctgaggtttagagtgagctatgattgcaccgccgcactccag

SEQ ID NO: 970303 - DNA, 120 bp, Artificial Sequence
  ENSG00000286428_4 (sequence is synthesized)
cctgggtgacagtcaaaattaaaaatctgctcccagaaagggggttcagagggtgaccgcttattccccgggactcagcctacattttctctgccaacccatgcctttaccttctgggct

SEQ ID NO: 970304 - DNA, 120 bp, Artificial Sequence
  ENSG00000286428_5 (sequence is synthesized)
agggaaagaagacaggcaggtgacaagggagagacggattagcacagctcctccccttcacccctcaccccacattttttagtgacaggattttaaacggttgctgtaggcaagagagct

SEQ ID NO: 970305 - DNA, 120 bp, Artificial Sequence
  ENSG00000286428_6 (sequence is synthesized)
gtcagcccattatgggcgagggtggagcttagagagctcctcacatgagcccagcctgtggcttggacagaaagccccattaatcctccctctgtgctgtgcagtctgggttgagcaact

SEQ ID NO: 970306 - DNA, 120 bp, Artificial Sequence
  ENSG00000286428_7 (sequence is synthesized)
tgatttctctgagcctcagtgaggcactctgaaggtaggagtttccttgttcccgggaccctgggcctgacctggaggaccggatcgcagggccagagagtctggtcttggggaggcagc

SEQ ID NO: 970307 - DNA, 120 bp, Artificial Sequence
  ENSG00000286428_8 (sequence is synthesized)
tggcgtggtggccaggccatgggtttgcaactgcacctgggttcgagccctggttcggctgtcccttgctagctttgctgcattgggctggtcgctttcgccttccaagcctgggttttc

SEQ ID NO: 970308 - DNA, 120 bp, Artificial Sequence
  ENSG00000286428_9 (sequence is synthesized)
ccttcagaaacatggggacctgcctcttggggttgttggagtgtagaggaggacatgaaccggaggtcctccaagtcgttagactctgaaggcagctggaactgcccggggagggctgtg

SEQ ID NO: 970309 - DNA, 120 bp, Artificial Sequence
  ENSG00000286428_10 (sequence is synthesized)
aatggagagcccagaagagggtgcagggcggggcctgcccctagggggcgctggtgcccgcgggcatccagggatgagaggtggccttcgggtggtccctgccacaggtgtggggagagg

SEQ ID NO: 970310 - DNA, 120 bp, Artificial Sequence
  ENSG00000286428_11 (sequence is synthesized)
aggaggcccagaggcctcccagatgcagacatgcaaagataggcaatgacgccgtgtggggtatgcaaacatctccaccagcacgtcgccacatcagggacacgtgtctccaggtgcaga

SEQ ID NO: 970311 - DNA, 120 bp, Artificial Sequence
  ENSG00000286428_12 (sequence is synthesized)
gacatgcggcctcgccaggagacacagccatgcacgatggtctgacacctgcagacccccagcttcatgcaggacatatccaggcaaaccggcccacagagctattccatagacacacac

SEQ ID NO: 970312 - DNA, 120 bp, Artificial Sequence
  ENSG00000286428_13 (sequence is synthesized)
acgtccacacatgcacacacaccctgagagtttcaaggaatgcaccttggaaaccaaattccctcgagtctctgccatcaccaccatactccccatccctgccaccatctctagagaccc

SEQ ID NO: 970313 - DNA, 120 bp, Artificial Sequence
  ENSG00000286428_14 (sequence is synthesized)
cacagccacatcccatcccaagtcctcacgattcctcagggtttggcttcagcttcttcctcctcccatgccgtcctcctctggggaactcatccatcccgtgcctcagtggccagccac

SEQ ID NO: 970314 - DNA, 120 bp, Artificial Sequence
  ENSG00000286428_15 (sequence is synthesized)
ctggttgaagacccgggtgctcagcatcccgtctggtcactctgaggcccagccctggcccaggacgtctccacttggatgcctgggagaccctaagctcacacgcccagaccacacatg

SEQ ID NO: 970315 - DNA, 120 bp, Artificial Sequence
  ENSG00000286428_16 (sequence is synthesized)
tccccactccctgtgcctcctgtgcccccgtctcggtgatccagggacctagatgctgcctggactcccccctcaccaatatctccgggatctgccctggagactgccaccctagtcaaa

SEQ ID NO: 970316 - DNA, 120 bp, Artificial Sequence
  ENSG00000286428_17 (sequence is synthesized)
gccatcgtcacctctcacctggtgacccaactgacttccctgcttccatccagtcaccttgatctaatcggatctattctctacttggcagcaaggccctgaacggtctggccctgccct

SEQ ID NO: 970317 - DNA, 120 bp, Artificial Sequence
  ENSG00000286428_18 (sequence is synthesized)
caaactttgctgttcttgcagtttaggagattcacaagattttgcctgcccctgaggttttggacaagtctggaatgctctcagacaccccttctcactctcagtcctcctgatgccagg

SEQ ID NO: 970318 - DNA, 120 bp, Artificial Sequence
  ENSG00000286428_19 (sequence is synthesized)
taacttcagatcacagcttaatatgtagcttcttccaggaagccttccatgatgctccaccctccagacgaggttgggtacccgggcaacagggtttctttgtacctcaactgagcttgt

SEQ ID NO: 970319 - DNA, 120 bp, Artificial Sequence
  ENSG00000286428_20 (sequence is synthesized)
atcacactgcgatctccttgaagcagggatagccaatccccagttctcagcctggtggctggcacttaaggggccttcgcaaatactggttgattgaatgaatgaaagtgttggagaatg

SEQ ID NO: 970320 - DNA, 120 bp, Artificial Sequence
  ENSG00000286428_21 (sequence is synthesized)
ggatagagtgaaatggagatggggtgaatgcatttcttttaaggttggagatggctcagggttgggatgagacaaaggtggaagagaagagaatcacaggagggttgggcaagaataggg

SEQ ID NO: 970321 - DNA, 120 bp, Artificial Sequence
  ENSG00000286420_0 (sequence is synthesized)
gataggctgtcatcactactacaacatctgcctatgcatccttgaatataaacaggtacttaaaagcacagcattgacaacaacaaaaaatgctttccttttggcttgaaagaaggcaat

SEQ ID NO: 970322 - DNA, 120 bp, Artificial Sequence
  ENSG00000286420_1 (sequence is synthesized)
aagaagaaagattttaggagctgagctggaaattaagaagaaagcctcaaggttctgtgagcatgaacctacttaaggggtcttgcctccaagacagtatttaggatatatggaaagaag

SEQ ID NO: 970323 - DNA, 120 bp, Artificial Sequence
  ENSG00000286420_2 (sequence is synthesized)
cacaggaaaaaaagaactacaatacaacctctaccatacatcagatgtctgagtcctgagctctgttctgttccactggtcaatttgtcttcctgcaccaagacaatactatcttaatta

SEQ ID NO: 970324 - DNA, 120 bp, Artificial Sequence
  ENSG00000286420_3 (sequence is synthesized)
taattcttggcacattgctattctgaacaccttttaaaattagtttgcgaatttccaccaaaaacactgttgggatttgaattgtgctgtattaaaactgtggatcagtttggggagtac

SEQ ID NO: 970325 - DNA, 120 bp, Artificial Sequence
  ENSG00000286420_4 (sequence is synthesized)
tgacatatttagagcattgagtcttccttttcatgaacatggaatctttctctatcaagttcttcttttacatctttcagtaatgttttatagtttatccataaaggtcttgcatatttt

SEQ ID NO: 970326 - DNA, 120 bp, Artificial Sequence
  ENSG00000286420_5 (sequence is synthesized)
ttgtgagattgctctgaagtacatttttttgttgttgcaattgcaaatggatatttagaggccgtttgctctttgtggctggtgtatataaatgaattgatttttatgaattcatctttt

SEQ ID NO: 970327 - DNA, 120 bp, Artificial Sequence
  ENSG00000286421_0 (sequence is synthesized)
ccccggccggaagcacagggacttgggcccacattcctggatgccgcgattattactcggcatctgtacagggaacgtgggtgcctggaacatctgggctgcctttggaccaaaacgtct

SEQ ID NO: 970328 - DNA, 120 bp, Artificial Sequence
  ENSG00000286421_1 (sequence is synthesized)
gggtcatgtgcccagcctcccttttgtgaccttcccaagggggcaggccaggtcggcagggaactggaactatttttgagaaggccactggcagaggtcgcctcatccactgcccaagta

SEQ ID NO: 970329 - DNA, 120 bp, Artificial Sequence
  ENSG00000286421_2 (sequence is synthesized)
ccccacattctctgttctctaggccaagagtttgtggagctattgaaatgggagtaagggaggagcaaggccaaaggagaggaggaagagtacgcaaactggcctgtccataatataaag

SEQ ID NO: 970330 - DNA, 120 bp, Artificial Sequence
  ENSG00000286421_3 (sequence is synthesized)
tttaactggacactggtcagatggagttctgagaagcaccaatgaagacatcagtctgtgaagaccctcgtccacgtccaatccttgctagatggtcttatcagtggtcctcctgatgtc

SEQ ID NO: 970331 - DNA, 120 bp, Artificial Sequence
  ENSG00000286421_4 (sequence is synthesized)
tcagccctctgaggaaagcatctggacctggcctggccgaggggcactgcatgaggagctttttcaggtcacaggctgtctgggctttctccgcctgagtggatgtgtttgcaaagtgga

SEQ ID NO: 970332 - DNA, 120 bp, Artificial Sequence
  ENSG00000286421_5 (sequence is synthesized)
taaggcataaataactataaaaataagcaagccccaaccccctcaaagctcaaacacagttgaagcactttgtgttttaaggcaccctgagtctggcagatgaagaagccttttctcgtg

SEQ ID NO: 970333 - DNA, 120 bp, Artificial Sequence
  ENSG00000286421_6 (sequence is synthesized)
tttcctcctgcaatgtgaaaaatcacttcactggaaaagatctctgccaggccagaaagcctgtgcaccccagccgcatgctgcacccccgtcatgttctcttctctcagaagtgctggg

SEQ ID NO: 970334 - DNA, 120 bp, Artificial Sequence
  ENSG00000286421_7 (sequence is synthesized)
accatcgtttccactcgggtggctggcaggatgcttatgtaatcatcacctgccaggagccactgatatacacacttgtcctggacaaccatgctaccctgacagacgtgattgtgaggc

SEQ ID NO: 970335 - DNA, 120 bp, Artificial Sequence
  ENSG00000286421_8 (sequence is synthesized)
cacaggacagctttgtcagaatagatcctgtaggaaacacaaactccaaaatgagaaagacaatgatcttggagaactcccaatgggagaggctgttctttgggggctctgccacccagc

SEQ ID NO: 970336 - DNA, 120 bp, Artificial Sequence
  ENSG00000286421_9 (sequence is synthesized)
agtccccccaagtaagcgctaatgctgcagcaaagtgtaagcaaccactacttttgcatttaaaggctagtaagtcagaccctgtatatatgaccataataaacaatttctgtaattttg

SEQ ID NO: 970337 - DNA, 120 bp, Artificial Sequence
  ENSG00000286423_0 (sequence is synthesized)
gtttctactttgtgcctgtgactgccctggacattgagatccagacgtaaagacacaatgactgttcttgaggtcgcctccaaagtgttcagatgtccagtgctgttgccaggcagactt

SEQ ID NO: 970338 - DNA, 120 bp, Artificial Sequence
  ENSG00000286423_1 (sequence is synthesized)
gttactgacacaaattttcctccctgataagttgaactctcccccctcccaacttcattatgcctgctgccggagctctgctatagaggaagccatgccagacactgtgattcacgtgcc

SEQ ID NO: 970339 - DNA, 120 bp, Artificial Sequence
  ENSG00000286423_2 (sequence is synthesized)
taaaatatcaactggcctgagtatgcgagtgaggcgataaatctggaaaacataaatcagatcatcagatgctgtatctgttcctgcacacaggctgcagcagccatggcaaaatgccct

SEQ ID NO: 970340 - DNA, 120 bp, Artificial Sequence
  ENSG00000286423_3 (sequence is synthesized)
ccaactctgagagctacacccaggtggaggttaaaggatatgacttacagaccaaggaaagctgggtgaggagggccagagctgatatgcagaagaggccttaaaaccactgacattcag

SEQ ID NO: 970341 - DNA, 120 bp, Artificial Sequence
  ENSG00000286423_4 (sequence is synthesized)
cacagacaccagacatgagactggattcagcctctaagactgcagggagaggctggacaaggaagcataaagagaggtcccaaaatcttctaaagtaaagaacttgggccaatgtgtagt

SEQ ID NO: 970342 - DNA, 120 bp, Artificial Sequence
  ENSG00000286423_5 (sequence is synthesized)
ccctgaatctggacatgagagagaagacaggcttcagcttcactaggaactctgtcaagatggaaaatagaatttacagactctggtaggtggagagcctccttaaagaacactctagaa

SEQ ID NO: 970343 - DNA, 120 bp, Artificial Sequence
  ENSG00000286423_6 (sequence is synthesized)
aaaaacaaccaacactgcccttcctttagtgaacagagaaaagtgctcccattgagccacttaatcattccaaagcacagaagagaagggccttatctctgtagctgaggctaggccatc

SEQ ID NO: 970344 - DNA, 120 bp, Artificial Sequence
  ENSG00000286423_7 (sequence is synthesized)
agatcacaggctttcttgacctgggcctggggacagctggcttgttcacaaatgacagtgctcctccgggtctgacatgccaggattactagttccaaagtagttttggaaccgtaggaa

SEQ ID NO: 970345 - DNA, 120 bp, Artificial Sequence
  ENSG00000286423_8 (sequence is synthesized)
agtaaggagggttcatagttcaaatttctaaacctcaaaccctgctttgtcagggttaggtcctgctgcatcaatatgactctacccaaaaatcacatcagaccctctggggctttgtgc

SEQ ID NO: 970346 - DNA, 120 bp, Artificial Sequence
  ENSG00000286423_9 (sequence is synthesized)
ctggggatgcgggagaatgactgggagtagacaggaaacagacataggatgaggtggagctgggagcagcattggatatccatttaaggaagttaagcagcgatccaggttccaccccaa

SEQ ID NO: 970347 - DNA, 120 bp, Artificial Sequence
  ENSG00000286423_10 (sequence is synthesized)
aatgtccaagagttacaccctagggagcaaaggaagacccatgagtggattgaaaggctccacctgacatcatggtatcagatgaatatggccagtgcacctgtctccaggcatcagcca

SEQ ID NO: 970348 - DNA, 120 bp, Artificial Sequence
  ENSG00000286423_11 (sequence is synthesized)
gtgagaacatctcaatgcaccacaaggtgaaatgctgagaaattcattgtagcttatctcttttgctactatgacctgtcagcaaaaacaatggaaagataattttcccctttcccttcc

SEQ ID NO: 970349 - DNA, 120 bp, Artificial Sequence
  ENSG00000286423_12 (sequence is synthesized)
aggcagccagggctttgtgttcccagacctgggtgccttgaccccaggcagggaatttccagctatttgtgaatcaggcccacctgggggaattaaggaggcttccaagaagggagaggg

SEQ ID NO: 970350 - DNA, 120 bp, Artificial Sequence
  ENSG00000286423_13 (sequence is synthesized)
gtaaggtatagaagtttttgttctttgtgagtaacagcatgccagggcctgaccctgaggaggtggttggatcctgggaacttggaaaacaagaaagggtaagtttgtgggattcttcag

SEQ ID NO: 970351 - DNA, 120 bp, Artificial Sequence
  ENSG00000286423_14 (sequence is synthesized)
atagtctgtcccctaaactttgtgacccagccagataagagatgggtgtgaatgtttaatgatcttagacattgtggctttgggagcaggattaagtgttctcttagggtgcctggggat

SEQ ID NO: 970352 - DNA, 120 bp, Artificial Sequence
  ENSG00000286423_15 (sequence is synthesized)
gtggagaggagcctcaaaggccatctttgtggttgcctggagcagaaatacccaacagaggcagggaccttcctttagtgaacagagaaaagtgcttccattgagccacctaatcattcc

SEQ ID NO: 970353 - DNA, 120 bp, Artificial Sequence
  ENSG00000286423_16 (sequence is synthesized)
aacacatgtgtcatgtcaacacatgacagagacttcaaagagaagaaacagccacatgacaagaatgacccaactgatggacaataagctgccgaatgagttaaccttgatgatccgcca

SEQ ID NO: 970354 - DNA, 120 bp, Artificial Sequence
  ENSG00000286423_17 (sequence is synthesized)
ggtccaagacttataattctacatggcctctgtctcctctttgcaagctgatcacgatgcagaatgactgacgcagcacccatgaacttccagatcacaagcatgctctgttctccttcc

SEQ ID NO: 970355 - DNA, 120 bp, Artificial Sequence
  ENSG00000286423_18 (sequence is synthesized)
tacctgggctggggtgacagttgtacagctgtgcaccatctgagtgccaccatctagtgataagtccatgagtgtggatactaggggaagacatgggttgcagattggccaggtctaagg

SEQ ID NO: 970356 - DNA, 120 bp, Artificial Sequence
  ENSG00000286423_19 (sequence is synthesized)
cgctgacaagaaacattacaagagctttagatttaactttaaaagcttctattcctttcattgtcagactgtgaagcccacagctgcacatcatcaggcaccaacatgcagggggccatt

SEQ ID NO: 970357 - DNA, 120 bp, Artificial Sequence
  ENSG00000286423_20 (sequence is synthesized)
tccttgtttgcacaggaagctcctgcatactctgtattgctctagagtcacaccactgagccggccaaggtctcgactctggccctgacacgtggctggctttgactttgctttctgagt

SEQ ID NO: 970358 - DNA, 120 bp, Artificial Sequence
  ENSG00000286423_21 (sequence is synthesized)
tcagctcatttcctgggtcatctccccagtaaagacagcactgcctcatcaaggcaggtgctcatctggtcatgctcaaagtccctcgatgccctatgactggtcagcggtctcagggga

SEQ ID NO: 970359 - DNA, 120 bp, Artificial Sequence
  ENSG00000286423_22 (sequence is synthesized)
tgagatgtgtgggtgtcagttggcttcctcgtgtcccagtgctgtccccttcacctctctttatcccactttctaatgttcaccctctcttctccattagtaaactcccaagacttcttt

SEQ ID NO: 970360 - DNA, 120 bp, Artificial Sequence
  ENSG00000286423_23 (sequence is synthesized)
aaggtcgaccttaaacacccttctctgggatccttcccaaaaccccaggcagaactcactgcttctacctctacccttggtccgtgattttatttcattgtagattatagttaattgctt

SEQ ID NO: 970361 - DNA, 120 bp, Artificial Sequence
  ENSG00000286423_24 (sequence is synthesized)
gcattttgatgatgaagcagagcccaatgatcaagcatttgagatagaaacatttatgggaaatttttttaaattctctgttttcttaggattttaaaactagttttgactttgaaagcc

SEQ ID NO: 970362 - DNA, 120 bp, Artificial Sequence
  ENSG00000286423_25 (sequence is synthesized)
tagaatgtcagatctgggaagatctcgaagagatcattggttcattcttcagatggtgaaagcgtgcctggaggagtaaagagaccatccaaaggcattccaagtactaatggagccgag

SEQ ID NO: 970363 - DNA, 120 bp, Artificial Sequence
  ENSG00000286423_26 (sequence is synthesized)
gccaggtcagttcagcacacctgcattcagtttctactttgtgcctgtgactgccctggacattgagatccagacgtaaagacacaatgactgttcttgaggtcgcctccaaagtgttca

SEQ ID NO: 970364 - DNA, 120 bp, Artificial Sequence
  ENSG00000286423_27 (sequence is synthesized)
gatgtccagctgataccagtggggaagccaggaggaatgacaaacttgaagtcatggaattggattgcagccctgatttaccaccaactacacatgaccttgagaaatctcttaacatct

SEQ ID NO: 970365 - DNA, 120 bp, Artificial Sequence
  ENSG00000286423_28 (sequence is synthesized)
ctgagcctctggtgagtcttctgtgaaacgggagtgttgggctagatgctctcctaggttcctttcagtgcaaaggttccatgactcttcatctctaaaacagcaacttatcaacatttt

SEQ ID NO: 970366 - DNA, 120 bp, Artificial Sequence
  ENSG00000286423_29 (sequence is synthesized)
ctaatttctttaccaaaaacaatctctttgtacacagagcatacaaaatccacttgctttgatttaaaacaaaagcaagcacttattgacccagttttcagctctgatattcccctggag

SEQ ID NO: 970367 - DNA, 120 bp, Artificial Sequence
  ENSG00000286423_30 (sequence is synthesized)
ctgctcctgggtacataggcattctggaaggcattacatgcaccacctttatgcctgcctgcgagccttccggcctctcctgtgctctggggctgtctgagaatcggccccatcctttca

SEQ ID NO: 970368 - DNA, 120 bp, Artificial Sequence
  ENSG00000286423_31 (sequence is synthesized)
gccacagaaccctcacatgaagagaaaatggacaactaaccccacagacatcaccatcatgtgcaagctggcatgtaaggccctgacgtctactctggccctgcctgagccttactgagc

SEQ ID NO: 970369 - DNA, 120 bp, Artificial Sequence
  ENSG00000286423_32 (sequence is synthesized)
tccaacctcacaccgtcctgtgaggagggatgcctggatcacttccaggttattcatccatgttcttcacagtctgaagtgagtgtcatctttaacagcttagcagtgacaaacacattc

SEQ ID NO: 970370 - DNA, 120 bp, Artificial Sequence
  ENSG00000286423_33 (sequence is synthesized)
acctctaataatgaagagaaatgatttgggtgcataattccatttcactgtgcatttcctttcctttaaaaactgcctcctttgccatgagcaggtctaaataccctgtagtgtgaaatg

SEQ ID NO: 970371 - DNA, 120 bp, Artificial Sequence
  ENSG00000286423_34 (sequence is synthesized)
gggccctggagtgtattcttccagccattcgtgtgtgtgtgtgtgtgtgtggtgtgcatctgagttttaactaaaaaaggaccaccccttgttaaggaacaaagcaaattgctaacgtat

SEQ ID NO: 970372 - DNA, 120 bp, Artificial Sequence
  ENSG00000286423_35 (sequence is synthesized)
aaaggtatgtaaggtatatatctttatcccttaatggtgtaaaaaaaatggtgattatctttcccaatacattaacacccaccttcagcatcattttcatgacttcaaagtagtacaccc

SEQ ID NO: 970373 - DNA, 120 bp, Artificial Sequence
  ENSG00000286423_36 (sequence is synthesized)
acacacaaatcacttatttaaccaaattcctagtgttagacatctagatccttcccatgtctccaaaaagcatggtgttccctaaagcaacatcaccagaccacccaagtaaaccacttg

SEQ ID NO: 970374 - DNA, 120 bp, Artificial Sequence
  ENSG00000286423_37 (sequence is synthesized)
ctgtctcctacctggattcctggacctccttcatgggtgatcccccttgcttcctgccaccagcccaactccaatggggacttcttttggtcactccgagcctcacttgtatcagaactt

SEQ ID NO: 970375 - DNA, 120 bp, Artificial Sequence
  ENSG00000286423_38 (sequence is synthesized)
ctggtgccatagctcatgttgggtcaacttccaactcacctcatgaacttccaccagctttgtatgaaaagtcagtcccaaggatgcagtgctgtgctggtggacaggattctcttaatc

SEQ ID NO: 970376 - DNA, 120 bp, Artificial Sequence
  ENSG00000286423_39 (sequence is synthesized)
caaacccactgaaaggtcaagaatgagggtccagaggttggggctctgcatctcccttgctcaccctccaggaacaggagtcctgccctagaatccaagctgtgactggtgcccagcctc

SEQ ID NO: 970377 - DNA, 120 bp, Artificial Sequence
  ENSG00000286423_40 (sequence is synthesized)
tagcatgccaagtgcccctgtgcagcatgttactaaagccttggaataacaccacgaggtacattcattattatcttccttttacatggagggaacccaacacagaggggataggtgact

SEQ ID NO: 970378 - DNA, 120 bp, Artificial Sequence
  ENSG00000286423_41 (sequence is synthesized)
tgtcacggtctagtggcttgggagatctggaatttatactgaggtctgtctgaccccgtctgcctttgctttattagataattaaccagtattacctgccaaggcctcctcatgaggccc

SEQ ID NO: 970379 - DNA, 120 bp, Artificial Sequence
  ENSG00000286423_42 (sequence is synthesized)
gcagccaggctgtgtaggaacaaacatgaccactgagcttcaagcacataccattcctccttcttcccacgtctaccttgcgtgtgttaggataactgtgaaactgctgttaaaaacaaa

SEQ ID NO: 970380 - DNA, 78 bp, Artificial Sequence
  ENSG00000286423_43 (sequence is synthesized)
cgtgtgttaggataactgtgaaactgctgttaaaaacaaagtcctaaagatgggccaggtgtcaagaggattgcttga

SEQ ID NO: 970381 - DNA, 120 bp, Artificial Sequence
  ENSG00000286424_0 (sequence is synthesized)
ctctggaagtcggattgcaacagaagtttacaaatggcttgtgccaagtgaaggacccaggaatgctgcgactctggcttcagcaccggcatctgtctgtcagctgggcccagcccaagt

SEQ ID NO: 970382 - DNA, 120 bp, Artificial Sequence
  ENSG00000286424_1 (sequence is synthesized)
atccctgaggggccaagaagcagaagaggcagaaagacctgagctccaggccaggccctgctgcagcaccaagtgtcatccatggaacccctttccctcctccaagcctccttccaccat

SEQ ID NO: 970383 - DNA, 120 bp, Artificial Sequence
  ENSG00000286424_2 (sequence is synthesized)
tcaggctcctgccctagattgcacaaggctgtggcaccgatttcagctgaaaccataccctcctctgtcttcccgtggatctttgtccatcgcccattctaacacacgtctgtctgcctt

SEQ ID NO: 970384 - DNA, 120 bp, Artificial Sequence
  ENSG00000286424_3 (sequence is synthesized)
gtttggagtttttctgtatgtgttttcttccctttcaaacttggaggtccttgaagacatagtccagggcatgtggtgggtgctcagcaaatgcttactgaatcggtttgtcctcgctta

SEQ ID NO: 970385 - DNA, 120 bp, Artificial Sequence
  ENSG00000286424_4 (sequence is synthesized)
gcctctgttcaggtgctgccatttcctgtttcaatttgccaaacaaatggagactgacctatcaggtcctcaacttcccctcctctataaaatagtctgtgtgtgtggcgggggggttgg

SEQ ID NO: 970386 - DNA, 120 bp, Artificial Sequence
  ENSG00000286424_5 (sequence is synthesized)
caggctctgccaccagctgtatgaactaaagacaatcactgggcttctctgggctttcgtgttctgaaggaactcctccttccactctcaacttgcttcatgtccaactttttttgttat

SEQ ID NO: 970387 - DNA, 120 bp, Artificial Sequence
  ENSG00000286424_6 (sequence is synthesized)
tattattatttttttagagatggggtcttcctatgttgcccaggctggcctctaactcctaggctcaagcgatcctcctgctctggcctccggagtagctgggaccacaggtccacacca

SEQ ID NO: 970388 - DNA, 120 bp, Artificial Sequence
  ENSG00000286424_7 (sequence is synthesized)
ccatgcctggctcatattcacctttctcactaggactgtgcaataccattttctggtgactcttcccaccaacagctgactccctaaataatccagctccccaccatcatgcgtgctctt

SEQ ID NO: 970389 - DNA, 120 bp, Artificial Sequence
  ENSG00000286424_8 (sequence is synthesized)
ttcaaggccccaagctgatcctgtaagtctcttgtgtaaagccctctgctgggtcccattcccttgaccccagctcctacctcctgactttggctctaacactgatacggtttggctgtg

SEQ ID NO: 970390 - DNA, 120 bp, Artificial Sequence
  ENSG00000286424_9 (sequence is synthesized)
tgtgtccccacccaaatattatattgaattcccatgtgttgtgggagagtactagtgggaggtagttgaatcatggaggaaggtctttccagtgctgttctcatgatagtgaataagtct

SEQ ID NO: 970391 - DNA, 120 bp, Artificial Sequence
  ENSG00000286424_10 (sequence is synthesized)
agatctgatggttttaaaaaggggagtttccctgcacgagctctcttctctcatctgtcaccacgtgagacatgcctttcaccttctaccatgattgtgaggtctccccagccacatgga

SEQ ID NO: 970392 - DNA, 120 bp, Artificial Sequence
  ENSG00000286425_0 (sequence is synthesized)
ctgagcagagcgtgtggcagcccagacaggttgctatggttcagcaagcccaggaggagtggaattcatatttcttttgggacgtattaaggaaagctcatcatcttgaactgacggaat

SEQ ID NO: 970393 - DNA, 120 bp, Artificial Sequence
  ENSG00000286425_1 (sequence is synthesized)
cttacccagctcaatgttcttacctcagaggctgcatttttgcaaggtagcatttgctacaagggtgggctggaaggtgagaaatggagataagctattggggtgtttctggaaggaggt

SEQ ID NO: 970394 - DNA, 120 bp, Artificial Sequence
  ENSG00000286425_2 (sequence is synthesized)
tttcgtcatatgcaagttgcaagcatagcaggttagctgacgtctttagtgggatttcagcatatttccaaggaaatccactggtgtttacctctcccatttatgatctcttggaagtca

SEQ ID NO: 970395 - DNA, 120 bp, Artificial Sequence
  ENSG00000286425_3 (sequence is synthesized)
cttccttcaataatcaatcaatcactgtgactggaacatcaaggctccacgtgcaccattgaagccctgactgtgtttgtcctggctgcactcacagagagcaagagtgatgacaatttt

SEQ ID NO: 970396 - DNA, 120 bp, Artificial Sequence
  ENSG00000286425_4 (sequence is synthesized)
gaacacacaactcaggctctcgcttcttgcaagaagaggtaccacgtgttagtcatttactaagggccagctctgctacgtatttcgcttttgactctcacagcagtcctgggagatgaa

SEQ ID NO: 970397 - DNA, 120 bp, Artificial Sequence
  ENSG00000286425_5 (sequence is synthesized)
tgcttcctctttccacatgtgacagatgagcaaatcgagtctctaagaatttacataactggctatggcagggccagagattgcacagggcgctgcctgacacccaggccaatgccagac

SEQ ID NO: 970398 - DNA, 120 bp, Artificial Sequence
  ENSG00000286425_6 (sequence is synthesized)
cacatggtggcctgtagcgtggaggtgaagagctcccatccagaggccagacggtgaaaccttttctctctacttgcttgttgggtgacacttacctctcaggatctgtttccttttata

SEQ ID NO: 970399 - DNA, 120 bp, Artificial Sequence
  ENSG00000286425_7 (sequence is synthesized)
cagaatgtggacagtaaagggcctcttcatagggttggtgcaagctgtaagtaactacaacaccaaggctcacagaacagtggggcagctcgtgtaagcatgagatgtcgttgttgccac

SEQ ID NO: 970400 - DNA, 120 bp, Artificial Sequence
  ENSG00000286425_8 (sequence is synthesized)
gtcctctccaaagagaaaagaaaattccttggtaagaaatggagcttatatttttagaggtctgttgggtcaatattcacattacacattttccattaacttcctgccctctcccttttt

SEQ ID NO: 970401 - DNA, 120 bp, Artificial Sequence
  ENSG00000286425_9 (sequence is synthesized)
tttttcttttactgaactctggatttcagccatgcccagtatatatgcttcacaaactcccaatacgcacgttataggtatctgcactattataccatgtgggctcccatgtggtgtcac

SEQ ID NO: 970402 - DNA, 120 bp, Artificial Sequence
  ENSG00000286425_10 (sequence is synthesized)
aaaaagtgtctttgcacgatcctctgctctcctctctcctaatgggcacgccagaagcacgcagtcagggtgccagccagcatctcccgcttggtccttcattgtttgtttggtgtttag

SEQ ID NO: 970403 - DNA, 120 bp, Artificial Sequence
  ENSG00000286425_11 (sequence is synthesized)
ggtgctagaggggccctggattctgtgaagccaattgtcctctcacccatccccttctcagtttctgcagggcatccactcgtgggtagacccagaagtccccaaggagcagcttcacac

SEQ ID NO: 970404 - DNA, 120 bp, Artificial Sequence
  ENSG00000286425_12 (sequence is synthesized)
tgtcacctcttctgcctttcccagcccactccctctcgggagcaccagttcttcccactcacctcctgtccccatgccagtgtgtcttcctttttgtttggcatgttaggggctacgttg

SEQ ID NO: 970405 - DNA, 120 bp, Artificial Sequence
  ENSG00000286425_13 (sequence is synthesized)
tgttccccaaatccatctgttggagccctaacccccaagatctcagagcgtggctgcatttagagataaggtctttaaaaagttaattaaggtaaaattagatcattagagtaggccctg

SEQ ID NO: 970406 - DNA, 120 bp, Artificial Sequence
  ENSG00000286425_14 (sequence is synthesized)
atccaatcccactggtgtccttataacaagggaacttgaggacacagacaggcacagagggatgacactgtgaaggcacagggaagatatctgcaaaccaaggagagaggctcagtcctg

SEQ ID NO: 970407 - DNA, 120 bp, Artificial Sequence
  ENSG00000286425_15 (sequence is synthesized)
ccgacacctccatcctggactccagcctccagaactgtgagagaagaaatgcctgctgcttaagttaattagtctgtggtgctttgttacagcagccctggaaaactcagaaaacaaaaa

SEQ ID NO: 970408 - DNA, 120 bp, Artificial Sequence
  ENSG00000286425_16 (sequence is synthesized)
gaaaagaaaacatatagtgaaagcatttaacacactggagatgctcaataaatattaccattttttttctaaatggtaaaaataaataataaataaatccaaagaaaaagaaagaaaact

SEQ ID NO: 970409 - DNA, 120 bp, Artificial Sequence
  ENSG00000286425_17 (sequence is synthesized)
catataggcattaagcaaaagttaccaaagtcaggtttggttctatcactttggatgagcagaatggcagaggcagcccacggccagcaggtgttcttctacttctgccttgggtcagac

SEQ ID NO: 970410 - DNA, 120 bp, Artificial Sequence
  ENSG00000286425_18 (sequence is synthesized)
accatgcacctaggagggggttgggaggaacgagaagggcagaacatccactcagaatattcttacgtggagctctccctgagtccatgccaaatcaaatccctgtacttatgttcaaat

SEQ ID NO: 970411 - DNA, 120 bp, Artificial Sequence
  ENSG00000286425_19 (sequence is synthesized)
acatgatatgtaaatttagtgagaaaactgtactttctttgttcatagttagacattttcactttctttttcagcaaaaccagtgtgatattcagagttctggcaataaattaaaagaac

SEQ ID NO: 970412 - DNA, 120 bp, Artificial Sequence
  ENSG00000286427_0 (sequence is synthesized)
acacgctgctcccgcagcgcccgctccagctcttcgtagctcgttcatgttcctggcgcttttccccagaaagccaggcacgctctgagcattgggcccccaggctcagatgtggccctg

SEQ ID NO: 970413 - DNA, 120 bp, Artificial Sequence
  ENSG00000286427_1 (sequence is synthesized)
aatgaggagctctgttttggaagaatgcgctttcatcggtattgctgcctggagtttcgagaattcgtttcatggaatcaacaagactttcttacacacacagcgtgaccataagtggag

SEQ ID NO: 970414 - DNA, 120 bp, Artificial Sequence
  ENSG00000286427_2 (sequence is synthesized)
agagaaatgtgccagagtaaagacagccatacatacttgacacttctcccattaaaaagtggagtctatttccttccacttgaatctgcactgacctgagactgcttggacccataggaa

SEQ ID NO: 970415 - DNA, 120 bp, Artificial Sequence
  ENSG00000286427_3 (sequence is synthesized)
atggcagatatgacatatggccagtcccaggctttgccttggagagacctagaaacttctaccatagtctcttgaagcttcgaggtggcaggaaataaatccaaccagctacctggccgg

SEQ ID NO: 970416 - DNA, 120 bp, Artificial Sequence
  ENSG00000286427_4 (sequence is synthesized)
agaaatcagcaggaaaggccccaagaatatgtgaagaaggagatgggcctggtagagcccaggcttccaaccaactgacaagactccaggcatggtaataaaaccatctcgatacttcta

SEQ ID NO: 970417 - DNA, 120 bp, Artificial Sequence
  ENSG00000286427_5 (sequence is synthesized)
gcagcagcagcagcagcaaccaacagaacatcactaagtgaccccagttgtgccatctgccccagttcctgctgcacaaaaccatgatataaagaagtgggttattttacatcagtaagt

SEQ ID NO: 970418 - DNA, 120 bp, Artificial Sequence
  ENSG00000286427_6 (sequence is synthesized)
attgggttagttttatactcagtaataaatcaagggagcattttacaacagtttcccagaagatgggcacaatagtggccccacagggtggggtgagaagagttgctgaagccttagcat

SEQ ID NO: 970419 - DNA, 120 bp, Artificial Sequence
  ENSG00000286427_7 (sequence is synthesized)
catgcattatactcactagtaactgatgcttatgcccctggctgctgggaataaatattcttatagccgctataaatcttgctgatcattcaagattcctcttgggtactggcaacttca

SEQ ID NO: 970420 - DNA, 120 bp, Artificial Sequence
  ENSG00000286427_8 (sequence is synthesized)
ggaactttcatgttgacctaagagtctctctacttttcataactctatcttagccaagttgtattttgttgaaattatctctgttatctccacaagtttctattttccactggtaagatg

SEQ ID NO: 970421 - DNA, 120 bp, Artificial Sequence
  ENSG00000286427_9 (sequence is synthesized)
gttgaagatacagattgcatcttcctcatggttgcatgtatgtacaattttaacagaatctgcacattgtaaatgaccaacctagcatttgcatattgtattacagtttataaagggttt

SEQ ID NO: 970422 - DNA, 120 bp, Artificial Sequence
  ENSG00000286427_10 (sequence is synthesized)
tcatgattatccctcttgaacagttgaattgaggctcagggaggaaaacgactttcttaaaatccctgggtcacaggggctcctcactcagaggcttgctaattttctcccccacatact

SEQ ID NO: 970423 - DNA, 120 bp, Artificial Sequence
  ENSG00000286427_11 (sequence is synthesized)
gaggatatggagaacttcttagtgggagggagagagctgaagccctatcctccccatggatacatatcctttgttttcagtgtctgggaaatgccccaggattccctgctgcgttaccct

SEQ ID NO: 970424 - DNA, 120 bp, Artificial Sequence
  ENSG00000286427_12 (sequence is synthesized)
gggagactattgctcaatcccagcagctgctctggaggaaggaaaaagcagacattctgaatgtatcatacatacaatgcaatattgaattggaggttgctaatgagcgagaactctttt

SEQ ID NO: 970425 - DNA, 120 bp, Artificial Sequence
  ENSG00000286427_13 (sequence is synthesized)
attgtgtagtctacttccagtgaggtctagctcttaattttcagtgggcgtagcaggaagtactagtgtaaaaaataaaacatatatattactaatactgttgctatataaaacaatatt

SEQ ID NO: 970426 - DNA, 120 bp, Artificial Sequence
  ENSG00000225988_0 (sequence is synthesized)
aagctaattgactttactttgccggctctgttctctgcaaagagtgcccgtcctctctcccagtcgccaaatcgctactcacggaacaacatcaggagaactcgaagtctgtcgatgctg

SEQ ID NO: 970427 - DNA, 120 bp, Artificial Sequence
  ENSG00000225988_1 (sequence is synthesized)
gggacccctcttccttggagatccatactcgcagtgccccgaatgaggccggctgtgctgctgcagaggccgccagagagggaatccctcaaagtcgccgctggagtgggccggggaagt

SEQ ID NO: 970428 - DNA, 120 bp, Artificial Sequence
  ENSG00000225988_2 (sequence is synthesized)
gtgcgctgctcaggacacatggcccgtggtctgtggtgttacctttggatggcgcggcggtaggtgggcctggttgctcatggctcagtatccctgggctggcccgcgcgcccgctgcgg

SEQ ID NO: 970429 - DNA, 120 bp, Artificial Sequence
  ENSG00000225988_3 (sequence is synthesized)
actccagacttgacggcttctgcccgcgggaaggaagatgcattctactgttgggcgcctcgctgcctgcacctctggctcgcgatgtcctcaacctgggaaagacgtcggcgctttgca

SEQ ID NO: 970430 - DNA, 120 bp, Artificial Sequence
  ENSG00000225988_4 (sequence is synthesized)
cccgagttgggctccttggcacattcgagcagctgctctggagaaacagcaggatctacggaagtttgtacccaccgcctcgcctgcagcctcgggagtctcaacccaagccggcccggc

SEQ ID NO: 970431 - DNA, 120 bp, Artificial Sequence
  ENSG00000225988_5 (sequence is synthesized)
cttgtagcccagagcagcaaagccacagcaggcaacgcgagctaacgcgggtcgcgcggaggtcgggagcccaggcggcggaggcggcggcggcgcagttattcccgggtgactctgggg

SEQ ID NO: 970432 - DNA, 120 bp, Artificial Sequence
  ENSG00000225988_6 (sequence is synthesized)
actcgtgcagatgggggacgcctccggccacgcacttggagccagctgcagctcccgggagcctggcactgatggatcgtctcatttcccaacttgatgggccggaacctgggatagctg

SEQ ID NO: 970433 - DNA, 120 bp, Artificial Sequence
  ENSG00000225988_7 (sequence is synthesized)
tgcctgcagggagaggcaagacgaagaaagtcgtgcatcccctgggagggagaggctgcttgtccctgtcctgacaccccaccccatggctcaggctggagtcagagggaatgagaagag

SEQ ID NO: 970434 - DNA, 120 bp, Artificial Sequence
  ENSG00000225988_8 (sequence is synthesized)
cagaggctgagcttggcttcctagaatcttcctccatctcaagaagtggaactccaactccgctccaaggcctacctccttagctgggtcttggagatcactgaacggatctcaaacctg

SEQ ID NO: 970435 - DNA, 120 bp, Artificial Sequence
  ENSG00000225988_9 (sequence is synthesized)
ggatcttaaagaatcccaaatctgggtgcacctcagcagaatacgttctcccagaccagtctgtcaggaaagccccagctctctagctggccaggaaacaccacatggttcgggacatct

SEQ ID NO: 970436 - DNA, 120 bp, Artificial Sequence
  ENSG00000225988_10 (sequence is synthesized)
gacaaagtgccgtccaaaatccaaagtgtggttctgagaccagtagcatcactgtcccttggagactgcaggattgcaggcctcatccagccctactgcatcggaacgtgcatctgagag

SEQ ID NO: 970437 - DNA, 120 bp, Artificial Sequence
  ENSG00000225988_11 (sequence is synthesized)
atatccaaggactgtgtacagtctggttggagaagcccttgcccaatttacagaacctgagtttagccattgacaacctgttcaaccctgttcctcccagcctcctcttcatcacctgtc

SEQ ID NO: 970438 - DNA, 120 bp, Artificial Sequence
  ENSG00000225988_12 (sequence is synthesized)
aagtgggagctgttttggaggtcctggggggctcttatgcactcctgagtgcattcagaccaatggaatcagaatctctggtttgctggagcctaggcaggagtgtgtgttttgggtgtc

SEQ ID NO: 970439 - DNA, 120 bp, Artificial Sequence
  ENSG00000225988_13 (sequence is synthesized)
tccaggtgattttaatggcagccaggaatgactagtgtagaaatacccactttacagattagttagattagctaatctgtctagcctgggcaagacaatatgtgcagtgttaagcccact

SEQ ID NO: 970440 - DNA, 120 bp, Artificial Sequence
  ENSG00000225988_14 (sequence is synthesized)
gctctctgtagcctgattcattctgtagcctgacattctgtagcctgagtcattctgactccagcaagtatggccttgaaccatacttaattagccaagtatggctaatcagcttcgctg

SEQ ID NO: 970441 - DNA, 120 bp, Artificial Sequence
  ENSG00000225988_15 (sequence is synthesized)
tgcctcggtttccttacccacaaaatgaagttgataatagtgcccaccacaaagggtgtttgtgaggatttagaatcaaatgtttaaaatcaaattcaataaatattagtttatgaggtc

SEQ ID NO: 970442 - DNA, 120 bp, Artificial Sequence; identical to SEQ ID NO: 943311
  ENSG00000131538_0 (sequence is synthesized)

SEQ ID NO: 970443 - DNA, 120 bp, Artificial Sequence; identical to SEQ ID NO: 943312
  ENSG00000131538_1 (sequence is synthesized)

SEQ ID NO: 970444 - DNA, 120 bp, Artificial Sequence; identical to SEQ ID NO: 943313
  ENSG00000131538_2 (sequence is synthesized)

SEQ ID NO: 970445 - DNA, 120 bp, Artificial Sequence; identical to SEQ ID NO: 943314
  ENSG00000131538_3 (sequence is synthesized)

SEQ ID NO: 970446 - DNA, 120 bp, Artificial Sequence
  ENSG00000249885_0 (sequence is synthesized)
tctctgttcgtcttttttgggagtccctccctgaccatccgacctaaagtgatgtaggacttttaggggcagaagccattccaggcagagggattatgctggtcctcatacatggaacaa

SEQ ID NO: 970447 - DNA, 120 bp, Artificial Sequence
  ENSG00000249885_1 (sequence is synthesized)
aattccactacatagaacatgatgtaccatgatcacgacagttccagtcagggagtgaagggagagagcccaggcttcggagctaagcacataaagtttgaatccagctcttctgcatat

SEQ ID NO: 970448 - DNA, 120 bp, Artificial Sequence
  ENSG00000249885_2 (sequence is synthesized)
tctatgaatcactgaatatatttacatacattcactgtattcagtttcatctctaaaattagcataatatcccatttttagagttgtgagaaagataataaataatgcatattttaaaaa

SEQ ID NO: 970449 - DNA, 120 bp, Artificial Sequence
  ENSG00000225981_0 (sequence is synthesized)
gagggccgagacccccaaccggtgaaggggcgcggtctgcttgggggtcctgccattctggacccctgcggagacctggaattttctttttcgccgccccacctcccaccaccatctcac

SEQ ID NO: 970450 - DNA, 120 bp, Artificial Sequence
  ENSG00000225981_1 (sequence is synthesized)
cccaccgccatggagaagaggcaggaaaggccgttgacaaacggggacactgaggctcgaacaccctgccctgtctagggcctcagccctcggcagcccggcctcccggggagcaggagg

SEQ ID NO: 970451 - DNA, 120 bp, Artificial Sequence
  ENSG00000225981_2 (sequence is synthesized)
ttcaaaggacgtccgcatctggtttctctttccaggccgctacatgccagcgggggttccaggcaaggcagagtggattcaaccctgaacgtcacctgaccaaggctgctgggccaagct

SEQ ID NO: 970452 - DNA, 120 bp, Artificial Sequence
  ENSG00000225981_3 (sequence is synthesized)
ggaacagaatcggatccttgagtctgggaggcggaggcggttcgggaatgcagagggcgtgagagagaaccaagggaggtgtcctggccgagtggtgtttcccgcgggacttctcagagc

SEQ ID NO: 970453 - DNA, 120 bp, Artificial Sequence
  ENSG00000225982_0 (sequence is synthesized)
aaatcatttttcagatgctacctggggactcctgcagctgctgtgcattttcttggaatctctcatggaaccatgcatgatgactgtttctacatctctgcatgggaaggaactcaggga

SEQ ID NO: 970454 - DNA, 120 bp, Artificial Sequence
  ENSG00000225982_1 (sequence is synthesized)
tagagggcaccccgttccatccccatcccagcccctagtgcaggggaagagagccgtggatgttaactattcaccttcagatgccctttcatggggtaggaactgggaagggcagaggta

SEQ ID NO: 970455 - DNA, 120 bp, Artificial Sequence
  ENSG00000225982_2 (sequence is synthesized)
gtaacatctgaacaaagctgggtgaattcccacggaagacggagcatcgagtcgtcaatgccttttggtaaacaagtcgcagctcttccgtcttggctcatcctcatgggcacatcccag

SEQ ID NO: 970456 - DNA, 120 bp, Artificial Sequence
  ENSG00000225982_3 (sequence is synthesized)
tggtgttccctgcccacctctgcacccacattttaagtgcctggaatgtgtgagacggatcctgccctttccttcaccaagccacctagcagaacccatgccatccagggcatctgcgag

SEQ ID NO: 970457 - DNA, 120 bp, Artificial Sequence
  ENSG00000225982_4 (sequence is synthesized)
gcatcttgcactcggtgtcctgagcccagctgaagtggcaggagcaccactgactccagaacagacttgtaaagaaagaaggtatctcccaagtcagccacagaggctcatggtttcctg

SEQ ID NO: 970458 - DNA, 120 bp, Artificial Sequence
  ENSG00000225982_5 (sequence is synthesized)
ctccatctagtcctgggtgtttgcttaaatgggcactggctgacatgactgaaacctcatgcatccatcacacattcaccctcaacaaagacacagcccctcctttaaggcctgtgctcc

SEQ ID NO: 970459 - DNA, 120 bp, Artificial Sequence
  ENSG00000225982_6 (sequence is synthesized)
ctgtacatacacagtgccctgcagcacagagaaaccacatgaatggccttcttggctcaaggagtcagggagtaggggcctgctgagcatgaccatgtccagagagtggggaccccaaga

SEQ ID NO: 970460 - DNA, 120 bp, Artificial Sequence
  ENSG00000225982_7 (sequence is synthesized)
actgtaacagcccattggacagatgtgggcaggaatggggacaaaatcacccacagtctcagaccccaaatgaggtgtgaatatgaaatccatgaaaacctcatgtggaggccaaaagac

SEQ ID NO: 970461 - DNA, 120 bp, Artificial Sequence
  ENSG00000225982_8 (sequence is synthesized)
taactagattcccatctcatctctccaggccagaagcctattatccaatccttcctctcattgcaagccccagaagtaacagcaattacaaaataaagaaaaataagaacttgtcagctc

SEQ ID NO: 970462 - DNA, 120 bp, Artificial Sequence
  ENSG00000244300_0 (sequence is synthesized)
ggctgggcccagctccgcgggcgcgcccccgtcaccccctcccaggccagttcagggcagcgccaaggggccgcgggctcaggctgaggcctcctcctgcctaggcgtctggcgtccgtt

SEQ ID NO: 970463 - DNA, 120 bp, Artificial Sequence
  ENSG00000244300_1 (sequence is synthesized)
aggctgaggcctcctcctgcctaggcgtctggcgtccgtttgtctgtccgaggcctcagcgcaggtaaagcgcggggctggggggcgcagagctccattgggctgggaaccagcgcgtct

SEQ ID NO: 970464 - DNA, 120 bp, Artificial Sequence
  ENSG00000244300_2 (sequence is synthesized)
cgtgcccttgggggacccgcctgcccgagccgcctgctaagcctcccgctcccctccacgctggagcgcgcggagcccggtctgctcggaactccactctgcgggagcggaggccggcgc

SEQ ID NO: 970465 - DNA, 120 bp, Artificial Sequence
  ENSG00000244300_3 (sequence is synthesized)
cgagcgcgaggcccttggcgccgggcctccgcggccaggccgggcaggtgagcagtctccgtgcctcccggttggcgttcccctcaacgcgtgcggtcccgccggggcccactgtctctc

SEQ ID NO: 970466 - DNA, 120 bp, Artificial Sequence
  ENSG00000244300_4 (sequence is synthesized)
gcgtgcggtcccgccggggcccactgtctctccgtccgtctgtctctcaacttttcccatcctttagcttacgattcttcatcaactcgtaaaatgagatcgccgcggagctcgagccta

SEQ ID NO: 970467 - DNA, 120 bp, Artificial Sequence
  ENSG00000244300_5 (sequence is synthesized)
tttggcgtctccggagactagcaagaccctctgaaagacaccgcgtccccagggataatcccccgtgtccggcaaagctgccccgctcgagcgcgaaccctgggacccagcgcgggaggc

SEQ ID NO: 970468 - DNA, 120 bp, Artificial Sequence
  ENSG00000244300_6 (sequence is synthesized)
tgggctgtgaacgccaggaccgagcggaagcttcccgcccggccgcgatcggtgccgcggctctcagggaagtggctacgcgcgtccctcgggaaagcagagtaatttgcctgtttctgg

SEQ ID NO: 970469 - DNA, 120 bp, Artificial Sequence
  ENSG00000244300_7 (sequence is synthesized)
caaatctgaagattggaatgccacacggcccagccattccttttccaggcatatgagaagccctcacacatgagcaagaaagagatgtggccaaagacattcatggagccctgtttgtta

SEQ ID NO: 970470 - DNA, 85 bp, Artificial Sequence
  ENSG00000244300_8 (sequence is synthesized)
agagatgtggccaaagacattcatggagccctgtttgttaaaacagagaaaaagaaattaagaaatactaaaaataaaaatttat

SEQ ID NO: 970471 - DNA, 120 bp, Artificial Sequence
  ENSG00000244300_9 (sequence is synthesized)
gatcgaagcttgcaatcagctgtgatcgtgtcactgcatgccagcctgggtgacagagagtgagaccctgtatcaataaagaaagaaagaaagaaaagaaacagaaataaacttaggaca

SEQ ID NO: 970472 - DNA, 120 bp, Artificial Sequence
  ENSG00000244300_10 (sequence is synthesized)
cagcagacggcccatcctgagggtaccacatagcagatgctgggaccttttttcaggtggacgccacatgacctttcctttgcaggcatccatgctgatgttcacaaggcacacagcatt

SEQ ID NO: 970473 - DNA, 120 bp, Artificial Sequence
  ENSG00000244300_11 (sequence is synthesized)
tcagctgaagaaagaactggcaggattttcatcacgaaagggcactgtctatcgtttatgaaaatgaagcatatgaagtaaaagtttggaaacagatggaattaaatcttctgacagatt

SEQ ID NO: 970474 - DNA, 120 bp, Artificial Sequence
  ENSG00000244300_12 (sequence is synthesized)
ttaaaataagatctaaaaaagagcaagacatgctcttggatggggaaacttaatatcagaaaaatgtcaattttcccattttttccatataaatttaatgtaattcaaattccattacca

SEQ ID NO: 970475 - DNA, 120 bp, Artificial Sequence
  ENSG00000244300_13 (sequence is synthesized)
agatccgagcgctgatgggcaggcagatagccctctgctgggggcacgcgggctccccgtgcccgtaccactcgcctgcctgccggggccactgagtgtgcgccccggtgtgcccggcgt

SEQ ID NO: 970476 - DNA, 120 bp, Artificial Sequence
  ENSG00000244300_14 (sequence is synthesized)
gtttggatggacacgtgggtgtgccagtgcatgggctaacgccgatgcaactgtgcgggtgtgtcaaacaagtgtaccacaaaaaagtgcaggtgtgcgagcccatccatgcacacgcat

SEQ ID NO: 970477 - DNA, 120 bp, Artificial Sequence
  ENSG00000244300_15 (sequence is synthesized)
ggcaggcgtctgtgctgtgtccggaggcggccgatgaggcgggtggagggttcacacaggaggcggtgctgcactaagcttgtgggcaggcatgcggcccagggtggctggacacgtggt

SEQ ID NO: 970478 - DNA, 120 bp, Artificial Sequence
  ENSG00000244300_16 (sequence is synthesized)
ggaggaatgggaatgcaagcccgcgtgtccgagtgcagcggatgagcatcctgcgagtgcctcactgtgtctgccctggaggtggctgtttaggggagcacgccggaggccactagggtg

SEQ ID NO: 970479 - DNA, 120 bp, Artificial Sequence
  ENSG00000244300_17 (sequence is synthesized)
gatgtgctgtgtgcatgcaagtgcccaccctacgttgtgtttcggggcacacaagctacctgtgcctaccgggatgagcatgcaagtgtcaccgctcccgccgggcgtgcttggggtgtg

SEQ ID NO: 970480 - DNA, 120 bp, Artificial Sequence
  ENSG00000244300_18 (sequence is synthesized)
tagataaaatgatctgaaagattatgcagcagaataaatgcccaagaattaccagggaagactggaaaaaagactgctgtgggggttttgccttcctggaaataagaccatactgcaaag

SEQ ID NO: 970481 - DNA, 120 bp, Artificial Sequence
  ENSG00000244300_19 (sequence is synthesized)
tcactgtaatcagatcaatatggcattggcagaggactagacaatggaaaggaatggagaatacaaaaataagtttcaggatatatgagaatgagatatatgccaaaggtagtattttga

SEQ ID NO: 970482 - DNA, 120 bp, Artificial Sequence
  ENSG00000244300_20 (sequence is synthesized)
ttcggtgggagaagggcagactgtgaagtaagtggtaccagccacaactgaatatccatctgggataaaataaaattgcactcgtcttagagatccaaatcaacttcagatggattaaaa

SEQ ID NO: 970483 - DNA, 120 bp, Artificial Sequence
  ENSG00000244300_21 (sequence is synthesized)
ctttgaatgtaaaaaacataaatgactaacagtcctgcaaaatatcttggagacaacctgtgccatctggagagtgggaagagcacatgcaaaggccaaggggtggagcagcccagcatg

SEQ ID NO: 970484 - DNA, 120 bp, Artificial Sequence
  ENSG00000244300_22 (sequence is synthesized)
ttctggaaaaggtagggctccccaaggctgggatgatggtggagacctgggtgtgtgggagcacaggggtgggggcccgtgggccaggaatgcacagagaggggctggtgctctgccgca

SEQ ID NO: 970485 - DNA, 120 bp, Artificial Sequence
  ENSG00000225986_0 (sequence is synthesized)
gggacatccttttctctccctgggtctgtgtccccgtcgctacatcccagcctggagggcatggcccagcggttgcataggtccctcggtttctgcagagcccgggagtcaccctatttt

SEQ ID NO: 970486 - DNA, 120 bp, Artificial Sequence
  ENSG00000225986_1 (sequence is synthesized)
ggtaaaggtgaattgctcctccatgggtcgtgaaagaagatcatgtcagtggtggtgtttctgctcgtctcagaagggaagtctgtgacccgtgggagttgctggggagggcctggtctg

SEQ ID NO: 970487 - DNA, 120 bp, Artificial Sequence
  ENSG00000225986_2 (sequence is synthesized)
acacactctggtcatccaggaagcctctgtggccctcggaatgtgtaaaagatggtggttttaggagctgctggttttgcaactgagtgctgacggcttatttcttgttaatgattctgt

SEQ ID NO: 970488 - DNA, 120 bp, Artificial Sequence
  ENSG00000225986_3 (sequence is synthesized)
caaaagtgtcttagcgatgctcttcagcccttcatcacccacccaaaaaagattaaagtggattcttcatcagctattttaaaatcacctaagaattatacaatcctttggagaatcaaa

SEQ ID NO: 970489 - DNA, 120 bp, Artificial Sequence
  ENSG00000286393_0 (sequence is synthesized)
gcccacgtctctcctctgtcttgttaaggaaagcggcgcttctgatcagaaaaacaacacaaggatctcagaggcaggacagagtgggatccgagggaccgcgtggtgtttctggccccc

SEQ ID NO: 970490 - DNA, 120 bp, Artificial Sequence
  ENSG00000286393_1 (sequence is synthesized)
ttccctctcgatggctgattattcagagtgttcacacccagcaaaggagcaggctgctcgttcccgactgcagcacggcgtgccgggccgcggtgttctttctggatcactggtttcctc

SEQ ID NO: 970491 - DNA, 120 bp, Artificial Sequence
  ENSG00000286393_2 (sequence is synthesized)
agcagcagcgctaacagccgcccggcatgtcgggctcaatgcatcaggtctaatcagatgtggcagctgctgaaacccaaatgcctccatccaaccaaagcatctcaatgctgccagtgg

SEQ ID NO: 970492 - DNA, 120 bp, Artificial Sequence
  ENSG00000286393_3 (sequence is synthesized)
tctctggctgagccgcctccaattcaaatgcacgtgacagggtccctggctgcaacccaggttggagaatccgggattagaaggctgaggacttcggacaaccaaacccagctgtccctg

SEQ ID NO: 970493 - DNA, 120 bp, Artificial Sequence
  ENSG00000286393_4 (sequence is synthesized)
atgaagttgcctgggcacaccagagtgtgggagagtggacggcgcggcccctcctgcacttggagctgctctcagatcttgggctgtgacccctgtgggtgacacgaagttcagtgattg

SEQ ID NO: 970494 - DNA, 120 bp, Artificial Sequence
  ENSG00000286393_5 (sequence is synthesized)
tcctccttctggactgagggacatccatccacacgcgccccctccacagcccgatcccatcacgtcctgctcgtccaacatgggccttagatcctggggtctctgctgagtgcctcccct

SEQ ID NO: 970495 - DNA, 120 bp, Artificial Sequence
  ENSG00000286393_6 (sequence is synthesized)
ctgaacgcccggctggcactttcacggtgaagccagctgtcatggacaccgacggcaggtggcctttctgcgttgtctaccggctgatcttgaaagtgaaaacggacattgtctgccctg

SEQ ID NO: 970496 - DNA, 120 bp, Artificial Sequence
  ENSG00000286393_7 (sequence is synthesized)
ctgcatgcaccttcacccagggatggcttcttagctgacagcggctctgccaggaaccacgatcaccctccagtttgctctttgtgctgaattttattgacatgaaattcgcatgacgcc

SEQ ID NO: 970497 - DNA, 120 bp, Artificial Sequence
  ENSG00000286393_8 (sequence is synthesized)
aactttatcgttttaaagtgaatggttaaacagaatgcggcactttcacagggcggcatgacccccacctctgtctgccttcagaacattttcatcccccacgaaaggaggaagcgcagt

SEQ ID NO: 970498 - DNA, 120 bp, Artificial Sequence
  ENSG00000286393_9 (sequence is synthesized)
ccccaggaacagttactcctcatttcccctccccagctctggcttccgcaaccacgaatctgctttctgtctccgtgaatttgcctctttcggatatatttcacgtaaatggagtcccgt

SEQ ID NO: 970499 - DNA, 120 bp, Artificial Sequence
  ENSG00000286393_10 (sequence is synthesized)
gatagatgagctgtgtctgcctcttgcgggcagcacagtgtctggaaggttctccgtgcagccgcaggggttggcgcttccttcctcccgaggctgacccggccccgtcgtacggggagt

SEQ ID NO: 970500 - DNA, 120 bp, Artificial Sequence
  ENSG00000286393_11 (sequence is synthesized)
ccactgtgtgtctgtcttttggctgctgtgagcctgggtgtgccgcctgctccagcccatgttttcagctctttcaggtgtggagggaggagtggaattgtgggatcatattgtaacttt

SEQ ID NO: 970501 - DNA, 120 bp, Artificial Sequence
  ENSG00000286393_12 (sequence is synthesized)
aactttggaaggatctgccaaattacccctctaatttgttttcaattttattcttatttccctgtcacttgttctttcttttgactggttaaaaaaaatggcaaaggtcttcagcaaaac

SEQ ID NO: 970502 - DNA, 120 bp, Artificial Sequence
  ENSG00000286393_13 (sequence is synthesized)
aagaagtgagtttcaattgaaccgtgaattaaatatgatacactcaaaatctgaccaataatacattttaattttccccacacatttacgtccacgttaatttcatggaaatcaagatgc

SEQ ID NO: 970503 - DNA, 82 bp, Artificial Sequence
  ENSG00000286393_14 (sequence is synthesized)
cacatttacgtccacgttaatttcatggaaatcaagatgcttttgcctctgttctaaagtatttattttttttaagacaggt

SEQ ID NO: 970504 - DNA, 120 bp, Artificial Sequence
  ENSG00000286390_0 (sequence is synthesized)
aaaactggacagaagtagtttttaaggccagcctctgaggtgtattctgaccccaagaggacccttcttagctgtctctttccctggggttctctaaggtcctgcaactgctttgatgag

SEQ ID NO: 970505 - DNA, 120 bp, Artificial Sequence
  ENSG00000286390_1 (sequence is synthesized)
atccaggtgtagttcttaactagtttggcaacttttacctccttcatcttggcatcctacgccacaagtaagaagtctaggccatgtagaggatgacagctgcaagacatacgagttaaa

SEQ ID NO: 970506 - DNA, 120 bp, Artificial Sequence
  ENSG00000286390_2 (sequence is synthesized)
gaaatgatatcaaggatcccaagcatgaaccaccaagctaagtctggtcaacccacagaactatgaaatacagtaataaattgatgttttgaagtgctaagttttggagcggtttgttat

SEQ ID NO: 970507 - DNA, 120 bp, Artificial Sequence
  ENSG00000286390_3 (sequence is synthesized)
acagcaatagaaaactggaacagctatatattttgttagtttttagtggttacccaggagattacaacatgtattcttgacttattagaatctatattaaatatagtttcacaataatgc

SEQ ID NO: 970508 - DNA, 120 bp, Artificial Sequence
  ENSG00000286391_0 (sequence is synthesized)
gatagtcttcgattggttctgccgtggtagggtgtgcgtgaggtggaagaagggctgttcctccacggcacggtggaggagttctgaagtcctaaagttggggcaggacctgcagcatgg

SEQ ID NO: 970509 - DNA, 120 bp, Artificial Sequence
  ENSG00000286391_1 (sequence is synthesized)
tcggagaaggggcaagaggcccggcgggaagaagcagcaagagtaagacaagtaggtcagggcctgcttagtactgagggccagacggccagaacgagcgtcgggagacaggaggagtgt

SEQ ID NO: 970510 - DNA, 120 bp, Artificial Sequence
  ENSG00000286391_2 (sequence is synthesized)
ccggggttttcgccctccttttttctcttaccaaacccaaatggtcctgctccccaggtcgtggaattaagggaagaagcagaaaagttctagaagaggactggagaagtagaaggacta

SEQ ID NO: 970511 - DNA, 120 bp, Artificial Sequence
  ENSG00000286391_3 (sequence is synthesized)
cagaccccatgatgcacatggaaatgggcgtaaatctgcacgacttgttccggggcatgcgcatgtgtaagcgcacaataatctcttaagaattaaagaaaccttgtaacaaagaaaagt

SEQ ID NO: 970512 - DNA, 120 bp, Artificial Sequence
  ENSG00000286391_4 (sequence is synthesized)
agtgaagaaaagccttaaggaaaagagaaggaatgtgtgtagtccctctgcttaaggaaaagatagagggtgggaagatcttccttcaacaatttagatcaacatttgttaggtatatgt

SEQ ID NO: 970513 - DNA, 120 bp, Artificial Sequence
  ENSG00000286391_5 (sequence is synthesized)
ggtttgccaggaaactgcatgtgtgttgtggaccatatgtgttgaagatgcagtgatcaaaaagacttagtcccagctattaaggagatcacagtttggcagcaaattattatagaatgt

SEQ ID NO: 970514 - DNA, 120 bp, Artificial Sequence
  ENSG00000286391_6 (sequence is synthesized)
aatagtgtctaagaacctagaagggatgaagatgaaaattgagatttgaaaggtgagaaagtcattaagacaaggatgacttaaaggtattccaaactcctaagaaatacagggagtttt

SEQ ID NO: 970515 - DNA, 120 bp, Artificial Sequence
  ENSG00000286391_7 (sequence is synthesized)
ggtggatgcagaatgattgaggaaggctgtgaaagtcttctcttaacaaaaatctctttctgtaatggttgcttgtttatgggatgagaaactagggggtcatttgcttgcttaaagcct

SEQ ID NO: 970516 - DNA, 120 bp, Artificial Sequence
  ENSG00000286391_8 (sequence is synthesized)
ctggcttctcctgatgcaacttccaggccagtctaccttctcttctcaaatcccccagcttttgcttcaagtttacttccagcctggcaaggagtgagtcttctgagcacaaccacccag

SEQ ID NO: 970517 - DNA, 120 bp, Artificial Sequence
  ENSG00000286391_9 (sequence is synthesized)
tgtccaagcagggcgggaacacctccttcctcatctctcccacacatactccttccatacccaccaagaagaaaggcagccaggaagagtggacaggtccagaaccacagagggtgatga

SEQ ID NO: 970518 - DNA, 120 bp, Artificial Sequence
  ENSG00000286391_10 (sequence is synthesized)
acagatgcagaagtatcaatcctgaggctaaagagtaattgggcaaagttttggtgagacactcccattgccactgatgataaggaatgttttctcttgaaaggcttaaaattggtggaa

SEQ ID NO: 970519 - DNA, 120 bp, Artificial Sequence
  ENSG00000286391_11 (sequence is synthesized)
tctcttgaaaggcttaaaattggtggaaagcggtggctcacgtccgtaatccaagcactttgggaggctggggcaggtggatggactgagctcaagagttcaagatcagcctgggcaaca

SEQ ID NO: 970520 - DNA, 120 bp, Artificial Sequence
  ENSG00000286391_12 (sequence is synthesized)
taaaaatattagccaggtgtggtggcacgtgctcccagcctgggcaacacctcccagtacttgggaggctgaggagggaggatatcgtgagccgtggaggtggttgcagtgagccgagac

SEQ ID NO: 970521 - DNA, 120 bp, Artificial Sequence
  ENSG00000286397_0 (sequence is synthesized)
tgcccaggccatgcttgctccccgcaggcaggcgagatttcggaacagccaggacctcctccgcatgggggaaccgctctagacgctcagaggggcggagttgaaacggacctgactggc

SEQ ID NO: 970522 - DNA, 120 bp, Artificial Sequence
  ENSG00000286397_1 (sequence is synthesized)
cagtgtctcaaagacgtggatggtgaccagctctctccagaacagatggcgctccagctttgtgggagaaactttcaaggtgtggatcacttggaagtcatttgaaacctatgaagttta

SEQ ID NO: 970523 - DNA, 120 bp, Artificial Sequence
  ENSG00000286397_2 (sequence is synthesized)
acatctctgctttggatggaatgctcatcacctacagcagtcagggatgtaactaaacttgctgggactgatgtgttgaaattttttgtctagatagtggaaacatccaggagcacttct

SEQ ID NO: 970524 - DNA, 61 bp, Artificial Sequence
  ENSG00000286397_3 (sequence is synthesized)
aaaaaaaaaaaaaggaaggaagaaagttactttcacaaagttggtaccagctttcttgttt

SEQ ID NO: 970525 - DNA, 120 bp, Artificial Sequence
  ENSG00000286397_4 (sequence is synthesized)
gaaagttactttcacaaagttggtaccagctttcttgtttttatatctaatctgtaaaaatctggctgttaatctacatgaaagtaatagttcattcatgtcacacttccaatagtttct

SEQ ID NO: 970526 - DNA, 120 bp, Artificial Sequence
  ENSG00000286397_5 (sequence is synthesized)
catttgtgatttttgaatgtggtacactgtcaaaaaagggaaaacatgattgtgaccattgaactctattactgtacttgtgaagcttataaagaatttactacttcaggattaattaca

SEQ ID NO: 970527 - DNA, 120 bp, Artificial Sequence
  ENSG00000286394_0 (sequence is synthesized)
gtggtgaaaagcaacgaaagaataactggtgagggtgtgaaagaagagccccagttcttatcttcctccaggcccatggcagtctcatttcagctgtgaggcatttaactctcccaattt

SEQ ID NO: 970528 - DNA, 120 bp, Artificial Sequence
  ENSG00000286394_1 (sequence is synthesized)
tgaaaagccttcttggataattttagcattcccaaaacttgctgataataccctaagctaagggaaaaggcgtaccatcagcagccccccggctgccctatcaatggcttggaaaatcta

SEQ ID NO: 970529 - DNA, 120 bp, Artificial Sequence
  ENSG00000286394_2 (sequence is synthesized)
ttaagacgaatattctcacaacccaattgccaacccggaacgatcagactggtctctgtattccacggtgcagatggagtttgtaagaacgggaaggccggctctacttcggtgagcgat

SEQ ID NO: 970530 - DNA, 120 bp, Artificial Sequence
  ENSG00000286394_3 (sequence is synthesized)
cacctgatcgacgggcgggtacagacagacattgggaaacgacttacctcaacgtgaagcgatcttcagtggaatttctggagatggaaacaggaaaagtcagcacgtctcctttcctca

SEQ ID NO: 970531 - DNA, 120 bp, Artificial Sequence
  ENSG00000286394_4 (sequence is synthesized)
cggtctttggtatatagtggatggccacgctgttgtccagacgcagttctctcagggagggtttcctgtgtgtctgataaaggaagatgctcccgatcctctgcaaggggggcccggact

SEQ ID NO: 970532 - DNA, 120 bp, Artificial Sequence
  ENSG00000286394_5 (sequence is synthesized)
catcgatgtcactgtggcctgtccggatcccattgcttctcctcgcgtcttccctgacgcagtcccctctctcaccccctgggtgcacggtgtagtagagctccacgggggtcccctccg

SEQ ID NO: 970533 - DNA, 120 bp, Artificial Sequence
  ENSG00000286395_0 (sequence is synthesized)
tttgaggagagacatttgttcaagacactttttttctcctctcactgacaatacgtaaggcagaaagttggtgtctacgttgctgcatggctgcagaatagattgtttcgagaaggtgaa

SEQ ID NO: 970534 - DNA, 120 bp, Artificial Sequence
  ENSG00000286395_1 (sequence is synthesized)
ctctggaaagggtacaactaggaaaggagaaagcatgttacggcaccaggaaattattataggagtgataccttgaactattttggaaagatctgggaaaagaaattaaggtctccaagg

SEQ ID NO: 970535 - DNA, 120 bp, Artificial Sequence
  ENSG00000286395_2 (sequence is synthesized)
aggaactggagaatcaatgagtgactggcctggtcaccctgagcagcaaaacactgaagtgggactacaaaaaaggaagttggcacagggatatatggaaactgttgactccgaggctcc

SEQ ID NO: 970536 - DNA, 120 bp, Artificial Sequence
  ENSG00000286395_3 (sequence is synthesized)
tcagccacatgtttagtgatgggcccagagctgttgttgctcagcaagaccagcattttggaagaagatgtgagcacaaagctgagaagatctggggagagcaaaggcacactggaaccc

SEQ ID NO: 970537 - DNA, 120 bp, Artificial Sequence
  ENSG00000286395_4 (sequence is synthesized)
ctggttggttacatcatggccgtctctcattgcttctcactataatggcctccagagagtgatagttgctcttttgcttctgtaaattcctcttttgaaatattctaacctagaaccata

SEQ ID NO: 970538 - DNA, 120 bp, Artificial Sequence
  ENSG00000286395_5 (sequence is synthesized)
tgaagcacaaaccactctgctacattttgagctcattggaactgaacttgcttagggcctggtattgccctttgtgtattttctgacagagaagtagacaatcacataacaacaagtgtg

SEQ ID NO: 970539 - DNA, 120 bp, Artificial Sequence
  ENSG00000286395_6 (sequence is synthesized)
gggaacagtctcataaaatagctaggcattgtggcattatttcaaatgagagacaatatactgtatgactgatttgctcataggtagaattatttcattgaaggagtcaaaagtttcaaa

SEQ ID NO: 970540 - DNA, 120 bp, Artificial Sequence
  ENSG00000286395_7 (sequence is synthesized)
acaagcctaataataatacaaaaagggataagaaagatacagaataaaaagaaaagtataaacataagcgaaatattaaactaaaaaatacaattgttgaatcgaagaacatgtttgttg

SEQ ID NO: 970541 - DNA, 120 bp, Artificial Sequence
  ENSG00000286395_8 (sequence is synthesized)
gaataaagtgtggaaaggatgtatctgaaggataaatgtgtgtattaggaggtaaatggaaatgaagccatgtaaacagcatgtttgttgcatcagcactataatatgttctaatataat

SEQ ID NO: 970542 - DNA, 120 bp, Artificial Sequence
  ENSG00000286395_9 (sequence is synthesized)
ggggaaagtgtagagaaatgtgtatctcagacttcatatttctttttttaattgtacattattaagggatacagagtgaaatttcattatctctatacaatgtatgatgatcaaatcagg

SEQ ID NO: 970543 - DNA, 120 bp, Artificial Sequence
  ENSG00000286395_10 (sequence is synthesized)
gtaattaacatatccatcacatcaaacatttctcatttctttgtgttgtgaacatttgaaatattctcttttagctttttgaaaatatacaataaattatagttaaccatattcacccta

SEQ ID NO: 970544 - DNA, 120 bp, Artificial Sequence
  ENSG00000286398_0 (sequence is synthesized)
agatgagcaggccttaaatgctaagctcagacactgggcttgctaggccaggaaacccccagccaaggatgggttctaactgatttctgtgtcccgaatagagcctgacaccaggcgatt

SEQ ID NO: 970545 - DNA, 120 bp, Artificial Sequence
  ENSG00000286398_1 (sequence is synthesized)
cctacagcatggctgaagcatgaagcagggctaactggccacattcaacctccatcagctgaagcacaatacacctgcaaacctatgagtctgagaataaaggcttgttattgaaagcca

SEQ ID NO: 970546 - DNA, 120 bp, Artificial Sequence
  ENSG00000286399_0 (sequence is synthesized)
aagggtcttgagcttctggagcagccttccaagtgggctaagtctatgggacagtttgttgccaactttgcaggaatgtgaaggctggagcaacagcaaccctcttggtccagcaagagg

SEQ ID NO: 970547 - DNA, 120 bp, Artificial Sequence
  ENSG00000286399_1 (sequence is synthesized)
agcaaggatggaaggaccctgggtcccatgattggagctgtccggcagccaccagaccagactatcgccaacctctcaaattcctttatgtgagggaaaataacactatatgtgcccaaa

SEQ ID NO: 970548 - DNA, 120 bp, Artificial Sequence
  ENSG00000251629_0 (sequence is synthesized)
gaggaagtgagctgccatgtactaggccacgtggcaagggcctggttggggacctccaggggttgagagcatcctctggacaacatggaaaaagaaaatgaaaatggtgacctcagccct

SEQ ID NO: 970549 - DNA, 120 bp, Artificial Sequence
  ENSG00000251629_1 (sequence is synthesized)
atagctagaaggaattgaatcctgtcaacaacgatactcatcactcactgcagatgttactttaagacattctggagcagcgtcatgtgcaggaacaataaggaagtgagtgcttttgta

SEQ ID NO: 970550 - DNA, 120 bp, Artificial Sequence
  ENSG00000251629_2 (sequence is synthesized)
attcctgaacaactgtgtcttacacttactaagaaaaacctggtggtatggacttccagctcaataattcactgtaaagttctcttgcctgccaccatgtaagatatgcttttactcttc

SEQ ID NO: 970551 - DNA, 120 bp, Artificial Sequence
  ENSG00000251629_3 (sequence is synthesized)
cgccttccaccgtgactgtgaggcctccccagccatgtgaaactgcctttgagcttatactgaattataccaccagctttcctaggtcttgaagcttacagacagcagatcttgggactt

SEQ ID NO: 970552 - DNA, 120 bp, Artificial Sequence
  ENSG00000251629_4 (sequence is synthesized)
ctcaggcaccataatcaatcatagataaatgatccaatgattcggaacttgaaaagtggtagctttatgaattctccttaagaagaaacctgtgccctgatcttgcctactcacccaaag

SEQ ID NO: 970553 - DNA, 120 bp, Artificial Sequence
  ENSG00000251629_5 (sequence is synthesized)
gcactgtgagatagcatcaaaggaacagctagtaagagacacagagccagaaatcagggaagtaaaatacacttgacatctacgttcggaaagaaattttaggaggcagaagcaaatgga

SEQ ID NO: 970554 - DNA, 120 bp, Artificial Sequence
  ENSG00000251629_6 (sequence is synthesized)
atatttttgcaagattaccaaagaaaccattggtggagaaagttctgtgaccaacttgtctgagtctagctccggaaagctgcctaaagtagatggagtcttctctgtgtgtgccccact

SEQ ID NO: 970555 - DNA, 120 bp, Artificial Sequence
  ENSG00000251629_7 (sequence is synthesized)
ggtcctgcagttgaaggatccggtaaagcagcctgcccttggttttatactccagaggaacgtgattcgctggactaaagcattgaagtgcatcctgtttccggggggcactggaacaga

SEQ ID NO: 970556 - DNA, 120 bp, Artificial Sequence
  ENSG00000251629_8 (sequence is synthesized)
gcctggtctgttctagccagtccctttctatctcaggataacattctacagttattcttgagaactataatcaaataagcagggagaactgggaaagcagaggctcattgtggaaccctc

SEQ ID NO: 970557 - DNA, 120 bp, Artificial Sequence
  ENSG00000251629_9 (sequence is synthesized)
aaggagcatggggtcgtcttcatccctcagtttataaatggccaaggagagtaatgcaacaaaaacttctcagagttaaaagccagagttcctaaagaaccgtggacaaagggttctgtc

SEQ ID NO: 970558 - DNA, 120 bp, Artificial Sequence
  ENSG00000251629_10 (sequence is synthesized)
tagtgggcagaattcatccagcgaaggtctcctaactacagagggtcacatctggatctgatggcacctacagaacttggactctgagcgacaatcagtgaccaggaaatttggaaccca

SEQ ID NO: 970559 - DNA, 120 bp, Artificial Sequence
  ENSG00000251629_11 (sequence is synthesized)
ggttttcccaacctacatctacaaaatggaatgggtctgattcgcaagttttcagagaaagaagccaaccttaatcagactgtgatatgatgaggaaataaaacttgctgtgctaatcaa

SEQ ID NO: 970560 - DNA, 120 bp, Artificial Sequence
  ENSG00000251629_12 (sequence is synthesized)
ggagcagcgtcatgtgcaggtgcgtagtgcctccgcccatctctctcttgctcctggtctcatcgtgacgggcctggtcctgcctcactttatgccacgactaagagctccctgaggcct

SEQ ID NO: 970561 - DNA, 120 bp, Artificial Sequence
  ENSG00000251629_13 (sequence is synthesized)
ctccagaagcagatatcactatgcttcctacacagcctgcagaaccgaacaataaggaagtgagtgcttttgtaattcctgaacaactgtgtcttacacttactaagaagtgcctttcac

SEQ ID NO: 970562 - DNA, 120 bp, Artificial Sequence
  ENSG00000251629_14 (sequence is synthesized)
accattggtggagaaagttctgtgaccaacttgtctgagtctagtaagattgaacgctcacacacaagtttcatgaagtgggtttgatacttacagataagcagcaaggaccaacagaag

SEQ ID NO: 970563 - DNA, 120 bp, Artificial Sequence
  ENSG00000251629_15 (sequence is synthesized)
ttattaaaattccttcctattgagatttaaattgctgtccagaattatacaatataatgaatgggggcattcattatgtgtattctatgccttctccatcattgcatattcagtcctcgt

SEQ ID NO: 970564 - DNA, 76 bp, Artificial Sequence
  ENSG00000251629_16 (sequence is synthesized)
cctgcttcgtcatcactcactgcagatgttactttaagacattctggagcagcgtcatgtgcaggaacaataagga

SEQ ID NO: 970565 - DNA, 120 bp, Artificial Sequence
  ENSG00000251629_17 (sequence is synthesized)
ccaggtgtgactttatattatctctgtcagggaagggtgagagttttcaatgtgtgaacatagaataaaatggtctggtgaccaaaaggctctattaaagataatatgagatgttcaaaa

SEQ ID NO: 970566 - DNA, 120 bp, Artificial Sequence
  ENSG00000251629_18 (sequence is synthesized)
atgaagccgcagaccctcacggtgagcgttacagttcgtaaagatgttgtgtcaggagtttgttccttcacatgttcagatgtgtccggggtttcttccttccggtggtttcatggtctc

SEQ ID NO: 970567 - DNA, 120 bp, Artificial Sequence
  ENSG00000251629_19 (sequence is synthesized)
tgtgtccggggtttcttccttccggtggtttcatggtctccccgacttgacttcaggagtgaagccgcagacctctgcagtgagtgctacagctcataaagactcatcactcactgcaga

SEQ ID NO: 970568 - DNA, 120 bp, Artificial Sequence
  ENSG00000251629_20 (sequence is synthesized)
actgagtgctcatgattgagatcttctagggactgcttgaattccttgactcacagtgcctcacaccaacctctggttctattgaaactttgtccggcctcctcccaacctgccgtctca

SEQ ID NO: 970569 - DNA, 120 bp, Artificial Sequence
  ENSG00000251629_21 (sequence is synthesized)
acctctagtttccctcttataaggacctttgtaattgtgattacatcacactcacctggataattcaggaaaatctcatcatgtcaagatccttaacacaataaaatctgcaaattccct

SEQ ID NO: 970570 - DNA, 120 bp, Artificial Sequence
  ENSG00000251629_22 (sequence is synthesized)
ggccatgcaaccaagttctggacaatggaatataaagaaaagtgaagcaagtcacttccagttgggcctttagaaaattctgtgtgctacctccgttccctttcccccttcaaagcttcc

SEQ ID NO: 970571 - DNA, 120 bp, Artificial Sequence
  ENSG00000251629_23 (sequence is synthesized)
ttggaagcactgagttagatggtaaagttacaagaaggaagaagtcacagaatcatcatttaatggagaaagctgtggaaagctgtgaagtgatcaacaaataaaacattaatgagcaaa

SEQ ID NO: 970572 - DNA, 120 bp, Artificial Sequence
  ENSG00000251629_24 (sequence is synthesized)
ggagcagcgtcatgtgcaggagaaaatagtatcatctcagccttctatgaaatcaaggcaatatggtaaagccaaaaagatctcaactgctgaaaccaggagcacatttcaaagctatat

SEQ ID NO: 970573 - DNA, 120 bp, Artificial Sequence
  ENSG00000251629_25 (sequence is synthesized)
ctatcatagtgaagaagaatgttaaaatacataaattgcatcttttttaatcataaagagaattatatgcaaaaatgaatatttcaacaaattaaagtcataattttttaaagacccatt

SEQ ID NO: 970574 - DNA, 120 bp, Artificial Sequence
  ENSG00000251629_26 (sequence is synthesized)
attaatctaaaataattttcttggtgattatcatgtccagaggaatattctagtttgagctgcttatatttttttcaaaatgtaaaaggaaatcctctctgagaccatgtctctttcaca

SEQ ID NO: 970575 - DNA, 120 bp, Artificial Sequence
  ENSG00000251629_27 (sequence is synthesized)
ccatgtctctttcacactaaaattcaaatataaaattgctaataactttaatttgttaaagatcttaatttctgagtttaagaaccatctatcatttataacaggaaataaaagaaaata

SEQ ID NO: 970576 - DNA, 120 bp, Artificial Sequence
  ENSG00000251629_28 (sequence is synthesized)
gtaagatatgcttttactcttccgccttccaccgtgactgtgaggcctccccagccatgtgaaactatatgtgtaatggaaaatcgaaaccaaccatggggcataaggaggaacattaca

SEQ ID NO: 970577 - DNA, 120 bp, Artificial Sequence
  ENSG00000251629_29 (sequence is synthesized)
ggatatgtaaataaacaagctactgtatagctcaagtgtttcacaaggcaacgctggaataaggaaggcagaaatttgaacctggatgtctctggagcagagttccctatcactttgggc

SEQ ID NO: 970578 - DNA, 120 bp, Artificial Sequence
  ENSG00000251629_30 (sequence is synthesized)
aggaatattgaaagcatcttattgtgaattgatgacttagaaaatgtatttcagatttggcctgacttttttattattgttcttttagtctatactcttcattaaaaagactcagtaagt

SEQ ID NO: 970579 - DNA, 120 bp, Artificial Sequence
  ENSG00000251629_31 (sequence is synthesized)
ggtgggtgggaactgcagtgcaggcactggagctagccagctgcttcagcattggcaggggcaaactccactcactggaacctgtgggcgctcaacccttcccgggaaggggcacgcaga

SEQ ID NO: 970580 - DNA, 120 bp, Artificial Sequence
  ENSG00000251629_32 (sequence is synthesized)
aaaggtagcacaggcctgaagagtgagcagcagcaagatttactgtgaaaagcaaaagaatgaaccttccaaagctggaaggagccccaaacaggttgccgcggctggctcccctggcca

SEQ ID NO: 970581 - DNA, 120 bp, Artificial Sequence
  ENSG00000251629_33 (sequence is synthesized)
acaatcctttagccagacagaaaagttctccaagtccccacgtgacccagaagcccagctggcttcgcctctcaataacattgttaaatttataacctcaactagaaaggaggatgagca

SEQ ID NO: 970582 - DNA, 120 bp, Artificial Sequence
  ENSG00000251629_34 (sequence is synthesized)
tagtccagctgaagaaagagctaaaatatcgatttagaactagtctacatattttgagaaaaaaacatttcattcaatttgctgttttatctaataactaagagtgatgctaatacatgc

SEQ ID NO: 970583 - DNA, 120 bp, Artificial Sequence
  ENSG00000251629_35 (sequence is synthesized)
atgaaaatacttcattctgaaattatgagcattgtttgaataacttatgaaaggggttccccattcctcagaaagatttccaaaaaggaaagatataacaatactcaggcaagtactttt

SEQ ID NO: 970584 - DNA, 120 bp, Artificial Sequence
  ENSG00000251629_36 (sequence is synthesized)
ttcattctgtaaaaatttcatgcaaagcaacatttgtaacagaagtgtaaagtgctaatacaacataccaaatacgtttgtacacactttttgtttaataaatatgccattcctcaaagc

SEQ ID NO: 970585 - DNA, 120 bp, Artificial Sequence
  ENSG00000251629_37 (sequence is synthesized)
ggagcagcgtcatgtgcaggtcagtgagtttcctgttgctttttttgggtgtatcactggtatcgattcatcaacgttgaattcatggccaacagcaccattaactagtgactgaatgga

SEQ ID NO: 970586 - DNA, 120 bp, Artificial Sequence
  ENSG00000251629_38 (sequence is synthesized)
gctaatctaacacatgcattttctccataagacacatcacagtcttgtgcttcctatcctgggcagcacttcacccttatgcttgggagtaattttaaacagcaaaatcactaacaaaaa

SEQ ID NO: 970587 - DNA, 120 bp, Artificial Sequence
  ENSG00000251629_39 (sequence is synthesized)
gcacaaaaatggaaaaacatgacattaaatataccgtgaaaaggacacttgtttatcctatgagagctgagacgagaaagcgcgctgttaccttgtgtgaactcagttgggaaagtgtac

SEQ ID NO: 970588 - DNA, 120 bp, Artificial Sequence
  ENSG00000251629_40 (sequence is synthesized)
gtgatattgatcttggggttagaaataaactttagtgagtagcaaagtggcaaatatggaatccacaaacaatgaagcttggccatatataaaataaatatgggctgagacatttaactt

SEQ ID NO: 970589 - DNA, 120 bp, Artificial Sequence
  ENSG00000251629_41 (sequence is synthesized)
ggtaacattgccgagttcctattatgcctgaacacccgcttaggggttaagtttctacaatttttagagaaacgttttcattgtcaatatcaaggcatcatcagaattgtcttcagttat

SEQ ID NO: 970590 - DNA, 120 bp, Artificial Sequence
  ENSG00000251629_42 (sequence is synthesized)
ttattattttgtattttgtcattcttgctgttgatttgtgaatgtcagttaaattaattgtatctttggagacccaatttgttgtgaatgatttggcaaaccactttattacagtgatgt

SEQ ID NO: 970591 - DNA, 120 bp, Artificial Sequence
  ENSG00000251629_43 (sequence is synthesized)
gttagtaaagaatgtttttactgtaatttgccagttactgggctttaagacatttatttattatgatttaaaaatgaataatcccatttttgtatgtagtaacaatttattagttatgtg

SEQ ID NO: 970592 - DNA, 120 bp, Artificial Sequence
  ENSG00000251629_44 (sequence is synthesized)
ctttctggaagtatgctattttaagaactagcaagttacttatcaatgcaattatataaaattcatgagatgtagaacattatttcaaagtatacaattaaattcacatagtcaaccgtt

SEQ ID NO: 970593 - DNA, 120 bp, Artificial Sequence
  ENSG00000251629_45 (sequence is synthesized)
acagctccagtctgaagctcccagtgagaccaacatagaaggcaatctgggtgttatgaaagatgtagaccaacagaaacactcatacctttctggtgacaataaaactttgtacattta

SEQ ID NO: 970594 - DNA, 120 bp, Artificial Sequence
  ENSG00000251629_46 (sequence is synthesized)
agacattctggagcagcgtcatgtgcagctatattatttcccttatgttggaccataaatctaaaattgtaattaaatgtccatcctccaaaaacggaaatgcaagcatgtacatgtctt

SEQ ID NO: 970595 - DNA, 120 bp, Artificial Sequence
  ENSG00000251629_47 (sequence is synthesized)
tatggcccagatgctccaacgagaagtgtatacttaagagatgaatgcctgtgtgcaccagaagacatgcacagacaggcatgattataacaactttattcataacagacctgaattgca

SEQ ID NO: 970596 - DNA, 120 bp, Artificial Sequence
  ENSG00000251629_48 (sequence is synthesized)
tcaaatgttcaacaaatgaatagataaacaaattatgctatatattaataggaaggaatactactcaaaaaaaataggcaaactgcagacaacattttaaaatatattgagttaaagaaa

SEQ ID NO: 970597 - DNA, 120 bp, Artificial Sequence
  ENSG00000251629_49 (sequence is synthesized)
tgagatacagaaaagtacatactgcatgatacaatttatatgaaattcaaagacaagcaaatgaatctatggtgatagatctggaagtcagtaactgaaaaagagcatgaaagtatcttg

SEQ ID NO: 970598 - DNA, 120 bp, Artificial Sequence
  ENSG00000251629_50 (sequence is synthesized)
ggtcagggcaatgctaggtgtcttgagaaacatagtaatttccttggtgtatagaattgtaatatatcatcaagctcaagaatatgtcttattcaataacaataacaaaacaagtaaaaa

SEQ ID NO: 970599 - DNA, 120 bp, Artificial Sequence
  ENSG00000251629_51 (sequence is synthesized)
tggcagaatataagcctacgtaatataaaaaagacttccaggtttggccctctgagtcttgactcattacacaccatctcacagccttattttgcctttcaacaggaaatttggaaccca

SEQ ID NO: 970600 - DNA, 120 bp, Artificial Sequence
  ENSG00000251629_52 (sequence is synthesized)
gggtccatactgggctataaaaatagtgtagtacttgagcagtactgtaaaaatggcaattataaataattatgagtgttgaggaggtaatatgaacactcaagttcaaagcagtaaaat

SEQ ID NO: 970601 - DNA, 120 bp, Artificial Sequence
  ENSG00000251629_53 (sequence is synthesized)
aaaaattaaaaaaaaaagacagacttaggtaagccatctatcaactcggagaatgctgatgctttgttgaaagagagctttgtcttacaaattaggcacttataaaaactcatcactcac

SEQ ID NO: 970602 - DNA, 120 bp, Artificial Sequence
  ENSG00000251629_54 (sequence is synthesized)
ctcagcctcccttgtggctaggtgtgccatgtgactgagtgctcatgattgagatgaacaataaggaagtgagtgcttttgtaattcctgaacaactgtgtcttacacttactaaggcta

SEQ ID NO: 970603 - DNA, 120 bp, Artificial Sequence
  ENSG00000251629_55 (sequence is synthesized)
caagctgaggagcaaggagagccagtttgagtcccaaaactgaagaacttggatccaatgttcaagagcaggaagcattcagcacaggagaaagatgtaggctgagaggctaggttcatc

SEQ ID NO: 970604 - DNA, 120 bp, Artificial Sequence
  ENSG00000251629_56 (sequence is synthesized)
tgtgcccactgggttaaaggtggatctgccttctccagttaattgactcaaatgttaatctcttttgacggcacccacacagacatacccaagattaatactttgtatccctcaatccaa

SEQ ID NO: 970605 - DNA, 120 bp, Artificial Sequence
  ENSG00000251629_57 (sequence is synthesized)
tggataccaacttggtgagttgtttctattttagggctattattgataagctatgaacaagggttatacaggtcttttgtggacatatattttctctattttgaatatatactcatagta

SEQ ID NO: 970606 - DNA, 120 bp, Artificial Sequence
  ENSG00000251629_58 (sequence is synthesized)
tcaccatttcagaagataacatatgtttaactctctgaaattactgtcattatcaaaagtggctgtgccattttaaaccagcaatgtataaaattcaagctgtttcacctgctgtccaaa

SEQ ID NO: 970607 - DNA, 120 bp, Artificial Sequence
  ENSG00000251629_59 (sequence is synthesized)
atttgatacacttatttttatttactgattctaatggatgtgggataatattttattgtagttttaattcatatttctcttgtaagtagcactgttgaccattgttccatgtactttatt

SEQ ID NO: 970608 - DNA, 120 bp, Artificial Sequence
  ENSG00000251629_60 (sequence is synthesized)
gcactgttgaccattgttccatgtactttattatatatttgattatcttctttaatgaattctatgtccatgccttataatattttttcttttatataaatgttgatcttatattactga

SEQ ID NO: 970609 - DNA, 120 bp, Artificial Sequence
  ENSG00000251629_61 (sequence is synthesized)
agacattctggagcagcgtcatgtgcaggagaaaatagtatcatctcagccttctatgaaatcaaggcaatatttctgcaggctggaaatccaagatgaagtcacctgtagttcagtgtc

SEQ ID NO: 970610 - DNA, 120 bp, Artificial Sequence
  ENSG00000251629_62 (sequence is synthesized)
gattgtcaggcaatctgtaacatcagcagtggatggaaagaaggagaaagatgagttttatggacgctaacccatctatatggctttggaaaataaagtactgctgtttttttttgtaaa

SEQ ID NO: 970611 - DNA, 120 bp, Artificial Sequence
  ENSG00000251629_63 (sequence is synthesized)
cctggtggtatggacttccagctcaataattcactgtaaaggcaatctgggtgttatgaaagatgtagaccaacagaaacactcatacctttctggtgacaataaaactttgtacattta

SEQ ID NO: 970612 - DNA, 120 bp, Artificial Sequence
  ENSG00000251629_64 (sequence is synthesized)
gggtgtcagctggaacaaaactctgtgagccccacggaagcatctagcggggagtaccaatgacctccaaagccctagacagcaagtgttacagtgggaggcacctggtggaagactcat

SEQ ID NO: 970613 - DNA, 120 bp, Artificial Sequence
  ENSG00000251629_65 (sequence is synthesized)
cacctcctgccatgattctgaggcctcctcagccatgtggaactttctcttgcctgccaccatgtaagatatgcttttactcttccgccttccaccgtgactgtgaggcctccccagcca

SEQ ID NO: 970614 - DNA, 120 bp, Artificial Sequence
  ENSG00000251629_66 (sequence is synthesized)
tcatgtgcaggagaaaatagtatcatctcagccttctatgaaatcaaggcaatattcatgtgaaagtatattccaaacccagaacctgagcacagattgggactgagaaacacttgtcta

SEQ ID NO: 970615 - DNA, 90 bp, Artificial Sequence
  ENSG00000251629_67 (sequence is synthesized)
aattaaacatctcttcttataagttacctcaacagcctaatacatctggcaatgtttttggatgtgattatagataaaaataaatctaaa

SEQ ID NO: 970616 - DNA, 120 bp, Artificial Sequence
  ENSG00000251629_68 (sequence is synthesized)
aatgtttttggatgtgattatagataaaaataaatctaaaaagtttaccagctttccggggatctagccatctttatacaaagggcttcaaaaataaactaattaataaaaggatggcta

SEQ ID NO: 970617 - DNA, 120 bp, Artificial Sequence
  ENSG00000251629_69 (sequence is synthesized)
atcattagaacaacatttcagtatctgtgtgggtgttatattttatctgttagtaaatattttataataagggagcatgtttctttctgacttgacattaaagtacctatacatctgtta

SEQ ID NO: 970618 - DNA, 120 bp, Artificial Sequence
  ENSG00000251629_70 (sequence is synthesized)
aaaagtgctttgacctttagcaatgtggtatgatcaacgatattataagctgatttaggttaaaaaaaggacacatgggcttatcagttttagaagtagacatctgtatgcaaaaaaaaa

SEQ ID NO: 970619 - DNA, 88 bp, Artificial Sequence
  ENSG00000260532_0 (sequence is synthesized)
ggtcctgctttctagaaaaaactgtagtgcgcgctccagagacgtaacccgttcccacacctgagtgggcaactctagcctttgaaca

SEQ ID NO: 970620 - DNA, 120 bp, Artificial Sequence
  ENSG00000260532_1 (sequence is synthesized)
ccgttcccacacctgagtgggcaactctagcctttgaacacagccctaggaaatgactgcaaatgagggggaagctttttaaatacaaggaaaaaggcatttgtaccaagctacatcgca

SEQ ID NO: 970621 - DNA, 120 bp, Artificial Sequence
  ENSG00000260532_2 (sequence is synthesized)
gtgaaattatcattggaaaacagtggaaagaggctgtgtgtccccccacgggtcaggcgcagtcccagggaggtctagaccccaagagcagagaggcctacgggaggcacggcttgtgcc

SEQ ID NO: 970622 - DNA, 120 bp, Artificial Sequence
  ENSG00000260532_3 (sequence is synthesized)
aggaggtggggtatgcggccaccaggcactctagttacacagcgatgggctgaaggctgtgcatcccgcagggagtgagccctccgaccctggaggagttcaagcagctgcttgtcagga

SEQ ID NO: 970623 - DNA, 120 bp, Artificial Sequence
  ENSG00000260532_4 (sequence is synthesized)
tgcagcgacaggagggacaccgttgcagccgatgcccgagacagccagaggctgccggcatccagcagcagagaggctgggcctggaatggacccccagaagctggccagaggcctggca

SEQ ID NO: 970624 - DNA, 120 bp, Artificial Sequence
  ENSG00000260532_5 (sequence is synthesized)
gttgggaaaggctcggtcgtcctggggagggagcagcaccagcggaggccccgcctgggtcttcatcagagacactccaagctggtgggggattcctgggacagtgtcacccccggcagg

SEQ ID NO: 970625 - DNA, 120 bp, Artificial Sequence
  ENSG00000260532_6 (sequence is synthesized)
ccccaggtgcccaccgcccacccggccacagtgggagcagctcgggtcagggaggccgggctgaatgcaaaccactgctgaggagacaaacgcggcgccacgagcaggtcaggagagaac

SEQ ID NO: 970626 - DNA, 120 bp, Artificial Sequence
  ENSG00000260532_7 (sequence is synthesized)
tccgagtggaggccggtcccacgctgtggactgagctgcatccctcagatgcatctgtttcagccctaaccccagtgtgaggggacgtggaggtggggcctcaggggtgatgagggttag

SEQ ID NO: 970627 - DNA, 120 bp, Artificial Sequence
  ENSG00000260532_8 (sequence is synthesized)
atgaggtcaggagggaggagacgcaaacacaattggccggaccttgatcttagacccgcagcctctagaacctgcagagaatgctggagctgcccagggtgtgattcttgttacgtctcc

SEQ ID NO: 970628 - DNA, 120 bp, Artificial Sequence
  ENSG00000260532_9 (sequence is synthesized)
ccgagctggctgagacatacagctccactccaccggcctgtgcccagagaccccggggtacaggaggaggacgccgcagaggtgcgtgttgatgagtgggtcgcaccagggtggagcctc

SEQ ID NO: 970629 - DNA, 120 bp, Artificial Sequence
  ENSG00000260532_10 (sequence is synthesized)
ctagaagggcagggacgcaccatccttggggagtggcctggagaggcctcgggaagggggtccagggtggctgagcctcagccatcaccccatgccgtccagccctgcaagcacatgctg

SEQ ID NO: 970630 - DNA, 120 bp, Artificial Sequence
  ENSG00000260532_11 (sequence is synthesized)
tgccttggacctgccttctgacggggccggggtgcccgtggggtcccagtccccgtacgagcatctcactttcccttccatggtgctgctggtggccgggagaccatatgtcccagccat

SEQ ID NO: 970631 - DNA, 120 bp, Artificial Sequence
  ENSG00000260532_12 (sequence is synthesized)
agtggcagatgctctccaggccggctaggggacaccggccctcatggcaggtgaggaggcagtgcactgttttgggggctctgaagcccggcctgcccgacttgaagtgtccagggccca

SEQ ID NO: 970632 - DNA, 120 bp, Artificial Sequence
  ENSG00000260532_13 (sequence is synthesized)
ccacctccttcctggttgaggagtttctgggagaatggtcaaatccccaatgtatcaactcagctttatctccaaaacctaccacttcccagagaacaaaattaaagaagatttcccaga

SEQ ID NO: 970633 - DNA, 120 bp, Artificial Sequence
  ENSG00000260530_0 (sequence is synthesized)
catcctgttgcaccagagaagagcatggaggagtcaataaaatctgagaagagtctctcacccctcctcaatgcctcccctctggccagatgagattgctggggttcagagacgtcaagc

SEQ ID NO: 970634 - DNA, 120 bp, Artificial Sequence
  ENSG00000260530_1 (sequence is synthesized)
gacatctggccccagggcatgtgtttcttgccactcactgcctcatgccttctctttgtactgccatcgtttgtcacccaactgcctctgcacctcggccacgccacccttgaggatggg

SEQ ID NO: 970635 - DNA, 120 bp, Artificial Sequence
  ENSG00000260530_2 (sequence is synthesized)
ggctggtacctcctttatcttgtatccacaggaccccacagagtgccttccccagagcggtttctgctaaattctgtttaacagagtgtattcattctgtttgctgaatgaataaacaac

SEQ ID NO: 970636 - DNA, 120 bp, Artificial Sequence
  ENSG00000226181_0 (sequence is synthesized)
gagggggctggggtgggtgaggcacagacacttgctgccagagcatgtgtaaccagcagtcctttgttcaccatacctgcttcaatcattgttaggaaacctaacaatgtctattacagc

SEQ ID NO: 970637 - DNA, 120 bp, Artificial Sequence
  ENSG00000226181_1 (sequence is synthesized)
tagaagaaaacagataacagcagaaatagccctgagagatcaaattgctttttattccatggacatcatgatttgacacagaaaggttagaaaatacaaatatatatcactgagttcaaa

SEQ ID NO: 970638 - DNA, 120 bp, Artificial Sequence
  ENSG00000226180_0 (sequence is synthesized)
tgtcagatgcagcccagcagagaggccctggaactcagaggactcccaaagtccgtgagcacagtgtcctcaacaaaaccccccctcaccacaccttcctcaacaaacccctcacgccaa

SEQ ID NO: 970639 - DNA, 120 bp, Artificial Sequence
  ENSG00000226180_1 (sequence is synthesized)
ctggctctggaggactgtgtccaattgcgagctgccttggatttaggttatggtcctgaatgctgctgccaccacctccctgaagtggctcacaagtcctcagcctccgccggagcccca

SEQ ID NO: 970640 - DNA, 120 bp, Artificial Sequence
  ENSG00000226180_2 (sequence is synthesized)
agtgccagactcccccttcagccgcacagcctgggcactcggaccaagctgccaccttccctgtgcttgccggggccaggtaggacacgtctcacaacagagccttttccgggggcgccc

SEQ ID NO: 970641 - DNA, 120 bp, Artificial Sequence
  ENSG00000226180_3 (sequence is synthesized)
ttctgcagtgattcttgcagtcctgcactctgctgtgttctgctcacaccaggcagggggagagggagcgtggcccctctgggaagctcccaggacggcaggggtgggtgctgccctaca

SEQ ID NO: 970642 - DNA, 120 bp, Artificial Sequence
  ENSG00000226180_4 (sequence is synthesized)
gatacagtacctgctgcacagggaatggacgcctcctggacggtggccccagcccaggaatggctgggacacccactccagtcttgcccacagtctgcttccagaggacacttgcccctg

SEQ ID NO: 970643 - DNA, 120 bp, Artificial Sequence
  ENSG00000226180_5 (sequence is synthesized)
cctctccccacccccaccacgccctgcatctcgcagccacctggaaggagatgtagaccccactgtggtaaggagctgttcagagcccccggagccctccacttcctaccacgcagacat

SEQ ID NO: 970644 - DNA, 120 bp, Artificial Sequence
  ENSG00000226180_6 (sequence is synthesized)
cctgctgctgtgcgacacagatggaccagggcttgtcctgaaggtcccaggatgcacattcctcagggatggctactctcctccccctccctgttaacagactggttttccatggactcc

SEQ ID NO: 970645 - DNA, 120 bp, Artificial Sequence
  ENSG00000226180_7 (sequence is synthesized)
tttaagcccccaagtctggcctctggtcaaatttcaaagacatgatggggtggtctgttaagactgagtagctcatgtggcaccaggtgagggctgctcaggcctgcattaaggagggga

SEQ ID NO: 970646 - DNA, 120 bp, Artificial Sequence
  ENSG00000226180_8 (sequence is synthesized)
gcccgaacaacgggcctcccccttccccccacccacaacgaagcagctgctgctggctcctctcccagagactggaagagaattgatgagaacaccggggacccagcagttccactccca

SEQ ID NO: 970647 - DNA, 120 bp, Artificial Sequence
  ENSG00000226180_9 (sequence is synthesized)
ggcctaaatctaagagggcaaagtcaagcctccactcaaaaccttgtgtgtgcacacactcccggcagcaggattcacaacagccacggagtggaagcagagccagctgtccagtggagg

SEQ ID NO: 970648 - DNA, 120 bp, Artificial Sequence
  ENSG00000226180_10 (sequence is synthesized)
accaggcagaaagcagagtccgggagctgggggaggaggggacagcaagtgcctgctcaatggccctgaggtttaaggtgatggagctgatctagatagaattgggggtgatggctgtat

SEQ ID NO: 970649 - DNA, 120 bp, Artificial Sequence
  ENSG00000226180_11 (sequence is synthesized)
aactgggaatacactaaaatccctgacttgtacactgtggccacctgaagtgaacagtacacgctttctgtctcagtaaagctacgcaaagaacagcagacatcccgcatgaagtcagct

SEQ ID NO: 970650 - DNA, 120 bp, Artificial Sequence
  ENSG00000226180_12 (sequence is synthesized)
ctccagggccgcaccatgggagctatgggctggcagtggccggctctgctcttgacacacaggaaggatgcaaactcagagccccagtggggtcacggccttgcccggagaactccctct

SEQ ID NO: 970651 - DNA, 120 bp, Artificial Sequence
  ENSG00000226180_13 (sequence is synthesized)
ggggatggcagcctgccgtccccttgcctagcctggatgccacatcccgcggcagcgaagcagcctcctgcttgaccgtctggcccggggacccttttgtctcctgggtcagtttcattc

SEQ ID NO: 970652 - DNA, 120 bp, Artificial Sequence
  ENSG00000226180_14 (sequence is synthesized)
tttccccaggctgtgctcctgatgaagcagcatcgtagctgatgttgaagggcctcacgccagcacctaggctggtcttccctgggtgcctgcttgagcacgtggcccaaaacagccgtt

SEQ ID NO: 970653 - DNA, 120 bp, Artificial Sequence
  ENSG00000226180_15 (sequence is synthesized)
gcatggggcactcagaacccaccacaccctcgccccttcccagcccgccaccctgtggctgaggccctgtgccttgagcaagctgctgcccctcctcctcctggtccagttctgcccaca

SEQ ID NO: 970654 - DNA, 120 bp, Artificial Sequence
  ENSG00000226180_16 (sequence is synthesized)
cctgggtgcccacctcccctccctgtggtctccaggagctgcccccaacatgccctgggcagcagtgctcatcgtagccccgtctgtggcctggacaggctctgaccactcctgcgttgg

SEQ ID NO: 970655 - DNA, 120 bp, Artificial Sequence
  ENSG00000226180_17 (sequence is synthesized)
cacagcttcctcgggaggctcctgccaacaccactcggcacggtgggctcaacacggcagcggcaacgggtgggagtacttgcctctgcctggcccgaatggcggttttccatttggatt

SEQ ID NO: 970656 - DNA, 120 bp, Artificial Sequence
  ENSG00000226180_18 (sequence is synthesized)
tggggatgagcagccaatgagcctatctcattcccgttaacgtgagagaaacatccagacgctatcctcaggtctcacacacccccgccgtgctctgcaccacacctggcaggggcaccc

SEQ ID NO: 970657 - DNA, 120 bp, Artificial Sequence
  ENSG00000226180_19 (sequence is synthesized)
ccgactgtatgctgggcatcagctcccaggcccgagcgcctcacctcacactggggattggagccctcaggccctagagacactggcttgagaaacttttgagatggagtctcgctctgt

SEQ ID NO: 970658 - DNA, 120 bp, Artificial Sequence
  ENSG00000260534_0 (sequence is synthesized)
atggaaatcgtctttgacaaaactgaaatgccctgaagttttaattttttaaatacatgtaatgaattggtatatggtagatactcgtggctacttagtatttaccaaatgctttgtttc

SEQ ID NO: 970659 - DNA, 120 bp, Artificial Sequence
  ENSG00000260534_1 (sequence is synthesized)
tttccatctcgtttatttttattttttatttttttaagagacagtcttgctatgttgcccaggctggacttgaactcctagtctcagccaaccccttctgcctcagcctcctgagtagct

SEQ ID NO: 970660 - DNA, 120 bp, Artificial Sequence
  ENSG00000260534_2 (sequence is synthesized)
tcataggcatgtgccactgctcctagctcttccatctcagtcttatgatgtagttactattttcattttataaataagaaaatagaagctcaaataaaatgggtagtttccttgaggtca

SEQ ID NO: 970661 - DNA, 120 bp, Artificial Sequence
  ENSG00000260534_3 (sequence is synthesized)
tcctgttagtaagtggtggaatgaagttacaaacctaggttttattggtcagcacacacagtgccgggcactggcagtacagcagtgaacaaaaggtctgttggtttgtctgaagctctc

SEQ ID NO: 970662 - DNA, 120 bp, Artificial Sequence
  ENSG00000260534_4 (sequence is synthesized)
aaccttgattctgcatagactcggtggattgcccaaggccactcaaccagttaatatcagagccagctctgctgtttgaccagtatattattttcaccatgctgtatctgcttctcagtc

SEQ ID NO: 970663 - DNA, 120 bp, Artificial Sequence
  ENSG00000260534_5 (sequence is synthesized)
accaaaagcaccagctaaaattgtatatagactgattaggggacttccaacctaagattgtcctggaaacttaattcttatcttggctcatctcttcaaaacagatgcctctttcgttgg

SEQ ID NO: 970664 - DNA, 120 bp, Artificial Sequence
  ENSG00000260534_6 (sequence is synthesized)
tgacctcagatacactgttcagaagtactcaaagtattccttttttctcacatttgagagtcactctagcattttaatgagttaagcaagccagccctgcatttccaaacccttcccaga

SEQ ID NO: 970665 - DNA, 120 bp, Artificial Sequence
  ENSG00000260534_7 (sequence is synthesized)
agcaagccagccctgcatttccaaacccttcccagaagtctaaccttactttgatctgatgacatgggctttttaaaagattactatttttttagaggtggggtctcactatgttgccca

SEQ ID NO: 970666 - DNA, 120 bp, Artificial Sequence
  ENSG00000260534_8 (sequence is synthesized)
ataatatttcctcagcaacaatttatgtcttatttggcacctgtaaaaccctcttcactgattatgcctgtttaaaggtttggtatttactccaagtcacctgcctttagccatggagta

SEQ ID NO: 970667 - DNA, 120 bp, Artificial Sequence
  ENSG00000260534_9 (sequence is synthesized)
ctttagccatggagtattcaagtttctttcagaatgagaatttggagggtgctcatagaaatataaaacaaggctgggcatggcggcttacaccttgtaatcccagcactttaggaggct

SEQ ID NO: 970668 - DNA, 120 bp, Artificial Sequence
  ENSG00000260534_10 (sequence is synthesized)
agaagaagaagaaatacaaaaccaactctttatagtagacagtttatcccccagaaagctttttaggctgaaaacgtttctatagattttggatttccttctgatagctaaaatttgttt

SEQ ID NO: 970669 - DNA, 120 bp, Artificial Sequence
  ENSG00000260534_11 (sequence is synthesized)
ctgtataacagagtagtgccctataagccagttcagtgcacattaaatggctgttcttagaattatgaatctgaggcttatgcagtgaggctctagctctctggagtcagttggtcaagt

SEQ ID NO: 970670 - DNA, 120 bp, Artificial Sequence
  ENSG00000260534_12 (sequence is synthesized)
gggattcctgaggactgagcaaacacacacagagcaggattttgtcctaagttttcttagggatcctatccaaaaacaccattacttgaatttcccagcttccttttacagggagacttc

SEQ ID NO: 970671 - DNA, 120 bp, Artificial Sequence
  ENSG00000260534_13 (sequence is synthesized)
cttgctatgtgtactcccacctcggtatgtcaaatcattttctcagaggaagtacagcataaaataataaccagcatttgtagagcacttcttgtgggccttcttgggcaaatagacatt

SEQ ID NO: 970672 - DNA, 120 bp, Artificial Sequence
  ENSG00000260534_14 (sequence is synthesized)
ctcatggaatgctctaaaattgttaagttcttgcacttgctctcaagtcatttataatctaattgctggtcttcctggtatgaacaaagatgtttgcttgttaataaattcctaccacat

SEQ ID NO: 970673 - DNA, 120 bp, Artificial Sequence
  ENSG00000251621_0 (sequence is synthesized)
agctggatcgagacgccctcctcgatcaagtccatcgactccagcgactcggggatttacgagcaggccaagcggaggcggatctcgccggccgacacgcccgtgtccgagagttcgtcc

SEQ ID NO: 970674 - DNA, 120 bp, Artificial Sequence
  ENSG00000251621_1 (sequence is synthesized)
ccgctcaagagcgaggtgctggcccagcgggactgcgagaagaactgcgccaaggacattagcggctactatggcttctactcgcacagctaggccgcccctgcccgcccggcagccgaa

SEQ ID NO: 970675 - DNA, 120 bp, Artificial Sequence
  ENSG00000251621_2 (sequence is synthesized)
tctttttaggaccgacttacatcactggagcttttaaattgtagtaatttagggtctatagataactttctgaacctcttatcccccgcagttaacattttcatataaatctcactgcta

SEQ ID NO: 970676 - DNA, 120 bp, Artificial Sequence
  ENSG00000251621_3 (sequence is synthesized)
caactctttgtgacccacctttttttggggtgttattgagtatttatatttttagcgctgaagctttaaaggatgctctactttctgcttaagatgcaggtttggaacaaaagcttcgtt

SEQ ID NO: 970677 - DNA, 120 bp, Artificial Sequence
  ENSG00000226083_0 (sequence is synthesized)
cttcattgaagacctaagttgcccctcccagggttgggttgatgtagatcaacccaagtgctgcctggagctaaggaggatcaggattggatgctggagagcagagatgaagaatatcaa

SEQ ID NO: 970678 - DNA, 120 bp, Artificial Sequence
  ENSG00000226083_1 (sequence is synthesized)
ctatggcctcagggccagcagggatgctggtttttcctcggctaatagccatttgcaatagggtcaagatttatgccagctggaatctcacaggatatcagtcacattgctttcttctaa

SEQ ID NO: 970679 - DNA, 120 bp, Artificial Sequence
  ENSG00000226083_2 (sequence is synthesized)
gcaattgcttatgcttacaagaaaaggagcaggaacattgaaaggaaaatgacatacttagcttagggttctgcatgacaaatggctcttgataaccttcccccgtcaattctgggagag

SEQ ID NO: 970680 - DNA, 120 bp, Artificial Sequence
  ENSG00000226083_3 (sequence is synthesized)
tagacaaaagcaaagaaaacaaattgactacagacatcgacattcatcctacttgaagagagaaccagtctgtgtgaaaaacagagtaaacttcaaaagaatccagcaattgccctgaac

SEQ ID NO: 970681 - DNA, 120 bp, Artificial Sequence
  ENSG00000226083_4 (sequence is synthesized)
ctcaagagtgaatctgaggactgatgtgctccacacattaccttcaagactgtttagtttaaacaaagtatagctcatttcattaaatggacaatggttggattctgcttcattagtagt

SEQ ID NO: 970682 - DNA, 120 bp, Artificial Sequence
  ENSG00000226083_5 (sequence is synthesized)
caatctcaatgaatctgttccacatattaccttcaaggttatttactttttcttctccaggacacagtgcttagaaaaatcaaatagaaaagccaccaagcttaccatttcaaccaagga

SEQ ID NO: 970683 - DNA, 120 bp, Artificial Sequence
  ENSG00000226083_6 (sequence is synthesized)
taaatataagaacatcccagcagtgactgtgaagatccagtcttgaacacatggatcagctgacacggaaaggccaatgtataatcccatgaaggcagttagggagcttataaaattcat

SEQ ID NO: 970684 - DNA, 120 bp, Artificial Sequence
  ENSG00000226083_7 (sequence is synthesized)
caggatggcagtcttcatagaaagtccagagcttaagagcacggcaaagtctcctgaagtttaagaggaaaggaaaatataattatcatttaatggaagacgcctttgctaaagtaacgc

SEQ ID NO: 970685 - DNA, 120 bp, Artificial Sequence
  ENSG00000226083_8 (sequence is synthesized)
acagaaagagaatagaagtctttcaaatttgtgggaaaattatctggaaattgaaagtcctccaggcaaaggtctggctgtgatattacttctgggcgacacttctcacaagagggaaga

SEQ ID NO: 970686 - DNA, 120 bp, Artificial Sequence
  ENSG00000226083_9 (sequence is synthesized)
acttctcacaagagggaagataagtactgtcagaccacagatccctgttcctggggagaatgcaccagggaatacaagaaagtagtggtccacaacctttttggcaccagggactggttt

SEQ ID NO: 970687 - DNA, 120 bp, Artificial Sequence
  ENSG00000226083_10 (sequence is synthesized)
gctttcctatatttctctagaattcatagcccattcatcgtactattaggaagttgcatttcaagagttccattcctttggctgctcctaaagattgtatctacagagaggtctgtgaca

SEQ ID NO: 970688 - DNA, 120 bp, Artificial Sequence
  ENSG00000226083_11 (sequence is synthesized)
tattcttgagttcttgatatcctctgacatttccaacttagataaatggaaaatagtcactcactgtcccagggtttctaaatctttgggcctggaaatttgccaggtgaaatcatgaca

SEQ ID NO: 970689 - DNA, 120 bp, Artificial Sequence
  ENSG00000226083_12 (sequence is synthesized)
gagaaaactacttaatatgagatttttaaagcattgtaaaagttggttaggaaacaaatttttccctttagaaaatgattataggaaaatgatctcattctctccatgccttccctccaa

SEQ ID NO: 970690 - DNA, 120 bp, Artificial Sequence
  ENSG00000226083_13 (sequence is synthesized)
gagaagattgacctgttagtaaatctgagaacatctacttcttagtttgggggattgagactaaaattcaatagacagcttggggacccagttttctagttccattgcataattgttccc

SEQ ID NO: 970691 - DNA, 120 bp, Artificial Sequence
  ENSG00000226083_14 (sequence is synthesized)
atgaacggggcttgaaacatctctgctggcctgctgcagacggtcacactgccctgtggctttgggttgaggactgggggctacatccctgttacagtagcaaaactcaggaccacagat

SEQ ID NO: 970692 - DNA, 120 bp, Artificial Sequence
  ENSG00000226083_15 (sequence is synthesized)
aggggatggcttccagaccaggtgcactttaatgagcccagggaggaccttggataaactgctccaagaaggataggtcaataatgagtcagtgtcaggactttgagcaacggactccaa

SEQ ID NO: 970693 - DNA, 120 bp, Artificial Sequence
  ENSG00000226083_16 (sequence is synthesized)
gcacaagagggcaagcgtttcctaggggcaatgtaggtgcgaaagtggaagcagagagactgcgaagagccctctcccttgggagcctatgccagaccagcctctactatttctgggtct

SEQ ID NO: 970694 - DNA, 120 bp, Artificial Sequence
  ENSG00000226083_17 (sequence is synthesized)
atgccagaccagcctctactatttctgggtctgtttcagaaacgtctgttctaacccatcttgcgtcctgggaggcaaagaacagggctatattgttctcacttatttgtgggatctaaa

SEQ ID NO: 970695 - DNA, 120 bp, Artificial Sequence
  ENSG00000226083_18 (sequence is synthesized)
atagaagaaggttaccagaggctgggaagggtagtggggtggtaggggaaggtggaggtgaggtaaagatggttaatcactacaaaaaaaaaaaaaaaaatagaatgaataagacctagt

SEQ ID NO: 970696 - DNA, 120 bp, Artificial Sequence
  ENSG00000226083_19 (sequence is synthesized)
atttgatagcacaacaggacgactacagtcatcataatttaatttgtacatttaaaaataactaaaagagtataattggatagtttgtaacacaaacaataaatgcttgaggggatggat

SEQ ID NO: 970697 - DNA, 120 bp, Artificial Sequence
  ENSG00000246560_0 (sequence is synthesized)
tccaaaatgcataagttctcgcgagacgcagtaaggcaccggctcgaactggggcgggccactgccaggaaagcaacgcccctgaatgcttatgccggtggttggtagaggaaatggaat

SEQ ID NO: 970698 - DNA, 120 bp, Artificial Sequence
  ENSG00000246560_1 (sequence is synthesized)
tccccagactgtacctcttgacttgctactggtacctggaagagatgtaacacctgaccatgggacatcaagtgactgtgtgaatcaaactgcccatcatgaattgttgttatttgactc

SEQ ID NO: 970699 - DNA, 120 bp, Artificial Sequence
  ENSG00000246560_2 (sequence is synthesized)
atcaaactgtacaactggatgaacacaggagcagtgcactacatatgggactggaaccatgaatgagcaggtgactcagactcctatagtacctgcctctactccttcagcacttctccc

SEQ ID NO: 970700 - DNA, 120 bp, Artificial Sequence
  ENSG00000246560_3 (sequence is synthesized)
gttaatggaagagaaaaaagtatggatgttatggatatcctaacatatttctggccattggacccctagaaacctgtggcaagtcctggaagtttttcaaggttcatcttgcaccttcta

SEQ ID NO: 970701 - DNA, 120 bp, Artificial Sequence
  ENSG00000246560_4 (sequence is synthesized)
gcatgcatatgtcgtaccaaagcatgtagaatgctgcctacttctgctcttcagtttcatttaatataatttcattactctgataaatcagtgtgatgttctatggaataacaaaagacc

SEQ ID NO: 970702 - DNA, 120 bp, Artificial Sequence
  ENSG00000246560_5 (sequence is synthesized)
atcaaggtcccttcataccatatagagaacaggagagttgatgtagcctgagacaagacagtaaggacttactgttatccctcctatttaaacgtagtctgtttctgattctccttagaa

SEQ ID NO: 970703 - DNA, 120 bp, Artificial Sequence
  ENSG00000246560_6 (sequence is synthesized)
tgggggtggggggacatttccagatcaatatcagatcagtatcatgtcaacatgggtattaatttcttccgaagaagataccacacctagaacagcaaccataattggcatccctaccta

SEQ ID NO: 970704 - DNA, 120 bp, Artificial Sequence
  ENSG00000227588_0 (sequence is synthesized)
atgtaagctgtagccaaagaaacagatcacaggccacactaaaattgtgaacttcatggcaattgctccagtcccacctgctccagatacctaaatcatgaaggcttactagcaaacctg

SEQ ID NO: 970705 - DNA, 120 bp, Artificial Sequence
  ENSG00000227588_1 (sequence is synthesized)
tgcccctcgtgtttctttcacaaatggtggaaaacagcaagtggaaaaggctagttcaccaaagcgaaagattataatatgacaatctgaaaggcagcagaaagcagatggaggtcacca

SEQ ID NO: 970706 - DNA, 120 bp, Artificial Sequence
  ENSG00000227588_2 (sequence is synthesized)
gtgtcggtctcaacacttcagctgcactggatgggatcctgttgcatcccccagtgtcacaggaatgtggcaaagaatgttgaaacaatgaacaacaaatatataaaacatttaagtata

SEQ ID NO: 970707 - DNA, 120 bp, Artificial Sequence
  ENSG00000227589_0 (sequence is synthesized)
cactacagggaacggcccaggaacccatccacccgtccccagctctcatcactctgacctctggctttttgtttcctggggcatttcacagcaaattccacctatgagaccgtctcatcc

SEQ ID NO: 970708 - DNA, 120 bp, Artificial Sequence
  ENSG00000227589_1 (sequence is synthesized)
gtaatacaccagtacatgcttccagcagcttggtgacatgaaaggacctccgtggctggccttactccctgtggatgccacagctgcaggatcctggggccccaacagaagccggtgaag

SEQ ID NO: 970709 - DNA, 120 bp, Artificial Sequence
  ENSG00000227589_2 (sequence is synthesized)
gaagagttcctgctccagcagaacaaaactgccctttgcccagaaatcctgcaaactgaggctggacgacttgaaatactcatcagcgagattaccacgaagcccaggtgcgagggaccc

SEQ ID NO: 970710 - DNA, 120 bp, Artificial Sequence
  ENSG00000227589_3 (sequence is synthesized)
gccagagaccaaaccgcagaagatgctcggagcccaacatctacaaacctgccccgccacggcccccaggctcagaaactggtttttagtcagctccaatgattagcttttttttttttt

SEQ ID NO: 970711 - DNA, 120 bp, Artificial Sequence
  ENSG00000227589_4 (sequence is synthesized)
cttttgtttccatagaaatgcctcttcaaagcattatgggacaacacacccacccagtttctgtaccgtggagcttcttggggaagtttcagactaggaaacaatggggctcaggacaca

SEQ ID NO: 970712 - DNA, 120 bp, Artificial Sequence
  ENSG00000227589_5 (sequence is synthesized)
tcaccccaaagtatgactgtaggagaccagaatacgccacccctaaatatgactataggagaccagaatacgtcaccccaaaatatgactgtaggagaccagaatacgccaccccaaaat

SEQ ID NO: 970713 - DNA, 120 bp, Artificial Sequence
  ENSG00000223800_0 (sequence is synthesized)
agaacactttgatttcttttcaatcatagtttaagctaggattggaattttgagctgaaagctaattcctgagtagcattaaatttcctacctccttgcagggaaaggccacaatattct

SEQ ID NO: 970714 - DNA, 120 bp, Artificial Sequence
  ENSG00000223800_1 (sequence is synthesized)
acagaaaaaatattaggtggagctacagatctacaagtattgaaatccaaggacagaagaagagtggcttatggatgatacaatagagaaaaggaaacaaaatacagaggcaacaggtag

SEQ ID NO: 970715 - DNA, 120 bp, Artificial Sequence
  ENSG00000223806_0 (sequence is synthesized)
gacatgggaccaacatagctgccatgatgatccagagactcctgccctgcagttgccgattaaggtctgagaagtcctatagtcaagagacctacttaatttctataaactccatattgc

SEQ ID NO: 970716 - DNA, 120 bp, Artificial Sequence
  ENSG00000223806_1 (sequence is synthesized)
caaacctttatgtaataagttttgatacctctcaaaacttctgcagtctacacttgtggaaacactatcgtttcataaacccagcaattcaatgtaaatttatcattggcttccctaaag

SEQ ID NO: 970717 - DNA, 120 bp, Artificial Sequence
  ENSG00000223806_2 (sequence is synthesized)
taattgcttgggagctcttgtgcttggagagtttggaaacacattagtcttttgcagaaacgagttagggcagctggggaagatgaccctgttttccctcccttctctacttcttcctca

SEQ ID NO: 970718 - DNA, 120 bp, Artificial Sequence
  ENSG00000223806_3 (sequence is synthesized)
aatgactggtatctcgaatttgcataacggaggccaaaaggttttgtgctacaataaaagataagacttgaagaacaagtcccagatatgaccaggagcatgcttgagagtcagcgacat

SEQ ID NO: 970719 - DNA, 120 bp, Artificial Sequence
  ENSG00000223806_4 (sequence is synthesized)
gcaagcgaatgatatgagaagtagcttgagggtggatctttgtccagggaggagaagggttgaggggctcttggaacctagatatttgcagtggaagcagcactgggctccttggcagat

SEQ ID NO: 970720 - DNA, 120 bp, Artificial Sequence
  ENSG00000223806_5 (sequence is synthesized)
gactgctctttgtactcaggataaaacccacatttgctgcccagcatctgaggccctgcctaccttggggatgttgtaatgtttttcttcccccttagttccagccacactaaggttttg

SEQ ID NO: 970721 - DNA, 120 bp, Artificial Sequence
  ENSG00000223806_6 (sequence is synthesized)
agcctgagatcaccaggctccctgagtccttggcctgtaccctcacctgcaatgttggtttcctcaacccctcagatctcttacttaatgccccttccctttaaggtgccccttcactta

SEQ ID NO: 970722 - DNA, 120 bp, Artificial Sequence
  ENSG00000223806_7 (sequence is synthesized)
attggagacgcaggccccactgccaaccacacaagaaataggctctgaaatatttgttggatccatgaatggttgattggctttcattgggctgctgggaggattaaattatgaatgtat

SEQ ID NO: 970723 - DNA, 120 bp, Artificial Sequence
  ENSG00000223806_8 (sequence is synthesized)
aaaggtgattacatctcattcctatatacccattacattgatggataagtattaggttctctctcctcttgccagggactttaagaagctgctgaagaacccaagaggaaggtgggagct

SEQ ID NO: 970724 - DNA, 120 bp, Artificial Sequence
  ENSG00000223806_9 (sequence is synthesized)
gttgatggtgtggaattagaggcctgatggagtggagagctttcctcctcatcacctgggtcaggaccatggagctccttgagccttgagattccaggcccaggagcacatcatcattgt

SEQ ID NO: 970725 - DNA, 120 bp, Artificial Sequence
  ENSG00000223806_10 (sequence is synthesized)
gcttcttggggcccaggcgcatctcctaagaacttgttcttagacatgttgtgctcaaacttgtggcatcatagcagtaatagtttacaatatacctacagtttcctgggcagatcatcg

SEQ ID NO: 970726 - DNA, 120 bp, Artificial Sequence
  ENSG00000223806_11 (sequence is synthesized)
tgtgcagaccggctgcagagagaagggaactgtttcactttcatcttcctgggccatttccagatatgaattgcagagacatatttcaatatatcctcacccaaatatgctttagaagta

SEQ ID NO: 970727 - DNA, 120 bp, Artificial Sequence
  ENSG00000223806_12 (sequence is synthesized)
catttcttttaatgtaataagatttatgtcctttgtgtttgtttagagggtaaatctggatttgtatttttagaagttactttcaccaaagaaattcgaaagaaatagtgtttcagaaaa

SEQ ID NO: 970728 - DNA, 120 bp, Artificial Sequence
  ENSG00000223806_13 (sequence is synthesized)
atcaaaacaagccatagaaatctaatatgtttcagatactatattgggctgcatgaagactaaatccataatatgtatgaataatgtattctaaagtaaatatcatattttgtcaaatta

SEQ ID NO: 970729 - DNA, 120 bp, Artificial Sequence
  ENSG00000223806_14 (sequence is synthesized)
tcttcgtcaaattccttcttaaacagtggtcaagtattcttccggtgcagctgttattttcgggtcctgtattctgctttgtgctgaccctgtaatctcagcagtacccattcgcctagc

SEQ ID NO: 970730 - DNA, 120 bp, Artificial Sequence
  ENSG00000223806_15 (sequence is synthesized)
agggcttcgggatgcttccccgactctcctcgcaccttcacaccaacgcactccgggaatgtttctgatgggtgtcaagtccactctctgatgaacggactcgtgctttgagagcatctt

SEQ ID NO: 970731 - DNA, 120 bp, Artificial Sequence
  ENSG00000223806_16 (sequence is synthesized)
cagggtcagtgcatccagtgaccgtttcatgacaccgtttgcctcgagcgccaccgcctggccaaaactggaacgacctgtgcccgttgctgaggaggaaaaacacccgggatggaattt

SEQ ID NO: 970732 - DNA, 120 bp, Artificial Sequence
  ENSG00000223806_17 (sequence is synthesized)
ctagtttttgtgcaatcctcatccttttccattttctgtaaagtgacgatgacagatattttcgcttactaatgcaagtatttttcatctgaataaatataccaatttctctggcaataa

SEQ ID NO: 970733 - DNA, 63 bp, Artificial Sequence
  ENSG00000223806_18 (sequence is synthesized)
tttcctgaggcctcctccggagtggagcagatgctgccatgcttcctgtgcagcctgtggaac

SEQ ID NO: 970734 - DNA, 120 bp, Artificial Sequence
  ENSG00000223809_0 (sequence is synthesized)
ttgtaatggttgcatcaggggaaggatttattgatccacaccattttcttggattttctatcctccccagggggcagaggtgggttgattgtgtggcgtgtcggcaaaggccaggctggg

SEQ ID NO: 970735 - DNA, 120 bp, Artificial Sequence
  ENSG00000223809_1 (sequence is synthesized)
tcatccaccttcctcctgatgctccacgcagatgtgctgggacctacttcagagtgtccctgagccatgactgcttgactccacagatggcttcaggaagacagcacagaagagggacct

SEQ ID NO: 970736 - DNA, 120 bp, Artificial Sequence
  ENSG00000223808_0 (sequence is synthesized)
tcttttccagaggctagatatataggaggttgtggctgctccagcagcttggattcagagtgagaaggcataaaggagaatccccagctgacttgtgcagtggttaattgaaattattca

SEQ ID NO: 970737 - DNA, 120 bp, Artificial Sequence
  ENSG00000223808_1 (sequence is synthesized)
ggcaagagatgatggtgtcttggaccaggggatgaggaaggctacaaaatgtgtctacctgtattctgtgaggagaacgtgttccctggttttagatactgtgaagatggatcaggagag

SEQ ID NO: 970738 - DNA, 120 bp, Artificial Sequence
  ENSG00000223808_2 (sequence is synthesized)
gaaaaaggaaatgaaagaaaagatgtttcagattgaggatatgctgtgtggtgaacttgttcttcactctgtagggttcacaaatgactcttcactgccctcttggatgaaataaactgg

SEQ ID NO: 970739 - DNA, 120 bp, Artificial Sequence
  ENSG00000223808_3 (sequence is synthesized)
ttcccatagaaatggaccgtctctgatttcacagtctagagcacacaaataactcaactttctggaagcaagggtgatggctcgtgagagctcaaggacaaggaggagtctgtagaagca

SEQ ID NO: 970740 - DNA, 120 bp, Artificial Sequence
  ENSG00000223808_4 (sequence is synthesized)
cacctggactcggggaaatcattgacctctcatcctgaattaagtagcgcttgaaaagactctctttgaatcagaaaaataatgcgagctcctatcaaactaccttacacagccaactga

SEQ ID NO: 970741 - DNA, 120 bp, Artificial Sequence
  ENSG00000257703_0 (sequence is synthesized)
aaacaagacagccattctcgctcctctcagaccactgctccgagaggcttgctctccgacgggtcctacatgctaaataactcctattcttagttcacgttgacttggtggctcgagcca

SEQ ID NO: 970742 - DNA, 120 bp, Artificial Sequence
  ENSG00000257703_1 (sequence is synthesized)
ggcgacttcttggcagatactgcatcttcagccaggagaagttggcttagtacaaaagggcttttgaagcggaaactacaagaagatgcatctgtcttaacaaaaaataataaaccaaga

SEQ ID NO: 970743 - DNA, 120 bp, Artificial Sequence
  ENSG00000257703_2 (sequence is synthesized)
aaataaaagatatgggatcctagaaataaaaggtgcaacacaagagagagataaagaaaaacattgacagcctctctatgaagaaagacccaaagtaacaactttgcaacagctctaggg

SEQ ID NO: 970744 - DNA, 120 bp, Artificial Sequence
  ENSG00000257703_3 (sequence is synthesized)
aataatttgttcagataagagtaactcaggagactccaagagcgattttcgagaagattaaatctatagaatacctaatatgtttgcacttgtaaagaagagttttatactacttggaga

SEQ ID NO: 970745 - DNA, 120 bp, Artificial Sequence
  ENSG00000257703_4 (sequence is synthesized)
gaatttagcagttcatctatcagtatcatttgcatagatataatgttcgctaaatatttctatagcctaaggaagatggtgaatgagaagtgtgcttatgtgtggcaaggaagaagggga

SEQ ID NO: 970746 - DNA, 120 bp, Artificial Sequence
  ENSG00000257703_5 (sequence is synthesized)
tttaccaagtgggaagtccatggtcaaatgcttaagacttagtaaggcatttaccaagtgggaagtcaatgggcaaatgcttaagacgtagtaatcagaatgcaaatacataagtacatg

SEQ ID NO: 970747 - DNA, 120 bp, Artificial Sequence
  ENSG00000257703_6 (sequence is synthesized)
tagaggcaaaacatagcattgtagttatgtgcgcagatgctggagtgagactctctgggttcaaatcccagccctaccaattactagtcatgtgactttgggcaaattgttgacctattt

SEQ ID NO: 970748 - DNA, 120 bp, Artificial Sequence
  ENSG00000257703_7 (sequence is synthesized)
gaaactcagttttctcgtatgaaaactgtgattataattactcatctcataagatttttatatgaactaactttctaaaatacttagaatagtacttgtcacaaagccagcagtataaaa

SEQ ID NO: 970749 - DNA, 120 bp, Artificial Sequence
  ENSG00000257703_8 (sequence is synthesized)
gataaatattaaaagaataagctaaaacagaaattggttgtgacaggaggagaatgatgcactgggaatattattgcttttcataacttggagaaatttgattttttaaagtttgtgttc

SEQ ID NO: 970750 - DNA, 120 bp, Artificial Sequence
  ENSG00000257703_9 (sequence is synthesized)
acatataattaaaaaaatagaaaactaaattttaagtgacaagaattatattcttccatttagtcaggtgctggataaagtagcttttttttaggtgtctgcaaatattatgacaattag

SEQ ID NO: 970751 - DNA, 120 bp, Artificial Sequence
  ENSG00000257703_10 (sequence is synthesized)
gacaagaaaagtgcatgctattttcaaccagtttgtattaatgatgatccttagatgtaagcaacagaagttgatgaagctgatttaaatacaatggtttagttgaaaagatgttgggga

SEQ ID NO: 970752 - DNA, 120 bp, Artificial Sequence
  ENSG00000257703_11 (sequence is synthesized)
gatcacagaatgaattgcaatgctggagaaccagttatgaaaacatacaagcatgaagggaggctgcatagccataactatgtcctgaatcacaccaaataccatcaggtgaggatttca

SEQ ID NO: 970753 - DNA, 120 bp, Artificial Sequence
  ENSG00000257703_12 (sequence is synthesized)
catctatcgccattggactcgccataccgtaatttatacatttactgacctggccgccccaactcttcctggaaatcagatgctgctgccaccacagccatatcagaaagaagcctcctc

SEQ ID NO: 970754 - DNA, 120 bp, Artificial Sequence
  ENSG00000257703_13 (sequence is synthesized)
tcgtgttgttttatgtcactagtcccacttcaagtcatagccaagtgcataaattgatcagggaggctgggaagacaaactacttggtgtatatataatgtctgtggtaggaggccaact

SEQ ID NO: 970755 - DNA, 120 bp, Artificial Sequence
  ENSG00000257703_14 (sequence is synthesized)
ctaccgccgtcccagagccataagataggtaattttccaattacagactagatggaatagactatattcttatattaattgcttcttcatagaagtacatttatttaccatcattgattc

SEQ ID NO: 970756 - DNA, 120 bp, Artificial Sequence
  ENSG00000257703_15 (sequence is synthesized)
aagttagcaatatgactaactttggccaattaaatataagtaacagtcattcttcacttcaggacagaaatactaagaaccaggatatggttctcccaatctactattccctgccaggca

SEQ ID NO: 970757 - DNA, 120 bp, Artificial Sequence
  ENSG00000257703_16 (sequence is synthesized)
aatctgaaggcatgttgaaaggatgcttctgtcagcctgagtccctaaatgactatgataagcaaagcttccttgccaacttgtgatggacatgtattatgagcaagaaataaatgtgat

SEQ ID NO: 970758 - DNA, 120 bp, Artificial Sequence
  ENSG00000257703_17 (sequence is synthesized)
gccaggagaagttggcttagtacaaaagggcttttgaagcgatttttgagattgttgactattatgtaacagatggcccaacagacctccgactcttttgcggtgttggccagcttggct

SEQ ID NO: 970759 - DNA, 120 bp, Artificial Sequence
  ENSG00000257703_18 (sequence is synthesized)
caggaaaatagcagcactggaatgccttttctgacccaaagtggggacaaccatgcatgagatcactccagaattatcttgggaacggagttcctgccatctcctaaagctccccagcct

SEQ ID NO: 970760 - DNA, 120 bp, Artificial Sequence
  ENSG00000257703_19 (sequence is synthesized)
aatggcttgtctgcaaacatttgccaactggctgaatttttccttagcctccagtgctgtgtggactcctcaattgataattcagtgagatggcagatttcctcagaagcagaagaaacc

SEQ ID NO: 970761 - DNA, 120 bp, Artificial Sequence
  ENSG00000257703_20 (sequence is synthesized)
aagagttgtaccaccatatcaaagatcttcaaccaacagcagggccaaaggccaagcttggattgaaatggcaaaactgactgcctaagtctttatatcataaagggcagtggttggctt

SEQ ID NO: 970762 - DNA, 120 bp, Artificial Sequence
  ENSG00000257703_21 (sequence is synthesized)
cgaggtaaaagacaagaaatggtggcttcatatatgtgcataaatatatgtgaattgaagactctatcccaatttatttacctttccaattaatatctattaaatgtttcatatatgcca

SEQ ID NO: 970763 - DNA, 120 bp, Artificial Sequence
  ENSG00000257702_0 (sequence is synthesized)
ttctgggattgttttctctttcagaaagcgctactgcggagtgaaccggtccttatatcttagtttcgtgactttgggggcggcaggcctgtgagttgttttccgccctggacgctgttt

SEQ ID NO: 970764 - DNA, 120 bp, Artificial Sequence
  ENSG00000257702_1 (sequence is synthesized)
tgcaaagatctctgcgcgcccaccgccaccctcccgggcgtgcgggccgggaagcagccagcggtgggaaactccgacgccctcctcgacacttttctccccccaactccccaagactca

SEQ ID NO: 970765 - DNA, 120 bp, Artificial Sequence
  ENSG00000257702_2 (sequence is synthesized)
cttctagggaagtcctttttcccatcaagccctgggaaagactggccaggctgagagagggacccgtcctcctctgtgccaaaggcgggagcaaatcctggtgctgtcgcctttggatgt

SEQ ID NO: 970766 - DNA, 120 bp, Artificial Sequence
  ENSG00000257702_3 (sequence is synthesized)
gagtcctggaaatggcgggggtgaggaaggtgggcaggggcaaggtttggccctcaggcgagaaccgacgccttgtcccggaagcgcagcacggccgagtgcgtccgggggtgcagacgg

SEQ ID NO: 970767 - DNA, 120 bp, Artificial Sequence
  ENSG00000257702_4 (sequence is synthesized)
cgccctggggtggtcctgccgccacctctcctttgactcaggagcgccgcgccgcgtccgggcgcgttctcagtcgcgcgaagccagagaggaccctgggcgtgattctccctccctggc

SEQ ID NO: 970768 - DNA, 120 bp, Artificial Sequence
  ENSG00000257702_5 (sequence is synthesized)
acagacggagacccgagtgaccccggggtccgggtgggcgtggggaatggacccatagacccgggacgagcggcgcggagcccgcagctggccagcttcagccaccttgggagacgcagt

SEQ ID NO: 970769 - DNA, 120 bp, Artificial Sequence
  ENSG00000257702_6 (sequence is synthesized)
gcagctgccgctgctgacagacaagaccaaggctcggctgggccccaccccagatccggcctgagcgccttccgcgctgctcggcctcaaggcgaaacttttcgcgcagaaactcctgga

SEQ ID NO: 970770 - DNA, 120 bp, Artificial Sequence
  ENSG00000257702_7 (sequence is synthesized)
gcttcaattcgcaggaaggggagtggggagccctgagctggggtgttcctggaagaggtcggggagcggggggagaggcattccaggctggaggcctggaaacgtttggaagctttgcta

SEQ ID NO: 970771 - DNA, 120 bp, Artificial Sequence
  ENSG00000257702_8 (sequence is synthesized)
accttggagaccatgtcaggaaagaagcgtacccaggccgtctgctgtgtgcccaccccgatccccatcagtgccccacgcactcgagctcttcttcggcgtctgcagcctcttcatccg

SEQ ID NO: 970772 - DNA, 120 bp, Artificial Sequence
  ENSG00000257702_9 (sequence is synthesized)
cgcggagaggcggaggtctcccggaaacagtgtccgactgtggcaccccagagcgtccaatgcgagctcaggcctttcccgcaagtctggagttttcttatccagttgaggccgccttcg

SEQ ID NO: 970773 - DNA, 120 bp, Artificial Sequence
  ENSG00000257702_10 (sequence is synthesized)
ctgtactcactctctgcctcccaccccatcttctgccacccgacctccatctttgatggttagcgccttcagccctcaacagcttcgcacaaccaacccctagaagccgtggagtcagac

SEQ ID NO: 970774 - DNA, 120 bp, Artificial Sequence
  ENSG00000257702_11 (sequence is synthesized)
cggccagggtgggacctaggttttaactcgggttctggctacacacgctgcgcctccatacagtttgtcccaggtttggcagcaggccggctaccttcaggaattctttgctttggcttc

SEQ ID NO: 970775 - DNA, 120 bp, Artificial Sequence
  ENSG00000257702_12 (sequence is synthesized)
tgtctgttcctgtctgttgggcaagtttctagctaccccactgagagaaccatagaacaaggaccctggcatggcatacagacaaggaatgtttgctgaattaatggagctggtgccttg

SEQ ID NO: 970776 - DNA, 120 bp, Artificial Sequence
  ENSG00000257702_13 (sequence is synthesized)
cagcttcccttttgttccttgaagttgcccttgctctcctccacatcagctccctctcctcctcagctacttattccccaccctggcttcttctagtcgcagtccccaagtacttgctga

SEQ ID NO: 970777 - DNA, 120 bp, Artificial Sequence
  ENSG00000257702_14 (sequence is synthesized)
atcctgtatggacagcctaagcctccatttctgacaattcctgtggccccactccatttgttttttagacttctccctcctttttgtccccatcccccaagttataaaactataatgcaa

SEQ ID NO: 970778 - DNA, 120 bp, Artificial Sequence
  ENSG00000257702_15 (sequence is synthesized)
cttggtcctcagggtctccggcctcggcacattaatcttcagacccggctttttcgacgccgagctgccgcccagccccaatggcagggccttccagggagtcccagtcagactgctccc

SEQ ID NO: 970779 - DNA, 120 bp, Artificial Sequence
  ENSG00000257702_16 (sequence is synthesized)
tttctactctcccctgagcccacgccatcccgtcactcctaggaaacttttcgcgcagaaactcctggagaacagccccggccgccaggtactcgcccgcccggaccgcaaagcccacag

SEQ ID NO: 970780 - DNA, 120 bp, Artificial Sequence
  ENSG00000257700_0 (sequence is synthesized)
cctcagcatccgaaatgagtgactgcatctgttcaatctgctccagagacagttggagaccatttaatggttaagtttccagagctcgatctggcagggcattgtaggaggtgcagggct

SEQ ID NO: 970781 - DNA, 120 bp, Artificial Sequence
  ENSG00000257700_1 (sequence is synthesized)
tggtcagccctccctaagcacccgtcccacctgcttcttcacgttgctgatctctgcctgcagcctctggacgaacactgtgcaggaccgtgggacagaggtcagccaggattggagttg

SEQ ID NO: 970782 - DNA, 120 bp, Artificial Sequence
  ENSG00000257700_2 (sequence is synthesized)
gccacagatcatcctcaaagccagtcatcaatgctagttgttcagaatttagtgactggactgtcagccacgccctttcaaccagaggcttcaccatccaaaaagatccaggacgacaaa

SEQ ID NO: 970783 - DNA, 120 bp, Artificial Sequence
  ENSG00000257700_3 (sequence is synthesized)
acctgtcaggcgaggcaaaggagcacagaaaggctgcaggctgaccttggctccctgaggtccctccttacagcagaaagcttggaattccccaaacatttgctgtcctgggttcagaga

SEQ ID NO: 970784 - DNA, 120 bp, Artificial Sequence
  ENSG00000257700_4 (sequence is synthesized)
accctgctcaaggtgctggctgtccattcccagaggctggcactctcatggatgagggcagagccaactcctaggtctgtgggccaacagaggggaccccgggccaacatggaaaaccca

SEQ ID NO: 970785 - DNA, 120 bp, Artificial Sequence
  ENSG00000257700_5 (sequence is synthesized)
gagccacagagaaggtccctggaatgtctatttttattttgatgttttacctttgtaaatgtgtcaaactcattcattccttaaaactgagaacatgaaataacaaccacttttactaaa

SEQ ID NO: 970786 - DNA, 120 bp, Artificial Sequence
  ENSG00000258708_0 (sequence is synthesized)
gcttgaagaaagactctacaattgataaaactaagtcagaccgaactggatcattttcaagtaaaataggtagcaaggcaaaaagaccgcctcaaagtcgctgcccttggggctctgcca

SEQ ID NO: 970787 - DNA, 120 bp, Artificial Sequence
  ENSG00000258708_1 (sequence is synthesized)
cttgctttacaggctaggaacggacaatgccgggaacccgagagcggccggcgcggacgccgaggcaactttacttggggcacccactactcgcaatcaactcccggcctcctctgctct

SEQ ID NO: 970788 - DNA, 120 bp, Artificial Sequence
  ENSG00000258708_2 (sequence is synthesized)
cgcgcctctaggggctcaagcactgctccgggagcgctgaattttgaggaagagggcagaacttcagtaaggagacctgtctgggcaacggtttcaggacacgcggtggggaaagcgact

SEQ ID NO: 970789 - DNA, 120 bp, Artificial Sequence
  ENSG00000258708_3 (sequence is synthesized)
agcctccggcggggcagggcgggctgtccttacctgcagaaccaccggccacgatctgccgagaagcctcgcgcactaagctgacttcaggcttggcggacatcttcgccaggcgggagg

SEQ ID NO: 970790 - DNA, 120 bp, Artificial Sequence
  ENSG00000258708_4 (sequence is synthesized)
acaagggagtgggctgagatgcgtcaacgagctcgcagcctgcacagcctactgatccagagagccccggctgggctggtcctcaagcgcgttggctccctgtggagcagcaatccggcg

SEQ ID NO: 970791 - DNA, 120 bp, Artificial Sequence
  ENSG00000258708_5 (sequence is synthesized)
actgctggaaagcgagggttcgaggcgcagattcgtcgcgcgatctccggcgcgtcggaacctgttcgcagcgctctcgcagaggcgccctcggctccgaaaatgtctctggaaagaaga

SEQ ID NO: 970792 - DNA, 120 bp, Artificial Sequence
  ENSG00000258708_6 (sequence is synthesized)
cccgcggatgggtttgggttggctcaccgcagcggctcaggctttgtctcctagattggcgcccacgcccttctctatcaggagcctccggtagtttgtcaaactagacggttgcctctg

SEQ ID NO: 970793 - DNA, 120 bp, Artificial Sequence
  ENSG00000258708_7 (sequence is synthesized)
ataactcaagtgaagtgacccaggcctggagcgccaagtacaaagcggggacgacacttgcacctcctggcaagccagagcacagtgaggttcaaaagaagggacaagtgaataaattcc

SEQ ID NO: 970794 - DNA, 120 bp, Artificial Sequence
  ENSG00000258708_8 (sequence is synthesized)
ttagttgtcctataattgtggtctgtagcaactaagtcaaagcaaatctaatttacacttaccttacaatagagctaaggtagtactttaccaaaaatggttttgatttaaggtaaaatc

SEQ ID NO: 970795 - DNA, 120 bp, Artificial Sequence
  ENSG00000258708_9 (sequence is synthesized)
atacctcatcaacttgagttttatttacctaaggaccaaaagaagaaaaagcctggttacaaatagtttcttctatacccaggtcagtggttcttaaaagtggttttagtacccacagca

SEQ ID NO: 970796 - DNA, 120 bp, Artificial Sequence
  ENSG00000258708_10 (sequence is synthesized)
tcagcataatttgtgaatgtgttaggaagtcaaattcgtgggtcccaccccgacctaaacggaatcagaatctctggggatagggcccagaaacgagttctctgttgattgtcatgaact

SEQ ID NO: 970797 - DNA, 120 bp, Artificial Sequence
  ENSG00000258708_11 (sequence is synthesized)
ttaaaggttgtgaaccactgacttaaacaattgaggaacattaaggaacttaacagtatattctctcaataaaatgtttgattattcttactagccccttaggatagttaccaaaacaaa

SEQ ID NO: 970798 - DNA, 120 bp, Artificial Sequence
  ENSG00000258708_12 (sequence is synthesized)
actactaatttatactcttttaaaactacaagttgcctgtgttatgtaggagagatataagattgtgaaattttccaaaaatacctgccacacccctaacagacaggagatgataagagt

SEQ ID NO: 970799 - DNA, 120 bp, Artificial Sequence
  ENSG00000258708_13 (sequence is synthesized)
aaaagagagaattgggaggctttagaagccctattgtaatatttcttaaaacacattatttattgctaaatatatttagtgtgagccatgtaaaaattgccatttttggaggtcaaaaac

SEQ ID NO: 970800 - DNA, 120 bp, Artificial Sequence
  ENSG00000258708_14 (sequence is synthesized)
cgttgaatatcagcaatttagtatggttcaatttatgtggtttctaatcaaatgtacaaagtacaataatttggtttcatacttgattttttatttcttaggctgagtcattaaaagttg

SEQ ID NO: 970801 - DNA, 120 bp, Artificial Sequence
  ENSG00000258708_15 (sequence is synthesized)
atcagtgatatatggcaaaattatttaaagtgcttgaggaattggggagacttgctgcttatgtgatcagatatacaaaaataaagtttttcatttcattaaatatttgattaaaactgc

SEQ ID NO: 970802 - DNA, 120 bp, Artificial Sequence
  ENSG00000258702_0 (sequence is synthesized)
ggcctgcgcatgcgcgcgccccagggcccagccctgttcctgctccggctcctgcggggatggatgcttcacgcagtaagcgacctaagtcgcggaagcgtagacacccggcttttcccg

SEQ ID NO: 970803 - DNA, 120 bp, Artificial Sequence
  ENSG00000258702_1 (sequence is synthesized)
cgtgctctatcgggctcccctggacacggagggtggagcagaaagagcagaggggccggtgggagccatggggagtccgcctagctccagaggaaagtgctgctttcaacatctgccaca

SEQ ID NO: 970804 - DNA, 120 bp, Artificial Sequence
  ENSG00000258702_2 (sequence is synthesized)
tttgcaagaagagcaaaggtggcccatttgagaccacccttgaactaaaccatccagtgagcccctgaggtcgggacagaagtggccatgaccttcctcaagcagggactgtggtggagc

SEQ ID NO: 970805 - DNA, 120 bp, Artificial Sequence
  ENSG00000258702_3 (sequence is synthesized)
ccaccttatccagcacaaggtggcctgctgacttctggtgacagtgatgccaacttcctggctgtccaaggttcaaatcttggtcttaatcctcctggccttctctcatcaatggccaga

SEQ ID NO: 970806 - DNA, 120 bp, Artificial Sequence
  ENSG00000258702_4 (sequence is synthesized)
gccaccctagctaacaaggtgcccagggactccggggtgggagaagtccagcttcttcttagctgaggacatttgagtctcgtcacagcccccaaaagaatactcatttttgtagctgga

SEQ ID NO: 970807 - DNA, 120 bp, Artificial Sequence
  ENSG00000258702_5 (sequence is synthesized)
gggcctggcctctgtctatctttgcttttccagaagctgacaagtacctgccggaaaaactgcctcttttccctcccgtgcttggagcaggcattgctgacagatcacagctgctgggcc

SEQ ID NO: 970808 - DNA, 120 bp, Artificial Sequence
  ENSG00000258702_6 (sequence is synthesized)
agaaagatgaaatttgttatccttggctgtatcaactctctctcctctccttggtggtgatagttttgttcttaaaagcctcttgtgagagaatttgtggatgaagaacctgtaagatca

SEQ ID NO: 970809 - DNA, 120 bp, Artificial Sequence
  ENSG00000258702_7 (sequence is synthesized)
caagtgaaacaatttattgatgtcaatagatttatacacgttcattaagaatcaaaactaaactaaaacatcagtctgactaaagagaccaccacagatatttcatatgctgtacatcag

SEQ ID NO: 970810 - DNA, 120 bp, Artificial Sequence
  ENSG00000258702_8 (sequence is synthesized)
taacaaagggtaccaaatagttaatatccatgtactagtcacatgagaaatgttttagggtcattgaccagtgtagtcagtacagtggtcccatggtatttgtgggggattggttccagg

SEQ ID NO: 970811 - DNA, 120 bp, Artificial Sequence
  ENSG00000258702_9 (sequence is synthesized)
tacagtggtcccatggtatttgtgggggattggttccaggaatctcttggacaccaactccgtggatgatcagacaatataaaatgtgggtcaggtgcggtggctcatacctgtaatccc

SEQ ID NO: 970812 - DNA, 89 bp, Artificial Sequence
  ENSG00000258702_10 (sequence is synthesized)
tccacctcagtgcagcggtgtgcacctgtagtcccagcttctcatgaggttgaggtgaaaagatcacttgggcccaggagtttgaggct

SEQ ID NO: 970813 - DNA, 88 bp, Artificial Sequence
  ENSG00000258702_11 (sequence is synthesized)
ggctgccactgcactccagcctgagtgacaaagcaagtccctgtctcttaaaaaataaaataaaataatagcatttgaatgtaaccta

SEQ ID NO: 970814 - DNA, 120 bp, Artificial Sequence
  ENSG00000258702_12 (sequence is synthesized)
gggcccagccctgttcctgctccggctcctgcggggatggatgcttcacgcagtaagcgagtaagcgagccctggagaccggggccctgggtgtgcggtcggctcagtgccacgcggtga

SEQ ID NO: 970815 - DNA, 120 bp, Artificial Sequence
  ENSG00000258702_13 (sequence is synthesized)
gataggcatggttatcaacccacgccaaggcggttgtgtacctggcatagaaaacactgctgttgaatgttgtttccatagtcattcgccagcgtccactgatgagaggtgccaccacgg

SEQ ID NO: 970816 - DNA, 120 bp, Artificial Sequence
  ENSG00000258702_14 (sequence is synthesized)
acacccggccttgctccgtcgaagctttggtccattaggaccaaagtcaggccccagcgggcctccctgccattcctggacggcctcgcgtcctcccagagcctgaccttctcttatctc

SEQ ID NO: 970817 - DNA, 120 bp, Artificial Sequence
  ENSG00000258702_15 (sequence is synthesized)
gttcctgctccggctcctgcggggatggatgcttcacgcagtaagcgagacaccttacctggatccgcctttgtagcctcctcctggctctgggggctgtcctgtggggtccgagtagct

SEQ ID NO: 970818 - DNA, 120 bp, Artificial Sequence
  ENSG00000258702_16 (sequence is synthesized)
gaaagacagcccctccatgtgaggaagcccccaactggggaaaaccccctcgtggactcattcctgtccctgcatgtggccttcacctgactgtctgcattgaggcatcctctgccaaga

SEQ ID NO: 970819 - DNA, 120 bp, Artificial Sequence
  ENSG00000258702_17 (sequence is synthesized)
gggagcagaggccaagaggggcagagcagagcaggggtgaggagaatgaggcactggcctgggcacagaattgaaggggcaccaaaaatcgcaatcatcaagggaaatcgtattttaatg

SEQ ID NO: 970820 - DNA, 120 bp, Artificial Sequence
  ENSG00000258702_18 (sequence is synthesized)
ccatattttaaaactcaaaattaacaaaaggaatccatgatgaacgaactatcaacatttcaagtaaagacaggatctgtttcatggatatctccttttgcctcagggtccaatatggaa

SEQ ID NO: 970821 - DNA, 81 bp, Artificial Sequence
  ENSG00000258702_19 (sequence is synthesized)
ttcatggatatctccttttgcctcagggtccaatatggaacggcatagttgattctgtctttatttaaaatttttggcggc

SEQ ID NO: 970822 - DNA, 120 bp, Artificial Sequence
  ENSG00000258702_20 (sequence is synthesized)
tcatcgtggatttttttccccattactttttgcattaacattatttatcttgaattctggctgctcttaaattctgcacccaaggcaagtgggcttcactctagtcccattccgggagga

SEQ ID NO: 970823 - DNA, 120 bp, Artificial Sequence
  ENSG00000258702_21 (sequence is synthesized)
agaccaccacaggacccttaagctgcttcattgcgcagtgggatcccctgtaaccccagacttcagtaataatcccacacagaaaggtcttacgtgagtgttttcttgtgaaaattaaag

SEQ ID NO: 970824 - DNA, 120 bp, Artificial Sequence
  ENSG00000258702_22 (sequence is synthesized)
cccacctccctggatgccagccagagctggagaatattcacgacccagaggagggcctggactccagagaagggaccccctttcacagtgcactctgtgtctgtgtggatctgatttcat

SEQ ID NO: 970825 - DNA, 120 bp, Artificial Sequence
  ENSG00000258702_23 (sequence is synthesized)
tccgaaatagagactgctccttcagcctggacccaactgcgaagaagccacatggaacagagctgcagctaacctgaagtctgtgtgaactgagtgcaagagacaaatgtttgccactgg

SEQ ID NO: 970826 - DNA, 120 bp, Artificial Sequence
  ENSG00000258702_24 (sequence is synthesized)
ctgggtgggtggaaacagtatatatgccccagagaggccaactccaaaagctgtgtgaattcagagagaaacacccatggcttaaggcttgaaacaagaggcaggaggttgggggatatt

SEQ ID NO: 970827 - DNA, 120 bp, Artificial Sequence
  ENSG00000258702_25 (sequence is synthesized)
ggtttttggtgaacttactgggcttgctgaggcagagcaacacctgtttctctgggccattactacaaaggtcagattgcgagtcttgtcctagattcagccttctttgagagttttcct

SEQ ID NO: 970828 - DNA, 120 bp, Artificial Sequence
  ENSG00000258702_26 (sequence is synthesized)
taagacacagtttgagcagattactttcttgcttagaatccctcagtaggtccccactgccccaggataaagtctagacccccaagcacgtcctgcacggccttgctgacatgtctgagt

SEQ ID NO: 970829 - DNA, 120 bp, Artificial Sequence
  ENSG00000258702_27 (sequence is synthesized)
ctgggcattgtactagtgagccacaaagtgtgcaggtcctggtgcccaccccatctccactgctgcccagggcgcaaatccacatcaccccttagctggactagggctagtgcctcctaa

SEQ ID NO: 970830 - DNA, 120 bp, Artificial Sequence
  ENSG00000258702_28 (sequence is synthesized)
ctggaaggattccactcagctcccttctaatccaccgtccacccagccacttctcaaatgtaaacccagtcttgttgccatcctactgtcacgtatacaataaaatccaaactcattctg

SEQ ID NO: 970831 - DNA, 120 bp, Artificial Sequence
  ENSG00000258702_29 (sequence is synthesized)
aggcgcccaccggaatgctcagcgctgccgcacagagagtccgcatccgtgcctgccaccggcctaagttatacccggagctacgacgacttatgagatgggcgactctaggaccctcat

SEQ ID NO: 970832 - DNA, 120 bp, Artificial Sequence
  ENSG00000258702_30 (sequence is synthesized)
tttccagacgagaaaacggaggcacctgcaggttcagtgacttgcccaaggtcacgcacctggtcagcggcagagacaggactccccccgcccgggcccgcggattgccgggtcggttct

SEQ ID NO: 970833 - DNA, 120 bp, Artificial Sequence
  ENSG00000250377_0 (sequence is synthesized)
ctgaacaggaaccattagagaagaaggcgacccctctaataacccctataataacagggcccggctgctgggcattgtcaacagggaaataactcggtcgctgcttttctggcgaagacg

SEQ ID NO: 970834 - DNA, 120 bp, Artificial Sequence
  ENSG00000250377_1 (sequence is synthesized)
tgccatagcctgggatagtagcctggggtcacagggccacaccgaaagccctcatctctctctaccttctctctgcagaaaaagcgtgaggctgctcctcattgacacccacttagaagt

SEQ ID NO: 970835 - DNA, 120 bp, Artificial Sequence
  ENSG00000250377_2 (sequence is synthesized)
ggcctggtaggctcaagtatgcccttggtaatttccagcttacagagaaaagaagagcgttcactttgtttctgctggcagggtgaaaaggggcagctacgtggccaaaggttacacgtt

SEQ ID NO: 970836 - DNA, 120 bp, Artificial Sequence
  ENSG00000250377_3 (sequence is synthesized)
ttccctcactgcgaactgtcagccttattccgagtatagccaccactgacttctgaccctggacggtgtcattcaccgggaactcttaacgtctccggccgagaaaggaggggacggtag

SEQ ID NO: 970837 - DNA, 120 bp, Artificial Sequence
  ENSG00000250377_4 (sequence is synthesized)
ctaactctttcggcggagctgaacccctaccccctccctcctgtgacccgagcctactgcgagacctggacaccgccaagtggggcaacgtttcgctcttacagcagcttcccgacctct

SEQ ID NO: 970838 - DNA, 120 bp, Artificial Sequence
  ENSG00000250377_5 (sequence is synthesized)
gtgagccaccgcgcccggcctcacaaaagtgtttttgaaggctccattcccgaagactgagtgaggtattcgatatcctcctccctcattgaaaagttgtgtaacaggaatctaagttca

SEQ ID NO: 970839 - DNA, 120 bp, Artificial Sequence
  ENSG00000250377_6 (sequence is synthesized)
tgccgtttgattcccaagacttctccaagccgcactgtagagcaggaaaatcgactaatattactgctcagattatcatcatagtggccatttaagatggaatgcgacatcaagggtaaa

SEQ ID NO: 970840 - DNA, 120 bp, Artificial Sequence
  ENSG00000250377_7 (sequence is synthesized)
ctaggcattgaaaaattcactttcagacctcccttccgtgcctcactctccggccagtccttttccccattcgccattcaggcactaaaattttgcagtttgagaaaaagaaaagtgagg

SEQ ID NO: 970841 - DNA, 120 bp, Artificial Sequence
  ENSG00000250377_8 (sequence is synthesized)
aaaacacaagagaaaaaacgcgaggcttttcgggttcttttttatatatagaatagcttatatagtccaattttattttctaaatcgccccacacataaaacgtataactctagccaaga

SEQ ID NO: 970842 - DNA, 120 bp, Artificial Sequence
  ENSG00000250377_9 (sequence is synthesized)
tgaaggaaaaaagaaatgtaatagttgggagcagagagaaatagccagcaccaccccccagcgcagagccggggcgcggggcctcgggtcgccccctccggctcctctgacccgagactc

SEQ ID NO: 970843 - DNA, 120 bp, Artificial Sequence
  ENSG00000250377_10 (sequence is synthesized)
gccaggtcttggacatcctcagcctgcgacaccgttcccaggacggctcatcacctattatctcggactccagattttgtgtaaaaagcgtgaggctgctcctcattgacacccacttag

SEQ ID NO: 970844 - DNA, 120 bp, Artificial Sequence
  ENSG00000250377_11 (sequence is synthesized)
tcagagagcaaacgttgctctctagcctcccccaacctccagttcctctcttccttcccctgctgtccaaacttcatactgtccaccaggggagactgccccccgactcggctgtccctc

SEQ ID NO: 970845 - DNA, 120 bp, Artificial Sequence
  ENSG00000250377_12 (sequence is synthesized)
actaacgcggtggtccccgacctagggtcgcagatgcacttcccgaggcacatgcgggcgcaacaaggtaactgcgctccaggcgtggaaccccagtcctgagcgatgtgaaaccaaccc

SEQ ID NO: 970846 - DNA, 120 bp, Artificial Sequence
  ENSG00000250377_13 (sequence is synthesized)
caagcgggctgtgctcacagtttgggaaaaggtaatgtctctgatccccccatatccacccctcccccaacccttgaggacagattcgggtaccgcaaaaccgccaggcacagaagggag

SEQ ID NO: 970847 - DNA, 120 bp, Artificial Sequence
  ENSG00000250377_14 (sequence is synthesized)
gagagctgggacggacaggctactcccggggaggggatcacctccacgttcccgctccaagcggctggtagctgctagtaattcagacttctggcctcggaggaagagtgccagggaaga

SEQ ID NO: 970848 - DNA, 120 bp, Artificial Sequence
  ENSG00000250377_15 (sequence is synthesized)
aagagactaagaaatcctcaaacgcccgtagaacaagacccgggagaagtgcccaagtgggcgcggccgtcggcgaggtcagtttagcctgtactggaccgtggaaccctgagcgctgag

SEQ ID NO: 970849 - DNA, 120 bp, Artificial Sequence
  ENSG00000250377_16 (sequence is synthesized)
gctgtggggtcgcgggattctactgggcctcgccagcttccacagtctgctgcggtctgtggaatggggaaggataaaatacagactttggtttattttaaaaaatggtattctgcctga

SEQ ID NO: 970850 - DNA, 120 bp, Artificial Sequence
  ENSG00000250377_17 (sequence is synthesized)
actatcaggtccatggtttgcttttggcgcttgcagaagcaccaggacgatctttccaaaaatttctgcagtagtttaactaaccaatgaaataaatgaaggttaaaaaaccaaaacaga

SEQ ID NO: 970851 - DNA, 120 bp, Artificial Sequence
  ENSG00000250377_18 (sequence is synthesized)
agataatagggactctgatttggagactgctggaacttgagcagtttgttctccacttctggtcctcttgcctcaggtgtgcggttgcctggccaacaggaggtgggtcctttctgtgcg

SEQ ID NO: 970852 - DNA, 120 bp, Artificial Sequence
  ENSG00000250377_19 (sequence is synthesized)
ccccaagtggtgccaagagtgattcgcgccacttcccgggggcatggaggttaagcaaggccggtaggaatgttagtgaatccttgcttgggggtccgcacggttttatttgttttgttt

SEQ ID NO: 970853 - DNA, 120 bp, Artificial Sequence
  ENSG00000250377_20 (sequence is synthesized)
ttacggggaactcccggggcgcagtgtagggaaggtcaaggaaaactactgctctcccataggcggttgctgtgtgtgagtcacgtctgggcgttttaaaattgaacattgttttgctca

SEQ ID NO: 970854 - DNA, 120 bp, Artificial Sequence
  ENSG00000250377_21 (sequence is synthesized)
ctgtttagttttctgaaaagaccgtttcttaaactattacaattcagttatctccattaagattgtatttctgttgcaatatatatttaatgtttgggctttataaatgctgtttccctt

SEQ ID NO: 970855 - DNA, 120 bp, Artificial Sequence
  ENSG00000258700_0 (sequence is synthesized)
catgactcgcaaagagaagggaagatggaactgccattttgcacgtgtcaagtttcaggtcttgacgttgggaagtaaaagatcagagtgctggcagattttggtgtctagtaaaggacg

SEQ ID NO: 970856 - DNA, 120 bp, Artificial Sequence
  ENSG00000258700_1 (sequence is synthesized)
gatcagagtgctggcagattttggtgtctagtaaaggacggctttctagtgtatagataacaccttctatccatgtcctcacatggtgaaaaagtgactgtaagtttcctgaggcctccc

SEQ ID NO: 970857 - DNA, 120 bp, Artificial Sequence
  ENSG00000258700_2 (sequence is synthesized)
agctcccagtgagatcaatgcagaagaatttcaggacagttttgtcttacgtgggaacagggagcaaaagaaggtacttcaataggatgttggaaaagaagacttccactctaataggat

SEQ ID NO: 970858 - DNA, 120 bp, Artificial Sequence
  ENSG00000258700_3 (sequence is synthesized)
ctaataggatgaaaaaatgatcatttatttacatcattctgatttcttttaattgcttcacaatccactataaagaagattcgctctgaccctaaattttctactttttttcccactttt

SEQ ID NO: 970859 - DNA, 120 bp, Artificial Sequence
  ENSG00000258700_4 (sequence is synthesized)
ctctcacataaattaggtgtttcattctttttcctccttattattttatttacaccattctgtgttgagcacagaaaggtggaagtatatagccctgttctctgtttttaatgctctgta

SEQ ID NO: 970860 - DNA, 120 bp, Artificial Sequence
  ENSG00000258700_5 (sequence is synthesized)
tatttttgtttccttttctgtggaatcagtttttcattatccttatagaatcagtttttcattatccttataaggagatgccatttttctcaatctttccttaaaatctaactaacttct

SEQ ID NO: 970861 - DNA, 120 bp, Artificial Sequence
  ENSG00000258700_6 (sequence is synthesized)
ttactaagtcatttctgttccttatagaatagtgaatgtgactgttcttagtgtattgactggtccctttacatcagcattgtaacttttaggtattagtttactttcatatgattgtta

SEQ ID NO: 970862 - DNA, 120 bp, Artificial Sequence
  ENSG00000258700_7 (sequence is synthesized)
cagaaacaattgatcttgatggaacaatcttgtttttatataaaatttcaagctggtgatgacatgtgtaaaaggaaaagtgctgcaagcagtaaatgctgttcagtttgcagtccatta

SEQ ID NO: 970863 - DNA, 120 bp, Artificial Sequence
  ENSG00000258700_8 (sequence is synthesized)
catcaacatatctaaatgatcctctttagcccaaactatcagaatgaattttccacatcagccacaagaatgaccttccggcatacaagacacttcttcccatgtaatgcaagggaaaaa

SEQ ID NO: 970864 - DNA, 120 bp, Artificial Sequence
  ENSG00000258700_9 (sequence is synthesized)
agtttgggagcctgggaagtacaaaatcaaggcgccagcagatttcagtgtctggagaaaacctgcttcctcaaaggtcttgacgttgggaagtaaaagatcagagtgctggcagatttt

SEQ ID NO: 970865 - DNA, 120 bp, Artificial Sequence
  ENSG00000258700_10 (sequence is synthesized)
ggctttggcagacactgccccaacttcttcaggtggttttctcccttaccagggagactgttgttcaggcggcaggactggcaactcagtatgtggtttgcttataaacctgtgaacaca

SEQ ID NO: 970866 - DNA, 120 bp, Artificial Sequence
  ENSG00000258700_11 (sequence is synthesized)
atcagcggaagtgcaacattcgtctaggtcagcacttcacagttgttccttcccagacatgagaagtgccagccacgtaacctttcctcctgacttctaaaggaactatcagaatgaatt

SEQ ID NO: 970867 - DNA, 120 bp, Artificial Sequence
  ENSG00000258701_0 (sequence is synthesized)
tgctgcggctggcccactcctcatccctgcaccatggaggctctcccagaggcatgtcaaaaccccagcctgacgaccaagctctgtccactgcccaccaccaacagccaccacttgagc

SEQ ID NO: 970868 - DNA, 120 bp, Artificial Sequence
  ENSG00000258701_1 (sequence is synthesized)
ctagatgtgtgcacgcagcggcggcgtccacccaggaggcagaccccaggaagaggcctgccgtctgggaagcaggctcaggcctgtgtgggcagcaacctagacggaaggggctaggtg

SEQ ID NO: 970869 - DNA, 120 bp, Artificial Sequence
  ENSG00000258701_2 (sequence is synthesized)
ctgaggggccatgtcccttgagctggaggagggcacagcaaggaactctgcagcatggacctcaggacagagctcctgggtcggggcattgccggcctgcaacgcaggagcgggtcgggg

SEQ ID NO: 970870 - DNA, 120 bp, Artificial Sequence
  ENSG00000258701_3 (sequence is synthesized)
gcccgcactggtgagtacagctccagcgttggtgtgctagggccactgtaaggaggtgcctccaacggggcgtgaacagcagcagcgtgtggtcccagttctggaggctccagctgtcca

SEQ ID NO: 970871 - DNA, 120 bp, Artificial Sequence
  ENSG00000258701_4 (sequence is synthesized)
cagggctggttgggtctgaggcagttgtggggaacctggcctctcctccactctcgtggggtttgcaggccatctttgctgttccttggctggtggaggcagcgcctcaatctctgcccg

SEQ ID NO: 970872 - DNA, 120 bp, Artificial Sequence
  ENSG00000258701_5 (sequence is synthesized)
aatcttcacatggtattctccctgcgagctgtgtccaaatttcccgtctttataaggacacagtcacacaggatcaggggcccacactcccgggatgactcaccctaacttgatggatca

SEQ ID NO: 970873 - DNA, 120 bp, Artificial Sequence
  ENSG00000258701_6 (sequence is synthesized)
catctgcaaagaccctatttccaaacaaggtcacattctgaggccctgggggttaggccttcaacatatgaattcgaggggacacaattcgacccgtaacagcttctgtctccccacaca

SEQ ID NO: 970874 - DNA, 120 bp, Artificial Sequence
  ENSG00000258701_7 (sequence is synthesized)
tccgatgtgcttctccctctgccacgcttaggctggggtctctaccaggcacctcgacccgagtcctcactcaggccggctctgagcctcacagctctgtctgtgggagctgccctagtt

SEQ ID NO: 970875 - DNA, 120 bp, Artificial Sequence
  ENSG00000258701_8 (sequence is synthesized)
ttccacggacctttattaggtgacatgggaatatcgagcagtgccccagaatccctgggttttgacacagtgcttcctcctcacctgaggcagcattcccaccctcctgcagggatctct

SEQ ID NO: 970876 - DNA, 120 bp, Artificial Sequence
  ENSG00000258701_9 (sequence is synthesized)
ccgaagagattcctctgcagagatctctggcccgcggagctcccttctccagcggtcagctcggcagtgagcggccccacatggccagagggcatctctgctcctgtgtttgggaagcag

SEQ ID NO: 970877 - DNA, 120 bp, Artificial Sequence
  ENSG00000258701_10 (sequence is synthesized)
gactgcagaggcgtggcaaggccgtgactggcgtccgtccacagaagccctctcacaggcatggccacctccagttcggcattctggcggtggggaaacggcctcctaggtcggtcccag

SEQ ID NO: 970878 - DNA, 120 bp, Artificial Sequence
  ENSG00000258701_11 (sequence is synthesized)
gttagaagcctgttctgccccccacaggcctgcatctcagtgttaaggggtgcagtctccccgctgcaaccattccaccagtctgttaggcctcctgcttctaggtgaagggcgtggagt

SEQ ID NO: 970879 - DNA, 120 bp, Artificial Sequence
  ENSG00000258701_12 (sequence is synthesized)
gagaccagtggaactgatggacacaagcttatcgccacactggttttcctctgaaacaaggccctggattacaagtgtcatttgtggaatcccaaggcagcgaaggaggccaaggatggc

SEQ ID NO: 970880 - DNA, 120 bp, Artificial Sequence
  ENSG00000258701_13 (sequence is synthesized)
atgctggcgggagaagcctgcgaggacccgtccctttgaggatccatccctgcaaggactggctctcgacaaaaggcacgccgtgtgctctgcctgcttcctggaggctggctgccctcc

SEQ ID NO: 970881 - DNA, 120 bp, Artificial Sequence
  ENSG00000258701_14 (sequence is synthesized)
ccacagggggtggtgccacatcagggctcagacaccatcctcgctgttggaaagatgggcgcccagctgtccatgctgctggaagggtctggtgggggtgaataggctacggagcctgtg

SEQ ID NO: 970882 - DNA, 120 bp, Artificial Sequence
  ENSG00000258701_15 (sequence is synthesized)
tggccaccatgcctgtggcctcagccactttgtgcaaaggactgcagaggcgtggcaaggccatgatgtgtccgtccaccgaaggcctccctggttttgagcccctcctctgcagggaat

SEQ ID NO: 970883 - DNA, 120 bp, Artificial Sequence
  ENSG00000258701_16 (sequence is synthesized)
gcttccagcattttcatggattacaaatgtcttagcccctgccctttcaagcagttccttagctcccctccccagtccacagagccatctcctgcctgtgagttaggcctaatcaacgta

SEQ ID NO: 970884 - DNA, 120 bp, Artificial Sequence
  ENSG00000258701_17 (sequence is synthesized)
aggcctaatcaacgtaaatctgtcctccaggccctcccttccctccagatgaggtgcgcaaccagtggtgctgctggacgtttgaaaatacaaaaggccgggcgtggtggctcatgcctg

SEQ ID NO: 970885 - DNA, 120 bp, Artificial Sequence
  ENSG00000267496_0 (sequence is synthesized)
agacccagactgtgcaacccccaaagcaggtctcctcactcaccgggatagatagaactatcggccccaattcctcagccctacctgcaaccaccgcttgccatggtttccttgtgggtg

SEQ ID NO: 970886 - DNA, 120 bp, Artificial Sequence
  ENSG00000267496_1 (sequence is synthesized)
gagggtactttcccgccccctggtttcgggcttgcccacgtggcttgctctggccatggaatgaagcagaaacgaaagcctgccagttctgagcctacgccggaagacgccttgggcggt

SEQ ID NO: 970887 - DNA, 120 bp, Artificial Sequence
  ENSG00000267496_2 (sequence is synthesized)
tccgcggtccctgtgcgcttccaccttcacccagaaggacttctctggtgcagccgctgcttcttcagccacggcccaaaaggatcggagccccctggccgatccgcaggtctgcaggga

SEQ ID NO: 970888 - DNA, 120 bp, Artificial Sequence
  ENSG00000267496_3 (sequence is synthesized)
ccaagcacaggcctgcgagaaccttgttccagccaccgtttgggatggttgattaggacttgttgctgtggcggtagctcaccaatccaatgcgtgcacccgctcctttattaggctata

SEQ ID NO: 970889 - DNA, 120 bp, Artificial Sequence
  ENSG00000267496_4 (sequence is synthesized)
gggccagtggctgcgacagggacctgatacaacagtgcgttaaataaggagcttattgagctatcatgtcgtaagccggtggagaagtccagggctagtgtgggggctccggcgggggct

SEQ ID NO: 970890 - DNA, 120 bp, Artificial Sequence
  ENSG00000267496_5 (sequence is synthesized)
gtggcccccatccgcatggagcctccccacggttcacaggtctcggtcttcggagccttcagccccgtgagcccgaacagtccacacggcggcgccagaccctcttcccaacgccaccct

SEQ ID NO: 970891 - DNA, 120 bp, Artificial Sequence
  ENSG00000250286_0 (sequence is synthesized)
cgctcagtcagcagggtgggcgtggccttctccctgcctgcatctgaaatgcagtttaaaggtcaggaagactgatctttcgcttctgaatcctctgagagttcctcaggccctcctgtg

SEQ ID NO: 970892 - DNA, 120 bp, Artificial Sequence
  ENSG00000250286_1 (sequence is synthesized)
tgaggcccagctgcttcctgcctggtcttcctggatccacagagctgcagctgcagttcctcttcccctgacgtctgaggccgggcctgctccaggtcggaggtatagcggggtgacgaa

SEQ ID NO: 970893 - DNA, 120 bp, Artificial Sequence
  ENSG00000250286_2 (sequence is synthesized)
ctgcaatgaccatcatgtctctgtgaccacacgattacccatcggctcccacacccctctgcctgccaggaagctgaggctcaagagaactgagaggaggggaacaacggccgttgaggc

SEQ ID NO: 970894 - DNA, 120 bp, Artificial Sequence
  ENSG00000250286_3 (sequence is synthesized)
ccccgtgggccaagcagtgtgccaggcactctatcaaacaatggaggtaggtgagcttatccccactgtacagatgaggaaactgaggttcagagaactggttgcccaggtcacacagct

SEQ ID NO: 970895 - DNA, 120 bp, Artificial Sequence
  ENSG00000250286_4 (sequence is synthesized)
tggaggaagcagaatatagaatgctatctgactccaaacccatgcttccactatcgcgccatcctatcaggcagctaacgaatgataatgaatctataacaacgttattatctgagctaa

SEQ ID NO: 970896 - DNA, 120 bp, Artificial Sequence
  ENSG00000250286_5 (sequence is synthesized)
ctggtcttggaagcacctttctgaagtcctccaagcagaggttccactccagcaggggaaggccatccggctcccaggggctcttggtgctgtccacatctgggctttcctccaccagga

SEQ ID NO: 970897 - DNA, 120 bp, Artificial Sequence
  ENSG00000250286_6 (sequence is synthesized)
ctggccttctgggacccggattccctgagggcctcgttctcaggccggggcacttgagtttcggagatggggctcctaaagcgtggtaacagctcagcattcacagaggccttctctgtg

SEQ ID NO: 970898 - DNA, 120 bp, Artificial Sequence
  ENSG00000250286_7 (sequence is synthesized)
gctatggggctgacgtgctccttgtcccctggcctggcctcctcagccttggcgggcagggtcatgtactggcgccacagttggtgcaggctttgcaccacttggtgctcataatgcagc

SEQ ID NO: 970899 - DNA, 120 bp, Artificial Sequence
  ENSG00000250286_8 (sequence is synthesized)
tgcagcagaggatgggaaggcatgtgagggggaggctggggtgcaggccccagtttcttcaatgtaaataaggacataaatagtacaagggccaggcacagtggctcaagcctgcaatcc

SEQ ID NO: 970900 - DNA, 120 bp, Artificial Sequence
  ENSG00000250286_9 (sequence is synthesized)
cagtgctttgggaagccacggtaggaagatcacttgaactcaggagttcaagaccggcctgtatgacatagagtgatcctatctctaccaaaaaaaaaaagagaaattagctgagcatgg

SEQ ID NO: 970901 - DNA, 69 bp, Artificial Sequence
  ENSG00000250286_10 (sequence is synthesized)
tgatgtatggggagtttgaggtcacaatgagctatgagtgggacactgtactctggcctggagtgtgac

SEQ ID NO: 970902 - DNA, 120 bp, Artificial Sequence
  ENSG00000250286_11 (sequence is synthesized)
aagacatagcatgtgcccctaattgtacactcgccaccctttccaggcccagtggagaggactggaggcagggaggcagtccctgcctgcgacaaaccgacagagataatgggtcttgtg

SEQ ID NO: 970903 - DNA, 120 bp, Artificial Sequence
  ENSG00000250286_12 (sequence is synthesized)
ctgtccttgggcacaggactggggctttgggtgacagagcctgagtcaaggccaaggggctcccaggcactctctccccctagcccatcccctccccaccgcagtggggctgcatggcct

SEQ ID NO: 970904 - DNA, 120 bp, Artificial Sequence
  ENSG00000250284_0 (sequence is synthesized)
aaacagggcaatggctcatcctagggctgagaaggaaagagaggctgcttctaccaggttctccatcctgcaacacaaggctttggtatcaggatgctgctggcctcatcaaatgagtta

SEQ ID NO: 970905 - DNA, 120 bp, Artificial Sequence
  ENSG00000250284_1 (sequence is synthesized)
ggacagcagttggttgacatttaaagggctactgtcccagaaggctgcttgcctgggcccatggcactgccagaaatcacaagactaagctgaaaaagcacaaagaagtttcctttcatt

SEQ ID NO: 970906 - DNA, 120 bp, Artificial Sequence
  ENSG00000250284_2 (sequence is synthesized)
ccaggaacctcttggcttgaatatgaaatagcctcttagtgacactacactgcaatttcaaataataggttttttatcacctctttgagaaatatcaccttgggttcatcccagaaaaat

SEQ ID NO: 970907 - DNA, 120 bp, Artificial Sequence
  ENSG00000250284_3 (sequence is synthesized)
aatacaaagtagaattttttcaaacgtaatccccttgggttcctctcagaaaaaaatagaaagtagaattctttcaaacttaatcccctctttgtatttgtctcctctgcatctctccaa

SEQ ID NO: 970908 - DNA, 120 bp, Artificial Sequence
  ENSG00000250284_4 (sequence is synthesized)
agtagatgggtaggagagggaaacagtgctgtagaaaatgggacaagaacacaccctaataaaacaagaaaacatggtttgccagaggtctcctttcccaggctcaagcctcaagtttct

SEQ ID NO: 970909 - DNA, 120 bp, Artificial Sequence
  ENSG00000250284_5 (sequence is synthesized)
aattgtccctacattactcccacaaatgcctttctgggagagtcttgtatgctagacctctgccatcttcccatcctttctcccttcctcctaaccttcactcttgagaaagactcatcc

SEQ ID NO: 970910 - DNA, 120 bp, Artificial Sequence
  ENSG00000250284_6 (sequence is synthesized)
ggtaatgtattcctgttccaacagaagtcttcttgagacatatctgaaagtgacatagtaaccagaaggaagatttttggagggttcttgaactagctctacataggaaactgccaacaa

SEQ ID NO: 970911 - DNA, 120 bp, Artificial Sequence
  ENSG00000250284_7 (sequence is synthesized)
taacttcctgtggcatttgttaagttgtgattctgcccctcactgcttgacttagtcctcttgacaagggccaggaggagaaaacaggtctcaaagaacagtgtacatcaaagcctggct

SEQ ID NO: 970912 - DNA, 120 bp, Artificial Sequence
  ENSG00000250284_8 (sequence is synthesized)
ttccagcaatgcctgaccctgccaaagaaggcagggaagcccccacagagcctcttagaaacctcaactccctcagcctcttgtcccagagcatcactggcaggtatagaccaagcatat

SEQ ID NO: 970913 - DNA, 120 bp, Artificial Sequence
  ENSG00000250284_9 (sequence is synthesized)
ccacatccacacttctggaggctgagaagttcaagatcaaggattcaggaggtttggttgtctggtgagggctggtctctgcttccaagatggcactttgatgctgtgtcctccagagga

SEQ ID NO: 970914 - DNA, 120 bp, Artificial Sequence
  ENSG00000250284_10 (sequence is synthesized)
gagaaatgctgtgatctcacctggtggatggcacaaggcccaactgtcactgaggaggggaagacccaggaagaaaggtcaaaagtcaagcaaattgcctcactatcctctcaagtcctt

SEQ ID NO: 970915 - DNA, 120 bp, Artificial Sequence
  ENSG00000250284_11 (sequence is synthesized)
cagagcctcaggatcccctgtggaccctggaagttttcccccatcttactcaggtcactcctttctccgagaccttctaaactttgaggaaactaagagacctggccctaagcatagatg

SEQ ID NO: 970916 - DNA, 120 bp, Artificial Sequence
  ENSG00000250284_12 (sequence is synthesized)
ggacaggatggtgtaaatgtgcaacacaaaccagcaagacacaggtactctcctctaccttccctgcagagcaaacagtgttgacagcagtgaagatgatgataatgatgacaactgcag

SEQ ID NO: 970917 - DNA, 120 bp, Artificial Sequence
  ENSG00000250284_13 (sequence is synthesized)
acgtcttttttgcttttattcattttagtttataacaactatttatttaggacgtggttctgtgagctgttaaattgttctattgtcagatcatagctgtatacatttgtggggtgtcaa

SEQ ID NO: 970918 - DNA, 120 bp, Artificial Sequence
  ENSG00000250284_14 (sequence is synthesized)
aacgatgttttaacatatacatacaatcagtgtgattaaatcaagctaattaacacatccatcaccttgcttacctatcttttttatggtgagacatttgaaatttactctcttagttgt

SEQ ID NO: 970919 - DNA, 120 bp, Artificial Sequence
  ENSG00000250284_15 (sequence is synthesized)
tttgaaatatacaatgcagtattattgactatagtcaccctggtatacaatatatctcaaaatctatccctactgtctctctgaaactttgtaccctttgattaacaactcccattcccc

SEQ ID NO: 970920 - DNA, 120 bp, Artificial Sequence
  ENSG00000250284_16 (sequence is synthesized)
tttcaatctgaaacattgtaccctttcatcagcaactcctcattccctccctcccagcccactcttagcctctttctactctctatttctatgagttcaactttgttagatttttacatg

SEQ ID NO: 970921 - DNA, 120 bp, Artificial Sequence
  ENSG00000250284_17 (sequence is synthesized)
taagtgagatcatgcagcatttgtctttctgtgcctggtttattttacttagcataatgtccttcagattcatccgtgttgatgcaagtgacaggatttctccctttttaaggctgaata

SEQ ID NO: 970922 - DNA, 120 bp, Artificial Sequence
  ENSG00000250284_18 (sequence is synthesized)
attttctattgtgtatgtttcacatttcctttatacactcatccattgatggatacctaagttgtttcatgttttagctattgtgaataatgctgcaataaacatgcagagtacagatat

SEQ ID NO: 970923 - DNA, 120 bp, Artificial Sequence
  ENSG00000250282_0 (sequence is synthesized)
acctctgcagtaatcaaggcccccaggagtcccttggtgagatccggagctcccaagcccagcccaagctcctgcttaaccctgcattttctggaagcacatccccacagactccacgcc

SEQ ID NO: 970924 - DNA, 120 bp, Artificial Sequence
  ENSG00000250282_1 (sequence is synthesized)
tctgctctcccacagacttgcaccatgaacttggaaatctctgactccacatcactgcccagagtgcaggctccctcctttcccttcaagaatccagtctccaaatccaacagctgggtt

SEQ ID NO: 970925 - DNA, 120 bp, Artificial Sequence
  ENSG00000250282_2 (sequence is synthesized)
cgaatcccaattccaccacctagtccctgggtgatctcagataaggttcttcacctctctgaacctcagtttctcatctagaaaatgggatgatagcaaagactacctcataaggttgcg

SEQ ID NO: 970926 - DNA, 120 bp, Artificial Sequence
  ENSG00000250280_0 (sequence is synthesized)
ggtttttggggatagttaagcccaggccttaagacagtttgatattcagttttgttatttaggtctgggttagggataccgccagagagcatccaaacatttctgtggttgggaaggcta

SEQ ID NO: 970927 - DNA, 120 bp, Artificial Sequence
  ENSG00000250280_1 (sequence is synthesized)
gttatctgtgagcattccagatgaaatagcctataatgggttatcaccttttgatcttacctcagagaagattgaattggatctacctatctgatttagcagaattaaactggatttgga

SEQ ID NO: 970928 - DNA, 120 bp, Artificial Sequence
  ENSG00000250280_2 (sequence is synthesized)
tggaagggtaatcagctatttaatttgccagttgttagttagcatttcttcttgctgtatctcaaggatttactttgaatattctgtattttctctttcctgcccatgatgggttttcct

SEQ ID NO: 970929 - DNA, 78 bp, Artificial Sequence
  ENSG00000250280_3 (sequence is synthesized)
attctgtattttctctttcctgcccatgatgggttttccttttaaaatgctcagcacaggctgggtgtggtggctcac

SEQ ID NO: 970930 - DNA, 120 bp, Artificial Sequence
  ENSG00000250280_4 (sequence is synthesized)
ctgagcatccattgttccaggtataacaattctgactttttcagatactctgatgcttttatggtatcctgcttgctgctgtcttcttttgaaattggagttcaatcactctgcttttct

SEQ ID NO: 970931 - DNA, 120 bp, Artificial Sequence
  ENSG00000250280_5 (sequence is synthesized)
ttcttaatacttgtctgtttcctagattttacatgcttttccatgaacactaatttcctgtatgaagagggaatatacaaatgataggatgctttcctgtaactgagatggcagggggaa

SEQ ID NO: 970932 - DNA, 120 bp, Artificial Sequence
  ENSG00000250280_6 (sequence is synthesized)
ggagaggacagcaactcatacagaaggaaatcagcttttgttgagcacccagaatttaccagatcagatagagaggacaggtgtagaagaaaatgagcatgtataaagtggaatagtggg

SEQ ID NO: 970933 - DNA, 120 bp, Artificial Sequence
  ENSG00000250280_7 (sequence is synthesized)
acaataaagtacaaatatggaaaattaagtggaaggcttttaatgctgttagggaacttggattgggttagtaagttatgagactgacatttttgatccttgaaatgtcataatcagagg

SEQ ID NO: 970934 - DNA, 120 bp, Artificial Sequence
  ENSG00000250280_8 (sequence is synthesized)
tgaattataggttatataatccaatagtttagataattaattaaattgggaaataagtcataggaccaataaagaagtgttttgagagtttctcttaaggaatgaagacctaacgagaat

SEQ ID NO: 970935 - DNA, 120 bp, Artificial Sequence
  ENSG00000250280_9 (sequence is synthesized)
agcggcaccgcagtagaagtgttgctaaagtacattggacagaaataagcaattggatattgggaaagaaagggatgaataaaaggtgacatgagatgttaagcctgggtgatggagaga

SEQ ID NO: 970936 - DNA, 120 bp, Artificial Sequence
  ENSG00000250280_10 (sequence is synthesized)
atgtgatctcagcaggtttgtgggtggaggtaaaaataagttttgttctagatctcttgcttttgaggtgctggtaggatattcctgtggagatgtgtagtagaatccgaagtgtgaaac

SEQ ID NO: 970937 - DNA, 120 bp, Artificial Sequence
  ENSG00000250280_11 (sequence is synthesized)
tggaacttggagggagagatcaaggctggaaataaaacatgtatgagtaaggagagttaaaaataaagagaaaaagagagcatttgttagctggagtaaaaggaagggtacaggaaaagc

SEQ ID NO: 970938 - DNA, 120 bp, Artificial Sequence
  ENSG00000250280_12 (sequence is synthesized)
atcatagagaagagagaatttgatctgactttaaaagatgccgagtcggtatatggcattctgttcacgagctttccttgttgaggggacatcacatttactaacttgagagataataca

SEQ ID NO: 970939 - DNA, 120 bp, Artificial Sequence
  ENSG00000250280_13 (sequence is synthesized)
tgggaagtgttggacaaaggatactgcatccagaatgacctttctaaactacaaaatcatttcccctctttcctgcttaaccctccctcagtggcttcttatctttcttcagataaagga

SEQ ID NO: 970940 - DNA, 120 bp, Artificial Sequence
  ENSG00000250280_14 (sequence is synthesized)
tgtgaagaagatatgatttccaccagatggagtactctttatacttttttggggtcctttatggttactttttgtggccatggtcaggttcttatccataaaataattattgataacttc

SEQ ID NO: 970941 - DNA, 120 bp, Artificial Sequence
  ENSG00000250280_15 (sequence is synthesized)
ctaatgtaaaatgaaaaataatgataaatcacatacttccctcatttttacagaattccttgcttgccttatctcttcaagtgttgactgcaaggttcctgtacacttacttgagttggc

SEQ ID NO: 970942 - DNA, 120 bp, Artificial Sequence
  ENSG00000250280_16 (sequence is synthesized)
cactccggtcactataccctgatctctgacacttggccgtggtagcctggagcagcattgttactgggcattgctgtgattgggttacccagctgtgctgatgtggaaacctcagggcta

SEQ ID NO: 970943 - DNA, 120 bp, Artificial Sequence
  ENSG00000250280_17 (sequence is synthesized)
tttattgatacttggtttcctaaaggaaagttgagggaatgtattttatgagagggctttatttacacgattaaagaggtttataaaatgtggagatgaatataggtgaaacagagaaag

SEQ ID NO: 970944 - DNA, 75 bp, Artificial Sequence
  ENSG00000250280_18 (sequence is synthesized)
ttataaaatgtggagatgaatataggtgaaacagagaaagaatgctggtataggaggtgttttcggctgggtttg

SEQ ID NO: 970945 - DNA, 120 bp, Artificial Sequence
  ENSG00000250280_19 (sequence is synthesized)
tcacttgagtccagcctgggcggcgtagtgagacccatctctacaaaaactacaaaaattagctgggcattgtgttgcatgcttgtagtcctggctactcaggaggctgaggtgagagga

SEQ ID NO: 970946 - DNA, 120 bp, Artificial Sequence
  ENSG00000250280_20 (sequence is synthesized)
tcgtgccactgcactccagactgggcaatagagtgagaccctatctcagaaaacaaacaaaaatccccaaaaaaccaggaagtgttttcttagggtctagttcccaggcgaatggtatat

SEQ ID NO: 970947 - DNA, 120 bp, Artificial Sequence
  ENSG00000250280_21 (sequence is synthesized)
atatcctgattctaggtttataaaaatagtatattattcataacatttgtctaaagtgacacatttacatacagtatatagtattgagtaatttccaactctttaaaaataatggagacc

SEQ ID NO: 970948 - DNA, 120 bp, Artificial Sequence
  ENSG00000250280_22 (sequence is synthesized)
ctttcatgtagtagtaactatgtttttagtatctgttgactgagaaaatacgtaacagcaaaagctactataaaactttgaaataagttcttgtaaatgtaaaaaaaattctcatatatt

SEQ ID NO: 970949 - DNA, 120 bp, Artificial Sequence
  ENSG00000250280_23 (sequence is synthesized)
tggaaagtatacatgtggaaattatgacttatagagtctatggacacttgatttcttgctttatggatactctcaggaagttctggtctcaactttgagtatctcattgtcctcttactt

SEQ ID NO: 970950 - DNA, 120 bp, Artificial Sequence
  ENSG00000250280_24 (sequence is synthesized)
tagaatgtggggtatgggggaaaacttctatttgaaaatttgagccatagcggaaattttggaatgacagggaaacaccttctcagaatcctcttacaataaaatttatatatgttatgc

SEQ ID NO: 970951 - DNA, 120 bp, Artificial Sequence
  ENSG00000250280_25 (sequence is synthesized)
cagacaatgtactttatactaagactggacttttaaatagtctcatggattagaagtcagatacaataaataaatactttttaaaaattatatttttaggtatatgagcattgttgttgg

SEQ ID NO: 970952 - DNA, 120 bp, Artificial Sequence
  ENSG00000250280_26 (sequence is synthesized)
gactacagtgctattttaaagtgaaatttagttgatttgcatgtgagtatacacctacaggtctctgttatagccgtgacatgtcttctgttactataaattacataacaaatccttatg

SEQ ID NO: 970953 - DNA, 120 bp, Artificial Sequence
  ENSG00000250280_27 (sequence is synthesized)
gtttcttgggtcacttattttatttaaagacaaaaacatctttcagtacatatgtaagacttaaggcattattgaaaataagcctgtgctacatggtagaatctattaaaaaaaaaaaaa

SEQ ID NO: 970954 - DNA, 120 bp, Artificial Sequence
  ENSG00000282890_0 (sequence is synthesized)
ctactaggaataaatactgcattttccagtgtcttttctagctagttgtggctttgtgactaaatcctggccagtaggatataagcaaaagtgttttgtggcagctttcaggaaatttcg

SEQ ID NO: 970955 - DNA, 120 bp, Artificial Sequence
  ENSG00000282890_1 (sequence is synthesized)
tcaaaagaaagctctcatgtgtcctttttattcctcattcctccatcctgctggctgtaatgttgacatgatggctggagctgctgtaaccttctggaactatgaagtcaccttgagaaa

SEQ ID NO: 970956 - DNA, 120 bp, Artificial Sequence
  ENSG00000282890_2 (sequence is synthesized)
ggaagctgtgactagtagaatgacaagagagatggaggcttgttttctgaagggatcacagaaagcagctatttttgtttggagagtactttctgatactgcctctggaacaactttaat

SEQ ID NO: 970957 - DNA, 120 bp, Artificial Sequence
  ENSG00000282890_3 (sequence is synthesized)
gaaagtagagtccagcacttacctgaagttgtgattatctacaaccatctgcaatgtggttcatctctagttttcacttggagcctcactggatgtcaagctgcaggctgctaagagcaa

SEQ ID NO: 970958 - DNA, 120 bp, Artificial Sequence
  ENSG00000282890_4 (sequence is synthesized)
tcagctgggcagaacatctatgaacacagtgaaaatggatgaagatttaaatgaaacttcctcagttatgtaatccaaactacaaaaatcgaagtcaagggagatggatgccaggtgtta

SEQ ID NO: 970959 - DNA, 120 bp, Artificial Sequence
  ENSG00000282890_5 (sequence is synthesized)
gcctaagagctggcatatattttttggagtgctgtgaggtgtattgcaagtcttgccattatttgtttacatttttcaaaaagctaaaagtcgaaatagccaaaataactcagactattt

SEQ ID NO: 970960 - DNA, 120 bp, Artificial Sequence
  ENSG00000282890_6 (sequence is synthesized)
caaaagctcattatttgcatagtgtactcatttgagcaagaggaaagtctgactgctaagagctgctaggaaaggataaaagtgaactgtatgtgtaaagaagggaatgagaaagttgca

SEQ ID NO: 970961 - DNA, 120 bp, Artificial Sequence
  ENSG00000282890_7 (sequence is synthesized)
cacaggtaataggctctttatcagccagtgctgccatccctagttgctgggaatataggctgatatataacaatatcccctttcctagacaattttctgatcaaccaggagctgcctttc

SEQ ID NO: 970962 - DNA, 120 bp, Artificial Sequence
  ENSG00000282890_8 (sequence is synthesized)
ctcaggggctatgcaaccacctcttggagttcagaatttagatgatgactaactgatatcaaggtttaaaggctgcttgtgtcaaagtgagattgattcagtggtgcaatgtgtactcta

SEQ ID NO: 970963 - DNA, 120 bp, Artificial Sequence
  ENSG00000282890_9 (sequence is synthesized)
gagttttcaccatgagaccagacgtaaagaagcctctgagaccagattcttgtgcatgtttttcgtcttgcctatcctgcattcctcaactctcctgaaggctttccctcattctgtcac

SEQ ID NO: 970964 - DNA, 120 bp, Artificial Sequence
  ENSG00000282890_10 (sequence is synthesized)
ttgaacaagaatcccctcccaggctctgcttccaaggctacaaggattcaatctgctttcctttattttggaagttgtttacacccactctactttctgggtttatttcctagcaagact

SEQ ID NO: 970965 - DNA, 120 bp, Artificial Sequence
  ENSG00000282890_11 (sequence is synthesized)
aaacagttctcttattggacaacatcattttcgcttgggcaaacagctcaattttcaggcaactgttttctcacaaagagccttatgtctgtctcaaactattgtgtcatgaatgttgcc

SEQ ID NO: 970966 - DNA, 120 bp, Artificial Sequence
  ENSG00000282890_12 (sequence is synthesized)
caatcttgacaaccttcacaccttaaaaaacaaacctcaaaccatttaagtacagtcccctaaaccctattaatacccttctgttgtctcctcttgagactgataaaaccctgttaatgt

SEQ ID NO: 970967 - DNA, 120 bp, Artificial Sequence
  ENSG00000282890_13 (sequence is synthesized)
ggttttctcccttattgcagtatgtttaataaattctgctttgccaaacaacaggtttatctggtggatgttataaaggagtcaacaatcaccaggtccaaacacaatctttgacaccta

SEQ ID NO: 970968 - DNA, 120 bp, Artificial Sequence
  ENSG00000282890_14 (sequence is synthesized)
acagaagctcaattaaattttttttcattaagtaactaggcagaaactcaggtagggtattatatgagataaatatgggggaaagggagaacaaggtattagtcacaaggaaaaagaaaa

SEQ ID NO: 970969 - DNA, 120 bp, Artificial Sequence
  ENSG00000282890_15 (sequence is synthesized)
ctggttatacaagagtccaggaaatctattaaaaggctaagggaatagaactgactctgaaacataagaatcttagagctccatgagattgttaatctatgaggttggccaatcaattgt

SEQ ID NO: 970970 - DNA, 120 bp, Artificial Sequence
  ENSG00000282890_16 (sequence is synthesized)
gcacacatgtgttagcctctgtaaggtgtcacatagaagggacatgaaactatctgatggatcttgcaataaacagtgtcacttttttcagtattttctattcctaaaggaaaggctttt

SEQ ID NO: 970971 - DNA, 120 bp, Artificial Sequence
  ENSG00000282890_17 (sequence is synthesized)
tctgtatttctggtctaggatgaagctcaagattttcctgtatgggttaatgggagataaacatacattcatttaaacattcagtatttagaatatttagtatttagtatttgctatgtc

SEQ ID NO: 970972 - DNA, 120 bp, Artificial Sequence
  ENSG00000282890_18 (sequence is synthesized)
aaaacaccattctagtttctagcaacattgagatgaatatggagggggctgaaaaactaagggtttattttatcaaagagaagcaaatgaaaggaaataacatgttagagccatacaatt

SEQ ID NO: 970973 - DNA, 120 bp, Artificial Sequence
  ENSG00000282890_19 (sequence is synthesized)
ctaaaagggctcattcatgttcataaattttcaggttatcttctgctgaccctcagaaaaacctatagaaggcaaaaacatcttcgaaggaggttctctttacttcacgtgaactcatca

SEQ ID NO: 970974 - DNA, 120 bp, Artificial Sequence
  ENSG00000282890_20 (sequence is synthesized)
ttaacttaagtactgtagcctagaaatcattgtcaattgcattttttttgcagagcaaaaccaccttttttgtttgtttgtttaaaggagtggaacactgagtaactcttgaaatggaaa

SEQ ID NO: 970975 - DNA, 120 bp, Artificial Sequence
  ENSG00000282890_21 (sequence is synthesized)
atgactatatatcacttagtataattatggccttcaccaataactttatctgtcaagccaaataattagtaaagctctccagtgtggtaaatccaaaatgctcttggtcatttactccag

SEQ ID NO: 970976 - DNA, 120 bp, Artificial Sequence
  ENSG00000225684_0 (sequence is synthesized)
agaccgggtgggaccggaccgcggtttgagtccaagcccagcggtgtttgcggcgggtccggggcctggaagcgcgggggcggcgccgagaacgaaactggaaaatggccttcattggaa

SEQ ID NO: 970977 - DNA, 120 bp, Artificial Sequence
  ENSG00000225684_1 (sequence is synthesized)
aagccccagtcctcggggagcagatcccccatctctggcagtgcagtgtgcctgggagctgtctggaacattccgcaacggtcactcctctgccctgcattggccttgaccacatgaccc

SEQ ID NO: 970978 - DNA, 120 bp, Artificial Sequence
  ENSG00000225684_2 (sequence is synthesized)
agaggtgcagggagaagcctcccttggatgcttggagtgacttcagctgctgagagtgtctaaggagagccgggaacaccgcacgcttcctgcagatggcggggcagacctgtgtgcaag

SEQ ID NO: 970979 - DNA, 120 bp, Artificial Sequence
  ENSG00000225684_3 (sequence is synthesized)
agtgcctgaaggggatctcccgtggcgctacctggtccagggaggtcacagagagctcctccaccctgagcacagggggtcccaccaaggacaaggacaagattcagcaccgtcgcacac

SEQ ID NO: 970980 - DNA, 120 bp, Artificial Sequence
  ENSG00000225684_4 (sequence is synthesized)
agaacagctacctggagccacaggtcactttccaaaaagggagtttccaggccagaagccatccctgcagcattgtctttgtgctccaagagaagccctggcacacacttctgctcagat

SEQ ID NO: 970981 - DNA, 120 bp, Artificial Sequence
  ENSG00000225684_5 (sequence is synthesized)
ggaaccactgttccctcagtgtccttgtcagtaccagctggtgactttcctactcaaacccttccctcactctctgcctcattttctcaaggtgccgtgtttgcctgaaaggacattggc

SEQ ID NO: 970982 - DNA, 120 bp, Artificial Sequence
  ENSG00000225684_6 (sequence is synthesized)
agccagcaggggcggcggctggtcctctagatgggcacgaatgccattggcaggcaatggggcagactccatggaaagatgcttctcttcctcaaggtatgcactcagcggggagacctc

SEQ ID NO: 970983 - DNA, 120 bp, Artificial Sequence
  ENSG00000225684_7 (sequence is synthesized)
attgtcaagttcagagttacgctgcagactgcacagcacctcgcctgcttctagggcctgctccggtcagcccaggacccaccacagcaggaccccccatcctgtgctcacccggggctt

SEQ ID NO: 970984 - DNA, 120 bp, Artificial Sequence
  ENSG00000225684_8 (sequence is synthesized)
gtccatggcactggaaactccttcctgttcctgatccccctctgggcgaggggtgggcagggacatgtggctcgtgccgaggtctaatactgtgttcccagcatggaagcaggtggggac

SEQ ID NO: 970985 - DNA, 120 bp, Artificial Sequence
  ENSG00000225684_9 (sequence is synthesized)
acttcctgtggcatgcaggattccgtgtagaaagctgtgactgtcacccctcctccccactcagttttgttagtggacctttccctggcccttctctccttggccccctcttggcaggag

SEQ ID NO: 970986 - DNA, 120 bp, Artificial Sequence
  ENSG00000225684_10 (sequence is synthesized)
agaggaggagaggatctcactttccccctgtaccagccacaccctcggtctgcggggttcccagcagctggccagggatgctccacacctggaggtcaagtaaccgtcccctcactctgg

SEQ ID NO: 970987 - DNA, 120 bp, Artificial Sequence
  ENSG00000225684_11 (sequence is synthesized)
gcatcggtgccctctctggggttggaacaggaaagaaagccaagacctgtatgtgggacttgagttgagactcaattctgtagagtcaggggtgaggaggagccaggcctcctgtgtgct

SEQ ID NO: 970988 - DNA, 120 bp, Artificial Sequence
  ENSG00000225684_12 (sequence is synthesized)
ctccataccccagagccgggtgcccagttccatgggtcctgatggacagaagggaagaacgggggggctgctgcaccgtgggtggtaatgcagtgggagccacctccagctgaatgccca

SEQ ID NO: 970989 - DNA, 120 bp, Artificial Sequence
  ENSG00000225684_13 (sequence is synthesized)
gggactcctggggctgctggccccgggtcccagcagtgggtcctgtttcttctttactcttggaatgcaggatctgccacaccaaaacgtcccctccacatttggtgaaataggaagctc

SEQ ID NO: 970990 - DNA, 120 bp, Artificial Sequence
  ENSG00000225684_14 (sequence is synthesized)
catggcatgtctccatctttcaaggtgactgagaggtttattttcataggagcctcagtggccttgtccgtacccacctctgcacgtggttgcagaaagtgaaggattgtcagggagcag

SEQ ID NO: 970991 - DNA, 120 bp, Artificial Sequence
  ENSG00000225684_15 (sequence is synthesized)
ggcagacatttggtttatctgtgtcattggtcaaagttttgtttttcctccagaagaaaaaggcttgtgaacatgccaccgtattcttcattccttcttttggaaatgtatgaagaacgg

SEQ ID NO: 970992 - DNA, 120 bp, Artificial Sequence
  ENSG00000225684_16 (sequence is synthesized)
gtggcattttggagttattggcctgtgaacagctggcccagaggaagggttagatgtgggtgggtgtggccgcctctgcccctccccagcgcaggtgtgcgtgggcagcccaggcaggcg

SEQ ID NO: 970993 - DNA, 120 bp, Artificial Sequence
  ENSG00000225684_17 (sequence is synthesized)
ctcaggaagggtgaggtggagccctgcacgctctgagcacaaagtcctgggatcccttaaacccaagcactgccttgacagcagccagcatggctgatagaagagacacagaagtccagc

SEQ ID NO: 970994 - DNA, 120 bp, Artificial Sequence
  ENSG00000225684_18 (sequence is synthesized)
tgatgccagacagagggcgtcactagagagccgtgctaggtgggggtcattcaagttgtcttggcgtatgcagacgttgcttctagagagtcagaagctctatatgcgtagtgttggagc

SEQ ID NO: 970995 - DNA, 120 bp, Artificial Sequence
  ENSG00000225684_19 (sequence is synthesized)
agaatttcgggatagtgatggcaagcctcctcccaagccagctggggagtatggggagggggtggccggaggaacctggcatccccgggttaggaccacagaggtggctctgcctgcagc

SEQ ID NO: 970996 - DNA, 120 bp, Artificial Sequence
  ENSG00000225684_20 (sequence is synthesized)
tgggcctctgcctcatcctgactccccctgctttggccatggctcttcttgtccttcctcttctcagtgcaggaggaccctgaatcaaatgcctcatcctggtttgcattttaccctcgg

SEQ ID NO: 970997 - DNA, 120 bp, Artificial Sequence
  ENSG00000225684_21 (sequence is synthesized)
atgaagcttgtggcgaacccctggactctgtgtctcctgagtctctgcagacctcgggtcctggacccagagactcttctccctgggacaggaggcactggggtgggtggacaggggtgg

SEQ ID NO: 970998 - DNA, 120 bp, Artificial Sequence
  ENSG00000225684_22 (sequence is synthesized)
cctggggcacagtagctgacggggggacttcctagttttctgggcctttccaactctgagtgtgaccttcctattcttgatcacagcccccaacttcggagcctgctagagcctgcagaa

SEQ ID NO: 970999 - DNA, 120 bp, Artificial Sequence
  ENSG00000225684_23 (sequence is synthesized)
ggttctctccttgccttcactctagaaaagtcccctgttttgtgatgtaggatgtggtcaatgactgactcgtccctttggaccatagacgcagctctgatttctggtgttcctgggctc

SEQ ID NO: 971000 - DNA, 120 bp, Artificial Sequence
  ENSG00000225684_24 (sequence is synthesized)
tgcacacagcaggagccactctgggctctgagaggtgcatcttctggctcactttcttcttgttggctcttctccctgcgtcttctgccactgccctgttctgggtgggaggctgtcaca

SEQ ID NO: 971001 - DNA, 120 bp, Artificial Sequence
  ENSG00000225684_25 (sequence is synthesized)
ctgtggtggagggtcccctctcctgcctcccctctttgatccttttctgtgagggtctgctggggtcctgtgtgtcgtgcattgttgatagattcctgtcgtgcttgctgtcctccccat

SEQ ID NO: 971002 - DNA, 120 bp, Artificial Sequence
  ENSG00000225684_26 (sequence is synthesized)
tctaagggacctctgattgcctgtgagcagtttacagggtcctctcctggccccttcacccgaggaattcccgcaacgcatgagtttgtgaggggcggatcctgggaggatgtgacgtca

SEQ ID NO: 971003 - DNA, 120 bp, Artificial Sequence
  ENSG00000225684_27 (sequence is synthesized)
ggtgagaagggagggcccgtcctagtccggtgggctcctctaacaaagtgcattagcctggggagttactgacgctcgaaatatgtcgtcaaagttctgaaggctgagaagtccgagatc

SEQ ID NO: 971004 - DNA, 120 bp, Artificial Sequence
  ENSG00000225684_28 (sequence is synthesized)
aagatgcctgaggattcagtgcctggtgaggacccattccttagggcagtgcctctagctgtgtcctcatgtggccgaaggggacaagggaggttgctggagcctgtttgatgagagcac

SEQ ID NO: 971005 - DNA, 120 bp, Artificial Sequence
  ENSG00000225684_29 (sequence is synthesized)
taccttccttcaggaggggattattcagaaagtctgtctggtttcagggcattcccaaaggccccacctgttcattctaccccattggtagaattcccattgggaattaggcttcaacat

SEQ ID NO: 971006 - DNA, 120 bp, Artificial Sequence
  ENSG00000225684_30 (sequence is synthesized)
acaaatttgggagacactgacatttaggccatagcgcgtcaaaggcaaagtgaggctgagtgtggaaaccatcccagaatctggatgtggcccaggcagaaggaaactcaaagtgatggg

SEQ ID NO: 971007 - DNA, 120 bp, Artificial Sequence
  ENSG00000225684_31 (sequence is synthesized)
gtgaccgatggtccctggtctgtgcaggactcagcggtgcggatggccctgggcacggtggcagtggctgttggaggatgatagggaacatgttggtggggggagggtggagcccactat

SEQ ID NO: 971008 - DNA, 120 bp, Artificial Sequence
  ENSG00000225684_32 (sequence is synthesized)
gagtggcaactccctgggggcacaggaaacaaagctagaggtggctcccctctcccctccctgcacacagtgtcacctctgtggtggccctgtcgtccgcctcagttcacaggtgttgct

SEQ ID NO: 971009 - DNA, 120 bp, Artificial Sequence
  ENSG00000225684_33 (sequence is synthesized)
gtaacaactcctgaaattaccttcaaaaggaggctcgtgcaggtgcctgcaggagccaggaggccgaagtgcatcctgagtgtccggggacaggccagcctggcggggtccacggcccca

SEQ ID NO: 971010 - DNA, 120 bp, Artificial Sequence
  ENSG00000225684_34 (sequence is synthesized)
cagtcccaacgactgcctcagaaatgggcagagagcatgcctggttctagctggcaaggcccacatctcagagctgtggacagtcatgaagggtccgtgagcatggagagggggcaaaaa

SEQ ID NO: 971011 - DNA, 120 bp, Artificial Sequence
  ENSG00000225684_35 (sequence is synthesized)
tgacccatgaacctcaggccactgtgctgccatccagccaagtgcggtaccagcccttcgggcctcgagatcctctacccttctctgggccttgctgatttcctcctccagcccctctgt

SEQ ID NO: 971012 - DNA, 120 bp, Artificial Sequence
  ENSG00000225684_36 (sequence is synthesized)
ttgtgtacgcacatacacacatgcacgcacgcacacgcacacccagtgcaatttctctctgctccctgtactccccaaaattcaatgggttcctctttcctcctcagagatatagtcctg

SEQ ID NO: 971013 - DNA, 120 bp, Artificial Sequence
  ENSG00000225684_37 (sequence is synthesized)
ggccccatctcagcctgcagaggcctgaacgtttcccaggattgtcttctaattctcaggtccggctttaaaacaaaacctaaactaaaactaaaatgctttctgcaaagaataatacac

SEQ ID NO: 971014 - DNA, 120 bp, Artificial Sequence
  ENSG00000225684_38 (sequence is synthesized)
caacataaagtccgggtatcctaagcatgtggtgtgtatggtgtctgaaattgaatatgctgtgaaactgcctgtgtcgaaatgcagtgtttcccaagacctggaggctctctccagctg

SEQ ID NO: 971015 - DNA, 120 bp, Artificial Sequence
  ENSG00000225684_39 (sequence is synthesized)
ctgattgtgatcacctctcccgatcaccgctgagccctgcaggtcaccttctcctgacctattacaccactgattgcttatgctgggcacaattttatacccttgctgttgttcagtcta

SEQ ID NO: 971016 - DNA, 120 bp, Artificial Sequence
  ENSG00000225684_40 (sequence is synthesized)
atcatccctataaccctatcggatcattcccatatgacagaggagaaaacctggggacacaggggctgtgtcctggccaaggccttgcttgcagcaaaaggcagagctggggtctagcca

SEQ ID NO: 971017 - DNA, 120 bp, Artificial Sequence
  ENSG00000225684_41 (sequence is synthesized)
ggagccccagcacagtcctgttcttcccccactaaactgagctgtgaaatagatcatggcagtttggaaaacgggctaactgtatgctgagggaggtggtgacggatacctacttctttt

SEQ ID NO: 971018 - DNA, 120 bp, Artificial Sequence
  ENSG00000225684_42 (sequence is synthesized)
catgggaaggtgaggtgtctccctgcccccctcaggtctagcctctctctgtagctcagaaccttgggaaagtgggaggctcagaggaggaaagagatttacttgcccaagggccgcagc

SEQ ID NO: 971019 - DNA, 120 bp, Artificial Sequence
  ENSG00000225684_43 (sequence is synthesized)
tgctaagtggcaggtaagggactgttattctcctgtccctttcacagaggacaggaggaaagtgaggacaggtggtgtacatgcatcttttctgcagcaggcccagatcagctttgcaca

SEQ ID NO: 971020 - DNA, 120 bp, Artificial Sequence
  ENSG00000225684_44 (sequence is synthesized)
tggtgctgacctcaaattcagccctagaggggcctgtctctgccctgagtgagtattgaagtgcaggcttcttcccctttgttctgtccatttccaaaaatgtgaacacacacctccaac

SEQ ID NO: 971021 - DNA, 120 bp, Artificial Sequence
  ENSG00000225684_45 (sequence is synthesized)
atgtttctgtgtatattattgtgtgcatagatactaccattgtgaaatattatgcagattaataatgcactatgccattgaaaatttcaaaagaaatgtgtaatgaacatttaaaattaa

SEQ ID NO: 971022 - DNA, 120 bp, Artificial Sequence
  ENSG00000225684_46 (sequence is synthesized)
agaggggcctgtctctgccctgagtagagcacattcactatatctccaaagaagatgttaggagccagccaaagtattatctagtaatgcatccacatcagtgttctggaacgtggggtt

SEQ ID NO: 971023 - DNA, 120 bp, Artificial Sequence
  ENSG00000225684_47 (sequence is synthesized)
ggtcatgtgtactcttccccatagtggctggatgtggctctgtgtatattgtggagacaaggtaatgatgataaagacccccactcagatagggataaataggaaacacacagcaatttt

SEQ ID NO: 971024 - DNA, 120 bp, Artificial Sequence
  ENSG00000225684_48 (sequence is synthesized)
tattgcctactgggtgagcattataaaatgtgaatattttcctcaatgaaaagtaagaagagaactaggttctcatgaaaaagtggcaaaatggtttttacaaactctggcgactcatat

SEQ ID NO: 971025 - DNA, 120 bp, Artificial Sequence
  ENSG00000225684_49 (sequence is synthesized)
attttaaagttgcctaatcaactgaaatgtatgtatgtaagcatgggtatattcactaaagcctagaactaatgatgaccttagcagcaaaggaataaaaatatgttcaataattagtca

SEQ ID NO: 971026 - DNA, 120 bp, Artificial Sequence
  ENSG00000225684_50 (sequence is synthesized)
gagtccaagcccagcggtgtttgcggcgggtccggggcctggaagcgcgggggcggcgccgagagtgagtaagaagttctggaacagcctcagttccaaaaaaatgagtcgctttgttgc

SEQ ID NO: 971027 - DNA, 120 bp, Artificial Sequence
  ENSG00000225684_51 (sequence is synthesized)
ggcattaaattttgcccctaactcatgtgtcccggcgtggcccgggagcagcgggcccttcctcttccaggctccctggccccggtctttgatgactcagagctcctgcggtcaccgggc

SEQ ID NO: 971028 - DNA, 120 bp, Artificial Sequence
  ENSG00000225684_52 (sequence is synthesized)
cgctctggagactcatcagagcagctcccccatcccgtcagctctgcggttacagcctcagttaatttccaaagtcgcccactttcaaaacacgatcttagggcgggacgatatgtacgc

SEQ ID NO: 971029 - DNA, 120 bp, Artificial Sequence
  ENSG00000225684_53 (sequence is synthesized)
atcttcctgtggccagcagcagtgatggcaacgctgtaggcacctccttcccttaggaagaagccaaacatttcacgaagtccttctgtgcttttagacgaaactggaaaatggccttca

SEQ ID NO: 971030 - DNA, 120 bp, Artificial Sequence
  ENSG00000225684_54 (sequence is synthesized)
aaataacaaagataatatgggtattaataacatttcctcaacaggaatgatggagaatgcttcagtttttctgtagggatttagtttttgaattgggattttgggtaagatatctttagg

SEQ ID NO: 971031 - DNA, 120 bp, Artificial Sequence
  ENSG00000225684_55 (sequence is synthesized)
ataaaatatgtgcacacaagaaaatagcatatttttcctaaaaatttgttttttatgcattattatatacacataaaaatggtcttattttggctgggcacagtggctcacgcgtgtaat

SEQ ID NO: 971032 - DNA, 86 bp, Artificial Sequence
  ENSG00000225684_56 (sequence is synthesized)
cacctgagttcaggagttggttattgaaaatacaaaaaacattagatgagcatggggcgggcacccataatcccagctacttggga

SEQ ID NO: 971033 - DNA, 120 bp, Artificial Sequence
  ENSG00000225684_57 (sequence is synthesized)
agcgaaattccatcttaaaaaaaaaagaaagaagtagttttatttcaaaattagaagcaaaaagaaaataaatatatcctgctatagagacttgtcttcggatgcttatgacctcctgta

SEQ ID NO: 971034 - DNA, 120 bp, Artificial Sequence
  ENSG00000225684_58 (sequence is synthesized)
aatgcagttcctccctcatccccgtctaagcatccttcctcagcctcctcaaattggagcctgcgtcatcagaaccacgtggaaggctctaaaaacattgacggcatagagggagaccct

SEQ ID NO: 971035 - DNA, 120 bp, Artificial Sequence
  ENSG00000225684_59 (sequence is synthesized)
atctccaaaaaacaaaacaaaaaaaccctttatttttaatgggataaaaagttaaatggtagttagatattcaagttttgtatgctccatgaacaaacaaacaaacaaacaaaaaaacat

SEQ ID NO: 971036 - DNA, 120 bp, Artificial Sequence
  ENSG00000225684_60 (sequence is synthesized)
gacacttgatggagactgcaggcctgcgttctgtacctggctttgagggagtgattggatgggatggtgtgcttcctgtgcctgtcctgtctgctctgggtttaatttactctcaattgg

SEQ ID NO: 971037 - DNA, 120 bp, Artificial Sequence
  ENSG00000225684_61 (sequence is synthesized)
ccattgttctttccatgatcttattttccaggcattgtcctaggacccaaggtctcttacattcttacatgtaacagtaagaattcttacaataagaattgagagagtagaagctatttt

SEQ ID NO: 971038 - DNA, 120 bp, Artificial Sequence
  ENSG00000225684_62 (sequence is synthesized)
ttcctatgacttagaactttgggggaagtttaaagggagatactgcatgtattctgtgtcatcatctaatttctacagacccttcttaaggaactgacattaatgttgtacttaattctt

SEQ ID NO: 971039 - DNA, 120 bp, Artificial Sequence
  ENSG00000225684_63 (sequence is synthesized)
caggcagtgtgggccaagaataaagccagatatacatttagtctaaaagtacaagtcatattatttccatcagtggattcctataatcctatgaataaaatcttatacattggcttataa

SEQ ID NO: 971040 - DNA, 120 bp, Artificial Sequence
  ENSG00000228590_0 (sequence is synthesized)
gctttctttcctggcttaggctgggaggcacagcgcccgtgtgctggaggcgagttggctccgggtgggggaggctggggttccaaaccagggcaggggaatggtggccctgcgtggctc

SEQ ID NO: 971041 - DNA, 120 bp, Artificial Sequence
  ENSG00000228590_1 (sequence is synthesized)
gtggacctctctcagggacccctctcagcaggggccggaaaagcaggcccacacccagtggtcattgcaggaacttcacttgagctggtctgcttgtgagcctgtggtttggagaggaga

SEQ ID NO: 971042 - DNA, 67 bp, Artificial Sequence
  ENSG00000228590_2 (sequence is synthesized)
tgagctggtctgcttgtgagcctgtggtttggagaggagaagacgcacttccccatgagaaaaagat

SEQ ID NO: 971043 - DNA, 120 bp, Artificial Sequence
  ENSG00000228590_3 (sequence is synthesized)
cctcccaagtagctggaattacaggtgctgacgaggactttcacctgggagaagagctcattcttcctatcgtttccctgggaagaacatggctgaaacaacttactgtacagaccacag

SEQ ID NO: 971044 - DNA, 120 bp, Artificial Sequence
  ENSG00000228590_4 (sequence is synthesized)
acagaagtgagaccaaaaacactgagatgaggaagaggtgtggcaaaatggctttgttgtggtggaagatgaattgtcgtctcaagggggcagaggactgcctgtgagcttccttaacat

SEQ ID NO: 971045 - DNA, 120 bp, Artificial Sequence
  ENSG00000228590_5 (sequence is synthesized)
ctgcaggagggaccatttacctacctgagaacaaactgttttctagctcttcagcagcaccacttacgcacaattttcatgtgctaatggcaagtgattattacctagttagtgaatata

SEQ ID NO: 971046 - DNA, 120 bp, Artificial Sequence
  ENSG00000228590_6 (sequence is synthesized)
cgtggaagacataaaatagcctttactatcccctggttgagacaactcgctaactcagacttgccaggtgctctgaattagagaggtgctacaggaatgtcctctcggatttttggcgtt

SEQ ID NO: 971047 - DNA, 120 bp, Artificial Sequence
  ENSG00000228590_7 (sequence is synthesized)
gagcatgcatgcatgtgagcagggtgccatttcttcagaagaaaaataaatgacaacattctgttttggggcttgaaactgcatgactgaaaacataaaggtgacaactgtgatatgctt

SEQ ID NO: 971048 - DNA, 120 bp, Artificial Sequence
  ENSG00000228590_8 (sequence is synthesized)
ttttaatgagggcagagatgtcaagagaaaccagccttctaggaacaaaagaatactctgtcaggtgcagtggacttaagacctttttctctcttggaataatgtccttaaaaataacca

SEQ ID NO: 971049 - DNA, 120 bp, Artificial Sequence
  ENSG00000228590_9 (sequence is synthesized)
aattttccattcaatagaaaaatgttcatcccttcctccccatcaatatgaattgttgtcttggagcatggggcactagcaagccatattgattttggaaattaaaatgggaatgttgaa

SEQ ID NO: 971050 - DNA, 120 bp, Artificial Sequence
  ENSG00000228590_10 (sequence is synthesized)
agttctaagagatgtctcaatccagaggtttggaaattgagcctttcaagaatcacagcgtgtaggtcttgggaaggacctagagatgatgctgtctagatttccccagccttctctttg

SEQ ID NO: 971051 - DNA, 120 bp, Artificial Sequence
  ENSG00000228590_11 (sequence is synthesized)
aacttgaccttcaaccgctggatcttgaaccagaaaacagttgaaaggacatagtggagacagcgtgggatcaagcatgaagactgagctatgtgctgacgaggactttcacctgggaga

SEQ ID NO: 971052 - DNA, 120 bp, Artificial Sequence
  ENSG00000228590_12 (sequence is synthesized)
tgtcaggcccgactcccagttccagcctgaacactggtcagctgaagacaacgctgccaccttcatctcttccctgcctgtcctgcttacaacagttgcaagaagtttatacccacatta

SEQ ID NO: 971053 - DNA, 120 bp, Artificial Sequence
  ENSG00000228590_13 (sequence is synthesized)
agcccccagaggcaggctggcagccagccttcgccactggtgcagagaactgagtcaaccacccggtgttcctggctgctccccctgagaagctttcccaccctgttccctgagtcgaga

SEQ ID NO: 971054 - DNA, 120 bp, Artificial Sequence
  ENSG00000228590_14 (sequence is synthesized)
gtcttggctgggcacctgctgcactgtggacgtgcggacgcggcctccagaagggggaagggagccctggctggcttctctgagacgtgttgagtggcttgccattgaagactgtttcct

SEQ ID NO: 971055 - DNA, 120 bp, Artificial Sequence
  ENSG00000228590_15 (sequence is synthesized)
cactcaggcagctgcatgccccaagtgagtgacttcctctctctggactcagtttctgaatctgtagacaaagagggtggaccagatggtcttggaggtgccttccaggtcacatctctc

SEQ ID NO: 971056 - DNA, 120 bp, Artificial Sequence
  ENSG00000228590_16 (sequence is synthesized)
ctgtttctaacagcaggtggaagcagacttattttgcaactggcttcaaacaatttgaagaaagggtcatggctttcccttcagcagagtttgggatctgaacactgcgttgcccccaaa

SEQ ID NO: 971057 - DNA, 120 bp, Artificial Sequence
  ENSG00000228590_17 (sequence is synthesized)
tgtctgcctcttgagagttctccacccagtggtcctgcttgcgtctttggaggacggtagcagtgcgctcagtggaggccacgggtgcctcagagggatttctcttggacctcctgccct

SEQ ID NO: 971058 - DNA, 120 bp, Artificial Sequence
  ENSG00000228590_18 (sequence is synthesized)
accccagcttcggcgttgcacttggagaaggccctggatatctcagggtgatcttcatgctcattccatggctagaatggaagtgatttccaggaccaccttgagagccatgtgttgaag

SEQ ID NO: 971059 - DNA, 120 bp, Artificial Sequence
  ENSG00000228590_19 (sequence is synthesized)
tgtaatgatgggagggaggatgcaaggcaggacttacgggtcctagccagctgtgctgcacctggtccgtgaggcagtgtggagtccaccgaaacgaccctcaagcctgatgccagttcc

SEQ ID NO: 971060 - DNA, 120 bp, Artificial Sequence
  ENSG00000228590_20 (sequence is synthesized)
agaagcccagtcggcaactctgccaccttacactcctctccccgtggaactgcctgggggtgctggcatggggacatgagggatgtctgacaggagaaacaagcatttcaagagtgtgtg

SEQ ID NO: 971061 - DNA, 120 bp, Artificial Sequence
  ENSG00000228590_21 (sequence is synthesized)
aggctcttgggaaccacacaattccccattctggtgccacctgcttcaaggatgtgagtgagagcagtgctggccttgaagcctacatcggtgggtagtctagcctccctagatgtgtcc

SEQ ID NO: 971062 - DNA, 120 bp, Artificial Sequence
  ENSG00000228590_22 (sequence is synthesized)
ttcgggcaggcagctgcctctggggcccgggcctgtggccccaggggaaagaattgttgccccaagatgctcatgcaatgttgtgtgactgtggcaaggctgtgccattttagctgggat

SEQ ID NO: 971063 - DNA, 120 bp, Artificial Sequence
  ENSG00000228590_23 (sequence is synthesized)
caacacgctaatgggcacaggtccagggggagtgcaggtgccttcctgggtgcaaagtggccctcatccccatagcacacaatgtctgcacagctgaggctggaagggactggctgaggg

SEQ ID NO: 971064 - DNA, 120 bp, Artificial Sequence
  ENSG00000228590_24 (sequence is synthesized)
ccgtgctggtgtgggcagatccctggaagatcacctgggccatctcctcattctaaagatgagaagaacgaggcttggagaggatgagtgtcttgttgagggttgcacagcaagttgggg

SEQ ID NO: 971065 - DNA, 120 bp, Artificial Sequence
  ENSG00000228590_25 (sequence is synthesized)
acacagctgcaggaaatccaagtctcctgattcctagcccatgatattttctctcccaccaagttgaaaggctgaggtgatgggaggcctggcataccacagatggaaacttgcatcgtt

SEQ ID NO: 971066 - DNA, 120 bp, Artificial Sequence
  ENSG00000228590_26 (sequence is synthesized)
gcccccggggctcagatgattctctaaaaatgtgtctgaggaagtgagagtgcagggcctctcctcacacgttggagctgtaagtagggcacgtgctttcagctccaggcaggactggag

SEQ ID NO: 971067 - DNA, 120 bp, Artificial Sequence
  ENSG00000228590_27 (sequence is synthesized)
aaggttatggaagggcagccaaccaagaagcacttatttaagcatttttatgtgcctagccctgagctaggcatagtagggcataaaggagctttgaaggaccctcccaacacagcaatt

SEQ ID NO: 971068 - DNA, 120 bp, Artificial Sequence
  ENSG00000228590_28 (sequence is synthesized)
tcactgcagctggtgagcaaatttaactcacaaatcaattacaaaaacaacctcatgcaagctactgtttgtgtaataaaatgtaagaacatatatttgtatttgcgtaaaggaaatctg

SEQ ID NO: 971069 - DNA, 120 bp, Artificial Sequence
  ENSG00000228590_29 (sequence is synthesized)
gaaggatataaaaagataataaaagtgttaactaaacagttacgtgatggggtgggggtgagatttttgtcctttgtaccttttaattacaaaattattttgaactatgtgaatgcattt

SEQ ID NO: 971070 - DNA, 120 bp, Artificial Sequence
  ENSG00000228590_30 (sequence is synthesized)
cagcatactggccctgtgcactagataagaacaatagcagagggttgtggactggtacagacacacactccccagggtcttaatctgccatgccaacccactcactgctgcaattctatt

SEQ ID NO: 971071 - DNA, 74 bp, Artificial Sequence
  ENSG00000228590_31 (sequence is synthesized)
taatctgccatgccaacccactcactgctgcaattctattaaaagtttggtggggctgggtgcggtggctcatg

SEQ ID NO: 971072 - DNA, 89 bp, Artificial Sequence
  ENSG00000228590_32 (sequence is synthesized)
aggactctgtctctaaatttaaaaaaacaaaattaattaaaaaaaaagtttggtggtttctccttacccctatccatggcagattcatc

SEQ ID NO: 971073 - DNA, 120 bp, Artificial Sequence
  ENSG00000228590_33 (sequence is synthesized)
ttggtggtttctccttacccctatccatggcagattcatctttctctgctccttcccagtgatgaaaatgtctctcttcttgctaggaaggaatcttcactttctgaaatttagttcatt

SEQ ID NO: 971074 - DNA, 120 bp, Artificial Sequence
  ENSG00000228590_34 (sequence is synthesized)
tcacttctttgcatctgaagctctctgataggttttaaacaattgtgatattgtagcttacctggttcattctcattgttaggatgggagcaagtcttcagcaatttttggcaacctaaa

SEQ ID NO: 971075 - DNA, 120 bp, Artificial Sequence
  ENSG00000228590_35 (sequence is synthesized)
tggaagtggagctcgttctttttgtttttatttatttactttctatttccagtaactagatgccgatctatgcagctgggataggaatagatttgagtgatcctaactcaaaatcccaat

SEQ ID NO: 971076 - DNA, 120 bp, Artificial Sequence
  ENSG00000228590_36 (sequence is synthesized)
tcctttcctatgtcaaaagctttctattggataaagctcataatctgtgactccttctctcacttgcagttgccccccaagaggctcttcagaaccaattaaatggatttctgtcgggcc

SEQ ID NO: 971077 - DNA, 120 bp, Artificial Sequence
  ENSG00000228590_37 (sequence is synthesized)
cacccgtcagtgttacagagatgtctaaatctcaatattcaaggcatggcaaactcctcacccgtcagctacccaatgcatctattgttacagtaagaatacactggagaggggcaatcc

SEQ ID NO: 971078 - DNA, 120 bp, Artificial Sequence
  ENSG00000228590_38 (sequence is synthesized)
ctcaaaagcattttcagcttggtgacatcaaggcttacagaaaagggagtgatttcagggtgagagtagggtaggaacacctacctactaatgtttccttggtttcttctcggagctacc

SEQ ID NO: 971079 - DNA, 120 bp, Artificial Sequence
  ENSG00000228590_39 (sequence is synthesized)
cttttccacagttaatcctgtggtaactccttgagctaggtctcatttaacgcacaagcatgctgagactccaagtcggggtataacttgctggaggtaagtggcagagctgggatttga

SEQ ID NO: 971080 - DNA, 120 bp, Artificial Sequence
  ENSG00000228590_40 (sequence is synthesized)
acccacatctgactcactctaaaacctaggcttttaaaattttttcttgaccaacatggaggaaggcatggcagaagacagaataggcagaccactgctccccggtcaggcctgggactg

SEQ ID NO: 971081 - DNA, 120 bp, Artificial Sequence
  ENSG00000228590_41 (sequence is synthesized)
acctggcaggtgtcggccctggggtcagaaccacgttggaggctgtagcttctgagaacagtgctcttctgtcaggaccccacctcacaatggattcaggtactctcgtaaccttgagca

SEQ ID NO: 971082 - DNA, 120 bp, Artificial Sequence
  ENSG00000228590_42 (sequence is synthesized)
gtgcatttagtctttttctgaatatcagcagttttctgaaaactggagttgtcccaaatcctttgaaaacattcgtgtgggaaattgggagccactcctccaaaggtcactgtcccaata

SEQ ID NO: 971083 - DNA, 120 bp, Artificial Sequence
  ENSG00000228590_43 (sequence is synthesized)
actggatttatagaaaggaaaggacagaaaggagcagcccccacgttcaccccagcccctgcccatcccagtctgcacaaaccttcttgccacaccagaggccacctcacgcttggcctc

SEQ ID NO: 971084 - DNA, 120 bp, Artificial Sequence
  ENSG00000228590_44 (sequence is synthesized)
ttctccctggcacggtggcttacacaggaaaagccaaagtgtaattagttaatagcagagctcctctgttaatggaaagggcatttcaaacttacttatgcaaactgatactgtgggatt

SEQ ID NO: 971085 - DNA, 120 bp, Artificial Sequence
  ENSG00000228590_45 (sequence is synthesized)
tgtcagaaaccatcaataggatgcaacagagaggactcacaggtcatttgtcaaatggggacaaaccttgtctcatttaagctttgagacccagagtggctctctgaattgctggcctgc

SEQ ID NO: 971086 - DNA, 120 bp, Artificial Sequence
  ENSG00000228590_46 (sequence is synthesized)
tgggatgtaagagcactgggggaggaagctgggacccctttttggagcatcttttccctcataacagttctggtcaggactgctacatacccaacaggcatgatctcagctgttcctcac

SEQ ID NO: 971087 - DNA, 120 bp, Artificial Sequence
  ENSG00000228590_47 (sequence is synthesized)
cacaacccaatgaggtagttactagtactgtccctattttatagctgaggaaactgagactcagacaggtaagtacctagactaaggttaagtatctagtcaatggtgagcctggaacat

SEQ ID NO: 971088 - DNA, 120 bp, Artificial Sequence
  ENSG00000228590_48 (sequence is synthesized)
gagcccaagattgcttgaattccaggtctaggtggttaaacactttcctggtacctttccattcagcagttggcctactctaaaacctaggttactaatagaagatgacaggggatcctc

SEQ ID NO: 971089 - DNA, 120 bp, Artificial Sequence
  ENSG00000228590_49 (sequence is synthesized)
tgagactggttatttatcaccacacctcttttctcctcttcttgggctcatggccacactatatttcccagactcccttgcagttgggtgtagccatgtgactgagagctggccaatgtc

SEQ ID NO: 971090 - DNA, 120 bp, Artificial Sequence
  ENSG00000228590_50 (sequence is synthesized)
ttctcctctacccccttaggtgatcttcatgctcattccatggctagaatggaagtgatttccaggaccaccttgagagccatgtgttgaaggtgctggggagaggagcagtgagcaaac

SEQ ID NO: 971091 - DNA, 120 bp, Artificial Sequence
  ENSG00000228590_51 (sequence is synthesized)
acaaaatccctgcctgtttagaactgatcttctagtggtggtggttggggctgggagcagctggacagtgaattactaaacatttgagcagatacctgaagataaagaagtgggccatgg

SEQ ID NO: 971092 - DNA, 120 bp, Artificial Sequence
  ENSG00000228590_52 (sequence is synthesized)
agatctttggggaaagggtgctgcaggcagagggactggtcagtgcaaaggcccaggccagagagcatgtgtcatgttggaggagcagcgaggtggccagtgtggctggaatggtgaggg

SEQ ID NO: 971093 - DNA, 120 bp, Artificial Sequence
  ENSG00000228590_53 (sequence is synthesized)
ccagggaagggatgatccttgcctcccaccctgtcactgaagaccaggagaagagtgatcccccgaaatgccctcagctcctgaaatgcccactgtcaacattcttggttacagacaacg

SEQ ID NO: 971094 - DNA, 120 bp, Artificial Sequence
  ENSG00000228590_54 (sequence is synthesized)
gcaacacctgtttcaagaataaaatggatctattgaatatttgggatcattaggagttgaggggcagggaaagcaaattccaggttaagtttccagaaaaagtgccccaaccgcactgta

SEQ ID NO: 971095 - DNA, 120 bp, Artificial Sequence
  ENSG00000228590_55 (sequence is synthesized)
gaactggcctgaagatgaaaccaccattgcagctactgagaactcaatgataagaacttgtcatttctaccctgtgcactgctgcttcccaagaactgatgctaccgtgtcagcgaaggg

SEQ ID NO: 971096 - DNA, 120 bp, Artificial Sequence
  ENSG00000228590_56 (sequence is synthesized)
attcccttgctgagcccagttccttacactgctcacttcatttctaaagcaaaatcttatgcaggtgtgtacaaagacagaactatgtcacaggcctgcattctaactgcaagagaggct

SEQ ID NO: 971097 - DNA, 120 bp, Artificial Sequence
  ENSG00000228590_57 (sequence is synthesized)
ggcagtttgagttgtgactacaatggggaggcaagaatgctatcatgagattttcccccattatagaaaggattggcaaagatagagccaaagttccctgtaggagatgtgtacagaagg

SEQ ID NO: 971098 - DNA, 120 bp, Artificial Sequence
  ENSG00000228590_58 (sequence is synthesized)
tctgatgaaaattcgaagtcttattcagaacaaaaggcctagataaccttccagggaccctggaaagaatgatgcctaggaaggtggcttctgtcatgaagtgatcaccaaccatggcaa

SEQ ID NO: 971099 - DNA, 120 bp, Artificial Sequence
  ENSG00000228590_59 (sequence is synthesized)
tgtcaactggggaatggcaagggggagtgctgggcatagggtccagctcccaggaaactagaaggagcccaggaagctagaaggcaagcttatgtcagcttggtctttttaacagggctc

SEQ ID NO: 971100 - DNA, 120 bp, Artificial Sequence
  ENSG00000228590_60 (sequence is synthesized)
caccctgccaagagaacaaggcctacatgggaaattatgaagaacacacacacgcaaaaaaaaatctgagtttgctttgtgtagggatttaattactgacttatcctgatgcttatgtat

SEQ ID NO: 971101 - DNA, 120 bp, Artificial Sequence
  ENSG00000228590_61 (sequence is synthesized)
acttgcagcttagaaaagtgaagacatctttctgggacagttctgggaaacagaagcccatgcgcactaaaaggaaccaaggaatgttttccatgtatcctgagctggacaccaaacaaa

SEQ ID NO: 971102 - DNA, 120 bp, Artificial Sequence
  ENSG00000228590_62 (sequence is synthesized)
tgtgttcctctttctttgctcacttagaagtcttcttcctgtcctgggttaattgacttcaactttgaaggagatgatgtttattttcatcttcgaatctgacctgataccatttagaaa

SEQ ID NO: 971103 - DNA, 120 bp, Artificial Sequence
  ENSG00000228590_63 (sequence is synthesized)
ttatgaataaattttaatacattggaaccctatgttaaaccacaatgcatgagtggatgagtcacaattccaagacagctcaatgccccacacaactaagacacagatgactttggtgct

SEQ ID NO: 971104 - DNA, 120 bp, Artificial Sequence
  ENSG00000228590_64 (sequence is synthesized)
ccccaaatcactttcccatgaagggcaaggttctctcggcagggtggggcatggtcagaaaggagaacttcagcttctgcttcaaaacaagcttccaggctcagatgggccctgctgtct

SEQ ID NO: 971105 - DNA, 120 bp, Artificial Sequence
  ENSG00000228590_65 (sequence is synthesized)
caaacactgctcttcaccctgccacgctttgtccttgctgggctcgccatccttcaagggcccccctccaggaagctgccctctcgtggcaggcatcttgctggtagctcccaattattt

SEQ ID NO: 971106 - DNA, 120 bp, Artificial Sequence
  ENSG00000228590_66 (sequence is synthesized)
tgtgagatgggatgcagaacagagttgctttggaagccctggagggtattgagggtctgacttttgggccgcaggacctctgcaaagcctgattccttgaagacatcactttgacttact

SEQ ID NO: 971107 - DNA, 120 bp, Artificial Sequence
  ENSG00000228590_67 (sequence is synthesized)
tggtcccagagcctgtcttgtttttaatttccctgctaagtttctgttctccagcaacatataaccccctttttctacttcagtaacctcagtggtagctctcaccatgttaaacaacgg

SEQ ID NO: 971108 - DNA, 120 bp, Artificial Sequence
  ENSG00000228590_68 (sequence is synthesized)
tctgatttggcatggaaaaaaagcagtcaattgttccctttaaatcttaatgttttcagccctgggaacatttgaagtaactatttaatgagaagacttctggtgaagcataggtaagat

SEQ ID NO: 971109 - DNA, 120 bp, Artificial Sequence
  ENSG00000228590_69 (sequence is synthesized)
cttaaaggctctaattgctccccagagaaagctgtcagggctaagtaacctcattcaggttgtgtacgcagagcagggagagcaaaacaaggcagaagtgaagagtggaggctgaggggg

SEQ ID NO: 971110 - DNA, 120 bp, Artificial Sequence
  ENSG00000228590_70 (sequence is synthesized)
cagaagtcacagagacttctcgaacctggaagtatttctggagttgtgccttgcactgtctgttttgggtacctgctggctgactgctatgcccccaaatggtcaaacaaatgacttact

SEQ ID NO: 971111 - DNA, 120 bp, Artificial Sequence
  ENSG00000228590_71 (sequence is synthesized)
ctttcctgggtctagttgccttctaatttggaactcaaattatagttctttcttctcctctttcatttaaatacaaagcaaaacaaaacaaaatctgaaactatttttccttctaacccc

SEQ ID NO: 971112 - DNA, 120 bp, Artificial Sequence
  ENSG00000242072_0 (sequence is synthesized)
aacgcagcgtccattgtgagatgccgcagttccgtgcagtcagaagatggctccagcgcgttaattttgctcctgtttctagcacgagatttaaggggcaagatgcacttcagtgctatt

SEQ ID NO: 971113 - DNA, 120 bp, Artificial Sequence
  ENSG00000242072_1 (sequence is synthesized)
tttcctttctgattttgccgtcgtctcatttggttcaaaacatcaaactgcagcatatatggagttgtaaagggtccattaatatagatgttctagtcaccagctaatgcagatggaaag

SEQ ID NO: 971114 - DNA, 120 bp, Artificial Sequence
  ENSG00000242072_2 (sequence is synthesized)
ggaaatacagggccacagaaggagattgaaaagcaccggcctaagcaactttggaaaatggacacacccatattcacaccaccacaaccgaagaatagagtgttcctatcacccggaaaa

SEQ ID NO: 971115 - DNA, 120 bp, Artificial Sequence
  ENSG00000242072_3 (sequence is synthesized)
tgcagccaatcaccctcattcaacccctggctctcagcaaccactgatctaatttgagttgccatagattattttgcttattttggaatttcatctcagggaaccatactgtgtgcattc

SEQ ID NO: 971116 - DNA, 120 bp, Artificial Sequence
  ENSG00000242072_4 (sequence is synthesized)
tttcatgtctggcttcttttgattagcttagtttgtttttttgtttgtttgtttagactcatccaagagtagtggctaatcttatattttatttatttttatcactgagtaatatctcct

SEQ ID NO: 971117 - DNA, 120 bp, Artificial Sequence
  ENSG00000242072_5 (sequence is synthesized)
tatatgaatatattaataagtcaacatttaataatgcattcactttttgatgggtgtttaaattgtttccaatgtggggcaatttgaacaaatatgctatgaacacttttgtacgtgtct

SEQ ID NO: 971118 - DNA, 87 bp, Artificial Sequence
  ENSG00000242078_0 (sequence is synthesized)
gcagacacaatctgcgagggaacctcgctggagtcttctgagccctgaaacctggtcctcagggctgggacccgggctccacgcatg

SEQ ID NO: 971119 - DNA, 120 bp, Artificial Sequence
  ENSG00000242078_1 (sequence is synthesized)
agccgggaaggaaccactccagcctcccgtccaaacagaaccctacagggccctacctcgatcagaggaaaaacgcacagaagcacacgcatacggttttcgaaaaatgtcgggaagttc

SEQ ID NO: 971120 - DNA, 120 bp, Artificial Sequence
  ENSG00000246792_0 (sequence is synthesized)
gagatttgagttttgttaccagagcagatctttgtcatcctggataatgtgcctgagaagaagaggtttaaggaagaaaacttgtgaacaccaatgtgcttgttagactcctttgcttgc

SEQ ID NO: 971121 - DNA, 120 bp, Artificial Sequence
  ENSG00000246792_1 (sequence is synthesized)
cctgttatacacttgccactacacttctgacttagatgtggtactttgttagtatctgtgaggactgaaaatgagatcgaagagaaaaatccaatcaagcattaagtaatcatatttaaa

SEQ ID NO: 971122 - DNA, 120 bp, Artificial Sequence
  ENSG00000246792_2 (sequence is synthesized)
tggaaaatgggaagatactattaacgaattcaatggtggcttggtcctgatgacactcttcttgaattatacgatgttcttatctcttgcggggctgttgaaataatcaaatctttgtac

SEQ ID NO: 971123 - DNA, 120 bp, Artificial Sequence
  ENSG00000246792_3 (sequence is synthesized)
agtccgtgagcggcttggatcctcgcccgttccctcctggtcgtttccgcagtaacctcttatcagagcgggcagctgtgagtggcgctcacatccgccgctgccctgtcgaatggggga

SEQ ID NO: 971124 - DNA, 120 bp, Artificial Sequence
  ENSG00000246792_4 (sequence is synthesized)
aagagttcttgtgttctgaggagggtttggctatggtccttgaccctattcttgtctcagacttgcctcccaggaatataggaggattgtatgccctggcctccctgtgatggggttgaa

SEQ ID NO: 971125 - DNA, 120 bp, Artificial Sequence
  ENSG00000246792_5 (sequence is synthesized)
ctacatgacatgttctccgaattaagtgtgagcatagcatttaattgttgatgcaagaccttccagaactctttttctctttgccatggcaatcatcagtgttccagagagcatatgcac

SEQ ID NO: 971126 - DNA, 120 bp, Artificial Sequence
  ENSG00000246792_6 (sequence is synthesized)
gatcagccttggtattggagggaagatgatgcggaacagagtcccagtcacatcatgaaggacatgtaaagtgagaagtaaaccttggttgttttaagccattgagatttgagttttgtt

SEQ ID NO: 971127 - DNA, 120 bp, Artificial Sequence
  ENSG00000246792_7 (sequence is synthesized)
accagagcagatctttgtcatcctggataatgtgcctgagaagaagaggtttaaggaagaaaacttgtgaacaccaatgtgcttgttagactcctttgcttgtaagaaagagaaactcaa

SEQ ID NO: 971128 - DNA, 120 bp, Artificial Sequence
  ENSG00000246792_8 (sequence is synthesized)
gagactaatgaaaagaaggaacaagtgtttatatgggtatatgagtagctattaggagcccaggcataagctactctcttatttctttctcattgtgtctctgctcttctctacctcttt

SEQ ID NO: 971129 - DNA, 120 bp, Artificial Sequence
  ENSG00000246792_9 (sequence is synthesized)
aatctattctcacactaccaactggctaattaatccacttcttatcctttagtctgcatttcagaagaatataagccagttccagagctcttagctctaagtagcttcatgggctgccag

SEQ ID NO: 971130 - DNA, 120 bp, Artificial Sequence
  ENSG00000246792_10 (sequence is synthesized)
ccaacctggaaatgagctactcttgggtcaggtgcccatcctgctctaaacagtgtcactcctacctgaaacatcatttagctttcctgggcatgggacctctggtacagcaatgcaagc

SEQ ID NO: 971131 - DNA, 120 bp, Artificial Sequence
  ENSG00000246792_11 (sequence is synthesized)
agtagtgggatatttctattctcgtcccactacaatttatttttcacagaattgtgaaaattatgttttacaattggacatcagatgtgtcttaatccatatctaccagcccactacaac

SEQ ID NO: 971132 - DNA, 120 bp, Artificial Sequence
  ENSG00000246792_12 (sequence is synthesized)
cagcctaaaactcttatattgcgttagggaaagacccaactctctgcctggcctacaaagccctttatgatctagcctctgcctgacattcctacctcacctcctgccaccctccctctc

SEQ ID NO: 971133 - DNA, 120 bp, Artificial Sequence
  ENSG00000246792_13 (sequence is synthesized)
acacgttccagccacccaggcctcctgtgtctcccttggatgagtcaagctggtttcctcctcaggacatttgcattctgcccttgccaatctttcttgtttgaacactctgcccttggc

SEQ ID NO: 971134 - DNA, 120 bp, Artificial Sequence
  ENSG00000246792_14 (sequence is synthesized)
tctgagaaagcctggtttcttcattcttattcgttttaagctctcctgtcatctcctcagagatgacttccctgattaccctcatctaaaggactgccctctctacatcgggttactggt

SEQ ID NO: 971135 - DNA, 120 bp, Artificial Sequence
  ENSG00000246792_15 (sequence is synthesized)
accccttattttcttcatagcacttatcatcacctgaaattgccttgtttattcctttactttctgtcttccataagcagaatgaaataccatgagagtgagtatctttcctgtcttgtg

SEQ ID NO: 971136 - DNA, 120 bp, Artificial Sequence
  ENSG00000246792_16 (sequence is synthesized)
aacccctgtactctgattccctagaatagtccctgtcacactaaatattttttaagtgaaggaaagggatggtgggcagtgtgctcatgtgctggttgttctctggtgtcgtctatccag

SEQ ID NO: 971137 - DNA, 120 bp, Artificial Sequence
  ENSG00000246792_17 (sequence is synthesized)
gaggcaccagcagaatattggagggtagtacaggtgagaagtggtcagggtatttatctcttcccggttgagtttcactatggttttggcagtggttgaattttgtgaacaaagttctta

SEQ ID NO: 971138 - DNA, 120 bp, Artificial Sequence
  ENSG00000246792_18 (sequence is synthesized)
tttaccaagtttccaactctttcccagctctagtaatgattttctgatgctttgtcatcctttttaatacttccttgattagacgctatttacagttgcttttgttgcctgcaggaactc

SEQ ID NO: 971139 - DNA, 120 bp, Artificial Sequence
  ENSG00000246792_19 (sequence is synthesized)
tcactgacacagcaggggcaggtcagaggctgacaagctcagtacagctaacacttgagttcatataactcacccatagccacacagagaaagtggtggaagcagatttcaaatttaaac

SEQ ID NO: 971140 - DNA, 120 bp, Artificial Sequence
  ENSG00000246792_20 (sequence is synthesized)
tcagggagtgtgaggagatctgcagaaactgttatattagaagtccaaggaagagagaatgttaagatgttaagatggaaagatggaatgttaaggtggtttgtcaagtgcagttggagt

SEQ ID NO: 971141 - DNA, 120 bp, Artificial Sequence
  ENSG00000246792_21 (sequence is synthesized)
ccctttttcttctgggtttggtggcctgctgcacctttgcctttctctgactctcattaaaattgttaattaagggagattttagagtcctaggctcaaaattaaaatttggtttatttt

SEQ ID NO: 971142 - DNA, 120 bp, Artificial Sequence
  ENSG00000246792_22 (sequence is synthesized)
gtaatacggctccagaagcctttaattctctatttaattttatttctaaaagaaaaagattgggcactactgacctagataaagacccaagatgagagaaggaccaatgagtgtccctta

SEQ ID NO: 971143 - DNA, 120 bp, Artificial Sequence
  ENSG00000246792_23 (sequence is synthesized)
gatatttcttttaaaggtagccactagggccttagggaaagtactttcaggaacagacaaattgcaccagtttgagagtgaatgaaaggtaactatgaaagagtgagtttagatagcact

SEQ ID NO: 971144 - DNA, 120 bp, Artificial Sequence
  ENSG00000246792_24 (sequence is synthesized)
tttaataattttggatggaaaggaagaaaaaggtgatagctagaaggtaatacagggtgaggaagatggggacattctaactgaaggattccagtgtgtttatagattgaggtaaagaag

SEQ ID NO: 971145 - DNA, 120 bp, Artificial Sequence
  ENSG00000246792_25 (sequence is synthesized)
gctggagagaagagggcattaaggcacagaagagaggaaatataatgaagccaggttgtaaaggagatgaaagagaatgtggttaagatattaggggaaggattagatgcaggggagaca

SEQ ID NO: 971146 - DNA, 120 bp, Artificial Sequence
  ENSG00000246792_26 (sequence is synthesized)
gtgcttcctttgagattcaaaggaaagatgtagagatgaatgcaaatttgccactgcctatttctaatcgtaatagattctgtcatttcaggatttattttaatgtagttggggactggc

SEQ ID NO: 971147 - DNA, 120 bp, Artificial Sequence
  ENSG00000246792_27 (sequence is synthesized)
aggtagtttttctctcccctttgatagcctggggcttcatttctgacttttcctgatcaaaaataagaactgatctatcttctcagctcttcaggtgtcaattatacaataagcaaattt

SEQ ID NO: 971148 - DNA, 120 bp, Artificial Sequence
  ENSG00000246792_28 (sequence is synthesized)
gttaattttaagtgcacccataacattaaatgtgttttgatatgtggttgttgaagctacctgttaaaattagtttgctgtgatttattgttattcatacaaatggtttatcaaatgcaa

SEQ ID NO: 971149 - DNA, 120 bp, Artificial Sequence
  ENSG00000246792_29 (sequence is synthesized)
agattcactgaaggacatttttaagagttcgctttctcagagggcagcttctcaaactcattcgctggtttcttttcctctttccgcctgtttaaggaatataggaggattgtatgccct

SEQ ID NO: 971150 - DNA, 120 bp, Artificial Sequence
  ENSG00000246792_30 (sequence is synthesized)
gaccattcattcatgccttgagacagtatgaatcaagctgactttttttttttccaaggagtttttaaactatatatgtgacaccccgatgaataagaagagcagccagctgagaagggg

SEQ ID NO: 971151 - DNA, 120 bp, Artificial Sequence
  ENSG00000246792_31 (sequence is synthesized)
ttttcaacagctgtgactgacccactcacctcacaggactccagtgggcactaatggaaatggagagaaagacaaacaagatgaccctgttagctccctgtgtactgcagatgtggtgta

SEQ ID NO: 971152 - DNA, 120 bp, Artificial Sequence
  ENSG00000246792_32 (sequence is synthesized)
ggctgtgctccgaacttagagagaagaaggaagagaggacaacccctctatccccaaattctcttccaaccctgttctgccagccatctgattggaagcaagagggaagggaggcctgtg

SEQ ID NO: 971153 - DNA, 120 bp, Artificial Sequence
  ENSG00000246792_33 (sequence is synthesized)
gtgacctctctcttgacaacaggggaaaacctgaccctagaaaaatcagctcaatcaatatcatgtgatcttatcaaagcaagcaaccctactccctaaactggtggaaacggtgtgaat

SEQ ID NO: 971154 - DNA, 120 bp, Artificial Sequence
  ENSG00000246792_34 (sequence is synthesized)
gtcaactagagttctatactttaaaaacaacaaaaatattgcaaattttgagtatccttcctaaagaaaacaacatattgtaatcttgttttctgttagataaatctctgttaaaaagaa

SEQ ID NO: 971155 - DNA, 120 bp, Artificial Sequence
  ENSG00000246790_0 (sequence is synthesized)
gtgctgttctgtgtaagtgtaccgcaactgcagggtgctcgcctccactgccaactgatgatacactaaagaaagcccgttttttatccagatgtaaaatgaagctgcacccctcctata

SEQ ID NO: 971156 - DNA, 120 bp, Artificial Sequence
  ENSG00000246790_1 (sequence is synthesized)
cctgccggaaactacatctctctgcacacaccctggggtaatacgcactgcacccggcgagttacctggaatacgtttactaaatcgacaggaagaaggaaagatcaatgcgattcaagt

SEQ ID NO: 971157 - DNA, 120 bp, Artificial Sequence
  ENSG00000246790_2 (sequence is synthesized)
gctgacggttgtactcgtgaaggaaaaaaacaaatgcaagccgggaagtccccagtggtgcctgcacctaggaggcgactgcaacggatggatgcgggggtagataatcagcaacccccc

SEQ ID NO: 971158 - DNA, 120 bp, Artificial Sequence
  ENSG00000246790_3 (sequence is synthesized)
aagactgtgcctgctgcacaactacagaacgcagtggaagacacgctgaattctgagtcagaaggttgactttctagctgtggggacttggccaaacctcctcagagcttcagttttctc

SEQ ID NO: 971159 - DNA, 120 bp, Artificial Sequence
  ENSG00000246790_4 (sequence is synthesized)
atctgtaaaatagagatcttaatccctaccaatctcacaggactgctgagagtatcagatgaggtaagtatataaaatagctgtgcaaatttgtgtgaaggcctccagagagaaatagtg

SEQ ID NO: 971160 - DNA, 120 bp, Artificial Sequence
  ENSG00000246790_5 (sequence is synthesized)
catgcaggtggcattagaaacatagattctagtcctggctttgcaaccaaattattatgtaattttttgtcttgatcatcttgtctcttacgatttcttcataagttaaatgaaaagaca

SEQ ID NO: 971161 - DNA, 120 bp, Artificial Sequence
  ENSG00000246790_6 (sequence is synthesized)
cctttcagccctgaccactcccaaaccttcaggacccccactgggttgtgagataggagcagccacaggcaaggtcacccaggacaggagttagagctgaatcgtgcaatatgagtgagg

SEQ ID NO: 971162 - DNA, 120 bp, Artificial Sequence
  ENSG00000246790_7 (sequence is synthesized)
tgttcctctcagcttcaaaaccagctctgggttgtaaacaagctaccacttcctctatccctctgaagtaacatcaaagttggggtgcaggatggaagacagtaccatatccccctctgt

SEQ ID NO: 971163 - DNA, 120 bp, Artificial Sequence
  ENSG00000246790_8 (sequence is synthesized)
cccatcttgcatggccttgctcggatgctgcccagcatcatgacgaaaatcaacatgcacggaaatgtaatgatagactcacagctgtgtataaaacagtcttaagcctgttgtcagact

SEQ ID NO: 971164 - DNA, 120 bp, Artificial Sequence
  ENSG00000246790_9 (sequence is synthesized)
ttaaactgccctcctctgtcctactgcccatcttaggccactggagatggaggtagaggacaaacacacagaggtcacagtgtcctacatttttatccaggtggagtcatgtttaaaata

SEQ ID NO: 971165 - DNA, 120 bp, Artificial Sequence
  ENSG00000246790_10 (sequence is synthesized)
gcagcaaggacagccacgaagaggaaaaaactccccaaagcctaatttgacttctttctgttctttctcttcctgtggccttctcacatgctcacctcctggctggccaacttctattca

SEQ ID NO: 971166 - DNA, 120 bp, Artificial Sequence
  ENSG00000246790_11 (sequence is synthesized)
gccttcaggtttcagagcagcctccttaggcacctaggctaggttacagccctcactctaaggctctagtcccctgtagcctttgatacttcctctctggtcacttgcttaatctccatc

SEQ ID NO: 971167 - DNA, 120 bp, Artificial Sequence
  ENSG00000246790_12 (sequence is synthesized)
acaaaaccagtctatctcattcaagtctagacgcccagtgcccagcatactcttggcacatggtggcactcaatgatatttataggatgcatgcatttaaatgaaggtgagaagtgacac

SEQ ID NO: 971168 - DNA, 120 bp, Artificial Sequence
  ENSG00000246790_13 (sequence is synthesized)
cacctttgtcctggtggcaatggttggttaaggggccaatgtagttgaatctcagatcttttcttaccaccatctgcttcccacctcgttttctcccccaaagcaggcctctctgagtca

SEQ ID NO: 971169 - DNA, 120 bp, Artificial Sequence
  ENSG00000246790_14 (sequence is synthesized)
cgcaaccagaccagagtcattaaagcagaaaagggacttccctgcccttaggatggtaaacattgttccctcttccatgttactttggccaaataactaccattgacctcaccagctcag

SEQ ID NO: 971170 - DNA, 120 bp, Artificial Sequence
  ENSG00000246790_15 (sequence is synthesized)
gcaaaatagaaatacccgcctgcccccaaagaaataactccttctcctgctgttgccaaaatctacttcagttaggaaagcgtccaagataattgatgaggtttaaaatacaaatgcacc

SEQ ID NO: 971171 - DNA, 120 bp, Artificial Sequence
  ENSG00000246790_16 (sequence is synthesized)
cagagcatagaataagtaacttatattctcactcttgattaaattaaatccaaagaggagtttctggaaatagcagtaagttattttgcatagcagtgatttacatttgcataacattat

SEQ ID NO: 971172 - DNA, 120 bp, Artificial Sequence
  ENSG00000246790_17 (sequence is synthesized)
aacagcattatctatctcattccatcgcacagcaaccctttgaagtgggccaaagcgagaattattgtcacccccattttacagaccttaagcattgaaattcagaaaggaagactattt

SEQ ID NO: 971173 - DNA, 120 bp, Artificial Sequence
  ENSG00000246790_18 (sequence is synthesized)
gctttgcctaaagttaaacaggcttgctaacttactgttagtaagggataaatttgaacccaggctccctttttctgccacatctgatacctctcttaggaagagaagagctggtatttc

SEQ ID NO: 971174 - DNA, 120 bp, Artificial Sequence
  ENSG00000246790_19 (sequence is synthesized)
aagtcctgggtatagtggaacagcgggaattagggcagaaagaaggaaagggagtggctgtaggcctcacctccttcacaactcagccctgccttaaccagcactgtctcccttcctagg

SEQ ID NO: 971175 - DNA, 120 bp, Artificial Sequence
  ENSG00000246790_20 (sequence is synthesized)
tacctagcctaggtgagatgctgtatctgcttgaccctcacgccctgattgggacaagttagcagtaatgttacagttacaaagctcacaagtccagtcctgttttctatacttttctag

SEQ ID NO: 971176 - DNA, 120 bp, Artificial Sequence
  ENSG00000246790_21 (sequence is synthesized)
gagatgaatttagcgagggatttggtttccaatgtgtttcaaaacctgtgagagagcgcaagttttagaaggtccctcagacaggcacagtgacttatgcccttaatcccagcacttaca

SEQ ID NO: 971177 - DNA, 89 bp, Artificial Sequence
  ENSG00000246790_22 (sequence is synthesized)
gaccagcctgggcaatgtgtcgagccaggcatggtagcacatgccagtagtcccagctacttaggaggctgagtggggaggatcgcttg

SEQ ID NO: 971178 - DNA, 120 bp, Artificial Sequence
  ENSG00000246790_23 (sequence is synthesized)
aaatacaaaaatgagccaggcatggtagcacatgccagtagtcccagctacttaggaggctgagtggggaggatcgcttgagcccaggaggtcagggctgcagtgagctgagatcgcacc

SEQ ID NO: 971179 - DNA, 120 bp, Artificial Sequence
  ENSG00000284808_0 (sequence is synthesized)
agtcaggtaacagacatgctggaaaagcaagtgagcctggaaaggaggacagaatgtactggaaaagggagagatgggcttccaaggagccacctcgaagctacagaggcaggagtggac

SEQ ID NO: 971180 - DNA, 120 bp, Artificial Sequence
  ENSG00000284808_1 (sequence is synthesized)
attgagaacagagagcctccagagaagagcagctttgtgccttgccatgaaaaccatgagaatggaaagcatgtaacatctcacttacagctgacacagaagggaagtgactctgaaata

SEQ ID NO: 971181 - DNA, 120 bp, Artificial Sequence
  ENSG00000284808_2 (sequence is synthesized)
tagaccctctcagcctctggggaagatttatgtggcgaggatcactctccttagagtgagactgcagcaggaaaaaggaagagactttgaggtcaaagggaaggaggtgaacagagatgg

SEQ ID NO: 971182 - DNA, 120 bp, Artificial Sequence
  ENSG00000284808_3 (sequence is synthesized)
gaaaaggcgttgcaggtcaacaagtcccaggctgttggacagtgatccagaaagagagtgagagctcagaggtgagccgctgtgtgggagctcctggagatacaagatacaaggagtggg

SEQ ID NO: 971183 - DNA, 120 bp, Artificial Sequence
  ENSG00000284808_4 (sequence is synthesized)
gattcccattcccccaggatgccagccagagcacctggacccagtgagacctctgggacagtggacatctcagtagtgaccagaaggtctctggccctgcaaaagcatttaggaacttgt

SEQ ID NO: 971184 - DNA, 120 bp, Artificial Sequence
  ENSG00000284808_5 (sequence is synthesized)
ccacaaactggaacttgtccacaaattgtccaagactgagacaattcctcctgacatgaaagggatgggaactcacaatttgatttaagttgattcacaaaaataacaagatgtcatatt

SEQ ID NO: 971185 - DNA, 120 bp, Artificial Sequence
  ENSG00000284808_6 (sequence is synthesized)
cctcacttccttagtctgtggattaagattcatatctgctactcatttgactgcctactacgtgttaggcaatgcagtagggttttcaaacatgttttatcatgtaaacttcaaaacaac

SEQ ID NO: 971186 - DNA, 120 bp, Artificial Sequence
  ENSG00000284808_7 (sequence is synthesized)
actcctatggatttgaaccagattttacctgactccaaagtctgtgagtatctctaaaataaggagaattaaaggaattaagtgttagagtgttcttgcatttacattatacatgtgaat

SEQ ID NO: 971187 - DNA, 120 bp, Artificial Sequence
  ENSG00000284808_8 (sequence is synthesized)
tcactgaatcctcacagtcaacataatatatttttaagtagatggacactgcctaaggcccctgctctggttgtgacattaatttattctctgttctctaaatgggtgctgaaagactgg

SEQ ID NO: 971188 - DNA, 120 bp, Artificial Sequence
  ENSG00000284808_9 (sequence is synthesized)
cctctaccgaatggccttaccctcccacagtcatgagttacacatccttgttctaaaaggtcagcagagatcaagtctgagttccagatttctagaaaagaaactctgctaattcttggc

SEQ ID NO: 971189 - DNA, 120 bp, Artificial Sequence
  ENSG00000284808_10 (sequence is synthesized)
aatcagattttctctcccaacaatatacaattgtgtcttagagattctaattagtctatgctggtaacttgaactgaagacatgtaacctgaatgctgtgcagcagccatagctggctgt

SEQ ID NO: 971190 - DNA, 120 bp, Artificial Sequence
  ENSG00000284808_11 (sequence is synthesized)
gtgtgcatatagatgaagaggatgccaacctgcagagatggaggagaatgatgcacacagcacatgcctgtgctctggctgtttttgcctcactagggcacctaggacacccactcacca

SEQ ID NO: 971191 - DNA, 120 bp, Artificial Sequence
  ENSG00000284808_12 (sequence is synthesized)
ggtccacttagaacaaagtccctgcagaaaatattacaagagtattaacatagccctggggcaatctggttgtgtgccagtgtgctgccatgctgaggtcaattggttttagatctttct

SEQ ID NO: 971192 - DNA, 120 bp, Artificial Sequence
  ENSG00000284808_13 (sequence is synthesized)
accaatggggatagagaagaacacatttgccaggtcaataatcacacaccaagggccagaaatagtgatgatctactccagtgaagatataaattaatcagagaagctgcaactggggct

SEQ ID NO: 971193 - DNA, 120 bp, Artificial Sequence
  ENSG00000284808_14 (sequence is synthesized)
aacaactggttcaacttacagtaattcattatcatttgccatgctctttcttttttcagagaccagataggtaacttaaataggtatgtgatagagactaccaccttgcaacctttaagt

SEQ ID NO: 971194 - DNA, 120 bp, Artificial Sequence
  ENSG00000284808_15 (sequence is synthesized)
cttttgaagatagaactaatttccacaataccagaagacaaagagacaagttataaaggatcctactttgtccttcctgccacagtgaccttactccatacatcagggacccaatgcaag

SEQ ID NO: 971195 - DNA, 120 bp, Artificial Sequence
  ENSG00000284808_16 (sequence is synthesized)
agttccagcagctgctaagtacacctatcccaattatacatgcaggaactagatatacaaccatacggtgagtctgcaagtacattggacccaaaatgagacagttttgggcagtacccc

SEQ ID NO: 971196 - DNA, 120 bp, Artificial Sequence
  ENSG00000284808_17 (sequence is synthesized)
atttatctcctagcttccgtaagtcccaccctaaacagataaccatgatggtatttggggtatcacggtcctatggattaaatgtttgtctcctcccaaactcaaatttaaatttaattg

SEQ ID NO: 971197 - DNA, 120 bp, Artificial Sequence
  ENSG00000284808_18 (sequence is synthesized)
ccattgtaacagtattaagaggtgattaggctatgagggctgtgcactcactcataggttaatgctattatttggggagtaggttcattatcaagggagcaggtttcttataaaaggatg

SEQ ID NO: 971198 - DNA, 120 bp, Artificial Sequence
  ENSG00000284808_19 (sequence is synthesized)
agttaggcctccttctgcctctctctgtcacctaccttttgctcttctgtcatgggatgatgcaggaagaattccctagcaagataccacctcctcaatcttggacttctcagcctccag

SEQ ID NO: 971199 - DNA, 120 bp, Artificial Sequence
  ENSG00000284809_0 (sequence is synthesized)
atttaaagggctgtggaatcaaaggccagtggcggacatgggcctcattctcactcgtccaacttctctttccagcaaaccataccttttctgcaattgtagctcatcatgtcagatgaa

SEQ ID NO: 971200 - DNA, 120 bp, Artificial Sequence
  ENSG00000284809_1 (sequence is synthesized)
atgtcagatgaatgaaactgattaaggcaactctctcctgccaacttcaccatatttggatgcagcgtctcatccttccatctcacctgtccagaaaagaaagaaagaaagaagaaagaa

SEQ ID NO: 971201 - DNA, 120 bp, Artificial Sequence
  ENSG00000284809_2 (sequence is synthesized)
gactgggccagactgcaaggtgacgatgtaagaagagtttatctacctttattcttgattgcagcataaatgtaaggtaagctgctccttctgtagacaacccacttgttgtgaggcttt

SEQ ID NO: 971202 - DNA, 120 bp, Artificial Sequence
  ENSG00000284809_3 (sequence is synthesized)
ggccctcatgccgctgttcctgcaagcttttgctctaagaagaaatcttcgtgctcagaaaaaaaatttgtcataaaaatgatgcatgcttggaaagtgtgactatgacttggcattttt

SEQ ID NO: 971203 - DNA, 120 bp, Artificial Sequence
  ENSG00000254946_0 (sequence is synthesized)
ggcaacccgcttgagtcagcttctgcattgtggaaggtttgttctttctctctttgcagtaaatcttactgctgctcactttttgggtccacactgcgtttattagctgcaacgctcacc

SEQ ID NO: 971204 - DNA, 69 bp, Artificial Sequence
  ENSG00000254946_1 (sequence is synthesized)
cgaacccaccagaagcggcctttaagaactgtaacactcacctcgagggtctgcggcttcattcttgaa

SEQ ID NO: 971205 - DNA, 81 bp, Artificial Sequence
  ENSG00000254946_2 (sequence is synthesized)
ttactccagataatcagcgccattttctgaagcttgagatgcaggaaaagaggagtgctatccattagatggagacaggaa

SEQ ID NO: 971206 - DNA, 120 bp, Artificial Sequence
  ENSG00000254946_3 (sequence is synthesized)
cacatcaggaataggaggggtgtgtccccacagcactgtgtacacgcagcggtcattgagaaatcctgacataaagaaggtatctgggagataaagttctgcaagcgatgattactagca

SEQ ID NO: 971207 - DNA, 120 bp, Artificial Sequence
  ENSG00000254946_4 (sequence is synthesized)
cttaagttctctttttgttgaaaggaagaatcccagattgaacagtgcattgaatgatatgacaagcaagtacttgatccctgtccagctggaggggggattgtacccatcagcagcttt

SEQ ID NO: 971208 - DNA, 120 bp, Artificial Sequence
  ENSG00000254946_5 (sequence is synthesized)
ttagctaaggacgtctttatatttcccttctttgtctgggcctctctagttcctccttttacttcatgtcagcactatatagtaggtatgccaagtggttttgaaatttaaattacagtc

SEQ ID NO: 971209 - DNA, 120 bp, Artificial Sequence
  ENSG00000254946_6 (sequence is synthesized)
tctttttcagatgttattggaaagaacatgtaatttataaccacgtgttaggagtacaggatgttcatggtccactgccaatttttcttttgtaaagttaataaaactttcataaaacac

SEQ ID NO: 971210 - DNA, 120 bp, Artificial Sequence
  ENSG00000254946_7 (sequence is synthesized)
atcaaaattatcattttactgtttttaccagttgttgactccagcagcttctgcttcaggtatttttttaaaccagcgtgaatagactatgaccacaactcaagtaaatcttactgctgc

SEQ ID NO: 971211 - DNA, 120 bp, Artificial Sequence
  ENSG00000254946_8 (sequence is synthesized)
cggaaatgcagatgataactcctgcctccagacccctctctgagatgattctgagacacatataaatgggctttgcaaactgtgggcagtagatgtgagaactcttcatcttccagacag

SEQ ID NO: 971212 - DNA, 120 bp, Artificial Sequence
  ENSG00000254946_9 (sequence is synthesized)
gatccaaggtcctttggaagggacagtgagcggactgcatcctgcttgcatgaagaccctgattccctcaaatgttgaaagaggttgaatttacaaataaattaagaaattaagagcaaa

SEQ ID NO: 971213 - DNA, 120 bp, Artificial Sequence
  ENSG00000254942_0 (sequence is synthesized)
ggggcccccgagctggtgaccatcgtggagcggctgctgagagattcggagcgttgccggggtgtctccatccacgtgggcagcggcccgtgctgcatggcagccacgcgggccactcgg

SEQ ID NO: 971214 - DNA, 120 bp, Artificial Sequence
  ENSG00000254942_1 (sequence is synthesized)
aacatgctgcagtagaccacaagtatgaggagcaggggcaacagaaagtaaaggacagcaaagaccaccacaaaaagctggcagtaggcactgtggctccactggagtgaacagcctggg

SEQ ID NO: 971215 - DNA, 120 bp, Artificial Sequence
  ENSG00000254942_2 (sequence is synthesized)
agccccagcgtcatgcgcacctcgtagcgcatggggtggactacgtaatagtagcgctccacattgatggctgacaccgagaggatggccagggctggtccttggaaagccacccttctg

SEQ ID NO: 971216 - DNA, 120 bp, Artificial Sequence
  ENSG00000254942_3 (sequence is synthesized)
tggggataccttggcactcaccaccaggctctgggtctggcccccattcctggcctagtcggcaactcctacctttgctgagcagtcccggctcccatgtgatagctcctctcagctgat

SEQ ID NO: 971217 - DNA, 120 bp, Artificial Sequence
  ENSG00000254943_0 (sequence is synthesized)
ttctttttggccttccaagcctctgcaggggccagagacaagcggggagaagagagtcccctgcggctgcagaggctgtctgagctggaacaggggctggagagctgggccagctggggt

SEQ ID NO: 971218 - DNA, 120 bp, Artificial Sequence
  ENSG00000254943_1 (sequence is synthesized)
cttcgggagtcccaggagagcactgtgacataaatgacaggaggaattatgcttttcacagactccttaagatctctgacctggtcccctaaacccagcacccctttcttattcctggat

SEQ ID NO: 971219 - DNA, 120 bp, Artificial Sequence
  ENSG00000254943_2 (sequence is synthesized)
gaggggaaatccgagtcacccagagctgggaggtagtaatgacagacagctatgtatgctgaggtaaaaagaagacctgaagacaaatctggtttgacaatctctatctgtcacagctta

SEQ ID NO: 971220 - DNA, 120 bp, Artificial Sequence
  ENSG00000226782_0 (sequence is synthesized)
gctaaagttgggggagggcatcttaggccagaagaataacaagacaccagtggtggaaatggaaaacatgtagtgaagatagcacatggagcctgaacggggaagtcttacaagacaggg

SEQ ID NO: 971221 - DNA, 71 bp, Artificial Sequence
  ENSG00000226782_1 (sequence is synthesized)
agcacatggagcctgaacggggaagtcttacaagacagggttggaatgcaatggtgcgatctcagctcaac

SEQ ID NO: 971222 - DNA, 120 bp, Artificial Sequence
  ENSG00000226782_2 (sequence is synthesized)
accgccatggaaaggtgtgaaaccgtaaccacgaggactctcacatttacatgttactgactagcgaatgtctaggcctaaaacatctgccctcttatagctgttttattattatgtaaa

SEQ ID NO: 971223 - DNA, 120 bp, Artificial Sequence
  ENSG00000226782_3 (sequence is synthesized)
catggctacaagatttctgacataaaatagtagatgactcagtgtcttcaaatgattaattgctggtttttttgcctgacctctttcttcatttcttcaataataaatctattgtcatgc

SEQ ID NO: 971224 - DNA, 120 bp, Artificial Sequence
  ENSG00000226978_0 (sequence is synthesized)
tcctttggcaactgcaccccctcttccttctccttttttttcaatctaatatgtgggacataccaagtgatgagatcctttctggcatcctaagaaaatgccaactatagaacaacagat

SEQ ID NO: 971225 - DNA, 120 bp, Artificial Sequence
  ENSG00000226978_1 (sequence is synthesized)
acgtttggaatagagctcagttcaaactcttcctattgcaaacgaggaaatggctatagaagcagagtgcccaaagaatgcgaatgcaactggcttcatcttgaaagcgacactctgaag

SEQ ID NO: 971226 - DNA, 120 bp, Artificial Sequence
  ENSG00000226978_2 (sequence is synthesized)
aaattacccataatttctccctcttggacatgcagaattatcctgttcttgtatttttctggccagcttctccaactttccctttcttgtttgcaactaattaaactttatggataagaa

SEQ ID NO: 971227 - DNA, 120 bp, Artificial Sequence
  ENSG00000259607_0 (sequence is synthesized)
gcaggtgagaaatggtctggttttattgagaagctgttggtcatttgatggaaagacacatacggtacaaaattacaggtggtttagttcattacatgatacaaatcattagagtcttta

SEQ ID NO: 971228 - DNA, 120 bp, Artificial Sequence
  ENSG00000259607_1 (sequence is synthesized)
caagtcattagagtctttggattttttaaactcccatttactgtgtaccaaatcaatataatcacagaatcaaagtcacttctttatatgtgaactcttcgcatttacacgaatccacac

SEQ ID NO: 971229 - DNA, 120 bp, Artificial Sequence
  ENSG00000259607_2 (sequence is synthesized)
ggtgggcgggcaggcgttcttgggaggtgagtctgctggtcagggaggcaagaaaagaagatagaagacggaggccagcccgccctggcccaccactctggagaccgcacctcctgcctg

SEQ ID NO: 971230 - DNA, 120 bp, Artificial Sequence
  ENSG00000259607_3 (sequence is synthesized)
ccaagtgctggcccggggtcagcggggctcactgccttggtgaccacgtcactgcacatccctctttcccagccacaagctgacattagtccgcaccgagaagcaagagtgaacagggcc

SEQ ID NO: 971231 - DNA, 120 bp, Artificial Sequence
  ENSG00000237579_0 (sequence is synthesized)
gttttactctgttgcccaggctggggtgcaggggcatgaacatggctcactgcacccttgaccttctgggctcaagcgatcctcttgcctcaggcttctgtttagctggggccacaggcg

SEQ ID NO: 971232 - DNA, 120 bp, Artificial Sequence
  ENSG00000237579_1 (sequence is synthesized)
ggcgggcaccaaaatgcctggctaatttttttgtttttattttggtagagacgaggtctcactttgttgcccatgctgttctcaaacttctcggctcaagtgatcctcccacctcggcct

SEQ ID NO: 971233 - DNA, 120 bp, Artificial Sequence
  ENSG00000237579_2 (sequence is synthesized)
aagtgctgtgttacaggcataagccactgcacctggtctctacttcgttcttactcttcttcccgactctgtgatcagctctttttcctcactgacatctcttatcaccagcagaggcct

SEQ ID NO: 971234 - DNA, 120 bp, Artificial Sequence
  ENSG00000237579_3 (sequence is synthesized)
accactagacaccagtggttctacttccctggttgagccctggtagatacggttcctgagaacttcatggagcagtttctgcaccaaacctgccctctctacctctggacctctacgtgg

SEQ ID NO: 971235 - DNA, 120 bp, Artificial Sequence
  ENSG00000237579_4 (sequence is synthesized)
aaaagagaagtccgtattggaagccttgactctggcccagacatttctgctgtacctcatgtagggtgagcccaggacctgccacactgtgccagcctcgcccaagccaccccccagcca

SEQ ID NO: 971236 - DNA, 120 bp, Artificial Sequence
  ENSG00000237579_5 (sequence is synthesized)
ctcagcaggctgaggcacctgaggctttcattttaattatgaaccacttcaaagcctttctggaagcagtctctgcaataaccaacctgggttctctcctaatgtggggattgtcctgga

SEQ ID NO: 971237 - DNA, 120 bp, Artificial Sequence
  ENSG00000237579_6 (sequence is synthesized)
gcccaggccttccaaggctcctccgcccgccaacatcacctacctcatcttcctcttcagcacatccccaacattgtctaagcggtaactcacctgagcaaagcacttgacacggattca

SEQ ID NO: 971238 - DNA, 120 bp, Artificial Sequence
  ENSG00000237579_7 (sequence is synthesized)
ttcatttactcctcacaacaacctgatgagagcactgattaacttcaaaggggaaaaacaataacctttacaatggatagatctggcaggaaccatgttaaccaagtgatcaaaggtagc

SEQ ID NO: 971239 - DNA, 120 bp, Artificial Sequence
  ENSG00000237579_8 (sequence is synthesized)
atcaccaataatggggcaaaccgacatcctgtgcttccccattgatgcgccgagaaggacacagcattgctcatgcagcatccttgtcaaaaatgcgtaaacggaatctaatcatgagaa

SEQ ID NO: 971240 - DNA, 120 bp, Artificial Sequence
  ENSG00000237579_9 (sequence is synthesized)
aactgccagacagccaaactcttcagaaatgtcaatataatgaaaggcaacaaagattgagaataactttaccaggttaaagaaaactaaaaagatatgacaactgactgcaacgcagaa

SEQ ID NO: 971241 - DNA, 120 bp, Artificial Sequence
  ENSG00000237579_10 (sequence is synthesized)
tcctggaccagaccctggatctggtcaaaagaaaaatgctttaaacgacagtattgggacaaagggtaaaatttgaatgtggatcatgtaatagatgaataatatattgtatcaatgata

SEQ ID NO: 971242 - DNA, 120 bp, Artificial Sequence
  ENSG00000237579_11 (sequence is synthesized)
gagataatggcagctaattctagatgttgagtcaactccattttgcaaccactacagtagtgattgattctgaaaagaatcatcaatggatgctaaaactattgggcaaaaatttgctgg

SEQ ID NO: 971243 - DNA, 120 bp, Artificial Sequence
  ENSG00000237579_12 (sequence is synthesized)
aagaggtattttagtttcctgactcgaagcaggtgagcccaggacctgccacactgtgccagcctcgcccaagccaccccccagccaggacgcggtctttcctgactcagcaggctgagg

SEQ ID NO: 971244 - DNA, 120 bp, Artificial Sequence
  ENSG00000237576_0 (sequence is synthesized)
cccggttccgtgtggctaaagagtgagcctctcatatctccatgctgaatttcctcactcattcacaaccctcctttccatttcaagaaatctttctgttcccacaagcctgggagggcc

SEQ ID NO: 971245 - DNA, 120 bp, Artificial Sequence
  ENSG00000237576_1 (sequence is synthesized)
tttgagtggggcatattgggacccgtgttcacaccagcacttagtttggaggaagcacctggaggagatgcagagtccagatgtgcgccctctgccggaagcctactgcaccaggacgta

SEQ ID NO: 971246 - DNA, 120 bp, Artificial Sequence
  ENSG00000237576_2 (sequence is synthesized)
tggagtggcccttaacgcatttggaaatcagtcttcactaaaaaaacttcctccaaaatgttctttaacagccctttaaaagccattgtttcaaaacagtccaaggtggtgaacaattaa

SEQ ID NO: 971247 - DNA, 120 bp, Artificial Sequence
  ENSG00000237576_3 (sequence is synthesized)
tattttcgatttacatgaagactctggagtaggaattacctgagttggaaactcagttctactctattggtatcaggttgcattctgtatcatcattaaaattttcagaaaaactctcaa

SEQ ID NO: 971248 - DNA, 120 bp, Artificial Sequence
  ENSG00000237576_4 (sequence is synthesized)
cagatttagggcaaagttaacacttcaaaaatatctccagtaattgagtaaattgctcatctgtcaaattggctctttggcaaattactctgcttgcacatattaatagccaagcttagc

SEQ ID NO: 971249 - DNA, 120 bp, Artificial Sequence
  ENSG00000237576_5 (sequence is synthesized)
caacttgaaatatggagatttactggaaatcacagtgaagtgaagagagaggcaagagcagaattgaaattcccacctggcagcaaaagagagttatgcagagcctatcaggacccgtgt

SEQ ID NO: 971250 - DNA, 120 bp, Artificial Sequence
  ENSG00000237574_0 (sequence is synthesized)
gtgcccgtcttccctgcgacggttttggggtggaacaggagtggctcctcagggggaaatgaaaggaactgaggagctccagtcgtgagaaggccaatgaagcaggcaccgccagttggg

SEQ ID NO: 971251 - DNA, 120 bp, Artificial Sequence
  ENSG00000237574_1 (sequence is synthesized)
aaatggacctccttggatgctgcattgttttctctggcccagctcctgcttggggcctgatgtacaccctggatggtggctacaggtggggcaccctgtgctgctctgcatctccatcca

SEQ ID NO: 971252 - DNA, 120 bp, Artificial Sequence
  ENSG00000237574_2 (sequence is synthesized)
gtcccccatctccacccaaaacagctcagttccccagagaagctccctggaaaccgggaggctgacttcttcaccaactgcagaaccacctgaggccacctggcagaatgcgatccagga

SEQ ID NO: 971253 - DNA, 120 bp, Artificial Sequence
  ENSG00000237574_3 (sequence is synthesized)
ctgcacgtggcattccgctgccgtgtctcagtgggatccttccatccagaacggctcctccgtctttctcctcctctcataattttgacagttttaaagcatccaggctatttttgtctt

SEQ ID NO: 971254 - DNA, 120 bp, Artificial Sequence
  ENSG00000237574_4 (sequence is synthesized)
tcataaccttgacactcttgaagagtactggccaattattttgtagaatgtcctccaacttgagtttgtctagtgctttctcacaatgagaatgaggttttgtgtttttggtgagaacac

SEQ ID NO: 971255 - DNA, 120 bp, Artificial Sequence
  ENSG00000237574_5 (sequence is synthesized)
cacagaagcaggttatacccttccccatgcattatatcaggaggcacatgtgatattgctgcatcccattactggagacgttaactttgagagatgatgtagcaaagatttctccattgt

SEQ ID NO: 971256 - DNA, 120 bp, Artificial Sequence
  ENSG00000237574_6 (sequence is synthesized)
aaaatcctatttttccttctgaacttaatgagtatcttacaaggagctgtcttggagactatgtaaatatcttgtttatcatcatactttcaccaaccaattttggcattcattggtgat

SEQ ID NO: 971257 - DNA, 120 bp, Artificial Sequence
  ENSG00000237574_7 (sequence is synthesized)
tcttgtctgcaatattaattaccactgtgttttccaacagatgatttttctactttcataattccttctccatttattaattgtaattcagtggtaaggaagagctgtcccttctctccc

SEQ ID NO: 971258 - DNA, 120 bp, Artificial Sequence
  ENSG00000237574_8 (sequence is synthesized)
aattacttatgcaattatttcagtatagactcatggatatttagtttattctaccagtgataatccatgaccaacatcatttgtatcattgttccaactgtcccaggtatggccaatgta

SEQ ID NO: 971259 - DNA, 120 bp, Artificial Sequence
  ENSG00000237574_9 (sequence is synthesized)
cttaatcatttctccaaagaactctgcttcctttattgagggaatgtatttagaatctaagatctgggtgctggatgtcctcattgttactgaggtgtcactgtgtctagggcctctcag

SEQ ID NO: 971260 - DNA, 120 bp, Artificial Sequence
  ENSG00000237574_10 (sequence is synthesized)
cagacagagctagggaatatgggttaccaactctgaaactattttatgggtattctgagattgagcaaataagtaaatacattgtatttagtgggagggaggcatctcactgtcaaagag

SEQ ID NO: 971261 - DNA, 120 bp, Artificial Sequence
  ENSG00000237574_11 (sequence is synthesized)
agaactacaaataaaaagggaagggcaaagtgaaccctattgtgttagattagaatcagaggcatcagcatgagctcctgatttttagtgtatgtacagattgacagatatagaaataaa

SEQ ID NO: 971262 - DNA, 120 bp, Artificial Sequence
  ENSG00000237574_12 (sequence is synthesized)
tatagaaataaatatgacctggcaattccattcctaggcatatacctagcagaaatccatggtcataaaaaaaaacatggacaagaatgatcatgctgggagtggtggctcacgcctgta

SEQ ID NO: 971263 - DNA, 120 bp, Artificial Sequence
  ENSG00000237574_13 (sequence is synthesized)
agctacttgagaggctgaggtaggaggatggcttgagcctgggagtcagagactgaagggagccaagattgtaccactgcactccaacctggggaacagagtgagaccctgaagaaagaa

SEQ ID NO: 971264 - DNA, 89 bp, Artificial Sequence
  ENSG00000237574_14 (sequence is synthesized)
accactgcactccaacctggggaacagagtgagaccctgaagaaagaaagagagaaagagagaaagagaaaagaaagaagaaagaaagg

SEQ ID NO: 971265 - DNA, 120 bp, Artificial Sequence
  ENSG00000237574_15 (sequence is synthesized)
cataggatcatagctgcactattatcatagtcctaagctgtaaaccacgcaaattcccgttgacaccagactaaagaatgaatgaccgaccactacatgcaacattatggatgaaaatac

SEQ ID NO: 971266 - DNA, 120 bp, Artificial Sequence
  ENSG00000237574_16 (sequence is synthesized)
aattgcggaaagacattttctcaaaaaatgctgtgtgataccatttatataaagcacaaaccaggcaaattaatccatgtcacaagaactcagtatcaattttctgcaagagaaacgagg

SEQ ID NO: 971267 - DNA, 120 bp, Artificial Sequence
  ENSG00000237574_17 (sequence is synthesized)
gggtttctgagctgctggtagtgttctgtcatttggtctgggtgctggttgcattggtgtgtctaattcttaaaatgtatatacattattcatcagtaaaaagttttttaaaatattcat

SEQ ID NO: 971268 - DNA, 120 bp, Artificial Sequence
  ENSG00000177406_0 (sequence is synthesized)
gttcttctggcccacagcgcccctcctgtgaccctcagcgaccctcctgtcctgccctccggcggcgcggctgtctggagactctgcaccgtcgcggcctcgcagcctcgcagccccgcg

SEQ ID NO: 971269 - DNA, 120 bp, Artificial Sequence
  ENSG00000177406_1 (sequence is synthesized)
ccgggtggggaggggagggtggcgttcctgagtccgcggaggaaagggtcgcagctgcagtcgcgccagccctcgggcctacatccgctccgccgcgacgcggctcacaaactagggagg

SEQ ID NO: 971270 - DNA, 120 bp, Artificial Sequence
  ENSG00000177406_2 (sequence is synthesized)
ggagaagggaagaaagacccgattcgggaacacggctttgtccctggaactgtacctcatgtcccctcacttaatcctcccaagacctgtggggcgtgtcgtcattttagggctggagat

SEQ ID NO: 971271 - DNA, 120 bp, Artificial Sequence
  ENSG00000177406_3 (sequence is synthesized)
gaggaaaccgaggctcggagagatgaagcgttgtacggccaccgagcggctgctttgcaacgaagccaaagccaacgttttgttcttagcggcggtcgtttgagccacgcctcaccgcaa

SEQ ID NO: 971272 - DNA, 120 bp, Artificial Sequence
  ENSG00000177406_4 (sequence is synthesized)
cgagtctgccatcagccaagaggtcacatcttttctggaactcgctcccccctcacatcatgggagcagtcagtctactcttccagtagaaactgttttgccacttttggggggaatctt

SEQ ID NO: 971273 - DNA, 120 bp, Artificial Sequence
  ENSG00000177406_5 (sequence is synthesized)
gagctaccagctcatcgctcagatggagtgaaggtacctgagcgcaggaaccatggtcttcattgctgcctcagcattagcggaagtgccacgggccggctcccagggggccagagtttc

SEQ ID NO: 971274 - DNA, 120 bp, Artificial Sequence
  ENSG00000177406_6 (sequence is synthesized)
ccaggaacaccattgagtaccactgaactagagtctgcaagttaaagtaaggcaagaaggaaaaccggaaacaactgtaaaaacctgacctttcgtcaccttaatactggccatcattta

SEQ ID NO: 971275 - DNA, 120 bp, Artificial Sequence
  ENSG00000177406_7 (sequence is synthesized)
tcgagtgcttattatgtaacagacattgttctcagtgtgtgagtgcagtgttcctcaaacctaaatgtgggcctgaatcgcagcggatcttggtaaaatgcagtttctcattcagtacct

SEQ ID NO: 971276 - DNA, 120 bp, Artificial Sequence
  ENSG00000177406_8 (sequence is synthesized)
ctggggtgcggcctgagattctgcatttccaacaagctcccaggatactttgtatagaaaggctttggtgtattaactaactcgatcttcttaataatcctatgaaatactactgctatt

SEQ ID NO: 971277 - DNA, 120 bp, Artificial Sequence
  ENSG00000177406_9 (sequence is synthesized)
cccattttacagatgaggaaacagaggttaagcatatatgaacttacatcaaaataaatagactgcagggcaaggagggaggggagaatagtgtgggcagtgtacagtgcagaaacaaag

SEQ ID NO: 971278 - DNA, 120 bp, Artificial Sequence
  ENSG00000177406_10 (sequence is synthesized)
gcagaggaaaaaggatttacagaaagcctggcatacagggcagggggacggggcctgcacacggggctgtttcaccgttagacgttataagcacagtacttggggctatgggcttcctga

SEQ ID NO: 971279 - DNA, 120 bp, Artificial Sequence
  ENSG00000177406_11 (sequence is synthesized)
aggtcccaagtatttgagacctgaaaaaaatttattgacacctacataggaaaagtgaacttttaaattaataattccaaaattcaaatcacgaattgtttcaaaaattttacatgatag

SEQ ID NO: 971280 - DNA, 120 bp, Artificial Sequence
  ENSG00000177406_12 (sequence is synthesized)
aattcatatttagtaagcgatacgggtatattttaatgcatttgattttaaaaacggggtagggcctactaagaacaggccaagccctggccccagtgggtttggatataatcctgaggg

SEQ ID NO: 971281 - DNA, 120 bp, Artificial Sequence
  ENSG00000177406_13 (sequence is synthesized)
cagctgggaaccactgagagaagcaggagaatgttctctgtggctacagtgaggagaatggattggagggaggccagactggaggcccagtggctagagaccagataggcagttacagtc

SEQ ID NO: 971282 - DNA, 120 bp, Artificial Sequence
  ENSG00000177406_14 (sequence is synthesized)
ttccagactgcgagacaatctctctttagtgccaagattagcataaaatcatagcattatataacccaattattctttgattcctgcatccccaatctgactcagcattctaaatttact

SEQ ID NO: 971283 - DNA, 120 bp, Artificial Sequence
  ENSG00000177406_15 (sequence is synthesized)
taagatctggggacaagggtttttggcaaatccttgaaggcaaatgatgttacagtcaatcagtatatgccttgagccagacagacatgggtacgggcctcagttctgctgcttgctagc

SEQ ID NO: 971284 - DNA, 120 bp, Artificial Sequence
  ENSG00000177406_16 (sequence is synthesized)
tatgtgactttgcacaagtgatttaacttctctgggccttggattccttactggtaacacgagcataatcgattcctcacagaattaagtgagaaaactatgtatgtaggacttcttatg

SEQ ID NO: 971285 - DNA, 120 bp, Artificial Sequence
  ENSG00000177406_17 (sequence is synthesized)
gagtgggtacttagaaataaatggtagccgttatcatttatgtgcctttgttctgaaatctgcttaagttttctctaggaagtaacagagggtagaataaattatttagtattttcatca

SEQ ID NO: 971286 - DNA, 120 bp, Artificial Sequence
  ENSG00000177406_18 (sequence is synthesized)
atcttctgagataaaaattattatcctcattttgcagataaggaaaagggctcagagattagatcacagctctgtgaagtaggggcacaaagtggtcaacctggaagagctggactttat

SEQ ID NO: 971287 - DNA, 120 bp, Artificial Sequence
  ENSG00000177406_19 (sequence is synthesized)
tttgcttgcacttctgtccatgcactctctccagcagttgacatttgccctctttgatggctccacgaccaatttcccttagtcatggcatgagtcagctgtgagggctgatggcacacc

SEQ ID NO: 971288 - DNA, 120 bp, Artificial Sequence
  ENSG00000177406_20 (sequence is synthesized)
accgaatactctgctgtggcgccactagcctccatttaccttcttctccaacgttttccagcctccctcataccttgccccccagttttatagcttctggattttccttattaaagagct

SEQ ID NO: 971289 - DNA, 120 bp, Artificial Sequence
  ENSG00000177406_21 (sequence is synthesized)
gctggcccggccgccgcggcctcttccgcccggcgcccgcgcattcctgccattcccccgagtcggcccgcgggctacggccgcctgcggagcgcaggaaccttcacctcccgaggacag

SEQ ID NO: 971290 - DNA, 120 bp, Artificial Sequence
  ENSG00000177406_22 (sequence is synthesized)
agcttcaagcctgacgttctaggggggagccgcttcttaagtacgtgctaggatcaagggtgcatttgcaaacttttcaaaatgccttagaggagtcctaaccagccccagggtgtctga

SEQ ID NO: 971291 - DNA, 120 bp, Artificial Sequence
  ENSG00000177406_23 (sequence is synthesized)
ggcacgctgcccacaggacacttgctctctctttcttgtgaccccaacatgtcagctggcaagactcaacattcctgtctgggactgagcagcttgaaccacttgtatgagtcacagaaa

SEQ ID NO: 971292 - DNA, 120 bp, Artificial Sequence
  ENSG00000177406_24 (sequence is synthesized)
aggagaatcatacccccattccaccaccccactccaacccctccactgtggctccaatgttacagaccactcctaacttcagtcccggaagaatggaaggaaggctgcaacttaagagac

SEQ ID NO: 971293 - DNA, 120 bp, Artificial Sequence
  ENSG00000177406_25 (sequence is synthesized)
acccaaatggcgcgggaggaggaagaaggggtcagcttcaagcctgacgttctaggggggagccgcttcttaacccacaggacacttgctctctctttcttgtgaccccaacatgtcagc

SEQ ID NO: 971294 - DNA, 120 bp, Artificial Sequence
  ENSG00000177406_26 (sequence is synthesized)
tggcaagactcaacattcctgtctgggactgagcagcttgaaccacttgtatgagtcacagacaaatcccagcggatctaagcttttgaaaacttgaccttttgtaaaaatgaggaaact

SEQ ID NO: 971295 - DNA, 120 bp, Artificial Sequence
  ENSG00000177406_27 (sequence is synthesized)
gaagttatagccctttctggagtgtggaagctttggaaacatcgcaccacagtgaagcaagccggggagggtgccagcccaaaccagaaccaagtgtgggcatttcatgccatgaacaca

SEQ ID NO: 971296 - DNA, 120 bp, Artificial Sequence
  ENSG00000177406_28 (sequence is synthesized)
ctcttgctgattccatctcgctgccctcaagtcccttcacacgcaccgggtgccgggaacagactgcgtgggctcctccaggctccgccgtctgagtctctgctgctttcttcgggtggg

SEQ ID NO: 971297 - DNA, 120 bp, Artificial Sequence
  ENSG00000177406_29 (sequence is synthesized)
gctggcgggacagacctgccattcatccctctgatgtgggatgcccgtcttggctgcagcctctgggggaggtgtgcacctgcacacacgtgtgagtgtatgtgtgtgcacatgtgtgtg

SEQ ID NO: 971298 - DNA, 120 bp, Artificial Sequence
  ENSG00000177406_30 (sequence is synthesized)
ctccaggaggtggcacatggcacactgataggtgaccttttgagttggtagtgacagcatcattttcaccagtggctccagtgaccttccagtcccagcggagccatctgaggtcaccca

SEQ ID NO: 971299 - DNA, 120 bp, Artificial Sequence
  ENSG00000177406_31 (sequence is synthesized)
gcctgctttgagctagtagctttatgactggcaaagaaatcctgcatgtttatcaagcaaattgaaaaacagcctgaggacaacgctatctgacttcaccgctgggtccagtccccagtc

SEQ ID NO: 971300 - DNA, 120 bp, Artificial Sequence
  ENSG00000177406_32 (sequence is synthesized)
gccacgggtggagtgacctccagcacagtctcaatactgaggcagagggatttccgttgttctttgctttgttccctatatccctaaaagtttttaaaaaaattgtagtttacctaatag

SEQ ID NO: 971301 - DNA, 120 bp, Artificial Sequence
  ENSG00000177406_33 (sequence is synthesized)
gctccaaagcataggctttgttctgcaaagtgagtgaacaatacgtttttactgacggattgtttgattccttcaactcctcccttgattagccatagagggagcagggagtagttgtac

SEQ ID NO: 971302 - DNA, 120 bp, Artificial Sequence
  ENSG00000177406_34 (sequence is synthesized)
cttcgaagcttgtttatgcaaacagtggtattctccctacttttaaaataaaattaccaggagggagtctttttttagaaagttttttttttcctctcctgtttaccttagagcccaaaa

SEQ ID NO: 971303 - DNA, 120 bp, Artificial Sequence
  ENSG00000237571_0 (sequence is synthesized)
aggtgaaagatcttgataccacacaggtataattacaatctgcaaacctactcaaggggagttgcaggtgaagataaggaagtcagcctcattccattacctaatcagattctcagccaa

SEQ ID NO: 971304 - DNA, 90 bp, Artificial Sequence
  ENSG00000237571_1 (sequence is synthesized)
gggtcttgctctgtcacccaggctggagttcactggcatgatcatggctcactgcagcctccatctcctggactcagagacggagcatct

SEQ ID NO: 971305 - DNA, 69 bp, Artificial Sequence
  ENSG00000237571_2 (sequence is synthesized)
atctggactcaagttatctgtgcttattcttttgtttgctattaaaatataagcattttctagtcaata

SEQ ID NO: 971306 - DNA, 120 bp, Artificial Sequence
  ENSG00000261231_0 (sequence is synthesized)
gtacaaaccgatggcatctcccaggcatttctgaaccattttcacgtgcctctactctccggccgtctccacaccaccctgtgttctgccaaagggagctaaaatgagccctgttttacc

SEQ ID NO: 971307 - DNA, 120 bp, Artificial Sequence
  ENSG00000261231_1 (sequence is synthesized)
aaaccactcaagcacggctgacacagtgtgttgctgcagaaggatcggggtgggtgggagtagggacagtgcagagagaaagaaaggagtgcatgctacatctctccctctccaagagga

SEQ ID NO: 971308 - DNA, 120 bp, Artificial Sequence
  ENSG00000261231_2 (sequence is synthesized)
cttggcagaaagcccatgcatgtttcaagcttgttttgacagttccatgacaggagtcatagggctgtagctgtagaaagcccaagaaacacatttttgttatcccatcaaaatcttccc

SEQ ID NO: 971309 - DNA, 120 bp, Artificial Sequence
  ENSG00000261231_3 (sequence is synthesized)
ggggagctacattgttggggcaagttatgtgtcatcactggcatcaaaagagaaaaagaaatgaatgatctggctcaggtgccaaggctctcgtcctgaggagggaaatgacatttattg

SEQ ID NO: 971310 - DNA, 120 bp, Artificial Sequence
  ENSG00000261231_4 (sequence is synthesized)
agcccctgcaatagcaacaacaaattattattattgggcactttgcatgtgccaggcactgggataaaacacaggcatggactcagcaatcccgatgactgtccttggatacaggctgtg

SEQ ID NO: 971311 - DNA, 120 bp, Artificial Sequence
  ENSG00000261231_5 (sequence is synthesized)
ctaattatcccccttttaaagaccaggcaatggaggcgcagaggggccaggtgatgtgcccgaggctgcatggcagtaagtggcgaaggtgggatttgaactggtttgcctctcccagag

SEQ ID NO: 971312 - DNA, 120 bp, Artificial Sequence
  ENSG00000261231_6 (sequence is synthesized)
tccaaatccttccttgcaacgcagagctgctctgactgtaaggagtgtggggtctctcctcagagtcccagatactcaggatctcatttaatcttcgcaacaaccctgaggcataggggt

SEQ ID NO: 971313 - DNA, 120 bp, Artificial Sequence
  ENSG00000261231_7 (sequence is synthesized)
ttttagatctgctttacagatgaagaaactgaggtccagggaggcttagtgatgcccaaagccacacctccagaagcagcaggatctgcaggcacagctgggtgtcctggccctgggtca

SEQ ID NO: 971314 - DNA, 120 bp, Artificial Sequence
  ENSG00000261231_8 (sequence is synthesized)
agcgactttcctactgacttccacccacaagggctgcatgatggttaatactgagtaacaacttgatcagattgaaggatgcaaagtattgtttctgggtgtgtcttcgagggtgttgcc

SEQ ID NO: 971315 - DNA, 120 bp, Artificial Sequence
  ENSG00000261231_9 (sequence is synthesized)
gatggcctattgtgggaccttgtgatcatagaagaacaacctcctgcccttgccctgaatcctgaggaaggtgatgcactcacaacaagggcatcccagtcctggggaagggcaggaagg

SEQ ID NO: 971316 - DNA, 120 bp, Artificial Sequence
  ENSG00000261231_10 (sequence is synthesized)
gggaagggcaggaaggacccaccctcatcagtccctgacaactcccacccttgtccttggtcaccttggaaatgaaaaggttctcagaaggcagtcacatctggacagcattccttgact

SEQ ID NO: 971317 - DNA, 120 bp, Artificial Sequence
  ENSG00000261231_11 (sequence is synthesized)
acgcatcaatattccatcatgtcattgccggctgtgaggaggaaagtgacctcctaaacaaatccgtgcacgtgtaaatgacagctgctggtttgaatctgtttcttctcccaccacttc

SEQ ID NO: 971318 - DNA, 120 bp, Artificial Sequence
  ENSG00000261231_12 (sequence is synthesized)
ctcttctgatcaaagagcccaccttttcatttggaggaaccatttctcaactggtctcattctgtgaggtttagagttctctttttgaggcagttcaagtggaaaaagaaataacctaga

SEQ ID NO: 971319 - DNA, 120 bp, Artificial Sequence
  ENSG00000261231_13 (sequence is synthesized)
agcaagtaaaacaaccttattcaaaaacaacaaaaatccttcagggttttcacaaacgtagtgaattttcagcttgtaatttgctgtctccggtgagcgcggtgctgagaagacccgtga

SEQ ID NO: 971320 - DNA, 120 bp, Artificial Sequence
  ENSG00000261231_14 (sequence is synthesized)
tgctctctttgaagcccatttgcggcatgccccaggcctgggacctccattaagcaccagggcctcgccaagcaccgatatttgttgagtaccttccatttgctaaatactgtgctttga

SEQ ID NO: 971321 - DNA, 120 bp, Artificial Sequence
  ENSG00000261231_15 (sequence is synthesized)
aggcactgggaattcaatgatgagcaaagtagatatggtccttgacctcatggagcttgagggaaaatgaagaagacattcacctaaataaatagataattgcaaaatttaatacatcaa

SEQ ID NO: 971322 - DNA, 120 bp, Artificial Sequence
  ENSG00000261231_16 (sequence is synthesized)
atttaagtcaatattattgagatataattacatacaataaaattcacacatatgaagtctataggtcaatgacttttgacaaatgccaccatttatgtaaccaacatcctaattaagata

SEQ ID NO: 971323 - DNA, 120 bp, Artificial Sequence
  ENSG00000261231_17 (sequence is synthesized)
tagaacatttccatcatttccatctctccaaaagcttcctcacatgccttcccagtcaatctccccgtatctaaatcctactatctgcttaccacctctgattatttttgcctactttag

SEQ ID NO: 971324 - DNA, 120 bp, Artificial Sequence
  ENSG00000261231_18 (sequence is synthesized)
aatttcatataaatggaataatacagcatacattgttttgtgtatgttttctttccctcagcctaatgtctctgagattcccccatgttgctgtgtgtagcatgacctgttcctttatat

SEQ ID NO: 971325 - DNA, 120 bp, Artificial Sequence
  ENSG00000261231_19 (sequence is synthesized)
ggctgagtatgtacataagggtgtaccacaatttgtttatcaattcacctgttgatggacatttgggttgtttacagcttttgtcaatttttaataaagcttctgtatacatttgtgttc

SEQ ID NO: 971326 - DNA, 120 bp, Artificial Sequence
  ENSG00000261231_20 (sequence is synthesized)
atttcttatctggttgatgtggttgagaaaggtgctctctggtgatgggaagctaaggaaagcaggagtcgctttgccaggatttgagaggctccagtgtcttccctcccagaaagacgc

SEQ ID NO: 971327 - DNA, 120 bp, Artificial Sequence
  ENSG00000261231_21 (sequence is synthesized)
ccttccccaactacctactgggatacacttcccaccataatagccctttggattgaagccgtcatctctagaagagtcttgctaaatgcatgcattggcctaatggtaccgtaccacatg

SEQ ID NO: 971328 - DNA, 82 bp, Artificial Sequence
  ENSG00000261231_22 (sequence is synthesized)
tgctatagagaagaacaacctcctgcccttgccctgaatcctgaggaaggtgatgcactcacaacaagggcatcccagtcct

SEQ ID NO: 971329 - DNA, 120 bp, Artificial Sequence
  ENSG00000285869_0 (sequence is synthesized)
gctattattattcttattgacaaatgtctgaattccaggaggattctagaaattatgaagcagacagcatcattggaagaaaaaaaatgtgctgctgcccatagcaactactatgagacc

SEQ ID NO: 971330 - DNA, 120 bp, Artificial Sequence
  ENSG00000285869_1 (sequence is synthesized)
atcacactactgactgtagaggagtgattgtgaagaaggcagccactctcaccagctggggctgatgtgctggtatcttggccaatgagatgggaccagcactcttgtctgatgtctcat

SEQ ID NO: 971331 - DNA, 120 bp, Artificial Sequence
  ENSG00000285869_2 (sequence is synthesized)
tggtagccttcattagaggagcttcctgggctggatgagaaaaatgaagcccagagatgtaaagacacttgttcaagagtacacagcttctaggaggaagcactggattagaactgggtt

SEQ ID NO: 971332 - DNA, 120 bp, Artificial Sequence
  ENSG00000285869_3 (sequence is synthesized)
tcctgactccctatcctttgcagcccacaactttggagagcataggtctcaaagaccaagacaggaaccagaaggggtggacggagtcatgctccatggtcttaattggctagcccaccc

SEQ ID NO: 971333 - DNA, 120 bp, Artificial Sequence
  ENSG00000285869_4 (sequence is synthesized)
ttgcccttccctccttgtctcttctaccagcttgtgagctccaggcgggcagggatagtccttgttcatttctcgatccccaatgtccaggattagcactcactaagtgttgttgctgaa

SEQ ID NO: 971334 - DNA, 120 bp, Artificial Sequence
  ENSG00000285869_5 (sequence is synthesized)
aaactgcatcatacatggatgaaaggatcacccagggatgaccttgacatcacaaataaggaaggaacaggacagcctgtgaggtcactgcggtgacctccttcgcagaggacctctggt

SEQ ID NO: 971335 - DNA, 120 bp, Artificial Sequence
  ENSG00000285869_6 (sequence is synthesized)
tgcccttacctggacccagaccatcaagcttgtcacaggctccccccaggcatcccagacatgacatccaagacagtttcctgttactctccatcctgctggagagttccaatgacctat

SEQ ID NO: 971336 - DNA, 120 bp, Artificial Sequence
  ENSG00000285869_7 (sequence is synthesized)
ggcatgaatactccagacaaagtgttccagccttccccagaaacctcaaaagtctctcaggcactccaagacttccaaggccaaaaaactcaagatgtctttaaacaagaccaaagaccc

SEQ ID NO: 971337 - DNA, 120 bp, Artificial Sequence
  ENSG00000285869_8 (sequence is synthesized)
cctcaggaatctggccaagaagccccccaagaaggctaggcccagcacttttgagcctagatctttctactgccttgacctctgccccctcccaccagagcagctacaggccccagagcc

SEQ ID NO: 971338 - DNA, 120 bp, Artificial Sequence
  ENSG00000285869_9 (sequence is synthesized)
ccagttacccttatcaatctcagaggccacagatgtctatctccctgaggatttcccagctgagcccaagctcatggaccagtcctgggtgtccaggaagagcctgaaaccatccaagag

SEQ ID NO: 971339 - DNA, 120 bp, Artificial Sequence
  ENSG00000285869_10 (sequence is synthesized)
tcatcttatggagccacccactccagtggccaagcaccaaaaggcaaagacccgacataggagtgagaagaaacaaaacaaataaatgcttggcatctccatcgacctggtccttttcag

SEQ ID NO: 971340 - DNA, 120 bp, Artificial Sequence
  ENSG00000285869_11 (sequence is synthesized)
cccagacctatcagctccagacatcccaaaacatcaccctattccagaggccacagaattcatgattccagataattcgtgttagtctttgctattcaataaactcctggctgcagcttc

SEQ ID NO: 971341 - DNA, 120 bp, Artificial Sequence
  ENSG00000285865_0 (sequence is synthesized)
gaatcgttaaggaaagatggacacgagggtgtccaggcccatctccctccctcacggagggaagaggcagtgggcaggtgtgacagcagacgctgtggggcagtacttggagggcgatgg

SEQ ID NO: 971342 - DNA, 120 bp, Artificial Sequence
  ENSG00000285865_1 (sequence is synthesized)
ctttgaaagagagttttaaaaactggactgggaaatgcgagtgtcacgagatgccggcgagtggagacagaacactggaaggagcagccagccaagagaacgaggccccgaggaagggag

SEQ ID NO: 971343 - DNA, 120 bp, Artificial Sequence
  ENSG00000285865_2 (sequence is synthesized)
agagcaggcacgcagcggcgcggggaggagcggcatggaccgcagcagacggcctctccggcctgcgcacccgggtcagcacgctgagggaattaaacccattgcttcctctgggcagtc

SEQ ID NO: 971344 - DNA, 120 bp, Artificial Sequence
  ENSG00000285865_3 (sequence is synthesized)
aatggtgaagcggtcctctgagagtgaagaacaagcgtgtgagttaaggtgttgaagtagagtgaacacacctgcaggtgctgctgtgccgaatgcggagcgccagccaggcggggaggc

SEQ ID NO: 971345 - DNA, 120 bp, Artificial Sequence
  ENSG00000285865_4 (sequence is synthesized)
tctgtcttgccaagtctgttcagagtcccgtgggaagacggtgagggaacagaaccgcttagcaacatgaggtacagaaagccacagcaggttagaatcagcttggaccatcatgatctc

SEQ ID NO: 971346 - DNA, 120 bp, Artificial Sequence
  ENSG00000285865_5 (sequence is synthesized)
cccatccctcattccccctgcattacttattggtctgaagaggtttcactgctatgtttgacacagcctggaagctcaccaggatgttcacttaaacacacacctaagtacagacaggaa

SEQ ID NO: 971347 - DNA, 120 bp, Artificial Sequence
  ENSG00000285865_6 (sequence is synthesized)
agatggactgagaaggggttttgcaaaagttgtcataaaacaaaacatgccaggaacctaagccaagaaaacagactatttgctgtgtcactgtcacttggactgaaactcagtggacaa

SEQ ID NO: 971348 - DNA, 120 bp, Artificial Sequence
  ENSG00000285865_7 (sequence is synthesized)
ctcttgccaggtctaggaggtacaaactaagatgaattggctttaataattaaaggaaataactgtgctggcccgggatacaaagtcagatgggtaggttaaatccgctccagggaattt

SEQ ID NO: 971349 - DNA, 120 bp, Artificial Sequence
  ENSG00000285865_8 (sequence is synthesized)
gatgctgcttctattttcttaagtgatttcccccttttctgtttctttggtgtacaataaagttcactaagaatgtctccaccctctgaagctgtttcaaaggcaactagatacggtggt

SEQ ID NO: 971350 - DNA, 120 bp, Artificial Sequence
  ENSG00000285865_9 (sequence is synthesized)
atcaaggcaatgggaataaaatgggtaaagtccaagaaattggtaaaacttaggaagacagagaatcatatgaaattatccttccaggcacaagtctgtgcttaaatattagaattgggt

SEQ ID NO: 971351 - DNA, 120 bp, Artificial Sequence
  ENSG00000285865_10 (sequence is synthesized)
gtggggcaggagacagttttcgttttatgccttttgagatgccattttcccattctagataaccttgaatactctgaatgtaggggcagcactaagatgcaactgtgtccttctagcgga

SEQ ID NO: 971352 - DNA, 120 bp, Artificial Sequence
  ENSG00000285865_11 (sequence is synthesized)
gaagcagggctctaccataactagagctctgaggcgggatgtcagttagaggtctccgccacagcatcctgacactgcctctctcccttggtcctccaagccaccagggatgaccctgac

SEQ ID NO: 971353 - DNA, 120 bp, Artificial Sequence
  ENSG00000285865_12 (sequence is synthesized)
acactttgctcttctttcaaactgctcaacccattgtaaagagagcacctttttaggtgaaactccctagaaatgcaggtcttcaactctccatgtatctagtgaaaaaataaaacaaca

SEQ ID NO: 971354 - DNA, 120 bp, Artificial Sequence
  ENSG00000285865_13 (sequence is synthesized)
aaagagacatagcaaagtcccaggaagtataggaagaaaacacatctcctggctttttaacgcacaaatggtcccaccagaattctctgaaaatgcatgctaggttttagcagaagaaac

SEQ ID NO: 971355 - DNA, 120 bp, Artificial Sequence
  ENSG00000285865_14 (sequence is synthesized)
ctctgtaggaaaacacagctagagttactgtaagaaggtagtttaaaataaagcattaggtagtgtagttggagaaaatctaacgaatgaaatgtaaacaattagggtgtgtcctctccc

SEQ ID NO: 971356 - DNA, 120 bp, Artificial Sequence
  ENSG00000285865_15 (sequence is synthesized)
accaaacaaaaacaaaactgctggattacttttacggtgctgaagttgtttcatgactgtaccttgtcacccttctttactgtcctggttgtcaatttactgatggctttcttggctgca

SEQ ID NO: 971357 - DNA, 120 bp, Artificial Sequence
  ENSG00000285864_0 (sequence is synthesized)
gtgctgggattacaggcacgagccaccatacctggctcacggtttttaataacatacagatggatagaataataaattcaggtgcttgtatttgcatgttttaacatatatacatatatg

SEQ ID NO: 971358 - DNA, 120 bp, Artificial Sequence
  ENSG00000285864_1 (sequence is synthesized)
tgcatgttttaacatatatacatatatgttttctagctctgtctgctgagcaggcctacaagcaatgacactccgccaatgatactctagccaggagtatatattctgtccagatcttgg

SEQ ID NO: 971359 - DNA, 120 bp, Artificial Sequence
  ENSG00000285864_2 (sequence is synthesized)
tttccagtggcatcaagaaacaacttggtttctaagttccttttttctggaataaaaggaactgggagcttcttagagaatgactgatgccagggctgagatagggaaaatgtgaggaag

SEQ ID NO: 971360 - DNA, 120 bp, Artificial Sequence
  ENSG00000285864_3 (sequence is synthesized)
tgacaggggcaatgtcgaaacaacacagtgccaacttcaatgagttctcactggccaaatctgagccaatttgagcaaccaaataaactgttagcattagattgtagcctgtagaataaa

SEQ ID NO: 971361 - DNA, 120 bp, Artificial Sequence
  ENSG00000285864_4 (sequence is synthesized)
acagatatccactcattcatactgatataaattatcaaataaataaatggggaaaagggacagctcttccttatagtagaataccaattaataaatacaggtaaaataatgaaacaaagt

SEQ ID NO: 971362 - DNA, 120 bp, Artificial Sequence
  ENSG00000285864_5 (sequence is synthesized)
caccattaggcaagcataacattaatacctgttataagcaagaatcattgatgatggaaatgaaaatcagtaggcaaaattttaagaataagacattcacatagcttcaaagtggaagat

SEQ ID NO: 971363 - DNA, 120 bp, Artificial Sequence
  ENSG00000285864_6 (sequence is synthesized)
tcttgttaatttcaaagggaaaattcctaattttacagtggagaaacctggcacacaccaccttagccatgtgatcaaagttaccaccacctagtctaggtgtggtggctcatgcctgta

SEQ ID NO: 971364 - DNA, 64 bp, Artificial Sequence
  ENSG00000285867_0 (sequence is synthesized)
cgcctgccttggcttcccaaagtggtgggattataggcataagccactgcgcccagcccgtgat

SEQ ID NO: 971365 - DNA, 120 bp, Artificial Sequence
  ENSG00000285867_1 (sequence is synthesized)
gtgggattataggcataagccactgcgcccagcccgtgataaagtttttttattttcagtgtttctcttgtatgcaacatattgctgaaccttaaggaagaaactcaacccaggaacgtt

SEQ ID NO: 971366 - DNA, 120 bp, Artificial Sequence
  ENSG00000285867_2 (sequence is synthesized)
tgtcttttaagaagtgtgtttactttacccatctttattacaattactataatattaggacttattctgccatttaattttatatttttcatgtactgtgccttctttgttgtttctttc

SEQ ID NO: 971367 - DNA, 120 bp, Artificial Sequence
  ENSG00000285867_3 (sequence is synthesized)
cccacctttgttactttccattacatagagccaacattcttctcatgttttgaaaactatacattctattttcttgttaatgtagttgctttaatttgactttatgctacttcattgaat

SEQ ID NO: 971368 - DNA, 120 bp, Artificial Sequence
  ENSG00000285867_4 (sequence is synthesized)
aatttttaattatttatattcttcctaataataaagttcctttcacaccctcctatcccatcagtcttgtcttttccttcctctttttttttttttgagatggggtcttgcactgtctcc

SEQ ID NO: 971369 - DNA, 63 bp, Artificial Sequence
  ENSG00000285867_5 (sequence is synthesized)
ctctttttttttttttgagatggggtcttgcactgtctcccaggctgaagtgcagtggttccc

SEQ ID NO: 971370 - DNA, 120 bp, Artificial Sequence
  ENSG00000285867_6 (sequence is synthesized)
caggtgtgagccactgcacccggtccgttctgcttattttcatcatattcatagtatctataattcaggttttttttctttttttttttttggtgtaagttcccaaccaatggccttgtc

SEQ ID NO: 971371 - DNA, 120 bp, Artificial Sequence
  ENSG00000285867_7 (sequence is synthesized)
cttcgagtacttttcctcaggctgatgataaaagttctgtgtgaaggtccttttgcttcagctcatctatgggacggagtccagctgcaaatatatgacacagtaactagagactctact

SEQ ID NO: 971372 - DNA, 120 bp, Artificial Sequence
  ENSG00000285867_8 (sequence is synthesized)
ctccaaccaatcattccattctgattatctctcactctcctccacctcttctttctcagactctctcccccttttagcttttgttgatattcaattttattatgtcatttaatcatgttt

SEQ ID NO: 971373 - DNA, 120 bp, Artificial Sequence
  ENSG00000285867_9 (sequence is synthesized)
atttcctatattgcaggcatcatcctatcctcttgaacttatttctcttcttatttggatactttgagaactgtaaatgtaggtctttgtgtgacaaacattctgaggcttttgtaatgc

SEQ ID NO: 971374 - DNA, 89 bp, Artificial Sequence
  ENSG00000285867_10 (sequence is synthesized)
caggcatgagccaccacgcctggccgagaatattttttactatattttcaaatttgaatgactatttggctacacagaatttttttttt

SEQ ID NO: 971375 - DNA, 120 bp, Artificial Sequence
  ENSG00000285867_11 (sequence is synthesized)
cccaggctggagtgcaatggcgcaattttggttcactgcaaccttaggctcctaggctcaagaaattcttgtgcctcagcctcctgagtagttagggattacaggggcatgtcaccacgt

SEQ ID NO: 971376 - DNA, 85 bp, Artificial Sequence
  ENSG00000285867_12 (sequence is synthesized)
tgtatttttagtacagatggggtttcaatgtgttggctaggctggtctggacctcaggtgaactgggtgagccactgcacctagc

SEQ ID NO: 971377 - DNA, 120 bp, Artificial Sequence
  ENSG00000285867_13 (sequence is synthesized)
tgggattaactgggtgagccactgcacctagcctaaaatttctttcagtacttacaaaccttgccactttcttgtattcagtgtttctattgagaagtctgatgtcaatttgattcgtgt

SEQ ID NO: 971378 - DNA, 120 bp, Artificial Sequence
  ENSG00000285867_14 (sequence is synthesized)
tcctgcaggacagttctccccatggccttggccttatccagttatctcccctttatcacttggagctctcaggaataactgtagaatgggctgagatacaacatcccgagataaagaggg

SEQ ID NO: 971379 - DNA, 120 bp, Artificial Sequence
  ENSG00000285867_15 (sequence is synthesized)
actggtgaacagcctgggccccgttccagtaacccctagaaacaggatgtccttcaactcattagccaagcatgtcacattgccccaggggtgtaaatccagggcaggctgctttttttg

SEQ ID NO: 971380 - DNA, 120 bp, Artificial Sequence
  ENSG00000285867_16 (sequence is synthesized)
gttttttgagacagggtctcgctctgtggtccaggctggagtgcagtggcataatcacggctcatgcagccttgaactcctgggctcaagaaatctgttctcctcagtcccccaagtagc

SEQ ID NO: 971381 - DNA, 88 bp, Artificial Sequence
  ENSG00000285867_17 (sequence is synthesized)
ctcctgggctcaagaaatctgttctcctcagtcccccaagtagctgggggtacaggtgtgtgccaccatgcccagctgagacggagtc

SEQ ID NO: 971382 - DNA, 79 bp, Artificial Sequence
  ENSG00000285867_18 (sequence is synthesized)
ccaggctggagtgcagtggcccgatctctgctcactaaaacctctgtctcccgtgttcaagcgattcttgtgcccatcg

SEQ ID NO: 971383 - DNA, 89 bp, Artificial Sequence
  ENSG00000285867_19 (sequence is synthesized)
acaggcatgagccaccgcgcctggcctgttttttattttctagagatggagtctcattatattccaatcctcctgcctcagtttcttaa

SEQ ID NO: 971384 - DNA, 120 bp, Artificial Sequence
  ENSG00000285866_0 (sequence is synthesized)
ggcacacatggattctcatcatatggctcccaactgcagttctttaagctaaagagtgcagttcttcacgcttccttgtgacagtctcctaattacccattctgagccctctgaaacagc

SEQ ID NO: 971385 - DNA, 120 bp, Artificial Sequence
  ENSG00000285866_1 (sequence is synthesized)
attcctcctagttaaggatctctgccatcaccgcaagacaccacacgctttgctgaaatagctggagaatgggtccctgtctcctgccacttactcgccctgctcctggtgtacggcaca

SEQ ID NO: 971386 - DNA, 120 bp, Artificial Sequence
  ENSG00000285866_2 (sequence is synthesized)
ccgcatgtgctaaagtggatttctcatcctgctccaagttagccaagagcatctgtacaaccactgggaagtcaacttcacttcagatctcgcctgcacctctccaccttatggtctgcc

SEQ ID NO: 971387 - DNA, 120 bp, Artificial Sequence
  ENSG00000285866_3 (sequence is synthesized)
cttattagtgaggcagtcttgggcagagagaacactgactcagttgaaagtgctcagaaagtcttgacctcatagaattcttgcaagtattaaatgagaaaatgaatataaaagactcag

SEQ ID NO: 971388 - DNA, 120 bp, Artificial Sequence
  ENSG00000285866_4 (sequence is synthesized)
cagagcacgtgacataaaataaggactaaagaaagagaggatgttgttgctacaaatattactacctccagttgtcaaaatcctttcatcatgccaaaagttaatccaaatgcaacctcc

SEQ ID NO: 971389 - DNA, 120 bp, Artificial Sequence
  ENSG00000285866_5 (sequence is synthesized)
aaggttattgtatttggaagcgctctttcccctctgaactgtagagctaaattgcatagaggggatttctcacatgtagctattccatgtaattattttaatataatataaaaataagaa

SEQ ID NO: 971390 - DNA, 120 bp, Artificial Sequence
  ENSG00000285861_0 (sequence is synthesized)
actggcttttgatggaaacaacgatatatgtgatgaccctttctggacaggagggagtccaggtcaaggcataatactcacatacacagctgggcttgttgccagaccactgattgttct

SEQ ID NO: 971391 - DNA, 120 bp, Artificial Sequence
  ENSG00000285861_1 (sequence is synthesized)
gctgacaggtgataactctctcccccaccagctcaaaggccgccgggcattcaaagacagtgtcttgctctgttgcccagactgcagtgcactgctgtaatcttggctcgctacaacctc

SEQ ID NO: 971392 - DNA, 120 bp, Artificial Sequence
  ENSG00000285861_2 (sequence is synthesized)
tctcagcctccagagtagctgggactgcaggtgcatgacaccatgcccagtccccttgtgctgcgataacagaaaaacatagactgggtaatgtatgaagagcagaaatgtatttctcat

SEQ ID NO: 971393 - DNA, 120 bp, Artificial Sequence
  ENSG00000285861_3 (sequence is synthesized)
ctcactatgatctcaggctcctgggctcaagtgatctttcgacctcagcccctggagtggctgggacaacagacagcaaatttaaccaaggtaaatttcagcaccttgattcacgtatat

SEQ ID NO: 971394 - DNA, 120 bp, Artificial Sequence
  ENSG00000285861_4 (sequence is synthesized)
tgacattgaggtgaagaactatgacctgttagaataaaactgatcaaagatgaccacaaaagattttagtgtctaccatctctaaaaggaacatcacttttcaaatcaattaatggaaaa

SEQ ID NO: 971395 - DNA, 120 bp, Artificial Sequence
  ENSG00000285861_5 (sequence is synthesized)
ggaagctggagactgtccacctgctctttccctcaattgcctcctctcctccttcaatgtcatcttaagtgacttctccttattaaacaccaggacagatgaagatacaaggcaatataa

SEQ ID NO: 971396 - DNA, 120 bp, Artificial Sequence
  ENSG00000285860_0 (sequence is synthesized)
cattttgggaggccaaggcgagaagatcactggagcccaggagctcaagaccaggcaacataaggagactccgtcgctacgagaaaatacaaaatttagccagggagcatggtgcatgcg

SEQ ID NO: 971397 - DNA, 120 bp, Artificial Sequence
  ENSG00000285860_1 (sequence is synthesized)
tacttgggaggcttaggtgggaggatcccttgagccaaggagtttcagactgccgtgatcataccactgcgctctagtctgggcaacagagaaagaccctgtcttgaaaaaaaaaaagtg

SEQ ID NO: 971398 - DNA, 120 bp, Artificial Sequence
  ENSG00000285860_2 (sequence is synthesized)
gtggcttctgatttcaagatcactgcatggtgcaagacaactttcctacatggcaggcatcgttctaatccctcttgtatgcattatcttgtaatactcataacagccctgtgagggtct

SEQ ID NO: 971399 - DNA, 90 bp, Artificial Sequence
  ENSG00000285860_3 (sequence is synthesized)
gcattatcttgtaatactcataacagccctgtgagggtcttgctgtgccactcaggctagagtacactggttgggttcaagtgatcctcc

SEQ ID NO: 971400 - DNA, 120 bp, Artificial Sequence
  ENSG00000285860_4 (sequence is synthesized)
cactgatttacaatcttctaataagagtctttatcttaaagatatttgtttcctgtgtttgagaattaaaatgctggctttttgctgaataaaaacaagttggcaataatagttaaattg

SEQ ID NO: 971401 - DNA, 120 bp, Artificial Sequence
  ENSG00000285863_0 (sequence is synthesized)
gctgggattacaggcttaagccaccacacccagcctattttcatctccttattttcaatactggggtggccaaactgtgcccttcaagccaaatccagcccaagacctgttttaatatat

SEQ ID NO: 971402 - DNA, 120 bp, Artificial Sequence
  ENSG00000285863_1 (sequence is synthesized)
gtctaaattttactatctgtccctttaaagaaagtttgttgactcctgttctatgttatctacaatgaatagccataactttagcaataaaaattattttggatgtggtggtgcatgtat

SEQ ID NO: 971403 - DNA, 76 bp, Artificial Sequence
  ENSG00000285863_2 (sequence is synthesized)
ttagcaataaaaattattttggatgtggtggtgcatgtatgcctatagtccaggctacttaacaggctgaggctgg

SEQ ID NO: 971404 - DNA, 120 bp, Artificial Sequence
  ENSG00000250917_0 (sequence is synthesized)
ctccccagctggatgaggcagtggctgaagcccacctgggcaagctgaatgtgaagttgaccaagctaactgagaagcaagcccagtacctgggcatgtcctgtgatggccccttcaagc

SEQ ID NO: 971405 - DNA, 120 bp, Artificial Sequence
  ENSG00000250917_1 (sequence is synthesized)
tggaccccagcatggaggagcaactgcagacttcagcagactcattcaggtcaatcacttgatgtggcctcttactggcaacattagccatggattttgtacccttaggagctatgatga

SEQ ID NO: 971406 - DNA, 120 bp, Artificial Sequence
  ENSG00000250917_2 (sequence is synthesized)
aaaaaacaacacaagattaaatcaaatgcgagagaaaataatgtgcaaacaagagatgcggtaaacatgaaatatatgaggatactgtgggtataacatgacatactgttttacagtaaa

SEQ ID NO: 971407 - DNA, 120 bp, Artificial Sequence
  ENSG00000250915_0 (sequence is synthesized)
gggatgcgcttactgctgcgctgctgctcggtcagccagcgtctgggatgggagcgctcctgcattttacatgactgcggggcctgttccttgcgcctgtctggtcgcgtcacatcatgg

SEQ ID NO: 971408 - DNA, 120 bp, Artificial Sequence
  ENSG00000250915_1 (sequence is synthesized)
agggtttctcggggcggccggccgcctctgagcacagccagggtggtgtttgcagcacagctgctgcctaggcctcgctgcggaggtgctgggccacggccccgtggaggcagagccgca

SEQ ID NO: 971409 - DNA, 120 bp, Artificial Sequence
  ENSG00000250915_2 (sequence is synthesized)
gggccatcgacatgtcctttgaaaacgggcatttccccaactcatgcaggtggaggggagagcgaagccaaatgggacaccggcccccacacactgccccggctcctgcatttccggaga

SEQ ID NO: 971410 - DNA, 120 bp, Artificial Sequence
  ENSG00000250915_3 (sequence is synthesized)
tgcttcccgggcctgcagcgctggccccagcctggccgagcgagcatttgttcacccaagacctttcccctcctgccctcgtggagcctccacaaggagtaaacaaccacttctggtccc

SEQ ID NO: 971411 - DNA, 120 bp, Artificial Sequence
  ENSG00000250915_4 (sequence is synthesized)
tcaaagcatcaactctgtgccttgcagacagcggacacgtaacacagccacgcggcgtgaacatgagcagacttcttttttccaggatgtgcacggtttccacgacaatgcccactgcac

SEQ ID NO: 971412 - DNA, 120 bp, Artificial Sequence
  ENSG00000250915_5 (sequence is synthesized)
gccttatggcctcaccagagacgtaaagcagatgccaagaaacttccccccaaaatgggctggcttgccaagcccaggaccgcctgtccagctggggctgggggcaaggatcccattttc

SEQ ID NO: 971413 - DNA, 120 bp, Artificial Sequence
  ENSG00000250915_6 (sequence is synthesized)
tgtgactctctttgctctgatggtcaggttcaccggccgtacgtgtaatctgaagcattcggtagcgatctaattaaatgttaacacatcattaaagtgatttgcgataagcacagttaa

SEQ ID NO: 971414 - DNA, 120 bp, Artificial Sequence
  ENSG00000255399_0 (sequence is synthesized)
cgcagccacaggttccggacgtcttggccccgggaataaataaagacataaaccaacccggctttctccggaggaatgaggcgcagtggtggatgctcgcaaacttttgcgcaccgctgg

SEQ ID NO: 971415 - DNA, 120 bp, Artificial Sequence
  ENSG00000255399_1 (sequence is synthesized)
aaacccactaggttgagttgcaaaacgtaccgcgtagacgcccctggtggcgccgagagaagagctaggcctgcccagcacagagccggagagcgtcgggccttccggaagggtcgacga

SEQ ID NO: 971416 - DNA, 120 bp, Artificial Sequence
  ENSG00000255399_2 (sequence is synthesized)
gatgagttcctacttgacctctgagccgaggtgggccggaaaccgaggcctaggccccgccggggctgcaaggaaaaggggaaactccgagcgtagcgtcttttccttgtggttcctttc

SEQ ID NO: 971417 - DNA, 120 bp, Artificial Sequence
  ENSG00000255399_3 (sequence is synthesized)
caaaggattctgcaagtccagcttcacagactggctttcccagacgctccgaagcccgcaccacgaacagaataaaggagagacgagagatcgcaactagatttgagaatcctcgttctt

SEQ ID NO: 971418 - DNA, 120 bp, Artificial Sequence
  ENSG00000255399_4 (sequence is synthesized)
ttccccaatcgttcgggcagtaaactccggagccggctacagcgcgcatcctcccttcctcctttcggagaactgtcgctttcccgaagctgctcccagctgggttttctcccgaagttt

SEQ ID NO: 971419 - DNA, 120 bp, Artificial Sequence
  ENSG00000255399_5 (sequence is synthesized)
atttttctcattttgcaaaattcctgccctgattttaatactgcaacaggacagcagaggttcctctttaaaaagtcaaaacccaaaccaaaggggcccattgctgttgataattttttt

SEQ ID NO: 971420 - DNA, 120 bp, Artificial Sequence
  ENSG00000255399_6 (sequence is synthesized)
ccgggtctgcgcagccacaggttccggacgtcttggccccgggaataaataaagacataaaccaacccggctttctccggaggaatgagggtgatgaacataagacacaaatagagccaa

SEQ ID NO: 971421 - DNA, 120 bp, Artificial Sequence
  ENSG00000255399_7 (sequence is synthesized)
gatcgactttcttaggaagggggagaggagggaactcttcacgaagggaggtgggagtccacctcagacctctattggaaggaaatcgagttgttccgggggactgaggtctcttgcata

SEQ ID NO: 971422 - DNA, 120 bp, Artificial Sequence
  ENSG00000255399_8 (sequence is synthesized)
aggcatgggatccttattattattattattatttttaaatcccccgcggaggagctctgggcaaatgaataccgaggcgccgctctagctggttaggcttgggatgcgataactcagtgc

SEQ ID NO: 971423 - DNA, 120 bp, Artificial Sequence
  ENSG00000255399_9 (sequence is synthesized)
cctcttgcagacttgcatagaaataattactgggttgtcgtggaggggacacgagacagagggagttctccgtaatgtgccttgcggagagaaaggtccaagaatgcaattcgtcccaga

SEQ ID NO: 971424 - DNA, 120 bp, Artificial Sequence
  ENSG00000255399_10 (sequence is synthesized)
tggcccggcaggggcggggtgcgagtgggtggtggagtaggggtgggagtggagagaggtggtttctgtagagaataattattgtaccagggcccgccgaggcacgaggcactctatttt

SEQ ID NO: 971425 - DNA, 120 bp, Artificial Sequence
  ENSG00000255399_11 (sequence is synthesized)
cagtgccgggtctgcgcagccacaggttccggacgtcttggccccgggaataaataaagacataaaccaacccggctttctccggaggaatgaggtctgatcaatgggcacaatttctaa

SEQ ID NO: 971426 - DNA, 120 bp, Artificial Sequence
  ENSG00000255399_12 (sequence is synthesized)
tctccggatatgtccccacctgacccggtggcaacttgtggggcgtgggggtagtgaaaaatagaagtgtggacggggctgggaaaatgaataagaattataacaatagaaatgatgaca

SEQ ID NO: 971427 - DNA, 120 bp, Artificial Sequence
  ENSG00000255399_13 (sequence is synthesized)
aaactaaactttgaccaattcaatttgcaaaagaaagggttggtctgagggtgagacattccctggtttctcaagggggtcactttccctctcaccgagttaaatctggctctgttatat

SEQ ID NO: 971428 - DNA, 120 bp, Artificial Sequence
  ENSG00000255399_14 (sequence is synthesized)
tttttccaggaacacagtatgtctcttcccaatgttttattcggtttctggtttccccacttttgaccggaagtatgtgggaagaatactggctgttattattatgattattgagtgtcc

SEQ ID NO: 971429 - DNA, 120 bp, Artificial Sequence
  ENSG00000255399_15 (sequence is synthesized)
aatactctcctccaatatttccaccaagaattattatcgctgctctcctcattcatgttagtgttgctttgtgtgctttagatgacaatcgtcctctttactctccaagtttggagggtg

SEQ ID NO: 971430 - DNA, 120 bp, Artificial Sequence
  ENSG00000255399_16 (sequence is synthesized)
agggttttttgttgtggtggtggtggttgggttcttctttgtttttgtttttttgtttttcctgttcggggtaatgaaatgagaactggaagagaggatatcatttcgaggcccagctga

SEQ ID NO: 971431 - DNA, 120 bp, Artificial Sequence
  ENSG00000255399_17 (sequence is synthesized)
gaaggatcccaatgcgaaaaatttacacacttcaaagagcagaaaggtggaagcgagtggtgcttggacacaaggatgccactgttcttatctcctccaatttgggaagtgcccagccta

SEQ ID NO: 971432 - DNA, 120 bp, Artificial Sequence
  ENSG00000255399_18 (sequence is synthesized)
acccactgataggtctcccaaaatgtttggggtagggggaagaaacatagggcattccaggtctgtaaccctgcaagagagagactcaaactaatatgtctaggtctggggtgaaggtgg

SEQ ID NO: 971433 - DNA, 120 bp, Artificial Sequence
  ENSG00000255399_19 (sequence is synthesized)
ggggcctgtctggatacctcctccctcaattgaagggctcgttggaaacataggaacccactgctctctgggactctggaaagacaaattttctttggcaaacggaacagtgtcgcgctg

SEQ ID NO: 971434 - DNA, 120 bp, Artificial Sequence
  ENSG00000255399_20 (sequence is synthesized)
tcgacagagcagactatttttcttgttccctcacaaggtgggggtggggggaaagaaaaggaagcaagaaagaaagggaaattaaatccacacgtgttaagctcgctcaaagggccagag

SEQ ID NO: 971435 - DNA, 120 bp, Artificial Sequence
  ENSG00000255399_21 (sequence is synthesized)
tcaaaaccagagatgaaacttcgactccagttctggctgcccgcgggcctctttccaaccagccaggcctcacagagcaaggcatccccactggagagaattcgatctgatgtttcataa

SEQ ID NO: 971436 - DNA, 120 bp, Artificial Sequence
  ENSG00000255399_22 (sequence is synthesized)
agcgctttatttaaggagaaggggcatgggtctgtctccaagtctgtgctgcagaaatccagaatttgtagcggcaaagaaaacaaaggagataacaattgtaatcataatgaccctctt

SEQ ID NO: 971437 - DNA, 120 bp, Artificial Sequence
  ENSG00000255399_23 (sequence is synthesized)
tatgaaaactcatcttgatgtcctccaaatcaaaacaacaattcaggcaatattcaagcaatggccaaaatcatccaggccattaaatcatccaggccattgttttacaaaattcctaag

SEQ ID NO: 971438 - DNA, 120 bp, Artificial Sequence
  ENSG00000255399_24 (sequence is synthesized)
gtctgatcaggctttcggacttgggcctagctgggtcaagagaacctgaaatgctgttgtcaagagactctgaaatcaccagtttaatcaggacagctaatctctacatccttgaggcct

SEQ ID NO: 971439 - DNA, 120 bp, Artificial Sequence
  ENSG00000255399_25 (sequence is synthesized)
ctcttttggggagagactttcttgagagaggacactacaggactcagctacagagctctgctatacatgggtgggagtggaggccgccaccccacctggaactgtgagtgaaaactctag

SEQ ID NO: 971440 - DNA, 120 bp, Artificial Sequence
  ENSG00000255399_26 (sequence is synthesized)
taatgatcttgaggaggtgaagggaggtaggtgggggtgtgggtgatgagggaggccaaaccccaatctggaaggatctgtcactgaaacaattgcttggtcgagacctctaatttttct

SEQ ID NO: 971441 - DNA, 120 bp, Artificial Sequence
  ENSG00000255399_27 (sequence is synthesized)
tcctctccagccagtctcctgtggctccctggtgctgggtttctggcctttggtgacatcctaacagaagggtccggaagcagggaccccagacaccttgctccctctcccaaatcacac

SEQ ID NO: 971442 - DNA, 120 bp, Artificial Sequence
  ENSG00000255399_28 (sequence is synthesized)
ccaaaacatactggggtgaaacaactgacagagggtctctgtggtgagcaactgactgaagtttccagtggaaaagttcctgacgattgtttccgcagggaccttgaatttcctggtcac

SEQ ID NO: 971443 - DNA, 120 bp, Artificial Sequence
  ENSG00000255399_29 (sequence is synthesized)
catggcgacctggaagtcccaccgaatgctctcaacaatggggtaccccgaggacattcgtgcaattggctgcgcagtctgaggcctgaaaagcgtttctgccaatcgttcttgactttc

SEQ ID NO: 971444 - DNA, 120 bp, Artificial Sequence
  ENSG00000255399_30 (sequence is synthesized)
tggagcctccttagtgggttcaacggagcagggatttttaaaactgcccccttttttaaacaggggagaaaattgagatttagtaccaggtgggttcaggtcctgagcaaaagccccatc

SEQ ID NO: 971445 - DNA, 120 bp, Artificial Sequence
  ENSG00000255399_31 (sequence is synthesized)
tttgaattcagaatgctgaccccagggccgatcgtgtagagcctatggtgtatcttaatcgaaacccgtggcccaaacatctcagccaggaacctgggactttaggtgtcacttaatctc

SEQ ID NO: 971446 - DNA, 120 bp, Artificial Sequence
  ENSG00000255399_32 (sequence is synthesized)
ttcacacctgttaactacacctatctgcataggaggctccccacatcagtccaggcaacttttttctttgcctggggccatttcttctaaatggaaggagaaaagtctgagcattagaaa

SEQ ID NO: 971447 - DNA, 120 bp, Artificial Sequence
  ENSG00000255399_33 (sequence is synthesized)
ttgtggcattaatgtctgcaagggctaatggagtgaaaagaatacattattctccttttcttcttagaaaaaaatttcaattgtggatgtaatagaaataccattaaaataatatttctg

SEQ ID NO: 971448 - DNA, 120 bp, Artificial Sequence
  ENSG00000249252_0 (sequence is synthesized)
attcatcgagtgaggctcaactcggggaccagttaaaattacagttttgtttgggataaactttaagtgcctgctttccttcagtggaaaagccacatccaaggggattccttttgttac

SEQ ID NO: 971449 - DNA, 120 bp, Artificial Sequence
  ENSG00000249252_1 (sequence is synthesized)
tgagttgtgccagctaggggacaaggtgacacagaatatgtacagacaaaaacaagtatgctaatgaaatttcttcaaatactacaaacaattagtgaagactgctactataggctgctg

SEQ ID NO: 971450 - DNA, 120 bp, Artificial Sequence
  ENSG00000249252_2 (sequence is synthesized)
cttcaaccttttatggaaagatggaaacacacaacaaactatgtagatcttgatacaagtctccatcaagttgattcattttcaaaagtaaattacatcctaatctcaaacctgtggcaa

SEQ ID NO: 971451 - DNA, 120 bp, Artificial Sequence
  ENSG00000249252_3 (sequence is synthesized)
gacaagtcaaatcatcaaagaatgtcctgtgacagccaaggaggcggccccgcgggaaccaggtcctgcgaggagggcggtcggccgctccctcccgactccctcctgggccggcggccc

SEQ ID NO: 971452 - DNA, 120 bp, Artificial Sequence
  ENSG00000249252_4 (sequence is synthesized)
agggtgcggcgctgccagcaggttgatcgggcggagctttgggagcggctcgactgaccgcccgaggggctgaggcttcaaggcgagatcaccgccggccaaataagaataaacaaactc

SEQ ID NO: 971453 - DNA, 77 bp, Artificial Sequence
  ENSG00000249252_5 (sequence is synthesized)
tgcactgtcagcttgtccacttttgaggtgttggcacttggactgatccaccactggcttcctcgctccgaggccag

SEQ ID NO: 971454 - DNA, 120 bp, Artificial Sequence
  ENSG00000249252_6 (sequence is synthesized)
tttgctattcttagttccagcggaagtggatctgacgtgggcgatcagcaccttcctttaccaatggcttatggaactcacgtccagcacgagagtggatatttgcccaacaaaactcac

SEQ ID NO: 971455 - DNA, 61 bp, Artificial Sequence
  ENSG00000255394_0 (sequence is synthesized)
aattttagctgggattatgctgtgattatgtttggcttaacagtaatgaaaataaagcgga

SEQ ID NO: 971456 - DNA, 69 bp, Artificial Sequence
  ENSG00000255394_1 (sequence is synthesized)
tctgcctgtaatcccagctactggggaagcggaggacaatcgcttgaacccagaaggcagaggttgtgg

SEQ ID NO: 971457 - DNA, 86 bp, Artificial Sequence
  ENSG00000255394_2 (sequence is synthesized)
acaacaacagcgaaacttcatctcaaaacaataataagtttacaacctctgaatatgtaccaaatggagccaggggtggggagtat

SEQ ID NO: 971458 - DNA, 120 bp, Artificial Sequence
  ENSG00000255394_3 (sequence is synthesized)
ctctgaatatgtaccaaatggagccaggggtggggagtattaggacaagccccgcactgcagagccccccagctctcactcgtggaccaagtgcatgggacacagccattcggaaagctc

SEQ ID NO: 971459 - DNA, 120 bp, Artificial Sequence
  ENSG00000255394_4 (sequence is synthesized)
tttcttttggagtgggtctgggtgttctggttttggtttgcttgttttatcattttgtgacattggcgcctattcttcagtttgcatccctgccttgcttgcttgaagctggagcacaaa

SEQ ID NO: 971460 - DNA, 120 bp, Artificial Sequence
  ENSG00000255394_5 (sequence is synthesized)
tgtcccgtcaccctgtaacaacacaagtatgcgtcatgcctgcgaggcttagcttgggaagtggaatctccaggaatctccttcggttgtctgtctgccactttacactgttgctcccat

SEQ ID NO: 971461 - DNA, 120 bp, Artificial Sequence
  ENSG00000255394_6 (sequence is synthesized)
ttcggtcactgaggccctgtcccttatcctccagggacatggtgctgtcctatgagctctggctcctttgtgacttttacattgctcctccagatagcagtggcagtggcatttgcaaaa

SEQ ID NO: 971462 - DNA, 120 bp, Artificial Sequence
  ENSG00000255394_7 (sequence is synthesized)
aggctatttgagaacaaataagaaaaaatcttcaaagcgaagatgatagtaaaacagccctcatttttcaaagtccattcttttttctggtccgtgcactgccagctcacttctctggct

SEQ ID NO: 971463 - DNA, 120 bp, Artificial Sequence
  ENSG00000255394_8 (sequence is synthesized)
gtactgatggcaccgctgtgctccaagttaaccagaacacaagaatcgaaaaagcctgtgagatactggtgctcgtgatcgtaagctccaggtcggggggttttcagatgaacacaaaaa

SEQ ID NO: 971464 - DNA, 120 bp, Artificial Sequence
  ENSG00000255394_9 (sequence is synthesized)
gggggctgctcccgtcccaagatgagtgataaatgagtcacttctcatactcgcactcacactcgctccatttcctctgggatgactgtcttccgtcctaccgctgtggctgctgttatt

SEQ ID NO: 971465 - DNA, 83 bp, Artificial Sequence
  ENSG00000255394_10 (sequence is synthesized)
gatgactgtcttccgtcctaccgctgtggctgctgttatttgcctgataaacttctttccctctccctccctctgacacagaa

SEQ ID NO: 971466 - DNA, 120 bp, Artificial Sequence
  ENSG00000255394_11 (sequence is synthesized)
accagttctaatcacgtttcaagtcaaatgaaccagtcgcagcttcctaataagtgaatggctgacataaggagttaattcagaagcagctcaatactatggacaatactagtggacaat

SEQ ID NO: 971467 - DNA, 120 bp, Artificial Sequence
  ENSG00000255394_12 (sequence is synthesized)
attagcatactgctcgtacaacaaagataccgtagtctctggtgctgcctcttcaggacgaatttgctgaaagtgagttgtaattagagatgttaaaaaaaacattggctgcgcgcgatg

SEQ ID NO: 971468 - DNA, 86 bp, Artificial Sequence
  ENSG00000255394_13 (sequence is synthesized)
taattagagatgttaaaaaaaacattggctgcgcgcgatggcttactcctgtaatcccagcacttttggaggcgaggcaggtggat

SEQ ID NO: 971469 - DNA, 90 bp, Artificial Sequence
  ENSG00000255394_14 (sequence is synthesized)
cctgggcaacaagagtgaaattgactgagatttatcattcctcctctctccttttccttgagaacttaataaaaatggaaaatatccatt

SEQ ID NO: 971470 - DNA, 120 bp, Artificial Sequence
  ENSG00000255395_0 (sequence is synthesized)
cttaagaaatacctgatgatgaggccgggcatggtggctcacgccagcactttgggaggccgaggtcccaagataaagaacgccattcaggaatcgtgcaggcatagctggactggatgg

SEQ ID NO: 971471 - DNA, 120 bp, Artificial Sequence
  ENSG00000255395_1 (sequence is synthesized)
acttatgtcaaatgactacagtcaagatcctggtgcttagagtgggcaaaacctggatctcactccattgttaagactggaggaaaaatatggcttccctggtagctgatgggtccggaa

SEQ ID NO: 971472 - DNA, 76 bp, Artificial Sequence
  ENSG00000255395_2 (sequence is synthesized)
ggcgcgtctggagtttgttccttctgacgttcggatgtgttgggagtttcttccttctggtgggttgagtgttaca

SEQ ID NO: 971473 - DNA, 74 bp, Artificial Sequence
  ENSG00000255395_3 (sequence is synthesized)
ttaaggcggcgcatctggagttgttcgtttctcccggtgggctttacatctcttaaggcagcgcatctggagtt

SEQ ID NO: 971474 - DNA, 120 bp, Artificial Sequence
  ENSG00000225096_0 (sequence is synthesized)
cctcccaagtagctggcactgcagacacgcaccaccacacccaggatggtgctagcatatataagactgaaacaccaaagtcctccgtggaagttaatgaatttctggttatgagttgga

SEQ ID NO: 971475 - DNA, 120 bp, Artificial Sequence
  ENSG00000225096_1 (sequence is synthesized)
ttcttcagcggagtatttgagccatgccttgaggcacatacttcaagttgctgcatccagttttaaactccagattgagctttacatattaaatgtgcacatttgttttcacatttttga

SEQ ID NO: 971476 - DNA, 120 bp, Artificial Sequence
  ENSG00000225096_2 (sequence is synthesized)
gctttgccagtggcaccctctctaattaatcatcccgcgggcttagaaaacttctgcccaatcctttctgatttgttaaaagaaagagagaaggttttagtctgaaaaaggccttatctg

SEQ ID NO: 971477 - DNA, 120 bp, Artificial Sequence
  ENSG00000225096_3 (sequence is synthesized)
ataaacatcacattatatggatttttacatttaagtacattttctttttaaatccggtggctttcccaaactagaaagatggagtgtttgcatacatccaccaaccaccaacatcagcag

SEQ ID NO: 971478 - DNA, 120 bp, Artificial Sequence
  ENSG00000225096_4 (sequence is synthesized)
aaagaaagcttgatacagtaaaggaaagaaatggcaatttaacagttcttttattttccattcagatcacatacacattaaccaaatgaggcctcacagcgtggaatctgatatcatagc

SEQ ID NO: 971479 - DNA, 120 bp, Artificial Sequence
  ENSG00000225096_5 (sequence is synthesized)
ttgaatactcctcattaaaaaggttcataaaagaatcctattaaaaccaatacgaataataaaccttgaaaatgctgctttaaattccaagaggatggcgaagatctgcgtcagtaacag

SEQ ID NO: 971480 - DNA, 120 bp, Artificial Sequence
  ENSG00000225096_6 (sequence is synthesized)
tcttcctgttcatagagtgattttgaaaatctcgtgggctgaatttttccaagccaagcaggcatctcactatccagtgaaagacccagggactattttgaatgcattcaatccaagcct

SEQ ID NO: 971481 - DNA, 120 bp, Artificial Sequence
  ENSG00000225096_7 (sequence is synthesized)
gtgcctttcacagtcagttttctccaagaatttatccctaatcctgacaggatacccaaccaaaaggctaattatttttagtcacttaattaatagataattcttacaaagagcccaaca

SEQ ID NO: 971482 - DNA, 120 bp, Artificial Sequence
  ENSG00000225096_8 (sequence is synthesized)
cctgaacccaccaagtcctctttgcatgggcaaatccagctggtttgatgcactaatttcactaaatgaaaatttggacaaattttatgttactgcaaataatggtaaatgtatccaatt

SEQ ID NO: 971483 - DNA, 120 bp, Artificial Sequence
  ENSG00000225096_9 (sequence is synthesized)
caaaaaatagtaataaaaaggttatttttttgttccctttttaatcacagaggcagctgtggtagaccccaaatgcacagggcatatggctcacctcaccaccccagatggtgctactgg

SEQ ID NO: 971484 - DNA, 120 bp, Artificial Sequence
  ENSG00000225096_10 (sequence is synthesized)
cccagccttcccagcgtccaccctggcagtctttcctcattcccttggccctcaccctgtctcctcagccttccagctgcactgctattgtaggctgctctttctcgacaatctcctctt

SEQ ID NO: 971485 - DNA, 120 bp, Artificial Sequence
  ENSG00000225096_11 (sequence is synthesized)
attttctgtgatgtctcaggatgtttcttcttctcaggggttttccaagcttcttccacactcaggtgctcagacgtttttatggtctggcttctgaaggagatcaaaattcatatggac

SEQ ID NO: 971486 - DNA, 120 bp, Artificial Sequence
  ENSG00000225096_12 (sequence is synthesized)
aggcatttgtgtattagccaagagttgctaatgcatttcttgatcataagtctcagagaaatgggatgaaagatcttagatttttatacactctgcttcaatgatttctcagcttttctg

SEQ ID NO: 971487 - DNA, 120 bp, Artificial Sequence
  ENSG00000225096_13 (sequence is synthesized)
atctgaaaagaataaaggacaccttttagctaagcactttctgttttatttcttataatgccatgtagtggctgttactgccaacacagcagtcatttaataaaccctgaatgtctgtag

SEQ ID NO: 971488 - DNA, 61 bp, Artificial Sequence
  ENSG00000225096_14 (sequence is synthesized)
ccctttttttttttttttaaagccagagcctctgtcgcccaggctgcagttcctcagcctc

SEQ ID NO: 971489 - DNA, 120 bp, Artificial Sequence
  ENSG00000225096_15 (sequence is synthesized)
ctcccaagtagctggcactgcagacacgcaccaccacacccagaatagtgaaataaggtggccaaggaggcagagatggagtcagggactctgtgatcaaccctgaggattgggaaggaa

SEQ ID NO: 971490 - DNA, 120 bp, Artificial Sequence
  ENSG00000225096_16 (sequence is synthesized)
ctatacataccaggaggcaaggagcactgggggccctcctggaactgcctgtcacagcgtcctcaaaggttttcactctcctaggatgacccaggtatagaatctgcccctatggttcgg

SEQ ID NO: 971491 - DNA, 120 bp, Artificial Sequence
  ENSG00000225096_17 (sequence is synthesized)
ctccaccctctcacctgtctcttgagagcattgtgaaattctgagacacagcaaggacagaaacagagggcatggaagatgctttcagtggctctcttcggctaaatcaacctaaaacca

SEQ ID NO: 971492 - DNA, 120 bp, Artificial Sequence
  ENSG00000225096_18 (sequence is synthesized)
gggagaaggaggctcactgatgggaaatttttatatttacataattttgaagaatcctggaatgtatggtgaataggtactctgtaaaaatgaaaatgttttcctgatattactgccacc

SEQ ID NO: 971493 - DNA, 120 bp, Artificial Sequence
  ENSG00000225096_19 (sequence is synthesized)
ttcttaaaactgaggatattaacctttcatgtaagaatcagaatagttattttatggtacctggttacccaaatgtgaataaattgcccctcccattcctcttatcaagacttgtgtgtg

SEQ ID NO: 971494 - DNA, 120 bp, Artificial Sequence
  ENSG00000225096_20 (sequence is synthesized)
tgtatgtgtgtgagacctataaaaacttctcttttctaatgacactttttcttatccaccccatgccactgatctcctcctttggctgttcttgaggtcttatttttgtatcatgcattt

SEQ ID NO: 971495 - DNA, 120 bp, Artificial Sequence
  ENSG00000225096_21 (sequence is synthesized)
tccaccatgcatgttcctgggtgccatggaggagagtggaaagagcaggattttaaagccagacaggccatagttaggattccaattttgctaattaccagttgttcaaacatagactga

SEQ ID NO: 971496 - DNA, 120 bp, Artificial Sequence
  ENSG00000225096_22 (sequence is synthesized)
gtttcatgttattcatctgtaacacgggaattcttgagaatcaaattctttaattatattgaacacaaagcctgacatccatgaggtactcaatagttcttttcttcattcctccttatt

SEQ ID NO: 971497 - DNA, 120 bp, Artificial Sequence
  ENSG00000225096_23 (sequence is synthesized)
tttacaaaagtaacattttaaaaatgtaaatagaatcactttcttctttaataaacatactgaatagactcagaaatgataatataatgtcaaactggtaatcaggaactaatggcagag

SEQ ID NO: 971498 - DNA, 120 bp, Artificial Sequence
  ENSG00000225096_24 (sequence is synthesized)
ttttatttccaccatgaactaattgtgtggcatatgaaagtctagcaatattcttatgaactacgtgatattgacatacaagtcaatttatgaactgacttttgcctagaaattaggagg

SEQ ID NO: 971499 - DNA, 120 bp, Artificial Sequence
  ENSG00000225096_25 (sequence is synthesized)
tcctatttagctattttccccagtacaaatataaaatgatcaataaggaatcataatattttaattttctaatacagttgtcacacaaaggaatacaccggtcattgcaaacattggctt

SEQ ID NO: 971500 - DNA, 120 bp, Artificial Sequence
  ENSG00000225096_26 (sequence is synthesized)
accagttaactcaaaccactgaaaaatcatagttactccaagtcattaagaaataagtctgcataggtaaattcttcaaagacaaaactgtttggtcttttctgacaagagttaaaatat

SEQ ID NO: 971501 - DNA, 120 bp, Artificial Sequence
  ENSG00000225096_27 (sequence is synthesized)
tttttattatattttctaaaaatgcatttattactgtacattacttaatcttttctagatgattcaggatgtaatgctaaacatcaataaagggcctgtgctgtaagcacctgtatatac

SEQ ID NO: 971502 - DNA, 120 bp, Artificial Sequence
  ENSG00000225096_28 (sequence is synthesized)
agggaacactaagattagtaatgttttgccatatattaaagggccaaacaatttgcttttgttctttgtgggtgtgtgtgttcgttttggagaaatatctcttgccttgctgccatatta

SEQ ID NO: 971503 - DNA, 120 bp, Artificial Sequence
  ENSG00000225096_29 (sequence is synthesized)
gctccttactttactgtgtgtctgcttgtaacaatgacgcttcactattcaactgtgatattcttgatctcctgggatttaaaaaatgagatgatgaatcttattggactgctatgcaat

SEQ ID NO: 971504 - DNA, 120 bp, Artificial Sequence
  ENSG00000225096_30 (sequence is synthesized)
ataaaactaaaattaaaggcagtacttataaggctttcctagcagtaaagtatccaggctttagtattatttatcatcaattttagctgttttaaaattgcttccttcctgttttcaggc

SEQ ID NO: 971505 - DNA, 120 bp, Artificial Sequence
  ENSG00000225096_31 (sequence is synthesized)
caaatgctgaatatctgagttgttaatatgttataacaagattaaatgacatttaattactttagtcatatataccaaagttcccattttagtttaaaaattcaaataaagcaaaggaat

SEQ ID NO: 971506 - DNA, 120 bp, Artificial Sequence
  ENSG00000225096_32 (sequence is synthesized)
ttctgcctcagcctcccaagtagctggcactgcagacacgcaccaccacacccaggctacacagaacaacatcattagcaacattgtttcagcaaggaaataatccttattggcaaaggg

SEQ ID NO: 971507 - DNA, 120 bp, Artificial Sequence
  ENSG00000225096_33 (sequence is synthesized)
ccttattggcaaagggaaaccaaggaaagaaaactattgttttcttcggctacatgctgtctgcaaagcaccccatggattcaatttctcatcaattcagaatggaatactaacgtgctg

SEQ ID NO: 971508 - DNA, 120 bp, Artificial Sequence
  ENSG00000225096_34 (sequence is synthesized)
tgaacgcagggccttactcagcattcagaacaaaactgtgagtaaactttcgggcatgacatgcttagagtcagtcatagaggaaaaatagaagcctcaagttctattcagagacatcaa

SEQ ID NO: 971509 - DNA, 120 bp, Artificial Sequence
  ENSG00000225096_35 (sequence is synthesized)
cttaccaaagtttaggctagtatattcgtcatttgcactggtgctttccaaagacccggatgcgacattagcaaagtcttctcatgaccattcgtgtgcaataaattcataaaggtaaaa

SEQ ID NO: 971510 - DNA, 120 bp, Artificial Sequence
  ENSG00000225096_36 (sequence is synthesized)
catctgaatgacgtttgagtccctggatccactgtgtgaagccagagccactcctgcaagtgttttgtttaggtttaaatttgattgagatttttattacttcaaagtaaaaaattctta

SEQ ID NO: 971511 - DNA, 120 bp, Artificial Sequence
  ENSG00000225096_37 (sequence is synthesized)
ttacttcaaagtaaaaaattcttactaatgcaatgccttcagccttccacctcaaagtcactgaaaggatcttaatattttcaatgtatatatttataacttataatttaatgtatttat

SEQ ID NO: 971512 - DNA, 120 bp, Artificial Sequence
  ENSG00000225096_38 (sequence is synthesized)
gtttttgttcattctgcaaatggacatttgggagttcattgacaccaatggagaaaagcaaatatcccaggataaaaacttcaaggaaactatctgagaaactgctttgtgatgtatgca

SEQ ID NO: 971513 - DNA, 120 bp, Artificial Sequence
  ENSG00000225096_39 (sequence is synthesized)
agtttggaaacactgtttttgttgaatctgcaaagggatatttcagagcccaaagcgtcctatgttgaaaaggtaaatatcttcatataaaaactagaaagaagctttcttagacactgc

SEQ ID NO: 971514 - DNA, 120 bp, Artificial Sequence
  ENSG00000225096_40 (sequence is synthesized)
tttgtgatgtgtgtattcatctcacagagttaatcctttcttttgattcaatggtttagaaacactgtttttgtccattctgcaaaggtataattgggggagcattgaggcctaatatga

SEQ ID NO: 971515 - DNA, 120 bp, Artificial Sequence
  ENSG00000225096_41 (sequence is synthesized)
agaaactgctttgtgatgtgtggcttcatctcacagagttaatcctttcttttgacccaacacgttggaaacactgtttttgtccattctgcaaagggatatttaggagcaccttgaggc

SEQ ID NO: 971516 - DNA, 120 bp, Artificial Sequence
  ENSG00000225096_42 (sequence is synthesized)
ctaaggtgaaaaagaaaatatcttcagataaaactagaaagatgcttctgagaaacagctctgtgatgtgtgcattcatctcacagagttaaacgtttgctttctttcagcagtttggaa

SEQ ID NO: 971517 - DNA, 120 bp, Artificial Sequence
  ENSG00000225096_43 (sequence is synthesized)
tgtttttgtagaatctgcaaagggataatttggagcccaatgaggcctatggtgaaaaaggaaataatttcaaataataactagacagaaggtttttgtgaaactgctttgtgatgtcta

SEQ ID NO: 971518 - DNA, 120 bp, Artificial Sequence
  ENSG00000225096_44 (sequence is synthesized)
tctactttcatctcacagaattaaaattttctacttttccaacagtttggaaacactgtttttgtccattctgtgacaggacatttgggagctcgtttaggccaaagaaggaaaagagaa

SEQ ID NO: 971519 - DNA, 120 bp, Artificial Sequence
  ENSG00000225096_45 (sequence is synthesized)
tacccaaggataaaaaatacaaggaagccatctgagaaacggatttgtgaggtgcacattcatctagctgagttaaacctttcttttcattcaggagtttggaaacccagtttgtgtagt

SEQ ID NO: 971520 - DNA, 120 bp, Artificial Sequence
  ENSG00000225096_46 (sequence is synthesized)
atctgcaaatggatatttgggagcccatcgtgtcctttggtgaaaaagtaaatatcttcatataaaaactagaaagaagcgttctgagaaactgctttgtgatgcgtgcattcaactcac

SEQ ID NO: 971521 - DNA, 120 bp, Artificial Sequence
  ENSG00000225096_47 (sequence is synthesized)
agagttaaacctttcttttgatccagcagttttgaaacactgtttttgtagtatctgcaaagggatattttggagtgcattgaagcctacactaaaaaagaaaatatcatcaaataaaaa

SEQ ID NO: 971522 - DNA, 120 bp, Artificial Sequence
  ENSG00000225096_48 (sequence is synthesized)
gagaagcagattctaggttctagaaaagaaggctgaaaatacaactttaagggaaaggataatctgatgactaattctcatttatcaaaaagccactttgccttagatctatctgtataa

SEQ ID NO: 971523 - DNA, 120 bp, Artificial Sequence
  ENSG00000225096_49 (sequence is synthesized)
actccatgcttcacagtaaaatccttctaactttattgaaaaaagggggccacctagcaaataacaccaagagtattatttctggggttcagttaacccaaagacaattatttatcttac

SEQ ID NO: 971524 - DNA, 120 bp, Artificial Sequence
  ENSG00000225096_50 (sequence is synthesized)
taggtctataaacctattgtgtagtacataaatacataggctttagtcctagatagttggagcagatcctggctataccaattgttagccataagccacgatcaatgtacttaacttctc

SEQ ID NO: 971525 - DNA, 120 bp, Artificial Sequence
  ENSG00000225096_51 (sequence is synthesized)
caagtttctcatctttagaatggggataatagtgctatttactttatataattattgggaggaggaaatggcttcataaatataaagaacttagcatagtgaatgccacataataaaccc

SEQ ID NO: 971526 - DNA, 120 bp, Artificial Sequence
  ENSG00000225096_52 (sequence is synthesized)
taaataattgtagcaactgcttttattaggaagtcttccagatctttgtaatctttgtccagttgtcatcacaggcagaaataaaagaataaaaaatttccactgagaattacgctaatt

SEQ ID NO: 971527 - DNA, 120 bp, Artificial Sequence
  ENSG00000225096_53 (sequence is synthesized)
gagaattacgctaattatataaacataatgcatattctatgaaactaacattctcagaggtaattatacaattttaggagaaaacattattttaaaatttaccagtaaagcactattata

SEQ ID NO: 971528 - DNA, 120 bp, Artificial Sequence
  ENSG00000225096_54 (sequence is synthesized)
attattttaaaatttaccagtaaaacattgttataaatatcaataaaatattgtccaacctactgaaacatttagaacgttctcttcacttttcatagccatggactatgaaagtgttat

SEQ ID NO: 971529 - DNA, 120 bp, Artificial Sequence
  ENSG00000225096_55 (sequence is synthesized)
ggcatattatatgttttttgttatattcaaaaatagtttatccttgggaaaatactaactgtggaaggaaattctacaaagttagtgactggagggaataaacctaatgcatatgttgaa

SEQ ID NO: 971530 - DNA, 120 bp, Artificial Sequence
  ENSG00000225096_56 (sequence is synthesized)
ttcccagaagaccagcagcaggagcgacattccacaaccttgaatttaaggtgcttcctgtttacttctctgtgaattatcattgccacctctgtgaaatcacctagccacatgaggtag

SEQ ID NO: 971531 - DNA, 120 bp, Artificial Sequence
  ENSG00000225096_57 (sequence is synthesized)
caaagctgcctgccacccaacgggctgcagggggaactgtttcatttgtattagagttcttcaaagaaagagggagaaagagtgagaaagaaagattatggaaattcactcatatgatta

SEQ ID NO: 971532 - DNA, 120 bp, Artificial Sequence
  ENSG00000225096_58 (sequence is synthesized)
aagtcagtggtgtaattcagtccaagtccaaaggcctgagaaccacgggagccaatggtataagtcccagtctgaagccaaaggcctgagaaccactggcaggagggcagaggagtcttg

SEQ ID NO: 971533 - DNA, 120 bp, Artificial Sequence
  ENSG00000225096_59 (sequence is synthesized)
ctggtataagacccataatccaaaggactgagaaccaggaagctttgatgtccaagagaaggagaagatggatatccttgctcatgcttcttctgccttttattcctatttgagcccaca

SEQ ID NO: 971534 - DNA, 120 bp, Artificial Sequence
  ENSG00000225096_60 (sequence is synthesized)
acagattggatgatgtctgcccactttagtgagggaagattttttttacccggtctacttattcaaatgttaatatcttctggagatcctcatacagacacacccagaaataatgtttta

SEQ ID NO: 971535 - DNA, 120 bp, Artificial Sequence
  ENSG00000225096_61 (sequence is synthesized)
ccagcaatctgggcatcctcagcccagtcagggtgacacataaaattagcccttacaacattactgccattttacaatacagtggcaatgtatgaaaacgctaggtcccctacattcttg

SEQ ID NO: 971536 - DNA, 120 bp, Artificial Sequence
  ENSG00000225096_62 (sequence is synthesized)
gcaatacttggtatggtcagtctttttcgttttaatcattctaatgggaatgctgtaatatctcattgtggtttaatttgtattttcctcatgataatgataaagaatatctttacatgt

SEQ ID NO: 971537 - DNA, 120 bp, Artificial Sequence
  ENSG00000225096_63 (sequence is synthesized)
caagtgcagcagccatcttttgacaagtcatgaggataaaagccaacacactcaccatggcaagcaaagaaacagaaaaaccctgcacgtccgatgacataactgagcagtgaggcatag

SEQ ID NO: 971538 - DNA, 120 bp, Artificial Sequence
  ENSG00000225096_64 (sequence is synthesized)
ctctggaggatgagagaccatgaagggcaacagagaaagacccagccaacccagaaaacctcctgtggagaataagcctttgttggagagaagaaaccaatgctaagatgcgcctgcttc

SEQ ID NO: 971539 - DNA, 120 bp, Artificial Sequence
  ENSG00000225096_65 (sequence is synthesized)
agtcggatataatttatcgcttatcttcaagaaaaagaaactcaagtaacaaaaaaggtaaagaagtctcattctcgcacaatctttagaaccttgaagctgaaccacaggatcagtgag

SEQ ID NO: 971540 - DNA, 120 bp, Artificial Sequence
  ENSG00000225096_66 (sequence is synthesized)
gttgcttcttaatgcaggccctgatgttactaaacttgaacctacgtctcttctcagaatctttcatattcagtttttcagacaaaatgtagtgaaggatatgatgtttcctgtataatt

SEQ ID NO: 971541 - DNA, 120 bp, Artificial Sequence
  ENSG00000225096_67 (sequence is synthesized)
aatgctcagtaaatgctgttgactatgtaaaacaacctgtttagcacttctgggctgctaagcccctctaacctccgtacaacaaaaacttgtttcctgtgagtcctacagggagtcgag

SEQ ID NO: 971542 - DNA, 120 bp, Artificial Sequence
  ENSG00000225096_68 (sequence is synthesized)
aaatgtgaaggaaaaacatattttccttttgtagaaattcccacaatttaaactcttccaattagcacctaattggcaggatgcaatttgaaatcattgaattaaactgctttaaaaaaa

SEQ ID NO: 971543 - DNA, 120 bp, Artificial Sequence
  ENSG00000225096_69 (sequence is synthesized)
gaactgcctgtcacagcgtcctcaaagacttagtcccagcctttgaaaaactgctggtaccatctgcagaaacactaccggttttcactctcctaggatgacccaggtatagaatctgcc

SEQ ID NO: 971544 - DNA, 120 bp, Artificial Sequence
  ENSG00000225096_70 (sequence is synthesized)
ctcagcattcagaacaaaactgatggtgctagcatatataagactgaaacaccaaagtcctccgtggaagttaatgaatttctaatagtgaaataaggtggccaaggaggcagagatgga

SEQ ID NO: 971545 - DNA, 120 bp, Artificial Sequence
  ENSG00000225096_71 (sequence is synthesized)
ttctgcctcagcctcccaagtagctggcactgcagacacgcaccaccacacccagaatggaatactaacgtgctgcctagagatacagaagtgggatgaacgcagggccttactcagcat

SEQ ID NO: 971546 - DNA, 120 bp, Artificial Sequence
  ENSG00000225096_72 (sequence is synthesized)
ggcgccgccgaagccaagagcggcgccttccgcagagggactgcggcttcctgcgcagcgccccctaccggacaggcggcgggaaaacgccgcgcaactcagaccactggagcggagtag

SEQ ID NO: 971547 - DNA, 120 bp, Artificial Sequence
  ENSG00000225096_73 (sequence is synthesized)
taaggggttaatatgcttccatctacataaaagttcaaagtttgattattatgcattgcatatcagggtggatgactagttttgattttgtcaggataaatgtgttctccctgctccaac

SEQ ID NO: 971548 - DNA, 120 bp, Artificial Sequence
  ENSG00000225096_74 (sequence is synthesized)
cattatgccaaggatggccttattctagaacctcctaattctgttttgaacattcctagtcatcattcctaaaaatgaaatattatatactagtacatgagctcatgagagctttcatag

SEQ ID NO: 971549 - DNA, 120 bp, Artificial Sequence
  ENSG00000225096_75 (sequence is synthesized)
ctgtaattaaagatgcataaaaggcatgtaacactttcaactcaagtcacatgctggtctgttttatcaactattcgcaaagattctcctgattggtgattaaaagtggattaacaattt

SEQ ID NO: 971550 - DNA, 120 bp, Artificial Sequence
  ENSG00000276649_0 (sequence is synthesized)
cgcgcggctgctccccgcttcccactggcgagaggctggaggcggcgaaggagtcggggcgcgggggcgcggggggcgggggggcgtctgccttttaaccctccccaggaggtcgtgcct

SEQ ID NO: 971551 - DNA, 120 bp, Artificial Sequence
  ENSG00000276649_1 (sequence is synthesized)
ggggcgtctgccttttaaccctccccaggaggtcgtgcctctgagccccaaagctgaaggcccctcttgggggtgggtgcgggccggaggggcccgatcctttcagagccgggccgaggt

SEQ ID NO: 971552 - DNA, 120 bp, Artificial Sequence
  ENSG00000276649_2 (sequence is synthesized)
gaaggaaaagaaggaagtcctttgagatacattatctcactgaagcctcagcaactccgcggtgttcccagaggtgaggaaacacactgagagacagaacacgacttgaccagggccacc

SEQ ID NO: 971553 - DNA, 120 bp, Artificial Sequence
  ENSG00000276649_3 (sequence is synthesized)
tgccaggaggctggagctgccaacgacctatttttctgggcaagaagagccatttggagttagaggtctcagctgtgaagccagaacaataaaaataaaaacagcacggactcctgggca

SEQ ID NO: 971554 - DNA, 120 bp, Artificial Sequence
  ENSG00000276649_4 (sequence is synthesized)
gcctggaccagggaaccaactgccccaagagttgctgctcaccaggctggaagatgaggcagctgagacttcaggaggcctctgctcacacgccacctccttgagaggccttgccagacc

SEQ ID NO: 971555 - DNA, 120 bp, Artificial Sequence
  ENSG00000276649_5 (sequence is synthesized)
accctgttaaagtagtcaccctcacgcctgcccaatatgccctaccctcttccctattttatcttcatagcatgcatcacgacctgctaatattgtgtgtctccactgcattttgtctgt

SEQ ID NO: 971556 - DNA, 120 bp, Artificial Sequence
  ENSG00000276649_6 (sequence is synthesized)
ctccctaactagctccaggtcagtttatcctagtggcttgcactccagcggtctctcagactagccccgtggggcaagttattttgatgatctgtgcttccttcggggtaatgataggac

SEQ ID NO: 971557 - DNA, 120 bp, Artificial Sequence
  ENSG00000276649_7 (sequence is synthesized)
ctactgattcagggatcacactttgagaaccgctgaatagactgccattcaagccaagccaatcctcttggctctaccttcaaaataaacccagaatccaaccactccttcccacctgca

SEQ ID NO: 971558 - DNA, 120 bp, Artificial Sequence
  ENSG00000276649_8 (sequence is synthesized)
tcacactccggtcccagtaccttcatttctcacctggattagtgcagtcacttcctcactggctccgtacttcctggactccccaccttgttgcttcttcaataaaagcctcccaatggc

SEQ ID NO: 971559 - DNA, 120 bp, Artificial Sequence
  ENSG00000276649_9 (sequence is synthesized)
cttaccgagcccctgctatgtcctccggcccttacagagtaagggtaatctccaaggttcacaacaggccctttgtctgggtggccagaccagtcaggatttgaactcagttttccaaac

SEQ ID NO: 971560 - DNA, 120 bp, Artificial Sequence
  ENSG00000276649_10 (sequence is synthesized)
agtaacaattcccatctgttcagcagctactatgctttacagacttgtgacattcataccacacctgggggggtgagctaatcattccctcattctacagatgaggcagctgagacttca

SEQ ID NO: 971561 - DNA, 120 bp, Artificial Sequence
  ENSG00000276649_11 (sequence is synthesized)
ttaaatgagttaatatcggttaagtgttggccgctgccattgttttgtcccagagctgtagctccagggtctttaacagtaaacaataggttgtcaataaatatgtattaaatttaaaaa

SEQ ID NO: 971562 - DNA, 120 bp, Artificial Sequence
  ENSG00000286989_0 (sequence is synthesized)
ggggcgcggggtgcgggcagggccgccgctctcccggcttcccgcctagtgagcgcaccttggacccctgcggcttttccgagccgaaactcacgggctgtggccggcttcgtttcgcgt

SEQ ID NO: 971563 - DNA, 120 bp, Artificial Sequence
  ENSG00000286989_1 (sequence is synthesized)
cgtgcagctccgcgaccgcccgtggccacaccagtcggggacttcgtgctttacgatgggggcgcagcggtctggcacgcgcaggaccccgggccttgcaccccaacgctggccgccctg

SEQ ID NO: 971564 - DNA, 120 bp, Artificial Sequence
  ENSG00000286989_2 (sequence is synthesized)
gacccgcggcggggacccgcgcagtcagggacggacagcgcccacccggaggaaagcctgacagatgagacttcgcaagagtgaggagagactggctattctgctcacggtgtccttggt

SEQ ID NO: 971565 - DNA, 120 bp, Artificial Sequence
  ENSG00000286989_3 (sequence is synthesized)
ccccgacctctggatggccatgtctccgcccccccacggagtcaccacccagcctcacgaattcctggtcatcttgaaaaacccagtgcagtggtcaggaccccacaggatctcaggggc

SEQ ID NO: 971566 - DNA, 120 bp, Artificial Sequence
  ENSG00000286989_4 (sequence is synthesized)
tctgccagagccccggcccagcggtcaggcccccaccaactgtggtcacggtgcacctccgtccccggcatggagggccctgaccccctacaccagcctgttgggcccctggcagggtct

SEQ ID NO: 971567 - DNA, 120 bp, Artificial Sequence
  ENSG00000286989_5 (sequence is synthesized)
gctgaggcctctgcacctggcgcagagaggttgggggcagagaccttgggagaggcgctccctgccccctgcccccagctcccacctctgcttaggaagggcaaaccctgggctctgact

SEQ ID NO: 971568 - DNA, 120 bp, Artificial Sequence
  ENSG00000286989_6 (sequence is synthesized)
cttgccccagcgttgtgaggcgactcaggggctgccccagggaagcagagagtgatggtgactcaggggacccccatgtccttgcccagaactccccaggggttcagccgacctactgcc

SEQ ID NO: 971569 - DNA, 120 bp, Artificial Sequence
  ENSG00000286989_7 (sequence is synthesized)
caggtgtgagggcatgggcagtggggcagggcaggagcctggatgatggtatatggggtggggcggcccccaactatcttggcatgttggcctgaggacagctggggccttcaccctgtg

SEQ ID NO: 971570 - DNA, 120 bp, Artificial Sequence
  ENSG00000286989_8 (sequence is synthesized)
ccatgaccattccagcttcttgtagcagcacctgcatttccctctgggcagccccctttatccatcctcaggtcatggggagcttgggtggggctgacactcccctgcctaggagttggc

SEQ ID NO: 971571 - DNA, 120 bp, Artificial Sequence
  ENSG00000286989_9 (sequence is synthesized)
agatgacctgggcgcggccagccagactggaccccttagcctcgaggcctttgctgaagctcatgtgagggggcgactgcccctgacaggtgttggattccagctgctgtggccctgaag

SEQ ID NO: 971572 - DNA, 120 bp, Artificial Sequence
  ENSG00000286989_10 (sequence is synthesized)
gtgggtggtgggaagaacgggagaatgaagccagccttgggagaggtaggacgccagcccggcccagctgcttccagcatctggatccagcctcacctgaagccagccacctcctggact

SEQ ID NO: 971573 - DNA, 120 bp, Artificial Sequence
  ENSG00000286989_11 (sequence is synthesized)
gcaaagtcattgtcaacaccgaaacacagggtttctgaccattgcaacccagggtcccggcgtgtcgtggctgcagaccctgcagacccctatgaagatggtcctgcctgccttgcatcg

SEQ ID NO: 971574 - DNA, 120 bp, Artificial Sequence
  ENSG00000286989_12 (sequence is synthesized)
ggcctctagctagggactgtggttgcagacgtagttctgggactgagctcctggtgagaggccagtggtgagggaagagagaccagcagagaaaagagtggagcctcgggctgctagcag

SEQ ID NO: 971575 - DNA, 120 bp, Artificial Sequence
  ENSG00000286989_13 (sequence is synthesized)
agtggcagaaaccgagcctgcgagaggaaaacattgtttcccgcggcctcctgctgagccatggggacccagatattgcgaagtccagctggggccaaccctaaggaaggaaggagggaa

SEQ ID NO: 971576 - DNA, 120 bp, Artificial Sequence
  ENSG00000286989_14 (sequence is synthesized)
ggggacagggaggggtgaggaggagagggagggagtgacctctgcttagcacctgcacttgagcagcggtggcctttcacgcgcacacgcttccccacctggagcgccgtctccaatgct

SEQ ID NO: 971577 - DNA, 120 bp, Artificial Sequence
  ENSG00000286988_0 (sequence is synthesized)
aggtcatatcttcaccagctctgtggagcaagcatggttttctattatttgtaaaacaaaagtatagtgatgcctcagtggggagtgccttatcccactctcagtgatttaacagggtct

SEQ ID NO: 971578 - DNA, 120 bp, Artificial Sequence
  ENSG00000286988_1 (sequence is synthesized)
ggacttctgttttttaaaagatatattttatcctaagcttttagaagtcaagatggggttaggggataaaagtcagggagaggaatggagagaggaagaacagagcccaaggaagaaagg

SEQ ID NO: 971579 - DNA, 120 bp, Artificial Sequence
  ENSG00000286988_2 (sequence is synthesized)
tgacagtctggacaacgcaagaacccctgcggtctccagcaaccacactcatgtgacttctgccttcacccttcacatgcaagaggaggcaagctcagttgagttctcacctccaagaac

SEQ ID NO: 971580 - DNA, 120 bp, Artificial Sequence
  ENSG00000286988_3 (sequence is synthesized)
ttgcagttctcctggggaggcaggaccgatgcccatggaacaaggtgtgccagtgagccccacagaaaggggcagtttcccgcaccaggatacacttcaaaaaagcacaattcagattat

SEQ ID NO: 971581 - DNA, 120 bp, Artificial Sequence
  ENSG00000286988_4 (sequence is synthesized)
actgggctccagtcagggtggggttttttgtcgttgttgttcttcaaatgctgtccaccaccccagaggttgtttctttgctgttcgtgggcctggagtcccctttccccaggtctttac

SEQ ID NO: 971582 - DNA, 120 bp, Artificial Sequence
  ENSG00000286988_5 (sequence is synthesized)
atggctgctccatctctccatagaagttgcagctcaagtgccaccttttcagagagcccttcctggaccgttcagtataaatgaagttctttccccaagtactcctgatggcagcaactt

SEQ ID NO: 971583 - DNA, 120 bp, Artificial Sequence
  ENSG00000286988_6 (sequence is synthesized)
gtcacagtgtccttctttgcccttaccatgagctggtatttttcttgtgtattgattcactgattaattgcttccttgattatccctcatgctgcccattagaatgtagctccatgggag

SEQ ID NO: 971584 - DNA, 120 bp, Artificial Sequence
  ENSG00000286988_7 (sequence is synthesized)
cagggaccttgtctatcttgtcctccatggtatcctagaattctaagatgtaggatagcttaacagaggagactcttgaaatatttgttaaatatgtgataaaaaataaaaggaagaatc

SEQ ID NO: 971585 - DNA, 120 bp, Artificial Sequence
  ENSG00000286987_0 (sequence is synthesized)
gcttcctaggagatagtgttaccttcactgcatagcagtatataaacacgtaggtcttcggtaacaacaatctttcttatctttgtctagaatactggacatctctcacatgttatttat

SEQ ID NO: 971586 - DNA, 120 bp, Artificial Sequence
  ENSG00000286987_1 (sequence is synthesized)
atttcttagaagatgaagtctatttcattcagctttgctgctttgttgcagcttttttcttttttcctacgatctccaggttcatttttcaagccacttggtcaaattaggtggtctcta

SEQ ID NO: 971587 - DNA, 120 bp, Artificial Sequence
  ENSG00000286987_2 (sequence is synthesized)
tgtaaaccaagaaaaatggaaatgtggcctttgtttgacaaaggcctttcttctgcttcccaggtatcatcagatccccttgtgactcaggcgagtcaggctacagagggcagctgcgct

SEQ ID NO: 971588 - DNA, 120 bp, Artificial Sequence
  ENSG00000286987_3 (sequence is synthesized)
ctgctgggggctcggctgtggagcaggaagaggcccatgaactctgctctcctcttgcttggcgcactggcctgacctgcactcagcggccacaaccttccattacagcttcctcggggc

SEQ ID NO: 971589 - DNA, 120 bp, Artificial Sequence
  ENSG00000286987_4 (sequence is synthesized)
ccagatattgttctcatagcttcaggctgtctttccacacccatgttgcgtttctgaagctcagtgcgggtcactcaaaggcagtgccctgccaagcctctcagtgaatcaggaaatacc

SEQ ID NO: 971590 - DNA, 120 bp, Artificial Sequence
  ENSG00000286986_0 (sequence is synthesized)
acaggaagccatgaacttgcaattccaccatttcttccagttgcttttggagaattcagtttcaaagtgcgagttgaggataacattctggctttcagaaatcataaataatgaacggca

SEQ ID NO: 971591 - DNA, 120 bp, Artificial Sequence
  ENSG00000286986_1 (sequence is synthesized)
catttgagtcattatcggtggttatccctcttagagtcctctttggtgtgctccgacctaaggcacccgtggagaaggagaaggagatctcaagaggaaaaatcaatgcaggaacaaaga

SEQ ID NO: 971592 - DNA, 120 bp, Artificial Sequence
  ENSG00000286986_2 (sequence is synthesized)
aactcttgggtctagtgaagagagactggatcttgctaggcgagtcagggatggggagctggaactgggaaatgttaatttgcaagggtcccctgtgtagcaagaggaaactgcacatcc

SEQ ID NO: 971593 - DNA, 120 bp, Artificial Sequence
  ENSG00000286986_3 (sequence is synthesized)
ccaagttctttcttctccttcaacattcccaacatctgggcttcctctgggtcctggtttcagatgattttcacatgtccatttcttgcttctaccctgggtgagttaaatttggatgac

SEQ ID NO: 971594 - DNA, 120 bp, Artificial Sequence
  ENSG00000286986_4 (sequence is synthesized)
aatacccagatcttacagtttgaaggagaattaaatggaataatatgtgcagaagtgtttcgtcaacagcaaagtgcatttaaaggcagaatgtgcatgtgagacagccaagtgtaaagg

SEQ ID NO: 971595 - DNA, 120 bp, Artificial Sequence
  ENSG00000286986_5 (sequence is synthesized)
ggtccccagagaaactccaaccgacctgcacactggaaggagtgtgcactggggtggagcctcgggaagttcctgccctttgccgtagggaaggagcctggcctctcctgttcagagatg

SEQ ID NO: 971596 - DNA, 120 bp, Artificial Sequence
  ENSG00000286986_6 (sequence is synthesized)
gaagcaggaactcaatctgtgaggtgggaagcctgtacttgcaggactctcactctgctgagtccctgtttccagtttttcccatttttgcccaataaattctttttttctcacccttca

SEQ ID NO: 971597 - DNA, 120 bp, Artificial Sequence
  ENSG00000286985_0 (sequence is synthesized)
gaaatgcaatgtgtgagcctgtctcgaattggatcctagaccagaaaaaggacatttgaagggaaactggtgcaatttgaaagggacctgcagattagacaatagagtgcctcaagaggg

SEQ ID NO: 971598 - DNA, 120 bp, Artificial Sequence
  ENSG00000286985_1 (sequence is synthesized)
aaagtttcttatggtcatctcacaacaatcgttgtccctccaatagggaattccgccaaagtctgctccgcaaagcacgagcaaatgttcagggtctggagacagtagattgctccagga

SEQ ID NO: 971599 - DNA, 120 bp, Artificial Sequence
  ENSG00000286985_2 (sequence is synthesized)
gaaatatgaaggagccaccgtgattccatatctgcctgggaactcttttaagctgctgaggtcagaagagatttgcaaagccctccaagagactttaccgaaagacatcgtgtgctgggg

SEQ ID NO: 971600 - DNA, 120 bp, Artificial Sequence
  ENSG00000286985_3 (sequence is synthesized)
tgtttttcttcattagttgtgtttgtagcttcttgaaattattgtatatggactggcacccgcctcagcctccagtcatcagcacaactgcatcgggggatggcctcctggcttcatcta

SEQ ID NO: 971601 - DNA, 120 bp, Artificial Sequence
  ENSG00000286985_4 (sequence is synthesized)
tcaaacaagccactgtctgcagacgttctgggatttgttgtatttggggttaaacgggggaggagggaaaattaacgggtttctataaagaatcacttctctggttctcgttaaagctct

SEQ ID NO: 971602 - DNA, 120 bp, Artificial Sequence
  ENSG00000286985_5 (sequence is synthesized)
gagggtcacaggaaatctctggtttcaaacaactgtatgtggcgtgatcctgtttacttgaaatgtctagctgagacctagctttgccacattaatactaaataagtaatatccacagaa

SEQ ID NO: 971603 - DNA, 120 bp, Artificial Sequence
  ENSG00000286984_0 (sequence is synthesized)
gtgggcttctaatctggtcaggtggtgataaattcccttagcatttgcttgactgagaaagaccttatttcttctttatttaggaagcttagtttggccagatataaaattcttggctga

SEQ ID NO: 971604 - DNA, 120 bp, Artificial Sequence
  ENSG00000286984_1 (sequence is synthesized)
tatttttttttctttaagaaggataaaaataggctcccaattttgtctggcttttaaggtttctgttgcaaagtttactactaatctgataggatttcctttataaataatttgttcttt

SEQ ID NO: 971605 - DNA, 120 bp, Artificial Sequence
  ENSG00000286984_2 (sequence is synthesized)
ttctgtagatgcccttaagatttttttttatcattgactttggatagtctgatgaccatatgcctttgtgatgcttatctcatttagtatctcacaagtgttctctgaatttcttgaatc

SEQ ID NO: 971606 - DNA, 120 bp, Artificial Sequence
  ENSG00000286984_3 (sequence is synthesized)
tggatatccacctctctagcaagattagggaattttttctggattattctcctaaatatatttttcacattgcttattttttcttattctctttcaataatgcctataagtcataggtac

SEQ ID NO: 971607 - DNA, 120 bp, Artificial Sequence
  ENSG00000286984_4 (sequence is synthesized)
agtcactttacataatcccatatttcttgaagtctatattcattttttaaaattcttttttatttattttggtctgactggctttattcaaaagaccactcttcaatctctaaaattctt

SEQ ID NO: 971608 - DNA, 120 bp, Artificial Sequence
  ENSG00000286984_5 (sequence is synthesized)
tcttctgcttggtctagtctattgttaaagcttccaactatattttgaaattcacttagttaatttgtcaattccagaagttctattattttaatatagctattccatctttcatatcct

SEQ ID NO: 971609 - DNA, 120 bp, Artificial Sequence
  ENSG00000286984_6 (sequence is synthesized)
aaattgtttttctgtttttgtatgtgctggttttcaactttctcttttatcttattgagtttcctggcagtccatattttgatttatttatctgtcatttcagactttttattttgatta

SEQ ID NO: 971610 - DNA, 120 bp, Artificial Sequence
  ENSG00000286984_7 (sequence is synthesized)
agagtcattactagagagctagtataatcctttggaggtatcactatactctgttttttgcactgctggaattcttgcactaattccatctcatctgaaggagctgttccttcttatttt

SEQ ID NO: 971611 - DNA, 120 bp, Artificial Sequence
  ENSG00000286984_8 (sequence is synthesized)
tgaatctgctattgtttgaatgggacttttatatttttaaattctttttttcccatgagggtatgactgtagtttatgttttgtatgattgtttaactttatttctaggttgttttagaa

SEQ ID NO: 971612 - DNA, 120 bp, Artificial Sequence
  ENSG00000286984_9 (sequence is synthesized)
ggccaagtatttgtatgggttccttggttggggtttttgtttgtttgtttggtggttttcgttgatactacttgtttcgcagtagattggatgcatgaaccaacaattctctcctgcagg

SEQ ID NO: 971613 - DNA, 120 bp, Artificial Sequence
  ENSG00000286984_10 (sequence is synthesized)
ttgtgcagttcaagcttcagttcagtaggtggcagttaattgtaagagcttgattgccctcaggtaggtgatgatgagtagaagcacctgctctcatgtggccagtggtggtgggagatt

SEQ ID NO: 971614 - DNA, 120 bp, Artificial Sequence
  ENSG00000286984_11 (sequence is synthesized)
gtgttggagtgtgctaaggtattctgggctggacttggggaatgcaacacctcctcattgtgggaagacaataattcaatccacttccctatcacacccctgtcacagggctcaggactt

SEQ ID NO: 971615 - DNA, 120 bp, Artificial Sequence
  ENSG00000286984_12 (sequence is synthesized)
tcagtttatacagacttcgtcctgtgtggctgtggactacaaatatgcccctctagcagctttcacctaactgggctcagggcagagccttttctcatagtccagaactgactactctgg

SEQ ID NO: 971616 - DNA, 120 bp, Artificial Sequence
  ENSG00000286984_13 (sequence is synthesized)
cttgtctgcctctgttgctgggatgctgttactctgtgtaggaagcaggaattgagcactatccttcatgcaagaactagctgcacaaactcactttcaactgggatagaactgccacag

SEQ ID NO: 971617 - DNA, 120 bp, Artificial Sequence
  ENSG00000286984_14 (sequence is synthesized)
gaagggctggaatggctttctccaagtgcatacatccacccccagtgagaagagtctctgctgtgtttgcaacagtgaacaaggaaagcatggagatgaccccgtctccttgcccttgac

SEQ ID NO: 971618 - DNA, 120 bp, Artificial Sequence
  ENSG00000286984_15 (sequence is synthesized)
attcctacattgattgtcaaggtgttgaaatttccaccatgtagttttttctccacactcacagagaggctcacggtaaacctcctaaagcatcttattaaaagaggtaatgagctttct

SEQ ID NO: 971619 - DNA, 120 bp, Artificial Sequence
  ENSG00000286984_16 (sequence is synthesized)
tgtttcaaggccctcaaacttaacctttttttccaatatttagaaaaggctttttcagttaacgcaactctttcttgcctcaaattttctttaaaattgtgatgcaaatataattctctg

SEQ ID NO: 971620 - DNA, 120 bp, Artificial Sequence
  ENSG00000286984_17 (sequence is synthesized)
tagtgaatctctctaaccttttctaaattgaaagcattatgcaaacatttatagcaatttaaacaatcattttggatagcaattttatgagtcaatatttctttccaagaaaatgtttgg

SEQ ID NO: 971621 - DNA, 120 bp, Artificial Sequence
  ENSG00000286984_18 (sequence is synthesized)
ttggcaaactataattttggagaaaatattaagattaacattttagtttccagaaatgattgtatttgtactatgaagcagaaaatttatgtaaattattaaaaataaaaaacttttggt

SEQ ID NO: 971622 - DNA, 120 bp, Artificial Sequence
  ENSG00000286983_0 (sequence is synthesized)
caacacataaaataacaccaaccattgtctattgattgtgacaatgcttgttcctgtctcctgggacacatatgtgagcactttaagttgaactttgcaaatggctttctgagactgagc

SEQ ID NO: 971623 - DNA, 120 bp, Artificial Sequence
  ENSG00000286983_1 (sequence is synthesized)
ttgaccagagctgaccttagttggatcaaagcagaaaaaagcaatagatcagttcactgcaaggccaagaggagaggaggtttttacttccccaagtggaggtgagtcagaggaacaaat

SEQ ID NO: 971624 - DNA, 120 bp, Artificial Sequence
  ENSG00000286983_2 (sequence is synthesized)
tctagtcccacttctaacactatctagccaggtcagcatacgcaactcacttcaattctctgaacttcacccaatctcaaagggatgctgttgtaactcagacaatggtgacatcaatga

SEQ ID NO: 971625 - DNA, 120 bp, Artificial Sequence
  ENSG00000286983_3 (sequence is synthesized)
tccttccccttaaactctagattttaacattgttttgcaacctcattcccttaattgtggatagcccattgtctctcccaaagacttgtgaagattatgggcaggcttccatttccttgc

SEQ ID NO: 971626 - DNA, 120 bp, Artificial Sequence
  ENSG00000286983_4 (sequence is synthesized)
cacctttggcttaaagctttgtcatttactcttgtcatgatatattatcagtacaaaatgatgttgcttcccattatccagacacagaaaccatctcttccccttgatttccctcaaacc

SEQ ID NO: 971627 - DNA, 120 bp, Artificial Sequence
  ENSG00000286983_5 (sequence is synthesized)
cactaacacaagacctttgtatttgtagcagacttctggatattcaaatacaaacaattaaaaataggatctttaacttctttcttctcaaagttcattattgaacatctcctaagacag

SEQ ID NO: 971628 - DNA, 120 bp, Artificial Sequence
  ENSG00000286983_6 (sequence is synthesized)
atcctctttctcttctctgttctcctctgaatttgtattctttctgttgtagaatagcttactcatatctttttagcaccatctccttccaacctcaacttgcattctacactgagtggc

SEQ ID NO: 971629 - DNA, 120 bp, Artificial Sequence
  ENSG00000286983_7 (sequence is synthesized)
tcattgtgggggttcagtcaggctggtgggaaaagttttagttataataaccacaaaccctcttggaaggcctgagagtttgcataactttggtaatagatctggctgaaggcagccaga

SEQ ID NO: 971630 - DNA, 120 bp, Artificial Sequence
  ENSG00000286983_8 (sequence is synthesized)
gtccctttgcaggagccagagagcttagggtgcaaatacaaaggaatgtagagtagtttatctaactaacttgtttactcatgtggtcctaagactaacctttgatttaccgcgggtgct

SEQ ID NO: 971631 - DNA, 120 bp, Artificial Sequence
  ENSG00000286983_9 (sequence is synthesized)
taattgctttttactctgaaagtccacaatgtcaattaccctctagtggtgttgactcgagcctttgtcaattaaacttcactgaataaacgcgagtctcactggctggtcagggctgtg

SEQ ID NO: 971632 - DNA, 120 bp, Artificial Sequence
  ENSG00000286983_10 (sequence is synthesized)
gttacaactaagtggcatggatgctcagtagaactggcaaagcagaatatctgtgtatcagtgtattttattcgtccattattgggtcagtgtctgcaggacagacccccccccagatca

SEQ ID NO: 971633 - DNA, 78 bp, Artificial Sequence
  ENSG00000286983_11 (sequence is synthesized)
gggaagcttctgactcttgtctttagatattaactgtttatatctttatttaaagaacttacagtaacagtagacata

SEQ ID NO: 971634 - DNA, 120 bp, Artificial Sequence
  ENSG00000286983_12 (sequence is synthesized)
tatttaaagaacttacagtaacagtagacataactactggccaaattctcagggacttctgagcattcataatgctcagcacttataatgcactaggaattgtgctgagaattttcacat

SEQ ID NO: 971635 - DNA, 120 bp, Artificial Sequence
  ENSG00000286983_13 (sequence is synthesized)
cagtcaattcacacattgccttcaaagctcccaaacgtggggtcgacatcctaaactgagttcaacctgaggaatccatcaacctgactcattctaaggtcacatcatatagagtggttt

SEQ ID NO: 971636 - DNA, 120 bp, Artificial Sequence
  ENSG00000286983_14 (sequence is synthesized)
ggagtttggaatttgttcccacaggattaactgtagtgaaaatatcccgatgttatagaagaatgaacaagaagagaaggaggaagaggaagatgagatctaatgtgaatctgactcaat

SEQ ID NO: 971637 - DNA, 120 bp, Artificial Sequence
  ENSG00000286983_15 (sequence is synthesized)
ttcttgcagaactatttgagtaaaactagcagtggaaatgtccacagataaatcaagatgtttctgacataggaataagaaactgcagttttcgttcaagggcaatgtgtctatgctgga

SEQ ID NO: 971638 - DNA, 120 bp, Artificial Sequence
  ENSG00000286983_16 (sequence is synthesized)
gaggaaggctggagatcgagcatagaaaggtctctgttcctggggcctagtgcagtatccatgattcctactgaagacacaaggcaaaggggttgcagaaaagaactgtataaatacctg

SEQ ID NO: 971639 - DNA, 120 bp, Artificial Sequence
  ENSG00000286983_17 (sequence is synthesized)
ctgcagtagctttagtgggaagatcagtgggtaccactgcagaggctcctctggtgggctgcagtggcagtgcctttgcaaacattgatggaagtgttgccatttgggaagaacatttca

SEQ ID NO: 971640 - DNA, 120 bp, Artificial Sequence
  ENSG00000286983_18 (sequence is synthesized)
gcaggaaacatcgccataggcaactctgggaagaagctttgagaagagaggggaaaaggggacattacaagtgcctcttggaaattcccagaacattctgtgggctgtttgagggggcta

SEQ ID NO: 971641 - DNA, 120 bp, Artificial Sequence
  ENSG00000286983_19 (sequence is synthesized)
catttttgcagatcatgtgaaagttgatccagaagaatacttttcgaagaatcagatgctgaggccctgacagcatgcttgatcacagctgaagcatggtaggaacagcagcatcaaggt

SEQ ID NO: 971642 - DNA, 120 bp, Artificial Sequence
  ENSG00000286983_20 (sequence is synthesized)
aacaccttaaaaggaataatctccaagctgactcttgctgcctcaagggccaaactgtgacttttgcgacaagcccgtgtgatttgtatgttggacattcagggatatggaatatgatgt

SEQ ID NO: 971643 - DNA, 120 bp, Artificial Sequence
  ENSG00000286983_21 (sequence is synthesized)
attcagggatatggaatatgatgttgaaatgaagtgtttgtttttctcattgaggttgtaaataagcattattagtccagaattatgttaacgaggcgggtggatcacctgaggtcagga

SEQ ID NO: 971644 - DNA, 120 bp, Artificial Sequence
  ENSG00000136315_0 (sequence is synthesized)
accagctggatcaattctcataggagccacagcgcggagactgtgtatgcgcagacaccagcaaacatgttctatatagttgcatgtgacaacagggatcaacgacgggaccctccacag

SEQ ID NO: 971645 - DNA, 120 bp, Artificial Sequence
  ENSG00000136315_1 (sequence is synthesized)
agatcccatccctccatgtactctgggtgtcagcatctgtcctcttcagtctctataccccttccacttgcctgagctgaagtgccttgtgaagcctgcaataaactgctttgcaaattc

SEQ ID NO: 971646 - DNA, 120 bp, Artificial Sequence
  ENSG00000286981_0 (sequence is synthesized)
atgcaagcaagacccagcggcccgaggggatttcggttgctctctgcgtgggggcgcagtctccactgcagatcagcacccgcccgcggggaggtggccacgtttctctcctgaacacca

SEQ ID NO: 971647 - DNA, 120 bp, Artificial Sequence
  ENSG00000286981_1 (sequence is synthesized)
gttgatggcccgccttcctaaaaggccgtgtggcgtctccagtggctacaacggggcgcgccaatggctcgtgcgtggaggcaactggtcatctccttcatgctgaagaaagctgccatc

SEQ ID NO: 971648 - DNA, 120 bp, Artificial Sequence
  ENSG00000286981_2 (sequence is synthesized)
ctgcccagggaggagtaggacaagaagaggggagaagagactctgggggggaaaagaagtcaggcggagatatatgggaacacaaagaaaaaacgagagccagagtacacaagacgagac

SEQ ID NO: 971649 - DNA, 120 bp, Artificial Sequence
  ENSG00000286981_3 (sequence is synthesized)
agaaaaaagaaatgtaagggagtgacggcgaagaagaggatagaacggtaatggaagcagaagggcaaagagggacaagtaagaaggagagaattctaggcctcgggaagagaaagttcc

SEQ ID NO: 971650 - DNA, 120 bp, Artificial Sequence
  ENSG00000286981_4 (sequence is synthesized)
ctgcactgcggaatccggcctaaaggaagaggcaaccaggtgcagcacccaagcccaggtgccagtcatttgccgctgggctctcagacccattctccttttgcggctgtcacatattct

SEQ ID NO: 971651 - DNA, 120 bp, Artificial Sequence
  ENSG00000286981_5 (sequence is synthesized)
gtagggattctgagccctgccctctgtcatcttgtccactggcttctcctgctttccaccactgggtgggcttggagggtgggaggcagggagaagccagggggactctcatcccctact

SEQ ID NO: 971652 - DNA, 120 bp, Artificial Sequence
  ENSG00000286981_6 (sequence is synthesized)
ttggaagatgtctgccgcagtagttgcactaactttgtggctccaactcctattggacaagccctccagggttccggctgtctcctctctttgcccctccagcctcaggggagaaggcac

SEQ ID NO: 971653 - DNA, 120 bp, Artificial Sequence
  ENSG00000286981_7 (sequence is synthesized)
gtccagcagttgctaatctcaggattgcctcaccttaccctagttgaacgtccagttctttcaacacttgtaactaatttgctgcattaaattattgctattgactcgcttgggaaagaa

SEQ ID NO: 971654 - DNA, 120 bp, Artificial Sequence
  ENSG00000286980_0 (sequence is synthesized)
aaagtgctgggtttacaggcgtgagccacggcgcccggccttgagacactttcgggaactttaaaagatgcctaccaccatttgtctctcatgaagatgtgaactgcgactggaaacagc

SEQ ID NO: 971655 - DNA, 120 bp, Artificial Sequence
  ENSG00000286980_1 (sequence is synthesized)
tttgtctctcatgaagatgtgaactgcgactggaaacagctcagtctctcacagggaaagcacaatgacacagaaggaaatatagaagtccccaaattaggaatcttggattttagaccc

SEQ ID NO: 971656 - DNA, 120 bp, Artificial Sequence
  ENSG00000286980_2 (sequence is synthesized)
agtgttcccttaactgcttaaagtgtgacctcaagccatatactgacatcaacacttaggaagaaataggactgcaatgaggacaaaacctgttacagggaaaggaaatgatagaggcct

SEQ ID NO: 971657 - DNA, 120 bp, Artificial Sequence
  ENSG00000286980_3 (sequence is synthesized)
ggaaaacaaagcaaataacaagagtcagatgttgaaggaatagagggaaatatactaagaggaaaaaataagaggcgtacacatggccaggagtaatttgagttaccagaggaagcatgg

SEQ ID NO: 971658 - DNA, 120 bp, Artificial Sequence
  ENSG00000286980_4 (sequence is synthesized)
agaaaaacagctctccaaagatgtctacatgaaaatcctgactctgcgaatgtattactttacacagcaaaaggaatttggcagctgtgatttaatcgaagatcatgagatggaaagatt

SEQ ID NO: 971659 - DNA, 120 bp, Artificial Sequence
  ENSG00000286980_5 (sequence is synthesized)
attatctgtgtgcatctaacataatcacaaaggtccttttaatgtgaaagaggaagacaggagagtcagagggtcagagaagatgtgaatacagaagcagaggtcacaacgacgtgagaa

SEQ ID NO: 971660 - DNA, 120 bp, Artificial Sequence
  ENSG00000286980_6 (sequence is synthesized)
aggcacatctggctttgaagatagaggggcgatgtgccgaggaatgcaggaagcctaaaaagctgaaataagcaagaagtggattctttcctgctgctgccagaagggacatacccctgc

SEQ ID NO: 971661 - DNA, 120 bp, Artificial Sequence
  ENSG00000286980_7 (sequence is synthesized)
agacaccttgatttttgccccataatactctttttagatttctgactcatagaaatataagataataaatttgctttgttgtaagccactaagttagtggtaaacggtaagtttgtaaag

SEQ ID NO: 971662 - DNA, 120 bp, Artificial Sequence
  ENSG00000286980_8 (sequence is synthesized)
caataagaaatgaacagacatttaagaatattattttaagtctatgcttagacttttcccaagaatatttatgcaatgggattatattctagttttataactgagttaatttatatagca

SEQ ID NO: 971663 - DNA, 120 bp, Artificial Sequence
  ENSG00000276390_0 (sequence is synthesized)
acactgtagatagttttggaatttcatataaatgattataccgtatgcattatttaagtttggcttcttttgctgtcattatatgagatccatattgtgagtagcagcagttctttttca

SEQ ID NO: 971664 - DNA, 120 bp, Artificial Sequence
  ENSG00000276390_1 (sequence is synthesized)
ttgctgaccagaattccattgtgtggatgtctcaatttttgtgtccattctcttattgataatacttttgtattgttggcggtttggggctatgatgaataaacctgctgtgaacattct

SEQ ID NO: 971665 - DNA, 120 bp, Artificial Sequence
  ENSG00000276390_2 (sequence is synthesized)
ggatttgctgggtcatagtttataaatacatgtagttttagaaaatactgtcaaacagttttccaaattatttgtgtggtatttttcttaataaaactaaggctaattaaaagagcgctg

SEQ ID NO: 971666 - DNA, 120 bp, Artificial Sequence
  ENSG00000276390_3 (sequence is synthesized)
ggacttttatttagtttgccatctgcttcaggattgtcccaatataagagaggtaaaattttgagtcttgaatttatcactgttggaactactttctgaaaatagaatttattctcaagt

SEQ ID NO: 971667 - DNA, 120 bp, Artificial Sequence
  ENSG00000276397_0 (sequence is synthesized)
agcttcggatgcatcagacacaaacgctggataaagctgctcattcacataaagcaccacctgctgccgctacctggaatatccacactggataactcgaagcttggtggaaacagaggt

SEQ ID NO: 971668 - DNA, 120 bp, Artificial Sequence
  ENSG00000276397_1 (sequence is synthesized)
tggaaaaagcagaaaataaaacaaagggatggaagatgggtgctctgaattccatttccttagaaaccaacaagagctccttcagtatgtcgtggacaccttcagttgagcacagctcag

SEQ ID NO: 971669 - DNA, 120 bp, Artificial Sequence
  ENSG00000276397_2 (sequence is synthesized)
gcaccgcaaggacactccgctcatgtaagttggccttagtaggtttttcttccatgagtgaatttctattcagagcaagtaaaacacagcctgtgacactgtttgtcccgaatgtcaaca

SEQ ID NO: 971670 - DNA, 120 bp, Artificial Sequence
  ENSG00000276397_3 (sequence is synthesized)
gcgctctctgtgatcagcccgttgtacgaggtgttggaatacatgaacaacgcaaacggaatatctcgtctctcatttctgtctttaatcattggctgcctccactccagttacacctgg

SEQ ID NO: 971671 - DNA, 120 bp, Artificial Sequence
  ENSG00000276397_4 (sequence is synthesized)
gccgtgctctgatctgcaggtttaactccaggggaaacttcacctgtttgatgacagccgtcaagtgaaccagatgttacctctagtaagaaaggatgggcaggtagagtgtgatgtctg

SEQ ID NO: 971672 - DNA, 120 bp, Artificial Sequence
  ENSG00000276397_5 (sequence is synthesized)
gggtgctcctgactcagggcggcctccctggctcccctcacccagttggacctgggtgcccttgtcctactcttctatagcatccttggcttttccttcatggtgcccatcacacattcc

SEQ ID NO: 971673 - DNA, 120 bp, Artificial Sequence
  ENSG00000276397_6 (sequence is synthesized)
agcgagacacggatttgtgggattatttgcaccgggtgaagttggcctgttccactagtttcctgactccaggagctcagagcttttgtcattctttcttcactctgtgcatgtaacaca

SEQ ID NO: 971674 - DNA, 120 bp, Artificial Sequence
  ENSG00000276397_7 (sequence is synthesized)
caagagacgtttcctgaatgaagggcccctgatgctgtggcacaaataacaaaacattgggaagtagtacgtcttgccagccctactgctggccctgaatgactggaaccagtgcttcaa

SEQ ID NO: 971675 - DNA, 120 bp, Artificial Sequence
  ENSG00000276397_8 (sequence is synthesized)
ttttaaacatttgattgacaagttattttcagcagtttgccctcaaaagatgaccttgtgtcgtttacttctaacctgatctgggcttagcgtatctactcattccttaggtcagccaca

SEQ ID NO: 971676 - DNA, 87 bp, Artificial Sequence
  ENSG00000276397_9 (sequence is synthesized)
ttcaatcagtcgtcacagccctgggcacagactttctcagcaagagtaattttctcacttatgctaacaatttgacttcttcaaacg

SEQ ID NO: 971677 - DNA, 120 bp, Artificial Sequence
  ENSG00000276397_10 (sequence is synthesized)
ctcctgggctcaagcaatcctctgcctcagctccagactagctgggacatagatgcatgtcaccgtgcccagctcaaaagcgtacttttacctacactgatgatatcaagacatgataga

SEQ ID NO: 971678 - DNA, 120 bp, Artificial Sequence
  ENSG00000276397_11 (sequence is synthesized)
acaaaaagcatatttcctgagtgattttttaaaaatttcaaccgcctgtacacagactgtaacaccagcagtcgtgaggaagtgcttgggacttgccggttctcagacttgcctcttgcc

SEQ ID NO: 971679 - DNA, 120 bp, Artificial Sequence
  ENSG00000276397_12 (sequence is synthesized)
agggaggagaccccatctaataacaaatgtctttccctaatgaagtccagaaccagatctttcatggacctagattttacctgcagagatgtggaacagccacagttggaaaaccatgag

SEQ ID NO: 971680 - DNA, 120 bp, Artificial Sequence
  ENSG00000276397_13 (sequence is synthesized)
tgcttgatgttaaatgaaggcaacactcctcaattctgagattgtttatattgttttgggaatgtaatcgttggagaaaacatttctcagcctggtcacaaaccgtccctcccacaacaa

SEQ ID NO: 971681 - DNA, 120 bp, Artificial Sequence
  ENSG00000276397_14 (sequence is synthesized)
caacaatggagtataagaagtacagttttacagagtattttgggggctttcttctcatgacaagagtctttcttatggtacaaatagttgtgtcctttctcacagcataaaatatacaca

SEQ ID NO: 971682 - DNA, 120 bp, Artificial Sequence
  ENSG00000276397_15 (sequence is synthesized)
taaaatagtaaaacgggagagacagtactgacagtggatgaagccaggctgacgtgactgagaggcaagtttcaacatcaggaaaaaaaacaaagaccacacttactcctcaggagatac

SEQ ID NO: 971683 - DNA, 120 bp, Artificial Sequence
  ENSG00000276397_16 (sequence is synthesized)
atgggtgatctttcaagagaccatcagaaagaggctgcttgggtcccgtccgaggagagacagaagactgagccgtggtgtactctattatctgacgcaacagccttttctgcaggatat

SEQ ID NO: 971684 - DNA, 120 bp, Artificial Sequence
  ENSG00000276397_17 (sequence is synthesized)
taaaggactttataaatattaattatctcattcatcctcatcactttgtgagagccgaagacattatagatggccagtcacccatttcactaagtatctaaagccaccttccacacgtaa

SEQ ID NO: 971685 - DNA, 120 bp, Artificial Sequence
  ENSG00000276397_18 (sequence is synthesized)
tcattaacatttcaaaatactttcacctctttattattcagagatgttgagtttatgaaggactcggtcctttttggttctttctgccccgcattaataaacacctttgaattactaaac

SEQ ID NO: 971686 - DNA, 120 bp, Artificial Sequence
  ENSG00000276397_19 (sequence is synthesized)
agtcctcatccacactgcccgccggcacccaggctcaaggtgctggggaatgtgtggcccttccttccctctgcccccgcaggtgtggccaccagtgctgcacaggcctctcagccatcc

SEQ ID NO: 971687 - DNA, 120 bp, Artificial Sequence
  ENSG00000276397_20 (sequence is synthesized)
cgctgttgtccttttgcttttagttttggaatctggtccttggggttgctgggttttgttttgcttttgggatgtcaagcaagcattggctatgatctccagagttcagatggtccccta

SEQ ID NO: 971688 - DNA, 60 bp, Artificial Sequence
  ENSG00000276399_0 (sequence is synthesized)
cctcaggcctgccaggacggtgttcgggatcaagaggaccacactccagcccaggacaaa

SEQ ID NO: 971689 - DNA, 120 bp, Artificial Sequence
  ENSG00000276399_1 (sequence is synthesized)
tggttgtacctttccacgcctcttctctgcgaaatgaagccacagaacgacacaatcttgaagaggaagccgtgaatgggagactgcaacaatctgtgtccctggaatgctggcctctct

SEQ ID NO: 971690 - DNA, 120 bp, Artificial Sequence
  ENSG00000276399_2 (sequence is synthesized)
ctctggacaagccacgcacttcgcacccctcctgttatgcccgtggcggtggcacggcgctgtatcctacctgggctctggcctcctctctgtcctccctcttgctctgtctcccctgtt

SEQ ID NO: 971691 - DNA, 120 bp, Artificial Sequence
  ENSG00000276399_3 (sequence is synthesized)
agcggcctaggtgcctcttggcctggctgaatatcttctacaaagatcacttcccagtccatcagggactctcttcctggaaatcggtgtcatgactgtttctctctccaaacctgtttc

SEQ ID NO: 971692 - DNA, 120 bp, Artificial Sequence
  ENSG00000276399_4 (sequence is synthesized)
tgctgggttggttaggtctggtgaccctggagctcttgtcttccatacgtgtctcagccagggaagcttcctcggtctccatgtttcacctcatttgtgggtggattttctagaattagt

SEQ ID NO: 971693 - DNA, 120 bp, Artificial Sequence
  ENSG00000276399_5 (sequence is synthesized)
tgtaggcgacagtgactggtcttgtcttctaggacaggagaggtgccgcatttcttctgcacttcctgtctcatcctttagggacatgctgtcctctgctcctgggtgtactgagtccct

SEQ ID NO: 971694 - DNA, 120 bp, Artificial Sequence
  ENSG00000276399_6 (sequence is synthesized)
gaatcttttggccccctcctgcatcccaggtgttctttgattttccttcgcattgatggaaaggtcacttgtgccccgcttccgccggccacatgcctggacaccattttttgtttcgcc

SEQ ID NO: 971695 - DNA, 120 bp, Artificial Sequence
  ENSG00000276399_7 (sequence is synthesized)
atcgccccatacgccctcggtgacacacatttatgccatctgctctgcggtacaccatgccacgtatggtctcattggctccacctcggaatttcccctgtccctgtgttcacgtgtcct

SEQ ID NO: 971696 - DNA, 120 bp, Artificial Sequence
  ENSG00000276399_8 (sequence is synthesized)
ggaaagtggtatcagctttcaagtgcaccagggcttttcttttttcaaaggagaagggaggcatcagtgaattttcagctgacacctcgccttggggcccatgggatcattctgggatgc

SEQ ID NO: 971697 - DNA, 120 bp, Artificial Sequence
  ENSG00000276399_9 (sequence is synthesized)
agcgaggccctgccttcctagcagatgtggtgagcccatcctttctcacccggaggggtccaaagtcggatctcaagaggagttctgggaccccagcaggcgcccagaagctccacctcc

SEQ ID NO: 971698 - DNA, 120 bp, Artificial Sequence
  ENSG00000276399_10 (sequence is synthesized)
accccggaagtcggcttaaggaggtcctcaagaccggactcctgggggtttggccttgggacgcctgtggcctcctctcccacgctgccccgtactggacccctgatccagccaccgcca

SEQ ID NO: 971699 - DNA, 120 bp, Artificial Sequence
  ENSG00000276399_11 (sequence is synthesized)
gggctgcaatgcgagccgcccttcctctgcgtagccgctattgtttaaaggggtcgcagcctgactgccaggagcggagtgcgactcggcccctccaatgcgcatgcgcaaggccctggc

SEQ ID NO: 971700 - DNA, 120 bp, Artificial Sequence
  ENSG00000276399_12 (sequence is synthesized)
gcatgctccagtcacagttattcccacggttgtcttagaaacccgtccctgaggcttggcaaagtaggagccctccgtggcagtgcttgggtgtcggggctccgaggctccggcctgacc

SEQ ID NO: 971701 - DNA, 120 bp, Artificial Sequence
  ENSG00000276399_13 (sequence is synthesized)
tctccacggggtcgacaggaacatctctggctgccaggagtcgcaaagggccgaccaggatgacgaaaccacaggcgaagtccgggggaagcggcatggcatgccagcctcaggcctgcc

SEQ ID NO: 971702 - DNA, 120 bp, Artificial Sequence
  ENSG00000276399_14 (sequence is synthesized)
ctctctcacctgagggtcgttctcatgtggagcagaaccctgctgcctcagaggttgccttggggtgtggtgtgtttctgtgccagtgctgtatgactgtgtgtttttgtttctgtgtgt

SEQ ID NO: 971703 - DNA, 120 bp, Artificial Sequence
  ENSG00000276399_15 (sequence is synthesized)
gtgtgtgtgtgtgtgtgtctcctattctctcctctctctctgtctcttactctttccctctctctgtcggtttgtttgtgtccttgtgcgtgtgtttgtttggacgaatgtgccttgtgc

SEQ ID NO: 971704 - DNA, 120 bp, Artificial Sequence
  ENSG00000276399_16 (sequence is synthesized)
gccaaagaagctatttttgcatgtcgtctggtctttgttgagcctctttctgggtctctgcctgggtcatgtggccggctgtctatcgttttctcggcgtttccactttgggttcgtgga

SEQ ID NO: 971705 - DNA, 120 bp, Artificial Sequence
  ENSG00000276399_17 (sequence is synthesized)
gacctcgaccacgtgaggagatgcgtcagtcccggggcaattgaaatctcatccccatcctgagcagcctcttttctaggatcaatatgaccacactccagccaaggacaaaatgctcac

SEQ ID NO: 971706 - DNA, 120 bp, Artificial Sequence
  ENSG00000276399_18 (sequence is synthesized)
aggaggtcatttttctgcaggggtggagccaaccaaagtcaaagaagattgttgtatcttttcacagctcttctctgagaacgaagccacacaacgatagaatcttgaagaagaagctag

SEQ ID NO: 971707 - DNA, 120 bp, Artificial Sequence
  ENSG00000276399_19 (sequence is synthesized)
gaatgggagatggcaacaatccctgtcactggaacactggtctctctggacaagtcaccagtttggcacccctccccttatgcctgtaccgatggcatggtgctatatcctgcctgggct

SEQ ID NO: 971708 - DNA, 120 bp, Artificial Sequence
  ENSG00000276399_20 (sequence is synthesized)
cctcttgctctgtctcccctgtttctgaggggccttgatgtttcttgatctgtctgaatgtcttcaacaaagaccacttcccagtcctccagggcgacacttcctggagatccgtgtcat

SEQ ID NO: 971709 - DNA, 120 bp, Artificial Sequence
  ENSG00000276399_21 (sequence is synthesized)
ttcctggagatccgtgtcatgattgtttctccctccaaacctgtttctgcttgattagccagggttgatgatcctggggctcttggcttccatacgtatctcagacagggaagctagctt

SEQ ID NO: 971710 - DNA, 120 bp, Artificial Sequence
  ENSG00000276399_22 (sequence is synthesized)
ggtctccatgtttcacctcatgggtgagtggattgcctagaatgagcagtaggtgactgtgactggccttgtcttctagggcagggacatgtcgcatttcctctgcacttcctgtctcat

SEQ ID NO: 971711 - DNA, 120 bp, Artificial Sequence
  ENSG00000276399_23 (sequence is synthesized)
tcttgagaaacatcctcccctctgctcatgggtggactgactccttgaatcttttggctgtaatgaaagtcagggatccaatgggactgggctggggctggagctggatgcaggggaggt

SEQ ID NO: 971712 - DNA, 120 bp, Artificial Sequence
  ENSG00000276399_24 (sequence is synthesized)
tctgtcagggctacctgggcattggaggattgggggtggattgaactttgcataaacctctttactcctccagcaggcttttcaaaatgtggcttggactcatgcaataagaaatttacc

SEQ ID NO: 971713 - DNA, 120 bp, Artificial Sequence
  ENSG00000276399_25 (sequence is synthesized)
ggttgaaagggcccctttttcaatggcactctgggtaacatcgcttcagcacaatcatatggtagagaagccttatcaaatttgctgtccctcagggctcttaaagatgcttgataaatt

SEQ ID NO: 971714 - DNA, 120 bp, Artificial Sequence
  ENSG00000276399_26 (sequence is synthesized)
attagggaaataagaaacaaattgaaaggaaaaggaaatccaaggacctgccccagaagaatcatagatatgtttgaatacttattcattatttgccccagatagaaaatgtttgttaat

SEQ ID NO: 971715 - DNA, 120 bp, Artificial Sequence
  ENSG00000276399_27 (sequence is synthesized)
caaaaggcaaaagttataatgaggaagataatattgcctggggcaatgttgagacaaataaggtgaagatcaaccaaacgccctgagtcctttggcccaaatccctgctggggacccaaa

SEQ ID NO: 971716 - DNA, 120 bp, Artificial Sequence
  ENSG00000276399_28 (sequence is synthesized)
tacttttgatatagcatcttgctacctgaggaacgcaaggagaataatactcataagcagagcctctgttttcccataggactgactctaactatgtgaagaactgctacatattctaca

SEQ ID NO: 971717 - DNA, 120 bp, Artificial Sequence
  ENSG00000276399_29 (sequence is synthesized)
gtgcttaataggcggtgcctatctaacaggagctgtttggcttgtggatagcagttccaagatgaacaaatgacattgtgtttgaaagccactgctcttattaaagaagagtcaagcaaa

SEQ ID NO: 971718 - DNA, 120 bp, Artificial Sequence
  ENSG00000276724_0 (sequence is synthesized)
cttacttcgattattaagaattttttcccctagtaatcttcaactgtctcaatattcagcaggaaccccttggagacaaagatcagtacgaatttggaacacctattgacaaaatgaatg

SEQ ID NO: 971719 - DNA, 120 bp, Artificial Sequence
  ENSG00000276724_1 (sequence is synthesized)
taatttaatttagtacagtagtaaagtcaaccacttttaggtgttgatgctgctgaaagtgtatattaaggaaaagtttacttaccttactttttgtggaggtgctagaactacttctgt

SEQ ID NO: 971720 - DNA, 120 bp, Artificial Sequence
  ENSG00000276724_2 (sequence is synthesized)
ttctgagactctgcaaccttaaaggaagagtggggttctttaaaggaaaggtggtggtggttgggtcatgggtaacaatgtctactgtgtacttcctttcccaaaacaagtccctgtcta

SEQ ID NO: 971721 - DNA, 120 bp, Artificial Sequence
  ENSG00000276724_3 (sequence is synthesized)
ccgtcagcatttccaaaatttgaaggtcaagtgtggtgttaactcatgaactaatgactagactttgagcggttgtggaagcaaaatctcagtgagtgcctggatgttctaattctgtta

SEQ ID NO: 971722 - DNA, 120 bp, Artificial Sequence
  ENSG00000276724_4 (sequence is synthesized)
agtcagtgagtgcatattctgtacaatactctcttagcccagtggtaggtttaaggagtgggagagagatttctgtgtttcggaaatcagatacacaaagaataaaaatttttaatccca

SEQ ID NO: 971723 - DNA, 120 bp, Artificial Sequence
  ENSG00000157306_0 (sequence is synthesized)
aaagaaggtgactgagccaggaggagagcacagatggcttggtggtggtatggtgtggtcctccttccccttccctcttaggcatggggagtggagcaacagacggagagtggcatgaag

SEQ ID NO: 971724 - DNA, 120 bp, Artificial Sequence
  ENSG00000157306_1 (sequence is synthesized)
acacaaaggaggaagcacaccattgccaagaccccaaggaagaaggatggaaagcgctggcagtcctgcctggcccccagccagttccctgctgaagatggccagatccccttgtctggt

SEQ ID NO: 971725 - DNA, 120 bp, Artificial Sequence
  ENSG00000157306_2 (sequence is synthesized)
gtgcctgcacaggagacagcaccagccaagctgattgtgtatctacagcgtttccggcctcaagactatcagcgcctgctagaagtgaacagctccagagagaggccacaggagactgaa

SEQ ID NO: 971726 - DNA, 120 bp, Artificial Sequence
  ENSG00000157306_3 (sequence is synthesized)
gatcctgaccactgcctgggctaggggtgtcacttcctagaaggggaagggaactctgggtctaacggagtccactcctgggcccactgtgcctctcccctcagtgtcccttctgacagt

SEQ ID NO: 971727 - DNA, 120 bp, Artificial Sequence
  ENSG00000157306_4 (sequence is synthesized)
gactcctctctctccagcgctgcctgtttcttccccctcctctaagctactcttccttgagccctccctggctgcttcctctcgctcatccgtcagatgcaatctgtgggccgcccctct

SEQ ID NO: 971728 - DNA, 120 bp, Artificial Sequence
  ENSG00000157306_5 (sequence is synthesized)
cccctggccgctaagcagcctccattgatttccgctcgtgtttataggatttccacttagccgtgatcagtagttaagcacaggaaaatcccttgccaccccccctcccttggtcgatgc

SEQ ID NO: 971729 - DNA, 120 bp, Artificial Sequence
  ENSG00000157306_6 (sequence is synthesized)
cattgattctgccagcggctcctaaaccgccttacagctgagttagaagatgaggagaggcagcagggatttccctgccttgggatgtgggaaacagaagaaaagttgaggaaatggttg

SEQ ID NO: 971730 - DNA, 120 bp, Artificial Sequence
  ENSG00000157306_7 (sequence is synthesized)
ggaatcgctgttagaactctagaaattctaatctgactttgccactgtgcccagctctggcccagagggtagagtgcctcctgtggaagtttaggggcaaatttgttccctgacctggag

SEQ ID NO: 971731 - DNA, 120 bp, Artificial Sequence
  ENSG00000157306_8 (sequence is synthesized)
agggttagaaagaaccaacagctgccccctccccgcccccgtgttgagacaggttctcaaggctcaggggaagatgcatacctcctatgtaagaatgctcttcccttgctgttattcata

SEQ ID NO: 971732 - DNA, 120 bp, Artificial Sequence
  ENSG00000157306_9 (sequence is synthesized)
cttctcaggctttattgggctttatttgtgggagaagggggctggtccccagtttttgcagtgcaaagccagagcgccacctgctggtagccctcaggtgtaggttcgaagctgctgggg

SEQ ID NO: 971733 - DNA, 120 bp, Artificial Sequence
  ENSG00000157306_10 (sequence is synthesized)
ccccctggggtttgggacacaggagaatttcaggctgtgagtggagacagttactgccacgattccacaggcaagttgttcacctcaaagatctcctgcaccgactggtgaaagtggtcg

SEQ ID NO: 971734 - DNA, 120 bp, Artificial Sequence
  ENSG00000157306_11 (sequence is synthesized)
taggtgaggcgcagctttagccgcaggggggcctaggaataggagagcagggaccagggttagcacccacggcttcttctatccctgggtcttgtcttgggggaactcctgaagctcacc

SEQ ID NO: 971735 - DNA, 120 bp, Artificial Sequence
  ENSG00000157306_12 (sequence is synthesized)
ttgttaggattgaggattctgaagagctgggtgataggaaggccaccccgagctggaactgtgttcccactgggggcctgcagctgcagctggagactctgaacacaggagtttaacaga

SEQ ID NO: 971736 - DNA, 120 bp, Artificial Sequence
  ENSG00000157306_13 (sequence is synthesized)
gcacagtatggcagtaggtagggctcaggcagcccctctatactcagtggctccacacccttttcctgtaactccccaagtgctgatctccagatgactcaatcccatctcacactgtct

SEQ ID NO: 971737 - DNA, 120 bp, Artificial Sequence
  ENSG00000157306_14 (sequence is synthesized)
cccacccacctcctccacttagtggccttttctcctggagtccccaggccacctctgaactctgatctttacaaaccttgggcacagcagcctggcagatgaaatgggtgacatcaccct

SEQ ID NO: 971738 - DNA, 120 bp, Artificial Sequence
  ENSG00000157306_15 (sequence is synthesized)
ctgagaagttggtggcagtgatggtgattaacagcaaagcagggttttcagggggtcgaatgaaagacagattcagctgtactccctcacgctcaaacactttgagatctgggatgggag

SEQ ID NO: 971739 - DNA, 120 bp, Artificial Sequence
  ENSG00000157306_16 (sequence is synthesized)
ctggagtagggagacagaagcagctcagtgtgcaggtttgagagaacatgtttgttcattcattcaacaaaaattgagtaaacacctactggccctgcactactcgaaaggctagtaaca

SEQ ID NO: 971740 - DNA, 120 bp, Artificial Sequence
  ENSG00000157306_17 (sequence is synthesized)
tactcgaaaggctagtaacaaagtagacatgtagatgaggatggagcttactgtctaatgggggagagaaacaataaaaaaaggccgggcgtgagccagtaatcccagcactttgggagg

SEQ ID NO: 971741 - DNA, 120 bp, Artificial Sequence
  ENSG00000157306_18 (sequence is synthesized)
atattttaaattgcacccgttctggtgtgagggcgaaggcgagtgaaagaaggtgactgagccaggaggagagcacagatggcttggtggtggtatggtgtgctccatcggctgccaacc

SEQ ID NO: 971742 - DNA, 120 bp, Artificial Sequence
  ENSG00000157306_19 (sequence is synthesized)
tagggccatcgtctgcctccatcacccctccgcccgcccgcctacccacccaatcccaaacgggtgctggatcaggtgctgaatccggctgcctcctcgggtcctccttccccttccctc

SEQ ID NO: 971743 - DNA, 120 bp, Artificial Sequence
  ENSG00000157306_20 (sequence is synthesized)
ttgctggggtggaaggagggaagggctggcttgctgagctgggctctagaatgggaagggtacctttctgcagatcccatttggactctccacttgaacaagtgaggtgtctgattttct

SEQ ID NO: 971744 - DNA, 120 bp, Artificial Sequence
  ENSG00000157306_21 (sequence is synthesized)
gcattgctgtgtgtctgccaccgctgcctggcactcatggggccgtgtgtgtgtgtatgtgtgtgtgcgcgcatgtacatgtacgcataagcgtgtgctgtatgtgagcctcctgggcat

SEQ ID NO: 971745 - DNA, 120 bp, Artificial Sequence
  ENSG00000157306_22 (sequence is synthesized)
gggtgggggttggcattgcggttgccaatctagtgtacaaccagaaggacagagggatggagtggaagaaggaggggagaggcttggggtctgggaggggagaagagggtgcatgagttg

SEQ ID NO: 971746 - DNA, 120 bp, Artificial Sequence
  ENSG00000157306_23 (sequence is synthesized)
cttcatgctgcctgcttacaggcattggcattgtagctgccacccttgtgcccacggagatgggaggaggcgagtggagggcgcagcggcaggagtcctgtgctctgggaggaaggcttt

SEQ ID NO: 971747 - DNA, 120 bp, Artificial Sequence
  ENSG00000157306_24 (sequence is synthesized)
gtacatgggagctgttggcatcacatctgtcaggccggtgcccagaactggggcaatggagactgggggatccaggaagcagggaggaggggcagaatgtgtttctgatgttgctgtccc

SEQ ID NO: 971748 - DNA, 120 bp, Artificial Sequence
  ENSG00000157306_25 (sequence is synthesized)
tctagaagctcagctctgaaaaatggttggagtatgaggtgattagtgctcttccagcttgaggaagtaaagtggtggagagagtagccagggaagtgccaagaaacagtctacgagcca

SEQ ID NO: 971749 - DNA, 120 bp, Artificial Sequence
  ENSG00000157306_26 (sequence is synthesized)
gggaggagggagtgtgccaccgtacccagggagaacttgttggggctggcaatctggccctttgtcagagtattgaaggagacagcaagaggaccagatgtgaggtgggtgggtgctggc

SEQ ID NO: 971750 - DNA, 120 bp, Artificial Sequence
  ENSG00000157306_27 (sequence is synthesized)
actgcccatggcacctggcacaggctctggcattgtgtggaacaggggaggttgacagtgcctcttgccaatctggttgagagggctattgtgccaggagtgagaaggaaggaggtgaaa

SEQ ID NO: 971751 - DNA, 120 bp, Artificial Sequence
  ENSG00000157306_28 (sequence is synthesized)
cccagctctggcaccagattgggatggtggcctgtccccagtgagaaggaggtggcaaggaggctgtctcttgcactttgcaagatgcttaagtagagacagggtttcaccatgttgtcc

SEQ ID NO: 971752 - DNA, 120 bp, Artificial Sequence
  ENSG00000157306_29 (sequence is synthesized)
acaggcgtgagccactgcgcccggctggaaggaaaacattctgagtgaccgtgtatgtaaataagtctttctggttattttattctgtgaacctgtgtgatgtaatgactgcatttaaat

SEQ ID NO: 971753 - DNA, 120 bp, Artificial Sequence
  ENSG00000157306_30 (sequence is synthesized)
tattctgtgaacctgtgtgatgtaatgactgcatttaaatagtattacaacaaaaactaattgtaataatagtaaatagctaacatctttaaatgtttgccatgggccaggcaccgtgct

SEQ ID NO: 971754 - DNA, 120 bp, Artificial Sequence
  ENSG00000157306_31 (sequence is synthesized)
aggccctcggcaagtatcacatcacctaatcctccacttcaatctgatgcaatagatgtagctattcattcctattttacaaacatggagactgatttagatgggttaagtaatttttaa

SEQ ID NO: 971755 - DNA, 120 bp, Artificial Sequence
  ENSG00000157306_32 (sequence is synthesized)
gatctcctgcttaaaaagaagtagagttgagattggaactcaggtagcctgatgtcagtacctctgctcttgggttaatttgtaagcttctgaactctggctggtatgcattttgaatga

SEQ ID NO: 971756 - DNA, 120 bp, Artificial Sequence
  ENSG00000157306_33 (sequence is synthesized)
ggtcttttgagtctgattgtattactctgtgtgtcaccttgagcatatgtgctatcatgttccgcctgaaggtgctagatggctgtcttccatttggtttgtttcttagtataagatgga

SEQ ID NO: 971757 - DNA, 120 bp, Artificial Sequence
  ENSG00000157306_34 (sequence is synthesized)
ccagaagaggagcactgctttgcgcaactccagggtgcgtcattcacactgcagtccatgcaggggcactggccatgccctgtgtgaaggaagggaaggagcgggagggagggagtggga

SEQ ID NO: 971758 - DNA, 120 bp, Artificial Sequence
  ENSG00000157306_35 (sequence is synthesized)
acaggagggaagggatagataatggcgggtagtgttctttgaatgatatgtgtacccatttgtgacaacatctcttaaagttgaaggtctacacatgtgtatccatattagcatatgaac

SEQ ID NO: 971759 - DNA, 120 bp, Artificial Sequence
  ENSG00000157306_36 (sequence is synthesized)
ttcatcagacaagcactctccctccaacagagggagaccctgtctcaaaaaacaaaaaaaaatagcctttagagtcagacagacctggaatcaaattctagttctgtttcttaatatgta

SEQ ID NO: 971760 - DNA, 120 bp, Artificial Sequence
  ENSG00000157306_37 (sequence is synthesized)
gttctgtttcttaatatgtaaatgacctcaggtaagttgcgtaaagtctcaatttagtctcttcatatagagaatggggcaggccgggcacgcgcctataattccagcactttgggaggc

SEQ ID NO: 971761 - DNA, 120 bp, Artificial Sequence
  ENSG00000157306_38 (sequence is synthesized)
ggagaagcaactgttggagtcagctgcctgaggaatatacttctctaggctggggtggggaaatgagcttgaagacaaggaactggctgagtcttaatttgggcgagtgaaagaaggtga

SEQ ID NO: 971762 - DNA, 120 bp, Artificial Sequence
  ENSG00000245910_0 (sequence is synthesized)
ctttcccgcgcgaccggcgagggaggaagaagcgcgaagagccgttagtcatgccggtgtggtggcggcggcggagactgcgggcccgtagctgggctctgcgaggtgcaagaaagcctt

SEQ ID NO: 971763 - DNA, 120 bp, Artificial Sequence
  ENSG00000245910_1 (sequence is synthesized)
tgaggtgaaggtgtatgaaagtcatcataacagatgttttccaaaaacttgtagaaggttgtgaaaaaactactaggatcacgcggcatgtattgaggtgtggcatgcagcattttggaa

SEQ ID NO: 971764 - DNA, 120 bp, Artificial Sequence
  ENSG00000245910_2 (sequence is synthesized)
aaaatgagcattttacttgatgttgataacatcacaataaattatggagaaaaatacatatttggctaacttttaattgctgaacaataaagtgttttcttttaaatcaactctaaatag

SEQ ID NO: 971765 - DNA, 120 bp, Artificial Sequence
  ENSG00000245910_3 (sequence is synthesized)
ctccattctcatagtcactagtcagacctgttttgaacatattcgaaagattataatcttgtcaataattagcttatttatgggtggtgattctcattgaggctgacagctggggagaca

SEQ ID NO: 971766 - DNA, 120 bp, Artificial Sequence
  ENSG00000245910_4 (sequence is synthesized)
ttgcttgtacctctaggttccctgtctggcttccccttcagagcctgctgttgtaccaggtggttgaatcttaaaactctttaataccaaatagcaatcaaattcccccttacagataaa

SEQ ID NO: 971767 - DNA, 120 bp, Artificial Sequence
  ENSG00000245910_5 (sequence is synthesized)
ggagagatgacctatctttaagtgagtagattgtttaatcatatgctttcatgtgtattctttctggcaacaagatcataagcctttctgctccagcatcaagcccagtgctttgcagtc

SEQ ID NO: 971768 - DNA, 120 bp, Artificial Sequence
  ENSG00000245910_6 (sequence is synthesized)
ctttcccgcgcgaccggcgagggaggaagaagcgcgaagagccgttagtcatgccggtgtggtggcggcggcggagactgcgggcccgtagctgggctctgcgagcatataggttgctgt

SEQ ID NO: 971769 - DNA, 120 bp, Artificial Sequence
  ENSG00000245910_7 (sequence is synthesized)
tgaggttgtctttgaagaaataattttaagactgagatgccagtactgtacattgattaattactgacatgtatgtaaggcaataatttaattaagggtgaatattctttgtttttagca

SEQ ID NO: 971770 - DNA, 120 bp, Artificial Sequence
  ENSG00000245910_8 (sequence is synthesized)
tataggttgctgtagatgaatgttcttagctgtcatgtttaaaaatacttctgcttcgttacctcaagtaagtgatttgtcaagcaactatgtctgctgacagttcagaaagtatctgat

SEQ ID NO: 971771 - DNA, 120 bp, Artificial Sequence
  ENSG00000268309_0 (sequence is synthesized)
ttagtgcagtgttcgctcctcgtccccttacccagaacatgattcagatcctaacataaacacaaaaacaggtcagggaaccaaaacactgtggtcttgtctattatacaaaatattgag

SEQ ID NO: 971772 - DNA, 120 bp, Artificial Sequence
  ENSG00000268309_1 (sequence is synthesized)
ataatgttcacgattcattctgttttcagcaattgtgacaattttgaagcttctctcgaagcttcgaaacacttcatttcctactaaataccaaaacgtgtcagacaggcatcaccagtg

SEQ ID NO: 971773 - DNA, 120 bp, Artificial Sequence
  ENSG00000287168_0 (sequence is synthesized)
agaggcctccggcggcgccccccaacaacagcagggcggtgccacattggtcctgagccaggcctggccgccggagacggcgggactctctgggaggccggcggtcctcgggtgtagagg

SEQ ID NO: 971774 - DNA, 120 bp, Artificial Sequence
  ENSG00000287168_1 (sequence is synthesized)
gagacagctgcccgggggcacgggcgagcgcctctgggggtcctggatccgagacccgcggccccggggtggcgatgacgcctggagtcatgcgggcttggctgggccgggctcttgggg

SEQ ID NO: 971775 - DNA, 120 bp, Artificial Sequence
  ENSG00000287168_2 (sequence is synthesized)
cagccaggcgccgctgctggcgtctaggccacaccaccctgaacgcgcccggctcgcctctgatctgttgaagctaagcagggtcgggactgcgtcactgcaaccgtccaagccggtggg

SEQ ID NO: 971776 - DNA, 120 bp, Artificial Sequence
  ENSG00000287168_3 (sequence is synthesized)
acgaggaaatccgtccctgtgcaccctgtttcccaatgccaccgacttcgtgtaaactccagtccggaggacaggagagagacccaggcctcgccccgtggacaggctcggcgccacggc

SEQ ID NO: 971777 - DNA, 120 bp, Artificial Sequence
  ENSG00000287168_4 (sequence is synthesized)
tcctgccagacacacgagcacactctacaaatctcggggcccaccgcatcaaggagacagaaagaagcaaacaaaggaaggaccttatgaaacgcacccccaaagcaaccaaccaatcca

SEQ ID NO: 971778 - DNA, 120 bp, Artificial Sequence
  ENSG00000287168_5 (sequence is synthesized)
aggaaaaaaacaagtctcagggctccattggttttcctgggtggggggccctgaccccctgttctagcccggcccaagaaccctccaccacaccccggcctgctgaaaggtgccctgtct

SEQ ID NO: 971779 - DNA, 120 bp, Artificial Sequence
  ENSG00000287169_0 (sequence is synthesized)
agggcatcaggtcccaccacagcaggccaggcttccagcagccacccagctctcagccacttgcagaccctttagtcaggatccggggcccgtcagcctcctccacattccttctcctgt

SEQ ID NO: 971780 - DNA, 120 bp, Artificial Sequence
  ENSG00000287169_1 (sequence is synthesized)
cacaggaggacgtgcagcaggagcagggatcccaggatacctcacatggaagggcagtcacgtggcatggatctgtcagaacagttcaccaacatccagaggcctctccaggaagggcag

SEQ ID NO: 971781 - DNA, 120 bp, Artificial Sequence
  ENSG00000287169_2 (sequence is synthesized)
atgataccgtgagacctgcagagtccacgcccgccatccccactctgccactacgctttctctcgctgcaaagccatttgcagaacatgtacaaaccacggagctaagaacacagagcta

SEQ ID NO: 971782 - DNA, 120 bp, Artificial Sequence
  ENSG00000287169_3 (sequence is synthesized)
acaggactgtccgtttggtgacagatttttaggtagtccatagaatttctacttctacaaaaacagaaaactacgtttcagaggatgtttccaatttaagcagatttaaagagaagaaaa

SEQ ID NO: 971783 - DNA, 120 bp, Artificial Sequence
  ENSG00000287169_4 (sequence is synthesized)
ggtaaaatatgacaaaaatttggttataatactcaaccaacactagtagctttaagtcaaagacaagaagcaaacagttacgtggacaggttgttggtccccagagccacagcactcctg

SEQ ID NO: 971784 - DNA, 120 bp, Artificial Sequence
  ENSG00000287169_5 (sequence is synthesized)
cacaggctcatattaattagcgcaatattaaatgcccccgagttaggcaaagaagaccctggtggacatgggcaatgggcaaggagcgaagttccagcaagcaccagcctggcctgggcc

SEQ ID NO: 971785 - DNA, 120 bp, Artificial Sequence
  ENSG00000287169_6 (sequence is synthesized)
gggtgcacgccaaggcacaccaagctgtagtgcagtctctggcagcccccacgggtgttcctcaactgcccctccatctcttcacctgacacgcatctttccacacttccttcatgccct

SEQ ID NO: 971786 - DNA, 120 bp, Artificial Sequence
  ENSG00000287169_7 (sequence is synthesized)
agaaattagttaagacacactccaagtgaataattagcatgcctaattttagccaacaaaatatactgatttttcctaaaggagtttctacactgtgataccaattgtcctgccaggaat

SEQ ID NO: 971787 - DNA, 120 bp, Artificial Sequence
  ENSG00000287169_8 (sequence is synthesized)
ctctgaagaaataacttgggctgataattcttctgccaaaaaatgtatcttgtaatgaatacgaggtccaatgtgtaaatattattctatcacttttgttcatttccaaaagcatataaa

SEQ ID NO: 971788 - DNA, 73 bp, Artificial Sequence
  ENSG00000287166_0 (sequence is synthesized)
gggacttaaagaagtatctatgaggcaggaggatcaattgagtcacggagttcaagaccagcctgggcaacag

SEQ ID NO: 971789 - DNA, 120 bp, Artificial Sequence
  ENSG00000287166_1 (sequence is synthesized)
ggcaacagagtgagactctgtctctacaacaaattttaaaaaaattagtcaggaaaaacaaagatccccaaagtccatttcgctccgaggtcagtggacacagctctgtgactgtcctgt

SEQ ID NO: 971790 - DNA, 120 bp, Artificial Sequence
  ENSG00000287166_2 (sequence is synthesized)
gacacagctctgtgactgtcctgtgctgtgtgggtctgtagaagggccagtcatgggccatcgagctactcacagccaactgcacccaagtccaagcctggctctgttcccatacacaga

SEQ ID NO: 971791 - DNA, 120 bp, Artificial Sequence
  ENSG00000287166_3 (sequence is synthesized)
gacaggatgggggctgctgatctggcctgaagccttgctctgggcactgaaaacgggggctatttccttacctgaagatctggaagcagcatgttgacaaaagcaccaactgctctgcca

SEQ ID NO: 971792 - DNA, 120 bp, Artificial Sequence
  ENSG00000287166_4 (sequence is synthesized)
tcacgtcccactgggtgtcagtgggaaggcctaaccaaggcctgcctccagtggctatcaggcagacgggccagcagttcccctccaggagcaagggacccttcttacccttttgatcac

SEQ ID NO: 971793 - DNA, 120 bp, Artificial Sequence
  ENSG00000287166_5 (sequence is synthesized)
atttccctctcttaaaggggcactgctgtgggaaggggtcatgccttggatcctacagtcatggactgtgggtgaaacaggggctcttgactcttcacttcctagccataactctgccca

SEQ ID NO: 971794 - DNA, 120 bp, Artificial Sequence
  ENSG00000287166_6 (sequence is synthesized)
ctcatttccctttgctttcccactcacctctgtttttgtttctgttttattttgttccagacacccttttcagggaagtagatcagggaggcccaagagattaggcctgggtgggctgct

SEQ ID NO: 971795 - DNA, 120 bp, Artificial Sequence
  ENSG00000287166_7 (sequence is synthesized)
atcgcttaagaacacgtctgcctctggggctcctccctaacagctggcctctggagctgggagatgcagctgcctggcagtctgcagaggcagattgtgttgttacgtgctggtcaccgc

SEQ ID NO: 971796 - DNA, 120 bp, Artificial Sequence
  ENSG00000287166_8 (sequence is synthesized)
cttgagccttaaaccacagtcagcaatgaacctggaggcagggcatctctggggatgatcgaccgcatctgctcaggttcttgcagggcagggcaggcagagatgtgtgtttggagccag

SEQ ID NO: 971797 - DNA, 120 bp, Artificial Sequence
  ENSG00000287166_9 (sequence is synthesized)
aaagccttcctgccaacctgccatgcctcagtttccctatctgaaccaccttcataaaaacaacttacggctctcagagcagcacatttgtaaaaacctgaaaaatataaagaaaaacgt

SEQ ID NO: 971798 - DNA, 120 bp, Artificial Sequence
  ENSG00000287166_10 (sequence is synthesized)
cactcacatttctcccatgaacattttcctattttatgtatcttttatgtaactgaatcacattgcatatacaattatgtgttccatttttaaacaataagcttcccttgttttaaaagt

SEQ ID NO: 971799 - DNA, 120 bp, Artificial Sequence
  ENSG00000287166_11 (sequence is synthesized)
aataatccatgtttattatgtgttattgcatagaaatttcagacacaaaaaaagaaaggaaaaatgactccttattgctccattgagaaataataaatatgaatattattctgataaata

SEQ ID NO: 971800 - DNA, 120 bp, Artificial Sequence
  ENSG00000287167_0 (sequence is synthesized)
ccagaacagactgttcagggtgaccagaggcttgtgggaagacgcctcggggcatgagccttcctgactcagcgctcttccactccagtttttggacagagtggacctaacccagattgc

SEQ ID NO: 971801 - DNA, 120 bp, Artificial Sequence
  ENSG00000287167_1 (sequence is synthesized)
cctgaacacctgcccctgttgctgaatcagagatgtgggctctggccggcggaggaccaagactttactgtggggctcgagcccagttaaagaaacactatccaggagattctatcatgg

SEQ ID NO: 971802 - DNA, 120 bp, Artificial Sequence
  ENSG00000287167_2 (sequence is synthesized)
gacttgaggctggtggacaaagcgggaagaggaaggcccggtccaagtgaggggcatgggttttgagtccacagaaaagagggggaatatgctttggttgaaaccaaaaaagctcagagg

SEQ ID NO: 971803 - DNA, 120 bp, Artificial Sequence
  ENSG00000287167_3 (sequence is synthesized)
gaagatacaaaataggacccctgagcaagtttagatttctgttttccctccctctcctagcactcctctcataagctgggtagaggagaagcaaagccaggaaatgagtccctggataag

SEQ ID NO: 971804 - DNA, 120 bp, Artificial Sequence
  ENSG00000287167_4 (sequence is synthesized)
gcaggcttcgggcaggccagtgcccagtgcctgcactgcaatcttaaaagtgacctggagcaagatctgaccaggtggagctcccacccttagctggtgagcccagcgcctcctgtgtgg

SEQ ID NO: 971805 - DNA, 120 bp, Artificial Sequence
  ENSG00000287167_5 (sequence is synthesized)
ggcggtctgggctgcccagctatgggcttcacagacatccccagaaatgcatctggggagacccagctcccaggggagctccttgaaggcagggtggcgtcttctctccctgcttcctgt

SEQ ID NO: 971806 - DNA, 120 bp, Artificial Sequence
  ENSG00000287167_6 (sequence is synthesized)
ggcacatcctgagctttgggtgctcaacagagggtgtggaggaagacgctgtgaggatgactctggagcagttaccaggacagaagactccagggaagacaagtagggggccaagaccta

SEQ ID NO: 971807 - DNA, 120 bp, Artificial Sequence
  ENSG00000287167_7 (sequence is synthesized)
tctgttattgttaggggtaaccctggctttaagccaaaccacgatatgtaacaattatccagattatccaaattgtatgaaaacaccacataaaattattactcaaattttagctgttcc

SEQ ID NO: 971808 - DNA, 120 bp, Artificial Sequence
  ENSG00000287167_8 (sequence is synthesized)
cagacagcttctgggaacacatctattgcacggagtcaattgtattgtgtgaaatgtgtggatggcaggttattgaactcctaggtcccaagtagcctcataaacatgaagactcagggg

SEQ ID NO: 971809 - DNA, 120 bp, Artificial Sequence
  ENSG00000287167_9 (sequence is synthesized)
accattggctcccctgctctgctctttcttttgtcttccatttccttctgtggctttcaaagtcccatgcctaggaaaatctgctctgcggacagcctggaagaaatgggagtcctgcta

SEQ ID NO: 971810 - DNA, 120 bp, Artificial Sequence
  ENSG00000287167_10 (sequence is synthesized)
cagacggtttgccaaggcttggccagggaagtttactgcattgcagcagcttaaaaatgcaactggatgggcatctctgctttggagcatcagcagtggcatcacaaaatgtgggcactg

SEQ ID NO: 971811 - DNA, 120 bp, Artificial Sequence
  ENSG00000287167_11 (sequence is synthesized)
agagagactctgaaactctagtccaactctcccctgggagctccttctctaaaattccaaaggctgcattgtggctggtgtggggccctgggagcattgctggcactcttgccacccctg

SEQ ID NO: 971812 - DNA, 120 bp, Artificial Sequence
  ENSG00000287167_12 (sequence is synthesized)
ctccctcccatccccttgtctgcaaatattgccaggccctgtgtagttgtcccaaagttcccctgtgtcccttgcctccctccagggagagagaagcttgcaggttctactgaacctccc

SEQ ID NO: 971813 - DNA, 120 bp, Artificial Sequence
  ENSG00000287167_13 (sequence is synthesized)
agctaatctaagcggatagatagaatgacaaatgatttcttcagcaagggctcctgcggaagagtcaatgagctccgtgcttccccaggtggaaagggtaaacagagacagaatctgagc

SEQ ID NO: 971814 - DNA, 120 bp, Artificial Sequence
  ENSG00000287167_14 (sequence is synthesized)
acatgcagcaaagaagctcgtgatgaggttcagcaggcggacgagtgctagaacacagtctttgacttgctcttgttcccgggccctgactggctccctctgtcattccccaccttcttc

SEQ ID NO: 971815 - DNA, 120 bp, Artificial Sequence
  ENSG00000287164_0 (sequence is synthesized)
attggaaggctgtagatgtttatgtgtcacttgtaagtgaagtcacttttcagctgtaaaaatagttgtacacgaagtgatactgggtaaatttccaattcttgctgtcgtgtcattcag

SEQ ID NO: 971816 - DNA, 120 bp, Artificial Sequence
  ENSG00000287164_1 (sequence is synthesized)
gaaactgcgtctactcacttcagctctctcaaggaataagcaccttcctcagtggtccaagcgtttgtgaaggcagctgtttcaacaggacccctctgcaagactccttcaaccacatga

SEQ ID NO: 971817 - DNA, 120 bp, Artificial Sequence
  ENSG00000287164_2 (sequence is synthesized)
cttcaagacagtgcacgccatagtgcctgctgggtcctcgcatctgcccctgcaatccatccctcctcctgaccaccatggcccatcctctgtattatccttgtggcatgagcccacacc

SEQ ID NO: 971818 - DNA, 120 bp, Artificial Sequence
  ENSG00000287164_3 (sequence is synthesized)
gctgggacgtgagatctgttgaatacatttatctttgtgtgtatagccccatttaggcgctgtggggcaggaactaaatgaggtatcttttggcatctcaaaataaaacccaacaccttg

SEQ ID NO: 971819 - DNA, 120 bp, Artificial Sequence
  ENSG00000287165_0 (sequence is synthesized)
ggcttccctccggcatttttggctcttgccttttagggttgccagattaaaagacaggatgcccagctagtttgaattttagataaacaacgaataatttcgtagcataaatatttccca

SEQ ID NO: 971820 - DNA, 120 bp, Artificial Sequence
  ENSG00000287165_1 (sequence is synthesized)
agcttagtttgggacatacttatgctaaaaaacattattggttgtttatctgagattcaaaattaagcattttatattttatttgctgcctctggccaccctactctcttcctaacactc

SEQ ID NO: 971821 - DNA, 120 bp, Artificial Sequence
  ENSG00000287165_2 (sequence is synthesized)
ccagttttgtccgccttccctgcctcctcttctgggggagttagattgagttgtaacaagaacatgccactgtctcactggctgcagcgtgtggtccccttaccagagtgaggatgcgaa

SEQ ID NO: 971822 - DNA, 120 bp, Artificial Sequence
  ENSG00000287165_3 (sequence is synthesized)
gagaaggtggctgtctgcaaaccaggaagagagccctcaccaggaacccgtccagctgccaccttgaacttggacttccaagcctccagaactgtgagggataaatgtatgattttaaag

SEQ ID NO: 971823 - DNA, 120 bp, Artificial Sequence
  ENSG00000287162_0 (sequence is synthesized)
ggggcctctttaacggctccccatgaaataatcattcattatgtcaccaggagggaagaaagggagtattttgtgaagctgtcccattcaaagccacccccagaggcccggaggagacca

SEQ ID NO: 971824 - DNA, 120 bp, Artificial Sequence
  ENSG00000287162_1 (sequence is synthesized)
ggaaagcactttcaaagagtgttttatcttggacagataatattccgttttgtttctgagaggcaatgacaatctctagttcgattgtaaaactatttccttcaaatatacatttttatc

SEQ ID NO: 971825 - DNA, 120 bp, Artificial Sequence
  ENSG00000287163_0 (sequence is synthesized)
agtgtaggcagggacaggcaggagagtcacattacctgggtgcttggcccagtggtatgtcacaatcccttatgtagggagggcacaggtagcaaaagactgtcacatcatctagttgct

SEQ ID NO: 971826 - DNA, 120 bp, Artificial Sequence
  ENSG00000287163_1 (sequence is synthesized)
ggactagagctattggtctctcggtcgttcagggagagggttaggatctccttagacatccatgtaacagagccccaactcatccgtgctcagaagcaaaggccagtggagaccaaataa

SEQ ID NO: 971827 - DNA, 120 bp, Artificial Sequence
  ENSG00000287163_2 (sequence is synthesized)
ggcttgaaagcatacttttgatcatcgtccctgtcgtcacaatggggcgcctgacaccaaggagaccctggaaacccactgaactcaggccctgcaggggtcaggtgaacatgtaggaag

SEQ ID NO: 971828 - DNA, 120 bp, Artificial Sequence
  ENSG00000287163_3 (sequence is synthesized)
tccaggagaaaagtcatctgccgtctccagaatgaacagcattccaggaagaactcccccacactccaggaagaagtcatgagcccagtggggaggcaggtccagcctgcaacaacttag

SEQ ID NO: 971829 - DNA, 120 bp, Artificial Sequence
  ENSG00000287163_4 (sequence is synthesized)
acatatgcggtgctccatagctcatgcttgtgtcctgcaggcaggagcacacatcagggtccgcagtctttgttctgggtgtggaattagtgcttcagctggttccccaggtgtccccag

SEQ ID NO: 971830 - DNA, 120 bp, Artificial Sequence
  ENSG00000287163_5 (sequence is synthesized)
agtcatgtcaggcctcctccctacagcaactctcctgcctttttttttctttttttcaccgccctaaccccctacttttggtcatcctccttgtcacaatggggcacctgcactgtagag

SEQ ID NO: 971831 - DNA, 120 bp, Artificial Sequence
  ENSG00000287163_6 (sequence is synthesized)
actctagaaacacgcagatctggggtcctgcagcgtccaggctaacatgccaggaatcagagagaaaagtcctctgaagcctccagaaggaagggaacaggacccgtcactgcaggaaga

SEQ ID NO: 971832 - DNA, 120 bp, Artificial Sequence
  ENSG00000287163_7 (sequence is synthesized)
agtggggcacccagtggcagatggaggccccacgcactgcagaggtaaatgtgtaaggcgctccctggcccgcgcctgtttcctggatgctggagtccgtgaccaggcctggggtggccc

SEQ ID NO: 971833 - DNA, 120 bp, Artificial Sequence
  ENSG00000287163_8 (sequence is synthesized)
ttccacacacagaataagctgttgggctggctgcctcacccagcacccgggccgcgccagagagtatctcagatgctgctttcctgccacctcagcgaccccagtaacacttctcccaca

SEQ ID NO: 971834 - DNA, 120 bp, Artificial Sequence
  ENSG00000287163_9 (sequence is synthesized)
gggactccgccgtgcccagctctccagcctggggattctcatcacccagtgattccaaaagaaacgatctacaatgttatgaccaaatgccagaaacaaacaaacaaaatatctgagggc

SEQ ID NO: 971835 - DNA, 120 bp, Artificial Sequence
  ENSG00000287163_10 (sequence is synthesized)
agtccattggtcacttccatttttcaaaggtgacaattgtccctccttgaaatcttgagagtgcatgaacaggctattctaatagatgtgcaatttgcactaaaactgattgaagagcaa

SEQ ID NO: 971836 - DNA, 120 bp, Artificial Sequence
  ENSG00000287160_0 (sequence is synthesized)
gacagaggcaaccatataaccatatacatagacctcatctgggaaaaaggcctgtctttaggctggaagtgtcctgtggaatccctatctgtgaaccctatattcagtcttcctgtagcc

SEQ ID NO: 971837 - DNA, 120 bp, Artificial Sequence
  ENSG00000287160_1 (sequence is synthesized)
tcaacctcagtccaattcctgaacacagaggttgggattgactgttgtgaaggagaggaggagagtgcatgtcaagtttcagtagctggatggacgaaggcacggaagtaggaatcagca

SEQ ID NO: 971838 - DNA, 70 bp, Artificial Sequence
  ENSG00000287160_2 (sequence is synthesized)
agtagctggatggacgaaggcacggaagtaggaatcagcaggcaaactgaaaagggtaaagaaaatcact

SEQ ID NO: 971839 - DNA, 120 bp, Artificial Sequence
  ENSG00000287161_0 (sequence is synthesized)
agggtggacagcaaagaaaaggaggccagaggcctgtggcagcctgtccccaagccacacagccaggagatggcagggctgggaccagcggagaacgtggaggctgtgaagcaggattcc

SEQ ID NO: 971840 - DNA, 120 bp, Artificial Sequence
  ENSG00000287161_1 (sequence is synthesized)
gagcaggacctcagcgaggccactgtcacaggacggaagcatcagggagcccgagtcattccttggagggcagccgtccaggagaggcacctgagggcatcagtctgtgacgaatgagca

SEQ ID NO: 971841 - DNA, 120 bp, Artificial Sequence
  ENSG00000287161_2 (sequence is synthesized)
gaccctcagaaggagccaactggacacatgaacagaagggatgaatgaatgaacagaaggggtgaatgaatgaacagaagggatgaatgactgaacagaagggatgaatgaatgaatggg

SEQ ID NO: 971842 - DNA, 120 bp, Artificial Sequence
  ENSG00000287161_3 (sequence is synthesized)
ccatcacttaacatgggctcgcccaccacggctcctggtcttgcgtttctcttttcctcagcatttctgtgcatttccagtctttccccatttggtgcagtctacatttctgagaatatt

SEQ ID NO: 971843 - DNA, 120 bp, Artificial Sequence
  ENSG00000287161_4 (sequence is synthesized)
cttgattacttgttggataatcaaccaatggaaatgcccaggggagaacctgattatgccccaatcctccttcttccaagcccacacggccacagctggaagtccatttgcttcttaaat

SEQ ID NO: 971844 - DNA, 120 bp, Artificial Sequence
  ENSG00000287161_5 (sequence is synthesized)
gagccaaaagatggcaattctcttcttctctcatcctctctgcacttactgcatcctcaccaatgatttgagaacttcgtttatatttcttttattccaatataaaagtattaaaataac

SEQ ID NO: 971845 - DNA, 120 bp, Artificial Sequence
  ENSG00000287161_6 (sequence is synthesized)
cagtatattagaaatagcctaaatgtcaaaagaagggattaactgaataatggagggtgtatccttaggcataggtatttgctgccattaaaaaaccatatttttgcatgtgaacaacag

SEQ ID NO: 971846 - DNA, 120 bp, Artificial Sequence
  ENSG00000287161_7 (sequence is synthesized)
gaagaaatcaccatataataataattagaagtgcaagtttgaaaaactatagagagcataatattgattttgtagaaaagtattccacacagaaaagcacaagagaaactgaatcaaaat

SEQ ID NO: 971847 - DNA, 120 bp, Artificial Sequence
  ENSG00000287161_8 (sequence is synthesized)
cataacaggttagtgctgggtggcagagtctccttgtccttgggcaaaataatccaacacaaggccagttgggagtcagatttctgggtaaaatctcagctctactaccagctggttctc

SEQ ID NO: 971848 - DNA, 120 bp, Artificial Sequence
  ENSG00000287161_9 (sequence is synthesized)
tggccatgggcagggttcctatctggttggtgccttgttttctgtaaaaatggagatgattctacccccgaactcctagggctggagggatgaatctggtaaagcacttagacaaaatta

SEQ ID NO: 971849 - DNA, 120 bp, Artificial Sequence
  ENSG00000287161_10 (sequence is synthesized)
aggggctaatgaacaaacactgtcagcacccaccaggaggataaacctgggggagctgagacacccctgccccacccccacccaggtacaacacacacacacaaatgcacacacaaacac

SEQ ID NO: 971850 - DNA, 120 bp, Artificial Sequence
  ENSG00000287161_11 (sequence is synthesized)
acaccaatacacattcacaaacaaaggcacacacatacaaacacaaacacatacacacacgcacacatatacaaatgcacacatatacaaacacacagaaacgaatacacaaacacataa

SEQ ID NO: 971851 - DNA, 120 bp, Artificial Sequence
  ENSG00000287161_12 (sequence is synthesized)
atgcacacacatacaaacacacataaacaaatacacacacaaacacacatatatacaaatgcacacatacacaaacacaaacacgaatacacacacaaacacataaaggcacacacaaac

SEQ ID NO: 971852 - DNA, 120 bp, Artificial Sequence
  ENSG00000287161_13 (sequence is synthesized)
gcaacgcgttccccatggcagcagccaatgctgcagagaagtgggcatgaccggaactaagtgggcttgcagaatcacaggcccctcagaaacctgcagggtggacagcaaagaaaagga

SEQ ID NO: 971853 - DNA, 120 bp, Artificial Sequence
  ENSG00000287161_14 (sequence is synthesized)
ggccagaggcctgtggcagcctgtccccaagccacacagccaggagatggcagggctgggaccagcgggcgacatgtggagagctctttctggtgttggaaaaacacagtggagccattc

SEQ ID NO: 971854 - DNA, 120 bp, Artificial Sequence
  ENSG00000287161_15 (sequence is synthesized)
ataatgctggtgttaaggggcagaagaaatgcccccttggtgacagacatccccatgtccaggctccagtgcaacctgggactctgagccggcacatgacatccatgaggatgagctcca

SEQ ID NO: 971855 - DNA, 120 bp, Artificial Sequence
  ENSG00000287161_16 (sequence is synthesized)
tgcaagccaggacttcccctgcacaggactctcccctggagcagccacagcaaagcacctagaacatgtggctgtaacagcaagtgggtttccagatcccggatctcctccacctgcttc

SEQ ID NO: 971856 - DNA, 120 bp, Artificial Sequence
  ENSG00000287161_17 (sequence is synthesized)
atctgatttgaatcacccaacagcactgtacacaggggattacacgccattcccatttcagggagtgaaactgaagcaatgctcttctgtagctcagaggctttgcaaatgctgttactc

SEQ ID NO: 971857 - DNA, 120 bp, Artificial Sequence
  ENSG00000287161_18 (sequence is synthesized)
ctgctcagattacttttcaatgtgaccatcataaagtgggccagagtgaagcatgtaaagcacttagaagccctgagccaccatttaagaagcctggctgccctgaagccaccgccggga

SEQ ID NO: 971858 - DNA, 120 bp, Artificial Sequence
  ENSG00000287161_19 (sequence is synthesized)
gagagaagcctgagacgccccagcaccccgcagcccagccatttgagacattccagcccagatgcccggagaaaaaggctttgagatgagcccaggcccagccaccatctcatgcagctg

SEQ ID NO: 971859 - DNA, 120 bp, Artificial Sequence
  ENSG00000287161_20 (sequence is synthesized)
gtgagagatcctgattgagacccacaatgctgaccccaggcaagatctggattggggagccactgtttgggggtatttcgttacacagcaatagctgagccccccttggactctagggcc

SEQ ID NO: 971860 - DNA, 120 bp, Artificial Sequence
  ENSG00000287161_21 (sequence is synthesized)
cttgaggagagggtgaccaaagctgacaaattgccgtaaagagaccatgccccagctgagccgccctcagcaagagccttgtggggactatgacttccggtttcagcagcatttcaggaa

SEQ ID NO: 971861 - DNA, 120 bp, Artificial Sequence
  ENSG00000287161_22 (sequence is synthesized)
gatgcttgactctccagacagtgacgattcaggcgggaaacagcagctactttgctacagggatccacgaaagtgtccaaggaggagacgaggccgtagctgagtgcacagtgggcaccc

SEQ ID NO: 971862 - DNA, 120 bp, Artificial Sequence
  ENSG00000287161_23 (sequence is synthesized)
ggtggaggggggttcacgtgcattgtcacttctgctctcccaccgccctgggagtcaggcacgattagaactccatctctggagaggaggctgggagatgtagaataactcatccaggac

SEQ ID NO: 971863 - DNA, 120 bp, Artificial Sequence
  ENSG00000287161_24 (sequence is synthesized)
acagcctgtaactcctggagcttggatttgaacaagcgcttcgtggagcacagagaagactggtaggatggacagtggatgaacgacgttctcagtctgtccccgggatccgggtcatac

SEQ ID NO: 971864 - DNA, 120 bp, Artificial Sequence
  ENSG00000287161_25 (sequence is synthesized)
acagacctcacactccacatgcagagtaacaaagcaaagcctcctttgtaagagagtgacagtacaatgagttcatgctcggaaggaagcaccaggcaagtccctgcacacaatgggccc

SEQ ID NO: 971865 - DNA, 120 bp, Artificial Sequence
  ENSG00000287161_26 (sequence is synthesized)
cttaagcaggagctgagttcagtgtctcctctactgctcacatcatccctgcaatgcgggcttcctaagctctccttttctctaggctgccatttactgaaccacactctgtgccaagca

SEQ ID NO: 971866 - DNA, 120 bp, Artificial Sequence
  ENSG00000287161_27 (sequence is synthesized)
agatgctaaaggctttctacgcacttcttcctgagctctcacaacaatcctattgacaggtgctccaacgatctcctttttgctaaagagttaaccgaggcttagtgagattgggtggca

SEQ ID NO: 971867 - DNA, 120 bp, Artificial Sequence
  ENSG00000287161_28 (sequence is synthesized)
tccttggtccccagagagcatgtggtcctgatttgaacccagcaacgatcccaggctcgctcggctctgacctcacttccgcacaccacactcgtggaagcttttattgtacccctcata

SEQ ID NO: 971868 - DNA, 120 bp, Artificial Sequence
  ENSG00000287161_29 (sequence is synthesized)
agacggagaaaccgaggctctgggagagcaaatggcatggccaagcaccccaggccaaccctggtgggcagcttatactcgacttgaatcctcctgtctgaaatatgcgttccactcttc

SEQ ID NO: 971869 - DNA, 120 bp, Artificial Sequence
  ENSG00000287161_30 (sequence is synthesized)
cccacaggacccaatgcagcagttccggaaggaggaattctggcccccatttgccatagttggaaagcagattcatgttgcattccctttgccaatttgcttgcagcgggttgatgagga

SEQ ID NO: 971870 - DNA, 120 bp, Artificial Sequence
  ENSG00000287161_31 (sequence is synthesized)
gcagctcccagcttgtcccagccttcatgtggtaggggcttccagcaacccccccgccccagcaaggtcctcacagcgccccaacactgtggggctgtcccagcagtgaggcgattagca

SEQ ID NO: 971871 - DNA, 120 bp, Artificial Sequence
  ENSG00000254113_0 (sequence is synthesized)
atcttgaaaagcagcctgaagcaggaatactaacttccgggaattcagccattaagaaagacagtaaggagtaataaacgttacctaccgatctactatgcagggtaatgtcaaaatcag

SEQ ID NO: 971872 - DNA, 120 bp, Artificial Sequence
  ENSG00000254113_1 (sequence is synthesized)
agccccctagcgctgccagaaggggctgtggaactgaagaattttccaaagcactgagaagccatgttacttatctaagtcacagacaattaaatggaccgatggactttcaatcagaag

SEQ ID NO: 971873 - DNA, 120 bp, Artificial Sequence
  ENSG00000254113_2 (sequence is synthesized)
gtagcaacaatgtctgatatccagggaccatgatggcagcagtggtacactcggtagtgtcctctgttcagcggggatgccagcagcatcctcactagactcttctcaggtacgattttg

SEQ ID NO: 971874 - DNA, 120 bp, Artificial Sequence
  ENSG00000254113_3 (sequence is synthesized)
ggcatagtctgggctgccatcctgctttccttgttccaactcatgttccaagcctgggtcttcctggtgattatgtgagctccccggtatcctgtcaataaattccttttctgaaatcaa

SEQ ID NO: 971875 - DNA, 120 bp, Artificial Sequence
  ENSG00000204277_0 (sequence is synthesized)
gttactggaaatgaggagagcctcccaggtcccagcagagctgctgctggtgcctcccactgtgggctccacagaggcagaggatgagggagccactgatacctccctgtaaggcagcct

SEQ ID NO: 971876 - DNA, 120 bp, Artificial Sequence
  ENSG00000204277_1 (sequence is synthesized)
ccctgagcgagcaggagcaggtcaggggtgagtgtggaatgatgacagcccagggcatcctaggcccccggggcaagagcaagctccctgtgcttcctgacccccgcctcatttgcagat

SEQ ID NO: 971877 - DNA, 120 bp, Artificial Sequence
  ENSG00000204277_2 (sequence is synthesized)
acatgtgctcatgtcgggagatacctggagtcatctcaactcctgtcccccattccgcaggtccacaagtcaccaggttccattccccttcccctccacatatctcagagctgtcacaga

SEQ ID NO: 971878 - DNA, 120 bp, Artificial Sequence
  ENSG00000204277_3 (sequence is synthesized)
ctctccatgccccatttcaggggtcttggcccaggccttgtcatgccttatctggaccaagagcaatggtccccaaccagctccacccaggtaccccctgccccgcccatgtcccccaca

SEQ ID NO: 971879 - DNA, 120 bp, Artificial Sequence
  ENSG00000204277_4 (sequence is synthesized)
gttgcaccatgcctgctggcacctgccctctcttcactggtgctccagcagctgcagaggcagggctgaaccctgggcccgctctcagggcccccacctcctgctcatcctccacatggc

SEQ ID NO: 971880 - DNA, 120 bp, Artificial Sequence
  ENSG00000204277_5 (sequence is synthesized)
ccaagcccttcatgactgtttgcctcttgcccacatcttccatgttgacgtcgcctgggactggaggatgcatcagagcacggatccttgagccagcttaaaaacggtgtgtgaggccgg

SEQ ID NO: 971881 - DNA, 120 bp, Artificial Sequence
  ENSG00000204277_6 (sequence is synthesized)
aatcccagcactttgggaggccgagggtctacaggagttagtgcatgcagtgtgcttaggacagggcctgctggaggaatgtttactactactattaatgactggtacccggggctagtg

SEQ ID NO: 971882 - DNA, 120 bp, Artificial Sequence
  ENSG00000204277_7 (sequence is synthesized)
actggtacccggggctagtgatccagcatttcctgcctagcgccttgtccattccatgagaaccggccctcctcagcctcaccagggacatcgacatgtctgaccccctgcagcctgcag

SEQ ID NO: 971883 - DNA, 120 bp, Artificial Sequence
  ENSG00000204277_8 (sequence is synthesized)
ggggaggacacggagaccctgagcaggcagcgacttctggagttcaacagccccctagggcagacctgtggatgcaaagccgggctccaggtacgcagtgcccttgggggccgccaggtg

SEQ ID NO: 971884 - DNA, 120 bp, Artificial Sequence
  ENSG00000204277_9 (sequence is synthesized)
ctggcagcagggccacggggacctgggactgagccctctctgcctccaggaaaaagcaaaatgggatcatggtcccaggcgtccattcgaggtcctctccccttggcaggagacgaagga

SEQ ID NO: 971885 - DNA, 120 bp, Artificial Sequence
  ENSG00000204277_10 (sequence is synthesized)
cactgaacccagcactcagcatgggctggcaaacctaatcagtgcccatggattatgtttgccatccactgactggtggacggattgaggaccttggagttatcttcctgaatcttccct

SEQ ID NO: 971886 - DNA, 120 bp, Artificial Sequence
  ENSG00000204277_11 (sequence is synthesized)
ccttgatggcaactcacctccgctcaccaaggggtccaggaaggcacctgactctcaggaccgctggcgtcttggccagcctgggagagaaattcatctggcttatggcacagggacaga

SEQ ID NO: 971887 - DNA, 120 bp, Artificial Sequence
  ENSG00000204277_12 (sequence is synthesized)
gcttccttcacggatgcagaaggagaatgctgtttctctgcgctgggcaacctgggtttgaatcccatctctgggataagtgtgcagggcgcacagcaggtgttcggcacacagagccct

SEQ ID NO: 971888 - DNA, 120 bp, Artificial Sequence
  ENSG00000204277_13 (sequence is synthesized)
tactgaagatactgctcaacaaggcagggtctgcctggcgctggcttcaggcccttggcaggggctgggcagccactcttgcccatgccctggtggccccgagatgccagcactcctctg

SEQ ID NO: 971889 - DNA, 120 bp, Artificial Sequence
  ENSG00000204277_14 (sequence is synthesized)
ggtggttggggaacccacccagggtggaggaggtgggcaaggcctgggattccacatctccagggcagcagaccccacggtctccagggatcttgtctgtgcccaaactcctgagacttc

SEQ ID NO: 971890 - DNA, 120 bp, Artificial Sequence
  ENSG00000204277_15 (sequence is synthesized)
cctgtcctttcccacaagggccctggctctggtggctgcagaagtgggaggaggggatgtgggggagtctggggaaggccaccttccatgacgctctgccaagccaggaggagcgaagga

SEQ ID NO: 971891 - DNA, 120 bp, Artificial Sequence
  ENSG00000204277_16 (sequence is synthesized)
ataacctggtccccgtgctggaccctggactccaggaagcagagcccacagccggctcagccttgggtcccctgcctctgtggagctggccctaccccagatggccactgtgcctgaggc

SEQ ID NO: 971892 - DNA, 120 bp, Artificial Sequence
  ENSG00000204277_17 (sequence is synthesized)
ccggcatctgaccctctgtcctccctgccgaggggccagaacagaggccccggcaacaggcaaggcgcagtgcacggagctgaccccgtgcctcggtccaggcctagcaacaggaagtga

SEQ ID NO: 971893 - DNA, 120 bp, Artificial Sequence
  ENSG00000204277_18 (sequence is synthesized)
gaggccaatgccggtaaacgagatccgaaagattagaggcctcgctgccgccccaagttagaggacaagttcctggaaggaggaggaagctgccgcagtaaataacgccagaccccagcg

SEQ ID NO: 971894 - DNA, 120 bp, Artificial Sequence
  ENSG00000204277_19 (sequence is synthesized)
tcccagctgtcagcagccagtgcggccgcaggctgatatggggtttcactatgttgaccagactggtctcgaactgctgaccttgtgatccgcccgccttggactctcaaagtgctggga

SEQ ID NO: 971895 - DNA, 120 bp, Artificial Sequence
  ENSG00000204277_20 (sequence is synthesized)
ttgaaggcatgagccactgcacccagccctggggtgaaatctttgcaacgcacagaacccgcaaggatcagtatgcttgcacataccaaccagcctgaccagtcaatgagaaaagaccag

SEQ ID NO: 971896 - DNA, 85 bp, Artificial Sequence
  ENSG00000204277_21 (sequence is synthesized)
acataccaaccagcctgaccagtcaatgagaaaagaccagaacatgctcttcacaaagaggaattcaaacggctaaaacataaga

SEQ ID NO: 971897 - DNA, 120 bp, Artificial Sequence
  ENSG00000254115_0 (sequence is synthesized)
agtgaggcagtggggggttagcaagttgaaggcagataatatggggctctgtgggccatcatgaggacttcagcttttacctcggcatgagatgggaaaccactggagaatctagaggag

SEQ ID NO: 971898 - DNA, 120 bp, Artificial Sequence
  ENSG00000254115_1 (sequence is synthesized)
aaagggatgatctgcccttcaacaggatcatccaggctactccggtgaatatagaccatatgagggcaaagattggaagctaggtgagcagttagaaggctactgcaatagctatgtgag

SEQ ID NO: 971899 - DNA, 120 bp, Artificial Sequence
  ENSG00000254115_2 (sequence is synthesized)
agagatgaactaggagagtagcagtggagatctgagatacggcaaagtctagatataacacaaaggaatagccgacagaatttgcttttggattggctgtattgtaggagagaaaaaata

SEQ ID NO: 971900 - DNA, 120 bp, Artificial Sequence
  ENSG00000254115_3 (sequence is synthesized)
agaggcaagttggttgccatgttgtgagcagcccccttgaaaggcccatgtgatgatgaattgaaacctcctgtcaacagccatgtgagtgacctaggaagcagatcctgcagcccagtc

SEQ ID NO: 971901 - DNA, 120 bp, Artificial Sequence
  ENSG00000254115_4 (sequence is synthesized)
atgcttcagatgaggcatatctgaggcacagagaggttaagttggggactgaagtgtggctccagaatctaagtttctaactgccatgctatggtaagtgagattggtaagtgcacatga

SEQ ID NO: 971902 - DNA, 120 bp, Artificial Sequence
  ENSG00000254115_5 (sequence is synthesized)
ggaactcgtgagcctcaaagtcattcatcaatgcagcattcaatgatggcttacatgaaggtatagaggtaggctcatcacttttacccaaactcaaaaaactgaatttttattaagaaa

SEQ ID NO: 971903 - DNA, 120 bp, Artificial Sequence
  ENSG00000229922_0 (sequence is synthesized)
tggagatgcactgaccttccttgcaagagcctttccctgaagttgggctcctgagagaagttctgaacatggctatccctgccttttcatcttgtcagcaggttgatttgataatctgca

SEQ ID NO: 971904 - DNA, 120 bp, Artificial Sequence
  ENSG00000229922_1 (sequence is synthesized)
gtctgtgagcctctgttccatgacagaacagcttgcctggtacttggagattcccatcttgttgaggtaatttcccacgacaacctccttcaagtctttgcttaaatgtcatcttctcaa

SEQ ID NO: 971905 - DNA, 120 bp, Artificial Sequence
  ENSG00000229922_2 (sequence is synthesized)
tgaggctgatgctgaatgccctgcttaaaaatggcagttttccactgtcagccctcttagcccactgtgttatttttcctttttcaaattattttccaacatatataatttacttgtgta

SEQ ID NO: 971906 - DNA, 120 bp, Artificial Sequence
  ENSG00000229922_3 (sequence is synthesized)
tggagatgcactgaccttccttgcaagagcctttccctgaagttgggctcctgagagaagttctgaacatggctatccctgccttttcatcttgtcagcagatttcttcagcagctgctc

SEQ ID NO: 971907 - DNA, 120 bp, Artificial Sequence
  ENSG00000229922_4 (sequence is synthesized)
tacaaatatgcaatggaccctttaagcatttctcctttacagtgagcacaatgctaagctttgtcagcagatgccactggagcagcattgcagaagaaagcgagtttctcttcctgattt

SEQ ID NO: 971908 - DNA, 120 bp, Artificial Sequence
  ENSG00000229922_5 (sequence is synthesized)
tgtataagaccatcccgctgtgccctgccctaccacctgcccagaggcacatccctcactgactatttggcctgattctgagcctgtggccaccttctcacagccctgcaacacaggcac

SEQ ID NO: 971909 - DNA, 120 bp, Artificial Sequence
  ENSG00000229922_6 (sequence is synthesized)
tgtgtgctccaggcctcacgtccccagcagtggcctgactgtgcacttagccacagcctcagtttgcctgtgctccaagaaattgcatcctatttgcccagcagctatggaccagctcct

SEQ ID NO: 971910 - DNA, 120 bp, Artificial Sequence
  ENSG00000254119_0 (sequence is synthesized)
ggtaggttctgacagtttcatccatcacaatacaggcctcaccatgtcactgcctcagactgataaatgcaaaatgacagtcattcatccggtggaatagaagaagccagggaaaataca

SEQ ID NO: 971911 - DNA, 120 bp, Artificial Sequence
  ENSG00000254119_1 (sequence is synthesized)
acatgaagtcacttatgccatttgatatagctttgcaatgtgtatcttttctctcccctatcttttgttttgtttgtgtacatgccagcatgattatagtctttgcaaaaatatatacaa

SEQ ID NO: 971912 - DNA, 120 bp, Artificial Sequence
  ENSG00000254119_2 (sequence is synthesized)
gacaacacatttccctaaaataaaaaagtatgaatttagaaagattatagctacattaaaatgaattcagaatctactatgacataaatagaattagttaaagattaaggttagaaagta

SEQ ID NO: 971913 - DNA, 120 bp, Artificial Sequence
  ENSG00000254119_3 (sequence is synthesized)
aatgtcacttcttaactttttctctttcttgctattgaggagcacaatctaaaatttgtaggcagatagagtataaaagtaatgtacaattatggcacttatactatttttttcttttat

SEQ ID NO: 971914 - DNA, 120 bp, Artificial Sequence
  ENSG00000254119_4 (sequence is synthesized)
gctgtgtacctttaatttaaaaattaaaaaaataaaaataacagtaaactgaaagtctccattctctcatcttccttttcctatgtttatttttaaacaaattatactgcatatatcgat

SEQ ID NO: 971915 - DNA, 120 bp, Artificial Sequence
  ENSG00000254119_5 (sequence is synthesized)
atctattagggtcatgtgttgacttagcaataaatttaattattggtttagatatcttacagatgtatggaatctctaatatacacatttttgtttaatatgttactgagaaagaagctc

SEQ ID NO: 971916 - DNA, 120 bp, Artificial Sequence
  ENSG00000254119_6 (sequence is synthesized)
aagtgatagaaataacacaggacaggaagtaagacagttctcgtctgaagttcttctctgacagcccacaaactagttaatatatgtgcctgtcacagtctccaccagaagctttatctt

SEQ ID NO: 971917 - DNA, 120 bp, Artificial Sequence
  ENSG00000254119_7 (sequence is synthesized)
actacagagtccagatgcattaaggctgtgttcgagccatgatcttcctctgaagaagaaatgaagaagaaatttatcttatttttggatatagtgttcttagttggcagtttaattatt

SEQ ID NO: 971918 - DNA, 120 bp, Artificial Sequence
  ENSG00000254119_8 (sequence is synthesized)
atttttacttcatcactttgtatacgtcatcgcactttctcctggcctataagatctctcctgagaaattttacgttctactttactggaacttcattaaatattatttgcatcattttt

SEQ ID NO: 971919 - DNA, 120 bp, Artificial Sequence
  ENSG00000254119_9 (sequence is synthesized)
tgcagatattcttcattattccatcatcatctcaaacctcttgggtatagtgtttgactactactgtgaccataaattccaataaaacctaggaaaaatgaaaccactacattaactgaa

SEQ ID NO: 971920 - DNA, 120 bp, Artificial Sequence
  ENSG00000254119_10 (sequence is synthesized)
agaatcgccagcatcactactcttgcactgtgcggccattattaagtgaaataaggattacttgaacacaagcactgcaatgccgctacagtcaatgtgataacccagctggtgactaag

SEQ ID NO: 971921 - DNA, 120 bp, Artificial Sequence
  ENSG00000254119_11 (sequence is synthesized)
tgaccaaggacggggagtatctacagcggggagactctggaaaaagggaggattcacatccagtgccactggggcagggcagaatgagagttcatcatgctacaaagaatggcacagaat

SEQ ID NO: 971922 - DNA, 120 bp, Artificial Sequence
  ENSG00000254119_12 (sequence is synthesized)
attgcagcttacagaagacccagctaaggccatgtctggactttaaatccacaggaactgcaagatggtatcagaagtgggacctgcagtggggcatctagcaacccccaggagcattga

SEQ ID NO: 971923 - DNA, 120 bp, Artificial Sequence
  ENSG00000254119_13 (sequence is synthesized)
cagagagacttctctactgcttgggatgcttgttcagagtataatttccatagcagcaagaaaaggaatttttgtttgtggatactttaaagtaaataaagctattatagaaggcaaaag

SEQ ID NO: 971924 - DNA, 120 bp, Artificial Sequence
  ENSG00000254119_14 (sequence is synthesized)
ccttcagtgcccggatgcaggaggtaactccctggtgaggaagacctaagtatatggccatagattcataaggagaatggaagagaaaagtgcttttaaaagtgataaatttgagaaaaa

SEQ ID NO: 971925 - DNA, 120 bp, Artificial Sequence
  ENSG00000254119_15 (sequence is synthesized)
agcatgaaaaacagtcttggagacttctagagatgtccaaagtatgcctacggggagcaatagggataccaggagaatctgatggtagacgtatattaaaaaagctatttacatgttaaa

SEQ ID NO: 971926 - DNA, 120 bp, Artificial Sequence
  ENSG00000254119_16 (sequence is synthesized)
atgaacacctgaatctgcgaatatgatttgaataggaaagaatgggcagatacaagacatattgtgaggggaatctgaggtttgagtaaaagatttcttgccatcctaaaggaaaagagt

SEQ ID NO: 971927 - DNA, 120 bp, Artificial Sequence
  ENSG00000254119_17 (sequence is synthesized)
tgagatgaaggaatgagtcataaaattaatatgaagatttttacatctacagtcttaagagtaatcggattttcaaaatttgaccaaaatataagcctcttcagccatcagaaggacact

SEQ ID NO: 971928 - DNA, 120 bp, Artificial Sequence
  ENSG00000254119_18 (sequence is synthesized)
atcagtgtatgtgagaagtttggatttctacccccacctggcaataataaggatcacaggtgtgagccaccattcccggccccacatggacattcttcaactaaaaatattcaataaaag

SEQ ID NO: 971929 - DNA, 120 bp, Artificial Sequence
  ENSG00000254119_19 (sequence is synthesized)
aagtaaaaaccaaatggatgggctaaagaacagaatagagaggacagaggaaaaatatcaatgaaattgaagatagaacgatagacattatacaatctgaacaatagggaaattacactg

SEQ ID NO: 971930 - DNA, 120 bp, Artificial Sequence
  ENSG00000254119_20 (sequence is synthesized)
acaagctgccatgaatcctgcagctacaaggaaatgaactctattaacttgagtgagcttaaaactagatccttccccagtcaagcctccaggtgagaattcaatcctggctggcacctg

SEQ ID NO: 971931 - DNA, 120 bp, Artificial Sequence
  ENSG00000254119_21 (sequence is synthesized)
ctcatttatgattgcacaacctaaataaccatacatggctgggcctgggaaaggcagaaaggcagatggatggtatcagaagtgggacctgcagtggggcatctagcaacccccaggagc

SEQ ID NO: 971932 - DNA, 120 bp, Artificial Sequence
  ENSG00000254119_22 (sequence is synthesized)
aatgcatccctggatcatagcagactctgcctatagaggcctggggtccctttggcagcacttttctcaagaaagtagagtcgtggacaaccaactgcacaggttgggaggctttgaaga

SEQ ID NO: 971933 - DNA, 120 bp, Artificial Sequence
  ENSG00000224810_0 (sequence is synthesized)
cccttgtaccctggccagcgcatgtaggtggtgtgacctgggaggacagcggagccaggagctccgcagctgtgtcagaagccaggctcccagcggcaatgttccagggagccaaagggg

SEQ ID NO: 971934 - DNA, 120 bp, Artificial Sequence
  ENSG00000224810_1 (sequence is synthesized)
gagccagagagccgggaggctccagcctggtccagagagaaagagacagcacctgcccaaggcgattgtgtcctgcagtctgaaaaacactgacatagtaaagctcaacaaatgtttggc

SEQ ID NO: 971935 - DNA, 120 bp, Artificial Sequence
  ENSG00000224810_2 (sequence is synthesized)
tccttcacaatcagtgaagaattaggtactttcttgccaaagatagctgaagctcaaagcccgtaccatatggacacttgggatattttgagcaaccatgttgggatgcgggctagtggc

SEQ ID NO: 971936 - DNA, 120 bp, Artificial Sequence
  ENSG00000224810_3 (sequence is synthesized)
agcaccaactgataacgtggctatgggagctattttaagtgttcacctactctccccatcccatgctctccccaaatgccaatggttctcaacattttttggatcatggccccttcaaga

SEQ ID NO: 971937 - DNA, 120 bp, Artificial Sequence
  ENSG00000224810_4 (sequence is synthesized)
aatggatggctaccaaggatcctcttgtcagaacagcacatgtccccatatctgccacattctgcactttatttcagaggctctatggacttcagaatttgaaccctattccagatattc

SEQ ID NO: 971938 - DNA, 120 bp, Artificial Sequence
  ENSG00000224810_5 (sequence is synthesized)
agactcagagacctagaggtatgtctctgctgcctgcctctttcctctgaaaccatgccttaaaaacaccaaggggacattgaaacctgcttttctggatcacattctgaaaactgctgt

SEQ ID NO: 971939 - DNA, 120 bp, Artificial Sequence
  ENSG00000224810_6 (sequence is synthesized)
tcagaagagttgcagcttcaacagggccacagggatataaaagcagccctggaatgatgtcttccctaaaaacaacaaaatcatcaataatgaataggaagaaccaatattgtgaaaatg

SEQ ID NO: 971940 - DNA, 60 bp, Artificial Sequence
  ENSG00000224810_7 (sequence is synthesized)
agaaccaaacaagagcttgtagagccaagacaatcctaagcaaaaataacaaagctagag

SEQ ID NO: 971941 - DNA, 76 bp, Artificial Sequence
  ENSG00000224810_8 (sequence is synthesized)
aactattttaaaattcatatagaaccaaacaagagcttgtagagccaagacaatcctaagcaaaaataacaaagct

SEQ ID NO: 971942 - DNA, 120 bp, Artificial Sequence
  ENSG00000224810_9 (sequence is synthesized)
agcatggtatgctacaaaaacaggcacatagaccaatgaaacagaaagagaacttagaaataaaaccacacatctacaaccatctgatcttccgaaaacctgacaaaaacaagcaatggg

SEQ ID NO: 971943 - DNA, 84 bp, Artificial Sequence
  ENSG00000224810_10 (sequence is synthesized)
ccttccttacaccttacacaaaaattaacactagatgaattaaagacttaaacgtaaaaccaaacattcaggacataggcatag

SEQ ID NO: 971944 - DNA, 68 bp, Artificial Sequence
  ENSG00000224810_11 (sequence is synthesized)
caggacataggcataggaaaagattttgaattaaactaatgagcttctgcacagcaaaagaaactatc

SEQ ID NO: 971945 - DNA, 80 bp, Artificial Sequence
  ENSG00000224810_12 (sequence is synthesized)
cccattaaaaagtgggcaaagaatgtgaatacatgaaaaaagagctcaacattactgatcattagagaaatgcaaattaa

SEQ ID NO: 971946 - DNA, 68 bp, Artificial Sequence
  ENSG00000224810_13 (sequence is synthesized)
gaaacaacagatgctggcgaggttgcgaagaaatagcaacgtttagcgattcctcaaagatttagaac

SEQ ID NO: 971947 - DNA, 72 bp, Artificial Sequence
  ENSG00000224810_14 (sequence is synthesized)
tccacaatcccattactggggcatatgttcaatgccgcactattcacaatagcagacttggaatcaacccaa

SEQ ID NO: 971948 - DNA, 60 bp, Artificial Sequence
  ENSG00000224810_15 (sequence is synthesized)
aataattctattataaagatacatgcatgcatatgttcaatgccgcactattcacaatag

SEQ ID NO: 971949 - DNA, 120 bp, Artificial Sequence
  ENSG00000224810_16 (sequence is synthesized)
catggaataccatgcagccataaaaaggaacaggatcatatcctttgcagggacagggatggagctggaggcattatcctcagcaaactggcaaaggaacagaaaaccaaacaccgcatg

SEQ ID NO: 971950 - DNA, 120 bp, Artificial Sequence
  ENSG00000224810_17 (sequence is synthesized)
catggacacagggaggggaacaacacatattggggccagttgggggagtgcggggtggagagagcatcaggaaaaatagctaatgcatgccgggcttaatacctaggtgaaggaagggtt

SEQ ID NO: 971951 - DNA, 71 bp, Artificial Sequence
  ENSG00000224810_18 (sequence is synthesized)
tagctaatgcatgccgggcttaatacctaggtgaaggaagggttgataggtgcagcaaaccagtcccggaa

SEQ ID NO: 971952 - DNA, 120 bp, Artificial Sequence
  ENSG00000253775_0 (sequence is synthesized)
gtgtcatcctgctctgttccacctgggatgcaaatcatccctttgtccagcagatccacaccatagacactccccaccgtgagtcactcgggtgctgcctgagttatcagatcaaccatc

SEQ ID NO: 971953 - DNA, 120 bp, Artificial Sequence
  ENSG00000253775_1 (sequence is synthesized)
acagtatccacagcgctgtgttcaaggaactcttattttacatggttataacccccaaccacaagaggagtgatgctgacaattcggatctgcctaagaaaagccataaagtccttcctt

SEQ ID NO: 971954 - DNA, 120 bp, Artificial Sequence
  ENSG00000253775_2 (sequence is synthesized)
taagtgaaaagtgaaagttctcgacttaataaggaaggaaaaaaataacttcatgctgaggttgctaagatctatgataagaaggaatcttctatctgtgaaattgtgaagaaggaaaaa

SEQ ID NO: 971955 - DNA, 120 bp, Artificial Sequence
  ENSG00000253775_3 (sequence is synthesized)
gaaatttgtgctagttttgctgctgcaaaagctactgccacagtgcacggaaatgcctcttgaatgggagaagctgctgctcccccaaattgctggggaagaaagggagttcctgatctt

SEQ ID NO: 971956 - DNA, 120 bp, Artificial Sequence
  ENSG00000253775_4 (sequence is synthesized)
tcttattgaggctcatggagcttctgtcctggagattcagtatacttcagtaatggctctggagaagagaactcaggatcctcaagacccaatggctcgtgatgataaaagcctttgggt

SEQ ID NO: 971957 - DNA, 120 bp, Artificial Sequence
  ENSG00000253775_5 (sequence is synthesized)
ctaccgacattttccctacgtgctcagacatgtctgcatgcatttattggcatatttttccatactcaaagcaagttgctatgtgttagtactaaagcaacccataatagtaaaaacgaa

SEQ ID NO: 971958 - DNA, 120 bp, Artificial Sequence
  ENSG00000253775_6 (sequence is synthesized)
tttctgcaccaagagaatgaatcggcagctgagaaagtcagagtgaagaggccccagtaatatctctacctacttgaaggttaaatattcctaagactctaggaggaaagaggagagaaa

SEQ ID NO: 971959 - DNA, 120 bp, Artificial Sequence
  ENSG00000253775_7 (sequence is synthesized)
gtgggccctgttctttcctccaggatgtaaggtttttccaggctgctttgaaaagtctcaattactccaggctatagaagaatacaatcagaggtgagttccctgaaatcaaggacactg

SEQ ID NO: 971960 - DNA, 120 bp, Artificial Sequence
  ENSG00000253775_8 (sequence is synthesized)
agtttgaaggatcatcttaagctctgaaaccaggttgctgccacctgctacagatcacccacagccaatgtccttggctgagtgacacagcttccccgtgaccgccactgatccagccac

SEQ ID NO: 971961 - DNA, 120 bp, Artificial Sequence
  ENSG00000253775_9 (sequence is synthesized)
caagtatgcagcccaacctatgaagctgagcccagaagtggctcaaaaaaacaagccacaacccagaactgaatcacaacagccttttcctttaacactatacttgctctatttaacctc

SEQ ID NO: 971962 - DNA, 120 bp, Artificial Sequence
  ENSG00000253775_10 (sequence is synthesized)
cgccatggccaattcaatagattcacagaaaatatcagcaggacgccttggttctcaacaccaagtctggaaagctgggtttacacgccccacctgagcaagcctgatcggtgattgtgt

SEQ ID NO: 971963 - DNA, 120 bp, Artificial Sequence
  ENSG00000253775_11 (sequence is synthesized)
tgggctcattcctcacttggccccttcaagcagagataggccctgcaagaactctctctaggaattgttttctcaatattttaaaatccacttttcctatatcctatcaatgggcacgga

SEQ ID NO: 971964 - DNA, 120 bp, Artificial Sequence
  ENSG00000253775_12 (sequence is synthesized)
gtgagagtgatacaggcatgtggaatttcacaaggctagatgtgccagcttcaagactactgagctttaggggaaacctgaggctcagaggtcatcttgcctacagtgactatttgcagg

SEQ ID NO: 971965 - DNA, 120 bp, Artificial Sequence
  ENSG00000253775_13 (sequence is synthesized)
actgagctcccagaggtcactgcgtgccttggctcatggctcctttcttcaccttcaaagtcagcaaaacggcagatcttcctggcccttcttcagctgtcgtgttgtcccctgaccacg

SEQ ID NO: 971966 - DNA, 120 bp, Artificial Sequence
  ENSG00000253775_14 (sequence is synthesized)
acctcagctggggaagcttctcctctttgaaggattcgtttgattagattggacctgcaggagtacctcaagatcaccttcttatctcaagattcttaacctgaatcacatctgcaacgc

SEQ ID NO: 971967 - DNA, 120 bp, Artificial Sequence
  ENSG00000253775_15 (sequence is synthesized)
gcttttgccacatagggatcatattcacaagttgtggggattgggctggggacatttctgttgaactgtcattccaccatcactgattgccacattccaagtgccagagtaaagaatgaa

SEQ ID NO: 971968 - DNA, 120 bp, Artificial Sequence
  ENSG00000287298_0 (sequence is synthesized)
aagatggccgtctggtgggacacttggtatcatgtgcccttcccgctccatggcttggaatggaatttgtgctggccgttaacgttcttgaatgcatttccctctgagcttggatagagg

SEQ ID NO: 971969 - DNA, 120 bp, Artificial Sequence
  ENSG00000287298_1 (sequence is synthesized)
gtaatcaacatgctgacaccaagctacaatttttctcctgaagcacaaaaggaaatgaaggcttgactagcactgcaaggctgtgagttaggaaacgggaaacaagatgctcctgctgct

SEQ ID NO: 971970 - DNA, 120 bp, Artificial Sequence
  ENSG00000287298_2 (sequence is synthesized)
gttggagtcttgagttgttcctgaaatgagactgtggcatcccctgagaacaaggcatgatgcagaattgcacaatctaggtgcctgtatttcagctggcaaagctcccacctctgcctc

SEQ ID NO: 971971 - DNA, 120 bp, Artificial Sequence
  ENSG00000287298_3 (sequence is synthesized)
aattggagcatttaggtgaaatttggaacccagccattaagagaactgctagagaaaaacatgacagtaaaatcaaatttcaaatcagcatcacttaccatatgggaaactgcaaattca

SEQ ID NO: 971972 - DNA, 120 bp, Artificial Sequence
  ENSG00000287298_4 (sequence is synthesized)
gcaaaagggaaggcaatgctgaaattcaccttcaaagctaaatattgttccttagaccaatttcaacctcgaattcatttgaatttcctttatgtctggttacatctgaagtgaagtaat

SEQ ID NO: 971973 - DNA, 120 bp, Artificial Sequence
  ENSG00000287298_5 (sequence is synthesized)
tagcaataggcttgttagatttttctttccttatggaatttttttttttttcagagagacaatgatcacttatgaggtcatatttgtcacaggaatggcaaagactaaagtgattcccac

SEQ ID NO: 971974 - DNA, 120 bp, Artificial Sequence
  ENSG00000287298_6 (sequence is synthesized)
cattttttaggatgagccacttttttgttttcctagcaagtttaactttattgagtttaacttcatgaagttagcatactaattaattttaattactaaagttaacccaatgtaaataca

SEQ ID NO: 971975 - DNA, 120 bp, Artificial Sequence
  ENSG00000287299_0 (sequence is synthesized)
ctcgtggggcagagattgcactgtgaaaccctaccgacactaccccggaagggcctggcctccgaggtgtctgcagcgtgctgccttcgccggggcttttcagaatgggccggggcctcg

SEQ ID NO: 971976 - DNA, 120 bp, Artificial Sequence
  ENSG00000287299_1 (sequence is synthesized)
ggggtcttcatccccaaggaagcctcttgatttttggcaccgcctttgtttttgggccggaagccgttgtgcggctgtcttctgtgttcgtggcggctgttgccctttcccagtggctcg

SEQ ID NO: 971977 - DNA, 120 bp, Artificial Sequence
  ENSG00000287299_2 (sequence is synthesized)
gcttcattcccactgccctgcgacttggcaggcccatttagcctgttgttatgatactgtggattaaatctccgtctttggttagaagatccattctaccaaaaaagaaaagagataagt

SEQ ID NO: 971978 - DNA, 120 bp, Artificial Sequence
  ENSG00000287299_3 (sequence is synthesized)
atcagatgccagcaagccactgatgacaccagtagacatcaggaaaaccaaatctctaagccacagttataagcaaagaaaatttgaagcctctattaaaaaatcattccttcaacacat

SEQ ID NO: 971979 - DNA, 120 bp, Artificial Sequence
  ENSG00000287299_4 (sequence is synthesized)
cactgaccaggaacgtaaatggatgagcagtaaggacgcaatggattaagctcctttacaagggaaagatttctgaactcctcaaggtaattgcagcaaagcacatcatctgatcttgag

SEQ ID NO: 971980 - DNA, 120 bp, Artificial Sequence
  ENSG00000287299_5 (sequence is synthesized)
aacccagcagccattcagaggagctccaacctacatcctcgtgccattccccacctcccgccactgtcagtggctttgagcagctccaatccatctacaccctctggcaatggcagcctc

SEQ ID NO: 971981 - DNA, 120 bp, Artificial Sequence
  ENSG00000287299_6 (sequence is synthesized)
ttaacagaagagctcagtctgtgccctttgacaagtttcttcaccaccacaaggctgcacgttcctctggtagccacacaccttcttcgatcaggatatgaccggttactcagcaaagga

SEQ ID NO: 971982 - DNA, 120 bp, Artificial Sequence
  ENSG00000287299_7 (sequence is synthesized)
cctcatttggtattgtgaagcctacctgagaccacctgtatttgatgattatgtaaacatactacttttctgaagaaccacaggtggtcaacgtaagtaacccaagtttctgtttttaga

SEQ ID NO: 971983 - DNA, 120 bp, Artificial Sequence
  ENSG00000287299_8 (sequence is synthesized)
agcaatttaaaatatgctttatttaatagcaaaaagagtactaaaatgagatgacatttccattaacctacatttcatttttcaagaagacttgagattttgcaaaacatcgtaaatggg

SEQ ID NO: 971984 - DNA, 120 bp, Artificial Sequence
  ENSG00000287299_9 (sequence is synthesized)
aaatgaagtctctaaagaacttaacaattcaagcaggcgtgtccattcattcattattcattcatttatctaactctatctgggggtcaactatgtatcaaacccaagaatagtaatagt

SEQ ID NO: 971985 - DNA, 120 bp, Artificial Sequence
  ENSG00000287299_10 (sequence is synthesized)
aagacccattctctgcctccaagaagcacagtctcacatggggagacagagccacaactaacaattacactccgtggaataacagctgcagtggagaatgcagagaagcccacagaagta

SEQ ID NO: 971986 - DNA, 120 bp, Artificial Sequence
  ENSG00000287299_11 (sequence is synthesized)
caaggtgaatgacagaggaagggcgaatcattcaggcagggtaggagaaagaagagagttgagtccctgaggaggacatcccagacagaggaaacagcctttgcaaaggaggcagacaca

SEQ ID NO: 971987 - DNA, 120 bp, Artificial Sequence
  ENSG00000287299_12 (sequence is synthesized)
ttcaaggtcagggtggcgaatgagagatgcgtggagatgcggcagtggataagggtgtaaaaggtggacggggtccactcatgcaggggatgtatgttatgccgaagagaccagactctg

SEQ ID NO: 971988 - DNA, 120 bp, Artificial Sequence
  ENSG00000287299_13 (sequence is synthesized)
attgcaaccatattttcaatttaaatccttatcgttataatccaacaaggtagagatattttaaaatgaaacagttaaaatgattgtcaattttaagtttcagttgtcttgaatattaaa

SEQ ID NO: 971989 - DNA, 120 bp, Artificial Sequence
  ENSG00000287299_14 (sequence is synthesized)
cctgaaatcattagctacctgcttctttggactaaaagctgcatgaaggcaggaatcatttcctcaccaaagcacctactcgaattcatccaatagaggacccactagagacagctgatg

SEQ ID NO: 971990 - DNA, 120 bp, Artificial Sequence
  ENSG00000287299_15 (sequence is synthesized)
aactcattggattccaacacttcttatgaagtaattaatttcccacagtgctcgactagatactgcatcaccaacactaaatagatgttttatctgatctctacaagcttgtaatctaag

SEQ ID NO: 971991 - DNA, 120 bp, Artificial Sequence
  ENSG00000287299_16 (sequence is synthesized)
acataacagttgttattcttaattttgagaattaaaatgtcattgctctgtgtgacagattgagaaacaaactaatcataaaaatttttaggccataaaagctaataactaaagacagta

SEQ ID NO: 971992 - DNA, 120 bp, Artificial Sequence
  ENSG00000287299_17 (sequence is synthesized)
agtatactaaaataaatcaatgtcaaattataaacgttcagaattttcagttgtttattatgatttatttcattgagttgagaaatctattaaccttttgacatgggaagatggaattca

SEQ ID NO: 971993 - DNA, 120 bp, Artificial Sequence
  ENSG00000287299_18 (sequence is synthesized)
ctaaataagttagagaagcactacttccattgtcatcaccctctttcaaaatagtgccaacatttttataagttacggaaatgcagtgggaaaacactactgttaattgtcaggtagaca

SEQ ID NO: 971994 - DNA, 120 bp, Artificial Sequence
  ENSG00000287299_19 (sequence is synthesized)
tctgacactgctcatgaggagtgggatgactgtggctcttaagcctatgcatggagcatttacactgaacctctgtgatctgtgtgctaacagatcagcctattttccctcattggcatg

SEQ ID NO: 971995 - DNA, 120 bp, Artificial Sequence
  ENSG00000287299_20 (sequence is synthesized)
atgccacctctgttttgaataagacactctaatgtcggctgctctgcctaccatattggtctgtccaccagccatgttttgcagggatcaattgctatgagtctgattctttaaagtgct

SEQ ID NO: 971996 - DNA, 120 bp, Artificial Sequence
  ENSG00000287299_21 (sequence is synthesized)
ctttaggagctgttctatctcaacagatattaggaaaggggctgccaatcctcgatcagcaccatggcgcccaacccagattctcaaattggggaatacatattctcacttgaatatatg

SEQ ID NO: 971997 - DNA, 120 bp, Artificial Sequence
  ENSG00000287299_22 (sequence is synthesized)
actgtgagttcagacattatatgaagaagccatgacataaaagggacatcttgctgctattttttactcaatggccaataagtttgtaaagatataggaaaaaacaaactccgcttctcc

SEQ ID NO: 971998 - DNA, 120 bp, Artificial Sequence
  ENSG00000287299_23 (sequence is synthesized)
tactatgctctcacaatgcagaatacttctggggacctctggtcacccaaatgtgtgggggacttctctccaccaagtaatcgttcagcagtggattcttcagcagacatcagctgggtg

SEQ ID NO: 971999 - DNA, 120 bp, Artificial Sequence
  ENSG00000287299_24 (sequence is synthesized)
ttctcccacttagttctcccagtgttaattctgacactgtctacctggagatagcatcagatcccacagattgagagctcagttccacaagaccaccccccacttcagataccagcacaa

SEQ ID NO: 972000 - DNA, 120 bp, Artificial Sequence
  ENSG00000287299_25 (sequence is synthesized)
gtacaattggccctccatatccacaggttccatatctgtggattcaaccaaccacagaaccaaaatatttgggaaaaaaacagtaaaaaatatcaggagtgtactgagtacctatggctt

SEQ ID NO: 972001 - DNA, 120 bp, Artificial Sequence
  ENSG00000287299_26 (sequence is synthesized)
ttggaacatcataaaatcaaaaaatcttaaatcaaaccaccataaataagggacggtctataatttgctagagtggctcacagaactcagggaacacatttactcgtttattacaaagga

SEQ ID NO: 972002 - DNA, 120 bp, Artificial Sequence
  ENSG00000287299_27 (sequence is synthesized)
tattattaaggttactgatgaacacaagagagaagagatacacagggcaaggtatgtggaaaggggttcaaagctaacatgccctctctgggttcaccaccccaaacctccaagtattta

SEQ ID NO: 972003 - DNA, 120 bp, Artificial Sequence
  ENSG00000287299_28 (sequence is synthesized)
gctcagtccttttgggtttttccagaggcttcgttacataggcatgactgcttacatcattggccactggtgatcaacttaaacgtcagctcctctctcctcctgccagtttggtgggta

SEQ ID NO: 972004 - DNA, 120 bp, Artificial Sequence
  ENSG00000287299_29 (sequence is synthesized)
ggactgaaaattccaaccctctaatcacctggttggttccctgggcaaccagcccctattggacgatatccaagagccctcagccaaagatcagctcatcagcatacaaaaagacactta

SEQ ID NO: 972005 - DNA, 120 bp, Artificial Sequence
  ENSG00000287299_30 (sequence is synthesized)
tcattttgaagataccaaggattttaggaatggtatatatatttcataataagtatcacaaagttacagtggttttatactgaaataatgtgtggaatatattattaaatacaatggata

SEQ ID NO: 972006 - DNA, 120 bp, Artificial Sequence
  ENSG00000287299_31 (sequence is synthesized)
aaaattttgcatcgatttttaagacaacatgtaataataccccaaggaaattgtatgttgtcagaagttagttttgaccatgtgcccagagacttggggtaacacattagtccttctgtg

SEQ ID NO: 972007 - DNA, 120 bp, Artificial Sequence
  ENSG00000287299_32 (sequence is synthesized)
tcttggggtcattttgatggaaaaccctgagaagcagtaatatgtggaaagggtacaggctttagaaccaaacacagctgagtttgaagccctgttcctccacatttcttgagagtttga

SEQ ID NO: 972008 - DNA, 120 bp, Artificial Sequence
  ENSG00000287299_33 (sequence is synthesized)
ctttgaccaagacaagtctgacctcaagcctcagtgtcctcatcaaacagaaaggttatttaacatgaagatttataaaatatgtagcacagtcgctaatggagccaggtgatattttta

SEQ ID NO: 972009 - DNA, 120 bp, Artificial Sequence
  ENSG00000287299_34 (sequence is synthesized)
aaacatgtaagatcaagtcatattccagcttaaaaccttccaacagcttctttttgctctctgaataatgccctacatggcagtattatgggttccaaacctttcagtacatggacctcc

SEQ ID NO: 972010 - DNA, 120 bp, Artificial Sequence
  ENSG00000287299_35 (sequence is synthesized)
tttggcagtctggtgaagcctttggggtctttctcaaaataatgttttaaaatttatgaaataaactacatgtgattacaaaggaaactacttatattgaaatatacttagaatattaat

SEQ ID NO: 972011 - DNA, 120 bp, Artificial Sequence
  ENSG00000287299_36 (sequence is synthesized)
aaaaaacaaacatgctgcagtaatatatgtacttctctattaacacatcaaataacattatatagtaacaaggttcttcaactacagtaagtttgaagtaatgacggacaaccatttcag

SEQ ID NO: 972012 - DNA, 120 bp, Artificial Sequence
  ENSG00000287299_37 (sequence is synthesized)
gatatctgcaacaaatgtaattggatatgaaaatatctgtgatttttaattgtgaaagtcacgggtactgctgctctactgtgggttttttgtttgtttgttttttgagacaaagtcttg

SEQ ID NO: 972013 - DNA, 76 bp, Artificial Sequence
  ENSG00000287299_38 (sequence is synthesized)
ggagtgcagtggcgcgatcttggctcaccccaacctctgcctcccaggtatgtgtctggcaccatacctagataat

SEQ ID NO: 972014 - DNA, 69 bp, Artificial Sequence
  ENSG00000287299_39 (sequence is synthesized)
tgtctggcaccatacctagtcttgaactcccgacctcaggcgatctgcccgcctcagcctcctaaagtg

SEQ ID NO: 972015 - DNA, 120 bp, Artificial Sequence
  ENSG00000287299_40 (sequence is synthesized)
acaggtgtgagccaccacacctggccctactctggccttttttttttttttgcctttgcctacattcatgactggaggaaacggtaaatttcatttagatgttagtgaagataaaaatgt

SEQ ID NO: 972016 - DNA, 120 bp, Artificial Sequence
  ENSG00000287299_41 (sequence is synthesized)
atttgttctcatctacattcatggacccatggattctaaccgcgatcccttggagatccacggacctgggtagacagccaggattctaagtggtattcttggacttcatctcccatcacc

SEQ ID NO: 972017 - DNA, 120 bp, Artificial Sequence
  ENSG00000287299_42 (sequence is synthesized)
accatgcactgaatggggtttctcaccatgcactacctcatttaacatcagaatcaccctttaagttagttgctattatgtgcttcgttttatagatgaggataaggagtttcagggact

SEQ ID NO: 972018 - DNA, 120 bp, Artificial Sequence
  ENSG00000287299_43 (sequence is synthesized)
tgcccaaggtctatctacagttgggaaatggtggagctattcccgctttatatactatctcctgacaagactcttaagttgtaacataaacataaaccttttttgaaaatcaaacctctt

SEQ ID NO: 972019 - DNA, 120 bp, Artificial Sequence
  ENSG00000287299_44 (sequence is synthesized)
aagaaaacatgaaattttatgagttacaaatatataaggttcttcatttgtgcactgtgactggatggtataggtttagggcagaccaacccccaataattcagagcctagagcaagagt

SEQ ID NO: 972020 - DNA, 80 bp, Artificial Sequence
  ENSG00000287299_45 (sequence is synthesized)
gcagaccaacccccaataattcagagcctagagcaagagtacaaatgtaggtccatacatctgtgaagggaaaagtcaag

SEQ ID NO: 972021 - DNA, 120 bp, Artificial Sequence
  ENSG00000287299_46 (sequence is synthesized)
gctcactgagataaatgcatatctgactgtctcatttggagaggctaatcagaaactcaaaagaatacaaccatctgtcttttatctgcctaagacctggaagccccctcctcgctccca

SEQ ID NO: 972022 - DNA, 120 bp, Artificial Sequence
  ENSG00000287299_47 (sequence is synthesized)
ctggaagccccctcctcgctcccagttgtccgcctttgcctccagtagtcccacctttctggactgaactgatattcaccttacacaaatggattgatgtctcatgtctccctaaaatgt

SEQ ID NO: 972023 - DNA, 120 bp, Artificial Sequence
  ENSG00000287299_48 (sequence is synthesized)
ctcatgtctccctaaaatgtacaaaaccaagctgtgccccaccaccttgggcacatgtcatcagaccttctgaggctgtgtcacgggtgcacgtcctcaaccttggcaaaataaactttc

SEQ ID NO: 972024 - DNA, 120 bp, Artificial Sequence
  ENSG00000287299_49 (sequence is synthesized)
caccatatgtctgaatactgtcttttcctatctctggctccatcccacattgtaaggggccttgcacacacaaatgtggacattccagcctgcacacctaagcatcgcctccactcccac

SEQ ID NO: 972025 - DNA, 120 bp, Artificial Sequence
  ENSG00000287299_50 (sequence is synthesized)
ccttccagcggatgggtgtgaaaactggcagtgttgttcatcttcaagatgatgtatacaggaaagtggtccaggcagatcctgtgagcaggcttgggcccacttgggaagagtaaccca

SEQ ID NO: 972026 - DNA, 120 bp, Artificial Sequence
  ENSG00000287299_51 (sequence is synthesized)
ggatctcgagtactgactggcagcatgcttcagaacaaagagtgtagattccagtggccctgtctccttggtctctctgattccttactctgtagagagggccatggctgcgggagggtc

SEQ ID NO: 972027 - DNA, 120 bp, Artificial Sequence
  ENSG00000287299_52 (sequence is synthesized)
aagaagttacttgaaaacacagggcccggtccaagggccattcttgcctgggtctacagtgttctgacttagatatttgagtggatttcaacttaaatgagccattacctaaactgctaa

SEQ ID NO: 972028 - DNA, 120 bp, Artificial Sequence
  ENSG00000287299_53 (sequence is synthesized)
accagagaactgaagaagtatctacatagatagtacttaatctggcctcctttgtttttaaagaaattatgaaaaagggaaactcttagactaaattttagacttaattatcagcatggt

SEQ ID NO: 972029 - DNA, 83 bp, Artificial Sequence
  ENSG00000287299_54 (sequence is synthesized)
accccatctctacaaaaattatacaaaaaaatttagttgcaggctgagcctggtggattgtttgagcccaggaggttgaggct

SEQ ID NO: 972030 - DNA, 120 bp, Artificial Sequence
  ENSG00000287299_55 (sequence is synthesized)
ctgaactcctcaagctcttattgtgggcctttattctgcaaagaaggctgcagtgccagcggagctgactgccagtgccaagtgtgtgactgacataacgtatggaggtaattgcagcaa

SEQ ID NO: 972031 - DNA, 120 bp, Artificial Sequence
  ENSG00000287299_56 (sequence is synthesized)
tttattgtctcattttcttcagtacagatatagtaactgctctcatgctaaatgtggacaccttatggtcctcttttaccccttctagtagttagtaacctcctactgttttaattaaca

SEQ ID NO: 972032 - DNA, 120 bp, Artificial Sequence
  ENSG00000287299_57 (sequence is synthesized)
atgctttacattacatttctcctattcaaataaccagtatggttcttatctcctgacttgatcttgactgatacacatggccagtatgagggcccaaacagagaccagcatagctaaagt

SEQ ID NO: 972033 - DNA, 120 bp, Artificial Sequence
  ENSG00000287299_58 (sequence is synthesized)
agagagggcaagaacgaatgtgccatgcaaggagggtggagtgggacacaggggccagactatgctgggcttgcaggacagggtaagtcttcttgtctttatcgtaagaggtcagatttg

SEQ ID NO: 972034 - DNA, 120 bp, Artificial Sequence
  ENSG00000287299_59 (sequence is synthesized)
tgttttgaaaagattacaggatagagaatgatttacaaaggaacaagggtaagtgctaggagattaatgagtggactattgctgcagtgcaggcaagtgaggatggtagttttggtggga

SEQ ID NO: 972035 - DNA, 120 bp, Artificial Sequence
  ENSG00000287299_60 (sequence is synthesized)
aggcaggggaagagacagcaatgaatgaattctagaaatacatggaaatgaaaaccaacaggaaatggggatagactggaaatggggagtgagaaagagggagatgtcatgactgatgac

SEQ ID NO: 972036 - DNA, 120 bp, Artificial Sequence
  ENSG00000287299_61 (sequence is synthesized)
gatcgggaacactaaaagagagccacgactgggaagggagatgatgagtttgttttgagcatgttgttgaagtgctttgaaatatcaaggtgaaaaagtcaaagaagagtctggagttca

SEQ ID NO: 972037 - DNA, 120 bp, Artificial Sequence
  ENSG00000287299_62 (sequence is synthesized)
gagtgtagccagaactaggaagatgagtttgtgagtcatcttacataattaaagctagagtatggctgaaataatctaaggacagtgtgtagctttatatgatgaaggacctgagatcaa

SEQ ID NO: 972038 - DNA, 120 bp, Artificial Sequence
  ENSG00000287299_63 (sequence is synthesized)
acaagccctagggagcttcagcaatttaacagccaggtaaggaagaatgacctccaaagggaacagagaggaagcagtaaagacagagggacacaatcaggagagtgtcatgtcatagaa

SEQ ID NO: 972039 - DNA, 120 bp, Artificial Sequence
  ENSG00000287299_64 (sequence is synthesized)
accacagggaaacgatagagttaaggatagggtggttaacaatgctgaatactgctaaagggaaaaaataaagattaaaaaacaatggctagattcaataatatggaggccattgctaaa

SEQ ID NO: 972040 - DNA, 120 bp, Artificial Sequence
  ENSG00000287299_65 (sequence is synthesized)
cttacctataacagcttacctagagcagtttatttggagagatggggctgaaagccgtaacaatgaggtgatgagtgagagggaggtgaagagtggagacagggagtaaaggtaactctc

SEQ ID NO: 972041 - DNA, 120 bp, Artificial Sequence
  ENSG00000287299_66 (sequence is synthesized)
aaggtaactctctgaagatgttacagaataatggtctagtgatgaagcctcaagaaaactcctttttttttttgtttttgagacacggtctcgctgtcacccaggctggagtgcaatggt

SEQ ID NO: 972042 - DNA, 66 bp, Artificial Sequence
  ENSG00000287299_67 (sequence is synthesized)
ccaggctggagtgcaatggtgtgatcacggctcactgtggcctcgaccccttgctaccctgctcag

SEQ ID NO: 972043 - DNA, 120 bp, Artificial Sequence
  ENSG00000287299_68 (sequence is synthesized)
tgccatgttgcccaggctaagaaaaccattctctcataattattatatactttgatttgcaagtttcatcattcttctatctttacatgacagggtaataaacaaaaatttggggaaaca

SEQ ID NO: 972044 - DNA, 120 bp, Artificial Sequence
  ENSG00000287299_69 (sequence is synthesized)
ataactttggaacagagaccaaaatagacaggtttatgcagcagacacaatgtcagttctgccttctcataatgtctttatcaaatacagatatactttattatttcattcaaatcctat

SEQ ID NO: 972045 - DNA, 120 bp, Artificial Sequence
  ENSG00000287299_70 (sequence is synthesized)
gaagcttgatgagctcagagggcataaaggtggtaactttctgactggaataacatctttagttttatttacattcactgtctttacaagatcttatatgtcattaataccttaataggt

SEQ ID NO: 972046 - DNA, 120 bp, Artificial Sequence
  ENSG00000287290_0 (sequence is synthesized)
aatcaactccagccctgggcatccactccacttccacaaggacgctatgctggtgaagttctctgtggaatggaagactgaactagctattggactgggatttacattattggctgcctt

SEQ ID NO: 972047 - DNA, 120 bp, Artificial Sequence
  ENSG00000287290_1 (sequence is synthesized)
catttttggatctttgacgcagactaaattataccactggctttcctggatctccagtttgcagacagcagattgtgggacttttcagcctccataatcataactggcaagtaacaagcc

SEQ ID NO: 972048 - DNA, 120 bp, Artificial Sequence
  ENSG00000287290_2 (sequence is synthesized)
aagcaagaatttcaatggaaaattacagagatactaacaggtttgagtacttatgaatacaaaataaataaacggatttaaattactttattattacaatgcagaaatgaggaagtgtaa

SEQ ID NO: 972049 - DNA, 78 bp, Artificial Sequence
  ENSG00000287290_3 (sequence is synthesized)
aattactttattattacaatgcagaaatgaggaagtgtaatagccagctagtcttggaacatggcactgtgaccccag

SEQ ID NO: 972050 - DNA, 120 bp, Artificial Sequence
  ENSG00000287290_4 (sequence is synthesized)
ctgagggctagttgaaataatgacatgtgggagatcagcactccaagtcaaaattgcaaaacagaagaaaattccagaattatatcactgttaagatagcaacaaataaataatttgcac

SEQ ID NO: 972051 - DNA, 120 bp, Artificial Sequence
  ENSG00000287290_5 (sequence is synthesized)
cctacaacccatgtgtgaatttaattctggaaaacccaatctgagacagggacatccatcaccatgtgaaaaagcctgggatagtctgctggaagaaaatgtaacttgcagagaatagat

SEQ ID NO: 972052 - DNA, 120 bp, Artificial Sequence
  ENSG00000287290_6 (sequence is synthesized)
aaaccttgcagtgtacccagttggatttcagaacattgaagagcagcagcttttatgggaataagagtgtcccttacaggtaatctcctcgacatttatattgggtgagtcacagtcaga

SEQ ID NO: 972053 - DNA, 120 bp, Artificial Sequence
  ENSG00000287290_7 (sequence is synthesized)
aaatatcttagtttgtaactttgaggatgaagagtaggtgtattcaaggagctaccttcttgaacacaattgaaggtcatgaaattctgaacttcaaggttgataccatgatttcatgag

SEQ ID NO: 972054 - DNA, 120 bp, Artificial Sequence
  ENSG00000287290_8 (sequence is synthesized)
acttttgaaagtcctaggatggcaatgagaatatcttttatgtggaaaaattgtgggtaatttgtggccagaggttggactgtggtagattcgaaaagtggttgcaaaagttttccattc

SEQ ID NO: 972055 - DNA, 120 bp, Artificial Sequence
  ENSG00000287290_9 (sequence is synthesized)
ttgtttcatgtccttcagtcatgacttctcctagtgactttaagattatcgatgtgatttgctttgcctatgaggcaataagcaaatgtgacacaagcagaggcttaaaaatgcgtatgc

SEQ ID NO: 972056 - DNA, 120 bp, Artificial Sequence
  ENSG00000287290_10 (sequence is synthesized)
tttaggagaggttagctgttgctcttgggaaacacagaaccatataaagctgctaaccttctggcagatgagaatcatcacggagcagagatgaggctaaacagctgaggcttctctaaa

SEQ ID NO: 972057 - DNA, 120 bp, Artificial Sequence
  ENSG00000287290_11 (sequence is synthesized)
gctgaggtacatagaagaaatgcctacctgagccaacccaaattgccaacccacaaaaatctgaaaccaaataaattgtttaaaactactaggtttgagagtattttgttacaaagcagg

SEQ ID NO: 972058 - DNA, 120 bp, Artificial Sequence
  ENSG00000287290_12 (sequence is synthesized)
ttaaccaaggcaattaaatgtaaaaggtatactaaatgaataattttataaacattaagccataatgacatcaaattgattttgaagttcattaatgcatacagtcctcaaactgcttta

SEQ ID NO: 972059 - DNA, 120 bp, Artificial Sequence
  ENSG00000287290_13 (sequence is synthesized)
ctgctttattcattgtatactgtaatgtttcacatttaatttctgtatctattccactaaagtttagtttttacttgagaagacaaaaatattattataggaaattttatatcatactca

SEQ ID NO: 972060 - DNA, 120 bp, Artificial Sequence
  ENSG00000287290_14 (sequence is synthesized)
tttgtgaaaataaataaaattcaaataatgttgatttctgttaatgatgctgattgcttattagatcctacacatataagtgaatcatttgcccataaatattatagattattatcataa

SEQ ID NO: 972061 - DNA, 120 bp, Artificial Sequence
  ENSG00000287290_15 (sequence is synthesized)
caagtattgaataacctatacttctcattttgaagaagtgtattctatctttaatcagttgtgcctaaatttaaatgtgtatacatttaagaattttatcaaaaaatgtctttaaaaaat

SEQ ID NO: 972062 - DNA, 120 bp, Artificial Sequence
  ENSG00000287290_16 (sequence is synthesized)
caaaaacatcatcaaactgccaaaaatagaaaagctggggtagagaagtgaaactattgctcagtgatacagtccctttttgtgccagcaacagctgggcaatcaactttcatttataac

SEQ ID NO: 972063 - DNA, 120 bp, Artificial Sequence
  ENSG00000287290_17 (sequence is synthesized)
tatctaccgtaagcagcttgcccgtggccaagtcaatcattatagaatctaatggtacatcaattttcttccaagatttaatttggcacacagggttttgaaaaagaagactatcataaa

SEQ ID NO: 972064 - DNA, 120 bp, Artificial Sequence
  ENSG00000287290_18 (sequence is synthesized)
atattgctacaactccagaatctaatatcttacttgtgttttgaccccattagataaaataaattgaaatcctttcattaatgtgttaacagagtcattttaaaattgaattttcatagt

SEQ ID NO: 972065 - DNA, 120 bp, Artificial Sequence
  ENSG00000287290_19 (sequence is synthesized)
gatctccttgaaattgcttataaagaactaagttatgttgctaaggttcttatgcaaattttaaacagataatatacctttttgtctcacaaccataacacatcaatgcaaggttctgtg

SEQ ID NO: 972066 - DNA, 120 bp, Artificial Sequence
  ENSG00000287290_20 (sequence is synthesized)
ttaaccaatttcttaccaacaaaataatttttaatttgattgttcttggtttgaagatttgctacttctcttgtttaatttgtgcagaataaattttattagagtcttttacagatatct

SEQ ID NO: 972067 - DNA, 120 bp, Artificial Sequence
  ENSG00000287290_21 (sequence is synthesized)
tatgacagtagggagtacatgtgatcatattttataaatattttcaagttggtatcatgcctaaatatcctaagtagtgatttgtgaataatggcaaattaaaatgaattaatgagaagt

SEQ ID NO: 972068 - DNA, 120 bp, Artificial Sequence
  ENSG00000287290_22 (sequence is synthesized)
ttgttaaaaatgcagatgctcaaaagattatattgctagcagtgtacggctaagtagaagttaagtgttccaggatttgtgaaccatcattttaaggactgaactgatgatgaaatcact

SEQ ID NO: 972069 - DNA, 120 bp, Artificial Sequence
  ENSG00000287291_0 (sequence is synthesized)
acactgagctctgttccattcccacttctccaccttcagaaagccttccctgatctccacacactatctccaccctctcagccaaaggtgctcctcctccgtaacctccagagcgctgtg

SEQ ID NO: 972070 - DNA, 120 bp, Artificial Sequence
  ENSG00000287291_1 (sequence is synthesized)
caccggcatgccctgcttagtagagagtgagtccttgagggtgaggctgggattaatttcccaccgcatcctgaaagacaattcagagtaggaatttggagaatgctaaatctgtctaga

SEQ ID NO: 972071 - DNA, 120 bp, Artificial Sequence
  ENSG00000287291_2 (sequence is synthesized)
acagtgctcctcaaactttaatctgtacaccaaccacctggaaagcttgttaaactgaagattctcatacagcaggtctgagtgaggcccaagattctaccaagacccaggtgatgctga

SEQ ID NO: 972072 - DNA, 120 bp, Artificial Sequence
  ENSG00000287291_3 (sequence is synthesized)
tggtccttggaccatactttggataacttggctgaacattggaatcatctggggaagttttaaaaggctccctgcgtggaccacacctccagagtttctgatttaatgggtaatgcacct

SEQ ID NO: 972073 - DNA, 120 bp, Artificial Sequence
  ENSG00000287291_4 (sequence is synthesized)
gggcagcagaaagttgtaacagctctcccggtgtttctaacgtacttcaaagtttgagaaccatggtgctgcaggaaatttgccatgggctatacaaccttcaaaataaaggctgtggtt

SEQ ID NO: 972074 - DNA, 120 bp, Artificial Sequence
  ENSG00000287291_5 (sequence is synthesized)
ccctgcaacactgggaagaagagtgtcaatggtaccttatgtttctggagtttgaaaaggactttatgattacatctattatttcttagttccctccaacgtgggaggaaggcgtccttc

SEQ ID NO: 972075 - DNA, 120 bp, Artificial Sequence
  ENSG00000287291_6 (sequence is synthesized)
agataagcagcaggctcagcaagatgatccttacagagctgagacattaatccagattgctttaggggaagaattcttgattgtctaaacactgaagttgtctcattggaaagttcaagt

SEQ ID NO: 972076 - DNA, 120 bp, Artificial Sequence
  ENSG00000287291_7 (sequence is synthesized)
aaataaacttcaagtgggacggccatattccttgacaactccatgctgaggcacagtaacaaagatgttctgctgcccattagaggcacccagcgaatggcaggggtggagacacaggtt

SEQ ID NO: 972077 - DNA, 120 bp, Artificial Sequence
  ENSG00000287291_8 (sequence is synthesized)
ttatttggttttgtcagcaacactgggatatttgctgaaccgctcaggagattttctttccccccagcttagaagaaacaaatttgagcactgtttggaagaagacgacagcagagagat

SEQ ID NO: 972078 - DNA, 120 bp, Artificial Sequence
  ENSG00000287291_9 (sequence is synthesized)
ggcaggaaaagtaagagcaggtggagagagaggatacaggcctgggaaactttcctagtcacttagaagtgtggtcttccagtcaacacaaggagttaaagaaagctacagccactgcag

SEQ ID NO: 972079 - DNA, 120 bp, Artificial Sequence
  ENSG00000287291_10 (sequence is synthesized)
tgagtacttttcagttaccaaggcaaggcattttttttttccaccacatggcagaatcaaagtgggtagaattactttgtgcatatattccagtcatgtgttttcatttttcccaagaaa

SEQ ID NO: 972080 - DNA, 120 bp, Artificial Sequence
  ENSG00000287291_11 (sequence is synthesized)
agctgtactggattgagtcatgtcccacataatttaggttcacccagaatctcagaatgtgactttatttggaaatagtgtctttgccgatgtaatttatgatgacatcaaactagaata

SEQ ID NO: 972081 - DNA, 120 bp, Artificial Sequence
  ENSG00000287291_12 (sequence is synthesized)
gggcaggctctgaatccactatcagactaagagaagacacagggaacagagaagaaacacaggtagaaccccacatgaaggtggaggccaacatcagagtgatgtgtcaacaagccaagg

SEQ ID NO: 972082 - DNA, 120 bp, Artificial Sequence
  ENSG00000287291_13 (sequence is synthesized)
aacaggaaggatgacccatggccaccagaagctggagagaaccatgaaacagattctcccccagaggtccaagaaggcagaagccctgcccacaccacgatttcagacttctggcctcca

SEQ ID NO: 972083 - DNA, 120 bp, Artificial Sequence
  ENSG00000287291_14 (sequence is synthesized)
gaactgtgaaaaatacatttctgttggccactcagtttgtgataatttggtatggcagccctgggagatgaatacagaagacttgtttataaaatttcagtaaagaacctattgaggtgt

SEQ ID NO: 972084 - DNA, 120 bp, Artificial Sequence
  ENSG00000287291_15 (sequence is synthesized)
ttttgaacaagaaatgattgaatctacatggacccaattggtcatccagaattcaccatcattgtcccccagcatggagcgagtacccttttctttaacctgctaggacctcttcagtac

SEQ ID NO: 972085 - DNA, 120 bp, Artificial Sequence
  ENSG00000287291_16 (sequence is synthesized)
aaaacaatatcacagaaaactttgaataaagattaagtcctggatggcatggccagttagttactagcaagttaacacaacatgccgtctcaacttaaaattctcttctggttgttattt

SEQ ID NO: 972086 - DNA, 120 bp, Artificial Sequence
  ENSG00000287292_0 (sequence is synthesized)
cagaggatggatgggtgaacccggatcccgggattctcccgcgcccgctgcccctctgcggagcctccccggagtcccacgcccccaccccggccacggagatcaccacgtcaggagata

SEQ ID NO: 972087 - DNA, 120 bp, Artificial Sequence
  ENSG00000287292_1 (sequence is synthesized)
tgtatgcgtgtgcatgtgtgtgcgcgcgtgttcacgcgcgtgtgcgagcaggctaacctgggcttgttcatatggtggtggaagatttcccagcagcaagagtgttggctccagtataca

SEQ ID NO: 972088 - DNA, 120 bp, Artificial Sequence
  ENSG00000287292_2 (sequence is synthesized)
gaccttgtcaagtctctgcctgcatcatttgcatctttgaccaaaccaggtaaaaaaccaaaacaaaaaaagtccctaaaattcaagaaagggggtaaagattctctcgctttttgggag

SEQ ID NO: 972089 - DNA, 120 bp, Artificial Sequence
  ENSG00000287292_3 (sequence is synthesized)
gaaaagtcacatcacataggcatgtgcttccagaaatatgaggaatctgtagtaatttatttgtgatgtaccataaggtgttctacaatattatacttcattctcctctgtcaatgagtg

SEQ ID NO: 972090 - DNA, 120 bp, Artificial Sequence
  ENSG00000287292_4 (sequence is synthesized)
tcattgaatataatatcatgtaaatattagatgatctgtagattgattcaggttcttgaaattaaagaaaagaagcaaatgtattaatttagctcccttaggagctatttttgaaaagta

SEQ ID NO: 972091 - DNA, 120 bp, Artificial Sequence
  ENSG00000287292_5 (sequence is synthesized)
atatttacttataattaaggaataagaaacattcatcaagacaaaataataaaacatttaaaaattattttgagtggaataaccagggtgaattgatagggataaagaaaggttgaactc

SEQ ID NO: 972092 - DNA, 120 bp, Artificial Sequence
  ENSG00000287292_6 (sequence is synthesized)
taccttagccttacccctttcagccccaccaagtaaaacacttactatcgtttagttggtataatatgtacaggtctttgttttgtttttgtttcccttttctctgttttttcctgtttg

SEQ ID NO: 972093 - DNA, 120 bp, Artificial Sequence
  ENSG00000287292_7 (sequence is synthesized)
ttttactccctgtgggctatgcctttatctgcacccgcttatattatcatgactcccagtgtatatctccggctttgatctgtctcctgagcgacagaccaatttaattcactttgtgat

SEQ ID NO: 972094 - DNA, 120 bp, Artificial Sequence
  ENSG00000287292_8 (sequence is synthesized)
gacctctatgaaaatatctcttagcatggccacataagaactcattgtcttctgctctaatcctttcttccagctatagtctctaacagtgagaggtaatgccaacattcattacgtgtt

SEQ ID NO: 972095 - DNA, 85 bp, Artificial Sequence
  ENSG00000287292_9 (sequence is synthesized)
tatcatgactcactgcagcctccacttcctgggctcaagtgatactcccacctcagcctcccgaatagatgggactacaggtgca

SEQ ID NO: 972096 - DNA, 90 bp, Artificial Sequence
  ENSG00000287292_10 (sequence is synthesized)
tgcatgccaccacgcccagctaatttatttttatttttagtagaaatgagggctcccctgcctcagcctcccgaaatggtgggattacag

SEQ ID NO: 972097 - DNA, 83 bp, Artificial Sequence
  ENSG00000287292_11 (sequence is synthesized)
acaggcatgagccactgtgcccagacaaaaaagatagcgaggcgggtatatcagtattttgcccaggctggtcttgaactcct

SEQ ID NO: 972098 - DNA, 120 bp, Artificial Sequence
  ENSG00000287292_12 (sequence is synthesized)
ccttggcctcccaaagttctgggattagaggagtaagccactgctattccttcccatcattgctctccactcaccaatctccaaatttgtgcttcttgccccttcaatatttcttgatat

SEQ ID NO: 972099 - DNA, 120 bp, Artificial Sequence
  ENSG00000287292_13 (sequence is synthesized)
cttgatattcagctcctccagttccacagcttctatcttaatcagactccatggcttatttatctgcttcacatcttccccaaatttctccaatccatctagagcaattgtctaaaatat

SEQ ID NO: 972100 - DNA, 120 bp, Artificial Sequence
  ENSG00000287292_14 (sequence is synthesized)
aaaacttatcatgtcattacaagtcttccatcaataaatcctcataacctttaggatatgatccacttcattatcttggcatacaagtctctcgacggtctaaccgatgatgtaactctc

SEQ ID NO: 972101 - DNA, 120 bp, Artificial Sequence
  ENSG00000287292_15 (sequence is synthesized)
agccagaggaaactcctttcttgtgtccatcataacatctctcacctctttgtccaaagtgaacccctgttcttattatccttcctgatcctcttccttctcaatgtggttaactcttac

SEQ ID NO: 972102 - DNA, 120 bp, Artificial Sequence
  ENSG00000287292_16 (sequence is synthesized)
tcattcttccagaattaatacaaaaaaaaatctgcttggaaagtattcctaagttaacatcagacttaagtgagcagtccactactttcccttatagtatataactgtcctaaatcacat

SEQ ID NO: 972103 - DNA, 120 bp, Artificial Sequence
  ENSG00000287292_17 (sequence is synthesized)
tccatagtttttaactggtgatttacttaggtcatctccgtcattgctctgcgtgatgttagcagttaactccgtccctgacacacagtaagctctcaggactcgaatgatgactgagat

SEQ ID NO: 972104 - DNA, 120 bp, Artificial Sequence
  ENSG00000287292_18 (sequence is synthesized)
tgaacaaattgactgaatgaatgagtgagtagaggaaggatgtgacagaagtgtaatcatattacagttggccatgtgtcctggctgcatcttactcaatgcatgcacatggcagaactg

SEQ ID NO: 972105 - DNA, 120 bp, Artificial Sequence
  ENSG00000287292_19 (sequence is synthesized)
tttattactgagaagtaatttagctaagtctgggtgttggaaggaatgcacttggagtttaagtcaagtttcagcacaaggtaggagtaagatcttgttgacaacaaaaacagctctagt

SEQ ID NO: 972106 - DNA, 120 bp, Artificial Sequence
  ENSG00000287292_20 (sequence is synthesized)
tctgaaaatttagggatcatttatttttctgtaattggaaaaaaattcctctctgttagaagtttgtctccttaagcccaggatttcgagaccagcctggcaagataagaccctccttgc

SEQ ID NO: 972107 - DNA, 120 bp, Artificial Sequence
  ENSG00000287292_21 (sequence is synthesized)
ctccccggagtcccacgcccccaccccggccacggagatcaccacgtcaggagatatgtatgcgtgtgcatgtgtgtgcgcgcgtgttcacgcgcgtgtgcgaggctaacctgggcttgt

SEQ ID NO: 972108 - DNA, 120 bp, Artificial Sequence
  ENSG00000287292_22 (sequence is synthesized)
agagagtgtgagatacactggatgcagagaaggtcaaaactgaattggaagattttatccagttctggcttctacaagtgagggggagtaaagacaacccgtggaaggtgtggcctcttt

SEQ ID NO: 972109 - DNA, 120 bp, Artificial Sequence
  ENSG00000287292_23 (sequence is synthesized)
gagagttccctttgatcatcgttgaacaagaaaatatttgggtctggtttaccaaaggacctacaagattttctggcaccaccattccctggaggggtcagccagctacatgttggcagg

SEQ ID NO: 972110 - DNA, 120 bp, Artificial Sequence
  ENSG00000287292_24 (sequence is synthesized)
atgatggcactggactatttccatcgtggaaggggcagcattttgtcctcactggaacagacacttggttagaatatgaatatgctttcactgtacatatttgttctgctaaaaccacca

SEQ ID NO: 972111 - DNA, 120 bp, Artificial Sequence
  ENSG00000287292_25 (sequence is synthesized)
actgtatatgccttattcactgttatgatattccacgtagcattacttctgaccaaggaactcatctcacagctaatgaagtgtggataaggaagggacttttgaagattttgttatgtt

SEQ ID NO: 972112 - DNA, 120 bp, Artificial Sequence
  ENSG00000287292_26 (sequence is synthesized)
aaggaatgggaatgagatcagctgctcttagtttaccctttgtgatccactaacagtatttttgcttctagtcctggtgactttgggctctgctgctttagggcattttacttttccaga

SEQ ID NO: 972113 - DNA, 120 bp, Artificial Sequence
  ENSG00000287292_27 (sequence is synthesized)
agaataatgcttctgccaggaaacacagtaacactcctgttaaattggaagtcgagactgctccctgagaactgtgatgccagtaaatcagcatgcaaataagtggctactggattggct

SEQ ID NO: 972114 - DNA, 120 bp, Artificial Sequence
  ENSG00000287292_28 (sequence is synthesized)
gaagtgtttgatgctgactatcaaggggggaaactgggtttccagcatagagtgggcacgggagtaggtgctttctggaataccctggtcaccttgggtactgctttttattcccttatc

SEQ ID NO: 972115 - DNA, 120 bp, Artificial Sequence
  ENSG00000287292_29 (sequence is synthesized)
ctgtggcaaaagttaatataaaaccatggtagcccaataaagacaggacttctcatggctgacactttaggaatggagttttaatcactccaccaggcatgggatcacagcaaggtgagg

SEQ ID NO: 972116 - DNA, 120 bp, Artificial Sequence
  ENSG00000287292_30 (sequence is synthesized)
tgcttgctgagggcaagggaaatatgaagtgggcagtgcaagaaggaagtcatcaatacaagctatgaccatatggccaatagcagaaatgaggacttaatatttatgagtatttctttc

SEQ ID NO: 972117 - DNA, 120 bp, Artificial Sequence
  ENSG00000287292_31 (sequence is synthesized)
ttaattttatttacaggcatgcttcacttaacgagagggatatagtctaagaattgtatcattaggcaattttgtcatcatacttacatcttggagtgtacttacacaaacctagatggt

SEQ ID NO: 972118 - DNA, 120 bp, Artificial Sequence
  ENSG00000287292_32 (sequence is synthesized)
atagcctactacacatctaggctgtatggcagaacccatttctcctaggctgtaaacctgcacagcatgttaccatactgagtactgtaggcaattgaagcacaatggtgaggatttgtg

SEQ ID NO: 972119 - DNA, 120 bp, Artificial Sequence
  ENSG00000287293_0 (sequence is synthesized)
cccgcctcggcctcccaaagtgctgggacgacaggcgtgagccgccgcgcccggcccccaacagatgcaggagtacggaatcagatgcccacaaagtgcagagacatgtttctgagtgtt

SEQ ID NO: 972120 - DNA, 120 bp, Artificial Sequence
  ENSG00000287293_1 (sequence is synthesized)
ccacaaagtgcagagacatgtttctgagtgttaccgggagccagccaggcagagctgcagtgtgggagcccggcctcagaacgggacaccccaccatcgatcaggagactggcttctgcc

SEQ ID NO: 972121 - DNA, 120 bp, Artificial Sequence
  ENSG00000287293_2 (sequence is synthesized)
catctgctctttaagcctgtgtctcagatggtgtgaaatagggatcaccctgagagaaagctgtcactgcaagattccgggatacactgccttcatttttataaatgcatgcaattagct

SEQ ID NO: 972122 - DNA, 120 bp, Artificial Sequence
  ENSG00000287293_3 (sequence is synthesized)
atgccaagtattacaagccgtttttcaatggcttcaacttcctcagctccaaaaccttggatctcactccaactcagcatctactattatgttctgtgtctccattatattagatttgca

SEQ ID NO: 972123 - DNA, 120 bp, Artificial Sequence
  ENSG00000287293_4 (sequence is synthesized)
ggaggttaacgagaagcacagcacataattcacatgaataggctttgaaacctaagtgtgatgaaaagtattattattactgttatgcaaagtccttgcagcaaaaattacattatcctt

SEQ ID NO: 972124 - DNA, 120 bp, Artificial Sequence
  ENSG00000287293_5 (sequence is synthesized)
tttccaaatatattgtgaacctattgctgcgctagaattcagatctaggctttcttaaaactccatttgtgatgcttgcacttacttcataaacttccttgggtatgaaaacacttaagt

SEQ ID NO: 972125 - DNA, 120 bp, Artificial Sequence
  ENSG00000287293_6 (sequence is synthesized)
tttcttttctccccaatgccccaggcagttgacaggtggataatgacatcaacaggcaggtggccatcaaagactcagggtaggtgtgtttttgtgagaccccaggtggttgatttctgt

SEQ ID NO: 972126 - DNA, 120 bp, Artificial Sequence
  ENSG00000287294_0 (sequence is synthesized)
gccctctacaaaggacctgtgcagcccacggaacaactccgcagttctcagcttggagaaaggaaggggagaaggggtcttctggcccaccaagtcgagggacattgaggaagtaatgaa

SEQ ID NO: 972127 - DNA, 120 bp, Artificial Sequence
  ENSG00000287294_1 (sequence is synthesized)
tctgtgatgcgtccagaagaaaattcaccctctgggaaaatgagcttccgtattcatgcttggtgtatctccagcagtatctgctctacctccaaacaacactgcaattattttttttca

SEQ ID NO: 972128 - DNA, 120 bp, Artificial Sequence
  ENSG00000287294_2 (sequence is synthesized)
ccccgtgggtgaaaaaccgctgccctatctccctcatttattgactcacactcctcccacaaaactacagtgttgagggatcagtaacagaaatgttcaagaaggccacacttgtcttta

SEQ ID NO: 972129 - DNA, 120 bp, Artificial Sequence
  ENSG00000287294_3 (sequence is synthesized)
tcactaatatgtgacatgtaagatggcttgaaggaagtactgaaattaacacccagatgtaaaagaatacccgaagatgcctagctggacattgctaataccaacattgcaacagatcaa

SEQ ID NO: 972130 - DNA, 120 bp, Artificial Sequence
  ENSG00000287294_4 (sequence is synthesized)
tgagcattttaatagtctatgctgtataaaaacatgtttaaattgatatttaaaatacacagcttcctattctttgaattaaatatttaatgttatttttccttatagacaaaaagttac

SEQ ID NO: 972131 - DNA, 120 bp, Artificial Sequence
  ENSG00000287294_5 (sequence is synthesized)
ttaccttgagtctgctggttttacaaaatgaattgaaaatggaaataaatgttcccgtttaggccccatttaagagtcactagatttagtgtttagcttttaataaaaattattgcaccc

SEQ ID NO: 972132 - DNA, 120 bp, Artificial Sequence
  ENSG00000287294_6 (sequence is synthesized)
tctaattggctgtaaattaggtcctgttctcatattttacatctgtagataccgacagttcttaaacagtggaaattttgtgcacattcatataatctgctgaaagtataaacaatgaaa

SEQ ID NO: 972133 - DNA, 120 bp, Artificial Sequence
  ENSG00000287294_7 (sequence is synthesized)
aacgtggctggaatttattcatatttttgtactgacagatgaggcatttcagtttcagctgaatgaaaggatttttaatggattaatttaaagccagcactggaattatgcaaaaagaaa

SEQ ID NO: 972134 - DNA, 120 bp, Artificial Sequence
  ENSG00000287295_0 (sequence is synthesized)
atatagaaataggacagacaaacagagtgggacgagaaaattccttcaagaatcacagttgttgtggatctcaaggtgatgcagattctggcacagaaagggaagcaccagccctgttct

SEQ ID NO: 972135 - DNA, 120 bp, Artificial Sequence
  ENSG00000287295_1 (sequence is synthesized)
ctccattccacatggcagttccttcctctctcagggatgactgcagtcttctgccaggcctggggttttctacttctagcctgggaactaggagtaataagcacgacagagcgatctgca

SEQ ID NO: 972136 - DNA, 120 bp, Artificial Sequence
  ENSG00000287295_2 (sequence is synthesized)
cttgcgtcgaagagctgcattccgttccagtggctttggactagaaaatctccttccctgttcattcagcaagatgaggcaagagttgtcctggtcatccaacaacatagggcataaagg

SEQ ID NO: 972137 - DNA, 120 bp, Artificial Sequence
  ENSG00000287295_3 (sequence is synthesized)
cgtctatttgagaaccagcaggaggtcatattctatatgtccacatatgtatctggggagactggctggctgcaaggctttgtaaccaccttccaggcagatgacaagatggaaccttct

SEQ ID NO: 972138 - DNA, 120 bp, Artificial Sequence
  ENSG00000287295_4 (sequence is synthesized)
caacatacacctcagttaaaagtcaagtcaataaaagcctggctgcatgaaagaggatgatacataaagactggctgtatacctttgtttgatctgagtaagaaatgcgtgcattcaatg

SEQ ID NO: 972139 - DNA, 120 bp, Artificial Sequence
  ENSG00000287295_5 (sequence is synthesized)
aggccactgagtttatgatcaaacctcctcgtaaagaatagagcacagagaaacccatattcttaccgtgtgacaaatgagactgcgaacgtggacccttctttaaaactccagctaatt

SEQ ID NO: 972140 - DNA, 120 bp, Artificial Sequence
  ENSG00000287295_6 (sequence is synthesized)
caggttgcagaatgaagtgtgccatgtcataattaatccctcatgtattgcaagcaatttaatgtcaaaataatcaacaggagcgttttttacccttttgtgagtacataataaatactg

SEQ ID NO: 972141 - DNA, 120 bp, Artificial Sequence
  ENSG00000287296_0 (sequence is synthesized)
agggaaaggggacgggaaccctggcgaggaggagcgtcccccgactccacgctgagctttctgggtgggctcctttctctgagccccgccgatgcatcagcgccttggcccaagggaggg

SEQ ID NO: 972142 - DNA, 120 bp, Artificial Sequence
  ENSG00000287296_1 (sequence is synthesized)
gggccgggggtggagctcacggcctacccacatgctcccgtctggaggccccagtgggtcgtgggcagcaagtttcccttcacacaggggaagaccctggttccagcctgaacatcccct

SEQ ID NO: 972143 - DNA, 120 bp, Artificial Sequence
  ENSG00000287296_2 (sequence is synthesized)
tgctaacagcgcttacaacgtgccaggctaggttaagagctctccttttatcaataattcaccgatccccagcctccactcctcggaggatactgttctatctgcttccttcaagtgggg

SEQ ID NO: 972144 - DNA, 120 bp, Artificial Sequence
  ENSG00000287296_3 (sequence is synthesized)
aaaccaaggcagagtcactaggccaatatttactaaacaaacaatatttgctactgctgtgaaagggggccactggggcctccagctcttcggtctctagcgtacgccagcccttgcttg

SEQ ID NO: 972145 - DNA, 120 bp, Artificial Sequence
  ENSG00000287296_4 (sequence is synthesized)
taggcggtgacccgccccgggctacgggttcccgtgattcgtaccaagccattcccccgcagtttcccgcgacaggagctccacgggtgggttcagagctcgcacggctgcgaacccggc

SEQ ID NO: 972146 - DNA, 120 bp, Artificial Sequence
  ENSG00000196810_0 (sequence is synthesized)
atcgctgaaaactgccacataacttgtataactgctgtaaggcttggttttcagccataagatgggaagagaagtaacatctaccttgcaggatgactgcaagctgtaaaatgccacaaa

SEQ ID NO: 972147 - DNA, 120 bp, Artificial Sequence
  ENSG00000196810_1 (sequence is synthesized)
gcgcaggggagcccagaaccgccgcagcaggacaggtcctctggaagcagacagacctgccttgttactttagccatccagagtccagtttagccagtgatgaaatgagtacaaaagaac

SEQ ID NO: 972148 - DNA, 120 bp, Artificial Sequence
  ENSG00000196810_2 (sequence is synthesized)
acctttcttgtaggattgcaaaatgatgtcttcatccattctgtgctgctatagcagactcctgcacactgggtaactgacagcttacagaagcttgttggcttatggttctggaggctg

SEQ ID NO: 972149 - DNA, 120 bp, Artificial Sequence
  ENSG00000196810_3 (sequence is synthesized)
ggaagtccaacctcaaggggctgcatctggtgagggctttcttgttgcatcatcacatcgcagaatagcagaagggcaaggagagagagagaaaagagtgctgaacccaccctttgataa

SEQ ID NO: 972150 - DNA, 120 bp, Artificial Sequence
  ENSG00000196810_4 (sequence is synthesized)
gaagcccactcccatgataatagcaccagcccattcaggagggcaaagccctcgtggctgcatcgcctctcaaaggttccacctctcaagatcatcacaatgacaatcaaacttcatgaa

SEQ ID NO: 972151 - DNA, 120 bp, Artificial Sequence
  ENSG00000196810_5 (sequence is synthesized)
ttttggaggggacaattattcaaaccagaacagagggggatggcaaatgttctgaaaacaagcctagaaattgatcttagaaatggtgcaaaagtagatttccccttctgtctttacctg

SEQ ID NO: 972152 - DNA, 120 bp, Artificial Sequence
  ENSG00000196810_6 (sequence is synthesized)
tgatggtctaaccccaaaagcctcccagaacagaacttgtgagcacaagatagaaacaacaaacttgatgcagagctgagctcacaaggaggtcagggatgtgacaggaaccagagacaa

SEQ ID NO: 972153 - DNA, 120 bp, Artificial Sequence
  ENSG00000196810_7 (sequence is synthesized)
acagaaggctgaaaaccaggtcttaaagtgtgagagccaaagggcagcagcccaggagagtgttcgtctggagccccggggtttaagtctccacactcacatgggaaaggagacgaggcc

SEQ ID NO: 972154 - DNA, 120 bp, Artificial Sequence
  ENSG00000196810_8 (sequence is synthesized)
tccctggatccacgtgaatcaggaactggaacaagggcactcaaagggctacgccatcaggagagatgtgaatgagtgtgcccacaggaacaggaagacaacaggatggttctgtgtttg

SEQ ID NO: 972155 - DNA, 120 bp, Artificial Sequence
  ENSG00000196810_9 (sequence is synthesized)
cctgcctgttgtggttctgtgagacagaaacagttttgatgacaattgataatcaggactcagagccttgttagacttcaggtattgaatttttttttgagacagggtctagctgtgttg

SEQ ID NO: 972156 - DNA, 88 bp, Artificial Sequence
  ENSG00000196810_10 (sequence is synthesized)
aggtatcgaattttcacaggtttcacagtccaggccctaccacccctgcagcaaataacttgatataaaacctgggcccaggctagta

SEQ ID NO: 972157 - DNA, 120 bp, Artificial Sequence
  ENSG00000196810_11 (sequence is synthesized)
cagcaaataacttgatataaaacctgggcccaggctagtaatacccttgaagcccatgacagaagcaggcacagtgatagaagcaaaatcacgtagacattatcaatctagccccctcca

SEQ ID NO: 972158 - DNA, 120 bp, Artificial Sequence
  ENSG00000196810_12 (sequence is synthesized)
attcctacccataaagcccactgaagatgaatttacaatcataaagtacaaaacatgccaagaaagaaccacatgagggaagtcagcagatgtgtgaacagcaggaacggactccgccac

SEQ ID NO: 972159 - DNA, 120 bp, Artificial Sequence
  ENSG00000196810_13 (sequence is synthesized)
caaaggccttcaaaagaaccagctggaaccctctggaaagttccagaaccaccagcatcagggtggccaagacgtgggcactgccagacaggggaccatgtggggccagaagaaattata

SEQ ID NO: 972160 - DNA, 120 bp, Artificial Sequence
  ENSG00000196810_14 (sequence is synthesized)
ggacatagcaggtctcagacatgaccagagactgctgccagtggtggaaggcttccctgagcgtgatgacctggccactccacaggaagcctccacacccaaggttaaaggtgtccagct

SEQ ID NO: 972161 - DNA, 120 bp, Artificial Sequence
  ENSG00000196810_15 (sequence is synthesized)
gcggccagggttccggggtacctgtggatcccgtgacgtggcaccgaagatctgagctgtgcagaggagctgcaccacagaggccaggtttccgtgtggagaacgcgcataatgggaggc

SEQ ID NO: 972162 - DNA, 120 bp, Artificial Sequence
  ENSG00000196810_16 (sequence is synthesized)
cttgagctgagacccagcccccgacccccacccccacccaccagcaggggattctcctcagggcctcacagagcaccacgtggtgtcattgctggtcctgccatagctcccaggaccaat

SEQ ID NO: 972163 - DNA, 120 bp, Artificial Sequence
  ENSG00000196810_17 (sequence is synthesized)
gcttcccagaactccctgctacataaatacatccggtccctttccctcgagatcttgaaaagtgaagacttcacttggcagtaacggtaaaacatttcaacatggtaagttgtcatttta

SEQ ID NO: 972164 - DNA, 120 bp, Artificial Sequence
  ENSG00000196810_18 (sequence is synthesized)
tgcacacatggaatggtggcccataaagggcctgggggtccaatatcctacatactggactcctcattagtcctctgagtcttctgttccccaacacactgcattgggatcaaactgaat

SEQ ID NO: 972165 - DNA, 78 bp, Artificial Sequence
  ENSG00000196810_19 (sequence is synthesized)
cttctgttccccaacacactgcattgggatcaaactgaatttgcagccaggcatcagaggatcacttgaggccaggag

SEQ ID NO: 972166 - DNA, 120 bp, Artificial Sequence
  ENSG00000196810_20 (sequence is synthesized)
aaggggtcgtagctggaggggcctaggtgaggctgccgggaagggacgatgtggttggtggagtgcacaggcagggacctcactggactttcctgtctgctcagcatggacaggcagccc

SEQ ID NO: 972167 - DNA, 120 bp, Artificial Sequence
  ENSG00000196810_21 (sequence is synthesized)
aggagaaggcagcacgtggccgggtgcagggacgtaccacccccacttccccaggggagctggggtcagacgagtcccaggcactccatcctctgcagcaagtcaggttgtgatttacta

SEQ ID NO: 972168 - DNA, 120 bp, Artificial Sequence
  ENSG00000196810_22 (sequence is synthesized)
gggggtggtgaatataatggagagacttctggggaggaattcctggctcccgcgtggacttgcagagctcaacaggcagccacgtggctgagtgtccagcaaacatcacataaggctttg

SEQ ID NO: 972169 - DNA, 120 bp, Artificial Sequence
  ENSG00000196810_23 (sequence is synthesized)
cctgcgcacttttatgtgcagtgtagctggagcagagctccccggaattccacaggcaactgagaacggagagggatgcaggccagccagggatccagcgtcttccccatcgtcactctc

SEQ ID NO: 972170 - DNA, 120 bp, Artificial Sequence
  ENSG00000196810_24 (sequence is synthesized)
catggcctccgtctacacacagtgttcgtctgcacagcttgtcagcgcgttatcatgacttctatttggcaccggcccgtctgtccactgtcctggcttgttccaagcgctgccttctcc

SEQ ID NO: 972171 - DNA, 120 bp, Artificial Sequence
  ENSG00000196810_25 (sequence is synthesized)
aactggggtcctggctgcagagctgtctgctccccacgttgggcaactccagccaagattcctacacccaaatgtgaccgtgttgctcacgaagaaggctcagctttgcgtgtgcccagc

SEQ ID NO: 972172 - DNA, 120 bp, Artificial Sequence
  ENSG00000196810_26 (sequence is synthesized)
cgtgtgcacagctcgtcccaactcctgcgggtggcacctgcctctcccacctccagtctttcccctgtgatgagcagatgaccaccgccctccagggtcagcgtttggctgtttgtgtgc

SEQ ID NO: 972173 - DNA, 120 bp, Artificial Sequence
  ENSG00000196810_27 (sequence is synthesized)
acaatgctgggccctcagccagacctgccctgcgtgccacgttctgttctaagatcgggctgccgagctgtggcctggaggaaacctggcaggtgtcaccagagctttggggagggtgag

SEQ ID NO: 972174 - DNA, 120 bp, Artificial Sequence
  ENSG00000196810_28 (sequence is synthesized)
gccctgtcggggaagcccagtgggagtcatgaaggagggaacacgtgtggagcccttgtagggggaggggcagccctgcagagatctaagaaaaaattccagaaaaatgagcagcaacct

SEQ ID NO: 972175 - DNA, 120 bp, Artificial Sequence
  ENSG00000196810_29 (sequence is synthesized)
ctgggcctgccctgtgcctgcacacaggagtggctcatggcgtttgccctacacggatgggctgtcctgggagctactggacagtcaccttggtgggaatgccagaggcatgggcattag

SEQ ID NO: 972176 - DNA, 120 bp, Artificial Sequence
  ENSG00000196810_30 (sequence is synthesized)
gtccccccggccagcctccgttgccacatgggctatttttgtccatcgcgtgggacaacctagtattgggggaaaactcagtccactctaaagaagcatcggcgttttggatggacgaat

SEQ ID NO: 972177 - DNA, 120 bp, Artificial Sequence
  ENSG00000196810_31 (sequence is synthesized)
gctgcttcatgcgactccatgtcaatggactattttattcaactcgggtatttatgagtgtctcctctgtgccagccacgtgtgaaagaagaactccaagttactggacaccaggacaaa

SEQ ID NO: 972178 - DNA, 120 bp, Artificial Sequence
  ENSG00000196810_32 (sequence is synthesized)
ccaggtagatcactgcatccggttcctcctctttctgccgactctcccgggcaaccgttctgattcctggcatggagttgggggcgagctcatcagtacccagagcgcctggtgtgcagc

SEQ ID NO: 972179 - DNA, 120 bp, Artificial Sequence
  ENSG00000196810_33 (sequence is synthesized)
caaaggcccccattttattagtcggtgtgttcagtatcacgctcaagacaagggccaacctattacttcacacacctcaaatacaaaaagtgcctgggaacgtcgatgaggtattaaagg

SEQ ID NO: 972180 - DNA, 120 bp, Artificial Sequence
  ENSG00000196810_34 (sequence is synthesized)
atacaaaaagtgcctgggaacgtcgatgaggtattaaaggaaaccactggtcttgtcagtcatgtacacacagaaaaaaaaaccagtcatttttatttttattttttgagacagagtttc

SEQ ID NO: 972181 - DNA, 71 bp, Artificial Sequence
  ENSG00000196810_35 (sequence is synthesized)
actgcaatctctgccagcagacacccatcaccacgcccagctaattttatgtatttttagtagagatgggg

SEQ ID NO: 972182 - DNA, 79 bp, Artificial Sequence
  ENSG00000196810_36 (sequence is synthesized)
acctcaggtgatccacccacgtcagcagccgaaaacaaccaagaattttttaacaataaaatgaccagcaagtaaactt

SEQ ID NO: 972183 - DNA, 120 bp, Artificial Sequence
  ENSG00000196810_37 (sequence is synthesized)
caaccaagaattttttaacaataaaatgaccagcaagtaaacttgaaacaaaaatggacaaatatctaaaatatttttaaatgtatgtattttaattggcaaataatacttgtatatatt

SEQ ID NO: 972184 - DNA, 120 bp, Artificial Sequence
  ENSG00000196810_38 (sequence is synthesized)
acaacttgttttaaagtatgaatacattgtggaatggctaaatcaagttaattaacatgcattaactcacatactttttgttttttggtgtggtgaggacacttaacatctactctctta

SEQ ID NO: 972185 - DNA, 120 bp, Artificial Sequence
  ENSG00000196810_39 (sequence is synthesized)
gcaattttccagtcaccatgtcctactatagatccctagaacatattcctccaatgtaactgaaatgtatcccttgaccaacatcactgcccggccccagccccaggtaaacaccattct

SEQ ID NO: 972186 - DNA, 120 bp, Artificial Sequence
  ENSG00000196810_40 (sequence is synthesized)
accctctgcttctgtgagttcagcttttctagatttcacctgtgagtgagattgtgcagcatttgtctttctgtgcctgggttttttcacataatgcccttctggttcatctatattgtc

SEQ ID NO: 972187 - DNA, 120 bp, Artificial Sequence
  ENSG00000196810_41 (sequence is synthesized)
tgaatcaagcaaaaaagagaacattaattaaacatgtttaacatgggtaagaattacaggaataaaagaagtaaatgaacaagaatacgattgcaagggagtggtagaagaataggcagt

SEQ ID NO: 972188 - DNA, 120 bp, Artificial Sequence
  ENSG00000196810_42 (sequence is synthesized)
tttgaagaactaaatggaatatctagaatgaaaaaccatgcttgctaaaattaactcaatgagtgagtttaaaaagcaatttagacccagctgagagctgaatttgtggtatatgcagaa

SEQ ID NO: 972189 - DNA, 120 bp, Artificial Sequence
  ENSG00000196810_43 (sequence is synthesized)
attacttctgatgcgaggcagagcatgatgacagaatgaggagatcccaaacatctatgagagttccattctgaatgattagaagaatgaggaagcaacagtatttaaaaagataatcac

SEQ ID NO: 972190 - DNA, 120 bp, Artificial Sequence
  ENSG00000196810_44 (sequence is synthesized)
taagaaagttctatacttgatgaaaaatgtgaatcctaagattcaggaacagtgtgagacttcagctggggaaaaaagatgaaactacacttctacatttaggagtaaaactacagaata

SEQ ID NO: 972191 - DNA, 120 bp, Artificial Sequence
  ENSG00000196810_45 (sequence is synthesized)
caaaagacaaaaaaattttaaagtgaaaaataaaaccactcagattacatcaaaagcagttatcatgaaagcagcctatcaattacaatgataaaagccaagcaatagtcaaatatcgat

SEQ ID NO: 972192 - DNA, 120 bp, Artificial Sequence
  ENSG00000196810_46 (sequence is synthesized)
ttttttcaaagtcacaagataaaataagtagtaacataggattctgtacatagcattatttgttacctattggggcataacaaaattccccaaaactttgcagcttaaaaaacattcagt

SEQ ID NO: 972193 - DNA, 120 bp, Artificial Sequence
  ENSG00000196810_47 (sequence is synthesized)
atttcaccattgccatgagtcaggaatccaggcgtggcttgagtcctctgcatattggcttctcaccagactgcaatcaggacaatagcacagtatctgtggtctcatctgaaggcttgc

SEQ ID NO: 972194 - DNA, 120 bp, Artificial Sequence
  ENSG00000196810_48 (sequence is synthesized)
ctgaggaagtctgcatccaagcttactcttcgttggctgttgggcagaggcaccctcagctcccagccatgtaggctttcccatggtgcagcttctatcaacaaagcacgccagacaaga

SEQ ID NO: 972195 - DNA, 120 bp, Artificial Sequence
  ENSG00000196810_49 (sequence is synthesized)
ggacaacacacagtcttctaggaagaagaaagccacaatctttttttaaaaagcaaagcaatatttatgtaattgccacttggtttgagaagtagaacactgtgtcaaaaacccctccaa

SEQ ID NO: 972196 - DNA, 120 bp, Artificial Sequence
  ENSG00000196810_50 (sequence is synthesized)
agcccccgccagtaactgccctcctccttctccccagtgcaaccactgccctcacttctgtctttttttcaacttttaaaaattgtggtaaaatgcatataacttaaaattacaacctta

SEQ ID NO: 972197 - DNA, 120 bp, Artificial Sequence
  ENSG00000196810_51 (sequence is synthesized)
atcattttaagtgtacagtttggtggtggtaaatacactcgtgatgtgcaaccatcaccaccatgcatctgtatagaactctttccatcttgtaaaactgaaactctgtctccattaaac

SEQ ID NO: 972198 - DNA, 120 bp, Artificial Sequence
  ENSG00000196810_52 (sequence is synthesized)
gaaaccacggcatggagacggaatgatgcagactcctatccgcgagatacctgctgtaatttcgctgtggttcgtgaggacgcgtcctgggctgccctgagaagcctacgtctccccttc

SEQ ID NO: 972199 - DNA, 120 bp, Artificial Sequence
  ENSG00000196810_53 (sequence is synthesized)
ggaggccccgggcctggtgttccgcacgttctaaaccgcctgtccccgaggaagtcgggcagggtcgggccggactcagcgccgctggcgggagcgccgtccgccccgaggaccctgcgg

SEQ ID NO: 972200 - DNA, 120 bp, Artificial Sequence
  ENSG00000196810_54 (sequence is synthesized)
ggaagccgagacagggccgcccacgtcagcgcctggcgcgggcccgaacgtaaatggcgctcctccgcgccgcagccgcagccgccccgctcccttcccgctccgccagctgccgccctc

SEQ ID NO: 972201 - DNA, 120 bp, Artificial Sequence
  ENSG00000196810_55 (sequence is synthesized)
gcttctcgccccgcggcctggcccgtgcgcctccgaggctggccaggggcaccgaggccgcgggccccccatcgcccccacccgagccctgatttaccgtccgagagccggcggcacatg

SEQ ID NO: 972202 - DNA, 120 bp, Artificial Sequence
  ENSG00000196810_56 (sequence is synthesized)
gggaagttcagggctggagaaccccttccccgaccccatttctcttttaacaagagtagggtttgtagctaaccaacgtcctgacagctcagctctgctttccctttaagcattaatatc

SEQ ID NO: 972203 - DNA, 120 bp, Artificial Sequence
  ENSG00000196810_57 (sequence is synthesized)
aaagccctgcctgctaccggtgaagccccgacccgggagggcccgaaagtcccttcagggagaggccgcactgggcctgctcacccaggggctgcccctgcagactctcccgaggggccc

SEQ ID NO: 972204 - DNA, 66 bp, Artificial Sequence
  ENSG00000196810_58 (sequence is synthesized)
atctttagataagcactctttcaaccaaatgccaatcagaaaatctttgaatccacctgtgagctg

SEQ ID NO: 972205 - DNA, 120 bp, Artificial Sequence
  ENSG00000196810_59 (sequence is synthesized)
aaatgccaatcagaaaatctttgaatccacctgtgagctggaagccccgctgtgctttgtgttgtcctgccttttcggaccaatgtaaatctcacatgtactgattgatgcctacatctc

SEQ ID NO: 972206 - DNA, 120 bp, Artificial Sequence
  ENSG00000196810_60 (sequence is synthesized)
cttaaaacgtataaaatcaagctgtaacccaaccaccttgggcatgtgttctgaggacctcttgaggctgtgtcactggtcatgatccttaaccttggcaacataaacttctaaactgat

SEQ ID NO: 972207 - DNA, 120 bp, Artificial Sequence
  ENSG00000233981_0 (sequence is synthesized)
agggctgtagtgactccagggaacgtgtgaacagtggttatcagcggatcacagaatgcaggaaaatatccatttctatctttaaactgatctgaaaatttaggaccagagtggaagtca

SEQ ID NO: 972208 - DNA, 120 bp, Artificial Sequence
  ENSG00000233981_1 (sequence is synthesized)
aaaggcgcctcctggacctgccgcactttgataccctcctttgcacaccccatttcatttgtcctgctatcaacttgacatcagcatttccacacccaaatatcccttatatgctcttct

SEQ ID NO: 972209 - DNA, 120 bp, Artificial Sequence
  ENSG00000233981_2 (sequence is synthesized)
gacagtgaggatgtttgctccctactgaaacagagtttagaactcacaccttgttaacaggttgtcaaaattcgttttgctagtctattgtttttcttctaatacaaaaagatttgctga

SEQ ID NO: 972210 - DNA, 120 bp, Artificial Sequence
  ENSG00000253779_0 (sequence is synthesized)
ggaccgggatcctgactgctctgactcagtctccgtctacctcatggacacctggcagtcggtcatcatcggttttgctgaatcagcagcaacattgggggtaacaattgtgtctcctgg

SEQ ID NO: 972211 - DNA, 120 bp, Artificial Sequence
  ENSG00000253779_1 (sequence is synthesized)
agacagagtagagacccacacagctgaagtgtggggtcaaatattaaaactaagagacataagattgattctcaggctccaagtctgacaagtgagcttctttgagactccctgggatcc

SEQ ID NO: 972212 - DNA, 120 bp, Artificial Sequence
  ENSG00000233987_0 (sequence is synthesized)
gagtcctgttcagcgtgggaggaaataacacaagaggcaaagatcactcgggaccaccttgtatattggctaccacagaacccaacacaagcagtaagttaaaatcatgaagctcctgac

SEQ ID NO: 972213 - DNA, 120 bp, Artificial Sequence
  ENSG00000233987_1 (sequence is synthesized)
gtcagaggacatggctctgccatttgttagcactgcaatgaatgctgctgcacacgctgttgagctcgtggacactttcctgctgggtgaggacccgaacgtgaaattgctgggtcatgg

SEQ ID NO: 972214 - DNA, 120 bp, Artificial Sequence; identical to SEQ ID NO: 870016
  ENSG00000233987_2 (sequence is synthesized)

SEQ ID NO: 972215 - DNA, 120 bp, Artificial Sequence; identical to SEQ ID NO: 870017
  ENSG00000233987_3 (sequence is synthesized)

SEQ ID NO: 972216 - DNA, 120 bp, Artificial Sequence; identical to SEQ ID NO: 870018
  ENSG00000233987_4 (sequence is synthesized)

SEQ ID NO: 972217 - DNA, 120 bp, Artificial Sequence
  ENSG00000233987_5 (sequence is synthesized)
ttaggtagggatcctgttaaaggctcagcttcctcatctggaaatggaaatataggccttgcctggtttgctgtaatgggtcgtgatgaggaccaaactacaaagagtggtacagatgtt

SEQ ID NO: 972218 - DNA, 120 bp, Artificial Sequence
  ENSG00000233987_6 (sequence is synthesized)
aattacaatgatttttcctatgccacccatggaaacaaaaatagcaagatagagaaggctaaatcccagttttttttgactgctattcagcaaagcctaggagactttcatgacacctgg

SEQ ID NO: 972219 - DNA, 120 bp, Artificial Sequence
  ENSG00000233987_7 (sequence is synthesized)
agaggcggccgtagtgtatgtgtaagagtaccggttccagagtggggctccccgagctcagccccaccacttaccaacagcggaccttgggccagatgctgaagccctttgtgccttggt

SEQ ID NO: 972220 - DNA, 120 bp, Artificial Sequence
  ENSG00000233987_8 (sequence is synthesized)
ttcctgacctattactgtggaaatgatgacagtaccctcctcatggcatcgtgagaattaaattagctaattcaggtgaagcatttagaagaggacctcctgacacttaataactgcttg

SEQ ID NO: 972221 - DNA, 120 bp, Artificial Sequence
  ENSG00000233987_9 (sequence is synthesized)
atataaataatagcttctgctacagagtggccatgaagtctggacatgtagatattatattatcatgcatcataagttcagttctatgtcaacattccaagaaaatccagactgagcctc

SEQ ID NO: 972222 - DNA, 120 bp, Artificial Sequence
  ENSG00000233987_10 (sequence is synthesized)
tcctggaggcaggggacctgctctggaatctcagctcatgcagcaagtacccggatgactttaggcaaatcatgtcacctcgctagatctccctctcttcctctggtacatggggcatcc

SEQ ID NO: 972223 - DNA, 120 bp, Artificial Sequence
  ENSG00000233987_11 (sequence is synthesized)
ggttatacaagtgagtcctgttcagcgtgggaggaaataacacaagaggcaaagatcactcgggaccaccttgtatattggctaccacagaacccaacacaagcaatggagtctcgctct

SEQ ID NO: 972224 - DNA, 120 bp, Artificial Sequence
  ENSG00000233987_12 (sequence is synthesized)
aaagcaatgtaaaagacgtagaaccaaactactgagggtggcacattcagtcctgggagagggacagagaaaacaggtggggcattcacggtggtccctggagcttcagccactccagag

SEQ ID NO: 972225 - DNA, 120 bp, Artificial Sequence
  ENSG00000233987_13 (sequence is synthesized)
ggttctggaaggctccattgcccactctcctctttccacacccccacctccacaacctgtactcctctctgccaggagccttgtcctaggcttcagggtgggagaagtctccggtcctgc

SEQ ID NO: 972226 - DNA, 120 bp, Artificial Sequence
  ENSG00000233987_14 (sequence is synthesized)
ccaggacactgaagaatgggagacccgccatacagtcctgtcctcaaggagcctgtggctcagggagaggagagaaggtcagagctgcgcagagctggcggtgcttccccatgggatgca

SEQ ID NO: 972227 - DNA, 120 bp, Artificial Sequence
  ENSG00000233987_15 (sequence is synthesized)
atgctggtagctttaaaccagctacggtagaagtattaacaccacagaagtcaagagaggccttttctctgcagagagctgattgttaaacattgaccagcacacgtctgctgacacacc

SEQ ID NO: 972228 - DNA, 120 bp, Artificial Sequence
  ENSG00000233987_16 (sequence is synthesized)
ctagctcccctaatggtacacagccaatggtcacaggcctcatttcacagaaggaagcacagatgggctgtgacattccaaggaaacagcttaaatgacgggaagaaatggaaatgggaa

SEQ ID NO: 972229 - DNA, 120 bp, Artificial Sequence
  ENSG00000233987_17 (sequence is synthesized)
tagttaatttcccaacccagacctctaggtcagcccagggaccccagggactggggaagttttaaaaaatgcctcttcttgttcctcaaagcctaacatggtttaattttgcaaatacac

SEQ ID NO: 972230 - DNA, 120 bp, Artificial Sequence
  ENSG00000233987_18 (sequence is synthesized)
ctagggcctgggtctgaagagtaacacaagcaatagctctgcctaaaacctatcttggattttgtacaagaaagttgtgaagaagtaagagtgactggtgttaaatgatcatctcatagg

SEQ ID NO: 972231 - DNA, 120 bp, Artificial Sequence
  ENSG00000233987_19 (sequence is synthesized)
aattactacagaatttgaccatcagcctgggctcctttttgtgcttcctgggaccatctaaattagtagttacaacgttaagttacaatgctaaattggaaaaataaaaggagttttcag

SEQ ID NO: 972232 - DNA, 120 bp, Artificial Sequence
  ENSG00000233987_20 (sequence is synthesized)
ggttatacaagtgagtcctgttcagcgtgggaggaaataacacaagaggcaaagatcactcgggaccaccttgtatattggctaccacagaacccaacacaagcattcagttctatgtca

SEQ ID NO: 972233 - DNA, 120 bp, Artificial Sequence
  ENSG00000233985_0 (sequence is synthesized)
aaagtgaaatcttaaatgcaaagaaatatacagagttcagaggctccatggctacactttgggcatgtatgtcattacaggaatgaaaaaaagatgatggccaaatgctgtattaaaatc

SEQ ID NO: 972234 - DNA, 120 bp, Artificial Sequence
  ENSG00000233985_1 (sequence is synthesized)
ccattagaaatgccgggagaaatttatggccccaatctcttttatctgacagcagttcccatgtgatccatcaggctctgaacatgaattttaatgggctcagaaccacttctctaccct

SEQ ID NO: 972235 - DNA, 120 bp, Artificial Sequence
  ENSG00000233985_2 (sequence is synthesized)
gaggtcacaggctgtcagagtgaatcttccacaaactgattggaacctgaagaatttgctctgtcaagagagagtgtttcaattgaatattgcaactgaagacattcactctgcgttgat

SEQ ID NO: 972236 - DNA, 120 bp, Artificial Sequence
  ENSG00000233985_3 (sequence is synthesized)
gactgcttcagcactgtcttgtagatatagtccattcaaataaaagacaaatatctgactgaattttgttagcacgttaagacatgtattataaaaaggtttaagaagaaaataatggcc

SEQ ID NO: 972237 - DNA, 120 bp, Artificial Sequence
  ENSG00000233985_4 (sequence is synthesized)
acaattcttcagaaaacatgtgaactaatgtgacaaaacactgtggtgttgcaaactcaagtgctgctctggccaagtcacctcgctgaaatctccacttccacttgtgcaacctaccaa

SEQ ID NO: 972238 - DNA, 120 bp, Artificial Sequence
  ENSG00000233985_5 (sequence is synthesized)
gccactctctacacagctgccagagtgattacaaaaacaacgcgggattatgctacccctgcttatctaaaatttgtcaaaatgcccgttacactttgaataaaatacagattcctctca

SEQ ID NO: 972239 - DNA, 120 bp, Artificial Sequence
  ENSG00000233985_6 (sequence is synthesized)
atggttagagtctcagtctctattacgggccctagtacacttcaggaactcaaaagctttgctgatataatgcaaggtgataaaaaagtagaaagacttgggataatcttgatttctgaa

SEQ ID NO: 972240 - DNA, 120 bp, Artificial Sequence
  ENSG00000233985_7 (sequence is synthesized)
ggcatcaaacgggaattagagaaagcagcaggaaaaacgaaggcctttttaagttccatgagaactacggtttgcaagactggtcaaaacagtacaatgcaagcggcaagaatcaggaag

SEQ ID NO: 972241 - DNA, 120 bp, Artificial Sequence
  ENSG00000233985_8 (sequence is synthesized)
ggaacctgaagaatttgctctgtcaagagagcgagagcttccaattaaaaggaagaaggaagaacaggacatattttctgtaagaacaaaaaatgccacatggtgcttaccctacctggc

SEQ ID NO: 972242 - DNA, 120 bp, Artificial Sequence
  ENSG00000233985_9 (sequence is synthesized)
ttcactctgcgttgatcacctatggagtgatcaaatttcaaccctttgaagtttcctaaattgctgctctggccaagtcacctcgctgaaatctccacttccacttgtgcaacctaccaa

SEQ ID NO: 972243 - DNA, 120 bp, Artificial Sequence
  ENSG00000233985_10 (sequence is synthesized)
aatacatgtaccctgtgaacattgctcttctgagaaggagaaaggaagagacagggctaagcatctccaattcttctcaagagcaccaatcaactgagttactacttcctgccctctcta

SEQ ID NO: 972244 - DNA, 120 bp, Artificial Sequence
  ENSG00000233985_11 (sequence is synthesized)
ccgccacccttccaggagtgagccaaaagatggagagaggccacaagtgttgcattaatgcataccctttacgtaagaggaaacaccaggagcaggaaatatgcatttcccccaaatggg

SEQ ID NO: 972245 - DNA, 120 bp, Artificial Sequence
  ENSG00000233985_12 (sequence is synthesized)
ggaattctcacgggatgagatatgggtcacagataaatatatattgcgtcaaatggaacctcttcaaatgaaccatccttgatttagctgactttggtggaagtagcaaaaaggttcaga

SEQ ID NO: 972246 - DNA, 120 bp, Artificial Sequence
  ENSG00000233985_13 (sequence is synthesized)
gccaagttaagatatacaaatgaatatttccttgtttataaaataaatttatcattattttactcacattcagttggcccaccaaactaataaaagacaaaaatgaataatatctgagat

SEQ ID NO: 972247 - DNA, 120 bp, Artificial Sequence
  ENSG00000233985_14 (sequence is synthesized)
gaaggactcacagctgaattctattagatgtgcaaagaagagctggtaccattcctacagaaactattctaaaaaattgagcagaaaggactccttcccaactcattctatgaggctagc

SEQ ID NO: 972248 - DNA, 120 bp, Artificial Sequence
  ENSG00000233985_15 (sequence is synthesized)
atcatcttaatggtaaactttcaatgactctccaccaccaagaggatgaatttctatctccttagaatggcatataaagccatttgtgatttggccctggcttccctctccactccagca

SEQ ID NO: 972249 - DNA, 120 bp, Artificial Sequence
  ENSG00000233985_16 (sequence is synthesized)
gctgtacttaagtacttgtaggtcccttagggagccataatttgtggcatttttacatgttacttccttggcatatatattttattttatttttgtcaggcccacaccacttagatgttg

SEQ ID NO: 972250 - DNA, 120 bp, Artificial Sequence
  ENSG00000233985_17 (sequence is synthesized)
ctgactctagtaaagcttcccttactccccaggtgctgggctaagtacccctattctgggaacccttctgcttaccatatcacagcacttccgtgacttcataatcgtctgtttacttgc

SEQ ID NO: 972251 - DNA, 120 bp, Artificial Sequence
  ENSG00000233985_18 (sequence is synthesized)
aaattaaatactggttagcaatctttaataaccaggagatgcttaacatttatttagaaatctgcaacattttataaatcattgttttggcttctgggacaaactcagaatctggaaccc

SEQ ID NO: 972252 - DNA, 120 bp, Artificial Sequence
  ENSG00000233985_19 (sequence is synthesized)
acggaaacccttcagttacacaaaggctttccagttcattgctactgcactgaagaacagtcttcacaactatacctggaacttactaggccaagaaggcaaggcgttgagtgtttcaat

SEQ ID NO: 972253 - DNA, 120 bp, Artificial Sequence
  ENSG00000233985_20 (sequence is synthesized)
aaaacagtacaatgcaagcggcaagaatcaggaagtgcacagaaacaagaagctcggtgcacactgggatcaggcaagcatctgggagaagactgtagcaagactggatcctgagaaatc

SEQ ID NO: 972254 - DNA, 120 bp, Artificial Sequence
  ENSG00000232058_0 (sequence is synthesized)
agtgttccacctactccctttccatctccttgctgggctaagaaaaggattctgatgaagaaatcaaagttcaggaatggtaaatgttctgatcaaggttgttctgctggagtggtggtt

SEQ ID NO: 972255 - DNA, 120 bp, Artificial Sequence
  ENSG00000232058_1 (sequence is synthesized)
gatctcaagcttcccgcaagcctgttgactacagcattgatcagttcgcctaagtttcctgactgtaaatatcatggctgattctaatatcatgcacaaagcctgtcattcagagagatg

SEQ ID NO: 972256 - DNA, 120 bp, Artificial Sequence
  ENSG00000232058_2 (sequence is synthesized)
gtgctacaaattgttttacagttttagttgtgttcaaatcaaccaagtataaatcagaatgtcatcaaggctatgagctccacctttctaaatctgggtattccacttccgagaagggtt

SEQ ID NO: 972257 - DNA, 120 bp, Artificial Sequence
  ENSG00000232058_3 (sequence is synthesized)
ttgtgcctgagaggttgatatctgcaactgtctcaaggctctaacttttcataaacactattgcaaactagtttaggttgtacaagagaagactttcttttaaaaatcaaaagtataggt

SEQ ID NO: 972258 - DNA, 120 bp, Artificial Sequence
  ENSG00000232058_4 (sequence is synthesized)
aagatgggagaaaaaagcagaaataaagtctagcctcccagatgacctcaatattggaaatgacccatgcaagcactttcactgagaagtgaataaaactaggataaattgctgccagat

SEQ ID NO: 972259 - DNA, 120 bp, Artificial Sequence
  ENSG00000232058_5 (sequence is synthesized)
ttagtgtacaacaggtctgattttgttgcttcacaactttttttctcatcaaacagtagagtggacttcgacatggagaagatcctgtcaaaacttcactcacactccctaattcagagg

SEQ ID NO: 972260 - DNA, 120 bp, Artificial Sequence
  ENSG00000232058_6 (sequence is synthesized)
ggtgagggcaggtagtggggcaaagagccatgatacacaaagtgcaggccactgccccccacttcaacctgacctaatccatcatgggagttcacattgcctcagccaaaataaatagag

SEQ ID NO: 972261 - DNA, 120 bp, Artificial Sequence
  ENSG00000232058_7 (sequence is synthesized)
agacgcccttctgcacaacggagacttgtctagctgtgactgcctactcgtcacctctcaacatccactcaaacccccaagctactgaatgcctaatataaatgcatagcaaaatgtaaa

SEQ ID NO: 972262 - DNA, 120 bp, Artificial Sequence
  ENSG00000232056_0 (sequence is synthesized)
tggactcaagggccactaaggtcaactgtgaaagggctgtagctccctatgccaccacctcgatgccagtcccactccaaccagtaagaaccagagcatctaccccacactgggcatgga

SEQ ID NO: 972263 - DNA, 120 bp, Artificial Sequence
  ENSG00000232056_1 (sequence is synthesized)
tatgaacctcacttgatgttattcctgtcttcatcagcacgactttattttcccaggagtcaccatcaagcccaggcagatggcttgatagttcttataggaacttctggaaagactcat

SEQ ID NO: 972264 - DNA, 120 bp, Artificial Sequence
  ENSG00000232056_2 (sequence is synthesized)
ctactctctgatggaaaacatcaacaggtgctggtgatgctggtggcagctgttgacaccaggcaccacttctgatagctgtcggctgtccagatttcaaaaatctcattgttcttgtca

SEQ ID NO: 972265 - DNA, 120 bp, Artificial Sequence
  ENSG00000232057_0 (sequence is synthesized)
agaacatgtctgacgtcagcgccagcctggacggagagctcggatcccagagaaggctgagcacagggaggagaggggcatgggcctctgcatttgagctgctctcgtcctgaagtttgt

SEQ ID NO: 972266 - DNA, 120 bp, Artificial Sequence
  ENSG00000232057_1 (sequence is synthesized)
gccctgggccctgtgagaactcaggggccagcctgtgacaccccggccaggccatgcgagggtggcgccgggacgccgccctctgcggctcctttggggagcactgaccagcactcaggg

SEQ ID NO: 972267 - DNA, 120 bp, Artificial Sequence
  ENSG00000232057_2 (sequence is synthesized)
atggatccgtgcagcgagttgtcgagaggagagagtggaggaggactccgcagtatcccggctgatgcatattgagtcatccagaggagagagagggggaggactccgcagtatcccggc

SEQ ID NO: 972268 - DNA, 120 bp, Artificial Sequence
  ENSG00000232057_3 (sequence is synthesized)
tgatgcataatttgttcttcttatgcattttaccaccattttggctagcatttggtgcttcaaggaacagctgttagaagcgaaaatcagagaaaaaggcatttgcgtttcaaaggcttc

SEQ ID NO: 972269 - DNA, 120 bp, Artificial Sequence
  ENSG00000232057_4 (sequence is synthesized)
gctttgtggatgacacatcccagagataggaggaactcctggcagcagccatagatttggaaggatgcatccccatcaggtagcggtggaggaatctccagggaggagacagagaaggga

SEQ ID NO: 972270 - DNA, 120 bp, Artificial Sequence
  ENSG00000232057_5 (sequence is synthesized)
gaggacaggagggagaggagtaaggggtttggatgcctgtgggtcctcagagagtggcctgagagccagactttctccctttcccctgagagcaacatggagctggggaaagagacctca

SEQ ID NO: 972271 - DNA, 120 bp, Artificial Sequence
  ENSG00000232057_6 (sequence is synthesized)
gacacgccactcccctgccttcctgatggcgacagacacagagaggcctcagggctgggagccgggaaggtggaggagctgcccatgaggctggtgctttggcagggaaaggggcccccc

SEQ ID NO: 972272 - DNA, 120 bp, Artificial Sequence
  ENSG00000232057_7 (sequence is synthesized)
aggagctgccacctgccccaaaggtgcacctgggatgaagatgggggggaggcaccacagcgacctagttatggcgagcaagctctcaccatacagtagaggaggagacagaaattagtt

SEQ ID NO: 972273 - DNA, 120 bp, Artificial Sequence
  ENSG00000232057_8 (sequence is synthesized)
cagttacagaaaacagatacattggtagaatttacatgttataacataattccattaaaaagttggcatactcctgaaaacctacttactcttcccttaagaatcaagtaatattatgtt

SEQ ID NO: 972274 - DNA, 120 bp, Artificial Sequence
  ENSG00000232057_9 (sequence is synthesized)
tattagaaattatttggagaaatcaaaagattggaattacagtcttagcttcacactaattatgagaacgtcaaagttttttgtttgtttaattgagattaattcacatatgggaacccg

SEQ ID NO: 972275 - DNA, 120 bp, Artificial Sequence
  ENSG00000232057_10 (sequence is synthesized)
cttttaaaagatcaggttccccatctctttattggatataagaatgatcctatttgtttgtactgttaattttttgtttgtatattggttttccctataaaattataacaggctaagttt

SEQ ID NO: 972276 - DNA, 120 bp, Artificial Sequence
  ENSG00000232057_11 (sequence is synthesized)
cttgggacagagactgtcttgaaatttttatttctctgaagatcctagcgcagtggctggatagtccccttccagtgggcagaatgctaaggtggccccaaagtctccccgtgtgcacct

SEQ ID NO: 972277 - DNA, 120 bp, Artificial Sequence
  ENSG00000232057_12 (sequence is synthesized)
gccgtgcgtgggcctctgtccttgagtgtggatggtcctgtgaacacagtatagtcattgcccccatgatggggtgacatcctatgagaccccagcccagctgccaagcagtgaggccac

SEQ ID NO: 972278 - DNA, 120 bp, Artificial Sequence
  ENSG00000232057_13 (sequence is synthesized)
cggctgtgtggccaggacctgggggcctcatccgcggaggacgactctgcccaacgtccagcaggacagtcgggcctgacagctgcaagctcaggagctgagttctgccaggaacccgca

SEQ ID NO: 972279 - DNA, 120 bp, Artificial Sequence
  ENSG00000232057_14 (sequence is synthesized)
cactttagcaatccccacccctgctggtgccccagacccctccccatcctgcagggctctggatgggtcaacctgcctggcctccaggactagagatcacggcctggacacagcgcagca

SEQ ID NO: 972280 - DNA, 120 bp, Artificial Sequence
  ENSG00000232057_15 (sequence is synthesized)
acatttcctctcttttccctgaggtggtgacctggccagatgactgaagggctgatagtgaggggctgccagcccagaatgggggcatggggcttcgtaggagctggggcacggcagggt

SEQ ID NO: 972281 - DNA, 120 bp, Artificial Sequence
  ENSG00000232057_16 (sequence is synthesized)
tcagccctggatggaaatgctctctgtctccctcccttgtgctgcatttactcctgggctggggccaccctcccttccacctcctgcagatcacagagggacccagagctcaggagaact

SEQ ID NO: 972282 - DNA, 120 bp, Artificial Sequence
  ENSG00000232057_17 (sequence is synthesized)
ttcttcctgtgttataaaacaaggtatgccattgaaacatgcctgggtcaaacagaaagctcccaccgggcctggaggagcccctggcaatgtggtcctcattcccgccaccctctgcct

SEQ ID NO: 972283 - DNA, 120 bp, Artificial Sequence
  ENSG00000232057_18 (sequence is synthesized)
agaaggggatctcagagagttgaggggacctctctggttgggaaaaggggagcatccagggagcgccaggagagtcctggaggaacattctgaggtgacacggccccagggctctgtcta

SEQ ID NO: 972284 - DNA, 120 bp, Artificial Sequence
  ENSG00000232057_19 (sequence is synthesized)
cggcagggatcagcattgctgacacacaaaatatttattccctgatgatgtggaatttggaatcatcatcagagacttcagtgcagagcaactggaacctcctgagtgtgccctgtctat

SEQ ID NO: 972285 - DNA, 120 bp, Artificial Sequence
  ENSG00000232057_20 (sequence is synthesized)
atatctggtctctggacagggtggccagtccttgtccatgacagggagagcgaggacccctcccctccacacaattggcagacgaggaactaccctcctggggatccagaggcagggcgc

SEQ ID NO: 972286 - DNA, 120 bp, Artificial Sequence
  ENSG00000232057_21 (sequence is synthesized)
ccccctagagaggacagctggggagggtcccctcactgtacttcccccacacctccagacaccagctagtgatctgtcctgagatcaaaaccagaatcctagtagatgagctgcatgctt

SEQ ID NO: 972287 - DNA, 120 bp, Artificial Sequence
  ENSG00000232057_22 (sequence is synthesized)
gctgtggacgccctgcgccctgagagtcttgtcctggatcgcacgggtgtgtccacaaatgagacccagcagccctggagcagccccagcgtctctccctactggcaatgcatccgggag

SEQ ID NO: 972288 - DNA, 120 bp, Artificial Sequence
  ENSG00000232057_23 (sequence is synthesized)
cgtggcttgccctccgagtcagttccctcatctctaaaacaggaccacacagatctcagggcgcgttggttgaatgtttacctgtgttgtgtaaaaactatggctactcagcaccacaga

SEQ ID NO: 972289 - DNA, 120 bp, Artificial Sequence
  ENSG00000232057_24 (sequence is synthesized)
gaggcaagagagcatgcaggcgtcctgtttgggatcatgggagaccatattcccagcttcctggtactaggtgacactggggggcctgttttacttatggaattcccagcttccctaatg

SEQ ID NO: 972290 - DNA, 120 bp, Artificial Sequence
  ENSG00000232057_25 (sequence is synthesized)
gtaggtgacatcttggggcaggatttacttatggaattcccagcttcccagtgttaggtgacactgtggggtggtttttacagatggaatgagaaagaggtaaggtgtgctcctccagat

SEQ ID NO: 972291 - DNA, 120 bp, Artificial Sequence
  ENSG00000232057_26 (sequence is synthesized)
ccagaccctaaacacctccctcttgggatcctccacgttctcttcctctctctgttatggaataaaaacaaccgtatgaaagtgtgtcgaaggtgccagagcccttctccctgttgcctg

SEQ ID NO: 972292 - DNA, 120 bp, Artificial Sequence
  ENSG00000232057_27 (sequence is synthesized)
tccagcactgtgatgtgtgtagacctcagctctgctcaaatagtttgaagtgtgtttgtcatggccgtcagcctattctcgctaatcttccattaaatgagatgactgatttaaaaaata

SEQ ID NO: 972293 - DNA, 120 bp, Artificial Sequence
  ENSG00000232053_0 (sequence is synthesized)
ctcattctgtcttgccgccacaatgtaagaattgtctctcaccctctgccatgtaagaattctctttcaccctctgccgtgatcgtgagaccttccccagccatgtgaaacttatcttac

SEQ ID NO: 972294 - DNA, 120 bp, Artificial Sequence
  ENSG00000232053_1 (sequence is synthesized)
agagcaagactgcagatcaagattttccaacgtggtgctgacttttttgagaacagttaatgagaactaggaaagtccttgcagaccatccagtccagcggctttcaaatggaaaatgtg

SEQ ID NO: 972295 - DNA, 120 bp, Artificial Sequence
  ENSG00000232053_2 (sequence is synthesized)
aaaggacaacagaatcacatggattcttttctgaactgcttttttccagtgatgccatattctataagacttcatgtgaaggtgtggaggacgggatgtactcacatcccaacaaattga

SEQ ID NO: 972296 - DNA, 120 bp, Artificial Sequence
  ENSG00000232053_3 (sequence is synthesized)
aaatgctgaccaatcccagcacagccaactcgaatttgctccttcatcaaagtgaccagcacctcatttcttcctctttagaatttatagttcaggaactttgcagatctcttattaact

SEQ ID NO: 972297 - DNA, 120 bp, Artificial Sequence
  ENSG00000232053_4 (sequence is synthesized)
aatgagagtcctatggctattgatatctaacatcctggcttcactcacatggatgagccccacctggaatgcctagaagacgtgggacagctggatctctctccacacggtttttcattg

SEQ ID NO: 972298 - DNA, 120 bp, Artificial Sequence
  ENSG00000232053_5 (sequence is synthesized)
ttgcctcaggttccaataaaagcaaaagctgcaaggtcttctgaggcaaagacttagaaataccacaatgttacttctgctgcattctgttgataaaagaatcccacaatgccagcttca

SEQ ID NO: 972299 - DNA, 120 bp, Artificial Sequence
  ENSG00000232053_6 (sequence is synthesized)
tttaaaggggtaaagatatagattattcaccttcgatgggaggaactgcaaatgatgtaattagtgataatttttaatatactgtaatgtattgacttatctttaaaaaatgaaaaaata

SEQ ID NO: 972300 - DNA, 120 bp, Artificial Sequence
  ENSG00000232053_7 (sequence is synthesized)
aaccaaaaactaaaagcaaaacaaaactataatagaaaacaattgcttctggaggaggaatgcaatggggaaaaggttatagaaacaaaagctacattttatttgaatatacctgtttta

SEQ ID NO: 972301 - DNA, 120 bp, Artificial Sequence
  ENSG00000232053_8 (sequence is synthesized)
ggtttgaccctggtaacatttgatattttacataattatatcattatttaaaattaaattttaaaacaccaatacccataacagaaaagtttgataaaagaggtgaaatataaatataaa

SEQ ID NO: 972302 - DNA, 120 bp, Artificial Sequence
  ENSG00000232053_9 (sequence is synthesized)
gcagatcactgaagcatcactcctgaatgttcctctgtaccctcaatgtgcatttgcactaccagtgatctcaagaattctagaaaatgaaaactggattaccatcaccaacgtctagga

SEQ ID NO: 972303 - DNA, 120 bp, Artificial Sequence
  ENSG00000232053_10 (sequence is synthesized)
agagggatggtgtgagtctggaaattctttgtgatggtctgagactccccttactccagttaagaacactgacttaattcgatctggttttttttaacaaatggcctctgagacgtagag

SEQ ID NO: 972304 - DNA, 120 bp, Artificial Sequence
  ENSG00000232053_11 (sequence is synthesized)
cagtgaggataaggactcttacccggttacagagtggagtaagggctagaactcaactcttaaaaatttcaaatgcaatgttctttctacaatattgtgcctacttcttcacttctgctt

SEQ ID NO: 972305 - DNA, 120 bp, Artificial Sequence
  ENSG00000232053_12 (sequence is synthesized)
ataggcaacttccttttcctttaattctctaatatttggagggcacgtcacaacttatacacttgctctatatgttttacattgcttctcatggtttctcatgcataagtatagtatttt

SEQ ID NO: 972306 - DNA, 120 bp, Artificial Sequence
  ENSG00000232053_13 (sequence is synthesized)
gatgattagtttattagtatctcaaaataatccatttgatgtgctaaggtgctattagttacaacatttcaagtatacatgcaattcttgttagaaatattatccaccttttgaaataca

SEQ ID NO: 972307 - DNA, 120 bp, Artificial Sequence
  ENSG00000232053_14 (sequence is synthesized)
tgttgattaaagactaacatgggctgtgggcataggtacagtaacagcataccataggccggagaaagagttgactttggaggtccaagatcaagaagcaggatgtctaacagggctctt

SEQ ID NO: 972308 - DNA, 120 bp, Artificial Sequence
  ENSG00000232053_15 (sequence is synthesized)
gagaattctagggcagccggtactcgaaaggcaagatttgattgtgaatgatttcatgcaactccgttggttaataagcaaatcctgcccacacttgtggataacatggaagctacctga

SEQ ID NO: 972309 - DNA, 120 bp, Artificial Sequence
  ENSG00000232053_16 (sequence is synthesized)
gcaggtaaaggctaagacagaagatccatgaacagaactggagttttgataattcaccaggaacttggttactttgttgtaccttttatgcttttatatttcttcttccctttcatttcc

SEQ ID NO: 972310 - DNA, 120 bp, Artificial Sequence
  ENSG00000232053_17 (sequence is synthesized)
atgcaatgtatttataacttgtagctagatttttagattactgccagacaaattcagtcaatttaattaattaggcaaattaaagtgaaaattatgttttaggggctgttaaaatttata

SEQ ID NO: 972311 - DNA, 120 bp, Artificial Sequence
  ENSG00000232053_18 (sequence is synthesized)
agacattagcacattcttctcatgtgcttttattattattacaaatgttgtttcataattagccatgtgttaattgttagcttggggaatgatttacgtgtttaaaattgggagaaatca

SEQ ID NO: 972312 - DNA, 120 bp, Artificial Sequence
  ENSG00000232053_19 (sequence is synthesized)
tgtctctcaccctctgccatgtaagaattctctttcaccctctgccgtgatcgtgagaccttccccagccatgtgaaactttttcagctttcctccactgttttgggaaacgtcaccttc

SEQ ID NO: 972313 - DNA, 120 bp, Artificial Sequence
  ENSG00000232053_20 (sequence is synthesized)
ttatcttggaagagtaatctcaaaattgaagcatcttagatccaacaagaattaaaaggatgggaagtccttgcagccatccaatagagtcagaagactttggattttggagtctgtgag

SEQ ID NO: 972314 - DNA, 120 bp, Artificial Sequence
  ENSG00000232053_21 (sequence is synthesized)
cagagttttctctttcttcaccattaagaacacagtgagaaggtggctgtctgcaagttagggagagagccctcagcaggatctgaatctgccagcaccttgatcttcggcttcctgaac

SEQ ID NO: 972315 - DNA, 120 bp, Artificial Sequence
  ENSG00000232053_22 (sequence is synthesized)
tagatcaaatatagacttcttcaacaaaataacagcagaaaatcatccagcatatccttaaacaactcccttgatgatggattgatcattcctaaagttaggatgtactcacatcccaac

SEQ ID NO: 972316 - DNA, 120 bp, Artificial Sequence
  ENSG00000232053_23 (sequence is synthesized)
atcacacagagatgaattgtgtcagttactcaaacacagatatttgactatacaacctttataagatatcctaaggacaaaaaaacatgcaaaaatatatattgaactgttttaaaatta

SEQ ID NO: 972317 - DNA, 120 bp, Artificial Sequence
  ENSG00000232053_24 (sequence is synthesized)
ctcattctgtcttgccgccacaatgtaagaattgtctctcaccctctgccatgtaagaattctctttcaccctctgccgtgatcgtgagaccttccccagccatgtgaaactggtctcac

SEQ ID NO: 972318 - DNA, 120 bp, Artificial Sequence
  ENSG00000232053_25 (sequence is synthesized)
ggctatggctacctcttttaatttacttacatatttttttcccatcacacagtgtttgacttttacaaccacatacattttgattagaacctgaaataattcagtaaaacaagatgatgg

SEQ ID NO: 972319 - DNA, 120 bp, Artificial Sequence
  ENSG00000232053_26 (sequence is synthesized)
tctgtcgcccaggctgcagtgcagtggtgtgatcatggctcaccgcagccttgacctcctaggctcaagcgatcctttcacctcagcttcctaagtagccaggactacagttttcagctt

SEQ ID NO: 972320 - DNA, 120 bp, Artificial Sequence
  ENSG00000278484_0 (sequence is synthesized)
ctgttaactcctcaccgtcagcctccgagaccatgatcattctccctcctgaaacaatgaaagcatggctttgagaagaggcgtaccacctgaggttctgtggccaggacatggcagact

SEQ ID NO: 972321 - DNA, 120 bp, Artificial Sequence
  ENSG00000278484_1 (sequence is synthesized)
gggactagagctggacattttgccccaaggtgatggatcccatcctgagccttatacacttgaggaattttctctaccttcctcacacagaagccacttgctcacttgtgttccatcttg

SEQ ID NO: 972322 - DNA, 120 bp, Artificial Sequence
  ENSG00000278484_2 (sequence is synthesized)
tgttatgggctgaagtgtgtccctgccccaaatttagatgttgaagtcctcactctcagcaccttagaacctaaccatgtttgaagaaaaaatcttctgagaggtaattaagctacaatg

SEQ ID NO: 972323 - DNA, 120 bp, Artificial Sequence
  ENSG00000278484_3 (sequence is synthesized)
aaggcttcagggtgggccttaatccaatgtgactggtgtgcttataagaagaggaaatttggacccatggaaagacaacagaagcatacacagacagagggacaccgcgtgaagacactg

SEQ ID NO: 972324 - DNA, 120 bp, Artificial Sequence
  ENSG00000278484_4 (sequence is synthesized)
tgaaaaggtggccatctgcaagccatggggagaagccttgagagaaactagccctgccaatgccttgattttggactgctagcctctataactgtgagaaaataaatctctgttgtttaa

SEQ ID NO: 972325 - DNA, 120 bp, Artificial Sequence
  ENSG00000277938_0 (sequence is synthesized)
agagcaagactgagactccatctcaaaaaatcaaggatgatgagagaaatgaggcagttccaggaaggagctctcaggagtgtgcaggtcgcagccatcagtggcagagtccccaggcaa

SEQ ID NO: 972326 - DNA, 120 bp, Artificial Sequence
  ENSG00000277938_1 (sequence is synthesized)
ggtctttgaggagccacacttggcgtgcagtctctgttagaggtgtttaatacgacctgtgtggaggccatgagatgtggggcatgtttgaaacaactggggctgttcatcctgcaacaa

SEQ ID NO: 972327 - DNA, 120 bp, Artificial Sequence
  ENSG00000277938_2 (sequence is synthesized)
ggagcttttggctggacagcaatataacaggtgtcttcactattactgaaggattgtcagacgctggcttttgccgggtggctccagaggcggtggaagttatggggacaccgctgtcag

SEQ ID NO: 972328 - DNA, 120 bp, Artificial Sequence
  ENSG00000277938_3 (sequence is synthesized)
gtttctcactcaagcattgctcactcgcgcgatgaacgatgtccagggctgaggcgggcttgtccttggcatgtgccccttcacctgcgggcatcggggtgcttgagaaaggagcctgcg

SEQ ID NO: 972329 - DNA, 120 bp, Artificial Sequence
  ENSG00000277938_4 (sequence is synthesized)
tgatcaggttcttccagtgtcttcacactcatcagattcttggattcggcttgaaaatgattttgaaaatcatggtcaggtaagcatacttacctctttcttccttaattgtaaatgaat

SEQ ID NO: 972330 - DNA, 120 bp, Artificial Sequence
  ENSG00000277938_5 (sequence is synthesized)
aacggtagtcgtgtttatggagtgcttgctgtgtgtcaggcatgatgcggactggactgtgcgttgtgtggtcagagattgaatcctcagcctcaaagtaggtaccgtgcatctccgccc

SEQ ID NO: 972331 - DNA, 120 bp, Artificial Sequence
  ENSG00000277938_6 (sequence is synthesized)
tgccgccgagagagaagcaggcctgcaggagcttggggacttacctggacccactcagatgcggttctgcaggcttcctacacccaaacagtgggctgccttacctcccaaagtggcaag

SEQ ID NO: 972332 - DNA, 120 bp, Artificial Sequence
  ENSG00000277938_7 (sequence is synthesized)
tgtttccagaggaatgtttactgatcacatcaggccgtgtgctcattatcaaaggcaggtctctccactgaagaatcagccatctccataacagtgtgcttgtaatgcttacaaaaatag

SEQ ID NO: 972333 - DNA, 120 bp, Artificial Sequence
  ENSG00000277938_8 (sequence is synthesized)
ttacacagttgagagaaataataattccctctaggcctcactgctgctttatcattttgacagcctctgattattttcctgttattgattcagtggataaaggtttccgtttaagagctt

SEQ ID NO: 972334 - DNA, 120 bp, Artificial Sequence
  ENSG00000277938_9 (sequence is synthesized)
aagtgcagccttgtgaatcttagtacctgccacatgatttacatagttcagaagcagacatccccctataaggcctcctgtttcaagaagcctctctagaggtcagaagagcccacagcc

SEQ ID NO: 972335 - DNA, 120 bp, Artificial Sequence
  ENSG00000277938_10 (sequence is synthesized)
ggtaggatggctctaaatacggcttccgagagggtcgagtgctcagctggcacagagctgtagttcctgcagacctaccagggaggacagccagggatcgcatggttttgtaaattaaaa

SEQ ID NO: 972336 - DNA, 120 bp, Artificial Sequence
  ENSG00000277938_11 (sequence is synthesized)
atcgcatggttttgtaaattaaaatgcccaagctcagaggcctgcaaggacttaccttaaagcaacaggcaggccaggtgcggtggctcacaactataatcccagcactttggaaggctg

SEQ ID NO: 972337 - DNA, 120 bp, Artificial Sequence
  ENSG00000277938_12 (sequence is synthesized)
aacctagggggcaaagcaagactctcaaaaaaacaaaaaaacagggagagttttcctgttgatagtcacctgggctgtttcctgtttggagctttatgaataaggcttctgtgaacattc

SEQ ID NO: 972338 - DNA, 120 bp, Artificial Sequence
  ENSG00000277938_13 (sequence is synthesized)
ttgtgcaagtctttttataggcataggtttttatttcatttggatgaatatctaaaggcagaatggctgggtcatatggcatgtgaatgtttaactttataagaacctactgggctcggc

SEQ ID NO: 972339 - DNA, 67 bp, Artificial Sequence
  ENSG00000277938_14 (sequence is synthesized)
cactgatcaatgtactttgtaatctccaccacccttaagaagattctttataatttcccccaccctt

SEQ ID NO: 972340 - DNA, 84 bp, Artificial Sequence
  ENSG00000277938_15 (sequence is synthesized)
tctgccccaccctcactgatcaatgtactttgtaatctccaccacccttaagaagattctttataattaacccttgagaatgta

SEQ ID NO: 972341 - DNA, 120 bp, Artificial Sequence
  ENSG00000277935_0 (sequence is synthesized)
ggattttttttaaccctgataatttgtggtaggtttctttattttttgaatataaagtgacagaaataatttgccattagaaaagagaaagaatctttgactatttacagcttttataca

SEQ ID NO: 972342 - DNA, 120 bp, Artificial Sequence
  ENSG00000277935_1 (sequence is synthesized)
tcacaaagtttttcttgtttttttatcgttgcctattcctgttgtctctacctcctctccttcccctctttcttgaatccaccccatcatgcttttgcccccaccagtccactgaaacag

SEQ ID NO: 972343 - DNA, 120 bp, Artificial Sequence
  ENSG00000277935_2 (sequence is synthesized)
gtacttgctttacccattaaccactcctcccattgctggtcccttctcatctcctggagctttgaacaatcctccaccctgggcctcagtctagagaatcctcttctgtcgctactcatt

SEQ ID NO: 972344 - DNA, 120 bp, Artificial Sequence
  ENSG00000277935_3 (sequence is synthesized)
ctctagttccagtatcatggcttcaaataccaaccaaacgcatacaaattttaaatatgtatcttcaggctatacattttccctgaactccaggtccatatatctaattgcctaatcatc

SEQ ID NO: 972345 - DNA, 120 bp, Artificial Sequence
  ENSG00000288110_0 (sequence is synthesized)
gagctgatgagattcatgtgccatctcagaaagaaaacataaaagcctggacattctatggaaggcaagccaagagaacgtggaatctccgtttgcggaactttcgtagaaatgctcagg

SEQ ID NO: 972346 - DNA, 120 bp, Artificial Sequence
  ENSG00000288110_1 (sequence is synthesized)
catcctgttggcgtttgaatgcatggtgccttcaagaagctcacggacacagacctgcaactgcccgtggggtttcctaaagacacaacaggagcgacgtctgcgtgtaaaatgacaagt

SEQ ID NO: 972347 - DNA, 120 bp, Artificial Sequence
  ENSG00000288110_2 (sequence is synthesized)
acagtaaacgtcccgcagccccaggcttcattgtcatctgctggaagtgtcctccatggatttaaaccaagataaagaaacaaaaccaacaggaagatgccatcaaaggaaagcaagaca

SEQ ID NO: 972348 - DNA, 120 bp, Artificial Sequence
  ENSG00000288110_3 (sequence is synthesized)
gaaaattgaggagcctcagaaagacttcacaaacaaggcatcatttaaacaactattttaggcaatagaacgtagagcaaagggaagactttgaagaagtcgaggtggatatttcaagaa

SEQ ID NO: 972349 - DNA, 120 bp, Artificial Sequence
  ENSG00000288110_4 (sequence is synthesized)
tacttttctcatgtcaacataaactctcttaaatgtttcacgtgttctcctcatctgcagtttcactttctgtggtttcagttacctaaggtcaactgtggtccactgaggtctgaaaac

SEQ ID NO: 972350 - DNA, 120 bp, Artificial Sequence
  ENSG00000288110_5 (sequence is synthesized)
attaaatgaaaaatttcagaaataaataatgtataagttttaaattgctagctgttctgactagcgccatcccactccatcccagccaggacatgaatcattcctttgtccagtggattc

SEQ ID NO: 972351 - DNA, 120 bp, Artificial Sequence
  ENSG00000288110_6 (sequence is synthesized)
acactatctacattagtcacttagtagccatatggcttttcagactcatggttgcagtagtgcagcatttgtgttcaagttgtcgttatttgactttataacatgcaagcgtagtgggcc

SEQ ID NO: 972352 - DNA, 120 bp, Artificial Sequence
  ENSG00000288110_7 (sequence is synthesized)
ttatttataaatgaacctttatcagaggtatgtctgtataggaaaaaacatgctacatgcaggctttggtgctgtcaaaggtatgaggaatctactgggggttttggaacatacccccct

SEQ ID NO: 972353 - DNA, 120 bp, Artificial Sequence
  ENSG00000288110_8 (sequence is synthesized)
agaataagggagagaactgtatttagaggtgtaactgaaatgcattttaataatgggcatgcaagactcaggctctaacctttgcagtctgaagttaagaataacaattatgtccacaaa

SEQ ID NO: 972354 - DNA, 120 bp, Artificial Sequence
  ENSG00000288110_9 (sequence is synthesized)
caagttaaaaaattatttctacatatgttacctacaaacctacaagcctaccaatctctaaatttctaattatgggttatatatgataaaaataacttcatgattactcctaaaacagta

SEQ ID NO: 972355 - DNA, 120 bp, Artificial Sequence
  ENSG00000288110_10 (sequence is synthesized)
aaacattttttttttactattgcagtagaatgagcagaacgtagaactagaaagttctgggtgcacattcttgcactcgcatatcattttagattctccgaggctcagtctttacagtaa

SEQ ID NO: 972356 - DNA, 120 bp, Artificial Sequence
  ENSG00000288110_11 (sequence is synthesized)
tacgaggacaaatgcatagatacaatggcaattctataaagtccctactgcagtctctggcatataataattgctcaaaacaaaaaagacagagagaacaaattctttcccaccctttgt

SEQ ID NO: 972357 - DNA, 120 bp, Artificial Sequence
  ENSG00000288110_12 (sequence is synthesized)
cagtgattatagctgacgaaatagtaatatttctccaacaacagtcattaccaaattctgagggccatgaccacgtcattccatgcaaacacacattaaaccccataagtgctctacatt

SEQ ID NO: 972358 - DNA, 120 bp, Artificial Sequence
  ENSG00000288110_13 (sequence is synthesized)
atgttatttcagacaaaaaacttgtttaaccattgccactcctcattttaaaaaaggactctatatatcctgaaatctcgcatttacttttattaatttttaactatagcatttcttgtt

SEQ ID NO: 972359 - DNA, 120 bp, Artificial Sequence
  ENSG00000288110_14 (sequence is synthesized)
gagttttcttttctctttgactttagtttcagcctcatcagtatattaacagcagatctttgcttttatttgtgtatgatggttgtagacagtacattccacaagagcatgaccaatctg

SEQ ID NO: 972360 - DNA, 120 bp, Artificial Sequence
  ENSG00000288110_15 (sequence is synthesized)
ttggactcaccagtaaatccccagtgtgtatgacggtgtgctgcccatagtaggtactcagtttttcttttgaaagaaaaagtttgattgaaaaacagatcaaccaattccttctggtgt

SEQ ID NO: 972361 - DNA, 120 bp, Artificial Sequence
  ENSG00000288110_16 (sequence is synthesized)
cttttaaattatatgtctgtttggtctctctgtctctaaatggtataagagattaaacagcctgaaaatcaatattttctggcacaggaaataaaaaaagctatcataattgaaacgttt

SEQ ID NO: 972362 - DNA, 120 bp, Artificial Sequence
  ENSG00000288110_17 (sequence is synthesized)
atgaaaataccttttacttaaagaactatagttctgtaaaggtgcataaatgaacaagaactgtgaatttgaatcttagagaactatgtgtaatggatatgctttttttacgtgaagtgt

SEQ ID NO: 972363 - DNA, 120 bp, Artificial Sequence
  ENSG00000288110_18 (sequence is synthesized)
gcttttaatatatagtctctcttatcatccgtctaagccaggtaattcctcttgtactgtaaaagtctacagcgtcatagtgtctatgatcattgcactttgccatggcagcctgcttga

SEQ ID NO: 972364 - DNA, 120 bp, Artificial Sequence
  ENSG00000288110_19 (sequence is synthesized)
catttatgataagaaggtgttgaagtatttgctgtcattcattcaataactattgagtgactaccatttaacattttttatgcctaccatcatactcaacttttgctcaactgttttgaa

SEQ ID NO: 972365 - DNA, 120 bp, Artificial Sequence
  ENSG00000288111_0 (sequence is synthesized)
aggggaagctgaaccggctgagggtggaggcgaaaacgcggtctggcttaggaggaccttggagacagacaaggggagtggttcctgtgatgggatcagtcagatgcctgcctggccgct

SEQ ID NO: 972366 - DNA, 120 bp, Artificial Sequence
  ENSG00000288111_1 (sequence is synthesized)
gctgccttaagccttatgaggtcgccaaggaaccgcagaaactcctggagggcagagctgtgtctgccatcttcatcattgcattaccaccacccagcacagtgcctggcacaaaagagt

SEQ ID NO: 972367 - DNA, 120 bp, Artificial Sequence
  ENSG00000288111_2 (sequence is synthesized)
ccggatgaatggataaatacatggataggcactttgaactacagatgagtttaaatactttgtgtttttcttagtcaaacatgtgcaattaagcatgtgataaatgatatgatgaccaca

SEQ ID NO: 972368 - DNA, 120 bp, Artificial Sequence
  ENSG00000227838_0 (sequence is synthesized)
agcatgctgggattgatttgtgatgtctgccacgaatataagattggccatttggggcatgaatgctattcatggattggatctcctaagagcccgaatttctgagaaaccactgaagac

SEQ ID NO: 972369 - DNA, 120 bp, Artificial Sequence
  ENSG00000227838_1 (sequence is synthesized)
ctgaccccagcgcttaattatttctcctttccaagcatctctcatggaaggcatcttggatgaaaagacctttggcagcgtgggttttgcagggaccgtctggtaccaggaactggccaa

SEQ ID NO: 972370 - DNA, 120 bp, Artificial Sequence
  ENSG00000227838_2 (sequence is synthesized)
atgtgaaggtgtaaaacacaaagttcacaccctgaagaaccttctagtccagtcggggagatggacccagaatgtcagattaagattggcctgcatcagcccaaatggttccatgttctt

SEQ ID NO: 972371 - DNA, 120 bp, Artificial Sequence
  ENSG00000227838_3 (sequence is synthesized)
tgagaccaacaccactgtgatcagcatcctgttgctgtgtgaaaagtccaggctagcctgctggaggatgagtgatgggtgaagcagagatgaattttcagagctggcttcatctgagac

SEQ ID NO: 972372 - DNA, 120 bp, Artificial Sequence
  ENSG00000227838_4 (sequence is synthesized)
cagccagccctagctgtggaaggcagacacttagcaaacccagccaagatcagccaagcccatcccagggcagaagaaccaccaagctgatcccagtccacatctacttctggaagcacg

SEQ ID NO: 972373 - DNA, 120 bp, Artificial Sequence
  ENSG00000227838_5 (sequence is synthesized)
tgctaaataaatggttgctgttttaagccactgagctatgggaggctttgtttcccagcaataactaattgataaatcatcaacagtaaaatggataaatgaattgtggtacaggcacac

SEQ ID NO: 972374 - DNA, 120 bp, Artificial Sequence
  ENSG00000227356_0 (sequence is synthesized)
ccccggagctctgcgctcgcttccgtggcccccgggacatccagcctgaaggacagtggggcaggaatttttccggggcaagacgcttcagcctgcaaggctgaccgctcccgagccgct

SEQ ID NO: 972375 - DNA, 120 bp, Artificial Sequence
  ENSG00000227356_1 (sequence is synthesized)
ggcgtggagaggaggcagtcagcaagttcttgtaaccggcccatttggaattagagaccatcctgatcctcaccaatccccacaggagtctccactcctctagtgggaatccagagactg

SEQ ID NO: 972376 - DNA, 120 bp, Artificial Sequence
  ENSG00000227356_2 (sequence is synthesized)
gagcccagcctattccaaaatcccaccactgccagcctgcaattccatttgccactcctctgaatgaaagcactgttgtctcctgaaggtcccagagggacacaataaatggagaaggta

SEQ ID NO: 972377 - DNA, 120 bp, Artificial Sequence
  ENSG00000287838_0 (sequence is synthesized)
agaacaagacagcagaccttgtgcaatgcactctcccacgggcctcccattccaatttcccctttttaagcctttctccccagcctaaagttttaagaggtttctggaggcgtaaggatt

SEQ ID NO: 972378 - DNA, 120 bp, Artificial Sequence
  ENSG00000287838_1 (sequence is synthesized)
ctatttatgtttaatgaacaaaaaaattagtttcaatgaaaactttatttgaaatgatgaattcaagctgttaccagcctcccaagtaagatgccagagacttcaaacactgctgttgtt

SEQ ID NO: 972379 - DNA, 120 bp, Artificial Sequence
  ENSG00000287838_2 (sequence is synthesized)
tctcaaggaaaagatccagttaacaaggaatcattctctcttcttcaatagctgcttacgaaataaaaacatcagtaggaggggaaggaggaaggaaggagaagaaagaggaagaatagg

SEQ ID NO: 972380 - DNA, 120 bp, Artificial Sequence
  ENSG00000287838_3 (sequence is synthesized)
aggagaagaggaagagaggaagaagtcgtgaacagccctcctgcattttgcatcaggtagaaaagtcagttgaatgttgggaagaacacaaatactcacacattcctccccattctctga

SEQ ID NO: 972381 - DNA, 120 bp, Artificial Sequence
  ENSG00000287838_4 (sequence is synthesized)
tgctttggcatccagagtgctttgaactataggagattgaaggccccagaagccaagtttccctctgaccttctcctgccttcctgtcttccaccccctgcttttcccctgaagtgagtc

SEQ ID NO: 972382 - DNA, 120 bp, Artificial Sequence
  ENSG00000287838_5 (sequence is synthesized)
ctggaagccagaattcttcttgcccaaagcaagccgtgacaccctggaaatatcactctaaccttccttgcctttccgtgtggcagctggccatgaagaaattctctgacctaccttgtt

SEQ ID NO: 972383 - DNA, 120 bp, Artificial Sequence
  ENSG00000287838_6 (sequence is synthesized)
tgatagcagatcacaagaccctggttccagagcggtcctgctttacaccgagggaaaggaatgtcatacagaaaggccaagaagaatctgaagagatgtccaatcaccttttcacgtggc

SEQ ID NO: 972384 - DNA, 120 bp, Artificial Sequence
  ENSG00000287838_7 (sequence is synthesized)
tgcccattcttcattgaacctaagcattaaaatagacagtttcccctgggtctttgggtcttcatttctgaagactccatgtcatgtaaaactttgattaaataaatgtatcatgcatta

SEQ ID NO: 972385 - DNA, 120 bp, Artificial Sequence
  ENSG00000287839_0 (sequence is synthesized)
actttcacttttgctttaataaatcttgccaccgcacactctttgggtctgcatgtttctctaatggagctgtaacactcaccactgaggtccatggcttctttccttgaagcctgtgaa

SEQ ID NO: 972386 - DNA, 120 bp, Artificial Sequence
  ENSG00000287839_1 (sequence is synthesized)
tgaaaccacgaacccttcaatcaagaaaagacctttgatcaggagaagacttctcgtctcatttctggggacacattcaggatttctccaaagcaggtgaaggtacgctcgagcgtggtc

SEQ ID NO: 972387 - DNA, 120 bp, Artificial Sequence
  ENSG00000287834_0 (sequence is synthesized)
attgtattcaataaaacggctattgttacagaatgaagatgatgttggcatctttgaagacagaggccaggaagcttttagaaatggggattcacctatcaatagcaaggacattggaat

SEQ ID NO: 972388 - DNA, 120 bp, Artificial Sequence
  ENSG00000287834_1 (sequence is synthesized)
aatagtttcaaagaatgaagtggtcagcgcaccccaaaaaggcatgctggggggcgtgtggttggaaggttacagtggcacaatgatggagcccgaatgctgggagaagagagtgatatt

SEQ ID NO: 972389 - DNA, 120 bp, Artificial Sequence
  ENSG00000287834_2 (sequence is synthesized)
gaccaactcaactaatttcatgcactatcaccgtatggtattagccactggaaaactaagtaaagcctgaaaatgtccatctcagtctagtgctcatatctacatggaaactcatttata

SEQ ID NO: 972390 - DNA, 120 bp, Artificial Sequence
  ENSG00000287834_3 (sequence is synthesized)
catcacaggcacggtaatccctttctcagtttctcaactgcacccacttccttggaattctcaaacctgctggttggcttagtcgtttatcatacaataagggttacaacataccagggg

SEQ ID NO: 972391 - DNA, 120 bp, Artificial Sequence
  ENSG00000287834_4 (sequence is synthesized)
cccaggaccacagtcaacgcatcaattcctgcaagtatgcacagatgccaatccaagtcccaggtgcttacaaactaaggaagcaaagaggaggaagcaactgtgctgatctaagggacc

SEQ ID NO: 972392 - DNA, 120 bp, Artificial Sequence
  ENSG00000287834_5 (sequence is synthesized)
cctgggccaaagaaggacttgttggaggtagaaagatgcattggaggtggaaagaaggaacccagagtgatggagctatctttaccactgagttatagtgccaggaaggagtgaggaaag

SEQ ID NO: 972393 - DNA, 120 bp, Artificial Sequence
  ENSG00000287834_6 (sequence is synthesized)
tgaatgaacagttaaatcaatattcaaagccctaagccactgtttcttttttaaaagttataatgatatgaaaaagtgttctactactcttgctgaggtaatctggaatctgtgttattt

SEQ ID NO: 972394 - DNA, 120 bp, Artificial Sequence
  ENSG00000287834_7 (sequence is synthesized)
catttatgtgaactatgcagggactcaaatggggagtattccttacagatgataaaagaagagaacctaattacgaagttattggagaatccttctgaaagagggatttaggtgttttaa

SEQ ID NO: 972395 - DNA, 120 bp, Artificial Sequence
  ENSG00000287834_8 (sequence is synthesized)
caagcactgaaattaattccaaagacagcttatgagggaatcttttggtgttttctccacgaatttccttttggaaaaaaaaaatcagctcctcaatttcctcagaccctggttgtccac

SEQ ID NO: 972396 - DNA, 120 bp, Artificial Sequence
  ENSG00000287834_9 (sequence is synthesized)
aggcatttgctgctcaggagctgcctcagtacaaacagctctgactccatggactgctagctgttcttgggagagatactgctatttgtcaaatgtaacattcgaacaaagcttgaggac

SEQ ID NO: 972397 - DNA, 120 bp, Artificial Sequence
  ENSG00000287834_10 (sequence is synthesized)
aggggattataatcagatatctttactcaatattttcacgtgactaaaattagaaaacacaacacatttcaaaggattttacagagggactttaagttcatcaagcaaagtaactttgga

SEQ ID NO: 972398 - DNA, 120 bp, Artificial Sequence
  ENSG00000287834_11 (sequence is synthesized)
taactttggcctttgtttccacatcattttgttcccatctttgttatgtacctcctactgcgctgaaattgactatgatcatgtcttcatcccttcactaaattgaatagagggcagtaa

SEQ ID NO: 972399 - DNA, 120 bp, Artificial Sequence
  ENSG00000287835_0 (sequence is synthesized)
gggaatgtgacttgtgggggaccgaaggcttcgtgggtttgtggggttgtctgccaacttggtgctaattgggaataatctgagaagcaagtcgcctactcacctcccaccctatgtccc

SEQ ID NO: 972400 - DNA, 120 bp, Artificial Sequence
  ENSG00000287835_1 (sequence is synthesized)
tcctcccgcagcctttttccccagcctagtgcctccacagggccactttcaaagcttgcaatttatttggaaagggtcccccgcagaggcgcatggcagcaggagccgggggcgtgtgcc

SEQ ID NO: 972401 - DNA, 120 bp, Artificial Sequence
  ENSG00000287835_2 (sequence is synthesized)
ttgccctgcgagtgcggctggagctgcgcccccagaggcgctgcatctccgcgcctgcagcgcgagaaaaggcagcaggcagcttggtacctccagggctgcggagtctctaaggaggct

SEQ ID NO: 972402 - DNA, 120 bp, Artificial Sequence
  ENSG00000287835_3 (sequence is synthesized)
gcaagagcccagagtcgccgctgattggctcctcccgcggccttgggaccacccttctcaccaccgttgcctcccgcctacaccacccacctccttaatcaaagccaatgattgcatcct

SEQ ID NO: 972403 - DNA, 120 bp, Artificial Sequence
  ENSG00000287835_4 (sequence is synthesized)
tcccgctctattgtggctagtggaaagcaggggcccctgcgggattgcccaggcagtgcaacagtccctgtctggaactagttaaatccttcctccagattcagacgccagcattccttt

SEQ ID NO: 972404 - DNA, 120 bp, Artificial Sequence
  ENSG00000287835_5 (sequence is synthesized)
cagaaaaacaaaagtgtatgttccctcccctccttcagatccgtaccccagcttttctttcatgaacaatgagttctcttatactcctccttcccatattaaactcttcccctttcccac

SEQ ID NO: 972405 - DNA, 120 bp, Artificial Sequence
  ENSG00000287835_6 (sequence is synthesized)
cttccacacgcatatccctcaatctcaatagctccagggatccctacctttctgcactgctgttctaatgcaaataaatatattttttaaaaaaatttaaaaataaaaacaaagatataa

SEQ ID NO: 972406 - DNA, 120 bp, Artificial Sequence
  ENSG00000287835_7 (sequence is synthesized)
actggggataaccctacgagacaagggttttctgaccatatcctagcactactgagcttccctattctccactttatctgtccttatcttgtacctccctcttcctataacccattgcct

SEQ ID NO: 972407 - DNA, 120 bp, Artificial Sequence
  ENSG00000287835_8 (sequence is synthesized)
tcctttaaatgtccctaagactgtcatcttcctagcttcttgtgaatgcatgtgccctgactcagcattaggagattgccttactacaagggattcacagattggatgagatcccaggtt

SEQ ID NO: 972408 - DNA, 120 bp, Artificial Sequence
  ENSG00000287835_9 (sequence is synthesized)
cctaaattccgggttttattggggggcatattaggaaatcttccacatctctgatagatgtgtttacagcaggactggacctccaagggactggaagaaaattgtgagctgggaactcag

SEQ ID NO: 972409 - DNA, 120 bp, Artificial Sequence
  ENSG00000287835_10 (sequence is synthesized)
cattctcctcctcctcctccttcttcctcttcctcttcttcctcttgttcttctttgagacagagtgtagtagtgtaatcatagctcaccgcaaccttgaagtattgggctcaaacaatc

SEQ ID NO: 972410 - DNA, 120 bp, Artificial Sequence
  ENSG00000287835_11 (sequence is synthesized)
ctcccaccttagcctctggagtaactgggaggacaacaggcacaagccatcactcctggctaactggaactcagcattcttgatggaagtcctcccttggtgctgctggaaaagtcaact

SEQ ID NO: 972411 - DNA, 120 bp, Artificial Sequence
  ENSG00000287835_12 (sequence is synthesized)
cgatgggtggcagagttctgcctcttgaagttgacagcactgcaaggagtggaatctggattcctcaagactgcaaaaaggcctaggtgagtaacacaaacctaggggtgcattagctca

SEQ ID NO: 972412 - DNA, 120 bp, Artificial Sequence
  ENSG00000287835_13 (sequence is synthesized)
atggaccaagaggagcttgcccagtgggagatgcaagctaggatggagctcgtcggtaaatcccctctacctttattattttcatggccaagcaaccacatggtctaatgaaaaggctgt

SEQ ID NO: 972413 - DNA, 120 bp, Artificial Sequence
  ENSG00000287835_14 (sequence is synthesized)
gtctctttgtgactcatgaagcagtaactagtttggtaactcttctccttggatctgcaccctgtccttccctgtctcactctccttttctcttcctctcatggttctggcttcacacct

SEQ ID NO: 972414 - DNA, 120 bp, Artificial Sequence
  ENSG00000287836_0 (sequence is synthesized)
gacagagagggagagagagacagggagagggacagagagagagagggagggacagagagagagagggagggacagagaggcagagaaagagaggcagagagagagagagagaagcagaga

SEQ ID NO: 972415 - DNA, 120 bp, Artificial Sequence
  ENSG00000287836_1 (sequence is synthesized)
gtgggagagacagagaggcagagagagagtcgggggagaaacagagggagagaggagaaaagagacagaaatagagagagacagagagggaacaagagggcggggagaggagagaaagag

SEQ ID NO: 972416 - DNA, 120 bp, Artificial Sequence
  ENSG00000287836_2 (sequence is synthesized)
actgactgagggaacagagggagtcagggagagaaagagggagaaaaggagagagaggaagagacaggtggggagagagggaggtagaaaagaagagagggaggaagggacagagagctt

SEQ ID NO: 972417 - DNA, 120 bp, Artificial Sequence
  ENSG00000287836_3 (sequence is synthesized)
ggctcagggaggccaacaagactgttttaccaggaacacagtgatgagaacagagctctggtctggaggggctgatgctccctgtggaagtccagctctggtctggaggggctgcgtgct

SEQ ID NO: 972418 - DNA, 120 bp, Artificial Sequence
  ENSG00000287836_4 (sequence is synthesized)
ctctacaaggaagacgacgtgctgtgctaacaaatgatggagagaaataagcatgattctgtgcagacaagacgaaaataagtttaacaacaaaaggaacatcttttagggaagctttcg

SEQ ID NO: 972419 - DNA, 120 bp, Artificial Sequence
  ENSG00000287836_5 (sequence is synthesized)
agctgatgcagccccgtcggggtggggagcaacttcccccgaggcacagcctgctggggtctgcctggcccctgagtccacgaagtccctggatgacagaggcttgggtcgtggagcatc

SEQ ID NO: 972420 - DNA, 120 bp, Artificial Sequence
  ENSG00000287836_6 (sequence is synthesized)
tgccctgatgtggggtgcacaaggggacctgaaggcaccagctgaaatcagagagaccactctgtggacgtccttaccaaagctgcagaataactggaagctccccccaggctaagcggg

SEQ ID NO: 972421 - DNA, 120 bp, Artificial Sequence
  ENSG00000287836_7 (sequence is synthesized)
gtgcagaagatgatggaggaagggatggggtacagaagcagaagtcatgtctgcccgacggtgctgacgtaaggtggtcactcttgggatgtcccgtgatggttaatattgagtgtcaac

SEQ ID NO: 972422 - DNA, 120 bp, Artificial Sequence
  ENSG00000287836_8 (sequence is synthesized)
atacaaagtattgttcctgtgtgtgtctatgaaggtgttgccaaaagagattaacatttgaatcagtggactgggagaggcagaaccacctgcaatctgggtgggcaccatctaatcagc

SEQ ID NO: 972423 - DNA, 87 bp, Artificial Sequence
  ENSG00000287836_9 (sequence is synthesized)
gcaccatctaatcagctgccaacgtggctagaataaagcaggcagaggaacgtagaataaggacactctctggatcttccggccttc

SEQ ID NO: 972424 - DNA, 120 bp, Artificial Sequence
  ENSG00000287836_10 (sequence is synthesized)
acctacaccagtgatttgccaggggctctcaggccttcagacacagagtaaagactacactgtcagcttccctacttttgaagttttgggactcaggctgtcttcgctgctcctcagttt

SEQ ID NO: 972425 - DNA, 83 bp, Artificial Sequence
  ENSG00000287836_11 (sequence is synthesized)
aagttttgggactcaggctgtcttcgctgctcctcagtttgcagaaggcctattgtgggacttcaccttgtgactgtgtgaat

SEQ ID NO: 972426 - DNA, 120 bp, Artificial Sequence
  ENSG00000287836_12 (sequence is synthesized)
catcccctttagttaaatggaatgggacaacacgcccaagacctaccctgaacattcccaggactctgagttgctttaaaatatgcttttgtcaggacacagtggttcacgcttgtaatc

SEQ ID NO: 972427 - DNA, 120 bp, Artificial Sequence
  ENSG00000287837_0 (sequence is synthesized)
ggaggccctggctcaagacctgcgaaagtttcccgccagagacctaggctgtgtgttgctccagtatgtcaacgacctcctgctgggacaccccacagcaattgggtgcgccaaaggaac

SEQ ID NO: 972428 - DNA, 120 bp, Artificial Sequence
  ENSG00000287837_1 (sequence is synthesized)
agacgccctgctctgacacctggaggactgtgatcaagtgtggatcaaggattggaatgtagtccccttgtgaccacggtggaaagaccccagaccgtcatcttgaccacccccacagct

SEQ ID NO: 972429 - DNA, 120 bp, Artificial Sequence
  ENSG00000287837_2 (sequence is synthesized)
gtaaaggttgaaggaatccaagcctggatccaccacagccatgtgaaacctgcagcctctgagacctggaaggtgagaccaagcccagacaacccctgcaaagtgactctgagaaggacg

SEQ ID NO: 972430 - DNA, 120 bp, Artificial Sequence
  ENSG00000287837_3 (sequence is synthesized)
ttggacttatgtaataaggacttccactgattttccccacatggaggactgttcccaatgtattcatcaggtcactgagtagggcaacaagttaaaacagtttctgttttatagttatta

SEQ ID NO: 972431 - DNA, 120 bp, Artificial Sequence
  ENSG00000287837_4 (sequence is synthesized)
ttgttgcgggacaatcaaagatgggagagaccaaacaaagtgagttcaggaaaggtctttattaaaagatgatcacttggctcagtaggattagtgtacaggaaagtctgagccctggac

SEQ ID NO: 972432 - DNA, 120 bp, Artificial Sequence
  ENSG00000287837_5 (sequence is synthesized)
aaagaaagcagccaccttttaagcagtcagtggctgggagctacgtgatgcaggaagcacacttagagaagcaagaacaaaggcagttgatcagtcttttacatttatctatattacatg

SEQ ID NO: 972433 - DNA, 120 bp, Artificial Sequence
  ENSG00000287837_6 (sequence is synthesized)
ttccaaatccttgggaaaccatgtttctgtataaaccttgtaactttgcagctgcacgggggaggtgaagcagaaactcgctgagcctcaaggaatgtgaaactagcaagtacagataag

SEQ ID NO: 972434 - DNA, 120 bp, Artificial Sequence
  ENSG00000287830_0 (sequence is synthesized)
gaggactccccaacgatccttaacacagccatatgactgatagccctcatcccacccccccaaaaaaagtctagtgagaagaaaatgcttaaaaatattctgatgcatgcatatcatgga

SEQ ID NO: 972435 - DNA, 120 bp, Artificial Sequence
  ENSG00000287830_1 (sequence is synthesized)
gttctttccagcagtcaaagagaatgaaggcaaaaaatggaaagctctccaaaacatatcgttcactgaaaaccaaactgtgacatactgcatagagtttgatagcattccacagaataa

SEQ ID NO: 972436 - DNA, 83 bp, Artificial Sequence
  ENSG00000287830_2 (sequence is synthesized)
tgacatactgcatagagtttgatagcattccacagaataaaattttattctgtgtggacatatattaatatatacaaatgcag

SEQ ID NO: 972437 - DNA, 76 bp, Artificial Sequence
  ENSG00000287830_3 (sequence is synthesized)
tgggcgtcatggcgcacccctgtagtagcctgtaaacccagctactctggtggctgaggcaggagaatcacttgaa

SEQ ID NO: 972438 - DNA, 120 bp, Artificial Sequence
  ENSG00000287830_4 (sequence is synthesized)
atataataaaagtcttggagaaatggaacgtacatcaaacagacaacagattggcattgagatgccaagccaaaggaatgcttatctgtattttcatttttttttttttacaatgaggat

SEQ ID NO: 972439 - DNA, 120 bp, Artificial Sequence
  ENSG00000287830_5 (sequence is synthesized)
acattttttaatgagaagcaatatagcataatggttaagggcatagctcctagagccagttcaaatcccagctctgaagcttaccagcactgtgcctgcgtcatgacttaagctgtctgt

SEQ ID NO: 972440 - DNA, 82 bp, Artificial Sequence
  ENSG00000287830_6 (sequence is synthesized)
cgggtgtggtggctcatgccaccctgaggtcgggagttcgagaccagtctggccaagatggtgaagccccatctctactaaa

SEQ ID NO: 972441 - DNA, 88 bp, Artificial Sequence
  ENSG00000287830_7 (sequence is synthesized)
ggctgaggcaggagaatcacttgatcctaggaggtagaggttgcagtggtgaatgagccagactctgtctcaaaaagaaaaacttcct

SEQ ID NO: 972442 - DNA, 120 bp, Artificial Sequence
  ENSG00000287830_8 (sequence is synthesized)
gccagactctgtctcaaaaagaaaaacttcctggcatggagtgagggctacctaaacaactgagaccaggaggcaggggatagggaaggtatgggaaattggccagcacaattaccacct

SEQ ID NO: 972443 - DNA, 120 bp, Artificial Sequence
  ENSG00000287830_9 (sequence is synthesized)
gatggtgggagttcacacgcaagaatccactttgcatacctgtgtgctgtgcattcctgtggaatacaccaccactccccacagcacacccagataaagtactgggcagcatggcctctt

SEQ ID NO: 972444 - DNA, 120 bp, Artificial Sequence
  ENSG00000287830_10 (sequence is synthesized)
cccctggtccccaagacacctgaggacagcctccactggcagcactgatgtcggatacctatcaggaggtgatgttgggaaaaccacactacagcctagatataattgtttaaggatctt

SEQ ID NO: 972445 - DNA, 120 bp, Artificial Sequence
  ENSG00000287830_11 (sequence is synthesized)
gagataaagtcatcctggatttagggtgggtcctaactccaacggctggagtccttagaagaagaggagacataccaagggaagaaggtcacctggagatggaggcagagattggagaga

SEQ ID NO: 972446 - DNA, 120 bp, Artificial Sequence
  ENSG00000287830_12 (sequence is synthesized)
tgcagccacaagccaagaaacacctggaggcaccagaaactggaggacgcaaagaatggccctcgcttagagccttcagagggagcaaggccctgctaacaccttgattttggactctgg

SEQ ID NO: 972447 - DNA, 120 bp, Artificial Sequence
  ENSG00000287832_0 (sequence is synthesized)
gcccagagaggctgtagagagtttaaaaggaaggagtgagagggatcaccagaccatgaagcatcccctgtgggaggaaggaggagctcaaggtcaggagagcactgttccctgggagaa

SEQ ID NO: 972448 - DNA, 120 bp, Artificial Sequence
  ENSG00000287832_1 (sequence is synthesized)
catgaagatggccatctacgagccaaggagaggggcctcagaagaaaccagtcctgctgacaccttgctgttgaacttccagcctccagaattgtgggagaaataaatgttgtttaagct

SEQ ID NO: 972449 - DNA, 120 bp, Artificial Sequence
  ENSG00000287832_2 (sequence is synthesized)
gccctgcctggcaccctgtcatggcagccctagcaaactagtccagctgcacttgtctgcgtggagacctctgaccccagggcaaatgttccagctcgtcttccctcctttgccctgcta

SEQ ID NO: 972450 - DNA, 120 bp, Artificial Sequence
  ENSG00000287832_3 (sequence is synthesized)
gttggctcctcctgcctgctggctctgcagtggtaccaacaccgaagcaggggtcagcaggggtgtgctctggggacctgaagctggcccaggagggtcagggatgggcacagcagtggg

SEQ ID NO: 972451 - DNA, 120 bp, Artificial Sequence
  ENSG00000287832_4 (sequence is synthesized)
gagaggacaaagctagagtcagtgcagccttggaccgaccacaggagcactgtgggcaggcagccggcaggggtagtctcgctctgtttgaatgagacctgctgtgtttgctgagccagg

SEQ ID NO: 972452 - DNA, 120 bp, Artificial Sequence
  ENSG00000287832_5 (sequence is synthesized)
agacaggccctgacttccctgagcttccaggacgttgaagcatggaaagaggtcgttttccttggcccagctttgggagcccaggtccgcatatgcctcacagccctctgggggaggcag

SEQ ID NO: 972453 - DNA, 120 bp, Artificial Sequence
  ENSG00000287833_0 (sequence is synthesized)
ggagacagagagaggagtggccagactacagccacactgtgaacagctacagatgaagtatggcttattggatcctaaacaccagggtagactattcatcttaaagggtgcctgatgatt

SEQ ID NO: 972454 - DNA, 120 bp, Artificial Sequence
  ENSG00000287833_1 (sequence is synthesized)
ccttcaaggtgtatgttctgtgaatggtggtgcatcacactggtgaagaactgagccaataagtagaaggaagaaatgatcaacactaaggaaatttagagccaaaggattgactatgga

SEQ ID NO: 972455 - DNA, 120 bp, Artificial Sequence
  ENSG00000287833_2 (sequence is synthesized)
ttcaggcaggcctgggtttgaatcctgtcctcacctctcactagcccactagtatggcaatttacaaacgtcctcccaccccccaacttctgagtatatatccaaaagaactaaaatcag

SEQ ID NO: 972456 - DNA, 120 bp, Artificial Sequence
  ENSG00000287833_3 (sequence is synthesized)
gaccctgaaaacatatctgcattcccatgttcactgcagcattattcccaatagtcaagatacagaaacaacctaaatgtccatggataaagaaaatgtggatatacatgcaatggaata

SEQ ID NO: 972457 - DNA, 120 bp, Artificial Sequence
  ENSG00000287833_4 (sequence is synthesized)
ccatggataaagaaaatgtggatatacatgcaatggaatattattcagtcttttattttttaatttaatttaattttttaagacagggtcctgttatgttgcccaggttggtctcaaact

SEQ ID NO: 972458 - DNA, 69 bp, Artificial Sequence
  ENSG00000287833_5 (sequence is synthesized)
aagtgctgggattacaggcatgagcatctatgcttggccttattcagccatttaaaagatggaaaccta

SEQ ID NO: 972459 - DNA, 89 bp, Artificial Sequence
  ENSG00000287833_6 (sequence is synthesized)
acagatgctggagagaatgtggagaaataagaatgcttttacactgttggtaggagtataaattagtgcaaccacgctagaactagaaa

SEQ ID NO: 972460 - DNA, 73 bp, Artificial Sequence
  ENSG00000287833_7 (sequence is synthesized)
gtggcaattcctcaaggacatacccaaaggagtataaattattccactataaagacacatgcacacgaatgtt

SEQ ID NO: 972461 - DNA, 120 bp, Artificial Sequence
  ENSG00000287833_8 (sequence is synthesized)
tgcatgttctcactcacagtggggagctgaacaatgagaacacacggacacagggtggggaacatcccacaccgggacctgtcagggggtgggagactgggggagggatagcattaggag

SEQ ID NO: 972462 - DNA, 120 bp, Artificial Sequence
  ENSG00000287518_0 (sequence is synthesized)
aggtacaacattcataagaacggacacaaatggaaaaactggctattttatcaaggctttgactggaagtgtatgcttccctttaaggagtcaacctccacttgcagagctgaaaaagcc

SEQ ID NO: 972463 - DNA, 120 bp, Artificial Sequence
  ENSG00000287518_1 (sequence is synthesized)
agtcaacctccacttgcagagctgaaaaagccccatgggaagaactggcctcataccttgtctacacagtccccgcacagggttcctaacctttggtcagtaaagaatgtcactttctaa

SEQ ID NO: 972464 - DNA, 120 bp, Artificial Sequence
  ENSG00000287518_2 (sequence is synthesized)
taagaagtcttatctgagatttcttgtggaacagagttccatcgaagccaatccaaaaggactatgcagaaataattactcttgctgaactttatgcaaataacaaggccaaatataaga

SEQ ID NO: 972465 - DNA, 120 bp, Artificial Sequence
  ENSG00000287518_3 (sequence is synthesized)
aaggccaaatataagactaaggtttattctacaaacaacacggtcctatcataatttgtttttaccaaaatcaggactagagagagaaaatatgctccaaagcttatcatacatttgtca

SEQ ID NO: 972466 - DNA, 120 bp, Artificial Sequence
  ENSG00000276092_0 (sequence is synthesized)
cccagagactgtgagattgctctttcagcccaagttcctactctctcagaactcctgatcagtcatttgttaatagcaacaataattactaggcatctacttaaacagcatttattggag

SEQ ID NO: 972467 - DNA, 120 bp, Artificial Sequence
  ENSG00000276092_1 (sequence is synthesized)
cccacaaaaccacccttgtccctacaacccttgtccctttccagtgctcctttccacccttcccctttactgcctctaccaggggaaccactctcctgacttctgacaggtcagattagt

SEQ ID NO: 972468 - DNA, 120 bp, Artificial Sequence
  ENSG00000276092_2 (sequence is synthesized)
tttgaacttgatatcagtggaataatacaggatgcactcttctgaatctggcttctttcactcaacatgaagcttgtgagcttcatccagaaaaaataaaaaaataagattcctgactca

SEQ ID NO: 972469 - DNA, 120 bp, Artificial Sequence
  ENSG00000276097_0 (sequence is synthesized)
tttggagaggactcacccctctacttttgggggagatgttaattgtttgctctagaactgggcacggggcagaaccccctggggaacagtgagttgaaggagacgggagttcggaatact

SEQ ID NO: 972470 - DNA, 120 bp, Artificial Sequence
  ENSG00000276097_1 (sequence is synthesized)
ttttgaggtttatttctaggatatagggtgccaaggagaacgcttcaggaaggagaaaggctcctgtcggtgactgaatttttcaggaactaaagtgggagtttttgggacggtgctatt

SEQ ID NO: 972471 - DNA, 120 bp, Artificial Sequence
  ENSG00000276097_2 (sequence is synthesized)
gatccccagctaagcgtcttcacacggttgctaggtgtcagcgaggcaaatgccaagttcacaaacttgttcccgtcgtgggatgctgcgatcttgccttgatggagtgtcgggggcctc

SEQ ID NO: 972472 - DNA, 120 bp, Artificial Sequence
  ENSG00000276097_3 (sequence is synthesized)
tgggaggtgcgcctgtgtgtgttccgacccagcctctcgctgcggatttggctgtatcatcttttggaggtgttgtttactcccctgcaaagcgggaataataaaaacagtagcatgtgc

SEQ ID NO: 972473 - DNA, 120 bp, Artificial Sequence
  ENSG00000230366_0 (sequence is synthesized)
cttctacccgggggctccagtgcatctggctttatctctggggtgcttccatacaaaggggacagaagagatgatggaaggcctcagtactgcaggaggggagacggatgtcatctacaa

SEQ ID NO: 972474 - DNA, 120 bp, Artificial Sequence
  ENSG00000230366_1 (sequence is synthesized)
tcacacaatacatgggaggtcacagaacgccagggtgacgtaacaattcaaaccatgaagaggtaacagagcccttcgcgcgtctcaacacgtggtgacgcagctaataacctgtgatgc

SEQ ID NO: 972475 - DNA, 120 bp, Artificial Sequence
  ENSG00000230366_2 (sequence is synthesized)
atacatgggaacaaatgcatagaaaaacttgtcaatgacacggcaaagtaaaacccaaatgaagcgaggtgaaagaatgggctgcagcgcaggcaaaactgcaccacgttacagactgct

SEQ ID NO: 972476 - DNA, 120 bp, Artificial Sequence
  ENSG00000230366_3 (sequence is synthesized)
cgcctgggatggaacggtggggaggtgcgcagacggatggacaagcgcctggcaaaatggatttcttttcctagactgctaatgctactaacagttccctcctcacagggtcgctataac

SEQ ID NO: 972477 - DNA, 120 bp, Artificial Sequence
  ENSG00000230366_4 (sequence is synthesized)
gaggtaacatacagcacttagaagacggcctgacccagaataacactaatgttcacatggctgcgagtctcagaccaaaatcaatagccggtatctactgaaactgcagcaaggcgaaac

SEQ ID NO: 972478 - DNA, 120 bp, Artificial Sequence
  ENSG00000230366_5 (sequence is synthesized)
cacgggaatggcgctccgttgagtagagcaacgcacagcacatcacatcgcatcctccgtagcgggaggctctggcctcaccgcagcggcacttcccggaagagcccaggatattcgggg

SEQ ID NO: 972479 - DNA, 120 bp, Artificial Sequence
  ENSG00000230366_6 (sequence is synthesized)
ggcagggattccggcggtcatcatttattcttggcgctaagctgccgcttctcttttttatcaccacagagtaacgcagaccccaccgtttccttccattctgagccaaccactccagca

SEQ ID NO: 972480 - DNA, 120 bp, Artificial Sequence
  ENSG00000230366_7 (sequence is synthesized)
gccaccggggcgccaggttatgctggggctgcaccacccggcccgaggcttttgaagccacgcctgagcgcggaggatgggcaggatttgccccgtgaactcccgcgcacgcaggctccg

SEQ ID NO: 972481 - DNA, 120 bp, Artificial Sequence
  ENSG00000230366_8 (sequence is synthesized)
cgcgaggcccgggcgcccgagcggcgattccctcccctatcaccagctccagggtggtgccccccggctgtggagcccagaccccggccgtccagcagcgtatagacgagcccatgtctg

SEQ ID NO: 972482 - DNA, 120 bp, Artificial Sequence
  ENSG00000230366_9 (sequence is synthesized)
cgatgtaactgcaccgcgctggggatccacctcccgccagggtgagggcgccgtcctccagcgtatgctaggcaggcgcgccccgccctcctggtcacgtgaccacgcctacagccgaag

SEQ ID NO: 972483 - DNA, 120 bp, Artificial Sequence
  ENSG00000230366_10 (sequence is synthesized)
aggatgggaaaatgcggccctgttcctgaacaggaagcggaagcaggaaggaactgagaacaccagcatctgctgccgccctgaatcagcgttagcatgtggaggcaacctcagccccca

SEQ ID NO: 972484 - DNA, 120 bp, Artificial Sequence
  ENSG00000230366_11 (sequence is synthesized)
gtttttgaagaaggtgattcagattcagacacaggaattatggtgacggtagaaatggactggaaggttcgttccccttgcccaccaagactccagagcaggtgggttcttgatgtctac

SEQ ID NO: 972485 - DNA, 120 bp, Artificial Sequence
  ENSG00000230366_12 (sequence is synthesized)
tctgcatgaagccctgggctttccggccctccctacttttcctccgaattcacagcacagcggagccaaaatgtattcctgccaaaacgggcatttcccaaaagaaaatattgttttaga

SEQ ID NO: 972486 - DNA, 120 bp, Artificial Sequence
  ENSG00000230366_13 (sequence is synthesized)
tcacacaatacatgggaggtcacaggtctacaacatccagagcagccacattgcaagtgctcagtagccacatgtggctggcacatgtggcccatggcaactgtgctggacatgaacgcc

SEQ ID NO: 972487 - DNA, 120 bp, Artificial Sequence
  ENSG00000230366_14 (sequence is synthesized)
ctcatgaggctgatgcagggcaggtctacaacatccagagcagccacattgcaagtgctcagtagccacatgtggctggcacatgtggcccatggcaactgtgctggacatgggtcgcta

SEQ ID NO: 972488 - DNA, 120 bp, Artificial Sequence
  ENSG00000273138_0 (sequence is synthesized)
atcttgtttgacctctcttttcttcagaatgcattttggaaaatgaattttaaaagcaacttactgttctgcagccctcatcaaatacccttgtatctcctctgctgaatttggggaagg

SEQ ID NO: 972489 - DNA, 120 bp, Artificial Sequence
  ENSG00000273138_1 (sequence is synthesized)
tttgttacacagagcataactgggactctgtttactttatcagagtgactgtatctttagggatggttctgatgttttttccaaggaaccattctttttaataaatgtcagtttaaaccc

SEQ ID NO: 972490 - DNA, 120 bp, Artificial Sequence
  ENSG00000273139_0 (sequence is synthesized)
agagtcaggtcaggtgggtgggcgagaggaccagtgtggccaggctgcggaagccagcacaggagacaagggcgggtgctgtgcattacagaggctgctgggggcttgtccatagagcag

SEQ ID NO: 972491 - DNA, 120 bp, Artificial Sequence
  ENSG00000273139_1 (sequence is synthesized)
ctttgaccaggttaggaattatgactggtttccagagagaacattggttagtaattggctatggggaagagggggcgttgagccaaccaactggggtccccctgaagtgccagcaaagtg

SEQ ID NO: 972492 - DNA, 120 bp, Artificial Sequence
  ENSG00000273139_2 (sequence is synthesized)
tctggttttctccaggatctgtttcctcagtccctggcaggattggctcccctgcacgccatgtccttgtggtcccttccagacagaaaccaggcatgaataaagtgaataatgacaagc

SEQ ID NO: 972493 - DNA, 120 bp, Artificial Sequence
  ENSG00000273137_0 (sequence is synthesized)
acgcatgtctatgccggagcaccaggctgccccagcggctcctcccggccttctgcagccccatcgcccacccacatggaacatggctggggtggactgcagggatggagctggggcagg

SEQ ID NO: 972494 - DNA, 120 bp, Artificial Sequence
  ENSG00000273137_1 (sequence is synthesized)
acacagccctaggagcacctgcctggcgccagcttctgctgacggcagcccaacagcccccagccacgtggcaaagcgggtccccacgcagccctggctgcagctgctccaggggtggcc

SEQ ID NO: 972495 - DNA, 120 bp, Artificial Sequence
  ENSG00000273137_2 (sequence is synthesized)
acccctacttggcctgaccccgctgatgctgcaggcccccagcccagccaggtggggacacccagcatccacccgcagggaggggtggcgtgcggcccactgacctcccggaagaaggca

SEQ ID NO: 972496 - DNA, 120 bp, Artificial Sequence
  ENSG00000273137_3 (sequence is synthesized)
gcatttctctgcacgctgtcgctggcatgagcagcctggatctcggggtaaaaggagctgatgacatagtcgagcagctgcactcgaatgtcgttcctccccacgctggggcctgcacgc

SEQ ID NO: 972497 - DNA, 120 bp, Artificial Sequence
  ENSG00000273137_4 (sequence is synthesized)
cctgtgtgctcatctgcagacttaaaaatctcaaaggatccaaacctggagggaagacccgaggcgtcaacagcccaaacctgaccccagccccttgtgaaaataagaaaaaggaaaaga

SEQ ID NO: 972498 - DNA, 120 bp, Artificial Sequence
  ENSG00000273132_0 (sequence is synthesized)
gcggctatcccaggagccccgggcaggagccccgggcaggagcaccgcatgctggcctccctccctcacaggctcggtgtgccccagcagacctagctgccagcagtgacaacatgcgtt

SEQ ID NO: 972499 - DNA, 120 bp, Artificial Sequence
  ENSG00000273132_1 (sequence is synthesized)
ctctcgcggccgtctagaaccaccccgtctgtgggcagatgcagaaccacatcctgcccagccttgctaagtggaggcgcatccttttctgagaaagaaaataaataattcataaaagat

SEQ ID NO: 972500 - DNA, 120 bp, Artificial Sequence
  ENSG00000273133_0 (sequence is synthesized)
gtctctacaaaaaaaaagaagttttaatttttggtccttccttctctgtttcctcagactcatcttcccaatggctgaaggctccctgttacccctggtgtagtgaattctagtagtcgt

SEQ ID NO: 972501 - DNA, 120 bp, Artificial Sequence
  ENSG00000273133_1 (sequence is synthesized)
aacacatttctccgaacagatgaaagggaagccacgtttttatgttcacagcacatatgtttcagaaccttggacagacaccttttgtgactctccccagctcatacccacttctctgag

SEQ ID NO: 972502 - DNA, 120 bp, Artificial Sequence
  ENSG00000273133_2 (sequence is synthesized)
ctggccaagttagcaccttcagacttctctggagaaaatgacgcttaattggtggtactctagctgcatgggccacttccatcacatggagaaaaatgaagcaaactcagagtgaggcaa

SEQ ID NO: 972503 - DNA, 120 bp, Artificial Sequence
  ENSG00000273133_3 (sequence is synthesized)
gtgagagaccacggggcctcaggagaactatcttatccctgcagtctcccttgtaattcagctatacctcttgtccgagttatttgagatgttcttaataaatcccctctttagcctgaa

SEQ ID NO: 972504 - DNA, 120 bp, Artificial Sequence
  ENSG00000230368_0 (sequence is synthesized)
ctgcctgtaggcttcatgtccttcccctacaacacgccatgcttgccaggctggaagaggggctccagaaacttggaaacctgggcctgtagctggcatatggaaaagaggcctggaaaa

SEQ ID NO: 972505 - DNA, 120 bp, Artificial Sequence
  ENSG00000230368_1 (sequence is synthesized)
gcaccactcctgtccatgaagcccccagatggaaccaggtcctgttcagaaaccccatctgtgcctttggagagactgccccgagcacacaggcccagcaaccgccatctatggccccca

SEQ ID NO: 972506 - DNA, 120 bp, Artificial Sequence
  ENSG00000230368_2 (sequence is synthesized)
ggacctaatcccttctacatagggttcagtgcatgtgagtatacaccgggcttgattcctgcctagtccctgccagataccccatgcccacctggtgaagagaatgaggccacacaaaca

SEQ ID NO: 972507 - DNA, 120 bp, Artificial Sequence
  ENSG00000230368_3 (sequence is synthesized)
cacccaggccatcgtggtgatggagtgcctggggtcctacttgcccacccttccttgctggttcagagccagctgtctgaccacattcctaccctgagatgagactttggggacattgtc

SEQ ID NO: 972508 - DNA, 120 bp, Artificial Sequence
  ENSG00000230368_4 (sequence is synthesized)
caccagggtcactgaccccttttaaaattccagaaacagagggccagctggtcccctagaagtttggcacatgggataagccaaggcttgccttcaggaacaggttttccaccacgtcgc

SEQ ID NO: 972509 - DNA, 120 bp, Artificial Sequence
  ENSG00000230368_5 (sequence is synthesized)
tgcccaaggcccagggcatccccaagttcatgtggcacctgcctgccatgtccacaacccatgccgacccctcctagagccactggaatgcttgttcctgggcatgtgataaacccagac

SEQ ID NO: 972510 - DNA, 120 bp, Artificial Sequence
  ENSG00000230368_6 (sequence is synthesized)
agcttcagccttgcaggacaactatgcacatctggcagcagtagccggagggcccatggaaagaagttggaggtgaaaccagatgctgtgaaaatattaggcaaaactgcatactataaa

SEQ ID NO: 972511 - DNA, 120 bp, Artificial Sequence
  ENSG00000230368_7 (sequence is synthesized)
taaaatgcagcaggaggagaggtgaagacacaaatgaataagtgcttagagacacatggctgtcagaacagttaagaatccacgctgcttcccccctttacctagaaaaggaaaattcta

SEQ ID NO: 972512 - DNA, 120 bp, Artificial Sequence
  ENSG00000230368_8 (sequence is synthesized)
ggccacctcctcctcagcatactcctcaaactcctcctcctcagccgtggcatcctgatattgctgatattcagacaccaggtcgttcatgttgctctcggcctcggtgaattccatctc

SEQ ID NO: 972513 - DNA, 120 bp, Artificial Sequence
  ENSG00000230368_9 (sequence is synthesized)
ttccatgccctcgcccgtgtaccaatggaggaaggccttgcgcctgaacattgctgtaaactgctctgagacacgcttgaagagttcctggatggccgtattattcccaatgaaggaaca

SEQ ID NO: 972514 - DNA, 66 bp, Artificial Sequence
  ENSG00000230368_10 (sequence is synthesized)
tgcattcctgaaggaacccaagaaattcctctctttctctctctggaatgaaatgaattctctaga

SEQ ID NO: 972515 - DNA, 120 bp, Artificial Sequence
  ENSG00000230368_11 (sequence is synthesized)
aatcacacggggcccaaatataatcacggggcccgggcccggcgtgggggttgtaggccggcgccacagcctgaggacaccgcgacctctgccccgcggagcgcgccgaatgccgggaaa

SEQ ID NO: 972516 - DNA, 120 bp, Artificial Sequence
  ENSG00000230368_12 (sequence is synthesized)
cgcgacctctgccccgcggagcgcgccgaatgccgggaaactttgcggaatgtgtccaggtgttgaagctcttgatggcgaaaggaacagcaagaggaccttgtgcatgaataatttgtt

SEQ ID NO: 972517 - DNA, 120 bp, Artificial Sequence
  ENSG00000248984_0 (sequence is synthesized)
aagagaggctgaagatggaagaggacagaggatggagaaacaattaagaagttatgatcataatttccttcagagatgatgaagacacaaactcattcaacacgaattgagataaacagg

SEQ ID NO: 972518 - DNA, 120 bp, Artificial Sequence
  ENSG00000248984_1 (sequence is synthesized)
tgcataatgaccttgagaacagggagtataagagagaaagaaggttagttgcttttaatcaatgaaagataagactttcacctcacttcactgaaatagacttggatgtctacttggata

SEQ ID NO: 972519 - DNA, 120 bp, Artificial Sequence
  ENSG00000248980_0 (sequence is synthesized)
aaaatttaagagcaagcccgggaatttacggtggaggggtgcaagttccgaggggacgccggaaaagcctgcgacgtccacccctgacgaccgccctcgggggcgaactgccgctcagga

SEQ ID NO: 972520 - DNA, 80 bp, Artificial Sequence
  ENSG00000248980_1 (sequence is synthesized)
ggcgcggcggcccggcttcggcttccgccccagcccggtcccggcgtcctgcaccgccggcccggcctcactcacagcat

SEQ ID NO: 972521 - DNA, 120 bp, Artificial Sequence
  ENSG00000248980_2 (sequence is synthesized)
cgagacgtgcagccgcaccgggacgctcctgtctttgaaggcggtggtgatgaagcagccgaagggataaagaagaaataacctttagtcaacccaccaattacatttctccattttcag

SEQ ID NO: 972522 - DNA, 120 bp, Artificial Sequence
  ENSG00000248980_3 (sequence is synthesized)
tgttcattgagccattggatataaatgtgaatacagagaggagagggaaagaggagtatgctaggactgagtccttcccttcgggctaattggtgcactgtggcagaaagactgctagtt

SEQ ID NO: 972523 - DNA, 120 bp, Artificial Sequence
  ENSG00000248980_4 (sequence is synthesized)
ttgcatcaagatccatgatcctaagttttcagtggggcacagagccacctggaacaaagattacatttcccagctttcctaagaaccaggtgtgcccttttgactgttttggcaatagag

SEQ ID NO: 972524 - DNA, 120 bp, Artificial Sequence
  ENSG00000285473_0 (sequence is synthesized)
agaggcccagggaagttaagtgactcaccgtgagtgaccaagcaagctgacagagccaagagttatacaatgagaggattgacaccatcagctcccctgattcccaggccttcagacttg

SEQ ID NO: 972525 - DNA, 120 bp, Artificial Sequence
  ENSG00000285473_1 (sequence is synthesized)
aactggaattactccattggctttcctgagtctctaatttgcagatggcagatcattgaacttctcagcccgcataaatggctaaaactacatactagaactcactgggtgatgaagcag

SEQ ID NO: 972526 - DNA, 120 bp, Artificial Sequence
  ENSG00000285473_2 (sequence is synthesized)
actactatttattgacagagccataaatcaagcacaggactgtctgtttctaaaatgcagattgtttccattttacaaaagcagtatcacatagaaaatgcttagatagaaatttgatga

SEQ ID NO: 972527 - DNA, 120 bp, Artificial Sequence
  ENSG00000285473_3 (sequence is synthesized)
ctcaaaaaaagaaatgtcatgtaaaattttcctgcatcagaggtggttggacaaattagcattttgatactgcctatatcacagatattgcgagtattgtgattcaaatattcattcaat

SEQ ID NO: 972528 - DNA, 120 bp, Artificial Sequence
  ENSG00000285473_4 (sequence is synthesized)
attgtgattcaaatatttattctgttaatatggtacattatattgttatttaaatttaaaaataccatagctttcctggaatgccacccacatagttataatgtaatacatcattatcct

SEQ ID NO: 972529 - DNA, 120 bp, Artificial Sequence
  ENSG00000235858_0 (sequence is synthesized)
aaatctagagtaggtcaattgagcctaggatgtcatccagcaacagaaagcttgtcaaaataggaaccatttccatccctaccactgggcctctatgatggtgccctttgggctgagtca

SEQ ID NO: 972530 - DNA, 120 bp, Artificial Sequence
  ENSG00000235858_1 (sequence is synthesized)
ttgaattcacacagaaatcatatatcgctccagggtacctggaagttttttcctcaaaaatgtacagaactggtatgacaggataacattcttaattaaacatttttaatgaaactataa

SEQ ID NO: 972531 - DNA, 120 bp, Artificial Sequence
  ENSG00000235852_0 (sequence is synthesized)
cccagatggctctacacgtgcctgaggtagccactcccgaaatataaagagctctctgtcacatctggcttccaaccggatgatggcagaaaccaagggagggcaggcagagcggaaacg

SEQ ID NO: 972532 - DNA, 120 bp, Artificial Sequence
  ENSG00000235852_1 (sequence is synthesized)
agccaggaaaagcgacaagtcaggaagaccctcggctcctatcccgccccaccgcagggccccacacagcctgagcccgggccccgaaaggaacgaggcctcctgcgcctcgcggagaca

SEQ ID NO: 972533 - DNA, 120 bp, Artificial Sequence
  ENSG00000235852_2 (sequence is synthesized)
ctcacttttcacctgaggccaccagctctttgccctcgctgttgccaaacgcgtccgtctccccggggccgtccttggggccgggcgccgccggggcagcgggtggcgacaccccgggct

SEQ ID NO: 972534 - DNA, 80 bp, Artificial Sequence
  ENSG00000235852_3 (sequence is synthesized)
cagccgggcccgcggccggccgtcccccgcctcggggacgccggcacagggtgaccaagggctgtgcccgccgcagagtc

SEQ ID NO: 972535 - DNA, 120 bp, Artificial Sequence
  ENSG00000235852_4 (sequence is synthesized)
agtcgcgctcacgccggcgggcgaccgcaggagcaggtcccgcagcatccccgagcctcgcagccgcatcatgccgccgggtccgtcagcgcccgctcaacaggggaggatgctccgggc

SEQ ID NO: 972536 - DNA, 120 bp, Artificial Sequence
  ENSG00000235852_5 (sequence is synthesized)
gtgggcggccggtttcctcggggaacgcggtctgtggtggggcggtgagatgacagaagaggaaagggcagctacttgggtgtggttccggctcggactcccgcagcggatgcgggtgct

SEQ ID NO: 972537 - DNA, 75 bp, Artificial Sequence
  ENSG00000235852_6 (sequence is synthesized)
cgctaggattgccgcgaccggttctcttcgctccgcctaaggctccgcactgaggctaaagcgcaggggagggct

SEQ ID NO: 972538 - DNA, 120 bp, Artificial Sequence
  ENSG00000251432_0 (sequence is synthesized)
cagagcgagactccatctcaaaaaaattaataaataataataatagtcacccttccacctccatagcacagctacgtcatgaactgacaccttaaaactttgttctgttttcaattatct

SEQ ID NO: 972539 - DNA, 120 bp, Artificial Sequence
  ENSG00000251432_1 (sequence is synthesized)
aattatctcttggtttctgatgcctgggtatttctttttctttcttgagagcttaagcatgaatataaaacatttcaaattttatattttatccagtatttctagctttttaatagtgag

SEQ ID NO: 972540 - DNA, 120 bp, Artificial Sequence
  ENSG00000251432_2 (sequence is synthesized)
atttatcttactctcccattttattaaaacagaaagtcttgagtaacattttaatactgagaaaaaaagcctcattattagttttagaaaaagagagacaatctgtgttgttctggaacc

SEQ ID NO: 972541 - DNA, 120 bp, Artificial Sequence
  ENSG00000251432_3 (sequence is synthesized)
aagacaaagttctagaagattctctcttgatccttaaacagcatagaaaaaccaggtaagttgactatgttcacgtttaggagtatgatggccaatggatccaaaacctatcctatatct

SEQ ID NO: 972542 - DNA, 120 bp, Artificial Sequence
  ENSG00000251432_4 (sequence is synthesized)
acatgttggtggccacattaatctgacatctgacagcaagagcgatgattgggttcactggaaatctttgtgaagtacgagtgaagtccttgtgaagtcagagtttcctcttcatgcctc

SEQ ID NO: 972543 - DNA, 120 bp, Artificial Sequence
  ENSG00000251432_5 (sequence is synthesized)
gtgtgcagctggtgatagatggaaacccttgttcataagctttgtggcactgtcggcaggatgaggggacttctggatcctcactggtcactgtggcagagtggttggtgttgtctgctc

SEQ ID NO: 972544 - DNA, 120 bp, Artificial Sequence
  ENSG00000251432_6 (sequence is synthesized)
cctagacaggaacccactgaagaatctgacattttttgatatgctggcattcattgttacagcccatcatcccagccatcaatccaggacatggggtctgtgcccacggtgggaaggagg

SEQ ID NO: 972545 - DNA, 120 bp, Artificial Sequence
  ENSG00000251432_7 (sequence is synthesized)
agggggaagctggctttgttctgacgttgggcttcttctgctccaccagtactttctgtgggggaaataggtaaagaaatggctgttcagatgagaagatgtgtcagtaaacttttgcta

SEQ ID NO: 972546 - DNA, 120 bp, Artificial Sequence
  ENSG00000251432_8 (sequence is synthesized)
cagtgatgctgcaaaacaaatcactggtgactttcagtggcacacagcaataaacatttatttagctcagggattgacaatctttttttttttttaaagggccaaatagtaaatatttta

SEQ ID NO: 972547 - DNA, 120 bp, Artificial Sequence
  ENSG00000251432_9 (sequence is synthesized)
ggtgtttcaggccatacagtctctgaactctgaacttgtagcacaacagtagccttagatgctatgcaaatggaggagcatgactgtgttccaataaaactttatttatggacactaaaa

SEQ ID NO: 972548 - DNA, 120 bp, Artificial Sequence
  ENSG00000251432_10 (sequence is synthesized)
gggcattttggggacagactctacagtttactagtggccccaggacatcctgcaaaagaggtgaaatcagtattggagaagtggtctcatgaagatgggagcacgactactacaattgac

SEQ ID NO: 972549 - DNA, 120 bp, Artificial Sequence
  ENSG00000251432_11 (sequence is synthesized)
tgctgacttctcacccaaggaagtaactgtatcccagcctaatctcagtggataagcccacagggttaaggagtaatcatcatgctccatttcgtttttgagccatcttcagcctttgag

SEQ ID NO: 972550 - DNA, 120 bp, Artificial Sequence
  ENSG00000251432_12 (sequence is synthesized)
tccttaagctttttggagacagtttgtggagaaggtcctcacaacattgtgcaacaagtgtgaaagatgtagtctccatttacggctactgaaataggctgagagagggtttcctagact

SEQ ID NO: 972551 - DNA, 120 bp, Artificial Sequence
  ENSG00000251432_13 (sequence is synthesized)
gagtgacaatagtgtggaatttggaagaatggaagagaaactgaagtggagagatggtgaaagagaagaaaaaatgaagaaagatgcttgcaaaaatactgctgtgggtcctgagatgag

SEQ ID NO: 972552 - DNA, 120 bp, Artificial Sequence
  ENSG00000251432_14 (sequence is synthesized)
gattctgggaggggacggtcagcggggagcgggatcgtcttagaccatgagggaggatgaggtgctgagagctggaagaatgaagagaaaagtggcctgatgaggaggtggaggtgtgag

SEQ ID NO: 972553 - DNA, 120 bp, Artificial Sequence
  ENSG00000251432_15 (sequence is synthesized)
aagtgacaaagagtctgtgaggagaatgaggaagggcaacccgagaaatcaagaaaaatcaggagacaaatctcctagaagccaagaagatggtggtaaactaataagtgatgagagcag

SEQ ID NO: 972554 - DNA, 120 bp, Artificial Sequence
  ENSG00000251432_16 (sequence is synthesized)
accagacagatttgggatttcagaacttttcagatgttagaaagggcatgagcatgaagatgctgacaaagctgttcctacacttcctgtgctggctgggaagggatctgattcgggctg

SEQ ID NO: 972555 - DNA, 120 bp, Artificial Sequence
  ENSG00000251432_17 (sequence is synthesized)
gaaagtaggcattctggaagtagagtccgtatctatactttatatgttccccttaggtttgatgagcaaaaagtaataaaggaaacacaaactcaggaaagaaaagatttttctaggaaa

SEQ ID NO: 972556 - DNA, 120 bp, Artificial Sequence
  ENSG00000251432_18 (sequence is synthesized)
tgagaacatcttgttggttcttagttattaaagtatttgatcacattttagaaattctgataactttgggcaagctgacaggacatagtttgagatggcgatagaacatattgtgaatta

SEQ ID NO: 972557 - DNA, 120 bp, Artificial Sequence
  ENSG00000251432_19 (sequence is synthesized)
aaccagcagcacccagtggccagcagcgtactctttcacctcttcttgggtgactttgtggaatgctccaatgtgacatctccctgtgaacgcctttcctgacaccctaaaaagtgtcag

SEQ ID NO: 972558 - DNA, 120 bp, Artificial Sequence
  ENSG00000251432_20 (sequence is synthesized)
gaatttccagcaagttccagagagcaggtttccagcaagtttggtcagtatgacaccacagcgatatctctgccattcactgaacttggattcttccttcttcagtgagagatgttcaag

SEQ ID NO: 972559 - DNA, 120 bp, Artificial Sequence
  ENSG00000251432_21 (sequence is synthesized)
aaaaagaacaacttcagtggaagaagaagaagataggagcccaggtcctgtgtttcaccaagacagccgtgcaaagcagatgctgccaaaaaggtgcaaagtggtttgtcagctcttctg

SEQ ID NO: 972560 - DNA, 120 bp, Artificial Sequence
  ENSG00000251432_22 (sequence is synthesized)
gttcatctgaagtacaccagctttctagatatgctgtcactttccttctgcagagccacagtggtgtcctgtcttctcagacctcttctcacctcaaatcacttaggactcggccaccag

SEQ ID NO: 972561 - DNA, 120 bp, Artificial Sequence
  ENSG00000251432_23 (sequence is synthesized)
acagatttgggatttcagaacttttcagatgttagaaagttcttttctaaatgtgatgaggaattacggaatcataaaatggaagcagagttaaactcagacatgtgggcactcaaggca

SEQ ID NO: 972562 - DNA, 120 bp, Artificial Sequence
  ENSG00000251432_24 (sequence is synthesized)
attaggagctttctgcgatgagaaagggatcagactgatccttaagactttatgcaaccccagagtattgcagccacctgcatgccgaaggtgtcaagagtgttctcactgctgcctata

SEQ ID NO: 972563 - DNA, 120 bp, Artificial Sequence
  ENSG00000251432_25 (sequence is synthesized)
ccaggcctgttctttaaaagtacttggaagcttctgccttggcctctttgtgcctgagttgctgtataagaatctgactaccttgctggagagaccttgtggagaagacttgaccttata

SEQ ID NO: 972564 - DNA, 120 bp, Artificial Sequence
  ENSG00000251432_26 (sequence is synthesized)
gatatgggttggtccgtttagggctgaccctggaaaaaaaaagttatatcagtcttgacattaattccgtagtcagagtaggtgagagaggagtagattagtatatagggttcccagcct

SEQ ID NO: 972565 - DNA, 120 bp, Artificial Sequence
  ENSG00000251432_27 (sequence is synthesized)
tcccagtacaaccatggactcagagttggggacactaaaaatgtacatgaagtttatgatttcactggtagagatggcccacaatgccagtttggacaggcattactctaaacgtggtgg

SEQ ID NO: 972566 - DNA, 120 bp, Artificial Sequence
  ENSG00000251432_28 (sequence is synthesized)
ggaagtcaggagacatctactccaaggcataacctctaggacagtttgtggggtatcagggaaggatatatcattggaaagatttctagttgccatacacaaataattgggcttcagttt

SEQ ID NO: 972567 - DNA, 120 bp, Artificial Sequence
  ENSG00000251432_29 (sequence is synthesized)
aatgcataattaactgttctcagtgtgttattagttggacaattggattattacattatttacattagtgtttataggtaatctgaaaacaaaaatgtgaatataatatgaactacctca

SEQ ID NO: 972568 - DNA, 120 bp, Artificial Sequence
  ENSG00000251432_30 (sequence is synthesized)
aagatttgtctctgcttaatagttttatttcaaatttgtatatcaaatgtttcattacccttttttcattttattttttagctttcaaaacaaattagcaagaggaggaaagaggagagg

SEQ ID NO: 972569 - DNA, 120 bp, Artificial Sequence
  ENSG00000251432_31 (sequence is synthesized)
gagaaactgtgcacaccaccagaatgttatagtaggcgatatcatgaaagcaatgttggaactttatactcaggttttgattgtgcatctatctctttgttgtcttatcctttatcttca

SEQ ID NO: 972570 - DNA, 120 bp, Artificial Sequence
  ENSG00000251432_32 (sequence is synthesized)
tttttaccaagtaattattgaccatcaaatgccattatggtaccaacttaagaaatggatgtaaagaattctacagggaaaaaaagcacattgtcagtgtatgaaatttatttagaagac

SEQ ID NO: 972571 - DNA, 120 bp, Artificial Sequence
  ENSG00000251432_33 (sequence is synthesized)
agttacagacacatataaaaatgatagcagcttatgtttgcgaagcactcactatatgccaagcactttctgttagctaataataatatttgctcatttaatattagctcacataataat

SEQ ID NO: 972572 - DNA, 120 bp, Artificial Sequence
  ENSG00000251432_34 (sequence is synthesized)
attaatattattagctcatttaatcctctcaacaactgtctagggtaggtactattatccctattttatggacaaggaaattaagtcaacaagagatgaaataatttgtttacagtcaca

SEQ ID NO: 972573 - DNA, 120 bp, Artificial Sequence
  ENSG00000251432_35 (sequence is synthesized)
tgtcaaaatagcagatccatttcctgcccttcttttattctactctgtattacagccaaccacatttccaggctcccttgtcctctgctatctaggagtatgatggccaatggatccaaa

SEQ ID NO: 972574 - DNA, 120 bp, Artificial Sequence
  ENSG00000251432_36 (sequence is synthesized)
gtgtgtctttgaagttctgcagttgcattatattgtggcttgctttggatttgttacatttaagctttatttatccttcctggaattcattacagtttttgaacttcaggattcaagtgt

SEQ ID NO: 972575 - DNA, 120 bp, Artificial Sequence
  ENSG00000251432_37 (sequence is synthesized)
tttaatcattgatgaaaacatttcaaccattatctcttcaagtattgcctgtcttattttcctctatttcgcattcttggaattaaatctgttggttctccttttccgtcttccatgtcc

SEQ ID NO: 972576 - DNA, 120 bp, Artificial Sequence
  ENSG00000251432_38 (sequence is synthesized)
cttaatcttccatattttccagatctttatatctctgtgcctattgagtaatgtctaaaatctgttttccagtttataaattatcttgctatatcaaatctgctatttaacctactcatt

SEQ ID NO: 972577 - DNA, 120 bp, Artificial Sequence
  ENSG00000251432_39 (sequence is synthesized)
taagttttcaatttccttgacatatacctatgtgaatgggtgggtttttacttagactaccttttcatgtagaatatgtagactaccttttcatgtagaacctagcttctatgcaaggtt

SEQ ID NO: 972578 - DNA, 120 bp, Artificial Sequence
  ENSG00000251432_40 (sequence is synthesized)
ctcaattccaatttcctgtccacttgggcccagtgcttacctcatgtttccacatgagcgtgaaatcacaagcccttgggtgaacagaatcagtaatcactggtcgggtgcagtggctca

SEQ ID NO: 972579 - DNA, 120 bp, Artificial Sequence
  ENSG00000251432_41 (sequence is synthesized)
aactggccctcgtcatgctaggaagtgtgagggcaagagctggaatacactgaggcagccttgctgttgggggttattggcagctgttgggggttagagacaggactctcatggagatgt

SEQ ID NO: 972580 - DNA, 120 bp, Artificial Sequence
  ENSG00000251432_42 (sequence is synthesized)
gaacttttcagatgttagaaaggtaaatggtatatattgcatatgtagtatttccagtagagtctgggtcagcacctcataagcaaatgtattaatattttgaccacaacatatatgcat

SEQ ID NO: 972581 - DNA, 120 bp, Artificial Sequence
  ENSG00000286753_0 (sequence is synthesized)
ggtcgccgcggcagccagtgatgcccgagcggcgggttcccaggcccaggtgtgggcgccaccgcccaccatgcgccaagcccagagcctggttgaatcgttcgccaccttgtctaccca

SEQ ID NO: 972582 - DNA, 120 bp, Artificial Sequence
  ENSG00000286753_1 (sequence is synthesized)
ttttggccattatcctgccacctccaaatcctgtttttgacacttctcgggagagagagaaaacggaaagataaaggaataaactcctcgtggtcgtagttagtgggtaaattcagatct

SEQ ID NO: 972583 - DNA, 120 bp, Artificial Sequence
  ENSG00000286753_2 (sequence is synthesized)
cgtttgaaccgaggtttttcttatctccagccaccgtatccaccaccaccagaatcgtctttttagtcatcacagctggtcgccgtcagtaccttgttcagaagcctctcgcagcttcca

SEQ ID NO: 972584 - DNA, 120 bp, Artificial Sequence
  ENSG00000286753_3 (sequence is synthesized)
tcgtgtggttatacaatccaaattccttataaagtccaaattcaagaggaggaatgcacgtttagttaagttaatgtctagaccttaccagccaatttctagctcctcagtatggaaatt

SEQ ID NO: 972585 - DNA, 120 bp, Artificial Sequence
  ENSG00000286753_4 (sequence is synthesized)
gcaactgaaaacaccccttccaaaaaaagcagtctgcatttttctctgagttttcttctccaaatttcgcacccctgaccttgcttacacactctggataccacctgctgtggagtggcg

SEQ ID NO: 972586 - DNA, 120 bp, Artificial Sequence
  ENSG00000286753_5 (sequence is synthesized)
gaagcagacatccagcgatagctaagtttcctgtcgttgacacccaagcaagacaggcgtgtacctaactgaggacctgccggtgatagaagtctcagcttttctcagagacagatgagt

SEQ ID NO: 972587 - DNA, 120 bp, Artificial Sequence
  ENSG00000286753_6 (sequence is synthesized)
cttccctttaaatgctgcaaagtgctgcatagtagatgttaaatgaaagtcagaaagaatcaaatgtgctgcaaataattgaagttcaacccaatggaaatagattaaaagagtgaaagt

SEQ ID NO: 972588 - DNA, 120 bp, Artificial Sequence
  ENSG00000286753_7 (sequence is synthesized)
gtgactgagagcagtagaagacttgttgagccgtaaggaataagaggaaaattatgttatgaagtgcaggaacagcacagacccagacgaggggatgcagcccagagccagtaacccggt

SEQ ID NO: 972589 - DNA, 120 bp, Artificial Sequence
  ENSG00000286753_8 (sequence is synthesized)
gcctcctcctccccaggaagcagcgctggctgatccccagataccatgatcacaccgtcccaggtcctgagagcgcctcataggtagacagttctttgggacttttgggacgcagcactt

SEQ ID NO: 972590 - DNA, 120 bp, Artificial Sequence
  ENSG00000286753_9 (sequence is synthesized)
gaagagaggtctacctaaactttcctcctgggagcctgtgatcatttgaaagtaacagaagaaagttgtcaggctgaggaaagtttcaacaggcacttggtgagaatgggaagcatccat

SEQ ID NO: 972591 - DNA, 120 bp, Artificial Sequence
  ENSG00000286753_10 (sequence is synthesized)
tcattgcgaaatcgcggggacagaggaggaattcacgggatcagagcactgagaaactccagaggcttctggttcaccgccctgattccacagatgtgggtcagaggcagagatggaagt

SEQ ID NO: 972592 - DNA, 120 bp, Artificial Sequence
  ENSG00000286753_11 (sequence is synthesized)
tggaatggacaagcctgccctctcatcggctctccatggctctgtcctcaggctgtttctgcaatttgacatgaggcctggccccagggaaaccagtggggcctcatctcctccctgtgc

SEQ ID NO: 972593 - DNA, 120 bp, Artificial Sequence
  ENSG00000286753_12 (sequence is synthesized)
tgctctgagatggagtcttctcagggtcagtccagctctggagcccctctccagctcggtcaccaaagctgtctggtcccagggcggtgctgagtgacaggcacaccagccagtccaatt

SEQ ID NO: 972594 - DNA, 120 bp, Artificial Sequence
  ENSG00000286753_13 (sequence is synthesized)
ggccatttcatacccaatgcatgtgactgataaagagataacaccctgtctccaagacacaggctttacataaacagctttaatgacctcttcacctagagacaagactccttagtggtg

SEQ ID NO: 972595 - DNA, 120 bp, Artificial Sequence
  ENSG00000286753_14 (sequence is synthesized)
gaacctcaggcatccgtgcaggatgtaagaaagctcccgtatatacatgaactgagaagtgtgtagaagaataaatactgtaataggtaataaaatgtatgtatttttatttatatgcta

SEQ ID NO: 972596 - DNA, 120 bp, Artificial Sequence
  ENSG00000286751_0 (sequence is synthesized)
gaattgaaactcaccaaatcaccaccaccagacaacgggatgctgagtctcattcatcatgattgcttcctgaagccttctgagttcctgtttccctacacattgttacatttcttccct

SEQ ID NO: 972597 - DNA, 120 bp, Artificial Sequence
  ENSG00000286751_1 (sequence is synthesized)
gcaacataaacccccaattttagtccatcaaggttatagatttgagactgatctcccatttccttggctgcaacacccaattatagccttcttggcaataattgttgtctcagtgattgg

SEQ ID NO: 972598 - DNA, 120 bp, Artificial Sequence
  ENSG00000286751_2 (sequence is synthesized)
ctttctttgtggccagcagcaggacctagactgaacacctgattttctggtctctcaaaacagaattttggcttttccagattggcaaatagctcttagttaaatgtggctttcaagtat

SEQ ID NO: 972599 - DNA, 120 bp, Artificial Sequence
  ENSG00000286751_3 (sequence is synthesized)
gggaaagaaaagaaaagcagttatgtttttttcccctccggcctatacaaacacatacacaccaagaagagattaacatttgtgtcagtggactggggaaggcagatccacccttaatct

SEQ ID NO: 972600 - DNA, 85 bp, Artificial Sequence
  ENSG00000286751_4 (sequence is synthesized)
ggtgggcacaatctcgtcagcttaacacgcctattctcccagcctacatctttctcccgagctggatgcttcctgccctcgaaca

SEQ ID NO: 972601 - DNA, 120 bp, Artificial Sequence
  ENSG00000286751_5 (sequence is synthesized)
tgggactcagtctggctctctttgctcctcagcttgcagacgcctattgtgggaccttgtgattgtcagttgccacagccgcttcaaccttctgcaaccagcaagtcaatagtcatcaac

SEQ ID NO: 972602 - DNA, 120 bp, Artificial Sequence
  ENSG00000286751_6 (sequence is synthesized)
atggtggccagaccatctaccaacaaaaagatcacaatttgctgaaggctccaggacttgagtggatgagtcctaaatacaatcatatttatcattataagaagaaggcaactgaagatt

SEQ ID NO: 972603 - DNA, 120 bp, Artificial Sequence
  ENSG00000232677_0 (sequence is synthesized)
ccaggtgcaaagtgggaagtgtgagtcctcagtcttgggctattcggccacgtgcctgccggacatgggacgctggagggtcagcagcgtggagtcctggccttttgcgtccacgggtgg

SEQ ID NO: 972604 - DNA, 120 bp, Artificial Sequence
  ENSG00000232677_1 (sequence is synthesized)
gaaattggccattgccacggcgggaactgggactcaggctgccccccggccgtttctcatccgtccaccggactcgtgggcgctcgcactggcgctgatgtagtttcctgacctctgacc

SEQ ID NO: 972605 - DNA, 120 bp, Artificial Sequence
  ENSG00000232677_2 (sequence is synthesized)
cgtattgtctccagattaaaggtacgacatttggaggccccagcgagaaacgtcaccgggagaaacgtcaccgggcgagagccgggcccgctgtgtgctcccccggaaggacagccagct

SEQ ID NO: 972606 - DNA, 120 bp, Artificial Sequence
  ENSG00000232677_3 (sequence is synthesized)
tgtaggggggagtgccacctgaaaaaaaaatttccaggtccccaaagggtgaccgtcttccggaggacagcggatcgactaccatgtgggtgcccacaaaaattccacctctgagtcctc

SEQ ID NO: 972607 - DNA, 120 bp, Artificial Sequence
  ENSG00000232677_4 (sequence is synthesized)
aactgctgaccccggggtcaggtccagattttgaacaaatctcgctagagattgaacagagctgcgcctggatcccgccacagtgaggagacctgaagaccagagaaaacacagcaagcc

SEQ ID NO: 972608 - DNA, 120 bp, Artificial Sequence
  ENSG00000232677_5 (sequence is synthesized)
cctggatcctcctggaatccccgatccctcttgctccctggcagagttttctagtccctcttacttgaagcatgtctttcagagcccggcaccacccatcttgagtatctggtggatttt

SEQ ID NO: 972609 - DNA, 120 bp, Artificial Sequence
  ENSG00000232677_6 (sequence is synthesized)
gcatcactcagtaactgtcacctttgatttattgatttacttgagatggagtttggttctgtccccgaggccggagtgcaatggcgtgatctctgctcactacaacctctgcctcccagg

SEQ ID NO: 972610 - DNA, 60 bp, Artificial Sequence
  ENSG00000232677_7 (sequence is synthesized)
tcactacaacctctgcctcccaggttcagagtgattctcctgcctcagcctctttagcct

SEQ ID NO: 972611 - DNA, 120 bp, Artificial Sequence
  ENSG00000232677_8 (sequence is synthesized)
gcctcccaaagtgctaggattacaggctggagctacagagcccagcctgtcaccttgatttaaatgaatgcagctttcttggtgtcttgatgtttgtgaatttctgtggagtttgatact

SEQ ID NO: 972612 - DNA, 120 bp, Artificial Sequence
  ENSG00000232677_9 (sequence is synthesized)
tttgtgaatttctgtggagtttgatactgctccttttgctgcttgtttttccagagtccccttatcacttgacgtgctgttatattatgtttgatttattacagataccccatcagcctg

SEQ ID NO: 972613 - DNA, 120 bp, Artificial Sequence
  ENSG00000232677_10 (sequence is synthesized)
agtctcttaaaggcctttatacacatatgtctacacatagggatttggatgatctcgggatcccacatcctcgctgtcccctgtccccccgcaacatcccccaccaatacctttctgaag

SEQ ID NO: 972614 - DNA, 120 bp, Artificial Sequence
  ENSG00000232677_11 (sequence is synthesized)
ttttctagtccctcctttttgtttgtgctccttaaagcccagccccatgcctgactttggttcccagtgagcattgtacatttgtggatattaaatctttggcaaagtcatttacctggg

SEQ ID NO: 972615 - DNA, 120 bp, Artificial Sequence
  ENSG00000232677_12 (sequence is synthesized)
tggagtgtagtgtggcgatctcggctccctgcaagaatctgcctcccagattcacgccattttcccacctcagcccctggagtagctggaagtacaggctcccgccaccacgcctggcta

SEQ ID NO: 972616 - DNA, 120 bp, Artificial Sequence
  ENSG00000232677_13 (sequence is synthesized)
catttctattatgatttgttctgtggaatgtcagtgacttagcggtgtttttcacatgtttataaagctgaatagttctgtatgtcagctcagcacccctagtgtcagtcatgctactct

SEQ ID NO: 972617 - DNA, 120 bp, Artificial Sequence
  ENSG00000232677_14 (sequence is synthesized)
cctgctgtgcatagatgggggcctgtccacacccaaatctcctgggttcccgctgtccgcacctgaaggtacccaccagatgtgtctgtcactgccctccatccacctttcttgtggttc

SEQ ID NO: 972618 - DNA, 120 bp, Artificial Sequence
  ENSG00000232677_15 (sequence is synthesized)
tcatgtttctgcctccctagagaccatttctctctacagcagtagtttccaatagaaatacaatgccagacacatacgtcattttagattttctagtagtcactttagaaaagtgaaaaa

SEQ ID NO: 972619 - DNA, 120 bp, Artificial Sequence
  ENSG00000232677_16 (sequence is synthesized)
actggacttcagtgtgggacctgcaggtctcaggccttctgggaagtcccagcttttcttgaatgttttctctctctggccagctcaggctggagcagtgggtgttggtgccatcctgtg

SEQ ID NO: 972620 - DNA, 120 bp, Artificial Sequence
  ENSG00000232677_17 (sequence is synthesized)
ttgtgcacccaccttcctcccagggactgtccttagggagtgactttatgcacaaacttcacatgctcttcctgcctccttcatccccataagcccccatctcagccccatctgattatt

SEQ ID NO: 972621 - DNA, 120 bp, Artificial Sequence
  ENSG00000232677_18 (sequence is synthesized)
tcttccctgtctcatttcctgttatgctgttggttttctaacctgaagggtaacttcttactccttagttttttgccttaatttctaagtcataggctactttcaggctaaaagttttcc

SEQ ID NO: 972622 - DNA, 120 bp, Artificial Sequence
  ENSG00000232677_19 (sequence is synthesized)
ctaagtcataggctactttcaggctaaaagttttcctccagccatggttttagtctcattctataagtcttgctaggtagtttattcattggaaattttttgtttttgagacagagtctc

SEQ ID NO: 972623 - DNA, 68 bp, Artificial Sequence
  ENSG00000232677_20 (sequence is synthesized)
ggtgagtcaccacaccccaccccttggcactatatttaagtgatgatatttttggacactgaggtagc

SEQ ID NO: 972624 - DNA, 120 bp, Artificial Sequence
  ENSG00000232677_21 (sequence is synthesized)
actatatttaagtgatgatatttttggacactgaggtagcctcattccacaggtttagatctgaagcattttcactattgcttctttccatgtatttcctggtttgcaggtcagtttctt

SEQ ID NO: 972625 - DNA, 120 bp, Artificial Sequence
  ENSG00000232677_22 (sequence is synthesized)
cttttaattcatcattgacacagtggtttatatggcttttaatttcaaaagattttttaaaatatctttttgccgatttttatctatgttaattttaactagacatgttccctggaagga

SEQ ID NO: 972626 - DNA, 120 bp, Artificial Sequence
  ENSG00000232677_23 (sequence is synthesized)
ccaccgtgttcacagacagtagcagcttcctcgagaagggactacgaaaggccggtgcagctgttaccatggagacagatgtgttgtgggctcaggctttaccagcaaacacctcagcac

SEQ ID NO: 972627 - DNA, 120 bp, Artificial Sequence
  ENSG00000232677_24 (sequence is synthesized)
aaaaggctgaattgatcgccctcactcaggctctccgatggggtaaggatattaacgttaacactgacagcaggtacgcctttgctactgtgcatgtacgtggagccatctaccaggagc

SEQ ID NO: 972628 - DNA, 120 bp, Artificial Sequence
  ENSG00000232677_25 (sequence is synthesized)
gtgggctactcacctcagcaggtggctgtaatccactgtaaaggacatcaaaaggaaaacacggctgttgcccgtggtaaccagaaagctgattcagcagctcaagatgcagtgtgactt

SEQ ID NO: 972629 - DNA, 120 bp, Artificial Sequence
  ENSG00000232677_26 (sequence is synthesized)
cacagccagatctgcctgacaatcccgcatactcaacagaagaagaaaactggcctcagaactcagagccaataaaaatcaggaaggttggtggattcttcctgactctagaatcttcat

SEQ ID NO: 972630 - DNA, 120 bp, Artificial Sequence
  ENSG00000232677_27 (sequence is synthesized)
gaatcttcataccccgaactcttgggaaaactttaatcagtcacctacagtctaccacccatttaggaggagcaaagctacctcagctcctccggagccgttttaagatcccccatcttc

SEQ ID NO: 972631 - DNA, 120 bp, Artificial Sequence
  ENSG00000232677_28 (sequence is synthesized)
aaagcctaacagatcaagcagctctccggtgcacaacctgcgcccaggtaaatgccaaaaaaggtcctaaacccagcccaggccaccgtctccaagaaaactcaccaggagaaaagtggg

SEQ ID NO: 972632 - DNA, 120 bp, Artificial Sequence
  ENSG00000232677_29 (sequence is synthesized)
aaattgactttacagaagtaaaaccacaccgggctgggtacaaataccttctagtactggtagacaccttctctggatggactgaagcatttgctaccaaaaacgaaactgtcaatatgt

SEQ ID NO: 972633 - DNA, 120 bp, Artificial Sequence
  ENSG00000232677_30 (sequence is synthesized)
tccagagagaaggactccctcctgcttggaagagacctcacaccgtcatcacgatgccaacggctctgaaggtggatggcattcctgcgtggattcatcactcccgcatcaaaaaggcca

SEQ ID NO: 972634 - DNA, 120 bp, Artificial Sequence
  ENSG00000232677_31 (sequence is synthesized)
acggagcccaactagaaacatgggtccccagggctgggtcaggccccttaaaactgcacctaagttgggtgaagccattagattaattctttttcttaattttgtaaaacaatgcatagc

SEQ ID NO: 972635 - DNA, 120 bp, Artificial Sequence
  ENSG00000232677_32 (sequence is synthesized)
tatcttaagactcaatataacccccttgttataactgaggaatcaatgatttgattccccaaaaacacaagtggggaatgtagtgtccaacctggtttttactaaccctgtttttagact

SEQ ID NO: 972636 - DNA, 77 bp, Artificial Sequence
  ENSG00000232677_33 (sequence is synthesized)
actaaccctgtttttagactctccctttcctttaatcactgccagatggactccatcttggctctttcactggcagc

SEQ ID NO: 972637 - DNA, 120 bp, Artificial Sequence
  ENSG00000232677_34 (sequence is synthesized)
agttcccaggaattcgtccaattgattacacccaaaagccccgcgtctatcaccttgtaataatcttaaagcccctgcacctggaactattaacgttcctgtaaccatttatccttttaa

SEQ ID NO: 972638 - DNA, 120 bp, Artificial Sequence
  ENSG00000232677_35 (sequence is synthesized)
tttaactagaccccccctctcctttctaaaccaaagtataaaagcaaatctagccccttcttcaggccgagagaatttcgagcgttagccgtctcttggccaccagctaaataaacggat

SEQ ID NO: 972639 - DNA, 120 bp, Artificial Sequence
  ENSG00000232677_36 (sequence is synthesized)
tgggacattctgggaagggtggcccaggctgtgatttgccatctactgcaggctatggatggtattcagaagggaggggagatgctgtgtgcgtgttctgaagggtttcccactaaacag

SEQ ID NO: 972640 - DNA, 120 bp, Artificial Sequence
  ENSG00000232677_37 (sequence is synthesized)
atcaaccctctccataactatttgatttttactttatctcctcgttgacttcacagtgtcagtgcagtttgtgtaaacatctctatggggtgatgcatgcagataaatgtttatgtgaac

SEQ ID NO: 972641 - DNA, 120 bp, Artificial Sequence
  ENSG00000232677_38 (sequence is synthesized)
atataaagtctgcatgtgtgggtgaacactccacatcaggtcattgtccatcattacatatctgtggtgtctggctcattcgtctcgttttctgtcattttacctacttttacctgaagt

SEQ ID NO: 972642 - DNA, 120 bp, Artificial Sequence
  ENSG00000232677_39 (sequence is synthesized)
gcacattatggccattttccttatctccctcccaaggggctgtttgctgtgtttattgactccctgtttaaaaaacatatatatatatatatatatagacgaattaggttgtaccccata

SEQ ID NO: 972643 - DNA, 120 bp, Artificial Sequence
  ENSG00000232677_40 (sequence is synthesized)
aattgcatgtttgaaaaatatttcaaagaatagtttatttttttttgctgatttttatgtatcttctaaattgtatatatttatggggtataaaatgatgttgtgatttttcaatacagt

SEQ ID NO: 972644 - DNA, 120 bp, Artificial Sequence
  ENSG00000232677_41 (sequence is synthesized)
gtggaatgagaatcaaattaacctatccgttacctcaagtacttgactttttttgtgatgagaaggctgtttatcactttcactcaccagctcctgctgtcttccatgctggggacagga

SEQ ID NO: 972645 - DNA, 120 bp, Artificial Sequence
  ENSG00000232677_42 (sequence is synthesized)
tgacaatcccgcatactcaacagaagaagaaaactggcctcagaactcagagccaataaaaatcaggaagtctccccaacaggtacaagatatcatcctgccacttgttcgaggaaccca

SEQ ID NO: 972646 - DNA, 120 bp, Artificial Sequence
  ENSG00000232677_43 (sequence is synthesized)
ctgttgccatagggtctgataatggaccggccttcgccttgtctatagtttagtcagtcagtaaggcgttaaacattcaatggaagctccattgtgcctatcgaccccagagctctgggc

SEQ ID NO: 972647 - DNA, 120 bp, Artificial Sequence
  ENSG00000232677_44 (sequence is synthesized)
aagtagaacgcatgaactgcaccctaaaaaacactcttacaaaattaatcttagaaaccggtgtaaattgtgtaagtctccttcctttagccctacttagagtaaggtgcaccccttact

SEQ ID NO: 972648 - DNA, 120 bp, Artificial Sequence
  ENSG00000232677_45 (sequence is synthesized)
gggctgggttcttaccttttgaaatcatgtatgggagggcgctgcctatcttgcctaagctaagagatgcccaattggcaaaaatatcacaaactaatttattacagtacctacagtctc

SEQ ID NO: 972649 - DNA, 120 bp, Artificial Sequence
  ENSG00000232677_46 (sequence is synthesized)
tccatctcaaaaaaaaaaaaaaggttacaaagaaacaggtgaaattagttttatttcacctaaaatgttagcattatccaaaatatcacttcaacatcttatcaaaataaaaattattaa

SEQ ID NO: 972650 - DNA, 120 bp, Artificial Sequence
  ENSG00000232677_47 (sequence is synthesized)
cagtgggctcttctacttgatggagcactccctgcgtggtgccttgtatttgtagacatgatgctgtaaatgctctttgaatgtcttgaaggcttttatgtttgaggagtttacagagaa

SEQ ID NO: 972651 - DNA, 120 bp, Artificial Sequence
  ENSG00000232677_48 (sequence is synthesized)
gcacctacaggcttcaggtcccttcttctgttgcttctttgctccttagttcctcccctaacctggtgctaaattagatcatagtgtggtccttggaccaacagtatcaatagcacctga

SEQ ID NO: 972652 - DNA, 120 bp, Artificial Sequence
  ENSG00000232677_49 (sequence is synthesized)
ggggtcaggtaggtcagatttgactttggttctggcagagggaagcgaccctgatgagggtgtccctcttttgactctgcccatttctctaggatgctagagggtagagccctggttttc

SEQ ID NO: 972653 - DNA, 120 bp, Artificial Sequence
  ENSG00000232677_50 (sequence is synthesized)
tgttagacgcctctgtgtctctgtctgggagggaagtggccctgacaggggccatcccttgagtcagtccacatcccaggatgctgggggactgagtcctggtttctggcagactggtct

SEQ ID NO: 972654 - DNA, 120 bp, Artificial Sequence
  ENSG00000232677_51 (sequence is synthesized)
ctctctctctctttttctatctctaatctttccttgttcaggtttcttggagaatctctgggaaagaaaaaagaaaaactgttataaactctgtgtgaatggtgaatgaatgggggagga

SEQ ID NO: 972655 - DNA, 120 bp, Artificial Sequence
  ENSG00000232677_52 (sequence is synthesized)
caagggcttgcgcttgtcctccagtttgtagctccacggcgaaagctacggagttcaagtgggccctcacctgcggttccgtggcgacctcataaggcttaaggcagcatccggcatagc

SEQ ID NO: 972656 - DNA, 120 bp, Artificial Sequence
  ENSG00000232677_53 (sequence is synthesized)
gagccgggggtttataccggcctgtcaatgctaagaggagcccaagtcccctaagggggagcggccaggcgggcatctgactgatcccatcacgggaccccctccccttgtttgtctaaa

SEQ ID NO: 972657 - DNA, 120 bp, Artificial Sequence
  ENSG00000232677_54 (sequence is synthesized)
aaaaaaaaaagaagaaactgtcataactgtttacatgccctagggtcaactgtttgttttatgtttattgttctgttcggtgtctattgtcttgtttagtggttgtcaaggttttgcatg

SEQ ID NO: 972658 - DNA, 120 bp, Artificial Sequence
  ENSG00000232677_55 (sequence is synthesized)
tcaggacgtcgatattgcccaagacgtctgggtaagaacttctgcaaggtccttagtgctgattttttgtcacaggaggttaaatttctcatcaatcatttaggctggccaccacagtcc

SEQ ID NO: 972659 - DNA, 120 bp, Artificial Sequence
  ENSG00000232677_56 (sequence is synthesized)
tgtcttttctgccagaagcaagtcaggtgttgttacgggaatgagtgtaaaaaaacattcgcctgattgggatttctggcaccatgatggttgtatttagattgtcataccccacatcca

SEQ ID NO: 972660 - DNA, 120 bp, Artificial Sequence
  ENSG00000232677_57 (sequence is synthesized)
ggttgattggacctcctctaaactaaactggtggtgggttcaaaacagccaccctgcagatttccttgctcacctctttggtcattctgtaacttttcctgtgcccttaaatagcacact

SEQ ID NO: 972661 - DNA, 120 bp, Artificial Sequence
  ENSG00000232677_58 (sequence is synthesized)
gtgtagggaaacctaccctcgtactgctttacttcgtttagattcttactctgttcctctgtggctactctcccatcttaaaaacgatccaagtggtccttttcctcctccctgccccct

SEQ ID NO: 972662 - DNA, 120 bp, Artificial Sequence
  ENSG00000232677_59 (sequence is synthesized)
accccacacatctcgttttccagtgcgacagcaagttcagcgtctccaggacttggctctgctctcactccttgaacccttaaaagaaaaagctgggtttgagctatttgcctttgagtc

SEQ ID NO: 972663 - DNA, 120 bp, Artificial Sequence
  ENSG00000232677_60 (sequence is synthesized)
atggagacacaaaaggtatttagggtacagatctagaagaagagagagaacacctagatccaactgacccaggagatctcgggctggcctctagtcctcctccctcaatcttaaagctac

SEQ ID NO: 972664 - DNA, 120 bp, Artificial Sequence
  ENSG00000232677_61 (sequence is synthesized)
agtgatgtggcaagtggtatttagctgttgtggtttttctgctctttctggtcatgttgattctgttctttcgatactccagccccccagggagtgagtttctctgtctgtgctgggttt

SEQ ID NO: 972665 - DNA, 120 bp, Artificial Sequence
  ENSG00000238250_0 (sequence is synthesized)
agttgccggaggttgtgagaatttgcatttggaacaagttctcaagtgatactgacactgttggtcctggggccacgctttgagaaccattctttcagctttttggaatcttaagaactt

SEQ ID NO: 972666 - DNA, 120 bp, Artificial Sequence
  ENSG00000238250_1 (sequence is synthesized)
gatggaggtaccagcaagggcttccttttccacttcaagagaaagaacaataagtttcaaaatttgaagaacacattgacctagcattgaagaaagcaaactctaagaacctcttcacca

SEQ ID NO: 972667 - DNA, 120 bp, Artificial Sequence
  ENSG00000238250_2 (sequence is synthesized)
aaagtattttattgttggaaaaacacctgatttcagaagtttgcaatttacgtacatagaaagtttatcaaagataacaatgattctgttttccttacaataaatgaattctaaaacatg

SEQ ID NO: 972668 - DNA, 120 bp, Artificial Sequence
  ENSG00000224478_0 (sequence is synthesized)
gcgggcggaggcgcagaggcaagaaggagctggtctctttgagggcgaaggcggttcatagggtgtgtgcacatctaatccctctccttcgagagtgccgccaccctcattcttagggaa

SEQ ID NO: 972669 - DNA, 120 bp, Artificial Sequence
  ENSG00000224478_1 (sequence is synthesized)
ggggcggggaagggttcctgggatcgtcatcctacctaagcaccccagtgagtgttcagttccctgccgcagctagtgccctgtgcccagtgggaagccacgtggccaggcctagcgaga

SEQ ID NO: 972670 - DNA, 120 bp, Artificial Sequence
  ENSG00000224478_2 (sequence is synthesized)
tctccgggcgcggtggcccgtgtgtgcctctagccaggccgccgtggccagggcttggtggtgtgtttgacgctaaccttccatgtcaactctgtgcgtttccccaacaccccgcactga

SEQ ID NO: 972671 - DNA, 120 bp, Artificial Sequence
  ENSG00000224478_3 (sequence is synthesized)
ccctgtcctcctggctgctggtgacccctgactccctgcctcctgactgctggtttttatgggagaggaagaagtggggagtatgaagaccccaggaaaagagtttttaaagaggaggag

SEQ ID NO: 972672 - DNA, 120 bp, Artificial Sequence
  ENSG00000224478_4 (sequence is synthesized)
atccaatttcacacctttgagtagtccagctctggaatccagtacaggatttttggaagattcaccaagatccatctttccttttcctgctattctttccaaatagattacctggcactt

SEQ ID NO: 972673 - DNA, 120 bp, Artificial Sequence
  ENSG00000224478_5 (sequence is synthesized)
cagacaaggagtgtccctgtcctcatggtgctacatgaaaagggatcaggacagcatagtgtgtcctctgtcttgagaagttcgcatccagctctgccatggaccagccatgctcatgga

SEQ ID NO: 972674 - DNA, 120 bp, Artificial Sequence
  ENSG00000224478_6 (sequence is synthesized)
ttgcctctcattttgctacggacaggagacaggaaaatactgggtagaagagggcggttcccgacaaaggccccaacctcaagcctgaagacccacgaccctaaatgaggacagccattt

SEQ ID NO: 972675 - DNA, 120 bp, Artificial Sequence
  ENSG00000224478_7 (sequence is synthesized)
ctgattttgtgcccaaaaatttgccttttggcctgccacacccaacatcttgcccctatataaacccgagaccttagcgggcacacacacaatcagccaaatgttgggattagcagacca

SEQ ID NO: 972676 - DNA, 120 bp, Artificial Sequence
  ENSG00000224478_8 (sequence is synthesized)
gtggaccagcggaccagcagaccagttaacggtggaacaacgcagcagagaaagagagaagaggagggatgtctgaatgccaaggggaattcggccgcgggcagttagaaaagtctggct

SEQ ID NO: 972677 - DNA, 120 bp, Artificial Sequence
  ENSG00000224478_9 (sequence is synthesized)
gctgggcggcccgactctaggggaagaccaccttcccactccatcccctgttctggctccccatccatctccctgagagccacctctaccactcaataaaacctttcattcatcctttga

SEQ ID NO: 972678 - DNA, 120 bp, Artificial Sequence
  ENSG00000224478_10 (sequence is synthesized)
agcccacggctgaccggagtcggtggctgataatgtgacttctaatgagttcattcaccaaatactaaataagcaaaattacaagtgattttcttattttgagacagggtctccttctgt

SEQ ID NO: 972679 - DNA, 89 bp, Artificial Sequence
  ENSG00000224478_11 (sequence is synthesized)
cctgtctctgcctctggagtagttgggagtacaggcacacgctaacatgccaggctaatttttttttttttaaataaatggagttttgc

SEQ ID NO: 972680 - DNA, 120 bp, Artificial Sequence
  ENSG00000224478_12 (sequence is synthesized)
ggagtacaggcacacgctaacatgccaggctaatttttttttttttaaataaatggagttttgccatgtttcccaggctgattttgaactcctaggctcaagcgatctgcccaccttggc

SEQ ID NO: 972681 - DNA, 120 bp, Artificial Sequence
  ENSG00000224478_13 (sequence is synthesized)
tgtcagccactgcgcccagcccacaagtgaaaattttaaactatattttgttagagagagaagagggaacccgaggcctggataacatgcaagatcttcataagacttcatagcaacagc

SEQ ID NO: 972682 - DNA, 120 bp, Artificial Sequence
  ENSG00000224478_14 (sequence is synthesized)
attcacttgtcatattttgatgatcaaattggagaaaatacctcttaaattcaaacctaggggcaagattacctggcacttgtccagtctttctgcagtcaacatcgcccagattccatg

SEQ ID NO: 972683 - DNA, 120 bp, Artificial Sequence
  ENSG00000224478_15 (sequence is synthesized)
agtcggtgaccctcctgcccatgcctgggaggatgtgagctctggtgccccaggcagcctggaattgtgccctgggagtggggctggggcaagggagaggctgcagtgtcattacaggga

SEQ ID NO: 972684 - DNA, 120 bp, Artificial Sequence
  ENSG00000224478_16 (sequence is synthesized)
tgtcctcctttcctggaggtcactttgggcttgaccacgggctgtccactgcctggcgtggtctctgatttgctgctctctgcggacccttggttgtgctctttcgggcttatctaacct

SEQ ID NO: 972685 - DNA, 120 bp, Artificial Sequence
  ENSG00000224478_17 (sequence is synthesized)
tactcatgcaaagacccgaagctctggcattccccatatctgacctgggatccctagtctttctcattatctgtgctaccccctcccagagtgtcccggggagaatcaccgcatccactt

SEQ ID NO: 972686 - DNA, 120 bp, Artificial Sequence
  ENSG00000224478_18 (sequence is synthesized)
gcaacacactggtttggcatctagcgggttgtgcttgcagaacagcaggctggctccgtgcacctgctcagtggggctgggctttagcaacctgcattgaggctgctcttcttaactttt

SEQ ID NO: 972687 - DNA, 120 bp, Artificial Sequence
  ENSG00000224478_19 (sequence is synthesized)
ctctaacttgcttcatgaaagttaattctgctgggaccccacgaggcagcggagagcccactctgcccatgattggtgccctgggctggcacgcagagtttaatggaggagcccgggaga

SEQ ID NO: 972688 - DNA, 120 bp, Artificial Sequence
  ENSG00000224478_20 (sequence is synthesized)
gagggatgcctgagaaccagggatgtgggctggagcagtgccacctcctctaactcacccgcaagcccagccaaccggctaaaccttccccacagagcctcagtctccttatctgtaaaa

SEQ ID NO: 972689 - DNA, 120 bp, Artificial Sequence
  ENSG00000286754_0 (sequence is synthesized)
taatggtgacttgggtgtcttagcctctgaaaaaaaccccaaaccatcacacagatatttcttctctgatatgtgctgcaggaaaacaggaaggtgaggagactctctgggacttacttt

SEQ ID NO: 972690 - DNA, 120 bp, Artificial Sequence
  ENSG00000286754_1 (sequence is synthesized)
tcagccaaaactaacctcacggcccttttcaaatagttgcaaataaagactcaaagtcacacaaactctctacctcactgcaagcacacactgacctgcttccccatgcagtctctcctc

SEQ ID NO: 972691 - DNA, 120 bp, Artificial Sequence
  ENSG00000286754_2 (sequence is synthesized)
atggagttatagtcccaaagggtgaaaatgggaaagacagtgttcaggtgatatccatgcacatttgtgcaagaaaaacaccaactcgaagttgaagcctggctccttaaggacagaaca

SEQ ID NO: 972692 - DNA, 120 bp, Artificial Sequence
  ENSG00000286754_3 (sequence is synthesized)
tccctgcacagggccctactgaaaacaacagcacttctgtgaagtttttattggccctcctgttgagagctgcagcctgagccattcctgacgggaatgtgtcctggccctcctctgact

SEQ ID NO: 972693 - DNA, 120 bp, Artificial Sequence
  ENSG00000286754_4 (sequence is synthesized)
cagaggccttgctgatgcaatcaagtacattgagaggaattttgaggattaagcagagactgctaaggtgagaactgtttaaagaaagcacagcagttgacaagccttttcccattctga

SEQ ID NO: 972694 - DNA, 120 bp, Artificial Sequence
  ENSG00000232896_0 (sequence is synthesized)
gaagcccacagaccgacgctgcttggctccctggattcagcctccttcctagggagtgaccaatctgagaaacccaggagctgtgctcctccgagaaaaagagaagctgaagagccctca

SEQ ID NO: 972695 - DNA, 120 bp, Artificial Sequence
  ENSG00000232896_1 (sequence is synthesized)
ctgacatccaaggcacatggacataccacagtacaggtccctgctgaaaacacagaaaatgcagaagaatccccggaacacaagtgaccaccagagcgctgtactgcactttttctagcc

SEQ ID NO: 972696 - DNA, 120 bp, Artificial Sequence
  ENSG00000232896_2 (sequence is synthesized)
ttcagaagggaaatccagaataagctaaacctaatggagtgaaaaaagagaacattctcatctctttagctttggcaagatgccagacaacctgtgccaatatcccagaatccatcacct

SEQ ID NO: 972697 - DNA, 120 bp, Artificial Sequence
  ENSG00000232896_3 (sequence is synthesized)
gtcgagcttttactagaaacatcaggtttcccacatcctggggtacaaaattcatcctcaatgctggttacctgccccatgcagatgctggcatttaaaatgttttgtcggtgggtcacg

SEQ ID NO: 972698 - DNA, 120 bp, Artificial Sequence
  ENSG00000286755_0 (sequence is synthesized)
acatgatgggcagagcaggtttccatcgtgaatccagccattcatctggatactgacagggaggacctgcccagcccgactacacaaatatgaagtatcttggacccaaactttcagacc

SEQ ID NO: 972699 - DNA, 120 bp, Artificial Sequence
  ENSG00000286755_1 (sequence is synthesized)
ttgaggagaacaagaaaccttcaaacaggaaaaaaatagatatataaaaataataaatatcaggcctagctgaggaccctgagggcagaggtgaggtcccgccttcccacgctgtcagca

SEQ ID NO: 972700 - DNA, 120 bp, Artificial Sequence
  ENSG00000286755_2 (sequence is synthesized)
ggcgtcacggtggaaactagctgaggaccctgagggcagaggtgaggtcccgccttcccacgctgtcagcaggcgtcacatcacggtggaaactagctgaagaccctgagggcagagatg

SEQ ID NO: 972701 - DNA, 120 bp, Artificial Sequence
  ENSG00000286755_3 (sequence is synthesized)
aagtcccgccttcccacgctgtcagcaggcgtcacagtggaacagtgatgctttcagacatgcaagtctcaacattgttctccgtcacatactcctcaaatctccactagaagatatgtt

SEQ ID NO: 972702 - DNA, 120 bp, Artificial Sequence
  ENSG00000286755_4 (sequence is synthesized)
ccattaaaataaaaaaaatccaaaaaagaatatgacacaaaatccatgaaggaggggatccaatatgagagagacagagggaccagagggacctccaggatgatcctgactcgagatccc

SEQ ID NO: 972703 - DNA, 120 bp, Artificial Sequence
  ENSG00000286755_5 (sequence is synthesized)
ctcaagatgaaatggatagaatacctcaggtatctggttctactgaaaggagatgagcccaactgggagaagagcttagaattgaattagtgctaaatacaaagaaaactaattgcaaaa

SEQ ID NO: 972704 - DNA, 120 bp, Artificial Sequence
  ENSG00000286755_6 (sequence is synthesized)
aaacaaggtcttaaatccagagaaaacgaaatactggggagaacggggaagtaatgattgcatgctaccaggcgccacgtctgcatagtcctggtgtcaaagcccacagaatgtagaaca

SEQ ID NO: 972705 - DNA, 120 bp, Artificial Sequence
  ENSG00000286755_7 (sequence is synthesized)
cccagagtgaaccctaatgtgaacatggacttcggatgatgatgtcggttcatcgaaacacccagagtgaaccctaatgtgaacatggacttcggatgatgatgtcggttcattgaaaac

SEQ ID NO: 972706 - DNA, 120 bp, Artificial Sequence
  ENSG00000286755_8 (sequence is synthesized)
acccagagtgaaccctaatgtgaacatggactttggatgatgatgtgggttcatcgattgtaccaaaaatgcctctgtggtacaggatgctgacggtgcggaaggccacgagtgtgtgga

SEQ ID NO: 972707 - DNA, 120 bp, Artificial Sequence
  ENSG00000286755_9 (sequence is synthesized)
gcaggggtatatgggaactctctgtaccttccacttaaatttgttgtgaacctaaaattgctctaaaaaataaagtctattaataataataaaaaagaaacctcaaaataacaccaaaaa

SEQ ID NO: 972708 - DNA, 120 bp, Artificial Sequence
  ENSG00000248567_0 (sequence is synthesized)
ctttaggacagactggagaaaaagaaactcttctcagttgactgggatgactagaggctggtaatgacaaggggctgaagttttcactaccatgagttgtcacatctaatggacttgaca

SEQ ID NO: 972709 - DNA, 120 bp, Artificial Sequence
  ENSG00000248567_1 (sequence is synthesized)
gccggagtgtttttaaacactaaacctagctgggtgtttctcaactctgctgcatcttagactcatgtggaaaattttatcccaaagaagggaaagagggcagtggacaggaggagagaa

SEQ ID NO: 972710 - DNA, 120 bp, Artificial Sequence
  ENSG00000248567_2 (sequence is synthesized)
atgtgctcacttggctccagagcctataaccgagtgacatctaaaaacagagttatccaagaacactcaactggtaagggaagaacgcctcaattgagcatgtgtacaactccagtaaac

SEQ ID NO: 972711 - DNA, 120 bp, Artificial Sequence
  ENSG00000248567_3 (sequence is synthesized)
ccctcccaactgctggcagaccactctacatgcagacagctcaccccaaggagagaatcaggggagaagagacacaaccgcctgaaagcatgccaacatattccccaagtcaaaaggttc

SEQ ID NO: 972712 - DNA, 120 bp, Artificial Sequence
  ENSG00000257176_0 (sequence is synthesized)
aattcagattctttccttagcttctatttccccatttgtaaaattgggatgatgaggacatcttccttgggtagctgtgacaatgaaaatgggatcatcatgcatcagccttagccccac

SEQ ID NO: 972713 - DNA, 120 bp, Artificial Sequence
  ENSG00000257176_1 (sequence is synthesized)
gagtgccacagtaaactctcaaagaatgaagtggggtttagaccctaaatgcttcagtgtgagctgtgaagccccacagcttggctggatcaatctggacttcgggcagatgcgcactaa

SEQ ID NO: 972714 - DNA, 120 bp, Artificial Sequence
  ENSG00000257176_2 (sequence is synthesized)
gggctgcttacctagaggagccacgtttctcctgggcagtcaagataactgccagaggagccacatgctgggtaaatcctgaacccaaagtggaattttgccctagtataatgggttcat

SEQ ID NO: 972715 - DNA, 120 bp, Artificial Sequence
  ENSG00000257176_3 (sequence is synthesized)
attcgattggctgcacttagctataaatcctgaggaggagaagaagaaagacatcagaaagtaattggactagaagaaccttagtttggaagcaaaacacagaatccagaaactatgaag

SEQ ID NO: 972716 - DNA, 120 bp, Artificial Sequence
  ENSG00000257176_4 (sequence is synthesized)
aaatttacatgcacacatatgtatacaagccatgagagggaaatgggaatgtacctgagagtgtcgtcaaagcgtacagtggctgcacagtgaaatattatgtttgtacaggagagaagc

SEQ ID NO: 972717 - DNA, 120 bp, Artificial Sequence
  ENSG00000257176_5 (sequence is synthesized)
tcctgcatgtcctctttgctgatggcaaagtcattctgattgagatctgcataaatagctctgatcttctcatgcacatttggacaaacttctttgactttctcaaatagctgaaacata

SEQ ID NO: 972718 - DNA, 120 bp, Artificial Sequence
  ENSG00000257176_6 (sequence is synthesized)
aatatagatcaatatacaaaaaatagcaccatcattatcacattgttcttgtttataacaacctgcttaattatactcaaaaactggttttagttgtaataacattacttaaagaagaca

SEQ ID NO: 972719 - DNA, 120 bp, Artificial Sequence
  ENSG00000257176_7 (sequence is synthesized)
cctgtaatctcagcactttgggaagccaaagcagggagatcacttgagcccaggagttcgacaccagcctgcgcaacatgggttctgtggactctttcactttggcctgtgaagacttct

SEQ ID NO: 972720 - DNA, 120 bp, Artificial Sequence
  ENSG00000257176_8 (sequence is synthesized)
tcactttggcctgtgaagacttctgactactggaaagcaagaagtaggagatggtttcagcatccacccttctcacgatggggttccttacatatgataatctgatgcctaccagaagaa

SEQ ID NO: 972721 - DNA, 120 bp, Artificial Sequence
  ENSG00000257176_9 (sequence is synthesized)
atccaaactcttctttattgcttgacacttttccaatcagcattgacttcattcctggcaagctgatgtaacatgaatgagttatgaagccaaagatcgcaagaagagcacacttcttaa

SEQ ID NO: 972722 - DNA, 120 bp, Artificial Sequence
  ENSG00000257176_10 (sequence is synthesized)
cagccacttcagaggtgacagccagggaataagaaataaggaagaactttccagaggatggagccaccacaaataataatggaaaagaaggttcctcccagagattagatttagaggcta

SEQ ID NO: 972723 - DNA, 120 bp, Artificial Sequence
  ENSG00000257176_11 (sequence is synthesized)
tttaaggaatttccccactcccagtgtaggaagcttctcaatactcgctaatcaggatttccttatggttatattctagggactgctgcttgcctgcctgtcttctcttttttgaataga

SEQ ID NO: 972724 - DNA, 120 bp, Artificial Sequence
  ENSG00000257176_12 (sequence is synthesized)
aggtgtctttgtttgtttgattttattttttcttcaacttcgctgttctacaatgacaagagatagaacagagacattttctacctcaacattgggaggcagaaaattcacctttttatc

SEQ ID NO: 972725 - DNA, 120 bp, Artificial Sequence
  ENSG00000257176_13 (sequence is synthesized)
caagaataccaaaccagaagctgaaatatctggatctgatagagaggatagtctattcccccttggactttggactggatgcaataatggtatgagaccctggggtaggaatgagtgtct

SEQ ID NO: 972726 - DNA, 120 bp, Artificial Sequence
  ENSG00000257176_14 (sequence is synthesized)
tctatgtgtgggaaagagaggaaagcagatatttggcgacctaaaaagaaggccatggcagaacctcattagttgttcaacaatcctattttccttttctcctggacacacagctatgca

SEQ ID NO: 972727 - DNA, 120 bp, Artificial Sequence
  ENSG00000257176_15 (sequence is synthesized)
ttttccagccatccttgtggttagatgcccagtgacagttctgagaatggaatatggacagatgtgataggcacttctgggcctgggccacaaaaaccttccacatgatgtccagtgcct

SEQ ID NO: 972728 - DNA, 120 bp, Artificial Sequence
  ENSG00000257176_16 (sequence is synthesized)
cttttaccccactgacagttttttattgtcatccagagagaccttggatggtttagaagccatgtgtagaagatggcaaccttcccttagcatggatccttgaatgactgtggagtgcaa

SEQ ID NO: 972729 - DNA, 120 bp, Artificial Sequence
  ENSG00000257176_17 (sequence is synthesized)
tgccttctaccaattacacctactgtgtttgagaatcaaatttcatttgtattaagctactgatttggggggtttatctccttcagcacccacattagtacaactcatgcagaatggaga

SEQ ID NO: 972730 - DNA, 120 bp, Artificial Sequence
  ENSG00000257176_18 (sequence is synthesized)
gttaatgtgaacacatatggcacagactggtgaaacctaggactttaagatgatagatgaatttctgattatactttcctttcccgcaaaaagtttttttcaaattaaatgttgtaatat

SEQ ID NO: 972731 - DNA, 75 bp, Artificial Sequence
  ENSG00000257176_19 (sequence is synthesized)
tctgacctcgtaatccgcccaagcagcgagaaagcaccttttaatctctaccactgccaagtacgtgagtagact

SEQ ID NO: 972732 - DNA, 120 bp, Artificial Sequence
  ENSG00000257176_20 (sequence is synthesized)
tggataaaaattgtgtctgagagactttcaaggagttacttagccattttgagctttttgctccgtgattagtatagcagtgataataatatcaaccttacaatattacgttatggaatt

SEQ ID NO: 972733 - DNA, 120 bp, Artificial Sequence
  ENSG00000257176_21 (sequence is synthesized)
aaatgtctgtggaagtgtcttcctcacagtaattgctcaataatgattcatgtcctcccttcccttcttaattcagatttatttacatatgctcaatagagcaataaatatttgtgattc

SEQ ID NO: 972734 - DNA, 120 bp, Artificial Sequence
  ENSG00000257176_22 (sequence is synthesized)
aatatagttttgcatctgtttttgcaccaatatattacaaggctttttgtgtcatttactattttataaaacatgattcttaatgcctggatacttgtctaacacttgtatatattgttt

SEQ ID NO: 972735 - DNA, 120 bp, Artificial Sequence
  ENSG00000257176_23 (sequence is synthesized)
atttagtcattcctctattgtggaacatttaaattggatccaagtttactataagtaatactacaataaaaatatctatacattatttgtggtgtctctggctgttgtcttggagtgaca

SEQ ID NO: 972736 - DNA, 120 bp, Artificial Sequence
  ENSG00000257176_24 (sequence is synthesized)
ccttaattatctttgtgagaaagtcctcaagaatcctgccattaattcatatactttccccccactggtatgtccctttaagtgctctgaaaatacttaagaaacttagtaataagaaag

SEQ ID NO: 972737 - DNA, 120 bp, Artificial Sequence
  ENSG00000257176_25 (sequence is synthesized)
aaaattaatcttctttttcgattcttcacttctagttctctgtggccaatggattttttaaaatccctttgtctagagcatctcccatttaatagtttctctttgacagcagggaaactg

SEQ ID NO: 972738 - DNA, 120 bp, Artificial Sequence
  ENSG00000257176_26 (sequence is synthesized)
gaagtcagatgtgatatctatgcataccataaaaggaaaagaaggaagcagatgtctgaattttgatacatagaacagatgtccttttgatcacatttcctgggggatgtagttgtaatc

SEQ ID NO: 972739 - DNA, 120 bp, Artificial Sequence
  ENSG00000257176_27 (sequence is synthesized)
aaaggccaactggtaacatttttggttactatgttttaaaaaaaaatttccaagcctcacatagctgacatggtttattaccttcaggaacactgtagtacttgcagtgagttagaattc

SEQ ID NO: 972740 - DNA, 120 bp, Artificial Sequence
  ENSG00000257176_28 (sequence is synthesized)
attcattattatgtgtgactggagagatgtattgcttaaaagctataccaggccctacttaggaataagttacaactgcattaaatcactctgtttgtgtcaaactcgttaaagttaaat

SEQ ID NO: 972741 - DNA, 120 bp, Artificial Sequence
  ENSG00000257176_29 (sequence is synthesized)
ggcagaatctagagggggacttgattaacatgagataataaatatttgcagaatctgatgcctaccagaagaaactctgacccagacaggatcattgcataagaggttggttttagaagt

SEQ ID NO: 972742 - DNA, 120 bp, Artificial Sequence
  ENSG00000257176_30 (sequence is synthesized)
ccagcctgggtgacagagctagacttcatctcaaaaaaaaaaaaaattatattgcacaatataaaacattattttatacttaggatcacatttgatctttgcaaatccatatgaaatagc

SEQ ID NO: 972743 - DNA, 120 bp, Artificial Sequence
  ENSG00000257176_31 (sequence is synthesized)
gcaaatccatatgaaatagctattattatcagatacagtttatgaataataaaaacaagactcatatgggttaggtaactaggccatggtctctctaccaagctctatctctctgattga

SEQ ID NO: 972744 - DNA, 120 bp, Artificial Sequence
  ENSG00000257176_32 (sequence is synthesized)
ggagagagtatctagagcatcagtgttctttttactgccttatgctacctcccagtacaggtataacaactaaacctacaagtaacctgcaattgagggtttagacttttagcatcttta

SEQ ID NO: 972745 - DNA, 120 bp, Artificial Sequence
  ENSG00000257176_33 (sequence is synthesized)
accatccaaaacatagctgtgggaccaaaaagcaaaaaacagtttacaaaagcccatatttattgcaccaagaaaaagccatgtctgtgaaatattgcttagaatttgtgtactaaactc

SEQ ID NO: 972746 - DNA, 120 bp, Artificial Sequence
  ENSG00000257176_34 (sequence is synthesized)
agcataatgaattaacaaactcagtgacctcattttctcctagattacaataaatggaagacttaaaatgatgagaaaaataaacacagaaaacctcaattaacagggtagaggatgacc

SEQ ID NO: 972747 - DNA, 120 bp, Artificial Sequence
  ENSG00000257176_35 (sequence is synthesized)
tattgaaagattgggcattcatgtgtgggaggtaaaggcaagtcctgtgagtggtaggcagtccgaggcaagtgttctctctttttgttgtttgattctaaatttatgacaactgaagaa

SEQ ID NO: 972748 - DNA, 120 bp, Artificial Sequence
  ENSG00000257176_36 (sequence is synthesized)
agggccttggcctggtctggatcaacttggtatggagcccatgagaaatgaaagatgattcataaacatacctaattcatcccaggcaacagcagaaatgaccatgaaaaatgagccatc

SEQ ID NO: 972749 - DNA, 120 bp, Artificial Sequence
  ENSG00000257176_37 (sequence is synthesized)
tgagaattctcaacgattcttggagaatgtcattaattacatttttattacagggcagggatgcccaagctgacatatgggttacaaaggcaaagtagaatttccctctatgggttttgt

SEQ ID NO: 972750 - DNA, 120 bp, Artificial Sequence
  ENSG00000257176_38 (sequence is synthesized)
taatgtaaaatataaattaataagctttttgcttttactaatatgaaacatacccatcaattagttgtcttcaattcagaaagaactaaactagagttcgatagtatcttaaatccaaaa

SEQ ID NO: 972751 - DNA, 120 bp, Artificial Sequence
  ENSG00000257176_39 (sequence is synthesized)
aataaaaataaaaacccaaccagcagccatttgctgaattcctgagtgcttaggagtctccatttctagtctagcaaatgtcttccagttgcaattttaaacatttttcccagatctttc

SEQ ID NO: 972752 - DNA, 120 bp, Artificial Sequence
  ENSG00000257176_40 (sequence is synthesized)
aagaaacctgtaatagtatcaagtccagcacacaaagctagctttctgtaagcaatcagtctcatctacccacctttactttatacagcctcctaaattcaaccttagaataaaaagtac

SEQ ID NO: 972753 - DNA, 81 bp, Artificial Sequence
  ENSG00000257176_41 (sequence is synthesized)
ccagaagattgcttgaaaccaggagtttgagatcagcctgtacaatgtagtgagaccaccatgtcttaaaaaaaaaaaaat

SEQ ID NO: 972754 - DNA, 120 bp, Artificial Sequence
  ENSG00000257176_42 (sequence is synthesized)
ggagtttgagatcagcctgtacaatgtagtgagaccaccatgtcttaaaaaaaaaaaaattaaaaacaatagctgggcatggtgtcacatatttgtggtcccagctacttgggaggctga

SEQ ID NO: 972755 - DNA, 120 bp, Artificial Sequence
  ENSG00000257176_43 (sequence is synthesized)
ccgggaggttgaggctgcagtgaacaatgatcatgcagtgccctccagccttagtgataagagtgagaccatgtctcagaaatttaaaaaaagtctatcctctgcctctaagggactttg

SEQ ID NO: 972756 - DNA, 120 bp, Artificial Sequence
  ENSG00000257176_44 (sequence is synthesized)
ggactttgttgttataaaactactgaaaatttgtataaatatatcttattaaatataaacatattttattaaaactattgaaaatatatataaaccaggtgtggtggctcacacttgtaa

SEQ ID NO: 972757 - DNA, 89 bp, Artificial Sequence
  ENSG00000257176_45 (sequence is synthesized)
tcccatctgtacaaaaatttgaaaattagccagctttggcagtgtgtgcctgtattcccagcaactcaggaggttgaggcaagagaatc

SEQ ID NO: 972758 - DNA, 120 bp, Artificial Sequence
  ENSG00000257176_46 (sequence is synthesized)
gtgcctgtattcccagcaactcaggaggttgaggcaagagaatcctttgaacccaggagtttaaggttacagtgagctgattgtgaactgtactccaacctgggcaacagagtgagaccc

SEQ ID NO: 972759 - DNA, 120 bp, Artificial Sequence
  ENSG00000259899_0 (sequence is synthesized)
gctactgcctctagaagactgtctattgtgccttgaatacacagcattgactttgcagggtcatcttgctggataacatagcaccacccaaacaggagaattgaggctgagactggatca

SEQ ID NO: 972760 - DNA, 120 bp, Artificial Sequence
  ENSG00000259899_1 (sequence is synthesized)
ggcccagtggaacatagcgaaatgagaataagctttcgtgttagaatcctgcctatgtgatctccagcaacttaacatctctgagccacttcatttatctggagaatggggctaaatctt

SEQ ID NO: 972761 - DNA, 120 bp, Artificial Sequence
  ENSG00000259899_2 (sequence is synthesized)
gtgccccgtgaaatctaattccactgtgaactatgctgacatccatcaaggcctttacctcctacctcttggtttgaaatgggtctccaagacttccaccatccacaactgatccagaaa

SEQ ID NO: 972762 - DNA, 120 bp, Artificial Sequence
  ENSG00000259899_3 (sequence is synthesized)
tggctctggcagtacccaagggttccttgaaggcaggtctgggtctggttctccggatcccaacaccacgaggtactttattttaaaaggattaaaaaagccactgcttgtcaaatcttg

SEQ ID NO: 972763 - DNA, 120 bp, Artificial Sequence
  ENSG00000259899_4 (sequence is synthesized)
aactaaaggactaacaccaattctcataacatccttaagccggccatgtgaaatgggtgctgtaattaccatcctaatcttaagggcatggaaaataaagcacagagggtaaatcctatg

SEQ ID NO: 972764 - DNA, 80 bp, Artificial Sequence
  ENSG00000259895_0 (sequence is synthesized)
gttggagggaggggcggccggctcgcggtgacctcgatgggagggggcctcgcccgcggctcagggcgcccccggctccc

SEQ ID NO: 972765 - DNA, 120 bp, Artificial Sequence
  ENSG00000259895_1 (sequence is synthesized)
gaaggcggcggtcagaagccccaggcccgcactgagcgcggccagcgacgagccctgggccaggtccaggcggggtccccgcagcgagaaggtgatggccgtggcagccgcaccagccag

SEQ ID NO: 972766 - DNA, 120 bp, Artificial Sequence
  ENSG00000259895_2 (sequence is synthesized)
aaggtgatggccgtggcagccgcaccagccagcacggccacggcaccgaacggcagaatgcagcgaggccacgagcccccagcgccgccggtggccaagagcagggcgcgcagggccccg

SEQ ID NO: 972767 - DNA, 120 bp, Artificial Sequence
  ENSG00000259895_3 (sequence is synthesized)
gaggcgggcgccgctgggggaggctcgagcgcgctcatgccgccaacgcggtggccgcgctcggtgggtggtgtggacgcccgcgcagtcccagtggcgttccaggctcgccacgtcaga

SEQ ID NO: 972768 - DNA, 120 bp, Artificial Sequence
  ENSG00000259895_4 (sequence is synthesized)
cagagcccattggctccagaggcggtgacgccagccgggagcccgaggagtcagctgctacctctgggttttggcggggaatcggggtgggcgggcgttagtccgaggaggcggcttgtc

SEQ ID NO: 972769 - DNA, 120 bp, Artificial Sequence
  ENSG00000259895_5 (sequence is synthesized)
tttcccgccctggactcctgtgttggggcctcctcaggacccccacaaagctatctaggccgcctccctgctccaggacaccactgtcctctgggttggcccccgggattggtggatcat

SEQ ID NO: 972770 - DNA, 120 bp, Artificial Sequence
  ENSG00000259895_6 (sequence is synthesized)
tgagtcagtgcacatctggctcccatcagggcctggccggggtaggggggatagcacccctgtcctcctgaggcagacatccagtaggcatgggggatgagccatgagccaagtcagcca

SEQ ID NO: 972771 - DNA, 120 bp, Artificial Sequence
  ENSG00000259895_7 (sequence is synthesized)
gtgaaataacgtcaggtagagaccacctgctctggaaagccacgggggtgtacggtcgcagcgtggttgggggtttcaaatgagtcagtggctcctgcagatagaggcacctgggcataa

SEQ ID NO: 972772 - DNA, 120 bp, Artificial Sequence
  ENSG00000259895_8 (sequence is synthesized)
gcctggaggcagcaatggggttgccgggaggggcgaggctggctgatctgcacaaggggtgcgaccctggggctgctgccaggctgcggtggcagggggtggagctgccctgtccctgga

SEQ ID NO: 972773 - DNA, 120 bp, Artificial Sequence
  ENSG00000259895_9 (sequence is synthesized)
ggcgccccctcaatgcaacgaggaccatggtttttggtttcctgtcttggtctctgtcatctggtccccagcagccctcaacttgggactctgggtccgagcgtgtttctggcccgctgg

SEQ ID NO: 972774 - DNA, 120 bp, Artificial Sequence
  ENSG00000259895_10 (sequence is synthesized)
actataaggccctttacaagcacgacctacctgcgacgctccatctggttctcagaagacccggctttctccaggtgtcatccacctcctgtcctgctgccctgtccagggggggcacct

SEQ ID NO: 972775 - DNA, 120 bp, Artificial Sequence
  ENSG00000259895_11 (sequence is synthesized)
tggtgaagaggccggtcatcttccctgtcgcaggtccctgcccagagcagcgcttggtggagctccggcactgtccacacagagcacctggccccagctcccaaaatgtctgggatgcct

SEQ ID NO: 972776 - DNA, 120 bp, Artificial Sequence
  ENSG00000259895_12 (sequence is synthesized)
tctgggatgcctcgggccctcagtgcaggttcgtttaaagaacactacgagcactggccatggccaacaccacggcctctgtggccagcagggttttttttttgagacggagtcttgctc

SEQ ID NO: 972777 - DNA, 70 bp, Artificial Sequence
  ENSG00000259895_13 (sequence is synthesized)
ctgacttcacccgtgcctggcctttagtttttatattttgaatggagacagggtttcaacatgttggcca

SEQ ID NO: 972778 - DNA, 120 bp, Artificial Sequence
  ENSG00000259895_14 (sequence is synthesized)
ccagcctgtggccagcactttagatgccacatcaagtaatctctatgccggcccctgaggtcatcaccaccatcacccagcatgacagtggggacaaacctggacaactggggctgactc

SEQ ID NO: 972779 - DNA, 120 bp, Artificial Sequence
  ENSG00000259895_15 (sequence is synthesized)
cttgagaatcttgcccagtcccagggcaagaaacaagtcatgttgcaaacacctctgtggctgcagagggcccaaccctgacccatgctctttcctgccttcctggggaagggaaggagg

SEQ ID NO: 972780 - DNA, 120 bp, Artificial Sequence
  ENSG00000259895_16 (sequence is synthesized)
cttggaggaggtgagagtggagtggctaaagggtgaagaggtaaaaggcccttcctggtggaggctcagtgtgaaccggtgaccccacacctgccccagcaccagcgccaggagggggag

SEQ ID NO: 972781 - DNA, 120 bp, Artificial Sequence
  ENSG00000259895_17 (sequence is synthesized)
ctgggcatgggcaccaggagacagtgggaagcagagccgtgtggctgtggcagagacagtggccggcctgttctccaatatggccttgtggttttcgtgtcctccgatgaatgcatacag

SEQ ID NO: 972782 - DNA, 120 bp, Artificial Sequence
  ENSG00000259895_18 (sequence is synthesized)
cctacagcctacagggggcagggctttcagcaatgctgggcctgccttgagtggccttgtcccgtcctttatacagaagggatatcgagacagagtctcgctctgtcacccaggttggag

SEQ ID NO: 972783 - DNA, 120 bp, Artificial Sequence
  ENSG00000259895_19 (sequence is synthesized)
gacagagtctcgctctgtcacccaggttggagcacagtggtgcaatcatggctcactgcaggctcaaagtgcgaggctcaagcgatcctcccgccttagcctcccaagtagctgggatta

SEQ ID NO: 972784 - DNA, 82 bp, Artificial Sequence
  ENSG00000259895_20 (sequence is synthesized)
tgggattacaggcagacacgccatgcccggctcattttcaaattttgtgtagagatggggtctcactgttgttcaattcagc

SEQ ID NO: 972785 - DNA, 120 bp, Artificial Sequence
  ENSG00000259895_21 (sequence is synthesized)
cggcccacttataatcttgataaatacacttgatatattctttttcagcatgacatgtatcaaccagtgatataacttgataaaatcataaagaaacaacaagggctcaccaagtcctac

SEQ ID NO: 972786 - DNA, 84 bp, Artificial Sequence
  ENSG00000259895_22 (sequence is synthesized)
taaaatcataaagaaacaacaagggctcaccaagtcctaccttggcatgatttaaatacatatgctttcagttgggagggtgag

SEQ ID NO: 972787 - DNA, 71 bp, Artificial Sequence
  ENSG00000259895_23 (sequence is synthesized)
atcgcctgaacccaggcgacagagtgagactgtctcaaaaacataaataaacacaaatgctttctaaagtg

SEQ ID NO: 972788 - DNA, 120 bp, Artificial Sequence
  ENSG00000259891_0 (sequence is synthesized)
gagagagaatagggatgagaagctcagcttgtagaattggcaggtgatgtttgcagtcattaatcatttgagaagtagagagagaagccaagcaggaaatcttcatactggaaaagaagt

SEQ ID NO: 972789 - DNA, 120 bp, Artificial Sequence
  ENSG00000259891_1 (sequence is synthesized)
aagtgctcaccattaaaaaaaaaaaaaaaaaaaatccagtgtggttcacagctgtaatcccatcacttggaggctgaggcaggagaaatacgtgaagccaggagtttgagaccagcctgg

SEQ ID NO: 972790 - DNA, 120 bp, Artificial Sequence
  ENSG00000259891_2 (sequence is synthesized)
tataacaagacccacatctctacaaagagaaaaaaaatgtaaaaaaaagaagctttaaacctaagacggcagaattcaagactgttgtccttgagaacttcctggctctggaaaaagctc

SEQ ID NO: 972791 - DNA, 120 bp, Artificial Sequence
  ENSG00000259891_3 (sequence is synthesized)
agtgagttagtctcatcctgtcgttagctctgttttttaggggctcactttgtcttcacgacagtaccttgcaccattctcatgggtatcccagggtggtgcaaggcagttttctgcact

SEQ ID NO: 972792 - DNA, 120 bp, Artificial Sequence
  ENSG00000259891_4 (sequence is synthesized)
tcccagaatgccctgtcagctggcttctgggtaggttctgcaaattggaggcccctgtgaaagatcgctgtggggtgggaggaagaagctttatctgcctgctggctgcagggtagagga

SEQ ID NO: 972793 - DNA, 120 bp, Artificial Sequence
  ENSG00000259891_5 (sequence is synthesized)
ctgcagtggggttatagggatcaccacctgcacatgtggagctttgagcggcttcactctaagtttctgctcaacagtggcagccctggagtccttcgggggcgagtgtgggctcctggg

SEQ ID NO: 972794 - DNA, 120 bp, Artificial Sequence
  ENSG00000259891_6 (sequence is synthesized)
ctccaggccaggggcagtcccagcttcctgatctcgaggtagcgtctcctcccttttgctccatagcacctcgcccttctcagtgacgtgcctccttctcagtcatgcgcctccagctct

SEQ ID NO: 972795 - DNA, 72 bp, Artificial Sequence
  ENSG00000259891_7 (sequence is synthesized)
cagtgacgtgcctccttctcagtcatgcgcctccagctctaacaatgtccttgaaaacaattcttgaccaag

SEQ ID NO: 972796 - DNA, 120 bp, Artificial Sequence
  ENSG00000259891_8 (sequence is synthesized)
aacatgtaatcccagctactccctccacttgatttgtgttccttgaagaaatttgcataatccctgtatctggttggcagatagcagagatgtagcctcagtctttcctttaaaaatttt

SEQ ID NO: 972797 - DNA, 81 bp, Artificial Sequence
  ENSG00000259891_9 (sequence is synthesized)
agggatactccatctcaaaaaaaattttttgctttagggccaatcgtggtgacacacgcttgtaattctggcactttgaga

SEQ ID NO: 972798 - DNA, 120 bp, Artificial Sequence
  ENSG00000259891_10 (sequence is synthesized)
aatcgtggtgacacacgcttgtaattctggcactttgagaggccgaggcaggtggataatttgaggtcaggggttcgagagcagactggccatgatggtgaaatcccatctctactaaaa

SEQ ID NO: 972799 - DNA, 66 bp, Artificial Sequence
  ENSG00000259891_11 (sequence is synthesized)
ggtgaaaccccgtctctactaaaaacattaaaaaattagccgggcatggtagtgggcgcctgtaat

SEQ ID NO: 972800 - DNA, 68 bp, Artificial Sequence
  ENSG00000259891_12 (sequence is synthesized)
gactaaacaaacaaaaagcccagtgtggtggtgtatatttgtggtcctagctactttgaaggctgagg

SEQ ID NO: 972801 - DNA, 120 bp, Artificial Sequence
  ENSG00000259891_13 (sequence is synthesized)
aaacaaacaaaaagcccagtgtggtggtgtatatttgtggtcctagctactttgaaggctgaggtgggaggattgcttgagtacaacatgtagaggctgcagtgagctgtgattgtgcca

SEQ ID NO: 972802 - DNA, 120 bp, Artificial Sequence
  ENSG00000259891_14 (sequence is synthesized)
gtgacagagcaagaccctgtctcaaaataataaaattaacattcattaacaataatgttaatatatatgttaatgtatatgttaatcgtaatgtttatattttaccatgataaaaacatt

SEQ ID NO: 972803 - DNA, 120 bp, Artificial Sequence
  ENSG00000203279_0 (sequence is synthesized)
gcatctgagaagctctggaaaaaacctctcaggaaaacaacgacttcagcaggacccactagccaaggaaaggggataaaataaatagcaaagggaaggaaaaacacgcacctctgggat

SEQ ID NO: 972804 - DNA, 120 bp, Artificial Sequence
  ENSG00000203279_1 (sequence is synthesized)
gctgcaggtcctgttgcagccgccgccatccctcgaagccaccgttgcttctgccagagctgctactagcgcgcttatcagctccgccaccgcccaagggggaaacttctgcagaaaccc

SEQ ID NO: 972805 - DNA, 62 bp, Artificial Sequence
  ENSG00000203279_2 (sequence is synthesized)
acagcctgggcgacagagcaagactccttaataaataaataaataaataaaaaataaataaa

SEQ ID NO: 972806 - DNA, 120 bp, Artificial Sequence
  ENSG00000203279_3 (sequence is synthesized)
acagactaaacaggacgtctttaatgaaggagggaaacactccacttttgtttgctataaattctgggagacagcatgtggtggaattcttattgaagaaccaggcaaatatacatgccg

SEQ ID NO: 972807 - DNA, 120 bp, Artificial Sequence
  ENSG00000233047_0 (sequence is synthesized)
gactgaagtttggcaggacatcctgttccagaaggaagcagaacagagtacagcctgctgtggacagttcctttttgtctcaggatgcttcattcgcagcatattctacaattattctga

SEQ ID NO: 972808 - DNA, 120 bp, Artificial Sequence
  ENSG00000233047_1 (sequence is synthesized)
gagctacaagcaagaaagacgagggagaactgggttagctaagagtaatgtgcataaactgttgtagaagaagaatgtagaggatatatgaaggcacatgaaactaatttacagattatt

SEQ ID NO: 972809 - DNA, 120 bp, Artificial Sequence
  ENSG00000233047_2 (sequence is synthesized)
aatcaacataatctcactcttttcaacacacatttaaacacctgctctgtgacagattctgggactggttttgggaaacaaaggagtcaaataaatgctctcaaggaatctaccttctag

SEQ ID NO: 972810 - DNA, 120 bp, Artificial Sequence
  ENSG00000233047_3 (sequence is synthesized)
ttgggaaatatatttctggcaacagtggagaagaatgataggaagagaatcatactggaatagtatagtcctttggaatgttgttgtaatgaaggcaagaagaaaaatgatcttgaaggc

SEQ ID NO: 972811 - DNA, 120 bp, Artificial Sequence
  ENSG00000233047_4 (sequence is synthesized)
aaaaatcatattgaaggaaaggagagatgagtttaccaaatataatctcagaattgttctgtaaatttcatttctgctttagcagccataaagagctccatttattacagtaggaacaga

SEQ ID NO: 972812 - DNA, 120 bp, Artificial Sequence
  ENSG00000233047_5 (sequence is synthesized)
ggcaacagcaacatgggtggctggcagtgatagaaaggattttagttttgatacatggaatttgacatgctttttgaaaatcttcagatggtgatgtacaaactactgcaggaacatatg

SEQ ID NO: 972813 - DNA, 120 bp, Artificial Sequence
  ENSG00000233047_6 (sequence is synthesized)
aggaaagatgagagaatccacagactctttgaaggaagcagattgctcctgcagggcctgggagacaaccaaacactgggtccttagggagaggtgccagaggaattggaaaaaggccac

SEQ ID NO: 972814 - DNA, 120 bp, Artificial Sequence
  ENSG00000233047_7 (sequence is synthesized)
aggcagaaggaaggctccagctaaacttgattgacccatcatttggatgacccgaaaccacagatgcaatagaagaatggaacaaatttgtacattttgtcaataaaaactttatcttca

SEQ ID NO: 972815 - DNA, 120 bp, Artificial Sequence
  ENSG00000233047_8 (sequence is synthesized)
ttatggctttctgccactaggctgagagtggaccacatatacagaaataaaaaactattaatagaaaaatatattgcaaacatctaatcctcaaaccccattcaagttttgccaactacc

SEQ ID NO: 972816 - DNA, 120 bp, Artificial Sequence
  ENSG00000233047_9 (sequence is synthesized)
ctccatcctatcaaatattccttataccaaaaagatccagttcaaaaataagtgttgcatttattttttaacctcttttgatctggaatagctcctcacaccgtctttcatgactttagt

SEQ ID NO: 972817 - DNA, 120 bp, Artificial Sequence
  ENSG00000233047_10 (sequence is synthesized)
gctttggaagactacagtattctttatatctgaaaaataaaggaatttctactttctggcttaatataataagatgtttaggctcatctgaaatttccctgccgtcacctgggaatcaac

SEQ ID NO: 972818 - DNA, 120 bp, Artificial Sequence
  ENSG00000233047_11 (sequence is synthesized)
catttcttcagggagtcctagtttcttttagcggtcaagtctgcattctgggataaagtgttgacacaatcttgaatcagtgcctaaggagttcacaagtccagagaggggatagcgcat

SEQ ID NO: 972819 - DNA, 120 bp, Artificial Sequence
  ENSG00000233047_12 (sequence is synthesized)
agagaagataaagcagatgtccatccaaagacttgtatgtgaatgttcatagcaactttatttgtaatagccaaaacctgaaagcaacccaaatgtatgttaagaagcgaatggatacat

SEQ ID NO: 972820 - DNA, 120 bp, Artificial Sequence
  ENSG00000233047_13 (sequence is synthesized)
catatgcatacaatgggatacccagcaataaaaaggaatgaactattcaagtaggcaacaaaagataagagagctgaagaagagtgaaaataaagaaacttctgcaaagccacacatgta

SEQ ID NO: 972821 - DNA, 120 bp, Artificial Sequence
  ENSG00000233047_14 (sequence is synthesized)
agacattcctatctgctggaggcacaaattctacttgttctattacttgatgtttaggctcatctgaaatttccctgccgtcacctgggaatcaaccatttcttcagggagtcctagttt

SEQ ID NO: 972822 - DNA, 120 bp, Artificial Sequence
  ENSG00000233047_15 (sequence is synthesized)
ggaagatgaatttactttgcccgcatggtttcagaagttattattaatcagaattgacttagacatatagtctcttttctaaggctttatagttgtattttaataaattattacatgtag

SEQ ID NO: 972823 - DNA, 120 bp, Artificial Sequence
  ENSG00000233047_16 (sequence is synthesized)
aaagaaacttctgcaaagccacacatgtaattgacccatcatttggatgacccgaaaccacagatgcaatagaagaatggaacaaatttgtacattttgtcaataaaaactttatcttca

SEQ ID NO: 972824 - DNA, 120 bp, Artificial Sequence
  ENSG00000233047_17 (sequence is synthesized)
actttaggtccattatttaggtccaagttcaaccactagacctgtacttcgcaagccttcagaggattcctgctttcagcccgcaagctttttcagctgaagcccccagtatcatggaac

SEQ ID NO: 972825 - DNA, 120 bp, Artificial Sequence
  ENSG00000233047_18 (sequence is synthesized)
gtgagccagatttccaaggctcaagaaagccatccaaggaaaatagaatctctcctgtgcatgctcctcattgcactgctgctgaaggaccccagaaagcactcccctctgagttatatg

SEQ ID NO: 972826 - DNA, 120 bp, Artificial Sequence
  ENSG00000233047_19 (sequence is synthesized)
cacatacacaacacacatatacacacaaatacaatttcatttaaagctcatcacatttgtaatctttaaaaatttatatttcttaagaactgctctgatcagataagggcttaagtagga

SEQ ID NO: 972827 - DNA, 120 bp, Artificial Sequence
  ENSG00000233047_20 (sequence is synthesized)
gaaatcaaaactaaaagtagatgatctattacagtactaaactttacatggaaagtattcatattatggtgtaaggtgtagaagttcatggcaagccagcactcttaatgcaactgctac

SEQ ID NO: 972828 - DNA, 120 bp, Artificial Sequence
  ENSG00000233047_21 (sequence is synthesized)
aaaagacaaataaataaactgtataactatatatttgaaaaagtttgaagaactattagataaattcagaaaagatgaacttaaaatcttgaagcatttgccattttttagtattggcag

SEQ ID NO: 972829 - DNA, 120 bp, Artificial Sequence
  ENSG00000233047_22 (sequence is synthesized)
aagctgggttttacccaggcaaagagcctttatggttagaaaaacacaacaaaacaataataatctgataggtggacggggctggtatgaaagattggaactacgcggaactccaaattc

SEQ ID NO: 972830 - DNA, 120 bp, Artificial Sequence
  ENSG00000233047_23 (sequence is synthesized)
atagttggttctcaccattaaacatttgctgatttctggggacagataggaattctaataggcatagctggcaaagtgaagggaagtctcccacagtctcatattacttgaaaaacaaag

SEQ ID NO: 972831 - DNA, 120 bp, Artificial Sequence
  ENSG00000233047_24 (sequence is synthesized)
ttccattaaaaagaagaagatggctgtcaacaaattagtaataggcaaatggtggataggaagcaggactaaattgcagctcccactcagacagagagtagcttgtggagactcacattg

SEQ ID NO: 972832 - DNA, 120 bp, Artificial Sequence
  ENSG00000233044_0 (sequence is synthesized)
agagggtgcctggcccataggggcagcacggtgactggttatgcttccttcatttgttcacccaacaaacactgactcaagcacctactaagagccaggctgaggaccttaagaatcagg

SEQ ID NO: 972833 - DNA, 120 bp, Artificial Sequence
  ENSG00000233044_1 (sequence is synthesized)
agaaagtgataacagaagactcatttgtgtccttggcccatgtaaagaagaaaattcagagccctccgaaccaaccgaattcaataaacaccttcaaaattacagatttttatatgacat

SEQ ID NO: 972834 - DNA, 120 bp, Artificial Sequence
  ENSG00000233044_2 (sequence is synthesized)
gtgttggtcacaagtaaaacctcttaaacaaagtgtggtaataatttttaaagcgcatactgctgggcacagtgaaccaacccactttatgaaggcactttaacattaaaatagcttaaa

SEQ ID NO: 972835 - DNA, 120 bp, Artificial Sequence
  ENSG00000236031_0 (sequence is synthesized)
cagtttactccagagaagaaactgtgtctcataatttcttttgcatcatctggtcctccaccaaggctatgagaacagaaataaaattaagcacagtagataccagatgctcagagcaga

SEQ ID NO: 972836 - DNA, 120 bp, Artificial Sequence
  ENSG00000236031_1 (sequence is synthesized)
gcagccatggagctgctgggaccaaaccttgcctgacctagccaccaccacaccccagacatataaatttaaattttactgatataaagaatgcaaaacacaaaatttacaaagatcata

SEQ ID NO: 972837 - DNA, 120 bp, Artificial Sequence
  ENSG00000236031_2 (sequence is synthesized)
aaacatacaatgttgtgtattgtaaattagtcacctgattctcacagaaaacttgttaatttctgctgtacgccaaagccactaatggatgaaacttacgattagttccaacatgaatat

SEQ ID NO: 972838 - DNA, 120 bp, Artificial Sequence
  ENSG00000236031_3 (sequence is synthesized)
agctgaaagtgatacaatggagacttcagaacttcacttgtcagttatttgtgtaggtttctttcccaggagactgcaaactcctttgaaggcaagatcagtgctggattatccaaaagg

SEQ ID NO: 972839 - DNA, 120 bp, Artificial Sequence
  ENSG00000236031_4 (sequence is synthesized)
cattctaagcttgtgcttggggaaccagagaagcaaaagcaccaaaacacgtttctgaaaagcatttaatattttcaagcatgcgtcaacatagtctgcatgagaaacatcaaagctcca

SEQ ID NO: 972840 - DNA, 120 bp, Artificial Sequence
  ENSG00000236031_5 (sequence is synthesized)
tggcattttcttacacttatgttgtagtttatttcaatactgttttcatttgaattgtacttgagatgggagttggagtggagaatcataatcattttgtaaataaaatgttttaatcca

SEQ ID NO: 972841 - DNA, 120 bp, Artificial Sequence
  ENSG00000236039_0 (sequence is synthesized)
aagggtaagaagaggaatcatgtggaagaagagtaaacatctgatggtgtcctgggtagctgaaactgtggaaagcaaaaccgtggataagggggaactactatactgaaaatgtacaaa

SEQ ID NO: 972842 - DNA, 120 bp, Artificial Sequence
  ENSG00000236039_1 (sequence is synthesized)
acagagaagatttcattgaagaagtctgctgtttctggaatgggaaattaagggagaggttcgtgaagaagtgattgggaaagagagcaagtcttggttggacagtgtgattcaatagaa

SEQ ID NO: 972843 - DNA, 120 bp, Artificial Sequence
  ENSG00000236039_2 (sequence is synthesized)
atgtgaggaggaaaactgcaattatttctgaaccttcccatcagccttgtctctgatagaattggcctgttgtggacgggctttgtgtagattagagaaagaagaagatgctcttttggt

SEQ ID NO: 972844 - DNA, 77 bp, Artificial Sequence
  ENSG00000236039_3 (sequence is synthesized)
ctttgtgtagattagagaaagaagaagatgctcttttggtgtaattgttcagttccacatggccggggaggcctcac

SEQ ID NO: 972845 - DNA, 120 bp, Artificial Sequence
  ENSG00000236039_4 (sequence is synthesized)
gatctcgtgagacttattcactatcaggagaacagcaagctaaatcagtgtgagaccaaggaccctggggctcctccagtcattgcagctgtatcacaactaccctgacagatttcttgc

SEQ ID NO: 972846 - DNA, 120 bp, Artificial Sequence
  ENSG00000236039_5 (sequence is synthesized)
ttgctcagggcaagccacctgccatgtcttgagaacactcaagcagcacatggcgaggaatggagatggacagacatgggccagcaagaaacaggcttgccaacaacagcttgcgtgatc

SEQ ID NO: 972847 - DNA, 120 bp, Artificial Sequence
  ENSG00000236039_6 (sequence is synthesized)
ctgaaagtgggtcctctagccccatgtgactgttgccctggccaacaacttaactgcaacctcaagagatacctaccctgagtcagaaccacccagtcaaactacccctggcatcttaac

SEQ ID NO: 972848 - DNA, 120 bp, Artificial Sequence
  ENSG00000236039_7 (sequence is synthesized)
tcagagtaactgtgagataattactgtgagataattatgatgattttaagcttctcagtttgggggtaatttgttatgcagcaacagataacaaaacacttagcaaatgttattccaatg

SEQ ID NO: 972849 - DNA, 120 bp, Artificial Sequence
  ENSG00000236039_8 (sequence is synthesized)
ttatttgattgagggccatagggatacaggagaaaagaaaggtgaacactcgggtttagaaaacaaaagaaattacaatcaatcaaattatttttctaataaaaagtgggtactttgcaa

SEQ ID NO: 972850 - DNA, 120 bp, Artificial Sequence
  ENSG00000236039_9 (sequence is synthesized)
acaactggaacagttatcgactgtgattcttgctgggaccaataaccttctacaaataccaacatcagtttttatgaaaggcaaagagctgacaggtttacagactgcaccctaacatta

SEQ ID NO: 972851 - DNA, 120 bp, Artificial Sequence
  ENSG00000236039_10 (sequence is synthesized)
agctaccaggagaaacttccaagttaccctcttgttacttgtgccccagaggtgaacactataaactgctacagcatgcaatttagggagaggttcgtgaagaagtgattgggaaagaga

SEQ ID NO: 972852 - DNA, 120 bp, Artificial Sequence
  ENSG00000236039_11 (sequence is synthesized)
aggaaacttttgacttctggtgacttgggccccaggcaagctggctgaatttgccaagacccggctttgcccttgcatgtgtgaaaaatggcctcaagtatgaccccatggcaagatgga

SEQ ID NO: 972853 - DNA, 120 bp, Artificial Sequence
  ENSG00000236039_12 (sequence is synthesized)
aagaaactgtgctcttgaatagcttagagattcagagccccccaaccagcttgaaacgcccacctcaaaacaatgacatgagaagaaacaaacctctaatttaagccactgtctttttaa

SEQ ID NO: 972854 - DNA, 120 bp, Artificial Sequence
  ENSG00000236039_13 (sequence is synthesized)
aaaaatgaagttctggggtacaagtcactaatgtattagaaattttccagctctccctccttgcccagcagagtatatttccactcaaacacaatgaacccatttggaatgggacaaaac

SEQ ID NO: 972855 - DNA, 120 bp, Artificial Sequence
  ENSG00000236039_14 (sequence is synthesized)
aaaatggggtgggcctggaacaagagaaagttcagctacacaggatccaggtcaaaactctttaatcctcccatttctggatttcaaatgaacacctttttgtctagcagttctcctcca

SEQ ID NO: 972856 - DNA, 120 bp, Artificial Sequence
  ENSG00000236039_15 (sequence is synthesized)
gaggtttgctttcccacaacagcttgtcaacagtgtaagaagttcaaaaagaacttttggggttgcacgttgcaggttgtgtggcatcatcccagcttgtctcaacacctctgatgaaca

SEQ ID NO: 972857 - DNA, 120 bp, Artificial Sequence
  ENSG00000236039_16 (sequence is synthesized)
gtagcggaagaaaggactctttccacatgagttcctcggcggtccccgtctcttagggagtttataaaaaaatccatcatcttgttctactaaacccaagtaaatataattaacaccaaa

SEQ ID NO: 972858 - DNA, 120 bp, Artificial Sequence
  ENSG00000236039_17 (sequence is synthesized)
atatgccatgccagatgtcaatgcatttatagtgatgatgttacagctgggatgaagacgggcccagaagagagtcagaaaaatctttctaggccaagtgacctttgaatgtggaaagat

SEQ ID NO: 972859 - DNA, 82 bp, Artificial Sequence
  ENSG00000236039_18 (sequence is synthesized)
gcctcaaactcctggatgactataggtgtgagccacttcacccagccttccctttttatcttgaataatattccttgcctta

SEQ ID NO: 972860 - DNA, 120 bp, Artificial Sequence
  ENSG00000236039_19 (sequence is synthesized)
taaactgctacagcatgcaatttagggccacatttggagcctcatctctttgtcatgaccaacaaatttaaatcctcatcaactggaaagaggaaacttcatctggataaatactatatt

SEQ ID NO: 972861 - DNA, 120 bp, Artificial Sequence
  ENSG00000236039_20 (sequence is synthesized)
ctggtgacttgggccccaggcaagtatgtgccaatcacaaactttctggctcatcctaggcttctcagtctctgtccctctatattgaatttgattttgagaggaaggcatccaaaagag

SEQ ID NO: 972862 - DNA, 120 bp, Artificial Sequence
  ENSG00000236039_21 (sequence is synthesized)
ttggtgtgaacctaatactgtcacaaagctgggaaaattttgggctcaatatttgagacaggaagagaaccccagctgccttactgagactgatttataagagtaaattataaaaatgaa

SEQ ID NO: 972863 - DNA, 120 bp, Artificial Sequence
  ENSG00000236039_22 (sequence is synthesized)
caaaaaagctgtagttttttcatttggcttgaagtcagtatagagaagttatttaaaataagattttcgtcccacggaattgtcccctttgttattgtatatccttcaggtttatgggac

SEQ ID NO: 972864 - DNA, 120 bp, Artificial Sequence
  ENSG00000236039_23 (sequence is synthesized)
aggaaacttcatctggataaatactatattcataactaggagaggttcgtgaagaagtgattgggaaagagagcaagtcttggttggacagtgtgtctgttttcatgctgctgataaaga

SEQ ID NO: 972865 - DNA, 120 bp, Artificial Sequence
  ENSG00000236039_24 (sequence is synthesized)
gatttctctcttggagcctccctccctctgtctctgtatgggggagctgctgctttctcgcttgcttgttaaactttctgctccttaaaactactccatgtgtgtctgtgttgttttagc

SEQ ID NO: 972866 - DNA, 120 bp, Artificial Sequence
  ENSG00000236039_25 (sequence is synthesized)
gacaacacattatttcctgaggaaacttttgacttctggtgacttgggccccaggcaaattgccaaacaaccagcagcagatggtcctgtatctaagtgcaatgctaagtggtgtgaggg

SEQ ID NO: 972867 - DNA, 120 bp, Artificial Sequence
  ENSG00000236039_26 (sequence is synthesized)
atggcatgattgaccatttactcagaggagcataaaagaaggaattcttgttaaaaatgcctctgttgtatcaagtggctgtaaaacaggcaagagaatctgggaactcttatatccaag

SEQ ID NO: 972868 - DNA, 120 bp, Artificial Sequence
  ENSG00000233048_0 (sequence is synthesized)
cagaccacagtggaataaaactggaaatccactccgaaaggaaccttcaaaaccatgaaaatacatggaaattaaataacctgctcctaaatgatcactgggtcaagtatgaaatcaaga

SEQ ID NO: 972869 - DNA, 120 bp, Artificial Sequence
  ENSG00000233048_1 (sequence is synthesized)
ctgctcctaaatgatcactgggtcaagtatgaaatcaagatgggaattaaagaattcttcaaactgaatgcaaatagtgacacaacctatcaaaacctctggaatacagcaaaggcagtg

SEQ ID NO: 972870 - DNA, 120 bp, Artificial Sequence
  ENSG00000233048_2 (sequence is synthesized)
ctaagaggaaagttcacagctctaaatgccaacatcaaaaaatctgaaagagcataaacggacaacctaagttcacacctcaaagaactggagaaacaagaacaaaccaaacccaaaccc

SEQ ID NO: 972871 - DNA, 120 bp, Artificial Sequence
  ENSG00000233048_3 (sequence is synthesized)
agcaagaaaaaggaaataaacaagatcagtgcagaactaaatgaaattgaaataacaacgaaaaacaatacaaaagataaatgaaacaaaaagcttgttcttgaaaccagcttaataaat

SEQ ID NO: 972872 - DNA, 120 bp, Artificial Sequence
  ENSG00000233048_4 (sequence is synthesized)
ttgaaaccagcttaataaataaaatagataaataaaactgattgaacattagcaaaattaaccaagaagacagaaaatcccaataaactcaatcagaaatgaaatgggagatattacaac

SEQ ID NO: 972873 - DNA, 120 bp, Artificial Sequence
  ENSG00000233048_5 (sequence is synthesized)
agatcattcaaggctacgatgaacactttcatgcgcatgaactagaaaacctagaggaggtggataactccttggaatgatataaccctcctatcttacaacaggaagaattagataccc

SEQ ID NO: 972874 - DNA, 120 bp, Artificial Sequence
  ENSG00000233048_6 (sequence is synthesized)
ccaataacaagcagcgagattgaaatgacccagcttgcccctctgtcctggaaatgagcctcaattaatttctcccaagaaggtgggacatctggctccactggacagatggaggttgtt

SEQ ID NO: 972875 - DNA, 120 bp, Artificial Sequence
  ENSG00000233048_7 (sequence is synthesized)
aggttgttggggaacaggtggtattggattacatgagcaagttctttaatggcaataatgtgaaagctgactaaaaacaactgttaatgtatgtggaagtacatctttattgagggtaaa

SEQ ID NO: 972876 - DNA, 120 bp, Artificial Sequence
  ENSG00000233048_8 (sequence is synthesized)
agtttggtggagaactgttgaactatagaacaatctcagtgtttccaaggtggaagccaagtgatggccagggtcacagtgagcaaatggcagatgggatcttgcatcctagtccctcag

SEQ ID NO: 972877 - DNA, 120 bp, Artificial Sequence
  ENSG00000233048_9 (sequence is synthesized)
aacctacagcctggaggcggagttaatggtcaccacttcctttgaatgcataggaacaagcagtctgcatgttgtctcatttaatctttaaaaccaccctagtgagctgtatgtgggtcg

SEQ ID NO: 972878 - DNA, 120 bp, Artificial Sequence
  ENSG00000233048_10 (sequence is synthesized)
agctgtatgtgggtcgcaagtaattgaactgctctaggcctccaaatgaagatggtaaaacatatcccacaggggtcatgtgaagttaaaataagatggagtctcaccctgtcgcccagg

SEQ ID NO: 972879 - DNA, 65 bp, Artificial Sequence
  ENSG00000233048_11 (sequence is synthesized)
ccgattctcctgtctcagcctcgcggatagctgggactacagggtctcactctgtcacccaggct

SEQ ID NO: 972880 - DNA, 120 bp, Artificial Sequence
  ENSG00000233048_12 (sequence is synthesized)
gcctcccaagtagctgggactacaggtcacttcccactgagagctggtttacacccatttcaaacaccatctccaaactgataccttgactacgagatcaagtgtccagaatgtaacaga

SEQ ID NO: 972881 - DNA, 120 bp, Artificial Sequence
  ENSG00000233048_13 (sequence is synthesized)
tccagaatgtaacagaagctgcctaatatttggtagaagaagaaagggaagaggagaattcagatgctaatggagaagttcccatgatagttcatgaatgtcagagaggccccagacttt

SEQ ID NO: 972882 - DNA, 120 bp, Artificial Sequence
  ENSG00000233048_14 (sequence is synthesized)
caagtttgctttactcatttaatggaaaactgaaaaggagatgaagatttaagtcattttcccaaagccacacagcgggctgagtgtagagcctgggtgttaaccaagaatccctctggt

SEQ ID NO: 972883 - DNA, 120 bp, Artificial Sequence
  ENSG00000233048_15 (sequence is synthesized)
gatttttcaagaaacacctggcctggcaaggaagacgctgcatcacaatgtgagggtggtttttttcttctcagtctttgagaggtgtgagagtgtaagaggggcctgtgtgcggtctct

SEQ ID NO: 972884 - DNA, 120 bp, Artificial Sequence
  ENSG00000233048_16 (sequence is synthesized)
gggaccactacccccctcagtcagacgctcctgagacccctaaaggctgtttccaatctctgtggggtgtggccagagagaatgcatccaccctcaacttcaccacttacggcatttgta

SEQ ID NO: 972885 - DNA, 120 bp, Artificial Sequence
  ENSG00000233048_17 (sequence is synthesized)
aaaatttaagtgcatctgaaggctctccagcttgaaaccctgcagagcgggatgaagctccctgagggctgtggaagctgcagcgtcattttgatacacagcggttcttggaaaaaatac

SEQ ID NO: 972886 - DNA, 120 bp, Artificial Sequence
  ENSG00000233048_18 (sequence is synthesized)
tgcagcctcagccggtggccgcagactgctgcttcttaaatgactcccctctgccttagggttaatgtgtgagtccttaaggtggctcaggaggctcagaaggcacctgtgcagttcagc

SEQ ID NO: 972887 - DNA, 120 bp, Artificial Sequence
  ENSG00000233048_19 (sequence is synthesized)
ttcctaactcctaccacaccggagctgtttagtctctgtcggtcttgtctcctcctgtacaagctctgggaaggaagggaccatggttttcttatttacatctttgtccccagagctcag

SEQ ID NO: 972888 - DNA, 120 bp, Artificial Sequence
  ENSG00000233048_20 (sequence is synthesized)
cagagttcctgacacctggcagggggaagctgcatagcaaccaagggtgaatgacctgatagcaaacacaacaggtgatctggaaaaacacttattgggagagaaacttacagagacata

SEQ ID NO: 972889 - DNA, 120 bp, Artificial Sequence
  ENSG00000233048_21 (sequence is synthesized)
acagcacaattatcccccatctcggaattaggccacaaccaagattatagagtgctatgttgcctactgggacaaccatgaatgtacattgctcagatatctctacaagaaaaaactgct

SEQ ID NO: 972890 - DNA, 120 bp, Artificial Sequence
  ENSG00000233048_22 (sequence is synthesized)
gaaaggaatgcaaatagctaacagcctactgtagcaccttcaagatctcctgcagcatctgagctgagagcacactgttcccaagctgcctccagtcattgtctacatgctgcggaggga

SEQ ID NO: 972891 - DNA, 120 bp, Artificial Sequence
  ENSG00000233048_23 (sequence is synthesized)
ctagggtctgggcttttctatttattgagagactcttctacagtcattctttgcattggagctccccactgcgatgcctaagactttctcagagctgcatcacagttgtagcctctttct

SEQ ID NO: 972892 - DNA, 120 bp, Artificial Sequence
  ENSG00000233048_24 (sequence is synthesized)
gtgttatcctcctttctctcccttctccattcatggcatcaggcctgaataatggtccaaaggctttctctcacccttttatatttcacagtttttacctcaataaatccctgaagcttc

SEQ ID NO: 972893 - DNA, 120 bp, Artificial Sequence
  ENSG00000234891_0 (sequence is synthesized)
agtttcagagttacctgcttctcccagagagacgaggacagattgcctccagcaggggcacagcagacaaaaggcacagactgacctgggcagcccttgctaggcaaccaagctatgaaa

SEQ ID NO: 972894 - DNA, 120 bp, Artificial Sequence
  ENSG00000234891_1 (sequence is synthesized)
tcacagctcactggcaccagcccaagcctctctcttcccctgggctcatgaccagaggttggtttccagtgggcaactgattacctgctgtgccaattctctttgcattgtgatctgaag

SEQ ID NO: 972895 - DNA, 120 bp, Artificial Sequence
  ENSG00000234891_2 (sequence is synthesized)
atgggcctggggtctactatgatatgaaaatgtcctacagtacctggcattggaggtgtatgggtagtgggagaaaaacaaggtttgaaatctacagagtctgaaagtaggtcatggggc

SEQ ID NO: 972896 - DNA, 120 bp, Artificial Sequence
  ENSG00000234891_3 (sequence is synthesized)
catctcccatcaacaccttgtcagcctgaagttcctttgtcagaaatatacttgataatgcgggtccaaattgtatatgtgtcatatcctataaagcatggatccatcccatcctctatt

SEQ ID NO: 972897 - DNA, 120 bp, Artificial Sequence
  ENSG00000234891_4 (sequence is synthesized)
gtggccacaaatgccttccacagtaacctgcagccgacctactactgacaaatcccagcaaatgtgtggtagtcacttctcttcctcgggtctgcagggactcagggtgcagcactgttc

SEQ ID NO: 972898 - DNA, 120 bp, Artificial Sequence
  ENSG00000234891_5 (sequence is synthesized)
tcagatttgggctggagctcagtatgactgttggggtctcctgctacccctggagcctccatgtgctccactcgggttgggatccagcagtgcagaggtgaactctgggcgcttggaagg

SEQ ID NO: 972899 - DNA, 120 bp, Artificial Sequence
  ENSG00000234892_0 (sequence is synthesized)
agacattgagtagagaggaactgatggctgctgtgcccggcaagaaagcagggacagcgactctcccatgtcctctcttctgcaggttcagggaggccgcctggccagcagggaggctgg

SEQ ID NO: 972900 - DNA, 120 bp, Artificial Sequence
  ENSG00000234892_1 (sequence is synthesized)
agcaggcaggcaccacttctggtgacctcggcaagctcccggacccctgagccttggtctcctgcttgcagagcgaggacaggaagtgcacccattttgaaggatatcacgaggactagg

SEQ ID NO: 972901 - DNA, 120 bp, Artificial Sequence
  ENSG00000234892_2 (sequence is synthesized)
tgaaaaaacacttccacggtgccggtgcttggtcagcgctcaagaaacttttttcaaaaagtaggtgtttttgcctctgtttgaggagtagactgaggcttagagagggaaagcacctgg

SEQ ID NO: 972902 - DNA, 120 bp, Artificial Sequence
  ENSG00000234892_3 (sequence is synthesized)
ttcaagaggcttcaaaagaagcaaaaaggaggtagcggaagaggcccttccaaggaggacaatgggaagatcagctcttgttggtcaccagccacgtctcagcagacctgccagacgcag

SEQ ID NO: 972903 - DNA, 120 bp, Artificial Sequence
  ENSG00000234892_4 (sequence is synthesized)
gcatggttgctgagccaggtacctgaagggccctgtccagtgtcactggcaccgctctgtacagaaggaacctgctgatgtgccgtgggacctgtgttctctcgaactctgctggggacc

SEQ ID NO: 972904 - DNA, 120 bp, Artificial Sequence
  ENSG00000234892_5 (sequence is synthesized)
ctgctgctggccagccctccctcttcctggcctctccaacagcaaagcaaatgattgccacgtgtcctttcccacagctacacgtggcccccgttcagcccagccctgggcccggctatg

SEQ ID NO: 972905 - DNA, 120 bp, Artificial Sequence
  ENSG00000234892_6 (sequence is synthesized)
caagcacacggaggctcttggccaggccagtacaggcaggggcacccacacagctccacatgctgacctttgcatgtcttcccgtccggctgcagtgtgaatccaacggggcagctgcat

SEQ ID NO: 972906 - DNA, 120 bp, Artificial Sequence
  ENSG00000234892_7 (sequence is synthesized)
cgcacgccagtggctgtgtccttgcatgtccggtcgcagcctccgttattgactgcgcacgtctctggggagggaaagagacagagacctcagtttccttggacagaagccactggcttt

SEQ ID NO: 972907 - DNA, 120 bp, Artificial Sequence
  ENSG00000275265_0 (sequence is synthesized)
tctgggggcagggcggggtggctcacacctgtaataccaactactcgggaggcagaggtgggaggatcacgtgagcccaggagttggagaccaccctgggcaacagagcgagacccagac

SEQ ID NO: 972908 - DNA, 120 bp, Artificial Sequence
  ENSG00000275265_1 (sequence is synthesized)
attgagcccagatggcgccactgcacaccagcctgggagacaaagcaagaccctgtctcaaaaagaaaaagaaaaacaaaaaccagtatgggatgttcctgttaggcaactaagggtgaa

SEQ ID NO: 972909 - DNA, 120 bp, Artificial Sequence
  ENSG00000275265_2 (sequence is synthesized)
aaatcagagcacgacgcatagcttctcacagattctggtgtgcgtgccacaccagagaataaggaactccatagcctgaaagggaactgaataaaaataaacataaaagagaataagaaa

SEQ ID NO: 972910 - DNA, 120 bp, Artificial Sequence
  ENSG00000258101_0 (sequence is synthesized)
acagaggtgtccactgggaggagggagcaggccggacgtctgccccgtccccggtgggtgcgggggcgtcaggtgggcaaaaccccagcgaggggaagctccaggatcgttgcagtgcca

SEQ ID NO: 972911 - DNA, 120 bp, Artificial Sequence
  ENSG00000258101_1 (sequence is synthesized)
tttctaggtccctcctcctctccccacttcccttttctctgcacccatttgacaggagcctctgcaatcatctgcttattgcgcgtcaccgtcatccagtgggagagccttgtggtacca

SEQ ID NO: 972912 - DNA, 120 bp, Artificial Sequence
  ENSG00000258101_2 (sequence is synthesized)
cctttctccacctatggctgcggcccgcaggaagatgacgggttgcgcttctgctctggagccagccctgttgccgggaactgcaacccgcaagatgatgccagagctcagcttccctct

SEQ ID NO: 972913 - DNA, 120 bp, Artificial Sequence
  ENSG00000258101_3 (sequence is synthesized)
ttttatgttgcagagtttatgctgccctgcactgagcagacgctttcgcttacgcagccctgcccttcaccttgcccagtgattccggaataaccttccggaccctcctacttgcagagg

SEQ ID NO: 972914 - DNA, 120 bp, Artificial Sequence
  ENSG00000258101_4 (sequence is synthesized)
ttcgttgcttcaagcgtcataatcattcatctccgtttttcctctagtgatgaaggctcgtggacggaccacggttcactcggtctaggagtcacgctgttgatcaggttgtcagacatc

SEQ ID NO: 972915 - DNA, 120 bp, Artificial Sequence
  ENSG00000258101_5 (sequence is synthesized)
aaaattcccatctcccatcagggcacagctatagggctctgggtcaaaacagggccttctcttttgtctggtagcaccagaaacacggtaattgggaacccatcaggaatggaaggctcc

SEQ ID NO: 972916 - DNA, 120 bp, Artificial Sequence
  ENSG00000258101_6 (sequence is synthesized)
gatggaatgttgggcccccaagtcctgaaaggaaccagtggggctgtaatcttcacaatctggatccagccagaagagcactgagagctcagtgtttggaggacaaaaaagggcaatgga

SEQ ID NO: 972917 - DNA, 120 bp, Artificial Sequence
  ENSG00000258101_7 (sequence is synthesized)
tatacagtaacttagtgaatcagggcccggatccaggaagatgcctgacatttgtttatcagcagagaaacagaagtaaaggaggggaaccttctcctaagtgttactgtgttatgaaag

SEQ ID NO: 972918 - DNA, 120 bp, Artificial Sequence
  ENSG00000258101_8 (sequence is synthesized)
tgtccttcagggagaggcgacatgaacagggcagctgataacgttgatactgtgcaggcacacatctccccacattccccaggctgctgaaccaagtgtaccaaactaatcgcaaggaca

SEQ ID NO: 972919 - DNA, 120 bp, Artificial Sequence
  ENSG00000258101_9 (sequence is synthesized)
cagctttgagcctccccggcggcagtccctggagagagtccgctcagacaaagcaaagcgcgctcccagcggggaggggtggccactttttctttgttctcccttggaaaatcggctgtc

SEQ ID NO: 972920 - DNA, 120 bp, Artificial Sequence
  ENSG00000258101_10 (sequence is synthesized)
tctcaagtctcgtaaaccagctgctttcacttcttgcagggggtcaaaatcaattaatcaccaatcatgtttggacagcacagttttgaagccctgaactctgtgaaatgcagggtcaaa

SEQ ID NO: 972921 - DNA, 120 bp, Artificial Sequence
  ENSG00000258101_11 (sequence is synthesized)
ctatttttagaattttaacatgccgttaagtttgtattctgagtttcccagcaaaaatttctgaaatgtgccccactttgaaaaaataaaataaaaagaacacctccagaaaaaaggtgg

SEQ ID NO: 972922 - DNA, 120 bp, Artificial Sequence
  ENSG00000214248_0 (sequence is synthesized)
attcctggaacctcgttcccaaagcggcagtcgatccctggtctccacggcggtgcagcctcagcctcctcgcttttcacggtcggcttgggcgtcccttcggaatgccttcctcactga

SEQ ID NO: 972923 - DNA, 120 bp, Artificial Sequence
  ENSG00000214248_1 (sequence is synthesized)
tggtgctttattaggattcctcttgtgcttaattacctcctagcctcctgctggcagcggggtgccgcctcctcaccgtaattaggctccgtcgagagccctttcccttcttgccagccc

SEQ ID NO: 972924 - DNA, 120 bp, Artificial Sequence
  ENSG00000214248_2 (sequence is synthesized)
cagcaggctcagagttggccgaagccaggggggaggggacggccatgggaacccagcggtgtgacccctgccctcggcgacggggccaaggtcaaggccagagttgttggccagacccac

SEQ ID NO: 972925 - DNA, 120 bp, Artificial Sequence
  ENSG00000214248_3 (sequence is synthesized)
atagaacctcaagacaccccccttatctctctcgcacccggaacgtgagcccagcgcctggacgtggagaattcctatctgaggaggggcgctggggttaggtgccagtgcttgggcccc

SEQ ID NO: 972926 - DNA, 120 bp, Artificial Sequence
  ENSG00000214248_4 (sequence is synthesized)
cggcagcctaaaccactcctttaagtggtccgacgggtgctggggaaatgtcccatctggaacccagggatccccccaagagcggcttccctctgctcttagatgcgagaaggaagttct

SEQ ID NO: 972927 - DNA, 120 bp, Artificial Sequence
  ENSG00000214248_5 (sequence is synthesized)
gattttgcggacacccgggaggtggccagggccaggcagactctgccaagtgcccttccagcttctggtccaacgagggaacactttgggatgagagttaccggcttgtcggaactcctc

SEQ ID NO: 972928 - DNA, 120 bp, Artificial Sequence
  ENSG00000214248_6 (sequence is synthesized)
tggtgacgatttgtgggtggagcacacacaagtgtagagttatagctgaggtctttacctttccgtcttccaggcagccttctgtgcctctgctctgagaacatgagactcatccttgat

SEQ ID NO: 972929 - DNA, 82 bp, Artificial Sequence
  ENSG00000214248_7 (sequence is synthesized)
tctgtgcctctgctctgagaacatgagactcatccttgattctggcacacgggtgttacttggtcacatgaaataaaaggtt

SEQ ID NO: 972930 - DNA, 60 bp, Artificial Sequence
  ENSG00000214248_8 (sequence is synthesized)
cagggtcttgttctgttgctcaggctggagtggagtggtgtgatcacagctcactgcagc

SEQ ID NO: 972931 - DNA, 120 bp, Artificial Sequence
  ENSG00000214248_9 (sequence is synthesized)
gctcactgcagcctcaacctcctgggtcctgggctcaagcaatcctcctgcctctgcttgcctagtagctgggacctcaggcacacatcagcacacctggccaacttttttttgtatgtt

SEQ ID NO: 972932 - DNA, 120 bp, Artificial Sequence
  ENSG00000214248_10 (sequence is synthesized)
tagagatgagatctcactatgttgcccagtttggtctcaagctcttgagctcaagcgatcctcccacctgagcctcccaaagcgctgggattacaagcatgagccactatgtctggccct

SEQ ID NO: 972933 - DNA, 120 bp, Artificial Sequence
  ENSG00000214248_11 (sequence is synthesized)
gattacaagcatgagccactatgtctggccctaatggacggtgttagacaatgacaggagtgcacataagagatcaaaactagaacttgcataattagtattatttattaagcacccaga

SEQ ID NO: 972934 - DNA, 120 bp, Artificial Sequence
  ENSG00000214248_12 (sequence is synthesized)
gaacagtcaagaccaaagtccctgcttgtccttggaaaaatgtcacctctatagcaggtgtcctaaccctgcagtccacccaccttaggaagtccttgaatagctctctgggggaaatct

SEQ ID NO: 972935 - DNA, 120 bp, Artificial Sequence
  ENSG00000214248_13 (sequence is synthesized)
atcagctgcctgaagagctttgtgtgtatttgtacaccagcattttcctgaggaaggaggtgcctggcttcatcagtttctcaaagggtctaggacctcaaaagggatcagaatctagat

SEQ ID NO: 972936 - DNA, 120 bp, Artificial Sequence
  ENSG00000214248_14 (sequence is synthesized)
tcaaagggtctaggacctcaaaagggatcagaatctagatatttggataccctattttttttttttttggcagaggtggggtctcgctatgttacccaggctgatctcgaactcctgagc

SEQ ID NO: 972937 - DNA, 120 bp, Artificial Sequence
  ENSG00000214248_15 (sequence is synthesized)
tatagtcatgagccacagcgcccggccctgatacctttacgtcagcatttcccaacatactgtctcagggccacttacctgcaccagaactacctggaatatttaggaacagactcctgg

SEQ ID NO: 972938 - DNA, 120 bp, Artificial Sequence
  ENSG00000214248_16 (sequence is synthesized)
cccccaaccaaacctcctgagtcagtgtttcaggggaggggactgggatattttgttttgcaccgactccctaggtgattttgatgcttagccaaatgagaaccattgttcggagctaac

SEQ ID NO: 972939 - DNA, 120 bp, Artificial Sequence
  ENSG00000214248_17 (sequence is synthesized)
atataacacagcaaacaactgtgtctgtgtcctctccttgggagagaactccagaagtaagttgctttgttgcatggggagggggagtgttggaaatcccactgggatgtgtcgtttccc

SEQ ID NO: 972940 - DNA, 120 bp, Artificial Sequence
  ENSG00000214248_18 (sequence is synthesized)
gagcaaggccagccagcctgccagagacacaggtgtggttttggtcggagaatgccatgactgagttaatccctccataccaggttccaccccagctccacaacatcctgtctgtctccc

SEQ ID NO: 972941 - DNA, 120 bp, Artificial Sequence
  ENSG00000214248_19 (sequence is synthesized)
cagacaaaccagcccagatcctcctgggccccagaaagatgacacagctgcccccgccccccccatctcctggcctggacccacttggcttcctatcttggaagacaatggttgagattc

SEQ ID NO: 972942 - DNA, 120 bp, Artificial Sequence
  ENSG00000214248_20 (sequence is synthesized)
cagggcagaagcatttttaaggctctacctaaaacggccccaccccagcttcattcctcctccatcttgtcccgcacttctgccggcagaccctggtaaagcgtgtcttccaccaggagc

SEQ ID NO: 972943 - DNA, 120 bp, Artificial Sequence
  ENSG00000214248_21 (sequence is synthesized)
cccgccttcttgagccccccacagttgccaagttcttctggcagcgcctctaagcggttgcctttgagctccaggcggctgagggctctgagggcacccacgtggggcgagagctggctc

SEQ ID NO: 972944 - DNA, 120 bp, Artificial Sequence
  ENSG00000214248_22 (sequence is synthesized)
agctggttgtcgcccagaagcaacgtccgcagcttgcggcagaagaagagctcttcgggcagggcctccagggcattgtaggagagggccaggtgctgtaggttctgcaggaggcccacc

SEQ ID NO: 972945 - DNA, 120 bp, Artificial Sequence
  ENSG00000214248_23 (sequence is synthesized)
tcgggtggcagggagtgtagcccattgtgggacacatccagcagacggaggcctgagcacaggccgagctgggagggcagggtctccagcttgttgtagctgaggtagagctgctccagg

SEQ ID NO: 972946 - DNA, 120 bp, Artificial Sequence
  ENSG00000214248_24 (sequence is synthesized)
ctcctgagcttccgcacgtgctcagggacgtaggcgatctggttgtgccacagcctgagcgtgaccagcttccggcagtgctggaagctgaggatttcctcgatggagcgcaggtggttg

SEQ ID NO: 972947 - DNA, 120 bp, Artificial Sequence
  ENSG00000214248_25 (sequence is synthesized)
tccttgaggtcaagttcctgcagcgcacccaggctgaacactgcatgggggatgcgctccagcccgcaggccaccagctccagctcccgcaatgccgccagcttcttgaggctgttcagg

SEQ ID NO: 972948 - DNA, 120 bp, Artificial Sequence
  ENSG00000214248_26 (sequence is synthesized)
gcaaccagacgggccccatcgttgtgcaggctgagcctctgcaggtggccagcaacgtcggtcacactggctggcaccttcccggcgttgctccggagggacaacaccttgagctgcttc

SEQ ID NO: 972949 - DNA, 120 bp, Artificial Sequence
  ENSG00000214248_27 (sequence is synthesized)
agctcccggaggctctccagggtggctgcccgagctagctcctgggggaaaagcccctccaggtgcagctcctccaagccccgcagcccaaacacccaaagcggcacctcgcggagctcc

SEQ ID NO: 972950 - DNA, 120 bp, Artificial Sequence
  ENSG00000214248_28 (sequence is synthesized)
tcgcatttgacgcgcatcaccttcaggtggtcccgcaggaagacctgcaaggagaagggtagcctggcgggcgagtggagcaagctgagctcctgcaagtgcaccagctgtgacagcccc

SEQ ID NO: 972951 - DNA, 120 bp, Artificial Sequence
  ENSG00000214248_29 (sequence is synthesized)
ggggggaaggtgatatcgcagatggcctccagcctgagtgactccacctcactgagctcaaagacggtgtcgggcagacccggcagcatgcagagggccagctccagccggcccgcggca

SEQ ID NO: 972952 - DNA, 120 bp, Artificial Sequence
  ENSG00000214248_30 (sequence is synthesized)
ttgcgctgcagcttctgtcgaagcttctcgggcgtccactcgtggttgagattgagctgctttagacggctttcgctgacctcggacaggaagacggcgaagcgcttggagtagagggag

SEQ ID NO: 972953 - DNA, 120 bp, Artificial Sequence
  ENSG00000214248_31 (sequence is synthesized)
tcgtactgatcgatgaggtgcagcatgaaggcgaagtcattcttgacgtcaggaatgtcccccatgccagtctcctcccgcacggaacggaaggagtactccttgaggggccggtggaag

SEQ ID NO: 972954 - DNA, 120 bp, Artificial Sequence
  ENSG00000214248_32 (sequence is synthesized)
agccagtagagcgtgtagatgcaggtaagtccgtagatgcacacaaaggagatgtaacagaaggccagcttggagaagaggtgggccttggtgtggttgcagcagaagctggcgtagccc

SEQ ID NO: 972955 - DNA, 120 bp, Artificial Sequence
  ENSG00000214248_33 (sequence is synthesized)
gtgacctctgacgtctccaccctacaggccaccaggaaactgatcttctccacatagaccaggttgtagaccaggatggccaggaacttacacactttcagcaccgtctgtcggatgtac

SEQ ID NO: 972956 - DNA, 120 bp, Artificial Sequence
  ENSG00000214248_34 (sequence is synthesized)
atggtgtacaggatgtcgccctcttccacgtgcatgcggaacttcttcaccttctcaaacagggctttggcttgctcaccctccttcttgtccaacagggtgacaactggaggctcggtc

SEQ ID NO: 972957 - DNA, 120 bp, Artificial Sequence
  ENSG00000214248_35 (sequence is synthesized)
accaccttctccggttccgccagcactttctccttctcaccctcccctgccttccccggcccggtccctgccatggccactatggtggccgcagcccgttcggtggctgctgggcccttc

SEQ ID NO: 972958 - DNA, 120 bp, Artificial Sequence
  ENSG00000214248_36 (sequence is synthesized)
tggttctccccggagacctcggatagggccctggtggtccatggagagtcgaaacacttgcccaggatggagatgaagtgttcaatcttggagctggtgccagggaacttgaaccagaaa

SEQ ID NO: 972959 - DNA, 120 bp, Artificial Sequence
  ENSG00000214248_37 (sequence is synthesized)
ctggtgcagaccatgaagatgagtgtgtgaatgaccacgaggtaagggaagtacttggcataccagtgcagggccgtctcataacacagctggttaataaagctgtattgctgcaggtcc

SEQ ID NO: 972960 - DNA, 120 bp, Artificial Sequence
  ENSG00000267943_0 (sequence is synthesized)
actagtagggacaggctcattcttttgaggagcccaccctgctccactgttcagggtatctcttctttccgagctcctacgcctttagataaagggcacttacctgcttaactctttctg

SEQ ID NO: 972961 - DNA, 120 bp, Artificial Sequence
  ENSG00000267943_1 (sequence is synthesized)
cgtgtctcttgactgaattcaaggagaccaagaaccagaggacttccacgcccctcctggtaacatctggtgttttcccctggtggcctgtgaactgttcttctggatgggtaaccagag

SEQ ID NO: 972962 - DNA, 120 bp, Artificial Sequence
  ENSG00000267943_2 (sequence is synthesized)
ctccgtaccccaggattcccctctcggatgcatccttagaaactgggataagtttgatccccaggcattgaaacgaaaaagattggtttttctttgcaatacagtttggccaaaatatga

SEQ ID NO: 972963 - DNA, 120 bp, Artificial Sequence
  ENSG00000267943_3 (sequence is synthesized)
actagaagggcaggaagcctggccagtggggggaagcttaaatgttaataccatactccagcttgacgtctactgccgacagcagcgcaaatggtcagaggtcccttatgtgcaaacctt

SEQ ID NO: 972964 - DNA, 120 bp, Artificial Sequence
  ENSG00000267943_4 (sequence is synthesized)
catgatcttgagggaaaaccccgatttttgtaaaggctgcaagatagatcctgcccttttagctatcctcagtcgtccactccagagacctcaaccaggaggcttcaatgatttcctggt

SEQ ID NO: 972965 - DNA, 120 bp, Artificial Sequence
  ENSG00000267943_5 (sequence is synthesized)
caacccacctcaacctcctcttcctgagaccaaagagaaagagcaagcacccccagctccttcctccttgtatcgcactcttagccttcatgggtcagcctcaacctacactaggccctc

SEQ ID NO: 972966 - DNA, 120 bp, Artificial Sequence
  ENSG00000267943_6 (sequence is synthesized)
aggcccccgctctggaatctgcctgctaccagtggtgagccgaccagtaggaccagtccaagtccaggtccccttttccatgcaggacttgtcccaagttaaggaaggcctgggaaaatt

SEQ ID NO: 972967 - DNA, 120 bp, Artificial Sequence
  ENSG00000267943_7 (sequence is synthesized)
ctcagagaatccgggaaaattcctggagggcttccgtaaattaaccctcacttttgaactaacctggaaggatgtcgccatcctcctaggacaaaccctgtctctggaagaaagacagac

SEQ ID NO: 972968 - DNA, 120 bp, Artificial Sequence
  ENSG00000267943_8 (sequence is synthesized)
catctgggaggcagcacgtcaatgcggggatgagctacacttggcagatgccaactaccccgtgggagctacagctgtccccctgcaggaccccaactgggactacgataccccggcagg

SEQ ID NO: 972969 - DNA, 120 bp, Artificial Sequence
  ENSG00000267943_9 (sequence is synthesized)
aatctgcgccagaaatcatatgctcctatgcctgatagagggaatgaaaaggagtcaagtcaagcctgtcaattataataagttagcaaccatcgaccaagggccacatgagaatcccac

SEQ ID NO: 972970 - DNA, 120 bp, Artificial Sequence
  ENSG00000267943_10 (sequence is synthesized)
ggcctttctcgaaaggctccaggaaactcttatcaaacataccaacctagacccgggatccccagaaggacaactagtcctaaaggatcacttcctcacacaagctgccccagacattag

SEQ ID NO: 972971 - DNA, 120 bp, Artificial Sequence
  ENSG00000267943_11 (sequence is synthesized)
gagaaaactgcgaatgctggctttgggaactagagcccccatgtcagaaatcctcaaattcgcttcctcagtgttttataaccgagaccaggatgagagggacagggccgagaggaagga

SEQ ID NO: 972972 - DNA, 120 bp, Artificial Sequence
  ENSG00000267943_12 (sequence is synthesized)
aaaacagaaagaagagaggcaggctcaattactagctgctttgcaagttcaccagccccctccaggttgccctaaggataccttcccagggaactgctatcagtgcgggaagccgggcca

SEQ ID NO: 972973 - DNA, 120 bp, Artificial Sequence
  ENSG00000267943_13 (sequence is synthesized)
ttggaaggcaaactgcccctacgggccaaggggggaaaagccctgcacggcctgtcccctctgccgtaagctcaggtactggaaagagaactgtcccgagagccaaaagggcccctgagc

SEQ ID NO: 972974 - DNA, 120 bp, Artificial Sequence
  ENSG00000267943_14 (sequence is synthesized)
caatgatggctttgagctgagggtgccctctgccttggccagctcccagatgtgacatcatcatcaaagggatggagcccagggcaactctggatgtagcaggtaggacaatacattttc

SEQ ID NO: 972975 - DNA, 120 bp, Artificial Sequence
  ENSG00000267943_15 (sequence is synthesized)
tatttgatttgagagcagcctgctcggtgctgacccccttctctaggcaactttcctctgtcaggtaatcagggtaaatggcatctcttcctaagatttacaccttctttattgttaaaa

SEQ ID NO: 972976 - DNA, 120 bp, Artificial Sequence
  ENSG00000267943_16 (sequence is synthesized)
ttacctgaacttccctgaaaggctttctttttttttggaagactcacccatgacattgctgaattatcttgatctggaatcacaaataaccctgagatatgggctttgatacactaggaa

SEQ ID NO: 972977 - DNA, 120 bp, Artificial Sequence
  ENSG00000267943_17 (sequence is synthesized)
gggcaataactgcagtcccagtcaaaatccagctaagaaaaccttccacttctttcataagaaacaatactcgctatggccagaggcaacagaaggacttgagcctatcattaacccatt

SEQ ID NO: 972978 - DNA, 120 bp, Artificial Sequence
  ENSG00000267943_18 (sequence is synthesized)
ccttagacatggcctgttaaagtctgtaactctccctgcaacacaggaaatctattctgctggtagaaaacatttaaagggttctccactactgaaccctgattaagtctggttttctga

SEQ ID NO: 972979 - DNA, 120 bp, Artificial Sequence
  ENSG00000267943_19 (sequence is synthesized)
tggcggcagtttcatccaacatggagtgacacatgcagttatgcaatagtgtctctatttgacattatagaagccaaatcccttcctccaagaacattggcacagctagcagagctcatt

SEQ ID NO: 972980 - DNA, 120 bp, Artificial Sequence
  ENSG00000267943_20 (sequence is synthesized)
tccttaactagagccatagaaatagggaaaaacccaaaagctacaatttatacagattcaaaatatgccctctcaggactccatgctcatgtggccatctggaaggaacagggattttta

SEQ ID NO: 972981 - DNA, 120 bp, Artificial Sequence
  ENSG00000267943_21 (sequence is synthesized)
ccagcaaaagatacccctaaggaatgtggaccacagatcctggccctgctctaagctgtacacctatcacaggaaatagctgtagtccatggccagggacaccaaaggaccagggagaaa

SEQ ID NO: 972982 - DNA, 120 bp, Artificial Sequence
  ENSG00000267943_22 (sequence is synthesized)
atgcccagcaaaacaggagggtggatcaaacagccaggaccactaccctgtagggaactcctcatggcccttaacccatctttacccaacaccttacccacccacaaaaacccaagagga

SEQ ID NO: 972983 - DNA, 120 bp, Artificial Sequence
  ENSG00000267943_23 (sequence is synthesized)
aaaggaatgggctatcaaatatgaatctacccgagaacctgaggtgtggtatacagtgggaggaattctccactttcctaggccctccagtaaaaacttgtgagagcactccatgagtca

SEQ ID NO: 972984 - DNA, 120 bp, Artificial Sequence
  ENSG00000267943_24 (sequence is synthesized)
tgtcactttgggagacatcatctccagcacatgtgcaaaaacctcttttccaggaaagggctctactagactatttgtcaggtctttaacacctgtgcatcctgtgcctgtaatagcccc

SEQ ID NO: 972985 - DNA, 82 bp, Artificial Sequence
  ENSG00000267943_25 (sequence is synthesized)
ggtctttaacacctgtgcatcctgtgcctgtaatagcccccagggccctacgctgaagtttcactcttagtacccaggctgg

SEQ ID NO: 972986 - DNA, 64 bp, Artificial Sequence
  ENSG00000267943_26 (sequence is synthesized)
gctgggattacaggcaggtgccaccaaaaaaagaccaaaaaaaactggtcttgaactcccaacc

SEQ ID NO: 972987 - DNA, 120 bp, Artificial Sequence
  ENSG00000267943_27 (sequence is synthesized)
ttgttcaatgttgcccaggttggcctcaaacgcgtagccttgcctccttgtgacccaggacaaccggccagagccaatgcagctccctgtcctgcttagttgagccagttcagcattggg

SEQ ID NO: 972988 - DNA, 120 bp, Artificial Sequence
  ENSG00000267943_28 (sequence is synthesized)
aagcttacccagggaaagactgatggatgtatttcactcaattgccagcctgtagaggctataaatgccttctggtgtttgtggacacctttattgggtgggttaaagcctttcctacaa

SEQ ID NO: 972989 - DNA, 120 bp, Artificial Sequence
  ENSG00000267943_29 (sequence is synthesized)
cctttcctacaagaacagaaaaggcccaggaagtagccaaggtacttcttaaaaaaaaaaaaaaaatcatcccggccgggcgtggtggctcacttctgtaatctcagcactttgggaggc

SEQ ID NO: 972990 - DNA, 71 bp, Artificial Sequence
  ENSG00000267943_30 (sequence is synthesized)
gcggatcacgaggtcagagagagaaaaaattaggtgggtgtggtagcgggcgcctatagtcccagctactc

SEQ ID NO: 972991 - DNA, 120 bp, Artificial Sequence
  ENSG00000267940_0 (sequence is synthesized)
tgcagggatggtggactgtggtgactttaccactatgcagtctatgcatatagcagaattgcacttgtacccttcaaatttatacaaaaaaaaaaaaaaggacgaggaggatctctttag

SEQ ID NO: 972992 - DNA, 120 bp, Artificial Sequence
  ENSG00000267940_1 (sequence is synthesized)
gacttttgggagaggggctcacaggggaaattgtgactgaaaacttctgactgattacttctcagttagaagcccatacattcttctgctgcctgattatcatgattccctaggatccct

SEQ ID NO: 972993 - DNA, 120 bp, Artificial Sequence
  ENSG00000267940_2 (sequence is synthesized)
aaattccctactgatctaccccaacactaagtaagtcggtctttccttttgactcagagagagactgaaactaaaagttactgaaggaaaatggatgactacttggtcctggatggagat

SEQ ID NO: 972994 - DNA, 120 bp, Artificial Sequence
  ENSG00000267940_3 (sequence is synthesized)
catgagcctaagggctgcgctctttgggccatatcctgcttataggatttgcctctggtatggcatgagagacagaccatctgcagggtatctgagggtggtctgaatggagagcatggg

SEQ ID NO: 972995 - DNA, 120 bp, Artificial Sequence
  ENSG00000267940_4 (sequence is synthesized)
gggaataaacagatggatctttttatccagagaacacgaggttctcagtatgaacctgtagggcagtatagaatagtattgacagcaaagactttagagtgataaagagccctaacaagt

SEQ ID NO: 972996 - DNA, 120 bp, Artificial Sequence
  ENSG00000267940_5 (sequence is synthesized)
cacagacccctcacaccttatttgaaacttttagggacagatattttggaattcagtttttttcagattatagaaaaggaatatgatatatatatatcatatattaaggaataccccagt

SEQ ID NO: 972997 - DNA, 120 bp, Artificial Sequence
  ENSG00000267940_6 (sequence is synthesized)
gggattcaggacagtgccctataatcaaacatcaacatttctgaagttagatgtatgaacatttacactaaataagataaataaagattataaataggatcatgatggttgagatgtcag

SEQ ID NO: 972998 - DNA, 120 bp, Artificial Sequence
  ENSG00000267940_7 (sequence is synthesized)
cttttgggccaaagttataaaaaaatattgtttcttcagagttttattttggaattatggatgagggattgtgggcttataattaattctcaggttgtcatgaggaatgagagtgtggta

SEQ ID NO: 972999 - DNA, 120 bp, Artificial Sequence
  ENSG00000267940_8 (sequence is synthesized)
aagctcttgaaacacatcatatggtaggtatgtatgcaatctcaatttggaacaagatacaaatgtccaagggagtggatttttagcttgaaggaagaaagttgctacaatggacaacgt

SEQ ID NO: 973000 - DNA, 120 bp, Artificial Sequence
  ENSG00000267940_9 (sequence is synthesized)
acagctctggaaccagctaccttgaaaagttgtgcacaaccaggggttgaaggtgccttagaagagagtcttcctgtggtgggagggtgacagaattcattgtttatgaacgttggctgc

SEQ ID NO: 973001 - DNA, 120 bp, Artificial Sequence
  ENSG00000267940_10 (sequence is synthesized)
agatgatttccctttcatgtatcagaggggaaaggcaaaaaatggtatacctgtatgtatgtgagacgcaggattatcatacatatatttatttataatcaataaatattttactgcata

SEQ ID NO: 973002 - DNA, 120 bp, Artificial Sequence
  ENSG00000275263_0 (sequence is synthesized)
ggaggacccacgaggactcacccggatgggagggacggccgggaggtggaaaaacacaaccgtgagcggtgactcaggcggtttgccccgcctcgcacataaatgcagggtacctttcct

SEQ ID NO: 973003 - DNA, 120 bp, Artificial Sequence
  ENSG00000275263_1 (sequence is synthesized)
ccgtactcaaacccaccattagtggttaaatccagggaccgcctcaaggttttctgatgagcctagtggggcctaagtgcccttaaatgggccttgtaataataaacgaggtcctacagg

SEQ ID NO: 973004 - DNA, 120 bp, Artificial Sequence
  ENSG00000258272_0 (sequence is synthesized)
tagaaggatatgcctgactgagagaaaagcctgagtaaggtgctgggttctcaggacatatgcaatgaatccagtataacatccctacttccttgagccttccgaccttttcttcaatat

SEQ ID NO: 973005 - DNA, 120 bp, Artificial Sequence
  ENSG00000258272_1 (sequence is synthesized)
catctccacttcatttgatgtggaacattatcagatcaatgcttcaagaagtcatctcattaagttattaggaattctgaatcatggggtctcactatgttgacaaggctggtcttgaac

SEQ ID NO: 973006 - DNA, 120 bp, Artificial Sequence
  ENSG00000258272_2 (sequence is synthesized)
tcctggactcaagcaatcctgctgcctcagcctctgaaagtgccgagattacagatcctgacttttcttcttataatgactaataaaaacagtttgccaggctctgtgccaagtgcttta

SEQ ID NO: 973007 - DNA, 80 bp, Artificial Sequence
  ENSG00000258274_0 (sequence is synthesized)
ggcttcaagcgatcttcttactgtactcgactgacttttcctatttctaatgtcagcatgaagaacacaagaagtcagct

SEQ ID NO: 973008 - DNA, 120 bp, Artificial Sequence
  ENSG00000258274_1 (sequence is synthesized)
ctatttctaatgtcagcatgaagaacacaagaagtcagcttcaaagagtctagaagagcaaacattcactttgcagcctcccttgtaccaaggagtggccatgagacaattctgcccaat

SEQ ID NO: 973009 - DNA, 120 bp, Artificial Sequence
  ENSG00000258274_2 (sequence is synthesized)
ttcccaagaaaaagtgacagacgcagtaggggctgagcaacttccgtgcctcttccagccttacggatgtgctgttggtagctgtgactgccttgctactacgaggaaaaggaaggccaa

SEQ ID NO: 973010 - DNA, 120 bp, Artificial Sequence
  ENSG00000258274_3 (sequence is synthesized)
gagaatagcagagacactcgctctgatgcctttgagccaatgaatcaatgccagaagcagctgacctccagagttcttgttacaggattaaaataaatctctacttatttgccattgtca

SEQ ID NO: 973011 - DNA, 120 bp, Artificial Sequence
  ENSG00000258274_4 (sequence is synthesized)
agaactataaactgactacacagctccctggcccgggaaggctatgaaacaggcaacatggacaatttaaaggtgtacaacatccgaggttccatttcaccctcaggcagcacggagtgg

SEQ ID NO: 973012 - DNA, 120 bp, Artificial Sequence
  ENSG00000258274_5 (sequence is synthesized)
agattggtacccatataaaagaagcccgagagagctatcttgaccctcctaccatgtgaagacacaacaaggtaccgtctatgaaccaggaaatgggccctcaccagacacctaatctgc

SEQ ID NO: 973013 - DNA, 120 bp, Artificial Sequence
  ENSG00000258274_6 (sequence is synthesized)
tggtgccttgatcttggacttcccagcttctagaactgtgggaattaaatttctattgtttataagctacccagtttacactactttgttctatcagcccaaaaagcacaccctgtttca

SEQ ID NO: 973014 - DNA, 120 bp, Artificial Sequence
  ENSG00000258274_7 (sequence is synthesized)
agattctgcattcatttactcattcatacattcaaccatattttgttgggcaccaatgatgccaggcactactctaggtgctcaggatacaataattaataaggcagacaatgccctggc

SEQ ID NO: 973015 - DNA, 120 bp, Artificial Sequence
  ENSG00000258274_8 (sequence is synthesized)
aggaagtagatagagtggtcagagaaggctggtggagagcacagttgaccagagatctgatggaagtgagaaagcaaactatgggaatatctggaaaaagagcattccaggcagaggaat

SEQ ID NO: 973016 - DNA, 120 bp, Artificial Sequence
  ENSG00000258274_9 (sequence is synthesized)
gagcaagtggcaaagatcctcaaatgcctatacttccatggaagaaggccagtgagtgaggaaaagagaggtagcaaaggggatcagagaggatacagggatccagatctcaaagggact

SEQ ID NO: 973017 - DNA, 120 bp, Artificial Sequence
  ENSG00000258274_10 (sequence is synthesized)
tgtaggtaatggccaccactttggacttcatgttttcggagtgacggaaagtccctacagcctttcccagcccctagctaagcctctattgattacttctccttcttgtgctcttatcac

SEQ ID NO: 973018 - DNA, 120 bp, Artificial Sequence
  ENSG00000258274_11 (sequence is synthesized)
ctgtacttttatttaccagttagtctatattccatggatttctattcatctcttgtgtatcaattctatgtcctcaactatgtctcaacggcaagaatcagtcatattctcttctgtatt

SEQ ID NO: 973019 - DNA, 120 bp, Artificial Sequence
  ENSG00000258274_12 (sequence is synthesized)
cccagggcctggcacctaacagatgctcaataaatctttccagaaggtgataatgatgatgtaatctcttagaatcttttctagctgttaagatccatgatgcctttgaactctctcaac

SEQ ID NO: 973020 - DNA, 120 bp, Artificial Sequence
  ENSG00000258274_13 (sequence is synthesized)
aaactagtttgcacaatgactcagaggactgacatctttctagatattttgagattatattcatgccacttttagagtctccatccatcaaatgactagaatgaattacatcagagtttt

SEQ ID NO: 973021 - DNA, 120 bp, Artificial Sequence
  ENSG00000258274_14 (sequence is synthesized)
gtctaaatgaaggctgtgccacttggaatgggattcccttacatggaactacctactaatatttgcactttaagccacctgaacctcaggagagtaataaattgctattaaataaatgct

SEQ ID NO: 973022 - DNA, 120 bp, Artificial Sequence
  ENSG00000258279_0 (sequence is synthesized)
gcagaggccccagggacctgtaggcaggtggagaggggatgggggaggtctcaggtcctcttgctcacccatcagctgtgtagtgtctgaagtgattaaggagcttggggagagccctga

SEQ ID NO: 973023 - DNA, 120 bp, Artificial Sequence
  ENSG00000258279_1 (sequence is synthesized)
atgggaagaaatgggttccatgtgcagcaagccaggagagatttaggcaacgagaacctccagttctgtcttagggttcccagctttctccttgtcctgagggagccgctgagcctgtgg

SEQ ID NO: 973024 - DNA, 120 bp, Artificial Sequence
  ENSG00000258279_2 (sequence is synthesized)
gagatgaggggtgcccattccccagtgcttctcaccctcccccacctgccctcctggggtacctttgtctgccacttgcatcctattggaagctgtccccaagtgcgtgttaggcaggtg

SEQ ID NO: 973025 - DNA, 120 bp, Artificial Sequence
  ENSG00000258279_3 (sequence is synthesized)
tgccagccccaggagaggggaaagcaagcccccgtccacccttgtgggtctctgctcctggaaaaggtgctctagcaggctcatctgtgtgagtcactgtcttccatgtgggaatgctgg

SEQ ID NO: 973026 - DNA, 120 bp, Artificial Sequence
  ENSG00000258279_4 (sequence is synthesized)
aagccaagcttgcacattctaggcagccatttggaagattcttctctgcgcatgaccagctgaaaaggaaaaaccccgaaacattggcactgtgatttctccatgtgaacagtttagttc

SEQ ID NO: 973027 - DNA, 120 bp, Artificial Sequence
  ENSG00000258279_5 (sequence is synthesized)
gccgaggtggacatgcctcattcatgcttatggagtgaccgaccagcctttagtgacaccccctgaaatgtgagtcatccatgggtcactagtcattggagaagagccccttatacaaaa

SEQ ID NO: 973028 - DNA, 120 bp, Artificial Sequence
  ENSG00000258279_6 (sequence is synthesized)
cttggagctcagaccacaaacaacaacaacaatccaaaaaataaaaaaatgaaaaattaggagcagagactaaatggaaagatggaaatattaaaataaaaatattattttaaaaattaa

SEQ ID NO: 973029 - DNA, 120 bp, Artificial Sequence
  ENSG00000258279_7 (sequence is synthesized)
ctctgtctcctgagtagctggaattatagatgtacaccaccacacctgactagttttttaattttttgtgaagacggagttttgcagtgttgcctgggctggtctcaactcctgggctca

SEQ ID NO: 973030 - DNA, 120 bp, Artificial Sequence
  ENSG00000258279_8 (sequence is synthesized)
tgggattacagatgtgagccaccgtgccagccttagttaataattctttactctgttcaaagaactggtgtgggtattgtctccttattgaacctgactgataatggacaggccttgagc

SEQ ID NO: 973031 - DNA, 120 bp, Artificial Sequence
  ENSG00000258279_9 (sequence is synthesized)
taccctgcagggagtccagcgccaccatgatgtccctctcttccctccttgaggctggctgggtccagcctgagctgtgccacctgctggctcaggccagtgggattgtgcctcaggcag

SEQ ID NO: 973032 - DNA, 120 bp, Artificial Sequence
  ENSG00000258279_10 (sequence is synthesized)
ggggcttctgggtggttctgcagaggccccagggacctgtaggcaggcctcccaggctggtctgctccactggccctcagaaagacttgtcgcctcgccgagcctcagtgttctcatctg

SEQ ID NO: 973033 - DNA, 120 bp, Artificial Sequence
  ENSG00000258279_11 (sequence is synthesized)
agggacctgtaggcaggtggagaggggatgggggaggtctcaggtcctcttgctcacccatcagctgtgtagtgtctgaagtgattaaggagcttggggaggcctcccaggctggtctgc

SEQ ID NO: 973034 - DNA, 120 bp, Artificial Sequence
  ENSG00000258279_12 (sequence is synthesized)
agaaaccagggctcagggagtctcagttgcactttggataagtgatagagctaggattggaacctggatatctttgactctgaaatctctgctctacccattgtgatatccagccttccc

SEQ ID NO: 973035 - DNA, 120 bp, Artificial Sequence
  ENSG00000258279_13 (sequence is synthesized)
gctgtggtgcaggctggcagggcaggagctgacctttccggaatggaatgctgcctgagcagtcagctccagaagggaagggggcgttgggccacttccctcaccctctccagtcctcag

SEQ ID NO: 973036 - DNA, 120 bp, Artificial Sequence
  ENSG00000258279_14 (sequence is synthesized)
ctcccctgagacaggtctcggagccctggcctctcttgtggggaagggggcaggtgaggctggctgactgtgtggacacttgcctgatcacttcaagtcaagccacctgggccaggctga

SEQ ID NO: 973037 - DNA, 120 bp, Artificial Sequence
  ENSG00000258279_15 (sequence is synthesized)
ttccaacctgactagggataagcttcacaacaaatctacgaagcagacagacgctgtttacctcctggaggctatccaagaccacacagctggaaccagggtttgctctacagaccatgg

SEQ ID NO: 973038 - DNA, 120 bp, Artificial Sequence
  ENSG00000223393_0 (sequence is synthesized)
cccaccaggcaccggtcgatgatctcgtcctgctgcgcgggcggcagccgcgcccactcgggcccgtacttctcgcggatcttctccttgtcctgcatgatcttcctggccatggggctc

SEQ ID NO: 973039 - DNA, 120 bp, Artificial Sequence
  ENSG00000223393_1 (sequence is synthesized)
agcgacgagaacttggcttgaaggagtactttaggactcagaacaacaggatgaagacagcagctaaaatagaacacaccagcagagacgttcagctccttgagctgtgcttccgaagct

SEQ ID NO: 973040 - DNA, 120 bp, Artificial Sequence
  ENSG00000223393_2 (sequence is synthesized)
caagcatggcagagtggccttgttaaatcagagttcagggtgccaccctgacagtttctgattccgttaccagaccggagcctccagcaatccaggagcacaaacaaggatgccttaaaa

SEQ ID NO: 973041 - DNA, 120 bp, Artificial Sequence
  ENSG00000223393_3 (sequence is synthesized)
aggacaagagccagtatcactgcctttgagtcccagcctcctcaaatccattttctgccctgcaccacctcatcatatcccggatattgttagtgtcgtgtcatttcatgactcaggagc

SEQ ID NO: 973042 - DNA, 120 bp, Artificial Sequence
  ENSG00000223393_4 (sequence is synthesized)
tgcgggtgactttggctgccctgacatttgttaaattggctcctgggtcctggtttgcaaatgttgccactttgagatccgtagatggtcatccctggctcccttggggagtgtcctgga

SEQ ID NO: 973043 - DNA, 120 bp, Artificial Sequence
  ENSG00000223393_5 (sequence is synthesized)
atccaccagctccatctgctcgacaagagacttgagtttgttctgttacctctttcatcattagccaaagctccgggacttggttaaaactttaggcaattaaaaagactgacttatgga

SEQ ID NO: 973044 - DNA, 120 bp, Artificial Sequence
  ENSG00000223393_6 (sequence is synthesized)
cccagcatttcaggccaagccgctggctgcctggcttctgtttttactcctttccttctgtccctttctgggacgagccacaccttctctgctttctctgggcccgtccaggacgctggg

SEQ ID NO: 973045 - DNA, 120 bp, Artificial Sequence
  ENSG00000223393_7 (sequence is synthesized)
cccggggcctggcgcggtgagctgcagatagccgggggcgcagggcagcccggaggctggagggcgacctggaaggctggaccggttcggggcatctggtgctcaaggaaagtcagctcc

SEQ ID NO: 973046 - DNA, 120 bp, Artificial Sequence
  ENSG00000223393_8 (sequence is synthesized)
cgccgcccctcggggccaggtgggtgcatgaagtacccggtggcccaggtgcctttccccaacccaaggagctcagaactcttggcagttcgacgtttgcaaacaaaccaaagaggagca

SEQ ID NO: 973047 - DNA, 120 bp, Artificial Sequence
  ENSG00000223393_9 (sequence is synthesized)
ttttttttcctttttctttttaatagagtcagggtcttgctatgttgcccacatgggtctcaaattcaagcgatcctcccacctcgacctcccaaagcactggaattccaggcataagcc

SEQ ID NO: 973048 - DNA, 120 bp, Artificial Sequence
  ENSG00000223393_10 (sequence is synthesized)
accgtgcctggccaagaacgtttttttttttaacaagtttctaaatgatgctggtctattggtcctgggaccacactttgaaattggtgggataggaggctgggatctttatccattcac

SEQ ID NO: 973049 - DNA, 120 bp, Artificial Sequence
  ENSG00000223393_11 (sequence is synthesized)
ccccaagacagtgaagtggggtgtgcttgaagtggggcaccgtcatcacccacctacccaccacagaggtgagctaaaaggtaaggtgtggctcacaaaaatcttctgctaaatacctat

SEQ ID NO: 973050 - DNA, 120 bp, Artificial Sequence
  ENSG00000223393_12 (sequence is synthesized)
ctttgcctccatttcttcctctttaagacgggggtaactgtaccagtgttctagggtaacatgtaccacccttgaatacagtgttgctccctgtcatgactcacggacaggttaccagac

SEQ ID NO: 973051 - DNA, 120 bp, Artificial Sequence
  ENSG00000223393_13 (sequence is synthesized)
gtagtgttttcactatatcgtccctgcttgaatttatgttcttgaattccattaacctgaaatatatcaaaataccaagatgttatgaagaatgggaacaaatatagaaaagtgaaaaca

SEQ ID NO: 973052 - DNA, 120 bp, Artificial Sequence
  ENSG00000223392_0 (sequence is synthesized)
aggagagcctggcagacagagctctgggtagagtctgggtagagggacctgtggtgggagaaagagagaagatcagagtggaggggagaagcagggttggggccttgaaggtactgctga

SEQ ID NO: 973053 - DNA, 120 bp, Artificial Sequence
  ENSG00000223392_1 (sequence is synthesized)
gcatgtgggtccttatccttaccctgcattgcccgcaggcctgacctttgcttcattcttcatggctgccaagtgagagtgtggcccctgcagatggttggatcatccatccagttcttt

SEQ ID NO: 973054 - DNA, 120 bp, Artificial Sequence
  ENSG00000223392_2 (sequence is synthesized)
gcttcctctagctgatatccttctttgctgtactatatgggaaaagcaagaaatatttgacaccaaaattgcttcctttgtgtggccccgtattgccctgtatagaagcatttcgtcttc

SEQ ID NO: 973055 - DNA, 120 bp, Artificial Sequence
  ENSG00000223392_3 (sequence is synthesized)
gcttggaggaaccagagactcaatcagggattcaagtgaagtctctgttgcaaacccttgagcaggtgagaacccctggactcttgcaggggatgtgggaggagctgtacatacagacag

SEQ ID NO: 973056 - DNA, 120 bp, Artificial Sequence
  ENSG00000223392_4 (sequence is synthesized)
tgctgtccagccaatgtgggttcaaaccctgcatctgtcactggctatgtgaccttgatcaagttccttaaggtctccaggtttgttttcttatctgtaagatgagaatcctcttctgca

SEQ ID NO: 973057 - DNA, 120 bp, Artificial Sequence
  ENSG00000223392_5 (sequence is synthesized)
aaccatgtctgtttaaaatatgtgcttattttgaaagtgatgtagcaacattttctctagttaatgttctttctccctcataattttaaaacatttattcatgactataatgttaagtct

SEQ ID NO: 973058 - DNA, 120 bp, Artificial Sequence
  ENSG00000223392_6 (sequence is synthesized)
gtgactttatttttgctaaatgtccatctcagagaagaatatgactttatatagcgaagtattttttaaaaaatagccttagtaatgcatatttgcaataaaaatatttgacaatcctaa

SEQ ID NO: 973059 - DNA, 120 bp, Artificial Sequence
  ENSG00000223390_0 (sequence is synthesized)
tcgttcgcgcccgccacctgaggtcccgcgatcgggccgccgggccgtacgcagtagaccaggcagagcggggtgcgcgccgcccgtgccaggcagtagagctcgtaacggaaacctttg

SEQ ID NO: 973060 - DNA, 120 bp, Artificial Sequence
  ENSG00000223390_1 (sequence is synthesized)
atgtagttaagcgagtccaggatgaccacgtcgtggcgactcaggcgccgttccacggaggctcgcagagctccacgcaatgccttctcacgggcagaatcgccgtacaccgctgggtcc

SEQ ID NO: 973061 - DNA, 120 bp, Artificial Sequence
  ENSG00000223390_2 (sequence is synthesized)
tctgcgcccaggacagctgcgtcgtccaccacgtacaccgcgcggccctcggcagccagcgccacgcgcaactcttcagcacgccggctcttgccgctgtacggcagcccgcaaaacacc

SEQ ID NO: 973062 - DNA, 120 bp, Artificial Sequence
  ENSG00000223390_3 (sequence is synthesized)
tgcgccaacttccgggttgtacgcgtctccgaccatgggatgctgtcacttgcctaaggctcaagatttgactctgaagagtgagtgattgagaatgaaattgagaggatgcccaggaga

SEQ ID NO: 973063 - DNA, 120 bp, Artificial Sequence
  ENSG00000223390_4 (sequence is synthesized)
actgcaaggtgtctaacatgatcaccatcactctattggtcaatatctaaactcaggcaactgaatcctgctttggcaagatgcccaaccagacagtctgaagggatatacacctacaaa

SEQ ID NO: 973064 - DNA, 120 bp, Artificial Sequence
  ENSG00000223390_5 (sequence is synthesized)
acaatgaaatcctagataaaatggactttcagaatgtgctcactagactcagtaatgacagaaccctccataaacacaaagcaagctaaaacctatgagcaacaagcaagtgaggctgcc

SEQ ID NO: 973065 - DNA, 120 bp, Artificial Sequence
  ENSG00000223394_0 (sequence is synthesized)
atgctgtctcctgctccttctccggggattaggctctgtgttcagtgctgtcatctctcaaaagccaagcagggatatctgtcaacgtggaacctccatgatgatccagtgtcaagtcga

SEQ ID NO: 973066 - DNA, 120 bp, Artificial Sequence
  ENSG00000223394_1 (sequence is synthesized)
tgagagcagatttgtcattgacaagtttcccatcagccgcccaaacctaacattctcaactctgactgtgagcaacaggagacctgaagacagcagcatatacctctgcagcgttgaaga

SEQ ID NO: 973067 - DNA, 120 bp, Artificial Sequence
  ENSG00000224621_0 (sequence is synthesized)
tgctaaggaggaaagttcttcagtgagtcttataaagcggcaccaaaacgcggtatttatagtgacataatcagccctaatggagatggaattaccccataaaggccccaaggagccctc

SEQ ID NO: 973068 - DNA, 120 bp, Artificial Sequence
  ENSG00000224621_1 (sequence is synthesized)
agggcctcagcgccactgcagcagacaaggctcctgtacagaaacaacgtgaggctcagagagaagaaatgactaaaattacacagctggtacatggcagaggtggaactaaaaagttaa

SEQ ID NO: 973069 - DNA, 120 bp, Artificial Sequence
  ENSG00000224621_2 (sequence is synthesized)
ttgtcccagctgtgccctctccctggatgccccttccatctgggcagctcctactagacctgccttggcatacataacacaggagaacggattgccaaagggtaggagagtgcctggtct

SEQ ID NO: 973070 - DNA, 120 bp, Artificial Sequence
  ENSG00000224621_3 (sequence is synthesized)
atagtgtgcgcccaacacagatttggtgaatgaatgaacactgggtccagcagacctggattcttccatgtaacccactgtgtggccttggtggagccatgcgggtgcaataatcctggt

SEQ ID NO: 973071 - DNA, 120 bp, Artificial Sequence
  ENSG00000224626_0 (sequence is synthesized)
attattgtacctcatggatttccagtgtgatgctgaataaaagtgatgagagagaacacatttgtcttcttcctgatcttagggataaagcattcattcattctcaccagaatggagtga

SEQ ID NO: 973072 - DNA, 120 bp, Artificial Sequence
  ENSG00000224626_1 (sequence is synthesized)
taagaccaaggacaagaacacactgttacaaacaaaaagacacccttaaaatgtgacacgaacaggttttatccctgccaagaaatattttctgaattcctagattgattaaatggtcct

SEQ ID NO: 973073 - DNA, 120 bp, Artificial Sequence
  ENSG00000224626_2 (sequence is synthesized)
tctctgtgctctcataatatccttacttacatctgttttatcacttacaatattttattgaaattatctgttcatgtgcgtatttcctccagtagacaataaactccttaactccaggaa

SEQ ID NO: 973074 - DNA, 120 bp, Artificial Sequence
  ENSG00000258857_0 (sequence is synthesized)
aaaggcctcggagggccgccctccgtccatgggagctgtcctgaccgcgggccgagtcctgctgccgggagagcagacctgctagatttgcaaacttccgcaggccgtgcaaagcgcagc

SEQ ID NO: 973075 - DNA, 120 bp, Artificial Sequence
  ENSG00000258857_1 (sequence is synthesized)
tgtaaccgcgtctgcggagcaagacgcctgcgctaggagcccctcctgagcggtccacatttccctgcaacagcagtccccacacctcagaaccgcggttattccctttggtcccttgga

SEQ ID NO: 973076 - DNA, 120 bp, Artificial Sequence
  ENSG00000258857_2 (sequence is synthesized)
gatcagtgctgcggcgtcagtgaatgaatgagagggagaaaggaaagaagaggaaggcgtgactgcagaaattgcttaaattttgccttttccagaatgtcatgaaaatggaatcagacc

SEQ ID NO: 973077 - DNA, 120 bp, Artificial Sequence
  ENSG00000258857_3 (sequence is synthesized)
gaccgtatgtagccttttgaggatagaggatctcccccaccaccccaactccagtgagctttcagatgagattgtagccccagatgacaatagggagtctcgctctgtcacccaggctgg

SEQ ID NO: 973078 - DNA, 120 bp, Artificial Sequence
  ENSG00000258854_0 (sequence is synthesized)
tttttttctctgaatttgaaggagttctttgacctattctgaatggagtgtccaacaccattattgtgggtgattgagactcatccgtatgaactattcaccttcgtacctcccgtttac

SEQ ID NO: 973079 - DNA, 120 bp, Artificial Sequence
  ENSG00000258854_1 (sequence is synthesized)
atatagctgctagcagacaagacatatacttcccagctccaccactgtgactcttttaattcaaagagatttttcaattttccagtgagattctggcctcaattcctgtcctaggctcag

SEQ ID NO: 973080 - DNA, 120 bp, Artificial Sequence
  ENSG00000258854_2 (sequence is synthesized)
aaaaagcacaatagtttctttatacatcttttcttttaaaaagctccctggaaaatattgtaaatatgctactatattgaggtttgataataaagggaaaaattttgctctttataccca

SEQ ID NO: 973081 - DNA, 120 bp, Artificial Sequence
  ENSG00000258853_0 (sequence is synthesized)
ttccacttgcatctgaccagcgtcaacactgatggcctgtggagtggagcctaagctcagtccacagcagggcatgctgcatgatgcttggaagctggggggtgttgatttcaaagctgc

SEQ ID NO: 973082 - DNA, 120 bp, Artificial Sequence
  ENSG00000258850_0 (sequence is synthesized)
taaatgccctgcaccaataggtctccccaccttggtcaagaggttcagtgtatgtgctggcacacactttcaatgttgtggcaagtagtttaaaatattttctaaaccttcacgccttct

SEQ ID NO: 973083 - DNA, 120 bp, Artificial Sequence
  ENSG00000258850_1 (sequence is synthesized)
gtttgtacagaacctcagtgtcagctacaggtgaaatataagaactttctaacgtctttcttgggcatgcacaccattttgcaatatgcgtgtttttccacattcccaggaatatgtcaa

SEQ ID NO: 973084 - DNA, 120 bp, Artificial Sequence
  ENSG00000258850_2 (sequence is synthesized)
agctcttgaaagccctttacaggctactcatttcccagatttttcttttatggtttttggtcttattctttgccccaaccattatcactttctcagccctcttcaatttaaacaattgct

SEQ ID NO: 973085 - DNA, 120 bp, Artificial Sequence
  ENSG00000258850_3 (sequence is synthesized)
aaaatgcctcaggaaaagattattcacactgagtgaactctgagtcaggtcaaattaaaaaaaaaaaaagtcctttccaggtaactgacagacaagtcaaatagtaacaattttctgaag

SEQ ID NO: 973086 - DNA, 120 bp, Artificial Sequence
  ENSG00000258850_4 (sequence is synthesized)
gtggaattcttgagaaactctaaatcaaatccattccgttttctctgggaattgctatgctgataatttttacagcgtgatttcaaggttgttggtttccagtgctactgcaaagctgtg

SEQ ID NO: 973087 - DNA, 120 bp, Artificial Sequence
  ENSG00000258850_5 (sequence is synthesized)
cagaaaggaatatgaatacagggcaagaaatatttccacagaagattaatcggttaatctcctcaagtccatggggacttcggctcaaaatattccaaattcacttttcctatgcattat

SEQ ID NO: 973088 - DNA, 120 bp, Artificial Sequence
  ENSG00000258850_6 (sequence is synthesized)
tttatttcttaatgactcaagagatgtgctgtgttctctttggaaactgctcattgttttcttactctgatttctttctccctctgttgttgcaaagataaaattatattaaaaagtcaa

SEQ ID NO: 973089 - DNA, 120 bp, Artificial Sequence
  ENSG00000258851_0 (sequence is synthesized)
tttgggaggctgaggtgggcagataacgaggtcaagagatggagaccctcctggcaacatggtgaaaccgtgtctccactaaaaatagaaaaatcagctgggcgtggtggcgcacgcctg

SEQ ID NO: 973090 - DNA, 60 bp, Artificial Sequence
  ENSG00000258851_1 (sequence is synthesized)
aaaccgtgtctccactaaaaatagaaaaatcagctgggcgtggtggcgcacgcctgtagt

SEQ ID NO: 973091 - DNA, 120 bp, Artificial Sequence
  ENSG00000258851_2 (sequence is synthesized)
agccacttggccagcattccctgaggtgggagctttcagaaatcctgatgtccagactgtaccctatcccgatgaaaccagaatcgctggggtgggccccaagcaccagccatttcttca

SEQ ID NO: 973092 - DNA, 120 bp, Artificial Sequence
  ENSG00000258851_3 (sequence is synthesized)
actctccaggtaaagaagagcgaccgggacagcgctgaagggcaccaccttgggctttcgaggcccaacacctcctcagcccccaacatgctccactctctcaaaaaaaaacaacccgcg

SEQ ID NO: 973093 - DNA, 120 bp, Artificial Sequence
  ENSG00000287445_0 (sequence is synthesized)
actcgggccacgcagctggaacctggaaattaggattggaatcctgaactcctaaatccaaactacagactggaagttaccaaaaaatgtcacagtggttccttgatcaggtagaaagat

SEQ ID NO: 973094 - DNA, 120 bp, Artificial Sequence
  ENSG00000287445_1 (sequence is synthesized)
gacagagcccaacataccagaacctagaaaggaggcgaaggaggcggtctagagggaagagcactttggtcaaaggatcaggtgcataaatgcggaggaatgaggatgcccggcttgctg

SEQ ID NO: 973095 - DNA, 120 bp, Artificial Sequence
  ENSG00000287445_2 (sequence is synthesized)
gaggatcaagggaaggtaagaggggtaggtgaagtcaggaaggaagcgggtaagggagtgggggtggatcttgggggcttcacaggttattttcaagactggcttttactttcaagactg

SEQ ID NO: 973096 - DNA, 120 bp, Artificial Sequence
  ENSG00000287445_3 (sequence is synthesized)
gaatagaggaattaacagaaaaagggtctcattccagacccaagagcaggttcttagacgtccacggcaaagaatcagggcaagtcgcagagcatagtagttaaaatagttcattagaaa

SEQ ID NO: 973097 - DNA, 120 bp, Artificial Sequence
  ENSG00000287445_4 (sequence is synthesized)
ctactccatttctaataatagtactactgtgtttctgagtagtatccttgctttgaagtagtactaagcaagtattgtttatataggagcacctctgccttcaatgtaatgcttgctttt

SEQ ID NO: 973098 - DNA, 120 bp, Artificial Sequence
  ENSG00000287445_5 (sequence is synthesized)
atagggctaaaactagcgtacttcattacaaaagcctatgatcagcttgttacagactattagtattgttattctcttgtgtaactattgacttcagggagaatttatgggtgtactgtt

SEQ ID NO: 973099 - DNA, 120 bp, Artificial Sequence
  ENSG00000287445_6 (sequence is synthesized)
atctttaaagtgaaactcatttttaaactaagaatgcctttttccattatctcatttcctcaaccataaacatcttgtgaagagtgcctatcttcctgggaaagtcgcccagcaggtttg

SEQ ID NO: 973100 - DNA, 120 bp, Artificial Sequence
  ENSG00000287445_7 (sequence is synthesized)
ttctgacataattccctcctcctttttacaaggagacctttaatcctaaggggtgcagggggacagagatccatcttcagtaacttcaagctgaacagaagcgatgatattcctgcctaa

SEQ ID NO: 973101 - DNA, 120 bp, Artificial Sequence
  ENSG00000287445_8 (sequence is synthesized)
ccattaggatccctttgcccaaagtagagagctagccagtcagaaagcatctgtatagtgaggaccaatcatacataattctaagtcccagaaaaaggtgaaatctagaaaattaacgtg

SEQ ID NO: 973102 - DNA, 120 bp, Artificial Sequence
  ENSG00000287445_9 (sequence is synthesized)
ttaaatttaaagaagcattgaataagcttaactcttattcctacataaaaagtacaatgcagtatattccacagcacaaaacagaatgaatagaattatcccaagcatgctaaacaaaaa

SEQ ID NO: 973103 - DNA, 120 bp, Artificial Sequence
  ENSG00000287445_10 (sequence is synthesized)
aagtttcccaaggactaggcagttgttagaaccaagctgatatggggtcaactgacagcgtgtcaatggcagagatgtgggtgtctaagtcttttgtggcctgagtaacattatgtgaat

SEQ ID NO: 973104 - DNA, 120 bp, Artificial Sequence
  ENSG00000287445_11 (sequence is synthesized)
agtctggaatgtatgcataacattctgttttgattatagcataagttccccctttgagctgctgttaacatgtccagagccatagtttcataaggctatctgtctaatttgagatgtttc

SEQ ID NO: 973105 - DNA, 120 bp, Artificial Sequence
  ENSG00000287445_12 (sequence is synthesized)
ttcagtcaagagggtaagggcatggcgtgtattattgaaaactgcagctgtgtttagctatggctttggcttgaagctcaatgtcaattgtggctgcctgtggggagaagacagtgtcag

SEQ ID NO: 973106 - DNA, 120 bp, Artificial Sequence
  ENSG00000287445_13 (sequence is synthesized)
gcctctgagctgaagctcagccattgtaacccttgtgacctgcacctataagtccagatggcctgcaggagccaagaagtctggagcagccaaaaaaacacaaaagaagtgcaacaaaag

SEQ ID NO: 973107 - DNA, 120 bp, Artificial Sequence
  ENSG00000258858_0 (sequence is synthesized)
gaaccgcataacttttccaacccaggaagtaactgcactttgatggaaggcgcagagtctatttcagagtgcagatgtggaaactgaggccggaagagggcgagtatcctgctccattcc

SEQ ID NO: 973108 - DNA, 120 bp, Artificial Sequence
  ENSG00000258858_1 (sequence is synthesized)
agtgccagacggaggggcagggctggcagtaagggaatttcctacgtccagcgccttctgggtgtgcctgacctctggcccggttcctgggttcctggttccctgcctgggcagggtctc

SEQ ID NO: 973109 - DNA, 120 bp, Artificial Sequence
  ENSG00000258858_2 (sequence is synthesized)
caccccccacgcctgtgctccccagggggcattggggacggtcagggacacagctggtcaccccgccttcccctccttagtcatggtcactcctggggcgactccccagttagagggttg

SEQ ID NO: 973110 - DNA, 120 bp, Artificial Sequence
  ENSG00000258858_3 (sequence is synthesized)
acgggtgggtctgggggcgtacagggattggatcctaccccacccaaaaggaacagagagctgtgatggaggctgattcccctaagcctgccagcggttgcggggtgggaagggctccct

SEQ ID NO: 973111 - DNA, 120 bp, Artificial Sequence
  ENSG00000258858_4 (sequence is synthesized)
gtgcgcccacctgcgcgtgggcagctggaagccaagcagtcagggtggggccgcaggccggcgcgcacctcggggtgccacccgggcggcggacccgaagttgaagtttattttcccaac

SEQ ID NO: 973112 - DNA, 120 bp, Artificial Sequence
  ENSG00000258859_0 (sequence is synthesized)
attttcaaaacatctggagcaagagacaaatcccatcagctcagttccaacaatatatgcagatgggcaactgatggtcagactccagtggttcttcaaaactttctaggaggtaaacaa

SEQ ID NO: 973113 - DNA, 120 bp, Artificial Sequence
  ENSG00000258859_1 (sequence is synthesized)
gatgaaagggaaagcacacaaatttgctggaatttggaaaacacgaaccctggaatttggaggagtcacttccactggaaaatacttttatattatttatagtggctaccattaccgtgc

SEQ ID NO: 973114 - DNA, 120 bp, Artificial Sequence
  ENSG00000258859_2 (sequence is synthesized)
agaaccaagattcaaatctgcacagcagtaaatgaaaccagcccagctgcgtgctcacctgaaacttattttctccttcacgttccaaactcatgacttgcttgtggcagaaaaaaagaa

SEQ ID NO: 973115 - DNA, 120 bp, Artificial Sequence
  ENSG00000258859_3 (sequence is synthesized)
ctacttcggggtccgcaacccctggcagtggaccggtaccagcccatggccagttaggatctgggtaacacagcagcagggccatttcagtccaaggaggaatgggacgcataggtgacc

SEQ ID NO: 973116 - DNA, 120 bp, Artificial Sequence
  ENSG00000263499_0 (sequence is synthesized)
cccacttgagatgggcatgtcaccatcactcctgcgtgagcttcagagagccaggtcacctctactcagttctaacatctgctccagggtttcaattccatcctgttgctcttcttgccc

SEQ ID NO: 973117 - DNA, 120 bp, Artificial Sequence
  ENSG00000263499_1 (sequence is synthesized)
agggccagaggccaagatggattcctgactagctgacagctgtgcctaccccatagggctctcggagctaatcctacaaagtgcttgcactggataaagttggttgagtcacaccttgcc

SEQ ID NO: 973118 - DNA, 120 bp, Artificial Sequence
  ENSG00000263499_2 (sequence is synthesized)
ctctccacatggagcctaggtttgcctaaatgggcagcaaggtataatgagaagaacagagggttcggaaccagaatgacacaggttcaaatcccagctctatcccttagaactgtccca

SEQ ID NO: 973119 - DNA, 120 bp, Artificial Sequence
  ENSG00000263499_3 (sequence is synthesized)
ccaaggaagatccactgctgctgagctctagtgaacccctctgtaaaatgagatgaggactcctgctcaggatgttgtgaggacaaaaggagacagcacgcacgtaaagcacagtcccag

SEQ ID NO: 973120 - DNA, 120 bp, Artificial Sequence
  ENSG00000263499_4 (sequence is synthesized)
tgcctataagcaccgattcctttctggtgaatcaggcgtgaggaaaggctctacccgagatgccctcgtcccaggcacctttcaggctgtacccacgctctcacccaatgagggtggtga

SEQ ID NO: 973121 - DNA, 120 bp, Artificial Sequence
  ENSG00000263499_5 (sequence is synthesized)
tgctgcccggctcgtcaggaggccgcttgaaggctgggctgtggtgactcatcaagcaagtgtccctgctgctcaggggctgcttcaatcagggggacgccacgggaggcattattagct

SEQ ID NO: 973122 - DNA, 120 bp, Artificial Sequence
  ENSG00000263499_6 (sequence is synthesized)
gcacccgcactggggcacacagagtggccagggaggatcccctctctggtgggtcacgaggcagctctgtgcatgcatttgtgtgtgtttattgataaagagccacatttgcattttgct

SEQ ID NO: 973123 - DNA, 120 bp, Artificial Sequence
  ENSG00000263499_7 (sequence is synthesized)
ctggcttggagagcttgtgggtttggccctgagcttgggtggcagtcagctcctgacccatgctcgtcacttatctgtgtctgtggcagtggaggaagaggcatggagatctgggacctg

SEQ ID NO: 973124 - DNA, 120 bp, Artificial Sequence
  ENSG00000263499_8 (sequence is synthesized)
ttaaacccaagcgtggtccttctccctagctgggaatctggcctgtctcctctgctcttctcctaggagaacatggaaccacatgggccacgacatagctgactgggaaagggtggtcag

SEQ ID NO: 973125 - DNA, 120 bp, Artificial Sequence
  ENSG00000263499_9 (sequence is synthesized)
tgatggagggcctgcagcccagctacataaccctgaaagccccttttggcctgaaggggacacacagtctgatgggtacagatgtgagctctggagtatagctttctgggctcgaattct

SEQ ID NO: 973126 - DNA, 120 bp, Artificial Sequence
  ENSG00000263499_10 (sequence is synthesized)
ggggctgccatttgctgaccatgtgaccttgggcaaactgcttaacctctctctgccttgccttgccaatctgtaagtggggataatgattaaagagtaagtgaaaatcaaatgaaataa

SEQ ID NO: 973127 - DNA, 120 bp, Artificial Sequence
  ENSG00000235079_0 (sequence is synthesized)
agtagaaaattgaggacaataaggtttatttacatgttctaccctctcctgaaggatggctggacagataacttcaaagttttttcagcttatgaagaaatggcctccttggacttaaga

SEQ ID NO: 973128 - DNA, 120 bp, Artificial Sequence
  ENSG00000235079_1 (sequence is synthesized)
ttggacttaagaaacagaaaaaagctgggcatggtggttcatgcctataatccccgcactttgggaggctggaggaggatcacttaaggttaggagtttaagaccagcctggccaacata

SEQ ID NO: 973129 - DNA, 120 bp, Artificial Sequence
  ENSG00000235079_2 (sequence is synthesized)
taaatatttaaaaagaaaaaagaaaagtttctcctacaatggtcttacaaagctttaatttcagaataaaaactcctttcacaatcaaagaatgctttccagcgaagaacatttattcta

SEQ ID NO: 973130 - DNA, 120 bp, Artificial Sequence
  ENSG00000235079_3 (sequence is synthesized)
tcagtaatgaggaaaaaatacaactgatcaaaacctctttgagaaagaaacccaaacctttcgggtgaccgtgatcttgttcgtctttttttgcgatcaccagatgaagaagatctagaa

SEQ ID NO: 973131 - DNA, 120 bp, Artificial Sequence
  ENSG00000235079_4 (sequence is synthesized)
cgacttctctttctgttcctctcaggagaagatgatgaacttgaataagatctttttcgtggggaagaagagcccctgtgggacctggagctggatcttcattgattgagaaacaaatca

SEQ ID NO: 973132 - DNA, 120 bp, Artificial Sequence
  ENSG00000235079_5 (sequence is synthesized)
ggtggggtaactgaggccccatgaagttaaagaatgttcctgaagtctctcagcaattctcaagtcccatcttatttgaagcatgtattcctgacatgggtcccataactgctctcagca

SEQ ID NO: 973133 - DNA, 120 bp, Artificial Sequence
  ENSG00000235079_6 (sequence is synthesized)
tactgcttattcaacagaagacttctggatcaaccatgaaaacattctacttaaacattttaattttgtctctttaaaattctatcatgtgtaattaaaaccctgcttactatatcaaaa

SEQ ID NO: 973134 - DNA, 120 bp, Artificial Sequence
  ENSG00000235078_0 (sequence is synthesized)
ggccgctgcccggcacctggaggaggctgggctgtgcgcggcgtttgggggtcggcgtcgcccgcacgctctgcgaggcttgggctcgcgtaccttccagtagagcaccccgagccgccg

SEQ ID NO: 973135 - DNA, 120 bp, Artificial Sequence
  ENSG00000235078_1 (sequence is synthesized)
cagctgctccaggcccactgggcggccggggtcggggcggtggggttgccgcgggtcgcccggggcgtcgtccatataccaggcctgcaccatgacgcgcagtgcgggtgccgtgttcga

SEQ ID NO: 973136 - DNA, 120 bp, Artificial Sequence
  ENSG00000235078_2 (sequence is synthesized)
acccaggggccgcgctcggagcccgtcggccgcgctttatcttatagggaggcgtggacgcgcatgggagccgggattgggcggctggttggaggcagggccggcgcgggggaggcccca

SEQ ID NO: 973137 - DNA, 120 bp, Artificial Sequence
  ENSG00000235078_3 (sequence is synthesized)
cggctccgctgttttcggaagcaaaggcattcaagccccgaccctgtcctgggcaccctcggacctgcctgaggcccgcggcccggggccagccgttcgccagacgcgccgggcaggtga

SEQ ID NO: 973138 - DNA, 120 bp, Artificial Sequence
  ENSG00000235078_4 (sequence is synthesized)
atcgcacgtgccttgtgtgtgctgccgcggtctccctgcaccttcagagcaatcttgtgaggcaaacgacgttaaacgtgtttagagtatggaaagcaaatgcaaaaaaaaaaaaaaaag

SEQ ID NO: 973139 - DNA, 120 bp, Artificial Sequence
  ENSG00000235078_5 (sequence is synthesized)
aataaggattttgttaagctcatgcagtccatatgggcacagttgagacttcacagctcggatcccaggtatgggggaaacagttttatgccataaaaaacatactttagaaaagcaaga

SEQ ID NO: 973140 - DNA, 120 bp, Artificial Sequence
  ENSG00000235078_6 (sequence is synthesized)
tgatggagaggctctgaggaattgccaaggcagcccagcacttgctgctggcaggagttcaagcgggcagaatcagatgagaacagcactcattacttcatacggacattgccggcccat

SEQ ID NO: 973141 - DNA, 120 bp, Artificial Sequence
  ENSG00000235078_7 (sequence is synthesized)
gggattcctcctttgaagaggaatctttggaacttgaactgtctcttccagaagaatagccagcagcagcccaaaaatatgtttcatgaccagaatttatcaccccgatgtaagacactt

SEQ ID NO: 973142 - DNA, 72 bp, Artificial Sequence
  ENSG00000235077_0 (sequence is synthesized)
caggttgaggactgagtgccactggaaatttcccggacgaaaagctgcttggagcctccagggaccggcatc

SEQ ID NO: 973143 - DNA, 120 bp, Artificial Sequence
  ENSG00000235077_1 (sequence is synthesized)
tcacaaaggttccattgaagatttgaggaagatgaagaagctgcaacacctttcggacctttgggctcacaccattgatactgctgatcctgatgaccaatgccaatttgtgttctgcag

SEQ ID NO: 973144 - DNA, 120 bp, Artificial Sequence
  ENSG00000235070_0 (sequence is synthesized)
attctactgactccaagttcacgcagctgttcatcccctgcttaatgtactggtgagttccttgaagccctgaaccgaggacttcttgtgtactttaacatttgttatatctgaagatat

SEQ ID NO: 973145 - DNA, 120 bp, Artificial Sequence
  ENSG00000235070_1 (sequence is synthesized)
tctgattggcaacatttttaacatagagaactgtttaaagaaaataccgccagcacacaactcatccacaaattgctgtttttgaaaaagatggagaggctgtgactgagatcatcagag

SEQ ID NO: 973146 - DNA, 120 bp, Artificial Sequence
  ENSG00000235070_2 (sequence is synthesized)
aaccagcccggcaccccaaacataatagggcaaaggagtcagatgagaattttgttcagtatgagacactggacaacaagacaggacccttgacctcagaaatgcaggaattcaggaata

SEQ ID NO: 973147 - DNA, 120 bp, Artificial Sequence
  ENSG00000235070_3 (sequence is synthesized)
ttatagaacatgaagtagcagagccgtggaggagaatttatagcactaatcttgagcactttcccccgaggactctgcgctgttttcacaaaggcctctcggaatgccaggctgtgaaag

SEQ ID NO: 973148 - DNA, 120 bp, Artificial Sequence
  ENSG00000235070_4 (sequence is synthesized)
gcaggtttctagttgccagcattccagtagtggtactgggaaatggttttataggataaacaaatcacccaaatgcagaaaatgcaattccactgaagcaaatccaacttcctttcctga

SEQ ID NO: 973149 - DNA, 120 bp, Artificial Sequence
  ENSG00000235070_5 (sequence is synthesized)
cggagaatgtaattaaatcctgcttcaggaggacggtttatatcctctgctgctgggggtctcggctcatgctcatcgctggtgtttacaagatgacattacctgcctcctgtgacatgc

SEQ ID NO: 973150 - DNA, 120 bp, Artificial Sequence
  ENSG00000235070_6 (sequence is synthesized)
tgaggcagccctgactttgaagatggggcggtggtgcatgtgagggaagggggatgagtgaggctgtgtttcatttgcagagcttggctgttcatctctcacattcacatctgacaccag

SEQ ID NO: 973151 - DNA, 120 bp, Artificial Sequence
  ENSG00000235070_7 (sequence is synthesized)
aagcccacaccatgcttggcttttccaaaacagtgattctaatgtaacaccctaataagctgtgttaactcacctttcagaaggaggctggggggacatacatcacaacaagttgagagg

SEQ ID NO: 973152 - DNA, 120 bp, Artificial Sequence
  ENSG00000235070_8 (sequence is synthesized)
aaggggtgattgtaacaatattaaatataattatcaccagcagaagttctatgagatgaagtgaatgaatcacagctcatgatgtcttcaaaatacaattaaaagtgcaattttacttta

SEQ ID NO: 973153 - DNA, 120 bp, Artificial Sequence
  ENSG00000235072_0 (sequence is synthesized)
gatcttagttcatctctttaggattgggagggtcaggaagaaaaagatctagctacgataatagacattctttacagatgcaaattttccccccacaaaaaacagctttgtgcagggcct

SEQ ID NO: 973154 - DNA, 120 bp, Artificial Sequence
  ENSG00000235072_1 (sequence is synthesized)
gtaaaatatttttattttcttccttgtctcataacgttatgccagccagagtcaggctggaaagtaagtcacaatatatagggttaaatgaaacctatctgatgagaatttatgatttgt

SEQ ID NO: 973155 - DNA, 84 bp, Artificial Sequence
  ENSG00000235072_2 (sequence is synthesized)
gagtcaggctggaaagtaagtcacaatatatagggttaaatgaaacctatctgatgagaatttatgatttgtagggcatgactc

SEQ ID NO: 973156 - DNA, 120 bp, Artificial Sequence
  ENSG00000235072_3 (sequence is synthesized)
aatgtgatggaatggcagcaagatttcaaagaagattttgggggagagagcagggagtggctcagggaaagaagtggagtgttgagtcagttggcttaatgggaacctggtttgcccatt

SEQ ID NO: 973157 - DNA, 120 bp, Artificial Sequence
  ENSG00000235072_4 (sequence is synthesized)
ttgaaaaccacaacggagaaataatcacccagatctactattttttcaccttaaaacatcctggggcccgtcatcttgcaccctggctctgcagggcaggattggaaggtctctgggggg

SEQ ID NO: 973158 - DNA, 120 bp, Artificial Sequence
  ENSG00000235072_5 (sequence is synthesized)
ccccgctcctctgaaggatcacctgccccacctgtcacattcctccctggccaggcctcacactaaagagactcgcctggctccaccaacacccactccagactctgtaggggggtatca

SEQ ID NO: 973159 - DNA, 120 bp, Artificial Sequence
  ENSG00000235072_6 (sequence is synthesized)
acagctcaagaagccgaaaccaagcaaatcagatggcccagggccacacagggaaggagtggaggggtccctgcgggagtgctgccccttccaggcctcctctgtcaccagaggagctgg

SEQ ID NO: 973160 - DNA, 120 bp, Artificial Sequence
  ENSG00000235072_7 (sequence is synthesized)
tcctgctgcttagagtcatattaaacctttggatggggtatgtaaggacactttcccctggaaaaatgctacgtcactcactttatatcctggccttaggccaactgagccttcacccca

SEQ ID NO: 973161 - DNA, 120 bp, Artificial Sequence
  ENSG00000235072_8 (sequence is synthesized)
ccctccctgcctaagtcacctcaccaagcatcctctggtactgacgacgatgcttttggcctggttaccaagctttcctgaccacctgatggtagggcccctccacatgggctattcatc

SEQ ID NO: 973162 - DNA, 120 bp, Artificial Sequence
  ENSG00000235072_9 (sequence is synthesized)
ctcccagaagcaggtcctccagtgactgatctgcactaatgtgggcaaacagagggcatcctcctcctctctctgcttcttttctttgcaaaattagtgggacaaataggtacaagttgc

SEQ ID NO: 973163 - DNA, 120 bp, Artificial Sequence
  ENSG00000235072_10 (sequence is synthesized)
atgaaaatgagatacagttcttcatttgccatccacaccaggagcaccaggtcccggagcccagctgtgcattagatgttgtctctgcagcacaaggtaggaggctgcaggatgtacctg

SEQ ID NO: 973164 - DNA, 120 bp, Artificial Sequence
  ENSG00000235072_11 (sequence is synthesized)
agaaacgcaatcgcacaaagcaattgttcagcaccaaatatgggggacagaagagtgctaaggggagaagactccaaccataaataaataaaatggcagcaaattaggaaataacagaaa

SEQ ID NO: 973165 - DNA, 120 bp, Artificial Sequence
  ENSG00000235072_12 (sequence is synthesized)
agcccctctcatctgctggtgaggcttcaaccactggcagacgtgctcctcttcgggctgcttactgtgctcctgcagcccataagcgcttcggaggggtgcagttgctatggcaatgcc

SEQ ID NO: 973166 - DNA, 120 bp, Artificial Sequence
  ENSG00000257826_0 (sequence is synthesized)
gcaagttggaggaccatcctggattcatggggagaagaccaaacaagtgtgagtgctggaaaggagacttccctgtgggccagctttggagatgagtgaccacattctccattaccattt

SEQ ID NO: 973167 - DNA, 120 bp, Artificial Sequence
  ENSG00000257826_1 (sequence is synthesized)
gctccacgtggttcagaaccacatgattatttaaccaaagctcgggttgactacacttcaactaactggaacctactgtaacggatccaggaggcccacaggtctgaacaaacacattgt

SEQ ID NO: 973168 - DNA, 120 bp, Artificial Sequence
  ENSG00000257826_2 (sequence is synthesized)
ggtcttccaactggtacctggtttctgctcctggatttaccaagtgactcctcctgtgactctggaagccttgaaaaacttggcatcattccttcctctgtagattaacaataactttac

SEQ ID NO: 973169 - DNA, 120 bp, Artificial Sequence
  ENSG00000257826_3 (sequence is synthesized)
aatcataactttgtacctaatttgtgattcctcgtggaaggaggtaaagttctctgggaaaattagagattgcacggtctttcaaatactaataatcataatctcaacaatctctttgct

SEQ ID NO: 973170 - DNA, 120 bp, Artificial Sequence
  ENSG00000257826_4 (sequence is synthesized)
atattaaaaaacttacaggaatttagaatgcctcaaactggaaacaaatgtccatcaacaggaatgtagattcatacaatggaatattcaagcataaaaagtatgaactactaatacata

SEQ ID NO: 973171 - DNA, 120 bp, Artificial Sequence
  ENSG00000257826_5 (sequence is synthesized)
aaacaacatggacaaatctcaaaaacatcatgttgaatgaaagaagccagactcataacagtactcattatataattccattcctacgaaagccaaatacagatcttcaggaaaagttct

SEQ ID NO: 973172 - DNA, 120 bp, Artificial Sequence
  ENSG00000257826_6 (sequence is synthesized)
ctacatataaccaatttatctatgttagtggtacattgaggaggtgtccagagacaaagagacaagacagcaaatgaatggacaagatgctgtgagggagtaggattcagaagaatgtcc

SEQ ID NO: 973173 - DNA, 120 bp, Artificial Sequence
  ENSG00000223537_0 (sequence is synthesized)
tttttttttttttttttttggccctgggaggctacagggactcaaggacttcatcatcaaagtcctgtgccggctagcttccagttgtattgagtcaatggagaatctggcagattggag

SEQ ID NO: 973174 - DNA, 120 bp, Artificial Sequence
  ENSG00000223537_1 (sequence is synthesized)
tggcaattaaagaaatggccagactgcctcccactctgaggacccttggctacctgacacgtaattccagagaccacagtagtcagtgctggcaagattccagagcccagaagaaggagc

SEQ ID NO: 973175 - DNA, 120 bp, Artificial Sequence
  ENSG00000223537_2 (sequence is synthesized)
aatcttttgaaaatctccttggaaggcacactcaattcaaagatgaccatgggaatgattgacctagcttccaagagattcatttgatgtttagttacaggatatccatcgatgacaaca

SEQ ID NO: 973176 - DNA, 120 bp, Artificial Sequence
  ENSG00000223537_3 (sequence is synthesized)
ggcggtgtcggcgcccgaggtcctgcgtgtggcactgccggggagcccaggcaggagcgacttttgcggtgaattgggggcaatggacaggagaggcgttgtgacccctccctttgggaa

SEQ ID NO: 973177 - DNA, 120 bp, Artificial Sequence
  ENSG00000223537_4 (sequence is synthesized)
gttttatatcgtattaaactgttagctcaacgccaataccttaattttatctcttctccgacaccgaatctggtgttgttcttgaatgtataaaggcatgaaatcccccttaccgtcatc

SEQ ID NO: 973178 - DNA, 120 bp, Artificial Sequence
  ENSG00000223537_5 (sequence is synthesized)
atcattgtcatcatcatcaccatcgtcattatctagtgctaatataataactattacttacctcctaaatgtttttcacatctgcctccttttcctccccactcctgatgccttagtcta

SEQ ID NO: 973179 - DNA, 120 bp, Artificial Sequence
  ENSG00000223537_6 (sequence is synthesized)
agggaatgaagagagcactgcagtcagagaaacctgggttctgagagatcttgggcaaattacttaccctcacaacttctttaccttacctgtaaaatggagatgttaacactagtgcca

SEQ ID NO: 973180 - DNA, 120 bp, Artificial Sequence
  ENSG00000223537_7 (sequence is synthesized)
ctttggtagggttgctattgcataaacaaaattaagtatgtaatgggcttaggaaatgcctggtttaattcgtctgctgtgattaaaatgatcattattattcaaactttcatcatcttt

SEQ ID NO: 973181 - DNA, 120 bp, Artificial Sequence
  ENSG00000223537_8 (sequence is synthesized)
gttcaatagactgtttctaactggtctcagctgcagcgttgttctctttaattcgcagaagtacagaggatttctccaagtacatatgagatccagagactagagtcactccttggctta

SEQ ID NO: 973182 - DNA, 120 bp, Artificial Sequence
  ENSG00000223537_9 (sequence is synthesized)
acctgcttccatccatttatttcagcattttctctctcttagccaatacctaattacttatttttctgcccatttccagattcccaacatgccatctatagcctccctgatcttgaaccg

SEQ ID NO: 973183 - DNA, 120 bp, Artificial Sequence
  ENSG00000223537_10 (sequence is synthesized)
gaggtgtaattagcaacctggctcttacatttttactagattttattaaaactagctcaagccacacatgctccttctctgaggtttccctttcatattgaattgtctctaagtcctctg

SEQ ID NO: 973184 - DNA, 120 bp, Artificial Sequence
  ENSG00000223537_11 (sequence is synthesized)
gatttgtgggggtacaagtgggatggggagcgctccctgacttctgcataccagcaggaagttagctacctcattgtttcttgctgctacgagggttgcagtcaaatcactgtccctcca

SEQ ID NO: 973185 - DNA, 120 bp, Artificial Sequence
  ENSG00000223536_0 (sequence is synthesized)
acttactctcctgccgccttgtgaagaaggtgcctgctttctcttctgccataactaattgttgattgcaaacacaagtgcatgtgagtgtagagggacaggcctgctctctgtatccct

SEQ ID NO: 973186 - DNA, 120 bp, Artificial Sequence
  ENSG00000223536_1 (sequence is synthesized)
ctcctggccctccctgtgcttttgctttggtcagcaggctaaaggaggaggactctgtatcttgctgagccttcttagcttggattctttgatgaaacaccaccatattggagcattcca

SEQ ID NO: 973187 - DNA, 120 bp, Artificial Sequence
  ENSG00000223536_2 (sequence is synthesized)
ctgccaactgccacatcagtgagcatagatgggatcctccacagttgaactttcagataagaccagagccacacctgacaatttgattgcagccttgcagacaaccctgaagcagaggac

SEQ ID NO: 973188 - DNA, 120 bp, Artificial Sequence
  ENSG00000223536_3 (sequence is synthesized)
ccagttcaatcatgctgggattcctgacccacagaatccatgagaaaataaatgtgtgtgtttaagcctctacattttgaggcaatttgttatacagcaagagataatgaatacttttgt

SEQ ID NO: 973189 - DNA, 120 bp, Artificial Sequence
  ENSG00000223536_4 (sequence is synthesized)
actttgcaagtttgcgtaataagtctagtaaatccttctgtagtcatgaaataatacagaagtaagaaaaaaaatcccattttcttgaatgagaaagcaaggtgctgacataacattgtg

SEQ ID NO: 973190 - DNA, 120 bp, Artificial Sequence
  ENSG00000223536_5 (sequence is synthesized)
atcctctgtcctaggtctctccttccatccatggctggggcaaagcatttcgtaaggggatctttgcctgcactactcctcccaggtggacatctcttctctgtgattttcactgagagc

SEQ ID NO: 973191 - DNA, 120 bp, Artificial Sequence
  ENSG00000223536_6 (sequence is synthesized)
atttattcaacatggatttgagttcctagtatgagcttgaaatcatggaggaataagacatatggagatttgatgtgcatatctcacgtcctgcctccatgccatttctcatattgtaac

SEQ ID NO: 973192 - DNA, 120 bp, Artificial Sequence
  ENSG00000223536_7 (sequence is synthesized)
tcctcttgggagcctcttccttcttcattttgactttcaaaattttgtgccgattacaaagccccacattctctatgatgttttctttccaaccctctggtgcccatccacctgtaaatg

SEQ ID NO: 973193 - DNA, 120 bp, Artificial Sequence
  ENSG00000223536_8 (sequence is synthesized)
tctatgacaacagaaccacatagcaaaggctgatgtcatcaattctctctgagttaacctccgacttggtaagatgtgtgagcctttatcagttatgaacagggaatgagtcaaaccaag

SEQ ID NO: 973194 - DNA, 120 bp, Artificial Sequence
  ENSG00000223536_9 (sequence is synthesized)
ttatagttcctaaaatagttacatgacccctaagcagccttgttataaaatgctctaagatgaaattaaaaggtcacacaattattgtttttacttccaaggttcagaaatatacttaac

SEQ ID NO: 973195 - DNA, 120 bp, Artificial Sequence
  ENSG00000223536_10 (sequence is synthesized)
aactaaatgtaaactctctgaccctaggcaaacagaatttaattttttaaaaatgtggaaatctaattagctatcacacttaggccccatgaggccactcgtaatgtgtaactgatactt

SEQ ID NO: 973196 - DNA, 120 bp, Artificial Sequence
  ENSG00000223536_11 (sequence is synthesized)
ccaggtgtcctgctggtggcttgaatcaattagtgatctttattgaagctgaatataattaattacacaactttgagatgttcaagtctaatttcactaaaattacatcataaagctggg

SEQ ID NO: 973197 - DNA, 120 bp, Artificial Sequence
  ENSG00000223536_12 (sequence is synthesized)
gcatttcagggcttctgacagaaaaaaaaacaagcatgaataattactcagttaaattcatggcacataaattcataccacaaaattgaactcctttagcttaccgttgtcagagataaa

SEQ ID NO: 973198 - DNA, 120 bp, Artificial Sequence
  ENSG00000223536_13 (sequence is synthesized)
aatgccctggggtcacacacataggattgttgaacaggtgctcactactgaagaaacatgtgtgttacttatctaaactataagcctatcgggggactatgtgcacagatatttttctga

SEQ ID NO: 973199 - DNA, 120 bp, Artificial Sequence
  ENSG00000223536_14 (sequence is synthesized)
aacatgtaagttaattgcttattcactaggatgacaccaccaagacctatttctgacatgaggtgtgttccctgtcatcctagctgcaataaaggcctgagcaataggaactattacaga

SEQ ID NO: 973200 - DNA, 120 bp, Artificial Sequence
  ENSG00000223536_15 (sequence is synthesized)
aaaccagatccaacacatacaaaaacttaggatcataaaatacttgagaatcgaagctaatcttgcctcttcctctagtctccctaaaatgtgattgtaggttacatctgagacaaaata

SEQ ID NO: 973201 - DNA, 120 bp, Artificial Sequence
  ENSG00000223536_16 (sequence is synthesized)
tcaaagaaattcgagatagtttctcagcatctatgtcagttatctattaccacattaatactgtgtaacaaagcgccctaaaggtaaagtcttaaaagaagacacatttactattgctca

SEQ ID NO: 973202 - DNA, 120 bp, Artificial Sequence
  ENSG00000223536_17 (sequence is synthesized)
tgagtctacaggtcaacagagtggttttgttctgctgatcttggtgagtttgtttggcaagctgtggtttgaaccaaggcttactaacttgtccggtggtaggcaagcttttggctgatt

SEQ ID NO: 973203 - DNA, 120 bp, Artificial Sequence
  ENSG00000223536_18 (sequence is synthesized)
gaggatgcctctgttccatgggcatgtttttatgaagatctcaggggtgagaaaggaagagagagagagagagctgcaaggcttcatgaagcctggcctcagaaatggcaccacatcact

SEQ ID NO: 973204 - DNA, 120 bp, Artificial Sequence
  ENSG00000223536_19 (sequence is synthesized)
tttccaacattctgtccccaaagcaagacacagaccagtgcagattcaaggagtggggaaatagactctacctcttagaggaagaacttgtaaagtcacaaagtaaagaaaggggggaaa

SEQ ID NO: 973205 - DNA, 120 bp, Artificial Sequence
  ENSG00000223536_20 (sequence is synthesized)
attcggtctatttcccaatcaatctactacagcatccagaaatggatggacttattcacgtttgcactcagaaatatgtagttcattttcattattcttgatagtcatattctataaaga

SEQ ID NO: 973206 - DNA, 120 bp, Artificial Sequence
  ENSG00000223534_0 (sequence is synthesized)
tacagataactcaggatcatgtttaattatgtaaaaaagctctaaagtcaggtaatgtttttcatgtgcttctcttgagcagtctgaggaaagaatagaaacagaaaccccttgggacct

SEQ ID NO: 973207 - DNA, 120 bp, Artificial Sequence
  ENSG00000223534_1 (sequence is synthesized)
gagtagacgcagctggccatgcacaggcagaggctctgggtcagtgcaggaagcagagtccagggtgtattgtcatcacctcccccaagatctgtgcaaaggtgaaatcagctcatgagg

SEQ ID NO: 973208 - DNA, 120 bp, Artificial Sequence
  ENSG00000223534_2 (sequence is synthesized)
ggttcagtctttttaggaaattggatgatatctcttcccgaccactagcagcctctttcagtcactggaaaatgcttacaggcagtagccaccatcatgtggcacaaagtgggcatcatc

SEQ ID NO: 973209 - DNA, 120 bp, Artificial Sequence
  ENSG00000223534_3 (sequence is synthesized)
ctagtgtctaacatttaagctgtggttctggctccacatttcacaagaagatgccaccaaagttaaggcttggttctggggaacaatgtctggagattcctagaaactggcaaacttctc

SEQ ID NO: 973210 - DNA, 120 bp, Artificial Sequence
  ENSG00000223530_0 (sequence is synthesized)
cgctcccttttgcacggatacttgagcatggcccctgtggtggggtacctggggaaagagcctggggtgtctcctcagccctgacagctcacctcgtgtcaagagaagcttgttgagatg

SEQ ID NO: 973211 - DNA, 120 bp, Artificial Sequence
  ENSG00000223530_1 (sequence is synthesized)
gagcatgctggagaagccccccaagaccaggcttgaaacaaggggagattgtttttggggactctggaagactaggcattgcacggacccatgctagacagatcggggaagggctggagg

SEQ ID NO: 973212 - DNA, 120 bp, Artificial Sequence
  ENSG00000223530_2 (sequence is synthesized)
aaaagaacgagaacagctttccccatttcttagtgtgctgaagtgggacgtgaagacaggcaaggaaagtgcttccagcggtcagtcagccaggtgctctgctcagaggcagagctggca

SEQ ID NO: 973213 - DNA, 120 bp, Artificial Sequence
  ENSG00000223530_3 (sequence is synthesized)
ggagcctgggaggtgctggcacacgtctttcccgccccaaagccacccactggcttctctcacggccaccctggaggttacagcacatgcatctttaattttttcaattaacaacaatat

SEQ ID NO: 973214 - DNA, 120 bp, Artificial Sequence
  ENSG00000261455_0 (sequence is synthesized)
atgggagggcgggccggggcgagggcggggaattaggcggtgcgaggccaatgggagggcgggccgggtcctctgggctgaggcggggtgccaggcggcacgaagccagtgggagggtga

SEQ ID NO: 973215 - DNA, 120 bp, Artificial Sequence
  ENSG00000261455_1 (sequence is synthesized)
gttaggggcaggggcggggtcccaagccaatggaagggtgataccgagagggcggggcgccaggcggcgagagagccaatgggaggccgagccgaggaccgcgggcggtgggcctccccc

SEQ ID NO: 973216 - DNA, 120 bp, Artificial Sequence
  ENSG00000261455_2 (sequence is synthesized)
cgagaggagggagacccggaaggcggtgggggcggggagtggagctgacaacctgtcaaatccactttgggacgaactaggtcacgcgctccgcgggtcgggcacccccgcccgccaggc

SEQ ID NO: 973217 - DNA, 80 bp, Artificial Sequence
  ENSG00000261455_3 (sequence is synthesized)
acggccgcggctccttcctcttcctgcccgcggtagtgggggtggggcaggcctcgggacacctgcctccgccgccggcc

SEQ ID NO: 973218 - DNA, 120 bp, Artificial Sequence
  ENSG00000261455_4 (sequence is synthesized)
cccgaccgtagactcccggcccgctcgccgcggcaggagccgtggttccgcggacctgggcgcgctctctccctggccactgggagaccccccgcggcctcgcggggaaaacctcgggac

SEQ ID NO: 973219 - DNA, 120 bp, Artificial Sequence
  ENSG00000261455_5 (sequence is synthesized)
tgccccgcgcccccggccgtctctgcgtcgctccttctcgcccgcgaccgtggactcgtcctcgcgagcctgggttggcggaagctgcgggggccggggtcgcactacttggcgcggaag

SEQ ID NO: 973220 - DNA, 120 bp, Artificial Sequence
  ENSG00000261455_6 (sequence is synthesized)
ctacttggcgcggaagggccggcggtgggcggagggatccccgtccgcggggtgagccgctgggcggagccgggaggagccgcgaggatccgcagtggggagccgggaggaacctggcgc

SEQ ID NO: 973221 - DNA, 120 bp, Artificial Sequence
  ENSG00000261455_7 (sequence is synthesized)
ggtctaggagctccggagccaccgttttgtgcccgtggagccgcggggaaggcgcacgcgctcgggtcttcccggcgggtcgtcctgcactttctccctctccggtacggaccgcggcgt

SEQ ID NO: 973222 - DNA, 120 bp, Artificial Sequence
  ENSG00000261455_8 (sequence is synthesized)
tctgtttccaggcaaaggaaaataagtcaaagactcagaaggcagcctgaatccagggcctgggatgcagggtttgctggaacgccagccggtgcgatcgcgcccctgggattccgctta

SEQ ID NO: 973223 - DNA, 120 bp, Artificial Sequence
  ENSG00000261455_9 (sequence is synthesized)
gcccgcgcgtccatttccctgcatggtggactcagtaaagccggatctgtccaacgcctgcagcgtggatgtggaggcggactaatcaactagtgctctgttattatttctacccatccc

SEQ ID NO: 973224 - DNA, 120 bp, Artificial Sequence
  ENSG00000261455_10 (sequence is synthesized)
ttttctccatgctaatttgcttagaactttaacattgaatggacagcaaatgtcatgttctgtttaattatcactccttgaccattatgttaatttctttccctaacaaggtgacgcatt

SEQ ID NO: 973225 - DNA, 120 bp, Artificial Sequence
  ENSG00000261455_11 (sequence is synthesized)
gttttaagtaacaatgaccaactcatctactcttcttccaaattgtgtaaattgaagggtaaaatgtgggaaaacgctaaatttgaatgctaaatttgaacatttcacacaacaataatt

SEQ ID NO: 973226 - DNA, 120 bp, Artificial Sequence
  ENSG00000261455_12 (sequence is synthesized)
tgaaatgcttctttgcaatattatggcgtttcggaacagataaaaatacttcattttcagacatttggtcaacaaatacttcttggacgtttatatgcaaagcaatgcatgtaacatttt

SEQ ID NO: 973227 - DNA, 120 bp, Artificial Sequence
  ENSG00000261455_13 (sequence is synthesized)
cattactttgcaagtgtgcttatcagtaaaagaattttgttttaaattctagccttcgtttaaatgtattttagttaccacattgggaagaaaataaaatattactatgtacggaatgta

SEQ ID NO: 973228 - DNA, 120 bp, Artificial Sequence
  ENSG00000261453_0 (sequence is synthesized)
acccataaagatgatgatattttatccccatcttctggatgagaatattgcaccacattttttcttctctcctccttacttcccaattgcattaaaatatttttctttggattcagggat

SEQ ID NO: 973229 - DNA, 120 bp, Artificial Sequence
  ENSG00000261453_1 (sequence is synthesized)
catggcctggggagaaacacagctttttgtagaagtaaaaatgtgaacacagatacaattcttcattttccccaaacacaccatgcaatgcaaagatgctactttttgtctgcaatgatt

SEQ ID NO: 973230 - DNA, 120 bp, Artificial Sequence
  ENSG00000261453_2 (sequence is synthesized)
ctacctattgttagttcactgcatcctcagagtcagtgcacaggcaggagagactgagattatttagattctcatagtacagcatataatgaggaagacaggctaggatgccatgggtgc

SEQ ID NO: 973231 - DNA, 120 bp, Artificial Sequence
  ENSG00000261453_3 (sequence is synthesized)
cacattagtgccttctttaaggttctgatatacaagcagccctgccccagttggtttgtatttaaaagaagatcatttattaaggtgctgatatacaaactctgtcccacccgagttggc

SEQ ID NO: 973232 - DNA, 120 bp, Artificial Sequence
  ENSG00000261453_4 (sequence is synthesized)
ttgtgtttaaaagaggatcctgacaagtctacctaaagaagatgaaagagatattgggggcaggggacaatggactagctaatgtgcagaaataaactttacagctctaggccagggcca

SEQ ID NO: 973233 - DNA, 120 bp, Artificial Sequence
  ENSG00000261453_5 (sequence is synthesized)
ccataaaactcttccacactgtgcagcacacattatgacggaaacaacatgccttggctggtggctttgctccgtgttcctcaagagagctctgggttgcaaacttgcctgctccctggc

SEQ ID NO: 973234 - DNA, 120 bp, Artificial Sequence
  ENSG00000261453_6 (sequence is synthesized)
tgtctcatcttttacatgtgaggaccacaattcctgacctttgcagtggctgtaaactttgagacaggaaggcaggatctgcagcttgccaggggcctcggaggactctggtggcccatg

SEQ ID NO: 973235 - DNA, 120 bp, Artificial Sequence
  ENSG00000261453_7 (sequence is synthesized)
cagctctatgggcttggaacttgagctcattgaggatgtcacctacagataaacaagtgacacgtcttgaacacattgcaaacaacttttaaaggtcatctcatccatgcctctgtctct

SEQ ID NO: 973236 - DNA, 120 bp, Artificial Sequence
  ENSG00000261453_8 (sequence is synthesized)
tctttggaagacttcaaaattatttcagagtgaaaatgtctcctgttttcaaaaattgccaaatataaattatatgaatgagtttgtttaaacaacttagaggaccaaaataaaaaattt

SEQ ID NO: 973237 - DNA, 120 bp, Artificial Sequence
  ENSG00000261453_9 (sequence is synthesized)
tttaatacaataaatatttactgagcttctacgtatctgatactgaaatggggccgagagggtcacaaagttgatgatctgggcttctttctcatctcaagaagcataattcccacatca

SEQ ID NO: 973238 - DNA, 120 bp, Artificial Sequence
  ENSG00000261453_10 (sequence is synthesized)
ctcatgatgcagagtgtggtaaatgccacatagtaaggccacaaggagagggtttggagccattgatgttacctagaatcaaataattctatggtggagacaaagatactcaggagagca

SEQ ID NO: 973239 - DNA, 120 bp, Artificial Sequence
  ENSG00000261453_11 (sequence is synthesized)
cctgcatctcatctggaccaaaaggaatggacacaactgtctggatgagctgtggcacaggcattctgccaagaagaggaagctggcagaagaggccttgcaagccaaatggactaagac

SEQ ID NO: 973240 - DNA, 120 bp, Artificial Sequence
  ENSG00000261453_12 (sequence is synthesized)
accccacccttgtgaaggcgacagaggactagaaataatgaacaaatctgcactgagcataacccatgatgcatagtactgcagaacagtgctgtacagtgctcttcagggcctcacagg

SEQ ID NO: 973241 - DNA, 120 bp, Artificial Sequence
  ENSG00000261453_13 (sequence is synthesized)
aggtgcagatgggtgccgttgacaacacagagagaagagagaacctaaacaatgaaacaagtcccctgcccacgtgctgtcagacactggagaaaagaacaaaaccaaagaaaagccact

SEQ ID NO: 973242 - DNA, 120 bp, Artificial Sequence
  ENSG00000261453_14 (sequence is synthesized)
gagcaaacacaatggccttgtcttctacctttcttgtggcacaatgcaggactggacagcactgtcctccccatcccatctccttccctccctctactctcacccccctccaccagcctt

SEQ ID NO: 973243 - DNA, 120 bp, Artificial Sequence
  ENSG00000261453_15 (sequence is synthesized)
cctgctcccaaagcacgttactgactagcagcttgccagtccagattgtagttttaatccaccaactagtattgcagctcatagaatggctttggatttatgaaacaggctgaggggaaa

SEQ ID NO: 973244 - DNA, 120 bp, Artificial Sequence
  ENSG00000261453_16 (sequence is synthesized)
taaagtaccctagtttgtagataataaaagctaagagtggtgcatccagggagagaggtggggtgccaggggttcttaggaaggtagtggtaccacctactgccagagtctcttttgaat

SEQ ID NO: 973245 - DNA, 120 bp, Artificial Sequence
  ENSG00000261453_17 (sequence is synthesized)
tggctttatccaggagtcccaaaagccctttaaactacttcatggtagcctttgacagagaactctttggcagtgacttggagagggtttatgaagacagtgctcaggctttggtcatga

SEQ ID NO: 973246 - DNA, 120 bp, Artificial Sequence
  ENSG00000261453_18 (sequence is synthesized)
cacaggcagattggggatggagtggtacatgtttgattacagtgtgtgttgaggggcaagggggcaggtcttggtacaatgacaactagcacgagaccttgaactcaacatggattttaa

SEQ ID NO: 973247 - DNA, 120 bp, Artificial Sequence
  ENSG00000261451_0 (sequence is synthesized)
tccatcagagaacaggctacacgttctttggaatgtgctctgagttccagctgggacattgggatactgggatgccaagaacgtgtctgcctgatgtcagcagtgggctcgaggcagatg

SEQ ID NO: 973248 - DNA, 120 bp, Artificial Sequence
  ENSG00000261451_1 (sequence is synthesized)
tccctgcgcacccactagtcacttagtcggtgcatcttcacagaagataacatctctgtgggcccctctcctcccctgctgtacagtggctcttctgcgaccaagtggcccccttggagg

SEQ ID NO: 973249 - DNA, 120 bp, Artificial Sequence
  ENSG00000261451_2 (sequence is synthesized)
tggaagcaaaaggaaaggctctggacggaggttccccagctccttgataacgtgtaaaaatctctggcaagtcagaggagttcattgctcacattaagagctgcttctcattgctctctt

SEQ ID NO: 973250 - DNA, 120 bp, Artificial Sequence
  ENSG00000261451_3 (sequence is synthesized)
attcattcagccattagttaattaattctctcaacatgaatctattcggtcccggctgtgtgccagggtctgtgctagatgccgggggcatcatgtcagccaaacatggttgccagcctc

SEQ ID NO: 973251 - DNA, 120 bp, Artificial Sequence
  ENSG00000261451_4 (sequence is synthesized)
cataaaactgttctagtggggaaattagatattaaacgagcagtgtcacaactccataattaaaaacagtggatgagctttcagggaaaatcatagtgtgctgtgaaagagtaaaaatga

SEQ ID NO: 973252 - DNA, 120 bp, Artificial Sequence
  ENSG00000261451_5 (sequence is synthesized)
ggggatccgatcaaagctgagggagctgcatttgggctgaattctgcaagatccatgagaagtaacacgcaaagtgggtgcgaaggtacagttgggagagggacacgttccagggagagg

SEQ ID NO: 973253 - DNA, 120 bp, Artificial Sequence
  ENSG00000261451_6 (sequence is synthesized)
gacattttccaggcagaggcatgtgccaaggccccagggtggagccattgaaagaaggaacctaagagctgtggtgatagtgccatatgtgttcatgctgcttttgtttttacaaagact

SEQ ID NO: 973254 - DNA, 120 bp, Artificial Sequence
  ENSG00000261451_7 (sequence is synthesized)
taactttttagggcagttttaggttcacagcaaaattgagaggaagatacagaaatttccgtatgccccccatgccctcacatgcacaagctccccaactatcaccatcccccaccagag

SEQ ID NO: 973255 - DNA, 120 bp, Artificial Sequence
  ENSG00000261451_8 (sequence is synthesized)
tggtgcatttgttacaaatgatgaaccaaattgacacgtcattatcacccagagtccatagtttacattcgggtttgttcttggtgttatacagcctatgggtttggactctatccactg

SEQ ID NO: 973256 - DNA, 120 bp, Artificial Sequence
  ENSG00000261451_9 (sequence is synthesized)
ttagagtatcatagagaatagtttccctgaccaaaaaattctctgtgctccatccacctgttcattcctgtctccctcctgacccctggcaaccactgatcttttaactgtcttcatact

SEQ ID NO: 973257 - DNA, 120 bp, Artificial Sequence
  ENSG00000261451_10 (sequence is synthesized)
tttgccttttccagaatgtcagatagttggaatcacacagtagccttttcaaagtggcttttttcacttagtaagtatgcctttaagtttccatcatgtcttttcatgactcaatagcac

SEQ ID NO: 973258 - DNA, 120 bp, Artificial Sequence
  ENSG00000261451_11 (sequence is synthesized)
atttcttttcagtgctgaataaaatcccattgtctggatgtactgccattcgtttatccaatcacctgctgatgggtatgttggttgtttctaggttttggtaattatgaataacattgc

SEQ ID NO: 973259 - DNA, 120 bp, Artificial Sequence
  ENSG00000261451_12 (sequence is synthesized)
tatacatatctaggttttggtagttatgaataacattgctatacatatctgtgtgcaggtttttatgtggacttaaattttcaacttctttggataaatgccaagaactgtgattgctgc

SEQ ID NO: 973260 - DNA, 120 bp, Artificial Sequence
  ENSG00000261451_13 (sequence is synthesized)
attgcacagtgagaggtatgtttagttttgtaagaagttgccaaactgtcttccaaagtggctgtgccattttgcattctcactagcaatgaatgagaattccagtggctccacatcttc

SEQ ID NO: 973261 - DNA, 120 bp, Artificial Sequence
  ENSG00000261451_14 (sequence is synthesized)
accagcatttggtgctgtcggtgttctggatttcggtcatgttaataggtgtgtagtgatgtctcgttgttttagttcacatttccctgatgacccatgatgtggagcatgttttcatgt

SEQ ID NO: 973262 - DNA, 120 bp, Artificial Sequence
  ENSG00000261451_15 (sequence is synthesized)
gcttctttgtgtctatatatcttcattggtgaggtgtctatcacaatatttggcccagtggttaatttttcgtagctgaccagtatgatgaggggtgctagggatgaaggttggtgaagc

SEQ ID NO: 973263 - DNA, 120 bp, Artificial Sequence
  ENSG00000261451_16 (sequence is synthesized)
ccacaaagtgagtttctgtctttttgagtatccacatttgaactaggcaacctggctgcatgaaactcgtagcttttgttttcccccactttttcagccatctttcagggtcacatcctg

SEQ ID NO: 973264 - DNA, 120 bp, Artificial Sequence
  ENSG00000261451_17 (sequence is synthesized)
cctgaggtaatgttggggcccctggtttttactgttgataattattttaaaactgcagtgacctcactgttgcatttaatttttttaaacacaagggctgggggtggtggctcacacctg

SEQ ID NO: 973265 - DNA, 120 bp, Artificial Sequence
  ENSG00000261451_18 (sequence is synthesized)
cccagcactttgggaggctggggcagggagatcacttgaggccaggatttcaagactagcctggccaacatggcgaatccctgcctctaataaaaatacaaaaattagtttggtggcaca

SEQ ID NO: 973266 - DNA, 120 bp, Artificial Sequence
  ENSG00000261451_19 (sequence is synthesized)
gtgagaccctgtctcaaaaaaaaaaaaatgtaatttacacaaaaaactacacacaaagtatataatttgataactttttgacatacatatatagccatgaaatcatagctacagtcaaga

SEQ ID NO: 973267 - DNA, 120 bp, Artificial Sequence
  ENSG00000261451_20 (sequence is synthesized)
atatagccatgaaatcatagctacagtcaagataacaaatgtatccaccaccccaaaaatatcctcacacctcttattcctgggcctgcttcccctactccatattcaggacgcagtcct

SEQ ID NO: 973268 - DNA, 120 bp, Artificial Sequence
  ENSG00000261451_21 (sequence is synthesized)
aaggcaatccgctttctgccattaaagactagtttgcatttctgaaattggactcagcatttactcttccatcatctggcttcctactcaacgtaagtattttgagattcatccatgttg

SEQ ID NO: 973269 - DNA, 120 bp, Artificial Sequence
  ENSG00000261451_22 (sequence is synthesized)
ctgcatgtctcattggttcattcctcttcattgctaagtagtattccatcgcatggatgtaccacagtgggtttatccatttatctgctgacggacatttgggttcttttcagtttgtga

SEQ ID NO: 973270 - DNA, 120 bp, Artificial Sequence
  ENSG00000261451_23 (sequence is synthesized)
ttataacacataaacgtgctatggagttcatgttttaatctttgtatgaacacatgatttcatttctcctgggtatatacccagctgtcaaatgcctaggtcatatgataggtgcatgtt

SEQ ID NO: 973271 - DNA, 120 bp, Artificial Sequence
  ENSG00000261451_24 (sequence is synthesized)
taactatttaagaaactgccagactgttttccaaagtgattgtaacattttacgttgttaccaccagcagctatgagagttccaggtgtgctgcgtcatcctggatgcttgccatggtca

SEQ ID NO: 973272 - DNA, 120 bp, Artificial Sequence
  ENSG00000261451_25 (sequence is synthesized)
atcgttttgagtttagatattccaacaggtgtgcagtgggatctcactatggtttcaatttgcatttccctaacaaatgatcctgagcctcttctatgtgctgctttgccatctggttat

SEQ ID NO: 973273 - DNA, 120 bp, Artificial Sequence
  ENSG00000261451_26 (sequence is synthesized)
cttatttggtgacacatctagtaaaatcttttgctcattttgggcagttgttaccttagtattgagttttgacagtcctttttatattctagatacgtcctttattagatatccattttg

SEQ ID NO: 973274 - DNA, 120 bp, Artificial Sequence
  ENSG00000261451_27 (sequence is synthesized)
caaagcctgtaacttgtctttttatttttttaacagtatctttcaaaaacagaagttctcaatgttgatgaagctcagtttatcaagtttttcctttatgtattgtgtttttggtattgt

SEQ ID NO: 973275 - DNA, 120 bp, Artificial Sequence
  ENSG00000261451_28 (sequence is synthesized)
gtctaagacatctttgcctgagatgagaagttgtatggtttaaggttttacacttaggcctgtggtccattttgagtttgtttttgtacacagtgtaaagtatgaattaaagtttggttt

SEQ ID NO: 973276 - DNA, 120 bp, Artificial Sequence
  ENSG00000261451_29 (sequence is synthesized)
attttttgcatatagatattcaattattccagcaccatttgttgacaggctattggtatggtctaaaagtttgtaccctctgcagatttgtatgtagagatcctaatccccgaggtgatt

SEQ ID NO: 973277 - DNA, 120 bp, Artificial Sequence
  ENSG00000261451_30 (sequence is synthesized)
gtattaggaggtggggtgtttggggatcttattaagtcatgagggcagagccttcatgaatgccattagtgcccttataaaagagcctcagagacctgccttgtccgttccacattggga

SEQ ID NO: 973278 - DNA, 120 bp, Artificial Sequence
  ENSG00000261451_31 (sequence is synthesized)
ccgttccacattgggaggacacagtgagaagactgtgagtctatgaggaagcagagccctggccagacaccgaatctgctgccaccttgatcctggacttctcagcctccagaactgtga

SEQ ID NO: 973279 - DNA, 120 bp, Artificial Sequence
  ENSG00000261451_32 (sequence is synthesized)
gtttagaagggtacagattatggtatttgatcatagcagcctgagtggactcagacaaccatcctttctcaactgaatcgatgttgcacatttgttgaaaatcaatcgtccatatatgtg

SEQ ID NO: 973280 - DNA, 120 bp, Artificial Sequence
  ENSG00000261451_33 (sequence is synthesized)
tagatctatttctggactgtgtattctgtttcattgatctagtctacctttgtgccaatgctatacagttttgattactaaagattataagttttagaatcagctagtgtaaacagtgaa

SEQ ID NO: 973281 - DNA, 120 bp, Artificial Sequence
  ENSG00000261451_34 (sequence is synthesized)
aatcactgagagttcagaagttaaagttgtactgcggtttcaaataaggtacttaatggtcctttttcatcattcagcatgaatatcccctacgtatctctgaaggttgattttgttctt

SEQ ID NO: 973282 - DNA, 120 bp, Artificial Sequence
  ENSG00000261451_35 (sequence is synthesized)
tattttaagaataaaataacgttgtgaacagcttgaacctgacaagttcacttgaaagcattgcacaggaagtggatttctcagcagccattggtggggccttgtgatcccctgagagtg

SEQ ID NO: 973283 - DNA, 120 bp, Artificial Sequence
  ENSG00000261451_36 (sequence is synthesized)
agcagctctgggaacagaactgacatgagtgtctgggaggggacatgggaaggatctgcatacaaattgaagatccaattcctataaattttctatacaattgtatattttaatatataa

SEQ ID NO: 973284 - DNA, 120 bp, Artificial Sequence
  ENSG00000261451_37 (sequence is synthesized)
ttataattgattttaagtctgtctctggaaatataagctttaataatttacatcttcacttaatcacttatgaaatcattttataacccttaataaaattagatagtgtaacttgtcaaa

SEQ ID NO: 973285 - DNA, 120 bp, Artificial Sequence
  ENSG00000253519_0 (sequence is synthesized)
gtctcaaaaaaaaaaaaaaaaagtaatgaataatgaaatgtaacctaactgtcctaaatataacctgttagagaatggttaaataaatgatgatccattcatatgacagaacactgaatg

SEQ ID NO: 973286 - DNA, 120 bp, Artificial Sequence
  ENSG00000253519_1 (sequence is synthesized)
atatgacagaacactgaatgatcattaaaagcagcaactttaagtagttgttaaattactgacaaaatgtacacaataatcattagtcataaagctcaaaatacaatactgaatatttta

SEQ ID NO: 973287 - DNA, 120 bp, Artificial Sequence
  ENSG00000253519_2 (sequence is synthesized)
tttaaatacacttcgcaaagggaaaaatgtagagagaaataagcctaaccattaccatagttaatgggatcatgagttaattttgttttcttttgcacatctttccacatgtttacaatt

SEQ ID NO: 973288 - DNA, 120 bp, Artificial Sequence
  ENSG00000253519_3 (sequence is synthesized)
gctttcacagtttaagaaaagaactttttattaatctctttttactttattattgtggagaatttcaaagaaatttaaaaaccaagtcataataaatctccacgcttcaacaattcaact

SEQ ID NO: 973289 - DNA, 120 bp, Artificial Sequence
  ENSG00000253519_4 (sequence is synthesized)
taaggctactgaacttttttcgaagaaataaattatttttttaaaaaaggatatttacatatttaaaacagaacagattctttggagtgttttaaacataagctctctattttgggacta

SEQ ID NO: 973290 - DNA, 120 bp, Artificial Sequence
  ENSG00000253519_5 (sequence is synthesized)
aggaactgacaactttttttgagacggggtcttgctttgttgtgcaggctgcagtgcagtgacccaatcttggctcactgcaaactccatctccagggttcaagccattctcatgctcag

SEQ ID NO: 973291 - DNA, 68 bp, Artificial Sequence
  ENSG00000253519_6 (sequence is synthesized)
tcaaggtgctgggattacagggcgtgagccaccatgccccgccaggagtagtaatctttatttttatg

SEQ ID NO: 973292 - DNA, 120 bp, Artificial Sequence
  ENSG00000253519_7 (sequence is synthesized)
ccaccatgccccgccaggagtagtaatctttatttttatgtgggtgatccaaaaataattctctctattctggaaggtgctcaggcactgatatttaaaaaaggatgttccctttttcta

SEQ ID NO: 973293 - DNA, 120 bp, Artificial Sequence
  ENSG00000253519_8 (sequence is synthesized)
tggggcatttcaagcaaaacaatgaaactgcattttaaggatctatgaagcttttctgtccggctctactgatgagcttttctgatgaaactccactctgtattaagaagaggcaccatc

SEQ ID NO: 973294 - DNA, 120 bp, Artificial Sequence
  ENSG00000253519_9 (sequence is synthesized)
agctctcctctcctatgaagtacagtaagctgacccactatttatacctctcctagggatgggttaaaaattctttccccttcagtctagattaaatagatctttagctccatagggtat

SEQ ID NO: 973295 - DNA, 120 bp, Artificial Sequence
  ENSG00000253519_10 (sequence is synthesized)
tggaaatctgtcctatatttgcattccccctaagatctagtataatatttagtatacagtataagtattcagttaatgtttaatgaatgtgagctttaagtcagtgatgagaaaaagaga

SEQ ID NO: 973296 - DNA, 120 bp, Artificial Sequence
  ENSG00000253519_11 (sequence is synthesized)
agaaaaaaatgtttaatgagtgaattaattatataaatgagaatgagaggcccaagtgaaatccagcctctagtctctctctcttcaacattcattcatttgttcattgaacaaatagtt

SEQ ID NO: 973297 - DNA, 120 bp, Artificial Sequence
  ENSG00000253519_12 (sequence is synthesized)
acggtgccaggcactatgctgactattcctacagaatacaatgacccatatgctgggcagacaatggttgggaacaaagacaggatctggtcctctgctttgttctcaggcccttcctga

SEQ ID NO: 973298 - DNA, 120 bp, Artificial Sequence
  ENSG00000253519_13 (sequence is synthesized)
ggatgcccggcatccacatctggagagaacaaagaagcctctataaaaagtagcaggtccattcctcagggggtatgaataggttgcaatacccaagatcttaattgttaaaagtaatct

SEQ ID NO: 973299 - DNA, 120 bp, Artificial Sequence
  ENSG00000240354_0 (sequence is synthesized)
gcactttcctgattccttcagggaaacatctgcctacttgaagctctcataatgaagcactgtcaaattactgaaaggctgcacatcatccaataattaacctggaaagatcacttgcca

SEQ ID NO: 973300 - DNA, 120 bp, Artificial Sequence
  ENSG00000240354_1 (sequence is synthesized)
atggcgttctgccatgacaaacagatgttcctgctacctatctgaaaaagaggtcaaatgttctgaagtagacatactctgtgttccttcctgctccctggcacatcagtaccaagtttc

SEQ ID NO: 973301 - DNA, 120 bp, Artificial Sequence
  ENSG00000240354_2 (sequence is synthesized)
tgtcatgtcaacttcgatttcaattttaccccaggacacatgcacctcagcatggtcagctcagcagtatatcaatgatggcaaaatttaacagcctttaaaagagagctggatgaaaag

SEQ ID NO: 973302 - DNA, 120 bp, Artificial Sequence
  ENSG00000240354_3 (sequence is synthesized)
gattccgaactgcttttcaggacatccatgaatcatctgctttcaatggagtgatattttagaatcacccactcaagttgacaccaattctgaatggtgaggtctcacccttcttatgaa

SEQ ID NO: 973303 - DNA, 120 bp, Artificial Sequence
  ENSG00000273151_0 (sequence is synthesized)
aagaatcaagaacaaagccctgacctgttcaggacagcaaagacaaggctgggtttccagcagaagccagagtgcggccggtgctgaggagtctcttctgagcaccacgtcccttggcaa

SEQ ID NO: 973304 - DNA, 120 bp, Artificial Sequence
  ENSG00000273151_1 (sequence is synthesized)
tgccgccgaaaaagagagctcctggccgagaatcacatgaaaatggacggggacgtttataccaacacaacgccctctcagccccatcgtgcacaaacgcagcgcagagccccagtcttg

SEQ ID NO: 973305 - DNA, 120 bp, Artificial Sequence
  ENSG00000273151_2 (sequence is synthesized)
agagtggagcagccaagccaggggggactctgggcccctctgccacccacagccccagtggccgaggcccagggcagcgcaaggttgcccatcagtggaggtgggaggtcattcccacct

SEQ ID NO: 973306 - DNA, 120 bp, Artificial Sequence
  ENSG00000273151_3 (sequence is synthesized)
ccacttgcctgcccggagcagaaagggatgcaggaggaagcaagacggcttacctggccatggctgaagaagagcagggctcccgagtacatgagctcccgggcctccgtgtgcttgctc

SEQ ID NO: 973307 - DNA, 120 bp, Artificial Sequence
  ENSG00000273151_4 (sequence is synthesized)
tgggacatgtacctgccacagagaggagaccgtgagccacgcccacgtgccctcgccaccgcgctcccccgctcatcttcaggtcagaagctaaaaacaaggcgcccaggaacaggtggc

SEQ ID NO: 973308 - DNA, 120 bp, Artificial Sequence
  ENSG00000273151_5 (sequence is synthesized)
atcctaaaagcagccgctcccagggcccaggtgctgcgtggagggggtctatcctgggtgtcctgctgaccatgagggctgcatggggcgcctctggacactaagggcctatctgtgtcc

SEQ ID NO: 973309 - DNA, 120 bp, Artificial Sequence
  ENSG00000273151_6 (sequence is synthesized)
aaatacaccaggagccagaaagcagcctcaccctggagcagctcaccggtttcagtagctgggaccagaaaggccactgggcagggcaggtgcgcagggaaggagcaggggatgtgcatg

SEQ ID NO: 973310 - DNA, 120 bp, Artificial Sequence
  ENSG00000273151_7 (sequence is synthesized)
tggccacctgagagctgagtggccacaggcaggagccaaaggatggggggctccaggctggggtcccacgggggacagtaacggctgtgacagcaccttcttcccccacggggccagtgt

SEQ ID NO: 973311 - DNA, 120 bp, Artificial Sequence
  ENSG00000273151_8 (sequence is synthesized)
ccccgccctctgcccctctgcgtgccacacccctccccccacgggagggaagggtctggggtgccccgttgcatcatgctcgccctgcatcacgtccccactcccagagcaccgctggca

SEQ ID NO: 973312 - DNA, 120 bp, Artificial Sequence
  ENSG00000273151_9 (sequence is synthesized)
gggaaagctggagctcctcaggccgcacggggacagaggcacggggtggcgagaggtatggtggggaccagcgcgtgacagacgatgtggagagaagccgagatggccgcactgctgtaa

SEQ ID NO: 973313 - DNA, 120 bp, Artificial Sequence
  ENSG00000273151_10 (sequence is synthesized)
gcagcagagcccctgcctgcgagagcagcaggcgtggagggcaggaggcagcctctgcttggatgcgctgcacctcccagtccagtggtggggcccagaacatgttatttcattggctac

SEQ ID NO: 973314 - DNA, 120 bp, Artificial Sequence
  ENSG00000273151_11 (sequence is synthesized)
acgtttttcttaatgatcgctgccttattatcaaaagatacataacgagttaatcagctctgtgcctgcgagccaaatgtccttggacaaagccttgtttaaaaataaatctagttaaag

SEQ ID NO: 973315 - DNA, 120 bp, Artificial Sequence
  ENSG00000273151_12 (sequence is synthesized)
aaagccttgtttaaaaataaatctagttaaagaaaaatactaagtaaacagcagtgcacaccggattcgggggctcacacctgtaatctcagccctttgggaggctgaggtgggaggatc

SEQ ID NO: 973316 - DNA, 120 bp, Artificial Sequence
  ENSG00000273151_13 (sequence is synthesized)
caaggccgcagtaagccatgattgcaccactgcctagacggatgacagagcgaggcgccatccccccaaaacaaacaaacaaaaaccaattgcagtggaggtgataaagagccacagcaa

SEQ ID NO: 973317 - DNA, 120 bp, Artificial Sequence
  ENSG00000273151_14 (sequence is synthesized)
cgccactgaggaccagaatgaccttggtgttgccaggacgggaaggccagccgagaacgcaaagggttggatgctcagttaaccacagaaaagggctcctcttcagaaggcaccacagcc

SEQ ID NO: 973318 - DNA, 120 bp, Artificial Sequence
  ENSG00000273151_15 (sequence is synthesized)
agggaccccaaacacagacagccccgccacatccgggcatctcattagcctggcacacaggccctccccccacaggagaccgcttcgtgctgcacagaggcagggcaccaggagggaaaa

SEQ ID NO: 973319 - DNA, 120 bp, Artificial Sequence
  ENSG00000273151_16 (sequence is synthesized)
gcccgcacccaagagagaaagtgcccccgcacccccgtcagcctgcaggccgttggcaggcctccggttttgctgtgctccccgcacagtgaaggttctggagggagacccaccccaaca

SEQ ID NO: 973320 - DNA, 120 bp, Artificial Sequence
  ENSG00000273151_17 (sequence is synthesized)
ccacagcaggagcctcgacaggaccactgactctgtgaccggccgtcctagttccagtcctgcagggacatgactgactcagaggaggccgggagccgtctggcacagggcactctggaa

SEQ ID NO: 973321 - DNA, 120 bp, Artificial Sequence
  ENSG00000273151_18 (sequence is synthesized)
aaacaagctcccagacacgcctggcctcacgatgccgccagtggggccacgggcagaaccgcatgcaccgaccctgagcaagcaccacaccagcttctgctttgccgatactacagcgtt

SEQ ID NO: 973322 - DNA, 120 bp, Artificial Sequence
  ENSG00000273151_19 (sequence is synthesized)
ctggatgcttctatctgaggtaaagcaagaggtggcgacttagaaaccagaagaaaaaaaggactccctggaaggcagtgacccatattcctgcacgaggagcctgctctggggggcact

SEQ ID NO: 973323 - DNA, 120 bp, Artificial Sequence
  ENSG00000273151_20 (sequence is synthesized)
gccgatggtcacggcccccggcctggtttggactgcgccttgcagccggctcccttcttccctgggcagctgggagccgggcaaggggaaaaaggacgggaggagaattctgggcacaca

SEQ ID NO: 973324 - DNA, 120 bp, Artificial Sequence
  ENSG00000273151_21 (sequence is synthesized)
gtggtccccggcctggctgggggcacccgtttccaggtccaggaatgccggtgacaggcaaaccgtctaaggcggctctgaacgtggacggcttctcctcctgtactggagaattctgga

SEQ ID NO: 973325 - DNA, 120 bp, Artificial Sequence
  ENSG00000273151_22 (sequence is synthesized)
agctgcgaaggattttggtttccaggtgactaagccaggacaggtaccctctcaagcccgaggccggggagagtggggggcagctgggcatggccgggccttctcccggcccggctctgc

SEQ ID NO: 973326 - DNA, 120 bp, Artificial Sequence
  ENSG00000273151_23 (sequence is synthesized)
atgctgcgcactattggccgtgccatgtggacacccagacgtgccttccagatagggaaatggcttctgcctgctgacaggcgctgagagccagtgagcgctggtgctctctgccggcca

SEQ ID NO: 973327 - DNA, 120 bp, Artificial Sequence
  ENSG00000273151_24 (sequence is synthesized)
aaacatctgtatccacagagcaaagtgtctgggcaaacaatctagctgattttgctcttctcttacaaaaacattaaaaagcagaacacagaaacgcaagcattagaactagtggccgag

SEQ ID NO: 973328 - DNA, 120 bp, Artificial Sequence
  ENSG00000273151_25 (sequence is synthesized)
actgtcggtgtcaaatgaagaaagaccgagctcatggggcgaatcccgcccttctctcttggcagacggaagctggcttgcgcgttcagctgtcagggacacgtgaaggatgaagaggaa

SEQ ID NO: 973329 - DNA, 120 bp, Artificial Sequence
  ENSG00000273151_26 (sequence is synthesized)
atactcaagacacacacaggtgcctcgggacagggggccagaggagatttcacaaggacccctccgccgactgccgcgagctaaagcgcactcacgcccggacgcagggctggctggacg

SEQ ID NO: 973330 - DNA, 120 bp, Artificial Sequence
  ENSG00000273151_27 (sequence is synthesized)
ggagtcactccgagaagggacctgagccggcaggtacagctccttcacaagacgctcctcttaggccctgggctaggggtgcaccgcacacactagaccgttttccttttaaaaatctct

SEQ ID NO: 973331 - DNA, 120 bp, Artificial Sequence
  ENSG00000273151_28 (sequence is synthesized)
ttagatgactgaagagacaaaagaaggtcagaggccgcaataaaaaaaatcacgcaaacacactgcaggaggagccaagtggcaggaagagccagacccacgaccgtgtgggcagacagg

SEQ ID NO: 973332 - DNA, 120 bp, Artificial Sequence
  ENSG00000273151_29 (sequence is synthesized)
gggacagctgctgcaggtcacagcctcctgggctgtggtctcagccacaccaagtttctaaatgccaatgtacaaatactacagccaaggctgaggctcctcaagacctggatggtggct

SEQ ID NO: 973333 - DNA, 120 bp, Artificial Sequence
  ENSG00000273151_30 (sequence is synthesized)
ccgaagtgccccaataatccagttggcctgggagatgactccccgtcccagcagggagaagtctggagaaagcaggtgatgaccacaacccgcgccatccccggggcaaggtcggccgcc

SEQ ID NO: 973334 - DNA, 120 bp, Artificial Sequence
  ENSG00000273151_31 (sequence is synthesized)
cacaacccgcgccatccccggggcaaggtcggccgcccacaacccgcgccatccccggggcaaggtcggccgcccacaacccgcgccatccctggagcaaggtcggccgcccacaacccg

SEQ ID NO: 973335 - DNA, 120 bp, Artificial Sequence
  ENSG00000273151_32 (sequence is synthesized)
cgccatccccggggcaaggtcggccgcccataactcgcgccatccatggggcaaggtcagctgctctctagcgtaaccagatgaaccaggtcagtttctctctagcgtaaccacacgaac

SEQ ID NO: 973336 - DNA, 120 bp, Artificial Sequence
  ENSG00000273151_33 (sequence is synthesized)
caggaactgctgcccgacttctgcggggcacatatccaaggacaccaacctgctgggttcccaattccttccctctccttcaccttcaactgctgtggctgtgagttaaaatggcatctc

SEQ ID NO: 973337 - DNA, 120 bp, Artificial Sequence
  ENSG00000273151_34 (sequence is synthesized)
ttgggaacgcttgtacctgctggtgggagtgtaaattagttgaaccatcctggaaagcagtctggcaattcttaaaagaactaaaaacagaactaccgttcgacccagcaaccccactac

SEQ ID NO: 973338 - DNA, 120 bp, Artificial Sequence
  ENSG00000273151_35 (sequence is synthesized)
tgggttatgtccagaggactctaaatggttctaccatgaagacacacgcactcaaatgcccactgcagcaccactcacaacagcaccgacatggaatcaagctggggcctgtcagcggca

SEQ ID NO: 973339 - DNA, 120 bp, Artificial Sequence
  ENSG00000273151_36 (sequence is synthesized)
gacggataaagaggatgtggtccatatacaccgcggaatactatgcagccataaaaaggaacaagatcatgccctttgcaggaacttggatggagctggaggccattatccttcgcaaac

SEQ ID NO: 973340 - DNA, 120 bp, Artificial Sequence
  ENSG00000273151_37 (sequence is synthesized)
taatgcggggacagaatcccgggcactacacttccccacttacaagtggaagctgaatgatgagaacacagggacagaaaggggccaacaacacacactggggccggcctgagggaagag

SEQ ID NO: 973341 - DNA, 120 bp, Artificial Sequence
  ENSG00000273151_38 (sequence is synthesized)
ggagaggctcagaaaaccattttaacaaaactgtcaggtacccatgcttggtacccggtgctgaaatgatctgtaggacaaaccctagtcactagtttacctatataccaagcctgcaca

SEQ ID NO: 973342 - DNA, 120 bp, Artificial Sequence
  ENSG00000273151_39 (sequence is synthesized)
cagacctgaggctaaaataaacattagcatatttaaaaataaatcaacaaagcctgcacacctgcccgaggctaaaataaacataagaatatttaaaaataagtcaacaaacagtatctt

SEQ ID NO: 973343 - DNA, 120 bp, Artificial Sequence
  ENSG00000273151_40 (sequence is synthesized)
ttggtaaatttacccgacagctgaagggataaacaattgtgctggagacacacagggaaaaccactcagcgataaaaggaactgcggacgctccaggaggagtctcccagcctccgtggt

SEQ ID NO: 973344 - DNA, 120 bp, Artificial Sequence
  ENSG00000273151_41 (sequence is synthesized)
gaatgaattcaagcggttagacagaaagtgcgcactgtgattccacatacgtaaaactccaggaaacaccacctcacctaagtgcagcccgcagatgcacgggtgccggggatggggtgg

SEQ ID NO: 973345 - DNA, 120 bp, Artificial Sequence
  ENSG00000273151_42 (sequence is synthesized)
ggtggggtgggagtgggggcgaggaggcctggttgcagagccccacagtgccgtggtatcttctgtgtcttgactggtcatagttcattcatgtcagacctcaccaaattatacatttta

SEQ ID NO: 973346 - DNA, 120 bp, Artificial Sequence
  ENSG00000273151_43 (sequence is synthesized)
cataaatatttaaatgtaaatgtgcaattacatatatttattgacataaaagcattttaaaaaatggctgggtgctatggctcccacctataatccccgcactttgggaggctggggcgg

SEQ ID NO: 973347 - DNA, 66 bp, Artificial Sequence
  ENSG00000273151_44 (sequence is synthesized)
tcccagctactcatgaggctgaggcacgagaattgcctctgagcgacagagcaagactctgtctca

SEQ ID NO: 973348 - DNA, 120 bp, Artificial Sequence
  ENSG00000273151_45 (sequence is synthesized)
cgtaacttggggaatgtgacttctctggcggcgatacacccatggaatactctgaagcagagctgggaatccacacggaattctaccctggaaagacaacgacagtgtctcagtgggtga

SEQ ID NO: 973349 - DNA, 120 bp, Artificial Sequence
  ENSG00000273151_46 (sequence is synthesized)
cagcgaggtgacagctgccgctgctgactcagtcttcattcctggcttgaaaggctccaagccaaggtttgagaggttcagtaacgtgtcccgggccccgtaagaggtggcgtgtgaccc

SEQ ID NO: 973350 - DNA, 120 bp, Artificial Sequence
  ENSG00000273151_47 (sequence is synthesized)
caaagcccaggctttccgagctaagccacaccgtgcccctgccaggtgacctcacgatgtcacatgcggccagcagggcctgctgtctagagggcttaagggagcagaatgctcatcacc

SEQ ID NO: 973351 - DNA, 120 bp, Artificial Sequence
  ENSG00000273151_48 (sequence is synthesized)
ccccgtttcactgtgaaaattcacccttgaccagggactcatcactgaaaaccaaaactgacaaatccctcgtcaccgtagaagtggctcaaaacaaggaacactgtgtttatttcgggg

SEQ ID NO: 973352 - DNA, 120 bp, Artificial Sequence
  ENSG00000273151_49 (sequence is synthesized)
gagatccatttttgctggttaatcactgggcaaatatttatttatttatcgagacagagtttctctcatcgcccaggctggagcgcagtggcgtgacctcggctcaccacaacctccgcc

SEQ ID NO: 973353 - DNA, 70 bp, Artificial Sequence
  ENSG00000273151_50 (sequence is synthesized)
aattgggcaaatatttatatacaaattcctaggcacggcaggcatcagggtgaatgctgaacaacataaa

SEQ ID NO: 973354 - DNA, 120 bp, Artificial Sequence
  ENSG00000273151_51 (sequence is synthesized)
aggcacggcaggcatcagggtgaatgctgaacaacataaaagttccccatcacacagctctatggctggcccctctacccacgggaaggctcgcgttgtacggtttagtgcctcctgaca

SEQ ID NO: 973355 - DNA, 120 bp, Artificial Sequence
  ENSG00000273151_52 (sequence is synthesized)
cctttgccttgatccctgaagaacaatcgggttgaaggcgctatcacaacccgtgccatttgggagctgctaaatgttcagtgacaaattcaactggcattaaaaacgtattgctataaa

SEQ ID NO: 973356 - DNA, 120 bp, Artificial Sequence
  ENSG00000234308_0 (sequence is synthesized)
gggtatgagcagccaggatattgataggggcagtcaagaaaagaattctactgaaataagtaattggttctggaaaaggatgtttcaaaattcttatctgatggcagtctgaagtcctgg

SEQ ID NO: 973357 - DNA, 120 bp, Artificial Sequence
  ENSG00000234308_1 (sequence is synthesized)
aagaaagatttccactttttctactggatatagctgtgtctacatggaatacctggcaaatggactcatccagcaaccatgaaagaacaagacagagctgccgagcaaaaaggagagaac

SEQ ID NO: 973358 - DNA, 120 bp, Artificial Sequence
  ENSG00000234308_2 (sequence is synthesized)
ctgggtgcatggaatattgtcaaaccactgtgttagttagtggtacccagaattgcctacctttggttttcttgttatataagttgttttctcaaatatgtttcattgggctttctgttt

SEQ ID NO: 973359 - DNA, 120 bp, Artificial Sequence
  ENSG00000234308_3 (sequence is synthesized)
cttaaaaaagattctaagtgacatactgtaaaagaaaaggctgagaaaaactgactttattgaggtcatactacataacaaatattttgcatccattatttggcttaatttttataacca

SEQ ID NO: 973360 - DNA, 120 bp, Artificial Sequence
  ENSG00000234308_4 (sequence is synthesized)
ccttatgaagttcatatttgatctccatttaaagaggagtacaacccaaaaagcctgaattttcccccatgaggtcagaagtcttgacccaaaattttcatatgcatcatcaagcattgc

SEQ ID NO: 973361 - DNA, 120 bp, Artificial Sequence
  ENSG00000234308_5 (sequence is synthesized)
atctagttttgactgatacctgtttcccagacttcaaacttttatgaatttcaaagtacttcagtagaacatgggggtatgagtaaaaattgcaaaataaggcagattgttcaaacctta

SEQ ID NO: 973362 - DNA, 120 bp, Artificial Sequence
  ENSG00000234308_6 (sequence is synthesized)
gcacatttattagtttggtgaactaagattactcagatcctaaattctgtattagtatttgtaaaaggcaataatagtacctattcacaaattgtacaacatttaacaaataccaataca

SEQ ID NO: 973363 - DNA, 120 bp, Artificial Sequence
  ENSG00000234308_7 (sequence is synthesized)
gcttagtcatgtaacaaatgtgctttatttatattaatgctgctagtgcaaaatatacagtcaagttttaaaaatcatatcatagaattttaggactataagagattgcagaaatgaaat

SEQ ID NO: 973364 - DNA, 120 bp, Artificial Sequence
  ENSG00000234308_8 (sequence is synthesized)
gaaaacttaacctgcaattcaaaaaatagctcagagctaaatatataagtgatcttcttatgagttacttttaaaaagctaaatataataactttatgtcattaaatttatgataaccgt

SEQ ID NO: 973365 - DNA, 120 bp, Artificial Sequence
  ENSG00000234308_9 (sequence is synthesized)
catttggaattaatgaccagctacgtaaacacagctacatggagaaagaaaggaaaacaaatttagttagaatttaagaacatggtcatcttactgcattttaccatatctggtggacaa

SEQ ID NO: 973366 - DNA, 120 bp, Artificial Sequence
  ENSG00000234308_10 (sequence is synthesized)
ctctgtagtgttgtataattgagaaaacattaaacttggaatcaaaagatgtagctgacatcaagccccttctccattattcattatgtctgtaactttgtgcaagtcatttactgcctc

SEQ ID NO: 973367 - DNA, 120 bp, Artificial Sequence
  ENSG00000234308_11 (sequence is synthesized)
taaatctcaatctttttatctttaaaatgggagtgataatttagccttttgcttatctcacagattaattctaaagtcaaagtatatacaaaagccttttatgcattgaaatatgcagca

SEQ ID NO: 973368 - DNA, 120 bp, Artificial Sequence
  ENSG00000234308_12 (sequence is synthesized)
tacatgaaaggaaaataataaaaatttcagtgaacacaaacggtggaaacttcagactgcatattctgtaacgtgttcttgaagttatttttccttaggatatttactcattacctactc

SEQ ID NO: 973369 - DNA, 120 bp, Artificial Sequence
  ENSG00000234308_13 (sequence is synthesized)
tgaagaatcagcagcctttctgaaactgcacactactaacatagcatagtgccatggatggctatagattcaacctgagccttttgatgatgatgagctttgaaggattcccatctctag

SEQ ID NO: 973370 - DNA, 120 bp, Artificial Sequence
  ENSG00000234308_14 (sequence is synthesized)
agctgtgcgcactttgctcactgtacttgatagaatcaagctacaggcttagcatatgatagttggtttgagtcaagtttggaaatcactcaatcaagaaaccactcaatcaccctgtct

SEQ ID NO: 973371 - DNA, 120 bp, Artificial Sequence
  ENSG00000234308_15 (sequence is synthesized)
agaaaacaaatgaattagagaagaaaaaaccaagatgactcagacccaattctcaaagtgtttttaatgggacattgattcggcccatactgaattttatttactaaaaataaaaaataa

SEQ ID NO: 973372 - DNA, 120 bp, Artificial Sequence
  ENSG00000234308_16 (sequence is synthesized)
aatgaaaatctggattctaagtagaaatgcgggtatgagcagccaggatattgataggggcagtcaagaaaagaattctactgaaataaggatgatgaattcccatggacagctagcaaa

SEQ ID NO: 973373 - DNA, 120 bp, Artificial Sequence
  ENSG00000234308_17 (sequence is synthesized)
ttatctgatgtgggaagcaggttcaggatttctgaacgatggatgatcctgattgacatttcatgtgacagttctcaatctcttcgtgattgggaaagtggcacttataaccaccatcta

SEQ ID NO: 973374 - DNA, 120 bp, Artificial Sequence
  ENSG00000234308_18 (sequence is synthesized)
aacaagcttgcactcaggttctgcttcctggagagcccaggctgatatctcacttcatatttacaacaactatgcaagatatgtcttcttgttgttgtctcataaataaagaaacgggag

SEQ ID NO: 973375 - DNA, 90 bp, Artificial Sequence
  ENSG00000234308_19 (sequence is synthesized)
atgtcttcttgttgttgtctcataaataaagaaacgggagagtctaacaagataactgacttgtacagagtcacacagctagttcagcct

SEQ ID NO: 973376 - DNA, 120 bp, Artificial Sequence
  ENSG00000234308_20 (sequence is synthesized)
ggagtcaccgggactacagatacaaacttttgagacccacccttcgtaagaaaaaaaatgcagaagaaagacaaattggatttcatttcaagaaaattgaaaataaaattcttcatactg

SEQ ID NO: 973377 - DNA, 120 bp, Artificial Sequence
  ENSG00000234308_21 (sequence is synthesized)
ggtatgagcagccaggatattgataggggcagtcaagaaaagaattctactgaaataaggtaaagaaagatttttttaagggttggagaaaggagcatattcactgtctgaaaggaagga

SEQ ID NO: 973378 - DNA, 120 bp, Artificial Sequence
  ENSG00000234308_22 (sequence is synthesized)
accagtagaagaaaacagattgaaggcatagctgagagagctgagtgctgggtccattttggatcctatctatatgctcagttatcaccctagattcttcgactaattctttgtccaaag

SEQ ID NO: 973379 - DNA, 120 bp, Artificial Sequence
  ENSG00000234308_23 (sequence is synthesized)
aaaatgccaaaagctctaggctagtgtcagagcctcaagtcaccctcattgctttctgctacttgctgactttgttacaggtcctagttcttgggttctggctctatcccttgtggccaa

SEQ ID NO: 973380 - DNA, 120 bp, Artificial Sequence
  ENSG00000234308_24 (sequence is synthesized)
gcccttgacttaagcctcaattcattccaattattctatttcaagttctcaatttgattcatttctgagaattcttgttgaactctctagaaatgaggtttttgcctcacacttcacttt

SEQ ID NO: 973381 - DNA, 120 bp, Artificial Sequence
  ENSG00000234308_25 (sequence is synthesized)
aatataaccccaattctgttcagatctccagtgacaatatactttaagggatggtcagccccttcccaccctgggaggggaatttacttagtcaaagctagttatgtaaattctatttcc

SEQ ID NO: 973382 - DNA, 120 bp, Artificial Sequence
  ENSG00000228629_0 (sequence is synthesized)
gactcagaaccggacggaatcgagagatcttggcccgtcctccgtgccactcttttgagggtagactacatttcccagaaggttcagcggtttgagtcagcttttcgcgcgaacttttcc

SEQ ID NO: 973383 - DNA, 120 bp, Artificial Sequence
  ENSG00000228629_1 (sequence is synthesized)
atatgtgagcagcttccatttcccttccatggtcttctcagcttcctccaacagtagattgttcagcctccctaaagcaggagaagaggaaggggaagaaaggtgtttttccgggtttct

SEQ ID NO: 973384 - DNA, 120 bp, Artificial Sequence
  ENSG00000228629_2 (sequence is synthesized)
aagcaaataccttgctgcagatcttcaactgcaggggagggcatgttgccagaacatcctgtttacagaggccacttaaaatccttacgttaaccctaggcatactgtggtcatcctttt

SEQ ID NO: 973385 - DNA, 120 bp, Artificial Sequence
  ENSG00000228627_0 (sequence is synthesized)
actgtggtctttttccagttcttctggcagccctccccaaggacccctgtgagacaaatcaggaatggcttccctggggcccaaggagctgacagggcttttcctgctgcttcttctacc

SEQ ID NO: 973386 - DNA, 120 bp, Artificial Sequence
  ENSG00000228627_1 (sequence is synthesized)
cctgtatttcactcagctttctaaatgacccagttccagaaattcatctatcaaattcacaataggttgtgaattaaaatggaaaactcttggaataatgtaaatggactggatggacat

SEQ ID NO: 973387 - DNA, 120 bp, Artificial Sequence
  ENSG00000228627_2 (sequence is synthesized)
ggggcaactttaaatgcagataaatgagacttttttgctcacctggaacttcaaaaagtgcttaccagagactgtctcctcactgctatttcttatacacaaatttcttgttggcttcct

SEQ ID NO: 973388 - DNA, 120 bp, Artificial Sequence
  ENSG00000228627_3 (sequence is synthesized)
cttaagaaactctctgcatgttggtaacaactgtctatccacttcactcagtccaaacagcagagagcagctgttgtcatgaggaaagcaataagctcacataagccttcaccttatacc

SEQ ID NO: 973389 - DNA, 120 bp, Artificial Sequence
  ENSG00000228627_4 (sequence is synthesized)
tcctgaacaaagtacttctggcgtccagaaaatacaatgatttcagagatgtcttcttagaaataacagatacagaaatggaagaagtgcattatattgcattgccaaccaattgctgca

SEQ ID NO: 973390 - DNA, 120 bp, Artificial Sequence
  ENSG00000228627_5 (sequence is synthesized)
ttatagatctcactaaagctcaaagcaaccctatgaaaccaattttgtcatccctagggagaatgaataatgaaactgtgagaagtgaaataaattgggtaacttttctctcccagtaaa

SEQ ID NO: 973391 - DNA, 120 bp, Artificial Sequence
  ENSG00000228627_6 (sequence is synthesized)
atggcttctaggtctgtcacctctaattcatctcctcctcccccaagtgtgtaatcatagcctttagtttttacaaaactttcattactttaagtaaaaataagcaaatgtatacaagaa

SEQ ID NO: 973392 - DNA, 120 bp, Artificial Sequence
  ENSG00000234306_0 (sequence is synthesized)
cagctcccgggcatagatgcatcttgtgctggctgagccatgtaactccaagtacgatttattttaagagaaaattgcccaccttttagagtaaataaacttaagagcagaacccagcaa

SEQ ID NO: 973393 - DNA, 120 bp, Artificial Sequence
  ENSG00000234306_1 (sequence is synthesized)
aagcacagtttctagaccaaagaggaagaaaataagacaaggcaaggcaaatatgaataaatgacccaggctaaatgccagttccttgcaaagaatttcatttaagcttcactgaattga

SEQ ID NO: 973394 - DNA, 120 bp, Artificial Sequence
  ENSG00000228622_0 (sequence is synthesized)
aaagaaagccggggccagaaagaaactcagacatcatctggcttacattttaatcttgcaactgagaaaaggtagactctcagcagctcctggcaataaacaactcaggcgcaacgggat

SEQ ID NO: 973395 - DNA, 120 bp, Artificial Sequence
  ENSG00000228622_1 (sequence is synthesized)
tattttagccccacgtttctggaggaggaaacgagaacatgatcaaggatgccgtgggaagagcctggggccctccagttctctcggggagcctcgggaagctcctcgcagtttcagcta

SEQ ID NO: 973396 - DNA, 120 bp, Artificial Sequence
  ENSG00000228622_2 (sequence is synthesized)
ctgtagaaattcacagccaagggctcctacagaattgggctgtcagcctggccagcctgggcgggtgggccccgctgtaagaaagcctgccatttggaaatgagaattagagcaaaagga

SEQ ID NO: 973397 - DNA, 120 bp, Artificial Sequence
  ENSG00000228620_0 (sequence is synthesized)
aggaaagaggcctcaagtttccttctgcagcagcgcagcatacggggtgcacagtgatccacccaaacggcagctatgctgccggggctggtgagacgtggtcattcacaaggcagctcg

SEQ ID NO: 973398 - DNA, 120 bp, Artificial Sequence
  ENSG00000228620_1 (sequence is synthesized)
ctgtgctgcacagcaggttgctgcccggagtcgccatgaaggaatgtgatgcagcctattggaggagaaccaaaccccaccaccaccccagaaagccataccagctgccgacatgtacat

SEQ ID NO: 973399 - DNA, 120 bp, Artificial Sequence
  ENSG00000228620_2 (sequence is synthesized)
gcgtgccggccacctcgtaggtcttgtgaaaacgtgagtagtccaccttgtagtggctcttctcctcgaagaccacaggctcaaagcggtggccccacaggatctcgctggccaggtagg

SEQ ID NO: 973400 - DNA, 120 bp, Artificial Sequence
  ENSG00000228620_3 (sequence is synthesized)
agctgcgggcctgggtggtcatggccgtggcctccaccatgccctccaggatgaccacgatctcaaagtcctccgactccagctcctccttgcccatgccataaagcgggctgtcctcgt

SEQ ID NO: 973401 - DNA, 120 bp, Artificial Sequence
  ENSG00000234303_0 (sequence is synthesized)
aaagcagaaggaacaactgtcttgaatatgtcgaaaattgctgtctttaagatgaagcacccagaggaccacaatcctcggattttatgagaagaccttctgccctgcctgcccttttga

SEQ ID NO: 973402 - DNA, 120 bp, Artificial Sequence
  ENSG00000234303_1 (sequence is synthesized)
gacctttatctgaaaaggaacctgcaatcctagaaaagaggtggaggcaggcttgattcagttaaggaagttctttcttctcagcaattaccacgccaattctgtggaaaagcaacattt

SEQ ID NO: 973403 - DNA, 120 bp, Artificial Sequence
  ENSG00000234303_2 (sequence is synthesized)
gcaggaaaagtaaatgacgacagcctgtgtcctctccatgacaccactctgcctccatggaaccactctgcccccatggatctctccagttttaagtctggggaaatctatcaatcacac

SEQ ID NO: 973404 - DNA, 120 bp, Artificial Sequence
  ENSG00000234303_3 (sequence is synthesized)
aatttcagttagcattccaagaactaggggaaggcccgagtaatctattcaaagacatgcttcagaaagaacacaccgaccccatggagagttaaacctgattaccaagaagcaggatag

SEQ ID NO: 973405 - DNA, 120 bp, Artificial Sequence
  ENSG00000234303_4 (sequence is synthesized)
ttaggtgtttccgctatttacataatcattgtaaatataagttacagactaattacaatgataattatgacaatgagcctggcatggaggaagagtttaataaataatatttgatgaatg

SEQ ID NO: 973406 - DNA, 120 bp, Artificial Sequence
  ENSG00000239569_0 (sequence is synthesized)
agagacgacggcgaggctgctcggagtgtctatgcccactctgttgccgctcccgaactccggcacggtctccgactcggccccctgcgcccgctcagtgtcactgcctctcgctctggg

SEQ ID NO: 973407 - DNA, 120 bp, Artificial Sequence
  ENSG00000239569_1 (sequence is synthesized)
aaaatggcggcggcggcggcggcggccgcggcggcggcggcggcggcggcaagtgcacgggatgcattcaacaatccaccgaaggtttgaggaagtgtcggtattcggtgggactggttc

SEQ ID NO: 973408 - DNA, 120 bp, Artificial Sequence
  ENSG00000239569_2 (sequence is synthesized)
tttccccctttcccccagtggccctcaagtctggatataggtgagcttgggcatgccagtattgggtgcacgaacaaggacagcagggcttgggaacgaactccctcccgtcaccctccg

SEQ ID NO: 973409 - DNA, 120 bp, Artificial Sequence
  ENSG00000239569_3 (sequence is synthesized)
tccccctcccaaacaaccccagtcccgtctccccgttcctctccccctcctcccccagcccagtctggcctccagcgctgggtgaacccggttggggtgtcactcgacgcccactagggg

SEQ ID NO: 973410 - DNA, 120 bp, Artificial Sequence
  ENSG00000239569_4 (sequence is synthesized)
ctgaggaggctccagtgcgcaggctccgggcaccggataaaagcggagctggcgagtctagtgctgtctcgatggaggagcaagaaacggaagaggtcggggggagaagcagccggaaaa

SEQ ID NO: 973411 - DNA, 120 bp, Artificial Sequence
  ENSG00000239569_5 (sequence is synthesized)
atgcagccaccgtcaacgccgcctccctgccaccgtgcttcggggtaaaaagctgccgttgccgtcggtgcagttgccgtcgctgcctcctatacttctcttggcctcggggaaggattt

SEQ ID NO: 973412 - DNA, 120 bp, Artificial Sequence
  ENSG00000283457_0 (sequence is synthesized)
caggctggtcctcgcctgctctccaaccgcccccgcgaaatgtaatctttttaggttaaaggccacgggaaagtgattggagcaggctttcatcagaccccagaaagctgggtttggaag

SEQ ID NO: 973413 - DNA, 120 bp, Artificial Sequence
  ENSG00000283457_1 (sequence is synthesized)
gagctccctcggtcaccacaagctacaggagggtggacatcgagggctggttgtgaaggagtgtcttccatgaggagacccctaggccaccccagaccccctcccagcccttctccacca

SEQ ID NO: 973414 - DNA, 120 bp, Artificial Sequence
  ENSG00000283457_2 (sequence is synthesized)
cagctgctccctgacggccagcccatcatccaaggaaaacagcccaggcagtggaaaattacagttttccaataagagagaccaactgcagctttgtagttttcatttcagaatgagtac

SEQ ID NO: 973415 - DNA, 120 bp, Artificial Sequence
  ENSG00000283457_3 (sequence is synthesized)
aaagctgtaatgcaagtcagctgcaccgggcaaatgcagcatacggtgacactgtaacctccctgaaacggcaatgaaaatgcacctgacccagggaggtgccactgtgtggaagcctgc

SEQ ID NO: 973416 - DNA, 120 bp, Artificial Sequence
  ENSG00000283457_4 (sequence is synthesized)
cccttcctcggtagggaaaagatggcctgacctgccgcttcattcaaaggagtccacgcctcctcacctaggttagagcaggtggcatcatccacacaggtgctccaaaacccaagctgg

SEQ ID NO: 973417 - DNA, 120 bp, Artificial Sequence
  ENSG00000283457_5 (sequence is synthesized)
agctgtcacggatttatgagctcctgtctgtttcacggtgctgcttctcaccgagcctacttcatcatttaaattattaacagtgaaagtgcattgactgggggagtcggtggaatacag

SEQ ID NO: 973418 - DNA, 120 bp, Artificial Sequence
  ENSG00000283457_6 (sequence is synthesized)
gatcctgaagagggtggaagggtctcaatacagtttcatctctctcatgcaactcaccctcatcagtctccagatctgggctgctgaacatgcatggaataaacggaggggatttttaag

SEQ ID NO: 973419 - DNA, 120 bp, Artificial Sequence
  ENSG00000283457_7 (sequence is synthesized)
tgcaaagatggagaagggaagagagatgcttgctgcactcagggagctggtacccaggctcctggtgcacctgttgctcacatcccctggaaacagcaaagactccacactgaggttccc

SEQ ID NO: 973420 - DNA, 120 bp, Artificial Sequence
  ENSG00000283457_8 (sequence is synthesized)
atgggaagaaaaaagccttcccctgcttcctctcaggaagaaagggatgcaggaaagcaactctatttgggctccagttcttccttgaaacctcctgagcagaaggggaaatcagacaga

SEQ ID NO: 973421 - DNA, 120 bp, Artificial Sequence
  ENSG00000283457_9 (sequence is synthesized)
atcaaccccaaaggcgatctcctgtctttttgaaattgcttccagctaagctgtgaagaatgtgggagacaaaaagcatctcactctcccatttaagagaatcaaaagtcccaatattga

SEQ ID NO: 973422 - DNA, 85 bp, Artificial Sequence
  ENSG00000267121_0 (sequence is synthesized)
accagcaccccagatgggtgagagatgtgatcactggtttcgtggcctgaccaaggacctccaagatggagtcgtctcagctcac

SEQ ID NO: 973423 - DNA, 80 bp, Artificial Sequence
  ENSG00000267121_1 (sequence is synthesized)
ctggagggagggggcgggcgctggccgggggacccccgcaaccatggcgggcggggagtgggctgccgagccgcttcacc

SEQ ID NO: 973424 - DNA, 120 bp, Artificial Sequence
  ENSG00000267121_2 (sequence is synthesized)
gcgccgcttcacctgccggagcgggaggccaccgaggcgaggccgaggcggcggcgcgctcggcggcgcctccgggtcctagaaccgcatcctcccgctcgcctcgggcgagggattggc

SEQ ID NO: 973425 - DNA, 120 bp, Artificial Sequence
  ENSG00000267121_3 (sequence is synthesized)
attggaggggcacatcttctccgcaccgaggatctcagcgactgcgagcacggctcggagacccacggtggtgcagcgttggggcgccagggctgcgttcccgtctcgcgtcccggactg

SEQ ID NO: 973426 - DNA, 120 bp, Artificial Sequence
  ENSG00000267121_4 (sequence is synthesized)
agaagaaatactttcagagctctttcattcatcctgacaatggccagagaagagccactgacaagactttaagcaagagacggagagttaacatctaatctggaggaagaccctggaagg

SEQ ID NO: 973427 - DNA, 120 bp, Artificial Sequence
  ENSG00000267121_5 (sequence is synthesized)
agccagccccttcccccaggctgacctggtttaagcctttcttctgccaaggtcaccagcaccccagatgggtgagagatgtgatcactggtttcgtggcctgaccaaggacctccaagg

SEQ ID NO: 973428 - DNA, 80 bp, Artificial Sequence
  ENSG00000267121_6 (sequence is synthesized)
cccgcgggctgctcggcgctgccggccgcgttgcccatggtggtccccacccagccggccaggcgcctccagcctcggaa

SEQ ID NO: 973429 - DNA, 80 bp, Artificial Sequence
  ENSG00000267121_7 (sequence is synthesized)
aggcgcctccagcctcggaaatccagctttccgggggacggggacgaggctcccggcccgggcgggggcgagggggcagc

SEQ ID NO: 973430 - DNA, 80 bp, Artificial Sequence
  ENSG00000267121_8 (sequence is synthesized)
tcggggcggccccgtccgtgggaccgggcggcgagctgcagggttgggggaggaagtcaggctgcaggccgccggggcca

SEQ ID NO: 973431 - DNA, 120 bp, Artificial Sequence
  ENSG00000267121_9 (sequence is synthesized)
tctccaaacaggaactcctaaacagggtggggggcgcggacgcaggccagtggagacccccgccacctgtcccacctcgaccaaccgtgcgcctgtgcagggcacccctacaggttttag

SEQ ID NO: 973432 - DNA, 120 bp, Artificial Sequence
  ENSG00000267121_10 (sequence is synthesized)
gcggaaaggaggatgagagccagccacaaggctggaaaaggagtgggcaccgcagaggagggaaaaagaatcttgacactgtcaccgccagggatctaggggggcctcttaccttggaga

SEQ ID NO: 973433 - DNA, 120 bp, Artificial Sequence
  ENSG00000267121_11 (sequence is synthesized)
ataacaatctctgatgtctgctaattacagaaatactttcagagctctttcattcatcctgacaatggccagagaaggtaggtattggtagccttattttagagatggggaaactgaggc

SEQ ID NO: 973434 - DNA, 120 bp, Artificial Sequence
  ENSG00000267121_12 (sequence is synthesized)
tgagagtaggtaagtaagctgtccaagggcactcagctaacaaaggacagaagcaagcctcctcactgtctacctccaaaacctacactggcttggagttgctgtcctggccctccactg

SEQ ID NO: 973435 - DNA, 120 bp, Artificial Sequence
  ENSG00000267121_13 (sequence is synthesized)
cccatctcatgtaggacgggagagtatggggggctggggtcccatctatagcctgaatttgagactttcagttgctcctctcattccccatttaatttgtggggatccccaactgacccc

SEQ ID NO: 973436 - DNA, 120 bp, Artificial Sequence
  ENSG00000267121_14 (sequence is synthesized)
tccctacacttccagggcactgaggagggagggcccgctgaaggagccccgaattatctctaggccaggtcaggagccattagtgtcccctcccctgacagcatcctcctccttctgccc

SEQ ID NO: 973437 - DNA, 120 bp, Artificial Sequence
  ENSG00000267121_15 (sequence is synthesized)
cagcctagcgagggacagacttttaacctctctaggagagtggctgcttcaagtcatcctatgggaccagctgttcatgcttcctcttgcccagaactacttctgtgagaggaaaagaga

SEQ ID NO: 973438 - DNA, 120 bp, Artificial Sequence
  ENSG00000267121_16 (sequence is synthesized)
agggtaggagcgtgccctgcagctggaaacccaagccaggcggggagccacgaatgcagtagttatcagactgtatcttcaatcctgggggcttctcaagccattgccagccactcttca

SEQ ID NO: 973439 - DNA, 120 bp, Artificial Sequence
  ENSG00000267121_17 (sequence is synthesized)
ctgtgctaccccctgctggccgtagacggtatgacagccaagatagggcaaggcttcgaggggcgatggatggattcaccgcagcggcgacatttctggactgttgtcaccttcagtgca

SEQ ID NO: 973440 - DNA, 120 bp, Artificial Sequence
  ENSG00000267121_18 (sequence is synthesized)
gtcactgggaatattcagaacccaggtgattgataaggttttcccagggatctcttctctccccttcaccattactcagtaggagcttccttaaaaacggaaaacgagaggccgggcgcg

SEQ ID NO: 973441 - DNA, 77 bp, Artificial Sequence
  ENSG00000267121_19 (sequence is synthesized)
ctcaaaaaaaaaaaaaaaaaaaggaaaaaggggccgggcgcggtggctcacgtctataatccatttgagactagtgt

SEQ ID NO: 973442 - DNA, 120 bp, Artificial Sequence
  ENSG00000267121_20 (sequence is synthesized)
gcagagctaactgcataataagcacactggaggggattcacaggctttgaggattgttttgaaggaagagaaataggtcctacttctgtgggagactgattattcctttaactccaatca

SEQ ID NO: 973443 - DNA, 120 bp, Artificial Sequence
  ENSG00000267121_21 (sequence is synthesized)
gtttctgcaagcctatattcattctccctctctctcatgctgatcagaactgtgagttacaaaaaaaatgagaagatggaatcaattattacgtagtaaatttcatttgcttggcaggag

SEQ ID NO: 973444 - DNA, 120 bp, Artificial Sequence
  ENSG00000267122_0 (sequence is synthesized)
gaaaaggcagcagaggtccagcgacagggcaccaggtccatcaacagtgaaaccacgctggggacacgtaaggctgctgcaaccgcaaccaccctaggctcaacgacgtcacagggaggc

SEQ ID NO: 973445 - DNA, 120 bp, Artificial Sequence
  ENSG00000267122_1 (sequence is synthesized)
tgatgggagaggctcggacaccacggagtgcagcctcgcgcgcagcccacctgcagctccaggcagtgcctctgcttctccgagatctggctcttcagggcctgcttctccttcaacagc

SEQ ID NO: 973446 - DNA, 120 bp, Artificial Sequence
  ENSG00000267122_2 (sequence is synthesized)
ttctccagcgacagcgtggcccagtccagctgcagctcctcgcagcgagccttgagctgaggggatagggatgggacagttgcgactggctggctgcctgcccagcacaccccacactct

SEQ ID NO: 973447 - DNA, 120 bp, Artificial Sequence
  ENSG00000267122_3 (sequence is synthesized)
cagggcagggttccctgggcctgcctcagccaacagcatgtgtgcttagggcacagaccccgtttctggaatagcaggctgaggatgcggaacacgcggagactggggccccccacggac

SEQ ID NO: 973448 - DNA, 120 bp, Artificial Sequence
  ENSG00000267122_4 (sequence is synthesized)
agatgaggcagctccagcacccacaccacgatggtgggatgctcgcatgaccccacacctcgagcctgccagagtgtggctccatgacacccagggccgctgagaaaccatccagccgag

SEQ ID NO: 973449 - DNA, 120 bp, Artificial Sequence
  ENSG00000267122_5 (sequence is synthesized)
gggcccaggcctgcctgctgtgacgcgctcgacaagctttcacaggtggcgcaattcgtctgggaacaaaccccacaacagaggcgggccttccagagcctcccacccgcacagaggaca

SEQ ID NO: 973450 - DNA, 120 bp, Artificial Sequence
  ENSG00000267122_6 (sequence is synthesized)
cacccgcccaggcagggcccctctggttccacgtccctgtccttgcgccgcggcacccaccagctgcaagctctggccgcggagcgcgcggttgtcctgctccagctgctccgactgctc

SEQ ID NO: 973451 - DNA, 120 bp, Artificial Sequence
  ENSG00000267122_7 (sequence is synthesized)
ccgcagctgctggttatgggcggagatctccttctgcgcttgaatcaggtcgttgtaggtcagcgccttcacacccagctggggacatggggcgggggagaggtcatgctggtggcctcc

SEQ ID NO: 973452 - DNA, 120 bp, Artificial Sequence
  ENSG00000267122_8 (sequence is synthesized)
aaggtgaagtaagcccccaggcatgaccacccctgcagcccagcccctgggacacagctggacagaggcatagacaggaagccacaggaagccataccgacggacatggaccaccccagc

SEQ ID NO: 973453 - DNA, 120 bp, Artificial Sequence
  ENSG00000267122_9 (sequence is synthesized)
ctgcgccccagctgccacctgccacctgccctctggggtccactacctcatccaatttttgctgaaacagcctcctgatctcctccttctgggcctggcagtggctgaggagctgctgag

SEQ ID NO: 973454 - DNA, 120 bp, Artificial Sequence
  ENSG00000267122_10 (sequence is synthesized)
ccgcacccaggagctgggcgttcttctcctgtaggacaaacagggcaggtgactaagggccagggcaggtgactgagggcccacagggagggcccacgccctgcctctcatgcttcctga

SEQ ID NO: 973455 - DNA, 120 bp, Artificial Sequence
  ENSG00000267122_11 (sequence is synthesized)
ggttcactgcaaagaactctcgccagctggagggactgcacctgccaccccacctggactcagccagggcagcgcccccagccacgcagaggccggccaatgccaaggagtttatcccaa

SEQ ID NO: 973456 - DNA, 120 bp, Artificial Sequence
  ENSG00000267122_12 (sequence is synthesized)
ggcaataccaggggatggacttttcacatggatctgcaaggaagccttctgcagcgtaacagcaaacactcagtgtccggaggcccacctccaagggaagaccccaggagccactgacac

SEQ ID NO: 973457 - DNA, 120 bp, Artificial Sequence
  ENSG00000267122_13 (sequence is synthesized)
aggacaaccttcagacaccagcagagaacagggccccggcccaggcatgctgtcagctacacagtgagcaatgcatgtgcatatatgctcaaagcacgctgtaagcttttttttaaaagc

SEQ ID NO: 973458 - DNA, 120 bp, Artificial Sequence
  ENSG00000267122_14 (sequence is synthesized)
aaagccaaagtccaaaatgcaaaccagggctcagggacagccgaccttgtggctccaatggcttttggagttatctctgggccgccagaacttccaccccatagcccggccctagctccc

SEQ ID NO: 973459 - DNA, 120 bp, Artificial Sequence
  ENSG00000267122_15 (sequence is synthesized)
cactaaagcaggtcctcggagactcccagggcggggccccacagccgggacctcaggtgaaggaaatcatgtatacagtggtccatttccaggacaaactgccttgaattggcttaggtc

SEQ ID NO: 973460 - DNA, 120 bp, Artificial Sequence
  ENSG00000267122_16 (sequence is synthesized)
agcaaactacagaagagacagcatgtactaggcccctgcttggatcgctgatgcctgcttgtcagcctcccctgcccccgcttcccccggcttagttgccctcacccgaaccaaagaagt

SEQ ID NO: 973461 - DNA, 120 bp, Artificial Sequence
  ENSG00000267122_17 (sequence is synthesized)
ttagcctaagatgaaggtttaccagcctgcaaaagagctggctttgtctgttcttaatcagcctgcccagctacttagatcataagtcaaatacttgaacagtccctgagctgactggga

SEQ ID NO: 973462 - DNA, 87 bp, Artificial Sequence
  ENSG00000267122_18 (sequence is synthesized)
cataagtcaaatacttgaacagtccctgagctgactgggattgcaatgcacaaaatgcagcaggacaaccctaaagaaaacacctac

SEQ ID NO: 973463 - DNA, 120 bp, Artificial Sequence
  ENSG00000267122_19 (sequence is synthesized)
cgagatcacaccactgcactccagcccctgccgaaccaataggcgacaactgggaagactgtgacctcacagtactcagcctttgaggaaccgggggagggacctgtgcactagggggaa

SEQ ID NO: 973464 - DNA, 120 bp, Artificial Sequence
  ENSG00000267122_20 (sequence is synthesized)
gaggaaccgggggagggacctgtgcactagggggaaggttgcttgttcaaactgtgctgggtgtgcctatcagacaccaggtcttgcaaaaccatgattaaaagtctcattttcgctgtt

SEQ ID NO: 973465 - DNA, 120 bp, Artificial Sequence
  ENSG00000267123_0 (sequence is synthesized)
tcctgttgtgtggcccagacagggcactgtctgtggccccaggggttgaggacccctggctttaacaacagaaaggtaccatcttacagttctggaggccaaagtctgatatccaggtgt

SEQ ID NO: 973466 - DNA, 120 bp, Artificial Sequence
  ENSG00000267123_1 (sequence is synthesized)
ctgcagggttgatcccttctgaggctaccccagttactggattgggatccaccctcactcaatatggcctcagcttaatgaaagacatctgcagagaccctatttctactaaaagccaca

SEQ ID NO: 973467 - DNA, 120 bp, Artificial Sequence
  ENSG00000267123_2 (sequence is synthesized)
ttctgagacttctcgtgggcgtgagtttttgagagacactgttctgctccatgcagggagggaattgggatctgaagacgttgcattcgaggtctcggggctcctgatgagcagcctcgg

SEQ ID NO: 973468 - DNA, 120 bp, Artificial Sequence
  ENSG00000267123_3 (sequence is synthesized)
cctgacctggggcaggtgtgatgtctgcggctcaccatctccaccctgcctgctgtggaatctccacaacgacaggtgctttggaggccagagtgcatgcgtacgggccctgcacacgct

SEQ ID NO: 973469 - DNA, 120 bp, Artificial Sequence
  ENSG00000267123_4 (sequence is synthesized)
catatgacacattatcagaccaaaccagagctcttggttttcggatctggggatgaattctttagcacagatggaaccatgaacttctatgatcaactgccaggaaggaaatacctcagg

SEQ ID NO: 973470 - DNA, 78 bp, Artificial Sequence
  ENSG00000267123_5 (sequence is synthesized)
ggcatgatcttggctcactgcagcctcgaactcacaggcttagagccatccccagtgcaggacatgctattgacttcc

SEQ ID NO: 973471 - DNA, 120 bp, Artificial Sequence
  ENSG00000267123_6 (sequence is synthesized)
catccccagtgcaggacatgctattgacttccatgagacaaacacctacttggaaatcaggttttttctgtaccttttgaaggagcaggaatttcccagcatttcctggacaaagacgga

SEQ ID NO: 973472 - DNA, 120 bp, Artificial Sequence
  ENSG00000267123_7 (sequence is synthesized)
ggccacattcgctgcatcctttccagcaagatgtcattctgagatttttgtcattcctgggcgttatgaggactgccaagggacacaattccatgggaggaaagttttcttctaagctgc

SEQ ID NO: 973473 - DNA, 120 bp, Artificial Sequence
  ENSG00000267123_8 (sequence is synthesized)
aagccagctctggcttctggagtttctccttaggattgcaagacagtagttccctgtcctttaggtcttctccagaaataccttaaaatagcaaataaaataagatataagcaaacaaaa

SEQ ID NO: 973474 - DNA, 120 bp, Artificial Sequence
  ENSG00000267123_9 (sequence is synthesized)
gcagcctgggggtggcacggaccacagaacacaagaggcatccaggagtcagatgcagcagatagaggccgcgtgcctcaccgcctgtgaaatgcagggagaggaggatgtttatgtcac

SEQ ID NO: 973475 - DNA, 120 bp, Artificial Sequence
  ENSG00000267123_10 (sequence is synthesized)
tgagcccatcgggcacagcatggaaaagagaattctggtccttttcccctgggattgaggtctcctgggctcagtctgcagtgggaaacccggccacattcgctgcatcctttccagcaa

SEQ ID NO: 973476 - DNA, 120 bp, Artificial Sequence
  ENSG00000267123_11 (sequence is synthesized)
cagttcccggactgtccctggagcacaggccaggcaccctggatgattaactgaggggttccatgagtatttcctgagcactgtatgctgagcgctgttgtagcccatggaactaaacct

SEQ ID NO: 973477 - DNA, 120 bp, Artificial Sequence
  ENSG00000267123_12 (sequence is synthesized)
agtacccaatagttactttttctaagccactctctccttccacccaccaccttcaagtaggctgcagtgtctgttgtccccctctttgtgtccatgtgccctcatttagctcccacttat

SEQ ID NO: 973478 - DNA, 65 bp, Artificial Sequence
  ENSG00000267123_13 (sequence is synthesized)
cctctttgtgtccatgtgccctcatttagctcccacttataagtgaaaatgtgcagcgtttgctt

SEQ ID NO: 973479 - DNA, 77 bp, Artificial Sequence
  ENSG00000267123_14 (sequence is synthesized)
gctgcatagtattccatagtgtatatgtaacacatgttctttatccagtctaccactgatgagcactggacatatgc

SEQ ID NO: 973480 - DNA, 120 bp, Artificial Sequence
  ENSG00000267123_15 (sequence is synthesized)
gtctttacggtagaacaatgtatattcctttggatatatacccagtaacgggattgctaggttgaatggtagttctgtttttagctcttcgaggaattgccatgcggctttccataatga

SEQ ID NO: 973481 - DNA, 120 bp, Artificial Sequence
  ENSG00000267123_16 (sequence is synthesized)
atgactgaactcatttacattcccaccaacagggtataagtgttcccctttctccacaacctcaccagcacctgttgttttttgacttttcaataacagccattctgactggtgtgagat

SEQ ID NO: 973482 - DNA, 120 bp, Artificial Sequence
  ENSG00000267123_17 (sequence is synthesized)
gatttgctgctggtaacatactcatgggcaaagtctgaaaaacctcttcctgccctgggcaaggcagatggggcagcccagcaggctggctttgcccaccgtctccgatatcatccaaca

SEQ ID NO: 973483 - DNA, 120 bp, Artificial Sequence
  ENSG00000267123_18 (sequence is synthesized)
gacccacacttttgtaaaccacgataaagatgaactaccagaaaaatgatgaagcacttagacaacatggcaaagtgaagtggctgtcagcgtttctacccgctcgctctcaatttccac

SEQ ID NO: 973484 - DNA, 120 bp, Artificial Sequence
  ENSG00000267123_19 (sequence is synthesized)
cacacgtacgtcttcttttgaaaagtatctggaactttgcttttaatgagggatacagacaataaattaacataataaataagtaaattaaacaatactttagagggcggtgcatcctaa

SEQ ID NO: 973485 - DNA, 120 bp, Artificial Sequence
  ENSG00000267123_20 (sequence is synthesized)
ggaaaaactaaagcagagaagagggatgccaatgatgagttggtttcttttttcctgttggatgggggtgttgccatcagggatgaaaacaaatgaagtaaacccatctattgaaaggaa

SEQ ID NO: 973486 - DNA, 120 bp, Artificial Sequence
  ENSG00000267123_21 (sequence is synthesized)
cccagacagggcactgtctgtggccccaggggttgaggacccctggctttaacaacagaaaggtaccatcttacagttctggaggccaaagtctgatatccagggagggaattgggatct

SEQ ID NO: 973487 - DNA, 120 bp, Artificial Sequence
  ENSG00000267123_22 (sequence is synthesized)
ggggcctacagaaaggagctggaggtgcctagtgcaggctgggaggcctcctttattgaggtgacatccctggatgctggcttggcggaggttggggagaacgctgcctccctggaatag

SEQ ID NO: 973488 - DNA, 120 bp, Artificial Sequence
  ENSG00000267123_23 (sequence is synthesized)
aagatgccttggaagccctgggtgcaggctggccgaccctgcctgagctgcctgtcttcattccatggctctgcttgttagaggaggaagttaggcagacatgagtggcgcccaccagcc

SEQ ID NO: 973489 - DNA, 120 bp, Artificial Sequence
  ENSG00000267123_24 (sequence is synthesized)
ggtcaggcagttgttaaactgtctctctgaaatgatcattggttgcagctcacaccaggggaagatggtctcccaataaataaaaaaacacctgaaactggtgatcagcagcttcccgat

SEQ ID NO: 973490 - DNA, 120 bp, Artificial Sequence
  ENSG00000267123_25 (sequence is synthesized)
tgaaactggtgatcagcagcttcccgataagctctcgagttgggcgagtgggctcaagcgtgcgcactaagaggcaaaatggcggatgtatgaacttcctctgggggcattcaaccagta

SEQ ID NO: 973491 - DNA, 120 bp, Artificial Sequence
  ENSG00000267123_26 (sequence is synthesized)
gctgcatggggctgttgagcaacagcccgccccaagggaagaaccgagggaggagaagagaaaactccagagccgtgccaacggataaaccccacgcccagggctgagcggtcacttgga

SEQ ID NO: 973492 - DNA, 120 bp, Artificial Sequence
  ENSG00000267123_27 (sequence is synthesized)
tctctcacgtggcgcactcagccctcttccaagtatactttaacttcctttcactcctgctctaaaactttttcataaaccctcactcctgttctaaaacgtgcctcaatctctccctct

SEQ ID NO: 973493 - DNA, 120 bp, Artificial Sequence
  ENSG00000267123_28 (sequence is synthesized)
caagatggtgtgggctatgctgtctttgcacagcgatctgatcccagggacatttgtgtgggtgtgtgcccgggagctgcatgtctgcaggttcagattggggtcagctttgctggtgag

SEQ ID NO: 973494 - DNA, 120 bp, Artificial Sequence
  ENSG00000267123_29 (sequence is synthesized)
tgtggcttcctgccatggcaccaaagaagagggctggcggattagtcctgttgtctctcatagctttgtagggacacagcgggccatgtggactgacagctggagacttcataaagatgg

SEQ ID NO: 973495 - DNA, 120 bp, Artificial Sequence
  ENSG00000267123_30 (sequence is synthesized)
cctagaaaattaggacactgtcctgttgacaaagcccctaggcctgcccccatcaggcctcatgggtccttttcaggcctaagccagggttctgaaatcatctgtaatgtgaatttatat

SEQ ID NO: 973496 - DNA, 120 bp, Artificial Sequence
  ENSG00000267123_31 (sequence is synthesized)
gagggcctccagttgggggcacacatgggtgacacctggcctagtgacgccccacctgggttgcacgttaaagtcactggggaacttttaaagggctgatgtctgatttctccagggatt

SEQ ID NO: 973497 - DNA, 120 bp, Artificial Sequence
  ENSG00000267124_0 (sequence is synthesized)
ccgggcttcaaatcaagtttaataaataaaacagcaaaggggggttcaaggcagttatcacttcacagtgtggtccttggtggggtgagggatggtcgagtccaactcggaaaggggctc

SEQ ID NO: 973498 - DNA, 120 bp, Artificial Sequence
  ENSG00000267124_1 (sequence is synthesized)
gagcacaagaggcaggtgggggtgtaaagtgcggcttttcctgaagtggagacgatggggtgggaaggcgaggctggggtgggggccggacagcgaggtatatggctctgtgccccacgg

SEQ ID NO: 973499 - DNA, 120 bp, Artificial Sequence
  ENSG00000267124_2 (sequence is synthesized)
ggtgtggagagacagagccaagcagggagctgagggcgccccggcggaggctgctggtgcggggcagggcgtcctgcccgtctccccgccggggcagtgacgccttccctcgcctctgct

SEQ ID NO: 973500 - DNA, 120 bp, Artificial Sequence
  ENSG00000267124_3 (sequence is synthesized)
ggctggaagggactaggtggccggctctgccctgcgtcccaacggcggggtctcttctgtccccggctgcccgacggatcccacgtgcaggcagcggcccggacccgggtggcagtgccg

SEQ ID NO: 973501 - DNA, 120 bp, Artificial Sequence
  ENSG00000267125_0 (sequence is synthesized)
ccacacacacgctggagtagggtttaaaaaggggcttgtttaattaattaaatacaaggatgaggccagctcagagaccccccacacacactcacaccccctgaggatgccggaccaccc

SEQ ID NO: 973502 - DNA, 120 bp, Artificial Sequence
  ENSG00000267125_1 (sequence is synthesized)
atgggggcccagaaaaaaaggaatccgtgcctgaaaaaatattctacccggtgcaaaaaaaacgagctaccccaggaggctgcacagccagccctctgcttccagtccacgaggcaagac

SEQ ID NO: 973503 - DNA, 120 bp, Artificial Sequence
  ENSG00000267125_2 (sequence is synthesized)
cacctcttccaagcacccaggagaaggaggggaggccagggaagcagggccgggccaggctgcagcccaggcccggaagagcctgcaaccccggcgggcatgggctccacggccccacct

SEQ ID NO: 973504 - DNA, 120 bp, Artificial Sequence
  ENSG00000267125_3 (sequence is synthesized)
gcaggccagggagggcagcgcagcccaacagccgcagtcgtcgttaagggagagttgattgtcacgtgataccgcaacggccaaagtcagcaaggcagggactggaggcccaagcccggt

SEQ ID NO: 973505 - DNA, 120 bp, Artificial Sequence
  ENSG00000267128_0 (sequence is synthesized)
gggagctgagcactaccccacccccgaggggacagtgtgtgtacggggacgccctctctaacatcatccccgcagctggggaggatcttttagtgccgagagagaagaaaacaaatccat

SEQ ID NO: 973506 - DNA, 120 bp, Artificial Sequence
  ENSG00000267128_1 (sequence is synthesized)
actctagagcctcaagcactgaagtcatcaactgagttggtgacactccaaacccccttgggctggggtgcaagagctgacggacgcagccttggcggccaccttctccttcaagctcct

SEQ ID NO: 973507 - DNA, 120 bp, Artificial Sequence
  ENSG00000267128_2 (sequence is synthesized)
tggccaggtgggagccgtcaggtccacatgcacacctccaacacttcccaagcgatggccagcgctaaagcagaagcaataggatgacatctgctggtgcgtctgtatccaggccgggca

SEQ ID NO: 973508 - DNA, 120 bp, Artificial Sequence
  ENSG00000267128_3 (sequence is synthesized)
tcatagagatcatcaatgctctgcttgctttgatgtaccattaagaagacgatctttcctctaacagccccatacaactgagcagcgccaccacgtcataccggacagaaggaaggccct

SEQ ID NO: 973509 - DNA, 120 bp, Artificial Sequence
  ENSG00000267128_4 (sequence is synthesized)
actggtatctaactccagggcctacgttaatagcatatatttccatctgtgtttaatatgcctcagaggctgagtagaggcagatcttgcttggagaggcaccatctgcctacagggatt

SEQ ID NO: 973510 - DNA, 120 bp, Artificial Sequence
  ENSG00000267128_5 (sequence is synthesized)
agatccgagccacattacccatatatgctcagaatggtctgtcaggaacacccttgttaatagtttagctgatactgtttctctaaggtggaagtaaaaattactaaatgaaagagcaaa

SEQ ID NO: 973511 - DNA, 120 bp, Artificial Sequence
  ENSG00000267128_6 (sequence is synthesized)
ttacaacagcctttaaaatacttgcctaagctgagctcctgaagaaacttggacctgtctccttgaccacgcctttacacccgcacctgacatccatggctctgaggcccagaaagagct

SEQ ID NO: 973512 - DNA, 120 bp, Artificial Sequence
  ENSG00000267128_7 (sequence is synthesized)
gaggaggtcatagagatcatcaatgctctgcttgctttgatgtaccattaagaagacgatctttcctctaacagccccatacaactgagcagcgccaccacgtcataccgaaggaaggcc

SEQ ID NO: 973513 - DNA, 120 bp, Artificial Sequence
  ENSG00000267128_8 (sequence is synthesized)
agaagcgcgcggcctgcggcaccgggaaccgctatggatccgttcgttctggggaaccaagactctcgcccccacccccttcctgtcccgtatgccttggacatgggactgaggccttga

SEQ ID NO: 973514 - DNA, 120 bp, Artificial Sequence
  ENSG00000267128_9 (sequence is synthesized)
ggaatctttccgtgcttctccctaggagaggactaagcacctgctgcgaggaaggacagggatcctcaggaagggggtcctggccactgtggctactgtttacctgaatctccttcatct

SEQ ID NO: 973515 - DNA, 120 bp, Artificial Sequence
  ENSG00000267128_10 (sequence is synthesized)
cagctccttcctccctcctcccagaaaaaagatgtgtaagaaattagcccatggaccccagctccacctgaacatcaatataccgtgaggacattccagagtccctgcaaaaggtctcgt

SEQ ID NO: 973516 - DNA, 120 bp, Artificial Sequence
  ENSG00000267128_11 (sequence is synthesized)
taggtcacacggagaaaggagggttccagttccctctgagagggcagcccaggagccggcacggaaggagcaggatgcgtgtcacctgagactccgatgacggtgcgagccacagcactc

SEQ ID NO: 973517 - DNA, 120 bp, Artificial Sequence
  ENSG00000267128_12 (sequence is synthesized)
gtgtgtgagaacggagagaagcagtgaaacagagagaagaaaacaaatccattccacgggctagggaatgtcggtgaaacaacctggccacaccgcacttcttagaagcaaatattctat

SEQ ID NO: 973518 - DNA, 120 bp, Artificial Sequence
  ENSG00000267128_13 (sequence is synthesized)
atgtggtgcctgcgaggaccacggtgggagctgagcactaccccacccccgaggggacagtgtgtgtacggggacgccctctctaacatcatccccgcagctggggaggatcttttagtg

SEQ ID NO: 973519 - DNA, 120 bp, Artificial Sequence
  ENSG00000267128_14 (sequence is synthesized)
gagaatgcgagcgttggactccggagctgcggctgttcagtaggaaagaccaaaagcaaatggtaaacaagagagaagacacacatgcatgcacaaataaaaacagcagcaccaccacca

SEQ ID NO: 973520 - DNA, 120 bp, Artificial Sequence
  ENSG00000267128_15 (sequence is synthesized)
ccaccgccgccgccaccaccagcaagccatggaatgctgggccggagaggctgcccagagagctgtcctgactctgaattcacagaagtccttgctacaaactccaaccttctattctat

SEQ ID NO: 973521 - DNA, 120 bp, Artificial Sequence
  ENSG00000267128_16 (sequence is synthesized)
tggctcctggaacacatagtgttccctgcttgggggagactttcctgccctccttcttcctcctacgtccttgctctgtgggccattccttctcttctagccttactggaaacaacattc

SEQ ID NO: 973522 - DNA, 120 bp, Artificial Sequence
  ENSG00000267128_17 (sequence is synthesized)
gacaggacaggaggtggtctgtgtgccaccaccccagggtaagggaagctccctgtcacctgctgcttctgggctcatatttcagggaaatcaggaagtggggttattgctcagcttatg

SEQ ID NO: 973523 - DNA, 120 bp, Artificial Sequence
  ENSG00000267128_18 (sequence is synthesized)
catcttaactatgaaaggggcgggaagaatgtagggggaaggaaggaaagaacattaggtggggcctgaaatggtaaagtctactgcagtttttcagagagggttggacgacaggccccc

SEQ ID NO: 973524 - DNA, 120 bp, Artificial Sequence
  ENSG00000267128_19 (sequence is synthesized)
ctctccatcagggcaggatgtgagccacaaccactaggcagtgagacagtcactgcactcctggcctctgcagccacacagaaacgaaggaccccctgggcaccaggctctttttgaggc

SEQ ID NO: 973525 - DNA, 120 bp, Artificial Sequence
  ENSG00000267128_20 (sequence is synthesized)
cccctgggcaccaggctctttttgaggctgccttggaaacagccttgaatttttttttttttgtttgagacagagtttcgatcttttcaatcttgtagcccaggctggagtgcagtggca

SEQ ID NO: 973526 - DNA, 120 bp, Artificial Sequence
  ENSG00000267128_21 (sequence is synthesized)
ctgcctcagcctcccgagtagctggggagggcccttgaagtgaaggccctgagccctgattccaacctctgctcccagcacactgctgctggccacatgctgctgcctgaacttagctca

SEQ ID NO: 973527 - DNA, 120 bp, Artificial Sequence
  ENSG00000267128_22 (sequence is synthesized)
tgctgcctgaacttagctcaaggctctccatcacttcctttggggacctgggcaccaaactgagaatcactggtccacatttctctcaaccattaacaaaagggggtagagatgggggca

SEQ ID NO: 973528 - DNA, 120 bp, Artificial Sequence
  ENSG00000267128_23 (sequence is synthesized)
acagggacaagaatgccacctcccaattgagtgaggatgaattatggtaatatacgaccactcctcacccagtgcttggcacacagaggtggtcaacacatgtgtttcttgaaatgtcac

SEQ ID NO: 973529 - DNA, 120 bp, Artificial Sequence
  ENSG00000267128_24 (sequence is synthesized)
cttaggatggagttgcaggcctccctgaatgcacctgatcaggagaaatgctccttaagggaaatcatcttaactgggggattctcagattcaagggctccttctttttttttttttttc

SEQ ID NO: 973530 - DNA, 120 bp, Artificial Sequence
  ENSG00000267128_25 (sequence is synthesized)
ggccaagagctccttcttaaccgcacaggcatgtgaggcccagaagactggctctgccaccagaaggaaggattgtttccttcaaccaaccttttggttgctaccatttcttgtccttga

SEQ ID NO: 973531 - DNA, 120 bp, Artificial Sequence
  ENSG00000267128_26 (sequence is synthesized)
gaaaggtgctcctagtgcttgtagagggaaacgctacgtccgtgcagtatggctctccctttccacaggagcgatcctccagccctaccccaaactgcaggtttccaattggttatgatg

SEQ ID NO: 973532 - DNA, 120 bp, Artificial Sequence
  ENSG00000267128_27 (sequence is synthesized)
agaggtgagggattgtggttacaggttgtaacagctgtcacaggagggtaaaaagtctccagcatcttgctgaggatgcccagtaggcagcagctgagtgaggatggatggaatgcaggg

SEQ ID NO: 973533 - DNA, 120 bp, Artificial Sequence
  ENSG00000267128_28 (sequence is synthesized)
caggaggggagcccaagtgcagaggctggggctcagacagccaaagggccccacacacagggcctcgtctcagagtcctccaggctgctggatgacaagcgccggcgctgggcattccga

SEQ ID NO: 973534 - DNA, 120 bp, Artificial Sequence
  ENSG00000267128_29 (sequence is synthesized)
ctgacggcattgtcatcagcctgccaggcacctggggaagagaaaatgaacattacaggagccagacctttggccaaatccagatggtgtctccagcagggcagcccaggagccggcacg

SEQ ID NO: 973535 - DNA, 120 bp, Artificial Sequence
  ENSG00000267128_30 (sequence is synthesized)
aggtacagtcactgccactgtggctcccggacagggagggacatgaaagatgttccttgttttgcgaacttaccctgggatccacttttgtattttaattacttggttttaaagtttgcc

SEQ ID NO: 973536 - DNA, 120 bp, Artificial Sequence
  ENSG00000226578_0 (sequence is synthesized)
caacttcagagcaaagtcaggaaactgccagaaagggcagagcctgacagtttgcacagcctgaagtaattcttcctcctgctcagaatgagtgatgctctgtaaatgttatcacatcca

SEQ ID NO: 973537 - DNA, 120 bp, Artificial Sequence
  ENSG00000226578_1 (sequence is synthesized)
gaaggtctccccactatgatgaaaggtttggaccacgtctcagaaaagatatgtgactggactgagtggtggaaagggggccaaagaaactttttcccatagacgagtgtgtaaccagtt

SEQ ID NO: 973538 - DNA, 120 bp, Artificial Sequence
  ENSG00000226578_2 (sequence is synthesized)
ggtgggcagcagtttttaggaagctgaatctcaaaggtccgtagcaggccagatctcgcatgaccacccctgtgttcttctcccgtaactgtacattcagcttcccctgcactttcccaa

SEQ ID NO: 973539 - DNA, 120 bp, Artificial Sequence
  ENSG00000286216_0 (sequence is synthesized)
gagatgagctcagcgccccagagcccgccgggctccaggcccaccttggagacccccgctccagccgcctgcccctcctctccacttccctggctgctgtcatgattgccataaactgag

SEQ ID NO: 973540 - DNA, 120 bp, Artificial Sequence
  ENSG00000286216_1 (sequence is synthesized)
tggcctgaaacaacagagtcagaaatcaaggcatctgcagggccatgctgtctccgaaggctcggaatatggacccctccttgcctcctcctagactctgtttccctcctgaaattccaa

SEQ ID NO: 973541 - DNA, 120 bp, Artificial Sequence
  ENSG00000286216_2 (sequence is synthesized)
ggatgctaggattcaatgcatttaaggagcagacaacaaagacgatcacaaaggatcaaactcacattcatggaaacatctgcggaactgtaacatcaaggcgtttccctcctaagagca

SEQ ID NO: 973542 - DNA, 120 bp, Artificial Sequence
  ENSG00000286216_3 (sequence is synthesized)
ctccagcctggggacagagcgagactctctcaaaacaacaacaacaacagcaacaaaaacaaaaaaaaacctctccaggagcgaatgtgagaaaatctacaagatctgtaaggactgaga

SEQ ID NO: 973543 - DNA, 120 bp, Artificial Sequence
  ENSG00000286216_4 (sequence is synthesized)
aaagagaacaggcagccctgcctttcatcaggctaagaagacagacgagtaacccactgtgcattcacaggacacgtggttttccccaaggtcttgccaaagcttcgaaacgccacaacg

SEQ ID NO: 973544 - DNA, 120 bp, Artificial Sequence
  ENSG00000286216_5 (sequence is synthesized)
cccgcttgacagatggactcctgctttctaaccaagaacgccctagacccacttgctgcactcatttatgactgggggaacgcaacaaccaaggcatccttgcctcctgacggcccatca

SEQ ID NO: 973545 - DNA, 120 bp, Artificial Sequence
  ENSG00000286216_6 (sequence is synthesized)
ccctcagtgaacccctacttcttctgagcccccctctaaacaacaaccagtgcagatgcgactcccacttccctgatacattatcaattattaaaacttcatacttccatgaggcctcag

SEQ ID NO: 973546 - DNA, 120 bp, Artificial Sequence
  ENSG00000286214_0 (sequence is synthesized)
gtaaatgggcacagtgggcatgcccagagtttggataggatgaaggtttgggtgctgatacgggggcttcatttttggaaactttttccagagggcagagaggaggaaaggcagaacagg

SEQ ID NO: 973547 - DNA, 120 bp, Artificial Sequence
  ENSG00000286214_1 (sequence is synthesized)
atggatggcaggacctgtgtaagaagaaggtcttaaattctaaacaagggtatagtaaaggtagtgtggccaagagggaaagaagaaatggtggatccagatagcttcaatgggtactgc

SEQ ID NO: 973548 - DNA, 120 bp, Artificial Sequence
  ENSG00000286214_2 (sequence is synthesized)
aagatcaggtgtgatgggcaggggtgcatgggctcactgggaccctatccaaggtaaatggaaataatggagatgaagaaaggaggaagaggaggaagtggcgggactggctgtagagtt

SEQ ID NO: 973549 - DNA, 120 bp, Artificial Sequence
  ENSG00000286214_3 (sequence is synthesized)
ttgtaggaactcacttcatggaacagaaagagaaaagaggaaacaaggctggagtggaagaggggaaggaaaaggcagcctaagggaaggcactggcctcaatcagtggaagatctggag

SEQ ID NO: 973550 - DNA, 120 bp, Artificial Sequence
  ENSG00000286214_4 (sequence is synthesized)
gagcaacagaaaacagttcttgaagagaaggtgggatagagagaggatggaaaagtttgagcggtgaaagcaggtcaaagtagtgagcacatccctatggagaagagatgactgagtcag

SEQ ID NO: 973551 - DNA, 120 bp, Artificial Sequence
  ENSG00000286214_5 (sequence is synthesized)
atgaagcgacaggccctgggtggctgagagaaatactggccacagacaggcaggtaccttcccttggccaaggaagcaaagagaagaaatgtggatgcaaggggaaaggcttcaagaaag

SEQ ID NO: 973552 - DNA, 120 bp, Artificial Sequence
  ENSG00000286214_6 (sequence is synthesized)
aatgtggaagtgggacgatgaggcagcgccaacaggggagtcacctacagaagacagacagggtggaggggcccccagggaaggatggagggcagaaagcatggtggaagggagctgggc

SEQ ID NO: 973553 - DNA, 120 bp, Artificial Sequence
  ENSG00000286214_7 (sequence is synthesized)
aggacagccacaggcaggacagccatagttggagcgaggtgaacggggaggtcccagagtaggaacaaaggaatgtggagtgctcagggcagcctgcaaggttcggcaggggaagggaaa

SEQ ID NO: 973554 - DNA, 120 bp, Artificial Sequence
  ENSG00000286214_8 (sequence is synthesized)
gtgtgaaaggggtggacagcaatgggcaggaaggaatggctgctcttaaagccttgaactttgttgcagaagtgtgaatcttgggccagggtctttgctatggatgcagtggggaagggt

SEQ ID NO: 973555 - DNA, 120 bp, Artificial Sequence
  ENSG00000286214_9 (sequence is synthesized)
gggttgggtgaaggggatggggtttgggatgggatttgggttgggactgactgggttggaaaggagggaaggattgggagcagtggggtgtgagtgggagaggaggtagggaaccagatg

SEQ ID NO: 973556 - DNA, 120 bp, Artificial Sequence
  ENSG00000286214_10 (sequence is synthesized)
gggagaatcgagccaagttctgggttggaggaaactttcttatttaactgagctggtgggttacatatctaatgttgcaggtgatgaatacaggctggggtagccgtctaaatccaccga

SEQ ID NO: 973557 - DNA, 120 bp, Artificial Sequence
  ENSG00000286214_11 (sequence is synthesized)
aagaagtaaatgaaagtggtttcttgtaggtcgaaaggtcaaggtaaatggctggtttttaggaaacaactgagaactcgggaaacaaagggggaagtttctgcaggccgatcttgtaag

SEQ ID NO: 973558 - DNA, 120 bp, Artificial Sequence
  ENSG00000286214_12 (sequence is synthesized)
ggatctgaaaaaaggggtggggattaaggaaaactgacaatagtaagcacccataagaaacaggttgaggccgaagatactgacacagggcctaagagtcctatcaggtgggaggacaag

SEQ ID NO: 973559 - DNA, 120 bp, Artificial Sequence
  ENSG00000286214_13 (sequence is synthesized)
acgtatcgggtggggaggcattaaaagaacaagtttccaatgcagactggtgtttggggtcagaggtgtgttaaagggcaaatagggaaggaatgaagtggttccaagcagagagttcca

SEQ ID NO: 973560 - DNA, 120 bp, Artificial Sequence
  ENSG00000286214_14 (sequence is synthesized)
ggcctaatgggggtgggcagacaaaagatgagatgtgttaagtgggaagttaaatggcaagtactagaatgccacctatggcaagcactagaatggtctaggtgtgaaatgagggagtaa

SEQ ID NO: 973561 - DNA, 120 bp, Artificial Sequence
  ENSG00000286214_15 (sequence is synthesized)
tgtcagggagtcaaggtggccatccatagcagtgattcttatctggggtagggggtgaatttcacgtggagggaggtctctggacatggacccccaggcagggctatccaatcatctgag

SEQ ID NO: 973562 - DNA, 120 bp, Artificial Sequence
  ENSG00000286214_16 (sequence is synthesized)
gggtgagcagtgttcagctcagtaaaagtaagggaaaaaaaatagcagtctctaaaaggaacatagacaatagcaaaagaagaaaccaagcccaaaagatgcttctgataggccgccttg

SEQ ID NO: 973563 - DNA, 120 bp, Artificial Sequence
  ENSG00000286214_17 (sequence is synthesized)
gggtcctgcattctcgggtgagaatcactggtggatgcgggaggatggagagccgggcagacacgtggagtgtgaggggaagacgcacgtgcagtggggctgatggaggcatcagggtca

SEQ ID NO: 973564 - DNA, 120 bp, Artificial Sequence
  ENSG00000286214_18 (sequence is synthesized)
agactgtcaggtgtgggaacacagttcccgacagatcaggacaaagatgacagcgagcagatggatgtagccgaaaaggcaccgggtaccctggtggtggaactgggttttccaatgcct

SEQ ID NO: 973565 - DNA, 120 bp, Artificial Sequence
  ENSG00000286214_19 (sequence is synthesized)
cggtcccagactcaaggtggaggagtgaggcctagagaagggcctagtgacacagaggaagtgggctgtgcgggtgagagcagagagcaggggatctgttgtcacggggagggaaggtgc

SEQ ID NO: 973566 - DNA, 120 bp, Artificial Sequence
  ENSG00000286214_20 (sequence is synthesized)
aaagggaaatggagacagtgtggaaggagagcgtcttgaagacacgggccttaaggagggaggaggtgggaggagggtgggactgacagcagcacccaggaggagcagaggagctgagtc

SEQ ID NO: 973567 - DNA, 120 bp, Artificial Sequence
  ENSG00000286214_21 (sequence is synthesized)
tcaggcagggcaggagagtcaggttgagactgggtgtgtatggggtgggagatgaggacgggcagagagcgagacacgagtgagtgacaaagacaaaattgctatggtgataggaacaag

SEQ ID NO: 973568 - DNA, 120 bp, Artificial Sequence
  ENSG00000286214_22 (sequence is synthesized)
gtaggagattcagaggcagatgttccccagagtgtttttacacagtgtgaaagaaaggatgagaaaagaatcaggaaggtttaggggagtcagggttgtggggccctggaaaggactcat

SEQ ID NO: 973569 - DNA, 120 bp, Artificial Sequence
  ENSG00000286214_23 (sequence is synthesized)
agcctgggccactgggacgtgagcttggacagcagagcgtgtggattcagtgcagtacgtgtgacacagagaggactgcatctggtggagcagtgggtgcggggccaggtcaagaaggga

SEQ ID NO: 973570 - DNA, 120 bp, Artificial Sequence
  ENSG00000286214_24 (sequence is synthesized)
ggacacacctgagaacacgaattaggccagtggcagaatcgcaggtggtgctgagagaacgcagcatggtgcaggtgggacagtaccgtgctatgcagtagaggaggaaagcaggagaaa

SEQ ID NO: 973571 - DNA, 120 bp, Artificial Sequence
  ENSG00000286214_25 (sequence is synthesized)
cgaccaacctgggcccaggagctgggagctgggagagcagagggtgagtttgcagcatatgggagagcaggacagaggagaggtgttccccaatgggcaagaagaatgagttggagcagg

SEQ ID NO: 973572 - DNA, 120 bp, Artificial Sequence
  ENSG00000286214_26 (sequence is synthesized)
ttatggaggccagcagcttacggaggtgagcttgttgagaggatcagggaatgtactgcagcaagggaggcatgccaagagcaagagtgtgggtgtgaacgtagagaatcctcctttttg

SEQ ID NO: 973573 - DNA, 120 bp, Artificial Sequence
  ENSG00000286214_27 (sequence is synthesized)
ccccaaaggggtgaagtgtttgatgcaggtcatggaggagaaagcatggtgtgggtaagacacggaaggaatgaaggagaggtgagatgaggccacagaaacagggtgtagaggtgttgg

SEQ ID NO: 973574 - DNA, 120 bp, Artificial Sequence
  ENSG00000286214_28 (sequence is synthesized)
caccttggaaacattgaggaccgtgtgtcaataaagggcatggcgagacgatggaaggccagaggacacaacagagagaggaaaccactgttccttagaggcagaactgagaatacagga

SEQ ID NO: 973575 - DNA, 120 bp, Artificial Sequence
  ENSG00000286214_29 (sequence is synthesized)
cggttaggggtgaactgagacagcagatggactcagtacagcaggttgaggacatggaagctggcagtggtgtcatcagtggggggcagggcaggaaggggtcagagttcaggacagatt

SEQ ID NO: 973576 - DNA, 120 bp, Artificial Sequence
  ENSG00000286214_30 (sequence is synthesized)
cctgagtctgtggattgacttggaggtggcagggcatgcaggactggatgttgaagatgaaaaggagtttctggaagatgacagtgggaggcaacactgtgtgtagactgtgcaaattta

SEQ ID NO: 973577 - DNA, 120 bp, Artificial Sequence
  ENSG00000286214_31 (sequence is synthesized)
cactggcataccacatggaatgagagagtctggcagccattctaaggcagttattgggatgtaaatttgatgacggaagtttatggtaaaagaagggacaggaggcaggtaggaggggag

SEQ ID NO: 973578 - DNA, 120 bp, Artificial Sequence
  ENSG00000286214_32 (sequence is synthesized)
ataaccttatgaatttgtgcagggcttagcatcagtaaaagggctgacatggaataggggaaggtggaatgcagagttcccaaagtgggggcactggcaaatctcaggggcaagtcagtg

SEQ ID NO: 973579 - DNA, 120 bp, Artificial Sequence
  ENSG00000286214_33 (sequence is synthesized)
ggagcattttagggaatagaagttaaatcctagacgacaagcgagtggggtaacaacactttacctgtcatggtaactacttcattgaataggaaaacagaaaaagaagaaaccttatag

SEQ ID NO: 973580 - DNA, 120 bp, Artificial Sequence
  ENSG00000286214_34 (sequence is synthesized)
agggtgatggtaaagcaaccccaactgatatggaaggcagtgttggcaatcactgaaggtcaggattttgaaagcaaacaattaacaatgtaaaatttgcaagtgtgggggttggacata

SEQ ID NO: 973581 - DNA, 120 bp, Artificial Sequence
  ENSG00000286214_35 (sequence is synthesized)
ggttactatgtgtttaatgtggtctccaacaaaattagcagagccaaaatgagaaggaagtattactctgtttaacaagattgaaattaaggggacagtatacagtttaaaccactttgg

SEQ ID NO: 973582 - DNA, 120 bp, Artificial Sequence
  ENSG00000286214_36 (sequence is synthesized)
gatttaggaatgtcagagttggtagggtgggtattgttgccccttgatccacagtatggaataatggcaaagaggaaaactatatagaaagaacttgtcattagggaatttggtggcttc

SEQ ID NO: 973583 - DNA, 120 bp, Artificial Sequence
  ENSG00000286214_37 (sequence is synthesized)
cttaaagctccttgagggaaacacttgatgaatgcttagagtcaggagaataaacggtcccatatagagataggtttatgaagcggagtctgaaggatgagcttcatcagcaatcctcag

SEQ ID NO: 973584 - DNA, 120 bp, Artificial Sequence
  ENSG00000286214_38 (sequence is synthesized)
aatgtcagttctactagctaaggatgcaggtaagtatgttggacaccaagagaacaggaaggaagtgttttgaacactggaggtgggtcatgaggaagcttatacatattcacattgtga

SEQ ID NO: 973585 - DNA, 120 bp, Artificial Sequence
  ENSG00000286214_39 (sequence is synthesized)
atcaatttcaaggacagatgaacaaagactgggcgttaccaatagagcagggttttgttttgtttttcccctaaggcaaaaggcagaaatgagtgggtacaccatgattaagttgcattc

SEQ ID NO: 973586 - DNA, 120 bp, Artificial Sequence
  ENSG00000286214_40 (sequence is synthesized)
tgtagagataggatcatttaagtcaagtcagcaacaaaaattagagacattgaagatgatggggtagaaaaggggtatcaaataggttagaaagatggcttgaaaggaaatgagggaaat

SEQ ID NO: 973587 - DNA, 120 bp, Artificial Sequence
  ENSG00000286214_41 (sequence is synthesized)
ttcagtgagtttgaggaatggcagactgggtatgtgacaaatgagtgggtaaataaggaaatctcagactgagaatcctggcagatctttcaatgggttagactgcaggaatattgattt

SEQ ID NO: 973588 - DNA, 120 bp, Artificial Sequence
  ENSG00000286214_42 (sequence is synthesized)
taaagccagactgaagcaaattctagtgataaaggaaggggaaagggtggctgaatcaaatgttctaccaatactgctttttttagtatttgagttaaaattcagattaaatgcttggct

SEQ ID NO: 973589 - DNA, 120 bp, Artificial Sequence
  ENSG00000286214_43 (sequence is synthesized)
tagaagaatgcaaagcttcactgagcctaataatatggatcccagtgggtgagtggaggtgagttaaagtaaaaaactctgaggcaaatcttacttaactgaagttgtgtttttagtaca

SEQ ID NO: 973590 - DNA, 120 bp, Artificial Sequence
  ENSG00000286214_44 (sequence is synthesized)
gaatgccaagttaatatggttaatactgaacaaaaaataatggaagggcaactacagtagcttaagatggcactttaaggaagtgtaggcagaaagtcaagaaattaaaataattatgaa

SEQ ID NO: 973591 - DNA, 120 bp, Artificial Sequence
  ENSG00000286214_45 (sequence is synthesized)
tcattatatggcaggcaatatttccaatgaaaatcagagaaaataaactcacatacatgtactgttacagctgatcttagtatgaatattttctattaaagactgttttaaaataagtta

SEQ ID NO: 973592 - DNA, 120 bp, Artificial Sequence
  ENSG00000286214_46 (sequence is synthesized)
ttaatatttgttgaaatggttccagataacaagaaatatgatgcaataaaacctgataaataaaagcaatataaagattagaatggttttgaataggtagtggaataaaaagttaagttg

SEQ ID NO: 973593 - DNA, 120 bp, Artificial Sequence
  ENSG00000286214_47 (sequence is synthesized)
gtagttgcattaaaaaggtcaaacatggggaataattggtagaatgttgtgtatataatatatattgttacgggtgcaataaatattcaggggaaacagagctgctgaaagagaatgaat

SEQ ID NO: 973594 - DNA, 120 bp, Artificial Sequence
  ENSG00000286214_48 (sequence is synthesized)
gcttagaaggaatgttgccttaaaggcttttctaaaactttttaggtaaaggacaaattctgggaggacgaaagataataagtaggactagttacatagagacttaggatgtccatagtc

SEQ ID NO: 973595 - DNA, 120 bp, Artificial Sequence
  ENSG00000286214_49 (sequence is synthesized)
tttcaagaaattgcccaacctttgcgagaaggtgttatggtaatatattgatgttgggttaaagcaaattttttcagatagggtagatttttatacatttataaagtaaaggggagtagg

SEQ ID NO: 973596 - DNA, 120 bp, Artificial Sequence
  ENSG00000286214_50 (sequence is synthesized)
aaagattaaagatagatcaaagaaaggaataattgatggaacaactttctggaagagattagagggtatgtgtcttttgaactctggaagacttgattttagagaggataaaggaagaaa

SEQ ID NO: 973597 - DNA, 120 bp, Artificial Sequence
  ENSG00000286214_51 (sequence is synthesized)
gtggataattctagaattaaacaccaaaaggttctatgtgtctggcaccatgtgaagcaacttacctattatttcatttcatttcatttcatttcatttcatttcatcctataacagtcc

SEQ ID NO: 973598 - DNA, 120 bp, Artificial Sequence
  ENSG00000286214_52 (sequence is synthesized)
taagagatcaaataatttgtccacgattacacagtcagtatgtagcagggccagcattcaaatcctcatctgtctatcaaacccatattcccttctattatgctatactgttttcaagtt

SEQ ID NO: 973599 - DNA, 120 bp, Artificial Sequence
  ENSG00000286214_53 (sequence is synthesized)
gaaggaaatcaaaccaagaatttctgttttttcactgcgattataaggaaaaatattatttttctgaaatgagacatattgatgtttaagaccttgaggtgacaggtaaaatttggaata

SEQ ID NO: 973600 - DNA, 120 bp, Artificial Sequence
  ENSG00000286214_54 (sequence is synthesized)
tctgtgatgggaaaatgcaaaaaggaaggaatgggtgaaagatacctattaccatctatgccctggtatttcacttcttccattgcacagcatagactttagattggccatggattaaaa

SEQ ID NO: 973601 - DNA, 120 bp, Artificial Sequence
  ENSG00000286214_55 (sequence is synthesized)
atttgagaattctgacaaaaaactaaatagaaaggagtttgttttttaagtaggtatatgatgggtcaaatataaacttactactaacaaaactttaaacaattccctaaatgccaaact

SEQ ID NO: 973602 - DNA, 120 bp, Artificial Sequence
  ENSG00000286214_56 (sequence is synthesized)
tttataaacaaaaatcaaacaaaccatcaagcaaaagagtccatagccagcagaccaaatgttgaaatctctgggctaatttgtaagatctatgttttaaaactccttagtgaagagggg

SEQ ID NO: 973603 - DNA, 120 bp, Artificial Sequence
  ENSG00000286214_57 (sequence is synthesized)
caagaaaacctctcctctttttcctctcttggtggaaatgttttgttgttgttgttggttttttcctatactatatgtaatttctatattgttgttttgtgtattttggtattataaaat

SEQ ID NO: 973604 - DNA, 120 bp, Artificial Sequence
  ENSG00000286214_58 (sequence is synthesized)
tatacttcttagattccgttaagaatactttctggggtgtgagccacctgagttattagttagcaaaatgaacctggggaagtgggaagagctagtattctcaattggcaagggattgat

SEQ ID NO: 973605 - DNA, 120 bp, Artificial Sequence
  ENSG00000286214_59 (sequence is synthesized)
tcttcaatgggttcagcatttcacttccctctgaaattaagtggcaaagtaatagcatcccttaaaaaacaggacattggtgagaggtagaatagcaggaggaattttgaaacatggagg

SEQ ID NO: 973606 - DNA, 120 bp, Artificial Sequence
  ENSG00000286214_60 (sequence is synthesized)
gatggctactggaaaagaactgatgaagtgcagagtctctccagacaatggtagaaaccacaggactacattaagattgggcccaaatactagtttagaaaaaggtaaataaaactagct

SEQ ID NO: 973607 - DNA, 120 bp, Artificial Sequence
  ENSG00000286214_61 (sequence is synthesized)
ttacttaagagtacagccagcttaattactggctagtggacatatttcagacaaatctaactggagagaaaaacagaccaggagagaaagcgaagttacaaggaaatggaactagagaaa

SEQ ID NO: 973608 - DNA, 120 bp, Artificial Sequence
  ENSG00000286214_62 (sequence is synthesized)
cctcacaaagggataaaggaggtaattaaaggttaaagccagatagcctcgagctcaaaggagaaatattggaggccagataggaaagtgccttcctactcagggggttatggatccagg

SEQ ID NO: 973609 - DNA, 120 bp, Artificial Sequence
  ENSG00000286214_63 (sequence is synthesized)
gtggctaaagaatagaagtagagttccacccagggccagagggaacaatctgggattcagacacagcagtggtgccaacgtgaatctacctcgtgctagagtctgagtagcctagtctat

SEQ ID NO: 973610 - DNA, 120 bp, Artificial Sequence
  ENSG00000286214_64 (sequence is synthesized)
cacccaacacagataagactggacaggggctcccaggaaccaacatctaagaagggagtttggagaggggctaaaagaaagcaggttaagccccaaatgtaactgaatgatgaccaggga

SEQ ID NO: 973611 - DNA, 120 bp, Artificial Sequence
  ENSG00000286214_65 (sequence is synthesized)
taactatttactagtgcttttatgatttattgtaactctgtaactttcccagtatttgttaattttttaacttctgtttctcctgtacttacgagcagtaaaagttgttcaaaacataaa

SEQ ID NO: 973612 - DNA, 120 bp, Artificial Sequence
  ENSG00000286213_0 (sequence is synthesized)
gatacaagcagaggtttgacaggcactggtgcatcggggcttgctccctcttgctgctgggaccccttctgctatcacaggaagaagtctgggctagtctactggaaggtgagaccaggg

SEQ ID NO: 973613 - DNA, 120 bp, Artificial Sequence
  ENSG00000286213_1 (sequence is synthesized)
ggagcaaagacaagtcaggcctgctgagttccactagttcccagttattctcaaccaaaggacaacttggtcctccagggaagatctggtaatgactggagatatttttggctgtcctac

SEQ ID NO: 973614 - DNA, 120 bp, Artificial Sequence
  ENSG00000286213_2 (sequence is synthesized)
tggcatctagtgggcagaggtcagagatgctgctacacatcttataatgtgcgggacagtccccccataacaaagagttacccggtcccaaatgtcagcagtgctgaggttgaaaaacct

SEQ ID NO: 973615 - DNA, 120 bp, Artificial Sequence
  ENSG00000286213_3 (sequence is synthesized)
gcccatgagcaaccaacccacagctgacctcccagctgactgcagccctgtgagtgaacccagtctgtgaggctgagacctggaggatcaggaggagttcatcgagggtagggtgcagag

SEQ ID NO: 973616 - DNA, 120 bp, Artificial Sequence
  ENSG00000286213_4 (sequence is synthesized)
gagacagcatgggctcaatgcaagtggttcagcagcagctcaaaggccatgagcagaatctggaaaggcaagagaggaggccagagaagcgagcaggggccagaactccagacgaattca

SEQ ID NO: 973617 - DNA, 120 bp, Artificial Sequence
  ENSG00000286213_5 (sequence is synthesized)
actgcttcctgaggacagtaggatataattagaacctttaatttaagcaagcaacctgcatacctgagccacgaggctacagttcccaaaaacaactatgccaaaagaaactgttctttg

SEQ ID NO: 973618 - DNA, 120 bp, Artificial Sequence
  ENSG00000286213_6 (sequence is synthesized)
catctatctccagagtgcttatcactgtagcacaactacaccatttgttcttgagccattgatataaattgtttgataccaaacctggcacagaacaatggtcaatgatgttggtgaacc

SEQ ID NO: 973619 - DNA, 120 bp, Artificial Sequence
  ENSG00000286213_7 (sequence is synthesized)
cagttgattaattctggctccactcttggcacagttcttttccttcctcctgttctagaaagctcccagtttccgctgctgctttgggaggtcattagcaactgtttgttgactggccct

SEQ ID NO: 973620 - DNA, 120 bp, Artificial Sequence
  ENSG00000286213_8 (sequence is synthesized)
caagaacagaacatgtcataggaagttatgtgacagacagatcctaacctggactggtgtgtagtttcaatactttgggcaaactatttacctaataatgggtgtctacaaaaacaacaa

SEQ ID NO: 973621 - DNA, 120 bp, Artificial Sequence
  ENSG00000286212_0 (sequence is synthesized)
gcagtggcacgatctcatgaagttttaagaaaagcctcaagaatggcctcatggcctcatggaagtttttgctatgccttcagttctgtcacagtctttagaggtgtttttgtctaactc

SEQ ID NO: 973622 - DNA, 120 bp, Artificial Sequence
  ENSG00000286212_1 (sequence is synthesized)
tccctcaggatcacaccaaaaagccttggtcattcagcatggtgcctgaccttcagcaaatattgggagcctccgattcctgctgcttctagtctgccatctttgccacacccccagaaa

SEQ ID NO: 973623 - DNA, 120 bp, Artificial Sequence
  ENSG00000286212_2 (sequence is synthesized)
attctgactattcaatttctactataccaaaattagactcctcctcccgctaaggaaaagtggtgacaacatgggcatatggacattcattcccaccttcagcagagggaggatatgtgt

SEQ ID NO: 973624 - DNA, 120 bp, Artificial Sequence
  ENSG00000286212_3 (sequence is synthesized)
tttgagaaatggtactagagcaattcaacatagaagaaaagaagagaagatgaaggagaagaggaggaagaggaagaggaagaaggaggaggaggaggaagaagaaaaagaagaaggaag

SEQ ID NO: 973625 - DNA, 120 bp, Artificial Sequence
  ENSG00000286212_4 (sequence is synthesized)
aagaggaagaagaagaggaagaagaggaagaaggagaagaaggagaaggagaagaagcagcagccaagtgcagtgacccagcctgtagtcccagcgctttgggaggtcaaggcgggcata

SEQ ID NO: 973626 - DNA, 90 bp, Artificial Sequence
  ENSG00000286212_5 (sequence is synthesized)
ctactaaaactacaaaaatatcagcttcttgggaggctaagcaggataatcgtttgagtcctggagacagaggttgcagtgagccgagat

SEQ ID NO: 973627 - DNA, 78 bp, Artificial Sequence
  ENSG00000286212_6 (sequence is synthesized)
catgccactgcactccaacctgggtggcagaaggaagaggaggaggaggaaagaataataataataataataataata

SEQ ID NO: 973628 - DNA, 120 bp, Artificial Sequence
  ENSG00000286212_7 (sequence is synthesized)
ataataataataataaggggagcaccttgacctaagtctcactttcgcacctacaaaatttaactcaaaatgaatcacagacttaaataccatagaaaaaaaaaacagggcacctgtgtg

SEQ ID NO: 973629 - DNA, 120 bp, Artificial Sequence
  ENSG00000286212_8 (sequence is synthesized)
ttctagcaccagttagagagttctttgaccggattctgaaagcactatccataaaaagaaattttggtaaattgaagttcattaaaattggaaacttttgttctgtgaaagaccctgcca

SEQ ID NO: 973630 - DNA, 120 bp, Artificial Sequence
  ENSG00000286212_9 (sequence is synthesized)
aaaagatgagaaaataagctacatgctgagagaaaatatttgcaaagcacctatttgacacagggttagtatctagagtatataacaaactcaaaaagctcaaaaataaaggaaaaaaaa

SEQ ID NO: 973631 - DNA, 120 bp, Artificial Sequence
  ENSG00000286211_0 (sequence is synthesized)
aagggctattcagaagacagagggcttaatcatgtccactacttcttgttgatttcttctcttctccacaaaatgactgcttcatgtactagaccataactgcatacatctataagacag

SEQ ID NO: 973632 - DNA, 120 bp, Artificial Sequence
  ENSG00000286211_1 (sequence is synthesized)
ctttactcacaagatgaagggatattccttagtgttgatatttcattgacttactcaggctttctcttgtcaagatcttgtctttcaactctgttggatagcatatttatcttagtttca

SEQ ID NO: 973633 - DNA, 120 bp, Artificial Sequence
  ENSG00000286211_2 (sequence is synthesized)
gccttgaattctcacttggacatattctatttccctaccagagtgtaaccccaatataaggactgacagtcaagctctactacacctcttagccagtttctccagataataacgaatacc

SEQ ID NO: 973634 - DNA, 120 bp, Artificial Sequence
  ENSG00000286211_3 (sequence is synthesized)
atacacattcacaggccatgttctaaaggattctcagaagctattggagtcgtttccaggattatatggggagaaagaagataaatattctcagctcttctttgttgctgtgacagaaac

SEQ ID NO: 973635 - DNA, 120 bp, Artificial Sequence
  ENSG00000286211_4 (sequence is synthesized)
gaagtacttctgttgcttgtgatattaccttacatgtagttattgaaaacaaagagaatggattttgcccctctgggtatattcttattctgctgtcattttttgagattttccaaatct

SEQ ID NO: 973636 - DNA, 120 bp, Artificial Sequence
  ENSG00000286211_5 (sequence is synthesized)
tttgttttgttttgttttgttttgttttccccatggcatctctccacttcctctaatttggctcctggacaattacagttgctttctaaagatattatacataattaaggcagttgactt

SEQ ID NO: 973637 - DNA, 120 bp, Artificial Sequence
  ENSG00000286211_6 (sequence is synthesized)
ttacagttgctttctaaagatattatacataattaaggcagttgacttttaactttcatttacattactttttaactttctaaaaaaattttactacttaccattatgaatggtatttaa

SEQ ID NO: 973638 - DNA, 120 bp, Artificial Sequence
  ENSG00000286211_7 (sequence is synthesized)
ttctgtggatttcttgggaagaaattcaataagataagatgaatgtagcaatgcattattcactcatgtttacctgaagttggaatgtgtgtttgagttaaaggttgagtacaaatcaaa

SEQ ID NO: 973639 - DNA, 120 bp, Artificial Sequence
  ENSG00000286210_0 (sequence is synthesized)
agcaccagaaagacttggagaggaaggccctggaagagctgcctctgtgaatccccgaagaaagggaagggagaacaaagtttacactgaacatcttgacttcccaaacagcatgttgag

SEQ ID NO: 973640 - DNA, 120 bp, Artificial Sequence
  ENSG00000286210_1 (sequence is synthesized)
gcagtcccacggcggacaggttttgcggcaggcctgggactcgcccgggactgccgcagcctggagattcatctagaaagaatataacaagcctccttctccctggtgcccatgttactc

SEQ ID NO: 973641 - DNA, 120 bp, Artificial Sequence
  ENSG00000286210_2 (sequence is synthesized)
cctgttgctactctttccgagccttcagttccctgggtggtaccctcaagtgtgaaagagggagtgccccttggaagctggggaacgatttaggcccaggagaaaatggaagcaaatcca

SEQ ID NO: 973642 - DNA, 120 bp, Artificial Sequence
  ENSG00000286210_3 (sequence is synthesized)
acaaccggtgagctgttaaagaggccatgcgcctggtagcaagagctctggatcaaacggcataacatgcgtttggacatgtaaggatttcagcggttcctgcaaagcaaacttctctgg

SEQ ID NO: 973643 - DNA, 120 bp, Artificial Sequence
  ENSG00000286210_4 (sequence is synthesized)
tctgtacagaatagccttacaccccatagggcagtctgtcagcaatgcatttgaaaggggagcacataggtaatgcattagactccatgtaaactgcccaatgcttcccagaaggctggc

SEQ ID NO: 973644 - DNA, 120 bp, Artificial Sequence
  ENSG00000286210_5 (sequence is synthesized)
ggcccctgcatcgctctgaactgaagaggagctgaagtcacagaaagccagccactactcgattgcccaagaagcagtcgtcgcactggcccagcttcacagcggctctcgagtgctgag

SEQ ID NO: 973645 - DNA, 120 bp, Artificial Sequence
  ENSG00000286210_6 (sequence is synthesized)
aaaacccactggaagggcttcctttccctactctgcacatgagaatagccattcctgtgtcagttttgcttctttctgggctctctgattaggatttatttccttagctagagaaaataa

SEQ ID NO: 973646 - DNA, 120 bp, Artificial Sequence
  ENSG00000286210_7 (sequence is synthesized)
agggaccttacaaggcctaattagagcgactcctctctgatgtattcaagacaccctgctgaattggactggcaagtccctgtgtattgttattattgttgttttaaagaagccatttct

SEQ ID NO: 973647 - DNA, 120 bp, Artificial Sequence
  ENSG00000286210_8 (sequence is synthesized)
gaccagggtggctgaaggagacgccctttgtcggcctctcatggtcctggccctcgccaagggaactgttcctgaactgctgtgtttatttgagttatgtaatataaacagctccaagga

SEQ ID NO: 973648 - DNA, 120 bp, Artificial Sequence
  ENSG00000226571_0 (sequence is synthesized)
ttgaactcttctcatgttcctccagcagccacaactaaagtactgtatcaggactgccttggaacatgaaaccaacttaccgctgtactttccatcttggatgctgaagttctagggtag

SEQ ID NO: 973649 - DNA, 120 bp, Artificial Sequence
  ENSG00000226571_1 (sequence is synthesized)
ggttgtcagtaaaatgcaggacacccagttaaatttaaatttcaaataaataagaaataatttttagccattattatggagttgtagacctggtgtggggagtatggggatcaacctcag

SEQ ID NO: 973650 - DNA, 120 bp, Artificial Sequence
  ENSG00000226571_2 (sequence is synthesized)
aagcctccagagagagattggtggactctaggagtgtcgatctcagactgaccatcgctggggccacatccaagcagcagccctttgtccagagccatttcctccactggcctcagtttc

SEQ ID NO: 973651 - DNA, 120 bp, Artificial Sequence
  ENSG00000226571_3 (sequence is synthesized)
tgtagggcccagatggtgctgaagtcagatgccaaggggaaagtgactttacccacgagagagatttttaaatattcccccaactgctccgatgggaccgtctagttacaggaaaacaag

SEQ ID NO: 973652 - DNA, 120 bp, Artificial Sequence
  ENSG00000226571_4 (sequence is synthesized)
ctcaaggctcccactgattctacattacgagctggaagaaacgaagaacctcaacaatttttatttctacttttgatcaaggaaaagcgtatttagaaggttcgctagagaaaaatttag

SEQ ID NO: 973653 - DNA, 120 bp, Artificial Sequence
  ENSG00000226571_5 (sequence is synthesized)
cagtttggaggattgagatcctttggcagagatatgggagtgtgagcaggaaatatttttttaaaggaagagctggtgttttaggatgtcaaaggtacaaattatgatggtgccatggtt

SEQ ID NO: 973654 - DNA, 120 bp, Artificial Sequence
  ENSG00000226571_6 (sequence is synthesized)
gacagaaatttgcaagatctccgtatctacatgaactctttgctcctgactattagctgactggtccagaaattcttgatccaagcttgatatgtaagcttctctctcctgtgaatatgg

SEQ ID NO: 973655 - DNA, 120 bp, Artificial Sequence
  ENSG00000226571_7 (sequence is synthesized)
cactgagagacacaagattagaagccctgggtgctgatcaaactcatagcaaggaagagtggtggctcaagactgcctgctcctgagacttctgagaagggtgtctctctgtctgtgtgg

SEQ ID NO: 973656 - DNA, 120 bp, Artificial Sequence
  ENSG00000226571_8 (sequence is synthesized)
atgcctgatgcttctggtatttcacaaatcttgagcctggccaggagtttactaacaggcacccctgtgtcatctgaacaagataaatatcccgcagtggaatcagccttcccagggacc

SEQ ID NO: 973657 - DNA, 120 bp, Artificial Sequence
  ENSG00000226571_9 (sequence is synthesized)
tccctggactctgagaagtgattaaagggactgtgcggcagtcatggggatgcaagcagctgtggccatcaaactggttctaacagacagtatgagatcttcatgattctggaccataag

SEQ ID NO: 973658 - DNA, 120 bp, Artificial Sequence
  ENSG00000226571_10 (sequence is synthesized)
ctgttcacttatgagtaggcctgtaacacggacgtgtgagaataaacgccagagaaaaatttttgtggctggtctacttgtgggtacaaaggcccagacccattgtttcaactggagacc

SEQ ID NO: 973659 - DNA, 120 bp, Artificial Sequence
  ENSG00000226571_11 (sequence is synthesized)
tgtgaagggcgatcccagcctcagaacctcgcatgggatggactcagtactctgctgcaactgcatttcagtttaacttctccctttacccagtcctaacttccttattccctaaaaaat

SEQ ID NO: 973660 - DNA, 120 bp, Artificial Sequence
  ENSG00000226571_12 (sequence is synthesized)
gtttctgggagtgctcctcagtaaacttcatgcataaacacttcagaggctcagagtatgtttcctggagaattccatctgtggcgtttcctcttcatgcctactgccaccatccaggtt

SEQ ID NO: 973661 - DNA, 120 bp, Artificial Sequence
  ENSG00000226571_13 (sequence is synthesized)
taggcccccattaccgcttacctggaatattgcaaaagctttatcactattctctttgctcactggctctcctataatcagtctacacaacagcagactaattttttttatcccagatca

SEQ ID NO: 973662 - DNA, 120 bp, Artificial Sequence
  ENSG00000226571_14 (sequence is synthesized)
tagctcttatgctgttttcctgctcaaaaactttggtggccccccagtctatttaattaggttcttactccttattgtgattttcaagacccttcccaatttagcccccactattttcag

SEQ ID NO: 973663 - DNA, 120 bp, Artificial Sequence
  ENSG00000226571_15 (sequence is synthesized)
ctctcatcttctactccagtataagtatgctccgctccatttaaactagaacatttgcaatcctccaaatctactgtaaaaattcatttttcctatatttgttccaaatgttctcttcta

SEQ ID NO: 973664 - DNA, 120 bp, Artificial Sequence
  ENSG00000226571_16 (sequence is synthesized)
atttgttccaaatgttctcttctattatcttctttataaaatttgaaccatatttcaaggtccattctcctttttctttttcattttttttctagatggagtctcgcactgtcgcccagg

SEQ ID NO: 973665 - DNA, 120 bp, Artificial Sequence
  ENSG00000226571_17 (sequence is synthesized)
cattgtgagagcaatattcattcttggcatacctgtatcaatgtatcttatgtaccccataaatatatatccctactatgtgaccaaaaaaattaaaaataaaataaaaatttaaaaccc

SEQ ID NO: 973666 - DNA, 120 bp, Artificial Sequence
  ENSG00000226571_18 (sequence is synthesized)
acaccttcagagccatgcaaagctggaaggagacagagataaggtacactgaaaggaagaaagaaactcctctctccaagctgcatctgcttgctcagagcagcagcttgctgatgcatg

SEQ ID NO: 973667 - DNA, 120 bp, Artificial Sequence
  ENSG00000226571_19 (sequence is synthesized)
tgattgccaggcatggggctggacccctgcccaggagtggcaaggacaggtacccaggccacatatgactgttgtgcagctgatgtacttggcttgctacctaccaccgatagtgatcat

SEQ ID NO: 973668 - DNA, 120 bp, Artificial Sequence
  ENSG00000226571_20 (sequence is synthesized)
tctaagatgcaaaacaatgaacacactcaagctgattttggatttgaccatacacatttctcagaagagggagctttcctggagaaggtgaagaaagagaaggatatttggcagtgctga

SEQ ID NO: 973669 - DNA, 120 bp, Artificial Sequence
  ENSG00000226571_21 (sequence is synthesized)
ttgcagctcgctctatgaggacatattctcctcatccacagaagcccttttcaaacattactaagaagtctgataagaagaaaaaacatccactgatgggttctcagaaagaaagcatta

SEQ ID NO: 973670 - DNA, 120 bp, Artificial Sequence
  ENSG00000226571_22 (sequence is synthesized)
gatttaactacagggcaatactgccctgattaccacaggcccagctgacggcaaggttgccaggcagctctcgtcctgccaagaatggtggtggaatgaagcaagcatgtgatgcacgtg

SEQ ID NO: 973671 - DNA, 120 bp, Artificial Sequence
  ENSG00000226571_23 (sequence is synthesized)
attgatgacactgtcacaagtatatatcatcatggaaatacccaaataaggtgtttgaacacatatttctcagaggaggaagatttcctggagaggctaaaggaagagaggaagatattt

SEQ ID NO: 973672 - DNA, 120 bp, Artificial Sequence
  ENSG00000226571_24 (sequence is synthesized)
ggcagctgttgattgttgaccatgacttgttgaaaaagcttgcaaaggcatccttaaggagtttacattctcctaagaaagaatgccacgcaaagaatcagatacgcagaaaatgccatg

SEQ ID NO: 973673 - DNA, 120 bp, Artificial Sequence
  ENSG00000226571_25 (sequence is synthesized)
aaggcagagctcggggtgatgcctctagaagccaagaatgtcaaagattgccagcaaaccaccggaagcaaggagagaggcatgggacagattctccctcccagttctcaggaaaaaaca

SEQ ID NO: 973674 - DNA, 120 bp, Artificial Sequence
  ENSG00000226571_26 (sequence is synthesized)
accctgctgacacctcgatctggacttgttgcttccagaacttgtgagaaattccccctccattttgatttcacccagagatgcagcactacctacaccaaacagaatgtgaatgtctgc

SEQ ID NO: 973675 - DNA, 120 bp, Artificial Sequence
  ENSG00000226571_27 (sequence is synthesized)
aagttctacacagtatttcccaggagctaattggatcagaagaaaaggcagtgctgatcacagagtttgcctgatgggagaaggacgacctgtgaacttttcttgttaggaaagactcgg

SEQ ID NO: 973676 - DNA, 120 bp, Artificial Sequence
  ENSG00000226571_28 (sequence is synthesized)
ggactgaggtgactgtcagtctcagaacagccatatctgagacgaggaccaaggaccaaagaccaagtagctctgtctgagacaaggacaacctccagaacagatttccacattgctttc

SEQ ID NO: 973677 - DNA, 120 bp, Artificial Sequence
  ENSG00000226571_29 (sequence is synthesized)
tttctgtttccatgacttagacaacaatggcatctgtgtgtaccttctttctgtgtggaactgccaattcttctacatggattaatcccaaggagtagtttctctgcacattctccacca

SEQ ID NO: 973678 - DNA, 120 bp, Artificial Sequence
  ENSG00000226571_30 (sequence is synthesized)
gacagtagctcttcattaggatgccttgatactctgatgtggtgccaccacatcctcccaaagcaagtctcttccctctggcagcagagaagcggattttctgctcaacctgctttgatc

SEQ ID NO: 973679 - DNA, 120 bp, Artificial Sequence
  ENSG00000226571_31 (sequence is synthesized)
accaaatgagtcagggagaagaacatggatggaaatatcctcagtcaagaacttcacaagcaccagttgctttaaccaggggctctagaaattttctagaataaatgcttctcaatttgt

SEQ ID NO: 973680 - DNA, 120 bp, Artificial Sequence
  ENSG00000226571_32 (sequence is synthesized)
ccaaggggaaagtgactttacccacgagagagatttttaaatattcccccaactgctccgatgggaccgtctagttacaggaaaacaagctcaaggctcccactgattctacattacgtc

SEQ ID NO: 973681 - DNA, 120 bp, Artificial Sequence
  ENSG00000226571_33 (sequence is synthesized)
gtctttaaacaatgcctgtgacatagacaatccctcagaaagatgcttatctaacgttcccagtggtcatgacttttggcaagaaagttggagatgtgaccagctgcacatgactttacc

SEQ ID NO: 973682 - DNA, 120 bp, Artificial Sequence
  ENSG00000226571_34 (sequence is synthesized)
taaaagcttgctatgtaaaggacactttctggagagtgggtgtaggaattcactgtctcactgctgcccaagacagcactactgtttgtaagcccctattaaatatttctttctgagaaa

SEQ ID NO: 973683 - DNA, 120 bp, Artificial Sequence
  ENSG00000226571_35 (sequence is synthesized)
aataaatgtaatgcacttgaatcatcccgaaactatccctccccagtccatggaaaaactgtcttccctggtgccaaaaaggttgacggctgttctgcagcaaggtctttaaacaatgcc

SEQ ID NO: 973684 - DNA, 120 bp, Artificial Sequence
  ENSG00000226571_36 (sequence is synthesized)
gggatcagctgaggcctctgttgccgctgcctcaccgttcaacttctctctttcctcaatcttgcttctctcattgccttactggtgtttgtcctgagagcatgccctccacaaatgtaa

SEQ ID NO: 973685 - DNA, 120 bp, Artificial Sequence
  ENSG00000226571_37 (sequence is synthesized)
catttctcagagtgctattatcaggatttatgagaaagttgaggtgcagagaggtcaaggaacttgttgcagctcactgaactgtggctggtctacttgtgggtacaaaggcccagaccc

SEQ ID NO: 973686 - DNA, 120 bp, Artificial Sequence
  ENSG00000286218_0 (sequence is synthesized)
gcaattcatcaggagtggaggggcatgtgcaggatcgccatgtaacgtgaatcctgattccacgtttgccttttgtggtcggctttacaaagtggaaatgcttccagtcggttttatgac

SEQ ID NO: 973687 - DNA, 120 bp, Artificial Sequence
  ENSG00000286218_1 (sequence is synthesized)
ctgcagccacctgccggaggaagcttctgacaaccaggctttcaaaaaggcaggattggtttgtttgtttgtcctgtgggatcctcctctctcctattaatctccaatcagctaatggca

SEQ ID NO: 973688 - DNA, 120 bp, Artificial Sequence
  ENSG00000286218_2 (sequence is synthesized)
tcaaaagatcgccctgggtaggaagcaatgtgataaaggacaggtgaaggaagtcaaggagagaaatgatgtggaaggctggaggggaggctcccacccacagacacaggggccacagtc

SEQ ID NO: 973689 - DNA, 120 bp, Artificial Sequence
  ENSG00000286218_3 (sequence is synthesized)
ggccctggacacacagaacacctttaagaaggcataagaactggaaacctgaaattactttcttctgacattgtctctttctggatctgctcagctggaaagcccaatgcagagcgattt

SEQ ID NO: 973690 - DNA, 120 bp, Artificial Sequence
  ENSG00000286218_4 (sequence is synthesized)
gtctttgttctgacttctgttgtattccatgtaaagccatcaccccaggagactcgaatttcctgtggatgttgatgtgcccatatctgcagtgacaaatcaattcaaagatacaaatgc

SEQ ID NO: 973691 - DNA, 120 bp, Artificial Sequence
  ENSG00000286218_5 (sequence is synthesized)
agttttgttatatgcacatattgcctactggtgaagtctgtgctttcagggtacccatcaccggaacagcaaacattgtacccaatagaacttcctgcatgtggggctctgatgacttcc

SEQ ID NO: 973692 - DNA, 120 bp, Artificial Sequence
  ENSG00000286218_6 (sequence is synthesized)
ctgaggcctgacgacccatgatctcccagtccaagagcttcacggagctccaaggccttgttctgcacttccaggggcaggctgtcagctgcccagcaaaatggggatgcacagtgtggc

SEQ ID NO: 973693 - DNA, 120 bp, Artificial Sequence
  ENSG00000286218_7 (sequence is synthesized)
tagggagaaggggttgcacgcagcaatacagtgttcttcagccttccagaaaacagctattgatgggcctcctcagattctggaatgtgtatgtactcatttgctagggctgccataaca

SEQ ID NO: 973694 - DNA, 120 bp, Artificial Sequence
  ENSG00000286218_8 (sequence is synthesized)
aagtaccgcagaccgggggcttaaaccaccgagatttattggctcacagttctggaggctggaagtaggaaagggttggttccttctgagggctgcaaggaagcatttgttccaggcctc

SEQ ID NO: 973695 - DNA, 120 bp, Artificial Sequence
  ENSG00000286218_9 (sequence is synthesized)
tccccttggcttggagatggccatttcctccctgtgtccctcatatcttcttccctccacgcatgtctcagtgtccacatttcccctttttataagaactatttgtcatagtggattaag

SEQ ID NO: 973696 - DNA, 120 bp, Artificial Sequence
  ENSG00000286218_10 (sequence is synthesized)
gcccaatctaatgaactaattttaacttgattacctctacaaatacagtaggtccaaataaagtcactttctgaggtcctggggttagggatccaatgaatgaacctggggagcagaggg

SEQ ID NO: 973697 - DNA, 120 bp, Artificial Sequence
  ENSG00000286218_11 (sequence is synthesized)
aacacattttaccgcctaacagcacagttcctaaacatgagatctttttgcatagacccctgggaagtccagtgtttagtggcctgccactccgtgtttggtggcctgtcatgtcagagt

SEQ ID NO: 973698 - DNA, 120 bp, Artificial Sequence
  ENSG00000286218_12 (sequence is synthesized)
ggcagcctgtcttgctgcatctagaactgttcaagccaaatgctcatcagaaactgagactcagatgaggggtgtgtgggcaccaacctgcctttcaggtgtggctctgggaagagggct

SEQ ID NO: 973699 - DNA, 120 bp, Artificial Sequence
  ENSG00000286218_13 (sequence is synthesized)
cagaatgttaagacaggactgcattttgagaggagcacacacaccacacattgctcatgtcagcaaaaagtggaaccacatttctggaaacaatttggtgatgtcatcaagggcattttt

SEQ ID NO: 973700 - DNA, 120 bp, Artificial Sequence
  ENSG00000286218_14 (sequence is synthesized)
aaaagttgtataatttgacccaagattcctgattttagaaatttttcttaggaaactaacaagggctacattgaaaattttctataaaaaaaaattcttctcagcatcaattttaatagt

SEQ ID NO: 973701 - DNA, 120 bp, Artificial Sequence
  ENSG00000286218_15 (sequence is synthesized)
taaaaaaaaatccctggaaaacagcctcaatgtccaacaaaaaggggatatggcatattcatatgatggagtagtgcaatgaaactaggagttttcaaataattagatttaatgacaaat

SEQ ID NO: 973702 - DNA, 120 bp, Artificial Sequence
  ENSG00000286218_16 (sequence is synthesized)
taagattagaaacttttatttttaaatctctgtatttcctaaacttcttgcaaagaatatatttagacattacccctgtaaagcagaaagaatagcaatttttttttaactgcgtgcttc

SEQ ID NO: 973703 - DNA, 120 bp, Artificial Sequence
  ENSG00000286218_17 (sequence is synthesized)
cttttctattttcgcttctcttccttctcctctacccttactttcaaccaaggctagaggttgaacagtgacttaatgctcacaatgtctattgccctatttgacccaatagctttagat

SEQ ID NO: 973704 - DNA, 120 bp, Artificial Sequence
  ENSG00000286218_18 (sequence is synthesized)
ctatttctcattattattgcatccactgtaactttttccataccctgatgctcatgcaaattacaaaagaatttccagttgtttaacctgttattatctgtttaacttgtgattcacttt

SEQ ID NO: 973705 - DNA, 120 bp, Artificial Sequence
  ENSG00000286218_19 (sequence is synthesized)
cccgttgctttggcttgtatagtgacactggtgaaaatgctttagtgaatgagaaattaactaaccatggaatcatagtaagagttataaggacttgaagtggaaatgccctggtggaat

SEQ ID NO: 973706 - DNA, 120 bp, Artificial Sequence
  ENSG00000286218_20 (sequence is synthesized)
tactgtcacatatagactacatttttctatatttctcttgtaattcctaactttgagttcctcccagtaggaatacactgtccttcatgtacaaatataaatatataaatatagcaacat

SEQ ID NO: 973707 - DNA, 120 bp, Artificial Sequence
  ENSG00000286218_21 (sequence is synthesized)
tatagcacttcaaacttgtcatgaacttttccaatctttttaaaattctgacaagatgactttctaatgaaagaatttgatcatgttaatttcccagtttaaaaatcttttagtggatgt

SEQ ID NO: 973708 - DNA, 120 bp, Artificial Sequence
  ENSG00000286218_22 (sequence is synthesized)
tgggctatgctacctaggtcctcctttgggtgctgtgctgtgctacctaggtcctcctttgggtgctgtgctgtgctacctaggtcctcctttgggtgctgtgctgtgctacctaggtcc

SEQ ID NO: 973709 - DNA, 120 bp, Artificial Sequence
  ENSG00000286218_23 (sequence is synthesized)
tcctttgggtgctgtgctgtgctacctaggtcctcctttggggctgagcaccccttctccacagttgccaggaatgttggggctaatgtctgtcaactgagtggttccccagaaggtacc

SEQ ID NO: 973710 - DNA, 120 bp, Artificial Sequence
  ENSG00000286218_24 (sequence is synthesized)
ctcagctgaagacagcagcttcacccagggccacaccccctccctaggaacagccaacctctgatgactggtcaatgcagggctgtagagcttgaccaccttgccttcagttggggcaaa

SEQ ID NO: 973711 - DNA, 120 bp, Artificial Sequence
  ENSG00000286218_25 (sequence is synthesized)
tctgaagggtcatctcagctctagagctccctgtaagatctgccctgcaggtcacttctttcccctgcccacctctccttccttcatttgcctacagatattgttcccatgaacactctc

SEQ ID NO: 973712 - DNA, 120 bp, Artificial Sequence
  ENSG00000286218_26 (sequence is synthesized)
ctcttggacctacaccagtggtttgccaagggctgttgggccttcagccacagactaaaggctgcactgtcagcttccctactttttaggtgtttggaattggactggcttccttgctcc

SEQ ID NO: 973713 - DNA, 89 bp, Artificial Sequence
  ENSG00000286218_27 (sequence is synthesized)
tcagcttgcagatggcctattgtggggctgcaccttgtgatcgtgtgagtcaatgctccttgataaactccctttcatgtatacgcact

SEQ ID NO: 973714 - DNA, 120 bp, Artificial Sequence
  ENSG00000286218_28 (sequence is synthesized)
agagcactgactaacagagggagccactacagactcgatatgttataatggaaaactaaacttaaactaaattaaattaaaaagccaacacatccatcaaaacatggtgtttcagtagga

SEQ ID NO: 973715 - DNA, 120 bp, Artificial Sequence
  ENSG00000286218_29 (sequence is synthesized)
caggttaaacatcaccttcatatagaaaaaacaaacaaaacaaaaattttgattatctgcgctatgtataaacgtagacaaaatctgtttctgtaatagatggccagctcttccccctgc

SEQ ID NO: 973716 - DNA, 120 bp, Artificial Sequence
  ENSG00000286218_30 (sequence is synthesized)
agttcaagaaaaaataaaactgaagatcatcagaataagagcaactgaaaaggttatggagatgggatgggctaaacacttgaaactactcagattggaaagtcagagactcaaataaac

SEQ ID NO: 973717 - DNA, 120 bp, Artificial Sequence
  ENSG00000286218_31 (sequence is synthesized)
aaagggacaacagccagactgtatataacattaggactctgacctacaatctgtagctaatagtctgggaaaccaaatcacaaagtctgccacaatcaactcatgttggccaggacttgg

SEQ ID NO: 973718 - DNA, 120 bp, Artificial Sequence
  ENSG00000286218_32 (sequence is synthesized)
tcaatgactggcagctcccctactttttgctcttacttctaacaaagggccaaaaaaagaaagccacatatgctcccaaatcaatcacgagggatgcctcatttctgattaggttgtctc

SEQ ID NO: 973719 - DNA, 120 bp, Artificial Sequence
  ENSG00000286218_33 (sequence is synthesized)
cagcttccccaggtcaacagtcttcaacaggccaacaaacttcaatactttaagccttctcttttatcaccttataaagcttttatacttgtacttgactttgcatttctgcaaaaaata

SEQ ID NO: 973720 - DNA, 120 bp, Artificial Sequence
  ENSG00000286218_34 (sequence is synthesized)
aactaactccctggaacagatagctttgactaaatcacctctgtttattttctgttagtggtcttcgtttatttccacaagaaaaaaggtaagatgacaaatatccataaaatcataaat

SEQ ID NO: 973721 - DNA, 120 bp, Artificial Sequence
  ENSG00000286218_35 (sequence is synthesized)
gatctgcatgaggagagcagagatttaaacaataaattttgttctttgatgaggatgtaataagttactcagtgtctcttaagattaaagtcaaggtcaggagatgttccctgtgaaaat

SEQ ID NO: 973722 - DNA, 120 bp, Artificial Sequence
  ENSG00000286218_36 (sequence is synthesized)
gattataacaaagtaaataaatcatatagccataaagaaacctattcttaagaaattacttgtaaagtcgatattactgtatacagtgttacttctgtttcctccaaaatcaggccatca

SEQ ID NO: 973723 - DNA, 120 bp, Artificial Sequence
  ENSG00000286218_37 (sequence is synthesized)
ataaaaaatttgattgagaccagtaaagtagtaactccatagtgacatacagaaaccaagatatatgagggttgactctggtcccaatcctcttccatgaggttgttccagatcttttca

SEQ ID NO: 973724 - DNA, 120 bp, Artificial Sequence
  ENSG00000286218_38 (sequence is synthesized)
gtgctctgcctaccatctatactgcccttatagaccatggtctcacatgacctatactccatgttgcatatgatgcatgaatgagtgaataatggcccatgggtcttgctggtgtttcat

SEQ ID NO: 973725 - DNA, 120 bp, Artificial Sequence
  ENSG00000286218_39 (sequence is synthesized)
gagttaataatttcagctccctcaagcaaatgttaattctctgaggacaaaaacatagaaggtacatttcccgaactacttgcttagtaacaacacagtttaattaagtcagtcataaag

SEQ ID NO: 973726 - DNA, 120 bp, Artificial Sequence
  ENSG00000286218_40 (sequence is synthesized)
tttgacttcagaaggaaccactgtcacatgtacttatgatacaactatgattacctacatcacggttgtatattgcagttgtttgttttgttattatgtccactaccaactagaaagccc

SEQ ID NO: 973727 - DNA, 120 bp, Artificial Sequence
  ENSG00000286218_41 (sequence is synthesized)
ttagggcaataactgctttgtcattgttgttcattttgcatttcctgtacctaacagagtagctggttcatgataggcccttgatattcaatgtcctgtttgctgtcgactcctaccaga

SEQ ID NO: 973728 - DNA, 120 bp, Artificial Sequence
  ENSG00000286218_42 (sequence is synthesized)
aaaagaattgtatatgaagcagcagtgatctgacctaggtagcaactggtgcattttgcatttcaggggttagaaaactttacctgaaaagaacagatggtaaattttaggcttacagga

SEQ ID NO: 973729 - DNA, 120 bp, Artificial Sequence
  ENSG00000286218_43 (sequence is synthesized)
catagggtctttgtagcaactactcaactttacccttgtcagccaaagcagctctagacaatagtaaacacatagggatggctgtgttaatagtactttctttacaaaaacagatagagg

SEQ ID NO: 973730 - DNA, 120 bp, Artificial Sequence
  ENSG00000286218_44 (sequence is synthesized)
actggatttggcctgaggcctacaatatgcctacccatgaacatggaatatccatagttcaaagagagataggaattgtatatactctgtaaatccaaatataagcaatacttcacaaag

SEQ ID NO: 973731 - DNA, 120 bp, Artificial Sequence
  ENSG00000286218_45 (sequence is synthesized)
ccataattggggcccccaaactgttcccaaatgtgatgcaatttgctgcctatattcaaaatggagggaaatgttaaatttcagcttgcgcttcgtggaaatacagatggaccttggcta

SEQ ID NO: 973732 - DNA, 120 bp, Artificial Sequence
  ENSG00000286218_46 (sequence is synthesized)
aataacccctgctctaggaggaatggaatttaccatttttctccataataacactgtttattgaaggacaacttactatgaaccaaacttttaatatacatcatttattcaatccccaaa

SEQ ID NO: 973733 - DNA, 120 bp, Artificial Sequence
  ENSG00000286218_47 (sequence is synthesized)
gaacactacaaagtaggaattatcatttttattttagacataaacaagtggcaaaatagcttagtgagtgtattgtttgaagtcacgagatttgtgcaagaaaaagacagcttcaagccc

SEQ ID NO: 973734 - DNA, 120 bp, Artificial Sequence
  ENSG00000286218_48 (sequence is synthesized)
aggactacccaactgcatgagtcgtgtgctttgcagactgcagatccctcagcaggagaggggagagctggtgtcgtggaacgtgtgtatattaaaacaatgacctacattgatcaaata

SEQ ID NO: 973735 - DNA, 120 bp, Artificial Sequence
  ENSG00000286218_49 (sequence is synthesized)
tttacaccaactcagcagctcaagttcatgtgtttgccagagacttcggacaccagagaattgtgcggaaagtgactgggatttcactgataaacagcaagtacttccacaggagttatg

SEQ ID NO: 973736 - DNA, 120 bp, Artificial Sequence
  ENSG00000286218_50 (sequence is synthesized)
aagaaggagaaattaggaccacaccatgcataacactgtactgtgtactatagacatttgactcctaccttcctacctgctgcaagagcatttccttacactaaatttatgatagtttgt

SEQ ID NO: 973737 - DNA, 120 bp, Artificial Sequence
  ENSG00000286218_51 (sequence is synthesized)
atatccctaaccccccaaaatataaaaaagatgtcataaattgtggccaggtgcaatggctcacatctgtaatcccagaacttgggaggctgaggcaggtggatcaccttgatgtcagga

SEQ ID NO: 973738 - DNA, 69 bp, Artificial Sequence
  ENSG00000286218_52 (sequence is synthesized)
tagatgtcataaattgcttatattgttagtcaaagcatagatttttttaagttcaactgaaccatttct

SEQ ID NO: 973739 - DNA, 120 bp, Artificial Sequence
  ENSG00000286218_53 (sequence is synthesized)
tcaaagcatagatttttttaagttcaactgaaccatttctcctggtttttattattcaataaacaagttaaaccaacaatggtattaaaatagcattaagattcctagaacaaaacaaat

SEQ ID NO: 973740 - DNA, 120 bp, Artificial Sequence
  ENSG00000227627_0 (sequence is synthesized)
ggaggctgtgcggccttccccagcggctgtagcaggagacctgcggctgcatctcccagggccttccggcggggccgaggcacacaatactgagaccagaataaagcagtgcatttacta

SEQ ID NO: 973741 - DNA, 120 bp, Artificial Sequence
  ENSG00000227627_1 (sequence is synthesized)
ccttgtgaagaatgttcaggtgttcagtgggcttgatccagtcaggtgaaggtctgaagagaaaaaaagaccgtcctcttcccagaacaagagaatcctccaacagatacctttggactg

SEQ ID NO: 973742 - DNA, 120 bp, Artificial Sequence
  ENSG00000227627_2 (sequence is synthesized)
gaccttgcaccatcagctttcctgggtttccagcctcctgcctcacactccagcttttggacttgttagacttaataataacaacacaagccaatccttttaaggaagtttgtctggaga

SEQ ID NO: 973743 - DNA, 120 bp, Artificial Sequence
  ENSG00000227627_3 (sequence is synthesized)
atcttgacaaacacaaacatctactgagagttcctgtccaagttttgctcacaccctagcaagaggcttctggcttaccagttgggagtgtgaggttctttgcttgtaagacctgatcca

SEQ ID NO: 973744 - DNA, 120 bp, Artificial Sequence
  ENSG00000227627_4 (sequence is synthesized)
ccagcggtacaccagctctggcccagggcaagacagggaatttcccaatcactgagtaggctgtagccactctctccattaggcctgacttcaccatggggaaggggagaccctttcaag

SEQ ID NO: 973745 - DNA, 120 bp, Artificial Sequence
  ENSG00000227627_5 (sequence is synthesized)
ggtattctttcctggggtactctcagtcctaggacatcatagctctctttcatccctcttaaaagttaataccattatcagttaacagtttttatattaaaattatccctgttcaagtta

SEQ ID NO: 973746 - DNA, 120 bp, Artificial Sequence
  ENSG00000227627_6 (sequence is synthesized)
cagtatttactgtcttatttctactactttatgtttaaagtttttcataatatttaaactgaagttttgatcattcattaaatatttacacagaacaggacaaaggatgattttcctttg

SEQ ID NO: 973747 - DNA, 120 bp, Artificial Sequence
  ENSG00000227627_7 (sequence is synthesized)
tctagttattgtaaggtagcgtccaagatttaccaccacatcatgattacagatggtcaccaacttatgttttaggattttttgactttatgatgggtttatagggatgcagccccattt

SEQ ID NO: 973748 - DNA, 120 bp, Artificial Sequence
  ENSG00000227627_8 (sequence is synthesized)
caagctgaggagctccttagggcttaggaatcatacctctttcacaccatggtaaagttggaaaattgttaagtcaagctgtcattaattaggagactgctgtgttgctaacgttatatg

SEQ ID NO: 973749 - DNA, 120 bp, Artificial Sequence
  ENSG00000227627_9 (sequence is synthesized)
catttttaacttatgatgggtttattgggaattaaccacaatgtaaatcgaggaccatctgtatattgtatgatttttgctaatgcattgagagagatctgtgtaaattatctatgactt

SEQ ID NO: 973750 - DNA, 120 bp, Artificial Sequence
  ENSG00000227627_10 (sequence is synthesized)
cagaatatgcatattacctccaactgtgttaactcaacgtttttcaagagagtaagggtactttcaccctatgtggatgtactgtagaatttttctaagctacgaaagtctataaataac

SEQ ID NO: 973751 - DNA, 120 bp, Artificial Sequence
  ENSG00000227627_11 (sequence is synthesized)
aaatcaacttaaactttttgggaaataatttctactaaagattcataatcggcgtattccttcaatgactgtacaagttcatccagtagataatctccttgcataaaagtttcaagatca

SEQ ID NO: 973752 - DNA, 120 bp, Artificial Sequence
  ENSG00000227627_12 (sequence is synthesized)
ggctgtagcaggagacctgcggctgcatctcccagggccttccggcggggccgaggcacacaatactgagaccagaataaagcagtgcatttactaccttgtgaagaatgttcagtgggc

SEQ ID NO: 973753 - DNA, 120 bp, Artificial Sequence
  ENSG00000227627_13 (sequence is synthesized)
tgggcgaggaggctgtgcggccttccccagcggctgtagcaggagacctgcggctgcatctcccagggccttccggcggggccgagggtaggaccgaggcacttcttccttgcaagcgcg

SEQ ID NO: 973754 - DNA, 120 bp, Artificial Sequence
  ENSG00000227627_14 (sequence is synthesized)
tttatttgtattttcaaccacacttcagacgctactggtttataggaacgttaagtttactgagtgtgcagctacgctcccctgggtttttgttcctttccttaaagggccaggtgtagg

SEQ ID NO: 973755 - DNA, 120 bp, Artificial Sequence
  ENSG00000227627_15 (sequence is synthesized)
agacagtagtcctgctcccaaaaaaagaataaatagaagtgcccgccctcttgggctggacccccgtggccaagggagtttttagtgatggctggcatggacgtcagtatgaaagtgtac

SEQ ID NO: 973756 - DNA, 120 bp, Artificial Sequence
  ENSG00000227627_16 (sequence is synthesized)
cggagtattagtgatgcttaacttttcacaatttgaatatgcacttaagtagggcagtgcattccctgaactcagctttatggctacagcccagtgaagcaacgggatgtgaactccaaa

SEQ ID NO: 973757 - DNA, 120 bp, Artificial Sequence
  ENSG00000227627_17 (sequence is synthesized)
agctagattcagggcaatttaaacctacaaatttaacttatttggagacttaagttcttgatttataacatgaatcaaatgcgagaaccaggttttaaacacttagaatctcaaatgaca

SEQ ID NO: 973758 - DNA, 120 bp, Artificial Sequence
  ENSG00000227627_18 (sequence is synthesized)
tgggaacatgatatagaaaaaagaacacgtgctctaaaatcagattaatatctgaatcctgcctcagccacttcaatgttctatgacctcgggcaacttagtttcccgatctgcaaaata

SEQ ID NO: 973759 - DNA, 120 bp, Artificial Sequence
  ENSG00000227627_19 (sequence is synthesized)
cagtgtctactacacagtgatgatgacaatagagcctggcacatagatgctattcctatagtcgctgaatacatataatctctgtgaattaatgcagtcatcttccgtggtaacaaggtg

SEQ ID NO: 973760 - DNA, 120 bp, Artificial Sequence
  ENSG00000227627_20 (sequence is synthesized)
tgaattaatgcagtcatcttccgtggtaacaaggtggtgagtttcccatattgaggaattcttaaaaggctctgtagttataaaattaaataccggccaggcgcggtggctcacacctgt

SEQ ID NO: 973761 - DNA, 70 bp, Artificial Sequence
  ENSG00000227627_21 (sequence is synthesized)
gaactccatgtcaataacaaacaacaacaacaaaaattaaatacaggaagaaaaaaacaggaagaaagcc

SEQ ID NO: 973762 - DNA, 120 bp, Artificial Sequence
  ENSG00000227627_22 (sequence is synthesized)
caaaaattaaatacaggaagaaaaaaacaggaagaaagccaagttgagtttgctttccaactttcttgcgtaattaaaatttcaaaggattaaaaatgaatgaggactcagtatatatct

SEQ ID NO: 973763 - DNA, 120 bp, Artificial Sequence
  ENSG00000227627_23 (sequence is synthesized)
ttatttttagtaacggattaaaagtctgagaaaaatacctttgaatatagaaaacagggcagagatgtaagattactatcaaagaaggatagcccttagactacttgaattgttttcaac

SEQ ID NO: 973764 - DNA, 120 bp, Artificial Sequence
  ENSG00000227627_24 (sequence is synthesized)
accaagttatttaaaaaaagctgagttatataaaaatatttctatcctttaaaagcatttttaaaattctttttttacctgaatttttctagcattctgtcttttatttatttcttcttc

SEQ ID NO: 973765 - DNA, 120 bp, Artificial Sequence
  ENSG00000227627_25 (sequence is synthesized)
ctgtcttttatttatttcttcttctagatgcatgctgtacagttttgcacgtaactttgtcatagccagctctttatttttcagctgagatctctcttgttgacattcagaaacaacacc

SEQ ID NO: 973766 - DNA, 120 bp, Artificial Sequence
  ENSG00000227627_26 (sequence is synthesized)
atgcgtgcgcccgccaagattccttccgccgtcttctggaccggcctcctgcaagtcctaatctcagcccaaattcagcgctggcttccatctggagatctttgatgggtacaaatggta

SEQ ID NO: 973767 - DNA, 120 bp, Artificial Sequence
  ENSG00000244513_0 (sequence is synthesized)
ggggactgaacatcgttcaccgaatacactttgtgatgctgggcttgaaatctactgttttcctgtcttaaaagagaattctgtgactccatggaagacatctgaattttgttagcaagg

SEQ ID NO: 973768 - DNA, 120 bp, Artificial Sequence
  ENSG00000244513_1 (sequence is synthesized)
atcgtggctcactgtagcctcaacctcctaggctcaagcgatcctcccagctgggactacagaaaaacacatacttcttggatttgtgttttggaaacctgtgacagtacctgctgaagt

SEQ ID NO: 973769 - DNA, 120 bp, Artificial Sequence
  ENSG00000244513_2 (sequence is synthesized)
tcaccgatctcatggcgtaaataatcctcctttctggcagccgcttgttctgtacgctgcaatgcaagcctaaggtcccccacctgtaggaggagaaacaatacattcacaaacaatggt

SEQ ID NO: 973770 - DNA, 120 bp, Artificial Sequence
  ENSG00000244513_3 (sequence is synthesized)
agttcttctgtagctgcacgttctctctcaactgctgctgccagcaaggtctgggattcacctgattacaggacagaaaaaaaaatcacatacacatacagcccagagaccaaaatacca

SEQ ID NO: 973771 - DNA, 120 bp, Artificial Sequence
  ENSG00000244513_4 (sequence is synthesized)
agtcaattctgatttcaaacatttaatgatgcaagtagccacacttaaaactgataactatttattgcctaaggcaggactgtctactgagacaaatgaaccaatcttaacttatacctg

SEQ ID NO: 973772 - DNA, 120 bp, Artificial Sequence
  ENSG00000244513_5 (sequence is synthesized)
ttccaaaagtattttaatttcaaaatggagtcatgcattaaaagagtagtggatcaccaacaccaaatggtcctggagcaactggacagctatatgcaaaaaaaccaaaaagcctacaca

SEQ ID NO: 973773 - DNA, 120 bp, Artificial Sequence
  ENSG00000244513_6 (sequence is synthesized)
tcacatcattcacgaaaattaactcaaaatggatcatagacttatatgtaaaacatgaaactataaaacttttaggaaaaaacagaggagaaagtcttcaggatctagaacaaggcagat

SEQ ID NO: 973774 - DNA, 120 bp, Artificial Sequence
  ENSG00000244513_7 (sequence is synthesized)
ttgacacaaaaagcaagagccatagaaagaaaaactgacaaactgcttcaaaattttcaacttttaaatctatgtgaagaggatgaaaaggcaaactacagagtgagagcaaataaatgc

SEQ ID NO: 973775 - DNA, 120 bp, Artificial Sequence
  ENSG00000244513_8 (sequence is synthesized)
aaaccatatatctaggattagtatcaggaatatataacaatctagttagaaaatgggtaaacgacatagacagaaatttcaccatagagaatgtacaaatggaaaataaggacataaaat

SEQ ID NO: 973776 - DNA, 120 bp, Artificial Sequence
  ENSG00000244513_9 (sequence is synthesized)
ggggactgaacatcgttcaccgaatacactttgtgatgttttaggtgatgaagtacctgctgccagagtttcccctgaaacacacaaagaagagtcttttacttgtgattcagttgtttc

SEQ ID NO: 973777 - DNA, 120 bp, Artificial Sequence
  ENSG00000244513_10 (sequence is synthesized)
aggagttcttgactggccaatgtgcaaggattcatggtggctgtgatggctggagatttcatttgcctaaagattatgatgagagagaagtatcaaacataatttttatcaaaagataat

SEQ ID NO: 973778 - DNA, 120 bp, Artificial Sequence
  ENSG00000244513_11 (sequence is synthesized)
ttttttaaggtttcaaaaatcacaaaaatgatttttacaacataacaaaaatctacaatacttacagagaagcactattggttagataatccaaaacctcctgtagtttagctgatggag

SEQ ID NO: 973779 - DNA, 120 bp, Artificial Sequence
  ENSG00000244513_12 (sequence is synthesized)
gctacaagctgggcagttttcctacacacataatacacaacaaattacagcagcacatgcaccaatattagtctcttttatgaacaataaaataaaaatcaggttgttttataatcatgc

SEQ ID NO: 973780 - DNA, 120 bp, Artificial Sequence
  ENSG00000244513_13 (sequence is synthesized)
atatttcctataaaaaaatttttatgctttaaagcctgcttttcataatagaccatttcttgtaaattacttcgctatagagttatttcaggctataaagcaaaagatatataataagta

SEQ ID NO: 973781 - DNA, 120 bp, Artificial Sequence
  ENSG00000244513_14 (sequence is synthesized)
gagttctggaagttagaaaatgtatgggtgactttgttcaaatttctaaccaataatatttaaaaatcaaaatatgcatgatcaaaaatgtgttcttaatactactaacctttctttctg

SEQ ID NO: 973782 - DNA, 120 bp, Artificial Sequence
  ENSG00000244513_15 (sequence is synthesized)
ggacgcccatctccatcgcagcagcccgcgcctccttgagcgagagcgttaaagcgctcagaggatgttaggacgggaagttgccgccctaacttccaaatttggggactgaacatcgtt

SEQ ID NO: 973783 - DNA, 120 bp, Artificial Sequence
  ENSG00000244513_16 (sequence is synthesized)
tcttctggtcgttgtgattttgctggaggttttgataccactggactcttctgaatggtctggacatcagttggcgagagaaaggcactgaagaaattttcagattcatcgaccacagtc

SEQ ID NO: 973784 - DNA, 120 bp, Artificial Sequence
  ENSG00000244513_17 (sequence is synthesized)
ctccgaactggctttgtgattgctttaggagaggctattggtggactctgaggttcagtgtttgatttcaacccccaggttgaagtatcccatcctccactgacaggggaacttattcct

SEQ ID NO: 973785 - DNA, 120 bp, Artificial Sequence
  ENSG00000244513_18 (sequence is synthesized)
atttcatactctccaatgaacttttacatatgattatcacatctctcattcatcaagcaattctaaaactgtatgtatattcaatgtttacttagaaaagcattctgttaaggcaaagaa

SEQ ID NO: 973786 - DNA, 120 bp, Artificial Sequence
  ENSG00000244513_19 (sequence is synthesized)
acgcaaacaaatatgtataaggcatagccattaccatacaatattggagaaaagacagtgcgtctataaatatttgccacatcacacagaaagtgataggtgctatacggattataaaag

SEQ ID NO: 973787 - DNA, 120 bp, Artificial Sequence
  ENSG00000244513_20 (sequence is synthesized)
gcaagcctaaggtcccccacctgtaggaggagaaacaatacattcacaaacaatggtttgactatgatgtacctgtcaaggaaaacgtacttgcccttgggagatgtagactgaagaatt

SEQ ID NO: 973788 - DNA, 120 bp, Artificial Sequence
  ENSG00000244513_21 (sequence is synthesized)
tccctcaccagggccggaaagaccgacggcacgtgccggcgccggacgcccatctccatcgcagcagcccgcgcctccttgagcgagagcgttaaagcgctcagaggatgttaggacggg

SEQ ID NO: 973789 - DNA, 120 bp, Artificial Sequence
  ENSG00000244513_22 (sequence is synthesized)
atttagaaaaaataccctatgaaatacctgtaatttgcacctgctaaactccttgcttactacatcattaagtagtttccaagttaatacagggacttacggaagaaaactggtgtgggt

SEQ ID NO: 973790 - DNA, 120 bp, Artificial Sequence
  ENSG00000244513_23 (sequence is synthesized)
ccacctgagaggaaggaggagcacagacaaaagactgggcctggcctggactaccagatgcgagtatgttattcctccccacaacaaattaaggaagtaacagtatatgttttataaccc

SEQ ID NO: 973791 - DNA, 120 bp, Artificial Sequence
  ENSG00000244513_24 (sequence is synthesized)
ggggactgaacatcgttcaccgaatacactttgtgatgactgcattccgtaaccaaattgttggtggcaatattggtattatgggatacaccaagttgaagtaattatgatggtaccttt

SEQ ID NO: 973792 - DNA, 120 bp, Artificial Sequence
  ENSG00000244513_25 (sequence is synthesized)
gaagctgaaatttttgacatgagatagaaatatgaaagcttaatcaggctatataaacatcctgtagttctgaatttcagttggaggcctcagtatgattaacagtatggttaatcttta

SEQ ID NO: 973793 - DNA, 120 bp, Artificial Sequence
  ENSG00000244513_26 (sequence is synthesized)
aaaacacatctctcctacgtgctccattgaaaaggcctagagacaagctacccaggaggaagaagcacccccttgcgctcacactgtgatctctaccaaccatttcccattaaaagaaac

SEQ ID NO: 973794 - DNA, 120 bp, Artificial Sequence
  ENSG00000244513_27 (sequence is synthesized)
tgatcttgggtctggagcaggaaatgtacaagataagcctgcaacatcttacatcaggaagcagcaaagcaatcaaaaggctattagggtcatatcaaaaggactcaggatccaccttga

SEQ ID NO: 973795 - DNA, 120 bp, Artificial Sequence
  ENSG00000244513_28 (sequence is synthesized)
aaaccttcctactggccaaagataggatgatttaaaacataaataaaggtaactgtaattggatgaaggacagatacatttaagtaatcatatcagacacgaccaatcaaccaaacatgc

SEQ ID NO: 973796 - DNA, 120 bp, Artificial Sequence
  ENSG00000244513_29 (sequence is synthesized)
aagccaaaaaggtatcgctgttcatttttaatgacagaaggaaaccaactcttattctgaaaactggtaaacaaagggaaagaatcaggaatatttatactgtctttcctgtatgaatta

SEQ ID NO: 973797 - DNA, 120 bp, Artificial Sequence
  ENSG00000229283_0 (sequence is synthesized)
attgcaggcaggtaacaagaagagagaattcatcctcctgtgagtggtaggcacccaggactgacctgcatgaaactgcaggcctacccaaccctttgtgtctgctgagagaagtctgcc

SEQ ID NO: 973798 - DNA, 120 bp, Artificial Sequence
  ENSG00000229283_1 (sequence is synthesized)
ctccaggagtttgaagataaggcacatcactcactgtgacagttgggggatctcatagccagactggatattggagatgccagcagctactgcagcagtgaccatcagcctgggcttgtt

SEQ ID NO: 973799 - DNA, 120 bp, Artificial Sequence
  ENSG00000229283_2 (sequence is synthesized)
gatctgcttggcctcctgctcaaaagcttcacgcatttcctacagaataataaggcataataggacatctatgatgctgattttagctccttaaataatactaataaacatatgtctgta

SEQ ID NO: 973800 - DNA, 120 bp, Artificial Sequence
  ENSG00000229282_0 (sequence is synthesized)
aacgaaaataactgcaactcttgattgcacctcctgagggtcgttgggactttccctctcagacatttattggttcattcattcgttcattttgctgtaactcacagtggcccccatcct

SEQ ID NO: 973801 - DNA, 120 bp, Artificial Sequence
  ENSG00000229282_1 (sequence is synthesized)
attcgttcattttgctgtaactcacagtggcccccatcctaaggtgcactgctgggattggtctatgtgctgatgatgttctccttgtcttcagagagacggagtttcaccgtgttagcc

SEQ ID NO: 973802 - DNA, 82 bp, Artificial Sequence
  ENSG00000229282_2 (sequence is synthesized)
gttccctgggtcttttgagtggtgtgagttgaatggtggtagattctaggacagttcagtaggagcccgtcctcaaaaggaa

SEQ ID NO: 973803 - DNA, 120 bp, Artificial Sequence
  ENSG00000229282_3 (sequence is synthesized)
attctaggacagttcagtaggagcccgtcctcaaaaggaaaataacagaacttcctgctaatctggtattggggctgagcaattactgcacactgatgagattgaccataattgcatcct

SEQ ID NO: 973804 - DNA, 120 bp, Artificial Sequence
  ENSG00000229282_4 (sequence is synthesized)
tttccagattctcaattttcatttaatccccagccttagtggaaagcaagagtcggagtcggcattctgggcagggaggcaggtgaggcaggtacacatctcctcttctccccaacgccc

SEQ ID NO: 973805 - DNA, 120 bp, Artificial Sequence
  ENSG00000229282_5 (sequence is synthesized)
catgtttctatttctgaataaaatgaaccatcatggtgctaaggtaaagctaaactagctgagccacctcctgaagaggacattgcttttttttatttgatgagatttctttcccttctg

SEQ ID NO: 973806 - DNA, 120 bp, Artificial Sequence
  ENSG00000229282_6 (sequence is synthesized)
ttaccagcatctccatccctttgggaaactgactcttaataacagagttttttgtacttttaaactttgtttttgtgtagtcaaatatgtacaacataagatatgctgttttatccattt

SEQ ID NO: 973807 - DNA, 120 bp, Artificial Sequence
  ENSG00000229282_7 (sequence is synthesized)
ttaagtggacagttcagaagcattaattacatcgactatgttgtgcaacctttcctgctatttatttccaaaacatttttcaacagaacaaataaaaacacggtactcattgtaaaataa

SEQ ID NO: 973808 - DNA, 120 bp, Artificial Sequence
  ENSG00000260479_0 (sequence is synthesized)
agtatgctcatgggaacccagctggaaagtgctgtggaaggacaaatggagaaaagtctccagaaattggcctcgtttgaaaggacctcatgcaaagagagatctttggagacatttcag

SEQ ID NO: 973809 - DNA, 120 bp, Artificial Sequence
  ENSG00000260479_1 (sequence is synthesized)
cccatccttcttaatccaacaactctgctggtctctctgctgacacaagatcgttcgcaggttatagaaggatttaacacgtcagccaatgcaggaagtagtcctctgaaatacatgtcc

SEQ ID NO: 973810 - DNA, 120 bp, Artificial Sequence
  ENSG00000260479_2 (sequence is synthesized)
acagaacacgccgtgctttccagaagacgcaacagacagaaactttccaaagggaattacctgggatcatttctcatcctctctctctttctctgtattacttagccttaaaaaaaaaaa

SEQ ID NO: 973811 - DNA, 120 bp, Artificial Sequence
  ENSG00000260477_0 (sequence is synthesized)
gtgtgaagacctgaggtatcaggggtaggggttgctctgcttgtgtaagtcccatagtgtgaaggccagagaaccaagagatggtcaagaagagagagtaagtgtccaatgtcccagctc

SEQ ID NO: 973812 - DNA, 120 bp, Artificial Sequence
  ENSG00000260477_1 (sequence is synthesized)
aagaagagagatccatccatcaaaggagagaaatcaaaggccaagaggtaaagagagaaggtcatggaatcctcccaaacttacagtctgacttctagggacctcaaaaacaggagacgc

SEQ ID NO: 973813 - DNA, 120 bp, Artificial Sequence
  ENSG00000260477_2 (sequence is synthesized)
tcaggaccaaccggggcattggcctgagcccagctgcctccaggcaattctcctcctgccctgatggctttcaaaagagaaatgcctggcaagaccaaccccgcctcttccttctccttc

SEQ ID NO: 973814 - DNA, 120 bp, Artificial Sequence
  ENSG00000260477_3 (sequence is synthesized)
tcgacctactcaaagtaaagatgaggatgaagacccttaagatgatccactcccacttaatgaataaaacttttgtggatagctaagttactgctagccatctgattatagcaatggctt

SEQ ID NO: 973815 - DNA, 120 bp, Artificial Sequence
  ENSG00000260477_4 (sequence is synthesized)
ctccccagcatcataacaggaaggtcccacgatcacgagcacattgccttcagcatccagcactgaatatggtgaattgcactctgaagagcttcctaagcttgtaagaaagtgattctg

SEQ ID NO: 973816 - DNA, 120 bp, Artificial Sequence
  ENSG00000260477_5 (sequence is synthesized)
aaaagctcaacattttggtagaatggagagatttgacattgcttctgctccaaaagcaaaagacttggcccagaagctaaaaatcacctgccatcttggaaataatccctggaggatcaa

SEQ ID NO: 973817 - DNA, 120 bp, Artificial Sequence
  ENSG00000260477_6 (sequence is synthesized)
gtccaagggggagaagtggactggtcaccccagccgaggttatctaagttccatggcttactccagacaggaagccccacatcctgcagcctcattcataatccataatagatggtgttc

SEQ ID NO: 973818 - DNA, 120 bp, Artificial Sequence
  ENSG00000260477_7 (sequence is synthesized)
ttggatcccaagttgagaaaagaagttaactatgcacattttggcaaagatgcagaccagggtttgatctaagcagctatcacataaaataataaagtacaaatggaaatggcaaaaatg

SEQ ID NO: 973819 - DNA, 120 bp, Artificial Sequence
  ENSG00000260477_8 (sequence is synthesized)
ttgggaagggcaccctgggagttgagaacatccaccacagagaggtaagttcctacttggcagtttgccgcagcaattaccacctcgtgctccatcactacctttccactccgtctccca

SEQ ID NO: 973820 - DNA, 120 bp, Artificial Sequence
  ENSG00000260477_9 (sequence is synthesized)
cccttacaccaggcttgtgattcaaaggccttcaggccaggggtaacaaactatggcctgtgggccaaatctaacccactgactgttttccaaataaagttccactggaacacaggcata

SEQ ID NO: 973821 - DNA, 120 bp, Artificial Sequence
  ENSG00000260477_10 (sequence is synthesized)
cctggcgtaaaggagatgggactcacacccaagaggatgcatttccatacacccatttctgaaatatgaagaggtgtccagtctgtttgattcatagctgcctgttccacaactgcagat

SEQ ID NO: 973822 - DNA, 120 bp, Artificial Sequence
  ENSG00000260477_11 (sequence is synthesized)
acagtaattgataaccgagaccaagttctcatccccatctcccagggctggaactggggctgtgtttggttctcataagatcagttccagttttagaaactgagtaaattgtggagtaaa

SEQ ID NO: 973823 - DNA, 120 bp, Artificial Sequence
  ENSG00000260477_12 (sequence is synthesized)
tcatctggagcctctgttgtgactacattgcagatcaatctcccctctgcccaatcctacttccttcatgatcccacatgtagatccaggcactcccccaataaacttcctgcatgaaaa

SEQ ID NO: 973824 - DNA, 120 bp, Artificial Sequence
  ENSG00000260477_13 (sequence is synthesized)
gactgtgtaactcctagttgagtgtgaagacctgaggtatcaggggtaggggttgctctgcttgtgtaagtcccatagtgtgaaggccagagaaccaagagatggtcaagaagagagaaa

SEQ ID NO: 973825 - DNA, 120 bp, Artificial Sequence
  ENSG00000260477_14 (sequence is synthesized)
tattgccaagtgatggctttctgctgtaggcgtgggtcgctgttggccatttgcctcagcatatcaccagcaatgcacctcattgcatcactgcatttccaattacacctcaaagcacca

SEQ ID NO: 973826 - DNA, 120 bp, Artificial Sequence
  ENSG00000260477_15 (sequence is synthesized)
ctggtcccctgtccaccctctgccctgcagaggtgggtgttcagggagacagatccaaaatctgggctcagaagatggaaatgccaactgctctcaatttgagagtggggatgagacttt

SEQ ID NO: 973827 - DNA, 120 bp, Artificial Sequence
  ENSG00000260477_16 (sequence is synthesized)
ttgactcaactctggttaattcagccatgctgtcagagctgctttgatgcaaggacatctgaatgctatctgaatgctgcccctaaaataacaaattaaaaacaacaacaacaacaaaaa

SEQ ID NO: 973828 - DNA, 120 bp, Artificial Sequence
  ENSG00000260477_17 (sequence is synthesized)
gagtctcaacattgggtgattgaagagcagaaagactggcatgaaatatctgtcaacatagctcaacaaggaatcaggaagagagagtcttcaagatggctgactagaggcatctggtac

SEQ ID NO: 973829 - DNA, 120 bp, Artificial Sequence
  ENSG00000260477_18 (sequence is synthesized)
ttgcctcctccacaaagaagaaccaaaatagcaagtatattattacacttcgaatagatcatctaagaaagaacactggaattcaaccaagaagtggcaataaatacctaaggcaaggaa

SEQ ID NO: 973830 - DNA, 120 bp, Artificial Sequence
  ENSG00000260477_19 (sequence is synthesized)
gagtgtgaagacctgaggtatcaggggtaggggttgctctgcttgtgtaagtcccatagtgtgaaggccagagaaccaagagatggtcaagaagagagacaagaccaaccccgcctcttc

SEQ ID NO: 973831 - DNA, 120 bp, Artificial Sequence
  ENSG00000260477_20 (sequence is synthesized)
aagggcaccctgggagttgagaacatccaccacagagagaaagaatgctgatccctgttctgggcacctgttctgcacccttttggccagtccttccagcctgtggagacagctactgtc

SEQ ID NO: 973832 - DNA, 120 bp, Artificial Sequence
  ENSG00000260477_21 (sequence is synthesized)
cccgcctcttccttctccttctcgacctactcaaagtaaagatgaggatgaagacccttaagatgatccactcccacttaatgaataatggtgaattgcactctgaagagcttcctaagc

SEQ ID NO: 973833 - DNA, 120 bp, Artificial Sequence
  ENSG00000260477_22 (sequence is synthesized)
ttgcttctgctccaaaagcaaaagacttgggaagggcaccctgggagttgagaacatccaccacagagagcccagaagctaaaaatcacctgccatcttggaaataatccctggaggatc

SEQ ID NO: 973834 - DNA, 120 bp, Artificial Sequence
  ENSG00000260477_23 (sequence is synthesized)
tatttgaattccatagcatcacttaggtcagcttcaaggtcctagggaaccgctgcctgcggccagatccaggctggagaggcagcggctgccaagctgacctcgctgcccgcctcgcag

SEQ ID NO: 973835 - DNA, 120 bp, Artificial Sequence
  ENSG00000260477_24 (sequence is synthesized)
gagacgactgcccggaggcctcagctgcacatgctgctgagtgtgaagtcagcgcggtgcaaccctagacctcggcacaggcgtgaatacccaccgactcccactgtggggattagggat

SEQ ID NO: 973836 - DNA, 120 bp, Artificial Sequence
  ENSG00000260477_25 (sequence is synthesized)
gtgtgagcagagtcttagcgactagcttctcctcctccccatatcaacacccttcaatgctgacttctcaaagtatggtgctagggcgtcacctggaagcttgttacgcctctccccaga

SEQ ID NO: 973837 - DNA, 120 bp, Artificial Sequence
  ENSG00000260477_26 (sequence is synthesized)
actactgtgtccgaaactgcatttaaaccagatcctcgggggatttagagctggttaacaaaatgaccagaggattaaagtttggaaatctccaatttcgactatattgattacattgcc

SEQ ID NO: 973838 - DNA, 120 bp, Artificial Sequence
  ENSG00000260476_0 (sequence is synthesized)
ccaacctccctcctccccatcccagctttatcctctggggcttctcctgtggtgtgcaggtaaatgtttaacaagcagctctcgcaggggattgaggggagctcatgtgaagtgttcgtc

SEQ ID NO: 973839 - DNA, 120 bp, Artificial Sequence
  ENSG00000260476_1 (sequence is synthesized)
aacatctgtggtgtaaatattctcatcatggctgatttcaagctaccaacatgacatggctgaacacgagattgagaagaaatgtgcaccatctgtccaggagcgggcgagctggatcca

SEQ ID NO: 973840 - DNA, 120 bp, Artificial Sequence
  ENSG00000260476_2 (sequence is synthesized)
gcacacctggattctcctcccctgacacgtgacaaccctgcagagacttgagatcagccgctcagattaggtgatcagaagcattttgtcacggagacacggagttctgggccggctctt

SEQ ID NO: 973841 - DNA, 120 bp, Artificial Sequence
  ENSG00000260476_3 (sequence is synthesized)
atcttcagggcatctggtagggtggaaagcacttcaagtcatgcgccaagcccacgtcctattccctgggcccattcccttccgttgaagtgctggaggcagagctcgcagctgaagacc

SEQ ID NO: 973842 - DNA, 120 bp, Artificial Sequence
  ENSG00000260476_4 (sequence is synthesized)
tacaggcggctctccctcgtgtctgggcatgagcggtctgtggaggcagcagccaggctgtgtccaggtagccctgacggccactgcacaagagcagtgtcgggtagagtccgagcaccc

SEQ ID NO: 973843 - DNA, 120 bp, Artificial Sequence
  ENSG00000260476_5 (sequence is synthesized)
gatgcctcagtcctgggccttagtgggaggccttccaggtgaagccctggggaccaggtagccctgctcagcaagcagccctggaccctacctcagcagccccggaccccacctcggccg

SEQ ID NO: 973844 - DNA, 120 bp, Artificial Sequence
  ENSG00000260476_6 (sequence is synthesized)
ccgcaggaagccaaggggatgagggaccaactcgggaaatggtgggtgaggctggtggctcctggaaacgccggtcaccagggcggcagcaccggtcctcacccctccctgccaggactt

SEQ ID NO: 973845 - DNA, 120 bp, Artificial Sequence
  ENSG00000260476_7 (sequence is synthesized)
cagcagctctcagcccctaagcatgatagtttcttgggtcaaccaaatagtcatctaggggttactgtgaaggtgttctgtaagtatgtcacatctgcagtcagctgactggagtgaaag

SEQ ID NO: 973846 - DNA, 120 bp, Artificial Sequence
  ENSG00000260476_8 (sequence is synthesized)
gccattactctcaatcatgtggcgggggtaggggtgggaagccttgtgcaaccagtgaaatgccttgagagcagagctggggtttccctgaggacagagagattttacctgtggactata

SEQ ID NO: 973847 - DNA, 120 bp, Artificial Sequence
  ENSG00000260476_9 (sequence is synthesized)
gcatcgcctactgcccgagaggcccaggtgccgcctgccctatggatttccaccttgctcagccagcccccaccttgtctgagccaatttttcacaataaatctctccctccctcccttc

SEQ ID NO: 973848 - DNA, 120 bp, Artificial Sequence
  ENSG00000260475_0 (sequence is synthesized)
gccggcctgggccggtcatccctggctggcgcgacccgcagcctgtccgggaagccgttgcgacatgcgggctgggaaccgcctcacctccaggggggaccgcggcggcccgctagactc

SEQ ID NO: 973849 - DNA, 120 bp, Artificial Sequence
  ENSG00000260475_1 (sequence is synthesized)
tggtcgggtctggagtattgggccctctggccggactcggtgctcctcaggccccagcgcccggcactgagcctcgcatccacattcgcagagtaaacccaacaagtgttgaatgaatga

SEQ ID NO: 973850 - DNA, 120 bp, Artificial Sequence
  ENSG00000260475_2 (sequence is synthesized)
ggttccccgggccccggctgtcactgggctctgcgccaggccaagagccgaaggcgggggaggaagatgtcgaaatgggcgggatgattcacagatgacggccggtggcgaggcggggct

SEQ ID NO: 973851 - DNA, 120 bp, Artificial Sequence
  ENSG00000260475_3 (sequence is synthesized)
gggaagtgcggcggctgtggggaagctcggacgcacggcctggccgagtctgaagcatcagtattttgtccctgagccggcgcgctgatgggtcccccgcctggcgatgagggcttctcc

SEQ ID NO: 973852 - DNA, 120 bp, Artificial Sequence
  ENSG00000260475_4 (sequence is synthesized)
ctccctcgggtcagcccgggtcctgagaggcaaggccagcgattcccggccttaggacctcctgctctagggagcacgggcgtcttcttccatttgccttccccgagcgtgttggcacaa

SEQ ID NO: 973853 - DNA, 120 bp, Artificial Sequence
  ENSG00000260475_5 (sequence is synthesized)
gctgcccgcggtttccagctctgtcttctctgttttacccagatgatgcaactgtggacttctccatctgttcataggttttccttggataggaaagatgttttccttttttctttctaa

SEQ ID NO: 973854 - DNA, 120 bp, Artificial Sequence
  ENSG00000260475_6 (sequence is synthesized)
agtttagctcttctctgggcttcctttttaaaaactttttctactctcttcagcagttgttattaacctttaggtcgcgaccgtttggaaaataataaaactacgaattctcttctccta

SEQ ID NO: 973855 - DNA, 120 bp, Artificial Sequence
  ENSG00000260473_0 (sequence is synthesized)
ggggacaagggggctgccaacacccagcgacggagacggggactccgacatggcacttgttggagggtctcacgaaactcaggaactgggtctcttctgaggtagacagaccacaactgc

SEQ ID NO: 973856 - DNA, 120 bp, Artificial Sequence
  ENSG00000260473_1 (sequence is synthesized)
agagcatcgtcagacaggagataaatacgtccatgtacaacacgcagcaaaatgaggaagcagacctgtgagatgtaataaacaacgtccttcttgccatccatgctgtaaacacagcgg

SEQ ID NO: 973857 - DNA, 120 bp, Artificial Sequence
  ENSG00000260473_2 (sequence is synthesized)
agatgttccttggctgttcctgacacccccttagcacctcccagcgtgagccaaacactctggtgttgtttgctccccttggttaggctgcctgcaatttcaccaagagaacaccattct

SEQ ID NO: 973858 - DNA, 120 bp, Artificial Sequence
  ENSG00000260473_3 (sequence is synthesized)
ggttaagaaggattctcttttaaaccaaatggaacttctgggaggctccaggctgtcagccagtcacacctccaggaggattagcaaggctgattctccttctccttcccacctgctcga

SEQ ID NO: 973859 - DNA, 120 bp, Artificial Sequence
  ENSG00000260473_4 (sequence is synthesized)
ccatcgaacagctgagaaaactgagggagcagttcattcccaccctcttcctcaacctcccctgctcccccagccctcctttcttgaaccccctcccacacttagccaccaaccccggag

SEQ ID NO: 973860 - DNA, 120 bp, Artificial Sequence
  ENSG00000260473_5 (sequence is synthesized)
cttagcatatctcaaacttgttctcatgggaccagataaatccctgcccaggtctgagaggcgctggcctcaaggctaggacacaggactctggttagggtctcagccagactctgcaga

SEQ ID NO: 973861 - DNA, 120 bp, Artificial Sequence
  ENSG00000260473_6 (sequence is synthesized)
gagtgatcagaaaggactgcaaggctgagactgtgccagaggagtggggaggagaaaggctcctgaagaccagatctctgcacgaccgtggcggcccctgcagctctgcacagcccctcc

SEQ ID NO: 973862 - DNA, 120 bp, Artificial Sequence
  ENSG00000260473_7 (sequence is synthesized)
tccccttttcctcaaaagaagcaaatcctccatgaaagatttttggcttcacagaaggacttggccccatctgagaacacgtgagccatctctagaagtgctgagtccccatcagtggag

SEQ ID NO: 973863 - DNA, 120 bp, Artificial Sequence
  ENSG00000260473_8 (sequence is synthesized)
gcactcggcaccagagaatgcctttcccgggaggggcactgctgggcaggtggaagggctctcccctcctctcccctcctctcttcttctctgatatctaatgatcactacaaactcaac

SEQ ID NO: 973864 - DNA, 120 bp, Artificial Sequence
  ENSG00000260473_9 (sequence is synthesized)
cagcggagatgttccttggctgttcctgacacccccttagcacctcccagcgtgagccaaacactctgggactttactgccaccttctggaaagctcataaatctggtgtctgctgcact

SEQ ID NO: 973865 - DNA, 120 bp, Artificial Sequence
  ENSG00000260473_10 (sequence is synthesized)
ggaattgtgaattgtgccctgttggaaaggcttgtggacaacctacataaccatccatacactttgagtccatagagaacaccaagaaatgttgggtcaccagagctttgaaagtgggtg

SEQ ID NO: 973866 - DNA, 120 bp, Artificial Sequence
  ENSG00000260473_11 (sequence is synthesized)
tatatagtcgaagaggaagctgaagataacccggtggcttctcagttctccacagctggccttcctagcagcagcttgttgacagcaccccacccctgttgatgctctctacttcaggtg

SEQ ID NO: 973867 - DNA, 120 bp, Artificial Sequence
  ENSG00000260473_12 (sequence is synthesized)
actgtgacctgacatcagtgggagaagacatttgaaaataaagctatttactctcatccccactgccctagggaaggcatgagccataaaagtgtagcttaaaaaggaagtagagacggg

SEQ ID NO: 973868 - DNA, 120 bp, Artificial Sequence
  ENSG00000260473_13 (sequence is synthesized)
ggcgtgagccaccgcgcccggccgacactcttatctagaccacctgatctctactctcagtcttcatttggcccttcattacctggcccttccactccaggtggtagctgggactctgtg

SEQ ID NO: 973869 - DNA, 120 bp, Artificial Sequence
  ENSG00000260473_14 (sequence is synthesized)
tagctgggactctgtggagaaaacactctctctctcaaactgcctggtttggggagcaaggtattgttcctgcggcagctctttctctgcagaccttgaaggtgaagtgctgctgtgcac

SEQ ID NO: 973870 - DNA, 120 bp, Artificial Sequence
  ENSG00000260473_15 (sequence is synthesized)
ataggaagctggaaccccgcttgactctacccacaggacgaagtccttcaaactcacaggacctcttgagggaagcccagtcacccaaaggaacagatgattctctaacttcagatggcc

SEQ ID NO: 973871 - DNA, 120 bp, Artificial Sequence
  ENSG00000260473_16 (sequence is synthesized)
cacaccgcattccccttcgaggcagcccagcaacctggggaaggaacatagtgtggcgggaagagtcctgcccaaggccaccagcccaaaaggggcagaattggcacttgcactcaagga

SEQ ID NO: 973872 - DNA, 120 bp, Artificial Sequence
  ENSG00000229289_0 (sequence is synthesized)
cagtgtctgcacacctcattcctcttggtcgtgagacaagaactcagaacttgctgaaatgcagaagtgaaagagcagtatcactccatcctgctgaactacgggagtgaagaagccaca

SEQ ID NO: 973873 - DNA, 120 bp, Artificial Sequence
  ENSG00000229289_1 (sequence is synthesized)
gtagtggccactgagtactgagagtgctgagtgctgaacatagaacctcagggcaacagttgcaaagacatgaattccaccaacaacatgaaggccttggaaatggattattctctagtc

SEQ ID NO: 973874 - DNA, 120 bp, Artificial Sequence
  ENSG00000229289_2 (sequence is synthesized)
caggctctgatcaccacagccccagccaacacctgaatttgagccttgtgagaccctggagtagagaacttagctaggatatgcctgacttctgccctacagaaacaaagacataataaa

SEQ ID NO: 973875 - DNA, 120 bp, Artificial Sequence
  ENSG00000260470_0 (sequence is synthesized)
ctggtgtggccagcacagcctctccaaacctgagtgggaagacactgagttccagtggattcaacacacagaagcgtggattgaagtgagacagacttgggaaacaacttctccccaggg

SEQ ID NO: 973876 - DNA, 120 bp, Artificial Sequence
  ENSG00000260470_1 (sequence is synthesized)
gcccctgggagagactttggcagtgccttttgttggaagtctttaaaaactggaccggaacaaggagacccctgcccagagttggtgagctggacaacatgacccctaccctcttgagcc

SEQ ID NO: 973877 - DNA, 120 bp, Artificial Sequence
  ENSG00000260470_2 (sequence is synthesized)
acggcccctgttctgctggagaaagccctgcagaggaggtcatccgtggcctccttttgggctctgttccaggcccccggcccacgtgtcccctgccctctgtgggcttctgggtatggg

SEQ ID NO: 973878 - DNA, 120 bp, Artificial Sequence
  ENSG00000260470_3 (sequence is synthesized)
tgagtggcagaggggtaaggagagccttcttggcttgcggcgtatggagagaagacgtcccagggaatcctcgctcctgatttaagcagctccgacagctttatggtgcctcctcgagtg

SEQ ID NO: 973879 - DNA, 120 bp, Artificial Sequence
  ENSG00000260470_4 (sequence is synthesized)
agcccccagcgttggctgtttaactttttagcgtcgtttaacgcttagactctggtggacaggcaggccccaaggccccagaggcagcggcactaaatcaggacactctgaggccccgat

SEQ ID NO: 973880 - DNA, 120 bp, Artificial Sequence
  ENSG00000260470_5 (sequence is synthesized)
aaataatttttacagggcacgcagcccatagatcaccagtgggggtggggggagagtggctgtgatatttcaaccaattgtcatatgtgactgccccgtgctctgactccaggtcgccca

SEQ ID NO: 973881 - DNA, 120 bp, Artificial Sequence
  ENSG00000260470_6 (sequence is synthesized)
catggcagccggcttcataaccacagccagctctggggctcttcactgtggggcatgggagaggagtaggagatggggcctttgataaccccagccagcagatgacccgttgcctccccg

SEQ ID NO: 973882 - DNA, 120 bp, Artificial Sequence
  ENSG00000260470_7 (sequence is synthesized)
ggaatgatgttaaggtctgctcaacttgctgttgtccatagagcatgggtgctcaatccaagcctcctctggcactgggagaagggacagctgaaggcacgagggcagggtggcagagag

SEQ ID NO: 973883 - DNA, 120 bp, Artificial Sequence
  ENSG00000260470_8 (sequence is synthesized)
cagacctgaccccaggagaggagggcagagctaaggctgacgttcagagaaactggcagcatccctctaccatttatacctctagagaaagagatggaaagtgtgggagtgtggaaagcg

SEQ ID NO: 973884 - DNA, 120 bp, Artificial Sequence
  ENSG00000260470_9 (sequence is synthesized)
ggggaatgtggaaggagagagacagaaacacagagaaggctaggtagtgagagggacagaaaaatgaagatgaaagacagatgaagatgtagagagaacaagagacagaggcaagaggag

SEQ ID NO: 973885 - DNA, 120 bp, Artificial Sequence
  ENSG00000260470_10 (sequence is synthesized)
acagaccaaaacggactcagaaaggacactccaacagttggtttggtgtggagaaggaggccttttcctaaagcttggtaccaagcaagaggaacagtggtatcaacagaccaaggcagg

SEQ ID NO: 973886 - DNA, 120 bp, Artificial Sequence
  ENSG00000260470_11 (sequence is synthesized)
ggttgcatctgtgccaggctgacctgccccatgccctctgagggtgcccttcccctggcttcaggaccgtgtttccctgcaccagctccacgctgcttccccactctctcccctcccctc

SEQ ID NO: 973887 - DNA, 120 bp, Artificial Sequence
  ENSG00000260470_12 (sequence is synthesized)
agtgcccttgccccatcccctcatctgtaagatctgggatttgcggggacacttaatccatatggagctgattcattcccatctaaatcatctccatgagcttccctaagagccctctga

SEQ ID NO: 973888 - DNA, 120 bp, Artificial Sequence
  ENSG00000260470_13 (sequence is synthesized)
tgtgccagccaccattcctctcccctgggcgatggcgggctgggggctgccagtaaacaaacctcagctgccatccatccatcttggcctcgcccatcagtccagccaagaccattcatc

SEQ ID NO: 973889 - DNA, 120 bp, Artificial Sequence
  ENSG00000260470_14 (sequence is synthesized)
tctccagcactgctccctgcactcctccatccctccatccatctgtctgtccctccttctcatgcccctctactggaaactttacctctctgccttttcctgggtagcatcttgaggggt

SEQ ID NO: 973890 - DNA, 120 bp, Artificial Sequence
  ENSG00000260470_15 (sequence is synthesized)
catctcaaccatccccctgccttcagacaggagccttattttacccctggcccagcaaggcgggggctctcccagttcatcaccttccgagaatgagggcttcgagtctgatgattttac

SEQ ID NO: 973891 - DNA, 120 bp, Artificial Sequence
  ENSG00000260470_16 (sequence is synthesized)
tctacagtactgacaacctagggaagttctttcttctgtctagcttgtgtgcttgacattcacatatgaccacacgtctgaatgggagtgggtataagattataggattatactcaagca

SEQ ID NO: 973892 - DNA, 120 bp, Artificial Sequence
  ENSG00000251183_0 (sequence is synthesized)
gtttgtggggctggatcccactgggcaggacatctgcctataccctggaataagaatatacagtctcttctagcactgacagttgtctctttatgtcggatgagctaacagcagccactc

SEQ ID NO: 973893 - DNA, 120 bp, Artificial Sequence
  ENSG00000251183_1 (sequence is synthesized)
ccatactgtcggatcctgcttcccttgccatagctgattaacccagggtaagacactgggaattggaaacttggagtggaaagactctgatcatagtggtctctggagccaaatcccatt

SEQ ID NO: 973894 - DNA, 120 bp, Artificial Sequence
  ENSG00000251183_2 (sequence is synthesized)
agtgatctgaacacctaacgggaatcctaaacagtggagaaaggagagcaaacattaaaaactcatggatagaaaaaaagaggaaaagaaaaccatttggaagtgttcattgagttgatg

SEQ ID NO: 973895 - DNA, 120 bp, Artificial Sequence
  ENSG00000251183_3 (sequence is synthesized)
cactggataatttaataagctgtctgttctgatccgtcttgcttccctgcttttagcagggtgccatatgaaagctcctacatggatgaacattcatcccatccgtaccacttactggcc

SEQ ID NO: 973896 - DNA, 120 bp, Artificial Sequence
  ENSG00000254350_0 (sequence is synthesized)
gaaacaatgcaaccaccattctcaaacttcagtgagtagaagaatcatggcagcttgctaaaatgcccgagtctcatctcagatattctgattcaggatgactgaggttaccacctcatt

SEQ ID NO: 973897 - DNA, 120 bp, Artificial Sequence
  ENSG00000254350_1 (sequence is synthesized)
ggttgctgcatatctgcataaccacactgaagcatccaggcgctttctgtgtgaaaggcagttgagagaagttggggcttggcatctgagcagaaccttgactctcttcaaaagggggct

SEQ ID NO: 973898 - DNA, 120 bp, Artificial Sequence
  ENSG00000254350_2 (sequence is synthesized)
gttaagaatattagtttttgctggtcttcttactcatggcccatctgaagtcccctggcctgaccctcctgtgaagtcatcccgctgaacgggcgccaccgggtcggggcattgccatag

SEQ ID NO: 973899 - DNA, 120 bp, Artificial Sequence
  ENSG00000254350_3 (sequence is synthesized)
tgtcagcccacggggccataaacacaggctttgctggatccctgccccttcaactgggggaggctgggtggtaagatgagaaggcgccttccttccagcccattttctccaaagcagcaa

SEQ ID NO: 973900 - DNA, 120 bp, Artificial Sequence
  ENSG00000254350_4 (sequence is synthesized)
gtttcgagaacgtcacatttgatacatggcatagaagaggaatatcctcaaacacaactttcgggtgattatctcctatcctaagtgccatctgtatggtattatgcttatgtgactgca

SEQ ID NO: 973901 - DNA, 120 bp, Artificial Sequence
  ENSG00000251187_0 (sequence is synthesized)
gtaagggaactttggcgacttagtgcgatcactgggagaattgtagagtccactggagagaaagaaaaatggtcaaaaagagcccagagagttcctgggggaaaacacaccgcagcccag

SEQ ID NO: 973902 - DNA, 120 bp, Artificial Sequence
  ENSG00000251187_1 (sequence is synthesized)
gcacatgcaccaggggcacgtggttctctttgctgacaagatttattaaaagaaaagagttatcctactgatgctgtttgattctagcagaggaggagaaggaaagatggaagagagagg

SEQ ID NO: 973903 - DNA, 120 bp, Artificial Sequence
  ENSG00000251187_2 (sequence is synthesized)
aaacagtgataaggaaatgaaagaaacagaagacttattttaaaatgcaattttagggacactgtggcacattttattgataaattataaccccaaataaataatgaatcacccaataaa

SEQ ID NO: 973904 - DNA, 120 bp, Artificial Sequence
  ENSG00000251187_3 (sequence is synthesized)
aaaagcacaaaggacactgctgagaactggctggatcacactgtcagccaagaaaaggaaggacgaatgaggctgaagagactgcagggctgcagatgaaatatccagacctatgcatcc

SEQ ID NO: 973905 - DNA, 120 bp, Artificial Sequence
  ENSG00000251187_4 (sequence is synthesized)
tcatgtgggatgagtgggttccggcaaaatttaagaggctaatgatgggatggaggggttggcagcagcacagcatagcagaattttctgattcactaccactgctggtgttacagcgtg

SEQ ID NO: 973906 - DNA, 120 bp, Artificial Sequence
  ENSG00000251187_5 (sequence is synthesized)
tgtattacactacaaatccatgttcattaacttcaagtggggccacaccacggttcagcaatcctgccacttttcacagatctaagtacaaagtggtttcaaactctccaccctgcaacc

SEQ ID NO: 973907 - DNA, 120 bp, Artificial Sequence
  ENSG00000251187_6 (sequence is synthesized)
ctctgacccacagtactcctgtttcagcaaatgattttgttttctccttccgaaggaaaaagcagcctccagatgtaactctttcatcttcctgctaccaaaaataaaaacttaccaaca

SEQ ID NO: 973908 - DNA, 120 bp, Artificial Sequence
  ENSG00000251187_7 (sequence is synthesized)
gggatggaggggttggcagcagcacagcatagcagaattttctgattcactaccactgctggtgttacagcgtgaacgtgacctgaagacaaaaaggctgtacagaatcattgtcacttc

SEQ ID NO: 973909 - DNA, 83 bp, Artificial Sequence
  ENSG00000251187_8 (sequence is synthesized)
gacaagatttattaaaagaaaagaggaaagaactattctaaaatggaccctccctccaaaaaagcccaaacagccaaagcaat

SEQ ID NO: 973910 - DNA, 120 bp, Artificial Sequence
  ENSG00000251186_0 (sequence is synthesized)
ttagattaatgtgaaggtttactatcagcatgtctgcttgacctatacaaagagacacattcattacagcaattcccactgggagctaagccatgctgagatcaagggcatgcgtaataa

SEQ ID NO: 973911 - DNA, 120 bp, Artificial Sequence
  ENSG00000251186_1 (sequence is synthesized)
agacggtacctctaactgagtttgtggtccatacatgtcccagatttttcttcttcggacatcaatccctctgcctggatgctgaaaaaattaattttagaaatcaaaggttaaccttag

SEQ ID NO: 973912 - DNA, 120 bp, Artificial Sequence
  ENSG00000251186_2 (sequence is synthesized)
caagagaagagcttcctgccagcaactcatacccatcctgatgtgtccagcgcaccaggaggggtataagttgctggcaggaagttccaggcacaagacacccacccctactgaccgtgc

SEQ ID NO: 973913 - DNA, 120 bp, Artificial Sequence
  ENSG00000251186_3 (sequence is synthesized)
tacctgggcaggtgccgctctcagcccaagagtgctttcactgcatcagctgaacatccagaaaataagggcaaaacccagtaccacacaccacactgttccatactgttgtctgtgtat

SEQ ID NO: 973914 - DNA, 120 bp, Artificial Sequence
  ENSG00000251186_4 (sequence is synthesized)
caccacactgttccatactgttgtctgtgtatacatgactggccgtccgagccagaactgaagcttctcttatttgtttttcttttttttgcagagatggggtttcactatgttgcccag

SEQ ID NO: 973915 - DNA, 120 bp, Artificial Sequence
  ENSG00000254357_0 (sequence is synthesized)
gaagacgttacttaaggctgctttccaaagcagtgaaaaaataagtcagaacagctgtgctgatggctgggactctctcaggacagcttggaaggcccgacctggcagctctctgggccc

SEQ ID NO: 973916 - DNA, 120 bp, Artificial Sequence
  ENSG00000254357_1 (sequence is synthesized)
accggagctctcctgccttgtcttgtacctgcctctctgtgctccagccacactgccatctctccgtttctcaaatgctacgtaaagccgcattctcttcccacagatagaaaatgctgt

SEQ ID NO: 973917 - DNA, 120 bp, Artificial Sequence
  ENSG00000254357_2 (sequence is synthesized)
cattggtcctaacataccttggcatgactgctgtagctctgtatctgcgtgggtactgacggatgtgactccaggagggagggtgtgcagcctgtggctcaccacggtatccccagcacc

SEQ ID NO: 973918 - DNA, 120 bp, Artificial Sequence
  ENSG00000254357_3 (sequence is synthesized)
tgtctctctgcttgcctattaacttcctaaattagtgcattttcccctgtcatttaaaaaaaaactttaattttttcatttgtatatatcgacagagcacaagtacagatttcttgcatg

SEQ ID NO: 973919 - DNA, 120 bp, Artificial Sequence
  ENSG00000251189_0 (sequence is synthesized)
gatattctcaaatcaagttctcatttctgcctctggcatctcactgcaacagtaccagacattgatatagtctcgataactttcaaaagctttctttgtacatcgtcgggtcggatctgt

SEQ ID NO: 973920 - DNA, 120 bp, Artificial Sequence
  ENSG00000251189_1 (sequence is synthesized)
gcaattattttgtgggtttaaaaatgcttctctacctaaatgtaagctcctagagggaagaactttgtctatcttgcctacttttgtatcttcagaattcagaaacgtgtctgaaacatt

SEQ ID NO: 973921 - DNA, 120 bp, Artificial Sequence
  ENSG00000251189_2 (sequence is synthesized)
tggaggaaagtgaggatctccagaacttacaaaaggctagtggctctgtatggcaaggaagaaccaccaccaaacagtttgatgtacagagttggagatgaacaaattttgtactgagag

SEQ ID NO: 973922 - DNA, 120 bp, Artificial Sequence
  ENSG00000251189_3 (sequence is synthesized)
aaggatggagatagtgtatataaaagaaatacaaggcctccctttgtctgttcagacaagcttggcttggaaaagctaaactcataaatagatgcttatttattaaattctcttacaatt

SEQ ID NO: 973923 - DNA, 120 bp, Artificial Sequence
  ENSG00000226398_0 (sequence is synthesized)
aaagaaaacagagcgcttccctagctcactctccctctctccctcacttcctgctggggaagatggtttactccctcccctgccctggctcaggacctggccttggtgtcaagtttctcc

SEQ ID NO: 973924 - DNA, 120 bp, Artificial Sequence
  ENSG00000226398_1 (sequence is synthesized)
caggacttccattggaggtgaaaatatcacaccaactgactgtgatgccttagcttcagagaagaaaaataatcatccttgtttaaaaagtccatcagttctccctctccctctccctct

SEQ ID NO: 973925 - DNA, 120 bp, Artificial Sequence
  ENSG00000251458_0 (sequence is synthesized)
actttcttgcaaaaatgcctgtttgggattcctcagagtacagacaaaaaggaaggcttgatcagcatgtggtggatctgaagattcaaagaggtgccacagctcaaaagtagacatttt

SEQ ID NO: 973926 - DNA, 120 bp, Artificial Sequence
  ENSG00000251458_1 (sequence is synthesized)
ggagcagcttccgcaggagctccggcaggttccttggaaaacgtggcagtgccgggcccatggtgccctgttcagaaatacaagactcagatttagtaaagccagttgtgtaatgtgaaa

SEQ ID NO: 973927 - DNA, 120 bp, Artificial Sequence
  ENSG00000285575_0 (sequence is synthesized)
ggggcggtcagcaccccggacagctcccgccgctagatcctggggccgcagctccagccgccgccgcgcgctctgcctccacaatgcggccacagcggcggcgggaggaggagggtgaat

SEQ ID NO: 973928 - DNA, 120 bp, Artificial Sequence
  ENSG00000285575_1 (sequence is synthesized)
gggtgaatccccgctcagtccatccctcattcctgtgccagctcggcgacgtacactgctgcttagggagcaaagcacttccaccgctttcacgcgacgaaggtcggaagagcaagagag

SEQ ID NO: 973929 - DNA, 120 bp, Artificial Sequence
  ENSG00000285575_2 (sequence is synthesized)
agaaaggaataacttaattcactgataagtttggaggaaaacctgatcatggattgtcccactccttcttctctccttgcctttaaggagctggctgcctacagaaagcctgtgttctgc

SEQ ID NO: 973930 - DNA, 120 bp, Artificial Sequence
  ENSG00000285575_3 (sequence is synthesized)
tctgcttccctatgtgaaaattaccagagacagcataacaaagcatgtgattttctgtgctgcctgtgactctggtgggtaagtctgcctcattctggaattcagtattataaagcccat

SEQ ID NO: 973931 - DNA, 120 bp, Artificial Sequence
  ENSG00000285575_4 (sequence is synthesized)
ttgtctgcagctctaagacacatttgccaatatcagatttaccagtaataaagacagtgttttaatctgtctgcctgactcctttgccttatctcctgattggctcaaaactctggccag

SEQ ID NO: 973932 - DNA, 120 bp, Artificial Sequence
  ENSG00000285575_5 (sequence is synthesized)
caagaagatcaacagttcatcaggccacctcaaaacccagtatattagagcatgaattcagacacctatggtctgcaagaatactttcaactttaaaaagaagtccatgatttacattcc

SEQ ID NO: 973933 - DNA, 120 bp, Artificial Sequence
  ENSG00000285575_6 (sequence is synthesized)
agaatgccatcgactcagagatattaaaagtggaagaagaataagatcatctgttcacagctttgtgaagaggaaactaaatcccagagaaagaaacctaacaagtggcagaaccagaac

SEQ ID NO: 973934 - DNA, 120 bp, Artificial Sequence
  ENSG00000285575_7 (sequence is synthesized)
tatgactcagatctcttgattcccatgcagtccaagaaggactttatctatgagaagaaggtattcagtttcattcattcctgaaaaagaaacaaaacaaaacattaagctgtcttccag

SEQ ID NO: 973935 - DNA, 120 bp, Artificial Sequence
  ENSG00000285575_8 (sequence is synthesized)
caaaacaaaacattaagctgtcttccagagtatttgtctccaagctatccccactgttttcttcacatgcatctgttgacccattatatagcccaaaaaaaatataaaaataaagaaaaa

SEQ ID NO: 973936 - DNA, 120 bp, Artificial Sequence
  ENSG00000285575_9 (sequence is synthesized)
tatttagccacttgagtaatgccacacttaagcactgaagtacctttcgctcagtgatttttacttgatcaaagaaaaagcctattacttcctgtaattacctgggtaactgaagaaatg

SEQ ID NO: 973937 - DNA, 120 bp, Artificial Sequence
  ENSG00000285575_10 (sequence is synthesized)
tctactgatgattcataatagctaacctcagaagaacccttaccattgtttcctttgtgactttcacgttcttctaactgctttgagctgtagaagccttcctcactctcaggtggtctt

SEQ ID NO: 973938 - DNA, 120 bp, Artificial Sequence
  ENSG00000285575_11 (sequence is synthesized)
cctcactctcaggtggtcttaccttcttctcagagagaatgaagacttcagaaagaaatgtcccttcccagcctggacaacagagtgagatctcatctctacaaaaaaattttaaaaatt

SEQ ID NO: 973939 - DNA, 120 bp, Artificial Sequence
  ENSG00000285575_12 (sequence is synthesized)
acatgttgtcccagcttataaggagactgaggtggaaggaccactcaaacctgggaagtccaggttgcaatgagccatgatcacgctactgcgctccagcctgggtgacagaacaagacc

SEQ ID NO: 973940 - DNA, 120 bp, Artificial Sequence
  ENSG00000251455_0 (sequence is synthesized)
aaaatataaggaaatacaggagagatcaaaagagatcaccggaattcccattttctcaagaaaaccaatgttaatattttggtgttttttcttcccatctttttctttctgttttgtaac

SEQ ID NO: 973941 - DNA, 120 bp, Artificial Sequence
  ENSG00000251455_1 (sequence is synthesized)
atacttgggatcataacgtatattcagtttgtgtcctgctttctttcatttagcacagaagtactttcttaataaaaagatctagctagtatccatcagatgtatttatcataatttatc

SEQ ID NO: 973942 - DNA, 120 bp, Artificial Sequence
  ENSG00000251455_2 (sequence is synthesized)
ccctcctcgtagatatctagactttgaccagtgttgattttgttcatctgcacagactcccaaaaaagctcctagctgaaaacctggctcaaaacagaaaccacctgtaaggacttgctc

SEQ ID NO: 973943 - DNA, 120 bp, Artificial Sequence
  ENSG00000251455_3 (sequence is synthesized)
gtgaaaaatctacgcagcagttccctccaggaaaaccaggcggacgagcagcctgtgcctggaagtaggcggggcccctcctgggtctgcgtctgcagacacagaccagggagcgatttc

SEQ ID NO: 973944 - DNA, 120 bp, Artificial Sequence
  ENSG00000251455_4 (sequence is synthesized)
tcagcgcctgtggtagctgctgcggtgggaagcacacggcagaccctgagcaggctggccagtgagccagcctctttctgacgggacccacagctcgaatgttggctggatttgcctggg

SEQ ID NO: 973945 - DNA, 120 bp, Artificial Sequence
  ENSG00000251455_5 (sequence is synthesized)
ccaaaataagcggaagagtggcagagtgcttggggatcacttccaatcacaccattcagaaggagaagcagtgcacctctaggacagatgccttcaaacgaagaggctggctgctccccg

SEQ ID NO: 973946 - DNA, 120 bp, Artificial Sequence
  ENSG00000251455_6 (sequence is synthesized)
agaaggagggccaggcggggtggtaccaagcagtgccgctagagaaacatcattcagcagcctcctggaacacatgggagcccggtggctgaaatgtcctttcctcccagagttagaata

SEQ ID NO: 973947 - DNA, 120 bp, Artificial Sequence
  ENSG00000251455_7 (sequence is synthesized)
cataatgttagttaactccacaaattagtgcagtggccatgacagtcgaggcccccagtccccagtcccctaggcttatacaacagacgccggttgtcccatcctttgctcaatcctatt

SEQ ID NO: 973948 - DNA, 120 bp, Artificial Sequence
  ENSG00000251455_8 (sequence is synthesized)
taagacgaggattgtgcactcctggctggagtccaggagggtgggagccactgggtggtagtggagcggccctgtctccaggccagactctcctgctcctggccctcttgacgctcacag

SEQ ID NO: 973949 - DNA, 120 bp, Artificial Sequence
  ENSG00000251455_9 (sequence is synthesized)
agtggcctctgtggctgccgagccctgtgctgcagcataaatcctcagcttttgtctgtgtttaatcccaccctgagaagtgatatccaagtgcaactgtttccagccaggagcgcagct

SEQ ID NO: 973950 - DNA, 120 bp, Artificial Sequence
  ENSG00000251455_10 (sequence is synthesized)
gaatttctagcacagtgctggtcctctgtgttaataaatggccgaccaggagtactgggtaatgcaagctgggaactccccatcacacacagacactggagccggctctgacacatgggg

SEQ ID NO: 973951 - DNA, 120 bp, Artificial Sequence
  ENSG00000251455_11 (sequence is synthesized)
cagagactcggcctttggttccctgaggactgaatttacacaccctcttagttgccacccaactgtttctagctaaagctatttttgaagtatcctgaaggaaagcacacaagactctag

SEQ ID NO: 973952 - DNA, 120 bp, Artificial Sequence
  ENSG00000251455_12 (sequence is synthesized)
cctctccctgcctgtcctgggtttccaaggtcaggatatggtggaaagacctgttcaagggacatggcatggagggagctgtcacagttacagagaagggagccccctttttggtcaaag

SEQ ID NO: 973953 - DNA, 120 bp, Artificial Sequence
  ENSG00000251455_13 (sequence is synthesized)
gcaagtattgtgaaaggttacttttctagaaaggcacaaacatcaacccaagcccctaataaagcggggcccagtaaactgtgcagataactgaagcactaaagagagaaaaagacatct

SEQ ID NO: 973954 - DNA, 120 bp, Artificial Sequence
  ENSG00000251455_14 (sequence is synthesized)
agtcatttgtaatacagctttggtgcatgatatataacattttgtacattaaaaggtttttggcgatttctctttaaagcagaccacaaagtagacaagagattggttattatggaacac

SEQ ID NO: 973955 - DNA, 120 bp, Artificial Sequence
  ENSG00000251455_15 (sequence is synthesized)
ttgtgtgttaaacgcgatttccatctctgcggcacccaattccagaaacgttaactggacaatcctcaggggatggtggatcatctgcatctgtttccagacgtgcatgaaggatctcct

SEQ ID NO: 973956 - DNA, 120 bp, Artificial Sequence
  ENSG00000251455_16 (sequence is synthesized)
tcgtacacctacacaacccatgcgatttcccttgaaccatgactaaccagctgtctggacgacatccagggcgagtcacaagaggcttgggaatcctgggaggctgttttcagattatgg

SEQ ID NO: 973957 - DNA, 120 bp, Artificial Sequence
  ENSG00000251455_17 (sequence is synthesized)
aaatgcaaatcaaatcctccctgatacgacttcacacccactaggacggctatagaatcaaaaagatggacaataacaagtgctggtgaggacatggagcaactggaacccttgcacact

SEQ ID NO: 973958 - DNA, 120 bp, Artificial Sequence
  ENSG00000251455_18 (sequence is synthesized)
aacaggtatacatccagcctgtgtgcaaaaacttgtacatgaatgtttaaggctgcattattcctaatagccaaaatgtggaaacaactcaaatgtccatcaactgatgaatggacagac

SEQ ID NO: 973959 - DNA, 120 bp, Artificial Sequence
  ENSG00000251455_19 (sequence is synthesized)
aaaatggaatgtgtccgtacaatggtgaaggggcttggcagacgagcagccccatttagccctaaaaaggcgtgaaggactgatgcgtgccgcaacacagatgtacttttcataaaatgt

SEQ ID NO: 973960 - DNA, 120 bp, Artificial Sequence
  ENSG00000251455_20 (sequence is synthesized)
gccgcaacacagatgtacttttcataaaatgtccagataaaataaaaataaataaataatacaaagtcaataaatacataaaatatccagataaaatgcttgacactatataattaataa

SEQ ID NO: 973961 - DNA, 120 bp, Artificial Sequence
  ENSG00000251454_0 (sequence is synthesized)
aagttttgaatttcaaaaggaaggaaaaagcaaagctgtttcgtattgacatttaacaaaatagctcacttgctggaacctgctgaagaagtaacctaactgatgtgcttgaaagtgcaa

SEQ ID NO: 973962 - DNA, 120 bp, Artificial Sequence
  ENSG00000251454_1 (sequence is synthesized)
gaaattgctgtgcatccaatgaaagctaagctttagcttcttcatggagtggtgatgggcttctaagaaggagttttccaaaaatgcaaaactggaagctgcatgggctcttataggcta

SEQ ID NO: 973963 - DNA, 120 bp, Artificial Sequence
  ENSG00000251454_2 (sequence is synthesized)
accttagaaggcacttgtcacttctacctcattcttttggacaaagcaactcacagagccaactcagaatcagattcaaaaggaggaagaacaaactgtggctttgagatgataagtgac

SEQ ID NO: 973964 - DNA, 120 bp, Artificial Sequence
  ENSG00000251456_0 (sequence is synthesized)
gctgttttacttgcacgcacacatctagaaacaaattaatgctcttgaatatttattttttgagcccttggatttactttaagaggaagagtttccaactgtttggaatgacttccagga

SEQ ID NO: 973965 - DNA, 120 bp, Artificial Sequence
  ENSG00000251456_1 (sequence is synthesized)
tttgcattttttcccgaaagccgaatatactgggtacattaaaacaaaacaaagcaactatggttgccccccatcacttaataagacttttccatcttttcaagatttcccaaaatgtat

SEQ ID NO: 973966 - DNA, 120 bp, Artificial Sequence
  ENSG00000251456_2 (sequence is synthesized)
ctatgcagtgttttaataaaagagaaatatacagacacatttccttctaaatatagtttaagtatactttggccaaaacacaaagacttttgttccacacgtttaaattctttcattcaa

SEQ ID NO: 973967 - DNA, 120 bp, Artificial Sequence
  ENSG00000251456_3 (sequence is synthesized)
tattcaaaagctgtaaacccaaataaacgaattgagtgattaattggcttggcacaaatctaagggtagcattaaataagttactgtgggcattaatgtgtacccaagtttttgtgtagg

SEQ ID NO: 973968 - DNA, 120 bp, Artificial Sequence
  ENSG00000226390_0 (sequence is synthesized)
ggccacccacatagaagagacatagaagatctcccagctcttcctgggagcaaagctgtgcaacccagagcctcaagctgccgctttggcaggaaagccaactcccgcgtgctgaagtca

SEQ ID NO: 973969 - DNA, 120 bp, Artificial Sequence
  ENSG00000226390_1 (sequence is synthesized)
ctgaatgcacaccagagagaaacccacttcgcaggaagcaaatgctttgtctcatttacatttttcgcaggtgttctgggatgtgaaggggacgtgtccaacgtccaggtccttcgtcac

SEQ ID NO: 973970 - DNA, 120 bp, Artificial Sequence
  ENSG00000226390_2 (sequence is synthesized)
agccataaaggaggccatgcgtgggacacgccctcattccaggcaatgtgagagacgccttcaccttgaccgtgttgctgcctctcgttccaaccgtgctcagaaccaggagccggcggg

SEQ ID NO: 973971 - DNA, 120 bp, Artificial Sequence
  ENSG00000226390_3 (sequence is synthesized)
tgcacaccctgcggcaccacacgaccgccacggagcctgtggggccctcctgtgtctcaaacccgagcccttccccggcgcccacatccaggttgccaactaggaggaggcaggcctggg

SEQ ID NO: 973972 - DNA, 120 bp, Artificial Sequence
  ENSG00000226390_4 (sequence is synthesized)
gcactggcaggaggacgggtgggcacaggaaaacctgcctgaagatgaggtcatgaggaaggcagcacagaaggatgggagaagaggccttaagacacataatgtgagcacctggatcca

SEQ ID NO: 973973 - DNA, 120 bp, Artificial Sequence
  ENSG00000226390_5 (sequence is synthesized)
gctgtgcctgaagccccttggacttccaggttatgtaagcccattccttacaaccctttgcatttgttttctgccccttgcaaataaaagaccatgacctttcacgctatgagcagctga

SEQ ID NO: 973974 - DNA, 120 bp, Artificial Sequence
  ENSG00000251450_0 (sequence is synthesized)
tcacatccacctcacaaagcaggtattattatcatgcccattttatagaagaaaaacaggttcagagaaggtaagtaacattcccaaatggtagagcttgtgagtctcagaggcaggatt

SEQ ID NO: 973975 - DNA, 120 bp, Artificial Sequence
  ENSG00000251450_1 (sequence is synthesized)
tgaacccgggcctgtctgaccggagacccatcctctttattatagagtgtttctcctgtgttgcctggaagtgtgagttaaagctgagagcatgtgccacgtgctccagccctaactctt

SEQ ID NO: 973976 - DNA, 120 bp, Artificial Sequence
  ENSG00000251450_2 (sequence is synthesized)
gtcatttattatattggacaaattacttatttatgcctcagttttgatgttagaagtggaggtaataataggactttcttcctaggagttcatgaaaatttaatagttaatatgtccaga

SEQ ID NO: 973977 - DNA, 120 bp, Artificial Sequence
  ENSG00000251450_3 (sequence is synthesized)
gtgcatagaacatggtctatcacatactaatgacatcattaaatgggacaggatggagccttatttatttatttatttaatttgtgagacaaggtctcactctgttgcccacgctggagt

SEQ ID NO: 973978 - DNA, 120 bp, Artificial Sequence
  ENSG00000251450_4 (sequence is synthesized)
catctggcccagggtgggactttaaacagaaaaaggacgtgagcatggaggtctggcctgagcaggagtgaacaatgctacattgaggagagaacattaaaggagacccagctcttggag

SEQ ID NO: 973979 - DNA, 120 bp, Artificial Sequence
  ENSG00000251450_5 (sequence is synthesized)
tgaggccttaagcttcgggagttgaaacaatgacctcccattaaaacccttggagtcacagggagaaacagatttctagaattggacctaaatctgttcattcttatttttcctattttt

SEQ ID NO: 973980 - DNA, 120 bp, Artificial Sequence
  ENSG00000251450_6 (sequence is synthesized)
ggctacctgaagaaaccaacaatatttgttccctgggtattttgaagttcaccataaataataccactcggtttagaaaactgtgtattcagttcctcagagaatggattatctaattac

SEQ ID NO: 973981 - DNA, 120 bp, Artificial Sequence
  ENSG00000251450_7 (sequence is synthesized)
gtgtctgtgtttacatggaacaggtagtccaatccacgaaagtgtgagaaccatgagcctagtctcgacctcaggagttgcctgaggaaactgatgctaaaaatccaagttgcaaatcaa

SEQ ID NO: 973982 - DNA, 120 bp, Artificial Sequence
  ENSG00000251450_8 (sequence is synthesized)
aatattagaaaaatcaagccatgctctagacttggaagcccgacacttagatcatctctctctgagcagagccagctgttggcccccataggtgagtgtcagtgacattctgacacagga

SEQ ID NO: 973983 - DNA, 120 bp, Artificial Sequence
  ENSG00000251450_9 (sequence is synthesized)
aaggtcaacaggtgccccaggaccacatccacctggttagaagctctgctgggtttggtctgggagagacccgctgcctcaagagaatttgctacagggaaagccccctgggtaaccatg

SEQ ID NO: 973984 - DNA, 120 bp, Artificial Sequence
  ENSG00000251450_10 (sequence is synthesized)
ttctctcttgtgtgtgtggaaatgtgctctttggggcattaaaatcctaccagtgtacccccatgcccttccaagatgagctcagggagatgtatttttgtgttgcagtcaacaggctga

SEQ ID NO: 973985 - DNA, 120 bp, Artificial Sequence
  ENSG00000251450_11 (sequence is synthesized)
taatcatcatcatggatcatgtacttaaggctgaaaaacagcagccttctctatcccatcatagaaagggcattttgaaccacaaaggctatgtccctggtaataaacatcagaaataac

SEQ ID NO: 973986 - DNA, 120 bp, Artificial Sequence
  ENSG00000251450_12 (sequence is synthesized)
catttgaataaattacatgtgtgtagcatgtgattttatagaatgcttccacatgtgttactatctcatttaattccatatttgtacaaatatgttatacacttgggtaattctctgaat

SEQ ID NO: 973987 - DNA, 120 bp, Artificial Sequence
  ENSG00000251450_13 (sequence is synthesized)
tctctgcatttcacgcatttggagtagtggcagggatgtagtggcactcagatgacatcagggcctgtttgctttatggcagtaatgagcatttgtagggcatttcacagtttatgtaga

SEQ ID NO: 973988 - DNA, 120 bp, Artificial Sequence
  ENSG00000251450_14 (sequence is synthesized)
gcttaaatacatttattagacctcatttgatcctcacagtaactttatgaggtaagatggatattgttcctatcatagactttaatgcataatattaactgtctttgcttctctgcatct

SEQ ID NO: 973989 - DNA, 120 bp, Artificial Sequence
  ENSG00000251450_15 (sequence is synthesized)
aactctagactgcaagttccacaaggattatagcttttcgatatatttttcactgtttcatcacagtgctcagtaactctttgtttaattgactttgatagtattataattgcccccata

SEQ ID NO: 973990 - DNA, 120 bp, Artificial Sequence
  ENSG00000251450_16 (sequence is synthesized)
tttgtgatcaatgaagaaactgaggctttcagaaggatttatcttgcccaaggtcacacaactgggagtgaaagcccttgaattcacatcttgtcactgtcactgcctgtccaaatggtc

SEQ ID NO: 973991 - DNA, 120 bp, Artificial Sequence
  ENSG00000251450_17 (sequence is synthesized)
acaaattgaggctatctggctggtaagaagtccctttatcctgctataattttcttggtggctctgtgtcattatgctgaactcagtttcccctcaagcaggtgaaactgcagatggcat

SEQ ID NO: 973992 - DNA, 120 bp, Artificial Sequence
  ENSG00000251450_18 (sequence is synthesized)
agggcacatagctgcagaccttgctcagactggactctgaaagatttggaaccttaggcagagaggtggaaaggagttggggaggcagtggcaatgatttgaaaactataaccaattttc

SEQ ID NO: 973993 - DNA, 120 bp, Artificial Sequence
  ENSG00000251450_19 (sequence is synthesized)
tctctcctaggagttggagacttggaatcccctttggtgcagaaactattccttcatgagaagaagtccttaaataggctctttagacaggaggccacatgttgaaggcagcagggtcac

SEQ ID NO: 973994 - DNA, 120 bp, Artificial Sequence
  ENSG00000251450_20 (sequence is synthesized)
aagatggaagaaccagggtcccagtatcatcgctccctgcttcaagctgccaggggcagcctaacccacatggcattatgacataagaaacaaagtaactattgttttattaaatcaatg

SEQ ID NO: 973995 - DNA, 120 bp, Artificial Sequence
  ENSG00000251450_21 (sequence is synthesized)
agatattgggcttcttgttatagcaactagtataaattgccctgactgatacattatggatttagagtgcactgtactacaactgtttgttgtattttcaaaattgtggtataactgact

SEQ ID NO: 973996 - DNA, 120 bp, Artificial Sequence
  ENSG00000251450_22 (sequence is synthesized)
aagacagccacctcgccaagatcgtgtctcccctttctgaggaagcccagagctgatgactggccatatggatataaaacgcacaaccccctcaggggaactccgactcgggcatctctg

SEQ ID NO: 973997 - DNA, 120 bp, Artificial Sequence
  ENSG00000251450_23 (sequence is synthesized)
aaggactatggggtccagtgcagcacagagtgggacattactttctgctgggaagacccacttcccaatcaagggagcatttggtctgagtcctgaagggtggttggttaagtggcaaat

SEQ ID NO: 973998 - DNA, 120 bp, Artificial Sequence
  ENSG00000251450_24 (sequence is synthesized)
atgtgcaggctcagctttctcatcactgaactggagatacaggtaatagtaatatctacccctggaggtatttttaaatacttccacagtacctgacacgtggtaagttttaacaatgct

SEQ ID NO: 973999 - DNA, 120 bp, Artificial Sequence
  ENSG00000251450_25 (sequence is synthesized)
gatggaggaaacatttggatgtttccagccaaattggaggaatcaacgagtcttgtctactgattagatatagaggtcggaagatggaggatggaggtgaagccaagatggctctaggta

SEQ ID NO: 974000 - DNA, 120 bp, Artificial Sequence
  ENSG00000251450_26 (sequence is synthesized)
tctggcctgagcaagagaactgacaacagttggtatttgggtttgacttgaaggcaactgtgggccatctagatggagagaggtacagtggcatcttggaatttctaaaataaaatacat

SEQ ID NO: 974001 - DNA, 120 bp, Artificial Sequence
  ENSG00000251450_27 (sequence is synthesized)
cgccctcgaagtagaagagcacattctggtagagggcgaaccacttctcgtgccagcggctcgcctcggccgtcttcttactcaggaagccgcgcttggtgccctccttgcgcgccagaa

SEQ ID NO: 974002 - DNA, 120 bp, Artificial Sequence
  ENSG00000259668_0 (sequence is synthesized)
cacatactaacaaaaaaaagaattcaacaaaatgaggagagaaactatcatggcaccatcctcaagcatgaacaatttctaagagtctggagaaaagcaggagggaaggcaaaccacaaa

SEQ ID NO: 974003 - DNA, 120 bp, Artificial Sequence
  ENSG00000259668_1 (sequence is synthesized)
gaagaaacctcaaaatagaaaatgccatgatcatatcagattccttatggatgactttcgcctttccacctggatagcccagatcagcttcaacctagaaaacattcatcagcagtttta

SEQ ID NO: 974004 - DNA, 120 bp, Artificial Sequence
  ENSG00000259668_2 (sequence is synthesized)
gcagcagcagcagcagcaagaaaaaaggggactcccctatggctgctgcagctgataaagatgcatccaagaaaacttccaaggaatggtcaatgtgtggcacagctaactcagtgaagg

SEQ ID NO: 974005 - DNA, 120 bp, Artificial Sequence
  ENSG00000259668_3 (sequence is synthesized)
ccaaactgctgaagaatctatttgtcttaactagctgaattcaccaatctgtttcccaaaaacttgttttgtgaaatattttcctgtaatatcttcagtgaataaaagatcttattctta

SEQ ID NO: 974006 - DNA, 120 bp, Artificial Sequence
  ENSG00000259668_4 (sequence is synthesized)
tatttagagttatgcacatcccataagatttaaatgtaggataagaagaaaatgtagcagcagcagcagcagcagcagcaagaaaaaagggtgactgccttcctttcatcacgaagggcc

SEQ ID NO: 974007 - DNA, 120 bp, Artificial Sequence
  ENSG00000259668_5 (sequence is synthesized)
gagtccaaatccagaaatgatacctataagtaaataacataccacactagctccagtgctagtctgtccagtgcccagccatggcagagatgaaggtggatgcacctgacttgctgaata

SEQ ID NO: 974008 - DNA, 120 bp, Artificial Sequence
  ENSG00000259668_6 (sequence is synthesized)
ggatgttgcactgggttgataaagagttgtagtggaaccacgataatcaacatcatctgaactgtgaaaaacattcatgtgttactgtgaacattcccttttctcttaacacaaattcca

SEQ ID NO: 974009 - DNA, 120 bp, Artificial Sequence
  ENSG00000259668_7 (sequence is synthesized)
actaaaaatcttcttatgtacccataggacaatctttattttaaaaactaagtagccatgagaaaaacttaggtacaagtcctaatcgccaatgttaatactggttaacttttttccctt

SEQ ID NO: 974010 - DNA, 120 bp, Artificial Sequence
  ENSG00000259668_8 (sequence is synthesized)
ttggcaaaatgtaaatttagtctaatgttgtttggggacaactttattgctgcacaagttgaaacaaaagtttgttgttatctatggaaaaatattatgttctcttcaagtacagatagc

SEQ ID NO: 974011 - DNA, 120 bp, Artificial Sequence
  ENSG00000259668_9 (sequence is synthesized)
atccacagcaaaggtaaaaacatggaaggaagattcactaaggccctactaaataaacattctgcctctaactatgtttctgttgctgtcattcccaaaaagtccaagtgctaaaaaatt

SEQ ID NO: 974012 - DNA, 120 bp, Artificial Sequence
  ENSG00000259668_10 (sequence is synthesized)
ccctgtcactttttttttaaatttttttagagacagggtctcattctgttacccaggctggagtgcagtagtgcaattataacttactataacctcaaactcctgggttcaagggatcct

SEQ ID NO: 974013 - DNA, 120 bp, Artificial Sequence
  ENSG00000259668_11 (sequence is synthesized)
ccagcctcaaccttctgagtagctaggactagaggcacatgcctgggctttttaaaaaaatttttgtagggatgtggtctccctttgttgttcaggttgtctcaaatgctggagttcaag

SEQ ID NO: 974014 - DNA, 120 bp, Artificial Sequence
  ENSG00000259668_12 (sequence is synthesized)
caatcctcctgccttgggctcctaaagtgttgtaattacaggtgtgaaccactgtgactggcccttccattacttcttaactgcttacctgtttcactgttttcctctaacctcttactg

SEQ ID NO: 974015 - DNA, 120 bp, Artificial Sequence
  ENSG00000259668_13 (sequence is synthesized)
atgaaatttagtaagaaactaggtttctctcaagaactttactgtgcttacaggaatcaccaacacactcaacacaggcagtttttttactctcacagtatatttagtatctttaaatag

SEQ ID NO: 974016 - DNA, 120 bp, Artificial Sequence
  ENSG00000259668_14 (sequence is synthesized)
atgattaatccatactaaattttgtagatttttgcttctattggaagaaaagagagtgtatgaatagactccaacaaactgtctactcagtttaaatccagggtcactgaattcattttt

SEQ ID NO: 974017 - DNA, 120 bp, Artificial Sequence
  ENSG00000259668_15 (sequence is synthesized)
cgatgcacttttatcacttactcctaaatatccacaactattttcagatgaattcagcagtagcccccagaaactaaccttgttgccttgtgaattaaaatataatctagtaactcttgc

SEQ ID NO: 974018 - DNA, 120 bp, Artificial Sequence
  ENSG00000259668_16 (sequence is synthesized)
attgccagcttgacgaaagcagacaagttgctgaggccgcgtccattcaaacattcgtacactgccgtcctgagcacctgtaagatctgaaacacaagagaaaaagcaggaaataagaaa

SEQ ID NO: 974019 - DNA, 120 bp, Artificial Sequence
  ENSG00000259668_17 (sequence is synthesized)
ttaaagagttccaatattttctattctataaatcaacctccaaatgaggacacttacaattattaggtcataaatacttacagtattgatggactgggtgtgaagtcattctcttaacat

SEQ ID NO: 974020 - DNA, 120 bp, Artificial Sequence
  ENSG00000259668_18 (sequence is synthesized)
tatgtagattccttttcataagctttaaaagaaaattttaaaaattttattttgtgtatgcagaaaagatgaggaaggatatgcttcaggataaattctgacatttattctcttacacct

SEQ ID NO: 974021 - DNA, 120 bp, Artificial Sequence
  ENSG00000259668_19 (sequence is synthesized)
tgcttattactgagataaagcctgttatggatgttctgaaccactacatagaacacttgtctgaagagggtgaggaagcacagtcacttgctggtatagccctggcctgtgaggttacca

SEQ ID NO: 974022 - DNA, 120 bp, Artificial Sequence
  ENSG00000259668_20 (sequence is synthesized)
aggagcttcatctcataataaaggaactcttcttcaagtgcccctccctgaggatattcaggagcacctccagatgcttcagagcagaacataagaatgggacccctccagctacagtga

SEQ ID NO: 974023 - DNA, 120 bp, Artificial Sequence
  ENSG00000259668_21 (sequence is synthesized)
atgaattcccctttaactttgctttaccattttgtatctgtttattcatctgtaaaatgataatggagggtaataatagcacctaccacctaggattgttgtgagaaaaagcatgtatct

SEQ ID NO: 974024 - DNA, 90 bp, Artificial Sequence
  ENSG00000259668_22 (sequence is synthesized)
agcgggtagatcacttgagcccaggagttcgagaacagcctgggcagcgtggtgaaaccccatccctacaaaaaatacaaaaattagcca

SEQ ID NO: 974025 - DNA, 86 bp, Artificial Sequence
  ENSG00000259668_23 (sequence is synthesized)
tcacttgagcccaggagttcgagaacagcctgggcagcgtggtgaaaccccatccctacaaaaaatacaaaaattagccaggcacg

SEQ ID NO: 974026 - DNA, 120 bp, Artificial Sequence
  ENSG00000259668_24 (sequence is synthesized)
aaattgcaccactgcactccagcctgcgcgacagagccagaccctgtcaccaaataaaaaagccacaataaatgtcagctgtcattatcatggcctatctactggtgtttgtccctgaaa

SEQ ID NO: 974027 - DNA, 120 bp, Artificial Sequence
  ENSG00000259669_0 (sequence is synthesized)
gaagataacagaagacatggctggagaccaagtgttaaagagaaaacaagagtaactgaatatgaaccatgagaaaggataaggcagtgaggatgatttgagatttgggtctgagaagct

SEQ ID NO: 974028 - DNA, 120 bp, Artificial Sequence
  ENSG00000259669_1 (sequence is synthesized)
gaagcaattaggaagaggagctgcttgagagacccagagctgaatttcttgacttttgagacatgttagtggaaatcctgtcaaagaggtaacagaggctactgaagaaattcaggtcac

SEQ ID NO: 974029 - DNA, 120 bp, Artificial Sequence
  ENSG00000259669_2 (sequence is synthesized)
cgagacaaaaagtagaaagagagtatcaggaatgttcccactcaaggccaaatggagaatgaaagcaattacgaaaatggaaggatatttccaggactgaagaacgtcaactagcagctg

SEQ ID NO: 974030 - DNA, 120 bp, Artificial Sequence
  ENSG00000259669_3 (sequence is synthesized)
tggttaaacagtataggaagcatatatacagatttgtatggcatttttcagtacatggagggatgaatatgtcttgactgacattagaattgactccacctaaatattcaataataatag

SEQ ID NO: 974031 - DNA, 120 bp, Artificial Sequence
  ENSG00000259669_4 (sequence is synthesized)
ttgccatcaaaataaacagttaaaccggatatagcattttgtggcaaaacttgtggcaaaacatttcacctaccgtatgtgacaaccaataaataacctctccatgatgtttaaaaaagt

SEQ ID NO: 974032 - DNA, 120 bp, Artificial Sequence
  ENSG00000259669_5 (sequence is synthesized)
gtccccaaatgtgacacaatatatatgttgggtactagcagctgagccctccccattcccagctatcagccccacctttaattcagagcagcacagcttcccttacccgctgcttaagtg

SEQ ID NO: 974033 - DNA, 120 bp, Artificial Sequence
  ENSG00000259669_6 (sequence is synthesized)
actgttaatggacctgagcagctgctcaaggtctaatgatctgcatcaggggcaagtaccagggcagtcttattcctgccttcactcatcacgggagtggcaggcaggacaaagctctgc

SEQ ID NO: 974034 - DNA, 120 bp, Artificial Sequence
  ENSG00000259669_7 (sequence is synthesized)
tgcccccggctgtaacactggagagtagcacaggaaaaccggttagacctagaagcacctgatagggcgaaacttgacttttttatacagaaaaactcatgctagccaatacactatttt

SEQ ID NO: 974035 - DNA, 120 bp, Artificial Sequence
  ENSG00000259669_8 (sequence is synthesized)
gaagaacgtgttttaatacatagagaaaagaacacctattcactgaatctgttttcactttttggtgtgaaataaccactgcaaagtacagaagctgtggtcagctgagagaccctagca

SEQ ID NO: 974036 - DNA, 120 bp, Artificial Sequence
  ENSG00000259669_9 (sequence is synthesized)
cccagaataaggcatgcgaatgagccattttagaagctgaccctctaaccatgttcaagctttcaaatgactgcaaccactgctgacatgctaaatgcaaccacatgagaaaccctgagg

SEQ ID NO: 974037 - DNA, 120 bp, Artificial Sequence
  ENSG00000259669_10 (sequence is synthesized)
cagaaaaacccaggctagagtacaaatgtgaataacatcacatgccaatcattcaggagttattcaatatgcactgatgaccccaagagcagtgaaaataaccgtgacagaagcttcctg

SEQ ID NO: 974038 - DNA, 120 bp, Artificial Sequence
  ENSG00000259669_11 (sequence is synthesized)
ttagtatccagactccagtcctcaagtctgcaaaaccatgagaacaataacactttaccatcagaacaataacacttctttaccatcagagacattctccattgtacacagagtacagat

SEQ ID NO: 974039 - DNA, 120 bp, Artificial Sequence
  ENSG00000259669_12 (sequence is synthesized)
tacacagagtacagatcaattccagtattcttaaatgggtgaaatcggattaaaatggccagcatgaagaggcatcagaatggggaagatgcagtcttgctgtcacccaggctggagtgc

SEQ ID NO: 974040 - DNA, 120 bp, Artificial Sequence
  ENSG00000259669_13 (sequence is synthesized)
aagcgattctcctgcctcagcttcctgaatagttgggattacagtgaagcctaaagagtcatcctccaaccttgacaacccttcaccattataatggaacaagtcccagatgagaacaac

SEQ ID NO: 974041 - DNA, 120 bp, Artificial Sequence
  ENSG00000259669_14 (sequence is synthesized)
aatggaacaagtcccagatgagaacaacagccatctcaggcagtcacaactttctgcagtagaaattcaatgagagcctctgatggatacaaaacactgtgttgggagctgcggtgacaa

SEQ ID NO: 974042 - DNA, 120 bp, Artificial Sequence
  ENSG00000259669_15 (sequence is synthesized)
gatcgaacggacacagatgaccctttcaaaaaataaaaagagctcaagagtcataacaaaagatgtgaacaaacatcaccaatgagaggtacaaggtgatcagaggcatgatggtctaag

SEQ ID NO: 974043 - DNA, 120 bp, Artificial Sequence
  ENSG00000259669_16 (sequence is synthesized)
ttttcaggaaaaggagcagctacttccagttggtagagcattaaggaaatgctgcaaaaggaattgaacttcaaattgtaccttggagatggggattgagtatggacagaagaagatgaa

SEQ ID NO: 974044 - DNA, 120 bp, Artificial Sequence
  ENSG00000259669_17 (sequence is synthesized)
atgaggactgttgttgagctgagagctaataaatcagctttctatttcatttgttcattcatccattttacaaatattaatcaaaatcttctatgtgccacattatactatgctctaaat

SEQ ID NO: 974045 - DNA, 120 bp, Artificial Sequence
  ENSG00000259669_18 (sequence is synthesized)
atgatgttgtgaaaaaaagacacagcctgtaacttaatggtgcttaaaagtctaatatcatctatccacctgctttttcttaggccttattggaaaattcaggaaatatacaattttgga

SEQ ID NO: 974046 - DNA, 120 bp, Artificial Sequence
  ENSG00000259669_19 (sequence is synthesized)
actcatcagaacatagactgaatagtccaggacagaccatatggcttgctaattggttacatataagtcatcaccataggtttgagatcaagttttatacttatatttggaaatattggg

SEQ ID NO: 974047 - DNA, 120 bp, Artificial Sequence
  ENSG00000259669_20 (sequence is synthesized)
aacaaaagataaaaaattgaaagtttcatttgtttgcttacattccaagcataacaagctattaatagaacttttattagaacccgctagactctgtgttaatgactttttaaaaagtga

SEQ ID NO: 974048 - DNA, 90 bp, Artificial Sequence
  ENSG00000259669_21 (sequence is synthesized)
gatatcaaaaagtgaatccaccatgatcaagtaggctttatccttggaatacaaggttggttcaacatctgcaaatcagttaatatgatt

SEQ ID NO: 974049 - DNA, 120 bp, Artificial Sequence
  ENSG00000259669_22 (sequence is synthesized)
atgatcaagtaggctttatccttggaatacaaggttggttcaacatctgcaaatcagttaatatgattcattacataagcagaactaaaatgaaaaccacatgattatctcaatagacac

SEQ ID NO: 974050 - DNA, 120 bp, Artificial Sequence
  ENSG00000259669_23 (sequence is synthesized)
ttaccatcagaacaataacacttctttaccatcagagacattctccattgtacacagagtacagatcaattccagtgatacccagctcagatactgtaatgaagtccatgaagaaatata

SEQ ID NO: 974051 - DNA, 120 bp, Artificial Sequence
  ENSG00000259669_24 (sequence is synthesized)
tcaccatgttggtcaagctggtctcaatctcctggcctcatgatccgcccccctcggcctaccaaagtgctgggattataggcatgagcctctgcaccggtagctctttcttatgacaga

SEQ ID NO: 974052 - DNA, 120 bp, Artificial Sequence
  ENSG00000259669_25 (sequence is synthesized)
tgagcctctgcaccggtagctctttcttatgacagaagtttctcaacagagtactttcttctgaaagcagtatcatttttccatatttaatctccacaagaaccactttcaaaaaataac

SEQ ID NO: 974053 - DNA, 120 bp, Artificial Sequence
  ENSG00000259669_26 (sequence is synthesized)
agtaacctggcactttaaagaactaaaaataaaaagagtaaacaaacaagatttattattttagaaaatctagctagttcttacatgagtagcttttgagatggaaaatacctttaaatc

SEQ ID NO: 974054 - DNA, 120 bp, Artificial Sequence
  ENSG00000259669_27 (sequence is synthesized)
aagattttggttttggcttacactcccagcctactcttttggttattttcagttcttgttcatttaccttaagaatatgttcacctaattgcgctactgaatcagatagcaaatcaatcc

SEQ ID NO: 974055 - DNA, 120 bp, Artificial Sequence
  ENSG00000259669_28 (sequence is synthesized)
ttctgataaagttaaaacaattaaattttaattcagaaggtattggctgccagtttcaacaatgtgtatcatgatatgtttctgaagacaaagtcattgtgataccacatataagttttg

SEQ ID NO: 974056 - DNA, 120 bp, Artificial Sequence
  ENSG00000259663_0 (sequence is synthesized)
gtcaattgctttattaaccagataaaacagtctgggtgaattagcaagaattttctctgcacgcagagcttcctagccttactttctgagttcaggtagttgtttctgacaccagctttc

SEQ ID NO: 974057 - DNA, 120 bp, Artificial Sequence
  ENSG00000259663_1 (sequence is synthesized)
ctggtatttcttggcagacgacaggccagaaggcaccgttcttgtgcggtctgttgctcggttctcagccgagatagaatttcatgctcccggcatcggggcagctgcgaaaccacaaac

SEQ ID NO: 974058 - DNA, 120 bp, Artificial Sequence
  ENSG00000259663_2 (sequence is synthesized)
ctcagttcagtcctgagcatgcgaaggtccgcagttgattgcagggaggcgttcggccaagcgaggacggaaatttgtattctccctttaaaattgtgcttctgaaagtatttactatga

SEQ ID NO: 974059 - DNA, 120 bp, Artificial Sequence
  ENSG00000259663_3 (sequence is synthesized)
cttatcaaaagcggctggcagtgtcaagtgaaacctttttcttgcttccccctgccccctagaactcctaagtgaccaggaacagacgatttttaaccgagttctgctgcgtggagccca

SEQ ID NO: 974060 - DNA, 120 bp, Artificial Sequence
  ENSG00000259663_4 (sequence is synthesized)
ggttggcgctagtgagtgcagtgtgctgacccaagtggtggtggcccaaggacgcgctgacccgtacatttggcaaagctttcattaaatgtatcagattctcgcggaagtggttgcagt

SEQ ID NO: 974061 - DNA, 120 bp, Artificial Sequence
  ENSG00000259663_5 (sequence is synthesized)
ccggagagtgaaacagctatctctcaagtcctgaccggttcagctgaaatctacatttgcactgaatctggcaaaacacggacgggtccgcccgagatctcaggaaacccagagcaagtt

SEQ ID NO: 974062 - DNA, 120 bp, Artificial Sequence
  ENSG00000259663_6 (sequence is synthesized)
acctccatgtagttgatcattctttctgaaaggacggacaccatttaccccactgcaatcctgtccaacgggcagctctgagtttagctttagcgccaaaggattgatttcccccacccg

SEQ ID NO: 974063 - DNA, 120 bp, Artificial Sequence
  ENSG00000259663_7 (sequence is synthesized)
ctggagatttactggggacgagcgggggaggggaggcgaaggtacctcggaggaggtcaagtgggggaggaggaggagcagcagaaaattaccagccaagcaggggagggagttggaagc

SEQ ID NO: 974064 - DNA, 120 bp, Artificial Sequence
  ENSG00000259663_8 (sequence is synthesized)
ccggaaatataccaggatgcctcaagtaaccttcctttaagtctcagaattcagccctcggaaaacagcctcataaggtgtcctgggaaggagtcctcgggtgggctgcggaggtgatgt

SEQ ID NO: 974065 - DNA, 120 bp, Artificial Sequence
  ENSG00000259663_9 (sequence is synthesized)
caagagttacagctactttatgaattaaactgacggctaaggcatgtcgggacagtttagtgtaagctgaatggtgcgtggacggggcaacttttaaagagaggtgggcaatcattggtg

SEQ ID NO: 974066 - DNA, 120 bp, Artificial Sequence
  ENSG00000259663_10 (sequence is synthesized)
gcatctaccagtatattctgcatgtaacagtagtttggaagctgaagaaaaacccctcaaatcccagtaaatgcccggtcagttcgagagagattttagggacaattttgaaggtcgctg

SEQ ID NO: 974067 - DNA, 120 bp, Artificial Sequence
  ENSG00000259663_11 (sequence is synthesized)
tctgctccaactccgcagagatgaacaagagtgtgaactctggcgcgggtgtgtttagaattatctacgacttcagatccatgctgttgaaactcatcaattctttgtgacttcacgtgg

SEQ ID NO: 974068 - DNA, 120 bp, Artificial Sequence
  ENSG00000259663_12 (sequence is synthesized)
agagaagaatttgccctgcctccctacctgctaaatgccgactgagaaaaggggcccaggagacgacccctttcagaaagaacgtcacttcatcaactcggctgagttattaacttgctc

SEQ ID NO: 974069 - DNA, 120 bp, Artificial Sequence
  ENSG00000259663_13 (sequence is synthesized)
cccgaaaggtcaacaacgccttctcttctcagccgcaccgcgcggagatcaatcgctttaccctaggtagcctcttgttcagggctcaggaactcctgtcttaaggtccttctggggctc

SEQ ID NO: 974070 - DNA, 120 bp, Artificial Sequence
  ENSG00000259663_14 (sequence is synthesized)
agaagctgtgttgtgtatgttctttccaagaatcccacctgtctgctttcaagcacacacggcgctagaaatttagcctagcctgagtcctgggatgagagaagagctaaacaaagagac

SEQ ID NO: 974071 - DNA, 120 bp, Artificial Sequence
  ENSG00000259663_15 (sequence is synthesized)
cccaaccgtccccttggccccctgccccgccgttttgcagtttgccaaccttctagctagacagccccctaagtctccgtgttgcgagtgaaagagaatttttctatttcatcttcccat

SEQ ID NO: 974072 - DNA, 120 bp, Artificial Sequence
  ENSG00000259663_16 (sequence is synthesized)
tgaccgaagcagaaaaattgaaccgaatctacgccccttgttctgattcctgctagaggaaaacagaaaatcatcccgcaggtctctttcagtccctggatggcgagcgcagcccctggg

SEQ ID NO: 974073 - DNA, 120 bp, Artificial Sequence
  ENSG00000259663_17 (sequence is synthesized)
aggccacacttagttctttattgtgaatctctcgctactcaagttcgttcgggaccagggcctcggatggcctcggttgcccgtaagtacgcgaaagaagaggtgaatccaatcgctggc

SEQ ID NO: 974074 - DNA, 120 bp, Artificial Sequence
  ENSG00000259663_18 (sequence is synthesized)
ctagaggatagtgatcagacaacccgaggattactaaacaaggggcggcggtgtccctgtctcatggggttggcgtggggcggggggtaggcagcaagatcctccaggctcctggatgca

SEQ ID NO: 974075 - DNA, 120 bp, Artificial Sequence
  ENSG00000259663_19 (sequence is synthesized)
aagagtgagaaagaaagcgcagcctctggcagcctgcttataaatgcagcctttcggaagatgaaacttgcagtcttaggttgtcctcctttatatccatgttccaatcctctgggcttt

SEQ ID NO: 974076 - DNA, 120 bp, Artificial Sequence
  ENSG00000259663_20 (sequence is synthesized)
cctcgaaatgaataaaattgtggaaatgaatgaatgagaatatcactttaattgtttcaaactcattgtcaagtcaccttttctgccatctgccagaggttcaatttgcgcttcgtgtct

SEQ ID NO: 974077 - DNA, 120 bp, Artificial Sequence
  ENSG00000259663_21 (sequence is synthesized)
acattccagaaaattgtaaggacgtttcctctgcatctgtctgccttgttggcagcgtgcggaaacgataactgcacagttattggtacagaatattttcatgactagcttaattctaaa

SEQ ID NO: 974078 - DNA, 120 bp, Artificial Sequence
  ENSG00000259663_22 (sequence is synthesized)
tatcaccccaaaatacagataccttacttcttagttggcattattcaagtttattcactttgtgctgcaaatgtttgaattagaaaacaggagagaactcccgcagcagagatgcacttc

SEQ ID NO: 974079 - DNA, 120 bp, Artificial Sequence
  ENSG00000259663_23 (sequence is synthesized)
tctgctctcctgtcagtcacagaacccacactgggtgattagccagaggggcgggctcctttgttgacttaagagttcaccaggcaagatggaacaattatcttgttgcctcttcttaac

SEQ ID NO: 974080 - DNA, 120 bp, Artificial Sequence
  ENSG00000259663_24 (sequence is synthesized)
tgtctattgttgacttacttctagtatgcttccattgtacaaaattctatccaaaattgaagaataaatcgtaagttaaaaaggtaataatgataataggtctactttaattttacctgg

SEQ ID NO: 974081 - DNA, 120 bp, Artificial Sequence
  ENSG00000259663_25 (sequence is synthesized)
ctggctttgttaatagatagtctatacctgacagtcatatacataagagatgtcgaaagtatatagcatatcatttatgtataattatatatgttataattatatgctaatgataccatc

SEQ ID NO: 974082 - DNA, 120 bp, Artificial Sequence
  ENSG00000259663_26 (sequence is synthesized)
aacgttacaaggtaattctatagaaaacttgaagttctatttttgatatatataacaccctctttacaagaaaataattgtcaggcttaaaaatgatattcaagggtgcttttatcaaga

SEQ ID NO: 974083 - DNA, 120 bp, Artificial Sequence
  ENSG00000259663_27 (sequence is synthesized)
gaacaaaatctgaagcttcatgaactaaaatcctatcaagcaaggtggtccataactaggttgctttgggttaatgataacttaaaatactcttgtttttgtaactttttgtgcacaaag

SEQ ID NO: 974084 - DNA, 120 bp, Artificial Sequence
  ENSG00000259663_28 (sequence is synthesized)
ttattattctgaaaccttcagtcacatcatttcagcaggaaataaaacctgaataagtcctaggcaatgtgtaaggaataagtatggtttaacttttgtagcttaacaatattgtgctga

SEQ ID NO: 974085 - DNA, 120 bp, Artificial Sequence
  ENSG00000259663_29 (sequence is synthesized)
tgtgctgatctttaaatgcaaatattaatatattgaaattaatataagtagataatttcatcacctcctaatttataaaaaatggaaaagcaaatataacaagctgctttactttctata

SEQ ID NO: 974086 - DNA, 120 bp, Artificial Sequence
  ENSG00000259663_30 (sequence is synthesized)
ttaaggacctattaccaaaatatagtaataataggattcatgtatgtgtaacacatatgtagctatcactctattattggagagttcagtctagttataaacacactgaactatcatatg

SEQ ID NO: 974087 - DNA, 120 bp, Artificial Sequence
  ENSG00000259663_31 (sequence is synthesized)
atgtgtgccattacttgaatgttgctaaattgatgctatgctatattttaagactctccctcctctttccagatacatgtactagcccaggaagatccctgcatcttgaacagtaatgct

SEQ ID NO: 974088 - DNA, 120 bp, Artificial Sequence
  ENSG00000259663_32 (sequence is synthesized)
gaatcggaaactatgtcgttacccataagtagaatcctcctgactttcacttaaatatcaggacccaaattattttatgtctcacttcagaacatagcacaatgtgctattttatcttct

SEQ ID NO: 974089 - DNA, 120 bp, Artificial Sequence
  ENSG00000259663_33 (sequence is synthesized)
tggcccagtctttagatttattctatactctccgtgttacaagctgcacaaaccattggtgacaatgagaaccactctatatagttttactgactttggattctcatataatgtatgaac

SEQ ID NO: 974090 - DNA, 120 bp, Artificial Sequence
  ENSG00000259663_34 (sequence is synthesized)
aaatataagccatatcttttaggtcttgacgatgtgtttcttccaattctgaagtgttcgtatagttgtccctaatgtcacgtgatacgtctcttcgttgtcctatacccgagccatagc

SEQ ID NO: 974091 - DNA, 120 bp, Artificial Sequence
  ENSG00000259663_35 (sequence is synthesized)
agatctgatgtgactttggatataccatgtgagggcaagcattttcttttaggctaggccatcaatgaggaagaaacatgagtagagctcttaaagcagaggaaaatgtaagtggatgga

SEQ ID NO: 974092 - DNA, 120 bp, Artificial Sequence
  ENSG00000259663_36 (sequence is synthesized)
aaaaaatcacacttttgaatatagtattggagaaagaattgagtgtgggtgactttattagctagcagaagaaagagtgaaaataggtgcttggctaagatgagaaaagtattcaatttt

SEQ ID NO: 974093 - DNA, 120 bp, Artificial Sequence
  ENSG00000259663_37 (sequence is synthesized)
gaaaacagaaagagaaagcttatttagaaaaagaaaacatggagtaaatgtcaagaggaacataaagaaatagggcgtggtgacccagttcattctgatagaataggcgtttaagggcaa

SEQ ID NO: 974094 - DNA, 120 bp, Artificial Sequence
  ENSG00000259663_38 (sequence is synthesized)
aacccagatccgaaataggtagtggatggaactagggaacagtagattcataattattttaacttggcatttaaaactttaaaatctgagttgaggggttttttttaatggtagaaaagc

SEQ ID NO: 974095 - DNA, 120 bp, Artificial Sequence
  ENSG00000259663_39 (sequence is synthesized)
agcttatttggcaataattttaaaaacttctgtcgcatctttaatcatactagactgttcacctttgtaaactcctcactatcagtaaactgtcagtacactgtcagtacagaaaataca

SEQ ID NO: 974096 - DNA, 120 bp, Artificial Sequence
  ENSG00000259663_40 (sequence is synthesized)
aactaaaagtactagaaatatcacaatacggatttctctttttaatgtaactaggtttatctaacaataagattcaggattcagaaaagaaaaaagaccagatctgagaaggaattttaa

SEQ ID NO: 974097 - DNA, 120 bp, Artificial Sequence
  ENSG00000259663_41 (sequence is synthesized)
aaaatggtttcaaagttttccagagttttgttagccattgccctttctgcagacgtggttatatcagaaagtgtaattcaagtatttgcactgcttacttaaaccacaataaaaagggaa

SEQ ID NO: 974098 - DNA, 120 bp, Artificial Sequence
  ENSG00000259663_42 (sequence is synthesized)
agatgttgtgaaaacactgcctcatgctcaaatttatgcaaaacaacttgaaaggctgccagcaacactgttgttatgttagcagttctgatctggcttcacattctcctagaggagttc

SEQ ID NO: 974099 - DNA, 120 bp, Artificial Sequence
  ENSG00000259663_43 (sequence is synthesized)
ttctgatgtgagaagaatgtaaacccaaaccacaagggagtattcattgtacctatgcacttgggaagagtttgggtgcccaaaatgtcagaaaaatcagatacagttgttctcttagaa

SEQ ID NO: 974100 - DNA, 120 bp, Artificial Sequence
  ENSG00000259663_44 (sequence is synthesized)
tctattctggaggtcacaaggtcagaatgcctgcacatgtgcataaaccaacatgcccataaaagcctgataggaggcagcagtgccccataaaaggtcacacccagccagaatccagca

SEQ ID NO: 974101 - DNA, 120 bp, Artificial Sequence
  ENSG00000259663_45 (sequence is synthesized)
acgttggaacagcgtctgttatggagaagaaatatgtgtctgacagcagcaacagcagcagcagagaaagatggattggggattaatcatggtaagatactgagcaaaagagacaacaaa

SEQ ID NO: 974102 - DNA, 120 bp, Artificial Sequence
  ENSG00000259663_46 (sequence is synthesized)
ttctgccaagcatgaatccttctctactcacaggtttcacaaaatacactcttcaaagtacaagctggttggccaaggtcaggttgatctttgctaggctaaagaagcagctgcggagtg

SEQ ID NO: 974103 - DNA, 120 bp, Artificial Sequence
  ENSG00000259663_47 (sequence is synthesized)
tttcccacggcagatggagaacacctaaggattttttactgttaaaaaaataataatttgtgtttcaacagtagaaatactcctgataacacacgtgatcaaaattgcattccccctcag

SEQ ID NO: 974104 - DNA, 120 bp, Artificial Sequence
  ENSG00000259663_48 (sequence is synthesized)
ttctcatgacattcactttggggtaataccatttaaaaaatattattggtagctgttagcctgtggctttccaggaccttacttttaatgtatttcccttgtctttctagatttaacata

SEQ ID NO: 974105 - DNA, 120 bp, Artificial Sequence
  ENSG00000259663_49 (sequence is synthesized)
ttgcctcatttcataatctcccttcattgagatcatttgtataagcaaaacatgttacatgacagtctttggaagactgaataggcgccactaaattgtgcagtttagagggctctaggc

SEQ ID NO: 974106 - DNA, 120 bp, Artificial Sequence
  ENSG00000259663_50 (sequence is synthesized)
aaggccacccagactgaaatggtagcccctctatatctgtcaaagcatctcaaataactctaagaaagatttactactttgacaatcataaagactctttagttttcaggaggttttgtt

SEQ ID NO: 974107 - DNA, 120 bp, Artificial Sequence
  ENSG00000259663_51 (sequence is synthesized)
tagttttgttggttggttatttaatgccaaagctttctgtaattgatttttcctgcttctttacccatttgtaccattatgaagatttctataataagcatgccaataataagaaaaaag

SEQ ID NO: 974108 - DNA, 120 bp, Artificial Sequence
  ENSG00000259663_52 (sequence is synthesized)
aaggaaagaaggagttgaaaaggaaataaagatgataaacctaaaaataaatgatacacaatggaatactattcagcaattgaaagaacaactgatacatactttaacatgggtgggtga

SEQ ID NO: 974109 - DNA, 120 bp, Artificial Sequence
  ENSG00000259663_53 (sequence is synthesized)
gtctcaatatgctgagtaaaagaagccagaacaaaaatggacactctataattctacttatgtaaaactctaggatatacaaactagtgtttgacaaactgatagtgaaagaaatcagat

SEQ ID NO: 974110 - DNA, 120 bp, Artificial Sequence
  ENSG00000259663_54 (sequence is synthesized)
gagtggtgactgtgggatggagtaggcgaagggtagatgggaaaggcagagattaaaaagggactagaggaaatttttggaagtgatagacatattccttaatttatattccttattttt

SEQ ID NO: 974111 - DNA, 120 bp, Artificial Sequence
  ENSG00000259663_55 (sequence is synthesized)
attgtggtagtttaatgggggtatgctgtggcaaagcttaccaaattatatattttaaatatgggcagttcattgtgtatcatttatacctcaataaagctattaaaaatagaaaagaaa

SEQ ID NO: 974112 - DNA, 120 bp, Artificial Sequence
  ENSG00000259663_56 (sequence is synthesized)
cattggctgcagggcgcgcggcgcagctgttctgattatcatatttcagcctcgccgccgctgagcgccactgaccgctcggcgagccagcgggagaggattagggctcccgaggcaact

SEQ ID NO: 974113 - DNA, 120 bp, Artificial Sequence
  ENSG00000259663_57 (sequence is synthesized)
tgctcggggctcaggccgttctcccccgaagctcgggctgccgggctgttctggctctggcctccctctcctcctcttcctcttccttctgtcccctcccgcgttccttcccggccgcgc

SEQ ID NO: 974114 - DNA, 120 bp, Artificial Sequence
  ENSG00000259663_58 (sequence is synthesized)
cgcctgcgccctcgcctcctgtggcgctgctcctccgccctgcgctcctggggtccccgcagtccggctggccgcgttgcgcgcggggctcactttctgccgccggtggcgagtggctga

SEQ ID NO: 974115 - DNA, 120 bp, Artificial Sequence
  ENSG00000259661_0 (sequence is synthesized)
caggtaggcagttttattgtctacaaataatgacaattataattcttccttatgttcctcatctggcttgttgcaggggttagtagtgccgggacactgctgaataatagcttgcccttg

SEQ ID NO: 974116 - DNA, 120 bp, Artificial Sequence
  ENSG00000259661_1 (sequence is synthesized)
gctagtttctgactttaatgggaatgcctgtggcgtctgactctttagaatgccatcactgttggtttctgaaacagacctttatctagattagggtgtttctttccagacttaatttac

SEQ ID NO: 974117 - DNA, 120 bp, Artificial Sequence
  ENSG00000259661_2 (sequence is synthesized)
taagagttttaataagggatggattttaaatcttacgaaataccttttcagcatctatagagctatcataaattcttccctattaattgaagctgaaatgaaggctcctgcacagccata

SEQ ID NO: 974118 - DNA, 120 bp, Artificial Sequence
  ENSG00000259661_3 (sequence is synthesized)
tgaggcttcaaggtctgcctgctaggcgtggtgctgaacgccttctcaagctgcccaagcacatggagtcttggaggctttcctttccagagaaagaaagtaggaccaatccccactccc

SEQ ID NO: 974119 - DNA, 120 bp, Artificial Sequence
  ENSG00000259661_4 (sequence is synthesized)
tgccataataagaaagagcccttggggacagcagcatacagagcacagaagccaaagagaattcaggcggcacttactgcaaagccatcacagaaagcagcgaggccttcagactcctag

SEQ ID NO: 974120 - DNA, 120 bp, Artificial Sequence
  ENSG00000259661_5 (sequence is synthesized)
gagaaacagtgattccttctactgctccatccccactgctaactctgggtccccacccctgtcctcccagagtcactctgatcctgctcatcacaccaggacatggagtctctacataac

SEQ ID NO: 974121 - DNA, 120 bp, Artificial Sequence
  ENSG00000259666_0 (sequence is synthesized)
cccaggatggacatggcacccacattggcaccctctggtcttgtccccacaggacacccctctgtcatggtgatcaagacggctagggggcagggaaggcgagaagagggaggagacact

SEQ ID NO: 974122 - DNA, 120 bp, Artificial Sequence
  ENSG00000259666_1 (sequence is synthesized)
ggtgtgactcatagcaaagtaagagcttcttccctcctctctgcaccccaaatacggctgcattagaactaagcaagctattgataccacactgacctaaaaataacaaatggcgaagtc

SEQ ID NO: 974123 - DNA, 120 bp, Artificial Sequence
  ENSG00000259666_2 (sequence is synthesized)
agtggcctaggaggctggagaatcttaacaccaggtggcccagggcatacccagagcttctggcaaccgaaatctggaaaaagtggtaacagttccatctggtcaaatgacaaaagccta

SEQ ID NO: 974124 - DNA, 120 bp, Artificial Sequence
  ENSG00000259666_3 (sequence is synthesized)
aatttgtatcaagtagtggctgataacagtcaatttctacctagaaggcactacgttggatctaggtgttcagggttctttaagtcatgctctgaatgaataagcaatgattccaaagta

SEQ ID NO: 974125 - DNA, 120 bp, Artificial Sequence
  ENSG00000259666_4 (sequence is synthesized)
tcaaatgaagaacaagctcatacaaactcaagagtgcttgatcgatgagcaactccagcaagtgaagacatcacagtctggggcagtgcatggctgacccctttacctgttgaactagct

SEQ ID NO: 974126 - DNA, 120 bp, Artificial Sequence
  ENSG00000259666_5 (sequence is synthesized)
gctttggcccttgtttcaagggaaaagggctctagaggaattgggggtttggtcctcttaaggtctgaggtctttgggtctctgggtttggtcaggcccttagggactgtgggcttaggc

SEQ ID NO: 974127 - DNA, 120 bp, Artificial Sequence
  ENSG00000259666_6 (sequence is synthesized)
tgagcaagggtagccttgggacatgtctcaaactctggtgaagtcaagaaaggccacagagtggaaaatccagaatctacatcccattcgtgccagagccctgttccatccactctctga

SEQ ID NO: 974128 - DNA, 120 bp, Artificial Sequence
  ENSG00000259666_7 (sequence is synthesized)
gcagatgtctccctacgaaggcccaagggactcctgaaaagcaggcacgaatagaccgcagagttaaacagtgcaagggcatgctgtggacccacccactttgggtaaatcttttgactt

SEQ ID NO: 974129 - DNA, 120 bp, Artificial Sequence
  ENSG00000259666_8 (sequence is synthesized)
ctctgtgaatcagaaaatcaatgggatagactatgcctcacagggccaccctagggatcgaataagatgatggataccaaagtgcttcattaacaataaagtgccaaaaagagttactac

SEQ ID NO: 974130 - DNA, 120 bp, Artificial Sequence
  ENSG00000259666_9 (sequence is synthesized)
acgttgcacattccccttctctatgaaaattggtgccaccattgctaactgatggatggacaatgaggagactgagtcccaagatcacccagatacaataataattgtagtattaacata

SEQ ID NO: 974131 - DNA, 120 bp, Artificial Sequence
  ENSG00000259666_10 (sequence is synthesized)
caaagtaagagcttcttccctcctctctgcaccccaaatacgatgaggagactgagtcccaagatcacccagatacaataataattgtagtattaacatacaagttaccattgaaggagc

SEQ ID NO: 974132 - DNA, 120 bp, Artificial Sequence
  ENSG00000259666_11 (sequence is synthesized)
accggctgcgttccaggcactgtgctagacacttcacatgcggtgaacctgtgaggcagatccatgactggcaacattgtacagaggggaaaactgaggctcaaagaaggcaagtcacta

SEQ ID NO: 974133 - DNA, 120 bp, Artificial Sequence
  ENSG00000259666_12 (sequence is synthesized)
ggcaatgtccactcacacaaccatgcacatggccactgtgtcagctgcatgccttccccactccccagctggctgaaaactggtggagctgagatctgaacccacatttatccatgttct

SEQ ID NO: 974134 - DNA, 120 bp, Artificial Sequence
  ENSG00000259666_13 (sequence is synthesized)
tactccaaggctgggctctactcccatgttgactgctgctgccaagagaactttaaacagcagttctagccacagcaggacccagcctgatcctggccccaacctgtggccaaatgggac

SEQ ID NO: 974135 - DNA, 120 bp, Artificial Sequence
  ENSG00000259666_14 (sequence is synthesized)
agagatccaggcccagcttgtctcagcctctggcctgacctctctgggcctcagaggccttgctatgaaagggggagctgtaggtagaataaatgaagtggcactgaggccccccgggac

SEQ ID NO: 974136 - DNA, 120 bp, Artificial Sequence
  ENSG00000259666_15 (sequence is synthesized)
agaaacggggctgtggctgtcccagcactgtgggttcagatagcagctggacaaacctgcgacagaggatgtcagaggtcctgcccagcctgataggctgaggccagctgggatgctggg

SEQ ID NO: 974137 - DNA, 120 bp, Artificial Sequence
  ENSG00000259666_16 (sequence is synthesized)
aagaactagacactggggtcagacactcagggtgcacatcccagggaagccacctgttggcggagtggtcttgggacacccctctgtcatggtgatcaagacggctagggggcagggaag

SEQ ID NO: 974138 - DNA, 120 bp, Artificial Sequence
  ENSG00000259666_17 (sequence is synthesized)
tctctgggctttgtcctgagacatccggaaaggaaagggcagtcagacagcagccacagggagagggtggtaagtggggaggactttggtatcaggtgtggatagctggggccctcagga

SEQ ID NO: 974139 - DNA, 120 bp, Artificial Sequence
  ENSG00000259666_18 (sequence is synthesized)
cagggcatacccatttcccaagggtcaccccttgtgcaccctgctctccagggctggagacctcaggcaggcccctgattctctgggaccccagtctgctccctgctgccctgctaaaca

SEQ ID NO: 974140 - DNA, 120 bp, Artificial Sequence
  ENSG00000259666_19 (sequence is synthesized)
gagttcccaaagagagagacaacaggaacccaggccttggtctcaaacctgcagccacacaccccagtggcctccaggaatcctgcacacacatcccagaacccctcagctctgcatgta

SEQ ID NO: 974141 - DNA, 120 bp, Artificial Sequence
  ENSG00000259666_20 (sequence is synthesized)
ctattgtgggttctggtccgtggaacccaaagtccaaacatagggaagtgcctttcagacacatccaagaaatgacccttaatcctccaagctaagagagatcatctggactagacgtgg

SEQ ID NO: 974142 - DNA, 120 bp, Artificial Sequence
  ENSG00000259666_21 (sequence is synthesized)
tagtgacataggctagcagtctgtattgtctgcaaacccagaactgtccttggctggccaatgtaaatgtgttttaatagccacacacacggtcatataaatgggaatgttctaggtaaa

SEQ ID NO: 974143 - DNA, 120 bp, Artificial Sequence
  ENSG00000259664_0 (sequence is synthesized)
gcacatttctctcctttgctgatagggcctgcgtgctgatagttgattcagtgaatatatgtagcagtgatagctcatgggctccagaggtcagatatcttattctctaggctgaaaccc

SEQ ID NO: 974144 - DNA, 120 bp, Artificial Sequence
  ENSG00000259664_1 (sequence is synthesized)
ttgttgctttaaggaaacaggattttaataggaatcacatgcagattgactacagggagccaagcggtagtggaagaagcaaagttggcggttttggagacggacgtctatctatccaca

SEQ ID NO: 974145 - DNA, 120 bp, Artificial Sequence
  ENSG00000259664_2 (sequence is synthesized)
gtgggacaaaaatgaaggttattgaaaagaatcatgcttggtggaagaagtaattacatttttttttcaaatctcagaggaataatgcttttatatttcctgcgatgacccaatttgcac

SEQ ID NO: 974146 - DNA, 120 bp, Artificial Sequence
  ENSG00000259664_3 (sequence is synthesized)
tacgatatgctcccttaaatgtaagtgtgcggacaccctcgccctgtattgtttttcactggtaaagatgccctgtcgtacctcagattaatttctgtactggtctcccaatacacaaaa

SEQ ID NO: 974147 - DNA, 120 bp, Artificial Sequence
  ENSG00000259664_4 (sequence is synthesized)
gcaactgcaccatggttgtccgtttttacaatgatgagtaaaaaatggcagacttggccagttgtccccccaaaaaaagtcagagagtcaagtagctgcagctataaatcatcttctcaa

SEQ ID NO: 974148 - DNA, 120 bp, Artificial Sequence
  ENSG00000259664_5 (sequence is synthesized)
attgtgtgattcagggccactgacctgtcttgagcgggaaggaagtggcctgagtgctccaaaggagagctggggctctagcttcagcagccaggtgctggttaattggactggaagaaa

SEQ ID NO: 974149 - DNA, 120 bp, Artificial Sequence
  ENSG00000259664_6 (sequence is synthesized)
gggtttcttactcctagtccttgttctccagccttactgtatatgcatctatctctagaactctgctatccacagctatacaggaacaagcttcagaaatatcttttctctacaatgaga

SEQ ID NO: 974150 - DNA, 120 bp, Artificial Sequence
  ENSG00000259664_7 (sequence is synthesized)
ggtagtattttaaaaactgtattaaatatttgttaaaatgtgtgtatctagcaacatgattgctaagaaagactccaaaatagtgtttaatacctctgagccattctttgattattttta

SEQ ID NO: 974151 - DNA, 120 bp, Artificial Sequence
  ENSG00000259664_8 (sequence is synthesized)
ttaaaatgcttaaagcactttctggaaatttatttgtgtttgatatagataggaactcactgtgcataaaactaagcttagttttgaaatgtcaaacaaaccttctatgacctttggctt

SEQ ID NO: 974152 - DNA, 120 bp, Artificial Sequence
  ENSG00000259664_9 (sequence is synthesized)
gcagtgaggtaaacatttatttgggaaatacgtatgtgtgattgcttctcgctattttggctaagatcaagtgtaggaaatatatgtatgtcgcctgttccagtttacttacaaacaaat

SEQ ID NO: 974153 - DNA, 120 bp, Artificial Sequence
  ENSG00000259664_10 (sequence is synthesized)
tcttgattttcggaaaaaaatgatcacgcattgtgtcatttagcatgttagaaggccctaatcttaactcttttcaacctccaaaaaagatgggtgcttaaacaatgttaatgaggaaaa

SEQ ID NO: 974154 - DNA, 120 bp, Artificial Sequence
  ENSG00000259664_11 (sequence is synthesized)
taaatgaagatgttaatgaggtttctacctttcttaaggaaatgtttagatttttatttcttatactcattttctcatactagctatggaaataatgatgaggataatttggggtgattt

SEQ ID NO: 974155 - DNA, 120 bp, Artificial Sequence
  ENSG00000259664_12 (sequence is synthesized)
aagaaaagagaatttgcttctgtttcactaacatggacttctgacactttacataaatgatcataatgttgatgtttagtggttaatggacatttatggcctctgagaaggcctgtgcca

SEQ ID NO: 974156 - DNA, 120 bp, Artificial Sequence
  ENSG00000259664_13 (sequence is synthesized)
ccagataactcatgctcaagaacacgactgtagatttgagtaatcttgtaatgaatcattaggtataaaaagacccttaatattgctctcttttctttctttattgtactttaagttctg

SEQ ID NO: 974157 - DNA, 67 bp, Artificial Sequence
  ENSG00000259664_14 (sequence is synthesized)
accgcatacattagatatttgtcctaatgttctccctcccctggccccccacccctggacaggtccc

SEQ ID NO: 974158 - DNA, 120 bp, Artificial Sequence
  ENSG00000259664_15 (sequence is synthesized)
ttaagaccgcatacattagatatttgtcctaatgttctccctcccctggccccccacccctggacaggtcccagtatattttgttccccttgctgtgtccatgtgttctcattgttcaac

SEQ ID NO: 974159 - DNA, 87 bp, Artificial Sequence
  ENSG00000259664_16 (sequence is synthesized)
acttattttttatggctgcataatattccatagtatttatatgccacattttctttagccattctattattgatgggtatttgggtt

SEQ ID NO: 974160 - DNA, 120 bp, Artificial Sequence
  ENSG00000259664_17 (sequence is synthesized)
ccacattttctttagccattctattattgatgggtatttgggttggttccatctctttgctattgtaaatagtgctgcgataaacttacgtatgcatgtgtctttatagtggaatgattt

SEQ ID NO: 974161 - DNA, 84 bp, Artificial Sequence
  ENSG00000259664_18 (sequence is synthesized)
cactgtcttccacaatggccaaactaatttacacctccaccaaccatgtaaaagtgttcctatttctctacagccttgccagca

SEQ ID NO: 974162 - DNA, 120 bp, Artificial Sequence
  ENSG00000259664_19 (sequence is synthesized)
gtcttccacaatggccaaactaatttacacctccaccaaccatgtaaaagtgttcctatttctctacagccttgccagcagctgttgttttctgactttttaataattgccattctgact

SEQ ID NO: 974163 - DNA, 120 bp, Artificial Sequence
  ENSG00000259664_20 (sequence is synthesized)
ctttaatgaccagtgatgatgagtttcttttcatatgtttgttgtctgcgtaggtgtcttcttttgagaagtgcctgttcttcttcactcactttttgatttttttttcttgtaaatttg

SEQ ID NO: 974164 - DNA, 76 bp, Artificial Sequence
  ENSG00000259664_21 (sequence is synthesized)
ttcttcactcactttttgatttttttttcttgtaaatttgtttaacttccttgtaatttctcccattctgtaggtg

SEQ ID NO: 974165 - DNA, 66 bp, Artificial Sequence
  ENSG00000259664_22 (sequence is synthesized)
gcctgttcactctgatgctagtttcttttactttgatttcctttggtgttttagtcatgaagtctt

SEQ ID NO: 974166 - DNA, 120 bp, Artificial Sequence
  ENSG00000259664_23 (sequence is synthesized)
ccaggtaatgtgattggtactaccactgatgtatggaacccacagtagacaatgtcatgttggattctcaaggcaaagtggaactggggtttctgttggtgattggcgaggaacagattg

SEQ ID NO: 974167 - DNA, 120 bp, Artificial Sequence
  ENSG00000259664_24 (sequence is synthesized)
cactttcctgaactgaaatctaatgaatgccacaaagtgaaaataaactggagacacttcaaaaaagaaaaagaaaagaaaactcacttcaagaaaccgaagctttcctaccccccttct

SEQ ID NO: 974168 - DNA, 120 bp, Artificial Sequence
  ENSG00000259664_25 (sequence is synthesized)
tttcccctcacttgcagccaactaagctccccacacattctgatcgtctccctgcacagtgtctgtggtggtgacaactgattcatgtgttcatttgcatatcccccggtgccagcagca

SEQ ID NO: 974169 - DNA, 120 bp, Artificial Sequence
  ENSG00000259664_26 (sequence is synthesized)
gaatacagaacgggcctcctgtgccggcagccaacacagcactggcaaatcagggagctgtcagaaacagctgtccattaacggagtttgtggaaacaaccaggagctgtttgaaaatgc

SEQ ID NO: 974170 - DNA, 120 bp, Artificial Sequence
  ENSG00000259664_27 (sequence is synthesized)
taggtggtagaatttaattggagtagcaactgttcaaaattaagattaaaaggaccagtcagtcaacgtggatttcgtgacaccttaaaaataacgtttcaggtttgattaatgctgcaa

SEQ ID NO: 974171 - DNA, 120 bp, Artificial Sequence
  ENSG00000259664_28 (sequence is synthesized)
cgccaaccaaatgtccaggtcctattccatggaacctatgaacaggttgtcccacattgcaaaagggacttcacagatgtcggtttcaaaaggactggttgaaaactaagatcttaaatc

SEQ ID NO: 974172 - DNA, 120 bp, Artificial Sequence
  ENSG00000259664_29 (sequence is synthesized)
gactggttgaaaactaagatcttaaatcaattcatcgtgttgggaatggagcaggatagagatcgttcctgaaggccatattctaaactttgtctggtaccaaaacagagatatagatca

SEQ ID NO: 974173 - DNA, 68 bp, Artificial Sequence
  ENSG00000259664_30 (sequence is synthesized)
agatatagatcaatggaagagaacagaggcctcagaaatagcgctgcgtatctaaaactatctgatct

SEQ ID NO: 974174 - DNA, 120 bp, Artificial Sequence
  ENSG00000259664_31 (sequence is synthesized)
ctgctgtctttggagagaatggccaggaggcaaggaacacaagcagcccctagaagttggaaaagaaacaggagtgataagggggaactgaggactaaatttttctaaaggtcttcctaa

SEQ ID NO: 974175 - DNA, 120 bp, Artificial Sequence
  ENSG00000259664_32 (sequence is synthesized)
ggttcctggaagaagtcacgtttataagccagaacttacatatctttctgctgtcccaaaatttttaaacaaaactactcttccttaaccaactgcaaatcagaaaatcttggaatctac

SEQ ID NO: 974176 - DNA, 120 bp, Artificial Sequence
  ENSG00000259664_33 (sequence is synthesized)
ttatgacctgtaagcctccgcttcaagataccccacctttttagaccaaagcaatgactaacctccatgtattgaggtatgattttgcctgtaacttctgccttcttgaaagttacccat

SEQ ID NO: 974177 - DNA, 120 bp, Artificial Sequence
  ENSG00000259664_34 (sequence is synthesized)
acctttaaagacccttgcttgcaagccactgagaagatgggtctaaagtgtgcattgccccattctccttgcctggttccctgcaaataaatgccctgctttctgcagtggcaaacctca

SEQ ID NO: 974178 - DNA, 120 bp, Artificial Sequence
  ENSG00000259664_35 (sequence is synthesized)
taatgctaagaggttgctccatataaactgcctcggaaagatgaacctgagggaaaccagtaatactcccgtcatcctgcagaagtattaaggactctagaggttagataatatcttcaa

SEQ ID NO: 974179 - DNA, 120 bp, Artificial Sequence
  ENSG00000259664_36 (sequence is synthesized)
atacaagaggcaacattttcttaaatccacatgtgtacatggccccatctgcaactgtacaagagggtaactgatgagattgtaagatctcctttgaagggacaactttacttgcaggca

SEQ ID NO: 974180 - DNA, 120 bp, Artificial Sequence
  ENSG00000259664_37 (sequence is synthesized)
aacactctctgtatgatggcttatgatactcagacacagtcactaaatattttgatcaacatgtgtgtacacaaagagcgggggactcacttctggcctgctggagaaaactggttactt

SEQ ID NO: 974181 - DNA, 120 bp, Artificial Sequence
  ENSG00000259664_38 (sequence is synthesized)
tgttcttctctcaaatttagccctctagtcaccctccctgcttggttggtgtatctcaataatccaccaaagtagcaaaatacgtttatgtaggtatatttgtgatttgcctaatggctt

SEQ ID NO: 974182 - DNA, 120 bp, Artificial Sequence
  ENSG00000259664_39 (sequence is synthesized)
gttttattgggttttctaactccaaatacttttaccaacattttatttcacctccaattttcctctacccccgtaaataggccatattctaaactttgtctggtaccaaaacagagatat

SEQ ID NO: 974183 - DNA, 120 bp, Artificial Sequence
  ENSG00000259664_40 (sequence is synthesized)
taagttaaggccattgagacgaatgattctggattgtctgttgggcccaatgtgatcaaaagtttccctagaagagctagagaagatgcgataatggaagcggaatcaaagacagatttg

SEQ ID NO: 974184 - DNA, 120 bp, Artificial Sequence
  ENSG00000259664_41 (sequence is synthesized)
ttgggaatggagcaggatagagatcgttcctgaagataaaaatacatgcaagcatatgcacttgtgcatacatagtgctgcttaatgaacatatgtcattgtggaaggagaggagaaatc

SEQ ID NO: 974185 - DNA, 120 bp, Artificial Sequence
  ENSG00000259664_42 (sequence is synthesized)
gccatctttgatcaatgtggctaaagcttgtgaactgactcttctactcctggtacttacttataccattttttcccaccaaggaacaaccttaatggattttagtagaatcgcctcctt

SEQ ID NO: 974186 - DNA, 120 bp, Artificial Sequence
  ENSG00000259664_43 (sequence is synthesized)
tcactcttagtggtgccattcccactctgtcatagacgagcagccttattagtcacactcaggaccagtactagcaacaatctgtcactgtggccgacggcacgcatcatccatgataac

SEQ ID NO: 974187 - DNA, 120 bp, Artificial Sequence
  ENSG00000259664_44 (sequence is synthesized)
taaacattcaccccaagacctgatgatttgtcttggcactgcatcctgtagcacaaagcaacagaaaccagtggttatgcctgtcctttctatcttttattctttctttctttttttttt

SEQ ID NO: 974188 - DNA, 120 bp, Artificial Sequence
  ENSG00000259664_45 (sequence is synthesized)
ttttttttggtcatagctcaaagcttattgagtgtaaaagacattttccctttaaaaaatgcttactcgatgttatctccttcacgctctgggtcgagctcatttggtgaagggtcatca

SEQ ID NO: 974189 - DNA, 120 bp, Artificial Sequence
  ENSG00000259664_46 (sequence is synthesized)
cacactccctttgtgataatgtcagtgagtcaatagagtggattggggatttcggtttctatctgaattttgacgatctgcttttcttgcaatatttaacaggaaaatatggattgcagc

SEQ ID NO: 974190 - DNA, 120 bp, Artificial Sequence
  ENSG00000259664_47 (sequence is synthesized)
ctgtgcttgcctgccaaagtgactcttccattttattatcgtttattttcctttatttctaggatgagttctacaatagacatagacagggaatagaattagtgtgagccaatcagatcc

SEQ ID NO: 974191 - DNA, 120 bp, Artificial Sequence
  ENSG00000259664_48 (sequence is synthesized)
tactagcataagcaacccccataaggtgatcatgatgtacaacgccaatgctagtactcttgggtgcaataatttattgcaatcataaaatgtatgtaaaataaataatatttttaataa

SEQ ID NO: 974192 - DNA, 120 bp, Artificial Sequence
  ENSG00000259664_49 (sequence is synthesized)
ttggaaaagattctccttatttactcctgggttgaaagaacatgaaagttactgcaaaagcatttcaaacatcatcatgatagagggaatcaaacaatttaattaagagtgaaacatcaa

SEQ ID NO: 974193 - DNA, 120 bp, Artificial Sequence
  ENSG00000259664_50 (sequence is synthesized)
tgtaaaatgctgatgatttcatccttgaggtgctgatggttcatattagtatggaaagaatgcagaaacaggagtgataagggggaactgaggactaaatttttctaaaggtcttcctaa

SEQ ID NO: 974194 - DNA, 120 bp, Artificial Sequence
  ENSG00000259664_51 (sequence is synthesized)
ggtggaagaagtaattacatttttttttcaaatctcagaggaataatgcttttatatttcctgcgatgacccaatttgcactacgatatgctcccttaaatacatttagctggaaacttt

SEQ ID NO: 974195 - DNA, 120 bp, Artificial Sequence
  ENSG00000259664_52 (sequence is synthesized)
gaacttttatcctctgcatccatacaatacgcagcctttgactctcgggagtgagcctgatcaggcctggagttaggagagctgggctctagactggatcttctccaggaaatctggcct

SEQ ID NO: 974196 - DNA, 120 bp, Artificial Sequence
  ENSG00000259664_53 (sequence is synthesized)
tggggtcttccctgtgagatcatgaaagagtagatgatttcaagatgattgtttctagaaaaatctttctagctctaggattcttcacctctgtgcctgcatgacttgaatttactgaca

SEQ ID NO: 974197 - DNA, 120 bp, Artificial Sequence
  ENSG00000259664_54 (sequence is synthesized)
atttacccaatgtttggtgtaggaaaagtgcattttgtccaaggtgacccaagagtgctatggcatctttacttggtaagatgccttctcacgtttgaaaatcttttcctgtcatgaatg

SEQ ID NO: 974198 - DNA, 120 bp, Artificial Sequence
  ENSG00000259664_55 (sequence is synthesized)
cagtgttgctttgaatgtgcacgatttcccactgctgctgtttaaatgataacagcaggttcaagtgatttgcaaactgtcaggaaaatgacctcagacaccccagttattttcagtgac

SEQ ID NO: 974199 - DNA, 120 bp, Artificial Sequence
  ENSG00000259664_56 (sequence is synthesized)
aggctaaagccacaacagaattttaaataaagcaggataaacccaaactgactaccttccccacttctgacactttgaatggttaaggacccttcagcctggctccagttcctgttctgt

SEQ ID NO: 974200 - DNA, 120 bp, Artificial Sequence
  ENSG00000259664_57 (sequence is synthesized)
tagaaacaccacattacctgcagaggggtgcccaagaactgacatattctaaggagaaaaatgtattataacatttgctttaaatctcaattattaatctcctctcctaactatctgaag

SEQ ID NO: 974201 - DNA, 120 bp, Artificial Sequence
  ENSG00000259664_58 (sequence is synthesized)
ggcctctctcctccctcacccccagtttattccagatattttcaacacacttaaacacaatttggaattattttgtttctttgttttattttttattttactttaagttttgggatacat

SEQ ID NO: 974202 - DNA, 120 bp, Artificial Sequence
  ENSG00000259664_59 (sequence is synthesized)
ataggtatacatgtgccatggtggttttcctgcacctatcaaacctgtcatctagattttaagccccgcatgcattaggtatctgtcctaatgctctccctccccttgtcccccacttcc

SEQ ID NO: 974203 - DNA, 77 bp, Artificial Sequence
  ENSG00000259664_60 (sequence is synthesized)
ttttaagccccgcatgcattaggtatctgtcctaatgctctccctccccttgtcccccacttcccgaaaaatctgac

SEQ ID NO: 974204 - DNA, 120 bp, Artificial Sequence
  ENSG00000258131_0 (sequence is synthesized)
tcggttggaggcgcagcggccccgcgagcagacgcgcagtgtctttcagatttccaagtctcttctggtgtgctgaggtatatttcaatgtcttctctccgctgaggatgacagggagga

SEQ ID NO: 974205 - DNA, 120 bp, Artificial Sequence
  ENSG00000258131_1 (sequence is synthesized)
ctcacgtagccacattggcaatgttctttcagaagcactatttgggaaccttggagcctctggaagatgaacaccataccatccacaatgtcaggatgaaagtagcttcacttccctggg

SEQ ID NO: 974206 - DNA, 120 bp, Artificial Sequence
  ENSG00000258131_2 (sequence is synthesized)
gctgattagttctcatttccacacttagagagccctctagaattggaatgggtataatagtggtattcagcccattcaaatgtcgattaattagcaagtattctgtgcacttatactact

SEQ ID NO: 974207 - DNA, 120 bp, Artificial Sequence
  ENSG00000258131_3 (sequence is synthesized)
atattctcgtgtgttaagtaagcttgtatacacataataacctccagcaaaattgacctgtgaaggagaggttggttagaaactgaattccacagtagccacatgtgtccaaagtatccc

SEQ ID NO: 974208 - DNA, 120 bp, Artificial Sequence
  ENSG00000258135_0 (sequence is synthesized)
ataagcttctgaacaatgatgaggatggtggcatttgacattcggtcaagggatggagcaggaaggcttgagatacacaacccatatctttaaggcactttccatctggtggagaaacgg

SEQ ID NO: 974209 - DNA, 120 bp, Artificial Sequence
  ENSG00000258135_1 (sequence is synthesized)
aaatgtatgcacatagcggcacatgcgatggcaacagaacccagggcctgtgccaggcctaccaaggagtgagctgatgcggctgagagttttggaatgtgaggctgggatgacaagcct

SEQ ID NO: 974210 - DNA, 120 bp, Artificial Sequence
  ENSG00000258135_2 (sequence is synthesized)
ggggcctggctcttctgtgctcagtgaggactgctccagcctcagccccaactcccagcaaagcccaggtgtggggagcaggggaggtgagacagagatgaggagggacagaaatgtggt

SEQ ID NO: 974211 - DNA, 120 bp, Artificial Sequence
  ENSG00000258135_3 (sequence is synthesized)
ttcacacctgacccagcaattcctgcagctgggaagcatggcgactcagaatgccgatgcctgcccgaggcttcggcttcttgtcccgcgttttggagaccatatctggagaggcacagt

SEQ ID NO: 974212 - DNA, 120 bp, Artificial Sequence
  ENSG00000258135_4 (sequence is synthesized)
gtgaggggcatggggaggcaggagtaggactgcagcagagaggggttttgcaaccagcctctggctggtcagcacaggagtgtcaggttctttgctgtggggctgctggggatgagagag

SEQ ID NO: 974213 - DNA, 120 bp, Artificial Sequence
  ENSG00000258135_5 (sequence is synthesized)
gcaggaagaacccctgtgaagaacagtgagaagggtaggggccaggggcctgcagggtgatggcaggctttgaagggtgtgaaaggctgccacagctgaggcccggctatacccaggagg

SEQ ID NO: 974214 - DNA, 120 bp, Artificial Sequence
  ENSG00000258135_6 (sequence is synthesized)
gagcaagcagcctgatgcctgagctggcctggcccattcacctcttgtggcccaacctgagaaccttcttactgtgggtgagctgggccttgtctagcccctgcctctgcgcccccatca

SEQ ID NO: 974215 - DNA, 120 bp, Artificial Sequence
  ENSG00000258135_7 (sequence is synthesized)
ctggcctcaaaagcacaggttctctcttttcttgcacggtgaggaggcagagagtggtgcaggctgggtgtgcgggtctgtgtgtcagggggttattggtgagaatctggggagaggcgc

SEQ ID NO: 974216 - DNA, 120 bp, Artificial Sequence
  ENSG00000258135_8 (sequence is synthesized)
ctggatagctctgattctacccacctaggaggtctgagaccctcccaactcctccccgactcccagcctcagtgttgtcgctgaaaccctcttgagctgatggtgcctacgcggggtcaa

SEQ ID NO: 974217 - DNA, 120 bp, Artificial Sequence
  ENSG00000258135_9 (sequence is synthesized)
tcgtgttagtcactcaacctctttggccttgtgcttccacatctgtaaaatgagaagttgcctccgcccacacctttgcccctccccaccgccaacccacacttgccccagacagagctg

SEQ ID NO: 974218 - DNA, 120 bp, Artificial Sequence
  ENSG00000258135_10 (sequence is synthesized)
gcaacaaaagcagactgcggagtgggagggactgccatggcgtgggcctggaaggaggagagaggcaatgcctgcggccagaccttcgctcccctcagagcagccctgaaaatattcccg

SEQ ID NO: 974219 - DNA, 120 bp, Artificial Sequence
  ENSG00000258135_11 (sequence is synthesized)
gctggtctttgcctctccacggtcacagcagcctcgtgatgaagatggcagggggaattctacagagaggacaggacttccttccatcttctcctgctcatagctgctgcctgggatcca

SEQ ID NO: 974220 - DNA, 120 bp, Artificial Sequence
  ENSG00000258135_12 (sequence is synthesized)
ctcatccccttcttctctccttggcctcactctgcagtgggggtgctcactgactccagggttcagccactgtctgcatgctaatgagctaaggagtcccacacctccaccaccagccca

SEQ ID NO: 974221 - DNA, 120 bp, Artificial Sequence
  ENSG00000258135_13 (sequence is synthesized)
gcactcaactccatgggccccagggctgggccccagggcgggaagggatgtggtcctccccctgaacacagtgcatggtgcctcctggggctgcgcagggaggaggccttgcccggacct

SEQ ID NO: 974222 - DNA, 120 bp, Artificial Sequence
  ENSG00000258135_14 (sequence is synthesized)
ctctcctgggcaccaggaacctctggccaactgcctacaggacatctccacctggatgtcctacaggccctcaaactcaacctgacccccgcccaagcacctcagctcctttcccttttc

SEQ ID NO: 974223 - DNA, 120 bp, Artificial Sequence
  ENSG00000258135_15 (sequence is synthesized)
ataatggtatcattctcccagggactcagtcttcacacctttgccctttttgatgccccttctgcctttctctcacttctactgtcttcccaagtcctgtcggtcctgtcccatgctgtc

SEQ ID NO: 974224 - DNA, 120 bp, Artificial Sequence
  ENSG00000258135_16 (sequence is synthesized)
ccttttctccatcttttctgcccctggatcacgtgtcttattttctagtgatcaaacatgtttacagcatgtgttagatggctggctctgctctaagtgccttacaaatcctaactctcc

SEQ ID NO: 974225 - DNA, 120 bp, Artificial Sequence
  ENSG00000258135_17 (sequence is synthesized)
tcattctcacaaccttcagtttacagaggatgaaactgaggcacagagaagtcaagcgtcttgtgcagggccaggattgggacccacgcagcctgctccagagccgggctctgaccctcc

SEQ ID NO: 974226 - DNA, 120 bp, Artificial Sequence
  ENSG00000258135_18 (sequence is synthesized)
acaagagccatcactaaagttccacttaccgctgcaccttcaatctcttcctctctccatccctcccacatgttcacagacaaaatcttcttccttatttaataaaacaatataatgacc

SEQ ID NO: 974227 - DNA, 120 bp, Artificial Sequence
  ENSG00000258137_0 (sequence is synthesized)
atgtaaactccagctcctggactagagagtgaatgcatggggcaaagatactggagggccagagaaagcaagcttgaaacagagaggaacgggtcactttggtggaggaaattgggccac

SEQ ID NO: 974228 - DNA, 120 bp, Artificial Sequence
  ENSG00000258137_1 (sequence is synthesized)
gaggaaattgggccaccaagcagccctatggagaggccaatgtggagagaaactgaggccttccaccaaaagccagcaccaacttgctatccatagatggggtcttgctatgttgcccag

SEQ ID NO: 974229 - DNA, 120 bp, Artificial Sequence
  ENSG00000258137_2 (sequence is synthesized)
acttatgggggcataagaccaaaaaggttggtgcagtctgtgaagagccttgaaagcctgtccttctcctcagctccacccacttcatagccttaccaaaagtgctgcacagccagaaag

SEQ ID NO: 974230 - DNA, 120 bp, Artificial Sequence
  ENSG00000258137_3 (sequence is synthesized)
aggaagtctcccctgctgagtgtgcaagaggaagcacaagaaggctctgagggcctgtgagccataatgactgatttcacccatgagccaattgcagaggcaacagaagaccagtgcacc

SEQ ID NO: 974231 - DNA, 120 bp, Artificial Sequence
  ENSG00000258137_4 (sequence is synthesized)
acagttgaggtacagagacagcgttcgcagtcagcttgctagaggacctacacgggctcctcaagttccgctgcttcctcctccaagcttgctagtattgaaaacccaggagtttggggt

SEQ ID NO: 974232 - DNA, 120 bp, Artificial Sequence
  ENSG00000258137_5 (sequence is synthesized)
acatcttgactacaacttcaagagagacatcaaggcagaactgcttcgctaaactgctcttgaattcttgacccacagaaactgagagagagaataaatatttattgttgtttcaagtaa

SEQ ID NO: 974233 - DNA, 120 bp, Artificial Sequence
  ENSG00000258136_0 (sequence is synthesized)
aacacaaatacgatggaaagccaccagagatgtatgagtggagacaggcacaatctgacttatatttgaaatggattgctctggcactgcggacagaaaactgtgtgtatgtgtgttcat

SEQ ID NO: 974234 - DNA, 120 bp, Artificial Sequence
  ENSG00000258136_1 (sequence is synthesized)
ctgtgttgcggagtagatgaggagaaacagcaagtagtggcagggagatcaactgggaggctactgaagccatccatagaagaaaagctggtggtctggacaaggtgttagttgaatgaa

SEQ ID NO: 974235 - DNA, 120 bp, Artificial Sequence
  ENSG00000258136_2 (sequence is synthesized)
ggaaggaaggaaaaactgagttgagaattacttcaaggtgtttggcttgaccattgaggtgaataatggtggtgccatttaatgagctgctcagcactggaggaaatcaaattcatggga

SEQ ID NO: 974236 - DNA, 120 bp, Artificial Sequence
  ENSG00000258136_3 (sequence is synthesized)
aacgtattttctcacagtcctggaggctggagtcagagatcagggtgccagcctggctgggttctggtgggggccctcttccaggcttgctcatgactgccttctctcactgtgtctctc

SEQ ID NO: 974237 - DNA, 120 bp, Artificial Sequence
  ENSG00000258136_4 (sequence is synthesized)
ccgttgtttgagccacaaaatctgtggtattttattatcacaacctgagctgcctagacaggatgttaagactagatgatccggggatctcttttggctccaatattgcacaatttgatg

SEQ ID NO: 974238 - DNA, 120 bp, Artificial Sequence
  ENSG00000258136_5 (sequence is synthesized)
taatatttgataatttctgtctaattttgtaaaatttcatgctagcaatggaactaaagaagtctttgttttagaatatccttctgagagttaggaatgtagatccaggctccttggctg

SEQ ID NO: 974239 - DNA, 120 bp, Artificial Sequence
  ENSG00000258136_6 (sequence is synthesized)
tttagcatctcaggctgcattgtgataaggaagcagacagaagaactggtatcaaagccaagtgtttatccaaattctacattaagaatataacgttttcagtgaaggtttttgtagatg

SEQ ID NO: 974240 - DNA, 120 bp, Artificial Sequence
  ENSG00000258136_7 (sequence is synthesized)
tgaaaaaagagtacatgtgaaaagtaagaaaaagaaagccaacaactgaaatcttccaggataacaccaaaaaaagtgttccaaccttggcttggctacatggaacacagaaggcatcta

SEQ ID NO: 974241 - DNA, 120 bp, Artificial Sequence
  ENSG00000258136_8 (sequence is synthesized)
ccatggtaccaaggcatgaaacagatgagccaggactccccagcccttcaatcagcaggtgggctgcagccacacaaaggctcaccacctgaggaacgacgtcttggctgcagggtaact

SEQ ID NO: 974242 - DNA, 120 bp, Artificial Sequence
  ENSG00000258136_9 (sequence is synthesized)
tactgagtgtggatgagcacgtgctgcttgaggtcctgcctccgcataaacaacttgtcacagtaatcacacttaagattcttctccccagtgtggataaccatgtgggactccaggtga

SEQ ID NO: 974243 - DNA, 120 bp, Artificial Sequence
  ENSG00000258136_10 (sequence is synthesized)
gccttctgggtgaaagacttgtcacacaaggtacacctgtagttcttctgacctgcaatcagcccaaagtattacaccgtgaagaaaacaactgctggcatccccaagacacacaggcac

SEQ ID NO: 974244 - DNA, 120 bp, Artificial Sequence
  ENSG00000258136_11 (sequence is synthesized)
acatatgtgcatgcagcagaggcaggaatgaaacagagctgactgggtcttgctcagtagctgcaagctggagtgcagtggcgtgatcacagctgactgctgcctctacctcctaggctc

SEQ ID NO: 974245 - DNA, 120 bp, Artificial Sequence
  ENSG00000258136_12 (sequence is synthesized)
atgagatcttcccacctcagcccccaagcagctgggaccacagattctaagaagcaatcccggaagaaggcaagaatcaagatactaagctctatcttccctactcatttagggtaaaat

SEQ ID NO: 974246 - DNA, 120 bp, Artificial Sequence
  ENSG00000258136_13 (sequence is synthesized)
aatttcctacacagttctacagtttatgtgtgtgtttctaactgacctatgcaaccatctgccagttgctgattttacacctttttcttcgcataaaatataataaactaactgaaatgc

SEQ ID NO: 974247 - DNA, 120 bp, Artificial Sequence
  ENSG00000258136_14 (sequence is synthesized)
ataaagggccttctgactgctgtaaaaagcttttaacacaaatacgatggaaagccaccagagatgtatgagtggagacaggcacaatctgacttatatttgaaatggattgctctggca

SEQ ID NO: 974248 - DNA, 120 bp, Artificial Sequence
  ENSG00000258136_15 (sequence is synthesized)
atatgtgcatgcagcagaggcaggaatgaaacagagctgactggacaagtttcctattcagtgcataagagaaacactaatgaaaaattggctgggtatggtagttcacgcctgtaaacc

SEQ ID NO: 974249 - DNA, 78 bp, Artificial Sequence
  ENSG00000258136_16 (sequence is synthesized)
tgaaaaattggctgggtatggtagttcacgcctgtaaacccagcagtttgggaggctgagagtaacacagtgagatcc

SEQ ID NO: 974250 - DNA, 120 bp, Artificial Sequence
  ENSG00000247287_0 (sequence is synthesized)
atcactctcgtgctgaaagttggagctccttacccaaagactgggcggaaagggtgaccgccctggacccctgcccgacttcccgttaggccaagccgctgtcctgaaaggggatcgtgt

SEQ ID NO: 974251 - DNA, 120 bp, Artificial Sequence
  ENSG00000247287_1 (sequence is synthesized)
ccaggccggcttcctggagacacacctgcgcctgcacacacccaccgcggtcgcgtcaccagtgccgcggccacgtggacgaagaccaaagtctggagggaattccctcagccacaaagc

SEQ ID NO: 974252 - DNA, 120 bp, Artificial Sequence
  ENSG00000247287_2 (sequence is synthesized)
aattccctcagccacaaagcgatgggaaagcgggacccggtggagaccagagtcttgctatgctttccaggctggttttgaactcctagcctcaagcgattttcctgcctcagcttccca

SEQ ID NO: 974253 - DNA, 120 bp, Artificial Sequence
  ENSG00000247287_3 (sequence is synthesized)
gaacaagattagggatcgtgatgtggagctgcacttcctggttccaaatcctggctcttcccctcatccctgggtaagttgagggatgagagcaagagaaggttgatcctgactcagatc

SEQ ID NO: 974254 - DNA, 120 bp, Artificial Sequence
  ENSG00000247287_4 (sequence is synthesized)
tctgcatggggcatgtcactgatgacggcggcattccctgagagagggaacactaagtttgaagttgggcatagtgagcactattttggatgagttaagtttagaagtgcctgaagacat

SEQ ID NO: 974255 - DNA, 120 bp, Artificial Sequence
  ENSG00000247287_5 (sequence is synthesized)
ccaagtggaagaagtggctgcatggactgaagatacagactgggaaacgttaacaccatcaaggaactggagtcctgggcacaggtgagactgctcaggggagttgtagaaggagaggac

SEQ ID NO: 974256 - DNA, 120 bp, Artificial Sequence
  ENSG00000247287_6 (sequence is synthesized)
ctggagtcctgggcacagaatatgctgcaaagggagaagaaggaagacgtgtggtatggaatcacctatggataaggttgagaaccatgggctagatgctatggagaccaacgtatcact

SEQ ID NO: 974257 - DNA, 120 bp, Artificial Sequence
  ENSG00000247287_7 (sequence is synthesized)
tactaggctttactttgtgccaggcactggattcggcattaccccatttaagcctcactaccatccttcatgttactattccacgttgccgctcaggagaaacaaaatttttttattaaa

SEQ ID NO: 974258 - DNA, 120 bp, Artificial Sequence
  ENSG00000247287_8 (sequence is synthesized)
ttcaagtaacctgaggtcccatatttagtaagaggcagaggagttagatgtgtcaatagctaaattacatggctgtgtcctctagctggccagggactgacaacatcagtatcacctggt

SEQ ID NO: 974259 - DNA, 120 bp, Artificial Sequence
  ENSG00000247287_9 (sequence is synthesized)
gactctcccaggggagatgtttttaaaaatcttttccagtaattctgtgcaacatggcaatctgaaaccagtctttcagacctggaagttctttagagaccacaggactctctttgatat

SEQ ID NO: 974260 - DNA, 120 bp, Artificial Sequence
  ENSG00000247287_10 (sequence is synthesized)
tttttcttttgaatttttttaaaatacagaatcctttttcatgttctctgtttataaaacaactgcatgtcaattacattattttttagaagataggtacaagagccaggcgtggtggct

SEQ ID NO: 974261 - DNA, 88 bp, Artificial Sequence
  ENSG00000247287_11 (sequence is synthesized)
attttttagaagataggtacaagagccaggcgtggtggctcatggctgtaatcatttgaggctggaagttcgagaccagcctggccaa

SEQ ID NO: 974262 - DNA, 120 bp, Artificial Sequence
  ENSG00000247287_12 (sequence is synthesized)
aattttattttatctcactttaaaaaaatagaagcatattagaatatactttgttctatacccaaatcttgtgttaaactctttaaaaatgtcttttcagtgtttggtaaaagctgcaat

SEQ ID NO: 974263 - DNA, 120 bp, Artificial Sequence
  ENSG00000247287_13 (sequence is synthesized)
caatgagtcgtacagatgtatatttcacattaattattaataattataatttagaaatgttaattacagtcatttaaaggaacttcaacaaactaatggttattgaagttacattaagaa

SEQ ID NO: 974264 - DNA, 120 bp, Artificial Sequence
  ENSG00000247287_14 (sequence is synthesized)
tataatcatgaagagtagtggcctaatacagtaatgaaagacagatctttaaatttaaaaaggaaaaatgtgattgtgtgttttcgtacgttattaagttgtagacaatataccaaaaca

SEQ ID NO: 974265 - DNA, 120 bp, Artificial Sequence
  ENSG00000247287_15 (sequence is synthesized)
tacatcagaggacattcacttatggccatagatagtagctaatgccagacacatcctcccactagaaacaactagaaatacacaagataactgattctagacatttgacaacaaacattg

SEQ ID NO: 974266 - DNA, 120 bp, Artificial Sequence
  ENSG00000247287_16 (sequence is synthesized)
cagggcagtgatacttgagagaaaggaaacacaatgtgatctgcacgtcctcttcagctttctgtctggggacaccaagtagactaaaaggaagtggaatccaaggaagtatggaagtct

SEQ ID NO: 974267 - DNA, 120 bp, Artificial Sequence
  ENSG00000247287_17 (sequence is synthesized)
tgctgagctgaagaaatctagataaaagtttagagtagttgtcatccctgaaatttgtaagacagaataccacaaagaaaggagtatgcagaagaagaggacaaagaagatttcacaagc

SEQ ID NO: 974268 - DNA, 120 bp, Artificial Sequence
  ENSG00000247287_18 (sequence is synthesized)
attcctgtgtagcccatgtgcaggataggacttaatgaggcctagcagagaatggttgctatgaacaagagaactgggccaagatatcatagactgtgcagtactgcaaacactggaata

SEQ ID NO: 974269 - DNA, 120 bp, Artificial Sequence
  ENSG00000247287_19 (sequence is synthesized)
ctgtcccagcctaaatggagagaccttactaagcacctcatccattcaattgaaattctaaagaggatagaccttaggagtaaataccatgtcccagacaaagggccatgtctcaggact

SEQ ID NO: 974270 - DNA, 120 bp, Artificial Sequence
  ENSG00000247287_20 (sequence is synthesized)
aaggataaaactgacatagaataaataataataatacataacaaaacaaagcctagcaagatcaagaggattttttagtagtttaatagcctgatagaataaacctcaacaccatttaaa

SEQ ID NO: 974271 - DNA, 120 bp, Artificial Sequence
  ENSG00000247287_21 (sequence is synthesized)
agaagataacataatccagactctctgtaactcctttataacaatattcaacaggaggttaaaaaatattgtacctgtaaagaagcagaaatatgtgactcataatcaaaataagacatg

SEQ ID NO: 974272 - DNA, 120 bp, Artificial Sequence
  ENSG00000247287_22 (sequence is synthesized)
gtcaatagaagcagaatccaagatgacccaaatgttggaattagcagatgaggtctttaaaacagctattataaatatatgtaaggatgcatgggaaaagatgaatatgtgattaaacag

SEQ ID NO: 974273 - DNA, 120 bp, Artificial Sequence
  ENSG00000247287_23 (sequence is synthesized)
atgagaatgatcagcaaagaaataaaccaaatggatatattagaaataaaaagcaaatatctgaaatgtaaaatttattcgatggttagagcagtttggagatggcaaaaggatgggtga

SEQ ID NO: 974274 - DNA, 120 bp, Artificial Sequence
  ENSG00000247287_24 (sequence is synthesized)
attatctctaacagagagcaatagaaattatataatttaataacagaaaggaaaagattggaaaaaatatataaacagcctcagtgaactctggaacaaccctgcaaagttagtatatat

SEQ ID NO: 974275 - DNA, 67 bp, Artificial Sequence
  ENSG00000247287_25 (sequence is synthesized)
tcagtgaactctggaacaaccctgcaaagttagtatatatataattggagtcctaaggctattcaag

SEQ ID NO: 974276 - DNA, 120 bp, Artificial Sequence
  ENSG00000247287_26 (sequence is synthesized)
gaggtgggaggatcacttaagccttgaagtaaaggctgcagtgagctctgattgtaccactgtgctccagcccgtgctggacagagtgagaccctatctctaaagtaaaagataataata

SEQ ID NO: 974277 - DNA, 120 bp, Artificial Sequence
  ENSG00000247287_27 (sequence is synthesized)
attagagtctcagtaaaagaaaggaaaaagaaaatggggtagagtgaaatttttaaaaaaattctctaatttggtgaaaaacatcagcctacagattgaagaatcaacaaactccaagca

SEQ ID NO: 974278 - DNA, 120 bp, Artificial Sequence
  ENSG00000247287_28 (sequence is synthesized)
gaataaatacaaaaaataaaataaagaaagaaaacacaccagctacactgtagtcaaaaggttaaaaaccaaaaatatagaataaatgttgaaacagaaaaaaaagtcaatgacataagg

SEQ ID NO: 974279 - DNA, 120 bp, Artificial Sequence
  ENSG00000247287_29 (sequence is synthesized)
ggaacaatgctatgaatcacagttgacttcttactagaaacagtggaggccaaaagaaatggaatgatgccattaaagtactgaaagaatagagcaacccagcttttttttttttttaag

SEQ ID NO: 974280 - DNA, 120 bp, Artificial Sequence
  ENSG00000247287_30 (sequence is synthesized)
agcttttttttttttttaagaccttgtttggctcagtcgcctagactggagtgaagtgatgcagtcacagctcactgcagcctcaacctcctaagctcaagtgatcctctcacctcagcc

SEQ ID NO: 974281 - DNA, 120 bp, Artificial Sequence
  ENSG00000247287_31 (sequence is synthesized)
tcccaattagctaggactacgagtgtatgccactatgtccaactaattttttttttttttagagatggggtctcagctacgttgcccaaactgttcttgaactcctgggttcaagcaatc

SEQ ID NO: 974282 - DNA, 120 bp, Artificial Sequence
  ENSG00000247287_32 (sequence is synthesized)
acaagtgtgagccaccacacctggccagaattctaacattttctcaaaaatgaaaacaaaaaagacattttctgataaacaaatgctgggaggattcattgtaaactatattaaatacta

SEQ ID NO: 974283 - DNA, 120 bp, Artificial Sequence
  ENSG00000247287_33 (sequence is synthesized)
tattaaatactaatagaagaattgggggcggtggtgatggaaaatgatagcacagggaaatctaaactacagaaagtaataaatagcaccagaaatggtaagtagacgtgtaaatataaa

SEQ ID NO: 974284 - DNA, 120 bp, Artificial Sequence
  ENSG00000247287_34 (sequence is synthesized)
gaacttttttcttctcatttttttaaaacagactatttaaagacaaatatattgtaggactctcaattcatgtagaagtaaaatacatgacagcaataacaaaaaaggacagagggtttt

SEQ ID NO: 974285 - DNA, 120 bp, Artificial Sequence
  ENSG00000247287_35 (sequence is synthesized)
gtttgtgtgtgtgtgtgtgtgtttattttaagcaatgcttttggagaaagaaaaaaaggacagagttaacaaaattgtactattgtaagattcttacatttcacatgaagtagtataata

SEQ ID NO: 974286 - DNA, 120 bp, Artificial Sequence
  ENSG00000247287_36 (sequence is synthesized)
ttaactctaaacagactgttaaggttgtgctgactactatggtagtcagtagccacaagtgactaaatttaaacttaaattaattaaaaataaataaaatttaaatttcagtcttcagtt

SEQ ID NO: 974287 - DNA, 120 bp, Artificial Sequence
  ENSG00000247287_37 (sequence is synthesized)
gtactagccatatttcaaggtatcaacagtcacaggtagccagtgtctaccatattggaaagacatagaacattttcactactaaagaacatttagttggagaatgctgccctatagcaa

SEQ ID NO: 974288 - DNA, 120 bp, Artificial Sequence
  ENSG00000247287_38 (sequence is synthesized)
ccataaaaaaaaaaaaatacagacatataactttaaaatcaataaatgaattagaatactaagaatattgtataaaccaaaataaagccatgaaggaggaaatgagaaacaaacaaaaaa

SEQ ID NO: 974289 - DNA, 120 bp, Artificial Sequence
  ENSG00000247287_39 (sequence is synthesized)
tgagacaagcagaaaacaaatagcaaggtgatagacttaaatcctaccaaatcaataattatattaaatataaatgaactaaacagtccaaagaaaagaaaaagattgcaaggatgaata

SEQ ID NO: 974290 - DNA, 120 bp, Artificial Sequence
  ENSG00000247287_40 (sequence is synthesized)
aaaagcaagattcaagtaagagctttggcatgagatgcaatgcattttaaagatccagataggttgaaagtaaaaggaagggaaaacatagaccaagcaaatctaagaaacctggtattg

SEQ ID NO: 974291 - DNA, 120 bp, Artificial Sequence
  ENSG00000247287_41 (sequence is synthesized)
atatactattattatacaaaacaaacttcaagtcaaaaagaattatcaaagttgaagagtgacattccttaatgaaaaatggtcatttcatcatgaagacataaaaaatataaatgttta

SEQ ID NO: 974292 - DNA, 120 bp, Artificial Sequence
  ENSG00000247287_42 (sequence is synthesized)
catcatgaagacataaaaaatataaatgtttatgtgactaaaaagcttcaagtataagaagcaagatatgaaaattaaaggaacaggcccagcacagtggctcatgcctataatcccaga

SEQ ID NO: 974293 - DNA, 120 bp, Artificial Sequence
  ENSG00000247287_43 (sequence is synthesized)
tagtgagatcctgtctctacaaaaaaattttaaaattaggtgggcatggtgatagacatctgtagctgtagcatctgtagctactcgagaggctggggcaggaggattgtttgaactcag

SEQ ID NO: 974294 - DNA, 120 bp, Artificial Sequence
  ENSG00000247287_44 (sequence is synthesized)
catctgtagctgtagcatctgtagctactcgagaggctggggcaggaggattgtttgaactcaggaggtcaaggctgcaatgagctgtgatcagatcatgccactgcactccagcctgga

SEQ ID NO: 974295 - DNA, 120 bp, Artificial Sequence
  ENSG00000245648_0 (sequence is synthesized)
ctcaatcccttggtctctctgattccttatatatcccgatacatttctgggggctcatcaggattggagatgacagatttactgtcccctttgcctgcgatactaggtccccggggccag

SEQ ID NO: 974296 - DNA, 120 bp, Artificial Sequence
  ENSG00000245648_1 (sequence is synthesized)
gagagacccggcatccaaggtgtgccacagctgagcttcacccggatatatagaccagctctccccacgtcccagcaccctgcctggcagcgcaatggaaccgaggatggggctgcagga

SEQ ID NO: 974297 - DNA, 120 bp, Artificial Sequence
  ENSG00000245648_2 (sequence is synthesized)
caatggaaccgaggatggggctgcaggacgataccagcacttcaggaactgtgacagaatcttgctccgctgccaaggctggagtgcactggttcaatctcggctcactgcaaactctgc

SEQ ID NO: 974298 - DNA, 120 bp, Artificial Sequence
  ENSG00000245648_3 (sequence is synthesized)
cagtttctttaggaatacagcactccatattgttaccataataatgaaacggattcccatggctacagcgatgaagcagcagaaaaaaaatggagatgctgtcaaagaaaaaagacacag

SEQ ID NO: 974299 - DNA, 89 bp, Artificial Sequence
  ENSG00000245648_4 (sequence is synthesized)
agaaaaaaaatggagatgctgtcaaagaaaaaagacacagatcagagaaagaagcataaaaggtgtttaagaaataagtaacatatcac

SEQ ID NO: 974300 - DNA, 120 bp, Artificial Sequence
  ENSG00000245648_5 (sequence is synthesized)
agcagtttgggaggccgaggtggacagattgcttgcggtaaggagtttgagaccagcgtagccaacatggcgaaaccccatctctacgaaaaattagccaggcatggtggtgagtgcctg

SEQ ID NO: 974301 - DNA, 120 bp, Artificial Sequence
  ENSG00000245648_6 (sequence is synthesized)
cttcggaggtggaggccgaagaattgcttgagcctggaaggctgagatctcagtgagccgagactgccactgcacgggtgacagagcgagcctctgtctcaaagaaagaaagagtatgta

SEQ ID NO: 974302 - DNA, 120 bp, Artificial Sequence
  ENSG00000245648_7 (sequence is synthesized)
cctggatatgtatttttaaaataatgtaaagatttaaaaatagttcgaagaacctaattgtatggcttttgaagcaactagaagtatgttctttacagatggtgggagtaatgttatatt

SEQ ID NO: 974303 - DNA, 120 bp, Artificial Sequence
  ENSG00000245648_8 (sequence is synthesized)
aagtttgtgtaagctataacacttaagtgtttataagcatgtttataagctggtgtttacaagcatgtttttatttccgaacaaaattcaaaagaagtttgtctttgtaaaaattcagat

SEQ ID NO: 974304 - DNA, 120 bp, Artificial Sequence
  ENSG00000245648_9 (sequence is synthesized)
gtgcacagttcttgttcctctctgaagatattggaaatgtattgctaatactggtaatatataacaatttttttatgaatagatgacttatttaatagttacgtatctaaatctgaatat

SEQ ID NO: 974305 - DNA, 120 bp, Artificial Sequence
  ENSG00000245648_10 (sequence is synthesized)
tttctatataatttgtctatggaaacaaatatttatacaattgttcacatattgctcttttctttgtaatgttattccttctaggtataaaatatagacgttctcaagaagattagtgtt

SEQ ID NO: 974306 - DNA, 120 bp, Artificial Sequence
  ENSG00000245648_11 (sequence is synthesized)
taaaaaattactggcagagtttgagaatttgtataagaaaacaaattttatgagatgcaaaatcaatactattatactaatttaaattttgtaatagcaaagctaattcttgttactttt

SEQ ID NO: 974307 - DNA, 120 bp, Artificial Sequence
  ENSG00000245648_12 (sequence is synthesized)
cagtctttcaattcactaagataatgagtgttacgcactgaacacatacaaatgtattgctgtgactgaatgaagaggacaaattaacaaagcaattccgaggccctggaaattgatcaa

SEQ ID NO: 974308 - DNA, 120 bp, Artificial Sequence
  ENSG00000245648_13 (sequence is synthesized)
aggctaataatcatttgtgaactatttattcttggaaaaactgctagagattcaaggaagagtgcagcaaatttgtagtaagtttacctagtgctgctcccgtgccttctgcccacccac

SEQ ID NO: 974309 - DNA, 120 bp, Artificial Sequence
  ENSG00000245648_14 (sequence is synthesized)
cacacccagcacagtgagtaacagttgcagtttttacagctgggggaaaatcaacagtgttttttgccacaaggacagacttgattagcggtcagaggttggggcatagtgtaacagacc

SEQ ID NO: 974310 - DNA, 120 bp, Artificial Sequence
  ENSG00000245648_15 (sequence is synthesized)
actgcttttcaactgaaagtgctgaattttgcaggaaatgaatgagaaaaccccattttttgttgttttttattttttttagtctgaggtgtagtctcctctggggcaagaacagtgcca

SEQ ID NO: 974311 - DNA, 120 bp, Artificial Sequence
  ENSG00000245648_16 (sequence is synthesized)
gccataaatataacaaaatcctaaacatgagagtgcaatagacctcatgacattagccctctacatattctttaaatttttttttaaattgacacattgtaattgtacatatttatgggg

SEQ ID NO: 974312 - DNA, 120 bp, Artificial Sequence
  ENSG00000245648_17 (sequence is synthesized)
tacaacttgatgttcaatacatatatatgttacattaaataatcaaatcagggtatttagtgtatctgtctacctcatgtatttatcatttctttgtggtgagaacgttcaaaagcctct

SEQ ID NO: 974313 - DNA, 120 bp, Artificial Sequence
  ENSG00000245648_18 (sequence is synthesized)
gttctagctattttgtaatatgcaatatcttactgttaaccatcatcaccctactatgcaatagaacagaacttattcctcctacctaactataactttgtacccattgaccaagctctc

SEQ ID NO: 974314 - DNA, 120 bp, Artificial Sequence
  ENSG00000245648_19 (sequence is synthesized)
accctgtccccctctttttctctcctccagtctctgttgaccactgttctggtgtttttctggtgatcgctctgcttctataatatcagctcttttttgctttatttctacatgagtgag

SEQ ID NO: 974315 - DNA, 120 bp, Artificial Sequence
  ENSG00000245648_20 (sequence is synthesized)
attatgtgatatttgtctttctgtatctgccttatttcacttaacatgatgctcagcaggttcatccatgttgtataaatgacaggattttattcttgattattgaaaaaaatatgcata

SEQ ID NO: 974316 - DNA, 120 bp, Artificial Sequence
  ENSG00000245648_21 (sequence is synthesized)
tatgcatatgtgtagaggagaccagggtgattccagtaaaaagtaaaagcccaaggagacttgagaactgattgcaaatttatgaacacttccttcaccacacacacacacacacacaca

SEQ ID NO: 974317 - DNA, 120 bp, Artificial Sequence
  ENSG00000245648_22 (sequence is synthesized)
ccgctagcacagagtggagcctctactaacttaaggttttcgaataaaccttttaaaataatatattggctgacaaccaagctatgcaattcacaagggcaatccctaggaaatggggct

SEQ ID NO: 974318 - DNA, 120 bp, Artificial Sequence
  ENSG00000245648_23 (sequence is synthesized)
cttaaactacccaggagcaaagctggacttccacgaaaaaggtttgtgcaaatctaaaacccctcatctatttcactaaaaggactaccccttctcactgtcagccttatcagtgtaacc

SEQ ID NO: 974319 - DNA, 120 bp, Artificial Sequence
  ENSG00000245648_24 (sequence is synthesized)
ctgtccttctctttatcaccacctccaccttaactaactctagacctgcccttagtcgcttctgtggtatggggattgacataaatggaaaagaccccctaggtatttttaaaatatgga

SEQ ID NO: 974320 - DNA, 120 bp, Artificial Sequence
  ENSG00000245648_25 (sequence is synthesized)
tttttcccccatctcccccttcttcagtagcctcagttctagatcccacaccagttgctcctacatctaataaaactagggtgtctattgtaaaaataagatatctaagacagaccttag

SEQ ID NO: 974321 - DNA, 120 bp, Artificial Sequence
  ENSG00000245648_26 (sequence is synthesized)
ccatcaagacaaaatatcaagatgcaaattcctggctgaaatggattaaataatccattcacactttaaataaaagcgattattacgcttgtacacacggtaggccagaggcccagatta

SEQ ID NO: 974322 - DNA, 120 bp, Artificial Sequence
  ENSG00000245648_27 (sequence is synthesized)
tctcctttccacttggatggtctccttgtcatccagatatggagtgtatggtggttctttttcaaaatcccactgcttgggataatccatcatactgagcgctctctgctatttcctgaa

SEQ ID NO: 974323 - DNA, 120 bp, Artificial Sequence
  ENSG00000245648_28 (sequence is synthesized)
attcaacaccctgcgggtcagcctccgagggcaatccagcttccacctctaaatgccaagtttactttgtgcctctcatggcaggaggaaaatttggcgttccttgaaagcataaaagga

SEQ ID NO: 974324 - DNA, 120 bp, Artificial Sequence
  ENSG00000245648_29 (sequence is synthesized)
tacaagaagcccaagcctttccaagaacttgcccatcagtccatgcttagccatccccaagcaaatgtatagtggtactgtggaagacctttactggacactcggccaaataactggagc

SEQ ID NO: 974325 - DNA, 120 bp, Artificial Sequence
  ENSG00000245648_30 (sequence is synthesized)
agtacttgtgctctaatccaattggctatccgcttcacgctggcatttcgtcaatctaaaaaggtaaaaacaaaacaccgcaggccaaaggaaactccttgagtcctttaatcctcaggt

SEQ ID NO: 974326 - DNA, 120 bp, Artificial Sequence
  ENSG00000245648_31 (sequence is synthesized)
ttacgtaaatgttattaaggtccgtgagaagtgccaaataagtttaaagcacaaaaatcaaatagctgcaaaatttaaatccatgttggtctggtaggtaaccataaattaaaaaaaaat

SEQ ID NO: 974327 - DNA, 120 bp, Artificial Sequence
  ENSG00000245648_32 (sequence is synthesized)
ttaacttcaattcaattctcacctcgtttgcccttactattggtgtacttattcttgtagactgttatattatgccctgccttcaaggttttatgcaaaaacttgtctctgctgctctta

SEQ ID NO: 974328 - DNA, 120 bp, Artificial Sequence
  ENSG00000245648_33 (sequence is synthesized)
cagagttaactcctaactatcctccaccctattgaaaaaaaattacctctcttagaaggacaaagaattaagtcaaaacatattaaacaagactgaggaggaattatgaaataaaaaaag

SEQ ID NO: 974329 - DNA, 68 bp, Artificial Sequence
  ENSG00000245648_34 (sequence is synthesized)
agaatgtgaggtcccgttccagccagtggaaaccggacacagcagtagtgtggacgaactgctagtga

SEQ ID NO: 974330 - DNA, 78 bp, Artificial Sequence
  ENSG00000245648_35 (sequence is synthesized)
tcctttgttcggtgtactctcatggcagaactgctagtgagtgtaccctttctgcaggaagtctatttctttatgaca

SEQ ID NO: 974331 - DNA, 120 bp, Artificial Sequence
  ENSG00000245648_36 (sequence is synthesized)
ggaacaagcatttcaaacaattccattctaataaccccaagtcttagctttttacggaatcaattgtaaagtctaaagtccaaaatcttatctaaatatcatcaaacaagatatgcatga

SEQ ID NO: 974332 - DNA, 120 bp, Artificial Sequence
  ENSG00000245648_37 (sequence is synthesized)
gactcaagattctatttattcagaggcaaaattccttcttaactgtgaacctgtgaaaccaaacaagttatgtgcttccaaaatacaatagtgggacaaacataggatggatattactat

SEQ ID NO: 974333 - DNA, 120 bp, Artificial Sequence
  ENSG00000245648_38 (sequence is synthesized)
tccaaaaggaagaaagagaggaagagaaacagtcatgggactcaagcaagtacaaatcatagcaaaggaaacgtcctaagatcttacttaaggctggagaataatgcctttaagataatc

SEQ ID NO: 974334 - DNA, 120 bp, Artificial Sequence
  ENSG00000245648_39 (sequence is synthesized)
atggcccactggggcagcaccacctccctgaccccgttgggtggaggacccattaaaagtggcagcatgacccccacaggcagggaaggcactgcccatgctgtgtctctctgctgtggc

SEQ ID NO: 974335 - DNA, 120 bp, Artificial Sequence
  ENSG00000245648_40 (sequence is synthesized)
cctgcccatgaggcaatttcctgtggagggtggggttgcactctcagtgatctgctggccttctcttccttcactgatcccctgggtgttggtcctacctttagaaattaaaacagcacc

SEQ ID NO: 974336 - DNA, 120 bp, Artificial Sequence
  ENSG00000245648_41 (sequence is synthesized)
cctcccccagcccatccactctgggcttgtggtgggagaggcagccttggggatatctgaattgcctttaggatctctcttcttttgtcttggagaatcatgcatgtttgcagtgaaatt

SEQ ID NO: 974337 - DNA, 120 bp, Artificial Sequence
  ENSG00000245648_42 (sequence is synthesized)
gttctatggtttggtcctgtggagtctaagaaatctgacagtctttggtcattttgtcctgtttttgtttgtttcctttagtctcagttggcagtgttaccgctggtgtaatctcttctc

SEQ ID NO: 974338 - DNA, 120 bp, Artificial Sequence
  ENSG00000245648_43 (sequence is synthesized)
tgttcctggcttttattgagatggttgatcatctttacacagtcctttgcatgcagatgtacgtatttggagttgaacagttttctatatagcctttaaagctcgaggcatagagtgcac

SEQ ID NO: 974339 - DNA, 120 bp, Artificial Sequence
  ENSG00000245648_44 (sequence is synthesized)
agtctcccttctgcatttcaattattgttagtctagaggagagacaattacaaattacatacatgattttattaacgcgggaaaataaaaatgaatcatacctattgaacttcaaataca

SEQ ID NO: 974340 - DNA, 120 bp, Artificial Sequence
  ENSG00000245648_45 (sequence is synthesized)
ggaacttaataccattttaggagattatggaccatgcctggtcctaattcataaacaaaatatagccaactcagataataaaaataaaaattataaataatgcgccactctttttatcat

SEQ ID NO: 974341 - DNA, 120 bp, Artificial Sequence
  ENSG00000245648_46 (sequence is synthesized)
ttccagaacagaacataaatacctcgcaaatgatcaaaaactagagtacaacaatgtaatatttccttctatacttctctacaagttccccagtcatccctagagtaaattatgcttatg

SEQ ID NO: 974342 - DNA, 120 bp, Artificial Sequence
  ENSG00000245648_47 (sequence is synthesized)
gggctcagtcatttggatgttaatccaactgggccagtgcacctaaataataaaaatcctcctcaaccccttggtgttcctgattccttatcaatcctgctacaggtggagaaaaaagaa

SEQ ID NO: 974343 - DNA, 120 bp, Artificial Sequence
  ENSG00000245648_48 (sequence is synthesized)
agaccagcagaaaagaaaaaaactaggagaggaagtcagagggaaagaaagcaaaaacagcaagcatagagccaaacagccaggcaggcacgccaaggggctggcaaccttgtagtaaat

SEQ ID NO: 974344 - DNA, 78 bp, Artificial Sequence
  ENSG00000285572_0 (sequence is synthesized)
gcgatgttatagatcgggaccgtggctatccaaagctatgtgcaaattgaaattataaggaagcagaaaagctatgaa

SEQ ID NO: 974345 - DNA, 120 bp, Artificial Sequence
  ENSG00000285572_1 (sequence is synthesized)
tgtgcaaattgaaattataaggaagcagaaaagctatgaagaggtggagagaggaaaagagagatatacacagaaatggagctgaagaaaggcaaatgaaaagagaaagaagagtttgca

SEQ ID NO: 974346 - DNA, 120 bp, Artificial Sequence
  ENSG00000285572_2 (sequence is synthesized)
cagtacctcagttcttcaactgagcatccttatattcaacttccttttcccccagaggagataactgcagtggctttttattacttgaaaacaaaagaacaaaaccctaacaagtggttc

SEQ ID NO: 974347 - DNA, 120 bp, Artificial Sequence
  ENSG00000285572_3 (sequence is synthesized)
ctggtccagaagactcaggaagctacttcaggtggaagagtgttccatttcattgagaagccttttaccaattgccagagtttcttttatgtgaaccttgacatatctcactagcttggt

SEQ ID NO: 974348 - DNA, 120 bp, Artificial Sequence
  ENSG00000285572_4 (sequence is synthesized)
tgtaaaaatttttacaatcatgttatctgtcagcatctgagaatgatgcatgaacattgtcaagcagaagatacatcttggagaacaaactatattatgcagttgcctggcacatttaaa

SEQ ID NO: 974349 - DNA, 120 bp, Artificial Sequence
  ENSG00000285572_5 (sequence is synthesized)
gcagaagtgctttattttaactcaagaaagagagtttatgtgtttgataaatctgaattatgtgataaaaattctaatactgtgagtagttgtctctcatattcttgaaaaatttacttt

SEQ ID NO: 974350 - DNA, 120 bp, Artificial Sequence
  ENSG00000285572_6 (sequence is synthesized)
aattagacattatcacataagaaaaaaccaaatacagaatcatatgactgaagtcaatagaaaattagtatgccagtatttgtcttcctctttataattttttattccctataaatctgg

SEQ ID NO: 974351 - DNA, 120 bp, Artificial Sequence
  ENSG00000285572_7 (sequence is synthesized)
gttttcatgtattgttatgttatcatttattaatttcaactttatccttgtgtttaaaagtaaagaaaccaattgcacaataaagctcatacttttctttcagttttaaaagaaagagat

SEQ ID NO: 974352 - DNA, 120 bp, Artificial Sequence
  ENSG00000285572_8 (sequence is synthesized)
gggaaataaaaactaggttgtggtaattaccattgaagaaaccctttcagttgttttattttttgtgcagatttgatgttattgtattatgaaggaaggaataattactgtataattaaa

SEQ ID NO: 974353 - DNA, 120 bp, Artificial Sequence
  ENSG00000285572_9 (sequence is synthesized)
tttgctctctcaggtgccactgtcaatttattttgtcttatatttttaaaagttggcagacgatatatccagtgcttgcttttggaaaaccaagcttggatcataaatctagtactaaac

SEQ ID NO: 974354 - DNA, 120 bp, Artificial Sequence
  ENSG00000285572_10 (sequence is synthesized)
ctttcattgcagaactcaagcgctctaagcttttttgttattttccttttattttggggaaaaaactgatctctaataaacagatgagcccagattctgaaagcagactatcttatttca

SEQ ID NO: 974355 - DNA, 120 bp, Artificial Sequence
  ENSG00000285572_11 (sequence is synthesized)
aatcttggctctaccgcttattagctttatgaccatgggtaaaggtatgtaatctgtctttattttggtttcctcatgtgtaaaatgaaatagtaatgttatgtttcccatagggttaaa

SEQ ID NO: 974356 - DNA, 120 bp, Artificial Sequence
  ENSG00000285572_12 (sequence is synthesized)
agaatgcctggtataagttggtgttatgtaagtgtttgctctttctatatttcatgatgaatagacaacctgtttctcatggcaaatgtttgatcatgtacacttacctggtaagctcat

SEQ ID NO: 974357 - DNA, 120 bp, Artificial Sequence
  ENSG00000285572_13 (sequence is synthesized)
ctgtcatctgttccccacagagacactctgttgcacaacacagaatataatgtgaatgacaccacctgggacagagcactgtgctctgcatgaatgatgtcttctcgtgttgtgttattt

SEQ ID NO: 974358 - DNA, 120 bp, Artificial Sequence
  ENSG00000285572_14 (sequence is synthesized)
ttaggccctgatccatctgcttctgttttatacctatcatagaagaccatgaagcattttgcagaacttcctaattatagtcagaagaggaatttactgtgcattctagaaaaggagaga

SEQ ID NO: 974359 - DNA, 120 bp, Artificial Sequence
  ENSG00000285572_15 (sequence is synthesized)
aaaaaatcttccattgtagaagaaaattaatgaaataaatgtatctatagtgatgtgaccaaattggcctgagcaatttagcccattgcatattctgtaattcatctaaaatagagatat

SEQ ID NO: 974360 - DNA, 120 bp, Artificial Sequence
  ENSG00000285572_16 (sequence is synthesized)
tattctggggagacctcaggactatagtttgtgctgctcaggtgaggtaaagcgtgcataggaattggtattatgaaatgttttggttccattatcaccacagtgtttccactgggtgtt

SEQ ID NO: 974361 - DNA, 120 bp, Artificial Sequence
  ENSG00000285572_17 (sequence is synthesized)
caccagtggatgttgctttcagaagtgtgtcttttatagggtaaaaaggcataagatattttcttattctataatttaggactttgactatgtgctccagagtaatgaagtcagtcatgg

SEQ ID NO: 974362 - DNA, 120 bp, Artificial Sequence
  ENSG00000285572_18 (sequence is synthesized)
tattagcatttcagagctcacccatggacaccaatactcaagagacactgatactcagttggactaaattcaaagaaactctttgaactttaagtatgggaatttgtgtttatttttgtg

SEQ ID NO: 974363 - DNA, 120 bp, Artificial Sequence
  ENSG00000285572_19 (sequence is synthesized)
tttcaaaacgataaccacctgctgctttgccagattcttgtttcttccagtcaaaataatatagctcttaaaagttcattttctcaactaagaagcacaatattagaagaaaatgttctt

SEQ ID NO: 974364 - DNA, 120 bp, Artificial Sequence
  ENSG00000285572_20 (sequence is synthesized)
ttctatttctttaatttctatttgttcctcaagttgatcaccaaatcctgagggtaaagaaatttacttcaatcatcatatatatagcatgaggcacatttaggaatcttgtagtccata

SEQ ID NO: 974365 - DNA, 120 bp, Artificial Sequence
  ENSG00000285572_21 (sequence is synthesized)
cagaaacagtgttcaaaagatgaagtgcttctccatatttcctcaaataattatgaaattactatgtgcaaatgtttataaaggctttaattagcaccttaagatttcacatagagacct

SEQ ID NO: 974366 - DNA, 120 bp, Artificial Sequence
  ENSG00000285572_22 (sequence is synthesized)
gtaaatacatgatagattgaaatttgaaaagtatttttttgaaatgcttcccatgcagaatatttttaattaaggtctaacacctcattctgactactttaattctaggaacttctgtaa

SEQ ID NO: 974367 - DNA, 120 bp, Artificial Sequence
  ENSG00000285572_23 (sequence is synthesized)
ccctatatcctagttttgactatttctttctgcctacaatcttcttattgaccatttttccaactaccttactcttcatttgcttgtcatttctgtcactgaccatggcttatccctgtg

SEQ ID NO: 974368 - DNA, 120 bp, Artificial Sequence
  ENSG00000285572_24 (sequence is synthesized)
attctgatttcttttttcttgccattcatttcaacaacactttaaaatacctaatgttctcgacttgctgccatattttcccattaaatcatgaattaattttgttccacaacctaaata

SEQ ID NO: 974369 - DNA, 120 bp, Artificial Sequence
  ENSG00000285572_25 (sequence is synthesized)
ttcaatattttttgctctcggattgccagagaaagtcaagctgattaggtgctccaaaaatgtatggcttgtaatgttttatgggttctcagcataccctgcaagttagttgctatggtt

SEQ ID NO: 974370 - DNA, 120 bp, Artificial Sequence
  ENSG00000285572_26 (sequence is synthesized)
gttggtcatgttcctcatagctgccattccaaaaattgtttctctatcttcagacctggaaacccattcacagatccagatctttctttcatcctcactaagatgagtaaaaccattggc

SEQ ID NO: 974371 - DNA, 120 bp, Artificial Sequence
  ENSG00000285572_27 (sequence is synthesized)
aaaaacaaacaaaaagcccaattgatttcccaactcatattccctcaggtatttcccatcttacattttctctgtatttttcctgtcatcttattctttgttctcatacattcttaatta

SEQ ID NO: 974372 - DNA, 66 bp, Artificial Sequence
  ENSG00000285572_28 (sequence is synthesized)
acccgtcatctacattaggtatttctccaatgctatccctcccctagaccccacccccgataggcc

SEQ ID NO: 974373 - DNA, 68 bp, Artificial Sequence
  ENSG00000285572_29 (sequence is synthesized)
attggaacacatgtgtgcatatgtctttatagtagaatgatttatcctttgggtatatacccagtaat

SEQ ID NO: 974374 - DNA, 73 bp, Artificial Sequence
  ENSG00000285572_30 (sequence is synthesized)
caatgaacacatgtgtgcatatgtctttatagtagaatgattgtttctggttttagatccttgaggaatctcc

SEQ ID NO: 974375 - DNA, 78 bp, Artificial Sequence
  ENSG00000285572_31 (sequence is synthesized)
tgtcttacgtttaagtgtttaatccatctcgagttaatttttgtataagctgtaaggaaggggtccaatttcagtttt

SEQ ID NO: 974376 - DNA, 120 bp, Artificial Sequence
  ENSG00000285572_32 (sequence is synthesized)
gtgggctcttttttggttccatatgaaatctaaagtagtttttgaactgtatggtagttggaagtgctccttgcaatgtttgctttgcaaatatttactcattgatttaacctactacca

SEQ ID NO: 974377 - DNA, 120 bp, Artificial Sequence
  ENSG00000285572_33 (sequence is synthesized)
atttaacctactaccattatcaactgctgtcactaactgcttcaccaaaacttggttaaataaataattatcttaagggaacaacagataccacagtctacttgagggtggagattgtga

SEQ ID NO: 974378 - DNA, 120 bp, Artificial Sequence
  ENSG00000285572_34 (sequence is synthesized)
ggaaagagaagataaaaaaattacctactgggcactatgcttattacttgggtgatgaaataatctgtataccaaacccctgtgctacacaatttggctctgtaacaaacctgaatatgt

SEQ ID NO: 974379 - DNA, 120 bp, Artificial Sequence
  ENSG00000285572_35 (sequence is synthesized)
gaagatttcttcttagagcaaaagcttgcaggaacagcggcatgagggccaaagcctcacaacaagtgggttgtctacagaaggagcagcttaccttacatttatgctgcaatcaagaat

SEQ ID NO: 974380 - DNA, 88 bp, Artificial Sequence
  ENSG00000285572_36 (sequence is synthesized)
aaggagcagcttaccttacatttatgctgcaatcaagaataaagatggagtctctctccgtcgcccaggttggagtgcctgggttcaa

SEQ ID NO: 974381 - DNA, 120 bp, Artificial Sequence
  ENSG00000285572_37 (sequence is synthesized)
ccttttcctgaactttggctcaattgaagaaggaaactttcaggggaattccaatagtaaacaacagaaccagcagttttacaataaactgcagagctccatttcaaaacacaaaaatag

SEQ ID NO: 974382 - DNA, 90 bp, Artificial Sequence
  ENSG00000285572_38 (sequence is synthesized)
acaataaactgcagagctccatttcaaaacacaaaaatagagcgtctctgcagtgatgtactgccttaaggaaacaaggatgcgatctcg

SEQ ID NO: 974383 - DNA, 120 bp, Artificial Sequence
  ENSG00000285572_39 (sequence is synthesized)
cctgagtagctgggattacagacatggtatcttggataacacctgacgataataacaaaggaactgtaattctgcagccttggcttgactttttttatgccttagggaatgaataagtac

SEQ ID NO: 974384 - DNA, 120 bp, Artificial Sequence
  ENSG00000285572_40 (sequence is synthesized)
atgaataagtacgtaaatgagaaatgaatcatgatagtcacttgtcaatccaaaaatatgtgagcaaggtaggctaagcatgattggctgggtgattggagaatctactgaaatatattg

SEQ ID NO: 974385 - DNA, 120 bp, Artificial Sequence
  ENSG00000285572_41 (sequence is synthesized)
ctttctttaaaatacattactctctttaattgaattaggttaacttcatgtgattggcacatacattaagatcaagaattgatgatgagcaggaggtgatgaccagaggataacactaaa

SEQ ID NO: 974386 - DNA, 69 bp, Artificial Sequence
  ENSG00000285572_42 (sequence is synthesized)
gttgtatgatttttttttttaatttgaacctctgcctctcaggctcaaacaattctcctgcctcagcct

SEQ ID NO: 974387 - DNA, 84 bp, Artificial Sequence
  ENSG00000285572_43 (sequence is synthesized)
cagtcctagctaagtttttgtatttcagtagagaagtttcaccatgttgccgggttggtcgcgaactcctgagctcaggcaatc

SEQ ID NO: 974388 - DNA, 120 bp, Artificial Sequence
  ENSG00000285572_44 (sequence is synthesized)
gcatgagccaccgcgcctggcccagacactatgatttttaagaaactgtagcccatcacttggtgccttcatccagaaatatcttttgaagtaacagtagggaactgaaaaatctgtgat

SEQ ID NO: 974389 - DNA, 120 bp, Artificial Sequence
  ENSG00000285572_45 (sequence is synthesized)
tctgtgatagagtgaaagagataattaacaggttcttccagctggattctcacctcctccagtggaggatgttttagtagaaaatatcagcccaactgatattttccaagattgttgggt

SEQ ID NO: 974390 - DNA, 120 bp, Artificial Sequence
  ENSG00000285572_46 (sequence is synthesized)
cttaagagtcattagatgagattgttaaaaataccaggtctcaggctcctctctgtctctgagttctgcagattctgattaagtggagacagtttaaaaaagagggagaacgacctccta

SEQ ID NO: 974391 - DNA, 120 bp, Artificial Sequence
  ENSG00000285572_47 (sequence is synthesized)
taatcctaccagaaattatgttgtcattttatgtttttgcattaactacataaaatgactcaccctatatatgattgtttctacttatctagatgtttgcctaatccaggaaatgatgaa

SEQ ID NO: 974392 - DNA, 120 bp, Artificial Sequence
  ENSG00000285572_48 (sequence is synthesized)
atgatgaatttaaattttgaattaccaagggacagaattatgatcacatctacatttaatttgtgatgatttttatatatatgttttagatatatgcacacttaagcattttaaaaatta

SEQ ID NO: 974393 - DNA, 120 bp, Artificial Sequence
  ENSG00000231216_0 (sequence is synthesized)
gaggctggtgagccaggcagaagtcagagtgggaggagccttgaggtctctccaggagattcagggaccataggatttggtagtgattcagctatagagtgaaaagatgacagtggccat

SEQ ID NO: 974394 - DNA, 120 bp, Artificial Sequence
  ENSG00000231216_1 (sequence is synthesized)
atccagggtaatgtctacgggaatttgtgaatatccagatatccagataagagaggatgatggccctaactcgagtaccaaaattggatttcctcagagtctggctgaggtgagaaatga

SEQ ID NO: 974395 - DNA, 120 bp, Artificial Sequence
  ENSG00000231216_2 (sequence is synthesized)
ttgagtcttgtcttggtgtcctgtagagagaaatgctgtcttctgggaccaccgccctgagcttgggggcccccactagcattcaggttcccgggagaaaatcctgaagaacgggggtca

SEQ ID NO: 974396 - DNA, 120 bp, Artificial Sequence
  ENSG00000231216_3 (sequence is synthesized)
tgagcaggggacgtgtctgctatctgggtaagtgattgtgtgcaccataaacttaccacggacaacctgatcttcacgtttgtaggtcagtgaggttcctttccctgaacagtttaccat

SEQ ID NO: 974397 - DNA, 120 bp, Artificial Sequence
  ENSG00000231216_4 (sequence is synthesized)
gtgatgcgtttatgggtattccggtaagaaagggtagtggctcctcgttctccttgccatgtaatcctattgttttctgtcttggagagaacgtatgaggtaagtaccctgtgagtgctg

SEQ ID NO: 974398 - DNA, 120 bp, Artificial Sequence
  ENSG00000231216_5 (sequence is synthesized)
atggattggcacgtaaccagggaactccagtggcactgtgcatcacaggagtaactaaggtggatgtgcagagaagacggccagagaaaatgaagtgtcctatgatgtcctaccccttgg

SEQ ID NO: 974399 - DNA, 120 bp, Artificial Sequence
  ENSG00000231216_6 (sequence is synthesized)
agcaaccacaagcatccagaagtcaagggaaccctcattatgctcgagcaggggcactctgcccatatccagagaggagacagtatgggcgtaagcaggccatggacgatccagtcttcc

SEQ ID NO: 974400 - DNA, 120 bp, Artificial Sequence
  ENSG00000231216_7 (sequence is synthesized)
gatacacaggataatgtgcattgaacctgagtccgtgttgactgtggtagatgcgggtgtccaggtatgccaagtggcatcccggaaaacacctgtcagatgcgtttcttctgctgctgc

SEQ ID NO: 974401 - DNA, 120 bp, Artificial Sequence
  ENSG00000231216_8 (sequence is synthesized)
tagtcatgagatcaagattcctgctatgacatcacagtgaatccaacatgggtccctatcaggaagcagggctgctctgcaggtcaaggctgcatgaggacccaaagcaacacatgggcc

SEQ ID NO: 974402 - DNA, 120 bp, Artificial Sequence
  ENSG00000231216_9 (sequence is synthesized)
gggttcaggcaggcagaagtcagagcatgaggacaacattgaggtctctccaggcgatttatggactctcggatttggtagtgattcagttttttttctttttttgagagtctggctgag

SEQ ID NO: 974403 - DNA, 120 bp, Artificial Sequence
  ENSG00000231216_10 (sequence is synthesized)
gtattgctgatgcacgcataaaccacagcatgcaccatgggactgtcccagggacctggttcactgatgagatgtccccacacgtcttcccgccgtgatttctttcacagatgaccaaaa

SEQ ID NO: 974404 - DNA, 120 bp, Artificial Sequence
  ENSG00000231216_11 (sequence is synthesized)
tggatcctacagtataatcacacaggataatgttggaaagtatgaactgtggcccggcagatctgactgttgttgctgctgcttctgttcctgctgatgcttttcaaaatagtcttcttt

SEQ ID NO: 974405 - DNA, 120 bp, Artificial Sequence
  ENSG00000231216_12 (sequence is synthesized)
tattttcttcggctgttctgaagcaggagttacacatgatgtctttggaagatcttgcgatgtgtttccggaactaccttgcatgcttaactcaatagtactgcggagatgttcatcttc

SEQ ID NO: 974406 - DNA, 120 bp, Artificial Sequence
  ENSG00000231216_13 (sequence is synthesized)
tctattggtttcttggcggcttagttcaagggccctctgaaaatcctcctcatcttggtctgatgttccagactcatcactttcttctgatactttttcaaggactgttttatagactct

SEQ ID NO: 974407 - DNA, 120 bp, Artificial Sequence
  ENSG00000231216_14 (sequence is synthesized)
atgctctttttgttttactaatttttttccattaagttttggtgtatccatctcttcgacactgatgatctgcaggagttggtcagcttcacagtctggcagatcacccttgacaacaaa

SEQ ID NO: 974408 - DNA, 120 bp, Artificial Sequence
  ENSG00000231216_15 (sequence is synthesized)
tacagaatatgcttgttgttgtaatcgagccaagaaatttgcaaggatcaatgccgagcttctgatattcaggattattgaaatggatgatctctaaaccccagaacttcaaggcattgc

SEQ ID NO: 974409 - DNA, 120 bp, Artificial Sequence
  ENSG00000231216_16 (sequence is synthesized)
ttattacctgaatggagaagaaaccggtatcatccatgttttctgaaggctgctgtaaaaatgcaagatactcttcactggtgactcctccttctgccattctcatcctctcttcttcat

SEQ ID NO: 974410 - DNA, 120 bp, Artificial Sequence
  ENSG00000231216_17 (sequence is synthesized)
ctagctgatgtgcaattgaggctaattccacagggctaaaatattctccttgcaatagattgttcagacagtgctgagcacacaggaaaccttcctgtttctcatgaaagatgaaatcca

SEQ ID NO: 974411 - DNA, 120 bp, Artificial Sequence
  ENSG00000231210_0 (sequence is synthesized)
acagaggccgtagacctgaagaaccaacaaccttccataggctttgaggtcccactccggcagcaggacgtgctggctcccaggaatcactgtgaccactattctaaattccttatgtgt

SEQ ID NO: 974412 - DNA, 120 bp, Artificial Sequence
  ENSG00000231210_1 (sequence is synthesized)
tcagaatttattcagagctcaggaaggtgatactactgtaacagatgctcttcaggaattgacaaacaattgtggaggttggcaattccaaaatctgaggagtaggtaaactggaagact

SEQ ID NO: 974413 - DNA, 120 bp, Artificial Sequence
  ENSG00000231210_2 (sequence is synthesized)
agagaccctgggaagagttgatgttacagcttgaatctgaaggcagtctgctggaagaatcccctctttcttgtagaagccccttgactgggcaaacttcaaacaagtgactgagctccc

SEQ ID NO: 974414 - DNA, 120 bp, Artificial Sequence
  ENSG00000231210_3 (sequence is synthesized)
ttagctgccactgattggaccaggatggacaacaaatgtaggaggagttcatctggatctagcctgagccagtcagatatcccctttgaatccatgcctatagaaatacaaaaaaatgga

SEQ ID NO: 974415 - DNA, 120 bp, Artificial Sequence
  ENSG00000231210_4 (sequence is synthesized)
agccagaggatgatggatccttgaagtaataagtcaggtagatcttgaaaatttttgactcaatccatattgatgaacacaagaataattctggtctacaaagagaggcaagagaaagac

SEQ ID NO: 974416 - DNA, 120 bp, Artificial Sequence
  ENSG00000231210_5 (sequence is synthesized)
tcaacatgtggttgctattattcaaagtggatgaaataattctgcaagccagtgggaacaggaagcttcatgaagaggagaaaggcttagggctcagaaaccgcacagagcaggaggata

SEQ ID NO: 974417 - DNA, 120 bp, Artificial Sequence
  ENSG00000231210_6 (sequence is synthesized)
gatgaatgtaaggaacagagctttgaggacagacacccctggattagacaatagctccaaaacttattaatgatggtgaatgggtgactttctaaaaccctttaaaccttatttgtaaaa

SEQ ID NO: 974418 - DNA, 120 bp, Artificial Sequence; identical to SEQ ID NO: 956462
  ENSG00000231210_7 (sequence is synthesized)

SEQ ID NO: 974419 - DNA, 120 bp, Artificial Sequence; identical to SEQ ID NO: 956463
  ENSG00000231210_8 (sequence is synthesized)

SEQ ID NO: 974420 - DNA, 120 bp, Artificial Sequence; identical to SEQ ID NO: 956464
  ENSG00000231210_9 (sequence is synthesized)

SEQ ID NO: 974421 - DNA, 120 bp, Artificial Sequence
  ENSG00000231210_10 (sequence is synthesized)
aattctgtctggacacaaaggaaaaatcggaattggcagatactctctcggttactccctggttgcagttaatgagcagcctgttcgcctgcagcctttagacagggaacaaggggcaca

SEQ ID NO: 974422 - DNA, 120 bp, Artificial Sequence
  ENSG00000231210_11 (sequence is synthesized)
gcttttcccactttattggttactgactgggaaagaaggattccactagcactgcttggctatcaaagctgggcaatgtgatcctctaagccacatgtttaggaattgacaaacaattgt

SEQ ID NO: 974423 - DNA, 120 bp, Artificial Sequence
  ENSG00000231210_12 (sequence is synthesized)
ggttactgactgggaaagaaggattccactagcactgcttggctatcaaagctgggcaatgtgatcctctaagccacatgtttagccccttgactgggcaaacttcaaacaagtgactga

SEQ ID NO: 974424 - DNA, 120 bp, Artificial Sequence
  ENSG00000231210_13 (sequence is synthesized)
gaggaattgatgaagtcaacagctgctggaaaaacttctttttccttaatagctgtatcaacatgtggttgctattattcaagtaagaaaaatatgtatatcaaacatccatggtagtcc

SEQ ID NO: 974425 - DNA, 120 bp, Artificial Sequence
  ENSG00000231210_14 (sequence is synthesized)
ttgctaaaattttcattagagagactcatgttttgacattaaaaaaagttcaaatgggtaccttagaggatgttttgttggagaacaaaatcatggagaaataaagtctaaaaagaaaaa

SEQ ID NO: 974426 - DNA, 120 bp, Artificial Sequence
  ENSG00000231212_0 (sequence is synthesized)
ggtaatgagtttgtattatgactcaatagcatcactttatcactttaacacagatggaggcctaaataaccatagggtaatggttcttcttagatgcagaaggacacatttatataatct

SEQ ID NO: 974427 - DNA, 120 bp, Artificial Sequence
  ENSG00000231212_1 (sequence is synthesized)
tagggaccccatctctgaggtcactcataatttatattaattcattgttattgccattgccccaagaatagataaggataagacatcctgtagtacaggtagcagagatataaactattc

SEQ ID NO: 974428 - DNA, 120 bp, Artificial Sequence
  ENSG00000231212_2 (sequence is synthesized)
gtctataggaagggagtgtatcctggtgtaagacagcatatagtagagaccattgtcaattagggcctgtgaactaagacagggtgactggctaagtccacaacccattagaaacccaga

SEQ ID NO: 974429 - DNA, 120 bp, Artificial Sequence
  ENSG00000231212_3 (sequence is synthesized)
aataatcaaatcatgagggatcatggaaaggaagctgaatttgccaagttttgccacttgggcattgcatgcctatgtgattaaccaccaataaaaacctgggacatcaaagaataaata

SEQ ID NO: 974430 - DNA, 120 bp, Artificial Sequence
  ENSG00000231212_4 (sequence is synthesized)
aaccaccaataaaaacctgggacatcaaagaataaataagctgctctaattgccaagaattcacatgtggttgtatgcagctttactgggagactgaagtgtatctgcatgtgattctgc

SEQ ID NO: 974431 - DNA, 120 bp, Artificial Sequence
  ENSG00000231212_5 (sequence is synthesized)
tgtgatggacacttgtaagtttgtgcctggagtctcctggactttgccctgagaatctttttcctttgttgatacgactctgcatccttttgttttaataaactgtaaacatgagtataa

SEQ ID NO: 974432 - DNA, 120 bp, Artificial Sequence
  ENSG00000250328_0 (sequence is synthesized)
ttaaagaatctgacttttgtctttatggctaaagaagcagtgctgtatcccacagtagtacaaagggcaaaagatgagtgccagcccggctggaggctgacaggcttccaagaacctgaa

SEQ ID NO: 974433 - DNA, 120 bp, Artificial Sequence
  ENSG00000250328_1 (sequence is synthesized)
tcccctcttggactcctggcttgcttttggctacagaatcatcatctgcatctggagatttccactgggactttctggaggcagacaaatcctgccctgattctggggaccatgcctgtg

SEQ ID NO: 974434 - DNA, 120 bp, Artificial Sequence
  ENSG00000250328_2 (sequence is synthesized)
gagatgcacagttctaccattcaaaatgactatctgaaaatacctcctaagaaggacaaaacttttcttcagccaagagggcacttgttaatatgattagatacatatgtaatggtgtcc

SEQ ID NO: 974435 - DNA, 120 bp, Artificial Sequence
  ENSG00000250328_3 (sequence is synthesized)
taaaggatggatgtaacttcagaccttcatttccccataagtattgctttcagagaatatctaatgaagtcacatggatgaagatttctgtatcatttgtttcccagaatggctctccaa

SEQ ID NO: 974436 - DNA, 120 bp, Artificial Sequence
  ENSG00000250328_4 (sequence is synthesized)
cttacatttcatcatccacccacatatccacttatccattcaaccttcatgtactgactgaaaactcctcttatatagttttcctcagcagtttcctcttctggggattttctgctgttt

SEQ ID NO: 974437 - DNA, 120 bp, Artificial Sequence
  ENSG00000250328_5 (sequence is synthesized)
tggtaacctgttttaatgttgtattttatgtgttcctaagggcaatgcaagttgtttaaagaggcaattatctcatgtgatttatgagatttgctggacaaattccaataaaaaatgtac

SEQ ID NO: 974438 - DNA, 61 bp, Artificial Sequence
  ENSG00000250328_6 (sequence is synthesized)
tgctacatgtgatcccatctgtgtgggaccccagtgaaaatcggactgttcaactcacctg

SEQ ID NO: 974439 - DNA, 120 bp, Artificial Sequence
  ENSG00000250328_7 (sequence is synthesized)
cacgaacgctggctgtgaggactttggatggaagaacagaagaggagaatgctaggaattccctgtacaactggaaagaagagtgctcagcacagcatggggctgaagcctaagtacaac

SEQ ID NO: 974440 - DNA, 120 bp, Artificial Sequence
  ENSG00000250328_8 (sequence is synthesized)
aataatgagttagacttggttctcatggaaccaacaggccacttactcctttagctgcttggttaacttcaccacttgagaggccagcgacatgcaggtctccaccaccaccaggtacct

SEQ ID NO: 974441 - DNA, 120 bp, Artificial Sequence
  ENSG00000250328_9 (sequence is synthesized)
gaaaatatggtaagctatgttaacaagccatattagatatcaagcattaatatggaaataaaccaggtaactcctgtgtaattgatctttgtggggacttggaggaggggaggtgaatct

SEQ ID NO: 974442 - DNA, 120 bp, Artificial Sequence
  ENSG00000250328_10 (sequence is synthesized)
aaactaggtttagtgtgtgctaaacttaattaatggttaactaaattcattcaaagatatctgtaacttgtggtctgatagtgctggtttttggatatgaatttgtcattaagactacct

SEQ ID NO: 974443 - DNA, 83 bp, Artificial Sequence
  ENSG00000250328_11 (sequence is synthesized)
caaatcctgccctgattctggggaccatgcctgtggagatgcacagttctaccattcaaaatgactatctgaaaatacctcct

SEQ ID NO: 974444 - DNA, 120 bp, Artificial Sequence
  ENSG00000250328_12 (sequence is synthesized)
caagattccctgccccggtgaggccggaagcagttcagacacctgacttctggcaacatgtgagcctgacccaagcagatcactggtgaccagtaaatattgaagctccaaggttcttcc

SEQ ID NO: 974445 - DNA, 120 bp, Artificial Sequence
  ENSG00000250328_13 (sequence is synthesized)
tttaacatactgaattaatgagccccctaggggcatcccctaaaatgactgagatttaatttctctctagcctgaataaagacttagagcagattaaatttgatttagaggaagaaaaaa

SEQ ID NO: 974446 - DNA, 70 bp, Artificial Sequence
  ENSG00000250328_14 (sequence is synthesized)
atgcccagaaaatatggtaagctatgttaacaagccatattagatatcaagcattaatatggaaataaac

SEQ ID NO: 974447 - DNA, 120 bp, Artificial Sequence
  ENSG00000250328_15 (sequence is synthesized)
attgctggtatcaataaagtctctatagtgtgtggcaatccatgttttaaaaggagttagctttgtgatcatagattatcaaatctaatatgccaccaattataagatttattccagttt

SEQ ID NO: 974448 - DNA, 120 bp, Artificial Sequence
  ENSG00000250328_16 (sequence is synthesized)
ttgagatgtaaaaatgtaaaaaataaaggtcagcaattattttataatttcatgtattgtaagatatatgtagaatcaaaagacggtaaaatgtgaaataaagtgcacctaagaattgat

SEQ ID NO: 974449 - DNA, 120 bp, Artificial Sequence
  ENSG00000250326_0 (sequence is synthesized)
gtgtgtcgagtcacaggcggtcttccgcgcggagcgtccccggcggacgctgcgcagatggctgcgactgtaggattcttgccggctagtcttcgtcggttccgcctgcgtcaggttact

SEQ ID NO: 974450 - DNA, 120 bp, Artificial Sequence
  ENSG00000250326_1 (sequence is synthesized)
cgtgaaaactcgaataagtgctatcgatgtgaaatccgaggaaaagagcatttgggggaaaagttaaaaggacttctgactcaaactcctcctcttgagtttgcagtttgccacttccag

SEQ ID NO: 974451 - DNA, 120 bp, Artificial Sequence
  ENSG00000250326_2 (sequence is synthesized)
cctggcgactaggtgctgattaagacttggaaagaagacaagctccacccaagctgagaaggtccctgtcaagtgctgctgacccctgagatggccatatgtacagctgaatgggggtgg

SEQ ID NO: 974452 - DNA, 120 bp, Artificial Sequence
  ENSG00000250326_3 (sequence is synthesized)
actcactatacttgtcaagggactggtaaaagagaccctggaagggtgggaaaaagaccagtggaaagtacatgggtcacctgaggaacccttaaaattaactctgagatgaatctaaaa

SEQ ID NO: 974453 - DNA, 120 bp, Artificial Sequence
  ENSG00000250326_4 (sequence is synthesized)
agaaaacatgggctggtcccatttctggaaattaatatggctgggatgggctactatgcaaagagaagaaggtcaaagtagaaactatcaggggactcctccctacccactcaggttggt

SEQ ID NO: 974454 - DNA, 120 bp, Artificial Sequence
  ENSG00000250326_5 (sequence is synthesized)
acagctctcacatgtggataaatatccacttcatatgaggtgcttggaatagtcaaattagaggtttctaggggctagggagaaaataaatggggagttattgtttaataggtacagagt

SEQ ID NO: 974455 - DNA, 120 bp, Artificial Sequence
  ENSG00000250326_6 (sequence is synthesized)
ttctctttcaaagaatgaaaagttctgtaaatggatagtggtgatgattgcacaacagtgtgtacttaatgccaccgaactgtacacttaagaatggtaaattttaggttatattttacc

SEQ ID NO: 974456 - DNA, 120 bp, Artificial Sequence
  ENSG00000250326_7 (sequence is synthesized)
acaataaaaaattaaaatcaacagtaaagaaatcaatccaattaaaaatgggcaaaagatttcaagacacatttcaatgaagaggatttacatatggcaaacaaatggaaagttgtttaa

SEQ ID NO: 974457 - DNA, 120 bp, Artificial Sequence
  ENSG00000250326_8 (sequence is synthesized)
catttctagctaatagggaaatgcaaattaagaccatgagatattataacacatttattagagaaccactaaaataaaaaatggtgacaacattaatgctggcaaagatgcagacaaact

SEQ ID NO: 974458 - DNA, 120 bp, Artificial Sequence
  ENSG00000250326_9 (sequence is synthesized)
gatttctcatacattgcaagtggaaatgcaaaatggtttaaccactctggagaattgtttggaagtttcttaaaaattaaacatgcagctatcatatgatcaaactgttgaactactagg

SEQ ID NO: 974459 - DNA, 120 bp, Artificial Sequence
  ENSG00000250326_10 (sequence is synthesized)
ccctctgcccctccgcccctccgcctgtccgcctctctccttctcccttgttccctctctccctccctgctcccccacctccctcccgagtcgtagactcccttccccccggcgctggga

SEQ ID NO: 974460 - DNA, 120 bp, Artificial Sequence
  ENSG00000250326_11 (sequence is synthesized)
gcatttgggggaaaagttatttccttccaatcccatcccaaatggaggttgcagcagggtagagtttttggacaatcttgtttactgctgcatccccagtgtcaagaaggctgcctgaac

SEQ ID NO: 974461 - DNA, 120 bp, Artificial Sequence
  ENSG00000250326_12 (sequence is synthesized)
atagaaagtcttcaatatatatttgctgaaataaaagtaaaaattcagtctggtgtctccataatcacagccatggccttgtaaacaggtagtgatgcggacagagccatctgtgctgcg

SEQ ID NO: 974462 - DNA, 120 bp, Artificial Sequence
  ENSG00000250320_0 (sequence is synthesized)
acctcggagcggggacgtacggtggtggcggtgacacaatgcgagtgagtggagcctttggaaggaattgggccatgagaagagccctcatgaatgggattagttcccttataagaagag

SEQ ID NO: 974463 - DNA, 120 bp, Artificial Sequence
  ENSG00000250320_1 (sequence is synthesized)
acaccaaggaagtgatctttctctgccctctgctatgtgaagacaaggtaagaagacagctatgaaccaagaagcaggcccttaccagacaccaaatctgctggtgcattgatcttggac

SEQ ID NO: 974464 - DNA, 120 bp, Artificial Sequence
  ENSG00000250320_2 (sequence is synthesized)
ttctcagcctccaggactgtgagaaataaatgtttattgttgaagccacccagtctacagtaatttgttatagcagctgaaattgactaagacaatttaaaaaaattaatctcattgact

SEQ ID NO: 974465 - DNA, 120 bp, Artificial Sequence
  ENSG00000250320_3 (sequence is synthesized)
atcaatttggattctggagcatacctggattcaggtatacattggatttgggcatatctgaactggaatatggtctctatcattctaactcctttaactaagttaaagtctgttaagtgc

SEQ ID NO: 974466 - DNA, 120 bp, Artificial Sequence
  ENSG00000250320_4 (sequence is synthesized)
caaacctcagtattctcatctgtaaaatgaaggtagtgatagtatcaaactgatagtggtaggttgtggtggtgcacaaaagggcctagtccagcactggacacatggtgatgatgatga

SEQ ID NO: 974467 - DNA, 120 bp, Artificial Sequence
  ENSG00000250320_5 (sequence is synthesized)
aagataatgatactgataaataagaagacaatactaatatacataattccaaaagaatttttcttaatacgtgatcctcttcactccccgtctcccatccccattaaattacctggaatt

SEQ ID NO: 974468 - DNA, 120 bp, Artificial Sequence
  ENSG00000250320_6 (sequence is synthesized)
ttttagtccatctttcagtttgtcaagcaacgaataacactaaaggtagtcttttttattatcgtgtaattatggaattttttattattttgcattttaaaactttgttttgaatttcca

SEQ ID NO: 974469 - DNA, 120 bp, Artificial Sequence
  ENSG00000250320_7 (sequence is synthesized)
aaactttttatttaatatctaaaatgtctttctactaaaattttgctctcaccgtctgagactcaaagcagaaaacccagccaagaccatctcaaattctgacctacagaactgggagtt

SEQ ID NO: 974470 - DNA, 120 bp, Artificial Sequence
  ENSG00000250320_8 (sequence is synthesized)
aataattggtgttgttttaaactgctgagtctgtggtagtttgctatgaagactaatatagttggttactattgttattctaatttcagggagaaggaataagtcatggagcggttaggt

SEQ ID NO: 974471 - DNA, 120 bp, Artificial Sequence
  ENSG00000250320_9 (sequence is synthesized)
taattgtccatcctctcaagttagtaagtgttggagccgataagtgaatctaaacagcgtgaatctaaagcccactgcatacttctgccaacaattatgaagggtcgactgtatgctaag

SEQ ID NO: 974472 - DNA, 120 bp, Artificial Sequence
  ENSG00000250320_10 (sequence is synthesized)
aatgcatttttacatatattgctttactaaataggttacctcaacaacctttatgaggtaaatattattattatttgcatttgactactgaggaaaccaagaatcaaaacctttaagtac

SEQ ID NO: 974473 - DNA, 120 bp, Artificial Sequence
  ENSG00000250320_11 (sequence is synthesized)
attgcccaggatcaaggtggcggtgaggaatggagccaagagctagtatcagagccctgctctggttccagtagtgattttcacagccattgtgttaaaatgcctatttagacagtggtc

SEQ ID NO: 974474 - DNA, 120 bp, Artificial Sequence
  ENSG00000250320_12 (sequence is synthesized)
taacttactttatttattgacattttcaatttcaatggttataattataattgtcattttttagtacagtttgcatttctccctgatcttcttgatgcatcattttagaatatacattgc

SEQ ID NO: 974475 - DNA, 120 bp, Artificial Sequence
  ENSG00000250320_13 (sequence is synthesized)
tgaaatgtagaatttcaagcacattttaaattctctacaatatttgcataactcataacacttttcttcattgctcccacaagcaccaagataattctttcctccaaccctctgctcatg

SEQ ID NO: 974476 - DNA, 120 bp, Artificial Sequence
  ENSG00000250320_14 (sequence is synthesized)
ctgttatccccacctgaaatgccctcttacaaatcctactagctgaattacagtttccatttaagacctccccgaattattctagcaccagagaaccatcatttcttagaattaacagtg

SEQ ID NO: 974477 - DNA, 120 bp, Artificial Sequence
  ENSG00000250320_15 (sequence is synthesized)
cttttaattttttttctagttgtttcacttgtgttaatcttatctttccaaagaattatatggttcttaccatttagataactgcatgtcttagacatagctgagtgttatgttttaaat

SEQ ID NO: 974478 - DNA, 120 bp, Artificial Sequence
  ENSG00000250320_16 (sequence is synthesized)
ttcttcagtctttccactgtgaacactaaggaaaattaatttttaagactacagatttgataccaaatccctacttcctaatatttcactgcctgattccctaatggatgctctttccag

SEQ ID NO: 974479 - DNA, 120 bp, Artificial Sequence
  ENSG00000250320_17 (sequence is synthesized)
aaaatgtgtagggtcattaagcaagagtgtacctttgctttcagaatttgaccctggtaggagaaatttctggtgcttctaattctttccctccagtttcccagtcaaactcatttcagt

SEQ ID NO: 974480 - DNA, 120 bp, Artificial Sequence
  ENSG00000250320_18 (sequence is synthesized)
gacttggtttttagcttcctgaaatatgtttgaataattaatatatacacacaataaaagttcaaaggtacaaaagagtgtgcaggaaaataaaagttttcctcctaatgacattccctt

SEQ ID NO: 974481 - DNA, 120 bp, Artificial Sequence
  ENSG00000250320_19 (sequence is synthesized)
cttacacaaggttattccctcagggcctactgctgatatctagtagctatgcttgtgtatccttctaaagatacacaaacacacccccctatatatgtgtgtttatatgtacttgtgcat

SEQ ID NO: 974482 - DNA, 120 bp, Artificial Sequence
  ENSG00000250320_20 (sequence is synthesized)
agtgtagccgaggtggcagcgcagggcagcagcagactccgcccctactaaagaattcaagaagacgttctctttcctcagcgctttgttaaacaaattcttggagagggcgagagtggt

SEQ ID NO: 974483 - DNA, 120 bp, Artificial Sequence
  ENSG00000250320_21 (sequence is synthesized)
tcacaaacgttctgtgttttgaaattgtatcaaggactgcatagtatctgtatatgtaaatcctttttgatagacatttaagttgcttccaatcttttgctattgcaagcaatattacat

SEQ ID NO: 974484 - DNA, 78 bp, Artificial Sequence
  ENSG00000250320_22 (sequence is synthesized)
cctgtcatagacaatgctgtaacaaacagactaattgttcactgttgacatatagaagtactactgattggccagaca

SEQ ID NO: 974485 - DNA, 74 bp, Artificial Sequence
  ENSG00000250320_23 (sequence is synthesized)
aaaattagctgggtatggtggcatgtgccagtagtcccagctacatgggagcctgaggtgggaggacgacttga

SEQ ID NO: 974486 - DNA, 120 bp, Artificial Sequence
  ENSG00000250320_24 (sequence is synthesized)
aattgtattatctgtaaacggaaatataaataatttaacttcttcttttccaatttggattccctttatttctttcacctgtatgattgctttagctagagcttccggtaatatgttgaa

SEQ ID NO: 974487 - DNA, 120 bp, Artificial Sequence
  ENSG00000250320_25 (sequence is synthesized)
taacagtgatgaccagtgggcatccttgctgtgttccagatcttagagaaaagactttcagtttttttccccatttagtatatgagctgtggacctgtaatatatggcttttattatgtt

SEQ ID NO: 974488 - DNA, 120 bp, Artificial Sequence
  ENSG00000250320_26 (sequence is synthesized)
acctgtaatatatggcttttattatgttgaggtatgttacttctatacctagttttcttaggttttgtttttttttatcatggggggatgttgaatcaattgaaatgatcatatggtttt

SEQ ID NO: 974489 - DNA, 120 bp, Artificial Sequence
  ENSG00000250320_27 (sequence is synthesized)
cacattgactgatttgcatatgtttaaccattcttgcacccctgagataaatgtcacttcatcatgatgaatcaaacttttaatatgttgttgaatttgtttgctagtattttgttgaga

SEQ ID NO: 974490 - DNA, 120 bp, Artificial Sequence
  ENSG00000250320_28 (sequence is synthesized)
tccatattcatcagtgatattggcctgtagtttcccttttttgatatgtttttgactggttttggtaccagggtaatacaggcctcatagaagaatgagcttgaaagtatgccatcctcc

SEQ ID NO: 974491 - DNA, 120 bp, Artificial Sequence
  ENSG00000250320_29 (sequence is synthesized)
tctattttttgagatagtttgcataggattgggattaattcttctttaaatgtttggtagaacttagcagtgaagccatggaatcacagctttccttgactggaagacattttattacag

SEQ ID NO: 974492 - DNA, 120 bp, Artificial Sequence
  ENSG00000250320_30 (sequence is synthesized)
cttcaatcttgttacttgttattggtctgctcaggctttggatttcttcatggttcaatgttgataggttgtatgtgtctaggaatttgttcatttcttctagattttctaattctttgg

SEQ ID NO: 974493 - DNA, 120 bp, Artificial Sequence
  ENSG00000250320_31 (sequence is synthesized)
cctgtataattcctcatagtatccactaatgatcttctgagtttctacagtatcagttgtaaagactcatttttcatctctgattttatttatttgggtattctcttttttgttagttag

SEQ ID NO: 974494 - DNA, 120 bp, Artificial Sequence
  ENSG00000250320_32 (sequence is synthesized)
tgattttatttatttgggtattctcttttttgttagttagctttctcaattttgtttaacttttcaaaaaaccagcttttttattattattatagtttaagttctagggtacatgtgcac

SEQ ID NO: 974495 - DNA, 120 bp, Artificial Sequence
  ENSG00000250320_33 (sequence is synthesized)
tagaatagatttgttgaagtaacattgttggtggggggaatgttcatataaaattgtgatagatattaccaatttgccattcataaggtatctatgagttcacccttccacctgtactgt

SEQ ID NO: 974496 - DNA, 120 bp, Artificial Sequence
  ENSG00000250320_34 (sequence is synthesized)
atcagacagcttgtctctctttagtgtggctgatatgattcttaacagtctttgaaagacaaaaaaaggtatctcatggttttgaacacctattatttttactgggtttgagcaactttt

SEQ ID NO: 974497 - DNA, 120 bp, Artificial Sequence
  ENSG00000250320_35 (sequence is synthesized)
cgcatatttaaaaataattattttctttatgtgaactggcatttcatgtattttgcttttatttctactgatttgctaacctttttattgattggtaggagatctgtataaggaaattca

SEQ ID NO: 974498 - DNA, 120 bp, Artificial Sequence
  ENSG00000250320_36 (sequence is synthesized)
tccatttggggtcacattaatgtcaaaaaatttatccagctggttcttgtcctttaacctagtttacacctatttgtttgattttattgtgctaaaattgctaaaatattttatatttgg

SEQ ID NO: 974499 - DNA, 120 bp, Artificial Sequence
  ENSG00000250320_37 (sequence is synthesized)
gtgatgaaatttatccacctttgctttaagatttctaggttttgatatttgctaagataggctttcagtattctgaatttataaacatatcttacagtgtcttatagtagttttatgaat

SEQ ID NO: 974500 - DNA, 120 bp, Artificial Sequence
  ENSG00000250320_38 (sequence is synthesized)
gggctcatctgttcacgggggcaaaagggtggaagtgagtaggagacatgcatctcgttaagcaggacatctgtttcagagaagaagtggggcaagtttgggaactgtgcaagaacataa

SEQ ID NO: 974501 - DNA, 120 bp, Artificial Sequence
  ENSG00000250320_39 (sequence is synthesized)
aggcaaagacagacccttgaagcatcactaaggtggatcaaattttctttctatccgccaaaataaatggactggtttttgcagtggaagtgattgaaccaaaaatacagctcatggctt

SEQ ID NO: 974502 - DNA, 120 bp, Artificial Sequence
  ENSG00000250320_40 (sequence is synthesized)
acaattgtgctttcttctctgtttttcggttagaatgattgcttattgtacatggatccaattccagcagttacagagagggaggtagggagagagacaaacacagagctagagaaattg

SEQ ID NO: 974503 - DNA, 120 bp, Artificial Sequence
  ENSG00000250320_41 (sequence is synthesized)
aaagagaaacattctcgaaggcaaagagttgaaaggtgaatctactaagaaaagaataacagagtgcaattagccatggaactacatctccatctgcctcctttaaaggatgagtccttt

SEQ ID NO: 974504 - DNA, 120 bp, Artificial Sequence
  ENSG00000250320_42 (sequence is synthesized)
tcatctgcagttttttgttgttgttgatgatcttcctgtcatagacaatgctgtaacaaacagactatccacaggttttctacttttttgagctaaatcgtgatgaagcagatgataatc

SEQ ID NO: 974505 - DNA, 120 bp, Artificial Sequence
  ENSG00000250320_43 (sequence is synthesized)
tgaggctcgcctgctatattgtgaaaatccctctgtgcttgtaataaaggcttcatctccacaagacctaaagtatgtgtcgagtgtataaatggaactcttttttaaatggaaaatacc

SEQ ID NO: 974506 - DNA, 120 bp, Artificial Sequence
  ENSG00000250320_44 (sequence is synthesized)
atattacactaattatttgtgtgaattactcatttctttattttaatgtaaagtatacattaaggcttctagaaaaagaattttgtttgttttcaaagataaagaaaagcaatacacttt

SEQ ID NO: 974507 - DNA, 120 bp, Artificial Sequence
  ENSG00000250320_45 (sequence is synthesized)
tgaaattaatagagaaaaaaataacatctcaaatagaattgggctagtatagtgctgattatctctctctgttgtatggtttatgttatgtgtggttgtttagaaacatcattttactaa

SEQ ID NO: 974508 - DNA, 120 bp, Artificial Sequence
  ENSG00000250320_46 (sequence is synthesized)
tctttgggatattgtatccaaggtagcctgcagagttttgctgttcaatttatcttatctttaatatggatttgtgggctcttacagccatcagctatactacgaaaaggtcctcttttg

SEQ ID NO: 974509 - DNA, 120 bp, Artificial Sequence
  ENSG00000250320_47 (sequence is synthesized)
ttgctcctttgtcatttacttcttgtttccaatccatcagcacatcttttattgagttcctgttttgttaaaggcaagactctaaggaaaaggcaaagaattataggaattacaacctgc

SEQ ID NO: 974510 - DNA, 120 bp, Artificial Sequence
  ENSG00000250320_48 (sequence is synthesized)
cctttaaaagctcatagtctgtgtgggagtggaaggactataatatttaaagagaattaagataatttaataagaagtgtttcaacaattaacattgaagattttgttttcattttgtta

SEQ ID NO: 974511 - DNA, 120 bp, Artificial Sequence
  ENSG00000250320_49 (sequence is synthesized)
cttgtttacaggtttttacctggaataaaatataaatgttttagtgcccatagataagagaggtgatagggcagtgaataacataatatgtgtgtctataatatggttgtaggtatagac

SEQ ID NO: 974512 - DNA, 120 bp, Artificial Sequence
  ENSG00000250320_50 (sequence is synthesized)
tgaaagactcagaaataaatctgttactgaaactatttggtgaagcctaagctattgaaatgccaataattgatttaaaatatattatttagcattggtctctttaattgcaggtagcca

SEQ ID NO: 974513 - DNA, 120 bp, Artificial Sequence
  ENSG00000250320_51 (sequence is synthesized)
aaaactcaattgggaaattgttgtttccaaaaactaaatgggaaattattgtttatgtgattgaacatggagatctttcatgattcagcgatggctggattcagaggaccaaagattggt

SEQ ID NO: 974514 - DNA, 120 bp, Artificial Sequence
  ENSG00000250320_52 (sequence is synthesized)
acaagcagtgacttttctccatctcttggttctctctgcccctgttttggctctggccagacaagcatgccccattgtggtgcaaagaaggctatggaagtttcagcctcctatcattct

SEQ ID NO: 974515 - DNA, 120 bp, Artificial Sequence
  ENSG00000250320_53 (sequence is synthesized)
gggttttagtatatatagatgatatctttttaaagtcaagttgaaaaaagcccaattcaatgcttcaaatcgaggagcatgactatctctgagccaacctctgttgatgggaaaacagaa

SEQ ID NO: 974516 - DNA, 120 bp, Artificial Sequence
  ENSG00000250320_54 (sequence is synthesized)
tgcactaaatggctaaagcctgagtcaaatatataccgctgaaataggggatttaaccagctccaccaaaacaagcacactgaaagtggggtttgccacttctgaaaggaaaatttaaaa

SEQ ID NO: 974517 - DNA, 120 bp, Artificial Sequence
  ENSG00000250320_55 (sequence is synthesized)
aacaaaatggtttgtagatgatctacaagcaggaggcatgatgttatgaagcaacataactatcagttaggggattgtggggcttcatctttaacacttatagttcacatacttgtatgt

SEQ ID NO: 974518 - DNA, 120 bp, Artificial Sequence
  ENSG00000250320_56 (sequence is synthesized)
tttgtatgaacatatgaatagaatgttaacaaggtggccaacatatctaaatgttgtttaaaaaagagaatttcaatgttaggtggagtgttggggaataagcacacaggtaaagtgtta

SEQ ID NO: 974519 - DNA, 120 bp, Artificial Sequence
  ENSG00000250320_57 (sequence is synthesized)
aaagaaatcagtaggcaaatttaacagtaaatatcaacacttttataactgtttcaacatattacccacagtcatatcttgaaattcatcataagggaaaaattggtcaagcaaaaatga

SEQ ID NO: 974520 - DNA, 120 bp, Artificial Sequence
  ENSG00000250320_58 (sequence is synthesized)
atatatatgtttattgcatatgcttaatatcaacatgggaaaaccactaaatgatgaaaaataaagaattaattgaataacccgcatactgaaatactttggaagcattgaatattataa

SEQ ID NO: 974521 - DNA, 87 bp, Artificial Sequence
  ENSG00000250320_59 (sequence is synthesized)
cccgcatactgaaatactttggaagcattgaatattataattagttttttgtttgcttgtcttgggctcaagtgcagcggcatgatc

SEQ ID NO: 974522 - DNA, 120 bp, Artificial Sequence
  ENSG00000250320_60 (sequence is synthesized)
gcctcccaaagtgctgggattacaagcaaatattataatgagtttttataaaataaactattgcacaaaaaaaagttaaaaaatagtatatgtaatatgatcatatttacatgtatgaat

SEQ ID NO: 974523 - DNA, 120 bp, Artificial Sequence
  ENSG00000250320_61 (sequence is synthesized)
taatatgatcatatttacatgtatgaattcttagagaaagtttggaaggttgtttactaagatattttaaaattgattatgtctatattgtggggctagaggcaatttttgtttttgctt

SEQ ID NO: 974524 - DNA, 120 bp, Artificial Sequence
  ENSG00000250320_62 (sequence is synthesized)
ttctgtaatgtttcctagttgagaggttactgggcaaaaagcagacacgtataaaattctactagatattcttagattttctgtaaagttaggaccaagttaaatttttacaagtagtgt

SEQ ID NO: 974525 - DNA, 120 bp, Artificial Sequence
  ENSG00000250320_63 (sequence is synthesized)
accacagtacatgttttccccaatactaaatattagcaaagttttttgaattatgcaaacctgatagtcaaaaaaacctcattattgtaactgtgttatcttgactgctagtgaggttac

SEQ ID NO: 974526 - DNA, 120 bp, Artificial Sequence
  ENSG00000250320_64 (sequence is synthesized)
gcgcactgtgtacaaacagaggcggcgtgcgtagaagaagtggggcaagtttgggaactgtgcaagaacataaaggcaaagacagacccttgaagcatcactaagaatgattgcttattg

SEQ ID NO: 974527 - DNA, 120 bp, Artificial Sequence
  ENSG00000250320_65 (sequence is synthesized)
ccatatatttcaaattaatatgacatgccaactcactcacttagtcactatatatttggctctactgcttgcttttatagactgttccattgggttatctattcgtgtgccagtactaca

SEQ ID NO: 974528 - DNA, 120 bp, Artificial Sequence
  ENSG00000250320_66 (sequence is synthesized)
gttctctttcctcagcgctttgttaaacaaattcttggagagggcgagagtggtgactaaagagaggagcctttcctccccttttgcctgcgctccggcgcgcggagagagggaggtagg

SEQ ID NO: 974529 - DNA, 120 bp, Artificial Sequence
  ENSG00000250320_67 (sequence is synthesized)
acaaacagactagagataataagctcactttacctcaggacctttgcagcagctctgccctgtgcttagattgatctgtcacgaaaccttaaagtctggctgattctcattcttcagatt

SEQ ID NO: 974530 - DNA, 120 bp, Artificial Sequence
  ENSG00000257114_0 (sequence is synthesized)
gatagaaaaagcaagtaaagaacagattttaaagggaccagaatgccaagaggagagaacttgaagatttttagtgttatgcctactctgccaattcttggaacatttgcggaactgaga

SEQ ID NO: 974531 - DNA, 120 bp, Artificial Sequence
  ENSG00000257114_1 (sequence is synthesized)
atttacttcttcgtttattacttcctaactacattttaaagactcatttgttctagattcagatcattcaacaaaacatggcatgatttccacagtctctgacattctgattgcattgct

SEQ ID NO: 974532 - DNA, 85 bp, Artificial Sequence
  ENSG00000257114_2 (sequence is synthesized)
gcatgatttccacagtctctgacattctgattgcattgcttgagaaaattctcagtctgggaatctccttaaaatgcagcacaga

SEQ ID NO: 974533 - DNA, 120 bp, Artificial Sequence
  ENSG00000257114_3 (sequence is synthesized)
tccaactgagggtgtaacactgtgaccaacgaagagagtgttttctatcagtgactcgcagacttccctttcactggaatccagcttattagctgcatggttaactttggagccaggaaa

SEQ ID NO: 974534 - DNA, 120 bp, Artificial Sequence
  ENSG00000257114_4 (sequence is synthesized)
atgtttctcggcttcccctctctgggacttaatagcctctgaaggctagcctttactgactcatgaagctgtgtctgcctggggtcagtggtggagacattgcgttaaccccagcaagcg

SEQ ID NO: 974535 - DNA, 120 bp, Artificial Sequence
  ENSG00000257114_5 (sequence is synthesized)
agccatcaccagagctttgcacagggagacaccacatagaaaggcagatgaggcaacacacacaccatccccagacagccatgggtccccagagacaggaaaaatatgtgttttcttaaa

SEQ ID NO: 974536 - DNA, 120 bp, Artificial Sequence
  ENSG00000257114_6 (sequence is synthesized)
gaattagaaaagaaaaccttgctttttcctgtgtggctcattggtaggagatctcaaattctaacccttgttttctcttttacctctctgtctgctaaaaagcactccttagatccagta

SEQ ID NO: 974537 - DNA, 120 bp, Artificial Sequence
  ENSG00000257114_7 (sequence is synthesized)
tctagcatggtgagcctcctggatgcagtgctgcagtggccactgctgggtcaaaaacaaacactgggaaaggaggaaaatgatgtttttctctctttcaataaagcatttgaaatctct

SEQ ID NO: 974538 - DNA, 120 bp, Artificial Sequence
  ENSG00000257114_8 (sequence is synthesized)
agtctctgagggccacagcttcatttacatgaggtgaacacaaagtggccaatgggaaatctctagggggtatttggacctgagaagattctatatccaggcccttgagctgctgccgct

SEQ ID NO: 974539 - DNA, 120 bp, Artificial Sequence
  ENSG00000257114_9 (sequence is synthesized)
ctgccgctgccggctcccacactgtggagtgtactttcactttcaataagtctctgcttttgttgtatcattctttccttgctttgctgtgtgttttgtccaattctttgttcaaaatgc

SEQ ID NO: 974540 - DNA, 120 bp, Artificial Sequence
  ENSG00000257114_10 (sequence is synthesized)
gcaagcaacttaatgaatgaatggatgaatgaacatctccattttgagtgctaatattcttgtggaaactgacaataaacaagaagtaattatacattttgaccaacatggagaagaact

SEQ ID NO: 974541 - DNA, 88 bp, Artificial Sequence
  ENSG00000256249_0 (sequence is synthesized)
tttttctttgtccaggctggtctcaaactccttacttcaggtgatctgcccgccttggctcccccaaagtgctgggattacaggcatg

SEQ ID NO: 974542 - DNA, 120 bp, Artificial Sequence
  ENSG00000256249_1 (sequence is synthesized)
tgggattacaggcatgaaccattgcacctggccttgattccctttttaatgcacaaatatgaagagcaatattcaccaaactctaataaaatgtaagtgctcttgcaatcctatctgtac

SEQ ID NO: 974543 - DNA, 120 bp, Artificial Sequence
  ENSG00000256249_2 (sequence is synthesized)
tatccttccaaattatttttaatcccagctctttctatctttgtttagacacaggtgtaatttctgcttagttgtttcatgatgtagctcagtgtctgtgtctctttcttactttgcagt

SEQ ID NO: 974544 - DNA, 120 bp, Artificial Sequence
  ENSG00000256249_3 (sequence is synthesized)
caacccataaaggtctctgcttaagtaagaagtccatttctgtgaaccataacccagatatagcaacgccagactgtctcctatcaaaatttattgaaatggtagatttttggattcctg

SEQ ID NO: 974545 - DNA, 120 bp, Artificial Sequence
  ENSG00000256249_4 (sequence is synthesized)
cggtcacaccttgcaaccagtctcccactcatctgccacagtttccctaaatcagattctctgaatctggaagttccaggaaatcttaggccgagtccagtgacattactcgatgcaaca

SEQ ID NO: 974546 - DNA, 120 bp, Artificial Sequence
  ENSG00000256249_5 (sequence is synthesized)
gcccaactgtttctccagagatgctggttcttggtgacaatgtcccttcttggaatggttatttgaggttgggcccagataagaggggctccatggctcaccggagttggcgattaacgc

SEQ ID NO: 974547 - DNA, 120 bp, Artificial Sequence
  ENSG00000256249_6 (sequence is synthesized)
tgaagtggtaccttctttagaaagagaagaacgtttaacaaggaagaaaagggccaacctgcagcgagatttggagaagggaaacagcatttgcaggacatccactcaactctaggcttc

SEQ ID NO: 974548 - DNA, 120 bp, Artificial Sequence
  ENSG00000256249_7 (sequence is synthesized)
gtgccaggcggcttaagtatatgatcacagcctcggcttgggaggggcctgagggcctaatgaacagcctggtacagcctggtacagcctaggacatcctgggaagttctggaaatactg

SEQ ID NO: 974549 - DNA, 120 bp, Artificial Sequence
  ENSG00000256249_8 (sequence is synthesized)
actccaagcaggtcaagtgtggagtagttttctaccaggacagagttaacaacccataaaggtctctgcttaagtaagaagtccatttctgtgaaccataacccagatatagcaacgcca

SEQ ID NO: 974550 - DNA, 120 bp, Artificial Sequence
  ENSG00000256249_9 (sequence is synthesized)
tggggcagaggcacgtttcccttttaatggtaaaagcaaacaggtgggaaacagctttctatcctgaagccgttttaactgttcaacccttagattactataaacaagagaggaatggat

SEQ ID NO: 974551 - DNA, 120 bp, Artificial Sequence
  ENSG00000256249_10 (sequence is synthesized)
tgcattagtcgctggttgaaagcagcaatgccatttcctttcccataataacactgtttagctcagtcccttctggggctaatcccctattacacccaccggaaacacagatactaacca

SEQ ID NO: 974552 - DNA, 120 bp, Artificial Sequence
  ENSG00000256249_11 (sequence is synthesized)
gatgaattggtccacggaagccaggtgacctactggcttgtttaatgatgcctgggcttcctccaggaacaacacaattccctccaatctcagctctccttatccctgctagagctcaca

SEQ ID NO: 974553 - DNA, 120 bp, Artificial Sequence
  ENSG00000256249_12 (sequence is synthesized)
agcaggctagatatcaccccaggagctgagccccctccagtctgaggcagatgtgggaagaaggccaacaagtcacaagtagatctctggctccaactctgctcagcagaaacgcctaca

SEQ ID NO: 974554 - DNA, 120 bp, Artificial Sequence
  ENSG00000256249_13 (sequence is synthesized)
cctgtgagctcgacgctcgtgctgcggttattatctggctcacctgttatcttcctctggaggcagcggttgatcaaagtggagaagaagttgggaaaggatgggctggagaagtagtac

SEQ ID NO: 974555 - DNA, 120 bp, Artificial Sequence
  ENSG00000256249_14 (sequence is synthesized)
accacggggtccagcatgctgttcatgtaggtgaagctgagagtgataaagaacgccaggtccaccgagcggtacacttcacaattctgcgtgcccgaagtgtgcaggagccagaagatg

SEQ ID NO: 974556 - DNA, 120 bp, Artificial Sequence
  ENSG00000228013_0 (sequence is synthesized)
aaataaacctctggagagccagttgcccaactcttccagaagagagactagacacgcagctgggcatgcggccagagcccaagaaaagcctggtttgccaggggcagattacagtcaacg

SEQ ID NO: 974557 - DNA, 120 bp, Artificial Sequence
  ENSG00000228013_1 (sequence is synthesized)
ggagcagccaatcctaacccagatcaaagatcctgggacagctggaacaggcatggcctaatggaactcccaagtggacagggccaggcatggacggacagagcttctgaaacagtcctc

SEQ ID NO: 974558 - DNA, 120 bp, Artificial Sequence
  ENSG00000228013_2 (sequence is synthesized)
agaccccgtgcatctggatctttctgtaggaaccacccatcagcagtgccagacagaaccaagcacatgcactgatccaccgcacgatgggagctggtgtgggtgagcttgtttgcttta

SEQ ID NO: 974559 - DNA, 120 bp, Artificial Sequence
  ENSG00000228013_3 (sequence is synthesized)
gccatgcccacagacaggaacagaagagcacagtggaggccaccagccctctcgcctgctatttcaaaaggggttgcagcagggctggaaagcggttcccactgtggttgcccccttcct

SEQ ID NO: 974560 - DNA, 120 bp, Artificial Sequence
  ENSG00000228013_4 (sequence is synthesized)
ctctgtggcacacacagacctgaaaataaccagagagggactgtgagctgccagcctaaaacaggaaggctgcagaaagtcctaggctcagataggagagtttaaaagaatgttgaaacc

SEQ ID NO: 974561 - DNA, 120 bp, Artificial Sequence
  ENSG00000228013_5 (sequence is synthesized)
aagaacgggcatcacagatcccacctgtctctgcaccaaagcagacctccccctctctaatctactggtggggagcctgtgtgctctgtagtcatgcagatcccagctttaccacttgct

SEQ ID NO: 974562 - DNA, 120 bp, Artificial Sequence
  ENSG00000228013_6 (sequence is synthesized)
ggctgtgtgacttaagcaagctatttaacttctctgaacccctatttcctgatttgtaagataagcgcagcaatatacaaagttttagtgttgtggttcacatgaaaaaatttaatcctg

SEQ ID NO: 974563 - DNA, 87 bp, Artificial Sequence
  ENSG00000228013_7 (sequence is synthesized)
atggcaccactgcactccagcctgggcaagaagaacgaaactccctctgaagaaagcatacctgcacaattcagcctgacctgccct

SEQ ID NO: 974564 - DNA, 120 bp, Artificial Sequence
  ENSG00000228013_8 (sequence is synthesized)
agaagaaagcatacctgcacaattcagcctgacctgccctcacccagacaacagaaggaacaatgaagactttagttgtctgagccagaacacttctcagataactgtgctgcttacaaa

SEQ ID NO: 974565 - DNA, 120 bp, Artificial Sequence
  ENSG00000228013_9 (sequence is synthesized)
ttgctttacatacacaatctcctctgaaattctcaaccctgaatgctgggagacattgcccccaattttcagatgagtagactgaggctaacagaggtaaagtggcttgttcaaaactgc

SEQ ID NO: 974566 - DNA, 120 bp, Artificial Sequence
  ENSG00000228013_10 (sequence is synthesized)
actactagtaactggcagctccagggtgaggtctggctcctggcccaggactctcactgagcaagggctcggtcggcccacccaggaccaaagacactgcagaccatggcagcaggcact

SEQ ID NO: 974567 - DNA, 120 bp, Artificial Sequence
  ENSG00000228013_11 (sequence is synthesized)
tggtgttctgtagtctgtgaggggagagcagagagcagaacctggtgtgtgggacaccctctccttcaccggtgttcctgcagggaccctccgtctcctgtaaagggggaagccctaggc

SEQ ID NO: 974568 - DNA, 120 bp, Artificial Sequence
  ENSG00000228013_12 (sequence is synthesized)
tgactcccagcaagcaagtcctctctcacctttcacctgaagcgatgaagcatcttaaagtttgcctaaagcagaagtctacaggagacccacagaataaatatgtaaggttattttgaa

SEQ ID NO: 974569 - DNA, 120 bp, Artificial Sequence
  ENSG00000276867_0 (sequence is synthesized)
agctggtgtagtgagcctggcttggttgtcaaataaaagcttccgtagactcaagttctctgggtgaagcactcaggttcccagggcctgactacttgtggaaaaggtctgtagctcaag

SEQ ID NO: 974570 - DNA, 120 bp, Artificial Sequence
  ENSG00000276867_1 (sequence is synthesized)
ggggcccacagttcatcacaatttctcccttcctccaaaacaatgaccattaaaatcccatgaaactcaatgggggcgttaaatttggcagccctagaaagttgtcaggccacccctgca

SEQ ID NO: 974571 - DNA, 120 bp, Artificial Sequence
  ENSG00000276867_2 (sequence is synthesized)
agcaggaggccttttgtgggctccccaaggcctgtgtgtgcttcagaagcaactggcaggaggttctttgcaatcaaggattcttgcccttagcaagccagggtgtgttgtgtgtgtgtt

SEQ ID NO: 974572 - DNA, 120 bp, Artificial Sequence
  ENSG00000276867_3 (sequence is synthesized)
tgtgtgtgtgtgtaggtgcgcacgtgcacacgtgtgtattgaaaccaaactctagcttatgtgtccatagtggaatttgaaaatggaagcctaaagttgaaaattaaaattatccatgaa

SEQ ID NO: 974573 - DNA, 120 bp, Artificial Sequence
  ENSG00000276863_0 (sequence is synthesized)
aaggggaggtattgccaaagagtttaggaacgccacacagtgcgccatctgaaaactttctccacacttccacgcaaccccaaaggctgattttacctccaagagcctcccggacccagc

SEQ ID NO: 974574 - DNA, 120 bp, Artificial Sequence
  ENSG00000276863_1 (sequence is synthesized)
agatgaactcctttctcagggacagagcctgcagccccttgcaccgggcctcgctgatgtcctggagcagctttttggcctggatgagctcctggttgatctggtccagtgtttcacggc

SEQ ID NO: 974575 - DNA, 120 bp, Artificial Sequence
  ENSG00000276863_2 (sequence is synthesized)
actggaactcattaaccagaaccccagaatctgtgagctgcaagcactgaccgtcccagcagccccaccctccctcaatgcctagatttgccactgctgtgacaacaggcacaccaagct

SEQ ID NO: 974576 - DNA, 120 bp, Artificial Sequence
  ENSG00000276863_3 (sequence is synthesized)
cttacccctgaattggatgatcaaacccccatggctgtttctccctgatcaagatgaactgtgattcctgggaacctgatattctgctaagcattttaataaagtggattttaaaatcaa

SEQ ID NO: 974577 - DNA, 120 bp, Artificial Sequence
  ENSG00000253749_0 (sequence is synthesized)
aaacgaacctgactaggggctacatgaaagccatactgtgcttcctcctccttctcatgaatccctttcctcccttctcttttccatcccccatagatcagaaatgtgaaggcggttagg

SEQ ID NO: 974578 - DNA, 120 bp, Artificial Sequence
  ENSG00000253749_1 (sequence is synthesized)
taagtaaacacccatagaaaaataaaatcaacatcctgaaataggaatttctgaggatatgcttcccatttgagagatgaaaacctcgaggcacagaaataccataaaattgtctaaatt

SEQ ID NO: 974579 - DNA, 120 bp, Artificial Sequence
  ENSG00000253749_2 (sequence is synthesized)
acacatgcaaattaatcttggggctagaacttgatggaatatctatgttcttagacaatgctaattgattataggaactgcctttaggaccagaacaagaatctaatgtctaaatggtaa

SEQ ID NO: 974580 - DNA, 120 bp, Artificial Sequence
  ENSG00000230163_0 (sequence is synthesized)
cgttccccattttgcagggaaaccaaggccagtagaggtgaagcggcataccccaggtcatcactcagatcgcttgcctccaagtccaaggctctttcccctcccaattctcctgatctg

SEQ ID NO: 974581 - DNA, 120 bp, Artificial Sequence
  ENSG00000230163_1 (sequence is synthesized)
tgacctcctgggcattctggccaatctgcttccctctgactttgcagactgcactgatggaactaccactaaggcaggtgtggagcctgcaatctcctgaccagcttgtgcttcttggtt

SEQ ID NO: 974582 - DNA, 120 bp, Artificial Sequence
  ENSG00000230163_2 (sequence is synthesized)
cttatgcaagccagttctctctgtgaaatatttctaagcagccctcaaccaccaggtctatgagggtccctgttgtccctcagccaaggctgctctctcccctagatccccacctcacca

SEQ ID NO: 974583 - DNA, 120 bp, Artificial Sequence
  ENSG00000230163_3 (sequence is synthesized)
gggtcacaaggatacacacaactattgcaggaaacataggttcttcctgcaatacaattaaagctgctaacatttactgagtacctactggttgttgtgaggatattgaggttcagaagg

SEQ ID NO: 974584 - DNA, 120 bp, Artificial Sequence
  ENSG00000230163_4 (sequence is synthesized)
gctaagtgacttgcccaaggtcatccagttaattgttaaggcagtattcataactcgagcctgtcagactctagaatccactttatttttcctctgctacactgccctggctccctaccc

SEQ ID NO: 974585 - DNA, 120 bp, Artificial Sequence
  ENSG00000230163_5 (sequence is synthesized)
tacaagtgcttagagatctaaagcaaagtagaaaaggaaaagtgagcaagacggaggggcttttacattttcactgcctggctcccaacccagactctggcaaggctaattccatgatgt

SEQ ID NO: 974586 - DNA, 120 bp, Artificial Sequence
  ENSG00000176659_0 (sequence is synthesized)
ggaggtgtcctgcatggagtcttgtgaaatcgcgtggactgcaacacccagcagcgcggtttcacattgagtgtttagcaagttaacgtttgtaacgtgtgaagtcataagatgcaggac

SEQ ID NO: 974587 - DNA, 120 bp, Artificial Sequence
  ENSG00000176659_1 (sequence is synthesized)
tggatgactgccctacccacaagaggcctaggatcttcccaagttgcactacttatgggacaggtctgccaagcagcccttgtgaagataaaggtggtgatgagttcctcccacaaaaca

SEQ ID NO: 974588 - DNA, 120 bp, Artificial Sequence
  ENSG00000176659_2 (sequence is synthesized)
ctggccagcagatggcagaagcaagccaggaacagagcttgtgtgcggcggctgtggcagctacctttgaaaatcccgtggtgtttggtggtcgtattaagagatctctggtgtaggagc

SEQ ID NO: 974589 - DNA, 120 bp, Artificial Sequence
  ENSG00000176659_3 (sequence is synthesized)
atccttcattctaagcaggattctgaacaaactcagaactggctttgtggctggtaccgaggacccaggggtcacggctgctcccagtgggtgctgatgcccatttgtttgtgcaagttg

SEQ ID NO: 974590 - DNA, 120 bp, Artificial Sequence
  ENSG00000176659_4 (sequence is synthesized)
gtcccctgtagggaggacagatggtctgtctcggactttctggcctgtgcaccaaggcccagggatggaagtggggcagcatgtccccatcattaaatagggcgttcttgataataatcc

SEQ ID NO: 974591 - DNA, 120 bp, Artificial Sequence
  ENSG00000176659_5 (sequence is synthesized)
atatcctgcctgagcctgggccgggtggaggtgtcctgcatggagtcttgtgaaatcgcgtggactgcaacacccagcagcgcgccgccctgggtcctgccactgagcagctgttggtag

SEQ ID NO: 974592 - DNA, 120 bp, Artificial Sequence
  ENSG00000176659_6 (sequence is synthesized)
gctctgctgtgaggtctcctcttccggctttcccacttcccaagtgttggttaaggaatccagatgttactgcaataaccactccataaacaaaaggaacacccagctgtgagaactggc

SEQ ID NO: 974593 - DNA, 120 bp, Artificial Sequence
  ENSG00000176659_7 (sequence is synthesized)
ttctcagcattcgtcccagcagaggctcttctggggccagccctggaagaacccatcagggttctgatggttgccctgtttcagcacagcccttattggcaggcagacggctacgggcac

SEQ ID NO: 974594 - DNA, 120 bp, Artificial Sequence
  ENSG00000176659_8 (sequence is synthesized)
agccacaggctgaagtgtcaacacttcaaacaacacagacagtacaatgacaaattggagatcagctctaatctcggcccccaatttaatgcattgctgaatattcttctgaacatagtc

SEQ ID NO: 974595 - DNA, 120 bp, Artificial Sequence
  ENSG00000176659_9 (sequence is synthesized)
catcccacactgtcccatgacacaagacgctccaaggggctgaagatagagggacttctgcagtcaagagagctgggaaactcttggacagtcacaatgtgcatttgggtattaaaggct

SEQ ID NO: 974596 - DNA, 120 bp, Artificial Sequence
  ENSG00000176659_10 (sequence is synthesized)
ctgcaaagttctgcaccaaataaacccttggattggcttgatccaatgccatgtttccaaaacctacttgcccgtgggacaccttagtccataacacaggttggcatttcttctagagag

SEQ ID NO: 974597 - DNA, 120 bp, Artificial Sequence
  ENSG00000176659_11 (sequence is synthesized)
tgtgctgtgaaaaacactggtctcacagcaccgtgcattcatccagcaggtatttaccaagcagggactttgggccaggtccgtgctaggctctgcaggtggaccagccagccctgacct

SEQ ID NO: 974598 - DNA, 120 bp, Artificial Sequence
  ENSG00000176659_12 (sequence is synthesized)
ccatggtgtctcttctcatgggagaggctgcacagcagtcattgagaaaacgaagaaacacacaggtactttcagatgctgataatgactaccatgtgctaaaagagctccaggtgttgt

SEQ ID NO: 974599 - DNA, 120 bp, Artificial Sequence
  ENSG00000176659_13 (sequence is synthesized)
ctgttttgagacaatcttctcgacaatgagatagaatgaaccatgcaaactttgggggctacgatggttttaggaaagagctagagtgaaaaatcctttgacatatatacatacaaataa

SEQ ID NO: 974600 - DNA, 120 bp, Artificial Sequence
  ENSG00000176659_14 (sequence is synthesized)
agatacatgtgtataattttatgtaattgacatcacattatatgctggcacctgccttttttgcttaatgaaaatgtcaaaggtaatattaccaatcaatcaatatatttcaccatcgtg

SEQ ID NO: 974601 - DNA, 120 bp, Artificial Sequence
  ENSG00000176659_15 (sequence is synthesized)
tttaatttctgcagagcacttattcaagcacatactgcatttttcttagtcactcactggtgggaatagaaagttttctcaggcatgcatttttcccacttctgaaatgatctccttaga

SEQ ID NO: 974602 - DNA, 120 bp, Artificial Sequence
  ENSG00000176659_16 (sequence is synthesized)
cactttactttccctccaagactgtgtgaaaatgcccattttcctaaatgcttactatgactggtttccaactacattttaattcttgttcaatctgataggcaaaaaatgatatttaat

SEQ ID NO: 974603 - DNA, 120 bp, Artificial Sequence
  ENSG00000176659_17 (sequence is synthesized)
ttttatttgattgataatgaccttgaacgtgcccattagccttttgcatgtattcttttatgaaacatctgttcctatccttcgtcaatgttcctcttcatatgttaacttttcttattg

SEQ ID NO: 974604 - DNA, 120 bp, Artificial Sequence
  ENSG00000176659_18 (sequence is synthesized)
atttgttagagcactttgtatattgtgaatattagcttttgtgatcagaattatggaattgttgttgtctttagttttgcttatcaagtttaaagccattcagagatgttgtaaatgtgt

SEQ ID NO: 974605 - DNA, 120 bp, Artificial Sequence
  ENSG00000176659_19 (sequence is synthesized)
atgttgttaaatttatgtcttattttgtgttttctgatgctcatatgtttagaatggtcaagcaatcccaacttatgattacttaaatattctcccatatttgctcttagcatttttttt

SEQ ID NO: 974606 - DNA, 120 bp, Artificial Sequence
  ENSG00000176659_20 (sequence is synthesized)
cttttcatgtaaccctttgttctttcaggaatttactttgcggtaagaaatgggctggcttccagttttatgtttcccaaatggtgattcagctgttccatttccatattctcccttatt

SEQ ID NO: 974607 - DNA, 120 bp, Artificial Sequence
  ENSG00000176659_21 (sequence is synthesized)
agaaatgaccactatattatgttctaaaatatctgcgtacttgtgtcccttcctataatctcagttcatctctttgagctatcttttgattcctttttcaaaccacactgctttactgaa

SEQ ID NO: 974608 - DNA, 120 bp, Artificial Sequence
  ENSG00000176659_22 (sequence is synthesized)
ctgtcatcatcttatacatttttaatactcagcaagacaagtttctcaatgccactctttttcagagtttttctggtggttgtaagatgtttattcttctggataaactttagaatcact

SEQ ID NO: 974609 - DNA, 120 bp, Artificial Sequence
  ENSG00000176659_23 (sequence is synthesized)
ctttttgtccaaggtaaaatatatcccacattgagatcatactgaatatacagactaattcaggaaaaaatgtatgtctttattgcattgagtcttcttatccaataaaaaagatatgaa

SEQ ID NO: 974610 - DNA, 120 bp, Artificial Sequence
  ENSG00000176659_24 (sequence is synthesized)
tttccatgtattgaaatcttcactgagacttatttttggcttttcacatgtcctgcaaatgtattgttaaatttatttttaggtattttaggggaaatgattttctaaagtttgtatttt

SEQ ID NO: 974611 - DNA, 120 bp, Artificial Sequence
  ENSG00000176659_25 (sequence is synthesized)
ttttctagcttgttataatttacatatgagatagtcattgttgtatattatttataactgatcatattactgtatttgtattgttttaatagtttttctattattttgggttttcctgga

SEQ ID NO: 974612 - DNA, 120 bp, Artificial Sequence
  ENSG00000176659_26 (sequence is synthesized)
aaccttattatctacaaattatgattgttttgccttttccaatgttcataactgtttttatattcttgtctgattgctttgttcagcacttctagaataaagtcatgcaatactaatgat

SEQ ID NO: 974613 - DNA, 120 bp, Artificial Sequence
  ENSG00000176659_27 (sequence is synthesized)
agaggggctgggcactgggttacttcatcagttcctgggtgttgatcggcaggaaacagtggtttcctgttcatatcctgcctgagcctgggccgggtggaggtgtcctgcatggagtct

SEQ ID NO: 974614 - DNA, 120 bp, Artificial Sequence
  ENSG00000229915_0 (sequence is synthesized)
aggtggagaccctaagtaggacagttattttggaagggctaccctctggctggctttcctgatccgtgcgctcagagctggaaggtggcccacgtcctacttttgcggttgggtcatatc

SEQ ID NO: 974615 - DNA, 120 bp, Artificial Sequence
  ENSG00000229915_1 (sequence is synthesized)
cactcgaggccgaggagagggcagcgcgtccgtggtggggtcgcccagcactgcgagccgcgctgaaccccacccccggcctgcagggtgcggctccctggctgccccgtggacccggcc

SEQ ID NO: 974616 - DNA, 120 bp, Artificial Sequence
  ENSG00000229915_2 (sequence is synthesized)
gtggacccggccagcccgggacgaggacgcaggacctcggcagggacgccggagccagcccttcgccatccccacacgccccgcggcccagtggccgcgcgcacgttacctgcggagccc

SEQ ID NO: 974617 - DNA, 120 bp, Artificial Sequence
  ENSG00000253740_0 (sequence is synthesized)
ggcccaagttacccacatttctgcccagctgactacaaattctggtttccatgaccccctctcaggtttgatagtttgctagaacaactcacaaagtgaaggaaaatggtgtacttacta

SEQ ID NO: 974618 - DNA, 120 bp, Artificial Sequence
  ENSG00000253740_1 (sequence is synthesized)
tctcggagtcccccagccaagaatcatctcatcagcataaactcaggcaatgttgaaaggcattcagaatggtactggccatgtaacatcctcaggaaaatggagaaaggagtcacatca

SEQ ID NO: 974619 - DNA, 120 bp, Artificial Sequence
  ENSG00000253740_2 (sequence is synthesized)
tcttctgtgtttggagactgctatgtaagccagaatactagtcacacagtgcaggtgggagcggccgggaagtaacctcctttttttttaagactaatacatttatggtatacacctgaa

SEQ ID NO: 974620 - DNA, 120 bp, Artificial Sequence
  ENSG00000229913_0 (sequence is synthesized)
agtgaaattcctccaacagctttgtgggccctggattggagctggaaagaaagaccatggtgaatgccacttgtgatgggtccagctgacagtcggacttgggggcccttgggaaactgc

SEQ ID NO: 974621 - DNA, 120 bp, Artificial Sequence
  ENSG00000229913_1 (sequence is synthesized)
ctttgaagatcctcagaaatacttgggagggtggtgagtttatgaaggactcacagaggctaccatatggataggaataaaaccagttgtgttgttgcaagaccaattatgggatgaatg

SEQ ID NO: 974622 - DNA, 120 bp, Artificial Sequence
  ENSG00000229913_2 (sequence is synthesized)
atgaaggaactgtggaaatacagaactaagtaaatcaccttctgctgtcatcagagaaggctcaatgcaggggcatcactggcactagctctggaaggttaagggacatggcacaggtga

SEQ ID NO: 974623 - DNA, 120 bp, Artificial Sequence
  ENSG00000229913_3 (sequence is synthesized)
ttaactgccacagcaatagatgcctttgaatgaatacactgacctccatgctcagttccgcctggctgatgtgcatgcagattgttcccctgtggcttgagtagcatcttctgctctagg

SEQ ID NO: 974624 - DNA, 120 bp, Artificial Sequence
  ENSG00000229913_4 (sequence is synthesized)
agacaatgggaaacaggatctcattgacacaggccacctcctttcccaagagcccttcattttgatgacaaaggactcttaccttgcaatatgaacaaaggccaaatggcttgtcttcat

SEQ ID NO: 974625 - DNA, 120 bp, Artificial Sequence
  ENSG00000229913_5 (sequence is synthesized)
ccagcatcctcattcagaactagccaactgagatctgtcacatggggccatggtagtggggcctgccacatcccacctccctataagctgtcacaccagctcttggcagtgtgagcctgg

SEQ ID NO: 974626 - DNA, 120 bp, Artificial Sequence
  ENSG00000229913_6 (sequence is synthesized)
gctgctggccactctgtaaatgtagctacatgaggaagaaaaatagacattaaagcagaaaaggaggtacgatccctagggctgctttcaggatgacaaagggtcggaaacagcaactcc

SEQ ID NO: 974627 - DNA, 120 bp, Artificial Sequence
  ENSG00000229913_7 (sequence is synthesized)
aaacactgggatgtgcacatacctgccttaagtccatgcaagggagtgtgcaagagtgtgagagagaagctatgcctccccaactcctcataaggagaaacagttcaaactcttagactt

SEQ ID NO: 974628 - DNA, 120 bp, Artificial Sequence
  ENSG00000229913_8 (sequence is synthesized)
tgatagaactttccaacatatgtgaaatcagctacctaaattatgagtcataagtcacataccaattgctatggtttgaatgtttgtgtctcctccaaaatttatgttgaaccttaagag

SEQ ID NO: 974629 - DNA, 120 bp, Artificial Sequence
  ENSG00000229913_9 (sequence is synthesized)
atttataccttatgaaagagccagagagaactagctgggcctttttgagcccttctgttctctggaggatgcagtgttcaaggcgccatcttggaagcagagaccggccctcaccagata

SEQ ID NO: 974630 - DNA, 120 bp, Artificial Sequence
  ENSG00000229913_10 (sequence is synthesized)
tgtggccctcacgagacacaaaaactgcagtcatcttgctccagactcctcgactgtgagcaataaatttgtgctgtttacaaattacacagttaaggtattttgctgtagcagcacaaa

SEQ ID NO: 974631 - DNA, 120 bp, Artificial Sequence
  ENSG00000229913_11 (sequence is synthesized)
cagactaagataccaactgacctgcggattttgtggagagacctaccactcctacatcctagtactctgagcctctaaacatggctttcatgtggtatgtctatgccttgaagtccagac

SEQ ID NO: 974632 - DNA, 120 bp, Artificial Sequence
  ENSG00000229913_12 (sequence is synthesized)
ccaagaaaaacaaacccaaagagagacgggggttccctgcttgagttttctgtctaaagactcacttttctggatgatggaacatgggagtgattgacattggaaaagatttcttacttc

SEQ ID NO: 974633 - DNA, 120 bp, Artificial Sequence
  ENSG00000229913_13 (sequence is synthesized)
caggcaagccccatcttctccccacagaggaatggcgttcctttgatctcaacaagacaagcatatcagaaaacatcttaataattcatctgagtgatgcatacataatgtaactggcat

SEQ ID NO: 974634 - DNA, 120 bp, Artificial Sequence
  ENSG00000229913_14 (sequence is synthesized)
tagtgggggaagaccatttctttacaagaaccaaaagggttgctacatccctagctccaagcacagcacctggctcaaagcaggtgctgagattcttattaaaagacaattaaaagaaaa

SEQ ID NO: 974635 - DNA, 120 bp, Artificial Sequence
  ENSG00000229912_0 (sequence is synthesized)
agtcacgtggtagacgtggtgcctgggagccggggtcagcgagcgctcagtctgagagaaaacgtgttccttccccctgagacgtgtcccgtgccgggcgatggctcgcggcaaacctcc

SEQ ID NO: 974636 - DNA, 120 bp, Artificial Sequence
  ENSG00000229912_1 (sequence is synthesized)
gctcccacagggaaggagccctgtgaggcctggcctgggagctctcgggagcgtgggtggagatagagatgaatctacaaaatggaaaaagtgttgaacttgggagtcaagagaccagga

SEQ ID NO: 974637 - DNA, 120 bp, Artificial Sequence
  ENSG00000229912_2 (sequence is synthesized)
ttctagttctgatgatgcccttcacataccgaatgccctggggaagccgcttcccttctctcagccttgggttctccatgtgtcaaattaggctgtggaaaaagaaacactcatctggct

SEQ ID NO: 974638 - DNA, 120 bp, Artificial Sequence
  ENSG00000229912_3 (sequence is synthesized)
gaacggagacatgagcctctgtaaactgattcttcctccacaaaggggccctggccctcacagccccatcctctttcatccttgctgcctgatcctagggaagctttgctctggtggtgc

SEQ ID NO: 974639 - DNA, 120 bp, Artificial Sequence
  ENSG00000229912_4 (sequence is synthesized)
ctggagctgtgatgtatgcagtcatttgaaaccccagctttgtggaagacacgagacattgatttttactctaccatttggagaaaaatcatttttatattagcagaaatgttgatagac

SEQ ID NO: 974640 - DNA, 120 bp, Artificial Sequence
  ENSG00000253745_0 (sequence is synthesized)
aaactcactgccagtgggaagaaagcttcagaatgcagaaaagctacccagcctccatgccagatgaatctgagaatcaggaaaactggggtcaaaaaccacttaacgggagcccaactc

SEQ ID NO: 974641 - DNA, 120 bp, Artificial Sequence
  ENSG00000253745_1 (sequence is synthesized)
ccaaggagctcttaggagacaaggaggagtcaagccttggattccaggcattatctgattccttccaagcacgatccccagaccccagatgccaggccacccacagagccctgacgtcct

SEQ ID NO: 974642 - DNA, 120 bp, Artificial Sequence
  ENSG00000253745_2 (sequence is synthesized)
ggacaccctcccagggagatgcccatactcccccagggataaagtcgcttggataccacagatgctgcggccacacggtgatgctggagactggatggaactataaaacatcaagttgcc

SEQ ID NO: 974643 - DNA, 120 bp, Artificial Sequence
  ENSG00000253745_3 (sequence is synthesized)
tttgagaagctctagggtctgcagccccagcacctgcacctaggtcaactgactctcttcccaaagtcatccacacctggggatgagcttgcccacatcctgcagaggaaaagccaactt

SEQ ID NO: 974644 - DNA, 120 bp, Artificial Sequence
  ENSG00000253745_4 (sequence is synthesized)
ttgtcaaaaatcagaatgcaccagccttgcctttggagccacctacatcgacttcctgaaccatgccttgctgagggcttgtttctgtggagccagcctcttctccctgccttagggaac

SEQ ID NO: 974645 - DNA, 120 bp, Artificial Sequence
  ENSG00000253744_0 (sequence is synthesized)
acaagtcccggaggcacagaaagggcaaccattctaaatccttggtaagggctccgtgcagtagttaaccccccaaatccgactaaggagagcaggacggcggaacccgggtgccctaat

SEQ ID NO: 974646 - DNA, 120 bp, Artificial Sequence
  ENSG00000253744_1 (sequence is synthesized)
caaatatgggcaccaaggaaggaaaaaagcgtccgcatctgctcgctggtcaccgccgacgacagattcgtcacctgaatcaccgacgtgggggtgaggccgaagcctaagcccaaaccg

SEQ ID NO: 974647 - DNA, 120 bp, Artificial Sequence
  ENSG00000253744_2 (sequence is synthesized)
agccgccgccgctgttcatcccgatcccgctgccgttgccttcccgctccccaacgtctacgacgcgtcagcgacggagccgggaaagcggagaacgcgcggccgcgagcgcgctcccgc

SEQ ID NO: 974648 - DNA, 120 bp, Artificial Sequence
  ENSG00000253744_3 (sequence is synthesized)
tggcgaattcacagcgccgggcagatctagccgcccatttcacaactcccctgctcccggggctgcgcgcgccagccggaagcgtcgccccggcaacccggcggttctcgcgcggctgcg

SEQ ID NO: 974649 - DNA, 120 bp, Artificial Sequence
  ENSG00000255441_0 (sequence is synthesized)
gggcagaatcacccactgagtcccagacacaaactgcatgagggtctacacaggtaagaaggtcggtctccgaggcctggggctccaggccccctcagctctgggaccctgagcccagcc

SEQ ID NO: 974650 - DNA, 120 bp, Artificial Sequence
  ENSG00000255441_1 (sequence is synthesized)
cctgtatccctctgccctcccaatggactccaggcccctgctgggcacactcacactgcacagagaggtccagggctcgctgctgggagccaagcctgttctccgctcggcaggtgtagc

SEQ ID NO: 974651 - DNA, 120 bp, Artificial Sequence
  ENSG00000255441_2 (sequence is synthesized)
gcagctccagccccaggggtctagggccccagggatgggacgaggagaggactctgttctgcaggacccagctcagtgtggcagggggctggctgtcagcagcacagaggagccgcagga

SEQ ID NO: 974652 - DNA, 120 bp, Artificial Sequence
  ENSG00000255441_3 (sequence is synthesized)
actggcctttttgggcttccagggaaaagaaagtgggactatcccgggaagacaagtgacaaccagcgccagggctcacgtgtgtggaccagacgccattcccatccccctcccagggct

SEQ ID NO: 974653 - DNA, 120 bp, Artificial Sequence
  ENSG00000255441_4 (sequence is synthesized)
gcggcggcatcctgggaccccacagcttcctctccctggatgctcctgagctgggagccgctcactgtcccactgggctcctccacctccccacccaccggggctgtctgcacaccccac

SEQ ID NO: 974654 - DNA, 120 bp, Artificial Sequence
  ENSG00000255441_5 (sequence is synthesized)
caggccacacggagtcggacggtcctctgtgcgctcacaccctttctggagaagtccacatggcagcttcctctctccacccgaaagaagtactgtgactcatcctgcatctgcgcgtct

SEQ ID NO: 974655 - DNA, 120 bp, Artificial Sequence
  ENSG00000255441_6 (sequence is synthesized)
ctgatcaccaaggagcagttccccttggcgggatccccagtgagctggaatcggccccgggtgctcatttccacctctcgactctggtggtttgtggccacaggagcacccttggttgtc

SEQ ID NO: 974656 - DNA, 120 bp, Artificial Sequence
  ENSG00000255441_7 (sequence is synthesized)
tcagtcactgctttgaaccagtagccataagctggggtagaccctgtccagtcctgtcgggggtaggagaaagagcagggcacagagatgcacaggccctccggcaccatcactgactcc

SEQ ID NO: 974657 - DNA, 120 bp, Artificial Sequence
  ENSG00000281219_0 (sequence is synthesized)
agaaaaagagactgcatacaacgtttcattcatgttttgctaggctagatacatttgttgtagcggtctcatatttgtaagtccgtggaaaaacctgaaagtatttttttcttgaaaatt

SEQ ID NO: 974658 - DNA, 120 bp, Artificial Sequence
  ENSG00000281219_1 (sequence is synthesized)
tttttgaaaaaaaagtaaaatgtcattaggagtgagaatcaggaatgatggattcacggtctagttgcaagactcatcacaggccattaacctctgaaaagcctttatctgcttcgcttt

SEQ ID NO: 974659 - DNA, 120 bp, Artificial Sequence
  ENSG00000281219_2 (sequence is synthesized)
tatgcaggaggtgctaccttagcaataggagcttcagtctgggaggagagtgggacatataagcaaataaatacatcacgtttcccacagggcgcgtattttgtgttcatcttcgtccca

SEQ ID NO: 974660 - DNA, 120 bp, Artificial Sequence
  ENSG00000281219_3 (sequence is synthesized)
ctggatctgtccaaacttttcatttttgacagataaggaaaatgaagttcagatgcttgagtgacacagctaattagtggcaaggctgagacttttgaccagacagcctgacttttagtt

SEQ ID NO: 974661 - DNA, 120 bp, Artificial Sequence
  ENSG00000281219_4 (sequence is synthesized)
tctaccatgcatgttaactcctcctaaaccccatttattttctcatttcagacaactgcgcaataacactgctaagataaaagcactctgattaataaacactgaaattaagcaggttaa

SEQ ID NO: 974662 - DNA, 120 bp, Artificial Sequence
  ENSG00000285278_0 (sequence is synthesized)
cctcacctccggagcactccgcccagcagcgacgcgttgagacactcgggtggtgagagccgccgctgcacttccgccaccgtgaccttgtacttcgaggtggagctgaggagcgagagg

SEQ ID NO: 974663 - DNA, 120 bp, Artificial Sequence
  ENSG00000285278_1 (sequence is synthesized)
cgacccggaactgaacagaagacttcgttggggttcaccacgccgccgaagaggttgtccttgttaatagggatggcggagacggcattgctgttggacttggacagggacacggggcct

SEQ ID NO: 974664 - DNA, 120 bp, Artificial Sequence
  ENSG00000285278_2 (sequence is synthesized)
gcggagacagaggggaggccgcgtgttgggcgtcgtggatcacccccaaatcctgcccgaccccggccctcatcccggccagggccggatcccaggctttgggccacagtccccgctttt

SEQ ID NO: 974665 - DNA, 120 bp, Artificial Sequence
  ENSG00000285278_3 (sequence is synthesized)
ccgtccggctctgaaattctgtggctctgctacttcccttcctcgggctcgagcccttccctacctcacccggcggccgggaggcggccctgccctcccccagccagcctggcctgcgtt

SEQ ID NO: 974666 - DNA, 120 bp, Artificial Sequence
  ENSG00000285278_4 (sequence is synthesized)
tctgccttgaccctttccccttcgccgtcaagggtgctctctagagatgggtggtgaaattggtgacccctgaggcgctgagcatccgagcggagtgggccccagatgaggtccaggacc

SEQ ID NO: 974667 - DNA, 120 bp, Artificial Sequence
  ENSG00000285278_5 (sequence is synthesized)
acgggttcagggtgcaggggagggaattacatttgcaaaccgagagcaagttacttgtacttcaggggttttgctgggtggggttttagtgtcggggaaaaactgcttcaaagacccatt

SEQ ID NO: 974668 - DNA, 120 bp, Artificial Sequence
  ENSG00000285278_6 (sequence is synthesized)
attaaaatcagccgacaatttagatggctaaagcaccctgtaaacgagcgttttaattgaggcaccacgctgggaagtggtggattttgttgtccacaccacacgtcccgtctttttgat

SEQ ID NO: 974669 - DNA, 120 bp, Artificial Sequence
  ENSG00000285278_7 (sequence is synthesized)
aaataggccctttcctatgttcaattttgaaaacgtctcagttttggagatccattccaaggccagttttgaactgcggagtggggagggaagaacaggcctacagtggaatactagcaa

SEQ ID NO: 974670 - DNA, 120 bp, Artificial Sequence
  ENSG00000285278_8 (sequence is synthesized)
tgtgcccttttgttaagtaaatacttaacagtcctctgctaaagcgcctttattgggaaagtgggtatatatacttcctagttaaaaccataagctctttattgctggactcaccactgt

SEQ ID NO: 974671 - DNA, 120 bp, Artificial Sequence
  ENSG00000285278_9 (sequence is synthesized)
tagaaaaaaaaaaaatagaagacctgcagaaagtatactaatgcattacgtttctcagcaccagtgtaattcagatgcattcacaaccatttaagtacagtatgcattgtattttaaaat

SEQ ID NO: 974672 - DNA, 120 bp, Artificial Sequence
  ENSG00000285278_10 (sequence is synthesized)
tccatttggagacatcatatgcacacaatctcatcacagtgttccttatgcgttctttaatggggatatgctagaggtatagggaggtggggggctctaggttttggatagatcacttgt

SEQ ID NO: 974673 - DNA, 120 bp, Artificial Sequence
  ENSG00000285278_11 (sequence is synthesized)
gacattaatagctctggggaggctaatagagacaataggagttaaacgaactcttgagagattactaataaaagagccaattatcatgtcgacttggaaagagcatctcttaagatttat

SEQ ID NO: 974674 - DNA, 120 bp, Artificial Sequence
  ENSG00000285278_12 (sequence is synthesized)
cccttgcacatctaatttgacgtgacaaagacttcacagatgcaaaaatgaaactttaaactagctaacaatatactgattggggttagaaatgagaacagttttatatagcatcgtcct

SEQ ID NO: 974675 - DNA, 120 bp, Artificial Sequence
  ENSG00000285278_13 (sequence is synthesized)
ctggtggtgcctagaatcctgaaatgtaacattgccaccataaccaaaaaaaaagctgctaccaagagtgaatagcatttaattcagtaaactttatttctactcactaaacacaataca

SEQ ID NO: 974676 - DNA, 120 bp, Artificial Sequence
  ENSG00000285278_14 (sequence is synthesized)
attcctcccatcttcaagatactaattttaaccaaaagctaaaattttgttaacctaattcacaaagttctaagacccttaaacagctaacaagaaactaaattgaagaacatgaatgtt

SEQ ID NO: 974677 - DNA, 120 bp, Artificial Sequence
  ENSG00000285278_15 (sequence is synthesized)
tttttcctctactaaagagtgcttcttatcatctgttcttacattaatgttaaattatttgtactattttagcattatacacttcttaaccttcatccaggcaatggattaaactatcaa

SEQ ID NO: 974678 - DNA, 120 bp, Artificial Sequence
  ENSG00000285278_16 (sequence is synthesized)
actgtttcaaaattgaaatgccacttccaaatcagttcaactactgtacattttgtgtgtttgtccaaatatcattaaactaaattaaatggtcaaatcatgagtcagaacaaagctagc

SEQ ID NO: 974679 - DNA, 120 bp, Artificial Sequence
  ENSG00000285278_17 (sequence is synthesized)
ctgttggcattaccaacatactgaaggctgattatttaagcattgctgttctgtgcctatctatttgctaattctgagcctttaggaaatcctatttggaaaaaataaacacatctctgc

SEQ ID NO: 974680 - DNA, 120 bp, Artificial Sequence
  ENSG00000285278_18 (sequence is synthesized)
aagttcttttaaatagcactctgcctgtaaggacatgcttggaatgcagaaggaaatggcttacctttcttaattacagtttgatctgggatgttaatacccgggtcttctacatgctgc

SEQ ID NO: 974681 - DNA, 120 bp, Artificial Sequence
  ENSG00000285278_19 (sequence is synthesized)
aacaaaaggatacacatggatgtaagtgtatcatcaaaacaaaaggaaatgaatattccctgcaagatgggaggaggggaaggtgtagaatcaaaattccccctcccgtataatgacatt

SEQ ID NO: 974682 - DNA, 120 bp, Artificial Sequence
  ENSG00000285278_20 (sequence is synthesized)
tatatataaacatctcatcttggcttattggaatttggggctttgcaactcaagaggtttcactgcacacccatggccaatttctcctcctccagcaaataatccatgtttaaaaggggt

SEQ ID NO: 974683 - DNA, 120 bp, Artificial Sequence
  ENSG00000285278_21 (sequence is synthesized)
ggagatggggaataaaactttctttggaaattaaatcaagtgttggagcacctaatcattctcagtcagttcaacatttagaaatgtacctagctttagattggcgcctcagcggcttct

SEQ ID NO: 974684 - DNA, 120 bp, Artificial Sequence
  ENSG00000285278_22 (sequence is synthesized)
gactttagcaattccagtgttcaggcagcgaaagccagggaaacacaatagaaatgacaggggcgggagtaacaggagagtgttggaaaagaaaaggtttaggtagtataataaagagca

SEQ ID NO: 974685 - DNA, 120 bp, Artificial Sequence
  ENSG00000285278_23 (sequence is synthesized)
aacacacacacctttatggaaaactccacataaatttttagaaagactactgcctaagcctgggtatgataggaatatgaaaatgaccaaaaccaaaaaacctttgagcttgctttcctg

SEQ ID NO: 974686 - DNA, 87 bp, Artificial Sequence
  ENSG00000285278_24 (sequence is synthesized)
gatggatgggtatacgtgtgcgcactagagtcaaaacgtgattagaaagtaaaatgaagtcatgttttctaatgcagaaactgacag

SEQ ID NO: 974687 - DNA, 120 bp, Artificial Sequence
  ENSG00000285278_25 (sequence is synthesized)
agtaaaatgaagtcatgttttctaatgcagaaactgacaggcaatataatgtctggctgtgtttacaaattagcaccagggctgctgagatagaagattttgcaatcattaccaaacaca

SEQ ID NO: 974688 - DNA, 120 bp, Artificial Sequence
  ENSG00000285278_26 (sequence is synthesized)
ggcattaccatttaaaaaactattgcttccttctctagtctttgtccaacaataatactgattcgaacattttccattctgtcttggatttatgctcctgttaattgtgcctgatcgcaa

SEQ ID NO: 974689 - DNA, 120 bp, Artificial Sequence
  ENSG00000285278_27 (sequence is synthesized)
tgattccgggtggatggtactaagttgctttattacaggttttattatactcaatgctctcatttgtaacttgcctaaagtgcttctggatttaagtataattaaattgagaaatgttca

SEQ ID NO: 974690 - DNA, 120 bp, Artificial Sequence
  ENSG00000243733_0 (sequence is synthesized)
caggtccctctaagcacccagtcatcaggggcaggcccccatggagagaacaggcttgtttcagggaggaattcccagaagctggagctccagacagaggtgagggacagtggtcagcgc

SEQ ID NO: 974691 - DNA, 120 bp, Artificial Sequence
  ENSG00000243733_1 (sequence is synthesized)
ctggacagagctgacttcagtcctatctggagtttctccaagaagcttcttcctagaagctcatcatccctactcactttggggtgaaaatagctttgcaaaacctgctcagatgagtca

SEQ ID NO: 974692 - DNA, 120 bp, Artificial Sequence
  ENSG00000243733_2 (sequence is synthesized)
gcaggccagacctccagagcggtggatgtagtccacacgaaattgcctttagtgaactgagcattgatgttataccatttgattgcattgatttggtttataagaaccagcacatcccta

SEQ ID NO: 974693 - DNA, 120 bp, Artificial Sequence
  ENSG00000240423_0 (sequence is synthesized)
aagccgcgacagggaggcggggagggtgcgtgcgaacatgacgcagagatccattactgcgcgcggcggggaagaggacgccgccgggagctggtgcgtgacacactgcagcctcgcggg

SEQ ID NO: 974694 - DNA, 120 bp, Artificial Sequence
  ENSG00000240423_1 (sequence is synthesized)
ctgcccgggacttcatcaagcccgggtcggctcggggcgggcaggggtaggatccataccgccgaactgcggccccgctgctcgcagccgctcttccgggagcgcccgcttaggactcac

SEQ ID NO: 974695 - DNA, 120 bp, Artificial Sequence
  ENSG00000240423_2 (sequence is synthesized)
aattccaaatggcccccggaccctcccgcagatgcagggcgcacactggccagttctaaccatagacttgactgcatgttgacaagggtttccaacctagcttccccgaggtactgcatg

SEQ ID NO: 974696 - DNA, 120 bp, Artificial Sequence
  ENSG00000240423_3 (sequence is synthesized)
aatcagtccttgctcagatggtggttgctgtaaatagctgcaatttccctccttccgtctcaaagcacggatgggaatggatttgcagcagggactctgcattatatttaaggtcttggt

SEQ ID NO: 974697 - DNA, 120 bp, Artificial Sequence
  ENSG00000240423_4 (sequence is synthesized)
gagatggacacgggctccatcagctccagacttcctgggacatctcggcatttccaggtccgtttgccccaatggtggaagtcaccgcccatatatgaggaaataaatgtccacacctag

SEQ ID NO: 974698 - DNA, 120 bp, Artificial Sequence
  ENSG00000240423_5 (sequence is synthesized)
gtcagttaccggcatcctgcacacgtggatagtttgttcttttttgaagggagatccaagctcccacaggcaagagcacatcctactggacctgaggaagaaaatgatctgtccataccc

SEQ ID NO: 974699 - DNA, 120 bp, Artificial Sequence
  ENSG00000240423_6 (sequence is synthesized)
actgcctggagaatgatctgttgccagaagctggatgacttcgggcctagccaaatgccaagctatgctaagggaagttggggttcttgtcctggaaaattgcagaatggacgcagagat

SEQ ID NO: 974700 - DNA, 120 bp, Artificial Sequence
  ENSG00000240423_7 (sequence is synthesized)
aattgttttcagtttttgaaagacgctgcagaaaaagaggcaaaacctgatacagcacagcagcatgcccctcccgcccccaaatacgagatcgaatcacatttttaagggaaaaaatag

SEQ ID NO: 974701 - DNA, 120 bp, Artificial Sequence
  ENSG00000240423_8 (sequence is synthesized)
agatcgaatcacatttttaagggaaaaaataggcattctcatcttagatatgtatgtagcatattttataatatatatttttatctaaaaattatgcttttctgtattttacaactttct

SEQ ID NO: 974702 - DNA, 120 bp, Artificial Sequence
  ENSG00000240423_9 (sequence is synthesized)
acagtaaaaactctgaagacccaaagaaatttaatattagcttaaatgtacattagatatatttatagaatcaatttattagctgctatattgtttgacataaaaggcttttgaactaaa

SEQ ID NO: 974703 - DNA, 120 bp, Artificial Sequence
  ENSG00000240423_10 (sequence is synthesized)
agtggagccgcccctctgtagaacaatcttgggaagtgggcctggctgccaggagaggttctgggaggaggcaaggactttgtccatcttgttcactgcagcatccccagtccctacaac

SEQ ID NO: 974704 - DNA, 120 bp, Artificial Sequence
  ENSG00000280179_0 (sequence is synthesized)
ccccggctttctgcaaatccaccttatggaagccggataagcacctcctcctctgatgcgtcacagtcacaggtcctggtgaggagggagccacgccaagcacagcggctggaacagggg

SEQ ID NO: 974705 - DNA, 120 bp, Artificial Sequence
  ENSG00000280179_1 (sequence is synthesized)
caagtgggtgcccaccccgaagtgcaggcaatgaacttgtgctgtagcccatggtgagctgtggggctgtttgtgactgcagcgtagccaagcccatcccgcctgatgcggcctcttcat

SEQ ID NO: 974706 - DNA, 120 bp, Artificial Sequence
  ENSG00000280179_2 (sequence is synthesized)
ccagagtgggggtgacgtgccagcccccacctcaccggaatgctgggaggagcgtctccacggaaggagctcactttgtcagctgtaatgtgctgtgactatcgtaaagttccttccggg

SEQ ID NO: 974707 - DNA, 120 bp, Artificial Sequence
  ENSG00000280179_3 (sequence is synthesized)
tgcagagtgatacatgaaccctggggactcactccaacttggtattgattttctccacggaggacccagcagtcacggcccgtgtctgcacagccccttggatcctgcggaggaattcag

SEQ ID NO: 974708 - DNA, 120 bp, Artificial Sequence
  ENSG00000280179_4 (sequence is synthesized)
ccggcccctccccctgtgccgaaaaccacggaggcaaagccaggccagggtacagtgagaacacgggagaggactgagagaccgctggctgccgagggaggaagagcaggattcgcaccc

SEQ ID NO: 974709 - DNA, 120 bp, Artificial Sequence
  ENSG00000280179_5 (sequence is synthesized)
ccgtcatcgctgggcccacacgccgccgacagcttccgcgtgtggccatctgtctttcagaaaccctctggcagagggacccagcagatgacacgggggccgttcacactctgaaacctg

SEQ ID NO: 974710 - DNA, 120 bp, Artificial Sequence
  ENSG00000280179_6 (sequence is synthesized)
cctggagtcaaaacactgctggcgagcctccaccgcaaacccaatccagatggtcttccctggtggccctcggggtggcgggcaccctgcccactccctgccagcccctgcccgctggac

SEQ ID NO: 974711 - DNA, 120 bp, Artificial Sequence
  ENSG00000280179_7 (sequence is synthesized)
tccaggcccggccgagcccccgaccggtctcctgacccagcatgctgctctcccctgggcccggcttcctcgcccgctgggactcccaggcccctccagcccagccccgagagcaggagc

SEQ ID NO: 974712 - DNA, 120 bp, Artificial Sequence
  ENSG00000280179_8 (sequence is synthesized)
cccaagggaggcttggcggctgtggaggcgagtgggccacgtgtagctgggaggccggcaggaccaggagcccctcacagcgcagcacccacagcatcacgagccacttccactcctggg

SEQ ID NO: 974713 - DNA, 120 bp, Artificial Sequence
  ENSG00000280179_9 (sequence is synthesized)
tggcctgggggcccccaccctgctctgagctgccccttgttgtgacctggggtcccccgtggtgggcccgccccttgcgcctgggatccagcctcagcgaggctccagaagtgtcgtctc

SEQ ID NO: 974714 - DNA, 120 bp, Artificial Sequence
  ENSG00000280179_10 (sequence is synthesized)
cgccggccaggcgtcagcgcctccacccaggatcacacactcctatctctgcacttctgccctccatcctgctccacgccgcctctgcttgttattccagcacattccagggtgatgcct

SEQ ID NO: 974715 - DNA, 120 bp, Artificial Sequence
  ENSG00000280179_11 (sequence is synthesized)
gctgaagccacgcagccagtgcctccaccctaccccccatctgacccaccggccccttccgcacgctggaagcctgcccggcctgaagtgtcctcacctgtcgccctatcctcccctcca

SEQ ID NO: 974716 - DNA, 120 bp, Artificial Sequence
  ENSG00000280179_12 (sequence is synthesized)
ctccagcccaccggtgactcagccctcacagctctctcctccccgagggagccggtgacttggctctgatggtgccgggacccagccccggcatgttcagaatccttgtcctttaacctg

SEQ ID NO: 974717 - DNA, 120 bp, Artificial Sequence
  ENSG00000280179_13 (sequence is synthesized)
gtccacatgtagtcgcctccacctccctgcctgaacctccaggccctgcagagcaaacactgctgcctgcaggagacccctggggccttctccgtcccctcatcctcctaaggagcctcc

SEQ ID NO: 974718 - DNA, 120 bp, Artificial Sequence
  ENSG00000280179_14 (sequence is synthesized)
cctgccaccgtgccagaatgtgccggaggaacagaggcccgagcctcccgtggccccagcgaggcttcctctggggaagacagtgagcccaacgccctggctctcgaggggtggacggag

SEQ ID NO: 974719 - DNA, 120 bp, Artificial Sequence
  ENSG00000280179_15 (sequence is synthesized)
tccagctggcatcgaccgggtgcccctcttcaccggtgtccacagtccttgagagcaaaggtggtcccagcagtggagcagagggcaagggtggggcatgtagagtctccagggagccac

SEQ ID NO: 974720 - DNA, 120 bp, Artificial Sequence
  ENSG00000280179_16 (sequence is synthesized)
tgttggttagagagggagcccgaagtgggctccggaccccagcagggacagcgtccccttccagcgggggcagccgattgatctgggcacacgagcaggaggagcggcgccacccagggc

SEQ ID NO: 974721 - DNA, 120 bp, Artificial Sequence
  ENSG00000280179_17 (sequence is synthesized)
tgacctcacggccctgctcacgtctcggggcattttggcagacccacctagacctgggggacagcctgatttcctgcagccatgacctacaagggtggcagctctctcaggcttgagtaa

SEQ ID NO: 974722 - DNA, 120 bp, Artificial Sequence
  ENSG00000280179_18 (sequence is synthesized)
ccaggacacagacctgggccatttaatgcgcaggcagccccaagtcccggcagggccagaagcagagacggcggctggggatgaaagtgcacgctggtcccagatggggctgggggtgaa

SEQ ID NO: 974723 - DNA, 120 bp, Artificial Sequence
  ENSG00000280179_19 (sequence is synthesized)
agctgcatgctgatccctgggccccctcactctatgagctcctgaaaggagggaagcccccacaccctactgagtggagtgctccttggcctgggaccccgtccagtgtctgctgctgtg

SEQ ID NO: 974724 - DNA, 120 bp, Artificial Sequence
  ENSG00000280179_20 (sequence is synthesized)
ggggcgggctctgggcagagagaggccagacaggcacccaggaaagctggaacacatccctcctgcttcccccagggttcccagaggcgacctccctcctgcacaggcatttgtcatcct

SEQ ID NO: 974725 - DNA, 120 bp, Artificial Sequence
  ENSG00000280179_21 (sequence is synthesized)
taccctctaggacagctttgccatgtgcagtgaacccctggacagtgttgcgtgccactttgccggatttggactgtatacagaccgaagcatgtggcatgaagccttctgctgtcagca

SEQ ID NO: 974726 - DNA, 120 bp, Artificial Sequence
  ENSG00000280179_22 (sequence is synthesized)
agttccttgtccctcgacagtatgtgcccaggctgcccttcaaggtggcagtgatggcagttgtctcttgcacgctgcgtacagttctgtcactgactcttacacacagccctggagacg

SEQ ID NO: 974727 - DNA, 120 bp, Artificial Sequence
  ENSG00000280179_23 (sequence is synthesized)
ggagagtgccgggagcattctatgcaagtgtcctggcctttgcgggcgtctccacagcacaaacacgagtcagggaccacccctcttctgcttccatgattccaccaactgggtggggca

SEQ ID NO: 974728 - DNA, 120 bp, Artificial Sequence
  ENSG00000280179_24 (sequence is synthesized)
gagcagtgccagggccggaggcacgccccaggtgagggcaggtggccatgccagtgagtgcactgcgttctcagttaattcatccgaaatatttctaagtttcttgattattgcagttgc

SEQ ID NO: 974729 - DNA, 120 bp, Artificial Sequence
  ENSG00000280179_25 (sequence is synthesized)
atccccaagataatgccgccctcaccaagtagaaggcacatgtgctctgatggcccctcccacactggggtcagggcacagcaacttagcgaggcgacgtgggggctcagaggacctcgg

SEQ ID NO: 974730 - DNA, 120 bp, Artificial Sequence
  ENSG00000280179_26 (sequence is synthesized)
accaggctcggcacatggggcttctccagccagccagggggaagcaccctgcagactgctaacttttgcaaaatagagtaaaaaagatcagctagaaaaataaaacaaaaaaggaaagat

SEQ ID NO: 974731 - DNA, 120 bp, Artificial Sequence; identical to SEQ ID NO: 920114
  ENSG00000280179_27 (sequence is synthesized)

SEQ ID NO: 974732 - DNA, 120 bp, Artificial Sequence; identical to SEQ ID NO: 920115
  ENSG00000280179_28 (sequence is synthesized)

SEQ ID NO: 974733 - DNA, 120 bp, Artificial Sequence; identical to SEQ ID NO: 920116
  ENSG00000280179_29 (sequence is synthesized)

SEQ ID NO: 974734 - DNA, 120 bp, Artificial Sequence; identical to SEQ ID NO: 920117
  ENSG00000280179_30 (sequence is synthesized)

SEQ ID NO: 974735 - DNA, 120 bp, Artificial Sequence; identical to SEQ ID NO: 920118
  ENSG00000280179_31 (sequence is synthesized)

SEQ ID NO: 974736 - DNA, 120 bp, Artificial Sequence; identical to SEQ ID NO: 920119
  ENSG00000280179_32 (sequence is synthesized)

SEQ ID NO: 974737 - DNA, 120 bp, Artificial Sequence
  ENSG00000241770_0 (sequence is synthesized)
aaagtcatcagcagcaagatgggcattgtcagtctgcagaacgcattgtccacaatatttgtgaagatctgagccctcaggtcctcaatggtcttgaaataatggctccagtctctgacc

SEQ ID NO: 974738 - DNA, 120 bp, Artificial Sequence
  ENSG00000241770_1 (sequence is synthesized)
cagttttcctgactctgattctgcgtgggacaaccagtgaaaattgcaggtgaagagaagaaatgcgtatttattcctccactgggaaaaaaaataccatccaaagctacatgacttgag

SEQ ID NO: 974739 - DNA, 120 bp, Artificial Sequence
  ENSG00000241772_0 (sequence is synthesized)
tgaacagttgaaaaatggaattgactttcactcctccaggtccagaaggattctaatacacaaaccataagcaagagttgtttctgttattttgtccacagaacagaagctgaaaaagca

SEQ ID NO: 974740 - DNA, 120 bp, Artificial Sequence
  ENSG00000241772_1 (sequence is synthesized)
tattgcttgcatttcagccagtccccttaatactttgagaacactgggatgtgatgtctccgtctgccacctcagaatcatttgttcctacgagaaggccaagagtggtacttgctttga

SEQ ID NO: 974741 - DNA, 120 bp, Artificial Sequence
  ENSG00000241772_2 (sequence is synthesized)
tcactgtttttaaatagaagacacattggtagaaatctttcatataatatgttgctgcttttgggggggtgttggggagtaccagagaggtctgcatgcatctgcagtgtacactggcaa

SEQ ID NO: 974742 - DNA, 120 bp, Artificial Sequence
  ENSG00000241772_3 (sequence is synthesized)
tcctgttgtgcttcctttccacctctccctggctgttcccccacccccttgttccttttgtaaaggatgcaggtgtagtcttgtgccagtctgtgacataacacctgaacaatttctatg

SEQ ID NO: 974743 - DNA, 120 bp, Artificial Sequence
  ENSG00000241772_4 (sequence is synthesized)
tttctatggtatcctacccatttgctcagattcaaaccaggccttaatcgataacaagcaaagagaaaaaaaggtgggatttgtaaataacaattacagcaaaaaaaaaaaaaaaaaaaa

SEQ ID NO: 974744 - DNA, 120 bp, Artificial Sequence
  ENSG00000241772_5 (sequence is synthesized)
gagaactctgctattctgcttaaaatagatatattgccataaggagaggtttttagaatgtgtgttttataaagtcctaaaaaaattgtgatggtcattataataggcaaagatgaaaaa

SEQ ID NO: 974745 - DNA, 120 bp, Artificial Sequence
  ENSG00000241772_6 (sequence is synthesized)
actaagcatttgttatccacaacaacctagagtttaaaaagatcgtattttcacctgtcttcattactttctatgtagtttcattctttgtcgtggtaacttaaatttgaaattggaaga

SEQ ID NO: 974746 - DNA, 120 bp, Artificial Sequence
  ENSG00000241772_7 (sequence is synthesized)
atctcttgggatagaagaaagattcttacctggtgatggaacttcatacttcatcctgtgtaagagtattatgggaagtagaaattcacttccttaaatccatcgtaagattgagcctca

SEQ ID NO: 974747 - DNA, 75 bp, Artificial Sequence
  ENSG00000243885_0 (sequence is synthesized)
tcgggcccacttgttcttttgttgctccattctttgctttgctgggcgttttgtccaattctttgttcaaaacgc

SEQ ID NO: 974748 - DNA, 120 bp, Artificial Sequence
  ENSG00000243885_1 (sequence is synthesized)
acgccaagaacctggacaacttgcaatcatgaccagtgacacaggcagctgtgatctgtggaaggaggccagcaggagagaacttgctacttttcccagggaggacctggtctcccatca

SEQ ID NO: 974749 - DNA, 120 bp, Artificial Sequence
  ENSG00000243885_2 (sequence is synthesized)
ggtctcccatcagacagagagaggagctgcaagtggcctgctacttctcctgcctcacaaagagaaccacttggtgaaccgggttcaaaaggtgcaaacacatgaattcatcagtttaaa

SEQ ID NO: 974750 - DNA, 120 bp, Artificial Sequence
  ENSG00000243885_3 (sequence is synthesized)
gtttttagggttttttttttttattttaatcaatggtttttcttctcaactgaaatgaaccttgctggacttgcgtagcctcatgtataaaactagaaagttgggccacctacatcagtg

SEQ ID NO: 974751 - DNA, 120 bp, Artificial Sequence
  ENSG00000243885_4 (sequence is synthesized)
tacttaaaatgcagattcctggcctcacccacagacattctgtttcccttgggctgaatcagggtgtgtcgttttagaaaaccatagaccgttttctgttgaaaatcaaatggtctttga

SEQ ID NO: 974752 - DNA, 120 bp, Artificial Sequence
  ENSG00000243885_5 (sequence is synthesized)
agccctccacatctcacatgccaggctctaattattcaacccaaggaaatgatactcaaatcagaacatgagagtcctttccccttcaagtatttatgcactagttgccctaggtgccct

SEQ ID NO: 974753 - DNA, 120 bp, Artificial Sequence
  ENSG00000243885_6 (sequence is synthesized)
ggatgccttcagctcacccattcaagaggaagtcacaccagcccttctgggtagctagccctcaggaagggagacccagagccacatcttgagcttcagaccacagggcaggcaccccag

SEQ ID NO: 974754 - DNA, 120 bp, Artificial Sequence
  ENSG00000243885_7 (sequence is synthesized)
gaggtgtcttgtctgaaaatggtaactgagacctgggagagttcttggcttaatgagccatcagctgagcaatgttgaactaaaattaccagataaagatggggaattggtgattaattc

SEQ ID NO: 974755 - DNA, 120 bp, Artificial Sequence
  ENSG00000243889_0 (sequence is synthesized)
gaggcagggatcagccagataccaagatatcacagacacacagggaaaaagatcatcctgaaatttgctcagattaggaaccattattcagtgttctgttatcaataagaccaagaatag

SEQ ID NO: 974756 - DNA, 120 bp, Artificial Sequence
  ENSG00000243889_1 (sequence is synthesized)
atgaccaaaggcggtgccaaggaagggtacaatgtctctggaaacaagctcaagcattttccctcaaccctggagtctactagcaccagccagacctctgtacctctgtggcagtgcatc

SEQ ID NO: 974757 - DNA, 120 bp, Artificial Sequence
  ENSG00000243888_0 (sequence is synthesized)
gctagattttttgaaagtcccaagagaagtggtggtcttcccttctgtcatcccagtatatatagttatacatgtaaatatctaaataccccatggtgtgctggtggctcagctttgggg

SEQ ID NO: 974758 - DNA, 120 bp, Artificial Sequence
  ENSG00000243888_1 (sequence is synthesized)
agaggcaccagaacccatcctgccttttctccagtgtgagcatttcagggagccaccatcagccttgggttcatgagaggaagaaacccccaaagaccaatgcctggagcccacttctcc

SEQ ID NO: 974759 - DNA, 120 bp, Artificial Sequence
  ENSG00000243888_2 (sequence is synthesized)
agcgacaccttccctcgccagagcaggctcctaggagtgcatggcaggggtgccgggtccctgtgcacgggtttgctttctgaacattgcccatcaacaccgccttcagggagtcccaga

SEQ ID NO: 974760 - DNA, 120 bp, Artificial Sequence
  ENSG00000232287_0 (sequence is synthesized)
tactgtgaatagtgctgctgtgaacaggagtgtacaaatatctctttgagagctgcttgtaattcttcaggtatctactcagaagcagaattgctggatcatatgtgcccaactgagaac

SEQ ID NO: 974761 - DNA, 120 bp, Artificial Sequence
  ENSG00000232287_1 (sequence is synthesized)
ttcattttgtcaaggcaattttcaatctgatccgcatcgactgtgcacctccggggagccgggcctcatgctgggtgctgagggacaaagatgcaagttggagtctgagtcctgctgcca

SEQ ID NO: 974762 - DNA, 120 bp, Artificial Sequence
  ENSG00000232287_2 (sequence is synthesized)
cgctctgcttccccgacagcaggcagcttgaacagtgctagatatgcatgcgctcttctgggttctgccctctatggcagaggacattgttcttacaaggcctcagcacagaaacgtttg

SEQ ID NO: 974763 - DNA, 120 bp, Artificial Sequence
  ENSG00000232287_3 (sequence is synthesized)
cttgggagaaggtggcaggtctacagagcaatggtgtgctggtaagctttaacaatgggctctcaggaaacaaaacagaagactcaatttgcagcatctgctgatttctgtggtgtaaac

SEQ ID NO: 974764 - DNA, 120 bp, Artificial Sequence
  ENSG00000237301_0 (sequence is synthesized)
gcatttggctcctggttgctaggcgacgccaacccgattctggttgctggagtttatcctcccgaggttgctgtgcgagtttcggactcagctcaagcgcttggatccctacagcacctg

SEQ ID NO: 974765 - DNA, 120 bp, Artificial Sequence
  ENSG00000237301_1 (sequence is synthesized)
cgagggcttctcctggctgccgctttcgttctggcgaatgttcggggtggcagccccccttcgaggcttgcacgagggcgtcccggcatccgcgatcaagcgggccctgctgcttttggg

SEQ ID NO: 974766 - DNA, 120 bp, Artificial Sequence
  ENSG00000237301_2 (sequence is synthesized)
gctgaccctgcggctggggtgctgcggcgtcgctctggctatgcccggtccactcacggactccctgctttggcctgctcagctcaggagaaccgggcccgactccatttcgggcagtgg

SEQ ID NO: 974767 - DNA, 120 bp, Artificial Sequence
  ENSG00000237301_3 (sequence is synthesized)
tggacagggaaactagtgcctgcctgtagtggtcccaggcatagagcttcctgcagctaccctgtggcttagttcacgttttgttgctttgaccaccgatgagaaatgtgcagtagggac

SEQ ID NO: 974768 - DNA, 120 bp, Artificial Sequence
  ENSG00000237301_4 (sequence is synthesized)
cctgtaggagtctgcttacccgaaatggtttctgtcttgaatagttgttgagtgaaagctcttgctgctgctcactctttgggtctgtgccgccttcatgagctgtgacactcaccgtga

SEQ ID NO: 974769 - DNA, 120 bp, Artificial Sequence
  ENSG00000237301_5 (sequence is synthesized)
gtgaagttttgcagcttcgctcctaaagccagcgagaccacgaacccactgggagggacagcaactctggacgcgccacttttacgaactgtagcactcaccgcaaaggtctgcagcttc

SEQ ID NO: 974770 - DNA, 89 bp, Artificial Sequence
  ENSG00000237301_6 (sequence is synthesized)
acaactccagacgcgccgcctttaagagctgtaacactgcatagaccacgaacctagcagaaggaagaaacttcggacacatctgaaca

SEQ ID NO: 974771 - DNA, 77 bp, Artificial Sequence
  ENSG00000237301_7 (sequence is synthesized)
gtctgcagcttcactcctgaagtcagcgtagaccacgaacctagcagaaggaagaaacttatctttaagaactgtaa

SEQ ID NO: 974772 - DNA, 120 bp, Artificial Sequence
  ENSG00000237301_8 (sequence is synthesized)
tcagcgagacaaagaacccaccaattcgatacactgggaccacaggtgtgcaccaccagtcttggctaacttttgtattctttgtagagacaggatttccccatgttggccaggctggtc

SEQ ID NO: 974773 - DNA, 120 bp, Artificial Sequence
  ENSG00000237301_9 (sequence is synthesized)
tcaagctcctggactcaagccatgtgcctgccttggtctcacaaagtgctaggattacgggcatgaggcaccgcacccagtgagaccctatttctacaaaaaatacaaaaattagctggg

SEQ ID NO: 974774 - DNA, 120 bp, Artificial Sequence
  ENSG00000237301_10 (sequence is synthesized)
tgggaggctgaggcagaaggattgctcaagcccagggggtggaggctgcagtgagctatgactgtaccacagcaccacagccttcatgacagagcgagacttctatctcccttaaaaaaa

SEQ ID NO: 974775 - DNA, 120 bp, Artificial Sequence
  ENSG00000237301_11 (sequence is synthesized)
tgagggctggggtggagcactgcaggcagacagaaaagcatgaacaaaggaaaggaggcaagaaagtgggggctgaggcagctgaccatgggctggaggaacaagcccgtggagctgcag

SEQ ID NO: 974776 - DNA, 120 bp, Artificial Sequence
  ENSG00000237301_12 (sequence is synthesized)
aaggggaaacacaggaagaattggctccaggaagcattaccgggcaggcatatgtatggtgatactagtgagagtgagatcagctggaaagctggggtgggaaggcctggaccagagtaa

SEQ ID NO: 974777 - DNA, 120 bp, Artificial Sequence
  ENSG00000237301_13 (sequence is synthesized)
cagcagaggaaatgagcagaaggcttgggggcaggaaaccatcaggacttcttaaatttgggggcgtagagcaggatcagagacagggaggtggaaagtcgctggctgaacttgcagccc

SEQ ID NO: 974778 - DNA, 120 bp, Artificial Sequence
  ENSG00000237301_14 (sequence is synthesized)
accccaggtgctgtcaagcatccaggtcagggttagaaattggtcgcctggagctcagggctgggatttgggcttgtggttgacctgcctatgggtgaaagtcatcacctccgtattaaa

SEQ ID NO: 974779 - DNA, 120 bp, Artificial Sequence
  ENSG00000237301_15 (sequence is synthesized)
agggattgccagccgagaaggagccacgaaggtggaaggagaccaggggagtcccagtcaagaggccgcctgaggaacgtttcaaggagagagggtgctcagcagtagtggatgttgggg

SEQ ID NO: 974780 - DNA, 120 bp, Artificial Sequence
  ENSG00000237301_16 (sequence is synthesized)
acacctcattggaacgcctggcacatagcggacactcaatatttgtgagctgaatgaaagaaaaacccggagtaagaacatgatacattcaggacaagcaacatgaaagaaatagcagtt

SEQ ID NO: 974781 - DNA, 120 bp, Artificial Sequence
  ENSG00000237301_17 (sequence is synthesized)
gaatttgggagtcaagagaataactgagaccctttaagtggcataagggagaaaaaaaggaaaaaataactgagagattgttgcatttgttccagaaaatggctgggacctgccccaagg

SEQ ID NO: 974782 - DNA, 120 bp, Artificial Sequence
  ENSG00000237301_18 (sequence is synthesized)
ccaacactaagcactgataattgaccattaggaaactctgtcccgacctgcagagtggaggctccactccagagtggaggctggagtggtgtggggtttaatgtgcaacctttttttttt

SEQ ID NO: 974783 - DNA, 74 bp, Artificial Sequence
  ENSG00000237301_19 (sequence is synthesized)
ctcccgggttcacgtcattctcccgcctcaggctcccgagtagctggtactacaggtgcccaccaccacgcctg

SEQ ID NO: 974784 - DNA, 120 bp, Artificial Sequence
  ENSG00000237301_20 (sequence is synthesized)
aggtgtgagccaccgcgcctggcctaatgtgcaacctttgtgtagaggttgcaacgtaaatgcaaatgtgagccttttccattcaatctcaacatttagagatcagaaaaaataatatat

SEQ ID NO: 974785 - DNA, 120 bp, Artificial Sequence
  ENSG00000237301_21 (sequence is synthesized)
gatcagaaaaaataatatatataatactgctaaatggctcacataattccattacaaatcacttctttctttccacgtgtgtttttctttccccttagaaataaagaggatgtaacaggt

SEQ ID NO: 974786 - DNA, 120 bp, Artificial Sequence
  ENSG00000272575_0 (sequence is synthesized)
atagattcatatttgaccataattatttatttcaacatttctctgcactaccagactttgagttccctggaactaaaaatattgcttggacctcacgctgtacctgaatacctgagaggg

SEQ ID NO: 974787 - DNA, 120 bp, Artificial Sequence
  ENSG00000272575_1 (sequence is synthesized)
gagacatgagaagggaactaaacacacaggcttcaggatctggtggaaagagataaggtgtctcaacgactgttggcctcatcaagagatactacccctgatcttttcatttcactttcc

SEQ ID NO: 974788 - DNA, 120 bp, Artificial Sequence
  ENSG00000272575_2 (sequence is synthesized)
tcgggtctgcctaaactcagtgtctctcctagaaaaccacccaactcatgaaaaactgtttgtaagaaaatgttctcaacacaaagaaataataaaggtttgagatgataaatatgctaa

SEQ ID NO: 974789 - DNA, 120 bp, Artificial Sequence
  ENSG00000272575_3 (sequence is synthesized)
agtcattcggaattctgaaagaccacagcactctatgtctacttctattatagattcatatttgaccataattatttatttcaacatttctctgcactaccagactttgagttccctgga

SEQ ID NO: 974790 - DNA, 120 bp, Artificial Sequence
  ENSG00000272575_4 (sequence is synthesized)
actaaaaatattgcttggacctcacgctgtacctgaatacctggcattaagaacttatttgcctcataacccaaattcctgctccccaataaaaaatgagtaacatcagggtataaaatg

SEQ ID NO: 974791 - DNA, 120 bp, Artificial Sequence
  ENSG00000272575_5 (sequence is synthesized)
ccagctggaagagtattcgcaaccatatacaatgaagagtcacacttccaagaagaaagccgatgtcccacttcagcatcaaatctaagacactgcatttcactttttctgtacaaatat

SEQ ID NO: 974792 - DNA, 120 bp, Artificial Sequence
  ENSG00000272575_6 (sequence is synthesized)
gggtgctgaatggaatccacctaaactggctcgtcctcaaacttcataccagagcaatgaatcaccttcaaagctaactcagggagcatattggctccaaagaccattaaccctgggaac

SEQ ID NO: 974793 - DNA, 120 bp, Artificial Sequence
  ENSG00000272576_0 (sequence is synthesized)
atcatcccatgtatagaagtacttgcttagaaatcatggtgaattagtacgtaggctatgctgagaataataattggaaactgaaaaacaaagattgactatagtaattaaatggaaact

SEQ ID NO: 974794 - DNA, 120 bp, Artificial Sequence
  ENSG00000272576_1 (sequence is synthesized)
ttaaaaaccatcatttaaaatgtaaatctcttctccaataagtgtattcggtcctttgaaagaaactcctttgcaatcactctctgaaaaatatagattgtaaagaatcctggctgtgag

SEQ ID NO: 974795 - DNA, 120 bp, Artificial Sequence
  ENSG00000272576_2 (sequence is synthesized)
gaaaagggtttgtttttccctctgacactttccagcagagacatctcagaattgcctaagtgtgaatatctaaaattacaaactagtgttctctagaaatcttaggatacatgtgtgatg

SEQ ID NO: 974796 - DNA, 120 bp, Artificial Sequence
  ENSG00000272576_3 (sequence is synthesized)
ataaagagagctacagctgtactcattaccagtgaaataactcatgaaaaagttttgggccaactttcgatagcatgttgaaagccactgcgttttctttgtctctacttgcttattgtt

SEQ ID NO: 974797 - DNA, 120 bp, Artificial Sequence
  ENSG00000272576_4 (sequence is synthesized)
catttttgcttcattacctatggtggcttctctgtatcccatagtgagagtagggcctggacaaggtttgtaatcctatcacacttccaaaattattgaataaaataatagatgccttct

SEQ ID NO: 974798 - DNA, 120 bp, Artificial Sequence
  ENSG00000272572_0 (sequence is synthesized)
cggccttggccggcgcgcgggggcggaaaggcgcgggcagcagctggcggacagctgacgacacccgcctggttgaaggcgaggggtgagggtttgctgaagcaaaccggagcccggcag

SEQ ID NO: 974799 - DNA, 120 bp, Artificial Sequence
  ENSG00000272572_1 (sequence is synthesized)
ctgccttcgttgaggatggccaacacttgggcttcctgtgtcacacaattgtgcctcagaaatccgcagctgttcattacatcgtctctttaacagcttaggccaaagtgccataatact

SEQ ID NO: 974800 - DNA, 120 bp, Artificial Sequence
  ENSG00000272572_2 (sequence is synthesized)
gtcacaatttgctgagggatctgcacagcgcgatccgaagacttgtccattctacgacggttcttgttgagtgtcagcggtagattatttttttgtctttaagaagaagaaaaaaccccc

SEQ ID NO: 974801 - DNA, 120 bp, Artificial Sequence
  ENSG00000272572_3 (sequence is synthesized)
aaaaaactccattggaataaagacagttgttaatccacaaaagcattttgtttctcatgagttaccatgaagtctctgcagccgacttccttggagattttttaaaggaacacaaggtca

SEQ ID NO: 974802 - DNA, 120 bp, Artificial Sequence
  ENSG00000272572_4 (sequence is synthesized)
gctttcagttttccatgttaagcgtgggcagcatagataagtaaaagctgcctgcaatctccaaccctcctttgtaaagggcttgtgctctggaggctgttagccatggttttccttata

SEQ ID NO: 974803 - DNA, 120 bp, Artificial Sequence
  ENSG00000272572_5 (sequence is synthesized)
aaccgagagactggtcagtatctctgaacctcagcctccacatctgtaaaacgggcattttactcacttttctgggtaattgtaaaccataaaaggataaaacagtgtacactgcacagt

SEQ ID NO: 974804 - DNA, 120 bp, Artificial Sequence
  ENSG00000272572_6 (sequence is synthesized)
tacttctttacaaaatcttccagagacaggtcaaatactgttgcaataactgttaacaaccaaaatatcaatttcaagatgtccaagctttaattgacagagttatttaatcagttggat

SEQ ID NO: 974805 - DNA, 120 bp, Artificial Sequence
  ENSG00000272572_7 (sequence is synthesized)
ggaaaaaaatcttaaatgatataaaataatttggacgggtctttcaagtttattgtatagaaattgaactattggcctgatacagttgctcacatctataatcccagcagtttgggaggc

SEQ ID NO: 974806 - DNA, 89 bp, Artificial Sequence
  ENSG00000272572_8 (sequence is synthesized)
aaataaattaattaattaaaatttagaaaaaacgaaattgaactgttctggtcactaagcatgcctgactgactccaagttcacctcct

SEQ ID NO: 974807 - DNA, 120 bp, Artificial Sequence
  ENSG00000272572_9 (sequence is synthesized)
ggtcactaagcatgcctgactgactccaagttcacctccttttcccttcccctttagtccccgggaggaagaattaataaggaataaagtggacaaaaagctggcaaagtagagggtcga

SEQ ID NO: 974808 - DNA, 120 bp, Artificial Sequence
  ENSG00000272572_10 (sequence is synthesized)
aggtaaacagtgaatatacaggtttcacattcaccccaaaagcacatatgtacagctgtatactagctaatggtggcggaagaagggaagtgccaaaatagagggtacttttctgctcct

SEQ ID NO: 974809 - DNA, 120 bp, Artificial Sequence
  ENSG00000272572_11 (sequence is synthesized)
aatagcggagaatttactatacgtaacattgttttttacataaaaaaacatgatactcaaaatgtgttgaatgacttacacatttgcattttacatgtattatttcctatctcttagtgc

SEQ ID NO: 974810 - DNA, 120 bp, Artificial Sequence
  ENSG00000272572_12 (sequence is synthesized)
tttctgttggatgtttttacactaggaagtttctgtactataacagagcacatctacgaaacatttaatccgattcatttccttgcatgcctaatcgataaagagtaatgcataaaaaca

SEQ ID NO: 974811 - DNA, 120 bp, Artificial Sequence
  ENSG00000240288_0 (sequence is synthesized)
cttccattccctccagtaaatacttgtttttcttccaccgctgaggcaaatgcggggtggctgatcacctggcagacatcttaggaaacaggagcaccggtctgggaaactgctggcctg

SEQ ID NO: 974812 - DNA, 120 bp, Artificial Sequence
  ENSG00000240288_1 (sequence is synthesized)
gcctaacacctggcgctgtggtgcaggcaagagggcagccactgaggattcttgaggagagagagaccatagaatgaatgaaagagttggaaagactttaaagctctgggaggctgaatc

SEQ ID NO: 974813 - DNA, 120 bp, Artificial Sequence
  ENSG00000240288_2 (sequence is synthesized)
ctttatttcgctggaagaaaaactgaatgccaagagggcctcactttccccaaagctatacagccatcaggggcaatgctgggattcccccatggatctcttgactcctaatacagtgct

SEQ ID NO: 974814 - DNA, 120 bp, Artificial Sequence
  ENSG00000240288_3 (sequence is synthesized)
ctttctgatatgccatctggctccataatgaacattgtgttccaggaaaatcagtctgcgctgaacaggatggaattggggcaggacgtccagtgaggaggacattgaggcagtagagca

SEQ ID NO: 974815 - DNA, 120 bp, Artificial Sequence
  ENSG00000240288_4 (sequence is synthesized)
gttgattgccgaatgaccacctaccctgacttaaaagatcaacctcagggaggattggagctttctagagtctcttgggacagcagaagcacaggccgggttggactgaatctttaagtg

SEQ ID NO: 974816 - DNA, 120 bp, Artificial Sequence
  ENSG00000240288_5 (sequence is synthesized)
gacatgagggacaaagtacctcctgttggtaaacatctcaccaccaacccactgtggtggctaaaatcccacctttagtcccagcaacatatgagcatgtcaccaggaggtcttcacagg

SEQ ID NO: 974817 - DNA, 120 bp, Artificial Sequence
  ENSG00000240288_6 (sequence is synthesized)
cctgtctgccacctgagtgtagacatcttttggccctggagcccagagaggctgaatgtggagagggtggagagaggtctgtagtcctcagagaagacttgcagctttttcagagccacc

SEQ ID NO: 974818 - DNA, 120 bp, Artificial Sequence
  ENSG00000240288_7 (sequence is synthesized)
aacccataaaaaaaaaaatccccaaacagaaaaatcctaactgtggtgaccaggtacctcctgagacatgaagcctccacttacctggaccctggaggcctctccgggcacagctgccaa

SEQ ID NO: 974819 - DNA, 120 bp, Artificial Sequence
  ENSG00000240288_8 (sequence is synthesized)
tgttgatcttagataagaccaccagcaagtaaacatccactgtgcaaagctgtgttatctttggggaactgaaatgtcccctgggagttggaaactcccctagccacataccacagagtt

SEQ ID NO: 974820 - DNA, 120 bp, Artificial Sequence
  ENSG00000240288_9 (sequence is synthesized)
gaggaaggaagagctgatggacggaagaaccatggcgggaggagtcatccggaagctacctcgctgccctgtcagttacggaacagaggagagatgccggctggaggacacagcaaattt

SEQ ID NO: 974821 - DNA, 120 bp, Artificial Sequence
  ENSG00000240288_10 (sequence is synthesized)
gaaccaagaggagcttggaggaagcccgagcgacctggaggggactggctgaccttcctcattcttttcaagtgtgaataataaccaagcccagtttggcaactccttgagggtgaggac

SEQ ID NO: 974822 - DNA, 120 bp, Artificial Sequence
  ENSG00000240288_11 (sequence is synthesized)
gaagccccattctcctttttggaacttggtggggctcaggaagcaggttctctccagtcggtggctttcctttctgttgcgggtctcttgagggcctgccttcatgaaggcacatgagtg

SEQ ID NO: 974823 - DNA, 120 bp, Artificial Sequence
  ENSG00000240288_12 (sequence is synthesized)
agcaagctcttttttcatagatttggctaaacttcagtctgaaagaggcaaattctggggttctagaaagagattttattctttgatatagggctatttggtggggttgctttttgtcct

SEQ ID NO: 974824 - DNA, 120 bp, Artificial Sequence
  ENSG00000240288_13 (sequence is synthesized)
agttgtagcttttataatttcgagattcacattttgcaatagaaatatacaggcataccttggaggcattacagctttggtcccagaccacaatgaagcaagtcacacgaattttgttgg

SEQ ID NO: 974825 - DNA, 120 bp, Artificial Sequence
  ENSG00000240288_14 (sequence is synthesized)
tttgttggtttcccagtaaatataaaacgtatgctgataccatactatagtctaagtgtgcaacagcatatgtctaaatgaatatacatatatatttttttgagacaggttcttgctctg

SEQ ID NO: 974826 - DNA, 77 bp, Artificial Sequence
  ENSG00000240288_15 (sequence is synthesized)
tggcactatcatggctcactgcagcctccacctccctggactaagacacaccaccacacccagttaatttttgtatt

SEQ ID NO: 974827 - DNA, 89 bp, Artificial Sequence
  ENSG00000240288_16 (sequence is synthesized)
gcctaggctggtcttgaactcctggcttaagtgatctgcctgactttagtctttgaaatccagtgtgtgttcttacagtgcatttcaat

SEQ ID NO: 974828 - DNA, 120 bp, Artificial Sequence
  ENSG00000240288_17 (sequence is synthesized)
tctttgaaatccagtgtgtgttcttacagtgcatttcaatttggactagccatgtttcaaatgctcagcagccacatgcggctcattctagataggcggccatcgctcttaaatcctccc

SEQ ID NO: 974829 - DNA, 120 bp, Artificial Sequence
  ENSG00000240288_18 (sequence is synthesized)
tgaccttagccatgctctctcatccctcctcttcgccaagctctgcctctctcactggggcttccctagcctccggccatcttggggccaaagctctaacactttgcctctctcgtgtct

SEQ ID NO: 974830 - DNA, 120 bp, Artificial Sequence
  ENSG00000240288_19 (sequence is synthesized)
tctgttcccctccagtggcttctgctttctgccttaaaatacacccaggttcctaatcctgaaaacgtctgttgtgcaccgatcccaccctcccctcgtgttaccatctccatttccttc

SEQ ID NO: 974831 - DNA, 120 bp, Artificial Sequence
  ENSG00000240288_20 (sequence is synthesized)
ccctttccttgtgtcctcttctttgctgtgtcctggcccctcaaaacttgaccttgcctctcatccccactgctgtactgaaactgttgtctcagcgttgctgatcatccagccttttag

SEQ ID NO: 974832 - DNA, 120 bp, Artificial Sequence
  ENSG00000240288_21 (sequence is synthesized)
tctatggaccgctaagagccataggacgacctcagggtgggacgtggcttggagggccatctcgtctcaatttccagatacagacctgtgttgggttgtgttggattcatgaggaaagct

SEQ ID NO: 974833 - DNA, 120 bp, Artificial Sequence
  ENSG00000240288_22 (sequence is synthesized)
tcataagttttatgcacgtttataagactccatccttggattctgatccagtagctctggcgtgggggctttagaatctgtttcaagtatctcaggtaattttgattataaattaccaag

SEQ ID NO: 974834 - DNA, 120 bp, Artificial Sequence
  ENSG00000240288_23 (sequence is synthesized)
tatcccaggtaaattttgattataaatgcttgcttccagcagaaaatataaacatatggaagatgaaatctttctctctgaataacccaattcagtttccactcgtgaatatcttatata

SEQ ID NO: 974835 - DNA, 120 bp, Artificial Sequence
  ENSG00000240288_24 (sequence is synthesized)
gtttgaacatttattcgcctcctgagcttgtacaacagtcgtgggagttgctgcagaagcaagcgaaaagccagatgagcgcttctaaacttagagagagggagagcgcctcatctcttc

SEQ ID NO: 974836 - DNA, 120 bp, Artificial Sequence
  ENSG00000240288_25 (sequence is synthesized)
gtttgaacatttattcgcctcctgagcttgtacaacagtcgtgggagttgctgcagaagcaagcgaaaagccagatgagcgcttctaaacttagagagaggagggcagccactgaggatt

SEQ ID NO: 974837 - DNA, 120 bp, Artificial Sequence
  ENSG00000246548_0 (sequence is synthesized)
atccatcttggggagagtggtggcgggtcctttccttgttctcttgctccctgccgcctacctgagaccgcaggaaatctgggtctttctgaaggcatcttcttgtggtgtagtcccctt

SEQ ID NO: 974838 - DNA, 120 bp, Artificial Sequence
  ENSG00000246548_1 (sequence is synthesized)
ggaaccgcggcctttagaatgaacatgacatcaccttgggcaacaacgacagagggtgtgttcctgtaggagacaagacacggggagatccaaggttggtcagcgggtcatggcaagcag

SEQ ID NO: 974839 - DNA, 120 bp, Artificial Sequence
  ENSG00000246548_2 (sequence is synthesized)
gagacacaatgctaatgactccggctccacgtggcgaccattcaggaaaaagctgcaatgttctctctgccacattaatcagagaaacacatcaagagttgttgcgtggagacagctttc

SEQ ID NO: 974840 - DNA, 120 bp, Artificial Sequence
  ENSG00000246548_3 (sequence is synthesized)
ctcccagtactcgccctgcatactaatcaccaccccctcctggcgagatgcggtttcactctgttgcccaggctagagtgcactaatacaatcatagcttactgcaccctcaacctcctg

SEQ ID NO: 974841 - DNA, 120 bp, Artificial Sequence
  ENSG00000246548_4 (sequence is synthesized)
catgagtagctgggactacaggcaccactgtggacccctgctctgcacccccaggaggagtgggactgcttcaagggcagcctggaggaaagaggtgtggtgtgaacacatacaacatgt

SEQ ID NO: 974842 - DNA, 120 bp, Artificial Sequence
  ENSG00000246548_5 (sequence is synthesized)
aggtgtggtgtgaacacatacaacatgttccttaaccaggaaggcgactggagtctttacctggtttcaaagcagccaagcctagaggcccccaccccttgttctttattatgattgccc

SEQ ID NO: 974843 - DNA, 120 bp, Artificial Sequence
  ENSG00000246548_6 (sequence is synthesized)
tttgaccccaaccccccaattctttcctctccagatccccagccatgcatactccaacttggttctgcaaagaatacccagccacagctgtgaacttggggaaacacattttttcttttt

SEQ ID NO: 974844 - DNA, 120 bp, Artificial Sequence
  ENSG00000246548_7 (sequence is synthesized)
ctcaagcagtcctctcaccttgcctcccaaggtgctaggattataggcttgagccaccatgcatgtgcacggccagcacattcattttctatacataactgtctcccagctcttcaggcc

SEQ ID NO: 974845 - DNA, 120 bp, Artificial Sequence
  ENSG00000246548_8 (sequence is synthesized)
aacttacctgataatgataaaaataactaagctgccatggattgggcagtgtgccaagtgctccatgtatattaccttacttagttttcacaaactctatgaggtaggtaccactattat

SEQ ID NO: 974846 - DNA, 120 bp, Artificial Sequence
  ENSG00000246548_9 (sequence is synthesized)
ttacaggtgaggaaatggaggctcagagaggttaagtgaattgatccaggccacacagctggtaagcgccagagccactagtggacgccaggtccagccagcccccagagcccatgtgct

SEQ ID NO: 974847 - DNA, 120 bp, Artificial Sequence
  ENSG00000246548_10 (sequence is synthesized)
gttgtcccaaagaccaagttcggctggccaattttccaggaccatctctcatggcacctggaggcttgtaggttcctggaggactctcacacctccttcccacccttctccagattctcc

SEQ ID NO: 974848 - DNA, 120 bp, Artificial Sequence
  ENSG00000246548_11 (sequence is synthesized)
aactccctcttgagcagacccggccccactctggggcaccctgccttcctgggacctgtcgtaacagtcacccactctgccagggcctggctgacccaggctggggaccgtgggacccct

SEQ ID NO: 974849 - DNA, 120 bp, Artificial Sequence
  ENSG00000246548_12 (sequence is synthesized)
ctgggcagtgcccccctacctgggcccaggtgggtatggatttctttcttctgggccattgcacccgccagaaggtgcggtgggagaggcaggcccacatttcagagggccttgctgccc

SEQ ID NO: 974850 - DNA, 120 bp, Artificial Sequence
  ENSG00000246548_13 (sequence is synthesized)
ccatgtggcatgaggctgtagcggctgcagcctcctcttccctccctcctgccactgctcccgaagccaaggcttttgcagggttgaaaaggaagagaaagaggagaagcaggaatgtga

SEQ ID NO: 974851 - DNA, 120 bp, Artificial Sequence
  ENSG00000246548_14 (sequence is synthesized)
gagaaatgaggcagagggatgggctagggaagagagaagcccttctgcgttacctggaaatgcagcaacaataataacaaagccaatgttaggaatgtttaaaggcagctgccacatagc

SEQ ID NO: 974852 - DNA, 120 bp, Artificial Sequence
  ENSG00000246548_15 (sequence is synthesized)
actttttatagcttgtagactctctcatttaatcctggcacttacatcaatctgattagtagctattattagttttataggtgatgatccaaggcgcaattatttgttccccagctagta

SEQ ID NO: 974853 - DNA, 120 bp, Artificial Sequence
  ENSG00000246548_16 (sequence is synthesized)
ggtgacagagcccagattgaatctgactccagaaccctaaccacgatattcccctgtctagaaggagccagttctctcctgcaacccccactgctcagcctctaggagttccagccacca

SEQ ID NO: 974854 - DNA, 120 bp, Artificial Sequence
  ENSG00000246548_17 (sequence is synthesized)
gccacctgcaccctcccttccatgtggctttgccctctgttcttctcctctccactctctctccaaggtccaagtggtcaaggtcatcccaagggtctgctgggaccgtgtgtccttatt

SEQ ID NO: 974855 - DNA, 120 bp, Artificial Sequence
  ENSG00000246548_18 (sequence is synthesized)
ctgtgccttgctggtcgccaaccttccccatctgccaaggactgatgtccagcccaggcccaggtgcaggtgcccaggtcatttttgccactgagtaaagggagacagaatgacagggta

SEQ ID NO: 974856 - DNA, 120 bp, Artificial Sequence
  ENSG00000246548_19 (sequence is synthesized)
aattaccaaccaccagaacaccatggagccaatagcatcaatgcaagtgaagtatatttatctgttggcctgaaaacatgtcctagtatattgtcccattaagcaaaaagcaggttataa

SEQ ID NO: 974857 - DNA, 120 bp, Artificial Sequence
  ENSG00000246548_20 (sequence is synthesized)
agctgtgtacattaagaaacattttataagtgaaacaaaagtattctccgtttctatgcagagaaaaaggatatttgccaagatgttaacagattatttttgctgtcttctcttggctta

SEQ ID NO: 974858 - DNA, 120 bp, Artificial Sequence
  ENSG00000246548_21 (sequence is synthesized)
tttttgttttctctttttcaatgaacaccaattagtcacatgattttaaaaagcaataaaaataaaccaatcccagacggattgtacttcttcctgtcctcatttctaccccgagtctcc

SEQ ID NO: 974859 - DNA, 120 bp, Artificial Sequence
  ENSG00000249568_0 (sequence is synthesized)
gttttgcttttactcctcctagaagcaatggaaccttgcctgttccctgggggtgagacggatgactgcccctacattagctacctaacatttttgcttctccggacagaagagtaaggg

SEQ ID NO: 974860 - DNA, 120 bp, Artificial Sequence
  ENSG00000249568_1 (sequence is synthesized)
caaggggacaagacccatctccccaaagcagctgatccccacttgcacaccaaactaccaatgaagctagccatttctggtctcccatcctgacttttctgagcacatggtgaagatctg

SEQ ID NO: 974861 - DNA, 120 bp, Artificial Sequence
  ENSG00000249568_2 (sequence is synthesized)
tggaaaacattttgatgaagagagagtccttggaaggtgtcatcaggtattgaccaaacaagccactgtcctggatttgcctgtttttccggttccaaggccattcttctgccttgagtg

SEQ ID NO: 974862 - DNA, 120 bp, Artificial Sequence
  ENSG00000249568_3 (sequence is synthesized)
gttccttgagactctttatcatcttgaccttcccagaagagagctccacaaagagcacatcagtttgtgtgcttgaactaccgtagatgttatattggtgggcttcagtaaaggatggtt

SEQ ID NO: 974863 - DNA, 120 bp, Artificial Sequence
  ENSG00000249568_4 (sequence is synthesized)
gaaatgccagatcagatatgtgcagatttgtgtaaatatcaaaagcctcctgtatttctcctctgatggtaatgtactgaacccttacaagacctttcacatcattaatgctgacaaggt

SEQ ID NO: 974864 - DNA, 120 bp, Artificial Sequence
  ENSG00000249568_5 (sequence is synthesized)
agtggccatctggagagacatatggagtgcccgtcacatcactattgaacccaatgactgagtcagttacaccgtccaccatgacctgtggggaaactgctccggtgctgtcaggtttgc

SEQ ID NO: 974865 - DNA, 120 bp, Artificial Sequence
  ENSG00000249568_6 (sequence is synthesized)
agccaatgaagtagtagcctcccaagtgtgtatatgccaatgactgaggaacgcacttatagtccttcaagttaattgtcttgatgtatgacatggtttcaagatcaattttttgtagtg

SEQ ID NO: 974866 - DNA, 120 bp, Artificial Sequence
  ENSG00000249568_7 (sequence is synthesized)
cagcttcatctttatgaagaataaatccaaacctgaaaaaaatgaaaatcagagttagacaggaagcaatggagtttttagccgtaagaaaaaaactagatacaggtggaaaggtccatc

SEQ ID NO: 974867 - DNA, 120 bp, Artificial Sequence
  ENSG00000249568_8 (sequence is synthesized)
gcaggctctaattgtcaggcgaggcagcaatttgtgttacaattgtgctagaattaatctgtagattgtgccactctccttctttctctaggtcattctttcattacatccaaatcatca

SEQ ID NO: 974868 - DNA, 120 bp, Artificial Sequence
  ENSG00000249568_9 (sequence is synthesized)
taactcatgctgtagaaagaaaaataattaaaagcaatacatctagttaattgcagcaacaaattttgcttttaacatagtggaaagaagaagtatacattattctgtaagtctctagac

SEQ ID NO: 974869 - DNA, 120 bp, Artificial Sequence
  ENSG00000249568_10 (sequence is synthesized)
catgtaatattaaataagcttggttaactattgccaaacccagcaagagtaaaaggctcgaatatatattggtttcactcatttcatttacttcttatattgttttttgaccattaaata

SEQ ID NO: 974870 - DNA, 120 bp, Artificial Sequence
  ENSG00000249568_11 (sequence is synthesized)
atatgcctgcattttatttgttatcctatactgaataatgaagaactttatttttatattaaagccaattaaacaattgtttgtttgttttgttgaccttaaattagttcagaacttttc

SEQ ID NO: 974871 - DNA, 120 bp, Artificial Sequence
  ENSG00000249568_12 (sequence is synthesized)
aaagcatatttgctaaatattgcttgagaattatcagagatacctgtggcaagtataaatatatttttaaactcacctagaacacaagcaactttctagcaaaaataagttaaacaagat

SEQ ID NO: 974872 - DNA, 120 bp, Artificial Sequence
  ENSG00000249568_13 (sequence is synthesized)
acaatgagatagaaactattaaacaaaattaaacaaaattatatccaaagtagatattggccaatagaattgtaaaggacttttatttatgtttgcattaacaatattgattgtcacctt

SEQ ID NO: 974873 - DNA, 120 bp, Artificial Sequence
  ENSG00000249568_14 (sequence is synthesized)
ctaatagttctaaaagctcataataaaaataagagaaatatttttccattcactgtgttcataagtaatacaatgaaattaccttattatgagtattaagataaagcaaaacaaaaactc

SEQ ID NO: 974874 - DNA, 120 bp, Artificial Sequence
  ENSG00000249568_15 (sequence is synthesized)
taaagagagccaattatgttatcatcacctgtgtaattatctttatgctaattatcacacataattatgacatgtagttttatttatgtaaaaaatgaccatttctacacatagtacaaa

SEQ ID NO: 974875 - DNA, 120 bp, Artificial Sequence
  ENSG00000249568_16 (sequence is synthesized)
ggtgcaatcagagtaatatctctttaaaattttaaatgtcagcatttagcaagctcaaaaatataaataaacatatattaaatatcatagaaaaataaaatattctcaaaatcagtcccg

SEQ ID NO: 974876 - DNA, 120 bp, Artificial Sequence
  ENSG00000249568_17 (sequence is synthesized)
cccgttttgcaattgcagaagaaagggagtgcctacacacagatgttttacgaaaatagacataaaattgtaattgtttccattcttcttacattaaatatagttgacaaaccatattat

SEQ ID NO: 974877 - DNA, 120 bp, Artificial Sequence
  ENSG00000249568_18 (sequence is synthesized)
aattttagctacatttaaaatttatgaggagactatttgctgtcattggagagagtacaaattcttctatatgaatgaaaattcacagtgtatagctactcctttataaaactttcttaa

SEQ ID NO: 974878 - DNA, 120 bp, Artificial Sequence
  ENSG00000249568_19 (sequence is synthesized)
atatttgttaaacaactactaaatgcaaggcactgggaatatattgcagatcaacataactctccctgtctccaatgagtctagacattttgagtgataaaaaagtgaaacagggctagt

SEQ ID NO: 974879 - DNA, 120 bp, Artificial Sequence
  ENSG00000249568_20 (sequence is synthesized)
gaataaagcttgattatagcattctgctatactattacctaattttgtaactatttcttgttccatgtatttgaaatggcataaagcaatatatttgaaaataatattttgagtgtattt

SEQ ID NO: 974880 - DNA, 120 bp, Artificial Sequence
  ENSG00000249568_21 (sequence is synthesized)
ctgaatgatgcccaccacttgtagcttatttgctaactgtttatcttttctgtgtccttaataaatgtgtttgtgtcctttcagtaaacccagctcataccatacccattcaggataaat

SEQ ID NO: 974881 - DNA, 120 bp, Artificial Sequence
  ENSG00000249568_22 (sequence is synthesized)
ttcagtcttgattatgatggtatgaagaaacattcatactgttgataattacttatattttcattaaaatattaatgccttgtgtgtaaacatagtgtagttttaaaatcctatctgaat

SEQ ID NO: 974882 - DNA, 120 bp, Artificial Sequence
  ENSG00000268804_0 (sequence is synthesized)
attttcagccttggggttttcaccccagggtccccaaagtgcttggggcagagtacagctcccctttgagaaagtcggtgctctggactgatgaaaaggacaaaagagaagccagttttg

SEQ ID NO: 974883 - DNA, 120 bp, Artificial Sequence
  ENSG00000268804_1 (sequence is synthesized)
agaagtcaaagtgtgggcagaacggttcctttctggaggctttaggggagaatctgtttcctcgcttctccagcctttagaggccacctgcagtccctggctcacggccatcttcaaagc

SEQ ID NO: 974884 - DNA, 120 bp, Artificial Sequence
  ENSG00000268804_2 (sequence is synthesized)
cagcggtcgcatcgccctgacctccgcctccatcaaccatctccttgctgaccctgaccctcctgcctccctctcacaacgactcctgcgatgacgtggggctgtgaaaggaaaaatctc

SEQ ID NO: 974885 - DNA, 120 bp, Artificial Sequence
  ENSG00000268804_3 (sequence is synthesized)
ggcaaaactccctcccattctattcaaactcatccctctgctcactgagatagatgcatattctgattgcctcgcttaccagaaactcaaaagaatgcaaccggttgtctctaaactcaa

SEQ ID NO: 974886 - DNA, 120 bp, Artificial Sequence
  ENSG00000268804_4 (sequence is synthesized)
aagaatgcaaccagttgtctcacctacctgtgacctggaaacccctttcctgcttggagctgtccccgtctttctggatggaaccagtgtacttcttacatgtattgattgatgtctcat

SEQ ID NO: 974887 - DNA, 120 bp, Artificial Sequence
  ENSG00000268804_5 (sequence is synthesized)
gtctccctaaaatgtataaaaccaggctgtgccccgaccaccttgggcacatgtcgtcaggacttcccgaggtcgtgtcacggatgcgcatccttaactttgtcgaataaacctcataaa

SEQ ID NO: 974888 - DNA, 120 bp, Artificial Sequence
  ENSG00000239661_0 (sequence is synthesized)
tggacaagaaagcccaatagaaaattttctaaacccccatgaagctagaaaacatggattagtatgagatgagaaaaccaagactaagagaggacaggagtatctcttctctacacaaag

SEQ ID NO: 974889 - DNA, 120 bp, Artificial Sequence
  ENSG00000239661_1 (sequence is synthesized)
ccacttgagcccatttgaaatgtaacttttgccatggaagaattctaccaacacttttgtcgtcatttaaactacccactaaataccttttctattttttatactattttttgttactgt

SEQ ID NO: 974890 - DNA, 120 bp, Artificial Sequence
  ENSG00000239661_2 (sequence is synthesized)
ttatttacttttcttaatatcataacaaaacaaaattaaacaaaaaaattgggttttaccagtgttgccatccaaaatatagaatacccagtttaacttgaatttcacgtaaacaaaatt

SEQ ID NO: 974891 - DNA, 120 bp, Artificial Sequence
  ENSG00000239661_3 (sequence is synthesized)
atttaactggatatctcatcttttgtttgccaatctagcaaacttagtttttgcaatcagtaatgtgttggttcctaatgctgctataataaattactataaacgttgtgtcttaaaaca

SEQ ID NO: 974892 - DNA, 60 bp, Artificial Sequence
  ENSG00000276054_0 (sequence is synthesized)
tgggcctccaacagcatactttcatcttcactgtttttttgtttttgttctttaagatgg

SEQ ID NO: 974893 - DNA, 120 bp, Artificial Sequence
  ENSG00000276054_1 (sequence is synthesized)
caacagcatactttcatcttcactgtttttttgtttttgttctttaagatggagtgtcactctgtcccccaggctggagtgcagtagcgtagtctcagcttactgcaacctctgcctccc

SEQ ID NO: 974894 - DNA, 120 bp, Artificial Sequence
  ENSG00000276054_2 (sequence is synthesized)
tacaggcatgagccaccgcacacagccttcttcactgtttttttagcaacagtcctccttaaattggccaggactaaaattctgtaagattccaatttgggttacatcctagtttctacc

SEQ ID NO: 974895 - DNA, 120 bp, Artificial Sequence
  ENSG00000276054_3 (sequence is synthesized)
attccaatttgggttacatcctagtttctaccaggggaaaaatgtgatattagtaataatgagatgcacattagggccaggtgagttggctcacacctgtaatattccagcactttggga

SEQ ID NO: 974896 - DNA, 120 bp, Artificial Sequence
  ENSG00000276050_0 (sequence is synthesized)
gatccagtggtgatactgtgatggcccagactccactctcctggcctgtcgcctctagagagccacccccatatcctgtaggtctagtcagagcctcttgtccagtgatggatacaccta

SEQ ID NO: 974897 - DNA, 120 bp, Artificial Sequence; identical to SEQ ID NO: 823395
  ENSG00000276050_1 (sequence is synthesized)

SEQ ID NO: 974898 - DNA, 120 bp, Artificial Sequence
  ENSG00000271009_0 (sequence is synthesized)
cttacagctacctccaagagtttggagcacagtcacgaagccaaagggcttgaaatgagaggatggatttcagataaagactaggagcggtacatcccactagagcccaaaggagatccc

SEQ ID NO: 974899 - DNA, 120 bp, Artificial Sequence
  ENSG00000271009_1 (sequence is synthesized)
tggaatcaaagacagcagcgagggaccctactactgtaccgattcccagtacatcaaagccatcacttaggctggtgcacggtacctccaaaaagcaagcaaacaaacgcaggaagaaca

SEQ ID NO: 974900 - DNA, 120 bp, Artificial Sequence
  ENSG00000271009_2 (sequence is synthesized)
agagtcagtgtctgtctgtctctctctctctctctcccccctcttctctgtctcttcccccccctttcaaatcctagcctcagcgtcactgctactgcaatagattttttaaaaatgaca

SEQ ID NO: 974901 - DNA, 120 bp, Artificial Sequence
  ENSG00000271009_3 (sequence is synthesized)
agttgtatttatgtaagttctaaatatgaactaataccattgaaattacaatgtctggaataaaataaaatgcaatcagcactttaagtaatctgcaaatgtaaaaacaacatttatgtt

SEQ ID NO: 974902 - DNA, 120 bp, Artificial Sequence
  ENSG00000271009_4 (sequence is synthesized)
tttgaaggcattattagtaaaccctgtaacaccagatagcttgctaaaacttatttttcttgggaaaaaatgttgccctagcctaccagattatttattttagaaggaatttgggaatta

SEQ ID NO: 974903 - DNA, 120 bp, Artificial Sequence
  ENSG00000271009_5 (sequence is synthesized)
atcaggaaatctgtttgattagaaagtaattcttcattttgagagattttccaatgctcttaagaacatgcagcttcttagtcaagactagagagaaaaaaaccggtttaggattttgca

SEQ ID NO: 974904 - DNA, 120 bp, Artificial Sequence
  ENSG00000271009_6 (sequence is synthesized)
gggttacctcatctaatccttctgaattcactctgggaataatgctattttatttacggggggcgggggaagaaaatacatttagaaaaatcaggggtttcctctctgtgagccaaatct

SEQ ID NO: 974905 - DNA, 120 bp, Artificial Sequence
  ENSG00000271009_7 (sequence is synthesized)
gggttgccattcaaactttttctggctgcttttccatgcaggacagctgatcaataaagccaagtccagcctggcttgctacaggtttcaccagtcagtgcttgcaaaacctttgtcatt

SEQ ID NO: 974906 - DNA, 120 bp, Artificial Sequence
  ENSG00000271009_8 (sequence is synthesized)
gaagaaggggcttttttttgtcccctgcacaatgtgtcttttgtgaggttaatgccattctgggctctcgatagccctggacaatggggaactctctaggagcctgcaaagattctagct

SEQ ID NO: 974907 - DNA, 120 bp, Artificial Sequence
  ENSG00000271009_9 (sequence is synthesized)
tcttgcctttttttttttttttttttaagggaaggatgaaacattcctacagtccaaacacaacctctactgtgattaaataaatatttatctttattgtagccattgtatatttttacc

SEQ ID NO: 974908 - DNA, 120 bp, Artificial Sequence
  ENSG00000271009_10 (sequence is synthesized)
tttttaccttcagtttgtccggtttctgattattattttaaatttttcaatggcaacagttaatcttttttttttccctttcagtccaaagggcaggtcagtgtaaaatgtagctgactg

SEQ ID NO: 974909 - DNA, 120 bp, Artificial Sequence
  ENSG00000271009_11 (sequence is synthesized)
aaggaagactggtaaattctgaatttttccataatacatcaggtaaggaaaattgttcagaccctcaggaatatattcacttcctttttatctgtcttcacgaatcttcataaagctgtt

SEQ ID NO: 974910 - DNA, 120 bp, Artificial Sequence
  ENSG00000271009_12 (sequence is synthesized)
tatttttttaaagatgtggtagaattaaattcctctttgtagatcttgaaaaatcacttaaatactatgtatttattttcttttaaaatgtaaatagtactagaagtgaacttgcagctt

SEQ ID NO: 974911 - DNA, 120 bp, Artificial Sequence
  ENSG00000271009_13 (sequence is synthesized)
gtttcttatataaaacggtgcggaggaagtcagtatttcctttagtataagctatttggaggaaattctggatataaatgtatttcatgttacaatataggaaaatgtcagcttaatctg

SEQ ID NO: 974912 - DNA, 120 bp, Artificial Sequence
  ENSG00000271009_14 (sequence is synthesized)
gtaaatacttatgctaattttactgagtgaattcgttataaggaggagaggtaccaagcttgtatgattgaataatgcttagacgataatccagcatctatatggattattttacgtaca

SEQ ID NO: 974913 - DNA, 120 bp, Artificial Sequence
  ENSG00000271009_15 (sequence is synthesized)
aaatgagaaaaaaaaaaggaaacaagaaattcagaatctaaatctttcatttagctggcaagagggcagaaaattttagaccaacctgtttttaagacatttacattaggagggaaagtg

SEQ ID NO: 974914 - DNA, 120 bp, Artificial Sequence
  ENSG00000271009_16 (sequence is synthesized)
gaatgtaggctaaatattgcattgctgtgtacatttctctagctctcactcaaatggatatagatataaaaacacaaaaatatatgcataaaggggtacataaatatacatttgaatgac

SEQ ID NO: 974915 - DNA, 120 bp, Artificial Sequence
  ENSG00000224429_0 (sequence is synthesized)
caggatatttacgttgtgaactggtaaaatctgaactgcagaatatcaatttccagacattcttcctagatgatgccgtctgccacggagaccatgtagatggattgaatggggatatga

SEQ ID NO: 974916 - DNA, 120 bp, Artificial Sequence
  ENSG00000224429_1 (sequence is synthesized)
tgaggatgaccacccctgcatttgctaagttcttgggagtggcatcgatctcagccattccactggaatagggtcaggaaacaaaacgtgagggctctaccagctgctcagtctatcctt

SEQ ID NO: 974917 - DNA, 120 bp, Artificial Sequence
  ENSG00000224429_2 (sequence is synthesized)
tccaattgagcacactggaactgaggaagcaaagacagggtgagccctaacaccctcatcatcactgctgagcctgccttgacaagaactccatttatcacccgcctccataatagccca

SEQ ID NO: 974918 - DNA, 120 bp, Artificial Sequence
  ENSG00000224429_3 (sequence is synthesized)
ggctgaaggcaatgaggggatgtgaggatgcatcttgtgaaggacaaaagtcatcctgtaaggattcatgagacctgagcagccagccagccctgaaatggttggaacaggagaaagaag

SEQ ID NO: 974919 - DNA, 120 bp, Artificial Sequence
  ENSG00000224429_4 (sequence is synthesized)
aagagctcgacagataccctgcctgggctggcagctagctgcaccacaagctggccagctgacagcgggcacatcccttcatcacccagtgcctttcttccctcttgtgaaaatggagat

SEQ ID NO: 974920 - DNA, 120 bp, Artificial Sequence
  ENSG00000224429_5 (sequence is synthesized)
atgctgagaaggttacttcagctcatccagagaaagcttcttcagctaactaggctgtagaaagggcctacagcctaaattttcaaaaacaagttaatgccagaatataaactccgtgaa

SEQ ID NO: 974921 - DNA, 120 bp, Artificial Sequence
  ENSG00000224429_6 (sequence is synthesized)
gggtgtggggctgagcaggcctggaagaaacaaggctgctgggctgagcttggggccagccgctcatttcaccaagctgagctgtaatcacatccccaggtagcactgtgccttcagaat

SEQ ID NO: 974922 - DNA, 120 bp, Artificial Sequence
  ENSG00000224429_7 (sequence is synthesized)
atgactgagcagcattatgtctgcagtgctaagcaggtgtgatcaatagatggagagctgtgaccagctgggctgtgatgcggagcctgcaaccaagctgcctgggggaaattcaggagg

SEQ ID NO: 974923 - DNA, 120 bp, Artificial Sequence
  ENSG00000224429_8 (sequence is synthesized)
ccagccatcgtctttaaccagggcagccccgagagtgtctgcaagggctgcatgccctgagtagatcctcgcagatgctgatcagggtgtcttctgggctccacctggcacagaaaagcc

SEQ ID NO: 974924 - DNA, 120 bp, Artificial Sequence
  ENSG00000224429_9 (sequence is synthesized)
agcaaagctccaggggcttcccttctttcctggcagagaaagagcaggcagattcagagccccgtgaggctgtcttgagctccaccgggatctagggagagccagcagcaccaccaagat

SEQ ID NO: 974925 - DNA, 120 bp, Artificial Sequence
  ENSG00000224429_10 (sequence is synthesized)
agggaggaaactgactgccttcttggggttttcttaactgtgctttttctgctctgcaggaaagatgcaacctgggccagaggcccctggaggttgtgcctgaacccagacagatcacac

SEQ ID NO: 974926 - DNA, 120 bp, Artificial Sequence
  ENSG00000224429_11 (sequence is synthesized)
tcaattgccaggaggtctttgctttttctggcttccagagaatgcagaaatttcaaggagccactattgggctccttccctataggatgttgggccaggcaacagaacaaacctcctgag

SEQ ID NO: 974927 - DNA, 120 bp, Artificial Sequence
  ENSG00000224429_12 (sequence is synthesized)
gcacttctacctgggaatgccctcctgaggccaatggcagccctctgatgaagatactatagtatttattttttgtacacgctggtgatcatccagtgtacatctctgcttagtgaacct

SEQ ID NO: 974928 - DNA, 120 bp, Artificial Sequence
  ENSG00000224429_13 (sequence is synthesized)
tcatgaactggaggctgaatattctcatcctgcattgatagaaccacgtaggctggttctaggctgttttctgtgcaacactcaacatgacaataataatgatgatgatgctaatgatga

SEQ ID NO: 974929 - DNA, 120 bp, Artificial Sequence
  ENSG00000224429_14 (sequence is synthesized)
gaagctgtttttctgagtagtgagtaattaaacaataaatagtctcttgaatggagtagacatgcctttctccagaaccctacccattctgtactgcaaatctattagggtttgtccaag

SEQ ID NO: 974930 - DNA, 120 bp, Artificial Sequence
  ENSG00000224429_15 (sequence is synthesized)
atttcctatagcatcctttcctaccatggataccccgagcactgttggatctgttgaattatatggcctcaacagcagagtatgttgtcctgaagcctagaatttcttcagttttcttat

SEQ ID NO: 974931 - DNA, 120 bp, Artificial Sequence
  ENSG00000224429_16 (sequence is synthesized)
gctttgggttccactcaaaactggtagacttctaatgacccaagaaatgagtcaaagaaataatctcaagtgcaatattggctgcctcctaaaatccaaagtcgcccaccaaaccatata

SEQ ID NO: 974932 - DNA, 120 bp, Artificial Sequence
  ENSG00000224429_17 (sequence is synthesized)
acttttcataggggtaattgtttaccttaggatgctgcaaaccatgggactcctaaaatcttcatcaatatggcaggactttgatactgtaaatgatttatgtttcaccttcatgtgttt

SEQ ID NO: 974933 - DNA, 120 bp, Artificial Sequence
  ENSG00000224429_18 (sequence is synthesized)
tactatgacatccagagtaccggccactttctgttcaccaagtccaattagcataatgtcaacaacatagtataccagcatgatatgtcaaggtgacagagagaaagagaatacatatag

SEQ ID NO: 974934 - DNA, 120 bp, Artificial Sequence
  ENSG00000224429_19 (sequence is synthesized)
ccttggggaaagacagtgaatgtgtactcaaatcctttcttaatgagacagaactgatcttgaccatccttcctgaggaggttggaagatgacttgtttgccagatggatagccacaacc

SEQ ID NO: 974935 - DNA, 120 bp, Artificial Sequence
  ENSG00000224429_20 (sequence is synthesized)
caggaaccaaaggctgtgctgctctgttccagtaaagataccacatccaattaggtagctacatacaattgggacgcaacttagataacgttccggtagtctgctgttattcacgaaaat

SEQ ID NO: 974936 - DNA, 120 bp, Artificial Sequence
  ENSG00000224429_21 (sequence is synthesized)
tgtcatcgtggcatttcaggttctgctgatgtcattgtaagaaatgccctatgtgtacaggaccctggctggcacgttggccttgctgccatatggtagtcatattcactttgtggtagt

SEQ ID NO: 974937 - DNA, 120 bp, Artificial Sequence
  ENSG00000224429_22 (sequence is synthesized)
attcctgcatagtcggctccttcaggctgatagaaaatcctgcttcctggaaatgagcaaatagaagagatatctgcatttccatggttgttgcagctctgttcacaacatccaagatta

SEQ ID NO: 974938 - DNA, 120 bp, Artificial Sequence
  ENSG00000224429_23 (sequence is synthesized)
ggaagcaacccaagtgtccatgaacagatgaatggacaaagaaaatgtggtacttacaatagagtgccattcagctataaaaaaagaatgagattatggccaggcatggtggctcacacc

SEQ ID NO: 974939 - DNA, 68 bp, Artificial Sequence
  ENSG00000224429_24 (sequence is synthesized)
ctgcttggaactcaggagatggaggttgagctgggactgcaccattgtactctagcctgggcaacaag

SEQ ID NO: 974940 - DNA, 120 bp, Artificial Sequence
  ENSG00000224429_25 (sequence is synthesized)
tcatcctgtcctcacaatggctggtgtggagacccacagacttcatccttaggacggaccttcaggcacccaggctgcctactgacctccctggcatgggtgggaaccgggagctcgttg

SEQ ID NO: 974941 - DNA, 120 bp, Artificial Sequence
  ENSG00000224429_26 (sequence is synthesized)
gtaagcaggaggattcaggactatcgactgaaccccacctcctctgtggcacgcaccgtgctgtgtctttgcagtcatcatctcatcacctctgcacaggaagattatctcccccatttt

SEQ ID NO: 974942 - DNA, 120 bp, Artificial Sequence
  ENSG00000224429_27 (sequence is synthesized)
aactagctgtcatcgtggcatttcaggttctgctgatgtcattataatggaccttaactagtgggctgaaggcaatgaggggatgtgaggatgcatcttgtgaaggacaaaagtcatcct

SEQ ID NO: 974943 - DNA, 120 bp, Artificial Sequence
  ENSG00000224429_28 (sequence is synthesized)
atgatatgcagttcctgagcagtgttgggactcaaagacgtttatggcagctcatcagcctgcatccagtgcttcaaagggttctaagagactggctcagccaactgccagcctggtcat

SEQ ID NO: 974944 - DNA, 120 bp, Artificial Sequence
  ENSG00000224429_29 (sequence is synthesized)
ttcgaaactgaaatgaaagcagcagagagagttatatttatcaactgagtgagacttgcttttctcaacaggatatttacgttgtgaactggtaaaatctgaactgcagaatatcaattt

SEQ ID NO: 974945 - DNA, 120 bp, Artificial Sequence
  ENSG00000224429_30 (sequence is synthesized)
aacattgactgaatgtgagggaaaaacctatgtagttcaatactatgtagacaagatcataaatgatcactatttaaattgtgtgtgttttccttgacatgagtaaccaagagtcggctc

SEQ ID NO: 974946 - DNA, 120 bp, Artificial Sequence
  ENSG00000224429_31 (sequence is synthesized)
gagttaacatattatggattgtggagccacaggatggagtagcctgggtctgatggttctgttagtcaaggctagtcaaagaagcaggaccaacaggaaatacatatgtttatgtatgta

SEQ ID NO: 974947 - DNA, 120 bp, Artificial Sequence
  ENSG00000224424_0 (sequence is synthesized)
ctcgggctgtcggggggtcgagacagtggagtgttcctgatgccagctcacggagggaatccagggaattagctgatgccaagagcctctttttggccagcacttactaagcaccagaga

SEQ ID NO: 974948 - DNA, 120 bp, Artificial Sequence
  ENSG00000224424_1 (sequence is synthesized)
cacagcgagaagcagaagcatacgagcacatcagtgtgattctgctgtgatgaagggcaagagagggctcactttccggcgtgacattcaagctagccccgaggcctgagcaggacccgc

SEQ ID NO: 974949 - DNA, 120 bp, Artificial Sequence
  ENSG00000224424_2 (sequence is synthesized)
ccaggggaagatctggaggaaagccatctgaacatacaacaagagcaaaggcctggtggagtcaagaccaccttggctgccaggtggaatggtggaataactcaggagtctgtcaggtct

SEQ ID NO: 974950 - DNA, 120 bp, Artificial Sequence
  ENSG00000224424_3 (sequence is synthesized)
ctgagatgtcaaacgggtaaggccttgtaggaagtaggcgtttgaatgagatcataatttgagagccacagacagaaaaataaatttgaaagagttcactcagccaaatgtgtacagtga

SEQ ID NO: 974951 - DNA, 120 bp, Artificial Sequence
  ENSG00000224424_4 (sequence is synthesized)
gaaagggaaataaggccaaaagcagcaaagacctctgtgcctgttcctcctggagcactttcaccagggtccccagatctaggtctgcccattcctctccccacattctacactgggccc

SEQ ID NO: 974952 - DNA, 120 bp, Artificial Sequence
  ENSG00000224424_5 (sequence is synthesized)
taggtcaacactgcttgatgaagttgagcagaccacaggcattgttatcctttgcccctgggaagatggtataggtgaactgtagaggccagactatttcccaaattgccctcctcctcc

SEQ ID NO: 974953 - DNA, 120 bp, Artificial Sequence
  ENSG00000224424_6 (sequence is synthesized)
taccaaactggaagggtattgaaaaaggtggagaccttcctgggatgtccagtctacagcctacgtgctaaccaaaggcccactgggcatagagcagagtccccctctccttacaggcct

SEQ ID NO: 974954 - DNA, 120 bp, Artificial Sequence
  ENSG00000224424_7 (sequence is synthesized)
agccaggaagagagtagctgtaggtttgggaacctgagggcatttgggatgcttaaacaccgcctggtaattactcagtattaattaaaatcctccctatcacctcccatacaggcttgg

SEQ ID NO: 974955 - DNA, 120 bp, Artificial Sequence
  ENSG00000224424_8 (sequence is synthesized)
cacacacccaggagctcaatgctgctgggagctgagcagctgggagcaaggagccctcatccccactgatgaagaggccagcccaggttctaggctaagcaggcctgtgattataaacag

SEQ ID NO: 974956 - DNA, 120 bp, Artificial Sequence
  ENSG00000224424_9 (sequence is synthesized)
cagtgtctccctggacaagtttcttgaccctgagaagaatgttagaccatcaactttgtgaggggacaggcagtctccaacttttttcctgctcagtccttattgcatactcttggagaa

SEQ ID NO: 974957 - DNA, 120 bp, Artificial Sequence
  ENSG00000224424_10 (sequence is synthesized)
ggtctactgacttgttctcagatgccccacggctcagccaaccacccatccagcagagcattcaaaaggcatctggaaggaatgagggcgaccgttctgccaggcccctatttttttttg

SEQ ID NO: 974958 - DNA, 66 bp, Artificial Sequence
  ENSG00000224424_11 (sequence is synthesized)
ggcgtgagccaccgcacctggctttttttttttcttttagatggagtcttccttttgtcgcccaag

SEQ ID NO: 974959 - DNA, 83 bp, Artificial Sequence
  ENSG00000224424_12 (sequence is synthesized)
gaactcctgacctagggatctgcccggcactgcacctggccattttgtttgtttgggtttgtttttgagatggagtcttgctc

SEQ ID NO: 974960 - DNA, 71 bp, Artificial Sequence
  ENSG00000224424_13 (sequence is synthesized)
cagcatgagtcaccacgcccggccaagaaagacccatattttgttttgttttcttttttgagatggagtct

SEQ ID NO: 974961 - DNA, 120 bp, Artificial Sequence
  ENSG00000224424_14 (sequence is synthesized)
aaagtgctggaattataggtgtgagccatcgcacctggccaccagacccccattaacttcagtagggatggcaccaggtttgagaggccaaaagagatccagagccagcaaacaagactt

SEQ ID NO: 974962 - DNA, 120 bp, Artificial Sequence
  ENSG00000224424_15 (sequence is synthesized)
ccagcaaacaagacttaggtttgattgaggggaatttgcatacagagcagtccagtggaggtgggctagataggagaactgccccacctgcagaaagtatgcagtatatatagcattttc

SEQ ID NO: 974963 - DNA, 120 bp, Artificial Sequence
  ENSG00000224424_16 (sequence is synthesized)
acttaacaccctccccctaacaactttgatttaacccaaaacaaaggggctaaatcccctgtacatccacaggacagaatgggggctcagatattcctcatgggtaagtaatgaatctct

SEQ ID NO: 974964 - DNA, 120 bp, Artificial Sequence
  ENSG00000224424_17 (sequence is synthesized)
ggcttgtcctcacttggaactcctaacacattcaggtgcatctgccatacagggtcattctcagagtatgcttaagttattgctgtcaggtgcagctaccatacacaggtgtgtctgcca

SEQ ID NO: 974965 - DNA, 120 bp, Artificial Sequence
  ENSG00000224424_18 (sequence is synthesized)
tatagccacagaaagcaggagtcctacagctgctcctcatgggtctccatagactagtcttagagcaaggatgggcagccagcctccaggtttaacctggcactctcccccagcacttgg

SEQ ID NO: 974966 - DNA, 120 bp, Artificial Sequence
  ENSG00000224424_19 (sequence is synthesized)
tccccagagcaggggtgcatctctcccacttctggtcaacccttcagtaacaagtagagcccccagggtcttcatgaatatctagttgaactggctaaagaagagggccctgtaacagga

SEQ ID NO: 974967 - DNA, 120 bp, Artificial Sequence
  ENSG00000224424_20 (sequence is synthesized)
cagaacaccaggagcctgaaccccgcatcttctacccttatcctgcatttatcctgcctgcattcaagcctgtccagctgcaccactggaggttaccatggcaactaaacccagaggcag

SEQ ID NO: 974968 - DNA, 120 bp, Artificial Sequence
  ENSG00000224424_21 (sequence is synthesized)
ccggtaactgagatacagctgccaagagcaactgatggtggaaaaggccaacagcagagactcttagaaggaagagaagtacacaggaggaggccccagaaccctgagggtgctacactc

SEQ ID NO: 974969 - DNA, 120 bp, Artificial Sequence
  ENSG00000224424_22 (sequence is synthesized)
aaatctaatcctactcacaactcagcaggcagtcaacgtcttgcacaaactgccatatcaccaaccagaggcacagatatggacacaatggggccaatttgcagagatgtttgcaactat

SEQ ID NO: 974970 - DNA, 120 bp, Artificial Sequence
  ENSG00000224424_23 (sequence is synthesized)
ggatgcagagtagcacaggtgggacacatgttgtttagcccaaaagcaacgggtcttggtgaaaacgaaaatgggtagggtaccattgctgtttccaatgaaacaatgaattttgtgtgc

SEQ ID NO: 974971 - DNA, 120 bp, Artificial Sequence
  ENSG00000224424_24 (sequence is synthesized)
gggctgtcggggggtcgagacagtggagtgttcctgatgccagctcacggagggaatccagggaattaggtaatgaacggtctacccatgaaggggaccgattagtgcctctcgcctggt

SEQ ID NO: 974972 - DNA, 120 bp, Artificial Sequence
  ENSG00000224424_25 (sequence is synthesized)
ccggcgggatctggatgtggctcatgccggcggcggccgaagggatagacgggttgggccgccggcggccactgtctccgcgctcactcacgccggcctttcgctccgcgcccgcgaggt

SEQ ID NO: 974973 - DNA, 120 bp, Artificial Sequence
  ENSG00000224424_26 (sequence is synthesized)
ctcttcgcgcacggccccggctcacgtcgcgccgctctttggccggctctgcgtttccgggccgcgcaaccctacgctaccacggccgacctggcaccgccgccgctgtcactgggcagc

SEQ ID NO: 974974 - DNA, 120 bp, Artificial Sequence
  ENSG00000224424_27 (sequence is synthesized)
ccgcggggaccgacgggcaggcgagctggacgggcggggcaggcgtcctggttgtgacgcacgccaccgcgggcgtgcgcgtccccgcttagcaccggccctcagtgcgcttgcgccact

SEQ ID NO: 974975 - DNA, 120 bp, Artificial Sequence
  ENSG00000264007_0 (sequence is synthesized)
ttgaagaccccacccctagaagagttcactaggaagaaggcccaaccagggcagaggacccagaggagaaaccggacaagcctatggtaggcaaaagccagaagaccatgatcagggctt

SEQ ID NO: 974976 - DNA, 120 bp, Artificial Sequence
  ENSG00000264007_1 (sequence is synthesized)
cctggagaagccagtgcagaaaggagtgggagaagagggatccacctcactctgtgctgccacccgtccccccacaaggcatgggatgaaaacagtagcagaaaggactcagattggtgg

SEQ ID NO: 974977 - DNA, 120 bp, Artificial Sequence
  ENSG00000264007_2 (sequence is synthesized)
ggcaaaaccccatctgcctgaactattccagagatgcgagttcggtatcctgtggtggctgcagtcttggccccatacctggctttaagccaagatccaatggtcaagtcttctgcttct

SEQ ID NO: 974978 - DNA, 120 bp, Artificial Sequence
  ENSG00000264007_3 (sequence is synthesized)
ggacagggtgcctctgggagctacaaccacgtccgtgaagagatgctcatcaaggctggcggtggtgggggcggggggtgcaggcagtgtggcattgaggctcctcccaaaaacattcca

SEQ ID NO: 974979 - DNA, 120 bp, Artificial Sequence
  ENSG00000264007_4 (sequence is synthesized)
acgtccagaaagctttcagtctgttaggctccacaatcccctcagcctgggtctctgtggagaattcaggccccaaatcctagccacttacattaaacagcattttacacagcaaaataa

SEQ ID NO: 974980 - DNA, 79 bp, Artificial Sequence
  ENSG00000233538_0 (sequence is synthesized)
tttgcagaagaaaactatcacttttctaaaatggctccaaacacctccaaatcagaaactagagacagtgttgtcgcct

SEQ ID NO: 974981 - DNA, 120 bp, Artificial Sequence
  ENSG00000233538_1 (sequence is synthesized)
cacccggccttcatcttcattcaacaggaaatcagcacatatgattagaacaagcactgagaaatcacaggactggaccgtctctgctttccttctcttaaggaatggtaaagaaaaaga

SEQ ID NO: 974982 - DNA, 120 bp, Artificial Sequence
  ENSG00000233538_2 (sequence is synthesized)
atcaggagacaggaacgttagtgtcctgcccttgtcttgcctcacagcaggcctcccaaagaaaccagctgcagcacattctcacctggatgaaggctgcagggaaccgaggagagccct

SEQ ID NO: 974983 - DNA, 120 bp, Artificial Sequence
  ENSG00000233539_0 (sequence is synthesized)
gagcagggaggctgcggtggatcagctgcctgctgtctctgactggaagccactacctttagggcagggactccgactacttcactcgccaccggatcatctgggttttgaagaaaccaa

SEQ ID NO: 974984 - DNA, 120 bp, Artificial Sequence
  ENSG00000233539_1 (sequence is synthesized)
gatgcctttcattaattcttccaactaaattaatggagtcactgcatctcgaacaccattagcagagcagagacaagagttttggctggaaaagggttcctgcttttttatcttcttcat

SEQ ID NO: 974985 - DNA, 120 bp, Artificial Sequence
  ENSG00000233539_2 (sequence is synthesized)
catgtaagaagtgcctttcacctcccacgatgatcctgaggtctccccagccatgtggaactatgtgcacaatcattatcactgatgtacctgtgtcttcagcctgtttgactacactgg

SEQ ID NO: 974986 - DNA, 120 bp, Artificial Sequence
  ENSG00000233539_3 (sequence is synthesized)
tgactacactggggtgaggacgttgtggaacagatggattattatctacctgggctcacacagctaggaggtgataaaggaaagaagcagcatgtagccattggacccaacccctcagcc

SEQ ID NO: 974987 - DNA, 120 bp, Artificial Sequence
  ENSG00000233539_4 (sequence is synthesized)
actgtagagcttgagagagctggatctctccaagttatatccagctttttaattatctgacaaaggagaacatgaaggatgaattccatcatcaccaaaaagtcatagtgatattaacac

SEQ ID NO: 974988 - DNA, 120 bp, Artificial Sequence
  ENSG00000233539_5 (sequence is synthesized)
atgccctgataacctgagaaaactgctgtgaaaccagagaacagtttgataatgagcctgggacatatacaagaaaacctgagctatagagtgagtgtctgcaaaggccgagagggctcc

SEQ ID NO: 974989 - DNA, 120 bp, Artificial Sequence
  ENSG00000233539_6 (sequence is synthesized)
cactatgttcattctcctggaggttgcttttatccaactcacagttgcttcttttgctctttatggaggtgtttggaaatcttgaaattcttaaggttgctttgaccttcttagatgaaa

SEQ ID NO: 974990 - DNA, 120 bp, Artificial Sequence
  ENSG00000233539_7 (sequence is synthesized)
gaggctgcggtggatcagctgcctgctgtctctgactggaagccactacctttagggcagggactccgactacttcactcgccaccggatcatctgggttttgactctgttgttaggtac

SEQ ID NO: 974991 - DNA, 120 bp, Artificial Sequence
  ENSG00000233539_8 (sequence is synthesized)
agagcagaattttgaagatgcattaattctttcaagtcatgaaggcagtgtacaagagcaagttacaaaatggcggcctgagaccaaaagaaccaatgaattatcttacagagacttgct

SEQ ID NO: 974992 - DNA, 120 bp, Artificial Sequence
  ENSG00000233539_9 (sequence is synthesized)
tgttttgcttcctcttttcacaacaagaagacagacatcattaatttttaaaaaattactatttgacctttcggagagccagccaaggaatcatggatgtatgatatttgacctagattt

SEQ ID NO: 974993 - DNA, 120 bp, Artificial Sequence
  ENSG00000233539_10 (sequence is synthesized)
agcaatggccacgcaggtgatgaagacagtcttcgagaagatggggaaacatagaaacatatgacctgctcaaaagtacaagagattttgcgtgactaaaaatggtatgggaggggcatc

SEQ ID NO: 974994 - DNA, 120 bp, Artificial Sequence
  ENSG00000233539_11 (sequence is synthesized)
ccagagaaagaagatgcaaagttgagctgacagcagaccttcaagcacctcaaattccaggacaaccagaagtctttccttaagcgagaagcagaaatgcattttggatattttgcaaga

SEQ ID NO: 974995 - DNA, 120 bp, Artificial Sequence
  ENSG00000233539_12 (sequence is synthesized)
gttcatgtaagctatattagttaccagaattagcaaataaaaatacaagatacccagttaaatttgaatttcagctaaagatatatttttctagtgaaagtgtgttccgtgcaatattta

SEQ ID NO: 974996 - DNA, 120 bp, Artificial Sequence
  ENSG00000233539_13 (sequence is synthesized)
tgacatagttatgttaaacttatttgttgttcatttgaaattcaaatattattgggcatctttgcaacccttagcataatcagggcctttcacttggatttcctaataccaggggctaac

SEQ ID NO: 974997 - DNA, 120 bp, Artificial Sequence
  ENSG00000233539_14 (sequence is synthesized)
aggtattttaacatatcatgaaaggcaggcctcctggtgacaaattctctcaacttttatctgaaaacatctttatttcttcatttctgaaggataattttactggatatggaatttcaa

SEQ ID NO: 974998 - DNA, 120 bp, Artificial Sequence
  ENSG00000233539_15 (sequence is synthesized)
tttgcaggtttgtgtggaaagcactcgctagaactgaagctccctgcaataacttttgaagtagcagaaatggacttagggctcatctgcaggcacattgcatctttacctaatcttcag

SEQ ID NO: 974999 - DNA, 120 bp, Artificial Sequence
  ENSG00000233539_16 (sequence is synthesized)
acactgcttatggcttggattgcttaggccgtagattgatcattaatctttaggacggtccggtgtggtggctcatacctgtagtcccagctactctggtggctgcccaagaccttggga

SEQ ID NO: 975000 - DNA, 120 bp, Artificial Sequence
  ENSG00000233539_17 (sequence is synthesized)
gatatgagacatggagtcaaaggagattgttttggagctttaagacttaatgactgccctgctgggtttcggacttgcatggagcctgtagcccctttgttttggccagtttctcacatt

SEQ ID NO: 975001 - DNA, 120 bp, Artificial Sequence
  ENSG00000233539_18 (sequence is synthesized)
ccctttgttttggccagtttctcacatttggaatgggaacatttccccaatgcctatacccccattgtatcttggaagtaattaacttgttttttattttacagaatcataggcagaaag

SEQ ID NO: 975002 - DNA, 120 bp, Artificial Sequence
  ENSG00000233539_19 (sequence is synthesized)
ctcagatgagactttggacttggacttttcagttaacgctggaatgagttaagactctgggggactgttgagaaggcatgactgattttgaaatgtgagaagggcatgagatttgtgaag

SEQ ID NO: 975003 - DNA, 120 bp, Artificial Sequence
  ENSG00000233539_20 (sequence is synthesized)
agatttgtgaagggcaaggagtgggatgatatgatttgtctctgtgtccccatccaaatctcatgtcaaattgtaatccccacatgtcaggggagggacccgaagggaggagattagatc

SEQ ID NO: 975004 - DNA, 84 bp, Artificial Sequence
  ENSG00000233539_21 (sequence is synthesized)
tggcagttccccccttgcttgctctctctcttctgctccaccatggtaatatgtgcttgcttctcctttgccttccaccatgat

SEQ ID NO: 975005 - DNA, 69 bp, Artificial Sequence
  ENSG00000233539_22 (sequence is synthesized)
ggtaatatgtgagccatgcttcctgttaaacctgtggaaccgtgaatcaattaaaacttttttattcat

SEQ ID NO: 975006 - DNA, 120 bp, Artificial Sequence
  ENSG00000233536_0 (sequence is synthesized)
ctcctgtgagactgtgaattcttcaaaagcagattccacaaatatgtcagcgctggaaatgatcctttggctttgaactatgtgaagactgcagaaggactggttgacaactacaataca

SEQ ID NO: 975007 - DNA, 120 bp, Artificial Sequence
  ENSG00000233536_1 (sequence is synthesized)
gatgagcagcccacccaagattccttctctaagaatttagaactgggaatggaggagagaaagagagagatactgattctaccagagacaatgggatgagatagcatggttgttggaacc

SEQ ID NO: 975008 - DNA, 120 bp, Artificial Sequence
  ENSG00000233536_2 (sequence is synthesized)
tgtctgcaagcctaatatttcatggatgtttgacaaggaccccgtctttagctgaactaaggagaaagtcctgcaacacacacatggagctcagcaaacggaggatgtaccttgaagagg

SEQ ID NO: 975009 - DNA, 120 bp, Artificial Sequence
  ENSG00000233536_3 (sequence is synthesized)
agcaaacggaggatgtaccttgaagaggcaagatgcttcagttctacagctgcaaggaaatcaattctgacaacaaccacgtgtgcttggaagaccaccaccaccatcaccaccaccacc

SEQ ID NO: 975010 - DNA, 120 bp, Artificial Sequence
  ENSG00000233536_4 (sequence is synthesized)
gcctcagatgggacgctagaccctccctgattatagtctgcgagacactgaacctggactcctggtctatgggagctgttttaagttttaagctgttaatttttggtaattagttatgca

SEQ ID NO: 975011 - DNA, 120 bp, Artificial Sequence
  ENSG00000233534_0 (sequence is synthesized)
aactcactttaattctatatccaccaacagtaaacaaactattcacaggaagaaaacaaattgcttttgagtcacagaggaaagagtaagagaaaattgctaatatttattgtgtgttta

SEQ ID NO: 975012 - DNA, 120 bp, Artificial Sequence
  ENSG00000233534_1 (sequence is synthesized)
ttactaggtcaactcagattctccaagaagcaggcaccaagacagaattagatgtgaaagaaatacactcagagaaatgctcttgaaggataaagacgccaaggagcaagaggaactgta

SEQ ID NO: 975013 - DNA, 120 bp, Artificial Sequence
  ENSG00000233534_2 (sequence is synthesized)
aaaacctccagatcatgttgctgttttcaatagttctttatatagaactaaatgaaattgtctgagttttgacaattataatattttatttctgattaatcagaaaatagtttgccataa

SEQ ID NO: 975014 - DNA, 120 bp, Artificial Sequence
  ENSG00000233534_3 (sequence is synthesized)
gtttttattgtaatttcaaaactaatgtcaagactgagcaaatcataagatggaagcacctgtgagtgcctgggaccctcaagatcatcaaatccagctttccctgcagagatggtcttt

SEQ ID NO: 975015 - DNA, 120 bp, Artificial Sequence
  ENSG00000233534_4 (sequence is synthesized)
caacttttgcctgaacatcatccttgtgagggaaatcgtttcatcacaaagcaatccagtttactactggaacactgcaattatttgaagcaaaacatctggatctactggataacactg

SEQ ID NO: 975016 - DNA, 120 bp, Artificial Sequence
  ENSG00000233534_5 (sequence is synthesized)
ctcaccaacactggtcatctttgtctttacccaaggcaagtatgccaccttataaaggactttgcactggacatgatggtttacaccctactcgagaggctgaagtgggaagatcatttg

SEQ ID NO: 975017 - DNA, 87 bp, Artificial Sequence
  ENSG00000233534_6 (sequence is synthesized)
ttacaccctactcgagaggctgaagtgggaagatcatttgagcccaggggttcaagactgcagtaagctatactcatttccccaata

SEQ ID NO: 975018 - DNA, 120 bp, Artificial Sequence
  ENSG00000233534_7 (sequence is synthesized)
gagagccgaagattgaagcttgaagaagtccagcgtttcagatcagatgaggagcactggctggtaaatgaagaaggagaaggagcaactgaagaggcagtagacaatccaaacggatct

SEQ ID NO: 975019 - DNA, 120 bp, Artificial Sequence
  ENSG00000233534_8 (sequence is synthesized)
gaacactgcaattatttgaagatttttggcatcacatgtcacaacattgcttcatatgaattggtacttaaaagaaaactcgacgccatagaactacaaaattaaatccaggaagaacct

SEQ ID NO: 975020 - DNA, 120 bp, Artificial Sequence
  ENSG00000233534_9 (sequence is synthesized)
cagagacgatcttcttccaacatcctctttctcagataaggaaattaaggttttaaaagatcttgtgccaaaagtcacacagttgacttgtggcagttaagattaaattttaaaattcct

SEQ ID NO: 975021 - DNA, 120 bp, Artificial Sequence
  ENSG00000233535_0 (sequence is synthesized)
gggagagatgtccctttgcagcagctgtgcacagggcttctgcacctcccctggggacagcttggtgtcttggctctgccttcagagccaggtcctttggggacagttctccccactctt

SEQ ID NO: 975022 - DNA, 120 bp, Artificial Sequence
  ENSG00000233535_1 (sequence is synthesized)
cctgatgcctgttgtgtggtcgtgtctcacctcgctgcctgctggcccacttgagcccagctccttctctggagaagttaattatcaaatcctagcaagaagggcaagtggtgatgattc

SEQ ID NO: 975023 - DNA, 120 bp, Artificial Sequence
  ENSG00000233535_2 (sequence is synthesized)
cattgcggagggatgacctgctcccaaccaaggattcttttcttccaggatgatgtcctccgtcataggttatgagatgtgccctataaccatttatgccaacaggactggttcattgaa

SEQ ID NO: 975024 - DNA, 120 bp, Artificial Sequence
  ENSG00000233535_3 (sequence is synthesized)
atatatgggcaccagttttaactgttttggtgcattgtgttagaaagtagcagcaattgaatcattgtcgcttgatttctgtcccttcgtttttcatgcctgtcagcaagcaaaagtggg

SEQ ID NO: 975025 - DNA, 120 bp, Artificial Sequence
  ENSG00000233535_4 (sequence is synthesized)
acaaatatttggaatttcttttttctggaacaccttttcttaaagtgtaagatttaaatggttttcagtaccagtcatcaccataatcaattttagaccatttcatcacctctaaaagaa

SEQ ID NO: 975026 - DNA, 120 bp, Artificial Sequence
  ENSG00000233532_0 (sequence is synthesized)
aatgatgcaatcatagcttactgcagcttctacctctggagctcaagcaatcctccagcctcagctgaccaagtagctgggatttcaggcacatgtcaccacagcaagctaatttttaca

SEQ ID NO: 975027 - DNA, 120 bp, Artificial Sequence
  ENSG00000233532_1 (sequence is synthesized)
tttttgtaaagacagggtctcactcttctgcccaggctgctcttgaactcatgggctcaagtgattctgccatgtcagcctcccaagtgctgggattacaggcttgaggcaccatgcctg

SEQ ID NO: 975028 - DNA, 120 bp, Artificial Sequence
  ENSG00000233532_2 (sequence is synthesized)
gcctaggaataggtcttaatcagtgcttctcatttggccacgtctggagacccctctggttgtcactgtgggagaagcggtgctcatgacatctcccgggtagagccagggtgccgctgt

SEQ ID NO: 975029 - DNA, 120 bp, Artificial Sequence
  ENSG00000233532_3 (sequence is synthesized)
gcctcgcacagtgcccggggcagcccgcacggcacagcattacctggcccagaatgtccattgcactgaggttgagagaccctggtctatgttaatcctgggacaggatcagcaacaagc

SEQ ID NO: 975030 - DNA, 120 bp, Artificial Sequence
  ENSG00000233532_4 (sequence is synthesized)
taaggaggagtcggctgagaggctcattcggggaccagaggtctccctaagggcccctcagctgacacacttccccagcacctctttgtggcagggcaggccagctttcccaaaatgagc

SEQ ID NO: 975031 - DNA, 120 bp, Artificial Sequence
  ENSG00000233532_5 (sequence is synthesized)
tatgcgggtgaggcttctccttggactttcctccttcttctccattcttcttcctttccagcaggccggaccccagcgctcgcctctccatgccaggacgctatgtgcctcgccaggaca

SEQ ID NO: 975032 - DNA, 120 bp, Artificial Sequence
  ENSG00000233532_6 (sequence is synthesized)
taagagtcaccctggatgaaccaccattgccagcggggagcatgttgcagctttcccacgcagtggatgagaacgaaggttacgaccattgtgtgggaggcgtctgtgtagcaattgctg

SEQ ID NO: 975033 - DNA, 120 bp, Artificial Sequence
  ENSG00000233532_7 (sequence is synthesized)
gaatcacttgtggcattgtagaaagactgagcgtgggaaagaagacgcattctgaagtcaccccgatttatgttaaattatcaccttgactactgctatagaacgaatgtttatgtcccc

SEQ ID NO: 975034 - DNA, 120 bp, Artificial Sequence
  ENSG00000233532_8 (sequence is synthesized)
cacccaaattcgtatgctaagacctaatagccaataagatagtattaatagatggggcctttgggaggtgagtggctcatgagggcagagtcctcaaaaccagataagtgcccgaataaa

SEQ ID NO: 975035 - DNA, 120 bp, Artificial Sequence
  ENSG00000233532_9 (sequence is synthesized)
aggggccccagagagatcccttgcaccgtctaccatgtgaagtgtagaacacagcgagaaggccacctatgagccagaacgtgggccctcaccagaacccagttgtgctggcaccctgat

SEQ ID NO: 975036 - DNA, 120 bp, Artificial Sequence
  ENSG00000233532_10 (sequence is synthesized)
cctggacttccagcctccaaaatgacgacaaagaagtttgtttttcctgagccatccacttcaaagtattctgtcatagctccccaaatagactaagacatctacttaaccttggtcaaa

SEQ ID NO: 975037 - DNA, 120 bp, Artificial Sequence
  ENSG00000233532_11 (sequence is synthesized)
cgtttaaccttggagtccacgcctctgaaatggtgacaataacactgtgtatttcctactttatgatcaggattaataaatgtaatttattaatcagaaattagtaatttctgattatta

SEQ ID NO: 975038 - DNA, 120 bp, Artificial Sequence
  ENSG00000233532_12 (sequence is synthesized)
gaaatcctccagccctgttagaaatgcctcagccagggggactcatctcctcaaacctgggggaccgagacctatgagaggtcacagcatgagccaggacatcggaggtacccagacatt

SEQ ID NO: 975039 - DNA, 120 bp, Artificial Sequence
  ENSG00000233532_13 (sequence is synthesized)
gagttttagacctagaaaaaaactgaaaaatcatccattccactctcctcattttacagatgagggcatcgagcctcagagaaatgaaacttgcccaagaccacacagcaagctttctgg

SEQ ID NO: 975040 - DNA, 120 bp, Artificial Sequence
  ENSG00000233532_14 (sequence is synthesized)
gctcagcgaacctgcaataccaaagttccacattttggggagtactacctcatctgtagagacgtattttaaagaattggctcgtgggattgtggggcctggaaatctgaaatctgcaga

SEQ ID NO: 975041 - DNA, 120 bp, Artificial Sequence
  ENSG00000233532_15 (sequence is synthesized)
gaaagccagcaggctggaaattcagctataatgtgacaggcaagctattttacaaggcaataaagaaaataatcatgctccccagcgagtaaactgcaaggccaaaaggaagtggcgagg

SEQ ID NO: 975042 - DNA, 120 bp, Artificial Sequence
  ENSG00000233532_16 (sequence is synthesized)
aaagaagaatgaagacaaagaatatggagtttccattgatttagccaagtccataacagaagaaaagtgccttccttcggaacttccaatacaatgtgtgagaatggacctgttacaact

SEQ ID NO: 975043 - DNA, 120 bp, Artificial Sequence
  ENSG00000233532_17 (sequence is synthesized)
tgtattactcgcagggttcccccactaccaagaataggggtggccttagaaggcactctgaagcaagaatcagcaagtgactgaatctatgagactcgtattgatcagcctcaaaagaaa

SEQ ID NO: 975044 - DNA, 120 bp, Artificial Sequence
  ENSG00000233532_18 (sequence is synthesized)
aacaatgagatatcctcctagctttctcttgggaaactttcactttatatcttttcaatttattctcatctttttttttgttccttccttccctacttttaggctttgtcgttcaaaagc

SEQ ID NO: 975045 - DNA, 120 bp, Artificial Sequence
  ENSG00000233532_19 (sequence is synthesized)
tagctcgtagaatttttttaaatctttgtattcatatatccctaactagagcatgatctttttctggctggtggatcctccccagaatgtttgcatgtattagggctccagtgaataggt

SEQ ID NO: 975046 - DNA, 120 bp, Artificial Sequence
  ENSG00000233532_20 (sequence is synthesized)
gttggtcatgaggaaggatgaccagctaagggagctaatggcttagacagacactgtagaattgcaaggaatagagatgtgctcaagataccttggttggcgaggtttattgttgcagaa

SEQ ID NO: 975047 - DNA, 120 bp, Artificial Sequence
  ENSG00000233532_21 (sequence is synthesized)
acacactgggtggtagccagtcaaccaagacggcggccatcaattccttacctttctttgtgtacatgctgcaccccatgaccaaaggtagggccttttttctcctcccttgtatttcga

SEQ ID NO: 975048 - DNA, 120 bp, Artificial Sequence
  ENSG00000233532_22 (sequence is synthesized)
ctggcctcataccttgctttcaacagtgaaatgtaacagtggtgaagttggacttgttccaagcctagactttaagccttctgtttcctacttcttagaagccagtcaccatgcaagaag

SEQ ID NO: 975049 - DNA, 120 bp, Artificial Sequence
  ENSG00000233532_23 (sequence is synthesized)
cctgcctacccagtaaccagctgtgagaagtccaagctggctacacaaagggggggacactgaggtgccagacaggtgggtaaggcctgcctgaaccttccagctctgcccaacactcag

SEQ ID NO: 975050 - DNA, 120 bp, Artificial Sequence
  ENSG00000233532_24 (sequence is synthesized)
ctgaatgcagtgaatcagccagcccagctgagaacacagtgagcagaggttctgatcctgcctggattccagacccacagaatccagagaaatcatgtgactttaagccactaacttttg

SEQ ID NO: 975051 - DNA, 120 bp, Artificial Sequence
  ENSG00000233532_25 (sequence is synthesized)
caatagattaatgtacaacaatagataaaacacacagaaaagtcaagaaaatgtttttgaagaaaagtgatctccgtaggttaactgcagttggttaatactaatttattgtatatttca

SEQ ID NO: 975052 - DNA, 120 bp, Artificial Sequence
  ENSG00000233532_26 (sequence is synthesized)
aaatagctagaagataataattagaatgttcctagcataaagaaaagacaatttaaggtgatggatatgccaattacactgatttgatctttacacattatatgaatgtattcaattatc

SEQ ID NO: 975053 - DNA, 120 bp, Artificial Sequence
  ENSG00000233532_27 (sequence is synthesized)
cattattgactcagagggatgaacgccagatcctgactcaccgccaggacatcggaggtacccagacattgttatgaaactccgcatgtgcccctggtggacgctgctggacccagcatg

SEQ ID NO: 975054 - DNA, 120 bp, Artificial Sequence
  ENSG00000233532_28 (sequence is synthesized)
ccttctaccacatcatgctgcagaaaacacagcagatgggaagagacgagagagacgtattttaaagaattggctcgtgggattgtggggcctggaaatctgaaatctgcagagaaagcc

SEQ ID NO: 975055 - DNA, 120 bp, Artificial Sequence
  ENSG00000233532_29 (sequence is synthesized)
caggcttccttctaccacatcatgctgcagaaaacacagcagatgggaagagacgaggcatgtggttgccatttctgtattacatccaattcatatttcatttagaaaatgtatttctag

SEQ ID NO: 975056 - DNA, 120 bp, Artificial Sequence
  ENSG00000233532_30 (sequence is synthesized)
aacttgttaaaaaacctgaatgattttgattgaagtttttcaaaactaggattactatgcttctaatggagatcaagttcaaatttttaacatattttgccttattttgccactcccctc

SEQ ID NO: 975057 - DNA, 120 bp, Artificial Sequence
  ENSG00000233532_31 (sequence is synthesized)
aaaatatccatagtattgaatgcccaggtttcctgtttggaaaagcccgaggatctgtgcacactctgggctactcttgcccagctcctgactgaggcactggacctggcccgatgctgc

SEQ ID NO: 975058 - DNA, 120 bp, Artificial Sequence
  ENSG00000233532_32 (sequence is synthesized)
tctctgctgctgcccagctcttctgctccaccggcaacactgtacccagttaatcattagggcccttgtctctgtacaattgctctgtacaactcgataaaataatccatgctaacaaaa

SEQ ID NO: 975059 - DNA, 120 bp, Artificial Sequence
  ENSG00000233532_33 (sequence is synthesized)
gacacataacggagaggagtagggaaataaagacctgtctggtccttccccacttccctaatccatctgtctcccttgctatgtctctaaaccttctccagccaggacatcggaggtacc

SEQ ID NO: 975060 - DNA, 120 bp, Artificial Sequence
  ENSG00000288093_0 (sequence is synthesized)
agtcagggctgcagccagagcccggagatagttgggcagggctccaggcgtccccgaatgctcgtcgtggagttttcctgatcctgtcgggtccctaaggaacgcttggcggggagcgtg

SEQ ID NO: 975061 - DNA, 120 bp, Artificial Sequence
  ENSG00000288093_1 (sequence is synthesized)
gacgccctggggccaggccaccgcggtcactgagagccacccccccggaaactggagaaaaacggagtagaagagacctaggggacagacttggccgggtcaagggaaaccagctcatat

SEQ ID NO: 975062 - DNA, 120 bp, Artificial Sequence
  ENSG00000288093_2 (sequence is synthesized)
ttggaacaaaatacgccttatgtttgcccagcactgaatttagaagcattttcacattctcgagtttaactagttttgcaacagtgccacgagcaaattattaaacgtgttttaaagatg

SEQ ID NO: 975063 - DNA, 120 bp, Artificial Sequence
  ENSG00000288093_3 (sequence is synthesized)
aagagactgaagctaggtaaattggacttgggtaagatggaagcgctacttaacgttaaggagagtctgcgaccctgatgttctcaggctgtatctcgcttagtgggactacaccttatt

SEQ ID NO: 975064 - DNA, 120 bp, Artificial Sequence
  ENSG00000288093_4 (sequence is synthesized)
attgtcggaggaaacaaatgaagaggaaagagaccgtgaagagtattcctggagggactcaagataccgctgtaggtagaaccccaagatagctgtgtagagtgacagctgatgtcgaat

SEQ ID NO: 975065 - DNA, 120 bp, Artificial Sequence
  ENSG00000288093_5 (sequence is synthesized)
gacttcatcttttccactgctgcgggtgaaattatctgaggaggtaggaagaggagatggtttagggatgccatatgacaaaagctttggaaaattaagaagaggccgggcgcggtggct

SEQ ID NO: 975066 - DNA, 89 bp, Artificial Sequence
  ENSG00000288093_6 (sequence is synthesized)
cactccagactggatgaaagagcaaaacttcgttaagaagagaaggatgagagaattaccaaggcagcagtgaagacttacgtgctgtt

SEQ ID NO: 975067 - DNA, 120 bp, Artificial Sequence
  ENSG00000288093_7 (sequence is synthesized)
agagaattaccaaggcagcagtgaagacttacgtgctgttgtatgatacaaatgtccaggggctagcatggaacaatgttggctgactgcgccaggagctctaatctggcaagaatctag

SEQ ID NO: 975068 - DNA, 120 bp, Artificial Sequence
  ENSG00000288093_8 (sequence is synthesized)
aggagaaggtggattgtgggatgaataagcaaaggaggagagttaaagagttgggggtggtagtgagagagcagaagagaagcacctggttacaggttgaggctgtgcagaatgtagaaa

SEQ ID NO: 975069 - DNA, 120 bp, Artificial Sequence
  ENSG00000288093_9 (sequence is synthesized)
gacatcagagatgttcaatggtgctcacttcggcagcacatatgctaacattggaataatacagagaaaattaacatggcccctgtgcaaggctgatgtacaaattcatgaactgttcct

SEQ ID NO: 975070 - DNA, 120 bp, Artificial Sequence
  ENSG00000288093_10 (sequence is synthesized)
ttttttttttttaaagaaatgtccaatggactgaatgctagacagataatagtttatcaggttaaggaactttatcaaaaaattggcttaaataataaagggaaaatattgcctcacaat

SEQ ID NO: 975071 - DNA, 120 bp, Artificial Sequence
  ENSG00000288093_11 (sequence is synthesized)
aattggcttaaataataaagggaaaatattgcctcacaatcctaggtagatctgggcttcaggtaagtcttcacacaaggctcaaagaagtctctgggccaggcgcggtggctcacgcct

SEQ ID NO: 975072 - DNA, 120 bp, Artificial Sequence
  ENSG00000288093_12 (sequence is synthesized)
agcactttgggagatagaggcaggcagatcacctgaggtcaaaaatccaagaccagcctggtattactaaaaatacaaaataattagccgtgcatagtggtgcacacctgtagtcccagc

SEQ ID NO: 975073 - DNA, 120 bp, Artificial Sequence
  ENSG00000288092_0 (sequence is synthesized)
cacagaaagtgctaagtttgtaaaagagtctgaaaaggttcagaaaagtagcataaaaggaactggggaacgccccgtgaattttgaacagagagcagaaaagggaccctaaaaagcaat

SEQ ID NO: 975074 - DNA, 120 bp, Artificial Sequence
  ENSG00000288092_1 (sequence is synthesized)
ggggagctgagtctggaggtacatttttgactctatgggaagctatgttatagaaagctcagtgaacaagatggacacccacattgtagaaatatttcctcccatctcactttaacagaa

SEQ ID NO: 975075 - DNA, 120 bp, Artificial Sequence
  ENSG00000288092_2 (sequence is synthesized)
aaaaagcccaaacaaacaaaaacaagacaaattgaaaaagagcttcaagtagagaaagcatcaagaatatagaactacatttctttgtcaaaatatttataataaaaagaaatgacatca

SEQ ID NO: 975076 - DNA, 120 bp, Artificial Sequence
  ENSG00000288091_0 (sequence is synthesized)
gaggtaaggccctgaaaatactgtggcccagaatttgcccactcctcctacggaagcattttgttgaaaacctaggaatggactcggaaatggacagctcaccgccagtcccttccgcgc

SEQ ID NO: 975077 - DNA, 120 bp, Artificial Sequence
  ENSG00000288091_1 (sequence is synthesized)
aagaaaaatataagctccacttccacttccagtcattatggagtgacagtgacccaatttgccctactgcatgaaactattaatacataacacttggacaaaatatatgaaacaatggtt

SEQ ID NO: 975078 - DNA, 120 bp, Artificial Sequence
  ENSG00000288091_2 (sequence is synthesized)
tttggacatttgacataaaggaatgcagaaccgtaatccctgaatgcaaaatacaaactgagctctctgagtgccccagctgctacgcctgtagtacaagaaaaggaaatccaggcagac

SEQ ID NO: 975079 - DNA, 120 bp, Artificial Sequence
  ENSG00000288091_3 (sequence is synthesized)
tttgatgctcttcttgagttgaagagatgaagctgggagtccagacaggcccaggtttagcaaagcagataccaaagagaagagagatgcacagagagagagagatgcaaaggatctctc

SEQ ID NO: 975080 - DNA, 120 bp, Artificial Sequence
  ENSG00000288091_4 (sequence is synthesized)
cagtcttcagctccataatgctaaacactggtgtatgaagaaactacttgaatggggtggagatggggcattgaagaaatcacttgcacagagcaaaggaagcaaaggaattatcataat

SEQ ID NO: 975081 - DNA, 120 bp, Artificial Sequence
  ENSG00000288091_5 (sequence is synthesized)
cctcaggactcaagcagtgccaggaatactaatgttcccatcagccgagtggaaaaccctgcaaatcacaggacattggctagactactcagaaatttattgcctcaggaataaggaaaa

SEQ ID NO: 975082 - DNA, 120 bp, Artificial Sequence
  ENSG00000288091_6 (sequence is synthesized)
tgaggcctagtctaaaggcttctctgtttctaactaaccaagcctaatagcaatgtttgaaaagatcaagctacttccaagtaacttaactgtatcatgaaaaaaaaagaagctccagaa

SEQ ID NO: 975083 - DNA, 120 bp, Artificial Sequence
  ENSG00000288091_7 (sequence is synthesized)
tatttataggaataaaagaattttcagtactcgatagagtacaatgcacaattagtttagcaactactaaaaaattatctggcatacatactgtccaaagcaatttatagattcaatgct

SEQ ID NO: 975084 - DNA, 120 bp, Artificial Sequence
  ENSG00000288091_8 (sequence is synthesized)
atctctatcaaactaccaattccattcttcacaaaaactagaaaaaaactaatttaaaattcacttggaaacaaaaaagagcccaaataaccaagacaatcctaagcgaaaaaaacaaag

SEQ ID NO: 975085 - DNA, 120 bp, Artificial Sequence
  ENSG00000288091_9 (sequence is synthesized)
acctgacttcaaactgtactacaaggctgcagtaaccaaaatagcatggtactagtataaaaacaaacacatagaccaatggaaaaaaataaagagcccagaaataaggccacacacctt

SEQ ID NO: 975086 - DNA, 120 bp, Artificial Sequence
  ENSG00000288091_10 (sequence is synthesized)
taaggccacacaccttcttcaacaaagctgaaaatcaatctgatcttcaacaaagctgaaaaaaaaaaaaaacaaggaagggggaaaggactccctgttaagcaaatggtgctgggataa

SEQ ID NO: 975087 - DNA, 78 bp, Artificial Sequence
  ENSG00000288091_11 (sequence is synthesized)
atggaagacaacctaggtaatatcattctggacataggaaagggcaaatatttcatgacaaagacaccaaaagcaatt

SEQ ID NO: 975088 - DNA, 120 bp, Artificial Sequence
  ENSG00000288091_12 (sequence is synthesized)
aaagggcaaatatttcatgacaaagacaccaaaagcaattgtgacaaaagcaaaaaatggcaaatagtatctaattaaactgaagagcttcttcacagcaaaagaaactatcagcagagt

SEQ ID NO: 975089 - DNA, 120 bp, Artificial Sequence
  ENSG00000288091_13 (sequence is synthesized)
tcacagcaaaagaaactatcagcagagtaaaaagacaacctacagaatgcaacaaaagcaaaacttgacaaatggaatctaattaaagcagagagcttctgcacagcaaaagaaactatc

SEQ ID NO: 975090 - DNA, 120 bp, Artificial Sequence
  ENSG00000288091_14 (sequence is synthesized)
aacttacagaatgggagaaaaattttgcaaactccacatctaacaaaggtctagtatccagcacccataaggaacttaaatttacaagggaaaaaaaaaaaacattaaaaagtgggcaaa

SEQ ID NO: 975091 - DNA, 120 bp, Artificial Sequence
  ENSG00000288091_15 (sequence is synthesized)
tgtggccaacaatcatatgaaaaaaagttcaacatcactgaccattacagaaatgcaaaccaaaaccacaattagataggatctcacaccagtcagaatgactattattaaagagtaaaa

SEQ ID NO: 975092 - DNA, 120 bp, Artificial Sequence
  ENSG00000288091_16 (sequence is synthesized)
caattagataggatctcacaccagtcagaatgactattattaaagagtaaaagaataacaggcgctggtgaggttttggagaaaaaggaaaccttatacactgttggtgggagtgtaaat

SEQ ID NO: 975093 - DNA, 120 bp, Artificial Sequence
  ENSG00000288091_17 (sequence is synthesized)
ccagcaatcccattactgagtatatacccgaaggaatagaaatcattctattataaagacacttgtatgcatatgttcactgcagaactattcacaatagcaaaaacatgtaatccacct

SEQ ID NO: 975094 - DNA, 75 bp, Artificial Sequence
  ENSG00000288091_18 (sequence is synthesized)
aatcattctattataaagacacttgtatgcatatgttcactgcagaactattcacaatagcaaaaacatgtaatc

SEQ ID NO: 975095 - DNA, 79 bp, Artificial Sequence
  ENSG00000288091_19 (sequence is synthesized)
ctttgcagggacatggatggagctggagtccattatccttagcaaacagaagtggaagctaaatgatgagaacacatgg

SEQ ID NO: 975096 - DNA, 120 bp, Artificial Sequence
  ENSG00000288091_20 (sequence is synthesized)
acacatggacacagagaggggaacaacacaaactggggcctttcagaggttggagagtgggaaagagggagaggatcagcaaaaataagtaatgggtatttggcttaatacctgggtaat

SEQ ID NO: 975097 - DNA, 120 bp, Artificial Sequence
  ENSG00000288091_21 (sequence is synthesized)
ggtggagagaagattgcttgctaggaacatcaaaacccaaagaacaacatggtcatgtgttgcttggaattcatttttgcctaatatatctgagacctgcagctgaagaagccagaaaca

SEQ ID NO: 975098 - DNA, 120 bp, Artificial Sequence
  ENSG00000288091_22 (sequence is synthesized)
tgaaaacaccaacatgcatgggcaaaatagcctgaacgaaagcttgttctctctagctgaaggccaggaaaacggtggcctagtcagacagaaaatttttagacaagaagtgctctattc

SEQ ID NO: 975099 - DNA, 120 bp, Artificial Sequence
  ENSG00000288091_23 (sequence is synthesized)
cagcctaaccccaaggaaaaagctgttgctccactcccatccatgccaatgaaggccacgtggggagcctacacttccaccctcatgagacagtaatgagatgctccaaccccctcacca

SEQ ID NO: 975100 - DNA, 120 bp, Artificial Sequence
  ENSG00000288091_24 (sequence is synthesized)
gagtggtatcaaagaaagccaagtagggagtgaggacattcatccaactggccaataacatgatctcctcctccctgcagtgtgagtaaaaaccacacaaggagccagaacttctacccc

SEQ ID NO: 975101 - DNA, 120 bp, Artificial Sequence
  ENSG00000288091_25 (sequence is synthesized)
catcaagcagtaatgaggcaccctcctcaccccactgaggtagtgttagaggaggcctactaaagaatcaagactttcaccatcacccagcaataatgaggccacccccaccaccgtgtc

SEQ ID NO: 975102 - DNA, 120 bp, Artificial Sequence
  ENSG00000288091_26 (sequence is synthesized)
aatggagaccatgtggggagccagaattcccaccctcacccagcagtaataaggagtccctcccattcaagtgtcagcaaggccaattggagaacctagacttccattccacctgatatt

SEQ ID NO: 975103 - DNA, 120 bp, Artificial Sequence
  ENSG00000288091_27 (sequence is synthesized)
atatgaaaatgtccagatttcaatgtccagagaacaaacataaaaatcacacgtcacactaacaaccagaaggtctctactgagtgaaaaaaagtaatagatgccaacaacagatgatag

SEQ ID NO: 975104 - DNA, 120 bp, Artificial Sequence
  ENSG00000288091_28 (sequence is synthesized)
aggtgctagaattacctaacaaagattttaaagcagccattataaacatatttcaatgagtaattacaaacaggcttgaaaaaatgaaaaaaaaaagctttagcaaagaaaaagaatgtc

SEQ ID NO: 975105 - DNA, 120 bp, Artificial Sequence
  ENSG00000288091_29 (sequence is synthesized)
tcaacaaataaatgaaagatataaagaaccaaactgaaatttagaactgagagataatagtaactgaaattttaaaaggctcagtgaataagttcaacagcagaatggaggaaatagagg

SEQ ID NO: 975106 - DNA, 120 bp, Artificial Sequence
  ENSG00000288091_30 (sequence is synthesized)
aaagaaatgatgaacagaaagagcaaacaatgcaaattactcaatctgaacaacacagaggaaaaaagacttgaaaaaagtgaacatgcttcaggaacctttggaagtattttttaaatg

SEQ ID NO: 975107 - DNA, 120 bp, Artificial Sequence
  ENSG00000288091_31 (sequence is synthesized)
taatatttgtgccattgaagccctggaaggagagaaaaatgagggcagggatgaaaaagtacttaaagaactaatggctgaaaacttcccacatttagcaagaaacacaaaactacaaat

SEQ ID NO: 975108 - DNA, 120 bp, Artificial Sequence
  ENSG00000288091_32 (sequence is synthesized)
tcgtgaagctgactgaaccccaaacaagataataaaataatacacaggaagacataccataattaaaattatgaaaactaaagacaaagtgttgaaagcagccatgacaccttatatgta

SEQ ID NO: 975109 - DNA, 120 bp, Artificial Sequence
  ENSG00000288091_33 (sequence is synthesized)
ggggaaagcaatttgaataacagtgagtttctccctggaaaaaccatggaggccagaaagaagtagcacagtatctttcaagtgaaaagaattgtcaacccagaactttacacccaatga

SEQ ID NO: 975110 - DNA, 120 bp, Artificial Sequence
  ENSG00000288091_34 (sequence is synthesized)
aattatccttcaggaattaaggagaaagcagtacattctcagataaaggaaaattatgatagtttttcaaaagtagacctaccctaaaataatagctttaaaaaagctctctaaacacaa

SEQ ID NO: 975111 - DNA, 120 bp, Artificial Sequence
  ENSG00000288090_0 (sequence is synthesized)
acaacagagcaggctgtctgctccctgcaagccaagctggagctggcagatggggatcagggctgggaccttcctgacaatgatcatcgccactgctgaggctcagtaaaatggccagga

SEQ ID NO: 975112 - DNA, 120 bp, Artificial Sequence
  ENSG00000288090_1 (sequence is synthesized)
gcagtttcatgtggctgagtctgtctctgtctgtaccccacctggcatgggggagtgaggaggcgtctctctccgagtctcaaggcacctgcctctggtgacaggctgtccttggaatga

SEQ ID NO: 975113 - DNA, 120 bp, Artificial Sequence
  ENSG00000288090_2 (sequence is synthesized)
gccaattagactgcaaaagtcatctctccaccttcccatcccacccaccagctcccaccagcacacacagagacacacctggttccctaagctttgcgcagacaacatgcccaggaggag

SEQ ID NO: 975114 - DNA, 120 bp, Artificial Sequence
  ENSG00000288090_3 (sequence is synthesized)
cacttgactctgctgaacaagtcgcccctcccacccctagcagctgaagttctcatctgctccacagaaagcagccctcaaatgctgcctctgcatcccacagctgtgtgaccttgggca

SEQ ID NO: 975115 - DNA, 120 bp, Artificial Sequence
  ENSG00000288090_4 (sequence is synthesized)
catcccttaatctctccttcccctgttcccccaaaaagggtctcaatacagcattatgctgccttctcaactgacccctccaggagaggataatgaggactcgatacccattgggaaggc

SEQ ID NO: 975116 - DNA, 120 bp, Artificial Sequence
  ENSG00000288090_5 (sequence is synthesized)
cttcccgttaaaggaggaaaacgccgagtttgccagcacaacagcacccacctcctcccaagaggagcctcagcactggggcagtaatgtcgctcgggatcagaggtgggaccagccatt

SEQ ID NO: 975117 - DNA, 120 bp, Artificial Sequence
  ENSG00000288090_6 (sequence is synthesized)
tcacctggagaagagcagggctgtccttccagctccttgctagacaagaagggaagagatcttctccttaagaggctgttgcttaatgaaaaataaaactaaatgcagccatagatagca

SEQ ID NO: 975118 - DNA, 120 bp, Artificial Sequence
  ENSG00000288090_7 (sequence is synthesized)
cactgatggtgggaaaatcttacttgacccccccgccccgccgattctgtgcctttctgagggcaagaggaaaatggaagtacccttatctgatggttcctgtctaaggaggcaggaaaa

SEQ ID NO: 975119 - DNA, 120 bp, Artificial Sequence
  ENSG00000288090_8 (sequence is synthesized)
cacggatgctcccagtgtccaggagaggccatgcgtggagcctgcaggagaggggggcagtgtgcaccatctctaggagcagcttttctagatgaagggcctagactatgggatctgcag

SEQ ID NO: 975120 - DNA, 120 bp, Artificial Sequence
  ENSG00000288090_9 (sequence is synthesized)
agttgcaggagatgtatgcagactccaccctctggaccaggggctgtgctgaggccaattgtgttagggaaggcttttagagcacagctgcacaccaggcacttgacatacgatgtatca

SEQ ID NO: 975121 - DNA, 120 bp, Artificial Sequence
  ENSG00000288090_10 (sequence is synthesized)
ttagtgagctcagcctctgatgaggcaggtgtcagtattagcccccattttacagatggggaaggggaggcacagagaggtcaggaactggcccagagtcactcagtcccctagctagac

SEQ ID NO: 975122 - DNA, 120 bp, Artificial Sequence
  ENSG00000288090_11 (sequence is synthesized)
atgaacccaggcagtctaattccagagtgtgcactcttaactactgtgtgatgtatgtggactagaaagcaggacacacagcgagcagggaaattcactccgtgtggtgtgggcacttag

SEQ ID NO: 975123 - DNA, 120 bp, Artificial Sequence
  ENSG00000288090_12 (sequence is synthesized)
cacgacttcttagggaccagagaagcttccactatcatattttgttttcattagtaatggttttttaaaatgtcaacaatcgctgagccaacttctcataatcaatcctttatatttaaa

SEQ ID NO: 975124 - DNA, 120 bp, Artificial Sequence
  ENSG00000288090_13 (sequence is synthesized)
aaaaggtcaaaacaaagttacatcgtggatgattttaaatgtttacatttcacaaattaatgcttttagccttatcaatacaatgcaataaaaattatgctctttccaagatagctacat

SEQ ID NO: 975125 - DNA, 120 bp, Artificial Sequence
  ENSG00000288090_14 (sequence is synthesized)
tattttaaaaaataatgtgatttcagagtgcactcaagtaacatgggctggcgatggggcaaaaaatgtaagcgtggataatcatctctctttgaatgttgttgctctgaggctacaagt

SEQ ID NO: 975126 - DNA, 120 bp, Artificial Sequence
  ENSG00000288090_15 (sequence is synthesized)
ctaactctcctctttagagaataacatcaaaagtccaatctgggaggaatcagcccgatgttgctggctttgaagatgaaggaaggtggccatgagccaaagaaaggacttctgttctac

SEQ ID NO: 975127 - DNA, 120 bp, Artificial Sequence
  ENSG00000288097_0 (sequence is synthesized)
tctatggagtagccattcttttattcgaatactttactctcctaacaaacttgctttcattttactctacagactcaccctgaattctttcttgcacttgctctaagaaccctctcttgg

SEQ ID NO: 975128 - DNA, 120 bp, Artificial Sequence
  ENSG00000288097_1 (sequence is synthesized)
accctctcttggggtctggatccggaccgctttctgctaacacttctacataccacgtttatttgagacagaaaaatacagcaaggacatccatctaaactttgtctggagtctgggccc

SEQ ID NO: 975129 - DNA, 120 bp, Artificial Sequence
  ENSG00000288097_2 (sequence is synthesized)
aggggagctgcagtacatggagggtctctggaagtgggtatggcagattagcgcctaagctcaactggctttcctcctctgcctctgttcctgggacttgctcacggctcacaagcattt

SEQ ID NO: 975130 - DNA, 120 bp, Artificial Sequence
  ENSG00000288097_3 (sequence is synthesized)
cccaggggagtaaaaggaaggatcaaagctacaatgggcttggctgcccttctccaggaatggccagaggacaacttctgcttggaaagttcctggatacttctggaacagaattctcct

SEQ ID NO: 975131 - DNA, 120 bp, Artificial Sequence
  ENSG00000288097_4 (sequence is synthesized)
ggggtgagtggttcacacaactgacccacttcatccccactcagcaaaatgagagcgccgttgactgacaacaaaatgctgaactggaaacctccgcagtaaaacgtgatgcagaacaga

SEQ ID NO: 975132 - DNA, 120 bp, Artificial Sequence
  ENSG00000288097_5 (sequence is synthesized)
gaaagaactaagatgttctgcacagacggtatcatgccctctatgaggaaactactcgagcatatctgtgtttcaaatgatgtctttgaactatttatgttaaatgcccccccaaaaaaa

SEQ ID NO: 975133 - DNA, 120 bp, Artificial Sequence
  ENSG00000288097_6 (sequence is synthesized)
tggaaaggcttcttcgtagaggaaagagcttgaagttgctaggctgttctgccttcaacaggcatttattgtgcagctacaaaatgctgcaccaagcactgggcagtggaaaggtgattc

SEQ ID NO: 975134 - DNA, 120 bp, Artificial Sequence
  ENSG00000288097_7 (sequence is synthesized)
agacacagttcctttgacaaaacctcaaaatcccatgtgaagttctcttttataaagtaaatcagaaaagattcaaaagttgaggtaccaaaaaaaaataatataaatgcaagtagtaaa

SEQ ID NO: 975135 - DNA, 120 bp, Artificial Sequence
  ENSG00000288097_8 (sequence is synthesized)
gcgctattgactgtaaatagaagcacttaataagtggttgttgtttctgttcttctctctaataagtgtatacaggtggctaaatgcttttgttgagctatgagtacctcattctgtgga

SEQ ID NO: 975136 - DNA, 120 bp, Artificial Sequence
  ENSG00000288097_9 (sequence is synthesized)
gactggaaacaggtgatgttcagtgcacgcaatgcttgaagtgttcccaggtatttagtttcaggtaaattttactgtttaaaaaaattgtttttacttgctattaagtgtgttgacctt

SEQ ID NO: 975137 - DNA, 120 bp, Artificial Sequence
  ENSG00000288097_10 (sequence is synthesized)
ggataatttacttaacctctctatgccttgcttccttttctgcaaaatgagagtaagaaaagtgcttacctcattggctttttgtgaaattcaatgagttaacacgtgggagaaaagatg

SEQ ID NO: 975138 - DNA, 120 bp, Artificial Sequence
  ENSG00000288097_11 (sequence is synthesized)
tttttaaataatcaattcttagcagttggtcattgttatgagttacatcatgcgtagttaaatattttttaaaaaattaaaatttattttcctataggaaaaaggagggactgaattgtg

SEQ ID NO: 975139 - DNA, 120 bp, Artificial Sequence
  ENSG00000288097_12 (sequence is synthesized)
aatccattttctctgctttcagttatttctactcctgagaaaaaccctaagcacttagggtctagaaccacatcccgagacggtgagctcttcccacattttcacatgtgcctgaatcat

SEQ ID NO: 975140 - DNA, 120 bp, Artificial Sequence
  ENSG00000288097_13 (sequence is synthesized)
ttgtaggtctcgttcaagcagagaatctccgggattctcactcgggaggtctggggtcgggcctgagtccttgcatttctaacaaactcccagttgatgctggtgccactggttctgaat

SEQ ID NO: 975141 - DNA, 120 bp, Artificial Sequence
  ENSG00000288097_14 (sequence is synthesized)
taagatgcttgtttacctagtgacagcaacaaaaattgtagcaatggtatccagaaataaacagcatacttttatagggctagtcaaatgaacccaaacatacaaaataaaggcaaacct

SEQ ID NO: 975142 - DNA, 120 bp, Artificial Sequence
  ENSG00000288097_15 (sequence is synthesized)
cacaatcttcttgcaatgatttattactctgagagctcattttaggtgagattgtctccctccggagcctgattcctaaaagctttctatgactttgaaattatcgttttccttttggag

SEQ ID NO: 975143 - DNA, 120 bp, Artificial Sequence
  ENSG00000288097_16 (sequence is synthesized)
gtagcacaatataagagctaagaagagaatgagaactggagtccctcccaggtttgcccctctaggtatgtaagctaaggtaaactacttagcctttcttaagcctcagttttctcatta

SEQ ID NO: 975144 - DNA, 120 bp, Artificial Sequence
  ENSG00000288097_17 (sequence is synthesized)
aagcctcagttttctcattacaaatgggcatatacggaacattggcttgcctcctacagttgtttgaggactcaatgaaaatgtacgtgaagctggttgcggtgagctgagattgtgcca

SEQ ID NO: 975145 - DNA, 120 bp, Artificial Sequence
  ENSG00000288097_18 (sequence is synthesized)
ccactgtcagtccatcagcaacagccagttagagtcgattgggtgtgagaagcgagactattcataagcagcctgtcccctgtgccactggcttattaagcagagctaggcatagacagc

SEQ ID NO: 975146 - DNA, 120 bp, Artificial Sequence
  ENSG00000288096_0 (sequence is synthesized)
gctgccctgtgaggacgcgccagggcacgcgcggtgacggaggcagaggctaaagagctgtcgccgcaggcccaggacggccacaggtaagggaagggatgccctcccgggctctgggag

SEQ ID NO: 975147 - DNA, 120 bp, Artificial Sequence
  ENSG00000288096_1 (sequence is synthesized)
atgtgcgtgtgcgggatgccacgtgacacagctgaacctgaggggccacttttggcaaaggcagtgcgacaggcccgtgtcacgggacccgtggtcgccgtggtgatccgcgtggcagcg

SEQ ID NO: 975148 - DNA, 120 bp, Artificial Sequence
  ENSG00000288096_2 (sequence is synthesized)
ccgggactgcggccctcaggtggtggagccaccccgcagagtcgcgctcagggacagccgggtgaccacgggctgtggagctgggcactgcgctccagggcagggcttatgccctgaacc

SEQ ID NO: 975149 - DNA, 120 bp, Artificial Sequence
  ENSG00000288096_3 (sequence is synthesized)
cgtaagcagtgcatcctcagcctctcctccccaatcctgcatcccctcctgcaaccagataccgccaagggccgagagcccagtctgagcagaggacactgaggccaccgccacgccagg

SEQ ID NO: 975150 - DNA, 120 bp, Artificial Sequence
  ENSG00000288096_4 (sequence is synthesized)
gcagctactccattttcaagtgaacctgagcacagctcctgggttgcatgaggggtgggcttggtggtgccaagcaagaaaggacaggcatagcgccggggctgactgcgtgggtgtggg

SEQ ID NO: 975151 - DNA, 120 bp, Artificial Sequence
  ENSG00000288096_5 (sequence is synthesized)
ctcaggacctggaggccgtagctcgagcactcagtccagcagccaggagcggctccagcaagggccaggctgtgaccagggctggctcagacaccgccgtgatcccaggaggaatgagct

SEQ ID NO: 975152 - DNA, 120 bp, Artificial Sequence
  ENSG00000288096_6 (sequence is synthesized)
gatggtgggctccaggggttaccgccagagagacccaggctgatggaatgactgctgcctagaacattgcaggtcttcccagatgagacacagaggctctggagggtcgtgcaataatac

SEQ ID NO: 975153 - DNA, 120 bp, Artificial Sequence
  ENSG00000288096_7 (sequence is synthesized)
tgcctcaccggaagctgagcctggtacacgcagagcccacaggacacccacaagagtcacatacctgccattgaccacctctgggcttttaataccgaaacttcaaagaacttatgtgtc

SEQ ID NO: 975154 - DNA, 120 bp, Artificial Sequence
  ENSG00000288096_8 (sequence is synthesized)
catgttgtatttatatccccaaaaatcagtaagagaattttaacaaaaccatgtatgggaaaagtcttaagtcacatttcagaaacaatgtgtagtggttgtaataacatgggggcattt

SEQ ID NO: 975155 - DNA, 120 bp, Artificial Sequence
  ENSG00000288096_9 (sequence is synthesized)
tgcaaagtttgagaaccaacaaagaggcgtgcgcacagccagggtggggctggggctcctgcagagagatttgctccaccctgcgttcaggacgccacctgcacgaaatgttaagttcac

SEQ ID NO: 975156 - DNA, 120 bp, Artificial Sequence
  ENSG00000288096_10 (sequence is synthesized)
gaaatgttaagttcacctgcgtgtcgtgtgtgttactggcatacacgcttccctggtttatagtaacattgtaatttttctcattttttaaaagtaatcccagcactttgggaggccgag

SEQ ID NO: 975157 - DNA, 81 bp, Artificial Sequence
  ENSG00000288096_11 (sequence is synthesized)
gcggagatcgtgagctcactgagttgtgttttttgagacagggtctccatctgttgcccaggctggaatacagtggtatga

SEQ ID NO: 975158 - DNA, 120 bp, Artificial Sequence
  ENSG00000288096_12 (sequence is synthesized)
tgagacagggtctccatctgttgcccaggctggaatacagtggtatgatcacaactcactgccatgagtctgggagcctcgacctccagagctcaagcaatcctcccgtctcagcctccc

SEQ ID NO: 975159 - DNA, 120 bp, Artificial Sequence
  ENSG00000288096_13 (sequence is synthesized)
gggctcaagtgatactcccaccttgacctcccaaagtgcttggattaaggcgtgagctaccacacctggccatttttctcatttaaaatagattattggccgggcatggtggctcatgcc

SEQ ID NO: 975160 - DNA, 120 bp, Artificial Sequence
  ENSG00000288095_0 (sequence is synthesized)
gcttggaagttccaagaaagacacagattcgtcccccgctaagccagcacttttacgggatcgctgtggggccggatggcttctagacttccgggtgattccgggagatgggggacgcct

SEQ ID NO: 975161 - DNA, 120 bp, Artificial Sequence
  ENSG00000288095_1 (sequence is synthesized)
tgcagcttgagccacctcgcctggctgtgttttgtttaaccatatacaatgtgaggtcattatacatgaaaataatccaaatattactcagcatcttccctatgagttttatgatgctca

SEQ ID NO: 975162 - DNA, 120 bp, Artificial Sequence
  ENSG00000288095_2 (sequence is synthesized)
aatattcttatcatagaagctctgctttcctctccttgtggaattctaaaggctgtagtcacaagataccagccagcagcaataactggagaactttcttcattgtccgtgacaagagag

SEQ ID NO: 975163 - DNA, 120 bp, Artificial Sequence
  ENSG00000288095_3 (sequence is synthesized)
ttactctccccaaacagtctatctttcaatccaactggaccaacttaggccatgttcccattcttagctcagtaatactagggaaataccctaagcctgtgtttctgaaaatggttgggg

SEQ ID NO: 975164 - DNA, 120 bp, Artificial Sequence
  ENSG00000288095_4 (sequence is synthesized)
agaggtgaggtgacatttggtaatgtctggagacatttatggttgtcacaactgtggggggtgggtcctactggtatctagtatatagagaccagggatactgctaaacattttacaagg

SEQ ID NO: 975165 - DNA, 120 bp, Artificial Sequence
  ENSG00000288095_5 (sequence is synthesized)
cacagaacagctccccaccacaaagaattatatggctcaaaatagtaccagggttgagaagccctgctttaagcttattattttaagtctatattcctaactaagcactgtcaagaggat

SEQ ID NO: 975166 - DNA, 120 bp, Artificial Sequence
  ENSG00000288095_6 (sequence is synthesized)
gtacattaagggcgaacacctaaactaaaaggaagtgttacaagaggaaaaaggggcatgagcaaccaatagtatccataaaagagctgcttatttttgtaattgtgaaagtatatatct

SEQ ID NO: 975167 - DNA, 120 bp, Artificial Sequence
  ENSG00000288095_7 (sequence is synthesized)
ttaaagtatggataagcatcgaatgtaaattctttatatcagtagttacataatgcaattattcataattttacatttttatcagtattttctaccttttatagtgaaattttctccttt

SEQ ID NO: 975168 - DNA, 120 bp, Artificial Sequence
  ENSG00000288095_8 (sequence is synthesized)
ctttaatatattgaatttacagtgagaattttttataatttttttacagtggataatttcttgagtagccatttttacagaaaataagtttcaatagtgtgtcatcttgaaaaggaaatg

SEQ ID NO: 975169 - DNA, 90 bp, Artificial Sequence
  ENSG00000288095_9 (sequence is synthesized)
aaaataagtttcaatagtgtgtcatcttgaaaaggaaatgtcaagagggaaaaatttgtaagaattcttagtcgaattttaatgtatttt

SEQ ID NO: 975170 - DNA, 120 bp, Artificial Sequence
  ENSG00000288095_10 (sequence is synthesized)
aaccccatctctattaaaagtacaaaaattagttgagcatcgtggtgtgtacatgtaatcctaactactagggagcctaaggcaggagaattgtttgaacccttgagacggaggttgcag

SEQ ID NO: 975171 - DNA, 64 bp, Artificial Sequence
  ENSG00000288095_11 (sequence is synthesized)
gtgtgtacatgtaatcctaactactagggagcctaaggcaggagaattgtttgaacccttgaga

SEQ ID NO: 975172 - DNA, 120 bp, Artificial Sequence
  ENSG00000288094_0 (sequence is synthesized)
agggactgcctgaaatgaaaagtggctctttagaaacaaggaggattttatcgctcaggcagaagcctcataaaggctgccatgagatttgcctcgaacagttaggaaggcaccttcatc

SEQ ID NO: 975173 - DNA, 120 bp, Artificial Sequence
  ENSG00000288094_1 (sequence is synthesized)
acagaaggcctgcaaagctcagagtaaagtgcccatgagaaaccgcggagacaattaaccccttataatatttctgaaaggaaatatccagaatcctggaagaagaaaattatcttgttt

SEQ ID NO: 975174 - DNA, 120 bp, Artificial Sequence
  ENSG00000288094_2 (sequence is synthesized)
aaatagcttttaattaactgcaaggaaccatgaaaccgttttgagtggagtcaaaaggggccatttgagccgcagagacactatcccaacaaccaaaacattgaactttcgtggcaagct

SEQ ID NO: 975175 - DNA, 120 bp, Artificial Sequence
  ENSG00000288094_3 (sequence is synthesized)
ttggtagcacacaggccttcagctattttactgtagtgcatatgttatgtgtccacaaagctacgaacaatttttgcttaaggaaattgacttttcattgtgatgaaaatccacgaggac

SEQ ID NO: 975176 - DNA, 120 bp, Artificial Sequence
  ENSG00000288094_4 (sequence is synthesized)
aggagaaaaaaaggagaaaaggccaagaagaagaaaagaaatgtgtttcttacattctgaggaaaatcagcagaatatgtgaagttttttgtttagtttttttttaattcctgttgcaga

SEQ ID NO: 975177 - DNA, 120 bp, Artificial Sequence
  ENSG00000288094_5 (sequence is synthesized)
attggatgattctcaccatgtctgggtccttgtgcccaggtttcagtcaattgctcctcccaaagggttgcggtgtgatcactggcctagcacagcttaaatgctcgggcttgttgtcat

SEQ ID NO: 975178 - DNA, 120 bp, Artificial Sequence
  ENSG00000288094_6 (sequence is synthesized)
ggagaacaaaatacaaagaatgatgattccagcaagaccacaggtgaaatatattccgacgaagaatgagaaatctatagcataatttgaattgttgaaaacaaggaaagaaatatcaaa

SEQ ID NO: 975179 - DNA, 120 bp, Artificial Sequence
  ENSG00000288094_7 (sequence is synthesized)
ggatgccatttataggataagaataggaggtaattgaaaattcgattttattagggcaaaagctaacagtttgaaaccagtataaagcactgggtgtctgggagaaaaggaaaaggaaag

SEQ ID NO: 975180 - DNA, 120 bp, Artificial Sequence
  ENSG00000288094_8 (sequence is synthesized)
gaagttgggaaggacctcaggcctaagaatgcacaaatgtcatttatgtggaaattgcaccttcaattttaataccaactgatatctgatgtttcacagatatattattattaattagag

SEQ ID NO: 975181 - DNA, 120 bp, Artificial Sequence
  ENSG00000288094_9 (sequence is synthesized)
atgttacaaaattctgcctaagcaaacccatctctccagatcaggtgtatatttctagccaaattctactcctatgtgaaaggatacaaagcaaaataaaataaaatcaagaaatacgaa

SEQ ID NO: 975182 - DNA, 120 bp, Artificial Sequence
  ENSG00000288099_0 (sequence is synthesized)
actccagcctgggagaaatgctctctctgccagatgattccttttggaaggagaggtacaaaatcattgtgaagaactcaggggtaggaatgatacctaggtttaggataagagcctaaa

SEQ ID NO: 975183 - DNA, 120 bp, Artificial Sequence
  ENSG00000288099_1 (sequence is synthesized)
ctcctatgtcctatgaacctcagaatgtgaccttatttggatatcagagtctttgcagacgtaataagttaaggatctcacagtgaaatcattctggacttcggatgggccctaatccaa

SEQ ID NO: 975184 - DNA, 120 bp, Artificial Sequence
  ENSG00000288099_2 (sequence is synthesized)
cttataagaagaggagactgccaggcatggaggcttatggctgtaccagcgctttgagaggccgaggtgggaggattgctcgaggccatgagttcaagaacatcctgggcaacaccccca

SEQ ID NO: 975185 - DNA, 120 bp, Artificial Sequence
  ENSG00000288099_3 (sequence is synthesized)
agaacatcctgggcaacacccccaggacacccccacctccatatctacaaaaaacttttaaaaattagcaggacatggtggcacacagctgtaatcccagctatttgggaggctaaggca

SEQ ID NO: 975186 - DNA, 120 bp, Artificial Sequence
  ENSG00000288098_0 (sequence is synthesized)
tgagaatcaatttgtgaggcaggaaacctgctagcaggactctcgctttgctgagttaatttttcctttttcctttccacccaataagttccattttcctcacccttctatgtatccaca

SEQ ID NO: 975187 - DNA, 120 bp, Artificial Sequence
  ENSG00000288098_1 (sequence is synthesized)
agcctaatcattcctggttgtgtgacaagaggccagttttagctgaactaaggagaaagttctgcaacatttttggcatccagatatggggctcgaggaaaggaacctgtaggaggatgt

SEQ ID NO: 975188 - DNA, 120 bp, Artificial Sequence
  ENSG00000288098_2 (sequence is synthesized)
gagacagcacctcggggcacagatggcaggcagagccccagactcggaaactggaagtagttctccagggttgattttaggagcagaagaccacagcctgaacttgattatcatcttggc

SEQ ID NO: 975189 - DNA, 120 bp, Artificial Sequence
  ENSG00000288098_3 (sequence is synthesized)
agctacagacactgttccatcattatcaagtattcagtgcgatagctgagaaatctgagaccattctaatcttcattatattggtacaagaaaggtgattataaacatttacatttgtag

SEQ ID NO: 975190 - DNA, 120 bp, Artificial Sequence
  ENSG00000288098_4 (sequence is synthesized)
ttggggatgaaagatttgaactgtgcctaccagagggtcctgatctgaaaagagggtgataatagaatacagtatgagacatttctgttgatgggtaagaatcatcactctgaaacaagg

SEQ ID NO: 975191 - DNA, 120 bp, Artificial Sequence
  ENSG00000288098_5 (sequence is synthesized)
ctgcctgaatctggatcctggctctaccgctttccagcaacattgtgaggattcagcaagtctagaattataatccctaatatttattttttaagtaaaggatgggatgtctgctaattt

SEQ ID NO: 975192 - DNA, 120 bp, Artificial Sequence
  ENSG00000288098_6 (sequence is synthesized)
caagtcagcaccaaactggttctggaggctgtgaagtctgaggtcaatggcccacatctggtgaaggcctgctcgctagtgaggactctctggagagttccaaattggcacatagcatca

SEQ ID NO: 975193 - DNA, 120 bp, Artificial Sequence
  ENSG00000288098_7 (sequence is synthesized)
tatggcttgaactgaataatttgttcttggctcttgagcctgctggcttttggactggaacttgaactattagcaatcctggtactcagggctttggacttgaactggattactctatcg

SEQ ID NO: 975194 - DNA, 120 bp, Artificial Sequence
  ENSG00000288098_8 (sequence is synthesized)
gttctcctggctctccagtgggccaactacggatcttaggacttctcagtctcaataatcatgtttctctcacatcgacatagaaactctgctgacattgatgacttgcctggtggtgtg

SEQ ID NO: 975195 - DNA, 120 bp, Artificial Sequence
  ENSG00000288098_9 (sequence is synthesized)
atacagatgatcattcatgaagggtctgagccccttgctactacaccctgttcaggcctggattgctgcatgtattatgacaatggaaattgagtaccaaagaaacatcctagaggctta

SEQ ID NO: 975196 - DNA, 120 bp, Artificial Sequence
  ENSG00000288098_10 (sequence is synthesized)
actggggaccacacatagtcctttttgtccccatgggatataagtcaccatatgtcctcttgatgatcagcatcgattatccctgacagagtggtgactccttttattaccttctggttc

SEQ ID NO: 975197 - DNA, 120 bp, Artificial Sequence
  ENSG00000288098_11 (sequence is synthesized)
tttataattaaatgttaatcttgctgagtcctctggcataaatgttctccatttggaactgaagacctctgaacctgcaaattccacagttttagggataagaatattttataagtgagt

SEQ ID NO: 975198 - DNA, 120 bp, Artificial Sequence
  ENSG00000288098_12 (sequence is synthesized)
gtccgagttgatgagaagaacttcttggttcccagattcatctcttcttgctatagaaatgcagcattatataaatgtcttttaattcaaggtataaatggtcttggagaatgacacgct

SEQ ID NO: 975199 - DNA, 120 bp, Artificial Sequence
  ENSG00000288098_13 (sequence is synthesized)
aatctagtaagtatcacctctgaattggtatttacgttgtgtctttaagaagttgtttcaatgctcccagagaccggcagcttctgaggagtgaccagtcctgctccttgttataatgta

SEQ ID NO: 975200 - DNA, 120 bp, Artificial Sequence
  ENSG00000288098_14 (sequence is synthesized)
aatcctctgagacgacacaatgttgtatggaatcccatactgctgggtcaaacattcataatatttcaaattgtgagggcttatggaatgaccttgttgcagaattcctggggcctgagt

SEQ ID NO: 975201 - DNA, 120 bp, Artificial Sequence
  ENSG00000288098_15 (sequence is synthesized)
tatgactcttcctctggtttttttttaaacaaactccacttggcatccttttgccaacactaatatctccaataccatatggcctgccagatcatatgtccccaggtggtaatgtttcag

SEQ ID NO: 975202 - DNA, 120 bp, Artificial Sequence
  ENSG00000288098_16 (sequence is synthesized)
gtagacaggtatgagctagccaggagaaggttctccctgcaccaccagaaatgtcaggcaatcatcaggtgatggtttggcagttatattgcctctcaaaaaatggtaatttggcagctg

SEQ ID NO: 975203 - DNA, 120 bp, Artificial Sequence
  ENSG00000288098_17 (sequence is synthesized)
gcaccagggagagacaatctcctgatggtccacagctgtcacactaaagtgttaattgaatgcaggtgccaaggggaggcaacttcttaaacagataaaaacacttgagattggtaagca

SEQ ID NO: 975204 - DNA, 120 bp, Artificial Sequence
  ENSG00000288098_18 (sequence is synthesized)
gcttccaataaaatctcaggaattgggtgagtgagcgcaggcatgcaaattaagagacaaaatggcagagtatgaccttctgggggcattccaccagaaaagggaagaaagcctcagatg

SEQ ID NO: 975205 - DNA, 120 bp, Artificial Sequence
  ENSG00000288098_19 (sequence is synthesized)
ggcatgtgtacaactttctaaacacactgagcatgctgcatactgcatatgtggccagccctccctatgggaagaatcatgggaaaaaggaacaagacactgggagtgggccagcctata

SEQ ID NO: 975206 - DNA, 120 bp, Artificial Sequence
  ENSG00000288098_20 (sequence is synthesized)
tataaagtcccagaatcaaagttaaatgccacacttatcgttcaagttgcccacctgggtctcttccacgtgtatttacttttctttcctgttgaaaagcctttttaaataaacttccac

SEQ ID NO: 975207 - DNA, 120 bp, Artificial Sequence
  ENSG00000288098_21 (sequence is synthesized)
gctctgaaactttccttggtgtctttttcggccttatgccgctcagtcgaattttttcttccgagcaggcaggaattgaggttgctgtagacccatatgggttcgcccccataactcaag

SEQ ID NO: 975208 - DNA, 120 bp, Artificial Sequence
  ENSG00000235277_0 (sequence is synthesized)
gttactggacctcagatactaaaaggacaaagaaaagggacagatgagaacagctacgaagcgatagtgaaaacatatggtgtccatcttgtaagcataaggctccctggtattgctgcc

SEQ ID NO: 975209 - DNA, 120 bp, Artificial Sequence
  ENSG00000235277_1 (sequence is synthesized)
actctccctgtgctcgggaaagctggaagaagccagtaggcaatctggtgtctcgtcagaagagtgccagaaacaggtgttgctgacctaaccctttcctcctaccacagattctcttgg

SEQ ID NO: 975210 - DNA, 71 bp, Artificial Sequence
  ENSG00000235277_2 (sequence is synthesized)
tgctgacctaaccctttcctcctaccacagattctctatggagacgggcagattacctgaggtcaggagtt

SEQ ID NO: 975211 - DNA, 120 bp, Artificial Sequence
  ENSG00000235277_3 (sequence is synthesized)
aaataaataaataaataaataaaatgtttcaggttctctcttgtctccaaaccattgctaatgctatttccatgtctgatgttccaaggaaaatattatttcctctagaaagcccgactg

SEQ ID NO: 975212 - DNA, 120 bp, Artificial Sequence
  ENSG00000235277_4 (sequence is synthesized)
cctctcagatttgttaggtgctttcctactgcaccctgtcagagcacaaaatggtaatcgcagtttgtctgtcccccttattagtctttaagcgaattagactttaaattctaaaagcag

SEQ ID NO: 975213 - DNA, 120 bp, Artificial Sequence
  ENSG00000231979_0 (sequence is synthesized)
aaggaacttccacttccaagccgtagctggctgcatcctcttcatgactcttgggaaaatattttctgtggagtctaaaagaaacaaaaatacacctgaaaagaaaaaaaggtaagcatt

SEQ ID NO: 975214 - DNA, 120 bp, Artificial Sequence
  ENSG00000231979_1 (sequence is synthesized)
tatatgcgtagctatagtttacacctgtatatactcaggaagtatttggattatgatggtatgatgatagttgttaaagaaagttcttttgcatgtgaaaaagaaagggaagacaaggca

SEQ ID NO: 975215 - DNA, 120 bp, Artificial Sequence
  ENSG00000231979_2 (sequence is synthesized)
aacagcagtctgttcagcattatcctttcaatgaattctacccttttatacaataaaaagctgtggctgtattataggccctgggttaaataaaagcaaaccacactctttgttcaataa

SEQ ID NO: 975216 - DNA, 120 bp, Artificial Sequence
  ENSG00000287319_0 (sequence is synthesized)
attgtaggaagtaactgtggatgtggtagaaacagcaagagaacttgaattagaagtgaaccctgaaaatgtgactagattgctgctatctcatgatcaaatttaaatggatgaggagtt

SEQ ID NO: 975217 - DNA, 120 bp, Artificial Sequence
  ENSG00000287319_1 (sequence is synthesized)
gcttcatagggatgaacaaagaaagtggtttcttgagatgagatctactcctggtgaagatgctgcgaacaacgttgaaatgacaacaaaggacttaaactatgacagaaacttagttga

SEQ ID NO: 975218 - DNA, 120 bp, Artificial Sequence
  ENSG00000287319_2 (sequence is synthesized)
taaagcagtggtagggtttgaaaggactgactccaattttgaaagaagttgtactgtgggtaaacagcattgcatgatacagagaaattgttcatggaaagaagagtacatggatgcagc

SEQ ID NO: 975219 - DNA, 120 bp, Artificial Sequence
  ENSG00000287319_3 (sequence is synthesized)
ttattttaagaaattgccacagccactccatccttcagcaaccaccaccctggtctattagaaaccatcaatatcaaggcaagattctccaccaacaaaaagcttatgactcactgatgg

SEQ ID NO: 975220 - DNA, 120 bp, Artificial Sequence
  ENSG00000287319_4 (sequence is synthesized)
tatgactcactgatggctcagatgatcattagcatttttcagcaataaagtatttctacattaaggaaggaaaactggctctaccctagaacttacagaaagaaaactagccctacaaaa

SEQ ID NO: 975221 - DNA, 120 bp, Artificial Sequence
  ENSG00000287319_5 (sequence is synthesized)
aaggtgtataagtgaagcaaaaatgagggtaacttgctccaggtagttccatgggaggcttcagagaagaactggttctagaggtgtaccctgaaggctaagcaacactatcttgggaaa

SEQ ID NO: 975222 - DNA, 120 bp, Artificial Sequence
  ENSG00000287319_6 (sequence is synthesized)
gaaatatgaggagggcagtttaggccaatgcaagaacataagtggagattcagagacatgaaaagagcatgatgtacgtggcataatcacaagtacatggacagaacatgctacaacatg

SEQ ID NO: 975223 - DNA, 120 bp, Artificial Sequence
  ENSG00000287319_7 (sequence is synthesized)
cttgatgtggtgagtggccagaaatggggttgagaaggggatggcattcaggacatcaaaggcattgtgtgcatcttattcttttagccacagggagaattttgagcagagttgcatctt

SEQ ID NO: 975224 - DNA, 120 bp, Artificial Sequence
  ENSG00000287319_8 (sequence is synthesized)
cctgctaatttatggttgcatctcagcacctagcacagtgacttgcttgcagttcttctagcaatgtcagagattgtttcctctccagtcataatcaatcttaagtgttaataaaataca

SEQ ID NO: 975225 - DNA, 120 bp, Artificial Sequence
  ENSG00000287319_9 (sequence is synthesized)
gaagactgtcaatgcaaatgatattcagacaaaacagatagataaattttctaaaacaaagacaagaacactgaattatatctgaaactaggtctcgatgaatagcaccgaatgaaccaa

SEQ ID NO: 975226 - DNA, 120 bp, Artificial Sequence
  ENSG00000287319_10 (sequence is synthesized)
taagtgagcatgtgtctacgggaaggaccacatgagtatgaaagaaatgactatgaaagaatactaaaaagaagaaaatcaaagaagaaggagaaggagaaagagaaggagaagaacaag

SEQ ID NO: 975227 - DNA, 120 bp, Artificial Sequence
  ENSG00000224076_0 (sequence is synthesized)
gcccgttggtgtgcggcacgctgcggtccgtacccggcccggggcccgcgcccgcgcccgggtggaagcgggccttggcgtagttgctcacgaactggtcctgcaggaaagagccggcca

SEQ ID NO: 975228 - DNA, 120 bp, Artificial Sequence
  ENSG00000224076_1 (sequence is synthesized)
cgttgggcgagggggtcaggcggtccatgtcacagccggtgtagatcctgcgggattgtttcagaaacccctaggaaaaagccgcgcacgcagtaatcatgaaagactggccttcacccg

SEQ ID NO: 975229 - DNA, 120 bp, Artificial Sequence
  ENSG00000224076_2 (sequence is synthesized)
tgttctggaacccgaggtttgctgctggaagcctccaaagtacttagtgtctattgtttcccctgtgtgaaactttcactcccacctctactaatacaaacaagaattactactctgaaa

SEQ ID NO: 975230 - DNA, 120 bp, Artificial Sequence
  ENSG00000224076_3 (sequence is synthesized)
gcaagatacagaccatcaagggaacgacttccctcttctcttgctctctctcgtcaagtgtactggggtactgagagaggggcacaagcaaggactttcatcccacttctccaacatatg

SEQ ID NO: 975231 - DNA, 120 bp, Artificial Sequence
  ENSG00000231970_0 (sequence is synthesized)
gctgcgggcggcctgacggtggcggcagatggcggggttgctgtcgctgctgtggcctttcttccagcgcttcaacttagctgagacaccagaaggcaactttcccgagcgacccatgtt

SEQ ID NO: 975232 - DNA, 120 bp, Artificial Sequence
  ENSG00000231970_1 (sequence is synthesized)
gactaagccgtggcgaggaatgagcttaaatgaccggcttccagggacgtagaaacacgctcagaacccacgtggataccctgtagccttcacttcctcttcttctggcgtcacttccgg

SEQ ID NO: 975233 - DNA, 120 bp, Artificial Sequence
  ENSG00000231970_2 (sequence is synthesized)
aatcctgtactccacagacaccagctgagccgggagatctgaacatcaggcaatgagtttgcaagatggtttaacaactatgaacatgtggtgtcctcacaggaatcctgtgggctgaac

SEQ ID NO: 975234 - DNA, 120 bp, Artificial Sequence
  ENSG00000231970_3 (sequence is synthesized)
agcagccgcccctccttccacccagcacaaaacttggtttgccccgctcactctaaatctgggccttcaatgaatgttcagtggagttcttctgtggaaaaaaataaatgggaaaggaag

SEQ ID NO: 975235 - DNA, 120 bp, Artificial Sequence
  ENSG00000287314_0 (sequence is synthesized)
gagagaaggcacaggaagcagctccaggatgcaaggatagagtctcttataattatcacaggatatggaagagcaaacagtaccttttttaaacttttcaaaggtagtggtgcagaaaag

SEQ ID NO: 975236 - DNA, 120 bp, Artificial Sequence
  ENSG00000287314_1 (sequence is synthesized)
aaacaatttgaagcaatcagaggcatgttgcagcaaaaatgttttgcagccagcattttcaaaaacatttgcattggaggaaagctcaccctggcattgtggaattagcaattaaagaac

SEQ ID NO: 975237 - DNA, 120 bp, Artificial Sequence
  ENSG00000287314_2 (sequence is synthesized)
agaaatagctagaccattgtaaatgaagttaatgaagactttaaaggctgaacactgacagtggcagacgacaggcagcgtggagtgacttgggggggtgcagcactcagactggcaatt

SEQ ID NO: 975238 - DNA, 120 bp, Artificial Sequence
  ENSG00000287314_3 (sequence is synthesized)
tgggctttttcctagctacactggagatgacaggactgcctgttaatatcaggattctgctgtccagtttactgagcatctaaagaagatctaagaagaatcaaggactccaaaacatcc

SEQ ID NO: 975239 - DNA, 120 bp, Artificial Sequence
  ENSG00000287314_4 (sequence is synthesized)
ccagataaacagagccatttagattttgctgaatttgctgtatatttttacatttagccttctctttccccattccttccttcatgtatgagcccctgtactcataaacctgtgtgaatt

SEQ ID NO: 975240 - DNA, 120 bp, Artificial Sequence
  ENSG00000287314_5 (sequence is synthesized)
tattcatcttcctcttcccacctgagttattgatctgtgaatctgcaagtttgaattcttttccttttctcctatgggaacttttccagacagaacttctgggtaatcctttcttatttc

SEQ ID NO: 975241 - DNA, 120 bp, Artificial Sequence
  ENSG00000287314_6 (sequence is synthesized)
ttcaagtctattcttcctttcattacaaattattctatttctggactatctctcttttctcgaataactttctagcatcttccaatagtatgttactaagaaataaatttcatttcaaca

SEQ ID NO: 975242 - DNA, 120 bp, Artificial Sequence
  ENSG00000287317_0 (sequence is synthesized)
ccttctgcctgggccctgacaaaaaaggggattggagcgtgtcacttgacccaacacctaggggtgatgtgactgtcttatttgcctgcaccttgcatatatcgggtattgagtcctatg

SEQ ID NO: 975243 - DNA, 120 bp, Artificial Sequence
  ENSG00000287317_1 (sequence is synthesized)
gctgagccctacatgaatgggatttaagactcctgccttggccctgccaacagggggcattgtaaagtatccctgcatctgtcactgagatgtgactctcctgttctgcctgcatcctgc

SEQ ID NO: 975244 - DNA, 120 bp, Artificial Sequence
  ENSG00000287317_2 (sequence is synthesized)
ctataaggaagattgtgacatattgctgggtccacgattgagacaatgtgtctttcctgcctgggtattgcctacagggagcattgtgacatatcactgggcccagcatgcaggttctgc

SEQ ID NO: 975245 - DNA, 120 bp, Artificial Sequence
  ENSG00000287317_3 (sequence is synthesized)
ccacaagggagattttgacttattgctgtcctcaaaatgaaggtgatgtgacacttttgccttggacccacccttgaagacattgtgacatatttcttagctcagcatcaaaacgatgtg

SEQ ID NO: 975246 - DNA, 120 bp, Artificial Sequence
  ENSG00000287317_4 (sequence is synthesized)
tgtaactctcttctcttacatggactttgctcacagaagagactatgaaatatctctgggcccagcaaataggtgatgtgactcttctctactgcttgggctctgctcatgagaaaattg

SEQ ID NO: 975247 - DNA, 120 bp, Artificial Sequence
  ENSG00000287317_5 (sequence is synthesized)
tgatggattgctgaacccagcacctaggtaatgtaactctcttctcttgcctgggcccggcataaattgtgtattgtgacatggggctcgatcacaaacctaggtaatgctactctcttg

SEQ ID NO: 975248 - DNA, 120 bp, Artificial Sequence
  ENSG00000287317_6 (sequence is synthesized)
cattggctctgcccaccagggtattatgacacaacttttcattcatcgcctaggcgatgtgaccccccgcttctgcttgaatcttgccaaaagaggaaatgataacatatcactatactc

SEQ ID NO: 975249 - DNA, 120 bp, Artificial Sequence
  ENSG00000287317_7 (sequence is synthesized)
agcacctaggtgccatgacttgcctttttccccaggcaatgcatatattgggaattatgacatatcactggacccaacatgtagggaataaaagactcctgcctgtgttctgctgaccta

SEQ ID NO: 975250 - DNA, 120 bp, Artificial Sequence
  ENSG00000287316_0 (sequence is synthesized)
acagatatttggattttattttggcagacagtttagctacttttagaccaacttgattcttttgaggtttgtttttagcacaggtctgcagtagcctcagtctagccctaatacttctgg

SEQ ID NO: 975251 - DNA, 120 bp, Artificial Sequence
  ENSG00000287316_1 (sequence is synthesized)
ggtcttttctgaatgccctgcttgttctgagatttctacaccacaattgaaagtgaattcaaaaaagctggagaggagacgcatcaggtcagaagggatttgctgctctgaactgccagt

SEQ ID NO: 975252 - DNA, 120 bp, Artificial Sequence
  ENSG00000287316_2 (sequence is synthesized)
tacactgcacaaaagactggggaagtgttagaggaagattacgacactgctactccatgccaaaacgttacactacggctctgcagactgaagattgcctcacaagcagaaatatactct

SEQ ID NO: 975253 - DNA, 120 bp, Artificial Sequence
  ENSG00000287316_3 (sequence is synthesized)
ttccaacaaacactggtggaatgaaaaggacattggattcctgcttccagttactgcttgcccttccctgactttgtgacctgaggcaagtccccaaatccctctgggccccagtatcct

SEQ ID NO: 975254 - DNA, 120 bp, Artificial Sequence
  ENSG00000287316_4 (sequence is synthesized)
gaggagggttagaattaagatgcaatcatgcatccagttgttttccaaagcattgtccagctagggaagtggtagcacgtggtgactgagagcttccccgatccttttagatcaaagaac

SEQ ID NO: 975255 - DNA, 120 bp, Artificial Sequence
  ENSG00000287316_5 (sequence is synthesized)
acttctatgcctttgtgcaactggtgtgctgtgggtacaggtacttttacatcctctagttagtgagtgcaaagtactcttggaagctcccaagcactcaaggtttcaatctgcattctt

SEQ ID NO: 975256 - DNA, 120 bp, Artificial Sequence
  ENSG00000287316_6 (sequence is synthesized)
ctcctctatatgcactttatatttcaggttttatagtttgaggatttgaaaggtaagaaaagtgtgagctacagattttggaagaatccaggagctgagctcatagctaagaacatgtca

SEQ ID NO: 975257 - DNA, 120 bp, Artificial Sequence
  ENSG00000287316_7 (sequence is synthesized)
ggggtgttaagcagctctgaagtatgtaacaaaggccatttaggtctcaggaggctgccaccagaacactacccgcccctctagcccatgccagccaggtgggggacaggtggaaagatg

SEQ ID NO: 975258 - DNA, 120 bp, Artificial Sequence
  ENSG00000287316_8 (sequence is synthesized)
gagatgtggacagcatcagagatttttcagctttcatatgccacatactcatgctatgtttatgcacacacacacatacacatgcacacacacgatttaaataaaggttttcactgaaaa

SEQ ID NO: 975259 - DNA, 120 bp, Artificial Sequence
  ENSG00000287311_0 (sequence is synthesized)
gaccggcatgcacacaggaagagcgccctgtgaaactggagttctgctgccgcaagcaaagtgaccactggaagctggtagagagggctccaaccagcacagaccctgtcgctgatggga

SEQ ID NO: 975260 - DNA, 120 bp, Artificial Sequence
  ENSG00000287311_1 (sequence is synthesized)
tccagggggaaggagggatccagaccggccactggccagcttcagcacctgcagcagcctcgccagtcatctgccctctgtaccagcctggaacattcttgccacagtctccttgtgggc

SEQ ID NO: 975261 - DNA, 120 bp, Artificial Sequence
  ENSG00000287311_2 (sequence is synthesized)
aggcccaagaggtgaaccctgctgcagaactgatgggtttcctgagcttcagcaagattgtgccctcttcaggtgacagcaaatggattaatttgacagatattcagggaaatcgtatta

SEQ ID NO: 975262 - DNA, 120 bp, Artificial Sequence
  ENSG00000287311_3 (sequence is synthesized)
gcctaactcaagaagtacaaagggagatgattatcaagaaatagatacaattccaggcagaaaagatcccaaagaagtcttaatagctgaaatattgctgacaaggaagtgcacagacca

SEQ ID NO: 975263 - DNA, 120 bp, Artificial Sequence
  ENSG00000287311_4 (sequence is synthesized)
gccttgcggaatcccacatccggggaagccgactttcccctgcagacaccgccgccggagcagagtctgatggatcacaggccaggatggggaattgcaaacacctcaagcacccgtgga

SEQ ID NO: 975264 - DNA, 120 bp, Artificial Sequence
  ENSG00000287311_5 (sequence is synthesized)
aatactgggtcaccaacaagccacctcccgaattcccctccttctggggtatcaaactccaagcctgggcgacctggtaaagaacagaccaacctggagagcacaggtgcccccaaatgg

SEQ ID NO: 975265 - DNA, 120 bp, Artificial Sequence
  ENSG00000287311_6 (sequence is synthesized)
gagagcacaggtgcccccaaatgggcagggagtggcagccaagtgtgtagggtgctctcagtggggccacatcttcccttttcaagagaatgtagaaggccgggtgcggtggctcacgcc

SEQ ID NO: 975266 - DNA, 120 bp, Artificial Sequence
  ENSG00000287311_7 (sequence is synthesized)
ataaaaaaaatttaaaaagagagagaaagaatgtagaaatttgcagttttatatgaaaattctctatgtttagattttggcaaccaattcaaaacattaaaaaataaataaatacagaag

SEQ ID NO: 975267 - DNA, 120 bp, Artificial Sequence
  ENSG00000287311_8 (sequence is synthesized)
caattcaaaacattaaaaaataaataaatacagaaggccaaggaaacaaggctgcaagttggactcagcctttgagcatcaatttctagcctctctatcacctcgtggctaaaggcgcta

SEQ ID NO: 975268 - DNA, 120 bp, Artificial Sequence
  ENSG00000287311_9 (sequence is synthesized)
tttcttccttgagatttgaggctgtgcctgcagtgttttgaggagactgagaacagagaatggcatggttagcctggttctagatagctctactctctgatagagaagattatgactgga

SEQ ID NO: 975269 - DNA, 120 bp, Artificial Sequence
  ENSG00000287311_10 (sequence is synthesized)
ttttcttggagcagactaaggctcttgcatagccccgtgatgtggagctttcttctatatcaataaaccaaatggataccaaacacagctgacattaataggtgcctcagccagggtctc

SEQ ID NO: 975270 - DNA, 120 bp, Artificial Sequence
  ENSG00000287311_11 (sequence is synthesized)
caccagaatactcaaatgaggataattggagagaatcaggtttttcctcttttttcttaatgcataatatttgtacatatttgtggggtgtgtgtaatattttattatgtgcatagaatg

SEQ ID NO: 975271 - DNA, 120 bp, Artificial Sequence
  ENSG00000287311_12 (sequence is synthesized)
tgtatgctcaagtcagggtatttagggaggcatgacaaagatatgggtgcggggcgaccccaggagccaagcaggaactcagagctgctgtcagcctggctgagacctcctgtcagtcca

SEQ ID NO: 975272 - DNA, 120 bp, Artificial Sequence
  ENSG00000287311_13 (sequence is synthesized)
aagggaccggggcttaattgcaaggaaagggtcttaaagccaggccacatttataggagctgtagccttctgccaagagatacagctgacccaagaagactttgatggtagagagccagg

SEQ ID NO: 975273 - DNA, 120 bp, Artificial Sequence
  ENSG00000287311_14 (sequence is synthesized)
gaatattcctggacttcactctcttctctcttgccagtctcctgcggggctttccatgaccaaacccagcagggagccaggggccatgggtgcccactggtgttgtccagaccaacctcg

SEQ ID NO: 975274 - DNA, 120 bp, Artificial Sequence
  ENSG00000287311_15 (sequence is synthesized)
gcgggcagagttgagaagtgtggagcctgggtctgcaggggctagcagcagatacccagctcggaagatattagtgtaagtcagtattttagaaacaaaccaacattgttcaactctagg

SEQ ID NO: 975275 - DNA, 120 bp, Artificial Sequence
  ENSG00000287311_16 (sequence is synthesized)
tggaggcagctgcccagagtctgctgcctgatgaaggctcagagctcgaagcttgaagctgctttcttttcgtagaaagggagattaccaagcactgacgtagtgttcaagacacacgtg

SEQ ID NO: 975276 - DNA, 120 bp, Artificial Sequence
  ENSG00000287311_17 (sequence is synthesized)
tttcagagggacactctctcaaagtacgcagccaaagactcaaaagaaatgacaggtaataacaccctcatcgcctgactcaaatcacatctgagtgttacccgcgtctttccacctctc

SEQ ID NO: 975277 - DNA, 120 bp, Artificial Sequence
  ENSG00000287311_18 (sequence is synthesized)
cctggattggggaaaggtgggaataagtgatctcaagtccccatctgactctgggatactcaccatgcctgtggctgtgactcaccacagcttcgtatggataaagtaacaattttctgc

SEQ ID NO: 975278 - DNA, 120 bp, Artificial Sequence
  ENSG00000287311_19 (sequence is synthesized)
actcagcttcttgttattccacaaacgagaatgttttgtttcagaagaatgagagcttattctgggcttgagctataagatgccgaatatgtattaatgctctttcagagatcctatttg

SEQ ID NO: 975279 - DNA, 120 bp, Artificial Sequence
  ENSG00000287311_20 (sequence is synthesized)
agaaaaataagcttttattctccaaatgtttattggtctctttgtctgcatagctcttcaggctaaaatgaatataatccatatgtagcattagacattttaccttaccttaatacagca

SEQ ID NO: 975280 - DNA, 120 bp, Artificial Sequence
  ENSG00000287311_21 (sequence is synthesized)
atcatgaatacatattagctgtacagaaggaagcctacatgtattacagttgatggaatgtactataaattggcttttgttttacttataaatttgttatagagatatttattgggcaca

SEQ ID NO: 975281 - DNA, 120 bp, Artificial Sequence
  ENSG00000287310_0 (sequence is synthesized)
ggaaagcaaccaaaagaaagcttggatttgctcatcatttcatctaaatgtagtgataataataatgactttccacttactgcgtaatactacgttccagatgcatgggtacactgtgct

SEQ ID NO: 975282 - DNA, 120 bp, Artificial Sequence
  ENSG00000287310_1 (sequence is synthesized)
gtgtgctgaacatatttaatctcctttaattctcagcaacaaccttataagggagatattactatacccattttatggggaacaaatgtcagttcagaaagtttgagtaactcccaggat

SEQ ID NO: 975283 - DNA, 120 bp, Artificial Sequence
  ENSG00000287310_2 (sequence is synthesized)
cacacagccaggacctgacaagctgggatttgacttcaggtctgtggactctgaaactcatgatattaaccattaggttagacacctgatagatatggccattcaacaggttgaaagtgg

SEQ ID NO: 975284 - DNA, 120 bp, Artificial Sequence
  ENSG00000287310_3 (sequence is synthesized)
atctcatcatctttgcttctcttcctcctccacttcacacctcagcgaacagcacaacctgtcctccccacacctatccagttgaccaagccagacatccaggcaggctgtacaggaagc

SEQ ID NO: 975285 - DNA, 86 bp, Artificial Sequence
  ENSG00000287310_4 (sequence is synthesized)
taggcacgtcttacatggctggagcaggcagaagagagggagcagggaggtactacacacttttaaacaaccagctctcatgatca

SEQ ID NO: 975286 - DNA, 120 bp, Artificial Sequence
  ENSG00000287310_5 (sequence is synthesized)
tacacacttttaaacaaccagctctcatgatcactcatttactcactatcacgagaaacagcaccaagaggatgatgctaaacattcatgaaagaccatccccatgatccaatcacctcc

SEQ ID NO: 975287 - DNA, 120 bp, Artificial Sequence
  ENSG00000287310_6 (sequence is synthesized)
cactaggcctcacctccaacactggggattacaattgacatgatatttgggcagggacacagatccaaaccatgtcatccctttaaagaagtaattaaggctggatgtggtggcttatgc

SEQ ID NO: 975288 - DNA, 120 bp, Artificial Sequence
  ENSG00000287310_7 (sequence is synthesized)
ccagcactttgggaggccaagggaggatggcttgcagctaggagttggagaccagcctgatcaacatagcaataccatctctaaaaaataaaaagtaactaagttaaagtacagtcatca

SEQ ID NO: 975289 - DNA, 120 bp, Artificial Sequence
  ENSG00000287310_8 (sequence is synthesized)
agtcatcagggtgggccctaatccaatgtgactactatccttataagaagaaattaggacacaggaaacagagggacaaatgtgaagacatagtgagaaggtggccatctgcaagccacg

SEQ ID NO: 975290 - DNA, 120 bp, Artificial Sequence
  ENSG00000287310_9 (sequence is synthesized)
gagagaggccccagaagaaaccaagctgctgacatcatcatcttggacttctcgcctccagaactgtgagaaaatacattttcgttgcttcagtcacctagtctggggcattttgttaca

SEQ ID NO: 975291 - DNA, 120 bp, Artificial Sequence
  ENSG00000287310_10 (sequence is synthesized)
gcagccctagcaaactaatacaatcaagaaaggaaatcagactcagcaaggctgagggacccacctagcgctgtctagctccttagtaatgcattcatcacattctgcctgtgaccactc

SEQ ID NO: 975292 - DNA, 73 bp, Artificial Sequence
  ENSG00000287313_0 (sequence is synthesized)
gttcaagcaattcttctgcctcagccacccgaatagtagctgagactacaggtgcatgccatcatgcctcggg

SEQ ID NO: 975293 - DNA, 73 bp, Artificial Sequence
  ENSG00000287313_1 (sequence is synthesized)
tgagactacaggtgcatgccatcatgcctcgggctactctcaaacatctgacctcaagtgatccacccacctc

SEQ ID NO: 975294 - DNA, 120 bp, Artificial Sequence
  ENSG00000287313_2 (sequence is synthesized)
acccggcctggaactcttccatgaaggggaagaaaaagataaaaccaaacacagcccagaaattctggcatacaaatcagaaaagaactacttcttagccacctgtgccagacagagtct

SEQ ID NO: 975295 - DNA, 83 bp, Artificial Sequence
  ENSG00000287313_3 (sequence is synthesized)
aaaagaactacttcttagccacctgtgccatggtttgatctcggctgaccacaacccccatctcctggattcaagcaattctc

SEQ ID NO: 975296 - DNA, 120 bp, Artificial Sequence
  ENSG00000287313_4 (sequence is synthesized)
caggtgtgagccactgcacccagcctccatcttgcttctaacctttaagttgcccttcttcattcctgggcaaaggccgaactaaccttgggaagaaatttagtttatgcttcaactgcg

SEQ ID NO: 975297 - DNA, 120 bp, Artificial Sequence
  ENSG00000287313_5 (sequence is synthesized)
ccgaactaaccttgggaagaaatttagtttatgcttcaactgcgaaacaaaattggtaatagtcctttccgaaaagacccccttcttgtcttgggaccagtctgcctttgcaggactaac

SEQ ID NO: 975298 - DNA, 120 bp, Artificial Sequence
  ENSG00000287313_6 (sequence is synthesized)
ttaaggggtcatgcagcctctggctgcaagagtctgagcctccccaaattgctcctggggataacatcactgttgtaaaacctaagttcagtgcttgagatattttgcagatcctgcact

SEQ ID NO: 975299 - DNA, 82 bp, Artificial Sequence
  ENSG00000287313_7 (sequence is synthesized)
agatcctgcacttgatggatcagctgacaccacccagaccataatctggctcaaccagttctgcaactgaccccctatgatt

SEQ ID NO: 975300 - DNA, 77 bp, Artificial Sequence
  ENSG00000287313_8 (sequence is synthesized)
gaaaaactcacttcgaccccctatgattccatttccaacctgaccaatcagtgctccccactttcgaatgcttggga

SEQ ID NO: 975301 - DNA, 120 bp, Artificial Sequence
  ENSG00000231977_0 (sequence is synthesized)
gtgagcaggaggaggagaggctgagctggacatgcagggcagtccatgttggctgcaaagcatggtgatggtggcccctgccccaagggcctctcactgaggccagcagctcagctgctg

SEQ ID NO: 975302 - DNA, 120 bp, Artificial Sequence
  ENSG00000231977_1 (sequence is synthesized)
caggtccgagtggaccctgtggcacatggggccctccccgcactgcggcagacggtgctacagctatgatgatgagactggggctgcaggagcagccgattcccagtcttcccctgcagg

SEQ ID NO: 975303 - DNA, 120 bp, Artificial Sequence
  ENSG00000231977_2 (sequence is synthesized)
gggagtggccgggtgccctgttggatgtcctgtagcgaatttgtctctgggagaagagcagagagatgaaggcctccatgccacagcccaggccgtgcacatttgtgttgaccttggcca

SEQ ID NO: 975304 - DNA, 120 bp, Artificial Sequence
  ENSG00000231977_3 (sequence is synthesized)
caggccgacggcgcgtctgcgaggtctctgcattgcaaggcccttctcctcctgaactgaaggccttcttcctcctttcccctcctgattctctcgccctcctggtgcatccaggtgccc

SEQ ID NO: 975305 - DNA, 120 bp, Artificial Sequence
  ENSG00000269445_0 (sequence is synthesized)
gtgcttcccgacctcccatgcgcctgcagcccccaaccaccctcaaggccccatcacgttggccctccattctccagactctccagccaccctttctccgcagcccttcacgcttccctt

SEQ ID NO: 975306 - DNA, 120 bp, Artificial Sequence
  ENSG00000269445_1 (sequence is synthesized)
gtccctgggggccttacgtgggcaggttgtacaggggcgtcatacggaaacaggccacgactgcccgccggcgctgtttggacaaaagcttgtgccacacggccttcttagacttgtagt

SEQ ID NO: 975307 - DNA, 120 bp, Artificial Sequence
  ENSG00000269445_2 (sequence is synthesized)
ccatctgccagcgcagagacggggagccttcgacctgaagggaggaagaaggagtggccggcgtgagggacccttcccacagtgtccgccggatgtcccctttccgtttttgggaggact

SEQ ID NO: 975308 - DNA, 120 bp, Artificial Sequence
  ENSG00000269445_3 (sequence is synthesized)
caatggaggaaggaggcatacctttccctgaaggtgaaggttgttgtgcagaaattcccggacctcctcatctgtgtctttctggggagacagagccaggctgggtcactctggaggtcc

SEQ ID NO: 975309 - DNA, 120 bp, Artificial Sequence
  ENSG00000269444_0 (sequence is synthesized)
gttaagggctgtggagggacacagtgcatgaggccagtgcagagtgactgtgggcagggggacgaggctgggggcccagagcacttggtcttggatgtatggctttggatgagaccgtag

SEQ ID NO: 975310 - DNA, 120 bp, Artificial Sequence
  ENSG00000269444_1 (sequence is synthesized)
ggccaccaccaccctagggtgcttgcagatggtggggagggcactctggacgcatctacaaatggcatttgcacaggtcacagatgagcagatgctcaaagagtcgatggctcccaaagg

SEQ ID NO: 975311 - DNA, 120 bp, Artificial Sequence
  ENSG00000277879_0 (sequence is synthesized)
ggcatgcaggtgtgctgagtggtgagggacaagtgaaccagaaaacagcaaagcagggaagcaccaaaaggatgcaggccaggggccgtacagttagcaacctgcaactctgccagacct

SEQ ID NO: 975312 - DNA, 120 bp, Artificial Sequence
  ENSG00000277879_1 (sequence is synthesized)
gcagaatggcaaggggagccgccagaggactagcaccctccctaaaaagatgggccaaccagacagtggaggacaaggggaggcaaggcagaggacaggcaaacggtcacctgagaagga

SEQ ID NO: 975313 - DNA, 120 bp, Artificial Sequence
  ENSG00000277879_2 (sequence is synthesized)
cctagagtaccatactgagttctaccccagcctcagcagccttctaccatctgtcctcagtgaaagccatgctgtgccactgtaccactcaaaggttgcgttcctgcttctacaggggtg

SEQ ID NO: 975314 - DNA, 120 bp, Artificial Sequence
  ENSG00000277879_3 (sequence is synthesized)
gactgagcacttatttttatcatgatcaattggtatattataaataagagacaaaagtataccattcactcaaaatagtgacagatttttcctaacatattatcattcttaacattacaa

SEQ ID NO: 975315 - DNA, 120 bp, Artificial Sequence
  ENSG00000277879_4 (sequence is synthesized)
aagcccatctccttgcccatgggaattcctgcagcacaggcggtcatcaacacattagtctgctttgtctgtactaaaacctcttcaaaatacatatgtgaagcctttgcccccagcctc

SEQ ID NO: 975316 - DNA, 120 bp, Artificial Sequence
  ENSG00000277879_5 (sequence is synthesized)
atgagaagacctgctcatagggaggagtccacaaaaatgagctctgtgcaagggattcctttgtttgcccagccccagcagtggagcatcagtttccttctgtaaatatcagcttttaaa

SEQ ID NO: 975317 - DNA, 120 bp, Artificial Sequence
  ENSG00000277879_6 (sequence is synthesized)
ggaaatttaggttgaggaactacagtctaccagaggaagaagaacccttcctagtggaaaagcggttttaaatgtaggcacaaggttcgtgtgacttaccaattgcaaaaccaactccaa

SEQ ID NO: 975318 - DNA, 120 bp, Artificial Sequence
  ENSG00000277879_7 (sequence is synthesized)
agttcggagctatgagtccataaatgttttttgcaaatggaatctgtaagaggaaataaacattatgctaaaataacaagagatccaactctaaatcatctcggaaagtcttgaacttgt

SEQ ID NO: 975319 - DNA, 120 bp, Artificial Sequence
  ENSG00000277879_8 (sequence is synthesized)
gttttctctgagcgtggtatgcctgttcccttctgaagaaaacaggaggaagaagggtggggtttgtgaagaaccggaccctccaaatctttaaaagtcaaagcttgaaacgagttttat

SEQ ID NO: 975320 - DNA, 120 bp, Artificial Sequence
  ENSG00000277879_9 (sequence is synthesized)
gaccaccatgaaaaacttgtcaccggcatatgtgaaagatcagcctagtccaccctcaagttttgacaagaacaagtaggcctcatgagggatggatattggccattggtagaagagatt

SEQ ID NO: 975321 - DNA, 120 bp, Artificial Sequence
  ENSG00000277879_10 (sequence is synthesized)
ttattctagaaaaacatcttgctattgtttcaggttggttgtcctgaagtgtttaagacactgtcaagcttaagatgatgcaggggaaaagttaaactgtgaaataaaacattttaaata

SEQ ID NO: 975322 - DNA, 120 bp, Artificial Sequence
  ENSG00000277879_11 (sequence is synthesized)
atttctgacataaaatgaaaatacactccttggaaagtcttgtccaaacatttttaagatgataaaaaattagaataaaatgaaagctgtaataaaacatcaacaaactcaaacgtaaaa

SEQ ID NO: 975323 - DNA, 78 bp, Artificial Sequence
  ENSG00000269446_0 (sequence is synthesized)
tctcccacactagagtacagcattgattctcccgcctcagcctcccggatagctgggattacaggcgtgcgccaccac

SEQ ID NO: 975324 - DNA, 120 bp, Artificial Sequence
  ENSG00000269446_1 (sequence is synthesized)
aggcgtgcgccaccacacctggccctacagtttcaagatgatgggatgacagcatttctaccttactctctgcctgaaccaaaatgaggtggcaaagtcacaggaacagaagtcctgctt

SEQ ID NO: 975325 - DNA, 120 bp, Artificial Sequence
  ENSG00000269446_2 (sequence is synthesized)
ttggtgagactacaagacacctggaacctgaatcacagtgtagaagaacgtcagcagacagtggacgcaaacatgaccccacagagcggacagtctggagcagccagtggatccctccac

SEQ ID NO: 975326 - DNA, 120 bp, Artificial Sequence
  ENSG00000269446_3 (sequence is synthesized)
atgacctgtgtgaaaggaaaggaaaatctcgagaccaaactcaccatgccaaagggaactgagtcatgcaatgcctgcctgccttctgtttccagacagctgtgatccccatgcctgcgt

SEQ ID NO: 975327 - DNA, 120 bp, Artificial Sequence
  ENSG00000269446_4 (sequence is synthesized)
agacagctgtgatccccatgcctgcgttatcgcatgtcaaatgtagacctactgagcgtgagacagatgcatgactggctttcccctaactctgttctttttttttttttttttttgaga

SEQ ID NO: 975328 - DNA, 62 bp, Artificial Sequence
  ENSG00000269446_5 (sequence is synthesized)
caaactcctggcctcaagtgatgtgctccattctttacacaggtgaaatgtagattctctga

SEQ ID NO: 975329 - DNA, 120 bp, Artificial Sequence
  ENSG00000269446_6 (sequence is synthesized)
cggctccattctttacacaggtgaaatgtagattctctgagtgctaatcagagcctcatgagaatgtggcctctcacctgtttgcctaccctctttgtttcccttttctcctttctcttg

SEQ ID NO: 975330 - DNA, 120 bp, Artificial Sequence
  ENSG00000269446_7 (sequence is synthesized)
aaacactgaagtccttaaaaccctctttggtaaaagcacaggacacagattctattgtgccttgagtttctttttcccgggcacatgctcaacctcagcaaaataaatctctcagccgat

SEQ ID NO: 975331 - DNA, 120 bp, Artificial Sequence
  ENSG00000277873_0 (sequence is synthesized)
ggaacaagcattctcccatggagccagtcgtcttgaattctgctctctggggaggacagaggcctggcacaagccatgatcacacagccgaaactcctccttcacaacaagcagctgctc

SEQ ID NO: 975332 - DNA, 120 bp, Artificial Sequence
  ENSG00000277873_1 (sequence is synthesized)
aggtcggctacttgcttggcatctgactacacagaatgtgatgtcttagaaccttcccttctagtctaaaaaggctggaagcatctttgcagaagggactcagcagcctgcagtttccaa

SEQ ID NO: 975333 - DNA, 120 bp, Artificial Sequence
  ENSG00000277873_2 (sequence is synthesized)
acagcagagaaaatgatagcagtggacggtccccagtgcctcccctgtgctaggcactctgcaaagtcgttttccaacattcctctcctctacatacgaaccagccagtgatcccacaag

SEQ ID NO: 975334 - DNA, 120 bp, Artificial Sequence
  ENSG00000277873_3 (sequence is synthesized)
cctgtttctactacactccatccccaaaggcccgcaaaatactcacttctcttcttccacgacatgttccaggcggggaaccatgagttcaggagtcaggggaccgaaccgaaacctcgt

SEQ ID NO: 975335 - DNA, 120 bp, Artificial Sequence
  ENSG00000277873_4 (sequence is synthesized)
gcagcgggactgcaaggcagggatgatctttgacagatagttacagatgaggcagaatctggtattttctgtgaatttctcaattactagtaagagaaaataaaaccacctcatgtcaaa

SEQ ID NO: 975336 - DNA, 120 bp, Artificial Sequence
  ENSG00000277870_0 (sequence is synthesized)
ttccaaaaagcgtgtgaaaaggaagccctactctaccaccaaggtgacttcagggagcacattcaatgagaatataagaagatatgctgtgcacaccaaccagtgtaggagacctcatgg

SEQ ID NO: 975337 - DNA, 80 bp, Artificial Sequence
  ENSG00000277870_1 (sequence is synthesized)
gatatgctgtgcacaccaaccagtgtaggagacctcatggctcccgggtaaagaagaagaggtacccacaagattggaca

SEQ ID NO: 975338 - DNA, 120 bp, Artificial Sequence
  ENSG00000277870_2 (sequence is synthesized)
aggagatggagagaggccagtcaacgtgagggtggtgcaggtggcccctctgaggcatgaatctactccccatgaggacaccgtacacaacatcactaacgaggatgcctcacacgatat

SEQ ID NO: 975339 - DNA, 120 bp, Artificial Sequence
  ENSG00000277870_3 (sequence is synthesized)
ccgtacacaacatcactaacgaggatgcctcacacgatatcactaacgaggacgctgtccacggcatcgctaacgaggccgccgacaagggcaacgccaacgaggacgccgcccagggca

SEQ ID NO: 975340 - DNA, 120 bp, Artificial Sequence
  ENSG00000277870_4 (sequence is synthesized)
cgccgcccacggcatcgccaacgaggacgctgcccacggcattgctaacgaggatgccgtgcacggcatcgctaatgaggactccgtatacgacatcgctaatgaggatgccatatatga

SEQ ID NO: 975341 - DNA, 120 bp, Artificial Sequence
  ENSG00000277870_5 (sequence is synthesized)
gctaatgacaccgtacaaggcacgctaaagaggacgctgtacacgacatcgctaatgaggacaccatacaaggcattggtaatgaggacgttgtatatgacatcgctaacaaggacactc

SEQ ID NO: 975342 - DNA, 120 bp, Artificial Sequence
  ENSG00000277870_6 (sequence is synthesized)
aatgaggacgttgtatatgacatcgctaacaaggacactctacaagccgtcgctaacaaggacactgtacacaacatcgctaatgacggcaccgtacaagacatcaccaatgagggcgct

SEQ ID NO: 975343 - DNA, 120 bp, Artificial Sequence
  ENSG00000277870_7 (sequence is synthesized)
atgataccgacaaggcacgctaacgcggacactgtacacgacatcgctaatgaggactccgtataccacatcgctaatgagggtgccgtatatgacatcgctaatgacaccgtacaaggc

SEQ ID NO: 975344 - DNA, 120 bp, Artificial Sequence
  ENSG00000277870_8 (sequence is synthesized)
cacgacatcgctaatgaggacaccatacaaggcatcggtaatgaggacgctgtatacgacatcgctaacgaggacaccatacaagccgtcgctaacaaggacactgtacacaacatcgct

SEQ ID NO: 975345 - DNA, 120 bp, Artificial Sequence
  ENSG00000277870_9 (sequence is synthesized)
gggcgctttatacgacattgctaatgataccgacaaggcacgctaacgtggacgctgtacacgacattgctaatgaggacaccgtataagacatcgctagtaactatcgcaagaacaaaa

SEQ ID NO: 975346 - DNA, 120 bp, Artificial Sequence
  ENSG00000277870_10 (sequence is synthesized)
gctgtatacgacatcgctaatgaggacaccatacaaggcatcgctaacgatgacgctgtacacaacatcactaatgatgacaccgtataagacatcgctaattatgacgctgtatacgac

SEQ ID NO: 975347 - DNA, 120 bp, Artificial Sequence
  ENSG00000277870_11 (sequence is synthesized)
atcgctaatgacaccgtacgaggcacgctaacaaggatgctgtacacaacatcgctaatgaggacagtgtacaagccatcgctaatgaggacactgtatatgacattgctaacgaggaca

SEQ ID NO: 975348 - DNA, 120 bp, Artificial Sequence
  ENSG00000277870_12 (sequence is synthesized)
ctgtacaaggcattgctaacgaggacgctgtacacaacatcgctaatgaggacaccatataagacatcaccaatgaggatgctctatatgacatcgctaatgacacccacaaggcatgct

SEQ ID NO: 975349 - DNA, 120 bp, Artificial Sequence
  ENSG00000277870_13 (sequence is synthesized)
aacgaggacgctgtagacgacattgcttataaggacaccgtacaagacatcgctaacgaggacgctgtatacgacatcgctaatgaggacgttgtatatgacatcgctaatgaggatgct

SEQ ID NO: 975350 - DNA, 120 bp, Artificial Sequence
  ENSG00000277870_14 (sequence is synthesized)
ttacaagacatagcgaatgaggttgctgtatatgacatcgctaatgaggacattgtatatgacatcgctaatgaggacgctctatacgacatcactaatgaggacgctgtatacaacatc

SEQ ID NO: 975351 - DNA, 120 bp, Artificial Sequence
  ENSG00000277870_15 (sequence is synthesized)
gctaatgaggacgctgtatatggcatcgctaatgaggatgctgtatacgaattcgctaataaggacgctgtatatgacattgctaatgaggacactgtacaagacatctgtaaaaaagaa

SEQ ID NO: 975352 - DNA, 120 bp, Artificial Sequence
  ENSG00000277870_16 (sequence is synthesized)
gatgctgccaatgagccattgacactggagaatgatacctaccctgaaataactcacttcctgaggaaaaaacgccatctctaggatttgattgtggagagcatatctgatgatggggat

SEQ ID NO: 975353 - DNA, 120 bp, Artificial Sequence
  ENSG00000277870_17 (sequence is synthesized)
ttgtaggactttaaaaagcactcatgtttccatcctcactgttgactcctggcttaaagggatctcccggggtgagtgaggaggcgggatcggaccctggcagtctgacggcagcacctg

SEQ ID NO: 975354 - DNA, 120 bp, Artificial Sequence
  ENSG00000277870_18 (sequence is synthesized)
tgttcctctgcactgggccgtggatgacattacacaccttgccactcccacggtcctgtgtgttccagatattttaaaataatggctataaggctgagcacttcaggatatgctgttttg

SEQ ID NO: 975355 - DNA, 120 bp, Artificial Sequence
  ENSG00000277870_19 (sequence is synthesized)
ctgtgtgcagatggaggcagtggctggagtgaatgaacggcaacacttgctggcaaccggcagaagctgagagacagggaacaggctctcctccagagcctccaggagccaggcctttgg

SEQ ID NO: 975356 - DNA, 120 bp, Artificial Sequence
  ENSG00000277870_20 (sequence is synthesized)
acaccttgaatgtgggcttctgggagaccatgcgtttctgttataagcagcccagtctctggcagtttttacggctgccccggaacactcatctatacctgtctgacaaggtcaagctcc

SEQ ID NO: 975357 - DNA, 120 bp, Artificial Sequence
  ENSG00000277870_21 (sequence is synthesized)
aaggaagggattctctacatatctacattgtttgcagattttacaataatcatttattcttgcatggctgatcattgttaaccaatacaaataaaataataaagaaatgacccacatttt

SEQ ID NO: 975358 - DNA, 120 bp, Artificial Sequence
  ENSG00000265751_0 (sequence is synthesized)
ggatggaggagagaagagaagactcatcaacagaacaaatgttgctggaacattacttataatggcaacaattggaaacaatcaaaggatgtcactatagggacttgggttaagaaaatt

SEQ ID NO: 975359 - DNA, 120 bp, Artificial Sequence
  ENSG00000265751_1 (sequence is synthesized)
atgacacatcaaaagcacagtgaagagaacttctgtcaatcctgtcaagcacatgaagatgtgaagtttcaactggattcatttctataaataaaggctacgagaagatctggttaagag

SEQ ID NO: 975360 - DNA, 120 bp, Artificial Sequence
  ENSG00000265751_2 (sequence is synthesized)
gaagaaacgaagtgaccagttcactaccattcaactattaagggatagagccaggactcagtatctagtcatgtgatgacaaagcccgcactcttactgtacagcctcaccttggataaa

SEQ ID NO: 975361 - DNA, 120 bp, Artificial Sequence
  ENSG00000265751_3 (sequence is synthesized)
tctcatttcaagacaggtaattttgagaatatcttaggccccccttctatcaaagagagggatcgaatttaaaatttatctggaatgccaactctgattaactccctggagagagtccct

SEQ ID NO: 975362 - DNA, 120 bp, Artificial Sequence
  ENSG00000265751_4 (sequence is synthesized)
ggaggactggttgagaagaaccctgaggatgcatcagtgttcatcaggaaagggcgccaacacccagcgtgcccactcatgagcagggaggagatgatgcatgggaatccacaactctat

SEQ ID NO: 975363 - DNA, 120 bp, Artificial Sequence
  ENSG00000265750_0 (sequence is synthesized)
cttaaatcttatagtatttatccacccaaaccccagactgagatactgctcccaggggcctaggtagctgccagtccgtgattttaattgctgtcttgaagttaacaagtgttataatga

SEQ ID NO: 975364 - DNA, 120 bp, Artificial Sequence
  ENSG00000265750_1 (sequence is synthesized)
aataatctacctgatgctaaataaaggctttagaatgttccccaaaagtgtggtttcttttaaaatttcaaatatactaatgttgccacttaatactatcctaaattgttagacgtgtcc

SEQ ID NO: 975365 - DNA, 120 bp, Artificial Sequence
  ENSG00000265750_2 (sequence is synthesized)
tacgaaagaagtccttgtggtaccatagctcccagggtcaaggagatgataaccagttacctggcatgcatagtggacacagcctgggcgcaccctgcaaagctggcttcttctcatact

SEQ ID NO: 975366 - DNA, 120 bp, Artificial Sequence
  ENSG00000265750_3 (sequence is synthesized)
atctgagcctgaacaccctacctaatagtgacaattaaaggaacagcaatgggcacttgcattgcaacatatctcaagacatctgactgtgaaacgacagcatgtccaggaagaggtttc

SEQ ID NO: 975367 - DNA, 120 bp, Artificial Sequence
  ENSG00000265750_4 (sequence is synthesized)
catccctgtgcttcctgaacatttgagcctactaagataaaaggtggggcactggtcttcttggtgtcgcccatcacataagttggaaaagtgacttttggtggatgctgctgaaactgt

SEQ ID NO: 975368 - DNA, 120 bp, Artificial Sequence
  ENSG00000265750_5 (sequence is synthesized)
ggatccttaggattaggtaaatagagggttgcttggggaaaaggcccaggtgcaggtggcggtgatgggtgaccttgttgattcttatcagttagacaataaagggtccacatgttagaa

SEQ ID NO: 975369 - DNA, 120 bp, Artificial Sequence
  ENSG00000265752_0 (sequence is synthesized)
tattacgggaaggcacattttctgtagctttgcccgaagagagaagctgttttctctcagagatggaacatgttagctggttgccatgatgtcttcatttgtccatcgctgcccctctgt

SEQ ID NO: 975370 - DNA, 120 bp, Artificial Sequence
  ENSG00000265752_1 (sequence is synthesized)
gagcaggcagccatcaggacagagagtggcatgctggacaggccgactctgacaaggagcaagctacgcagacattgtgctggaatttctatgctgaagaattaagctatattgtttggc

SEQ ID NO: 975371 - DNA, 120 bp, Artificial Sequence
  ENSG00000265752_2 (sequence is synthesized)
aaaagaagaaactgaaaacaagaaatccatccctttctaccactgctattatatcatccacgtttaaaaaaaaaaagtttgtatgtagttatatacaacaagaagtttctgcttcggatt

SEQ ID NO: 975372 - DNA, 120 bp, Artificial Sequence
  ENSG00000265752_3 (sequence is synthesized)
tctctgttgggcagggtggtgggagggatggggtctcgagtttttcccaagtgaaatcctggtaatcctgcctgagagaattcttatgaaagtttcactcacaatgaaagcaaacttcca

SEQ ID NO: 975373 - DNA, 120 bp, Artificial Sequence
  ENSG00000265752_4 (sequence is synthesized)
caggcttggcaccggtttggtgttctcgagtgtgatgcattctgaaaacctggctgcgtccgtggcccagctccagttctgcagggctcagcatcaggctgccccctctcctaaggtgtt

SEQ ID NO: 975374 - DNA, 120 bp, Artificial Sequence
  ENSG00000265752_5 (sequence is synthesized)
ttgcaggatcgcccctcagagctaaacacccaccagctgaccacctgttccaggtgatgggattttggctcagatcagcctggatcagggtggacctctacaagctggcttgcatgaatg

SEQ ID NO: 975375 - DNA, 120 bp, Artificial Sequence
  ENSG00000265752_6 (sequence is synthesized)
taaatgtctgctgcccatcttgaagaccatcggcaagctttggtgggttcatattcagtggcattagggattaaggcaaacttaaaatgattctgagtgtaaacagatacagatataaac

SEQ ID NO: 975376 - DNA, 120 bp, Artificial Sequence
  ENSG00000265752_7 (sequence is synthesized)
ttttgggggaacaatttggtaatagctaataacaatcgttaaaatgtttatatcctttgacctgatagtgttagttctaagaatttaccttaagaaaataaataaatttatatcccatga

SEQ ID NO: 975377 - DNA, 120 bp, Artificial Sequence
  ENSG00000265752_8 (sequence is synthesized)
tgctggacaggccgactctgacaaggagcaagctttctcccacctgcaccatgcaattccagcacatgtgggtaacatgtgctacgaagtcagaggacctgcattgcaactgtggcaaat

SEQ ID NO: 975378 - DNA, 120 bp, Artificial Sequence
  ENSG00000265752_9 (sequence is synthesized)
tgcttaagcttttggagcctgagctgcttgggctataagacgggtgaatggtacccacagtcagatgtgtttctggaagaaatgacatcagcatgcctatccctgtctctggccaagcct

SEQ ID NO: 975379 - DNA, 120 bp, Artificial Sequence
  ENSG00000265752_10 (sequence is synthesized)
cctactggcctatggaggcttccctcggtgagcacaaaagacgttgcaggcaaatccaccctcttctgtaccaggcagagctttgactcaaatccctagaagacttctaccatggaaatg

SEQ ID NO: 975380 - DNA, 120 bp, Artificial Sequence
  ENSG00000265752_11 (sequence is synthesized)
ggagctgggccctgtgtgagtgtcaagagtcttttgctttttttatcttagggctagagttgggccaggcaatttggtttttcatcaggttagaaaacctgcccaagatgatagcatcca

SEQ ID NO: 975381 - DNA, 120 bp, Artificial Sequence
  ENSG00000265752_12 (sequence is synthesized)
gcctgtcagattactgagaactcaaaaacaaaacaaaacaaaacaaagacaaatggcaacaaggaaacccaaaacaacagcaaaacagaacagctgcagctgatcctggagaagatgccc

SEQ ID NO: 975382 - DNA, 120 bp, Artificial Sequence
  ENSG00000265752_13 (sequence is synthesized)
tgggggcttcctggctttcccgccctttggggtagatcatggcagatgggccaccctgacttggtttgatcctcagttattgcagcacccacacaactctgctcctcagtccctcaccaa

SEQ ID NO: 975383 - DNA, 120 bp, Artificial Sequence
  ENSG00000265752_14 (sequence is synthesized)
agactcaccttctgtggcagaaaccagccacagtgggatgagacagggtggggtccagcgtgcaccattccttgctgcaggactccctggtgaaataaggagagagccagtggggtgtgg

SEQ ID NO: 975384 - DNA, 120 bp, Artificial Sequence
  ENSG00000265752_15 (sequence is synthesized)
cttagcggtgctggacccatggggtgtgacttaatggtgctgacccagtaggcatggcttagtggtgctgcaccagtagggtgtggcttaatgacactagcaggagccccatgattatgc

SEQ ID NO: 975385 - DNA, 120 bp, Artificial Sequence
  ENSG00000265752_16 (sequence is synthesized)
acgtggagtggcagggtcagcgatgagaaattcggcaagttggctagcccagcctccttcccaacagtctccgccaacacccaacattgacagcaccagctctcaggagaatgctctggt

SEQ ID NO: 975386 - DNA, 120 bp, Artificial Sequence
  ENSG00000265752_17 (sequence is synthesized)
ggcagcacccacaagctctgtggtcacggctttccctgcctgatctccacgccactgcacaccagcctgagagacagagcacgactccatctcaaagaaaaaacaaaaaagaaaagaaaa

SEQ ID NO: 975387 - DNA, 120 bp, Artificial Sequence
  ENSG00000265758_0 (sequence is synthesized)
tagagatggggtttcgccatgttgtccaagctggtctcgaattcttgggctcaaaccatctgcccacactggcctcccaaggtgctgtagcatctcttcctcaaagatgagccagccgtc

SEQ ID NO: 975388 - DNA, 120 bp, Artificial Sequence
  ENSG00000265758_1 (sequence is synthesized)
gtgttacagctctttttgaatttgtctagcatgctttctgctttttactggaaagtgcccccccccaaaaaaataaaaacgaataaataaaaaagaaagatttaaaaaataaaagagaaa

SEQ ID NO: 975389 - DNA, 120 bp, Artificial Sequence
  ENSG00000265758_2 (sequence is synthesized)
ggattggtatcccctctgctcccaggaatccagtaaaagtagcatctcttcctcaaagatgagccagccgtcatttgaagaggaggaaagactggattggggaagaatctggggcaaaat

SEQ ID NO: 975390 - DNA, 120 bp, Artificial Sequence
  ENSG00000265758_3 (sequence is synthesized)
gaagccaaattgagaacgaggagaaaagaagatgctaaggccgcagataaggagttccatctcccgggctgatcctgctcctctgcgatacgttctgcagatggtcctgtgtggcccagt

SEQ ID NO: 975391 - DNA, 120 bp, Artificial Sequence
  ENSG00000265758_4 (sequence is synthesized)
ccaaatgcacctcttcagggatgcccatcctcagttagagaaacgggctgtaagtcagagaacttgaacttgacccagagcatggccagacacatcagctattccctacatcacgtttct

SEQ ID NO: 975392 - DNA, 120 bp, Artificial Sequence
  ENSG00000265758_5 (sequence is synthesized)
ttaaaataaagcctgccagcacaagaggcttgtagagtttgccatagtacatgtacccagggctctgcttttgttcacgattctgtattcatattgtgattttaatagctgctaatcaaa

SEQ ID NO: 975393 - DNA, 120 bp, Artificial Sequence
  ENSG00000265758_6 (sequence is synthesized)
gaaagaggctttctagtcattggtaagctggcaaagagcaaaacaaccaaatgcctgacaagcagctggtaaggaggttgtgctggagaaataaacatgcaattgtcttcccttccacaa

SEQ ID NO: 975394 - DNA, 120 bp, Artificial Sequence
  ENSG00000265758_7 (sequence is synthesized)
caggctggagtgcagtggtgtgatcatatctcactgtacatctccaactcctgggctcaagaaattctcctgccatagcctcctgagtaggtaggactacaggcatgtgccaccacaccc

SEQ ID NO: 975395 - DNA, 120 bp, Artificial Sequence
  ENSG00000270069_0 (sequence is synthesized)
tccggccactctcctgcctgggctgctgctcaacgggggctgggggtgtgtggggcgggggtggtctgtccagtgattcagccacatgtgatagatgaccaagtgactgctttcttggag

SEQ ID NO: 975396 - DNA, 120 bp, Artificial Sequence
  ENSG00000270069_1 (sequence is synthesized)
tccgcacaccagtggaagactctcaaagtggttgtgaccgacttgatcaaactctaggcttcctgaactggtaactgtcactttaatataggttactgattaaactcagaaaaatgcagc

SEQ ID NO: 975397 - DNA, 120 bp, Artificial Sequence
  ENSG00000270069_2 (sequence is synthesized)
ttaaaatctttgccaggaacttgtgtggacttattccctgttcccccccccaccccccttgttctgatttgttttgtcacaggaatgaaatgcagataactctttagaaaacttttgtag

SEQ ID NO: 975398 - DNA, 120 bp, Artificial Sequence
  ENSG00000270069_3 (sequence is synthesized)
gaaaagcgcctcgtgtgatctggaacaaagacgttttataatcagatttatcaagctgcgaagagggagttttagtgaacggaagcagcagcattctgtcaccaggaaatactcctttat

SEQ ID NO: 975399 - DNA, 120 bp, Artificial Sequence
  ENSG00000270069_4 (sequence is synthesized)
ccagaattggaggtataaaccagtggagtttatcattgaatagagtgcagagaaaggaccgcaagaaagctgatcacctcagcaatgaatgatttcaatacgatttcacccaaatggtct

SEQ ID NO: 975400 - DNA, 120 bp, Artificial Sequence
  ENSG00000270069_5 (sequence is synthesized)
tgcctcaactgtcaaagattgacaacttacatgttgtttactttttggcttctatttctgttcataattattatcagaaggcatagcacccacaagcctaatcatactgccttacaacct

SEQ ID NO: 975401 - DNA, 120 bp, Artificial Sequence
  ENSG00000270069_6 (sequence is synthesized)
tattcctcttcattttgtcttctcacttacctgcagaaacccagtttatttttgttctccctttaccacaccagccttgtaactgttatgaatgaccctcaatctcactggaatctgaat

SEQ ID NO: 975402 - DNA, 120 bp, Artificial Sequence
  ENSG00000270069_7 (sequence is synthesized)
cactcaggaattcaagcaaactggatgttttaaccactgttcagctttcttatggaatgacagagaacttgtaaagataaaacaccagtttgcaggaagaaaggaagagaatggaaattg

SEQ ID NO: 975403 - DNA, 120 bp, Artificial Sequence
  ENSG00000270069_8 (sequence is synthesized)
cttctggaaaatactagttttacaatatgttttgtttgtctgctctcttaaataaacttaatcctataaacattttttaagaactagccattaagactgttaagttctcaattataaagg

SEQ ID NO: 975404 - DNA, 120 bp, Artificial Sequence
  ENSG00000270069_9 (sequence is synthesized)
aataaaatgttttaaggaggatttatttgcccttgcttatatgaactgcatatttttagtaggaaatcatgtaatttaaattagtattggttaacagatttaacgtagaaaatggacata

SEQ ID NO: 975405 - DNA, 120 bp, Artificial Sequence
  ENSG00000270069_10 (sequence is synthesized)
taaagaatacaaggataaatgtctacatgtaataatggatggtagtgatataatgcatttttgtcatcccatgctgaattcagtaaaaataaagctaatgacttggagcttttaaaagat

SEQ ID NO: 975406 - DNA, 120 bp, Artificial Sequence
  ENSG00000270069_11 (sequence is synthesized)
aaagtggcattgctccctaatagatatcatatgcgtgtgtgggaattgaaaaattgttcacagacccctaacaactgtgttgaacagagaacacataaacagtgaggagttctaaaaaag

SEQ ID NO: 975407 - DNA, 120 bp, Artificial Sequence
  ENSG00000270069_12 (sequence is synthesized)
agcagcacgagaataccgcataaagactgagaagaagccaggtaattaacaaaaatgagctgagtgctatcagtttagctaaacatatgtaatacagctagatttggttgttttattttt

SEQ ID NO: 975408 - DNA, 120 bp, Artificial Sequence
  ENSG00000270069_13 (sequence is synthesized)
tcttgttagtggaggagaaacataaaatcagaatgggctgtttagtagaattgcgacattaactttccatggatgtagatttccatttagtctgaatagcatgtatgaaatttgaaggga

SEQ ID NO: 975409 - DNA, 120 bp, Artificial Sequence
  ENSG00000270069_14 (sequence is synthesized)
tgctttcagaattagtctacttgccctcctttcctttcctctgcattaagatgtcaagtatttagttagaaccttacaagatgaaagttgtacaaaatgaaagttcaagtaatgcgtcgg

SEQ ID NO: 975410 - DNA, 120 bp, Artificial Sequence
  ENSG00000270069_15 (sequence is synthesized)
aattttaagtttgttctattggattacattagtacagcaaaaggggggttatttctatctatatggttcatgacattttgagaggtcgtgattagtagttcttactggtttcgtatgcgt

SEQ ID NO: 975411 - DNA, 120 bp, Artificial Sequence
  ENSG00000270069_16 (sequence is synthesized)
gttcctgcctgttgaattcagttttctaatcttgaatctgagctgcctttatgttaaagggttctagaaaaagacaataaagctttgaatacccgtgttatatacaacaggttcctgttc

SEQ ID NO: 975412 - DNA, 120 bp, Artificial Sequence
  ENSG00000270069_17 (sequence is synthesized)
atgatgtataaggtaacgcaattttattttaggcatgaatgtctaatttcttgatttggcttcttaagaatatactgaaaaggttgaatagaataagaaaaagaacattagaaaagaatg

SEQ ID NO: 975413 - DNA, 120 bp, Artificial Sequence
  ENSG00000270069_18 (sequence is synthesized)
gtgggtgactgcctgattttactagtttcttattggtcaatagaagtaatcatgtgatgtctacttatagaagcaaatggaaaaaatttttcttctttaactgctaacaagtatataggc

SEQ ID NO: 975414 - DNA, 120 bp, Artificial Sequence
  ENSG00000270069_19 (sequence is synthesized)
attaatttgaatatataattataactgttattaacagaataagttttgggtaatataggaaataataattatttctttctttttaagccaaattggaagttgaatctacttttggttcct

SEQ ID NO: 975415 - DNA, 120 bp, Artificial Sequence
  ENSG00000270069_20 (sequence is synthesized)
tgaatctacttttggttcctgttctgttactttcaaaatcttaaaatccttaactcaaaagggaaaatgtataataaaacaggatagcagtgctgaaatttctctctcttagcagtggag

SEQ ID NO: 975416 - DNA, 120 bp, Artificial Sequence
  ENSG00000270069_21 (sequence is synthesized)
tgggatgagggtgggggagggagatgaatctagtgagatatattaattgttttttccccctcttgtatacttggataacttttgagatcagttttctcagactagcagctctcaagactt

SEQ ID NO: 975417 - DNA, 120 bp, Artificial Sequence
  ENSG00000270068_0 (sequence is synthesized)
ttagttgtttttgtttttattaaagtatcatattgaagtagaaagatggttttgagtttgaaaagctccagataaatccttggatttttatgagcctcaatttccttttctgtaaaatga

SEQ ID NO: 975418 - DNA, 120 bp, Artificial Sequence
  ENSG00000270068_1 (sequence is synthesized)
agagggtgtcctgaagtcacaggggaatatttgtgaggattcaacggaataaaattttaaaagatgtctgaccaatagtaagcactcaatacatgttagctttattctctcttttatttt

SEQ ID NO: 975419 - DNA, 120 bp, Artificial Sequence
  ENSG00000270068_2 (sequence is synthesized)
tctcgcttcttttctcctgctcttcaaaaaagtgagtggttgaaccacctaggtgatctctgctgctaaacttctattattgatttttgtttgcttcctctctgccccttgtttcctcat

SEQ ID NO: 975420 - DNA, 120 bp, Artificial Sequence
  ENSG00000270066_0 (sequence is synthesized)
gttttagggagggagagcggcctgggtcctgggtgttgtgtgcggagctgtggcgtcgcgtgtgaggcgcgtgcagggtgagtgtgagtggacgcgtgagtgtgtgagtgtgcgcgcttg

SEQ ID NO: 975421 - DNA, 120 bp, Artificial Sequence
  ENSG00000270066_1 (sequence is synthesized)
tgatcggatcgtgaccccagccccgccgggccgacccgaaatgaaaagctctcctcctgcgaagccccctcggggcgctgtgcagcgaggccccttaggcggcggccacgctgtggtccc

SEQ ID NO: 975422 - DNA, 120 bp, Artificial Sequence
  ENSG00000270066_2 (sequence is synthesized)
cgaggtcccggagctggccctgcggggcccggcgctcagaagtgatgaattgatcagatagacgaggccgggcttgtccccggccactgattatcgaggcgattctgatctgggcacggc

SEQ ID NO: 975423 - DNA, 120 bp, Artificial Sequence
  ENSG00000270061_0 (sequence is synthesized)
gggctgctccttccctaggggcttttgggatcagctggttccccacttggcgtgaatggctattaggaggtatcacagaggtataggagggtctttctgagagggactcctgggtattcc

SEQ ID NO: 975424 - DNA, 120 bp, Artificial Sequence
  ENSG00000270061_1 (sequence is synthesized)
acatgaaccctaggaagattttttagtagattaaagacccacctgctatcgaagatgattcttagtcgtgctttgcatttgtatggcacattacagggaataaagcactctcgaattcaa

SEQ ID NO: 975425 - DNA, 120 bp, Artificial Sequence
  ENSG00000270060_0 (sequence is synthesized)
attgcaaaataatcactccttggggttcttctagctaaaagctatagatattttttaatgaattgatttaaatcaaattagtccttaaagtgtccttgtggagcctgacagaggaatgag

SEQ ID NO: 975426 - DNA, 120 bp, Artificial Sequence
  ENSG00000270060_1 (sequence is synthesized)
aggcatcaagagttgtattgtattgcctgccaaccctagaccccttttctttgagaaacgagacagcaattctaggtcttagtgcataaggccagtctttgtgctttgaggtgctttttt

SEQ ID NO: 975427 - DNA, 120 bp, Artificial Sequence
  ENSG00000270060_2 (sequence is synthesized)
aaattataacaggcaaaccgtcactggccagggaactcctacgtggaataaacaaagctgatgtgtaaagaattctgaggtgtgcttcacaggtcaccacacacagctagccttctgttg

SEQ ID NO: 975428 - DNA, 120 bp, Artificial Sequence
  ENSG00000270060_3 (sequence is synthesized)
gggtctggcccagccctgtgcttgggtaaggacagaaggctctgggtgacgctccgtgaaggagaacccagttgctgggcattgtctcttgtgcggtgatgctgatgcctatcctttggt

SEQ ID NO: 975429 - DNA, 120 bp, Artificial Sequence
  ENSG00000270062_0 (sequence is synthesized)
aagtatcccaaggctgctaacaagttttcccaccccaacctagaccatatattctaactataaagattagactagacaaggccccatgcaaaacaaaacaaaaacaaagacaattcagga

SEQ ID NO: 975430 - DNA, 120 bp, Artificial Sequence
  ENSG00000270062_1 (sequence is synthesized)
gaagtaactgcccaaatcttatctctgttataatacatgagctaaattttaaaataatcagtgggttgtagttacgaatggtaagttcaagtatctgttgttacaagcagagttaaacag

SEQ ID NO: 975431 - DNA, 120 bp, Artificial Sequence
  ENSG00000270062_2 (sequence is synthesized)
caggaatttaagttataaaagtatttgatatttttaaagaataaatacagaaataatgcctatttaggtagaaaaaaaacttttggtgccatctaatatcaatctgttctattagtaact

SEQ ID NO: 975432 - DNA, 120 bp, Artificial Sequence
  ENSG00000270062_3 (sequence is synthesized)
gacataaacatctcatgcaaagaaatagcttagaaaaagtagatttgttccaatggtgtccctgatgccaagtctgatgttaaagctattttgtaaaataaaagaatataattagacgaa

SEQ ID NO: 975433 - DNA, 120 bp, Artificial Sequence
  ENSG00000269993_0 (sequence is synthesized)
tttaaacagcctggtgtttttacagtttttgcattattgctttcattcaaaagggaatttgaagtaataaatggcagcaagaagcgaattgaatactgctgggaggttgtaaatgagcat

SEQ ID NO: 975434 - DNA, 120 bp, Artificial Sequence
  ENSG00000269993_1 (sequence is synthesized)
atacacgatgttaagtcgtagatgtcttttattagcacacttgacagaccaggaaatgatttttctctacaattcaagaaaactgctgtttaataaaaatttcaattgctgattcaaata

SEQ ID NO: 975435 - DNA, 120 bp, Artificial Sequence
  ENSG00000269993_2 (sequence is synthesized)
gacactttaagcaaagtttactgtatgaaagcttgtgaggataagtggaaatgtattatactgccttaattctattctgtatttgtggtagcaattaaatagaagtgtttttgtggcttt

SEQ ID NO: 975436 - DNA, 120 bp, Artificial Sequence
  ENSG00000269997_0 (sequence is synthesized)
cagcatgttcctactgaagaaactgggaatcctcggcaggttagtagcaagcagaactttagagtcccttgaaggaaggttgaagtgatgtttggactgctgaactgcagagtgaacctg

SEQ ID NO: 975437 - DNA, 120 bp, Artificial Sequence
  ENSG00000269997_1 (sequence is synthesized)
ggaatgagatgcactgacaccctcatcagtgctttccatcagtgtgcaagacttagctatttctcaaaagaacacagcttcctctcacatggaatgtcctaccattggggatgtaaccag

SEQ ID NO: 975438 - DNA, 120 bp, Artificial Sequence
  ENSG00000269997_2 (sequence is synthesized)
tttataggtagggaatccagccacttcagtccagtttctgaaaattcctggctaggttatttttcagagttccatttggacattttaccacctcttctgattgtggacaagacagtgaag

SEQ ID NO: 975439 - DNA, 120 bp, Artificial Sequence
  ENSG00000269997_3 (sequence is synthesized)
gcattgatgaatgtgtagggctttacagctttatttacaatccaatctggaaatgatggactcctgttacaaatagacacacttaatgtaccaaatctggaaataaaatatttcagaagt

SEQ ID NO: 975440 - DNA, 120 bp, Artificial Sequence
  ENSG00000269994_0 (sequence is synthesized)
ctctacatcaaaaccgttcaggttcaaagtccaggctttctgatgttccttcttggtgggcgtctggctgttttcaggctggttctccttgctcaggaggaagctggcaacctccatctg

SEQ ID NO: 975441 - DNA, 120 bp, Artificial Sequence
  ENSG00000269994_1 (sequence is synthesized)
ggcagcactgcgatgggggatatagcggtcaccgccaggtttgctaggagtggtctgaaccttggaactggatttgccaggagttcggcccggagtcctgctggcgctgtgggatcggtt

SEQ ID NO: 975442 - DNA, 120 bp, Artificial Sequence
  ENSG00000269994_2 (sequence is synthesized)
ggcggcccgcatggagtccaaccaggatggcgacttgactggattttacagtttcattgacacgcatgagctctatcaaacttctgggagtttttctgaaatgtttacatggaaggcacc

SEQ ID NO: 975443 - DNA, 120 bp, Artificial Sequence
  ENSG00000269994_3 (sequence is synthesized)
tggagcccattgaatttccctcttcaaatgcttaagttttcttctgtcttggtggctactgcctccttctcactttctgccttaggtcaagataaatgagtttttccccaagaaagccat

SEQ ID NO: 975444 - DNA, 120 bp, Artificial Sequence
  ENSG00000269994_4 (sequence is synthesized)
atggatctctgaggttttgaactctaaccaatgctatctcgttgattgcctttggatttcagggtcttattttacgtcaacctcagcctctctcttctgcagttccatatccacatgagc

SEQ ID NO: 975445 - DNA, 120 bp, Artificial Sequence
  ENSG00000269994_5 (sequence is synthesized)
gaccagagaatggcttacatgggaattaattatgcacttgttcgttttactctatagaacaatcccatctgtattggatctgtatgttccatctcccatgtgaaagaagcaccctacaaa

SEQ ID NO: 975446 - DNA, 120 bp, Artificial Sequence
  ENSG00000269994_6 (sequence is synthesized)
acacctgtaatcccagaactttgggagcctgagtggggaggatcttttgagcccaggagttcgagactagtctgggcaacaaagagagaccctgtttctaaaacaaaaataaaaacaaag

SEQ ID NO: 975447 - DNA, 120 bp, Artificial Sequence
  ENSG00000269994_7 (sequence is synthesized)
tgtttctaaaacaaaaataaaaacaaagatatcttccgagcctgttcagtctttggtcctggtttagatataggtatatagagagagctatttgagtaatcaattcccaatatggtatga

SEQ ID NO: 975448 - DNA, 120 bp, Artificial Sequence
  ENSG00000269994_8 (sequence is synthesized)
tttgagcatttggagaggtcttctttacatatcatagtacttagattattaccaataaatatttttcttttggggttaacattacagtaataatatattttgaatctaaaatttggatgg

SEQ ID NO: 975449 - DNA, 120 bp, Artificial Sequence
  ENSG00000269994_9 (sequence is synthesized)
agacacaggacacagaatatataatgctcaaaaaatgtaatgctcaatgaatgtctctatcatattcttttttgttgttgttgttgttatatagatgaggccttcctatattgtccaggc

SEQ ID NO: 975450 - DNA, 120 bp, Artificial Sequence
  ENSG00000269994_10 (sequence is synthesized)
tggtctcaaacacccagctttgcctccttatgtgccaggaaaacaggcctgagccaccaagactctcaatatattattaaaatataaacaaattacttgaagtggtacccctcaaaataa

SEQ ID NO: 975451 - DNA, 88 bp, Artificial Sequence
  ENSG00000269994_11 (sequence is synthesized)
aaaagcgcagtattcgggtgggagtggcctgattttccaggtgttgtctgtcacccctttctctcttcccgagtgaggcaatgcctcg

SEQ ID NO: 975452 - DNA, 120 bp, Artificial Sequence
  ENSG00000269994_12 (sequence is synthesized)
aatcactttcctgctttcaacaagttgcaatgtaagacgggacattttctgaaatggagagaagataaacatgaagtaagaagctttgtccccagcaggcttttcctggcagaaaatatg

SEQ ID NO: 975453 - DNA, 120 bp, Artificial Sequence
  ENSG00000269994_13 (sequence is synthesized)
gacatctgggtggtgtcatagtcaggaggccaggaggaaggatttgccaaaatgggtaaactgggcagtgcatgaaaactggtgcctttgctcctatgggccatcatcctgttgatagtg

SEQ ID NO: 975454 - DNA, 120 bp, Artificial Sequence
  ENSG00000269994_14 (sequence is synthesized)
aggtaccaagagaagtgctgatggtaaagccctgtgtcctccccatccatgatcttggccgaaagcattaacctccgaagagtctcggtgcttttagagacttcctggtctgaagtgact

SEQ ID NO: 975455 - DNA, 120 bp, Artificial Sequence
  ENSG00000269994_15 (sequence is synthesized)
gcctgttgtggacaaaagctgaaaacaaacaacataaaaacaaactaaaaaggtcagttactcaaggatctagacaactagccaacacctccacaaacaaatgggagcttaatagacttt

SEQ ID NO: 975456 - DNA, 120 bp, Artificial Sequence
  ENSG00000274528_0 (sequence is synthesized)
gagtaatgaagttaagtggttggggtgagcttgaatgctttatattttttaatatttaaaacaacgtcagctgagtaccaggtgtgaagaagaggtaatgagtgaaaaaaaccaagagaa

SEQ ID NO: 975457 - DNA, 120 bp, Artificial Sequence
  ENSG00000274528_1 (sequence is synthesized)
aggggagacttgttccaaccgcagaatttccagcttctgcaacgagagctcgtaccttcagccccactgcctctgctctaggctctcctctgatcctcaggacatttttcctctcactct

SEQ ID NO: 975458 - DNA, 120 bp, Artificial Sequence
  ENSG00000274528_2 (sequence is synthesized)
ttgagaactcgtttaccttccttttccatcaatgtctgatcacccagagaaggtgggagaataaataccaagcactgtgccttccctcaaggagcatttaatccagtgtcactgctgact

SEQ ID NO: 975459 - DNA, 120 bp, Artificial Sequence
  ENSG00000274528_3 (sequence is synthesized)
tgtcactgctgacttcctgtggataatgcaaagttggcttacaatagtaagggagaccactaaattgacagaatctttgtagcatttcaaaagggtgtcaggcctctgagcccaagctaa

SEQ ID NO: 975460 - DNA, 120 bp, Artificial Sequence
  ENSG00000274528_4 (sequence is synthesized)
gacctgaagcaactgaagatccacaaaaaaaatgaaaatagccttaactgatgacattccatcattgtgatttatttctgccccaacctaactgatcagtgtactttgtaatctccccca

SEQ ID NO: 975461 - DNA, 69 bp, Artificial Sequence
  ENSG00000274528_5 (sequence is synthesized)
cccttaagaaggttctttataatctcccccatccttaagaagattccttgtaacccattgctcttaact

SEQ ID NO: 975462 - DNA, 120 bp, Artificial Sequence
  ENSG00000284668_0 (sequence is synthesized)
tttggtctttcctgctgccttgtgaagaaggtgcttgtttcttctttgccttctgccatgattgccatgtgaatcgcacccctggaactgtgcagggcccacctgtgtggccacacgcag

SEQ ID NO: 975463 - DNA, 120 bp, Artificial Sequence
  ENSG00000284668_1 (sequence is synthesized)
tgaccctgagcaaaggagtgaccacagaagtgcatggcaaagcagaaaggtgtgacgtcttggaggacgcgggaggaaagcacgcccagcggacaggagccatcacgcggctgcgggctg

SEQ ID NO: 975464 - DNA, 120 bp, Artificial Sequence
  ENSG00000284668_2 (sequence is synthesized)
ctgctgagaacctggcgtgggccaccgtcgtcagcagcgtggaggttcctcaatgtgaagacgacaacgatgaagatctttatggctgggttcagttttggtgtctcaacacccgtaatc

SEQ ID NO: 975465 - DNA, 120 bp, Artificial Sequence
  ENSG00000284668_3 (sequence is synthesized)
ggccaaggtggatggatggcttgagcccaagagtttgagaccagcttgagcaatgtagtgaaaccctatctctacaaaaaactagcagggcgtgtgcctgtagtcccagttactcgggag

SEQ ID NO: 975466 - DNA, 120 bp, Artificial Sequence
  ENSG00000284668_4 (sequence is synthesized)
agggagattgaggctgcagtgagccctgattgcgccactgcactccagcctgggagtgcggtctcaaagaaaacccagtctcaagaaacaaaacaaaacaacccaaaaaagatcttaaga

SEQ ID NO: 975467 - DNA, 73 bp, Artificial Sequence
  ENSG00000284668_5 (sequence is synthesized)
tcaagaaacaaaacaaaacaacccaaaaaagatcttaagatgatccacttctgcttaatgatcagtgaatatt

SEQ ID NO: 975468 - DNA, 120 bp, Artificial Sequence
  ENSG00000284668_6 (sequence is synthesized)
gaacctggcgtgggccaccgtcgtcagcagcgtggaggtaactgacgaccttggccaagaagttgggtggcagcgtggaggtcatgctcagagacacttgttattgcagtcagagtccat

SEQ ID NO: 975469 - DNA, 120 bp, Artificial Sequence
  ENSG00000284668_7 (sequence is synthesized)
ctggataatcctggataaatctcatctggagatccttcaccagatcacatcggcaatgacctgttccccaaataaggccctgtgcacaggttctggggtgctaggagtgagccaccatgc

SEQ ID NO: 975470 - DNA, 120 bp, Artificial Sequence
  ENSG00000284668_8 (sequence is synthesized)
ctggcccagtttttaatgcttggacatctccaaaatcaggacatatcttgtaattgaagacgtctcaccatagcggccagccgtgcaaccactgggcctgtctgtgcctgaacaacacac

SEQ ID NO: 975471 - DNA, 120 bp, Artificial Sequence
  ENSG00000284668_9 (sequence is synthesized)
cctggtagaaaattctcaagacaacggcggagcacgcttgcccctaggagaccaagtggccggaatgttgagaatcagcctttcgcagaaatcccctaagcgggaggcagcaggctgact

SEQ ID NO: 975472 - DNA, 120 bp, Artificial Sequence
  ENSG00000284668_10 (sequence is synthesized)
ccatcagccccaggcaggcttctgggccctgcagctatggctcttcatccttttacatgttcttcgagaatcagctgcaccctggatgcttctgacagctcagaggacatcagcatgagg

SEQ ID NO: 975473 - DNA, 120 bp, Artificial Sequence
  ENSG00000284668_11 (sequence is synthesized)
acaagcacagggcttgatggctcggagggaaatggagttggaagatttggacttaatgtgcacacattttagaaatatcttaacaaattttattttgctgatatctttcttttttgtgtg

SEQ ID NO: 975474 - DNA, 120 bp, Artificial Sequence
  ENSG00000284668_12 (sequence is synthesized)
tgccaaagtgatggccagtacaaatccatgtctaattaagtccagaagagctccttcaataagcgtaagatgaaagttatgagtgataagaaagcgtcatgtcagtttaattggcagcat

SEQ ID NO: 975475 - DNA, 120 bp, Artificial Sequence
  ENSG00000284668_13 (sequence is synthesized)
tttctctttcttagtggttcataaaataaggcagtgctttgctatcgacggtgtctgaaattctgtgaatattcaaagttaaatctcatgctgaacagccactgtgcgcaaggcgggtga

SEQ ID NO: 975476 - DNA, 120 bp, Artificial Sequence
  ENSG00000284668_14 (sequence is synthesized)
aggcacagtcagagtccatctggataatcctggataaatctcatctggagatccttcaccagatcacatcggcaatgacctgttccccaaataaggccctgtgcacaggttctggggtgc

SEQ ID NO: 975477 - DNA, 120 bp, Artificial Sequence
  ENSG00000284669_0 (sequence is synthesized)
ccagctcccagctgaccagcaggttctcccaggaggtgggggattcatgacccagaggcaggcatactcacatgtacacacatgctcagacaacacggaaacacacatatggacaaacaa

SEQ ID NO: 975478 - DNA, 120 bp, Artificial Sequence
  ENSG00000284669_1 (sequence is synthesized)
cacccacacatcctgtccccatcgcatcctgccaagagaccccatcctttccccagttccagatgccatctacagggccctgaatgcctccttcaccacacatccagcctgagatccccc

SEQ ID NO: 975479 - DNA, 120 bp, Artificial Sequence
  ENSG00000284669_2 (sequence is synthesized)
aggacccactgcccacttgttatctccgcccaaccatcccctagaaacataaaattctgcaggccccaaatcgaaccccttgtgtctgttccccaccccccatgccatctgttcctcttc

SEQ ID NO: 975480 - DNA, 120 bp, Artificial Sequence
  ENSG00000284669_3 (sequence is synthesized)
ctgtgttccctatcttagtaacagccccaccacccacccagtcactcaagccagaaacctgcagtcatcctcaactccttcctctctcttcctccatctatatccaggcacgccatgcct

SEQ ID NO: 975481 - DNA, 120 bp, Artificial Sequence
  ENSG00000284669_4 (sequence is synthesized)
gggagttcatgtaaatccgtttaatccacacagagccaggaacagacccaggaggtatcatggaggccacgtggccgtgttaagagcttcggctccaggaccagactgcctgcttttgca

SEQ ID NO: 975482 - DNA, 120 bp, Artificial Sequence
  ENSG00000284669_5 (sequence is synthesized)
tggaggccacgtggcagtgttaagagcttcggctccagaaccagactgcctgcttttgaactctggctccactgttacttggctgggtaatcctgggcaagttccttaacctctctgtgc

SEQ ID NO: 975483 - DNA, 120 bp, Artificial Sequence
  ENSG00000284669_6 (sequence is synthesized)
ctccaattctttgtcttaagacctcatagggttggggggtttagaagaatcaacacatgtcacatgttcttagattagtgataagtgctcagtgaatgtgttattccacactgtttaaaa

SEQ ID NO: 975484 - DNA, 120 bp, Artificial Sequence
  ENSG00000284669_7 (sequence is synthesized)
aaaaaaaaaaaatgagctccagctcctggatgcacacgacacagatgcatctcacagacatcatgctgagtgaaagaaggcagacacgaaatacatgcaaatgttcaaaaaaaaaggcag

SEQ ID NO: 975485 - DNA, 120 bp, Artificial Sequence
  ENSG00000284669_8 (sequence is synthesized)
aactactctgtgatgatataagtcagagcagtggttccccaggagagggagaaggacaccctggagagagtcatgagggaaattttctggggtgggaggtaggaagggctgggggacctg

SEQ ID NO: 975486 - DNA, 120 bp, Artificial Sequence
  ENSG00000284669_9 (sequence is synthesized)
taaaagttctatgttgatctgcatggtggttaaatgaatgtctaaaattgtaaaaattcgtcttatggacacttaagatttatatacttacgcattttatttaggttactatcaatttaa

SEQ ID NO: 975487 - DNA, 120 bp, Artificial Sequence
  ENSG00000284669_10 (sequence is synthesized)
aaagttcactaaccttaacatgtctctgtccccacagtggccaccccatgtccctctactcctgccctctttccccagccattcttgatcctgcagccagaatgaccttcttaaaccaca

SEQ ID NO: 975488 - DNA, 120 bp, Artificial Sequence
  ENSG00000284669_11 (sequence is synthesized)
catttacctgccactcccacgcctagaaccactctatagctccccttggggcattaggatcaagtccagaattcaagaagctgaagctgacctggccactgcttccctctccccaccttg

SEQ ID NO: 975489 - DNA, 120 bp, Artificial Sequence
  ENSG00000284669_12 (sequence is synthesized)
ctctctttactccagctgaactggcagttcccgtaatggccatgtccctgctcacctcctggcctctgcaaagctggaacaacccagccttattccctttcagaaagtcatctttcaagg

SEQ ID NO: 975490 - DNA, 120 bp, Artificial Sequence
  ENSG00000284669_13 (sequence is synthesized)
ggcttcctgaatcccccactccttcctcctgcctttctgtgctcctgctatggactgaatatttgtatcctaccaaaattcttatgttgagactgaatccccagtgtgacggtatttgga

SEQ ID NO: 975491 - DNA, 120 bp, Artificial Sequence
  ENSG00000284669_14 (sequence is synthesized)
ggtgggccttggggtaatcaggagatgaatgacaccttattagcacctttataagaagtgacacaaaagagatggtctccctctccaacatgtgagctcagacccagcaagaaggtgtcc

SEQ ID NO: 975492 - DNA, 120 bp, Artificial Sequence
  ENSG00000284669_15 (sequence is synthesized)
atctgcaagccaagaaggcagacttcatcaggctgactagagccttgatcttggacttcacaacctcccaaagtgtgaaaaataaatcttttgtttaagcaacccagtctatggactttc

SEQ ID NO: 975493 - DNA, 120 bp, Artificial Sequence
  ENSG00000284669_16 (sequence is synthesized)
cattatagcagcccaaaggaaaacagctcccaaaaaccctggtatttccctatcacagactatatctgatcagactgcaagggcctcattgctcatctgcctcacactgagggcatttct

SEQ ID NO: 975494 - DNA, 120 bp, Artificial Sequence
  ENSG00000284669_17 (sequence is synthesized)
ctctggctgcccatgtgcccatgtctaggacagagtctggcatagagaaggcacctgataataccagaggtaagcagaccagccctgcatatcgggtatagacccaactgcacaggcaat

SEQ ID NO: 975495 - DNA, 120 bp, Artificial Sequence
  ENSG00000284669_18 (sequence is synthesized)
cttacccacatgaggctgctgagggcgactggtcagtgtgaccttctcctgctcctgtcacagttaatttaagaggggcaggaggagagtcacatgtctatcccccagctgtgccagagg

SEQ ID NO: 975496 - DNA, 120 bp, Artificial Sequence
  ENSG00000284669_19 (sequence is synthesized)
gtacaagcaagaatggtgctcaaaaagggtggctctggtggcaggagagggaagctcaggctgcaggcaggtgccaatgtaggcaatcccaggaggctccctggtcccccaagaggaaac

SEQ ID NO: 975497 - DNA, 120 bp, Artificial Sequence
  ENSG00000284669_20 (sequence is synthesized)
agggatcgccacagaaagagaacttaaggtgaggaggttatgacctccaagcctacagacagggaaacagagacacagggaagctacggtcatgctgcaggttctagtgatgaacaatcc

SEQ ID NO: 975498 - DNA, 120 bp, Artificial Sequence
  ENSG00000284669_21 (sequence is synthesized)
cctccaaatctgcagagcgggaatgaaatgagaaattacctcctccctgatactcctctggagaggcgggggaagtgcccctggttctcatgttcctctgttccacctcggaatccagag

SEQ ID NO: 975499 - DNA, 120 bp, Artificial Sequence
  ENSG00000284669_22 (sequence is synthesized)
gctaagaggcagaggcaggagatgaaacaaaaagactgagccagagacaaggagaggccaagagggaatgaaacatagtgagaatctaagaaaagtgtcagacagtgagtcagaggtggg

SEQ ID NO: 975500 - DNA, 120 bp, Artificial Sequence
  ENSG00000284669_23 (sequence is synthesized)
gggaggggccctcagcagctacccaggaatcaagatcctgaccatggcagtgttcccagggtgagcacagccccctccctagggtcctggaggaaggaaaagcagttcccaggagctggc

SEQ ID NO: 975501 - DNA, 120 bp, Artificial Sequence
  ENSG00000284669_24 (sequence is synthesized)
tcagacagaaataccacaccgccgaggaaccccagagacaggccctgaatctgagagccaggcttcttctgggatctgagccctgacaatcaggcagccctcctgccaccacacacaggc

SEQ ID NO: 975502 - DNA, 120 bp, Artificial Sequence
  ENSG00000284669_25 (sequence is synthesized)
actgacaaccccccactcaactggccacagttatccacacgctcaggtcacactgtgcaaatccaggaaaggccacctcacccctgggcaccaagtaaccaaaggctgtttttgagaagt

SEQ ID NO: 975503 - DNA, 120 bp, Artificial Sequence
  ENSG00000284669_26 (sequence is synthesized)
gggggcggggcttgaaaacgtcacagcaactcctctgtccacctcagcagtcctaccagtgccccaggcctcaacccaagccagtcttagggagggggcacctttagctgcctccatccc

SEQ ID NO: 975504 - DNA, 120 bp, Artificial Sequence
  ENSG00000284669_27 (sequence is synthesized)
ccttcaggaatctgaagaatgtgtcctttaacctcagagccccaggccttggccagtccccccaaaacacttggggtcacatgacccctgtccctcaggaacttcctgggagaaggggag

SEQ ID NO: 975505 - DNA, 120 bp, Artificial Sequence
  ENSG00000284669_28 (sequence is synthesized)
ggcacctcccagcacctctagcccccactgaaaaaccagcctgggtggccctgagagggcagaccgaaagccttggcacctcctccccaaccatccctctgaaggagagctgggggaggg

SEQ ID NO: 975506 - DNA, 120 bp, Artificial Sequence
  ENSG00000284669_29 (sequence is synthesized)
gacggctcctcggctttggcctccaggacctggcactggataggtgccaaatgtttgctggctacatgaggcacttgttcctgcagaagggaaactgcacctgacaatgactgcttcctc

SEQ ID NO: 975507 - DNA, 120 bp, Artificial Sequence
  ENSG00000284669_30 (sequence is synthesized)
cacctaagtggggccttcttccctctctcattcattcattcaacaaatacacactaagctcacatatgtgccaaacactgtggcaggcactcgcgcatgcagggagcaagacttatacaa

SEQ ID NO: 975508 - DNA, 120 bp, Artificial Sequence
  ENSG00000284669_31 (sequence is synthesized)
ctgctgccctcttgaagctctgaattgagcagggaggacaaatagagtggggtgctgggatggagggtctgaagggtgggacagggtacggctggggtgaaggtaggtctctccgaggaa

SEQ ID NO: 975509 - DNA, 120 bp, Artificial Sequence
  ENSG00000284669_32 (sequence is synthesized)
ggaatgtaggcagagttccagataggggctccgcatgggtaaggaacaggaggagggaccagcacagtgtgatcggaggaggggcagcccgcgaggctgagcctgggctccagggcaggc

SEQ ID NO: 975510 - DNA, 120 bp, Artificial Sequence
  ENSG00000284669_33 (sequence is synthesized)
tttacctcgagggcacggcaagccacagaaggcttaagtagggagtgacaatgccagatttgcattttaaaaacgtggctcagcaccgggagtggagggggtgtgaccggttggaggtgc

SEQ ID NO: 975511 - DNA, 120 bp, Artificial Sequence
  ENSG00000284669_34 (sequence is synthesized)
tgccagggccaggagagatgacaggtcaagggcataggagaaaggcagataccaagatgtggagaaggaagagggcagggctgtcaaggatttggatcgggggagtgcgtgcctgtgaat

SEQ ID NO: 975512 - DNA, 120 bp, Artificial Sequence
  ENSG00000284669_35 (sequence is synthesized)
gggccccggggaggagaaactgaggaaggggaggaagtacgtgctgcggaaggaggagaagtgcgtgggagagagtctacgtgtgcctgcgggtggccggtgtagctgagcccgtgactc

SEQ ID NO: 975513 - DNA, 120 bp, Artificial Sequence
  ENSG00000284669_36 (sequence is synthesized)
acagcagtggcctctgagagtgacggcgactgacaaacagactaaggccaagaaagaggttatatcatgaacccatgacctgactccagacaatgattttgccattccaacttcagagga

SEQ ID NO: 975514 - DNA, 120 bp, Artificial Sequence
  ENSG00000284669_37 (sequence is synthesized)
agctttggaaggagtttaaaccataagcttaccctctcaatcatccactaccccaaggacagaggtgggaaaactcaaaggcacaggctgtactgagaagtttgagcaatggagaagaaa

SEQ ID NO: 975515 - DNA, 120 bp, Artificial Sequence
  ENSG00000284669_38 (sequence is synthesized)
gtggagctctgactgaccttagcccaccacagtcaggctccaagaggggagatggcctgggctgatggctccctttcctctgctggcccttcccttttgggaaaacccccatgtcagaaa

SEQ ID NO: 975516 - DNA, 120 bp, Artificial Sequence
  ENSG00000284669_39 (sequence is synthesized)
agtctcaagtctgtcagactgggagtccccaactcccaacccaaggaagcagccctaggaaaggagaggatgagatttcccaaagctatctcttaccacttccctcccccaatctcatcc

SEQ ID NO: 975517 - DNA, 120 bp, Artificial Sequence
  ENSG00000284669_40 (sequence is synthesized)
ctccatctattggtgagaagcctcctaaagttggcctgaggctcctgagggactggttccaccggagtctttaaccaggaccctatcctccttgggacctgcaatagagataagaatcag

SEQ ID NO: 975518 - DNA, 86 bp, Artificial Sequence
  ENSG00000284664_0 (sequence is synthesized)
gcctcccaggctggaatgtggtgttaccatcacgattcactgtagcctcaacctcctaaggctcaagtgctcctcttgcctcagat

SEQ ID NO: 975519 - DNA, 120 bp, Artificial Sequence
  ENSG00000284664_1 (sequence is synthesized)
atgttgctcaggctggtcttgaactccttgtggctcaaatgatccgcccatctctgcctcccaaagtactggaattacagcctttatttcttttagattttcaatttactgcccctaagt

SEQ ID NO: 975520 - DNA, 120 bp, Artificial Sequence
  ENSG00000284664_2 (sequence is synthesized)
tatttcttttagattttcaatttactgcccctaagttgcaaaatgttctcttagaattatttttatctttgcattctgtatccattctgtatgcatatctatatattctgtatattcctc

SEQ ID NO: 975521 - DNA, 120 bp, Artificial Sequence
  ENSG00000284664_3 (sequence is synthesized)
ctttctaatattgtgtattttcactttctctctttcctttttaaccaggcttgcctgaggcatctattttatctttccaaagaaccagtggttctttttgagacagggtctggctctgtc

SEQ ID NO: 975522 - DNA, 83 bp, Artificial Sequence
  ENSG00000284664_4 (sequence is synthesized)
tgggcaacagagcgcacattttattagtttattttggtttatatgtaatgaatatatatagtatgtttattaaatctgcaccc

SEQ ID NO: 975523 - DNA, 120 bp, Artificial Sequence
  ENSG00000284664_5 (sequence is synthesized)
aaatctgcaccctactttctcttttcccttcttaagtaaatgtgctttttttgtcttttgtttttaaatcagaaaaagagtaagtactattgaatgttcctctgtagcttgtccaataga

SEQ ID NO: 975524 - DNA, 120 bp, Artificial Sequence
  ENSG00000284664_6 (sequence is synthesized)
tttttataagaaatgtttcttttcactgtgttctatgtatttttgtaattttagtgttgatttccattttttggctgaaggtattcagaatttttgtttgtttgttttttgtttttgaga

SEQ ID NO: 975525 - DNA, 120 bp, Artificial Sequence
  ENSG00000284664_7 (sequence is synthesized)
acacacacacacacacacacacacttttcaaaatcaaatataccaagagtcttttattgaaaaggagcagccctcttctgtacctctcttatttcccagagggaactctttaactctttt

SEQ ID NO: 975526 - DNA, 120 bp, Artificial Sequence
  ENSG00000284664_8 (sequence is synthesized)
tctcttatttcccagagggaactctttaactcttttagctgtttctgatagtaacttccattttcctaaacaattttaaactgccttatctcgagttatctatattagacatgttgttga

SEQ ID NO: 975527 - DNA, 120 bp, Artificial Sequence
  ENSG00000284664_9 (sequence is synthesized)
tttcctgttatatgatagatgaaatttcatctctcataccactttcctacctgctcctttcatcttcccaatctggttatattgatattttaagctaaatgcataatcagcatttacttt

SEQ ID NO: 975528 - DNA, 120 bp, Artificial Sequence
  ENSG00000284664_10 (sequence is synthesized)
accgtgatactaaatgtttacaaaagcatgaagtactatattcttggtacattttctttcttgtattgcattttatttttcctacagttaataccttccttatattttcatacgtttaat

SEQ ID NO: 975529 - DNA, 120 bp, Artificial Sequence
  ENSG00000284664_11 (sequence is synthesized)
tttcagtgttcatttatcaaggtttttttcctgcctaaatctgtatcagatgatcctttagtctttaaaaatctcccattttttctctcccaaagtccttcattcccttgcttcagtctg

SEQ ID NO: 975530 - DNA, 120 bp, Artificial Sequence
  ENSG00000284664_12 (sequence is synthesized)
gattttactctgtgggcctgagcacagccatgatgccatgactttccttctctaatctcctggttaggtttcattgtttgccgaatcacatttcttcctcttttttggtttcctttctta

SEQ ID NO: 975531 - DNA, 120 bp, Artificial Sequence
  ENSG00000284664_13 (sequence is synthesized)
ttttactggaacacatcctccaatggcttcctaagaaatggtgccttggagagcgacattttttgaggtccttgtgtgaatgacaatgtctttttttgtttgaatcatcatactcaattg

SEQ ID NO: 975532 - DNA, 120 bp, Artificial Sequence
  ENSG00000284664_14 (sequence is synthesized)
atagctgggtttagactttattttcacacacggacttcattgtcttctaatctctagggttgttattgaggaaaatatgccattctgattcttgttccttaatatgttatttcttgtaat

SEQ ID NO: 975533 - DNA, 120 bp, Artificial Sequence
  ENSG00000284666_0 (sequence is synthesized)
cgaaggggcgtgaacagctttgcaccatgtgactctttttgatgatagtcaccagcaataccttctggggacggtacaaccacggaacctacagtcgctggatcaagctctccctgccca

SEQ ID NO: 975534 - DNA, 120 bp, Artificial Sequence
  ENSG00000284666_1 (sequence is synthesized)
gtgctgtgaatcatgactggagtgagggaaaactgtataaatggctgcaaaccaagcccactggttacagacagtgtctgctagctgtagaccacgcctgttggttacaaaccaagtccg

SEQ ID NO: 975535 - DNA, 120 bp, Artificial Sequence
  ENSG00000284666_2 (sequence is synthesized)
gggcacaagacagtccccatgactaagaatgacccaaccacaaacgccggcagtgctgtggtgaaggagccacgcaggagaatggaggtggtaaaagcaggctcaccggggtcaaactgt

SEQ ID NO: 975536 - DNA, 120 bp, Artificial Sequence
  ENSG00000284666_3 (sequence is synthesized)
ccagttttaagttctggatccaacttttacgaatgctatggacttggaaaattataacctttcaccgagcctcagtttccccatctgtaaataatgggatgataacggcacctgcctcct

SEQ ID NO: 975537 - DNA, 120 bp, Artificial Sequence
  ENSG00000284666_4 (sequence is synthesized)
gatgcagagttggctcggcgcagggcagccagggcagcatccccagccctctgcacctccggacggtgagagctccctgcttaataacgagccgggcccggggacacttaccctctgtct

SEQ ID NO: 975538 - DNA, 120 bp, Artificial Sequence
  ENSG00000224079_0 (sequence is synthesized)
caacaacggaacccaggggacaggactgcatcaactacaaccagacggcgtagacggcagcacacggccctcggcaaatcagaggtgctcagtgaccacagccaccatgacagcagggcg

SEQ ID NO: 975539 - DNA, 120 bp, Artificial Sequence
  ENSG00000224079_1 (sequence is synthesized)
gggcggggggcaaggaagcagcgctgggagacttggagacaccccaaaaaacgccttcctcagaaacactgctgtgcaagaacctgcaaatccctaaggcgtctgtgtccgatggccccg

SEQ ID NO: 975540 - DNA, 120 bp, Artificial Sequence
  ENSG00000224079_2 (sequence is synthesized)
gccccatgctctgaggtcgcgcaggtgtccaaggccaggaggggcaccgaggagacgaagaagaaacagcacagcagctggggaggtaggaacagcagagtctgagtcaccaaagcccgg

SEQ ID NO: 975541 - DNA, 120 bp, Artificial Sequence
  ENSG00000224079_3 (sequence is synthesized)
cagctccagcggctgagtccaccaagccaggacaggcccaaggaccagagggcgaggtgattcacagtggagctcggaaagacccatccatgcccagcgccttgtcaaaaaccacagggg

SEQ ID NO: 975542 - DNA, 120 bp, Artificial Sequence
  ENSG00000224079_4 (sequence is synthesized)
tcttggtgacaagcaattgagggaggccaacatggcagagccagggctgcaaaatcggctggaataagcatcagacctgctagaagggttttctgtgcctgttttcggtgagcacagaac

SEQ ID NO: 975543 - DNA, 120 bp, Artificial Sequence
  ENSG00000224079_5 (sequence is synthesized)
aactgaaggaagcgcgggacagacacaagggcgggcctcggtgccacggctggccttgggcagagggaaatgctttgtgtactttctctgggaagcagcagccccagcgcggcctcggcg

SEQ ID NO: 975544 - DNA, 120 bp, Artificial Sequence
  ENSG00000224079_6 (sequence is synthesized)
tcctctgccgccaactgctccgtgaccgctgggcgtgtgtgcggggacatgggagcaacttcacagtggtgggaagtttctctcctaaaacgaaagcttctctatactacagattggccc

SEQ ID NO: 975545 - DNA, 120 bp, Artificial Sequence
  ENSG00000288321_0 (sequence is synthesized)
ttttgcaaacccaggtcagagtggaaaattcccctagggctcaggctgtgagaaacatcctgccgggcaagtcctaagcccaaccgcctgatctcaggaaattcctcacttagcaacagc

SEQ ID NO: 975546 - DNA, 120 bp, Artificial Sequence
  ENSG00000288321_1 (sequence is synthesized)
taaccaccctgcccaccccacttcacaacaagcccagatctctcccacccggacctaaacttacccagtctgtaagcgggggcgggctctggccttagttggtgtccccctccgcgggtg

SEQ ID NO: 975547 - DNA, 120 bp, Artificial Sequence
  ENSG00000288321_2 (sequence is synthesized)
tttgttcggtaaacctgtgttgctgtagagccgcctccgtccgtttttcctcccgttcctgcgctaacaatgacattataccaaatgtaactgatatactaatacatgctgctgtaataa

SEQ ID NO: 975548 - DNA, 120 bp, Artificial Sequence
  ENSG00000288321_3 (sequence is synthesized)
ggagtcctcatttaagttactgtgtccaaaatgagtttccagtggtcctccatcttgatacatgctccagtatcacttatacagaaagggtggacatgggaaccaggaagaagaacttga

SEQ ID NO: 975549 - DNA, 120 bp, Artificial Sequence
  ENSG00000288321_4 (sequence is synthesized)
taacaggaccttgcataattaatcgattgatcactgaacttcattgtcatatttctacggtcaaattttgggagaaagctgtcgcaaattcatcagagtgtagcaatgcccgagttgtaa

SEQ ID NO: 975550 - DNA, 120 bp, Artificial Sequence
  ENSG00000288321_5 (sequence is synthesized)
ctgagttccatctggataaaaccaagatagaaattgtgcctcataattgatattttgaggattccatgaagtaataaatttattatgtgctaagaaatatgtgcctggtcataaatttaa

SEQ ID NO: 975551 - DNA, 120 bp, Artificial Sequence
  ENSG00000288321_6 (sequence is synthesized)
ttaagtgacaaaatatttcagaatatggcaattttggaacagtaaaatatttattgatggaattcagaatagctgacatttggagattaaggacccttcattctattttctatgaaaagg

SEQ ID NO: 975552 - DNA, 90 bp, Artificial Sequence
  ENSG00000288321_7 (sequence is synthesized)
aaaggaggctgggtgcaggaggccgaagcaggcggattgcttgaactcaagagctcgagtccggcctgggcaacatggtgaaaccccatc

SEQ ID NO: 975553 - DNA, 87 bp, Artificial Sequence
  ENSG00000288321_8 (sequence is synthesized)
tcacatcctggcccaaaacaaaaaggagtccctaggtagcaaactgcaacttaacttcatatgaaaacaatctacaactgtaacata

SEQ ID NO: 975554 - DNA, 120 bp, Artificial Sequence
  ENSG00000288321_9 (sequence is synthesized)
aacttaacttcatatgaaaacaatctacaactgtaacatattctgtaacaaataactgagactcagttaattatagcagctgggctttaaccagtcatgggatgacaactgatcagacca

SEQ ID NO: 975555 - DNA, 120 bp, Artificial Sequence
  ENSG00000288321_10 (sequence is synthesized)
tgtatctgtataaggcaagtgcttcatcacaccgtggctgaatcagacaagagacacacctcttattacagaagaaatatcaagtattccacaagaagagagttcaagtggaaagagaaa

SEQ ID NO: 975556 - DNA, 120 bp, Artificial Sequence
  ENSG00000288321_11 (sequence is synthesized)
agtcatgttacataagattgtctctaatcagtcaaccactggagtcagataaaaatagaagatgaaaatctgtcagatgaaatttcactttggaaatattgtttgtgttcttcaaatgta

SEQ ID NO: 975557 - DNA, 120 bp, Artificial Sequence
  ENSG00000288321_12 (sequence is synthesized)
taagatttgtgtttctatccacaaattgtgtatacagcagcacattaaaagaggtagtttcagctgatgttccccaaagtgcatatcgtatgtcccaatgtttctgcatatcctatactt

SEQ ID NO: 975558 - DNA, 120 bp, Artificial Sequence
  ENSG00000288321_13 (sequence is synthesized)
taatatctaaattatataaagaccccatctgttgcacaaaaatttgtccttctgaagatttctgagaattcctaggaaacgcttgcatgtctcaattatttctggtcatgtcttcctctg

SEQ ID NO: 975559 - DNA, 120 bp, Artificial Sequence
  ENSG00000288321_14 (sequence is synthesized)
aatttttgtttcaaactgcccttcattatttctggccatatcctttagccccagccatgccttcatggttcctctctgcatattttgcctgtgaaaatgaactcagcctttaactttatt

SEQ ID NO: 975560 - DNA, 120 bp, Artificial Sequence
  ENSG00000288321_15 (sequence is synthesized)
ttctaagatagtgagaacacaaaactgcttgaggatgcataggtaacttacaacttagaaaataaagttataaatttaaatttatagattcaatgctatttccctcaagctacaactgac

SEQ ID NO: 975561 - DNA, 120 bp, Artificial Sequence
  ENSG00000224078_0 (sequence is synthesized)
ccaccatgcccagccaagtacagactttttctttggttattattccctaaaacagtacagtataacaactatttacgcagcatttacattgtattcagcatcatgagtaatctagaaatg

SEQ ID NO: 975562 - DNA, 120 bp, Artificial Sequence
  ENSG00000224078_1 (sequence is synthesized)
atttcctgcatataggaggatgtacataggttctatgccaatagtgcacagtgctcgctgtgtttaaagaaatatcctaggtatagaataaataattttgaagtcagtgtgttgagaaaa

SEQ ID NO: 975563 - DNA, 120 bp, Artificial Sequence
  ENSG00000224078_2 (sequence is synthesized)
cactgacatggatagaaaatattctgtctagaatagaaaaaacaatagaatagaaaaagttctatctgtatcagtctgatcaaagatgtgagcataattattcttgtcatacatatagtc

SEQ ID NO: 975564 - DNA, 120 bp, Artificial Sequence
  ENSG00000224078_3 (sequence is synthesized)
taatgaatgtctaaagtgaattcttataactgcttgtaacaaaatatttcatttggcaaatgttatttcacaactttcctaattgcccatgtactttgtagattggttttcacagaattc

SEQ ID NO: 975565 - DNA, 120 bp, Artificial Sequence
  ENSG00000224078_4 (sequence is synthesized)
catggactttaactgctgaaccaatgatgcactgattttgtcacttgtaccagctaacgcatctgggaggcaacaaaacaatactctcctgaggttaatgtggaccaaaaactagatttc

SEQ ID NO: 975566 - DNA, 120 bp, Artificial Sequence
  ENSG00000224078_5 (sequence is synthesized)
atataaaagagtttattccttctacttgaggtgtgacatgaaggaaagtaatggaaataattctgccctcccattctcaagggccagggggaattcaaatattgaacggaagtgattttg

SEQ ID NO: 975567 - DNA, 120 bp, Artificial Sequence
  ENSG00000224078_6 (sequence is synthesized)
gaattgcatggaattctcactgccatcccaaagaaatgctgatcttgtcactcttacctgtttcattccctgggggcagaacaaaaggacgcactccaaagatcggcatgaaccaagaac

SEQ ID NO: 975568 - DNA, 120 bp, Artificial Sequence
  ENSG00000224078_7 (sequence is synthesized)
tgggtttcatataaaatattttattctgtcctcttgagatgtgacatgagaaaagtattgagaatacttctatcacctcatcttcaagaatccgtaggaattctcccatggtggacttta

SEQ ID NO: 975569 - DNA, 120 bp, Artificial Sequence
  ENSG00000224078_8 (sequence is synthesized)
cggttaacctgaacaggtcttggaaaaaggactttaaacattctcctgttctgtggaataagtatacttttttctggacatacaccttgtcagtgagttccatgtgatactagagttgca

SEQ ID NO: 975570 - DNA, 120 bp, Artificial Sequence
  ENSG00000224078_9 (sequence is synthesized)
tagatttttaacctttacgccaatgaagatctgaggcaaacattgccccttttttagaagtttgcatttgtcactgataactgtaataattgatcttgttgaaaagcctgggaaatgaag

SEQ ID NO: 975571 - DNA, 120 bp, Artificial Sequence
  ENSG00000224078_10 (sequence is synthesized)
atctgatatgtcacttttaccggcttcctcaactgaaaaagaatacaatgaaacacgctgagaatttttgtgctttctcagtcttgctgatgatctttctatgggcctgaagcgtggaga

SEQ ID NO: 975572 - DNA, 120 bp, Artificial Sequence
  ENSG00000224078_11 (sequence is synthesized)
atgcggtgcccacatgccactgggtcctcagcagtaccacctgattggaagtgatattggtggaagacaacattttgccgcttggaattctcacctccacaccaaagaagtactgttttt

SEQ ID NO: 975573 - DNA, 120 bp, Artificial Sequence
  ENSG00000224078_12 (sequence is synthesized)
gtcatttgcaccagcttctttctccaggaaagatcaaaacgatgcactgcaagtgtgattggtccagatagctgccttatccaactgcctcctttggaccacttcatcatgggacagctt

SEQ ID NO: 975574 - DNA, 120 bp, Artificial Sequence
  ENSG00000224078_13 (sequence is synthesized)
gatgcaatctacttgacaagaccctggaaccccacacccctcatggaaccagtgtccacctcccagtcacagtgtgaccccagggaactcttgcctgcttgctttaaacccaccacttaa

SEQ ID NO: 975575 - DNA, 120 bp, Artificial Sequence
  ENSG00000224078_14 (sequence is synthesized)
gcctgcttgctttaaacccaccacttaaaagtctccacagaaaacctgtttgaatagtacccttgacccaataagggcattggcccctgggtgtctctctctctctctctctctctctct

SEQ ID NO: 975576 - DNA, 120 bp, Artificial Sequence
  ENSG00000224078_15 (sequence is synthesized)
ccctgacctctgcgtgtggactccaggcatgccatatacccctcaggacctgaagcaaaagaatgaattaaagaaaactccagagaatgagctgacaacctactccctggtcagtggctc

SEQ ID NO: 975577 - DNA, 120 bp, Artificial Sequence
  ENSG00000224078_16 (sequence is synthesized)
tccatgcctacctgtggtctcttggacacccttgcagatgacttcctgggaactcttctgggagtgaatgttatcagcaaattcccaaaacaacaccccttagacaaaaagcctcctcac

SEQ ID NO: 975578 - DNA, 120 bp, Artificial Sequence
  ENSG00000224078_17 (sequence is synthesized)
ctatgcattgcctagaccacccactaaaggtgatggccacaaagaggtggatttgttgagttggtgccattccttctactgccagcttcaccaaaacaatgacacagtcttccttccgca

SEQ ID NO: 975579 - DNA, 120 bp, Artificial Sequence
  ENSG00000224078_18 (sequence is synthesized)
tggagactcttctctttcctgtgttgcagtggatgcctcctgcagataagaaatgcttaactgagaaatgctcatgttgggatatcatcgatgagactttaatttgggcatggtgactgt

SEQ ID NO: 975580 - DNA, 120 bp, Artificial Sequence
  ENSG00000224078_19 (sequence is synthesized)
ttcccttgctgccacttgactcaatcccaggagcctcagtagaggatataatattacacaagatgctcaaaatggtggaattgctcagtgctcccataaatatacatttataattttcat

SEQ ID NO: 975581 - DNA, 120 bp, Artificial Sequence
  ENSG00000224078_20 (sequence is synthesized)
ttgccacatggtaaactgaaaaatacagactatattaaaaagaaactgcatgattttttttcaaaaattcaaagcatatttaaataatatataaattaaatgccctcctctcttccaatt

SEQ ID NO: 975582 - DNA, 120 bp, Artificial Sequence
  ENSG00000224078_21 (sequence is synthesized)
ctgtccctatagttttcctctattaagtgaactacatgcattcttttagtggatagatgcacacaaacacacaagccattatggggaaggatccacgtgtgtggccatattgtaacacat

SEQ ID NO: 975583 - DNA, 120 bp, Artificial Sequence
  ENSG00000224078_22 (sequence is synthesized)
ttttctgcaaatcacctctttcatttaacagcccttattcaatggcctttttctttttcagtagtacatacacatctgtgtcatttgttgaatgacgacatgaatgttttgtagataaaa

SEQ ID NO: 975584 - DNA, 120 bp, Artificial Sequence
  ENSG00000224078_23 (sequence is synthesized)
tataattaaatgttttaagcatttctcactcatagatatttatgttagcaccaaatttctgtgcaatgaacctccctatatatcagtaattttgcatttgtctataatatcataataaat

SEQ ID NO: 975585 - DNA, 120 bp, Artificial Sequence
  ENSG00000224078_24 (sequence is synthesized)
atgttaccttgaagagaaatgatgacgtaaaaattaagttcagttggattacgctgaggcccagcctaggtaacaattgtgagacaagaagtttggatttcttagtttccttccattggg

SEQ ID NO: 975586 - DNA, 120 bp, Artificial Sequence
  ENSG00000224078_25 (sequence is synthesized)
gactttattttgggattctggcaatggaatcttattgcgaaacttgttttgcacgcttctatctgtgtgcttctaagtaaactataaattctgattctttaagtgctatttaagtttcct

SEQ ID NO: 975587 - DNA, 120 bp, Artificial Sequence
  ENSG00000224078_26 (sequence is synthesized)
acaattcctaattttcttggatatttggcactaagacccttgctctttttctctcattggatgatttagtaagtcctactggcactattctattgagtggagataaggatgactgaggaa

SEQ ID NO: 975588 - DNA, 120 bp, Artificial Sequence
  ENSG00000224078_27 (sequence is synthesized)
gagtactctttggcttgttgacaccagcacagctgacacacccagatatctgtttggtctcctgtgaactttcaaccaggatttaaggatgccactctggttaaaagctgaaacaacttc

SEQ ID NO: 975589 - DNA, 120 bp, Artificial Sequence
  ENSG00000224078_28 (sequence is synthesized)
aaggaaacttcagggaaaagagaaggcctggaatctgatcctccacttcagagaacaggggtggtggagtctatggcccttctccttgaatctgagtgaaattagtgagtctttcaatcc

SEQ ID NO: 975590 - DNA, 120 bp, Artificial Sequence
  ENSG00000224078_29 (sequence is synthesized)
aactatctacagaggactggttccaggactcccatggatcccaaaatccaaggatgcttcgaatcccttatataaaatggcatggtatttgcatataacctacatgcatcttcaaatatg

SEQ ID NO: 975591 - DNA, 120 bp, Artificial Sequence
  ENSG00000224078_30 (sequence is synthesized)
ttaaaccatctctagattacttataataccaaatacaatgtaatgctatgtaaacagttgttacaatgtattgtcaaagacaagctctccttgccaatccctgaccaaatgagagattca

SEQ ID NO: 975592 - DNA, 120 bp, Artificial Sequence
  ENSG00000224078_31 (sequence is synthesized)
tgagcaaaataaatagttgctgatatttaaggcactaagtttggggcaatgtattacacagcaataaataactggaacagcatagtaaattctagttaaaaatactaaactactaagttt

SEQ ID NO: 975593 - DNA, 120 bp, Artificial Sequence
  ENSG00000224078_32 (sequence is synthesized)
tagttaacatacatgctcaagttaagggtgtggtatactaacaactgcaacttactttgaaaagcataaaaaaagacactagaagaagacaggatggatagatggacaagatagaagaca

SEQ ID NO: 975594 - DNA, 120 bp, Artificial Sequence
  ENSG00000224078_33 (sequence is synthesized)
ataacaaatagaacaaaatgttgtgaaattatattctacaattattttaaagtctgtgtggtttgaaaaattgtacgataaaatgaagagtgaaataaagacatttccatacaaacaaaa

SEQ ID NO: 975595 - DNA, 120 bp, Artificial Sequence
  ENSG00000224078_34 (sequence is synthesized)
gtactctgaaggctcctgacccccagatgagcatccttgtgtccgttaacttctgtgtttatgaacaggtgaggccagagacaggcagacagcagatgtattgcagggagctggatgaca

SEQ ID NO: 975596 - DNA, 120 bp, Artificial Sequence
  ENSG00000224078_35 (sequence is synthesized)
tggcccttggaacctgtgcacatgcctgcctttctgatgcacgtccatgttttctctgcacctccccggtggtgttggtataaaaagcaggcttacatcagcaagggatgattgtcgtct

SEQ ID NO: 975597 - DNA, 120 bp, Artificial Sequence
  ENSG00000224078_36 (sequence is synthesized)
catgcgatcctgggagatggcagaagtcccgggacacatggagtgtgggctctttcggaggctgttggatccctcctgaatgtgttgtggccatggaagtaaggccagtggctacgaggg

SEQ ID NO: 975598 - DNA, 120 bp, Artificial Sequence
  ENSG00000224078_37 (sequence is synthesized)
acagtcttcatcttgggagatccctagagagggcagggagccccttgacatgtggaatgtgatctctgttgggtgctggtggatcccacaggtggtctggcatggaagaaggccagaggc

SEQ ID NO: 975599 - DNA, 120 bp, Artificial Sequence
  ENSG00000224078_38 (sequence is synthesized)
tgcgatggatcatctttgtcttgggagattcctggagatggtggggagcccctgggcacgtgcagcatatgtggcgtgggcttcttcaggtgctggtggatccctcaggatgcttttcaa

SEQ ID NO: 975600 - DNA, 120 bp, Artificial Sequence
  ENSG00000224078_39 (sequence is synthesized)
ggtttttctatgagttctgttaaagagtctgaaaatggagcgtagaagacatgcttcgatttccaggatggttgtgttttccagagaggcggaggtaaaccactggcgcagccctgcctc

SEQ ID NO: 975601 - DNA, 120 bp, Artificial Sequence
  ENSG00000224078_40 (sequence is synthesized)
ccacagataattccgggtgcagtgtttcatatctagacttggacttctatcctaccatacttctttgtgtgcagttcattgtggaaccagcacagattttcatacgaaagttatttcttt

SEQ ID NO: 975602 - DNA, 120 bp, Artificial Sequence
  ENSG00000224078_41 (sequence is synthesized)
ttaacctcaaaaagtgacagaatggagtgtatcatgaaaaagtctgacatcaaaacctcaaaatgtgatattgattgggtgagatagaattccatggaatttcattgccaaaccagtgaa

SEQ ID NO: 975603 - DNA, 120 bp, Artificial Sequence
  ENSG00000224078_42 (sequence is synthesized)
gtgctaattttgacatttgtaccagctaacgtagctgtgaagaaacacaccaatacacttctaaggacagcatagaccaagatctaggtttcatatggatgaatttattcttccctttga

SEQ ID NO: 975604 - DNA, 120 bp, Artificial Sequence
  ENSG00000224078_43 (sequence is synthesized)
ggcaagacaagaaggaaagaaagtattgggaataatgctgccctcccatcctcaagggccagtgggaactctaatattgattgggtgagatacaattccatggaattttaccactgaacc

SEQ ID NO: 975605 - DNA, 120 bp, Artificial Sequence
  ENSG00000224078_44 (sequence is synthesized)
aacattgcccttgaaatatgacagaaagtatcagaaataattataccattccatgctcacaggccagtgggaattctcacatgtgattggtccagatagctgccttatccaactgcctcc

SEQ ID NO: 975606 - DNA, 120 bp, Artificial Sequence
  ENSG00000224078_45 (sequence is synthesized)
ttgccttcaaaaatgtggttaacaactttatcttcaaatggcaatgaatgagattgccagctttcctacagcctcacagacaatggattttataaatatttaacatttttgccaatgtga

SEQ ID NO: 975607 - DNA, 120 bp, Artificial Sequence
  ENSG00000224078_46 (sequence is synthesized)
tcacccaaactattgtcttaaattgtatctcttttgtttttgagtttggtcattttttcatgtttattagccatctgtattttttaatttcttctttatgtccaattttgtgggtgggag

SEQ ID NO: 975608 - DNA, 120 bp, Artificial Sequence
  ENSG00000224078_47 (sequence is synthesized)
gaggatttagtctcttcctgatttcgaagagctcatttactatttcgggaaataagatttggattgtcaaccattatagctattttttacacacttttcaactttgtttttgttataaga

SEQ ID NO: 975609 - DNA, 120 bp, Artificial Sequence
  ENSG00000224078_48 (sequence is synthesized)
atgtgtatgattgttacatgtccaagtataaccatgttcgcttttatggcttctgagtttcatgtcatttttggaaagatatatatattgagtccataaaacccttcacctatgttaaat

SEQ ID NO: 975610 - DNA, 120 bp, Artificial Sequence
  ENSG00000224078_49 (sequence is synthesized)
tctaattcttttgtgtttttttaattcaaattcttaaatcatgagaaatttttttgttttgaaatcttaaagttgccaagttacttgccattacttgcgattatttgccaataattgccc

SEQ ID NO: 975611 - DNA, 120 bp, Artificial Sequence
  ENSG00000224078_50 (sequence is synthesized)
atttatctgtaccgccatcttgcgcatatgctgtactctcatctgtgactggctccatttttgttctgtggatttgtgtgtctcttcttctgcctcctgtctcgtgtctgctcgttggaa

SEQ ID NO: 975612 - DNA, 120 bp, Artificial Sequence
  ENSG00000224078_51 (sequence is synthesized)
gaaattacagtttagactgcaatttcatcaactttaataaatcaattgaggggagaattggtttttaaaaatattaagtaagtcttcgtatccaaggacaaggtatgtcttttcttattc

SEQ ID NO: 975613 - DNA, 120 bp, Artificial Sequence
  ENSG00000224078_52 (sequence is synthesized)
aataattttaattactgttaatattttcactgtggtgatgggagtttttcttttaatttattttcttgttcattttttgtatctaaagtttttgttttgttttgttttgggggtaagttg

SEQ ID NO: 975614 - DNA, 120 bp, Artificial Sequence
  ENSG00000224078_53 (sequence is synthesized)
tcaccttactgtttcttgttgcttttcagattttttcaaagtatagactaaatccttcacaaatatttaaagtttttattttcccccttcatattgatcctgattttagttatgttgaca

SEQ ID NO: 975615 - DNA, 120 bp, Artificial Sequence
  ENSG00000224078_54 (sequence is synthesized)
aagtccacagactgttactatcagaacacttgaacagttatggaaatattacctacccttgatttaatcagagtttaatggtatgcttctttggtttgactggcacattgtcgctggtca

SEQ ID NO: 975616 - DNA, 120 bp, Artificial Sequence
  ENSG00000224078_55 (sequence is synthesized)
tttcctcccaaagaccaccagaaagagctatgatcaagcaaagctgagtttgttaaacttacctgcagcaagggaaaacaccaccttgatagggtttaataatgtttcaaaatcaagaaa

SEQ ID NO: 975617 - DNA, 120 bp, Artificial Sequence
  ENSG00000224078_56 (sequence is synthesized)
tgaggctttggggtctgggcagggaactaattagaaatgggcaaaatttgtcatgcaataccttgtgggaaagtgagatgaggttcttaatgtgagtattgatggtgaaatcattttcta

SEQ ID NO: 975618 - DNA, 120 bp, Artificial Sequence
  ENSG00000224078_57 (sequence is synthesized)
ggtgagctgtttgcctatataaagatgttatcaatgacagaagaactatttgcctagataaacaaactgaatttatttattggtttacagttttatcttgctgggcaggactctgctggg

SEQ ID NO: 975619 - DNA, 120 bp, Artificial Sequence
  ENSG00000224078_58 (sequence is synthesized)
ggtggtatcaggtcttattcccaataggtaagttatttggatatgggtggtcttaatcatcaatgtgtaaaatgctgattttaagtgcgaaatactttgtctaccatgttaggaaagtct

SEQ ID NO: 975620 - DNA, 120 bp, Artificial Sequence
  ENSG00000224078_59 (sequence is synthesized)
gccaccttttatcttttttaaggaattttaatcaaaaccaggtggtagatataatcaaattgttttgcagaatcaattttcctgttctctttaaagacttttatcactgtgaattaattt

SEQ ID NO: 975621 - DNA, 120 bp, Artificial Sequence
  ENSG00000224078_60 (sequence is synthesized)
actattattgcaacttcctttaattccttgaatgaacagaccctactggttttaaaaatgttttattcttttaatttactacttaattgtgggtattttaatttgatttggaatttttac

SEQ ID NO: 975622 - DNA, 120 bp, Artificial Sequence
  ENSG00000224078_61 (sequence is synthesized)
aagtatacaactaagtgaaattgatctgtgatttttcttttttgtgctatttttgtcatgttttgatatcagatattctggttgtgttaaaataattttgaggattttcttcttatactg

SEQ ID NO: 975623 - DNA, 120 bp, Artificial Sequence
  ENSG00000224078_62 (sequence is synthesized)
tgttctagagtgggtaaaaaagccctagtctcactatcagtgtttaagtgaacacatcagtgacatcatctggactctcctttgtttttgctggtttggagttaggacatctagaagttt

SEQ ID NO: 975624 - DNA, 120 bp, Artificial Sequence
  ENSG00000224078_63 (sequence is synthesized)
ttttctttttttcctttttttgtatggttattgcttgttctttgttttgtgtcaaatttaacctgttttctcttagcaaatcacagctcatgcagattttcaaacacattagccttgtta

SEQ ID NO: 975625 - DNA, 120 bp, Artificial Sequence
  ENSG00000224078_64 (sequence is synthesized)
tacaaagtgttctttcatcattctattaaatttccattttcattccagttatagttatttctgctgtgcctttgttaatgaataagtttaaacagtggatgtttagcatcactagccttc

SEQ ID NO: 975626 - DNA, 120 bp, Artificial Sequence
  ENSG00000224078_65 (sequence is synthesized)
cccttccatctcccttaatcaggaccttggtataatttatcaggtattttttaaggttctaatttacttatatatattgtttctgtattcttttgtttcttttcttaataaattcttaaa

SEQ ID NO: 975627 - DNA, 120 bp, Artificial Sequence
  ENSG00000224078_66 (sequence is synthesized)
gcttggatcgatgatgagtccccaaaaaaaacattccttggaaaagctgaacaaaatgagtgaaaactcataccgtcattctcatcggaactgaggtccagcacgttgccttccccgggg

SEQ ID NO: 975628 - DNA, 120 bp, Artificial Sequence
  ENSG00000224078_67 (sequence is synthesized)
actgtaggagtgagggacaacttccactgattcccataggttccaccacccaaggcatccacagccaaagtctcccatcaaatgctcattaggaacattccctttttgtgaggtacacag

SEQ ID NO: 975629 - DNA, 120 bp, Artificial Sequence
  ENSG00000224078_68 (sequence is synthesized)
gtaggagagtcctggggggaacggctgctctgtgatggcctggtggccatggaagcagacagaaatatcgcaggcctagggtagtgtgcgcctgatcttggcttggtgagctcctaggaa

SEQ ID NO: 975630 - DNA, 120 bp, Artificial Sequence
  ENSG00000224078_69 (sequence is synthesized)
gggagacgcggacctcgtggcaggcgtctctgagcagaggactgagtccttgttttcttgccggggagagcacaaggcccaggcctcaggcagatgttggtcctgatttttgattagctg

SEQ ID NO: 975631 - DNA, 120 bp, Artificial Sequence
  ENSG00000224078_70 (sequence is synthesized)
aggacaagggagtgccaagggtgatgggggacagtgtataacaaagggtgttgtgacagagagccaaagcctctttggccctccacccagcatccagtcatggaggccccccagcaggga

SEQ ID NO: 975632 - DNA, 120 bp, Artificial Sequence
  ENSG00000224078_71 (sequence is synthesized)
tttcttcatcccctgagccgtgagatgcccctggtgctatggtggaagcctggactggaaggtactccacagaagaggtggtagggggcttatgtggacatgtgtgtcatcagcagtctt

SEQ ID NO: 975633 - DNA, 120 bp, Artificial Sequence
  ENSG00000224078_72 (sequence is synthesized)
gggctgttgttcagcgttgatgggctttccatttatttctctagtggatgacaagttggccagcagaggtgtcagagggcaggttccagggaatacaagggtcagacttgtgctcctggc

SEQ ID NO: 975634 - DNA, 120 bp, Artificial Sequence
  ENSG00000224078_73 (sequence is synthesized)
ccttggtcacttctcgtcttcctgacagagtagtgggctccactgttgggcacatcttcctggaagtcgtctcttggcccgccattgccgagcggccacacctgctgcagctcgtgtgag

SEQ ID NO: 975635 - DNA, 120 bp, Artificial Sequence
  ENSG00000224078_74 (sequence is synthesized)
caaatatggctctggatcctctttcctgctttgaaagcagcttccatcctgaaggcgtccagagggggcagttatcatgggacacccgccatatgctggcaaggaagatggtcagttctt

SEQ ID NO: 975636 - DNA, 120 bp, Artificial Sequence
  ENSG00000224078_75 (sequence is synthesized)
ctgagccacaaaggcccccaacatcctggagttggtgttgcctagcatccacggtgcgccccctgctggtggatggctcaggatggggcagttgccgtgggaggcccgctgcctgctgga

SEQ ID NO: 975637 - DNA, 120 bp, Artificial Sequence
  ENSG00000224078_76 (sequence is synthesized)
aggaagatggtcagttcttctgaaccacaaaggccctgcagagtcctggagtctgtgtggcctggcttccagggttcacctcatgctggtggattgctcaggatgggtgccgaaggtctt

SEQ ID NO: 975638 - DNA, 120 bp, Artificial Sequence
  ENSG00000224078_77 (sequence is synthesized)
taaggtcgtcagctcacctactgcccagcctgtggtgtcaaatgtcctgcctcttcaaatgtgtttggatcgatgatgagtccccccaaaaaaacattccttggaaaagctgaacaaaat

SEQ ID NO: 975639 - DNA, 120 bp, Artificial Sequence
  ENSG00000224078_78 (sequence is synthesized)
gagtgaaaactcataccgtcgttctcagcggaactgaggtccagcgcgttgcctccagcagggactgttggagtgagggagagcttccactagtccctataggttccaccacccagggca

SEQ ID NO: 975640 - DNA, 120 bp, Artificial Sequence
  ENSG00000224078_79 (sequence is synthesized)
tccgcagggacagttgccgtgggaggtccgctgcctgctgtcaaggaagatggtcgatgcttctgagaaacaggccctgcgggttcctggatttggtgtggcctggcatccacggtgcac

SEQ ID NO: 975641 - DNA, 120 bp, Artificial Sequence
  ENSG00000224078_80 (sequence is synthesized)
cccgtgctggcgggtggcccaggacggggcagttgccttgagaggcccaccgcctgctggcatgacagatggtcagttcttccgagcagtggaatctccatggagtcgtggagtcggtgt

SEQ ID NO: 975642 - DNA, 120 bp, Artificial Sequence
  ENSG00000224078_81 (sequence is synthesized)
ggcctcgcatccacagtgcaccctgtgctggtggatggctcaggacacagcagttgtcatgagaggtctgccgcttgctggcaaggaagatggtcaattcttctgaccaacagaggctgc

SEQ ID NO: 975643 - DNA, 120 bp, Artificial Sequence
  ENSG00000224078_82 (sequence is synthesized)
cttgagtcctgatttggtgtggcctggcatctatggtgcacccaatgctggggcagttgccgtgggaggcctgccgtctgctgaaaggaagatggttgatgcttctgagcaatgaaggcc

SEQ ID NO: 975644 - DNA, 120 bp, Artificial Sequence
  ENSG00000224078_83 (sequence is synthesized)
ccatggagtcctggattcggtgtggccttgcatccgtggtgcaccccgtgctggtggatggctcaggacggggcagttgccatgggaggcgcaggcctgctggaaggaagatggtcgatt

SEQ ID NO: 975645 - DNA, 120 bp, Artificial Sequence
  ENSG00000224078_84 (sequence is synthesized)
ctcccaagcaacaaaggccacgtagagtcctggtttcagtgtggcctggtatccacagtgcaccccgtgctggtgggtggctcaggacgcacactcatttcctctgcaccttcctggtgt

SEQ ID NO: 975646 - DNA, 120 bp, Artificial Sequence
  ENSG00000224078_85 (sequence is synthesized)
cattggcatggaaggaaggcccttgtccaagaaggatggtcttcgtcttgtgtgatctttgagatgccatgaggcccctggatacaaatggtgtgggctcctttggaggcttttggattt

SEQ ID NO: 975647 - DNA, 120 bp, Artificial Sequence
  ENSG00000224078_86 (sequence is synthesized)
ctcctgaatgtggcgttggtatggaaggaaggccagtgaccgcaagggatgactttgatcttgggagatttttggagatggcaaagtgcttctaaacatgtttggcatggtctccttcag

SEQ ID NO: 975648 - DNA, 120 bp, Artificial Sequence
  ENSG00000224078_87 (sequence is synthesized)
gctggtggatacctcaggatggtggcgttggcatggaaggaaggactgtgtctgtgagggatgatcatcctctcatgtgatccttggagatgccaggaagccccttgacacatgtggcat

SEQ ID NO: 975649 - DNA, 120 bp, Artificial Sequence
  ENSG00000224078_88 (sequence is synthesized)
gggctccttcagaggcttttggatccgtcgtgaatgtggcatgggcatgcaaagaaagacagaggctgcaagggataaacttcatcttgggagatccctggagatggcagggaacccatg

SEQ ID NO: 975650 - DNA, 120 bp, Artificial Sequence
  ENSG00000224078_89 (sequence is synthesized)
gacacatgtggcatgggctcctttgggtgccggtggatcccttcatacggtaaagccagagttgggtatcaaccagatacactgcaggggatcagaggacatggcctttgtgtactgcac

SEQ ID NO: 975651 - DNA, 120 bp, Artificial Sequence
  ENSG00000224078_90 (sequence is synthesized)
atctgtcagattttctcaagcacacccgtgtttcctcttcacctcccacgtggaagtgatgaattggccaggaccatgttggtgagggacaatcatcatctcatgttaacctcagagaag

SEQ ID NO: 975652 - DNA, 120 bp, Artificial Sequence
  ENSG00000224078_91 (sequence is synthesized)
ccaggaagctcctggacacacatggtgtaggcttccttggaggctgttggatctctcctgaatgtagtgttggtgtaaaaggcaaacccgtgtcatgagggatggtcatcatcttgtgtg

SEQ ID NO: 975653 - DNA, 120 bp, Artificial Sequence
  ENSG00000224078_92 (sequence is synthesized)
atccttggagatggcaggaagccctggacatacatggtgtgggggctcctccagaggctgttgggatcctcctggatgtggtgtgggcatggaaggaaggccagtggagacaatggatga

SEQ ID NO: 975654 - DNA, 120 bp, Artificial Sequence
  ENSG00000224078_93 (sequence is synthesized)
tcttgttcttagcagatcactggatgtggcagggagtcctaggacatgtgtggtgtgggcttcttcaggtgctggtggtgttggcatgaggaaaggaggtatcttcgagggacaatcttc

SEQ ID NO: 975655 - DNA, 120 bp, Artificial Sequence
  ENSG00000224078_94 (sequence is synthesized)
ttcttgtgcgatccttggagatgccatgaggcccctggacacatgtggtgtgggctcctttggaggctgttgtatcccttctgaatgtggcgtgggcatagaaggaaggccagtggccac

SEQ ID NO: 975656 - DNA, 120 bp, Artificial Sequence
  ENSG00000224078_95 (sequence is synthesized)
gagggacaatcttggtcttgggagatcctggaaatgatagggagtcccttgatatgtgtggcatgggctccttcaggtgctagtggattccttaggatggtggtgttggcatgaaaggca

SEQ ID NO: 975657 - DNA, 120 bp, Artificial Sequence
  ENSG00000224078_96 (sequence is synthesized)
ggcttgtatcatgaggaatgattgtcatcttgtctgattcttggagatggcaggaagcccctggaaacacatggtgtggactctttcacaggctgttgaaaccctcctgaatgtgaggcc

SEQ ID NO: 975658 - DNA, 120 bp, Artificial Sequence
  ENSG00000224078_97 (sequence is synthesized)
atttgtaccagttaactaacttgggaggaaacagaacaacacactcctgagggtaaaatggaaactctgagagtttggttggcggcatctatataccatagaaacagagcctgggaagca

SEQ ID NO: 975659 - DNA, 67 bp, Artificial Sequence
  ENSG00000224078_98 (sequence is synthesized)
ctaggtgagagttttggaagaggatgctgggatcctgaggtcccctggtagagccaattgtattttg

SEQ ID NO: 975660 - DNA, 120 bp, Artificial Sequence
  ENSG00000224078_99 (sequence is synthesized)
tgggatcctgaggtcccctggtagagccaattgtattttgggctggagacctggaagccctgaagggcatctgggaggcccaaccctgtctctgtgctcctccatgaggcagccctggct

SEQ ID NO: 975661 - DNA, 120 bp, Artificial Sequence
  ENSG00000224078_100 (sequence is synthesized)
ccccatgtaggcttggtgatggccttcctgttccctgggggtggggcacatgggtagctcctccctgacccccattctctcctgtgtctttcagtgagctcttccccacaggtgggcccc

SEQ ID NO: 975662 - DNA, 120 bp, Artificial Sequence
  ENSG00000224078_101 (sequence is synthesized)
ctggcattgactagcatcgtgagctcttctgcccagcagcctccctggcagtgaccagcatagatgctgaccctggaggaagaattgcactgggcccactggccccgggaaaatgtccct

SEQ ID NO: 975663 - DNA, 120 bp, Artificial Sequence
  ENSG00000224078_102 (sequence is synthesized)
cagccaggtgcttagcccctggtaatctgaagctcaggcccttcctgatgccctggtctcctgcactgagctgtgtgagctcttcagcccaggtgggctccctgacactgatgcgcatag

SEQ ID NO: 975664 - DNA, 120 bp, Artificial Sequence
  ENSG00000224078_103 (sequence is synthesized)
atggtgagcctggaggaagacttgcattgggcccaatggacccaggccagtggccatcagccaggtgcccaccctggtgtgctgaagcgcgggacctacctgttgtcctggtttcctaca

SEQ ID NO: 975665 - DNA, 120 bp, Artificial Sequence
  ENSG00000224078_104 (sequence is synthesized)
ctgagctgagtgagctcttcaacccaggcggggcaccctggcattcaccagcatagactgtgaaatgggaggaagaattgtgttgggcccaatggccctgggccagtatccgtcagcctg

SEQ ID NO: 975666 - DNA, 120 bp, Artificial Sequence
  ENSG00000224078_105 (sequence is synthesized)
gtgtccagcccctggtgtgctgaagctcatgcccttcctggtgccctagtttcctgcactgagcttgtgagctcttttgcccagaagactccctggcattgatcggcatagatggcagcg

SEQ ID NO: 975667 - DNA, 120 bp, Artificial Sequence
  ENSG00000224078_106 (sequence is synthesized)
ctggaggaggacttgtactggggccgctggccccacatcagtgtccgtcatcccggcgtccagcccctggtgtgctgaagctcaggcccttccttgtgccctagtctcctgcactgagct

SEQ ID NO: 975668 - DNA, 120 bp, Artificial Sequence
  ENSG00000224078_107 (sequence is synthesized)
tgtgagctcttctgctcaggcgggtcccctggcattgaccagcatagatggtggccctggaggaggacttgtattggggccactggccccacgtcagtgttcgtcagcctggcatccagc

SEQ ID NO: 975669 - DNA, 120 bp, Artificial Sequence
  ENSG00000224078_108 (sequence is synthesized)
ccctggtgtgctgaagctcaggcccttcctgttgccctagtctcctgcactgagcttgtgagctcttctgcccaggtggtccccctggtcttgatgggcatagatggtgagcctgaagga

SEQ ID NO: 975670 - DNA, 120 bp, Artificial Sequence
  ENSG00000224078_109 (sequence is synthesized)
agacttgcatcaggaccaatggaccctggcaagtgtccgtcagccaggtgctcagcccctggtgcactgaagctcaggcccttcctggccccttgatctcctgcactgagctgtgtgagc

SEQ ID NO: 975671 - DNA, 120 bp, Artificial Sequence
  ENSG00000224078_110 (sequence is synthesized)
tcttctgccaagggggggcctcctggcattgaccaacatagatggtgagcctggaggaagatttgcattgggcccaatggccctgggccagtgtctgtcagccagtttcccagcccctgg

SEQ ID NO: 975672 - DNA, 120 bp, Artificial Sequence
  ENSG00000224078_111 (sequence is synthesized)
tgcactgaagctcaggcctttcctggcatcctggcctcctgcactgagctgtgtgagtgcttctgcccaggcaggccacttggcattgaccggtatagatggtgagcctggaggaagatg

SEQ ID NO: 975673 - DNA, 120 bp, Artificial Sequence
  ENSG00000224078_112 (sequence is synthesized)
tgtgggacccgcaggccgagggccagtgtctctcagccaggtgctcagcccccagtgggctgaaactctgacccttcctggcaccctgctctcctgcactgtgctgtgatggtgagactt

SEQ ID NO: 975674 - DNA, 120 bp, Artificial Sequence
  ENSG00000224078_113 (sequence is synthesized)
ctgttgggcttgcttttcctgggccagtgtccatcagccaggtgctcagccatcggtgcgctgaagctccagcccttcctggtgccctgatctcctgcactgagctgtgatgatgagctc

SEQ ID NO: 975675 - DNA, 120 bp, Artificial Sequence
  ENSG00000224078_114 (sequence is synthesized)
tttcacctaggagggccccttggcattgactggcatagatggtgaccctgaagaaagacttcagttgggcctgaaggccccgggccagtgtccatcatccaggtgctcagctcccagtgc

SEQ ID NO: 975676 - DNA, 120 bp, Artificial Sequence
  ENSG00000224078_115 (sequence is synthesized)
actgaagctcagacccttcctggttccctggtctcttgcactgagctctgatggtgagacttgaggaagacttccactgggcctgcttttcctgagccagtgcccatcacccaggtgctc

SEQ ID NO: 975677 - DNA, 120 bp, Artificial Sequence
  ENSG00000224078_116 (sequence is synthesized)
agtccctggtgcactgaagctccagcccttcctggcgccctggtctcctgaactgagctgtgtgagctcttctgccaagcggttcccctggcattgaccaacatagatggtgagcctgga

SEQ ID NO: 975678 - DNA, 120 bp, Artificial Sequence
  ENSG00000224078_117 (sequence is synthesized)
ggaagacttgcgttgggcccaaaggccctagaccagtgtctgtcagccaggttcccaacccccgatgcgctgaagctcaagcctttcctggcaccctggtctcctgcactgagctgtgtg

SEQ ID NO: 975679 - DNA, 120 bp, Artificial Sequence
  ENSG00000224078_118 (sequence is synthesized)
agctcttctgcccaggcgggccccctggaattgatgggtatagatggtgaccccggaggaaaatttgtgttgggcccactatccctgggccaatgtcagtcagctaggcacccagccccc

SEQ ID NO: 975680 - DNA, 120 bp, Artificial Sequence
  ENSG00000224078_119 (sequence is synthesized)
agtgcgctgaagctcaggaccttcctagtgccctcggctcctgcactgagctctgatggtaagcctggaggaagacttgtgttgggcccacaggccccaggccaatgtctgtcagccagg

SEQ ID NO: 975681 - DNA, 120 bp, Artificial Sequence
  ENSG00000224078_120 (sequence is synthesized)
tgctcagcctctggtgcgctgaaactctgacccttcctggcacactggtctcctgcactgagctgggattttccacctaggaggtccacctggcattgactgacatagatggtgagactt

SEQ ID NO: 975682 - DNA, 120 bp, Artificial Sequence
  ENSG00000224078_121 (sequence is synthesized)
ctgtcggcctcgcttttcctgggccagtgtccatcagccaggtgctcagccccagtgcactgaagctccagcccttcctggcgccctggactgagctgtgtgagctcttctgccaagggg

SEQ ID NO: 975683 - DNA, 120 bp, Artificial Sequence
  ENSG00000224078_122 (sequence is synthesized)
gtcctcctggcattgaccaacataggtggtgagcctggaggaagacttgcattgggcccaatggccctggaccagtgtctgtcagccaggttcccagcccccgatgcgctgaagctcaag

SEQ ID NO: 975684 - DNA, 120 bp, Artificial Sequence
  ENSG00000224078_123 (sequence is synthesized)
cctttcctggcaccctggtctcctgcactgagctgtgtgagctcttcggcccaagtggtccccccggccttaagcggcatagtgagctcttccaaacaggtgggctccctagcattgacc

SEQ ID NO: 975685 - DNA, 120 bp, Artificial Sequence
  ENSG00000224078_124 (sequence is synthesized)
gacagagtgagctctgccacccaggacatccccctggcattgactggcatagatgctgaccctggaggaagacttgtgtcgggcccccaggccccaggccagtgtccatcagccaggtgc

SEQ ID NO: 975686 - DNA, 120 bp, Artificial Sequence
  ENSG00000224078_125 (sequence is synthesized)
tcagctcccagtgcgctgaagctcagacccttcctggcaccctggtgtccagcactgagctgtgtgagcttttccacccaggtgggccccctggcattgaccgacatagatgatgagact

SEQ ID NO: 975687 - DNA, 120 bp, Artificial Sequence
  ENSG00000224078_126 (sequence is synthesized)
ggaggaagacttccattgggcccacttttcctgggccagtgtccatcagccaggtgctcagcccctggtgtactgaagctccagcctttcctggtgccccagtcttctgcactaagctgt

SEQ ID NO: 975688 - DNA, 120 bp, Artificial Sequence
  ENSG00000224078_127 (sequence is synthesized)
gatggtgagacgggaggaagacttgtgttgggcctgctgttcctgggccagtggccatcagcctgttgcccagcccctgaggcgctgaagctcaggcccttcctcacaccctggtctcct

SEQ ID NO: 975689 - DNA, 120 bp, Artificial Sequence
  ENSG00000224078_128 (sequence is synthesized)
gcactagctgtgtgagctcttctgcccaggtggggcccatggccttacacgacataggagcacgcatttcttgaagtcctgcaaaggtgatggtggtccagacaggagagggttccttca

SEQ ID NO: 975690 - DNA, 120 bp, Artificial Sequence
  ENSG00000224078_129 (sequence is synthesized)
gcccaacatagcgcagctcccagctgaaactcggaaggctggtcaggcctcgaggactgcccaggccacatgagggtttggtggccgggagggccaatgatgctctgcgtctgtgttgga

SEQ ID NO: 975691 - DNA, 120 bp, Artificial Sequence
  ENSG00000224078_130 (sequence is synthesized)
tcagtgttcttcatggattccatcacatggtgagccttgaggaagacttgtattgggcccccacaggccccaggccagtgtccgtcagcctggtgctcacccccagtgtgctgaagctca

SEQ ID NO: 975692 - DNA, 120 bp, Artificial Sequence
  ENSG00000224078_131 (sequence is synthesized)
gaccctccgtggcaccctggtctcctgcactgagctgtgtgaacttttcctcccagatgggccccctggcattgactggcatagatggtgagaccggaggaagacttgcattgggcctgt

SEQ ID NO: 975693 - DNA, 120 bp, Artificial Sequence
  ENSG00000224078_132 (sequence is synthesized)
tgttcctgggccagtggccatcagcctgttgcccagcccctgatgcgctgaagctcgggcccttcctcgcgccctggtctcctgcactgagctgtgtgagctcttctgcccaggtgaggc

SEQ ID NO: 975694 - DNA, 120 bp, Artificial Sequence
  ENSG00000224078_133 (sequence is synthesized)
ccatggccttaagcggcatagatggtgagcctggaggaagacttgtattgggaccctacaggccccaggccagtgtctgtcagcctggtgctcatcccccagtgcgctgaagctcagacc

SEQ ID NO: 975695 - DNA, 120 bp, Artificial Sequence
  ENSG00000224078_134 (sequence is synthesized)
ctccctggcaccctggtctcctgcactgagctgtgatggtgagtctggaggaagacttgtgttggacccccacaggccccaggccagtgtccatcagcctggtgctaatcccccagtgct

SEQ ID NO: 975696 - DNA, 120 bp, Artificial Sequence
  ENSG00000224078_135 (sequence is synthesized)
ctggagtttggaccctccctggcaccctggtctcctgcactgagctgtgtgagctcttccacccgggcgggcccccggcattgactggcataggtggtgagcccggaggaggacttgcgt

SEQ ID NO: 975697 - DNA, 79 bp, Artificial Sequence
  ENSG00000224078_136 (sequence is synthesized)
tatgatgatatggaagaaaagcactctttggcctgttgtgactgggacagttgacagcacccaggtgtcctttaatgaa

SEQ ID NO: 975698 - DNA, 120 bp, Artificial Sequence
  ENSG00000224078_137 (sequence is synthesized)
gactgggacagttgacagcacccaggtgtcctttaatgaaaatgctcttgacaccaatgcatcctagcatcacagcttcaggaagccttctcaagtgtgcatggggagtactatgtcttt

SEQ ID NO: 975699 - DNA, 120 bp, Artificial Sequence
  ENSG00000224078_138 (sequence is synthesized)
catcaataatgaaatcttctgatttgtaagacatgctgccaagagatgtgccattctattataaaagatcagtagcttcctttaccgacgtgtatattctatctagaacattgagctatg

SEQ ID NO: 975700 - DNA, 120 bp, Artificial Sequence
  ENSG00000224078_139 (sequence is synthesized)
gaagactcccacctaagggaattagttttacaccttcagataaagactgctgagaagagcaccctctggtgttgtcacagaggcaagtgctaccgcacaggcatgctgcagtgaatttaa

SEQ ID NO: 975701 - DNA, 120 bp, Artificial Sequence
  ENSG00000224078_140 (sequence is synthesized)
ctgatcctctgtccctgcaaccgttgtttaaggatgctattctgaaaagactgtggaggaagaaaaccctttaccctgttgttcagggagaaactgacaccactcaactgcctggcactg

SEQ ID NO: 975702 - DNA, 120 bp, Artificial Sequence
  ENSG00000224078_141 (sequence is synthesized)
tactttagaaatgtttaagaaattttttcaagtaaaaggaaaataacaccagcaacaaacttggatctacaaaaaggaatctccacaaagaaaaataaataaaaatggtaaatatgaagg

SEQ ID NO: 975703 - DNA, 120 bp, Artificial Sequence
  ENSG00000224078_142 (sequence is synthesized)
taaatataaaggaatgttattcttagtttttaagtttcttcgtaagacaactggcctttgaaagaaatagtttcaaacgctgctgtggaatctataacacatatagaagtaaaatgttaa

SEQ ID NO: 975704 - DNA, 120 bp, Artificial Sequence
  ENSG00000224078_143 (sequence is synthesized)
gatcataataccaaaaagaatgagggagagtaaatggatgtatactattccaaaattcttacattatacattaagaggaataatatttttgaaggtagattgaggtaagttaaaggtgca

SEQ ID NO: 975705 - DNA, 120 bp, Artificial Sequence
  ENSG00000224078_144 (sequence is synthesized)
tattgtaaatcctagaagtatcactggggggaaaaaaaacagagggacaagctaataatggagacaatacaaaattccaaaaatgctccattaaccgaaaagaaggcagaaaaggaagaa

SEQ ID NO: 975706 - DNA, 120 bp, Artificial Sequence
  ENSG00000224078_145 (sequence is synthesized)
aagattagacaaatagaaaacaaatagtgtcttaaacacaattatattgccaactgcaataaatgtaaatggacttaatcaaaaagcaacgatcgtaaaaagtcaatctgaaagcaagat

SEQ ID NO: 975707 - DNA, 120 bp, Artificial Sequence
  ENSG00000224078_146 (sequence is synthesized)
gcaactatatgctatctaaaagaaagacattaaatgaccaataagctgaaaataaaaacacagcaaaatgatataatgtgcaaaaattaatcataagaaaggaatggatacactaatatc

SEQ ID NO: 975708 - DNA, 120 bp, Artificial Sequence
  ENSG00000224078_147 (sequence is synthesized)
aaagtagactttagataaggaacattaccagcgataaacagagacatttcataatgataaagacatcaattaatcaaggagatctaacagtcctaaatgtgaacacacctaaggacacaa

SEQ ID NO: 975709 - DNA, 120 bp, Artificial Sequence
  ENSG00000224078_148 (sequence is synthesized)
gatgagtcctccaaaaaaaacattccttggaaaagctgaacaaaatgagtgaaaactcataccgtcattctcatcggaactgaggtccagcacattgcttcctctggggcctttactagt

SEQ ID NO: 975710 - DNA, 120 bp, Artificial Sequence
  ENSG00000224078_149 (sequence is synthesized)
gagggacaacttccactagtccctataggttctaacacccatggcgttcacaggtgaaggtctcctgtcatattacaaacattccccccactcccctcccaaaaaaaggaacatttcctc

SEQ ID NO: 975711 - DNA, 120 bp, Artificial Sequence
  ENSG00000224078_150 (sequence is synthesized)
tgtgtcaggtacacaggtcagagagtcatagggtgactggctgctctgtgatggcatagtggccgtggaagtggatggaaatgtcgcaggcttaggggagtgtggggctggcctcggctt

SEQ ID NO: 975712 - DNA, 120 bp, Artificial Sequence
  ENSG00000224078_151 (sequence is synthesized)
atcctcattgaactgaggtcccagcatgctgctacattggagggcaaggagagggggccaacatctgtttgttgacatggtctacaccttggcttaggatgtggtcctctttgggcaaat

SEQ ID NO: 975713 - DNA, 120 bp, Artificial Sequence
  ENSG00000224078_152 (sequence is synthesized)
ttgatatgtgtggcatgggctccttcaggtgctagtggattccttaggatgggacaaacactgtgcgtggatcgatgatgacttccatatatacattccttggaaagctgaacaaaatga

SEQ ID NO: 975714 - DNA, 120 bp, Artificial Sequence
  ENSG00000224078_153 (sequence is synthesized)
ggatcgatgatgagaataattgtctgaggatgctgagggactcattccagatgtcaatctgaggtccagatgtgtggccctccaataggacaaataagactctcagagcctggctctatt

SEQ ID NO: 975715 - DNA, 120 bp, Artificial Sequence
  ENSG00000224078_154 (sequence is synthesized)
tggggatccctcagtgacaacatagtacctctgtgagcgtgccttttctatctctccgaagagggcattagcatcctgtcttatgagtcagtatgcactttagtatggttagtgacccaa

SEQ ID NO: 975716 - DNA, 120 bp, Artificial Sequence
  ENSG00000224078_155 (sequence is synthesized)
gactcactttattttgttcattttgagcagagaattgtagatagatacatatatgggaaatatgttcttgattaacaaatgaaaaaatgaaaaagtttcagtcaagaaaggtcaaggaac

SEQ ID NO: 975717 - DNA, 120 bp, Artificial Sequence
  ENSG00000224078_156 (sequence is synthesized)
tgtgatgtatagtgaaggcagggaacactgcatgcctgtattaaatattgacaaaggaaccaattttagtgctttgttatttttactgttgagtattttctgagaccatttctttttctt

SEQ ID NO: 975718 - DNA, 120 bp, Artificial Sequence
  ENSG00000224078_157 (sequence is synthesized)
ctattttgttttgctgaggtagaggagggctggaatgaggtcctccacttcagaaaataggggtgagtagttaaaccaacatcctttggaattcatatacgtcatgcgttccatgccaca

SEQ ID NO: 975719 - DNA, 120 bp, Artificial Sequence
  ENSG00000224078_158 (sequence is synthesized)
tcctgagatctttttgttgatttttttagtggcttactggataatatctaaatactgtatattttactttggtgagtctctccaccttcatttctgaatcattgtcctttacatttttat

SEQ ID NO: 975720 - DNA, 120 bp, Artificial Sequence
  ENSG00000224078_159 (sequence is synthesized)
atttttattctatttgaattttgcatgaaatgacaaatgtagaattttgcccaatttattttatttattcatttatttatttgggaagacaaagtctctctctgtcacccaggctggagt

SEQ ID NO: 975721 - DNA, 120 bp, Artificial Sequence
  ENSG00000224078_160 (sequence is synthesized)
ccagtcagagctcacttcagctcttcaccctgtagcccttaactcctgggctcaagtgatcctccaccctcagcctcccaagtatctaggaatacagttgtcatgggaggccagccgcct

SEQ ID NO: 975722 - DNA, 120 bp, Artificial Sequence
  ENSG00000224078_161 (sequence is synthesized)
gctggcaaggaagatggttgattcttctgatcaatggaggccctgcagagtcctgtagtcactgtggcctggcatccatggtgcacccaatgctggtggatggcttaggacggtacgcct

SEQ ID NO: 975723 - DNA, 120 bp, Artificial Sequence
  ENSG00000224078_162 (sequence is synthesized)
cacctgagagggcggctagagacagtgtctgctcaggacatcagatgtcccgtgaggaggagtgtgtactcacaccaggggagttgactgaggcagttgctgtgggaggtgtggtaactg

SEQ ID NO: 975724 - DNA, 120 bp, Artificial Sequence
  ENSG00000224078_163 (sequence is synthesized)
ctggaaggaagatgctcaattcttctgagcaacgaaggccacacggagtcctggattctgtgtggcctggcatccatggcgcactgtgtgctggcaggtggctcaggacggtaagcattt

SEQ ID NO: 975725 - DNA, 120 bp, Artificial Sequence
  ENSG00000224078_164 (sequence is synthesized)
atggcatggcgagttcctctcctagagtggatagtctgtgctcattgctcagtggcatcgctctagtggggccgaaggtctttaaggtcattggctcacccactgcccagcctgtggtgt

SEQ ID NO: 975726 - DNA, 120 bp, Artificial Sequence
  ENSG00000224078_165 (sequence is synthesized)
cgccccctgctggtggatggctcaggatggtaagcattcctccgccgcacatgctgagtgggggtgggatttccaagacctgcaaggagctgtttctcagcaggccactgatggcatggc

SEQ ID NO: 975727 - DNA, 120 bp, Artificial Sequence
  ENSG00000224078_166 (sequence is synthesized)
gagttccactcctaaagtgaacggtctgtgcccattgttcagtggtgcagctctggcttccccagcgtgcggagggtttttaaggtcatcggcttgcccactgcccagcctgtggtgtca

SEQ ID NO: 975728 - DNA, 120 bp, Artificial Sequence
  ENSG00000224078_167 (sequence is synthesized)
aatatcctgccccttcaaatgtgcttggatcgatgatgagtcccccataaaaacattccttggaaaagctgaacaaaatgagtgagaactcataccgtcgttctcatcggaactgaggtc

SEQ ID NO: 975729 - DNA, 120 bp, Artificial Sequence
  ENSG00000224078_168 (sequence is synthesized)
tgcatggatctcatcacacgtgaccatgaaggacgagcaagcatgagctggcaccagccacccccttctccgcgtggagggtggtcacatgtcctccacctgtgcccccagatgatgaga

SEQ ID NO: 975730 - DNA, 120 bp, Artificial Sequence
  ENSG00000224078_169 (sequence is synthesized)
ggatcgatgatgacttaaagatttatctaatttaaatctgaacaaaatgagtgaccaaaacacttctgtaccacttctgtgagctgaggtccagcacagagaccactccagtcaaacatg

SEQ ID NO: 975731 - DNA, 120 bp, Artificial Sequence
  ENSG00000224078_170 (sequence is synthesized)
tgttgcctggagttgcaactagttggtcagttagaagcaaccacagggactggggtatttgaaaaccacttgagtgcatttattagaggaaacgaattttacatttgtgtataaaaattc

SEQ ID NO: 975732 - DNA, 120 bp, Artificial Sequence
  ENSG00000224078_171 (sequence is synthesized)
tgttctcacatttgcctgagctactgattgatcttttgagggtgatgagatggtcaaaatccaaggatatgatgagtttttacttctcattttctttttttttttattatactttaagtt

SEQ ID NO: 975733 - DNA, 120 bp, Artificial Sequence
  ENSG00000224078_172 (sequence is synthesized)
atccaatttttaatacatgtaattccctggattatttttgttgtgttattaaataacttagaattttttttacaaagtctgttgaaccaaacactgtaaggcattaataacctggtgagt

SEQ ID NO: 975734 - DNA, 120 bp, Artificial Sequence
  ENSG00000224078_173 (sequence is synthesized)
tgaacaaaatgagtgaaaactctataccgtcatcctcgtcgaactgaggtccagcacattgctcttacaggggctggagtgagggccaagtttcatttgttgctgcaggttgcaccaagg

SEQ ID NO: 975735 - DNA, 120 bp, Artificial Sequence
  ENSG00000224078_174 (sequence is synthesized)
gagggccaagtttcatttgttgctgcaggttgcaccaaggggtttgttcagttgtaggaggggctccctttctgcaaggggtagtcacagggttgtgagatctctcataaataggaaatt

SEQ ID NO: 975736 - DNA, 120 bp, Artificial Sequence
  ENSG00000224078_175 (sequence is synthesized)
gttttagggacttctctctgcaaggtaacacacacacaccgtctgtaggactatgtgaatgtgaaggtgacatgggaagacttagcctgtagcctgcctctggtggccatatttgtcctt

SEQ ID NO: 975737 - DNA, 120 bp, Artificial Sequence
  ENSG00000224078_176 (sequence is synthesized)
gagtcttagctctgggttccatcattcccttgaggaaagacaggtgtttgtgcttgggaagagagcacaaagccccacctttgctgttttttccactcattttcatcattgttcaaggac

SEQ ID NO: 975738 - DNA, 120 bp, Artificial Sequence
  ENSG00000224078_177 (sequence is synthesized)
attgcagttccggttttatccataaccagggaagccagagacaggcagatagcagatatgccatagggggccagatgacacggccctcatgacctgtgaatgtgtctgcttttttgaagc

SEQ ID NO: 975739 - DNA, 120 bp, Artificial Sequence
  ENSG00000224078_178 (sequence is synthesized)
atccctcctgaatgtaagtgattccttcttaaagcatgctgattttcctcatttgcaggggcaaggactggatcgatgatgacttccatatgtacattccttggaaagctgaacaaaatg

SEQ ID NO: 975740 - DNA, 120 bp, Artificial Sequence
  ENSG00000224078_179 (sequence is synthesized)
cagcatactgctcatcaggggctagagagagggacaacatccgtttgttgacaagggctgtgtcaacacttgggatggggtcgtctttgggtgaagtggagtagctgggcattttggact

SEQ ID NO: 975741 - DNA, 120 bp, Artificial Sequence
  ENSG00000224078_180 (sequence is synthesized)
tctgtggctgagagacagcttagttgaagcacttccctctgcgcagctatgtgtgtccttgattcaaactccttggctcctgcactccccagaggaagacagtggcttctgcatggggac

SEQ ID NO: 975742 - DNA, 120 bp, Artificial Sequence
  ENSG00000224078_181 (sequence is synthesized)
accacacaatgttgttcctgtgcacttctttggttcactttcaccctcatttggggacgtggcagttcccatggtgtttaggtagcattgagggcaggcagtcctcaggaggatgttgat

SEQ ID NO: 975743 - DNA, 120 bp, Artificial Sequence
  ENSG00000224078_182 (sequence is synthesized)
gctgatttgctttctgcagaggagccagagagggtatccatgttgaacttgtatatccataggaggaaaccagtcccatggcccctgaagggtcctggcagtgggaaggggagaggtctg

SEQ ID NO: 975744 - DNA, 120 bp, Artificial Sequence
  ENSG00000224078_183 (sequence is synthesized)
catgtgcatgtactggacagcatattccatgtgggtcatggagtgatgactgtgggcctctttcgggcattgtagcaggcccccatttcatttcatgatgacctcggggtgctgggacag

SEQ ID NO: 975745 - DNA, 120 bp, Artificial Sequence
  ENSG00000224078_184 (sequence is synthesized)
gaatgtgattgcgggtccacgtgcttctgcaactcctcagactgacttggtttggaaggtctgtgttcaggaccctctgtgagatgcttgtctccattaggcatttgagcttatatcggc

SEQ ID NO: 975746 - DNA, 120 bp, Artificial Sequence
  ENSG00000224078_185 (sequence is synthesized)
ccagggtttctacctatcgtaggttgtgcatactttgcctctgaaccactcaggcacctcgatgcagtcaacgtgcccgattataagagtgtgacttcccatatcctggtgatctctact

SEQ ID NO: 975747 - DNA, 120 bp, Artificial Sequence
  ENSG00000224078_186 (sequence is synthesized)
cggaaacatggtccaggaaggtctctgtgcttaaataccttagtagctcgtgatgttaggttattttctaattcctcctaattcttcccaggagtcttctttgtgaaatagtcatcttgt

SEQ ID NO: 975748 - DNA, 120 bp, Artificial Sequence
  ENSG00000224078_187 (sequence is synthesized)
tgtaggacagggctggtatccacaggcagtgatgcataggttttgcactgcgcggccatgttcaaaggcaagtgccttaaaatgtatggtgttctcagccacagtgccttagaagccatg

SEQ ID NO: 975749 - DNA, 120 bp, Artificial Sequence
  ENSG00000224078_188 (sequence is synthesized)
tgggattcagtgtgtctggtggtcctctgagctgcacctgtgaggaagacgctgaggtagaggttaagttgttattgaacgtttttctcaatctgaaaagtgttcaagcagcccagggtg

SEQ ID NO: 975750 - DNA, 120 bp, Artificial Sequence
  ENSG00000224078_189 (sequence is synthesized)
aaaagtcttcaagactgaaggaaaattgccttttgtactggaagagtttttccccaaaactctcctcatttaaatagccctgtggcttgtgtcttctctgatgaccaagaggagggcttt

SEQ ID NO: 975751 - DNA, 120 bp, Artificial Sequence
  ENSG00000224078_190 (sequence is synthesized)
tgagtcagtgatggcaaatgagtggttttgagagagttcttacacttagggctctgtagcttgatggtgccttcaaaattaacacgtgcctgctatcttcattcctgggtagacccatac

SEQ ID NO: 975752 - DNA, 120 bp, Artificial Sequence
  ENSG00000224078_191 (sequence is synthesized)
acccatcccaaaaggggagtagcctgtgggaagcacatatgggatataccacagtgagtcgagtggaatggcccttttgacatgtgtacctgcctcccgttcttaagcacacccgttttt

SEQ ID NO: 975753 - DNA, 120 bp, Artificial Sequence
  ENSG00000224078_192 (sequence is synthesized)
ctgaacaaaatgagtgaaaactctataccgtcatcttcgttgaactgaggtccagcacattgctccaacagtgggtagatagagagggaaaacttccatttgttgacgcaggttccattg

SEQ ID NO: 975754 - DNA, 120 bp, Artificial Sequence
  ENSG00000224078_193 (sequence is synthesized)
cttccatttgttgacgcaggttccattgaggggtttgtccaggcttaggatggggtcccctttgggcaaagggagtcacaggggagtgcggcctcctgtgcacaggagattccttgtgtg

SEQ ID NO: 975755 - DNA, 120 bp, Artificial Sequence
  ENSG00000224078_194 (sequence is synthesized)
aaggatttacctctgtgagagcagggtagcacacataactatgcaggagcaggtgaatgtgcaggtggcacaggaagagttagatggcagcctgtctctgcacagcgaggtttgacttgt

SEQ ID NO: 975756 - DNA, 120 bp, Artificial Sequence
  ENSG00000224078_195 (sequence is synthesized)
cctagctctgcattccctcatcccttagaggaagttggtttcttcagaagacttaaatttgtggaattcagtagaatattatccacataatgttcccagtgaatgctaggcatatcaccc

SEQ ID NO: 975757 - DNA, 120 bp, Artificial Sequence
  ENSG00000224078_196 (sequence is synthesized)
aagatggccaggcctctggccataaaccatagtaaatagtagggtgtgcatatatccattagggagaacctgaaaggtccttttttggccctccaaggtgaatgcctgcaaaagcaagcg

SEQ ID NO: 975758 - DNA, 120 bp, Artificial Sequence
  ENSG00000224078_197 (sequence is synthesized)
tgctgccccttcgccttgccaggtggagtctgactgattttttgccactgctgccaccacaggccacctggagccccagccagtttgaggaaagtggctctgcttgattttccttttttc

SEQ ID NO: 975759 - DNA, 120 bp, Artificial Sequence
  ENSG00000224078_198 (sequence is synthesized)
tttttttttcctctttttttctccatttctgacttcagcaggtgggacttggagcttctgcttctgcagccacagaagactccccagtttggagggctgtggttgtgggctccctaagca

SEQ ID NO: 975760 - DNA, 120 bp, Artificial Sequence
  ENSG00000224078_199 (sequence is synthesized)
tctctctgcagagcctctttgttttccattttacccaccatgtcaataatttaacacagtggcggaggagttcatgtctcttcctatttgtcattactcttctaactttcacagctgtac

SEQ ID NO: 975761 - DNA, 120 bp, Artificial Sequence
  ENSG00000224078_200 (sequence is synthesized)
tcggctactggtcagaataagagaaaaagcagtggaaccaggaggatcctacaagaaatattccatttcacttttgtttgtgcatataccttttctgtttaaatgtggacttcgatttga

SEQ ID NO: 975762 - DNA, 120 bp, Artificial Sequence
  ENSG00000224078_201 (sequence is synthesized)
tatgcttccagtgcagacacagatcccatatgtaagagagtatggagttgcatagaaagaagacttgtcattttcctgtactgttggtgttctaatctgtcttcgtggtttttgcctctt

SEQ ID NO: 975763 - DNA, 120 bp, Artificial Sequence
  ENSG00000224078_202 (sequence is synthesized)
ctggctttagaagatacaccaacatggttttgcaacatagcctcttcttattttagtaagggaccaaatgtgcatgtcagtaacaggtgttaccttgaattgggatcagtgcttgtgtga

SEQ ID NO: 975764 - DNA, 120 bp, Artificial Sequence
  ENSG00000224078_203 (sequence is synthesized)
ctatattcagtgatgtcattttctgtcacactcaagtcacaaaatatttaaccacttatttttttatctctggaggaataatccaaaagattgtactggtaaagccagaacaatttccaa

SEQ ID NO: 975765 - DNA, 120 bp, Artificial Sequence
  ENSG00000224078_204 (sequence is synthesized)
accttgttcttgagctgtccggttgccacagggtcggacctggaggctgcagaccatcgtggccctttgcagtgttcggaaacatatgcgctccccccaaaaaaacattccttggaaaag

SEQ ID NO: 975766 - DNA, 120 bp, Artificial Sequence
  ENSG00000224078_205 (sequence is synthesized)
ctgaacaaaatgagtgaaaactctataccgtcatcctcgtcgaactgaggtgttgtggccatggaagtaaggccagtggctacgagggacagtcttcatcttgggagatccctagagagg

SEQ ID NO: 975767 - DNA, 120 bp, Artificial Sequence
  ENSG00000224078_206 (sequence is synthesized)
acattgtaaacatacagtgtatgaagagaagaaaacagtgaactagcacatacaaggaactggaactggttccatcattatcagtattttgccatatttactttgtgtttattttaagta

SEQ ID NO: 975768 - DNA, 120 bp, Artificial Sequence
  ENSG00000224078_207 (sequence is synthesized)
ttttcaaataagctagagaaatcttaacgcttcttattctcccataaacatttttacaattttatttttgaatgtgtatgtatacacattcgtatgcttttatattgttctataactttc

SEQ ID NO: 975769 - DNA, 120 bp, Artificial Sequence
  ENSG00000224078_208 (sequence is synthesized)
taaatgcattgatatatagtaattgtataattcaataagtttcttaaaagtaattactatcccattcaggagatagaatatttttattacttgagaacctaccctattgcctctttccaa

SEQ ID NO: 975770 - DNA, 120 bp, Artificial Sequence
  ENSG00000224078_209 (sequence is synthesized)
ccaagcaccttctcaaaaaaacaatgttgtgatttttatgatcatagataagttttgcctgtttggaaattaatataaatggaatcacacagtgtgtgtctggcttcttgcactcatcat

SEQ ID NO: 975771 - DNA, 120 bp, Artificial Sequence
  ENSG00000224078_210 (sequence is synthesized)
aatcatgttgagatttatctgtgctattccctatatcagcagtttaaaaaagtttctatagttgtaatatttcactaaatggttatattgcagtttatctattctcttgttgacggacac

SEQ ID NO: 975772 - DNA, 120 bp, Artificial Sequence
  ENSG00000224078_211 (sequence is synthesized)
ctgagtagtttctagtttttagctgttttgaatgttagcagatctcttatgtaaatacctaaaaattgaattgtttgatcataagacagattttgcttaacttataggaaactgctagag

SEQ ID NO: 975773 - DNA, 120 bp, Artificial Sequence
  ENSG00000224078_212 (sequence is synthesized)
agtcttctaaagagatggacacttttcgcactcccaaccagtgatatgagatttttagttgctgtccatttttgccaacattggaaattgtcagtcttatctattaagtgggtgtgaggt

SEQ ID NO: 975774 - DNA, 120 bp, Artificial Sequence
  ENSG00000224078_213 (sequence is synthesized)
gatattttgttgtgacttcaatttgaaatttgaccacttaagaaggcaaccagtttttcatgaagttatccaattgtaaatcttctttagtaaaatttgtatatttttcccaacttttaa

SEQ ID NO: 975775 - DNA, 120 bp, Artificial Sequence
  ENSG00000224078_214 (sequence is synthesized)
attacaattttgaagtaattttggacttacgggaaatttgcaaaaatagtagagttcctgtgtattctgtacccagctttctggatgttagcattttatataatcattattataacatta

SEQ ID NO: 975776 - DNA, 120 bp, Artificial Sequence
  ENSG00000224078_215 (sequence is synthesized)
ttacatacaatgataattgaaatcaggaaattaatataatactgtcaaccaatctgcagactatattcaggtttttcaagttatgctactaatgtcctttttatctagtccaggatccaa

SEQ ID NO: 975777 - DNA, 120 bp, Artificial Sequence
  ENSG00000224078_216 (sequence is synthesized)
ttcaagatctcttattttatctggcatgtttcctttgccctctctcctgactacaaatctgggagagctccctcagtctttctttgtatttcatttaattgacacatttgagaaatacta

SEQ ID NO: 975778 - DNA, 120 bp, Artificial Sequence
  ENSG00000224078_217 (sequence is synthesized)
gaccataatttggtacactagtcctcaatttggatttgtccgatatttttattattagattaaggttatgcacttttgacaaaagataacacagtagtaacagtgtgcccttttcagtgg

SEQ ID NO: 975779 - DNA, 120 bp, Artificial Sequence
  ENSG00000224078_218 (sequence is synthesized)
atcatctggagtacatgaagttaatgtcttatttctgctgatactaaatatgacgcctttattaaggtagtgtctgccaggtttatccactgcaaagttactgttttcctttctttgtaa

SEQ ID NO: 975780 - DNA, 120 bp, Artificial Sequence
  ENSG00000224078_219 (sequence is synthesized)
ttaatattttatgagaaaataatttgagactatgcaaatattttatttcatctaatttcagtattaattgaagattcttgcctgcagcaattatgattatggtgtttacctagtaatggt

SEQ ID NO: 975781 - DNA, 120 bp, Artificial Sequence
  ENSG00000224078_220 (sequence is synthesized)
ttctatttccatgatactttctctacttactagaatttgactgtaaggaagatctgtccttcttccccatttatttgtactcagttgttattttacatcagtatggatttgtggatatct

SEQ ID NO: 975782 - DNA, 120 bp, Artificial Sequence
  ENSG00000224078_221 (sequence is synthesized)
tattttatggattgttatatattgcaatcattgtttgtgtttgattttcaattttttttctggatttgatcattgggagctccttaaagttggcccctgtgttcttttaatacaacctca

SEQ ID NO: 975783 - DNA, 120 bp, Artificial Sequence
  ENSG00000224078_222 (sequence is synthesized)
taattttttgaccacttcttattttcgggtatcacaagatattctaggtttatcttgtattttccttccccacgcctgtaatcaaccatttcctcaaggggttctagttcttcatattgg

SEQ ID NO: 975784 - DNA, 120 bp, Artificial Sequence
  ENSG00000224078_223 (sequence is synthesized)
aaaatagtatttagaaaccaagatcttggtattaagtgtattaattgctaatggggttttattgcttctaggcctagagctgggagctgtgtgtccgtttacacacatacacatacacac

SEQ ID NO: 975785 - DNA, 120 bp, Artificial Sequence
  ENSG00000224078_224 (sequence is synthesized)
gtccgtttacacacatacacatacacacacacccctatattgtctctattcatttatctatcttaaatatatatactaatagtatgtagaatactatagatagtatatatctatctttat

SEQ ID NO: 975786 - DNA, 120 bp, Artificial Sequence
  ENSG00000224078_225 (sequence is synthesized)
atcataatccatcatcatatggttcattttattcttccctcttggcttatttgtgatttgcttcttcaacagtgagaaacctacctttcattatctacaatatgttttgttatttcttca

SEQ ID NO: 975787 - DNA, 120 bp, Artificial Sequence
  ENSG00000224078_226 (sequence is synthesized)
gtgcagtatacacttaaataatttcagaattgctaaattatacccctttaaaaatgaaatcactaactacagcacagtatttaaatatagttcttttgtctttatccttaacagcgttca

SEQ ID NO: 975788 - DNA, 120 bp, Artificial Sequence
  ENSG00000224078_227 (sequence is synthesized)
gtcaacatactattatttctaaacgtatttaggttagttatcttttttttcctatcccctgccatatggttacattaatcatataatcaagcaggtttttttattgtttatattccattt

SEQ ID NO: 975789 - DNA, 120 bp, Artificial Sequence
  ENSG00000224078_228 (sequence is synthesized)
tgagttccctcaccttttggattattttaactatattttgtatatgtgaaatattactatgtttctaaaaattaggactgtgagaaataccactctcccatcatccctgctacactgatt

SEQ ID NO: 975790 - DNA, 120 bp, Artificial Sequence
  ENSG00000224078_229 (sequence is synthesized)
ctattcctcccttctttccaccctaatctcacccaacccttagagttaactagtctaatagtttctggtttatttttttctcttgttattcttgttcacaagtgggcagatacatgtata

SEQ ID NO: 975791 - DNA, 120 bp, Artificial Sequence
  ENSG00000224078_230 (sequence is synthesized)
ttttatcatatatcacatgtatattttatatccccttccttcttacatgattagtggcatactatagatttttttttgttgcagttttctttttccgcttaatatgtcctggaaatcact

SEQ ID NO: 975792 - DNA, 120 bp, Artificial Sequence
  ENSG00000224078_231 (sequence is synthesized)
tcatgtgtattcaaagagatattcctcattctgtcatgcttagtgcttaactccatggatgcaccacaatttattcaacccctctgctctatgagaattgtttgcaatatgtgtaaagta

SEQ ID NO: 975793 - DNA, 120 bp, Artificial Sequence
  ENSG00000224078_232 (sequence is synthesized)
tcacactacaaatagttttacattggattgtttatttgctcttcgtttggaagtgttctttgtattactgggacatacatttcttgttcaatatatgtgttgcaaaggtttctttcatta

SEQ ID NO: 975794 - DNA, 120 bp, Artificial Sequence
  ENSG00000224078_233 (sequence is synthesized)
agtatcttagcctgcctgccttcctttccatttcctttctttttcttttctttcttctccttttaatgctgttatgctctaaattttaaaatggcccgaatttgccagtggctcatccct

SEQ ID NO: 975795 - DNA, 120 bp, Artificial Sequence
  ENSG00000224078_234 (sequence is synthesized)
tattgctatttattcttcctctccttttctcccccatctcttttcctttaatttacgtgaaattaacataacgtagccatttagtgcattcaaaatgttttgcaactgccatccttaact

SEQ ID NO: 975796 - DNA, 120 bp, Artificial Sequence
  ENSG00000224078_235 (sequence is synthesized)
agttccaaaacattttcagcaccccaaagacaacccatacccattaagcagtcagtcccaactctctttccccatcttttcatttttgttttttggagtttttttgagacaaagtctcac

SEQ ID NO: 975797 - DNA, 120 bp, Artificial Sequence
  ENSG00000224078_236 (sequence is synthesized)
gctcactgcagcctcaaattcctgggcttatgcaatacttccaccttagcctcccgagcagctaggactacaggcatatgtcaccacaccaggctaatttataaaaaaaattttttagac

SEQ ID NO: 975798 - DNA, 120 bp, Artificial Sequence
  ENSG00000224078_237 (sequence is synthesized)
cacaccaggctaatttataaaaaaaattttttagacacagagtcttgcagtgttgcccaggcttcttgtgtctttcgataaacagacattgaaaatttttaagtccagtatatcagtttg

SEQ ID NO: 975799 - DNA, 120 bp, Artificial Sequence
  ENSG00000224078_238 (sequence is synthesized)
agtctcttatttttagtgcttattacttactattaaatctttgcttactccaggtttgcaaataatagttttctaagttttcttctagaagctttgggacataagtataacatctatctc

SEQ ID NO: 975800 - DNA, 120 bp, Artificial Sequence
  ENSG00000224078_239 (sequence is synthesized)
cattttcaaatgtagttgaagttacttgttttcatcaatctccagttgttgcagaaccatttgatcaaaagatttttctttttctactgaattatctaatgccattgttgaaaataagtt

SEQ ID NO: 975801 - DNA, 120 bp, Artificial Sequence
  ENSG00000224078_240 (sequence is synthesized)
ggccatttacgtatggatcttttttgaactctctgtttttccttctttatgccattctttttcactgaagtttaatagtaaatcttgagattaagtagtgtgagtccaaaattttgttat

SEQ ID NO: 975802 - DNA, 120 bp, Artificial Sequence
  ENSG00000224078_241 (sequence is synthesized)
ttcaaggctttatagaggaaggagatggctacactgggtcctttgtatgttcacttaaattttaaaattatcttgtcaatttcctaaaaagcccaaccgagaaattgattttgattacat

SEQ ID NO: 975803 - DNA, 120 bp, Artificial Sequence
  ENSG00000224078_242 (sequence is synthesized)
caaaactatagataaatttaggggggattgacatcttaacaatgttgagtctgtagttctccatttattaggtcgtctataatttctcatagatgtcttttatggtgtttagtatagaag

SEQ ID NO: 975804 - DNA, 120 bp, Artificial Sequence
  ENSG00000224078_243 (sequence is synthesized)
tttcgttttccagatttgttactattatatgaaaacagtaatattttcacattgcaactgcttttcagttgggttgtcttcttttcagtcttaggagaaaatatgtaatttcttaccatt

SEQ ID NO: 975805 - DNA, 120 bp, Artificial Sequence
  ENSG00000224078_244 (sequence is synthesized)
aagaaagatactagctgttatttttttgtagatgcccattaccaaattgagcaagttttattctagtgccagtttgctgttaatttttataataataatgtgataaatttgctgaatgtt

SEQ ID NO: 975806 - DNA, 120 bp, Artificial Sequence
  ENSG00000224078_245 (sequence is synthesized)
tttctacatttattaatataatcatgttttcccccttattctcttattatgggagactgcattggtcagcttttgaatgttagcccaacattgcattcttgatgtaatccaattggtcac

SEQ ID NO: 975807 - DNA, 120 bp, Artificial Sequence
  ENSG00000224078_246 (sequence is synthesized)
tgttatccttcttgtatatatattactgtattcaatttttctgctagttatttaagagttattcacctatgtccgtgatggccattatcctgtggtttcctttttaaaaattatttttgt

SEQ ID NO: 975808 - DNA, 120 bp, Artificial Sequence
  ENSG00000224078_247 (sequence is synthesized)
cagatgttggcattaggcttcataaaatgtatttagtatagtgctctatttgctagtacacttgacccttgaacaacagacatggagattaggggttcagactcccccatagttgacaat

SEQ ID NO: 975809 - DNA, 120 bp, Artificial Sequence
  ENSG00000224078_248 (sequence is synthesized)
ctgtggacaattgtttgctctccagaaacttaactacgaatagcctactgttgactgaaagccttacagataacataactagtcaattaacacatattttatgttatatgtattacatac

SEQ ID NO: 975810 - DNA, 90 bp, Artificial Sequence
  ENSG00000224078_249 (sequence is synthesized)
ttacgagagttacgtgaaagtagatgatcataaaggtcttcattctcatttttatgttgaataggctgaggaggaggaagaagaggaggg

SEQ ID NO: 975811 - DNA, 120 bp, Artificial Sequence
  ENSG00000224078_250 (sequence is synthesized)
tttatgttgaataggctgaggaggaggaagaagaggaggggttgttcttactgtatcggggtggcagaagcagtacacttggtgtaactgtatggaaatatagtttctagcttttttgat

SEQ ID NO: 975812 - DNA, 120 bp, Artificial Sequence
  ENSG00000224078_251 (sequence is synthesized)
ttttcatttctctaaaaatgtttctatatggtacagtccttcttccactgtttacttatttgtagtacccacatcatagaaggagccatattgtaaagaagtcaaatgcagacttaaata

SEQ ID NO: 975813 - DNA, 120 bp, Artificial Sequence
  ENSG00000224078_252 (sequence is synthesized)
attagaaaccttctgccagcgtgtttttctggcactccttctgtgtcgtcttccttatcgtctggtactggttcagaagcacttgtctccatcacgtcatcttctgttaattcctctagt

SEQ ID NO: 975814 - DNA, 120 bp, Artificial Sequence
  ENSG00000224078_253 (sequence is synthesized)
gtgttatctattagctcttgaatttctccaaggtgtatatcttgaaagccttcactcaccacccttttttccgtgttcacgatctctttcgtgatttccttggttggctgtattgtaaat

SEQ ID NO: 975815 - DNA, 120 bp, Artificial Sequence
  ENSG00000224078_254 (sequence is synthesized)
cctgtcaagtcatgcacaacatctggacacagtttcctccagcaggggagtgtgttgtgttgggcttgatgctttcacagctttttgtgtaacgatggcatcttcagtgctgtgatcctt

SEQ ID NO: 975816 - DNA, 120 bp, Artificial Sequence
  ENSG00000224078_255 (sequence is synthesized)
ccagactttcatgatgttctatcagggttctcttgcatagtgttagataatcctttccataaagtactgtgtgtaatgagccttaatggtccttatgactccctgatctagaggatgatt

SEQ ID NO: 975817 - DNA, 120 bp, Artificial Sequence
  ENSG00000224078_256 (sequence is synthesized)
tagagatgttatgtctgggggcaaatagaccactttgacaccttcagtattgaactcatggggtcagggacattgtccaatcaaaaaaaaaaactttaaaaggcactcacttactgcaag

SEQ ID NO: 975818 - DNA, 120 bp, Artificial Sequence
  ENSG00000224078_257 (sequence is synthesized)
gtacttcttgacatcagggtcaaaacatcaatgaaaccaatacagaaaaaaagacttcttattgtccaggcctttttgttttacaatcaaaagaccggcagctggtgttttaacttttcc

SEQ ID NO: 975819 - DNA, 120 bp, Artificial Sequence
  ENSG00000224078_258 (sequence is synthesized)
cttcgaggctcaggagttagctgctttatagataaggtcagtcctgatcataaacccaattacatttgcacaaaacagtagaattagcccatcccttcctgccttaaatcctggtgctca

SEQ ID NO: 975820 - DNA, 120 bp, Artificial Sequence
  ENSG00000224078_259 (sequence is synthesized)
cttctcttccttactaataaatgtcctttctggcattttttttttttcagagtagggcactttcgtcagtttaaaaacctgttcaggcagatatcctttctcctcaatgattttcttaat

SEQ ID NO: 975821 - DNA, 86 bp, Artificial Sequence
  ENSG00000224078_260 (sequence is synthesized)
gttcaggcagatatcctttctcctcaatgattttcttaatggcatctgggaactgcttctcctgcttgactgtttttaagccagac

SEQ ID NO: 975822 - DNA, 120 bp, Artificial Sequence
  ENSG00000224078_261 (sequence is synthesized)
cttaggatcatcttgcaccctagaggtatgccttacagcaatcctgtacccgcagaaaagatgcattttcaatagatagatactttgcaaaagtgcaaggttttcacagtgttggtacag

SEQ ID NO: 975823 - DNA, 120 bp, Artificial Sequence
  ENSG00000224078_262 (sequence is synthesized)
ctgcaacaatggcttcatgaatttccttttttttttttttttttttaacaattgtcctcacactggatttacttatcttgaaatggcaagtagcccctgctggagacctcaatctgtggt

SEQ ID NO: 975824 - DNA, 120 bp, Artificial Sequence
  ENSG00000224078_263 (sequence is synthesized)
accttttaagcaattaaacgttttcttgtaatgtcatgactttcctctgcttcttaggagtacttccagtatcaccagtggcacttcatatgggtcccatggtgttaaggtttatggtat

SEQ ID NO: 975825 - DNA, 120 bp, Artificial Sequence
  ENSG00000224078_264 (sequence is synthesized)
tacacaagacactatgaaaagtaatatgagaactgtgaaagcttttgttttgctgccacatgcaatttactggagggagaaactgtttcctggcatgatttcgggtcacctggcacttta

SEQ ID NO: 975826 - DNA, 120 bp, Artificial Sequence
  ENSG00000224078_265 (sequence is synthesized)
agcagatgcaattgagctccccactgtagcaaaaggaggtggctacaaaattattacaataatgctgggtgtactacagctaattttatgcagttaggatttaataccacatatttacat

SEQ ID NO: 975827 - DNA, 120 bp, Artificial Sequence
  ENSG00000224078_266 (sequence is synthesized)
ttctctcaactgcaaatggcaccatgtaggatctgtgagtatgtgtgagtaggttttgataaattttaactttttataatttgtgtatattttatggtaataaatgataaaaataggcta

SEQ ID NO: 975828 - DNA, 120 bp, Artificial Sequence
  ENSG00000224078_267 (sequence is synthesized)
gtatctacatctattttatgcattcatgacatacctttttcttaatttttttggtatttctggactacgcagttgagttttttcaaattgtcacaaatttccaaaaatgtatccaatgta

SEQ ID NO: 975829 - DNA, 120 bp, Artificial Sequence
  ENSG00000224078_268 (sequence is synthesized)
tttattgaaaaaagtctgcatataaatagatcatatgcagttcaaacttgtgctgttcaaaggtcaaatttctttgtggaatgtttgatagaattcattagtgaaatgatctgggcctgg

SEQ ID NO: 975830 - DNA, 120 bp, Artificial Sequence
  ENSG00000224078_269 (sequence is synthesized)
agtttccttcgtgatattttaatgaacaatttcagtttatttaataatacaggattgagagtttctgtttcatttaatggcagctttagtactgtttttcaaagagtatagtccatttta

SEQ ID NO: 975831 - DNA, 120 bp, Artificial Sequence
  ENSG00000224078_270 (sequence is synthesized)
tcagatttgtcaaattcagtagtataaagttgctcatgatagttccttattacccttatactgtctgtaagatctcacctttccaattctgatataggtaatattattttttctcaggtt

SEQ ID NO: 975832 - DNA, 120 bp, Artificial Sequence
  ENSG00000224078_271 (sequence is synthesized)
tttttttttttttttttaactatcttgtcatttaaaagaatcaatctttgatttgctaattttctctttatctgttttttatattattgatttctttccttcatcttaccttggttttaa

SEQ ID NO: 975833 - DNA, 120 bp, Artificial Sequence
  ENSG00000224078_272 (sequence is synthesized)
ggttttaatatgctcttttttttggtagcttcttaatcttgagactattaagtcttctattatgtaccttacttattttctaatataaccattgaaggctataagcactacattgataga

SEQ ID NO: 975834 - DNA, 120 bp, Artificial Sequence
  ENSG00000224078_273 (sequence is synthesized)
ttccacaaactttgatatattgttttaattaccatttaattcaattattttcttcctttgtgttttaatttgatctgttatttttaagtggagtatttaatttccaaatatttggggctt

SEQ ID NO: 975835 - DNA, 120 bp, Artificial Sequence
  ENSG00000224078_274 (sequence is synthesized)
ttctgtgtagtttgttacaacttctgttttagttttgttttggttctaaaaagttactctgatatttcagctttccaaatttattgagacttatggtctagcatatgatctgtcttgaca

SEQ ID NO: 975836 - DNA, 120 bp, Artificial Sequence
  ENSG00000224078_275 (sequence is synthesized)
aaagtttcacatgcacaggaatatatatttaaactcaaggtgtgcagattttgttcagatagatagtgtctagattttctagattgtcagtgaatttttacaattgttttataagttaca

SEQ ID NO: 975837 - DNA, 120 bp, Artificial Sequence
  ENSG00000224078_276 (sequence is synthesized)
aagagaatagtgtaaaaaatttctgctgtgattatgattttctttatctttagttctctcagttcttcgtgtatttggaaatatcttattgtttatacttttatgaacatcatgactgta

SEQ ID NO: 975838 - DNA, 120 bp, Artificial Sequence
  ENSG00000224078_277 (sequence is synthesized)
ataaattttatcttttcctaatttggcctgtcttaccttatgtaatatttctggtcttgatgtctgcttcgtctgatatctgaataatattaccagttttcttgggtttgcagtatgtct

SEQ ID NO: 975839 - DNA, 120 bp, Artificial Sequence
  ENSG00000224078_278 (sequence is synthesized)
ggtgtatctttttctgttctttaaatctgtcttcatagtgcttccattatagagagcatagagatggatcttttttgtccaatttaaccatcagtgacttttaagtctttggggtcttaa

SEQ ID NO: 975840 - DNA, 120 bp, Artificial Sequence
  ENSG00000224078_279 (sequence is synthesized)
gtccctttgcattaaacatactaacgtgactagacttatgcctactatttagctattgtttttccatttgtcccctctagtttgttcctctctgcctgctttgcttcgttcttttgggtt

SEQ ID NO: 975841 - DNA, 120 bp, Artificial Sequence
  ENSG00000224078_280 (sequence is synthesized)
aattgaatatttttagtatcctacattaacttctctgtttacatttcggctccacctctgggtattttgtatgggttataaaatgtacccttaatttatgacaatctgcttagagttagt

SEQ ID NO: 975842 - DNA, 73 bp, Artificial Sequence
  ENSG00000224078_281 (sequence is synthesized)
gagtctcaatctgtcacccagactggagtgcgggggcatgatctcagctcactgcaacattaggtggaactgt

SEQ ID NO: 975843 - DNA, 120 bp, Artificial Sequence
  ENSG00000224078_282 (sequence is synthesized)
gggcatgatctcagctcactgcaacattaggtggaactgtattaactctaaaaggactgtgataatttaaagatgtatattataaccatagaataatcactaaaaagtacagagaaatat

SEQ ID NO: 975844 - DNA, 120 bp, Artificial Sequence
  ENSG00000224078_283 (sequence is synthesized)
agctaaaaaagcaacagcagaattaaaatgtaatagtaaaaatacttgattaaaagaatacaggaaagaatgaagaaaagaacaaagtaaactgtatagaaaacagatggcaaaatggta

SEQ ID NO: 975845 - DNA, 120 bp, Artificial Sequence
  ENSG00000224078_284 (sequence is synthesized)
gacctaaacacagtcatattataaattactttaacggtacacttgtttttcattgctttaattgatcaaatgataggtaaagtattttaaagtctctttgtagttttctttaaatcttaa

SEQ ID NO: 975846 - DNA, 120 bp, Artificial Sequence
  ENSG00000224078_285 (sequence is synthesized)
cattttgtgcaatgtttgctttgtgaagattgatgctatgatatttaccaatcatttagaagagatattgctgggtgttttggtaagtttaggttacttacatatcttatatgatgaaat

SEQ ID NO: 975847 - DNA, 120 bp, Artificial Sequence
  ENSG00000224078_286 (sequence is synthesized)
caacattttttatttgatcaacttaatagaggcatcctgtttgaaagaagaaaataacagatctacaaaattctgattcatgtaataagtaaccattatgataataaatgtttttattta

SEQ ID NO: 975848 - DNA, 120 bp, Artificial Sequence
  ENSG00000224078_287 (sequence is synthesized)
tttattgagtgcatactgaaaagtggtaggaagattttgtgctgaaatatttgtaaacctagtaattaaaaaatgttttggctgggcttgttggctcacgcctgtaatcccagctctttg

SEQ ID NO: 975849 - DNA, 120 bp, Artificial Sequence
  ENSG00000224078_288 (sequence is synthesized)
agctactcgggaggctgagatgggagagtcgcttgaacccaggaagcagaggttgccgtgagtcaagattacaccattgcactccagcctgggtgtcgcagtgagactctgcctcaaaaa

SEQ ID NO: 975850 - DNA, 120 bp, Artificial Sequence
  ENSG00000224078_289 (sequence is synthesized)
ctcaaaaaaaaaaaaaaaaaaaaagctgctaattaccccatgctaaatgtgttgtaatggtattaatttgatatataacatatatgtaacattttatatatgtgctcatatgatgatact

SEQ ID NO: 975851 - DNA, 120 bp, Artificial Sequence
  ENSG00000224078_290 (sequence is synthesized)
gataatacctccctcaaattgctcttttgagtattaagaaaagtttatatagaaaaaccagtttggaaaggtttggaacataaggctacagtgattagatgttgagaacagcagcaataa

SEQ ID NO: 975852 - DNA, 120 bp, Artificial Sequence
  ENSG00000224078_291 (sequence is synthesized)
tagttgtcattataatatctgattaaggcaatatttgcacccaggtataccttgcttcagaactgtgtgattaaccattataccttgaggctattcataccctaccttcactttgttggc

SEQ ID NO: 975853 - DNA, 120 bp, Artificial Sequence
  ENSG00000224078_292 (sequence is synthesized)
ataatctgaagttttaaaccataatcacatattgcatttgcacaattaaattttaaaatatatacaaattacagtcaaattattgcattcatttcatgactatattctgtttccatccat

SEQ ID NO: 975854 - DNA, 120 bp, Artificial Sequence
  ENSG00000224078_293 (sequence is synthesized)
aagtaccgtatggtcaacaataacatgtcaaagagaattttgttgtcacctcgtttcattgtaccatgttcacactgttctttatctcttttttccattggcagtattgtgttctcaaga

SEQ ID NO: 975855 - DNA, 120 bp, Artificial Sequence
  ENSG00000224078_294 (sequence is synthesized)
agaattattccagaagcacccctgaaataatatatttccttaattttggtattattagcccttctttgcttttctctataaattgtcctgatcagtcacctctctcaattatatacaaca

SEQ ID NO: 975856 - DNA, 120 bp, Artificial Sequence
  ENSG00000224078_295 (sequence is synthesized)
caaagtagcttaaaggagaaaaaaaaggagataaataaccatgttgggtctggcgtcaggcttaatggagtccagtagtccagaatttaaagacacatatgaccgtttgctcccttatct

SEQ ID NO: 975857 - DNA, 120 bp, Artificial Sequence
  ENSG00000224078_296 (sequence is synthesized)
cttagttctccatttcttggtttggcttaaatcttcagtcactttttctttatgtgaatttgcaaagggatcatttgaagccctagatgcaattattacctgccttgcaatcttggtagg

SEQ ID NO: 975858 - DNA, 120 bp, Artificial Sequence
  ENSG00000224078_297 (sequence is synthesized)
atgtgtcctccttccctcctccttgtccatgtaaaagttggtgggtgaagagatggacaaggcttgagtcactaagacattcactgacctgggaataactcaggataggtctggtcatat

SEQ ID NO: 975859 - DNA, 120 bp, Artificial Sequence
  ENSG00000224078_298 (sequence is synthesized)
ccccaatggaggcaatgtaccctaatgaaaaggtcagggtcactggtctcattgtccaaggtgttatctgagctcatggtctcacaaccaagaaaattaaggagtatggacacagggtga

SEQ ID NO: 975860 - DNA, 120 bp, Artificial Sequence
  ENSG00000224078_299 (sequence is synthesized)
ggttggttggagcaaaagtttagtaagcgaaagaagaaagctctctgcagcagagaggggagtccaagtggattgccgtttttacagtcattcaaaagcttttttaagaaactcctctca

SEQ ID NO: 975861 - DNA, 120 bp, Artificial Sequence
  ENSG00000224078_300 (sequence is synthesized)
tctctgtagcactttgagtaacttctcttatcagcaaagctgtctgtacaactccccttatcttatgcagctgtgggtatgtctctaggcaagcacaaagcgccgcttatttttgtttgt

SEQ ID NO: 975862 - DNA, 120 bp, Artificial Sequence
  ENSG00000224078_301 (sequence is synthesized)
gtaactgagggtttgttttaggtaagccccctcctttctgtgcaggcttccagggagcccaccatgtacatatctgaaaagggaaggaaactttttgctgggagcttgttaatcatacaa

SEQ ID NO: 975863 - DNA, 120 bp, Artificial Sequence
  ENSG00000224078_302 (sequence is synthesized)
agaataaagggcttccatgccagactttgcctgcctgcttatctatggcttatctgtgcagctatagcctgagtttcccctggctgctctgtttttgcctgtagctgtgattttttcagg

SEQ ID NO: 975864 - DNA, 120 bp, Artificial Sequence
  ENSG00000224078_303 (sequence is synthesized)
cagacagcttctctgaggactagtctcttagctgtttactcaagtaatttttcctgtccttttccctcactatgattaccagctcccctaggacttcatggtctggaatgaaatattccg

SEQ ID NO: 975865 - DNA, 120 bp, Artificial Sequence
  ENSG00000224078_304 (sequence is synthesized)
tgggagtcagggaaagggagtttgttgcaaacatgtccaggccagacactttatataaagtgtcaaagtaaagtacacttacataaagtgtaagtgctgccaccaccactagggtgccag

SEQ ID NO: 975866 - DNA, 120 bp, Artificial Sequence
  ENSG00000224078_305 (sequence is synthesized)
gtactctaacacaagtctttattcccatagatgtgagttaacatttataccaccagctcacactatcaaacaatcccacgtaccccaaataaacactggtgcctggtgggcagcaacaag

SEQ ID NO: 975867 - DNA, 120 bp, Artificial Sequence
  ENSG00000224078_306 (sequence is synthesized)
ccctccttcaaggaaggagttcatttgttggtttatccagctgctcccgctttgcttatggaagcgctccgttttctaggggtcttagaagctgtagcagtggtagaaagcccctttttt

SEQ ID NO: 975868 - DNA, 120 bp, Artificial Sequence
  ENSG00000224078_307 (sequence is synthesized)
gtggactattatgacttaggcttttatcagagcctcagagaattgctgttgttttgttggttaggctttaggtttccaatctgcatacacaattcctttgaagcaccaggcttccaggca

SEQ ID NO: 975869 - DNA, 120 bp, Artificial Sequence
  ENSG00000224078_308 (sequence is synthesized)
atttggttgagggaacttattgggatatgaaatattatcaggcaccatttctaatcaatgtacctaagttatgacttcaggtttagagaaaaaaaaaatttttttcccttggcttcaggc

SEQ ID NO: 975870 - DNA, 120 bp, Artificial Sequence
  ENSG00000224078_309 (sequence is synthesized)
ttccttctggaggtgataacctcctaaatggactgtctttaagggcctgtggcatgtgccctcctttcaggaaactagtgtatgcctggaggcattggtaatggcttctctcatcttact

SEQ ID NO: 975871 - DNA, 120 bp, Artificial Sequence
  ENSG00000224078_310 (sequence is synthesized)
gtggcttgggaagaatatggctattgcagattttctagtttcattaccacctgaccttcaggctccttacatgttataggcagaaaaggtgcctccacaaagttgtgggctattctctgc

SEQ ID NO: 975872 - DNA, 120 bp, Artificial Sequence
  ENSG00000224078_311 (sequence is synthesized)
tttcagaaggacagctggaaatggtacttaattctttgtagcagcaccatcatgaatagctgcccacacccatatacatcattatcttttttggtgaagactctaagacttcaggccatg

SEQ ID NO: 975873 - DNA, 120 bp, Artificial Sequence
  ENSG00000224078_312 (sequence is synthesized)
atatccacaaggctatgttcatgcactacttcggtataatctcaaaataattgccagctccccagtggaacgcctgccttggtccatgtggaatgtgggcatatggtaggatttccttgg

SEQ ID NO: 975874 - DNA, 120 bp, Artificial Sequence
  ENSG00000224078_313 (sequence is synthesized)
aggaactagaagaggaacataaagaatgttaggcatataaattattgtttctttttcttcttgtttctttccactgagttatgtgtgagcccccacacccaccctaccttcctgtcctct

SEQ ID NO: 975875 - DNA, 120 bp, Artificial Sequence
  ENSG00000224078_314 (sequence is synthesized)
accttactgatgctattttcaggctgttgtagaattgggtgtgtaaaattaaattagcctttctcctcttaatatctgtaaaatgaacaaatttgacaaagaaactacctatctgatata

SEQ ID NO: 975876 - DNA, 120 bp, Artificial Sequence
  ENSG00000224078_315 (sequence is synthesized)
taagaaggttattagcctgtaccacaagtgaaaaagtttcatcctgatatatcaaaatagtaccacttgaaggaaaacgttggggccatctgtttctctcattgtagttagagtacagat

SEQ ID NO: 975877 - DNA, 120 bp, Artificial Sequence
  ENSG00000224078_316 (sequence is synthesized)
ttttaaaatatgagcctcaggcataaaaatgcagtattagcaactcaacttgaagaagcagttactagtgtcctgggtgggccccagggaaaatagtaccaactgcctgttatatttaac

SEQ ID NO: 975878 - DNA, 120 bp, Artificial Sequence
  ENSG00000224078_317 (sequence is synthesized)
tgcaattaaaaatggcagtgctgggtatcttctgtctctgggtcatctcctaaagatcctgcagagggagccatagctagtgtagaggccagccataactagccatggcaaagaccacag

SEQ ID NO: 975879 - DNA, 120 bp, Artificial Sequence
  ENSG00000224078_318 (sequence is synthesized)
ggaacgctcttcaacatgctctgcactgatcctctaccctggtgtggagaaatgtcagattcatcactaacaaggttaaaggtgtaaattgagggaaaaaaatgagaaaagttatctttc

SEQ ID NO: 975880 - DNA, 120 bp, Artificial Sequence
  ENSG00000224078_319 (sequence is synthesized)
acataagacttcagaaagaaattgcgtcgtcaggtttggaactggtttgtaatttcatccagttattttcattttaattactgtcactgttttcttcatccttgataaactatgagctct

SEQ ID NO: 975881 - DNA, 120 bp, Artificial Sequence
  ENSG00000224078_320 (sequence is synthesized)
ttgagattgtctttttcatatcctgatgtcagagcttcctgtattttctgatcatggtatgtgctaagtaaatgcaatttttagcattttgaatggtttatcaaatgattgaaggagtgg

SEQ ID NO: 975882 - DNA, 120 bp, Artificial Sequence
  ENSG00000224078_321 (sequence is synthesized)
gtaataatatagattacatatacagtcagccacatatgtgtatgtatgtgtatttgtgtgtgtgtgtgtatatgtatatactgttgaccctccgtatcaatgggtttcacatttgtggat

SEQ ID NO: 975883 - DNA, 120 bp, Artificial Sequence
  ENSG00000224078_322 (sequence is synthesized)
tcatccaatcatggatcaaaaatattctttaaaaatatggttgcatctgtactgaacaggcacaaactttttttcttatcattattccctaaacaatgcagtatgacaactatttatcat

SEQ ID NO: 975884 - DNA, 120 bp, Artificial Sequence
  ENSG00000224078_323 (sequence is synthesized)
agcattgacactgcattagatatgataagtaatctagagattaaagtatataggaggatgcatgtggatcatatgcaaataatacactacatcttatataagggacttgaacatccatgg

SEQ ID NO: 975885 - DNA, 120 bp, Artificial Sequence
  ENSG00000224078_324 (sequence is synthesized)
agtttggtatgtggtgggtgatacctcctctttgaggaggtgagtatcagagacgcaggtaaatatgatccagagggcaaagaggcattgccagcctcacactggctgtcaacaccatgc

SEQ ID NO: 975886 - DNA, 120 bp, Artificial Sequence
  ENSG00000224078_325 (sequence is synthesized)
tgagttccacgaaagcagcgaggagagggtggtgttcttgtttctggtacaatacctggcatagagaagatgtcacagcaatgttcgtctattgaataagtcaccaaaattgtgaatgac

SEQ ID NO: 975887 - DNA, 120 bp, Artificial Sequence
  ENSG00000224078_326 (sequence is synthesized)
tgaataaatgggcaaagggatttgttccctacttgctgtgggaagtttcttgtagttatgacctccatgaaagagagactcgtatctggagaaagttcatagctgaaaccatgagattta

SEQ ID NO: 975888 - DNA, 120 bp, Artificial Sequence
  ENSG00000224078_327 (sequence is synthesized)
acttttgaagttataatggatctatttttttaacatcataaatgaagattatgcaatactgtatgtgcttcaattgacacaaccccttcccattcagggctgatttatgttctgtactga

SEQ ID NO: 975889 - DNA, 120 bp, Artificial Sequence
  ENSG00000224078_328 (sequence is synthesized)
atgacaggcacagaagtaaatgtgataatcctgtcccgtcgttaccctttattgtggtcttgctgtgtcccagccacacacttcatactgtatctgtgtcatcattctcatatacatcta

SEQ ID NO: 975890 - DNA, 120 bp, Artificial Sequence
  ENSG00000224078_329 (sequence is synthesized)
tataggtacacttccatagacttaggcccatttaatggaggagcaactccaacatttagagatcatgaaaggtacctcatgacatatattgacctagtggcagagctgcttagttctaca

SEQ ID NO: 975891 - DNA, 120 bp, Artificial Sequence
  ENSG00000224078_330 (sequence is synthesized)
gcctctgagtggaatcctcacgacagtaaaaacacaagcttggtttctcacacactctacctgctttttctcatcccctttagtctctattccttgctgagatgtgttaggcattaaatg

SEQ ID NO: 975892 - DNA, 120 bp, Artificial Sequence
  ENSG00000224078_331 (sequence is synthesized)
gttacagtctacttctgtgtgtagtctccaaacactcagaaacctcaaaatttaaaaaaatacagaacaatatgttattaaataatcagggacaagttaaaatggtaaagagaataggcc

SEQ ID NO: 975893 - DNA, 120 bp, Artificial Sequence
  ENSG00000224078_332 (sequence is synthesized)
actttgtgaaatcatatgcagggaagaaaaaaatactggagtgaaaacaatataaaaataatactagatgctgtttcgtagcaccaagtgtgttctagcttctgtggttgttgctttata

SEQ ID NO: 975894 - DNA, 120 bp, Artificial Sequence
  ENSG00000224078_333 (sequence is synthesized)
tcattttatataatctttacacaaaacctacaagcagatattatttcccctatttcaaaaatgagaaaaccaaggcaaatagttggtaagtagtacatatatattatcctaactctgaac

SEQ ID NO: 975895 - DNA, 120 bp, Artificial Sequence
  ENSG00000224078_334 (sequence is synthesized)
ttctggattcaaagaccatgttctaggataccattttgtgtaccagcatggaatatgtttttagttcatctatttactctaaaaatgtggagcatgtagtgtgagacagaactgttctag

SEQ ID NO: 975896 - DNA, 120 bp, Artificial Sequence
  ENSG00000224078_335 (sequence is synthesized)
gctgtgaggaagtagctgtgaggatggtagtatgggtccctgtaataatgaaaatggaatatattggtatgtacaagtacatgctcattaaaggaaattgatgttggcatagattgcctg

SEQ ID NO: 975897 - DNA, 120 bp, Artificial Sequence
  ENSG00000224078_336 (sequence is synthesized)
ggttcaaattcccatttaccatgttttcctagttgtctctgtggtgagaggaggtggaatgtactagccattaccaaaattaagagagattgttggaaaaagtctcatttagcacaataa

SEQ ID NO: 975898 - DNA, 120 bp, Artificial Sequence
  ENSG00000224078_337 (sequence is synthesized)
cacattaaatgtattcaataaatgttacttatgactctttgagaaaacatacgtttaaaaaacatggcttatgttacacatactatatgctggctcccaaaaataaacatatttcccaag

SEQ ID NO: 975899 - DNA, 120 bp, Artificial Sequence
  ENSG00000224078_338 (sequence is synthesized)
ctcaataggattacgctgaggcccaacctaggggagaattttggaagaggacgctgggatcctgaggtccgtggcagggccaccgtattttgggctggagacctcaaggccctgaagggc

SEQ ID NO: 975900 - DNA, 120 bp, Artificial Sequence
  ENSG00000224078_339 (sequence is synthesized)
tttgggctggagacctcaaggccctgaagggcatcttggcagcccccagccctgtctctgcactcctccgtgaggcagcccaggctccctgtgtgggcttggtgtcagagtcccattccc

SEQ ID NO: 975901 - DNA, 120 bp, Artificial Sequence
  ENSG00000224078_340 (sequence is synthesized)
caggggcggggcaggttggcggctcctccctgagtcccctttctcccttgtgtctttgagtgacttcttctgcccaggtgggccccctggcgttgaccagcatagatggtgagcctggag

SEQ ID NO: 975902 - DNA, 120 bp, Artificial Sequence
  ENSG00000224078_341 (sequence is synthesized)
gaagacttgcactgggccttctgtgcgccggccagaggccatcaaccaggtgcccaggtccttttgtactgaagcttgggcccttcctggcaccctggtctccttcatggagctgatggt

SEQ ID NO: 975903 - DNA, 120 bp, Artificial Sequence
  ENSG00000224078_342 (sequence is synthesized)
tgaacaaaatgagtgaaaactctataccgtcatcctcgtcgaactgaggtccagcacattgctcttacaggggctagagagagagggacaaatttcatttgatgatgcccattgcaccaa

SEQ ID NO: 975904 - DNA, 120 bp, Artificial Sequence
  ENSG00000224078_343 (sequence is synthesized)
gagagggacaaatttcatttgatgatgcccattgcaccaaggggttctgtccaggcttaggatggggtctcgtttgggcaaaggagaatggcaggggagtggaggctatgtacacaggag

SEQ ID NO: 975905 - DNA, 120 bp, Artificial Sequence
  ENSG00000224078_344 (sequence is synthesized)
attccttgtttgaaggactctatttgtgaggccagggtaccacacatgctgtccgcaggagtaggtgaatgtgcagttgcccaggaagagttagcctgtagcctgcctctgcatggcagt

SEQ ID NO: 975906 - DNA, 120 bp, Artificial Sequence
  ENSG00000224078_345 (sequence is synthesized)
ttgtccttgggtcctggctctggatttccatgttccttggaggaggataggtgattttgcttgagaagacagcacagtaccatacttttgttgtttttctgctcatttcatcgtccattg

SEQ ID NO: 975907 - DNA, 120 bp, Artificial Sequence
  ENSG00000224078_346 (sequence is synthesized)
aggacaatgaagttgtggtcagcaggcatagctttcaggccagcgtgcccatgttgtgtcccatgcattgtgagcacatgcatgtggcatgaacacataggctgccactccaagctgagt

SEQ ID NO: 975908 - DNA, 120 bp, Artificial Sequence
  ENSG00000224078_347 (sequence is synthesized)
ctgataggcaatgagactctggcttatcctgatcccggtgtagatcaaagtcttcccagtaggattgcatggccccgaggctattgtgagctgcattgcaggtgtggaagcaagggtgtt

SEQ ID NO: 975909 - DNA, 120 bp, Artificial Sequence
  ENSG00000224078_348 (sequence is synthesized)
gagagggatgctcaacattagtgctctttagcgagatgatgcactataagggcaccctgaacccagacgtgcatccctatgtacgtgcatttctgtgtccataaatagttgaagccagac

SEQ ID NO: 975910 - DNA, 120 bp, Artificial Sequence
  ENSG00000224078_349 (sequence is synthesized)
agccagattccagatgtatcgcagggggctggatgacatggcccttgtcacctgtgtacctgtctgcctttctgaagcacgcttgtgtttcctctacacctcccaggtagcattggcatg

SEQ ID NO: 975911 - DNA, 120 bp, Artificial Sequence
  ENSG00000224078_350 (sequence is synthesized)
gaaggcaggcccatgttggtgagggacaattgttatcttgtgtgagccgcagggataccaggaaacccctggacacaaatggcaaaggcttctttggaagttgttggatcccttctgcat

SEQ ID NO: 975912 - DNA, 71 bp, Artificial Sequence
  ENSG00000224078_351 (sequence is synthesized)
tgagctgtgatgagtacatccgggttccactggatgcatgtgcgggaaggggggtgccctgggttgggtca

SEQ ID NO: 975913 - DNA, 120 bp, Artificial Sequence
  ENSG00000224078_352 (sequence is synthesized)
attttggaaaaggatgctgggatcccagggtccccaacagggccactgtattttggacctgggacctggtggctctgaagggcatctggaggtggcccaacctgtctctgcactctagtt

SEQ ID NO: 975914 - DNA, 120 bp, Artificial Sequence
  ENSG00000224078_353 (sequence is synthesized)
gtcagccaggtgctcagcccatggtgtgctgaagctctgacccttcctgactccgtggtctcctgcactgagctgtgatgaccatatccagtgagctcttccaaacaggtgggctcccta

SEQ ID NO: 975915 - DNA, 120 bp, Artificial Sequence
  ENSG00000224078_354 (sequence is synthesized)
cctgcactgagctgtggtgagctcttctgcccaggtgaggcccatggccttaagcggcataggagcatgcatttcgtgaagccctgcaaaggtgatggtggtcccggcaggaaagggttc

SEQ ID NO: 975916 - DNA, 120 bp, Artificial Sequence
  ENSG00000224078_355 (sequence is synthesized)
actgaatttttcaggtatatagataaaaattagtcaaaaaacactgtaattagatatgaacattcaaaaagtttggtttattgatacaggtgttctactgagaaagacatttttataaga

SEQ ID NO: 975917 - DNA, 120 bp, Artificial Sequence
  ENSG00000224078_356 (sequence is synthesized)
tttcttgtgataaatgtgtccctgaaaatactcaatcttttaaattttgcacttaaaaacctcctacgcaaaaacagtttggtgcagactacttaatacttatgcaactttgtaattagt

SEQ ID NO: 975918 - DNA, 120 bp, Artificial Sequence
  ENSG00000224078_357 (sequence is synthesized)
gttaacaaacataattaataatcaaaataagagtactagtgtacagaaagcatctctaatttccaatatacaatagtaactatagaacaatgcaaaaacaaaaacaaaaaaaccagtaac

SEQ ID NO: 975919 - DNA, 120 bp, Artificial Sequence
  ENSG00000224078_358 (sequence is synthesized)
gaacagggaacagtaacagtagcatattagaaaacagggataaggaaaggtcacaactgctataatgcagacttgagcaaaaagaggagggggcataaagactggataaagccacacaat

SEQ ID NO: 975920 - DNA, 120 bp, Artificial Sequence
  ENSG00000224078_359 (sequence is synthesized)
aagcacctctaagatggagcacgtggccaaaagagcagatgagcacattcctcatgtaccacatcccccgcagctggctgcattccactgtgccagcactctacattcagttactggtac

SEQ ID NO: 975921 - DNA, 120 bp, Artificial Sequence
  ENSG00000224078_360 (sequence is synthesized)
tctctggtgcacacttactggagaactgtgtacaataaagtcaatgcagcttccacattatactgacacactatatatacagacaacatttacctattttcccatagtgtgtgaactaat

SEQ ID NO: 975922 - DNA, 120 bp, Artificial Sequence
  ENSG00000224078_361 (sequence is synthesized)
tcatgaaacagaattatacactctgaagcaacaaagttgtgtaaagtgacgaaaataattttattgtggaaacagagtagaggttataacacaatgccacttcactaattctttcaaact

SEQ ID NO: 975923 - DNA, 120 bp, Artificial Sequence
  ENSG00000224078_362 (sequence is synthesized)
tgattcaaatgatgttagtgaaagttttagaggcaaatgcctctaaaattctctgacttgtatgtcataaaaaaaaagctttctctcttaaaatacaattgcctctgggtgtgtgtaggg

SEQ ID NO: 975924 - DNA, 120 bp, Artificial Sequence
  ENSG00000224078_363 (sequence is synthesized)
gtgagagtggaggggcgctaagccctggtagtcattcaaaaatttgattactttgttactaattaccttcactgaagaaaataacttggagttttagtattagcgacaaggtaatcgaat

SEQ ID NO: 975925 - DNA, 120 bp, Artificial Sequence
  ENSG00000224078_364 (sequence is synthesized)
tctgaattttggacgtaggaccatttagaaaacaaaagacctgagtgaagactgtcattggtaggtcatgatccttggcagcatgactgtaccaaatgtccggaaggagagtgagaagca

SEQ ID NO: 975926 - DNA, 120 bp, Artificial Sequence
  ENSG00000224078_365 (sequence is synthesized)
tatatctgaaggaaacgtagaattctcacataactatcacaaaattttgtcttgccttcaaaaatggaaaaaacccactgtttcctctttctgcttctttcatcacatcatcctgaggtt

SEQ ID NO: 975927 - DNA, 120 bp, Artificial Sequence
  ENSG00000224078_366 (sequence is synthesized)
ccagaactcatgccagatacttagtccagttattctataacttaaatagatgttgtggcctagttttggagattcactaccacttaatacatttttcctaagaattttaaaaagttcaaa

SEQ ID NO: 975928 - DNA, 120 bp, Artificial Sequence
  ENSG00000224078_367 (sequence is synthesized)
tcaatctattaacaaatgaacttttggcatatgatctgcttctaattagcaatgattagacctgtaaaatgtagttattattcctgtccgttaccacaataaaaaattggttctacgata

SEQ ID NO: 975929 - DNA, 120 bp, Artificial Sequence
  ENSG00000224078_368 (sequence is synthesized)
tcaaaatgtctttatgtcacagaagaaaaaacaaataaaaactaatacatttaaatctcccacatggttttcaggcaacaattctcaattgaaaataaaacatcttacctttaaaatcaa

SEQ ID NO: 975930 - DNA, 120 bp, Artificial Sequence
  ENSG00000224078_369 (sequence is synthesized)
gccttcaggacaggaagatttcctcggggagccaacctgaatccccaccgtggagggatgtgttagtcctccaggagggtggcttcctagggaatctgaccccaggaggacacctttgct

SEQ ID NO: 975931 - DNA, 120 bp, Artificial Sequence
  ENSG00000224078_370 (sequence is synthesized)
gaagccctgcaggggtgatggtggtccaggctggaaagttttccttcagtctcatgtggggcagctccctgctgacattccgtgcctgcgtctgaccttgaggactgcccgggccacatg

SEQ ID NO: 975932 - DNA, 120 bp, Artificial Sequence
  ENSG00000224078_371 (sequence is synthesized)
agtggggcaacaagggctccagggtgccacggggattatgagtggggctctccatccccggagagaggtgggcaatcaggcccatgtggtcaggcttgtagggttcggtggtggggagag

SEQ ID NO: 975933 - DNA, 120 bp, Artificial Sequence
  ENSG00000224078_372 (sequence is synthesized)
ccaaggtttccctgggtccattaccgtcactgtttcacctggatcccatcacatgggtccatggagggagagcatgtgtgaacaggcaccccttgctccctttcccacatgagcccctgg

SEQ ID NO: 975934 - DNA, 120 bp, Artificial Sequence
  ENSG00000224078_373 (sequence is synthesized)
tctcaccagatggtgagcccagaggaagaccccgtggctctgggccagtgtgcgtcagccaggtccccagcccccagtgtgctgaagctcaggcccttcccaacgccctggtctcctgca

SEQ ID NO: 975935 - DNA, 120 bp, Artificial Sequence
  ENSG00000224078_374 (sequence is synthesized)
ctgagtgagctcttccgcccatttgggccctctgacattgaccggcatagatggtgagctcggaggaagacttgcattgggcccaatggagctgggccagtttctgtcagccaggtcccc

SEQ ID NO: 975936 - DNA, 89 bp, Artificial Sequence
  ENSG00000224078_375 (sequence is synthesized)
gctgaggcccagtctaggttaaaattctggaagaggatgctgggatcccaagttcacaggcagggccactgtattttggactagagaac

SEQ ID NO: 975937 - DNA, 120 bp, Artificial Sequence
  ENSG00000224078_376 (sequence is synthesized)
aagttcacaggcagggccactgtattttggactagagaactcgaggccctaaagggcatcttgagggggtccaacctgtctctgtgctcctccatgaggcagccctggctccctgtgtgg

SEQ ID NO: 975938 - DNA, 120 bp, Artificial Sequence
  ENSG00000224078_377 (sequence is synthesized)
cttggatcgatgatgagtcccctataaaaacattccttggaaaagctgaacaaaatgagtgagaactcataacgtcattctcatcggaactgaggtccagcatgttgcttcctctggggc

SEQ ID NO: 975939 - DNA, 120 bp, Artificial Sequence
  ENSG00000224078_378 (sequence is synthesized)
ctgtaggagtgagggacaacttccactgattcccataggttccaccacccagggcatccacagacaaaagtctcgtgtcacaggcacgttaggaacattccctctgtgtgaggtacatgg

SEQ ID NO: 975940 - DNA, 120 bp, Artificial Sequence
  ENSG00000224078_379 (sequence is synthesized)
gtgggagagtgatgggggattcggccgctctgtgatggcgtggtggccgtggaagcaggcagaaatgttgcaggcctaggggaagtggaaatgttgccagcacaggggtgtgtgctactg

SEQ ID NO: 975941 - DNA, 120 bp, Artificial Sequence
  ENSG00000224078_380 (sequence is synthesized)
gtaagctcccagaaggaagacccggacctcacagtggtcatctcagtgcagaagaccaggtgtctgttttcatgtcgaggagagcccaaggcccagacctcaggcagaccttggtgttga

SEQ ID NO: 975942 - DNA, 120 bp, Artificial Sequence
  ENSG00000224078_381 (sequence is synthesized)
tttttgattagttgagaacaggggagtgccaaggtgttaggggagagtgcagagcaataggtgtcggggcaaacagtgaaagcctcttcagcctaccctgcagcattggtcaccaggagc

SEQ ID NO: 975943 - DNA, 120 bp, Artificial Sequence
  ENSG00000224078_382 (sequence is synthesized)
gcctcctcacctatgcattgcctagaccacccactaaagatggtgaccatggaggaagacttgtgttgggcccaatggccctcggccagtgtccgtctgccaggtgccagcccccggtgc

SEQ ID NO: 975944 - DNA, 120 bp, Artificial Sequence
  ENSG00000224078_383 (sequence is synthesized)
tcctgcactgagctgtgtgagctcttctgcccaggcaggccccctggcattgaccggcatagacagtgagcctggaggaagacttgccctggtcccactgtccctgggccagtgtccatc

SEQ ID NO: 975945 - DNA, 120 bp, Artificial Sequence
  ENSG00000224078_384 (sequence is synthesized)
agccaggtgcccagaccccagtgcgctgaagctcagccctccctggcactctggtctcctgcactgagctgtgtgagctcttccgcccatgagggccccctggccttgagcagcataggt

SEQ ID NO: 975946 - DNA, 120 bp, Artificial Sequence
  ENSG00000224078_385 (sequence is synthesized)
gctccctattcgggatcggtattggtgctccacttccctgggggcaggacacgtgggtggctactccctgagcccccgttctccccttgtgtctttcagtgagctcttccaaacaggtgg

SEQ ID NO: 975947 - DNA, 120 bp, Artificial Sequence
  ENSG00000224078_386 (sequence is synthesized)
caaagtgctgggattacaggcttgagcccccgtgcctggccttcacctctacctattataatattttcatgttattccattttgtcatgtttgtgggtcatttgatgagggttcacaata

SEQ ID NO: 975948 - DNA, 120 bp, Artificial Sequence
  ENSG00000224078_387 (sequence is synthesized)
tgaaaactgggcattttggccaagatgcatgtaaatgaatacaactccatgtgccctgataactgatttctagatcctgagatgcaagtggcttccagagtgtctgtattttatgaaagt

SEQ ID NO: 975949 - DNA, 120 bp, Artificial Sequence
  ENSG00000224078_388 (sequence is synthesized)
tcatatacagtaaaccatgctaattgttactgatacagcttccttgaatatataaagcgatgattaatgggatgttttgtttctgcagaaaaccactgaattgcttctccaaagccaagt

SEQ ID NO: 975950 - DNA, 120 bp, Artificial Sequence
  ENSG00000224078_389 (sequence is synthesized)
gacctgtatgatttgtccttattatattttgtgaaccagtggactaaaacctttataatgggtcatttttttagtattgtcaatattgctcaattaacaaacatgactcatatacacagg

SEQ ID NO: 975951 - DNA, 120 bp, Artificial Sequence
  ENSG00000224078_390 (sequence is synthesized)
acaggggtcagcttactgtatgattaagtaacacaaggcacagtagccatctttttcattatgttgcaacactgatcacgtgcctcgataaaatggctgattcaacaagatgatggcaac

SEQ ID NO: 975952 - DNA, 120 bp, Artificial Sequence
  ENSG00000224078_391 (sequence is synthesized)
acgaaggggagactttggattgtctatttaaaatctaggtaataagtaagtaattaataaaaactctatcttaagtgcactttcacatgctttttgtttataataaacaaacaacaaact

SEQ ID NO: 975953 - DNA, 120 bp, Artificial Sequence
  ENSG00000224078_392 (sequence is synthesized)
ctaccataaagaaaatttccaggtaaaattggctacatttctgttaacttgccttaccattttattgacactttaataattactaatgatttatactgtcttatctattccattgagttc

SEQ ID NO: 975954 - DNA, 120 bp, Artificial Sequence
  ENSG00000224078_393 (sequence is synthesized)
tatctcatttctcttctttttcagaatattccctctgtatacttgcatttttttctatcaattgacgcttacaattatttttgcaagttggaaaaaaatgcagtattaatttcatttgca

SEQ ID NO: 975955 - DNA, 120 bp, Artificial Sequence
  ENSG00000224078_394 (sequence is synthesized)
acaaatttaatagattaattaggagagaatagatatctttaaaattgagtcttctgtccaactgcaagttatagctgaggtggtaccagtttaagaagtgagaacttcttcactgactga

SEQ ID NO: 975956 - DNA, 120 bp, Artificial Sequence
  ENSG00000224078_395 (sequence is synthesized)
aatttgcatatcaatccaaatcattgtgcttatttactatttttgtagacgtcattcttcaaaagtgctgcatcttcaatagtcaaggaggacaaagacatctttcctgcaggtggtgac

SEQ ID NO: 975957 - DNA, 120 bp, Artificial Sequence
  ENSG00000224078_396 (sequence is synthesized)
catgtggataataggatcatagacaaatggtggttccatctacagcatcaccgaaatgctgttgttactgcttctttctgggatcttcttgcatctttgcttctaaaggggcacaccttt

SEQ ID NO: 975958 - DNA, 120 bp, Artificial Sequence
  ENSG00000224078_397 (sequence is synthesized)
tatagaagtacgtccaggaatagaagtgacctgctttttcgcaagtaattgcctggaatgtttttatgtacttctctgcactctcaatacatttcatgcttccctctatttttgtatatt

SEQ ID NO: 975959 - DNA, 120 bp, Artificial Sequence
  ENSG00000224078_398 (sequence is synthesized)
aactcattgtatttcttaaatttatattttactttatgaatggaagtgagatttgtgtatggtaaatataattaattcaaccccatggatacgttagtcactgtccagatgatggcaagt

SEQ ID NO: 975960 - DNA, 120 bp, Artificial Sequence
  ENSG00000224078_399 (sequence is synthesized)
ctttctcagaagcagagggccttggtgtgccagtgattttttttccccatgtgtaagatactttttttcctcatttgaatcaggagcccacagtttttagacaagtcccaaatgaaatct

SEQ ID NO: 975961 - DNA, 120 bp, Artificial Sequence
  ENSG00000224078_400 (sequence is synthesized)
taagcatttgtgttatctggactagaccttctgtagtatcctttttgttagacctagtatatctcattgcagatcaggatctgagattgactatagttcacctctttccaagtacacaaa

SEQ ID NO: 975962 - DNA, 120 bp, Artificial Sequence
  ENSG00000224078_401 (sequence is synthesized)
cttggatgacatgacaactgagtgtgtaagggagagcgagacccttgcactgccatttgagcccttgtgatctcatcttgtagaacatgttgtacaatcattttattggtatcattagtg

SEQ ID NO: 975963 - DNA, 120 bp, Artificial Sequence
  ENSG00000224078_402 (sequence is synthesized)
ttatttggggctggaataaaaatctcagtgcaccaaagagatttcccctttatccacgttaccctggttttcctttgttttctgtttaacctaaacgggcttaatataaaatagtgctta

SEQ ID NO: 975964 - DNA, 120 bp, Artificial Sequence
  ENSG00000224078_403 (sequence is synthesized)
tttggtgttttaattgtctgcttctataacataagctgcactgtccattggggaactgctcaccatattgcccaacctgtcttgataggtttatacatgggaggcattcagtaatattaa

SEQ ID NO: 975965 - DNA, 120 bp, Artificial Sequence
  ENSG00000224078_404 (sequence is synthesized)
ttacctctctagaccagtgttagcaataacaaacacttgctagaattttaagactatataatcaatcactttgatgtcagttaatcctaccaacacaagattaaaggtttaaaaatctca

SEQ ID NO: 975966 - DNA, 120 bp, Artificial Sequence
  ENSG00000224078_405 (sequence is synthesized)
attagtgtctcctttcatactatattattttgttcattggcagctagatttttaggtagaacttgtgttcctttttgcaatgctcatttattttacctggacagaaggtgctcttctgtc

SEQ ID NO: 975967 - DNA, 120 bp, Artificial Sequence
  ENSG00000224078_406 (sequence is synthesized)
tcttctccaaagttaatttatctcatactatttcttgtgttaatattttccaagttcagtatgctgttctggttataagaagatcagtgtcctaatcacacacttttacattatatgaaa

SEQ ID NO: 975968 - DNA, 120 bp, Artificial Sequence
  ENSG00000224078_407 (sequence is synthesized)
catcatacagagttttgtagtctgtataacaatacacagaggtagcaaaatttgtaaaagagcagactatatagtccatactgtagtaactactcaacattgccattatacgtgaaatcg

SEQ ID NO: 975969 - DNA, 120 bp, Artificial Sequence
  ENSG00000224078_408 (sequence is synthesized)
gctataaccaattcataaacaaatgaatttggccgtgttctagtaaaacttatttacaaaaacatgtgttaggccagatttggaccacaggctgtagatttctgacctctggcttacagc

SEQ ID NO: 975970 - DNA, 120 bp, Artificial Sequence
  ENSG00000224078_409 (sequence is synthesized)
agaagtttattatgatcctggggaaggtggatatacatggaaggcagaagcgagaagatgtattccatcccatgtcatttttctgaaccctcaacgtaggaagttaaactaaaacatggg

SEQ ID NO: 975971 - DNA, 120 bp, Artificial Sequence
  ENSG00000224078_410 (sequence is synthesized)
gcagaatctgctttaagcctttgaattcttggctcttaaagccaggttgagggttatgtgtttttattcttttatatctccttttcacttaggcttggcaactagttcattgaaacagag

SEQ ID NO: 975972 - DNA, 120 bp, Artificial Sequence
  ENSG00000224078_411 (sequence is synthesized)
ccaacaagaatgagtgagtcactcagtgatatgaagcaagctgtggtcatttatctactaccttccatacctacttcctaggtttgataagtagtgtttgtagtgtagttgtcagtaact

SEQ ID NO: 975973 - DNA, 120 bp, Artificial Sequence
  ENSG00000224078_412 (sequence is synthesized)
tttctcagcttacataagtttatgtggaattcatttacaaatgtgtgattattacgatagatgttattttataaatttcaaggttctttaatacagcatggacatgtttctaaatcaata

SEQ ID NO: 975974 - DNA, 120 bp, Artificial Sequence
  ENSG00000224078_413 (sequence is synthesized)
aatatagcttacccacagactttttatgggatgtaaagtatgtattacaacaggtaaatccatttctctgttttgggaaagcaggttaatgttttgtttgttttgttgctgcatataatg

SEQ ID NO: 975975 - DNA, 120 bp, Artificial Sequence
  ENSG00000224078_414 (sequence is synthesized)
ttgcactatatatatattctaatgcagttggtctcctaattctacaggataaatgtctagctgtggcattgttggatcatcagtttcgtttcagttagatgctgtgaaattgctcttgaa

SEQ ID NO: 975976 - DNA, 120 bp, Artificial Sequence
  ENSG00000224078_415 (sequence is synthesized)
aatggtgtcctctgccaccacagaacggtgttgtaatggaagtgccaattttcataaaaacttgtgtgcaacaggtattaagaatttttgaggtcgggcgcagtagctcacgcctgtaat

SEQ ID NO: 975977 - DNA, 120 bp, Artificial Sequence
  ENSG00000224078_416 (sequence is synthesized)
tgaggaagagcatgtgctcgcgccaggagtggtggctgttaggggagggacctcagacctatgtctgcatggcctgaggtcagagttcacatcctactgattgaagaccttgttcttgag

SEQ ID NO: 975978 - DNA, 120 bp, Artificial Sequence
  ENSG00000224078_417 (sequence is synthesized)
ttcttgagctgtccggttgccacagggtcggacctggaggctgcagaccatcgtggccctttgcagtgttcggaaacatatgcgcaccccagggagggacacacacacacacacacacac

SEQ ID NO: 975979 - DNA, 120 bp, Artificial Sequence
  ENSG00000224078_418 (sequence is synthesized)
acacacacacacacgcaaactcacaaacacaacacacagacagaaaatgacaaataaacacacacactcacacacacacacacaggagcccacagaaaaaagcaaatagacgcagaaacg

SEQ ID NO: 975980 - DNA, 120 bp, Artificial Sequence
  ENSG00000224078_419 (sequence is synthesized)
ggcacgtgcagtagttctggccacacatgttccctaggtatccacagaatggcatgggtattgtatattcataaagatggagatcagtcatggaggccaaggacaagtaggtgcactggt

SEQ ID NO: 975981 - DNA, 120 bp, Artificial Sequence
  ENSG00000224078_420 (sequence is synthesized)
gagacttggtgctagggtctggccttgaggactgcccaagccacatgaaggtggccccaggctgtgatttttggtgcgtgcttggagagggagtctgggcaccctccctgcacaggggca

SEQ ID NO: 975982 - DNA, 120 bp, Artificial Sequence
  ENSG00000224078_421 (sequence is synthesized)
ggctgtgcgtctgccaggtctacagtggcgcctagcttcagagcaagcttccttggttggccttagctggttggtggccctggctcctacccaggggtcacaatgcagcccaggaagtgc

SEQ ID NO: 975983 - DNA, 120 bp, Artificial Sequence
  ENSG00000224078_422 (sequence is synthesized)
cctgtccttccagggtttggtggtggggagatacaagggttccccaggtccataactgtcctcgtttcacatggatcccatcacatgagtccacggatgtagagcatgtgtagccagcag

SEQ ID NO: 975984 - DNA, 120 bp, Artificial Sequence
  ENSG00000224078_423 (sequence is synthesized)
cccctccccgctttcctgcatggaatcttaaggccctatttggacacctttccccgtccctccagatggtgagcacagaggaagaattgcgttaggccctttggccccggaccagtgtct

SEQ ID NO: 975985 - DNA, 120 bp, Artificial Sequence
  ENSG00000224078_424 (sequence is synthesized)
gccagccacgtgctcagcctcccgtgcgctaaagctcaggtccttcctgtcatcctggtatcctgcactgaggtgtgtgagctcttccccccagcaggccccctgggattgactggcaaa

SEQ ID NO: 975986 - DNA, 120 bp, Artificial Sequence
  ENSG00000224078_425 (sequence is synthesized)
tgacccatggagcacgcctttcctgaagccctgcagaggtgacagtggtccaggcaggaaggggttccttcagccccaatgtagggcagctcccagctgaaacttggtggacagatcagg

SEQ ID NO: 975987 - DNA, 120 bp, Artificial Sequence
  ENSG00000224078_426 (sequence is synthesized)
cctggagtactgcccagggcatatggggaggagggacacagggaatgtggcgcaccctagaggtcacactggagttctgtctccctggagaggggtgagtgattgggcccacatggtcag

SEQ ID NO: 975988 - DNA, 120 bp, Artificial Sequence
  ENSG00000224078_427 (sequence is synthesized)
gctgtggagattcaaggaatgctccacaccgatggccttgaatgggaccaaccctattgagcaatgggccatcttagtggcacctccttgaacctggtgggggatggcactctttcaatg

SEQ ID NO: 975989 - DNA, 120 bp, Artificial Sequence
  ENSG00000224078_428 (sequence is synthesized)
aggttgggtcaaggctgagctctggctggcacccagtggtgctgcaggctggccctgggacttgtgggctttgggccaagggggaagcttccatcctgctgggaacaacccttccttgag

SEQ ID NO: 975990 - DNA, 120 bp, Artificial Sequence
  ENSG00000224078_429 (sequence is synthesized)
gtccagtggcaggaaggggggcttcctgaggtggaaagccctactgttgagggacctgtcctgggaatttgctgtccaagctgcttctgagccatggggtcacctctagggtggtggggt

SEQ ID NO: 975991 - DNA, 120 bp, Artificial Sequence
  ENSG00000224078_430 (sequence is synthesized)
cttgagcccaaggaaaggagaggacaccatgtggttcctgattggctgagtgtggcccggctctgtgtgtcggagttgtgcagggtatggattgggacccaccagtgaaagcacatggcc

SEQ ID NO: 975992 - DNA, 120 bp, Artificial Sequence
  ENSG00000224078_431 (sequence is synthesized)
ggttcatgatgacacaggaccttgtctgaacataatgatttcaaaatttgagcttaaaaatgacactctgaaatccagtcagtgtgcctcactagacttttcgatttcaagattttctgc

SEQ ID NO: 975993 - DNA, 120 bp, Artificial Sequence
  ENSG00000224078_432 (sequence is synthesized)
agaaaatgttttgaaaactttgaatacttaaaaatggcaggtgtagtattgcactttgctagttgctcagatacccttttttatttgtatagatattctgagttcctttttttttctaca

SEQ ID NO: 975994 - DNA, 120 bp, Artificial Sequence
  ENSG00000224078_433 (sequence is synthesized)
tggaaacaaggatgtgtaaaaatgagacgaccacctctcggattaaaaaaaaaaagtgccagagttctagggttctaagtgatgtccaggaaggaggaggaataatatttatggagcata

SEQ ID NO: 975995 - DNA, 120 bp, Artificial Sequence
  ENSG00000224078_434 (sequence is synthesized)
tattatggaacacaaatattccctctgtatacttgcatttttttctatcaattgacgcttacaattatttttgcaagttggaaaaaaatgcagtattaatttcatttgcaacaaatttaa

SEQ ID NO: 975996 - DNA, 120 bp, Artificial Sequence
  ENSG00000224078_435 (sequence is synthesized)
tcagagaacagggatcacttgaactggcacatgtctcttgttttgcagagagggaattaatgtgataccttcatgcttttctattctatgtgctacataattgaatatacaagcaaatat

SEQ ID NO: 975997 - DNA, 120 bp, Artificial Sequence
  ENSG00000224078_436 (sequence is synthesized)
ggatcgatgatgagtcccccataaaaacattccttggaaaagctgaacaaaatgagtgagaactcataccgtcgttctcatcggaactgaggtccagcacattgcctccactttggctta

SEQ ID NO: 975998 - DNA, 120 bp, Artificial Sequence
  ENSG00000224078_437 (sequence is synthesized)
aagtgttgggattacaggcatgagccgccgtgcccggccttactttttattttcaattaagtgaaacaattacatggaaattgaaaaaaaaaaaaggtactctaagtagactactctagt

SEQ ID NO: 975999 - DNA, 120 bp, Artificial Sequence
  ENSG00000224078_438 (sequence is synthesized)
agtagactactctagtgtattttaattttcttgccaattcagccactaggattgtgtcacttgtttttttgattttagtttttcgtatcaaaaagcaaaccactgtttatatttgagtgc

SEQ ID NO: 976000 - DNA, 120 bp, Artificial Sequence
  ENSG00000224078_439 (sequence is synthesized)
tggtttcaactgtatgctgcctcaaataaacttagattatattacaaattcttttttacatagatttcattggctatattcatatatcctcaaaggtttccattgtgtttgaagaggtat

SEQ ID NO: 976001 - DNA, 120 bp, Artificial Sequence
  ENSG00000224078_440 (sequence is synthesized)
cctaattgtaataaatgcttttgattggggatgccagggaagctttgagactaatgtctcagattttttttaaaaaagtttatattctatagtgatcaaagatgtaagaataatttttct

SEQ ID NO: 976002 - DNA, 120 bp, Artificial Sequence
  ENSG00000224078_441 (sequence is synthesized)
tgtcattcattggatagtccagtgagtgtctactgtgaattcttatattcacttgtaactaaacattccatttggcaaatttcgtttcataacttccctaatttcctctacactttgtag

SEQ ID NO: 976003 - DNA, 120 bp, Artificial Sequence
  ENSG00000224078_442 (sequence is synthesized)
gagttcccatggtacttgggtagcatcaggggcaggcagccatgaggtgggtggtgagctgatttgctttctgcagaggagcccagggagggtatccacattgaactcgtatgtccatag

SEQ ID NO: 976004 - DNA, 120 bp, Artificial Sequence
  ENSG00000224078_443 (sequence is synthesized)
gaggaaacccaagtcctttggtccctgcagtgtactggtggtgggaaggggagagggctgtgcatgcatgtaccaagcgacattccatgtgggtcgtggagcaatgactatgagcctctt

SEQ ID NO: 976005 - DNA, 120 bp, Artificial Sequence
  ENSG00000224078_444 (sequence is synthesized)
ttgggagttgtagggtgcccatgctccatttcatgatgaccttggggtgctgggatgggaatgagattgcaagtccctgtgttcctgccacttcgcagactgacttggtttgagagatct

SEQ ID NO: 976006 - DNA, 120 bp, Artificial Sequence
  ENSG00000224078_445 (sequence is synthesized)
gtgttcaggaacccctgtgggatgcttgtctgtgttaggcatttgagcagatattggcccagggtttctacccttccatggttgtacatactgctggaagggcttgttgctccctctgta

SEQ ID NO: 976007 - DNA, 120 bp, Artificial Sequence
  ENSG00000224078_446 (sequence is synthesized)
ttgatgaggggaagttttgcccaggagagcctgatgccatttgcttctgaactgctcaggcacttcaatgcagttgaggttaagagtgtgtcacttcccatgtcgtggtagcatctactc

SEQ ID NO: 976008 - DNA, 120 bp, Artificial Sequence
  ENSG00000224078_447 (sequence is synthesized)
agaaaagtgacccgtcaaggtctctgcacttaaattctccattatcttatgatgttaggttattttcaaattcctcctaattcttcacaacagtcctctttgtgaaacagtcatgaagtt

SEQ ID NO: 976009 - DNA, 120 bp, Artificial Sequence
  ENSG00000224078_448 (sequence is synthesized)
gtatgagggctgtcatccacaggccagtgatggagagttttgtactctgtggccatgttcacaggcaagtggcttaagacgtatcgtgttctcagggacagcaccatagaagccctgtag

SEQ ID NO: 976010 - DNA, 120 bp, Artificial Sequence
  ENSG00000224078_449 (sequence is synthesized)
gatgtgtgattgaatgtgtttctcaatgcaaagtgtgtggaaggagcttcaaggccgaaggaaagttgttctttgtgctggaacactttttccctgcagctctccccattgaaatatcct

SEQ ID NO: 976011 - DNA, 120 bp, Artificial Sequence
  ENSG00000224078_450 (sequence is synthesized)
catggctgttgtcttctctgatggccaagagaatggcttttgagtcaggggtggtgaaagtgtggtattgagagaattcttcgcgcttagtgttctctagtttgatggtgcccttgaaat

SEQ ID NO: 976012 - DNA, 120 bp, Artificial Sequence
  ENSG00000224078_451 (sequence is synthesized)
gcatgcctgccttataccttcatgcctgggtatatctgtgcataagtccccaaagagaggtcacccatgggaggtagatatagaatacagcatggcaggaggaatggcatggcccttgca

SEQ ID NO: 976013 - DNA, 120 bp, Artificial Sequence
  ENSG00000224078_452 (sequence is synthesized)
tgaatgtaagcaattccttcccagtgcaccctgattttcctcatttgcagaaacaaagattgtgtgtggatcgatgatgacttccatatatacattccttggaaagctgaacaaaatgag

SEQ ID NO: 976014 - DNA, 120 bp, Artificial Sequence
  ENSG00000224078_453 (sequence is synthesized)
aatttacaagacaactggaatataagcaatgaatacaagcactaagaagatgaagccatagaaacagctgccagaaagtgaagatgtgacagtgaacgccaaacaagtggtggagtctat

SEQ ID NO: 976015 - DNA, 120 bp, Artificial Sequence
  ENSG00000224078_454 (sequence is synthesized)
ggactccaggcatgccatatacccctcaggacctgtaagtaatactatctttatttttattttatatctctcctaatcattgaaaaggtgctctctatcttgaagatactatattaaata

SEQ ID NO: 976016 - DNA, 120 bp, Artificial Sequence
  ENSG00000224078_455 (sequence is synthesized)
aaatgagaacttgtccctaacacagttagtgataggctgaaacacgctgattgcactctttacccatttagtgatttttctcaagttactctacaccatgtattatcaacataattgata

SEQ ID NO: 976017 - DNA, 120 bp, Artificial Sequence
  ENSG00000224078_456 (sequence is synthesized)
ttacagaatagaattataagacacttcttttgccacagaaagttctattggactcagattatctagagctactacatgtatgctattctatgataaaagatgtagatgtgataaaaacat

SEQ ID NO: 976018 - DNA, 120 bp, Artificial Sequence
  ENSG00000224078_457 (sequence is synthesized)
ttataaaatatctgtcttagaaaagttagctaaaattattttgggaaaagtatgtttgaaaatagaatcgtaagctaccacattgtgataaatatttctaaatgtgtctattaacttgtc

SEQ ID NO: 976019 - DNA, 120 bp, Artificial Sequence
  ENSG00000224078_458 (sequence is synthesized)
aggagacaacagagtgaattaaaacagtagccttgtatcagtatgtttttattcagaagacaaatgcacgttttaactattatatgttcttggcttaactttttttgtaaagttaagaca

SEQ ID NO: 976020 - DNA, 120 bp, Artificial Sequence
  ENSG00000224078_459 (sequence is synthesized)
tgttttgcagatggcttcagaggttattagcacatctgtttgagatatgcacagttttacatttgtcccttaggtaatcaacagggctgagatcagtaaatcacatgtaagccactgtta

SEQ ID NO: 976021 - DNA, 120 bp, Artificial Sequence
  ENSG00000224078_460 (sequence is synthesized)
tgaggctattctgaatagagttacatcattttatcatatctagactttctagttatattggtgctgttgaaaatgattttgtattacatgctttcttccaaatcatagatcaagatattt

SEQ ID NO: 976022 - DNA, 120 bp, Artificial Sequence
  ENSG00000224078_461 (sequence is synthesized)
tatttatgtatgtcttttaaatgaagagtggttaggatagtcctgattattgcacataaatattgcctttcactagattattgttttgggccaaattttagactattattttaaaaaaga

SEQ ID NO: 976023 - DNA, 120 bp, Artificial Sequence
  ENSG00000224078_462 (sequence is synthesized)
gtaccttagtttaatccaacctttccagatacttagaaattattgaaatgtatattttgtgaagatggtcttatgaaagttgttgagctagaaacatgtccttcaccagtggaattctta

SEQ ID NO: 976024 - DNA, 120 bp, Artificial Sequence
  ENSG00000224078_463 (sequence is synthesized)
gaagctttccttgggcttcactgggtgctaatagaccatgatcgtattgctctgtatataatggtacaaattttgttttataacactcagtcttaatagaatgggaatattttatcttac

SEQ ID NO: 976025 - DNA, 120 bp, Artificial Sequence
  ENSG00000224078_464 (sequence is synthesized)
taacgtagtcattagctggccactctctgtgtccattggaccttatagggtaaagggagggcagtgcgtatttgaagcctgtgcacgtgacacacaaagggcttagcaacctccgtgttt

SEQ ID NO: 976026 - DNA, 86 bp, Artificial Sequence
  ENSG00000224078_465 (sequence is synthesized)
gtgcacgtgacacacaaagggcttagcaacctccgtgttttcccagcacaggatacccattcttcctgaatgtttcattgttaaat

SEQ ID NO: 976027 - DNA, 120 bp, Artificial Sequence
  ENSG00000224078_466 (sequence is synthesized)
tttttttcttaaaatgttattttttctctttttcttttatgtcaggtgatgatagagcccctagggaagcaaaactgtccatgcccttgccttaactttcagatacgataaaaacaacat

SEQ ID NO: 976028 - DNA, 120 bp, Artificial Sequence
  ENSG00000224078_467 (sequence is synthesized)
ttataaaatacctgtcttagaaatattagctaaaattatgttggggaaagtatgtttgaaaatagaattgtaagctaccacattgtgataaatattactaaatttgtttattgacttgtc

SEQ ID NO: 976029 - DNA, 120 bp, Artificial Sequence
  ENSG00000224078_468 (sequence is synthesized)
tagctggtagcccgcctctggttgccaatttgttcttgagtccttgttctgagttcctggaaggaaacagatttgtctggttgggaggagaatacaaggccacatctttgtcgtttgttg

SEQ ID NO: 976030 - DNA, 120 bp, Artificial Sequence
  ENSG00000224078_469 (sequence is synthesized)
gctaactttgtccttggttgaggacattagagttttggtcaccaggcatagcctatgtgcctgtgtgcccgtgttgtatcccatgtgtttgggggacatgtacattgcatgaactagtga

SEQ ID NO: 976031 - DNA, 120 bp, Artificial Sequence
  ENSG00000224078_470 (sequence is synthesized)
gctcctgctcattgcttctgatacccaaggagtccctggcttatcctaaacccaatataggttaaagcctttctcattaggggcccagggtcccaaggcttttgtgagtatcattgtagg

SEQ ID NO: 976032 - DNA, 120 bp, Artificial Sequence
  ENSG00000224078_471 (sequence is synthesized)
ggatcgatgatgactataaaaaaaatggatctcatcggaatctgaacaaaatgagtgaccaaatcatttctgtgccacttctgtgagctgaggtccagcactgggaccatgccaggcaaa

SEQ ID NO: 976033 - DNA, 120 bp, Artificial Sequence
  ENSG00000224078_472 (sequence is synthesized)
cctggtgagcgtcactcttgagagctgagagtaggtgggaagcagctcatggtgagagggttcagaggccgcctttccctctctgcgcactgcccagttcttctagtcacatgtcccggg

SEQ ID NO: 976034 - DNA, 120 bp, Artificial Sequence
  ENSG00000224078_473 (sequence is synthesized)
acagtaccatacctgtgtgtgtcctgcctgcattgctgtgaccacttttagtggaatcaggtgcagtgcagctctgcagcttctgcaaattgccacgctcccactctcaagcaggttgag

SEQ ID NO: 976035 - DNA, 120 bp, Artificial Sequence
  ENSG00000224078_474 (sequence is synthesized)
tgctacgagtgatttttagaccatttgtttattcccttatcatggctttttgtgacttcttcctccccagtccgttgggtcacctttaaaggtaaagtaatcctgaggtggttgaattta

SEQ ID NO: 976036 - DNA, 120 bp, Artificial Sequence
  ENSG00000224078_475 (sequence is synthesized)
gttggacagtatttggactgatggaagctagagacaaacacattgactattgttgaataacactggaaacatcttaggagagcagtacattagctaatttaataggtacataaactgaat

SEQ ID NO: 976037 - DNA, 120 bp, Artificial Sequence
  ENSG00000224078_476 (sequence is synthesized)
cccactgtcttgtgcttgacggaccagcagacacatatgcttgtatcgttctcatgtttctacatgtttaccctattcccacaggtcaacaaagacaaggcacctagccccacatgaaac

SEQ ID NO: 976038 - DNA, 120 bp, Artificial Sequence
  ENSG00000224078_477 (sequence is synthesized)
tttattcctttcccttttgagatgtgacatgaaagaaaataacagaaatgatttttccatcccatcctcagggaccagtgggaatgaattttaccatcccaccctcaagggccaggtcag

SEQ ID NO: 976039 - DNA, 120 bp, Artificial Sequence
  ENSG00000224078_478 (sequence is synthesized)
gtcgctaagcattttgtcactaaaatattgcccttttttagggattatgtaatactctataaggcactgtctgtgctgggcagcatggagcctgggtcattgctgtgttgggggcttggt

SEQ ID NO: 976040 - DNA, 120 bp, Artificial Sequence
  ENSG00000224078_479 (sequence is synthesized)
ctccatgacttaatagggtgtatcagtgtgtcccagagaagtgtactccagagtgctcattttctttcatgtttctgaagcaaacagtgcccccttttttagaagtttgcatgtgtcact

SEQ ID NO: 976041 - DNA, 120 bp, Artificial Sequence
  ENSG00000224078_480 (sequence is synthesized)
gataactttaataattgatcttgttgaaaaacctgggaaaacagtgagttaaataataacttctctgaacatgaggtccagcccaattacctgccctaagcaaactatatggaaggagag

SEQ ID NO: 976042 - DNA, 120 bp, Artificial Sequence
  ENSG00000224078_481 (sequence is synthesized)
ttcagtttgttcagctatgtggtcccagcaaggactgtggtactggaaaactaaccagcttacatgcactagagaagtagaattggacagtgatctgtaggtacccagtttggagatgaa

SEQ ID NO: 976043 - DNA, 120 bp, Artificial Sequence
  ENSG00000224078_482 (sequence is synthesized)
attgcaactctgagttcttgattggcaacataaatacgttgatagtaaacagaccctggggaatcagcacttgagttgtgaaaagcgggaaatagctatgcctacactagagccattcac

SEQ ID NO: 976044 - DNA, 120 bp, Artificial Sequence
  ENSG00000224078_483 (sequence is synthesized)
acttttgctggagctgcaataatcttctaagtcatgcttgctctcgtgagggcaatgagatggtcacaatccaaggagagttggggttttcacttttcatttctctattaagtgaaaaaa

SEQ ID NO: 976045 - DNA, 120 bp, Artificial Sequence
  ENSG00000224078_484 (sequence is synthesized)
tctcctggctctgagcagtacatgtcaggaacaagagggaattgtagctggaagacagtagaagagccataggacaagtctctaagagaaggaagaaaaggcgcaatgaaagaaaacaag

SEQ ID NO: 976046 - DNA, 120 bp, Artificial Sequence
  ENSG00000224078_485 (sequence is synthesized)
tggatggctcaggacggtaagcattcctctgccccgcatgatgactgagggtgtctttaggatttctgagacccacaaggagcagttcttcagcaggccattaagggcatggctgtggtc

SEQ ID NO: 976047 - DNA, 120 bp, Artificial Sequence
  ENSG00000224078_486 (sequence is synthesized)
tttaaagtcattggctcacccactgcccagcctgtggtgtcaaatgtcctgcctcttcaaatgtgcttggatcgatgatgagtcctccaaaaaaacattccttggaaaagctgaacaaaa

SEQ ID NO: 976048 - DNA, 120 bp, Artificial Sequence
  ENSG00000224078_487 (sequence is synthesized)
gaacaaaatgagtgaaaactctataccgtcgtcctcgtcaaactgaggtccagcacgtggctccaactggagctggagagagagagacaacttccattggttgatgtggtctggcatgga

SEQ ID NO: 976049 - DNA, 120 bp, Artificial Sequence
  ENSG00000224078_488 (sequence is synthesized)
ttcagtcatatgttttttcatgctatgtatatgagagttccattattcagatactaaacaaatgtctactgtacatttactcttctcactgatgatggattagataaccatgcacaaaat

SEQ ID NO: 976050 - DNA, 120 bp, Artificial Sequence
  ENSG00000224078_489 (sequence is synthesized)
tgaatgtaagtgatttcattccaaagcaccctgagtttcctcatttgcagggatgaaacctgtgtgtggatcgatgatgacttccatatatacattccttggaaagctgaacaaaatgag

SEQ ID NO: 976051 - DNA, 120 bp, Artificial Sequence
  ENSG00000224078_490 (sequence is synthesized)
gtcgaactgaggtccagcacattactccaacaggggctagacagagaaggccaacatccgtttgttgacatgggttatatcaaggcgtctgttcaggcttagaatgtggtctcttatggg

SEQ ID NO: 976052 - DNA, 120 bp, Artificial Sequence
  ENSG00000224078_491 (sequence is synthesized)
tgatgggggtcacaggagagtggtggctcccatgtataggaaatttcttgtttgaaggactgtcagtgagggtgggtaacacatgcattgtctgcaggactaggtgaatgtccatgtggc

SEQ ID NO: 976053 - DNA, 120 bp, Artificial Sequence
  ENSG00000224078_492 (sequence is synthesized)
ctagcaagagttagctggtagcccgcctctggttgccaatttgttcttgagtccttgttctgggttctcaggtcccacggaggaaaacagatctgtgtggttgagaggtgggtacaaggc

SEQ ID NO: 976054 - DNA, 120 bp, Artificial Sequence
  ENSG00000224078_493 (sequence is synthesized)
cgcatctttgtcatttgttggctaactttgtccttggttgaggacattagagttttggtcaccaggcatagcctatgtgcctttgtgcccgtgttgtatcccacgtgttttgaggacatg

SEQ ID NO: 976055 - DNA, 120 bp, Artificial Sequence
  ENSG00000224078_494 (sequence is synthesized)
tattttgcacgtaaaggtgagctcctgctccaagctggttctgataccaaaggagtccctggcttatcctaaactcatggtaggttaaagccttcctccttaggggttcagggccgcaag

SEQ ID NO: 976056 - DNA, 120 bp, Artificial Sequence
  ENSG00000224078_495 (sequence is synthesized)
gcttttgtgagtggcattgcaggcgttgaagcagtgatgttgagagggatggtcaatgtcagtgctctttagcaggatggtgtactgcaggggcccccagccccgagacgagcatccctg

SEQ ID NO: 976057 - DNA, 120 bp, Artificial Sequence
  ENSG00000224078_496 (sequence is synthesized)
catccatgcatttctgcctccatgaacaggggaggccagagacaggcagatagtagataaattgcaggggactggatgacatggccctcgtgacctgtgcacctgtctgtctttctgaag

SEQ ID NO: 976058 - DNA, 120 bp, Artificial Sequence
  ENSG00000224078_497 (sequence is synthesized)
cacgcctgtgttaactctgcacctcccaggtagcactggcatggagggcaggcacatgttggtgagggacaattgttaccttgtgtgagctgcggagataccaggaagcccctggacaca

SEQ ID NO: 976059 - DNA, 120 bp, Artificial Sequence
  ENSG00000224078_498 (sequence is synthesized)
aatggcaaaggctccttcggaagttgttggatcccttctgaatgtaagcacttctttcccagagcactctgagtttcctcatttgcagggacaaatactgtgcgtggatcgatgatgact

SEQ ID NO: 976060 - DNA, 120 bp, Artificial Sequence
  ENSG00000224078_499 (sequence is synthesized)
ctgaacaaaatgagtgaaaactctataccgtcatcctcgtcgaactgaggtccagcacattactccaacaggggctagacagagagggccaacatctgttttttgacatgggttatacca

SEQ ID NO: 976061 - DNA, 120 bp, Artificial Sequence
  ENSG00000224078_500 (sequence is synthesized)
tgttttttgacatgggttataccaaggcatccgttcaggcttaggatggggtcttttatgggtgatgggggtcacaggagagtggtggctcccatgtataggaaatttcttgtttgaagg

SEQ ID NO: 976062 - DNA, 120 bp, Artificial Sequence
  ENSG00000224078_501 (sequence is synthesized)
tcttagggaatcataacactctgctaaccgtgagactctggctatgctagtccgccatgggctggtcattgactgtgatcctggtctccatgattgaatagtgtgggtcagtgtgtccca

SEQ ID NO: 976063 - DNA, 120 bp, Artificial Sequence
  ENSG00000224078_502 (sequence is synthesized)
cctacccatatatattagagcaaatgaattgttctcagttctgtaaatatccagctgtggtttgacatagcaactctctttgtatttgcttggcagcatttatagaaacagctggtagac

SEQ ID NO: 976064 - DNA, 120 bp, Artificial Sequence
  ENSG00000224078_503 (sequence is synthesized)
cctggggaaccagggcatagtgagattcatgggacgttatttcacctactcttgagccattcacacatttgagctcgcagaattatctggtcaatgagcagtctcttgagggtaatgaga

SEQ ID NO: 976065 - DNA, 79 bp, Artificial Sequence
  ENSG00000224078_504 (sequence is synthesized)
aattatctggtcaatgagcagtctcttgagggtaatgagatggtcaacatccaaatccaaagatactaatgagatttta

SEQ ID NO: 976066 - DNA, 64 bp, Artificial Sequence
  ENSG00000224078_505 (sequence is synthesized)
ctcctgggttcaagagattctcccgcccgtgtttgtagtagagatggagtttcaccatattggc

SEQ ID NO: 976067 - DNA, 120 bp, Artificial Sequence
  ENSG00000224078_506 (sequence is synthesized)
gggaggaaacagaacaacacactcctgaggtagtatccaatttttagtaaatttatttttattatttttcaaactgtcagtgatttggtttggtgaacaataggttaatacagacaatgt

SEQ ID NO: 976068 - DNA, 120 bp, Artificial Sequence
  ENSG00000224078_507 (sequence is synthesized)
taggaattattaatctgatgcgctatctgaagcatcagtttcctttatttttaagatttttttcttctctgtagtttggataatatttaaaacatttccaagagttataaattagtatat

SEQ ID NO: 976069 - DNA, 120 bp, Artificial Sequence
  ENSG00000224078_508 (sequence is synthesized)
tttctatgctgattaataatgaaaccttttgtcttatacagatttttaaaaaatggacgtgtgcgtgcatgtgtatatatataaatatatatatatataaaatctcttctcacaagatga

SEQ ID NO: 976070 - DNA, 120 bp, Artificial Sequence
  ENSG00000224078_509 (sequence is synthesized)
tgcagactaaaactgcattttacattttatatggctaagtttattgtttccttgtgttgtaatatgatggaaagtaatgggaataattctgcttcctgtccttagggaccagtaggaatt

SEQ ID NO: 976071 - DNA, 120 bp, Artificial Sequence
  ENSG00000224078_510 (sequence is synthesized)
ttcccatgataagcattttgtccttaaaatactgacatcctgttaagagatcatgacactccaatgaccatgagaccctggctatgctagtcagccagggggctgaccattgacagtgat

SEQ ID NO: 976072 - DNA, 120 bp, Artificial Sequence
  ENSG00000224078_511 (sequence is synthesized)
ctgaggggatgctgttttgatcacttagtttatctgatgttgctgggcctccaactggtgctgactggtacttcctgagatggcgaaggtttttctgtactctgagatgccgtgtatctc

SEQ ID NO: 976073 - DNA, 120 bp, Artificial Sequence
  ENSG00000224078_512 (sequence is synthesized)
ggatcgatgatgacttaaaaaaatggaaaccttggaaatctgaacaaaatgagtgaccaagacacttctgtgagctgaggtccagcacagggaccataccaggcaaacccgtggagggcg

SEQ ID NO: 976074 - DNA, 120 bp, Artificial Sequence
  ENSG00000224078_513 (sequence is synthesized)
ttcagtttggtcaggaactggtaccaaaacgaacccacttgcatatgttagagcagatgaattgtacagaggcctatatatcttcgggaattacatgacaatgatttaagtgcatggctg

SEQ ID NO: 976075 - DNA, 120 bp, Artificial Sequence
  ENSG00000224078_514 (sequence is synthesized)
acagccttcaaacacctagtaatcaggctttggggtaccagcgtcagaggagtgaacactgtagaaatggctgtgccagcactcgagtcattcacactattttcgtagacgccacaacat

SEQ ID NO: 976076 - DNA, 120 bp, Artificial Sequence
  ENSG00000224078_515 (sequence is synthesized)
gtggtgaagctcaggctcttcctggcgccctggtctcctgcacggagctgcgtgagctcttctacccaggcgggcccctgcccttgagcggcatagatggtgaccccagaggaagacttg

SEQ ID NO: 976077 - DNA, 120 bp, Artificial Sequence
  ENSG00000224078_516 (sequence is synthesized)
cgttgggcccactggctctgggctcagcccctggtgagctgaagctcaggcccttcctggcaccctggtctgctgcactgagctgcgtgagctcttccacccaggtgcaaccccctggca

SEQ ID NO: 976078 - DNA, 120 bp, Artificial Sequence
  ENSG00000224078_517 (sequence is synthesized)
taggtattgagcctggaggaagacttgaattggtcccaatggtcccaggccagcatccatcagctaggtgctgagcccctggtgcactgaagattgggcacttcctggcaccctggtgtg

SEQ ID NO: 976079 - DNA, 120 bp, Artificial Sequence
  ENSG00000224078_518 (sequence is synthesized)
tttttttttttttttttttttcagagtattttctttcttgtccagattagctaaattggattgttctatgctaaattcacttaatcactactctattatttttgaattttttagttctgt

SEQ ID NO: 976080 - DNA, 120 bp, Artificial Sequence
  ENSG00000224078_519 (sequence is synthesized)
ctgtttttttcacttggttctttttttaaaaaaacttctactacctttctgagacttctacttttttacttttttcaagaagctttataattacttgctaaagcatttttaccatgactg

SEQ ID NO: 976081 - DNA, 120 bp, Artificial Sequence
  ENSG00000224078_520 (sequence is synthesized)
tttttaacttcttcagataaccacaacatttggttaatcttgaggttggcttggttaactgtcttttctcatcctgcttatgattttccttctaattgtgatttttccggttcttgatag

SEQ ID NO: 976082 - DNA, 120 bp, Artificial Sequence
  ENSG00000224078_521 (sequence is synthesized)
atgggtgatgttttagtttatcctgcatttttttttcctttttaagttagaggaatctgaatctattcaaatgttttattttagcaggcatgtgccctgtttaggtttaatttgaatgtc

SEQ ID NO: 976083 - DNA, 120 bp, Artificial Sequence
  ENSG00000224078_522 (sequence is synthesized)
gcgataacctgggtcaaccagccagtagcctcatgaagtatgggagggaattctccagtgtcagcattcaaagacatcatgagtttttacttctcattttcttttaagtgaaataatcgc

SEQ ID NO: 976084 - DNA, 120 bp, Artificial Sequence
  ENSG00000224078_523 (sequence is synthesized)
atggaaattaaagaataaatatatgaaatatatgaaacttatatgaaatataagaatgtgagaaggcctacagcgtggggatccccaggctatttgaacaatgaatgtctgtgttacaca

SEQ ID NO: 976085 - DNA, 120 bp, Artificial Sequence
  ENSG00000224078_524 (sequence is synthesized)
ttagtacattttatatgcagatacatagtgaagcctcctttcttatgcatatttgacaaatggacatgtatatttctcatcttcccatatttttactccatttccacaggtcatgtagac

SEQ ID NO: 976086 - DNA, 120 bp, Artificial Sequence
  ENSG00000224078_525 (sequence is synthesized)
ttgtccagagaatattcttcttagggaactataacattccaatgataatggtagtcagccatgtggctggatcatcgttcctgtatcctggtctctatgacttagtgtggtgatggtgtc

SEQ ID NO: 976087 - DNA, 120 bp, Artificial Sequence
  ENSG00000224078_526 (sequence is synthesized)
attgtgtccaagtgtgacagaattgttagtgtgtagtgtctgtctcctatctcaggctcacagtcccttttataaacatgcctggattgatgatggcttcagtatcttttggaaatctgg

SEQ ID NO: 976088 - DNA, 120 bp, Artificial Sequence
  ENSG00000224078_527 (sequence is synthesized)
actgagcaatagaattgcttctctcaaattgatttcaagtcatataaaaggccatgttacacatatattgttaatctgagggaggctgtgatcatttaagttgtattttataaacactag

SEQ ID NO: 976089 - DNA, 120 bp, Artificial Sequence
  ENSG00000224078_528 (sequence is synthesized)
gaccaccagtaagaaaacaattcaaaaaatattaaaagaacaaccaaagaattaaaatagaataaccgaaaagatctgtttaacacaaaagaaggcagttaaagatgaacagaggaacca

SEQ ID NO: 976090 - DNA, 120 bp, Artificial Sequence
  ENSG00000224078_529 (sequence is synthesized)
ataagacatatagaaaacagataggaaaatgacagacataaacccagccatatgacaattatattaaatttttaagagattaggaaattccgttgttttttaaacatgagcaactatacg

SEQ ID NO: 976091 - DNA, 120 bp, Artificial Sequence
  ENSG00000224078_530 (sequence is synthesized)
ctgtctacagaagagacactttagaacaaaagatacaaatagttggaaagtaaaaagatggaaaaagctatatccagcgaatccagaagagagcagaagtggctattctgacatcagaaa

SEQ ID NO: 976092 - DNA, 120 bp, Artificial Sequence
  ENSG00000224078_531 (sequence is synthesized)
aaagagactttaagataaagtattgctagagaggaagaaggatagtatttaatgatagaagggttaatatggaatatgtaacaattacaatcatatcagcactaacaacagtgcccaaaa

SEQ ID NO: 976093 - DNA, 120 bp, Artificial Sequence
  ENSG00000224078_532 (sequence is synthesized)
ctacatacactgaaatttaacatgattgaggggatcaataggcaattcaacaataaaagcttttgttcataccctcttcttaatcagtgataagtcaattagatagagcatcattgaggt

SEQ ID NO: 976094 - DNA, 120 bp, Artificial Sequence
  ENSG00000224078_533 (sequence is synthesized)
tacaacatacttcagcaatgttgtcaaccaatttgacctgagatagatagatagacagttagacagacagacagacagacagagaaaacttcacccaacaacagaaatacaaattatttt

SEQ ID NO: 976095 - DNA, 120 bp, Artificial Sequence
  ENSG00000224078_534 (sequence is synthesized)
caagcatacctggaacattctccaggatagagtatatgttaggctataaaactgtactcaataaatttaagattgaaaccatgtagagtatgttgtgtgaccatagaggaattagaaatc

SEQ ID NO: 976096 - DNA, 120 bp, Artificial Sequence
  ENSG00000224078_535 (sequence is synthesized)
aacacagaaataaatttggaggtcacaagatatttggaaattaacacactttacagagcccattggtcaaaaatatatatattaaactagaaaggccgggggtggttgcttacacctgta

SEQ ID NO: 976097 - DNA, 120 bp, Artificial Sequence
  ENSG00000224078_536 (sequence is synthesized)
ccagctactcaggaggctgaggtaggggaatcacctgagcccagcaggtagaagctgcattgaaccaagattgcaccactgcataccagcctgggcgacaaagtgagaccctgtctaaaa

SEQ ID NO: 976098 - DNA, 120 bp, Artificial Sequence
  ENSG00000224078_537 (sequence is synthesized)
aagtgagaccctgtctaaaaaataaaaggaatccagaaaacatcttgcatagaatttgatacaactaaagacatgcttagagggatatttatagttttaaataactgtatcagaaaaaaa

SEQ ID NO: 976099 - DNA, 120 bp, Artificial Sequence
  ENSG00000224078_538 (sequence is synthesized)
ggaattatcagagtaacaatagttcctgttactgacttgatatggtctctgccagaatagcttctcagattaatggccactctcaggggaagcatttctccttgcattggtttgctggta

SEQ ID NO: 976100 - DNA, 120 bp, Artificial Sequence
  ENSG00000224078_539 (sequence is synthesized)
tggatggcccttagattttggcatgagtgattatgcagcctatttgaagaaaacctgttttcaggacctttttaattaaatatggcctgttacatgagttaaagtgtcatacgataccat

SEQ ID NO: 976101 - DNA, 120 bp, Artificial Sequence
  ENSG00000224078_540 (sequence is synthesized)
tttttgaccacttagttgatgcctctgaaaggaagagagaatcagatcgctaaaatttgatgtgtcgtcagtgtggatcctactcagtagtgtcacaacgaggctgaaaatcatattaag

SEQ ID NO: 976102 - DNA, 120 bp, Artificial Sequence
  ENSG00000224078_541 (sequence is synthesized)
acagagtattggattacctaaggaaagaagcagaggatggaatttgaggcaatcaggatgagtgaaaaattgatttgcagctgacctgcaaatggaatcatcaggaacatccctttctca

SEQ ID NO: 976103 - DNA, 120 bp, Artificial Sequence
  ENSG00000224078_542 (sequence is synthesized)
tggagtcccttaatttacaagttaactgcaaacataggagatgatagttccaagaaggaacattttatcgtctttgtttttaatctcaagaatggtacctaccatcagtgaatgacctgt

SEQ ID NO: 976104 - DNA, 120 bp, Artificial Sequence
  ENSG00000224078_543 (sequence is synthesized)
tgcagtgctttcattgaagtgttcttcgttccctcagcaatatgattgtgatgactgaaaaagggaaactgtgccactatttgtaccatcattttcaccaaaatctaaaaatgcttttta

SEQ ID NO: 976105 - DNA, 120 bp, Artificial Sequence
  ENSG00000224078_544 (sequence is synthesized)
tgacgtatggagacattcttcatgtttgtttcagtggacactccttgcagatgtaaaaaactgagaaaactcacttttggaaagtgacctaaagagtgtcattgaagtgaattttaagta

SEQ ID NO: 976106 - DNA, 120 bp, Artificial Sequence
  ENSG00000224078_545 (sequence is synthesized)
ggcacgatgattgttttcatggttgctgttggatcatatctcaggagctggaatgacagacattattgaacaaagaaatcaggatagtggaacttaaagggcttcatctcagtgctttca

SEQ ID NO: 976107 - DNA, 120 bp, Artificial Sequence
  ENSG00000224078_546 (sequence is synthesized)
aactccatctcaaaaaaaaaaaaaagctttaaatttttagccaatctaataggtgaaaatggcatttttaacataagtctgacttaaacaattaatggccgtggctaaaagaagaatcaa

SEQ ID NO: 976108 - DNA, 120 bp, Artificial Sequence
  ENSG00000224078_547 (sequence is synthesized)
caattaatggccgtggctaaaagaagaatcaaataatgatgtgtgatttataagataaggaggcagtaccccatttttcctcactctacccaaaaatcctgtttatctgagcaagaaatc

SEQ ID NO: 976109 - DNA, 120 bp, Artificial Sequence
  ENSG00000224078_548 (sequence is synthesized)
attaatattttctaaatccgcttggaagttcataaacgccctaagtataccttataccagcgtttttatgactttgtatttttgaaataattttagattcagaatcgcaagaatcatgca

SEQ ID NO: 976110 - DNA, 120 bp, Artificial Sequence
  ENSG00000224078_549 (sequence is synthesized)
gagcgacctgatttacgcttcacctagattgactttttattctgcatcgttgtgttcttcccccacttcctcttcttgctctcgcctccctttatatgtttatacatagcattatcattt

SEQ ID NO: 976111 - DNA, 120 bp, Artificial Sequence
  ENSG00000224078_550 (sequence is synthesized)
tatgtactatttgaatgatttgccgacattatcttcctgtaacccaaaacacttcaacatctactttctaagagcctgagcatcttatattgacttcggtaaaaatttcaaaataatgaa

SEQ ID NO: 976112 - DNA, 120 bp, Artificial Sequence
  ENSG00000224078_551 (sequence is synthesized)
atgtgtcaatagtataaaagtataacagtatgcagtccatattcacattttacccatttttccagaggtgttctttatagcagtttcttcccttctacaacatccagaaaaggatcttct

SEQ ID NO: 976113 - DNA, 120 bp, Artificial Sequence
  ENSG00000224078_552 (sequence is synthesized)
attgcattcaattatcatgtctctttagttttgtttaatctgaaacagtttcctggactttgatcacatcagtgttcttaaaaagtaatagctaacagatttaaggagatacctcagatt

SEQ ID NO: 976114 - DNA, 120 bp, Artificial Sequence
  ENSG00000224078_553 (sequence is synthesized)
ttgaattttgtgtttcctcatgaaaaggtttaagatactcattttgagcagaaataattcagtattctcagtcttccttagtgaatcatctcaggtgacaaataatgtcactttgtctca

SEQ ID NO: 976115 - DNA, 120 bp, Artificial Sequence
  ENSG00000224078_554 (sequence is synthesized)
ctttgaattactttgatctcttggttcgattggtgtccactggacttttccactatagttaacattccttcataattaatttggaactatacaggtattctatttttcatcaaacttcca

SEQ ID NO: 976116 - DNA, 120 bp, Artificial Sequence
  ENSG00000224078_555 (sequence is synthesized)
catagtaggtttaatatgcacaggtgacttttacctgaatcagtgttgattagaaaaaaatctgttattgcttagatgcattatttagtatcttgtactgtaaggaagagtttgtatatc

SEQ ID NO: 976117 - DNA, 120 bp, Artificial Sequence
  ENSG00000224078_556 (sequence is synthesized)
atggcctgtcagaacagtcccgcaatgtgttttatgaactgaaaattctgaaagaataaggtagtgatttatatgagaatacagggaaagggttacccaaagagtctaatgaatttatgt

SEQ ID NO: 976118 - DNA, 120 bp, Artificial Sequence
  ENSG00000224078_557 (sequence is synthesized)
ctaaaccatagagtggaatgtgagagacacacagaactccagagttgtgatgcaaatacactgcacagtggaaggagaagaggaagtttttggtaatagtgtttcatctaatgtagctct

SEQ ID NO: 976119 - DNA, 120 bp, Artificial Sequence
  ENSG00000224078_558 (sequence is synthesized)
gtaatgtatgtgtgccttcattattggaagagtgttcaacagttcacagttgaatagactgaagcatgatgctggaatctgggttcagattctagatccgtatcctacatatcaccaatg

SEQ ID NO: 976120 - DNA, 120 bp, Artificial Sequence
  ENSG00000224078_559 (sequence is synthesized)
cttgtttctcaatttttgtttgtcattactttaagtctctttaatgcattagagtatccaaggttgacagtgaagggactgcatttgggagctatctgaagacaaaaacagctttttgaa

SEQ ID NO: 976121 - DNA, 120 bp, Artificial Sequence
  ENSG00000224078_560 (sequence is synthesized)
gtttctttcatacgtcaccttacatggcctctcgcattctctgtggagaagtttgtgtagattattcagactaccgtgcagtgactgtgttgtttaaaacctatacatatccaaactctg

SEQ ID NO: 976122 - DNA, 120 bp, Artificial Sequence
  ENSG00000224078_561 (sequence is synthesized)
ttttgtgttctctataactagggcattagtctcccaatagtaatcctgcatcttatgctatttaaagaaggttcccagaatacagacattcttacttttgaacaatgacttgggtagatt

SEQ ID NO: 976123 - DNA, 120 bp, Artificial Sequence
  ENSG00000224078_562 (sequence is synthesized)
gaggaagtggttttaataatcactttgatatatttcaaaatctggttcattattggtgaggtgcaggccacctggtattaatgaaaatgtgtaattaggaaccagtgcagtggaatcaga

SEQ ID NO: 976124 - DNA, 120 bp, Artificial Sequence
  ENSG00000224078_563 (sequence is synthesized)
ggcttgaacatgacctaaggcttggtcaaaagtggtgatctgaatgttccctgctctctgtatgtaactttgtacttagtcttcagtggcagggttgcagcagaggcccagtaaatattg

SEQ ID NO: 976125 - DNA, 120 bp, Artificial Sequence
  ENSG00000224078_564 (sequence is synthesized)
ttcattcaacgtatgaaggagaaaatggaagtaaggccaaaaattactgattgtaaacaaatgaagcaccaagtgaataaatgtacaaatagacaagtagccagtaggaaaaaaaacaat

SEQ ID NO: 976126 - DNA, 120 bp, Artificial Sequence
  ENSG00000224078_565 (sequence is synthesized)
aattgttacctaaagaatgaaaaccaagtggaaaaggccgccagggacattttaatatgcatattgttgctttcacatataatacagtaagggagtatcagaaaacctgaatctgcctga

SEQ ID NO: 976127 - DNA, 120 bp, Artificial Sequence
  ENSG00000224078_566 (sequence is synthesized)
ctaaaacataccctgttccacaaagctatatatatgagagtattgaaggtggtttaataccaaattcaaaaattcagcctcagtgtagcaaacttttaaattttccatgatataaagtaa

SEQ ID NO: 976128 - DNA, 120 bp, Artificial Sequence
  ENSG00000224078_567 (sequence is synthesized)
gttttaaccaacaatggaagtcacagcactaaagtacattactattatatgattctctgatggtaatagaaactgtgctgcaggacacgttttgattcaggaagaaatgtggagtaactc

SEQ ID NO: 976129 - DNA, 120 bp, Artificial Sequence
  ENSG00000224078_568 (sequence is synthesized)
cacagaggaattcatcctttctaagtttaaatctgaacggaacccatatgcccataccctgaagatgcatgtaagggaacaacatggcttggtctgttgaaaaaagaaaagaaccttcaa

SEQ ID NO: 976130 - DNA, 120 bp, Artificial Sequence
  ENSG00000224078_569 (sequence is synthesized)
ttaagcattctgtgaacttgataagaggatgcagaggaacgtaaatgcactctgcatatctgtgattgaccttggaacacagtgattgccctctaaagaatagccgagtaagtactgtta

SEQ ID NO: 976131 - DNA, 120 bp, Artificial Sequence
  ENSG00000224078_570 (sequence is synthesized)
tcattccaccgatcaaattagagcctcttccttccagtgggagcagagtgacatagaccaaggaaagccgaggagaagattgtagccttttatttctccttatatttgttgaggttcact

SEQ ID NO: 976132 - DNA, 120 bp, Artificial Sequence
  ENSG00000224078_571 (sequence is synthesized)
gctgactgataaacgatttgcacaaaaaaattcaggcctctgactcttctggtatttgatttatctagtaaagttaattccaagacaaaagtacagttggttaaaaataccagtctcatg

SEQ ID NO: 976133 - DNA, 120 bp, Artificial Sequence
  ENSG00000224078_572 (sequence is synthesized)
tttatttgatggtttgaaatattctgttacattgttgtatctcgtttgtcaccttggaatatatgacaatcatgttatcttgattttttccacaagataatttgattctaaaatcgattc

SEQ ID NO: 976134 - DNA, 120 bp, Artificial Sequence
  ENSG00000224078_573 (sequence is synthesized)
attgtttatcttcaggaattagagattttaaaaatgtcatctcatgtctcattcagtcatttccaagatttagcgagtgttctccctaatgccttggataagaatgccttgttcaatggc

SEQ ID NO: 976135 - DNA, 120 bp, Artificial Sequence
  ENSG00000224078_574 (sequence is synthesized)
tgtattttactcataattagcattccaactgctttgggtttttttagatttacaatttttatttctgcagtacttaactttctatattttatgtatattaaaacaagttaggtaggatga

SEQ ID NO: 976136 - DNA, 120 bp, Artificial Sequence
  ENSG00000224078_575 (sequence is synthesized)
agatcactggatgatataaatactaatagcaaaagtagaaataagttgtattatataagttgtacataggtgttacattaggttgtcttacatgaaagtattacaaagtatgggatttgg

SEQ ID NO: 976137 - DNA, 120 bp, Artificial Sequence
  ENSG00000224078_576 (sequence is synthesized)
ggtgtattttgaaatccttgccagttctacttgataaagtattgaatggtatcatgtgagaggagaagaggacggaaacaggacttatgatttagacctcaacaactgctagggagggtt

SEQ ID NO: 976138 - DNA, 120 bp, Artificial Sequence
  ENSG00000224078_577 (sequence is synthesized)
ggttttctctgagtgcatgattttttataaaaatgctattttgccagttttagatccatattaaacccacagattaaggttttggtttttaaagtgtaaataggaagcttgagctggggg

SEQ ID NO: 976139 - DNA, 120 bp, Artificial Sequence
  ENSG00000224078_578 (sequence is synthesized)
ggaatttggaggtagagataatacttaatcgctgtgggaaaggatgagatctagagatagagtgtatgtgggagtaggaacatatgtgtctgagaccatgctttggatgctctagcattt

SEQ ID NO: 976140 - DNA, 120 bp, Artificial Sequence
  ENSG00000224078_579 (sequence is synthesized)
agatattgagaaaatgaggaagacccattaaaggagattgtggctagagttactggtgaaaaccaaagggttgtagtgttcctgaagatacatgaagagtgagattaaaaattaatgggg

SEQ ID NO: 976141 - DNA, 120 bp, Artificial Sequence
  ENSG00000224078_580 (sequence is synthesized)
cagcagtggcttttgcatggcattgaaaagacacagttcaatttgaaaattgagtatcattaatcgtagtgctcttattattgaaaaggccaaatcaaacaatacctttgagttgatggt

SEQ ID NO: 976142 - DNA, 120 bp, Artificial Sequence
  ENSG00000224078_581 (sequence is synthesized)
ctgtactataattaggttaccattgttagcccagcatagacacatgctgatacctgtgagttgctttcatcaattagtatgtgaagatgcatcccagttgtacaattttagatcctcttc

SEQ ID NO: 976143 - DNA, 120 bp, Artificial Sequence
  ENSG00000224078_582 (sequence is synthesized)
gtccttacgtagctttatcattggagtttccacttgcagtgtctctatctgtacctgcattcattggccacggtagagttttcattacggcaggattgcatttcattgttttggcttgtg

SEQ ID NO: 976144 - DNA, 120 bp, Artificial Sequence
  ENSG00000224078_583 (sequence is synthesized)
tcagacatttagcaaagattgttgaggaaaggaatggatggaaggggccagctgaaagaaaaagtaacaacctaatgatggataagtgaaaaaggaatgaagaaaggatggtgctaggaa

SEQ ID NO: 976145 - DNA, 120 bp, Artificial Sequence
  ENSG00000224078_584 (sequence is synthesized)
tcgagggagtaaagcaagatagaatgtacaaaaggtcgaatttttaaagaaagttgtagggcaagggcaaggtgtgttgaacctacatttaaaatacaataacatcactaaagtcgaggc

SEQ ID NO: 976146 - DNA, 120 bp, Artificial Sequence
  ENSG00000224078_585 (sequence is synthesized)
aaactctgtctcaaaaaaaaaaaaaacccatcactaaaatcagggagaaaaaaaccatcactaaagtcagggataaagtaccattgtggaaggtgttcttttccagcttaacctgaagaa

SEQ ID NO: 976147 - DNA, 120 bp, Artificial Sequence
  ENSG00000224078_586 (sequence is synthesized)
gtgttcttttccagcttaacctgaagaattgtacagtcattgtacattgtcattccctaactaatgggttagatatgagtctgtagaaaattgtttgtccaacatactttatgcctctta

SEQ ID NO: 976148 - DNA, 120 bp, Artificial Sequence
  ENSG00000224078_587 (sequence is synthesized)
acatttcacttaccaaatttcatttcattccttcattttgtgtctaacagactagaaataatgagctcctattgacagggatattttcctcttcatactttcctttaccttacagagcct

SEQ ID NO: 976149 - DNA, 120 bp, Artificial Sequence
  ENSG00000224078_588 (sequence is synthesized)
tttatgtagcagatatttaatttcataatgggtctaaactacttgtttagaccatggatgagtgaaattttgatgaatgagccccaatcacctgaagggtgagtaaaagaagaatttcta

SEQ ID NO: 976150 - DNA, 120 bp, Artificial Sequence
  ENSG00000224078_589 (sequence is synthesized)
gagacccaatatgaagtagctgcttcacacttttttgagaatgttatggcatgactgaggaaatcatagatgctgtagaccatgttgagttggattgtgtaaatatagattctggtatta

SEQ ID NO: 976151 - DNA, 120 bp, Artificial Sequence
  ENSG00000224078_590 (sequence is synthesized)
gggaactcagcatctgctggattagacttcttatggtgaaagtctttttttagggattaggcataaatccccactgatatttgtgcagtaatagagtatagctcctgttttctttcctgc

SEQ ID NO: 976152 - DNA, 120 bp, Artificial Sequence
  ENSG00000224078_591 (sequence is synthesized)
ttgtatagcctgtgccattagtgtcctctttctcactgttttctcaaaggaaaacagtcaaagaggaagccatatgcatggtagactttgtaatccgggaaaagtcaacatatttcatag

SEQ ID NO: 976153 - DNA, 120 bp, Artificial Sequence
  ENSG00000224078_592 (sequence is synthesized)
tagtgcactttttatgtgttgtcagtccttagaaaggattcattttctccatattatatactactctattttaaaaatttcttgggggagaatggctgtagacaggccaatgatagaatc

SEQ ID NO: 976154 - DNA, 120 bp, Artificial Sequence
  ENSG00000224078_593 (sequence is synthesized)
atagaatatagtcactgtctaattactttcaatcaagagagggaacaataaagtacaatgtatgtcgctgacttcagtgtgaccactcagtatttctgtaacacagtatttatattgctg

SEQ ID NO: 976155 - DNA, 120 bp, Artificial Sequence
  ENSG00000224078_594 (sequence is synthesized)
tacggtagagttatacttatttctgtgatccagttcatttgtttaatattgggattcaaggagtgttgaagaaatgtctactgattaataacagatgggaagagtgtatgtgttttaaat

SEQ ID NO: 976156 - DNA, 120 bp, Artificial Sequence
  ENSG00000224078_595 (sequence is synthesized)
aagagaccaagagagacaataaggaaaataagaaggaagtgtttgtgaacctttcacattactcttacattcgggaagtccacaagacaccgtagtggagattctgaggaggtgaaaacc

SEQ ID NO: 976157 - DNA, 120 bp, Artificial Sequence
  ENSG00000224078_596 (sequence is synthesized)
tgtagaaaaatgctttattagtaaggagctgactaagttgtcagaaagtgttgatttttagaaggatattgagacattgggtatatagggtatatgactccttgtcttcctttcattctg

SEQ ID NO: 976158 - DNA, 120 bp, Artificial Sequence
  ENSG00000224078_597 (sequence is synthesized)
gcttcttaccagctgttgtgaataagtttaagatttcttctgacgttataaacttcagaaaaggtatggctgtttgttcagtttgaagtagtatcatatccgccaaagccttgttcaatt

SEQ ID NO: 976159 - DNA, 120 bp, Artificial Sequence
  ENSG00000224078_598 (sequence is synthesized)
gtcttgttgattcatggttctcttcagtgataatattatatgggattcctacccacagccacccaatatctcagtggagaaatgcaggtttggagagaacatctgaatagaatcacgcta

SEQ ID NO: 976160 - DNA, 120 bp, Artificial Sequence
  ENSG00000224078_599 (sequence is synthesized)
agatggtacatttgcactgagaccattgttatgtggcaggcagacatgaagtatcctaggattgatcagtatgccttaatgtaaatagctgcatatagacctgatttcttaggctcccca

SEQ ID NO: 976161 - DNA, 120 bp, Artificial Sequence
  ENSG00000224078_600 (sequence is synthesized)
cttcaagctcttgaatattgtgttgatatccttatcaatacactttgtcttgtgttctgtgttgtttttccaaaatataacgagctcctacttgacagggattttttctttctattgtct

SEQ ID NO: 976162 - DNA, 120 bp, Artificial Sequence
  ENSG00000224078_601 (sequence is synthesized)
tacgataaaatgtcaagataaaaatgtatgagtttcattaaagtttattgaataaaatttgtgatggaatgagtgacagcgaggtcatgaatgagagagaatatggaaataatggagaat

SEQ ID NO: 976163 - DNA, 120 bp, Artificial Sequence
  ENSG00000224078_602 (sequence is synthesized)
tgatataatatgtaacatatattagtatgttatattctatgtattatttgtcatatattattactatatcctgttgctatatttggataatttgggaatctgccatgtttgatgatgttg

SEQ ID NO: 976164 - DNA, 120 bp, Artificial Sequence
  ENSG00000224078_603 (sequence is synthesized)
aatttgggaatctgccatgtttgatgatgttgaaaagagaacataaaatgtagtgatttcttaataaggtgtagaggtgtaggtattaactctttaagaatatagtgatttattttaaaa

SEQ ID NO: 976165 - DNA, 120 bp, Artificial Sequence
  ENSG00000224078_604 (sequence is synthesized)
taatgataggaaaggaccataaaaatgtctgaatttgggaaattagaaaatgttttctctctggggctttcatatgtctgttctatgtgaatgtcgctttgccatggctccctctttgct

SEQ ID NO: 976166 - DNA, 120 bp, Artificial Sequence
  ENSG00000224078_605 (sequence is synthesized)
aactcttcttaacccctgcagagaaggaagtgtagtgatggtattttgagtccatcttcaggtttattgggaatgcaagggaaatgagttgttaccaatgggagtaaagggctagttgct

SEQ ID NO: 976167 - DNA, 120 bp, Artificial Sequence
  ENSG00000224078_606 (sequence is synthesized)
atgccagtagctgctacttttgacactgcttgagcaatctgaatggctaggtttgaatctggcttctcagtcagaattttaccttcactctaatgctgctttttttcaaatcacctatat

SEQ ID NO: 976168 - DNA, 120 bp, Artificial Sequence
  ENSG00000224078_607 (sequence is synthesized)
ttacataaatatgaaccaacttcagtgatcttaattctttcccgaagatccaagtttctttccatctgcctgaagaactttctttagcacttctggtatagcagacctactgatgataat

SEQ ID NO: 976169 - DNA, 120 bp, Artificial Sequence
  ENSG00000224078_608 (sequence is synthesized)
ttttcttttagtatatggtgattagtttactttttattcaactgtgtctttttttgaagtcttcttcattgaaatatattgttactaaatatagaattaatggctttctttaagcacttc

SEQ ID NO: 976170 - DNA, 120 bp, Artificial Sequence
  ENSG00000224078_609 (sequence is synthesized)
aaagataatccactgttttctggactccgttgatacttaagtctttatttttgtgtaattctttttctttaaatgtgccatttttcatttttctctgactcctacctactaagatatttt

SEQ ID NO: 976171 - DNA, 120 bp, Artificial Sequence
  ENSG00000224078_610 (sequence is synthesized)
tacctaagtattgagtcagttttggttatgatgtgactcagtgtgtttttatttatattgtttggttgtttgaacttcttgaatctgtaaatgttgtgctttatgttaaatttgggggga

SEQ ID NO: 976172 - DNA, 120 bp, Artificial Sequence
  ENSG00000224078_611 (sequence is synthesized)
tttcagccatttaaaatataacttttcagtctcttccccctgggactccaatttttacatatgtattagacctattaatatttttctatggatacctgacattctttttaaatcttattt

SEQ ID NO: 976173 - DNA, 120 bp, Artificial Sequence
  ENSG00000224078_612 (sequence is synthesized)
ttggtgtttttcactttgaacaacctaataatttgtttccatccatgttcactcactgtttattctattttttcccaatctgctcttaagcctatcctgtgaattttctttttaatttat

SEQ ID NO: 976174 - DNA, 120 bp, Artificial Sequence
  ENSG00000224078_613 (sequence is synthesized)
tttattttttagttccagatattttctgctttttgtttgtttttgagacagaatctttctctgtcacacagggtggagtgcagtgtcatggttcaccgcagccttgacctcctggtctca

SEQ ID NO: 976175 - DNA, 120 bp, Artificial Sequence
  ENSG00000224078_614 (sequence is synthesized)
agtgatcctctcaccttaacctacccactcctaagtagctagaactacaggtgcatgccaccacgctcagctaattttttatttttgtagagatggggtcgttgtgttgcccaagctggt

SEQ ID NO: 976176 - DNA, 120 bp, Artificial Sequence
  ENSG00000224078_615 (sequence is synthesized)
cttgaactcccagactcaagcagtcttcctgcctcggcctcatgcccgcgccaaccagttctttatttttaatattatgttgtatttgatgtgctatcctattcatttagtataagcaca

SEQ ID NO: 976177 - DNA, 120 bp, Artificial Sequence
  ENSG00000224078_616 (sequence is synthesized)
tttttctttatgtcttcagcataattatatgctttttcagaattttaacatcaggactgcttccagggtagctttattgccctttgtcttaagtatggattatagttttcattctttgta

SEQ ID NO: 976178 - DNA, 120 bp, Artificial Sequence
  ENSG00000224078_617 (sequence is synthesized)
tgtcaagtaattttggattgtaacttgaactttgaatatactgtagaaactctgaattctattttattcttctaaaacaatatttctcagcttcagcactactgacattttgaactgggt

SEQ ID NO: 976179 - DNA, 120 bp, Artificial Sequence
  ENSG00000224078_618 (sequence is synthesized)
cattttgtttgtgttgttgtgtgtattttgggagggtactgttctatatgcattgtggggtactgagtattatcctttgtctccactcactacttaccagtagcataactctctctcctc

SEQ ID NO: 976180 - DNA, 120 bp, Artificial Sequence
  ENSG00000224078_619 (sequence is synthesized)
cccacatcccctgccaaaaaatgccttcagtcctttctaagcgctcttttttatggtgttggggccaaaatcatgcatctttactcactctttctcattgagagctatggctataaaggg

SEQ ID NO: 976181 - DNA, 120 bp, Artificial Sequence
  ENSG00000224078_620 (sequence is synthesized)
tagtgatacttttacttatttatttttaaggcaagcagttaacttagctggattcaaactccaggctgcctcgtgtgctgtgggaagcagcctacgctctattcagttcttttcttttca

SEQ ID NO: 976182 - DNA, 120 bp, Artificial Sequence
  ENSG00000224078_621 (sequence is synthesized)
tattggttgggttactttgagtctggcctacatgatgggcagtttagaggtcaaccaaaggatttcagcagaacttatacacagaatttcattcaggcttcccgtgtctgattggctaca

SEQ ID NO: 976183 - DNA, 120 bp, Artificial Sequence
  ENSG00000224078_622 (sequence is synthesized)
gtgtgggaatttcctcccacttttcagccactactgaggatgcctttcggcaaaattccttgaaattggaaacttacagggaaattcctttcctccaagagtgcgctctcctccagtgtt

SEQ ID NO: 976184 - DNA, 120 bp, Artificial Sequence
  ENSG00000224078_623 (sequence is synthesized)
ggcttgcttttggttgttctccgtggttttagatagctgtctttatattaattctggagtttacagttgatatctgttgggggcttagtttgataacatgtattcttctattactagtag

SEQ ID NO: 976185 - DNA, 120 bp, Artificial Sequence
  ENSG00000224078_624 (sequence is synthesized)
ccagacctgtatgtcttacttgacctgatggagaaaagtttcaacttatgagacaatactgtgctagctagttttactgatttgtactctaaagtacccaagcctaaaatagtagagctg

SEQ ID NO: 976186 - DNA, 120 bp, Artificial Sequence
  ENSG00000224078_625 (sequence is synthesized)
tctatcccacatgaaacttctctgattttcactgttttttataaaaagtatacatgttcacatttctgtaggtttttttaagcatcacaatttttataaactttctatatttccaaggtc

SEQ ID NO: 976187 - DNA, 120 bp, Artificial Sequence
  ENSG00000224078_626 (sequence is synthesized)
tacctgctttgtattttgcctagtgagagttttgtattcatgtaggaataatctcttggtgtgagtatctattttccactcatccaaaacagatagagcattgatttcactaagcgttat

SEQ ID NO: 976188 - DNA, 120 bp, Artificial Sequence
  ENSG00000224078_627 (sequence is synthesized)
gttctagtttgctttggtattattattagaaatacctggtgattaatttgagctaagtattcttctctaccctcattcccagcattatcacccgcttttaccacttccaaggggtggaag

SEQ ID NO: 976189 - DNA, 120 bp, Artificial Sequence
  ENSG00000224078_628 (sequence is synthesized)
cattctccacaatgcattttttcatgccagagaaaaatctagaaaaaaatgaataaaacgaagaaattctttccccttggtatctgtagctaacttgcctaagtgttctttcccacagtt

SEQ ID NO: 976190 - DNA, 120 bp, Artificial Sequence
  ENSG00000224078_629 (sequence is synthesized)
taagtcttcagtccatagttcataagcaaaggggtgtagcgagctctgatcttgccagaagagagaataagtgagctaccccacggtggacattctggccatctgaaatgagtcgatgca

SEQ ID NO: 976191 - DNA, 120 bp, Artificial Sequence
  ENSG00000224078_630 (sequence is synthesized)
tgtggcttttgtctaaaggctacaaataaaatgtaaccactttcttctttgagtagttgatatagcaaatagttgaaacagaagttttgattggcaaatcaggatgtggtagatacttta

SEQ ID NO: 976192 - DNA, 120 bp, Artificial Sequence
  ENSG00000224078_631 (sequence is synthesized)
acaaagagtagaactattaccagttttatgtgttgctgtttgtatctctttcacagttttgataatatcacatcctggaaagtgaaacagaaaattattattccattttaaatgactaaa

SEQ ID NO: 976193 - DNA, 120 bp, Artificial Sequence
  ENSG00000224078_632 (sequence is synthesized)
tttgctttcatggtatttacagtgaaagagtaaattagaaagtgaatggatgactgttcatgagaaaaagcagggtaaaaagattttatttaattaattgaaaatattagggtcaaaaca

SEQ ID NO: 976194 - DNA, 120 bp, Artificial Sequence
  ENSG00000224078_633 (sequence is synthesized)
taggcttatgttatgttttgtgaattgtgctgtgttgtagacatttgatgagtcctaacatagaattgatctagctcttgaaataccatttttgattgagtataaatgggatataggcac

SEQ ID NO: 976195 - DNA, 120 bp, Artificial Sequence
  ENSG00000224078_634 (sequence is synthesized)
cttacaacttcagaattcgaggaagatgatgtgaatcttccaattttatctatttgattcaaatggtatgttttttcacatttctcataatttccacgtcaactcccatgatgatcatgc

SEQ ID NO: 976196 - DNA, 120 bp, Artificial Sequence
  ENSG00000224078_635 (sequence is synthesized)
aggaaagcagcatgattgcacttcttgtagtgcataccatcactaaaacatagttactgtctttctgtggtcttaagaaaaattcagaaacagcataccaatgtacatataagataaata

SEQ ID NO: 976197 - DNA, 120 bp, Artificial Sequence
  ENSG00000224078_636 (sequence is synthesized)
agcttatgtggtacagtaagtgttctgttctgagaaataccttgattcgtatcctaatgtctgatgttattggtagttctcaaacttccccaattctgctttcatctaaattcatcttat

SEQ ID NO: 976198 - DNA, 120 bp, Artificial Sequence
  ENSG00000224078_637 (sequence is synthesized)
ctatctattgttaaataatctatcagtccatttttatctatcatctatatatctgtctttatcaatcattcgtctgtaatctatctgtgccgtttggcataagagacagaagggcatagc

SEQ ID NO: 976199 - DNA, 120 bp, Artificial Sequence
  ENSG00000224078_638 (sequence is synthesized)
agtggaaactcaaaggagttacctccatgtgaatggacagtggtgatggtgatctgtgaggtggtgatgtatagaaagaaaaactagaagagagcatgccctaactcagggaccttgtcc

SEQ ID NO: 976200 - DNA, 120 bp, Artificial Sequence
  ENSG00000224078_639 (sequence is synthesized)
agcaggcactctggccttgttatactgtgcttgaatatgaaaaaaaaaaaaatcaaaatagtgctgacattctttgtcttctgggtctgagaaaacttagagtagatatgatgactctgc

SEQ ID NO: 976201 - DNA, 120 bp, Artificial Sequence
  ENSG00000224078_640 (sequence is synthesized)
catttcagtcttttgtatttccacatttagagctcagttttaattatgtagaattatttctccagcctgtgttaaactagaccatggattggcaaactttttttgtaaattgccaaatac

SEQ ID NO: 976202 - DNA, 120 bp, Artificial Sequence
  ENSG00000224078_641 (sequence is synthesized)
acattttcagttctgaaagccttgtggtctttgttgcagctaatctactctgctgttgtgttatgaaagcagccataggtaatttataattgaatgagtgcgctgtgcctttcttccaat

SEQ ID NO: 976203 - DNA, 120 bp, Artificial Sequence
  ENSG00000224078_642 (sequence is synthesized)
aaaactttacaaaagcatcctgtgggctggagtttaccctttgggaaaccagagcattggctaaactggaacctgaaaaaataatcacatcaactcagccacatggtaataatatttaga

SEQ ID NO: 976204 - DNA, 120 bp, Artificial Sequence
  ENSG00000224078_643 (sequence is synthesized)
gtattatttcaacattttcattttcataaaaatttttttagctcttttgccaaattccatctgtgagtgatacaaatgactaccacgtgccattaacatcacctaaacagtgcaaaacaa

SEQ ID NO: 976205 - DNA, 120 bp, Artificial Sequence
  ENSG00000224078_644 (sequence is synthesized)
gcatagtagaagtaattggaatgatataaaccccttgctgtaatagttatagttgataaattatgtttcaaaattgaacctatttcttccaaatttcatctataaagttccaaggagttc

SEQ ID NO: 976206 - DNA, 120 bp, Artificial Sequence
  ENSG00000224078_645 (sequence is synthesized)
caaaatcttgcctgccttcttttcccagttagcagtattgtctctgagcagccatggtggtatccatcctccttggacaatgaatttagcctattttgacttcatttgagcagttgtaat

SEQ ID NO: 976207 - DNA, 120 bp, Artificial Sequence
  ENSG00000224078_646 (sequence is synthesized)
tgtttcaccacatcagagtaagattactacatgccagagctattctttaactcagcttgtaaaaacatgatagcatcaacaatatacatagcaaatgaatgccatctttaatccaattaa

SEQ ID NO: 976208 - DNA, 120 bp, Artificial Sequence
  ENSG00000224078_647 (sequence is synthesized)
atggtttttacaaatttgctcttgtttgttgatgctatctgcattgcagtaattaaaggtgaggtaaaaagaatgaataaactgccaagttaaaattaaatttgggcaatttctcttttg

SEQ ID NO: 976209 - DNA, 120 bp, Artificial Sequence
  ENSG00000224078_648 (sequence is synthesized)
cagtaatgtatgtatatttactcaaaacatatgccaaatttagtgttgaaaggctcattcaaatcaattgggaaagcacgtaaatgaacaattcataaaagaaaagcattgcaaatggcc

SEQ ID NO: 976210 - DNA, 120 bp, Artificial Sequence
  ENSG00000224078_649 (sequence is synthesized)
aagagcatagaaaatgtgctcaatcttaccagtcattataaggaaataatgaaatttgtgtatatatgaaatacttaaaatatatataaaataaaacaattatttgccttttttcaccta

SEQ ID NO: 976211 - DNA, 120 bp, Artificial Sequence
  ENSG00000224078_650 (sequence is synthesized)
tcagattaacagattatatgtgttaacaaggtggggagaatttacaactcctgatatgttaaaatctttcaggaaggtagtagaaaatatatgtaagatggaaattagcacttttgacca

SEQ ID NO: 976212 - DNA, 120 bp, Artificial Sequence
  ENSG00000224078_651 (sequence is synthesized)
acaattttagttttagatatttacctataaggatataataggaggtgttcaaagatgcatgtaactcaatgtagtattaattataattgtaaaatagtaaataacatttttgtcaaatca

SEQ ID NO: 976213 - DNA, 120 bp, Artificial Sequence
  ENSG00000224078_652 (sequence is synthesized)
taatgttaggaaaattagtgatggcacatttaaccaattgaattatattcagttctgaataccgtgatgcatgttcaaattaattgatacaaaaatccaacaactttagcagtttgttta

SEQ ID NO: 976214 - DNA, 120 bp, Artificial Sequence
  ENSG00000224078_653 (sequence is synthesized)
ccagttattgagtaccaactgtgttcaacattgttatttcactcatatgaaatgataaatgtatgtgcgtgttatgatacggtcaataaaaccacttttataggaagaatactcacaaaa

SEQ ID NO: 976215 - DNA, 120 bp, Artificial Sequence
  ENSG00000224078_654 (sequence is synthesized)
cagtataatttgcttgccaagcagtcactgggatttaatcagtttctttgtctttcgtttttctcataagctgagagagtaattttgtgtgcacagaagtactgtcttcagctacatgct

SEQ ID NO: 976216 - DNA, 120 bp, Artificial Sequence
  ENSG00000224078_655 (sequence is synthesized)
gccttgagcagcataggtgagcggatcctgctgggctcatggaccaggccacatggggtcactgagggtcagccttcaggacaggagggattcctcagggagacaacctgaatccccact

SEQ ID NO: 976217 - DNA, 120 bp, Artificial Sequence
  ENSG00000224078_656 (sequence is synthesized)
cctccgtttggggtccctgacttccctcaacactggtctcttccactgagccttgtgagctcttccaccaaggagggccccctggcattgactggcatagtgagctcttccccccagcag

SEQ ID NO: 976218 - DNA, 120 bp, Artificial Sequence
  ENSG00000224078_657 (sequence is synthesized)
ctgggattgacgagcatagatggtgactgtggaagaagacttgctttgggaccgctggccccaggccagtggttgtcatccaggtgcccagcccttggtgcacttgagctcaagcccttc

SEQ ID NO: 976219 - DNA, 120 bp, Artificial Sequence
  ENSG00000224078_658 (sequence is synthesized)
ctggtgccctggcctcctgccctaagctgtgcgagctcttctgcccagggggacccctggccttaagtgggatagatggtgaccccagaggaagacgtgcattgggtccgctggccccag

SEQ ID NO: 976220 - DNA, 120 bp, Artificial Sequence
  ENSG00000224078_659 (sequence is synthesized)
gccagtgtctctcagccatgtgctcaacacctggtgagctgaagctcaggcccttcctggcatcctggtctcctgcactgagctgtgggttcggtggctgagagagcttttgttgccctg

SEQ ID NO: 976221 - DNA, 85 bp, Artificial Sequence
  ENSG00000224078_660 (sequence is synthesized)
ttatagtagcatgatttataatcctttagatatatacccagtaatgggattgctgaatcaaatggtatttccagttctagatcct

SEQ ID NO: 976222 - DNA, 64 bp, Artificial Sequence
  ENSG00000224078_661 (sequence is synthesized)
ccagcatttgttgtttcctgacttacacatttctgtaatgaccagtgatgatgagccttttttc

SEQ ID NO: 976223 - DNA, 120 bp, Artificial Sequence
  ENSG00000224078_662 (sequence is synthesized)
ttgttggctgcataaatgtcttcttttgttttacttctcattttcttaaagtgaaacaatttcatgtggtatcttccaagtatattttaatcagttgccaacccagctgctaagattgaa

SEQ ID NO: 976224 - DNA, 120 bp, Artificial Sequence
  ENSG00000224078_663 (sequence is synthesized)
tatattttaatcagttgccaacccagctgctaagattgaactgtttcttttgttcttctcttgtttttttctattaatttagcaaacaattttatatatagtttgctatccttctccatg

SEQ ID NO: 976225 - DNA, 120 bp, Artificial Sequence
  ENSG00000224078_664 (sequence is synthesized)
gggcctgcatcttcagattcaactagccatggattgaaaatacttgacaaaaaattgtatggtttcatctgtactgaacatgtacagtctttttctctctttttctctttctttcttttt

SEQ ID NO: 976226 - DNA, 120 bp, Artificial Sequence
  ENSG00000224078_665 (sequence is synthesized)
ccatgcctggctaattttttgtatgaaaaagcagaatcttatacaatgctcaattaaaatcagggagaggagaaaaagagtagaataccaaaaaagtaacaaattacaaggttgatataa

SEQ ID NO: 976227 - DNA, 120 bp, Artificial Sequence
  ENSG00000224078_666 (sequence is synthesized)
atagaaaacaatcacaaatactgagtatactaatctaagtatatcaataatcactttaaacatcgcttaaaagacagagattgtcagtggattaagaacaagacccaaatatatgttgtc

SEQ ID NO: 976228 - DNA, 120 bp, Artificial Sequence
  ENSG00000224078_667 (sequence is synthesized)
tatgagaaatgcactttaaatagctgggcatggtggtgtgcacctgcagtccttaggaggccaaggcggagtgtcacctgagcccaggattttgggactacagtgagctatgatcatgcc

SEQ ID NO: 976229 - DNA, 120 bp, Artificial Sequence
  ENSG00000224078_668 (sequence is synthesized)
actgcactctagcctggttgacagaataagacctcatctctatagaaaaaagtaagtaaatctactttataaaggcacaaatatattcacagtaaaggaatagagaaagatatcccatgc

SEQ ID NO: 976230 - DNA, 120 bp, Artificial Sequence
  ENSG00000224078_669 (sequence is synthesized)
taacattaatcaaaataaagtgaaatagccatattaatttcagacacaaccgactttagaacaaggaatattatcagagatcaaaagggacattccttaatgataaagggatcagttttc

SEQ ID NO: 976231 - DNA, 120 bp, Artificial Sequence
  ENSG00000224078_670 (sequence is synthesized)
taagaagacataacaatccttaatgtgtacgcactgaacagcagatcatcaaagtacatgaagctaaatctgatagaactgcatagagaaatagataaattcactcttagagttggaggc

SEQ ID NO: 976232 - DNA, 120 bp, Artificial Sequence
  ENSG00000224078_671 (sequence is synthesized)
attggcatccctctatcagaaatggacaggtttagcaagcagaaaatcagtaagggcataacatgatcaatcatgatcaaaaacttgattcagtcaactatatgtaactgacatctatgg

SEQ ID NO: 976233 - DNA, 120 bp, Artificial Sequence
  ENSG00000224078_672 (sequence is synthesized)
accactttacccaacaacagcagatgacacattttctcacacacacatgaaacattcagcagaatagaccacattctgggctagaaaatgcacctcaacaaatttaaaagaatagaaatc

SEQ ID NO: 976234 - DNA, 120 bp, Artificial Sequence
  ENSG00000224078_673 (sequence is synthesized)
atacaaagtatgttctcagactacaatggaatgaaagtaaacaaaaatcactaaaaaagatagctgaaaaacatgaaaatacttggaggttaaacaacagactgaaataactgaaggtca

SEQ ID NO: 976235 - DNA, 120 bp, Artificial Sequence
  ENSG00000224078_674 (sequence is synthesized)
cagaagtctcaagataaatttttaaaatatttcaaactaaatggaattgaaagcacaacttatcaaaaatttaggaacgcaacaaaggcagtgcctactgggaaatttataccactgaat

SEQ ID NO: 976236 - DNA, 120 bp, Artificial Sequence
  ENSG00000224078_675 (sequence is synthesized)
gtatgttaaaaagaacaaagatctaaataaataatccttcccattggaaagctagggggaaaattcaaattaaattcaaagtaagcaagtaaaagaaataataaaatatgaatacaattc

SEQ ID NO: 976237 - DNA, 120 bp, Artificial Sequence
  ENSG00000224078_676 (sequence is synthesized)
tgagtggcctgatatctgatttctggaagctgagttttatgtggctttagaagtttcatgttatgagtgtgaaatggcaagtgaccatggcgattgcttctgatatggccacctcaatta

SEQ ID NO: 976238 - DNA, 120 bp, Artificial Sequence
  ENSG00000224078_677 (sequence is synthesized)
catagagaagggatgatcagtggcatcatcccagttctgcatgataccacaccagtgattctccaaagtcaagaaacctgtatatgttgtccttgtgtttggtgaatctgtggtctatag

SEQ ID NO: 976239 - DNA, 120 bp, Artificial Sequence
  ENSG00000224078_678 (sequence is synthesized)
actacataatgggctatttctggggtactgaccattttgctccattaaggaaaaccatgcatgagccatataactatgggaaacaatgttttcctttttgacacctggcctactctcttc

SEQ ID NO: 976240 - DNA, 120 bp, Artificial Sequence
  ENSG00000224078_679 (sequence is synthesized)
ttaggtgagagcaaaggaagagcaccacttggcctgctgcacccagggcaatttataccatccagatatccagcactgaatatgtagcaactccaatccaccatagaacattaatctatc

SEQ ID NO: 976241 - DNA, 120 bp, Artificial Sequence
  ENSG00000224078_680 (sequence is synthesized)
tctgataagcatgctaatatctatgattctgcctttgtggggagatgactccatagattaaccccctggcttggggcaatatggagatgttatattgtcttcgacagggaagatgacata

SEQ ID NO: 976242 - DNA, 120 bp, Artificial Sequence
  ENSG00000224078_681 (sequence is synthesized)
aaaattatgttcaataggattatgtggagacttaacataagtgacaaacctaagacaagaagttagaaatccttgtttcttttaggtgaataattttggagcttgagaaaaagacaccat

SEQ ID NO: 976243 - DNA, 120 bp, Artificial Sequence
  ENSG00000224078_682 (sequence is synthesized)
tgtggcgaacttgctttgccaaaccctgtgtatgcatttttgggtaaacaacacattttcatcctttaagcattgtttccattatttataattcctaatagtatgagacatttaggactc

SEQ ID NO: 976244 - DNA, 120 bp, Artificial Sequence
  ENSG00000224078_683 (sequence is synthesized)
attccttggttcttcttctctcattgtatctttcattgtatctttcagtgctgcaagagatgcaatcatcccattaatgaaagcagagtgactgccttcgtcacacatacattcaaaata

SEQ ID NO: 976245 - DNA, 120 bp, Artificial Sequence
  ENSG00000224078_684 (sequence is synthesized)
gatcactaggctagtgatgattctctcttaaggctattatgtttactcatttaaaaaatctggatctcagtatagattttcttctcagtgagtgactgacctatctgatatgatgctatg

SEQ ID NO: 976246 - DNA, 120 bp, Artificial Sequence
  ENSG00000224078_685 (sequence is synthesized)
acaaaatctttactttttacctgaatttggtgggattgaaagttgagaacatattaatttattttctgtttcacttgattaataatgcccaatctaacatgcagtgttcacttgggtaca

SEQ ID NO: 976247 - DNA, 120 bp, Artificial Sequence
  ENSG00000224078_686 (sequence is synthesized)
ttactcactggtaaacttttcataacagaaatatcatgccagtggacacaaatatgtaacatcagtaatttgctttcctcatgaaacagagaactgaataagttgatgggtaaactagta

SEQ ID NO: 976248 - DNA, 120 bp, Artificial Sequence
  ENSG00000224078_687 (sequence is synthesized)
tctgaattataaaccccaaatatcatgtgacttcatcattttcagtataatgaaaatacaggctgtgaatgcttccagttggtcctgaaagggcctttgaggtgagtaggttcaccaaag

SEQ ID NO: 976249 - DNA, 120 bp, Artificial Sequence
  ENSG00000224078_688 (sequence is synthesized)
cggcaacatatgtgtcccagtgggcattctactcctcagtaagtgacttgacattctttatggcttcctcatgattaaaacaagtctttttattgaaattttactgaaataatgatgaaa

SEQ ID NO: 976250 - DNA, 120 bp, Artificial Sequence
  ENSG00000224078_689 (sequence is synthesized)
caagtctttttattgaaattttactgaaataatgatgaaacaatgtaatattcttttcatctacatataagagtagacatagattaacctctaccttttttttttttttttttgagacgg

SEQ ID NO: 976251 - DNA, 120 bp, Artificial Sequence
  ENSG00000224078_690 (sequence is synthesized)
cctaccatcagtgaatgacctgttgcagtgctttcattgaagtgttcttcgttccctcagcaatatgattttatagctgaggtggtaccagtttaagaagtgagaacttcttcactgact

SEQ ID NO: 976252 - DNA, 120 bp, Artificial Sequence
  ENSG00000224078_691 (sequence is synthesized)
gtcggctacaggaagtaaaaatggcaatatggtgctcagggtgcattcatcactataacagataaccattttgttaatggtgccctgcgcggtaactgaaattgtactgggctttcaaca

SEQ ID NO: 976253 - DNA, 120 bp, Artificial Sequence
  ENSG00000224078_692 (sequence is synthesized)
gaattttgtcaaaatgggacgctgcatgagctaataagttgtgaaataaatagggttttattgtggagtaataagtaacacaaagaagggggtttgcagtatcttaggaagaagaacaga

SEQ ID NO: 976254 - DNA, 120 bp, Artificial Sequence
  ENSG00000224078_693 (sequence is synthesized)
cgttcttggtaaagttcctttaatatgaaaatagcatttttaaatacttggagtagtgagtgaagaagctttctctatgagagcacggttagttcccaaataaatcccagcctcctctct

SEQ ID NO: 976255 - DNA, 120 bp, Artificial Sequence
  ENSG00000224078_694 (sequence is synthesized)
ctcttctgttaatttcttcggaaggatttgaggtagcttttgaagtatttggtcaaagttgcaaactcctcgggaggaggccaggcatggtacctcacgcctgtaatcccagcattttgg

SEQ ID NO: 976256 - DNA, 79 bp, Artificial Sequence
  ENSG00000224078_695 (sequence is synthesized)
ccagaaggcagaggttgccaaacaagactcctcctggaaaaaaaaaaaaaaaaaaaaggaaacctgagattctgcttaa

SEQ ID NO: 976257 - DNA, 120 bp, Artificial Sequence
  ENSG00000224078_696 (sequence is synthesized)
aaaaaaaaaaaaaaaaaaggaaacctgagattctgcttaacaattgtaaagtcagaaggtatgaagagtatttgaagttagacctgtggacaggctgattggatcttcagcagtatgaga

SEQ ID NO: 976258 - DNA, 120 bp, Artificial Sequence
  ENSG00000224078_697 (sequence is synthesized)
aagtttagttaagccaaggtactatgtaaaactccaagctgtacagagctctgcctggccagctggtcagcacttgggtaatgaggaattgataaatggcaaattgcttcattgaatgat

SEQ ID NO: 976259 - DNA, 120 bp, Artificial Sequence
  ENSG00000224078_698 (sequence is synthesized)
tggattaatagtagcatgaatggataaattaacgggaatgggtatataaatgggtatgagatcaggaatattaatggagtcacaagtagatgatgcgtaaatgggactatatgtgtggat

SEQ ID NO: 976260 - DNA, 120 bp, Artificial Sequence
  ENSG00000224078_699 (sequence is synthesized)
tgatggatggatggaccctgaaatgcatttttgatggaattagggaacaagaataaatataataggaagtgtggtatgcatgtaagcatgtttgtgtgtgtatgtgtatataggttgatg

SEQ ID NO: 976261 - DNA, 120 bp, Artificial Sequence
  ENSG00000224078_700 (sequence is synthesized)
caagagtggaagggtagtaaggacaaaaactttggacagctatattgacaatgcaaaataaaaacatgaatgtatgaatgtatgaatttgacggatatgtgcttgaaagaatgaagtcag

SEQ ID NO: 976262 - DNA, 120 bp, Artificial Sequence
  ENSG00000224078_701 (sequence is synthesized)
tttaggaaaggataattaacaaatctcagtaatgattgtaatcatgtgattctcacagtaactgttcaacagtgactgttaaggatgctgcgtgctcatggcagtaactcatgggcagat

SEQ ID NO: 976263 - DNA, 120 bp, Artificial Sequence
  ENSG00000224078_702 (sequence is synthesized)
gtcacaaagacagtaatacctcttattgcttttatgacagcataaggttttatttttcactgtggctttgttagagttatggaaagtcatccattgcctcttaaatacgtaatggtaaat

SEQ ID NO: 976264 - DNA, 120 bp, Artificial Sequence
  ENSG00000224078_703 (sequence is synthesized)
tgggtaaaggaattgggtaaatcacatggttttccaaaacttcaggagatttagaagctgtattttatgttttctcaaggaaaggatgaaaaggacacgttaaacactgatagtgtctac

SEQ ID NO: 976265 - DNA, 120 bp, Artificial Sequence
  ENSG00000224078_704 (sequence is synthesized)
tgtaggatacctttctggtctcacaaactaggtatactttctacttaaatggaaactatccccttcacagtgggaaccaataaaaacctcacccaggtaaaaatccagcgtctcagtgat

SEQ ID NO: 976266 - DNA, 120 bp, Artificial Sequence
  ENSG00000224078_705 (sequence is synthesized)
gctatctccctatcatgaggtaattcacagtaatctgtaccttaagtctcagtgtacctactgttggcccagagataggtgaaacttaaagataattgtaccttggctgcatgtagtggc

SEQ ID NO: 976267 - DNA, 69 bp, Artificial Sequence
  ENSG00000224078_706 (sequence is synthesized)
cagatcacaccgtcaggagttcacaccctggtgtggtggtgtgtgcctgtaataccagctactcagaac

SEQ ID NO: 976268 - DNA, 74 bp, Artificial Sequence
  ENSG00000224078_707 (sequence is synthesized)
tgaaaccctgtctctactaaaaatacaccacaccctggtgtggtggtgtgtgcctgtaataccagctactcaga

SEQ ID NO: 976269 - DNA, 120 bp, Artificial Sequence
  ENSG00000224078_708 (sequence is synthesized)
caatagggtgagactccatctcaaaaaaataataattgaaccttatttccttttgtacaatgtacaatgagcagagtcagggcaactataatacaactccaaactctaaggtgtcaaatg

SEQ ID NO: 976270 - DNA, 120 bp, Artificial Sequence
  ENSG00000224078_709 (sequence is synthesized)
tgatagaaatcacttttccattgaaattttgaaatccctctggaaatacactgtgaaggctccctatactgtgctagagagtgttttactagggcctggaagatgctcactttttccttg

SEQ ID NO: 976271 - DNA, 120 bp, Artificial Sequence
  ENSG00000224078_710 (sequence is synthesized)
ttttccttggctgtagcttttacctctggcacactttcccaatccccttatcctacttaattatttttaaaataggcattgtggaggatgtttgttcatattttaagtcttaatcatggg

SEQ ID NO: 976272 - DNA, 120 bp, Artificial Sequence
  ENSG00000224078_711 (sequence is synthesized)
cttctagtttctttggaagtaaaagtgacccattaaaaatgtaaaatgtgttatgtgcatcatgggcacaggagtttcgtggcctatatgtgattctaacttatatcttaccatggtgat

SEQ ID NO: 976273 - DNA, 120 bp, Artificial Sequence
  ENSG00000224078_712 (sequence is synthesized)
cgtagaaccatgtgttgatatgtaattttcaaaagaggtgaatgcccttggcacagtaatctgtcatatttagcaaagcttccctgagagccatcataacagacccacaggaatattttc

SEQ ID NO: 976274 - DNA, 120 bp, Artificial Sequence
  ENSG00000224078_713 (sequence is synthesized)
attagtaagaagtagatgtgttcagccagtaaaattttgaagtggccatgacttcaatctgagtacagagggaaagttacacacaataattcagtgattggtggataggtgcgttcaagg

SEQ ID NO: 976275 - DNA, 120 bp, Artificial Sequence
  ENSG00000224078_714 (sequence is synthesized)
aggcagggttggattggtgttttcaagcttggtagtagtagtagacaggcagacatgtgagttgatggaaggatgcaagaatggttactgaaattttctttgtattatatggttaatgtg

SEQ ID NO: 976276 - DNA, 120 bp, Artificial Sequence
  ENSG00000224078_715 (sequence is synthesized)
gatttaataactagtcattgaaattatgtgggattggatatttaaagcccagaaagatgaatataataatcgtctaatataatttgaaatataataacggatgcatgcaaaattgggtgt

SEQ ID NO: 976277 - DNA, 120 bp, Artificial Sequence
  ENSG00000224078_716 (sequence is synthesized)
attgaataatgtaagaaatagatggaaagtagaatatgagcaaatggctggatgcaagaatggagaatgcaggttttaaaaacctgttgggtgtatgtatggttatatgcacagtggaat

SEQ ID NO: 976278 - DNA, 120 bp, Artificial Sequence
  ENSG00000224078_717 (sequence is synthesized)
taggtgttatcattggatggatcaaaaatggaatgctgtatggatagatctttagattgatgagtacaaatatggctatctaaaaccttggataaatgtagggatcagggttcaggtaca

SEQ ID NO: 976279 - DNA, 120 bp, Artificial Sequence
  ENSG00000224078_718 (sequence is synthesized)
ttggttgcataagtgatagctgcctgtttggtggctttagagtggcttaatagactgatagatgggttgattcacaaggtgatggtacaggaatttgatgactatgagaatgggctgatg

SEQ ID NO: 976280 - DNA, 120 bp, Artificial Sequence
  ENSG00000224078_719 (sequence is synthesized)
caataataaagtcatatatgtaaagttgactggaaagatggacatttgaaagccaatggtatattttcacgggcagattcattatgaaattataaaagttttgtttttgcattctcaaca

SEQ ID NO: 976281 - DNA, 120 bp, Artificial Sequence
  ENSG00000224078_720 (sequence is synthesized)
tgatgtgttagcaaataagcaaaaactaactgcagtgggttcacaagttagtttaattaaaatgatctttcaatattttaataatttggggactttaggaggttgaggaatgagagaact

SEQ ID NO: 976282 - DNA, 120 bp, Artificial Sequence
  ENSG00000224078_721 (sequence is synthesized)
cccaacaactctcagcatggtaatcattgtgcaaatatcatagaacgtacttacacaaatctagattagatggtatagcttactacagaactaggatacatggtatagcccgggtgctcc

SEQ ID NO: 976283 - DNA, 120 bp, Artificial Sequence
  ENSG00000224078_722 (sequence is synthesized)
taggttataaagctgtacagcatgttactatactgaatgaatactgtaagcaactgtaacaaagtgtaagtatttatacatctaaacctagaaaaggtacagtgaaaatatggtggtata

SEQ ID NO: 976284 - DNA, 120 bp, Artificial Sequence
  ENSG00000224078_723 (sequence is synthesized)
atcttaaatgactattgtcaactatgatctcgttgactgaaatgtcagcatgcggcacatgactgtataaccagacttctcatcaaaaacaaatgctgaaagaaaaacacatcaactaac

SEQ ID NO: 976285 - DNA, 120 bp, Artificial Sequence
  ENSG00000224078_724 (sequence is synthesized)
caagaaaaaagaaacatatatgtccacacagagacttctttttttacacaaatgttcattgtacctttttataatagctgggaactgaaaacagcctggaactgaaaacagcccaggtgt

SEQ ID NO: 976286 - DNA, 120 bp, Artificial Sequence
  ENSG00000224078_725 (sequence is synthesized)
cccttaacagatgaagtcacaaaccaccgaaacattcaacaatatggatgaatctcaaaaacattatgttgagcaaaaagaaactttttacaacatataagtattgtatgactctactta

SEQ ID NO: 976287 - DNA, 120 bp, Artificial Sequence
  ENSG00000224078_726 (sequence is synthesized)
cataaagttctgcgcaagctaaactaagatgaaaacaatctgaacaatgttaggttctaggggtggtgtggggggaaggaataactaggaagaggtgtaggttctataccctgatagaac

SEQ ID NO: 976288 - DNA, 120 bp, Artificial Sequence
  ENSG00000224078_727 (sequence is synthesized)
tggtcacaatagaagccattccacatgctcttaacaatgtaacactgtcattttttcatcaggtggtggagtctatggcccttctccttgaatctgagtgaaattagtgagtctttcaat

SEQ ID NO: 976289 - DNA, 120 bp, Artificial Sequence
  ENSG00000224078_728 (sequence is synthesized)
ccagtcagagctcacttcagctcttcaccctgtagcccttaactcctgggctcaagtgatcctccaccctcagcctcccaagtatctaggaatacagaggcagttgctgtgggaggtgtg

SEQ ID NO: 976290 - DNA, 120 bp, Artificial Sequence
  ENSG00000224078_729 (sequence is synthesized)
gaatatctatctggaataaaaactatttttcccaattatcaacaacatgggagacttaaaaataaatttgtaagtggaatatccaaagatagtgttacactgaaagaaagcggctgcagc

SEQ ID NO: 976291 - DNA, 120 bp, Artificial Sequence
  ENSG00000224078_730 (sequence is synthesized)
ctgagtgaggcagatcatgactgtaatcaatcccataactgtgggaggctgaggcaggccgactacttgagcccaggaggtcaacaccagcctgggcaacatagtgaggctactctctac

SEQ ID NO: 976292 - DNA, 120 bp, Artificial Sequence
  ENSG00000224078_731 (sequence is synthesized)
actccagcctgggcaacagagctagactttgtctcaaaaacaaacaaacaaacaaaaaccaaaaagaaaaagaaaaagaggctccaaagtgtagaatcttaaatctaaaacttgtcacta

SEQ ID NO: 976293 - DNA, 120 bp, Artificial Sequence
  ENSG00000224078_732 (sequence is synthesized)
actaaacctcctcattagttccacgtcacaagatggaatattttaagttccatcacgtgaaatcttatattccttttactctgtcaacttaaagtacacagattaatgtcctattatggc

SEQ ID NO: 976294 - DNA, 120 bp, Artificial Sequence
  ENSG00000224078_733 (sequence is synthesized)
tgtttcaggagagctaccaaaactgagggaggaattatgtgaccatgtaagaagttagatgacattatattcaacactaaagagtctatgcttctactaactgataaaattaccataatt

SEQ ID NO: 976295 - DNA, 120 bp, Artificial Sequence
  ENSG00000224078_734 (sequence is synthesized)
tcagtagaataaactactggatccaaagaaacataagtcatagccattccttttggtcccaaattcacaagcatggaaataacaactacaaagaatcaaaattataagaaaaatagttca

SEQ ID NO: 976296 - DNA, 120 bp, Artificial Sequence
  ENSG00000224078_735 (sequence is synthesized)
gctgattttcaaaacattcacagaattatctaacatgtaggactagatgaccaatgccagagtttacatcttgctaatcatgagaaactcaacaattaacaaggcagcaagtaagtgaag

SEQ ID NO: 976297 - DNA, 120 bp, Artificial Sequence
  ENSG00000224078_736 (sequence is synthesized)
aaacacacgagatccaattttgtctcaacagaagaactttcactctctgtccaggtaggtgacaaaaagtgataattcacacacattcaattcattctggtgcttatttttcaaatgttc

SEQ ID NO: 976298 - DNA, 120 bp, Artificial Sequence
  ENSG00000224078_737 (sequence is synthesized)
catgcaaatttaccactcactgcatgcaaacagagaaaaaagaaaacccacaaagcacatgtaaaaattgcataaacatgacttaaagacattttgctatctatgaagctataaacccca

SEQ ID NO: 976299 - DNA, 120 bp, Artificial Sequence
  ENSG00000224078_738 (sequence is synthesized)
cctgaaaattaaaaactgttatcacagatttagcactatgcaaaatatgaaagtgaaaacatgtaaaaataaaatggaaatgcagaatctagaaaatttaaaatatatattgctaccctt

SEQ ID NO: 976300 - DNA, 120 bp, Artificial Sequence
  ENSG00000224078_739 (sequence is synthesized)
cagtaaagaaagggagataatgtcatgttctcccaaactacagtgacttccctggtgaaaatgtaagtaggtatttcctttctggaggaaaacagtgaacatgtatcgaaagtcttaaaa

SEQ ID NO: 976301 - DNA, 120 bp, Artificial Sequence
  ENSG00000224078_740 (sequence is synthesized)
acacgaataccgtgtgaatgagatcctacttgtggaaaataatttgacaattttacaaaaatgcattgtttctatatctgaaaaaaacatgtctaataaaagattacttaaatgaactga

SEQ ID NO: 976302 - DNA, 120 bp, Artificial Sequence
  ENSG00000224078_741 (sequence is synthesized)
taataggtcacacaataaaataaaaactatcaagatttgaattcgacaaagaactgcctagtcttcctgatatatcactaactgacaaaagtcagttaaaaagtagcaggtgtaggatga

SEQ ID NO: 976303 - DNA, 120 bp, Artificial Sequence
  ENSG00000224078_742 (sequence is synthesized)
acccattgttatttcaaagcattaatagcattttctctggatgatgtgattaagtgagttttaaaacttcttccatcttttgatttcttatttattctttccatagtaaggatgctactt

SEQ ID NO: 976304 - DNA, 120 bp, Artificial Sequence
  ENSG00000224078_743 (sequence is synthesized)
gcatattaaaaattaataactataaggggaaaacaatagcagttataaaacttcatatacatgatttgaatggccccgagatttactaaattgtctctgatttttaaaaaaattacaaaa

SEQ ID NO: 976305 - DNA, 120 bp, Artificial Sequence
  ENSG00000224078_744 (sequence is synthesized)
gtcaaaataccaaaatagatatttttaatgtgagcttttatactaaaataacctccccaaaacttgtcagatacatagtacttctttatatactacataggaggagagtgatcagcacaa

SEQ ID NO: 976306 - DNA, 120 bp, Artificial Sequence
  ENSG00000224078_745 (sequence is synthesized)
acagaacgagactgaaaaatcagaagatctgcattaagtgtcatccttctgtccctaagcagctgtaggatcctagggaaacaattgtctgggcctcagttttcccagctttatgagtcc

SEQ ID NO: 976307 - DNA, 120 bp, Artificial Sequence
  ENSG00000224078_746 (sequence is synthesized)
cttcagttctaattttaaagttattttatgtaatagggaggtgagcaagaaactagtatttgctggatgcctgataacttattacacacactgcggggcactttgacatgggttatctca

SEQ ID NO: 976308 - DNA, 120 bp, Artificial Sequence
  ENSG00000224078_747 (sequence is synthesized)
tttgaataccatgacattgaggattatcttcagtccacagccaaagagagaaatagaactggagtcaaatcacgaaaccaagatctcaaagaaagtacagaaccaagacaagaataggag

SEQ ID NO: 976309 - DNA, 120 bp, Artificial Sequence
  ENSG00000224078_748 (sequence is synthesized)
tccaggagtctttcagcttcagagtctaagtcattttgactatattgttttgcagaaggtgattcatttcaaaataattattttttaacatgagtaatactgaagaattctatggaaaaa

SEQ ID NO: 976310 - DNA, 120 bp, Artificial Sequence
  ENSG00000224078_749 (sequence is synthesized)
aatctcataactaatgtgcaactgggaaaaaaatctgaagaatcataacgtgaacctcacatttatgcatctatctggtaccacaaaggcagaccaagtttcttgaggaaatggaaccac

SEQ ID NO: 976311 - DNA, 120 bp, Artificial Sequence
  ENSG00000224078_750 (sequence is synthesized)
tatattctgcaaagttaatttctctctaatttgttgaggacctatgtgctatgcattttatagacattcccactttagaggggaataaaccttaacagttaagagctcgcattctgaggc

SEQ ID NO: 976312 - DNA, 120 bp, Artificial Sequence
  ENSG00000224078_751 (sequence is synthesized)
cagatgcccaagttcacataatggctctacctcttaattaactatgtgaccctgaatgaattacttgatctttctggacgtaagtttcctcgtaatttaaatggtagtatctacgagcat

SEQ ID NO: 976313 - DNA, 120 bp, Artificial Sequence
  ENSG00000224078_752 (sequence is synthesized)
taatatatataaagtgcttagaacattgcctggcacatactaagcactatgaaagtgttagctactactattattgttgtaattgttactatcaccctcacaagtgtatgagttagcact

SEQ ID NO: 976314 - DNA, 120 bp, Artificial Sequence
  ENSG00000224078_753 (sequence is synthesized)
ataaaccttcattctgctgatgctcagagaaattacataagtcatacatctaataagagatttgaactcagctactaaacttgagcttttaataactattaagaggaggatctgaaagta

SEQ ID NO: 976315 - DNA, 120 bp, Artificial Sequence
  ENSG00000224078_754 (sequence is synthesized)
gccctctatatttgatctgcctttctgtgccaagtttaacaaatagcagctacactgatgagacaggactaaaggaagccatgccagaacctccaagttaatggtggaatcaactatatt

SEQ ID NO: 976316 - DNA, 120 bp, Artificial Sequence
  ENSG00000224078_755 (sequence is synthesized)
aagcattcttcttttttcctcactccaatgacaccttaatttatctgacctcatctgcatcactatctaatttaggatatgtaaaaggcatacaaaatttagagcacataaaagggcctc

SEQ ID NO: 976317 - DNA, 120 bp, Artificial Sequence
  ENSG00000224078_756 (sequence is synthesized)
tacgttggaaaagtatacactaataacgactttttggtatagttcctgcgcaagggaaatccttgtaccatatgggtcaccaaatcatagctcgtaagtcaaatcgagtccaccacctgt

SEQ ID NO: 976318 - DNA, 120 bp, Artificial Sequence
  ENSG00000224078_757 (sequence is synthesized)
ttatgtctctcaagcttagaatattttacatttttaaatggctggaaaaagtttgaaaaataataatagtttgtaacgtgaaaattataagaaattcaagttccagtatccatcaagtgt

SEQ ID NO: 976319 - DNA, 120 bp, Artificial Sequence
  ENSG00000224078_758 (sequence is synthesized)
aaaattataagaaattcaagttccagtatccatcaagtgtactggaacatacccaagttcattgatttataaatatactatatatgataatgctttggctctgtgtccccacccaaatct

SEQ ID NO: 976320 - DNA, 120 bp, Artificial Sequence
  ENSG00000224078_759 (sequence is synthesized)
attgtactcccataattctcatgtgttgtaggagtgaccccctgggagataatctgaatcatgggggcagtttcccacatgctgttcttgtggtagtaagtctcacgagatctgatggtt

SEQ ID NO: 976321 - DNA, 120 bp, Artificial Sequence
  ENSG00000224078_760 (sequence is synthesized)
attttctcttgtcactgccatgcaagaagtgtctttcacctttcgccatgattctgaagccttcccagccatgtggaagtgtaagtccaattaaacttcttttttttttcccagtctcag

SEQ ID NO: 976322 - DNA, 120 bp, Artificial Sequence
  ENSG00000224078_761 (sequence is synthesized)
gtacgtctttatcagcagcgtgaaaaaggactaatacaatatactatatagtttatggctgtttttcatactacaatggcagagttgagtactttaggcctgcaaaacctaaaacaaata

SEQ ID NO: 976323 - DNA, 120 bp, Artificial Sequence
  ENSG00000224078_762 (sequence is synthesized)
ccacctgccctttacagaaaatgtttgccaacccttagtttaggatctattatttatctctgccctccagtgaccctgccatctaatcatttggcctcttaactctctctttaccctgag

SEQ ID NO: 976324 - DNA, 120 bp, Artificial Sequence
  ENSG00000224078_763 (sequence is synthesized)
caaatccgtaaaataaaaggtatacctttccccaagtactattaaagaaaagaagaggagaggggaaaagggaaaaaggggaaaagaaagtgaggaaagggagaggatgcaaaagaaaaa

SEQ ID NO: 976325 - DNA, 120 bp, Artificial Sequence
  ENSG00000224078_764 (sequence is synthesized)
gaaggaaagaaaggaatttccctgatgagatcccttagtaataccttatcagctgttcataatcaaaattcctagaagaggaacaacagcttacttgctataatttcttcacattccatt

SEQ ID NO: 976326 - DNA, 120 bp, Artificial Sequence
  ENSG00000224078_765 (sequence is synthesized)
gacttttcttattactcaaaaaacaaagtatgttataatgtgttgatttttaaaataaaacaaacttttcttatttagtcagcaatgaaggtcaagtgagaccttctagtaaaagtcctc

SEQ ID NO: 976327 - DNA, 120 bp, Artificial Sequence
  ENSG00000224078_766 (sequence is synthesized)
taaagtcagacacatgaaaatacttatccatttaaaacagacaatactttccaattatttatttctatgattgaattaatgggacagtgctacaaacagaagtcctatggaataagtcat

SEQ ID NO: 976328 - DNA, 120 bp, Artificial Sequence
  ENSG00000224078_767 (sequence is synthesized)
acttggaagatcagagtttactctagacaacttgacagcaatcagtttaaaaatggtttcacctagagggatgtgtactaatgttagcaattaactttgaaaggcataaaaattaagatg

SEQ ID NO: 976329 - DNA, 120 bp, Artificial Sequence
  ENSG00000224078_768 (sequence is synthesized)
gattgatggatacaaggatggttatacgataaagcaatgtaagtattaatggcagaatctaggtggcaggcatatgtgtgtcagctgtaaaatttgtgttcaatgtttttttagttccca

SEQ ID NO: 976330 - DNA, 120 bp, Artificial Sequence
  ENSG00000224078_769 (sequence is synthesized)
attggtaagcattttgtcttgaaagcaccaacattcttcttagggggtcatgacactccaatgacaatgagaccctggctgtgcttgtcagtcatgagactggtcactggctgtgatgct

SEQ ID NO: 976331 - DNA, 120 bp, Artificial Sequence
  ENSG00000224078_770 (sequence is synthesized)
tatcagcatgtataggtatattatgtagtcaattagaaagaaattatcagtctttgcttgctatttattctttcactaaaagaaatatgtgaaaattgaagagtgggttgtattcatggg

SEQ ID NO: 976332 - DNA, 120 bp, Artificial Sequence
  ENSG00000224078_771 (sequence is synthesized)
attatcttattacatgctggaatttgcttcctaactcagtctcaaggattagaacagcatttgtttttctttttcctgtcactcagggagcaattttctaagcattagatgatagattaa

SEQ ID NO: 976333 - DNA, 120 bp, Artificial Sequence
  ENSG00000224078_772 (sequence is synthesized)
gtgaaataatgaaatttctaattctagggattttagatggatattgttggctaataggaatattccttcattgagtctttgtatattttaagagagattctaattttagtaatactcggg

SEQ ID NO: 976334 - DNA, 120 bp, Artificial Sequence
  ENSG00000224078_773 (sequence is synthesized)
gcctttggccttcgagaccaaaatcttggaaacattgattttctgtacttaccctgttccaagcaacaagcagattttttagttatgtggatagtcaagtgactatggctaattaattac

SEQ ID NO: 976335 - DNA, 120 bp, Artificial Sequence
  ENSG00000224078_774 (sequence is synthesized)
agatcgtgacactccaatgaccatgagaccctggccatgctagtcagccattggccagtcattgactgtgatgccagtctccataattgaatgaatagtgtgggtcagtgtaccccaagc

SEQ ID NO: 976336 - DNA, 120 bp, Artificial Sequence
  ENSG00000224078_775 (sequence is synthesized)
tgatggaaagctgtgtgctcagtgtctgtcacatatcccaggcttaaggtaccttttataaatgtacctggattgacgatgactttaaaaaaaaaaaatctcattgaaatctgaaaaaaa

SEQ ID NO: 976337 - DNA, 79 bp, Artificial Sequence
  ENSG00000224078_776 (sequence is synthesized)
cctaggggagaattttggaagaggattatgggatcccaaggtccccaacaaggccactgcattttgggctagagacctg

SEQ ID NO: 976338 - DNA, 120 bp, Artificial Sequence
  ENSG00000224078_777 (sequence is synthesized)
ggtccccaacaaggccactgcattttgggctagagacctggaggctcttaagagcatctggaggtggcccaacctgtctctgctccttcgtgatgcagcccaggctccctgtgtgggatt

SEQ ID NO: 976339 - DNA, 120 bp, Artificial Sequence
  ENSG00000224078_778 (sequence is synthesized)
ggatcgatgatgactttaaaatggatctcatcggaatctgaacaaaatgagtgaccaaatcacttctgtgccacttctgtgagctgaggtccagcacaggggccatgccagacaaacaca

SEQ ID NO: 976340 - DNA, 120 bp, Artificial Sequence
  ENSG00000224078_779 (sequence is synthesized)
tggagggtgttttgtttggtcagcactggtactatgaaacggcctgtggaattagacaactaaccagctcacatacagtacaggaaattactggacagttaacctaccaatatatggttg

SEQ ID NO: 976341 - DNA, 62 bp, Artificial Sequence
  ENSG00000224078_780 (sequence is synthesized)
gaaagaagttaaacaaatttacaagaaaaaaatcaaccccatcaacaagtgggcaaaggata

SEQ ID NO: 976342 - DNA, 120 bp, Artificial Sequence
  ENSG00000224078_781 (sequence is synthesized)
tgttctcactcataggtgggaattgaacggtgaataattttggagcttgagaaaaagacaccattgtggcgaacttgctttgccaaaccctgtgtatgcatttttggatgatgatatgga

SEQ ID NO: 976343 - DNA, 120 bp, Artificial Sequence
  ENSG00000224078_782 (sequence is synthesized)
ttaatacaaatagtattaggcattcaatactctcatgagatatctgagccttcagtttcttttattttaacattttacatttttctcaactttaacatcagaaacatcctataagtgtaa

SEQ ID NO: 976344 - DNA, 120 bp, Artificial Sequence
  ENSG00000224078_783 (sequence is synthesized)
taaaattcttatactttacatatagttacatagtaaatcctcctgtcttatttaagtttgaaaaatgaacatgtatacttctcattcccatgtatataatctcttcccacagaatgaggt

SEQ ID NO: 976345 - DNA, 120 bp, Artificial Sequence
  ENSG00000224078_784 (sequence is synthesized)
ggaccaagaaactgggcttcatacggatgaatttatttttttccctgtgtggagacataaaggaaaagtatagtgaataattccgcctcccacccacaagtccccatgggaattctcaca

SEQ ID NO: 976346 - DNA, 120 bp, Artificial Sequence
  ENSG00000224078_785 (sequence is synthesized)
tgttaaaaagcattttgtcctgaaaataacaacaatttttcttagggaatcaggacactccaatgacagtgagactctggctatgccaggcagccatgggctggtcattgtgctgctggt

SEQ ID NO: 976347 - DNA, 120 bp, Artificial Sequence
  ENSG00000224078_786 (sequence is synthesized)
ctccatgattgaatagtgtgggtcattggtgacagatagctatgtgctcagtgtctgccacatatctcaggttcaaagtcccttttataaatgtgcctggatggatgacgacttaaaaat

SEQ ID NO: 976348 - DNA, 120 bp, Artificial Sequence
  ENSG00000224078_787 (sequence is synthesized)
gaatctcgttggaatctgagcaaaacgagtgagcaaaccacttctgtgcagttctgtgaactgaggtcaagcacagggaccatgccaggcaaacacgtgcagagagttcagtttggtcag

SEQ ID NO: 976349 - DNA, 120 bp, Artificial Sequence
  ENSG00000224078_788 (sequence is synthesized)
caactggtaccaaaatggcctgtggtattggaaaacaaacccactcacatagcttacagcacatgaattgtacagaggtctgtatgtgtttgtatatatttatatatgtttgtgtacata

SEQ ID NO: 976350 - DNA, 120 bp, Artificial Sequence
  ENSG00000224078_789 (sequence is synthesized)
tatctttggggattatatggcatttctttcagtgtttggctggcagtgtccatactctcatagtaaacagaattacacaagagtagagggaacagtaggaaatggttttgcctaccctag

SEQ ID NO: 976351 - DNA, 120 bp, Artificial Sequence
  ENSG00000224078_790 (sequence is synthesized)
agtcttttatacatgtttttaggtgctataatcttgtgtgtgaggtcagtctctcaggttcattagatggacagtgtaaaaggtattatgaggttttacatattatttatctattaagta

SEQ ID NO: 976352 - DNA, 120 bp, Artificial Sequence
  ENSG00000224078_791 (sequence is synthesized)
aaagaaatatatggaaattgaagagtagcttttatctattaaagaaaagaatgtatggaaattgaagggtactttctatttgtggaaagtcttaacattttaatttccttattgatcttg

SEQ ID NO: 976353 - DNA, 120 bp, Artificial Sequence
  ENSG00000224078_792 (sequence is synthesized)
tcacagaagttggaatttaagttttgcctgtcactcaaagagaagctttttagacatttgattaagggattctagtagatgctatagtaaacatttctaattgtaaaatgattaaatttg

SEQ ID NO: 976354 - DNA, 120 bp, Artificial Sequence
  ENSG00000224078_793 (sequence is synthesized)
caattcatagagttttatgtggatttcattgcctgatattcattatttttattagtgggtttcatagatgtttaaagggagatcctagttttattgtgtgatactaagggaggccttttg

SEQ ID NO: 976355 - DNA, 120 bp, Artificial Sequence
  ENSG00000224078_794 (sequence is synthesized)
gtcttagaaaactgactttcagtactacccatttccagggagtgagcataatttttattctcataccacatgggcaagtgaatatctatggtttatttcttataactcgtcattagtaat

SEQ ID NO: 976356 - DNA, 120 bp, Artificial Sequence
  ENSG00000224078_795 (sequence is synthesized)
tatgaaagtaagaaagttgacaaatgaaactcttttaattatgagggtttcatttgtcgacttcctacttcctcagtgtgctttgtgtattggaggtaatactggaattgcatggaattc

SEQ ID NO: 976357 - DNA, 120 bp, Artificial Sequence
  ENSG00000224078_796 (sequence is synthesized)
ctactgctgctccagtaacctgctgattttgtcacgtgtaccagattcgttgtctggcaatgagaacaatacacttcagaggtaatattgcaatttttagtaagtgcatttttcctgggt

SEQ ID NO: 976358 - DNA, 120 bp, Artificial Sequence
  ENSG00000224078_797 (sequence is synthesized)
tcgttctattattttattttagcaagtaagattataattggtttttcaagcagtctgttaatccaaatggtgtgaggccctaataatctggttagtcatctgaagtttctgtgttctttg

SEQ ID NO: 976359 - DNA, 120 bp, Artificial Sequence
  ENSG00000224078_798 (sequence is synthesized)
tacagtatttttatacttcctctgttttcaaataacattaggataccctactagcaaaataatttagtatattttatatacttgtgcatagtaagcctgttgtatatgtacactatttgc

SEQ ID NO: 976360 - DNA, 120 bp, Artificial Sequence
  ENSG00000224078_799 (sequence is synthesized)
aaggagagagcctagtcatgatgaatggtgttgtgttgggtatgctgaggaaactttgagaccaatgtttcagaaaaaattatttctatactgtcatgtttcaagtaccgagtattgttc

SEQ ID NO: 976361 - DNA, 120 bp, Artificial Sequence
  ENSG00000224078_800 (sequence is synthesized)
ttgtcatacagatggtccagtgaacatctctggtgaattccttacaaccaacctcttgttactaaatattccattaggaatgttttgtttctcaactccctgatttcccctttatagatt

SEQ ID NO: 976362 - DNA, 120 bp, Artificial Sequence
  ENSG00000224078_801 (sequence is synthesized)
tgaacaaaatgagtgaaaactctataccgtcatcctcgtcgaactgaggtccagcacattactccatcaggggctagacagagagggccaacattcgtttgttgatatgggttgcatcaa

SEQ ID NO: 976363 - DNA, 120 bp, Artificial Sequence
  ENSG00000224078_802 (sequence is synthesized)
gagagggccaacattcgtttgttgatatgggttgcatcaaggggtccatccaggcttaggatggggtccctttgggcaattggaagtcacagggaagtgggagctcccatgcacaggaaa

SEQ ID NO: 976364 - DNA, 120 bp, Artificial Sequence
  ENSG00000224078_803 (sequence is synthesized)
ttccttatttgaaggacttctttctccctgggcgggataactcacctactgtctgaaggactaggtgaatggcaggtggcatggaaagagtttgtgggtagtctgcctctggtggccaag

SEQ ID NO: 976365 - DNA, 120 bp, Artificial Sequence
  ENSG00000224078_804 (sequence is synthesized)
tttgttcttgagtccaagctctggattcccagaggaagacagatcccctggttgcggggagagcacaagcctacactattctcacttgttagcttgttttgtccttggcggaggacgttg

SEQ ID NO: 976366 - DNA, 120 bp, Artificial Sequence
  ENSG00000224078_805 (sequence is synthesized)
tatttccaggcacccagcatagcctctttgccgcatttccatgtcatatcccatatgttatgaggatttgtgtattgcatgatcaggcaggcttctgctccaagctggggctgtcaggca

SEQ ID NO: 976367 - DNA, 120 bp, Artificial Sequence
  ENSG00000224078_806 (sequence is synthesized)
aggagtctctgggttattccaaacctgatttaggtcagtggcttcctctttcaggattcatggccccaaggcttttgtgagcaccattgcaggtgttgaagcaacgatgttgagagggat

SEQ ID NO: 976368 - DNA, 120 bp, Artificial Sequence
  ENSG00000224078_807 (sequence is synthesized)
gcccaacatcagtgctctttagcaggatggtgcacctcgagggcccctggccctgggacgagcatctgcgtgtccatgcatttctgtgtccatgaacaggcgaggccatagacaggcaaa

SEQ ID NO: 976369 - DNA, 120 bp, Artificial Sequence
  ENSG00000224078_808 (sequence is synthesized)
tagcagatgtgtcacaggggactggataacatggccctcgtgacgtgtgcaacctgtctgcctttctgaagcacgcctgtgtttcctctgcacttcacaggtggtgttggcatgaaaggc

SEQ ID NO: 976370 - DNA, 120 bp, Artificial Sequence
  ENSG00000224078_809 (sequence is synthesized)
ccttggtgggccgtgaactgaatggtggcgctggcctgtgcccagtatatctgggttcggtggctgagagagcttttgttgccctgtgtccgtgacgggccagtgttctgcatgcatccc

SEQ ID NO: 976371 - DNA, 120 bp, Artificial Sequence
  ENSG00000224078_810 (sequence is synthesized)
atcacatggatccatggaggatgttgagcccagaggaagacttgcactgggcccaatggccccaggtcagcgtccatcagccaggtgtccagcccctggtgcactgaagatcgggccctt

SEQ ID NO: 976372 - DNA, 120 bp, Artificial Sequence
  ENSG00000224078_811 (sequence is synthesized)
cctggtgccctggtctcctgcattgagctgtgtgagctcttccacatggaagacccctgtcattgactggcatagggttcagtggcggagagagcatcaggtggcccacgtctgtgatgg

SEQ ID NO: 976373 - DNA, 120 bp, Artificial Sequence
  ENSG00000224078_812 (sequence is synthesized)
gccagtattccacatggatctcatcacatgggtccatggaaggcgagcatccctgagctggcacaccccaccttctgccagcatggaaggatggtgagcacagaggaagaattgcgttag

SEQ ID NO: 976374 - DNA, 120 bp, Artificial Sequence
  ENSG00000224078_813 (sequence is synthesized)
caggcccttcctggtgctctggtctcctgcactgagctgtgtgacctcttttgcccggcagaccccctggcattgaccagcatagatagtgagactggaagaaaactttcattgggcccg

SEQ ID NO: 976375 - DNA, 86 bp, Artificial Sequence
  ENSG00000224078_814 (sequence is synthesized)
gtctcctgcattgagctgtggtgagcacatccggatcctgctggatgcgtgtgcggggaagggggtgccctgggttgggtcaaact

SEQ ID NO: 976376 - DNA, 120 bp, Artificial Sequence
  ENSG00000224078_815 (sequence is synthesized)
tctaggtgagaggtttggaagaggatgctgggattccgaggtccccaggagggcccctgtatttttggctggagacctggaggccctgaagggcatcttgtgggtgcccaaccctgtctc

SEQ ID NO: 976377 - DNA, 120 bp, Artificial Sequence
  ENSG00000224078_816 (sequence is synthesized)
tgcgctcctccttgaggcagcccaggctccctgtgcaggcttggtgtcagccctccagttccctgggtttgaggcacatgggaagctcctttctgagccccgttctcctcttgtgtcttt

SEQ ID NO: 976378 - DNA, 120 bp, Artificial Sequence
  ENSG00000224078_817 (sequence is synthesized)
cccacagggactggggtatttgaaagctaatctgcctgcgtatgttagaggaaatgaattggacagtcatctataaatatcgtattttttaataaaatggctattcctttggtgcttggc

SEQ ID NO: 976379 - DNA, 120 bp, Artificial Sequence
  ENSG00000224078_818 (sequence is synthesized)
tggtagcatccatccactggtagtaaatagaccctggaaaaccagcacatatgtagtgagaccccatgagacatgattgtgcctacctttgagccatccataagttatctgggacatgac

SEQ ID NO: 976380 - DNA, 120 bp, Artificial Sequence
  ENSG00000224078_819 (sequence is synthesized)
agtcttttgagtgagagcagtttactaaggtcatttagatcatcagttccaaagatggtgtggatcttatcgattatttttttaggcagaggtaatatctggaaaattaagagtgatttc

SEQ ID NO: 976381 - DNA, 120 bp, Artificial Sequence
  ENSG00000224078_820 (sequence is synthesized)
taaccatgagaatattttagtttgtttaaatttgcttgctaacccagtaccaagaattcagaccttttttctgtctgtataaagcaatattctagacatttgagtgattcaagtagatgt

SEQ ID NO: 976382 - DNA, 120 bp, Artificial Sequence
  ENSG00000224078_821 (sequence is synthesized)
tgtgagatgattacatttccagtccttggaatgttatgtggattttattggctaatcttcatatttcatcagtggattttcctatgcatgttaagggagatccttgttaattgatgtcta

SEQ ID NO: 976383 - DNA, 120 bp, Artificial Sequence
  ENSG00000224078_822 (sequence is synthesized)
aatgctggtgagtggctcagggtggtaagcattcctctgccctgtgtgcagaggtgtcttttgaattttgagacctgcaaagagctgtttctcagcaggccactaatggcatggcgagtt

SEQ ID NO: 976384 - DNA, 120 bp, Artificial Sequence
  ENSG00000224078_823 (sequence is synthesized)
ccactcccagagctgattgtctgtgttcattgctcagtggtgtggctctgggttccccccaggatgctgaaggtgtttaaggtcatcagctctcccactgcccagcctgtggtgtcaaat

SEQ ID NO: 976385 - DNA, 120 bp, Artificial Sequence
  ENSG00000224078_824 (sequence is synthesized)
gttctgcctcttcgaacgtgcttggatcgatgatgagtcccccataaaaacattccttggaaaagctgaacaaaatgagtgagaactcataccgtcgttctcatcagaactgaggtccag

SEQ ID NO: 976386 - DNA, 120 bp, Artificial Sequence
  ENSG00000224078_825 (sequence is synthesized)
ttctctgcttctaccccacagccaattttttataaaccagttgataacataagtagtttttgggggatgatacattacttatacattttctatgtagtaaacatgtatgtgtatgtgtgt

SEQ ID NO: 976387 - DNA, 120 bp, Artificial Sequence
  ENSG00000224078_826 (sequence is synthesized)
gggtgtgtgtctaattactttgttggacagattcctgtggtttggaactgctggggccaagtttatacaaaaatctacatttttgagtaaactccccatgactctagtaagtttccacag

SEQ ID NO: 976388 - DNA, 120 bp, Artificial Sequence
  ENSG00000224078_827 (sequence is synthesized)
tatttgagtattctttatttcctaaagctgtacaaacatcagataatcaatatttgtaaggatcgataatataatttataatgaaattgctttatcagctattaatgttaactacatcat

SEQ ID NO: 976389 - DNA, 120 bp, Artificial Sequence
  ENSG00000224078_828 (sequence is synthesized)
cttcatatagccttataactcatttgtgctattccattttcctctgttccttttattttcacttcccttgtaatgttagtctctttgtactgatttctgaagagttcatttatgattaaa

SEQ ID NO: 976390 - DNA, 120 bp, Artificial Sequence
  ENSG00000224078_829 (sequence is synthesized)
catgttaacattttgtctagaattgcaaatatgttttttctcattcattttactatggtgttttattttttggttatacagaagttgtatattgaaatataatcttgttctgttttatga

SEQ ID NO: 976391 - DNA, 120 bp, Artificial Sequence
  ENSG00000224078_830 (sequence is synthesized)
ggaccttcctagtgccctcggctcctgcactgagctctgtgaactcttctgcacaagtgacccccccagccttgagcggcatagatggtaagcctggaggaagacttgtgttgggcccac

SEQ ID NO: 976392 - DNA, 120 bp, Artificial Sequence
  ENSG00000224078_831 (sequence is synthesized)
aggtactgttgtatatatttttttgcctgttgattttgatgagatcttaagttactgtggatgagggtgatgcctattaagcagttgattcaaatcatattctctttaattcttaggata

SEQ ID NO: 976393 - DNA, 120 bp, Artificial Sequence
  ENSG00000224078_832 (sequence is synthesized)
aaaaggttttctgctatctaactttcactttgtgcattgactggtgttggttaataatgttttcatgacccgggggtttaagtggttgtgctgcttcacacatggcctcctgcttctcat

SEQ ID NO: 976394 - DNA, 120 bp, Artificial Sequence
  ENSG00000224078_833 (sequence is synthesized)
gttgctatgtcacattatctgaagggaagtggggatgggatgaaaggccttgtaaggccacctatatactgaaggaagttgtagtgaatcacagtccatgctcattacatatcaaggcat

SEQ ID NO: 976395 - DNA, 120 bp, Artificial Sequence
  ENSG00000224078_834 (sequence is synthesized)
ttgaaatagaagttactctttttcttgggatgttgacctcagttgatcaggttttacagtgtcctatgatcagaatagaggatgtgatactggaataatcattttctaccattgagtaag

SEQ ID NO: 976396 - DNA, 120 bp, Artificial Sequence
  ENSG00000224078_835 (sequence is synthesized)
tatttatttataaattactaaatgagtggaagatcctgggtactgggaggcaggaggttgcatatttgagttgataagttgtactactgataataaagataactgacacactaaaacata

SEQ ID NO: 976397 - DNA, 120 bp, Artificial Sequence
  ENSG00000224078_836 (sequence is synthesized)
cttggtacactgaaatacaaattacggttatgtccagtggtatcaccaagtgacaaactgggagctaaatagttcagaaatgccctagtctctaggtccagtttgaattggttatggaac

SEQ ID NO: 976398 - DNA, 120 bp, Artificial Sequence
  ENSG00000224078_837 (sequence is synthesized)
aaagaagccatttataaaagggaagagatttttaggttttgcagctaaggtttatagtaggcagcgagggaatgattcatagtgattgtagcagttggtttaccaagcactaaagagatt

SEQ ID NO: 976399 - DNA, 120 bp, Artificial Sequence
  ENSG00000224078_838 (sequence is synthesized)
ggtgttaactccataatactgatagactgattggaattacattttttctcttgaatttaccaggagtggttgtgaatgtcaccttttccatcttttaaattacatccttgcaggtggtaa

SEQ ID NO: 976400 - DNA, 120 bp, Artificial Sequence
  ENSG00000224078_839 (sequence is synthesized)
tttcttttttcttcagctgtgtgcagttgattaacttgtacagagcctatcacacaatagatgtttaagaaatattaagtgaatgaatgaggcagcattgctaatttttgtatagtgaga

SEQ ID NO: 976401 - DNA, 120 bp, Artificial Sequence
  ENSG00000224078_840 (sequence is synthesized)
cagtatctcacagtccaggctggagttcagtggcattaacataactcactgcagccttgaacacctgagctcaaacgatcctttcaccttatcctccagagtagctgggactacagtcgc

SEQ ID NO: 976402 - DNA, 120 bp, Artificial Sequence
  ENSG00000224078_841 (sequence is synthesized)
gtgtcaacatgcctggctaattttagttttctaatttttttagagttgggatctcactatgttgcttagactggtcttgaactcctggcctcatgccatcctcttgcctcagctggtatt

SEQ ID NO: 976403 - DNA, 120 bp, Artificial Sequence
  ENSG00000224078_842 (sequence is synthesized)
gtaggtgtgagccactgtgccaggtactaattttttttatgttagaaaacaagtttttaggtattttatagttacttccttatgacaatatctcatcagaatctaggcctatctgatatc

SEQ ID NO: 976404 - DNA, 120 bp, Artificial Sequence
  ENSG00000224078_843 (sequence is synthesized)
tgactccatacgtttataccgtgtagtcagccattcccagatagaggtcatttgagttacttagtgtttaccagcacttgtttactaccttgcgatgatatttacagtgtatttttgggt

SEQ ID NO: 976405 - DNA, 86 bp, Artificial Sequence
  ENSG00000224078_844 (sequence is synthesized)
tttactaccttgcgatgatatttacagtgtatttttgggtatggttttggggttatttggttgttgttaaaatgcctgtaatcccg

SEQ ID NO: 976406 - DNA, 64 bp, Artificial Sequence
  ENSG00000224078_845 (sequence is synthesized)
agttcgagcccagcctggccaacatggcgaaaccctaactacgcaggaggctaaggcaggagaa

SEQ ID NO: 976407 - DNA, 120 bp, Artificial Sequence
  ENSG00000224078_846 (sequence is synthesized)
agccgagatcgcgccaatggcactccattcagcttgagtgacagaggtgagactcccatctcaaggtaaaaaaaaaaaatagaaatcagcaactgctatttgagtttacaggagtgagaa

SEQ ID NO: 976408 - DNA, 120 bp, Artificial Sequence
  ENSG00000224078_847 (sequence is synthesized)
atcagcaactgctatttgagtttacaggagtgagaagtcctctcttgcatggtgagatggggaacatttaattcaatagaaatatttgagaccaggtatggtggctcaagcctgtaatcc

SEQ ID NO: 976409 - DNA, 90 bp, Artificial Sequence
  ENSG00000224078_848 (sequence is synthesized)
tgagttgggtggatcacctgacaagcaataccctgtctcaaagatacaaaaattacccaagcttggtggtgtgtgtctgtaatcccagct

SEQ ID NO: 976410 - DNA, 120 bp, Artificial Sequence
  ENSG00000224078_849 (sequence is synthesized)
gttcaaaggatgtatttattaagccaatataaagtaaagaggtggggaatgttgtagaagtatatgttgataaagggatcaggtggttgtacaataagaagggggttgcagacatggaga

SEQ ID NO: 976411 - DNA, 120 bp, Artificial Sequence
  ENSG00000224078_850 (sequence is synthesized)
aacagttcttctagctcttccactttcagtatcatctgtgtgggtcactggaatcctttttcacaatgcctgcttgcccatgagttttaagaactagtacagtgtagaaatgattagtag

SEQ ID NO: 976412 - DNA, 120 bp, Artificial Sequence
  ENSG00000224078_851 (sequence is synthesized)
gaaaaacttggctgggttaatttgctttgctgagccgattcaacttaaaaagcgaggtccatactaagtgcccaagaatcaagaaggaggctcacatttgaacttgatgtttagttaatg

SEQ ID NO: 976413 - DNA, 120 bp, Artificial Sequence
  ENSG00000224078_852 (sequence is synthesized)
tgaatcattttctgttgaactaatgagaatacagtgaccttgagggttaggttgtacatctgaattgttcgggctgtttcctgtcttttggatgttttgtttgtatagatattttcattt

SEQ ID NO: 976414 - DNA, 120 bp, Artificial Sequence
  ENSG00000224078_853 (sequence is synthesized)
tatgttacatcatttgttctttggtagcaaaaattgagttgaaatgatacagttcctgaaatctatgatttcatgtttcggagatatgtatcaggaataatagtgtgggttctcatgaga

SEQ ID NO: 976415 - DNA, 120 bp, Artificial Sequence
  ENSG00000224078_854 (sequence is synthesized)
aaatctggattgcattactgtgctactttggtttcttgtcagagaagttagtagtttagacctccttcagaatcctttctttggactttgtgtttcttacgttgtgccagccttgatttt

SEQ ID NO: 976416 - DNA, 120 bp, Artificial Sequence
  ENSG00000224078_855 (sequence is synthesized)
atttgtctgtcctctgtctttctataccatttgtttacacttaactctagaattttttgatgcatgttttcagtgtactctagtcctaaaattggtttacatttaattattggggagaat

SEQ ID NO: 976417 - DNA, 120 bp, Artificial Sequence
  ENSG00000224078_856 (sequence is synthesized)
agcaagttgtcgatagtatctgtggtggcattagtgtatttctgtttcagttctttggacagtttgctagtggaaatagtcattgtatttagctctgtgagacccgactggcagattgct

SEQ ID NO: 976418 - DNA, 87 bp, Artificial Sequence
  ENSG00000224078_857 (sequence is synthesized)
cccgcgtttgtttccttcatgtagattgctgtgtgtgtctttttcttcataattccccttaattctgtgtgctttgaatgacactgt

SEQ ID NO: 976419 - DNA, 120 bp, Artificial Sequence
  ENSG00000224078_858 (sequence is synthesized)
cataattccccttaattctgtgtgctttgaatgacactgttgttgttactgttgttttatatccattgtcacataaaactcttatcatttattcttccaggccagggactgtccttatgg

SEQ ID NO: 976420 - DNA, 120 bp, Artificial Sequence
  ENSG00000224078_859 (sequence is synthesized)
gtagagatacactatctgcaggaatttatttttttacgtatttttactagttgatgggaaagacattgggaaagacctgggctggatttgtgatgagctgtgtttactgagcatgatgaa

SEQ ID NO: 976421 - DNA, 120 bp, Artificial Sequence
  ENSG00000224078_860 (sequence is synthesized)
gtaaagctcaacgtgattactctgaagtccagccttactgtcagtctaaggactcaggatacaaatactcaaaacataaattcttagactctaaatttcacatggtttttcctatcagta

SEQ ID NO: 976422 - DNA, 120 bp, Artificial Sequence
  ENSG00000224078_861 (sequence is synthesized)
caggttaaggataatggcgtgttgtaggtttttccagtgcaatacaaggaagttggttctagatcctttagtacagttaatgttttgtagagtgtgttctatgttcactgcattggtatg

SEQ ID NO: 976423 - DNA, 83 bp, Artificial Sequence
  ENSG00000224078_862 (sequence is synthesized)
ctcttgcattcaagcacttcttgccaacatgcccggctaatttttgtatgcttttgtggagacaggctttgccatgtttgcca

SEQ ID NO: 976424 - DNA, 120 bp, Artificial Sequence
  ENSG00000224078_863 (sequence is synthesized)
catgcccggctaatttttgtatgcttttgtggagacaggctttgccatgtttgccaggttggtctctaagtgatccacccgcctcagccccacaaagtgctgggattacatgcgtgagcc

SEQ ID NO: 976425 - DNA, 120 bp, Artificial Sequence
  ENSG00000224078_864 (sequence is synthesized)
cctttgcttatttctactatgcatttcaagtgatcatttcaagagaataagtacttaggagctcctatgctctttttttttttaaccctgttgcttgcatcacccggttccaaccctata

SEQ ID NO: 976426 - DNA, 120 bp, Artificial Sequence
  ENSG00000224078_865 (sequence is synthesized)
tgaaagtttcatgagcatgtttctgtcactgaggcagcttctccatttggcatataattgagaaattgctagtttgtggctgagacattggtttgagaggagacgtaatttatatattta

SEQ ID NO: 976427 - DNA, 120 bp, Artificial Sequence
  ENSG00000224078_866 (sequence is synthesized)
gcagaatgcttaagttacatttccagagattaatttaattctacttttaattaagttaaccctttgctgtatctttacaagacgtaggtggagatttaattttgactcttagattcagtt

SEQ ID NO: 976428 - DNA, 120 bp, Artificial Sequence
  ENSG00000224078_867 (sequence is synthesized)
aaggtgatgaaattggcattatatagtttttgatgctgagccccacggagattaaaagatttgctaaacaccatgcaatttttgaatcacatctctaatctcacattattctgtactcta

SEQ ID NO: 976429 - DNA, 120 bp, Artificial Sequence
  ENSG00000224078_868 (sequence is synthesized)
tgatgggtctttcattatctgtgattgacattctatgagtaggtgcttttgctttgcctataagtcgttattatgaaggaggaatggtgaataagaaggtaatttagaaaagcctatatt

SEQ ID NO: 976430 - DNA, 120 bp, Artificial Sequence
  ENSG00000224078_869 (sequence is synthesized)
aaatataccatgaacattgaatatagcaagatcttattctctagttgttatcttagttgataaattctgtatgtgttatgtgtttgtgtatacatatgtacatattaatgatgtgggtgt

SEQ ID NO: 976431 - DNA, 120 bp, Artificial Sequence
  ENSG00000224078_870 (sequence is synthesized)
tgatactgtgatcacatgacaaatgactggtttatagtgaaaagctgttggggttcagagaaatgaacattcttctaaaagtgaggtagataagttattttatagttcttgcctttgagt

SEQ ID NO: 976432 - DNA, 120 bp, Artificial Sequence
  ENSG00000224078_871 (sequence is synthesized)
ctctgttcttctggtagaaatgttagtgtatttataacctctcagatttgtttggttctcttagtgttcttgatccaggcagttagcgatatgttggatgaattgagaaaaatgagtttt

SEQ ID NO: 976433 - DNA, 120 bp, Artificial Sequence
  ENSG00000224078_872 (sequence is synthesized)
tcctttcctactaactgaattagattagaaataagcagttaagtgagaaaaatagggaattagtgccagatatgttgaggtgtagtgttgacagggggtcttttaccttcagatgtttgg

SEQ ID NO: 976434 - DNA, 120 bp, Artificial Sequence
  ENSG00000224078_873 (sequence is synthesized)
tgcaacttagagaatgcagtggtagttgctggcccagcccatccaaacaacctcatttgtggggtgatacttcacagatgacttaaaataaatcccctgaaaataagaatctctggaaga

SEQ ID NO: 976435 - DNA, 120 bp, Artificial Sequence
  ENSG00000224078_874 (sequence is synthesized)
gatgacacgtgtatgtgcgtgtgtgcacgtgtgtgcgtgtgtgcacgtgtgtgtgtgtgtgtgttttggtggagtggtaggaggagggttggcttaatgatgagaatcattatttcttga

SEQ ID NO: 976436 - DNA, 120 bp, Artificial Sequence
  ENSG00000224078_875 (sequence is synthesized)
attggatgacactttccattcctgcaaagggagcgtgaggtccagccttgctaattcatgatcaaagtaatttgctgagagtagtggaaggaatgagttagcagaagatggcaaattgca

SEQ ID NO: 976437 - DNA, 120 bp, Artificial Sequence
  ENSG00000224078_876 (sequence is synthesized)
ttaatgagtagtaggaggaaaacaaataagcaaattttaatgtggttggaacatgttcctgagttgtatgaagggagacaggtaaattgagagtaatgttatgattgtttcatttgttgg

SEQ ID NO: 976438 - DNA, 120 bp, Artificial Sequence
  ENSG00000224078_877 (sequence is synthesized)
aaataaggaaaacttgcatggtttgaattgtggaacaataggtggtgtatgttaggagtcagaattatcatttaacatgtaagtttctgttttacttcagataaagaatgtcagctacct

SEQ ID NO: 976439 - DNA, 120 bp, Artificial Sequence
  ENSG00000224078_878 (sequence is synthesized)
ttcccatgttagcttctataccttttcttgaggtgaccataaataggtaatattgtctttcactgagattgttttaattagcgaagtgtgctgattaaatgtcttttcttgataaattat

SEQ ID NO: 976440 - DNA, 120 bp, Artificial Sequence
  ENSG00000224078_879 (sequence is synthesized)
tagaatgaataaaggatggtatttctagatagccttggttagtcagtgatttgtttaaatttagtgtggataagaatcacctgagggctttttaaacacagtttactgggtcctgacctt

SEQ ID NO: 976441 - DNA, 120 bp, Artificial Sequence
  ENSG00000224078_880 (sequence is synthesized)
agtgtttctggcttattaggtataagtatgagaagttgatttttatcaagtttctagatgctacagatctaggaaccatacttagagtgctattatatgtcttttaatgtacactgatat

SEQ ID NO: 976442 - DNA, 120 bp, Artificial Sequence
  ENSG00000224078_881 (sequence is synthesized)
ggaaaaagcaatgatacatcatgttatcgcatattttaaaatgtgatcatgaccagggaatcttgaaagttgtcttatgtaataatgtaaatcaatgtagaataccatatatttttttct

SEQ ID NO: 976443 - DNA, 120 bp, Artificial Sequence
  ENSG00000224078_882 (sequence is synthesized)
tgcaaggttattattaataggaatgactatttgtagccaatgtgttcaaatgcatgggaggacgtaaacacttcataatttcctggaaatacagacatatatcacttaaaataatacatt

SEQ ID NO: 976444 - DNA, 120 bp, Artificial Sequence
  ENSG00000224078_883 (sequence is synthesized)
tctaatataaatttaaattatctacgtgatatgaggaaacgagcttatttttgataattttcctagcagtgaatcaactatactcatttgaatctaaattaaattaaatttgagtaaatt

SEQ ID NO: 976445 - DNA, 120 bp, Artificial Sequence
  ENSG00000224078_884 (sequence is synthesized)
cagccatttctaaattcagtccatataaattcactttgggtaaaagaagacaaaattcctgaaaacagtagattaaaaaaataacattttaagagcaggtatgatctcaatgaatatagt

SEQ ID NO: 976446 - DNA, 120 bp, Artificial Sequence
  ENSG00000224078_885 (sequence is synthesized)
gtggtaatttctgcctaatacctacccttttggaggaaggaaaggtaatcctgtttgtgtttaatgttaattactgaactctttataacttgttttatttatttattgtttgattttaag

SEQ ID NO: 976447 - DNA, 120 bp, Artificial Sequence
  ENSG00000224078_886 (sequence is synthesized)
catctgcttctggtggacttacatatgttgggtttgggaaatttcaacatacaggttggcattccagtggctatagttgtttcttgaaatttagtactgttttccaatgatgattctctt

SEQ ID NO: 976448 - DNA, 120 bp, Artificial Sequence
  ENSG00000224078_887 (sequence is synthesized)
tgggaataggctgttctcttttacttaaaaactgtaaaattagccacttcagttgagactcctccaggtttggaagtggtgaagaatatggatatattcagatcaaatcagtcattctct

SEQ ID NO: 976449 - DNA, 120 bp, Artificial Sequence
  ENSG00000224078_888 (sequence is synthesized)
gtgatacagcaactgaacaagaaacccagacttcaaacaagcagacttctttgggttggactgaataaaatgagaagaaattacagaggatttgaaaatgtatatggcctaggaattatt

SEQ ID NO: 976450 - DNA, 120 bp, Artificial Sequence
  ENSG00000224078_889 (sequence is synthesized)
gaaattattttggagggtggcaacaaatttgggacattgtactttctgttttaatgtcaattgtataatgtgtaactctagtgagcatggctggataccgtggcttcacattttaggtag

SEQ ID NO: 976451 - DNA, 120 bp, Artificial Sequence
  ENSG00000224078_890 (sequence is synthesized)
actgggtgttttatctactgagtgaattacagccttcggcaatgatgtcaaggtagcaacaaaacccaaaaaatccatcctttagaaattgttttaagtcacaatgatgataccttcttt

SEQ ID NO: 976452 - DNA, 120 bp, Artificial Sequence
  ENSG00000224078_891 (sequence is synthesized)
aaaagctttgacttactgaaataatgcttttcatttgtccaagatgagtacatagcagaatttggaaatatggttccaaaaggctaaatagactgacttttttgatatttttcccttata

SEQ ID NO: 976453 - DNA, 120 bp, Artificial Sequence
  ENSG00000224078_892 (sequence is synthesized)
gggagaaagaaacattaacggtttatcagatgccttgactgtactttttactgctttgtcttcaaggcctagtgtaataattaacatctagtatgtgtttgatggatagccaatttttgc

SEQ ID NO: 976454 - DNA, 120 bp, Artificial Sequence
  ENSG00000224078_893 (sequence is synthesized)
ttcattggtatgttgttaccacagtcattggtagagtcaatatatgaatgaagaaagtataacaaatttgccctctagtagagtacaggcaaagtatggccgtcagtttcaccctgattt

SEQ ID NO: 976455 - DNA, 120 bp, Artificial Sequence
  ENSG00000224078_894 (sequence is synthesized)
tttttcctccattcttttttagggtttaggtcaagaacaagggcatttcattgtaccacatagctgagagtagggaattgggacatactgtcttgctttaaattaaagttgtctgtttca

SEQ ID NO: 976456 - DNA, 120 bp, Artificial Sequence
  ENSG00000224078_895 (sequence is synthesized)
tcaagtagagaggttcctaagatattgccagatttctgactcggggtttgttaaaaatagaaaaggtagttccttaaggttgtattttattggatgcctccacctgcttcaggctagctc

SEQ ID NO: 976457 - DNA, 120 bp, Artificial Sequence
  ENSG00000224078_896 (sequence is synthesized)
actggagaataaatattccaggttaaaaaaaaaaaagcatgtgttcacgtgaacttgtcctttgagcaaacctgttggaaatcaagaggtcattgctgttggagaggataagagggtgta

SEQ ID NO: 976458 - DNA, 120 bp, Artificial Sequence
  ENSG00000224078_897 (sequence is synthesized)
cttgttggtgtgttaagagtagttcacaacataaaaataaatgtaaatgcatctattatatttgggttggcaaaatatattggttatttactctgttgattcctgtagtgtacataaata

SEQ ID NO: 976459 - DNA, 120 bp, Artificial Sequence
  ENSG00000224078_898 (sequence is synthesized)
tgatctacaactctgtgaacaaaaaggcttgaaaaattgttctgaaaatggacaaatcatgaacagataattgaacaagaaaataagcagaaagtaaatttgtgaaatatttcaaactca

SEQ ID NO: 976460 - DNA, 120 bp, Artificial Sequence
  ENSG00000224078_899 (sequence is synthesized)
tttacattcagaaacatctttttaagatcactgtgatacattcgactgtcaattctgaagagacgtataaaggaaatgccagctaaggagcaaggaaacagctttcattcatgggctaaa

SEQ ID NO: 976461 - DNA, 120 bp, Artificial Sequence
  ENSG00000224078_900 (sequence is synthesized)
ttgcagcttaaaaaagatggaccaggattatttcctttagaaacttactgtacaaaagatactgttcaccccattagagaactgatttgaagttactcttccctgtgagggctctgtcat

SEQ ID NO: 976462 - DNA, 120 bp, Artificial Sequence
  ENSG00000224078_901 (sequence is synthesized)
cttaactgtattcacatactttcaactgttccccttgctgctaacctcaggttctttagttcatctatctggcagagctgatttggggaaaacaagacaaaccttctcaggttttcttaa

SEQ ID NO: 976463 - DNA, 120 bp, Artificial Sequence
  ENSG00000224078_902 (sequence is synthesized)
taaataagcagttgtcatgtttcaagagttttagaaatgagcaataatcaaggaagaggacaacgattgcatacgtttataatatttagaacatcttttgccacaataaacactggaaac

SEQ ID NO: 976464 - DNA, 120 bp, Artificial Sequence
  ENSG00000224078_903 (sequence is synthesized)
cacccacttgtggacaccaaacatttggatttgtatattttgtggcattccctcactctaatcctctcatccttaaaaattttcagaaatttttgcagcaacaaacactgattgcaacat

SEQ ID NO: 976465 - DNA, 120 bp, Artificial Sequence
  ENSG00000224078_904 (sequence is synthesized)
atgatttagggtagatttatgaaccattttttcactgaaatacatcaacaggagtgagtagtctgagtgaccaccccagcatggagaaaactgtagtttacagattcttctggagcattt

SEQ ID NO: 976466 - DNA, 120 bp, Artificial Sequence
  ENSG00000224078_905 (sequence is synthesized)
ttatttctagattgcggtggaagtctaaccccccttggagatgtctgccttaaagggtctttggccagggtcctctgtagagccatagtccagatctactctatttgtgtgctccttaca

SEQ ID NO: 976467 - DNA, 120 bp, Artificial Sequence
  ENSG00000224078_906 (sequence is synthesized)
acatcagaacagcaactctcaatccggattcatccccagaatgccgtctgagtcacagcgtggcaggtgcataaagaattatctactgaattgagaaacatttcaaatatataaaacttg

SEQ ID NO: 976468 - DNA, 120 bp, Artificial Sequence
  ENSG00000224078_907 (sequence is synthesized)
aaatattttgggtagtctgtacaaactcaagttgacaagccaaccctgcaggaatatatggatagaaggggaaggataacatgttgaattcagctacatgcctcatcagctagaaaacct

SEQ ID NO: 976469 - DNA, 120 bp, Artificial Sequence
  ENSG00000224078_908 (sequence is synthesized)
tggaagaaagaaagatagattgatacttgcctgaacttcatcaaccaataatattttttttcttgctatggagagtccactcgcctttggaagatttaccagtaaaagccctgcacatga

SEQ ID NO: 976470 - DNA, 120 bp, Artificial Sequence
  ENSG00000224078_909 (sequence is synthesized)
tatacttgtgtgcacatgcaataaggacatcattccccaactcctgctagcattgtgaaagagctccaaatattcaaataatataaactttttttcgtggacatttagcttacgagtttg

SEQ ID NO: 976471 - DNA, 120 bp, Artificial Sequence
  ENSG00000224078_910 (sequence is synthesized)
tttaaatatgtgggaaaattatgtttagataatagtattgaaatgagaatgtaagatacacattgaatgataaatgtgtatgaattgttcattgtgccttaggtaagccagacagtgaaa

SEQ ID NO: 976472 - DNA, 120 bp, Artificial Sequence
  ENSG00000224078_911 (sequence is synthesized)
ttaaatgtgtaatagttgtatttttttgcataatcttggaatgtaattagttaaaagcaaacacttagattttgaacatgaatctgttaagcttgttaatgtagttgctgtggctaaata

SEQ ID NO: 976473 - DNA, 120 bp, Artificial Sequence
  ENSG00000224078_912 (sequence is synthesized)
actggtttcctggggaagcttctatttgctagaattttattctggaacagttgttagaaaggaattctcaggtcaccttttaaagatatacacaattctgtattcactttttgagtgcat

SEQ ID NO: 976474 - DNA, 120 bp, Artificial Sequence
  ENSG00000224078_913 (sequence is synthesized)
aagggtaatagaaaatgacatgggaagcgttaattagaaaaaaaggcattttgtttatgtgcatttgaggatacagtgtttgaagtttctaaataattgttttatgacattttcttggta

SEQ ID NO: 976475 - DNA, 120 bp, Artificial Sequence
  ENSG00000224078_914 (sequence is synthesized)
catagatattgctaacaattagtttgctgaagtatgtagaaacattttaagaaatgattttagaaatataattgttaaagtacctctgatgtatattaaaaatccttttattttggttta

SEQ ID NO: 976476 - DNA, 120 bp, Artificial Sequence
  ENSG00000224078_915 (sequence is synthesized)
taggagcgagggacaacttccactggttcccagaggttctaccactcagggcgtccatggatgaaagtctcacatcacaggcacaatagaaatattccctctgtgtgaggggcagttgcc

SEQ ID NO: 976477 - DNA, 120 bp, Artificial Sequence
  ENSG00000224078_916 (sequence is synthesized)
tgaacaaaatgagtgaaaactctataccgtcatcctcgtcaaactgaggtccagcacactgctccatcaggggctcgagagagaggaacaacatccatttgttgacacagactgcaccaa

SEQ ID NO: 976478 - DNA, 120 bp, Artificial Sequence
  ENSG00000224078_917 (sequence is synthesized)
gagaggaacaacatccatttgttgacacagactgcaccaaggcttggggtggggtctttttctggcagaggagagtagctgggaattttggacgtttgtaactaagagacagcttggttg

SEQ ID NO: 976479 - DNA, 120 bp, Artificial Sequence
  ENSG00000224078_918 (sequence is synthesized)
aaggcagccaggtgtgtcgtcaatttgtaccttgggtcccttgtcctccagaggaagactattgcttccacatggggagacagcacaaggtcattcccagacacctctttcactcacttt

SEQ ID NO: 976480 - DNA, 120 bp, Artificial Sequence
  ENSG00000224078_919 (sequence is synthesized)
catccttgtcaagggacgtaggacttcccatggtgtttggatagcatcaggggcaggcaggcagtcttcaggaggatggcgatgctgatttgctttctgcagaggagcccagagagggta

SEQ ID NO: 976481 - DNA, 120 bp, Artificial Sequence
  ENSG00000224078_920 (sequence is synthesized)
tccacactgaacttgtatgtccataggaggaaacccaaaccgcatggtcccagaagggtcctggtggttagaaggggagaaagctgcacatgcatttaccacacagtcttctgtctgggt

SEQ ID NO: 976482 - DNA, 120 bp, Artificial Sequence
  ENSG00000224078_921 (sequence is synthesized)
tgtggagagatgactgtgagcctcttttgggtgttatagggtgcatacggtttattttatgatgatcttgggatgctgggatgggaatgtaattgcgaatccatgtgttcccgcaactcc

SEQ ID NO: 976483 - DNA, 120 bp, Artificial Sequence
  ENSG00000224078_922 (sequence is synthesized)
tcagtgttcttcatggattccatcacgtgggtatcccctacccaccttccccttgctcatacgtgaggccctggttggacacatgtccttctcctgtcaccccagatggtgagccttgag

SEQ ID NO: 976484 - DNA, 65 bp, Artificial Sequence
  ENSG00000224078_923 (sequence is synthesized)
gatctcagctcactacaacctctgtccgcccaccactgtgccaggctaatttttgtgtttttagt

SEQ ID NO: 976485 - DNA, 120 bp, Artificial Sequence
  ENSG00000224078_924 (sequence is synthesized)
cagcttctttctccaggaaagatcaaaacgatgcactgcaagtttccagttctacacctccttctcgttcctcagtgtgattggtccagatagctgccttatccaactgcctcctttgga

SEQ ID NO: 976486 - DNA, 120 bp, Artificial Sequence
  ENSG00000224078_925 (sequence is synthesized)
ttttgaaattcatatgtcatgtgctctttgctaggtctttaggtcgttttgtacatcttttcagaagcttattggaggacattttcatgatatgtccttttcctcattgagaccctcacc

SEQ ID NO: 976487 - DNA, 120 bp, Artificial Sequence
  ENSG00000224078_926 (sequence is synthesized)
atgtcacctacactattgaatccttatcatttctcttttaattttaactctcttttgcttttatggaaaaatgtagaatttaagagaatttttggcaatttcatattggatcaaaatgta

SEQ ID NO: 976488 - DNA, 120 bp, Artificial Sequence
  ENSG00000224078_927 (sequence is synthesized)
ttgtagtgaaatccaggtgtgccaaaatattaacagattttccccatctgtttaattattggggtttcagaatagagactccatggttcataatatctttgtggtcatactacattatat

SEQ ID NO: 976489 - DNA, 120 bp, Artificial Sequence
  ENSG00000224078_928 (sequence is synthesized)
ttctgcttctaatttaattattaaatattgacttgaattagtcttttcctcattgttgcaacaaggtaagttatataggaaattttcttctcttgatggcatgtctgagataatcataga

SEQ ID NO: 976490 - DNA, 120 bp, Artificial Sequence
  ENSG00000224078_929 (sequence is synthesized)
tataagacacctggctggtttctagaatgcatgtaatttttatttcttgatctgtgtgttgagtacttgctgtgattgcatcatgcaaatacattgagctttacaattttagtgtatgca

SEQ ID NO: 976491 - DNA, 120 bp, Artificial Sequence
  ENSG00000224078_930 (sequence is synthesized)
cttttctacatgtatattattcttcgatagaaagtaaaaaaaacttatcgaactagtcaaaatattggttaatacataaaaaaagtctcaagtagattgtgtattacatggtgcttgttg

SEQ ID NO: 976492 - DNA, 120 bp, Artificial Sequence
  ENSG00000224078_931 (sequence is synthesized)
attgatgccctcataatagatcaagtgggttctctctttagcacagggctttttagcaaatcatgtcatgagtagttactcaagtatttttattttaacacatttatattttttctatgt

SEQ ID NO: 976493 - DNA, 120 bp, Artificial Sequence
  ENSG00000224078_932 (sequence is synthesized)
atattcttaaattctcttatacttttttctctgttataaaaacatgctgaacaatctcaagtcttaaggattgcagtattgtccccacatattcatgtattttggtactcaattctttat

SEQ ID NO: 976494 - DNA, 120 bp, Artificial Sequence
  ENSG00000224078_933 (sequence is synthesized)
actttctttgacagatcacttgaactggcacatgtctcttgttttgcagagagggaattaatgtgataccttcatgcttttctattctatgtgctacataattgaatatacaagcaaata

SEQ ID NO: 976495 - DNA, 120 bp, Artificial Sequence
  ENSG00000224078_934 (sequence is synthesized)
tccttggaaagctgaacaaaatgagtgggaactctgtactatcatcttagttgaactgaggtccaccgggggctatagagggacaactgtcattttttttgatgcccgttgcatgaagca

SEQ ID NO: 976496 - DNA, 120 bp, Artificial Sequence
  ENSG00000224078_935 (sequence is synthesized)
ttttttttgatgcccgttgcatgaagcattcttccaggcttaggaagggattccgtttgggtgaaggagagtcacaggggagttgaggctatgtgcacaggacttctgtctacaaggctg

SEQ ID NO: 976497 - DNA, 120 bp, Artificial Sequence
  ENSG00000224078_936 (sequence is synthesized)
gggtagcacacatgcagtccgtgggactaggtgaatgtgcaggttgctcagggagagttaacctgtagcctgcctctgggtggccaagattgtccttgactcctggctctgggttcccac

SEQ ID NO: 976498 - DNA, 120 bp, Artificial Sequence
  ENSG00000224078_937 (sequence is synthesized)
aacccctggaggaagacaagtaattgtgcttgggaagagagaacaaggccatacttttgcctttctttttttcattcttagtttgagaacagtggagttccaatcacctggcatagcttt

SEQ ID NO: 976499 - DNA, 120 bp, Artificial Sequence
  ENSG00000224078_938 (sequence is synthesized)
catgttgtgttccatgcattgtgagtacatgcatatggcaggaacacacaggttcccactgcaagctgagcctgataggcaaggagtctctagcttaaccccagcccagtgtacgtcaat

SEQ ID NO: 976500 - DNA, 120 bp, Artificial Sequence
  ENSG00000224078_939 (sequence is synthesized)
ggcttcctcattaaaattgcatggccctgtagcttttgtgagtgacattataggtatcgatgtaagggtgttgagagggatgctcaatgtcagtgctctttagtgtgctgatgcactact

SEQ ID NO: 976501 - DNA, 120 bp, Artificial Sequence
  ENSG00000224078_940 (sequence is synthesized)
gcttccaccttaagaaacaagaaaaagactaaactagaagatgaaatccaaagcaagcagaaagaagtaaacaatagggattggagcaaaaattgatgacataaaaaaccagacaaaata

SEQ ID NO: 976502 - DNA, 120 bp, Artificial Sequence
  ENSG00000224078_941 (sequence is synthesized)
cagagaaaaatccatgaaaccaaaagttgggtttgtgcagagatttgtgaaatttacaatcctttagctagactgacacagatcattagaattaggaatgatggagacaacatcactact

SEQ ID NO: 976503 - DNA, 120 bp, Artificial Sequence
  ENSG00000224078_942 (sequence is synthesized)
gaccctatagattggatcaggaatgtcgctgtttgctgcattgtgctttcttgaggggagagctatgaaggaaaacaaagttctcattgcacttacaactcaacaacacagcgttgacat

SEQ ID NO: 976504 - DNA, 120 bp, Artificial Sequence
  ENSG00000224078_943 (sequence is synthesized)
acgctgtctatgggttagccctgctctgcaaggagcagtaagaaaatatatatatattttttgaggctgagtctcgctctatcgcccagacgggagtgcagtggcacgatgttggctcac

SEQ ID NO: 976505 - DNA, 120 bp, Artificial Sequence
  ENSG00000224078_944 (sequence is synthesized)
cccaaagtgcagggattacaggcatgatccactgtgcctggcaagtatgtttgtagccagtggggaattattttaactaggcaataatttgatctattttgggaagcctcttgtaatcaa

SEQ ID NO: 976506 - DNA, 120 bp, Artificial Sequence
  ENSG00000224078_945 (sequence is synthesized)
gcaataatttgatctattttgggaagcctcttgtaatcaaatcatatatcaacattaatcacatggtgagtcctccatggttttcattcctagagattctaggatgtttgacatttctct

SEQ ID NO: 976507 - DNA, 120 bp, Artificial Sequence
  ENSG00000224078_946 (sequence is synthesized)
gcttagcttatagcagaaaggtattggatatcaagaatgtttgaacagtttctcctttttgggaatgaagatgaaattgggctagaatgagatgtgtgattgagagaatgtccctgaggc

SEQ ID NO: 976508 - DNA, 120 bp, Artificial Sequence
  ENSG00000224078_947 (sequence is synthesized)
ctgagcagtgtgtccttttgggtatgggcattggaagcatgtagtgaattcttataattttatgttgcctcggcatccatcttgagtataagtttaactttgttataccagaagcaaggc

SEQ ID NO: 976509 - DNA, 120 bp, Artificial Sequence
  ENSG00000227071_0 (sequence is synthesized)
cagcagccacgatgaaacacgctgaaaagagccagcagaaaaaaacgaggagagactggtatgacggagtggaattccggttgtggatgacagaatggaaattttacgcaagatgaaaga

SEQ ID NO: 976510 - DNA, 120 bp, Artificial Sequence
  ENSG00000227071_1 (sequence is synthesized)
tcgaaggagagtgggacgactgcaacctgctgcagctaagtatgcaaggatcgcgccgaccggcttccgagtcgagatcccactaagtcccaccgcagtcaccacagccagccctgccca

SEQ ID NO: 976511 - DNA, 120 bp, Artificial Sequence
  ENSG00000258792_0 (sequence is synthesized)
cagaagacaggaaatggtttctctggatcagttctttgctctttgaaacgagatgatccatctcacactgaaagtttcctatcgtgaggttcagtgtcatctagagtcaacggatgaagt

SEQ ID NO: 976512 - DNA, 120 bp, Artificial Sequence
  ENSG00000258792_1 (sequence is synthesized)
ataagtgttcactgtggaatttctacaacacaaaaagaagaggctggataaagaagataaactgaatattgaaactgttccttttccattaaaaaatagcaaaaaaagttttccctgtaa

SEQ ID NO: 976513 - DNA, 120 bp, Artificial Sequence
  ENSG00000258792_2 (sequence is synthesized)
agagaatttgctgaacgaaggaagatgcaggaagagaggccttggtcttgagtggggcaatcagcaagctgaagacttcttctactcatctattgacattcattggtgtggcatcggctc

SEQ ID NO: 976514 - DNA, 120 bp, Artificial Sequence
  ENSG00000258792_3 (sequence is synthesized)
aaaactagttttgctcagaagtcatagtatgttccttgacccacagatctggtagctggattcttgcattgcttccctattctgctaaattacctggcagtgcagttcccgctaagaaaa

SEQ ID NO: 976515 - DNA, 120 bp, Artificial Sequence
  ENSG00000258792_4 (sequence is synthesized)
ggtcctcaaactcagcccaggggctaggaaccctttatccaccaatggactagcttaattctatttgactgtatctctaggtcccagttgctttgctccatttgtccctgagcatggact

SEQ ID NO: 976516 - DNA, 120 bp, Artificial Sequence
  ENSG00000258792_5 (sequence is synthesized)
gccctggcccagcgcacgtggcatcacaggggaagttaggtttgcatctagaaagagatctagtccgagcgtggagaaggcagaaccaaacccacatggttgagacccacatctcagttc

SEQ ID NO: 976517 - DNA, 120 bp, Artificial Sequence
  ENSG00000214894_0 (sequence is synthesized)
attccaggaagcgtttgcacatcctggccccagaagattttgcgtagcctcaccaagagaagaagttggaaagaaaaaaaaagaagttggcaaggcatccagaggagaccccgccagcac

SEQ ID NO: 976518 - DNA, 120 bp, Artificial Sequence
  ENSG00000214894_1 (sequence is synthesized)
ctgggttctctgccaggggagagagttatgaagaagacttgagcaggcagtccagagctgatacagctgctccaatcaccagagatgcaatctcctgctagatgtcttcacatctacctt

SEQ ID NO: 976519 - DNA, 120 bp, Artificial Sequence
  ENSG00000214894_2 (sequence is synthesized)
tctatgtcacatgtgcaagatggttgctctgccttcagacatcacatttacattccaggcagaaaggagaaggaaagagcaaaagatgtgttccgaacaaatccatcttaaaaacaaaca

SEQ ID NO: 976520 - DNA, 120 bp, Artificial Sequence
  ENSG00000214894_3 (sequence is synthesized)
aggggaggggtagcaggagaaaatttaaaaagaagaagaagaaaaacaaaaacaggaaagccgttgtttccctaaaagccccatcaagccgacttctaccggtgactcattacccagtca

SEQ ID NO: 976521 - DNA, 120 bp, Artificial Sequence
  ENSG00000214894_4 (sequence is synthesized)
tgtggccacccctggattcaaggcagtctgaggaggtgagtgtttcaaagaggcacatggatgccacagacaaaatcaagtttccatggttgaaggagaagaggacgatagagtttgggg

SEQ ID NO: 976522 - DNA, 120 bp, Artificial Sequence
  ENSG00000214894_5 (sequence is synthesized)
aggcagcaggctacgtctgccacagaagatataaagatatggagccacacgagaagatgggggaggctgccaaaaaagtccactgggtacaggtgaggagcaggtgacattggagttgct

SEQ ID NO: 976523 - DNA, 120 bp, Artificial Sequence
  ENSG00000214894_6 (sequence is synthesized)
ccatctgaggagcccgcacctgcaatggcttgtgctcctgctcctgtgggtataggcacaaggctgatgccgagagagtgagttgtttctgttggggttcagaacacaataccccaaagt

SEQ ID NO: 976524 - DNA, 120 bp, Artificial Sequence
  ENSG00000214894_7 (sequence is synthesized)
atggcgatgagtacttaactaaaggacattggaaggcctcagaagcagcctcagatccaaggtccctctgacctgctcctgccctcctgtctctctcgtccctcgttctcccctgaagtg

SEQ ID NO: 976525 - DNA, 120 bp, Artificial Sequence
  ENSG00000214894_8 (sequence is synthesized)
cagaatcctcttccccacggtaggtcctagaaactagaaccctttttccccgaagcaaaagccataaaaactggaattattactctaaactctccttgactttttgtccagaagatggcc

SEQ ID NO: 976526 - DNA, 75 bp, Artificial Sequence
  ENSG00000214894_9 (sequence is synthesized)
tactctaaactctccttgactttttgtccagaagatggccataaagaaattctcagctaggtgtggtggctcgta

SEQ ID NO: 976527 - DNA, 120 bp, Artificial Sequence
  ENSG00000214894_10 (sequence is synthesized)
acccccatctctacaaaacttttttttttaaacttacctaagcgtggtggtacacctgtagtctcagctacttaggaggctgaggtgggagggaccctgctctggctgtgactgctttat

SEQ ID NO: 976528 - DNA, 120 bp, Artificial Sequence
  ENSG00000214894_11 (sequence is synthesized)
cacagggagtgcctatctgtgggctgctttctacacattaaagcattttcagaaagggccaacatcagccttggaaaaaaggaggaagagccacggagagtctccctttatcttcccctt

SEQ ID NO: 976529 - DNA, 120 bp, Artificial Sequence
  ENSG00000214894_12 (sequence is synthesized)
cacacacacacaccacacacacacaccccacaggcacacagggtcaagaacatgctgggcagagcttaagccactgaatgtttcagtaggaatcatgatatctaaaaataggacagctga

SEQ ID NO: 976530 - DNA, 120 bp, Artificial Sequence
  ENSG00000214894_13 (sequence is synthesized)
tttcagtaggaatcatgatatctaaaaataggacagctgataagggggttcttactactcacagttcctggaattatatgcaattgcatcttggaaactcaacaaataaacagttagtat

SEQ ID NO: 976531 - DNA, 120 bp, Artificial Sequence
  ENSG00000214894_14 (sequence is synthesized)
gttagtatggaattaaggaattaagtttggtgaagttcaaagaagctgatgttactcacaagagtaaatagagaggaaaccgggcgtggtggcttcacgcctgtaattctagcactttgg

SEQ ID NO: 976532 - DNA, 120 bp, Artificial Sequence
  ENSG00000214894_15 (sequence is synthesized)
ggccctagaaacaagaaccaatccagcagcaacaagcatctctggcagtctatcatttcccttcaactgaaatcagatcttcttaaagaaatgcttggctctcagactgggaacggaaat

SEQ ID NO: 976533 - DNA, 120 bp, Artificial Sequence
  ENSG00000241231_0 (sequence is synthesized)
tggtggtgattgtggtggtggagctaatgacatgtgtgcagaaactcttctgaatgggacttccctgatcctgtttttacctgatcttcatgctcaatagaaaaagcctcagctttggaa

SEQ ID NO: 976534 - DNA, 120 bp, Artificial Sequence
  ENSG00000241231_1 (sequence is synthesized)
tcagcttcccagtgaacaccgagagttgagtttagcaactgtttggactggccatgtaacagttatacaattttcaatttgcagggccgtccaggtagcatggcatggtactggaacact

SEQ ID NO: 976535 - DNA, 120 bp, Artificial Sequence
  ENSG00000241231_2 (sequence is synthesized)
atgtcttctctctgacctctcggaatatctctgtgattcaatgtgttggcccattggaggccctggactggttaaaacctggaggtttgagaaacccctgatcttctccatactcttcac

SEQ ID NO: 976536 - DNA, 120 bp, Artificial Sequence
  ENSG00000241231_3 (sequence is synthesized)
aagggcaatggctggccaagattacaaattagtgactgttgaggctggaatctgtaccgaggtcatgggaaccccctgcactgccccttctaatcaccctcctgcttggaccctgggagt

SEQ ID NO: 976537 - DNA, 120 bp, Artificial Sequence
  ENSG00000241231_4 (sequence is synthesized)
agtcagataagacaactgaggctgaagatcacacaaccagtaaatggaacagccagaaatcaaatgttatatattggccctgaagtggggataaagcagctaaaagaaagtgtactttac

SEQ ID NO: 976538 - DNA, 120 bp, Artificial Sequence
  ENSG00000241231_5 (sequence is synthesized)
attaaattttaaggtatccaaaagcaaatcaataagccatactctagttacattaagatattttcacaagtgctaggttaagtaatataaaattaccatttttgtaggtcaaaagtaatg

SEQ ID NO: 976539 - DNA, 120 bp, Artificial Sequence
  ENSG00000241231_6 (sequence is synthesized)
gaatatcatgcttgtatatggtttgatctaatatatatcattatcaggttctactaatacagagttttctgcctttacttaaccatcacaataaactaaggacttccaagctagtaagaa

SEQ ID NO: 976540 - DNA, 120 bp, Artificial Sequence
  ENSG00000241231_7 (sequence is synthesized)
taatgacacagataataattagaaaagtattcataacattatcaacaaacacttctaccattttttgaacaactacttctatgtatattttcactgtagtaaaaaatccctaacaaaaaa

SEQ ID NO: 976541 - DNA, 120 bp, Artificial Sequence
  ENSG00000241231_8 (sequence is synthesized)
ggctgattaattgccggcctgcctagacgaagctgcaacaagccagatactgtcagcatgccatcggttaccatggaaatgcacaaggttcctgtttctgacaaacccttgaatactgga

SEQ ID NO: 976542 - DNA, 120 bp, Artificial Sequence
  ENSG00000241231_9 (sequence is synthesized)
tagattgtgccatatgtaaataaggcaaattagttttcctatatcttccagacaaggttagacgaaaagaaaatatatctgtttaaacatactctctaacctcttagatgtgacgaatga

SEQ ID NO: 976543 - DNA, 120 bp, Artificial Sequence
  ENSG00000241231_10 (sequence is synthesized)
gaaagaggggcttctttcttaggaaactaaactcagattgttacaactgaaaggcacttggggaaaatgaccaaaaaatgcaaaatgcattgcccatttataaggaaggacttcaaagtc

SEQ ID NO: 976544 - DNA, 120 bp, Artificial Sequence
  ENSG00000241231_11 (sequence is synthesized)
caagaagaaccccatgagagaccatgtggctggtggtgtcagattataggctttttcaagagaagtcaatctggaattttgtgtaaaattttccaagctttaatgttagctttaaaatag

SEQ ID NO: 976545 - DNA, 120 bp, Artificial Sequence
  ENSG00000241231_12 (sequence is synthesized)
ctttatcgagatataattcaaatgccataaatctatccatttaaagtgtacattttaacagtttttaatcacccccaaaggagaccttgtaccattaagcagtcactcctcattcccccc

SEQ ID NO: 976546 - DNA, 120 bp, Artificial Sequence
  ENSG00000241231_13 (sequence is synthesized)
tcctcccagatgctagtaaccaccattctgtttcctgttgctatgaattgactacttaagtgccagtagcctatcatttttgagtatgtaaatctgcaaggtgcattacacactttaatc

SEQ ID NO: 976547 - DNA, 120 bp, Artificial Sequence
  ENSG00000241231_14 (sequence is synthesized)
ctaacaaaactacaaattaagtgctattattcttactttatagtctagaaaatgaaaaagttttagtagatacaaagttacatctgaaagtaattaattgctacgtattttcatatctgt

SEQ ID NO: 976548 - DNA, 120 bp, Artificial Sequence
  ENSG00000241231_15 (sequence is synthesized)
aatgaagtaagacagaagcaataatctctacaacaaaagatgagaacttgcctcctctaaatcccatacacacatggctatttgttccaagcttatgtggatcatcgctaatttacaaac

SEQ ID NO: 976549 - DNA, 120 bp, Artificial Sequence
  ENSG00000241231_16 (sequence is synthesized)
agtgggtgatgtgctataaagaaaatgactcattggcccatctgtaatttaaatatgtgacaaaatgtttaaatgtttcaaacaatggttaattattagagacttaacagtttgaaaaca

SEQ ID NO: 976550 - DNA, 120 bp, Artificial Sequence
  ENSG00000241231_17 (sequence is synthesized)
ttttttttttttttctgtttttttggcttcattttgaaccagcccaaatggacatcaggtgtttgactcttcctgagatgcagtacataatctttaattggacaccttgttggaaaataa

SEQ ID NO: 976551 - DNA, 120 bp, Artificial Sequence
  ENSG00000241231_18 (sequence is synthesized)
gttggaaaataaggaggaaagtatccattttttttttttagaatagcctggccaacatttatgtactgaatgctaatatgtataattgaaaaaataaaaaattctaggtcttacttaaga

SEQ ID NO: 976552 - DNA, 120 bp, Artificial Sequence
  ENSG00000241231_19 (sequence is synthesized)
tgccagccaagtaggtatctcactgagacttatatttgtctttctctgttcacatattgcttttgtctgtgggacattcatatgtcctcttctgtgaaatgtctatatatccctctggca

SEQ ID NO: 976553 - DNA, 120 bp, Artificial Sequence
  ENSG00000241231_20 (sequence is synthesized)
gatatttttattgaattatttgtaatttttgtattgattgttaggagccatttaaaaatatgtatacattttcaatactattcttttgttcgttgcatgtgttccaaatatattcttcaa

SEQ ID NO: 976554 - DNA, 120 bp, Artificial Sequence
  ENSG00000241231_21 (sequence is synthesized)
gtccgtcagtattttcctttgtagttagtgctttttatatatcttgtataaataattcttgcctacatcaaggtcataaaaatagtaccaaattttctcatgagaattttaaaattctgc

SEQ ID NO: 976555 - DNA, 120 bp, Artificial Sequence
  ENSG00000241231_22 (sequence is synthesized)
aattctgcttttcattatgaagtctttaatccactaaaaatttatttatttatgtgtatggtgtgagatataaattaaattttattttttcaacttgaaaatcaattgtatacctaactt

SEQ ID NO: 976556 - DNA, 120 bp, Artificial Sequence
  ENSG00000241231_23 (sequence is synthesized)
ttctttctttcttttttttgagacagagtatcattctgtcacccaggctggattgcagtgctgtgatcacagctcactgtagcctccatccaccttttgggctcaagtgatctttccatc

SEQ ID NO: 976557 - DNA, 88 bp, Artificial Sequence
  ENSG00000241231_24 (sequence is synthesized)
ctgtgatcacagctcactgtagcctccatccaccttttgggctcaagtgatctttccattgtgccactatacccagctaattttctta

SEQ ID NO: 976558 - DNA, 120 bp, Artificial Sequence
  ENSG00000241231_25 (sequence is synthesized)
ctggctttaaatgccagggctcaagtgatcctccctcctcagcttcccaaagtggtgggattacaggaatgagccaccaaacccagccaaaattataatttctaattatttaaaaatgga

SEQ ID NO: 976559 - DNA, 120 bp, Artificial Sequence
  ENSG00000241231_26 (sequence is synthesized)
atagattcttgcgcattgatcttatatttggtaacctttccaaaatcccctactaatacaaaaagtttgtttcagatttatttttaaagagttacatcacctgtaaataagagcagcttt

SEQ ID NO: 976560 - DNA, 120 bp, Artificial Sequence
  ENSG00000241231_27 (sequence is synthesized)
gtttcttgcttcccaatcctcttgccttttattgtattgtattaatttctttttctgatttacttatgctttcaacatttcaccattaaacatcatgtttgttgtagttttttctttttc

SEQ ID NO: 976561 - DNA, 120 bp, Artificial Sequence
  ENSG00000241231_28 (sequence is synthesized)
tatctctgtgattcaatgtgttggcccattggaggccctggcagatttacgatgtcatgtagactcagcctcttctcttcgtaacatcctgctcaaacctcctatctttaggtcctccct

SEQ ID NO: 976562 - DNA, 120 bp, Artificial Sequence
  ENSG00000241231_29 (sequence is synthesized)
tctcttatggcacatgtcactgtattcatatttgcagaacatgaactagatgccagacacactatgactggttaaaacctggaggtttgagaaacccctgatcttctccatactcttcac

SEQ ID NO: 976563 - DNA, 120 bp, Artificial Sequence
  ENSG00000241231_30 (sequence is synthesized)
tctatagaaaagatttttcatatattggattattgttaagtagtagtggtgttggtggattcccaaacatccaaataatggagttcaataaatactggttgaatgactaagtgaatggtg

SEQ ID NO: 976564 - DNA, 120 bp, Artificial Sequence
  ENSG00000241231_31 (sequence is synthesized)
tgatagaataccttcttaaataaaagaggcccaagacaatatgaaggagaaatagaagaagaaattgaaggagaatatgcaaaagctcatggtaacactctccaggtagagaaagttttt

SEQ ID NO: 976565 - DNA, 120 bp, Artificial Sequence
  ENSG00000241231_32 (sequence is synthesized)
gcctggttcttctatcagcagcacaaaattacagagaccacatactatgagccacactgtattaaaaaaatagatacacttcttgtataaacacaagatatccaaagaaattggaagaaa

SEQ ID NO: 976566 - DNA, 120 bp, Artificial Sequence
  ENSG00000241231_33 (sequence is synthesized)
aaaggacttaattgtaagaaaaacaacattctattctggaatactactgacaaatttaattgaatcctggaggaaataggatattttaaaataggttaaaatgttaaatagaacattaag

SEQ ID NO: 976567 - DNA, 120 bp, Artificial Sequence
  ENSG00000241231_34 (sequence is synthesized)
tagtggattatagttagcacataaacaagtaagagaaactgagtatggaagaataagtgaagctcttgtcagcacttacaaaaggatggacaatcgctggttagagaaaaacacaagctt

SEQ ID NO: 976568 - DNA, 120 bp, Artificial Sequence
  ENSG00000241231_35 (sequence is synthesized)
tgtgctcacacttcaactttttttttttttaacaaaaagacaaagttggagaaaacagttgtactagagacttgatcattcataatatgaatgaaacagagttgaagtaatgagtggcaa

SEQ ID NO: 976569 - DNA, 120 bp, Artificial Sequence
  ENSG00000241231_36 (sequence is synthesized)
tttgaaattaaggtctccttttactttctaaatttaaagaaaaattacataataatcttccttgaataaataaatgtaataaaaagtgaacttatgaaaaggatggttgcatataaaata

SEQ ID NO: 976570 - DNA, 120 bp, Artificial Sequence
  ENSG00000241231_37 (sequence is synthesized)
cttttaaaaaataaataaatacaataactttagatttctaaagaataacaaaaattacatgcattttcatctataaataaacacctttcttgccacttttctttttacattaaaactccc

SEQ ID NO: 976571 - DNA, 120 bp, Artificial Sequence
  ENSG00000241231_38 (sequence is synthesized)
ccgacaaaaaacttttcttccaatgcacaaaacttttcagaaacttaatatatctaggttccaatatacctagttttttaaaagatattttgcttaaactgaagtttgaaagcaactgga

SEQ ID NO: 976572 - DNA, 120 bp, Artificial Sequence
  ENSG00000241231_39 (sequence is synthesized)
tttttgctatgtggtatctgtggaaatgcaaatgtccaaatctgatttcaatgagctttgaccttctgagatttgtcagccacccagatgtcaaatctttctttttcctttttgaaaaag

SEQ ID NO: 976573 - DNA, 120 bp, Artificial Sequence
  ENSG00000241231_40 (sequence is synthesized)
aaatttattcaattcaattcgatgcaaattattctgtcatctttcaaggacaaaagactgaacgaattatggatcttaattttgacctatccaaattacttttaactacccaaactaatg

SEQ ID NO: 976574 - DNA, 120 bp, Artificial Sequence
  ENSG00000241231_41 (sequence is synthesized)
tcctagaaaacatggagaaccacagaatttctgtgcttggtgaactgttgaagataatcgaatcaattcccttttttttttcacagagaaagaagctagatggcttccctagatgtgaca

SEQ ID NO: 976575 - DNA, 120 bp, Artificial Sequence
  ENSG00000241231_42 (sequence is synthesized)
tagtcagaattgtaggcaaaatccagacacagctttctactaacaacctaaggcccaaattgttaacttactcatgctcttgtccagatcctagacaatacaaggtcccaactgaataaa

SEQ ID NO: 976576 - DNA, 120 bp, Artificial Sequence
  ENSG00000241231_43 (sequence is synthesized)
ttcaatggcactattttttgagaaagaaaatgccagaatattgatgtgaaataacagtgatttctataccttaaaacatcatcatacataaaaggggactgccagcctctctgtgttgac

SEQ ID NO: 976577 - DNA, 120 bp, Artificial Sequence
  ENSG00000241231_44 (sequence is synthesized)
acagtggtaagagcactggagtgcttcatcccaaacttaaagctggctgaatcatttaatttctctgcatctcagtctgcaaaatggcaataatataccttccacgtagctgagaagata

SEQ ID NO: 976578 - DNA, 120 bp, Artificial Sequence
  ENSG00000241231_45 (sequence is synthesized)
gaaccagataagtggtgtaaagggactctaagaagacaacactgcatgacacaggcccagccataatttatgcacagacctgctttggtaggtatgccctacttgcaccaacaataaagg

SEQ ID NO: 976579 - DNA, 120 bp, Artificial Sequence
  ENSG00000241231_46 (sequence is synthesized)
accttgagacacagattaagggaccatctagcacaaacccaagaaaacccagaaaaaaataaaaagcaaacccactatgaggcatagaataaaaggaagaaacataccctggcatatttg

SEQ ID NO: 976580 - DNA, 120 bp, Artificial Sequence
  ENSG00000241231_47 (sequence is synthesized)
atgctaagaagaaataaggtcattttgaaattacaggtacctgtgttacccttctccccaccccccatactcttttctaacacattttggggagctatggaaaatgaatagaagagacaa

SEQ ID NO: 976581 - DNA, 120 bp, Artificial Sequence
  ENSG00000241231_48 (sequence is synthesized)
tattagacttttgttttgtaaccagaagatgcattttgtggccttttctttacaaaatcataaaatgtcaaagttatttctgtaatattaggttagaatttttatgttttattacataat

SEQ ID NO: 976582 - DNA, 120 bp, Artificial Sequence
  ENSG00000241231_49 (sequence is synthesized)
ttttacttattgcacagtctctaggctccataggctgaatactgagtcacaaatcagcgtgataagacaaatcagcaaaatttacaatgtttaactccattactatggacacttattttg

SEQ ID NO: 976583 - DNA, 120 bp, Artificial Sequence
  ENSG00000241231_50 (sequence is synthesized)
gcattacattgaatggggcttttttaaattaaaaaataacttttaccagcactgggcaactttataacttcttttcatgttgcgaaattaatttataattaattaaatctgatgttaact

SEQ ID NO: 976584 - DNA, 120 bp, Artificial Sequence
  ENSG00000241231_51 (sequence is synthesized)
gcaaaaaaattcttgtaattatcattaggataccttaaagtacacagtggctcaaatctcttatttaattcaggacacaggactacttttctgatggtcatgtgtaattatatattttaa

SEQ ID NO: 976585 - DNA, 120 bp, Artificial Sequence
  ENSG00000241231_52 (sequence is synthesized)
aaattgaatctgtttacttaaacagtgaaaatgccaaaaacagctgcagtacattttgtaatatggcatctctgaataatttttaagtgtggatctctcaaaataaaatgtcataatatc

SEQ ID NO: 976586 - DNA, 120 bp, Artificial Sequence
  ENSG00000241231_53 (sequence is synthesized)
ggcagtacaacttttatgggggaagatggagggttgccaggttttaattttgccatgtgatgttgttgcataaaacccatcatccatttgcccgtgatttcataaatgagaagacatttg

SEQ ID NO: 976587 - DNA, 120 bp, Artificial Sequence
  ENSG00000220891_0 (sequence is synthesized)
acttcctcccaggccctctagggggatggtcaggcttctgcagagatggggaggatcctttcctgactgcttcagctgccataacaaaatatcacagactggatggattaaacaacaaaa

SEQ ID NO: 976588 - DNA, 120 bp, Artificial Sequence
  ENSG00000220891_1 (sequence is synthesized)
ctgggaagtccaagatcaaggtgtcagcaaggtgaagacactgacagtaagaaaaggcaaaccacaggtccaagacaaagtggtcaagtcaagaaggaactcaggctgtgtagtcctggt

SEQ ID NO: 976589 - DNA, 120 bp, Artificial Sequence
  ENSG00000220891_2 (sequence is synthesized)
gaactcaggctgtgtagtcctggtgcaaggctccttgcccccagcgtggggtcacactggctggctgtgctcccacgacacttagtgcatactgggctcctgacttaataacacgtgttt

SEQ ID NO: 976590 - DNA, 120 bp, Artificial Sequence
  ENSG00000220891_3 (sequence is synthesized)
gaaatggcccctgattcccaatctgctgcaggattctgcagatgcgcaacaggccacagtggaaggtcttggagagaattcagagtggcttgcctacgttcccatgaccgtttgtcttaa

SEQ ID NO: 976591 - DNA, 71 bp, Artificial Sequence
  ENSG00000220891_4 (sequence is synthesized)
cagagtggcttgcctacgttcccatgaccgtttgtcttaatgggagaatcaccattttggaaaattctttt

SEQ ID NO: 976592 - DNA, 74 bp, Artificial Sequence
  ENSG00000220891_5 (sequence is synthesized)
tcttttggggctagctgtgaatgagctcagagggaaaggcaggagccttcaggtagggagcagcatgattccac

SEQ ID NO: 976593 - DNA, 120 bp, Artificial Sequence
  ENSG00000220891_6 (sequence is synthesized)
aaaggcaggagccttcaggtagggagcagcatgattccaccccagattcaggcctcctgggtgtacagagggcaggaggatcctccccaggtatgtgagaggaagggaagatgaggtgtt

SEQ ID NO: 976594 - DNA, 120 bp, Artificial Sequence
  ENSG00000220891_7 (sequence is synthesized)
tgggtcagtgaacacactagaaatccaggtgctcactgatggattgtgcttggcatctctgttctgccaatccagcctcaaagcaactttggaagaggatttatgcgcttcacacgcttc

SEQ ID NO: 976595 - DNA, 120 bp, Artificial Sequence
  ENSG00000220891_8 (sequence is synthesized)
cagcttgggccagagcatctgcacactcccctgggtataggcctccagggcttggagcaacggaagagctaagaattgtcagtgctcaggaggcagattttcagggaggatcctcttgca

SEQ ID NO: 976596 - DNA, 120 bp, Artificial Sequence
  ENSG00000220891_9 (sequence is synthesized)
tctcaggacatggaaagggctaacagagccttaagtgtcctgtcccagtgctggggtctcagaaggcagctctggggcatctccaccatggtctgacttctgctgcttgaaaccattctc

SEQ ID NO: 976597 - DNA, 120 bp, Artificial Sequence
  ENSG00000220891_10 (sequence is synthesized)
cctcacggcacaggcaagagtcctcaaggaagagcacctgggcacctgggttgactcttcctctctccaggtggagagaaccagtagagtttacctggggtcatgctctgagttaatccc

SEQ ID NO: 976598 - DNA, 120 bp, Artificial Sequence
  ENSG00000220891_11 (sequence is synthesized)
tgacattgagggttctaaccatatctcttcgtacctacagtgcccaggaactggccccacactcctcatttattatgtccattctcaacccttagggggtcccagcttgattttcagtct

SEQ ID NO: 976599 - DNA, 120 bp, Artificial Sequence
  ENSG00000220891_12 (sequence is synthesized)
ctaggtctggcaacacggccttcctggccgtctttggcctctagcctgaagatgggcctgacagtcactgtttgttctgggacaaccatagcatttttacccacatgtgctccaagtcca

SEQ ID NO: 976600 - DNA, 120 bp, Artificial Sequence
  ENSG00000220891_13 (sequence is synthesized)
cggggaacagagaccaaatctgccatgagtgaccagtgtcacagggcttcacaccagtcaggcagtcagatggtggtgtttgctttcatttctgctcatcatcccaagggggtggacgct

SEQ ID NO: 976601 - DNA, 120 bp, Artificial Sequence
  ENSG00000220891_14 (sequence is synthesized)
tcaggaatgggaccctatgcaactctcattgctctttataatgatgtgggaaagagaaaccatctcccaggggacttggctttgcaaaaatgaaaataaaagctccctcctccctctgtg

SEQ ID NO: 976602 - DNA, 120 bp, Artificial Sequence
  ENSG00000220891_15 (sequence is synthesized)
cagtgaatggcctctgaatgcagacttggtctccctcttcagtggcaaggttggaggaagaacaacagcttcttattgcactgagacaactcaggggccacctcatttgaagatgtgcat

SEQ ID NO: 976603 - DNA, 120 bp, Artificial Sequence
  ENSG00000220891_16 (sequence is synthesized)
cagtgtgagcccaggtattcctgtactcaatgatcgaggtctctctccttaccttgtctccacctggatctgaccaaagtgactgagatgatccaggttctagttttctcttgctgtgta

SEQ ID NO: 976604 - DNA, 120 bp, Artificial Sequence
  ENSG00000220891_17 (sequence is synthesized)
acaaatttctgcaaacctagcaccttaaaataacacccatttatgatctcccagttttcctggatcaggagtctgggatcagcttagctgagtcatctgttcagggtcttcccaacctga

SEQ ID NO: 976605 - DNA, 120 bp, Artificial Sequence
  ENSG00000220891_18 (sequence is synthesized)
aatcagggcattggcttggctgtgttttcatctggaggctcaactgaggaagattctgtttccaaacttactggcagaactcacttccttgctgctatatgactgaagccaaggttttgg

SEQ ID NO: 976606 - DNA, 120 bp, Artificial Sequence
  ENSG00000220891_19 (sequence is synthesized)
ggggctatttgctgtcagtgcccgaagctcctagagttcctagaggtcacccatagctcttttgccatttaatgtaacctaatgaaaagagagatattccatcacctttgccatatttat

SEQ ID NO: 976607 - DNA, 120 bp, Artificial Sequence
  ENSG00000220891_20 (sequence is synthesized)
tggttagaagcaaatcacaggttcttcttgaattcaagtgaagagattgtgcaagggtatgactcatttggggtcaccatagggtacatcctcagtaattgtgtgcagtcaggactaggg

SEQ ID NO: 976608 - DNA, 120 bp, Artificial Sequence
  ENSG00000220891_21 (sequence is synthesized)
gaggagattctaattatacagagaagacttgtgccttctattcagaagttaagaagacatcctttactttttaagacactctgtcattttattcattgatttttagtggtgttctagaaa

SEQ ID NO: 976609 - DNA, 120 bp, Artificial Sequence
  ENSG00000220891_22 (sequence is synthesized)
gcagattttccaagcgtaaagcacaataatgaaatggcagagctgatgacagttcagatgctattagatgggtgtgcagatctaggtttagagccaagggatggagtagtgtctcttggt

SEQ ID NO: 976610 - DNA, 120 bp, Artificial Sequence
  ENSG00000220891_23 (sequence is synthesized)
ctccactgtggagaggccccttgggaaaacccaccacccccatttctcctcactccctgcctggacccatggtctctgcttggtctggcctatgctattaaaaatatacttcaatgatga

SEQ ID NO: 976611 - DNA, 120 bp, Artificial Sequence
  ENSG00000271826_0 (sequence is synthesized)
acttagttggaattcaccatgaactgcatctcgaggatcaagtttaggctccccagtccattgtgacatccagcaaagtggagccgggcgcccccagcatcccgtctgtctgacgctaaa

SEQ ID NO: 976612 - DNA, 120 bp, Artificial Sequence
  ENSG00000271826_1 (sequence is synthesized)
acgctaaatggcgaggctctccaacccacttagctccaagctcaaccttctgcaaaagttcaaccttctgcaccactggggatatcgtgcagctcagacatggtcttgctctgttgccca

SEQ ID NO: 976613 - DNA, 120 bp, Artificial Sequence
  ENSG00000271826_2 (sequence is synthesized)
tcaagtgatcctcccacctcagcctccagcatagctgagactacagacacatgccaccacacccaggtgtctgcatccgggctcttttttgtagttctggtctatgtacaagacaggaat

SEQ ID NO: 976614 - DNA, 120 bp, Artificial Sequence
  ENSG00000271826_3 (sequence is synthesized)
gaataatagagttggagaagaccctgagacgagcaactgaaacggtgaaggggacggaaagcaaggcgggatataagctatatataaaatgataactcttcatattaaaactggctaaag

SEQ ID NO: 976615 - DNA, 120 bp, Artificial Sequence
  ENSG00000271826_4 (sequence is synthesized)
tattgaagtttctccaactgaagggcatgtactgttgagcatgctcagaagccaaggttcaagccattcttcaactatagatgcttcaactcatctctctttcttcggaatattctctcc

SEQ ID NO: 976616 - DNA, 120 bp, Artificial Sequence
  ENSG00000271826_5 (sequence is synthesized)
cttatcaatttcaccaattataccaagtaaccccctgcttattcccctagaacagacagagctgatactagtctgtgccttatgtgatttagaaaaagactcttggaatgcagccccaga

SEQ ID NO: 976617 - DNA, 120 bp, Artificial Sequence
  ENSG00000271826_6 (sequence is synthesized)
ccatgatgtacagagcatgagttgggtattgccccattttattctctaattcaggtgcccttgtgcagtgaataacatggcagctgtgagactagtgatgctaaacaggtttaatttttg

SEQ ID NO: 976618 - DNA, 120 bp, Artificial Sequence
  ENSG00000271826_7 (sequence is synthesized)
gtgcaaattctaatgaattaataatagctgttttaaaaaaacacacagtgctaagaaagactctgaggctgttttcaggctcagtagataaattgtactgtaagctgggatgatttgcct

SEQ ID NO: 976619 - DNA, 120 bp, Artificial Sequence
  ENSG00000271826_8 (sequence is synthesized)
gcctggggtaggcagatgttgaggtagaatgtgggcccagacaagttttataatttatagaacacaactttaaaatgcccttgtaatacaaggcaacaatcctacttttccaggtctcta

SEQ ID NO: 976620 - DNA, 120 bp, Artificial Sequence
  ENSG00000271826_9 (sequence is synthesized)
acaaaaagcatctagctgagctagagtgttttcatgaggcatctgctacacaaaacaatgtcttgcttaataaataacacccgtttctacttggtgtcattttactgtttaatcaaaact

SEQ ID NO: 976621 - DNA, 120 bp, Artificial Sequence
  ENSG00000271826_10 (sequence is synthesized)
tattttcaccactcttaaccacaatctaaagaaggatgcttcaatctcttcctgatttagccttaaacttggtcatgtgtaccattcgactaggattgccagagtcagccaccctcccaa

SEQ ID NO: 976622 - DNA, 120 bp, Artificial Sequence
  ENSG00000271826_11 (sequence is synthesized)
caaaggatgctcagttaaatattgcacagaacacacttatactaaaaattgtttgttgtttatctgaaattcaaatttaatggggcataatgtattttacttggcaatcctacctgtgat

SEQ ID NO: 976623 - DNA, 120 bp, Artificial Sequence
  ENSG00000271826_12 (sequence is synthesized)
ggacatatatatttccccccagctttattaaggtataattgacaaataaaagtgtaaatatttatgatataaatggaaatataaacagatgctcctcgacttttgatggggttacatcct

SEQ ID NO: 976624 - DNA, 120 bp, Artificial Sequence
  ENSG00000271826_13 (sequence is synthesized)
gataaacctgtcataagttaaaaatattgtgagttgaaaattcatgtaatacacctaacttactgaatatcctagcttggcctagccaaccttaaatgtgcccagaacacttacatcagc

SEQ ID NO: 976625 - DNA, 90 bp, Artificial Sequence
  ENSG00000271826_14 (sequence is synthesized)
cctagccaaccttaaatgtgcccagaacacttacatcagcatatttgggctgatgtaacacaaaccctattttatcataaactgtttttg

SEQ ID NO: 976626 - DNA, 120 bp, Artificial Sequence
  ENSG00000271825_0 (sequence is synthesized)
tctattttatctgatagaaatatagcaactcctactcttttttggttttcatttgtgtggaatatctttttccatccctttattttaggcctatgtgtgtatttataggtgaagagtgtt

SEQ ID NO: 976627 - DNA, 82 bp, Artificial Sequence
  ENSG00000271825_1 (sequence is synthesized)
aatccttctgcctgttcgcagccagagtttaaaattggatatgacagttggactggtgggttagaattccagtttctcccca

SEQ ID NO: 976628 - DNA, 120 bp, Artificial Sequence
  ENSG00000271825_2 (sequence is synthesized)
gacagttggactggtgggttagaattccagtttctccccactgaggccagggtccataatctgagcatatctagttcatcttctccagatcagtttggtgactccctactcagtctccat

SEQ ID NO: 976629 - DNA, 120 bp, Artificial Sequence
  ENSG00000271820_0 (sequence is synthesized)
aagtatgctgtttcaatttgatctgctatttcgggtgatctagtccctgttagttcttgacagtccaggaggcgcctggtgcatcccacggactcatttaaatgttccctgagtgcttcg

SEQ ID NO: 976630 - DNA, 120 bp, Artificial Sequence
  ENSG00000271820_1 (sequence is synthesized)
tctgtgccgcacgttgctctgcgtggtggagataaatgaggagtagaagctgcgcctggcctgaaggcaccccaggtcactcttggggaaacacagtgcccatcgctgatgctcaccaag

SEQ ID NO: 976631 - DNA, 120 bp, Artificial Sequence
  ENSG00000271820_2 (sequence is synthesized)
gttccggtcctgcggacaagcccctgccatgcacctgatcgtggatctggcctctgtgaccggctctggaagttcccatgaatggactcttcctcgccttcttgccctgcctctgtgtct

SEQ ID NO: 976632 - DNA, 120 bp, Artificial Sequence
  ENSG00000271820_3 (sequence is synthesized)
cgtgtccttataagaacaccagtcactggattccaggctgaccctcatccagctcaacctcatctccactctcaactatctgcagagacctgtttccacacaagctcacatcacgaggct

SEQ ID NO: 976633 - DNA, 120 bp, Artificial Sequence
  ENSG00000271820_4 (sequence is synthesized)
ctggggggacgtggattttggaggaacacctctcagcccactacagagccttttactaccatcaatcaaatgaatttttcaaaggcacgtctgttatacatttttttttcagtgagcttt

SEQ ID NO: 976634 - DNA, 120 bp, Artificial Sequence
  ENSG00000271820_5 (sequence is synthesized)
ttctgagaactttttgggttcaaagcacccagatggtataaatgacgtggaaaatggccctcccaaaaagatgccatgagggagctgcacatggggctggggggagtcggagacagcacg

SEQ ID NO: 976635 - DNA, 120 bp, Artificial Sequence
  ENSG00000271820_6 (sequence is synthesized)
tgtgagcggacgtgtggccggcacccaaaccagacgccatgtgattacagatcctgcagggaattacaggaggcaactcaacgtaggagattggtgtcatactaacagaaaaccaagact

SEQ ID NO: 976636 - DNA, 120 bp, Artificial Sequence
  ENSG00000271820_7 (sequence is synthesized)
ccaagactgaagagacaggaacgactgtccgggtttcccagacaggaccgtcccaggaagcagacaacacaggcctgcgtgcggccctggccttgagtgtgctggacgcaggggaccgtc

SEQ ID NO: 976637 - DNA, 60 bp, Artificial Sequence
  ENSG00000271820_8 (sequence is synthesized)
aagcggacaacacagccctgcgtgcctgcgtgcggccctggccgtgagtgtgctggacgc

SEQ ID NO: 976638 - DNA, 120 bp, Artificial Sequence
  ENSG00000271820_9 (sequence is synthesized)
gtcccaggaagcggacaacacagccctgcgtgcggccctgccgtgagtctccacctttctgtctctctgggctgtggctgggcagcacggaaggggggaatcacctaccttttggtccag

SEQ ID NO: 976639 - DNA, 120 bp, Artificial Sequence
  ENSG00000271821_0 (sequence is synthesized)
tttttgaggtggagtcttgctctgtcaccaggcctagaaaaatgcctggcacagaagcacttactaaatatttgttaaatggatgaataaactatgtgaccagaattccttaatactggg

SEQ ID NO: 976640 - DNA, 120 bp, Artificial Sequence
  ENSG00000271821_1 (sequence is synthesized)
cttaatactgggtccgagactagaaagtgggagttactggtttggttttggcacttgtttagtcagcttgtgctgccataacaaaacaccacagatggattggttaacaacagacatttc

SEQ ID NO: 976641 - DNA, 120 bp, Artificial Sequence
  ENSG00000271821_2 (sequence is synthesized)
ggaaccagcagattcagttcctggtgagggccctcttcctgcctggcagacagctgccttcttgccatatcctcacgtggtgaagagagtgggagctccagtctcttctttttcttaaaa

SEQ ID NO: 976642 - DNA, 120 bp, Artificial Sequence
  ENSG00000271821_3 (sequence is synthesized)
ggacactaatcccatcatgggggccccaacctctcaacctcttctgaatctaatcacttcccaagatggccaccagtctcaaggagtttactgtcacagtgggagcaaagatgctacagc

SEQ ID NO: 976643 - DNA, 120 bp, Artificial Sequence
  ENSG00000263342_0 (sequence is synthesized)
gataacaatggccagttggttgagcgtccccagggcgccccgcagggagccaagcaccgcagagaacacagcaaggaccagggtcccagtcactcgctgctgagggggttccccatcctg

SEQ ID NO: 976644 - DNA, 120 bp, Artificial Sequence
  ENSG00000263342_1 (sequence is synthesized)
cgctaggggcccgggcccagctggagcctgaagatactgggctccacccaacatgttgggtgagggaaactgggccatattaggaattgcacaaagatctcaatgtaaacaggagctgaa

SEQ ID NO: 976645 - DNA, 120 bp, Artificial Sequence
  ENSG00000263342_2 (sequence is synthesized)
ctgcaacctgggcataaaggagaaactggatgtttgggtccataaggcagagaaatgtttgagaacttgtctcaaaattcttctgtgaccttgagacaggcttggccttaagagctcaga

SEQ ID NO: 976646 - DNA, 120 bp, Artificial Sequence
  ENSG00000263345_0 (sequence is synthesized)
gggcccccaggattcctgagaaccctccagctgtgtgcggggcagaggtgggggcctccacacctctgctcagggcagcctggatggctggaccagctcgtaccattgaaaaacttgatg

SEQ ID NO: 976647 - DNA, 120 bp, Artificial Sequence
  ENSG00000263345_1 (sequence is synthesized)
atgtcagtgaagtccatgttgttgtcacggatgatctctcgcttacgcagcccagtcccatgtcccgccatccctcaccattgtcgagggtgaccaggagaggcgccagcagatcgcaca

SEQ ID NO: 976648 - DNA, 120 bp, Artificial Sequence
  ENSG00000263345_2 (sequence is synthesized)
tgccctgcacatagcccacgtccaggtgctcccacacgtagctgaaaggcagggggagagtcactgtggctgtgccccattcttccctccctcgggatccctgggaagacgtcctccaga

SEQ ID NO: 976649 - DNA, 120 bp, Artificial Sequence
  ENSG00000263345_3 (sequence is synthesized)
tgccgcccagaagtcagcctttccacgaccctaaggcttgactggatgcccgaggccacggagtaattgcgagaggagggcagtcctgagtctggagagtcgaactccacggaatgctgc

SEQ ID NO: 976650 - DNA, 120 bp, Artificial Sequence
  ENSG00000263345_4 (sequence is synthesized)
tgctccaccacggcggtgcccggagtcccgggtcctgcttcctgctcagcctccaacactgtggccacggggcaccaagccagcttctgacccagccagccaggcggagagaaacaagcc

SEQ ID NO: 976651 - DNA, 120 bp, Artificial Sequence
  ENSG00000263345_5 (sequence is synthesized)
tctggccaaacatgaagacacgtcttcagccctgcttgaaggaacagccccaggtcttcctgtggctactgaagggaagtaggggagccagggggctgaacgctcaatggccagtttgaa

SEQ ID NO: 976652 - DNA, 120 bp, Artificial Sequence
  ENSG00000263345_6 (sequence is synthesized)
ctcagtctcattctagaaacgcctgaagtcatgagaccgggagaatggccttagtgttttggtgtggctgggtggagagaagcctagaggttttaggaaaaacaagttttgccttatttt

SEQ ID NO: 976653 - DNA, 120 bp, Artificial Sequence
  ENSG00000263345_7 (sequence is synthesized)
gtgggtctgtctgttgccctgtgctgcgcggtgcactctctccccctcggatctccttgtggagggtgggttgctcctgctgcccctcccatcacccatctctctgagctgcattatttt

SEQ ID NO: 976654 - DNA, 81 bp, Artificial Sequence
  ENSG00000263345_8 (sequence is synthesized)
ccctactgttcgccagaactttcatgggcacgagcattcacacacacacacactcctcctcaatttctaacgctgaaacca

SEQ ID NO: 976655 - DNA, 120 bp, Artificial Sequence
  ENSG00000271828_0 (sequence is synthesized)
ttctccctcctgcctcggccctggcaccagtgatctttttattgtttccatagttttgcttttttcagaatatcatatatttggaaagctacagtatagagtcttttcagattggcttcc

SEQ ID NO: 976656 - DNA, 120 bp, Artificial Sequence
  ENSG00000271828_1 (sequence is synthesized)
ttcacttaataatatgcatttaggatttcacatgtctccttgcggcttgttagctcaatttttttagtgctgaataatagtccagttctggaggtgccacactttgtttatcctttcacc

SEQ ID NO: 976657 - DNA, 120 bp, Artificial Sequence
  ENSG00000271828_2 (sequence is synthesized)
tcaaaggacatacaggttccttccaagttttagcaattatgatgaaagctgctataaacacttttgtgtggacataagttttcaacgcatttgggtaaatgccaaggaacaggattattt

SEQ ID NO: 976658 - DNA, 120 bp, Artificial Sequence
  ENSG00000271828_3 (sequence is synthesized)
aattatacggtaagagtatggttggtattataagaaacttccaagctatcttccaacgtggccataccactttgcattcctacaggcaatgaataagagttcctgttgcttcccatcctt

SEQ ID NO: 976659 - DNA, 120 bp, Artificial Sequence
  ENSG00000271828_4 (sequence is synthesized)
accagcatttggtggtgttagaatatgtttctagttgttttagtaacaatgtttcttccttcagcaacagctactctcactgctgaagagaaattattttgaggccacaaacctctgaat

SEQ ID NO: 976660 - DNA, 120 bp, Artificial Sequence
  ENSG00000271828_5 (sequence is synthesized)
ggcttgataagaaaggaaagtcaaggagaaatgagagtgagacttcctaaaaaatacagtgagtccactttctgtgtcaactgtttatgtgaaaagatatgtgaatatactatcagccat

SEQ ID NO: 976661 - DNA, 120 bp, Artificial Sequence
  ENSG00000271828_6 (sequence is synthesized)
tccataagcaggctgtggcatctctgagcaaattagtcatgttagaatgatatctgaaatgctataagggaacattagtaagttgttcttttttcctacttaagtgacttataaattagt

SEQ ID NO: 976662 - DNA, 120 bp, Artificial Sequence
  ENSG00000271828_7 (sequence is synthesized)
agtaatttatctgtactaatctgcctaatttaccttattcttctgtataagatgaaaatcttttccaaaaagcatgagtgcatgttcaaagcttcggcattcttcttccgtccatgcagt

SEQ ID NO: 976663 - DNA, 120 bp, Artificial Sequence
  ENSG00000271828_8 (sequence is synthesized)
cattccttctaagaaaaattttaaaataaaatttatgggcccccaaattttcttatgtgaatcactgattttcagtatgttttccctgtaaaaggtcacaaactctctctctctctcaca

SEQ ID NO: 976664 - DNA, 120 bp, Artificial Sequence
  ENSG00000271828_9 (sequence is synthesized)
cacactctctctctctctctctctctgtatgcaggagatttcagttagaattaccaaaagcatgcatactacagttcaagtctagaatacaaaaatataaacactgctttttttccacta

SEQ ID NO: 976665 - DNA, 120 bp, Artificial Sequence
  ENSG00000271828_10 (sequence is synthesized)
aaatataaacactgctttttttccactacattatgggatgagaatttaagttttctataacatgcctgtttttctgattaaaaaaaatttttttaaacaatgagcgtatttttcaattag

SEQ ID NO: 976666 - DNA, 120 bp, Artificial Sequence
  ENSG00000271828_11 (sequence is synthesized)
acaatgagcgtatttttcaattagaaaaaaaaactctacctcctttattgggggaaagaagctctgttttggtcttacttcaaaaccacaagttctagccaggtgcggtggctcatgcct

SEQ ID NO: 976667 - DNA, 120 bp, Artificial Sequence
  ENSG00000271828_12 (sequence is synthesized)
aggatcacttgagcccaggagtttgaaatcagcatgggcaacatggaaaaaccctgtctttacaaaaaaacaaactagccaggcgtggtggcgggcacctatagttccggctacttggga

SEQ ID NO: 976668 - DNA, 89 bp, Artificial Sequence
  ENSG00000271828_13 (sequence is synthesized)
acctatagttccgctgagcccacgagatcaaggctatactaagctgtgatcatgccactgccctccagcctgggagacagagtgagacc

SEQ ID NO: 976669 - DNA, 120 bp, Artificial Sequence
  ENSG00000225479_0 (sequence is synthesized)
tatctttgaagaccaaatacccaaaagatctgcttcaaccttccccagttaatcttttgccagaagattcacaatctgaatgtggctgcctgtccatcattggaagtaattggaaagaaa

SEQ ID NO: 976670 - DNA, 120 bp, Artificial Sequence
  ENSG00000225479_1 (sequence is synthesized)
ctacatgagaactggaacccttaaatcatgaatggtggcaagattccaaaattaattatgaagactattggaatgatgtagcatcctttaactcttattgtgatcgacagaaagtatcat

SEQ ID NO: 976671 - DNA, 120 bp, Artificial Sequence
  ENSG00000225479_2 (sequence is synthesized)
agatggacaactcactttccctttgctctgtgcttcctggtgattttaggtcacgtccactctgaaatctgagctgtcattaaagccatgtcttcgtgtctgtctgtctgaagcagcaaa

SEQ ID NO: 976672 - DNA, 120 bp, Artificial Sequence
  ENSG00000225479_3 (sequence is synthesized)
caaaagatctgcttcaaccttccccagttaatcttttgccagaagattcacaatctgaatgtggctcaatataaagaaatccttcagtcaagtttccataaagaccctctttcctgcttc

SEQ ID NO: 976673 - DNA, 120 bp, Artificial Sequence
  ENSG00000225479_4 (sequence is synthesized)
ctactaaaaagaagattaatgtggaaattaatctaatccaggattaagagtagaagacttacttaaactgggcaattttctgtcaatttgattgtaataaatattttgcatttaagagtt

SEQ ID NO: 976674 - DNA, 120 bp, Artificial Sequence
  ENSG00000230630_0 (sequence is synthesized)
tcccccttttcctggtcctaaattcattgccagttccccagtctgcagcaaatgtgccacgtcaagactggaaatcacagcccttgagtgtgtctcagtcagcgcagcagaattcagggg

SEQ ID NO: 976675 - DNA, 120 bp, Artificial Sequence
  ENSG00000230630_1 (sequence is synthesized)
ggaaagctgaatgcaacccctggtgcaggaagggaggcttttcctgaggaccgggagaggattttaagttttgcacactagggaccaagaagccctcggggacactgctgagaaaagact

SEQ ID NO: 976676 - DNA, 120 bp, Artificial Sequence
  ENSG00000230630_2 (sequence is synthesized)
gccgaagggaagaccagcggggatcatggaatctattccagaggaaactaaccaacagtgagcatcttcaactaaaactacccctggatgtaataagtgttgcatgcatcattcctttaa

SEQ ID NO: 976677 - DNA, 120 bp, Artificial Sequence
  ENSG00000230630_3 (sequence is synthesized)
ttgagcagagttaactggatcaaattatttatgggagagagaggaaaagttataaagaattatagtaatttttaatttccaccaatatactctttgtaagtgaatcactctataattact

SEQ ID NO: 976678 - DNA, 120 bp, Artificial Sequence
  ENSG00000230630_4 (sequence is synthesized)
ttctgttgcactgaatgcagcaacaataacacaatagtattttaaggcactggtttttggcatactctaaccttgtaattatttaaataacagccaagtttactcatgtttttgattctg

SEQ ID NO: 976679 - DNA, 120 bp, Artificial Sequence
  ENSG00000230630_5 (sequence is synthesized)
tcaagaaaaaaaaaaagttcctttactcgaaagtgatggccgaaacagaatcggaaatttgttttcttgaaattacataaatacacagaaaatggcacttattagcttttgttaaaacat

SEQ ID NO: 976680 - DNA, 120 bp, Artificial Sequence
  ENSG00000230630_6 (sequence is synthesized)
taccttacctaatcactgcataaaagtccagatttgtagaaaattgtaattttctcagtatctaaaactattttgctttccattaagtttctatttgctattttctcagaattttacaat

SEQ ID NO: 976681 - DNA, 120 bp, Artificial Sequence
  ENSG00000230630_7 (sequence is synthesized)
taaagataaatcacaaactgtttgtttttcttaaagttctttgagaaaatgtctaattatacaatccttggacaatactgtgtttttttggtgctgtgttttttaagaagtcctacttac

SEQ ID NO: 976682 - DNA, 120 bp, Artificial Sequence
  ENSG00000230630_8 (sequence is synthesized)
tggaattttgactatttggatatttttgtttttaaaaggggaggggaatttgcttaatacttctaaagatgtgaattgataattgatattaaaatagaattactctcaactcaccagaat

SEQ ID NO: 976683 - DNA, 120 bp, Artificial Sequence
  ENSG00000230630_9 (sequence is synthesized)
taaattttatatctgcatatttaacactattagctcatataaattataagaaaaattttcaaaggatctggttttaattttttggatatgaaatgaatttgccttttctgccttttctta

SEQ ID NO: 976684 - DNA, 120 bp, Artificial Sequence
  ENSG00000230630_10 (sequence is synthesized)
tattgcactaactatatccaaaacacattctgagcatcactgtgagtaacagccttccagtttgtacccttttgattcacagcatggccctatagttaattaagaggtggataacttaag

SEQ ID NO: 976685 - DNA, 120 bp, Artificial Sequence
  ENSG00000230630_11 (sequence is synthesized)
ctcacaactgcctttaatttgatttcacatccacagttataaactttgcatttaaaaggaaaatgagacatttaaataggttcctgttgtttcacatataattggtaaaaacatattccc

SEQ ID NO: 976686 - DNA, 120 bp, Artificial Sequence
  ENSG00000230630_12 (sequence is synthesized)
ttgtaggatcctattatcagagcatcaaataccaaagtcagcaacttgggttgccaaataaattaggctcattaattattttgaaaagggctgctgtttccatgtaaatgataattttct

SEQ ID NO: 976687 - DNA, 120 bp, Artificial Sequence
  ENSG00000230630_13 (sequence is synthesized)
ttttcatggacaaggttatggtacttatctactaaaagaaacatgcataaacatagtttttatctttaacttcagtattaaaatatgcagttttttgcaaagaggaaaaacatctggttc

SEQ ID NO: 976688 - DNA, 120 bp, Artificial Sequence
  ENSG00000230630_14 (sequence is synthesized)
aattacgctgaactctgactacatgtgggccagtaataatatgaattggacttaagaataaaccttgtgtttaatctctttttttccttaaaattttaatgtgagttttctgttacgcaa

SEQ ID NO: 976689 - DNA, 120 bp, Artificial Sequence
  ENSG00000230630_15 (sequence is synthesized)
attatccatgttagcacatttggaacaaatgtataaatgtactttctgaataaagtcaaaagtctaacttgtttttagttccataatgttttaatgtttaattatattgtgtatttttct

SEQ ID NO: 976690 - DNA, 120 bp, Artificial Sequence
  ENSG00000230630_16 (sequence is synthesized)
ccctttccccttactctccaaaatcaccaaatctggaaaacaggctgattgtatctgtctatgagcaaaggaaacctgaaggaaccaagggcctggctggacagagttgtcatgtgtctg

SEQ ID NO: 976691 - DNA, 120 bp, Artificial Sequence
  ENSG00000230630_17 (sequence is synthesized)
cctgtctacacttgctgtgcagaacatccgctcacctgtacagcaggcacagacaggcagtcacatgacaacccagcctgaatgacaaccagccattgaaagaaagcagccctcacacca

SEQ ID NO: 976692 - DNA, 120 bp, Artificial Sequence
  ENSG00000230630_18 (sequence is synthesized)
tagcatctacaccaagagctacaaccaaaatgaggggctcgggggcctggggttttaatctgttggtttaatacttaactcatgtattattttattttgattcaagtattaaaacccacc

SEQ ID NO: 976693 - DNA, 120 bp, Artificial Sequence
  ENSG00000230630_19 (sequence is synthesized)
aaaagtaaagtgagtggtgcctatgaaatataataaaacccatttctgaaaatgttcctgtgcattctatagttctcttttcctaattgttgtcagcaaatcactacccttgacctttat

SEQ ID NO: 976694 - DNA, 120 bp, Artificial Sequence
  ENSG00000230630_20 (sequence is synthesized)
tgtacacagctttgcagcaccctatattgatataaaaactcaatataacaaaacaatataacttcagtctgatgcttaacaaagaataaattattctaagaattcttgtccataaactaa

SEQ ID NO: 976695 - DNA, 120 bp, Artificial Sequence
  ENSG00000230630_21 (sequence is synthesized)
cagcgcagcagaattcaggggggaaagctgaatgcaacccctggtgcaggaagggaggcttttcctgaggaccgggagaggattttaagtacatagaaggaagcttctggagatcctgct

SEQ ID NO: 976696 - DNA, 120 bp, Artificial Sequence
  ENSG00000230630_22 (sequence is synthesized)
ccgtcgccccagtgttcagactacctgttcaggacaatgccgttgtacagtagtctgcacattggttttgcacactagggaccaagaagccctcggggacactgctgagaaaagactgcc

SEQ ID NO: 976697 - DNA, 120 bp, Artificial Sequence
  ENSG00000230630_23 (sequence is synthesized)
tttttgtttcaaagaaatgaatccctatgggtccctcacctattttctccctcaggatgacttttagtctggagatagaagggacataagggtgcctctggcataagtacaggagtagaa

SEQ ID NO: 976698 - DNA, 120 bp, Artificial Sequence
  ENSG00000230630_24 (sequence is synthesized)
atataagaattactttgtaaaaggataaccaaggagttcctgcacatgcttgatgtggctctagcgacttattttcgaggcaaagttttaacaaatgaaaacgaatagtacttatttttc

SEQ ID NO: 976699 - DNA, 120 bp, Artificial Sequence
  ENSG00000230630_25 (sequence is synthesized)
aattatatgggctaaattaaagatcaaaggtaaaagctcattttataaagctctgctgaatgaaggcaggattgtagtttatgcgctggtacacacgcccacatttatatacattatagc

SEQ ID NO: 976700 - DNA, 120 bp, Artificial Sequence
  ENSG00000230630_26 (sequence is synthesized)
gtcgccccagtgttcagactacctgttcaggacaatgccgttgtacagtagtctgcacattggttagactgggcaagggagagcaacgccatggaccgctggggacaaaatgggctgttt

SEQ ID NO: 976701 - DNA, 120 bp, Artificial Sequence
  ENSG00000230630_27 (sequence is synthesized)
ccgttgtacagtagtctgcacattggttttgcacactagggaccaagaagccctcggggacactgctgagaaaagactgccgaagggaagaccagcgggttgcatgcatcattcctttaa

SEQ ID NO: 976702 - DNA, 120 bp, Artificial Sequence
  ENSG00000230630_28 (sequence is synthesized)
agttataaagaattatagtaatttttaatttccaccaatatactctttgctgattgtatctgtctatgagcaaaggaaacctgaaggaaccaagggcctggctggacagagttgtcatgt

SEQ ID NO: 976703 - DNA, 120 bp, Artificial Sequence
  ENSG00000261856_0 (sequence is synthesized)
tgaatagcagggcttggtctaaaaatatctcctccactgacataccacatgggttgatattcctgctgtcagaggcacaccttgaaattaaggtgtcttcctacaaaaagtcttgttgtt

SEQ ID NO: 976704 - DNA, 120 bp, Artificial Sequence
  ENSG00000261856_1 (sequence is synthesized)
aagttcagacactgtctgagatgaggtatttataattcctgccccaaatttggctataagcttcaagaatactgggacctggcttgtttactgaagcatctctagagccacaacaatggg

SEQ ID NO: 976705 - DNA, 120 bp, Artificial Sequence
  ENSG00000261856_2 (sequence is synthesized)
acaatgggtgaaacaccatggacagttagcaaatatttgctaagcaaatgaaagactacacgacaagagcaaaagaagtgcaggaatgggcccatgctcatggaattcactggtcttacc

SEQ ID NO: 976706 - DNA, 120 bp, Artificial Sequence
  ENSG00000261856_3 (sequence is synthesized)
ttgaagactcaattacagcaccagctaagtagtaataccttggagggctggggcaagtttctccagaaggctgaatatgctctgaattagtatccaatatatggtgctatttctccccta

SEQ ID NO: 976707 - DNA, 120 bp, Artificial Sequence
  ENSG00000261856_4 (sequence is synthesized)
gccgggattcacagatccaggaatcaacggggtggaaatgggagtggcaccagtcaccatcacccctagcgacccactagcaaaatgtttttttcctgttcttgagactttatgctttgc

SEQ ID NO: 976708 - DNA, 120 bp, Artificial Sequence
  ENSG00000261856_5 (sequence is synthesized)
tggcctagaggtcttagttccagagggaagaatgctgccaccagaagacaaaacaatgatttcactgagctggaagttaagactgccaccccgccacttggggctcttcatgcctttgag

SEQ ID NO: 976709 - DNA, 120 bp, Artificial Sequence
  ENSG00000261856_6 (sequence is synthesized)
tcaacaggctaagagaggaagagaaggaaggaatagccaatgatcagtaactgtgcagagccaggatcaaaaactcaaatgcccacaggggccaggtaataaagcaagtaaatgaaggca

SEQ ID NO: 976710 - DNA, 120 bp, Artificial Sequence
  ENSG00000286445_0 (sequence is synthesized)
ggagggcgcttccggccggcggccctcgggatgcgcttcgctgttctctaggaggtaccaacctctggcggtgggtcttgcgtcccggcggaaagctccgaggagtcctgtagacttgtg

SEQ ID NO: 976711 - DNA, 120 bp, Artificial Sequence
  ENSG00000286445_1 (sequence is synthesized)
gctcgggtggagccggcggaaaaccccgagaagcttgagacagccgtggctgaggtggagccggcgtcgctgccctggagcgtgggcgagtttcctcttagccggagcttcagggattga

SEQ ID NO: 976712 - DNA, 120 bp, Artificial Sequence
  ENSG00000286445_2 (sequence is synthesized)
ctcaaagactcctccgcttttttagttgttttgggtgtgaatacagcccggactaaaccttagtcgcctagactaaaccttagcctcccaggctgccaaaacagcacagcttttacagat

SEQ ID NO: 976713 - DNA, 120 bp, Artificial Sequence
  ENSG00000286445_3 (sequence is synthesized)
gactcttacatcaccatccctactctgtgatactgtgtttttcaaagtttagtgcctgaaccatcagcatgaaatctgcctgagacggttgttgaaaattcacatcgctgggccttgcgg

SEQ ID NO: 976714 - DNA, 120 bp, Artificial Sequence
  ENSG00000286445_4 (sequence is synthesized)
gaagccaacagaagaggggtccatgtgtacagataggcctggagtgatccatgttccaacagcagtccctttaacctcacttgaatgtggaggctgcacaggtcacaagtctgaagacta

SEQ ID NO: 976715 - DNA, 120 bp, Artificial Sequence
  ENSG00000286445_5 (sequence is synthesized)
caagctacctttgcttaaaaggaaccacaccaccgctgatagctaactgctagattgttctccagcatatcagagctacattgaattgcttgagttgtgcttcaattaatgtagagatct

SEQ ID NO: 976716 - DNA, 120 bp, Artificial Sequence
  ENSG00000286445_6 (sequence is synthesized)
tcactgaatcgcacataaccattgaagtaacctgctgtttacagtctctatcatgctctgccaagagagttattttacagtgacaaaacttctcttctggtgccctgacacatcctagga

SEQ ID NO: 976717 - DNA, 120 bp, Artificial Sequence
  ENSG00000286445_7 (sequence is synthesized)
ctttgatgttggtaattctttcccctcagcaaatgttggttctaaatccacagaactacttgagaaactagatgcaaaattgtagtaggtttaaactatcaatactcttttttttttttt

SEQ ID NO: 976718 - DNA, 120 bp, Artificial Sequence
  ENSG00000249599_0 (sequence is synthesized)
cgggtacaggggtgcgcttcccaagccccgtccgctgctcagagcatccccaagatttccctcatgggtcctgtcctggttgtttaagaaggtttccagaaaacctcctggtttgaagaa

SEQ ID NO: 976719 - DNA, 120 bp, Artificial Sequence
  ENSG00000249599_1 (sequence is synthesized)
caaagattcgtggaattattgtaccttgagagctggaaagggctcgcagagatgatataatgtcgtggatttcaacttttcggggccatagacacttttcagaaattgataaaacgttga

SEQ ID NO: 976720 - DNA, 120 bp, Artificial Sequence
  ENSG00000249599_2 (sequence is synthesized)
cacaccttgtaaaaaatgaacacattaaaattaagcctgcagtttgaggtaatggagaagcactggagatttgtaagccacggagtcaaatggtggactgggattttcaggagatcattt

SEQ ID NO: 976721 - DNA, 120 bp, Artificial Sequence
  ENSG00000249599_3 (sequence is synthesized)
ggtgaagaactaatgactgcagcaggaaaaagaattggatgtgtcatgaattatggccctgcttatacttctacttcaaccgtaatcatttgtttaaacaaaaagttctgcatttgaatt

SEQ ID NO: 976722 - DNA, 120 bp, Artificial Sequence
  ENSG00000249599_4 (sequence is synthesized)
gtcacaattgtgtgtgtgttataaacatctcatatttcatccaggctcagccaacacttgcctttattaatgctcataatcaagaaataaaatctcatactaaccaaaaattatccttca

SEQ ID NO: 976723 - DNA, 120 bp, Artificial Sequence
  ENSG00000249599_5 (sequence is synthesized)
taagagaatataaacagaagtctggttcataaacttactaattaacacctctattctcatgtatcaactaacatttttgtttcgtcttaaaataaataaaactttatgacatgctaataa

SEQ ID NO: 976724 - DNA, 120 bp, Artificial Sequence
  ENSG00000242370_0 (sequence is synthesized)
acagaagtgacacaatctgactttcttttaaaaggaacactctgctattgtgctaaggatagactgcagaggcgaggctgaaacatgggggaccagttaggaggctgttcccataatcca

SEQ ID NO: 976725 - DNA, 120 bp, Artificial Sequence
  ENSG00000242370_1 (sequence is synthesized)
ctaccgtcaagaagtttgaaagtcaatgtgtcctcttttatgctttcttttgtctgtgaaaagctaatgtcaaatctttacctttgtgcagggatatattttttgatggttcagtgaatt

SEQ ID NO: 976726 - DNA, 120 bp, Artificial Sequence
  ENSG00000242370_2 (sequence is synthesized)
gttctctcccaaacagtaataattttgagtaactcttgttctatctgtacataaaaaacacagtgtgtgcttatagagctgtcagaatctgcgaggaaataaattttaattccatggcaa

SEQ ID NO: 976727 - DNA, 120 bp, Artificial Sequence
  ENSG00000259468_0 (sequence is synthesized)
gatgtacatggctgctgcaaatgtggtaccaagataaaagcagaggccaacagccccaccaaactctgggcccagtgcccgggaaatcataaagtatgagcccccagctaaaagacaaaa

SEQ ID NO: 976728 - DNA, 120 bp, Artificial Sequence
  ENSG00000259468_1 (sequence is synthesized)
gagaacttgcaacgttcaggtgatctctaggagccagtgcagtacttacacagcagcagcagataaggacaattgcaaaagcctgaagaactccagctgtgcccaccacccatgtaaggc

SEQ ID NO: 976729 - DNA, 120 bp, Artificial Sequence
  ENSG00000259468_2 (sequence is synthesized)
gtaaaaaaaggatcactccaaaaatattttgtagacatgggaggtagacacccatgaaggtacccatttggggggtctagaaagaaagacattgataaaaaatcacacagttatcctaaa

SEQ ID NO: 976730 - DNA, 120 bp, Artificial Sequence
  ENSG00000259469_0 (sequence is synthesized)
aaaataaacacctatataccctgcatttagatttaccaattgtttactttctacatttgttttatatttgtctgtaaatatacatatgtatgcatgtacatagtatgtacatgtatataa

SEQ ID NO: 976731 - DNA, 120 bp, Artificial Sequence
  ENSG00000259469_1 (sequence is synthesized)
aaacatttttccttaaccatgaagattatttgcagacaccctgagtattccttcctaaatacttcagcatacattttctaagaacaaaaacattttatttcttaaatacaattgtcatat

SEQ ID NO: 976732 - DNA, 120 bp, Artificial Sequence
  ENSG00000259469_2 (sequence is synthesized)
tgctctgtcacccaggctggagagcagttgctcaaatcactgcaactgaaccgagacttcaactgttgggttcaaatgatcctccccgctcagcctcttgaatagctgggactacagatc

SEQ ID NO: 976733 - DNA, 120 bp, Artificial Sequence
  ENSG00000259469_3 (sequence is synthesized)
gctgggactacagatctttgctgttcaccttcaagctgaggacttaccacttttcttcgattatgaaaaatgctcagccaatagctattcattaaacaaatatttatgaggtgtcaacaa

SEQ ID NO: 976734 - DNA, 120 bp, Artificial Sequence
  ENSG00000259460_0 (sequence is synthesized)
ccgccatcatcaagcagcgagcagcagcagaagcgttgaagggagaggaggcatcgggacaggcccctcttaggagaggatttatatctagttggaaaaaaaaagaaagaaaagaaaaag

SEQ ID NO: 976735 - DNA, 120 bp, Artificial Sequence
  ENSG00000259460_1 (sequence is synthesized)
actccagctgtcaatcaaagcccggaatgtcaaggtagtgaatgaatgatggttgatgatgatgaagaggaggaatctttcagacccgtttttttcttccagtaaaactccgcgaggggt

SEQ ID NO: 976736 - DNA, 120 bp, Artificial Sequence
  ENSG00000259460_2 (sequence is synthesized)
ttctgcttcttgaattttttcctcccccctccccccttttttagctttgcccccgcggtatctataatacgatcctctctctttaaagtattgttcaaagaaagcagtgagaaaaatcaa

SEQ ID NO: 976737 - DNA, 120 bp, Artificial Sequence
  ENSG00000259462_0 (sequence is synthesized)
atgagactgaagctcaaagaagttaagtaacttgccaaaagactcccagctaaaagtgtgagagcaaagactcaaaccaaggcagtcttctggtttcagagcctgaagtcttaaccaggt

SEQ ID NO: 976738 - DNA, 120 bp, Artificial Sequence
  ENSG00000259462_1 (sequence is synthesized)
gagaataaaacttccagcatgcttatgtgtgtgcttatctgtgaatgaccccagagctgactgcagatgttgagagaagaggtaactttgaccaaatgcagtcatgacctcaggtgtggg

SEQ ID NO: 976739 - DNA, 120 bp, Artificial Sequence
  ENSG00000259462_2 (sequence is synthesized)
caagtccttgttccctacctggacttggctaggcctgcaggtcatacaggaagaacagtccctctgaaggtgaccataatccacagggcagggtgtggaaagtgacagaggtgaatttat

SEQ ID NO: 976740 - DNA, 120 bp, Artificial Sequence
  ENSG00000259462_3 (sequence is synthesized)
taaatgacttggtcaagtccccacagctggtcactggcagaagcagcagaaacaaataggcagcattatctattctcccagtcaacaaacagcctttgagcccagctatgcctggcactg

SEQ ID NO: 976741 - DNA, 120 bp, Artificial Sequence
  ENSG00000259462_4 (sequence is synthesized)
tctctgcagtcaagccccagacttacaatactgattttaagtccaactatataattagctggactacattttaaatatgtgtactagggaaacaggagggaccctatagtcttttatatg

SEQ ID NO: 976742 - DNA, 120 bp, Artificial Sequence
  ENSG00000259462_5 (sequence is synthesized)
ctcaagtgttcagtgcttctgcaggaggcagagagctaaaagaagagagaagtttgatgggagaaaataatttcctggttgcaaaagataagaaaaggaattcactcaggaactcaagac

SEQ ID NO: 976743 - DNA, 120 bp, Artificial Sequence
  ENSG00000259462_6 (sequence is synthesized)
cacaaggtagacacacacagtctctgctcaagttttgccaagctctgtacagaagaaaccatgttctttgttttttcaagttccttttaagtgggataaaaaagtggattggggccaggc

SEQ ID NO: 976744 - DNA, 120 bp, Artificial Sequence
  ENSG00000259462_7 (sequence is synthesized)
atctcaaaaaaaaaaaaaaaagaaagagtggattggccccacctttcatcgtacacaaaagtaagttaaaaatacaattctgaaaagctttacttagaattttttcagaagaaaatatag

SEQ ID NO: 976745 - DNA, 120 bp, Artificial Sequence
  ENSG00000259462_8 (sequence is synthesized)
tttacttagaattttttcagaagaaaatataggagaatttttttttacctcagcccgtggatgaattttgtaaacttggaaaaataagattggaacaataagcacaggatataaaggaag

SEQ ID NO: 976746 - DNA, 120 bp, Artificial Sequence
  ENSG00000259462_9 (sequence is synthesized)
attggaacaataagcacaggatataaaggaagacaatacatttgaccacactggaattaaaaactttggtttactaaaagagtttgtttgtttgttttgaggtggagtcttgctctgtcg

SEQ ID NO: 976747 - DNA, 73 bp, Artificial Sequence
  ENSG00000259462_10 (sequence is synthesized)
ggcgtgagccaccgcccagctaaagatattgtttaaagcttgaaaagacaagccatagactggaagaaggtat

SEQ ID NO: 976748 - DNA, 120 bp, Artificial Sequence
  ENSG00000259462_11 (sequence is synthesized)
taaagcttgaaaagacaagccatagactggaagaaggtatctccaatccatgtatttacaaagaactagtttccagactatgtaagaagttctgtaatcaatgaggaaaaaacacaactc

SEQ ID NO: 976749 - DNA, 120 bp, Artificial Sequence
  ENSG00000259462_12 (sequence is synthesized)
cacagaaaaatgggcaaaagatgagaatgggcagttgacacaagtgaaaatccaaatggccaagaaacatcagtagatgcccaccctcatcagtaaccagggaaatgcaaatgaaaccac

SEQ ID NO: 976750 - DNA, 120 bp, Artificial Sequence
  ENSG00000259462_13 (sequence is synthesized)
aatcagatgccgtgccacacttttcaaatggaaaaaaatgatcaactttcactgtcccagtagcaggatcactgctagtgagggcgtaaactgattcagctactttggtgtgtgctttta

SEQ ID NO: 976751 - DNA, 90 bp, Artificial Sequence
  ENSG00000259462_14 (sequence is synthesized)
agggcgtaaactgattcagctactttggtgtgtgcttttatgtttcatatcttttaatggagagaaggcaatgcatagagtgcacaaatc

SEQ ID NO: 976752 - DNA, 120 bp, Artificial Sequence
  ENSG00000259462_15 (sequence is synthesized)
ccggccacagtacacaaatcttaagtgtataccgaggtaaccaccacccgcatggaggcatagaatctctccagaacccccactgggttccttcctgccccttcccactttatacctccc

SEQ ID NO: 976753 - DNA, 120 bp, Artificial Sequence
  ENSG00000259462_16 (sequence is synthesized)
tcctcaaggtaccgttaccttactgcttttcattacagattcatttaacctgttctagacttcatataatttttggtttctttcattcaacatacctgttagatccatccatgttgttgg

SEQ ID NO: 976754 - DNA, 120 bp, Artificial Sequence
  ENSG00000259462_17 (sequence is synthesized)
catgtaggagtagtttgttcctttgtattgctaagtagtattccattgtgtagatacaccataatttatttctgcattctcctattgattggaatttgaattctttccacttcggggact

SEQ ID NO: 976755 - DNA, 120 bp, Artificial Sequence
  ENSG00000259462_18 (sequence is synthesized)
attatgaataaagctgctagaaatattattgatgtgaagtatagcaactctggtgagcaatttggattctctagttaacttgaaaaagtgtatactctatgacccagcaattccattcct

SEQ ID NO: 976756 - DNA, 120 bp, Artificial Sequence
  ENSG00000259462_19 (sequence is synthesized)
aggaaaatatgttagagaaactttcatacgtgttaagaaacatgagtaaaaatgtctgtagctgttttgttaatagttacaaaaacaaaacaaaataaaataatcttaaatgcccaccaa

SEQ ID NO: 976757 - DNA, 120 bp, Artificial Sequence
  ENSG00000259462_20 (sequence is synthesized)
ctgcgcgcggaccgttagctactgcggccgggacgcggccccgcccaggcgagcggcgggtggctcttaccagcgggaacgccatggggccggtgtggccctgcggggctgacgggctga

SEQ ID NO: 976758 - DNA, 120 bp, Artificial Sequence
  ENSG00000259462_21 (sequence is synthesized)
ggggctgacgggctgaccggccagccggcgggcgagagacgcgcacgcacgtgggcactatttttgcagcgggccgcgcgcagccccgcaccccggcagcttatgaagctcctacgagcc

SEQ ID NO: 976759 - DNA, 120 bp, Artificial Sequence
  ENSG00000259462_22 (sequence is synthesized)
ttatgaagctcctacgagccgctcctcggagccgccccccggccggatgcggagcacctgtgtcggccccgcccgggccctcgcctccgccccctcgcgccccgcccctcctagcaggcc

SEQ ID NO: 976760 - DNA, 120 bp, Artificial Sequence
  ENSG00000259462_23 (sequence is synthesized)
gcccacccggaacccggcggggactgccgccgctgctagccacagctgccccctggggggccagagacctaagcctgagcgcgccatcacctaagtgacccttgccgagtcactgtctgc

SEQ ID NO: 976761 - DNA, 120 bp, Artificial Sequence
  ENSG00000259462_24 (sequence is synthesized)
cctgggcctcagtttccctcttaacgaaagagggcacgatttacaagcccctgcgagcggcggcgatcgcttcgtcagtagagcctcgtgtccgcgctccttctcttccagtgatctctc

SEQ ID NO: 976762 - DNA, 120 bp, Artificial Sequence
  ENSG00000259462_25 (sequence is synthesized)
cagggcgagagcctgccctggcatccttggtcggaactgtagcccctgggctccaggaggcgcactcactttagaccctctgctccgtgcgctgcagagggggccgcgagagtcaggaag

SEQ ID NO: 976763 - DNA, 120 bp, Artificial Sequence
  ENSG00000259462_26 (sequence is synthesized)
ttccagaaagttccaaagacatcactggtcctctttggaccggagttctccggagaaaccgcttccggcgctcctgacacactgagatagaaagtttcacagaaatagggcaagggatag

SEQ ID NO: 976764 - DNA, 120 bp, Artificial Sequence
  ENSG00000259462_27 (sequence is synthesized)
ggcgagggctccagggcaggcgtcctagggcacctggcgcaggggcggaccggaaaccccaggcaaacgcagagtcggagatggcattccaggcggaagatcaagcaaaggcagagaggg

SEQ ID NO: 976765 - DNA, 120 bp, Artificial Sequence
  ENSG00000259462_28 (sequence is synthesized)
gaaacccagaatagtgcccaagggagcgggtgtctggaggccctgtcatatttcaaaactgtcaaccataagaaaatgaaggcatctttcaagagacttggaacagaaacttctgctgcc

SEQ ID NO: 976766 - DNA, 120 bp, Artificial Sequence
  ENSG00000259462_29 (sequence is synthesized)
ccaccccgacttcgtaagtcctggagaactccacacgaagccgacactggccataatcataactatttcttccataaatagcatcctctgcatctcgggggtcctcaaagcgcaccaagg

SEQ ID NO: 976767 - DNA, 120 bp, Artificial Sequence
  ENSG00000259462_30 (sequence is synthesized)
cgaagggcacaaggcagtgcccattcttaagcttgatcttgcggatccggccgtacttgtagaaaaggtcttccacgtccttctcgcgcacgttggaaggctcaccacgcagatgcgctc

SEQ ID NO: 976768 - DNA, 120 bp, Artificial Sequence
  ENSG00000259462_31 (sequence is synthesized)
atccgcccagcccaacatcggcacctcccaacgccccctccccgcaatccccccgcagcgtccccgcgggctctgaggcgctcagccgcactgcactgtgggaacgagaagcaattgtgg

SEQ ID NO: 976769 - DNA, 120 bp, Artificial Sequence
  ENSG00000259462_32 (sequence is synthesized)
tacttttgatacaggagtgtaggaaatgaatgtagccagaaacagagagccaggaaacaagaggaagggtttggggtgggaaagtatggacctggctcagggaaaaggactagttggatg

SEQ ID NO: 976770 - DNA, 120 bp, Artificial Sequence
  ENSG00000259462_33 (sequence is synthesized)
gataagaaggaccagcggaaaagaggtagatgccaaaacaagagcagggtgcccttgccctgcctccagtatgtttccaagtcctgacctctcagaccaaactgattccagggactggaa

SEQ ID NO: 976771 - DNA, 120 bp, Artificial Sequence
  ENSG00000259462_34 (sequence is synthesized)
gggtcccagagactccatagatggcctcacaacaaaagccagacctgtcactgaacattgaacagccattcaaggaagtcattaaactctagtgggatgaataaagatttgagtaagtga

SEQ ID NO: 976772 - DNA, 120 bp, Artificial Sequence
  ENSG00000259463_0 (sequence is synthesized)
aaggaagtaaagtacacttggaagaaggccaagaaggcaacttaagatatcaagtgtgccaatccaatttgcttttcattccatggggcattttcagaatacccagcttcccagtatctt

SEQ ID NO: 976773 - DNA, 120 bp, Artificial Sequence
  ENSG00000259463_1 (sequence is synthesized)
aacaacaacaacaacaacaacaacaaccaccacaacaaaaacccaaaaaggctgttggatgaaagagagttgctcacatactccacagcaacacagagctttgatacccgcaatgtgagt

SEQ ID NO: 976774 - DNA, 120 bp, Artificial Sequence
  ENSG00000259463_2 (sequence is synthesized)
tacccgcaatgtgagtttctaactcttactctattggaagcatttctttctctctttgaagagggtatacgatttcaagagaaaaaggaaaatcctgaaataaaaacaaaacaaccaaca

SEQ ID NO: 976775 - DNA, 120 bp, Artificial Sequence
  ENSG00000258337_0 (sequence is synthesized)
ttaaagatgatttataaaggatgtgtacaggttagatttcgaggggactgttttctgtttaagaagtaactcattttgccgggtgcggtggctcatgcctgtactttgggaggctgaggt

SEQ ID NO: 976776 - DNA, 120 bp, Artificial Sequence
  ENSG00000258337_1 (sequence is synthesized)
gggctggtctccaactcctgggcttaagtgatcttccctctgtggtggcctcccaaaatgttgggataacaggcgtgaaccactgtgcctggctgggttttcatacatgcaagtttacac

SEQ ID NO: 976777 - DNA, 120 bp, Artificial Sequence
  ENSG00000258337_2 (sequence is synthesized)
tacatgatagactgacattcacttagacaactctagaagctaaatttgtaatctgttcagataggtgttggcagctagtaacaactatcccatagagttatcccataggcatcaatattt

SEQ ID NO: 976778 - DNA, 120 bp, Artificial Sequence
  ENSG00000258337_3 (sequence is synthesized)
taaccaaaatctggattggagaaacttagtcattatggggcctatctgttagcaaaatcgaatagtcagatatgctttgaccttaggttcctttagccaaaccttttttgtttttcccag

SEQ ID NO: 976779 - DNA, 120 bp, Artificial Sequence
  ENSG00000258334_0 (sequence is synthesized)
ataagacactattctaagcactggggtcccataagaataagacaaagcccctatcctcaagaggctatcatcaaactatagacagagatgggatctccctctgtcatccaggctggtctc

SEQ ID NO: 976780 - DNA, 120 bp, Artificial Sequence
  ENSG00000258334_1 (sequence is synthesized)
tcctcctgcttcagcctcctgagtagctgtgattacaggtacaagccatggcacctggcgagatgacattttgctggaggaaagggagatcttctaagagcaaagagctttccaggagct

SEQ ID NO: 976781 - DNA, 120 bp, Artificial Sequence
  ENSG00000258334_2 (sequence is synthesized)
tctaagagcaaagagctttccaggagctgggaccaggactatcacagattgccctatgtcgtccatgctggtctggaactcctgggctcaagagatcctctcaccttggcctcccaaagt

SEQ ID NO: 976782 - DNA, 90 bp, Artificial Sequence
  ENSG00000258334_3 (sequence is synthesized)
gcctcccaaagtgctgagattacagagctagagtctcatgatgtcgtccaggctggtatcgaactcggcttcaagcagtcctctcattga

SEQ ID NO: 976783 - DNA, 120 bp, Artificial Sequence
  ENSG00000258334_4 (sequence is synthesized)
gctctttctttgaaaggaggcaaaagaatggacgggcacggagatcctagaggcgaagcaagttgtcagcgcccctgcccaggccccgccctgcccggcccagtcccgaccccgccctgc

SEQ ID NO: 976784 - DNA, 120 bp, Artificial Sequence
  ENSG00000258334_5 (sequence is synthesized)
cccgccccagcagctccaccctcaccggctctcctcgccctccagcagcttgcggtaggtggcgatctcgatgtccagggccatcttgacgttgaggagctcctggtactccctcaggtg

SEQ ID NO: 976785 - DNA, 120 bp, Artificial Sequence
  ENSG00000258334_6 (sequence is synthesized)
ccgcgccatctcctcttttagctgtcgcagctcctcctcgagccgcgcagcgcccgcctggtagccccccgcctccagggcgaactgctcctccagctctctcaactgcctgagcagcgc

SEQ ID NO: 976786 - DNA, 120 bp, Artificial Sequence
  ENSG00000258334_7 (sequence is synthesized)
ctcgttctggggtaggagagtggaaggggccagttgcagaacatttcatcgtccgctccccgggcccgagcgcgcagcttcgtactcaccgtgccgcgcagcccgtccacctcgcacgtt

SEQ ID NO: 976787 - DNA, 120 bp, Artificial Sequence
  ENSG00000258334_8 (sequence is synthesized)
agactctggatctggcgtcgggactcgttcatctcctgcttggcctggcgcagggcctcgtggttccggttggcagcgtcggacaggtccgcgtactgagaagtgggggtaacccaggct

SEQ ID NO: 976788 - DNA, 120 bp, Artificial Sequence
  ENSG00000258334_9 (sequence is synthesized)
ttagtcggctgggacgcgcgacaccaccccagcgtcccgcctcgcaggccctcccggctcttgcaccttggacttgtaccactcctccgcctcctgcaggttcttcgcggcgatgctctc

SEQ ID NO: 976789 - DNA, 120 bp, Artificial Sequence
  ENSG00000258334_10 (sequence is synthesized)
gtactgcgcgcggatgtccctcagcgctgccgtcagctcgggcttcaccgtggcttccacctccacctgctgcacctgctggctctccacactcacctgcaggtctcgcagctcctacgg

SEQ ID NO: 976790 - DNA, 120 bp, Artificial Sequence
  ENSG00000258334_11 (sequence is synthesized)
ccgggagcaggcagaggatggacagcggcgcaaattccacgcgggccacgcagttcgtgcacagaaaagagaagaaacgcttgaacgaacagaagtgggcgccagggagggcagggcgta

SEQ ID NO: 976791 - DNA, 120 bp, Artificial Sequence
  ENSG00000258334_12 (sequence is synthesized)
cagccctgcgcccccgcgggcgcgagaccagaggccaggtttcggagctccagcgagaccaccccacaacctcagaaaccgcccctgataccgggcccacttacctcctcgtgcagcttc

SEQ ID NO: 976792 - DNA, 120 bp, Artificial Sequence
  ENSG00000258334_13 (sequence is synthesized)
ttgaggaactcaatctcatccatcagagactcaatcttgcgctctagttccaggcgggacagagtggcatcgtccacgtccttcgaggggtggcagtggaggttcaagataagttagggg

SEQ ID NO: 976793 - DNA, 120 bp, Artificial Sequence
  ENSG00000258334_14 (sequence is synthesized)
ctgcgcagaccaaggaaggaccaggccttccctgtctgcctcaggaggcatctgggttacccccttctccccgcgcccaccgatgccacctctggatactgagatcgggggtagcggtgg

SEQ ID NO: 976794 - DNA, 120 bp, Artificial Sequence
  ENSG00000258334_15 (sequence is synthesized)
ggaggctgaactcggagaggggctcggactcaccttgcggaagagcacgaggttgtgctccgcgtcctcccgcttgcgcgtctcctcctccaacctgacgggaagagcgtgcagaggctg

SEQ ID NO: 976795 - DNA, 120 bp, Artificial Sequence
  ENSG00000258334_16 (sequence is synthesized)
aactgcggggtcgccgcccagctcgcaccccagaccgcacgccccccaggatccggttagaggctgttctgctgcccaggactctaaatggagggctgaggctgtctaatggaattgccc

SEQ ID NO: 976796 - DNA, 120 bp, Artificial Sequence
  ENSG00000258334_17 (sequence is synthesized)
caaacactcagagcaaaggggtagcggggggcacttggagcccgtgggcagggatgctgcccgcacacacctgggttggtaaggggagccacacccttgggctgctgatggagaggggaa

SEQ ID NO: 976797 - DNA, 120 bp, Artificial Sequence
  ENSG00000258334_18 (sequence is synthesized)
gcgaggggaggcaagagcagccgcctcgacggccgcttcgacctcgcctcgacggcagcggcccagccctgccccctgacctctgcttgagcgccgccaggtcctccgccagcccgtcgc

SEQ ID NO: 976798 - DNA, 120 bp, Artificial Sequence
  ENSG00000258334_19 (sequence is synthesized)
gctccacctgcacccggtcacgctcgcggcccaacagctccagctctcgccgcagctcgcgcagctcctgctggcacagctggtcggcgcgcgccggctcctggccccgggcttggctca

SEQ ID NO: 976799 - DNA, 120 bp, Artificial Sequence
  ENSG00000258334_20 (sequence is synthesized)
gctccccgcgcagggccgcgttctgctgctccagaaagcgtaccttctcgatgaagttggcgaagcggtcgttgagctcctgcagctcctgcttctcgttgctgcgcgtggccaggaact

SEQ ID NO: 976800 - DNA, 120 bp, Artificial Sequence
  ENSG00000258334_21 (sequence is synthesized)
cctggttgagggcctcggccatggagaagtcgaggcgctccgagggcaggcgcaggagggcgcccgctcccgctcgggggctacggaagctgcccaggcgcaccgaggagctcggggacg

SEQ ID NO: 976801 - DNA, 120 bp, Artificial Sequence
  ENSG00000258334_22 (sequence is synthesized)
cggagcccagcaggcggctgctggagaagcgggagctggacgagtaggagaaggccccgggggatagtgagggcggtggaccgaagacggcccagcagaggttgtctgctgatgtttcag

SEQ ID NO: 976802 - DNA, 120 bp, Artificial Sequence
  ENSG00000258334_23 (sequence is synthesized)
ccttaaagacacagcccccaaacctagacctaccccgcaacaagccccaatgagcttccagaatgcaagcacaacctgcccaggagtggacagaggcagctcggatggtctgcaggagcc

SEQ ID NO: 976803 - DNA, 120 bp, Artificial Sequence
  ENSG00000258334_24 (sequence is synthesized)
gggttgctgaggtctgctgggtttgccaggaaccatagggctggggctgctgctgctgctggggactccagcgctgtcctgtgagacaggtctgcctcagatgggacctgaggacaagag

SEQ ID NO: 976804 - DNA, 120 bp, Artificial Sequence
  ENSG00000258334_25 (sequence is synthesized)
agtgcatctggggaagcaggtttcaggttcctgcctggatatctggctgggggtaaggagggcggctccctggctggccagctcctcagtattgcagggcagcagccccctccccccttt

SEQ ID NO: 976805 - DNA, 120 bp, Artificial Sequence
  ENSG00000258334_26 (sequence is synthesized)
gtgcgtcctgtgagatgggccagggccaacgccctgctcacgtccctaccgccttcgtctcctttccaggcccctccttccttccgggccattagtctctccctgcacagctgccagttc

SEQ ID NO: 976806 - DNA, 120 bp, Artificial Sequence
  ENSG00000258334_27 (sequence is synthesized)
cttctccttgatgggtctggtttggttgccaggggagtgggaagcgggaggaagggagagatgggacaggacgaataaatgacagcttggcctcccctaactcctgggaattgggagggg

SEQ ID NO: 976807 - DNA, 120 bp, Artificial Sequence
  ENSG00000258334_28 (sequence is synthesized)
tagggtcccacccgggatagggccgggaggcttggtgggtgtgaggaggggctagggaagccttggtgcttcctgccgcagtcctgggcactgagccccagctgctgttggcctggagcc

SEQ ID NO: 976808 - DNA, 120 bp, Artificial Sequence
  ENSG00000258334_29 (sequence is synthesized)
ccatctatcccggatttggccccaccctccaggagcagggagccagctctgcatcaggagaggcgggcaaggcctggggaggaccagctcaggccctgtctacagggcactagtggggga

SEQ ID NO: 976809 - DNA, 120 bp, Artificial Sequence
  ENSG00000258334_30 (sequence is synthesized)
cccaagcctctgagagtagaggctgctggggctgcagctgggcctggggagttccagatggagttcccgtcctcaccctgcttaagggctccgctggccacctacatgcctcggaggaga

SEQ ID NO: 976810 - DNA, 120 bp, Artificial Sequence
  ENSG00000258334_31 (sequence is synthesized)
agggacagagggctgccacagcagggctctggagctgtggatcaggcctgggtggggaactgccaggcagaagaggctcctcccctaaagcagaaggagcaggccagcaactccaggcgg

SEQ ID NO: 976811 - DNA, 120 bp, Artificial Sequence
  ENSG00000258334_32 (sequence is synthesized)
agcaaaggtaggcaaagagtctgggttaagagccgggctctggcatccagctgccacacttcccatctgatccaccactctgttgtagaatttaggctcgtcactacgtcccttcatgtc

SEQ ID NO: 976812 - DNA, 120 bp, Artificial Sequence
  ENSG00000258334_33 (sequence is synthesized)
cctcaagaaaagggagataactaactgtagcttctacctcatagtgttgttgggaggactaaaggaataaataaatacatgtgaagtgcttaggacacacatcttaaagcctgaaaatgg

SEQ ID NO: 976813 - DNA, 120 bp, Artificial Sequence
  ENSG00000258332_0 (sequence is synthesized)
agaggaggggttgctgagaaaggggagagaatatggagagaatggagaataaggagagggaacattcttcacacttacattgaaaatcagcaatcccactaatgggtatctgcctagagg

SEQ ID NO: 976814 - DNA, 120 bp, Artificial Sequence
  ENSG00000258332_1 (sequence is synthesized)
cctagaggaaaagaagtcattatatgaagaagacacatgcacacaaatgtttacagcagcacaattagcaactgtcaaaatatgaaaccaacctgagtgcccatcaaccaatgagtggat

SEQ ID NO: 976815 - DNA, 120 bp, Artificial Sequence
  ENSG00000258332_2 (sequence is synthesized)
aaggaatgaaataatggcattcacagaaacctggatggagttgcagaccattattctaagtaagttgctgaatgataagcaataatggaaggaaactatgaaaatcacactagagtgtca

SEQ ID NO: 976816 - DNA, 120 bp, Artificial Sequence
  ENSG00000258332_3 (sequence is synthesized)
aataatggaaggaaactatgaaaatcacactagagtgtcaatgaaaatcatctacagttgatggtatctaaaagcgatatgacacttctgaaatggccttgtgacatcatctctgaatag

SEQ ID NO: 976817 - DNA, 120 bp, Artificial Sequence
  ENSG00000258332_4 (sequence is synthesized)
agaagttgaatgaaataagtttgcaagcacattctgtaagaacttctccagagacatgggctttaggtatgtctgcccaggagtgccagttaccagtaagagtttcagttcatgtttatt

SEQ ID NO: 976818 - DNA, 120 bp, Artificial Sequence
  ENSG00000258332_5 (sequence is synthesized)
ctgcaaaactgggtgaagaaaagttcatttatcagaaatactttctccatagaaggtctaaactttcgaccagactgaagtctattcatgtaatcaactgtctttaatattcaatgttct

SEQ ID NO: 976819 - DNA, 120 bp, Artificial Sequence
  ENSG00000258332_6 (sequence is synthesized)
tactacaacagctgggcaggattgtctttccctccctgaacatttcttccctctttgtcagaaaacaaatgaatgtcctcagtattatcagagtaagtcctttatctacccaagggtgcc

SEQ ID NO: 976820 - DNA, 120 bp, Artificial Sequence
  ENSG00000258332_7 (sequence is synthesized)
aggatattttatcaagtaaacaaattaaaatatttcactttcatttgccaactgaatgattcccgctcctttgtccaccaatccccacctcacttattaatgttcactgagcaataaggc

SEQ ID NO: 976821 - DNA, 120 bp, Artificial Sequence
  ENSG00000258332_8 (sequence is synthesized)
tcatcttaatccaaaggttcccaaatgttactgtacttagaactacctggggaatttataaaaccccgatgtctatgctgcactgcataacaactaaatcagaatatttggaggtgaaaa

SEQ ID NO: 976822 - DNA, 120 bp, Artificial Sequence
  ENSG00000258332_9 (sequence is synthesized)
acaggcatcaatcatttagagcaacattacaaacaaataaaaatgttcaaaatttttttctattaaacacttatgaattctgaataaaatgaaataaatgctgttcaaaaggttttgctg

SEQ ID NO: 976823 - DNA, 120 bp, Artificial Sequence
  ENSG00000258332_10 (sequence is synthesized)
agcttacaacaaattaaggcaaatcattggttttgaggtgatccacaaaaccaataatcatataaaaatgctcaaactctttagtaattaggaaaatgcaaattaaagcaataattacct

SEQ ID NO: 976824 - DNA, 120 bp, Artificial Sequence
  ENSG00000258332_11 (sequence is synthesized)
gcaattttacacccgttacattggcaaaaatttttaaaaataacaataactaatggcaagatatggggcaaagggaactcttattcactgctgacagattttaaataggcacagcccctt

SEQ ID NO: 976825 - DNA, 120 bp, Artificial Sequence
  ENSG00000258332_12 (sequence is synthesized)
tggagagcaattttatactctctagtgaagtggaagatgcacatatattataactcagcaattacacttcccctgtggccgtatgtgtccagggagaggagcacaagaatgttcattata

SEQ ID NO: 976826 - DNA, 120 bp, Artificial Sequence
  ENSG00000258332_13 (sequence is synthesized)
gcgttgtttgtaatattgaaaaattgaaggctgcttgaatttgcattgaagatgttgtattattcactcatagagcaaattataggcactaaaatgaaggaacaagagctgcttatatta

SEQ ID NO: 976827 - DNA, 120 bp, Artificial Sequence
  ENSG00000258332_14 (sequence is synthesized)
atgtggataattattgaaaatattgtaaaaataaatttcaaaatgatcttaaaatatattatctttaatacaatgttaatacatgcaacgtaaattacatgctgctgggaggtaactaca

SEQ ID NO: 976828 - DNA, 120 bp, Artificial Sequence
  ENSG00000258332_15 (sequence is synthesized)
tacaagataacgtgttaaaatgtgcataagaatttaagtgccaagttcaggttaaaggttacctctgaatagagacaatggagatgagatatggccagaataaattggaggctttgattg

SEQ ID NO: 976829 - DNA, 120 bp, Artificial Sequence
  ENSG00000258332_16 (sequence is synthesized)
acagtgccaactaggtgacaatactctgcagggctggggcaaagttctccagagggctgtgtatgctctgaatcagcctccaatacatgatactgtttctcccatagccaggatttacag

SEQ ID NO: 976830 - DNA, 120 bp, Artificial Sequence
  ENSG00000258332_17 (sequence is synthesized)
gatactgtttctcccatagccaggatttacaggtccagtaatcgaggggtggaagtggaagcggcaccactcactatcacccctagtgatctactagcaaaatttttgcttcctgttccc

SEQ ID NO: 976831 - DNA, 120 bp, Artificial Sequence
  ENSG00000258332_18 (sequence is synthesized)
tctgctggcttagaggtcttagttccagaaggaggagtgctgccaccaggagacacaacaacaatgccataaaactagaagttaagattgccatctggacactttgggctcctcctacct

SEQ ID NO: 976832 - DNA, 120 bp, Artificial Sequence
  ENSG00000258331_0 (sequence is synthesized)
cttggaatgttctacaaggtttatatcaactgagggttgaaaaatcctacttatccactctccttactttagagatgaggaatttgaatcttagagagtttatgacttatccaattggtg

SEQ ID NO: 976833 - DNA, 120 bp, Artificial Sequence
  ENSG00000258331_1 (sequence is synthesized)
gtattaccgaaaaccaaaagccagtttgcttcctagttgaatgttctttccatcatgccatgtggagttattttgagtcaaccagaaaatctgcaaggacatcaaaataatgttctttct

SEQ ID NO: 976834 - DNA, 120 bp, Artificial Sequence
  ENSG00000258331_2 (sequence is synthesized)
ccctctgacctcagtaataaccggttaaagatttagaatgctttagagtaaatcctcaaagcagctgcaggtcctcaatgttccagaatagatattttaagttctccaaataaaaaatcc

SEQ ID NO: 976835 - DNA, 120 bp, Artificial Sequence
  ENSG00000258331_3 (sequence is synthesized)
tagaactccaggatggatgtcaaaaaactctgtgatcctagttctaactcaaatttacctttcatatggtatgaggttggcaacaaatgattcatggaccaccactcatctatagaccag

SEQ ID NO: 976836 - DNA, 120 bp, Artificial Sequence
  ENSG00000258331_4 (sequence is synthesized)
acattagtaagatgtgcttgcttctccttcgcctttcaccatgactgtaagtttccagaggcctcccagtcatggttcctgttaagcttgcagaacgtgcacacaacctggagcaaagag

SEQ ID NO: 976837 - DNA, 120 bp, Artificial Sequence
  ENSG00000258331_5 (sequence is synthesized)
atgtcaacgtagacttgaaagcctcaacaaacatctatacattcaaaattcagaggataattgcagacttacatgttaaatgatgccacaggcttgtggtgaatgtacaaatctaattcc

SEQ ID NO: 976838 - DNA, 120 bp, Artificial Sequence
  ENSG00000258338_0 (sequence is synthesized)
aattcttctcttaataaatacttactgaaaaccaagcatgcgttaggcacactagtacattaaaaagtggtgaatgagaaagtaaaggcatttattttaacactagaagagttcaagaat

SEQ ID NO: 976839 - DNA, 120 bp, Artificial Sequence
  ENSG00000258338_1 (sequence is synthesized)
aatggcaggaaaatatatgatatctctggaggaaaccatccattgaagctcacataaaaaaagacgagaaggacagagttagctggttcacatcactttaatcatagaaccatccttagg

SEQ ID NO: 976840 - DNA, 120 bp, Artificial Sequence
  ENSG00000258338_2 (sequence is synthesized)
tgatttttgggaaatattatctcgcagtgctagctctttgtggaatcacaaatgaaaaacatgaaggggagaaatttctttccttttggggaagaaagtgcagctaaggcagagaataag

SEQ ID NO: 976841 - DNA, 120 bp, Artificial Sequence
  ENSG00000258338_3 (sequence is synthesized)
aacagacatgacgtgagacaagaaatgagactgaaagggaaagaataatttagaaagtatatacagtgtctcctgtgggtactccagacatcaaaaagaagaatataatatatttcaggg

SEQ ID NO: 976842 - DNA, 120 bp, Artificial Sequence
  ENSG00000258338_4 (sequence is synthesized)
cttgatattactgaatagtcagaacagccacaaactgctgtcagcaatttagcagagacgctatatcaaggacaaaatccacacccacaaccttatactcaaccaaattgcatgcaattg

SEQ ID NO: 976843 - DNA, 120 bp, Artificial Sequence
  ENSG00000258338_5 (sequence is synthesized)
cctatgacaagtctttgttggaatcctcttatcatggcaaacatcctcagtactctaaatagtgtcaaaaaggaaaaaaaaaaagaaaaaactgctgagcctagagcacaaattttctgt

SEQ ID NO: 976844 - DNA, 73 bp, Artificial Sequence
  ENSG00000237945_0 (sequence is synthesized)
tattctcattaccttcttgagttgtggctcagacactacaacagagctctgtcacctctttctaaaagctggg

SEQ ID NO: 976845 - DNA, 120 bp, Artificial Sequence
  ENSG00000237945_1 (sequence is synthesized)
cactacaacagagctctgtcacctctttctaaaagctgggaaatggttattgtcaacgccagccccattttggaggcacctggttgcaggggaccacagctagctgggtgcggtggctca

SEQ ID NO: 976846 - DNA, 120 bp, Artificial Sequence
  ENSG00000237945_2 (sequence is synthesized)
ctgaggccaggagtttgagaccagcctgaacaacataatagactgggagctccatgaggtccgagacaacctgaagacgcccagctcagcagagactggctacggcaatcactcagtaac

SEQ ID NO: 976847 - DNA, 120 bp, Artificial Sequence
  ENSG00000237945_3 (sequence is synthesized)
gcagagactggctacggcaatcactcagtaactatttgttgaattggacataatagaagagctgaagaattttaaacaagtcaccatcagtgcagtggattcctcaaagcaaacctggaa

SEQ ID NO: 976848 - DNA, 120 bp, Artificial Sequence
  ENSG00000237945_4 (sequence is synthesized)
atctcggcatgagttggatttaaggcagtacattttcagctcctgaaaatttgaacagtttctcaagagaacaacttgaaacagaaaggcaaggatgtagatgtggttgtagaagatgat

SEQ ID NO: 976849 - DNA, 120 bp, Artificial Sequence
  ENSG00000237945_5 (sequence is synthesized)
gtctgcggccaccaaactgtccactgtgaagacaaaccatgcatgtttagtaggcagtggctcctcttccctgtggggagtcccactgcttccctggcctgggtgttctctgccggtaga

SEQ ID NO: 976850 - DNA, 120 bp, Artificial Sequence
  ENSG00000237945_6 (sequence is synthesized)
tgttattgacaaaataagcaaagtcctctgattctgagaattagagttaatgatagctctagattgcctctgccatgctatttaaagtcctgctttattgtctgacatgagttcggcatc

SEQ ID NO: 976851 - DNA, 120 bp, Artificial Sequence
  ENSG00000237945_7 (sequence is synthesized)
tatgaggacttgtccagtgcaaagtacaatctccactgaaagatatcaccagcacatcttgtcactgtgctgtagcaagctgggcagtacaatgatgttggcaggatcctgtttaggtgg

SEQ ID NO: 976852 - DNA, 120 bp, Artificial Sequence
  ENSG00000237945_8 (sequence is synthesized)
aggatggccacctgggcatcaagaatcttctaccctgattccacattgactccccaaagtgggcttcagacagctctttacttacgtcttctgattaaagcagcagacagggtcccagct

SEQ ID NO: 976853 - DNA, 120 bp, Artificial Sequence
  ENSG00000237945_9 (sequence is synthesized)
agagaaaagttctgggagcaggagaggtgttggtggctttaaaaccaggggtgaagattgaattaggaggttaggcaggagtaggatcaaagacttagaaaatgcttgtttcctcctatt

SEQ ID NO: 976854 - DNA, 120 bp, Artificial Sequence
  ENSG00000237945_10 (sequence is synthesized)
attcttatgagagctgatacggggctttcagttttgggggagagccttggaagagaatgagggaatttaatcaactagcgggacctttccaacttacatttcccagtgtttgttggatga

SEQ ID NO: 976855 - DNA, 120 bp, Artificial Sequence
  ENSG00000237945_11 (sequence is synthesized)
tacgtttgcctaataagttaaagcttccaaaaatagaaaggaaagcttggtgacactaagctctggcatgctgtcatcttctggctaggggtcttgtgcttctgtttttctatttctgac

SEQ ID NO: 976856 - DNA, 120 bp, Artificial Sequence
  ENSG00000237945_12 (sequence is synthesized)
caaagacataaaatgtgttgtgacctctcaggtaatgctgtggtatcatgtccaagcagtaactaaccagagtggagtttttacaggtaaaaaagtattgaatagctcagcaacagggag

SEQ ID NO: 976857 - DNA, 120 bp, Artificial Sequence
  ENSG00000237945_13 (sequence is synthesized)
gacttaatgataaattgctttttcagaaaatgacaaggggacagacacttgcggttcttccattgagagccttaaggaagttaagcgaagcctctgctcaccccttcaagtaacgatgac

SEQ ID NO: 976858 - DNA, 120 bp, Artificial Sequence
  ENSG00000237945_14 (sequence is synthesized)
ccatcagatcgtggtcataaccagtagcatctgaggcacccctaagctctctgggccccagattccttgttaagttaaatgaggtgacttcccagtttaccattctaggggttcctgagg

SEQ ID NO: 976859 - DNA, 120 bp, Artificial Sequence
  ENSG00000237945_15 (sequence is synthesized)
agttaaaaatgaaggagaaaatgcaacatgtaccaagtgagcaagagctcaaggcttatctctggcacgaaagtgaccgctgtccgttagagatgtgattgccctagatttcctttagga

SEQ ID NO: 976860 - DNA, 120 bp, Artificial Sequence
  ENSG00000237945_16 (sequence is synthesized)
aatgcaaacattgaactctggccttcaggacccaagtcccggcttgcatctattctatacactttctgttatttgttagggctcacaaggaacagttatttatcttttattttctatttt

SEQ ID NO: 976861 - DNA, 120 bp, Artificial Sequence
  ENSG00000237945_17 (sequence is synthesized)
ttggcctcccaaactgctggaattacagatgtgagcgaccacacctggcccatttgttttctttcaaacccttctgtaagaccagtgctttaggtgaacacgtggacagaacaagatcat

SEQ ID NO: 976862 - DNA, 120 bp, Artificial Sequence
  ENSG00000237945_18 (sequence is synthesized)
cactattttgcaatatgaagaccaactgcgctgtgaccagaaaaacagaggcaaaatgttgagcttaatgatacctttttataatttgtatttggtgtttctcaattttccattggatag

SEQ ID NO: 976863 - DNA, 120 bp, Artificial Sequence
  ENSG00000237945_19 (sequence is synthesized)
tatttggtgtttctcaattttccattggatagtttgagagataagtacaagtcaatgacatgttctctttcgtaccctattgtctaatcctgctaacacacacacacacacacacacaca

SEQ ID NO: 976864 - DNA, 120 bp, Artificial Sequence
  ENSG00000237945_20 (sequence is synthesized)
attacactctcaattgctgcagagtctcagaagcagcatggtgtaacagaaagaatatgaggcttagaatccaaaagccagagtgtgaattccagctccactgacttgctgcgtgacttg

SEQ ID NO: 976865 - DNA, 120 bp, Artificial Sequence
  ENSG00000237945_21 (sequence is synthesized)
aagcaagtcattacgtgtctctgtttactcattttatgactttcctattgcctctgtaatatagcaccacaaacgtgtggacttaaaacaacatgcatttattctcttagcgttctggag

SEQ ID NO: 976866 - DNA, 120 bp, Artificial Sequence
  ENSG00000237945_22 (sequence is synthesized)
gtcaggagtctgacatcaatttcgttgggctaaaatcaagatgttggtaggaccaagatccccgtggaggctctgggagaacccatttccttgcctttgccagcttctaatgctgcattc

SEQ ID NO: 976867 - DNA, 120 bp, Artificial Sequence
  ENSG00000237945_23 (sequence is synthesized)
cttgcattccttgattgttgacctcttcccccatcttcaaagccagcagaacagcaccttgtttcattgccttctttactgtcaaatctccctctgccttcttcttataagaacacttgt

SEQ ID NO: 976868 - DNA, 120 bp, Artificial Sequence
  ENSG00000237945_24 (sequence is synthesized)
ggttgcatttagaagctgtgataatccagaataatatctttatctcaagatctttgacttggtctcttctgcaaagtctcttttgccacagagggaaatattcacaggtcccaggggtca

SEQ ID NO: 976869 - DNA, 120 bp, Artificial Sequence
  ENSG00000237945_25 (sequence is synthesized)
gggaaatattcacaggtcccaggggtcaggctgtgtacgtctttgggggactttattctgcctaccacactcatcttttttttttttttttttggatggagtcttgctctgtcacccagg

SEQ ID NO: 976870 - DNA, 63 bp, Artificial Sequence
  ENSG00000237945_26 (sequence is synthesized)
aggtgattcccacactcatctattaagtagagctaggaattcctatcctaagggacacaaaaa

SEQ ID NO: 976871 - DNA, 120 bp, Artificial Sequence
  ENSG00000237945_27 (sequence is synthesized)
taagtagagctaggaattcctatcctaagggacacaaaaatgaaaaaagataaaatttgtgaagaggcacataatgaaagcccatacatgtcactgagttcagaggagggtgggtctgac

SEQ ID NO: 976872 - DNA, 120 bp, Artificial Sequence
  ENSG00000237945_28 (sequence is synthesized)
ctcccattggctggtctctgcctgatggacatcgtgaagaagagagccaggactagtgtggctgggggatgttcaggggccagagtggcttcaggtgccagcagccctggccgaaggatg

SEQ ID NO: 976873 - DNA, 120 bp, Artificial Sequence
  ENSG00000237945_29 (sequence is synthesized)
actccaggagcaaggctcagagccgagtggaagaagcttcataaacgcaactgagccaagcatgatgggatgtgcctgtggttccagctactcaggaggcaggtgggaggatggcttgag

SEQ ID NO: 976874 - DNA, 120 bp, Artificial Sequence
  ENSG00000237945_30 (sequence is synthesized)
ggctgcagtgagctatgatcacactactgtactccagcctgggtgacagaatgacaccctgtctctaaaaagaaaaggcacctggatgctcatgaccgagatggggtggggtgggtgggg

SEQ ID NO: 976875 - DNA, 120 bp, Artificial Sequence
  ENSG00000237945_31 (sequence is synthesized)
gggtgggtggggtgggacagccgcactttataactttgctttcagcatgatgtggattagtgtctcccatgtgggaaaattatgtttaccacttagagacctgatagtgcttgcttaccc

SEQ ID NO: 976876 - DNA, 120 bp, Artificial Sequence
  ENSG00000237945_32 (sequence is synthesized)
acgctggacggtggcaggcttaactcccccatcaagggccttaatgtatttggggccctagtcctagcaacagcagcaaatctcctttttcttttcctcgagctggttgttcaccaggca

SEQ ID NO: 976877 - DNA, 120 bp, Artificial Sequence
  ENSG00000237945_33 (sequence is synthesized)
gttgggatgttaatgggaagagaagacacacacaagtcccttgttttcaataaggcagtctggtcacgtccttagcaggttattaatctttttcaaacccctcctctccaccaagtttta

SEQ ID NO: 976878 - DNA, 120 bp, Artificial Sequence
  ENSG00000237945_34 (sequence is synthesized)
tgatcctgggaaggagattcctacctagcatccttagagttatcgggggttaggatcggtgcatgcagtcacttccgtggaatcatcagtagccctccagcctctggggagagctgccag

SEQ ID NO: 976879 - DNA, 120 bp, Artificial Sequence
  ENSG00000237945_35 (sequence is synthesized)
tggtcagagatgttgggaattacgagggaggagctagggagaaggaactcacagtccctcagtctctgaaggtggctcctggcaggagagggggccagtcctagataagagctctcccag

SEQ ID NO: 976880 - DNA, 120 bp, Artificial Sequence
  ENSG00000237945_36 (sequence is synthesized)
ggaattccaagggtcctcccaaggtccagccacaagatgaggaattactgttgggctcttcctcagatgtgcctgtgaattcatatcacagatgcttgatgcatttgacaattgtttaat

SEQ ID NO: 976881 - DNA, 120 bp, Artificial Sequence
  ENSG00000237945_37 (sequence is synthesized)
tgcttgagcccaactgatactctttcagtcactttaagggagtgatttcaagtatgatcattgcctcaaatctgtatggctttccttgcctttcaggtgctttaagagggcttatgttct

SEQ ID NO: 976882 - DNA, 120 bp, Artificial Sequence
  ENSG00000237945_38 (sequence is synthesized)
ttgactcccctagtaactcaaaagggtggctaagatgcaactctggaggtttccaagctctctgcaaagcctgccttcagtagtctgtgcaccacaagaagcataactttattatcctct

SEQ ID NO: 976883 - DNA, 120 bp, Artificial Sequence
  ENSG00000237945_39 (sequence is synthesized)
gcataactttattatcctctagctgaatttacctcctgcttcgagcccctgttttcccatgtcattttaggggtccaatgtttttcctggaggcatatacacacacacacacacacacac

SEQ ID NO: 976884 - DNA, 120 bp, Artificial Sequence
  ENSG00000237945_40 (sequence is synthesized)
acacacacacatatatacacacacacattccaggggcctctgaggtgccaagacatgtgtggggtccatctggttcacactgatgtccatgatcattgagttcattttttatatcaacta

SEQ ID NO: 976885 - DNA, 120 bp, Artificial Sequence
  ENSG00000237945_41 (sequence is synthesized)
tgtgacacttcctatagtttccagttcctggttagaatttgcaaagttgccgactatttctttgaatagagtagctagatcatgggtctacaccagtcatcaagcagcgatttccctgtt

SEQ ID NO: 976886 - DNA, 120 bp, Artificial Sequence
  ENSG00000237945_42 (sequence is synthesized)
ggaagctccaagcaaattgtcagctccagcattccacacagctgtgggtgccacactccttttccttttaaaagatgatgatctgctagtggtgaatgctcttggagttttatttgtagg

SEQ ID NO: 976887 - DNA, 120 bp, Artificial Sequence
  ENSG00000237945_43 (sequence is synthesized)
tttttcttgttgtcgcaaatgtctatatttcatcttccctcttgagggatattttccatgggtagaggatctaggcttttcttttggattccattgtggctttaaaaaaaagtcagttga

SEQ ID NO: 976888 - DNA, 120 bp, Artificial Sequence
  ENSG00000237945_44 (sequence is synthesized)
ctgtttatttatggcttctctaaaggtgatctctttcttcctaaggctgctttaaaagtttccgttccctccctcccttcctcccaccccatcccccttcttcctttccttcctccctcc

SEQ ID NO: 976889 - DNA, 120 bp, Artificial Sequence
  ENSG00000237945_45 (sequence is synthesized)
cttcctcccttctcttcctccctttctcccttgtcttcctccttttctcccatcctcccttcctccctctttccttcttttttcccttcctcccgccctccttccttcttccatcattat

SEQ ID NO: 976890 - DNA, 80 bp, Artificial Sequence
  ENSG00000237945_46 (sequence is synthesized)
attaaaatattttcttctgggccttccctccttttacttcttttgataccgccatcaaatgcatgttaggttgactcact

SEQ ID NO: 976891 - DNA, 120 bp, Artificial Sequence
  ENSG00000237945_47 (sequence is synthesized)
ttttgataccgccatcaaatgcatgttaggttgactcactgtgtactctattaccctctcatctggtttttaatctttctgtctccttatactgtaatctcagtgtttcttctgctttaa

SEQ ID NO: 976892 - DNA, 120 bp, Artificial Sequence
  ENSG00000237945_48 (sequence is synthesized)
ttttggtatatgaattattcagctgtgttcaaagtgtggttaaagcgacttatatgctctttaatttttagttattgtacttttcacctctagaagttcttctgtgacacttcttatagt

SEQ ID NO: 976893 - DNA, 120 bp, Artificial Sequence
  ENSG00000237945_49 (sequence is synthesized)
ttccagttcctggttagaatttgcaaacttgttgactatttctttgaaaagagtagctagaattgttttagtctgtgtatagtgagttgaatatctgaaacctctgtgagtctgtttctt

SEQ ID NO: 976894 - DNA, 120 bp, Artificial Sequence
  ENSG00000237945_50 (sequence is synthesized)
ttgtctgctagccctactcatggcgtcatgttttcctggatgtttagttggttgtctttgaatatgtccaactccagttatttctgggaatacccaaaggcacacctgttcactatcacc

SEQ ID NO: 976895 - DNA, 120 bp, Artificial Sequence
  ENSG00000237945_51 (sequence is synthesized)
cagtgaactgccatgtgtttgtctcctgtcatggtaacatttgcattcagggagaggcctctgctctctgcagaacagtgtgaaatcacctcatttttgccttcaatgaaggttgtctct

SEQ ID NO: 976896 - DNA, 120 bp, Artificial Sequence
  ENSG00000237945_52 (sequence is synthesized)
tgctggtcaccaccacttcctcaaatgactaatgccactcttgctcacagtgctaaggcgctaaggagttttcagagggctagagtgattctgcatcctctggggttctcaggaaacgag

SEQ ID NO: 976897 - DNA, 120 bp, Artificial Sequence
  ENSG00000237945_53 (sequence is synthesized)
gccacagggccatctgtgcatgagtgacagtggggtggggtggatgagcagtggcagtggtgggcacctatgctgctggcgccacagctttttatatcttggtgaaaacaacgccttgcg

SEQ ID NO: 976898 - DNA, 120 bp, Artificial Sequence
  ENSG00000237945_54 (sequence is synthesized)
ttttcacttgtagattctccggctacattccacaagaacaaattctggtcacagaggccagagtagactatcagtgtaatggcccttcccctttgatgatagcagcttttttcgggggag

SEQ ID NO: 976899 - DNA, 120 bp, Artificial Sequence
  ENSG00000237945_55 (sequence is synthesized)
caggggtggccaaacttcctagccttattttatcttcctttctagttctccccagaggctgctgggtccacctctccctctgccagacagacaggctcagacatgcaagaacggaagggg

SEQ ID NO: 976900 - DNA, 120 bp, Artificial Sequence
  ENSG00000237945_56 (sequence is synthesized)
gtgtgggggttggtgggaggattaagttggggaaagccagtcttgtctttgtagattaccagaactgacacacgtacacacacgtacactcactcactcactcactcatctattcatcta

SEQ ID NO: 976901 - DNA, 120 bp, Artificial Sequence
  ENSG00000237945_57 (sequence is synthesized)
tttttggcctaagtgcctttggacacttcttcggaaaagcacatgaactcttcggagtctcctgttccacttggtaaatttcctatagccacgcactgaaagtccctgctgccctccttc

SEQ ID NO: 976902 - DNA, 120 bp, Artificial Sequence
  ENSG00000237945_58 (sequence is synthesized)
ctctgagcttgtggggcccacagatcccctgctccacttcctgcttcatttcagctgatggtgagtccagggcaggcttgtaggaagggcgggctaggcgtggggaactgcagcacccac

SEQ ID NO: 976903 - DNA, 120 bp, Artificial Sequence
  ENSG00000237945_59 (sequence is synthesized)
cccaccccccgccccagtgcttgttgccccagcctctgtctccctcgctgtgcccttcccttaagccccactcttggcctccccaaagacagagtttgttctgtttttattgataggatg

SEQ ID NO: 976904 - DNA, 120 bp, Artificial Sequence
  ENSG00000237945_60 (sequence is synthesized)
acactccctcgttctaataccatctgaatgcctgagcaattacatcttacaacctcatgaaaaacacagcagcttgtcacgatgaatgatgttaccgtgaataatgcagttttgagttca

SEQ ID NO: 976905 - DNA, 120 bp, Artificial Sequence
  ENSG00000237945_61 (sequence is synthesized)
aactccttcttattccaagaatgagtaaatatccctattccctcccctccccattgcatttgggtttgacatgacatgaatcattgtggttttactcctgggtagaattgtttttctgta

SEQ ID NO: 976906 - DNA, 120 bp, Artificial Sequence
  ENSG00000237945_62 (sequence is synthesized)
ttgcattgccaattgatggaaggacaaaaaaaggaaacttaccaatgagcagtttcagatgaacttaaattctcagaaatcttgaagaatgaatgaactataactttctgaagttgcaaa

SEQ ID NO: 976907 - DNA, 120 bp, Artificial Sequence
  ENSG00000237945_63 (sequence is synthesized)
aatgttcaagtcggaagtgacccatgggaagcaacctggtccttaattaggactggaaagaaaacggaggcccagcgagggaacagtggcttccccaaggtcacactgcaagtgagtggt

SEQ ID NO: 976908 - DNA, 120 bp, Artificial Sequence
  ENSG00000237945_64 (sequence is synthesized)
ggcactagtcacccaggagtcctcctgactccatggtatcctgaccccagaccagcagccttatttgtggttaaagaacgtggaaaaacagcttatgtttgaattttaaaatcatgccag

SEQ ID NO: 976909 - DNA, 120 bp, Artificial Sequence
  ENSG00000237945_65 (sequence is synthesized)
tactaaagatctgcattccatgaatattgagctttgctgtgtgcgggttgctacgaattttgtaactattttctctaagagctctcagtattttacatatacaattccattctttattgt

SEQ ID NO: 976910 - DNA, 120 bp, Artificial Sequence
  ENSG00000237945_66 (sequence is synthesized)
ccagggaaaaagttgcatttactgagcagtaagagggtgatttgaagtccctggggtcccccacccttgtctttctatgtgagattgtattgcagggctcacatttattctctcagcagc

SEQ ID NO: 976911 - DNA, 120 bp, Artificial Sequence
  ENSG00000237945_67 (sequence is synthesized)
tcattgcacagacagtgtatttattgagcacctactgtgtgccaggagctatgtggtaagctaagcagacaaaaactcctgctctcacaagaagaaagaataaacaagcagacaattgca

SEQ ID NO: 976912 - DNA, 88 bp, Artificial Sequence
  ENSG00000237945_68 (sequence is synthesized)
ttgtagttcttagcagtgggtcttgctgtgtccctcgggctggagtgcagtggcaccatcacagttcacttgcagcctcgacctccca

SEQ ID NO: 976913 - DNA, 120 bp, Artificial Sequence
  ENSG00000237945_69 (sequence is synthesized)
aacagagataaaattatacccctcttagttttatggtaaggattagataaaataacacgtattaccaaatagcacagttcttggtagattttcttttatttactttctccttcaaatacc

SEQ ID NO: 976914 - DNA, 120 bp, Artificial Sequence
  ENSG00000237945_70 (sequence is synthesized)
cactgggtaattttttacccctcgagaagccttggaaaagcagtgatactggatgcattcccttatcttatcacttgtcacattcattatgctgaaatcattcatttaagtgtgactctc

SEQ ID NO: 976915 - DNA, 120 bp, Artificial Sequence
  ENSG00000237945_71 (sequence is synthesized)
tcttttattttccatcaggcggcaggttccttgagatccagggccatgtgttatccgttttgatgtccccagtgtcagacttaatgcctgggaacacaataggaattcaaccaatgtgga

SEQ ID NO: 976916 - DNA, 120 bp, Artificial Sequence
  ENSG00000237945_72 (sequence is synthesized)
aggcatcccgggggacaaacgctgggtcgtcctgagtcgctcccactcgccaggtcccataaccttgaagactgccagacttccccagccgaagcatcgcaccctggtgctcgaggcggc

SEQ ID NO: 976917 - DNA, 82 bp, Artificial Sequence
  ENSG00000237945_73 (sequence is synthesized)
acaacataccacaggttgaagatgacagtagatcctaaggaacctcagttctatcccgaaatgcgaaggcctttttactcaa

SEQ ID NO: 976918 - DNA, 120 bp, Artificial Sequence
  ENSG00000237945_74 (sequence is synthesized)
gcgaaggcctttttactcaaccacaaagaagtggtcagcagaaaactggtcatcccggcctctggggccatgcacagcactcaggaggagctactattttccctgcctgtttacatgcgg

SEQ ID NO: 976919 - DNA, 120 bp, Artificial Sequence
  ENSG00000237945_75 (sequence is synthesized)
caaaatgatacagacactttggaagacactttggcagtttcttacaaaactaacatactcttaccacatgatccagcaattatactccttgatatttacccaaatgagctgaaaacatat

SEQ ID NO: 976920 - DNA, 120 bp, Artificial Sequence
  ENSG00000237945_76 (sequence is synthesized)
ccacacagaaacctacacaggattttataactgctttattcatagttgtcaaaacttggaagcaaccaagatgtcctccagtaggcgaatggaaaaacacactgtggtacatccagacag

SEQ ID NO: 976921 - DNA, 120 bp, Artificial Sequence
  ENSG00000237945_77 (sequence is synthesized)
tggaatattattcagtactaaaaggaaatgagctgtcaagccatgaaaagacatggaggaaatttaaatgcgattatgaagtgaaagaaaccaatctgaaaaggctacctgggtgcggtg

SEQ ID NO: 976922 - DNA, 120 bp, Artificial Sequence
  ENSG00000237945_78 (sequence is synthesized)
gcctccagaggagctggactacagatgacttggcgcatctgctagagaaaaacagcaaatagcacatctaaaaacagcttggtggttttttgcatctttagagaaagctgctttaggagg

SEQ ID NO: 976923 - DNA, 120 bp, Artificial Sequence
  ENSG00000237945_79 (sequence is synthesized)
gtctgcagtatagacctcctgtatctgcaaggtgacagacggaggaccccaagccgtgggaactggtcacctactgtggggcccaggcctctccccactgcaggtcaagcccatcttgaa

SEQ ID NO: 976924 - DNA, 120 bp, Artificial Sequence
  ENSG00000237945_80 (sequence is synthesized)
atcatctcgacacgagggggcgccatctcctcacattgtgaggaagcctctggcatcgggatgaattttgttctagagctttccttctacaaacctcggtgttgttctcgctcacatgca

SEQ ID NO: 976925 - DNA, 87 bp, Artificial Sequence
  ENSG00000237945_81 (sequence is synthesized)
ttccttctacaaacctcggtgttgttctcgctcacatgcaagaaagaatcggagtattgtgagatggagtcgcctaataacctctgt

SEQ ID NO: 976926 - DNA, 120 bp, Artificial Sequence
  ENSG00000237945_82 (sequence is synthesized)
gcgcctactgccccgtaggcatcccgggggacaaacgctgggtcgtcctgagtcgctcccactcgccaggtcccataaccttgaagactgccagacttccccagccgaagcatcgcaccc

SEQ ID NO: 976927 - DNA, 120 bp, Artificial Sequence
  ENSG00000237945_83 (sequence is synthesized)
tggtgctcgaggtttggtaccggtcatcccaggagggatcctcccactggctctcaggaccacctttctctcacctgccgggagagcccggacactgctggggcagccatcttctcccgg

SEQ ID NO: 976928 - DNA, 120 bp, Artificial Sequence
  ENSG00000237945_84 (sequence is synthesized)
agcaggcttcgtgagctggggaagtgccagaagcagccttcgaattagacagacctggacccaaaccctttctcttccccccacccattttggcatcttggcacgagactgtccccattt

SEQ ID NO: 976929 - DNA, 120 bp, Artificial Sequence
  ENSG00000237945_85 (sequence is synthesized)
ctggaaagggtgttcacaagaacagtctggctgggttgttgggatgaccgagtgtgatcatgcgtctctatggctggccatggtgtttattcgatggcaggtattaccaggatggagcga

SEQ ID NO: 976930 - DNA, 120 bp, Artificial Sequence
  ENSG00000237945_86 (sequence is synthesized)
gtcccagtaggaagggcctttaggatgtcatctggttccacccaacagggatgggaactgtaattccccactctccctgtggagaatcagggcgggctccggatggatggccaaaggctg

SEQ ID NO: 976931 - DNA, 120 bp, Artificial Sequence
  ENSG00000237945_87 (sequence is synthesized)
cacagaggcgctcctgtgaagaggaagcctcaggagggagtgagagcagaagggagcccacctgtggttgtctcagcaacagcagaagaacctgggccgctgggagtggagttggagaga

SEQ ID NO: 976932 - DNA, 120 bp, Artificial Sequence
  ENSG00000237945_88 (sequence is synthesized)
aacaggttgatttggaagttcttctgcaggtagaacggaaaggcgaattctgcaagatgctctggggtccactgagctcagctgctgaggctcagctctttctgtggcttcttcttgagc

SEQ ID NO: 976933 - DNA, 120 bp, Artificial Sequence
  ENSG00000237945_89 (sequence is synthesized)
agcctgttgaccaagatgtggcccatgccactccctatattcggagtccattttctgatgccctctctcagctcttcgcctgcactcatctgtgactgcctggtactgctaggaagcctc

SEQ ID NO: 976934 - DNA, 120 bp, Artificial Sequence
  ENSG00000237945_90 (sequence is synthesized)
tgtttgtgtctcatctctccaggtggactggagctcctgggggtcctttcctttgtgggggttctcaatatcagaatggagtcgcttatgtcaaaccctaacaaaatggaggtggaggtc

SEQ ID NO: 976935 - DNA, 120 bp, Artificial Sequence
  ENSG00000237945_91 (sequence is synthesized)
acgaattggagcctatatgcgtgcctgtaacaggacttgtcacaaggaatccctgcacatatgtgtatgatggggactatgccaggaactcctcacatatggaggattcgaggtaagcca

SEQ ID NO: 976936 - DNA, 120 bp, Artificial Sequence
  ENSG00000237945_92 (sequence is synthesized)
tttgctcaaggacacttacccagcaatggcagcctccactaatgagacatcgcgaactcctgtaatcaatggtctttgtttctaaacagcttatgtggaattctccgtttttttgtctgt

SEQ ID NO: 976937 - DNA, 120 bp, Artificial Sequence
  ENSG00000237945_93 (sequence is synthesized)
ttgtggagatcctgtctctctctgtcattatttaggttgacaccttttatgtcctgcattgctgttgatgacacccacatttgtacctcctgcttgaatgtcccctcccccaactccaaa

SEQ ID NO: 976938 - DNA, 120 bp, Artificial Sequence
  ENSG00000237945_94 (sequence is synthesized)
attcctctctctgtctaccctgtacctctatttgaaccactaagaggcatctcagacttaaagtgtcccaaactgagcccctgtgatgcccccagagctgctcctccccaccacctcctc

SEQ ID NO: 976939 - DNA, 120 bp, Artificial Sequence
  ENSG00000237945_95 (sequence is synthesized)
ctcagcaatggcagcttgattcttctttgggctttattcagtcccccaactttggagctttcttgacccctctctattgctcacatgccatattcaatgtgtaggcaaatcctttggccc

SEQ ID NO: 976940 - DNA, 120 bp, Artificial Sequence
  ENSG00000237945_96 (sequence is synthesized)
tgccttccaaagacatgcagaatctactcacttctcgccacctcgctgtctcactctgcgtcaggccaccctgtgtgtccttgcacaattgcgggagccttggctcgagtcctccagacc

SEQ ID NO: 976941 - DNA, 120 bp, Artificial Sequence
  ENSG00000237945_97 (sequence is synthesized)
ttctacctctttgacttcatctagtgctgctccaagccccgtgctcttccttggacacaccaggcatgctgccagcagagcctttgcatgtgctgttccctttgtcgggaagccttttcc

SEQ ID NO: 976942 - DNA, 120 bp, Artificial Sequence
  ENSG00000237945_98 (sequence is synthesized)
ccagctatctgctcagctcatccgctgtctctttcgtcctcgctcagattccccttctctgtgaagcctttctgaccatcctcattaaaatcaaataaccccacccctccactctcttgc

SEQ ID NO: 976943 - DNA, 120 bp, Artificial Sequence
  ENSG00000237945_99 (sequence is synthesized)
ccattttcctcatccatttccccctaggactaatcactctctaacattctctatatatttttctgatatatttgtttatatgtcttgcataaacaaaatgatttggtttatggtctatct

SEQ ID NO: 976944 - DNA, 120 bp, Artificial Sequence
  ENSG00000237945_100 (sequence is synthesized)
cttcttgctagaatgtgagctctacaagggtagggatgcttattttgtcaccgttgtgtccctgactcctaaaatgctgacggtgtggccagctgcatgccctgctgtctctattttgaa

SEQ ID NO: 976945 - DNA, 120 bp, Artificial Sequence
  ENSG00000237945_101 (sequence is synthesized)
actctaacaaaattttggacaagaccctcctctttcattttatgctggacctggaaaattacagagcaggttctgacttccaggcacatggtacgcattcaataaataatctcttgaatg

SEQ ID NO: 976946 - DNA, 120 bp, Artificial Sequence
  ENSG00000237945_102 (sequence is synthesized)
gagtatgttgtttacagaatgaaaagcgagttccacataagctgagacttggcttcagtcatgcctgggaatctacaaactcaatgccctctcactggcagaacataaaagctaaagatt

SEQ ID NO: 976947 - DNA, 120 bp, Artificial Sequence
  ENSG00000237945_103 (sequence is synthesized)
gtaggcatcccgggggacaaacgctgggtcgtcctgagtcgctcccactcgccaggtcccataaccttgaagactgccagacttccccagccgaagcatcgcaccctggtgctcgagaac

SEQ ID NO: 976948 - DNA, 120 bp, Artificial Sequence
  ENSG00000237945_104 (sequence is synthesized)
ggccctgtggttaacggttggaggctgctgttgacaaggcctgttgctgtggcagttttgctccggaagtggccattttctgggcagggctccaccagagcaccatctgtctgtgccttt

SEQ ID NO: 976949 - DNA, 88 bp, Artificial Sequence
  ENSG00000237945_105 (sequence is synthesized)
tgatcttagccaaaaggccgagaagcgatcatccctggagtctctctgaatctgccgtgatcctgggggctgcccgattcgtgcattg

SEQ ID NO: 976950 - DNA, 120 bp, Artificial Sequence
  ENSG00000237945_106 (sequence is synthesized)
aaggaaactgaggatcagacaaggatatctagcttatccatgattaggtagagctgacaatgggattaaataatcaagtcctgctactgccaggttaagaaaacccagctctttgttgtt

SEQ ID NO: 976951 - DNA, 120 bp, Artificial Sequence
  ENSG00000237945_107 (sequence is synthesized)
ttataacaactgggggaagctggtgtgcatcattggctgataggaagagaaattgaattccacatctatgtcctacttcatgcatggattgctctcaacaaccgtgaaacggaatacaaa

SEQ ID NO: 976952 - DNA, 120 bp, Artificial Sequence
  ENSG00000272037_0 (sequence is synthesized)
gtttttggtggttcttacagacttgagatggggcttgtcttaaggaaacaaggtgccctgaatctaaagactgactaaaggtggtagaacttaagctatttaggtgatcctgaaaccaac

SEQ ID NO: 976953 - DNA, 120 bp, Artificial Sequence
  ENSG00000272037_1 (sequence is synthesized)
agggacagttatggtattgactagtgggaacttttaagagccataagactggagaagtcaaatgctgaccaattatatcaaacccacctggggaacaaactaagtcaaaattactagggt

SEQ ID NO: 976954 - DNA, 120 bp, Artificial Sequence
  ENSG00000272037_2 (sequence is synthesized)
ggctaaaagctgagaaatgaactaggtggcagttaggactgctgaacaaacccatctcaccatagcagagaaatattagaatacacctagagccatgtaaagattcaggagtgctaaaag

SEQ ID NO: 976955 - DNA, 120 bp, Artificial Sequence
  ENSG00000272037_3 (sequence is synthesized)
catgaattcccctccttccctccaccacccccaaaataagcttctgcctgaatgaaggtaactgggaatctgcaatttttttctttcctgcacaaataaccacttccccttattcaaata

SEQ ID NO: 976956 - DNA, 120 bp, Artificial Sequence
  ENSG00000272037_4 (sequence is synthesized)
aaataaaggatatatctagaaatctgatcatttttaaatatttccagaagtggtctagtttagaactaaggctggttagaccggggcaatgttccaggagtacagaaaggatcttccagg

SEQ ID NO: 976957 - DNA, 120 bp, Artificial Sequence
  ENSG00000272037_5 (sequence is synthesized)
acgtaagttccactaagaggtagactttccactaagatcaaagcttctgttatctaatttataattctaagttagctggggctctgtactaataagattttgaaagacttagtacccaca

SEQ ID NO: 976958 - DNA, 120 bp, Artificial Sequence
  ENSG00000272037_6 (sequence is synthesized)
tatcacaattaagctactctcttcctagtatgcagataacaatcaagataatactcagaaattctgtcaaggcttggcactagtcaaaaggattaaggatgtatacagggagaagcatat

SEQ ID NO: 976959 - DNA, 120 bp, Artificial Sequence
  ENSG00000272037_7 (sequence is synthesized)
gtaggcagtgcgataaagataaaaagccatgttgcaacagtaaactggtatcttctgggactaaggacagcatattaacagctaaatgtacttcactctgcttagagctttagtaatact

SEQ ID NO: 976960 - DNA, 120 bp, Artificial Sequence
  ENSG00000272037_8 (sequence is synthesized)
tcagatattgttatagagcagaaaaacaaaaactgccttatttgtgaccttctataattgccctacccaaaattaaaatgaccaaccattacaaacttaaaaggccatcatacatggtat

SEQ ID NO: 976961 - DNA, 120 bp, Artificial Sequence
  ENSG00000272037_9 (sequence is synthesized)
ttttaacttctgtatttccttctacaaatcttgtgaaatttttaacttacaagatcttgtcgttctgtcatgctcatcttctctactattgaccagaaccaacgcttgaactgcagaagc

SEQ ID NO: 976962 - DNA, 120 bp, Artificial Sequence
  ENSG00000272037_10 (sequence is synthesized)
ttctcagcattttctcctaagaatgaagaatgtaaataaaatatactataccagttgttgttattatctgtagaatattactaatcttcttataataaaaggatacagattaaaacatta

SEQ ID NO: 976963 - DNA, 120 bp, Artificial Sequence
  ENSG00000272030_0 (sequence is synthesized)
cccccacatttctggaccttgagcattcctcaagtaggaagatgtaatgcaccttgacctctttctaaataagacacttccccaaataaggggagttgagagtgaacagtcttcacgtct

SEQ ID NO: 976964 - DNA, 120 bp, Artificial Sequence
  ENSG00000272030_1 (sequence is synthesized)
ccacccacttccagatcccagaggagacagacatcggatggctgaagaaattgttacaggccactgtgagagcagccacaagcaccacatactcctggaagtccacctccccgtctccat

SEQ ID NO: 976965 - DNA, 120 bp, Artificial Sequence
  ENSG00000272030_2 (sequence is synthesized)
gagggaggtgtatagggaagggtacagcactgagtcagaggcaagggggtggttgaggagcaggaggcaaagatgagcgagaggaactgcattgaattatgggactcttctaggcctcct

SEQ ID NO: 976966 - DNA, 120 bp, Artificial Sequence
  ENSG00000272030_3 (sequence is synthesized)
caaaggtcttgagggcttctgttgcctacagcataagctctttcacctggcagaatgaataataatgacaccagttaccgtatgttcagtgcctataataaagcaagcactacactagga

SEQ ID NO: 976967 - DNA, 120 bp, Artificial Sequence
  ENSG00000272030_4 (sequence is synthesized)
ttccgctcctcaagaccgcacctcccccggctccttctcactaccgaaactcaccgaaggaaacagacgccagtgctcctcccggggctgccaccacggctccggcaggcgggccgggga

SEQ ID NO: 976968 - DNA, 120 bp, Artificial Sequence
  ENSG00000272030_5 (sequence is synthesized)
ccggccgaacctgagttgacggtggaggggctcgggttagctagatgggcggttggttagatgccggccgccagctcctgctcggtgtccaaaacaaaatggccgccacgtccagtgctt

SEQ ID NO: 976969 - DNA, 120 bp, Artificial Sequence
  ENSG00000272030_6 (sequence is synthesized)
gtctgaccggctaaaatggcgtctacgcaattacgtcaggcgtcagatccgcgcacgactagagggcgggaaagatttgagctacgcctgcgcagagatggagtctcgctgtgtcaccca

SEQ ID NO: 976970 - DNA, 73 bp, Artificial Sequence
  ENSG00000272033_0 (sequence is synthesized)
gtcttgaactcctgggttcaagcgatcctcttctggactcacttagaggagtctaatgtgaatggcccaatat

SEQ ID NO: 976971 - DNA, 120 bp, Artificial Sequence
  ENSG00000272033_1 (sequence is synthesized)
tggactcacttagaggagtctaatgtgaatggcccaatatcttccaataagaaagtcttctgtcaactctactaaaccacagatttaatcagaaaagtggcatttccaagtttttattta

SEQ ID NO: 976972 - DNA, 120 bp, Artificial Sequence
  ENSG00000272033_2 (sequence is synthesized)
ataaagttcatgttgaaacttgggtagggaaaattggtaaataagtaggtagatggacaggacctggtggccagttatatttgattaatgataggaaagaagtatctaggtataatgcct

SEQ ID NO: 976973 - DNA, 120 bp, Artificial Sequence
  ENSG00000272033_3 (sequence is synthesized)
gggtttttaggaaactacgagggttgatagggtcagagaaaatatatatgtagtgttagaagaaccttggtgaaaccaaccttttaggtgtaaaggattaagtagattcaaaagatactg

SEQ ID NO: 976974 - DNA, 120 bp, Artificial Sequence
  ENSG00000272033_4 (sequence is synthesized)
cattttcagaagtcaaaaactagtggagagtggtaatcgcaatggaagaaaatgccaagagggaaggagaaagtgacctagatcagaaagacttaggaaggtcaatgcaaagtgtgttta

SEQ ID NO: 976975 - DNA, 120 bp, Artificial Sequence
  ENSG00000272033_5 (sequence is synthesized)
ttagatttgttaattgccaaagccttaagatagaatgagattgccttcattcactttcagcaaagccaagggcgttgtctttcccttttcatatctgggacctcattttatttcaatttt

SEQ ID NO: 976976 - DNA, 120 bp, Artificial Sequence
  ENSG00000272033_6 (sequence is synthesized)
atttgtctcaaatcaagatagtaggaataatgaattactgttcattctgattttttggtacttgcaaaagtatgtgtatgtttttaaacactcccccaacttccagacttttataagatt

SEQ ID NO: 976977 - DNA, 120 bp, Artificial Sequence
  ENSG00000272033_7 (sequence is synthesized)
tttttatcttccccttcacttacatgggtgaattacaaaaaaagttttactaccctaacatcaggaaggtcattataatgtagtagcaaagagcatagactctaaagccaaactgtctct

SEQ ID NO: 976978 - DNA, 120 bp, Artificial Sequence
  ENSG00000272033_8 (sequence is synthesized)
ttgtgaatcttggctctgccacttacctgtgtgtcctggggaaagttaactttatgggcccctgtttcctcaactgtgatattaggatactttcagtgttcacctctaagagttgtaggg

SEQ ID NO: 976979 - DNA, 120 bp, Artificial Sequence
  ENSG00000272033_9 (sequence is synthesized)
agtcaacgagtaaacacatgtaaggcaccttttagaaagctgcctcctacatagtaacctttctaaatctttgctgctgttaccattatgacattatcatgataccagtatcatcctcag

SEQ ID NO: 976980 - DNA, 120 bp, Artificial Sequence
  ENSG00000272033_10 (sequence is synthesized)
tcaacaaacgatagataactcagagaatgaaaaggttgttcctttatatagtttccctagaatcaccttgtaccactgctgctgagttgcaatcattcgttagtcgtatgtgacctagat

SEQ ID NO: 976981 - DNA, 120 bp, Artificial Sequence
  ENSG00000272033_11 (sequence is synthesized)
tccattttctaagattattcaacaatgtagaggatcagcgtagtggaaatacgtctataaacatttctaagaattgaattcattgtaattaatagcatcagagaagctgaaaatccaaag

SEQ ID NO: 976982 - DNA, 120 bp, Artificial Sequence
  ENSG00000272033_12 (sequence is synthesized)
agctaatctcttaacttcatgatggaggacaaagattttatcttttggaattttaataatgtttccagcatgagattagccttcaatattgatttctggaattctgttttcccttgtttt

SEQ ID NO: 976983 - DNA, 120 bp, Artificial Sequence
  ENSG00000272033_13 (sequence is synthesized)
tcattgattaacctaaaacttttgagatgtagttcatatttttggtaatattgctatgattatataactgtaactgtctagaatttaatttctagcaagggaaatttaagccttttcctc

SEQ ID NO: 976984 - DNA, 120 bp, Artificial Sequence
  ENSG00000272033_14 (sequence is synthesized)
agaattatttttcatgggaaaattcttactgatagattactggacttgagtcataatttattggttatcttattctgccctatctactctcagcactaattataaaaataatcaaagaaa

SEQ ID NO: 976985 - DNA, 120 bp, Artificial Sequence
  ENSG00000242553_0 (sequence is synthesized)
gcaggaaggaactgagaacaccagcatctgctgccgccctgaatcagcgttagcatgtggaggcaacctcagcccccagtttttgaagaaggtgattcagattcagacacaggaattatg

SEQ ID NO: 976986 - DNA, 120 bp, Artificial Sequence
  ENSG00000242553_1 (sequence is synthesized)
gtgacggtagaaatggactggaaggttcgttccccttgcccaccaagactccagagcagtttctttcagggtggaaacagtcccaacctagaaagctgatcagaagactcccacccacat

SEQ ID NO: 976987 - DNA, 120 bp, Artificial Sequence
  ENSG00000242553_2 (sequence is synthesized)
tctgaatccaggtactactcagtcatcactgctgcttccttggggctgtccaaagcctttggtgctaacaataaaggactagaaacacttcttttcttcacagaagatgtacatcatact

SEQ ID NO: 976988 - DNA, 120 bp, Artificial Sequence
  ENSG00000242553_3 (sequence is synthesized)
acatgtgtttcctctggacagatctcttaggcaattcataaaactcccatacagatgaatctttaaacactcacaggggtttggggggcttttattttaaaggttctattattttcagca

SEQ ID NO: 976989 - DNA, 120 bp, Artificial Sequence
  ENSG00000260060_0 (sequence is synthesized)
gaagtattagatcctcaatctcaaggtattctaagaaattttggagaccattgagtctaaaattcccagtatctttgaggcaggaacagacttggagaatgtagtttatgagcaggagtt

SEQ ID NO: 976990 - DNA, 120 bp, Artificial Sequence
  ENSG00000260060_1 (sequence is synthesized)
tggagctggaagaaatactgctttctgttggtggttaatgctgtcagctccttggattgtggctttagccctaaatattggggcagtagagactcttacctggaaaacaattgagggcca

SEQ ID NO: 976991 - DNA, 120 bp, Artificial Sequence
  ENSG00000260060_2 (sequence is synthesized)
cccatgttagcggcaagaggcagaggaaagcttggatggttgggctgaagatggtggatgtgctgtccctgtgagagtgctgatgctggactctggagccaacgacaaagtgtttgagca

SEQ ID NO: 976992 - DNA, 120 bp, Artificial Sequence
  ENSG00000260060_3 (sequence is synthesized)
cgaggggtgttgcacaatcacaccgattctttgtcactactgagtgcagtgttcttaagaatggggacctggcagctgggtgcgatggcttgtgcctgtaatcccaacactttgggaggc

SEQ ID NO: 976993 - DNA, 85 bp, Artificial Sequence
  ENSG00000260060_4 (sequence is synthesized)
cccaagatcgtgccattgccccctggcctgggcgacagtgcgagactctcaaaaaaataagtaaataaataaaaggagacctagg

SEQ ID NO: 976994 - DNA, 120 bp, Artificial Sequence
  ENSG00000260063_0 (sequence is synthesized)
gatttaaaaaaaaaaaaaatcccacagttttattcttctcccctcccccggcctcaagccaagaaccaaaccagcctaccaagaagatccgactgactggtatgggccagtgccctcttt

SEQ ID NO: 976995 - DNA, 120 bp, Artificial Sequence
  ENSG00000260063_1 (sequence is synthesized)
tcactcacagtcctcaggggcaacaactctccccggtgcattaggtcctagaaaccaaattataggctgcctcataaatagagcttggctatttaatcaactgcccctgagctggcaaac

SEQ ID NO: 976996 - DNA, 120 bp, Artificial Sequence
  ENSG00000260063_2 (sequence is synthesized)
agtcctgagtcctgcacacaaatgaggatttttttacatgccattactctgccattttccttagagctggggtgtaatgggaaacctggagcccagtgaaaatctggaagctagaatgga

SEQ ID NO: 976997 - DNA, 120 bp, Artificial Sequence
  ENSG00000260063_3 (sequence is synthesized)
tttctctccaaagaaagccctcatcccctttcttcaatggctgtgaaatatggaaagcgccaaaaatctccttccctacacgtgggcaagctgttttgaaaacagtcaccatttttctct

SEQ ID NO: 976998 - DNA, 120 bp, Artificial Sequence
  ENSG00000260063_4 (sequence is synthesized)
agcaataaggtaaagtgcacaaaaatctatccacctgggttggaggagataatgtggaatttctctacttttttttttttttaattcactagggttctcttccacttttacttttagagc

SEQ ID NO: 976999 - DNA, 120 bp, Artificial Sequence
  ENSG00000260063_5 (sequence is synthesized)
cccacaccacgatcccaggaaatgttgggctgagggaacttttttagaaactggcccatcagctttccctaggggcagtggcaacgggaaagcgggggaggggaggagctgggcacgtgg

SEQ ID NO: 977000 - DNA, 120 bp, Artificial Sequence
  ENSG00000260063_6 (sequence is synthesized)
ctggcccgagcagcgagaccccggctgggggcagtgggtcctcccttcggtggagttttttcccccacggcccctgccttttaaccccacacccaggcagctcaggaatcccggcgcaga

SEQ ID NO: 977001 - DNA, 120 bp, Artificial Sequence
  ENSG00000260063_7 (sequence is synthesized)
ttggagaactaggactaggacagcgctaccctcgcgaaagcacctcggccaacagcctgatggcaaatatggactgaatcgttgacatggaaaccggactaaagtctcgctagctctccc

SEQ ID NO: 977002 - DNA, 120 bp, Artificial Sequence
  ENSG00000260063_8 (sequence is synthesized)
gcggagtttctgggcgtattaactccagcggcagagcagccaaggaagggggcagggctgccaggacaaaccggctgaaaatggcagaggatgtgctcccattttatccggctgcacagc

SEQ ID NO: 977003 - DNA, 120 bp, Artificial Sequence
  ENSG00000260063_9 (sequence is synthesized)
gtgcatggattgggcccgaggacaagggaacaacctattaaaatccagagagtcaactgcaaaatgtggaaccgaggcctggagggtttgctaggagagggaaacgtttgcagggaagac

SEQ ID NO: 977004 - DNA, 120 bp, Artificial Sequence
  ENSG00000260063_10 (sequence is synthesized)
agcccttcctttctcgcaatttgcttcccctaaatgtctgaaatacaaaactcaacaaacaaacagaagatcgggctcggctccttcctccacccaatccttgtgggagaagtcgtctta

SEQ ID NO: 977005 - DNA, 120 bp, Artificial Sequence
  ENSG00000260063_11 (sequence is synthesized)
agcccagggaccctagcgagggtttgcttagattcctaactaaggcgtggagaatcgctggagcgccaggttgttgcccccacacgttcccgccgcggaacagcagcagacacccagcag

SEQ ID NO: 977006 - DNA, 120 bp, Artificial Sequence
  ENSG00000260063_12 (sequence is synthesized)
agctctctcgagtgcgaactggagctgcgagtttgagcaaaagggcaactatgtcagttgacggaagccagaagcagagttcaaagcctggcgtggatttccgtctggagctgtctgttc

SEQ ID NO: 977007 - DNA, 120 bp, Artificial Sequence
  ENSG00000260063_13 (sequence is synthesized)
ttaaagtttgtaactccgtgttaagaaacagccccagcggaggctttgggatcggtgtgaaagtctagcactaccatctgacagcgagctgcaaaactttgggctgcatattaagcgagg

SEQ ID NO: 977008 - DNA, 120 bp, Artificial Sequence
  ENSG00000260063_14 (sequence is synthesized)
aaagtggattgaagcgagagtcaaggcaattcattatgttaccggctcccatacgggagctgtaaaatacgaactggatgcacacacggagaaaaatggaatgaactcggaatggcattc

SEQ ID NO: 977009 - DNA, 120 bp, Artificial Sequence
  ENSG00000260063_15 (sequence is synthesized)
aacagctcttcgcggtaaaactgtgactgccaaggatctagaatcccaaaggagcaaaccaggaggcctcaaacttggttggcacacaataaatgcttttctagatcttttccccactca

SEQ ID NO: 977010 - DNA, 120 bp, Artificial Sequence
  ENSG00000260064_0 (sequence is synthesized)
tccaagaaagagcaagagaggatgatccttttgtcacctattctcctcctgaagatgacctgccatcattttggcatcttctgttgaagccagttgctaggtccagtcttctcttgaggg

SEQ ID NO: 977011 - DNA, 120 bp, Artificial Sequence
  ENSG00000260064_1 (sequence is synthesized)
tgggatttacagaagagtgtgaatacaaggggtttaaatcacacagaaggcaagatgcagtaaggaggtgcacattctacaagggagtttgtcagaagaatcacaacaaggatttaaagt

SEQ ID NO: 977012 - DNA, 120 bp, Artificial Sequence
  ENSG00000260064_2 (sequence is synthesized)
attcagggttttgggagaagggagagtatgcatctagtctagggtacggggaaatctcccttgaaggtggttgcatttgagataggcctggtgtgactggatttcagcaggtacagatga

SEQ ID NO: 977013 - DNA, 120 bp, Artificial Sequence
  ENSG00000260064_3 (sequence is synthesized)
ggagtctgttctctccagcagacaactaatagcaggtgcaagtgacagctaggaagtgcataatgagggcaatgaatgtacaggacatatttaggacttcaaaatgcatagcagtctggg

SEQ ID NO: 977014 - DNA, 120 bp, Artificial Sequence
  ENSG00000260064_4 (sequence is synthesized)
actatttgttatagaatcacatcccagaagcctctaagaagaattttctgttataggccagcaggtgaccattgagaggtagttatatgcatacagtatattctgtttaagaaggaaaca

SEQ ID NO: 977015 - DNA, 120 bp, Artificial Sequence
  ENSG00000260064_5 (sequence is synthesized)
gaatgtggactaatttcggaacattttactttaaatgaaccagttacattattaaatttggggtctttcaagaaggtagaatcttagccatctgtccaaattgaattagcaacaccaaaa

SEQ ID NO: 977016 - DNA, 120 bp, Artificial Sequence
  ENSG00000260066_0 (sequence is synthesized)
agggacacaggcgcaggctcccgcgtgctcgccggctgtgttgttaaacatcttcatgcaccagccctcccggcaggcccgggcgggcagagcagcggaggagtgctcgggttcagaccg

SEQ ID NO: 977017 - DNA, 120 bp, Artificial Sequence
  ENSG00000260066_1 (sequence is synthesized)
agtcagggtcagcctgctggtcctcaacgccgttccgggttagttcaggttgattttcctctctgagggcaaggccacctctaaagttgggagggacaggggcggggacgaggctcgggc

SEQ ID NO: 977018 - DNA, 120 bp, Artificial Sequence
  ENSG00000260066_2 (sequence is synthesized)
tgtgctgggcggttcctctgtatcttgagacgctgcatttccccgcctgctgcagctcctcccagaaccgccagcaagaaaccgagagctgagctggccaaggccatcagggccgtccac

SEQ ID NO: 977019 - DNA, 120 bp, Artificial Sequence
  ENSG00000260066_3 (sequence is synthesized)
tgtgggtgggagacgcagccttgccacatggaagataaacgaggccgagcaggctctctcccctcccctcccctcccctcctctcctggtataccccggcttcccccttgccctcagccc

SEQ ID NO: 977020 - DNA, 120 bp, Artificial Sequence
  ENSG00000260066_4 (sequence is synthesized)
tgcgtcccgggcatggcttccatctccaacagaacacaaggtcggaagcccttcccccgatttgaggttaatggcacttcggtgtttaggctccttctggctttggcccaagcttggcag

SEQ ID NO: 977021 - DNA, 120 bp, Artificial Sequence
  ENSG00000260066_5 (sequence is synthesized)
gtgggcctcccgccttgctcttcttggggcctgacaggctcaccggcattgcagctccgtcagggacagagcccaccatctccagaaagccagcccctacctgagagctgcagcccagca

SEQ ID NO: 977022 - DNA, 120 bp, Artificial Sequence
  ENSG00000260066_6 (sequence is synthesized)
gcacgcgaggaccctgcatttctttcccgcggttgagggtgagggagtgagtgttcaaggaggaaggccgccctcgccccctagagccctgccttcctctacacgcccacgcgaattcct

SEQ ID NO: 977023 - DNA, 120 bp, Artificial Sequence
  ENSG00000260066_7 (sequence is synthesized)
aggcgtacgggtttgtttggatggtggagggagacagggcccgtcaggaggcactcttggggaatcgcgcagccatacaactttagagctggccttggctgggagaggaaaatccatctg

SEQ ID NO: 977024 - DNA, 120 bp, Artificial Sequence
  ENSG00000260066_8 (sequence is synthesized)
aactcacccggaatggttccgaggaccagcgcgctgaccctgactctgttagtgcctgagccctcctccgccgttccgccggccgcggcgtgtggggagggccggaacctgaggacctgc

SEQ ID NO: 977025 - DNA, 120 bp, Artificial Sequence
  ENSG00000260066_9 (sequence is synthesized)
atgaagacatttaagaacactgctacggtgcatacaaaagcctgcgcctgtgtcccagggctctggaggccttacaatgcctgtgacctgcgtcagactgacggcttcatccaacagagc

SEQ ID NO: 977026 - DNA, 120 bp, Artificial Sequence
  ENSG00000260066_10 (sequence is synthesized)
aggggagcaccagaggagggaacctgtgtgcaaacactgcattcctggggcgcacggtctcggggccggctgcacacaccacgctcagaactactcattgtcatggggtcactgtgtctc

SEQ ID NO: 977027 - DNA, 120 bp, Artificial Sequence
  ENSG00000260066_11 (sequence is synthesized)
ccaaatgcatatgttgacgtcctaactcccagcgcccccaaggtggctgcatttctacatagaaactttaaagagatgattaaggtaaaatgaggtcattggggtggccccgatttgcta

SEQ ID NO: 977028 - DNA, 120 bp, Artificial Sequence
  ENSG00000260066_12 (sequence is synthesized)
aaggacacagacatgtacagagggacggccccgtgaggacacagggagaggacaccatctgcaagcccagaagagaggcctcggaaggaaccggcctggccaccccttgaccttggacac

SEQ ID NO: 977029 - DNA, 120 bp, Artificial Sequence
  ENSG00000260066_13 (sequence is synthesized)
cagcctccagcacgctgaggatgagctgctgtcatttcagctgccttggcttcggtgcttctccagggcagccctgctaactcatgctcacggctagttctggggttggcagatcctgcg

SEQ ID NO: 977030 - DNA, 120 bp, Artificial Sequence
  ENSG00000260066_14 (sequence is synthesized)
gatacctgtagacacaggcatgtgttcaggcttgagctgggtggggtgaggggtgagcagccatagaaggaaaaggcaatcctctggacacacaaactgtgttttctctcaaacccaaac

SEQ ID NO: 977031 - DNA, 120 bp, Artificial Sequence
  ENSG00000260066_15 (sequence is synthesized)
actcctacaagaaggacagtcggtattaggataaaggcctcaccacatcccccctggttttcctcacagcaagctcgagatgtgggaaccgctgcaccctccacatcagggaacggactg

SEQ ID NO: 977032 - DNA, 120 bp, Artificial Sequence
  ENSG00000260066_16 (sequence is synthesized)
agggaggaggtgactgtcatcctggggcctcacgtggcgcagggccggggctgagcctcccgttgtggggacctggacccagggcctctcttggggtctaaaacttttgaggcaaaggag

SEQ ID NO: 977033 - DNA, 120 bp, Artificial Sequence
  ENSG00000260066_17 (sequence is synthesized)
atgcagagatgcccatgccgagacccaacaggccacagaggactgactggtgctcagaatttgatctcagagatcccggtgactctggacctgaggttgcgtgagatcccctcccctgtg

SEQ ID NO: 977034 - DNA, 120 bp, Artificial Sequence
  ENSG00000260066_18 (sequence is synthesized)
ccaggtctcactggtgcagtcatcgtttaacttctgggatctttacagtatcaggaaataactacggaagatagtctgaattgttgggcagcagaaaaccaccaaagttaagttaaaaac

SEQ ID NO: 977035 - DNA, 120 bp, Artificial Sequence
  ENSG00000260066_19 (sequence is synthesized)
aaagaagaaaatcactctcagaaatgcattgtgaactctccaccatacccagtaccgtctaacattttggcctgaatggttgatgttggtgatttacagtccaagcacccatcagctgcc

SEQ ID NO: 977036 - DNA, 120 bp, Artificial Sequence
  ENSG00000260066_20 (sequence is synthesized)
aagggagccctagaggggactgcagtccccacggcctgcttacaaagcagggaaaccgagggccccacgcgggggcttgggaacaacccatgacggagcccctcctccgcggtcgtctct

SEQ ID NO: 977037 - DNA, 120 bp, Artificial Sequence
  ENSG00000260066_21 (sequence is synthesized)
caggcctaggcctgctgggcctggactgttccctctgctctgcttctccaagtctcccgcctcacacctgcctcggcgggtgcacaggtggtctcagagctgacgtctgaccacacctct

SEQ ID NO: 977038 - DNA, 120 bp, Artificial Sequence
  ENSG00000260066_22 (sequence is synthesized)
cccgggggcgtttctgtccctgctcacaggtgcatgaggatcggactccgcctcccatcttggtttcgagtgaagtgacggctgagccaagagcttgctttcagctttagtatttccgca

SEQ ID NO: 977039 - DNA, 120 bp, Artificial Sequence
  ENSG00000260066_23 (sequence is synthesized)
atgaaaagacaagagaaagctctgtgctctcccagggcgtccgctgggtgggagcctgtggctccagctgctcaaagacgagccttcaacttgaaagttctgcagcctggaaattgggag

SEQ ID NO: 977040 - DNA, 120 bp, Artificial Sequence
  ENSG00000260066_24 (sequence is synthesized)
aatgttccctctggaaaatttcctctcaccacgttttccttccatttcttttgtctccatatagcagtccaggaaaccggagaaaacggggcaaagaaaaataaaataaaatgaacccaa

SEQ ID NO: 977041 - DNA, 120 bp, Artificial Sequence
  ENSG00000275155_0 (sequence is synthesized)
gcggggggcgggggggtatgttctttgccttgttctagtgtaagaggtgagattggattgtccaaggctagggcagggcataagactagggttccatcagggctgggggaaagggcaggt

SEQ ID NO: 977042 - DNA, 120 bp, Artificial Sequence
  ENSG00000275155_1 (sequence is synthesized)
ggggtgctaataaggacttgctgagtgatctgatgaccattattaggattagaatatttgttttgtctccttgtggggacagcattcttttgagactgtgcctggtgggttgcgagcttg

SEQ ID NO: 977043 - DNA, 120 bp, Artificial Sequence
  ENSG00000275155_2 (sequence is synthesized)
agatcccttgtggcccctatgcctgcctgccaggactcagctccctcggcctacccagtcctgcacacttaggccagtttgtctatgacaaggagagagaagaatggctgttttgtccac

SEQ ID NO: 977044 - DNA, 120 bp, Artificial Sequence
  ENSG00000275155_3 (sequence is synthesized)
ttgattgccttgctttctagaccatcttgggcccaaaggtctaggctttgcaaactcttcactgcctcgctccttggaggtgcttggaaactttttctccccctgttttctctgtaattg

SEQ ID NO: 977045 - DNA, 120 bp, Artificial Sequence
  ENSG00000275155_4 (sequence is synthesized)
aaatttgccctttcgttacctgggcatgaattattttttgcagtgttgtcattccctatcctgctgtgaggtttatctcttctgttgatcctaattaaataaaacatactgttcacctaa

SEQ ID NO: 977046 - DNA, 79 bp, Artificial Sequence
  ENSG00000234919_0 (sequence is synthesized)
gtttcgaaagttgggaccacaggagggggccaccatacccggctaatttttttgatgttttgtagatatagggtctccc

SEQ ID NO: 977047 - DNA, 120 bp, Artificial Sequence
  ENSG00000234919_1 (sequence is synthesized)
cggctaatttttttgatgttttgtagatatagggtctccctatgttgcccaggttggtctctaactcctgagctcaagtgttctgcccacttcagcctcccaaagtgctagggtgaaagg

SEQ ID NO: 977048 - DNA, 120 bp, Artificial Sequence
  ENSG00000234919_2 (sequence is synthesized)
caaaggccacaggattctgctgcaaattctaacaggaggaggcaatggcagcccttactaaaaccgcagaactacaggaagaggatccctgagtgggattcctgtgtgaaaggcattttc

SEQ ID NO: 977049 - DNA, 120 bp, Artificial Sequence
  ENSG00000234919_3 (sequence is synthesized)
acctttttgtgtatcttcagaatcttaactttcatgagagaagaatagaaatgcaacaatggaacaatccactgtatacacgtagctgacaatttaataaacttgaaggaaatgctacag

SEQ ID NO: 977050 - DNA, 120 bp, Artificial Sequence
  ENSG00000234918_0 (sequence is synthesized)
ggattatctcatcttcatcctgtaattccagtgtttgtcacgtggttgttgaataaatgaataaagaatgagaaaaccagaagctctgatacataatcataatgataattatttcaatgc

SEQ ID NO: 977051 - DNA, 120 bp, Artificial Sequence
  ENSG00000234918_1 (sequence is synthesized)
aagcatcagaaaaaaaagtgggtattcctacaagtcaggacattctacgtgactacaatataatctcacagaaatttaacattaatacattctaagatttaattcttagattcttggtaa

SEQ ID NO: 977052 - DNA, 120 bp, Artificial Sequence
  ENSG00000234913_0 (sequence is synthesized)
atgacacatgtacacagaaaaatacaagaaaacacatacatcaaaatggtaacaatgatatgctggtgaacgtaatgggtatttttattttttgtactttatttaaaaaattcttttaca

SEQ ID NO: 977053 - DNA, 120 bp, Artificial Sequence
  ENSG00000234913_1 (sequence is synthesized)
atgaacatgtattacttttgaaatcaggtgatctgcccttctcgacctcccaaactgctgagattagaggcatgagccaccgtcaccagcccagaaaatattttttaaattgaaaataag

SEQ ID NO: 977054 - DNA, 120 bp, Artificial Sequence
  ENSG00000234913_2 (sequence is synthesized)
atagcatattccacaaatcttctaccggctccattgcggattgaattagatgattctccctattgtttactaagtgtccagttatttctgggcactctccacctccgcaggacactgccc

SEQ ID NO: 977055 - DNA, 120 bp, Artificial Sequence
  ENSG00000234913_3 (sequence is synthesized)
atctccccaacccagggccatttctcaacctagtgctccttctcctactaggggggcagacttcccaacgtgagcacctacatttcgccgtagatgggatccacttgcactctctgaggt

SEQ ID NO: 977056 - DNA, 120 bp, Artificial Sequence
  ENSG00000234913_4 (sequence is synthesized)
tctcaggcagattccttccttacggaagggggtctgatatttaatcaccccatgcactaagtacacacttcatgtgcggatccatcaggataaccccacacaagctgccagttctttgct

SEQ ID NO: 977057 - DNA, 120 bp, Artificial Sequence
  ENSG00000234913_5 (sequence is synthesized)
tgtagtgggtgcccaataaatgtttgaatgcataaagaaagcactcagataagcagagacattttagagctctctggggatgagaaaagagagagctatgggagtgagaattaacttgat

SEQ ID NO: 977058 - DNA, 120 bp, Artificial Sequence
  ENSG00000234913_6 (sequence is synthesized)
tgactatggctggacctggcaaagaacaactcagaagtattggcctcacaatcaccttgttcaggctgcttaatcaatattaaaagtttgctgctcccacacaattttgctaggctctcc

SEQ ID NO: 977059 - DNA, 120 bp, Artificial Sequence
  ENSG00000234913_7 (sequence is synthesized)
aaccctgtgaggatgtcaacagttgaaaaagaagaaataatgagcccagcctgtatttgcaggggagtgttaaaactgccggtggagcaggatagtttgctaaacagccagttgagaact

SEQ ID NO: 977060 - DNA, 120 bp, Artificial Sequence
  ENSG00000234913_8 (sequence is synthesized)
ttcccaaactggtcggcagcagcattgcacacagaagtcccttcttcattgacatggggctaattctagccaccagcactccagcggtacggggcagttttgtggccttttgctattgaa

SEQ ID NO: 977061 - DNA, 120 bp, Artificial Sequence
  ENSG00000234913_9 (sequence is synthesized)
tctgccagatgtgtccaagacacactctcatgggcagaatataaacaacaaaccagtataaagaagtccacagtgatctcacccttcatagaagtcttctttgacttgttttctggcccc

SEQ ID NO: 977062 - DNA, 120 bp, Artificial Sequence
  ENSG00000234913_10 (sequence is synthesized)
aaaaggttgtgttcacgcagggggcaggaattgcaatggaaagaatgcagtgtggaaagccaggctcagttacttaccagccttgctaccttagccaaacggtcatgctctctgagctgt

SEQ ID NO: 977063 - DNA, 120 bp, Artificial Sequence
  ENSG00000234913_11 (sequence is synthesized)
agtttccttcctcatctgtgaatagacttctaccaactctcctcacatgactgttttgagactgaaatgatattataggtatagaaataaatgtaaacataatataaatgtatgaggcct

SEQ ID NO: 977064 - DNA, 80 bp, Artificial Sequence
  ENSG00000234913_12 (sequence is synthesized)
gtaaatatatgagattatctttcatctggcatgcagtagattcttaagaaactcaagacagtattgcgttgtggagttat

SEQ ID NO: 977065 - DNA, 120 bp, Artificial Sequence
  ENSG00000234913_13 (sequence is synthesized)
ttcttaagaaactcaagacagtattgcgttgtggagttatggtgggggcactagatgtcagacctctgtgtgcactcgggcagatcagtttcactaagctcttgtgttttcctcaggaag

SEQ ID NO: 977066 - DNA, 120 bp, Artificial Sequence
  ENSG00000234913_14 (sequence is synthesized)
gcaaaacggtactaaggcgaataataaggaacatcacagaattgatatgagggtgaagttaaataatgcgggcaaagcacttcccaacagtacctagcacatagtgagcacttaataaat

SEQ ID NO: 977067 - DNA, 120 bp, Artificial Sequence
  ENSG00000234913_15 (sequence is synthesized)
tgagcacttaataaatgtaagctgtggctgctgctgctgtggccatcagggagatagggaaatatgtcaataagaaatgtatattggccgggcacggcggctcatgcctataatcccagc

SEQ ID NO: 977068 - DNA, 120 bp, Artificial Sequence
  ENSG00000234912_0 (sequence is synthesized)
acttccgcccaggggagtgggaagtaagtggagacacgtgctttggcctgttggaggggaaacccgctctcgcctcctggtggtcgccgactcgcagtccgcaggatgactcagggcagc

SEQ ID NO: 977069 - DNA, 120 bp, Artificial Sequence
  ENSG00000234912_1 (sequence is synthesized)
cctgaccacagttccgccgccatcggccctagcctgcggaattgggctcgccccgggacgataacagagctctgccgggggctggaggcactgaccgggtgaccagagacccagagacca

SEQ ID NO: 977070 - DNA, 120 bp, Artificial Sequence
  ENSG00000234912_2 (sequence is synthesized)
gaccccctccacggcgcccgggatttcggggacggcttctcccatcgcaagtttcaacagaaaatgagaaatatcccccgacgattggctgaaaacatgcagcaaccactattttcttcc

SEQ ID NO: 977071 - DNA, 120 bp, Artificial Sequence
  ENSG00000234912_3 (sequence is synthesized)
tgcccctcgttgatgagagcattcgaagtgacctcagcagggcatccaggtcagtttctggaagacttgtgtgtgtgatgaatgaatatctggttttgtctctgctgggcctgtgtgcct

SEQ ID NO: 977072 - DNA, 120 bp, Artificial Sequence
  ENSG00000234912_4 (sequence is synthesized)
ggaaaggaattgttttggcctaggatcatccaggtttgtttggtttagttcttgaccacatattttttgaatggtgactgcttaagaccctgttgtgtatggctataaatagatacacgc

SEQ ID NO: 977073 - DNA, 120 bp, Artificial Sequence
  ENSG00000234912_5 (sequence is synthesized)
caaggtgaccacatactctgtggttcctgtgcccgccggccatgtgtctgagtgtgtagcctctcatcatctaaaggaactttggctgcagaggggaggcctggtcccatgggaagtttt

SEQ ID NO: 977074 - DNA, 120 bp, Artificial Sequence
  ENSG00000234912_6 (sequence is synthesized)
gggagcgcagcagcaggtgggttcaaacgacccagcaagtgcctccttagcacttagaggcggaggccaccacgttgtccacgtggggtttctgatcccagctccccaccagcctgctgg

SEQ ID NO: 977075 - DNA, 120 bp, Artificial Sequence
  ENSG00000234912_7 (sequence is synthesized)
gtacctccattacttcttcagtaagatggggacactgaagatgaccatgcctcccaccagattggtgctttttttgttttaataagggacagagtctcactatgttgcctataggctggt

SEQ ID NO: 977076 - DNA, 120 bp, Artificial Sequence
  ENSG00000234912_8 (sequence is synthesized)
ctcaagctcttggcctcagttttcctgcctcagccttcaaatatgctggggtgacaggcatgagccactgcactggcccagattggtacatttgagggttaaatgagcaaatcctataaa

SEQ ID NO: 977077 - DNA, 120 bp, Artificial Sequence
  ENSG00000234912_9 (sequence is synthesized)
gattggtacatttgagggttaaatgagcaaatcctataaagcactcaggagagggctgtggggtttgggctggagtgcggtggtgtgacctcggctcactgcatcctccgcctcccgggt

SEQ ID NO: 977078 - DNA, 120 bp, Artificial Sequence
  ENSG00000234912_10 (sequence is synthesized)
agctaccgcgcccggcacaaagcattttcagctgtgaaattccctggggtgctgcagtagaggaaggtttggggtcttgacgggtgctatttgccacggaaagatgccttcctgctccca

SEQ ID NO: 977079 - DNA, 120 bp, Artificial Sequence
  ENSG00000234912_11 (sequence is synthesized)
gccacggaaagatgccttcctgctcccagggcaggagagccgaggtaagacttactgtaggctgtcgttttttttgtttgttttttgtctttgcgatggagtctcactctgtcgccaggc

SEQ ID NO: 977080 - DNA, 120 bp, Artificial Sequence
  ENSG00000234912_12 (sequence is synthesized)
cttcctgcccctcgttgatgagagcattcgaagtgacctcagcagggcatccagaccccaagacaatgaagagccttcattggctgggcatggtggcttgcgcctgtaatcccagcactt

SEQ ID NO: 977081 - DNA, 68 bp, Artificial Sequence
  ENSG00000234912_13 (sequence is synthesized)
aggccgaggcgggtggtcaggagttcgacaaccaggtgtcgtggcaggcacctgtaatcccagctgct

SEQ ID NO: 977082 - DNA, 87 bp, Artificial Sequence
  ENSG00000234912_14 (sequence is synthesized)
tgctcgggaggctgaggcatgagaatcagttgaacccaggagacagaggtttcgagaagacagagcaagactttgtctcaaaaaaaa

SEQ ID NO: 977083 - DNA, 120 bp, Artificial Sequence
  ENSG00000234912_15 (sequence is synthesized)
cctgcccctcgttgatgagagcattcgaagtgacctcagcagggcatccaggtatgtcaagcatggtgacaaagtgttcaggtcagacggtctggggaaaggctcctgtgttgttgagcc

SEQ ID NO: 977084 - DNA, 120 bp, Artificial Sequence
  ENSG00000234912_16 (sequence is synthesized)
atggtaccaggcagcccaaccctgacctaaagtaaattcccggaagaagtctttcctgggttttgaatttgcagtaacaggtgtgagcattctagcagcagtttgatgatcatgtatgat

SEQ ID NO: 977085 - DNA, 120 bp, Artificial Sequence
  ENSG00000234912_17 (sequence is synthesized)
actgcaaacaggacctacgtttaaagaaaatggttgtagttagtatcagagagcccttgcttttcaaaacttcataaacaatgttactgtcatgtctttcattcaataaacatttgttga

SEQ ID NO: 977086 - DNA, 120 bp, Artificial Sequence
  ENSG00000234912_18 (sequence is synthesized)
tgtaccagtgagggcaaccagaggtcactctcatagccatcttggttttggaggattttggccgtcttctttactgcagcctgtttgatcagcaaggtctttatgagctgtatgacctag

SEQ ID NO: 977087 - DNA, 80 bp, Artificial Sequence
  ENSG00000234912_19 (sequence is synthesized)
gacaaggtccagcaattcttccttggttgtgggattagactcagagcaagattcctgttcgttgcttcctgtgcccacag

SEQ ID NO: 977088 - DNA, 120 bp, Artificial Sequence
  ENSG00000234912_20 (sequence is synthesized)
tcagagcaagattcctgttcgttgcttcctgtgcccacagacagtgaactgtcgggaatctaccaggtcttttggagcaataggcttttcagggggtatcccaataggccaggacggcct

SEQ ID NO: 977089 - DNA, 120 bp, Artificial Sequence
  ENSG00000234912_21 (sequence is synthesized)
gcatcttcacgtagcccctctgctcttgagctttctccttcctgccacctggggtggtggaaagggcattgggtttggagcagaaatgacttaggtgtgaacccagctctgccacttcct

SEQ ID NO: 977090 - DNA, 120 bp, Artificial Sequence
  ENSG00000234912_22 (sequence is synthesized)
ggccggctgtgcttggaaaagtaaccaagcatctccggagcgccccacttctcatctacaagacaggagtggtctttgcacttaattcagagggttgcatgaggagtagagagataatgc

SEQ ID NO: 977091 - DNA, 120 bp, Artificial Sequence
  ENSG00000234912_23 (sequence is synthesized)
tttcacggctccaggaacccagcgggctttcaagaaatgggatgttccttctgattccctcgctccagggccctcccctctggcccaggctctagtccccattaatcacaccgcgcgggc

SEQ ID NO: 977092 - DNA, 120 bp, Artificial Sequence
  ENSG00000234912_24 (sequence is synthesized)
acggcgcccgggatttcggggacggcttctcccatcgcaagtagggcttggacgggaggcgacaaaagagaacttggtccgcacacagccaccgaaattggaatgaggagctgtagggag

SEQ ID NO: 977093 - DNA, 120 bp, Artificial Sequence
  ENSG00000234912_25 (sequence is synthesized)
gccccgtagccagcagaaaagcattggggtccctggctgggttagcccaggtttctaggagtgtggtaagcgtcgaatgacttttgtccttttaaagcacattatgttactttttccccc

SEQ ID NO: 977094 - DNA, 120 bp, Artificial Sequence
  ENSG00000234912_26 (sequence is synthesized)
ggggtttgggctggggcctgggagcactttagacgtggtagctatgttgttgtcacctttctcctctttcaaagcattttttgtttgtttgtttttgtttttgagacagagtttcgctct

SEQ ID NO: 977095 - DNA, 120 bp, Artificial Sequence
  ENSG00000234912_27 (sequence is synthesized)
tacagacatgagccactgcgcccagccaggctgttgtttttttacctccttgtttgcacaatttgggccactcacaagagtgtataccctgtgataaacagttacctacattctcctctg

SEQ ID NO: 977096 - DNA, 120 bp, Artificial Sequence
  ENSG00000234912_28 (sequence is synthesized)
ctgtgataaacagttacctacattctcctctgcatgcttgtctttagaggaaggaaatgtattaattgcccaaagtaatatattgtgttaagatgtgatatatactggggaaaaaaaaag

SEQ ID NO: 977097 - DNA, 120 bp, Artificial Sequence
  ENSG00000234912_29 (sequence is synthesized)
gccccgtgtaagtcactggaaggtcacatgttcacagactgtcagctgtggagggttatgtaacagtggttatgcaatgccacgttagaactacagcccgagcagcaaaacatttagata

SEQ ID NO: 977098 - DNA, 120 bp, Artificial Sequence
  ENSG00000234912_30 (sequence is synthesized)
agccctgaccacagttccgccgccatcggccctagcctgcggaattgggctcgccccgggacgataacagagctctgccgggggctggaggcactgaccgggtttcaacagaaaatgaga

SEQ ID NO: 977099 - DNA, 61 bp, Artificial Sequence
  ENSG00000234912_31 (sequence is synthesized)
tctgggaactacaacccagttagggagacaaggttaaatgatcacacttaagagggcataa

SEQ ID NO: 977100 - DNA, 120 bp, Artificial Sequence
  ENSG00000234912_32 (sequence is synthesized)
tgtagttttcgcctgtccaggacgccttcacccctgcttcctttgagaaaagtccctctcccactccaagtggtactgacggggatcacccacacaaaagaaacctggaggctcccctcc

SEQ ID NO: 977101 - DNA, 120 bp, Artificial Sequence
  ENSG00000234912_33 (sequence is synthesized)
gccacattttaccttctatgcgtggctggccccattgagtagatttctgaaagtcaaatttctgacatgagcctatttgaaaactttgctcagttgtcatcttctatcaggatgagttat

SEQ ID NO: 977102 - DNA, 120 bp, Artificial Sequence
  ENSG00000234912_34 (sequence is synthesized)
gttgtcatcttctatcaggatgagttatggacgaagccccccataaatcctaaggcacatcttgaagcccctaaaatccaaaggcatggccgggctcacatctgtaatcccagcactttg

SEQ ID NO: 977103 - DNA, 72 bp, Artificial Sequence
  ENSG00000234912_35 (sequence is synthesized)
aggagttcgaggcttacccgggtgtggtggcacactcctgtaatgccagctacttggaggctgaggcaggag

SEQ ID NO: 977104 - DNA, 86 bp, Artificial Sequence
  ENSG00000234912_36 (sequence is synthesized)
ctgagatcacctctctcaaacaaaaacaaaaaaaatcctaaggtacgtgagtctccttcactaatgtactgtctttgttccaagat

SEQ ID NO: 977105 - DNA, 120 bp, Artificial Sequence
  ENSG00000234912_37 (sequence is synthesized)
gtgagtctccttcactaatgtactgtctttgttccaagatacttcaccccttcgaaagttaacggggaagatcaaaaggaggtattaagagatcaaaatgaaataaaggcttcatgcgtt

SEQ ID NO: 977106 - DNA, 120 bp, Artificial Sequence
  ENSG00000234912_38 (sequence is synthesized)
ctggaaaggaattgttttggcctaggatcatccaggaaccatttttccctctaatggtagtttacgttagaagtatttcctgttctaggcccggtgcagtggctcatgtctgtaatccca

SEQ ID NO: 977107 - DNA, 89 bp, Artificial Sequence
  ENSG00000234912_39 (sequence is synthesized)
tcgtcgtgccactggacttcagcctgggcgacagtgagactgtctcaaaaaaaaaaaaaagtatttcctgttcctacacattggcccat

SEQ ID NO: 977108 - DNA, 120 bp, Artificial Sequence
  ENSG00000234912_40 (sequence is synthesized)
cccaggtctatgcatggggacaccgtctttttggctcatgttgagccacatgtcctgcagtatttggaagtgttctgggacagactttgttcacataaagatcgcgtgcccttcactgca

SEQ ID NO: 977109 - DNA, 120 bp, Artificial Sequence
  ENSG00000234912_41 (sequence is synthesized)
gtgatgaagctggagactgtctttctctgtgacaaggacctcagccctggatctgtcctctcctagtgcccacctcattcatggagctcaccccgtggttttggaattgtttccttccct

SEQ ID NO: 977110 - DNA, 120 bp, Artificial Sequence
  ENSG00000234912_42 (sequence is synthesized)
gtgccttagcttccctgaacactacttctacactagctccttgagagtgggagccctggacttattgctttttcaacagagtagatatgtgtgtttcatttatatcagtatttaaattgc

SEQ ID NO: 977111 - DNA, 120 bp, Artificial Sequence
  ENSG00000234912_43 (sequence is synthesized)
tagcaacaagaccacaaaaactacattctcatagaagcctgtttgggtttgatgtggttacatgtgattaatgtatttgaaatagttatttgttgtgattttttttttcagatcaattat

SEQ ID NO: 977112 - DNA, 120 bp, Artificial Sequence
  ENSG00000234915_0 (sequence is synthesized)
aattttagagattaattcccaggactttaaaaattcctgaatataagccatttgaaatcagtaacagtaggaaatactgctttttctccctgaactttttaaatgataaaaaaaacttga

SEQ ID NO: 977113 - DNA, 120 bp, Artificial Sequence
  ENSG00000234915_1 (sequence is synthesized)
gttctcaaactatcacttccttttattgtctgtaggagtttaagccaatttcattttgattaatgttctctctatagctaatctttaaatttttttgaggctggacatgtggaagaataa

SEQ ID NO: 977114 - DNA, 120 bp, Artificial Sequence
  ENSG00000234915_2 (sequence is synthesized)
aatcagtcaagtggtagattagcccaattgacttttatatcccagtctctgttatcctgacctaacttttttcctctatcaaattgagaaaaaatgatcagaaagatagtactatgctaa

SEQ ID NO: 977115 - DNA, 120 bp, Artificial Sequence
  ENSG00000234917_0 (sequence is synthesized)
ccccaacacctggaagaactgagcttctggaatctaatagatgctaaataaatatttgttgcatgaatgatagtggtatgagaggaagagggaaaaaaaacggaaaaaggcttcttggaa

SEQ ID NO: 977116 - DNA, 120 bp, Artificial Sequence
  ENSG00000234917_1 (sequence is synthesized)
gaggtgacacttgaggatatatttccaattaaatatacctaagtgactgcccacctctgcaacccaatgtcacattcgagtcttactgaactacttgactgcatttcccgagatctcacc

SEQ ID NO: 977117 - DNA, 120 bp, Artificial Sequence
  ENSG00000234917_2 (sequence is synthesized)
cttctcgcctgtaccctgtgcgcggaaagtcagccctccaccttctccctgcttccactcccaaaatacttcgtggttttgcagctctggagtatttaccgtgttggctgtttaaatttc

SEQ ID NO: 977118 - DNA, 120 bp, Artificial Sequence
  ENSG00000234917_3 (sequence is synthesized)
tgcctccatcagaaggcagaaactgactcgcgaactattccatccccagccgatagtagacgcttaaaaaagaacgaaagaaggtgggtggaggacttcagtaacatcaggtggcagcct

SEQ ID NO: 977119 - DNA, 120 bp, Artificial Sequence
  ENSG00000234917_4 (sequence is synthesized)
caattttatcgtttgtgaaacgtggatagtaatccctctatcacgtggctgttgcaggaataaagtgaaaaaacaaaacaggctagcttgttcaataaatgtgagttgaattaaatctga

SEQ ID NO: 977120 - DNA, 120 bp, Artificial Sequence
  ENSG00000177112_0 (sequence is synthesized)
accgacccgcgctccgcagctcctgagggctttcgagcccagatggtcatctgagacgagaggtggcggcgaaggagagtctcgcctgtcacgctcccggagcaggggcttcatgaggtg

SEQ ID NO: 977121 - DNA, 120 bp, Artificial Sequence
  ENSG00000177112_1 (sequence is synthesized)
gccatggaaacagcctggcagactcccatctctcctggtgccatctccggagcggaaagtggagcgccccgctggcgaccaaggccgcactgagagccctggtttggtcaacagttgggc

SEQ ID NO: 977122 - DNA, 120 bp, Artificial Sequence
  ENSG00000177112_2 (sequence is synthesized)
tccaagaagtctcttcctttcactctgctgagtgaagcccttcctgccctcaggctggaccatggcttccatgctgcccctcttttcaaggctgcttgtctacagttctacaggtttcta

SEQ ID NO: 977123 - DNA, 120 bp, Artificial Sequence
  ENSG00000177112_3 (sequence is synthesized)
agccacagggagccctggtattccttgaacatgcatacctttcccagcgtgagggacatggaccgtgccgtgcgagggaccccatcttctgcagcaggagggagcagagaagagaacaca

SEQ ID NO: 977124 - DNA, 120 bp, Artificial Sequence
  ENSG00000177112_4 (sequence is synthesized)
gggattcctgttgctaaaaggtctgttttctcctgctagccaccctcatcagccagagttcaaaccctgacagtgcccatggagagatctggtccaaggcaccaacctcttcctgctgga

SEQ ID NO: 977125 - DNA, 120 bp, Artificial Sequence
  ENSG00000177112_5 (sequence is synthesized)
ctgagaaagagcctcctactgtgtctctctttacctcagcttttgcacacctccaatatattgtccactgaagtcagaataatctaaaaataaaggctgattacctcatgtggtataaac

SEQ ID NO: 977126 - DNA, 120 bp, Artificial Sequence
  ENSG00000177112_6 (sequence is synthesized)
aaaaaattgtaaccaccttggcagattgtggtgtaagcacaaaaagagttatcatttgcaaagaacgctgagctgccaacaccatgctgagggcagtgggacttcccagagtagtagaat

SEQ ID NO: 977127 - DNA, 120 bp, Artificial Sequence
  ENSG00000177112_7 (sequence is synthesized)
acatgcagcctggtgtatattgagtttttgagcctatcactcagattctattctggaaatttcctctccttgttgaccctgcccccatttggtcaccctccctgccctaggactgagtac

SEQ ID NO: 977128 - DNA, 120 bp, Artificial Sequence
  ENSG00000177112_8 (sequence is synthesized)
gaaggaaaggttattctactattctgtgctgggaggcagacatcgtcatacttaccaaggctgcttatgagatcttggagatacagaatggaaatgaccccacagtctctgggtaacacc

SEQ ID NO: 977129 - DNA, 120 bp, Artificial Sequence
  ENSG00000177112_9 (sequence is synthesized)
ctggtattccttgaacatgcatacctttcccagcgtgagggacatggaccgtgccgtgcgagggaccccatcttctgcagcaggagggagcagagaagagaacacaggttcagggtacat

SEQ ID NO: 977130 - DNA, 120 bp, Artificial Sequence
  ENSG00000236202_0 (sequence is synthesized)
agattaccaagctcttctgggaagacaatgtgttccaacaatggcccgttccacatgctttctttatatgagtgacactcctctttatccacaagtgagatctatgtacctctcctttga

SEQ ID NO: 977131 - DNA, 120 bp, Artificial Sequence
  ENSG00000236202_1 (sequence is synthesized)
agaagcacgaaccagcctagactgatagatggcatacaaaggctcacatggagtggaactgaggtccccagccagcagccagcagccagcagccagcctcaactaccagcccagtgagtg

SEQ ID NO: 977132 - DNA, 120 bp, Artificial Sequence
  ENSG00000236202_2 (sequence is synthesized)
aatgaagcttcaaatgattctaccactcagcttttgatccacttcagctgttgcaatgtagcgctaagacaagttatccccactaaatcctgcccaaattacagattaatgagcaaaaca

SEQ ID NO: 977133 - DNA, 120 bp, Artificial Sequence
  ENSG00000236200_0 (sequence is synthesized)
cttcactttcagagacttcagcgttccatgtctgctgtgctgtggaacccagagtgctcttgcctggatggctgagaatcccttggaccctggaagcacctactccatgatggcccgcag

SEQ ID NO: 977134 - DNA, 120 bp, Artificial Sequence
  ENSG00000236200_1 (sequence is synthesized)
gaggaccaaactggagacagtcctggctctgaggaaacaggaaggaaggagggtgaaaggaacgtccacctgcacacaaaggaaagatgaaaaagagtcacctaccatgggacctggcaa

SEQ ID NO: 977135 - DNA, 120 bp, Artificial Sequence
  ENSG00000236200_2 (sequence is synthesized)
agtacttcagaacttttattccttccagaagcaggtaagtaccccaagtcctcatcgtattcccagcatagggcttggtatacggggggatatttcattcagcatattggctgaatgaaa

SEQ ID NO: 977136 - DNA, 120 bp, Artificial Sequence
  ENSG00000236200_3 (sequence is synthesized)
atgctacagttcatttattgagtggaaacagttccctacttattgacaattcatttactgaataggtaatcagtaaatacattttgtatcaatctaacaattaggcataaactacagcct

SEQ ID NO: 977137 - DNA, 120 bp, Artificial Sequence
  ENSG00000236200_4 (sequence is synthesized)
cctacacccaatatctgaggtgttctaagatttaactactcaaatgtttgatatttgataaattgtttaagttctctgcaattcagttccacctcctataacagcacttctgaaaatgtg

SEQ ID NO: 977138 - DNA, 120 bp, Artificial Sequence
  ENSG00000236200_5 (sequence is synthesized)
gtctgtgaacctctgaggggttcctgagacactgtcagggagcaagtgagacatggctatttttataatattaaactattagcctttgtcactgtgttgtcatttacctaggataggtac

SEQ ID NO: 977139 - DNA, 120 bp, Artificial Sequence
  ENSG00000236200_6 (sequence is synthesized)
agtgctgcggcgagtgcggggcgagaggttcgcgctggtggagcaccccagcttgcaggttcagcgtgggtgtctctcccgggcacatcgagctgtctagaggaaccctcttcccctggc

SEQ ID NO: 977140 - DNA, 120 bp, Artificial Sequence
  ENSG00000236200_7 (sequence is synthesized)
ttcacggcccagaggacgcacggctctctcccctcgagagcgtgtttcgtcgcccgcgcggggaacgcaaagtgctagggtagtcacggccacttcacgccgagggacatctcatctcgc

SEQ ID NO: 977141 - DNA, 120 bp, Artificial Sequence
  ENSG00000236200_8 (sequence is synthesized)
tccttccagaagcaggtgacagggcccagtcaccaaccaagctggagctgaggctcggcagtgatgatcatcctggatctctgggcttcaggcagccaaggagaccatgctccactgatg

SEQ ID NO: 977142 - DNA, 120 bp, Artificial Sequence
  ENSG00000236200_9 (sequence is synthesized)
tcaacacaccctgagcttcagtgccacatttcctggttttccttacacatggctgcttaccctgcttctctgcctccttcacaggctcccctccctcctctgtccacctagccccagcgt

SEQ ID NO: 977143 - DNA, 120 bp, Artificial Sequence
  ENSG00000236200_10 (sequence is synthesized)
accactgtacactcataatttaggagaaaagagcaaaaactctagattgcatgtaacaatatcccttgatgaagcagtaaaaaattattaatgttgttaaatcttaatcattgagtacat

SEQ ID NO: 977144 - DNA, 120 bp, Artificial Sequence
  ENSG00000236200_11 (sequence is synthesized)
gtgttaagtcctcataagacacttttggttgtctcaaagaaatctatctgtgttgtttgagttgtgaattacactagctgctttgttcatggaataccagttttatttgaaaaaaattac

SEQ ID NO: 977145 - DNA, 85 bp, Artificial Sequence
  ENSG00000236200_12 (sequence is synthesized)
ccagttttatttgaaaaaaattatcactttgggaggcagaggtaggaggatcgcatcagcccaggagttcaagaccagcctgggc

SEQ ID NO: 977146 - DNA, 120 bp, Artificial Sequence
  ENSG00000236200_13 (sequence is synthesized)
tctacaaaacataaaaaattatccaggtgtgatggcacacgcctatagtcccagttactcggaaggctgaggactgcttgaggccgggaggatgaggctgcagtgagccatgaccatgcc

SEQ ID NO: 977147 - DNA, 120 bp, Artificial Sequence
  ENSG00000236200_14 (sequence is synthesized)
caggaccctgtctttaaaaaactctatgaaaatttaaaaaaagaaaaaagtgactgacaaactatggcttttcagacttaggtatctggcagacatcttcttgaaaatgcatgaagtgaa

SEQ ID NO: 977148 - DNA, 120 bp, Artificial Sequence
  ENSG00000236200_15 (sequence is synthesized)
cgcctgtcatgtcaaggaaaacaaaagtcagtatctgttgccaatagtaaaattcaggctttcaaacaaatattagcatttcagagaagcggcattcacaactgtgagcttgaaacttcc

SEQ ID NO: 977149 - DNA, 120 bp, Artificial Sequence
  ENSG00000236200_16 (sequence is synthesized)
agaagcggcattcacaactgtgagcttgaaacttcccaaaattccaagttttttgattattagtgatactaacaaatgtaatttttaaaatatttatggccgggcgtggtggctcatgcc

SEQ ID NO: 977150 - DNA, 77 bp, Artificial Sequence
  ENSG00000236200_17 (sequence is synthesized)
gcagatcacgaggtcaagagattgagtccatcctggacaacatggggaaacccacctgtagtcgcagctacttggga

SEQ ID NO: 977151 - DNA, 120 bp, Artificial Sequence
  ENSG00000236200_18 (sequence is synthesized)
tataataatatttaacaacatttggaggctgtcgataggccagtgcaccaatattttctaaatgaccaaagtatgatgttataaaaggatgcatgggtgaaagatccattcagaagagac

SEQ ID NO: 977152 - DNA, 120 bp, Artificial Sequence
  ENSG00000236200_19 (sequence is synthesized)
tccattcagaagagaccaatgggttttagtgttaacagtatgaaacgttcactgacctttcagattccacactgcaactaacttttaagaacctgccaggagcagtggctcacacctgta

SEQ ID NO: 977153 - DNA, 120 bp, Artificial Sequence
  ENSG00000236200_20 (sequence is synthesized)
actttgggaggttgaggcaaaagaaatcgcttgagcccaggagtttgagactacctgggcaagatggcaagaccccatttctacaaatagccatgcatgcctgtagtcccagctactcgg

SEQ ID NO: 977154 - DNA, 120 bp, Artificial Sequence
  ENSG00000236200_21 (sequence is synthesized)
tggtcaacaaagcaagacatcatctcttaaaacaaacaaacaaacaaaaaaagttgttacttccattgagttttggtggatatcagagaataataaacacaattacctgaaagactatta

SEQ ID NO: 977155 - DNA, 85 bp, Artificial Sequence
  ENSG00000236200_22 (sequence is synthesized)
gcttgagcccagttttgagaccagcctgggcaacaaggcaaaactccatctctacaaaaaattaaaaaattagctgggcgccagt

SEQ ID NO: 977156 - DNA, 86 bp, Artificial Sequence
  ENSG00000236200_23 (sequence is synthesized)
agcccagttttgagaccagcctgggcaacaaggcaaaactccatctctacaaaaaattaaaaaattagctgggcgccagtgacaag

SEQ ID NO: 977157 - DNA, 120 bp, Artificial Sequence
  ENSG00000236200_24 (sequence is synthesized)
gttgagatcactgcactgcactccaacgtgggtgactggagtgaaaccctattttaaaaaaacaaaaacaaactcctttttccaattacatatctacgcaaggctgaattttcttcctat

SEQ ID NO: 977158 - DNA, 120 bp, Artificial Sequence
  ENSG00000236200_25 (sequence is synthesized)
tccaattacatatctacgcaaggctgaattttcttcctatacttgaacctaaacagtgtatcacaatagattgaatcaagaagtgacattaaggccagcgcggtggctcacgcctgtaat

SEQ ID NO: 977159 - DNA, 120 bp, Artificial Sequence
  ENSG00000236200_26 (sequence is synthesized)
gggcaagtaccagcacctcagcctagtcggtgcaggtgatagttatgaagctaagtcctaggccaggaacaaggcagccagtccagccagcatagttgacccctctatggactggggcca

SEQ ID NO: 977160 - DNA, 120 bp, Artificial Sequence
  ENSG00000236200_27 (sequence is synthesized)
gtgcagccacagcattccagtgctcagcccctcagctgggagatcagcgactgctgccacgtgcccagaaatggctcgtcctttcactacagcggaatgcaatgagggtgggtgagaaga

SEQ ID NO: 977161 - DNA, 120 bp, Artificial Sequence
  ENSG00000236200_28 (sequence is synthesized)
ttagagagcaaggcagctctctgggctgaaaaatgttaacagttaaagaccttgctaagtcaaagtctgcccctatctctgccctctcctgcttctaggtgaccaaaaaaaaaaaaaaaa

SEQ ID NO: 977162 - DNA, 120 bp, Artificial Sequence
  ENSG00000236206_0 (sequence is synthesized)
ccgagacttttaagtcgagtgttcctgtggggccaaaaggatggtttcagagaaatcccaggaagtgagagtgctgggatatgcgaggggcccacggagccctcccctgcgtgtctgaga

SEQ ID NO: 977163 - DNA, 120 bp, Artificial Sequence
  ENSG00000236206_1 (sequence is synthesized)
tcacaccctgcgggtaccctgccgtcgtgtgctgaaggaggtgactggatctcgactccagagtttgctcctgagatcgaaaaacaaaacaacccaataatagtcttgatttaagttcct

SEQ ID NO: 977164 - DNA, 120 bp, Artificial Sequence
  ENSG00000236206_2 (sequence is synthesized)
ccaccaccagcagccatgacttcttggcaagactccaaacccctccctaccttcactctttagagagaaaggctagacttacagggtgaccaataatgctggtttatccaagaaggggat

SEQ ID NO: 977165 - DNA, 120 bp, Artificial Sequence
  ENSG00000236206_3 (sequence is synthesized)
tcccaagacacagggctgtcagtgctaaaccagggtgttcctgtccaacttggcttccataagaacttcaatcaaattcacagaccacattcaaatttgtcaattgtcctaataatagct

SEQ ID NO: 977166 - DNA, 120 bp, Artificial Sequence
  ENSG00000236206_4 (sequence is synthesized)
taaaaagagcaggttactcactttgtagaaagtccatcaatttgggtttgtttagtatttcttcataattacatgtaagttatacaatttttggccgaattgtataaaaagtgatgctat

SEQ ID NO: 977167 - DNA, 120 bp, Artificial Sequence
  ENSG00000236206_5 (sequence is synthesized)
gttctaatggcatcctatcaggacatatacaatatccatttatcctatgctgttttaacttttataagataatgtctgactcctctattgtaaaattaactattaaatatttggtattaa

SEQ ID NO: 977168 - DNA, 120 bp, Artificial Sequence
  ENSG00000236206_6 (sequence is synthesized)
tccttatcaaatgttcacttactagttttaggatccagtgatgagtcttccttgaatcagtttttatgataatgattgcacaatgatcctaactctatcatttcttctatgcttattagt

SEQ ID NO: 977169 - DNA, 120 bp, Artificial Sequence
  ENSG00000236206_7 (sequence is synthesized)
tggcatcttactacaaggtagagttttccattctgccccagttatttatttattcatgcatttattcatgcatttattcatatcagcacagacttgtgaatttctattttattcagtgga

SEQ ID NO: 977170 - DNA, 120 bp, Artificial Sequence
  ENSG00000236206_8 (sequence is synthesized)
ttatatctgttattagcattatttgttttgatgcttaaattatcccagatttggtcagtggaaactttattaagttggtttctgtgttcttatgaataaaaggaataataatactgctta

SEQ ID NO: 977171 - DNA, 120 bp, Artificial Sequence
  ENSG00000236206_9 (sequence is synthesized)
attagtcctgtccctgaaaatccaagctgcgtgtttgtcagtcttatggctgatttaactcataggcccaggagagaaaggatagaaggaagcctgaatgaccagcaaagaatctgcatc

SEQ ID NO: 977172 - DNA, 120 bp, Artificial Sequence
  ENSG00000236206_10 (sequence is synthesized)
tcaacactcagagcatgtatgctacattcttcagaaaccttcaggagtcatagactgtggtcagttcttcgtcagaattattttagatttacttcagttgttttttcatcaaatgcacat

SEQ ID NO: 977173 - DNA, 120 bp, Artificial Sequence
  ENSG00000236206_11 (sequence is synthesized)
aaaacatggaattgttcttagctgtgcagaccttgtctattttctgaaaggaaaaacaatgttaatttttaaagccctacatacattacatctttgtacttttcaaatcattgtgtcacc

SEQ ID NO: 977174 - DNA, 120 bp, Artificial Sequence
  ENSG00000236206_12 (sequence is synthesized)
cccttcccttctcttttgaaggtgcctggctgaatctctcctattctcacaatggctttgcctccattctgctgaagtcgcttcccattgctcacattattatactgtttttacttcact

SEQ ID NO: 977175 - DNA, 120 bp, Artificial Sequence
  ENSG00000236206_13 (sequence is synthesized)
tccaagcttgtttctgactacacaaagggtgctgtaattctgagttccctatatatagagttgcttttccaggaacattattaataaaaggaaaggtcttccttttccattatggagata

SEQ ID NO: 977176 - DNA, 120 bp, Artificial Sequence
  ENSG00000236209_0 (sequence is synthesized)
tttgctggaaaagaaaacagcagaagccaaggtaaataacatctttgtgtggcgtgttgcagctgtcacagccgccagcagacagccgactccctcaccagtaaacaccgcggcttaggt

SEQ ID NO: 977177 - DNA, 120 bp, Artificial Sequence
  ENSG00000236209_1 (sequence is synthesized)
gttgcccaccgggcaccggaaggcggcccccttctcgctctccagtgaatgttcctaaaacaactgcggggtccaagagcacagggagaacagcgcccctgacgcaggctgcgcacccgc

SEQ ID NO: 977178 - DNA, 120 bp, Artificial Sequence
  ENSG00000236209_2 (sequence is synthesized)
ccggaggaggcagtgcgtcagtcctgaggtcaccgccacccgctcccgggggacggccgcctgggcaggtgaggaggcgaccacctcccagacgcctgccggagctgcggcgcaccgact

SEQ ID NO: 977179 - DNA, 120 bp, Artificial Sequence
  ENSG00000236209_3 (sequence is synthesized)
gccacctggaggctccctcgagatctgcatttaggaggcgacgggtcctttcatcgttttattcattaaacatttatcgaggcctggagcgatggttcaagcctgtaatcccagcacttt

SEQ ID NO: 977180 - DNA, 89 bp, Artificial Sequence
  ENSG00000236209_4 (sequence is synthesized)
agaggcggaagttgcagtgagcggagatggagccactgtgtgttaggctctggcgacgtggggagaaataaagataatgtcttgtttcc

SEQ ID NO: 977181 - DNA, 120 bp, Artificial Sequence
  ENSG00000236208_0 (sequence is synthesized)
ggagcagaataatctgcagctaggggaaggccaggctgggtctcagggtgagagttacagaaggatatgaaataatcggggaagaggcaagttacagcgggtatcctgatgcagaccatc

SEQ ID NO: 977182 - DNA, 120 bp, Artificial Sequence
  ENSG00000236208_1 (sequence is synthesized)
cccagccagaaacacagccgcagaactgagcccaagctccagaccaaaaactgagcccaagctcagggtctgcatggcccagagctggcatctgtccgggggactggcccaggcaaagtg

SEQ ID NO: 977183 - DNA, 120 bp, Artificial Sequence
  ENSG00000236208_2 (sequence is synthesized)
accactgtcatccagtccaggagctgtgagctgcatggaaagaatgtgaatgaagacacaactctaaatgtggaaccatggacgctatgtgagccagtgtgctccctagccgtccagaaa

SEQ ID NO: 977184 - DNA, 120 bp, Artificial Sequence
  ENSG00000236208_3 (sequence is synthesized)
aaataaagctgtcctcaggcggcgtgctgtggtggcccatccttgcagtggcttcactggctgcacccctcagcaaggcctctggaacactgtgagggcagcacacccacccaacagcgt

SEQ ID NO: 977185 - DNA, 120 bp, Artificial Sequence
  ENSG00000236208_4 (sequence is synthesized)
gggtaaaaaacggtctagctatggccttgccgcacgtggtgatcgctaacttaattttgcagcaaatttaatctgctctgtattggtattaattagaaatgttcaaaagctggtaataag

SEQ ID NO: 977186 - DNA, 120 bp, Artificial Sequence
  ENSG00000236208_5 (sequence is synthesized)
ggcagtgcagaatgggtccttcaggccaatttctggttctgggtatttgaagctcatatccctgcaaataacaggaagccactcacctgattcttttaactttgcgtcctggttatatgt

SEQ ID NO: 977187 - DNA, 120 bp, Artificial Sequence
  ENSG00000236208_6 (sequence is synthesized)
cttcaatccagaatgattgctaaagctattccagcacctagagtcaaataaaaatatcccgaggtgggaaggaaaacatttgtttagggaaacattaaaaacaggagagtgtgtgccttg

SEQ ID NO: 977188 - DNA, 120 bp, Artificial Sequence
  ENSG00000217702_0 (sequence is synthesized)
cccaaggttgttatatcttcatgtcctcatttcttagggaggtaccttcagaaccaatagtgacccctaacttctctggtggtcggttccatgaaaggcaaaggagtgtgagagaggagt

SEQ ID NO: 977189 - DNA, 120 bp, Artificial Sequence
  ENSG00000217702_1 (sequence is synthesized)
ggatggtcaacctcccactgccatggtaacatgggtgctggctgatgggagcagaaaataatttagtgaaagtctgtgggggcagtcacaagatgtctgagaaaactggcgagccagctg

SEQ ID NO: 977190 - DNA, 120 bp, Artificial Sequence
  ENSG00000217702_2 (sequence is synthesized)
ctgaaaacagggacaaggaagcctccgtggctggagcccaaatcacactgcagacccagacaccgtgaccaccaccatggactccagagagagcagcttatagtactcaatcagctgcca

SEQ ID NO: 977191 - DNA, 120 bp, Artificial Sequence
  ENSG00000217702_3 (sequence is synthesized)
tgctcccaagttcagggcaggtccatctgattggctgagtctggaatatctgcctgtgcctcagctgtgagggaggcagggaaagtaagccttttcagcttctgtcgtgggaggtgggct

SEQ ID NO: 977192 - DNA, 120 bp, Artificial Sequence
  ENSG00000217702_4 (sequence is synthesized)
ctgcctcctaccaagaatcaaagggtggaggatcttcaaacacaggaaaagaacccggatcctggcacccccaaattttcagagtccatttcagagcataagaaattgagggtccaagat

SEQ ID NO: 977193 - DNA, 120 bp, Artificial Sequence
  ENSG00000217702_5 (sequence is synthesized)
cattcatgtaagaagtttagagggggaagaaaagaatgataaacgaaaagaacagcaatagtaaaggatcttttctttgtttcagtaagatgaagaggcctgagcagtttcgtggagggg

SEQ ID NO: 977194 - DNA, 120 bp, Artificial Sequence
  ENSG00000217702_6 (sequence is synthesized)
aagaaacaggaaaacctcttcaaaagacaaaaagctggcactgcattctctctctgtagcaggacagaactgtctaaagacaagacccctttggccaaaataaaggaacctgaaacatta

SEQ ID NO: 977195 - DNA, 120 bp, Artificial Sequence
  ENSG00000217702_7 (sequence is synthesized)
agtcgtggcgaggaagcgcggactagggcgcgcttgctgctctccaacaacgtctggacccggggatcgagggcagcggaaccccctcccgtccctccatctccaccttctctgtgcttg

SEQ ID NO: 977196 - DNA, 120 bp, Artificial Sequence
  ENSG00000217702_8 (sequence is synthesized)
ggtgcaccctgtggatacagccggcctgagggaccgcagactcgtcgggctgctttctgatgagaggattaacaaacaattgccggctgcgaccattttgcaggacaggcatcttctgcg

SEQ ID NO: 977197 - DNA, 120 bp, Artificial Sequence
  ENSG00000217702_9 (sequence is synthesized)
ggcctgcccgggctctggctgcctggaagtgctcccgctgttcaccccgcggaattaggggttggggggcagttccccgcaaatggtaagatgaagaggcctgagcagtttcgtggaggg

SEQ ID NO: 977198 - DNA, 120 bp, Artificial Sequence
  ENSG00000217702_10 (sequence is synthesized)
gacccttcaaaagcttcagttgtttgtttcctttaattaacatctaaatagattatacatcttctataattataatatggaaatgtatatgagcaaaatatataaattttttggtgactg

SEQ ID NO: 977199 - DNA, 120 bp, Artificial Sequence
  ENSG00000217702_11 (sequence is synthesized)
cttagggaagaatgatgtcagtgaagttcatccaaggtcttaagcagcagcatctatgcagccagggcgtggtcagcgtttggggacagaggtaaatatccgcaatccatgcatctcttt

SEQ ID NO: 977200 - DNA, 120 bp, Artificial Sequence
  ENSG00000224989_0 (sequence is synthesized)
ataaaacccatctaaaatgaccttctgggctactgactgctcactatccctgcgtgtcaactctttagctgtgcacaattatgcaagaacagccctcctcacttccctgaaaagacctga

SEQ ID NO: 977201 - DNA, 120 bp, Artificial Sequence
  ENSG00000224989_1 (sequence is synthesized)
atgaagccagggtctcaggtttgaggtcatagatctggttctggaggacagaagttgaagatcagaatgccagcatggtcgagctctaggagctatgaaatatctgagatgagcaagtga

SEQ ID NO: 977202 - DNA, 120 bp, Artificial Sequence
  ENSG00000224989_2 (sequence is synthesized)
ttcacaaggagacagaagcagtatgacctttaccctgtgacccggttcaattatttcaggctctcattaaccaggcgagctcctctttctctcagagctgcaaacaaggaaactgaatgt

SEQ ID NO: 977203 - DNA, 120 bp, Artificial Sequence
  ENSG00000224989_3 (sequence is synthesized)
agctagacaaagactcccttttcttacagctggaatgaggggtggggagatttcatggtgtcctgtacaggttggatgttaatctgatgtggtgctcttggagaagcttgcctgagtcag

SEQ ID NO: 977204 - DNA, 120 bp, Artificial Sequence
  ENSG00000224989_4 (sequence is synthesized)
gtgctttctcatcctgtggtgtgtgcttccccttcaagctgcagaagtccctgaagaggccctgcgtggctgctgtggctgccctgagactcgttctgcctcctcttccctccacagctc

SEQ ID NO: 977205 - DNA, 120 bp, Artificial Sequence
  ENSG00000224989_5 (sequence is synthesized)
tcccagcttctacccacagctgtgctccaggtaaacaaccaggggcctccaggggtagagaacctagccagacaggttctgctgcctgtagacttgatgtccttcccccacaacatgcca

SEQ ID NO: 977206 - DNA, 120 bp, Artificial Sequence
  ENSG00000224989_6 (sequence is synthesized)
tgcttgccaggctggaagggggtctccagatacttgggaaatctgggcctgtagctggcatatggagaagaggcctggaaaagcactactcctgtccatgaagcccccagatggaaccag

SEQ ID NO: 977207 - DNA, 120 bp, Artificial Sequence
  ENSG00000224985_0 (sequence is synthesized)
gctgcccagagaggtctttaatccatgactccaaagcaagtccctgagtcgctgcacccacaactcacgatctcggggtccggcgttagtcttcagcaccgggatctcagacacaacacg

SEQ ID NO: 977208 - DNA, 120 bp, Artificial Sequence
  ENSG00000224985_1 (sequence is synthesized)
atcttggaccagggcgcaagagaaacgcggaagtggtgttgcctgtagcttacctcaaggcgccgtcatctttactatgggaagatgagacgttgggttgctgtaagacctcttttgaat

SEQ ID NO: 977209 - DNA, 120 bp, Artificial Sequence
  ENSG00000224985_2 (sequence is synthesized)
aagatctttgttttcttgtcacctagttacccgcttgtgagtgcatcgagaagaacagaatgtaaacagattactccgtcctatatatgacacctatcattaaaatcaccgcataaggca

SEQ ID NO: 977210 - DNA, 120 bp, Artificial Sequence
  ENSG00000224984_0 (sequence is synthesized)
agacagagaaaaagagaaaacaacaacaaaaatgaagcaagagtaaactgccaactccaactgcctttctggaaggcctaatttgaagatgtctgaaattctgtatcactggctcccaga

SEQ ID NO: 977211 - DNA, 120 bp, Artificial Sequence
  ENSG00000224984_1 (sequence is synthesized)
catatcatgtttatttgtacatcacacctttgcccacctctgctcagtggacctccagcctaaaatgcctcccttgttcctctgtctcacttcagctgttattgaagtctcctggtacaa

SEQ ID NO: 977212 - DNA, 120 bp, Artificial Sequence
  ENSG00000224984_2 (sequence is synthesized)
atttggtgggcagggaatgacaatgtcctgtgatgtatccatcataatggaaaattatctgatgtcttgggcaaataacagcagtcctgccagacaaaatgaaggtgaaaaattcattta

SEQ ID NO: 977213 - DNA, 120 bp, Artificial Sequence
  ENSG00000224984_3 (sequence is synthesized)
taattgcctaagttcagagcttctctctgttttacatacaagtacaagaaatgtttggcacagttttaatgtatactgaattataggaatccaattacaatatattttgcttaacataga

SEQ ID NO: 977214 - DNA, 120 bp, Artificial Sequence
  ENSG00000260937_0 (sequence is synthesized)
cagcttggcttgagatcctaggagaaaaataattgactaggggctaagagacttgaggggaactagcccacttctgatgctgcatgactgagaagaagtagtatcatagaatcatggtac

SEQ ID NO: 977215 - DNA, 120 bp, Artificial Sequence
  ENSG00000260937_1 (sequence is synthesized)
tttaaagctggagagaaacatctcaaaaataagcaacctggaccagagattaaactccaggtctgagagccagataacagccctcctcaagataaccagtcaagtttggcactgcaggcc

SEQ ID NO: 977216 - DNA, 120 bp, Artificial Sequence
  ENSG00000260937_2 (sequence is synthesized)
agccattttggtccaccctgctttgaccccaccccttgtccacatcagctcctgtgaagccaccccagaagaaaaccactattcgttcacattggctgattgatgctccatacgtccaaa

SEQ ID NO: 977217 - DNA, 120 bp, Artificial Sequence
  ENSG00000260937_3 (sequence is synthesized)
ccttccagtcctcaagaaacaagtatggctgagttctgggtaaaagtggagaacatgaccctctcctcactctgtgccatgttttatataagaaataaattaaaagtatataaaaacaca

SEQ ID NO: 977218 - DNA, 120 bp, Artificial Sequence
  ENSG00000260934_0 (sequence is synthesized)
tttgttgcactcaatgaacaaatctttgttgtttattttaaaattcaagacaatttttttgcaaatgctgattcaaaacgtaccaatccccatctatcatgcctatgccaatacaatctg

SEQ ID NO: 977219 - DNA, 120 bp, Artificial Sequence
  ENSG00000260934_1 (sequence is synthesized)
tcacaaaaaagtttgcttctcattgtcacatagctatggggactggtggccttctaaaatcactgtccagctgctgcaagtgtgagaagcggtaagctagaggagacagacggcgttgcc

SEQ ID NO: 977220 - DNA, 120 bp, Artificial Sequence
  ENSG00000260934_2 (sequence is synthesized)
tgctatgtaagttcacaataaaatccctggaagttcaaattggaaagagcagtttggggtcatgggctcaacaatataaaggcagattcagtgaggggtaagggtagtggctctgggggc

SEQ ID NO: 977221 - DNA, 120 bp, Artificial Sequence
  ENSG00000260934_3 (sequence is synthesized)
agactgacctagatttgaatgccagttgtaccagactcaagacaccttgggtaagtggttttatgaagtacctcagttcttcatcagtagaaagagtgctaacacctccataagactttt

SEQ ID NO: 977222 - DNA, 120 bp, Artificial Sequence
  ENSG00000260932_0 (sequence is synthesized)
aaaggggcacatcttgccaaggtgtgcccaaggggcaggttgggttgctgtgatgatgggtacacagggccctgcacacggctttccagtcggagctgcaaaaggagacacaaaaatcac

SEQ ID NO: 977223 - DNA, 120 bp, Artificial Sequence
  ENSG00000260932_1 (sequence is synthesized)
gcagcacccagcagcattgtcaccactgcaagcagccactgacagccgacctgagaatgaacatgagggccagggaggaggcagctcagcctgcagcgtcagcagcgcagttcggcagag

SEQ ID NO: 977224 - DNA, 120 bp, Artificial Sequence
  ENSG00000260932_2 (sequence is synthesized)
cctgctaatcgtcttgctcaagtttcaaactctgtttaccaaatgaccacagaagcgttttaacaacaaacacctcatttgaaggccaagatgaaaaattttacataaaaaattaatttt

SEQ ID NO: 977225 - DNA, 120 bp, Artificial Sequence
  ENSG00000260932_3 (sequence is synthesized)
ctccggagcaactgcagcctcggtgatagcacctggaaaaggggcacatcttgccaaggcggccctgctggctgtggggacagaggtttctacttgtcctgcctccatcccatttcccgt

SEQ ID NO: 977226 - DNA, 120 bp, Artificial Sequence
  ENSG00000238120_0 (sequence is synthesized)
cagtaataaaccagctgtgttagaaatggatcacttatcagtgcgtgcccaagcctcctaatgcctcatgatgtttaataattaaattgtgacaccttgaacccgcagctgacaccatga

SEQ ID NO: 977227 - DNA, 120 bp, Artificial Sequence
  ENSG00000238120_1 (sequence is synthesized)
atcacagtggaattctccaaatggaatgcagccacacctcagcttctgtgctgcgtgctgccactgaggacattcgataccattgaagccgtcagatagaggccgtatttcaaaaggtct

SEQ ID NO: 977228 - DNA, 120 bp, Artificial Sequence
  ENSG00000238120_2 (sequence is synthesized)
tccaggatgaagacggatggcctcttggcacccatctctttggcatgaacgatgtggggaaacgtgaatggaaatggggaactgttgctggcacccagaagtcatccggtccggatgaag

SEQ ID NO: 977229 - DNA, 120 bp, Artificial Sequence
  ENSG00000238120_3 (sequence is synthesized)
ccaagtcacaaggaagtgcctccaattattcttcataaattcctctgaggtttcacttcttgtccacacaagactttaataaaatgtggcatctaactgaataaagactatcctttcggg

SEQ ID NO: 977230 - DNA, 120 bp, Artificial Sequence
  ENSG00000261080_0 (sequence is synthesized)
ctgtttctcacacacatccatgagggaagaatcattcccatttaacagacaatgtaactgggcctgaatatagctcagcgacttgccccaggcccaccaggaagtggataaagccatgct

SEQ ID NO: 977231 - DNA, 120 bp, Artificial Sequence
  ENSG00000261080_1 (sequence is synthesized)
caacccagcacttcttctctctaccttccaccgatcctgcctgctcatcttccctccttggtgaaggcatgtgtgctgtgctctgcttaactaatttccctcagatattcgcatttctgt

SEQ ID NO: 977232 - DNA, 120 bp, Artificial Sequence
  ENSG00000261080_2 (sequence is synthesized)
ctttacaatttggcatcccagtgaggtttccctttgtatattttccggttcctatattcccattattcaggtatcatcactcaataaccatttgacagcagtaatgcttttcacatggaa

SEQ ID NO: 977233 - DNA, 120 bp, Artificial Sequence
  ENSG00000261080_3 (sequence is synthesized)
agaattgggtttttattgatggcaaatgttgtgatgaactttcatgcccacttggagccggagcacttttttatagaatgaaccacaatgagaagcgtttccaagaaatgtctttggagt

SEQ ID NO: 977234 - DNA, 120 bp, Artificial Sequence
  ENSG00000261080_4 (sequence is synthesized)
gtggactgagatgtacgtttaggaacaggtcctgtggccagagtggggagagagggggcttcccattgtcaaaatctcatcaatcaaaatgtataatagcaacattattaataaccctat

SEQ ID NO: 977235 - DNA, 120 bp, Artificial Sequence
  ENSG00000261080_5 (sequence is synthesized)
agttgcattgcacttggtgctcttccaagcacttccctagaatcctaaaatgaaggcagggcagatattatatccatgttacaggttaaacaacattgtaacaggactgataacaccatg

SEQ ID NO: 977236 - DNA, 120 bp, Artificial Sequence
  ENSG00000261080_6 (sequence is synthesized)
caaaacacagcacaacaaaacaaaaaagaacgagtttcatagtgagaaacagcggagaaaccagcttacctggtgggccttgagtggcccctacaaactccaacctgttcaagactcatt

SEQ ID NO: 977237 - DNA, 120 bp, Artificial Sequence
  ENSG00000261080_7 (sequence is synthesized)
tgccacgttgtaccttccagccaaggcaatccccccagcctgagctacttcccagaccagaccacagaagcaaggccatgctcaccgaggaccccacttgtggactagacttctgtcctg

SEQ ID NO: 977238 - DNA, 120 bp, Artificial Sequence
  ENSG00000261080_8 (sequence is synthesized)
ctgtggcctcaaaagcaatagccagggccccatgatgaagctgccatcagaagcacaggtgtgcctggcaaggacacaggaggaccacggctccatgccgatgagaatggcagctaagtc

SEQ ID NO: 977239 - DNA, 120 bp, Artificial Sequence
  ENSG00000261080_9 (sequence is synthesized)
tgaagctttctatgatttagattcctggttgcgagagggagcctataggaatggcgagaagagtgagaactttgcagaggcagcaaggtgagtttaaactggaaactatgaagttcctgg

SEQ ID NO: 977240 - DNA, 120 bp, Artificial Sequence
  ENSG00000261083_0 (sequence is synthesized)
attctgctggtgggatagtagcagtgaggatgagcagaggtcactctcgtcaccttcttggttttggggacgagacacacacacacagagacagagagagagagagagtgcaaagcaagg

SEQ ID NO: 977241 - DNA, 120 bp, Artificial Sequence
  ENSG00000261083_1 (sequence is synthesized)
caaggcaagaggagtaagaaggtcattatgcaatctttctcggactcagctctctaattcttaagcttttcagatactcaacctgtataaggactgagtgaataagtgcagactgcttgg

SEQ ID NO: 977242 - DNA, 120 bp, Artificial Sequence
  ENSG00000261083_2 (sequence is synthesized)
aacagcatccatcacataataagtgaagtgatcagcagtctcaaagtaccatctgtgtactcctgggagctcctaagacactttcaagagccacagcaaaagagatgaaattctgcctga

SEQ ID NO: 977243 - DNA, 120 bp, Artificial Sequence
  ENSG00000261083_3 (sequence is synthesized)
actattatcctccatttacagttaagtaaactgaggccctggaaaatgaggcactttagttttaaaagctgctaaagtctattgctacatcatgcagctagcctgggctctgctttgctt

SEQ ID NO: 977244 - DNA, 120 bp, Artificial Sequence
  ENSG00000261083_4 (sequence is synthesized)
gtgtcagtcagctctgaagaagtctctgtcctgtaatttagactgtatgccattaagtgggattagttcagggaaattcacaggaataacaaaagacagaaaacatgaggatgatgggcc

SEQ ID NO: 977245 - DNA, 120 bp, Artificial Sequence
  ENSG00000261083_5 (sequence is synthesized)
ccaccccaggacggaaaatgtgtggaaacatcaagggaataaaagtgtgtcagtttcagttctggactccacattttgctagggacattaccaactatccagaagacagagatgggaaat

SEQ ID NO: 977246 - DNA, 120 bp, Artificial Sequence
  ENSG00000261083_6 (sequence is synthesized)
gtaaagggactgcaaaaaagccatgttacataaagaaccgtgaaagaaactggaaataatttccttagaggacagaagattcctaggaaataagacaatgaacaatgagtgttggagaat

SEQ ID NO: 977247 - DNA, 120 bp, Artificial Sequence
  ENSG00000261083_7 (sequence is synthesized)
atgggtaagggataatataaagagtcctctatgcatgctaatttgttgttacatgtgacctaagatggtggtttcttgctttaaagaccttactaatcattacagagtattcttattctc

SEQ ID NO: 977248 - DNA, 120 bp, Artificial Sequence
  ENSG00000261083_8 (sequence is synthesized)
tgctcaataatttggaaatgacttaggtcctgtaactctctgtgtctctaatttctgatctctgtattcatccatgctgtctttagtacaagtatttatttatgtagacttcccttgttc

SEQ ID NO: 977249 - DNA, 120 bp, Artificial Sequence
  ENSG00000261083_9 (sequence is synthesized)
tgttctttatgttacatggaggaaattctgagaaacttcatcagtagcactatgaaactccttccatacagaacagtctagaacaggcattgtcaaactgggctaaatctgttctgccat

SEQ ID NO: 977250 - DNA, 120 bp, Artificial Sequence
  ENSG00000261083_10 (sequence is synthesized)
ctgcttttctaaagaaaatgttgttggaacacaaccacgttcattcatttctgtattgtctgtggcagagattgaccatcacgatagagaccatatgagttgaaaagcctaaaacattta

SEQ ID NO: 977251 - DNA, 120 bp, Artificial Sequence
  ENSG00000261083_11 (sequence is synthesized)
ttacctggctctgaacagaaaatacttgctgacttctggtctggaacagcactgtgtatatacctcaggtttaatactggaagtctccattagtccttcttcagaggtgactagagtgca

SEQ ID NO: 977252 - DNA, 120 bp, Artificial Sequence
  ENSG00000261083_12 (sequence is synthesized)
cagtcataatgacagggccccaaggacttctctaactcacactccctgtccagtcaccttcactgcaacaaccatcttaccaaggggtgctgtcactgctcctgtccactttctggccgt

SEQ ID NO: 977253 - DNA, 120 bp, Artificial Sequence
  ENSG00000261083_13 (sequence is synthesized)
cagatgcctcgagagttcttcttgcccttgataaggaataaacttgtcagttgcatgtggcagtttttcaactgatttgggagatgatgcagattttgctatttcttaactttcaattgt

SEQ ID NO: 977254 - DNA, 120 bp, Artificial Sequence
  ENSG00000261083_14 (sequence is synthesized)
tgtgttttctggttctcagtagggagacatgaagaaaattgctgattcccttcagttaaataacagtttagattaaaccagcaagaacttttgctctttaataaaatgcaaagttaccat

SEQ ID NO: 977255 - DNA, 120 bp, Artificial Sequence
  ENSG00000261083_15 (sequence is synthesized)
caaaagaccttgaaaagctatgagagaaaagggagaagaaaagggaactaaagcagaaaaggagaagggtaacgtactttgcatgttacagagagattggacgccactgcttactgcccc

SEQ ID NO: 977256 - DNA, 120 bp, Artificial Sequence
  ENSG00000261083_16 (sequence is synthesized)
agaggctactaagaaacctttaaatgagatttctgtctggcttggagaagtttgaggaataaatgcgattaatcattattttgattcttatgaagaaaaaatagcacttccatataaaca

SEQ ID NO: 977257 - DNA, 120 bp, Artificial Sequence
  ENSG00000261083_17 (sequence is synthesized)
accatctatccaattttattcaatgaataggtgaaaaaaaagctgtgaaacacttctatgatcacaaaaacactttagtagagtactcaaaatatcagaagcgtgtttaaaaagcataca

SEQ ID NO: 977258 - DNA, 120 bp, Artificial Sequence
  ENSG00000261083_18 (sequence is synthesized)
tttgactaaattggaaatgtggcaatttactaggtggccatcttaagtgaactgctttgcaatatttgttgaagaattaaattaattttgtgccttctctctcaatgcctgagttttctg

SEQ ID NO: 977259 - DNA, 120 bp, Artificial Sequence
  ENSG00000261083_19 (sequence is synthesized)
ggatcctatttttgacaattcatctttccttcttctatacatcatatttttgctagtgaaccaaaacccatttaaacaaagtttcattgaataaacaaaacaatactgaggttaaaataa

SEQ ID NO: 977260 - DNA, 120 bp, Artificial Sequence
  ENSG00000238123_0 (sequence is synthesized)
ggccttgcgcgcgctccccgcgtgggatgaccagaatgcacgtgccttggttgcagagtgagcccctcagccccgaatctggagtggccgcggccgggaaacaggaacccgggtttatta

SEQ ID NO: 977261 - DNA, 120 bp, Artificial Sequence
  ENSG00000238123_1 (sequence is synthesized)
aggggccggcagcagttccaacagtgtgataacacacggaaaacggaaatccaagggatctagcaaaaggattccacccagcaaaaacgccagcttgggagagggcccctacctaactcc

SEQ ID NO: 977262 - DNA, 120 bp, Artificial Sequence
  ENSG00000238123_2 (sequence is synthesized)
ttccttctggcctccacccctcccctgatacgtttccttccgtctagtctcgagataacccttcatcccccagtttcttgactctggccgctgttcttgaacatttcttaaacactttca

SEQ ID NO: 977263 - DNA, 120 bp, Artificial Sequence
  ENSG00000203684_0 (sequence is synthesized)
ggactcggcctatccgtcagcacgcaggctccaccctcgctgaactcacagaggacaatttaggcaggaaccacacactgctatgacatatccaccccaccgtgctttctcgaggagtga

SEQ ID NO: 977264 - DNA, 120 bp, Artificial Sequence
  ENSG00000203684_1 (sequence is synthesized)
cttcagccctagagtctgactgccctggtccaagccatccctgccttgctggcctcctggggcccatgcaccctgttgacattcccctctccactgccctccactcaaagcaccaaagaa

SEQ ID NO: 977265 - DNA, 120 bp, Artificial Sequence
  ENSG00000203684_2 (sequence is synthesized)
gacttactcaatgtgtccttatggtgcagagtcccagcaagcagaggtctttgtatctgttgaataaaaaaattcctcatgatgcgtagtaacatcagtgaggaagactgcaccaaggcg

SEQ ID NO: 977266 - DNA, 120 bp, Artificial Sequence
  ENSG00000203684_3 (sequence is synthesized)
ccagcgtccacgtgtggctgttgtgtcatttttttcatttgctggaccattgggacttcagctgcaggtggcaggaggctccatccccaagtgtctccacggataaggacaggcaccatc

SEQ ID NO: 977267 - DNA, 120 bp, Artificial Sequence
  ENSG00000238129_0 (sequence is synthesized)
acaaggagaggtcagaagaaacacaattatttttgtctggcagaatacaaaaaggtgtcacagagttggcatttgaattggattttggaagatgaatggaaatgcactagctggagatga

SEQ ID NO: 977268 - DNA, 120 bp, Artificial Sequence
  ENSG00000238129_1 (sequence is synthesized)
aaagaacataatggactgaggaaagttcctttccaaaaatcaagaaagctgtaaaaggcacggggattttaataattatcttcagttggaattacatgtatgttgagtgcagggacaaaa

SEQ ID NO: 977269 - DNA, 120 bp, Artificial Sequence
  ENSG00000238129_2 (sequence is synthesized)
ttgaaaaaatagttatgcctgaaaagttatatgggaaattattatcaaaggctattgatgtcaagctaagaagattacattttacctaaaacacctaggatctttaaagtggatgtaaga

SEQ ID NO: 977270 - DNA, 120 bp, Artificial Sequence
  ENSG00000238129_3 (sequence is synthesized)
ttcacccatgagcagaatggatgagaacattctcagaaataaattaaaattactacatatattgtgtttgaaatggaaaaccatgaatagatacctttatagtaataaattaaatcttaa

SEQ ID NO: 977271 - DNA, 120 bp, Artificial Sequence
  ENSG00000238129_4 (sequence is synthesized)
caggtgacttgcagagaacatgcattcatcaacaacttttgaaacatatacgaaaattatctaaaaatcctcaaaataccaattcagttgaatatttgctgtatgccaggaaaacttctg

SEQ ID NO: 977272 - DNA, 120 bp, Artificial Sequence
  ENSG00000238129_5 (sequence is synthesized)
gacactgaagatacttacagtcaacattacttcaaggcagttatggcatcctaattactgtttttagtaatataatatctgcttccaaatactcttagaaatgggcaacttgataaggtg

SEQ ID NO: 977273 - DNA, 120 bp, Artificial Sequence
  ENSG00000238129_6 (sequence is synthesized)
attcctgaaagtctctgccatcttgattgtgttaactgtgtttatttaaagaggctaaaaatgagggtggtttttaatgcatggtaactattcattaaaaatgaaattatatatgaaaaa

SEQ ID NO: 977274 - DNA, 120 bp, Artificial Sequence
  ENSG00000238129_7 (sequence is synthesized)
ggaagaacacctgacacggctgaaagcttggtggaaaaaacacctgatgaggctgcacccttagtggagggaacatctgacaaaattcaatgtctggggaaagcaacatctggaaagttt

SEQ ID NO: 977275 - DNA, 120 bp, Artificial Sequence
  ENSG00000238129_8 (sequence is synthesized)
gaacagtcagcagaagaatatgttaggccatgtgtctctataacagctattgaactctgcattgtacagtgaaagcagtcatagataatgtgtgagcaaataggcatgattgcactccaa

SEQ ID NO: 977276 - DNA, 120 bp, Artificial Sequence
  ENSG00000238129_9 (sequence is synthesized)
taaaactttgtataaaaaaccatttggtaagctgaatttggcctgtgatatatagtttcctggcccttcacacagaagatagatggagtgtaattacataaaaagttttaaagacaaagt

SEQ ID NO: 977277 - DNA, 120 bp, Artificial Sequence
  ENSG00000280374_0 (sequence is synthesized)
tcaaaaagttcaaagtagaatttactttcaaaattgtttgttcccccagagctagttaatgcccccagagctagttaataaactctatttgcagataaaagcatgctttcccttcaaagg

SEQ ID NO: 977278 - DNA, 120 bp, Artificial Sequence
  ENSG00000280374_1 (sequence is synthesized)
tatttcaccaagacgggaaacacaaaactaaataagctgggaaactgaggatacacagagggtctccttaatctctggatatgtggtctaatgtatcctttttgtgctcattttttccct

SEQ ID NO: 977279 - DNA, 120 bp, Artificial Sequence
  ENSG00000280374_2 (sequence is synthesized)
tttatccagaaatacaacattacctttttataaaattcctggagattgatcatatctctagtgtttgggtctagaatgtattttttggccaaaacatctctttaccccacttccacatgt

SEQ ID NO: 977280 - DNA, 120 bp, Artificial Sequence
  ENSG00000280374_3 (sequence is synthesized)
gaggcatggggttgtttcctgaaatgaggcaaggactttggacaagaacatgtttggacttgagatggtttttgtaaacccaaatgatattagttctagtctgtctttatcgctcactgt

SEQ ID NO: 977281 - DNA, 120 bp, Artificial Sequence
  ENSG00000280374_4 (sequence is synthesized)
attttgttttcattcatactaatgaataatagacttgattgtgttccatcatttatgtcattaatatttcctttatgtttgagtgctgtgcagttctccttgaaacttgtatggagattg

SEQ ID NO: 977282 - DNA, 120 bp, Artificial Sequence
  ENSG00000280374_5 (sequence is synthesized)
aacttgatagtgatttaaagtaattaattcatatgtcagttgttagcaaggtctagtaattaaaatctactttagagtaagttattaactctccaaaataaaaacactttatcaacttac

SEQ ID NO: 977283 - DNA, 120 bp, Artificial Sequence
  ENSG00000203688_0 (sequence is synthesized)
ggtctatggttgcagcttttaggaggccacggcttttactcccaacaggcccactgagactaatggggccacactactgggagggggcagtgtttctcaaagcatggtctttagaccgtc

SEQ ID NO: 977284 - DNA, 120 bp, Artificial Sequence
  ENSG00000203688_1 (sequence is synthesized)
tgagtgagaaaccccggggcaatgatttcgctggttcccagtcagatctgccactgccgaatctgtgatgaggcccagaaagctcctgacagacggtgcctctgtgtgcagcaacaggag

SEQ ID NO: 977285 - DNA, 120 bp, Artificial Sequence
  ENSG00000203688_2 (sequence is synthesized)
accacggcggtctcacctggaaactcttccacagttgtcatttcagcagcgctccacaagtgatggagttgactcccatcagagccctcctggacatgaactcctgagtgccagaaacaa

SEQ ID NO: 977286 - DNA, 120 bp, Artificial Sequence
  ENSG00000203688_3 (sequence is synthesized)
gattcatttaaagatacaactgtgaacgctgctgaccacattccagcgcagtgtggatgttcaacaccgaagggaggggactcgggcttggatctgcagctagcattggatggacacaga

SEQ ID NO: 977287 - DNA, 120 bp, Artificial Sequence
  ENSG00000203688_4 (sequence is synthesized)
atcctgaactatgcatcgtgctttagctgccatgaaaattgatttttttttttttcagaaaggaatgtgccaatgatgggacttaagctggtgaaaaccacgtggaacgggatgctcatg

SEQ ID NO: 977288 - DNA, 120 bp, Artificial Sequence
  ENSG00000203688_5 (sequence is synthesized)
ggacctgccccttggagctccaggcctccaggcctcagtgctggttttcctaagtccttattttctcccgtgtttggctgggggctggtccgacttctccctttggtggactctcagttg

SEQ ID NO: 977289 - DNA, 120 bp, Artificial Sequence
  ENSG00000203688_6 (sequence is synthesized)
tcaagtgtgaagtctttgaactgcacacaagagtggggacaacgtttctatctgcaaatcaagcaagcgcttgggcgaacatcttcccaaggcagagatgaagaatgggtactctaggat

SEQ ID NO: 977290 - DNA, 120 bp, Artificial Sequence
  ENSG00000203688_7 (sequence is synthesized)
gctccattttgggacaaacgtctagtggggccacatttgcatggcaacatgccatttccactttttccgtatttagaagcttcccatggagctcccgctgacaggagccactcatgtgca

SEQ ID NO: 977291 - DNA, 120 bp, Artificial Sequence
  ENSG00000203688_8 (sequence is synthesized)
cactgagtggaggctcagaaggaggatttgtcgtagagttgtttttcagaggctgggagtcagggctgagggccagcgggtggctctgcacccccatccctccatcccctgtggaatgcc

SEQ ID NO: 977292 - DNA, 120 bp, Artificial Sequence
  ENSG00000203688_9 (sequence is synthesized)
aggagttctcttctccgtccctcatgcgtgatgggggacaaatgtctcctcaccggtgacaataatgacaggcttctgtccagaggcaggaggggggccagtatcatgcactgaagaaac

SEQ ID NO: 977293 - DNA, 120 bp, Artificial Sequence
  ENSG00000203688_10 (sequence is synthesized)
tttcacagcacagttgtctgagacagggaaacccacacgcagacggccaggggaccttgacctccttagcaaacaggaaacaaagtgctcttgttctcaggccggaatgaagcggctgtg

SEQ ID NO: 977294 - DNA, 120 bp, Artificial Sequence
  ENSG00000203688_11 (sequence is synthesized)
gcgtttccatttttagatttcagctacagaaggcaggaatcctttggacttggccctttatcagtggaatggacagagcagctctcggtggggtctctgttgggaatgcctgctgagacg

SEQ ID NO: 977295 - DNA, 120 bp, Artificial Sequence
  ENSG00000203688_12 (sequence is synthesized)
ggaccaaggacggctgcaggatgtggtgtctgtgctcagcgtcacctcctcccaggctcctgggaagcacctgagcatctcctgacaaagccaccatgagcaagaccctcagagaaggta

SEQ ID NO: 977296 - DNA, 120 bp, Artificial Sequence
  ENSG00000203688_13 (sequence is synthesized)
tgaagatgagaggctggtgtgaagaggctgctgtgaagcaactatatagcatcgggcaggacataaggggaaattgttgctttcatgttcctttacccccacagtttggatttctgccac

SEQ ID NO: 977297 - DNA, 120 bp, Artificial Sequence
  ENSG00000203688_14 (sequence is synthesized)
aaggatcactgtggtcttcctccctggggctcactccacctaccccacacctcccacctcccccgtcctctcttgggggacttcctgagttctcgacagagcagtttcactgtcttctct

SEQ ID NO: 977298 - DNA, 120 bp, Artificial Sequence
  ENSG00000203688_15 (sequence is synthesized)
ccacgcttcctggactggcccgcccatttttttctatgacccagaattccttcccaaataagagcgtcatattccttgagccccttcactagaagcaaggagatgggcaggcgttgaact

SEQ ID NO: 977299 - DNA, 120 bp, Artificial Sequence
  ENSG00000203688_16 (sequence is synthesized)
gcggcttttctctagactcttccctaatccctaggttcccccaactatttagtctagagcaagcccaggaacagtgattttttttttttaacctgccatttctgttattcaagctgtttt

SEQ ID NO: 977300 - DNA, 120 bp, Artificial Sequence
  ENSG00000203688_17 (sequence is synthesized)
agtcagttcaggctgctgtaacaaaaatgcaatggcctgggtggttttaacaacagaaatggatttctcacagttcttgtgaggctgggacgcaggaacccccacatccaagtgccaggc

SEQ ID NO: 977301 - DNA, 120 bp, Artificial Sequence
  ENSG00000203688_18 (sequence is synthesized)
agttccgtggctgggagggctccagactggtgtgtggatggcaccttctgctgtgtcctcacatggctgagagatgggtcatctctgttcttatcagggcactaatcccattcacaaggc

SEQ ID NO: 977302 - DNA, 120 bp, Artificial Sequence
  ENSG00000203688_19 (sequence is synthesized)
cccccatgacctaatcacctcctaaatgccccgcttcctaataccagcaccttggaaaatagggcttcaagatacaaattttgggggactcaaacattccatccatagcacccgctcatg

SEQ ID NO: 977303 - DNA, 120 bp, Artificial Sequence
  ENSG00000203688_20 (sequence is synthesized)
tgctgtgatgtccagtgagcaggcggagttccagggctggtcagtgccaggtgctccttctcccacccgagaacaggggccaggttgctcctcaggcaccctgggcaactgccccttccc

SEQ ID NO: 977304 - DNA, 120 bp, Artificial Sequence
  ENSG00000203688_21 (sequence is synthesized)
ttccagtggggcctgacctggctaccgagcttggcagctaataggcgggcccctcagcattcacgctcctgagctgctttatcaaactaggattgttcccccaggtctaagaaaaccatc

SEQ ID NO: 977305 - DNA, 120 bp, Artificial Sequence
  ENSG00000203688_22 (sequence is synthesized)
cattcactgcaaagttatttattactgcggatgggctaggagttagaggaagagagtgactcaaatcacaacacctcctggacgaagctggaagggattaaaatacggcctaatttctcc

SEQ ID NO: 977306 - DNA, 120 bp, Artificial Sequence
  ENSG00000203688_23 (sequence is synthesized)
ataattggattgtggataatttccttatctcaaaacaaaatgatggcaggaaaattgccgagcttatttctctttgatctgtggcactggctggatggtagaagcagaatgccaccctcc

SEQ ID NO: 977307 - DNA, 120 bp, Artificial Sequence
  ENSG00000203688_24 (sequence is synthesized)
gggtccctgcctacagatcttgattccttgagattgccctttgtgcttctgtctggggactgcctgtttctgtaatggccaccgtctcagaacacatggttgtaggcctcagcatttgcc

SEQ ID NO: 977308 - DNA, 120 bp, Artificial Sequence
  ENSG00000203688_25 (sequence is synthesized)
ttacacacagcccccttggagacaaaccgtgtctgtgtccctcagaaggccctgactttcagggcacactccagcctgactttggcactctgctagacacatccgaaacgctggttctcg

SEQ ID NO: 977309 - DNA, 120 bp, Artificial Sequence
  ENSG00000203688_26 (sequence is synthesized)
tgttgaagtctgttatggatatgtagggtaaggcagggaaactggagcgcctgcatacccttgacttcctccatttggaaaagataaccctgagacatggtggaggagaaggggccctga

SEQ ID NO: 977310 - DNA, 120 bp, Artificial Sequence
  ENSG00000203688_27 (sequence is synthesized)
cctgtcagctacatctggatgtaactcccctgatgaagaaagtgccagaggcagcaaagcagcccttatagggtattttgtgctcccccaacagaggaagaggagcttagggtctccagg

SEQ ID NO: 977311 - DNA, 120 bp, Artificial Sequence
  ENSG00000203688_28 (sequence is synthesized)
gagaatgtctggttgtgaagagccgccaggacctggagctgcacggttgctcagtgtgcatttcacttggtcagcccctacgctggagagtgcttgcatccgaaccttcagtgcctggat

SEQ ID NO: 977312 - DNA, 120 bp, Artificial Sequence
  ENSG00000203688_29 (sequence is synthesized)
agacactgagctgagcgaacggtatgctggaaaatgaagcgtgcaagtgacaaagtgctcaacttagactctgggcaaaattctcacaaagggctttctaatcctcacttaatggaagag

SEQ ID NO: 977313 - DNA, 120 bp, Artificial Sequence
  ENSG00000203688_30 (sequence is synthesized)
tggagcaatttccagcagaagttgtggcttgcttcaccaggtctgctcaggtcagcggggtgagcctacggccaggatgggtggtaattaatattggaatacttggccagtctgcagacc

SEQ ID NO: 977314 - DNA, 120 bp, Artificial Sequence
  ENSG00000203688_31 (sequence is synthesized)
tcagaccacaaaaaaccctccatcctcaagcagtctcttctttatgcctcgcaaggggaagataattaaagactgtggtaacgggttaatttataggaaaataatgtagcatactcaact

SEQ ID NO: 977315 - DNA, 120 bp, Artificial Sequence
  ENSG00000251239_0 (sequence is synthesized)
actttgcttttgagtgttcagaaccaagatggttcttgctggaagggctccggagaagcagtaacggccttgtgggttgggctgcagcagagaaatggaccaaacctcccccagccttca

SEQ ID NO: 977316 - DNA, 120 bp, Artificial Sequence
  ENSG00000251239_1 (sequence is synthesized)
tggcccaagccccatcctccctccccaactgactgctgctccaggcaggatggatggagcatgtgcggtgcctcccccgcaaaaatgatgacgaggttaaaggaaaaaataagttacatt

SEQ ID NO: 977317 - DNA, 120 bp, Artificial Sequence
  ENSG00000251239_2 (sequence is synthesized)
tgaagatgggccaccgttggggctgcaatgtgctcgcggtcccagcttgtgctttgcaagaagagggaatataactagactgttattttaggttaaaatagccaagagacagacgccttc

SEQ ID NO: 977318 - DNA, 120 bp, Artificial Sequence
  ENSG00000251239_3 (sequence is synthesized)
gcctcaaaaatattctgagacacataaaagtagaaggaaacaagtctcttcagtcacaaaatgtcgtacatcccgcatatactagattcaattaatttaataaaatagaatatacataga

SEQ ID NO: 977319 - DNA, 120 bp, Artificial Sequence
  ENSG00000227987_0 (sequence is synthesized)
agtccgggaaggacccacttccccggctccaagtcgggagcgggcgccgcgtcttctcgagtccgcgccgcgccgggggaggttgagtcagtggcctggagggagcagggccgggggaag

SEQ ID NO: 977320 - DNA, 120 bp, Artificial Sequence
  ENSG00000227987_1 (sequence is synthesized)
gcagcggcgaaggactgccccccaacccaggggactattttcccttggggattcaaagagaaagacaggaattgaaactttgcagctgacatttggaagcttccatttgctcttgttata

SEQ ID NO: 977321 - DNA, 120 bp, Artificial Sequence
  ENSG00000227987_2 (sequence is synthesized)
aaacaagactcaactctcccaactcagactcgttatctccatcatggtggagggaccttgatgggtttgggacagccaccatagagaggaggaattggattctgaccttcatctcccttc

SEQ ID NO: 977322 - DNA, 120 bp, Artificial Sequence
  ENSG00000227987_3 (sequence is synthesized)
atcacctcacagctcaaccctgagcacaacaggatacacccttgttgtctaagacttgaactgtctttttgggacctttcttgggcagatggaggaagctttaatacttattggtcccag

SEQ ID NO: 977323 - DNA, 120 bp, Artificial Sequence
  ENSG00000203356_0 (sequence is synthesized)
tcattcaccatttactgaagttgtgtgtgcgtgtgtataccagaccccacgctaaggactggggaaaaggatgatcatacctggcttgttcctgatagagcccagagaccacctgggaag

SEQ ID NO: 977324 - DNA, 120 bp, Artificial Sequence
  ENSG00000203356_1 (sequence is synthesized)
acaagtaatcaggtccagcttcggtgtgaggccctcaatccagaacatcatggctctgactcaccagccttcagctgctgcactctgctctcctcagtggctgccttgcacctggaactc

SEQ ID NO: 977325 - DNA, 85 bp, Artificial Sequence
  ENSG00000203356_2 (sequence is synthesized)
cttccacctcccctgggattacagttgtccaccaccatgcccagctaatttttgtgtgttttttttttagtagagacagggtttc

SEQ ID NO: 977326 - DNA, 120 bp, Artificial Sequence
  ENSG00000203356_3 (sequence is synthesized)
gcccaggctgatcctcaaactcctggcatcaagagacactcctgactccacctcctaaatgctgggattagagatgtgagccattgttcctggcccctattgaattttttagtccactgt

SEQ ID NO: 977327 - DNA, 89 bp, Artificial Sequence
  ENSG00000203356_4 (sequence is synthesized)
ccattgttcctggcccctattgaattttttagtccactgttgagacctattgatcagaaaaaaggttgctttcaaaaggttattactga

SEQ ID NO: 977328 - DNA, 120 bp, Artificial Sequence
  ENSG00000203356_5 (sequence is synthesized)
aaggagatgaatgttgttttcatgcctgctaatacacatcctttctgcagcccatggatcaaggagtaatttaaacctgcaagtcttattatttaaaattacatttcataaggctatagc

SEQ ID NO: 977329 - DNA, 89 bp, Artificial Sequence
  ENSG00000203356_6 (sequence is synthesized)
ctgcagcccatggatcaaggagtaatttaaacctgcaagtcttattatttaaaattacatttctgctgatggatttgggcaaagtacat

SEQ ID NO: 977330 - DNA, 120 bp, Artificial Sequence
  ENSG00000203356_7 (sequence is synthesized)
atggatgactttcagaggggctcaagacttcactagaggaagtaactgcaggtatgatagaagtagcaagggaactagaattagaaatggaacctgaagatgtgactgaattgctgcaat

SEQ ID NO: 977331 - DNA, 88 bp, Artificial Sequence
  ENSG00000203356_8 (sequence is synthesized)
actgaattgctgcaatctcatgataaaatttaaatggatgcagagttgtttcttatggatgagcaaataagtgatttcttcttctttt

SEQ ID NO: 977332 - DNA, 61 bp, Artificial Sequence
  ENSG00000203356_9 (sequence is synthesized)
ctctgtcacccaggcttgagtgcagtgatgtgatctctgctcactgcaaccttaacctccc

SEQ ID NO: 977333 - DNA, 64 bp, Artificial Sequence
  ENSG00000203356_10 (sequence is synthesized)
ggactcctgacctcaagtgatcctcctggttttttttttttttaaatagagacagagtctcact

SEQ ID NO: 977334 - DNA, 90 bp, Artificial Sequence
  ENSG00000203356_11 (sequence is synthesized)
gtgttgcccaggctggtagactcaagccatcctcctggttcaaccttccaagtaactagtactacatgtgtgcaccaccctgctcagcta

SEQ ID NO: 977335 - DNA, 120 bp, Artificial Sequence
  ENSG00000203356_12 (sequence is synthesized)
agtaactagtactacatgtgtgcaccaccctgctcagctaattaaaaataatttttgtgaggagatgggggtctcactatgttgccaaggctggtttagaatgcccaagctcacgtgatt

SEQ ID NO: 977336 - DNA, 120 bp, Artificial Sequence
  ENSG00000203356_13 (sequence is synthesized)
ccaaggctggtttagaatgcccaagctcacgtgattctctcactctggactcccaaagttctgggattacaggtgtgtgccatcgtgcctagccagaaagtggtttcttgagatggaatc

SEQ ID NO: 977337 - DNA, 89 bp, Artificial Sequence
  ENSG00000203356_14 (sequence is synthesized)
ctgagtccaattttggaagatattctactatgagtaaaatgctatcaaatagtactgcatactacagataaatctttcatgaaaggaag

SEQ ID NO: 977338 - DNA, 120 bp, Artificial Sequence
  ENSG00000203356_15 (sequence is synthesized)
tagtactgcatactacagataaatctttcatgaaaggaagtgtcaattcatgcggcaaatgctacattgtcttattttaagaaattgtcacagctggcatggtggcacacacctgtaatc

SEQ ID NO: 977339 - DNA, 120 bp, Artificial Sequence
  ENSG00000251230_0 (sequence is synthesized)
ggggagggcataggagagggttgatataaaatgcaattacagcctcttatgctttccaaagtgggggatgattcaatgattcctgactggtccacagccatatatcaattgaggttataa

SEQ ID NO: 977340 - DNA, 120 bp, Artificial Sequence
  ENSG00000251230_1 (sequence is synthesized)
tactaatttgaattgcaaatctctgaaaagaaggggacaagctaaggagataaaatttaacaggcctcttcctcctgcttgccacctctcagtcacaagacggctgctgcgactcaggct

SEQ ID NO: 977341 - DNA, 120 bp, Artificial Sequence
  ENSG00000251230_2 (sequence is synthesized)
ggttgaggccttggagctactgcctctgcctgtgaactcacccatcatcgctaacaggttgctccacagcctacagatctcaatatttcgctagcacaaaacccaagcggccaggcacgg

SEQ ID NO: 977342 - DNA, 120 bp, Artificial Sequence
  ENSG00000251230_3 (sequence is synthesized)
catatgagtagttctcaccagtggaatgtagtgaaaacgagatgctgtctcttagggactaaggaagctatctttcctcttccgacatttgctgactggtcgatgctagatgatcttgag

SEQ ID NO: 977343 - DNA, 120 bp, Artificial Sequence
  ENSG00000251230_4 (sequence is synthesized)
accctgtgctgaggactggagaactacaggaaaggagcagtatctctgaattatcgtgtggaaggtcacttgtctagcccctgatgactgtgagcctcttcctcctgcttgccacctctc

SEQ ID NO: 977344 - DNA, 120 bp, Artificial Sequence
  ENSG00000251230_5 (sequence is synthesized)
gcaacagtacttgctgtcatgtttagtcggccactggtcagtctgagacagcagtgggtgtgatcgtgtagcagctatggaaagcttatgctgcatttaataataatagtcatactttaa

SEQ ID NO: 977345 - DNA, 120 bp, Artificial Sequence
  ENSG00000251230_6 (sequence is synthesized)
agcatgtttcagttatgaattcattctgaccagaaaagtaacttgcactagcttaacagtcaaatagcaagaagcatagagaagtggccgcttgctgtgcttcagcagctcaacagtgtc

SEQ ID NO: 977346 - DNA, 120 bp, Artificial Sequence
  ENSG00000251230_7 (sequence is synthesized)
tgtcccaattcaaggcagcaagaaggccatggagcggcacctgccaggtatgtccctttcccaggcatccccagcagatttctcactgtctgaaactgcatcccacggcgttcttaggtg

SEQ ID NO: 977347 - DNA, 120 bp, Artificial Sequence
  ENSG00000251230_8 (sequence is synthesized)
cgaggctggtctggagagtcaatgcttgggttttccaatacctgcatgggacatgggcaagatggaagggagttgggtttaggaaaccagtagtgccagccctttactcgtatcatatct

SEQ ID NO: 977348 - DNA, 120 bp, Artificial Sequence
  ENSG00000251230_9 (sequence is synthesized)
gatccccacagcaaccctgaggagtagctatttatcatccttattgagcaaatgaagaaaatcagaaccagcaacatcaagaaaaaatgaggaaagacatacattagtaaataataaagc

SEQ ID NO: 977349 - DNA, 120 bp, Artificial Sequence
  ENSG00000251230_10 (sequence is synthesized)
cagggttccaattcagatcaggttgaatccaaaattcctctccctgccattataacgcatcacagtgttcaggtcatgtgggtctgggaaggatgaatcatattcaactatcccaccacg

SEQ ID NO: 977350 - DNA, 120 bp, Artificial Sequence
  ENSG00000251230_11 (sequence is synthesized)
cctgccagcagatgcccctgcaggccatctctccaggctcaggaacctaaagaagaatctacccagatgtggtggctcacacctgtgatcccaccactttgggaggctgaggcaagagga

SEQ ID NO: 977351 - DNA, 86 bp, Artificial Sequence
  ENSG00000251230_12 (sequence is synthesized)
aaattagctggctgtggtgctgcacatttgtaataccagctactctagaggctgaggctggaggatcacttgagccgaggagtgag

SEQ ID NO: 977352 - DNA, 120 bp, Artificial Sequence
  ENSG00000251230_13 (sequence is synthesized)
ctctagaggctgaggctggaggatcacttgagccgaggagtgagctatgaccacaccattgcatttcagcctcagtgacagagcaaggccctgcctcaaaaaaaaaaaaaaaaaaagaaa

SEQ ID NO: 977353 - DNA, 120 bp, Artificial Sequence
  ENSG00000251230_14 (sequence is synthesized)
actcaggattcatgtctgcacttcattcactgcgtaggaaggtgagggtggttaaggaggtgccactctgggagcagaaggcagtcactggagcagatcagtggagctacgttacggaga

SEQ ID NO: 977354 - DNA, 120 bp, Artificial Sequence
  ENSG00000227981_0 (sequence is synthesized)
aaggaagtaaaatttaaatgcagaatgagcatctgaaaaaaattattagtttgacagattcagtacttttctgctagctgaaatcaaggacggcaagaagcagaggacatttgacaggaa

SEQ ID NO: 977355 - DNA, 120 bp, Artificial Sequence
  ENSG00000266196_0 (sequence is synthesized)
acagtttctggcacccaacataggacagctgagacactgcagtcacacatgtacctgcagatgaggtcttgggacaacagacaaaaagctgggaacgaggtaaaaatattttactaatat

SEQ ID NO: 977356 - DNA, 120 bp, Artificial Sequence
  ENSG00000266196_1 (sequence is synthesized)
cagctctcctggatctgtgcctggagtgcccagttgagagtgaaaggtgagaagatgtttacaaatactagagaagccaccagttcccagctgaagttgcattgcctggaggacctgaga

SEQ ID NO: 977357 - DNA, 120 bp, Artificial Sequence
  ENSG00000266196_2 (sequence is synthesized)
gttatatagaatcatgaaatgttttatgtcctatgttttggattgagatatacctcacataatgactggtaaatcaatgatagtgcttcatcaaatttcccctgtgcaaacaggagcgaa

SEQ ID NO: 977358 - DNA, 120 bp, Artificial Sequence
  ENSG00000266196_3 (sequence is synthesized)
gagaagctatagtgagctccaaaaagaatgctccaaggaagatatccagggacttattatacttcactttagagctgtgatagcagcttgcctgaattgagatatttaccttttcaattc

SEQ ID NO: 977359 - DNA, 120 bp, Artificial Sequence
  ENSG00000235244_0 (sequence is synthesized)
ccaccccctctggggaacaggagacacagaagatggagggagggatggcagcctaccctgtggcaacgcgggagtcgcgttgccgcagggggcgcattggggtccagccgtccccagaac

SEQ ID NO: 977360 - DNA, 120 bp, Artificial Sequence
  ENSG00000235244_1 (sequence is synthesized)
gcagatcagaggtagtcggacctttcccgctggcgcgcagcctcagctaggcccacattgatgggaattcccggagagtcaaagaagcccaatcacatagagacagagcaagagaggaag

SEQ ID NO: 977361 - DNA, 120 bp, Artificial Sequence
  ENSG00000235244_2 (sequence is synthesized)
cgggctccagtagaagtggggcacacagagtgaacagaaaaagaggatacctctgcgatcccgggtcatctccagatgctagggttatggtcctaggtctctcgactcttcaggatgatg

SEQ ID NO: 977362 - DNA, 120 bp, Artificial Sequence
  ENSG00000235244_3 (sequence is synthesized)
tcctacacaacatcaacaaccagtgggtaccctgtgccctagggagaagactgacagaatggcatcctgtggcacccttgacccagcctttctttgaggggagcaagaggaaaccagaca

SEQ ID NO: 977363 - DNA, 120 bp, Artificial Sequence
  ENSG00000235244_4 (sequence is synthesized)
atacttgaaatgcaatgcacctgggttaccatttcttgtctcagtgcagtacccaataatcaggaaattctctctcctctttacaagagataacgcctgataatgtggccactaccaccg

SEQ ID NO: 977364 - DNA, 120 bp, Artificial Sequence
  ENSG00000235244_5 (sequence is synthesized)
tctcaggttttacatagccccaagacctccagggcaaggatccctctcttcccctaaccttgtttctgcactaagagcaaagatccatagtctcaatgccctgcagtagcttcagctccc

SEQ ID NO: 977365 - DNA, 120 bp, Artificial Sequence
  ENSG00000235244_6 (sequence is synthesized)
agtttccaaacatggcggccaacaaggcctgacctccaccacctctgggacctgacaggccttgcagcccagggctccttggtggatgagcctggttccctcgctttcacaccaactctg

SEQ ID NO: 977366 - DNA, 120 bp, Artificial Sequence
  ENSG00000235244_7 (sequence is synthesized)
aaggcacccactcaggtgcccatgtccacctccagaattctctgagtgttccatacctaccctgttacctaacatacctaccctgttacctaacagaagtatgaatatacagagaggggc

SEQ ID NO: 977367 - DNA, 120 bp, Artificial Sequence
  ENSG00000235244_8 (sequence is synthesized)
cagaagccatactcaaaaagcttctgcttgatggcccttttgctccagtaatgccaaccactctggcctgccagacctttccccttgccttttgtcctaatccaaagggagtcccaaaac

SEQ ID NO: 977368 - DNA, 120 bp, Artificial Sequence
  ENSG00000235244_9 (sequence is synthesized)
cagtccaagaccttgaagtgggatttactctgcttgggttctcggggtgaactggtatccctttctgtcatgctctcagtgggaaatataaatgtctatgaaataattcatcaaaacgaa

SEQ ID NO: 977369 - DNA, 69 bp, Artificial Sequence
  ENSG00000235244_10 (sequence is synthesized)
gactcgcttacaactctaaggagtctacgtgaaagagtcataatagatcaaacaaattaagaattcaga

SEQ ID NO: 977370 - DNA, 120 bp, Artificial Sequence
  ENSG00000235244_11 (sequence is synthesized)
tgaaagagtcataatagatcaaacaaattaagaattcagagcccaatcctaacttcaagccaagaagtaaaaaaaggaagaaaaaatcaagacgctcagaacagaactccagcaatattg

SEQ ID NO: 977371 - DNA, 120 bp, Artificial Sequence
  ENSG00000235244_12 (sequence is synthesized)
aacccaggaaaaacgtcttcacaaatacaaaagtgtttcaaggaaaaattgaagtcactcctgcccacatccactgcccagtgtaaccgcccttaaagattgctgtgtatttgtgtacta

SEQ ID NO: 977372 - DNA, 120 bp, Artificial Sequence
  ENSG00000235244_13 (sequence is synthesized)
atttttctgtgtttataaaatcattcatatatttattaataacatgtttagaagaaatctctgcattaacctcagggcacacagctgtctttgatcgcccccaactcctcagaatgtcct

SEQ ID NO: 977373 - DNA, 120 bp, Artificial Sequence
  ENSG00000235244_14 (sequence is synthesized)
cctgctgaaaaactacttccaaccttaagctcaggccctgactcacagccctttattctaacagagcccctaggtgtttgggcagaggtaggtgggtattacgagggaagcgggaggagg

SEQ ID NO: 977374 - DNA, 120 bp, Artificial Sequence
  ENSG00000235244_15 (sequence is synthesized)
acagtgaggccccttaagttctttgtcctggccaggcggctgccctcctgcattacaggtctccacaggataggtcccaattcccaactactttcaattggtggggtgtggattggcagg

SEQ ID NO: 977375 - DNA, 120 bp, Artificial Sequence
  ENSG00000235244_16 (sequence is synthesized)
atgggttaatgctctgccacaactttctcactttataatgggagctgtatggtaaattcacctgatagtaataacttaagcatatcctgagaatgatcctgtatggcagacgcacctgaa

SEQ ID NO: 977376 - DNA, 120 bp, Artificial Sequence
  ENSG00000235244_17 (sequence is synthesized)
tcctgaatgtgtgtttgaagttctgagctaagaaatctgggggtggccaacacagagattcatttcttatttatgaagaagctgtgaacccccagccgtcccgtcccatggaatgtgggc

SEQ ID NO: 977377 - DNA, 120 bp, Artificial Sequence
  ENSG00000235244_18 (sequence is synthesized)
tatacaggggttcaaggccctgtattttgggttaaatgaagactgccaggtggaggttgttagggggaggctgtgaagtgaaaatactatataaggccgggcgcggtggctcacacctgt

SEQ ID NO: 977378 - DNA, 120 bp, Artificial Sequence
  ENSG00000235244_19 (sequence is synthesized)
cgtccccagaacgcagatcagaggtagtcggacctttcccgctggcgcgcagcctcagctaggtcagactattttaagaaaatagaagactatcatttacagctggtatggccctgtggt

SEQ ID NO: 977379 - DNA, 120 bp, Artificial Sequence
  ENSG00000235244_20 (sequence is synthesized)
ctcagctagggcacacagagtgaacagaaaaagaggatacctctgcgatcccgggtcatctccagatgctagggttatggtttattctagtgggcccaacctctgagaccatccttgaac

SEQ ID NO: 977380 - DNA, 77 bp, Artificial Sequence
  ENSG00000235244_21 (sequence is synthesized)
tttattctagtgggcccaacctctgagaccatccttgaacatcagtagactgtgagttgtacatgggcggacaatac

SEQ ID NO: 977381 - DNA, 120 bp, Artificial Sequence
  ENSG00000235244_22 (sequence is synthesized)
gccaaagcatgagaaaactcattgcgggactcattttccttaaaatttggacttataccatagggacttcaactgaccttcctcagactgaagactattcccagtatatacgtcaagtca

SEQ ID NO: 977382 - DNA, 83 bp, Artificial Sequence
  ENSG00000235244_23 (sequence is synthesized)
gtcactgaggtaggaaaaaaataccaggactctaaaaagaacttgtttgtataatgctattctatacaaggtatgtagcccag

SEQ ID NO: 977383 - DNA, 90 bp, Artificial Sequence
  ENSG00000235244_24 (sequence is synthesized)
attaaggactgaaacctggtgggggctcataaacgatatgagtaaagtgttagccaaaacaaaagaaaaaggggtgcccaaacaagtcac

SEQ ID NO: 977384 - DNA, 120 bp, Artificial Sequence
  ENSG00000235244_25 (sequence is synthesized)
aaaaggggtgcccaaacaagtcaccttgaagtttgatgcctgtgttgtcattaatagtaataagttaggaataggatgtggttctcttaattaggaaaaaggctatatggcaaaaaaaaa

SEQ ID NO: 977385 - DNA, 120 bp, Artificial Sequence
  ENSG00000235244_26 (sequence is synthesized)
aaaaaaaaaagtacatttgtcataaattaggactgtatggaaatgaacgtgcatactggtcttgtgtcatttcggctacttggataaaaaatgaaaaggatcccgtccaccttcagaaag

SEQ ID NO: 977386 - DNA, 120 bp, Artificial Sequence
  ENSG00000235244_27 (sequence is synthesized)
agaactagtaataaccaacccccttgatcctcactggaaaaaaggggagcgtgtaaccctaggaattgagggggctggactggatcctcgagtaaatatcatggcttgaggagaagttta

SEQ ID NO: 977387 - DNA, 120 bp, Artificial Sequence
  ENSG00000235244_28 (sequence is synthesized)
tggatcctcgagtaaatatcatggcttgaggagaagtttataaacgctctcctgagccagtatctcaacccttctacgattaactgaatgtgtcagtaccagaaattccaggaaaaacaa

SEQ ID NO: 977388 - DNA, 120 bp, Artificial Sequence
  ENSG00000235244_29 (sequence is synthesized)
attagctgagcatgtagcctagtctctcagtttcacttcatgttatgtatgtggaggaactataatgggagatcaatggccatgggaagcctgagaattagtacctacagacccagttcc

SEQ ID NO: 977389 - DNA, 120 bp, Artificial Sequence
  ENSG00000235244_30 (sequence is synthesized)
agaatcaccctgataacttctgggtcctaaaagcctcaattattagacaatactgtatagcaagagtggggaaggacttcaaccttcctgtgggaagactcaactgccttgagcaaaaac

SEQ ID NO: 977390 - DNA, 75 bp, Artificial Sequence
  ENSG00000235244_31 (sequence is synthesized)
cccagagtcccactgggactggaccaaattaccctaccagtgggcagatagttgtgttattggcactattaaacc

SEQ ID NO: 977391 - DNA, 120 bp, Artificial Sequence
  ENSG00000235244_32 (sequence is synthesized)
taaagacaggcaaactcctgggcttccctgtctatgcttcccacaaaaagagaagcatagctataggaaattggaaagataatgaatggccccctgagagaatcatataatattatgggc

SEQ ID NO: 977392 - DNA, 120 bp, Artificial Sequence
  ENSG00000235244_33 (sequence is synthesized)
gccccctgagagaatcatataatattatgggcccgctacttgggcacaagatggctcgcggtgatatgggacccccatttacatgctgaactgaatcatacggttacaagctgtcttaga

SEQ ID NO: 977393 - DNA, 78 bp, Artificial Sequence
  ENSG00000235244_34 (sequence is synthesized)
gtcttagaaataatcactaataagatcggcagagccttgactattctgacccagcaagaaactcagatgagaaatgct

SEQ ID NO: 977394 - DNA, 120 bp, Artificial Sequence
  ENSG00000266441_0 (sequence is synthesized)
taggcggtcagcaccacgccgcccgagtcctccacctccatcgtcagccgcgcatgtctcggcgccggccccagaacaaagaccgggaccagcatggaccggcgcgccgggaggctgtca

SEQ ID NO: 977395 - DNA, 120 bp, Artificial Sequence
  ENSG00000266441_1 (sequence is synthesized)
gcagctgggcggcgcggcccgagccctcttccaactggaggcttatcctgtggctgggaacatttcctgcctggctgcgaggagtgagactaagaaaccatacctcaggctgaggagaga

SEQ ID NO: 977396 - DNA, 120 bp, Artificial Sequence
  ENSG00000266441_2 (sequence is synthesized)
atatgtgtgctctagggaagaaaaggagaaaatgtgacactctctcatttaaagcatccacatcaaaaattgaagaactggattacattgctgtttacttagtcaagttacaataaactt

SEQ ID NO: 977397 - DNA, 120 bp, Artificial Sequence
  ENSG00000266441_3 (sequence is synthesized)
gatttccttttgggtcaggtaatccccttttacagcaagggaacgcttccctcccacaccctcagtgcgccactaccagactcttacctcactctcacatccctttcctcctcccaatca

SEQ ID NO: 977398 - DNA, 120 bp, Artificial Sequence
  ENSG00000266445_0 (sequence is synthesized)
cagacatgataatcccatttaacaatcaaagtttcacctataaagacgcccgtgtgtgctcaggaaacacccacagagacacagaagcagccacagagagaaatgccccagggccgggcg

SEQ ID NO: 977399 - DNA, 120 bp, Artificial Sequence
  ENSG00000266445_1 (sequence is synthesized)
cacgcctgtaatcccaacactttgggactgtgaggcaggcggatcacttgagggcaggatttcaagaccagcctaggcaacacggtgagactctgtctctagaaaaataaaaaaatcatc

SEQ ID NO: 977400 - DNA, 120 bp, Artificial Sequence
  ENSG00000266445_2 (sequence is synthesized)
cacctgtagtcctagctacttgggagactgagatgggaggatcacttgagcccaagaggttgaagctctcgtgagccatgattgagctgccgcactccagcgtgggcaacaaagtaagat

SEQ ID NO: 977401 - DNA, 120 bp, Artificial Sequence
  ENSG00000266445_3 (sequence is synthesized)
aatcccagcactttgggagtccaaggaaggcagatcatcgaggtcaggagatcaaggccagcctgaccaacaaagtgaaaccgtgtctctattacaaatacaaaaattagccaggcgtgg

SEQ ID NO: 977402 - DNA, 120 bp, Artificial Sequence
  ENSG00000266446_0 (sequence is synthesized)
gatcccgccgcctgactcctcggcctgggagacaggaaaagcggtcctgtttgggaacagtaaaagcagggcaaggaaaggaaggagcggcagaaaggaggggtgagtcgaggacacagg

SEQ ID NO: 977403 - DNA, 120 bp, Artificial Sequence
  ENSG00000266446_1 (sequence is synthesized)
acgcgggctcgccggctctccgcgcgcgggaagtcgagcccaggacgccgccttcaggccggcgcgctgacccggtgccccgacccggagcctgcggtctgcctggatccgtcctaaacc

SEQ ID NO: 977404 - DNA, 120 bp, Artificial Sequence
  ENSG00000266446_2 (sequence is synthesized)
tcgcgggctggacccgcggcctgagtgggtgggtgtgtgccagaggattcgggactaggcccagctccgggaacctggaaatgtggcccgcttctcagtggcttcctgttcatgcgcttg

SEQ ID NO: 977405 - DNA, 120 bp, Artificial Sequence
  ENSG00000235271_0 (sequence is synthesized)
cttctcctgcgggctaagggtgtgggcgacagctcgcacattcaaataagggagcgattacacggcgcttgcttctgaagacggatttcctgagacttttatgcgagtgtgagggccagc

SEQ ID NO: 977406 - DNA, 120 bp, Artificial Sequence
  ENSG00000235271_1 (sequence is synthesized)
aggtgcacatttgaagctcagtgggaagtgttttccaagcaacaggagacagcagatgcagatggggtccaattactgctgctcacggctgatcacgccatgcacttgtgtgcggatacc

SEQ ID NO: 977407 - DNA, 120 bp, Artificial Sequence
  ENSG00000235271_2 (sequence is synthesized)
tggctcctggtctcaggcacctagtatggggctatgcacacgggaacgctcatggattcctgagaagttggctggaactaagggagcattcagagaccacagatccagttgactggtccc

SEQ ID NO: 977408 - DNA, 120 bp, Artificial Sequence
  ENSG00000235271_3 (sequence is synthesized)
gctgacatccagtccacgttgttggccacatcagctcctcttcaaactcatgatgcaaatcaacagctaaacatgttgatattttttgtttctctcagctaagtggatccctgagtcctc

SEQ ID NO: 977409 - DNA, 120 bp, Artificial Sequence
  ENSG00000235271_4 (sequence is synthesized)
tttctctcagctaagtggatccctgagtcctcctggtgcagtggaaagatttgagttttgcagccaaatagagtgaggtttaaatggtggctaagcggctcacgcctataatcccagcac

SEQ ID NO: 977410 - DNA, 84 bp, Artificial Sequence
  ENSG00000235271_5 (sequence is synthesized)
tcccccatactgcgcctggcctgcaaccgtccttttttccccctgattattttcgatgtgttgttggttgaatccacaaatgca

SEQ ID NO: 977411 - DNA, 120 bp, Artificial Sequence
  ENSG00000225166_0 (sequence is synthesized)
ataactagcaaggtaagaacaaaataaccacatcttaagtacagtttgactttcatgactaaagataaaaattacagggaggtaggattttatttcactataaagatgaacttcctaacg

SEQ ID NO: 977412 - DNA, 120 bp, Artificial Sequence
  ENSG00000225166_1 (sequence is synthesized)
aaatgagaaactgattacatctgcttatttggacagtgaatggaaccacatattctgcctgttggcaaacaccaaatctgtatagtttattttcttcaaagggaatcatgattgccaaca

SEQ ID NO: 977413 - DNA, 120 bp, Artificial Sequence
  ENSG00000225166_2 (sequence is synthesized)
atcactcagcaccaacaatttactgaatgtttatctgcctgcattcttcttgtggctggaaatgtagcagtgaaccagaccgagaccctgatccgctgggtatatagctgggggagtcag

SEQ ID NO: 977414 - DNA, 120 bp, Artificial Sequence
  ENSG00000225166_3 (sequence is synthesized)
acattcatgaaaatgacttctagtgccacagatatttcaaaagatgcagtaaagagttctgtgggtctgaatgatatggtgtgctaaccaaatatgtgaaggtggcgaaggtctcctaga

SEQ ID NO: 977415 - DNA, 120 bp, Artificial Sequence
  ENSG00000225166_4 (sequence is synthesized)
caaaacttgagtctcaaaggatgagctgggtgaggagttgggcacagtattctgggcagtgggaacatcatggacagaagcctgaatgcagcggagagactgactcacttgtgggcatga

SEQ ID NO: 977416 - DNA, 120 bp, Artificial Sequence
  ENSG00000225166_5 (sequence is synthesized)
aggagatcagcatgactggattggagctcacttcctggtgttttcacctcattgcatccctggttggtttctgttgcttgcaatgaaagaacccttacaaatgcaataatgcagaagtaa

SEQ ID NO: 977417 - DNA, 120 bp, Artificial Sequence
  ENSG00000225166_6 (sequence is synthesized)
caatgaagatgacactgattcacacaagatttaatttgttacatgagtaaataaacaaagcaaaatgaacagaatttactatactgcatccctgctgggagtatgttgagctatctggcc

SEQ ID NO: 977418 - DNA, 120 bp, Artificial Sequence
  ENSG00000225166_7 (sequence is synthesized)
tggaaggcctttgtgacctgttgaaagaatatacatggatttacttcaggagaaaaataaagtgttattttaaaaatggatcatgttcattgtaattaagaataaaggttgtaaaaacta

SEQ ID NO: 977419 - DNA, 120 bp, Artificial Sequence
  ENSG00000225166_8 (sequence is synthesized)
gcatgactggattggagctcacttcctggtgttttcacctcattgcatgtaagcatcaatggacctacccctgcttctggccatatcaaacagttcaatagtttggcatctttgtgatca

SEQ ID NO: 977420 - DNA, 120 bp, Artificial Sequence
  ENSG00000225166_9 (sequence is synthesized)
gggacacatgaagaggccacatgcacttattctgtctaaaagccctagctaattgcaaggctgacagccagcagcaactatcatttttgtgaataaataagtcttcagatgattccaaat

SEQ ID NO: 977421 - DNA, 120 bp, Artificial Sequence
  ENSG00000225166_10 (sequence is synthesized)
cccagcctttgagtcaccccagctgatgtcaagtagagcaaagatgagctatcctcaccgaactccatctaaattgctgattcctgagcaaaataaatgtcattgttctaagtctctaaa

SEQ ID NO: 977422 - DNA, 120 bp, Artificial Sequence
  ENSG00000225166_11 (sequence is synthesized)
aaactataactagcaagggtctcatgaggctgaaatcaaggctgggctcctatctgaaggctctggagaagagtctgcctccaaactcagatggattgttggcagaattcagttcctggt

SEQ ID NO: 977423 - DNA, 120 bp, Artificial Sequence
  ENSG00000225166_12 (sequence is synthesized)
aaggtaagaacaaaataaccacatcttaagtacagtttgactttcatgactaaagataaaaattacagggaggtaggattttatttcactataaagatgaacttcctaacggtttgtatt

SEQ ID NO: 977424 - DNA, 120 bp, Artificial Sequence
  ENSG00000228189_0 (sequence is synthesized)
aggatctgtctcaccatacactgagaactgtagaatatgcaaggcacatggaacttattttcttacgtataaaagcgtgtatatgctccttatacatctgtcctaatgctttccaacagt

SEQ ID NO: 977425 - DNA, 120 bp, Artificial Sequence
  ENSG00000228189_1 (sequence is synthesized)
cctcactctaagcctcaccaagacccagatgaggaaacaaaggcacagagggataaactcagagcaggaagacagcaaggaatagcagtgaaaagcatggtgcttaatccaaccccttac

SEQ ID NO: 977426 - DNA, 120 bp, Artificial Sequence
  ENSG00000228189_2 (sequence is synthesized)
tcactgctgagacctggaaatgtgttcatcagctacaaaacaggagagatgataactcattatgtatatgtgatgataaacagagacaatatattgaagagcttatatgagtggcagaca

SEQ ID NO: 977427 - DNA, 120 bp, Artificial Sequence
  ENSG00000228189_3 (sequence is synthesized)
cgggacatgcttccctgtggctggccagcgtgtcatcttctccatgtgtccagagaaaagctttgcaaatcaacctctcgatgaatgatgacggcaccagtgaaatcaggggaggcagaa

SEQ ID NO: 977428 - DNA, 120 bp, Artificial Sequence
  ENSG00000228189_4 (sequence is synthesized)
tcacgtctgacatcaactttctcccaggtgacagctgcaccctctaaaggcttctcaaatgacagagctcaatgaatatagaagggaaaagtatgaggatgacctatgagcacagggtgg

SEQ ID NO: 977429 - DNA, 120 bp, Artificial Sequence
  ENSG00000228189_5 (sequence is synthesized)
acagtctctgcggtgggcaggcattagcaaaggagagaccttctgtattatgcagtctagagtggaattttccagaggctacatgatgagtgacgtcacgacagattgagtacagagcca

SEQ ID NO: 977430 - DNA, 120 bp, Artificial Sequence
  ENSG00000228189_6 (sequence is synthesized)
actatgagaatccagctgccttctattaaggtaccctttctgtggataccttcaagttccagcaccaaatatgaaggcgactgccatcaccagctcccacccctacatgaggtcaaatcc

SEQ ID NO: 977431 - DNA, 120 bp, Artificial Sequence
  ENSG00000228189_7 (sequence is synthesized)
ctggatggcatataacacactagagcaattaagaggatctaactaaaggtggggaaggaaaaatgtgtgtacagagacaggaagtcatggacacagttatattgaaagatacaatgacct

SEQ ID NO: 977432 - DNA, 120 bp, Artificial Sequence
  ENSG00000228189_8 (sequence is synthesized)
ggtggaccttcttcttggattgtgattcaaaagcccaaaccattcctcactggtctgaaaaagtggaattttccagaggctacatgatgagtgacgtcacgacagattgagtacagagcc

SEQ ID NO: 977433 - DNA, 120 bp, Artificial Sequence
  ENSG00000228189_9 (sequence is synthesized)
tgtataacagggtccttcttgggactcagccaggattcaaactataaaggaaaatcgggtgagcaggtgggatagtcaagtgattctatttgcatgaataattttgtgagatgatacctt

SEQ ID NO: 977434 - DNA, 120 bp, Artificial Sequence
  ENSG00000228189_10 (sequence is synthesized)
gtatgtgcaagaaccaaagaaaataactgtcatgagaattctgacctcattaatacccacagactagagacaccaggaatctaagcttgcaaaagcataagggaacataagggttgtgtt

SEQ ID NO: 977435 - DNA, 120 bp, Artificial Sequence
  ENSG00000228189_11 (sequence is synthesized)
catgatgcagatcgaagagccccagtgatttcccaataaaatgctccagttgtataaatttgcttgaccttcagtagatgctcattccctatggtccacatctactgcaggctcacattc

SEQ ID NO: 977436 - DNA, 120 bp, Artificial Sequence
  ENSG00000228189_12 (sequence is synthesized)
tggacagggagaatcctccgcgtgactgaagcaagaggtcccacatgatttgcttttcgcctggcatggaggcactgtttgccctggtgaccaagggcacatagccctgtctttcctctg

SEQ ID NO: 977437 - DNA, 120 bp, Artificial Sequence
  ENSG00000228189_13 (sequence is synthesized)
gaccaagggcacatagccctgtctttcctctggcggccattggattcatactctgttctgagataactttgtattaatcaagacctcctaacatgtctctctctctctctcttttttttt

SEQ ID NO: 977438 - DNA, 87 bp, Artificial Sequence
  ENSG00000228189_14 (sequence is synthesized)
gagtctcgctctgtcgcccaggctgagtgcagtggcacaatcgcggctcagggcaagccagcctcccaaatagctaggactacaggc

SEQ ID NO: 977439 - DNA, 120 bp, Artificial Sequence
  ENSG00000228189_15 (sequence is synthesized)
gcgtgagccaccacgcccggccacatgtctcttttttgaaaatgacaagcatgctgtgatgaggttctcaagatctgatcacagctttctctcaacaacgcaccaggatgtagcggtgct

SEQ ID NO: 977440 - DNA, 120 bp, Artificial Sequence
  ENSG00000228189_16 (sequence is synthesized)
cagctctgccttcttctgtcctggcttgggtgctgtgttgagacagacacagcagcaagcgagcaaacctcttgcagtcctgtagccttcccccttttcttcttctctgtctgtcccatc

SEQ ID NO: 977441 - DNA, 120 bp, Artificial Sequence
  ENSG00000228189_17 (sequence is synthesized)
cccttctcttttctttcccctcatctccattcttttcttcctttcgttcctgtcactgttttcttctttgcttttgttctgtttccagctttcaaaacacatttataaagagagcttcct

SEQ ID NO: 977442 - DNA, 120 bp, Artificial Sequence
  ENSG00000228189_18 (sequence is synthesized)
ctgagccaaaagtaacaaaactgtttcacattctttatctggtagcaggctgctgtctaaagggcattgtaaacacttcccagactttccctcaataaggggactgcctgattctcagtt

SEQ ID NO: 977443 - DNA, 120 bp, Artificial Sequence
  ENSG00000228189_19 (sequence is synthesized)
acagaatgtcattagctctaatgcgtgctggtttccctgctagaaaatagcaactaacataaattataaaatattaaaattaataccaataaactgtcttgtatttgcaacatgaatgaa

SEQ ID NO: 977444 - DNA, 120 bp, Artificial Sequence
  ENSG00000228189_20 (sequence is synthesized)
caggcattagcaaaggagagaccttctgtattatgcagaaattggacctttgaggaccagctgggacttgggaatatagaaagaggtccttcaactcaacaacaaaaagacaaacaaccc

SEQ ID NO: 977445 - DNA, 120 bp, Artificial Sequence
  ENSG00000228189_21 (sequence is synthesized)
aatcaaagaattgtcaaaggacttgaatagtcaacactccaaagaagatatataaatggccaagtggaattttccagaggctacatgatgagtgacgtcacgacagattgagtacagagc

SEQ ID NO: 977446 - DNA, 120 bp, Artificial Sequence
  ENSG00000228189_22 (sequence is synthesized)
ctcattgtgatattatcacgcctttccacacttgggcttctgagattgttacactggaagtctgccctaactacagggtcacatgtagaactgcgtccacaaagaggcagattgattgtg

SEQ ID NO: 977447 - DNA, 120 bp, Artificial Sequence
  ENSG00000225163_0 (sequence is synthesized)
aaggggtggggacacgttgcatccatggtgctgtttgtgcaggtggcctccaggagggcagtttccagagatgaatttccttccccttgcccagcccaccactgcccagccctgtgggct

SEQ ID NO: 977448 - DNA, 120 bp, Artificial Sequence
  ENSG00000225163_1 (sequence is synthesized)
gtcagagcttggacgatcaaggtggacctacccgctcagaaagacagtggcgcttctgtcaagggagacctcaacgaccttcctctgaaaagaaaaatgtccttgcaagtaggtaaatga

SEQ ID NO: 977449 - DNA, 120 bp, Artificial Sequence
  ENSG00000225163_2 (sequence is synthesized)
ggttgcctggtgattatggaataagcagcggacttacagacactcagcgtccaggcgcaccaggccaccacatcccagacatgagtacctgtgcaaaatgcattcattcctccatcttgg

SEQ ID NO: 977450 - DNA, 120 bp, Artificial Sequence
  ENSG00000225163_3 (sequence is synthesized)
acgagtttactgagcacctgtgatgtgccaggcactaggggtgctgcagcggaagagctaagcattgagggagaccagaactgccttctgaatgccattatgacttgactcagctgggaa

SEQ ID NO: 977451 - DNA, 120 bp, Artificial Sequence
  ENSG00000225163_4 (sequence is synthesized)
gtcacctcgtcccttgtccctgggaaactccatgttaccagcatgttatcagcatggctccgaatcctatatccaccctccagccacaccccgggacactctggatcgaagccacccagc

SEQ ID NO: 977452 - DNA, 77 bp, Artificial Sequence
  ENSG00000283554_0 (sequence is synthesized)
agcatgatcacctaccaaatcataataaatatctatatatttggagatagagatgaaaaccatgtggctgtatccag

SEQ ID NO: 977453 - DNA, 120 bp, Artificial Sequence
  ENSG00000283554_1 (sequence is synthesized)
tatttggagatagagatgaaaaccatgtggctgtatccagttggagtgaaaaatatgaactatgaagaaagaaggagttctgcttcttccaaaggagtgactcccaaaggaacaagaatt

SEQ ID NO: 977454 - DNA, 120 bp, Artificial Sequence
  ENSG00000283554_2 (sequence is synthesized)
gaccataggttatggcttgtgttacaatacaccgatgttgtctttgaggccatccactgacgtcctcacccatggcataagcaagtttttctgaaggtctctcttgtgctcctgcctcct

SEQ ID NO: 977455 - DNA, 120 bp, Artificial Sequence
  ENSG00000283554_3 (sequence is synthesized)
gacccacagacactgggagagaaatgaagacttattgttttagactttgatattctggaattgattgcagcatcattacggcaaaagctgactaatacaattccatttgttattctatta

SEQ ID NO: 977456 - DNA, 120 bp, Artificial Sequence
  ENSG00000283554_4 (sequence is synthesized)
agttctttttgttaaaaaagtatataaccattgttgaaaaattagaaaatacagaaaatcaaaatgaagaaaaaaattgggtaggaagacaggctcaaacaactatgatgcaattacatg

SEQ ID NO: 977457 - DNA, 120 bp, Artificial Sequence
  ENSG00000283554_5 (sequence is synthesized)
attacatgtttatttacaattgtgataagtgctataaagggaaagtctgtattctaggataatattaatatttaaaaagagggcataggctaggcatggtggctcatgcctataatccca

SEQ ID NO: 977458 - DNA, 120 bp, Artificial Sequence
  ENSG00000283554_6 (sequence is synthesized)
gggggttgtcaaaacctgtggaaatgtggcctttggtgaccggccatggcataatatgacaacatttctggagtagtccagcactgggaatggtacccttgggtcaggccgtaccattcc

SEQ ID NO: 977459 - DNA, 120 bp, Artificial Sequence
  ENSG00000283554_7 (sequence is synthesized)
tcctgccgtcctcacatattctcccacggttctgcagatgaaatgtaagaacttcctccaggtaatcttccactggcaggctgcattgtcaacagcagctgtcctccagaaactcagtac

SEQ ID NO: 977460 - DNA, 120 bp, Artificial Sequence
  ENSG00000283554_8 (sequence is synthesized)
tgtgttttaaagatctattcataatgatgtgcgtacatctggttcttagcttctacttgttgaagagtcttcatggtgcgtgtaacccctttcacctatctactcagccaatggacacca

SEQ ID NO: 977461 - DNA, 120 bp, Artificial Sequence
  ENSG00000283554_9 (sequence is synthesized)
agactgcctccaagtctctgccacgatgaccattctcatacagcttccctcatggactcacacacctgcagtggaattgtgctggaggagccaaatagtcaagactggggaaaggagagg

SEQ ID NO: 977462 - DNA, 120 bp, Artificial Sequence
  ENSG00000283554_10 (sequence is synthesized)
aggaagaagaccatgaagtagggaacctactgatcctaggagccatccaggaactgcaactattgtgtgcctaaatacaggaagggccagcgactgaggatgtgccttctggatgcctgc

SEQ ID NO: 977463 - DNA, 120 bp, Artificial Sequence
  ENSG00000283554_11 (sequence is synthesized)
gtatcccaatttccagaattaagtaggaatgtgacttcatttctgcttgtccctggagcaactctgcagattcacctgggctgtctaaggcaggagtgatttttgtaaagagctggctgc

SEQ ID NO: 977464 - DNA, 120 bp, Artificial Sequence
  ENSG00000283554_12 (sequence is synthesized)
gcataagattaacactactccatttcccactactttgcatctggggacacttcttacaaggattcatatgccatgaggactggcattatgttgaggtggaataaagagctggttacatcc

SEQ ID NO: 977465 - DNA, 120 bp, Artificial Sequence
  ENSG00000233143_0 (sequence is synthesized)
aacaatgtcaaggagttaatagtcttggcaacacagaggccactggacagaggcataaccttgcgtggcagctgcacgggaattggatttggctcaggtgtttcagatgactaagaaaac

SEQ ID NO: 977466 - DNA, 120 bp, Artificial Sequence
  ENSG00000233143_1 (sequence is synthesized)
caaaagatcctgccttactatgcacctatggcccttcaaaggcgagagtagaatctgctatgatttagaagcaagcaataaaaagtacacatcagggtgcctagagacttcacctctatt

SEQ ID NO: 977467 - DNA, 120 bp, Artificial Sequence
  ENSG00000233143_2 (sequence is synthesized)
tccatgagggactgaacagcctcttgagaagggactcatcaaaatggaagagttggcaataagaagtttggctaaataaccaagcactgaagttgcagaggagaaaggatttgaaaggca

SEQ ID NO: 977468 - DNA, 120 bp, Artificial Sequence
  ENSG00000233143_3 (sequence is synthesized)
gtacagtgtccaggggcaagttggcaatttttagcaggaggtgaagtgatgccagcagaggtaacagtgctcagagggaccagtagtccccaggaggagcaggggaatccccagtggatc

SEQ ID NO: 977469 - DNA, 120 bp, Artificial Sequence
  ENSG00000233143_4 (sequence is synthesized)
tgatttgttcaagagcacatgtgagattatcagctggcgttacaattttggagtggcagtgagaagcagtgaatttgaggtcactcaatttgcagaccccaaagggtgaaatgttgagaa

SEQ ID NO: 977470 - DNA, 120 bp, Artificial Sequence
  ENSG00000233143_5 (sequence is synthesized)
acatgagttacacatgtatttaacagctcttgtgtattatcacaaatcctatttcacctctcatgcccccgaggctttggtgtccagttctctgaagacttcatcaatcctcagccataa

SEQ ID NO: 977471 - DNA, 120 bp, Artificial Sequence
  ENSG00000233143_6 (sequence is synthesized)
atcacctgagagcaactcaccttgcttcatactatgaagctccctgatgtcacagcatggcaggcctgtggcaacccctcaacacttatgcatgatcccaaacagctagaggattaacac

SEQ ID NO: 977472 - DNA, 120 bp, Artificial Sequence
  ENSG00000233143_7 (sequence is synthesized)
ctacggtgtaacccttgaccagcaggaaatggaaattactgtctttttgtccccgcaggtgaatggttctaaaatgcattttataagccttctgaaatagtcccacaggtcaagcaccta

SEQ ID NO: 977473 - DNA, 120 bp, Artificial Sequence
  ENSG00000233143_8 (sequence is synthesized)
cttgctccagtggtgaccaactcaatgatgcatccttgggttgactctccctcctttccagttcactttccccgcccctcactcctgcacctcagcatcacattcctgaataaaccactc

SEQ ID NO: 977474 - DNA, 120 bp, Artificial Sequence
  ENSG00000233143_9 (sequence is synthesized)
acacatctgtcttatttcagactctgtttgggggaatccacaataaaaatttgtcattttgagttaaacattgctctcaccttgaagacatatttccatacctagagatttctgaagttc

SEQ ID NO: 977475 - DNA, 120 bp, Artificial Sequence
  ENSG00000233143_10 (sequence is synthesized)
tctcccttttcctatcatctcctttgtgctttgtctgacctccatgttacagagccccatgatatttagagccagtactgctagggaagtagttcagttgtgttttaaatggttcagcaa

SEQ ID NO: 977476 - DNA, 120 bp, Artificial Sequence
  ENSG00000233143_11 (sequence is synthesized)
cttgtaacatcaactgagaaccagaggaatacacttggaggccaagaaaaaaatgttagctaatatgtaccatacagtatgattccttgggtaagggaaagtatatgcaagtgacagagg

SEQ ID NO: 977477 - DNA, 120 bp, Artificial Sequence
  ENSG00000233143_12 (sequence is synthesized)
gtggataatgatgaatctgaagaccagaacagtgggccaatttgccttagttgagagtggcaaataaatgaagaactgaagaacgtatctctttaactagtgctcctttgttgagaagat

SEQ ID NO: 977478 - DNA, 120 bp, Artificial Sequence
  ENSG00000233143_13 (sequence is synthesized)
acaaaacaaacaattgaagggtatggatgaagccattggcttattcatgtctctgttgatcataatgagattaatatatataggacattcacacaaagaggatattgactcgatggctta

SEQ ID NO: 977479 - DNA, 120 bp, Artificial Sequence
  ENSG00000233143_14 (sequence is synthesized)
cagattattagagttagaaatgtgacctactactaaaggaagaatgtttcaggtgtggatctctgatttaaaaaatacaccacacttgcctcagtgaagcaagtcaacttaggtgctgat

SEQ ID NO: 977480 - DNA, 120 bp, Artificial Sequence
  ENSG00000233143_15 (sequence is synthesized)
acaatgccactgcagctgtgctgagttcatgaaatcagatcccactctcttcacctacccctaccgtattcatcctactttccgtctgctctgcccttcccatttggtaacctagtcatg

SEQ ID NO: 977481 - DNA, 120 bp, Artificial Sequence
  ENSG00000233143_16 (sequence is synthesized)
aaacacctggctctgggtccttccttcagcatcactccacgttgtactgctggcatcgcttttcttggcacagaacctcttagggctgctatcctaggagtaggtgctactcaggctggc

SEQ ID NO: 977482 - DNA, 120 bp, Artificial Sequence
  ENSG00000233143_17 (sequence is synthesized)
ttagtcccaggcttcactcacttcttggcccatggccaggaggaccggaaagaacaaactctctgcacatctctgcaggtggccacagagcccccatctgagccttgctgatggagaaga

SEQ ID NO: 977483 - DNA, 120 bp, Artificial Sequence
  ENSG00000233143_18 (sequence is synthesized)
gcatgctgcatcacaagataactgtgtggctctgttcaaaaaccttgtttagaagttattatttcttttattgcattagaatttgcctcactgtagcttttgtgcttctgtcctggttca

SEQ ID NO: 977484 - DNA, 120 bp, Artificial Sequence
  ENSG00000233143_19 (sequence is synthesized)
gccttagatagcagtgcagcctggtccatgtgaaagctcttgcaataggcctttctgctagtcaggagttctcagacccatccctactcttcacttttctcaagactaatatcagactcc

SEQ ID NO: 977485 - DNA, 120 bp, Artificial Sequence
  ENSG00000233143_20 (sequence is synthesized)
tgggctcttcaaggtttcctcatatgataaaagttctaagccctccattgtcctagtcactgtcctctctgttccatccctgtctgcccttccaagatgctgcacctggagatgaatttg

SEQ ID NO: 977486 - DNA, 120 bp, Artificial Sequence
  ENSG00000233143_21 (sequence is synthesized)
tccttcctggggcaagtcaccatgagatgattacttttggatcatactgaatttgtgggttaaataaactcataggtctttatctcatgcactaaatccaaattcgatctcttgccgtaa

SEQ ID NO: 977487 - DNA, 120 bp, Artificial Sequence
  ENSG00000233143_22 (sequence is synthesized)
atcatttttttgaatagctgaacaataagtaaataatacacaaatgaaaactaatcaatatttgaacatcctcagtattttcagccctagtttgagccagacatagctcatcttgtatac

SEQ ID NO: 977488 - DNA, 120 bp, Artificial Sequence
  ENSG00000233143_23 (sequence is synthesized)
ttcactaaggacactttatacgatcaagcaattaatattatgatgtcatgtctcgcaagccccatagtgtcacttccagtctcttcaccacaaagaacgttgaagccttcgtattttttt

SEQ ID NO: 977489 - DNA, 120 bp, Artificial Sequence
  ENSG00000233143_24 (sequence is synthesized)
gaaaatcatatttctagctgcaggatgggatgtaagaaaagttcagattaggattattctaggctcctgactataactaaaatcctgattttttatggaaaggaatgaggatcattcctt

SEQ ID NO: 977490 - DNA, 120 bp, Artificial Sequence
  ENSG00000233143_25 (sequence is synthesized)
agactgctggtttaaaaaagagaggtccatccagcagggatgatgcttttcctcgttgaaagaggacattcacctaatgggagacctggagtcagaatctttctgatgtgtgacttggca

SEQ ID NO: 977491 - DNA, 120 bp, Artificial Sequence
  ENSG00000233143_26 (sequence is synthesized)
cagtaacacaatgcaggatgctggtgtgttaataaaaataaaaattgcatcgcctacctcagagtcgacaacaatgtcaaggagttaatagtcttggcaacacagaggccactggacaga

SEQ ID NO: 977492 - DNA, 120 bp, Artificial Sequence
  ENSG00000233143_27 (sequence is synthesized)
ggcataaccttgcgtggcagctgcacgggaattggatttggctcaggtgtttcagatgactaagaacaaaggggaccactcttggtatagaagttcatctcgtcgggagcatctgtggtt

SEQ ID NO: 977493 - DNA, 120 bp, Artificial Sequence
  ENSG00000233143_28 (sequence is synthesized)
tcctggccctgtcattctggggaaacatgtttctgctttctcctatatgaaatagaggcagtgggtatcctgaacatgtcacctttacttgtccagcttgtcagttagggtttggttagg

SEQ ID NO: 977494 - DNA, 120 bp, Artificial Sequence
  ENSG00000233143_29 (sequence is synthesized)
gaaacagagctgctgtaaacattatgggaataagggattttattcagaattggagcctgcacagatgtagaaggaggcatgaagagggtattggaggattgcccactatgcagtctgcat

SEQ ID NO: 977495 - DNA, 120 bp, Artificial Sequence
  ENSG00000233143_30 (sequence is synthesized)
cctgagtctgtggtgaggctggacacgttcaagcttacaggagaactggagaaagcaagcaacacagcggtggaagtgagaccactgaaggtaagcttgggagggggtcccgacaccacc

SEQ ID NO: 977496 - DNA, 120 bp, Artificial Sequence
  ENSG00000233143_31 (sequence is synthesized)
acatcagtggatccacagctaagtgattggtggtggcctggggttctgctgtttagcagggacaagagtggaggagacaaactggactcggaacaaactgggagcctctgcatccatccg

SEQ ID NO: 977497 - DNA, 120 bp, Artificial Sequence
  ENSG00000233143_32 (sequence is synthesized)
taactgtctggccgtgacagtggttagagaggagtggcttctgtgaaactctcacaatctcaaatctcccacaagtgcctctttcagctaactctaaactggtaccatagaggaaatgga

SEQ ID NO: 977498 - DNA, 120 bp, Artificial Sequence
  ENSG00000233143_33 (sequence is synthesized)
ttctgaaaacttggtctccaaccttagacaaattgaataattaatatgtcctctcctgcttcttctgtaactgaatttgcattgggaagcaggcctgtcactctcagactttgtggtttg

SEQ ID NO: 977499 - DNA, 120 bp, Artificial Sequence
  ENSG00000233143_34 (sequence is synthesized)
agtagggctcacttcagcaccaccttttcctcttctcagccccacggactggcatgagactcaggcctggccaactgaatgtcacacacctatgaccatcagttggctcagagatggact

SEQ ID NO: 977500 - DNA, 120 bp, Artificial Sequence
  ENSG00000233143_35 (sequence is synthesized)
caggacaccatcacagccaatgaaaccctgttagggaaatttgtcagaaccatacaaagaaatagctccacttttccatagagatgagacataagcctggactaactggtgtccaatttg

SEQ ID NO: 977501 - DNA, 120 bp, Artificial Sequence
  ENSG00000233143_36 (sequence is synthesized)
ccatcaagagagcatctgagaagacagaggaaaactggggaaagcgaagtctaaggaaggtgagtaaggacaagtccagttgatattacatgaatcacctggacctggaaatcaaggcat

SEQ ID NO: 977502 - DNA, 120 bp, Artificial Sequence
  ENSG00000233143_37 (sequence is synthesized)
tgctggattcaaggccaagaaaaattggaagctggcttgaatcaggttctatcacttgcagttgaaaaggtccagactaatatgataacaaaggagcaagtaagcaagattctgccctac

SEQ ID NO: 977503 - DNA, 120 bp, Artificial Sequence
  ENSG00000233143_38 (sequence is synthesized)
agtaagtgctcaatgcatgtcagctggtattattattatacagacttctatttctagcccttttatttctaccacctctcttctgtgttttatgtaaagtgcataaggattgttctgttt

SEQ ID NO: 977504 - DNA, 120 bp, Artificial Sequence
  ENSG00000233143_39 (sequence is synthesized)
ggaaacatcaaaccatataaaatgacaccagcaggtccctttctgtctgtcagtgtccacaagctcaacaaccaggatcagcagacaaaaacagctaagctggagtcagtgtttttatga

SEQ ID NO: 977505 - DNA, 120 bp, Artificial Sequence
  ENSG00000233143_40 (sequence is synthesized)
agaaacaggaaaagaacttacttgggaactgtagctcatcctccaatattctccatcctatcactcttttcatgacagtttcttcttggccctgaagttgccttgtcatggctccctgcc

SEQ ID NO: 977506 - DNA, 120 bp, Artificial Sequence
  ENSG00000233143_41 (sequence is synthesized)
tctgtcctttctctgtctcacttacatcttccaatgaggaatacagcaagacctttggatgaggacctccaaaggtcctcagtatccttaggacactcggtgcagaactagagggactga

SEQ ID NO: 977507 - DNA, 120 bp, Artificial Sequence
  ENSG00000233143_42 (sequence is synthesized)
gaggaggagcttttgcaggttaaatgactagtgaatggcctttccttatatttccattagaaatgggattagctacacctgagaaggaatgactttggaacaactgatccctagctttcc

SEQ ID NO: 977508 - DNA, 120 bp, Artificial Sequence
  ENSG00000233143_43 (sequence is synthesized)
aaaatatgagaaattgagatgcagggagtagtaagcacctagttaatgagtcaaagcatatttataaagttcacagggtacatagcatatagcagctgttctctatctcagttgagtttt

SEQ ID NO: 977509 - DNA, 120 bp, Artificial Sequence
  ENSG00000233143_44 (sequence is synthesized)
ttatgaaaagtcactgaaataccttctctggaaaatgttagaagctcaagtacaatggcttagttaaaggcaggtgggggagaaacttgaagaatgtggtccagtacaagaataccccat

SEQ ID NO: 977510 - DNA, 120 bp, Artificial Sequence
  ENSG00000233143_45 (sequence is synthesized)
ttttcccctaaggcaatgaaaatgacatgaagtaatcatagttatttatacaggaacaatttaggagacttagaatattcacttcttttgccttctagctgagcatcaaaattctctctc

SEQ ID NO: 977511 - DNA, 120 bp, Artificial Sequence
  ENSG00000233143_46 (sequence is synthesized)
tgtctctgcctctctctctctattttccacttctagctccaactattttaaatccctcccccaatagaactcataacaaacataaaacaacatttgttgtatgtttacaatagatgttca

SEQ ID NO: 977512 - DNA, 120 bp, Artificial Sequence
  ENSG00000233143_47 (sequence is synthesized)
ccccttcctgaactttgcctcctggatcttgaggtctgccttctgtggaagagaaatactagaatcaatgaactgtgaactagagccctgggattatcaacagccagctgaaattttgag

SEQ ID NO: 977513 - DNA, 120 bp, Artificial Sequence
  ENSG00000233143_48 (sequence is synthesized)
agccaccttatagaaagcctaacagcaaagactggagagaggcttccagccaacagccagcaaggaattgaagccctcagtccaatagcagtgaggaattgaatcctgccaacagcctcg

SEQ ID NO: 977514 - DNA, 120 bp, Artificial Sequence
  ENSG00000233143_49 (sequence is synthesized)
tggatgggttgcttgctgcctgaatctaactcctgctactactgcaaataccactgccatgaatatcctcagcaagacccccttccagacctgcatgaacagttgtgtgaaataccgact

SEQ ID NO: 977515 - DNA, 120 bp, Artificial Sequence
  ENSG00000233143_50 (sequence is synthesized)
gcttcatgctgggcttcagacatgagaggctaggagtaggaggcatgccttgttcaaaggtcttaaatgtgggaaatagtctacagtttggaagacaccagagaaaaatgctccacagct

SEQ ID NO: 977516 - DNA, 120 bp, Artificial Sequence
  ENSG00000233143_51 (sequence is synthesized)
cgccctggtgactcactacaacttatgggaagatgtgagattattctgtattctaatgtatgttagaaggcacactccacccaaagccttcctgtgtgttcctccctgtgagctcacatc

SEQ ID NO: 977517 - DNA, 120 bp, Artificial Sequence
  ENSG00000233143_52 (sequence is synthesized)
ccgttcaccagctgactgggaagggaagtcaggaccagccctgaccccatcacaccatcataacctcgggatggcagggctggaaggcacctcagacgtcatcctttgcagactcttcat

SEQ ID NO: 977518 - DNA, 120 bp, Artificial Sequence
  ENSG00000233143_53 (sequence is synthesized)
tttacagtgagaggcatgacgtgtccacagctggttagtgccaaagcctgggacaggcttcacattgtccagctcttagtcagagcactgttgacaatgtctgccttcacttggaattca

SEQ ID NO: 977519 - DNA, 120 bp, Artificial Sequence
  ENSG00000233143_54 (sequence is synthesized)
actggactagggaagaatccacttccaagctcattcaagttgttggtcgaattcatgtcctcgagtctgcatgagtgaggtcccagctcttactgactttaatcctcaggtcctagaggt

SEQ ID NO: 977520 - DNA, 120 bp, Artificial Sequence
  ENSG00000233143_55 (sequence is synthesized)
ggctcccactttcctgccacttggcactatccacaggggcttaaccaggtggctgtttgcttcttcaaggccatcaggagaatttctctcctggtttgctaagatagagccttatataat

SEQ ID NO: 977521 - DNA, 120 bp, Artificial Sequence
  ENSG00000233143_56 (sequence is synthesized)
aaaacataatcacaagagtgacatttcagcacctttacataactacataactttacataacataaaccaacctaatcaagggagtgtccttccaacaactttgccacactgcgttggttg

SEQ ID NO: 977522 - DNA, 120 bp, Artificial Sequence
  ENSG00000233143_57 (sequence is synthesized)
caagtaagtcacaaacccacactcaaggggattacacaagagtggattattggggtctccttaaagcatgtcctccactatctactttgaaacttctttacaaagctttcattttgatga

SEQ ID NO: 977523 - DNA, 120 bp, Artificial Sequence
  ENSG00000233143_58 (sequence is synthesized)
tttgtttcagatgactgaagcccactctcattaaaactatttggaaactgctgtctagtgacattatattaaagccaatctgtttaaacaagaaagagcagtgctcccacttggtaggag

SEQ ID NO: 977524 - DNA, 120 bp, Artificial Sequence
  ENSG00000233143_59 (sequence is synthesized)
ataagactccttacagcctcagctatcaacaacatggcttatgctatttctttatgtacatatctatatatgtccagtgcatgccaaataaggtctgtaagcgttgaaacataataataa

SEQ ID NO: 977525 - DNA, 120 bp, Artificial Sequence
  ENSG00000233143_60 (sequence is synthesized)
aatgaactcaggtaccctcattccaatttaagagctaaaccattatgaactccattctatctacctatgtatttcttcttatgccattcccctacctcccagaggtaaccaaccattcag

SEQ ID NO: 977526 - DNA, 120 bp, Artificial Sequence
  ENSG00000233143_61 (sequence is synthesized)
ttgctataattcatttgcctttttgataattttgtgacacacatatttaacaataaaggagtggtgtgctattgctaacttctgaactataataatggcatcacataccgcaaagtgttc

SEQ ID NO: 977527 - DNA, 120 bp, Artificial Sequence
  ENSG00000233143_62 (sequence is synthesized)
tgaggttagctttttccacacaacgttatgtttttgagattgagctctgctgcttctcctagctgtagatcaatcatttccactcgcacaattccactgtgcaaagatgacacaaataag

SEQ ID NO: 977528 - DNA, 120 bp, Artificial Sequence
  ENSG00000233143_63 (sequence is synthesized)
tagacgtttttatcaatgggcatttcagttcttttcatttttcactgccatgaatactgctgccgtgaacattgtcatgcatctcctagtactcatatgcaagtattttttttctggcgt

SEQ ID NO: 977529 - DNA, 120 bp, Artificial Sequence
  ENSG00000233143_64 (sequence is synthesized)
atgcacctaaaagtaaaatcactgagtcttagggtatgcaaatattcaactttacaaggaatgacaaattgttttccaaagcaaactcttatcagcaacttatgagttcctttaacctat

SEQ ID NO: 977530 - DNA, 120 bp, Artificial Sequence
  ENSG00000233143_65 (sequence is synthesized)
tttctcctcaaccagacttcttcatatggccaatttagaagctataaaagggtattttatttttatcttactttgtattttttgaatattagtaagtctaaacattttatgtgcttattt

SEQ ID NO: 977531 - DNA, 120 bp, Artificial Sequence
  ENSG00000233143_66 (sequence is synthesized)
tccatttgtattttctcttctgtgagatgctggtttatttctctgttgtttacattttccttcatatatttgtagaagttcttcatatattcaatggttaaacttttgttaattctcgta

SEQ ID NO: 977532 - DNA, 120 bp, Artificial Sequence
  ENSG00000233143_67 (sequence is synthesized)
ggacagaggcataaccttgcgtggcagctgcacgggaattggatttggctcaggtgtttcagatgactaagttgggagcatttgacaattttagatgtgggatgaaaattgccttatcta

SEQ ID NO: 977533 - DNA, 120 bp, Artificial Sequence
  ENSG00000233143_68 (sequence is synthesized)
ctatgaacaagtgaagatggtgggcgatttcagctgcttcagaatcactctacctgtctcaaggacaaagggaagaaacccacaatactagatgtattatatattttctagagtccaaaa

SEQ ID NO: 977534 - DNA, 120 bp, Artificial Sequence
  ENSG00000233143_69 (sequence is synthesized)
ttggtaatctattcaaaattgtaacaaaaataactgcatttttctttggaaaataatagttgattcctttttgctttttttacttatgaattggggtgcaatagagtttaataaaaatga

SEQ ID NO: 977535 - DNA, 120 bp, Artificial Sequence
  ENSG00000228459_0 (sequence is synthesized)
agtggtacctctgtagctgccctgactcactgtgccatcaaaaatctccttcaatcaaaccagcctctgaatgcactcgacaaggtcctgcatgttgaagcctgcaatctgcaaatctgc

SEQ ID NO: 977536 - DNA, 120 bp, Artificial Sequence
  ENSG00000228459_1 (sequence is synthesized)
accatctttctaaagctgcctgctgcttacattttgagaggaggatgaggttaattatcggaggtggaaaataaatatcacagagcagctggacatgggggagcttgcagcgtcagcaaa

SEQ ID NO: 977537 - DNA, 120 bp, Artificial Sequence
  ENSG00000228459_2 (sequence is synthesized)
tcatggacactcaccctgctacccagagagaaaagggacccctggagacttgagcaaaagaaaaatgctggtacatttttaccccaggaggcacagccaccccagagccacacagcaatg

SEQ ID NO: 977538 - DNA, 120 bp, Artificial Sequence
  ENSG00000228459_3 (sequence is synthesized)
gatacttaagaataagacacaagaaggtagccacctgcaaaccaaaaggagagtcctttccagaccctggatctgctggcacccagatcttggacttccagcctccagaaccatgagaaa

SEQ ID NO: 977539 - DNA, 120 bp, Artificial Sequence
  ENSG00000228459_4 (sequence is synthesized)
ttgaagatcattgctttagccactcagtgtatgctgttttattatagaatcccaagtggacagaggcagggaggaatattatcctgtttctccaatggttgtcattaaagacccatcaag

SEQ ID NO: 977540 - DNA, 120 bp, Artificial Sequence
  ENSG00000228459_5 (sequence is synthesized)
cctgctgtgtgcctcagagccagattccaaaatgccctcaagttgacttcaagttttctgcccacagctctgtagccaatttggggcacgtgtaccgtccacaccattccatgccctgga

SEQ ID NO: 977541 - DNA, 120 bp, Artificial Sequence
  ENSG00000228459_6 (sequence is synthesized)
agttggcatggaaaacaaaaattgcataatctccctcatacgtggaatctaaaaaagtcaaactcatagaaatagagagtagaatggtgggtgccagaggatgggggcatgcagtgtatg

SEQ ID NO: 977542 - DNA, 120 bp, Artificial Sequence
  ENSG00000228459_7 (sequence is synthesized)
ttggtcaaagggtacaaagtttcagttagacaggaaggataagttctggtgatctattgcataacaaggtgagtgtatttgtttgttctggcattgctataaagaactatgtgagactgg

SEQ ID NO: 977543 - DNA, 77 bp, Artificial Sequence
  ENSG00000228459_8 (sequence is synthesized)
atacaatcatgacagaagatgaaggggaagcaagcatatcttaccatggtgatggaggagagaaagaaggagtgagt

SEQ ID NO: 977544 - DNA, 86 bp, Artificial Sequence
  ENSG00000228459_9 (sequence is synthesized)
aacatacaatcatgacagaagatgaaggggaagcaagcatatcttaccatggtgatggaggagagaaagaaggagtgagtggggag

SEQ ID NO: 977545 - DNA, 120 bp, Artificial Sequence
  ENSG00000228459_10 (sequence is synthesized)
gtggagacacagagccaaaccatatcagtgactgtagttaataatatatcgtatatttttaaattgctctaaaaattgaatttcaaatgttctcaccataaagacatgacaaatatgtga

SEQ ID NO: 977546 - DNA, 120 bp, Artificial Sequence
  ENSG00000228459_11 (sequence is synthesized)
catgacaaatatgtgaagtgatgattattttaattagcctgatttgttaatgccacaatgtataaatgtataaaaatcacgttttaacccataaatacatgtaattgttatttgtcaatt

SEQ ID NO: 977547 - DNA, 120 bp, Artificial Sequence
  ENSG00000228459_12 (sequence is synthesized)
aaaaataaaaataaattgaaaactaaaaatagtaaagggagttccctccatgaaggatcaatgagtacatgccatagatttaattttgacagcaagaaacaagaaggttgcaacagtcca

SEQ ID NO: 977548 - DNA, 120 bp, Artificial Sequence
  ENSG00000228459_13 (sequence is synthesized)
aacattgtgtgataaatggttgctcttaaaaatatttttatagtttgcctcaataagctaagacataagttataatctattaggtaggagtatattcattcagtggcttactgttatact

SEQ ID NO: 977549 - DNA, 120 bp, Artificial Sequence
  ENSG00000228459_14 (sequence is synthesized)
cataaacagcttcatcctacttacccaaggttagttttcatgaagactgatcatctgaataaatttggttgcaaatactaattattgaaattaatggatacctactgtggatgtctattg

SEQ ID NO: 977550 - DNA, 120 bp, Artificial Sequence
  ENSG00000228459_15 (sequence is synthesized)
ttctaagtattcaacacatattcaagtgggtttcatcaatgactaaagcaaggctctattaacctatttacaaccaagatggcagcccagtgtgagactcatgatggtggcccactgtga

SEQ ID NO: 977551 - DNA, 120 bp, Artificial Sequence
  ENSG00000228459_16 (sequence is synthesized)
gacttctctccccagcctctggtaaccatcattctacactgtatctccgtgagatccacttttttgagttcccacacaggagtgagaatatgcactgtcttccagtggctggcttacttc

SEQ ID NO: 977552 - DNA, 120 bp, Artificial Sequence
  ENSG00000228459_17 (sequence is synthesized)
acttaacatcatgacctccagtttcatctatgtttgaacagttttaatcaacatgaaattcacaagaaagcaaaagagtggaaacaggactgcagtcaattgccttgatcagaacctgat

SEQ ID NO: 977553 - DNA, 120 bp, Artificial Sequence
  ENSG00000228459_18 (sequence is synthesized)
caagaactagtcaccactttggaaaacaccatctatggaaatcctcctgctgctatttgagttgccaacacaacacaccagtgttggcagttctggtatctatctcaatgattacatcta

SEQ ID NO: 977554 - DNA, 120 bp, Artificial Sequence
  ENSG00000228459_19 (sequence is synthesized)
gagcaaacctgtgggtcttttgttccatccctaccttatcatttacctattaaaatgccatggtgttttaaaataagagttgctttcctgttacatttctgttttacattgcagttacag

SEQ ID NO: 977555 - DNA, 120 bp, Artificial Sequence
  ENSG00000228459_20 (sequence is synthesized)
aaaagagcagaatatctgcagctgccaagacctcggctctaattctagatttgcagcccatggctgcacaataggcacaagaatgaaccaacgtcaccaccaaggaaagtggcacagctg

SEQ ID NO: 977556 - DNA, 120 bp, Artificial Sequence
  ENSG00000228459_21 (sequence is synthesized)
agctgcacccacgtctgactccaagggaccagctattgacagctattcaccatttggtttctgtgtgtcccagtcctcacgtggaaaatgggcaaatattatctgcttcatcggtattcc

SEQ ID NO: 977557 - DNA, 120 bp, Artificial Sequence
  ENSG00000228459_22 (sequence is synthesized)
tgggaacctagaggaagcactagccaatatcattcacttagcataccggagttatctttccattttcttaattcaagaaccttgctctttttgccaattatcttagtagtttttcagtga

SEQ ID NO: 977558 - DNA, 120 bp, Artificial Sequence
  ENSG00000228459_23 (sequence is synthesized)
cctctcagtaaaagcaatgtattttgtagccttgtctttcacagaaatcgccttataaattgtttgatatacaattaaacaaaaactttatttctgcattgctcaaagaatatatatttc

SEQ ID NO: 977559 - DNA, 120 bp, Artificial Sequence
  ENSG00000228459_24 (sequence is synthesized)
atttgttataaaatattatagcattcagctaagtctcatacatttatttatttatttttatttactttttctctccaacttctattttatgttcagagagttcatgtacaggtttgttaa

SEQ ID NO: 977560 - DNA, 120 bp, Artificial Sequence
  ENSG00000228459_25 (sequence is synthesized)
ggtgtacagattatttcatcacccagataataagtgtagtatcccacaggtagttttttgatccccaccctccaccctcaagtaggcgttggtgtatattgttctcacctttgtgtccat

SEQ ID NO: 977561 - DNA, 120 bp, Artificial Sequence
  ENSG00000228459_26 (sequence is synthesized)
caatgcttagctcccactgataagtgagaacttgtggtattttgttttctgttccgttcctctgttaattcacttagaataatggcttccagctccatccatgtagccgcaaagaacata

SEQ ID NO: 977562 - DNA, 120 bp, Artificial Sequence
  ENSG00000228459_27 (sequence is synthesized)
atggtgtatatgcaccacattttctttattcagtctgctcttaataggcatctaagttgattccttacctttgctattgtgaatagtgctgccatgaacatacacgtgcatgtgtcttta

SEQ ID NO: 977563 - DNA, 120 bp, Artificial Sequence
  ENSG00000228459_28 (sequence is synthesized)
ctgccatgaacatacacgtgcatgtgtctttatggtagaacaatgtatattccttcgagcatatactgagtaatgggattgatgggtcgaatggtagttctgtttttgttttttgagaaa

SEQ ID NO: 977564 - DNA, 120 bp, Artificial Sequence
  ENSG00000228459_29 (sequence is synthesized)
tctccaaactgctttccacagtagctgggctaatttacatttccactaaccgtgtataagtgttcccttttctctgcaatcttgggagcatctgttgtttttgactttttaatcatagcc

SEQ ID NO: 977565 - DNA, 90 bp, Artificial Sequence
  ENSG00000228459_30 (sequence is synthesized)
ttaatttgcatttctctgatgattagtaatatggagtattttttcaagtttgttggctgtgtgttatgtcttttttgtagatcttttttc

SEQ ID NO: 977566 - DNA, 89 bp, Artificial Sequence
  ENSG00000228459_31 (sequence is synthesized)
cttttttcttttttttctttttttttcggaaacagtatcttgctctgttacccagtctggagtgcagaggcatgatattagctcactgg

SEQ ID NO: 977567 - DNA, 60 bp, Artificial Sequence
  ENSG00000228459_32 (sequence is synthesized)
ttgcccattttttaatgttgttgtccaacatttctttgacatcaacactgtacactgcaa

SEQ ID NO: 977568 - DNA, 120 bp, Artificial Sequence
  ENSG00000228459_33 (sequence is synthesized)
ttgtccaacatttctttgacatcaacactgtacactgcaacaatattggtaagtgtttatatatattattttgattattttttgccttaataatgctctattatcacttccatcatagga

SEQ ID NO: 977569 - DNA, 120 bp, Artificial Sequence
  ENSG00000228459_34 (sequence is synthesized)
ttcccttctgtctgtctgaatgttttcttatctaggcttcatctggtcctgtgttgttgcatgacttttgttaaatcttttagtatccttggtctacgtggcttccgttattacgcatct

SEQ ID NO: 977570 - DNA, 120 bp, Artificial Sequence
  ENSG00000250544_0 (sequence is synthesized)
atgttctaaagggatgtcatcatttacaaaatgtctttgttgagtctgaatggttcaaacaatagcaaaaaaggattatttctctcttggacatttcaaagtactatgacacaaaatatc

SEQ ID NO: 977571 - DNA, 120 bp, Artificial Sequence
  ENSG00000250544_1 (sequence is synthesized)
caagacttgttatggtgaggagccaagtggaatggaaaggacagctcatcccggcggctgggagtgcatgcacacacatgccccctttttcttgcctactaacaggatctatagaaggcg

SEQ ID NO: 977572 - DNA, 120 bp, Artificial Sequence
  ENSG00000250544_2 (sequence is synthesized)
tacataatgaagcaagagatggaccctgagggtacttgaagccaacaagtttcacttctggaaaaagacttcagaatatgagtttaaaatataaaaagggaatttgagccaagacacaag

SEQ ID NO: 977573 - DNA, 120 bp, Artificial Sequence
  ENSG00000250544_3 (sequence is synthesized)
aacaaactttttttgacaattatatctttattattcctcttacagagctacatttactcttactaagtttcagagtcaggtagtaatttacagtaagactgaattaccatccataacgtt

SEQ ID NO: 977574 - DNA, 120 bp, Artificial Sequence
  ENSG00000250544_4 (sequence is synthesized)
agatgtccttattgaaacttcaacatcatttccaaatatcagcattagcattgtgcttgacattcatttaacgaagttactgaaaatctattaagtataagacatcagttatttttaata

SEQ ID NO: 977575 - DNA, 120 bp, Artificial Sequence
  ENSG00000250544_5 (sequence is synthesized)
gaagtttctgaaaacatttcagcaaaatagcctgttgagaaaaatgtgtatgctgaaaaaaaaaaatgaacaaataggaaagcctggttcacaaacaggtgtcagggaaatagacagtac

SEQ ID NO: 977576 - DNA, 120 bp, Artificial Sequence
  ENSG00000250544_6 (sequence is synthesized)
ttttatagtaataacataagaacaaacttcttgaaggtaagttttattaaataataggacaacaacaagataaaatgacttcttcctgatatttatatattgattgctggctggtcataa

SEQ ID NO: 977577 - DNA, 120 bp, Artificial Sequence
  ENSG00000250544_7 (sequence is synthesized)
gactgtttttaggcaacgtgttttgaaaaaccagaaagtctactaccttgagttttcagccacgtgagaatagcaagattcagtgtttatacttgatagcatcttaattaggcctacagg

SEQ ID NO: 977578 - DNA, 120 bp, Artificial Sequence
  ENSG00000250544_8 (sequence is synthesized)
cattatggagaagagagaagagttaagctaaaaacagaccactttcagaggacctgaaagcaacgtaatcagtcacctattgccatatacaagccacccccaaacataatgacttaaaac

SEQ ID NO: 977579 - DNA, 120 bp, Artificial Sequence
  ENSG00000250544_9 (sequence is synthesized)
agcgatcatctattattgcttatgagtctctgagtcagctgaacattcctgctgatctgggcttggttaggcttattttagctgtgttcattcttggtctgcagatagctgacaatcacc

SEQ ID NO: 977580 - DNA, 120 bp, Artificial Sequence
  ENSG00000250544_10 (sequence is synthesized)
taggggctgactgtaggcattccagctgagatatgctctctgtgtcttttatcctttagcaggaggaggcttgctcacagggtggttacaggcatccaagagagtcagcataaatgtgaa

SEQ ID NO: 977581 - DNA, 120 bp, Artificial Sequence
  ENSG00000250544_11 (sequence is synthesized)
aagtttccaaaatatcagattcagtcctatgtaatctggtttccattgcattctcttggccagagcaagttgcaagacaagtccaaattcaagaaggtcaagaaatacactccatctcca

SEQ ID NO: 977582 - DNA, 120 bp, Artificial Sequence
  ENSG00000250544_12 (sequence is synthesized)
ggtaggagaagctgcaaagaactgtgacaatctatgacaaatagtatgttcaaagggaataatatgggaagatgtgccctccgccaacttctcagggaaaaatacagcttttgtaatatt

SEQ ID NO: 977583 - DNA, 120 bp, Artificial Sequence
  ENSG00000250544_13 (sequence is synthesized)
tagtaatatagactgtctaatatttctagagaaatctatgactttgagttgaaatatctgaggccaacactccaagcaattttaaacaagtggtgacagaaattaccagacacacatcaa

SEQ ID NO: 977584 - DNA, 120 bp, Artificial Sequence
  ENSG00000250544_14 (sequence is synthesized)
gactcaagtataaagctatacaatttaaggatgctcagcaaatgttactgaattgactgggtagtccctaaagagctgaagaataaaagatgttatgagaaatccaacaataccaaatat

SEQ ID NO: 977585 - DNA, 120 bp, Artificial Sequence
  ENSG00000250544_15 (sequence is synthesized)
aaattgcctcaggttctgaaatattcaataaagtattctcactgtagttccttcagcttagctgatttggactttggctgtgaaaacattatcctcagtgtttaaaaggttggaaaattc

SEQ ID NO: 977586 - DNA, 120 bp, Artificial Sequence
  ENSG00000250544_16 (sequence is synthesized)
tactgggtctttggcccaacctggaattaaatcctgatgcttagaacctcaaagtctaaaatcttctattgtcactttacagagctattgaaacatattaataaacttgtatcatactga

SEQ ID NO: 977587 - DNA, 120 bp, Artificial Sequence
  ENSG00000250541_0 (sequence is synthesized)
tgatctggtggtggggaaggaagggaggaacaagttttatagacttctatcgtccaatcattgtgtaaaccaggaggaagtgttacagaattctcaaacatttccattgaggaaacactg

SEQ ID NO: 977588 - DNA, 120 bp, Artificial Sequence
  ENSG00000250541_1 (sequence is synthesized)
cattgaggaaacactgaaatccatcagaaagagatgtctaaaaaggcatgtgagatccatagaaacactgaacagaaatctacctctgggccgagcacagtggctcatgcctgtaatcct

SEQ ID NO: 977589 - DNA, 120 bp, Artificial Sequence
  ENSG00000250541_2 (sequence is synthesized)
caggggcttcactagcactggccatgtttatttttttaagtagagtgatagctttatggctgttcattttattgtcactctttggaggttatgtatgtatcatatatacttcatacatat

SEQ ID NO: 977590 - DNA, 120 bp, Artificial Sequence
  ENSG00000250541_3 (sequence is synthesized)
caatgattacatgataaaagaagagaaaagccaccctactgactcatgccacatcttccgttcaaatgctcggctccttttgaactaactcccctttcaggctctcccttctattcacca

SEQ ID NO: 977591 - DNA, 120 bp, Artificial Sequence
  ENSG00000250543_0 (sequence is synthesized)
gacctgtctcctgcattccccatggcagcaacaacatgaggctgttttgtgaaacagcctttgtcctaaaatgttgaggacaataaggtggaggctgcagcacatggcaagaaaacactg

SEQ ID NO: 977592 - DNA, 120 bp, Artificial Sequence
  ENSG00000250543_1 (sequence is synthesized)
ggaaccaaaaatccggcttctgtctctgaagttgattggacgtgatgggcccaggcaagatttgcctggcacatcgttcctaaggaagcaggatcccaacaatggaactttccttctctg

SEQ ID NO: 977593 - DNA, 120 bp, Artificial Sequence
  ENSG00000250543_2 (sequence is synthesized)
caaaggactaaaaaacttctgtgtgatttgatacagacaatttagaaaacttttgtttcaaagtttcccatccagactagccaaggagagcaagggaggggagctaataagcccattaag

SEQ ID NO: 977594 - DNA, 120 bp, Artificial Sequence
  ENSG00000250543_3 (sequence is synthesized)
gtgtcttcccaaacaaatgttttctttgtccttctgcccaaatgcagaaacagctgcagctttaaaaaatagcatacttttatcttttgaaggaaatatgtgaaagttttagcactggtt

SEQ ID NO: 977595 - DNA, 120 bp, Artificial Sequence
  ENSG00000250543_4 (sequence is synthesized)
gtctttggttggcaagaaattgtttagtgttatttatttcttcctatttttctgaattttccaaattgtccacagcaagcatgactactttatcataataaaatctccaatgtattatgc

SEQ ID NO: 977596 - DNA, 120 bp, Artificial Sequence
  ENSG00000225298_0 (sequence is synthesized)
agaaaaatggatgaagttccagggatggaatccgagtgatcgctaaggcaattcatatattttacccaccttaggataactggtttaggattggacaaacaatctcagctgcttcaatca

SEQ ID NO: 977597 - DNA, 120 bp, Artificial Sequence
  ENSG00000225298_1 (sequence is synthesized)
gactcacttcctttcattcagatggaagatgggaaaacacaatgctatagactttggaatattgtatgggctcgtaatcagcgtactgaatttcaagccattccttggccactcaatggc

SEQ ID NO: 977598 - DNA, 120 bp, Artificial Sequence
  ENSG00000225298_2 (sequence is synthesized)
ggagaattaaatcaaatatctggagcaatttaatgtgcatgcattcgtggccacaaaaatgaagatacaaataagtaggtgctggatattagaccttcgtcagacacatagaccagtgga

SEQ ID NO: 977599 - DNA, 120 bp, Artificial Sequence
  ENSG00000225298_3 (sequence is synthesized)
acagaatagagaacccagaaattagatcactcatcttcaaccatccaatcttcgacaaacctgacaaaaagcaatggggaaaggactccctgttcaataaatggtgctgggagaaatggc

SEQ ID NO: 977600 - DNA, 120 bp, Artificial Sequence
  ENSG00000225299_0 (sequence is synthesized)
ctgccccatcaaaggttctaaaatatgcttagggcatctctattaagaggatgaggagaaaggaggagggggaagatgctaacaactaaatggttcaatatgatgcagtatttccaatgg

SEQ ID NO: 977601 - DNA, 120 bp, Artificial Sequence
  ENSG00000225299_1 (sequence is synthesized)
cgggagacagaaacaatgtcacaaagtgggagaggcactaagaatgagatctggcaccacttactcttgtttctatacaatcgaagtacaacacttctcaattttctaggcgtctttggg

SEQ ID NO: 977602 - DNA, 120 bp, Artificial Sequence
  ENSG00000225299_2 (sequence is synthesized)
accaactcagtaacccaaactgttcaccaatacttcttttaagtagttgtgaggtagggagtccaacacttcccaagagatcctgttagtacattatagcaactacagggaatgttttac

SEQ ID NO: 977603 - DNA, 120 bp, Artificial Sequence
  ENSG00000225299_3 (sequence is synthesized)
aaatgactgtcattataatgttaaatctaacatatatgccaacccccttagtttatacaataactttcctccaaaaatcttaattaaaaataaaatatagctgacttcgttataaagaga

SEQ ID NO: 977604 - DNA, 70 bp, Artificial Sequence
  ENSG00000225292_0 (sequence is synthesized)
actggcgtcagcaggaaagatcagctctgccatttgaaacacccaactgctaccttctctcagaaatcaa

SEQ ID NO: 977605 - DNA, 120 bp, Artificial Sequence
  ENSG00000225292_1 (sequence is synthesized)
cagtacatcatatgagccagagtgctggccaggaatgagaccacgctttgcctgttggtcaccgcatctccagggaactcagaggcatctccaggaaacacctgaatatgtgagctggtt

SEQ ID NO: 977606 - DNA, 120 bp, Artificial Sequence
  ENSG00000286006_0 (sequence is synthesized)
gtagagggaaaagagaaaagaaaagaagcaaagaggagggtggtggagggaagaggggtcattgaccataagcgaggcattctaattaaaagggagaacatacaagaacttcaaatccta

SEQ ID NO: 977607 - DNA, 120 bp, Artificial Sequence
  ENSG00000286006_1 (sequence is synthesized)
gcacctacccactacacactcccagtttcccctctgccctaccacccatcctcctgatgcttatcttagataaaaattctgaaatgggtcaagcaggcccagctcggcactgagtaccag

SEQ ID NO: 977608 - DNA, 120 bp, Artificial Sequence
  ENSG00000286006_2 (sequence is synthesized)
ttcaggagacagccaccaggaccctcagctgacagcaattacaggtccgagacattttcctctggcactgtattgtattaacttttttttttgtttcctttaaattacagggtgacctgc

SEQ ID NO: 977609 - DNA, 120 bp, Artificial Sequence
  ENSG00000286006_3 (sequence is synthesized)
tttcagttgggaagttataaccagtggccgaatgagaacaatattttccctataaaaagaacagaagagccaaggattcttcaaagattcctgggcactgagaaaacaagtaaatacaaa

SEQ ID NO: 977610 - DNA, 120 bp, Artificial Sequence
  ENSG00000286006_4 (sequence is synthesized)
atttagctatgacaattacagacagacatcaacaaaaatctttttaaaaagataaactttcttcattaaaatataatttgtttgatctgtatttatatatctgtgccctgctaccgtatc

SEQ ID NO: 977611 - DNA, 120 bp, Artificial Sequence
  ENSG00000286006_5 (sequence is synthesized)
attaaaaatatttgaagtcggatatacgatgcattaatttggcagattatcacattatctagttaactttatcttacatgttaccttctgggccagtggtgctaggactccgatcaaact

SEQ ID NO: 977612 - DNA, 120 bp, Artificial Sequence
  ENSG00000286006_6 (sequence is synthesized)
aacaagggctaagtgttgctcttgtctggcactgggagttaacagtatatacttcatgataactgaaaaattggcaggaattgagtatatgaaaactacgtatgaagacaagcaatacag

SEQ ID NO: 977613 - DNA, 120 bp, Artificial Sequence
  ENSG00000286006_7 (sequence is synthesized)
cttttaattctaattgtttacaaaaattataaagcattgttgggaaattgttaaaatgatttgaatactaccaagggtttgaaataaaactgaaaaaaacatcaaaggttattcaacaat

SEQ ID NO: 977614 - DNA, 120 bp, Artificial Sequence
  ENSG00000286006_8 (sequence is synthesized)
aaattattttacaatgacaagagaatccaaaagcagcatctgatgtatcttaggatcccaaaatttcaggagccgtgaactctaactctaaacaatgcattatttatggactttccagtc

SEQ ID NO: 977615 - DNA, 120 bp, Artificial Sequence
  ENSG00000286006_9 (sequence is synthesized)
tttgcttaaatgtctctattcatgagcatcccttacttctccaaagcaatcgaactgcatttcacatcactctgaaggaaacagagagggagaattcctcagctggagttcaaattggcc

SEQ ID NO: 977616 - DNA, 120 bp, Artificial Sequence
  ENSG00000286006_10 (sequence is synthesized)
tttctacagttctttccgaatggccccaggattcttttctgacttcatgaggacaacacttcagatgagagagctcctctgtgtgcatcctccaagtttatctgctaaaccaagataaac

SEQ ID NO: 977617 - DNA, 120 bp, Artificial Sequence
  ENSG00000286006_11 (sequence is synthesized)
atccccggttcctctttttaagtttttaagtgctggagtacatgtgcaggatgtgcagactcctgagattgccatatgaacccagcccagccagcctactagagaatgagagaccacatg

SEQ ID NO: 977618 - DNA, 120 bp, Artificial Sequence
  ENSG00000286006_12 (sequence is synthesized)
gggaagagcttaccagactttcaaaaatccctatggctggaaaaggcttggaggtttctctctccattacgattcatgcacctgcttcctcttctgcaaccacccctaactttcctgcag

SEQ ID NO: 977619 - DNA, 120 bp, Artificial Sequence
  ENSG00000286006_13 (sequence is synthesized)
agaagagccaaggattcttcaaagattcctgggcactgagaaaacaaactcctgagattgccatatgaacccagcccagccagcctactagagaatgagagaccacatggggaagagctt

SEQ ID NO: 977620 - DNA, 120 bp, Artificial Sequence
  ENSG00000286006_14 (sequence is synthesized)
tctgagagagaataatgagacagaagtttggatcaagaaaccatttattcatttgtccagcatttgaccatccaaattgtacaactttcaaaaatccctatggctggaaaaggcttggag

SEQ ID NO: 977621 - DNA, 120 bp, Artificial Sequence
  ENSG00000286006_15 (sequence is synthesized)
gtttctctctccattacgattcatgcacctgcttcctcttctgcaaccacccctaactttcctgcagaactaccattagataaataaagtttattttatttcaagatttttaaagacagg

SEQ ID NO: 977622 - DNA, 120 bp, Artificial Sequence
  ENSG00000286004_0 (sequence is synthesized)
tgccagagctgggaagtgaacattcagtctacaagatacactgctcattccctcaggaccatgtctacaccaagacccaggagctgggaacatgtcacctagagcaggccgcagggccca

SEQ ID NO: 977623 - DNA, 120 bp, Artificial Sequence
  ENSG00000286004_1 (sequence is synthesized)
ggagagcctgggagccagagaaatgtccggtgcttcaagacatacaccttaaatcccactggaccctgctcaccatctgaccttgaagagcccgggaccctcaaaggggaaggggcgtgc

SEQ ID NO: 977624 - DNA, 120 bp, Artificial Sequence
  ENSG00000286004_2 (sequence is synthesized)
ctggtccaaggtaccaggaagctgtcatcgggaatggaggctcatggaggctcaggatctgggggagggcaaatgttagcggaagggtgactctcttctggccacagggtagggggagag

SEQ ID NO: 977625 - DNA, 120 bp, Artificial Sequence
  ENSG00000286004_3 (sequence is synthesized)
ccctgccaaggtcagggtaccagagaagaggccctgcttcattggcagacacagtgtacaggggacagagagaaacagaggagtccaatgttggcagacacagtatacaggggacagagg

SEQ ID NO: 977626 - DNA, 120 bp, Artificial Sequence
  ENSG00000286004_4 (sequence is synthesized)
gaaacagaagagtccaatgttgttacatccagctggggggcccaggaggtacagctgctgaggaggaagagagggaccaggaaaacctccctcccctctcaccttccttagacacccacc

SEQ ID NO: 977627 - DNA, 120 bp, Artificial Sequence
  ENSG00000286004_5 (sequence is synthesized)
atgcaccccacatgcccacccgatgctggtttctgggagaatatgaaggggcagaagtcatagcctgggtcctcaggaagacactatgcgccagctcttcactgagagtgtaccttcact

SEQ ID NO: 977628 - DNA, 120 bp, Artificial Sequence
  ENSG00000286004_6 (sequence is synthesized)
accagctctggagaggtggccaagagcacccagagagtaaaaggtaaagccagcattcagcccattcacgactgtactgcttggcacaaggatgcgggcccatggaggtccccgcggaag

SEQ ID NO: 977629 - DNA, 120 bp, Artificial Sequence
  ENSG00000286004_7 (sequence is synthesized)
tcttatgacccacattggactcgctgagtggataccatgtcattcactgacgctgagtgaatgcatggattctgtgaggaagtctgaagaagggacaggggttccaggaaaaaacagtag

SEQ ID NO: 977630 - DNA, 120 bp, Artificial Sequence
  ENSG00000286004_8 (sequence is synthesized)
attccacacagtgtcactccttcctgaaacctcaccagaacaacaattaaaaaaggatgttctgaatgccataggcccctagggagggggagaatggtagaggaaaaaccaccacagaac

SEQ ID NO: 977631 - DNA, 120 bp, Artificial Sequence
  ENSG00000286004_9 (sequence is synthesized)
tttggaagctggaaagcagatgggctggtggcagttgagagctgacccaagaaaatcacaaatcccagcgtgagagacacttgactgaccgcctgcaatcctcaaaagcccaggaactgg

SEQ ID NO: 977632 - DNA, 86 bp, Artificial Sequence
  ENSG00000286004_10 (sequence is synthesized)
ttgactgaccgcctgcaatcctcaaaagcccaggaactggcagccccggaaacctctggaagaagagagtcggaatgcagtggcgc

SEQ ID NO: 977633 - DNA, 75 bp, Artificial Sequence
  ENSG00000286004_11 (sequence is synthesized)
taacaccactcttaatggtgagagactaaatgcatcccctggaagatcagaaacaaggtatctacccttctattc

SEQ ID NO: 977634 - DNA, 120 bp, Artificial Sequence
  ENSG00000286002_0 (sequence is synthesized)
cttttgctcctgtgaggatggccccatgcagacctgtttcccaggtagcagtcccaagagcagcaggttttggacaatggtcatgaatatcttttatctgacaggcactctgctctagga

SEQ ID NO: 977635 - DNA, 120 bp, Artificial Sequence
  ENSG00000286002_1 (sequence is synthesized)
tgctggagaagtgagacttttatttgccagtgaagactcaatatagcaacaaaagaacaaagagatgtgatagtcttcctccaggggccagttttcttctggatgaatgcatttggtcat

SEQ ID NO: 977636 - DNA, 120 bp, Artificial Sequence
  ENSG00000286002_2 (sequence is synthesized)
caagaatgtctcaagactttcaatggccttattttatactacctcaggcctctcatctgcattcacagacttcaaatatgtataaccagtataacatttttgaaatactttccaacatgt

SEQ ID NO: 977637 - DNA, 120 bp, Artificial Sequence
  ENSG00000286002_3 (sequence is synthesized)
ttccttgtacctcatacctcttctgcatttcagcttcattgaaacagagaggacaggtgctacttgtgaaaaaggagaatataacaaggaaaaatcctctccttccccttggaggtctga

SEQ ID NO: 977638 - DNA, 120 bp, Artificial Sequence
  ENSG00000286002_4 (sequence is synthesized)
agaagaaaggacatagagacagggcagtaggcagtcatgtgtgtgcttagaactccgtactccaaggtgataagttaaatctgaagagaggaaggtgaccaacagagttaggaagacaca

SEQ ID NO: 977639 - DNA, 120 bp, Artificial Sequence
  ENSG00000286002_5 (sequence is synthesized)
gactctgaatagagagccacagggccttcctggagacaggataaccccacagccttctccagaaaccctttagaggacttacagagactcagagggatctacagagtcagtaaggatcaa

SEQ ID NO: 977640 - DNA, 120 bp, Artificial Sequence
  ENSG00000286002_6 (sequence is synthesized)
aaggaggccagacaatggagggaaagctcttgaccatggcagagctgtgaaacctatcacaaatttatcagctgcagaatgtctagagaaggcggccagctagagcagattccagtgatg

SEQ ID NO: 977641 - DNA, 120 bp, Artificial Sequence
  ENSG00000286002_7 (sequence is synthesized)
ccaggcagcacccactcagggagaatcatggggagaccttttctttctggatctgtgaagatctttctccccatctcagacaccatccgaagagagggcagaggtgtagagaagaaagaa

SEQ ID NO: 977642 - DNA, 120 bp, Artificial Sequence
  ENSG00000286002_8 (sequence is synthesized)
ataatacttcaaagagacaggttactcaactggactaagttttgaaccagactgcattaaaactagggcagtggtggtggttgttttcattacaccaatcaggtagaatacaaaaggata

SEQ ID NO: 977643 - DNA, 120 bp, Artificial Sequence
  ENSG00000286002_9 (sequence is synthesized)
tcagaacaaattcagaaaacatggaaactactttttctgcacacctcagtataatgcaagtaattctgtgatcctaatatgtatgaaatcattgaatagataaagctaagaggacaacaa

SEQ ID NO: 977644 - DNA, 120 bp, Artificial Sequence
  ENSG00000286002_10 (sequence is synthesized)
agtatggagtggtatgatgagtctatgagaaggtaaatgattttcagacaattcaaattctctagcgaatttgttgtcacaaaatacactgtaattaaactgcattggccttgggcaaaa

SEQ ID NO: 977645 - DNA, 120 bp, Artificial Sequence
  ENSG00000286003_0 (sequence is synthesized)
gcgtggaagttgaggatgactagtgagttaattccttatacccctttcagctcttggattccatatatctaattggtacttgcttaatgaggaggagaatgcttttgttaataccactgc

SEQ ID NO: 977646 - DNA, 120 bp, Artificial Sequence
  ENSG00000286003_1 (sequence is synthesized)
ctctaccaccaggcattttcaatgctatttctgttggcacatttttatttcattcccaggagaggaaagcagcatgctctgcccactgcagacacatttgccatttacaagcctttggtt

SEQ ID NO: 977647 - DNA, 120 bp, Artificial Sequence
  ENSG00000286003_2 (sequence is synthesized)
gcccaggaattaaggaccgggggaaacggctgttcacttccacctctggccccctggagagaaacacaggtggctgaaatcattcaccaagttctcaagacagattgtcaagtgcgaaga

SEQ ID NO: 977648 - DNA, 120 bp, Artificial Sequence
  ENSG00000286003_3 (sequence is synthesized)
aagcactttaaagagattgataaaataagatgtcacaacctccagtacttcttactatcagaaccaatcctcaggagaaatgcagtatttaacaacatttaagatgaaagaagtttgctt

SEQ ID NO: 977649 - DNA, 120 bp, Artificial Sequence
  ENSG00000286003_4 (sequence is synthesized)
attaaacaaaatgtgccatcaccaactctgttggccaattccacaacatttatgaattcctatcctcttcatccaagtcataatatcctgcttctaatgccaagctttgcatcaacccaa

SEQ ID NO: 977650 - DNA, 120 bp, Artificial Sequence
  ENSG00000286003_5 (sequence is synthesized)
atatgtataagatgggaagaagatatggagcccaaccacagactgaagataccttgattacagaaggctttgcagacctcggttatttcaaacatttttgttttctgcttggtatcacag

SEQ ID NO: 977651 - DNA, 120 bp, Artificial Sequence
  ENSG00000286003_6 (sequence is synthesized)
agtatttttaccccagtgcagtataccagtaaattagaatgagagagaggtgacctttcttgtcaaaatggaagaagagtgattgttcaagaggaggtaagaaaggagaaccaacacatt

SEQ ID NO: 977652 - DNA, 120 bp, Artificial Sequence
  ENSG00000286003_7 (sequence is synthesized)
ttaaatctgtggctgttaacccttggaaagcctctgtctacagcaagaacacatgtatctcagtttaaaggccatgatataatctatatttgagtgtattttgttgttgttgttgctgtg

SEQ ID NO: 977653 - DNA, 120 bp, Artificial Sequence
  ENSG00000286003_8 (sequence is synthesized)
taacaatttaatacatgcttagaagcttccaacaccaccacccatttattatctcacagtttctgtgggtcaagagtctggacacactttagttgagttttctcttcagggtctctggtc

SEQ ID NO: 977654 - DNA, 120 bp, Artificial Sequence
  ENSG00000286003_9 (sequence is synthesized)
agagttgcagctcatctaagattcagagtcctcttttgaacccacatgtatattggcagacatttccccacagttgaaatatttatggtgatttgctttttctaggtcaggaagagagat

SEQ ID NO: 977655 - DNA, 120 bp, Artificial Sequence
  ENSG00000286003_10 (sequence is synthesized)
tttgtactgctctgagtttctgattgttagacccacttttaaatgactcacctgattaggtaagacccatccagcataatctctcttttgattaactcgaagtgaactaattagggacct

SEQ ID NO: 977656 - DNA, 120 bp, Artificial Sequence
  ENSG00000286003_11 (sequence is synthesized)
taattatgcctgcaaaaatcccttcaccctctccatataatataaaacaatcaaagaatggcatccatcatatttgctaagctttcacccatactcaagggataggattgcatagtgtat

SEQ ID NO: 977657 - DNA, 120 bp, Artificial Sequence
  ENSG00000286003_12 (sequence is synthesized)
aaaccctagaaagcaaaaatcttggtgcccagtttagaattctgtttaccatgcatgacaaaacagaacttcctaaactccaaaaactttctcttcatttacaaacaggtttcacatatg

SEQ ID NO: 977658 - DNA, 120 bp, Artificial Sequence
  ENSG00000286003_13 (sequence is synthesized)
ctctctttaattaagtgccccttttctatttgcttttaggacctacttcaagtcccttctttactacttcaagtcccttctttacaaagcattgcaaagctttccatccaacacagggag

SEQ ID NO: 977659 - DNA, 120 bp, Artificial Sequence
  ENSG00000286003_14 (sequence is synthesized)
atagaagtcatttctccctttttgaaaattaaaatactagttttgttatttgtataaatatttaattccctttttaaacaagtaactccttgaatcatgtctgatttatctttgcattgt

SEQ ID NO: 977660 - DNA, 78 bp, Artificial Sequence
  ENSG00000286000_0 (sequence is synthesized)
tggctcactgcaaatgagtagctgggattacaggtgtgcactgctatccccggataatttttgtatatttactagaga

SEQ ID NO: 977661 - DNA, 120 bp, Artificial Sequence
  ENSG00000286000_1 (sequence is synthesized)
gcctcagcctaatgagtagctgggattacaggtgtgcactgctatccccggataatttttgtatatttactagagacagggtttcgccatgtgggccaggctgctctcgaactcctggcc

SEQ ID NO: 977662 - DNA, 120 bp, Artificial Sequence
  ENSG00000286000_2 (sequence is synthesized)
gggattacaggtgtgagttaccgcacctggccagaaatattttttatgatagatttttcccagattaattcctcattaatttttcagtgaccataacttcattttttttctgattgtaaa

SEQ ID NO: 977663 - DNA, 120 bp, Artificial Sequence
  ENSG00000286000_3 (sequence is synthesized)
taaaaatgattgcatactgacgcttttttttttttgatggagtctctcgctctgtcacctaggctggagtgaattggcacgatctaggcttacggcaacctccgcctccagggttcaagc

SEQ ID NO: 977664 - DNA, 120 bp, Artificial Sequence
  ENSG00000286000_4 (sequence is synthesized)
gcccgccttggcctcccaaagtgttgagactacaggcatgagccaccgcgcctggccactgatgcttattttttaaggcggtaatagtacatgaggaagtgaaaatatgaggaagtacaa

SEQ ID NO: 977665 - DNA, 120 bp, Artificial Sequence
  ENSG00000286000_5 (sequence is synthesized)
atatgaggaagtacaaatctcatgttcattccctgcctctgttactgacatgctgtccattttctaattctaatccctgcctgcctctccgccctcacgttttgggggatggacacagtt

SEQ ID NO: 977666 - DNA, 120 bp, Artificial Sequence
  ENSG00000286000_6 (sequence is synthesized)
gcaggggaaatggaagacattactgatcgtggacatcgagggtggagagagaaacttgggcatcaaactagccctgagaactgtaccaatgaggttgaaaacatttgtaaaccattgcct

SEQ ID NO: 977667 - DNA, 120 bp, Artificial Sequence
  ENSG00000286000_7 (sequence is synthesized)
agtaaaagcagtcactgagatcagcgttttggatgattaatatctcttaaaaacattttataattccctcaacaaagctcttgcaaactgtggtagaggctgttagtgctctccaatatc

SEQ ID NO: 977668 - DNA, 120 bp, Artificial Sequence
  ENSG00000286000_8 (sequence is synthesized)
catgttttctgcccactccttggaatccagctagattggtcaatagtggcctagctatagtggtcaacgtcccctatgattgggtgcaaccatgagactgagttctggccaatggattgt

SEQ ID NO: 977669 - DNA, 120 bp, Artificial Sequence
  ENSG00000286000_9 (sequence is synthesized)
ggcaggagtgatgtgttccagattttgcctcatgaaacttcctcatgcttgacttgtgctctctcttttcctatctacccgctgaatggagataactttgagtacctagagaaggatgga

SEQ ID NO: 977670 - DNA, 120 bp, Artificial Sequence
  ENSG00000286000_10 (sequence is synthesized)
aatgagcctgggaccctgaatggccacgtgtagcagagcctctctgctgacctggaacattaacctcagactcttttgaaacaagatcttgccatgttgcctaagctggtcttcaactcc

SEQ ID NO: 977671 - DNA, 120 bp, Artificial Sequence
  ENSG00000286000_11 (sequence is synthesized)
tggcctcaagctatccttctgccttggcctcccaaagcactggcattacaggcaggagccacctcatccgtccgtcctcttttgtcactttaaggcagtgtattcctgtctttttctttt

SEQ ID NO: 977672 - DNA, 120 bp, Artificial Sequence
  ENSG00000286000_12 (sequence is synthesized)
ggatttgcaggagtactttgtatatgctagctattaatcctttgttaaaggtattgtaaataacttttctctgtcatctattaactttgtttatggtgtctctcattgaatagaaattct

SEQ ID NO: 977673 - DNA, 120 bp, Artificial Sequence
  ENSG00000286000_13 (sequence is synthesized)
tattttttatgtaatcaaatctattaatcttttgtgtcttatggcatctacttctgaggttttgtttaagaaattgttatctaattctaggccacaaagattttttcctatatcatcatc

SEQ ID NO: 977674 - DNA, 120 bp, Artificial Sequence
  ENSG00000286000_14 (sequence is synthesized)
tattaacttcataattttagctttcaaatttattttattctctgtagtctagatttatacatggtgctaaggagggttccagctttatttttcttcaaatagtgaactagtctttccaat

SEQ ID NO: 977675 - DNA, 120 bp, Artificial Sequence
  ENSG00000286000_15 (sequence is synthesized)
aacatgtattataccgtccatcctttctccattgatttgtgctgcctattttttctgtatctacttaagtctgtctctaaacgtttccatttatgtatttatctcttccatattactttt

SEQ ID NO: 977676 - DNA, 120 bp, Artificial Sequence
  ENSG00000286000_16 (sequence is synthesized)
gttactatgatacggcagggagagctggtactcaccaaatgatttttgtacttactttcctagcttgccttgcagttagattgaggtcatatgactatctggactacacactacaagcaa

SEQ ID NO: 977677 - DNA, 120 bp, Artificial Sequence
  ENSG00000286000_17 (sequence is synthesized)
agtaatgtttattatttctgggtcaaggttatttaaaactggtgtaaaaggctgtgtgtttagatggaggaaccacaagatggaagaagccttaggttcctgagtaactgcatggaagac

SEQ ID NO: 977678 - DNA, 120 bp, Artificial Sequence
  ENSG00000286000_18 (sequence is synthesized)
tggagagctgcctaatcattaaattttacgtaaataggaaataaacctttgtttacttcactgaggttttgaggttcatttgttacttcagtatagcatattgttaccctgactgacaca

SEQ ID NO: 977679 - DNA, 120 bp, Artificial Sequence
  ENSG00000286000_19 (sequence is synthesized)
tacagtgtatcttactatccagtagggtaagtctccactctatcctttgtttccaaattgatgtagctcttgttgggtctttatatttccatatagtgttagaatgtatcaattaagctt

SEQ ID NO: 977680 - DNA, 120 bp, Artificial Sequence
  ENSG00000286000_20 (sequence is synthesized)
tgatagattttttaaaatgttaagccagctctgcgttaccattctgatcatgactttttaaaatacattgctggattctacttgctggtattttgtttaagattttcacatttatatttt

SEQ ID NO: 977681 - DNA, 120 bp, Artificial Sequence
  ENSG00000286000_21 (sequence is synthesized)
gagacttgtttgaaatttcattttttatactgatcttgtcagttttaatataaaagatatttggctcataaaatgcattgaacaacattacttatttctaggctatagaagagcttgtat

SEQ ID NO: 977682 - DNA, 120 bp, Artificial Sequence
  ENSG00000286008_0 (sequence is synthesized)
ttttcaccacccatcagtctgtcactttggtctgtttctgcttaaagacactgtatttagtgtatagagttgattcattaacgttgaactcacggccaacagcacctacacaggcctgag

SEQ ID NO: 977683 - DNA, 120 bp, Artificial Sequence
  ENSG00000286008_1 (sequence is synthesized)
cgaagcgtctccatcgcatgtcacagctcctgcactcagggtcactcgagaggacctcagctctgttcctgaggctactttaagctgcaacatcaccgacaaagagcatgaaaatgtgaa

SEQ ID NO: 977684 - DNA, 120 bp, Artificial Sequence
  ENSG00000286008_2 (sequence is synthesized)
gagagcggaaacaagaaggcgggtgcggcctcactccttcccggccaggcacgcacgtgggtgacgcggcttccagaagctctgtgcacgcctgtgaatgaccaggaaagaccccggtac

SEQ ID NO: 977685 - DNA, 120 bp, Artificial Sequence
  ENSG00000286008_3 (sequence is synthesized)
tgatctggggattacgaatacgttttagcaagaggtcaaagcccccacactcagcgtccggagctcagcacctgcctgccccaacctgcctgaccctccatccctgcgccgtgaacggtg

SEQ ID NO: 977686 - DNA, 120 bp, Artificial Sequence
  ENSG00000286009_0 (sequence is synthesized)
ggtgcagactctcaggtcagatggtgagggctgattgcgggaggtggacaagaagtctggcctaatgactaaggacagctaacgcctaactccgttcctcatcactccacctgggtaaga

SEQ ID NO: 977687 - DNA, 120 bp, Artificial Sequence
  ENSG00000286009_1 (sequence is synthesized)
gcatttggtgcaacgagccagtttcgagcctgtgaaggaccgtggggcaaggtgaccgatgccgctacctctttgtcattcagtagccctctttacctgttttggcctcgctgctagggc

SEQ ID NO: 977688 - DNA, 120 bp, Artificial Sequence
  ENSG00000286009_2 (sequence is synthesized)
tgtcgccgagcttacacggactccaggtgatgagtttttcttgagtcactgcaaaggcagtttcactaggcttcacttttctttctcgcggttttcggccaggtctctcctgagacactc

SEQ ID NO: 977689 - DNA, 120 bp, Artificial Sequence
  ENSG00000286009_3 (sequence is synthesized)
ctatctcccggtcccgacaccagcaccaagcgctcagaagcagcggaactggcaacaccttggtgccctagacggaaacctcagtcccgactgaagcgtattcatcaccaacactgggat

SEQ ID NO: 977690 - DNA, 120 bp, Artificial Sequence
  ENSG00000286009_4 (sequence is synthesized)
agctgcagctagggccacacaataaaaatagcccaggacggcactggctatccgctgccccttcagctatagaattcctgtccttaatcgcttttagttctgtaactgcttgtggaaaca

SEQ ID NO: 977691 - DNA, 120 bp, Artificial Sequence
  ENSG00000286009_5 (sequence is synthesized)
ggacaggtgggagtacgaaaggcgtttagtaagactgcaaatctgatgtgaactggtaggacgcagagtgtatggcatagtcaagaaagaagtcaacgccaggcgaggtgctatggctaa

SEQ ID NO: 977692 - DNA, 120 bp, Artificial Sequence
  ENSG00000286009_6 (sequence is synthesized)
gggattaatcttttgtgtcccaactatgttgctctgacggttccacttgcactactggtttttacttcatcgttaatctctgctctggccgataacagcctgcatgaaaacatcaccagt

SEQ ID NO: 977693 - DNA, 120 bp, Artificial Sequence
  ENSG00000286009_7 (sequence is synthesized)
tttcaagtttttctcaggatgaacagtacatagaaaagtgagcctgaatgctgagatcctgagaccgtgctgcggcgcctgggaattcatagagcagcttttaaggggccaccacttctc

SEQ ID NO: 977694 - DNA, 120 bp, Artificial Sequence
  ENSG00000286009_8 (sequence is synthesized)
gcatcgtgtgccatgcaagtaaacctaccctatcctgagacccttgcctggggtgactggaagagctgcttctgtagaatcctgggccagaccatctatctggacgaataggagaaaagc

SEQ ID NO: 977695 - DNA, 120 bp, Artificial Sequence
  ENSG00000286009_9 (sequence is synthesized)
ctagttgttgtctcctgcaagatgtattcagttgtaatttcgcctttgttccttaatctgttagtatggtatattacatcgattaatatttcatattaaatcagtcatgaattcccatta

SEQ ID NO: 977696 - DNA, 120 bp, Artificial Sequence
  ENSG00000286009_10 (sequence is synthesized)
acctggtgcagactctcaggtcagatggtgagggctgattgcgggaggtggacaagaagtctggcctaatgactaaggacagctaacgcctaactccgttcctcatcactccacctgggt

SEQ ID NO: 977697 - DNA, 120 bp, Artificial Sequence
  ENSG00000267719_0 (sequence is synthesized)
ggcgggagggacacgccgatgggaacatcccagctggtccaggcctctgctccccccagctcctcctccctggcgggcagctcttctgggctcctgaggtgctgcgcagccccttccctg

SEQ ID NO: 977698 - DNA, 120 bp, Artificial Sequence
  ENSG00000267719_1 (sequence is synthesized)
gccctgggacccccagtgcctgagatgaaagaggagttgcttccatggacggtcccagtgcaagctggggggcgctggcctcaggacaccaggcatccaagacatagggacaccagaagc

SEQ ID NO: 977699 - DNA, 120 bp, Artificial Sequence
  ENSG00000267719_2 (sequence is synthesized)
cccggctctgcctctgaggtccagcagccccaaagcccctgctcagaagccagcgatgggagggcagggcctgcctgtgggacccatcatgggcgcagcaatcgccaggccctgggcaga

SEQ ID NO: 977700 - DNA, 120 bp, Artificial Sequence
  ENSG00000267719_3 (sequence is synthesized)
cagcagcacagcctgtgagtccagggctggggagcaggcaggtgacaaccagtgtcctactttcctgcattaaaacacccaaatcaacaggacggagaaggcccggaagaggggacctga

SEQ ID NO: 977701 - DNA, 120 bp, Artificial Sequence
  ENSG00000267719_4 (sequence is synthesized)
gggagccagccgggcgctcagcctgcttcgctgggatgcttgtcgaggtcgggacggcaccaccaaactcacctctgtgcgccctgcggggcccaggagactcggtcctccctgggctcc

SEQ ID NO: 977702 - DNA, 120 bp, Artificial Sequence
  ENSG00000267719_5 (sequence is synthesized)
cccaggcctggggtggacgttggaataaagtggggacaacacgatgagagaccccagccctggaggtgccctcggccaaagcccgagatcaaagctgggagattcgtggctggacagcac

SEQ ID NO: 977703 - DNA, 120 bp, Artificial Sequence
  ENSG00000267719_6 (sequence is synthesized)
cacctggtggacacgttggagattaccaaagccgaacagtcaattcgttcttggttctgggattttcttaattgggtcttagctgggccttcctttctctttccccagtagcaggggctt

SEQ ID NO: 977704 - DNA, 87 bp, Artificial Sequence
  ENSG00000267719_7 (sequence is synthesized)
agctgggccttcctttctctttccccagtagcaggggctttgtgactatcagaaacacctgccaggcctgggcaatatggccacaaa

SEQ ID NO: 977705 - DNA, 120 bp, Artificial Sequence
  ENSG00000267719_8 (sequence is synthesized)
agatgggaggatcgcttgaacccgggaggtcgaagctgcagtgagtcgtgatcatgccactgcactccagtcagggtgacagagagagaccctgtctctaaagaaagaaaaggccgggag

SEQ ID NO: 977706 - DNA, 87 bp, Artificial Sequence
  ENSG00000267719_9 (sequence is synthesized)
agagagagaccctgtctctaaagaaagaaaaggccgggagcagtagctcacgcctgtaatcctaatactttgggaggccgaggcggg

SEQ ID NO: 977707 - DNA, 120 bp, Artificial Sequence
  ENSG00000267719_10 (sequence is synthesized)
aaaaaaaaaagaaagaaagaaagaaaagagaagaagtccttgtcttctaataagatgttgttggtttcagagagcccaatccaggcacttcaaacaaggcagggaaatcaatggccctga

SEQ ID NO: 977708 - DNA, 120 bp, Artificial Sequence
  ENSG00000267719_11 (sequence is synthesized)
ccaggcacttcaaacaaggcagggaaatcaatggccctgaagaaagtttctcttcgacaagcccctccctccctgacactggcattctggcattcacccaccagcccctccgtccctgac

SEQ ID NO: 977709 - DNA, 120 bp, Artificial Sequence
  ENSG00000267719_12 (sequence is synthesized)
gctggcaccctggcattcacccaccagcccctcccctccctaatgctggcaccctggcattcacccaccagcccctcccctccctgatgctggcaccctggcattcacccacaagcccct

SEQ ID NO: 977710 - DNA, 120 bp, Artificial Sequence
  ENSG00000267719_13 (sequence is synthesized)
ccgtccctgacgctggcaccctggcattcacccaccagcccctcccctccctgatgctggcaccctggcattcactcaccagcccctcccctccctgacactggcaccctggcattcacc

SEQ ID NO: 977711 - DNA, 120 bp, Artificial Sequence
  ENSG00000267719_14 (sequence is synthesized)
caccagcccctccgtccctgacgctggcaccctggcattcacccaccagcccctcccctccctgatgctggcaccctggcattcacccaccagcccctcccctccctgatgctggcaccc

SEQ ID NO: 977712 - DNA, 120 bp, Artificial Sequence
  ENSG00000267719_15 (sequence is synthesized)
tggcattcacccaccagcccctcccctccctgacactggcaccctgacattcacccaccagcccctcccctccctgatgctggcaccctggcattcacccaccagcccctcccctccctg

SEQ ID NO: 977713 - DNA, 120 bp, Artificial Sequence
  ENSG00000267719_16 (sequence is synthesized)
tccctgacactggcaccctggcattcacccaccagcccctcccctccctgatgctggcaccctggcattcacccaccagcccctccgtccctgacactggcaccctagcattcacccacc

SEQ ID NO: 977714 - DNA, 120 bp, Artificial Sequence
  ENSG00000267719_17 (sequence is synthesized)
agcccctcccctccctgacactggcaccctggcattcacccactgtctggggcaactaccctttcctcccaccactgatgggacggcaccctggcaccctggcctaccagttttgagggg

SEQ ID NO: 977715 - DNA, 120 bp, Artificial Sequence
  ENSG00000267719_18 (sequence is synthesized)
aaaaaaattagaaatctttggccaaagaggggacaaattgagcctaaaatcaagccttggtgtctcactttttaaatctacttttaccttttgtgtattggttgtgtgattttttgtgta

SEQ ID NO: 977716 - DNA, 120 bp, Artificial Sequence
  ENSG00000267719_19 (sequence is synthesized)
ctcattgtgtatgattgctgaatacacaatgaatacacaaaagctataaatagatttaaagagagaaagcaaaccaaaacccatcggtaatccactggaaaaacaagcctccaactctat

SEQ ID NO: 977717 - DNA, 120 bp, Artificial Sequence
  ENSG00000267719_20 (sequence is synthesized)
tcagaacattgtcaattaaaagaaaagaattaagaatttcccttttaaactatatttcaggataactcaataactctagtggacaacagcaagtatttttggtttttgtttgtttggttt

SEQ ID NO: 977718 - DNA, 86 bp, Artificial Sequence
  ENSG00000267719_21 (sequence is synthesized)
aggtgtgagccaccacacccagcctgtttggttgttttatttaagagacagggtctcgctccatcgcccaggctgataacctcttg

SEQ ID NO: 977719 - DNA, 120 bp, Artificial Sequence
  ENSG00000267719_22 (sequence is synthesized)
cacagctcactgcagccttaacctcttgggctcaaaggatccttctgcctcagcccccgagtagctgagactacgggcgcgcaccaccacacctggctaatgttttatttttttgtagag

SEQ ID NO: 977720 - DNA, 86 bp, Artificial Sequence
  ENSG00000267719_23 (sequence is synthesized)
atggggtcttgccatgttgcccaggctggattcaagctcctggcctctctcaccttggcccacaaaagctttttttgtcgttgttg

SEQ ID NO: 977721 - DNA, 120 bp, Artificial Sequence
  ENSG00000267719_24 (sequence is synthesized)
tttttaacagaacaatttcagctactcattgtgaaggagatgagatcatgagagaaaccatgattttgccacctctcatgacataagtatttctcgcaagggtcatggatgagatcagta

SEQ ID NO: 977722 - DNA, 120 bp, Artificial Sequence
  ENSG00000267719_25 (sequence is synthesized)
atgacaaaactagggcatcacagggtggatccgggctatgaccacctggacccacggggcacacttagcatcacagggtgggcccaggctgtggccacctggacccacggggcacactta

SEQ ID NO: 977723 - DNA, 120 bp, Artificial Sequence
  ENSG00000267719_26 (sequence is synthesized)
gcatctcagggtgggcccgggcgatggccacctggacccacggggcacacttagcatcagagggtgggtccgggcgatggccacctggacccacagggcacacttagcattacaggtgct

SEQ ID NO: 977724 - DNA, 120 bp, Artificial Sequence
  ENSG00000267719_27 (sequence is synthesized)
tccatgtggctctcacagctctgcccacgaaggcttctggcaaagaaagatgagcctgaatctaagggcgtttctgcggcacagcttccatttgcaggagacacggggcgaggcgacacc

SEQ ID NO: 977725 - DNA, 120 bp, Artificial Sequence
  ENSG00000267719_28 (sequence is synthesized)
acagagaggcaaacagcagcgcgataggccacacatttgcaggacagctgatctggtttctgcaacaaatcacaagtggtgggaggagcaatgggggtcgggggcggcgcctgatctaga

SEQ ID NO: 977726 - DNA, 120 bp, Artificial Sequence
  ENSG00000267719_29 (sequence is synthesized)
gtaagagaggttcaagaggcgccaccacaaaacttaaactttgggccttgttaggaacctgtgtgttccatctgatggacgtaagcaaacaatcaggggaatgtgattctggatggggcc

SEQ ID NO: 977727 - DNA, 120 bp, Artificial Sequence
  ENSG00000267719_30 (sequence is synthesized)
tgagcgggtgccaaggaatgactgttaatttgaacattgccctaagggaaccgcaagtgtgttccagagtttcccgtacttggcgccttgcaacctgaagttcataggaagaaaatttca

SEQ ID NO: 977728 - DNA, 120 bp, Artificial Sequence
  ENSG00000267719_31 (sequence is synthesized)
gaacgtttttgctacaggatggaaagtgcttcagccacaggggaaaagcaaagagaaagacaacagcaatgcatgaaacaagtgtggcgattatcgataaagtatgtgtggtgatcactg

SEQ ID NO: 977729 - DNA, 120 bp, Artificial Sequence
  ENSG00000267714_0 (sequence is synthesized)
cctccgtgggccagagctccgggcaggtaggcgaggaagtgactgccccccaagtcggccttcccagagtctccaccacccgcccctcttccctgagccttcgctgggtagcttttatca

SEQ ID NO: 977730 - DNA, 120 bp, Artificial Sequence
  ENSG00000267714_1 (sequence is synthesized)
cattaagatgtttggcctgatggggcttactcagcttcttggaggaacgaagaaagggccattgttccccgtggccgctgcggtgcatgctgacctatttctggaggcagcggcagacca

SEQ ID NO: 977731 - DNA, 120 bp, Artificial Sequence
  ENSG00000267714_2 (sequence is synthesized)
ctgaggtcacaggggcggcccacggaggtcgagtcgcagagtgagccacctcctgtggtgtgtggggaatgtgcagtctgatttggggagggggcagggagggcctgtcaggccaggaca

SEQ ID NO: 977732 - DNA, 120 bp, Artificial Sequence
  ENSG00000267714_3 (sequence is synthesized)
ctggcaccagtcctcatgccttgaagcacattctggacccgactgtgtgactcaggccagtgctgcccttccgagccccagtttccccatctgccaggtggggccactgggctagggggc

SEQ ID NO: 977733 - DNA, 120 bp, Artificial Sequence
  ENSG00000267714_4 (sequence is synthesized)
agcagagggctagtccaaccgtgacttcagcagaggggatgcaccctgcatatctgtgctgggccaaggaaacagtctgctcagggaacatgtccctcactgtggcaggcctctgcccag

SEQ ID NO: 977734 - DNA, 120 bp, Artificial Sequence
  ENSG00000267714_5 (sequence is synthesized)
ctcactggtctccctgaagcagcaccacctccaggaagctcttcctgaccagccaccctggcccctgcaatctggacatcgccccacggccacggtacctggatgatggctgggaaggga

SEQ ID NO: 977735 - DNA, 120 bp, Artificial Sequence
  ENSG00000267714_6 (sequence is synthesized)
tgcttttatttgatgcaggcattctcttgatcccgtctggcacatcagaggccatgggaagtgcttttggatctccctacgcactgccatctgccttggagaccccctaggcagccccat

SEQ ID NO: 977736 - DNA, 120 bp, Artificial Sequence
  ENSG00000267714_7 (sequence is synthesized)
ctttcctctgagacctgagccacccgggaccccaacaccccggggtgatcggctgcggcctgggtgaagcctactcgcctcaagcgcacgggtgtcctcacatcctcacggagatgagcg

SEQ ID NO: 977737 - DNA, 120 bp, Artificial Sequence
  ENSG00000267714_8 (sequence is synthesized)
tcgttcggctcagccagcccagccaagcaaacctcgcccagggccctgtctcctggctgaggcttctcatggtcaccggacctctattccatcacaaatccttcggctctcatcttccaa

SEQ ID NO: 977738 - DNA, 120 bp, Artificial Sequence
  ENSG00000267714_9 (sequence is synthesized)
actcatccggaatggaacctcctctgacaccaccatggccaccgccctgccctgagccaccgtggtctcttgcccggggagacccaggtagcctcctgaccggccttcctcctcccactt

SEQ ID NO: 977739 - DNA, 120 bp, Artificial Sequence
  ENSG00000267714_10 (sequence is synthesized)
cttcccccactgcctcttctccatagtgggccctgtaagccccatcccatcatccctctgctcaaagcccagggctcctgcttcacagagagcaaaaggcaatgcccttaacatagcttg

SEQ ID NO: 977740 - DNA, 120 bp, Artificial Sequence
  ENSG00000267714_11 (sequence is synthesized)
caatgccttgctcacactgaaccccaccccagatctcagctcatttccaagctgcaatccccgaccctggctctctccatcctccttcctggctggactgtctggtcttagcacttaaca

SEQ ID NO: 977741 - DNA, 120 bp, Artificial Sequence
  ENSG00000267714_12 (sequence is synthesized)
atacacacattcagcttgttcatcttgttgcgggactcccacaccagaagatggattttgtctgtcttgacccccccatggtgtctctggcatgtaagccagtgcctgacaccgttcagt

SEQ ID NO: 977742 - DNA, 120 bp, Artificial Sequence
  ENSG00000267714_13 (sequence is synthesized)
atgtagtggttgaataaatggatgagtgtgcccaggactgacaggtccccgaaattatagttggggcttcccttggggtcctggagcacaccgagggcatctgaccccagggcaggttgc

SEQ ID NO: 977743 - DNA, 120 bp, Artificial Sequence
  ENSG00000267714_14 (sequence is synthesized)
ctcagtttcctcacctgtaaatggaactgtagtggggaacagctaagcccctgcacagttgtatggctcctcagggccccggtgaggaggggctggggttctgcagaggtccacccctct

SEQ ID NO: 977744 - DNA, 120 bp, Artificial Sequence
  ENSG00000267714_15 (sequence is synthesized)
gggaagcccagccacctgcagccctggagaccagggagggtcctggctgaggctgggtgagcagggattggttcctgaggagttgaggttcatgatgtcaactcctgagtcactgaacac

SEQ ID NO: 977745 - DNA, 120 bp, Artificial Sequence
  ENSG00000267714_16 (sequence is synthesized)
acatctggcccacaaacccctgcaggagccggactctcaagtcaaagagagagcagaggaagggcctggtcagcagacccaggggggactcccactttggaggatctgggtgtgttcctt

SEQ ID NO: 977746 - DNA, 120 bp, Artificial Sequence
  ENSG00000267714_17 (sequence is synthesized)
tgtggatccggcaagggagctggccgaggttcctgggtcagtatgagaggccctgtgagtccagccgccgatggggaggcagacttccctggccgtctgtctgtttgtccacccatagtg

SEQ ID NO: 977747 - DNA, 120 bp, Artificial Sequence
  ENSG00000267714_18 (sequence is synthesized)
gagcaggagctcagtgaagcctagttggacaagctcccagcttggtccccaaccctcccccgtcagggctctgactctggccccaatttgcccagcatcagaacagtataaagggcactg

SEQ ID NO: 977748 - DNA, 77 bp, Artificial Sequence
  ENSG00000267714_19 (sequence is synthesized)
ccccaatttgcccagcatcagaacagtataaagggcactgggaccgggcatgatggctcccgcctgtaaccctaatt

SEQ ID NO: 977749 - DNA, 120 bp, Artificial Sequence
  ENSG00000267712_0 (sequence is synthesized)
agagaggaaaagaatatccttgctgtgccaagaaagaaaagaccatggatctactagttgcagatttcagcagtaatgccaagggggcaagaagtgaccagcagaacaattaggccatgg

SEQ ID NO: 977750 - DNA, 120 bp, Artificial Sequence
  ENSG00000267712_1 (sequence is synthesized)
caacagaagccaactacaacccatgttccaatctatgacctccctctcctgctggtacaaggatatgtattccttagagcaaaggatgcaatgtcaagcaagttgtgatacctcaactat

SEQ ID NO: 977751 - DNA, 120 bp, Artificial Sequence
  ENSG00000267712_2 (sequence is synthesized)
ctacaatttaacaccaaggaaagaacactgtttggagaaatgagaaagattatcatcagtgtctttcagaagtcatcaaaagaagaaaaggagaaaagagaggagaaagcagaaagatct

SEQ ID NO: 977752 - DNA, 120 bp, Artificial Sequence
  ENSG00000267712_3 (sequence is synthesized)
ggagtctgggaagttcaagagcatggcaccaacatctggcaagggctttcattctgcatcatctcatggaggaaaataaaaaggcaaattcaccaccatcactactctaagtatttttct

SEQ ID NO: 977753 - DNA, 120 bp, Artificial Sequence
  ENSG00000267712_4 (sequence is synthesized)
tcttgagaaagagaaggagagggaaagcaaggaagaggaagagaaagagaaatggataaaaacatggtcaagtagaagagtctgtgatttcaggtaaatccagatttggagcttaaatga

SEQ ID NO: 977754 - DNA, 120 bp, Artificial Sequence
  ENSG00000267712_5 (sequence is synthesized)
ctcaaatgctttgcctacattgatcctacattcaggctgcttacatatctcttggcttctctgagaaccagattgtcaccacttaaagtgtcttccagagtcctcacgagtatcagagaa

SEQ ID NO: 977755 - DNA, 120 bp, Artificial Sequence
  ENSG00000267712_6 (sequence is synthesized)
ttcatttaaaatgaaaatatcaagcagtgtcattttcacaagtatccccacactgtctgaggctgaaaagaagagtgtagctatgcacactgcagtgagaagaaaatttcagctcaattg

SEQ ID NO: 977756 - DNA, 120 bp, Artificial Sequence
  ENSG00000267712_7 (sequence is synthesized)
gaggatgtaaagattgaaataccactgctcctagttctgatgcaaaattgaaaagagtgcactgggtcttcaaatggcatattgacaaggagaaagaggaaaggatgccccaggacagcc

SEQ ID NO: 977757 - DNA, 120 bp, Artificial Sequence
  ENSG00000267712_8 (sequence is synthesized)
tgggggtcaaggctgggctcaggcatgcctggacaagccatgcaagttgtctccggacttgaaccacgtatcagaggagctatttgaggagccacatcagcatacctgcttctgtgggcc

SEQ ID NO: 977758 - DNA, 120 bp, Artificial Sequence
  ENSG00000267712_9 (sequence is synthesized)
cccaggctgtggtgctcagcccttgcactatgaaacattttttttttccagaagccaaagctttgagcatctcctcccatgtagagagtgtatatgtttacgtccatgtctttcgccatg

SEQ ID NO: 977759 - DNA, 120 bp, Artificial Sequence
  ENSG00000267712_10 (sequence is synthesized)
tgaacgcatgcaaccaccacctcaaatatcataaatcctctctctccccctttctgtctgcctgtttatctacaatctgtctatttaaattctttttaaacaagaagggaatatctttat

SEQ ID NO: 977760 - DNA, 120 bp, Artificial Sequence
  ENSG00000267712_11 (sequence is synthesized)
gcctgtttgtagggatattctacatccatctgttatttacatcattcgttttcctgaggtgtctccaacaaatcctggctggatgcactgtatgtgttattaataaaacagctgtaaaaa

SEQ ID NO: 977761 - DNA, 120 bp, Artificial Sequence
  ENSG00000267712_12 (sequence is synthesized)
gtacccgtttgagtggtccacttctcagtccaactctgatcttggtgtgcagggcagcagtaaagagatctggagtctgggaagttcaagagcatggcaccaacatctggcaagggcttt

SEQ ID NO: 977762 - DNA, 120 bp, Artificial Sequence
  ENSG00000267712_13 (sequence is synthesized)
aacacatgctttttgggtggcataattaaaccataacacacttgttattaggtcaggagatttcccaaggtcagaacagtgacagagctaagccctgaacttttgtgaccttcaaaccag

SEQ ID NO: 977763 - DNA, 120 bp, Artificial Sequence
  ENSG00000267712_14 (sequence is synthesized)
gattgtttccacaatttgtcatacatggatatttagaacatactttagaagtggaggaaagaataaaataatttgaagatggagtacccaaaagctgtgccagacaagtccattgaaact

SEQ ID NO: 977764 - DNA, 120 bp, Artificial Sequence
  ENSG00000267712_15 (sequence is synthesized)
ttcatgggaaagtaaaagcaatgaaaatgccttcaagttaactaggtcttattaggtacaaattgttgcaaggaaagtgaggtgggatggaagtagaaggttgttctgaaatcatcttac

SEQ ID NO: 977765 - DNA, 120 bp, Artificial Sequence
  ENSG00000267712_16 (sequence is synthesized)
aaatgtcagcattcaagacctgagtaatccaagatagcaagagcagatcaatgatctctatacagaatgctctacaaaggacttggaaggaacggtaaacccacagggctttcaaccctc

SEQ ID NO: 977766 - DNA, 120 bp, Artificial Sequence
  ENSG00000267712_17 (sequence is synthesized)
ttcctatgaacaatggggctcatagggtttgcaagatacaggaagaagctcctggagatgccagacaaagaaggaaaggtgatccatcaacctccacctgctttacaaacagacagcccc

SEQ ID NO: 977767 - DNA, 120 bp, Artificial Sequence
  ENSG00000267712_18 (sequence is synthesized)
gcatggaattggatgtgcctaaatcaacagaagagggattttgatgtcatcacactgtagccccagaagacagaacgctcaaaggtgtcaatgggcagaatttgtagatgacatacagca

SEQ ID NO: 977768 - DNA, 120 bp, Artificial Sequence
  ENSG00000267712_19 (sequence is synthesized)
ctgggattggagaaaggcaaatggaacagaccaactcagaattacagtcctcatttatttcatcagagtgtcttccagagtcctcacgagtatcagagaaggcataatctgtacacgtgg

SEQ ID NO: 977769 - DNA, 120 bp, Artificial Sequence
  ENSG00000267712_20 (sequence is synthesized)
aaagatctggagtctgggaagttcaagagcatggcaccaacatctggcaagggctttcattctgcatcatctcatggaggaaaataaaaaggaggctggatgctcctgtgaagtacgtct

SEQ ID NO: 977770 - DNA, 120 bp, Artificial Sequence
  ENSG00000267712_21 (sequence is synthesized)
tttatctacttgctatctttgcaattccttcatgctacaatgagagatagagtttaaacctgaaaacattcttggaaaaggaatcttcattaattcaaatataccacaaggttctgccac

SEQ ID NO: 977771 - DNA, 120 bp, Artificial Sequence
  ENSG00000267712_22 (sequence is synthesized)
catgtctcacccactgtctgttcacttctgacctgaaacaatgggactgcagaagagagaaggaaaatatctggtggtcaggctaactctgtgtaccccatgatgaagatgttttccata

SEQ ID NO: 977772 - DNA, 120 bp, Artificial Sequence
  ENSG00000267712_23 (sequence is synthesized)
tgttcccaccttgcggagcttcctagagtggctgctgcttccttcgatgtcacaaattgggcaaatcctccaacaataaggcaccccagactgtgctccagctttcagagggagcctttc

SEQ ID NO: 977773 - DNA, 120 bp, Artificial Sequence
  ENSG00000267712_24 (sequence is synthesized)
acgccagctttcagccgtgggctgtaatggtgccacatgcgtcaatggggctaggatctgtcccctaagcactgcggtcagaggcccagtgagtgatgtggtctagggccgtggatgctc

SEQ ID NO: 977774 - DNA, 120 bp, Artificial Sequence
  ENSG00000267712_25 (sequence is synthesized)
actcacattctgctttggtcttgaccacagcatcagaaatgatttgatgcattgggtttgaacatgttttgagttactctgtattgcatacacatgtaaaacaaatctgggaacccacaa

SEQ ID NO: 977775 - DNA, 120 bp, Artificial Sequence
  ENSG00000267712_26 (sequence is synthesized)
atggaacataagaaaagaagggaaaaacagaaacaaaaacaagatgagcactctgcaatgggaaaagctccacgtaggaggtgaaacttgagctggacctaaacgtgtggacaggctttg

SEQ ID NO: 977776 - DNA, 120 bp, Artificial Sequence
  ENSG00000267712_27 (sequence is synthesized)
caaatgttcatattgaggttcatatacgattaagaaggagaagtgtaacttagaaagaaattttgtaaaaaggaacatttaaaaggattataaaatgcttatgtaaaagtatttggaaga

SEQ ID NO: 977777 - DNA, 120 bp, Artificial Sequence
  ENSG00000267712_28 (sequence is synthesized)
aagtctcagccaccagtcatttattctaaagtaggagaaggaagcttgtatatctgtattgcaaaaatctttatggtaaaaagtgcctccaggcacttcataaatcggaaatgggtaaaa

SEQ ID NO: 977778 - DNA, 120 bp, Artificial Sequence
  ENSG00000267712_29 (sequence is synthesized)
aagaaaaaggttcttacccttcagcagatagcatgctgagccctgaacaaattttatgacttctggtgcaaagcagacccagtcagcttgcctctagcaactggttaatactactccaag

SEQ ID NO: 977779 - DNA, 120 bp, Artificial Sequence
  ENSG00000267712_30 (sequence is synthesized)
gaaaccacacttaaaattcttggaagttcttttaccatcacatcaagttgcattttgaagctgaagcccttcgaatccatttataccttgtgatattcccttgccagattgttgttttgt

SEQ ID NO: 977780 - DNA, 120 bp, Artificial Sequence
  ENSG00000267712_31 (sequence is synthesized)
aggattttgtcaaggaagccatctatgaccccaatcaatcaaaaccataaggatcaaggctggaagaacctattccttagagcaaaggatgcaatgtcaagcaagttgtgatacctcaac

SEQ ID NO: 977781 - DNA, 120 bp, Artificial Sequence
  ENSG00000267712_32 (sequence is synthesized)
aggaaagggggtcaaactcacccttttatcacgaaaacactctatcgataacagcattgatccattcatgagggaagacccctcatgtcctagtcacctcttaaaggtccaacctttcaa

SEQ ID NO: 977782 - DNA, 120 bp, Artificial Sequence
  ENSG00000267712_33 (sequence is synthesized)
aatctatgacctccctctcctgctggtacaaggatatgaatgtggctgtagcatcatttttggaagccagaatggtaatactgaaaatcactgcttgtctcaagatccaacttctggaaa

SEQ ID NO: 977783 - DNA, 120 bp, Artificial Sequence
  ENSG00000267712_34 (sequence is synthesized)
catgttccaatctatgacctccctctcctgctggtacaaggatatggactagcctagatgatgatggctcaccaatttccttgcaagggcaagagctgataatcaactgactaatgagga

SEQ ID NO: 977784 - DNA, 120 bp, Artificial Sequence
  ENSG00000267712_35 (sequence is synthesized)
tgatatgtcagtctcagcagctgagttctgggaagattcatcctcttcatgagcaaagggagaatggaaaggggaactgtccaacccaaagaggggaaaataaaggagagagggatataa

SEQ ID NO: 977785 - DNA, 120 bp, Artificial Sequence
  ENSG00000267712_36 (sequence is synthesized)
accattctgaatacagccatcattcttaaaattgaagagaactgttttacaagatcttgacttgtaaagaaaccaagtttattaagtattccttagagcaaaggatgcaatgtcaagcaa

SEQ ID NO: 977786 - DNA, 120 bp, Artificial Sequence
  ENSG00000267712_37 (sequence is synthesized)
tcttctttcttagctcataccccctttaatgcatggatgctggcttaactttatcaggagtcagaataggcttctgtgtgtattcttgactagaagtaaaacaaatattttctttctaaa

SEQ ID NO: 977787 - DNA, 120 bp, Artificial Sequence
  ENSG00000267711_0 (sequence is synthesized)
agaagttagctaaagagaaaaaaaatgcaaaaagaaggagtcatggaacatcaggaaggaaaaagaacacagtggatccaatattatcacaagggtccttataagaaggactcaggagaa

SEQ ID NO: 977788 - DNA, 120 bp, Artificial Sequence
  ENSG00000267711_1 (sequence is synthesized)
agcacaggatagagccaagagaaggtgctgtgcactgctggctttgaagatggaggaaggggctacaaaccaaggcacgcagtcagcctctagaagctggaaaaagcaaggaaatggatt

SEQ ID NO: 977789 - DNA, 120 bp, Artificial Sequence
  ENSG00000267711_2 (sequence is synthesized)
ttcccctacagctccagaaggaatacaagccagccgacaccttgatttcagctcagggaaactgattttggatttctgactttcagaactgtatgataaattcatgttgttttaagctgc

SEQ ID NO: 977790 - DNA, 120 bp, Artificial Sequence
  ENSG00000263627_0 (sequence is synthesized)
gacaaggcgggcaatccaccagcgggagcgttggcaggcccggggtcagatcctgattcagccagttaattgctcgtggatggcagagctgtgtgttgtccgtggtcagacacacaggaa

SEQ ID NO: 977791 - DNA, 120 bp, Artificial Sequence
  ENSG00000263627_1 (sequence is synthesized)
tctgccactgaaatgtgtaaaatatagggggagtgtcccaagtcattttcctaaaagcatcatccaactatgagctgaacactgccccgagaatgcaacagaacttcagctctgtcccaa

SEQ ID NO: 977792 - DNA, 120 bp, Artificial Sequence
  ENSG00000263627_2 (sequence is synthesized)
ggtcgtcagccacagctccaagtttcttagcatcagctttttctgaacaaaatagtgcatcctgctggaatcactactgtaaactgagtataaaggaaaataaaccctctttttcttatc

SEQ ID NO: 977793 - DNA, 120 bp, Artificial Sequence
  ENSG00000263624_0 (sequence is synthesized)
gcaagatttaataaaaaacaaacaaaaataggaatggttgctttcaacattttccaggttgtgaaaggttttgactgatttggggaaagaatggtgaaaaagagcttctcagttctcctg

SEQ ID NO: 977794 - DNA, 120 bp, Artificial Sequence
  ENSG00000263624_1 (sequence is synthesized)
aggtgctcgctgacaaccacacctgtgtgtctgggtggggccgagtccgtcacacagaggtgacatgtgagctgctgtttccattcagagctacaggagtaacgggctgggaaaaacagg

SEQ ID NO: 977795 - DNA, 120 bp, Artificial Sequence
  ENSG00000263624_2 (sequence is synthesized)
tgtcctgctagacagtggctgtgaggatgtgtaggcaggagcagtggcagccacctgggagtcaggagcttgcagcacaatggtgctggctgtgtgcgcgcctggctctgccacatgagc

SEQ ID NO: 977796 - DNA, 120 bp, Artificial Sequence
  ENSG00000263624_3 (sequence is synthesized)
gtggaaggcaccacctgaacatggcttttgaggggcctagtcatcctagtcatttactggggcagcttcctgagtggaaggaacataagggcacaggtatcatggtaaacttttgagtct

SEQ ID NO: 977797 - DNA, 120 bp, Artificial Sequence
  ENSG00000263624_4 (sequence is synthesized)
aagggatgatgcttgacagccacacatggtgggtgtggcctgcagctacaaagggtggggccagacagctgggcctccactcagcccaccaccacctccagggcctggcatttcgccttt

SEQ ID NO: 977798 - DNA, 120 bp, Artificial Sequence
  ENSG00000263624_5 (sequence is synthesized)
gacagttctggggaaaatctacttgtaaaggtcctggggaaggggacaggagtggctggaggctgtgctccgtgggaaagttcttctcaccagagcacacatcaaatgccagttccagag

SEQ ID NO: 977799 - DNA, 120 bp, Artificial Sequence
  ENSG00000263624_6 (sequence is synthesized)
agggaccctccgcccgactgtgctctcctagggcaatcaggaggagactgccctccaactgggccctggctctccggggtgttgctgtgagtacaaggctgtcctcaggcagctgcctca

SEQ ID NO: 977800 - DNA, 120 bp, Artificial Sequence
  ENSG00000263624_7 (sequence is synthesized)
gatttgggctgggactgggccagacggggttcccggggcaggggcaggaaggaggcaaggctggcaaggggattgggggctgctctcaggaacacggagaggccgcattaggcaggcagg

SEQ ID NO: 977801 - DNA, 120 bp, Artificial Sequence
  ENSG00000263624_8 (sequence is synthesized)
gaagtgctgggaagactacgtgctcctctcccaccagggaccctggcggccctcctgctagttctcctcctggtggaggacactgggggatgccgaacaagaggctaagcctgcggccca

SEQ ID NO: 977802 - DNA, 120 bp, Artificial Sequence
  ENSG00000263624_9 (sequence is synthesized)
ggccctgctgagaccacaccatggctagcaagtagagggacagcagcatatcccctcaattctgcctgcacggtagctgagccagacgtccccacacccaccccattatcaaggaagatc

SEQ ID NO: 977803 - DNA, 120 bp, Artificial Sequence
  ENSG00000263622_0 (sequence is synthesized)
ggttggagaagaagaacctagtgctgaatccagggtttgtgacaaggctggaagaacatttggtctggctagttaaagtgtggaaagagattcacgctcgtgccaagtatcaagagggat

SEQ ID NO: 977804 - DNA, 120 bp, Artificial Sequence
  ENSG00000263622_1 (sequence is synthesized)
tagaatcaactgaactgactttatcattttattacactatatcaaatcgggttctttgagattcttattctccaaacaatgaaaggaataaatataaactgtgcctgacaaatgaagaaa

SEQ ID NO: 977805 - DNA, 120 bp, Artificial Sequence
  ENSG00000253169_0 (sequence is synthesized)
gccaacaactgtgtttctcctgcactcttgggctagtgaagctctcacagaccctctctctcacctgtgctgtctctgcattctccatcacaaccagtgcttcctgctggagctgcatcc

SEQ ID NO: 977806 - DNA, 120 bp, Artificial Sequence
  ENSG00000253169_1 (sequence is synthesized)
ttccaacccactcctcaagagtccagtcactatctccagatccacatccaaaaaacagtgtttcctgtagctgagctacctgagcaacaagtacacaaccatgaattttaatacaaaaga

SEQ ID NO: 977807 - DNA, 65 bp, Artificial Sequence
  ENSG00000253168_0 (sequence is synthesized)
aacacttacaggaaacaaaaataacctacattgaaatattgggggcgacagaccatgggaatgca

SEQ ID NO: 977808 - DNA, 120 bp, Artificial Sequence
  ENSG00000253168_1 (sequence is synthesized)
ctacattgaaatattgggggcgacagaccatgggaatgcaagtatctcttcaacatcctgatttcaattattttgaagaaaccctggcagcctcggcatcacctcatcagcaggtttgca

SEQ ID NO: 977809 - DNA, 120 bp, Artificial Sequence
  ENSG00000253168_2 (sequence is synthesized)
acttgcaaccacttcccagcacttggcaaaagaaggcaagaaagccgccctgttctcctgtgatgtctttactaagtaactgcggaaggaccagtgcattttctaccttccaaggcagac

SEQ ID NO: 977810 - DNA, 120 bp, Artificial Sequence
  ENSG00000253168_3 (sequence is synthesized)
agtgatgatcttgtgtaaaccaatcagggtactggataaatacagctctgatgcctctggtatgccagtggctttagtgtatggtagaaccaaggtaataatagtattctgtggtatgtg

SEQ ID NO: 977811 - DNA, 120 bp, Artificial Sequence
  ENSG00000253168_4 (sequence is synthesized)
tgacatcttccttatcagcagtaagccaagattttttttagagtcaatatcaactacaatcttgcagcgtcataacgtttaaataaattacaacagttagaccccaagaggttggttctt

SEQ ID NO: 977812 - DNA, 120 bp, Artificial Sequence
  ENSG00000253168_5 (sequence is synthesized)
gactttaagcagtctttcctgcttgctttagagatttaaaataattcaacttcctggaaaagaaccctaaaaataagcccctagaattataaaaacaatgtaaaagatcgccatcattac

SEQ ID NO: 977813 - DNA, 120 bp, Artificial Sequence
  ENSG00000259149_0 (sequence is synthesized)
aaaactttgtgatcttgaaccttaggttcataatctcacaaatgagaaggctccctccacactcttggaactgtacacccactgaaacccttaagatcaaaagaaactgcctctgtgcag

SEQ ID NO: 977814 - DNA, 120 bp, Artificial Sequence
  ENSG00000259149_1 (sequence is synthesized)
tttacatgcattctcattgaggcatatgagattcttaaatttaatttttgttcttgttcctgcctcaaatccaccaatgacttttcattgacgttagaatgaacattaaactctgtaaca

SEQ ID NO: 977815 - DNA, 120 bp, Artificial Sequence
  ENSG00000253163_0 (sequence is synthesized)
aggcaggcagctgctctgcccgagactgtcaggagttggtggatgtgaatccatgtctgaagcccaagctctcactactctgctgtctccctgaggggtgcatgaaggccccagcccagc

SEQ ID NO: 977816 - DNA, 120 bp, Artificial Sequence
  ENSG00000253163_1 (sequence is synthesized)
cagtgacacagaggttgggaagaccagggcgtgaagcttctgtgcttggagaacaggagggcttgtggagctgtggttgatggcgtgtccaggaagcctggccaggctggggtctggcaa

SEQ ID NO: 977817 - DNA, 120 bp, Artificial Sequence
  ENSG00000253163_2 (sequence is synthesized)
gtgggcccggcctctacccgctgcgccacagctcctggctcctggctccaggtcatctctgcccacagccagtgtctctggtgagcctgggcaggtgggaggccgaagctgtgccccact

SEQ ID NO: 977818 - DNA, 120 bp, Artificial Sequence
  ENSG00000253163_3 (sequence is synthesized)
ggtttggatgctgagctctggggtgacctgcaccctgtagtcctacagttcacacgctatggatgcctgaagggatgggtgtcccgtttctgaaacccacagagcagccttgattgggag

SEQ ID NO: 977819 - DNA, 120 bp, Artificial Sequence
  ENSG00000253163_4 (sequence is synthesized)
gcgtcctgtgcccatctcgtgccccccgtccttctcctgcgtccaggttctggttctgccgcctcctccgcacgctgctcaccagcctgctaagtggatgtgaataaacaatcatgcagg

SEQ ID NO: 977820 - DNA, 120 bp, Artificial Sequence
  ENSG00000259146_0 (sequence is synthesized)
agcgatttaagagcctcggaaatttcctttaaggtcaggagagaagctggtaacagatggggcgaaggaggaaaagttctttttgcggcaccctcacgccttcccagccctttcgcggtt

SEQ ID NO: 977821 - DNA, 120 bp, Artificial Sequence
  ENSG00000259146_1 (sequence is synthesized)
tactcgctccccggaaagcagggcattcaagcagccctgaggagaggtccacatggtgagccactgagggccttgccaagagccagcaccaacggtccaggtttggagtgtaccaccttg

SEQ ID NO: 977822 - DNA, 120 bp, Artificial Sequence
  ENSG00000259146_2 (sequence is synthesized)
tcagatgacttcagaaccgtccatgtaagccactcttggattcctgacccacagaaactgttggagtaagtgatgtttctgaagcaccaatgaaaatgaagtcctgaagtcctgtgctca

SEQ ID NO: 977823 - DNA, 120 bp, Artificial Sequence
  ENSG00000259146_3 (sequence is synthesized)
atatgaaatgttggaagttagaagaaaaaaacaaaacttggatccaatctcaaggcactttttgtttaatgggaagaagtggattattttaaaagctacaaataaagttacataaaagta

SEQ ID NO: 977824 - DNA, 120 bp, Artificial Sequence
  ENSG00000259146_4 (sequence is synthesized)
ctcatgacttggaagcggtgggctgaggcctcccaagaccatctggcttgttccattgccagccagagtggaggcgacattcacacgaacccaggagctgcaggggcgcgtgagctacag

SEQ ID NO: 977825 - DNA, 120 bp, Artificial Sequence
  ENSG00000259146_5 (sequence is synthesized)
caagtgaattctccagcctcaacttcacaagtagctgggattacagccactttttatcttctctcctgcaatccaacccacataatttccatgaagaaagcggagtggtgtcattttaca

SEQ ID NO: 977826 - DNA, 120 bp, Artificial Sequence
  ENSG00000259146_6 (sequence is synthesized)
acaagaaaactgagttaagaataagtccaatcaattgctaggtgttgagactgaaatggaagtctcttagtactccacccaaggattttcatattaaacaattatcttgtcatcatttta

SEQ ID NO: 977827 - DNA, 120 bp, Artificial Sequence
  ENSG00000259146_7 (sequence is synthesized)
gagacagacaaacatgtgcctcctgattgaaaaaacagaacatcacctgtagtcttgccagtgagatcaaactgaagtccaattaacctctggatccagctgccaatttgcaggaaatag

SEQ ID NO: 977828 - DNA, 120 bp, Artificial Sequence
  ENSG00000253161_0 (sequence is synthesized)
actgattgttgctgaatcggtaacagtctgttccagggaaacagctggattcagactgaactggcagacactgcacgtgttctacagagaagaaagaggatgatggtaaagcagactgca

SEQ ID NO: 977829 - DNA, 120 bp, Artificial Sequence
  ENSG00000253161_1 (sequence is synthesized)
ggtaaagcagactgcagtcttcaggcctggagcagagaagggagagttcctgctctagagaaaagattttgccacgttggctaggctgctctggaactcttgacctcaggtgatctgcct

SEQ ID NO: 977830 - DNA, 120 bp, Artificial Sequence
  ENSG00000253161_2 (sequence is synthesized)
ggattacagtagccagtcctgccagggttctggctgtgccgggacagtgaatggccactccgtcccagatgagctgcaggaagcgtttcgatgtcatgtggaggtgatggcgattttcaa

SEQ ID NO: 977831 - DNA, 120 bp, Artificial Sequence
  ENSG00000253161_3 (sequence is synthesized)
caaacagccgaccttcctaccgagttcaagtaccttctgcctggcctggaagaacaatatctctctgtctccctcttccactggccctcacctgccttcccctgaacatgcattttgcct

SEQ ID NO: 977832 - DNA, 120 bp, Artificial Sequence
  ENSG00000253161_4 (sequence is synthesized)
gacaggagacagaggcagttgagatggagtcttgctatatggcccagctggtaatgcctagattcttgagtccctccctggctcatccctgggagcagcactgaaccccttgtctgacac

SEQ ID NO: 977833 - DNA, 120 bp, Artificial Sequence
  ENSG00000253161_5 (sequence is synthesized)
ctgtctggaaatggagcctgcacattgaccctaggcatgaagtgaacactgcggctcccacttagcacttgggcacgtgcatccttgaagcacactggggttaacaccctgggcggggaa

SEQ ID NO: 977834 - DNA, 120 bp, Artificial Sequence
  ENSG00000253161_6 (sequence is synthesized)
acaattatacagcaaagtctcctgggagggtttatatgttaagctctgtcagtaatttctcccctagcaagaatgaggaagatgaagagctcgggtatctgagggctggtgtgtctgcat

SEQ ID NO: 977835 - DNA, 120 bp, Artificial Sequence
  ENSG00000253161_7 (sequence is synthesized)
gcgtgtgtgttttgggggccgactgaaggaagagaaggctggagagagggaacatgggtctgagggcacatcgctaaggggtcaagaggcctaaaggaggagtctaaggctctccatcga

SEQ ID NO: 977836 - DNA, 120 bp, Artificial Sequence
  ENSG00000253161_8 (sequence is synthesized)
acttggacttggtctacattagactttaacctccatgaggcttggactttcaggcttcctccctcacaccgcgggcaggtgaggcgtctgctacaggcctggtctcgcagagggggccca

SEQ ID NO: 977837 - DNA, 120 bp, Artificial Sequence
  ENSG00000253161_9 (sequence is synthesized)
gcgccccccgccgccgccttctcctggagtctgtgtgacagaatgggacctgtgggaaagcagcacgtcagcacccagccccgcttgcgcgccagcagctaattaaagccaggaaggtga

SEQ ID NO: 977838 - DNA, 120 bp, Artificial Sequence
  ENSG00000253161_10 (sequence is synthesized)
atgaatgagagatgcttgcagcttggtccaggaggccagcaggaccagagagaagaccacagcgacacatggggatggctgtcccacaggcagaaatgagcagccgggaggaagcccagg

SEQ ID NO: 977839 - DNA, 120 bp, Artificial Sequence
  ENSG00000253161_11 (sequence is synthesized)
cagccagccacccagctccctccacatcgtggccctagaacggagtcttgaagaataagaagccacagcttgtcagggaatcaggctggaaaaatgttatgagactgagtaagaccagag

SEQ ID NO: 977840 - DNA, 88 bp, Artificial Sequence
  ENSG00000253167_0 (sequence is synthesized)
cttccacttccaccatggtgaactggtggcagaaaacaggcatgaaagtcaaaaggctcacctgtaactcttttacaatcataaagca

SEQ ID NO: 977841 - DNA, 120 bp, Artificial Sequence
  ENSG00000253167_1 (sequence is synthesized)
tcaaaaggctcacctgtaactcttttacaatcataaagcacagaagcctgtctaagccatttagaccaaaggttcccaaggtggtctggatttctgagaagaggcggctgctggtcactt

SEQ ID NO: 977842 - DNA, 120 bp, Artificial Sequence
  ENSG00000253167_2 (sequence is synthesized)
aagagatgttaggactcaacaggacatgcggcaccaaatatgaagaacaggagttacatgatctgtgttttctaacctctgtattcaggcacccaatgcgtcttcccagtgacacccaat

SEQ ID NO: 977843 - DNA, 120 bp, Artificial Sequence
  ENSG00000253167_3 (sequence is synthesized)
ggaacaggaaggtaaaattcagtctgacccccttttcctgccctatgccatatcattggtttcagtcatttatttccattgagttagggtgttgacttggaatcatgctgagaagacaag

SEQ ID NO: 977844 - DNA, 120 bp, Artificial Sequence
  ENSG00000259142_0 (sequence is synthesized)
ggtgaagaaaagcaaaagtgcagaaaaccatcttttcgaaagagctttccatcattcaggcaacaggtcactcagtgaagaaactgtgccaggagactgggaatatcttctaaatcctta

SEQ ID NO: 977845 - DNA, 120 bp, Artificial Sequence
  ENSG00000259142_1 (sequence is synthesized)
cgatgcctctggaaaaaagggacatgcagcagctgccagatgttcatgatcccacctcccctacttaacaaaggcacctatatttcaccagaaataaaattttattagtaacatgtcaaa

SEQ ID NO: 977846 - DNA, 120 bp, Artificial Sequence
  ENSG00000253165_0 (sequence is synthesized)
agggtggaaaccatttcattgctgctgggctcctggggcctagatcattgtctgagataaaaataaccgctactttgaagacttactctcaggaccaaataggatcatagctgtgacaag

SEQ ID NO: 977847 - DNA, 120 bp, Artificial Sequence
  ENSG00000253165_1 (sequence is synthesized)
tgttttgtgaccacagacagctccagctctgtgccgttactaggatcctgggctgatgagaaaccatctccagctaagagattgtgattgaccactgagtagctgcccaagttgagacgc

SEQ ID NO: 977848 - DNA, 120 bp, Artificial Sequence
  ENSG00000253165_2 (sequence is synthesized)
tctgctcagcccccagcctgacaggacaattggcccacactgccccggaggctgctgggcaggagctggtaattgacagagaactcattatcgaaggacagagcctctgagcatgctggg

SEQ ID NO: 977849 - DNA, 120 bp, Artificial Sequence
  ENSG00000253165_3 (sequence is synthesized)
aattggaactgacagagcccaagggcctgggaatcggatcactgggaagagacagcccaagtgttgtgtgtcctggacgtacagaggaaaataaagtttcagaaattgctcggcactaaa

SEQ ID NO: 977850 - DNA, 120 bp, Artificial Sequence
  ENSG00000253165_4 (sequence is synthesized)
ttttgtcacctccaaaatagagatgacaataaatctttttcgtggagtaagaaataaggatgctgtaactatgacattgatgatcatcattataacaactagcagctatttcacatcctc

SEQ ID NO: 977851 - DNA, 120 bp, Artificial Sequence
  ENSG00000253165_5 (sequence is synthesized)
cagatgccagagaccatttgaagagtgctaaaaatgggccaggcacagaggctcacacccgtaatcccagcgttttgggaggcccaggcaggagggtcgcttgagcccaggagtttgaga

SEQ ID NO: 977852 - DNA, 90 bp, Artificial Sequence
  ENSG00000253165_6 (sequence is synthesized)
ggcccaggcaggagggtcgcttgagcccaggagtttgagaatagcctgggcaacatagtgataaccctccatcactacaaaaaatcagaa

SEQ ID NO: 977853 - DNA, 120 bp, Artificial Sequence
  ENSG00000253165_7 (sequence is synthesized)
gagttcaaggttgcatgaaggagttcaaggttgccatgatcacaccactgcactcccgcctgggctacaaagcaagatcctctctcatataaaataaaataaaaataatattaaaatgca

SEQ ID NO: 977854 - DNA, 120 bp, Artificial Sequence
  ENSG00000253164_0 (sequence is synthesized)
ctgtgcctcccaaaggtgcttggggcaggaatgaagagcggaacagcccccatcaatccaataggattgtcgttttacgctggcgtggagcctcagacatcaaaagggctggagagtgaa

SEQ ID NO: 977855 - DNA, 120 bp, Artificial Sequence
  ENSG00000253164_1 (sequence is synthesized)
gccacgtgtgagccgtgaagttggtgaccctgaggcacagaaagctgagggaatttgttcgaagtcacacagctgggtccttgcagatgtaatcgggtgaagatgggttcatattggatt

SEQ ID NO: 977856 - DNA, 120 bp, Artificial Sequence
  ENSG00000253164_2 (sequence is synthesized)
ggagtgagtcataatccactgtgactggtgtctttaaaagaaaaggacacacggaaattcagagacagaaagacccacagggagaatgccatgtgatgacagaggcagagactggagtga

SEQ ID NO: 977857 - DNA, 120 bp, Artificial Sequence
  ENSG00000253164_3 (sequence is synthesized)
cagaagctggaagaggcaagaagtggaaaagcatttgggaggaagtggaaccaaagcagatcctatccaaggtgaatggcaagcagctatatgaggatggccttgctcccagccggatct

SEQ ID NO: 977858 - DNA, 120 bp, Artificial Sequence
  ENSG00000253164_4 (sequence is synthesized)
cccatcctcaagaaggccagcccaggcttcatcacacagcagtggaagagttctgatttaagagaagaagagtggaagctgcaggtcctgttgagacctggactaggaagacacacaatg

SEQ ID NO: 977859 - DNA, 120 bp, Artificial Sequence
  ENSG00000253164_5 (sequence is synthesized)
ccacttctgccacattctagttgtcatttctggttgtgaaagcaagtcccagggccagtcaagattcaaggaaagggtaaataaactccattacttgatgggtgcagccaaaaaaagtca

SEQ ID NO: 977860 - DNA, 120 bp, Artificial Sequence
  ENSG00000253164_6 (sequence is synthesized)
aaatgggcatggtgatcctcctccagccttctccacgggtggccataagaaccaaagaagaaagtgcaggcgaagctccaagtggaaagcataatgattaggatgggatgggccttcagg

SEQ ID NO: 977861 - DNA, 120 bp, Artificial Sequence
  ENSG00000253164_7 (sequence is synthesized)
gaagcctgctggatgccatccaggacacacttgctccagttggtgaccctgaggcacagaaagctgagggaatttgttcgaagtcacacagctgtggaaaagcatttgggaggaagtgga

SEQ ID NO: 977862 - DNA, 120 bp, Artificial Sequence
  ENSG00000225836_0 (sequence is synthesized)
tttttcagctcccattttgtgtccagtactgcgttgagtcctggggattcaaagattccgttcttcttgtttgggtagctgagacctatcagaagtgcttcaggggccagctcagtttcc

SEQ ID NO: 977863 - DNA, 120 bp, Artificial Sequence
  ENSG00000225836_1 (sequence is synthesized)
aaaaagtatgcaagagtggatagaccagagtgctccagtggcccccatggttctcaagctctgattctaggtaaggctctgctggaaggaattgccagatgcaagccctagatgctgctg

SEQ ID NO: 977864 - DNA, 120 bp, Artificial Sequence
  ENSG00000225836_2 (sequence is synthesized)
aatgcactgaagcccaggggcccagcaacccagtagccagccagcacctgccagactctgactcctctgtagattaattgcaaatcacggagaatatcacaaaataaatcacacaataaa

SEQ ID NO: 977865 - DNA, 120 bp, Artificial Sequence
  ENSG00000244491_0 (sequence is synthesized)
tcccacagctcttgggcgtcatttattttttgcataggcataaattaggatctggagataaaaaacttaagaaccaatagtgcagcatttgtgacaggagagcgcaaaacaaaccctggc

SEQ ID NO: 977866 - DNA, 120 bp, Artificial Sequence
  ENSG00000244491_1 (sequence is synthesized)
cttgccccttccccgcagccagaccaccagacacagccggaaccagtgccccaggcccctctccacggccaggaacaagaaactgagtatcacccatgctgttgggtgacaaggccttgg

SEQ ID NO: 977867 - DNA, 120 bp, Artificial Sequence
  ENSG00000244491_2 (sequence is synthesized)
gcacatgctctaaggtaacggctgtggggcggatgcgggcagagaggcggaccacggcgaagccttgtggcccctggaaggcccagcagttgcctgggtgcacatctggctggaggagca

SEQ ID NO: 977868 - DNA, 120 bp, Artificial Sequence
  ENSG00000225833_0 (sequence is synthesized)
caataggagaaaaaacaggcaagaaagaggacagcacacgagtatctgaagaaaaggttgaaatgttactgtaataaaagcggaaataaatttctacacagcttctttagaaatggtccg

SEQ ID NO: 977869 - DNA, 120 bp, Artificial Sequence
  ENSG00000225833_1 (sequence is synthesized)
ggagagagacagaagaagtaaaaggatgaggccatatcccagaagccaagaaggcagattctgtcgaagagggtgacagggtgccctacactgtaaaatgcttcaaacagatttaggaga

SEQ ID NO: 977870 - DNA, 120 bp, Artificial Sequence
  ENSG00000225833_2 (sequence is synthesized)
gcaaagagttgaggagcaagtgcatggtggtgaagccaacctattttttaattaaccagggtcaatgtactttaaaagtcttcagaatgcctgtaagtttcctttactagttccatgtac

SEQ ID NO: 977871 - DNA, 120 bp, Artificial Sequence
  ENSG00000225833_3 (sequence is synthesized)
tttcttgttttcccataaaaatctggatttgtggcagaagagaatgaaaaaaattaaaaattaaaagcgctgcttttccttaagcactgacaaaatacaataaaagctgattcttattaa

SEQ ID NO: 977872 - DNA, 120 bp, Artificial Sequence
  ENSG00000229325_0 (sequence is synthesized)
aatatgcttagtattataaatgttgagtgatgagttgtttaccatttataataaactgttaaatgtatttctgggaacattccatggcagcatattctgggttgttgtttatgtgttcca

SEQ ID NO: 977873 - DNA, 120 bp, Artificial Sequence
  ENSG00000229325_1 (sequence is synthesized)
atgtagacaaattatatttgccttgggaaaaattctaagtaatcaaaattatatttaaatattaaaaaatcacattgaagttcaatttgtgttagctgtattaaatatcttggtcactat

SEQ ID NO: 977874 - DNA, 120 bp, Artificial Sequence
  ENSG00000229325_2 (sequence is synthesized)
ctaaatgttaacaaaaagttttgtgtgtatgtgaaggtggcaacttccttttgtattatattaacactttttaaatgtattcagtcagtgaaaccaatgattattatagcaccaacactt

SEQ ID NO: 977875 - DNA, 120 bp, Artificial Sequence
  ENSG00000229325_3 (sequence is synthesized)
tcattcaaggaagcatttgagtcttataatttgttttgcatggtacaatggttctactaaaatatacttgtgtaataggtactagatgatttaaaaacaaaaccggagaaaccatttaaa

SEQ ID NO: 977876 - DNA, 120 bp, Artificial Sequence
  ENSG00000229325_4 (sequence is synthesized)
aagttccatagcttgttatacaaaatatgcattgctaatgtttagcaggaagcattcatgatcaacgatttatcttgaaaataagattccttcgtctgagggattgatctgtatgtgtgt

SEQ ID NO: 977877 - DNA, 120 bp, Artificial Sequence
  ENSG00000229327_0 (sequence is synthesized)
gtcgtgctctcctgcagcgcacacgctcactttctcacgctcgctccctcccggcgccgctttctgacgggcgaacaagtttatatttaccatgatgtttatttgatgacaccgtgaaca

SEQ ID NO: 977878 - DNA, 120 bp, Artificial Sequence
  ENSG00000229327_1 (sequence is synthesized)
tgttttaaaaaatgttttcatcaaatggatctcagagggacatgcccaaaactcctgctaccagagtgatcctctcttcatctcttttctctagccaataaatcaaagtttcatttctca

SEQ ID NO: 977879 - DNA, 120 bp, Artificial Sequence
  ENSG00000229321_0 (sequence is synthesized)
ggctgagagttgaagaccagcctgggtaacattgcaagacccccatctctacaagaaaattaaaaaggcttgagcccaggagattgagcctgcagtgagccatgatcatgcccctgcact

SEQ ID NO: 977880 - DNA, 120 bp, Artificial Sequence
  ENSG00000229321_1 (sequence is synthesized)
ccagcctggggaaagaatgataccctgtctcaaagaaaaaaaaaagaatttccttccttttaaaaagatggaattatattctattgtatgtatataccacattttgtttatctgcagatg

SEQ ID NO: 977881 - DNA, 72 bp, Artificial Sequence
  ENSG00000229321_2 (sequence is synthesized)
gaaacttgttattctcctgagtgttaaactgttttaaatgtttggtttttcatttctagaacattttcctat

SEQ ID NO: 977882 - DNA, 120 bp, Artificial Sequence
  ENSG00000229321_3 (sequence is synthesized)
tttaaatgtttggtttttcatttctagaacattttcctatcctaaaatttacctatctggctatctatcatctatcacttttcctaaggatctttagttgtttactttttaatgaagtat

SEQ ID NO: 977883 - DNA, 120 bp, Artificial Sequence
  ENSG00000229321_4 (sequence is synthesized)
aatatacgttatgatagtgtattttatgtatcctcatatcctttcactgtggatttaatttttagaaataacaaaaagtcacatagggcaaattcattaagctgagtgggtgattaagtt

SEQ ID NO: 977884 - DNA, 120 bp, Artificial Sequence
  ENSG00000229321_5 (sequence is synthesized)
aacaatagtaatgaccatgtattaagtgcctactatgtgccaggcactgtgctagcatttcacacccattatatcattcagtcttcacacccctgtttggtggttattaatgattactaa

SEQ ID NO: 977885 - DNA, 120 bp, Artificial Sequence
  ENSG00000229321_6 (sequence is synthesized)
tattcattttatagatgaataaactgatactcaaggccttaattgcctttcctaggggtgcacaactagaaaaaaggcagagccagatctgcacccaagtccttctgaccccagagctca

SEQ ID NO: 977886 - DNA, 120 bp, Artificial Sequence
  ENSG00000229321_7 (sequence is synthesized)
tgcttgtatcatcgcaccagtgttactcaagctttcctggtgattacagtcacatgtacttgacaaaaccacaaactgttgggcctgtcccagtgatactgaatcgaaatttactgagga

SEQ ID NO: 977887 - DNA, 120 bp, Artificial Sequence
  ENSG00000229321_8 (sequence is synthesized)
gggacctgggagattacactgcttgaacagcatggtaccggggaaccagagatcaacttcaacccttctgttagctcttagtgggctggtcagctggatgtagaagctaaattgacagca

SEQ ID NO: 977888 - DNA, 120 bp, Artificial Sequence
  ENSG00000229321_9 (sequence is synthesized)
ggcagattaacaagagaaaaatgtataaattttactagttttacatgtacttggggatcttcacaagaaagtgaagtctgaacaagaggccaaagtaagatattcttatactttttagac

SEQ ID NO: 977889 - DNA, 120 bp, Artificial Sequence
  ENSG00000229321_10 (sequence is synthesized)
aaagaatgataaatttgagaagaaacaacaggagaaagaaaatctggctaggacagtaaaattttctaggggagtcacaggagatatatgagggggtgtaaagcaagtggaagataaagg

SEQ ID NO: 977890 - DNA, 120 bp, Artificial Sequence
  ENSG00000229321_11 (sequence is synthesized)
ttattttgttcgtaagtttgtttattcgggttccttgcagcctccaagtctctggtgataagggctattttctcatcctggtatggataaatctcagggccttcgaagagtatccgtccc

SEQ ID NO: 977891 - DNA, 120 bp, Artificial Sequence
  ENSG00000229321_12 (sequence is synthesized)
agaggattctttatcccttgctccatacaggaagatatagatcagctcttcctttctgaaactagaatttctccattgttttccattagaaataatcaacatacaaattttgggatggca

SEQ ID NO: 977892 - DNA, 120 bp, Artificial Sequence
  ENSG00000229321_13 (sequence is synthesized)
catccttcagtcctccaatggtatctaccatatttttttcaaacatataacatactttaaggtaatgagattaggtcgtgcagctcacaaatagctctgaaggcagttcctatagcagag

SEQ ID NO: 977893 - DNA, 120 bp, Artificial Sequence
  ENSG00000229321_14 (sequence is synthesized)
ggacaagatttatttgaatgttctgctttagaatcattaaaatgagcaccctcactgccatgttggctctacgcacagtaagattagagagacagcgttttacagtgaaaagagtaagtc

SEQ ID NO: 977894 - DNA, 120 bp, Artificial Sequence
  ENSG00000229321_15 (sequence is synthesized)
aaccctggtttgggatctggataaattgcttaacttctcagagccttagtttcttcatctgtaaaatggattactacccaatttgaaggactattgtatacattagaaataactatatat

SEQ ID NO: 977895 - DNA, 120 bp, Artificial Sequence
  ENSG00000229321_16 (sequence is synthesized)
gccttgtcatgtagtagatgcttatagcagttcttataataataaagcgaagtccccgtggtgtattgtaaatgtgaaccacactcctcagcagtgatccttgtgtgctaagctagtgga

SEQ ID NO: 977896 - DNA, 120 bp, Artificial Sequence
  ENSG00000229321_17 (sequence is synthesized)
ccagagtttccagctgaagtagatctggaaccgagtcttgaaaaatgtgtgtagagaagcttctgtacttttcttatgtggatggcagtggcgagggggcggtggcgggtgcagctgcaa

SEQ ID NO: 977897 - DNA, 120 bp, Artificial Sequence
  ENSG00000229321_18 (sequence is synthesized)
tacttaaaaaggaattctattgtggcaataaatgaatatggcaagaaatgagcctggcaagaaatgaatgacaatggcccctaggtggtgctgaatcatcatggaagtggaggctggaca

SEQ ID NO: 977898 - DNA, 120 bp, Artificial Sequence
  ENSG00000229321_19 (sequence is synthesized)
cttggcatttgcggaggtgacttccttctggtttgaatttcaaataagagcaggacagctccttgggatgtctgggaaaaaagaccaggcagaaaagagtcttttcactaggagcgggtg

SEQ ID NO: 977899 - DNA, 120 bp, Artificial Sequence
  ENSG00000229321_20 (sequence is synthesized)
caaaatactcttgcctgtgaggcctcttcaggtcttcggtttgctttagttggaaacaggaagcagggtcagaccaacttgtattcatttgctgagagctgttggagctgtgactgattc

SEQ ID NO: 977900 - DNA, 120 bp, Artificial Sequence
  ENSG00000229321_21 (sequence is synthesized)
tgacagatcaaataccatttataacactcctgtgggggacactttaaccggggatgttagtgctagcccctccagagactaagtatgtttgcgggatgtgaggacccctggaatatacaa

SEQ ID NO: 977901 - DNA, 120 bp, Artificial Sequence
  ENSG00000229321_22 (sequence is synthesized)
atatgcatgctaatgaattttaacaaaaataacccattattgttttctgtgcaacactgtgcatttctcagctacacctgtcctttccaacctcaattgctgggcaacctatttttcttt

SEQ ID NO: 977902 - DNA, 120 bp, Artificial Sequence
  ENSG00000229321_23 (sequence is synthesized)
cggcatcagaagcgatagcatctgggaagtgaatctgatgaattctgcctggcaaccaacatctttccaactgccagatcctgggttttcctcttctcctgtgttagaaagcgtgaagaa

SEQ ID NO: 977903 - DNA, 120 bp, Artificial Sequence
  ENSG00000229321_24 (sequence is synthesized)
tatatgttggaatgagggagcccacacaagatagagctacctggattgtcacatcaccttgtggtcatctgtactaacagcaggtcctgcatgtttggcacggcatctcaacttgatgtc

SEQ ID NO: 977904 - DNA, 120 bp, Artificial Sequence
  ENSG00000229321_25 (sequence is synthesized)
tatttcttcttgttctccttcacctcacatgaaccttccaagtcataattctttggaaatagacacaaggagctttatttcaaattaccatcctttacttaagaggttccatctctaagc

SEQ ID NO: 977905 - DNA, 120 bp, Artificial Sequence
  ENSG00000229321_26 (sequence is synthesized)
atatcagcaatcatggtgacgtgccactctgctggtaattcatatggcttattcagaagcacagatcatggctgttagacctgccagatgttcccggtccctagctgcaattaagttcca

SEQ ID NO: 977906 - DNA, 120 bp, Artificial Sequence
  ENSG00000229321_27 (sequence is synthesized)
acatagcccaatttgaaagagattgagaaaccacagttctcattaagaatattcatgagtttgcaccttgaaaagccagcaatcacatgatatgccagaacggacaagatcgtttgagaa

SEQ ID NO: 977907 - DNA, 120 bp, Artificial Sequence
  ENSG00000229321_28 (sequence is synthesized)
gttacactcccatttttcctaagacatgttgtgcatctgccaacttgatgctctcacacatcccacaatgatttctttggaagaatgcaatggctgttttgagaatgaaggtgagacatt

SEQ ID NO: 977908 - DNA, 120 bp, Artificial Sequence
  ENSG00000229321_29 (sequence is synthesized)
tgcagctttgagaatggaagtcacacgctaaagatgatggagctgcagcccccgatgactttgtgtgctgcagcaccagccctgaactgcccatctttggactttcctttctatgtttgg

SEQ ID NO: 977909 - DNA, 120 bp, Artificial Sequence
  ENSG00000229321_30 (sequence is synthesized)
tcctctgtggccatgtcgggtctgttggtggagatgccaaacacggaagacagtgaagtggtggctcagcgttctccaaaggaatgagcaagcagatgaggcaaagcacactctgaagag

SEQ ID NO: 977910 - DNA, 120 bp, Artificial Sequence
  ENSG00000229321_31 (sequence is synthesized)
tgacaactatagcttccataagaaagttttggaggctcctaaaaatgacagataaatgaactaacctaatcagcaaaattaaactataggaaagagtatggaccttgaaaagacagctta

SEQ ID NO: 977911 - DNA, 120 bp, Artificial Sequence
  ENSG00000229321_32 (sequence is synthesized)
gccagcttgacgactaaagcaacacctttccaagcaacattggaaatttgacctcctcatcagaaaaatgtgtatagacatctctggagtcaggctaccccatatgaagcttggattttg

SEQ ID NO: 977912 - DNA, 120 bp, Artificial Sequence
  ENSG00000229321_33 (sequence is synthesized)
gcttcactgtggctgcaggtatttgaggatgcaattagctgaactaatctcactcaaattcctaagtgcgacttcttacgtggttttcatctagccgttctatctatcccaacaagaatc

SEQ ID NO: 977913 - DNA, 120 bp, Artificial Sequence
  ENSG00000229321_34 (sequence is synthesized)
tgttgctagacctcaaaaacactgagtgctgtcaggaaaaaatgtacaaggcaccacaaagattatggggcatctactatggaaaacctagacattgtctagagcattgtttgtggttat

SEQ ID NO: 977914 - DNA, 120 bp, Artificial Sequence
  ENSG00000229321_35 (sequence is synthesized)
ctctgtctttcattgcctttgatctatttttcaactctccacattgtagaaaatgactgataattcaaatgattcttttccataaaaatggaagtgaacaatgttcggtgggatgcaatg

SEQ ID NO: 977915 - DNA, 120 bp, Artificial Sequence
  ENSG00000229321_36 (sequence is synthesized)
gactaattttgtaggtatttataaatttattttaacattttgtattacctatgtatatatgtgattctctgaattctcttttgaactgatcataacatcttactggatctcattaattaa

SEQ ID NO: 977916 - DNA, 79 bp, Artificial Sequence
  ENSG00000229321_37 (sequence is synthesized)
cacctcaagcaattctcctcactcagactcctgagtagctaggattacaggcccatgccaccacctccagataatttta

SEQ ID NO: 977917 - DNA, 120 bp, Artificial Sequence
  ENSG00000229321_38 (sequence is synthesized)
taggattacaggcccatgccaccacctccagataattttaaacttttttattttacaaataggattttgctatgttgttcaggctggtcttgaactcctggactcagatgtttggcacgg

SEQ ID NO: 977918 - DNA, 120 bp, Artificial Sequence
  ENSG00000229321_39 (sequence is synthesized)
ttaaaataagttaccagagaagatcattttacctcggtctggccagttgaaacactgtgtttgccattacacagtgggtgtttttgggatgtgactgaagtcagcctgagtccaatgaaa

SEQ ID NO: 977919 - DNA, 120 bp, Artificial Sequence
  ENSG00000229321_40 (sequence is synthesized)
attctgaacttcttctggaattatggtgaaggacaaactctttttgggttgtaaacctggcaatgtgagtaagaatcttactgtagtgggagaatgtgcctgaggatgcagccaacacaa

SEQ ID NO: 977920 - DNA, 120 bp, Artificial Sequence
  ENSG00000229321_41 (sequence is synthesized)
taaaaagcagagtccggtagatgaagagtaatagtgttctgatgatgtcacttaaagcaccaagatccagccatgcctgaagttgatatacccttttcagttattaaaaaagtcaacaaa

SEQ ID NO: 977921 - DNA, 120 bp, Artificial Sequence
  ENSG00000229321_42 (sequence is synthesized)
acccctttttaaaagtaagctagtttaaactggatttctttcacttatgtccaaaagagttctaattcatacaaagccctcattttataggcttaggaaactgacaccaaggacgatggc

SEQ ID NO: 977922 - DNA, 120 bp, Artificial Sequence
  ENSG00000278058_0 (sequence is synthesized)
agcctgttttccccactcttgtcattttaagtcaatagatttcctgggtttcttcccccgcccccccactttgccttttcaggggataggcatctccttagatttttgtttttcttcact

SEQ ID NO: 977923 - DNA, 120 bp, Artificial Sequence
  ENSG00000278058_1 (sequence is synthesized)
tagggtcagctttatgattcgttcttctgctgtcatcctttttcatcctattcacagcctgtaccggtgagggaatttgtctcaaaagcattcagcccttcaaagatttttattgtggtg

SEQ ID NO: 977924 - DNA, 120 bp, Artificial Sequence
  ENSG00000278058_2 (sequence is synthesized)
aactcagaactgataaacagaaaaacagaaacagaaaaagggaactgatatgggggcgatcttgatgcgggttgtgtctctcatgcatgataactcagaggacaggctcctcggtagtgc

SEQ ID NO: 977925 - DNA, 120 bp, Artificial Sequence
  ENSG00000278058_3 (sequence is synthesized)
tcagcagccattcgacctgggaaagaaacagagttttagaaaatacaggccaaatgtagagacgcctgtgattaccaggatgagtatgtcagtgcaggtggcttctgaatttctgtttct

SEQ ID NO: 977926 - DNA, 120 bp, Artificial Sequence
  ENSG00000278058_4 (sequence is synthesized)
gagtttgtttggctgatgcctaaggaaaggggtcccttacagccctgttttataccttagttcttggtggcaacgtgggtgttgctgatctctctgatgtgtttttctgtgcactgaaaa

SEQ ID NO: 977927 - DNA, 120 bp, Artificial Sequence
  ENSG00000278058_5 (sequence is synthesized)
caccagacatgctccgtgacatcctcggagcatctcccatcataatggagtgttcctaacctgacaaagaatagcatattacctccccatctactcaaaataaaattatagtaaaattta

SEQ ID NO: 977928 - DNA, 120 bp, Artificial Sequence
  ENSG00000251604_0 (sequence is synthesized)
gccggcaactccctgggagctcggcccgcgcggggaactcgcccagcagcctgtgtttctcgagtgtgggcagccggctcccgggcgtccctcccaccggctgcgggggcccgggactgg

SEQ ID NO: 977929 - DNA, 120 bp, Artificial Sequence
  ENSG00000251604_1 (sequence is synthesized)
gggactgggcggtagtggaggcaggtccttggactgcaggctgaggctttttccccccacgagcggtttgggccctccaggagcccctgcgcgggggtcacgtggattacgctaggtgag

SEQ ID NO: 977930 - DNA, 120 bp, Artificial Sequence
  ENSG00000251604_2 (sequence is synthesized)
agccggagaggctgcgccaccgtcgggaggctccctgcctccgccctttgtcctttgcccctgaccatgagcgccccaagcccagggacctccttagggggatgaaggctggaagagacc

SEQ ID NO: 977931 - DNA, 120 bp, Artificial Sequence
  ENSG00000251604_3 (sequence is synthesized)
cccatgaacgtgaacatgaacgtgttttcaaccccagcggttcccctggcgcctcgaccctcctttgaagagtcattctagaaggctgtattgcgatagtgtttgtacctgtcactgtga

SEQ ID NO: 977932 - DNA, 120 bp, Artificial Sequence
  ENSG00000251604_4 (sequence is synthesized)
gccctgaaaagagacagaagaaaacgcgagtgcctggcctgagggtgctccgtcccgtgggtagccagggcactccacttcagcattctcctgtggtgtaacattacctgccactcatgc

SEQ ID NO: 977933 - DNA, 120 bp, Artificial Sequence
  ENSG00000251604_5 (sequence is synthesized)
tggttcccatgcgccaagctaatttcaacaacgggtgaagtgggtatctccatgtgatggctgaggagacagattctgggtgttgctactaagcctcatggaggcagccatgacagagca

SEQ ID NO: 977934 - DNA, 120 bp, Artificial Sequence
  ENSG00000260511_0 (sequence is synthesized)
gccactgcactgggccaggaatatctttctatgacaaacggtctggttctgtcacccaggttggaatgcagtgtcaggatcatagctccactgtgtgacctcaaactcttgggctcaagc

SEQ ID NO: 977935 - DNA, 120 bp, Artificial Sequence
  ENSG00000260511_1 (sequence is synthesized)
caactctccagcctcagcctccgagtaactgagactacagtcagggaaatgaagagccactttcaacaattctgaagaagaaatatgggatgttttgcttcgggatggaggctggagcag

SEQ ID NO: 977936 - DNA, 120 bp, Artificial Sequence
  ENSG00000260511_2 (sequence is synthesized)
gagtttctggagtctgccagtacccagtttgaatcccagctctgccttttatcagctgggtgttgggcaagttagctgacttttgtgagttttctcatcattaaaatgagaacactgtta

SEQ ID NO: 977937 - DNA, 120 bp, Artificial Sequence
  ENSG00000278052_0 (sequence is synthesized)
aattatagaactattttatgcagcttttcatctaaaaaggcatcccatcccctctaagctttatttatgtactttcagcctccaaaaaccttccttaatcattcaacttaatattaactt

SEQ ID NO: 977938 - DNA, 120 bp, Artificial Sequence
  ENSG00000278052_1 (sequence is synthesized)
tcttctataatcatctgtattgtgtctttcaaacattttttagccctgtcttgtagtaagccatacactttacattgacatgtagtgcatacatacatttgttctgcaaaaattttatga

SEQ ID NO: 977939 - DNA, 120 bp, Artificial Sequence
  ENSG00000278052_2 (sequence is synthesized)
gcaatatacactgatatttgcctttttctctcctgttgattttgttattattatttggtaaagtatagtcccaaccaaaaaaatttattttatgacccagcaaagaatgactggcaacct

SEQ ID NO: 977940 - DNA, 120 bp, Artificial Sequence
  ENSG00000278052_3 (sequence is synthesized)
acaatttgaaaaatattgttttagatcataatgactacactgctccttttaccttatttatattttcatatgagtatgttttgttggtcaaataaaatcttaattggaaaacccttgaaa

SEQ ID NO: 977941 - DNA, 120 bp, Artificial Sequence
  ENSG00000227477_0 (sequence is synthesized)
ctctccactcagagctccggcttcagctattgtgcttccgaatgccactaccatcagatatgccatctacagaacttaacacctgagcacccacccttcagggcaatatggtgaaacccc

SEQ ID NO: 977942 - DNA, 120 bp, Artificial Sequence
  ENSG00000227477_1 (sequence is synthesized)
ttttctacaaaaaacttagccaagcatggcatatttgtgtaatgccatttgcatgacccacatggtcaccctggaccccgtggatcaggccctgcctggtgccaccaccgccacttctgt

SEQ ID NO: 977943 - DNA, 120 bp, Artificial Sequence
  ENSG00000227477_2 (sequence is synthesized)
ggtttggagatgttcagaataggcaaatcctgtggtggatttgtggttgtctaaggccctggtggaagggagcataggtgaattggaggggatgattaaaaggtgtgagatttcattttg

SEQ ID NO: 977944 - DNA, 120 bp, Artificial Sequence
  ENSG00000227477_3 (sequence is synthesized)
gggtgatgaaaatgttctaaaattggttgtagtaatggttatacaactctgaatatactaaaaggcattgaattgtacactttcaatatgtgagttatatctcaataaagctattttaca

SEQ ID NO: 977945 - DNA, 120 bp, Artificial Sequence
  ENSG00000227477_4 (sequence is synthesized)
gagtcttgtggcgcggtggggcgcggacccggaaccgccaagtggtgaaggcgcctccaggcggtgcccgctggtctctagagtgtcagtggcgctgtcttcctgcgttaccggagcgca

SEQ ID NO: 977946 - DNA, 120 bp, Artificial Sequence
  ENSG00000227477_5 (sequence is synthesized)
caaaatactcggtccccaggccgagaacgcacctctacctgggtcctgggtcccatttcacagactgagatgcgtgaagcgcctcctttagaagagctgacaattcttagcaaaccaagt

SEQ ID NO: 977947 - DNA, 120 bp, Artificial Sequence
  ENSG00000227477_6 (sequence is synthesized)
tttgcgtgattttggggaggcggcgctgccccaggaacgcctggagggcctgcaccaccaaactggacagccatgggtgtgtaacctctttttgggcctgagaaacagacctttctctcc

SEQ ID NO: 977948 - DNA, 120 bp, Artificial Sequence
  ENSG00000227477_7 (sequence is synthesized)
actcagagctccggcttcagctattgtgcttccgaatgccactaccatcagatatgccatctacagaacttaacacctgagcacccacccttcagggccacccatgggcccaaaacggga

SEQ ID NO: 977949 - DNA, 120 bp, Artificial Sequence
  ENSG00000227477_8 (sequence is synthesized)
taaaggagccattccctgacataggaggaaaacatttgctgagaagctactgtgtgccagacacaatcttggactttcacttaatcctcaaaacagccctaggaagaagtacctaccgtt

SEQ ID NO: 977950 - DNA, 120 bp, Artificial Sequence
  ENSG00000227477_9 (sequence is synthesized)
aacagataagaaagctgagacccacggtttacacagctaaggagagcaaaggttttaacccaggactgtcctgactccacaacatcaaagttgttgttttgtttttggtgttttgtagaa

SEQ ID NO: 977951 - DNA, 90 bp, Artificial Sequence
  ENSG00000227477_10 (sequence is synthesized)
aacatcaaagttgttgttttgtttttggtgttttgtagaaacaggatctccctattagcagcagtcctcccacctcggcctcccagagtg

SEQ ID NO: 977952 - DNA, 120 bp, Artificial Sequence
  ENSG00000227477_11 (sequence is synthesized)
taggaattgggtaaacatttttgaaaattaaataccaaattaccattacacaatgccaaacagacctcctttgtccccttcccaggatttttccagaagatggactcacattatgatggc

SEQ ID NO: 977953 - DNA, 120 bp, Artificial Sequence
  ENSG00000227477_12 (sequence is synthesized)
atgaaaatttctgaaatgatgggaatgttctaaatatgtgctgtccgaaatagtaaccattagccacatatggctattgagcactttaaatgtggctagcataactgaaaggccacattt

SEQ ID NO: 977954 - DNA, 120 bp, Artificial Sequence
  ENSG00000227477_13 (sequence is synthesized)
ttatttaaatttaaatttaaatagcaaaccgtggctaatcataataatagcttaagagagaaatggtgagcagggttactgggagaggtattttcctataagctctggatatacagttga

SEQ ID NO: 977955 - DNA, 120 bp, Artificial Sequence
  ENSG00000227477_14 (sequence is synthesized)
cctgggaacaacaagggtttgagctgcatgggtccaccaatacaacccttgttttgttttgttttgttttcaataaatacagtcagccctctctatcagagggttccacatccacaatga

SEQ ID NO: 977956 - DNA, 120 bp, Artificial Sequence
  ENSG00000227477_15 (sequence is synthesized)
aacatggttggaaaatacagtatgggatgtgaaacctgtgtatagggtgggctgacttttcgtttccataggttctgcagggtcaactatagtacatgagtatactcacattttagtatc

SEQ ID NO: 977957 - DNA, 120 bp, Artificial Sequence
  ENSG00000227477_16 (sequence is synthesized)
ttagtatcctaatagatcctcaaaccaacacctggcagaaaatggggaacaattgcataacagtattcaagggactgggtatgatggcttgcacctgtaatcccagcacttttggaggcc

SEQ ID NO: 977958 - DNA, 120 bp, Artificial Sequence
  ENSG00000254236_0 (sequence is synthesized)
tccttctcttccttagagacggaacctaggcccaagacggtgaattggcgccgagaaaccagacacagccacccagccagctccagctccaacgccacggtctctgcccccgcacccacc

SEQ ID NO: 977959 - DNA, 120 bp, Artificial Sequence
  ENSG00000254236_1 (sequence is synthesized)
ccatccggggagagccatcgctcactgacccaggaaggtgtcaaacgaggaagtagcagcagtaacagatctacagatgaagaaagtgagggcacggagttgttcagcgcaagggaatag

SEQ ID NO: 977960 - DNA, 120 bp, Artificial Sequence
  ENSG00000254236_2 (sequence is synthesized)
ataccaggtgttgaatccaggctctcctacttactagttgtgtgaccttactcctctgaatttcagcctgttcacatgcaaagtggtggtaataataccttacacaggtattgtgaggat

SEQ ID NO: 977961 - DNA, 120 bp, Artificial Sequence
  ENSG00000254237_0 (sequence is synthesized)
gacctaccacctgtgtcacatcccattaggttctgtggatgaggcatggtgcttggcacagactgacacaagtttgggcaaacttggcagagcagcctaacccaaagcgaaaaacagaaa

SEQ ID NO: 977962 - DNA, 120 bp, Artificial Sequence
  ENSG00000254237_1 (sequence is synthesized)
tgaaccaagatacaacctctgtggaaaaccctactgaacaaaagcaactctgtggagtgtcctctcagctgcaaattgagacagaattgtggggcaagcttggccactgatgcagcttgc

SEQ ID NO: 977963 - DNA, 82 bp, Artificial Sequence
  ENSG00000254237_2 (sequence is synthesized)
acagaattgtggggcaagcttggccactgatgcagcttgctacacagaaagccagagaccgagagccaatgactgagactat

SEQ ID NO: 977964 - DNA, 120 bp, Artificial Sequence
  ENSG00000254237_3 (sequence is synthesized)
gaccaactaaagctaaggatttatatagcagggaagaagacaggaactaggaaggggcaaggaagcgatcctgatgaatgaagggtcaggcatttcattgtctggatgtggcgatctgct

SEQ ID NO: 977965 - DNA, 120 bp, Artificial Sequence
  ENSG00000254237_4 (sequence is synthesized)
ctataaccccacttccgatgcagacagcaattccaatgcattgcagctttcaggattttctcactgtgtttttgcctctccttttctttaagacatgagcatttgtctacggggatggcc

SEQ ID NO: 977966 - DNA, 120 bp, Artificial Sequence
  ENSG00000254237_5 (sequence is synthesized)
tgaagtgtagtctccattacccagagtcatctcactctctgaccttgactcatgatctgagaacaagtgctcccctgcttgtcttcctgaggggcatctgtccctcttgcaaacagattt

SEQ ID NO: 977967 - DNA, 120 bp, Artificial Sequence
  ENSG00000254237_6 (sequence is synthesized)
cctttgggctctgtcatttagaaatgcccttatttatctgaattatagttccagttcagaacatttacaaaggaacagattgctcccaattttaaagcaggtaaattctaaaagttggca

SEQ ID NO: 977968 - DNA, 120 bp, Artificial Sequence
  ENSG00000254237_7 (sequence is synthesized)
agccagtcatttagaatttgagcctcatattccataggtatgaaattatacataatgaaaaagttcccagggcagcccacaaaaagcctacttatccaaaataaagctaacctgagttaa

SEQ ID NO: 977969 - DNA, 120 bp, Artificial Sequence
  ENSG00000254237_8 (sequence is synthesized)
aaccaagagtaaggaagccacttgctccaagtcacagtagaaggttgagcatgtgactattaccaagaggaagtggggacacaagtgacgccatgttggaggctaatttgctgttttcac

SEQ ID NO: 977970 - DNA, 120 bp, Artificial Sequence
  ENSG00000254237_9 (sequence is synthesized)
ttctgattagccgttgtctcgggaatgccttctgattattacttaatttactgtccctaatgtaagaacatgtcaacctcgatgctgttgcacaaattataggctttgatgcatgcagca

SEQ ID NO: 977971 - DNA, 120 bp, Artificial Sequence
  ENSG00000254237_10 (sequence is synthesized)
ctatgctatataagccctggttctgggggtaacaggtgcagagatctacctgtattgctgccgctaaagaccatgcttccatctgtaagtttccccagtaaaacatcctttatcaacaaa

SEQ ID NO: 977972 - DNA, 120 bp, Artificial Sequence
  ENSG00000254237_11 (sequence is synthesized)
ttatttttagaccaactgaaatatatatgactcgacaaggggaccagtgaacagaagaacagaaatcagaattctgacaacataacagaaggcagaagtccttgtgagtcattctcggag

SEQ ID NO: 977973 - DNA, 120 bp, Artificial Sequence
  ENSG00000254237_12 (sequence is synthesized)
accatagggcagaacgcaaagaacataacataggagtcaaatggagccgaacacttcagtcactcacgtgatggctgtgtgtccttgggctctacaagaagcatggtatcagcatctgct

SEQ ID NO: 977974 - DNA, 120 bp, Artificial Sequence
  ENSG00000254237_13 (sequence is synthesized)
tctgatgatgcctcaggctgcttccactcaagttggaaggaaaaagggaggctgcatgtgcagagatcacacggaggaggaggaagcaaaagagaactttctagctcgaaatcacgtatg

SEQ ID NO: 977975 - DNA, 120 bp, Artificial Sequence
  ENSG00000254237_14 (sequence is synthesized)
ccgtttctcctggagcccgagctggctgtcaccgagaccttgctcattatgcagactcattcacatgcatacccaaagcaacacttgacggttgtggaagatttccatcctcacaggtca

SEQ ID NO: 977976 - DNA, 120 bp, Artificial Sequence
  ENSG00000254237_15 (sequence is synthesized)
tgaaatgcgtctccactggaatactggttgtttatcacctacactaacgatttacaatggcctaagtgttgtattcctagtgactgtagtctgaatcaaaaactcctgccctgaagcaag

SEQ ID NO: 977977 - DNA, 120 bp, Artificial Sequence
  ENSG00000254237_16 (sequence is synthesized)
gacaacttctttattcacatggagaatgatagcagggaaaaggcaaaaatttaacaataacgaagaaaaatccctctttttctatgtgcagaataaaaatcttattaaaataagaccttt

SEQ ID NO: 977978 - DNA, 120 bp, Artificial Sequence
  ENSG00000254237_17 (sequence is synthesized)
acactgcagtctgctgtactggaaatgacttatttattctacgttcattcacagcttctgtttatggcataataccttctgagagtaggccattatgacaacaatgcctctgtttcctcc

SEQ ID NO: 977979 - DNA, 120 bp, Artificial Sequence
  ENSG00000254237_18 (sequence is synthesized)
tttcttctctcttccacctgatagacttctactcttccttcaagggtcagcccgagtggcatccttttgaagtttcttctgtctccctgaccagctgtgagccctctagggccaagacag

SEQ ID NO: 977980 - DNA, 120 bp, Artificial Sequence
  ENSG00000282787_0 (sequence is synthesized)
ctgcatcccaaagagcgttgctccaggcctcccagtcttcattaaacatttcttaaatcctgccccagcccgccgcggggcttgtttgccaaagcgcaccaggtgcgttgcggcctgagc

SEQ ID NO: 977981 - DNA, 120 bp, Artificial Sequence
  ENSG00000282787_1 (sequence is synthesized)
ggcctgcagtggaggggccgggactatcgaagattgcttaatcactcaacaagattttaaaacgtgattgaagaccgcctacctgtgagggcagcgccgaccaggcttttcttgcccgct

SEQ ID NO: 977982 - DNA, 120 bp, Artificial Sequence
  ENSG00000282787_2 (sequence is synthesized)
tccgcacatgcaatcacggttgtctcgtcttctggcaaccctggatctccacaaactgatcttcagggtgcttctctcttcagcagttttgcctcaagggcatggcgcctcagctagttt

SEQ ID NO: 977983 - DNA, 120 bp, Artificial Sequence
  ENSG00000282787_3 (sequence is synthesized)
ttggctgtaaacaaaccgcggccaccgccaggctaccgggttaccagtacctgttcttcggagtttcttaggcataaactataagaactacaaataaagattttctgcttccttatttca

SEQ ID NO: 977984 - DNA, 120 bp, Artificial Sequence
  ENSG00000254239_0 (sequence is synthesized)
tgtaagagtatggcaatactgttttttttcattttgtattgtttcttaggagtgatgatggctcgtcagtgttccactgcactatggggaagggagtgtcttggtggtaaacaaggcctt

SEQ ID NO: 977985 - DNA, 120 bp, Artificial Sequence
  ENSG00000254239_1 (sequence is synthesized)
ctgttctcatcatttagttttcagctcaactacaacctcctcagcaagaccttctctgaccatagcaatcactgccatctgcctgtgcctctttcagtgtctggttctcccaggagaatg

SEQ ID NO: 977986 - DNA, 120 bp, Artificial Sequence
  ENSG00000254239_2 (sequence is synthesized)
tcagttccatgacaatggacactacaacggactctcttgctcatcactattcccagggcatagtctatacagagtgctcaggaattcctggttaaatgaataaatgactaatacatttaa

SEQ ID NO: 977987 - DNA, 120 bp, Artificial Sequence
  ENSG00000232971_0 (sequence is synthesized)
gctatgctttgggccagcttgtcctgtggaccaaataatggaaaaacaaggaatcagagcatgacagccagggacaatgagaacagccccttgggaggaactgtcctccttccatcacca

SEQ ID NO: 977988 - DNA, 120 bp, Artificial Sequence
  ENSG00000232971_1 (sequence is synthesized)
tacatatcattcaaaattttagattctggctatcagaatacatgaaaaatatatgactgtgccctgggcaaggtagcagaaggtgctggaacacagagcggagaattgctaatgttttcc

SEQ ID NO: 977989 - DNA, 120 bp, Artificial Sequence
  ENSG00000232971_2 (sequence is synthesized)
tgccagctctggtgagatggtagttgctgacagccatgctttgtgatcacagattgtctgcccactcatattgccaagcctagcttgtgatttataaatttattttttctgatcctctaa

SEQ ID NO: 977990 - DNA, 120 bp, Artificial Sequence
  ENSG00000232973_0 (sequence is synthesized)
agaactacaggctacacagaggagaagggagccaggccacctttcccatgcatcccactccttgaacagaaagagcaactaaaaagggaggcaggagttctaagcaccatctttttttca

SEQ ID NO: 977991 - DNA, 120 bp, Artificial Sequence
  ENSG00000232973_1 (sequence is synthesized)
ccagtacagtttccaagatcttgctgctatgaaaataaagatctcctaatatttatagtacttgaggcagcactgagaagtgaaggaatatttgggaggatcagaagcttggtcctgatt

SEQ ID NO: 977992 - DNA, 120 bp, Artificial Sequence
  ENSG00000232973_2 (sequence is synthesized)
catcaacaggaacttgatgacttcaagggagtccccaaaccctgggtttctgttttctcaactctaacatgaggggctagatgcatctggtttagttagtctccatgatggtttagttcg

SEQ ID NO: 977993 - DNA, 120 bp, Artificial Sequence
  ENSG00000232973_3 (sequence is synthesized)
tctccatgatcctgtgaatttcagatgttgaaaatcttcggaaaagccctgaaagatgaacagtggtctcaaatagtcaagaccccctgctgggaggagcttctatcctgctctgtggaa

SEQ ID NO: 977994 - DNA, 120 bp, Artificial Sequence
  ENSG00000232973_4 (sequence is synthesized)
ggcgccagttctaagcattgacttcaactatggttgctaacacaagaatcggcactggtgacttttgagccatcaatcatcctttcctaacacatgaatcttttggaaaatggtctcaaa

SEQ ID NO: 977995 - DNA, 120 bp, Artificial Sequence
  ENSG00000232973_5 (sequence is synthesized)
gtgtactggtatgaccacccgagatcccatcgctgagaaagataatggccctggagacaaagactgatgaagaaagacagtatccagctgtgatgcagatgaaacatgcggcatggttgc

SEQ ID NO: 977996 - DNA, 120 bp, Artificial Sequence
  ENSG00000232973_6 (sequence is synthesized)
actcactatgcagccaaggctggaagccactctggatccagccactctggcacagcgttcttgctctaggaagaacaactgaacatggccacacaggcctcacagctggcatatggaggc

SEQ ID NO: 977997 - DNA, 120 bp, Artificial Sequence
  ENSG00000232973_7 (sequence is synthesized)
tgttaataagctgagcttgaggcttcaaaggactcttgtagcctgtgctggatctagcagtgaccagtatgccagtggccatggatgcccaggcccatgttcagtagtgaagcaggtgct

SEQ ID NO: 977998 - DNA, 120 bp, Artificial Sequence
  ENSG00000232973_8 (sequence is synthesized)
agcagcagaagcaatagaaatggaaactgggagatctgctgtggatgaatctcattatcttctttctctgaccctctttggactaaataaactcccagtattcttgaccaacagaggtag

SEQ ID NO: 977999 - DNA, 120 bp, Artificial Sequence
  ENSG00000232973_9 (sequence is synthesized)
ggttggaacagaacctcaaaagtcatcattagacttcctactaatagggcattggaagttcaagcgactaactaggaaacaggttagtatttgtacccctacactgtgcaacagattaca

SEQ ID NO: 978000 - DNA, 120 bp, Artificial Sequence
  ENSG00000232973_10 (sequence is synthesized)
tactaggccaaggttttttcaaagggatgcactaattttcactatttccccacaccctttcaggtgataaataattgacttgatttgtttacactgacgccaagaattcttgggaagaag

SEQ ID NO: 978001 - DNA, 120 bp, Artificial Sequence
  ENSG00000232973_11 (sequence is synthesized)
gatcaaagtgaaaagtggtagcccatggtggggaggccacactcagtgcagttgtgaagtcagcagcatttttaagcccattcattgccagtagccctgagatgagcattcccaagctgc

SEQ ID NO: 978002 - DNA, 120 bp, Artificial Sequence
  ENSG00000232973_12 (sequence is synthesized)
ttcccaggtccctcctccactctctcagggacatccattctgtaccagccccctcagatactcatgcccttgccctcccttctccatgctcattaaaaccagcttaagagcagatatgac

SEQ ID NO: 978003 - DNA, 120 bp, Artificial Sequence
  ENSG00000232973_13 (sequence is synthesized)
atcagtcacttaccttttcgtgtggctctaaatcaaagtgtcacctctcccaagcacatgcttgcatcttagctctgattgaggaatgaaaagctttgttctctgttaaaagaactttga

SEQ ID NO: 978004 - DNA, 120 bp, Artificial Sequence
  ENSG00000232973_14 (sequence is synthesized)
gcttagatgccccagactgagaaatccaccaaaagctggacctttgacttgagcggcaaaggacccccatagtcaggctgtgatttgaggagcatcaagaggccagagtttccaagttgg

SEQ ID NO: 978005 - DNA, 120 bp, Artificial Sequence
  ENSG00000232973_15 (sequence is synthesized)
gacccagaaggtggggttggcagggggagggtaggagcagctggagactctgctctaccaggggaatacggaggtggggaccaatcccagggtaaggaatgaaagtaggagccccagaag

SEQ ID NO: 978006 - DNA, 120 bp, Artificial Sequence
  ENSG00000232973_16 (sequence is synthesized)
ctgaaaacatacttcaccgatgtcagcattttacccagagccattccaaggtgaccataactcacttaaaagcctgaaagctgttttatgccaactaataaagtgcagtttaataaaaaa

SEQ ID NO: 978007 - DNA, 120 bp, Artificial Sequence
  ENSG00000232973_17 (sequence is synthesized)
aagtacctaccacgccacccgctacctgtaataatccatctgaagaggtcgccgggcagcgcctcggcagacagactgacctgcggggaggtgcggtttccagtggcgcgggacagccgg

SEQ ID NO: 978008 - DNA, 120 bp, Artificial Sequence
  ENSG00000232973_18 (sequence is synthesized)
ctccgagaaggaactgggacctttgcctagggcaagacgtcaacaggaacccgcaggcccggcctggacacctgctgccctcactggaagctttaactcccactcgagtctcttggcgtc

SEQ ID NO: 978009 - DNA, 120 bp, Artificial Sequence
  ENSG00000232973_19 (sequence is synthesized)
gtcagtgccaggagcgcttggattgggatggggacggagaagggtgcctcgctcgccgagccccgctgcccttggggacctggcaaagtcgaggtttcctcacagcgttgagattgagac

SEQ ID NO: 978010 - DNA, 84 bp, Artificial Sequence
  ENSG00000232973_20 (sequence is synthesized)
cacattccagcaccattcacaatagcaaggacatggaatcaacctaagagcccatcaacagtggattggagagagaaaatgagg

SEQ ID NO: 978011 - DNA, 120 bp, Artificial Sequence
  ENSG00000232973_21 (sequence is synthesized)
cgcgacctggcagggcggggcctgcggggggcggggcgcgccgcacaccaggccgctttgacccggactcccgtccaggcgcaccggccggcctcggagctctaccagcaggctttcatg

SEQ ID NO: 978012 - DNA, 120 bp, Artificial Sequence
  ENSG00000232973_22 (sequence is synthesized)
caggctttcatgggagcggaggtgcccacgtttccattgtgcggtaaccgcgcttcatcacagccacctccaatcgaggccgcacggtgtccccagaaccacgctcggtacaacctgccc

SEQ ID NO: 978013 - DNA, 120 bp, Artificial Sequence
  ENSG00000232973_23 (sequence is synthesized)
tccgcgacttgagcttgcttcccggaaagccagtgtagtggcagcggtttgcctcacagcgcccctgtggtctcaaatagtcaagaccccctgctgggaggagcttctatcctgctctgt

SEQ ID NO: 978014 - DNA, 120 bp, Artificial Sequence
  ENSG00000232973_24 (sequence is synthesized)
tcggaggggccttcacagatccgtcaggctcaacactgcctccttagtgagcctgtgaaccacccaagacggctggtcatcagtgtcatcctcttccttttccggacaactatctttaaa

SEQ ID NO: 978015 - DNA, 120 bp, Artificial Sequence
  ENSG00000232973_25 (sequence is synthesized)
gatccagcatgcatatgagctctaaggcaggacagagtggcactttggagaaccctccaccgtccttaaaccagccccacttcccacttccagttctacccactcttggcttaggaaatt

SEQ ID NO: 978016 - DNA, 120 bp, Artificial Sequence
  ENSG00000232973_26 (sequence is synthesized)
ttctcctctttttgccctgaaaattagccttggtggctgagttttgcttttcaggttctcattgctagtgcttattttgacgcttagtgaccatctcattcctactattggcccgcagta

SEQ ID NO: 978017 - DNA, 120 bp, Artificial Sequence
  ENSG00000232973_27 (sequence is synthesized)
tccaggggctctgggagtggctgccagtctatctttgttgagttttggtattgattttatgtgtcagtacctgagaaggagagaagtccttgagttgtttcgtaaatgtggctcaagtga

SEQ ID NO: 978018 - DNA, 120 bp, Artificial Sequence
  ENSG00000232973_28 (sequence is synthesized)
tggctcaagtgagatgctgaacagtgccagccatgtggactctgccacagtgaaggaggaaggcagcactgagaagtgaaggaatatttgggaggatcagaagcttggtcctgattttgc

SEQ ID NO: 978019 - DNA, 120 bp, Artificial Sequence
  ENSG00000232973_29 (sequence is synthesized)
gagcacatttttttcaaggcttacagaatcccaaagcttgcccttgcttcaggaaaaagaactggttgacacctgagaggttttaagccacaagaagctgaggcccgttgtgaggagggc

SEQ ID NO: 978020 - DNA, 120 bp, Artificial Sequence
  ENSG00000232973_30 (sequence is synthesized)
agggacagtggggccaggccacacgcgacgcgtcacccacctcctgcctcacctccccccactgagatgtctgctgggtgggaggaggcttattgccagagaacagtctggtgttttctg

SEQ ID NO: 978021 - DNA, 120 bp, Artificial Sequence
  ENSG00000232973_31 (sequence is synthesized)
ttcctgcttcaggaagtcccccttctcccgccacccccgcagctcctcagcctggaaacaacttttagagaggagaagggaagcaaagctttcaaaagcagatacctgtggggtttgaag

SEQ ID NO: 978022 - DNA, 120 bp, Artificial Sequence
  ENSG00000232973_32 (sequence is synthesized)
tatcttcagtaattaagaagccactaagaaaactgaccctgggaaggcaaattcctgaagctgagtcagatacagccagctcttaccataccatctgaccctcagttccctctgacctca

SEQ ID NO: 978023 - DNA, 120 bp, Artificial Sequence
  ENSG00000232973_33 (sequence is synthesized)
tctcttcccacctcctctctgtctgactcagcagtgaggccacacaggcctccctgctgattcgagaatggctcccacctgaggccttgggccccccttgttttcgcccccacataccca

SEQ ID NO: 978024 - DNA, 120 bp, Artificial Sequence
  ENSG00000232973_34 (sequence is synthesized)
tctggcttccccttcactgcttccaaggctctcctcagagagcatcctgtcagaccagtctttcctggacatgctgagtgtacctttcccctatttcattttccttcgtggcacctttta

SEQ ID NO: 978025 - DNA, 120 bp, Artificial Sequence
  ENSG00000232973_35 (sequence is synthesized)
ccacctgatatgttcaatggctctatgtttgtttgtagtaagtctcgcctgactagaatataagacccatgggagaagagactttctgctctacccttggcacataccgggtgctcaaaa

SEQ ID NO: 978026 - DNA, 120 bp, Artificial Sequence
  ENSG00000232973_36 (sequence is synthesized)
aatattcaagtgctcgcttcggcagtacatgtactaaaactggaacaatacagagaacattagcacggccccttcacaaggatgacacacaaatttatgcagcattccataatttcgaga

SEQ ID NO: 978027 - DNA, 120 bp, Artificial Sequence
  ENSG00000232973_37 (sequence is synthesized)
accagtcagaatggctattattaaaaagacagaaaataagagttgctggtgaggctgcagaggaaaggggaaagcttatatgctcttaatggaaacacaaactagttgagccactgtgga

SEQ ID NO: 978028 - DNA, 120 bp, Artificial Sequence
  ENSG00000232973_38 (sequence is synthesized)
cttaatggaaacacaaactagttgagccactgtggaagacagtttggagatttctcaaggaactcaaaatagaacaaccattagacccagcaatcccactactgagtatatacccaaagg

SEQ ID NO: 978029 - DNA, 120 bp, Artificial Sequence
  ENSG00000232973_39 (sequence is synthesized)
cctaaaacaaaatattgcatgttatcacttgtaagtggggcctaaacgttgaagacacatgatcacgaagatgggaacaataggcactggggatcactagatggggaaggaagggagcag

SEQ ID NO: 978030 - DNA, 120 bp, Artificial Sequence
  ENSG00000232973_40 (sequence is synthesized)
ggggcatgggctggagtgccacctgttgcgtcctatacttattccctgggtgatgggatcattgggatcccaagcctcagggtgatgcaatttacccatgtaataaacctgcatgtgtac

SEQ ID NO: 978031 - DNA, 120 bp, Artificial Sequence
  ENSG00000232973_41 (sequence is synthesized)
cctggaagatcagaggctcacattccagctggaaccatggaggatgtagaagagaagaagaagaaggttcctgttatgccagaaacccttaagaaaaagggaaggaatttctcagagctg

SEQ ID NO: 978032 - DNA, 120 bp, Artificial Sequence
  ENSG00000232973_42 (sequence is synthesized)
gtatttactggaaggagaaggatttgtcctaagatgaatagttttttcatcttcagaaattcctgacaagctactaccctgtcaaggcatgaaaaatttcattagtgctgacttggcagc

SEQ ID NO: 978033 - DNA, 120 bp, Artificial Sequence
  ENSG00000232973_43 (sequence is synthesized)
cagttaaatatggatttcagatcaacaagggctaatcttttagtaggagaaaagacctggcccacgcctcccagaggctttacctggtgaagaggaggagcagccactgcagcgcggtaa

SEQ ID NO: 978034 - DNA, 120 bp, Artificial Sequence
  ENSG00000232973_44 (sequence is synthesized)
attccctgaccttcctttctagggctctgaatccaccccattgctgtctatccagtcagtctctcttttctagctggcatccatcacaagcaatctgcttatcttgtttttgtctatctt

SEQ ID NO: 978035 - DNA, 120 bp, Artificial Sequence
  ENSG00000232973_45 (sequence is synthesized)
cagtgaaggaggaaggaaaaaaatataatattggatcggctgtgtgtcaagcatctgaggttctaaccatagctccattactaccagtccgtgtgacttggggaatgctgcttaccttct

SEQ ID NO: 978036 - DNA, 120 bp, Artificial Sequence
  ENSG00000232973_46 (sequence is synthesized)
aacccactctcccttggagaagagaaggggcgtgtttccacctcgctgtaacccagcgccaaacccttcccctccccgcaaggcgcgtaacggttcctgcaatctggggacaacgctgcg

SEQ ID NO: 978037 - DNA, 120 bp, Artificial Sequence
  ENSG00000232973_47 (sequence is synthesized)
tccattttatccccaaataatcttgtttaataaattccttattaggccaaatccaatgtgctgaaatatctgccaagcatgtcattctacacaaaagggatttgcaaatagccagtagtt

SEQ ID NO: 978038 - DNA, 120 bp, Artificial Sequence
  ENSG00000232973_48 (sequence is synthesized)
ggcgtgaagaaaggacatgtgaaagcgctgggtgtggaatttcccatcctcggccggaggtctactacagctcgctgtttgcagatctgggctgagctatgcatcacattgttcatgaaa

SEQ ID NO: 978039 - DNA, 120 bp, Artificial Sequence
  ENSG00000232973_49 (sequence is synthesized)
gaaaaagcaactgctctccccagtgccccttccccgctccacatggctgcgatcagcagccccaagaccctaattgccacagcctattagaaataatgagacttacatggcagaagccaa

SEQ ID NO: 978040 - DNA, 120 bp, Artificial Sequence
  ENSG00000232973_50 (sequence is synthesized)
gggtaaaagcgacatctcgcaacacgaaaggttaatatcaacatatacagctagtgagtgcaaagggcacctcagttggtggctcattatggcgggctgacccatagggaaagtgtcatt

SEQ ID NO: 978041 - DNA, 120 bp, Artificial Sequence
  ENSG00000232973_51 (sequence is synthesized)
ctgcagagaggcctttctcaggatgtggcagcaaaagttacaaaagataaggacttgcctgtgaaacgcactcaactaatgagagctgaagattgtttgaaatatcccgatgacctcaca

SEQ ID NO: 978042 - DNA, 120 bp, Artificial Sequence
  ENSG00000232973_52 (sequence is synthesized)
gatgggggatgctgattaagatggctacaggaggctcctttcttgtctgacagcccattgagaagctttggtgagatgtgactaacaggccgtgaaggtgtctccatcttctctgacatg

SEQ ID NO: 978043 - DNA, 120 bp, Artificial Sequence
  ENSG00000232973_53 (sequence is synthesized)
gtccatgctttgggcaaaacaaacatgaaaaataagtctgaactgacacacatgtttgaatttagttttcagagccatatttgggggaaggagcactggtggggccgtcagcgatgattc

SEQ ID NO: 978044 - DNA, 120 bp, Artificial Sequence
  ENSG00000232973_54 (sequence is synthesized)
ctttatggtaaagggtgttcgtgactacttgcgtgactaatcgcatgactgcgctggggggtgagccaacggcaaattgaggtcttgaacacttgacaaaacaacccctgttctgtgggt

SEQ ID NO: 978045 - DNA, 120 bp, Artificial Sequence
  ENSG00000232973_55 (sequence is synthesized)
gctcagcacgtggccctcgaggacttggcggctgcgcggctggcgcgtgaagaagttgcgcatcatgctgtgggctgcgcgccgctgcaccttccagtgctccgagtagtggccgaaagc

SEQ ID NO: 978046 - DNA, 120 bp, Artificial Sequence
  ENSG00000232973_56 (sequence is synthesized)
catgctgcggccgccggacaccacacggaaggaggcgaaggccggccggtcggcgaaggccgagccctgctgcaccagggcctggtggatggcgcgctcgccattcagcaccactatggg

SEQ ID NO: 978047 - DNA, 120 bp, Artificial Sequence
  ENSG00000232973_57 (sequence is synthesized)
gcagctgcccaggcggatctggaaaacgtcgccgtagcgccgcgccaggcgagcgaacgagaggcagcactgagaagtgaaggaatatttgggaggatcagaagcttggtcctgattttg

SEQ ID NO: 978048 - DNA, 60 bp, Artificial Sequence
  ENSG00000232973_58 (sequence is synthesized)
gataaaattaccagaaaatattaaacaggcagcactgagaagtgaaggaatatttgggag

SEQ ID NO: 978049 - DNA, 120 bp, Artificial Sequence
  ENSG00000232973_59 (sequence is synthesized)
aagatgaacagtcttcaccaacctcctccctccagaatattcctcaagaatataaaatgcctcatcaacatgagacaacagcaggaagcacccattcgtagtaatcctctgtatggagga

SEQ ID NO: 978050 - DNA, 120 bp, Artificial Sequence
  ENSG00000232973_60 (sequence is synthesized)
ctgcacaccttaacatggtgaattttatggtacgtaaattacatctcaataacatttaaaaaaaaaaaaaaaagcagcagcagatggctgctggaggaggctgagcttaaatacccctgg

SEQ ID NO: 978051 - DNA, 120 bp, Artificial Sequence
  ENSG00000232973_61 (sequence is synthesized)
ttacacttcctcctttccttgtatttactggaaggagaaggatttgtcctaagatgaatagttttttcatcttcagaaattcctgacaagctactaccctgtcaaggcatgaaaaatttc

SEQ ID NO: 978052 - DNA, 120 bp, Artificial Sequence
  ENSG00000232973_62 (sequence is synthesized)
tcccaagacagctacctgcccagatgatgtaccttagccccaggaaggaggaggaagaagaggcagacagaatgatgcccaaacccctgcggcccggagacgaggtagtgcctgagtcag

SEQ ID NO: 978053 - DNA, 120 bp, Artificial Sequence
  ENSG00000232973_63 (sequence is synthesized)
gaagctgggagagcccagctcagtggaagaggcatgtggatcctggttaggtgtgaagccaggagggcttcttagccacagcctgaaatcgaagcccaggatcgagccacagtctgaaat

SEQ ID NO: 978054 - DNA, 120 bp, Artificial Sequence
  ENSG00000232973_64 (sequence is synthesized)
tcttgatttcctggcagtgataccttcccattccattacataaggtataagtggcagaagatcagggagaaccacagggctgtaagatattttataagttgttaaataaggggacactgc

SEQ ID NO: 978055 - DNA, 120 bp, Artificial Sequence
  ENSG00000232973_65 (sequence is synthesized)
tttatttggggcatgtcactcaatctcttcaacattgtgttaggtaggtatcatgaactaaattgtggccacccaaaactcatacctcgaaccccgggtacctcagaacataattgtatt

SEQ ID NO: 978056 - DNA, 120 bp, Artificial Sequence
  ENSG00000232973_66 (sequence is synthesized)
ttgaaaacacagatgtgcacagagcaaagaccacgtgaagacacaaagaaaacagccatctgcaactcaagaagagagtcccagagcacattgtgatctctgacttctggcctccagaat

SEQ ID NO: 978057 - DNA, 120 bp, Artificial Sequence
  ENSG00000232973_67 (sequence is synthesized)
tatgttgaaaatcttcggaaaagccctgaaagatgaacagtggtctcaaatagtcaagaccccctgctgggaggagcttctatcctgctctgtggaagaaatgggcatgccagatgcctg

SEQ ID NO: 978058 - DNA, 120 bp, Artificial Sequence
  ENSG00000232973_68 (sequence is synthesized)
catcaataaatcaagcgtgatcagggcagcactgagaagtgaaggaatatttgggaggatcagaagcttggtcctgattttgccatcaacaggaacttgatgacttcaagggagtcccca

SEQ ID NO: 978059 - DNA, 120 bp, Artificial Sequence
  ENSG00000232973_69 (sequence is synthesized)
aaagtgagaaaagtagtgacaacttgaagctggtagttgaggaagaaggagaacttctgaacccatgaagagagtatacccggtttgggtgggcaggactccaaagcctttaggatcgat

SEQ ID NO: 978060 - DNA, 120 bp, Artificial Sequence
  ENSG00000232973_70 (sequence is synthesized)
tagcaggcaagtgataacaggctttaaccctttcaaagcatgctgtgggatgggatattggcattaatcggggtaaaggtggttaggttttaatgagatggtaagggatgcatgatcggt

SEQ ID NO: 978061 - DNA, 78 bp, Artificial Sequence
  ENSG00000232973_71 (sequence is synthesized)
ttgtgggttaaggtgggggaatataagaggaggacgcaaaggaggctttggactgggaagaagggcagcaatgagatg

SEQ ID NO: 978062 - DNA, 120 bp, Artificial Sequence
  ENSG00000232973_72 (sequence is synthesized)
gggaagcagataatttagttaaagtggctcgccctaataagggaactgggcaggtgtggataactaaaatgagtgcttaaaagagtattgtctaagttgccaccagagttggggagtttt

SEQ ID NO: 978063 - DNA, 72 bp, Artificial Sequence
  ENSG00000232973_73 (sequence is synthesized)
gcgaagctcggcgtctgtgatggtctagggggcttccaaggcagtcgggcagcatcagtcttcagccgctaa

SEQ ID NO: 978064 - DNA, 120 bp, Artificial Sequence
  ENSG00000232973_74 (sequence is synthesized)
cagttaaatatggatttcagatcaacaagggctaatcttttagtaggagaaaagacctggcccacgcctcccagaggctttacctggtgaagaggaggagcagccactgcagcgcggtgg

SEQ ID NO: 978065 - DNA, 120 bp, Artificial Sequence
  ENSG00000232973_75 (sequence is synthesized)
aagtacctaccacgccacccgctacctgtaataatccatctgaagaggtcgccgggcagcgcctcggcagacagactgacctgcggggaggcagcactgagaagtgaaggaatatttggg

SEQ ID NO: 978066 - DNA, 120 bp, Artificial Sequence
  ENSG00000232973_76 (sequence is synthesized)
atttgaggaaagaaggaaggaaagagggatggagagatggaggaagactaaaggaaggatcgtggccctgagagaatagagcacaggccaggggtgagatacagagtgagatgggagctg

SEQ ID NO: 978067 - DNA, 120 bp, Artificial Sequence
  ENSG00000232973_77 (sequence is synthesized)
aatggggtctctgaaactagacatggaagacaccaaaagaaacattcctacttcatctttccctgtgcctgggataatttactcctggatggtaaagatatgtcttggtttcatctgtgt

SEQ ID NO: 978068 - DNA, 120 bp, Artificial Sequence
  ENSG00000257097_0 (sequence is synthesized)
tttaaaggaatctggagctgatgactcaagaaatgtccttcctcctaagaaattatcctcccatctgagattagcagcatctaatctcagttttctccactgctgaccagcatcagcaac

SEQ ID NO: 978069 - DNA, 120 bp, Artificial Sequence
  ENSG00000257097_1 (sequence is synthesized)
taactttgccaaagtgaaaagtacagacctctgccatcagtgaagaaagaacccagatctgataagagcttcaaacaggctcagcacctcctggcacacatagagcggcatcacgttgcc

SEQ ID NO: 978070 - DNA, 120 bp, Artificial Sequence
  ENSG00000257097_2 (sequence is synthesized)
ccaagaaaatcacatctctacacatcagaccctttccagtccattttgccccatccacaaaatgaaaatgccactttatttactaaatctaaaaattctgttgggaggcaaaggagagtt

SEQ ID NO: 978071 - DNA, 120 bp, Artificial Sequence
  ENSG00000257097_3 (sequence is synthesized)
ctgagattagcagcatctaatctcagttttctccactgctgaccagcatcagcaacacaggcagaaaaaaaattcttttgagccacagtaaaacggcttcaaccgaaagagtgaagaaac

SEQ ID NO: 978072 - DNA, 120 bp, Artificial Sequence
  ENSG00000257097_4 (sequence is synthesized)
agactctactgagctgctttctccacagaaacaagagtgcagtacagccaagccaggatggaattctagtcctgttttgggtatcaaatccaaatcctgtaagcaaaaggtcaaggattc

SEQ ID NO: 978073 - DNA, 120 bp, Artificial Sequence
  ENSG00000257097_5 (sequence is synthesized)
caggtttcaacgcggccctgcttcaagacccaaaggaaattcagcaccaggcgggtgaagtgacttacctgtgcacagctgcactcgcagacttcggagcccccacctaattctaaaatg

SEQ ID NO: 978074 - DNA, 120 bp, Artificial Sequence
  ENSG00000257097_6 (sequence is synthesized)
ctgtatgtccatgaacttaataacagaaggtcaggggagagacgttctgagagcaacggaaatctatcttaagataaagatgtttctgaggctgatttttcaagtcaaacttgagagaga

SEQ ID NO: 978075 - DNA, 120 bp, Artificial Sequence
  ENSG00000257097_7 (sequence is synthesized)
gtcccctgaagtcacggttacgtaagtatgctgtgtcacttgctgtccccacccccaacacaggagatgcagtgtaacctgagctcctcggcttgagccactgaaaacacttacacaacg

SEQ ID NO: 978076 - DNA, 120 bp, Artificial Sequence
  ENSG00000257097_8 (sequence is synthesized)
ctgggacctttccaaattgacttgtttccccttaagaaagggcaagctatttgattttcttccttccacttcattcacattcatatttctgtatatacagaagagactgaaaaagataaa

SEQ ID NO: 978077 - DNA, 120 bp, Artificial Sequence
  ENSG00000257097_9 (sequence is synthesized)
taagattgaagggcatttgcaaattttcttcaattcttgagtaaaacaaaaaagtcaactatccaatgtcacggaaaagtaaccaaaaaaaaaaaaattatgggcctgcttagccccaat

SEQ ID NO: 978078 - DNA, 120 bp, Artificial Sequence
  ENSG00000257097_10 (sequence is synthesized)
ttaaaaacatcacatctcctggctgaactgagcttaaggtccttggacgggcttcatttcccacgtactggctgtttctagagccaggccccatacgctactgccacgcgcagcatactg

SEQ ID NO: 978079 - DNA, 120 bp, Artificial Sequence
  ENSG00000257097_11 (sequence is synthesized)
ccacacagaagggctttgggggcacatgggaaatggctctccaagaacacaggagacacatcagcagtctcttctgactactcttcttgccctctcttccttctctggactactccagct

SEQ ID NO: 978080 - DNA, 120 bp, Artificial Sequence
  ENSG00000257097_12 (sequence is synthesized)
actgggcagcttcgattacggaatgatgactcacacgcattcctgtcttgtttgcatatcatgctatgactaagctccatgagatttgatttgtcttcgcatccaacgaatctaaaaaag

SEQ ID NO: 978081 - DNA, 120 bp, Artificial Sequence
  ENSG00000257097_13 (sequence is synthesized)
tttgatacacagtaagagttcaaaaaagttctcaagtgagtcaacagcaaaacaagaatccataaaattatgcaaaatgatgcgattttcaaactaaagcatcaagtaactgtatcttac

SEQ ID NO: 978082 - DNA, 120 bp, Artificial Sequence
  ENSG00000257096_0 (sequence is synthesized)
ggttaaaacacctttaatgatagagggaaagacactaatatctcccgtctgttcttgacattttactaggttaggaagctctggagcctacagcttgaggagaagccatcgttcaagtca

SEQ ID NO: 978083 - DNA, 120 bp, Artificial Sequence
  ENSG00000257096_1 (sequence is synthesized)
ggtcacaccagggaagctggagagggttccccttgagaaagctgcagagaatctatgttcctcaggtacaaagaatgaggagggaagaaaaattccttagggggccatccccttgtaagc

SEQ ID NO: 978084 - DNA, 120 bp, Artificial Sequence
  ENSG00000257096_2 (sequence is synthesized)
acagtaatttccaagctcagggactacagaaaagccactagggacataacatgttaagaacttagagaaaaagacaaaatcagggctcataactctgggaggtccttttgtgaagctgtt

SEQ ID NO: 978085 - DNA, 120 bp, Artificial Sequence
  ENSG00000257095_0 (sequence is synthesized)
aggcgatgggctataggatgaggacctgccagggccaagaagacacatttcagaaggaggctcttaaaggccaagccaagaagcaagagcacggatttacatctcattggctgagggtgc

SEQ ID NO: 978086 - DNA, 120 bp, Artificial Sequence
  ENSG00000257095_1 (sequence is synthesized)
tccaggaatttctcacacagaagcgtgagtggctgaaacgaagagaatggacatggagcccacccggaagagcacccttaacatcatcatatccctgaagcacgagtcggggtggtggga

SEQ ID NO: 978087 - DNA, 120 bp, Artificial Sequence
  ENSG00000257095_2 (sequence is synthesized)
ggaaaccctgcacacagctggcttgagcagtgggtattttcataaggcatatatgggcatcacagaacacttggagctttaatgaagacagctgccattctgtgagctgttctatgaagg

SEQ ID NO: 978088 - DNA, 120 bp, Artificial Sequence
  ENSG00000257095_3 (sequence is synthesized)
agcccacttggcaaggaactgggggaggtctcagattaacagccagcaagaaactgaatcctgctaacaaccacctgaatgaacatgaaagcagacccttccccaattgagtcttcagat

SEQ ID NO: 978089 - DNA, 120 bp, Artificial Sequence
  ENSG00000257095_4 (sequence is synthesized)
gagacccagtgctcacctgcacctaggttggagccctaagagaaaccttgaagcagaggaaccagcttaacctgatccatggaaactataaaataaaatgtgtgttgtttaaactgctaa

SEQ ID NO: 978090 - DNA, 120 bp, Artificial Sequence
  ENSG00000232978_0 (sequence is synthesized)
tcaaaaaaaaaaaaaaaagaaaagaaagttttcaattttgaaatttctactgctatcagctttttatactgaatattgtttatttttgccttctcttctttataaatcagtttatgtcat

SEQ ID NO: 978091 - DNA, 120 bp, Artificial Sequence
  ENSG00000232978_1 (sequence is synthesized)
aataaatgtcttttctctctagttgttttgtctccggtgttccatgatagcaccatgatataataagaggcgggataggccaggcatggtgcctcatacctgtataatccaggactttgg

SEQ ID NO: 978092 - DNA, 120 bp, Artificial Sequence
  ENSG00000232978_2 (sequence is synthesized)
gaggctgaggcaggcgtgagccaccgcacctggccttatctctgctgtttaacccattcactgaatttttaattttaaggaccatatttttcatttctaaacacttgattcttttcccaa

SEQ ID NO: 978093 - DNA, 120 bp, Artificial Sequence
  ENSG00000242767_0 (sequence is synthesized)
aagaggagagagagagagagagaaagaaaaacagaaagaaacagagagaaaggcacagacaaagccctcctaccagacagcagacagctctccttcccctatccagcaaaatgcaactcg

SEQ ID NO: 978094 - DNA, 120 bp, Artificial Sequence
  ENSG00000242767_1 (sequence is synthesized)
tctaatgcagcaacaggttcagtattgccagactaacagagtgaaaaaggagaagacgtatttggtttctaccagcaggaatcaaaaggaatataaaggaccatgaaggctcttttctaa

SEQ ID NO: 978095 - DNA, 120 bp, Artificial Sequence
  ENSG00000242767_2 (sequence is synthesized)
gcaacagagcaagactccatctcaaattaaaaaaaaaaaaggtgaagaagaagaagaagaatgtacaacatctcaaaacttttcccatatctgtacattttactagattcaaagcacaat

SEQ ID NO: 978096 - DNA, 120 bp, Artificial Sequence
  ENSG00000287665_0 (sequence is synthesized)
ggagcccagccagccagggggacacggcctcctgcccacaggcagaggcccggggccagatgtccgctttctctttcgctccgcaggagtgagaagcaaggacctcactgcctttgtgcg

SEQ ID NO: 978097 - DNA, 120 bp, Artificial Sequence
  ENSG00000287665_1 (sequence is synthesized)
gccgggcccctccggccagtctgcgtgaacggactctccgggcctcgcccatgctccgggcgtgtggctgtgttgggaggacgggagctctactgcttggcagtggacacaccaaggctg

SEQ ID NO: 978098 - DNA, 120 bp, Artificial Sequence
  ENSG00000287665_2 (sequence is synthesized)
ccgactggcccagtgggtggcgatgccacttacatgtgatttctcaatctccgtcaactgccgtggctgcccgggctgggctgccctgtaggtttcagttcttcagggcaacaggctggg

SEQ ID NO: 978099 - DNA, 120 bp, Artificial Sequence
  ENSG00000287665_3 (sequence is synthesized)
atccaggcaaggtgcctgcactcagaggggtagggagccaggggcacatgtgctgggcgtgggctggggcttctggctggcaggggtgtgggtttgggcctggtgggattccccatatta

SEQ ID NO: 978100 - DNA, 120 bp, Artificial Sequence
  ENSG00000287665_4 (sequence is synthesized)
ggaaggtgagctgagctcggctgcagtggctgaagcaaggaagtgatttgtcaagccatttagacactgtccctgttttctttcaacaaacagaactttttttttttttaagcagcgaag

SEQ ID NO: 978101 - DNA, 120 bp, Artificial Sequence
  ENSG00000287665_5 (sequence is synthesized)
accttttgctctctgttggggtgtgattggggtttgcatttgggggctctcttgagctttgccgctgtcttcaaggatggtatctaaagggaaagtcttaaaataaataactttgaattt

SEQ ID NO: 978102 - DNA, 120 bp, Artificial Sequence
  ENSG00000287665_6 (sequence is synthesized)
ggataggaatgtctatgcagtgagggacaggaggcttccgtgtgtttcactagaacgttcttgtttttggcctacgaatgcttttacttaggaagcacgagacctgtgctgcagaccgtc

SEQ ID NO: 978103 - DNA, 120 bp, Artificial Sequence
  ENSG00000287665_7 (sequence is synthesized)
tgttggagctggccgcggcaggacggcgatcaccttcctggcaggcccctcctggattctgccctctgcttctgaaagcgtttcctccatcagctttagcaaaactgggcctggcagatc

SEQ ID NO: 978104 - DNA, 67 bp, Artificial Sequence
  ENSG00000287665_8 (sequence is synthesized)
tgcagtgagccaagattgtgacacgtgcctgggccttggaggtgcctgagtccagaagacagacagc

SEQ ID NO: 978105 - DNA, 120 bp, Artificial Sequence
  ENSG00000287665_9 (sequence is synthesized)
gcggcagctgctttgccctcaagacttctcttttcgcccactctattcatagggggaaatgacaacacaggcgctttccctcaaactctgtgtattcatacatcaccagagtgttcagag

SEQ ID NO: 978106 - DNA, 120 bp, Artificial Sequence
  ENSG00000287665_10 (sequence is synthesized)
aagtgggatattttggcttcagtgctgagggcggcctgctgtccgtccctgcggcagactgggccctgtcccaccttcccgtcactcctcgatgtcacatcagagtgctctctcctgggt

SEQ ID NO: 978107 - DNA, 120 bp, Artificial Sequence
  ENSG00000287665_11 (sequence is synthesized)
gggaacccgcgcacggaggaaacactttaccagagtaaacgagattataacttgtttgccagagaacctctcctgtggccatgcctgaacctctcctgggactgtccgtggtcttcacat

SEQ ID NO: 978108 - DNA, 120 bp, Artificial Sequence
  ENSG00000287665_12 (sequence is synthesized)
tggtgcttggacacccgtccttcgggaggggaggaaaagcggccggtaaaatggagacagtcggtggcgtgtgtttgccgattggactggcattggtatagacagataccaatcactgca

SEQ ID NO: 978109 - DNA, 120 bp, Artificial Sequence
  ENSG00000287665_13 (sequence is synthesized)
cagacatttccaggggcccttccccagccatgtttagtggcactgacctcaggcagctgggcccccgggacagcaaccaggggactgccctggccctggatggcagccgggaccggctca

SEQ ID NO: 978110 - DNA, 120 bp, Artificial Sequence
  ENSG00000287665_14 (sequence is synthesized)
caagcttctgtttggagcagttctgttggcagccccccgcctccagtggagatgtgacacgactctttcttgcctgccaaacgttctctgattctttggatcatcgatcctaacacagca

SEQ ID NO: 978111 - DNA, 120 bp, Artificial Sequence
  ENSG00000287665_15 (sequence is synthesized)
aaggcggtattgttgctgtcctttcaaggttaatccaggatcagaaaagtctaatcatttctctgtggtttttggaatttccaaagagcacccagattttaaccctcagtcctcggggtt

SEQ ID NO: 978112 - DNA, 120 bp, Artificial Sequence
  ENSG00000287665_16 (sequence is synthesized)
gtccggctgcggctgtgctgctgttgagcattaagctcattccacttcacatgtaaacttgtttctatgcattcacctcctgggagactccacattcctgagagaactgcatggttatga

SEQ ID NO: 978113 - DNA, 120 bp, Artificial Sequence
  ENSG00000287665_17 (sequence is synthesized)
actcttactcgtgtgcactaaagtgcacgtgctgtgtgtgtactgaccctctgccctgtgggagccacgtgctgtggggagaacagaccagcagcagatgggactcctcctccaggaacc

SEQ ID NO: 978114 - DNA, 120 bp, Artificial Sequence
  ENSG00000287665_18 (sequence is synthesized)
agaccagcagcagatgggactcctcctccaggaacctgctaccagctaggcgtggtggtgcaagcctatacttctggcactttgggaggctgtggcaggaggatcacttgaggccaggaa

SEQ ID NO: 978115 - DNA, 90 bp, Artificial Sequence
  ENSG00000287664_0 (sequence is synthesized)
tgcgtgcacacgtggcctaggggatgccaaattccagggtccagaaagagcttgggataaaatgaaacttcaaggggacggctttgacct

SEQ ID NO: 978116 - DNA, 120 bp, Artificial Sequence
  ENSG00000287667_0 (sequence is synthesized)
ggaatcatctagcacgggaaccttttgggattggcgtccccctccctcactcgtggttccctgaagattcagccaggccttcctatttcctgttaataatcttacagtgacctctaaatg

SEQ ID NO: 978117 - DNA, 120 bp, Artificial Sequence
  ENSG00000287667_1 (sequence is synthesized)
ttcaagcgaaagaaagagtcacacatctctcactttaaatcaaaagcaagaaataattaagcttactgaggacggcatgtcaaaagctgacattggcttaacgctaggtcacttgcacca

SEQ ID NO: 978118 - DNA, 120 bp, Artificial Sequence
  ENSG00000287667_2 (sequence is synthesized)
aacagtcagccaagttgtgaatgcaaaggaaaagttcttgacagaaatgaaagtgctattccagtgaacacatgaatgataaaacagtctggataaaagatcaaaccagccacaacattc

SEQ ID NO: 978119 - DNA, 120 bp, Artificial Sequence
  ENSG00000287667_3 (sequence is synthesized)
ccttaagccaaagcctaatccagagaaaggctgtaactctctttgattctgtgaaggctgagagagagctgaggaagctgcagaagaaaaatttgaagttagcagaggttggatcatgag

SEQ ID NO: 978120 - DNA, 120 bp, Artificial Sequence
  ENSG00000287667_4 (sequence is synthesized)
gtttaaggaaagaagtgatctccataacgtaaaagtgcaggtaaagctgcaagtgctgatggtgaagctgcagcaagttatccagaagatctagttaagatacttgattaaggtggccac

SEQ ID NO: 978121 - DNA, 120 bp, Artificial Sequence
  ENSG00000287667_5 (sequence is synthesized)
actaaacaacatatatttagggttgatgaaacagacttctactggaggaagatgccatcaggactttcatagctggagagaagtcaatgactgacttcaaagacatgaacttcaaaggac

SEQ ID NO: 978122 - DNA, 120 bp, Artificial Sequence
  ENSG00000287667_6 (sequence is synthesized)
atgtaactcttgttacaggctaatgtggctggtgactttaagttgaagccaatgctcatttaaccattccaaaaatccttaagaattatgctgactctactctgcttgcgctctagatat

SEQ ID NO: 978123 - DNA, 120 bp, Artificial Sequence
  ENSG00000287667_7 (sequence is synthesized)
cttttgagaactattgctcagaaaaaacccaagattatttttgtaatatttgcgctctttgacaatgcaatggtcactcaaaagctctggtggagacatacaaaaagattaatgttgttt

SEQ ID NO: 978124 - DNA, 120 bp, Artificial Sequence
  ENSG00000287667_8 (sequence is synthesized)
tactgctaacacaacatccattatgcaccctgatgaaggagtaatttcacctttcaagtcttattatttaagaaatctatcttgttaggctgtagctaccatagacagtgattcttctga

SEQ ID NO: 978125 - DNA, 120 bp, Artificial Sequence
  ENSG00000287667_9 (sequence is synthesized)
tagattagggaaaattaaatttaacaatttctgggaaggattcaccattccttttaatgccattaaaagcacttatgattcttggaaggaggtcagaatataaacactaatgaaaatttg

SEQ ID NO: 978126 - DNA, 120 bp, Artificial Sequence
  ENSG00000287667_10 (sequence is synthesized)
tcagaatataaacactaatgaaaatttgaaagaagttgattccaatcttcatgaatgactttgaggggtttaagacttcagtgcaggacgtcactgcagatgtggtagaaatagcaagag

SEQ ID NO: 978127 - DNA, 120 bp, Artificial Sequence
  ENSG00000287667_11 (sequence is synthesized)
tctgactgaattgctgcaatctcatgataaatcttgaacgaatgagaacttgcttcttacacatgaacaaagaaagtggtttcttgagatggaagttactcctggtgaagatgctgtgaa

SEQ ID NO: 978128 - DNA, 120 bp, Artificial Sequence
  ENSG00000287667_12 (sequence is synthesized)
cattgttgaaatgacaacaaggaatttagaatattgcacaagtttagttggtaaagcaggagcggagtttgcgaggattgactcaattttgagagaatctttactctgggtaaaaagcta

SEQ ID NO: 978129 - DNA, 120 bp, Artificial Sequence
  ENSG00000287667_13 (sequence is synthesized)
taaataccaactcatgctacagagaaatctttcatgaaaagaagagctaatcagtgaggcaaacttcatcgctgttttatttttgaaaattgccacagtcaccccaatctttagcaacta

SEQ ID NO: 978130 - DNA, 72 bp, Artificial Sequence
  ENSG00000287667_14 (sequence is synthesized)
tcacactgatcagccgactcactgaggactcagatgatcattggcatttttcagcaataaaatgtttttaaa

SEQ ID NO: 978131 - DNA, 120 bp, Artificial Sequence
  ENSG00000287666_0 (sequence is synthesized)
gttctgggactggccttttgcctcctgcctcccacagctcaggtggagagaggagggccctgcccttaccgactggagagcatcagctcagccttcagctccaccagagaggctgcagtg

SEQ ID NO: 978132 - DNA, 120 bp, Artificial Sequence
  ENSG00000287666_1 (sequence is synthesized)
tgtgaagacagctcattctgcgggaggaggaagagcagagaaaccaccaccctatgggtcgttctcagatccctcgtgtgctggctgtctcccacccaggctcagtttgcactgctaatc

SEQ ID NO: 978133 - DNA, 120 bp, Artificial Sequence
  ENSG00000287666_2 (sequence is synthesized)
tgttacgtctttcttgggcagctgttgtggagcctggtccatcctgagcactccagtgttccatttcaaggatctcttcctggctcccctcccaccagagaatgtggccttgggatcaag

SEQ ID NO: 978134 - DNA, 120 bp, Artificial Sequence
  ENSG00000287666_3 (sequence is synthesized)
gcgtggagagctgccagctactgccacctgccacaaagcctcatcacccttgcgtatctctctcccctctccgtcctcggcatggggtcacattgtgggtcattatttcctttcaccaag

SEQ ID NO: 978135 - DNA, 120 bp, Artificial Sequence
  ENSG00000287666_4 (sequence is synthesized)
gtatgagcagagggagagagggctggaaaaagagactctccctttgctaactgatgagggagaagtatggggtccaagtgggcctgccccttgcctaatttttgcccaattttttggcct

SEQ ID NO: 978136 - DNA, 120 bp, Artificial Sequence
  ENSG00000287666_5 (sequence is synthesized)
ctggagtccctggtagacttcttaacttcttgcacacaaggttaccatgtgtctaattgctcagctccagttagagtggtggagggaaactggtatcaatgaatgaatgaatgaatggat

SEQ ID NO: 978137 - DNA, 120 bp, Artificial Sequence
  ENSG00000287666_6 (sequence is synthesized)
ggatggtttaatgacagcttggagaaccgactggggtttgagcaagaaacaggaagagaaagccaacatcttttagctcaccaaatactttcatgccccttgggaggaagaaaaatggat

SEQ ID NO: 978138 - DNA, 120 bp, Artificial Sequence
  ENSG00000287666_7 (sequence is synthesized)
atgggaaatgcagagcatggaagagcttaaattgagcataaaggacataaaactagataagtaagatcagaaataaaagatgagtcatcatcgaatccaaacctttacattttcagcaga

SEQ ID NO: 978139 - DNA, 120 bp, Artificial Sequence
  ENSG00000287666_8 (sequence is synthesized)
gggtgccaaaacctcaaggggatagtgacttccttaaaattacagaaccagagtgaagactggggtcttttgactctttttttttttttttttctgtccctaacaaaatgttgctctttt

SEQ ID NO: 978140 - DNA, 120 bp, Artificial Sequence
  ENSG00000287666_9 (sequence is synthesized)
cttctccatacttttatattttcaaactcatttattccagaaaattacctgccttctaacctggagttcctcttttttgatctaaagaagttatccaaacttaccttgagcttactgtcc

SEQ ID NO: 978141 - DNA, 120 bp, Artificial Sequence
  ENSG00000287666_10 (sequence is synthesized)
ttgaagccattttggcctttgttttgtggcctcaaggctgccctcacttagaaaggatgagtgacggtagcagaagccagccaagcagggccagtttctcccaaggctggccccatgaaa

SEQ ID NO: 978142 - DNA, 120 bp, Artificial Sequence
  ENSG00000287666_11 (sequence is synthesized)
aacagaggttttcagaccttgcctgatgatccagggactggaactgaacacacgttgtacctctttatagcaacttgggtgtcccaaacaggacccatcacttccaagtcccaggctagg

SEQ ID NO: 978143 - DNA, 120 bp, Artificial Sequence
  ENSG00000287666_12 (sequence is synthesized)
attttctaaccaagtatgtagttagaggaaaatttaatccacatgtatctgactcactgatctttaaatcatcctagagtttgattctgggaatggtttgatgtgtactctgcttttttt

SEQ ID NO: 978144 - DNA, 120 bp, Artificial Sequence
  ENSG00000287666_13 (sequence is synthesized)
caacttttggattggtgcactggccaagacataataaatagcaaccctgagagagagaaggaagcttcaagtagaggcatgacctgcaggctcttcccttcgtcccagctggagacaggc

SEQ ID NO: 978145 - DNA, 120 bp, Artificial Sequence
  ENSG00000287666_14 (sequence is synthesized)
gcccagcaggagtagagagtaggccagaagcccagaaatgtgccttaggttaacctcaccctcagcctcctcttctgcttgtatttctgggatgcagagcccgactagggaaaaatcact

SEQ ID NO: 978146 - DNA, 120 bp, Artificial Sequence
  ENSG00000287666_15 (sequence is synthesized)
cagcctaaaagatggtaacaccacagatttatggcatctgatctttgttgcaccctccagggtacaaactaatcccagcttgtgattcctactgtcatctaaggtcattccaggcctttt

SEQ ID NO: 978147 - DNA, 120 bp, Artificial Sequence
  ENSG00000287666_16 (sequence is synthesized)
ccactcttctggagatctcgagcactttttttcaacaatttctcattttgaaaagaaaaaggagtccatcaggaaagaatttcctccattgcctgcgacgctctacaaacctccatgcct

SEQ ID NO: 978148 - DNA, 120 bp, Artificial Sequence
  ENSG00000287666_17 (sequence is synthesized)
cagccaccctcgttttccatgaggtctccctgtcagggctggttcctcagatctccccccagtaatcctccttcatgaaaacctcagagtctcagagtctgtttccgctgatgtgagcta

SEQ ID NO: 978149 - DNA, 120 bp, Artificial Sequence
  ENSG00000287666_18 (sequence is synthesized)
agaatgtttcaggaagaggggtatgtcatcgggatcccatttcttcctgtgtcctccgggaccttgctctaaggtcctctctttcgtcctgagacttttctgaatctttaagctccacct

SEQ ID NO: 978150 - DNA, 120 bp, Artificial Sequence
  ENSG00000287666_19 (sequence is synthesized)
ctccttagccatacatactcattcaagtatttcccgtactaaaaaacaaaatgaaaccttccttccacctgaagtctctatgacccctcatgtcttctcttttagtcaagcctctcgtaa

SEQ ID NO: 978151 - DNA, 120 bp, Artificial Sequence
  ENSG00000287666_20 (sequence is synthesized)
gtgtcccctgttttttctcccttcatgtcacattgactccacaacgcattgtagcctggcatgcactgtcatcacagaaatgccctctgtgggtcaggcacggtggctcacgcctgtcat

SEQ ID NO: 978152 - DNA, 120 bp, Artificial Sequence
  ENSG00000287661_0 (sequence is synthesized)
gcccaagactgctggtatttatagcttgtctgtctaactcagacccacttctcactcaagagggaaattaatctctctctccaaatcccacactatcacttgcctcatggcttcctcatt

SEQ ID NO: 978153 - DNA, 120 bp, Artificial Sequence
  ENSG00000287661_1 (sequence is synthesized)
cccctgctcctccaatccaggcaccagcaatttcccagcagtgcctccctttccccactgacagttgaccgtggctctgaaaattggctcttggaatcagctgtgcctgcccagctgggc

SEQ ID NO: 978154 - DNA, 120 bp, Artificial Sequence
  ENSG00000287661_2 (sequence is synthesized)
cccagctcagcagtgcctgggactttgatgcagttcaacctgagagggggctctgcttttctgagagatattcagctcctgcttgtctcacatatatttttagaagcttcaactggatgc

SEQ ID NO: 978155 - DNA, 120 bp, Artificial Sequence
  ENSG00000287661_3 (sequence is synthesized)
acagttaaaaatgagactgaagaccaaagtaaatatttgcatagcaggatcttggagtggcggagaagagagaaggaagagaggagttctgatgggcctggcttcaggcctcagctctgc

SEQ ID NO: 978156 - DNA, 120 bp, Artificial Sequence
  ENSG00000287661_4 (sequence is synthesized)
ttctgagtggctgcacttgcttggagcaagtctcctttaggtatcagttttccaatctgtaaatttggaggagggactggcttgccgatgttttgaaacatttcagctccgatgttctgt

SEQ ID NO: 978157 - DNA, 120 bp, Artificial Sequence
  ENSG00000287661_5 (sequence is synthesized)
gagcctctatatcagaagggccattaaggggttcctgaaccctctgatactactgacaaactgtgtaaattttctgggaagagtattcataattttctacaattttcaaaaaaaaaatca

SEQ ID NO: 978158 - DNA, 120 bp, Artificial Sequence
  ENSG00000287661_6 (sequence is synthesized)
gcatcttctaaaatgttaagaatctctgctctaggtctgtggatagagataattgagtttatcaccaacttcctggtaatgttccttcttctcattttctaacctgttcccttgttatag

SEQ ID NO: 978159 - DNA, 120 bp, Artificial Sequence
  ENSG00000287661_7 (sequence is synthesized)
cttgaaatggaatgaacaatatgaagaatctatcctgagtgcatctgcattaacttaactagaaaacctcaaagagtcctgtggcccaagtctgctgcagcggtcaaagaacagtgcagc

SEQ ID NO: 978160 - DNA, 120 bp, Artificial Sequence
  ENSG00000287661_8 (sequence is synthesized)
aaagaagatccctaggaggccaggattatctcaggatttcatgaagaggagaaatggaggtcatttcctagagattaatggataatttgattgtgagaagaaaattgtttaaggagcagg

SEQ ID NO: 978161 - DNA, 120 bp, Artificial Sequence
  ENSG00000287661_9 (sequence is synthesized)
ggtgggtatggaggcaaatgtcacacactccagaaggtaaagtgacctggctcttcccctctcactccttggaaagaaggaaagctcatcagagccaggaccctggaaaagtgatgtgat

SEQ ID NO: 978162 - DNA, 120 bp, Artificial Sequence
  ENSG00000287661_10 (sequence is synthesized)
gaagagaaggaggccctgaataccaccatctgaaggcatttccaaggaagccagggatgtgactctgtctcggttgcagagatcaaaaggttttgtgaaggaagcaatggctctctagcc

SEQ ID NO: 978163 - DNA, 120 bp, Artificial Sequence
  ENSG00000287661_11 (sequence is synthesized)
cccttctgggtggattctggggtagaaggatccggttcctttgataactggttagttatagctatagggtgaagccaattgagtaacattggtctgggcttccagagacacaaggtcttc

SEQ ID NO: 978164 - DNA, 120 bp, Artificial Sequence
  ENSG00000287661_12 (sequence is synthesized)
ttgaaccataagctctcagaacaatgccccacctaggcagagcagagaaccctgaaccttttgcctggagagaacaaagaagcgcacagctcaggagccaccagacctgggactacccat

SEQ ID NO: 978165 - DNA, 120 bp, Artificial Sequence
  ENSG00000287661_13 (sequence is synthesized)
tggacccctaatctccactgttcttggcctgtctctctttcccattagattgtgagctctttgagaacagagactacctcttctccatccttgtttccctagcctagtacaccatcaaat

SEQ ID NO: 978166 - DNA, 120 bp, Artificial Sequence
  ENSG00000287661_14 (sequence is synthesized)
aatgctgtggaaagaaaaagtaaaggaataaataaataacccttagataagtgggtcatccaccaatcctcaattcctgattagtaaaatgagaataacaatagctactaacaagagtat

SEQ ID NO: 978167 - DNA, 120 bp, Artificial Sequence
  ENSG00000287660_0 (sequence is synthesized)
ccctcaccatcaacctccgcaagtgcctcttatgatgaggcggctgcgcggccagcagcagcaattccagccagctgccaccaccgatgccctctttcttctgtcttcagcttgtacctg

SEQ ID NO: 978168 - DNA, 120 bp, Artificial Sequence
  ENSG00000287660_1 (sequence is synthesized)
cacacgcatgacaggggtctacatgggaccccactaccagccagccactactgagctatcacgtggccttggccaagccgctgacctcctttagggctcagtggccccatctgtcaaatg

SEQ ID NO: 978169 - DNA, 120 bp, Artificial Sequence
  ENSG00000287660_2 (sequence is synthesized)
gacatattaatagttctcatcttacagagtcgttatgaggatgacatgaaggaatccatgtaagatacttagctcagtacctggaatttgcatgtgttcaataaatgaccattgcactgc

SEQ ID NO: 978170 - DNA, 120 bp, Artificial Sequence
  ENSG00000287663_0 (sequence is synthesized)
ggggctgcgggacgaccttgggcggcagctagcagcgagtcctagctgatgtggccctgagtcagcttttagaggtcccaagactcgttcacaggccgctaaacgcaaactaaggcacct

SEQ ID NO: 978171 - DNA, 120 bp, Artificial Sequence
  ENSG00000287663_1 (sequence is synthesized)
cccagcacaccaggatcgacgtgtcctccttcagtccggactcggcggaatctgcacctgggagcccctccccaaatgacctgctagccgcagtccaggaagcaggcacccctcactccc

SEQ ID NO: 978172 - DNA, 120 bp, Artificial Sequence
  ENSG00000287663_2 (sequence is synthesized)
cttctcaaatgggggctctattcctgtctctagctctggagttgttgtgaggataaagggagaacctggcacacagtaggcactcaacaaaccgttcctctgtctgtcttgagagactgc

SEQ ID NO: 978173 - DNA, 120 bp, Artificial Sequence
  ENSG00000287663_3 (sequence is synthesized)
ggtgggccctgcagggcagctgcctgcctctgcctggttcgaggaaggcccagccaggccggccccagcttccttcctgctcttctgtcccactccgacccactccggagagccacgctc

SEQ ID NO: 978174 - DNA, 120 bp, Artificial Sequence
  ENSG00000287663_4 (sequence is synthesized)
tgagccgcacatgactctctccttctccacagaacaatctgtgttctgctcccgcccccgagagagttctgagctttccaaatatggatgctttttgcattcccaaagcatcacgaacat

SEQ ID NO: 978175 - DNA, 120 bp, Artificial Sequence
  ENSG00000287663_5 (sequence is synthesized)
ggatgggtggtgacggaacaagcaccgtactaggagttttaaaatataaaacacgagtctggcctaggtgatgtcttacaaccttactagctttgtagcagtctaggccccaaagagatc

SEQ ID NO: 978176 - DNA, 120 bp, Artificial Sequence
  ENSG00000287663_6 (sequence is synthesized)
ctagaagtaagcacccaaaccctaagaataaaaactacagcggccaccaccacacattgcagaggcgaaaactgcattaaggaggcccagagagtcacctgctgtcagaggaaatgagca

SEQ ID NO: 978177 - DNA, 120 bp, Artificial Sequence
  ENSG00000287663_7 (sequence is synthesized)
gtgggaggcagtcccttgagagccaaacagcttgaaagttgacaaattgagatgaaccagctcgtcggtgagtgtaggcagaagaggcattagacacaagagtatttgtttttatatcag

SEQ ID NO: 978178 - DNA, 120 bp, Artificial Sequence
  ENSG00000287663_8 (sequence is synthesized)
gcccaaaccaaaacctattctgaaatggagtggatctcagaatatactgagaagtttgcccttttgcttaggcaccttgtgtgttattcagctagagtttatcttcaatagtgtgcccct

SEQ ID NO: 978179 - DNA, 120 bp, Artificial Sequence
  ENSG00000287663_9 (sequence is synthesized)
ggatgccagggcaaaatgttaaagaatggccccgtcacaggcacccctgtgcagcaggcactgttgtccctggcgcacatgcagggagataaagcaggcagcttagatatgacacagcct

SEQ ID NO: 978180 - DNA, 120 bp, Artificial Sequence
  ENSG00000287663_10 (sequence is synthesized)
caacacccaacccagaataagcactcacatatttgctgatttaatgaattaattaattatacagtctagtttgagagaggcaaatggcagatgtgaaataattaaaatctgaatgccaaa

SEQ ID NO: 978181 - DNA, 120 bp, Artificial Sequence
  ENSG00000287662_0 (sequence is synthesized)
aggattgtgaggcctccctacccatgtggaactgcccataggtggaagagacttggcttttctcagatgagatgttggactgaggacttttgcattaatgctgaattaagttaagacttt

SEQ ID NO: 978182 - DNA, 120 bp, Artificial Sequence
  ENSG00000287662_1 (sequence is synthesized)
tttgaaatgtgagggcatgagatttggaggggccggggtgaaatgatatggttttcctgcgtccccacccaaatcacatcttgaattgtaactcccacaattcctacatgttgtgggaag

SEQ ID NO: 978183 - DNA, 82 bp, Artificial Sequence
  ENSG00000287662_2 (sequence is synthesized)
tttcctgcgtccccacccaaatcacatcttgaattgtaactcccacaattcctacatgttgtgggaagaatctagtgggaga

SEQ ID NO: 978184 - DNA, 75 bp, Artificial Sequence
  ENSG00000287662_3 (sequence is synthesized)
taaaaacaggaatttctctgcacaagctctctgcctgctgccatccatgtaagatgtgatttgctcctacttgct

SEQ ID NO: 978185 - DNA, 120 bp, Artificial Sequence
  ENSG00000287662_4 (sequence is synthesized)
tcagcagcatgaaaatggactaataaaccacatttctgtataactttgttactgccacaacatatggatgggtctaacattttcctgggtcatattctgatatttgatagggttttaaac

SEQ ID NO: 978186 - DNA, 120 bp, Artificial Sequence
  ENSG00000287662_5 (sequence is synthesized)
agggttttaaaccagaaaggttgtaggtttcactcacccacactaactaatgaaagacagggacccagccttgttttctctgcaatctggagccctggcttcattagatatgctgcttgc

SEQ ID NO: 978187 - DNA, 120 bp, Artificial Sequence
  ENSG00000287662_6 (sequence is synthesized)
atgatactggcataaaagaacgcagacatttaaaaaaattcgaataattgcagcaggatattcaagcttgaagagaaagtttataccataggaaaactaaaataaaatagaaaataaatg

SEQ ID NO: 978188 - DNA, 120 bp, Artificial Sequence
  ENSG00000287669_0 (sequence is synthesized)
gcttgccaccatcttggaagtggcctgccaccatcttgggagctcgggagcaaggaccccctcgtaacagtgaaattctgaagataaatgacatacaagtgccaaatttacagttccaaa

SEQ ID NO: 978189 - DNA, 120 bp, Artificial Sequence
  ENSG00000287669_1 (sequence is synthesized)
tgacatacaagtgccaaatttacagttccaaaatgaagagttctgcattcaaaaaaaggatgagaaaggatgttatttgagctagaccttcaagcacaagaggaattccgataagtacga

SEQ ID NO: 978190 - DNA, 120 bp, Artificial Sequence
  ENSG00000287669_2 (sequence is synthesized)
ggcactggaaaattattatagtcaaggataatggcaaaagcagagaataaaggcaggaaggggcatgtagtgatcagaagccaaaacaaaaatcagtgggcagatacattctttagaaca

SEQ ID NO: 978191 - DNA, 120 bp, Artificial Sequence
  ENSG00000287669_3 (sequence is synthesized)
actcattattatcgtcattatatacacaagaaaacagagttcatcagataggttcagcagattgttcaaggtcacatagcaaaagatggagactcttggattttatcccagccagaccaa

SEQ ID NO: 978192 - DNA, 120 bp, Artificial Sequence
  ENSG00000287669_4 (sequence is synthesized)
atgcaagggaaccataaataccacacaaagaagaaaaaaaaaatgaagagagaatgaatgaaagaaaaatgtttggcaatgggaacctacaattatgactcaaatgcccctaacttcaat

SEQ ID NO: 978193 - DNA, 120 bp, Artificial Sequence
  ENSG00000287669_5 (sequence is synthesized)
aaaagggaaatgaactatgaaattattgaaggaagcagtatatgaaaatgaaggcatagatactccattcaaatctcttaatatataaatttaaatattcactccattttaagtgaatga

SEQ ID NO: 978194 - DNA, 120 bp, Artificial Sequence
  ENSG00000287669_6 (sequence is synthesized)
ttctgtcaaaagaattaattttctgagcaatgaggatattcatttaccatgattccaccatctgcaatttatgaaccaaattatactctttcagaaaaaaagaagttcatacaatgcatt

SEQ ID NO: 978195 - DNA, 120 bp, Artificial Sequence
  ENSG00000287669_7 (sequence is synthesized)
taaactacatcaagaccaaatcaaaaatgttttcctaaaattgaagaaatcaccaagtaaaagttaatcacctgcacctttagtagacagtgaccattacagaataatatataacaaacg

SEQ ID NO: 978196 - DNA, 120 bp, Artificial Sequence
  ENSG00000287668_0 (sequence is synthesized)
gacccctgtggggaggggcccctctccagcctccagctgagggcaggcaatgacttccaccaggaatacacgtcattggcaggtccatccccttcccgctgtccagccagcctggcgtct

SEQ ID NO: 978197 - DNA, 120 bp, Artificial Sequence
  ENSG00000287668_1 (sequence is synthesized)
gactaatcagagcccacaagcccaccatatctcagccttctagtccatggaacatcatttatccaggtgtgatgttgggctatgtcgtgtctacgagctatgcgttggagttcttcaaaa

SEQ ID NO: 978198 - DNA, 120 bp, Artificial Sequence
  ENSG00000287668_2 (sequence is synthesized)
agaaaaaggaaaaggaacaatgacttgaaaagccttttaaatctgggactgtttggagaatccgttgcaatgtaacagatgaccccaaacctcagcggctgaaaacaacaatggctttat

SEQ ID NO: 978199 - DNA, 120 bp, Artificial Sequence
  ENSG00000287668_3 (sequence is synthesized)
ttgcttaagattcggtgggtcaggaattcaggacttagccaagtggttctttggctccatgtggtgccagccagagtcattcactcagctgcattcagaccatgactcgctgggctggtc

SEQ ID NO: 978200 - DNA, 120 bp, Artificial Sequence
  ENSG00000287668_4 (sequence is synthesized)
tggaaggccacagaggctttgctcacatgtctggtgcctgattgttcctccatgagtcctctttctctctctctatttggttagcttgggcttcctcatagcatggcagtcccagatcac

SEQ ID NO: 978201 - DNA, 120 bp, Artificial Sequence
  ENSG00000287668_5 (sequence is synthesized)
tcagacttcatatatggcagctggcttctcaaaaggagcattccagcatgtaaaagcagaagctgcagaacctaaggcttagcctcacgttgcatcacttctgtcccatgttattaagac

SEQ ID NO: 978202 - DNA, 120 bp, Artificial Sequence
  ENSG00000287668_6 (sequence is synthesized)
accatagggacaaatcccttaccagatcccaccaaaaaacttggataaatatatactccataggatcaggcctcactcagtgccactaattggaggattataattgtccacaaaaaggct

SEQ ID NO: 978203 - DNA, 120 bp, Artificial Sequence
  ENSG00000287668_7 (sequence is synthesized)
aagcataatgacggactaagataaaggatgagtttgctgcggaaagtaatactaaggacaaaattgagggagagtgtcagcccaacttgtgaaatatggctaatacctgtgctagttata

SEQ ID NO: 978204 - DNA, 120 bp, Artificial Sequence
  ENSG00000287668_8 (sequence is synthesized)
cttcttttggttacaaaaacataatcttagagaccctttggattgcttaaacaaataaacaaacaaaatattggaaggactaccaggttgtgggcgagtctcacggagcatggaacaact

SEQ ID NO: 978205 - DNA, 120 bp, Artificial Sequence
  ENSG00000287668_9 (sequence is synthesized)
ggatcacagagaaaccagctctggggactcagccgcagggggctacgggttgtcttttgaggctctgctgcaaccgcaactcagcattcaagactcttgctcactgttttcctcacttcc

SEQ ID NO: 978206 - DNA, 120 bp, Artificial Sequence
  ENSG00000287668_10 (sequence is synthesized)
ttcctcacttccaaatctcactttccaggacagggactcagtggcccatcattcaggtgtgctgctagctccagcctgggggactgatatggtctggctgtgtccctacccaaatctcat

SEQ ID NO: 978207 - DNA, 120 bp, Artificial Sequence
  ENSG00000287668_11 (sequence is synthesized)
tgcccataatccacacgtgtcatgggagggacccggtgggaggtaactgaatcatgggggtgggtttttcctgtgctgttctcgtgatagtgagtaagtctcagggagatctgatggttt

SEQ ID NO: 978208 - DNA, 120 bp, Artificial Sequence
  ENSG00000287668_12 (sequence is synthesized)
tataaagagcacttcctctgcacatgctctcttgtctgctgtcgtgtaagacgtgactttgctcttccttcaccttctgccatgatggtgaggcctccccagccatgtgaaagtgtgagt

SEQ ID NO: 978209 - DNA, 120 bp, Artificial Sequence
  ENSG00000254670_0 (sequence is synthesized)
ctcgctcgcattgcaggcatcctgagtctcggcccttttcgccaaatcgctgctctgccgcgcgcctacgcaaggaaagattcaagggtccctccacttcagggagtggagcccgcgcct

SEQ ID NO: 978210 - DNA, 120 bp, Artificial Sequence
  ENSG00000254670_1 (sequence is synthesized)
cggcacggatcagctgtgcgtctcctttggcctactggctcctctgcttgtgtctatagctagctggacgcatcgtgactttatcttctcatctttcctggcgcccccagacgcatttcc

SEQ ID NO: 978211 - DNA, 120 bp, Artificial Sequence
  ENSG00000254670_2 (sequence is synthesized)
ctccaatggagacgctgtaatcgcattccacgaccagctagcgctataagcgctgcctctaaagcggaaggcctcccagtccttctcgacaggaagcaatatttgcatatctaaggagaa

SEQ ID NO: 978212 - DNA, 120 bp, Artificial Sequence
  ENSG00000254670_3 (sequence is synthesized)
caagattcggcaatgtgctccgggagcaagtgcaggcatggaacggtatgggctggagggggacagaccttcagaggcggctgcccgttccctgtagtgtcacataagatttttagaaga

SEQ ID NO: 978213 - DNA, 120 bp, Artificial Sequence
  ENSG00000254670_4 (sequence is synthesized)
taggagttttcacagtggcggcagagccctctgctaaatcctcatattagatgtcaaaggtggcatgtcatttgacccaatggcttttttagtcatttatcttcctaacacctatgagag

SEQ ID NO: 978214 - DNA, 120 bp, Artificial Sequence
  ENSG00000254676_0 (sequence is synthesized)
ctattttttttttttttcttggagttaataactgctctgtttgttcacttacttggtcttctatatatacctgtttcttcccaaatagggagcccagaatttaaaaaactaattatttgt

SEQ ID NO: 978215 - DNA, 85 bp, Artificial Sequence
  ENSG00000254676_1 (sequence is synthesized)
tcccaatggtattctaagttttctctttagttatccatactattattatttcttctgtccttttttcactgttacaccagagtgg

SEQ ID NO: 978216 - DNA, 120 bp, Artificial Sequence
  ENSG00000254676_2 (sequence is synthesized)
aaaaaaaaaaaaagttcaaatggtcatatttgtagtctgtttttaaaatcaagtaatggaataaataggtttttagagataatgggttggaggcaatttggaaggtttatttaggttgtc

SEQ ID NO: 978217 - DNA, 120 bp, Artificial Sequence
  ENSG00000254676_3 (sequence is synthesized)
agaagactagtgttgagggtgatggtttgtggggatttaaaaaatcctcagactatttgaaattagggtagtaacaagtcccaggatatatgtatgagtttaacatctatgtagagatta

SEQ ID NO: 978218 - DNA, 120 bp, Artificial Sequence
  ENSG00000254676_4 (sequence is synthesized)
aaatgtagaagcatgtctaatcaactttttttggctgtataatgtcctataacttagctgttaactgcttaactcactgctgagtacatattgaacgtgcaatatatattttatttctgg

SEQ ID NO: 978219 - DNA, 120 bp, Artificial Sequence
  ENSG00000254675_0 (sequence is synthesized)
agccaaaccagaaagggacaccgaggcgcgaaaggagagtgatcccagcaggagggacggcaaagattgaagagagcgaccagcccgagagacagggtctcactctatcgctcaggctga

SEQ ID NO: 978220 - DNA, 64 bp, Artificial Sequence
  ENSG00000254675_1 (sequence is synthesized)
ctgagccacggcaacttgcctcttcctatattttcttttacgcttaaataaattacttaaacat

SEQ ID NO: 978221 - DNA, 120 bp, Artificial Sequence
  ENSG00000257329_0 (sequence is synthesized)
ttgtttctctatccatctcctacacacagccaggccacacaggtatggactaacaacactctatgtggcctaaaaaccaaccaaatcaagtttctatcaaggcagaagaggcaggacagc

SEQ ID NO: 978222 - DNA, 120 bp, Artificial Sequence
  ENSG00000257329_1 (sequence is synthesized)
gtaatccaggaagtctcgaaagttcttcagaaatgtttaacctatttcaaaaattttcattactctgcgcacactattcctcattacagaaagtgctcaataaacttctgtatgctccta

SEQ ID NO: 978223 - DNA, 120 bp, Artificial Sequence
  ENSG00000257322_0 (sequence is synthesized)
attccctcaccgacctttccagctaaggaggagagaggcacaaggtatatctgcagaagtaaccatggatttaaaagtagctacagcatcaatttaaaggttcaatgaagaatgtacagc

SEQ ID NO: 978224 - DNA, 120 bp, Artificial Sequence
  ENSG00000257322_1 (sequence is synthesized)
catgtagaactacaattgggggaaacaggaataatctaatggaaatagaccgagtcgcgatacctatcaagccccgtcagctcagcttcttcttggcctctctgtgcagcatttctttct

SEQ ID NO: 978225 - DNA, 120 bp, Artificial Sequence
  ENSG00000257322_2 (sequence is synthesized)
cccagggcttaccataggaggccctgccgaagctggcacgctgcatgggagctatccttaaatgccactcagaacactctcacagcctgcagccttcagaaggagagtgtcgcatggtct

SEQ ID NO: 978226 - DNA, 120 bp, Artificial Sequence
  ENSG00000257322_3 (sequence is synthesized)
agctgctgagtgaccgctgatcaacagctggcttcaccttgcatcctgactcctgggagatcttcctctcccatctctcttcccttctttctctgtaggcgcagctgtcaggatcaactg

SEQ ID NO: 978227 - DNA, 120 bp, Artificial Sequence
  ENSG00000257322_4 (sequence is synthesized)
aacccctggggatggctgtctttagagaggagctatgtggccttgagaaaagctgggtagatggacggcctgtccttggaaatgggctctctgcaaggacaaagcctaggagactgttcc

SEQ ID NO: 978228 - DNA, 120 bp, Artificial Sequence
  ENSG00000257322_5 (sequence is synthesized)
tcagggtgcagagcacaggcttgcctgtttatttaggtgtgaacttggagtcaggacaggagtttaatgaacaggagaaggaattttgttgagtttgtggccttatgctgattctttttg

SEQ ID NO: 978229 - DNA, 120 bp, Artificial Sequence
  ENSG00000257322_6 (sequence is synthesized)
cttctatttgttgttactccatttgtaagatgcacacgtataaccatagattcagagtttttttgtctatccattgatggcaatctgtgttactttctgtcaaggaggcacagcaacttg

SEQ ID NO: 978230 - DNA, 120 bp, Artificial Sequence
  ENSG00000257322_7 (sequence is synthesized)
gtgtcagtgtggtgaggctctggctgccacagacagtataggtagtggccttctgttagttgataattaattactaaattggcagcatgtgcccctcattctgtgatacacacacacaca

SEQ ID NO: 978231 - DNA, 120 bp, Artificial Sequence
  ENSG00000257322_8 (sequence is synthesized)
cacacacacacacacacacacacacggtaccccttatgtctgcttaacttccaagagtcttttggacatataaaatttgcctgcgtcaaaagtttaaaatatgcattggttctgtgccta

SEQ ID NO: 978232 - DNA, 120 bp, Artificial Sequence
  ENSG00000257322_9 (sequence is synthesized)
ttaaaagcaaagtttaaaataaagcccaaataatggatgaaatccattcaggcagcttggtggtttaaagcaagactgaactttctactttttgaaaagtgtatttccaggaataaagct

SEQ ID NO: 978233 - DNA, 120 bp, Artificial Sequence
  ENSG00000257322_10 (sequence is synthesized)
gagtgggcaaagcaagacctaattttccttattgaataggaaataaattgacacatattgaatgctgtctcgaaggtgcttatactggttgggaaaagatggccttgagacccaggctat

SEQ ID NO: 978234 - DNA, 120 bp, Artificial Sequence
  ENSG00000257322_11 (sequence is synthesized)
tcatgttaagattgaagatgaggtgaaaatgctaattaaataatgccatggcaaagttggctgaaaatgagtaagcaggactttgtgaacccttcatattcctaataaaacatctcttcc

SEQ ID NO: 978235 - DNA, 120 bp, Artificial Sequence
  ENSG00000257322_12 (sequence is synthesized)
caagaacaaaccagcaatcctgagaggaaccacagaccctctgaaagaagtggactgcttctgcaggacctgggagacaccccaaatactatgaggtttcatgtgctgcccaggatgagc

SEQ ID NO: 978236 - DNA, 120 bp, Artificial Sequence
  ENSG00000257322_13 (sequence is synthesized)
actgtgcccggccaaatgagctatttatgatgatcataaggacacaagataaggaaatccaatcagttgctacgtgctgatgattctgattctggccctgcagtatcgcttgcatgcacc

SEQ ID NO: 978237 - DNA, 120 bp, Artificial Sequence
  ENSG00000257322_14 (sequence is synthesized)
gtcctccccccctcccctgcaccttctctagttagcgctgtaagaacttggttgctcaggtggaaggcatatagattgtattgtatttgaatagctccccaggtagcacagtaatgtctc

SEQ ID NO: 978238 - DNA, 120 bp, Artificial Sequence
  ENSG00000257322_15 (sequence is synthesized)
tgcacttgattaaataagtcaggtcaatttttctgcaagttttcctccattgcagcactaacatccacatttaatttgttgctttatttaacaccatcatctgctttcagggcaaaataa

SEQ ID NO: 978239 - DNA, 120 bp, Artificial Sequence
  ENSG00000257322_16 (sequence is synthesized)
atttacagacagccacttgaggaacacagtgacactgaggtggagagaaagaaatgagcattttggcagtggatggggtctgggggtgctgacagctgagccattccacgcaccttcgga

SEQ ID NO: 978240 - DNA, 120 bp, Artificial Sequence
  ENSG00000257322_17 (sequence is synthesized)
gcaaagaactgccggaaaccagggccaagttcagagcctgaaatttttttcaaaggctacaaggagaaacctggggggcctgatcacacattacataagccgtatgtgagcagaggatgc

SEQ ID NO: 978241 - DNA, 120 bp, Artificial Sequence
  ENSG00000257322_18 (sequence is synthesized)
gttgcaacatgaccccacatctttaccaaaaatgtgaaacattcacgcagcacacactttaaaaacactaaagcttgtctccgccaggtggctaaggctgcttgatggggctgacaggag

SEQ ID NO: 978242 - DNA, 120 bp, Artificial Sequence
  ENSG00000257322_19 (sequence is synthesized)
aggagctttgcaggggggcctgacttactgtagctcttggcccagggagctgaacacgcagtactttgtaccccaatagccctgggcagcccaagcctctgataaaatgtacttttctgt

SEQ ID NO: 978243 - DNA, 120 bp, Artificial Sequence
  ENSG00000257322_20 (sequence is synthesized)
aggctatctagctagggagtgatggagcccagatccgaatccagactgtaagctccttcagtgctggagcagtgtcattcatccatttgttcatttacggatcaaatatttaatgcataa

SEQ ID NO: 978244 - DNA, 120 bp, Artificial Sequence
  ENSG00000257325_0 (sequence is synthesized)
gacacctgtcactgccactcacatttaactggctaaaacaagtcaagtcatatggccatatccgagttcagtggagtgcagaagagcctggaccgaactatactagcacggaacgatact

SEQ ID NO: 978245 - DNA, 120 bp, Artificial Sequence
  ENSG00000257325_1 (sequence is synthesized)
gccatatacttgtgaacagcctgaaagactaccacaaaatgtaacagaaatggatgcagaatgtggtgtctggaggaaagcatcaatcttgtcaacatgaggatgatagccacatacatg

SEQ ID NO: 978246 - DNA, 120 bp, Artificial Sequence
  ENSG00000257325_2 (sequence is synthesized)
tttaggacagtagaagaagcctgtatcctggaggccttccttgagctgctgaactagtcctgaattgtcttcctccaggtttcctgtgatgagagaaaaataaagccccactggattcaa

SEQ ID NO: 978247 - DNA, 120 bp, Artificial Sequence
  ENSG00000257327_0 (sequence is synthesized)
cgcgggggtggccgtgtggtgtggtggcgcgcaggccacatgggatggaatgatgaggtacgaccccagcgccgcccgcccagctccgccgcaccttcgtcctgccttctgggactgacc

SEQ ID NO: 978248 - DNA, 120 bp, Artificial Sequence
  ENSG00000257327_1 (sequence is synthesized)
cccagctctggccacaaggacagcgcccctcccaccccagctgctctggccccggccctagaaggagcacattttgatttatctgaaattgtctgaggtgccaagtccattcttctagcc

SEQ ID NO: 978249 - DNA, 120 bp, Artificial Sequence
  ENSG00000257327_2 (sequence is synthesized)
tttaaccaagtgctcccataatgagaagccattcctagaaccctcagaatgttgctggctcataccttgaggccaatatctccggctccggatccactcaatttctctcagaaggctgca

SEQ ID NO: 978250 - DNA, 120 bp, Artificial Sequence
  ENSG00000257327_3 (sequence is synthesized)
aaagatcaaaagttgtcaagaggtcatatatatagcatgaataaccagaagcatatttctgtttggaacatgaaacagaaactcactgcaggattccatggattccatggattgatgaat

SEQ ID NO: 978251 - DNA, 120 bp, Artificial Sequence
  ENSG00000257327_4 (sequence is synthesized)
gagaagatcccaggtggatcacccttaaatcaactgatctgtataaatagcctactgcctcaatcatgacgtgatgacaagagtcacttgccaataaatgacctgctagatatttgaaaa

SEQ ID NO: 978252 - DNA, 120 bp, Artificial Sequence
  ENSG00000250686_0 (sequence is synthesized)
tgggccacaacccgctctagcttgaaggcaccaccgcaaaggtcagccagagggggatacagggaacacccctatggtagatattgaaggtccttcccacctgtgacctcacctcaaaga

SEQ ID NO: 978253 - DNA, 120 bp, Artificial Sequence
  ENSG00000250686_1 (sequence is synthesized)
caattcatagcctgtggtctccacataaacagcaacaagacaagtacccacaaacaaagaacacataattgaataaccgatgtgatttgctaagaaggatggaggtgaagatgtatgata

SEQ ID NO: 978254 - DNA, 120 bp, Artificial Sequence
  ENSG00000250686_2 (sequence is synthesized)
aaagaagataatttggatttgaaccaatattttcttcatctcaactcacctcaccactacggatccaagcctgacacagagcctaacagaaatactttcctccaaatacaatcctgttca

SEQ ID NO: 978255 - DNA, 120 bp, Artificial Sequence
  ENSG00000250686_3 (sequence is synthesized)
ccatggaagacattaaaaccttcagtggttgctgctgggggccttcaccaaaatgcagccattcaccttgctgctgggggccttcaccaaaatgcagccattcacctttgcttttgctct

SEQ ID NO: 978256 - DNA, 120 bp, Artificial Sequence
  ENSG00000250686_4 (sequence is synthesized)
acctacaaaaaatgttcattggctcactcccgaggtcaactttgattcaaagatagtcttcagttaccaaaccttatcacatgactgtaaaactagataataaacaagtgtttaaaatat

SEQ ID NO: 978257 - DNA, 120 bp, Artificial Sequence
  ENSG00000272834_0 (sequence is synthesized)
ctgcccagctgccaccacctgcccagacctctctcctcaaacacctgcttctggcatcactgccacctcttgggccacttttcagtgtccctttggcggcaggcagcacccacacccacc

SEQ ID NO: 978258 - DNA, 120 bp, Artificial Sequence
  ENSG00000272834_1 (sequence is synthesized)
acctccttcccttggaacctcctgaagctcacgccaaggcctcgctcctgagcgcccagcccagccgtcctcacagcgggtcccatacctgccgcctcagtgccacctgcactggtgaga

SEQ ID NO: 978259 - DNA, 120 bp, Artificial Sequence
  ENSG00000272834_2 (sequence is synthesized)
gatgcgcctcagaccccagggacccagggattctccctagggcttgagaattacagacctcacaggaacaccagtgactgagctcttgtcttaaattgaaataaaattcacacaacatca

SEQ ID NO: 978260 - DNA, 120 bp, Artificial Sequence
  ENSG00000281849_0 (sequence is synthesized)
gatgtcatcacgaggcgacgccgccgctagccacgcgcgccccgcggccctcggagcttttgcaggaggctttggtggggccgagcggctgcggtgaggacgagggaggggctgtggcgg

SEQ ID NO: 978261 - DNA, 120 bp, Artificial Sequence
  ENSG00000281849_1 (sequence is synthesized)
ccgtaccgcccgagctctttctgcgtttaggatttttagaggcgcggcccatggcggcgtggcagtcctagagctgcggaaatgcgagcatgcgcaatgcgtgcctgccagagcgaggag

SEQ ID NO: 978262 - DNA, 120 bp, Artificial Sequence
  ENSG00000281849_2 (sequence is synthesized)
tggaacctccgcatggagcatgcgccgtgcatagcggtggaggagcggagttcgggaggccggtcggagacagggtctccttctgttgcccagcttggagcgcacctgtgtgatctcggc

SEQ ID NO: 978263 - DNA, 120 bp, Artificial Sequence
  ENSG00000281849_3 (sequence is synthesized)
tcactgcagactccgcctcctgggttcaagagatcctcctgcctcagcgtgcatgcaccaccaagcctggctcatattttttagacattttaattttattcagggtcacaaagttacctt

SEQ ID NO: 978264 - DNA, 120 bp, Artificial Sequence
  ENSG00000272518_0 (sequence is synthesized)
cctgccctccagagtcttgctattagtagagtagatagacaaaaacaaaagtatgccaaaaaatgtggcagcatgctacatgatgtcataaaggtctgaccttttttttaaaatagcaga

SEQ ID NO: 978265 - DNA, 120 bp, Artificial Sequence
  ENSG00000272518_1 (sequence is synthesized)
ccagactttgggccatggggaaagaaagtgctgtgttctaccccaagatattatggaagattcttaagaatgggacttttagtctaagaaaaaacagaatgtggcagggagacgagggcc

SEQ ID NO: 978266 - DNA, 120 bp, Artificial Sequence
  ENSG00000272518_2 (sequence is synthesized)
ttctaggcaaagagaatgaatgaatagcttatacgaaggcacaggggcaaggggagaacaaacaaaacaagcatagactgttcaagaacttcaagtgacttaggtgactcctgagctcag

SEQ ID NO: 978267 - DNA, 120 bp, Artificial Sequence
  ENSG00000272518_3 (sequence is synthesized)
gcgttactaaattcgttaatggacagtgctgagagaactgttcatgtgttaattaatctcattaatatatagtcacccagtgtaggtgcagaaaaggaattaagaaatattcatgcagcc

SEQ ID NO: 978268 - DNA, 83 bp, Artificial Sequence
  ENSG00000272518_4 (sequence is synthesized)
tgtaggtgcagaaaaggaattaagaaatattcatgcagccaaaaaaagaatgagattgtcttttgtggtaacatgaatggaac

SEQ ID NO: 978269 - DNA, 60 bp, Artificial Sequence
  ENSG00000272518_5 (sequence is synthesized)
gaaaaccaaatactgcatgttctcacctataagtggaagctataaatgataagaatttat

SEQ ID NO: 978270 - DNA, 120 bp, Artificial Sequence
  ENSG00000272518_6 (sequence is synthesized)
tacctgggtgatgaaataatacgtacaacaaaccttggtgacatatgtttacctatgtaacaaaccttcatgtgtacccctgaacctaaaataatagttaaaaaaagtatttaaattata

SEQ ID NO: 978271 - DNA, 120 bp, Artificial Sequence
  ENSG00000277840_0 (sequence is synthesized)
agggatccatttcttcaagatttgcatcttgccggttgctgctgcgaagtgcacctgaaaggcaagcttctgtttgccaacagaaagtcacctttgggatggtggtgaaagtcattttcc

SEQ ID NO: 978272 - DNA, 120 bp, Artificial Sequence
  ENSG00000277840_1 (sequence is synthesized)
acatgttcacagatacggccgtgttaccaagcctcacgctatgacttatctctggcaaggacttacaaaatagtctctctggctgattgtcaaaaattacatcatatcggagtaaactgc

SEQ ID NO: 978273 - DNA, 120 bp, Artificial Sequence
  ENSG00000277840_2 (sequence is synthesized)
ggctccccctctccccagttgtctatctttctcattcctgtttttttaaagtcttagctcatctgtgaatttatagagactgttcacctagctttgtgcatgaacgttgataggcacacc

SEQ ID NO: 978274 - DNA, 120 bp, Artificial Sequence
  ENSG00000277840_3 (sequence is synthesized)
ttgcatttttgtagttcaattccacgtttctgtggatcttacttttgttgggtcagaatagcaatgtgggtcgtttatgtgagtaaattctaccatgaagatgtataggactttttcttt

SEQ ID NO: 978275 - DNA, 120 bp, Artificial Sequence
  ENSG00000277840_4 (sequence is synthesized)
tgtatcttttgttttttaaaaaggagcatcactagtcttgtatgtgaagatctgtactgaataaaagtgtacctggcacttagcaaacagctgtatacattgcagttggtggacagcaaa

SEQ ID NO: 978276 - DNA, 120 bp, Artificial Sequence
  ENSG00000231405_0 (sequence is synthesized)
cagccagccatcagggagccagcaatagatgcaaggattggaggactctgagagacgagcatgtacaggaagcacccgggctgtgcacacacaggaaagaccacgtgaggacccagcgag

SEQ ID NO: 978277 - DNA, 120 bp, Artificial Sequence
  ENSG00000231405_1 (sequence is synthesized)
gaagcctctgaggcagtggtattttcttatggaagccccagcagacccctatgtgacttggtagccccatctgtgactggagaaggtgaagtccaccggccctggtgctgggagaatcac

SEQ ID NO: 978278 - DNA, 120 bp, Artificial Sequence
  ENSG00000231405_2 (sequence is synthesized)
actggatgctgagactgggcctcactaagctcacaggtgggagattctgggtaaagaggtggaatttgtgtcacagtcaatcaacgtgttcagtgacaataataacagaaactaccgttc

SEQ ID NO: 978279 - DNA, 120 bp, Artificial Sequence
  ENSG00000231407_0 (sequence is synthesized)
gtttcctctggcttacctctactctctctctctctcattgtttctcactgttgctggttaatcgcttcaggagctaaggggggaaatggcgatggggataagggtggagataaacagagg

SEQ ID NO: 978280 - DNA, 120 bp, Artificial Sequence
  ENSG00000231407_1 (sequence is synthesized)
ttactacacttggcatgtggataccacccaagcagcctgtgcaggggttggaggctcaagcaaaatatttgatgggtctgaatgaaaatctgatgaaacagatgttacttgaagctgagt

SEQ ID NO: 978281 - DNA, 120 bp, Artificial Sequence
  ENSG00000231407_2 (sequence is synthesized)
gactttctcagggtcaagcaaataagtaaatggaggagccagaattataccccagctcattgcttaccttctgactcagctctgaaaaactagctccacatttttaacgctgccaagagc

SEQ ID NO: 978282 - DNA, 120 bp, Artificial Sequence
  ENSG00000231407_3 (sequence is synthesized)
ttaacactaggattgtgatggcagtggagtcagtaccaactgacccaagtattcctagcctgtggaatctttagactcacttaattcattcaacatatacttattaagtgcctactgtgt

SEQ ID NO: 978283 - DNA, 120 bp, Artificial Sequence
  ENSG00000231407_4 (sequence is synthesized)
catgaacttcagggatatgaaattctgcaagatagtctctgcttttcagtaccaggagccccagatattatacttaatgtttcaaatagtggattctgggttgcttgaaagtcagtaggc

SEQ ID NO: 978284 - DNA, 120 bp, Artificial Sequence
  ENSG00000231407_5 (sequence is synthesized)
agcctttttgtcattaaatttcctttattgctctgatgcattttattttatagtgactctgactacttcagattgttcacaatattttaaaacttacgttattaagattgctcaattctg

SEQ ID NO: 978285 - DNA, 77 bp, Artificial Sequence
  ENSG00000231407_6 (sequence is synthesized)
tccgcccgcctcgggcttggatttcttagtctcccctttaaatctgtttttcagagaagacattgtaaaacgtcggt

SEQ ID NO: 978286 - DNA, 120 bp, Artificial Sequence
  ENSG00000231407_7 (sequence is synthesized)
ttaaatctgtttttcagagaagacattgtaaaacgtcggtgctgggggatgggaaagcatttcttaggatcctgcctggaatcctaataccgtaattcgggttctgccttgaacactaac

SEQ ID NO: 978287 - DNA, 120 bp, Artificial Sequence
  ENSG00000231407_8 (sequence is synthesized)
ctgagatcccatttcctcatttgaaatatggttgcaaagattaaaagatgcaagcgttgtcaaaatacacatagataaggatgattcaagagagacctagttatactatttttcatggtt

SEQ ID NO: 978288 - DNA, 120 bp, Artificial Sequence
  ENSG00000231407_9 (sequence is synthesized)
ctctttcactatttttgcagtaagaacaacaaaacacctcatcttggcttacattttaaaatactttggctttagtgtgttgatatttttaaacaaaatgaaagaaaggagtaaagtaca

SEQ ID NO: 978289 - DNA, 120 bp, Artificial Sequence
  ENSG00000231407_10 (sequence is synthesized)
aaataaaacacgtcaagaaaagttgaaatgagtacttcagatttagtaagtgataaaaagtgaaggatgtttggaatttcccatgtaaatccgagcttttaaaacttaaagtggtttctg

SEQ ID NO: 978290 - DNA, 120 bp, Artificial Sequence
  ENSG00000231407_11 (sequence is synthesized)
aaatttggggatgctgcagatgcgtcattttaaatatgtactcattttttataatattaaacaatcaaaatgcctggaggagacagttaccaccagtttctgaatatagactgaatatag

SEQ ID NO: 978291 - DNA, 120 bp, Artificial Sequence
  ENSG00000231407_12 (sequence is synthesized)
actacgtatattcaagttatagattatctagctccaaagtagtagatggggatcagtggcaatctggtagttaattcagtttcctagttgcaggcaaccgccatctagttcatctaataa

SEQ ID NO: 978292 - DNA, 120 bp, Artificial Sequence
  ENSG00000231407_13 (sequence is synthesized)
cagtaaaccaccttgtgtgccccatgttgaattttatacataaatgttctttagttcactctgggggaatttcaaaaattatccgtaatcttaataaagatgtaaattaggatattttaa

SEQ ID NO: 978293 - DNA, 120 bp, Artificial Sequence
  ENSG00000231407_14 (sequence is synthesized)
aaggttttgcattggcccttaatgagaaccaaagcgaaagtgacacgtggtaaaagataataaaatccgtctgtataaaagttataatttccagtttgctaggttctaaatctcctgttt

SEQ ID NO: 978294 - DNA, 120 bp, Artificial Sequence
  ENSG00000231407_15 (sequence is synthesized)
gttgtttctgttggctctccctcatggtggctagtttcttcaaatgttgtgtaatatttaagtgggaatttatcttcaaagttctttgttctgcagaagtcttctcttccttgagttaag

SEQ ID NO: 978295 - DNA, 120 bp, Artificial Sequence
  ENSG00000231407_16 (sequence is synthesized)
aaagtgtctctacagattggttttattggtcctaaagtttcagttgttttaatccagatttaagactgagctccttgctttaccagcatttatcctcgaatgtaaagtgacccatccaat

SEQ ID NO: 978296 - DNA, 120 bp, Artificial Sequence
  ENSG00000231407_17 (sequence is synthesized)
tcccttttttatactgccagttgcctctcttcctttcctgtccctgctcctttgcctgactcttcatttctacctacgacttggggatataggactgcctttctaacccttatgccttcc

SEQ ID NO: 978297 - DNA, 120 bp, Artificial Sequence
  ENSG00000231407_18 (sequence is synthesized)
cagttcaaggttggagaaccccagccaatgccccgagggtgggacagaacctaggcgccaagcagtatcctcaggctgcaatttgctggacacacagagtcctgttctgcaacctccccc

SEQ ID NO: 978298 - DNA, 120 bp, Artificial Sequence
  ENSG00000231407_19 (sequence is synthesized)
actgttagtaaaatgataaggttaccttatggctttgaattttaggtgctttggtatccatgatacatacgtgtatatatagtcatgcaccatgccacgacgttgcagtcaactacagac

SEQ ID NO: 978299 - DNA, 120 bp, Artificial Sequence
  ENSG00000231407_20 (sequence is synthesized)
cacatgtatgatagtgctctcatgagattataatgccatatttttatggtcctttttctatgtttagaaatatttagatatacaaataattaccattgtgttacagttgcctacagtatt

SEQ ID NO: 978300 - DNA, 76 bp, Artificial Sequence
  ENSG00000231407_21 (sequence is synthesized)
tacaaataattaccattgtgttacagttgcctacagtattcaatacagtcacatgttgtacagatttatagcctaa

SEQ ID NO: 978301 - DNA, 120 bp, Artificial Sequence
  ENSG00000231407_22 (sequence is synthesized)
aaagccatctaatgacatatttctcagaatgtatccccattgctaagcaactcctgattgtgtgtgtatatatatacgtgtgtgtgtgtatatgtgttccaaaatcaattttataattaa

SEQ ID NO: 978302 - DNA, 120 bp, Artificial Sequence
  ENSG00000231407_23 (sequence is synthesized)
tattggtcctaagttcagaattcatttcaactgtttatgttaagaattacattttgctagatcatatggtagctttatttttactttttaattttactttctcataatggctatactaag

SEQ ID NO: 978303 - DNA, 120 bp, Artificial Sequence
  ENSG00000231407_24 (sequence is synthesized)
ttaaattcctgccaactgtgtgtaaccgttctcctttctctgtatccttaccagtgtttgttctttttgtctctttgataataaccattctaactgggataagttgatatttcccaatgg

SEQ ID NO: 978304 - DNA, 120 bp, Artificial Sequence
  ENSG00000231407_25 (sequence is synthesized)
cccaatggttttgatatgcatttccctgatgattagtgatgctgaacattttttcatatacctgttggtcatttatatgtcttctgatccaataatcccactactgggtatatatccaaa

SEQ ID NO: 978305 - DNA, 120 bp, Artificial Sequence
  ENSG00000231407_26 (sequence is synthesized)
ggctgtgggatgggagccagatatattggagggaggaggcaagtaagtgctggagacctcaggattttattgtagggcacatggactttgtatgagaatgtcaaaaactcattttgtctt

SEQ ID NO: 978306 - DNA, 120 bp, Artificial Sequence
  ENSG00000231407_27 (sequence is synthesized)
tagcacaggaagatgcttggcaaagagttaatgacactaaagaattcttacaaatgttatggatgggtgttaattttcacagataggcattcattgtcagatgtttatgctctccattcc

SEQ ID NO: 978307 - DNA, 120 bp, Artificial Sequence
  ENSG00000231407_28 (sequence is synthesized)
tgaaactcctcctgtctgtggatccccatcacaaggaggggagggctaccatcccagctgcaaactctcattcaaggtttatgctgcagccagcagtgtccttggagtctagttcaaagc

SEQ ID NO: 978308 - DNA, 120 bp, Artificial Sequence
  ENSG00000231407_29 (sequence is synthesized)
tgaagagagtgaaccatggaactgggagccattggcggagaggctggcctgaaggaagggaagtgtttcagccagaatgtactgacgcacaaccaggaaaccacaagactggtgagaacc

SEQ ID NO: 978309 - DNA, 120 bp, Artificial Sequence
  ENSG00000231407_30 (sequence is synthesized)
tttccaaaactgagctttatgatcaaaagaggtacaggaaacagctctgccaagagtcctttctgctcctggctggaaccctgagcttctgaggctctctgagtcaactctctgaacaga

SEQ ID NO: 978310 - DNA, 120 bp, Artificial Sequence
  ENSG00000231407_31 (sequence is synthesized)
gctctgaggtggcctcactggtgggtgcaagtgagttactgtctctttttctctttcttgtttctttcttttgacagaagttgccatgtgattactcaattctgaattttagaggccata

SEQ ID NO: 978311 - DNA, 120 bp, Artificial Sequence
  ENSG00000231407_32 (sequence is synthesized)
ggttactgcatttatgccctttgccaactgactattgtttggtgctgggcctgcatacaaacacgacatccccaaactcttatcaatacctagatcacctgatgtgaatctatcaatacc

SEQ ID NO: 978312 - DNA, 120 bp, Artificial Sequence
  ENSG00000231407_33 (sequence is synthesized)
ctggacttaacagggtattgaaggaaagagaaccggcaattccttcatttcttacatcccagccagtagtccttctcccaggctagtcttccttttgtttcccctaagaatgactcaact

SEQ ID NO: 978313 - DNA, 120 bp, Artificial Sequence
  ENSG00000231407_34 (sequence is synthesized)
aggaattgcattctgatccctgtcacagatataaatcttgtctggatacaaggtcaaaataattgtgttcctgtggattctttttcttttttcaaccagagtaactaccagttgccatga

SEQ ID NO: 978314 - DNA, 120 bp, Artificial Sequence
  ENSG00000231407_35 (sequence is synthesized)
aataaatcacatcatcatatggcagatccagctaatagctgagactggcaggataactgaaccgtgtactcagagctaaatgatggagaaattggactggccatggagcacttcaaattg

SEQ ID NO: 978315 - DNA, 120 bp, Artificial Sequence
  ENSG00000231407_36 (sequence is synthesized)
attgcttagtaatgggatatttttcctggaaagacaacagaatacttctgaattgttggttctgtcatgggtacaggctcccatgtacaggaaaataaagaaagtgtgatgaatttttca

SEQ ID NO: 978316 - DNA, 120 bp, Artificial Sequence
  ENSG00000231407_37 (sequence is synthesized)
tcccttaccctgaccctaaccttccaaccgttgattcctgcagcaatcttccctaagggagacaccccggctgtaggctcacttcctctcccaagtcccattcctttcacaagagtcaaa

SEQ ID NO: 978317 - DNA, 120 bp, Artificial Sequence
  ENSG00000231407_38 (sequence is synthesized)
tccctacagtggattcctggaccgttttttctaaaagaagatcccagtcctctggcttgcccctcccgtcgtgactcccatatttgatgggtctgaatgaaaatctgatgaaacagatgt

SEQ ID NO: 978318 - DNA, 120 bp, Artificial Sequence
  ENSG00000231407_39 (sequence is synthesized)
ctttctgcatgtctccatttttagtctgtaagccctgcctagatgaccaatcactattgcccatgtggcataaaacctacaatttaactatacttcttaccaaactctcagcaagtatga

SEQ ID NO: 978319 - DNA, 120 bp, Artificial Sequence
  ENSG00000231407_40 (sequence is synthesized)
ggtagccaacagccttttcaagataatgactgagtcttagcttaggtttcagtcattttaggaaacataaaaaattcaatggtgggagatcatacacactctgcaaagatgtcagaagtc

SEQ ID NO: 978320 - DNA, 120 bp, Artificial Sequence
  ENSG00000231407_41 (sequence is synthesized)
aagttttgggagagtccacacacaaactgagcagtgatggtaaaatatatttttgaaatatttctcctctgtgactgttatgtgaagtagagcaaacacattgtgctgcagtgctctttg

SEQ ID NO: 978321 - DNA, 120 bp, Artificial Sequence
  ENSG00000231407_42 (sequence is synthesized)
ggacatgccttttttgggaagtgctaactttatactctgctgacaccaaacatttgaatataaaaccttatttttttctctcactctgctccacttttggctcagcttattctaccaaaa

SEQ ID NO: 978322 - DNA, 120 bp, Artificial Sequence
  ENSG00000231407_43 (sequence is synthesized)
cacacttcaaaagacttctttatagaaagaatgtttcaaaaatataatatttccatctgttatttcaataatacatgctctgggactctctttatgaaccactttcctttctttgctccc

SEQ ID NO: 978323 - DNA, 120 bp, Artificial Sequence
  ENSG00000231407_44 (sequence is synthesized)
atttagatgtataaatatttgattgtaaagctctaaggaatagtcagccaatcgggtcactgaattgtgaacattcctaaccctataattttgtctgtagcaggcacctcctgctgtgga

SEQ ID NO: 978324 - DNA, 120 bp, Artificial Sequence
  ENSG00000231407_45 (sequence is synthesized)
actaactgctaagggattatagcaatgtaatcctcagactgttccatctcaaggttactctgaagtggagggaaggaagccgttttaattttgataaaataaactttattttgtaacttt

SEQ ID NO: 978325 - DNA, 120 bp, Artificial Sequence
  ENSG00000231403_0 (sequence is synthesized)
cttcattaacctctttgagcatcagttttcctgatctgtaagaggggcacgtaatgctatctcttgacagattccttgcgaagctgagaggtgctgtatgtataacacctgatcctcctc

SEQ ID NO: 978326 - DNA, 120 bp, Artificial Sequence
  ENSG00000231403_1 (sequence is synthesized)
agcagagggacctctgcaaaggcagactgacaccacttttcgaagcctcagcaaccgcatttaagcagttactggttttcactgttgcctgataagctcaatgccctccgggtgcaggaa

SEQ ID NO: 978327 - DNA, 120 bp, Artificial Sequence
  ENSG00000231403_2 (sequence is synthesized)
cacccatgtactgcctgccgcggttagggtttctgactaaattagttcctgtggaagcagcaagcaatgcttccctctatgctggaagctgtctgtgatagtcaccataatcaatgagaa

SEQ ID NO: 978328 - DNA, 120 bp, Artificial Sequence
  ENSG00000231403_3 (sequence is synthesized)
aagcccagggtttggggattgccccagaaaaccagccatccatccccaccaccctccaggatggggattcagaagcactcaggaaagtgcccaagatgacggcccatcaagaagtcagca

SEQ ID NO: 978329 - DNA, 120 bp, Artificial Sequence
  ENSG00000231403_4 (sequence is synthesized)
ccaggccaaaggttttccccttgcgtggcctcgacggaatcctgaacagctagcagtcgggtgctgcctgatacatgaattgctgagcttaatgttcaaataaacttgttaaaatcctaa

SEQ ID NO: 978330 - DNA, 120 bp, Artificial Sequence
  ENSG00000255252_0 (sequence is synthesized)
catattagcagatccatactggaaaatgcatggaggtttcatatacaccacttacagttttcagctcctcagtagtgacaaagccatccccatcattgtcgattcgatcaacaatcttcc

SEQ ID NO: 978331 - DNA, 120 bp, Artificial Sequence
  ENSG00000255250_0 (sequence is synthesized)
atgcaacactggacaagatgctatgtgtggagctctgcactggaagctgcagatacagccatgagtggaggatcggggtctgggtctgtaagcactaagagcctgagcagtgggccagtg

SEQ ID NO: 978332 - DNA, 120 bp, Artificial Sequence
  ENSG00000255250_1 (sequence is synthesized)
ctccaatgaagccagaggcctcctgggtcctgacacagctggggatgggatttgacaaaggcctgcaaaccgaagctggacaacttgatataaatctggaaggactcaccatcactgcag

SEQ ID NO: 978333 - DNA, 120 bp, Artificial Sequence
  ENSG00000255250_2 (sequence is synthesized)
ttccttgtgcccaggaagctagggagacgtatgagaagaaaggatggcctgttatgtgtagtgacctgatggagacagccattccactcagcctcatccaaggacatggggacacaacaa

SEQ ID NO: 978334 - DNA, 120 bp, Artificial Sequence
  ENSG00000255250_3 (sequence is synthesized)
gggacctcacgagatcgctttacagaccagttggtccggaggcacatttcttctgcagggattggcaaggaagatttcagtcttcaaggtctgttgctgggcctgggcaatggatgcgtt

SEQ ID NO: 978335 - DNA, 120 bp, Artificial Sequence
  ENSG00000255250_4 (sequence is synthesized)
gcagaaagttattttattttcagggtgaggtgaccacaaacatatttgatttctaccccccgagaagttacaaatctgactctctggattcaacaaaaaggaagtaccagcttgaccttg

SEQ ID NO: 978336 - DNA, 120 bp, Artificial Sequence
  ENSG00000255250_5 (sequence is synthesized)
gagactaccattgcatcaaggcacacatataaacaagagaaaattctgaaagaagaaacaacagaatgctgaaacatacttatggaggaattgatttgacaaaggcctgcaaaccgaagc

SEQ ID NO: 978337 - DNA, 120 bp, Artificial Sequence
  ENSG00000255250_6 (sequence is synthesized)
taaagaaggaatttgaagacagcaggaatatctcaaaatggactttggcatgactgttataaattcttcctctaactcctctacagaatctttaataaagtctacaatgctcttttgtac

SEQ ID NO: 978338 - DNA, 120 bp, Artificial Sequence
  ENSG00000255256_0 (sequence is synthesized)
gtttgttttcaaattggtaatagatataatggtataaaattggaaagagaatttctcatccctgctgcttcactgcacagtttactggttacccattctccagcccagaggaaaccagcc

SEQ ID NO: 978339 - DNA, 120 bp, Artificial Sequence
  ENSG00000255256_1 (sequence is synthesized)
ctcagattcttgtgtgctacttcagaggtagctgtttacgtgcaagaatgtatgtaggtaggtatgtctgagcagatagatagtctgaatttaatttctttgcagaaactgtagcatacc

SEQ ID NO: 978340 - DNA, 120 bp, Artificial Sequence
  ENSG00000255256_2 (sequence is synthesized)
acaaattatatgtatttattgatttgaattttattgtttgaaaaagaaatgcaatcgtatggttcaacatttaaaaggtataaaagaggtcaggcgtgagtcaccatgcctggccaggtc

SEQ ID NO: 978341 - DNA, 73 bp, Artificial Sequence
  ENSG00000255256_3 (sequence is synthesized)
ctataaattctttgccaagactgatgtccagaatagtatttcctacgttttcttctgggagtcttatagtttg

SEQ ID NO: 978342 - DNA, 120 bp, Artificial Sequence
  ENSG00000255258_0 (sequence is synthesized)
ggggctggggcctctcgggacttatcagggaaaggctgctgccaaaagtggaggacttaaagctggaggccgccccaaagacggggaaatgaagaaaacgccgtttctggagctccctga

SEQ ID NO: 978343 - DNA, 120 bp, Artificial Sequence
  ENSG00000255258_1 (sequence is synthesized)
ggacaaggggagcagcttctgttctcagaatccctgagctgcgctcctctggagtgtcacccccaggctggaggagatggctgtgtcagtttcccattgctgctctaacaaagcgtgcag

SEQ ID NO: 978344 - DNA, 120 bp, Artificial Sequence
  ENSG00000255258_2 (sequence is synthesized)
attctgcaactcagaaccagagacgtccattgccccacagctccagagactggaagtatgggatcaaggtgctggttgggcccccttccctcaggcaatgctagggaaggatctctcctg

SEQ ID NO: 978345 - DNA, 120 bp, Artificial Sequence
  ENSG00000255258_3 (sequence is synthesized)
gcttcgggcggttccttggggtgtgtggcatacctgccccttgccctcccccaacacctgtcttcacaagaccctctccctgtgaagctcattgtccacatttcccctttttatttggca

SEQ ID NO: 978346 - DNA, 120 bp, Artificial Sequence
  ENSG00000255258_4 (sequence is synthesized)
ttacggcataccctaattacctcattttaacttgattaacctctgcaaagaccctatctccaatgaaagtcacgtttctgggtactgggtgttagggcttaaacatatctttttggagga

SEQ ID NO: 978347 - DNA, 120 bp, Artificial Sequence
  ENSG00000255258_5 (sequence is synthesized)
agacgcaattcaacccataaccacagtccatccctgaactacatgctgcagagggagagacctggttgattggcttaggtcatctgagagggatgcatgtggggcagtggttcgcagggc

SEQ ID NO: 978348 - DNA, 120 bp, Artificial Sequence
  ENSG00000255258_6 (sequence is synthesized)
ccacactctcctcgcaggtactgggagagtgacaggagcccagcacctggcatagagaaggctctcagagtctggactagagactacatattagctgtgtaacttggaggagcgtactta

SEQ ID NO: 978349 - DNA, 120 bp, Artificial Sequence
  ENSG00000255258_7 (sequence is synthesized)
ctctccctaaacttcagccgcaaaatggagatgacgctacatgcctggaagggtggctgtaccaacccagcaagacatcaggcctggagtaagtgcttaataaatggaattgtccctggt

SEQ ID NO: 978350 - DNA, 120 bp, Artificial Sequence
  ENSG00000243384_0 (sequence is synthesized)
caggggaaaaatctgtgattgacctggctgagaccttcgccccatacgcttctgggcatcccgagagatccaagactctggggtccatccggggagtggctgtggagcagctaagagggg

SEQ ID NO: 978351 - DNA, 120 bp, Artificial Sequence
  ENSG00000243384_1 (sequence is synthesized)
gagccttctcatcctcagaaaccacactggttaaatcagtggatcttaactttggctgcatatcggcatcaccacaggaagtttcaaaaattccagtgcctgagtcccaccacagggatt

SEQ ID NO: 978352 - DNA, 120 bp, Artificial Sequence
  ENSG00000243389_0 (sequence is synthesized)
gctttgattcctgccatccgtacctgagagggtcctaggagagctggctgggcagagtcatctgttccccagcttcaccgggtgtgccaaggaagtgcctgggaagaacaggactctgca

SEQ ID NO: 978353 - DNA, 120 bp, Artificial Sequence
  ENSG00000243389_1 (sequence is synthesized)
cttctgctgcatgtgcctggggcccctctgctgccagtctgctggtgtttgctggaggtcccctcctgaccctgttttcctgggtatcaccagtggaggctgcaaagcagcaaagattgc

SEQ ID NO: 978354 - DNA, 120 bp, Artificial Sequence
  ENSG00000243389_2 (sequence is synthesized)
tgcttgttctttcctctggaagcttcgacccagcagggaacctgccagatgccagccagagctcttctgtatgaggtgtctgtcagccccaactgggaggtgtctcccagtcagtataca

SEQ ID NO: 978355 - DNA, 120 bp, Artificial Sequence
  ENSG00000279636_0 (sequence is synthesized)
taagctgaaccaattgagatgttggcataaacaagattaacttttcccttgcaaatcgatgtgactggtctgctgctgcaggcttcatctaaaactttgcttcgtcttaaactagttatg

SEQ ID NO: 978356 - DNA, 120 bp, Artificial Sequence
  ENSG00000279636_1 (sequence is synthesized)
catttgtaaactgctactgatttctttggggcattgtccccataaactatttgtaaagtatcaatgatttcaccattcttccacatcacaactttcaccatcaatttgatgtttgtcctt

SEQ ID NO: 978357 - DNA, 120 bp, Artificial Sequence
  ENSG00000279636_2 (sequence is synthesized)
tcaatttgatgtttgtccttgctacaattttagcagaattgattttgccttgatagggactctttgcaaactgatgtcctatccttcttagtgcctcaaactagatcctgttcagacatg

SEQ ID NO: 978358 - DNA, 120 bp, Artificial Sequence
  ENSG00000279636_3 (sequence is synthesized)
tttattttggtgcaagaaaatttatgttctcacaaaactatatttttttcaataatgaaaaacaaatctctccttaatttgagaagcatctggttttcctgaacttattttttcttaatt

SEQ ID NO: 978359 - DNA, 120 bp, Artificial Sequence
  ENSG00000279636_4 (sequence is synthesized)
attaaaagtcacaatgtagaaacaatgtagggtttgggacaatgccttgtcccaattagggaacccgcaaagattttgacaaaatgaagaataaatgcttactggacatttcaagctcta

SEQ ID NO: 978360 - DNA, 120 bp, Artificial Sequence
  ENSG00000279636_5 (sequence is synthesized)
actagcatgtttaaaacagatttcatcatctttaccaaccagtggcttttcttgacttgccaaatcagtgaatggtactgctcgttccctctttcttaaatcttgagtatgtttcatttt

SEQ ID NO: 978361 - DNA, 120 bp, Artificial Sequence
  ENSG00000279636_6 (sequence is synthesized)
ctttcttcttcacctctataatcagagatcaaatgctgtcaagttttcctccccccaccaaaacaattccttgctcacctattcctttctctctccagttcctactctagtttcatctca

SEQ ID NO: 978362 - DNA, 120 bp, Artificial Sequence
  ENSG00000279636_7 (sequence is synthesized)
tgctgataccacttcaacagtatcttgtctccctacttccaattcctgtgtcatttcttcagttacaatgggcattgtttctaaataattttccaacactgtattttgtttatgacatgc

SEQ ID NO: 978363 - DNA, 120 bp, Artificial Sequence
  ENSG00000279636_8 (sequence is synthesized)
ctttctgtgcctattcaaaaactctcagcaaaagtaactaaaattaaaagggaaatctgtatggaaaaatatgtgcagcaagttaccactataataaactcaatcaattaagaaataaaa

SEQ ID NO: 978364 - DNA, 120 bp, Artificial Sequence
  ENSG00000214708_0 (sequence is synthesized)
ggaatctccagaagacaagaaggtctgaaaggaggcggcctgggaaactgtgaggcccagaaggacagggttcgaagaggaaaaggaggagagaagcttcggagggatgaggatccgcac

SEQ ID NO: 978365 - DNA, 120 bp, Artificial Sequence
  ENSG00000214708_1 (sequence is synthesized)
gtctttcttcatgtcggcggctctcgggggccggcctccgcccgcacgcacggagtggactcctctcaccaggagcacccaccccacggcgccacctgccagcctcttcggccgccgggg

SEQ ID NO: 978366 - DNA, 80 bp, Artificial Sequence
  ENSG00000214708_2 (sequence is synthesized)
cccgccgcgccgccccctcagttgcttccccgcaagagagccgggacagcgccagctccgcctcctccggcccagcgggc

SEQ ID NO: 978367 - DNA, 120 bp, Artificial Sequence
  ENSG00000214708_3 (sequence is synthesized)
gcggcggcggcggggacgacggcacgcggcgagggacacgcgctttcggaacgcgaacgcgctctgcgccggaacagcgctcccgctgtcaggccgccgcagcgcaggcccagggagcct

SEQ ID NO: 978368 - DNA, 120 bp, Artificial Sequence
  ENSG00000214708_4 (sequence is synthesized)
cgcccaccctcctttgggcaccgcgaccccggagacacttgggccaggaatttgaatggcggattccctggtttaaccccgtttattttatagatagggacagaaattccctgttcaaag

SEQ ID NO: 978369 - DNA, 120 bp, Artificial Sequence
  ENSG00000214708_5 (sequence is synthesized)
tcacatagctagagcttggcagtgactcagagcagggatcttctcaccagaccataaactccgggagggcagcgatcagcttgcatggttttcagctgcgtccccacgttattggatagg

SEQ ID NO: 978370 - DNA, 120 bp, Artificial Sequence
  ENSG00000214708_6 (sequence is synthesized)
ccaggatccggcgctttccactccccaaagcccgtcaccctagttgcttttgcctctgatgcttataaaatacgattataagattcgtttttacgctgtgtgaacaagactcctttcttt

SEQ ID NO: 978371 - DNA, 120 bp, Artificial Sequence
  ENSG00000214708_7 (sequence is synthesized)
ataaccaaactaagtgactttttttctgtctatgtagtttattttatggcagggttttcggacactcttctttactcaggcttacccagcgtaatgctagacacggaggtggcactcgat

SEQ ID NO: 978372 - DNA, 120 bp, Artificial Sequence
  ENSG00000214708_8 (sequence is synthesized)
aataaactctagatgatttttctaacattgccttaattttctcgtgaccctctccatctggaggaatttgttgttacatgcttaatgtttggtacacaatggcaaatatatatatataca

SEQ ID NO: 978373 - DNA, 120 bp, Artificial Sequence
  ENSG00000214708_9 (sequence is synthesized)
tacgcgtgcgaatatatatcacatccctaatacttggcacacagtgggaaatataaaatacataaattaatgaggaagcactatctgtgcataatgtacattttttctatcttaaatatt

SEQ ID NO: 978374 - DNA, 120 bp, Artificial Sequence
  ENSG00000214708_10 (sequence is synthesized)
acacaataaacacttaaagggaatgaaatgtgcgtaataccaacttccctttctcctaggagaagtcatgtggtctcttgcagcagttaagagttgctggcaaatttcctgggtttgaat

SEQ ID NO: 978375 - DNA, 120 bp, Artificial Sequence
  ENSG00000214708_11 (sequence is synthesized)
ctaggctccacataatagctctgtgatctcgactaagtgcttttatttttacttccctcagccactgttccttcttctgtagcatggaaataatgatgataataccttcctcttgagatg

SEQ ID NO: 978376 - DNA, 120 bp, Artificial Sequence
  ENSG00000214708_12 (sequence is synthesized)
gttgtgagtaataaatactataatacttgtcaagcatttggtacagtgccagactcagagcgtgtgctctactgatctcagctatcattattatattaaaaagtcactaaaaagttgtaa

SEQ ID NO: 978377 - DNA, 120 bp, Artificial Sequence
  ENSG00000270094_0 (sequence is synthesized)
atcttcagaggtggggtacacaagactttcagggggctggcaaagctgcaggaactgtgcagcttaggtgaaccctggattctgcaagccccagtggagttttctcagcttctggaacca

SEQ ID NO: 978378 - DNA, 120 bp, Artificial Sequence
  ENSG00000270094_1 (sequence is synthesized)
caggccagagctgccggggcaatggggctcccagctttgagatgggagtcttgctatgtttcccgggttggtcttgaactgatggcctcaagcaatcctcccgcctgagcctctcaaagt

SEQ ID NO: 978379 - DNA, 120 bp, Artificial Sequence
  ENSG00000270094_2 (sequence is synthesized)
gctgggattacagagaagttgaagaattgtttggtgtgaaaatacccacacaactgatgtcagaagtatgagcagaggacgttttcccaacaacccaccaccatgacactgtgagtttgg

SEQ ID NO: 978380 - DNA, 120 bp, Artificial Sequence
  ENSG00000270094_3 (sequence is synthesized)
agctggcagtggcagggcacagaacacgtggctggctgcccaggtccttggcaggtcccctcctggagtcatctccccacctggggcctccacacctacctcgaaacctccgcagtgtct

SEQ ID NO: 978381 - DNA, 120 bp, Artificial Sequence
  ENSG00000253959_0 (sequence is synthesized)
gctatttttaccctcacaggggataagcctccctgaggctacagaagcaaagcccagagatgggagtcggggagacagagcctcctcatgatgtcacgatgtcacctgagctcctgggtc

SEQ ID NO: 978382 - DNA, 120 bp, Artificial Sequence
  ENSG00000253959_1 (sequence is synthesized)
cagcttgtttcatgagctgagactaatgattgtaactgttcgggcacggtgaggcaagaggaacgtacagttacagaatccgtgggcaaagcatctcggggccaggagcgagcctgaagg

SEQ ID NO: 978383 - DNA, 120 bp, Artificial Sequence
  ENSG00000253959_2 (sequence is synthesized)
tgatcagtttagcaatttctacgattctgacatcctctttctgttctttccggactcaggcatccaaggtcacctcattatggctctgtgcgaagacagcaccccaaaggggccatcgat

SEQ ID NO: 978384 - DNA, 120 bp, Artificial Sequence
  ENSG00000253959_3 (sequence is synthesized)
ttggaacatctgatcggctttctgagtcagatccactagctcgtaaaatccaataaatgtcaaagatatgtcaggcccattaacctctggaggtctattaaaagactctgcttctgctaa

SEQ ID NO: 978385 - DNA, 120 bp, Artificial Sequence
  ENSG00000253956_0 (sequence is synthesized)
gttatagttgctgagggttcagcagtgaagaagtacctgcactcatgaagcttagaatataaacttgtggattctcatgaagtcccttccccaccagagcggttaaagaattaccagctg

SEQ ID NO: 978386 - DNA, 120 bp, Artificial Sequence
  ENSG00000253956_1 (sequence is synthesized)
gcaagaatcagtgcataaagacagaatcccttatggtgaacatgtagaggagaataaagacggcacttggaaactcagtatgtgagaatctcagaacgtggctttattttggaagaaggt

SEQ ID NO: 978387 - DNA, 120 bp, Artificial Sequence
  ENSG00000253956_2 (sequence is synthesized)
tgttatagatgtagttagctaagatgagactatcgtagcaggacaaacatcacattaaacagagtcagagattaacataaacccagggatgctgaagaatgccaccagcgaccagaagct

SEQ ID NO: 978388 - DNA, 120 bp, Artificial Sequence
  ENSG00000253956_3 (sequence is synthesized)
tgccgacaccttgattttggattttcagcttccaaactaggactgagacagaacaaatttctgttgttttaagtggcctactttgtggtactttgttgcagctgccctagaaaacaaata

SEQ ID NO: 978389 - DNA, 120 bp, Artificial Sequence
  ENSG00000253956_4 (sequence is synthesized)
catgtgttgactgtagcttttactaagggaagatgacgtctttagggctctaaagatattcttcatcaagtttaggaaatatccttctattcctcttttacataaagtttatactatgtt

SEQ ID NO: 978390 - DNA, 120 bp, Artificial Sequence
  ENSG00000253956_5 (sequence is synthesized)
tgttaactagaatcacttctcagcaggtataattaatatgatcctactgttattttctcctttattaatattgtgacagattgcaagaacctcaataaaaacctctctttccttcctgta

SEQ ID NO: 978391 - DNA, 120 bp, Artificial Sequence
  ENSG00000253957_0 (sequence is synthesized)
atagaccacgtctgtgaaaggcagattcacaatctcaagagatgattccaaaagcatcacctatctgcaaatgaagagcctgaaaaccgaggacacggccgtgtattactgttccagaga

SEQ ID NO: 978392 - DNA, 120 bp, Artificial Sequence
  ENSG00000253955_0 (sequence is synthesized)
agtttgagaaaagaggacacaaaagcatgaataacaggaggatggatatagaataccagcatcagcaagtgtacacgatttaaagcacatttggtatctattaccaagctgcccttcaga

SEQ ID NO: 978393 - DNA, 120 bp, Artificial Sequence
  ENSG00000253955_1 (sequence is synthesized)
gaggttgtctcgttacacattccacagctgtgactgagaaaccgtcttgtcgcatttgacaatccaggtatttccgagagtgatgcatgctccttgggaagcattgggaattctgcactt

SEQ ID NO: 978394 - DNA, 120 bp, Artificial Sequence
  ENSG00000253955_2 (sequence is synthesized)
ctgggccagccagctccaactgcagccaatgtttaaaaaatagcatctctcccttccttctatatgtacagatcttcagggatttagcaaattctcttaaatagctagaagaccttgctg

SEQ ID NO: 978395 - DNA, 120 bp, Artificial Sequence
  ENSG00000253955_3 (sequence is synthesized)
acttcgatgcaaatattctggccagagaactgaggtccttggatgaaacccaataatcagaggggtcacagtttccttagcccaggaggaaggcagctggtgtctcagcagatgttccta

SEQ ID NO: 978396 - DNA, 120 bp, Artificial Sequence
  ENSG00000253955_4 (sequence is synthesized)
aaggcctggctttttccacatctgttctgtgtggtagacaaggagaagaggaagggaggaagggaacagagaggaagcagagagagctgaagattaaaacaatactgtacaggtccccgc

SEQ ID NO: 978397 - DNA, 120 bp, Artificial Sequence
  ENSG00000253955_5 (sequence is synthesized)
taaagatggactctctggctgccaggaaaggactgagagataaataggaggagcataagaacctgggagctggaggctggtccacctccctcagcttccaggacccagagggaggcaggc

SEQ ID NO: 978398 - DNA, 120 bp, Artificial Sequence
  ENSG00000253955_6 (sequence is synthesized)
acagccagccttggccctgtggaaccaacaccttccagccaggctgccaggaagccaaattccaaatgtctaaactgtattttgcacttttccacaaggtcagcaaaaattagaaagtca

SEQ ID NO: 978399 - DNA, 120 bp, Artificial Sequence
  ENSG00000253955_7 (sequence is synthesized)
tggtgctggttcaagtcgactgcgtaagtcttctgcccacagcaatgccactcctcggtatgcggcgcagagacactttttgtccaaaaggggcatgtggggaggtgctcattcagcatt

SEQ ID NO: 978400 - DNA, 120 bp, Artificial Sequence
  ENSG00000253955_8 (sequence is synthesized)
gtttctggcaggggcgttggccactcaggcacccatccctggggaagacagaagtaaatgtggtgggtgtacaccttggagaagcatctatcagtcagaagcaaggaaggggatgtccac

SEQ ID NO: 978401 - DNA, 120 bp, Artificial Sequence
  ENSG00000253955_9 (sequence is synthesized)
acagatttaggtagcttacgttagacactatgttcaaattcaaggacgcacatcagatacacagaaaggctgcctgtgggggaattcggactgcaagtggagaatggggactgtagtgga

SEQ ID NO: 978402 - DNA, 120 bp, Artificial Sequence
  ENSG00000253955_10 (sequence is synthesized)
ttgaagatggtcccaaattccttgtcactccctgcatggagaggtgaggtggggtgccctgggcaggcttgtgactacttgaccaacagaatacagcagaagtggtgcttgtcagtttcc

SEQ ID NO: 978403 - DNA, 120 bp, Artificial Sequence
  ENSG00000253955_11 (sequence is synthesized)
aggcctgggctttttagagggtggcagttcacttcacctctcttaggacactctctgggagcttgaagctgccatgtaatcaactgccctaataccaccaggttgctgaaaccatgttca

SEQ ID NO: 978404 - DNA, 120 bp, Artificial Sequence
  ENSG00000253955_12 (sequence is synthesized)
ggagctctgtttgtggtcctagctgagcccagccttgcagccagcccccaccagccaatgtcaccagacatgtaagtgaagccatcctgggatctctagaccagcccagcacacctacag

SEQ ID NO: 978405 - DNA, 120 bp, Artificial Sequence
  ENSG00000253955_13 (sequence is synthesized)
gctgattaccatggagtgacctccgttggcaccacattcatcaagagaatcaaccagctgagtcctgcaaatccaaatccacacaactgtaatatgataaagtatctaactttgggggta

SEQ ID NO: 978406 - DNA, 120 bp, Artificial Sequence
  ENSG00000253955_14 (sequence is synthesized)
gacttcccatgggcagggtggagtgctgggagcattgattcaattcttcccttgagcactcttcacccccatctctctccagaaatgtaccgagagtctaactgctctatactctgggag

SEQ ID NO: 978407 - DNA, 120 bp, Artificial Sequence
  ENSG00000253955_15 (sequence is synthesized)
gaacacgaacatgattccacctcagttccaagctttctgagaaccatcctgggaaccagcaagcatgacaactctccaccttctgcatcagtcacttgcaaggaggccagtgggcacagt

SEQ ID NO: 978408 - DNA, 120 bp, Artificial Sequence
  ENSG00000253955_16 (sequence is synthesized)
tcatgctactgagtgagatggcgcccagaggccaaggccaagggcagggctgcattttctggttcttttatatttgtagcaagatactcttagtggaagagcccaatatctgggcttgcc

SEQ ID NO: 978409 - DNA, 120 bp, Artificial Sequence
  ENSG00000253955_17 (sequence is synthesized)
taaaagtctccttagctagatcattcaatttatgagctttccatcttgttgcagtgttgcttaatttctgcctctccataacaagaatcacctttcttccagtctctaatgcattgttct

SEQ ID NO: 978410 - DNA, 120 bp, Artificial Sequence
  ENSG00000253955_18 (sequence is synthesized)
cactttcctataaaccctcaccaacattctcctcccactactggcttctccagtgccctttaggctttctctgacactttcttcaaagtcctttcagcttctgccctctgctcagttcca

SEQ ID NO: 978411 - DNA, 120 bp, Artificial Sequence
  ENSG00000253955_19 (sequence is synthesized)
aagacgctcccacattggtaggtttatgttccatcagcaccccacttctggtactaagctttatatcagctatctactgttaggcaacagccaaaacttagtgacttaaaacagacacaa

SEQ ID NO: 978412 - DNA, 120 bp, Artificial Sequence
  ENSG00000253955_20 (sequence is synthesized)
acatatattatctttcacagtctctgtgagtcgggaattcaggaacagcttagctgggtgttctggctccaggtctctcatgaggttgcagtctagatatgagctgggacagtggtcatc

SEQ ID NO: 978413 - DNA, 120 bp, Artificial Sequence
  ENSG00000253955_21 (sequence is synthesized)
tgaaggctggaatgaggctggaggatccacttccaaggtggctgactcagatggttggcaagttggtgccggctgcggcaaaggccttgttttctctccaggtggacctctccacaaggc

SEQ ID NO: 978414 - DNA, 120 bp, Artificial Sequence
  ENSG00000253955_22 (sequence is synthesized)
tacttgagcagcctcacaacatggtagctgcttccccagggcaagtgatccaagagcaaaggttgaagtcacaatgcccttatgacttagccttggatgtgacacaccatcacttctgca

SEQ ID NO: 978415 - DNA, 120 bp, Artificial Sequence
  ENSG00000253955_23 (sequence is synthesized)
agtttgtaagagcaacacgccatgagataatattcgtgcaaatgtaactgacaaaagactaacatcccataatactagagcacctacaaaccaagaagataaacatcccattgggaaagt

SEQ ID NO: 978416 - DNA, 120 bp, Artificial Sequence
  ENSG00000253955_24 (sequence is synthesized)
gtaaaaatatgaacataaagtttacagaagaaaaaacacaaatggctcataaacacacaaaaagatgatattgcttcctggtaattggggaaatgcaaacaaaaactacaatgaaatatc

SEQ ID NO: 978417 - DNA, 120 bp, Artificial Sequence
  ENSG00000253955_25 (sequence is synthesized)
gtggtatcgtgtatcaaatttgcagagcataaaatagattacattcgcaaccagcaactacaacccaaccttcagcctcactggacttcttgccattccccaaaccatatccacgcccct

SEQ ID NO: 978418 - DNA, 120 bp, Artificial Sequence
  ENSG00000253955_26 (sequence is synthesized)
ctccacaggctgttccttctgcctgcatgccctcgatggcaccaagggggatgggcacactaacacaactgctgggaatgggaaagtttcaacctcttgggaataaaatctaacagtatt

SEQ ID NO: 978419 - DNA, 120 bp, Artificial Sequence
  ENSG00000253955_27 (sequence is synthesized)
gcatactccacagctgggccactaccctgcaagaacccctctggctgctgcacaaagctcttctctgcatccttttttatactagtggaaccctggacacagcctgcatatggatcaaaa

SEQ ID NO: 978420 - DNA, 120 bp, Artificial Sequence
  ENSG00000253955_28 (sequence is synthesized)
gggcagtggttataaatatactatggtccatctctaggctagactgtgatgcagtggttaaagccaagtattgcagaagagtgattaagcattcgtgctccaaagccagatagcctaggt

SEQ ID NO: 978421 - DNA, 120 bp, Artificial Sequence
  ENSG00000253955_29 (sequence is synthesized)
ttcaatcccagctttgccacttacttgctgtgtgatcttgtgcaactcacttagcctttctgtgtcacagtttctccatctgtataacggacgataacactagcccctacctcatagggt

SEQ ID NO: 978422 - DNA, 120 bp, Artificial Sequence
  ENSG00000253955_30 (sequence is synthesized)
cattgtgaagagtaaatgaaattaatattgcctatgtcacagagtgatcctcctcaaaatctattagatgaaaaaagaaatttctagaaattatctacatacatattctgatgggatttg

SEQ ID NO: 978423 - DNA, 120 bp, Artificial Sequence
  ENSG00000253955_31 (sequence is synthesized)
tgtaaagaatttaaccaacaaacccatattacacacacatacacacacactcacacagacacactcacacacacacacacgcactcacgtgcgtagaagtagatctaggaagatccatga

SEQ ID NO: 978424 - DNA, 120 bp, Artificial Sequence
  ENSG00000253955_32 (sequence is synthesized)
cacacatgcgaggcaggtgaatggggacattaaaaggaggacttccacgtttaattctgaatggtctattttatttgtgcaatttttaaaaatcaaagcaataaatcactgtaaaagaaa

SEQ ID NO: 978425 - DNA, 120 bp, Artificial Sequence
  ENSG00000253955_33 (sequence is synthesized)
aggtaaattactttaaagctcagaccgtcaggtatcccaaggagagacggcatgcgtgtgagtgtcatgtgtgtgagtatcatgcatgtgagtggttccatccttaggaagaaaaacatg

SEQ ID NO: 978426 - DNA, 120 bp, Artificial Sequence
  ENSG00000253955_34 (sequence is synthesized)
ggaggaacctgcagtgtgcagcctctgtccagacccacctgctgaggggcccaggcaccccaaagtataccctaaatatgatcagatccagggagcattgtgactgagttttcaggttag

SEQ ID NO: 978427 - DNA, 120 bp, Artificial Sequence
  ENSG00000237807_0 (sequence is synthesized)
atattgactcatggctaaatataatatagacaaaaccagcatagatccagccctgtttaatggcttattgcaaaaaagccaaaagtgaaagtaagagcagctttgccagcagacacagag

SEQ ID NO: 978428 - DNA, 120 bp, Artificial Sequence
  ENSG00000237807_1 (sequence is synthesized)
ttaaaaggggagtcccagagacagcaagagaagccagttgtacaggaactgccaaaggcaacagaaattctttctccctatgtcccagcctacccccactttaccgaggccaacagccgc

SEQ ID NO: 978429 - DNA, 120 bp, Artificial Sequence
  ENSG00000237807_2 (sequence is synthesized)
ctcagaaaccagattcaggagctaacatgccccaggtctcacgaggatcagagactccagaggccagggaaggagatcaaggtagtcaagcgggggtcgtctcagatctggttgtgctcg

SEQ ID NO: 978430 - DNA, 120 bp, Artificial Sequence
  ENSG00000237807_3 (sequence is synthesized)
agctatgcaaatgcctctcacggagatgcgaggacctatctattatgatgaccagggccacatccggagggggcaacagactttcatctatcagcccttttcaaccactgatctactaaa

SEQ ID NO: 978431 - DNA, 120 bp, Artificial Sequence
  ENSG00000237807_4 (sequence is synthesized)
ctggaaacactctgaaccctgccatcttgctcctggtatcagagagccctgtcgtgcataactgtgtagaagtgttggactcggtttactccagcagacctgatctccgggaccagcctt

SEQ ID NO: 978432 - DNA, 120 bp, Artificial Sequence
  ENSG00000237807_5 (sequence is synthesized)
tgctccaaggcacttcagcccagaaagatgagctcattgctttaatttgggccttagaactcagttaagttgcaggtgttatgtcttggatccaccaccatcggctaacaccatcagctc

SEQ ID NO: 978433 - DNA, 120 bp, Artificial Sequence
  ENSG00000237807_6 (sequence is synthesized)
gggacaggtaaaccagccagcaagacccagatatccaacccggctaatcctgagatgagaccaagctgctgctgaggacaacagccctgctctggttactctggaggctgaccagtctat

SEQ ID NO: 978434 - DNA, 120 bp, Artificial Sequence
  ENSG00000237807_7 (sequence is synthesized)
gtacggctgaagcttgaagaaacaataagccctgcattagtcatacaccagaagctgagtagtctaagcatggctgaagcttgaggacttgtcaagcaaataatgtagttagaaatctta

SEQ ID NO: 978435 - DNA, 120 bp, Artificial Sequence
  ENSG00000237807_8 (sequence is synthesized)
ggactagtggttttcctgtatactaactgttttactattgttctgtcactgtgctcaatctttttctcaggtaaggacctcttttgtccttgctggatataaatatgctgtacattgctt

SEQ ID NO: 978436 - DNA, 120 bp, Artificial Sequence
  ENSG00000237807_9 (sequence is synthesized)
tgttgttgttaccccccttaactatgctaaaagaaacacctatagaaaggtgtccccactgtacacatactacttggtcaaggaacccaaacccgtctggcccagcaacaattctgagcc

SEQ ID NO: 978437 - DNA, 90 bp, Artificial Sequence
  ENSG00000237807_10 (sequence is synthesized)
aggaacccaaacccgtctggcccagcaacaattctgagcctttaagtcattctctgagcatataaactagaagttaccagagcctcctcc

SEQ ID NO: 978438 - DNA, 120 bp, Artificial Sequence
  ENSG00000237807_11 (sequence is synthesized)
cagaaagatgagctcattgctttaatttgggccttagaactcagttaaggccttctacggtcccaggctttctgctgcatacactgaagggccacgaagtacagtcatctggacttggca

SEQ ID NO: 978439 - DNA, 120 bp, Artificial Sequence
  ENSG00000237807_12 (sequence is synthesized)
cctggaatacaaggatggaaagcatcatttctgccagcttcttatggtcctgaggcgagacagtcatgagagaggaaaactgcaatgacttctgaccactgccagcctcgcttcctgcat

SEQ ID NO: 978440 - DNA, 120 bp, Artificial Sequence
  ENSG00000237807_13 (sequence is synthesized)
tttcttcttcggcttactcttgccaagttggagttgcctaacttccaagagggtatttgctcttttttttttctcactccacaaactcttcccaggtagttcagtccactcccatctacc

SEQ ID NO: 978441 - DNA, 120 bp, Artificial Sequence
  ENSG00000237807_14 (sequence is synthesized)
agtcactatacgccgatgaatgccaatattattatttccagcttagacattgttcttggattgcagatgtgaggtttgacttgtttactagacattgctggctgaggatccctagcataa

SEQ ID NO: 978442 - DNA, 120 bp, Artificial Sequence
  ENSG00000237807_15 (sequence is synthesized)
catggcccaaattcaatttatttccaaagctgtctcatctcctttgttctctgtaatgatgttgctatccattcgatcaacatactcagaaatatcaccccctccttccttcttccaaga

SEQ ID NO: 978443 - DNA, 120 bp, Artificial Sequence
  ENSG00000237807_16 (sequence is synthesized)
taagtgagttgctcacgacatgatcatgttttggcagtgtactctgtccattcccatcacttagtaagaatcatctaggttatgctgaagtatgaagttaatctccaaatttctctggct

SEQ ID NO: 978444 - DNA, 120 bp, Artificial Sequence
  ENSG00000237807_17 (sequence is synthesized)
cagtacagaaaaagtccatttctcccttctgcaatgcacccaatgcaggtctgcagggtctctgctgtgcgttgtccctcagggactcaggctgaagaggcccccttgtcttatctggcc

SEQ ID NO: 978445 - DNA, 120 bp, Artificial Sequence
  ENSG00000237807_18 (sequence is synthesized)
acctcctctgcacatggctcaggattttccaggcaaggggttgagcagaggcttttcagtgctgggcctggatgtgacataagatgcttctgctcacagccttgtggtcagaacaagtca

SEQ ID NO: 978446 - DNA, 120 bp, Artificial Sequence
  ENSG00000237807_19 (sequence is synthesized)
catcatccctcctacttgcaggggtgctgggcagcgtagtcatccacagatcaggagagggagcagaggcaggtgttcccgggctgcagcgatctccactgcactgctgtgggctgaact

SEQ ID NO: 978447 - DNA, 120 bp, Artificial Sequence
  ENSG00000237807_20 (sequence is synthesized)
gtgccctccaccccaccaagcttatatgctgccagcctcaccctccacaccttagaatgtggctgtatctcgacatagggtccttacagaggtagttaagttaaagcagggtcattaggg

SEQ ID NO: 978448 - DNA, 120 bp, Artificial Sequence
  ENSG00000237807_21 (sequence is synthesized)
tgggccctaaggtactctgactggtgtttttatgagaagaggagattaggacttacagggagagacactaggtatgtgagcacacagagaaaagaccatgtgaagacgagaagaaggcaa

SEQ ID NO: 978449 - DNA, 120 bp, Artificial Sequence
  ENSG00000237807_22 (sequence is synthesized)
ctgtctccaatccagacggagatgccaggcacagcccttctgtcacaaccctcagaaggaaccaaccctgccgacaccttggccttgtacttctggcctccagaaccgcaggaaagtaca

SEQ ID NO: 978450 - DNA, 120 bp, Artificial Sequence
  ENSG00000237807_23 (sequence is synthesized)
tttctgttgcttaggccgctcagcctgtggcactttgttacagcttctcacccagttcaggcccttttaattgattgctgggcctttgcagttgtttttgcttctaatatattcatctct

SEQ ID NO: 978451 - DNA, 120 bp, Artificial Sequence
  ENSG00000237807_24 (sequence is synthesized)
caatttatttctggaggctgccacccgaggggcagaacttcaattgtgtccctaatgggaaaccttgctgggatcatgtggtctacagcacaaggttgctaaagcatcttctgccagaat

SEQ ID NO: 978452 - DNA, 120 bp, Artificial Sequence
  ENSG00000237807_25 (sequence is synthesized)
tctgtgagtatctggttaggtgggtctggaatatactgagtttaaaaaagttaaataggtttctttactgcaagatgtttcagagactttaatatgctactctgctgtatgaatctccag

SEQ ID NO: 978453 - DNA, 120 bp, Artificial Sequence
  ENSG00000237807_26 (sequence is synthesized)
gcaggaaatcttataaaatgtgtttctgaaatgaatttgcacataagaccctgttttcttggagcctctgatagtgggtgaatgcccaatctctagtgggacttgcaagactttgcaatt

SEQ ID NO: 978454 - DNA, 120 bp, Artificial Sequence
  ENSG00000237807_27 (sequence is synthesized)
gggcagacatatttcttttcaccttatctccctctgtctctatggagatactcccatcgcatcaaagttcttcttattacttacacatggggtggcagctgtgacatgcacccatcacat

SEQ ID NO: 978455 - DNA, 120 bp, Artificial Sequence
  ENSG00000237807_28 (sequence is synthesized)
ctccctccaagagaccctacaggggagcacagttggctggcagctcccggtgtctgcgcctccaggcccactgctcccttgggcggctcccagtcagtggcaaggtagcggggttctgga

SEQ ID NO: 978456 - DNA, 120 bp, Artificial Sequence
  ENSG00000237807_29 (sequence is synthesized)
gctcctctaagaggcaaacttctcagagactccactgtggctctgctgaggctgagaactgtgcttttggtctgagcgcattctccccattctccttcctgcccccgctccttgcgccgg

SEQ ID NO: 978457 - DNA, 120 bp, Artificial Sequence
  ENSG00000237807_30 (sequence is synthesized)
ccttagaccagctagctgtctgcaggctttccctgcccacggctgcccctcctttccccttcacagccgtttccgcccacatgcgccgtgcatggttaatcgcaccgtgccatccacttc

SEQ ID NO: 978458 - DNA, 120 bp, Artificial Sequence
  ENSG00000237807_31 (sequence is synthesized)
tctgaggacctgagttagcacacaaagtatgttcgttccctgtgtcctcacctctccctgatgtatcttctcccttcctctgctggctgtctgttgggaatcttgggaaaggaatttgtg

SEQ ID NO: 978459 - DNA, 120 bp, Artificial Sequence
  ENSG00000237807_32 (sequence is synthesized)
agtaatgttccaggcagcctagcttttagggtgaatgactggttctgacttatgtcaatacatccttgagtcatgccaagaactgtgggatgatcaaggaccacggaccagtgtcctgga

SEQ ID NO: 978460 - DNA, 120 bp, Artificial Sequence
  ENSG00000237807_33 (sequence is synthesized)
agcatcgatggctccaagctgctggcaccactgtccttggaattaccgagtgtgatttttagagttacgggcacatttctcaggccccataaatgtgatggatggtgaattacaggactt

SEQ ID NO: 978461 - DNA, 120 bp, Artificial Sequence
  ENSG00000237807_34 (sequence is synthesized)
ttgagtatatagtgagtggactacaattgtgctgtatgtagcccactgctttgtgcgtgaggcgattttaggccattgaaggagttcagctgtcctccatatgagtcatttcctagacag

SEQ ID NO: 978462 - DNA, 120 bp, Artificial Sequence
  ENSG00000237807_35 (sequence is synthesized)
tgtactctgcaaaagcccaaataacttcacaaatgtaacagtttaagctcttatcagccatgtataccacactgagatgagtatatcatatttcacataatataaaatagaagtaacatc

SEQ ID NO: 978463 - DNA, 120 bp, Artificial Sequence
  ENSG00000237807_36 (sequence is synthesized)
atacatttcactcttatttctccttctggaagccaccatgccctaactcattctctttctaaatttcaaaacatccaaacatttcccagcttattttatttgcaacacaaactagcattt

SEQ ID NO: 978464 - DNA, 120 bp, Artificial Sequence
  ENSG00000237807_37 (sequence is synthesized)
ttctttttattcataagctaaaaactttatcactgaaatcattttatactgccacgtatcattcttcactctctcaatacagtgctcttctcattggttagtcaatagtttataagagtt

SEQ ID NO: 978465 - DNA, 120 bp, Artificial Sequence
  ENSG00000237807_38 (sequence is synthesized)
ccatatttttatctttggttgagatgtattaattgattagagatacttttacaattgtaattaaaaagtttaatcattaaatttaatgagacaggtatacggaggttcagaagaaatgta

SEQ ID NO: 978466 - DNA, 120 bp, Artificial Sequence
  ENSG00000237807_39 (sequence is synthesized)
aggaagtgagacaagaagagaaagggaggttacgaaaagtgagattaggaaaataaacggaagaccacgttgatactgactggaaaacgtggaaggtttactaattaatcagtgctaaca

SEQ ID NO: 978467 - DNA, 120 bp, Artificial Sequence
  ENSG00000237807_40 (sequence is synthesized)
tgaccacaaagcatatgttactatttttactattggaacccaccgttaagtagtcaaagttgcaggataaagtgtctgaaaacatataaaacagataaaatgatgaaagtgtaaacaggt

SEQ ID NO: 978468 - DNA, 120 bp, Artificial Sequence
  ENSG00000237807_41 (sequence is synthesized)
acatcttttctgaaggcagtttggtgtgcactaaagtgcagaatataccttgcaattctactcccatgaatataacagaaagtaattactgagttgggagcggtggcccatgcctgtaac

SEQ ID NO: 978469 - DNA, 64 bp, Artificial Sequence
  ENSG00000237807_42 (sequence is synthesized)
taaccccagcactttgggaggcctaggtgttctctcctaaaactacaaaaattagccgggcatg

SEQ ID NO: 978470 - DNA, 69 bp, Artificial Sequence
  ENSG00000237807_43 (sequence is synthesized)
atcccagctactaaagctgagagatcgcaccactgcactcccgcctgggtgacagagtgagactctgtc

SEQ ID NO: 978471 - DNA, 120 bp, Artificial Sequence
  ENSG00000237807_44 (sequence is synthesized)
tgtctcaaaaaaaaaaaaaaaaaagtgcaaggatgtttattacagtatagtaaatcgcaagcaggaaaatcctaaatgtattatgttggtactaaagtaattgtggtctttgccgttaaa

SEQ ID NO: 978472 - DNA, 120 bp, Artificial Sequence
  ENSG00000237807_45 (sequence is synthesized)
ccgttaaaagtagtaaatccatggagaatgggttaaataaatgatagtttatgtatacacacaaataccatgtggctggtaaaaatgatggtgtaaattatatttacagactgataaacg

SEQ ID NO: 978473 - DNA, 120 bp, Artificial Sequence
  ENSG00000237807_46 (sequence is synthesized)
taaaaagtatctgggacatagcattattgaaaagaaagcaggctagtgaatactataattattttgtaaaagtctcttatggacataagttatatatttacatggccatattttgcacag

SEQ ID NO: 978474 - DNA, 120 bp, Artificial Sequence
  ENSG00000237807_47 (sequence is synthesized)
gaaatatgaaaaagtatatatatcaaacagtaatggcttatttttatcttctgggagttttgcaggtgcttccctctttacaccattatatgtcatctgaagttttgttctgattctgta

SEQ ID NO: 978475 - DNA, 120 bp, Artificial Sequence
  ENSG00000237807_48 (sequence is synthesized)
ttatttcatttctaaaagaaaagccccaaaaccaagtgctgttttcctggtctgtggaaacagagtctccgaggaattaggctagacatggtaagaacaaagttctgttgtgataaaagc

SEQ ID NO: 978476 - DNA, 120 bp, Artificial Sequence
  ENSG00000237807_49 (sequence is synthesized)
tttggcctgaggttccaaccattaagtttgccagctcagacttgatcttgaatgaaggcggggttctgtgactggagaccatttctctccttttgtatttgttggtgtgtccaaaaacct

SEQ ID NO: 978477 - DNA, 120 bp, Artificial Sequence
  ENSG00000237807_50 (sequence is synthesized)
cagatctcccagcttcaggcttctttgagggcagtgctaaattggttgaaaccttatttgaggcagttcctgaaaagggtaggtgaaatttcctgctgataaaaggcatcttgtgtcttg

SEQ ID NO: 978478 - DNA, 120 bp, Artificial Sequence
  ENSG00000237807_51 (sequence is synthesized)
ttcatccttagcaaattgccaattagcaaagaagagagggcagatgaagtaccagccaatttgaaattggtgtggacttccatcaaggtatattaattcactttacctagatgattcgaa

SEQ ID NO: 978479 - DNA, 120 bp, Artificial Sequence
  ENSG00000237807_52 (sequence is synthesized)
attagttgcttttttcttttaatcctaaaaggataattttcttcatgttcttcttgtcatgtcagccaaatcctatagtgtcaactttcagtaaatgtatcttagatataactatggacc

SEQ ID NO: 978480 - DNA, 120 bp, Artificial Sequence
  ENSG00000237807_53 (sequence is synthesized)
actctattggagtgcatgttacagaaccttaagaaaggttttggaggggattatagagttaagttaaccccccagaggttgagaactctctgtgaattaaaattgccttcttttggtgtt

SEQ ID NO: 978481 - DNA, 120 bp, Artificial Sequence
  ENSG00000237807_54 (sequence is synthesized)
acccataggggacccaaagggacccatagactcccagagacctggaggatgcaggtatcatgtggtcattgccacagaaccatgatgtgttaggaagatggcagaagactgtggaagatg

SEQ ID NO: 978482 - DNA, 120 bp, Artificial Sequence
  ENSG00000237807_55 (sequence is synthesized)
tgcatttttttaaataacaaggacaggaaactcagggaatatctggataaagcagggattggcctgggatgttccagatgaagacagggctgcaggcttgccaaaggacccccccgtggg

SEQ ID NO: 978483 - DNA, 120 bp, Artificial Sequence
  ENSG00000237807_56 (sequence is synthesized)
gatggtggtcctttggatcaagttgtggtccaggtacaagaggcacatcatcaggattctccccacagtggaggcctccaggagaccagagagaggttcttcttttgacttacatcacca

SEQ ID NO: 978484 - DNA, 120 bp, Artificial Sequence
  ENSG00000237807_57 (sequence is synthesized)
tcttaaaaaacagcactattacccaaaggacaaattagcagagaagaggaatgagttgtgcacattggcactgtgtcaacttggaacgaaggggagcacggatattgttcacaatatacc

SEQ ID NO: 978485 - DNA, 69 bp, Artificial Sequence
  ENSG00000237807_58 (sequence is synthesized)
ttggaacgaaggggagcacggatattgttcacaatataccccaaaccaaatcgtcattaaaaacaaaag

SEQ ID NO: 978486 - DNA, 120 bp, Artificial Sequence
  ENSG00000237807_59 (sequence is synthesized)
ccgggaggtggagcttgcaatgagaccagacgagatcaagccgctgcactccagcctaggccacagagcgagactccttctcaaaaaaaaagaaaaaaaaaagcaccaaaagaaaaaaag

SEQ ID NO: 978487 - DNA, 120 bp, Artificial Sequence
  ENSG00000237802_0 (sequence is synthesized)
actcagccatcccggttaccggtggcaggatgatttcctttcatcccaacctttatttccacagtgaaatcatcatgaaggagcactgtgttggcatcctcggctacagggtgtctcatt

SEQ ID NO: 978488 - DNA, 120 bp, Artificial Sequence
  ENSG00000237802_1 (sequence is synthesized)
ggttttggcaggattgctgagttggagtctcactgtgtcatccaggctgcagtcaagtggcaaactctcagatcactgcaacctctccctccagcttcaaaggattcctctgcctgctga

SEQ ID NO: 978489 - DNA, 120 bp, Artificial Sequence
  ENSG00000237802_2 (sequence is synthesized)
tgctgcttttcccccacatgaggagaacatgcagacagttataaaaaattctgtgcctggggtactctcgctctgtagaccaggctggagcgcagtcgcaggatctcagctcaacacatc

SEQ ID NO: 978490 - DNA, 120 bp, Artificial Sequence
  ENSG00000237802_3 (sequence is synthesized)
gtgatggatttgcaggtggaggaactcagccatcccggttaccggtggcaggatgatttcctttcatcccaacctttatttccacagtgaaatcatcatgaaggagcactgtgttggcat

SEQ ID NO: 978491 - DNA, 120 bp, Artificial Sequence
  ENSG00000237802_4 (sequence is synthesized)
gtatttttagcagaagccaggcttcaccatgttggccaggctgctctcctactacagatctcaggtgacccgcccgactcagcttcccaaaatccaaagtgctgggaatacaggtgtgag

SEQ ID NO: 978492 - DNA, 120 bp, Artificial Sequence
  ENSG00000237802_5 (sequence is synthesized)
actccagtactttttacctaagccagtggacgagtggagttgcctttatttttttttttttcttttttcagtcatggtctcgctgtgtcatccaggctggagtgcagtagtctgatcttg

SEQ ID NO: 978493 - DNA, 76 bp, Artificial Sequence
  ENSG00000237802_6 (sequence is synthesized)
cgctgtgtcatccaggctggagtgcagtagtctgatcttggcttactatacaatctctgccacccatgttcagaag

SEQ ID NO: 978494 - DNA, 120 bp, Artificial Sequence
  ENSG00000237802_7 (sequence is synthesized)
cagctttttgccatgttgcccatgctggtctccaactcctgacctcaagtgacccaccaacctcggcctcccaaaatgtagaaattacaacaagagccacgaagcctggcctggagttgt

SEQ ID NO: 978495 - DNA, 120 bp, Artificial Sequence
  ENSG00000237802_8 (sequence is synthesized)
ggctttttgacataagaaatctgtggagggaaaagcttggtttgtgggagcacccgagctcagtttggctcaaaggtttgggatacctattattgagtggcagtgatggtatgttgttaa

SEQ ID NO: 978496 - DNA, 120 bp, Artificial Sequence
  ENSG00000237802_9 (sequence is synthesized)
tgtacaatatgttcctgtatatagcatacgtctatgctcatcagatattttcaggtaaaaaaaagatagtctttccagtagtttgagccattatagcaatttccaccaggggatttcaaa

SEQ ID NO: 978497 - DNA, 120 bp, Artificial Sequence
  ENSG00000237802_10 (sequence is synthesized)
tgagacgtccagccacgtttccatgtcagtgccttgtttgcagtattatgaagaaagagtgcattggactagatactaagaaaaacattgaattatttttcttgcctctataacatcaaa

SEQ ID NO: 978498 - DNA, 89 bp, Artificial Sequence
  ENSG00000237802_11 (sequence is synthesized)
tttaaccatgtacaaagtttgttacctatgcaaaggtaggactgcaaaaggaagacagaggtggagtcagaggtcacaatccacagcaa

SEQ ID NO: 978499 - DNA, 120 bp, Artificial Sequence
  ENSG00000237802_12 (sequence is synthesized)
ggaagacagaggtggagtcagaggtcacaatccacagcaaggtgacactcttgttgatcgcaccttgaaagccaaattagagcgagaattaactttccggttgccgtaagagaacaagga

SEQ ID NO: 978500 - DNA, 120 bp, Artificial Sequence
  ENSG00000237802_13 (sequence is synthesized)
gaatgaagctaccagcagttaacagtattggattaattgaaatgaaggtggacagagttttttggctttccatcaaattgagtaaagaaaaggtaaccgcttatctaatttcacacacat

SEQ ID NO: 978501 - DNA, 120 bp, Artificial Sequence
  ENSG00000237802_14 (sequence is synthesized)
acaattatggattaattaaaagattacacaacccatatattatgggtttctcatataagtgtatatatacatgggcaaactcacagtgtgccagtatgtgtctatatccaaatatataca

SEQ ID NO: 978502 - DNA, 120 bp, Artificial Sequence
  ENSG00000237802_15 (sequence is synthesized)
aatccatgtccaacagttagcaagtgagaaattctcttccatttcaccattccctttcctagaattttttcataaatataatttttccatatatttgaagcctactctctggaggcatgt

SEQ ID NO: 978503 - DNA, 120 bp, Artificial Sequence
  ENSG00000237802_16 (sequence is synthesized)
aatgcatgcatgcagtaaacctgtgcgatatcacaatgttggtgtcagagaaaactataacaccgatgttataaaagattaattgtgaggagaaagttatgcttcgcattactacaaata

SEQ ID NO: 978504 - DNA, 120 bp, Artificial Sequence
  ENSG00000237802_17 (sequence is synthesized)
atcagtcaatataatttgtttttaatgttttatttaaaatccttaatttcaacaggattactcaagaaaaataacgttattggtattaaataatgttgatgtattccctttaattgttga

SEQ ID NO: 978505 - DNA, 120 bp, Artificial Sequence
  ENSG00000237802_18 (sequence is synthesized)
atgttgatgtattccctttaattgttgattatttaaaatgtcagtaaaatagtaaatggcactgtacaatgtagtttcatgaagcattctttatagttttcataaaattgatagtctcca

SEQ ID NO: 978506 - DNA, 81 bp, Artificial Sequence
  ENSG00000237802_19 (sequence is synthesized)
gaagcattctttatagttttcataaaattgatagtctccatggaatattttaagactgaggaagttccatatatcatttga

SEQ ID NO: 978507 - DNA, 120 bp, Artificial Sequence
  ENSG00000237803_0 (sequence is synthesized)
tggagattcagagacgtccttcctcaagaaggaacctctgcctggccttcagcagggccactgtcatgtgcgatattcacttagagccttatcacatttgtggctgtagaggtgtttgcg

SEQ ID NO: 978508 - DNA, 120 bp, Artificial Sequence
  ENSG00000237803_1 (sequence is synthesized)
tgccttgtttaatttatcccactagactgcctttcgaacggagcccggggaggacaggctggcagaggagggaggagggtttctagctgagagagactgcggctgtgggcctgcagccta

SEQ ID NO: 978509 - DNA, 120 bp, Artificial Sequence
  ENSG00000237803_2 (sequence is synthesized)
ttctggcctgattgctccctctcctgacccctaagcgtagttacctactcaggactaaaacaaaacaatccagaaagaatgctttctaagaataaagaaaaacaaaacaaacgcctgatg

SEQ ID NO: 978510 - DNA, 120 bp, Artificial Sequence
  ENSG00000237803_3 (sequence is synthesized)
aagatcaaagtctctacatggcatggaaggaccctaaccaccttgcatgaacctgcaaaggatttgatgctagtgacatctgatgagctctagggccatgggtaaatccctgaatcacag

SEQ ID NO: 978511 - DNA, 120 bp, Artificial Sequence
  ENSG00000237803_4 (sequence is synthesized)
ggagcaccatctgtaaagcagtgataatgatacattttttcatttgtaaagtgatgatttaaaaaaatatcctacctcatggtatcttcatgaaaatgaaacaagataatgaatgaaaaa

SEQ ID NO: 978512 - DNA, 120 bp, Artificial Sequence
  ENSG00000237803_5 (sequence is synthesized)
ctcattagaagccagcttcccctggaaaacaaccacattctgctctactttctcatgtctatgtggccctccctgagtgggaaggcttaagttttgtaagattcatcataagtgtggtga

SEQ ID NO: 978513 - DNA, 120 bp, Artificial Sequence
  ENSG00000237803_6 (sequence is synthesized)
gtgatatttcctaattccagggaatggagctagtcatgccacacatctttgctgttttcacgaactgagattcttcttatgttgctattttaaactcctgaactcaagtgatcctcctgc

SEQ ID NO: 978514 - DNA, 120 bp, Artificial Sequence
  ENSG00000237803_7 (sequence is synthesized)
ggattacaggtgtgagacactgcaccctgcccaagcacctctgctccgtgccatgctcttggctaattggagttgtgaaaggcatgaggattctggtcatggactcagctctcccatagg

SEQ ID NO: 978515 - DNA, 120 bp, Artificial Sequence
  ENSG00000237803_8 (sequence is synthesized)
tcagctctcccatagggttctgacaccaaagcaatggtcacaacagtgaaaggaagaatccatctggccaggctcaggtggttcaaggccttcagaatctgccttgagactctcactggc

SEQ ID NO: 978516 - DNA, 120 bp, Artificial Sequence
  ENSG00000237803_9 (sequence is synthesized)
tttagactgaaaaccatcttggccccgtccatccgtgtaagcaatttaacgacagcttgcaaagcaccgagctttaacagaaagaagagatgagcacagcgcaagaacttggactccaga

SEQ ID NO: 978517 - DNA, 120 bp, Artificial Sequence
  ENSG00000237803_10 (sequence is synthesized)
agagctgcctaacagattatttttctgtggcatttcatgagaacaaacgaagtaggaattttccttttgtttgtctggcctttggcatcgtttactttctttttattcttctgaaatgta

SEQ ID NO: 978518 - DNA, 120 bp, Artificial Sequence
  ENSG00000237803_11 (sequence is synthesized)
cttcgagccctggcagcatttctgtcctaaaatcttattgtcagaggtttatttttcagcttttcaaatcatatctgatagagtgagtgtactgcctggactcatcactttacttcagaa

SEQ ID NO: 978519 - DNA, 120 bp, Artificial Sequence
  ENSG00000237803_12 (sequence is synthesized)
gaaatacagctcaccctttaaatgacaatggtgactgtccacatctttatgttttctacactgaagtggcaggcttcatttaaaaataatgttttccctcatcaaaagagagctagggta

SEQ ID NO: 978520 - DNA, 120 bp, Artificial Sequence
  ENSG00000237803_13 (sequence is synthesized)
ccgtcaactctgctgttgtctgggtagtgacctaacacccacgttttggacaatcactcactgtcttatattgggttttcattgcatgtaggataattctttgtcaatggtagttttgtc

SEQ ID NO: 978521 - DNA, 120 bp, Artificial Sequence
  ENSG00000237803_14 (sequence is synthesized)
aaccgtgatctgaggtaatgaggttttctacttttgcttgaaattttgaaaatatgcaagctttaaacatttgcaaagttggattctgttttctttagaaagcaatctgatttgctgata

SEQ ID NO: 978522 - DNA, 120 bp, Artificial Sequence
  ENSG00000237803_15 (sequence is synthesized)
ttctctccatctgtcaggggatgcgtgatgtggtgtagacttaatgtgctgcctttctggaacatggacagagtagcagcacagaaaaatgagcatttcagctctgtgatgatttgtgaa

SEQ ID NO: 978523 - DNA, 120 bp, Artificial Sequence
  ENSG00000237803_16 (sequence is synthesized)
aaaaaatctcagatcattgagcaggcattttgctgacacctgtgaaaagtaaccacatgagagagcatggcgtgatggtcggaggccacgtgctggagctggactgcttgagtcaaatcc

SEQ ID NO: 978524 - DNA, 120 bp, Artificial Sequence
  ENSG00000237803_17 (sequence is synthesized)
cagctgctcagctgtagtgaactgaatggtggtccccaaaagatacatgtatctcctaatccctggaacctgtgaatgtgaccttattaggcaaaagggtctttgcagatgtaattacat

SEQ ID NO: 978525 - DNA, 120 bp, Artificial Sequence
  ENSG00000237803_18 (sequence is synthesized)
tgaggctctcagagatgagaacatcctggattatcagggtgggtcctatatccaatgacaagtgtctccttataggagacagaagaagttgcagacccggaagagactaagtaaagatgg

SEQ ID NO: 978526 - DNA, 120 bp, Artificial Sequence
  ENSG00000237803_19 (sequence is synthesized)
aggcagagactggagtgaggctgctgcaggccaaaaatgcctggtgccagcaaaagctggaagaggcaaggaaggacctttccctggggcttttggagggagtgcagccctgctgatgcc

SEQ ID NO: 978527 - DNA, 120 bp, Artificial Sequence
  ENSG00000237803_20 (sequence is synthesized)
ttagtgttggatatctgggctatggaactatgagagagaaacttctgttgttttaagccacctagtttgtggtactctgttatggcagccacaggaaactaatacactctttaccacctg

SEQ ID NO: 978528 - DNA, 120 bp, Artificial Sequence
  ENSG00000237803_21 (sequence is synthesized)
aataaggaagctgggattcagagaaattaagggacttggtgaagcagagaatgccaagggaattgattcagtagtggacggggagtccctgaagactgttgagcagtgaagagacctgat

SEQ ID NO: 978529 - DNA, 120 bp, Artificial Sequence
  ENSG00000237803_22 (sequence is synthesized)
aaagtacatgcaatggcaagaagatcaactaagaggactcaatgtacaatattccattccagcattgaatttggggtcaatggatgacattcagatgctctactcttgccatgctttcta

SEQ ID NO: 978530 - DNA, 120 bp, Artificial Sequence
  ENSG00000237803_23 (sequence is synthesized)
attttgatttattctatgttaaaattaactaagttaattttaatcaatccctacccttgatgtaaatgtacacttccagcaaggtcctggtttggggagtttgttcatttaacaaatgtt

SEQ ID NO: 978531 - DNA, 120 bp, Artificial Sequence
  ENSG00000237803_24 (sequence is synthesized)
taatgagcacctgctagtttctagcccagtgctaaatgctgagttactgaagtaaaaattgtgttccctccaggagctcccaggctggagggggcagaaaattattacatgcaagcacag

SEQ ID NO: 978532 - DNA, 120 bp, Artificial Sequence
  ENSG00000237803_25 (sequence is synthesized)
atgacttgtaagaatctttgctgatttggatggaaattttctgcccttggaatttggtatctaatccctaaataaaacactttaaagaatgccaattagaaggaataggcaagactaaaa

SEQ ID NO: 978533 - DNA, 120 bp, Artificial Sequence
  ENSG00000237803_26 (sequence is synthesized)
ccaaggagagaaaattacacaaggttgtgaaataccagaaccatggctcgttgtgatccatcctagggagtatttgatgcactgtcctgggcaaatggcagaaataaattccatatcaaa

SEQ ID NO: 978534 - DNA, 120 bp, Artificial Sequence
  ENSG00000237803_27 (sequence is synthesized)
aagaagatcaactaagagattctgatcagctgagaaataagataatgatgcctgtcaaatgagcaaccctcagccttccctccgtctacagctacagggaatgggaagtagccatgagaa

SEQ ID NO: 978535 - DNA, 120 bp, Artificial Sequence
  ENSG00000237803_28 (sequence is synthesized)
gccctggggctgctggatactctgcaaggccatcctcctgtaactaaggtcactgtattgcactgtcaaatccaaacgtatcttagctggaaagacctgcccatcacctatcaacccctt

SEQ ID NO: 978536 - DNA, 120 bp, Artificial Sequence
  ENSG00000237803_29 (sequence is synthesized)
atgccacacatctttgctgttttcacgaactgaggtaatttttatttttatttttatttttttgaggaacagtcttactctgtcacccaggctgcagtgtagtggtgtgatcacagctca

SEQ ID NO: 978537 - DNA, 120 bp, Artificial Sequence
  ENSG00000237803_30 (sequence is synthesized)
ctgcagccttgacctcctgggcttaggtgatcctcccaccctagcctcccatgtagctgggactagaggtatgtgccacctcacctcctttttttcttttctttttcttttttggagaga

SEQ ID NO: 978538 - DNA, 120 bp, Artificial Sequence
  ENSG00000275038_0 (sequence is synthesized)
ggtctttcacgaagcggcggctgctctccatccaggggaaattgagaccgccaaggctggagaccgtgggcacggagggcatggcgggtagcgcgcttggcagaggcggtggcacggccc

SEQ ID NO: 978539 - DNA, 120 bp, Artificial Sequence
  ENSG00000275038_1 (sequence is synthesized)
cgggcagcggcctgtgcgccggcacccggatcacgcctgcgggcgctaggctcaggttcacactgtaagatcccgcgtcctcgaagggcgcgccgaggcccgcaaaggaggcgggcagag

SEQ ID NO: 978540 - DNA, 120 bp, Artificial Sequence
  ENSG00000275038_2 (sequence is synthesized)
acgggtacaatggagttgcaaccccgggacgacccggcggaatccgcagaagccccttggacgctaccgccgccggaggaacgaaaggggcgcactacccggggcaggcttcgcgctgcc

SEQ ID NO: 978541 - DNA, 120 bp, Artificial Sequence
  ENSG00000275038_3 (sequence is synthesized)
tgcgcgcggggcgaggggagcaccgtagcgttctccgcgccccggatgacgccgacccgcgtggggagaattcgcccccgcccgggtttcggccgcggcctcgcggccactttggagaca

SEQ ID NO: 978542 - DNA, 120 bp, Artificial Sequence
  ENSG00000275038_4 (sequence is synthesized)
ctccctggctccggccaggcggaccgaggcgtgactcgcaggtgcccacgcgtgccagctgcggctgggctagggacgcggggtcgcccggtggggagcggggacctgactctcgtaatt

SEQ ID NO: 978543 - DNA, 120 bp, Artificial Sequence
  ENSG00000275038_5 (sequence is synthesized)
cgttgcaggatggaagggggctgtggtcgcgcgtgggaacccgctcgcggctcggcgggtctagggacttcgggttcctgaatgtcaaaggcgcgggcagctcctagagcaaattgcggg

SEQ ID NO: 978544 - DNA, 120 bp, Artificial Sequence
  ENSG00000275038_6 (sequence is synthesized)
atttctttgggaaacgcgactggtgagcccttcccggctccagtccactttgggcgctggaaccactccccgttctgctcgcgcctcagtgactgtctacccggcccagggcaccgtgga

SEQ ID NO: 978545 - DNA, 120 bp, Artificial Sequence
  ENSG00000275038_7 (sequence is synthesized)
caggaccgcacacgaagtagtcaccttccgctgcagctttggggagacaagcggaatcattttcttccagcgaattctaaaatcgttaggtgcaaactctttgagtgtcgcacccctggc

SEQ ID NO: 978546 - DNA, 120 bp, Artificial Sequence
  ENSG00000275038_8 (sequence is synthesized)
ctgggttcttcctcccgctccttgtggtgtggacagtggtgagagctcggatgtgctgttgttggccagaagtgtgttcaaatttggactggccatttcctcgctgagtgaccttgagaa

SEQ ID NO: 978547 - DNA, 120 bp, Artificial Sequence
  ENSG00000275038_9 (sequence is synthesized)
attgactctatatatttagatttcggttttctcgtttgcaaaaaaggaaaataatgcatgcatgcgggttgttcgtgagccgcgagtgagatattgagggagcgcagagcactgggcctg

SEQ ID NO: 978548 - DNA, 120 bp, Artificial Sequence
  ENSG00000275038_10 (sequence is synthesized)
gcacgtagtaggcactgggcagcgtggctcacctcccactctatccccccagagtaatggctgatgtattattgttgtgactcttgtttattttgttggcagtttaattttatttgcagg

SEQ ID NO: 978549 - DNA, 120 bp, Artificial Sequence
  ENSG00000275038_11 (sequence is synthesized)
ggctcagtacgttggagagaaaggtgtatttgtctaccagtagggtcagtttcagaggacggggaaagacaggaggtgcaggttggggattctttctctcttctcccaacaatccaaagg

SEQ ID NO: 978550 - DNA, 120 bp, Artificial Sequence
  ENSG00000275038_12 (sequence is synthesized)
gtgtgaccttgggcaaattcctggcccttgctaagccttcctggtgggtgtggagagggaggcccaacagtgaggagtgagagctgcaggatgtctggggtctgggcaagtgctccctca

SEQ ID NO: 978551 - DNA, 120 bp, Artificial Sequence
  ENSG00000275038_13 (sequence is synthesized)
ctcccttccagcgacaacgaccctcagatggggtagatgccattgccctggctccagggggcctcctgcttctaattcaggctctgccactggcagtgtgggtccctaaccgcccctccc

SEQ ID NO: 978552 - DNA, 120 bp, Artificial Sequence
  ENSG00000275038_14 (sequence is synthesized)
agaaccgcattttccttatttgtaaaacaaaaagggcaccagctacccccagggtggctgtgagaacaaaatgagataacatctgtggcagtgcctgtgtgaaactctggcggttatatc

SEQ ID NO: 978553 - DNA, 120 bp, Artificial Sequence
  ENSG00000275038_15 (sequence is synthesized)
ataataactttaatgacaactataaagctactgtagctgagaccctagcctgtgccaggcagggaggtggacacttatttattcttcacaatgaccctgtgaggaaagggctgttagtgg

SEQ ID NO: 978554 - DNA, 120 bp, Artificial Sequence
  ENSG00000275038_16 (sequence is synthesized)
ccccaatttctcactaatgagggaattgaggctttgagagttcaagggaagcacagctccccacttgggggctggagttggcacctcaccagctccacttcccttctggcttccagtgcc

SEQ ID NO: 978555 - DNA, 120 bp, Artificial Sequence
  ENSG00000275038_17 (sequence is synthesized)
cgggactcagggctgcccttgtcacttcagacactgttaaatcaggacaacaaggcccaccgcacagaggtttgtggcacagaattaaggcgtgggtggcacagcgctgctcccagcttg

SEQ ID NO: 978556 - DNA, 120 bp, Artificial Sequence
  ENSG00000275038_18 (sequence is synthesized)
tgtgcttaagaatgggattcccacctcagtttaccagctgtggactcagggaattattcatcctctttatgcctcagttttctcatctggtaaataaacctcatgggattaaataagcgc

SEQ ID NO: 978557 - DNA, 120 bp, Artificial Sequence
  ENSG00000275038_19 (sequence is synthesized)
cccaggtaaagcctggcacgggtcagggctctgcttcactgcttggcttccggcttcctgagatccacggtccctcatcgtccagccctgtcatacagatgaaggagctttgggccacta

SEQ ID NO: 978558 - DNA, 120 bp, Artificial Sequence
  ENSG00000275038_20 (sequence is synthesized)
attataagcctcctttcacttcctatccagatagctcttaggcagctcaggaatggggggaacttggttagtccctaggacagtggttctcagagtgtgtttccagagcagcagcatcag

SEQ ID NO: 978559 - DNA, 120 bp, Artificial Sequence
  ENSG00000275038_21 (sequence is synthesized)
catcactggagaatttgttagaaatgcaaattattggaccctcgccagacctacggcatcagacactctggggtaggactcggcagtctgtgcttaacaagccctccaggtgattctgat

SEQ ID NO: 978560 - DNA, 120 bp, Artificial Sequence
  ENSG00000275038_22 (sequence is synthesized)
gcctgctcaactctggaagccagtgcccagaatatggtccattccatctgagttttcaaatgtgttgttgtaacattgtgggaagattctctcagaatttgcaactctcatacgaatctg

SEQ ID NO: 978561 - DNA, 120 bp, Artificial Sequence
  ENSG00000275038_23 (sequence is synthesized)
tactaatgccttccacttctcattccccgtgtcgctcattcatgccttctcctgatcatacttgccaaaggtttgttattttgttggtttttaaaaaagcctttgatgtcattatcccct

SEQ ID NO: 978562 - DNA, 120 bp, Artificial Sequence
  ENSG00000275038_24 (sequence is synthesized)
tttaagatgccacctctttcgtgaatgttgcggtttaaaaaaagatttattccttctttgctgagttgaaaatttaatttgtcaattttctttctttttaaataaatgcactcaagggca

SEQ ID NO: 978563 - DNA, 120 bp, Artificial Sequence
  ENSG00000271904_0 (sequence is synthesized)
tcttcattccatggacagcaataagctctccttgcagccaggagtggccatatgatggattctgactaatgagatgcaagctgaagttgctaattgggactcctaaaaacacttttaaaa

SEQ ID NO: 978564 - DNA, 120 bp, Artificial Sequence
  ENSG00000271904_1 (sequence is synthesized)
atcctcagacttcttgatacacaaaaaatttattttcggctaggccatgttaatttggttttccactacttgcagctgactgtactgattatctaaaactgctttataaagttttgtgac

SEQ ID NO: 978565 - DNA, 120 bp, Artificial Sequence
  ENSG00000271904_2 (sequence is synthesized)
tagggggtgggagcaatgatcactaatattcattaagtgaaaggataaatgattgaattgtgtatcttaattgtggtatattctgtacaacatttttacaataaattaatgttgaattag

SEQ ID NO: 978566 - DNA, 120 bp, Artificial Sequence
  ENSG00000271901_0 (sequence is synthesized)
gagtggagggctcttcagcagggcggatactcacgtggataatgccaaacagatcttcgtggtttcaaaaaaaaaaaaaatcagctccaggtcacaaaatcagaaatcatgttacaacat

SEQ ID NO: 978567 - DNA, 120 bp, Artificial Sequence
  ENSG00000271901_1 (sequence is synthesized)
gcatggggtggtagaaaaggaaacaaagagatttgctaaagcattcattttgatgattacacaatttgcagaggagttgtatgaattacagacaatctgcttgctgttagactgggattt

SEQ ID NO: 978568 - DNA, 120 bp, Artificial Sequence
  ENSG00000271901_2 (sequence is synthesized)
tgctgtgaaagtttggaacatcactacctgcaagggttacacttagttaagatcactctcccagaggaaagtcaactgccatgtcaggagaccacttagacaaactattgataggtaagg

SEQ ID NO: 978569 - DNA, 120 bp, Artificial Sequence
  ENSG00000271901_3 (sequence is synthesized)
agctgaggtctcccagtcagccagggaggaactgaagcctgacaacaactttgtgactgagattggaagcaggtggagcctttgaatgagactgccgctccagccaatagccgcactgca

SEQ ID NO: 978570 - DNA, 120 bp, Artificial Sequence
  ENSG00000271901_4 (sequence is synthesized)
gccttctcagacatcttgagccagattaacccagttaagctgctcctcaattcctggcctataggaaccataagctagactacaatccttgaagaaggatgtctagcttccagttgattc

SEQ ID NO: 978571 - DNA, 120 bp, Artificial Sequence
  ENSG00000271901_5 (sequence is synthesized)
tatccattggattgaagagaaaggtagacagatggatagctatttttatctacctccttgaactttttcaccgatactaaccattctgaacaatgttctgtgaggtcaaccttacttatg

SEQ ID NO: 978572 - DNA, 120 bp, Artificial Sequence
  ENSG00000271901_6 (sequence is synthesized)
gaaggggattgcattatggaacgaaaaccaggaggtgatcactgctatcttagaggctggctactgttgatgtcaaaatcagcatctatggcacagatgttccctgaagatgtcttgctc

SEQ ID NO: 978573 - DNA, 120 bp, Artificial Sequence
  ENSG00000271901_7 (sequence is synthesized)
ctggggattcctgaatataccagagctaagactaaatacacctggattggagaatgaaaagagtcatgacagccagttgaatgacttcatggccaagacttcagaagaaagctctgactt

SEQ ID NO: 978574 - DNA, 120 bp, Artificial Sequence
  ENSG00000271901_8 (sequence is synthesized)
cttgggaatcccatttcccccagtcccctgaatctcctttgagaagcagtttttgcttcgtaagccatttctgagcaccccacttgctgccaagggggttaacagttgctaggtgaggag

SEQ ID NO: 978575 - DNA, 120 bp, Artificial Sequence
  ENSG00000271901_9 (sequence is synthesized)
aaggagccatttttcccagtgttctcactatgctgtgtacatagtctctcatgtgaagggcagcaaacatggtggtcggtcatcatacattgtgaatctagctctttccaagtctctggg

SEQ ID NO: 978576 - DNA, 120 bp, Artificial Sequence
  ENSG00000271901_10 (sequence is synthesized)
tagatcagcatattgttagttactagaaatctgatagccctcctaagtgtttattaattatttgtaaacgttattaaggcttccctcaatgagtaaaaggctctttataacatgtttaaa

SEQ ID NO: 978577 - DNA, 120 bp, Artificial Sequence
  ENSG00000230461_0 (sequence is synthesized)
cgggatgtgacagttgaggctgggagcagaaataatcaacatgcccattagatacaggacggaataatgcttctattggttgggtcccttcgaggacagaagagctccttggcactggat

SEQ ID NO: 978578 - DNA, 120 bp, Artificial Sequence
  ENSG00000230461_1 (sequence is synthesized)
gcctccgggtctggttgagagaggaatggttaggagactgttctgaggatacgcagacatcatccaaagcttcctacattcagatgaggacagaggttgggccagagctttgtaagcttg

SEQ ID NO: 978579 - DNA, 120 bp, Artificial Sequence
  ENSG00000230461_2 (sequence is synthesized)
agctggaggcaaaggatgccaagatgggaaagccacataatggaaggatcctggatttcagagctgtcacttggaggaggggcacccagtgaaggtgtcttatctaacccacaccatatc

SEQ ID NO: 978580 - DNA, 120 bp, Artificial Sequence
  ENSG00000230461_3 (sequence is synthesized)
ttcatgaagtggccatatggatttgatccctatccttcagaggtgctcagcctaagggaacacggatagtagattaagcactgaccagagccagccttgacaatgtgctgatggcaacct

SEQ ID NO: 978581 - DNA, 120 bp, Artificial Sequence
  ENSG00000230461_4 (sequence is synthesized)
tgtttcttatgtatcaacctgatatttaaatccatgaaggacagagacgacaaaggcaggtggaatagatagagaagagattcaaggtctgagctctacattactcaaactgttagagat

SEQ ID NO: 978582 - DNA, 120 bp, Artificial Sequence
  ENSG00000230461_5 (sequence is synthesized)
taggaagaagaggaagacctggcaaaagaatgtcctgggatgtagaaagaaaaccagaagcttgtgttctctggaaaccaaatgaagaaagggcttccagaaggacagacaaagtgtagt

SEQ ID NO: 978583 - DNA, 120 bp, Artificial Sequence
  ENSG00000230461_6 (sequence is synthesized)
gtgtcaaaggctcctgagcaatcagaggagagcacaaaggggctcacaggactttggtatctggatcacccagtgacacttcctgatcacgagaaactgtcagaccaacaggggcacttt

SEQ ID NO: 978584 - DNA, 120 bp, Artificial Sequence
  ENSG00000230461_7 (sequence is synthesized)
ctgaaaccagcagttcttcagtgcccaaatgcaaccttgatggtttgattttggaggatggcaattcattaacagcactccccagtgataaatatgaaaaccaataaaaccccccaccca

SEQ ID NO: 978585 - DNA, 120 bp, Artificial Sequence
  ENSG00000230461_8 (sequence is synthesized)
aggcaatctctcccagctcctcgctttgagtaaagtgagtaacctccatttctgccaactcctgtcttgtctgaagccacatttccccagcaatgtcacatatgcatttcttgatcctgg

SEQ ID NO: 978586 - DNA, 120 bp, Artificial Sequence
  ENSG00000230461_9 (sequence is synthesized)
tcatttctcctcttgggagatgaatcataaagaaaatgagatctgtgtgccctggtgactatggatgcaagagtctgctgccctggagggaacagctggaaaagtagatggtgaagacgt

SEQ ID NO: 978587 - DNA, 120 bp, Artificial Sequence
  ENSG00000230461_10 (sequence is synthesized)
gtgggggggaaacagtggagaaggcatctttgcaggggatcaaggtgacagagtgattagttacactgttttgacatgtgagaacagggggttataaaaatggatacaggaagagggaga

SEQ ID NO: 978588 - DNA, 120 bp, Artificial Sequence
  ENSG00000230461_11 (sequence is synthesized)
tctgcctctagttagcaggggcagcacaaagagcattactgtggagctgaactttgggtaaaagattaacagccagtcctttctctccagtgtctgcttccttctgggcttgccctgggg

SEQ ID NO: 978589 - DNA, 120 bp, Artificial Sequence
  ENSG00000230461_12 (sequence is synthesized)
gaaaaggagggctggcatggatatgcctgcagccctcaccctagatgttcttccacgcctctctgttcattcattgcttagtcattcctcaggcatggattgagaccactgtgtgcccag

SEQ ID NO: 978590 - DNA, 120 bp, Artificial Sequence
  ENSG00000230461_13 (sequence is synthesized)
gaccgacctggcctaggatggacatagagatggaaaaggcacagggagcaggtgacagagacaaatcaaggtcatggagaatagcagagtaagatagaagatgaaggcaggagatggggt

SEQ ID NO: 978591 - DNA, 120 bp, Artificial Sequence
  ENSG00000230461_14 (sequence is synthesized)
tcttgagaaagcgagagcaggactgacccgtgtctgcctcacctgttattgctgtagcctcttctccttggagtatccctcctgctcttgcatcaccttaggaacttggatcagagagga

SEQ ID NO: 978592 - DNA, 120 bp, Artificial Sequence
  ENSG00000230461_15 (sequence is synthesized)
aagttacggcctggatatgttgtagtaggaggggacaaacatgtttggagacagaaatgcttggggagcgggtgtttttgggggatgagactttccaggtctctcaattcacactatgta

SEQ ID NO: 978593 - DNA, 120 bp, Artificial Sequence
  ENSG00000230461_16 (sequence is synthesized)
ggtagttcactgcacagcttaaataagagacaactctccggagtggttggctctcatccaaaaaatgtgttttgggcctcagatttccaacggaagggctgaagcgtgactggcctgatg

SEQ ID NO: 978594 - DNA, 120 bp, Artificial Sequence
  ENSG00000230461_17 (sequence is synthesized)
tcaactactgaagtccacctgcccctgccctatcaggtgtggaaatgctggggttcctctctcagaacctacttcctgagatgtcgaaatatacccaagagtatttctgggccttctcca

SEQ ID NO: 978595 - DNA, 120 bp, Artificial Sequence
  ENSG00000230461_18 (sequence is synthesized)
atccgaaactgtttagtttttgtgtgtgtgtgcctacttggccacactagaagacagaggtggcctgggtgaaatgcaggtttctagaggctctctgacaaagctcaggccaccagcccc

SEQ ID NO: 978596 - DNA, 120 bp, Artificial Sequence
  ENSG00000230461_19 (sequence is synthesized)
aggccagcctgtgggtagtcctggctgacagtcacttcatacctcacctgggctttttgccaaattcaaagtgtgtgtatatgtggagtgctgggttcccaccactgacagtctgtaagt

SEQ ID NO: 978597 - DNA, 120 bp, Artificial Sequence
  ENSG00000230461_20 (sequence is synthesized)
cattcacttagctcaatttgtcttactttcttctgaaatttcttccttcttgttctttttcccaggagaaaccaggagaaggcagtcctagggcagtctccgggccagctttccctaata

SEQ ID NO: 978598 - DNA, 120 bp, Artificial Sequence
  ENSG00000230461_21 (sequence is synthesized)
agaaggcagagctcctcttcacccagacttcagacctatagaggcagcctggggtcccgggatgcccttgcactcagagatgtccccagagtcctagggaaatggaggataactaggagg

SEQ ID NO: 978599 - DNA, 120 bp, Artificial Sequence
  ENSG00000230461_22 (sequence is synthesized)
aagctgttcatggctggcgatgaggtctataccttcttgtccgtctcagtgctgtctgctattgaatttttgtgcagatcacattaacttaaagccagttctcaagaagctccccctgcc

SEQ ID NO: 978600 - DNA, 120 bp, Artificial Sequence
  ENSG00000230461_23 (sequence is synthesized)
gccggcatatccaccagttgctcccctttcctgccattaatcagggtctgctagttagagaacaaattcctatttgtccaaacagttgccaacacccccaccccaaggtagttaaatgag

SEQ ID NO: 978601 - DNA, 120 bp, Artificial Sequence
  ENSG00000230461_24 (sequence is synthesized)
agaagtgataaaagcagagaggggcagcctaaaagactgtgtctttacttagaaaacagtagagctcatcggcttgtggatcctgagctgggaaaaaagttttctctcaatgggaaaaga

SEQ ID NO: 978602 - DNA, 120 bp, Artificial Sequence
  ENSG00000230461_25 (sequence is synthesized)
agttttcttgtcccacttctcatcacagtgagatctcctctctagcatccctaacgtggggccatctcacctctccctgaactcttccacaggctcaagtttgtacattccaacttgttg

SEQ ID NO: 978603 - DNA, 120 bp, Artificial Sequence
  ENSG00000230461_26 (sequence is synthesized)
tttgggccttgttggacataactgaagtctggatggcagggtgaaaattggataaacagccacactgactcaggggagatttttttttaatgcaaacatctgtttcttgaatttggccat

SEQ ID NO: 978604 - DNA, 120 bp, Artificial Sequence
  ENSG00000230461_27 (sequence is synthesized)
ttacagaggaagaaaaccctttccaagtttcctctgatactgggtttatgcccaattatagtttaggcatgaagaaactgaagcatggaggaaaaacttagcaactagcccaacgtcaca

SEQ ID NO: 978605 - DNA, 120 bp, Artificial Sequence
  ENSG00000230461_28 (sequence is synthesized)
caggcagtatatcaagttctcaactcagtaaagatgtcaattctccccaaattatttttataaatataatgcaatcccaatcaaattccaaacaatgattttgaatgaggaacctggcaa

SEQ ID NO: 978606 - DNA, 120 bp, Artificial Sequence
  ENSG00000230461_29 (sequence is synthesized)
aacatttctaaacttcacgtggaagaatatctacatgcaaataatgaagacacacacacccacacttatatgtattaggagccgtgatagccagccttgacaatgtgctgatggcaacct

SEQ ID NO: 978607 - DNA, 120 bp, Artificial Sequence
  ENSG00000230461_30 (sequence is synthesized)
agtgatctttccgtgggaatgcggcaaggagtcagcaggcatagtgaaaatgggcggcgatggatactcccagcacttgctgagcactgctacgcctcaggactgggacagagagaacca

SEQ ID NO: 978608 - DNA, 120 bp, Artificial Sequence
  ENSG00000230461_31 (sequence is synthesized)
caaactaagctattcacagatcatcatcagccagaggtgacttctgttgcttgcagctcagaatcctagatgtttccggtggcactgaagagcctctgctgaagctctataccatttgcc

SEQ ID NO: 978609 - DNA, 120 bp, Artificial Sequence
  ENSG00000230461_32 (sequence is synthesized)
agatctggaggttcagaagtctgacatcagaatgtctgggctgaaatcaaggcgttggcaaggcggtgctccctccaaggctctaggagagaatctttttcttgccttttctggtgtcta

SEQ ID NO: 978610 - DNA, 120 bp, Artificial Sequence
  ENSG00000230461_33 (sequence is synthesized)
agcactgaccagcctttctctttactcattggactcagagccagccttgacaatgtgctgatggcaacctagaacataagcagaggagtatacaggacaagaacttgatggtctcgggaa

SEQ ID NO: 978611 - DNA, 120 bp, Artificial Sequence
  ENSG00000230461_34 (sequence is synthesized)
gggagacggcgcgagcggcgcccggctcacactagctcttccaggacgcagatggcaagcatctcctaaagaaaccgctggtcagaccaatgaaaccacaggacaaagagttctcttcaa

SEQ ID NO: 978612 - DNA, 120 bp, Artificial Sequence
  ENSG00000230461_35 (sequence is synthesized)
acgtggacctggcccctctcattttcggtgctcttgaggactcccacgccttgtaaggactggccattctgtcctgaatgtgaattatggggaggggcaagctaaagtgacccaaaggaa

SEQ ID NO: 978613 - DNA, 120 bp, Artificial Sequence
  ENSG00000230461_36 (sequence is synthesized)
aagaagaaaaaggcatgtgtgtaggttcaccctggctctaaattgcttaccgttaagtcttgagccagctcctgacggaaagataagagagaaccattctctgctttcaataggacagaa

SEQ ID NO: 978614 - DNA, 120 bp, Artificial Sequence
  ENSG00000230461_37 (sequence is synthesized)
ccaagtttcctctgatactgggtttatgcccaattatagtttaggagaggacaggatggactactgacattagagaagactttgaaaaggaagtttgaattaatgcaggctgtaaggtgc

SEQ ID NO: 978615 - DNA, 120 bp, Artificial Sequence
  ENSG00000230461_38 (sequence is synthesized)
tgagaagctccaagcaggcagaacctaggcatgaagaaactgaagcatggaggaaaaacttagcaactagcccaacgtcacacaggcaagccagccttgacaatgtgctgatggcaacct

SEQ ID NO: 978616 - DNA, 120 bp, Artificial Sequence
  ENSG00000230461_39 (sequence is synthesized)
gtgatacacgctaaagacaaggactatgtgactgtatgaaatggagcgatcacatccaacctgaagatcaggagaaactggagccctcctgaggacagagcccttgaattagatacagaa

SEQ ID NO: 978617 - DNA, 120 bp, Artificial Sequence
  ENSG00000230461_40 (sequence is synthesized)
ctctctctctctctatctctctctctctcttttttttcccccggcagagagaggaaaacacgcgagtgcacacacggtgatatcttgcgggtgatgaatatgataattggacaagggacg

SEQ ID NO: 978618 - DNA, 120 bp, Artificial Sequence
  ENSG00000230461_41 (sequence is synthesized)
tgggtcattcttattaaaaaatgacttaaatttctcaaattctatttatgtttcttttacatcccaattttctatagatttagtgactccaaatgataaggtctcaagctcataataatt

SEQ ID NO: 978619 - DNA, 120 bp, Artificial Sequence
  ENSG00000230461_42 (sequence is synthesized)
tatcccttgggtaacacacaaggcttggtggtatttcagtaatattcatgacaacagcagctgtcgtgctaataaggactgatgtcaccagagcactttctatgtgccaagcatggtgca

SEQ ID NO: 978620 - DNA, 120 bp, Artificial Sequence
  ENSG00000230461_43 (sequence is synthesized)
caacactttacatacattatgtcatttaattttcacaaaacctcacagaggtaaatattattatcttcctctgcatataaggaaatgaatgttcggaaagattaagtcaactcactgagg

SEQ ID NO: 978621 - DNA, 120 bp, Artificial Sequence
  ENSG00000230461_44 (sequence is synthesized)
tcccatcagtgctctttcatatgcctctgttgcagtctcattgaactgctgaaatcagaaaaacctggagaccttgttaaccttcagattcctgggccccatcttagatgcagggagtca

SEQ ID NO: 978622 - DNA, 120 bp, Artificial Sequence
  ENSG00000230461_45 (sequence is synthesized)
gacttcctgggagtgtggccctggaattttcatttgtaaacacattccccaagagacctgtatgcacactaaagtgggagaattcacgatctctggcttttgtgatgttttaaacgcact

SEQ ID NO: 978623 - DNA, 120 bp, Artificial Sequence
  ENSG00000230461_46 (sequence is synthesized)
atataatttcagtagcaaaagaattgggctttgggaagggagtgtgtggtgaaccctgaaagctgaatggacttccttcctgtggaggagcagtgggagaaactggaggcagagagctgt

SEQ ID NO: 978624 - DNA, 120 bp, Artificial Sequence
  ENSG00000230461_47 (sequence is synthesized)
gtttcattccttgattgagcctttgtgagttatttaatctctttcagtctctatttttttcatttgtaaaccaggaaggatacttgtattttccaggtggttgtgaggtgtgaaagagat

SEQ ID NO: 978625 - DNA, 120 bp, Artificial Sequence
  ENSG00000230461_48 (sequence is synthesized)
gagagtagaacaaaattttaaaagttgaaagcactcaacaaatgtatttggtattaatcatgggtttccctggggccgaggaagccaccagccaccgcaggcctgtacacaatgccagcc

SEQ ID NO: 978626 - DNA, 120 bp, Artificial Sequence
  ENSG00000230461_49 (sequence is synthesized)
accatgtatggatacggaggaggcaaaaggactagcgaacactcccagggactggatgtcttgaatatctgtccaactttcttgggaggggccatttcttctgtaactcaaaggaattta

SEQ ID NO: 978627 - DNA, 120 bp, Artificial Sequence
  ENSG00000230461_50 (sequence is synthesized)
ttatttttcagccagggaggcatgctttctatctactgctagtactcccagaccaagctgtttcagtgggactgaggtgtgacttctgcctcggtttcatccatctgtgcagggaagaga

SEQ ID NO: 978628 - DNA, 120 bp, Artificial Sequence
  ENSG00000230461_51 (sequence is synthesized)
aaaatgcctgcacctccacggtcacaccctctgttggaaccacctccttaagccagaattattgaatgttctctatgtgccagaattattattatctcatttgattctcacaacaatgcc

SEQ ID NO: 978629 - DNA, 120 bp, Artificial Sequence
  ENSG00000230461_52 (sequence is synthesized)
atgaagtctatacagacataccttggaaatacagcgggtttggttccagaccaccgcaataaagctaataccgcaataaaatgggtcacacgaattttttggattaggcttcggcttaag

SEQ ID NO: 978630 - DNA, 120 bp, Artificial Sequence
  ENSG00000230461_53 (sequence is synthesized)
taagggaatgttgtggctggtttgatgttttatccagaccgctaacactttctccctatcagcaatgaggctgttttgctttcttatcattcctgtgttcactggagtagcacttttaat

SEQ ID NO: 978631 - DNA, 120 bp, Artificial Sequence
  ENSG00000230461_54 (sequence is synthesized)
ttcaagaacttttcctttgcattcataacttggctaactgtttggcacaagaggcctgcctagcttttggcctatctaagcttttgacttgccttcctcactgagcttaatcatctctag

SEQ ID NO: 978632 - DNA, 120 bp, Artificial Sequence
  ENSG00000230461_55 (sequence is synthesized)
ccttggatttaacgtggaaaatgtgtgacccttcctttcacttgaacacttggaagctattgtagggttattaactggcctaattcaatattattgtgtctcagggaacagggaggccca

SEQ ID NO: 978633 - DNA, 120 bp, Artificial Sequence
  ENSG00000230461_56 (sequence is synthesized)
gagagagagagacgggaaaacagaaagtcagtggggcaggcagaacacacacgtttatttattaagtttgctgtcatatgttggtgcagttcatgctgccccaaaacaattacaataaca

SEQ ID NO: 978634 - DNA, 120 bp, Artificial Sequence
  ENSG00000230461_57 (sequence is synthesized)
attctgtagtggccatatggatttgatccctatccttcagaggtgctcagcctaagggaacacggatagtagattaagcactgaccagagccagccttgacaatgtgctgatggcaacct

SEQ ID NO: 978635 - DNA, 120 bp, Artificial Sequence
  ENSG00000230461_58 (sequence is synthesized)
aaagattcctggtcatagattgccataacagatacagtaatcacgaaaaagtttgagatattgtgagaattacgcagatattgtgagaaatatgacccagagacaagaagcgagcacatg

SEQ ID NO: 978636 - DNA, 120 bp, Artificial Sequence
  ENSG00000230461_59 (sequence is synthesized)
ccgttagaaaaatggcaccaacagacttgcttgctgcagggttacacataccttcaatttgtaaaaaaaaaaaactgtaatatctgcaaaacgcaataaagaaaagtgtaataaaatgca

SEQ ID NO: 978637 - DNA, 120 bp, Artificial Sequence
  ENSG00000230461_60 (sequence is synthesized)
atcagtggtggcattagattctcataggtgctcaaaccctttcatgaactgtgtatgtgaggaatctaagttgcatgctccttatgagaagctaacgcctgatgattatcactgtctccc

SEQ ID NO: 978638 - DNA, 120 bp, Artificial Sequence
  ENSG00000230461_61 (sequence is synthesized)
aactttcagaactttccagtgcttcaggttggggtccgagccagccttgacaatgtgctgatggcaacctagaacataagcagaggagtatacaggacaagaacttgatggtctcgggaa

SEQ ID NO: 978639 - DNA, 120 bp, Artificial Sequence
  ENSG00000230461_62 (sequence is synthesized)
acagttgaggctgggagcagaaataatcaacatgcccattagatacaggacggaataatgcttctattggttgggtcccttcgagagagaaccattctctgctttcaataggacagaaga

SEQ ID NO: 978640 - DNA, 120 bp, Artificial Sequence
  ENSG00000230461_63 (sequence is synthesized)
ccatgggtagcaaataggttcatgatgctgttatttcaattactttacatcctgctaatggctagttgtgtgatcctgtaacttaatttctctgtgcctcagttttatctgaaagaaaaa

SEQ ID NO: 978641 - DNA, 120 bp, Artificial Sequence
  ENSG00000230461_64 (sequence is synthesized)
tgtcattttttccaccattatacatggtttatgatggtggagatgtggaatatggataactaatcttttacatatgtaggtaactgcactgagaggtgccatgtcagactgatgaatacg

SEQ ID NO: 978642 - DNA, 120 bp, Artificial Sequence
  ENSG00000230461_65 (sequence is synthesized)
aaagatggtgcctcacccagatatcctggacattgatctggaggtggtgactaaatgggacttagggtgtaccccttggcatggggtgagtgtgttctgtgagaggaagagtgaaatgaa

SEQ ID NO: 978643 - DNA, 120 bp, Artificial Sequence
  ENSG00000230461_66 (sequence is synthesized)
agtctctccttgggcacgtaggaaggttacatcttccaggtgaccctgcagttagatgggccaatggaatgtgagaagaagcaatgactgtcacttgtagaacaagcgttttaaacttgg

SEQ ID NO: 978644 - DNA, 67 bp, Artificial Sequence
  ENSG00000230461_67 (sequence is synthesized)
agctttgtaagcttgttacctaaggatggttctgaccatgtaagcagatcacagaacacctggataa

SEQ ID NO: 978645 - DNA, 120 bp, Artificial Sequence
  ENSG00000230461_68 (sequence is synthesized)
tttttttttctttttcttttttcatttcccagatacagctgatcgagttcgccgagtggccgagcgagtgagcgctcctccgacttgggtggaggaagatggcaagcatctcctaaagaa

SEQ ID NO: 978646 - DNA, 120 bp, Artificial Sequence
  ENSG00000230461_69 (sequence is synthesized)
atgttgcaatcagagctgggctttcaattctcacctctgagatgttataaattgcattaagaagcatctcctccaatcttcatgttttaaaaacaacttgctaggggcatgttggaggaa

SEQ ID NO: 978647 - DNA, 120 bp, Artificial Sequence
  ENSG00000230461_70 (sequence is synthesized)
agaagttgcaataggcaaacttaacagatttacagatcatcaaggcagaaccatcttattgttgatgcaatcatccgtagttcatgtgaccatcacagtagaccaattcaacaggggagt

SEQ ID NO: 978648 - DNA, 120 bp, Artificial Sequence
  ENSG00000230461_71 (sequence is synthesized)
acacggatagtagattaagcactgaccaggcatgaagaaactgaagcatggaggaaaaacttagcaactagcccaacgtcacacaggcaagccagccttgacaatgtgctgatggcaacc

SEQ ID NO: 978649 - DNA, 120 bp, Artificial Sequence
  ENSG00000230461_72 (sequence is synthesized)
ttttttttctttttcttttttcatttcccagatacagctgatcgagttcgccgagtggccgagcgagtgagcgctcctccgacttgggtggaggaagagagaaccattctctgctttcaa

SEQ ID NO: 978650 - DNA, 120 bp, Artificial Sequence
  ENSG00000230461_73 (sequence is synthesized)
ccccacccccacccccaccctgccacagcttcgggacgactggatcgccgcgcctgggccggagcgagccatctgcgggcactatgcaaagcgggagacggcgcgagcggcgcccggctc

SEQ ID NO: 978651 - DNA, 120 bp, Artificial Sequence
  ENSG00000230461_74 (sequence is synthesized)
tgcctggatgccctgcttacccagcctggcactaaggcaaaacctaagtagcccttcctgttctcatctgtcttgaactccttgaggttagtgcagatggaggcaagatcaggagttcgt

SEQ ID NO: 978652 - DNA, 120 bp, Artificial Sequence
  ENSG00000230461_75 (sequence is synthesized)
gatcacagagacaccagcagcatcaacccacaatcttgggcctctggaatgtcagtgacaaactaggttccaagtatatataggcaacacaaagagagaaccattctctgctttcaatag

SEQ ID NO: 978653 - DNA, 120 bp, Artificial Sequence
  ENSG00000230461_76 (sequence is synthesized)
tgagcctggaggagctggtgtaacttctctttggtgcctgacttccttctgactcaaacacaggagaaaacctatcacacaaaagaactgagaaacttcctgggtttgggggtgagctgg

SEQ ID NO: 978654 - DNA, 120 bp, Artificial Sequence
  ENSG00000230461_77 (sequence is synthesized)
agtcactcagtgtgagccattcacaacaacaactcttgagccagccttgacaatgtgctgatggcaacctagaacataagcagaggagtatacaggacaagaacttgatggtctcgggaa

SEQ ID NO: 978655 - DNA, 120 bp, Artificial Sequence
  ENSG00000230461_78 (sequence is synthesized)
ttatttaaagagctaagagctaatttgaaaatacatctttgaaaggacaacaaaaatgagatgtgaaaaaaatggatgaagattcttaattagtccattatttgacacgcacgatttaac

SEQ ID NO: 978656 - DNA, 120 bp, Artificial Sequence
  ENSG00000230461_79 (sequence is synthesized)
atgtgttcttgtcttgttcgctgattctgactgtgccccagcctccttgatttgaagaccatggataacttcattctcagtggtgattctgttccttctcagtgcatttggtttgatcag

SEQ ID NO: 978657 - DNA, 120 bp, Artificial Sequence
  ENSG00000230461_80 (sequence is synthesized)
ccttcccctgacactgcatcagtgacttttcaggtctcaattcctacccatttaaacataactcttaaggaagcattgacagcatcttaccttatttttgttcctgtctgctggacatat

SEQ ID NO: 978658 - DNA, 120 bp, Artificial Sequence
  ENSG00000230461_81 (sequence is synthesized)
ggcagagagaggaaaacacgcgagtgcacacacggtgatatcttgcgggtgatgaatatgataattggacaagggacgagagaaccattctctgctttcaataggacagaagagctcctt

SEQ ID NO: 978659 - DNA, 120 bp, Artificial Sequence
  ENSG00000230461_82 (sequence is synthesized)
gaaaacatcattctcagcaaactaagtagaggaattgctggattatattgaaggtctatttttaattatttgaagaacctccattttggaaaactcaaatttctgagcagactgatcctg

SEQ ID NO: 978660 - DNA, 120 bp, Artificial Sequence
  ENSG00000230461_83 (sequence is synthesized)
cctaaggatggttctgaccatgtaagcagatcacagaaggactttttgatcctgcagaaatgcaggtgaggctcaagaaaaagtgtcataaagattaatgagggccatggctggaagagg

SEQ ID NO: 978661 - DNA, 120 bp, Artificial Sequence
  ENSG00000278884_0 (sequence is synthesized)
actgtctaagtctctccagagaaataagctacccaggccatccagctgctggaatatccaccctcttcatcaagaacatcgtgtcattcttcagggtcacagaatgctctacagcctact

SEQ ID NO: 978662 - DNA, 120 bp, Artificial Sequence
  ENSG00000278884_1 (sequence is synthesized)
tcctggtgtccaccaaggaggagattagttgcatctgaattcaaggaagattcgagagggctcacagctgcagaattccaatcactctcagtctgactgtgctgattttagaaagacaca

SEQ ID NO: 978663 - DNA, 120 bp, Artificial Sequence
  ENSG00000278884_2 (sequence is synthesized)
ctcttagaaaatttaaatggggaccaaaatactaaccctaaccagtttattatctcaaagaattggaaaaacaaagttttcgaatactacgggattagaagagtaaacaagatatgcctt

SEQ ID NO: 978664 - DNA, 120 bp, Artificial Sequence
  ENSG00000278884_3 (sequence is synthesized)
ttctttggagctacatatatgtattaaaaatgggatgtacaaagaattttttatcacatggagaagtgcttatgagatgatataacattaaacaaattaatgaaaggcacacattaaaaa

SEQ ID NO: 978665 - DNA, 120 bp, Artificial Sequence
  ENSG00000243960_0 (sequence is synthesized)
ttggatttaagacaaaaagcaagtcccccatgagtgtccacttctttgccctgccctctcagcttgtgagacaacacaggagccttctatagtatgttgatatgctagatctgtgccgtt

SEQ ID NO: 978666 - DNA, 120 bp, Artificial Sequence
  ENSG00000243960_1 (sequence is synthesized)
aataggcatcgtctctcagcctgagggaggctggattctgggttcctgtagtcacagggaggaaaagctttcttaaaaatggacatgtatgtgcgtgtgagtgtgtgtgtagatttatag

SEQ ID NO: 978667 - DNA, 120 bp, Artificial Sequence
  ENSG00000243960_2 (sequence is synthesized)
tttttggtagtggcaggaataaaaaaaatccatcctacatcttccctaagcactgcctctctctcaccccccaaaacaagttgacgaaagggttttatgtagctgtctatgaggaattgg

SEQ ID NO: 978668 - DNA, 120 bp, Artificial Sequence
  ENSG00000243960_3 (sequence is synthesized)
tgtctgggtgggttatgggatgtgggcatccctgggttcttggaagcagctcttatgctactcatagagatgggattgactttatttttttatagtgcttaattcaccattatgagaaat

SEQ ID NO: 978669 - DNA, 120 bp, Artificial Sequence
  ENSG00000243960_4 (sequence is synthesized)
gcttccagtcacaaaaatgcagcccagctcactctgaggaagaagcaggacttgctgttctctggtccaccaagggctatgaggctcaccccttggatggtgctcagaaccacaaggaat

SEQ ID NO: 978670 - DNA, 120 bp, Artificial Sequence
  ENSG00000243960_5 (sequence is synthesized)
actgaagaagccttgcctatgatttcaggtggcatcagacattgggctaattttcaaggtgtctctccttcccaacaggacagtcggagtctggttctttaataaatagctatatggatc

SEQ ID NO: 978671 - DNA, 120 bp, Artificial Sequence
  ENSG00000243960_6 (sequence is synthesized)
tttgtgagagatgcgacttggtccccgctcaatcactccctgcttaccacagtgggctgggaccatcaggtcgtccaccacgttgtgcccacagaacctctcccagcccctggacctgca

SEQ ID NO: 978672 - DNA, 120 bp, Artificial Sequence
  ENSG00000243961_0 (sequence is synthesized)
gggacttttgaaatgcattctgtgaatgagaagaaatgcaaacatgttggcaaaactgattattttcattgtggatctcacgcttgctttggccatttttgttatcttttatttaatggc

SEQ ID NO: 978673 - DNA, 120 bp, Artificial Sequence
  ENSG00000243961_1 (sequence is synthesized)
tgccactgtttttttcatctcggtcattttctatattttcaaaagggagatggaaaaaaaactttgacttcaacaagcgccgaatctgggcgctggattctagcaatgctactgaggagc

SEQ ID NO: 978674 - DNA, 120 bp, Artificial Sequence
  ENSG00000243961_2 (sequence is synthesized)
ctttggcaggtggcgcagagaaagtcagctccaagctgcttcctgtccattgtccagctgtaggagaagggtctttcctgcccaaggacagtggtcctctcttctaaagagcaaggagct

SEQ ID NO: 978675 - DNA, 120 bp, Artificial Sequence
  ENSG00000243961_3 (sequence is synthesized)
ctctgaggtggaggaggcttgtgaagacttcccagaacactgcacccacctgaccaagaggtactttttaaggtcattcaaactgtcatctacacatgaataacaatgaaattctcataa

SEQ ID NO: 978676 - DNA, 120 bp, Artificial Sequence
  ENSG00000243961_4 (sequence is synthesized)
gaaaagtagactccgtaactcttaaaagctcaatcttggagaggagaaacatgctgtttgatgacatagcacagaaacttgttgaaatatccttggagcttgagatgtcgagagcgagcc

SEQ ID NO: 978677 - DNA, 120 bp, Artificial Sequence
  ENSG00000243961_5 (sequence is synthesized)
atcaaaatgttctcaagaattaaattgaaaaatgttgcttcaaaatgtcttagccaaccaaatacaaacatttttgtcattgtgacaaaaaaaaagctcaccaattgtctttgctagtct

SEQ ID NO: 978678 - DNA, 120 bp, Artificial Sequence
  ENSG00000243961_6 (sequence is synthesized)
cagcacagcccaagaggagcatccttcatgagccaactgaaaaacagtgtgtagtctatgcttctgaccagatgggcttctcttgtcaccataacattatgtattaggacttcatgtatt

SEQ ID NO: 978679 - DNA, 120 bp, Artificial Sequence
  ENSG00000243961_7 (sequence is synthesized)
atgtattatgtcaacactttattcattatgctgatcatactctgtatttcacttgctctggttatttgtaaagcttttcctatttcatcattaaattatccttgtattttagcaactgca

SEQ ID NO: 978680 - DNA, 120 bp, Artificial Sequence
  ENSG00000243969_0 (sequence is synthesized)
tgcttgatgccacggcctatatacaattatcatatccccttaattggaaaagtttgaacaatcaaagggcatttttctaaatggcctcctcaactgttttctgtgttttggtcatatcca

SEQ ID NO: 978681 - DNA, 120 bp, Artificial Sequence
  ENSG00000243969_1 (sequence is synthesized)
cttagatgagccctgaaatgtctctttggatcttctggactccacaaatcacaattttaaaacaattagactcataatgctactgatataagagtctctgaatctaacagtaacatcaag

SEQ ID NO: 978682 - DNA, 120 bp, Artificial Sequence
  ENSG00000241520_0 (sequence is synthesized)
gcccaaggagcagccggcagcttgacacagtgaccaattggaagcacagcagccacacgccatgaaacaagacggagtttcgctcttggctggagtgcaatgtcgcaatctgggctcacc

SEQ ID NO: 978683 - DNA, 120 bp, Artificial Sequence
  ENSG00000241520_1 (sequence is synthesized)
ccatgttggtcaggctggtcctgaactcccgacctcgggtgatcctcccacctcagcctccctatattattaatcttaagtctaaatgttctattagaaaagttacaatcacatatgcag

SEQ ID NO: 978684 - DNA, 120 bp, Artificial Sequence
  ENSG00000241520_2 (sequence is synthesized)
cttgcattacattgctaatggaacacgctgctctaaaccagggattggcaaactatgggcagtggacaacttccagcccactgtctgtttctgtacagctggtaaacaaggaatggtttt

SEQ ID NO: 978685 - DNA, 120 bp, Artificial Sequence
  ENSG00000241520_3 (sequence is synthesized)
agaaaaaaaataatttgtgatacgtgaacattaataaaattcaaatttcagtgtccatgaagagttatattggaaaagagaacctacaaccattgcctctcccgctgcgtaagttcggca

SEQ ID NO: 978686 - DNA, 120 bp, Artificial Sequence
  ENSG00000241520_4 (sequence is synthesized)
aaggctcacgcttttgtcttttgttggatgaatgactaccaacacctaggacagtgcctgcacaaattaggtgccctataaatatttgttgagtcactaaattttaaaattctagattat

SEQ ID NO: 978687 - DNA, 120 bp, Artificial Sequence
  ENSG00000241520_5 (sequence is synthesized)
ggggactgtgtaggaaggacctcattctttagagaacatgaattacccactactacaactcgctgtgtccatccctaagccagaagagcggaggttaagaccccaagcaagcccacacgt

SEQ ID NO: 978688 - DNA, 120 bp, Artificial Sequence
  ENSG00000241520_6 (sequence is synthesized)
aatgacacaggaatggaaagctgatgctcggcctggtctcctgctgagcctggacacaggcataggcactgctgcaatggcaagagaagctcaaaaagttttaaaacaaaatacattatt

SEQ ID NO: 978689 - DNA, 120 bp, Artificial Sequence
  ENSG00000241525_0 (sequence is synthesized)
tgggctgcctgtggctggagctgccatctttgtccgagaggtaggtttatagatgcgaatcctttccttctctgcctccgggtcagcaagaattccatcccaacgcagactttcgttgat

SEQ ID NO: 978690 - DNA, 120 bp, Artificial Sequence
  ENSG00000241525_1 (sequence is synthesized)
aagtcggggaggctgacggtggaggagtcagaagggaggtgcttcttttccactttgctctgtctgtgctctggtttcgggccacgctctttgcaaggacttaagatgtcatgaaaggag

SEQ ID NO: 978691 - DNA, 120 bp, Artificial Sequence
  ENSG00000241525_2 (sequence is synthesized)
gaagaaagcggctggctcttcaggctctgactctgatgtttatctgctgagtagatgagcagcccactacagttgtagttctggcaccatcgtgccatcaaagccgctttacaacgtcac

SEQ ID NO: 978692 - DNA, 120 bp, Artificial Sequence
  ENSG00000241525_3 (sequence is synthesized)
ggaaacctccgcacacagaggtgtgcgcatgcgtgcttctgtcggggaccgcggcgcacggtggttcgcccatgcttgcttttgtctgttggaatctggacagttgaccgcaggaagggg

SEQ ID NO: 978693 - DNA, 120 bp, Artificial Sequence
  ENSG00000241525_4 (sequence is synthesized)
agggtgggcagagagattttaaatccctgggctgacactcatctcgtccagtcccgtgcctcgatcctcctgccttggcctcccatccccacgcctggctaagagttttgatttttggtt

SEQ ID NO: 978694 - DNA, 120 bp, Artificial Sequence
  ENSG00000241525_5 (sequence is synthesized)
tcaggctggtctcgaactcctgggctccatcgatcttcccgcctcggcctcctagatcgctgggatcacaggcatgagcctccgtgctcggcctcctgtacctttttaaatgctgtgtat

SEQ ID NO: 978695 - DNA, 120 bp, Artificial Sequence
  ENSG00000241525_6 (sequence is synthesized)
ctggactctcaaagccaatgtgtccaaaacaaacttacttcttcatggttttccactttagtgaacaaaaccgctggactggctggaaacctggtgggcttccgtgtcccctaccctctc

SEQ ID NO: 978696 - DNA, 120 bp, Artificial Sequence
  ENSG00000241525_7 (sequence is synthesized)
ccttgtcccttacccaggctggggccgactgccgtgtctggcactgggacttctgggtcctctcctgaatggtctctgctttcaaaccttccccacgaactctttttccgcacagctgct

SEQ ID NO: 978697 - DNA, 120 bp, Artificial Sequence
  ENSG00000241525_8 (sequence is synthesized)
agaacaaacttttaaaaacaaccaaaccgttcactctcttgctaaaagtctccagtgatgaaaaacaaaacataaaaagccaaaaagtcctccattgcttcctcatcacaatttacatca

SEQ ID NO: 978698 - DNA, 120 bp, Artificial Sequence
  ENSG00000241525_9 (sequence is synthesized)
agatctaaactcttgtggggctctgtgcagggctgacacccgtagtcccaacactttgggaggtcaagcccactacagttgtagttctggcaccatcgtgccatcaaagccgctttacaa

SEQ ID NO: 978699 - DNA, 120 bp, Artificial Sequence
  ENSG00000241525_10 (sequence is synthesized)
tacagttgtagttctggcaccatcgtgccatcaaagccgctttacaacgtcaccactgtccttccaagccatcgaacgtcaccactgtccttccaagccatcgaacgtcaccactgtcct

SEQ ID NO: 978700 - DNA, 120 bp, Artificial Sequence
  ENSG00000277688_0 (sequence is synthesized)
tttttaaactatacggtgggtacactggtgttcttttattgttactctttacacacaaagaacagataggtcctgaagggccctttgatagtctcgcagcactgatgagtgatcagctct

SEQ ID NO: 978701 - DNA, 120 bp, Artificial Sequence
  ENSG00000277688_1 (sequence is synthesized)
cccctctttctctggaactcggtagcttcatgttggcacctatcacagacgctgaaggcatttaaattttattttaaatcaaccaagagcccaaaaacccaacccatatttcgaaaaaac

SEQ ID NO: 978702 - DNA, 120 bp, Artificial Sequence
  ENSG00000277688_2 (sequence is synthesized)
tgccatcctgccaccttacagtccttttgtttttcctattcttgcaggcaagtgcaaaacagtggtttttggaaggcaattcataattactctgaagctatttcggcatattttttactg

SEQ ID NO: 978703 - DNA, 75 bp, Artificial Sequence
  ENSG00000277688_3 (sequence is synthesized)
ttattttgaatttctgttccagatgcctctccacagcattcatcacaccttccttcacacttgaagggaaaagtc

SEQ ID NO: 978704 - DNA, 120 bp, Artificial Sequence
  ENSG00000277684_0 (sequence is synthesized)
aaaaaagaagtgcatggaaaaataaattggggtatatccctacaatggaatgttatttgaaaatcaaaaggaaatgtcctaatatatataacaatatagataaatctcaaaattattaca

SEQ ID NO: 978705 - DNA, 120 bp, Artificial Sequence
  ENSG00000277684_1 (sequence is synthesized)
ctgagaaaaagccagactcaaaaggatgcattgaataattcctttcatatgaaattctagaaaaggcaaaaccaatctttaaagtcaaaaagtagatctgtagttgcctgcggaacagag

SEQ ID NO: 978706 - DNA, 120 bp, Artificial Sequence
  ENSG00000277684_2 (sequence is synthesized)
caaaaagttctatatcttaatggtggtgattatatgagtgaatatgtctgttaaaacgtattgaactgtgcacttaaaattggcatattttgtgtatgtaaattatacctcaataaatct

SEQ ID NO: 978707 - DNA, 120 bp, Artificial Sequence
  ENSG00000277684_3 (sequence is synthesized)
gattttgaaactatgttacatacttactgtttctgaaattgaagatacaaagtatacactgcttcactgttttcaagactaattaaaaatatatattttaataaaatgaacaaaaatcaa

SEQ ID NO: 978708 - DNA, 120 bp, Artificial Sequence
  ENSG00000277687_0 (sequence is synthesized)
tgtttatctaaatgctattttatccaggttcaagctcttgtaataggatttatactacttgtaaggagaattctatatttgagaattgtccttttgaaaaggtgaattttatcacatact

SEQ ID NO: 978709 - DNA, 120 bp, Artificial Sequence
  ENSG00000277687_1 (sequence is synthesized)
aaccttttgctgccctgcacattttctgagatacttgaaaacatattttgacatttacatgttttgccagtacccattatgttcctgctttattaaagccattttattcacctgacagat

SEQ ID NO: 978710 - DNA, 120 bp, Artificial Sequence
  ENSG00000277687_2 (sequence is synthesized)
taagattagaatattttaaaagttgaattttgaaagcaaaagtttgttctactgcagtagttcgcaagtgctggtctttgtatgactgcatctgagtcacttaagaaggctttttaaact

SEQ ID NO: 978711 - DNA, 120 bp, Artificial Sequence
  ENSG00000277687_3 (sequence is synthesized)
ctagattcctgggctgtaatccttggagattctcatgacttaccatttttggcatccattctttagaaatagttccagcaatcctattctgcccgttttcatttaatacacacactttgt

SEQ ID NO: 978712 - DNA, 120 bp, Artificial Sequence
  ENSG00000277687_4 (sequence is synthesized)
ccatatttgagctggactggaaggagggaagcattttgccacgagtttctcccaaggcgtgactgaatggattggtccttgtatcatttgcagtgcttatttgccagctttaattagcta

SEQ ID NO: 978713 - DNA, 120 bp, Artificial Sequence
  ENSG00000277687_5 (sequence is synthesized)
ttctcctgttagacgttttattaacttctacttttttacttaccacagagcaaatgttccacagcatcaagcgtggctttttctgatttataatcatttactcagattatcgtttttaaa

SEQ ID NO: 978714 - DNA, 120 bp, Artificial Sequence
  ENSG00000277687_6 (sequence is synthesized)
gtgattcaagagcattaatatttttatagtttttgacatgtgtagccaaaatgttttccaagaggaaaaatgtaaaagggctagattaaaacaattcaaaatgagtaatagtgttaattg

SEQ ID NO: 978715 - DNA, 120 bp, Artificial Sequence
  ENSG00000277687_7 (sequence is synthesized)
aggaccaccaccaaggaagggaaatactggtttccccatgcccttgatacaggtgggtgttaattctctttaatgttcactgaataaaaaggagagagtatatttattttagcttgaatt

SEQ ID NO: 978716 - DNA, 120 bp, Artificial Sequence
  ENSG00000277687_8 (sequence is synthesized)
tttttaaatattaacagggctattctgtttctattattataggttctttcactcatttatctggtcttactgatctgtacatattcgttataataaagatactaattcatctttgtcata

SEQ ID NO: 978717 - DNA, 120 bp, Artificial Sequence
  ENSG00000268635_0 (sequence is synthesized)
ggagcgggcctcgcggggcgccgcccgcctcaccttacctggcgcctcctcccgcccaggcgcccggccccgcaacgcgaaataaatgggcccagacccccactccacccgtccccaccc

SEQ ID NO: 978718 - DNA, 120 bp, Artificial Sequence
  ENSG00000268635_1 (sequence is synthesized)
ccgcgccccagccctggcagcccgggacgcgaggggtactgggcggtaggcccgctctcaccttccgcgctcgctcagctcctctcggctcctcctcctcctcccggcggtgggtgccgc

SEQ ID NO: 978719 - DNA, 120 bp, Artificial Sequence
  ENSG00000268635_2 (sequence is synthesized)
ctagccgggagtgagggcgcgagtgtgcgcgagctaccgcttcactttctccctcctgccgccgccgccgcgctgcccgtggcggggctcccctcaggacaggggaactgcgagggaagg

SEQ ID NO: 978720 - DNA, 120 bp, Artificial Sequence
  ENSG00000268635_3 (sequence is synthesized)
gatgatgggggggcgggagggagcgaggcgacgcgggcggggggggaaggggggactgaggggcgaggtgcgaagggctcagatggcctctgaggcaggaggtggtaactggatgcggag

SEQ ID NO: 978721 - DNA, 120 bp, Artificial Sequence
  ENSG00000268635_4 (sequence is synthesized)
accaggttcctcgagggggctcacgaaagcgcggggctccgtggaaaagggaatgagagtccaagggggaaggcgtctgtgggggaggactgcagagcctgtgagggaagcgcgatgggc

SEQ ID NO: 978722 - DNA, 120 bp, Artificial Sequence
  ENSG00000268635_5 (sequence is synthesized)
gagcgagggggcgggagcgtgtgggggaagccgtgagggggcgtctactgtgcagccaccaccttcggctccggctgcagccgcgggagggcagcctcccccgcccacagccgcgctatt

SEQ ID NO: 978723 - DNA, 120 bp, Artificial Sequence
  ENSG00000268635_6 (sequence is synthesized)
gtacgccgcccggcaggcctgaccgcctagttcactggctcccctactcctcctcctcccgcctcctcctcccctctgccctttccccttctccccctccccctcccccactccccctcc

SEQ ID NO: 978724 - DNA, 120 bp, Artificial Sequence
  ENSG00000268635_7 (sequence is synthesized)
ggctgcggctccggtggagccgtgcccgccccgcctcccgcaggtgagagggggcggggagggcctgaccgacccgtgggagcgaggccaaaccctggcccgcatgagggcgaacgcctg

SEQ ID NO: 978725 - DNA, 120 bp, Artificial Sequence
  ENSG00000268635_8 (sequence is synthesized)
tgagggcgaacgcctgggattacgtcatcggcgcgtgacgccagaggctggggaatcacccgcttgctgcgtgacgtcatcgcgtcgcgtcactgttctcggtccgctgtccgtggcggg

SEQ ID NO: 978726 - DNA, 120 bp, Artificial Sequence
  ENSG00000268635_9 (sequence is synthesized)
ttgtttccgtgcagcctttctatcagacaattttgggacgatttctgggagggctactgtagtagtcaggatggagaaagacggctaacttccggcgctgagggtccttttcaggttaac

SEQ ID NO: 978727 - DNA, 120 bp, Artificial Sequence
  ENSG00000268635_10 (sequence is synthesized)
aaagcaccaccgcatctatgagctcgttgtcaagggctgaatttgaaaactatccgatgtcgtgtgatctcacagccagacatgtattatgttttctttctgtgggagagggggcagggg

SEQ ID NO: 978728 - DNA, 120 bp, Artificial Sequence
  ENSG00000268635_11 (sequence is synthesized)
tgggaggaagacaaagaaattataacggagatgtttgaactaatgtgaactgacatacgaaaagaatgggcttcctttcacgttttttcccctaccgtggagggtactttcgacccaaag

SEQ ID NO: 978729 - DNA, 120 bp, Artificial Sequence
  ENSG00000268635_12 (sequence is synthesized)
ctttctttctcctgagctcagattgtgtatttcccaatacctcccgagcagcattacctgcatactcttcgtacctcagattcaacatgtgcgaaactgagacagcattagaaaggctaa

SEQ ID NO: 978730 - DNA, 120 bp, Artificial Sequence
  ENSG00000268635_13 (sequence is synthesized)
gagtccggaatcaggttgccttgcttgaaatcctagctattcaaatattagtgataggaccttgacatttctaagccgtaatttttctgtaataataagtagtaccttaactaggtcttc

SEQ ID NO: 978731 - DNA, 120 bp, Artificial Sequence
  ENSG00000268635_14 (sequence is synthesized)
ctaagcctcagttttaccatggtaatagtaacaagccctttagaatgttggctattattattatttcccccccaaaattgcttcttacgttcctttccgttctcaatgaatgggccaccc

SEQ ID NO: 978732 - DNA, 120 bp, Artificial Sequence
  ENSG00000268635_15 (sequence is synthesized)
tcaacatccatatcaagttggacaccaagtcttgtagcttctcctaaatatttttcaagtccttgcctgtgtcgtcttctactaccaccacctgaacaactggagcaacctttagtctct

SEQ ID NO: 978733 - DNA, 120 bp, Artificial Sequence
  ENSG00000268635_16 (sequence is synthesized)
tcaaactcaatctatttttctcactagttacctgagtagccttataaaagcacaaatctgatgatgtcctcccgtttaaacaccgaaaggattttattgctttcaggataaagttcaaac

SEQ ID NO: 978734 - DNA, 120 bp, Artificial Sequence
  ENSG00000268635_17 (sequence is synthesized)
tcctgaacttggcactttattacctgactgcttacactagcctttctagctttgtctcacatcatttattttttgctccaagcacactgaaatattaacgttatttgaatacacatttct

SEQ ID NO: 978735 - DNA, 120 bp, Artificial Sequence
  ENSG00000268635_18 (sequence is synthesized)
tcatgtcttcaagctcttccctacttagctgactggccaacacctattcattgtacaaagctgagctcaaatgtcattcatattcatattcatattcatttgactaatatttctaaagtt

SEQ ID NO: 978736 - DNA, 120 bp, Artificial Sequence
  ENSG00000268635_19 (sequence is synthesized)
tccctaagccttaacaaaactgtaattctatagtatttctatgccttttatggaagtaactgcatttgtgtatctaatttcttgagttccaagtcatattcctttccatatcctcagcac

SEQ ID NO: 978737 - DNA, 120 bp, Artificial Sequence
  ENSG00000268635_20 (sequence is synthesized)
cttgagttccaagtcatattcctttccatatcctcagcacctaaaacagtgcttgacatatacctaagtatcaatatgttgttaaaatatatttaataaggccaggcgcggtggctcacg

SEQ ID NO: 978738 - DNA, 74 bp, Artificial Sequence
  ENSG00000268635_21 (sequence is synthesized)
caggagaattgcttaaacccaggaggcggtggttgtaggaagctgtgattgcaccacctgtatttaataaatgt

SEQ ID NO: 978739 - DNA, 120 bp, Artificial Sequence
  ENSG00000268635_22 (sequence is synthesized)
atgttcctattgttctttctatgtgccaggtactgttctgagcactttacaaacactgtctttaaacctctaccctctacggtagatactgttgttatcctcacccatcttattgatgcg

SEQ ID NO: 978740 - DNA, 120 bp, Artificial Sequence
  ENSG00000268635_23 (sequence is synthesized)
ggaactgaggcacagaggggttaagtaacttaacccaggatcctaacccagtaaattgactctaatctggattgtcttttcgtgatctctgcactaggcagaataatggctcatccaatg

SEQ ID NO: 978741 - DNA, 120 bp, Artificial Sequence
  ENSG00000268635_24 (sequence is synthesized)
gaatgttcacattccaatccctgggaactatgaatatgttaccttccatgacaaaaggactctgcagatgtgagtaaattgaggatttggggaaagggactctccagcttttgggagcag

SEQ ID NO: 978742 - DNA, 120 bp, Artificial Sequence
  ENSG00000268635_25 (sequence is synthesized)
actggaaaatggaaaaggcaagaaaatggatcctcccttggagcctctggaaaggaagagatggtatcctgatgataccttaattttagcccactgacatccatttaggacttctgaact

SEQ ID NO: 978743 - DNA, 69 bp, Artificial Sequence
  ENSG00000268635_26 (sequence is synthesized)
taattttagcccactgacatccatttaggacttctgaactacagaactgtgaaataataaatgtgtatt

SEQ ID NO: 978744 - DNA, 87 bp, Artificial Sequence
  ENSG00000268635_27 (sequence is synthesized)
ctactcgggagctgaggcaggagaatcggttgaatccaggaggtaaagatgctgtgagccgagattgcgccattgcacttaagccta

SEQ ID NO: 978745 - DNA, 120 bp, Artificial Sequence
  ENSG00000268636_0 (sequence is synthesized)
taaagtgtttgccgttgggttttcgtttggctggttgtgtgtacacagtgtatacaagttgagttgtacagaagcccaagaaagagcaagagacaaagggtagtgggagcaggggtgggt

SEQ ID NO: 978746 - DNA, 120 bp, Artificial Sequence
  ENSG00000268636_1 (sequence is synthesized)
gggggccagacacagacaaatcgccgtagaaaaggagtgggaggggcagagagaggggacccttctcccccctccacctccccaagcccctgccccaggtatgtacaataaataagatta

SEQ ID NO: 978747 - DNA, 120 bp, Artificial Sequence
  ENSG00000268636_2 (sequence is synthesized)
aaaataattaacaagatgcgttttcccctcccacccgacgccaaatgccctgcggagggaatggcctttagcaaagatcttggcctgcaggggggacttggggggaaggggtcccccagc

SEQ ID NO: 978748 - DNA, 120 bp, Artificial Sequence
  ENSG00000279597_0 (sequence is synthesized)
ccccatggcctggggctaacagtaaaaagttggcgacaccatgctcccagccaccacatctgcacccgagggagcgaaggccctgagccgcagggaccatggagcagccatctggctctg

SEQ ID NO: 978749 - DNA, 120 bp, Artificial Sequence
  ENSG00000279597_1 (sequence is synthesized)
tgtctgaccctaaggtgcacgtggccacacccacaggtcccacggccctcacgctgatgactctggagctgttttgccgccgtcaccccctgcgcctccctcttttgttaagtcctctta

SEQ ID NO: 978750 - DNA, 120 bp, Artificial Sequence
  ENSG00000279597_2 (sequence is synthesized)
tttgagatttagtcttaggaagcaacatcttacatttctctatactcgcctcagcagcaaacatgttttggcctctgttgttaccttatttctgataacttaattttcttgacaagctta

SEQ ID NO: 978751 - DNA, 120 bp, Artificial Sequence
  ENSG00000279597_3 (sequence is synthesized)
cccaaccttcccaggcactgggaacacacagaggagctggaacgcggtgttctctgtcttcacgatattctccgtccttggcagcatcttcattagcctgcctgtggccgcaccaagcgc

SEQ ID NO: 978752 - DNA, 120 bp, Artificial Sequence
  ENSG00000279597_4 (sequence is synthesized)
cagcacagctggcctgtccccacaggagtccccgtgtgactgcacaaccccatctgcccggtcaccgtcgcaccccgctcagcgtgacatttaacgaggtatgtagggtcaggcaggtta

SEQ ID NO: 978753 - DNA, 120 bp, Artificial Sequence
  ENSG00000279597_5 (sequence is synthesized)
aacgtgagaaaactaatttgtataacggcaagcagcaactataggcacacacgtgcttaaaagatgtcttctactgtattaagttaacagattttcataatcacatagagtggagcaaga

SEQ ID NO: 978754 - DNA, 120 bp, Artificial Sequence
  ENSG00000279597_6 (sequence is synthesized)
tgattgagttaagggatttacttaggagcctggaagggatgttagtacatctctgtgataattaagagactgctaatctcttaacctctgcaataagatatgcttcattattctttaaat

SEQ ID NO: 978755 - DNA, 120 bp, Artificial Sequence
  ENSG00000274340_0 (sequence is synthesized)
gtacatgtttattgatttctgtatgagcctggtaataagctcactaaattaatgccacctaaattgttccttggtttactaacaaagaataaccatatttttatggtccaaatgccaggt

SEQ ID NO: 978756 - DNA, 120 bp, Artificial Sequence
  ENSG00000274340_1 (sequence is synthesized)
ttacataagaggctcatcaagaaggaaaggaaaaaatggttgcaacttaagtgattttccccttccacttagtcctccgttcatagggcccaatagcttcctatcaagcatctcaaaatc

SEQ ID NO: 978757 - DNA, 120 bp, Artificial Sequence
  ENSG00000274340_2 (sequence is synthesized)
tttctgacacctggatttcaagattttccattacttaatgcatcctcttgaaagtatccccacacttttccactacccatcagcgggatgccattcagtaatggaagctacattccatga

SEQ ID NO: 978758 - DNA, 120 bp, Artificial Sequence
  ENSG00000274340_3 (sequence is synthesized)
gagcaagaacctcatctgtatctctgtgcctgaaggagcctgacacatagtatttaataagtactcaataaaaatctgctttatgaaaatagccttatttgttcactacctatcttacta

SEQ ID NO: 978759 - DNA, 120 bp, Artificial Sequence
  ENSG00000274340_4 (sequence is synthesized)
gttcctgagatatttgaaaagttatctattctattagagtgtcagcaaaattctgggatgctgagatcctgtagagttatagccttggtttggttcagttacttttcaaagttccagcta

SEQ ID NO: 978760 - DNA, 120 bp, Artificial Sequence
  ENSG00000274340_5 (sequence is synthesized)
aatcctaaggcattcacaagggtgaggtgcaggtgtctgaatatttgggcattaataagccagatagcactattctgtggctttccaaggtcaattaaattctttcccccagtgagaaag

SEQ ID NO: 978761 - DNA, 120 bp, Artificial Sequence
  ENSG00000274340_6 (sequence is synthesized)
accatttactgtttttttagagaaatcaactaaccattctacgtcctagcattatatttttcaaaaatttccccagtagaagtaaaagcaattttaccagtaacctttactaacttttct

SEQ ID NO: 978762 - DNA, 120 bp, Artificial Sequence
  ENSG00000274340_7 (sequence is synthesized)
gaaattgagatgcctccctagacctaaaaaaagttatttctaaatttagagtcagctactagtagtcgctgtctttattcagagtgatcatagttcattgtagaccagcaaaaaaaaact

SEQ ID NO: 978763 - DNA, 120 bp, Artificial Sequence
  ENSG00000274340_8 (sequence is synthesized)
aaaaaaacaaaatctaactttttttaacaagattacattttggggcttcgtctctacccagcagaggaaaacagggtgggagataaaacattccatctaagcaatttctcaagccttaca

SEQ ID NO: 978764 - DNA, 120 bp, Artificial Sequence
  ENSG00000274340_9 (sequence is synthesized)
gcctcttacttctgcccagcagatcttaagtagcaaaataaatacactttgtatgaataaagagtggaacatttggggaggtaagtcaaagagatagcttccaagtcacttgtaataaat

SEQ ID NO: 978765 - DNA, 120 bp, Artificial Sequence
  ENSG00000274340_10 (sequence is synthesized)
atatctggaacgaaaaaccattttcttcacaagtcagatttgtaattaccaaattagacattgcttggtgctaaagagctggatgctgagagattgcccctctcctcccattgcactgag

SEQ ID NO: 978766 - DNA, 120 bp, Artificial Sequence
  ENSG00000274340_11 (sequence is synthesized)
ccttaacctcctgaattcctgttgagcacttgtaggtatctggggtggctttgctcagctttcatagctgagcaaactcaactgtgtccatgttgaaaaaataaaagaaattccaccaaa

SEQ ID NO: 978767 - DNA, 120 bp, Artificial Sequence
  ENSG00000274341_0 (sequence is synthesized)
cataaggtattaaaattatgtgttaacatttgatcaccaaaggaaatataagcattattgcattctatcttttagtattgttaaatttctttatttagtcgatgttgtattaaagttaaa

SEQ ID NO: 978768 - DNA, 120 bp, Artificial Sequence
  ENSG00000237119_0 (sequence is synthesized)
gaggtcgctcagcacagcgcttccaaagttatttacctggtagcgagtgtcagacttccttcatttttctggctgaatcctattcccatgggtggatggaccgcattttgtcctccattc

SEQ ID NO: 978769 - DNA, 120 bp, Artificial Sequence
  ENSG00000237119_1 (sequence is synthesized)
atctgctgggggcaactgtgctgtttccacctttcagccattgtgagtaacgctggtctctggagtgacagggatggccctgccccactgacccaggcgttcaccccagagaagcgtgca

SEQ ID NO: 978770 - DNA, 120 bp, Artificial Sequence
  ENSG00000237119_2 (sequence is synthesized)
ggcaggtacaagaggccgagtgcggtcaacttgaagggacaggaagcctgcaggcagtgaccactctctaggctgtgctcagaggagaggccaaggggacacaggcaccagggccgtggg

SEQ ID NO: 978771 - DNA, 120 bp, Artificial Sequence
  ENSG00000237119_3 (sequence is synthesized)
acacacctgggctaccccagctcctatcaggacttgatgtggcgtatggagcactgaccgtccatgtggcaggactcagaggacgcgggcaacacagtgcccaggacagagaggccacag

SEQ ID NO: 978772 - DNA, 120 bp, Artificial Sequence
  ENSG00000237119_4 (sequence is synthesized)
aggagcaaacgggcaggccgaggacagtcaagaccaagggaaacggctaattaattaggctcagcctcttgaaaggcacttaaaatactaacgacttgctaaaaaagggcaggacttgaa

SEQ ID NO: 978773 - DNA, 120 bp, Artificial Sequence
  ENSG00000237119_5 (sequence is synthesized)
aggggtctgctgcctccctgcggggaagccctggcagagccccttgctttgctgctcacagagtccaggacatgagagccgagcccatgcaccagtgactcacgccccggcacagatgag

SEQ ID NO: 978774 - DNA, 120 bp, Artificial Sequence
  ENSG00000237119_6 (sequence is synthesized)
cccagagcccggaacagaggccgtagcaagaccccgggagcccagcctcccctacccctccagccccgctctgggccccaggaggctgacctccatggatgtcccagcaatctgtctctg

SEQ ID NO: 978775 - DNA, 120 bp, Artificial Sequence
  ENSG00000237119_7 (sequence is synthesized)
gcctctgggcactggaaatacagcggtggacacagtggtggacctcccggtatgtcctctgttcgactgaacagtcgggttgcggggcctccaggagctctgtgagcccgtgctcaggtg

SEQ ID NO: 978776 - DNA, 120 bp, Artificial Sequence
  ENSG00000237119_8 (sequence is synthesized)
cacacaacagaagtactccgctgacgcccacccctttcactcagctctcggttcagtcatcgccaagcaactgagagcctttgtgaagaggcttcctgccctcttcatcttccacagaca

SEQ ID NO: 978777 - DNA, 120 bp, Artificial Sequence
  ENSG00000237119_9 (sequence is synthesized)
cgctcttcttccttaagcccaggcatacacagacacagtgaatgcacacacaaagacacacaccagtgtgcacactgctctggaatccacaggttctataaatatctagaaatgatatct

SEQ ID NO: 978778 - DNA, 120 bp, Artificial Sequence
  ENSG00000277534_0 (sequence is synthesized)
ctttccttattttccccaaggtagtattttcgtgagtattattaaagttatattcatgttttggacactctctagtctaggagtcagaaaccaggggtctttggacactgtgttctattc

SEQ ID NO: 978779 - DNA, 120 bp, Artificial Sequence
  ENSG00000277534_1 (sequence is synthesized)
tgcaggcaggagtacccactggaggttttacaactttgacctgcctgccatcaagcagaagtaggaattttgcaggtctgaaggtatagtgcaggccctccaggaacatatgtcaggtac

SEQ ID NO: 978780 - DNA, 120 bp, Artificial Sequence
  ENSG00000277534_2 (sequence is synthesized)
ctctgtgctttttccaaagtggaaattccagttctggacacactgaccctttcaaacgtttaccagctaatgggcaagcctcaaggccaactgagaaaggggctgcgagtggtaatataa

SEQ ID NO: 978781 - DNA, 120 bp, Artificial Sequence
  ENSG00000277534_3 (sequence is synthesized)
acaccaaagttctctaaaatacacaagacctgtaggctatgtgtcttctgtacttcaggtgtgtagtctatttctgacaggttgtgttagtgaattttaagaatggagaggagaatttag

SEQ ID NO: 978782 - DNA, 120 bp, Artificial Sequence
  ENSG00000277534_4 (sequence is synthesized)
ggtttgctttttctttgaaagcaaaaataaatgttcatattcttctgatacagtaaaaacccttgaaatgccctaatttagaatagcacctgattaattaagagttaaaagtctaagaaa

SEQ ID NO: 978783 - DNA, 120 bp, Artificial Sequence
  ENSG00000277534_5 (sequence is synthesized)
gtttattaaggcgtgcatggccttgggataacaatgaaaccatttgtctactggcatctgtctgctggtttcttgacaccagtgtaatatagaattgtgacgtaaagaaccacaaaatat

SEQ ID NO: 978784 - DNA, 120 bp, Artificial Sequence
  ENSG00000277534_6 (sequence is synthesized)
aagagggtttcgtttcattggttttgttttgttctaaggaatgcagtctttcagtcattatcttttatttacctgagtaaaataaatcagttccaaaaaactgtatactgatgcttttat

SEQ ID NO: 978785 - DNA, 120 bp, Artificial Sequence
  ENSG00000277534_7 (sequence is synthesized)
tattcttgcattattgtcaggtaactcctaagttaaatatagatttgagtgtccatatatggcttatatgattattatggctctcaaacaagatcttagctccaagtccctgttagttaa

SEQ ID NO: 978786 - DNA, 120 bp, Artificial Sequence
  ENSG00000277534_8 (sequence is synthesized)
aacactacaaaaagttttcagtttgcacatttttagtagtcagcttttcacttatgaagtctgagcagtcgaagtattgctcagtagaaagctgagagcaaactttttccttctttgtat

SEQ ID NO: 978787 - DNA, 120 bp, Artificial Sequence
  ENSG00000277534_9 (sequence is synthesized)
attaaaatcactgtaagagttgaggttcagtgcatttcctggggcttaatgcctagctgaggttgctggcctgtggcattgctttgggtcatcaactcttctggctggtcattaatccgc

SEQ ID NO: 978788 - DNA, 120 bp, Artificial Sequence
  ENSG00000277534_10 (sequence is synthesized)
aggaaatgccctgtgcagctccagcttcagtcattattacttaatcataaacataggctctctagcctaatactgactggactttatcaagtagtgtcatacggaattccactgttgacc

SEQ ID NO: 978789 - DNA, 120 bp, Artificial Sequence
  ENSG00000277534_11 (sequence is synthesized)
ttgcaagtttccctaaagatgaagagcctgcttctttaaatgcatttactctttttacttcttgagggtgttgttaagtatattatttatgggactggttaaaaaatgaatgcattcaag

SEQ ID NO: 978790 - DNA, 120 bp, Artificial Sequence
  ENSG00000277534_12 (sequence is synthesized)
gattaacaaagattatggaatgtgtgattgctcatgtgaagtatctggcttttggggggagtgaggaattatggcgatggttgtgatggtcgctttaactggtccactctttaattctct

SEQ ID NO: 978791 - DNA, 120 bp, Artificial Sequence
  ENSG00000277534_13 (sequence is synthesized)
tgaatggttgtgttaaaagtaaagtgtagttttagttcccttgtcccccaaatagctattgtgatctaaaatgatccagttattggtacggtttgcaagctgccaggtggaggtcatgta

SEQ ID NO: 978792 - DNA, 120 bp, Artificial Sequence
  ENSG00000277534_14 (sequence is synthesized)
gtccattttaaactgcttaccactgtatcgtccatccttataactattctctttgcataaaaatagagcatttttcctacctcagagaacagtacttcagtttagagggatgatagagat

SEQ ID NO: 978793 - DNA, 120 bp, Artificial Sequence
  ENSG00000277534_15 (sequence is synthesized)
ttataattttgttctttatcattctcagaggagaaaatactaataaagtttagattctgaatgtcatagttttgtcactacagtttttgtagacatgtctctctcctgtgctaaacaaaa

SEQ ID NO: 978794 - DNA, 120 bp, Artificial Sequence
  ENSG00000277534_16 (sequence is synthesized)
gtgtgaagcatttgcaagctgtgacaaaggtgtctttagttgcacttgcttgaccctaacctagattatttccagaaatacttttaaggaattctgtagagaggacatctattagtggaa

SEQ ID NO: 978795 - DNA, 120 bp, Artificial Sequence
  ENSG00000277534_17 (sequence is synthesized)
agattttgggggctggtacacatcccctgtttgtgttttattgtcttcagtgtgggccgttggtccttatagttagcagagtggaaactgcagcaggctgcaagcaggctgacacagtta

SEQ ID NO: 978796 - DNA, 120 bp, Artificial Sequence
  ENSG00000277534_18 (sequence is synthesized)
gttgttcattaacttacctttgaggagaagccagaggctgacagctcagggaatccactcaggtgctataggggcaaggaagaaggaatatttaatgtatctacttaatagtgaaaggca

SEQ ID NO: 978797 - DNA, 120 bp, Artificial Sequence
  ENSG00000277534_19 (sequence is synthesized)
tgcattttatgtattattgaaataactgctaaggtcctattttgaatttgaagactaagagggagggatgttctttatttcttatagatggaatcaaatttttataaacatgaaaggagt

SEQ ID NO: 978798 - DNA, 120 bp, Artificial Sequence
  ENSG00000277534_20 (sequence is synthesized)
atagcgattgtaacaagacttcttgccatggttatttggagctattaagattaactgccttttaaagagtgggtatttttctgattttcaatattagtttgtggctacattcctttttct

SEQ ID NO: 978799 - DNA, 120 bp, Artificial Sequence
  ENSG00000277534_21 (sequence is synthesized)
actgcaagaatgtttgctctcctttatgaaaagttcaagttggtggagaaactaaatgttttgtacataagtatataactttcttcattcaggaagtagttactgagcgcctactgtttt

SEQ ID NO: 978800 - DNA, 120 bp, Artificial Sequence
  ENSG00000277534_22 (sequence is synthesized)
ggcttttgtaccaggagtctataaattaatcgttttccacctggcaagtagtctcattggcaaaattttggcttctttatctgtttaaactagatcaaaataaagacagttaaaaggtga

SEQ ID NO: 978801 - DNA, 120 bp, Artificial Sequence
  ENSG00000223749_0 (sequence is synthesized)
ccccctcgtggggaaggtagaaggtggggtctgccggacgcgtgttcctgccaccaggtgcccgctccccgcgaggccggctcaggagcagaaggaagcccggtgccagccagccttcct

SEQ ID NO: 978802 - DNA, 120 bp, Artificial Sequence
  ENSG00000223749_1 (sequence is synthesized)
gaaagaccaagcccgcgccatccggcttcctccagtggacgcctgcaggacccaggaatgtttttcttgaaggcatccagcatctccagttagcagtactgattttttttccccccaaca

SEQ ID NO: 978803 - DNA, 120 bp, Artificial Sequence
  ENSG00000223749_2 (sequence is synthesized)
aaggaacactacatcaacactgttggcggggacctggacacagaagactcctgtttcaagaaaatacaatcatctctcaaaggctgtaatttatatgcattttaaaactctaggcattga

SEQ ID NO: 978804 - DNA, 120 bp, Artificial Sequence
  ENSG00000223749_3 (sequence is synthesized)
aaaccacccaagtgtcccaaatagaagggtaatatataatcaatcactcagtgtaatattatacatcctttaaaaatgttattgggaaatgttttatgatctgtaagtccaaggaatcct

SEQ ID NO: 978805 - DNA, 120 bp, Artificial Sequence
  ENSG00000223749_4 (sequence is synthesized)
atgatgggaacctcaactgatttgaacagatgtgtgtcaatgttacttggaaaactagatgtcaataaccagggtcacagaaaaaggcagtggtcacaactctgtaaaaatgtatgcatg

SEQ ID NO: 978806 - DNA, 120 bp, Artificial Sequence
  ENSG00000223749_5 (sequence is synthesized)
cacacagacaagaactaaagtggaaccccacacaggaaaacagtgggctgtactccagtgctgggacattgaatgactgtatgctgcttttgatttccgttaatatgggcaactgtccaa

SEQ ID NO: 978807 - DNA, 120 bp, Artificial Sequence
  ENSG00000223749_6 (sequence is synthesized)
ttaaaaaaaaaactcctaaggactctgcagtgcaaattgttttgctgattgttttaaaacaccatacctatcaactcatcaaggcaaatggggcagcgggggactgggttcgttccctga

SEQ ID NO: 978808 - DNA, 120 bp, Artificial Sequence
  ENSG00000223749_7 (sequence is synthesized)
atcctggactgctatagagctcagggcaacatttgcagaaaacctgagcctatgagatgggagttataggcagctttcctgaggctgtgtaagatgaaaataaaactaggttcaaaaaat

SEQ ID NO: 978809 - DNA, 120 bp, Artificial Sequence
  ENSG00000223749_8 (sequence is synthesized)
aggctcccggggcgccgcccaccagcccgacccggcggcctagaaatccccattctgctcccgcctcgccccggccggccagcgcagggcccctcaggcccgcaatctccaggctcaaac

SEQ ID NO: 978810 - DNA, 120 bp, Artificial Sequence
  ENSG00000223749_9 (sequence is synthesized)
ggcgaacaggtccccgcatccgcctgcctttgcacttgggggtgggagagccaccttgtgacgccccttctgcctctcaccagcttccccctttctccccgtcctgtacggttccccctg

SEQ ID NO: 978811 - DNA, 120 bp, Artificial Sequence
  ENSG00000223749_10 (sequence is synthesized)
ccacaggacaacgaagaaaacctatcttcagtccccacccacgaaatgctggggggtggggaggactggaaaaggagtaaggggagaggaagggtgagcagctgcaagaagtctttacac

SEQ ID NO: 978812 - DNA, 120 bp, Artificial Sequence
  ENSG00000223749_11 (sequence is synthesized)
ctctctgcggttcctggtaaacgcgctcatgtcctgggtatggaagggacttaagaattcaggaaagatcaaaataacgggcctcttccccactccctcgccctcccttccccgctgctg

SEQ ID NO: 978813 - DNA, 120 bp, Artificial Sequence
  ENSG00000223749_12 (sequence is synthesized)
gggggttagggaggctccgtggagctccagcactctagaaggatcgggtgaggcgcgaggccttgcgggcgggtgaacccaaggtggggtggaaggctccaacccgcccaatctgagccc

SEQ ID NO: 978814 - DNA, 120 bp, Artificial Sequence
  ENSG00000223749_13 (sequence is synthesized)
gaggcctgctgagaagcatgggggccttgggatagttccagaatgaggatgtgcgtttctagctgctttgcgccctcctcccccaaaaatctgctaccacaattccaacccggcggcacg

SEQ ID NO: 978815 - DNA, 120 bp, Artificial Sequence
  ENSG00000223749_14 (sequence is synthesized)
cccccaagactcctttgtcgccccaggggcgggacctgagctgtcgatttcaggagcccttcgtgacttcaaaagtcctgggcactgttgctcatgagtgctgcacaactgtcgccctct

SEQ ID NO: 978816 - DNA, 120 bp, Artificial Sequence
  ENSG00000223749_15 (sequence is synthesized)
aaagccacctccatccctcactgggctggcctcctgagccttcgaaggaagcccggtgccagccagccttcctgaaagaccaagcccgcgccatccggcttcctccagtggacgcctgca

SEQ ID NO: 978817 - DNA, 120 bp, Artificial Sequence
  ENSG00000223749_16 (sequence is synthesized)
gggtaagtctgggactgccgttcgggcctacccagcaggtaagtcttaggccatcgcctgcggtgtcggccccgggagcagcgagacccaagattgcatcaaacgtttgccccgtctctg

SEQ ID NO: 978818 - DNA, 120 bp, Artificial Sequence
  ENSG00000223749_17 (sequence is synthesized)
tgggggcggcgagcaagggatcctgacttgggggcgttgcctcccggaatccaagcggccttttgcccgggtctcccgagatgcatcgaaattgagctcgtccacacagccccctgactg

SEQ ID NO: 978819 - DNA, 120 bp, Artificial Sequence
  ENSG00000223749_18 (sequence is synthesized)
cgtgatgcccttttctgacttaaaacattccttgtacctttatttacacgatccaagttgcagtgtgcctagattttcctccaaggacaaaaatgtgaataaagcaatattttagccaaa

SEQ ID NO: 978820 - DNA, 120 bp, Artificial Sequence
  ENSG00000223749_19 (sequence is synthesized)
agtcctgggcactgttgctcatgagtgctgcacaactgtcgccctctaaagccacctccatccctcactgggctggcctcctgagccttcgcttccccctttctccccgtcctgtacggt

SEQ ID NO: 978821 - DNA, 120 bp, Artificial Sequence
  ENSG00000223749_20 (sequence is synthesized)
gaaggtggggtctgccggacgcgtgttcctgccaccaggtgcccgctccccgcgaggccggctcaggagcaggtagaatgtaaacaattgaaaaaaatcccttcccaatcagaataccac

SEQ ID NO: 978822 - DNA, 120 bp, Artificial Sequence
  ENSG00000271270_0 (sequence is synthesized)
acgcggtctctgggctggttgagctgcgccgctgcaggtagtgctgagttgctccagtgccactgggttagggtctccacaaccgagctggtctcagcaagtggtgtccatacatggggc

SEQ ID NO: 978823 - DNA, 120 bp, Artificial Sequence
  ENSG00000271270_1 (sequence is synthesized)
tgtccatacatggggctcgaacctgggttgaagggtcgccagagcgacggttggagaacgtggaactaagctggaggacacctgagtactcttaagcaatccccgtggtgagtaagaagg

SEQ ID NO: 978824 - DNA, 120 bp, Artificial Sequence
  ENSG00000271270_2 (sequence is synthesized)
gaaagtataatgaactaacagaagacatgacagagcaggtttgtttgccagctaaagctaaagcggcaaaggaggaagaggttcctccctacccttctgcaccccctcattattttgaag

SEQ ID NO: 978825 - DNA, 120 bp, Artificial Sequence
  ENSG00000271270_3 (sequence is synthesized)
gattctgggaggatcccgaggatcccctggttgcagccatgttgagactgacgctgagggggaccccaactgtcacgagcaacacccatcgaacgcagccacctacctggggacagatca

SEQ ID NO: 978826 - DNA, 80 bp, Artificial Sequence
  ENSG00000271270_4 (sequence is synthesized)
gctgtcacagatggcagaagaaaacctaaggaaagtgggacaaccagtcacaatgagtaatttaatgatagctatgatag

SEQ ID NO: 978827 - DNA, 69 bp, Artificial Sequence
  ENSG00000271270_5 (sequence is synthesized)
tctccgtatttaccataataaatctgctcctgtaattgaggtatactgccctcaaaaacctatttgtaa

SEQ ID NO: 978828 - DNA, 120 bp, Artificial Sequence
  ENSG00000271270_6 (sequence is synthesized)
ctgtaattgaggtatactgccctcaaaaacctatttgtaaacagaattggacctggctagaaataatgaatgtatttgtttgggaagattgcattgcaaaacaggcagaggtgctgtgca

SEQ ID NO: 978829 - DNA, 83 bp, Artificial Sequence
  ENSG00000271270_7 (sequence is synthesized)
aggggatgtttagcttgaattgcacctgtcagtctgtgtgccacaaatggtagaaatggtaagaagtatggcaagagttccta

SEQ ID NO: 978830 - DNA, 78 bp, Artificial Sequence
  ENSG00000271270_8 (sequence is synthesized)
ttcagctggtctgaacaaaatggtcaaatggtagaaatggtaagaagtatggcaagagttcctattatttgaaacgct

SEQ ID NO: 978831 - DNA, 84 bp, Artificial Sequence
  ENSG00000271270_9 (sequence is synthesized)
aataggagtgcttgaaggagtgtagacagattagcaggtagtaacccattaaaatagataaaaacacttggaagctctgtgatt

SEQ ID NO: 978832 - DNA, 120 bp, Artificial Sequence
  ENSG00000271270_10 (sequence is synthesized)
ttgtttgtctttgtatagtctgcagctcccgactcctgcaagaagtagctcaccatgataaagccacctttgcatttatcatcttgcaaaaacaaaaagggggaacatgttgggaacagg

SEQ ID NO: 978833 - DNA, 75 bp, Artificial Sequence
  ENSG00000271270_11 (sequence is synthesized)
ctggccccaaaactgtatgacacccaccctgaaggttgtgggtttactgtaatgagggcaaggaacacctggccc

SEQ ID NO: 978834 - DNA, 77 bp, Artificial Sequence
  ENSG00000271270_12 (sequence is synthesized)
gcccacccagggcagaaaactgcttaaggcgttcctaagccacagacaatagcatgagtgatctatgcattttgttt

SEQ ID NO: 978835 - DNA, 120 bp, Artificial Sequence
  ENSG00000271270_13 (sequence is synthesized)
tggcttgctgtcagtaaatatgtgggttaaactctgtttggggctctcagatctgaaggctgtcagccccctggatttcccactccacactctatagttctgtgtgtgtgtgtgtgtgtg

SEQ ID NO: 978836 - DNA, 120 bp, Artificial Sequence
  ENSG00000271270_14 (sequence is synthesized)
tgtgtgtgtgtgtgtgtgtttctttaattcctctagtgctgctgggttagggtctccacgactgagctagtctcagcagtataaaaatcagaatattaatttggcaacatttggtaatat

SEQ ID NO: 978837 - DNA, 120 bp, Artificial Sequence
  ENSG00000271270_15 (sequence is synthesized)
atattaatttggcaacatttggtaatatcaatgcagaatatttatcagaaatcaaatgttatcaccaaaaatctactctactttgttatccaggagatgcaatacaaaacccattaatta

SEQ ID NO: 978838 - DNA, 120 bp, Artificial Sequence
  ENSG00000271270_16 (sequence is synthesized)
aaacattaacagatactattaaaatactttgggataaggtcagaaatgctaaatgttacttattattttagacacattacctgatgcgaggcatatagtgcagatgattatggttagagt

SEQ ID NO: 978839 - DNA, 120 bp, Artificial Sequence
  ENSG00000271270_17 (sequence is synthesized)
tgtgattttctaaactcaaatacttctatatgtgaacatttttgggagatttttgtcacaactggagaaagattatttttaaattttagtaaactacttacaaaaactgaaccagacaaa

SEQ ID NO: 978840 - DNA, 120 bp, Artificial Sequence
  ENSG00000271270_18 (sequence is synthesized)
aataattcaagaagctagaaatatgacaacatggtgcaataggaaatccttgaataaaaaatatatatatgtatatatacaccataaaatatagaatggtatattctgtatcattctata

SEQ ID NO: 978841 - DNA, 120 bp, Artificial Sequence
  ENSG00000271270_19 (sequence is synthesized)
ttccttttctaaagcatcattattattatttgagatgagggggagatctaaccatgttgcctgggctggtcttgaacccctgtcctcaagcaatcttccttcctcagcctcctgagtagt

SEQ ID NO: 978842 - DNA, 89 bp, Artificial Sequence
  ENSG00000271270_20 (sequence is synthesized)
ctcaagcaatcttccttcacataccactatgcccaccttaaagcttgcttgcttgcttgcttgcttttttttttttttttttttgagac

SEQ ID NO: 978843 - DNA, 120 bp, Artificial Sequence
  ENSG00000271270_21 (sequence is synthesized)
gcacgatctcagctcactgcaacactccagcctgagcaacagagcagactccatcttggggaaagaaagaaaaaaaaaaagaactatacatctaccaaaagcttcagttaaatgtttggg

SEQ ID NO: 978844 - DNA, 120 bp, Artificial Sequence
  ENSG00000271270_22 (sequence is synthesized)
tatattgaaaacacactggatataaatttgaaaccactgttaaacgtgtgacaggaaaatcgagttgagactgccatgcccgtgtcaactgaccatgggttcttgggctctcaatgcaat

SEQ ID NO: 978845 - DNA, 120 bp, Artificial Sequence
  ENSG00000271270_23 (sequence is synthesized)
agaacattgacatgaggccaaaagagttttctcaaagcttcactggagcttttgtccagccataagggaggcagaacgagagagaaagagagatagagagagacagagagagagagagag

SEQ ID NO: 978846 - DNA, 120 bp, Artificial Sequence
  ENSG00000271270_24 (sequence is synthesized)
agagtattccctgacagactccacctataaaagaacaggtaggacttttttattaggcaaagtacagaactgacatcagaagtagagtgtacacaggctgggcaaggcaaacaatgtgag

SEQ ID NO: 978847 - DNA, 120 bp, Artificial Sequence
  ENSG00000271270_25 (sequence is synthesized)
gggtagggtagcaggtcagcatatccagttgtgatggttatcttgagtaatgggccacctggtagtctggcctgtgacaacaagactataaatcaattgtccagcagcattcctttctga

SEQ ID NO: 978848 - DNA, 120 bp, Artificial Sequence
  ENSG00000271270_26 (sequence is synthesized)
ggtgggacactctgcaaccttggttagctcctaaagccagttcctggaattctttaagtaaaaagactattagcagcgaggtaatggtgtgggttttgtgatgtgtgggaatgctctaat

SEQ ID NO: 978849 - DNA, 120 bp, Artificial Sequence
  ENSG00000271270_27 (sequence is synthesized)
gggggtgaaccaaagccaggctctgtctctactgtgtctcaccagtaaaaacacaattacaaacagcatgcaatgctcttttttgtgatgatggttaataaagaatacacattctaaaat

SEQ ID NO: 978850 - DNA, 77 bp, Artificial Sequence
  ENSG00000271270_28 (sequence is synthesized)
ctcttaagcaatccccgtgggggagttaatcctcgaggattggaacgtaattctctttggcaaatggatgtcaccca

SEQ ID NO: 978851 - DNA, 61 bp, Artificial Sequence
  ENSG00000271270_29 (sequence is synthesized)
catgccaatcaggagagtcttctgcctgagttaaacgtcccaggctatactagccaagctc

SEQ ID NO: 978852 - DNA, 81 bp, Artificial Sequence
  ENSG00000271270_30 (sequence is synthesized)
ctccctgaaacagcagttgcaaaagcaaaaagggggaaacagggactatgggataccccatatgcaattgaatctagtatt

SEQ ID NO: 978853 - DNA, 120 bp, Artificial Sequence
  ENSG00000271270_31 (sequence is synthesized)
acagcagttgcaaaagcaaaaagggggaaacagggactatgggataccccatatgcaattgaatctagtattattgactttaaattttttgagactgcctaaaggccagatgctatcagc

SEQ ID NO: 978854 - DNA, 120 bp, Artificial Sequence
  ENSG00000271270_32 (sequence is synthesized)
gcagaacaactggtttggtggagagagccaatgataaaaagttgggaaatgggtagaataataacttggggtagaggttatccttgtgtttctccaggaccaaatcaactgccaatttgg

SEQ ID NO: 978855 - DNA, 120 bp, Artificial Sequence
  ENSG00000271270_33 (sequence is synthesized)
caacagctgtggagagaagccgggcgacagctgtggagagaagccgggcgatatgctcacgcttccgtgtgcccagcaatcctgctttatctttttaaataaaggtgattcctgataaca

SEQ ID NO: 978856 - DNA, 120 bp, Artificial Sequence
  ENSG00000271270_34 (sequence is synthesized)
gggctggttgagctgcgccgctgcaggtagtgctgagttgctccaggtaagctcctcctctcaaaaagctctaggaaccgagccaccctcgccctaggagcaacgcccctgagtaatatg

SEQ ID NO: 978857 - DNA, 120 bp, Artificial Sequence
  ENSG00000271270_35 (sequence is synthesized)
gggtttcgtcggatttctgcccgccgctctggatcacacgtttgttctccctatttgagtcgcaaggccttccttcattccacctagcaggctgcttggaaaagggcagagactcattac

SEQ ID NO: 978858 - DNA, 120 bp, Artificial Sequence
  ENSG00000271270_36 (sequence is synthesized)
agcagtgcctcgagtgaccgctctcagttctattcaagcaggaatccagcaagctagaagagagggtgatttagaggtttggcagtccctgttggaatacaccccccagatcaacaggga

SEQ ID NO: 978859 - DNA, 120 bp, Artificial Sequence
  ENSG00000271270_37 (sequence is synthesized)
tcaaagaatttaaacaagctattaatcagtatggacaaggttatccttttgtaatgggactgttaaagaatgttcctgtctccagtcagatgttgccagtggggcttataggattacttc

SEQ ID NO: 978860 - DNA, 78 bp, Artificial Sequence
  ENSG00000271270_38 (sequence is synthesized)
ggactgttaaagaatgttcctgtctccagtcagatgttgccagtggggcttatgcaagtatatacaggagtcattgat

SEQ ID NO: 978861 - DNA, 69 bp, Artificial Sequence
  ENSG00000271270_39 (sequence is synthesized)
tggtagatacaggagcagacatttcagttatttctctacagcactggtcatcctcctggccaattcaac

SEQ ID NO: 978862 - DNA, 120 bp, Artificial Sequence
  ENSG00000271270_40 (sequence is synthesized)
ggtatgggactaggaaaaaatttgcaatgtttgaaggaaccacttcaagcaggaagacaaagttcccaccaaggtttagggtatcatttttgatcgtggccattgttaagcctccagaac

SEQ ID NO: 978863 - DNA, 78 bp, Artificial Sequence
  ENSG00000271270_41 (sequence is synthesized)
tccagaacctatacctttaaaatggttgacagataagccaatttggatagaataatggccactaaaattagaaaaaga

SEQ ID NO: 978864 - DNA, 120 bp, Artificial Sequence
  ENSG00000271270_42 (sequence is synthesized)
agttactgaataattagaaaaagaacacatagctccaacattttccccttggaattcttcagtctttattattaagaaaaaatcaggtaaatggagaatattaactgacttaagagccgt

SEQ ID NO: 978865 - DNA, 120 bp, Artificial Sequence
  ENSG00000271270_43 (sequence is synthesized)
agagccgttaattccgttatacaacctacaggggcattacagccaggattgtcttttcctgctatgattctgaaaaatcagcctttaatagccatagatttaaaagactgtttctttact

SEQ ID NO: 978866 - DNA, 78 bp, Artificial Sequence
  ENSG00000271270_44 (sequence is synthesized)
aattttcacagtgttacattattcattatgtggacgatatactttgtgctgccgcctcgatttctcgtgccagtttaa

SEQ ID NO: 978867 - DNA, 83 bp, Artificial Sequence
  ENSG00000271270_45 (sequence is synthesized)
tccaatgttatgatcacttgcaaaactcgatttctcgtgccagtttaattatagctacttaaacttagtaaatgacactacca

SEQ ID NO: 978868 - DNA, 120 bp, Artificial Sequence
  ENSG00000271270_46 (sequence is synthesized)
gccacagaaagtaaccatatagtaaccatatacgtcgggatcaattgaaaacattaaatgactttaaaaaattactaggggacattaattgcatatgacctgctctaggcattcctacct

SEQ ID NO: 978869 - DNA, 120 bp, Artificial Sequence
  ENSG00000271270_47 (sequence is synthesized)
atcctagtctcactagcccttggcaattaacaaatgaggctgaggcagagttacagctgattgaaaagcaagtctgtaaagctcaaatgaatagaatagatcaagagaagactctagatt

SEQ ID NO: 978870 - DNA, 120 bp, Artificial Sequence
  ENSG00000271270_48 (sequence is synthesized)
tgctaattttttcaactcagtattcacctactgtgttattgtccaagagcaggacttagtagaatggctttttcttccacatgctaattcacagactttgaccccttatttggatcgaat

SEQ ID NO: 978871 - DNA, 64 bp, Artificial Sequence
  ENSG00000271270_49 (sequence is synthesized)
atgctaattcacagactttgaccccttatttggatcgaattgctactatgataggaacctctta

SEQ ID NO: 978872 - DNA, 89 bp, Artificial Sequence
  ENSG00000271270_50 (sequence is synthesized)
caaatacagcaacgtagctgactttgtgggtattttcaataaccattttcctaaaacaaaattatttcaatttttgaaattaactaatt

SEQ ID NO: 978873 - DNA, 120 bp, Artificial Sequence
  ENSG00000271270_51 (sequence is synthesized)
atggtaaagcttcttattctggatcgaaaggtaaagttttccagacgccctatacttcggctcaaaaagcagagcttgtagctataattgaggtattgactgcttttgatatacctatta

SEQ ID NO: 978874 - DNA, 72 bp, Artificial Sequence
  ENSG00000271270_52 (sequence is synthesized)
ccagacgccctatacttcggctcaaaaagcagagcttgtagctataattgaggtattgactgcttttgatat

SEQ ID NO: 978875 - DNA, 88 bp, Artificial Sequence
  ENSG00000271270_53 (sequence is synthesized)
tgaacaactgatgactttatttacccaactgcaaacagcaattaggagtagaatgcaccctttctacattactcatattcccagggaa

SEQ ID NO: 978876 - DNA, 78 bp, Artificial Sequence
  ENSG00000271270_54 (sequence is synthesized)
tcatacacctcttccaggacctttgactccagggaatcaaatggctgatcgcctagttgctactgcaatatctaatgc

SEQ ID NO: 978877 - DNA, 120 bp, Artificial Sequence
  ENSG00000234117_0 (sequence is synthesized)
agggagaagaggaaactttccacttattcaccatcattcattccaactgctaaacagatccaggctcctaacagctaataaatgaaactgagaggtttgagaagacaataaacagggtct

SEQ ID NO: 978878 - DNA, 77 bp, Artificial Sequence
  ENSG00000234117_1 (sequence is synthesized)
aatgaaactgagaggtttgagaagacaataaacagggtctcactctgttgcccggattggagccttaatcaatcctc

SEQ ID NO: 978879 - DNA, 120 bp, Artificial Sequence
  ENSG00000234117_2 (sequence is synthesized)
acaaatacacaactgtttgtatttgtgctgcttttttttcccattaccatacgtgaatggaatgaacagcttctctgaggatggatagtgtaagatgtggaattcctgcctgctatcttg

SEQ ID NO: 978880 - DNA, 120 bp, Artificial Sequence
  ENSG00000234117_3 (sequence is synthesized)
atgaaattttgtggacatgagattgaaaatgcgtgatttataagcaaaaggaaaaaaaaacctttaagccttcatgccctgcatttcaaatttctggctgatttataaacctttcaaagc

SEQ ID NO: 978881 - DNA, 120 bp, Artificial Sequence
  ENSG00000234117_4 (sequence is synthesized)
tcatgctatgaagcaattcaaaatttctatgtctatacatgtttagctaacattaactcagctagccgccccgtggcattttccgtgctagtcttcattttttccctctatattttttct

SEQ ID NO: 978882 - DNA, 120 bp, Artificial Sequence
  ENSG00000234117_5 (sequence is synthesized)
cgtctcgcttttttagaaatgttattcctatttctgtcacactgtcaccttttagtctgtcttgcaagaatgtaacatcagccgccaaatgaacctaggaaagaagaaaaaaacaggcct

SEQ ID NO: 978883 - DNA, 120 bp, Artificial Sequence
  ENSG00000223742_0 (sequence is synthesized)
ccatccaccgcgtaattgagttccctgcaaaagagttcgctgctggtttctgagatgaatttgtgatgaagaaagagggtcaaagtagtttccaggcaatcttgtggtgttggtggagat

SEQ ID NO: 978884 - DNA, 120 bp, Artificial Sequence
  ENSG00000223742_1 (sequence is synthesized)
ggcagctgcagttactggaaccagtaagaatgaaaactctgagggaggagtcttctctgttctatacagcttgcagtttcaagaggcacagcgcttctgaggggccctgattttactgcc

SEQ ID NO: 978885 - DNA, 120 bp, Artificial Sequence
  ENSG00000223742_2 (sequence is synthesized)
gtggatagtgagaactgcaacaactgtcaccgggaacgactccatccaaatcccagcactaaaagacttgatcaatgacttctagctgcctaaggccatattcctgggaagaccaaagtc

SEQ ID NO: 978886 - DNA, 120 bp, Artificial Sequence
  ENSG00000223742_3 (sequence is synthesized)
caaaagaatttactgttgttaacaacaaacacctgagataggcccttcacctctgtttcttagagtatttgttaaggaaaaaaaaagcttacaaatctaaatatttcctttgtccctgtg

SEQ ID NO: 978887 - DNA, 120 bp, Artificial Sequence
  ENSG00000223742_4 (sequence is synthesized)
agatgcatatgtatttcctacaacccttggagtgtctttctcaaagacctgagacctttgaaatgtaatcatgtaatttttagaaaaggatagggtcccagtctctcattgcctttagga

SEQ ID NO: 978888 - DNA, 120 bp, Artificial Sequence
  ENSG00000223742_5 (sequence is synthesized)
agcctaacttcgataaatgccagtagcagacactggcagcctaatccattttcattgacccaccctcttagccactttttgtaatttttcacatctctgactctgctctatctaccactg

SEQ ID NO: 978889 - DNA, 120 bp, Artificial Sequence
  ENSG00000223745_0 (sequence is synthesized)
tcgcgctgccagcagcttccgcctgctacggtcctggcaagcacctcgggatcccattccttcacagggaccctagccagttaaagctgatacattcctgtgggtcaactatgcaactaa

SEQ ID NO: 978890 - DNA, 120 bp, Artificial Sequence
  ENSG00000223745_1 (sequence is synthesized)
ctcagattttgagcaaacaaagctctcaagttggtgatcctcaggagtctctgcattagttggacagctcttctggaattatcttctaagtcaactgtgggttgggtaggtggctctgct

SEQ ID NO: 978891 - DNA, 120 bp, Artificial Sequence
  ENSG00000223745_2 (sequence is synthesized)
tggctgttttcctcacattcctcaagcaggtactgtaataaagaactggagaaatacagtcagatgggaagtagcccttgctgtcaaggagcttgccatctaatgggggagacaggcaag

SEQ ID NO: 978892 - DNA, 120 bp, Artificial Sequence
  ENSG00000223745_3 (sequence is synthesized)
taaaccaaagactacacagtgcagtatgaatttcctttcatctctggtaaaagtcagctctctaactactgcatctcacagctgaacagataactgataccgtgcttccagaagattttt

SEQ ID NO: 978893 - DNA, 120 bp, Artificial Sequence
  ENSG00000223745_4 (sequence is synthesized)
gctgaacagataactgataccgtgcttccagaagatttttctaacagtgtttgcaagctataaaatagtgctttcacttagaaaaggctagacgtggtggttcatgcctgtaatcccagc

SEQ ID NO: 978894 - DNA, 120 bp, Artificial Sequence
  ENSG00000223745_5 (sequence is synthesized)
taaaccaaagactacacagtgcagtatggtaagtgccatgattttgatgtgacagggcacagtggacgaccttccaaatcaaagcaagtaactaggggttgacaatggtaagtatcatag

SEQ ID NO: 978895 - DNA, 120 bp, Artificial Sequence
  ENSG00000223745_6 (sequence is synthesized)
ttgaagtatccttgaacaaggtttcaggaagaagaagaagggaatttcatgcagggaaacagccaaagctcagtgagtcaaaatatcacagcattcttggtaagcccaattgttttttct

SEQ ID NO: 978896 - DNA, 120 bp, Artificial Sequence
  ENSG00000223745_7 (sequence is synthesized)
gttttgctattttggtggagagaaaggaacacataaaggaataacatgagagaaggctatttggggaagtgtagtagttaaggttctggctcaaacaacaactgcagctcataaagttga

SEQ ID NO: 978897 - DNA, 120 bp, Artificial Sequence
  ENSG00000223745_8 (sequence is synthesized)
ctttagtggaaggatactggggtatctcatggaatcttgggaactgttgaataaccagggaaactctgggaaactcactggtaggaatccataaactgtcctcctggtgggctgtaaaca

SEQ ID NO: 978898 - DNA, 120 bp, Artificial Sequence
  ENSG00000223745_9 (sequence is synthesized)
atcaaaattccagtttcttgggaaaacaagtctgtttgcccaatttgggtcatatttccacgtccatgttactcaggcatgattcatctgcaagttatgtgtatagatattttgctactg

SEQ ID NO: 978899 - DNA, 120 bp, Artificial Sequence
  ENSG00000223745_10 (sequence is synthesized)
ttccacccttacgctgtgctggggagggaggtgtcactgtgagctgtgtcggtgccttaagagatatctgttgtgtcttattacttggttgcttttccccacatgtacaatgacaaaaat

SEQ ID NO: 978900 - DNA, 120 bp, Artificial Sequence
  ENSG00000223745_11 (sequence is synthesized)
gccttcaacctatttgatccagccgttccagtacaactcctatacttgccatctttccaagcccaaaggtacatccagctgatggaaggagcatcttggtgttaatattcttttagtcat

SEQ ID NO: 978901 - DNA, 120 bp, Artificial Sequence
  ENSG00000223745_12 (sequence is synthesized)
ggtctctgaaagtaaaatgtctattcttctaattctggcacaatcttatctagctatagttcctcatggtcctgcactccatggactaaattatgatgaaactgaaacacaaaaaattta

SEQ ID NO: 978902 - DNA, 120 bp, Artificial Sequence
  ENSG00000223745_13 (sequence is synthesized)
gattaactcttaggtgacaaagccaggattgaagctcatgcggtctggctccagaacaactcttcttcatagttacgttatactgcccctgcattgttggtattgaaaataactgatacc

SEQ ID NO: 978903 - DNA, 120 bp, Artificial Sequence
  ENSG00000223745_14 (sequence is synthesized)
tccagttttcccagcaccacttattaaagagactgtcttttctgcagtgtatattcttggcaccgttgttgaaaatgaattcattgtaggagggctctgagagatttcatttctgtcctg

SEQ ID NO: 978904 - DNA, 120 bp, Artificial Sequence
  ENSG00000223745_15 (sequence is synthesized)
ctgatgaagtctacgttcattcagggcctgctgtggaagaccagccccaaagttgctgaacagaagacttttgagagtcagcagaaatcttccactttgcatggttctcttgatgtgaaa

SEQ ID NO: 978905 - DNA, 120 bp, Artificial Sequence
  ENSG00000223745_16 (sequence is synthesized)
ggatccaacataagacaaacagtgctgatgcttttggaaagctcatattcaagctggggagacaaacaacatacaagctcatagatggaaggcttgtctcagataagactttggacttgg

SEQ ID NO: 978906 - DNA, 76 bp, Artificial Sequence
  ENSG00000223745_17 (sequence is synthesized)
atgctggaatgagttaagactttggggtagagatctgggaggggccagggttggaatgatatggcttggctctgtg

SEQ ID NO: 978907 - DNA, 120 bp, Artificial Sequence
  ENSG00000223745_18 (sequence is synthesized)
gctgttttcctcacattcctcaagcaggtaagcttaatcatgttctcatattgaagcagaaactgtttactcatttatctatttacttactgggtctcctgggcactaggtactgtaata

SEQ ID NO: 978908 - DNA, 120 bp, Artificial Sequence
  ENSG00000223745_19 (sequence is synthesized)
ctgcactccatggactaaattgtaagtataattactaccaatgtactctataaataacttttggggccagggtggcaatagttgctagagagaaaaaaaaaaaaaaggaaggagaagaaa

SEQ ID NO: 978909 - DNA, 120 bp, Artificial Sequence
  ENSG00000223745_20 (sequence is synthesized)
gacaaagccaggattgaagctcatgcggtctggctccagaacaactcttcttcatagttacgttatactgcccctgcattgttggtattgaaagagggctctgagagatttcatttctgt

SEQ ID NO: 978910 - DNA, 89 bp, Artificial Sequence
  ENSG00000223745_21 (sequence is synthesized)
accagcctaggcagcatttcaagaccctgtctctactaaaaagtaaaaaaaaaatttagtcaggcatggtggcatgcacctgtagtcgt

SEQ ID NO: 978911 - DNA, 120 bp, Artificial Sequence
  ENSG00000223745_22 (sequence is synthesized)
tgccattgcactccagcctgggcatcagagcaagaccttgtcttttaggaaaaaaaggcagggaagaggaataggtaatttttcagtgttcagacattccagcaatatgtgtggagtact

SEQ ID NO: 978912 - DNA, 120 bp, Artificial Sequence
  ENSG00000223745_23 (sequence is synthesized)
cattctcactacagtttatgaggccatagctagtatgtatgactacccatccaagtttccctgcttacagttactattccaactgattggggggcttttcctaatagagtgatttaagcc

SEQ ID NO: 978913 - DNA, 120 bp, Artificial Sequence
  ENSG00000223745_24 (sequence is synthesized)
ttcatttttagacatctaagcccttggtgatcatcagcataaaatgtgacaaattaaacaaaagcaagacagcacatcagagaacaactctgaggtggaatgattgggaaccaatgaata

SEQ ID NO: 978914 - DNA, 120 bp, Artificial Sequence
  ENSG00000223745_25 (sequence is synthesized)
ttactagtcttgtgagcgagaaaaagctactgaatttttctaagctcagtctttttcatttatgaaatagagatatcctttgtgggccggttgccgtggctcacgcctgtaatcccagca

SEQ ID NO: 978915 - DNA, 120 bp, Artificial Sequence
  ENSG00000223745_26 (sequence is synthesized)
caggcaagcgcgcgcctcactgtaccggagagctccaagcacgcgcttggtctggggcccggacgctacatctgggaaggggtgggtggctgggtagataggcgaggaaggatcgtctct

SEQ ID NO: 978916 - DNA, 120 bp, Artificial Sequence
  ENSG00000223745_27 (sequence is synthesized)
cggcgggagccgcccgttcgcgctgccagcagcttccgcctgctacggtcctggcaagcacctcgggatcccattccttcacagggaccctagccaggagtctctgcattagttggacag

SEQ ID NO: 978917 - DNA, 120 bp, Artificial Sequence
  ENSG00000223745_28 (sequence is synthesized)
gtctatgtgtctgtttttatgccagtaccgtgtcattttagttaccagagctctgcagtataatttgaaaccaggtcatgtgattcctccagttttgtggtattaggataggtttggcta

SEQ ID NO: 978918 - DNA, 120 bp, Artificial Sequence
  ENSG00000223745_29 (sequence is synthesized)
cgctgccagcagcttccgcctgctacggtcctggcaagcacctcgggatcccattccttcacagggaccctagccagctgaggcctccgaaaccttccctagctggatttggggacagag

SEQ ID NO: 978919 - DNA, 70 bp, Artificial Sequence
  ENSG00000223745_30 (sequence is synthesized)
ggagggctctgagagatttcatttctgtcctgctgatgaagtctacgttcattcagggcctgctgtggaa

SEQ ID NO: 978920 - DNA, 120 bp, Artificial Sequence
  ENSG00000223745_31 (sequence is synthesized)
aatgatgccagatgtcctgtatcttgcacggttgttccacatgacagaactatctggctggcaattctactagactttgctagtctgtttatgctttcctactctccaaagaatgagact

SEQ ID NO: 978921 - DNA, 120 bp, Artificial Sequence
  ENSG00000223745_32 (sequence is synthesized)
gtggctgccgccgtggccgcgtagcccgaacgcagatcgtggaagccgaagacgcggcaacggtggtccctccagatgccagggaaggtttgcaggaagccgctcccgacaccctttgcg

SEQ ID NO: 978922 - DNA, 120 bp, Artificial Sequence
  ENSG00000223745_33 (sequence is synthesized)
agtgctgatgcttttggaaagctcatattcaagctggggagacaaacaacatacaaaagttctcatcatgatactttaaggatgaggacagctgatgtggctggcctgaaaaataagaaa

SEQ ID NO: 978923 - DNA, 120 bp, Artificial Sequence
  ENSG00000223745_34 (sequence is synthesized)
tcattcagggcctgctgtggaagaccagccccaaaggaatgagactacatacactaaaaaaccaaaaagcctaaaaaaagagatgatattttaatttcaaaagcttaataatttgctgaa

SEQ ID NO: 978924 - DNA, 120 bp, Artificial Sequence
  ENSG00000223745_35 (sequence is synthesized)
ggtcttgaagtcctgacctcaggtgattcacctacctcagcttcccgacgtactgggtttacaggcatgagccaccgttcccggccaaggagggctctgagagatttcatttctgtcctg

SEQ ID NO: 978925 - DNA, 72 bp, Artificial Sequence
  ENSG00000223745_36 (sequence is synthesized)
tcctgctgatgaagtctacgttcattcagggcctgctgtggaagaccagccccaaaggagctactgcagcct

SEQ ID NO: 978926 - DNA, 120 bp, Artificial Sequence
  ENSG00000223745_37 (sequence is synthesized)
tgagcagctgggattacagttgctgaacagaagacttttgagagtcagcagaaatcttccactttgcatggttctcttgatgtgaaatcatctatatagccccagaattggaaaagaaaa

SEQ ID NO: 978927 - DNA, 120 bp, Artificial Sequence
  ENSG00000223745_38 (sequence is synthesized)
aattcctaagttaggcttttcttactcctagagttctgtatagcatggccttcttatttcttgtaacattgcttttgggaataaaatgtttgaagaaaggaatataaagaagaaaaaatg

SEQ ID NO: 978928 - DNA, 120 bp, Artificial Sequence
  ENSG00000223745_39 (sequence is synthesized)
ctggggaatatataagggaaaaagaacaaaggttgaaaaacagaaacagagaaagggaggaaagataaatctgaccactttaaagtcagtcagtatacctacagacattcagttgagcaa

SEQ ID NO: 978929 - DNA, 120 bp, Artificial Sequence
  ENSG00000223745_40 (sequence is synthesized)
acattttaacaatattcattcttctaatccatgaacatggaatacctttccattttttggtgtccatttcaatttctttcatcagtcttatacttttcattatagagatctttcacttct

SEQ ID NO: 978930 - DNA, 120 bp, Artificial Sequence
  ENSG00000223745_41 (sequence is synthesized)
tggattaactcctatgtatttaattttacttgtagctattgtaaatgggattacttttttttttttttttgacggagtttcacccttggcatccaggctagtgtgcaatggcgcaacctc

SEQ ID NO: 978931 - DNA, 60 bp, Artificial Sequence
  ENSG00000223745_42 (sequence is synthesized)
acctcacagcaagggattacttttttaatctctttttcagatttttcactgttggcatat

SEQ ID NO: 978932 - DNA, 120 bp, Artificial Sequence
  ENSG00000223745_43 (sequence is synthesized)
ttttttaatctctttttcagatttttcactgttggcatatagaaatcctactaatttttgtatgttgattttgtatcctggaactttactgaatctgtttataatttgtgtatttgttta

SEQ ID NO: 978933 - DNA, 120 bp, Artificial Sequence
  ENSG00000223745_44 (sequence is synthesized)
tagtagttttttggtggactctttcagtttttccaaatataagatcatatcattggcaaacaaggacagtttgatttcttctattccaatttggatgcctttatttctttctgttgtctg

SEQ ID NO: 978934 - DNA, 120 bp, Artificial Sequence
  ENSG00000223745_45 (sequence is synthesized)
attgctctagttaggacttccagtactatgttgaataacagtgatgaaagtgggcatccttgccatgttccagatcttagaaaagaggctttcagtttttcaccattcagtttgatacta

SEQ ID NO: 978935 - DNA, 120 bp, Artificial Sequence
  ENSG00000223745_46 (sequence is synthesized)
gctgtggcagcttccatgagaatcacgcagtttgaagaagcatttcactgaaaaatagggattgctgttctggaaagacaaaacaattgtctacaattctaaagaagaagtgaacacaat

SEQ ID NO: 978936 - DNA, 120 bp, Artificial Sequence
  ENSG00000223745_47 (sequence is synthesized)
aattgtctacaattctaaagaagaagtgaacacaataattaaatcaatgttattctgggtctaaagcttatattcttaattactatattatcccatcttaaaattttaatttggaaatta

SEQ ID NO: 978937 - DNA, 79 bp, Artificial Sequence
  ENSG00000236447_0 (sequence is synthesized)
gactggggtgcaataagtgatcctttcacctcagctctctaagtagctgggccacagacacatgctgccacacccagct

SEQ ID NO: 978938 - DNA, 89 bp, Artificial Sequence
  ENSG00000236447_1 (sequence is synthesized)
tgatctcctgggcttaagtgatcctttcacctcagctctctaagtagctgggccacagacacatgctgccacacccagctaatttttta

SEQ ID NO: 978939 - DNA, 120 bp, Artificial Sequence
  ENSG00000236447_2 (sequence is synthesized)
ttacaggtgtgagccaccatgcctgaccaaggctcctttagagtgtatattgtccctcataccttcaggttttatggtcactcatacaatcactttggcaccatccattttatttttatt

SEQ ID NO: 978940 - DNA, 120 bp, Artificial Sequence
  ENSG00000236447_3 (sequence is synthesized)
ctcatacaatcactttggcaccatccattttatttttattttatttatttatttttaaaattaaattaaattttttttttttgagacgaagtctctgtcacccacgctggagtgcagtgg

SEQ ID NO: 978941 - DNA, 120 bp, Artificial Sequence
  ENSG00000279047_0 (sequence is synthesized)
caggaaaaaaagtccttgggaattgagaagccaatgagattagtcgttcaagctgaagtcattctatctgctagctgtctggagccactgaagctgtgggcgaacagcaacaagtttaag

SEQ ID NO: 978942 - DNA, 120 bp, Artificial Sequence
  ENSG00000279047_1 (sequence is synthesized)
ctacatctgcacactctgcggtccatccagagaccaagaaagaagcacaaggatcctgcagagtcttccgaagcccaagccaaatatatgaggcagggagctagagaatgtggaggaagt

SEQ ID NO: 978943 - DNA, 120 bp, Artificial Sequence
  ENSG00000279047_2 (sequence is synthesized)
tcagtaggaaaaggaatgggaacagacattctccttcagaaacttgaggtccagtccctgaactttagctggccccaaaacttgagcaagctctaaaaagcagaacatctcccacttaac

SEQ ID NO: 978944 - DNA, 120 bp, Artificial Sequence
  ENSG00000279047_3 (sequence is synthesized)
agtttattctgagaactggccaaccacaggagggaaaatcatatctccagttaaagtgccctgatcatgccatctgctcatcctaccccctttgccctgctcccacacaaagttcctgct

SEQ ID NO: 978945 - DNA, 120 bp, Artificial Sequence
  ENSG00000279047_4 (sequence is synthesized)
agccctgtttacgtcttcttttttaaactctttttttaaaatttgatttttagacatttgaagatttccatggtcagagggtctgtaatagtcttttttgaataaagctgctccttacct

SEQ ID NO: 978946 - DNA, 120 bp, Artificial Sequence
  ENSG00000279047_5 (sequence is synthesized)
ggtctgcggcgcccacgcggaactcgaacgcctgcagggcctcgtagtccagcgactggagagcgaacagagtcttgctctgtcacctacactggaattcagtggcacagtctcagctca

SEQ ID NO: 978947 - DNA, 85 bp, Artificial Sequence
  ENSG00000279047_6 (sequence is synthesized)
acctggacttaatctcagctggtgtacagagttctctccaaaaacaagtggcctacttcacattcagtgaattgatatattctta

SEQ ID NO: 978948 - DNA, 120 bp, Artificial Sequence
  ENSG00000279047_7 (sequence is synthesized)
aggtggccgttgtccgcgttgatggagaccagggaggcgaggggcaggtgcgggtcctggggcggcagcagcgagtaggtgacctgggcgttggtgcccgagtctctgtctgtggcgctg

SEQ ID NO: 978949 - DNA, 90 bp, Artificial Sequence
  ENSG00000279047_8 (sequence is synthesized)
cgggggcgttgtcattgacgtcggagaccagcacggttatgttgtgctcggttttcagcctgggtgtcccgaagtcggtgacggtgatgg

SEQ ID NO: 978950 - DNA, 120 bp, Artificial Sequence
  ENSG00000279047_9 (sequence is synthesized)
gttttcagcctgggtgtcccgaagtcggtgacggtgatggtgatgttgtattcggatctggtctcccggtccagggccgtgcttatcaccagagtgtaaaagttctcaacagaaggtttc

SEQ ID NO: 978951 - DNA, 120 bp, Artificial Sequence
  ENSG00000279047_10 (sequence is synthesized)
aagaaaaaaggaagatcatcttggatggagcacaccatccttccgttgtctccggagtcaggatctgaaacgctgaatacagcaatgagggtgtcctgcaagttttctgggatctgattg

SEQ ID NO: 978952 - DNA, 120 bp, Artificial Sequence
  ENSG00000279047_11 (sequence is synthesized)
ataagtgtcgacatagttagttccggaggattgtcattcaaatccatcacttggacaaataccacacaagttccagataggcccccaccatctgtcgcctgaatatttactgtgtatgtc

SEQ ID NO: 978953 - DNA, 120 bp, Artificial Sequence
  ENSG00000279047_12 (sequence is synthesized)
tggatggattcgaaatccagtttctgtcttaaaagcagttctcccgattttgcacttaatcgaaacgttttgcgaatgtcttcagatgcttgggaaaatgcataagatatttctccatta

SEQ ID NO: 978954 - DNA, 120 bp, Artificial Sequence
  ENSG00000279047_13 (sequence is synthesized)
gttccaatgtctaaatccctggcagagacgatggcaacctgggatccaacggggctgtcctccgggatctgcacctcatagagcagctttgcaaactctgggacgttgtcattgatgtcc

SEQ ID NO: 978955 - DNA, 120 bp, Artificial Sequence
  ENSG00000279047_14 (sequence is synthesized)
acaacttcaatccgtaccagggccgtgccggacctgggtggactcccgccatctagcgctgtgagggttaacctgatctcaggctgctcctcgcgatccagggctctgttcagcaccagc

SEQ ID NO: 978956 - DNA, 120 bp, Artificial Sequence
  ENSG00000279047_15 (sequence is synthesized)
ctgattgtgtaattttggagactgttggttcctacatccaagtcctgggcacgttctattaagaaagtagttccaggagtgatactttctggaattttcaaaagtatttctttgtctagg

SEQ ID NO: 978957 - DNA, 120 bp, Artificial Sequence
  ENSG00000279047_16 (sequence is synthesized)
aaaactggggaatgatcatttacgtccctaatccgtagctccgcctgaaaaaactgcaagggattttctagtaacacctggaaaggtaggacacagggctctgtggggccgcacagctcc

SEQ ID NO: 978958 - DNA, 120 bp, Artificial Sequence
  ENSG00000279047_17 (sequence is synthesized)
tcccggtccaatttctcatttaacaacaaatccccggtctgcctatcgaactgcaaatgcattttttttcctttggaaacgaccctggcccccctcacagcaagttctcctatctccagc

SEQ ID NO: 978959 - DNA, 120 bp, Artificial Sequence
  ENSG00000279047_18 (sequence is synthesized)
cccaggtcttttaacaaattggccacaaaggagccactctccgtttcctcggccactgaatagtgcctaggctggcaactagcctgagctatgcccagcaaaacaaagaatatcaggact

SEQ ID NO: 978960 - DNA, 120 bp, Artificial Sequence
  ENSG00000279047_19 (sequence is synthesized)
tgcctttgtttcggaacgcgctccttcccctctccggcctccattgctttctggtctctcaccaaacgtgctccagctctggctcacgttgtcgctaactctatctccccgtatctcgct

SEQ ID NO: 978961 - DNA, 120 bp, Artificial Sequence
  ENSG00000279047_20 (sequence is synthesized)
gatactgggatgagtggacaatcctagggcccggatttcccggagcgaccgccttagaaagcctcctcttcctgcttgctgcttctttagctgagtatctgggtaagggagcgtcggctg

SEQ ID NO: 978962 - DNA, 120 bp, Artificial Sequence
  ENSG00000279047_21 (sequence is synthesized)
ggtgctttgtttctgctacttctaaggctgcagcgccaccccgcgtctcttccgagtatttattttctcctaaactttaagaaaatcccagtgctttctttcaggctgatggcaatcgaa

SEQ ID NO: 978963 - DNA, 120 bp, Artificial Sequence
  ENSG00000279047_22 (sequence is synthesized)
attgagtattttcaagtagtgtctctcagtgtaccgaagtcttattggcgtttcgaaaggctcttcattgcacccatagagacagggcaagaataaataaatcttcacttccctcacaaa

SEQ ID NO: 978964 - DNA, 120 bp, Artificial Sequence
  ENSG00000279047_23 (sequence is synthesized)
gaagtgctagccacagcgacttcaggtagtctcggtcttagcggattccgcggactttcttgtctttctgcgtactgcactaactgagcgaccaattgatacctaagtttagctgaactt

SEQ ID NO: 978965 - DNA, 120 bp, Artificial Sequence
  ENSG00000279047_24 (sequence is synthesized)
tttgttgaattaattaaaactgttttgaaatctattctgtaagagcctgagaaaaattgcggccacagaagctgttttgaaatgcgcttggcttccgacttccgcaaggggaggcagctg

SEQ ID NO: 978966 - DNA, 120 bp, Artificial Sequence
  ENSG00000236449_0 (sequence is synthesized)
ggctctctccggatgaggtgtctctcctgctgtgcccccagggcctgtgttttggaaactccagcaagccagcccagcaggccctttcgggtgaggaaggcaccccaggaactacaggtg

SEQ ID NO: 978967 - DNA, 120 bp, Artificial Sequence
  ENSG00000236449_1 (sequence is synthesized)
ctcctcagaagagtcaagaaagaggggtcaactctaagcccctgaaagagcccgactttgcatttctatttcacaagcttacagttctgagtaattgtactggagggctgtagagccaaa

SEQ ID NO: 978968 - DNA, 120 bp, Artificial Sequence
  ENSG00000236449_2 (sequence is synthesized)
ggcaattcatgtgcaaatctaggcttcttcaggcgtgagatttcatccggtttacaccagatgacctgcctctgtcatgtctcactctgtctgcaatgaaggaggagaaaaatctgcgcc

SEQ ID NO: 978969 - DNA, 120 bp, Artificial Sequence
  ENSG00000236449_3 (sequence is synthesized)
tctttctctcaagggatactttgtctctggggtactttctgacccagtggacccctggcagaagtaagcgtggactgtggctgcaggaccacgcagagtcaacacgaaccgaagccaggc

SEQ ID NO: 978970 - DNA, 120 bp, Artificial Sequence
  ENSG00000236449_4 (sequence is synthesized)
cttggccacggcagctctggggtccaaccacttgatcaatgcaggaaatgctttgatggcagaattcttccatggccagcttctcatattctctgggacagacacaaaccaagaaaaatg

SEQ ID NO: 978971 - DNA, 120 bp, Artificial Sequence
  ENSG00000236449_5 (sequence is synthesized)
agtgtggcgcagaatctgatgtgtccttccttaccccgtgctggtagcaaaaagtatgtcttgaacttttctttgttacacacagtctgggtaataacagactgaaggaaaactaaagaa

SEQ ID NO: 978972 - DNA, 120 bp, Artificial Sequence
  ENSG00000236449_6 (sequence is synthesized)
gcttgggaggctaagttcaatgacaaatgaagaactaaggcagagaaaaaagagaattgagaaagtgtctgggtgtctggagaggttgggggaatagagagggaggagatataattggcc

SEQ ID NO: 978973 - DNA, 120 bp, Artificial Sequence
  ENSG00000236449_7 (sequence is synthesized)
agataacttgagagtgggagaggagtgcaaacattatttttgaggcgctttgttggatatttaaaatgcactcctacctttggcattttctcaaaaggcaagaaagatttgttttcaatt

SEQ ID NO: 978974 - DNA, 120 bp, Artificial Sequence
  ENSG00000236449_8 (sequence is synthesized)
ctatttttctgctggactgaaccagtgccaagactggaccatgtaggatcctgggtttatttcagttacataagcaaacgttgctgtgatttggaatagtcaaagtcatgaatgtttctc

SEQ ID NO: 978975 - DNA, 120 bp, Artificial Sequence
  ENSG00000236449_9 (sequence is synthesized)
aacttccattttgtcagctgcttgagtttctattctgagaggtgctaactgtgaacattgttattcacttgtgttccctaaatcacttttaattagttttaatttgaaccaagaatgttc

SEQ ID NO: 978976 - DNA, 120 bp, Artificial Sequence
  ENSG00000236449_10 (sequence is synthesized)
tactgttgaaactatgtcaagaatgatcaaaaatgaaattaataaagaattcgcgtcaaaaaaaatttgcactaatattacagtattttataatgtctatctcagcagagtcacagataa

SEQ ID NO: 978977 - DNA, 120 bp, Artificial Sequence
  ENSG00000236449_11 (sequence is synthesized)
tttagaatttttaattttgtttttaagtgattttcctcaaagctataatagccttggtaaagagtttagttaaacattatttttcacctctcacgcattttgtgtaatgaaatttttcta

SEQ ID NO: 978978 - DNA, 120 bp, Artificial Sequence
  ENSG00000236449_12 (sequence is synthesized)
tcatcttccagtggaattaattgcattggtgcaaaaaatgcaatcaaatcgatgactgaatttagcctttgaaacctcacgtctagctgggatagttactatattcattacatactgaaa

SEQ ID NO: 978979 - DNA, 120 bp, Artificial Sequence
  ENSG00000236449_13 (sequence is synthesized)
aatgataagcagtaagcttttctgctaaaaaactgccaaagataagtttttcaaggctctcaaaatatcctaaagctgacaatacaagaaatgttaaaatattgttggaatttttaacgg

SEQ ID NO: 978980 - DNA, 120 bp, Artificial Sequence
  ENSG00000236449_14 (sequence is synthesized)
aatcttccttctcttcttttcctgtttaagacaatagtagttagttgtccactaatcgttaatacacgattttctaacaaagacttgcatatccttttggctaaaaagtggccaaatatc

SEQ ID NO: 978981 - DNA, 120 bp, Artificial Sequence
  ENSG00000236449_15 (sequence is synthesized)
agagagctagaagtttgggagacagcctttagtcttttccaaagcatgtaagcccttttgaatcattttgggtaaatggcgaagattaaacagaattcataaagggtttctgatacataa

SEQ ID NO: 978982 - DNA, 120 bp, Artificial Sequence
  ENSG00000236449_16 (sequence is synthesized)
gtggaatgtgcctgtgaggacactacacatgacaataatctaagcatgctctcttttagtcccaaaacgtgtagagtaatgtcacatgaaatttacaggaggccattgacttggactgag

SEQ ID NO: 978983 - DNA, 120 bp, Artificial Sequence
  ENSG00000236449_17 (sequence is synthesized)
agggagataacagcccaatccccaaacaggccagtttttgctggcatgataggaaggcccctctgcttcaaactttccaaagaaagtaacttggaaacaaccaatctgctttttgttctc

SEQ ID NO: 978984 - DNA, 120 bp, Artificial Sequence
  ENSG00000236449_18 (sequence is synthesized)
cgtttctgctttcctcaaccattttctgaccataaaaccaacatcctttgctcggctcatgggaacattcattctattttgtagaatgaggtgttgcccgatattctagatttgcaaata

SEQ ID NO: 978985 - DNA, 120 bp, Artificial Sequence
  ENSG00000236449_19 (sequence is synthesized)
aaagccaattaagatctttaaattaaatctgttgtaactttgtcttttgacactaataaatgcacgaacaggtttctttagagaaagcccgtgatatgcagggtatgtttgacaagtgct

SEQ ID NO: 978986 - DNA, 120 bp, Artificial Sequence
  ENSG00000236449_20 (sequence is synthesized)
gtggtcaaatgtgatactgtttacattctcattttcataattttcttaagtactatgtaatttggtcttgggaatgcttcgctaattacgggtgaggaggatgggccttgtatgtgacag

SEQ ID NO: 978987 - DNA, 120 bp, Artificial Sequence
  ENSG00000236449_21 (sequence is synthesized)
aatgatttagtgttctgtagttcagtggaaagagtgtagatgtgttgaatatttatgacgttttaccttctctctttgttacagaggccttacaacaaattaaaacatgtgtgtcagctc

SEQ ID NO: 978988 - DNA, 120 bp, Artificial Sequence
  ENSG00000236449_22 (sequence is synthesized)
cctaattatctagctagacttttaaagattggctagttaaggctgaattttattcaagcactacttcatctgtcatactattttaagtacattagccttgttagcctattatatggccat

SEQ ID NO: 978989 - DNA, 120 bp, Artificial Sequence
  ENSG00000236449_23 (sequence is synthesized)
gatcagtactgtttaaattgccaacttctacaagtcccttctgtgtgctctggctcaatcaatgcattagtggtactagcttagttttgtcacagttctgggcacattggcagtccccgg

SEQ ID NO: 978990 - DNA, 120 bp, Artificial Sequence
  ENSG00000236449_24 (sequence is synthesized)
gtgggaggcctggagctcctgagtaaacatagtgcatctgcctggagcttcaattttacttgaggatttggaaaaatataaattaatcgatttaaccatttatttaatgtgctccaattc

SEQ ID NO: 978991 - DNA, 120 bp, Artificial Sequence
  ENSG00000236449_25 (sequence is synthesized)
tttatttaattggctgcaaagcaaacaaaattatgcattagctatgttatgactaaaacccaaatgttgttgaatactttcagtgatagaataacagcgtgtaaacccagaagtatgact

SEQ ID NO: 978992 - DNA, 120 bp, Artificial Sequence
  ENSG00000236449_26 (sequence is synthesized)
gcttagctgtcagatttccagccagaaaccggctgagaaaaaaatgtgatgacactcatcctgagaagtgttgggacggagcctcacctggcttctgggtgaggcagtccaaagcctact

SEQ ID NO: 978993 - DNA, 120 bp, Artificial Sequence
  ENSG00000236449_27 (sequence is synthesized)
cccatctcatgtcaaagtcccctgtcattgcataggaactccagggactgttcaagaaggaacaggaagcctccaacccaagggaaggggactcatcctgttgtcaggtgagatcctgag

SEQ ID NO: 978994 - DNA, 120 bp, Artificial Sequence
  ENSG00000236449_28 (sequence is synthesized)
aagcatgggtgagctcagcatgggcggggccattgaggaagttcctctttcctcagctaagccgcactggccaggaggtccctgagtcctgagagcatcctcccagagctgtccaggtta

SEQ ID NO: 978995 - DNA, 120 bp, Artificial Sequence
  ENSG00000236449_29 (sequence is synthesized)
ctctccagacctggtcgtggcacctctcagctcctggtgcctgagtccctgcctttgactaggatcaccatttatcaccccccactgcacccattgcccctcacctgcccagtgtggtga

SEQ ID NO: 978996 - DNA, 120 bp, Artificial Sequence
  ENSG00000236449_30 (sequence is synthesized)
cacagtcttgctcaggtccagtcctagtcctgtgagagagtttctgcccttgactttggtccacatttccagttcctgtctttatgtggtccactgccaggactatagacgagttcaacc

SEQ ID NO: 978997 - DNA, 120 bp, Artificial Sequence
  ENSG00000236449_31 (sequence is synthesized)
aatgaacaatataaagtttgatctttctgtgaaaataaatatgaatgcaaaattcacatgaatgcttaaaatatcagacctcaaagatgagtgctgtctatctgtggcccctttgagcaa

SEQ ID NO: 978998 - DNA, 120 bp, Artificial Sequence
  ENSG00000236449_32 (sequence is synthesized)
tccctgtgcccctggaggatgcattcatccgctgctgttacagcgccaccagcagtcacttttgaggagtgcagctccaagggatgacggtataaggggaagaattcagccaaagtgaga

SEQ ID NO: 978999 - DNA, 120 bp, Artificial Sequence
  ENSG00000236449_33 (sequence is synthesized)
tgtcctccagcaaaatcagagacagtgcccttcagagggctcgtgtcctgctggaattgggaaattccataaggctgcagatattcagcctcctaactgaactctatgcaatgcctttat

SEQ ID NO: 979000 - DNA, 120 bp, Artificial Sequence
  ENSG00000236449_34 (sequence is synthesized)
cccctcctcccgatctgtgcaaaatatcaaaggaataaaacctgttttctttcttagtggttgcaccaattttgtgcagtctggttcttttctgtttttctgtaaaattgttttcagaag

SEQ ID NO: 979001 - DNA, 120 bp, Artificial Sequence
  ENSG00000236449_35 (sequence is synthesized)
gagctgatcaagggaacctcaacaaacaaccccagccatggaggcggcggtgtctttgaagaccccatgagagcatcaaacaagggagagagtaaaatggcggcagagagctagtaatgt

SEQ ID NO: 979002 - DNA, 120 bp, Artificial Sequence
  ENSG00000236449_36 (sequence is synthesized)
aagaatgaagccgcggaccctcacggtatgacagctcctctcccaacagctctactttctacatctactctctaccaccacaaaacttctttcagttccatgaaagggccatgtttttct

SEQ ID NO: 979003 - DNA, 120 bp, Artificial Sequence
  ENSG00000236449_37 (sequence is synthesized)
acttctttcagttccatgaaagggccatgtttttctggtctcttggcctaggagcatgttgttcttctgccagcaaccttcttcaaccatctccacaggatgactcctctattggatact

SEQ ID NO: 979004 - DNA, 120 bp, Artificial Sequence
  ENSG00000236449_38 (sequence is synthesized)
tccatgaaaagtccaggcctgggttatgtacccttcccaaagtgcaccccagacacccaacagtttttccagcccagactcaccacactgtgtggtaatttcctgatcactcagttgtgc

SEQ ID NO: 979005 - DNA, 120 bp, Artificial Sequence
  ENSG00000236449_39 (sequence is synthesized)
ctattccattggtggcctccagtgaaccatgtcttctggtatttacatcttgtgtggtcccctccattaaatttgggctttaaccaacagaatgctgcagaagcgacaccctgccacttg

SEQ ID NO: 979006 - DNA, 120 bp, Artificial Sequence
  ENSG00000236449_40 (sequence is synthesized)
tgcttttgtgatcctagccaccagtaagaagccctgtgaccttgctgagaccctgaagagaccacatagagaggccacttgaagggcaaggggtcctgactctacatggagagagaagcc

SEQ ID NO: 979007 - DNA, 120 bp, Artificial Sequence
  ENSG00000236449_41 (sequence is synthesized)
cagccatccctgtttcccagctgagtcctgaccagataactcactacaagactgaccacaggcaagaacagcagaagagctgcccagctgagcccatccaagagtgcagaatttcaagca

SEQ ID NO: 979008 - DNA, 120 bp, Artificial Sequence
  ENSG00000236449_42 (sequence is synthesized)
agtaaaatgactaatgttgtaagccactaaaattctagggtggttcttacatagcaatatgtaactgtgataaactaaataaatgaataaaagggaatgaagaattacttcacagaataa

SEQ ID NO: 979009 - DNA, 120 bp, Artificial Sequence
  ENSG00000236449_43 (sequence is synthesized)
catcattctggttttttgctcctgttttactacgaagcaaacacctcgactataagccgccatagaccagggtctgtgtctcattcgtgtctggacaatgcatcacagacactcaactgt

SEQ ID NO: 979010 - DNA, 120 bp, Artificial Sequence
  ENSG00000236449_44 (sequence is synthesized)
tttctgcctgagcagaattaagacttggcctcctaactcctccatcaccatcttctccactctcttccttggccttcatcaccaacaccacctcatcaaccgtgaaagattcaaagagta

SEQ ID NO: 979011 - DNA, 120 bp, Artificial Sequence
  ENSG00000236449_45 (sequence is synthesized)
aggaaaaccatttctaggaccatgaaatgtgtcactggatctcctgcagaaatctgccagagctacaatgtgactggtttctacatgtctgacaaatttctatttaaataagtatttttc

SEQ ID NO: 979012 - DNA, 120 bp, Artificial Sequence
  ENSG00000236449_46 (sequence is synthesized)
aaaatgcaaattgctacctattctttggccatcaaatcactttagtgggttgcaaccggctttttcttcttaatagaaaaggaaatgtgttgcatttggtaaacatggaaattgttttat

SEQ ID NO: 979013 - DNA, 120 bp, Artificial Sequence
  ENSG00000236449_47 (sequence is synthesized)
gcagagttttgaggcagagctgatcaagggaacctcaacaaacaaccccagccatggaggcggcggtgtctttgaagaccccatgagagcatcaaacaagggagagagcctggaacaaat

SEQ ID NO: 979014 - DNA, 120 bp, Artificial Sequence
  ENSG00000236449_48 (sequence is synthesized)
gcatcaaacaagggagagagcctggaacaaatcatggtagtaaaatggcggcagagagctagtaatgtgtctgcaattggtgggttcttggtcgcactgacttcaagaatgaagccgcgg

SEQ ID NO: 979015 - DNA, 120 bp, Artificial Sequence
  ENSG00000188004_0 (sequence is synthesized)
ccctgcggcggccccgaggacgtggccctggcgccctgcaccgccgccgccgcctgcgaagcgggcccctccccggtctacgtcaaggtcaagagcgcggagccggctgactgcgccgag

SEQ ID NO: 979016 - DNA, 120 bp, Artificial Sequence
  ENSG00000188004_1 (sequence is synthesized)
gcgccgaggggccggtgcagtgcaagaacggcctcttggtctccagcccacactgtgaagagccttgtgcccacagctgtgcacatcctgggcttcctccacaccttgtccataaactgc

SEQ ID NO: 979017 - DNA, 120 bp, Artificial Sequence
  ENSG00000188004_2 (sequence is synthesized)
ccctcagctaccttcagacccaggatacagacgcagcctccagaagaataaatgctccattagcagctggctggagctggctgaggctctggctggtgactctggcctctggtgtagact

SEQ ID NO: 979018 - DNA, 120 bp, Artificial Sequence
  ENSG00000188004_3 (sequence is synthesized)
tccctcaggtgagtgcatggatgagagctctaccttctcctgactgcccaggcctcaggacaacaggagaacagatgcaaaaactattgctcaaggaaaataaagtgaaaacgaggaaaa

SEQ ID NO: 979019 - DNA, 120 bp, Artificial Sequence
  ENSG00000188004_4 (sequence is synthesized)
gcaaaagaagatctggagagggctctcacctgaccacaagcatcctggagcaatgagtttcaggcaggaagactcatcctgagctgagctgcttttcttgaagttgtgcaagaacgtcct

SEQ ID NO: 979020 - DNA, 120 bp, Artificial Sequence
  ENSG00000188004_5 (sequence is synthesized)
gttggctggggcaaattcagtatttcttttcctggccactgtgctggagcgtgaggaaagactctccaccctcactcccagatcctgcaggaggcgtgagagcggatggagatggtgagg

SEQ ID NO: 979021 - DNA, 120 bp, Artificial Sequence
  ENSG00000188004_6 (sequence is synthesized)
ctgtcagcatggacatcctttttctttttccctggtaaggacatcagaaagaaagttacccctccagtgtttggagtcttggaatccttggcctgcctgcaggcctctgaatcctcagtg

SEQ ID NO: 979022 - DNA, 120 bp, Artificial Sequence
  ENSG00000188004_7 (sequence is synthesized)
tgttagcccaaggtcaccttaggtaaaggaacatttctcctggtcttccaacaccctggaaagggaggctcttcaagaataggaaattcttcctagtatctaaccttggcctgcaactat

SEQ ID NO: 979023 - DNA, 120 bp, Artificial Sequence
  ENSG00000188004_8 (sequence is synthesized)
gccatacatttaattgtagaaggtatggaaagttaggactgtggtggacccagttaaatcactggacagaagccatgaggcagagccagaaccagcttctggactccctgcatggagctt

SEQ ID NO: 979024 - DNA, 120 bp, Artificial Sequence
  ENSG00000188004_9 (sequence is synthesized)
tctactatcccaggttgttgggtcccttctcagtggccaaagatgctattttatgagccttgaggacatgacactaagtgaaaaaagcctggccaaagggccacatagtgtatagttcta

SEQ ID NO: 979025 - DNA, 120 bp, Artificial Sequence
  ENSG00000188004_10 (sequence is synthesized)
tttatatgaaatgtccaggaaagacaaaagcatagaggcagaaagcagactagtgctgtgggaggaatgggggatttgggaggtgatggctaaggggttatggggttttgggggaggtaa

SEQ ID NO: 979026 - DNA, 120 bp, Artificial Sequence
  ENSG00000188004_11 (sequence is synthesized)
tagaaatgttttaaaattggttgtgaaggtggatgcccaactctgcgaatacactaaaaggcatcgaattgtatactttaaataggtgaattgtatgctatgtgaattatatctcaataa

SEQ ID NO: 979027 - DNA, 120 bp, Artificial Sequence
  ENSG00000188004_12 (sequence is synthesized)
atggggatgctggctccgggaccgctgcagggtcgccgacccaggaagggtcacaaaggacaagaggacgccgtggcgcccgggtgcaaggccagcgggcgcggcagccgcgtcacccac

SEQ ID NO: 979028 - DNA, 120 bp, Artificial Sequence
  ENSG00000188004_13 (sequence is synthesized)
acccctgtcccccacctctcactttcacctatttctagaccttttcttacagcaatgccttggccctcaggaagcatcagatctcaaactgcagggtctggggctgaagctgatgctggc

SEQ ID NO: 979029 - DNA, 120 bp, Artificial Sequence
  ENSG00000188004_14 (sequence is synthesized)
atgggtgactcagagttcctctattagttcaaatatgtaatatcttttagagcctaggactcaggctggaggcaattccttggtgccagttggttaatactttatgaatagtggtggggg

SEQ ID NO: 979030 - DNA, 120 bp, Artificial Sequence
  ENSG00000188004_15 (sequence is synthesized)
agggaatgccttggactattaatgtccccatggatctggatcctggagaacttccagtgtcctggatggaatgttctgcttggctcatcttgcccagagaagagccaggatatgagaaga

SEQ ID NO: 979031 - DNA, 120 bp, Artificial Sequence
  ENSG00000188004_16 (sequence is synthesized)
tgggagagggaagggggaggtgtgaaacgtgctggtgcttcctgtcctcgtggtgtgatggctgcccaggctgctccttcgaggcaggacaggattcccatgggagatatgaggaccatg

SEQ ID NO: 979032 - DNA, 120 bp, Artificial Sequence
  ENSG00000232560_0 (sequence is synthesized)
gcaatcacagctcactgcagcctcgatctcctggactcaactaatcctcctgcctcagccttctgggtagttgagactacagaagatgagagagagaaaaagagagaaattacagagtga

SEQ ID NO: 979033 - DNA, 120 bp, Artificial Sequence
  ENSG00000232560_1 (sequence is synthesized)
ctgcttagctttgatccctgcagccatgctcagcccttcccccaagccctcccttccagatggattgaggctgttgagactccaggggtgttcggggctgggagcctgctgagtgttccc

SEQ ID NO: 979034 - DNA, 120 bp, Artificial Sequence
  ENSG00000232560_2 (sequence is synthesized)
tgttcccacctccaatctgctccatcctccagctgcatttcattccggatctaccaggatccaactttactactgtcatggagggaattacagtaattctaccaacttttgaggcaacct

SEQ ID NO: 979035 - DNA, 120 bp, Artificial Sequence
  ENSG00000232560_3 (sequence is synthesized)
tcttctgacactgtgtgaaacagactgaaaagactctaaagatggagagagctcaatgcttgagaaaaggaattctgtcctttgaaaggtctctagaacaaaggagtcttattctgtcac

SEQ ID NO: 979036 - DNA, 120 bp, Artificial Sequence
  ENSG00000232560_4 (sequence is synthesized)
agaaaaagagagaaattacagagtgacggagaaggcagacatcatgcaacatgctcaagggctattcattttaagctgaaacatacatgtgtagaaagcatccttgtacttataatccca

SEQ ID NO: 979037 - DNA, 120 bp, Artificial Sequence
  ENSG00000232560_5 (sequence is synthesized)
atgactatgaagaaaaataatttagccaaatagttcctagaacaggaaaaataaggaattatattttgagataagaagttaagctctagtataacaatgatatgggtcaaagaaaaatga

SEQ ID NO: 979038 - DNA, 120 bp, Artificial Sequence
  ENSG00000232560_6 (sequence is synthesized)
aaacaaattttaaaaacgttgcaacatgaataaaagtttcaccaaatcgggagtctattataagcatgttttgagttattttctttcccaaagacttcatttttgtttcaatttatttca

SEQ ID NO: 979039 - DNA, 120 bp, Artificial Sequence
  ENSG00000232560_7 (sequence is synthesized)
tttaactaatgtcgtactggttctcgtaaaaggtgaggtggagcaattccattaagctatagtgaggtgaagagagaatatctggtgaatgaatttgaaataagctccttcgcgatatgc

SEQ ID NO: 979040 - DNA, 120 bp, Artificial Sequence
  ENSG00000232560_8 (sequence is synthesized)
cccttccataacctctgtatccttgtcatcccaaactgcccacatttcgctgaactccttgcacttctcagaggacatcttacctgtcaacccacggtatcagttggctgggggaggtcc

SEQ ID NO: 979041 - DNA, 120 bp, Artificial Sequence
  ENSG00000232560_9 (sequence is synthesized)
ccaaatactggtgagaccctgacccctgctaatgtccaggcacctgacaccgatatagaaggaatccaaagacgacgagtcagaaaacagtgactgtatgaagatttactgcaaagtgaa

SEQ ID NO: 979042 - DNA, 120 bp, Artificial Sequence
  ENSG00000232560_10 (sequence is synthesized)
tctccacggaagtgcagttcaggcctactcaagagagagacactcccagaggggcttggggctgctatctttatgggtttctttagccaaagggtgaaatattcatgaagatttctggaa

SEQ ID NO: 979043 - DNA, 120 bp, Artificial Sequence
  ENSG00000232560_11 (sequence is synthesized)
aaaaggtgaagatttcttggaactgtggtgccacccatttttacaccaaatatgggtgttcccagaagtgtcatggcattggtgggtatgtaatttagtatgttaatgaatgtacagtga

SEQ ID NO: 979044 - DNA, 120 bp, Artificial Sequence
  ENSG00000232560_12 (sequence is synthesized)
agtcctcatgagacctaggtgaaatccagcaccatgttgggtccagtcagcctcagccagcttggtctacaccctggtttgcaaagtatcagcccctagtttatgcagctatttcaacag

SEQ ID NO: 979045 - DNA, 120 bp, Artificial Sequence
  ENSG00000232560_13 (sequence is synthesized)
tttcctttttgctagtcatgtgaaactgctgcctagaattttctattctcctaccaccaccctgtattattcctgtctcactacccttcaacttccacccccttttcctctagatacttg

SEQ ID NO: 979046 - DNA, 120 bp, Artificial Sequence
  ENSG00000249061_0 (sequence is synthesized)
gtgaggcctccccagccatgtggaaatcatgttccagaaggccagggcggtcggttctgctgcacaaatgaggtcagagcaatcaagagagccaaggaagtcctacttatctggattaaa

SEQ ID NO: 979047 - DNA, 120 bp, Artificial Sequence
  ENSG00000249061_1 (sequence is synthesized)
taaggtggaaaataggatttcaaaagaaaagaagaaggagaagaacaaggacaagaaactgagttttggcagaaggcaagtgagcaattaaaaataaatctttcatgatttgctcccaca

SEQ ID NO: 979048 - DNA, 120 bp, Artificial Sequence
  ENSG00000249061_2 (sequence is synthesized)
gaagttctgctttctgttccctgatcagggaccagagaggggcaaaatcttcctttgatcctaactccctattttttatttttcctctctcttgatccccttgtctacttttcagattta

SEQ ID NO: 979049 - DNA, 120 bp, Artificial Sequence
  ENSG00000249061_3 (sequence is synthesized)
gcctcaccttgtaagtgcttcctttctgaggtgtaggtaagaaagattgagattccatccgcacgagacaaacccagcagttcggagcagtcaagacaggttggaggaacaaaggaagga

SEQ ID NO: 979050 - DNA, 120 bp, Artificial Sequence
  ENSG00000249061_4 (sequence is synthesized)
tcatgttaccagtttctaaggcttggggtcatctggaagaagctggaatcacagtacaggtggaatggaagtgcaatggaagaagtggaaccacagtgaagcatgttccagaaggccagg

SEQ ID NO: 979051 - DNA, 120 bp, Artificial Sequence
  ENSG00000236991_0 (sequence is synthesized)
ggagacaaagatcagccacgtggcagtcaaccatgtctatctgaccaagttccaatgaaaactctggacaccaaggcttgggagatatttctcaaaagactcctctgcgggagaggagaa

SEQ ID NO: 979052 - DNA, 120 bp, Artificial Sequence
  ENSG00000236991_1 (sequence is synthesized)
tagagaaagaaagaaaacaactgtgtaagcagacatcagtgtaaaccttagcactgtctcttgatgagataagaggaggatggcagtgacaggagtgtggtggcgagccagtcacctgca

SEQ ID NO: 979053 - DNA, 120 bp, Artificial Sequence
  ENSG00000236991_2 (sequence is synthesized)
aggacaggtcctttaaagacgtaattaagattaaatgagattgtaagggtgggatcctaatccagtatgactggtgtccttttaaagagggagggactccagggctatgcacagagagaa

SEQ ID NO: 979054 - DNA, 120 bp, Artificial Sequence
  ENSG00000236991_3 (sequence is synthesized)
ggccctgtgtggacacggtgacaaggcggttatctgcaagccaaggtagaaacatgagaggaatccaatgctgctgccaccttgatcttgaacttccagtctccagatctatgacacaat

SEQ ID NO: 979055 - DNA, 120 bp, Artificial Sequence
  ENSG00000236991_4 (sequence is synthesized)
ctctcaccatgcctgttacatgaaggtatgtatgtataggaaaaagcactgaaaaactctccagtttcaggcatccactggggatcttggaacgcatcctccaaggataagtggggtcta

SEQ ID NO: 979056 - DNA, 120 bp, Artificial Sequence
  ENSG00000236991_5 (sequence is synthesized)
agttgctgggattacaggcacccgccactactgcttggctaattttttaatttttttctggggttttgtcatgttggctaggctgctctctaactcccgacctcaaatgatccaaccacc

SEQ ID NO: 979057 - DNA, 88 bp, Artificial Sequence
  ENSG00000236991_6 (sequence is synthesized)
ggagaagatttctttccacttcgacttaggaagtcctcaaccaaaattcaggtttgcccagatggcctaatatcctgagggcaaaagc

SEQ ID NO: 979058 - DNA, 120 bp, Artificial Sequence
  ENSG00000236991_7 (sequence is synthesized)
caggtttgcccagatggcctaatatcctgagggcaaaagcaagcttaagggtgccaagacaatgcagcagaggagtagtcttttcagcaaatggtgctgggacaactagatatctatatg

SEQ ID NO: 979059 - DNA, 120 bp, Artificial Sequence
  ENSG00000236991_8 (sequence is synthesized)
gaggcactggagacaaagatcagccacgtggcagtcaaccatgtctatctgaccaagttccaatgaaaactctggacaccaaggcttgggtgagcttccgcagttgtacatgtattgatt

SEQ ID NO: 979060 - DNA, 120 bp, Artificial Sequence
  ENSG00000236991_9 (sequence is synthesized)
tactctaagcagttcgcagggagcatctttcagcagctgaaacagctttgcggccttgctgtaatgaagatctgccagcacccggtgttgtttcctaaggtgttcatcaccaacctagaa

SEQ ID NO: 979061 - DNA, 120 bp, Artificial Sequence
  ENSG00000236991_10 (sequence is synthesized)
atgcctgttacatgaagaattagcatttaagtactaacctgactggaagcactgggatcttcagaaactgaagaaggcatttcgaagggagcaggccatgaagccccttccgaatcattt

SEQ ID NO: 979062 - DNA, 120 bp, Artificial Sequence
  ENSG00000236991_11 (sequence is synthesized)
gtctgatctgaactggacgattcctgctgttctgcggtggatgagacaggctgagcggctccatcaccattgatactggccaaaccagaaataaaaaaggattgctgttactaaagttaa

SEQ ID NO: 979063 - DNA, 120 bp, Artificial Sequence
  ENSG00000236991_12 (sequence is synthesized)
tacataataaaagggcggcattggtggcatcctcaattgattcaaagttgtgaattcccttttcaaaacaagaaaagctttttttccacaactgttgctcggcagcagacacagatttgc

SEQ ID NO: 979064 - DNA, 120 bp, Artificial Sequence
  ENSG00000236990_0 (sequence is synthesized)
caaatgtcggtgtgctctcatgaacagaaacgatggcacggtgggtcctggtctcaagacttcctctcaatgattcagaggtcttgggggttttttgtctgaatatcaggcaaagaggaa

SEQ ID NO: 979065 - DNA, 120 bp, Artificial Sequence
  ENSG00000236990_1 (sequence is synthesized)
ggacggctacaatggaggagtctcctaccacgcttgtggtcgtcactgtagtgctcagttgaatggtgtgtccattggggttggagtccccatcctgttctgggtcctggccccccacag

SEQ ID NO: 979066 - DNA, 120 bp, Artificial Sequence
  ENSG00000236990_2 (sequence is synthesized)
gctccagggacataacccttccagttcaggatcatgtgctggggcactgttccctgaggtgggactctgggctgtaacagctgcttttgaagcatgttccagcttcaaccacgtgcttgg

SEQ ID NO: 979067 - DNA, 120 bp, Artificial Sequence
  ENSG00000236990_3 (sequence is synthesized)
acgacaccagctcttcccacatactcttccccagctcttgtgttgagtttggcttccaccttcctccagctgtagagacagggtttctccatgtgggccaggctggtctcgaaatcctgg

SEQ ID NO: 979068 - DNA, 120 bp, Artificial Sequence
  ENSG00000236990_4 (sequence is synthesized)
gcctcccaacatgctgggattacaggctctgcctcctctgtcgaaaattcaaggcaggcggaatgcagtgctgcccctgacacacaccacagtagcgactccagtcttcatctgagatga

SEQ ID NO: 979069 - DNA, 89 bp, Artificial Sequence
  ENSG00000236990_5 (sequence is synthesized)
ggcggaatgcagtgctgcccctgacacacaccacagtagcgactccagtcttcatctgagatgatggcacagacagtgtggcgccatct

SEQ ID NO: 979070 - DNA, 120 bp, Artificial Sequence
  ENSG00000236990_6 (sequence is synthesized)
cctcccaaagtgctgggattacagagaccatgatgttttttactttcagcacagtattcaatagattacataaaatatttaacacttgcttgtgctgaatgattttgactaactgtaggc

SEQ ID NO: 979071 - DNA, 120 bp, Artificial Sequence
  ENSG00000236990_7 (sequence is synthesized)
cttgtgctgaatgattttgactaactgtaggctaatcgaagcgttttgagcatgtttaaggtaggcaaagctaagctatgatgtttagtagatgaggtatatcaaatgcattttcaacct

SEQ ID NO: 979072 - DNA, 120 bp, Artificial Sequence
  ENSG00000236990_8 (sequence is synthesized)
tttcaactaacaatggatttattgtgatgtaactttactgtaagttgagaagcatatgtacgtgtgtatacagatacctatatagagagatatctatagatataaatatatagacagatt

SEQ ID NO: 979073 - DNA, 120 bp, Artificial Sequence
  ENSG00000236990_9 (sequence is synthesized)
gatgatagataggtcaatagagcaaatcttgctttaggaaaatctgaaacatcttaatatcccttggaaacaagatggtgtagtaagctgttccggcatcactataaagaaatatctgag

SEQ ID NO: 979074 - DNA, 120 bp, Artificial Sequence
  ENSG00000236990_10 (sequence is synthesized)
gctgtgtaattagtaagaaaagaggtttagttgtctcatggttctgctggctgtacaggaagcatagggctggcatcagcttctggggaggcctcagaaagcttccaatcatggggtaag

SEQ ID NO: 979075 - DNA, 120 bp, Artificial Sequence
  ENSG00000236990_11 (sequence is synthesized)
aaaaagggggagcaggtgtcttacatggcaggaatgggagctagagggtagggggaggtgcctctggatttaaacaaccggatctcacaagaaatcactcactgttgcaaaaacagcacc

SEQ ID NO: 979076 - DNA, 120 bp, Artificial Sequence
  ENSG00000236990_12 (sequence is synthesized)
aaggagggatggtgataagccaatcataagaaatccacctccacgatcagtcacctcccactcataagaaatccacctccatgatcagtcacctcccactcataagaaatccacctccac

SEQ ID NO: 979077 - DNA, 120 bp, Artificial Sequence
  ENSG00000236990_13 (sequence is synthesized)
gatcagtcacctcccactcataagaaatccacctccacgatcagtcacctcccactcataagaaatccacctccacgatcagtcacctcccactcataagaaatccacctccatgatcag

SEQ ID NO: 979078 - DNA, 120 bp, Artificial Sequence
  ENSG00000236990_14 (sequence is synthesized)
tcacctcccaccaggccccgcctccacgatcagtcacctcccaccaggccccgcctccaacactgaggataacagtttaacatgagatttgggggaacgaatatctaaactatttcaatt

SEQ ID NO: 979079 - DNA, 120 bp, Artificial Sequence
  ENSG00000236990_15 (sequence is synthesized)
aataatgggctaataaagccaagtcaactcttatgggaacatcatcggacgcttgtcaagatattagggaagaatgctgagagagggggtggagcgggcacacggaaagaaacagagatg

SEQ ID NO: 979080 - DNA, 120 bp, Artificial Sequence
  ENSG00000236990_16 (sequence is synthesized)
ggagcactctccaccctcacagcaccatgagggaagtagccttgaccttgatattcccacaggaactcagggtgctgagcttgtattgccgacatcatcatttttctgaacaagcctggg

SEQ ID NO: 979081 - DNA, 120 bp, Artificial Sequence
  ENSG00000236990_17 (sequence is synthesized)
taagtctctactgcctgtaaacaaaagaggcgtggctagaatgaaaatcatgctaggtgaagaatcgtgatgcaaattggcttttatgtattaggccaactttgtaaaagataagcacac

SEQ ID NO: 979082 - DNA, 120 bp, Artificial Sequence
  ENSG00000236996_0 (sequence is synthesized)
tgttttttttctttttttaacctgtacagaataaaaaattgaattagtttccaacatttcacaatcaagagatttcacagatgaaactagtttttctggaaaaatgagaagatctggaaa

SEQ ID NO: 979083 - DNA, 120 bp, Artificial Sequence
  ENSG00000236996_1 (sequence is synthesized)
tcctgggcctgcattcccatatggcaacagtaagctggagctgagtaaggtagttagaggaaataagagcaaattgcttaattgcttcaaatattctggaaggcaagcattccaagcaca

SEQ ID NO: 979084 - DNA, 120 bp, Artificial Sequence
  ENSG00000236996_2 (sequence is synthesized)
taacacaggaagaatcttcaccgctaaaaatctggcataatttttttacactcacaagaaaacctgtcgtaggagaagaagtgacctcatggtccagatgttttactgcctctagtattg

SEQ ID NO: 979085 - DNA, 120 bp, Artificial Sequence
  ENSG00000236996_3 (sequence is synthesized)
caaatcccagtggagaaggttcctggttgaaccatgaattgaaacacctagcattgaaattggatcatgatggacacctgactcatggtgggcaaactggatcttttcttctgggaatta

SEQ ID NO: 979086 - DNA, 120 bp, Artificial Sequence
  ENSG00000236996_4 (sequence is synthesized)
gacttggaaattcagagaaaacaagtcagtttgtatgcatgccttggattgagagacatgaacattttggactggaggtgcgggcatcttctcccacttgcacaaagaaagcagattttc

SEQ ID NO: 979087 - DNA, 120 bp, Artificial Sequence
  ENSG00000273691_0 (sequence is synthesized)
cagttttttgagtgggctttagagatcatgctgaggaagaaagaaaatagcgtgcacggatgtgttgctgtggttggatttcactggctgtttttcatatacctgtcttttccctgtgag

SEQ ID NO: 979088 - DNA, 120 bp, Artificial Sequence
  ENSG00000273691_1 (sequence is synthesized)
agaaaacagccatgacagtaagcaggggaagctcatttgagagtaggggacgtggagggatgagggcagttctccggggcacccctgaaaatgaatttcctcctccagagccagggtgac

SEQ ID NO: 979089 - DNA, 120 bp, Artificial Sequence
  ENSG00000273691_2 (sequence is synthesized)
cgggtccctcacagggccaccgtctgcaggcatcaacactcttttgggtctaaatccaattattcctcaagttcttcttggtggcttccttcactctctggccagggggagttttgcaga

SEQ ID NO: 979090 - DNA, 120 bp, Artificial Sequence
  ENSG00000273691_3 (sequence is synthesized)
aatactgttctaacagcagagcatgtctgtgaccaaaccttgggcaaatacatatttaaagaaatcttattattaaaatagtcaaccttatggtttatgtagacaatctgataaacacag

SEQ ID NO: 979091 - DNA, 120 bp, Artificial Sequence
  ENSG00000273691_4 (sequence is synthesized)
cctttttcattgcatatatgtaaatacactgtattttaaacatggttacaagcacattgaactttatatcatttttctttttcatttgacataacattatggcaaacaaaaactttaaaa

SEQ ID NO: 979092 - DNA, 120 bp, Artificial Sequence
  ENSG00000273691_5 (sequence is synthesized)
aagcacatgggctttacaagtgagcatatgctttgcaaacatttctgtcagctaccagtaaccaactgcaaaaactcatattctacccaaaacagaaattgtgccagtcggggagtcctt

SEQ ID NO: 979093 - DNA, 120 bp, Artificial Sequence
  ENSG00000273691_6 (sequence is synthesized)
tgatcaccatgcagtaaacctcgccaaaatattgtaaatttaaacaaactaaaacccaaccacttgaaaaaatttaaagcacttaaattgctattggttcaaggaagaaataaagaatgt

SEQ ID NO: 979094 - DNA, 120 bp, Artificial Sequence
  ENSG00000273691_7 (sequence is synthesized)
actgacaaatatttagaaagcattgaaaactagaatgccacatacccaaacctatgggagacagctggcactattctcatagccttaaatgcttttattattaaaaagggagagagaaaa

SEQ ID NO: 979095 - DNA, 120 bp, Artificial Sequence
  ENSG00000232692_0 (sequence is synthesized)
cagggacacaggtatttataatcacatagagggaccatggtgaatattccctttgtgttcaaaagtgaggctttaaataagtggcagcttattcatttcagatgcattttattgcagtgg

SEQ ID NO: 979096 - DNA, 120 bp, Artificial Sequence
  ENSG00000232692_1 (sequence is synthesized)
aggaaggaggagaagcaagtgaagacaatgaagtttgcctatctttaccaagagcttgatgatttgaaccactgactgattgccctgtacttggaggatgtgaggaagcagaattgagcc

SEQ ID NO: 979097 - DNA, 120 bp, Artificial Sequence
  ENSG00000232692_2 (sequence is synthesized)
ataaagagaagaggaagaaggagccacagaactgagtgggatgtcccctgagcactccttggtggagcaaaagtcttgcaagtctctagtgcgctgggcaggctgagggcgttcagccga

SEQ ID NO: 979098 - DNA, 120 bp, Artificial Sequence
  ENSG00000232692_3 (sequence is synthesized)
gaacacagctctgtaaatacatcagcgaggatgcatatatacagtttccccagtgctccctcagacccttggaggctgggctactccaagctctgtttcctgcaaaaaaatggagtaagt

SEQ ID NO: 979099 - DNA, 120 bp, Artificial Sequence
  ENSG00000232692_4 (sequence is synthesized)
cctgtggagtctaaatacacattccctctgcattatacccacgcctcgacttcattatatctaggagcactgagacaaagagatttataacaaacttcatccaagccaagaatgaaacac

SEQ ID NO: 979100 - DNA, 120 bp, Artificial Sequence
  ENSG00000232692_5 (sequence is synthesized)
catcaccaccttctgctagctatgcaatgctctccatcctacaggactcacatccagggtgacgagctgcagatcaaggtggattaaacagagctggaggcaggggttccattgaataga

SEQ ID NO: 979101 - DNA, 120 bp, Artificial Sequence
  ENSG00000232692_6 (sequence is synthesized)
aacacagaagcagagctgcctgggagactgcatgcagggaaatgatggcaggagctctctccatgggaggttatagcagctcttgatggaggaaaatgggaatctgtgagttcttagaag

SEQ ID NO: 979102 - DNA, 120 bp, Artificial Sequence
  ENSG00000232692_7 (sequence is synthesized)
atggaagacgtaggatctgacgttggttctgccctttggaatttgtacgtaggctttagcttttcccaacaataagcacggcaatctgcaatttcttcacatctgagtggcagtgacttc

SEQ ID NO: 979103 - DNA, 120 bp, Artificial Sequence
  ENSG00000232692_8 (sequence is synthesized)
actcataggtagtatcaaatggcctgcaaccagtggcatttgcttattctgccaaggtattatgccaacactgcctggaatctatgctcattatggaggaggcagagcaagatagccaga

SEQ ID NO: 979104 - DNA, 120 bp, Artificial Sequence
  ENSG00000232692_9 (sequence is synthesized)
tagaaccctccagcgatcatccccctggaggacatcaaattgaactattcacctaagaaagcaccttcataagaatctacatcatggccattaaaaaagcattggttaaataaatatcga

SEQ ID NO: 979105 - DNA, 120 bp, Artificial Sequence
  ENSG00000232692_10 (sequence is synthesized)
tctgaagacagcctcccaccccaccccacctcatcatgctcttccaggacagctacaggaagaaaaggagataacagaatctaatgatgtcccataagatctccagtcaaggtgtgaaca

SEQ ID NO: 979106 - DNA, 120 bp, Artificial Sequence
  ENSG00000232692_11 (sequence is synthesized)
aaacccattgatctgtttcttataagcatgtggttctatgctgtttttctgccaaagcttttccctgcctcccacttgaggagcatacaccagctgattctgcagattgactctacatca

SEQ ID NO: 979107 - DNA, 120 bp, Artificial Sequence
  ENSG00000232692_12 (sequence is synthesized)
ttctctgtcatgaagccatggcatgtgtttatgcgtctgtaacaaagcgtttatattctgccatctgcataaaaactgctgaaggacatttcagcaagaatccctatggtttatgcagct

SEQ ID NO: 979108 - DNA, 120 bp, Artificial Sequence
  ENSG00000232692_13 (sequence is synthesized)
gcatgttgaacatgaaaatctaagatatgacagtggtctttcattcatacaacctttgaattttggtaaagttctgatgtaatgttaaagagtggtattttgaggactacgcatcaagat

SEQ ID NO: 979109 - DNA, 120 bp, Artificial Sequence
  ENSG00000232692_14 (sequence is synthesized)
ataaacatggcacatcttttataatatcagccactggaagacatttgaaataatatttgtataattgtgggctgtattatctttctttcttgcacataataaagtttcactggaagtaaa

SEQ ID NO: 979110 - DNA, 120 bp, Artificial Sequence
  ENSG00000232692_15 (sequence is synthesized)
tcagtaggccaggggatctggaaatattcttcgggttgccattcttgatgttccagcacccagaggcaaatggacactgatgtgcttgacaagagcctccttttgtaaccctatcagtaa

SEQ ID NO: 979111 - DNA, 120 bp, Artificial Sequence
  ENSG00000232692_16 (sequence is synthesized)
ttgcccttcctatgtgacccaacgggggtttagaagaatgtgtttgcttccccttctgccagattgtaagtatcctgaggtctccccagtcctgtgaaactgtgaacaagttctgagttc

SEQ ID NO: 979112 - DNA, 120 bp, Artificial Sequence
  ENSG00000232692_17 (sequence is synthesized)
ttgtcccacaactgagaagaatgaggtacacagacatcagaaacacatcaccaccttctgctagctatgcaatgctctccatcctacaggactcacatccagatgtgcttgcttcccctt

SEQ ID NO: 979113 - DNA, 120 bp, Artificial Sequence
  ENSG00000232693_0 (sequence is synthesized)
ctttgtggaactcttttcagaagaaaaaaagagagaaagtgggggccatacttggcactagtaacgatgcatatgcacttctgaaaagaggtgtcaatggaatttggctcagctgatgtt

SEQ ID NO: 979114 - DNA, 120 bp, Artificial Sequence
  ENSG00000232693_1 (sequence is synthesized)
tactggatgggctctctcctccttccttccttagcccttctggtgggatcttgacatgttacagaggaaatgctaattgaagccccagccacaaccacttctgtgctctgcttctgcctg

SEQ ID NO: 979115 - DNA, 120 bp, Artificial Sequence
  ENSG00000232693_2 (sequence is synthesized)
aaatggatctcagtggcgaaaagtacgttaagttagcaaacgtgcctcacatactgtggatgcctgtaagactcttacattcgtctgcctagatgtatttcagaagccaataaaagataa

SEQ ID NO: 979116 - DNA, 120 bp, Artificial Sequence
  ENSG00000232693_3 (sequence is synthesized)
tctgtgtttgttgaatgaatgaagaaacccagtctaccgtgggtttaccatgtgccaaatgcagagctacaaaaggaaaaatgaaaaagaaaagacctagagaatctcaagtccagtggc

SEQ ID NO: 979117 - DNA, 120 bp, Artificial Sequence
  ENSG00000232696_0 (sequence is synthesized)
agataaagctgaactggggcaaagactacacttgagtaaaatcttgaacaatgtgagtgggaggaggagaaggcctggcaaattagaagcacaaccttgaagggcagagagacaagagtc

SEQ ID NO: 979118 - DNA, 120 bp, Artificial Sequence
  ENSG00000232696_1 (sequence is synthesized)
gtccggcccctggaagtttctggagttgtaaaatggcatcaagttgattttaaggaaaactcttctggaagcagagttcaaggtggattggaagaaggcagcctgaagttattctctctt

SEQ ID NO: 979119 - DNA, 120 bp, Artificial Sequence
  ENSG00000232696_2 (sequence is synthesized)
ccccatttccattgtccaaaatgttttattgtctttgaaaaagataaacaagcaatcctcattcctcactactacacttccttggtagaaacacaataaatatacagccactttggagaa

SEQ ID NO: 979120 - DNA, 120 bp, Artificial Sequence
  ENSG00000224216_0 (sequence is synthesized)
ccggttgcaaatttccaaaaaggagagtaaaataattaatgagtcaaggtctcaggagagacagaagggttgacaagcagaaatacagaactaatcatggttcctgatacagacgccaaa

SEQ ID NO: 979121 - DNA, 120 bp, Artificial Sequence
  ENSG00000224216_1 (sequence is synthesized)
ccctggttgtagagagaagtgaaatttgcaacccagaacagaaatctggctgtgtgagcagtaggattgggggtggaaacatttaatgaagtacaattttttaaccctcttttagacagt

SEQ ID NO: 979122 - DNA, 120 bp, Artificial Sequence
  ENSG00000224216_2 (sequence is synthesized)
atcactggataaacatccttttcaataataaaaatccaagtcatttctggcccttttcctggaagtgctttcaagttacaggaacaccaataagaggcccttttctgggcatggagccca

SEQ ID NO: 979123 - DNA, 120 bp, Artificial Sequence
  ENSG00000224216_3 (sequence is synthesized)
tgtactaaagggagcacattgttgagaaggaccggttgcaaatttccaaaaaggagagtaaaataattaatgagtcaaggtctcaggagagacagaaggatgacttacaacttaagtgtc

SEQ ID NO: 979124 - DNA, 120 bp, Artificial Sequence
  ENSG00000224216_4 (sequence is synthesized)
tccctttgtgggaggaatcccagctatagcctagtggaccattcacccagggatcttcaatcattcgttcaaccctaacatttatatgcgcaccagctacatgctaggcagtgcgtcagg

SEQ ID NO: 979125 - DNA, 120 bp, Artificial Sequence
  ENSG00000224216_5 (sequence is synthesized)
cattaaagatacaaggacgaatacagcagacacgacctcagtctttggacagagtttaccttctattgaggaagatagatgataaacaagtaataaatacataaacaaagtaatttcagc

SEQ ID NO: 979126 - DNA, 120 bp, Artificial Sequence
  ENSG00000224216_6 (sequence is synthesized)
tagctataaatgctatgaaaaaataatagtgttatataataaagagcgactgggaaatctatttcacatggagtgttaagtgaaggactttttgaagaagcgacatttgagctgttacct

SEQ ID NO: 979127 - DNA, 120 bp, Artificial Sequence
  ENSG00000224216_7 (sequence is synthesized)
gtatgatacgagaccaacaatgtaacaggctgaggggagagcattccaggcaaagggaaaagcaaaaacacagccttggagtggaatggagttttattctgtttgccgaccagtaagaag

SEQ ID NO: 979128 - DNA, 120 bp, Artificial Sequence; identical to SEQ ID NO: 936584
  ENSG00000224216_8 (sequence is synthesized)

SEQ ID NO: 979129 - DNA, 120 bp, Artificial Sequence; identical to SEQ ID NO: 936585
  ENSG00000224216_9 (sequence is synthesized)

SEQ ID NO: 979130 - DNA, 120 bp, Artificial Sequence; identical to SEQ ID NO: 936586
  ENSG00000224216_10 (sequence is synthesized)

SEQ ID NO: 979131 - DNA, 120 bp, Artificial Sequence; identical to SEQ ID NO: 936587
  ENSG00000224216_11 (sequence is synthesized)

SEQ ID NO: 979132 - DNA, 120 bp, Artificial Sequence; identical to SEQ ID NO: 936588
  ENSG00000224216_12 (sequence is synthesized)

SEQ ID NO: 979133 - DNA, 120 bp, Artificial Sequence
  ENSG00000224216_13 (sequence is synthesized)
ttccggtttggaactactacaaacagtgctgttatgaacattctattacatgtcttttggtgaacaaatatattcactcctgtttgaaataaacttaagaatggaacttatggatcataa

SEQ ID NO: 979134 - DNA, 120 bp, Artificial Sequence
  ENSG00000224215_0 (sequence is synthesized)
ttccggccctcctctgtctcaggcgagtcgccccagttcgccattgcagccccggacgtgcgcctcccgcggagccgctcgctctcctgagtcggagtcgggaacccggcgtccgttgcc

SEQ ID NO: 979135 - DNA, 120 bp, Artificial Sequence
  ENSG00000224215_1 (sequence is synthesized)
atggcgactcccaggcttccccacaagactcccacagcctggaggctgctgcgataccccagaggaaagctgcacccccgtaaataacccttcagcctcccgccgtgcccctggaccctg

SEQ ID NO: 979136 - DNA, 120 bp, Artificial Sequence
  ENSG00000224215_2 (sequence is synthesized)
ctcgcttcctcctctacccaggcgcggagctcagcctacctcgtggacccgcgcatttgcgggggcttgaattcccgagcttctcgcttcctacgcgcgcagcagacccgcagctcggtg

SEQ ID NO: 979137 - DNA, 120 bp, Artificial Sequence
  ENSG00000224215_3 (sequence is synthesized)
aggaaaagcagtgaacccatctaataactatgctcatgacataatgagccctgcgatcccggaccaaggccatcataagaggagagcaggctgcctaataagctgtctccacctgccaca

SEQ ID NO: 979138 - DNA, 120 bp, Artificial Sequence
  ENSG00000224215_4 (sequence is synthesized)
aacgtaggcgttcctggacaaaatatttccttgcagagattaaacagatttctatttaatgaggtcagaatgtgaggcgttaagtcttaaactataccatctagtgtggaattcaatttt

SEQ ID NO: 979139 - DNA, 120 bp, Artificial Sequence
  ENSG00000224215_5 (sequence is synthesized)
accaggtttctacaataataagagttaatagtgaaactgttgtcatccttagttttaaattatgtatcactcattgtcaactaataggagacacctattctaatatcagtatgtcattgt

SEQ ID NO: 979140 - DNA, 120 bp, Artificial Sequence
  ENSG00000224215_6 (sequence is synthesized)
ttttctgtaaacgactggctaaatttatttttaaaatgtcattgtctggtttagaactgtctatactacatctgcatttcaatatattatctacagaaaaataagttttttctcctctct

SEQ ID NO: 979141 - DNA, 120 bp, Artificial Sequence
  ENSG00000273521_0 (sequence is synthesized)
ccagccggacagtgaaacgcacaatgtcaggagtaacgcggcttcacaaccggaaaatgggtgattttatggcaaagagtttataaaaacatcccttggactttattttatgacaaaaga

SEQ ID NO: 979142 - DNA, 120 bp, Artificial Sequence
  ENSG00000273521_1 (sequence is synthesized)
taggaaaacacctcttaatctatttcaaaatagtaattagccaatgtttaaatttcaagaggaaaaatccgaattacaggattttaaagaatatggttttaggccaggcgcgcctggtgg

SEQ ID NO: 979143 - DNA, 83 bp, Artificial Sequence
  ENSG00000273521_2 (sequence is synthesized)
gaggatcgcttgagcccagtttaaaaaaaaaaaaaggtaaaaaaaaaaagcttgtagtgttcatatgtatatatatatattat

SEQ ID NO: 979144 - DNA, 120 bp, Artificial Sequence
  ENSG00000273521_3 (sequence is synthesized)
aaaaaagcttgtagtgttcatatgtatatatatatattattcaatatattacggtaactaagtcctgcctagtaaaatctttttttttgtaataaaattagcaactcactaaatttatgt

SEQ ID NO: 979145 - DNA, 120 bp, Artificial Sequence
  ENSG00000273521_4 (sequence is synthesized)
actctcaatgaagattaaaagttcactgtcagaggtttcagcagtcctttcccaagcttatttacatgctaattttgcttagtaaactctggcttcaaagaacacaaaggtcagctgcca

SEQ ID NO: 979146 - DNA, 120 bp, Artificial Sequence
  ENSG00000273521_5 (sequence is synthesized)
ccaggtccctcctccgaggctttggccctagggaccctgggaaggcggcttcagtgcccgcttccctgagcaaaggctcgtctggactctgacgcggacccaccgggtggggtgggtctc

SEQ ID NO: 979147 - DNA, 120 bp, Artificial Sequence
  ENSG00000273521_6 (sequence is synthesized)
cacgccacccggctgtgcgtggggcaagtcctgcaccccgggcctgcgtttcccgctgcgtgaacggatggtcttgcgaatctagccaagggcacacagcgagcctctactcgggcatta

SEQ ID NO: 979148 - DNA, 120 bp, Artificial Sequence
  ENSG00000273521_7 (sequence is synthesized)
ggcaggctgtaacgactgagtgctgcacgggcagcgtccttttgcttgtgttttcttaacccgtaagtcatttaaagctttgttttggaacgaccctctagtgaaattggaacatgccca

SEQ ID NO: 979149 - DNA, 120 bp, Artificial Sequence
  ENSG00000273521_8 (sequence is synthesized)
tttaatgccatattttaaaaacgctgtaaccccctcccatctccgcgttcacccttgaggaaatcctaacagtcaccatggatataaacattaataacaaaattaaagctcataacaggc

SEQ ID NO: 979150 - DNA, 120 bp, Artificial Sequence
  ENSG00000273523_0 (sequence is synthesized)
agcccaggacgctaggccttttctgggccgcccccgccgccccaggccgaaactccatccctttcccccaccctgccgagctcccgaagccctgtggcggctccgggcaagaactaaggg

SEQ ID NO: 979151 - DNA, 120 bp, Artificial Sequence
  ENSG00000273523_1 (sequence is synthesized)
cggcccctgcaagcgtacctgctccgccggctccgcggggccaacgaagcgtcccggaaggatccgggttcccggggccgctgcgcctccctgcggccggggcggagccgcgcaaggaaa

SEQ ID NO: 979152 - DNA, 120 bp, Artificial Sequence
  ENSG00000273523_2 (sequence is synthesized)
cgcgggcggggcgcgggtctggaatggcctggggaccagtccacctcgaggcagggtcaggcgccagggagtttggagacccggcagagtcaccccgcaaccgtcccgttgccttgggtc

SEQ ID NO: 979153 - DNA, 120 bp, Artificial Sequence
  ENSG00000273523_3 (sequence is synthesized)
gggattcctttgctttgcagtctacagtagcgctccccgctcttgcttaaggtgcaccagacgcttcgcaaacgttctctcttttctttacaacccgtcaaggcagtagtctcccagttt

SEQ ID NO: 979154 - DNA, 120 bp, Artificial Sequence
  ENSG00000273523_4 (sequence is synthesized)
tacaaatgagctaaactgatacaggaagagtgtttcttgtacaaggtctcaaatattgccaaaaggtggacgtgagactggaacggcttcctactctttgggccacagcggcggcctgcc

SEQ ID NO: 979155 - DNA, 120 bp, Artificial Sequence
  ENSG00000273523_5 (sequence is synthesized)
aagggactttctaacgaaaccggcgctgcccaagcgtctgcactcacgcccagtgctcatcccaccctgccccattctggatttgcacatcaagctgctgtctaaaatgtttaagtagtt

SEQ ID NO: 979156 - DNA, 120 bp, Artificial Sequence
  ENSG00000273523_6 (sequence is synthesized)
gaaaaaaatgtaattttcagcaattgtaaatagtgacgcaagttaaatatatccaactgaatcgaaacactacagtaatatggtaccctccatcgtccacctcacacacacacacaaaaa

SEQ ID NO: 979157 - DNA, 120 bp, Artificial Sequence
  ENSG00000273523_7 (sequence is synthesized)
aaacccacaaaaaactcttaaaaatcctaagtttacatcattactcttccttcttaaaatcatctctccgccgccccctccccgtccctgccacaaaaaatttcttcttcttgtaagcac

SEQ ID NO: 979158 - DNA, 120 bp, Artificial Sequence
  ENSG00000273523_8 (sequence is synthesized)
tctagtcaagttggattagggctgaactaaaggcctcattttgatctaattgcatctttaaagtctctgtctccgaatatagtctcattattagttattggtgttagatttcagtgtgtg

SEQ ID NO: 979159 - DNA, 120 bp, Artificial Sequence
  ENSG00000273523_9 (sequence is synthesized)
aattgggggtggccgcggcgggggtgaatgcagcccgtagcaggagtccaaaagttgtttagcagttggaatatccaatgttagtttctttggcagtgaaattccctcaaaatattagta

SEQ ID NO: 979160 - DNA, 120 bp, Artificial Sequence
  ENSG00000273523_10 (sequence is synthesized)
ggtatatgatctacttgtttttgtttaattacacgtgtcagtgaccacacccaaatttcttccctagaattcttagacatgcttcattaaatcatatcttcattctactttcctgataga

SEQ ID NO: 979161 - DNA, 120 bp, Artificial Sequence
  ENSG00000273523_11 (sequence is synthesized)
attttacccgttatctttttcatacttgaaagtcttattgatcatcctatcatactgctgaaagaagtacagaaatggaaatttatatttcctgctcatagaattttagtttttctggat

SEQ ID NO: 979162 - DNA, 120 bp, Artificial Sequence
  ENSG00000273523_12 (sequence is synthesized)
ttgttaaaattactagtactacacaattgatcacaataaaatgtatcacaatactgataattattaaatataaaaaataaaattgtattgaaaattcatctctttaagacctggatgggc

SEQ ID NO: 979163 - DNA, 120 bp, Artificial Sequence
  ENSG00000273523_13 (sequence is synthesized)
gggcttcccatgcaccgttagttcctgtatccatagatgaatgctaacttcttgctacaatgaagtttaacactgattctcttccattttcttaaggctgtaagtgctgagaaataagta

SEQ ID NO: 979164 - DNA, 120 bp, Artificial Sequence
  ENSG00000273523_14 (sequence is synthesized)
tctgtcaccaaaactggtttataatcatgaactgataattccattagtcttctgaaattttattaaaagcaaaaccccataagccattctgattttgaaaaggatttattatccaatact

SEQ ID NO: 979165 - DNA, 120 bp, Artificial Sequence
  ENSG00000273523_15 (sequence is synthesized)
tatccagtctctcagtaactgtacataatttcaagttttttttgtttgatggttttgaaatgtttatgcccttgggcaatgccaagattgaagatgactaagaggtatggaatacagtat

SEQ ID NO: 979166 - DNA, 120 bp, Artificial Sequence
  ENSG00000273523_16 (sequence is synthesized)
atatggaagctgagtacctggaaatgtccttaaaactatccatgcctgctttaacttgaaaaatcttcaagagagtagtaagctaatttcaaagagctaacccaagtaattttgggaaat

SEQ ID NO: 979167 - DNA, 120 bp, Artificial Sequence
  ENSG00000273523_17 (sequence is synthesized)
ggtatttgactggaaactatgagacaataggaaagatacataaactctgtaccttagttggtaaatttgtttctcccaggggtatgggttaatgatttggaaactgctttacaaatagac

SEQ ID NO: 979168 - DNA, 120 bp, Artificial Sequence
  ENSG00000273523_18 (sequence is synthesized)
taggattgaacagctaagcagatggcggatggtacaagccagttttctcattgtcagggagagaagttacagaaaagcgtgagaagaaggctagaatgaaccttgtagtactgggttagt

SEQ ID NO: 979169 - DNA, 120 bp, Artificial Sequence
  ENSG00000273523_19 (sequence is synthesized)
tggagacatcagtatggacccatgcttaatttaatgtatgtacagatggagagatacagaaataactgtagagatgtctggatggatatacaattatacagtgtatacaggttagtatac

SEQ ID NO: 979170 - DNA, 120 bp, Artificial Sequence
  ENSG00000273523_20 (sequence is synthesized)
acatatatacttcctagctctgtctgctgagagggcctagaagcagtgacaccccaggagcaataagcacacccagcacccagatcttggtttctaaaccagtgggaaccttgttgaaat

SEQ ID NO: 979171 - DNA, 120 bp, Artificial Sequence
  ENSG00000273523_21 (sequence is synthesized)
ggatgattttggggctggggcagagaagataaagatgagtctggaccatcttgtagtgccagaaaggaagtgctccaaaagaaccagcgcacctcaaagggacacaggaggtgacctgaa

SEQ ID NO: 979172 - DNA, 120 bp, Artificial Sequence
  ENSG00000273523_22 (sequence is synthesized)
acaattcccaacggccaaagctagaacaatttaagcaagaaaacaaacgacttattattggattatactcccacccccagaggtggagattaattcctttgcatttgactatgagctgga

SEQ ID NO: 979173 - DNA, 120 bp, Artificial Sequence
  ENSG00000273523_23 (sequence is synthesized)
gtgtgtgactcacttatagtgaacacagcatgaacatggaaaattatgaagttgatagtgaagagcctggcagacactgccttcatcaagtgatcaaggtgaacgacaccaggaagaagt

SEQ ID NO: 979174 - DNA, 120 bp, Artificial Sequence
  ENSG00000273523_24 (sequence is synthesized)
catgctgatgctccctgaaatgatgtgatgagaagggcacttcacctttgtgattttccccaaaatccataagcttagtccaattgtgagacaaacccaaattgagcaacagtctacaaa

SEQ ID NO: 979175 - DNA, 120 bp, Artificial Sequence
  ENSG00000273523_25 (sequence is synthesized)
atacctaagcagtactcaaaaatgtcaaggtcccgaaaaacaaggaaagatttagagactgccagagaccactggagatgaaagatatctaaatgactgccatcttctgacaagatctgc

SEQ ID NO: 979176 - DNA, 120 bp, Artificial Sequence
  ENSG00000273523_26 (sequence is synthesized)
agaccaccccaagcttcccagggctgaccctccaacccaggctcttttgtgcatcctatgagggactgtatttaaggacagctggtagttggtgaagatcattggaatgatcttcaaact

SEQ ID NO: 979177 - DNA, 120 bp, Artificial Sequence
  ENSG00000273523_27 (sequence is synthesized)
actcagaatcaggtcatattgaaaaactgcacacattactaaatcataattaaatatatttaattctcaaacctttaggaaatgtaaaaagagtcacataataataaacacatatcataa

SEQ ID NO: 979178 - DNA, 120 bp, Artificial Sequence
  ENSG00000264635_0 (sequence is synthesized)
attatagtatgtgtagtgaaatggtgggattttatttttattttttattttttagagacagcgtctcattctgtcacccagggtggaatgcagtggtgcactgatagctccgtgcttgaa

SEQ ID NO: 979179 - DNA, 120 bp, Artificial Sequence
  ENSG00000264635_1 (sequence is synthesized)
gagccttgaattcttgggctctagcaatcctctcgcctcagcctcctgggtagctaggactgcaggcacaggccaccattcccagctaatttaaaaaattattttttttgtagacacagg

SEQ ID NO: 979180 - DNA, 120 bp, Artificial Sequence
  ENSG00000264635_2 (sequence is synthesized)
cccagctaatttaaaaaattattttttttgtagacacagggatctctctgtgttgcttaggctagtctcaaagtccttggctcaaaggatcctcccacctcagcctcccaaagtattggg

SEQ ID NO: 979181 - DNA, 120 bp, Artificial Sequence
  ENSG00000264635_3 (sequence is synthesized)
gtcagagataatccaatgtgagctcttaatgatacagattaatgaagtatcaaaagatgagaggtatctaaaattcacaaaacttgttagtaacagaacgagtattagaaccagctatct

SEQ ID NO: 979182 - DNA, 120 bp, Artificial Sequence
  ENSG00000264635_4 (sequence is synthesized)
aactcttagtccagtggtgtcctgtatcatacggtttcttagaaaatagatgtttccaggccaggtgcggtggctcacgcttgtaatctgagcactttgagaggccgaggtgggtgggtc

SEQ ID NO: 979183 - DNA, 120 bp, Artificial Sequence
  ENSG00000264635_5 (sequence is synthesized)
cactccagcctgagcaacaagagcgagactccatctcaagaaaatagatgtttccacaaatgtaaagtctatatgtatttatatttcaacagataattttaagaaaattaaaatggatga

SEQ ID NO: 979184 - DNA, 120 bp, Artificial Sequence
  ENSG00000264635_6 (sequence is synthesized)
aagtctatatgtatttatatttcaacagataattttaagaaaattaaaatggatgagggctgttccaaagaaaatattagtaatctaaagtgtatgctgaattttttttttttttttttt

SEQ ID NO: 979185 - DNA, 74 bp, Artificial Sequence
  ENSG00000264635_7 (sequence is synthesized)
actgcaagctccatctcccaggttcacacaattctccccccagccaatcttttgtatttttagtagggacgggg

SEQ ID NO: 979186 - DNA, 120 bp, Artificial Sequence
  ENSG00000264635_8 (sequence is synthesized)
cacctggcctgaatttgttatttactatagtccaacacaagaattaagatggtatatatacagtttaaaatgggacttttttactcttctgactttttgttttaaatatatagtgaaaac

SEQ ID NO: 979187 - DNA, 120 bp, Artificial Sequence
  ENSG00000264635_9 (sequence is synthesized)
tgttaaaagtttctcttcagatatgtggtaggtatttgagaggccttattattggctttggttgacatgctggttttggaatcttacctcctagcctccaaatgtccacagaatctgaca

SEQ ID NO: 979188 - DNA, 120 bp, Artificial Sequence
  ENSG00000264635_10 (sequence is synthesized)
attcagaaaagctttatactgagaaactatacataggcaacaggcatatgccacgccagttcatgcttctgagttagacactctatggtaggggaggttggcaatccatttttgtttttt

SEQ ID NO: 979189 - DNA, 120 bp, Artificial Sequence
  ENSG00000264634_0 (sequence is synthesized)
tcggtgaggaaaagtgtccttgcaacaacaaatgcatgctgaaaaaataatgaatgcattgcagcacattgttagcagtcgttattatgaagaaaatggtttgcctctgtctttcgcaaa

SEQ ID NO: 979190 - DNA, 120 bp, Artificial Sequence
  ENSG00000264634_1 (sequence is synthesized)
tatttgagtgaggaatgcaaactttacagagggtcttttggttggacgtcagtggcacatccacatgcaacacagggaagttggatgtgtacccagacatgagaaatacaaggaaacaat

SEQ ID NO: 979191 - DNA, 120 bp, Artificial Sequence
  ENSG00000264634_2 (sequence is synthesized)
gccacaggggactcctcagtttggtgaggtggggcaagaattcccctgctcctaacggtgcaaaccctatattaaaagtagacaagccaagtgaaaccttttcactcaaatccgatctga

SEQ ID NO: 979192 - DNA, 120 bp, Artificial Sequence
  ENSG00000284632_0 (sequence is synthesized)
acttgcaaatcctgctgaagataacacatgtggcaggttcatagatacacccttcaaggctgtccctccaaatgagaagagcatgaactatgtggttgtacagcttgggtgtgaattcca

SEQ ID NO: 979193 - DNA, 120 bp, Artificial Sequence
  ENSG00000284632_1 (sequence is synthesized)
acatacctcttggggttgttgtacggattaaatgtgcctgtgtatacagaacccctaacacagtctctcagatgttgtaactgtttaacaagtagtgatgtgattattgttgataatgtt

SEQ ID NO: 979194 - DNA, 120 bp, Artificial Sequence
  ENSG00000284632_2 (sequence is synthesized)
gatggtaaggccacttaccccaccatgggttcaattttaggaagctcatcgttgctgcatggctgagccctgtctgcaataccgctagtatcagtaataaaatggatactttgatctcta

SEQ ID NO: 979195 - DNA, 120 bp, Artificial Sequence
  ENSG00000284632_3 (sequence is synthesized)
cgcctcgcccccagcccggacgccgccgaggcctgcccctgactccgcatttctattaactttcgaattaaaaagtatttcttttaagatcaaaaagcgatcaatgctagtcggaaaaag

SEQ ID NO: 979196 - DNA, 120 bp, Artificial Sequence
  ENSG00000284632_4 (sequence is synthesized)
ttcaaacaataccaccacccttccttctccaaatctctctagaggaaaccactgtttacagattgatgagatcatgggtcagaggcgtaaagtgacttgttcaaagtcacccagcagtgt

SEQ ID NO: 979197 - DNA, 120 bp, Artificial Sequence
  ENSG00000284632_5 (sequence is synthesized)
atgattcagcctctccaagggaaccaatctttccaaaccgtctggtggagaacagatggcacagcacccaggagtccccgagctgcccagcctcaaagatgctccatttcagccaagtgg

SEQ ID NO: 979198 - DNA, 120 bp, Artificial Sequence
  ENSG00000284632_6 (sequence is synthesized)
aaaagtcaggcaagcagcttgggatctggttctggcagtcaaggctggagaaagaagcccgggatgcttcagcataaggagaggtacttaaaaccctgggagaggatgggctcactgcgg

SEQ ID NO: 979199 - DNA, 120 bp, Artificial Sequence
  ENSG00000284632_7 (sequence is synthesized)
gtgtctccctgaggcttaggaggtaccaggattcacccgagtcttctgagggtggcacttgggttagggaacaatttactcatgacgaagacagagatcagaggatgagatcatgggtca

SEQ ID NO: 979200 - DNA, 120 bp, Artificial Sequence
  ENSG00000286329_0 (sequence is synthesized)
agatgaatacacatctgttaaacaagctgcatagattctccagagagttcaatataatttttctcggtatttttcctgtaaaaatacgccattagacaaatgaattgaaacatttttacc

SEQ ID NO: 979201 - DNA, 120 bp, Artificial Sequence
  ENSG00000286329_1 (sequence is synthesized)
aaagcttcaatgcagaaatcacggctgcacaaaagtacatgaaatggggaggtcacatcatattagtgatcagctgtcataatcagaagaggccataaattgccacagtcacctcaacct

SEQ ID NO: 979202 - DNA, 120 bp, Artificial Sequence
  ENSG00000286329_2 (sequence is synthesized)
tcagcaaccaccaacttgatcaatcagcagccaataacgtgaagtcatgaccattcaccagcaaaaagtttatgattcaccaaaatattagatgatcattaacatttttagcaataatgt

SEQ ID NO: 979203 - DNA, 120 bp, Artificial Sequence
  ENSG00000286329_3 (sequence is synthesized)
atttgtcattaaggtgttagtgcattggaaaatcatttaaagaatgtatcagctaattgaaggcttatgtgatcattcaaagataagctacctgatgaaaaaataaaggttaatgcaatt

SEQ ID NO: 979204 - DNA, 120 bp, Artificial Sequence
  ENSG00000286329_4 (sequence is synthesized)
caacaacaaaattaatgctgcaaacatctctcttctattttagacattcttctaactgctggaactaataagatatgaatgatgaagcttatattcttctaggaatgatatatacttcac

SEQ ID NO: 979205 - DNA, 120 bp, Artificial Sequence
  ENSG00000286329_5 (sequence is synthesized)
acaaatataaataaaaagcctagataattacaaataagttatatgaatgaagttgacagtaactgaaagaagtccgtttaaatatggttgtcggaaagcctctacagaaggtgccatcta

SEQ ID NO: 979206 - DNA, 120 bp, Artificial Sequence
  ENSG00000286329_6 (sequence is synthesized)
aacacagatccaagggataccggtagactagctgtactaagaaccatggagagagcgttctagagtgtacatgttcagaggccgaatagaatgaatgagttagacacatctgggaaacga

SEQ ID NO: 979207 - DNA, 120 bp, Artificial Sequence
  ENSG00000286329_7 (sequence is synthesized)
tctgggaaacgaaaaagaagccaatgtgaatggaaaacaaggaccgttactgtaggccatgaaaacattttctctttctctccccctctctctgttttttgtttgtttgtttgtttgttt

SEQ ID NO: 979208 - DNA, 120 bp, Artificial Sequence
  ENSG00000286329_8 (sequence is synthesized)
tgggattacaggcgtgagccattgtgccaagactctttctctctttttttttttttttcctttcttccctaagcacagtggtagccattagagcatctgagaagggatgtgggcaagcct

SEQ ID NO: 979209 - DNA, 120 bp, Artificial Sequence
  ENSG00000286329_9 (sequence is synthesized)
gtgggcaagcctggttttaattctaaagttcccttcggttaatttgtgacaaactggattgtgaatgtgtttccatgtatcgtgggaaggagaatatagaggtgggagtgaatagcaaaa

SEQ ID NO: 979210 - DNA, 120 bp, Artificial Sequence
  ENSG00000286329_10 (sequence is synthesized)
atacacataagaagactctttatgaagttttttggattatctgtaaatatacactatcacaacactgaaaatttatgctgaaactttcattccaatctattttatttttatttttatttt

SEQ ID NO: 979211 - DNA, 120 bp, Artificial Sequence
  ENSG00000286329_11 (sequence is synthesized)
ttcttttttttccacttcaaatgaatgagcctattgtgaattcttttgaaaggctttgtatttttgtctctgtgatacttcgtggcttcatatttgtttacttttactatttggttgttt

SEQ ID NO: 979212 - DNA, 120 bp, Artificial Sequence
  ENSG00000286329_12 (sequence is synthesized)
agttatatgtattttgttccactaaaatgtcccattccgaacaggtatgccttctgaacaattaatgcagtgcacctaatgtacatcaatcaaattgctaaccgatgatgtttctcaagg

SEQ ID NO: 979213 - DNA, 120 bp, Artificial Sequence
  ENSG00000286329_13 (sequence is synthesized)
gtatttgttccttggtagttgtcagaaatataaatggtatatttcagtatatatcacagtatacattttctcatgtaatccccacaataactcagcaaagtgtggcttattatcacttca

SEQ ID NO: 979214 - DNA, 120 bp, Artificial Sequence
  ENSG00000286329_14 (sequence is synthesized)
acagaagagtcagaaagtttaagctactgcatctgggtaactatgcaaagccgtagagaagagtggaaaagacacacaattcagatttgaaatattttttttcagttctttgctgttcac

SEQ ID NO: 979215 - DNA, 120 bp, Artificial Sequence
  ENSG00000284634_0 (sequence is synthesized)
atgcagatgggttctctacctggcctgtgccttgttgcctgttcctttactgtacatgtgatgacaagaaaagaagatggaccctccatgttgaacatgcctgataaaactctgcaaaga

SEQ ID NO: 979216 - DNA, 120 bp, Artificial Sequence
  ENSG00000284634_1 (sequence is synthesized)
caatgtctagcacttatatctccagtaactcctgtcaaggtttattgttgcttgttcatcattgcagtcctgactacaagtgtgattgcactttctattgttttgtcagcaagaaaggaa

SEQ ID NO: 979217 - DNA, 120 bp, Artificial Sequence
  ENSG00000284634_2 (sequence is synthesized)
aagccagtggtagagtcatctaaatacgctgcttgcccaaaaagctgaattagatttaggagtaaatgtttttatttttctgaaggcataagaaattagacattgagtcaaacgttctgt

SEQ ID NO: 979218 - DNA, 120 bp, Artificial Sequence
  ENSG00000284634_3 (sequence is synthesized)
ccttagaagagaatcatcccatcgcatttggaaatggacagacaacatggaatataataacatgcttgctatcagaggaagtggagaatgtgccttcctgaatgacaatggagtcaacag

SEQ ID NO: 979219 - DNA, 120 bp, Artificial Sequence
  ENSG00000284634_4 (sequence is synthesized)
acagtggcagaatctacatgaacagaaaatggatttgtagcaagccaaacaattatgtctacagttgccagttatgtccccactgggatactacctagtagagctgtgagaagagggcca

SEQ ID NO: 979220 - DNA, 120 bp, Artificial Sequence
  ENSG00000284634_5 (sequence is synthesized)
cctccagactccagaatggtggaatcagcagcagcttccaccatgcccctggaaaaactgcaagtaacagacctgcacatgtatcccctacatctaaaataaaagttggaaaaaatggaa

SEQ ID NO: 979221 - DNA, 120 bp, Artificial Sequence
  ENSG00000284634_6 (sequence is synthesized)
agtttaaatgttcaacaagttcatggaatgttcgggtatcagtttacaatatatgattcttcttcctgaccaacagtttcctgctctacgaaacgcactcttttgccttgaagcggcatt

SEQ ID NO: 979222 - DNA, 120 bp, Artificial Sequence
  ENSG00000284634_7 (sequence is synthesized)
ggacagtggtgtcactaatggctataatcatgcaattctagcttatgcttttgccttagctggaaaagagaagcaagtggaatctttactccaaaccctggatcaatctgccccaaaact

SEQ ID NO: 979223 - DNA, 120 bp, Artificial Sequence
  ENSG00000284634_8 (sequence is synthesized)
aagtaagcgttattattcattgttgctaatggaggtgatcttggagcacagtgaggaagcgttctaagcagtcacataggagctccctcttgacgagtatgtttctgtttctcttatgga

SEQ ID NO: 979224 - DNA, 120 bp, Artificial Sequence
  ENSG00000284634_9 (sequence is synthesized)
atttatcagtggcctttatacctttcaagaacgctacatattctagactttcctcttttgctttatgctagcttcctctcaaatgagtgatgtcaggggaatcaagcctggtgaccaagc

SEQ ID NO: 979225 - DNA, 120 bp, Artificial Sequence
  ENSG00000284634_10 (sequence is synthesized)
cataggctatcgaaactgctggggaagcttaatcacctgctacttagaaagttgctatttaaggctgtagtagtttgctatagctgtcataaaataccacatactggatgactgcagcaa

SEQ ID NO: 979226 - DNA, 120 bp, Artificial Sequence
  ENSG00000284634_11 (sequence is synthesized)
caaaagtttattttctcatgcttctggaggctagaagtctaagttcaaggtgttgaaagtgtggtttcttcacctgcagatgaccacattcttcctttgtcttcacaagatcttttgtgt

SEQ ID NO: 979227 - DNA, 120 bp, Artificial Sequence
  ENSG00000284634_12 (sequence is synthesized)
gtgcacagccctgctctcccttttgtgtgtccaaaatttttcttctcataaggtcaccagtcagattggattgtggcccataagcttcattttaacttaatcacctctttaaaaagtctt

SEQ ID NO: 979228 - DNA, 120 bp, Artificial Sequence
  ENSG00000284634_13 (sequence is synthesized)
atctccaaatacagccacattttgaggtacttggtgttagggcttcaacatataattttaggggaacaattcagcacaaacagaggtcgggaatggaattttcatccttctttatgtgta

SEQ ID NO: 979229 - DNA, 120 bp, Artificial Sequence
  ENSG00000284634_14 (sequence is synthesized)
acccatgacttttatacagactatgtgaaaattcttcctttttctcagataatgtcatctactgggaaagagaaaggaaacccaagacagaagaatttccatcctttattccctgggcac

SEQ ID NO: 979230 - DNA, 120 bp, Artificial Sequence
  ENSG00000284634_15 (sequence is synthesized)
cttctgctcagactgagaagagttgctacgtgctgttggctgtcatttcccggaaaattcctgacctcacctatgctagtaagattgtgcagtggcttgcccaacggatgaattcccatg

SEQ ID NO: 979231 - DNA, 120 bp, Artificial Sequence
  ENSG00000284634_16 (sequence is synthesized)
gaggcttttcttccaaccaggctccggtagattgcaaacgacctgctttctttgtgatcccggctgcattcggacccctgtcagacagtaaatcccaagctcccgtagattgcaaaggac

SEQ ID NO: 979232 - DNA, 120 bp, Artificial Sequence
  ENSG00000284634_17 (sequence is synthesized)
gattgcaaaggacatgctttctttgtgatcccgggctgcattcggacccctgtcggatagtgaattccaaataatgtacctaccgtcggcagatctgagctttcttcttggacacctaat

SEQ ID NO: 979233 - DNA, 120 bp, Artificial Sequence
  ENSG00000284634_18 (sequence is synthesized)
gatccagtgagattttccaggttaacggtcataaccgcctactggtccaacgttcagaagtaacacaggcacctggagaatacacagtagatgtggaaggacacggttgtacatttatcc

SEQ ID NO: 979234 - DNA, 120 bp, Artificial Sequence
  ENSG00000284634_19 (sequence is synthesized)
aggccacccttaagtacaatgttctcctacctaagaaggcatctggattttctctttccttggaaatagtaaagaactactcttcgactgcttttgacctcacagtgaccctcaaataca

SEQ ID NO: 979235 - DNA, 120 bp, Artificial Sequence
  ENSG00000284634_20 (sequence is synthesized)
ctggaattcgcaataaatccagtatggtggttatagatgtaaaaatgctatcaggatttactccaaccatgtcatccattgaagagcttgaaaacaagggccaagtgatgaagactgaag

SEQ ID NO: 979236 - DNA, 120 bp, Artificial Sequence
  ENSG00000284634_21 (sequence is synthesized)
tcaagaatgaccatgttcttttctacttggaaaatgtctgcccacatcagtgcccaccaggaaaactgctgcttgtgttatcaagaatttaaaggccatgctatccatcatgtgttacct

SEQ ID NO: 979237 - DNA, 120 bp, Artificial Sequence
  ENSG00000284634_22 (sequence is synthesized)
cacattggtgttccccgcttctttcactcagaatgctaactcttcagagacacaggaaagtgccagtttcaacaaatgcaatgatttaaagccataaatgtaacaggaagatctaattct

SEQ ID NO: 979238 - DNA, 120 bp, Artificial Sequence
  ENSG00000284634_23 (sequence is synthesized)
ggaagacatacaaatgccgaaaggaaaattaaagccacttaccccgaggaagagatgaaggtgaagaactttctgggcctgagtctgtgggaacacagaagaaagaaagaagaactgaga

SEQ ID NO: 979239 - DNA, 120 bp, Artificial Sequence
  ENSG00000284634_24 (sequence is synthesized)
cttaaatgaagcttaactggtacatctggactctgatgagtgagaagtccaagcaaatagaaaagccacagccaaacgggtctcacgctgtcacccaggctggagtggaatggcactatc

SEQ ID NO: 979240 - DNA, 120 bp, Artificial Sequence
  ENSG00000284634_25 (sequence is synthesized)
ttgactcactacagccttaatctcctgagctcaagcaatcctctcacctcaggctcctgagtagctgggactacaaatgggttctctacctggcctgtgccttgttgcctgttcctttac

SEQ ID NO: 979241 - DNA, 120 bp, Artificial Sequence
  ENSG00000284634_26 (sequence is synthesized)
tgtacatgtgatgacaagaaaagaagatggaccctccatgttgaacatgcctggccctcaggtagcccttttctattggcacagctgctggcattcatctgtgcaagcttccagcttgct

SEQ ID NO: 979242 - DNA, 120 bp, Artificial Sequence
  ENSG00000284634_27 (sequence is synthesized)
catgtatgtctgcagctcgatttctcaggctgctctttgttagaaaagaaatgattttttgggctgctttttgttaaaatggaaaattctgcctatgactctgttgtccttactatctgc

SEQ ID NO: 979243 - DNA, 120 bp, Artificial Sequence
  ENSG00000284634_28 (sequence is synthesized)
ctaaataatttatttctatgtcctgtatcactggattccccccacctaccaagttgttcttaaaaactgctccctgaatgctctaagagactgatttgagttttgaataaaactctggac

SEQ ID NO: 979244 - DNA, 120 bp, Artificial Sequence
  ENSG00000284634_29 (sequence is synthesized)
gtatcattgggggctgttataccaggacacatggaggtgaagaactaaagcaaaatcgtgtctacttcacagttttgcctaaggctgggcttaattcttaaaaagataaaactctgcaaa

SEQ ID NO: 979245 - DNA, 120 bp, Artificial Sequence
  ENSG00000284634_30 (sequence is synthesized)
aggctttgatttttaattctgcaatgtttccttaacagccattctgaattacaaactaattcctatttctgccacattccttcctgagaactgtctagtcctggtttgggatttatctta

SEQ ID NO: 979246 - DNA, 120 bp, Artificial Sequence
  ENSG00000284634_31 (sequence is synthesized)
aggaacttggatctcaaccccagggctaggtgcctcctcccgctgctttccgccagctgcggggtgtgagattaatccccgccgattagcgccaggtgtactaatccctggatggttccc

SEQ ID NO: 979247 - DNA, 120 bp, Artificial Sequence
  ENSG00000284634_32 (sequence is synthesized)
tgaccagatgaaacatcagccgatgttctaatgcccgtcccctgggcactgtccccgagagggaaaacctgttttctgaccccggctctagtcggcctctggagatctgcagctgggtta

SEQ ID NO: 979248 - DNA, 120 bp, Artificial Sequence
  ENSG00000284634_33 (sequence is synthesized)
ttttacttctgaaacggacgacacctgccccgcgcaccccagcggctcctccacacggagagatggtgtcagtcaaaggccgtctagatgacgagtttatgaaattgttcctggcccgtg

SEQ ID NO: 979249 - DNA, 120 bp, Artificial Sequence
  ENSG00000284634_34 (sequence is synthesized)
ccgggcacgaccttgcagagagcccagaagatgaaaccccagccctgccaggagctcacctgctaattaggaggacaacgaatcacctcacctccctagactttgcttctcctttattca

SEQ ID NO: 979250 - DNA, 120 bp, Artificial Sequence
  ENSG00000284634_35 (sequence is synthesized)
aaagtctggttctgggagatgaccaatgggatcatcttatgctatgagctttcctggaatgacaggtaatggagagtgaggagattttacctgatatggtcctgtttgcaccgtcagcca

SEQ ID NO: 979251 - DNA, 120 bp, Artificial Sequence
  ENSG00000284634_36 (sequence is synthesized)
ctccagcctgctttgcagaaattatttcgctctacttagaaaatctgaccaacttaagatctaacaagtacagaaggaggaaaaggtcaatgtttggagtgaattctggactaactgggt

SEQ ID NO: 979252 - DNA, 120 bp, Artificial Sequence
  ENSG00000284634_37 (sequence is synthesized)
ggatatagccttatcctgaatcactttagaagactgctatcgacatcattccaaaaaggttcattgcagcatccaattccaggtctctggcgataagagctattttcttgcccttgtatg

SEQ ID NO: 979253 - DNA, 120 bp, Artificial Sequence
  ENSG00000284634_38 (sequence is synthesized)
tgtattcccctgatcaaggtcactggcctagaaaacaaagattctgtgttttaccaagataattcccagtgcttcatggtgtctttattaggctttgactgcttagggaaactgagcctt

SEQ ID NO: 979254 - DNA, 120 bp, Artificial Sequence
  ENSG00000284634_39 (sequence is synthesized)
aaaagggtaaaagtttttccatccatgtaactttctgaggtctttaggttgtcactctgattaaatgagtagtattcttagcagtgacttattatctgttgaaggaagtattttaagctt

SEQ ID NO: 979255 - DNA, 120 bp, Artificial Sequence
  ENSG00000284634_40 (sequence is synthesized)
tttgacatctttggcaggtttctctagaatccaaatcctaaattaagccttttggcctaaaaatgactgggatttttccaggtggaccccctagatatgctcctccaaaggcttgtcttt

SEQ ID NO: 979256 - DNA, 120 bp, Artificial Sequence
  ENSG00000284634_41 (sequence is synthesized)
cttgtagagttattaaatgattaggcttatttggcaaatactgctagaagcattgtcaaataagaaatggtgttttacctttctttaagctgtgtttgtgtaagttcatcatttatagaa

SEQ ID NO: 979257 - DNA, 120 bp, Artificial Sequence
  ENSG00000284634_42 (sequence is synthesized)
atgtgaaattttatgagattcctaagatactgacatgctgagatacctgtaataattgcaatttttatgttggatgattgtatgccacagaagcacttaaatttcctggttaattggtaa

SEQ ID NO: 979258 - DNA, 120 bp, Artificial Sequence
  ENSG00000284634_43 (sequence is synthesized)
cgttaatcagatctttacctatggctgttctgggtttttgtcattcacagttattattttaatttcttctttggaagcgttcgcaatcagctatagtccaaaattgctaattaagatcaa

SEQ ID NO: 979259 - DNA, 120 bp, Artificial Sequence
  ENSG00000284634_44 (sequence is synthesized)
gcaaaacaaaattaattacgtaaaattaatttataaggatgtttttatgacgtaaatgttttattttccagagccaaggaaattttctgtcacaagctatctaccgtttgcaataatttg

SEQ ID NO: 979260 - DNA, 120 bp, Artificial Sequence
  ENSG00000248172_0 (sequence is synthesized)
cgcgcagcaggcttccggcagtccaaagggctttgagagctgcagttggcagaaacagagggcacggtccgcggactgaggggcaggggtgagtgcccgcttggtctgggccactcccgg

SEQ ID NO: 979261 - DNA, 120 bp, Artificial Sequence
  ENSG00000248172_1 (sequence is synthesized)
aggccgccgcgtgggaaaggacttgggtcattggtaaaagtctagtcccaggatacaatgagctgaagtggtaaccagtgcacagtggacctgctttgcagcttgggcatgccacgcaaa

SEQ ID NO: 979262 - DNA, 120 bp, Artificial Sequence
  ENSG00000248172_2 (sequence is synthesized)
ggtccgtcatgctttccacagcacatcaggcaatccatccaatcacagcaacaacaccaaaaatgatcccctctgctctcaggtactttaatttgaaaaatggagttttggctgggtgtg

SEQ ID NO: 979263 - DNA, 85 bp, Artificial Sequence
  ENSG00000248172_3 (sequence is synthesized)
aggtactttaatttgaaaaatggagttttggctgggtgtggtgccgtgggaagatcattacttgagcccagaagtttgagaccag

SEQ ID NO: 979264 - DNA, 120 bp, Artificial Sequence
  ENSG00000234595_0 (sequence is synthesized)
ggtctcacggtagctgtccttgggcttcccatcccgcagcgctccgatgtgaccctcctctgcgcggaaaatttcgacccggggcgccggcatcgcgacgctcagccagtgcccgcgagg

SEQ ID NO: 979265 - DNA, 120 bp, Artificial Sequence
  ENSG00000234595_1 (sequence is synthesized)
ctcccaggagatgcggggtagtaaggccctaaaaagaggagcctggacacggcctggattgagaaagaagcaagcaaacaaaaatcctcggtagctgtgtgtagcttcaggagtggagag

SEQ ID NO: 979266 - DNA, 120 bp, Artificial Sequence
  ENSG00000234595_2 (sequence is synthesized)
acaatggttgctgcagtgggttgggagagaggacccggacaagttcctaaaggcacgggaggaacgcgggcaaaccaggtttagggccccaggcgaattgtggaaggaatgacttcctca

SEQ ID NO: 979267 - DNA, 120 bp, Artificial Sequence
  ENSG00000234595_3 (sequence is synthesized)
acctatcagcaccgtggacaattcccactccaacggccctgaccttcggcctactagattcagcaaaaatctctcttcctcccttgcttcctcctttccttcctcccttcctcctttcct

SEQ ID NO: 979268 - DNA, 120 bp, Artificial Sequence
  ENSG00000234595_4 (sequence is synthesized)
tcctgccttccctccctccccttcctcctcctttccttcctttcctccctccccttcttcctcctttctttcccttcctcctttccactcttccctgtttgctttgtttcaaaaacaaaa

SEQ ID NO: 979269 - DNA, 120 bp, Artificial Sequence
  ENSG00000234597_0 (sequence is synthesized)
gaaataatttcttataagtcattaataactgaagtaagcattaattgaacctttaaacagttaaacttacaataattattttgaagatcatcttgccttaaaaacttcaagatctttgag

SEQ ID NO: 979270 - DNA, 120 bp, Artificial Sequence
  ENSG00000234597_1 (sequence is synthesized)
gggataatttgccatcttagtatttagaagaactgtgtttgtgtctatatgagggagatcagattataatagaaggatttggtaaaatgaagagaaagttttgaatgggctaaacaggaa

SEQ ID NO: 979271 - DNA, 120 bp, Artificial Sequence
  ENSG00000234597_2 (sequence is synthesized)
ttcaaggacttcttataatacattccagagctcagcaactctttttttatattgcctgctgtttgggattatattcatcattgctgccttcagttacagggcaaaatgctgaatggcaga

SEQ ID NO: 979272 - DNA, 120 bp, Artificial Sequence
  ENSG00000234597_3 (sequence is synthesized)
aggctgaagaaaagctaaaagctccgtcctattgagaagttcatcacagggaagactccactgaagtaatcagatgcctttcctgctgccctgagtctttaactgtccaaagggagtcct

SEQ ID NO: 979273 - DNA, 120 bp, Artificial Sequence
  ENSG00000234597_4 (sequence is synthesized)
gaacccaaagctgtttcagctgcatgcgattgttaggatcattcactcatacctcttcgtttaggatagagaacaatcaggcaaagaaaggggaggactaacccaaggtcagataattag

SEQ ID NO: 979274 - DNA, 120 bp, Artificial Sequence
  ENSG00000234597_5 (sequence is synthesized)
ggctcatctgaaagagatggaccagagaggaggagatggagaaaaaagtctcctaccacacactggaaccacttttacagaagtgcctgttgtctcccctgcacccctgcactcccaacc

SEQ ID NO: 979275 - DNA, 120 bp, Artificial Sequence
  ENSG00000234597_6 (sequence is synthesized)
ccaacaatgccaggcagcaagctgttgcagaaaggaagcaggctgctgcccctgcagtgttcaggcctcctcctggcagggctccctctacctgaatccatctcagggaaatggtcatct

SEQ ID NO: 979276 - DNA, 120 bp, Artificial Sequence
  ENSG00000234597_7 (sequence is synthesized)
ctgactatgctgcacagagcctgcaaagctatgttaataatctctctgggccttaaactgaataaccaagatttcgcacatgtaccattcacttcccacttaatatgcacactcaattta

SEQ ID NO: 979277 - DNA, 120 bp, Artificial Sequence
  ENSG00000234597_8 (sequence is synthesized)
cacaggaagtatgcctaaggctctttcaatgactgtatgtgactacacatagggtttttcttttataacagattggcaaatgcctgaggtggtatgagtgtgatgttgctggaaaacctt

SEQ ID NO: 979278 - DNA, 120 bp, Artificial Sequence
  ENSG00000234597_9 (sequence is synthesized)
agttgaaattcctagactatatgaaatcctttttaaatctccttattctgaaaacatatttttttaaaaaaaatttagaccactcatgggatttaaagtaaaaagtacaaatatactgta

SEQ ID NO: 979279 - DNA, 120 bp, Artificial Sequence
  ENSG00000234597_10 (sequence is synthesized)
aaaaaaaaaaaaaaagctttcctggaattttaaactattttctcttttgattaaaaaaaatagaggatgagatatgcactcattacaagaatattacatttcaggatttggtaaaatgaa

SEQ ID NO: 979280 - DNA, 120 bp, Artificial Sequence
  ENSG00000234597_11 (sequence is synthesized)
attatgcaaacatagagctcttatattttcattcttctactttaggtcgcaattgtctatctctgcattatgtgcaaaccaaaatgagaactgcaggaataaaacacatggttgtgtcca

SEQ ID NO: 979281 - DNA, 120 bp, Artificial Sequence
  ENSG00000287508_0 (sequence is synthesized)
catctgctgaaagaagtggctcaggccctctccatgacaactgccgacgcagaatccacagagctctggacaatgggacaaaccatatttctatgaacaaagccaaggaatctgatggac

SEQ ID NO: 979282 - DNA, 120 bp, Artificial Sequence
  ENSG00000287508_1 (sequence is synthesized)
aagagaatccagaatctctgcaatgggcagaagagaggaccagacttcatggttgatctccccacagaccataccaacagggcaaagcccttctactgtcattggagtatattgacccat

SEQ ID NO: 979283 - DNA, 120 bp, Artificial Sequence
  ENSG00000287508_2 (sequence is synthesized)
ccctgacagaaagtctgtgtaagcccgaggaggaggaacatgccgcaaacctgctgcagagcattaacaagaacagaattaaaaaggatcacttctgggactcatcacacaacttggaaa

SEQ ID NO: 979284 - DNA, 120 bp, Artificial Sequence
  ENSG00000287508_3 (sequence is synthesized)
tcatgttcaataaaagaaaagataatttggggccacactacctgaaatgaacatctgacactcagtcactggtctggatttagaaaactgctttgatccccggagggaagattgttaatg

SEQ ID NO: 979285 - DNA, 120 bp, Artificial Sequence
  ENSG00000287508_4 (sequence is synthesized)
gcaagtagaactgactttgaacaagacacattacactgccctgagaaaacgtcctcatctctaacatgggaggtgaagttaaccctctagtccatccaacaatcaaatctaggccttaat

SEQ ID NO: 979286 - DNA, 120 bp, Artificial Sequence
  ENSG00000287508_5 (sequence is synthesized)
gactatgaaaacatgggaaaaaatttaaaacaagagcaggtaatgcttgcaccttttcgctacctgaaaggaaggtcagacaaccttagtataaaaggtaacttttcttacttgcatgct

SEQ ID NO: 979287 - DNA, 120 bp, Artificial Sequence
  ENSG00000287508_6 (sequence is synthesized)
aacaatcaatgcataatttacatagcaatgcatacactttatatagttcaagagatcatcgttgactgcctgaacttgatatgcttcatccttgtcatgtcctcctcactaaatactaac

SEQ ID NO: 979288 - DNA, 120 bp, Artificial Sequence
  ENSG00000287508_7 (sequence is synthesized)
tacccaaagtgatcaaaccccaaatgtaaaaataatcatctgataaatcacagacaacaaggaggtgaaaaaaagaactcagtcaaacatttttgagttcataaaaaaattgaatagcat

SEQ ID NO: 979289 - DNA, 120 bp, Artificial Sequence
  ENSG00000287509_0 (sequence is synthesized)
ggggccctggcaccgctctacagaggctcggctctgccctggtcgctgtcagtgccatctcccttaacgagaaacttgggcgtgatgtatgcgaaacaattttgatgcatgatggtttct

SEQ ID NO: 979290 - DNA, 120 bp, Artificial Sequence
  ENSG00000287509_1 (sequence is synthesized)
aactccttaggaaaagataagtcctttaattctattacctgatttcgacatggtcgtagttacttgaatactttttccagtgaaatttggggagtaagatgaatttgtggaacatttcat

SEQ ID NO: 979291 - DNA, 120 bp, Artificial Sequence
  ENSG00000287509_2 (sequence is synthesized)
aagacaaccgtaaaagatgggaaaggggggaaatcccagttttcatggttgtaggatgaaaactagttccacgacagttagtctccaaataaccttatttggcctccgcaaatatgtact

SEQ ID NO: 979292 - DNA, 120 bp, Artificial Sequence
  ENSG00000287509_3 (sequence is synthesized)
ggttgctccagaaatcatcctacttggtatgcggcgttagatacattagaaaattagttactaacggtctttagggaatgctttgtgagcctcagtaacgatcaccagggttttctcttt

SEQ ID NO: 979293 - DNA, 120 bp, Artificial Sequence
  ENSG00000287509_4 (sequence is synthesized)
accaggtccaaagccctttattcttttcacccttttattatttttcctttaatgtactttgtaacacttagaataaaagtttagagtaatcataaatgcccccataaactcactatttat

SEQ ID NO: 979294 - DNA, 120 bp, Artificial Sequence
  ENSG00000287509_5 (sequence is synthesized)
ccctcttacgtcagtagtcatttattttaatttattatgtttgatagggaggtgttttaacctgaagaaatgatatcttcccgtatttaaagtttaataactgtatactgtttggcccct

SEQ ID NO: 979295 - DNA, 120 bp, Artificial Sequence
  ENSG00000287509_6 (sequence is synthesized)
gtcagactgtgtttgtgctagtcttttttccttcttctttttgaactgtagtatcttcttaataactttgaagaatgtgtggtactaatagaattaaaagaatatcttggccgggcgcgg

SEQ ID NO: 979296 - DNA, 60 bp, Artificial Sequence
  ENSG00000287509_7 (sequence is synthesized)
ggtactaatagaattaaaagaatatcttggccgggcgcggtagctcacccctgtaatccc

SEQ ID NO: 979297 - DNA, 120 bp, Artificial Sequence
  ENSG00000234593_0 (sequence is synthesized)
caggtgtgagccacagtgcctggcctgattattattttagaattaaaatatcccaagtttctgaagcgagaaaagcagtttcccctctttctagtgccttctggctgctggcgaaatgat

SEQ ID NO: 979298 - DNA, 120 bp, Artificial Sequence
  ENSG00000234593_1 (sequence is synthesized)
ctgctggcgaaatgatgaacatgttgagctttacaagccagagattcgatgagaacagaaacacacctgccaggaaaagaaaaggctgcttagagtgaggattcaggacctggagcccac

SEQ ID NO: 979299 - DNA, 120 bp, Artificial Sequence
  ENSG00000234593_2 (sequence is synthesized)
tctgcggagagggactggggtcaggtcctgattggcttgtgctcttctcttttacgcaggtcttatgtatcaacaaaatcacaccagaccacccaaagctggccctgccaactgaccaca

SEQ ID NO: 979300 - DNA, 120 bp, Artificial Sequence
  ENSG00000234593_3 (sequence is synthesized)
actcaggggacatcaaatgttcatgagaactcgctaacctcgaaacaggttctacaaattcaaaaaaaccacccgtggcctggctctgggctgaagctgagtcctggcttgaaatcccct

SEQ ID NO: 979301 - DNA, 120 bp, Artificial Sequence
  ENSG00000234593_4 (sequence is synthesized)
gccttaatctctcttcgaagacttttctgcattcatctgagtcctcatcctccaaggcagggctcaggcttgggctcaggctcccagccatgtatccctcctggaccattcctgactcct

SEQ ID NO: 979302 - DNA, 120 bp, Artificial Sequence
  ENSG00000234593_5 (sequence is synthesized)
ttccagtatccttatcacttgtaccacatacgttggcctttgatcctgtgtactgttggatttgtctttacttcacaggttcatcttgtctccccaagaacaatgagagttgcctcaagg

SEQ ID NO: 979303 - DNA, 120 bp, Artificial Sequence
  ENSG00000234593_6 (sequence is synthesized)
ggtagaaccatgctttttgttttcttttgaattcattacagcacagccaaaagctcaacacacaaaacacactcagtaaatatctgttgaacagaataaaagccattccgcataaccaac

SEQ ID NO: 979304 - DNA, 120 bp, Artificial Sequence
  ENSG00000234593_7 (sequence is synthesized)
ggcaatcccctaatgttcccttccaccttgtggaagttttgttctttcgctctttgcaataaatcccattgttgctcgctctttggggtctcactgtctgtgcgagctgtaatactcgcc

SEQ ID NO: 979305 - DNA, 120 bp, Artificial Sequence
  ENSG00000234593_8 (sequence is synthesized)
gcaaaggtgtctggcttcacttccgagaccagcgagaccccgaacccaccgggaggaatgaacaactccggatgggagggacaaacaacaccagacgcaccgccttaagagtcctaacgc

SEQ ID NO: 979306 - DNA, 120 bp, Artificial Sequence
  ENSG00000234593_9 (sequence is synthesized)
tcaccgcggaggtctgcggcttcactcttgaatgaagccagcgagatcacaaacccaccagaaggaaggaactctgaacacatccgaaaatcagaaggaacaaactccggacacactacc

SEQ ID NO: 979307 - DNA, 87 bp, Artificial Sequence
  ENSG00000234593_10 (sequence is synthesized)
aaattccggacacttccccacacagagggaactggcctaacactctggtggtgccaataggatgtactgacagatcagaagtggtcg

SEQ ID NO: 979308 - DNA, 120 bp, Artificial Sequence
  ENSG00000234593_11 (sequence is synthesized)
gtggtgccaataggatgtactgacagatcagaagtggtcgtgagagaaggagcaagtagccagaagagtgaagtgtgcactggctgagatgtgggagcaggtgttgttggtttccccgga

SEQ ID NO: 979309 - DNA, 120 bp, Artificial Sequence
  ENSG00000234593_12 (sequence is synthesized)
ggcaactgtgaacagccatttggagaatccaccacatggaaaatcctccagctttcccaggggacagtcacatcctcaccccaggagggctgagaaagaacaccggtgcaaaggagggca

SEQ ID NO: 979310 - DNA, 120 bp, Artificial Sequence
  ENSG00000234593_13 (sequence is synthesized)
caggtcagcaagagggattcgcttctgtccccagctatgagtcatcatcctcatccttttagtcatcccctgaaagctgcatgctgtaatttggtgaccgccttgtgtccttgaagagca

SEQ ID NO: 979311 - DNA, 120 bp, Artificial Sequence
  ENSG00000234593_14 (sequence is synthesized)
ttttcgagccaaaacttttcttcttcttcctggggcagacactgagagtctctgggcaatcgaactgtgacatcttcatcacattggtcccaaggattgattcagcaatgtgcccaatta

SEQ ID NO: 979312 - DNA, 120 bp, Artificial Sequence
  ENSG00000234593_15 (sequence is synthesized)
ggtgggtgtccccttccatcatggctctcctatgtgggtcccttctgaaataatgcatccttcagggtgctttcagctacgagcaacataaaactcaattaaaagtgtgctagacagaaa

SEQ ID NO: 979313 - DNA, 120 bp, Artificial Sequence
  ENSG00000234593_16 (sequence is synthesized)
ctagctgaagatacaaagatgggatgagatcaccaaggagtaagtgtctttagcaaagagaagagaccaaggactgaatctggatacctcaacatttggagtcagagcctgaaaaggatc

SEQ ID NO: 979314 - DNA, 120 bp, Artificial Sequence
  ENSG00000234593_17 (sequence is synthesized)
cctcaaaagtgcccaagaagcagcagaatgaggaaagacagcccagggagtgtggcacagctgctcctcaccacttcaggctcccctggagtccaatgcactggggcctcattcctgggt

SEQ ID NO: 979315 - DNA, 120 bp, Artificial Sequence
  ENSG00000234593_18 (sequence is synthesized)
attataattgcctcctaagtggcctctggcttatgtctcctaccccagttgatgttcatcacatcagccagagtggctctgttaacacccaagccagttcctgcccatctgctgagaatc

SEQ ID NO: 979316 - DNA, 120 bp, Artificial Sequence
  ENSG00000234593_19 (sequence is synthesized)
ttcaagggctttcacctcactctgagtcgaagccaatatcttcacaatggcctggccctttgccaactgctgtggtttaaatgtttgtacccttcaaaacttaggttgaaatttgcttgg

SEQ ID NO: 979317 - DNA, 120 bp, Artificial Sequence
  ENSG00000234593_20 (sequence is synthesized)
caacatggtggtggcaggaggtggaacctttgggatgtgatagggccaagggctctgccctcaggggtaggattaatgctgttacaaaagagcaagtttgactttcttttgcctctttgc

SEQ ID NO: 979318 - DNA, 120 bp, Artificial Sequence
  ENSG00000234593_21 (sequence is synthesized)
caagtttgactttcttttgcctctttgcccttctaccttccttcctgggaggatgcagcaagaaggccctcgccagatatcaaggccttaagcttggacttcccagcctccagaactgtg

SEQ ID NO: 979319 - DNA, 120 bp, Artificial Sequence
  ENSG00000287504_0 (sequence is synthesized)
acccattccgtttgggatatttagacattcagaagaggcacccgagacctgatgcccgacaggggttggagctcagagttggtgctgacaagagaggctggaagtgaggaccatctgcat

SEQ ID NO: 979320 - DNA, 120 bp, Artificial Sequence
  ENSG00000287504_1 (sequence is synthesized)
ggaggtgtcagcttctcacaggtgaccctgacgacccaccaccccagctgttctccatcacctgacagctgagcctccaagatgctggcgagttctgcctgtgcatggctttgaccagct

SEQ ID NO: 979321 - DNA, 120 bp, Artificial Sequence
  ENSG00000287504_2 (sequence is synthesized)
ccagccagaaagaggaactttcagagtccaggtttggggcctgtggatgagttacctgttaccaagaaaggttaccgagtctccatcactcttttgggaatgaggccacttcctactgac

SEQ ID NO: 979322 - DNA, 120 bp, Artificial Sequence
  ENSG00000287504_3 (sequence is synthesized)
agatcctgtagctatttatggagagttttggcctttcagcatccaatccctctttcaatcaggaggcgttctccactgtgtattatctgagagggtcccaatgtaccacctcctgctgtg

SEQ ID NO: 979323 - DNA, 120 bp, Artificial Sequence
  ENSG00000287504_4 (sequence is synthesized)
gaagccaaagctggggtgggggaagcaggaggtgagaatgtgactcaggatcagtcaaccacatgggaccctgaatcttgcaggagaggcagaaagagtcagatgtggtttataaattat

SEQ ID NO: 979324 - DNA, 120 bp, Artificial Sequence
  ENSG00000287504_5 (sequence is synthesized)
tggcagttattgaaagtctagaggtgcagcatcaagtgtccagcatggtgacatctcactccagtattctaattactttctcccgtagtgaactgggctctggttccagctccctggcct

SEQ ID NO: 979325 - DNA, 120 bp, Artificial Sequence
  ENSG00000287504_6 (sequence is synthesized)
aaccttgacaatgtagaacagcgaagggatgtgctataaggcatgagcaataggttcaactggacccaagacacacacactgtatgaaagttaccctcctgcaagcgacccagaatgtca

SEQ ID NO: 979326 - DNA, 82 bp, Artificial Sequence
  ENSG00000287504_7 (sequence is synthesized)
tgtatgaaagttaccctcctgcaagcgacccagaatgtcaatcctccagtgagagagacagagaataaataaatgtctatac

SEQ ID NO: 979327 - DNA, 120 bp, Artificial Sequence
  ENSG00000287504_8 (sequence is synthesized)
agtacaatgaaggagtagagatcgagtgggcagtattttagatggggtggtcagagaagggggaggtgagcagaggcctgagtggagtgacagagcagccaagtcgggtactcagaagag

SEQ ID NO: 979328 - DNA, 120 bp, Artificial Sequence
  ENSG00000287504_9 (sequence is synthesized)
ctttccaggcaaagggagccccaagtgaaaagatgccaaggcaaaaaaaaaagtgtcacctctctgtctctcctgctggcacagcttcctgagagcagggactctgtctgttttcttcac

SEQ ID NO: 979329 - DNA, 120 bp, Artificial Sequence
  ENSG00000287504_10 (sequence is synthesized)
atccaccaggcctaggacactttctgtcatgtaaatatctgttcatgaatgaatatctgcctggcacgcagggtacagttcttcacacatcatttgcagttcttcccgatttgcctacag

SEQ ID NO: 979330 - DNA, 120 bp, Artificial Sequence
  ENSG00000287504_11 (sequence is synthesized)
tggggcataggatgggaaggaactcgtcaggagtaggtttcagacatgggacctgggtgagacaggataggttaccttagttgtcccctgaaactcaatatgatcctcatgcagttgtca

SEQ ID NO: 979331 - DNA, 120 bp, Artificial Sequence
  ENSG00000287504_12 (sequence is synthesized)
ggaggggttatattatttcatgtttgtaaaggtcttagcaccaagggcacaggcctttatgttctagaggttggctgttattattactgttcttaccaatcaataataaactgtaaatct

SEQ ID NO: 979332 - DNA, 120 bp, Artificial Sequence
  ENSG00000287505_0 (sequence is synthesized)
ggagatcactcaaattcatctccctaactgactaaaattggggttttatatagcaggaaagaaatgcaacaatatgtgagaaaacaggagctagaaaggggcaaggaagcaatcatgatg

SEQ ID NO: 979333 - DNA, 120 bp, Artificial Sequence
  ENSG00000287505_1 (sequence is synthesized)
aatgaggggtatctcattgtctggatctggtgcctcggagtttgtcatgacctcaaggagtttcttgtgaaggagtcactgagcttcagaccacttgactctaccaaccttgaccacaac

SEQ ID NO: 979334 - DNA, 120 bp, Artificial Sequence
  ENSG00000287505_2 (sequence is synthesized)
tgattggaccaatgtggggacctgacctcagggacgtgtccacagatcagtggtcttcaagctaagcagtagagtgacttgaaagcttggccaagaagaacaccaggtaaactggacggt

SEQ ID NO: 979335 - DNA, 120 bp, Artificial Sequence
  ENSG00000287505_3 (sequence is synthesized)
gactaacagacccagtaagatcttccctctagaggaatctgaactgaggtgcaagctggaaaaactacgagacagctaaaagtcatgcattattgatgtagtagcaatcacgagatagga

SEQ ID NO: 979336 - DNA, 120 bp, Artificial Sequence
  ENSG00000287505_4 (sequence is synthesized)
aacagagcacaaaaacatgtagtagtggtatccaaacacatggagagttgagcagaaagagtacctgggttagcaacaggttataacagggagaactgaatggctacttcagaggacaaa

SEQ ID NO: 979337 - DNA, 120 bp, Artificial Sequence
  ENSG00000287505_5 (sequence is synthesized)
tccttaaggaggtgatgagtcactgcaggtgctggcagacacctttcttactgaacaaaaacagcattgcatttctctatgaaactttgctccatggctgctgaagtgcattcctctctt

SEQ ID NO: 979338 - DNA, 120 bp, Artificial Sequence
  ENSG00000287505_6 (sequence is synthesized)
gtttatcttgtcacatattctttcaagacacctccattcggcagacagtaaacaagaatacttccttgctcctcgaaatctggaaagatcttaaaaatgcattaagtcactaccattttt

SEQ ID NO: 979339 - DNA, 120 bp, Artificial Sequence
  ENSG00000287505_7 (sequence is synthesized)
actccttttaactagtcggtaatagttatagaaatccagcacctgggctaatgaagaaaatagtttataaatattatcagaatttattaccaagatcatcagatgtgtagctgccccttg

SEQ ID NO: 979340 - DNA, 120 bp, Artificial Sequence
  ENSG00000287505_8 (sequence is synthesized)
gggtagggcgtaaacttgcccattgaccacagtctccaccacttcacaatgtcccctgatattgggttagactgccaggtactatctgtcattacacttatatacttggatgttcttagc

SEQ ID NO: 979341 - DNA, 120 bp, Artificial Sequence
  ENSG00000287505_9 (sequence is synthesized)
ctaccgaactgtggtaaagtgaaagatagactgaaaatctctaactttctaaaaacaggaaagggcatatcttggtagaatggagaatatttgtaggagatttacgtgacatgatgtgtg

SEQ ID NO: 979342 - DNA, 120 bp, Artificial Sequence
  ENSG00000287505_10 (sequence is synthesized)
tctggatcaaaggagcacaagtcaaaatttcataaggaatgatccaggccaccttctctcttggtctgtaagcatctggattttcagcccaggtctagatacagaatgcttcattgttga

SEQ ID NO: 979343 - DNA, 120 bp, Artificial Sequence
  ENSG00000287505_11 (sequence is synthesized)
ataaaataatgcctttttacagagttctttttcctggtggctgttagctgtttaaagttgtgctgagagtttttgaggaaagaaaaggagtttaactatgatgccagtccagaacgagcg

SEQ ID NO: 979344 - DNA, 120 bp, Artificial Sequence
  ENSG00000287505_12 (sequence is synthesized)
aataatctatttgggaagataaaatgcaaatataaaaatcagaaatattctcaattttgttattactgttaataagtagcaaaagccatcatttattgagcaacaactatgttggaaagc

SEQ ID NO: 979345 - DNA, 120 bp, Artificial Sequence
  ENSG00000287505_13 (sequence is synthesized)
cacttacatacataagacggcattcttaattcaattcttgttatgtgggcattgttgcccagattttaagaatgaagaatctaggatcagagaggttaaatggcttgccaaattaaaaaa

SEQ ID NO: 979346 - DNA, 120 bp, Artificial Sequence
  ENSG00000287505_14 (sequence is synthesized)
atattattcaatgttagaagatgaaatttgaacagtctgtttggatccaaattccatgctatatctaatgtaccattctctatacttaaaatgtgtttttctggaaaaaattatccattg

SEQ ID NO: 979347 - DNA, 120 bp, Artificial Sequence
  ENSG00000287505_15 (sequence is synthesized)
atatttatatcttttgatatcacaagaatttttggcctctcatcaagatgaaatatattaggaaatgagatagaatgttagaattaaattgttgtgagaccaccaaattcccattgctat

SEQ ID NO: 979348 - DNA, 120 bp, Artificial Sequence
  ENSG00000287505_16 (sequence is synthesized)
ggaaatcattttgggcaatgcaaatattttaactggctaacactcaaggttttccagattaaattcttttctttctctccatagaatagtagttatttacctttgtatggctcattcata

SEQ ID NO: 979349 - DNA, 120 bp, Artificial Sequence
  ENSG00000287505_17 (sequence is synthesized)
gtaaatctcttaatttccttggtgatgtttatttaaataattggtctccttaaatgaaagcacaattatagcaagacaattcttcttccataaaacacacattcacacgattaaaaacct

SEQ ID NO: 979350 - DNA, 120 bp, Artificial Sequence
  ENSG00000287506_0 (sequence is synthesized)
agattctgggaggtctcgggaggcccagaaatgggagaagtcagattgcggggtcgtgggccccaaagcctaaatcttgcccttcctacacccagagctaagtgaccatgcccaggcttc

SEQ ID NO: 979351 - DNA, 120 bp, Artificial Sequence
  ENSG00000287506_1 (sequence is synthesized)
atttgaccacatggacaaaggcctagagaaggcctccccgaggccagaatccctgggaagtctgcccagcatctagtctcttaggacttcgttggcctcctctggggaagaacatcaatt

SEQ ID NO: 979352 - DNA, 120 bp, Artificial Sequence
  ENSG00000287506_2 (sequence is synthesized)
cagcatcagcatcagcagcagcagcagcaagacatcctggagctccatattcagtatggcaagaggcaacgggcgtgagggaagcagtcccgaacagaaatgcaggagcagcggtaacag

SEQ ID NO: 979353 - DNA, 120 bp, Artificial Sequence
  ENSG00000287506_3 (sequence is synthesized)
cagcagccgctgcctgcgagcatcaggcaggggagtgagacagtgggcactcaaatccgtttcctccatctctcagccacacagcccaagcgaggctgtgtgagaacttctcagtgcaca

SEQ ID NO: 979354 - DNA, 120 bp, Artificial Sequence
  ENSG00000287507_0 (sequence is synthesized)
agacacacgaggccgggcaggcatgactcagcagcccttaggatctgcgtcctgtgattttctcaaggagcacaaagtgggaatctattctcatctccatcagttggccctgcttcataa

SEQ ID NO: 979355 - DNA, 120 bp, Artificial Sequence
  ENSG00000287507_1 (sequence is synthesized)
cgcacgtttcctgacagcagttagaggagagactgagtaaggctgtggtggcatctcccagctcctttgggctggatggggaaggacctaagccatcagtgtcctggagatccagcgtct

SEQ ID NO: 979356 - DNA, 120 bp, Artificial Sequence
  ENSG00000287507_2 (sequence is synthesized)
taattcattcagggtagcccgtcccgccctccagactgctgggcacaccaggggctctgctcctgctctgtcccaggactcagggcccctccagggcagctgccgtgacgtcgtggctat

SEQ ID NO: 979357 - DNA, 120 bp, Artificial Sequence
  ENSG00000287507_3 (sequence is synthesized)
tgcccaacctggactccccactctctgctgctggcgccaggacggtctcacccacctcagcctctagctcctcctcctcaagcctcaggtctgaacttggccatggcctctgcccagaag

SEQ ID NO: 979358 - DNA, 120 bp, Artificial Sequence
  ENSG00000287507_4 (sequence is synthesized)
ccttctgcacctctgtcagatccccgtttacccccagcaggaccctcccttagggcacttggtacaatttcacatccgtgacagtgacagtcaccgcccccatgctgtgagccccacggg

SEQ ID NO: 979359 - DNA, 120 bp, Artificial Sequence
  ENSG00000287507_5 (sequence is synthesized)
tgacagtcaccgcccccatgctgtgagccccacgggagtccgagctgacttcattcttcccctactacgtgcctcatccactttgagctcctgtattagtccattctcatgctgctaata

SEQ ID NO: 979360 - DNA, 120 bp, Artificial Sequence
  ENSG00000287500_0 (sequence is synthesized)
actatggcaatgccgccgctcgccccggggcgctagtttggggccgggttttcggtgcaggtgcccggcgggtgcgagggcgctggagatggcggctgggagacaccagcagagtcccgg

SEQ ID NO: 979361 - DNA, 120 bp, Artificial Sequence
  ENSG00000287500_1 (sequence is synthesized)
aagcccgagacgtcccaggcacttcggttgcgctcccagccggcagaggcgcgcctggattctgagaccaggaatcggagctgcgctattagagcgcaggatggaggaaggtagcctggg

SEQ ID NO: 979362 - DNA, 120 bp, Artificial Sequence
  ENSG00000287500_2 (sequence is synthesized)
cccaactgaactcactgtgtattcagaaaataacccacagttgggaaattcacagtgccattgctttgaatcaaatccttacttcataccaggatgtaccatgattcttggcaacatgac

SEQ ID NO: 979363 - DNA, 120 bp, Artificial Sequence
  ENSG00000287500_3 (sequence is synthesized)
tgggtattgatgtcttgtctagccaatgaaatccacatagcaaagatgttatgaagacatggaaacatgaatatgaaataaaatcagtatagctatttggatgattagctatcgacacaa

SEQ ID NO: 979364 - DNA, 120 bp, Artificial Sequence
  ENSG00000287500_4 (sequence is synthesized)
ttggccatgtgaccctaactcccctggtcacaagtggctgaaccagcaatcaatacctgacctgaaggcaaccctctataggctggcaagtggcctacaaagttgctcagtgctagagaa

SEQ ID NO: 979365 - DNA, 120 bp, Artificial Sequence
  ENSG00000287500_5 (sequence is synthesized)
ctgagcccaacagaagtacattctaatgtttagtgattggccaatcgtattctttgtgatggtgctgatgggaaggtagtgatgtgcatcagacatgcagagttagtagcagctggagca

SEQ ID NO: 979366 - DNA, 120 bp, Artificial Sequence
  ENSG00000287500_6 (sequence is synthesized)
gacacagaagcctccctaacaatgggcaatggagaaaggaacaacagacagttctgaaagaataccaagtgctcctaagccaaaagctatagttaggctgctggaggtactgccagtcct

SEQ ID NO: 979367 - DNA, 120 bp, Artificial Sequence
  ENSG00000287500_7 (sequence is synthesized)
aaatgatggcaatgatggtccatttttctgtgaaacttgactgtatacctgttaagatttttttgtgttctttttaaggctccatgaatgaatctttccaataaacaagtttgtaacaaa

SEQ ID NO: 979368 - DNA, 120 bp, Artificial Sequence
  ENSG00000287501_0 (sequence is synthesized)
ccctctccccgagctgctcctttctgaggtctgcaattggatggccccctctcatcatttggcttcagctcagatgtttagttgccctcaggaagctgcctcctacatctgtgacctcat

SEQ ID NO: 979369 - DNA, 120 bp, Artificial Sequence
  ENSG00000287501_1 (sequence is synthesized)
cacttgccattgtctaccaccacaccttggctcatgttccacagcactcacctctcttaaggaattcacgtaagtgctgagaagtaatggaacctggactctccacttttgaggcagggc

SEQ ID NO: 979370 - DNA, 120 bp, Artificial Sequence
  ENSG00000287501_2 (sequence is synthesized)
tgacagctgagcgtggacgtggatggtggggaaaacacagctatgacagccttccccacagtttaaggtatcaacaaatttaattctcactccacaggaagactccagaagactaaaaaa

SEQ ID NO: 979371 - DNA, 120 bp, Artificial Sequence
  ENSG00000287501_3 (sequence is synthesized)
agagatcttgtgttgcccctgaagatactctcactcagccttccctctgtctgcagagatggctttgacagccccacacctacaatctccagcttctcttctgagctgtgctcagtcacg

SEQ ID NO: 979372 - DNA, 120 bp, Artificial Sequence
  ENSG00000287501_4 (sequence is synthesized)
gaggctgagaagtccaaggtcagagggccatatctgctcagggccttcttgctgctgggaactctgtagagtctcatggtagcacaggacatcacatgatgaggaagtggagcatgttag

SEQ ID NO: 979373 - DNA, 120 bp, Artificial Sequence
  ENSG00000287501_5 (sequence is synthesized)
cccagggttctgctgctcttgggacccagcctggtagcatgacccccacttccccagctcccgcagtcctcccagcctgtgagtcaccatcgattcttccagagaggagtcactctcatc

SEQ ID NO: 979374 - DNA, 120 bp, Artificial Sequence
  ENSG00000287501_6 (sequence is synthesized)
aaatttgaaacctcgtgacactctatacccagcatctggctcaccaatcatttccggctagtgggaaaggtcctgatggttcaaggttgaaatgtgattttaataaaaataatgctaaaa

SEQ ID NO: 979375 - DNA, 120 bp, Artificial Sequence
  ENSG00000287502_0 (sequence is synthesized)
aagccggaagtggatagggtggtgtcacgtgttccgcttcgttggaggaggtggacacctgtcttggaatcttggctgaccagctctcctccctgcgcccgggactggactgcgctagga

SEQ ID NO: 979376 - DNA, 120 bp, Artificial Sequence
  ENSG00000287502_1 (sequence is synthesized)
accccaggctgagccagcgcctacgcacctctgagcagagcctttgtggtagttaacaacgaacgatatacaataactccgtttagtgagcgcagactatgcgagaaacgctacacacac

SEQ ID NO: 979377 - DNA, 120 bp, Artificial Sequence
  ENSG00000287502_2 (sequence is synthesized)
tatcttatttaagcctcatagttcttatgaggtaggtctctttatccatcgctttacagatgcagagtcccgagatattacctgctcagggtcacacaactattaattggcagaaagaaa

SEQ ID NO: 979378 - DNA, 120 bp, Artificial Sequence
  ENSG00000287503_0 (sequence is synthesized)
ggggcctttgcaacctccatactagcgttggccccctggtcccactttctttcatcttttctcattcctttgactccgccggactttgtagcccccatggcctggtgttgggtctgatca

SEQ ID NO: 979379 - DNA, 120 bp, Artificial Sequence
  ENSG00000287503_1 (sequence is synthesized)
ccccaatattcatggcacccaacatggggcgacaaagaccacagtgaaggaacgctagagcatgtgaaagcggaggatgcatcgtcagaggacacccagggacgactgaaagaagctcgg

SEQ ID NO: 979380 - DNA, 120 bp, Artificial Sequence
  ENSG00000287503_2 (sequence is synthesized)
agagggagccatagacaatacaactaacaacctccaaaaacgcacagcctcaccaccactatcttgagtcagccaggactaatcacaccctgcccttcattatgtctgtccccataagcc

SEQ ID NO: 979381 - DNA, 120 bp, Artificial Sequence
  ENSG00000287503_3 (sequence is synthesized)
ccaaactcaaaggttatccttcataacccatacactgatccccataatgctctgcatgctccctaacctgcaccaatctcccatattcctaacccttacactgtgatttctggaatatgg

SEQ ID NO: 979382 - DNA, 120 bp, Artificial Sequence
  ENSG00000287503_4 (sequence is synthesized)
agcccaatatcagcgaaacttaagttatattaagttttattaaaatgtaagttttagaacttaaaactttaagtgtattaaaactcaggttttatttacctaataaaacttaactttaaa

SEQ ID NO: 979383 - DNA, 120 bp, Artificial Sequence
  ENSG00000230876_0 (sequence is synthesized)
tgaggacctgaggcacagatgctaaccagcttgctggagatcacacactcatgagtggcagagtggggcttggaaccgggtagcctggctctggagccctcactccatccacacaccatg

SEQ ID NO: 979384 - DNA, 120 bp, Artificial Sequence
  ENSG00000230876_1 (sequence is synthesized)
ctgggacccagtcgagtgaccagcagaccggttgtgtgggttaggtggaatggtggatataaaccacacagcccagctcctgacccatgctgggccctcaacttaattgctgcctagagc

SEQ ID NO: 979385 - DNA, 120 bp, Artificial Sequence
  ENSG00000230876_2 (sequence is synthesized)
gctggtttgaaactgtgatcttttgaatgtaatccaggaaaggaatggaaaggaaagaagtgctcagaaagctcccagaagcattttggcactcaccaaagcagccggaagatgaataac

SEQ ID NO: 979386 - DNA, 120 bp, Artificial Sequence
  ENSG00000230876_3 (sequence is synthesized)
acagtggggatagatggctaacaagaagcccctctccggatgccggcccctcttggacttcccagcttccagaattgtgtatgtttaagctcaggctggaaaaggatcactgaaagtcac

SEQ ID NO: 979387 - DNA, 120 bp, Artificial Sequence
  ENSG00000230876_4 (sequence is synthesized)
ttggatggtgtctcgtgtgtctgtgatgagcttgctgttgctttctttctccttgacagatgagaaaacagtggcttcaaaggttaaacaacttgtcttcgattgcacagctaacaagag

SEQ ID NO: 979388 - DNA, 120 bp, Artificial Sequence
  ENSG00000230876_5 (sequence is synthesized)
gagagtcctgccaagggctacgaggcagaaaactgatattattaaagtggtcttctgaacgacttaattgctgcctagagctcatagaaggatctcacagcactgctccagggcactgaa

SEQ ID NO: 979389 - DNA, 120 bp, Artificial Sequence
  ENSG00000230876_6 (sequence is synthesized)
cagaagaagccttgacattatcataaaaccacagacatgatacaaggccaggaagaaggaggcttgggagcttattagctgaaatatattgatcaccttttcacagctttctcttattat

SEQ ID NO: 979390 - DNA, 120 bp, Artificial Sequence
  ENSG00000230876_7 (sequence is synthesized)
cctcccaatgtctctgtgaggacagtacagttatcaccccattctagagatgaggaaactgaagctcagaggtgttaagaaacttgttctaggtcacacagctagtaatgcttgggatca

SEQ ID NO: 979391 - DNA, 86 bp, Artificial Sequence
  ENSG00000230876_8 (sequence is synthesized)
aacttgttctaggtcacacagctagtaatgcttgggatcaggatttgaatttagatttgtcatattccaaagtttacctatagtct

SEQ ID NO: 979392 - DNA, 120 bp, Artificial Sequence
  ENSG00000230876_9 (sequence is synthesized)
cctttttattattctgacttataaactgcagtgacctctgagtcaacttcgccatctcttggccctgtgccaacattgtgttctgtgaaaagagagtcctgccaagggctacgaggcaga

SEQ ID NO: 979393 - DNA, 120 bp, Artificial Sequence
  ENSG00000230876_10 (sequence is synthesized)
aaactgatattattaaagtggtcttctgaacgcaactctctgcaaggtcctaagggttctaagttgaataaggcccactccctcccttccaggactttagctgaggttggttggggcaga

SEQ ID NO: 979394 - DNA, 120 bp, Artificial Sequence
  ENSG00000230876_11 (sequence is synthesized)
agtcgggcaagactcatcggaacggattaacagagacagaatccagaggcaacggggtgaattccaagtatagaaaagacacacttggtctgagggtatgtttcagctcaggcatgctgc

SEQ ID NO: 979395 - DNA, 120 bp, Artificial Sequence
  ENSG00000230876_12 (sequence is synthesized)
catcaggaccacgtaaagctggatttttctacgctagtccatttgcacgatctggactcagaagagatttaagtttcaaatctggctttgtcagttaatgcttgtgggatctcaaccacg

SEQ ID NO: 979396 - DNA, 120 bp, Artificial Sequence
  ENSG00000230876_13 (sequence is synthesized)
tcctgaggcctccccagccatgctgaactcatgaggcaggaaaggatagaagcctttcagagcctgagccaagttcctcctcacagaagcacagaggacacttactccatctctgaaaaa

SEQ ID NO: 979397 - DNA, 120 bp, Artificial Sequence
  ENSG00000230876_14 (sequence is synthesized)
atctctgaaaaagctgcccacaccccacctccatccagccttccaaaagccaccacgaatgacccgtaggaggggcagagtgtgccacttgctacggaccagaacctctggggagcgggg

SEQ ID NO: 979398 - DNA, 120 bp, Artificial Sequence
  ENSG00000230876_15 (sequence is synthesized)
atcatctctgtgtctctctgcttcaactgcatttaaaatgaacattcttaatgataaacctttccgtgtgtaaagaagggcgtggaaaaatgtatgtactggagactcgggtaatgactt

SEQ ID NO: 979399 - DNA, 120 bp, Artificial Sequence
  ENSG00000230876_16 (sequence is synthesized)
tctaagtgtggaaaattttcccccaaagtgtttccaaatatagaaaagtcacataataaatgatgagggctcataaacctttctggcagcagttgcaggggtcagaacaaggaagaagga

SEQ ID NO: 979400 - DNA, 120 bp, Artificial Sequence
  ENSG00000230876_17 (sequence is synthesized)
attcccagctcctagggcctcgcatcccacactgtcttctgggctactgtgcaaccaatggttccgtatctgtacgtacccaggggctccttagataaataattgaagtgaaatatcaaa

SEQ ID NO: 979401 - DNA, 120 bp, Artificial Sequence
  ENSG00000230876_18 (sequence is synthesized)
ttacctaacccaatatatgcaaaatattacattttaacatgtaatcaatattttcaaagttaataatgaataccagaaataacacatgtgctaataacatgtacgctgcaacactaatat

SEQ ID NO: 979402 - DNA, 120 bp, Artificial Sequence
  ENSG00000230876_19 (sequence is synthesized)
gtctaccagaaaaatattttacactgcttccatttttaaatttacatttaaattaattgacattaagtaacatttaaaactcagttcctcagtcacacgggctacattttaagtgtgcaa

SEQ ID NO: 979403 - DNA, 120 bp, Artificial Sequence
  ENSG00000230876_20 (sequence is synthesized)
caaccacatatggctagtggccacagtggtgctggttaatgagcacagctctaagccttccttgtgtgtttttttaaaaattcaattcagattccacttccattgtttgcttgtttaacc

SEQ ID NO: 979404 - DNA, 120 bp, Artificial Sequence
  ENSG00000230876_21 (sequence is synthesized)
ttaaaatctgtgtgttttaacagacctgtgtttaagccttataagtcccatcacaaagtgtcagtggtttggagagaggttctagaacgttctctttgtaacattatcacaaatctgtgg

SEQ ID NO: 979405 - DNA, 120 bp, Artificial Sequence
  ENSG00000230876_22 (sequence is synthesized)
ttgttaggctgctcttggtttatgtttgagttaaaccctttgtgtggtgtcagaccaattcaggcttatgttttccccggagagaggaataagctgctattttggaccctgtcgtgatcc

SEQ ID NO: 979406 - DNA, 120 bp, Artificial Sequence
  ENSG00000230876_23 (sequence is synthesized)
ctgcccagagtcaaaagtaattcccaagcagactgatttttacagggtcatgctcctctgatcttctctccaggagtgtgattttcaacgggatagagaaaggcaaactcctgaggaaaa

SEQ ID NO: 979407 - DNA, 120 bp, Artificial Sequence
  ENSG00000230876_24 (sequence is synthesized)
atttctctgggaaagcccaggctgaagtcgaggagggaagaggacgaaaggctgacagggttgccgtctctgagggagatccactcacacacctcaggaggcattgtgggatggtcaaag

SEQ ID NO: 979408 - DNA, 76 bp, Artificial Sequence
  ENSG00000230876_25 (sequence is synthesized)
ccactcacacacctcaggaggcattgtgggatggtcaaagtggggaggaagaaagggaatcttcgaaagaaacttg

SEQ ID NO: 979409 - DNA, 120 bp, Artificial Sequence
  ENSG00000230876_26 (sequence is synthesized)
tttcattattatacatgcgtagatgaaagttgggtggtaatagtgattttccctaagatgatggaactttacgtgcctttgccttttcttacctgtatattcctgaaatcaacaggttct

SEQ ID NO: 979410 - DNA, 75 bp, Artificial Sequence
  ENSG00000230876_27 (sequence is synthesized)
gccttttcttacctgtatattcctgaaatcaacaggttctacttttgtcacaagaagagaggaaataattgtagg

SEQ ID NO: 979411 - DNA, 80 bp, Artificial Sequence
  ENSG00000230876_28 (sequence is synthesized)
agagacggggtttcaccatgttagccccttgatatggttaggctgtaattctcataagcttcacatgtcaagggagagac

SEQ ID NO: 979412 - DNA, 78 bp, Artificial Sequence
  ENSG00000230876_29 (sequence is synthesized)
tggaggtaattgaatcatgggggtagttccattttatacgtgtttggtagttcctcctgaattccttctcattcctgc

SEQ ID NO: 979413 - DNA, 88 bp, Artificial Sequence
  ENSG00000230876_30 (sequence is synthesized)
tgatagtgagttctcacgagatctgatgattttatacgtgtttggtagttcctcctgaattccttctcattcctgccgccttctgccg

SEQ ID NO: 979414 - DNA, 120 bp, Artificial Sequence
  ENSG00000230876_31 (sequence is synthesized)
gaactgtgagtcaattaaaactcttccctttataaatttataaatttataaattctttatagcagtgtgaaacgggactaatacacccttcttgacttgcttatgtgacttgcttatgtg

SEQ ID NO: 979415 - DNA, 120 bp, Artificial Sequence
  ENSG00000230876_32 (sequence is synthesized)
ccggtccacatgctgaggcttgctccagagtgaatgtgtgcactggaaagaacccacacaggccccctgagagctgtcagccttgccaggcttctgtgagatccctgggtccgagtagcc

SEQ ID NO: 979416 - DNA, 120 bp, Artificial Sequence
  ENSG00000230876_33 (sequence is synthesized)
aagctgggaggagcaccatttgcccactgactcttgggcaacgctgcagcctgcatcccagccggcagaaggcaggtggtatcacagctgagtttacagccacggaaggaaccactgtag

SEQ ID NO: 979417 - DNA, 120 bp, Artificial Sequence
  ENSG00000230876_34 (sequence is synthesized)
gcttttagtagataatatgttttctctgcttcaaatccttattttggttgcttaaaatttctgcagaaaacaaacagcttctgccaaaattggctcacaaaattagcttactagtataat

SEQ ID NO: 979418 - DNA, 120 bp, Artificial Sequence
  ENSG00000230876_35 (sequence is synthesized)
gctatcaggcgagtaaatggatgatcacacaaaggcagaggcatcgcagaaggatgctaactagatgtcatgcgtcaaggatactacagaaggatctctttgctgacaaggagggtacct

SEQ ID NO: 979419 - DNA, 120 bp, Artificial Sequence
  ENSG00000230876_36 (sequence is synthesized)
ctaaggttccttcagatgggatggttctctgttcaccgtgatcactactatgcaaaggcctgtgggccatttaggagaaaagcattcagtccaattccacagacacagtgaggatgtaat

SEQ ID NO: 979420 - DNA, 120 bp, Artificial Sequence
  ENSG00000230876_37 (sequence is synthesized)
atgccctaggcatatatgagtggatccaaggaggaaatactcagtcactactgtcaagaactcatgacctgctgcagggtttgccaaactatggcttgtgggccaatctggctcaccacc

SEQ ID NO: 979421 - DNA, 120 bp, Artificial Sequence
  ENSG00000230876_38 (sequence is synthesized)
tattttagtaaataatgttttactggaatccagacacgcttgtttgattacatattgtctatggctgctgagcacccactataagggcaaagttaagtagatagagactttatcacccac

SEQ ID NO: 979422 - DNA, 120 bp, Artificial Sequence
  ENSG00000230876_39 (sequence is synthesized)
aaaacctaaaatatttgactggatggccctctacagaaaaagcctgcgaacctgtggtcttgtgggaggacactgctgggcacagttaactctaattcttggctgtagcatcttgaatag

SEQ ID NO: 979423 - DNA, 120 bp, Artificial Sequence
  ENSG00000230876_40 (sequence is synthesized)
ggtggcagtccctggctgctgagggggacagctggacggctgcctcccaggggcatttccatgacttgcaggcccagaaactagacttgggcatgaccacagagttcttgatggactgaa

SEQ ID NO: 979424 - DNA, 120 bp, Artificial Sequence
  ENSG00000230876_41 (sequence is synthesized)
gatgcccaaaccacagactgacttgtaggctagaaatgaacatgtggggtggaatagtccttttggggactagaataatttctagagagccaccctttctacatgatacggcgcacattc

SEQ ID NO: 979425 - DNA, 75 bp, Artificial Sequence
  ENSG00000262777_0 (sequence is synthesized)
gaccagcctgagcaacatggtgaactgctcatagaaccagctactcgggaggctgagcacaagtgtggaggaagg

SEQ ID NO: 979426 - DNA, 120 bp, Artificial Sequence
  ENSG00000262777_1 (sequence is synthesized)
caatcctcacaggttgctgtcaccaggactctcaccacacctggcctgccagcaattttagaattcaacgtttctcacatctgggcagggtgctgtggggctcacgtctttaatcccagc

SEQ ID NO: 979427 - DNA, 120 bp, Artificial Sequence
  ENSG00000262777_2 (sequence is synthesized)
gtcacttggtcctagagaatcaagtgttcctatcacctcctgacccaggcaagccttttcccatatgggcaggtagaggccaaaactccaggtccaattagctcccagaaaacccccacc

SEQ ID NO: 979428 - DNA, 120 bp, Artificial Sequence
  ENSG00000262777_3 (sequence is synthesized)
tcattcagtaagctctacttcacaagccactgcctgcccagcccccaaatcccaccatcggacagaccttgctgctccctcaaagccgcttgttacctgatcattacccaatgaggggtc

SEQ ID NO: 979429 - DNA, 120 bp, Artificial Sequence
  ENSG00000262777_4 (sequence is synthesized)
gtgtggaggaaggagaggaagggatgatggcccagcctgtgtcgtgacgatgccagctgagcacaagtgtggaggaaggggaggaagggatgatggcatgcctatccttacacacaggta

SEQ ID NO: 979430 - DNA, 120 bp, Artificial Sequence
  ENSG00000262772_0 (sequence is synthesized)
ggtccctgagtgggccgtgtgccaggagcctggccagagagccaagagtggtcatggccccctgggagttctactcttttctaggcagcagcagtgactgagaccttgtacacaaaactc

SEQ ID NO: 979431 - DNA, 120 bp, Artificial Sequence
  ENSG00000262772_1 (sequence is synthesized)
attcattcaatcagtatttatctaggacttccagaaacagtgctaagctgtgctggagagtgatagtaaaaaagacacagtccctaccagcgagagacattgggtccagctgatgagtaa

SEQ ID NO: 979432 - DNA, 120 bp, Artificial Sequence
  ENSG00000262772_2 (sequence is synthesized)
gacaagccaacagagtagggcaacaagaccaggatcccttcggggcattactgagcacacggcctcggtctggaattctggacacattcttcaccttaactgggggtgcattggggattt

SEQ ID NO: 979433 - DNA, 120 bp, Artificial Sequence
  ENSG00000262772_3 (sequence is synthesized)
aaaacccccaagagccagggatctttcccacccaagctaatttctgggcagctgtgccactgcagggcatgcagaaggaagagagccttccagaggaaagtcgccttgttccttgctttg

SEQ ID NO: 979434 - DNA, 120 bp, Artificial Sequence
  ENSG00000262772_4 (sequence is synthesized)
tgaccctcatctctgcgaggtagagaagaaaaggagggctcttccatcgggagcttccaaggttccgggtgagagctagccagctctgcatttggagcagagagagacaggaatttggga

SEQ ID NO: 979435 - DNA, 120 bp, Artificial Sequence
  ENSG00000262772_5 (sequence is synthesized)
cactaggtcacaagttggtctcttcctttgtcagcagtccattcaacatggcaatgcccacacccacctcacaaggcatggatgacacaaagagatggcttgcctgcaagagacccagct

SEQ ID NO: 979436 - DNA, 120 bp, Artificial Sequence
  ENSG00000262772_6 (sequence is synthesized)
ggtctggagttggaggcacacttcatttctctgcccagctcggcaggcggctggagcaaaccaggagatcgcctcaaatgttttaaatgtcaatatggtcccttcttgctggcttgccaa

SEQ ID NO: 979437 - DNA, 120 bp, Artificial Sequence
  ENSG00000262772_7 (sequence is synthesized)
gatttgaccagctaaattggcctgtgtggtgtgttccctgcagtgcacgagcaaaggatcctgcgctcattctgcgccctctccctctggtctcctttgcgctgggcaggaccttggcct

SEQ ID NO: 979438 - DNA, 120 bp, Artificial Sequence
  ENSG00000262772_8 (sequence is synthesized)
ctctctgtgttctttcaccttggcttctgaagagtacgcatctgggatttcttcgtggttggattcgggcgctgcgttctggcgggaaaaccgctggaatgacactacggacttctgggt

SEQ ID NO: 979439 - DNA, 120 bp, Artificial Sequence
  ENSG00000262772_9 (sequence is synthesized)
ggacttctgggtgcggcttctcagtgttgggaggcccacgatggcagtttggcccatgattggtaacactggctttgatccttccaatgtgatttttttttaacttttattttaagttca

SEQ ID NO: 979440 - DNA, 120 bp, Artificial Sequence
  ENSG00000262772_10 (sequence is synthesized)
ccgcctcagccttccagagtgctgggattacaggcttcagccaccgtgcccagcctcacccagatggagtttcaatctgtcacccaggctagagcacagtggcacaatcttggctcactg

SEQ ID NO: 979441 - DNA, 120 bp, Artificial Sequence
  ENSG00000262772_11 (sequence is synthesized)
caacctctgtctccaggattcagatgaaaaacccaaggtccagaaaggggacgcaatggccatagcagcagcagagcagggactgaatcccaaggctgatgactttgacttcggtgctcc

SEQ ID NO: 979442 - DNA, 120 bp, Artificial Sequence
  ENSG00000262772_12 (sequence is synthesized)
agcattcgtcttccctggatttctcagctcgcaggctcgataactctcttctctccccagacttgttggcaggcaagaggaataactcatgtgagtcaaaagcaatttgcaaacataaat

SEQ ID NO: 979443 - DNA, 120 bp, Artificial Sequence
  ENSG00000262772_13 (sequence is synthesized)
aattttcaatgccaggagaggagacggtgggaagatgcatggaaggttgagaggaacacagccagccccaagtctccctcgccctgctgggcacttcctctttccacctcggcgctggtg

SEQ ID NO: 979444 - DNA, 120 bp, Artificial Sequence
  ENSG00000262772_14 (sequence is synthesized)
ggagagtcggagtgcgccataaacaaggcaggaaacggctatcatgatgctcacttccgctcttcctagaagggattctgctcggcaatctctccactccccaccccctgccatgcacag

SEQ ID NO: 979445 - DNA, 120 bp, Artificial Sequence
  ENSG00000262772_15 (sequence is synthesized)
gattttgtactcccagctcctctggaggctcagaggaggagatggtcctgctgcactggcccagccttcctctacctggcttgtctttttccttgtcctcaaccccaaacagcaagtatc

SEQ ID NO: 979446 - DNA, 120 bp, Artificial Sequence
  ENSG00000262772_16 (sequence is synthesized)
ctaacaaagaatggatagtacactattatttttgtgacattcatctcagtgtcatattccaaaggagcttgacattaattgtcctgttcctaatttggacactggtttacgaaagtgtgg

SEQ ID NO: 979447 - DNA, 120 bp, Artificial Sequence
  ENSG00000262772_17 (sequence is synthesized)
tgaccactggagactgttctctgacagtgtaacaggtattcgcccctttccccagggtactaagactcacgtggccctgacagccagcacagtctcttaggaggttccggagggtggcag

SEQ ID NO: 979448 - DNA, 120 bp, Artificial Sequence
  ENSG00000262772_18 (sequence is synthesized)
tgggaatgagcgtagagccgtgtcatttcggagggctgagtgcattccacacatcttcccaaagcccaccccaagaggctgtctaacgcagggggaaacaatgagaaaccagataccatg

SEQ ID NO: 979449 - DNA, 120 bp, Artificial Sequence
  ENSG00000262772_19 (sequence is synthesized)
gtccattggagaccttgtgccctttctgcctgcatactttggggtagtgtgttttccctgagatcaaggacaagatcttacacaacaaccacagtgcaatggccagaatcaggatgttta

SEQ ID NO: 979450 - DNA, 120 bp, Artificial Sequence
  ENSG00000262772_20 (sequence is synthesized)
acatcaatccaatactgttgtctaacccacagtccagatgccgttttctcagtctcctcaataatgctctttataactcacttctcttttctgttccaagagcaaaggatcctgcgctca

SEQ ID NO: 979451 - DNA, 120 bp, Artificial Sequence
  ENSG00000262772_21 (sequence is synthesized)
attcagggccagttgttggcaatattaaactccaggctgcgtttgaaagggtccttcactcgggcagccaaagagaggcgttcctgccaggataggttgcatcgctgcagatctccagcc

SEQ ID NO: 979452 - DNA, 120 bp, Artificial Sequence
  ENSG00000262772_22 (sequence is synthesized)
ctacgtgcatacacacgtgcacacacacgtgtacacacacgtgcacacacatgtatgcacacacatgtatgcacacacatgcatgcacacacatgtatgcacacacatgcatgcacacac

SEQ ID NO: 979453 - DNA, 120 bp, Artificial Sequence
  ENSG00000262772_23 (sequence is synthesized)
acgcacacacatgcacacatgcatgcatacatgcacacacgcgcgcacacgtgtgcacgcacatgcatgcacacagacacgcacacgcacacacatgcatgcacacacgcacacacatgc

SEQ ID NO: 979454 - DNA, 120 bp, Artificial Sequence
  ENSG00000262772_24 (sequence is synthesized)
acacacacgcacacacgcatgcacacacacacatgcatgcacacacgtgcatcttggatatctcttgttaatgtcagccctctgccccaaactagatttgaaaacttgtaggtaatcaag

SEQ ID NO: 979455 - DNA, 120 bp, Artificial Sequence
  ENSG00000262772_25 (sequence is synthesized)
ttttctggttaagagaaataatcccagccaacagttagtaagctcttatgtgtcaggccttatccaaacagttcacacgaagaccagatccaaaaataaaagtgtgctttgtcctctgtg

SEQ ID NO: 979456 - DNA, 120 bp, Artificial Sequence
  ENSG00000240766_0 (sequence is synthesized)
atgatggcccccatttcccaaatgcctactatatttcaggatttctcagcaaggactggtagaacttgacttgactgccagcttttatctggaccggacttcacaaagcagggtgaaaga

SEQ ID NO: 979457 - DNA, 120 bp, Artificial Sequence
  ENSG00000240766_1 (sequence is synthesized)
atttgcatgatctccatggtggctaatcatataatttccagtttcagcagctggcaccagctatttgctcccccgctacccaagcaattctagtaactgtgagatatcctatgaatcaca

SEQ ID NO: 979458 - DNA, 120 bp, Artificial Sequence
  ENSG00000240766_2 (sequence is synthesized)
caactcctttctacagtcacggggtcagagtacacagccaacccactagcagagctggagttatggtttgagccaaagtacaacaaggaaggaggaagccccaacctaccccggacatgc

SEQ ID NO: 979459 - DNA, 120 bp, Artificial Sequence
  ENSG00000240766_3 (sequence is synthesized)
cctgaatgacacagccatttagggcctgccaaagatgccattctgtttgcaaacacatattacctgccatatcactcaacaaaataattccatcagaaggcctgaaggcaaatgactaat

SEQ ID NO: 979460 - DNA, 120 bp, Artificial Sequence
  ENSG00000260608_0 (sequence is synthesized)
cacgagggcccaggttagaacagcaagggcaggtagagaagtcaccaaaggacactgaccagatctgtcccatgatgaatctgggttgtccctgtgtgagccccttgaaccaacagattg

SEQ ID NO: 979461 - DNA, 120 bp, Artificial Sequence
  ENSG00000260608_1 (sequence is synthesized)
ttttgtgttcctcggagtcatgagccacgaagtcaagctaccctgctggagagaccagctgaagaagcctcttgaagaggacctgagacttaaggctcagccatcccagactgtgagtta

SEQ ID NO: 979462 - DNA, 120 bp, Artificial Sequence
  ENSG00000260608_2 (sequence is synthesized)
aacctccagatgagtccaaccccacctgctatctgactacagctacatagacgacaaaccacctaagtgattccagtcaacccacacaactgtaaaagataataaaagttgtttaagtca

SEQ ID NO: 979463 - DNA, 120 bp, Artificial Sequence
  ENSG00000260600_0 (sequence is synthesized)
ttactttcttgcatcatacctcatttacctctttctcttctttatgtctgtctctgggatctcagggccccacactggcatgaaataaaggtgttttttatgcataactcatatgataat

SEQ ID NO: 979464 - DNA, 120 bp, Artificial Sequence
  ENSG00000260600_1 (sequence is synthesized)
aataacaacaacaagattttactgtctcctatccctttatgggagtacactatgcaatacctctatgaggtgccatcttaaattgtttagatgtaccatcttaaatggtttacccttagc

SEQ ID NO: 979465 - DNA, 120 bp, Artificial Sequence
  ENSG00000260600_2 (sequence is synthesized)
aaagggcacctacacctttgattttatcttttcctgtgctaagagtgcacaaacttttcttatacagagtcaggaaaggctttggggtcctatatcttctctgtcacatttactcaaatg

SEQ ID NO: 979466 - DNA, 120 bp, Artificial Sequence
  ENSG00000260600_3 (sequence is synthesized)
tgtctttctagggagaaggcatccaataaacaatatgtaaaccaaggagcatagttctgcttcaacaaaaccttctctgtacaaaagcaaaaggcagactagatttgctccatgggtcat

SEQ ID NO: 979467 - DNA, 120 bp, Artificial Sequence
  ENSG00000260600_4 (sequence is synthesized)
agtttgctcttctccccaaactagtttatactttgagaatcccttatcatattgaaagacaagaactgaaggaaatacttttattttttaacccggtaagccctattttttaaattccat

SEQ ID NO: 979468 - DNA, 120 bp, Artificial Sequence
  ENSG00000260600_5 (sequence is synthesized)
taaattatgatgataaaattagtaatttttgttgccattgttttgttttagctctctgtctctgcacattattatgagttattaaaataagtcagttaacactttcaacatcttgtctgg

SEQ ID NO: 979469 - DNA, 120 bp, Artificial Sequence
  ENSG00000260600_6 (sequence is synthesized)
aaaatatcctgccaatatccacaaatttattttgtgtgttttttaaattaatttgtcatgttatcgtaggcactttaccaattgttttgctactctatgactcagttgaccactttgcca

SEQ ID NO: 979470 - DNA, 120 bp, Artificial Sequence
  ENSG00000260600_7 (sequence is synthesized)
gtttgctatggcagttttgtcaccattatactacattatactaactaagaagctaatagtttccctgctgcttttccagcatttgctcaaagcttcctgacctcccaaagtcaatcttac

SEQ ID NO: 979471 - DNA, 120 bp, Artificial Sequence
  ENSG00000260600_8 (sequence is synthesized)
aagtaatagaaatccactgttcttgttttgggagagggccttctacagactttcattaatattatttagcctgttatgacaggggaaatctcaaggaaaataagacctattctccttcaa

SEQ ID NO: 979472 - DNA, 120 bp, Artificial Sequence
  ENSG00000260600_9 (sequence is synthesized)
tgaaaacaaacaaatgaaaaaaaaaaaacccacaactctcttttagctggtgacatcaggacaaatctcaacacatacatacacacatacacagataaacacacatgcttttggtgtgta

SEQ ID NO: 979473 - DNA, 120 bp, Artificial Sequence
  ENSG00000260600_10 (sequence is synthesized)
tgtgtgtagaaaagctccagcagtctcagcaaagtatatgcatactcttttcatactccctgaagagggaaattttaaaaaatagcaatataatagacatttttatacagctagatctgc

SEQ ID NO: 979474 - DNA, 120 bp, Artificial Sequence
  ENSG00000260600_11 (sequence is synthesized)
aggaagaaatgcgtcaaactgcaataatgacgcgtagcaagagtgactaaaagaagtatccagtggtcaggttcacaggcaaccacagacagaggtaaaaatctctgatgggagaatctt

SEQ ID NO: 979475 - DNA, 120 bp, Artificial Sequence
  ENSG00000260600_12 (sequence is synthesized)
tacaaaattggtcatcacgtttgcattagggcattgaaattcatgtcagcagagtgactctcataaaaacattgtattttttctctagatagataaactttcatcacaaattccctggtt

SEQ ID NO: 979476 - DNA, 120 bp, Artificial Sequence
  ENSG00000260600_13 (sequence is synthesized)
gtgtccccgttcatgccagttgttctagcattatggttggtaataatggcacttttattcccaaagtatttggatgataaattatatgggtacccaacccttaggctacatctgcttcct

SEQ ID NO: 979477 - DNA, 120 bp, Artificial Sequence
  ENSG00000260600_14 (sequence is synthesized)
taacatagaaaatcactgactttctcacatattaataattttcaggtggataatgatgtatttcccctgcatatcacattattaatgtctaaataggaaaaaattcagcagctgtcaatg

SEQ ID NO: 979478 - DNA, 120 bp, Artificial Sequence
  ENSG00000260600_15 (sequence is synthesized)
tctaataagttgatcacagtggccaggaaatgttgatggaatggttaaatacataaaagtcgtgcattattattactgctgttcagtgtattttcagtgtttgagccaagtactacaaaa

SEQ ID NO: 979479 - DNA, 120 bp, Artificial Sequence
  ENSG00000260601_0 (sequence is synthesized)
ctgcaactgtggcaagaccgtgtgtcctgtcagagtgggtgaccagggcctttgccagcagacgacttatggagaaacgtttgagtagatggaggaacccatttcctctggaatccagag

SEQ ID NO: 979480 - DNA, 82 bp, Artificial Sequence
  ENSG00000260601_1 (sequence is synthesized)
ttgagtagatggaggaacccatttcctctggaatccagagtgctgataaagacatacctgagactgtgcaatttacagaaag

SEQ ID NO: 979481 - DNA, 120 bp, Artificial Sequence
  ENSG00000260601_2 (sequence is synthesized)
ctcttccttatgaaaccatcacattcactgtcagaagaacagcacaggaaagactcgcccctgtgattcaattatctcccaatgggtccctcccatgatacatgggaattcaagatgaca

SEQ ID NO: 979482 - DNA, 120 bp, Artificial Sequence
  ENSG00000260601_3 (sequence is synthesized)
catggtttggctgtgtccccacccaaggataatacaggtggaacataaatgccagattgatctattgataattataaacaattaccaagaagagtggataaatcttcctttttgaatcca

SEQ ID NO: 979483 - DNA, 120 bp, Artificial Sequence
  ENSG00000257766_0 (sequence is synthesized)
agttgatggcatggctagtgctcagtcatctggtcaccacaactctactgagcccctcccctgggtgctggactggctctaacactgtgcgaacagacagaggaaggctcatgcttgtgg

SEQ ID NO: 979484 - DNA, 120 bp, Artificial Sequence
  ENSG00000257766_1 (sequence is synthesized)
acgtggaccctaggacccaagagcatggccctggagctgcctggccctactggcctagactgggcctcggccacgcgctcctcaccttcacagtggcattgcagtaccgggcacagccgc

SEQ ID NO: 979485 - DNA, 120 bp, Artificial Sequence
  ENSG00000257766_2 (sequence is synthesized)
tcttcaggctcccaaacctgccactgtagacacatctgtgtgtgaagagtgcctggagaaagccaaggagggaaagcatggcagtcagcatgtttaggtcctccaggcactgcacaccct

SEQ ID NO: 979486 - DNA, 120 bp, Artificial Sequence
  ENSG00000260604_0 (sequence is synthesized)
agaggagtgtgcggaaagatggagttgagacagaaacttgttagcataacaccgaaggagttttgctgtgagtagcatcagcatagcaggagaacatccctagctctcctgccgctgctc

SEQ ID NO: 979487 - DNA, 120 bp, Artificial Sequence
  ENSG00000260604_1 (sequence is synthesized)
tgccacaaggagagaaagggaaaagcaaattcagcaggacctctaggactttgctgtagatctccaggtggagccaggaccctccaggagaactgatggctagaaaagactgcaagtaat

SEQ ID NO: 979488 - DNA, 120 bp, Artificial Sequence
  ENSG00000260604_2 (sequence is synthesized)
gtggaggaaggaagaagagagagagcagagagagatgattcttgcaaacattgatctgtgtagagcggatgtcaacttgatgggataagacctgggttgacttggtatctgggttcaggt

SEQ ID NO: 979489 - DNA, 120 bp, Artificial Sequence
  ENSG00000260604_3 (sequence is synthesized)
cagcaaactctaacggcatttccttctactagcagacagatctgctcatcctgcgacattgtggacagtgctgaatggcttccagaacattcctcttatgtctactggttaaactttgaa

SEQ ID NO: 979490 - DNA, 120 bp, Artificial Sequence
  ENSG00000260604_4 (sequence is synthesized)
gcatctgaaccatttgggagagcagggacccccatgaacaggagatactggaggtgtctgaggccacttcatgccctttctcaagagtggcctgcaggtctttcagccactggccactga

SEQ ID NO: 979491 - DNA, 120 bp, Artificial Sequence
  ENSG00000260604_5 (sequence is synthesized)
agtccagctcctgccagccatggatttgggcactgggctccagtgttgagaaagttcttgacttccagcgcttgttttcctagtggacaataggagtcagagacagagagggagagtgaa

SEQ ID NO: 979492 - DNA, 120 bp, Artificial Sequence
  ENSG00000260604_6 (sequence is synthesized)
gatgcagaagacatatcctttccattgtgacccagataagaatgtagccggtgagcttgcttcctgtcactcatttcccagctatttgttgtagtccaagttgtgcatattctttctgtt

SEQ ID NO: 979493 - DNA, 120 bp, Artificial Sequence
  ENSG00000260604_7 (sequence is synthesized)
aggttcttatgtttgtcttaagctcacccatcttttcttcttccctcattttttctttataaatcaagaaaaattctgccactttctttccctggctcactgcacagccaatcaataatt

SEQ ID NO: 979494 - DNA, 120 bp, Artificial Sequence
  ENSG00000260604_8 (sequence is synthesized)
ttgaatcctttgtgtatcaatttctactggctattcattatttgtggaaaccatattaacgggtccataaaaatcacagcaatccatttgttaaattcatcataagaacagattacatct

SEQ ID NO: 979495 - DNA, 120 bp, Artificial Sequence
  ENSG00000260604_9 (sequence is synthesized)
ttctggccaagtttcatggtttggtaatatcatattttggttttagaatttataaggtgcattctcccatacttttcaagtatattttttattcattgccctctctgaattaggcatttt

SEQ ID NO: 979496 - DNA, 120 bp, Artificial Sequence
  ENSG00000260604_10 (sequence is synthesized)
tggggatgcacgttttacagatatggagacaatggttcagagaaatcagcttgttcacagtggggccagagctgggacctagggcttctgactctatgtctcaggtcattcctatcacac

SEQ ID NO: 979497 - DNA, 120 bp, Artificial Sequence
  ENSG00000260604_11 (sequence is synthesized)
acacactgaaggagaaaagagttcccttgtctggagaagacatatcaaattcatgcgggttaaacacagaaattccaaatagctgtagtttttgtaaaaatggttgagctatggactttt

SEQ ID NO: 979498 - DNA, 120 bp, Artificial Sequence
  ENSG00000260604_12 (sequence is synthesized)
aaagtagttggccacctgtggtggtgggtggaagggagttagggcaggattgttgtgcttcagggaggattcagtgtctgcacgaccacggaggggggtgcagggcaccaggtatccagg

SEQ ID NO: 979499 - DNA, 120 bp, Artificial Sequence
  ENSG00000260604_13 (sequence is synthesized)
actgttgtcaagagttatgctttgaatttcccagagaagacacactgctgcgaaaggaagaaatcgttggtttttctccaactgcttagctgttaagaagcaagaagcctatctccaagg

SEQ ID NO: 979500 - DNA, 120 bp, Artificial Sequence
  ENSG00000260604_14 (sequence is synthesized)
cagcagcaggcctcagagaaaacagtaggacccttccttcaaacaaaggagaaaactcccacaactcaaagcaagtgccccctggtcattctctcaaaaagctacaggctccaaaaaaag

SEQ ID NO: 979501 - DNA, 120 bp, Artificial Sequence
  ENSG00000260604_15 (sequence is synthesized)
acagacttcacaggctagagacgggctctgcactcagggttggtggtcgggggcacagagctggctgggcagggccagaggggaccacattctgccacatgcagagcaaagcagtatctt

SEQ ID NO: 979502 - DNA, 120 bp, Artificial Sequence
  ENSG00000260604_16 (sequence is synthesized)
tctattactggtcaatgtaatatgagctgggaatgagcaatttcatacctttttctgagatattaaaaagaaatacgctgatgtggctggaggtaatttcccaaagcctgtggatggagt

SEQ ID NO: 979503 - DNA, 120 bp, Artificial Sequence
  ENSG00000260604_17 (sequence is synthesized)
tgatgtcagtaactggctatgaggttgttatttacaggactgtttgatcccactgaagtagtggtgcttaatatgtagctcaatgtggctcaggagcgaggcccaatactgcatataaac

SEQ ID NO: 979504 - DNA, 120 bp, Artificial Sequence
  ENSG00000260604_18 (sequence is synthesized)
caccatcctgcaatttatccagagagcatgtgggaggtgaaccttgaatcatttgcttgatggatttttttctttccttggaaacagaaaaacgaatctcagttttctccctaagcctta

SEQ ID NO: 979505 - DNA, 120 bp, Artificial Sequence
  ENSG00000260604_19 (sequence is synthesized)
ggcaacagggctccttgcaagtcaccttcccttccttgtccccaaaacaaagatgcatacatgttccccgagcactgcaaacacagcctttctttcaggggcagctgggtccctggatcc

SEQ ID NO: 979506 - DNA, 120 bp, Artificial Sequence
  ENSG00000260604_20 (sequence is synthesized)
gctttccctcccctgggctggtcccagtgtaaatcatcagatctccaggtccactcgtctgcacacaggctgctttgtaagtgggagaaagaatccacagaactttacactaaatcccca

SEQ ID NO: 979507 - DNA, 120 bp, Artificial Sequence
  ENSG00000260604_21 (sequence is synthesized)
tgggaaccaggtgaataggtgtgtgtgtttgcacacaagcccgtatacatggcaaaccaatccaagagatggtgaccgatgggtccataaagactctggctggcaatgctgtcagcttcc

SEQ ID NO: 979508 - DNA, 120 bp, Artificial Sequence
  ENSG00000260604_22 (sequence is synthesized)
ttcagctgagcgtcagttagttaccctggtagtctcaaatgtctccttgtgtctggagacaacatagggcctggccctgaggactgccaggctgggtcgcccggcagctgcacctgttgt

SEQ ID NO: 979509 - DNA, 120 bp, Artificial Sequence
  ENSG00000260604_23 (sequence is synthesized)
aggctgggtaggccccctaaaatgctttgggcagcccaagagtgtcttcctgagtcatgtggagctgcctcaccagcagcccagtgagagattcacagccctagtggagagtggaagccc

SEQ ID NO: 979510 - DNA, 120 bp, Artificial Sequence
  ENSG00000260604_24 (sequence is synthesized)
tgggctatcccaagcaatccttgcgtctgtggggctggtgccgcccctttgcgtctcttcttgcagctaagcagagctcagaggccaggaaaaaagccactgggtgtctttggaaacagc

SEQ ID NO: 979511 - DNA, 120 bp, Artificial Sequence
  ENSG00000260604_25 (sequence is synthesized)
tgacctgattttcaacattccctttgagcatttgctaaaggggcaccacagaagggcattaaggatgccaccgtggaaggaagctgcagatgacagaagcgtgagcactgctggaaaatg

SEQ ID NO: 979512 - DNA, 120 bp, Artificial Sequence
  ENSG00000260604_26 (sequence is synthesized)
agaaagctgagttgggactgcgtgccatggagaacctgtactgtcaccctccccagccatctgactaccagcagcttcagcagcatcatcatttgcattcattcatctcttttcctcact

SEQ ID NO: 979513 - DNA, 120 bp, Artificial Sequence
  ENSG00000260604_27 (sequence is synthesized)
ccctccctcgatgaatctctttgggaatgatcttcaaaaactttgcttaggtttcaaggtgcttttgattcactgtatttttctttaaataagccttttaattgagcacaacgttcatag

SEQ ID NO: 979514 - DNA, 120 bp, Artificial Sequence
  ENSG00000260604_28 (sequence is synthesized)
agagaagcgcacacatcctgaggggtcagcccaaagaattttcagaaagtgaacacgtgagggtggcaagcacctggactaggaaccagaacaccgccagcgccccagatgtgccctttt

SEQ ID NO: 979515 - DNA, 120 bp, Artificial Sequence
  ENSG00000260604_29 (sequence is synthesized)
tgcaacagcgtgtctgtgaggttcatgcacgtttctgaacgtgggatcgctgaagtgtggggttgtattcgaaactgtagtttgcactcaaagaacagcaagtggaagaaaattactttg

SEQ ID NO: 979516 - DNA, 120 bp, Artificial Sequence
  ENSG00000260604_30 (sequence is synthesized)
gaaaggaattttcaaatcgagtgtgaatgagagggtctttgggactttggcctttggagttgagctgacctaaaggtagaaggtgaactaggatcctcttagctccccactccactctga

SEQ ID NO: 979517 - DNA, 120 bp, Artificial Sequence
  ENSG00000260604_31 (sequence is synthesized)
actgtgctcccagggcaatccagcttctgctctcttttactactacttcatgtaatgataaaaattatgtcaggttaaatatcagtaattgcttaagtgagtttgtatatcaagctgtgt

SEQ ID NO: 979518 - DNA, 120 bp, Artificial Sequence
  ENSG00000260604_32 (sequence is synthesized)
gtttgtatatcaagctgtgtagtaacgcctcactgaaacactgctcagctgagactgagattcagtgtgttgacgaaaagagttaaactctaacatatttgaagagatttattctgagcc

SEQ ID NO: 979519 - DNA, 120 bp, Artificial Sequence
  ENSG00000260604_33 (sequence is synthesized)
gagaccatggcctgtgacacagccctcaggagtcctgaggacatgtgcccaaggtggttgaggtacagcttggttttatgtattttaggaagggatgagacatcaatcaaatacatttaa

SEQ ID NO: 979520 - DNA, 82 bp, Artificial Sequence
  ENSG00000260604_34 (sequence is synthesized)
taattggtagagtttatttgaaggtctggaattaatggaaaggaatgttcaggttaagataaaggactgtggagaccaagtt

SEQ ID NO: 979521 - DNA, 120 bp, Artificial Sequence
  ENSG00000260604_35 (sequence is synthesized)
gaatgttcaggttaagataaaggactgtggagaccaagttttattgttcagaggaatctctcagatagcagacttcagagagagagcaggttgtaaaatgtttcttataagacctaaaag

SEQ ID NO: 979522 - DNA, 120 bp, Artificial Sequence
  ENSG00000260604_36 (sequence is synthesized)
ggtgcctggctcttagttggttatctcctgggtctggaaagaaaggaaggaaaacaaacggggaaggagattctctgtagattgtggatttttcccacagagactttgcaggacaatttc

SEQ ID NO: 979523 - DNA, 79 bp, Artificial Sequence
  ENSG00000260604_37 (sequence is synthesized)
attgtggatttttcccacagagactttgcaggacaatttcaaggcatggcaaggaaatgtattttggggtaaaacattt

SEQ ID NO: 979524 - DNA, 120 bp, Artificial Sequence
  ENSG00000260604_38 (sequence is synthesized)
ataggaatttgggcaagataaaaaaaatcagatcttagtcctcaagtgtaaagcagatcaattgagaatccaaatctgcagggtataaggtcagacgcagtcaaccgatgcatgaaccaa

SEQ ID NO: 979525 - DNA, 120 bp, Artificial Sequence
  ENSG00000260604_39 (sequence is synthesized)
gggtataaggtcagacgcagtcaaccgatgcatgaaccaagaagcatttatagaagcctctggcgcttttcctttgctcacctctgtccacaggctctgaactaattccttcattttttt

SEQ ID NO: 979526 - DNA, 120 bp, Artificial Sequence
  ENSG00000260604_40 (sequence is synthesized)
ttaaatttgcaaataagattactgtattatagatttgaagatgcacccaattattttataagcttttttttatgtaacactaagaaattaaaaaaatgctgaaggtgcagtctagtagga

SEQ ID NO: 979527 - DNA, 120 bp, Artificial Sequence
  ENSG00000260604_41 (sequence is synthesized)
gaccctgcagctgaaatgctgaagtcattctttgtgtgcaggaaacaagaaaaaagcctgccatgcagaaagtcactgagaaacctgctggcctccatggtggcacgtgggggagggagg

SEQ ID NO: 979528 - DNA, 120 bp, Artificial Sequence
  ENSG00000260604_42 (sequence is synthesized)
agaagaaaactcctgaaagaatgtggaccacacagcatgctctggtgggtatgtgggctgacaaagaacagggagcgctaacagtgaaaatgaagagcctgccccgcctcccagcgtgga

SEQ ID NO: 979529 - DNA, 120 bp, Artificial Sequence
  ENSG00000260604_43 (sequence is synthesized)
ccttgacctggggccagaccaaggccactttatagaaacgtccctggagcgtgtctcaggtggccctgcctgcatcctggcctacctctggggcccttcttacccacagtcctactttcc

SEQ ID NO: 979530 - DNA, 120 bp, Artificial Sequence
  ENSG00000260604_44 (sequence is synthesized)
acccaccttgaccccaagaggtgttcatttataacgcccctgcatcttctcaacttcaaagtcagctcggacctcgttcacccagacaagaccttggctgagtcttgacaaactggcaca

SEQ ID NO: 979531 - DNA, 120 bp, Artificial Sequence
  ENSG00000260604_45 (sequence is synthesized)
gggtcccccgacagaagacagctttcctttctctttgctttcctttatcttagccgagtccggcctccccagcactcttttccatctggggacagttcgtgctggtgggaattggcaggg

SEQ ID NO: 979532 - DNA, 120 bp, Artificial Sequence
  ENSG00000260604_46 (sequence is synthesized)
gcacacggtccagacagagacaactgaaacacaggtgtcccgctggtgtgccagcagggcggccgtcctaccaggagcaggacactttgttggccactgcccatgcaataatcagcgtgg

SEQ ID NO: 979533 - DNA, 120 bp, Artificial Sequence
  ENSG00000260604_47 (sequence is synthesized)
gacaaacagtcccatggggagtgaggtgatgtgaagaaaaggaagccgaagaagagaagaagctgaagggccagtaaacacacacatagacgctcaccctccccttcgttggaaaaatga

SEQ ID NO: 979534 - DNA, 120 bp, Artificial Sequence
  ENSG00000260604_48 (sequence is synthesized)
acggctgctgttgccgagggctggtgaggatgaggccccaggcctgcaggagggcacatccggttggccgcctcgacggggccatctgggtagctgctgccctttgcatgtaaataaagc

SEQ ID NO: 979535 - DNA, 120 bp, Artificial Sequence
  ENSG00000260604_49 (sequence is synthesized)
tcctcaaagccccatttcacaactgctgggagaaacagcatccttccctccttccctatatttccagggaggaggtggctggttttttttgttgttgtgttttttttgtttgtttgtttt

SEQ ID NO: 979536 - DNA, 120 bp, Artificial Sequence
  ENSG00000260604_50 (sequence is synthesized)
gttttgttttgttttttccagatttctcccagccacatccagcttcttgttctgtaatttttttttccaaattactgactgccttctttcaaggggaaatggaactcagaaagatgggaa

SEQ ID NO: 979537 - DNA, 120 bp, Artificial Sequence
  ENSG00000260604_51 (sequence is synthesized)
gatacatgataagagcacttaagagagaagcctgtccatttccactaaggttgaagtgtgcatactccaggatccagtccttcatgtctacacaaggagtcccaggaaaaggtctgtgca

SEQ ID NO: 979538 - DNA, 120 bp, Artificial Sequence
  ENSG00000260604_52 (sequence is synthesized)
aaacgtttgtaattgcaacggagcagccacgacctagccctccttcagcagaggaatgaataaactggtttattcagtcaacgcagcagttaaaatgagagaattagtgatgttgaaagg

SEQ ID NO: 979539 - DNA, 120 bp, Artificial Sequence
  ENSG00000260604_53 (sequence is synthesized)
aaaaatgaagagcaaacagatacagtaggaagttatcacgtacatttcaaaaacattcaaaacaaccgtacatatttatggattcatgtaataatgcagtaaaaatacaaaatcagagcc

SEQ ID NO: 979540 - DNA, 120 bp, Artificial Sequence
  ENSG00000260604_54 (sequence is synthesized)
aggactgtggcacactgaattcagcacaatggtcgtctctaaatgtgggttcatgtgggaggaggtgaccccggggtgggggcttctgctgtatttgtcatgtttgggttatttgaaagg

SEQ ID NO: 979541 - DNA, 120 bp, Artificial Sequence
  ENSG00000260604_55 (sequence is synthesized)
gagagagagcactgtagttatacagtaaaatgcaaacatattttttattttagtggtgagtatacaggtgtctgttgtgctgttttctgtgtgtttgaatggtttcataatttttagaaa

SEQ ID NO: 979542 - DNA, 120 bp, Artificial Sequence
  ENSG00000260604_56 (sequence is synthesized)
tcacccctgtaattccagcactttggggggtcagagcagaaggattgcttgaagaccagcctgggcaacatagcaagattctatctttacaatttctaaaacatttttcaatttaaaaat

SEQ ID NO: 979543 - DNA, 120 bp, Artificial Sequence
  ENSG00000260604_57 (sequence is synthesized)
tttctaaaacatttttcaatttaaaaatgataaacaatgaaaaactgcaaagaaatagattgaaaagttcacagttgcttttgccacattttgtgaatatgttatttttataatgaaaaa

SEQ ID NO: 979544 - DNA, 120 bp, Artificial Sequence
  ENSG00000260605_0 (sequence is synthesized)
gacctgaaactcaaagcctcatctctacctgaggggatggcatttgctcatcagagtgtgttaccttctttccacctcaggtttcatcatctgaaaatgagaaggcacagcccaggccca

SEQ ID NO: 979545 - DNA, 120 bp, Artificial Sequence
  ENSG00000260605_1 (sequence is synthesized)
ggaggcaggatacctgggtcctgccctgccacctgccatcaccatctcaggaaacttgcagagacgcatctaactgccctgcccctcaatctctggtactgcaaaactgggactcattgt

SEQ ID NO: 979546 - DNA, 120 bp, Artificial Sequence
  ENSG00000260605_2 (sequence is synthesized)
catcatgcaagtagaccttaagagacagtgcaactttcactggggccgtcctgaagcactgcccagaaacctcagatcaggaaattggtctagccttctggaagacaagagtccccaggg

SEQ ID NO: 979547 - DNA, 120 bp, Artificial Sequence
  ENSG00000260605_3 (sequence is synthesized)
aggagcatcagggtttccagtcaagtgtcccagcacagctgctagacatgcgcctgaggccatcttgggaccttccagctgagacaagcagaaaatcacacagccaacttaacaaaatgt

SEQ ID NO: 979548 - DNA, 120 bp, Artificial Sequence
  ENSG00000239945_0 (sequence is synthesized)
tgggattacagatgtgagccaccgcacctggtccaagaacccaagttttagatctagagtgatgtcagcatgacattgatttcctgaggcccaggggcgaaggagctgaggacagcagag

SEQ ID NO: 979549 - DNA, 120 bp, Artificial Sequence
  ENSG00000239945_1 (sequence is synthesized)
gcccaggggcgaaggagctgaggacagcagaggggtgaaggaactcagctacagacagcagcagctgatgcacaggcctcccagcgcctgaagtcacccggaattgggaagtgctcagaa

SEQ ID NO: 979550 - DNA, 120 bp, Artificial Sequence
  ENSG00000239945_2 (sequence is synthesized)
gcttacaaagctgcctcgaggtgggaacatgacataaatccaagagcagatccctgatcctataaaaatgtactagatgcagtgggggcattttaaatgagcagagaaggacagacagat

SEQ ID NO: 979551 - DNA, 120 bp, Artificial Sequence
  ENSG00000239945_3 (sequence is synthesized)
aaacagaaggacaaacagtattgggattgggataaatgctcagcttttgcccaaatcttagtgacttaagcatcacttatttgctcacgattctgtggctggaccatttggtttggctca

SEQ ID NO: 979552 - DNA, 120 bp, Artificial Sequence
  ENSG00000239945_4 (sequence is synthesized)
ggggcagctggtctccagggcagcaagagagaccaagccccagtgcacattctacagcctctgtgcacatcagacttgttaatatcccattggccagtgtaagtcacttggccaagccca

SEQ ID NO: 979553 - DNA, 120 bp, Artificial Sequence
  ENSG00000239945_5 (sequence is synthesized)
gattaaggagtggaaagatggaggctatctcctcctgggagaggaggcaaaggaggtgggagtattatgtggccacttatgtttgcaatctaccatacttagcactttgagaaaagaatt

SEQ ID NO: 979554 - DNA, 120 bp, Artificial Sequence
  ENSG00000239945_6 (sequence is synthesized)
aactgagaaacttgcttcaaatagggccagtaaaatgaagccccaattgaagtaaaatgcatatataaaaaatgaaactgtgaccgattttaaggacagtattggcaaatatttctgtgc

SEQ ID NO: 979555 - DNA, 120 bp, Artificial Sequence
  ENSG00000239945_7 (sequence is synthesized)
tcttggaggagaagacccttattggcatgacatgtcagaaaccacaatgaaagaattattttaacttgcattcataaaaattaaaattattcattaaaaacatcgtgaatgaaattaaaa

SEQ ID NO: 979556 - DNA, 120 bp, Artificial Sequence
  ENSG00000267057_0 (sequence is synthesized)
agtgaagcagctatcacagggtctggaacatagtacatcccagccttcttgcacatagaaacactacacagcacttcagctgtatgtttgggggccattttaaacagcaaaatcatcaac

SEQ ID NO: 979557 - DNA, 120 bp, Artificial Sequence
  ENSG00000267057_1 (sequence is synthesized)
aggaagcagaaaattgtaaaaattgtggcactaaatagaccatgtaaaggacacatgtttgcaataagaaagctgaaacaagaagggggagtgtcaccttatttgatccagctagaaact

SEQ ID NO: 979558 - DNA, 120 bp, Artificial Sequence
  ENSG00000267057_2 (sequence is synthesized)
caggtgctggtattccagcaacactcaggcggctgctccaggaggctgcagaggggtcctttttagccgtcaacaaaactggctatggtcacgcccattgggaaactcattgctgccttc

SEQ ID NO: 979559 - DNA, 120 bp, Artificial Sequence
  ENSG00000267057_3 (sequence is synthesized)
aaggactcagaagctgtaggaatattcaggcacagacaccagacccagcttcatctctaacttgtggcaaaggacagtacatcctgggatgggaccctatgctcccctatgccatttaga

SEQ ID NO: 979560 - DNA, 120 bp, Artificial Sequence
  ENSG00000267057_4 (sequence is synthesized)
gttggaatctctcatttgattcttattcaaatttaggttctgtcaatagaagatactaaagaaagaaagccaggagaagaaaagggacttctttcttcaaggtctaagctgttctaatag

SEQ ID NO: 979561 - DNA, 120 bp, Artificial Sequence
  ENSG00000267057_5 (sequence is synthesized)
cattattctgggaatggcatcttccactcctcctagtacaaagaacctgcttcctcataccccgtcaaggaactgcagcatccaggtgatggccacagtggcagaacctaggaagccaag

SEQ ID NO: 979562 - DNA, 120 bp, Artificial Sequence
  ENSG00000267057_6 (sequence is synthesized)
aagaaaccagagaatggagacacatggcagcaatggcaagtcatcagacccaggatttcccaaagaacactggtccaggaagatgctctgtgaaaaagtgttccctggtcggagaaattt

SEQ ID NO: 979563 - DNA, 120 bp, Artificial Sequence
  ENSG00000267057_7 (sequence is synthesized)
gtgaaacactttgcataatacttaaaagaatgtatggcacatcaaagatcttataacagtctccgcaggaagcagctgcagtcattagccataggacagactaaacacacaatctgcatg

SEQ ID NO: 979564 - DNA, 120 bp, Artificial Sequence
  ENSG00000267057_8 (sequence is synthesized)
gaaggaggcctggatcagcttggtctttcagatctctaatctcaggcacaggaaagcaccatcaacagcaccctttgtatatatacataaaggtaacatattttatcatttaaagggatt

SEQ ID NO: 979565 - DNA, 120 bp, Artificial Sequence
  ENSG00000267057_9 (sequence is synthesized)
cagggcactgtcacaggcaatgtgctggtaggcactgcaggagctccagggaagaatggaaactctatgggaaatatgggaaaagcaatcctggacagcttcaaggagcaaggcaaactt

SEQ ID NO: 979566 - DNA, 120 bp, Artificial Sequence
  ENSG00000267057_10 (sequence is synthesized)
gagctcagccttcaagcatgggtagaatttggactcaaggaaggacacagggaatattaaaagcaaagaagctctttatgactaccaatgaagacattaacctgaccagagaggaggata

SEQ ID NO: 979567 - DNA, 120 bp, Artificial Sequence
  ENSG00000267057_11 (sequence is synthesized)
caaaggtctgcatcccattctccatttggcccctcctttgaactaccagatctccggctggattgcctttttgttctggaattttctaaatttctttattaaatttcccagttgaaattc

SEQ ID NO: 979568 - DNA, 120 bp, Artificial Sequence
  ENSG00000267057_12 (sequence is synthesized)
catagtaagtcctcaataagttctagcaattattaaaaaaggaaaggctgtctgcaaacaggtgatctcagaagggggtttgtgcctctctaggaaggaagcctcattgtggacatctgg

SEQ ID NO: 979569 - DNA, 120 bp, Artificial Sequence
  ENSG00000267057_13 (sequence is synthesized)
gtttcatgtgtgtttctgtttaaagacaccttatttaatatatgttgttgattcattaatattgaacacatggccaaaatcattataactcattcctaaatgatgcttatctaacacata

SEQ ID NO: 979570 - DNA, 120 bp, Artificial Sequence
  ENSG00000267057_14 (sequence is synthesized)
gttcttccctcatgaatagatcaatgctattatcgtggaagtgggcttgttattgcaggagtaggttccttacaaaaggatgagttcagcctccttttgcctctttctctccctcattct

SEQ ID NO: 979571 - DNA, 120 bp, Artificial Sequence
  ENSG00000267057_15 (sequence is synthesized)
aagtgaagcagctatcacagggtctggaacataaaataatcatgaggcccaaaacacttcctgaatgaaagagaacctgcattgaattttgttctgtggtgaatggtacatcccagcctt

SEQ ID NO: 979572 - DNA, 120 bp, Artificial Sequence
  ENSG00000267057_16 (sequence is synthesized)
actgcagcatccagaatacattcatacctaacacctcaatagatgacatgttatccatggaatcgagttcaaagccctctgtaacgtggctatatcccatctactctgagctgatgttca

SEQ ID NO: 979573 - DNA, 120 bp, Artificial Sequence
  ENSG00000267057_17 (sequence is synthesized)
atagtcacatttcttccctgctgtagaaacctctatttttagttgttcagggagatggatttgaaactgatcttccatttccttggctgcagcactcgatgaaagccttcttctttggca

SEQ ID NO: 979574 - DNA, 120 bp, Artificial Sequence
  ENSG00000267057_18 (sequence is synthesized)
atactcattgtgtcagtcattggctttctgtgtcagggaacagcaggacctagatcgaacccctggcatttcaggcacactcttgcctcagtctcagaggtggtctcctgcatgctgtat

SEQ ID NO: 979575 - DNA, 120 bp, Artificial Sequence
  ENSG00000267057_19 (sequence is synthesized)
ctctgcagagtgatttttgtctctcatctgacccaccatagttcttttctttcttcaacaaacagttattgaactcctatttaccaagtgcattcctagaaaataaacaagacaatggaa

SEQ ID NO: 979576 - DNA, 120 bp, Artificial Sequence
  ENSG00000267057_20 (sequence is synthesized)
attaaaaaaggaaaggctgtctgcaaacaggtgatctcagaagggggtttgtgcctctctaggaaggaagcctcattgtggacatctgggagcaggttctgtcaatagaagatactaaag

SEQ ID NO: 979577 - DNA, 120 bp, Artificial Sequence
  ENSG00000267057_21 (sequence is synthesized)
ctctttttgcccttctttcatgggatgatgcagcaagaaggcccttgccagatgccagcaacttgatattgaacttctcatcctccagaatggtttgtttttcctctctgtcatacctca

SEQ ID NO: 979578 - DNA, 120 bp, Artificial Sequence
  ENSG00000267057_22 (sequence is synthesized)
attgagagcctgggaagaagctctacccagacaagggcaagaggtgcacagtgaggtggctgaagacagcaatatacagccttcagccctgcacaggctggtctacctttgatgaaggtt

SEQ ID NO: 979579 - DNA, 120 bp, Artificial Sequence
  ENSG00000267057_23 (sequence is synthesized)
tgtttttcctctctgtcatacctcaagaggaacacaaagagtgatggcctgtcactctgatgcctctctctactcaaatggcagaaaccaaccagttaggttctgtcaatagaagatact

SEQ ID NO: 979580 - DNA, 120 bp, Artificial Sequence
  ENSG00000267057_24 (sequence is synthesized)
tgtaagtcattctccgaggcccatataaagtcaacctcatccttgaagctttgggttttatttctttaatgtgctttgtgtatacattaatacttaaaattgaaatctggacaaaagaaa

SEQ ID NO: 979581 - DNA, 120 bp, Artificial Sequence
  ENSG00000267057_25 (sequence is synthesized)
tcgcgccacggcactccagcctgggcaagggagtgagactccatctcaagaaaaaaaaaaaaaaagaaaagtcgaatagccctggcaactgagtaaagatggggcactgtggatttgaag

SEQ ID NO: 979582 - DNA, 120 bp, Artificial Sequence
  ENSG00000267057_26 (sequence is synthesized)
gcatccagcctcctataggtaatttaacttctctgagatggagtttttcatctgtaaaatatggataatcatacctacttatggggcaacttttgaagatgaaataaagtaatatgttta

SEQ ID NO: 979583 - DNA, 120 bp, Artificial Sequence
  ENSG00000267057_27 (sequence is synthesized)
aaaggcactttaaaaatggtaaagtactactactactaaaagggttataatgatttccatgaagaggaaaacaagtaataaataattaagctgacatcaataaatgatttttgaagagaa

SEQ ID NO: 979584 - DNA, 120 bp, Artificial Sequence
  ENSG00000226101_0 (sequence is synthesized)
agtccctgtcttcaagcaaaagtgctcactgcatttcagatcttctcggaggaagagtccagcctcacctaagacactcacctgcacaatgaatgacacgtgacattgtcatggcagctt

SEQ ID NO: 979585 - DNA, 120 bp, Artificial Sequence
  ENSG00000226101_1 (sequence is synthesized)
ttgtcctgacctagccttaggtagcactgacaaatccactgcgtgctcactattgggtcatttgacatttggaatcggtgacctgacaacactgccgtacggaaaggctaacggaaacag

SEQ ID NO: 979586 - DNA, 120 bp, Artificial Sequence
  ENSG00000226101_2 (sequence is synthesized)
aggctgcagccacagcccaggaacggtggtctttcgcacacatggggcagcctctgccacaactttttcttccaaggaaatcaacacaaatgaaaactggctgatgctctggtccaccag

SEQ ID NO: 979587 - DNA, 120 bp, Artificial Sequence
  ENSG00000226101_3 (sequence is synthesized)
aggctgaagaagaaaaccgcaaaatggagactgcccaattctaatttaattcagaagaacaaacagggcatcactcagcggacttcaaatccccagtcagaagattttgcccgtggagca

SEQ ID NO: 979588 - DNA, 120 bp, Artificial Sequence
  ENSG00000226101_4 (sequence is synthesized)
aatcgtttcatgggccatctaccccacctactccctcctgccacagcaaggaggtgaaaatagctcatgaagccatggggagttcaaagtggaactgtgaagtttcccaagctccatgca

SEQ ID NO: 979589 - DNA, 120 bp, Artificial Sequence
  ENSG00000226101_5 (sequence is synthesized)
ggtcactgaagtccaccctgcaaacaacagtccttcaccttctgaagacctgtcacctatgaagcagcaaggaaggaatttcttggctctgcttcctggcagtcattacctgtgatcttc

SEQ ID NO: 979590 - DNA, 120 bp, Artificial Sequence
  ENSG00000226101_6 (sequence is synthesized)
tatcccaattggttgaccctagcaactgagccccatgaaatatgtatttagtggactgaatgaattggacaattgaatcagaaaaagcaacaagaactcccaaggttaaaacaagtccag

SEQ ID NO: 979591 - DNA, 120 bp, Artificial Sequence
  ENSG00000226101_7 (sequence is synthesized)
gactacactcctctcttcctgcctctccacattgatctgcagcttctagagaagactgagcaaagagatgctggtgtctttgacttcagggaagagcaatgtcaaggagagaggccagca

SEQ ID NO: 979592 - DNA, 120 bp, Artificial Sequence
  ENSG00000226101_8 (sequence is synthesized)
gatttttttaaatctctattcacctgtcactgtccagcctgccattgtggtgggtgaagacaacatttagggattctagtgctagtaggatacaaacaacatttctattttgttattaag

SEQ ID NO: 979593 - DNA, 120 bp, Artificial Sequence
  ENSG00000226101_9 (sequence is synthesized)
taaataaataccactctttatcaacctgctccttcctggcgtgcagaatgacttatagctaaggtaaatggtcgctcaggaactcatagcacgtacccacttccaggtagcttcagctga

SEQ ID NO: 979594 - DNA, 120 bp, Artificial Sequence
  ENSG00000226101_10 (sequence is synthesized)
gcattcagcacaacacagcataagggctaacagtgagcagaaagccccaaaactcagcacctgtctttttagtatctcatagagaaaaataaatgcagaaagcatattgaaagtggggaa

SEQ ID NO: 979595 - DNA, 120 bp, Artificial Sequence
  ENSG00000226101_11 (sequence is synthesized)
tatggttggctggactccctgacaccaaagaagaaaatgctgtatgctttcaaggagccttctggagtactgagctaggacataaaaacattcaactgctcttgccatttgaatggggaa

SEQ ID NO: 979596 - DNA, 120 bp, Artificial Sequence
  ENSG00000226101_12 (sequence is synthesized)
atatatggttctaggcctgcagcaagaaaagtggtgcattccacccagcattctcattctaaaatgcaaattggatcacgtctgtcttcagcttcatggtattcattggttttagatgaa

SEQ ID NO: 979597 - DNA, 120 bp, Artificial Sequence
  ENSG00000226101_13 (sequence is synthesized)
ttgcaaagtctttaacatcgcagagaaggctttttctggtctgaccgcagcctatttccccaggtttatctctcactccatcccatacctgcactggccttctgttttctaattatctta

SEQ ID NO: 979598 - DNA, 120 bp, Artificial Sequence
  ENSG00000226101_14 (sequence is synthesized)
ctgacctgccattcccagaacccaccatgttttctcttatacctggattttgcacatgctgttccctctacctggaacatattttccccacccatccattctctggctaactgttactgg

SEQ ID NO: 979599 - DNA, 120 bp, Artificial Sequence
  ENSG00000226101_15 (sequence is synthesized)
actgaaaagcatatcacagaaaacaaacagtaccagctgtcagcggacagtttttgcattgtattaatattttctttctctgaagctccagagaccaaaaatgtacaaaacaacaaatca

SEQ ID NO: 979600 - DNA, 120 bp, Artificial Sequence
  ENSG00000226101_16 (sequence is synthesized)
agcaacctcacatggtaaataatttttcaccaataaatgttaaatatagttcatatatgcttatattatacaagtcttctaggaagacagacattaacgatgcaaattttaaagttcatt

SEQ ID NO: 979601 - DNA, 120 bp, Artificial Sequence
  ENSG00000226101_17 (sequence is synthesized)
tctttaaaaaaatccatgtataatattagcagattattctttttggagtcagatatatgcggctttgagtatcagcgctgccacttactagcagtatgatgttatgcaaattatcaaccc

SEQ ID NO: 979602 - DNA, 120 bp, Artificial Sequence
  ENSG00000226101_18 (sequence is synthesized)
ctttgtgccccaaccttctcatctgcaaagtggaaatcatcctagcacctgcctgatggacgtcttgtgaggatcaaatgagatgataagaatgaagtgccctgtgctacttaccaggca

SEQ ID NO: 979603 - DNA, 120 bp, Artificial Sequence
  ENSG00000226101_19 (sequence is synthesized)
tgcagtgtactcagtcaactcaatgaatgatcactgttaccatcttcattgttgtcatcatcatcatcaatatgtatcaagagccctgctgcatctttctctggtggctcctggtgcttt

SEQ ID NO: 979604 - DNA, 120 bp, Artificial Sequence
  ENSG00000226101_20 (sequence is synthesized)
aaaacttgatatgctcattccattctgcagctaccaaagccttttgagggttaacctaaccttgatcactcctgaagagcatccaaccaccaccttcatcttgggcaacaggaaactaca

SEQ ID NO: 979605 - DNA, 120 bp, Artificial Sequence
  ENSG00000226101_21 (sequence is synthesized)
gggctcttctcaggtggttattcccaggagggggaaacttactaagacataccagaggtcctaatcaacagaataattaaaaagggaggcagccctcttctgcaatccctgacatctaaa

SEQ ID NO: 979606 - DNA, 120 bp, Artificial Sequence
  ENSG00000226101_22 (sequence is synthesized)
gatggtttcagctagataagactggaagacagcaaggacttggaaatgtactcacagaccctcctacccgtgataactgacttcagagcacaccttcattcccacctttctatattttaa

SEQ ID NO: 979607 - DNA, 120 bp, Artificial Sequence
  ENSG00000226101_23 (sequence is synthesized)
catgggattgagactgggacagaggttaacaaggcatctcaagccaatcaagaactagatgcacataactgcatttgatggggaagtaaaaattactacaaatttaaaaaaaagtgtata

SEQ ID NO: 979608 - DNA, 120 bp, Artificial Sequence
  ENSG00000226101_24 (sequence is synthesized)
tacgttcaccaagtagctataattctagggtcttatttttaaggaaaaaaaaatgcattaaaggtagaaaaggagaaacataggtggagggagaggaagaaagctggagaggaaggcatt

SEQ ID NO: 979609 - DNA, 120 bp, Artificial Sequence
  ENSG00000226101_25 (sequence is synthesized)
ttgaacatctatcactattatattaggaacttcacatgaaccatctcatttacctctcacaaaatctatgagattgagacaatgctgcttattatggcatcgttaatcatagtgaaaaat

SEQ ID NO: 979610 - DNA, 120 bp, Artificial Sequence
  ENSG00000226101_26 (sequence is synthesized)
tgaaaacagccttcttgtatactgctaagaaaactggggccttaagtgggtgcaaatgtttgtctaaaccaatacattgactgctctacaagaaaatgctggtgtggtccttcagatatt

SEQ ID NO: 979611 - DNA, 120 bp, Artificial Sequence
  ENSG00000226101_27 (sequence is synthesized)
ctgccagggttctccactgagtgaactcaaccagaagccaaaggacatggaaacccattgatgtccctcccaggacaaggtggatgaacagaaattgatctgaaaggacaaatggaagaa

SEQ ID NO: 979612 - DNA, 120 bp, Artificial Sequence
  ENSG00000226101_28 (sequence is synthesized)
atacaatgcaatgttgatgaaatttcatcctctgcccctcttccctccatctctctcacctcttgttcgtagaaatgttccaccccaaagcagcaatggtacctgaaccacgtcagtccc

SEQ ID NO: 979613 - DNA, 120 bp, Artificial Sequence
  ENSG00000226101_29 (sequence is synthesized)
aaagagctgtctcaattacatcctgaccccttttagtaatgtggccaggggtgtgcttgcagttggtttagtcccctgacatttcaccacctccaagataggcctgggactgctgagacc

SEQ ID NO: 979614 - DNA, 120 bp, Artificial Sequence
  ENSG00000226101_30 (sequence is synthesized)
ccagtggtaaccaaaccaaggatcctgagaacttcccagtgcccaagctggcaaacaaaagaacatgagtgttgtttgggttagcccacaactaactcctccatgagctgccaaacactc

SEQ ID NO: 979615 - DNA, 120 bp, Artificial Sequence
  ENSG00000226101_31 (sequence is synthesized)
agtatacattctcgtcaccaagaaatgccactggaatgaatctgcaccaaagctgtttatgtgactaatgaacctccattacgttgcatccaagtaggagtaaaatttatattctactca

SEQ ID NO: 979616 - DNA, 120 bp, Artificial Sequence
  ENSG00000226101_32 (sequence is synthesized)
tttactgctctgagcttgagcttgccttcaaatggtggtgggcatgacagccaatccaactatcctgtagtgagcacttactagatgccaggaactcttccacatgacacccaggggctc

SEQ ID NO: 979617 - DNA, 120 bp, Artificial Sequence
  ENSG00000226101_33 (sequence is synthesized)
taatcctcatagtaacctcaaagggaggcactagtgttatcctccattgtagataatcaggctggaaacccaagcctactgcctgtggtgctgtaggaagcacgcagagtgtttatgaca

SEQ ID NO: 979618 - DNA, 120 bp, Artificial Sequence
  ENSG00000226101_34 (sequence is synthesized)
cacttagcacaaagccttcactcatagtggcttttcaacaaagaattcaaggattattcttatcaatagtggcaacatttttgcagagggcacccaatcagcacacagtcatacagaaca

SEQ ID NO: 979619 - DNA, 120 bp, Artificial Sequence
  ENSG00000226101_35 (sequence is synthesized)
cagactgtaataagcacttctcattgtcctggccttctacacaccattcttttagcatctgagtttgttatcagtggcctagcactaatggcagcacccctaaaccaaggctttatttgg

SEQ ID NO: 979620 - DNA, 120 bp, Artificial Sequence
  ENSG00000226101_36 (sequence is synthesized)
acagcaatcttctgtgtagctggcaaagcctcttctgcaaagcactgctttgagttctgatttttaattccgaacactgcatggtatcgttgtgataatgggaaatgttgaagtgctgtc

SEQ ID NO: 979621 - DNA, 120 bp, Artificial Sequence
  ENSG00000226101_37 (sequence is synthesized)
attaggtacttctacgtcatatcagataaacagaattcagacacaagcactaaggtaaagctttattggatggatcatctttttttttaagtgatggaaatatatcaactctaaactctg

SEQ ID NO: 979622 - DNA, 120 bp, Artificial Sequence
  ENSG00000259789_0 (sequence is synthesized)
agagagattatatgggggaagaaagaacaagaaagtcagacctgagccaggcctgagaggaggcactatgatcactcccatttcactgatgaaaaaatggaggctcagggaggttaggtg

SEQ ID NO: 979623 - DNA, 120 bp, Artificial Sequence
  ENSG00000259789_1 (sequence is synthesized)
acttgcctgactcacagtagatggtggacttgggagtttgatgggactccaatgactgcaccctcagttacaagattgccccacatttcttccaaatctctcgctcaaatctccggctca

SEQ ID NO: 979624 - DNA, 120 bp, Artificial Sequence
  ENSG00000259789_2 (sequence is synthesized)
aatctccaagacagagatccagcctggacctcttatttattgcctccttccaacggccagcaaaaagtgaccggagaggcttgtgtttcatctgtagtcgttggtggctgctccgtggtc

SEQ ID NO: 979625 - DNA, 120 bp, Artificial Sequence
  ENSG00000259789_3 (sequence is synthesized)
ccaggatgcctatgctggaaaggaccagaggaattaattcatcctactgcctactaccatttggaccagaggggaaccccaaggcacaaaccaggctctgagagcccagctctgggccag

SEQ ID NO: 979626 - DNA, 120 bp, Artificial Sequence
  ENSG00000259789_4 (sequence is synthesized)
ccagctttccatcacccatatggtagggaggataatcggcagccagaggcctccccagcccctcagggcttgctgaagtctctcatcaagccagccttacaaatgcctccttgattcctc

SEQ ID NO: 979627 - DNA, 120 bp, Artificial Sequence
  ENSG00000259789_5 (sequence is synthesized)
gagcctcatcattgaagggattgtggctgtgcctccagggtattattcatgtctcactatgtaggcagaatgtcccagcccagtgctgggacagggaaggatgggaagacagggccattc

SEQ ID NO: 979628 - DNA, 120 bp, Artificial Sequence
  ENSG00000259789_6 (sequence is synthesized)
caggaggcagaggccaaggtgtggaagatcaccaggcccagtccccccatccctagcctcggataatgcagaatcactcctttgttgttttatgggggtcttccctggcatggatgaaaa

SEQ ID NO: 979629 - DNA, 120 bp, Artificial Sequence
  ENSG00000259789_7 (sequence is synthesized)
taagcccccttctcactttcccccacatggctctccatctggggccactgagggggtatgcctacctctccccactgagccccacctggttcttttacccatccacactggcctccacct

SEQ ID NO: 979630 - DNA, 120 bp, Artificial Sequence
  ENSG00000259789_8 (sequence is synthesized)
ccagaaccctcgccaccctgatgtctgcccttttttccaaagttgggagaacaaactacagcccaagggccaaatctggcccaccacttgtttttgtaaataaagttttattggagcaca

SEQ ID NO: 979631 - DNA, 120 bp, Artificial Sequence
  ENSG00000259789_9 (sequence is synthesized)
agcagaatttctcagcattccagagagagattatatgggggaagaaagaacaagaaagtcagacctgagccaggcctgagaggtcaaggccaacaccccagggagacccatttcctctct

SEQ ID NO: 979632 - DNA, 120 bp, Artificial Sequence
  ENSG00000259789_10 (sequence is synthesized)
ggcctcttcacacccttctcccctccttcttcttcttttaacgtttctctctgccccctgtcttctctacatccctctttcctggctcccttccctgagcccctgcttacaggaggtgtc

SEQ ID NO: 979633 - DNA, 120 bp, Artificial Sequence
  ENSG00000259789_11 (sequence is synthesized)
taatccacatgtgccgtgtgccaggcacaggttcatgcgcttcacaagtggggactcattgaattcccctgctctgtgtaggaggcactatgatcactcccatttcactgatgaaaaaat

SEQ ID NO: 979634 - DNA, 120 bp, Artificial Sequence
  ENSG00000259789_12 (sequence is synthesized)
gagaaactcaggggcccccagtgaaatgcaggtgagggtgggaggcagaaaagaggcacaggtggcccatactctggagaccccgttgggcctccgcactctctcttccttctgtctaca

SEQ ID NO: 979635 - DNA, 120 bp, Artificial Sequence
  ENSG00000259789_13 (sequence is synthesized)
ccccatactgacaatcctggtttgggccagggcagaggatgaggctggcagcccattcctcccgaaacactgctttggggctgattccctggccttagccgaccaaagcactctcattca

SEQ ID NO: 979636 - DNA, 120 bp, Artificial Sequence
  ENSG00000259789_14 (sequence is synthesized)
ggctcaggaaagactccccagtttagggatggcactggaaagtccagggggcctagagacctaggtaccactcccagcactcacacattccccagagatgccctgtagagagagaacctg

SEQ ID NO: 979637 - DNA, 120 bp, Artificial Sequence
  ENSG00000259789_15 (sequence is synthesized)
gcccaagaagcctggcttacgccacaccataatcctgcaagaaaattcttcagaatttcaggcttcaatgccctccttgctgcctctccagtgaaggcgaggggcagatgggaggccaca

SEQ ID NO: 979638 - DNA, 120 bp, Artificial Sequence
  ENSG00000259789_16 (sequence is synthesized)
tataaggatagcaactcagccatgccagtcacttggcatggccttcatggctggccactcgccagcttctaaagaccagaacaaactggggactgggaaagtcctgcttcacttctgggg

SEQ ID NO: 979639 - DNA, 120 bp, Artificial Sequence
  ENSG00000259789_17 (sequence is synthesized)
acagagaaccttccattcatggctttaaacatggcttagtcctcgccaggctggctctgcctgcgcctcactctctcctggcttctgtatcctgcagcacaagctcctccactcactgcc

SEQ ID NO: 979640 - DNA, 120 bp, Artificial Sequence
  ENSG00000259789_18 (sequence is synthesized)
ggacctcttatttattggtattgtgattgggcagaactccccctccaggccatctcattggctgcttgcaggctgctgattggctgccctgggactggggcttccctctggtccaatcag

SEQ ID NO: 979641 - DNA, 120 bp, Artificial Sequence
  ENSG00000259789_19 (sequence is synthesized)
ctatcaccagggaggtggcgtcctcctccctggtgatacctaatgttactgaatgttgttgctaagatcatagatgcagtttttcgttgtttaagccagtcattgttgctaatcctttga

SEQ ID NO: 979642 - DNA, 120 bp, Artificial Sequence
  ENSG00000259789_20 (sequence is synthesized)
cctgaacagccaccccctcactacttggagtcatgacataagcctctggcaaagagtcagttgcttctctgcttccatatgacagttaagttggggtttctgttatttgcaaccaaagcc

SEQ ID NO: 979643 - DNA, 120 bp, Artificial Sequence
  ENSG00000259789_21 (sequence is synthesized)
tcatggctgacacccatttcataggtttatggcaagattgaatgagttgggacctgtttcaggcttagccatgacctcacagagctgagatgaggggatccagaatagtgccccaggaaa

SEQ ID NO: 979644 - DNA, 120 bp, Artificial Sequence
  ENSG00000259788_0 (sequence is synthesized)
gccaggagccggccggcagagagcggctcgtgggtcccaggacccctgacgtccctaggttgtactgggaggtgcgagcccgaggctcttagtcggcccagcggcacggggcacaagcgg

SEQ ID NO: 979645 - DNA, 120 bp, Artificial Sequence
  ENSG00000259788_1 (sequence is synthesized)
gccacagagatgggcagggagctgtgtccccagggtggcggatttccgagccacccacgcgggtggttgggaaagggcggtggattttcctgcggagaaactttcagggcgggcctggcg

SEQ ID NO: 979646 - DNA, 120 bp, Artificial Sequence
  ENSG00000259788_2 (sequence is synthesized)
cgctctctgaccttgggctagttattttgtgtgcagttcacaagatgcctggccgggctccaaactcgctctctgtttggttgtgttttggctcccaagaaggcgaagccaggccttttt

SEQ ID NO: 979647 - DNA, 120 bp, Artificial Sequence
  ENSG00000259788_3 (sequence is synthesized)
tcttttgcacaaacagacaggaaaggagagaggaaatgcaagcaaaggtagtaggtaacctaaggtagtataagcccggggtcatctttgtgagtttgcagacttaacgtcgctaggcct

SEQ ID NO: 979648 - DNA, 120 bp, Artificial Sequence
  ENSG00000259788_4 (sequence is synthesized)
gtactctgcagaaagatggtggaggacctagatgacctcccaggccattccaggaccagtgtttacagtcctgttacataacctagtgtgggtgtgcacacacaggttattatatgttca

SEQ ID NO: 979649 - DNA, 120 bp, Artificial Sequence
  ENSG00000259788_5 (sequence is synthesized)
gcactgtgcccttggaagctatgtttacatttaaagttgtgttgcattttgcagcttttgcaagaagtggaatatgttgaaatacgaaaatacctagatttaacataccacctatcataa

SEQ ID NO: 979650 - DNA, 120 bp, Artificial Sequence
  ENSG00000259788_6 (sequence is synthesized)
agagattcaggcgcctttcttctactttcttgggtgcaaaggccttttcattccctttaccaattgcataatcacccactgcctcaagtaacaacagaaaaacttaaacttggtaagtaa

SEQ ID NO: 979651 - DNA, 120 bp, Artificial Sequence
  ENSG00000259788_7 (sequence is synthesized)
tgctggtagatttacattcaggagattgaatactctccatctctcatgatcctagaacttccttcgtttctttgaaagaagaatagtgtagtgattggtttatagtgtagtgattggttt

SEQ ID NO: 979652 - DNA, 120 bp, Artificial Sequence
  ENSG00000259788_8 (sequence is synthesized)
cttaatcatgggatctgaagacaatttcagctttattgcttgtgatctttggcaagctacttgtgctatcagttttctcatctataaaaaacagacaataaagatgaaaatgccatttgg

SEQ ID NO: 979653 - DNA, 120 bp, Artificial Sequence
  ENSG00000259786_0 (sequence is synthesized)
agaatattcagccccaccccatgacttccagagacagaggaaaggctgaaggttgagttgattaccagtagctcacgatataatcattcatgcctacataacacagctttcataagaacc

SEQ ID NO: 979654 - DNA, 120 bp, Artificial Sequence
  ENSG00000259786_1 (sequence is synthesized)
caataggacagggttcaaggaccctctaaagaatgccacacctatagaggcatggaaactctttgccactttcatctgactattgatctatatcctttgtaatgcctcttataagaaatg

SEQ ID NO: 979655 - DNA, 120 bp, Artificial Sequence
  ENSG00000259786_2 (sequence is synthesized)
ggcagattctagcagtgtttgtgagaaaaactgatggatcctgcagattaactatggacagccaaatattgagtaaagtgatgtctacaacagcatcagctatgcctgatatggtgttaa

SEQ ID NO: 979656 - DNA, 120 bp, Artificial Sequence
  ENSG00000259786_3 (sequence is synthesized)
ttcacattgtgaagttccaaaatcagaagatgatacagaaagattgctctggttgcctggtttctgaagaaatcgtgtaccctgtctggatagtgtcttacttcctatccacaaagttgt

SEQ ID NO: 979657 - DNA, 120 bp, Artificial Sequence
  ENSG00000259786_4 (sequence is synthesized)
ctgtgttgatcattatagcagtcctcaataggaaaaagatgcctccctggtcgaccttcctggaaagtatgcatatcattactgcttagattttgttggagagaaatcacactaccatca

SEQ ID NO: 979658 - DNA, 120 bp, Artificial Sequence
  ENSG00000259786_5 (sequence is synthesized)
aagacaacgggtcaaaaagaatgccgtcctaagctgagaagccatcttcctaacgacagccatgtaatatgaaagggaaaaacacactgttattgaagaacttatcagctatgtcacatc

SEQ ID NO: 979659 - DNA, 120 bp, Artificial Sequence
  ENSG00000259786_6 (sequence is synthesized)
ttccacacaaatactcaggaaagttaaaagaaaattttacctcggacacagttgatgtacctcagtcttgtacaaaacttagaactcactaagtctgaaataagactttaaactctctct

SEQ ID NO: 979660 - DNA, 120 bp, Artificial Sequence
  ENSG00000259786_7 (sequence is synthesized)
gaggtgaagttgtaatacagtgagaatgataatatatagtatattaggatttacttactcctgtgttgttctggactatagactgccacacatatcagatgcacatgactgacatgtata

SEQ ID NO: 979661 - DNA, 120 bp, Artificial Sequence
  ENSG00000259786_8 (sequence is synthesized)
tcttcattttgctattatttgtggtgaactaatacaggatttactgtaaaagtataataatgcagtagcaatatactaataaatcaatgcagttaatatacaagtgctgcttataagtta

SEQ ID NO: 979662 - DNA, 120 bp, Artificial Sequence
  ENSG00000259786_9 (sequence is synthesized)
gtacccaattgtgactaaaccaaaagaaacaaatctggaaactgaagtatcaatacgtgaaaagcgttcttttggtattgggagtgccagttgtctttgtttcatgaactacttctccgt

SEQ ID NO: 979663 - DNA, 120 bp, Artificial Sequence
  ENSG00000259786_10 (sequence is synthesized)
cttagcgacttaaacagaagtgttatctcaagataatataatatctggagggagaggcaccagagctcactctctctgctgcagcacagaggaaaggccatacaaacacacagggagaaa

SEQ ID NO: 979664 - DNA, 120 bp, Artificial Sequence
  ENSG00000259786_11 (sequence is synthesized)
gccaccatctgcgagcagaggagtggggcctcaccagaaaccaaccctgctggcaccttgatcctggaattccagcctcagaactcggataaaataaatttatgtgatttattacaccaa

SEQ ID NO: 979665 - DNA, 120 bp, Artificial Sequence
  ENSG00000259786_12 (sequence is synthesized)
tgcgtttggtgaattgaagcctgatatgtcaacatactctctgtaaacacagcagcacagagggcaaagaaacacttatccagcaccacagctaggacaaaaggaattattttgacagtt

SEQ ID NO: 979666 - DNA, 120 bp, Artificial Sequence
  ENSG00000259786_13 (sequence is synthesized)
ttgtctttgtttcatgaactacttctccgtaatagcatgcagccatcttcaagaggtgagaatttcacttagcgacttaaacagaagtgttatctcaagataatataatatctggagcta

SEQ ID NO: 979667 - DNA, 120 bp, Artificial Sequence
  ENSG00000259786_14 (sequence is synthesized)
tgtcatttctatattgcctgacctaaaggaaaagaaaaaaaagggccaatgtcttcattacaagatagactcctgagaatgcttattccagcaaagaagaagatcttcctaaaaaacaag

SEQ ID NO: 979668 - DNA, 120 bp, Artificial Sequence
  ENSG00000259786_15 (sequence is synthesized)
attataagtcacagtctgtaagaaaagaaaaagtaaaacaagatagactcctgagaacactaattccagcaaagaagaagaagatcttcctaaaaaacaagaactgcattgtgcaactat

SEQ ID NO: 979669 - DNA, 120 bp, Artificial Sequence
  ENSG00000259786_16 (sequence is synthesized)
caaaaagggctccagcttgagtcctaagttactccaaaactacatgactattaaagagggagcaagtggaaaaggacaccaagaaagaagaaacaagaagggggaggggtagagagagag

SEQ ID NO: 979670 - DNA, 120 bp, Artificial Sequence
  ENSG00000259786_17 (sequence is synthesized)
agagaagaaagaattggcagaaggagaaaagagaaagtgcatgaggagctatatcatacaagaaataaaaaatgattactcaaagttattgagaagaaatacaggttctggtggacaatt

SEQ ID NO: 979671 - DNA, 120 bp, Artificial Sequence
  ENSG00000259786_18 (sequence is synthesized)
tccagtctggagtctgcatttggagagattctacagcacatgcatgaatgaatggagtatctgctgaggagactggaatgaggaaggaattcattaagtctgattgtctctgaacagcaa

SEQ ID NO: 979672 - DNA, 120 bp, Artificial Sequence
  ENSG00000259786_19 (sequence is synthesized)
agttcctgagcctactcaatatgaagataatgagaatgaagatcttgatgaattagtcactttcacttaacgaataaacaaataaactaagtgctttttaaaactgtaacctgtaagtag

SEQ ID NO: 979673 - DNA, 120 bp, Artificial Sequence
  ENSG00000259786_20 (sequence is synthesized)
aacaaccctagagttgcctgaacacagagccattgctgtgttgatcattatagcagaacactgactaatactcatactttgggcaatgtgttaagaagaggaaatttcaaagtagactta

SEQ ID NO: 979674 - DNA, 120 bp, Artificial Sequence
  ENSG00000259786_21 (sequence is synthesized)
ccacttggctaaatgagatacacggttatggaggaattcaaacaatgcaaaagagagaaaaagaggaatctctttgttggcctcactatcaagcatgcactttttcttgctgccgtctgt

SEQ ID NO: 979675 - DNA, 120 bp, Artificial Sequence
  ENSG00000259786_22 (sequence is synthesized)
ttctccgtaatagcatgcagccatcttcaagaggtaaaacagcatccccaggataaacaggaatactacactcttccttaaataacaaaaactgcggctgggcgtggtggctcacacttg

SEQ ID NO: 979676 - DNA, 65 bp, Artificial Sequence
  ENSG00000259786_23 (sequence is synthesized)
acaggcgcggtggcgggcgcctatagtcccagctacccgggaggctgaggcgggagaatggcgcg

SEQ ID NO: 979677 - DNA, 66 bp, Artificial Sequence
  ENSG00000259786_24 (sequence is synthesized)
aatacaaaaaattacacaggcgcggtggcgggcgcctatagtcccagctacccgggaggctgaggc

SEQ ID NO: 979678 - DNA, 120 bp, Artificial Sequence
  ENSG00000259786_25 (sequence is synthesized)
cggagggcgggcaccgcgtcccccggcaggctgacaggggttctgtggggagagatgagatggcgtccggtcgtcaagttctggatcaggaccctgtggaggtctcagggcgggcggtgg

SEQ ID NO: 979679 - DNA, 120 bp, Artificial Sequence
  ENSG00000259786_26 (sequence is synthesized)
gggccactgtgttctccaacgcaagcacgcggagaatggattttcttcaggccctgagggacagcgggccctcaggaaccttccctgatcttggtggatctgggccccagctccctggat

SEQ ID NO: 979680 - DNA, 120 bp, Artificial Sequence
  ENSG00000259786_27 (sequence is synthesized)
ccaccgcagccgcatctctggcctcctggtgggttgagggactgcggacccagagtgcggacccggaagcgagaaggagacctggcgtcaggggtcccccatgtccctcgatctctaaag

SEQ ID NO: 979681 - DNA, 120 bp, Artificial Sequence
  ENSG00000259786_28 (sequence is synthesized)
ccttctgcctcagcgcgcccctgactggacaccctggttggactggcttggcctatgcgccccagcgcgttaggcacccacagcagggcctgggtgttctctgcccccggttaacgtgga

SEQ ID NO: 979682 - DNA, 120 bp, Artificial Sequence
  ENSG00000259786_29 (sequence is synthesized)
aaggaggccgcaaggacgcagtggtccctttttctggccagattttctggccagattcggccttcagagcggccacctccggagactcggccctgccaccctggcgcccgcccggacgcc

SEQ ID NO: 979683 - DNA, 120 bp, Artificial Sequence
  ENSG00000259786_30 (sequence is synthesized)
tcgctgccttgggagaccctagtgtagacaccccggtgaaaacgggcctgcccgggtccaggctgagccagagtgcgcccaggagtgttccagtcagagcctccagttctcgagtcccag

SEQ ID NO: 979684 - DNA, 120 bp, Artificial Sequence
  ENSG00000259786_31 (sequence is synthesized)
cgaccctcggtcagacctggaagccctctgggaggaggaggaggccgggactgggctgcgcggacacagccccagccaccttcctacggagatggcgggattgctaaagtcctattgcat

SEQ ID NO: 979685 - DNA, 120 bp, Artificial Sequence
  ENSG00000259786_32 (sequence is synthesized)
atttgactgattgatttgtttgcttagttaaatacccttgtaatttgattgtttatagatgtttgcctactcttatttttatcaatctgctaagtgctatgcatagaaaagtatatattt

SEQ ID NO: 979686 - DNA, 120 bp, Artificial Sequence
  ENSG00000259786_33 (sequence is synthesized)
gaaattaactatttttcattacaatattctagcttatgtgcttatttttcataaactatttatctagtaatcaccatgaaatcaaatggttatttgtagtgggatggttctaaaaatatt

SEQ ID NO: 979687 - DNA, 120 bp, Artificial Sequence
  ENSG00000259786_34 (sequence is synthesized)
aatgtgatattttatttctgatagtatttaataagacaagtcctaaatttaaaaccatgtatttctttatagacaaatctttctctttactcaccaactctttctactcttttgtggtag

SEQ ID NO: 979688 - DNA, 120 bp, Artificial Sequence
  ENSG00000259786_35 (sequence is synthesized)
aactttttgtcaccattttattagctcagattgtgagcaaagacacattaaaatggatagagaagttgatgtcacaattgctaaactgattaaaataactgaataatgattttaatttac

SEQ ID NO: 979689 - DNA, 120 bp, Artificial Sequence
  ENSG00000259786_36 (sequence is synthesized)
tcattttggttaaaccaaaaatacttgtctctaccatcaaaaaaatgcaaaagtccatgttttggagcatgttaatgaaatatataatttttaaaataaacaacatcaacagttgtcaaa

SEQ ID NO: 979690 - DNA, 120 bp, Artificial Sequence
  ENSG00000259786_37 (sequence is synthesized)
aattaaagcgataaaaatatagatttcatctcttggcagggtaaagtcttcatgttagttgaatagtaaatgttactctttcaaattaagatgtctctaccaaatggggcatttaataag

SEQ ID NO: 979691 - DNA, 120 bp, Artificial Sequence
  ENSG00000259786_38 (sequence is synthesized)
tgtattcatcaaagccacagaatttgcaaatgaaataatctattacatagtctacagcttgtgaaactaaaattgtttaaatttaagtgcaaattcattaaaacttcacttaaacaagca

SEQ ID NO: 979692 - DNA, 89 bp, Artificial Sequence
  ENSG00000259786_39 (sequence is synthesized)
agactccatgggcgtaggaccctcccacattgtttaagctggtcggaaaagcgcagtattcgggtgggattgacctgattttccaggtt

SEQ ID NO: 979693 - DNA, 120 bp, Artificial Sequence
  ENSG00000259786_40 (sequence is synthesized)
tgcactaagccccagaagactgaaacaaaccaaactgctaaacgtcacttcatcatgctaaacgtcacgtaatcaaatggaaattttaaagaaacagcctactcaatatgaagataatga

SEQ ID NO: 979694 - DNA, 120 bp, Artificial Sequence
  ENSG00000259786_41 (sequence is synthesized)
atgagaatgaagatcttgatgaattagtcactttcacttaacgaatagtaaatatagtttatctttcttatgattttcttaataacattttattttctctagcttactttattgtaagaa

SEQ ID NO: 979695 - DNA, 120 bp, Artificial Sequence
  ENSG00000259786_42 (sequence is synthesized)
tgaactattgaaaactgcacaccaagggtaaaagctggagcttaattccccctaaatatatctaccctcttcttttttaaaaatgtatttcaattaaaattagtgttctctccgttttaa

SEQ ID NO: 979696 - DNA, 120 bp, Artificial Sequence
  ENSG00000259786_43 (sequence is synthesized)
atctggaggtaaaacagcatccccaggataaacagatgttaattccctgcttgctgcaactaggaagcaagtgccaacatatttgggaatgctccttcctgctggacagcacacagacaa

SEQ ID NO: 979697 - DNA, 120 bp, Artificial Sequence
  ENSG00000259786_44 (sequence is synthesized)
gttggaaaggaatcctataacaagctagctgccatgcatatggaatgaagcttagttaaaaagtctttccaagtgcttgagtatttttagatgatatttagccccctttaaattgaaaga

SEQ ID NO: 979698 - DNA, 120 bp, Artificial Sequence
  ENSG00000259786_45 (sequence is synthesized)
cgaaatgcagcaattgaaactgagtatgtactctgatcttggtggggaggtaattccccataagatgttgtgtctctgatgaactctcaacaaattcaaaatataggatgttatcaaact

SEQ ID NO: 979699 - DNA, 120 bp, Artificial Sequence
  ENSG00000259780_0 (sequence is synthesized)
cgaagctctgaatgttgaaggctccgatgcgaagcgcggcggtcccggcggcttccagcgcccagagtgcggccagcagagcccggggcccgcccatggcgcggagcgagaggctgggag

SEQ ID NO: 979700 - DNA, 120 bp, Artificial Sequence
  ENSG00000259780_1 (sequence is synthesized)
ggacagacgctgccgcctacgcagacccgctgtcagacccaccgacccaccccttccctccgcggccgccccttgacggccagtgcgacgcggaatccgcccctgcgttctgcaggctcc

SEQ ID NO: 979701 - DNA, 120 bp, Artificial Sequence
  ENSG00000259780_2 (sequence is synthesized)
cagggcactgctgggctctcagggaccgctgccttctcactgcgcgggaagctgcagccggaatggagggtccggcccatccagccccagctcagggcagccgagagactcaccttggat

SEQ ID NO: 979702 - DNA, 120 bp, Artificial Sequence
  ENSG00000259780_3 (sequence is synthesized)
gtgggtgcagaggcccgaggctcagagatcctagggggatggggatcccgggtccaggctgcgggcgtgtccgacacaggactgcactgactccctctggcagtagctctggcaccaagg

SEQ ID NO: 979703 - DNA, 120 bp, Artificial Sequence
  ENSG00000259780_4 (sequence is synthesized)
caggggccggtatttgaggtcctgggccagggaggggccgggctgcactgggtcccgccccctcgactcagctgggtgcctgatgaactcctggctttcattcccatggagacccccagg

SEQ ID NO: 979704 - DNA, 120 bp, Artificial Sequence
  ENSG00000259780_5 (sequence is synthesized)
ccggttctggtgccccagacctgtcccaaaaccgtcccagaagcccctgccagccccctaggagggaggtagacggtcagccacatcccggtgcggctgtgttcttgtcctcgcccctag

SEQ ID NO: 979705 - DNA, 120 bp, Artificial Sequence
  ENSG00000259780_6 (sequence is synthesized)
aaattaggtcgcctagactctgcctccctgagcagaatcccttcagggaaagcaaggcagcgcaggtaggaccagccacactccctacccagcatctcctgctgctgctccacctgctca

SEQ ID NO: 979706 - DNA, 120 bp, Artificial Sequence
  ENSG00000259780_7 (sequence is synthesized)
ccctgcggtggaggccgaggctcccagatctccctgtccccgtccctggtcctcccacccacccacaggcctcaggcagcgcagctgggggcacagctccagctgggcagggcaggaggc

SEQ ID NO: 979707 - DNA, 120 bp, Artificial Sequence
  ENSG00000259780_8 (sequence is synthesized)
tgttggtcaacatgccaatgacacccacacagcaccaaggcgccgccagggctggcagaagcccctgggtggggcggccaggcacgtgagtctaggagtggcctgggaggcaggtgctgc

SEQ ID NO: 979708 - DNA, 120 bp, Artificial Sequence
  ENSG00000259780_9 (sequence is synthesized)
tgcgggggcctgggcaaaggtggtggcaccagccgcggaggctgccactgccacaacatcacaagctgcaggttctcatgttttattgtaaagcaacaagaaactcttatgtacactgtc

SEQ ID NO: 979709 - DNA, 120 bp, Artificial Sequence
  ENSG00000259783_0 (sequence is synthesized)
ggcctctggcggggcggggcctgctcgagtgaggccgggagcggaccgcagcccgctggaggtgccgggggcgaaatgctggcgtctgctcctccgtctcccagaatcctgccctggaaa

SEQ ID NO: 979710 - DNA, 120 bp, Artificial Sequence
  ENSG00000259783_1 (sequence is synthesized)
aaaccagcgccaaccgccggtttaactgaggacggatttaaggcattacgaaagacagctttcccctttgctcggctctccttctctctcctgctgccctgtgaagaggtgtcttctgcc

SEQ ID NO: 979711 - DNA, 120 bp, Artificial Sequence
  ENSG00000259783_2 (sequence is synthesized)
tccaccagaaaaccatcatcataagaaccaaaaattaggcgaggactcacagtacctgggtttaacttcatgtcgctgaaagaggcactgaaaaggaagaggaagacagagctcttacca

SEQ ID NO: 979712 - DNA, 79 bp, Artificial Sequence
  ENSG00000259783_3 (sequence is synthesized)
ggataacctgggaggatggggtggaatctgaggggtgagccttcttccccaggctggaagtgggcgacacgagactggc

SEQ ID NO: 979713 - DNA, 120 bp, Artificial Sequence
  ENSG00000259783_4 (sequence is synthesized)
ccttcttccccaggctggaagtgggcgacacgagactggcacctctacatctgattgtcccccaaacccagcatttatgtcgtgagcaaagaaagaaatcatgttacttcttccagctga

SEQ ID NO: 979714 - DNA, 120 bp, Artificial Sequence
  ENSG00000259782_0 (sequence is synthesized)
gtctgggtgacagagggagactctgtctcaataaataaataaatagagtgtgaatttaatttaaaaataaggcattgtaagatttttaagcagcagagtaacatggttcaggaggctatt

SEQ ID NO: 979715 - DNA, 120 bp, Artificial Sequence
  ENSG00000259782_1 (sequence is synthesized)
agtaacatggttcaggaggctattgctgaggtccagaaaagagatgatagtggcttcaactggggtgatggcagtgaagatgatgagtaatgggtatatttaagatatttttaggcttgg

SEQ ID NO: 979716 - DNA, 88 bp, Artificial Sequence
  ENSG00000259782_2 (sequence is synthesized)
tgatgagtaatgggtatatttaagatatttttaggcttggcattgtggatagccaggcaggtcccttgagcccaggagtttgagacca

SEQ ID NO: 979717 - DNA, 120 bp, Artificial Sequence
  ENSG00000259782_3 (sequence is synthesized)
gttgcagtgagctgtgatttcaccactgcactccagtctgggcaaccgagtgagaccctgtctcaaaaataattttaaaataggccgggcctggtggctcatgcctgtattcccagcact

SEQ ID NO: 979718 - DNA, 120 bp, Artificial Sequence
  ENSG00000261959_0 (sequence is synthesized)
cttaacagcaaacgtaggtgccatccacccagcctttatccccagtccaagcacttcagcgtggaggtctagcaagccctggacaggaccagccagctagagacaggtgagcggaggagg

SEQ ID NO: 979719 - DNA, 120 bp, Artificial Sequence
  ENSG00000261959_1 (sequence is synthesized)
caccctctctggcccatggagtcagggttcattcggcgcatagacttggaggcctggaggtgggccaccttggccacttgctggggatgaggccttgagtgcaccatttgccctctagcc

SEQ ID NO: 979720 - DNA, 120 bp, Artificial Sequence
  ENSG00000261959_2 (sequence is synthesized)
catttccacaactataaactggcaagaatagtgcttgcctcttggcatcattgtgaggactccacaaagtaatgaatgcagcgcatatttatgaaacacctgctatgtatcagacattga

SEQ ID NO: 979721 - DNA, 120 bp, Artificial Sequence
  ENSG00000261959_3 (sequence is synthesized)
aattgcaaagataagcaaacctctgcccacatggaggtcacctgccagtgggtaataccagctagcgctgccagctactgtgctgagaatcttacatatatctacctatattacctcatt

SEQ ID NO: 979722 - DNA, 120 bp, Artificial Sequence
  ENSG00000261959_4 (sequence is synthesized)
ccatctcctcagcagttccatgaggcaggtattattactgtgcccatttaacagatgataaaactgaggcacaggggtgtataccttccccaaggccacattgctgatgagtagaatgca

SEQ ID NO: 979723 - DNA, 120 bp, Artificial Sequence
  ENSG00000261959_5 (sequence is synthesized)
tgtggacggcttagcccagtgcctggctcagtcgatgactgtgctgctgatgtacttgcccggccctgcttccccttccttcttgcctctgccaaaggatctcagtccaggggcgatggg

SEQ ID NO: 979724 - DNA, 120 bp, Artificial Sequence
  ENSG00000261959_6 (sequence is synthesized)
gcgcggtgtcctctccccaggtctctcacttagggcaggcacaggggcactctccccaggtgccctgagaagggggcggggacctatggctgccagggttcccaaatccttggtgcctgt

SEQ ID NO: 979725 - DNA, 120 bp, Artificial Sequence
  ENSG00000261959_7 (sequence is synthesized)
ttacgcagtccttgtcccttcctctctctctctccacctgactgacccgctcatccctggagagccaccaaattccagagtcagcgtcccctcaggcaaggcagtatttgtcccagcatc

SEQ ID NO: 979726 - DNA, 120 bp, Artificial Sequence
  ENSG00000261959_8 (sequence is synthesized)
acctggccatctctctgtcttctcagagacagagggagggaggaagaaaggttctggaggcagaggaagagcccaagggttctgggggagcaggcagaagtgccaaccccctgggcacct

SEQ ID NO: 979727 - DNA, 120 bp, Artificial Sequence
  ENSG00000261959_9 (sequence is synthesized)
gcccagcctcacccctgagcttctccatgtgactccccgccccctgccgtccccctggctatttttggagccacccactcagctgtcttaaggtagcagtgcctggccccagtgtcacca

SEQ ID NO: 979728 - DNA, 120 bp, Artificial Sequence
  ENSG00000261959_10 (sequence is synthesized)
ggcccacagaggccagccttccttaatgaaaagctgcagctacttccccatcagatcctccctgcccaattcaagggagccagggactgtcccacaagccagaaagtccccagaaaccct

SEQ ID NO: 979729 - DNA, 120 bp, Artificial Sequence
  ENSG00000261959_11 (sequence is synthesized)
tctcaggcccctcagccatcagaggaccttcccactcagagctgtctggattgcaacctgctgcttgtaacacacagcaccttctgtctattgggcctaggggtgggaagggaggtcaca

SEQ ID NO: 979730 - DNA, 120 bp, Artificial Sequence
  ENSG00000261959_12 (sequence is synthesized)
gggtctttaaacttcttagtttgaaaaatttgcagcatactataataagcccccgtgtatctgtcacctggcttcaacaattatcaactcatggccagtctagtttcatctgtacccctc

SEQ ID NO: 979731 - DNA, 120 bp, Artificial Sequence
  ENSG00000261959_13 (sequence is synthesized)
ctgattaatttcatccatcaatatttcagtgtgtatctttaaatgataatgactctttttaacataatcacataacacgttcagctattaacatcatcaataaaattccttaatatcaaa

SEQ ID NO: 979732 - DNA, 120 bp, Artificial Sequence
  ENSG00000227274_0 (sequence is synthesized)
agttctgttctggctctgaaacaaagactaaactttcaatgtttagccatgggtcatagcgcttcaatataactaactacacaacattttttctaactaatgtaactaactacactatat

SEQ ID NO: 979733 - DNA, 120 bp, Artificial Sequence
  ENSG00000227274_1 (sequence is synthesized)
agggctatacatagggcttcaatacaactaactacactacagtttttcaagggcaaacttctgcttgttgtatactgaactctgaagtaacagtcacaacagcattttacagacacctga

SEQ ID NO: 979734 - DNA, 120 bp, Artificial Sequence
  ENSG00000227274_2 (sequence is synthesized)
atttctgcacaagtcattatagatcttgatttttaaattttgttggagaggaagttagaatctatgacctagagcagctttacccatgacttattcatccagggtacccttttctctatt

SEQ ID NO: 979735 - DNA, 120 bp, Artificial Sequence
  ENSG00000227274_3 (sequence is synthesized)
tctacagataaccaagagttagctttcattgctgaattggtagaaaatttaaaatatatcttctaaaagatacaataatccttcttcttttacccagttcgtggccagtaattcaacatt

SEQ ID NO: 979736 - DNA, 120 bp, Artificial Sequence
  ENSG00000227274_4 (sequence is synthesized)
ttcaatgacttgtggactccaatatcccaaacagaactgaaattcaggaagtgagaaaaagatgatgtaattgatgcttctggaaagaatattaattatatccaattttaaaagtagatg

SEQ ID NO: 979737 - DNA, 120 bp, Artificial Sequence
  ENSG00000227274_5 (sequence is synthesized)
agtcaggggtgcccataatgaattgtgtttaccctgagaacaaatccactacattggaattttaggcataaccagtatcattaaaaggagccccttgcagacacagtggaagaagaagga

SEQ ID NO: 979738 - DNA, 120 bp, Artificial Sequence
  ENSG00000227274_6 (sequence is synthesized)
gagaagctgagaaggttacaaggttttgcaaaagaaacccttaataattctacaaagatctttccctcatagaagtatgaggatgtgaagaccatgagtcattttaccaatatggaaaca

SEQ ID NO: 979739 - DNA, 120 bp, Artificial Sequence
  ENSG00000227274_7 (sequence is synthesized)
gaggcccagagagccctgggaatataaacatattcccaagaccacggagtcccagatgggctcccactgtgacttggcccacaggacagaaggaatggaaccaggaaagcagagacctgt

SEQ ID NO: 979740 - DNA, 120 bp, Artificial Sequence
  ENSG00000227274_8 (sequence is synthesized)
gaaatgcacctgctggctcctcccccttgatctggacagagatgtggggtacctgttcaccattcattagatgctcgggaagccttgctaattagatgaaaataaaggaaatgaaaagca

SEQ ID NO: 979741 - DNA, 120 bp, Artificial Sequence
  ENSG00000250174_0 (sequence is synthesized)
agaagcaggactgtgatctgggtgggtgacagcctgggtgaggagagactcccacacaggagtcatcagccacagcatccactgtgcagaacctcaaaatgtgtcccatgccccctctga

SEQ ID NO: 979742 - DNA, 120 bp, Artificial Sequence
  ENSG00000250174_1 (sequence is synthesized)
attgagcataaacttggacacatcaagtccgcttccttagactcagagcccctatagcacatatacgcacgatctccaaggagaagtacacagtattagatgagttcagcttacctttcg

SEQ ID NO: 979743 - DNA, 120 bp, Artificial Sequence
  ENSG00000250174_2 (sequence is synthesized)
gctattaacaattaattcgtgctgccattgtgtttttataaaaaagactttcttttccacctctctcccattcatcatgttccatagagctcagctctgtgatcaggaaaccaattgtaa

SEQ ID NO: 979744 - DNA, 120 bp, Artificial Sequence
  ENSG00000250174_3 (sequence is synthesized)
ggaatggcagtgagacgggctaggacttcagaactcaactgatcacacacaggagggagaagaacaaccaagctgggcttcaagatgccttatttggacactagtttttgatgtgtctct

SEQ ID NO: 979745 - DNA, 120 bp, Artificial Sequence
  ENSG00000250174_4 (sequence is synthesized)
gatggttattaaccagacatttcaagggcaagaaactatttccccaaaactaccttttgagacatttccagaggctgccctgtcctctctgtccagagactcagccccgactcacctcct

SEQ ID NO: 979746 - DNA, 120 bp, Artificial Sequence
  ENSG00000250174_5 (sequence is synthesized)
ctaggaagtctcccacacggacctcgctctgctccctcctcctcacggctgaccctgctgggtcgtcctgccagctcggacacttgtttgttgtggcttttgtaaaatactctgtagtca

SEQ ID NO: 979747 - DNA, 120 bp, Artificial Sequence
  ENSG00000250174_6 (sequence is synthesized)
agactgaaaatgcaaagtgcacaagagtctctggccaggacaggcattgaaggtcagcttgttctcctcctggagctcagctctgtgatcaggaaaccaattgtaaagtccagaatgagg

SEQ ID NO: 979748 - DNA, 120 bp, Artificial Sequence
  ENSG00000250170_0 (sequence is synthesized)
gtgcccacagttccttcatttccttttgtgtttcctttctttgtctgattttaaggaactaatacagcatctggtgtgtatatgtttggttttaagctctttctgtctgtgagtttgtca

SEQ ID NO: 979749 - DNA, 120 bp, Artificial Sequence
  ENSG00000250170_1 (sequence is synthesized)
ggacagtgaggaaatgaagtactaactttaaatgatttgttgggacgtttgtttcttgttgactttttttttttaagagttgggggtctcactgtgttgcccaggagatcgaggctgcag

SEQ ID NO: 979750 - DNA, 120 bp, Artificial Sequence
  ENSG00000250170_2 (sequence is synthesized)
gagcaagactctgtctcaaaaaaaaaattaaaaaaaatacataaataaaagaaaatagtaaacactaaactaaaacaatctttgggactattagaggcacaaaaagggtttttaagatca

SEQ ID NO: 979751 - DNA, 120 bp, Artificial Sequence
  ENSG00000250170_3 (sequence is synthesized)
agaggcacaaaaagggtttttaagatcattaagttaaaagtcattctaatgcagaggaggcacatcagatgtagagtttgagtaattcacccgagattacacagctaataagtaacagaa

SEQ ID NO: 979752 - DNA, 120 bp, Artificial Sequence
  ENSG00000250170_4 (sequence is synthesized)
ttgacactaggttatggaattagtgtttgtgttggaaggagcacaaacaggcatgccttggtttcaaaatctggctgcagcacctgttagcggcaagtttaaaaatattgttcagctttc

SEQ ID NO: 979753 - DNA, 120 bp, Artificial Sequence
  ENSG00000250173_0 (sequence is synthesized)
tgagaagcctgggaggtttgagttctgtctccatgaccataagtctgcagccacacaattgtgtgatgggttgtgtgatcttcctgacaaggaaccagttgaaggatgctgactgggaag

SEQ ID NO: 979754 - DNA, 120 bp, Artificial Sequence
  ENSG00000250173_1 (sequence is synthesized)
tccggacacaaagcgtctccatatgacagagttttgttactgtggggagaggacaaagcaccagccacacccctcattccacagcctttcccaaccctcccctcgagatgaaacactggc

SEQ ID NO: 979755 - DNA, 120 bp, Artificial Sequence
  ENSG00000250173_2 (sequence is synthesized)
catctgcagcgcttcacctctgagctggaaagaagcttgtttcttttgctttgatgaggttctgctggttttggcgggactttgaagtttatttattgtcattaaattgcattaattatt

SEQ ID NO: 979756 - DNA, 120 bp, Artificial Sequence
  ENSG00000267659_0 (sequence is synthesized)
actgccctgtgggagaggctagtgggagggtgggcaaggccagagcgtgtcctgcctccatgtggagggagatacgggaagctggcatttctgagatgaaagaagtgggccctgccattg

SEQ ID NO: 979757 - DNA, 120 bp, Artificial Sequence
  ENSG00000267659_1 (sequence is synthesized)
tttctgtgaaaaagagaagaaaatgagcctgcatggcatagtgagtctgcaactgtgaactcgggaaatcctgtaccttcccgtgcagtcgctccccagccatgcaggtatttccagagc

SEQ ID NO: 979758 - DNA, 120 bp, Artificial Sequence
  ENSG00000267659_2 (sequence is synthesized)
ctggagatcccagactacctttcaaaagaatgaattccagacccagagagtcccctggaggagattcatggcaagcagccgtacgaaataacagaagccccagagaggggaagcaatttc

SEQ ID NO: 979759 - DNA, 120 bp, Artificial Sequence
  ENSG00000267659_3 (sequence is synthesized)
ctgcctccatgtggagggagatacgggaagctgcatgtcaccacggagacttccttgttcgtgtctatatggttcatacatggccttccccttaattaaagatgtcttccgaggaacatt

SEQ ID NO: 979760 - DNA, 120 bp, Artificial Sequence
  ENSG00000267659_4 (sequence is synthesized)
ctatcttcctggctttctgggtctggagtcccatgttagaggccctctgttttcagagcaggactcattgaatatgtgtgctctttctactcaagtgcttcaaggatccttcctggaaaa

SEQ ID NO: 979761 - DNA, 120 bp, Artificial Sequence
  ENSG00000267659_5 (sequence is synthesized)
gcctcggttccggaccagtgctgtcatggcctcaccatgtcatagaattcccatcatttcacttgtgactcccttcttcctaggacccgggcataaattcttgaagagttgatctgagtg

SEQ ID NO: 979762 - DNA, 120 bp, Artificial Sequence
  ENSG00000267659_6 (sequence is synthesized)
acagactcccacgctatgccaaaaacggcctcttatttcccaatgattgagaccttttatttgatcaatctcatgtgctcactggaccccagtgataccttcacatacctgacacctcag

SEQ ID NO: 979763 - DNA, 120 bp, Artificial Sequence
  ENSG00000267659_7 (sequence is synthesized)
ggaaacacagcttccgttcaagtcaagatccttgctatactgcaaactcttatgaaacgtctaggagaattttcaggctcctttgtatatggaaaaaggtcagaatgaagctccaaattc

SEQ ID NO: 979764 - DNA, 71 bp, Artificial Sequence
  ENSG00000267659_8 (sequence is synthesized)
ctttgtatatggaaaaaggtcagaatgaagctccaaattcttcagcatgtgtaaaaacttaagacaaccaa

SEQ ID NO: 979765 - DNA, 120 bp, Artificial Sequence
  ENSG00000267659_9 (sequence is synthesized)
gcatgagcccctgtgcccagccaacaactacattttaaagcaactttattctcaactgaatgacattttaatcactttcttgcccatgtggatatggataaggatattttgccaatattc

SEQ ID NO: 979766 - DNA, 120 bp, Artificial Sequence
  ENSG00000267659_10 (sequence is synthesized)
ttgtttgtgtttgactgtgatgctattgttatacaaagaatgggcaggtggagctaagcagaaagagacagtcgggtacctgtaccatggaaaatggaagagagccaagcagactgcatc

SEQ ID NO: 979767 - DNA, 120 bp, Artificial Sequence
  ENSG00000267659_11 (sequence is synthesized)
cttagggggcagggaggtcagtgcaagttgggacaaagcctagctgagtcggtgagcacttcatggcagactagtcaaattatatctcttggactaagatcttcattaaaggcctgcacc

SEQ ID NO: 979768 - DNA, 120 bp, Artificial Sequence
  ENSG00000267659_12 (sequence is synthesized)
tcagagacatttcagcctaccaaggtgcatcattatggaagactgggcatgataatagtaatttaaatgaagttaaaagagcagtctaaattagaacaggtattcacattccaatttctc

SEQ ID NO: 979769 - DNA, 120 bp, Artificial Sequence
  ENSG00000267659_13 (sequence is synthesized)
ttgagaagagcctctgttggataaagaaaactcgctgagcaaaataaatcgattggaggtaaactttaccagccctggagtgcaaggtttagaaacatgcacacatcccacggtgttaag

SEQ ID NO: 979770 - DNA, 120 bp, Artificial Sequence
  ENSG00000267659_14 (sequence is synthesized)
cacggtgttaagggtcctgctgttttcttccatgtcatttcatcacagaacaattttctacagcaacctgatctaccttgtggcccagtaaggcatgttttgttttgagatggagtctca

SEQ ID NO: 979771 - DNA, 120 bp, Artificial Sequence
  ENSG00000267659_15 (sequence is synthesized)
gccaccgctcccagccaagcatgtgagagttttaaatcaaatgttaccttgtccctattagccttaccactgctaaatatctacacggttccctgttaaggagagtttctaaatgactct

SEQ ID NO: 979772 - DNA, 120 bp, Artificial Sequence
  ENSG00000267659_16 (sequence is synthesized)
cttgagaaatcctggataaatggagaatggagcatttttcctgcctctaagctttgctccactgcaatctttcacatgctgtgtatccagagggtgactgccagatagcttcttgaagaa

SEQ ID NO: 979773 - DNA, 120 bp, Artificial Sequence
  ENSG00000267659_17 (sequence is synthesized)
agggaggaggaaacggtcattttcttgctgcgctttctaacacccaacagaggaaatgcacagcataggtgtgtgggagtttggctgacttatggtaaaaaataaacatggtttcctgtt

SEQ ID NO: 979774 - DNA, 120 bp, Artificial Sequence
  ENSG00000267659_18 (sequence is synthesized)
ggaaatttgctagcaggactctctcttgctctgctgagaggcatttctgagatgaaagaagtgggccctgccattgaacagaatttatgcatttaaatattcatcatttctgtgaaaaag

SEQ ID NO: 979775 - DNA, 120 bp, Artificial Sequence
  ENSG00000267659_19 (sequence is synthesized)
acaagtttttagaaacgacgaggcattgaaaacttaccacatgaccttgtgcaagttgcttaacaccactaagccgccctgtcttctcagttttaatcggggataatattgcatcctctt

SEQ ID NO: 979776 - DNA, 120 bp, Artificial Sequence
  ENSG00000267659_20 (sequence is synthesized)
aaagagtttttttgagaggatttgatgagaaactatgtaagtcacttagtatgctgcctggaatgtagcaagaacttgatcaatgataaactattatggaagtttttttgttttattttt

SEQ ID NO: 979777 - DNA, 120 bp, Artificial Sequence
  ENSG00000267659_21 (sequence is synthesized)
ctcctgttcctgtgtggtgacctgggattcagtctgtgaggcgggaaatttgctagcaggactctctcttgctctgctgagaggtttcactgtcacctaagctggagtgcagtggcacag

SEQ ID NO: 979778 - DNA, 120 bp, Artificial Sequence
  ENSG00000267659_22 (sequence is synthesized)
cctcaaccttctgggctcaagcaatccttctgtctcagtccctcaagtgactaggactacagctggatctcctgctacacaacaggaaaatcctaactgatgctgggtcacagaatacat

SEQ ID NO: 979779 - DNA, 120 bp, Artificial Sequence
  ENSG00000267659_23 (sequence is synthesized)
tctcacagttcctcaaggtggaccatctccttctgtctgaccaaccctatttatcatcctccttacatgctgtgctcattccttcaatgactcattctacacttttagctactcatggac

SEQ ID NO: 979780 - DNA, 120 bp, Artificial Sequence
  ENSG00000267659_24 (sequence is synthesized)
tattgaacacaaatgtacagccacttccagggttttctaggaaactttgtatcactcactttcactttctgctgggtcagctgcaggtatgaatttgttcatcacagatttagaccaacc

SEQ ID NO: 979781 - DNA, 120 bp, Artificial Sequence
  ENSG00000267655_0 (sequence is synthesized)
agctccttcatgtccagccatagtctaggtaatgttgatacaacagtgaacaagacaaaccaaatcctgttctaatagaactaaaattctgggagaaaaggcagtatataaactcctaat

SEQ ID NO: 979782 - DNA, 120 bp, Artificial Sequence
  ENSG00000267655_1 (sequence is synthesized)
gccacgtagccatccatcaggctatgaagaagaaaatataaagcaggaaaaatgagtagaggatgaaagggttattctatatgggatggtcaaggaaggcctctcctgtgaggtgacatt

SEQ ID NO: 979783 - DNA, 120 bp, Artificial Sequence
  ENSG00000267655_2 (sequence is synthesized)
ggtcatccaggagggtgtgggtgggaagaagtagttggaaaggaggtcagagggcctggcgtcaactcttccagggctctcagatttcatcctgggtgaaaaaggaagccgtatgtttgt

SEQ ID NO: 979784 - DNA, 120 bp, Artificial Sequence
  ENSG00000267655_3 (sequence is synthesized)
gtatatattgcatgtattcacacacagaagaaacactgaagtgtatacaacagaattttgaaagttgttgttgaagctaggtaaccgtggaagagagtatagataactgtttctcctttc

SEQ ID NO: 979785 - DNA, 120 bp, Artificial Sequence
  ENSG00000267655_4 (sequence is synthesized)
ttttctccaccttccaccacattagcagtaacctattctgaatgtgagattataattcctatgtatctcttaatagttttactgtgtttatatttatcattaaaacaatatgcaatatta

SEQ ID NO: 979786 - DNA, 120 bp, Artificial Sequence
  ENSG00000227278_0 (sequence is synthesized)
ttccccaaacactggaaactctctgatgtgcccttctgactgcagggtaggaatcagcaaaagtatgttcagaaacttaattgcccaagcatcttctttagtggtgactgggacagtcac

SEQ ID NO: 979787 - DNA, 120 bp, Artificial Sequence
  ENSG00000227278_1 (sequence is synthesized)
tgccaagaaaccaggaagctccttcccatatgctgtttgcagttcacaccagttctgagtagccaggtccagaaactccaggaactctgagtcactcaagtctgagaaccctgaggcttc

SEQ ID NO: 979788 - DNA, 120 bp, Artificial Sequence
  ENSG00000227278_2 (sequence is synthesized)
tgctgacactgtctcctcttctcttgtctctgccatggtacagctctggattgggctagaagggccctgcataacatgttaaagaaatgcattgttcaaataaaaacgttctcaaaagca

SEQ ID NO: 979789 - DNA, 120 bp, Artificial Sequence
  ENSG00000227279_0 (sequence is synthesized)
agaatggcctgctccagatgggaagtttatctgcctggatcctgaaacgaagacgacatatggatcaggaactgagtcactgacagactacagctgacttacaacttaagtgctttcaac

SEQ ID NO: 979790 - DNA, 120 bp, Artificial Sequence
  ENSG00000227279_1 (sequence is synthesized)
cgtcggattcccacaggcttgatggcatcaggctccacagtgtcaggctgctgcagctggctcaagtcatagtcctgcaaaaagacaaaatcaaaaaccgatgggagatgggcacaaaga

SEQ ID NO: 979791 - DNA, 120 bp, Artificial Sequence
  ENSG00000227279_2 (sequence is synthesized)
tagaaaattacaacctcgctttttaagcacatactcagaacacatagaaatgaggaaaatttaacataatggaaaagttgccactatgagtttttcatgttatgattaaatatttctttc

SEQ ID NO: 979792 - DNA, 120 bp, Artificial Sequence
  ENSG00000267650_0 (sequence is synthesized)
gcactgtatcttgtggtcctgggggaaggctattcccatcctatcctgccctatctccacaagtctcacctgtggcccttctgctccctcctctcctttcagacctggatgcccggggag

SEQ ID NO: 979793 - DNA, 120 bp, Artificial Sequence
  ENSG00000267650_1 (sequence is synthesized)
acccttgggggaggagagatggaggagtgtgggtagatgattcttcactaatgcatgcaccgccccctccacgcagtcgccttactcaccacagggcctgggcgcccagtgagccccact

SEQ ID NO: 979794 - DNA, 120 bp, Artificial Sequence
  ENSG00000267650_2 (sequence is synthesized)
ggaccaggggggcctttcatagagagctggaaagacagaggagtcagagcttggggcctcccacaagacccccaacattccccacagaggcatcttcaggagaaaaataacccccttctc

SEQ ID NO: 979795 - DNA, 120 bp, Artificial Sequence
  ENSG00000267650_3 (sequence is synthesized)
ctgcccagcccctccttacgccgaggctctatcactctctggggttcctcccactatgtccacacctcccactcacctgagtctgctgcagaactgcctgagcctgggcctgctggaatg

SEQ ID NO: 979796 - DNA, 120 bp, Artificial Sequence
  ENSG00000267650_4 (sequence is synthesized)
ctggatcaggactccactccccaaggctgggccactccatctccttcttaccggcatcatgatcacagtgcccggtgggcctcggatcccatcaatgccggggattcctgggaggccagc

SEQ ID NO: 979797 - DNA, 120 bp, Artificial Sequence
  ENSG00000267650_5 (sequence is synthesized)
agggccctgagagagggatgggggaagagaggtggagacagggagagagggagagagagagcgaggacaggggaggcacagaaggatgagtcagaaagagagagagagggagagatggag

SEQ ID NO: 979798 - DNA, 120 bp, Artificial Sequence
  ENSG00000267650_6 (sequence is synthesized)
agagacacagaatcaaagagggatcatggcaaggaaagagagagaagtagagagaagtggaaaggaaaagacagagatggaacagagacaaagagaaggggagagagggatggagaagga

SEQ ID NO: 979799 - DNA, 120 bp, Artificial Sequence
  ENSG00000267650_7 (sequence is synthesized)
tgggggcagatggagagacatacagagacagaaacagagagacagagagagatagacagagacagaaaagccagtgaaagacagacagagatggagaaatagagagagaggcgaacatag

SEQ ID NO: 979800 - DNA, 120 bp, Artificial Sequence
  ENSG00000267650_8 (sequence is synthesized)
agagatggacggagggagagggacagagaccaacagagagagacagaagagagacagagacagagtcacaacaggagaaagacagagataaaagacactcagaaacagagacaggcaaaa

SEQ ID NO: 979801 - DNA, 120 bp, Artificial Sequence
  ENSG00000267651_0 (sequence is synthesized)
gctgggaatatgctgggggaagacacaggccttgtttcaaaacaatctacctacttgtcatctggacactgtcctggctacttcagggacaccattccagttaaccttcgcagcaatcct

SEQ ID NO: 979802 - DNA, 120 bp, Artificial Sequence
  ENSG00000267651_1 (sequence is synthesized)
gggccctattttacagatgagcttatatgctgtatgaaagtcacgtgaaccccagaactgggatttgaacccaggtctgccctatggcagacgccgtgtatgtaatcttcatattacatt

SEQ ID NO: 979803 - DNA, 120 bp, Artificial Sequence
  ENSG00000267651_2 (sequence is synthesized)
ggaaaaagctacctattcaaggcacatattcaaggcataatggctcctgcctcaaaagcctccttgctgactgtgcttccaagcctcaaacagagacacacagcctatccacagggcaga

SEQ ID NO: 979804 - DNA, 120 bp, Artificial Sequence
  ENSG00000267651_3 (sequence is synthesized)
aaagtgaagtcaggccagtcctggaaaggctcagatctctctggcctcagatccctcctctgcaaagtgagcaggcagcctgggtctcagggatttggcccagcgtcagtgtccctgaag

SEQ ID NO: 979805 - DNA, 120 bp, Artificial Sequence
  ENSG00000267651_4 (sequence is synthesized)
ctctctgccaagtgccgggaaagggcactggagaagagaggtcagaggagatgcatgactgtgagtaccctcatccttgctctgggtatgacagtcaccctggaatgagggagcttggca

SEQ ID NO: 979806 - DNA, 120 bp, Artificial Sequence
  ENSG00000267651_5 (sequence is synthesized)
aagggttttatcctccactgtattttgctcttgattctgggcaggatccagctcctgccttgccctcagtgctgagtgaccttaagaatctctgggctcaaagcatcccctttgagagta

SEQ ID NO: 979807 - DNA, 120 bp, Artificial Sequence
  ENSG00000267651_6 (sequence is synthesized)
ttatgtgtcttcagcattgacttcaatatctggcatggagtaggtgctcaccagtgtttgctgaatgcatgagaagaggtggggagtggaagcggggatgccttccacaggcctcttctg

SEQ ID NO: 979808 - DNA, 120 bp, Artificial Sequence
  ENSG00000267651_7 (sequence is synthesized)
aagcaccctgggcctggcccactctttgcagggcccctctgccccatgttgccctaactctgaacagggatcaaaagaaagcctggtggttcaggtcttcccagtactctgggagctcct

SEQ ID NO: 979809 - DNA, 120 bp, Artificial Sequence
  ENSG00000267651_8 (sequence is synthesized)
ctggccatccaaattctccctgtccttaagtcctagtccagggtccacctactccagggggtctactggaaacagagcacctgttttctgactttctagtgccctgagtgggaaccactt

SEQ ID NO: 979810 - DNA, 120 bp, Artificial Sequence
  ENSG00000267651_9 (sequence is synthesized)
cactgggctcttgttcccatgctgttgtgtgttgctttgtatgtagttcttggcctacctaatggccctgaggatcagaagtaaatggtctctgtttccaatctgtctcctaggagtgga

SEQ ID NO: 979811 - DNA, 120 bp, Artificial Sequence
  ENSG00000267651_10 (sequence is synthesized)
ctggtcaaagagagtaggcaggggcaaagtagaagactaaggatttaaacgcaatgtgctgaaacatcaatggatgataaaacaagtgggtaaaaaaaaaggtatgagaaacaatattta

SEQ ID NO: 979812 - DNA, 120 bp, Artificial Sequence
  ENSG00000267651_11 (sequence is synthesized)
catagcctcaaagtatacccccacaaaatacttatacattacaaagggaaagttagtaattttattatacaaggagaaacctggcagataccaccttaaccaggtgatcaaagtaagtat

SEQ ID NO: 979813 - DNA, 120 bp, Artificial Sequence
  ENSG00000267651_12 (sequence is synthesized)
catctggaatgtaatatgtaacaaatgctatcatgggcctcctggtcagatgtgttcaaaaggagacagtgtcacttattcttgctgagaatgcataaccagaatctaatcataaggaaa

SEQ ID NO: 979814 - DNA, 120 bp, Artificial Sequence
  ENSG00000267651_13 (sequence is synthesized)
caagacaaacccaaaatgttctatgaagtaaatggcttgtgctcatttaaagagacaagacaactaaatgtaacttgtgatccttggccagaatttctttcttttttttgtttttgtttt

SEQ ID NO: 979815 - DNA, 120 bp, Artificial Sequence
  ENSG00000267651_14 (sequence is synthesized)
ttggttacaaaggatattagttcaacaactggcaacacttaaataagatcaggtactgtgtcagcattgatttcttaattttgatacctgtactgtggttatataagaggctgtccttgt

SEQ ID NO: 979816 - DNA, 120 bp, Artificial Sequence
  ENSG00000267651_15 (sequence is synthesized)
ttaggaaatatatactgaactttttggggaaataaggatattaggtcagcaatttactctcaaatgtttccagaaaaaagtaataatacagtgtttatatgtgtgtgagagagtatgata

SEQ ID NO: 979817 - DNA, 120 bp, Artificial Sequence
  ENSG00000267651_16 (sequence is synthesized)
aagcaaacaagttaaatgttaacacttggggaatatgagtaaagggtataaaagtattccttgtgttatttctaaaacttctctgtatgtctgacttcaaaataaaatgtatgaaaaaaa

SEQ ID NO: 979818 - DNA, 120 bp, Artificial Sequence
  ENSG00000258784_0 (sequence is synthesized)
tgtgctgcttggagcatcttctgctatcttgtatccattcagaagctgcgttgaagatggcacagcagaatgatgctccctgagaagaggatcttcaattcatttatgcctcccggagct

SEQ ID NO: 979819 - DNA, 120 bp, Artificial Sequence
  ENSG00000258784_1 (sequence is synthesized)
gaggaagaaatcagaagaaaaatggaagacaaaaagagacagaactctttgcagtaggggcatctttttaaggaagctcagaatagccctccagaaccatttacccagacctcttcaatg

SEQ ID NO: 979820 - DNA, 120 bp, Artificial Sequence
  ENSG00000258784_2 (sequence is synthesized)
ttcaaacatgagcctgtgaagctcccagttcctccttttctcaattaagctataattagcagaatagttgttcttagatactttggtgaccttggaaatataagatattccagaaataga

SEQ ID NO: 979821 - DNA, 120 bp, Artificial Sequence
  ENSG00000258785_0 (sequence is synthesized)
agggaccatggggattgaagggcttgcatgaatatcagcagcagcttcaagtggagaatctttcatcagaaaaggagaaaaataagtagcctaaggagatttgctagtttgagtcctggg

SEQ ID NO: 979822 - DNA, 120 bp, Artificial Sequence
  ENSG00000258785_1 (sequence is synthesized)
agatgagatggggaagatgggcccaagctgcaacatgaaggtccatgatgaacagttggcatctcctacagtgcctgccacttggtaatgttcaatgcagccaagggagctaaggtaatg

SEQ ID NO: 979823 - DNA, 120 bp, Artificial Sequence
  ENSG00000258785_2 (sequence is synthesized)
gggacaccatggataatggaaagatctacggcaaggctggctgtctgccctgtctaaggaggacgtactggaccatcctgctctgcacatccagatgtgtccatgaatacatccataaaa

SEQ ID NO: 979824 - DNA, 120 bp, Artificial Sequence
  ENSG00000258785_3 (sequence is synthesized)
cgatggcctgtggaatcctataggaaaatgatccagagcctgggcggtcagaaggaacaaacacttgatttacaaaataaatcttctatgtttatgttttaaagacacacagaggaaaaa

SEQ ID NO: 979825 - DNA, 120 bp, Artificial Sequence
  ENSG00000258785_4 (sequence is synthesized)
atataacttgagattttcccagggtttatatactcgttagagttggaaacatgaaaatggcaatttgggatgtctctttggagtcaaaaaccttataaaaatataatgtactttctctct

SEQ ID NO: 979826 - DNA, 120 bp, Artificial Sequence
  ENSG00000258785_5 (sequence is synthesized)
gagccaccgcgacgggccgccatccctaccgtttacagacagcgtccatctcactggtgggtccctatgcagtccaacttgctccacgtctgaatgtcagtcctagatacaaagcagaga

SEQ ID NO: 979827 - DNA, 120 bp, Artificial Sequence
  ENSG00000258785_6 (sequence is synthesized)
agtttaaagtagggaatggcttcttttttccttttacaaaacataatgatggtaagacacaatattggagctgggatgaaggagaagtagatataaagatatggaggggcatcccttaag

SEQ ID NO: 979828 - DNA, 120 bp, Artificial Sequence
  ENSG00000258785_7 (sequence is synthesized)
ggatataaatagtttcacagatgaaatgcctaaaggagagagaggagagacagatgaggagacaattatctcaaaggaggaaaatggtcaaaaggcaaagaataatgtgtgtgaactctc

SEQ ID NO: 979829 - DNA, 120 bp, Artificial Sequence
  ENSG00000258785_8 (sequence is synthesized)
gggcgggcctggaaaaagaaccattagtgctcactccaggccacagactccgaccggaactgacagcgcggcctccaggattgaagccatccctggcttgaagcctaaggagatttgcta

SEQ ID NO: 979830 - DNA, 120 bp, Artificial Sequence
  ENSG00000258785_9 (sequence is synthesized)
gttgctggcagcaccttctgcctgagtattgctcgtgcccactgggcttgttccgcccacttggcccggtaggctgtgcttggctcccgccaccagcccagatcccacacctgcccaggg

SEQ ID NO: 979831 - DNA, 120 bp, Artificial Sequence
  ENSG00000258785_10 (sequence is synthesized)
agagctaggcgcggagccgcaaggggtgtgtgggtgaacgagcgcagggaccggcaacagccatacataccggctgctgcagtggggctggcagctccaggcgccagcacagttgtggct

SEQ ID NO: 979832 - DNA, 120 bp, Artificial Sequence
  ENSG00000258785_11 (sequence is synthesized)
ctgcgtgaggctggaccagatggacggcatgtggattctgctgtgggcacctgtttggatgaagggaacgaaggtggtggcgcctggaagcttgaagatgccaggaaccatagaacccca

SEQ ID NO: 979833 - DNA, 120 bp, Artificial Sequence
  ENSG00000258785_12 (sequence is synthesized)
aagggagtgtcacagccctggctcagggagaccctaggtctgggatcctcaaaggaacacagctcttttctccttctcgtcacccgcaatgtggcaagcaagggagcgtgtttcagccct

SEQ ID NO: 979834 - DNA, 120 bp, Artificial Sequence
  ENSG00000258785_13 (sequence is synthesized)
gtttgtgttaaagctcttttagtacctccaggcgggtcctgagttcttgtcctgcgtccagggagatgaggtattgcggacaaatggaggcttagcaagatggagaagagctttattgag

SEQ ID NO: 979835 - DNA, 120 bp, Artificial Sequence
  ENSG00000258785_14 (sequence is synthesized)
tggcagaacagctctcagtagacctgaagcaggtagctcctttctgcaggaaggttgtctctcctttccgcaggaaggttgtcccaacaagttgagaagacgcacagtgggcagctcctt

SEQ ID NO: 979836 - DNA, 120 bp, Artificial Sequence
  ENSG00000258785_15 (sequence is synthesized)
ggaagtgcatgctgattggtccatgggtggccatgggcgggcctggaaaaagaaccattagtgctcactccaggccacagactccgaccggaactgacagcgcggcctccaggattgaag

SEQ ID NO: 979837 - DNA, 120 bp, Artificial Sequence
  ENSG00000258785_16 (sequence is synthesized)
ggcatctgcaaggcattctaaggacctctaggagcacacagttcaatccagcaacctctactaagggtcacaaatgcctatgtccaagtctatgctggccctgtcaaagtcccgtctctg

SEQ ID NO: 979838 - DNA, 120 bp, Artificial Sequence
  ENSG00000258785_17 (sequence is synthesized)
ctctgcccccagggtcttacgggctacaaatgggacaactttttaaatactcacacatgttgtgatcatttgtaagtccaagtcacaaaaacagcagaagtagaaagttttaccttagag

SEQ ID NO: 979839 - DNA, 120 bp, Artificial Sequence
  ENSG00000258785_18 (sequence is synthesized)
acttgctccttctttcttctaccatttctctttctccttcattgtctcctctgcttacagccagaatccatatcctgttccaagatgcctgttccaaactcccatcactaaagtttaggt

SEQ ID NO: 979840 - DNA, 120 bp, Artificial Sequence
  ENSG00000258789_0 (sequence is synthesized)
gcgtgccctactggcggtggagaggttgggcgggccccataggatgcccgctttggagccacaggacctcaaaatacgctccttacaacgtgttttatagagcgaagtctcgctatgcca

SEQ ID NO: 979841 - DNA, 120 bp, Artificial Sequence
  ENSG00000258789_1 (sequence is synthesized)
cccaggctggagtgcagtggcgccatcgtagctcaccgcagcctcgaacacctgggctcaagcgatcctcccgcctcaacctcccgagtagctgggaccacagagattgcctgttgggga

SEQ ID NO: 979842 - DNA, 120 bp, Artificial Sequence
  ENSG00000258789_2 (sequence is synthesized)
gaagagaagcggctttcgcagtttcacgctaggacgggctgagctgggaatcgatcccaaattccacagtcccagtcctctcctgggtcctgctctcctgactgcgtctcaggcccagag

SEQ ID NO: 979843 - DNA, 120 bp, Artificial Sequence
  ENSG00000258789_3 (sequence is synthesized)
gtgatggggcacttagggttagggaatggcagacctggagaaaagggttccgctactaccctcggctttgccaaacttaacattttgaaattccattccacaaatgtgtattgcgtctct

SEQ ID NO: 979844 - DNA, 120 bp, Artificial Sequence
  ENSG00000258789_4 (sequence is synthesized)
gggaacaagacagcgtaatgagcatcgtgagaaatctaagacgaatccctaaaccgtcgctgtctttaaagagattacaaccatgctataattacatacagagctgtatctctaataagg

SEQ ID NO: 979845 - DNA, 120 bp, Artificial Sequence
  ENSG00000235965_0 (sequence is synthesized)
agaaggtacctgcttcccctttgtcttccaccaggattgtaaattacctgaggcctccccagccatgcggaactcctctatgttgagtactgagatccagcataaaacaggagacttgtt

SEQ ID NO: 979846 - DNA, 120 bp, Artificial Sequence
  ENSG00000235965_1 (sequence is synthesized)
tcctgcatgaaacctgcagtattctgaggattaaagatattagatcaacaaccagagaaaagaattatttaagtgtttatgcaaaaaactgtagagagtcctatggaaatacaccagtga

SEQ ID NO: 979847 - DNA, 120 bp, Artificial Sequence
  ENSG00000235965_2 (sequence is synthesized)
aatagaatatgcacagaatgtgatacactgtacaagataagtgcaccaaaaccatatatttgaactgtgtgactagtatatgacaaagctagagagatttgaattgtgcttctaaaataa

SEQ ID NO: 979848 - DNA, 120 bp, Artificial Sequence
  ENSG00000235965_3 (sequence is synthesized)
tgtgtaatatagctatactaaaatgtatatatttttatacataatcacaggaaacacaactcatagtcaattatgttatcatattttcccattcaaaaatgtggtatgaaagtattttgc

SEQ ID NO: 979849 - DNA, 120 bp, Artificial Sequence
  ENSG00000235965_4 (sequence is synthesized)
aaattcagtatcaagtagatagtttgtcaggtgtttttacaccacacagaataaatcttatctttgctagacaagaataagtgtgctagttcttttgtattttgacttttaagtttgagg

SEQ ID NO: 979850 - DNA, 120 bp, Artificial Sequence
  ENSG00000235965_5 (sequence is synthesized)
cagaagtgccacggaaatcaacttctgactaggggagataaaataaactctccaaagagctgagcctgtcaaagtagatgaaaaaaacatctctctcgaatgctcaaataataaatgctg

SEQ ID NO: 979851 - DNA, 120 bp, Artificial Sequence
  ENSG00000242568_0 (sequence is synthesized)
cacttaaagactggactcagaggaagtgtaatgggtgaacactcaaagcacaggaggagaggtaatgctgttatttcatcagtgacaactctaccatggagacgctgattttagaccttg

SEQ ID NO: 979852 - DNA, 120 bp, Artificial Sequence
  ENSG00000242568_1 (sequence is synthesized)
gaagttgtatgggactatcacaggaccatggccaacctttggagtaggcactcctgggtccctggccccatctccatttctactttctgctccctgaagctaaaatctgttgagttcacg

SEQ ID NO: 979853 - DNA, 120 bp, Artificial Sequence
  ENSG00000242568_2 (sequence is synthesized)
tgcagcaggtttactccatcacatccagatcaataaccattaacattgtgcatagatggagtcctcccagcactctacagagtgggctttgtccctcatctcttctggaagtgctgatta

SEQ ID NO: 979854 - DNA, 120 bp, Artificial Sequence
  ENSG00000242568_3 (sequence is synthesized)
aaaaaaaaattcctgtagatctcaagcccctggattcttagaaaccctctgttccaaacaacccaatctactcactgcccctaactgcctggttcttaaacaagagtgtgtttcaatatc

SEQ ID NO: 979855 - DNA, 120 bp, Artificial Sequence
  ENSG00000261173_0 (sequence is synthesized)
agaaaatgggccccggctcccgcaggaggcccgcctggcgcgcagatgtcgttattagaatccgggacgtcggtggaccctctgggtctggctccctcggggcttacgatgaaaaaaact

SEQ ID NO: 979856 - DNA, 120 bp, Artificial Sequence
  ENSG00000261173_1 (sequence is synthesized)
ggggggcgcgtgtgtgtgtcatgagacttccatttctgaaggggtcctgttccatatcctcaagaagggagtgctgcacagagaggccatgaggaatctaagcagacaggccttgctggg

SEQ ID NO: 979857 - DNA, 120 bp, Artificial Sequence
  ENSG00000261173_2 (sequence is synthesized)
ttttgtccagtcacatttttacatggttgtcaattatgcctgtccagtaaagtctccataaaaggcccaagaagacagagttggagttcctggatagctgaacatgtggaggttcctgga

SEQ ID NO: 979858 - DNA, 120 bp, Artificial Sequence
  ENSG00000261173_3 (sequence is synthesized)
gggtggggcacctgggcataaaagctctgagccccttccctcataccttgctctgtgcatccctccatctgtatcctttgtaacattccttataataaattggtaaatgtgtttcccaga

SEQ ID NO: 979859 - DNA, 120 bp, Artificial Sequence
  ENSG00000282816_0 (sequence is synthesized)
tgcaccgcgtggccttcaagctgcgcgcgaatctcgcgcagcgccgacgtcacgtcgcacttcagggcgtcgcgcgtctcggcctgcatctgcgcctgcgcggcgccggagccctggatc

SEQ ID NO: 979860 - DNA, 120 bp, Artificial Sequence
  ENSG00000282816_1 (sequence is synthesized)
ttcttctgcaggtccacgcgcgccgcctcggcctcctgcgcgaagcgcgccagcgcgcgggccgccgcctcggcctcctctcgctgccgggcctcgtcgtctaggcgctggcgcacgtgc

SEQ ID NO: 979861 - DNA, 120 bp, Artificial Sequence
  ENSG00000223883_0 (sequence is synthesized)
gagaagaggacaactggctacaaatatcaacaggctttaacagtcttctttccttcaagtccagttctttgaaagtccaaatttgctctgaactgacttcaagcaagtgcccactcttga

SEQ ID NO: 979862 - DNA, 120 bp, Artificial Sequence
  ENSG00000223883_1 (sequence is synthesized)
acaaattactgaggctggaggataaagacacaaattggccaaacttggattacctgccttctgcatcttaaaggagtcagtcccaactacaaatttaagaggatcacagaaacacccaca

SEQ ID NO: 979863 - DNA, 120 bp, Artificial Sequence
  ENSG00000223883_2 (sequence is synthesized)
aacttacgaggatcacagaaaacacccctacaccaacttatagccaatctattcaacctgcattgttagcagctgaaatgtggatgtgatagaagaagatgaactatttctgaattcaag

SEQ ID NO: 979864 - DNA, 120 bp, Artificial Sequence
  ENSG00000223883_3 (sequence is synthesized)
aattcaagatggactctgaattgagaagatagatgccttggaccttaacactattgagctatcaactaaactgcagaccacttaccttcatatttatgaagtcttgctctgtcgcccagg

SEQ ID NO: 979865 - DNA, 120 bp, Artificial Sequence
  ENSG00000223883_4 (sequence is synthesized)
caggtgtgagccactgcgcccggccatatgagccatatttcttctgagactctgcagggaactgcctggagcatttctgagcatacccgaatgtatataggatacattttgagaaacacg

SEQ ID NO: 979866 - DNA, 120 bp, Artificial Sequence
  ENSG00000223883_5 (sequence is synthesized)
gatacattttgagaaacacgatcaccatagcttatggctgtgaaacctcagttgtaacatcaataaaatgggaagaacaaaaaagttgctgtgaagataaaatgagtaatgatggaatag

SEQ ID NO: 979867 - DNA, 120 bp, Artificial Sequence
  ENSG00000223883_6 (sequence is synthesized)
tctgtggtcgagtgcagaaatactattacctgttcctggaggcaaagattaaaggaatagacaccttcctcagccagaatgacccaggccaggagccacagtgtcaacttggaaaatttc

SEQ ID NO: 979868 - DNA, 120 bp, Artificial Sequence
  ENSG00000223883_7 (sequence is synthesized)
tccttcctcatctccacatcatgtctgcagccttaactgcttgacacctgacaactactcttatctccattgtgttgttttgttttgtgtcatgatctttttgaatgtgcaattgtaatg

SEQ ID NO: 979869 - DNA, 120 bp, Artificial Sequence
  ENSG00000223883_8 (sequence is synthesized)
ggaaaatgagaatttcagatgcctgctgagatctgtggatggagtactttgtccacagggcactgagctctggccaaaccaaagacttgtactgcatagatgttcttcaatctctatagc

SEQ ID NO: 979870 - DNA, 120 bp, Artificial Sequence
  ENSG00000223883_9 (sequence is synthesized)
tgggaactctcttctttttgtagtgcttgcccattgtagatgtttaataagtttgcattacgtacaggagaaactatgaaagtcccttataaatataacaaccataatgataaaaggaaa

SEQ ID NO: 979871 - DNA, 120 bp, Artificial Sequence
  ENSG00000223883_10 (sequence is synthesized)
aagagactcaagtactttgaagtagaagacatttaatgttcatctgggtgaaaccgcctttgcaaaattaggactgagacagtgaaagagatctaaactaactgactctattttgcttct

SEQ ID NO: 979872 - DNA, 84 bp, Artificial Sequence
  ENSG00000223883_11 (sequence is synthesized)
gcaataacagccctttcccaaaacaaacctccttcttgcccagggactagaatgccgttgtaggactaacaaattagccacaag

SEQ ID NO: 979873 - DNA, 120 bp, Artificial Sequence
  ENSG00000223883_12 (sequence is synthesized)
caagattagaaattatggtttagaagtcatgcatctggaagatacaagattctgaccctccctaaactgttcctaaagttagtgcttgcgatatttggcggatattttcctgtgtttgat

SEQ ID NO: 979874 - DNA, 90 bp, Artificial Sequence
  ENSG00000223883_13 (sequence is synthesized)
tgctcttgtgggcacagcttcagttccctatgatttcatctcctacctgaccaatcagcactcccagctcactggcttccccaactgatc

SEQ ID NO: 979875 - DNA, 120 bp, Artificial Sequence
  ENSG00000223883_14 (sequence is synthesized)
ttcatctcctacctgaccaatcagcactcccagctcactggcttccccaactgatcaagttgtccttaaaaactctgatccccaaatgctcaaggagactgatttgagtaataataaaac

SEQ ID NO: 979876 - DNA, 120 bp, Artificial Sequence
  ENSG00000223883_15 (sequence is synthesized)
ttgttttcttaaaagcagacctgagaggctctgactccttcaaatatactgatctccttccaataggcaatgtgctggtcttatttgtgggagagatatgcagctgatccttctgatcca

SEQ ID NO: 979877 - DNA, 120 bp, Artificial Sequence
  ENSG00000223883_16 (sequence is synthesized)
tttaaccaacagtggaaaaaaaaaatcatggctggaattgttcttttaccttggaaacaaaagtttcacagagctagtgggcatgatggctgtgacaaatagctattggtaggatagtat

SEQ ID NO: 979878 - DNA, 120 bp, Artificial Sequence
  ENSG00000223883_17 (sequence is synthesized)
ggagccagcacatggatatttcagaatagccactctagtcgaggaggcagaacagcaaggcataaggtaaagtgagcttggaggaaagcatctttagtaagaaaagcctttccctggttc

SEQ ID NO: 979879 - DNA, 120 bp, Artificial Sequence
  ENSG00000223883_18 (sequence is synthesized)
tactggcccctctgggatatgattcctatgataaacaatatgctctgttaattcttttgccctgtgtgtctcatgtaaataacagtgtcatttatagaatgcctaaccatggtgcctaaa

SEQ ID NO: 979880 - DNA, 120 bp, Artificial Sequence
  ENSG00000223883_19 (sequence is synthesized)
caggcactgcatacgttcatttaaagtcccttctatcagatatttctatcatatccttcctgttttacagatgaaaactatgagactcaagagattaagtaactttccccaattcacaca

SEQ ID NO: 979881 - DNA, 120 bp, Artificial Sequence
  ENSG00000223883_20 (sequence is synthesized)
gctagtgcatatgtattaggattcaaatccacatgtatctgattcctgtattttaattacaatacaaagctgtcccatttcctttctgctttggctattctctttcctaataattctcag

SEQ ID NO: 979882 - DNA, 120 bp, Artificial Sequence
  ENSG00000223883_21 (sequence is synthesized)
gtttgattgtcaagttactatccaagagcagaattctttctggagcctcctcactaaagttctctgtacttgtggatcattaagacaaggacaccaactgagaactgttactaattgctt

SEQ ID NO: 979883 - DNA, 120 bp, Artificial Sequence
  ENSG00000223883_22 (sequence is synthesized)
gaccacaggttccaatgcaaagtggcaatgctgatggacctctgtagaaatggatttttttaaagtaactttgggcaaataaatagtattaactctgtgacactgactgagcttaaatta

SEQ ID NO: 979884 - DNA, 120 bp, Artificial Sequence
  ENSG00000223883_23 (sequence is synthesized)
gtctcaagcataatgtttaatgaaaaacagagacacaaagatactatctgattttttttaagtggacccactgctggatctgttttaggtctaggcacatgcttagagctctgagagctg

SEQ ID NO: 979885 - DNA, 120 bp, Artificial Sequence
  ENSG00000223883_24 (sequence is synthesized)
tagttataaatgtcttatatttacagcatagcatgatatacttgcagtattctatactggaatagatcttaaattattgatgtttggtgatcatacacattccaagcctcataggcctta

SEQ ID NO: 979886 - DNA, 120 bp, Artificial Sequence
  ENSG00000223883_25 (sequence is synthesized)
ggccaggacattgatgttatgtgttcctattatactgtttataataggaaatacagtatttttccgattttaaagtctcaaagcaacaatgagaggaatctaagaagatgagcaagagag

SEQ ID NO: 979887 - DNA, 120 bp, Artificial Sequence
  ENSG00000223883_26 (sequence is synthesized)
tgaatcccctgcctacggttccttcttgctccagtacagccccctttgaagctgctaaggagcagaccctatgcctaggaaagcaggacttcaggtcttttgaatttaaaaacttactct

SEQ ID NO: 979888 - DNA, 120 bp, Artificial Sequence
  ENSG00000223883_27 (sequence is synthesized)
ggttgcttttactggcagcattcactttttggttgagtaagagcaaggcactgatggagaggagaacattaagaaatataaaatataatctctaacccaagaaacccagtcaaggtgggg

SEQ ID NO: 979889 - DNA, 120 bp, Artificial Sequence
  ENSG00000223883_28 (sequence is synthesized)
agtgggagaatgttttacatatgtatagtgtttaacagaagcacttgtaaaatgttgagtgccagagttgtggggtgaaatttcagaggaagggtaaagcatgtgatctcacacgctatg

SEQ ID NO: 979890 - DNA, 89 bp, Artificial Sequence
  ENSG00000223883_29 (sequence is synthesized)
tttcagaggaagggtaaagcatgtgatctcacacgctatgttctagccacaataatagctcataggtataagataattttccagaggtc

SEQ ID NO: 979891 - DNA, 120 bp, Artificial Sequence
  ENSG00000223883_30 (sequence is synthesized)
ctctaagctctaggtttaaaatatctggttttgaaatgcactttcaccaccttgtagctgaattgtgttgtctacatttttttgtgccactatctccttatctgttttaaaaaaaatact

SEQ ID NO: 979892 - DNA, 120 bp, Artificial Sequence
  ENSG00000223883_31 (sequence is synthesized)
aattttaaaaagccttattgtattaaatgtgaggagtaaatgaaataatttatataaagatctcagtgtagagcttggcacatggaagattcagtaaataatactgtggcagatattgtt

SEQ ID NO: 979893 - DNA, 120 bp, Artificial Sequence
  ENSG00000223883_32 (sequence is synthesized)
gattgcttacttaatattcattcactccttctttgctgacaaaactccagattggggagcaatgtgcccagatagacgctcatatttcagtttcccttgagccaacagtagccacacaac

SEQ ID NO: 979894 - DNA, 120 bp, Artificial Sequence
  ENSG00000223883_33 (sequence is synthesized)
ttcatggcttggttctgtgtccttcattgcttggttctgtgtgcagctgtgcttaacacatggtagatggaagtctcctgaatgttttgggggagggtttgctttcctattaaaagggga

SEQ ID NO: 979895 - DNA, 120 bp, Artificial Sequence
  ENSG00000223883_34 (sequence is synthesized)
tatatctgcctggcatcatccctttctcatttttctttccttgaatgtggatctaatgtcaggagctgaagctaccatatgtgacccaagcattggggctcagaaaatgataacacaaag

SEQ ID NO: 979896 - DNA, 120 bp, Artificial Sequence
  ENSG00000223883_35 (sequence is synthesized)
tatggcactttggcatgctgagtactttgaactaaaggagatgggaaagcctcaaaagcaaaatctctctctgaccttctcctgctctctttctctcctgaagtgagtcgtagaattcct

SEQ ID NO: 979897 - DNA, 120 bp, Artificial Sequence
  ENSG00000223883_36 (sequence is synthesized)
cttgcctagagtgggtcatagaaactagaaccctttccccaaagcaagccattaaacttagaaaggtcactcttttctcttctcccttaaagaacctcatatcagaggggtcctggccca

SEQ ID NO: 979898 - DNA, 120 bp, Artificial Sequence
  ENSG00000223883_37 (sequence is synthesized)
tatctaggaggaaggaattctacagaaacccagaagaatctgaacagacaggacttactgggttttcctctgtcttttaccactcaatcaccctttttgtctaatcacatttcaacatgg

SEQ ID NO: 979899 - DNA, 120 bp, Artificial Sequence
  ENSG00000223883_38 (sequence is synthesized)
atgtccactcttcatcaaacctaagcataaaagtagttttccctgggtcttttggtcttcatttctgaaggctcctgtgtcacataaaactttgattaaacaaatttgtcatgcttttct

SEQ ID NO: 979900 - DNA, 120 bp, Artificial Sequence
  ENSG00000223883_39 (sequence is synthesized)
cttgttaacctatcttttattataggaggatcaaacgtaacacttacaatgggtgagtaagtgctacgtttgctcctcctataatatcaagttatcacacccctttcctgcccctacagt

SEQ ID NO: 979901 - DNA, 120 bp, Artificial Sequence
  ENSG00000223883_40 (sequence is synthesized)
ttctggtgcccaatgtggggtcattgaaacacctcacaccagatcttgggacaactaacaaaaaatcaacaacaacaacaacaacaacacacatttttttttttaaaccaaggtcacctc

SEQ ID NO: 979902 - DNA, 120 bp, Artificial Sequence
  ENSG00000223883_41 (sequence is synthesized)
aggtcacctctcctggatctctgcctgtagtgcccaattaagaatggaaggaggagatttttcagcttttgaagtctgcataccttcaaggaaattcttcaaaaacagccaagacatttt

SEQ ID NO: 979903 - DNA, 120 bp, Artificial Sequence
  ENSG00000223883_42 (sequence is synthesized)
aagatgaggagctacagaacagggtacatgccccacagtcttcaatactttttattattgtttcaagaaaactggataaattcattctgaacatcacagacttgaaagtcattgttacca

SEQ ID NO: 979904 - DNA, 120 bp, Artificial Sequence
  ENSG00000223883_43 (sequence is synthesized)
tgcctttgagaatgcctatagttatcattgccatcatctcaaaggagaagaattctttaactcttattgtatatgcaattttgaataaaaaaatcaagttgcattgttattgaaattaaa

SEQ ID NO: 979905 - DNA, 120 bp, Artificial Sequence
  ENSG00000223883_44 (sequence is synthesized)
gggcaagatcatgagtgaagactatcaggatccttctagtccatcatctaagcctggtaattcctcctggtcagcatatcctgttaatattatatggcatttaggctgtagcctgctttc

SEQ ID NO: 979906 - DNA, 120 bp, Artificial Sequence
  ENSG00000223883_45 (sequence is synthesized)
ctctcaaagcagcactcccagtggctcacacagtttgcttggtcatcagccaacctactggggaagctgcctgctggtttgaaagagcacccaacgatctggaagactgtctactgcaac

SEQ ID NO: 979907 - DNA, 120 bp, Artificial Sequence
  ENSG00000223883_46 (sequence is synthesized)
ccagatccacggagcccttgaattgccccttggcaaccttaaaaggacctagaagtatgaaaaaatcatcaatgtcacttgggatggactttgaacaagatgagccatatttcttctgag

SEQ ID NO: 979908 - DNA, 120 bp, Artificial Sequence
  ENSG00000223883_47 (sequence is synthesized)
actctgcagggaactgcctggagcatttctgagcatacccgaatgtatataggatacattttgagaaacacgatcaccatagcttatgtgctcaagatgagactttatttccccgcatta

SEQ ID NO: 979909 - DNA, 120 bp, Artificial Sequence
  ENSG00000223883_48 (sequence is synthesized)
atgcaatggccttattctccgttcccacaatggactcaagcagtcaatgattggttaaattgttcattctgcctcttgcctgggaggcttttgctgtgagcatgcatcaagcacaaaatc

SEQ ID NO: 979910 - DNA, 120 bp, Artificial Sequence
  ENSG00000223882_0 (sequence is synthesized)
tcttaaccctgtccagaaaatctgctgagtcaccgagtatcaatcaagagaaaaataatgcagagctgcaaaatgctaatctccttcctcctgctctccttcctaacagcaagccgactc

SEQ ID NO: 979911 - DNA, 120 bp, Artificial Sequence
  ENSG00000223882_1 (sequence is synthesized)
ctggggaccctatccccagaaatttcacaggaccacacaccagctccacagcctccaccttctcctgctctgcaagccatccttgggtttttttctgcattgcttcaagactaatctaag

SEQ ID NO: 979912 - DNA, 120 bp, Artificial Sequence
  ENSG00000223882_2 (sequence is synthesized)
ataaaaatctactctcaaacatcgtagccattagggaactgcaaattaaaaccacaatcagataccaggcacatctataggaatggctaaaataaacattataacattgagtactggcaa

SEQ ID NO: 979913 - DNA, 120 bp, Artificial Sequence
  ENSG00000223881_0 (sequence is synthesized)
gacctattccctgccacatgatcctgggggcagatggatagctgatctctgagtgactacagtgaacaaagaaagaaagactcctgccaaaccttgtggacagtcagataattggaatgt

SEQ ID NO: 979914 - DNA, 120 bp, Artificial Sequence
  ENSG00000223881_1 (sequence is synthesized)
ctttgtaaggttgggaagaaggacgatcaagtgggtagctagctccttgcacctctgtggaagagctaaacttcctctgtgaagagcttcaccacagggcccttggcactggggacagag

SEQ ID NO: 979915 - DNA, 120 bp, Artificial Sequence
  ENSG00000223881_2 (sequence is synthesized)
tggcacatttataccaagcacccacttccactttctctctaacacttgaaaactttcacagtactttttcactaaggctactgtcaagtctgaaaaataaagacattgtttcacttagaa

SEQ ID NO: 979916 - DNA, 120 bp, Artificial Sequence
  ENSG00000223880_0 (sequence is synthesized)
gatgtgttacaacttgtccacataccttcacaaatcagaaaagaactaaataggattatatcaacatttgcactctatgtacctattctgaagaataacacaggaaagagattacttgga

SEQ ID NO: 979917 - DNA, 120 bp, Artificial Sequence
  ENSG00000223880_1 (sequence is synthesized)
gactggtctgaaactcctggactcaaaacatatgaatatccagccctggaagctaaaaacaagctttgtgcccaaaaaaagtttatatttttgatttttctacaactaaatggaacaggg

SEQ ID NO: 979918 - DNA, 120 bp, Artificial Sequence
  ENSG00000223880_2 (sequence is synthesized)
tttaactgagaacagttttcaaacacaagtcttagagaagataaggattacaggcgtgagccaccgtgctctgctggacatcatttagcatatatgacaaggtaactgacgaaggacaat

SEQ ID NO: 979919 - DNA, 120 bp, Artificial Sequence
  ENSG00000223884_0 (sequence is synthesized)
agctgtccaatggctcctggagccagagagatggcacccagcatgctgcagtctagcctctcccactgaccacctgagcctgctgaagctggcttatataaggctttggaaagagaaagg

SEQ ID NO: 979920 - DNA, 120 bp, Artificial Sequence
  ENSG00000223884_1 (sequence is synthesized)
gctttggtgactctctggaaatcaggaaaaactgttccaagatgtgtgttagagaagaccagcttccgcaggaatgaacccagaaaacagtctacaactatatttccagcacaggggctg

SEQ ID NO: 979921 - DNA, 120 bp, Artificial Sequence
  ENSG00000223884_2 (sequence is synthesized)
aggaggaaggcactacctcaaagccaggtactctgctcagtgtggggactctaggagtgacatagacacagatgtttcttccccacaaagcttataacccagatgaaaggacagacatat

SEQ ID NO: 979922 - DNA, 120 bp, Artificial Sequence
  ENSG00000223884_3 (sequence is synthesized)
gagttttaactaacttaattctttatacaataaagaggagtactaagtgcatagatcttttaagggcccaggaaaatatttaagacaactacaacaaattattgacaacacaaaattttt

SEQ ID NO: 979923 - DNA, 120 bp, Artificial Sequence
  ENSG00000223884_4 (sequence is synthesized)
agtcaaattttgcaagattttactgaggaggaaggcactacctcaaagccagcaaaagaagagtttctagagaaaggagaggattgatgggttcactggtgctcactggaaactatcaaa

SEQ ID NO: 979924 - DNA, 120 bp, Artificial Sequence
  ENSG00000223884_5 (sequence is synthesized)
tttgtaatgtgagcatcccaacatgcagaggaaccagaagttcaatatttgagctgattaaggatcaatcagccagttccctgggcaggggagagactctgcttccacattatcagggac

SEQ ID NO: 979925 - DNA, 120 bp, Artificial Sequence
  ENSG00000223884_6 (sequence is synthesized)
gctttggtgactctctggaaatcaggaaaaactgttccaagatgtgtgttagagaaggtcaggatctcgtgtttaataagcagttttaggcctgacttctctaaggacagtgtgtatggg

SEQ ID NO: 979926 - DNA, 120 bp, Artificial Sequence
  ENSG00000223884_7 (sequence is synthesized)
cctgttttcccccagtacatagggtcagagtcctgccagcaatagccaaaacatggtagaatcagtcaagagatctaacaaaagtgctcttggaggaagaacttcagagaaagaagcaaa

SEQ ID NO: 979927 - DNA, 120 bp, Artificial Sequence
  ENSG00000223884_8 (sequence is synthesized)
ttttatgctgagaaatcatgattccacactctggagtgagaactctagatagtttactctgtggtcacttactcgtatttctacatagatggaaggtctcggccctggagttctggtcta

SEQ ID NO: 979928 - DNA, 120 bp, Artificial Sequence
  ENSG00000223884_9 (sequence is synthesized)
aaattttgcaagattttactgaggaggaaggcactacctcaaagccaggctgcacagaccagatggagggcctgggttgaagagctagcagaatattctgaattcacagtggtgtgaccc

SEQ ID NO: 979929 - DNA, 120 bp, Artificial Sequence
  ENSG00000223884_10 (sequence is synthesized)
tacaaggaccaatttatatcttcacctcatgtatggattaaataagatagccaatactcaattccggggagtgatagacacatttgtaatcctgcatcagaaagtacaaagcggagtggt

SEQ ID NO: 979930 - DNA, 120 bp, Artificial Sequence
  ENSG00000223884_11 (sequence is synthesized)
ttcccaacagccaaacgtggggtgaggaggagactgagaaaggcttcccacaggggctactgcatgagctgggtcttgaaggaggagtagaccttcccagggatggagacagggtggatc

SEQ ID NO: 979931 - DNA, 120 bp, Artificial Sequence
  ENSG00000223884_12 (sequence is synthesized)
ctttcctctggtccatcctgctccagtatcagtggaactcccagctagaggaagaatgtacttcatttttaactctgtaccagtcttgagatttcctttggcaaaaagcaaaaacaaaaa

SEQ ID NO: 979932 - DNA, 120 bp, Artificial Sequence
  ENSG00000223884_13 (sequence is synthesized)
aagattttactgaggaggaaggcactacctcaaagccagtgttttctggggggcaattcctacattccaggcccgcttcaagaattgatgtgcaacccagcgtagggaagaactgcttct

SEQ ID NO: 979933 - DNA, 120 bp, Artificial Sequence
  ENSG00000223884_14 (sequence is synthesized)
ggactgcacctgaggcagcaccaccggcaacggagccccgccacctgctgtacccgtccaccttctctggttgacctccctggggccagacagcccactcagagtccgtgctccctccta

SEQ ID NO: 979934 - DNA, 120 bp, Artificial Sequence
  ENSG00000223884_15 (sequence is synthesized)
tggagatgaaggagctgtgtccacaggcgtgcacacagggagaacgccgtgggaacctgcaggcagagactgggggtgcatctaccagccaaggaacacccaggactgccagcagtacca

SEQ ID NO: 979935 - DNA, 120 bp, Artificial Sequence
  ENSG00000223884_16 (sequence is synthesized)
ggaagttgcagagcaacacgggcatcctccttaccgctctcagaagattccagccctgcagatacctgaaccttcagtttccaacctccagacctggaagacagtaaagctctgttgttg

SEQ ID NO: 979936 - DNA, 120 bp, Artificial Sequence
  ENSG00000256433_0 (sequence is synthesized)
cagaaaaccaacaaagacagcctcttgatggtggtcttcaaaagatgcaacaggatgcaatggcagttgacaatgggaatttcaactagcaacaatcctgtggcaagtttaccaccctga

SEQ ID NO: 979937 - DNA, 120 bp, Artificial Sequence
  ENSG00000256433_1 (sequence is synthesized)
atatcccagaacttggagtgaagctttgcatcccctgggatggcagagccaagaaaaaccatgaggacggaagcactgtgagtaccggcagggtcagcccaacaagggtcagtaagaact

SEQ ID NO: 979938 - DNA, 120 bp, Artificial Sequence
  ENSG00000256433_2 (sequence is synthesized)
tcccttttcaaaagataaagcggttcacatagacagctgtggtggactctttctgctgcctgtccaacagacttctgcacatttcctaaggacagaaccgcatttttgtactagagcaga

SEQ ID NO: 979939 - DNA, 120 bp, Artificial Sequence
  ENSG00000256433_3 (sequence is synthesized)
cccaatcccaggagccaataaactcattcttctttgcaattgtacaatgacatgcacagggaagtcttcctttccagggtataaagcaccattaggagaaagtttttggtttgccttggc

SEQ ID NO: 979940 - DNA, 120 bp, Artificial Sequence
  ENSG00000256433_4 (sequence is synthesized)
ccttattttttgttttggggattttgcgtgtgacaacatcactcctgagctgtggcagccatcttaccatcatgaggaaaccgccacggggataaaaagccagtcctctgaggacctgga

SEQ ID NO: 979941 - DNA, 120 bp, Artificial Sequence
  ENSG00000256433_5 (sequence is synthesized)
agaaaggacagaacctggctcccaaggcatcactgagacccaaatcaacagtaagtaagcacagcacctactcctgggcttctttttatgagagaaaaaaaaagttcccatttgtgtaaa

SEQ ID NO: 979942 - DNA, 120 bp, Artificial Sequence
  ENSG00000256433_6 (sequence is synthesized)
aatgtctctctttcactcctatcccccaaccaccaaggtccctgctctggaagcaaccaatgttactgtttctgatgcttttccagaggtaatttatgcatattcaaacaaatatatata

SEQ ID NO: 979943 - DNA, 120 bp, Artificial Sequence
  ENSG00000256433_7 (sequence is synthesized)
aatagattcctttgcttttttatttctacagatggtactacagtagtccccccttgtttgttatttttttttcttgtttgtgattttgctttccatggtttcagttatctgctgtcaact

SEQ ID NO: 979944 - DNA, 120 bp, Artificial Sequence
  ENSG00000256433_8 (sequence is synthesized)
gtggtccaaaaatattaaatggaaaattccggaaagaaacaattcatctgttttaaattgtgcactgttctgaacagcatgatgaaacctcaagctgtcctactgagacagagtagggat

SEQ ID NO: 979945 - DNA, 120 bp, Artificial Sequence
  ENSG00000256433_9 (sequence is synthesized)
gggactcgggccccactcgtgccctaccaagaacctctattgtaagctggggtgggggtgtgtggccagtgaggaccccaaccagactgtccagaccttgcaccatgaatcttgctcaag

SEQ ID NO: 979946 - DNA, 120 bp, Artificial Sequence
  ENSG00000256433_10 (sequence is synthesized)
gtactatacccactcatcgcagacccttagagagactaagatgaacaacgtcccaccataaatcttactccaggtgccaaacccactagttgtagaaattaaaataagcagctcccacct

SEQ ID NO: 979947 - DNA, 120 bp, Artificial Sequence
  ENSG00000256433_11 (sequence is synthesized)
tgaatcttactcaaaggagttaaccctatctcccgtatgtataccacaggaccagaagaatgagcgctcctttgccttatcttcattataatactaaaaatcacaccggggtggagactt

SEQ ID NO: 979948 - DNA, 120 bp, Artificial Sequence
  ENSG00000256433_12 (sequence is synthesized)
aacatgctaatgagacacacgatgcataaagaagcatgttatcaaactgaacaggtgccaaaatttcctcatctctacctgctcaaactcactcccttcccactttagttcctttaattc

SEQ ID NO: 979949 - DNA, 120 bp, Artificial Sequence
  ENSG00000256433_13 (sequence is synthesized)
tcctttagttcctttagttctcttgagtctcttccaggagccagccagagaattctctctctcgtgctgcctcccttatgccctgcataagctctaataaagccttgtctgggaaaactc

SEQ ID NO: 979950 - DNA, 120 bp, Artificial Sequence
  ENSG00000260388_0 (sequence is synthesized)
ttttatcttggtagcaaggtagcaagacttttccaatgcaggaagcttcagtgctttcatttatattctgatgtaagttatcttattgcagaccggtaacaaacactgtcttcacagcca

SEQ ID NO: 979951 - DNA, 120 bp, Artificial Sequence
  ENSG00000260388_1 (sequence is synthesized)
tttgagccttaggtatgaatggagcagctttgggtggagggatatctccatgactgggtgggaaaaggtccagaaagacaacattggagtcaccaaatactaactgttcactaggcttgg

SEQ ID NO: 979952 - DNA, 120 bp, Artificial Sequence
  ENSG00000260388_2 (sequence is synthesized)
ctgttataaaagctgccaaaattcatgcttatggtttgactggatttcttttctctgcttagtatgcccttcagtagaagtgccaaaaaaaaaaaaaaaaagacaaacccagttatatag

SEQ ID NO: 979953 - DNA, 120 bp, Artificial Sequence
  ENSG00000260388_3 (sequence is synthesized)
cccaaagaagaggattaagttagttatctgcagcctctggattgactgtgaagtctgtttgaaaatgggagtgttggccagtaaaatgtttccctaaaaaactcgaagctgaggccgggc

SEQ ID NO: 979954 - DNA, 120 bp, Artificial Sequence
  ENSG00000260388_4 (sequence is synthesized)
aagactccgtctcaaaaaaaaagaaaaaacaaaacttgaagctgagtgtttctggggactctcatgagcatttttgaccatcaatttagaagaaatattctgatattactattgcattac

SEQ ID NO: 979955 - DNA, 120 bp, Artificial Sequence
  ENSG00000260388_5 (sequence is synthesized)
tgatattactattgcattaccattattttatctagattaaattgcttcatttcttaaatggttcagtctaaatgggaagacttgataataaacaaataataactaaaaggattagaaaga

SEQ ID NO: 979956 - DNA, 120 bp, Artificial Sequence
  ENSG00000260388_6 (sequence is synthesized)
ttctatgattctagaattctttcaagtacacagttattttagagatccacttccagtatttattcacttcattcaacaaatattaagtgcacacctcctatgtgccacacaatgtaccag

SEQ ID NO: 979957 - DNA, 120 bp, Artificial Sequence
  ENSG00000260388_7 (sequence is synthesized)
ggctacatggtatacaatgatcaataggagacatggtcccttatggtgtttgtaatgtagtgggggagatataagcaattaaatccaagtcaatgtatgaataaatatataacaatgaat

SEQ ID NO: 979958 - DNA, 120 bp, Artificial Sequence
  ENSG00000260388_8 (sequence is synthesized)
ttcagcaaatggtttttgagcatctattttgtgccaggcactgtgcttagtattaaggatacagagatgcataggagaacattcttgtcctcagatccacttggcactatacctgagtaa

SEQ ID NO: 979959 - DNA, 120 bp, Artificial Sequence
  ENSG00000260388_9 (sequence is synthesized)
cacctacgcctctcctcaactcccatttgattttgttggttgatttgtgtaggtttggctatttcacctgctgttcattccacactcttagtgtgtaacagtgaggtagggctttctggt

SEQ ID NO: 979960 - DNA, 120 bp, Artificial Sequence
  ENSG00000260388_10 (sequence is synthesized)
acctgtttgtctgcagatgtagaatcaactcttgtgtttgtgaatttgactcagagaaaatatttaaatgatttgacctttgagatgcccagctgagctgctgagcggacacagactcaa

SEQ ID NO: 979961 - DNA, 120 bp, Artificial Sequence
  ENSG00000260388_11 (sequence is synthesized)
cagaactaagaattgttgaacatctatcataaaattataggcttagattcaaagtgatcacaggatatgctcatttcttcccttcccttcccttccctccctcccttccttccttccttc

SEQ ID NO: 979962 - DNA, 120 bp, Artificial Sequence
  ENSG00000260388_12 (sequence is synthesized)
cctttcttccttccttcctttctctcttttctctttttctctttctctctatttttctctctttccttcctttctttccttccttttctttctttttttttttagctttgctttgctttc

SEQ ID NO: 979963 - DNA, 120 bp, Artificial Sequence
  ENSG00000260388_13 (sequence is synthesized)
tgctttgctttcttctttctcagggtctccctatgttgcccaggctagactcaaacctctgggctcaagcaatgcccctgtctcagcctcttaagtagctgggactacaggcatgcacca

SEQ ID NO: 979964 - DNA, 120 bp, Artificial Sequence
  ENSG00000260388_14 (sequence is synthesized)
tgctcatttatttattgtatctgggagtcttccacatgctaggcactgttctaggcacggggtaatagcagtgaacaaaacagacacacaccccctcccctcatgcaacttgcacctcac

SEQ ID NO: 979965 - DNA, 120 bp, Artificial Sequence
  ENSG00000260388_15 (sequence is synthesized)
ccaacgtttaacatatcctgacagtcggtcattcctttcaacttaaacatcttcactatcagagaactcatctccttatggggagttgtctcatttttaaacagtttgaaatattggaaa

SEQ ID NO: 979966 - DNA, 120 bp, Artificial Sequence
  ENSG00000260388_16 (sequence is synthesized)
gctctttattatactgatcccaaatccttttccctgtagcttttacctgctagtctgactaaggttctatatttgaaccagtttggaaatagctaatccttctttctgggaacccttcaa

SEQ ID NO: 979967 - DNA, 120 bp, Artificial Sequence
  ENSG00000260388_17 (sequence is synthesized)
atatttgaaaaaaatacttgtgtttcttttaaggctccccattttgttagctgatatagagaaatatgtgtagatacacgagtacttggatatcatctaataaagcaattgcacctcgaa

SEQ ID NO: 979968 - DNA, 120 bp, Artificial Sequence
  ENSG00000260385_0 (sequence is synthesized)
atatgtttgtattgcttattcttgatttattaattgtagacatcatctattcagaccttagcaggactataaagctatggtgttctttcacattctttcctactcccgtctttcccaaag

SEQ ID NO: 979969 - DNA, 120 bp, Artificial Sequence
  ENSG00000260385_1 (sequence is synthesized)
taggtacatcattggattttgttaagtgaatgccagtgtttaccttattttgaatgtagaagtattgttcatggctgagcccagtggtaaacaataacatttccattcttgggaaactgt

SEQ ID NO: 979970 - DNA, 120 bp, Artificial Sequence
  ENSG00000260385_2 (sequence is synthesized)
tcttttacctaaagtttttaatggtcttgttttgtgagagttgatgttgttcatccttcggttttctacggtcctatcacaaattctttccaaattctgcatccgtattagtaaacacct

SEQ ID NO: 979971 - DNA, 120 bp, Artificial Sequence
  ENSG00000260385_3 (sequence is synthesized)
ttaaatagtatgtcctgcaaggttgaatacatcagggacttcatcagctcagcttcttcttgcagccaggcctggggggcctctgtccccttgctgcatggtggttattgtcacatttca

SEQ ID NO: 979972 - DNA, 120 bp, Artificial Sequence
  ENSG00000260385_4 (sequence is synthesized)
tgtcatctctctgccacggatctcccattttccatatccatgttttttcttgctggatttcctttcttgttttggtaagttatgccttctaataggctgtacaaccctagagtgatagtt

SEQ ID NO: 979973 - DNA, 120 bp, Artificial Sequence
  ENSG00000260385_5 (sequence is synthesized)
tagctaggtatagaaatctagattaaaaaataattttcccttgtgattttatctccaacacatgatgttgcttttgagcaatctgtactatttgtgttttacaccttactgagggatact

SEQ ID NO: 979974 - DNA, 120 bp, Artificial Sequence
  ENSG00000260385_6 (sequence is synthesized)
tgatatgcaataaactgtacacatataccataaacaatttgatacagcttgacaaatatatatacccatgaaattatcatcacaatcaagataacaaacatatccatcaccgtcaaaagt

SEQ ID NO: 979975 - DNA, 120 bp, Artificial Sequence
  ENSG00000260385_7 (sequence is synthesized)
tcacttcccttctttgcaaaccctctctcttacctctttccacctgcaaacaaccacgaatctgctttttgtcagtatggattggtttgcatttattagaattttgtatacatgggattt

SEQ ID NO: 979976 - DNA, 120 bp, Artificial Sequence
  ENSG00000260385_8 (sequence is synthesized)
agtgtgtgctctttcttgtctggcttctttcacttagcataatgattttaagagtaatccatatatagcatgcatccataggccattccttttatgggtgagtattctgctgtagggaga

SEQ ID NO: 979977 - DNA, 120 bp, Artificial Sequence
  ENSG00000260385_9 (sequence is synthesized)
gacagttgtttatccataagtaatgtccttcagtcaaccagccacatctccagtgctgagtcgtcacagggggctactggcaatcatcttgatcagtacgacaaatagtagtgccatcat

SEQ ID NO: 979978 - DNA, 120 bp, Artificial Sequence
  ENSG00000260385_10 (sequence is synthesized)
tgcaaaatgttctaatgagcaatattctaacattctatagttttagctctcacatttaggactgtgatgcattttgaattaatttttgtatgtgacatgaagtaagtgttagtatttttt

SEQ ID NO: 979979 - DNA, 120 bp, Artificial Sequence
  ENSG00000260385_11 (sequence is synthesized)
tgcatattgttactcattgttccagtatcattttttgaaaagattattctttacccattaaattgccatggcacctttgtcaaaaatcaattgaccatatatgtgtggttttacttctgg

SEQ ID NO: 979980 - DNA, 120 bp, Artificial Sequence
  ENSG00000260385_12 (sequence is synthesized)
actctttattattttacattgatctattgatctatgtttatgtcaataccacgcaatcttaattactgtataagtcctaaaaacaggtagtgtaaatactccaactttgttaatgttttt

SEQ ID NO: 979981 - DNA, 120 bp, Artificial Sequence
  ENSG00000260385_13 (sequence is synthesized)
tcaaagttgttttggctgttttatgtactttgcatttccatataaagtttggaataagcttgtcaatgtctacaaaaaaaaaagccttctgcagttttaattgaggccttatggaatcta

SEQ ID NO: 979982 - DNA, 120 bp, Artificial Sequence
  ENSG00000260385_14 (sequence is synthesized)
tagatgaattttgggagaaccgatatcttaacaacattgagtcatcaatccttcaacatgttatataatctccacttatttaaatcttctttagtttcctttagtcatgtttttcagttt

SEQ ID NO: 979983 - DNA, 120 bp, Artificial Sequence
  ENSG00000260385_15 (sequence is synthesized)
tgagtgcaaagatctcatacatcttttgtcatatttatcccaaactattttagttttggattcttgccatggacatcccgtcatgtgcaaataaaggcatttttatttcttcctttctaa

SEQ ID NO: 979984 - DNA, 120 bp, Artificial Sequence
  ENSG00000260387_0 (sequence is synthesized)
cactgcaacttgggcccagaaagcctgccaaaaccagggatgctgctccaggtcctgttacatccactctgcagaaaagacacattcctcagtggattgactgccccaggagcacaggga

SEQ ID NO: 979985 - DNA, 120 bp, Artificial Sequence
  ENSG00000260387_1 (sequence is synthesized)
ccctaagcctccttctgcccctccctcttcttcaaggcagctggcaacctccctctctataaaaaagaaggggaaatgcatgaacacgtggaacgtgataaaatacgctgtttatttcca

SEQ ID NO: 979986 - DNA, 120 bp, Artificial Sequence
  ENSG00000260381_0 (sequence is synthesized)
agctacagaattaaatgtgtttggaaccacatgcacatcgtgctttgactacctcacaaaggagcagaaaggcaaattctgtttccagtaatgtgcaaagtcaagccacaaggaccttct

SEQ ID NO: 979987 - DNA, 120 bp, Artificial Sequence
  ENSG00000260381_1 (sequence is synthesized)
ctgaggcaaacggatggacaatgaagccggttcagaggcccagccgagacaatgatgcacagggaaactccctcgagccccagctgtcacctagtacttcgaagacactgagagaatgca

SEQ ID NO: 979988 - DNA, 120 bp, Artificial Sequence
  ENSG00000260381_2 (sequence is synthesized)
tacattggatgcaacagcaaaggcagaaggcatctttaaaaattctgaatttgccctttcactaaagacagatttatttttttaaaaaagtacctctggaataacgttaaattgtaaaat

SEQ ID NO: 979989 - DNA, 120 bp, Artificial Sequence
  ENSG00000260381_3 (sequence is synthesized)
gtggctcaacttttcaaatacttacctaattaatacacatagttagatcaagccaaagggtatattctaataatatgactcaataaagcaacttgatatgacttcttctcttcaagtcca

SEQ ID NO: 979990 - DNA, 120 bp, Artificial Sequence
  ENSG00000260381_4 (sequence is synthesized)
cacaagttttaagaaatcctacaccaacagttcttctcccatttctaattatttaacatgttaggtcagaagcaaattgttttaccttaagagtttcaagtgtaccatcttctttggcaa

SEQ ID NO: 979991 - DNA, 120 bp, Artificial Sequence
  ENSG00000228239_0 (sequence is synthesized)
agttgaaggaaagagttggcaaccgggatgctaatttagaagttctaaggtattctccacctgtaatctattgctccagaattctgcaggaacatttgaactggtaaggaaagaatgcct

SEQ ID NO: 979992 - DNA, 120 bp, Artificial Sequence
  ENSG00000228239_1 (sequence is synthesized)
atgcagcctctcccaaattctggcaggctactgggcatgtggaaaacccatcccaagagaagaatcacgggagaaggaatgcaagaacccagaagcatgccaacatataaaaccctgagt

SEQ ID NO: 979993 - DNA, 89 bp, Artificial Sequence
  ENSG00000228239_2 (sequence is synthesized)
gcaagaacccagaagcatgccaacatataaaaccctgagtcaaagatcaaactgggaacttggatctcttaagtcacctgcttggccct

SEQ ID NO: 979994 - DNA, 120 bp, Artificial Sequence
  ENSG00000228235_0 (sequence is synthesized)
tgttctccttgtggctgcagcagccgcactaagacactggccacacctggtttctccacagccgctgcagccacgaggagaaggccaccctctcgcgttcaaacacaggtgcacccaccg

SEQ ID NO: 979995 - DNA, 120 bp, Artificial Sequence
  ENSG00000228235_1 (sequence is synthesized)
ctgagtcactgccgtcacccacagccctgccccgacccacagcctgcgtctcagtcactgcccatcacccacagccctgcatctcagtcactgcccgtcacccacagccctgcctctcag

SEQ ID NO: 979996 - DNA, 120 bp, Artificial Sequence
  ENSG00000228235_2 (sequence is synthesized)
tccctgccgtcacccacagccctgcctctcagtcactgcccgtcacccacagccctgcctctcagtcactgcccgtcacccacagccctgcctctcagtcactgcccgtcacccacagcc

SEQ ID NO: 979997 - DNA, 120 bp, Artificial Sequence
  ENSG00000228237_0 (sequence is synthesized)
ctaataattcacaagaacactgccaaatggatatcatgatcctcctcttatggatgaagagacaggttccaagggcatatgccatacctttcttagttgcagagccagttctcaaatcta

SEQ ID NO: 979998 - DNA, 120 bp, Artificial Sequence
  ENSG00000228237_1 (sequence is synthesized)
catctgccttgcatcaaagttactggtatgaaagttattgatcatcagttgcttggcatcaaagtttcagcacatgagaacaaaagtacgccctttgaaaaagtagcagtagatcaaaag

SEQ ID NO: 979999 - DNA, 120 bp, Artificial Sequence
  ENSG00000228237_2 (sequence is synthesized)
tacttttacttcaggttttctgtagtgcttccacagcaagatggacgctgtttaaagtattgccaatggaagctacactctgaatggaaacatataggaaggtgtaaaaaagctttaaga

SEQ ID NO: 980000 - DNA, 120 bp, Artificial Sequence
  ENSG00000228237_3 (sequence is synthesized)
gacaactgacatgcaataaactgtacatattcaaaaatgtataatttgaatgttttgacacataaacaattgtgaaaccagtactacaatcaagataataaacactcatcacctctgaaa

SEQ ID NO: 980001 - DNA, 120 bp, Artificial Sequence
  ENSG00000228237_4 (sequence is synthesized)
ttagttgcagagccagttctcaaatctacatctgccttgcatcaaagttactggtatgaaagttattgatcatcagttgcttggcatcaaaggaaattccaacagagtgacatgtgctaa

SEQ ID NO: 980002 - DNA, 120 bp, Artificial Sequence
  ENSG00000228231_0 (sequence is synthesized)
atttctttttagttttctgataatcttcagtaatttaaaatcttctggaggtaattataaggaacatcatttcaaaggatacggggaaaagagatgtcacatgaacacgtcttagaattt

SEQ ID NO: 980003 - DNA, 120 bp, Artificial Sequence
  ENSG00000228231_1 (sequence is synthesized)
gaatgtaaagaaaactcagagacagggaagaaagccaggataggctccaagatcagctggatgagatcacaacatgtgaccctcacagatgatagatcaagaaaatgggaagagcttcaa

SEQ ID NO: 980004 - DNA, 120 bp, Artificial Sequence
  ENSG00000228231_2 (sequence is synthesized)
agccctgaaaccatataaaggagagtcacccaacaactaaaagcacccatcctaaactattatgtgaacaagaaacaaacctctattaatatatttgaattattaaatattttgagtcta

SEQ ID NO: 980005 - DNA, 120 bp, Artificial Sequence
  ENSG00000239440_0 (sequence is synthesized)
gctctatgatctgagttttagacttgcacagaatccatcaagccatccccttattgactggtctcagctggggtcagccaacagaaagcccaggtggaagatcagcgggtgagaagagaa

SEQ ID NO: 980006 - DNA, 120 bp, Artificial Sequence
  ENSG00000239440_1 (sequence is synthesized)
agatcagagaaaacgcctattttggagtgaaaccagggccgccttatgagctaaacagagtgtgttacagcttcaatagactaaacaagctctaaatttatcttcctatggtcacgggat

SEQ ID NO: 980007 - DNA, 120 bp, Artificial Sequence
  ENSG00000239440_2 (sequence is synthesized)
ctcatatattctggctgtcattgtcataataagccactcttggtcatatggaaaagcattcagctgctccctgcctttgctcacagcgtgtggtactctcttagaagctattcctggttc

SEQ ID NO: 980008 - DNA, 120 bp, Artificial Sequence
  ENSG00000239440_3 (sequence is synthesized)
atcagagaaagaaggcttctttaagcagcagaattgaggaatgagtcagaaaataaaagagcaaacaggtttttgttgttttatttaattttggtcaacctacttgtattggctttcata

SEQ ID NO: 980009 - DNA, 120 bp, Artificial Sequence
  ENSG00000239440_4 (sequence is synthesized)
gcataaagaaaatattttactttgaacaagcataaaacaaaaacacatctttcatacaatacaatgcaatcgatggcttttccccaatgatttatggaaatagctctaaaggagagagat

SEQ ID NO: 980010 - DNA, 120 bp, Artificial Sequence
  ENSG00000239440_5 (sequence is synthesized)
gattttgttgccaggtctcctcagatatcatcagtatttttaatctctcatgacattgctctacaccctcttgctgctatatttctaaatgccctgaggatgttatttctggctgtttct

SEQ ID NO: 980011 - DNA, 120 bp, Artificial Sequence
  ENSG00000239440_6 (sequence is synthesized)
ggatttgaacggcgggcaggaagtactcgagtagggagtctggcctagtgaaagtctctgtttcctccttttcttacttttcactcaataaaaccctgctttacacacccttcaaaccat

SEQ ID NO: 980012 - DNA, 120 bp, Artificial Sequence
  ENSG00000239440_7 (sequence is synthesized)
ctgtgagcctgaatttttacggccatgggacagacaaggatcctgtctttatctaaactaaggaaaagtcctgcaacatttgtggtgcacaacgtggggctcgagaagtgatcatccaaa

SEQ ID NO: 980013 - DNA, 120 bp, Artificial Sequence
  ENSG00000239440_8 (sequence is synthesized)
ctatttaggcagttattcctgcttcttgtgttggacctgaagtcaacagggccagcaatagagaagaaagatgatgtgaaggagagcaactgaaatgggagagttctctgacccactcgt

SEQ ID NO: 980014 - DNA, 120 bp, Artificial Sequence
  ENSG00000239440_9 (sequence is synthesized)
ggaacctgcttgggctgccatgtgctcaaaccctttatggaggggagatgcagacagattaataaactgaggcaaacagaaactaggaaacttgcagaataaatgaataaagaaataaaa

SEQ ID NO: 980015 - DNA, 120 bp, Artificial Sequence
  ENSG00000239440_10 (sequence is synthesized)
atgaggaatgctgaagatcacagggagcccttggaagctaggaaaaggcaatgaaaggcttttacctagaacctgcagagacaacatggccctactacctcttgatttcagaattctggt

SEQ ID NO: 980016 - DNA, 120 bp, Artificial Sequence
  ENSG00000239440_11 (sequence is synthesized)
ctcctgaactaaaagattaaggaataagaatatctatcttatgcctattccaacttcagagggagcatcactctgtagaaaccttgatttgaacttctggccttctgcactggaagagag

SEQ ID NO: 980017 - DNA, 120 bp, Artificial Sequence
  ENSG00000239440_12 (sequence is synthesized)
atggttgtttccatttctttttaagtttaagagcatattttagattccatcttaagacaatgtaacagctgtgagtcttttcatgagaaagaaaagaaggcagttagtctataatgaaga

SEQ ID NO: 980018 - DNA, 120 bp, Artificial Sequence
  ENSG00000239440_13 (sequence is synthesized)
tgaactgtcaagagcatgtgaaggggaaaggggtcttccctggcaccaatcagtcatttatattttacaaaacaatgcagcaaccttaattcctgcctcctcagaagaaagaatttgact

SEQ ID NO: 980019 - DNA, 120 bp, Artificial Sequence
  ENSG00000239440_14 (sequence is synthesized)
aaggagcataaggcagaagaagagacagaggcaagtttccgagcagaaatgaatgttgatttaaaaactttagagcagaaatgaaaggaagtaaattacacttggaagaaggccaagctg

SEQ ID NO: 980020 - DNA, 120 bp, Artificial Sequence
  ENSG00000239440_15 (sequence is synthesized)
gcagattgacagatcaagtgcacagtttgactttttgacttggggttttctatgttggcatgcttccagaggcttccatcccttcccccgattcttctcttggggtggactctttgcctg

SEQ ID NO: 980021 - DNA, 120 bp, Artificial Sequence
  ENSG00000239440_16 (sequence is synthesized)
tacagcgacctaccagcatgtgggaggggttgtacacgcagtgtgtttactggagttgtgcacatgctcacttgaggtgttctgcctgtaccagcctgaatgttcctaggtcgtatacca

SEQ ID NO: 980022 - DNA, 120 bp, Artificial Sequence
  ENSG00000239440_17 (sequence is synthesized)
gttaaactctgcctttttgccacttaatgcacatgcttgagcccactcgcccacctcctgagatctaattgggaagctggtgattaccagtttcaggtttgtctgtttattaagaggtgt

SEQ ID NO: 980023 - DNA, 120 bp, Artificial Sequence
  ENSG00000239440_18 (sequence is synthesized)
gtgtttattttccttggtgctggctgtgaccaattttttttttagagatacagctaacaacagtctgactgtcatctaatggtcacctgaattcctggcgtgtgtgtgtgtgtgtgtgtg

SEQ ID NO: 980024 - DNA, 120 bp, Artificial Sequence
  ENSG00000239440_19 (sequence is synthesized)
tgtgtgtgtgtgtgtctggtgtgctctcctactgtgctcatgtctgacctactgtaaccaaatgggccatcaaattagagaaaatttttgtgtttcaatagaaacctgtattttctacag

SEQ ID NO: 980025 - DNA, 120 bp, Artificial Sequence
  ENSG00000239440_20 (sequence is synthesized)
attgaatcttaaggattcttcctgttattcatgcattgactgggcttggctgggcagctctcttctgaagttgtaatcggatgttgtctgtggttgctgtcatttaaatgctcagattgg

SEQ ID NO: 980026 - DNA, 120 bp, Artificial Sequence
  ENSG00000239440_21 (sequence is synthesized)
gaggggagatgcagacagtatgttgagaaaatattttcattagatgttggacaaatggacaaaacatgaggggtggcaagtctggtgctgagaaaaaaaatgtgaagtaagaacgggatt

SEQ ID NO: 980027 - DNA, 120 bp, Artificial Sequence
  ENSG00000239440_22 (sequence is synthesized)
cctctgatccaggatcacagcttagtaacccatgaactgttccaaattacttcccctctttaacttctgttcacttatgtaaagtatgttcaaaatagtgagatgaggaaggtcgatatt

SEQ ID NO: 980028 - DNA, 120 bp, Artificial Sequence
  ENSG00000239440_23 (sequence is synthesized)
caaagtaagatctaaacaaacttagctattactcttgtttttactcctatgaagtttaaacatcagtgtgctaatggcagcaaaacatacttgcttgatgagaacctcgggagcacagtt

SEQ ID NO: 980029 - DNA, 120 bp, Artificial Sequence
  ENSG00000239440_24 (sequence is synthesized)
ttacttgagtcagtttaaagaagaagtaatcttatgcaaaaagtcatgtcctctgtgaatttcctgaactctagagatacaacagctaaattcagagagccagtagtgcaagacatttga

SEQ ID NO: 980030 - DNA, 120 bp, Artificial Sequence
  ENSG00000239440_25 (sequence is synthesized)
aagccagtggagcatgaggctggacaagatgcattgttatgtgaaaggctggctgcggcagatatcagttgagaaattattattcaggctgaatgatccatatgatattgcattgcatta

SEQ ID NO: 980031 - DNA, 120 bp, Artificial Sequence
  ENSG00000239440_26 (sequence is synthesized)
tcctgagaaggtcttgccaaaatagattttgttacaggactcagaaaaattaatactacacactagaagatgtggaatatttataaggatagaatttagaattctttcacagtgatcagg

SEQ ID NO: 980032 - DNA, 120 bp, Artificial Sequence
  ENSG00000239440_27 (sequence is synthesized)
tgttctataactcaccgaaagtgacttactggatgaaagacacttgtctgtggattagcccactcttgcactgctgtaaacaaatatctgagactaggtaatttgtaacgaaaaggggtt

SEQ ID NO: 980033 - DNA, 120 bp, Artificial Sequence
  ENSG00000239440_28 (sequence is synthesized)
taattggctcatggatccacaggctatacatgaagcatgatggtggcatctgcttggcttttgaggaagccttaggaaacctataatcatggtggaaggtgaagagagagccagcacttc

SEQ ID NO: 980034 - DNA, 120 bp, Artificial Sequence
  ENSG00000239440_29 (sequence is synthesized)
atatggctagagcaggaggaaagagggtcaggaggtgccacacacttttaaatgacctaatctcatgagaactcactcattatcaggagaacagcaccaatggggaaatccatccccata

SEQ ID NO: 980035 - DNA, 120 bp, Artificial Sequence
  ENSG00000239440_30 (sequence is synthesized)
gccccatctccaacactggggattacagtctacatgagatttggattggggacacagatccaaatcatatcagtttgttagttttgttttagatttctcatggcaatcgtactatattac

SEQ ID NO: 980036 - DNA, 120 bp, Artificial Sequence
  ENSG00000239440_31 (sequence is synthesized)
tggcaatcgtactatattactccttaatgatgctaatagcttcttttgcttgcattagcacttttattggagaaagagaaataaaagagattctgtgcttcagcagtatctaaatcaaaa

SEQ ID NO: 980037 - DNA, 120 bp, Artificial Sequence
  ENSG00000239440_32 (sequence is synthesized)
tctccttgatcatagaaatttatgacatgctctctgttttacttctacctcagttgacataatattttccagcaagttcatgtgttgcttttaaaataacttaattcaactcttgtagac

SEQ ID NO: 980038 - DNA, 120 bp, Artificial Sequence
  ENSG00000239440_33 (sequence is synthesized)
aaaaagaaacattttctttctgtggtcattcaggatgagatggtaacaccagaggtctcagtaacaacgcttcagggaaatatttttaggatctgacacattcagcagagaaaaggaaga

SEQ ID NO: 980039 - DNA, 120 bp, Artificial Sequence
  ENSG00000239440_34 (sequence is synthesized)
tgaaaaactggccttttcctgaaaatgtgataaaagcaacatcacactggaagaaaactaacagagaatggaggttgatccacctaagagacctgtaggtcaacacatattcaagtgcag

SEQ ID NO: 980040 - DNA, 120 bp, Artificial Sequence
  ENSG00000239440_35 (sequence is synthesized)
atcagagaatgagcctccccagaagaggaagcaggagatctgaaagagaaatcttttcacagaaaggaagtgctctgtttaacagagcttgactttagcatcagtcaattcaggcagctc

SEQ ID NO: 980041 - DNA, 120 bp, Artificial Sequence
  ENSG00000239440_36 (sequence is synthesized)
tacacagaagagagcatcttgccccagtgtccacagagagcaggcacttcctggacccttgagcaaacatgccaggaggtcacttaaaacagcgactcttccttggttgtacaaaatgaa

SEQ ID NO: 980042 - DNA, 120 bp, Artificial Sequence
  ENSG00000239440_37 (sequence is synthesized)
tgaatggtaccaagaaaaaattttctttccttggaggaaaattagattcattacaagcatttttttttttaaagcaacaaatggaacccagttgtaaaaaaaaaaaaaataaagaaaaga

SEQ ID NO: 980043 - DNA, 120 bp, Artificial Sequence
  ENSG00000239445_0 (sequence is synthesized)
cgcgcgccctcgccgggcgccgggaccggaaaatcaccgcgaagggagggacgaggaaaggcggcgggtggcttcaggacaagctgtgagatatcggtgggcgaggatgtgatgcctgaa

SEQ ID NO: 980044 - DNA, 120 bp, Artificial Sequence
  ENSG00000239445_1 (sequence is synthesized)
gatgtggcatctaccttgaaacagtcaaggacctgaggatgaagccagcatctgaggaagacagacagaaaggatctggatacatcatgagcctgaaaagtatcttgcatacacaactgg

SEQ ID NO: 980045 - DNA, 120 bp, Artificial Sequence
  ENSG00000239445_2 (sequence is synthesized)
actctttatgctcttaccaaaatgctggctttgagaactaattatgaatgaaaattactgatgtgattttcagtctagggaagaatatcaagttaaactttatgaagtccaagacaatgg

SEQ ID NO: 980046 - DNA, 120 bp, Artificial Sequence
  ENSG00000239445_3 (sequence is synthesized)
gaaaagaagaggtgttcctgtccaggccctcttccagttagaaggtgatggtttccagaagtctgcacctgtatttcaattacctataatggagtttataggactaaactatattcacta

SEQ ID NO: 980047 - DNA, 120 bp, Artificial Sequence
  ENSG00000239445_4 (sequence is synthesized)
atccccttccaactggtctgacaagccctgaggaaggaggaagacagtgatatccaccccccgctgcccctacctccttaactgtaaaattgtccatctcatcttgaactatccagaaac

SEQ ID NO: 980048 - DNA, 120 bp, Artificial Sequence
  ENSG00000239445_5 (sequence is synthesized)
caacatgggactacacaaaaccactacttgaagtcagcaccaaaagagttgtctgtggaaaatggttgaccagggtcaacgttatttatagatgtgcaacaaactgcctaccttctagtc

SEQ ID NO: 980049 - DNA, 120 bp, Artificial Sequence
  ENSG00000239445_6 (sequence is synthesized)
ttcaattatctgcatatgtataggagatgttggaaatttgtttttggactgattctttgaagccttacctccttgcatagtcctgatagaataacaaattaggttcccaatattgagtga

SEQ ID NO: 980050 - DNA, 120 bp, Artificial Sequence
  ENSG00000239445_7 (sequence is synthesized)
gtcattcacacactgcattctgccttccagaggcagtgggaggcaagaataagagaagtatcatgggctttggggttagccaggactacacccaaatttctgctggccttggtactagct

SEQ ID NO: 980051 - DNA, 85 bp, Artificial Sequence
  ENSG00000239445_8 (sequence is synthesized)
gatctggtagcctgcagtaaattgttatttccttggccttaggatttatagcctgtgaccagttaccagattatctcaccactga

SEQ ID NO: 980052 - DNA, 120 bp, Artificial Sequence
  ENSG00000239445_9 (sequence is synthesized)
ttatagcctgtgaccagttaccagattatctcaccactgaaggcctagatagtactgtgtataatgaaagcaagtaaggttattaacacttgaagctttttaaccatagtatttctcagt

SEQ ID NO: 980053 - DNA, 120 bp, Artificial Sequence
  ENSG00000239445_10 (sequence is synthesized)
ttctcagttcaaagcaaagaaacccatccacctatttatttttgcatgactagtatagatatctataatattgagaggacgttccagcttggcttcctgggtcaagtaggggctcagaaa

SEQ ID NO: 980054 - DNA, 120 bp, Artificial Sequence
  ENSG00000239445_11 (sequence is synthesized)
taaacagcaaaaattttgctgtaagtttccctgtgtcctctctccctctctctcttccccctcccctaaaactaaaaggaacgttaaatgcccattttctgctggaccttatctatgctc

SEQ ID NO: 980055 - DNA, 76 bp, Artificial Sequence
  ENSG00000239445_12 (sequence is synthesized)
acgttaaatgcccattttctgctggaccttatctatgctcctaattccaattccttgtaaacatgctttgtaaagt

SEQ ID NO: 980056 - DNA, 120 bp, Artificial Sequence
  ENSG00000239445_13 (sequence is synthesized)
ctcctgctccgcggctggcgccagttgcacggtggccgcccccaaattcgaggaggaaggtgcaaagtggtgggaggctgcgggtctcccggagggtgaggcgttggggaccaggcggga

SEQ ID NO: 980057 - DNA, 120 bp, Artificial Sequence
  ENSG00000239445_14 (sequence is synthesized)
gcacagccgaacccctacctttcgggcggggcggacaccagccgcgcgccctcgccgggcgccgggaccggaaaatcaccgcgaagggagggacgaggaaaggcggcgggtggcttcagg

SEQ ID NO: 980058 - DNA, 120 bp, Artificial Sequence
  ENSG00000239445_15 (sequence is synthesized)
acaaggactttgtgattacattgggcccatccagatcatccaggatcatcttcccatctcaagattcttcacttaatcacatctgcaaaattccttttgctgtgtaagctgtgagatatc

SEQ ID NO: 980059 - DNA, 120 bp, Artificial Sequence
  ENSG00000239445_16 (sequence is synthesized)
gtaactggggagggatagctcttctcaggaagagctaattcttagagatacagggagcatgcttttcatatgcaaactactcaaactggagtccacacttccccaacctcctctatagga

SEQ ID NO: 980060 - DNA, 120 bp, Artificial Sequence
  ENSG00000239445_17 (sequence is synthesized)
ctcttactctcctgcccgatattcccctgctctaatcatcttggggccaggtaccaggcaactcaggacggccactacacctccagagcccactgacattattaaaactagacaattcta

SEQ ID NO: 980061 - DNA, 120 bp, Artificial Sequence
  ENSG00000239445_18 (sequence is synthesized)
agctgcttgccctaccttgaccttattccttttgttgcaaaacgcaataaagggtcttgccacattttccttctgctccctctgcctccggactgaccctggtgctttcctttgtgggcc

SEQ ID NO: 980062 - DNA, 120 bp, Artificial Sequence
  ENSG00000239445_19 (sequence is synthesized)
ttcgtggcttacctcgtgtttctaggaacctgcaagtgtaaaaacttctttcttcatgacagtcatttccatgactgctgccttactatacctgatttaaacaaatcctgagcacatttt

SEQ ID NO: 980063 - DNA, 120 bp, Artificial Sequence
  ENSG00000239445_20 (sequence is synthesized)
cacattttaaaacataaattcaacagctggacctgctatgcagagcaattcaggcggagggaatggctcatgcacactctccaagtactgttaggtatgagttctaaatttctcttcaaa

SEQ ID NO: 980064 - DNA, 120 bp, Artificial Sequence
  ENSG00000239445_21 (sequence is synthesized)
taacttcctcgtaaagcaacctttttccattacctgctccaccctgactcattctgattacctgctcattctccaccctggcttactctgatttcctgctctgccctgtaaccatttttc

SEQ ID NO: 980065 - DNA, 82 bp, Artificial Sequence
  ENSG00000239445_22 (sequence is synthesized)
accctgactcattctgattacctgctcattctccaccctggcttactctgatttcctgctctgccctgtaaccatttttccc

SEQ ID NO: 980066 - DNA, 74 bp, Artificial Sequence
  ENSG00000239445_23 (sequence is synthesized)
aattggaattagtttagcctgtgcagtctaacccaagccaataggggaaccatacagcagcagggaccacgtgc

SEQ ID NO: 980067 - DNA, 120 bp, Artificial Sequence
  ENSG00000239445_24 (sequence is synthesized)
tacgttgtcttgctgagaattaaaaagaaaattttatattcgagcgctatttcttttgcggcactgaaactttatttataatagtatgaatgagcctggcatgtgcagggaagaaccagc

SEQ ID NO: 980068 - DNA, 120 bp, Artificial Sequence
  ENSG00000239445_25 (sequence is synthesized)
agatcggtctggctggagcatatcatacgaggggagcgtaatgggcaaggaagccaaagaggaggtaggagctagatcgttcatcacgcagggcctcgaaggcaagggtaaggaattggg

SEQ ID NO: 980069 - DNA, 120 bp, Artificial Sequence
  ENSG00000239445_26 (sequence is synthesized)
atttgattctaaatgcgaaaggaagtaaataaaatattttacgcaaggagtgattgaatctgacatattttttaaaaaatcactctgaggtctacttggagaaagaattacaatgatgca

SEQ ID NO: 980070 - DNA, 120 bp, Artificial Sequence
  ENSG00000239445_27 (sequence is synthesized)
agagtggaagcagaaaagccagtctggagactactgcaggacctgaggcaagagatgacaatggcttggaccatgctggcggctgtggatatggagcccagtgccatctaaatttatcct

SEQ ID NO: 980071 - DNA, 120 bp, Artificial Sequence
  ENSG00000239445_28 (sequence is synthesized)
aaagaatgcagaaaatcaaagactagtctcatatgagacaaactcaagccccagcagaataacaagtgggaccctgaggagtataaataatgccagatcatttctttctttgatagaatg

SEQ ID NO: 980072 - DNA, 120 bp, Artificial Sequence
  ENSG00000239445_29 (sequence is synthesized)
atgagtcaccttaatcaggggaagaagagtttctggtaaaaaatcttgagtcacgcactttttttttttttaacgtctcaaggtagaattgtctaatgcttaggtggtccacatcttaca

SEQ ID NO: 980073 - DNA, 120 bp, Artificial Sequence
  ENSG00000239445_30 (sequence is synthesized)
gagtagattctttaatgctcaagaggctttttgcaaggaaagaacatactctttgggcattgttcaatgctcaatttattagtctaatattctattcccagtaaaatgctcaaattcagg

SEQ ID NO: 980074 - DNA, 67 bp, Artificial Sequence
  ENSG00000239445_31 (sequence is synthesized)
agtctaatattctattcccagtaaaatgctcaaattcaggaaggattccaaaaaatcagttcgtggc

SEQ ID NO: 980075 - DNA, 62 bp, Artificial Sequence
  ENSG00000239445_32 (sequence is synthesized)
caaaaaattagccaggcgtggcagcgtgtgcctgtagtcccagctgtgagattgccctactg

SEQ ID NO: 980076 - DNA, 83 bp, Artificial Sequence
  ENSG00000239445_33 (sequence is synthesized)
aaaaatcagttcaatgttttttctgttcttttttgtgcttctgttttttaacctcttcgaggtaagactggataatgataccc

SEQ ID NO: 980077 - DNA, 120 bp, Artificial Sequence
  ENSG00000239445_34 (sequence is synthesized)
ttttttaacctcttcgaggtaagactggataatgatacccatccaacatattttcaatatgttttggaaaacaaagatattgataagcaggtactatgcagagtgccagattaaaacctt

SEQ ID NO: 980078 - DNA, 120 bp, Artificial Sequence
  ENSG00000239445_35 (sequence is synthesized)
tagagactcaaagttcaaaaatgttatagagtccatactcaatatgtaattctatataaaaataatactagtccataatgtaagtgggagaccagcaagatcctgataattttcaaatga

SEQ ID NO: 980079 - DNA, 120 bp, Artificial Sequence
  ENSG00000239445_36 (sequence is synthesized)
ctttttctgtagtttaaaaataaccactttttaacttaaaaaaagttcttttgatgcctctgtttttggtgtcctaagaatgtatttaagctgcatttgggtaatccagttgcagttgag

SEQ ID NO: 980080 - DNA, 120 bp, Artificial Sequence
  ENSG00000239445_37 (sequence is synthesized)
catctgctgtgctttacactagatgaggaaatgggatatgacagagaatgactggagggcttcttgattgcgttatcagaacagacttctctgaggagggaactttcaagttgaggtcta

SEQ ID NO: 980081 - DNA, 120 bp, Artificial Sequence
  ENSG00000239445_38 (sequence is synthesized)
aatgatgaggagaacccagctacgtaaagattaatggaatgagcaacccaggaaaaagaaagaaagaagaaacaggatcctggacatcaagtagctccccatctagtcagggagacagac

SEQ ID NO: 980082 - DNA, 120 bp, Artificial Sequence
  ENSG00000239445_39 (sequence is synthesized)
aagtagctccccatctagtcagggagacagacataaaaagagctcattttggccgcgcatggtggctcacacctttaatcccaacactttaggaggctgaggtgggtggattgcttgagg

SEQ ID NO: 980083 - DNA, 89 bp, Artificial Sequence
  ENSG00000239445_40 (sequence is synthesized)
cggaaaaagagagctgattttaacacaatgcggttcctgctgcaccaggcatgagaacaggaatccagtggaaggagtgattaattaga

SEQ ID NO: 980084 - DNA, 120 bp, Artificial Sequence
  ENSG00000239445_41 (sequence is synthesized)
catgagaacaggaatccagtggaaggagtgattaattagaactaagaattgagaaagggctgtgccaagcagaatatacaaaattatagagtagcattgtaaagatttaaactcttgctt

SEQ ID NO: 980085 - DNA, 120 bp, Artificial Sequence
  ENSG00000239445_42 (sequence is synthesized)
caacagagacatttgttaaaaaacagattactgggcttcactccacatttactcagtcagaatctctgagttggctgcctagaaatctatgtttttgaccaagcacccttctgatgtgaa

SEQ ID NO: 980086 - DNA, 120 bp, Artificial Sequence
  ENSG00000239445_43 (sequence is synthesized)
gactttttgtgatcctctgatttatggaataggttttgaagttaggtgactcggacataggacctacatctcactttcatcacctgtgaaatgaggataataatacaatcttcctcattg

SEQ ID NO: 980087 - DNA, 120 bp, Artificial Sequence
  ENSG00000239445_44 (sequence is synthesized)
ggtaactttgaggattaaacgaggttgtatttataaagtgttatctattatggctattatgtgaaacgtatagctttgatcatagccgagtgaagaactgaacaagctgtctctgagctc

SEQ ID NO: 980088 - DNA, 120 bp, Artificial Sequence
  ENSG00000239445_45 (sequence is synthesized)
acttaacatatctcagaatcttacttacaggtgaaatgatagtggcaaggtcacagccattgggataaactaaggagactagaaaagcaacattcagggttggggaggaagccagtttct

SEQ ID NO: 980089 - DNA, 120 bp, Artificial Sequence
  ENSG00000239445_46 (sequence is synthesized)
tggggaggaagccagtttctactggagcaggagaagagtgcacagctgttgtgtcaaaggtttgcagaaaacagctggcttttcctctttcttgttttttgttttgttttgttttctttt

SEQ ID NO: 980090 - DNA, 120 bp, Artificial Sequence
  ENSG00000239445_47 (sequence is synthesized)
ttaattaaagtacaaattatttaaagacttccttccccacacctgagcctagccttggctaagtcaaaagagagttatctccttaagaaagggaagcccctagggaagtgaggaagttag

SEQ ID NO: 980091 - DNA, 120 bp, Artificial Sequence
  ENSG00000239445_48 (sequence is synthesized)
tatacaagtacagaataactgcagtacaaaacagcaatcaagtctgaacaggaaatctctggacaaagagaaaaatactatcattgaaataagggacaagggattatggcaatattaaat

SEQ ID NO: 980092 - DNA, 120 bp, Artificial Sequence
  ENSG00000239445_49 (sequence is synthesized)
aatggcactgattagtgaaatgattctagggggaagtgtcaaaagattttctaaagaacatgtactgagcagatgatcgctgactgcataattgccctttctgggtaggtgtgtaagaca

SEQ ID NO: 980093 - DNA, 120 bp, Artificial Sequence
  ENSG00000239445_50 (sequence is synthesized)
cacacacgcacacacacgtttgggagaattgtgaccatcgggttccatagtaacaagataagttataatagccacctttcattgagcacctacaatatgtcacaaactgtgatagggact

SEQ ID NO: 980094 - DNA, 76 bp, Artificial Sequence
  ENSG00000239445_51 (sequence is synthesized)
attgagcacctacaatatgtcacaaactgtgatagggactttatgtatttcaatacactatctgttatctattttc

SEQ ID NO: 980095 - DNA, 64 bp, Artificial Sequence
  ENSG00000239445_52 (sequence is synthesized)
agtgtgatctcggctggtgctatctcggctcatggcaacttctacttcccgggttcaagtgata

SEQ ID NO: 980096 - DNA, 120 bp, Artificial Sequence
  ENSG00000239445_53 (sequence is synthesized)
aggtgatctgccagcctcggcctcctgaagtcctgggattacaggcgtgatccatctcacccggccttgttacctattttctattggtaactgaggtaaaacctattggaggcttagcag

SEQ ID NO: 980097 - DNA, 120 bp, Artificial Sequence
  ENSG00000239445_54 (sequence is synthesized)
taggttcatgtgttcatacattttggggaatgtaagagagtatcagggcaattgattattgcctttgtgggttgaaagcagcaacacaggaatagattgctgatatgaagagtgagatga

SEQ ID NO: 980098 - DNA, 120 bp, Artificial Sequence
  ENSG00000239445_55 (sequence is synthesized)
cctgtagagtaagcaatctaaccattaacatcaactcaacttgggcaataaaatttgatattttacttatgggacaaatatttattgagtgtccagtttgtgtcaggtactaaatacgta

SEQ ID NO: 980099 - DNA, 120 bp, Artificial Sequence
  ENSG00000239445_56 (sequence is synthesized)
agctttactaatcccacttctagaagaatgatttctttttctttttgaaataacacttcagcagagcaccacattgtttcagacttaagtttccttttccattttgtcgacaccaacagt

SEQ ID NO: 980100 - DNA, 120 bp, Artificial Sequence
  ENSG00000239445_57 (sequence is synthesized)
gttcttataatattaactcaccaacatttagtctataatatgattgccagggatgtggcaatatgtccttgggagcttcaagccatatatatctggtccatcttttggaaagttcatgac

SEQ ID NO: 980101 - DNA, 120 bp, Artificial Sequence
  ENSG00000239445_58 (sequence is synthesized)
atagatgggcaaggatacaatttatactcaggagatgcagccaccctaacagagttacaaatgaatgttaaatgacataaactatgcgtagtgcaagcacggaagcatctctttggtctg

SEQ ID NO: 980102 - DNA, 120 bp, Artificial Sequence
  ENSG00000239445_59 (sequence is synthesized)
agggatatttgcagggaccttgaataggcagagagagggggacatgtggtctaagcctctgagttgggagaggacaatgatgggcatgggggagaatgtatatgctgtttgacttgagag

SEQ ID NO: 980103 - DNA, 120 bp, Artificial Sequence
  ENSG00000239445_60 (sequence is synthesized)
gatgacatgtaggcattatggtagtctttttcttgacatctgatacacaatcacttctttcttttctccatgaaatctagccacaaagatgagttgctcaaatgtcaaggtctacccctc

SEQ ID NO: 980104 - DNA, 120 bp, Artificial Sequence
  ENSG00000239445_61 (sequence is synthesized)
tttaaagcctccatgatttgcactctctgcagccttggccaggattgtccttatcttgccctgtcgctgatgggttatttactactcatctttcaagggccgggtagaattttacctatt

SEQ ID NO: 980105 - DNA, 120 bp, Artificial Sequence
  ENSG00000239445_62 (sequence is synthesized)
ctgagacaccttcaagcagaatgagtctttcctttgctgtgctcccatgacacaatgctcatcttcaataaataattatattttttgtaccttcagtgtatcatgttcatctttgcatcc

SEQ ID NO: 980106 - DNA, 120 bp, Artificial Sequence
  ENSG00000239445_63 (sequence is synthesized)
ccagtttcctcaagaatcctggcatgaaagaatatgcttgttgagtgaataaattggctgattctaatgttcataaggcaaagttcacctgtcctaattgctgattcaattccaatttga

SEQ ID NO: 980107 - DNA, 120 bp, Artificial Sequence
  ENSG00000239445_64 (sequence is synthesized)
cagtgtcttacagattctgggtaaattgggatacttccctttgtcctaacattggaaaaccttggagaaaagtattgttattttctacatcaagtactttatctgagacatgggcagcta

SEQ ID NO: 980108 - DNA, 120 bp, Artificial Sequence
  ENSG00000239445_65 (sequence is synthesized)
ggctttgagaactaattatgaatgaaaattactgatgtgattttcaggtgagagaccctattagacaaaattttggattcatttttttctcttgagtaaaacatggggaaaaaatctttc

SEQ ID NO: 980109 - DNA, 120 bp, Artificial Sequence
  ENSG00000239445_66 (sequence is synthesized)
tcaattttatctttgaatcaaactatatcatgaaagggctatgtttttatcccttacaattaataccatgaagggtccagcaatagaatacatcacctgtattaactatataactatctt

SEQ ID NO: 980110 - DNA, 120 bp, Artificial Sequence
  ENSG00000239445_67 (sequence is synthesized)
tcagaattaattcctgcataggtaaatgagtaattctctaattcctacaatttctacaactctaagattctgtgatatcaaaattttcaagtattatactaaactctcaatatatattga

SEQ ID NO: 980111 - DNA, 120 bp, Artificial Sequence
  ENSG00000239445_68 (sequence is synthesized)
taagctggttcttttgctattgcaaaaattcaactaagagataggaaaatgggtcaatggcaacaacaaattaatggagactgcagcaaaagattatttaacatactttcttccctttta

SEQ ID NO: 980112 - DNA, 120 bp, Artificial Sequence
  ENSG00000239445_69 (sequence is synthesized)
tggaaaagagagctgttctcctttttgaaccatattcccctaaataccctcacaatcttcttaggcctctcactccttcattttcttttctagccccttcatctcatccttattttgaat

SEQ ID NO: 980113 - DNA, 120 bp, Artificial Sequence
  ENSG00000239445_70 (sequence is synthesized)
tcagatgagttaatacagtttgatggcctagttcagattctagaaagggacagctattcagagatgatagtgacatgcttttctcttctcacattgcttctctttaaagaatttacagga

SEQ ID NO: 980114 - DNA, 120 bp, Artificial Sequence
  ENSG00000239445_71 (sequence is synthesized)
cttctgcctacatttacatctgaaaacaatagtttcatttggtgtcacatccttgcccaaatttattgagaatattggtaaaggacaacatatttacaaggatttctttattaaaaactg

SEQ ID NO: 980115 - DNA, 120 bp, Artificial Sequence
  ENSG00000239445_72 (sequence is synthesized)
gggagattggcaagtgacactgtcactaaataaataaaaataaaaactgagaaaagcaataacatttgatttgtcatttcccagtctagggaagaatatcaagttaaactttatgaagtc

SEQ ID NO: 980116 - DNA, 120 bp, Artificial Sequence
  ENSG00000239445_73 (sequence is synthesized)
aacctggaataataataaaatatgtcatttagtatatttacaggtagtatattcaagtacattcaatgttaaagtcaatcatgatattcttccccttcttacagcctgaaaagtatcttg

SEQ ID NO: 980117 - DNA, 120 bp, Artificial Sequence
  ENSG00000239445_74 (sequence is synthesized)
atcttcccatctcaagattcttcacttaatcacatctgcaaaattccttttgctgtcctgaaaagtatcttgcatacacaactggcagcacagaatcctgacaaacctctcatcagaaat

SEQ ID NO: 980118 - DNA, 120 bp, Artificial Sequence
  ENSG00000239446_0 (sequence is synthesized)
agcggagagcccggaactaagaactgtagacccagagaggtgagactggccccaagcacctgggtcctcaagaagagtcaccgtttccgtgccaggaggatccaaggtggggaaactgag

SEQ ID NO: 980119 - DNA, 120 bp, Artificial Sequence
  ENSG00000239446_1 (sequence is synthesized)
agagagaaggacgttgaccaagtgctgggattaccgaatgggagccaccatgcccagtctttactcaaaattcaccttctccctgggtcttctctggagaccctagctttaaaaataaac

SEQ ID NO: 980120 - DNA, 120 bp, Artificial Sequence
  ENSG00000247049_0 (sequence is synthesized)
acctctgcaatcctccctatagcaagatgggtcaaagcctgatccctacccccgaaaatgggtgtcaagtgtctccgtcaaggacagacttaagactcacccgaaagaaaacgagacttc

SEQ ID NO: 980121 - DNA, 120 bp, Artificial Sequence
  ENSG00000247049_1 (sequence is synthesized)
tggtaaagccctagagacctgatctggcatcaccggctttgctctatttgctttgaggaagccatccttccctggtcgtcttcactgcatctgctctgtgtacagaatccttctcattct

SEQ ID NO: 980122 - DNA, 120 bp, Artificial Sequence
  ENSG00000247049_2 (sequence is synthesized)
ccttttcccaggtccccttacttcctctccatccccccactaaactcccatcttctctctgtacttctctcaccttgtactcctgcaccacctcctccaatggcaccacgctgtgctgtt

SEQ ID NO: 980123 - DNA, 120 bp, Artificial Sequence
  ENSG00000247049_3 (sequence is synthesized)
tgtggctcctggattctcggcacaccacacagatggcctcttcgtctacctcgcagaagagcttcagggcttcttggtgtttgggacagatgccctgatcggtcacgcggctccctcgac

SEQ ID NO: 980124 - DNA, 120 bp, Artificial Sequence
  ENSG00000205971_0 (sequence is synthesized)
gggccggcctgggtctcgcagcaaaggtctttgataaccagcaaaacggcaaagggaggcaggaaaaccacccgcagggaggccagtgtgggtttaaggaagtgagaccaggaccacaga

SEQ ID NO: 980125 - DNA, 120 bp, Artificial Sequence
  ENSG00000205971_1 (sequence is synthesized)
ctgggcgctccctgctgagtctgtggccctgaaggctgttcagctctaagcgtcggtgcacggacaggccagacagggctgtattgctccaatcgccctgcaagaatcacagccagacgg

SEQ ID NO: 980126 - DNA, 120 bp, Artificial Sequence
  ENSG00000205971_2 (sequence is synthesized)
gggcttcccgagtgctgcccaccttgccggcacgcaggaggaggtggcatggactggggaggaggaagcactctcactcctgctggagcctctgcccaggaaccccgattggcccagccg

SEQ ID NO: 980127 - DNA, 120 bp, Artificial Sequence
  ENSG00000205971_3 (sequence is synthesized)
ccatggggacgagcgggagggtgagtgtggcgcacacagctgtctgtagacacacagagggcatgcacgcatgtgtctgtgctcacctgcatgtgttcacacggactgggcaccgccgga

SEQ ID NO: 980128 - DNA, 120 bp, Artificial Sequence
  ENSG00000205971_4 (sequence is synthesized)
ggtgttcacacagcggtgtacaccgacccctctgcagatgtgcacacacccagcaaggctacgtccacaggcgtgtatgtgttcttgcaccaggaagtgggtcacgccccacaccacaca

SEQ ID NO: 980129 - DNA, 120 bp, Artificial Sequence
  ENSG00000205971_5 (sequence is synthesized)
tcgtatactctgtccctgcggcacgcacctgtctgggtgcaccaggcagtctaagcccatgtcacctatgtgtacacatatgtgcacatacctactcaggcacaccagtgtgtgtacacg

SEQ ID NO: 980130 - DNA, 120 bp, Artificial Sequence
  ENSG00000205971_6 (sequence is synthesized)
gctgtccaggcacactgggcagtccaagcccacgcctgcccagactcttggaatcgggcactttctgaggctgccccgatgggcgttcctttccccagccagtacatcctctcttcctaa

SEQ ID NO: 980131 - DNA, 120 bp, Artificial Sequence
  ENSG00000205971_7 (sequence is synthesized)
gataaccagcaaaacggcaaagggaggcaggaaaaccacccgcagggaggccagtgtgggtttaaggtgatggcattccccagccctgcccggcaccggcctcccaagcctgggacctgg

SEQ ID NO: 980132 - DNA, 120 bp, Artificial Sequence
  ENSG00000205971_8 (sequence is synthesized)
cagcatctggtcactaggggtctgcatgggcagtcacttcctgggggcctgcaccccttaaggagggtgaaggacgggccagcccagctggggctgaatcctcacagccttgttcacagg

SEQ ID NO: 980133 - DNA, 120 bp, Artificial Sequence
  ENSG00000205971_9 (sequence is synthesized)
gagaggctgacctgcgcccattttacagacaacaaaactgaggctgagagagtaacagcccggccagcacatggcagagcgtggcgcaggcccaggcctgccttgtgaggtccctgccgt

SEQ ID NO: 980134 - DNA, 120 bp, Artificial Sequence
  ENSG00000205971_10 (sequence is synthesized)
tccctgcagggtacatagaggcggaagctgatgtggcccccactgggcgttctttcactttctctcctttgattccacagtcctcagacctaggaattaaagaaacgtccgtagtttccg

SEQ ID NO: 980135 - DNA, 120 bp, Artificial Sequence
  ENSG00000229042_0 (sequence is synthesized)
ggcagaatggcatgcctttcatccacacagcatttagggaatgcttaaaaacaagcaatttcattatgaacggttaactttagcttcggccatcatcctgaaaagggacatcataaattc

SEQ ID NO: 980136 - DNA, 120 bp, Artificial Sequence
  ENSG00000229042_1 (sequence is synthesized)
ctatgaaaaagtctctccttcactttgctgaactaaattcaacaaacaaatctcatctacctaagcttaaaacatctagatttaaatacatgaaaacgctgacgtttttcttagggttat

SEQ ID NO: 980137 - DNA, 120 bp, Artificial Sequence
  ENSG00000229042_2 (sequence is synthesized)
gagaatataggtactattttttctttattctgtttcttatttgatttttttacaaatgcctagtaaacctgcatcagttgcttattataaatataagcatttgaaataggtagcaggagt

SEQ ID NO: 980138 - DNA, 120 bp, Artificial Sequence
  ENSG00000229042_3 (sequence is synthesized)
caagaaccacgattacatccattttcccagcaagttcctcaccaatagttcactaacaaggagacatcctggctacctctgggaccccctcaaagacctccacttgacaacacaaagcag

SEQ ID NO: 980139 - DNA, 120 bp, Artificial Sequence
  ENSG00000229042_4 (sequence is synthesized)
acagtactacacccttattacagatgaggacaccaaggttacctagaaagcagctgtgtcaataccgcctgctctgtggctacaggcattgcacttcccacctacccgcaagcccaggtg

SEQ ID NO: 980140 - DNA, 120 bp, Artificial Sequence
  ENSG00000229042_5 (sequence is synthesized)
ttaccactcccaggagcagcccttacccaagagacagaaagatcccatcaaacgcattccccttcctgtgtcaggatcaagacagtctacagtcatgtcagtgtgtactcctgccaaaac

SEQ ID NO: 980141 - DNA, 120 bp, Artificial Sequence
  ENSG00000229042_6 (sequence is synthesized)
tcctaccagcaaataaatttaagagctcagcctcagtctacttaacaacatcatgttgcaaccagtgaagtcattcagaaatgcataattcaataacaacttagcaccagatgaagtttt

SEQ ID NO: 980142 - DNA, 120 bp, Artificial Sequence
  ENSG00000229042_7 (sequence is synthesized)
atgatctgcaacactctgtctgccccggctcccccttatcccccaaaacctcaacattttcaagattactctttgctgggccacttcccaaaattaagagcagagtaaacattctagaag

SEQ ID NO: 980143 - DNA, 120 bp, Artificial Sequence
  ENSG00000229042_8 (sequence is synthesized)
ggctaggagaagctggattctaaagctttggaatcaaaggccatgcttcaggagcaccttgttccagggcagcatgggttcacaaatgggcacccttcactcccctcccccacctcagcc

SEQ ID NO: 980144 - DNA, 120 bp, Artificial Sequence
  ENSG00000229042_9 (sequence is synthesized)
aagcagccctgctatgaagaatggggtgaaagaaactcttgccttatccagtttggatcttaagagttccagagacaaccacgtctgtacacccacaggatggtgagagctgttattatt

SEQ ID NO: 980145 - DNA, 120 bp, Artificial Sequence
  ENSG00000229042_10 (sequence is synthesized)
actgtcacgcagcaaggacaaataacattctcataatgttcactgcgtgcctggctctatttcgggatttacatacaaattcatttattcctcatatcacaccggaaagtaagtactatt

SEQ ID NO: 980146 - DNA, 120 bp, Artificial Sequence
  ENSG00000229042_11 (sequence is synthesized)
ctagtatgcatttatagatgaggagactaaaggagtgtgctagtattcagctctggtctttttgcctcaagcccaccctgttacatcagttatgtaattctggagctgggaccccactaa

SEQ ID NO: 980147 - DNA, 120 bp, Artificial Sequence
  ENSG00000229042_12 (sequence is synthesized)
caacatctctaaactaccttgccagctggctttggtccagtcctagtgatgggagacttcagatggagactgggatgctggaagaaggaagaagatgctctctttctgcttcaaggtcct

SEQ ID NO: 980148 - DNA, 120 bp, Artificial Sequence
  ENSG00000229042_13 (sequence is synthesized)
tgtagcatcattccagcaacaggggctgctacgctccaggccttcatcttttctggtctttgtagcacccatggcacagtatctttctgaaggaactaatataacctaggccatgcccct

SEQ ID NO: 980149 - DNA, 120 bp, Artificial Sequence
  ENSG00000229042_14 (sequence is synthesized)
tacagctgcagtacaatctgtggggtctccctcctcagaggtctcagaatcagccctgctgtgctcctcctacagacttctaggtaccataacccctcctattccattttgttaccccag

SEQ ID NO: 980150 - DNA, 120 bp, Artificial Sequence
  ENSG00000229042_15 (sequence is synthesized)
ccccaggtgtggtcaccacttcctgccatttttggctaccttagcgtcccacttttgcactgacagcctttcatcactgtgtaatggattcccttcaataaaaaccctctgtttgaaata

SEQ ID NO: 980151 - DNA, 120 bp, Artificial Sequence
  ENSG00000229546_0 (sequence is synthesized)
attgttgaacatgtctgacaatagaagacctaaggcctaagaagtccatttcaatgaatcacaaaagaaatcaaagaacagaatttctctcttttgaagagagaataattgctttattaa

SEQ ID NO: 980152 - DNA, 120 bp, Artificial Sequence
  ENSG00000229543_0 (sequence is synthesized)
gccaggctgcagaatttggccatcctcaaacaccacctttaatggcaaaggagggatgggaaaactcctgaagaccaggtagccatggagtgctacatttctggatggaaaggggaccac

SEQ ID NO: 980153 - DNA, 120 bp, Artificial Sequence
  ENSG00000229543_1 (sequence is synthesized)
acaggattcacaactgggctcctcttgctgtgttggagggagatgtttcacctgagcaccatgtttcacatggcagtggggcaaggcactgaggctgtgtggcatggcaccacagggtgg

SEQ ID NO: 980154 - DNA, 120 bp, Artificial Sequence
  ENSG00000229543_2 (sequence is synthesized)
tgccatgctgacttcatgtttatggctaagaagcctctcccagggagcagctgagcttcaggggcattcctggagcgtccaggagagcaatatggccctttgctggtggagaacctgaga

SEQ ID NO: 980155 - DNA, 120 bp, Artificial Sequence
  ENSG00000229543_3 (sequence is synthesized)
ccctcaaggagaaagtgaagaaaattctctctgcatacagaccccttcccattttcccattctgggttgactatcctccctcatagatgtgctcatgagtcttggaaattctcttgactc

SEQ ID NO: 980156 - DNA, 73 bp, Artificial Sequence
  ENSG00000261166_0 (sequence is synthesized)
aacgcgctggggtcccattccgtgttgtgggggtttttttctttccctttatgagctgtaacactcaccgcga

SEQ ID NO: 980157 - DNA, 66 bp, Artificial Sequence
  ENSG00000261166_1 (sequence is synthesized)
gaagtcagcaagaccacaaacccaccaggaggaatgaccaactccggacggccaccggagaccacg

SEQ ID NO: 980158 - DNA, 89 bp, Artificial Sequence
  ENSG00000261166_2 (sequence is synthesized)
gtctgcagcttcactcctgaagtcagggagaccacgaacccactaggaggaagaaactcgggactcgcccgaacatctaagaactgtaa

SEQ ID NO: 980159 - DNA, 120 bp, Artificial Sequence
  ENSG00000261166_3 (sequence is synthesized)
atcaagaacccaccaattccggacacaataccttacagactctgaatgttcagtattactttatttccttccaatcataaatgttaaactgatagagatttcaagttctatatgttgata

SEQ ID NO: 980160 - DNA, 120 bp, Artificial Sequence
  ENSG00000261166_4 (sequence is synthesized)
tagagatttcaagttctatatgttgataagttgcataagataatttcggctttatgttttgacattattttcatgtaggtattttatagattagcataaaatattacgtatttttataat

SEQ ID NO: 980161 - DNA, 120 bp, Artificial Sequence
  ENSG00000261166_5 (sequence is synthesized)
ttgaaaagatattgaaaactgtgttttactttttctggcttttatttttattcttgaacaccatggtcaattgcttttttactttcatttctcaacttgtttggacaaattttgcaaaga

SEQ ID NO: 980162 - DNA, 120 bp, Artificial Sequence
  ENSG00000261166_6 (sequence is synthesized)
cttacccttggcctctcccgacaaattcctctcataagtaaatattatcttgagaatgtgtggactcttatgtagaaaaagaacaacataaactcaatgtttattaaaaaacgtgagatt

SEQ ID NO: 980163 - DNA, 120 bp, Artificial Sequence
  ENSG00000261166_7 (sequence is synthesized)
acaaatgacttttttaaaaagggaatcaaatttcatttcaggaaacttactagaaaaaaattcttatgaacacctaaactagtgtaagtgtgttattctgtgaaaacagtaattccttat

SEQ ID NO: 980164 - DNA, 120 bp, Artificial Sequence
  ENSG00000261166_8 (sequence is synthesized)
ttcaaaaatagtttctaataaaagaacctggattatatagctactcaagttgaacagatgatcacaaagaaccttaactgtaaccatatttagctatcaaaaatagaaaggaaattttgg

SEQ ID NO: 980165 - DNA, 120 bp, Artificial Sequence
  ENSG00000261166_9 (sequence is synthesized)
ttatagttctctgtcccacatttaatttaaaagaataatggctatttgttatcaaagtattttaatacatttcttatgtctgcccatctaaaatgaaaacttttatttccataaagtttt

SEQ ID NO: 980166 - DNA, 120 bp, Artificial Sequence
  ENSG00000261166_10 (sequence is synthesized)
gtataacatgtcttaaatgaatgtgcagtcataactgcattcggttactaaaggaactaataattcataaattgcatttatttgtatgttactaacattaaaaagagatgttttgtcatg

SEQ ID NO: 980167 - DNA, 120 bp, Artificial Sequence
  ENSG00000261166_11 (sequence is synthesized)
tttataatgatcgtcatgtatataatgatatatgtttataatgatgacatcatcgtcattgtaagattagctaaactctttgtccttcagtataaaaattaaagccagtatattattttt

SEQ ID NO: 980168 - DNA, 120 bp, Artificial Sequence
  ENSG00000261167_0 (sequence is synthesized)
atggaaatactgaaccttggataattctctaagtcttatagaggccaacagattaaggaatactttcaagagtatcccttacactacttagactactggtcatccttcctctccaagacc

SEQ ID NO: 980169 - DNA, 120 bp, Artificial Sequence
  ENSG00000261167_1 (sequence is synthesized)
tttttcctacctgctagggtagccgaagctgaaatgcaaatgttaattagtcctatttccacagtggcccctggcatgggtaaattggatgatgccagctgtcacaaacattaagttgta

SEQ ID NO: 980170 - DNA, 120 bp, Artificial Sequence
  ENSG00000261167_2 (sequence is synthesized)
aatgaaaatatttcttacagcaagtataaggatatactttacaagaatattaagcatttcagaatcagtagtgcttttgagtcagtagtgcttttgcagtctaatggtgaggtacaaatc

SEQ ID NO: 980171 - DNA, 120 bp, Artificial Sequence
  ENSG00000261167_3 (sequence is synthesized)
tgcttttcaactttcctcaaggggtagaatataaggatgacctttacagctaatttccaaaggtaaatttgcagatgggacctgaccatgtttcaggacatatggagaaatgtgtataga

SEQ ID NO: 980172 - DNA, 120 bp, Artificial Sequence
  ENSG00000261167_4 (sequence is synthesized)
actatggcctgtttttctagtgtaaagagtattagaatacagtcaaacacacggaagctgagttcgtacttagggttcctcatatgcagaatgaattccgttagtctgtaggattacttg

SEQ ID NO: 980173 - DNA, 120 bp, Artificial Sequence
  ENSG00000261167_5 (sequence is synthesized)
ccttacatccagtagcttattttgttgtactaatcaaaaaacccctctttgagaaagagtgtgtcagagtgaagtctctcctgattccagcaaaattgaacctacgccctaaatcgttgc

SEQ ID NO: 980174 - DNA, 120 bp, Artificial Sequence
  ENSG00000261167_6 (sequence is synthesized)
ccaaagagagactgttggctgtgtcacagtgaaaacccatgatgggaggaaagagcagtgttcagattgctgactctgaacctgttatttggacctctgggatgaatacctttaaatgtt

SEQ ID NO: 980175 - DNA, 120 bp, Artificial Sequence
  ENSG00000261167_7 (sequence is synthesized)
ggtgttattcctcatttttgtcagagtagaaacacagtgtgggcttcctgtggcactgagtcttgcaaacttgtcttctagcctggagtgtgatgtgcttctactagctacattattttt

SEQ ID NO: 980176 - DNA, 120 bp, Artificial Sequence
  ENSG00000261167_8 (sequence is synthesized)
ctatggctgattcttttcccttggtaggatgtgtgtgattctaaaaatgccttttactgcctgttttgcctgaaggtcaccacttgggaagttttccccacttttgcaggaactatggca

SEQ ID NO: 980177 - DNA, 120 bp, Artificial Sequence
  ENSG00000261167_9 (sequence is synthesized)
agaagaatgttatgtttctattatggtacttatcatgttactgcttatcatgcttttatgaacagttttataatggagcactttcgtgatgaggtagggcatgttgctgataacttactg

SEQ ID NO: 980178 - DNA, 120 bp, Artificial Sequence
  ENSG00000261167_10 (sequence is synthesized)
aactgctgaaccaagagagtgaagacaggcagacagaagcaactcactatgctatgaggccaccttgggcaaacatcttcaatagctttataatcatgtgttacttcatggctacctgtt

SEQ ID NO: 980179 - DNA, 120 bp, Artificial Sequence
  ENSG00000261167_11 (sequence is synthesized)
ttctctatgggaagaagttcttcacatgagagtttattttagtagtgatagataaagcttctactctcttcagggacttttcttaaagttgactttactataacaacagacagttcttca

SEQ ID NO: 980180 - DNA, 120 bp, Artificial Sequence
  ENSG00000261167_12 (sequence is synthesized)
gttttcagttttattgctatttctgctagaacacctcatccaccagcttggccccataaatgatagtggtctctcaaagcatgtcccaccagacaaatgaagactgtcattcagactttg

SEQ ID NO: 980181 - DNA, 120 bp, Artificial Sequence
  ENSG00000261167_13 (sequence is synthesized)
cctccagcaattacctaggattccctggaataagaggactcagtgtcattatcccctccagaaaacagccagtcctgagcatgcagggttgccagcctcaatttcatcgtttgcttttct

SEQ ID NO: 980182 - DNA, 120 bp, Artificial Sequence
  ENSG00000261167_14 (sequence is synthesized)
ccttagcaccacaaaagcaaacaaatgattttaactcaactggacaaagagtcttggcatagtaggtgcgtaattgttggtttttggatttgactggagagtgagagttgtgattttgat

SEQ ID NO: 980183 - DNA, 120 bp, Artificial Sequence
  ENSG00000261167_15 (sequence is synthesized)
tctccaaaagcagactatatgagcaccaagtatattttaggtcatttagaaagtttgttgtttgaacaaatgaggataagacatccatcagtttttgacactgcaccaaatctgcttgat

SEQ ID NO: 980184 - DNA, 120 bp, Artificial Sequence
  ENSG00000261167_16 (sequence is synthesized)
ttcaaaaggaactaactaaacactccatcacaagagtcctgacaaagatgcacggatggctatattaacgagactgtgtcaaaatgaataataataaatggctgtcttgagaatccaacg

SEQ ID NO: 980185 - DNA, 120 bp, Artificial Sequence
  ENSG00000261167_17 (sequence is synthesized)
taaatttccttatctaaaatagtggtttgtttaaatgatgaagcaaagatggcattggagctgttggctgactgtccctttttttctgctaactgcagaagcacggaatctgatgcccta

SEQ ID NO: 980186 - DNA, 120 bp, Artificial Sequence
  ENSG00000261167_18 (sequence is synthesized)
ctttgtggggtaatggtgtgcttatctccccctcctcaaacagagtttggcacgttgctaataacagccagcctactgctaaaatatcaatgacagaacagaagaaatagatatttagga

SEQ ID NO: 980187 - DNA, 120 bp, Artificial Sequence
  ENSG00000261167_19 (sequence is synthesized)
aaacataaatcaaagctgaggaagtaggcaaaaaaaaagcactgatagaaagcaaataaagaaagatctataatattgggacaggcagcatctccctgctcacatggtaattttctttag

SEQ ID NO: 980188 - DNA, 120 bp, Artificial Sequence
  ENSG00000261167_20 (sequence is synthesized)
ccagtaaccaacgaggatgcctgccatgggaagaaggtgtgattttgtgatttaatgatccaaagcccatttttagacaccacttagccataaagagaggcccaagtttctgtggtccag

SEQ ID NO: 980189 - DNA, 120 bp, Artificial Sequence
  ENSG00000261167_21 (sequence is synthesized)
gagtcattgagataagtatttatgacaaggtccacccaaacacaaggggacacaagaagggggcatgtcaggcacagggaattttcacagtggcttacaaaggcaagtcttactcttacc

SEQ ID NO: 980190 - DNA, 120 bp, Artificial Sequence
  ENSG00000261167_22 (sequence is synthesized)
taacacagtagttctccacactggctgcatgttagatccccacagaagagcttttaaaatccccaatccaatattcttggaattggggggcaggagagagtaggagacccagtcattagt

SEQ ID NO: 980191 - DNA, 120 bp, Artificial Sequence
  ENSG00000261167_23 (sequence is synthesized)
ggtttttaaagctccccagttaaatatttaactcccatttgaagaggggctaataagctgagattaagaaatactgacctaaaacaacatgacgtagacaggcaaatcatttgtggaact

SEQ ID NO: 980192 - DNA, 120 bp, Artificial Sequence
  ENSG00000261167_24 (sequence is synthesized)
caggccagttaattggtcatctccctgaaacaattcaaattggagaaaattctgtacaaatgtagtaatagtgatgttttatatgtgtatagtattttaaattttaaggtgtttttatgt

SEQ ID NO: 980193 - DNA, 120 bp, Artificial Sequence
  ENSG00000261167_25 (sequence is synthesized)
tcatgtcagggtgctctcaggaaaatgcttagcatcttgtaaaactgcaaatgttagatatcatcaacccagtgttataattgagaaaacaagcagagtgcaagtctaggacttatttgg

SEQ ID NO: 980194 - DNA, 120 bp, Artificial Sequence
  ENSG00000261167_26 (sequence is synthesized)
agtctcaccaaagaagtggctggcaaagcctaaaattggggcactggacactttcctatattcttctatcctgggaatcatgatttcctttgaagaatgctgtaaaatgttgagtgtatt

SEQ ID NO: 980195 - DNA, 120 bp, Artificial Sequence
  ENSG00000261167_27 (sequence is synthesized)
tgtttttgtctgttatgaactgtgattggcctcacacataaataatgaattcttttaggttgctttaggaatgtgttactttagtatctcaaatcaataatacaatcacaagtgaaacaa

SEQ ID NO: 980196 - DNA, 120 bp, Artificial Sequence
  ENSG00000261161_0 (sequence is synthesized)
aactcagtggcatgaaagcatcccagaacgttcagatgtgtgcccagccctgtggctctcacgcatctcctgtgctagggggacgatctggatcagtgcctggcccatggaagactcctg

SEQ ID NO: 980197 - DNA, 120 bp, Artificial Sequence
  ENSG00000261161_1 (sequence is synthesized)
acccaggcttgttcactgaatgaaggcattccacatgttctgtgatgcgggcaagtcattcattcatttatgcatttagaatgagctttgagaatatggcagcctacaaaatggacatgg

SEQ ID NO: 980198 - DNA, 120 bp, Artificial Sequence
  ENSG00000261161_2 (sequence is synthesized)
cctatggcctcttgcctggaaagagatgttaccacgttattaggaggtagtgtggtgtgagccactttggaaggaatggtgactctgaacctctgggggatggaagaaaagaatgctgct

SEQ ID NO: 980199 - DNA, 120 bp, Artificial Sequence
  ENSG00000261161_3 (sequence is synthesized)
ttgcatggacaaacctgagttcgattcccagcgctgtttatcggatgtgggatctgatcttggggggaccttcttcaagcctctctgagcttcagtttctgcattaaaaatgagaagaaa

SEQ ID NO: 980200 - DNA, 120 bp, Artificial Sequence
  ENSG00000261168_0 (sequence is synthesized)
tcgtccctgttggaggcaagggtctgcccccggctcttacttaaggagcgggacgggggacgagagcgtgcgcggcgtcacacgcacgcttagccaccccccaagaagccgccgccgcgc

SEQ ID NO: 980201 - DNA, 120 bp, Artificial Sequence
  ENSG00000261168_1 (sequence is synthesized)
tcaagctccgcgcgctcaggaccaggtagcgtgtagctgtcgtgaagctccctttgctccggttgggactggctgcggatacctgtccgttatccccggcaccaatgagagggacgaaca

SEQ ID NO: 980202 - DNA, 120 bp, Artificial Sequence
  ENSG00000261168_2 (sequence is synthesized)
ggaccacctgcaccgcccaccaccctcgctaacaacgctttaaggcctaacgcaggaggcagctggtgcgaatttacaaatcgggtttttcacccccgcgtggctgcaatgtccgcccag

SEQ ID NO: 980203 - DNA, 120 bp, Artificial Sequence
  ENSG00000261168_3 (sequence is synthesized)
ttcgagccccacattctcccgctggctccgcctgggggtcgggccaactcttgctgctaaggaagcctcaccagtccccttcccgtttgctacctaaatgtcctcggcgggaaactgctg

SEQ ID NO: 980204 - DNA, 120 bp, Artificial Sequence
  ENSG00000261168_4 (sequence is synthesized)
agaacaatttggggaagcctgaacttgttcctagttccgcgctttattacttgtgatcatgactggtcagaactccgcccggagcctccatttgttcatctgaaaaatggggttgagaag

SEQ ID NO: 980205 - DNA, 120 bp, Artificial Sequence
  ENSG00000261168_5 (sequence is synthesized)
ctcaagtaccagaatgtgaaaacgctttctaaaggcgaaggcatggtatcttgtgagatagtaattccttcaaactcacgcataggctattcctattcctaactttgcgatctgctttca

SEQ ID NO: 980206 - DNA, 120 bp, Artificial Sequence
  ENSG00000261168_6 (sequence is synthesized)
gttaagcttgtctggccaaatttggttgtcctccagagtctgacctctttttgcttggcgcttgtttcaccaggttgaagtggtcctttaggtctcagtttttcccgtatggggtgcctt

SEQ ID NO: 980207 - DNA, 120 bp, Artificial Sequence
  ENSG00000261168_7 (sequence is synthesized)
acttaaaccaaggtgcctcggggccagtgctagtttcctagatactggaggaaagcaagcaaggaaggagtagagaatccagtcacttgacttcattatcctcttcaaaccgaaattttg

SEQ ID NO: 980208 - DNA, 120 bp, Artificial Sequence
  ENSG00000261168_8 (sequence is synthesized)
aaggacaaggaaaagtttcaaggctgcagcctttcacagtcctctgagggacaaaactcaaatatagttcttgccttgaaggtggtcacaaacaaaaagggtaaatgatcctaaggttta

SEQ ID NO: 980209 - DNA, 120 bp, Artificial Sequence
  ENSG00000261168_9 (sequence is synthesized)
aatatagacctaaaagagagatatatacaatggaaatttaatcttgtaattctttgcaggcagcagtaatttataggttaaagtcctggttgtagtttaattataaaatatgttctttta

SEQ ID NO: 980210 - DNA, 120 bp, Artificial Sequence
  ENSG00000261168_10 (sequence is synthesized)
ttagtatttatcactatggtgacttctttagccaaagagtatctaaactgaactctcagagctaacagaagtaactatgttgcagtgagagcaacagtcctgggtctctacctcttgttt

SEQ ID NO: 980211 - DNA, 120 bp, Artificial Sequence
  ENSG00000261168_11 (sequence is synthesized)
tctatgtgaccttggcaattcaaccaacatctttgaggctgtttttttggtaaggaatggaaagaacatatggcaacagggatttgtaaagtaccgtataaatatatatatttaaattaa

SEQ ID NO: 980212 - DNA, 120 bp, Artificial Sequence
  ENSG00000250994_0 (sequence is synthesized)
gagtctgggtggaaatgatgccttcgcagagctgagagcacaaaatgaagttggtgattcatgggcagcagccacttgaaaatatgaacactcctgcgtccccagccccgccggcctttc

SEQ ID NO: 980213 - DNA, 120 bp, Artificial Sequence
  ENSG00000250994_1 (sequence is synthesized)
acacccatttggaggcgtgttgagcagagctgctagcctgctgcatcctagtctgcatgtgtttgggcaggatgtgaggacaggccggttctaccctgacaaggagcctgcaaagggcag

SEQ ID NO: 980214 - DNA, 120 bp, Artificial Sequence
  ENSG00000250994_2 (sequence is synthesized)
acatcgctgagggccccaattgtgaggacattgcccatcaatcttggagcctccacaccaagctgggattctctctcttctggacttcatagccttctgagaccgcactggggagaacag

SEQ ID NO: 980215 - DNA, 120 bp, Artificial Sequence
  ENSG00000250994_3 (sequence is synthesized)
taagagagctttgtaaggccactctggctcctcacccaccttttctgggctcactcttctgaagccatagctgacctaagcgacccacctgggcttttaaggtgggctacattcccccag

SEQ ID NO: 980216 - DNA, 120 bp, Artificial Sequence
  ENSG00000250994_4 (sequence is synthesized)
gcccaggaactacaaatgggaggccaggagtgctatatgccgcagccagaggcgtctgtgctccaaaaagtcttctgagtgggcttctcagcagtggatgggaacgtagggcagtcttct

SEQ ID NO: 980217 - DNA, 120 bp, Artificial Sequence
  ENSG00000250993_0 (sequence is synthesized)
atttctctctggacgatgaagaatagtagtacctcatcacagagctgctgtcaggactaacaggagaaatcccatataatgtacctagaatatagaaaccagtcactaaacgataccaag

SEQ ID NO: 980218 - DNA, 120 bp, Artificial Sequence
  ENSG00000250993_1 (sequence is synthesized)
agagaagagagaatattatctgaggaaattacatcctcctctcaggagaagatgcaagaacagctcatctgtattatcaggatgaaatgaagagcatattggaccaagagctggttgctg

SEQ ID NO: 980219 - DNA, 120 bp, Artificial Sequence
  ENSG00000250993_2 (sequence is synthesized)
ttttttttcagtgtagtaggacgcaagatcatctgttaacagtgagcatgggagaggatgtggagaaagtttggagagaagaaattgtatgaaattgtaatctccaaaatcaaaagaatg

SEQ ID NO: 980220 - DNA, 120 bp, Artificial Sequence
  ENSG00000250993_3 (sequence is synthesized)
catgaagtagataagtgttataatatcattatgttattaatcatggcatcatagtaacaatactattaatcgcccacatcagatctgttttgatgaatttaaacacttaaacagaatatt

SEQ ID NO: 980221 - DNA, 120 bp, Artificial Sequence
  ENSG00000250992_0 (sequence is synthesized)
agtatataaatggtgctgaaggggtgtcaggccgttctaggctcatgcgtgtctgcgcgctgggctgctccgttcccggcttagaggaccaggacaagggctagccaccgctgcatgctg

SEQ ID NO: 980222 - DNA, 120 bp, Artificial Sequence
  ENSG00000250992_1 (sequence is synthesized)
gaggctgtggctgcggcaccacagctcgcctcgctgcggttggtggcagcgacggagactgcagtgtggctggagcgcccagggatgcaggggaggtcccagcaagtggccacgccagct

SEQ ID NO: 980223 - DNA, 120 bp, Artificial Sequence
  ENSG00000250992_2 (sequence is synthesized)
gctgcccttctcccctggccattgacacatctggttcacctcagcatccctaggtgttacgaggagggcagagtgtagccagccctggcctgggaatgcaccaacacggggtccctgctg

SEQ ID NO: 980224 - DNA, 120 bp, Artificial Sequence
  ENSG00000250992_3 (sequence is synthesized)
tggtcatggacatgttcacccatgtggacatcttcaaagacctgctggatgccggcttcaagaggaaagcagatttgtacatcatcgtggacgggagtaaagtcaagtacgttctgcata

SEQ ID NO: 980225 - DNA, 120 bp, Artificial Sequence
  ENSG00000250992_4 (sequence is synthesized)
tgtgtgagcagacccgcatgcacctggggcacctcaaggtgagcaggctcctcacttgcctacgtggccagatggcaggggtcattcagtttgtcaaacacctcgagtacctgcctgctc

SEQ ID NO: 980226 - DNA, 120 bp, Artificial Sequence
  ENSG00000250992_5 (sequence is synthesized)
tggacggagtcctgtgccaggcactcagagtccagtaatcctagagcctctgcttgaattccctgagggacaggatacttgccatgtctgatgggacagagataagataaacattgatga

SEQ ID NO: 980227 - DNA, 120 bp, Artificial Sequence
  ENSG00000250992_6 (sequence is synthesized)
ggtgcttgctgaccaggtgctggagctcatgccaagtgctgcatcatatgttatttcagagcagcccatgccacattggttacctgtctgcttgcatacccctggtcatagtgtgctcac

SEQ ID NO: 980228 - DNA, 120 bp, Artificial Sequence
  ENSG00000250992_7 (sequence is synthesized)
tatgtcctcaggtagctcgtggcctatctggagagattcagttcccaggaagtctttcttgggttaagccaaaacctgtctccttagaatgtccatttactggttttaggatctggctca

SEQ ID NO: 980229 - DNA, 120 bp, Artificial Sequence
  ENSG00000250992_8 (sequence is synthesized)
gacagaagcagctctccctcaggctgaggccagggaaggcttccttgatgtctgcacagttgaagtggatttgaggcacatgagcagagtagaacctttagggtggggagaaaccacgga

SEQ ID NO: 980230 - DNA, 120 bp, Artificial Sequence
  ENSG00000250992_9 (sequence is synthesized)
acagaggtggatcagagacggctgccagtggggtcaaggtgggctgcaggtccccagtgctgcttttctgtgtgtccctgggcatgtcacctcccctttctgggctatacaacatctcat

SEQ ID NO: 980231 - DNA, 64 bp, Artificial Sequence
  ENSG00000250992_10 (sequence is synthesized)
ttgctccaactctgttctacccagacaccctggcatttggtaggttggagtgcagtggtgcgat

SEQ ID NO: 980232 - DNA, 85 bp, Artificial Sequence
  ENSG00000250992_11 (sequence is synthesized)
gcctcccaagcagctgggactacaggcgcgcaccactacgcccaactactttttgtattttctgtagatgctctggacctcgtga

SEQ ID NO: 980233 - DNA, 78 bp, Artificial Sequence
  ENSG00000250992_12 (sequence is synthesized)
ccatccaccttggtctctataaaagccagttttaaaactgaaaaaacagctttgaaattgagggctgcatttttacag

SEQ ID NO: 980234 - DNA, 120 bp, Artificial Sequence
  ENSG00000250992_13 (sequence is synthesized)
tgaaaaaacagctttgaaattgagggctgcatttttacagagaatattttccagcatgtgcaatctaacatagtagcactatactcctcacttaaacagactagcttttataatgaatga

SEQ ID NO: 980235 - DNA, 120 bp, Artificial Sequence
  ENSG00000250992_14 (sequence is synthesized)
ttttgttttaaaatgtgagtaacagcacaccaggggctgtgacagcatgatcgcttctgttaacatctctttctaataccgtagtcccacgtaagctgcatttggctttcacggtttcac

SEQ ID NO: 980236 - DNA, 120 bp, Artificial Sequence
  ENSG00000250992_15 (sequence is synthesized)
ttacctacaggcaatcctggtctgaaaacattaaatgaaaaatccacagataaacaactgacaagttttaacttgctgtgctgttccaagtagtgtggtgggagctcctgtcatccccct

SEQ ID NO: 980237 - DNA, 120 bp, Artificial Sequence
  ENSG00000250992_16 (sequence is synthesized)
ctactcaaggcccacccaggacgtgaatcatctctgcccacaacatctacctgtctaccttcccacttgttagtcacttagcagctctctgagtcgtcaaatcctctgttgagatatcac

SEQ ID NO: 980238 - DNA, 120 bp, Artificial Sequence
  ENSG00000250992_17 (sequence is synthesized)
agtgtttgtgttcaaagaaatcttgttttacttaatggccccaaagtgcaaaagtactgatgctggcaattcaaaaatgccaaagagaagccataaagtgttccttttaagtgaaaaggt

SEQ ID NO: 980239 - DNA, 120 bp, Artificial Sequence
  ENSG00000250992_18 (sequence is synthesized)
gaaagttaatcatagggcatgcatgtgtagaaacaaagataatctatattggatttagtactatctgtggtttcaggcatcctctgaagatcttgaaatgtatcccctatggataaagga

SEQ ID NO: 980240 - DNA, 120 bp, Artificial Sequence
  ENSG00000250992_19 (sequence is synthesized)
ggactactatattctcaatggattttgcaagaagaaaattaatcattcacaaaatattttaaccttagaatttaaataaatgtgtatattctctacaagttaaacacaaatattgtaata

SEQ ID NO: 980241 - DNA, 120 bp, Artificial Sequence
  ENSG00000250990_0 (sequence is synthesized)
gagttctccatgggatcaggctgagactagagttctgaagcagctgtattctggcccagcttcttccccagctctatcctgcttccctccatctcctataggattctccttagagttctc

SEQ ID NO: 980242 - DNA, 120 bp, Artificial Sequence
  ENSG00000250990_1 (sequence is synthesized)
cctccattagtagttgtcttagggtctgtttctggggagccctgcctaagactcatgctacaagaagttaaataagtttcccgaagtcacacagctagcctctcatcccttttctactga

SEQ ID NO: 980243 - DNA, 120 bp, Artificial Sequence
  ENSG00000250990_2 (sequence is synthesized)
gaaggtggaaggagtgcaaagtatggtgaccattctatttacgttctataatagattgtaaaaagtggccacgaattcctcctatctgcaggctttcctgactaaggggtgcttcaacat

SEQ ID NO: 980244 - DNA, 120 bp, Artificial Sequence
  ENSG00000250990_3 (sequence is synthesized)
caaagctccttaggatttacttcctttctaaagcaacgtcaaaaggcttttggttttaaggatctatgggtgaagagataatgcaggaagcccgatatgctgacatgtgtgagaggcatc

SEQ ID NO: 980245 - DNA, 120 bp, Artificial Sequence
  ENSG00000250999_0 (sequence is synthesized)
gggagttgattcggaagtgaagggccctgggcgacccggcgagtagaggcaacaccaacactcctccttagcgaggggtctccccgccgcggtggctgcccggccccaaggacaggaggg

SEQ ID NO: 980246 - DNA, 120 bp, Artificial Sequence
  ENSG00000250999_1 (sequence is synthesized)
atttgtgcactgactcctgaccccgtcctccagcgctgctctgaagggagagtctgtgcagtggcacctgcgcgaagctggccaaagcctgcccagacggctcacctgtgcgggatggaa

SEQ ID NO: 980247 - DNA, 61 bp, Artificial Sequence
  ENSG00000250999_2 (sequence is synthesized)
agcctgcccagacggctcacctgtgcgggatggaacaaaagaatttcgctcttgttgccca

SEQ ID NO: 980248 - DNA, 120 bp, Artificial Sequence
  ENSG00000250999_3 (sequence is synthesized)
gggattacaggtcggcttgaggtttgcgagtcccagctcccactgcccctgccacctgcctttcccttctcaggacatacacaggactgggagaaaatagactaagtatttgatattaca

SEQ ID NO: 980249 - DNA, 120 bp, Artificial Sequence
  ENSG00000250999_4 (sequence is synthesized)
agtcccggttccccgccatgagcacgacctgtgtgagagcacagggtatctgggcagaaggaaaactaggggagcctcatccagcgctggagatggagaagctttgggcttctcgacggc

SEQ ID NO: 980250 - DNA, 120 bp, Artificial Sequence; identical to SEQ ID NO: 556554
  ENSG00000250999_5 (sequence is synthesized)

SEQ ID NO: 980251 - DNA, 120 bp, Artificial Sequence
  ENSG00000250999_6 (sequence is synthesized)
tagactaagtatttgatattacagtattgttaggtttttatatgtgcggtatcttaggagggaacagaaagcagcagacacaccactgacgatggcttccagtgtggcaggggccaaagc

SEQ ID NO: 980252 - DNA, 120 bp, Artificial Sequence
  ENSG00000250999_7 (sequence is synthesized)
ccttgctctgtggctccaggggcagcctgtgcaggcccagcctggggccactcatgctccccagccccacacgaggcccatcccgtctcagcataggcttccttctttccactgttcctg

SEQ ID NO: 980253 - DNA, 120 bp, Artificial Sequence
  ENSG00000250999_8 (sequence is synthesized)
agcaggctgtcatgggcctttggtccctacacagtccactccagtggccaccaggcttctgcagccatcatttcccatgtgcacgtgggaaagaactaggccaggcttctaagttatcta

SEQ ID NO: 980254 - DNA, 120 bp, Artificial Sequence
  ENSG00000255313_0 (sequence is synthesized)
acagacagcccgcagaagggcagcaacgttttggagctccttttagttctctttattgatatattttaattgaacccagattttttttttcctgtctagcccttggagacaagctctgcc

SEQ ID NO: 980255 - DNA, 120 bp, Artificial Sequence
  ENSG00000255313_1 (sequence is synthesized)
agagctcgtatagcagagagaaggtcttgagattagtgatactcagcgtttctgacactggagacctgcataagaatttaacaaactgggaagcagttttcatgacaacccttttcattg

SEQ ID NO: 980256 - DNA, 120 bp, Artificial Sequence
  ENSG00000255313_2 (sequence is synthesized)
catagatgttaccaagagtttgggggtgtttttaagaaaagccattaggctggaagtcagacacacctggatttgagatccgctctgctacttcgtacttgcgtggttttgaggaatcat

SEQ ID NO: 980257 - DNA, 120 bp, Artificial Sequence
  ENSG00000255313_3 (sequence is synthesized)
ttggcctcttttcaggttttagatccttcacctgtaaaatgaggatggttgtgagaaagggaaattgctctgtaaacagtgaagcactattcaaatgctcaggctttgtaaaaaattgat

SEQ ID NO: 980258 - DNA, 120 bp, Artificial Sequence
  ENSG00000255313_4 (sequence is synthesized)
ggaaaatgtcataagaagtgggcagttctggtttgcttccattgctataggaagctggcacacacaagaaagtttattgacagcagctgagatgtgctgaagctggtaattatcttcaag

SEQ ID NO: 980259 - DNA, 120 bp, Artificial Sequence
  ENSG00000255313_5 (sequence is synthesized)
catccttagcctgatctggcccctccactggcctctgagtgtggagtgagacagagctgaaatggagaagccgggcttggctggaagcgaggagggtggaagtgaagtccgtcaccgctg

SEQ ID NO: 980260 - DNA, 120 bp, Artificial Sequence
  ENSG00000255313_6 (sequence is synthesized)
gtgggagtgtcggccacaacagtatgtcccctcctgcatagcttcctgaactgtgaccttgccactcttccatcacgaggtggtgtctgtttcaccacctcctgaagctgggcaggccct

SEQ ID NO: 980261 - DNA, 120 bp, Artificial Sequence
  ENSG00000255313_7 (sequence is synthesized)
ggaagtgatgctgtgctactcccaggcagagcctttcatgggcccggtggctttgctttctgcctcttggaagccggctacaatgaaggaagtttgtctatatcctgagaccactatgct

SEQ ID NO: 980262 - DNA, 120 bp, Artificial Sequence
  ENSG00000255313_8 (sequence is synthesized)
gtgagcagcccgtgaacccaccggagaggtcttgcaggaggaaatggcccatggagagagagagaagccaaggatcacaaggcaccagacccagaacttttaatattacagaattttaac

SEQ ID NO: 980263 - DNA, 120 bp, Artificial Sequence
  ENSG00000255313_9 (sequence is synthesized)
aatttctctgattctatactgtatctctcctatgcttaaagtctagaatcccaatggcattcattaacataatcactgatcttacaatatatatacaataaatttatatacgataaataa

SEQ ID NO: 980264 - DNA, 120 bp, Artificial Sequence
  ENSG00000255310_0 (sequence is synthesized)
gtttaaaggccatcttagatgctgaaaactctgagcacaaatgaaagcgacccaagaaggaaaaacttcagagcctaagaataaaaaatggtggtagggttgggggataaactcgcccag

SEQ ID NO: 980265 - DNA, 120 bp, Artificial Sequence
  ENSG00000255310_1 (sequence is synthesized)
agctgacttaaagtgctgtcagggaaggaagtgcctttcctggggaggatgagatggtccatgccgggtctggagctgtgggcgttctgatgttggatagcccaccctagcaggctgcag

SEQ ID NO: 980266 - DNA, 120 bp, Artificial Sequence
  ENSG00000255310_2 (sequence is synthesized)
tgtcttaagggtagtggcatgagatctttggaagtatcgatacatttcctaacagtgagtttgagtttgttctggtatgttctgaatggatatgtggctcaaagattaacttagctaaaa

SEQ ID NO: 980267 - DNA, 120 bp, Artificial Sequence
  ENSG00000255310_3 (sequence is synthesized)
ataagtatattagatattagggaaatattgttaataaaggtcttctgtccctgttggataactttagaaaataatgtagacaactgaacgtagtggagatgatggcatgaatacagtcag

SEQ ID NO: 980268 - DNA, 120 bp, Artificial Sequence
  ENSG00000255310_4 (sequence is synthesized)
ggtttgatgcttgcttcctagaaacttcctagaaatagaacacatctagacatagggaaataaggttccaaagaaaaccttacacttttattcagattttatgttggcctcagttgtact

SEQ ID NO: 980269 - DNA, 120 bp, Artificial Sequence
  ENSG00000255310_5 (sequence is synthesized)
agaaaagcgtttcagtatgtgtctcttggggaatctgcaccttcttggtcactgcacttcatagcccggcatatcactgagaattcagaaatctgactctttacccagggacgaatacat

SEQ ID NO: 980270 - DNA, 120 bp, Artificial Sequence
  ENSG00000255310_6 (sequence is synthesized)
cgttatgagttcaggtgcactaaatacataggaacacccagagaaaatgagcccgaaacaatggttctttttattttggaagtttcagacaaactctttggaaaattgaagaaatctatg

SEQ ID NO: 980271 - DNA, 120 bp, Artificial Sequence
  ENSG00000255310_7 (sequence is synthesized)
gatccttttcctgggaagactgtacagacatacgtattcgtgtggtttctgtgggtgtagggactggccctggtcatgtgtcaggaagccccaatccagaagatcgtcttcattttacct

SEQ ID NO: 980272 - DNA, 120 bp, Artificial Sequence
  ENSG00000255310_8 (sequence is synthesized)
gttctcgcgcccatctgtggttgattctctgtcgccttggaatggagcatcagatcttgaaggtcgctcattgcttttccacgcatagaactgagccacatggcaagagcttcctaatga

SEQ ID NO: 980273 - DNA, 120 bp, Artificial Sequence
  ENSG00000255310_9 (sequence is synthesized)
aatggacggaaactctctgcaaagggctgccccagaagcacgggtgatagaaatagagtccaaggcactaaggccgctgagccacagtcctcctaggcaatgcctcctgctggcttagtg

SEQ ID NO: 980274 - DNA, 120 bp, Artificial Sequence
  ENSG00000255310_10 (sequence is synthesized)
ggtttatttcataagttgagtactaatgtcctgttttttaaatgaacatatttcttctaacatttctaacaattatgaagattttctccctaagtgtgactttttcttatgtcttggggt

SEQ ID NO: 980275 - DNA, 120 bp, Artificial Sequence
  ENSG00000255310_11 (sequence is synthesized)
atcagatttacagcgtaacatgtgtacttcaaattgtagtagtgactggaaatttaggattctgttgtttcataacacttaaatctgcagcagattttcaggaaaatggtcaagattcac

SEQ ID NO: 980276 - DNA, 120 bp, Artificial Sequence
  ENSG00000255310_12 (sequence is synthesized)
agataattccttccttattccttacagattttacaattgtatggttatttctgaatttggttaatttgtttataagtgtagtggacatttaacagaacagatgcacccgattatctgatt

SEQ ID NO: 980277 - DNA, 120 bp, Artificial Sequence
  ENSG00000255310_13 (sequence is synthesized)
agaaatgtgtttcaacacacgggtccctttgcgtgtttccaatctctgttttcggatctgggattctccacctgttacatcgttcactggaactttcctacaaaatacagcctcgctgag

SEQ ID NO: 980278 - DNA, 120 bp, Artificial Sequence
  ENSG00000255310_14 (sequence is synthesized)
aggcgcatcgtggaaaaatgaagcagcctgaagaaactctaatattgggaccgagtggagagatggaagagcatcatcagagtggtgccgccgcacatgcgggaggcgtcccaggcagca

SEQ ID NO: 980279 - DNA, 120 bp, Artificial Sequence
  ENSG00000255310_15 (sequence is synthesized)
ttgctctttgtacatgagacaggataccactgtcttttatgcattagactggtaaccagataaaataaccttgtaaaacagatcttttatgtaagaaaaatacaactctcacctcgcaaa

SEQ ID NO: 980280 - DNA, 120 bp, Artificial Sequence
  ENSG00000255311_0 (sequence is synthesized)
ctcctctggatcttttctggttccttcgctcctagaactgtgtctgatggcttatgaaggcaaatgacaaatgtttgccatatgcacatgtatgtgcatgaatgaatacatccaggttct

SEQ ID NO: 980281 - DNA, 120 bp, Artificial Sequence
  ENSG00000255311_1 (sequence is synthesized)
gacttcctcggggcaacctctactttctcaatgcccctcttaagatgggggtgggggagggtcctcctagaactgaacatgatattccaggtgtgatctaatacatttaaatgtccaaaa

SEQ ID NO: 980282 - DNA, 120 bp, Artificial Sequence
  ENSG00000255311_2 (sequence is synthesized)
gctctttcttccctaaacgttcctttttaaaagctactgttctcaattaatgggtgtctcatcttcttaagtatattaataagaggtattttgatgtttccctccattctgtggattacc

SEQ ID NO: 980283 - DNA, 120 bp, Artificial Sequence
  ENSG00000255311_3 (sequence is synthesized)
tttgttttaaggatgttctcaggtgtctggtgatccttgcttataagtccaaattaatgatgaggcactaaaatgctgattggaagctctctgtgcaggccttcctcacacccatgtctt

SEQ ID NO: 980284 - DNA, 120 bp, Artificial Sequence
  ENSG00000255311_4 (sequence is synthesized)
cagatacccaaggcctttaatacccaagtccttccaggattctgcacatctcattagcttcatattccctctatttgaaaagttcatatggacccagctctgtcatcatcacatgttcta

SEQ ID NO: 980285 - DNA, 120 bp, Artificial Sequence
  ENSG00000255311_5 (sequence is synthesized)
tatccccaaaccttgtgacatctgcaaagaagtacagaagacctcaagagaagataagctagaatttatttatttttataccttttattcagtttttattaaagctttcctacctttcca

SEQ ID NO: 980286 - DNA, 120 bp, Artificial Sequence
  ENSG00000255311_6 (sequence is synthesized)
agatgcaggatgactgaagcccgattctgggggttgttacagcacagttacagggccttcctcacacccatgtcttcagatacccaaggcctttaatacccaagtccttccaggattctg

SEQ ID NO: 980287 - DNA, 120 bp, Artificial Sequence
  ENSG00000255311_7 (sequence is synthesized)
cacatctcattagcttcatattcccatttgctgtattatcagtgtctgatgatgttgacaatgttgaagaagaagaaagaagaggagttggaggaggaggaagaaaacatccagagcatt

SEQ ID NO: 980288 - DNA, 120 bp, Artificial Sequence
  ENSG00000255311_8 (sequence is synthesized)
gagacatgtaaatcctgtttccaaaacacacttagaggattacagcatgtgaaagatttgctccctacctggctcagagctacgaaggtcacattggctgtcaaaggacatgtcttctgg

SEQ ID NO: 980289 - DNA, 120 bp, Artificial Sequence
  ENSG00000255311_9 (sequence is synthesized)
ctagaagaagccctggtgaaatcttatgtgatatcggcacctttgcagaaagtaagaaacaaatcacctgaaatctacacacttaaattcagcctgtgttggtctaatcaaatttggccc

SEQ ID NO: 980290 - DNA, 120 bp, Artificial Sequence
  ENSG00000255311_10 (sequence is synthesized)
ccaggagctaaaataatatctaagtttcctctttgcctgacgccatccatgcaaaatgtgacttgcttcttcagcagcagcatgaaaacaaactaatacaccactattcctagtttgtac

SEQ ID NO: 980291 - DNA, 120 bp, Artificial Sequence
  ENSG00000255311_11 (sequence is synthesized)
tggatgagatgccgtctttcctgaccatacttaataataaagatgctgggactcaagaggaactaagcagtgtatatttttcatgtatccgcttgatgcaatgaatcttttggcttcaga

SEQ ID NO: 980292 - DNA, 120 bp, Artificial Sequence
  ENSG00000255311_12 (sequence is synthesized)
gagttgcccattagccaagaagaccggctttagactttctgagaaaagggtttgctgtcaaaaggaaaagctctgagtcattctttagaaaaggtgaagagaggatatgcaaccacaagc

SEQ ID NO: 980293 - DNA, 120 bp, Artificial Sequence
  ENSG00000255311_13 (sequence is synthesized)
caaaggtctgaatagcccttgtgaaggcagcatttgagagaacttctctgccacatgctgattcctctcaccgcgggaagaaaccaacctaccctggggagcctgagagctctttgagta

SEQ ID NO: 980294 - DNA, 120 bp, Artificial Sequence
  ENSG00000255311_14 (sequence is synthesized)
tctgggggtgaatcaactaatctgattaattgttttcagagttaaaaaggcttagtcctggaaaagtcgaagaggtgaaaacctgcctggggaggctgctgaaggacgccaggaagaatt

SEQ ID NO: 980295 - DNA, 120 bp, Artificial Sequence
  ENSG00000255311_15 (sequence is synthesized)
cttatctccaaattcaatcctgcctcccagctagctgctggtgtttgaaattccaactctgaagtggtagtctggtatcttcttttaaaatgtggaagagagtaaacaaagttattcaca

SEQ ID NO: 980296 - DNA, 120 bp, Artificial Sequence
  ENSG00000255317_0 (sequence is synthesized)
cggggttttgcttcatcattgagcttgtcctgccagcctccaccagttcctgaagagaacaggccaaagtgtggaacatacaggatgaagcgattacaacctgggcgcagtatactggct

SEQ ID NO: 980297 - DNA, 120 bp, Artificial Sequence
  ENSG00000255317_1 (sequence is synthesized)
agtgctgggatgtccgctggcctcgaggcaagacaagagctccaatcactctgctgcaagcgccaccattaaagtcaagatcactgtggtggggggagttgaagtgtgcattccagcatg

SEQ ID NO: 980298 - DNA, 120 bp, Artificial Sequence
  ENSG00000255317_2 (sequence is synthesized)
ctcatgatcttactgaccttctccactgatgaattagaacacccctcttcccaggcacaggacgagttcagtgcctctctgtttcttgatggaccccaataaaaaaacgcctgcactgtt

SEQ ID NO: 980299 - DNA, 120 bp, Artificial Sequence
  ENSG00000255314_0 (sequence is synthesized)
gggaggacaggttgggtagtaagacccagctttaccatctagagctaactgtaatgtatttaaaatgagggagggggtctttcaagctggacccactggccagtcactggaactataacc

SEQ ID NO: 980300 - DNA, 120 bp, Artificial Sequence
  ENSG00000255314_1 (sequence is synthesized)
taatggtgtgatttcaaatcatcccaggctatcaaccttttttcataggaagactgctttggtgttctttctggaaaaagaagagaactgatgagatagaagttgcagatgaccaagttt

SEQ ID NO: 980301 - DNA, 120 bp, Artificial Sequence
  ENSG00000255314_2 (sequence is synthesized)
actgaaaatgggtgctgtgagtgaaagaaagaggaatggattaaatttaaaatgacactacttcagccatctcagcatctgggttggtggacaaaactagaggctgttctgatcatgatc

SEQ ID NO: 980302 - DNA, 120 bp, Artificial Sequence
  ENSG00000255314_3 (sequence is synthesized)
aagcccaagacagagcgatgggcgtggcttccccaaaggtgtttatgaatccaaaatctgagagagagaagacaagatgaagtcacagtctagtcattgcctcaacaccagtcattccta

SEQ ID NO: 980303 - DNA, 120 bp, Artificial Sequence
  ENSG00000255314_4 (sequence is synthesized)
ctcccacccagacaacatcatctccactcccaagcccgaaatgctccctgccatgccttcgaggctgaggtctgggaagaaaactctaagaagagagaaaagggcaccagtatggagacc

SEQ ID NO: 980304 - DNA, 120 bp, Artificial Sequence
  ENSG00000255314_5 (sequence is synthesized)
tataaaaagcagacttagcctgtctaacctgttccttgacttggccatgatcccaggaatggaggaaggatcttccttttcttcctcctcctggagaggcatcagagcatgggccctggc

SEQ ID NO: 980305 - DNA, 120 bp, Artificial Sequence
  ENSG00000255314_6 (sequence is synthesized)
tctgttactccctggctggggaagttacttacctactccgtgtctcagttttacttatctctaaaaggggtagagtaacagcactcactggagtggagtgtggttatgcctcccagcctc

SEQ ID NO: 980306 - DNA, 120 bp, Artificial Sequence
  ENSG00000255314_7 (sequence is synthesized)
tccttcagaactaggttacttattccctcagctgcaaggagtgttagctgcggactgctcacaacggagtctcttctagggattgccctcaaccgaaggaagctgcattgcccaagatga

SEQ ID NO: 980307 - DNA, 120 bp, Artificial Sequence
  ENSG00000255314_8 (sequence is synthesized)
gatcccctcgctggggcatcctgcatccaatgacaagtcagtggggcgtacgaaggcctggcttcctcatctcgattggacatctccaaagggccatcccagtttctgatctccccgtag

SEQ ID NO: 980308 - DNA, 120 bp, Artificial Sequence
  ENSG00000255314_9 (sequence is synthesized)
aatctcctgaagcctctgttgtgactgcatcagagcccaacctctctctctacccaatccagtctcctttccttctcacaggtgttgttcccaaaactcagtaaactgcctacacgcaaa

SEQ ID NO: 980309 - DNA, 120 bp, Artificial Sequence
  ENSG00000255314_10 (sequence is synthesized)
gggacatgactgaatgtctccctccacctgctggcagcagtgcagagcaatggcagggacaaacttacggaaacttctagaggaaccttggcagtgtgagagcgcgggaaatttgtaaaa

SEQ ID NO: 980310 - DNA, 120 bp, Artificial Sequence
  ENSG00000255314_11 (sequence is synthesized)
tgtttttaaagctcagcacttttgtagcaactgccactacgcattttccaggcattgattagccatgcaactcccataggcatgaaatccagtttttgcagataaagagcaacagtggtg

SEQ ID NO: 980311 - DNA, 120 bp, Artificial Sequence
  ENSG00000272619_0 (sequence is synthesized)
agattatgaatggagagctacatcccatggggtggcagatgaagatgtgcaagaagaagacactaacaactgaattgcagattgaggagatgagattatggtgacagaatccatcttcgg

SEQ ID NO: 980312 - DNA, 120 bp, Artificial Sequence
  ENSG00000272619_1 (sequence is synthesized)
aatcgtttagtgtagttcgtggcagggtctgataccctatttcaatagtggagagaattagaaagcattttcttttttcatatctactattattggttatataaaagaagtatcaaatag

SEQ ID NO: 980313 - DNA, 120 bp, Artificial Sequence
  ENSG00000232284_0 (sequence is synthesized)
ttgtatacaaccacgcccggcaggatgaccaccagatgaccggccgcagcaatgcctccactcagtcccagttgggcaaagtttcactccactgcggcgacgtgaacaagaatcacggct

SEQ ID NO: 980314 - DNA, 120 bp, Artificial Sequence
  ENSG00000232284_1 (sequence is synthesized)
tccttatctatctggccaaatgaatacatgcaggagatgaaatatggagaaagaacaaaaggactaattccacttgtgagagatgaaggaacaggagcactctcatgtttcttaggtatg

SEQ ID NO: 980315 - DNA, 120 bp, Artificial Sequence
  ENSG00000232284_2 (sequence is synthesized)
ttttgtgacccagaatgtgatcctggtaaacattccatttgagaagaatgtgtattctgctgttgttggaagctgcgttgtcattgatgaaggaatatttcgaagcgctgaacaattctt

SEQ ID NO: 980316 - DNA, 120 bp, Artificial Sequence
  ENSG00000232284_3 (sequence is synthesized)
gataaagttccgaaacaaacaaagcacaatcttccctcgatttacatgggagttgcattcctggaaaattcagtatattttaaaaccatgcaaaatatccttttaaaaaaatatgtaaca

SEQ ID NO: 980317 - DNA, 120 bp, Artificial Sequence
  ENSG00000232284_4 (sequence is synthesized)
tggagtttaggaccaaggctcagaatatttccaatccatggttgggtgcggaacctgcggatacagaggactgactataatatcaagaatcagagaagctctactacccagaagagttgg

SEQ ID NO: 980318 - DNA, 120 bp, Artificial Sequence
  ENSG00000232284_5 (sequence is synthesized)
aacgggccttgaaatgtaacccaagcatcttattatacaggaggctcgtgtggtccctgtttgtcatccagtcaatacggccatcagcttctggccccagacacctttcctctgcactgt

SEQ ID NO: 980319 - DNA, 120 bp, Artificial Sequence
  ENSG00000232284_6 (sequence is synthesized)
ggcacagaggagcagactgctttggagggcagcttcctgggagctccagggaccctggccaggcggccactgccactgacttcctcggctcactgagcccgtgcctgcagctctcgtgtt

SEQ ID NO: 980320 - DNA, 120 bp, Artificial Sequence
  ENSG00000232284_7 (sequence is synthesized)
tcctctgtgctgcagtggacgcttatcttcccccgatggcacatttctttgtcacagacaggaccctcactggcagtcggaggacatcaagccctagtacaggaagggacattttcacac

SEQ ID NO: 980321 - DNA, 120 bp, Artificial Sequence
  ENSG00000232284_8 (sequence is synthesized)
gcagtcctgccatctgaacatcatattttggaaccctgagaagctaggatgcagttaacaggcagatgaggattttaaatgcttcgcctacaacctcaattgttgtggagccaaagatgc

SEQ ID NO: 980322 - DNA, 120 bp, Artificial Sequence
  ENSG00000232284_9 (sequence is synthesized)
aacagctttgaagaatagaagaattactctatatttgtcaggatctacgtggcaaacaagcgccacttggcttacattacttgcctggcttggatcccatggaatggaggagcattggaa

SEQ ID NO: 980323 - DNA, 120 bp, Artificial Sequence
  ENSG00000232284_10 (sequence is synthesized)
ccaagaggaaaaaaattaaagtgctttgggacagcgagccaaactcttacatagtatttgaaatggtgtggcaaacatgaaattattttaggctcaagattggtgctagttttttaccct

SEQ ID NO: 980324 - DNA, 120 bp, Artificial Sequence
  ENSG00000232284_11 (sequence is synthesized)
ctttttgaaaaaatagtaaaatgcacataaagggccctgccagaggtttagctcataaaatctgccaatcattggatgtgctaattggtgtagcaatccagtggtggcctggattaggac

SEQ ID NO: 980325 - DNA, 120 bp, Artificial Sequence
  ENSG00000232284_12 (sequence is synthesized)
tcaaaaactgacccttaccacccttggtgtcctgcagcaaagacagcctaaatcgaaaagactgatggaagtatatcaaattacgaatttctctatccctgaaaaatgcctgcaatttct

SEQ ID NO: 980326 - DNA, 120 bp, Artificial Sequence
  ENSG00000232284_13 (sequence is synthesized)
gtttctccatcactccagaaatactcaaaacagcaaaaattaaatacatatgaagtgaacacaaaagacctccacagaaaaatcagtggctcatctgttgacgctattgctcattgctcg

SEQ ID NO: 980327 - DNA, 120 bp, Artificial Sequence
  ENSG00000232284_14 (sequence is synthesized)
gctggccagtcatctgggctaagttttgactttgggccagtgcttcaaaatcagcaacctttcagccaaaagactgtggaatgcagccaagaccacctgtggaaagtgaattatagcatc

SEQ ID NO: 980328 - DNA, 120 bp, Artificial Sequence
  ENSG00000232284_15 (sequence is synthesized)
tttaatttactaccttgggctatgatgtcagaaacccagcatggagggcgcaccagttcttgtgtgggaaatctctcagagcccccatggaggcccccaaagtggctctggcaaagctgt

SEQ ID NO: 980329 - DNA, 120 bp, Artificial Sequence
  ENSG00000232284_16 (sequence is synthesized)
aggggtggaggtaacaaaaaaggggacacctggctctccttcttaaatcagctcaccatgggcacacatttatattggaattttagggtcagaaaataccaaaattaaatcttctagaag

SEQ ID NO: 980330 - DNA, 120 bp, Artificial Sequence
  ENSG00000232284_17 (sequence is synthesized)
ccactcactcggcttaatgtaagacaagatgaagactccagacttcagaacttcagtgtccgcagatgaggattttaaatgcttcgcctacaacctcaattgttgtggagccaaagatgc

SEQ ID NO: 980331 - DNA, 120 bp, Artificial Sequence
  ENSG00000232284_18 (sequence is synthesized)
atgcaccatagattaattcaaatccagtgtctaccactcactcggcttaatgtaagacaagatgaagactccagacttcagaacttcagtgtccagggaaggggctgaaataccagactg

SEQ ID NO: 980332 - DNA, 120 bp, Artificial Sequence
  ENSG00000232284_19 (sequence is synthesized)
gcattccacagcttcccgtcgcctttcattcctggcctcagagcttcaatatcctggcgagatcccctcgcattatatttcatgaggcttaaatgcaagctctcccacagcaagcccgag

SEQ ID NO: 980333 - DNA, 120 bp, Artificial Sequence
  ENSG00000232284_20 (sequence is synthesized)
agtataatgggggttttaatacattccttttacctaaggctgggatccatttcaaaaagttacccaataggtttcctttcaggtgagctcattgctctgacattccaaaatgacattaaa

SEQ ID NO: 980334 - DNA, 120 bp, Artificial Sequence
  ENSG00000232284_21 (sequence is synthesized)
tttctcaagagcatgttctgtcacactttccacactgccttccccaaattcactctgctcaagtcccccactccatcctcgtgcctccacacagtctgtagataatgctgtactttattt

SEQ ID NO: 980335 - DNA, 120 bp, Artificial Sequence
  ENSG00000232284_22 (sequence is synthesized)
catcacgaaaatacaagcactgagttgatactgcttcatcctctgaacactccctacctataaaccaatctatattcccatccatagcttctttcattcccaaattagtgaaaaaggtat

SEQ ID NO: 980336 - DNA, 120 bp, Artificial Sequence
  ENSG00000232284_23 (sequence is synthesized)
ctttcttcccaagtaaggtaaatccgtccctcatcttgtgctcaggattccttctcattcggcctccccatggatcattctaacactgtctcaactcttcaatttctctgacttgttcta

SEQ ID NO: 980337 - DNA, 120 bp, Artificial Sequence
  ENSG00000232284_24 (sequence is synthesized)
taattccacttgtgagagatgaaggaacaggagcactctcatgtttcttaggtcacacaccaagaaagaggagacatgagattaaacccacgttttctaactctgggctcattttggtga

SEQ ID NO: 980338 - DNA, 120 bp, Artificial Sequence
  ENSG00000232284_25 (sequence is synthesized)
cgtcaggtgatttgggtgagaatcccagttccagcgatctcagcatgactgactggaatatgtgagtgatattacagcttcagcaaccttcttgaatcatgaaaagaagagaagcaaagt

SEQ ID NO: 980339 - DNA, 120 bp, Artificial Sequence
  ENSG00000232284_26 (sequence is synthesized)
gggtggagaaagaagataggaagagtctgatccttgacactttggagcaccacacgagtcctagactgactagctacagactttttgcctatgaggaagaaataaacttctatttcacct

SEQ ID NO: 980340 - DNA, 88 bp, Artificial Sequence
  ENSG00000225315_0 (sequence is synthesized)
ctctcgcttcaacctcccaaagcgttggaattaaaggatccttgggggaagaaagggatccccactcacatccccttgtaaacactcc

SEQ ID NO: 980341 - DNA, 120 bp, Artificial Sequence
  ENSG00000225315_1 (sequence is synthesized)
ggtccaatatggtgtcgtcctcccctcgatcgtcagaaaccatcgctctgtaaattcccttgtcctttttggacaactggaaagaaggatgagcgatggtggtgtcagcatgggctccag

SEQ ID NO: 980342 - DNA, 120 bp, Artificial Sequence
  ENSG00000225315_2 (sequence is synthesized)
aaggagagatggataccaaatccggaggcctgggctccaggcctgcccctcactctctgtgtgacctcaggtccagaacggcgaatctcggggatctcacagggctttccgagctgatgg

SEQ ID NO: 980343 - DNA, 76 bp, Artificial Sequence
  ENSG00000225311_0 (sequence is synthesized)
gcccatcaatgggagaaggtctgttatgggaagactgtattgaattaaaaggttaatatcaggctgatgctattac

SEQ ID NO: 980344 - DNA, 120 bp, Artificial Sequence
  ENSG00000225311_1 (sequence is synthesized)
tatctctactttactcaggcacagagcagctaagccatttgtccaggttcacagagctagcaggtggccatgcttacacccacagcacctgatactgtctgaaccattccctaaagtatt

SEQ ID NO: 980345 - DNA, 120 bp, Artificial Sequence
  ENSG00000225311_2 (sequence is synthesized)
gatttttaaatcctgcaggatttttcttattattcttttcaaatattgtgtaatctaataccatgccatccttgatatctaactcattttagagataaaaatgcttaccctaaataccat

SEQ ID NO: 980346 - DNA, 120 bp, Artificial Sequence
  ENSG00000225311_3 (sequence is synthesized)
catataatctatatttctataaccccaacagcaatattgcaggttagaatccaagtgtgcagaatatttgtgaagatcagtgtagataatactgaaatgacagtgatgaggaagaaggta

SEQ ID NO: 980347 - DNA, 61 bp, Artificial Sequence
  ENSG00000225313_0 (sequence is synthesized)
gcctcctgggttcaagtgattctcgtgactcagcctcccgaatagctgggattacgagtgc

SEQ ID NO: 980348 - DNA, 120 bp, Artificial Sequence
  ENSG00000225313_1 (sequence is synthesized)
acaggcgtgagccaccgtgtccggcctacaaatcctttcaaaacctggctcccctggtctctttcaagaaggccgccagcttcagaccctcctgcccctgcctctcctgctgccccacgt

SEQ ID NO: 980349 - DNA, 120 bp, Artificial Sequence
  ENSG00000225313_2 (sequence is synthesized)
ctcctgcccctgcctctcctgctgccccacgtcgctgttcctcagcaggtgtgtctagtaaagagtgctgcgaactgccttgcaggtgtgtggatccacctgggcactgtctctgagcac

SEQ ID NO: 980350 - DNA, 120 bp, Artificial Sequence
  ENSG00000225313_3 (sequence is synthesized)
ccgggttgacctggtctccttgatctctgctccccctgctcttccccgtgccccacagtgaccctcgcctgctcctccgtcacgggatcattgcagcagcactcttcatgctcctggtca

SEQ ID NO: 980351 - DNA, 120 bp, Artificial Sequence
  ENSG00000225313_4 (sequence is synthesized)
cttcctccacaaccccagagtcatctcataacaagtcagcctgccttaacagtttccatgtcacacaaacagcttgagagaggctgtgcaactcacccacagcagccgcgatctgggcct

SEQ ID NO: 980352 - DNA, 120 bp, Artificial Sequence
  ENSG00000225313_5 (sequence is synthesized)
cctcctatgttcccctgttcagacccctgctccatgaactgggcggacccatgtccactaaagtgctgaggaagtgacagcgtgtgatttctgaggctagatcataaagggcacagcagt

SEQ ID NO: 980353 - DNA, 120 bp, Artificial Sequence
  ENSG00000225313_6 (sequence is synthesized)
tctcacctcactcttctgcctgggttactgcagagtaagccagctaccagtaagccaccccagcaaccctttggagaggcatgcgtggagagcagccaaggccctggtggtccccggcct

SEQ ID NO: 980354 - DNA, 120 bp, Artificial Sequence
  ENSG00000225313_7 (sequence is synthesized)
agagatggggtcttgctatgttgcccacgcttgtctccaactcagctcaagcaatcctcccgcctcagtcactgggagttaaaagctgtctgggacttagagaagagttactgggctggc

SEQ ID NO: 980355 - DNA, 120 bp, Artificial Sequence
  ENSG00000225313_8 (sequence is synthesized)
tctgggacttagagaagagttactgggctggctgtggtcagagaccaggtgtctgtggtggctccagtcaccaggccaggtgaactcctccaagcagagctcagcagcccaattcttggc

SEQ ID NO: 980356 - DNA, 120 bp, Artificial Sequence
  ENSG00000225313_9 (sequence is synthesized)
tcagaagaggtgggctttgggatttgtccacacttcgttttccaggaagggctccaaatgctgagaatcttaataagctccttctggggagcttgttccactgtcaccccaccttcctga

SEQ ID NO: 980357 - DNA, 120 bp, Artificial Sequence
  ENSG00000225313_10 (sequence is synthesized)
cttccctgagacctcatatgacctcaaactcatacactgggtctgtggaagggagcagataacctctctgtttctagttcttagactaagaggaactggacaccaggagcctcataccag

SEQ ID NO: 980358 - DNA, 120 bp, Artificial Sequence
  ENSG00000225313_11 (sequence is synthesized)
gactgcccagccgagccactcgattcctgacccacatggcccttgagatgacaagtgattgctgcttaaagtcactgagttctggaataatttacatcatggcaataggtaactaatgca

SEQ ID NO: 980359 - DNA, 120 bp, Artificial Sequence
  ENSG00000225313_12 (sequence is synthesized)
gattctggtacctggaaaaggagtgctgacatcaaacagctctatagatgtgggcgtggcctcagaactggccacaggcaggagccagaaggactctgtggaaagcgtgagtgtctaagg

SEQ ID NO: 980360 - DNA, 120 bp, Artificial Sequence
  ENSG00000225313_13 (sequence is synthesized)
ggtgaacacgtagtacatcacgctctggcccgccatgaagtgctgctccgccgtctccaggaagcgctccagcttgagagaggctgtgcaactcacccacagcagccgcgatctgggcct

SEQ ID NO: 980361 - DNA, 120 bp, Artificial Sequence
  ENSG00000225313_14 (sequence is synthesized)
ataataaatttcactgctaagacgacaatcatctgaaaaaaacagacatttgcttatgttttaaagtcataatagcaaactggggctctcttcaacatctggattcatctcagagcactg

SEQ ID NO: 980362 - DNA, 120 bp, Artificial Sequence
  ENSG00000225313_15 (sequence is synthesized)
cactaactataaaaataatttggaaggagaaggaaacaaaaaaaaccttgaagttttctatgctggtctacatggtcttacaatgaatctcagagcaacggtttatgacttaaattatat

SEQ ID NO: 980363 - DNA, 120 bp, Artificial Sequence
  ENSG00000225313_16 (sequence is synthesized)
gctgtgttccttagcatactttttcttcaaaaactagtaattctaaattgtataattcttgactatgataaaagagcccatttcttgaccatgtcatttatactggacttttgttactga

SEQ ID NO: 980364 - DNA, 120 bp, Artificial Sequence
  ENSG00000225313_17 (sequence is synthesized)
tggggaaaaatccagaatttgtaataattatgtcttggatatgcaaatggttgattattttcctaacaattcccaaaatatccacatcataaagcagaattaaagatggtttgcctctca

SEQ ID NO: 980365 - DNA, 120 bp, Artificial Sequence
  ENSG00000225313_18 (sequence is synthesized)
aacacgtagtacatcacgctctggcccgccatgaagtgctgctccgccgtctccaggaagcgctccaggtacttctccagcttgagagaggctgtgcaactcacccacagcagccgcgat

SEQ ID NO: 980366 - DNA, 120 bp, Artificial Sequence
  ENSG00000225313_19 (sequence is synthesized)
gggctcctccacacccacagggcagcaccactgtctccagtgcacactgcacagaagcagctctgggtgctttggtcaataacccatcttcgtggctcgtggatatttcttgttagtctt

SEQ ID NO: 980367 - DNA, 120 bp, Artificial Sequence
  ENSG00000225313_20 (sequence is synthesized)
aggcttccatcgtgacctttctgagtgcccctcaatctcattaactcccctttcaaggctctgtccccagaaaacaagcttcaggttgtgaccctgtttcctcacattcatttctgatac

SEQ ID NO: 980368 - DNA, 120 bp, Artificial Sequence
  ENSG00000225313_21 (sequence is synthesized)
gcaggtgccaaaagagcaccactccccatctgcccgaccttctgcgaaacaagcccgcccttgaaggagagaaaacgctcttctaaaaatggaagaaaagacacagaacagcttgtccct

SEQ ID NO: 980369 - DNA, 120 bp, Artificial Sequence
  ENSG00000225313_22 (sequence is synthesized)
ttccatccaattaaaaacctcgtgagactgaactagattaaaaacaaaactctccagcgaagccgcaggcgcctccaagatagggagtccaccaccaataaagtacggcagatgccagca

SEQ ID NO: 980370 - DNA, 120 bp, Artificial Sequence
  ENSG00000225313_23 (sequence is synthesized)
caccgctcccggaagctcggtgaacacgtagtacatcacgctctggcccgccatgaagtgctgctccgccgtctccaggaagcgctccaggaaggcgctgctgttcttattttgcagctt

SEQ ID NO: 980371 - DNA, 120 bp, Artificial Sequence
  ENSG00000225313_24 (sequence is synthesized)
acacgtagtacatcacgctctggcccgccatgaagtgctgctccgccgtctccaggaagcgctccaggtacttctccagtgaccctcgcctgctcctccgtcacgggatcattgcagcag

SEQ ID NO: 980372 - DNA, 120 bp, Artificial Sequence
  ENSG00000225313_25 (sequence is synthesized)
agaagtctcatggcctttagggaagctgctggggaggcctaaaggaaagtgaggaaactcttagtggagattggaagaaacagggtctctgttatgaaataaaagaacattttgtaaaaa

SEQ ID NO: 980373 - DNA, 120 bp, Artificial Sequence
  ENSG00000225313_26 (sequence is synthesized)
aacacgtagtacatcacgctctggcccgccatgaagtgctgctccgccgtctccaggaagcgctccaggtacttctccagttcttagactaagaggaactggacaccaggagcctcatac

SEQ ID NO: 980374 - DNA, 120 bp, Artificial Sequence
  ENSG00000225313_27 (sequence is synthesized)
ggtagcagaaatgtaagttgaatgtacctcatgaagtgggtggtctagctaaggagattttcaggcagaatgtggaaggtgttgcttggcttcttactgctgctcacagtaaaataggag

SEQ ID NO: 980375 - DNA, 120 bp, Artificial Sequence
  ENSG00000225313_28 (sequence is synthesized)
agagagaaggtaaaaacaaacaaacaaaactgttcaacataaaggaaccgggatctgccggttttaaaaatgcccagcctctccagatggcacatgatgctaacattaagaaatggtttc

SEQ ID NO: 980376 - DNA, 120 bp, Artificial Sequence
  ENSG00000225313_29 (sequence is synthesized)
taggcaaagatcaaattcagggcacagtcaagaaaacacggtctacagattaaacttaggatgtgacttaaatctttttgtgaagacttcagaaagatctaaagtgatgcctcaaagagc

SEQ ID NO: 980377 - DNA, 120 bp, Artificial Sequence
  ENSG00000286907_0 (sequence is synthesized)
gtggcagcattagattccaataggagtgtgaaccctattgtgagctgcgcgtgcgaggggtctaggctgcgcgctccttgtgagacgcactccttataagaatctaacgcctgatgatct

SEQ ID NO: 980378 - DNA, 120 bp, Artificial Sequence
  ENSG00000286907_1 (sequence is synthesized)
gtcattgtttcccatcacctccagatggaaccgtctagttgcaggaaagcaagatgtcagggctcccactgattctacattatgggtgtgaaagaagagtcatcattccttcaatctaaa

SEQ ID NO: 980379 - DNA, 120 bp, Artificial Sequence
  ENSG00000286907_2 (sequence is synthesized)
aggattacatcaattcagttccagaaaatggagtgactgccaattaaaaatgtgggaagagaaagtctccatctccctgaaggaacatacagagtccttttaagataagtacatttaaag

SEQ ID NO: 980380 - DNA, 120 bp, Artificial Sequence
  ENSG00000286907_3 (sequence is synthesized)
aaaatcgttatgcacaacactaacttcattgtaggtttttggctctctttcatatgactatgtctttgcagatgcctttagtaccagtggggagtctatactggaaatgcattcttcgcc

SEQ ID NO: 980381 - DNA, 120 bp, Artificial Sequence
  ENSG00000286907_4 (sequence is synthesized)
acttggcagagtattcacagtaaatgaatatcagagctaggattttgttgttagttttttatctgtggctggctaaaaagacagacttttacctacaggttggattatactaaacaaaaa

SEQ ID NO: 980382 - DNA, 120 bp, Artificial Sequence
  ENSG00000286907_5 (sequence is synthesized)
gaaggataagcagattttcttttaaggcaagaccaaaggaaggaaggaagaccaaatcaaattttcattttgaaacaatgaacaatagcagacaagttggttagcagggacactacgttt

SEQ ID NO: 980383 - DNA, 120 bp, Artificial Sequence
  ENSG00000286907_6 (sequence is synthesized)
aaatatttgtgtgtgtttgcatgtgggggggtctgtgtgtctcaaaataggagcagaagggcagactgaacacgtgttctttcccaccccaattactctgatatgatcaaataaataaat

SEQ ID NO: 980384 - DNA, 120 bp, Artificial Sequence
  ENSG00000286907_7 (sequence is synthesized)
agatgttgagatatttataaaagatatagagcagataggattgaattcttcataaaaaaaaagaccagaaaaaaacacataggagagagagagtgcagagatgagagtgcttatgggaac

SEQ ID NO: 980385 - DNA, 120 bp, Artificial Sequence
  ENSG00000286907_8 (sequence is synthesized)
ttcaggcagccttaggaggtcaaggagcaattgtcacagtgattaactggggcagtgcatttagagggactaggctgatcagccagcccccctacctcctgactaagctgagcaaaagag

SEQ ID NO: 980386 - DNA, 120 bp, Artificial Sequence
  ENSG00000286907_9 (sequence is synthesized)
agcaggaattgccctcaggctaaacagatgagcatgggctctgagaccaaagagatgggacaattcattgtcacaagtagctagtgatacccttgagaccagctgaaacctcctcctagc

SEQ ID NO: 980387 - DNA, 120 bp, Artificial Sequence
  ENSG00000286907_10 (sequence is synthesized)
agaatgccctgtcctgtccccacgatcactgcagataaactcctgtaatccgaatcaatttctactaaaatgtgaacaagttattcaaatatgtatgccaacaaaactaagattccaaga

SEQ ID NO: 980388 - DNA, 120 bp, Artificial Sequence
  ENSG00000286907_11 (sequence is synthesized)
taaagaaaaatgtgggatataagaaagcatgataagaaaaaaatatatatatagttaagtttaaatcttttttctttaatttcagcttttattttagatatgaggacgggagctacatgt

SEQ ID NO: 980389 - DNA, 120 bp, Artificial Sequence
  ENSG00000286907_12 (sequence is synthesized)
gtaagatgtgtacacataaatgtgtacattatatgtgtacacataaatgtgtacattatatgtgtacacataaatgtgtacattatatgtgtacacataaatgctgatgaactctatagt

SEQ ID NO: 980390 - DNA, 120 bp, Artificial Sequence
  ENSG00000286907_13 (sequence is synthesized)
caaaaactaattatagttggaggcatattttaagaatttaaaagtaaaacttctggttaaacttaatggattaagtctacatatttactttattttattttagagtgctactaaaaactt

SEQ ID NO: 980391 - DNA, 63 bp, Artificial Sequence
  ENSG00000286907_14 (sequence is synthesized)
ttactttattttattttagagtgctactaaaaacttaaaagtaaattcgggcggatcaggagg

SEQ ID NO: 980392 - DNA, 120 bp, Artificial Sequence
  ENSG00000286907_15 (sequence is synthesized)
cataagttaacttatattcttaggctttacattttaactgcagagatggaattcatggtggaagcaataattgttgcccataaatgagaacaatttacctgaatgagtacggaaacacct

SEQ ID NO: 980393 - DNA, 120 bp, Artificial Sequence
  ENSG00000286906_0 (sequence is synthesized)
ggaaacacatggcagctgggttcagcacagcaagcaagagagaatgtgtaagaaaatgctagcaagatgagagccatggtgttttggtaacctaaatacagtttgccttttgtgtttgtg

SEQ ID NO: 980394 - DNA, 120 bp, Artificial Sequence
  ENSG00000286906_1 (sequence is synthesized)
tttactatttggccggtgtgttcaatagaagtccaaaccccaggattacacaaaatattcatgtaacaaatccatacatatattccctgaatctaaaaatacatgtatatgttcaaaaaa

SEQ ID NO: 980395 - DNA, 120 bp, Artificial Sequence
  ENSG00000286903_0 (sequence is synthesized)
agtcccgttgctgagggaacccttcgggtgtttgttctctgtgctgaagtgagataagaagcaaggccatcggctcaaagcaataatggtcagatggtattgaaggtttgaggagagagg

SEQ ID NO: 980396 - DNA, 120 bp, Artificial Sequence
  ENSG00000286903_1 (sequence is synthesized)
agatggcataaaatagtcatcttggagcacaggaagccagtccatggaaacagagaggaaattcatgacctccaaggaggtttggagtccttcacgcctgagagatcaccatggaaaaca

SEQ ID NO: 980397 - DNA, 120 bp, Artificial Sequence
  ENSG00000286903_2 (sequence is synthesized)
atgaaggggagaaaaaagctcgtcagttctcaagtattcatctcatggtggcgactggcctttgactttcactcaggatacaaatttgatcctgccactccgctatttaaaatctttggt

SEQ ID NO: 980398 - DNA, 120 bp, Artificial Sequence
  ENSG00000286903_3 (sequence is synthesized)
gataataagaggaataacaataattgcaaacagacacttacttattgaactattactatgtgccaggtactatactaaggattttacctgcattatctcctaaaattattcaaaacctca

SEQ ID NO: 980399 - DNA, 120 bp, Artificial Sequence
  ENSG00000286903_4 (sequence is synthesized)
ttggttatttgctgttataatccccagtttaaagatgaggaaattgaggcctggaaagcttaaagaacttgcccacagttagctaatttcagaggtgggattcaaacctgtggaatatgt

SEQ ID NO: 980400 - DNA, 120 bp, Artificial Sequence
  ENSG00000286903_5 (sequence is synthesized)
ctgtgctgccatcatcttctgccatgaccttttgtacacgtgccttacaaagttccctgtagtccttgaaaatgtagtttcccatgcctgtgtctttgcagagattgtttccatcagcct

SEQ ID NO: 980401 - DNA, 120 bp, Artificial Sequence
  ENSG00000286903_6 (sequence is synthesized)
caaatccccttcctccatgggtctcttaacaaattcatcttctaaagctgtgcttaaatatcgcttctgtggtcaatgaaattcagttctatgcatattaatgaagcatgtactttgttc

SEQ ID NO: 980402 - DNA, 120 bp, Artificial Sequence
  ENSG00000286903_7 (sequence is synthesized)
caagcaccgaggtaggcactgcaggtttaataacgtaaaagaaacatggacttgctgcccttcaagggagattcccatctactaatggcagacgattaaaaacaggagtgttccagtaga

SEQ ID NO: 980403 - DNA, 120 bp, Artificial Sequence
  ENSG00000286903_8 (sequence is synthesized)
ggacaatccacatgacacagggagcacatgtaaaggagtcataggctaaggtcaacatttctggaatgagtgtcctgacaggggacgatgcacaggacaggagtgtgtaggagaaaggta

SEQ ID NO: 980404 - DNA, 120 bp, Artificial Sequence
  ENSG00000286903_9 (sequence is synthesized)
accacgatctaatcagtcaatcttgcctgtaactgttgccatgtttgtgtgtttgtgtccctgtctgctgcctatggtgagttattgcaaaagtaaataaaatacatattagtaggttta

SEQ ID NO: 980405 - DNA, 120 bp, Artificial Sequence
  ENSG00000286902_0 (sequence is synthesized)
acagctgcaagagcttccagcaacatcctggcaggaagagaagaatatgagctttcacgaactgtctaccacactgtggttaaaatcagaagagagctgaataaaggcaacgtgggcacc

SEQ ID NO: 980406 - DNA, 120 bp, Artificial Sequence
  ENSG00000286902_1 (sequence is synthesized)
aggagcatctgtctaagattaggatatcaaagcatagggaagaagaaaagagatgggaaagaaacctagaatctgagttgacggaaatgctcaagggactccacagaagcagaatgtgaa

SEQ ID NO: 980407 - DNA, 120 bp, Artificial Sequence
  ENSG00000286902_2 (sequence is synthesized)
atgccttgtgtccttgatagttctcactgggagcaactaggtgaggaaaaagataagaattctcaaaatggctaaatatgtcatttcctgcattttgttggcaaaattaaagactccaag

SEQ ID NO: 980408 - DNA, 120 bp, Artificial Sequence
  ENSG00000286902_3 (sequence is synthesized)
ccagaaaagattagaaaaaatgcaagccacacttttatctgtgtttcctgcctgtgctgctccccctcccaatcttttacccccagtgggaagaggttctagctaatatcacctgattct

SEQ ID NO: 980409 - DNA, 120 bp, Artificial Sequence
  ENSG00000286902_4 (sequence is synthesized)
gaggttctagctaatatcacctgattcttaaaaatcaagctgcctcaaaggacacatgagctacaaaagtgaagttgaaatataggtgccatcctatccacaatagcaaagacttggaac

SEQ ID NO: 980410 - DNA, 120 bp, Artificial Sequence
  ENSG00000286900_0 (sequence is synthesized)
gagccgtccctgacccttccgccatgagcggacgcagacatgtacagtaggagggcgatgggagacacctggagagaagatggccgtccacaaaccagggccagaggcctagagcaggtg

SEQ ID NO: 980411 - DNA, 120 bp, Artificial Sequence
  ENSG00000286900_1 (sequence is synthesized)
ccccctgctggactccaagggagccaagcctgctgccccctgggttttggacttctggcttccagaactgcaaggtgataagcttctcttgtcgaaggcacccaatctgtggcagtttat

SEQ ID NO: 980412 - DNA, 120 bp, Artificial Sequence
  ENSG00000286900_2 (sequence is synthesized)
gggtccactcctgccattgccagcattctagaactggtgtggcccctccaccttaaccagccctgggctctggagtttctgactgtgattgtccacattttgaccacaactttgtatata

SEQ ID NO: 980413 - DNA, 120 bp, Artificial Sequence
  ENSG00000286900_3 (sequence is synthesized)
aaaaccctccttgaactgttccactgtgtgtgcccgcctattgggaccctgactgatacatgctgtattggtttttaaaaactttttaaaatttatattttatttaggattttgcatgta

SEQ ID NO: 980414 - DNA, 120 bp, Artificial Sequence
  ENSG00000286909_0 (sequence is synthesized)
attcctgagacactttgaaatcagtgtctgacttaacccaagctgtgtatggggaccctctcaccgtggtcccaatggagtcgcttttgttaggcgcccccctttaccttgggctctgag

SEQ ID NO: 980415 - DNA, 120 bp, Artificial Sequence
  ENSG00000286909_1 (sequence is synthesized)
cttcctctgcctttcatctctgcaggatgaagccccacccgctgtacaggatgcaaagccctcctctataaagtgcgtgcggggccagatgcagtggctcacgtctgacctcccaacact

SEQ ID NO: 980416 - DNA, 120 bp, Artificial Sequence
  ENSG00000286909_2 (sequence is synthesized)
ttgggaggccgaggcaggggcatcgtttgagaccagcctggacaacattgtgagaccctgttccttgaattgccctgggagatttcctcagcttgtactggaggatgaagccccacccgc

SEQ ID NO: 980417 - DNA, 120 bp, Artificial Sequence
  ENSG00000286909_3 (sequence is synthesized)
gaggatgaagccccacccgcccttcaggatgccagccttggcaacattgtgagaccctgtttctacaaaaagtaaacgtgtagtggtgcacgcctgtagttctagctacttgggaggctg

SEQ ID NO: 980418 - DNA, 120 bp, Artificial Sequence
  ENSG00000286909_4 (sequence is synthesized)
cctgggaggttgaggctgcattgagctgagatcaagccacggcactccagcctgggagacagagcgaaaccccatctcaaaaaaacaaagaaagtggatgcacgctgctcctgccattgg

SEQ ID NO: 980419 - DNA, 120 bp, Artificial Sequence
  ENSG00000286909_5 (sequence is synthesized)
atcatcgcagcatttttcttttctctgatatgcgcctttttcctcatcgtgggggctcatgtttttgtactttcctctcgctactagattgtgagctgcgtgaaggaaggttcatagttg

SEQ ID NO: 980420 - DNA, 120 bp, Artificial Sequence
  ENSG00000286909_6 (sequence is synthesized)
gcacacaaaatttgtccttggatagacacatatcaatccgcttccttctcctctctgaagttctttatttaaaaaaaaaaattagagatggagtctcactgtcttgcccaggctggtctc

SEQ ID NO: 980421 - DNA, 120 bp, Artificial Sequence
  ENSG00000286909_7 (sequence is synthesized)
aaactcctaggctcaagcgatcctcccgcctctactaatatgaattattagcctatactaatatgaattcctatactaatatgattgaaattagtttgacttgtataataattgttctcc

SEQ ID NO: 980422 - DNA, 120 bp, Artificial Sequence
  ENSG00000286909_8 (sequence is synthesized)
cagattggccttctgttttgatagtagaactaaattattaggctatttcaagaaattaatatattactggtagaaaaactgaagctacaaaatggcctggtttctcacttcagttaaatt

SEQ ID NO: 980423 - DNA, 120 bp, Artificial Sequence
  ENSG00000286909_9 (sequence is synthesized)
tgtgcttctgagtgcttgtattgtaggtgaaaccgcactgagaaggtatttgtggcccgtatgctgattgattgatgagacttctttgcacaggagagctgctaaaaattactgcggtga

SEQ ID NO: 980424 - DNA, 120 bp, Artificial Sequence
  ENSG00000286909_10 (sequence is synthesized)
acaggtatgaagaagactgttctctgcccttctttttgcaataaaatgttacaaactatcttgagattgatcccttttcgggtgtttgggttttttttaacattcacatatttcttggaa

SEQ ID NO: 980425 - DNA, 120 bp, Artificial Sequence
  ENSG00000286909_11 (sequence is synthesized)
ttataagaaattaactttgtgcttctgaagtgggtttcccttaatataacactgatgtatttgtaaggggcatttttaaagttgtactttaaaaaataataattcttacattcgtttgaa

SEQ ID NO: 980426 - DNA, 120 bp, Artificial Sequence
  ENSG00000286908_0 (sequence is synthesized)
gagtacaagtagctctatatccacaccggcacttgctatggtattcaattgacccagcaccatttattgaaaaggctatcctcttactgaaatgcagcaaagttgttgtcttaaatcagg

SEQ ID NO: 980427 - DNA, 120 bp, Artificial Sequence
  ENSG00000286908_1 (sequence is synthesized)
tcatcaaacatttgatttcaagtgcagaatcaaagacatataaccataataaaatgcaaaatcacaagccctcagaatcagaagggatgtcaaggaaaatgccttccctctctccacctc

SEQ ID NO: 980428 - DNA, 120 bp, Artificial Sequence
  ENSG00000286908_2 (sequence is synthesized)
tctgaatgcagaacactgaagcttctgtgcatctggtgagcacgtggtacagaattgcaagtttcatgagccctgattaacttctcatagaggctggctgtgttagacttttgctaaggc

SEQ ID NO: 980429 - DNA, 120 bp, Artificial Sequence
  ENSG00000286908_3 (sequence is synthesized)
caagagttttattttgttctatcctatttcattattataaaaatctggagagttgcttattattatgaactcctgtttgaagatatggaaatgaggaaaatgaagacctatggtactttt

SEQ ID NO: 980430 - DNA, 120 bp, Artificial Sequence
  ENSG00000286908_4 (sequence is synthesized)
ttaaaagtgatactataaataaggaataaaatgtgaagttgtgtggttgcctggagttcttctgcttccctcatccatatcaacacatacaaataaataaactcctgagtacattcatat

SEQ ID NO: 980431 - DNA, 120 bp, Artificial Sequence
  ENSG00000286908_5 (sequence is synthesized)
tctaggtattaatactgtttcaccaattatacacagcaagctcaacatagccatctttcttcatccataattttttcagtgataaattttcgtcagtgatgaaaggctcagctggaaaat

SEQ ID NO: 980432 - DNA, 120 bp, Artificial Sequence
  ENSG00000286908_6 (sequence is synthesized)
tctgcttaagatctctcacataattgtagttagatattggctggggctacaattatctgaaagctaaactgggctgaaccacaatggcttgttgatctggtatccaaatgatgctgcctg

SEQ ID NO: 980433 - DNA, 120 bp, Artificial Sequence
  ENSG00000286908_7 (sequence is synthesized)
cagccaggagtgcgtgaaacagaagaggttcttatggactcacaaccacagcagcaatgtcagagttgctgcacttgcttcatgtgaacgggatccttccagagaaaactcccagagtta

SEQ ID NO: 980434 - DNA, 120 bp, Artificial Sequence
  ENSG00000286908_8 (sequence is synthesized)
caggaagaagatgtagggtattttatcagttatcctcataatcacagagcaccgtttctgtcactctcaattaatcaaagcagtcacacgcctacccagagtcaagaacatgagacatag

SEQ ID NO: 980435 - DNA, 120 bp, Artificial Sequence
  ENSG00000286908_9 (sequence is synthesized)
attgcatatcctaatgaaagattgttcaaaattcacttttatattgccacagtatagaatagtgtgttgaattcattagcatcagtactttgtccagtcatcaatatttacaagggccta

SEQ ID NO: 980436 - DNA, 120 bp, Artificial Sequence
  ENSG00000286908_10 (sequence is synthesized)
ttactctccaaggaaagttgaagttatatgatttttttccatttctctaactttatgtgcaaatttagactatccttcaagattatctacattactaggtaaatcagatttgcatgatat

SEQ ID NO: 980437 - DNA, 120 bp, Artificial Sequence
  ENSG00000286908_11 (sequence is synthesized)
atctataactatatctatatgtatcatgttaaactgatgacaaaccccttggagcagcctccatattactgatcatacaccaaagggcctgtcactagcaaggcaaatggcaacagggca

SEQ ID NO: 980438 - DNA, 120 bp, Artificial Sequence
  ENSG00000286908_12 (sequence is synthesized)
ttaacgtatgtgggcttcacatggcattcatgtggtctttcctttggagtacttcatactagatcatggatcacagtaatgttcttcatttttcctattacatgaaacatctataccttt

SEQ ID NO: 980439 - DNA, 120 bp, Artificial Sequence
  ENSG00000286908_13 (sequence is synthesized)
caaatgcagctttattttgatggaattagagaagtgttgtgatttgactttcgccttcatcaattgtttggccacaatgcggaataatagcttgatatataaatatctgtgatttatgtc

SEQ ID NO: 980440 - DNA, 120 bp, Artificial Sequence
  ENSG00000286908_14 (sequence is synthesized)
agtcctatttgtccccatttttggaaaataaataatactttatgtaagctaaaactaatagtaagtgctatcagagagactcaaattcatccttattcactttctggttcgaaaaaatac

SEQ ID NO: 980441 - DNA, 120 bp, Artificial Sequence
  ENSG00000241059_0 (sequence is synthesized)
caggcgtgagccactgtgcccagcctctcttcctctttttaataaagccatagtcctatcagattagggccttaccctatgaactcatttaactgtaattatctcctaaagattctctct

SEQ ID NO: 980442 - DNA, 120 bp, Artificial Sequence
  ENSG00000241059_1 (sequence is synthesized)
aattatctcctaaagattctctctccagatacaatcacattgtgggttaaggcttcaatatataaatctcggggggacataattcagttgatatcagtaaccgaagttactgcccaagta

SEQ ID NO: 980443 - DNA, 120 bp, Artificial Sequence
  ENSG00000241059_2 (sequence is synthesized)
ctgttttgtactcagcttgatccatgcattgtgagagctgaagggttgggtgggaagaagtacaaaagaagtaactaatatagttcctgttttcaggagcttattgtctttttggggagg

SEQ ID NO: 980444 - DNA, 120 bp, Artificial Sequence
  ENSG00000241059_3 (sequence is synthesized)
taagaccaataggttgtaaataagaacaaatgctgtgaggtagagtgaatgctgagggcactccagagtgacaggaatcaataagggttggaaggggccaggaaacttttatgtatttat

SEQ ID NO: 980445 - DNA, 120 bp, Artificial Sequence
  ENSG00000241059_4 (sequence is synthesized)
ttatgtatttatttattgagatggggtcttgctttgttacccaggctgtattttttcattttattttgttttttaacacagtgtctcgctccatcacccagactggagtgcagtggcatg

SEQ ID NO: 980446 - DNA, 120 bp, Artificial Sequence
  ENSG00000241054_0 (sequence is synthesized)
caaagcagacgctctgcccatctgtcactaggagccgccgctggcctccaactacccttccctaaaacctcagcttggagtaaacaccagatgtcaagaacacaaagcctctgatgcttg

SEQ ID NO: 980447 - DNA, 120 bp, Artificial Sequence
  ENSG00000241054_1 (sequence is synthesized)
agggttggaactgcagttttcagcctacagctttgctctgatgtttacacacactgaaagtgtgaaacatacggcaagagagagaaagaacgtgggggaagaggtcactgcagcttctct

SEQ ID NO: 980448 - DNA, 120 bp, Artificial Sequence
  ENSG00000241054_2 (sequence is synthesized)
acaaagcactgactcaagtgattcagagtaaaactagtaccttggaaccaaataattaaaagccttccaaaaacaaagaccctgattaaacctgataagtaaagtttggtcatgaaaatc

SEQ ID NO: 980449 - DNA, 120 bp, Artificial Sequence
  ENSG00000255866_0 (sequence is synthesized)
gagatagcgccgagacagcatggacgccgggagcctgggaaagccaactgtaccacaggagtctaaactgtagctaggaatagaagtacgctcattttagctattagaaggtttgcctga

SEQ ID NO: 980450 - DNA, 120 bp, Artificial Sequence
  ENSG00000255866_1 (sequence is synthesized)
tactctggctctttatttcgaggatgtctagctcacctgtgatataactcagaccccatttcactcatttcttaaactaggaatggggcagaatttcccagcatctcttccagctcccag

SEQ ID NO: 980451 - DNA, 120 bp, Artificial Sequence
  ENSG00000255866_2 (sequence is synthesized)
ggagaaggtctgggacctatgttctaccaaccaaatacactctcatgaagctctcatttggaagtcagcaacatgcagacacagactgggttctgagcatctatggtgcagatgaagatg

SEQ ID NO: 980452 - DNA, 120 bp, Artificial Sequence
  ENSG00000255866_3 (sequence is synthesized)
atggcaggagctgtggaggcagtagaatcctcatcaagccacttctgtgtgagatgccgggctgtgttcctatgagcttagccttgagcttcttttttgccagacctcccaatgaatcac

SEQ ID NO: 980453 - DNA, 120 bp, Artificial Sequence
  ENSG00000255866_4 (sequence is synthesized)
agtagcatgaagaggtctgaggaagctgtgcgtccctcaagaaagcaattctttattgcccatcaaagatgaatccataggggatcattaacaaggagatcatcccagagagcagcttct

SEQ ID NO: 980454 - DNA, 120 bp, Artificial Sequence
  ENSG00000255866_5 (sequence is synthesized)
agaatcaccaaccaaacagaagatttgtcagaagaacaaagacctcaaaatgagaaggaatgtgttctggacttaaaacattgctcagcctcatgaaataaagaaataaagaaaacaaac

SEQ ID NO: 980455 - DNA, 120 bp, Artificial Sequence
  ENSG00000255866_6 (sequence is synthesized)
aagtaaataaaaacaagatctttatggatgtggcagaaagctttgcaagccaagaaagtcttctatccaggtgatgcaaataactgtaaaacttcagacttcttgaactacaaagatgaa

SEQ ID NO: 980456 - DNA, 120 bp, Artificial Sequence
  ENSG00000255866_7 (sequence is synthesized)
ctctgccaacccaagttctagtacttcctctactcccagcctgacccccactgtttcttggtttcctcactccttctctttctgtttgactcttgagagtaataaactcagccaagtcct

SEQ ID NO: 980457 - DNA, 120 bp, Artificial Sequence
  ENSG00000255867_0 (sequence is synthesized)
ggccgcattcgtgcccactggccccggctgcggcatcgagggcgaccctgcacacacccctcctcgccctggccagccgataagagggctagcctcagtgtgggggtctgtcttctaaag

SEQ ID NO: 980458 - DNA, 120 bp, Artificial Sequence
  ENSG00000255867_1 (sequence is synthesized)
gggttgtcacccatccttatttcttttaatgcagctttggggaaggtgaacagccgctctgagatcatttcgcataacggtctgaaccatcgtcttttaaactgtgacctgtgtgggggt

SEQ ID NO: 980459 - DNA, 120 bp, Artificial Sequence
  ENSG00000255867_2 (sequence is synthesized)
gcctgtctcactttaaggtcctcccttcccccagccgtcaccccatttacaggccatccttagtgacttagtgacaagtcaaccgtgagggggaaaaaacacaactcaatacccacaaag

SEQ ID NO: 980460 - DNA, 120 bp, Artificial Sequence
  ENSG00000255867_3 (sequence is synthesized)
gaaaaaacacaactcaatacccacaaagcgttgagacttctagaaggagtgcagtcaccaacccccgccttctgtcatttatcctgacattttccagacggggtttcaccgtattagcca

SEQ ID NO: 980461 - DNA, 120 bp, Artificial Sequence
  ENSG00000255867_4 (sequence is synthesized)
ctgggattacaggcgtgagcctccgcgaccggccagaactagctcttcttaaggatgtgacagtgatctgcactagagcttcaggcagctaaggatatctgaaaaggagagactctatgg

SEQ ID NO: 980462 - DNA, 120 bp, Artificial Sequence
  ENSG00000255867_5 (sequence is synthesized)
agtgtggatgtagaaaaggagttattcctaccggaaaaaaatgaactgtggacacagtcactcaagaccagagaaacaaccactatgagtaagtagcttcaatttcactgttaccaggag

SEQ ID NO: 980463 - DNA, 120 bp, Artificial Sequence
  ENSG00000255867_6 (sequence is synthesized)
ggcacacaccagaaagcctgggacaaagcctgggctagagccctcaggattcattctcaggcttcctggtgctgtggttcaacagcctttgtggggatggggagaaccagagactatcac

SEQ ID NO: 980464 - DNA, 120 bp, Artificial Sequence
  ENSG00000255867_7 (sequence is synthesized)
catcacatgtaaaaaatattaccacagcaacagctgtcaaaaaccagctggagctgaagttacacaccatttgaaatccacactgtacttgctttcttgtgatgggcttgagacatgtgc

SEQ ID NO: 980465 - DNA, 120 bp, Artificial Sequence
  ENSG00000255867_8 (sequence is synthesized)
agagacaccttaaacatgtgtaggtgaccacccttttgaaaggcagaggagggcctcttcatgaactctttctactcatttgttttcctatcagttcaccatttcaactagaaaagatgc

SEQ ID NO: 980466 - DNA, 120 bp, Artificial Sequence
  ENSG00000255867_9 (sequence is synthesized)
gcactgcgccatcaaatgagtcaagcggaaggaccggtacccctccgggaaaaccaggcactaacacacggtgcacccaactgaatttaaactcgggaacagtgtaggcagtgtcaacaa

SEQ ID NO: 980467 - DNA, 120 bp, Artificial Sequence
  ENSG00000255867_10 (sequence is synthesized)
cagtgtcaacaaagcgcggtgctgggtcccgagcgtccaaaggtccctgccagctcccagacgcggccaaatccacaggattccaaaagtacagacggggtttcaccgtattagccagga

SEQ ID NO: 980468 - DNA, 120 bp, Artificial Sequence
  ENSG00000279206_0 (sequence is synthesized)
aaaaggaataaattccagacacaatactgtgtttttgaaaattatttgtagagataattttaggtatataatgaatgtaccttctgctagtgaagctttatatttgctgtgtcaggtaac

SEQ ID NO: 980469 - DNA, 120 bp, Artificial Sequence
  ENSG00000279206_1 (sequence is synthesized)
tgtggctactatcagtccagaaaaccaattttaaatcttgagattccacggatttcctggtgaattggaactcagactgtcaatctggatgaggcctgttctatgtatggattacccgtt

SEQ ID NO: 980470 - DNA, 120 bp, Artificial Sequence
  ENSG00000279206_2 (sequence is synthesized)
gaggctacctcaagattgtagcctcttttggtcctagtttattgtgtaaggtgtctcctgttagaatcctcttttgtaggggcccgggactttaaatttcgtactttttcctttaatgat

SEQ ID NO: 980471 - DNA, 120 bp, Artificial Sequence
  ENSG00000279206_3 (sequence is synthesized)
gctttcttaatattatgaaatttctagtcatgatcaaatttctaattgtcttaaatatcgtaactttaaaaaatatatagtttgaatcaggatccaattacatttacattgccattgttt

SEQ ID NO: 980472 - DNA, 120 bp, Artificial Sequence
  ENSG00000279206_4 (sequence is synthesized)
ttaaaaataaggtttttaggtatattttaatgcataagctttttccttccaatgccttcattctcattgcaatttatttgaaaaagatatctctttgtttaatatagagagtttcccaca

SEQ ID NO: 980473 - DNA, 120 bp, Artificial Sequence
  ENSG00000226669_0 (sequence is synthesized)
ctggaaggatctaccggagtccctcttcccctccccttctggctctcccctccgatgttgcttggtaaagatgctcttcctagggctacacagcattcaaaaccaacttgctattggtgt

SEQ ID NO: 980474 - DNA, 120 bp, Artificial Sequence
  ENSG00000226669_1 (sequence is synthesized)
gcttttagtaaccagggactattttaggggtttactaatcatagagaatctggggacagtcttagggagaagaaacttccttggaaatatatttccctttaaacttagaacagttttgct

SEQ ID NO: 980475 - DNA, 120 bp, Artificial Sequence
  ENSG00000226669_2 (sequence is synthesized)
tcaacctccacagaaatgtttgaaagattaaaaatattttattggccgcacaatattgcaaggaagacagcaacattgaaattacaagtgtttaattaaatgtctctggattgtgacatt

SEQ ID NO: 980476 - DNA, 120 bp, Artificial Sequence
  ENSG00000226669_3 (sequence is synthesized)
aggtcaactagttgagggcaactccattcaactcatgtatatattacatttaatgtggaatgagagcattttaatatgtgtaataaaagataagagtctccaaaagtaagagtgcataga

SEQ ID NO: 980477 - DNA, 120 bp, Artificial Sequence
  ENSG00000226669_4 (sequence is synthesized)
gcctatgaactatcaaaataaccttgtctacactccgtgatggttcttatcacaatgatcattatctctgtacctcacaggtggattctgaatggtgggtcaatgtccataggaaatggc

SEQ ID NO: 980478 - DNA, 120 bp, Artificial Sequence
  ENSG00000226664_0 (sequence is synthesized)
aggactatagagaggcaagtgaccagacgccgaagacaaaaattcctccaggttcaaacttgccctaccctgcttcgatgcataagcagttgactcaataaagatgtgtctctgacccag

SEQ ID NO: 980479 - DNA, 120 bp, Artificial Sequence
  ENSG00000254192_0 (sequence is synthesized)
aggaaagctgagtttcgaaaaaatgcagctcgactgagactgtggtgtggctggattttcacaaagcagtatttataatcaggcagaaaatcgtggagaaacagctaaggatcaagttgc

SEQ ID NO: 980480 - DNA, 120 bp, Artificial Sequence
  ENSG00000254192_1 (sequence is synthesized)
cacttaaattcctaacagctacacctggccatgagaactggtgaggtttcggagacacacatcataaagtgtgggccaggttgggtgcttctctgattaatatcatggcagggttttgga

SEQ ID NO: 980481 - DNA, 120 bp, Artificial Sequence
  ENSG00000254192_2 (sequence is synthesized)
actcttcatttccttcatgctgaatcaccagggggtcccacatggctgtcccaactccatcaagctggagtccgagaggtggcaggcaggcgggcaggggcttaggaacacgcgaggcag

SEQ ID NO: 980482 - DNA, 120 bp, Artificial Sequence
  ENSG00000254192_3 (sequence is synthesized)
tggcagcactggggcccacagcccccacgacattccatgatgggcaccttggaggctgtggcacatgatgcataacctttctggcggcggatcacctctcggactacttgtcccaggcac

SEQ ID NO: 980483 - DNA, 120 bp, Artificial Sequence
  ENSG00000254192_4 (sequence is synthesized)
ggattctctgcagagggcatagaagtcagggcattggtggtctaggtggccagcaggaccatgagcagttcccagtgggagaatgtctgcagcaaggcacttgaggaagggagccatgac

SEQ ID NO: 980484 - DNA, 120 bp, Artificial Sequence
  ENSG00000254192_5 (sequence is synthesized)
ccttgacccttgacaagcaagtcacagtttccgtgtctgcaaagtggtaacacatttacctgtccttccagcaactcccaggctgttacgggcaccagaggcgattgtgaaggagaaagg

SEQ ID NO: 980485 - DNA, 120 bp, Artificial Sequence
  ENSG00000254197_0 (sequence is synthesized)
agcctgggctgaggccacactcgtgaggcagtgggtttccccgatgggatctcggtgcaacccaacaactgagccaactgggactcctcggtctgtgaaacccatgaggacattggcgag

SEQ ID NO: 980486 - DNA, 120 bp, Artificial Sequence
  ENSG00000254197_1 (sequence is synthesized)
acatcgctccacaacacacacaggcatacacagtcttcatgggtcactgaaggtgtcagcgacaaaaaccacaccctatcaacgctgatgaagggctggctctaagaagttctccatcag

SEQ ID NO: 980487 - DNA, 120 bp, Artificial Sequence
  ENSG00000226661_0 (sequence is synthesized)
tttaaaaagaactgtgatatttgacaaatacacttgctttgttcccagtcatcattttcactatgtctttggcagcagttttggtaagtgtgtgaacaatgaattcagtaggtctaacct

SEQ ID NO: 980488 - DNA, 120 bp, Artificial Sequence
  ENSG00000226661_1 (sequence is synthesized)
ttgcaattcagtacaaccttataaaatgtggtttccatagcttttgcctttggcctgttgtgtttagctttaggtgatgatgaaatgtccttccattctaggtggataagtctcacgaga

SEQ ID NO: 980489 - DNA, 120 bp, Artificial Sequence
  ENSG00000226661_2 (sequence is synthesized)
agctctctctttgcctgctgccatctgtgtaagaagtgacttgctcctccttgccctccgacatgatcatgaggcctccccagccacatggaattgaagcaaaggactctgaaatggtgg

SEQ ID NO: 980490 - DNA, 120 bp, Artificial Sequence
  ENSG00000226661_3 (sequence is synthesized)
aacacgatgcaaggaacctgtatccttgggtttacccctcagaggaaaaccaccctggagagttgctcatacaggaaccatctcataggactttgtattccaagattataaaaatattct

SEQ ID NO: 980491 - DNA, 120 bp, Artificial Sequence
  ENSG00000226661_4 (sequence is synthesized)
cctggctggggcacagtggctcacaactgtaaccccaacactttgggaggctgaggtgagtggctcgcttgaggccaggagttcgagatcagcctaggcaacacataacccggtctcaaa

SEQ ID NO: 980492 - DNA, 120 bp, Artificial Sequence
  ENSG00000254194_0 (sequence is synthesized)
actgttgatttccaactaaggatggggggaaagtgaaaacaatggaaataaaaggtcaaagaatccctcagaatgcatgcgatttgttaatcatgatggagatctcagatgcttttgaag

SEQ ID NO: 980493 - DNA, 120 bp, Artificial Sequence
  ENSG00000254194_1 (sequence is synthesized)
gaaggaaggggccacaagccaaggaatgtggtggcatctagacactggaaaaagcaagaaaatgaattctccactaaagcatccagaaacacagctctaaagatccccagttttagtcca

SEQ ID NO: 980494 - DNA, 120 bp, Artificial Sequence
  ENSG00000254194_2 (sequence is synthesized)
gtatgacccatgttggacttctaaaccatagaattgtaagatactaaatttatgctgttttaaaccattatgttcatgataatttgttacagtagccatagaaatctaataaaattgaga

SEQ ID NO: 980495 - DNA, 120 bp, Artificial Sequence
  ENSG00000254194_3 (sequence is synthesized)
cagactgttgatttccaactaaggatggggggaaagtgaaaacaatggaaataaaaggtcaaagaatccctcagcacttctccttgctgctgccatatgaagaaggatgtgtttgcttcc

SEQ ID NO: 980496 - DNA, 120 bp, Artificial Sequence
  ENSG00000254194_4 (sequence is synthesized)
ctgaggcctctccagccatgctgaactaatgcatgcgatttgttaatcatgatggagatctcagatgcttttgaagaggctgaactgatatgagaaagtcttaaccagttgttgcttctt

SEQ ID NO: 980497 - DNA, 120 bp, Artificial Sequence
  ENSG00000234703_0 (sequence is synthesized)
atctctactgtcccatatccatccctgctgaccaaagcaaaactaggtttttcttgcttttcctgggctgagcctcttattgttcctagacacagccagcctggtgagcacaggcaaact

SEQ ID NO: 980498 - DNA, 120 bp, Artificial Sequence
  ENSG00000234703_1 (sequence is synthesized)
ggacattggaagacccagctgcacaaagactccttcctgtgagaggcttggagaagactttgctctagacacacaagggagcctgtgggaaggtgccaggggagccaagaagagcaaaac

SEQ ID NO: 980499 - DNA, 120 bp, Artificial Sequence
  ENSG00000234703_2 (sequence is synthesized)
tcttgactgagggcttatctgagagccttttgttcaggctcataattattcagtgactcaggagcccacaagcattacccacggagccagacaagaccagcaagctctgaggaccacctg

SEQ ID NO: 980500 - DNA, 120 bp, Artificial Sequence
  ENSG00000234703_3 (sequence is synthesized)
ttccaagtcatttcctgtgtgggcggcaacttcacagggctgaaaatacgagttacggtaaaaatgtcttcaaccctggcgcgctggattgttgaaactcgatggaatcttgcttgatta

SEQ ID NO: 980501 - DNA, 120 bp, Artificial Sequence
  ENSG00000234703_4 (sequence is synthesized)
tgttcaggccagacacatttcattatcattctttgcatatatattaaaaactctaacccctttacaaacaaatgttctcaaggggcagacagcacacccttgcctcatgacattgctcta

SEQ ID NO: 980502 - DNA, 120 bp, Artificial Sequence
  ENSG00000276633_0 (sequence is synthesized)
atggtgagtcttcttaggacagggaagtcagccctctcatgcgcagaacccctgtggcacctggccggccttcacaccaggtcttcacacccctcatgagaccagccaggaaatgggggc

SEQ ID NO: 980503 - DNA, 120 bp, Artificial Sequence
  ENSG00000276633_1 (sequence is synthesized)
ccccaggggaggctgtatagcccagtgccagggagagcccagcacccgctggggaaggccatgcagcccagtgcccgggagagacaggaaccccctacaggaaggcagtgcagcccagtg

SEQ ID NO: 980504 - DNA, 120 bp, Artificial Sequence
  ENSG00000276633_2 (sequence is synthesized)
cccaggagagatgggaaccccccagggaaggccgtgcagcccagtgcccaggagagatgggaaccccccagggaaggccgtgcagcccagtgcctgggagagacaggcaccccccaggga

SEQ ID NO: 980505 - DNA, 120 bp, Artificial Sequence
  ENSG00000276633_3 (sequence is synthesized)
aggccgtgcagtccagtgcccgggagagacaggcaccccccagggaaggccgtgcagtccagtgcccgggagagacgggcacccccttgggaaggccgtgcagcccagtaacccccagga

SEQ ID NO: 980506 - DNA, 120 bp, Artificial Sequence
  ENSG00000276633_4 (sequence is synthesized)
aggccatgcagcccagtgccctggagagctggtgccctgtgactggggtggggaaggggctacgcggggcttgcctgagtcctcctccctccacccgcacccagagaccttcatgggaga

SEQ ID NO: 980507 - DNA, 120 bp, Artificial Sequence
  ENSG00000276633_5 (sequence is synthesized)
cacctcctctccaggaccccaggggcaggggtgatactgcagaggtggctctgggcttcctccccctcccctgccaggttctgcttcactcttgcagcctgggcaggggcgtggggtgtg

SEQ ID NO: 980508 - DNA, 120 bp, Artificial Sequence
  ENSG00000276633_6 (sequence is synthesized)
gaaggagaagcgagtggccccttatcttcaatccttgctggaagctgcagtccctgagcctaaccgggccacaagaatgcagaaccagctgaaaagaggccagggccactgccctctccc

SEQ ID NO: 980509 - DNA, 120 bp, Artificial Sequence
  ENSG00000276633_7 (sequence is synthesized)
cgcccttggcgccagcatggcggccacgatctttctggtgccgcggtctctgactctgtgggaagaagcatccccggacttgcctctctcctcagagccccagttccatggagggaaggt

SEQ ID NO: 980510 - DNA, 120 bp, Artificial Sequence
  ENSG00000276633_8 (sequence is synthesized)
ggcttccatgcctgtctctgggagttttccttaagcagctcctggaagggtgcagtggcgtctcctgctgcggtgacagttcccctgggatgtggaaggtcccaggctttggagaactct

SEQ ID NO: 980511 - DNA, 120 bp, Artificial Sequence
  ENSG00000276633_9 (sequence is synthesized)
cccggagcagaggcctccgtccccccaggggacgggctgggctccgatttgggggcccacatgcatgagtgagcaaacaccccagagggttgggagagcgtccgttcgtgctggcggcag

SEQ ID NO: 980512 - DNA, 120 bp, Artificial Sequence
  ENSG00000276633_10 (sequence is synthesized)
ggggtgagggtccctcttcagtgccacatccatgcagacccgtgtagacccaggctttttctccatagccaggtgggctttatttttccttaaacatcttaggtggttctcaagtaatcg

SEQ ID NO: 980513 - DNA, 120 bp, Artificial Sequence
  ENSG00000276633_11 (sequence is synthesized)
gaggctcgtctgcttttcatgctagcggtgcaatgccccattttatcgtgtgtctaaaaggcgtccctggtcccgcatttttcctagtttcctcagttacctcctgtgaccatttgctgt

SEQ ID NO: 980514 - DNA, 120 bp, Artificial Sequence
  ENSG00000276633_12 (sequence is synthesized)
aatgaaagctggaaggagagctccgtgctgtacccacccacttctgtgaaaagtgggaacaagaacacagatttggaaccagtgctgtgcttttgtgttttggtaaattgtctttacctt

SEQ ID NO: 980515 - DNA, 120 bp, Artificial Sequence
  ENSG00000276633_13 (sequence is synthesized)
ccctgagctgttttcttccattcctgcgggattggattcaattctatttgatggtgatggctgtggacagtactaagtgccctccgagcttctacagtggagcagcctgctcagtgtcca

SEQ ID NO: 980516 - DNA, 120 bp, Artificial Sequence
  ENSG00000276633_14 (sequence is synthesized)
ggccccggagcccgcgttggggctgcggtcccagtgcccctgccactgtgtggctgtcggcatggtccagctggcctgtggcttcggtgcttggagggctgtggcaagggctgtctgtgc

SEQ ID NO: 980517 - DNA, 120 bp, Artificial Sequence
  ENSG00000276633_15 (sequence is synthesized)
ctggcgcgtggtaaacattctatcagtgtgttgtttattattatttgtatggttattggggttctcctttaatttatcaattatgttgacagaatttgtgatataacgatgcccatccat

SEQ ID NO: 980518 - DNA, 120 bp, Artificial Sequence
  ENSG00000276633_16 (sequence is synthesized)
tcctaaaatgaatcccattaagatattgtctgattagtcttcatatatactgctgattgcatttgttcatatttgatttggaacatgagttggaatttctgtctaggtagaagctggaat

SEQ ID NO: 980519 - DNA, 120 bp, Artificial Sequence
  ENSG00000276633_17 (sequence is synthesized)
tgctgggtcacagcatgcgcccaccatcaaccttcctgggtggcaccgagtggctttcctcggtgatacgggcgagcggggcgggtcatctggtgtcatgtgctctcccacgcttcctgg

SEQ ID NO: 980520 - DNA, 120 bp, Artificial Sequence
  ENSG00000276633_18 (sequence is synthesized)
agcaatttttgttgggctgtgtctttacctctgggggctgtggggtgtgtgctgcgactttctcctgcctctacctcctggctgatgcgctcactccactgccctttggatcacggattg

SEQ ID NO: 980521 - DNA, 120 bp, Artificial Sequence
  ENSG00000276633_19 (sequence is synthesized)
gccatgagggtgtccctctgggatgtgccttttcaagacctctgcccactcctctgtgagcaacccagaaatattctctgcataggaaccccttgtcattaaacaactgcatgtaccttg

SEQ ID NO: 980522 - DNA, 120 bp, Artificial Sequence
  ENSG00000287372_0 (sequence is synthesized)
ccttccactaagtacaactgaaaaccgtgacactatatataaaacaaacataagaagactctgaaaggcaagaatgggttttcttttgcctcctttattccagacttgtaactgaagaag

SEQ ID NO: 980523 - DNA, 120 bp, Artificial Sequence
  ENSG00000287372_1 (sequence is synthesized)
ccatcaaccaagaaatttccaacagacccagatggaaaaagtcccagtgaaagcctgttctttagccaaaggggccagaaaagagcaagatagcaggacaagtgtcattgaggagaattt

SEQ ID NO: 980524 - DNA, 120 bp, Artificial Sequence
  ENSG00000287372_2 (sequence is synthesized)
gcctaggagatgcaaagagagagaagcctatactttgagggtggaagcccctccaacaggcaacatgactgcagcacaatcaactatggctttgctgatctcgtgtatcatcatcctcat

SEQ ID NO: 980525 - DNA, 120 bp, Artificial Sequence
  ENSG00000287372_3 (sequence is synthesized)
tgtatctcaccttcagacagaaggttgcactcacatccttagcagttataaacaaggcttaaaaacaagactgagtttacatgaatgatttgtttttagactgagggctatatgattgct

SEQ ID NO: 980526 - DNA, 120 bp, Artificial Sequence
  ENSG00000287372_4 (sequence is synthesized)
ttggtagtagtggtccctaatggagctatgttaattggcatctgggttagaaaagaaaaattaatatggccctcagaggcaagaactggggctcgtctacatttagtggaatctttcaga

SEQ ID NO: 980527 - DNA, 120 bp, Artificial Sequence
  ENSG00000287372_5 (sequence is synthesized)
gcctctttagaggggcacacaccctagagaggatgatgaagacaaaaattttgaatgttggaaaaaaattgtgtttgaagaataaattacatagaacatatatgtgtgtgtgtgtgtgtg

SEQ ID NO: 980528 - DNA, 120 bp, Artificial Sequence
  ENSG00000287372_6 (sequence is synthesized)
actgtctctgggtccattttagccctagaacttgcctaggtgttgtagttcttgtggtgtagaccagctttcaatttattttgagccccagagcactttagcccacagtggtgaggcttg

SEQ ID NO: 980529 - DNA, 120 bp, Artificial Sequence
  ENSG00000287372_7 (sequence is synthesized)
caaaaactcaagttctgactgctggcattggcagtttccctctggctaagggtggttgaaatgcatcctctgtggtctggcgtcagctgagtttggtccagtttttctttctgctataac

SEQ ID NO: 980530 - DNA, 120 bp, Artificial Sequence
  ENSG00000287372_8 (sequence is synthesized)
aagggcagcactgagttcaatgcctcacagttgctggctctccctctccccagggcacagaaacgctcttcagaccatactcctactgccaggggatggagaaggcatggtgtcagcaat

SEQ ID NO: 980531 - DNA, 120 bp, Artificial Sequence
  ENSG00000287372_9 (sequence is synthesized)
tcaagactgtttttcctacctcttcagtgtctctttcggcaaaatgaagtgaaaatcaggaacaagatgtctccagagttaaatacatgaattaaatgcaatttcaatggatgtcccaat

SEQ ID NO: 980532 - DNA, 120 bp, Artificial Sequence
  ENSG00000287372_10 (sequence is synthesized)
acacacacacacacacacacatatatgtgtatatgtatggttttggctcattcagggctgacaagttccatgaccttccattggcaagcttcagacccaggtaaagtcaatgtttcaatt

SEQ ID NO: 980533 - DNA, 120 bp, Artificial Sequence
  ENSG00000287372_11 (sequence is synthesized)
aagaggaatttctatttactctagagggtcagctttttttttgtttttctacgtaggcctccagctggttggaggggcacactcacaccatggagggaaatctgctttctgtactctact

SEQ ID NO: 980534 - DNA, 120 bp, Artificial Sequence
  ENSG00000287372_12 (sequence is synthesized)
aatccaaacataacacacccagaatgatatctgacgaaatctgtagatacctcttggcctagtgaagtcaacatataaaattaatcatcacaactgcttcagccaaatgccacagaaaaa

SEQ ID NO: 980535 - DNA, 120 bp, Artificial Sequence
  ENSG00000287372_13 (sequence is synthesized)
actgtggcaccacccacatccataccagcaaaggctaagtaaggagcctagacttccacccttgccagtatgtaaggaaacatctcagcttgttggggcagagttctaaaatgggcacct

SEQ ID NO: 980536 - DNA, 120 bp, Artificial Sequence
  ENSG00000287372_14 (sequence is synthesized)
tgtgatagctgctaaggtctcagggaatgtgaggaattaagtgtgagcctcctccctgggtcagtgccactgtacaattccccagaaggtccctatgttagtttcaggtcacatgaaggt

SEQ ID NO: 980537 - DNA, 120 bp, Artificial Sequence
  ENSG00000287372_15 (sequence is synthesized)
tagagggactctctcgtagctaggattgcaggagtccacagtgagaatgtgagccactgagggcctctcacttaccctttccctgtgctggggagtctttctcggctcccagctggtccc

SEQ ID NO: 980538 - DNA, 120 bp, Artificial Sequence
  ENSG00000287372_16 (sequence is synthesized)
agccgagcatgctgcctcattaccttctccttttttgtttaggtattgcctgtcacttttctgttgaattctggtgttctctcttggatactctatttgaagcatgattatctactcatt

SEQ ID NO: 980539 - DNA, 120 bp, Artificial Sequence
  ENSG00000287372_17 (sequence is synthesized)
atcttagttcttgttactggagggtgagagcatgaaattcccctgatcagccatcttgaagcatggacataaaaatctttgacaaaaattagcaaatagggccgggcgtggtggctcacg

SEQ ID NO: 980540 - DNA, 120 bp, Artificial Sequence
  ENSG00000287372_18 (sequence is synthesized)
gagggatgtaccaagttacagtatcttttttcacccattataaaagaaatacatgttcatgttagagatcttgaaataaataaaagaaatttatgtttattttagatatcttaaaataaa

SEQ ID NO: 980541 - DNA, 120 bp, Artificial Sequence
  ENSG00000287372_19 (sequence is synthesized)
tttaaagaaaaaaatcaaatagtaatcccaacattcagaataacaaatgttaatgttttggattattaacttccagtctttttgtatggttgtgtaactagtataacatactgttaaaga

SEQ ID NO: 980542 - DNA, 120 bp, Artificial Sequence
  ENSG00000287372_20 (sequence is synthesized)
aagttccagtatagccacttcctattgaaaggttatttaaaatattaaagcctcaatttttcccagtaaaatgaagatgaagatgatggtaataataataaaaagtaatccataggtttg

SEQ ID NO: 980543 - DNA, 120 bp, Artificial Sequence
  ENSG00000287372_21 (sequence is synthesized)
tttttaagattaaataagataacatgcatagagtgctaagcttggtgcctagagcatagactaagtacataataaaagttaggtagtttttttttattttaacaaaacgaattttatgct

SEQ ID NO: 980544 - DNA, 120 bp, Artificial Sequence
  ENSG00000287372_22 (sequence is synthesized)
gtgtgtgtgtgtgtgtgtgtgtttctgtagtttaatctctcccatatccttgattattttcttaggatgaattgctggaagtggagttactaggtcaaagggcatgtatatttgacgatt

SEQ ID NO: 980545 - DNA, 120 bp, Artificial Sequence
  ENSG00000287372_23 (sequence is synthesized)
actaggtcaaagggcatgtatatttgacgattcttgatacctagtactgaattgtcctccaaataggctgtaccaattcatccaccctctggcttcatatgagaagtctcacttctcacc

SEQ ID NO: 980546 - DNA, 120 bp, Artificial Sequence
  ENSG00000287372_24 (sequence is synthesized)
cataccaacaatgggcatatatagatatagatatatagatatcttgccaatttagtcggcaaaatacccttattttaatttatttaataatttataaatattatagtgtcatttgaagcc

SEQ ID NO: 980547 - DNA, 120 bp, Artificial Sequence
  ENSG00000287372_25 (sequence is synthesized)
acaaccctctgggactgattaaatagatgagaagtgcccattatataatatgctaaagaagctggttttatcctacagaagataagatcagaggcgaaacttcatgactatcttcaagga

SEQ ID NO: 980548 - DNA, 120 bp, Artificial Sequence
  ENSG00000287372_26 (sequence is synthesized)
tataaggaggtttatgtgaaagcattgttttccatgttataagtagttaactaaacaagagaagctgggctatgattaaaatagtttaaacttctcttgaatgcaagggcagaactgcca

SEQ ID NO: 980549 - DNA, 120 bp, Artificial Sequence
  ENSG00000287372_27 (sequence is synthesized)
ctttcaacatgacagagtactaggaaggttctgagaaagatcttggggtccctgaagctgtaatgaccagcacggtcacttttttgcctttggtgggacatccagctccctgaagggaat

SEQ ID NO: 980550 - DNA, 120 bp, Artificial Sequence
  ENSG00000287372_28 (sequence is synthesized)
gggcacaccacctgatttatttggtctcttccagttctgtgattctatagttaatttagtgaagtgttgattttgtgatatttttgaaactagaaaagatggatttattccaatgcatcc

SEQ ID NO: 980551 - DNA, 120 bp, Artificial Sequence
  ENSG00000287372_29 (sequence is synthesized)
atcaggtgacattttcgaacagataaattaagctctgtctagaaaccatctctcctgttacaagtacagacaaatgcaatgcagttcctgccatcaaccatcttattagaagcagattaa

SEQ ID NO: 980552 - DNA, 120 bp, Artificial Sequence
  ENSG00000287372_30 (sequence is synthesized)
taactagcgatgatgactacagccttttttaaaaaacagaactttctgtattttttcgtgctcgggcagtgttttacggaaaggtgtatttactgtgaagaatgtttaatggcaaagcac

SEQ ID NO: 980553 - DNA, 120 bp, Artificial Sequence
  ENSG00000173811_0 (sequence is synthesized)
gattctcaatgagcaagagaagatgagggaaggtgctagaagccaggcccaggaaggttcctcaggttaattctcacgtagcaggctgcggatcctcagcaggtttttctcctgtgccga

SEQ ID NO: 980554 - DNA, 120 bp, Artificial Sequence
  ENSG00000173811_1 (sequence is synthesized)
cagcttccttgggtctggatagacagacaactcatcactggctgttcccgcagactggctccgggcctggcccaattgcttctcaagctcttgaacctgaggatggtaaaactcgtcgtt

SEQ ID NO: 980555 - DNA, 120 bp, Artificial Sequence
  ENSG00000173811_2 (sequence is synthesized)
ccacaatgggtcttctgccagcctcttctactcagaagtgtgataggagaccccacagactgaagatggaaccacctctctagatggctgtggtagccccatctgaggaggactaggggt

SEQ ID NO: 980556 - DNA, 120 bp, Artificial Sequence
  ENSG00000173811_3 (sequence is synthesized)
gggggacaatctgagctggcatcttgagcaacacattggaagacaccaggaaagttcagcttagaaaaatggtgtgaagatgaagacataggaagatgaaggggtttgcccaaggtcaga

SEQ ID NO: 980557 - DNA, 120 bp, Artificial Sequence
  ENSG00000173811_4 (sequence is synthesized)
ggccatgcactatcatctattagcttcttggagtttttccccctttatattggcttcaaggatcccatgggagacactgaagataaaagccactgtgaccctcgaagtccctgggaacaa

SEQ ID NO: 980558 - DNA, 120 bp, Artificial Sequence
  ENSG00000173811_5 (sequence is synthesized)
gggtgatatgcttggcaaatggtggaagtcatacaccttctcacatgtttctcagtttgaagggacaaagggaaaagaaccacacctaacttttatacagtgcttcctccatgccaggcc

SEQ ID NO: 980559 - DNA, 120 bp, Artificial Sequence
  ENSG00000173811_6 (sequence is synthesized)
ctgtgctgagcattttacaagtattgactcaattctcccaacaatcctgtggggtaggcatcgttattatccccattatacagatgaggaaactgaggcacagagctaaaggaacttgct

SEQ ID NO: 980560 - DNA, 120 bp, Artificial Sequence
  ENSG00000173811_7 (sequence is synthesized)
taaggtcacacagctggtgagtggagagctgggatttgaatctgagcagtgtggctccagagcccctgctgttagctgcttttggtatgctccaaaatattcagacaataaagagggaga

SEQ ID NO: 980561 - DNA, 120 bp, Artificial Sequence
  ENSG00000173811_8 (sequence is synthesized)
caaggctaaatttttattgggtaattaaactttcaaaagactacaagcatctggacaaaactggaaaaagcttacaattacaacagtcacgcaaatctacataaactaagaaaaaaaaaa

SEQ ID NO: 980562 - DNA, 120 bp, Artificial Sequence
  ENSG00000173811_9 (sequence is synthesized)
ctccagtgcctggcatgtgctaagtgttatataagagcttgttcattaaataacaaattaaaatcaggctggttggcgagaaggtaaaacaacaaccccgcacgagtgcactgtgagacc

SEQ ID NO: 980563 - DNA, 120 bp, Artificial Sequence
  ENSG00000173811_10 (sequence is synthesized)
taaaggccttttttgggtactgtgtgcttaggtctctaagggggtcagggcagctctttctggggtgttttaaatcctttgttcaggccaggagaagtctgatgactcactcaccttgct

SEQ ID NO: 980564 - DNA, 120 bp, Artificial Sequence
  ENSG00000173811_11 (sequence is synthesized)
ctgcaaaacaagaatttgttgagcccgacccctccaggtccctggcgaagataggagctgctgaacgttgatgtcttccccaacctctctggccaaaacctgaaataaggcagggccttc

SEQ ID NO: 980565 - DNA, 120 bp, Artificial Sequence
  ENSG00000173811_12 (sequence is synthesized)
aatgtggccaaaagagagggctccaccagaccctgatgctgctacgtatttagaagcatattcagaagcagtcttcacctacacgatcttcttcccatctcagagcatagccctcaaagg

SEQ ID NO: 980566 - DNA, 120 bp, Artificial Sequence
  ENSG00000173811_13 (sequence is synthesized)
tcagttttccatgtcccaagggcagctctccctgggaaagtagtaaacccatcatccctggcatttcttggcaatgcttagagcagccaagaaactgccagcaatgcccagatagggccc

SEQ ID NO: 980567 - DNA, 120 bp, Artificial Sequence
  ENSG00000173811_14 (sequence is synthesized)
cttgctcttgacatattctgggatgactgaaccacaaagctgaccaactcctgcttccttaacccactcacctgtcacctagtgctgagctaattctggctataggaagtacatcaccac

SEQ ID NO: 980568 - DNA, 120 bp, Artificial Sequence
  ENSG00000173811_15 (sequence is synthesized)
aggaccctagcctttgtgaaaacccacggacaagtggacctctgagtgcagcaaaaggtgggctactgaatgtcagttggggtgctgtggtccaagaaggacccagctttgcggttgttg

SEQ ID NO: 980569 - DNA, 120 bp, Artificial Sequence
  ENSG00000173811_16 (sequence is synthesized)
aagtgcagcactcaggcccaacctcaaggctttgaggcagaaacaatacgctccagcttgtgacctgggcccctctgaagcctgtcacagaaacccgatccagcgtaccaagtctctggc

SEQ ID NO: 980570 - DNA, 120 bp, Artificial Sequence
  ENSG00000173811_17 (sequence is synthesized)
acttgtttccacaatagaacactgttttggaaatcttggccagtctgagtggttccagcagggaagacaaatgccagagaattcgctatgtaaataaaaataaataacgaaccagctggg

SEQ ID NO: 980571 - DNA, 120 bp, Artificial Sequence
  ENSG00000173811_18 (sequence is synthesized)
gattctcaatgagcaagagaagatgagggaaggtgctagaagccaggcccaggaaggttcctcaggttaattctcacgtagcaggctcttatgggtgcctgccagagggaatgcatgcag

SEQ ID NO: 980572 - DNA, 120 bp, Artificial Sequence
  ENSG00000233907_0 (sequence is synthesized)
aattgttccaagtcacttacatggagctacatttacagacacaaagaggagctggactgatgtttagctgtcttgcaccagcttgtatttttggattagctagtatcccaggaaaagggt

SEQ ID NO: 980573 - DNA, 120 bp, Artificial Sequence
  ENSG00000233907_1 (sequence is synthesized)
ttgtatccaagataatccttcctctggactggttttctttctgtgttttgaccctcccagaagcagaagagtcatcttgcctctcagtaaaagcagagaaggggaaatatctttgaattg

SEQ ID NO: 980574 - DNA, 120 bp, Artificial Sequence
  ENSG00000233907_2 (sequence is synthesized)
ctgggtaggatagcttctctcgctcagcattttttctgttctccacaagaaaacctcttactgcaaaatatgtttgttggtggatcacagacttcaaactcacaggaccttatctccgat

SEQ ID NO: 980575 - DNA, 120 bp, Artificial Sequence
  ENSG00000233907_3 (sequence is synthesized)
acactgaaagtaaatgcaacatattaaatagtttaatcaaaatgaggtagagaggctatgaagtgtctgtaaacatttggaatctgatgcaaagaagcacgaggaccttcattttcactc

SEQ ID NO: 980576 - DNA, 120 bp, Artificial Sequence
  ENSG00000233907_4 (sequence is synthesized)
cagtggttgtggtgactgtggagaggaatacacaacagaagaaacacgcacccacatgaacacacacgggcacaaagagatactacagaatggggagcaataaattattggcctaattcg

SEQ ID NO: 980577 - DNA, 120 bp, Artificial Sequence
  ENSG00000233907_5 (sequence is synthesized)
tgcctggttccaaagaaaaggggcagttggagccccccaggccatctcaccgcctttcccctgactgggtccctccatctggtagttgccagccaatgttggaggtctgacccatgcttt

SEQ ID NO: 980578 - DNA, 120 bp, Artificial Sequence
  ENSG00000233907_6 (sequence is synthesized)
tctctccttgggaaaagacatgacttgctcctccttgtcttctactatgattgtgaggccttctcagccgcttggaactgtgagtctaattaaacctttttcttttgtacattgcccagt

SEQ ID NO: 980579 - DNA, 88 bp, Artificial Sequence
  ENSG00000233907_7 (sequence is synthesized)
tgagtctaattaaacctttttcttttgtacattgcccagtctcaggtatgtctttatcttagaaaacagactcatacagtaaattggt

SEQ ID NO: 980580 - DNA, 120 bp, Artificial Sequence
  ENSG00000233907_8 (sequence is synthesized)
gaggttggaacaatttggaaagctcagaagaagacaagaaaatttgggaaagtttgtaacttcctagagacttgttgaatgactttgaccacaagcctgacagcaatatggacaataagg

SEQ ID NO: 980581 - DNA, 120 bp, Artificial Sequence
  ENSG00000233907_9 (sequence is synthesized)
ctgacagcaatatggacaataaggtctaggctgaagtggtctcagatggagatgaggaagttgttgggaactggagcaaagatatgtgttgttgttgtgttttagcaaagagactggtgg

SEQ ID NO: 980582 - DNA, 120 bp, Artificial Sequence
  ENSG00000233907_10 (sequence is synthesized)
gggtatctggtggaagaaatttctaagcatcaaaacatctaaggggtgacttgggatgtgttaattcagacttgggatgttaaaggtattcagttttataaaggaagcagagcataaaag

SEQ ID NO: 980583 - DNA, 84 bp, Artificial Sequence
  ENSG00000233907_11 (sequence is synthesized)
ttggcagcctctcccatcacaggtgtggagacctaggaagaaaatatagtttcctgggctgggcccagggtctccgtgctgtgc

SEQ ID NO: 980584 - DNA, 86 bp, Artificial Sequence
  ENSG00000233907_12 (sequence is synthesized)
cagcctctcccatcacaggtgtggagacctaggaagaaaatatagtttcctgggctgggcccagggtctccgtgctgtgcacagtc

SEQ ID NO: 980585 - DNA, 120 bp, Artificial Sequence
  ENSG00000233907_13 (sequence is synthesized)
tgactaaaaggggtcaaggtacagcttgggccatggcttcaaagggtgtaagccccaagctttgacagccccaacatgatgtcgagcctgagggtgcacagaagtcaagaattggggttt

SEQ ID NO: 980586 - DNA, 120 bp, Artificial Sequence
  ENSG00000233907_14 (sequence is synthesized)
acgcctggatgcccaggcataagtttgttgcaggggcagggtgcttgtggagaacctctgctagcacagaagggaaatgtgggtcagagcccccacacacagtgcctactggggcactgc

SEQ ID NO: 980587 - DNA, 89 bp, Artificial Sequence
  ENSG00000233907_15 (sequence is synthesized)
gggccactgtccatttgcacacttcacctggaaaaggtggctgtactctgcaaagctacagagatggagctgcccaagaccatgggaac

SEQ ID NO: 980588 - DNA, 76 bp, Artificial Sequence
  ENSG00000233907_16 (sequence is synthesized)
agctttaagatttgactgccctgctggagtttggacttgcatggggcctgtaactcctttgccctatacccccttt

SEQ ID NO: 980589 - DNA, 120 bp, Artificial Sequence
  ENSG00000233907_17 (sequence is synthesized)
aggtggaagggacttgccttgtctcagacaagactttggactgttgacttttcagttaatattgaaataagttaagcctttgggggactactgggaaggcatgattggttctgaaatgtg

SEQ ID NO: 980590 - DNA, 90 bp, Artificial Sequence
  ENSG00000233907_18 (sequence is synthesized)
tatgtctccacctaaatctcatcttaaattgtactccaataattcccacttgttgtgggaagaacctggtgggagataattgaatcatgg

SEQ ID NO: 980591 - DNA, 75 bp, Artificial Sequence
  ENSG00000233907_19 (sequence is synthesized)
actgttctcatggtcatttcacttggctctcattctctctttttgcctgttgccattcatgtaagaagtgacttg

SEQ ID NO: 980592 - DNA, 120 bp, Artificial Sequence
  ENSG00000233907_20 (sequence is synthesized)
cacttggctctcattctctctttttgcctgttgccattcatgtaagaagtgacttgctcctccttgtcttccaccatcattatgaggcttctgcagccacgtggaactgtgagtccatta

SEQ ID NO: 980593 - DNA, 120 bp, Artificial Sequence
  ENSG00000233906_0 (sequence is synthesized)
atactttctttgtctaagaaacatttattttacaacccacggagcaatgctggggatgtaactatttcttgattgattcctgtggcacagcatcgtctgcagagacctgcattatgtgaa

SEQ ID NO: 980594 - DNA, 120 bp, Artificial Sequence
  ENSG00000214922_0 (sequence is synthesized)
aggaaatttctggtgggccttcgcggctccgctgggttggcagccgcttgagccactgcgaggaaagcaaagtctgggccatggagatgagcctagtcctgctgttcctgatccgcactg

SEQ ID NO: 980595 - DNA, 120 bp, Artificial Sequence
  ENSG00000214922_1 (sequence is synthesized)
agatgagcctagtcctgctgttcctgatccgcactgccctttttgcaccccagggagctgctgctgacggcgcctccctctgtcgccaaagttggagtgcagtggcgcggtctcggctca

SEQ ID NO: 980596 - DNA, 77 bp, Artificial Sequence
  ENSG00000214922_2 (sequence is synthesized)
caccacacccggctaatattttgtattttaatagagactgggtttcaccatgttgaagcctcccgaagtgctgggat

SEQ ID NO: 980597 - DNA, 120 bp, Artificial Sequence
  ENSG00000214922_3 (sequence is synthesized)
tacaggcgtgagccaccacacctagctggaagaggagataaatatatgaaggtgctgtttggcacagaatttaatagggaagaaagagacagtataactcaccagtgctgggtctcatca

SEQ ID NO: 980598 - DNA, 120 bp, Artificial Sequence
  ENSG00000214922_4 (sequence is synthesized)
agaaagagacagtataactcaccagtgctgggtctcatcatcctgcaatttcagaacaactatgaatacaaaaagaattttaaaatcccagtcctgcctagaaaggggaagtcatctcta

SEQ ID NO: 980599 - DNA, 120 bp, Artificial Sequence
  ENSG00000214922_5 (sequence is synthesized)
aatatggtggccctggggcagctggcctccctgccaggcctcttccatgggggccctttctgcagtgactgtggtttcttcccattttactctgtcctgtgtcctgactgaagcgacaag

SEQ ID NO: 980600 - DNA, 120 bp, Artificial Sequence
  ENSG00000214922_6 (sequence is synthesized)
gtgtgtctgcagctgtgctcacacctggaggaaacctcaatggtcacatcctctttcctgtgtcaagaagcatcgtccggggaggtgagaagaagacagtcctccctagaattgaagaac

SEQ ID NO: 980601 - DNA, 120 bp, Artificial Sequence
  ENSG00000214922_7 (sequence is synthesized)
gctcatgagcagtgcagtggtgcctcctagtggtctctgctcttccttttccagatcaagcacaaacctgagatccaactgtccctcttatgcgcctgggtttcttcactggacaccagt

SEQ ID NO: 980602 - DNA, 120 bp, Artificial Sequence
  ENSG00000214922_8 (sequence is synthesized)
atgagtcaactttcctgtaaagcagaacaagcacgagattggaccatgttagaggaggaatggtgtcatctccacttctggagagatcactgtccccgtgtttgggggaaggaccaagcc

SEQ ID NO: 980603 - DNA, 120 bp, Artificial Sequence
  ENSG00000214922_9 (sequence is synthesized)
tcactcccatgcagagaagaagctctgactgtaactgcacctgtggagagaggattgcggcctgttggcagaagagtagtgtcttgggccccagctgacctgatgaatatcaacatccaa

SEQ ID NO: 980604 - DNA, 120 bp, Artificial Sequence
  ENSG00000214922_10 (sequence is synthesized)
tgccctgtaatgaagtcatgtgtgcacatatcatcacttctgcatgcagtctcatgggaagatggtgccaagaacgaagaaggaagctcctgcccctcctaaagccgaagccaaagcgaa

SEQ ID NO: 980605 - DNA, 120 bp, Artificial Sequence
  ENSG00000214922_11 (sequence is synthesized)
ggctttgcaaggccaagaaggcagtgttgaaagatgtccacagccacaaaaaaaacaagatccacatgtcacccaccttccggcggcccaagacactgtgactccggaggcagcccaaat

SEQ ID NO: 980606 - DNA, 120 bp, Artificial Sequence
  ENSG00000214922_12 (sequence is synthesized)
atccttggaagagcacccccaggagaaataagcttgaccaccatgttatcatcaagtttccgctgaccactgagtaggctgtgaagaagatagaaaacaacagcctacttgtgttcactg

SEQ ID NO: 980607 - DNA, 120 bp, Artificial Sequence
  ENSG00000214922_13 (sequence is synthesized)
caccagatcaaacaggctgtgaagaagtttgtgacattgatgtggccaaagtcaacactctgattcagtctgatggagagaggaaggcatatgttcgactggctcctgactacgatgctt

SEQ ID NO: 980608 - DNA, 120 bp, Artificial Sequence
  ENSG00000214922_14 (sequence is synthesized)
ggctcctgactacgatgctttggttgttgccaccaaaattgggatcacctaaactgagtcaagctggctagttccaaatatatgtatatcttttcaccattaaaagaatcttaatctctc

SEQ ID NO: 980609 - DNA, 120 bp, Artificial Sequence
  ENSG00000214922_15 (sequence is synthesized)
tgcgaggaaagcaaagtctgggccatggagatgagcctagtcctgctgttcctgatccgcactgccctttttgcaccccagggagctgctgctgagccccacagtctttgttacaacctc

SEQ ID NO: 980610 - DNA, 120 bp, Artificial Sequence
  ENSG00000214922_16 (sequence is synthesized)
acggtgctgtcccaggatggatctgtgcagtcagggtttctcgctgagggacatctggatggtcagctcttcctgctctgtgacaggcagaaaggcagggcagggccccggggacagtgg

SEQ ID NO: 980611 - DNA, 120 bp, Artificial Sequence
  ENSG00000214922_17 (sequence is synthesized)
gcagaagcagtcctgggagctgagacctgggacacagagactgaagacttgacagagaatgggcaggagctcaggaggaccctggctcatatcaagggccagaaaggaggaagaggagat

SEQ ID NO: 980612 - DNA, 120 bp, Artificial Sequence
  ENSG00000214922_18 (sequence is synthesized)
tgtcaagaagcatcgtccggggaggtgagaagaagacagtcctccctagaattgaagaaccagggagaaccagatgggctgggcagatcaagcacaaacctgagatccaactgtccctct

SEQ ID NO: 980613 - DNA, 120 bp, Artificial Sequence
  ENSG00000214922_19 (sequence is synthesized)
cacctgactgccacgggagtgatagtgaccacacacagcaagacctgggacatggcagtgactgtgtccagaactgacagaactaatctatcatattagaaatcaagaaagtgtctgctc

SEQ ID NO: 980614 - DNA, 120 bp, Artificial Sequence
  ENSG00000214922_20 (sequence is synthesized)
tagggttggggagggtgatttatgaccaagtagaacccaatggtgtttcctggaggctggaaatgctattccttgatgtggctgctatttacctgagtgttcactttgtgaaaatccacg

SEQ ID NO: 980615 - DNA, 120 bp, Artificial Sequence
  ENSG00000214922_21 (sequence is synthesized)
caattctctctaagctaatatagaatctccattactgaaagtccttagaaatgctgcattggaaaaaattagtccaattattaaaaatctatgaaataaatgctgtgactcagacattaa

SEQ ID NO: 980616 - DNA, 120 bp, Artificial Sequence
  ENSG00000214922_22 (sequence is synthesized)
gaggagaatctacaacaagagcagtaggcttgggagctaacgcaagaacagctttggaaatggctgttgagccaggaactaggaatcaaaacccaaaaaggcccatgcaaggtggagggt

SEQ ID NO: 980617 - DNA, 120 bp, Artificial Sequence
  ENSG00000214922_23 (sequence is synthesized)
gtgaaatgatgccccagtagtgcatgaatgaatgagtcatgggcagtggctcatgggttgcttggtcagtcaggaacttgagcaaaataaagttggaaaactgggggatggaagagagag

SEQ ID NO: 980618 - DNA, 120 bp, Artificial Sequence
  ENSG00000214922_24 (sequence is synthesized)
gtatgcacagacctcttgacatgggcagagcttcagaagatggtggttgcaggtttccccaaatagagaacatcaataaaaaggtagaaattttacaaagagaccagataaaaagtttgg

SEQ ID NO: 980619 - DNA, 120 bp, Artificial Sequence
  ENSG00000214922_25 (sequence is synthesized)
agctgaaaagtgcaataactgaaatgaaaaattcactagaggggctccagagcaaatttcaccatgcagaatggagaatcagcaagcttgaagataagacaattgaaattctctagttca

SEQ ID NO: 980620 - DNA, 120 bp, Artificial Sequence
  ENSG00000214922_26 (sequence is synthesized)
gtagcagaaagaaaaaaaattatgaagaaaaataaacagaactttaaagatctgtgagacaacatcaagcacatgcactttgggagtcctcaaagaaaggagagagagaaaggagaagaa

SEQ ID NO: 980621 - DNA, 120 bp, Artificial Sequence
  ENSG00000214922_27 (sequence is synthesized)
tgactatttaaagaataactccaaaccttccaaatttgatgaaaaacattattcatccaacaaacttgacaaattttaagcagcaaaaaaaattaaatttaaagaggtccacaccaagag

SEQ ID NO: 980622 - DNA, 120 bp, Artificial Sequence
  ENSG00000214922_28 (sequence is synthesized)
aacattataatcaacctgtcaaaagccaatgacaaacagagcatattgaaatgaataacagagaaggaacttttcaggttcaatggatcctcaataagattgcagcccagttttcttcag

SEQ ID NO: 980623 - DNA, 120 bp, Artificial Sequence
  ENSG00000214922_29 (sequence is synthesized)
aaaccatagagttcagaaggcattggaatgttgacaaatttagaggtcagaaaaaaaaagactgtcatgcaggaattgtgtgtctggaaaaactctccttcagaaataatggattttata

SEQ ID NO: 980624 - DNA, 120 bp, Artificial Sequence
  ENSG00000214922_30 (sequence is synthesized)
aaaagctagtagtaacatgtatatttttggtgtttaattcttcctttgtttttcctatttggtttaaaagaaaatgcccattgactaatgaatgaataaacaacatgtagtgtatttcta

SEQ ID NO: 980625 - DNA, 120 bp, Artificial Sequence
  ENSG00000214922_31 (sequence is synthesized)
agaagctctgactgtaactgcacctgtggagaggtgaggacctgtcccctctacaccgatggccagagcctccagagtggggccaggcttttccctcagctgtgtcctgtcaggtttatc

SEQ ID NO: 980626 - DNA, 120 bp, Artificial Sequence
  ENSG00000214922_32 (sequence is synthesized)
taggcctcaaagaatagaccctggacattgcctctggcaatgtgagctggacacacacccagatgtaaggtagccctgccaagtatcctggggttgccagtagttctgggtgctcagtgt

SEQ ID NO: 980627 - DNA, 120 bp, Artificial Sequence
  ENSG00000230020_0 (sequence is synthesized)
cagatgctctctggaaccagactgaaattgaaatgcaagatatatatatatatatatatatcacagaatctctgtcactaaatattctcccagaggcaaaggagctgggatatttacacc

SEQ ID NO: 980628 - DNA, 120 bp, Artificial Sequence
  ENSG00000230020_1 (sequence is synthesized)
ctcatcattaagtggatggctcttggagggtatttgaactctctcacacatctggactgccaagaacacagacatgatgcttggagctatagcagccatctcgcaatcatgaggaaaggc

SEQ ID NO: 980629 - DNA, 120 bp, Artificial Sequence
  ENSG00000230020_2 (sequence is synthesized)
caagagaatttctgagtcaccaaacccagcactgttcagctgctgagccaatccctacagcctcctatctctagaccttgtgctctgtgagaaaactaaaaccccattttgtttaatgcc

SEQ ID NO: 980630 - DNA, 120 bp, Artificial Sequence
  ENSG00000233321_0 (sequence is synthesized)
aatgggcaacgatcaaatttcaccttgagcagattcttttgtttgctttttagtcacaaatagcttggccctaagtggtggctcccattcttgtaagatgcgtttattcatcgtgtaatc

SEQ ID NO: 980631 - DNA, 120 bp, Artificial Sequence
  ENSG00000233321_1 (sequence is synthesized)
accagttccctgtagtgggggcgtggatggagtgtcagaggctcctgctggtctttagggtgtctggcctccaggaatcctagaggtagtatttggagagatttttaaaagctttgtttc

SEQ ID NO: 980632 - DNA, 120 bp, Artificial Sequence
  ENSG00000233321_2 (sequence is synthesized)
cagccagtgacgtaacctgtctttttgccccagtaaattgggaactacagcactcgatgttagagttgtcgtgaagattaaagaaggtgacgactggacaactcccagcccaatacctga

SEQ ID NO: 980633 - DNA, 120 bp, Artificial Sequence
  ENSG00000233321_3 (sequence is synthesized)
aactgtaccagcacccagtgagcactgctattcctgtgactgctgcacatttgccttatctcagcagtatgcctgtgtcacttttttggctaacgtcaagactttcacagtagtttaact

SEQ ID NO: 980634 - DNA, 120 bp, Artificial Sequence
  ENSG00000233321_4 (sequence is synthesized)
gaagaatctgcaaaatttaacagttattccaatcccttctatgttaaggattacccttcaatcaatgtctcattttctctctaaaatctattgaaaaagaaaaaaaaaaacacaacagaa

SEQ ID NO: 980635 - DNA, 120 bp, Artificial Sequence
  ENSG00000233321_5 (sequence is synthesized)
cgtgtactatcgtgtagaagttgtagtagacgctgtggtctttccaacaacaaacaaacctcgtgccagcaacttaaatctatcagcaatggagaatgcctggcattggcttctgcatga

SEQ ID NO: 980636 - DNA, 120 bp, Artificial Sequence
  ENSG00000233321_6 (sequence is synthesized)
tattcttctaccttgatttttttttctgtttttctacatgagtgttgcctgcagagttccctgattgactcaaagtacatcttctatattgcttcaagtagtgctggtcatgaacacaat

SEQ ID NO: 980637 - DNA, 120 bp, Artificial Sequence
  ENSG00000233321_7 (sequence is synthesized)
tcagtcttagtcagctattggaactgattgactgcaaagttctggtgcctcttctcgcagcccagggcagatggacgtgctatgtggggcccgtacaaaacagaatcatggagctggtgg

SEQ ID NO: 980638 - DNA, 120 bp, Artificial Sequence
  ENSG00000233321_8 (sequence is synthesized)
ggcaaggagtcaacctccctcctagggcctgcagcctccaccagggcagagagcaagtttctctcagcttctgctctcaggtggtgacctggcagggaggacagcttggcagtaggtgca

SEQ ID NO: 980639 - DNA, 120 bp, Artificial Sequence
  ENSG00000233321_9 (sequence is synthesized)
ggcactggacggggacctcctggctcctctcctagctcttgcagcaccagccataaggcactcagatcatgcaacttcccggtgtctccgtctctgcatctttaaaatggggctaataag

SEQ ID NO: 980640 - DNA, 120 bp, Artificial Sequence
  ENSG00000233321_10 (sequence is synthesized)
aacacttttctcatagacttataaagagaattaattaaaaaaaataatgcttggctcagaatgtacactccatgaacatcacctgttaccacttaagaagggtgcgtaccctccagccgc

SEQ ID NO: 980641 - DNA, 120 bp, Artificial Sequence
  ENSG00000233321_11 (sequence is synthesized)
atccatgccagttcccgttgtctcaccctgggccagcgacacccatcttaagtcacaattgagaatacaagcaagacacgctgaaatctaccagaataaaggtccatcttcacagaacaa

SEQ ID NO: 980642 - DNA, 120 bp, Artificial Sequence
  ENSG00000233321_12 (sequence is synthesized)
aggttccggaggatcaggaggtccacctgggagaagagctgatcggctagtaggagagctggaaaagcaacagacacctacttagtcccttccctggggcccggctccagtctgagctgt

SEQ ID NO: 980643 - DNA, 120 bp, Artificial Sequence
  ENSG00000233321_13 (sequence is synthesized)
cacgccacagcaaaggcatcacttcaggacagcaaagcccctgtctccctcccttccagctcctcagacttcaccctggtaacacgtttgtttaaaaaacatatttttcccccttgtaaa

SEQ ID NO: 980644 - DNA, 120 bp, Artificial Sequence
  ENSG00000233321_14 (sequence is synthesized)
gaatctaggatacaaggggtcagcccagcagtttaggtatcaagaagaaactgctctcggagctaaagtaagaaacagtgcctgtctatagcgcaaataaagagttggaacaagataaaa

SEQ ID NO: 980645 - DNA, 120 bp, Artificial Sequence
  ENSG00000233321_15 (sequence is synthesized)
gtttggcatatggattatttcatcacccagtgggcaagtctatgcaaacctgtccccaaagtccaaggaggctgagaggccaaagaaagaggctggcaaatccagtctcttaaaaagaaa

SEQ ID NO: 980646 - DNA, 120 bp, Artificial Sequence
  ENSG00000233321_16 (sequence is synthesized)
cacgtctgtgtcttaggggactagacaagagaatggatccccgccattagccccagacctggagctcatgtaccagggaaagggtggttcagaagagacatgcaggacaactgaagtatg

SEQ ID NO: 980647 - DNA, 120 bp, Artificial Sequence
  ENSG00000233321_17 (sequence is synthesized)
acaacatcacagttgtttgacctacaggcaggatttatgctaagtgcctgctctaacacaaggaacaatcgataaactgaaaatcttggaggccttcctggaactggggttcatcaaagc

SEQ ID NO: 980648 - DNA, 120 bp, Artificial Sequence
  ENSG00000233321_18 (sequence is synthesized)
caacatgggagattagcttccaagacagagtctcttggccttagtggtgctgcctgcagcattctagcacccacctccacataaaagcgagaggtggttcccatttatatcggagtcttg

SEQ ID NO: 980649 - DNA, 120 bp, Artificial Sequence
  ENSG00000233321_19 (sequence is synthesized)
gaaggatccatacatttcatgcagggatgtcagtcacggccagctgatacacttatacaacattactgagaccataactttacagtttttgttctttcaatgtatctcaaggcctgattc

SEQ ID NO: 980650 - DNA, 120 bp, Artificial Sequence
  ENSG00000233321_20 (sequence is synthesized)
tgagaaataatactgctggggaattgtacaaatgatatgcatttcattcttctgttcttcactgcataaaagaaacaaactgtgaactcggactttatctgcctgaccccagatggagga

SEQ ID NO: 980651 - DNA, 120 bp, Artificial Sequence
  ENSG00000233321_21 (sequence is synthesized)
gcttgtactgccttgtcattagtgttgggctcttgacttacatggaggggtgcatttcgacatgccgcagaaaggtttcccaggacgggcaatcagaggaggtttgtcatctgctcatca

SEQ ID NO: 980652 - DNA, 120 bp, Artificial Sequence
  ENSG00000233321_22 (sequence is synthesized)
cccagtatcttccttattaataatactcaagagggaattttgtctgaatacttcagagctggtcgtggggattgggggaggtaaaaacaacagaaaataaagtttcattcaaaaatttaa

SEQ ID NO: 980653 - DNA, 120 bp, Artificial Sequence
  ENSG00000233321_23 (sequence is synthesized)
tcagcagtatgcctgtgtcacttttttgtgaagagaacatcccgtgtactatcgtgtagaagttgtagtagacgctgtggtctttccaacaacaaacaaactgctgggacaggacccagg

SEQ ID NO: 980654 - DNA, 120 bp, Artificial Sequence
  ENSG00000233321_24 (sequence is synthesized)
ccacacctggaagctccagccttgcctctccccagttcacccagtaagcgctggacacggggctgagctgggacttcgatgcttactctgcctggaaacctcctttctctctccccactt

SEQ ID NO: 980655 - DNA, 120 bp, Artificial Sequence
  ENSG00000233321_25 (sequence is synthesized)
ctgaggctccgctcagggctgagagctccaaggagctgtgaatcacacctccgactccccccagggtacaggaacggggttcagaatgctcttcccaaagctgctgggacaggacccagg

SEQ ID NO: 980656 - DNA, 120 bp, Artificial Sequence
  ENSG00000233321_26 (sequence is synthesized)
aagactggggaaggaagagaaaggaagacacagcctctgagagccggatgaagacacaaatgggatggaggctgcggctgttaaaccatcaggactcagcggctgttaaaccatcaggac

SEQ ID NO: 980657 - DNA, 120 bp, Artificial Sequence
  ENSG00000233321_27 (sequence is synthesized)
tcagcaattatttcatgtggagacaagtgatggcaaagccaaaaggccacgggtgttgagctgttgacgagaaactgaaagtgccattgtgtttatacaggaagctgccattagtaggga

SEQ ID NO: 980658 - DNA, 120 bp, Artificial Sequence
  ENSG00000233321_28 (sequence is synthesized)
tttgaaaaagcaagaggagaggatgagtttagtggggagttcttacacttcaggtgctagtggataccaccaagtcaatattgagtagcaggaaaccagggcctgatgttccgtcaggcc

SEQ ID NO: 980659 - DNA, 120 bp, Artificial Sequence
  ENSG00000233321_29 (sequence is synthesized)
atcagggcggagacattgtggagaggaagttttgaggctgtgagattaggagagaagcatggagtgtagagcaggaactaggcctctctttacccaaaatccaaaaccccacttatgcca

SEQ ID NO: 980660 - DNA, 120 bp, Artificial Sequence
  ENSG00000233321_30 (sequence is synthesized)
ccaaaaccccacttatgccagacacactcaatactttctgctgggatcctcaattctcataaagttttcataataaggccgggcggggtggcttatgcctgtattcccagcactttggga

SEQ ID NO: 980661 - DNA, 90 bp, Artificial Sequence
  ENSG00000233321_31 (sequence is synthesized)
gccaacatggtaaaaacgggcttggtggtaggcgcctacagctagtcgggacgctgaggcatgggaatcgcttgaacccaggaggcagag

SEQ ID NO: 980662 - DNA, 120 bp, Artificial Sequence
  ENSG00000233321_32 (sequence is synthesized)
tgaaagcctccagagcccagagtatgagaaacagcgttcccgtgtgggcagcaggttcacagaagacagaacagatgcctgaaggggaaagggcagaaccctccagaaagggctggaatc

SEQ ID NO: 980663 - DNA, 120 bp, Artificial Sequence
  ENSG00000233321_33 (sequence is synthesized)
gcaggaaaagacctcttggattcctgcctcaactgcttacaattccaatttggttttttttgtttttttttctttacagctgggggtggaggagataaaaatgctaaatgaagctgaaaa

SEQ ID NO: 980664 - DNA, 120 bp, Artificial Sequence
  ENSG00000233321_34 (sequence is synthesized)
agagcgggcctggtgccctattggtacaggatcgcagaacagcacattcaacgttatcgccaaggcaaaattccattcatgcttcacatgtcttcttccagcaaacacgtctttgagtgc

SEQ ID NO: 980665 - DNA, 120 bp, Artificial Sequence
  ENSG00000233321_35 (sequence is synthesized)
atgttattgccacagctttgggacaggggccaggacaacagggagacttttcagggctgggcagggatcgcccgtcaagagcaaggggcagggttttgaatcatgtcttttgtcttctga

SEQ ID NO: 980666 - DNA, 120 bp, Artificial Sequence
  ENSG00000233321_36 (sequence is synthesized)
atcccaaatgacggctgtttccaggaaatttcagtttcttttgtcatttttttttttttaaatcttggggcactcttttctcatgggtacattcagagaagaggaatgtttgttcactgg

SEQ ID NO: 980667 - DNA, 120 bp, Artificial Sequence
  ENSG00000233321_37 (sequence is synthesized)
ctacattcagtgcccccttcgccacttcctccacctgggagcaccgcaggagtcggaattccaagtgtggttcatccacagcctctttctcatggcctgaaacgtgctttttactggaaa

SEQ ID NO: 980668 - DNA, 120 bp, Artificial Sequence
  ENSG00000233321_38 (sequence is synthesized)
acactctgatacatcctgaagctaaatgcttcttagaatacactgtgatgtaacactgtgatggaaatcatcccgtaaaagccgagtgagggcaagcattccccagtcaggcggcgtgag

SEQ ID NO: 980669 - DNA, 120 bp, Artificial Sequence
  ENSG00000233321_39 (sequence is synthesized)
gcttgcctgacgttcacgcacttctaacaagaaaggaggtagctcacactcaacgccgttacttaagtaaggttaatagaacagcagacaggaaaaagcacaaaaacttaggaagacaca

SEQ ID NO: 980670 - DNA, 120 bp, Artificial Sequence
  ENSG00000233321_40 (sequence is synthesized)
gagccatgggctccccgccaaacaccttcggtgattgcaatacagaagacggcacgtggaatctgcccttgactccttgaaaatacgatgtgaccgagttttcagtgttaacaggaaccg

SEQ ID NO: 980671 - DNA, 120 bp, Artificial Sequence
  ENSG00000233321_41 (sequence is synthesized)
agacaaaaacgttcacgtattttgttatcatctgtgctctgggacatgagttatgttcttgaaaattctgagtttgggctacattattttaagagaattcacaataaaaccttatataat

SEQ ID NO: 980672 - DNA, 120 bp, Artificial Sequence
  ENSG00000233321_42 (sequence is synthesized)
gctgtggtctttccaacaacaaacaaagtaagttttcgaagttttattatcaagtatgataacctctgtagggttttcttgagataccctttttcagataaacaaaacctctctctgtag

SEQ ID NO: 980673 - DNA, 120 bp, Artificial Sequence
  ENSG00000233321_43 (sequence is synthesized)
tttgctaccaattttattttgaatgggtgttgaaaatatcaagtgctcattttgtgtctactgagatgctcctgtgagttttaatggtaatataataaatcacattgtttgaattttaaa

SEQ ID NO: 980674 - DNA, 120 bp, Artificial Sequence
  ENSG00000233321_44 (sequence is synthesized)
agagggaggtatccagagaggctaatggaagagacaggctttgggatttatttgcagagaggttaggcattcagacatgtggaaagagagatgaaaggaaagtgcacctgaggctgaaca

SEQ ID NO: 980675 - DNA, 120 bp, Artificial Sequence
  ENSG00000233321_45 (sequence is synthesized)
ctcattcctaacactcaggacaggtcttcatagcgtttatcctgctttgtcatctgcatgccccacagggctgagagctccaaggagctgtgaatcacacctccgactccccccagggta

SEQ ID NO: 980676 - DNA, 120 bp, Artificial Sequence
  ENSG00000233321_46 (sequence is synthesized)
caggaacggggttcagaatgctcttcccaaaggtgagatacaacatgaagagtggttatttctgggttatgggatgaagagtaatttttttgttttctttattagacgttactaaatgaa

SEQ ID NO: 980677 - DNA, 120 bp, Artificial Sequence
  ENSG00000233321_47 (sequence is synthesized)
cctgcttggtgttaaccacatgtggcttttataatcagagaaataaaacaaaactgacagtaaaaatacatagaagaaggattatgtaaaatttataattaaaaatttgttgattttaaa

SEQ ID NO: 980678 - DNA, 120 bp, Artificial Sequence
  ENSG00000233321_48 (sequence is synthesized)
ttctgtcaccatagactgtgactttcaaacagcacagtcacttctcacagtgttaaaggtcagaagtcccagatcaaggttctggcagatctggtatctgctgctgggacaggacccagg

SEQ ID NO: 980679 - DNA, 120 bp, Artificial Sequence
  ENSG00000254739_0 (sequence is synthesized)
gagacacagtgggtgtccgagggggggctctgcgtccggaggcgagacgtccgaggtcagaggggaggagacggacccgaccttccttggctgtgctctccagccctgtcctgtgctgga

SEQ ID NO: 980680 - DNA, 120 bp, Artificial Sequence
  ENSG00000254739_1 (sequence is synthesized)
cccaacctaacctctgcagcctccctgccctggacacaaatctggctgagaccccagaccctgatggggcagagcctggcactggaggagccaccaggatgggcccctgtgggtgtgggc

SEQ ID NO: 980681 - DNA, 120 bp, Artificial Sequence
  ENSG00000254739_2 (sequence is synthesized)
cagacttcagatgcgctcactgctgctcactgtgggacagccagacacggagccctctgttctccagcagttgtggacaatgagggatccctggagggatgcctggtgggcagcaggagt

SEQ ID NO: 980682 - DNA, 120 bp, Artificial Sequence
  ENSG00000254739_3 (sequence is synthesized)
ccctcttgtgggtcagggtgcggggatgggctctccctgcagggacttcccagtcttgtcctctgggattggcagtttgcaggggtatcctcggcatcagaccaggggggccacacaggg

SEQ ID NO: 980683 - DNA, 85 bp, Artificial Sequence
  ENSG00000254734_0 (sequence is synthesized)
aaactctgaacacatgttttaagaactgtaacactcacggcaggggtccgcggctttattcttgaagtcagtgaaaccaagaaac

SEQ ID NO: 980684 - DNA, 120 bp, Artificial Sequence
  ENSG00000254734_1 (sequence is synthesized)
gtccgcggctttattcttgaagtcagtgaaaccaagaaaccaccgattccggacacaatgtgagaacttcactgaagcagaattaccaaagaaaccagcttcttcattacaggctatcag

SEQ ID NO: 980685 - DNA, 120 bp, Artificial Sequence
  ENSG00000254734_2 (sequence is synthesized)
ttgtcagacagacacaacccagactcgtgacttatgcctcaacaagaccttgggcttccacccagagaaggactcagtgcacaaggatcatttttcttacccttatcatagcatccacaa

SEQ ID NO: 980686 - DNA, 120 bp, Artificial Sequence
  ENSG00000254734_3 (sequence is synthesized)
ccaattggcagtacccattccctaacccctgcccactaaaccacccttaaaaacccctaacttccaaggctttagagagaattatttgagtaatagcttcatctcccatgtggctggcct

SEQ ID NO: 980687 - DNA, 120 bp, Artificial Sequence
  ENSG00000254733_0 (sequence is synthesized)
gcggccgccgcgggcccagctgtatggttaggccaccatcgttcgtcttgggaggactccagtgcttgttgccctagcattaattgaaagtggaatgaaaaacgaagatgcagtacggtt

SEQ ID NO: 980688 - DNA, 70 bp, Artificial Sequence
  ENSG00000254733_1 (sequence is synthesized)
aacggcacggcgcttttaacagcaagcaacttttgtatttggagaaatatcattctcaaatgcggcttcg

SEQ ID NO: 980689 - DNA, 120 bp, Artificial Sequence
  ENSG00000254733_2 (sequence is synthesized)
tgccatcgttggctgatgaaagagttccttttatttggtgagttcatccatcaagattgtcttcgaagctttgtctttgaagttttcacctattcccaaccactccccctggaagcttgt

SEQ ID NO: 980690 - DNA, 120 bp, Artificial Sequence
  ENSG00000254731_0 (sequence is synthesized)
gtatgttgcattgtacaagatgaagttagagtgtgaagcatggaacaaagtgcttattgagccagaaaatactgcccaaccagctctcaaggcaaagagagggtgtacgagaagctaatc

SEQ ID NO: 980691 - DNA, 120 bp, Artificial Sequence
  ENSG00000254731_1 (sequence is synthesized)
agactggcaagatgcaagggcaggcagcccacccacagggaaggcgtcgccaatcttgagcaactctagaagagaaacctgaacacatcagaactcaaactaactgataatgaactggtt

SEQ ID NO: 980692 - DNA, 120 bp, Artificial Sequence
  ENSG00000254731_2 (sequence is synthesized)
ttcattacttcctgagtgatcaggaggtagaattgtctcttacaacccaatgtataccattctcagttgtctatttaaggatttcttagtgagctccatggtaaaatatatctacttctt

SEQ ID NO: 980693 - DNA, 120 bp, Artificial Sequence
  ENSG00000253338_0 (sequence is synthesized)
catatgtgctgacacagccaccctcagtgtcagtggccccaggacagacacccaggatcacctgtaggggaaataatattggaattaaacctgcttaatggtaccagcagaaaccaggcc

SEQ ID NO: 980694 - DNA, 120 bp, Artificial Sequence
  ENSG00000253338_1 (sequence is synthesized)
ccttgtgcaggtcatctatggggatagcagatggccttcagggatctctaagtgattctccagctccaactcggggaacatggtcaccctgaccatcagtggagcccaggctggggacga

SEQ ID NO: 980695 - DNA, 120 bp, Artificial Sequence
  ENSG00000253339_0 (sequence is synthesized)
tcctttttggcctttaaccttcctccacgtaaggacacagtgaacaaggtgccatcttggaaacaaacagcagccttcaccagacaccagaccttctggcaccttgaccttgcgctttcc

SEQ ID NO: 980696 - DNA, 120 bp, Artificial Sequence
  ENSG00000253339_1 (sequence is synthesized)
agcctccagaaccgactagaactattgccactgagggcaggtgaaagttcagccaactcggaacccggaggccccaccttacctccctttgtgaagagcccagagcctttgtccaaagct

SEQ ID NO: 980697 - DNA, 120 bp, Artificial Sequence
  ENSG00000253339_2 (sequence is synthesized)
gcaaaaatgtgcagcagtagacagggcgtgggtttttgaagtctctgcaggaagtagagttattttctcagcaccacatctgagcgcatcttctaagggtggccgactgtgtgggagctg

SEQ ID NO: 980698 - DNA, 120 bp, Artificial Sequence
  ENSG00000253339_3 (sequence is synthesized)
caggagctcagccgggatgcagccctcccattccccaccctgtccactaccaccacgcctggatccgacaggcagggcaggaccccatgccacgtggtaactgttaaggaaaatggagcc

SEQ ID NO: 980699 - DNA, 120 bp, Artificial Sequence
  ENSG00000253339_4 (sequence is synthesized)
atgctgcggaaatcatgaaccagataaagttcacctttagtcccttgtctacaccctgaaggtgtaacatgagggatcccatctgctatggtttgaatgtgcgtgcccgctccaaaattc

SEQ ID NO: 980700 - DNA, 120 bp, Artificial Sequence
  ENSG00000253339_5 (sequence is synthesized)
atgctgaaacttaatccccagcgcaactgtatcggaagcataatgggactaagacaccatcagaacttgggaccaaaagaatacttttgccctctgagagctgattcttaacacagaata

SEQ ID NO: 980701 - DNA, 120 bp, Artificial Sequence
  ENSG00000253339_6 (sequence is synthesized)
tctgatacccttcctggttttcctgagtgttctttgtctccccaactcctactcacaataaatctgactacacttaaacttagatcatcataagagaccccgcaaatgcccaccatcctc

SEQ ID NO: 980702 - DNA, 120 bp, Artificial Sequence
  ENSG00000253339_7 (sequence is synthesized)
cactgctgtgatcatgaatctagaatggacatttcatatcaatgccacagtcccctgagaccatcagccagaaatgttatcacaactccctcgctttgccctccattcccagaaggcaag

SEQ ID NO: 980703 - DNA, 120 bp, Artificial Sequence
  ENSG00000253339_8 (sequence is synthesized)
gaaagaaggaacccagtttcccagcacccagatgcctactgatcctggcacgcagctcaaagttcagttacattaatgatgggcctactgcatgcttggggcgcttccctgtgtgttttg

SEQ ID NO: 980704 - DNA, 120 bp, Artificial Sequence
  ENSG00000253339_9 (sequence is synthesized)
agatcacatggatggcaagtgacagaggcaagacccatccttgggtcaggtatgaacgtctcgaaggcttggatctgtctgcacgtgggtgattatcacatccagacttgcactgaaggt

SEQ ID NO: 980705 - DNA, 120 bp, Artificial Sequence
  ENSG00000253339_10 (sequence is synthesized)
catgctggctgccatgggctgtgaatacctttcctcaatcaggcactttgtgtctattatctcatttaatctttgttctgctttataaagtggctcttaatatgccccctctacaaatga

SEQ ID NO: 980706 - DNA, 120 bp, Artificial Sequence
  ENSG00000253339_11 (sequence is synthesized)
gccaccttatctaatgtcactaagatgtgtaccggacctgattccaaagcctatgcagtttccattaagcacctctgccttttgaaaagtaggtaatttctccatctctcctagccccca

SEQ ID NO: 980707 - DNA, 120 bp, Artificial Sequence
  ENSG00000253339_12 (sequence is synthesized)
ttttctgaatctgtggcacattaaatgcatataaatgcaaagacagatgacagtatctccatgtctgaaaggtagcctacgtgtgttagcctctggaggcaccctgctaggaggctggaa

SEQ ID NO: 980708 - DNA, 120 bp, Artificial Sequence
  ENSG00000253339_13 (sequence is synthesized)
tctgggatccaatgcggtccagcatttagcagagtgtgccgctgctccaggctccagagcattctaggtgctatgtaacatttgacattttgacatgggcattagaaaaaaaaaatacaa

SEQ ID NO: 980709 - DNA, 120 bp, Artificial Sequence
  ENSG00000253339_14 (sequence is synthesized)
ctagcacactaaactcattatttcaaatattgatcaggataaaaatatgttaacaaaaaagtcattaaaaataatgagcttcttgtgagtgatttacagatttgactaaaatgcaaactg

SEQ ID NO: 980710 - DNA, 120 bp, Artificial Sequence
  ENSG00000253339_15 (sequence is synthesized)
tcaatgacaaatatgagaattaatatactccaaagggtaatgaaggaacagtcctcctgacatctttacatgccaggtagcaccctggccttttagagaggtagggatagcaattgtaaa

SEQ ID NO: 980711 - DNA, 120 bp, Artificial Sequence
  ENSG00000253339_16 (sequence is synthesized)
gcagcactgggtcccctagctagaatcgtccattactggcttttgtcactaactgaaaaatgcggtcatggtttccttttctctggcacattaaaaataaaggacatctttttcctttca

SEQ ID NO: 980712 - DNA, 120 bp, Artificial Sequence
  ENSG00000284430_0 (sequence is synthesized)
taagctgtaagagaaacaaactcctttgggcatttttaacattacctcagcagaggaagaaatgtcacatggtcctataccgcactgtcctcaaagggaatgtatgcctggccccaaaca

SEQ ID NO: 980713 - DNA, 120 bp, Artificial Sequence
  ENSG00000284430_1 (sequence is synthesized)
tagcttcctccttagcaggacacaaacaaagcagctaaagatggaggttaaggccagtcgactgcttccagatgtccatgagcaggagacgaggacagcagcaaactccagcttaacata

SEQ ID NO: 980714 - DNA, 120 bp, Artificial Sequence
  ENSG00000284430_2 (sequence is synthesized)
agatggagaggctgttgggatttctgagggaccagagatcttttggctgcaactcagaggagggtttgggaactggaagtcagaaatcaggagttcgagaccagcctggtgaagccccat

SEQ ID NO: 980715 - DNA, 120 bp, Artificial Sequence
  ENSG00000284430_3 (sequence is synthesized)
aaaaaaaaaaaagaaagaaagaaaataccaaaaatgagccaatgtctacagggcttcgctccctctagaggcttcaggggaggacacttccttgactcttccagctcctggtggcttcca

SEQ ID NO: 980716 - DNA, 120 bp, Artificial Sequence
  ENSG00000284430_4 (sequence is synthesized)
tggtggcttccatgttccctggcttgtgactgcagagttccaacctctgcctccgtctttgccgggccttctcctcttctcccacggaggcagagaagcgtgtcctctcctcttcagtct

SEQ ID NO: 980717 - DNA, 120 bp, Artificial Sequence
  ENSG00000284430_5 (sequence is synthesized)
cttacagggacacttgtcattggatttaggatccacctggatattccagaatggtctcatcttgagatccttaactttaaagcacctgcaaagactctttaacaaagaagttacatttgc

SEQ ID NO: 980718 - DNA, 120 bp, Artificial Sequence
  ENSG00000284430_6 (sequence is synthesized)
aagttctggaacatgctcatatctttttggaggccactactaaaccccctacaattctctttacataatttcccaaaactgtttcccaaaaagttgccagcagtaaccaaattccagaag

SEQ ID NO: 980719 - DNA, 120 bp, Artificial Sequence
  ENSG00000284430_7 (sequence is synthesized)
tgaaagcatgaccctggcccatggtgacaaacccgctttctaccaagttgatcaccacctaactgttgattctagcccttctaatctttagcctgtggtagcaagccaggtacaatttgg

SEQ ID NO: 980720 - DNA, 120 bp, Artificial Sequence
  ENSG00000284430_8 (sequence is synthesized)
cattaagatctaagaatggccaaagtctctcattgcacgcagtgctaccctgatgcagtggaaactacactaaacaagctccgtgggatccttgggccttctcccgtctccatgactcat

SEQ ID NO: 980721 - DNA, 120 bp, Artificial Sequence
  ENSG00000284430_9 (sequence is synthesized)
tggctgggagactttggaaaattttctctgcttctgtgaacttcagtctccctatctataaaatgaagactagattagaacaggggttgatatgctatagcttttttttttttttggaga

SEQ ID NO: 980722 - DNA, 65 bp, Artificial Sequence
  ENSG00000284430_10 (sequence is synthesized)
ggttgatatgctatagatagcacaatctcggctcactagaacctccacctcccgggttcaagtga

SEQ ID NO: 980723 - DNA, 120 bp, Artificial Sequence
  ENSG00000284430_11 (sequence is synthesized)
ggcgtgagccactgtgcctggccagcctgcttttttaaataaagttttattggaacccagccttgtccatttatttacagatcgtgtatgggggctgtcatgctgcaagagcaaagcggt

SEQ ID NO: 980724 - DNA, 120 bp, Artificial Sequence
  ENSG00000284430_12 (sequence is synthesized)
gcaagagcaaagcggttgcaacagagacagaatgactcagaaaatggagaatatttgctggctagccctttacagaaaaagcttgccaccccctagacaagtacagagctctgtaaaggg

SEQ ID NO: 980725 - DNA, 120 bp, Artificial Sequence
  ENSG00000284430_13 (sequence is synthesized)
cccttctagctgggttattttgtgttactatggaccagttcctcatttgagccctgcctaaaatctgatggtggcctgaggagctggctatggagagggagcaggactgaaaaaaaggct

SEQ ID NO: 980726 - DNA, 120 bp, Artificial Sequence
  ENSG00000284430_14 (sequence is synthesized)
ccatcagcctcacagtaccagcattgcccctccccggacatccttgtgtgcaccgtgcttccgcattgcctgcgctcccagaatttagctcccccagatcttccaccctgttctcccctt

SEQ ID NO: 980727 - DNA, 120 bp, Artificial Sequence
  ENSG00000284430_15 (sequence is synthesized)
ggggcttgccccctgcaacgggcaggaaatgcagacagccaggggacttgtgggtccctttaaggccttgagacctggggaaatcccccagttctcagccacctaaggacaactcattct

SEQ ID NO: 980728 - DNA, 120 bp, Artificial Sequence
  ENSG00000284430_16 (sequence is synthesized)
cccagtctaagggccgagtcattctcactttgcttctatcactgtccagattccagcaaaatacacccttccacagtcaaacctctacctccttcattctcctctcttatttgttaaaca

SEQ ID NO: 980729 - DNA, 120 bp, Artificial Sequence
  ENSG00000284430_17 (sequence is synthesized)
aatcctgatctgcctttttaggctgctcttgaattttatggcaacatataataaacatctgactgcttttatttctatttaacttttatcttgaatgtctctgctgtttcaaaccaaata

SEQ ID NO: 980730 - DNA, 120 bp, Artificial Sequence
  ENSG00000284430_18 (sequence is synthesized)
tttacagcatcacacagccgctgcaatttcattcctcaccaatactgtcactccctcctgcttgcactcaccagccccgtagagaggccgggaatgttggggcgaatggtctcttgtgcc

SEQ ID NO: 980731 - DNA, 120 bp, Artificial Sequence
  ENSG00000284430_19 (sequence is synthesized)
cccacagcagggcttccagactggatctctgagtcactggactcccgggagagcagatggctttcctggcagcctggccctcagctcggagtcaggccatctctggtgactgaagggctt

SEQ ID NO: 980732 - DNA, 120 bp, Artificial Sequence
  ENSG00000284430_20 (sequence is synthesized)
cacatcggtactaggttgggtctggctgtgagaaagaccctcgcatgctccattaaggagcaaacctggggaattcgagcacctctgtcttctcaaaggcctctctttttctcagtaccc

SEQ ID NO: 980733 - DNA, 120 bp, Artificial Sequence
  ENSG00000284430_21 (sequence is synthesized)
tcaggtttggcccaaggcctcggagtgcagctccttggtccacctgtgcttgtccctgcttttctggcccaccaaaaagtgctcctgacagccctaaccacctactcttcaccaaggctc

SEQ ID NO: 980734 - DNA, 120 bp, Artificial Sequence
  ENSG00000284430_22 (sequence is synthesized)
tctggtcctgtgtggtccaaaaggccgactgcagatgctcttttgagtccagggccctaaagaaagcagtcctacctggtgggggatgacactctggacctggagtctgaagacctcgtt

SEQ ID NO: 980735 - DNA, 120 bp, Artificial Sequence
  ENSG00000284430_23 (sequence is synthesized)
ttctgtctctgagcttcagttttctcatctatgaaatgggaatcataacacacgcttgatgtgactctcagggctgccctaaggatactgaaaaatggcgaatgacggcgtgctttgtac

SEQ ID NO: 980736 - DNA, 120 bp, Artificial Sequence
  ENSG00000284430_24 (sequence is synthesized)
acagtgggtcgtccaaggggagccagagagtgcctctttctggcatgcctgagcctccggagctggagaagcctcctttggtctcctagactgccttttctcctcccatctgtctcaacc

SEQ ID NO: 980737 - DNA, 120 bp, Artificial Sequence
  ENSG00000284430_25 (sequence is synthesized)
tgcacaaatcctgccgggctctgcacattgctctgtgttgacggatccaccatattagccttgcctggccctttccttcgtccttagaagactcatgactccagctgagcttatgggtga

SEQ ID NO: 980738 - DNA, 120 bp, Artificial Sequence
  ENSG00000284430_26 (sequence is synthesized)
actctttcacagcagaaactgctttgcccttccttccccatgggccttgtacctggtcaagcctgcatctttcagctctctggtcatccagagggaagtctcacatgagtcttggtgaga

SEQ ID NO: 980739 - DNA, 120 bp, Artificial Sequence
  ENSG00000284430_27 (sequence is synthesized)
atcttcaacttggccgtgcaagttttctgatactttcaatccagttcaagataagatacatacagcagtcacacaccctgaatctcagattctcagaggggttgatccctctgaaacatc

SEQ ID NO: 980740 - DNA, 120 bp, Artificial Sequence
  ENSG00000284430_28 (sequence is synthesized)
ttgcaaccaaaactccatcttggcgtctgcttccttctgaagaactcaacctgggacacagtaagaggacagatcacctacctgtgaggacccctgtgattcagtctgcctttccctggc

SEQ ID NO: 980741 - DNA, 120 bp, Artificial Sequence
  ENSG00000284430_29 (sequence is synthesized)
cacgaccccatccttgcccctgtctgatgtccaagctgcccctgctgagacagacctggcctcttctggacagctccagtcacataaggactccatagcttgtgtgggctcagagcactt

SEQ ID NO: 980742 - DNA, 120 bp, Artificial Sequence
  ENSG00000284430_30 (sequence is synthesized)
tggctgcagagaggaaagtctttaccactgggcaggactcactagttcgtgatgaagatggtgacacgcccacctggagagatgtacacggtttccttggaggaagcccacggcctggag

SEQ ID NO: 980743 - DNA, 120 bp, Artificial Sequence
  ENSG00000284430_31 (sequence is synthesized)
tgaatcactcaagcagagtgttcgctgggtgactggtgtcccatgagggcaccaggcggatcacattgaatataaaagatgctccttgggggccctcttagctcttgccacatggaaccc

SEQ ID NO: 980744 - DNA, 120 bp, Artificial Sequence
  ENSG00000284430_32 (sequence is synthesized)
tgagaagggcagggcaccttgggctggaaggaagatgctgtcagggcgtgcacttgtagaagaggagaggcgccaccaggcaattcctgggattgcatggtttgctgagagaattggggc

SEQ ID NO: 980745 - DNA, 120 bp, Artificial Sequence
  ENSG00000284430_33 (sequence is synthesized)
cggggacctcgggagccgtcacgcttgtgtggtcctagacattctcaatcactcccaccctcgccctaaaacttagtcgggatgcccttttctctctacgtggggaccctgctctaggga

SEQ ID NO: 980746 - DNA, 120 bp, Artificial Sequence
  ENSG00000284430_34 (sequence is synthesized)
agaagctgtagggggctggtgtggccgggctgtttctgcctgtctgcatcttacattttacttctggcaggcacttttcccagggactggaacttcagcctcactccctaaattctcaat

SEQ ID NO: 980747 - DNA, 120 bp, Artificial Sequence
  ENSG00000284430_35 (sequence is synthesized)
tctcccagaatccccagcaaccaaccaaggggagctccaggggctgagggtcagtgaggcacaaatggcaggtggatggcaggattcctgggtgtcccaacccacaccgcacccatgtgg

SEQ ID NO: 980748 - DNA, 120 bp, Artificial Sequence
  ENSG00000284430_36 (sequence is synthesized)
cccttgggtctcagcacctgcataccctggccagcgtggggccagtgtgggaccagcatggggccagtgggaacacagcagcaggcccagtgcttactccaacctcaggactgggcctgg

SEQ ID NO: 980749 - DNA, 120 bp, Artificial Sequence
  ENSG00000284430_37 (sequence is synthesized)
ggagtggcaggttggactcctccaggaggcacagcacctagaacccatggtgctttcagggcattgaataaaaaatgttttcatccaattaaaacaggaagaggccaggcccaaaggcct

SEQ ID NO: 980750 - DNA, 120 bp, Artificial Sequence
  ENSG00000284430_38 (sequence is synthesized)
aggattgcttgaggccaggagctcaagatcagcctgggcaatatagggagacctcatctttaccaataaataaataaataaataaaatgggaagaaaaaaataaatttttagaatcaaag

SEQ ID NO: 980751 - DNA, 120 bp, Artificial Sequence
  ENSG00000284430_39 (sequence is synthesized)
gggaagaaaaaaataaatttttagaatcaaagatgtggtttgtcattacatccatgtggttgtaaaatacaagtttgagtttttgtttttcggaggaggaagaggctcacaaagactaaa

SEQ ID NO: 980752 - DNA, 120 bp, Artificial Sequence
  ENSG00000284430_40 (sequence is synthesized)
gtgcttagggccttgtaagagggggcacatggccagggctcagtggttggggtaggggtctctggagcctggaggtggcctcagagctaagggacaggtgcccccatgaaacaccccaag

SEQ ID NO: 980753 - DNA, 120 bp, Artificial Sequence
  ENSG00000253331_0 (sequence is synthesized)
atgaacaattcgacctccttctgttgtggatgatcttttctggtctgggtaaagttgttggtgttggagcactgttcgagaaacaagaacatgaaggtcgcactgactctatgcttaaac

SEQ ID NO: 980754 - DNA, 89 bp, Artificial Sequence
  ENSG00000253331_1 (sequence is synthesized)
aaacaagaacatgaaggtcgcactgactctatgcttaaactgctgacagtttcatggaaataaatgtatttgtgtgctaatgagagatg

SEQ ID NO: 980755 - DNA, 120 bp, Artificial Sequence
  ENSG00000253331_2 (sequence is synthesized)
tggagtcccagaatgcagcaatctaaagcagaagccatcactaaaaggcagcaacgtgtgacagaaacaagaaataaacattgtctgtgccacagaaatgttgtgggttttgttaccaca

SEQ ID NO: 980756 - DNA, 120 bp, Artificial Sequence
  ENSG00000253331_3 (sequence is synthesized)
catctcctgcccaacagagacgtatgtggtgtagtagaaggagcataatcactgttaaaagttgccagcaactggtttccccaagagttatctaaggccatcaaagtggcttttcctgtg

SEQ ID NO: 980757 - DNA, 120 bp, Artificial Sequence
  ENSG00000253331_4 (sequence is synthesized)
tgtgacaatggacacataattagccacacacccagatctcccaactctcaacacgtcattttagaaagcagcattcaaggtgcaattttaaagttaaaatattaaaatactaacaaactg

SEQ ID NO: 980758 - DNA, 61 bp, Artificial Sequence
  ENSG00000253334_0 (sequence is synthesized)
acatgctatcaaatggacccggtggatcatccaaacaaagaaattctctcactgcaaggct

SEQ ID NO: 980759 - DNA, 120 bp, Artificial Sequence
  ENSG00000253334_1 (sequence is synthesized)
tgtacagtgttttaaacaagttggttatgtgttttcatacaagtaactaaatataaatataaaactatagaagatgcaaagatcttaaggtgttttctaagatcttagaacataaatatc

SEQ ID NO: 980760 - DNA, 120 bp, Artificial Sequence
  ENSG00000253334_2 (sequence is synthesized)
acaaatttattgttacatacaaactatggggcataaaacatacttcacaataatggttcaagagaccaacatagtgaatagcctctttatgattttcaaagaaatattagtctgaactag

SEQ ID NO: 980761 - DNA, 120 bp, Artificial Sequence
  ENSG00000253335_0 (sequence is synthesized)
agataggtgttgctgagtgactggacagatttcttctgctttcagtctcttttcatgggtccttcagaatgagttttggaaaggagaaaaacaaaaagagaccagaaggaactgagaagc

SEQ ID NO: 980762 - DNA, 120 bp, Artificial Sequence
  ENSG00000253335_1 (sequence is synthesized)
tcaaagcatcaaaggacacagcaatatgagaggccaacaactgatatacaagccacaccgagaagattgccatttgcaagagagctattaatgaaagtcacacacctgaagctctaaaag

SEQ ID NO: 980763 - DNA, 120 bp, Artificial Sequence
  ENSG00000253335_2 (sequence is synthesized)
agcaaaaaagtgatcaggccagaaatcctgctgactcaggaaattctattctgccgttagacgaagctaaatatcagagcacctactctgccgtatattcttaatagggttcctgtactt

SEQ ID NO: 980764 - DNA, 120 bp, Artificial Sequence
  ENSG00000253335_3 (sequence is synthesized)
agctatgtaacagcctatggggtttaactcattcgctaaagaaacatattgaatgaggaccctgggccaaagcaccacatatagtcgtccatcggtaaagtggggcataagtggggattg

SEQ ID NO: 980765 - DNA, 120 bp, Artificial Sequence
  ENSG00000257429_0 (sequence is synthesized)
gtaaaataatttgcatgactgtaatgtttcaagctgtagttgattgaatccacggatgcagaacacatggatttggagggccaactgtagtgttttggatgatgatcagagttgcggaga

SEQ ID NO: 980766 - DNA, 120 bp, Artificial Sequence
  ENSG00000257429_1 (sequence is synthesized)
aaaagaagaatgagaagaaggagagtttcagggatattgaaaatttaaattagatatccctcaagattcccggtccctgtacaaaaacagattcttccacttactcaaccaaacactgat

SEQ ID NO: 980767 - DNA, 120 bp, Artificial Sequence
  ENSG00000257429_2 (sequence is synthesized)
ctaggtacagatggaaagctatgttgctgctgtaactaagaatcttaatcagtttactttaaaatagagagctatccagtggacctgaccttataacctgagccctctaaaaggaggata

SEQ ID NO: 980768 - DNA, 120 bp, Artificial Sequence
  ENSG00000257429_3 (sequence is synthesized)
tttcagaaaaggaagtcaaagctttaaagagatggattcaacgtacaaaaatttctctattgttggctctcaagaaggagggagctgcatgataaggaacacagaacatctttgggagct

SEQ ID NO: 980769 - DNA, 120 bp, Artificial Sequence
  ENSG00000257429_4 (sequence is synthesized)
gagagaagcccttagctaaaagccagccagggaaggggctctcaatcctgtgactgcaaggaactaaattctaccacaaccacgtgaacctgaaagaggaccctgagttacacaagaaaa

SEQ ID NO: 980770 - DNA, 120 bp, Artificial Sequence
  ENSG00000257429_5 (sequence is synthesized)
tgttgactgacaagttgacttcagcttgtgagaataagtagaaaacctaggcacaacacgcctggacttctgacctatagaactatgagctaataaatgggtattgttttaagccactaa

SEQ ID NO: 980771 - DNA, 120 bp, Artificial Sequence
  ENSG00000232494_0 (sequence is synthesized)
ccagaatcaggctgcaaatgccaaagcaagagatgtcagcaatgagttgcaggtctttgccaaacagagcatcatctggcagtgaaaggagagcagaagaggggattttgaagtcttcct

SEQ ID NO: 980772 - DNA, 120 bp, Artificial Sequence
  ENSG00000232494_1 (sequence is synthesized)
gcacacttccgacaacttgattgaactggacgcccttggaagttcatggcatcgcctataacagagtctgtgtaggcaaaaccccagcctatgctggaatttaactcttaaaaagcaacc

SEQ ID NO: 980773 - DNA, 120 bp, Artificial Sequence
  ENSG00000232494_2 (sequence is synthesized)
aaaagaaagtatgacttgagccaatgaaatgccaaaatccagttctagctgacaacgtcagtagtggaggacagacttccacttgccatttgaggaaaaagcatgtggattcatgagcat

SEQ ID NO: 980774 - DNA, 120 bp, Artificial Sequence
  ENSG00000232494_3 (sequence is synthesized)
aacagcagataccccactaccaattaccaaatcctgtgcacattcctgttctccagtcaccttttctccataaatgtttgtggtataaaatgaaaaccttcccaaatattaaccagtcaa

SEQ ID NO: 980775 - DNA, 120 bp, Artificial Sequence
  ENSG00000233559_0 (sequence is synthesized)
gtgaacacgctgagtccagccttggagatgcagcttttgtcttgctgaaaccttccagttaaatttctccatcaatttttcaaatagtattattagctgagggactaaaatctgcctggc

SEQ ID NO: 980776 - DNA, 120 bp, Artificial Sequence
  ENSG00000233559_1 (sequence is synthesized)
gttcttctgatgacaaaggaaacacagcacattcacaaacatctgaagccaactgcaaggcacccgtcactcagcgagaaaagcagaaaggtgccaattcagatggctgagctacttcgc

SEQ ID NO: 980777 - DNA, 120 bp, Artificial Sequence
  ENSG00000233559_2 (sequence is synthesized)
ctgggtcccgacctgtatcaccacagggtcacagaaatggaaccttctccgtcacacctcctgatggcagtcagctgtgacccgctgaatccaggacatcatgcattccagtttcatttg

SEQ ID NO: 980778 - DNA, 120 bp, Artificial Sequence
  ENSG00000233559_3 (sequence is synthesized)
cgagaacatttccagatcccctggaggtatatagcttattaacacaaaacaaatgtgacacttgaaaggcaggagacttggtttctattctctggcccactactgacttattgggtggct

SEQ ID NO: 980779 - DNA, 120 bp, Artificial Sequence
  ENSG00000233559_4 (sequence is synthesized)
agagtgggcacctggcagactttcttttttaaaagcaaaataaattgacatgacttgttcagggttaactgtttggcaggtggatgatctgtggccatccatgatgagatcacctccctg

SEQ ID NO: 980780 - DNA, 120 bp, Artificial Sequence
  ENSG00000233559_5 (sequence is synthesized)
ccccgctggcccccagcctctagaagtcagggcttctgaggcccagaagctcagcgccacacctgttgaaggccagtgatgtcagagttactcttccttcctccagcagcactgacagca

SEQ ID NO: 980781 - DNA, 120 bp, Artificial Sequence
  ENSG00000233559_6 (sequence is synthesized)
gtttattgtacgcaatttctagaactcagatgttctagaaggaagcaaacatattctgagatcacagactatgactatgctctcagaatatgttctagaacacctaagttgcaattctta

SEQ ID NO: 980782 - DNA, 120 bp, Artificial Sequence
  ENSG00000233559_7 (sequence is synthesized)
aaatcaacacagcgtaagactgctttaggaggaagtgatcaagctcaaagcaacctaggcatgatgtgccttgtttgtttatctgtttgaacaggaataaaacgaaaagaggcctgtgta

SEQ ID NO: 980783 - DNA, 120 bp, Artificial Sequence
  ENSG00000233559_8 (sequence is synthesized)
cagagttgatcacacttaacaatatgtgcaggcaggaccgaaaaaaggtgtggtgccttccagcccataaatcaaagttttctcttgtcactgccgtgtaagaagtgccttttgcctcct

SEQ ID NO: 980784 - DNA, 120 bp, Artificial Sequence
  ENSG00000233559_9 (sequence is synthesized)
tctgaggcttccccagccatgtggaactatgacgccttgctgtgttgcccagggtggtctctaattcctggcctttagcaattctcccgccttggcctcctaaagcactggggttacagg

SEQ ID NO: 980785 - DNA, 120 bp, Artificial Sequence
  ENSG00000233559_10 (sequence is synthesized)
gttacaggcatgaaccactgtgcccagcctgcatgatgtaatctccaaattgagggcaggagagagagtggtctcacaacggaagggcaccagccactgagaagtcctaaggccgtgttt

SEQ ID NO: 980786 - DNA, 120 bp, Artificial Sequence
  ENSG00000233559_11 (sequence is synthesized)
gagttctggctcatcttttttgctaatttgctcttatgcatatcacccaacctcgctaagccagtttcatcatcagcgagaacagcacactgacatgcagggccagctcaggcgctacca

SEQ ID NO: 980787 - DNA, 120 bp, Artificial Sequence
  ENSG00000233559_12 (sequence is synthesized)
gcctagtggctccagcagaggtctcaacccctttgggatgctcagtgggagacagaatcaagggccaatgatccatgacctagtcctagtgcccatgtcagtttgtcaaaggccctcaga

SEQ ID NO: 980788 - DNA, 120 bp, Artificial Sequence
  ENSG00000233559_13 (sequence is synthesized)
ttcaacaagcacagagtgggcacctggcaggtgagcagtgccctgtgaggtctggggctgggttcggtggtgaaactaggtcagcacacacagccctttgctgggggcccactgcctggg

SEQ ID NO: 980789 - DNA, 120 bp, Artificial Sequence
  ENSG00000233559_14 (sequence is synthesized)
gtaggatttttgtagctgggttcaaggtggacatgctgaaatgtgaccctaaaatgtttgtactcttgaagctgaaggagtgggaagaaacctgtcatttaaagaaggacagtatggcca

SEQ ID NO: 980790 - DNA, 79 bp, Artificial Sequence
  ENSG00000233559_15 (sequence is synthesized)
agcctgggtaacatagggagaccacatctctacaaaacatttaaaaattagccaggcatggtgggatgtgcctgtagtc

SEQ ID NO: 980791 - DNA, 120 bp, Artificial Sequence
  ENSG00000233559_16 (sequence is synthesized)
ctgggtaacatagggagaccacatctctacaaaacatttaaaaattagccaggcatggtgggatgtgcctgtagtcccagctactcaggaagttgaggcaggaggatcacttgagcccag

SEQ ID NO: 980792 - DNA, 120 bp, Artificial Sequence
  ENSG00000233559_17 (sequence is synthesized)
gtctaatcctctgcgatggggccagtctgcagatccgtctgggcgggctgcggtagcattctccacctgccaacactcagttgctggtgagtaaccagcatacggactctcacttcctag

SEQ ID NO: 980793 - DNA, 120 bp, Artificial Sequence
  ENSG00000282591_0 (sequence is synthesized)
gtgccaggaaaggaagggcgcagctcctgcaatgcggagcagccagggcagtgggcaccaggctttagcctccctttctcaccctacagagggcaggcccttcagctccattctcctcca

SEQ ID NO: 980794 - DNA, 120 bp, Artificial Sequence
  ENSG00000282591_1 (sequence is synthesized)
aggctgcagagggggcaggaattgggggtgacaggagagctgtaaggtctccagtgggtcattctgggcccagagatgggtgctgaagctcccacgcctgcctgtgaaaatggagtcctc

SEQ ID NO: 980795 - DNA, 120 bp, Artificial Sequence
  ENSG00000282591_2 (sequence is synthesized)
gagtcctctctcacctgggagagccaggtgctgccccgagaaggatgcatttatggcttcgtgaagtctttcctgacccccgatgctgctgactatagagacaaagtctcactatgttgc

SEQ ID NO: 980796 - DNA, 75 bp, Artificial Sequence
  ENSG00000282591_3 (sequence is synthesized)
gaccttgggcaagttcttaaacccttcaaagcctcatttttctccaatcacaaaagggaaagatggtaatatttt

SEQ ID NO: 980797 - DNA, 120 bp, Artificial Sequence
  ENSG00000282591_4 (sequence is synthesized)
atttttctccaatcacaaaagggaaagatggtaatattttccccaccaaattcttgtaagtattaaacattgtatatgtattttgaacacgattaagctctaaacacttgttaggaagca

SEQ ID NO: 980798 - DNA, 120 bp, Artificial Sequence
  ENSG00000282591_5 (sequence is synthesized)
gactggcatttgaaacaaacagctcttttcccacaggtcggatgccctcacagaattgagattatgtacgtaaaacaccaggtgcctaacccggcacagagcaggagggctaagcgtgac

SEQ ID NO: 980799 - DNA, 120 bp, Artificial Sequence; identical to SEQ ID NO: 911808
  ENSG00000282591_6 (sequence is synthesized)

SEQ ID NO: 980800 - DNA, 120 bp, Artificial Sequence; identical to SEQ ID NO: 911809
  ENSG00000282591_7 (sequence is synthesized)

SEQ ID NO: 980801 - DNA, 120 bp, Artificial Sequence
  ENSG00000282591_8 (sequence is synthesized)
cagcattggccaatggactctgcatgggagtgacgcatgctgcctccaggcttgtccctaaaacctcccacgtgtcctccgcctgctcttcccacctccaaggagcacggcaattgtgga

SEQ ID NO: 980802 - DNA, 120 bp, Artificial Sequence; identical to SEQ ID NO: 911811
  ENSG00000282591_9 (sequence is synthesized)

SEQ ID NO: 980803 - DNA, 120 bp, Artificial Sequence
  ENSG00000273141_0 (sequence is synthesized)
acgcgggaaaggcattttggggacacaggagagctgcgagggcgaagcacgggcgagctgtcgttagggcccaggaaaggcccgttgcggggcgcacaggcgggcaggggaactcgcgcc

SEQ ID NO: 980804 - DNA, 120 bp, Artificial Sequence
  ENSG00000273141_1 (sequence is synthesized)
gcttctgagcacagccaccgcggcggccgggggcggccactgctccccgcgagcccgcttccgcgccccagaagcccccagagcccgcgtccgagctccaggccttggaggagccaggcg

SEQ ID NO: 980805 - DNA, 120 bp, Artificial Sequence
  ENSG00000273141_2 (sequence is synthesized)
gggttccgcgcgcggtggcagccaggccgtgcctccccgttcccctcccgcgccgcgctgcccctccgggacccaccaggcctggctgcgcctctttcctctcctcccccggagccttgg

SEQ ID NO: 980806 - DNA, 120 bp, Artificial Sequence
  ENSG00000273141_3 (sequence is synthesized)
cgcctctttcctctcctcccccggagccttggaaagtgccctccagagatgtgcttaggaagtgtgtgatgaataaaggagacaatcaggataactataatatttattatgcacttgctt

SEQ ID NO: 980807 - DNA, 120 bp, Artificial Sequence
  ENSG00000284294_0 (sequence is synthesized)
agacaagggcttagacttcacaagcaccctggcacttcagctgcatggtggggaccctctgccggcagggctgaggccaaggcccactggcttctcaaagcctctgctcctgctctccgt

SEQ ID NO: 980808 - DNA, 120 bp, Artificial Sequence
  ENSG00000284294_1 (sequence is synthesized)
agagtgagaccctgtctcaaaacaaaaattatgtattttcagatagcttgaaggagaatattgagtgttcgtaatgcaaagaaataataaatgtttgagatgatagaaagattccggaca

SEQ ID NO: 980809 - DNA, 120 bp, Artificial Sequence
  ENSG00000284294_2 (sequence is synthesized)
agattccggacacaaacggccacaagttgtatggttcgttttatatgaagagttcagaatagacaaatcgatagagacagaagtcacacgaagacaagcccatagtggagcctgggtgaa

SEQ ID NO: 980810 - DNA, 120 bp, Artificial Sequence
  ENSG00000285744_0 (sequence is synthesized)
gaccagaggaattcgcgaatttccgaatcaccgcaggaaaaaccagctggcctgaatcaaagcaattctgggtaaaagacttcccagatgatctctcaacgccttggcaacgcttggcga

SEQ ID NO: 980811 - DNA, 120 bp, Artificial Sequence
  ENSG00000285744_1 (sequence is synthesized)
ctgggagctagaaccatgagttgttaatgtgtgcacggaagccacaagtgtgcaggacgcaagctgggttattggaagcggacgacaccaaggaggcgttgccgcggatgtggtggacga

SEQ ID NO: 980812 - DNA, 120 bp, Artificial Sequence
  ENSG00000285744_2 (sequence is synthesized)
tgccaagtcgtcttttaaaaaaggaagtgaagaatgattaagagggtcacgccctctaccactccaacctctctaatcagtctctttctgctccgtctgctgtacatgcacctgctcagg

SEQ ID NO: 980813 - DNA, 120 bp, Artificial Sequence
  ENSG00000285744_3 (sequence is synthesized)
tgagacctcaaggaaaaataatcctgtgggtccacctaatctgacaaccacagttgctaacagtatgagttctgcagttatacagaactaagtccattagctgtgtgacccatggccaaa

SEQ ID NO: 980814 - DNA, 120 bp, Artificial Sequence
  ENSG00000285744_4 (sequence is synthesized)
ctgtgtgacccatggccaaatattttccttctctgtgcctgcatttcttcatctgcaaactggaataatgatagcaactacttcagaggactatgctagagtgcaatggcgcaatcttgg

SEQ ID NO: 980815 - DNA, 120 bp, Artificial Sequence
  ENSG00000285744_5 (sequence is synthesized)
ggattacaggcatgagccaccgcgccaggtggttttataagggaattttcccccactttgctctgcacttatccttgctgctgccatgtgaaaaaggatgtgtttgcttccccttctgcc

SEQ ID NO: 980816 - DNA, 120 bp, Artificial Sequence
  ENSG00000285744_6 (sequence is synthesized)
agcggtgactaaaagaggccaaggtatagctcaggtcgttgcttcagagggtgcaagacccaactcttgggttgggtcttggcgttggtgttggtcctgcagaggcacataagacaagaa

SEQ ID NO: 980817 - DNA, 120 bp, Artificial Sequence
  ENSG00000285744_7 (sequence is synthesized)
ttgaggtttgggaactttcgcttagatttcagaggatgcatggaaatgcctggatgtccagggagaagtttggtgcaggggtggagtcctcctggagaacccctgctaggtcagtgcaga

SEQ ID NO: 980818 - DNA, 120 bp, Artificial Sequence
  ENSG00000285744_8 (sequence is synthesized)
agggaaatgtgaggtgggagccaccacacagagtccccacttgggcactgcctagtgtggctgtaagaaaagggtcaccattctccagaacccagaatggtagatccacagacagcttgc

SEQ ID NO: 980819 - DNA, 90 bp, Artificial Sequence
  ENSG00000285744_9 (sequence is synthesized)
aaagccacaggggcagagctgcccaagattgtgggagcccatctcttgcatcagtctaacctggatgtgagacagcagtttaatgactgc

SEQ ID NO: 980820 - DNA, 120 bp, Artificial Sequence
  ENSG00000285744_10 (sequence is synthesized)
atcattttggaactttgcagtttaatgactgccccgttgaatttcagactggcataggtcctgaaccccctttgttttggtcagtttctcccatttggaatgggtgtattttctcaatgc

SEQ ID NO: 980821 - DNA, 120 bp, Artificial Sequence
  ENSG00000285744_11 (sequence is synthesized)
ctgtccccattatatagctaaattgcttttgattttacaggctcctagggacctgagaaaaggcacttgtcttgtctcagatgtgactttggacttggacttttgagttcatgctagaat

SEQ ID NO: 980822 - DNA, 120 bp, Artificial Sequence
  ENSG00000285744_12 (sequence is synthesized)
gagttaatacctgggaggactgttggagggacatgattgtgttttgaattttgaggacatgagttttgtgaggggctagggtggaatgatatggtttggctatgttgccagccaaatctc

SEQ ID NO: 980823 - DNA, 120 bp, Artificial Sequence
  ENSG00000285744_13 (sequence is synthesized)
ggtttggctatgttgccagccaaatctcatcttgaactgtagttcccataatcctcaggtgttataggaggaacctggtgggaggtaagtggatcatgggggcggttacctccatgctgt

SEQ ID NO: 980824 - DNA, 120 bp, Artificial Sequence
  ENSG00000285744_14 (sequence is synthesized)
ataatagtgggtgagttctcatgagatatgatggatttttaaggtgcttttctccaacttcgctctgcacttttccttgctgtcgcaatgtaaggaaggatgtgtttgcttccccttctg

SEQ ID NO: 980825 - DNA, 120 bp, Artificial Sequence
  ENSG00000285744_15 (sequence is synthesized)
ctccccagtcatgctaaactgtccaatcagcataatgtcatcaatgcaatggaacggactgattttctgcagaaagggaaatcaatcaaggtcccagtggactaaatgatgatataaggc

SEQ ID NO: 980826 - DNA, 120 bp, Artificial Sequence
  ENSG00000285744_16 (sequence is synthesized)
tgaagaatggacgcatcctatgaagtctcgctctgtcacccaggctgtagtgtagtggggtgaccttggcttactgcaacctccacctcctaggttccagcgattctcccacctcagcct

SEQ ID NO: 980827 - DNA, 120 bp, Artificial Sequence
  ENSG00000285744_17 (sequence is synthesized)
acaggcatgagccacagtgcctggcctacgtatttctttttaaagactgacttttcatttagattaaatgattgctcttctaaagtaatttactctttgttggttttaagaaatcttttg

SEQ ID NO: 980828 - DNA, 120 bp, Artificial Sequence
  ENSG00000285744_18 (sequence is synthesized)
tttactctttgttggttttaagaaatcttttgcatgtataaggtataaaacaacaactgtttatatgttacttccattagccgatgaactagcggttaaatgatgcttcaaatagaaaat

SEQ ID NO: 980829 - DNA, 120 bp, Artificial Sequence
  ENSG00000285744_19 (sequence is synthesized)
aagttaattccactaatagattgtgttttcattaaagtcataaacatgaaataacactttacaaagttcattttgttgagtatcttgcattactgtgaattatattgtaaagtagtttaa

SEQ ID NO: 980830 - DNA, 120 bp, Artificial Sequence
  ENSG00000285747_0 (sequence is synthesized)
ggattacaacccacaagtctggttattttagcaggaaactggtgattccttttctaccgagaaagcaagcaacagacaagaggaaaccagcattccttgagaatccagtgcgctagaaac

SEQ ID NO: 980831 - DNA, 120 bp, Artificial Sequence
  ENSG00000285747_1 (sequence is synthesized)
tcgacagaaattatcttatctaattctcacatcactcttaggaggcagacattattttgcagatgaggaaaatggatctcccagaagtcaaagagcttcctcaggatcacacagcaggaa

SEQ ID NO: 980832 - DNA, 120 bp, Artificial Sequence
  ENSG00000285747_2 (sequence is synthesized)
ctccacagaactgagattcaaaagcagatcacatatgtggcaaaattgcatagaactgaatatacactcacaaatgagagcacgtgaaactcatgaaatttgaataagacatttggacta

SEQ ID NO: 980833 - DNA, 120 bp, Artificial Sequence
  ENSG00000285747_3 (sequence is synthesized)
cactaatgtccatttactgattgtaatattgttctacagttatgcaaaatgttaccattgagaaaaattaagtgaagcgtctatagggaatctctctattattccttacaacttcaagcg

SEQ ID NO: 980834 - DNA, 120 bp, Artificial Sequence
  ENSG00000285747_4 (sequence is synthesized)
aatttacagttacctcaaaaaatttttttaaaaattttaaacatctcagtcttattcaaaagcccaggctctcttctttcaacacggtatataagcgtgcctgcagaataagagagattt

SEQ ID NO: 980835 - DNA, 120 bp, Artificial Sequence
  ENSG00000285747_5 (sequence is synthesized)
atgctcctctctcctttttaaacagtcttgaataagtacacatacacacacaaacacacactcatacactgtatgcatggttgttcagtcatccagtaatatgatacaacacacacacac

SEQ ID NO: 980836 - DNA, 120 bp, Artificial Sequence
  ENSG00000285747_6 (sequence is synthesized)
acacacgcagttcattaagaggatagctaacctgttaccagaatacttacatagaggtcatcttgtaagacagacaataatgctcactgggcactaaaacagccaacagtcttggaagcc

SEQ ID NO: 980837 - DNA, 120 bp, Artificial Sequence
  ENSG00000285747_7 (sequence is synthesized)
tttgaaacctggtgtgtgcttggcacttgcagcacatctcagttcagaccagccacacggggctactggctgccacaaacgcagtgtcagaacaagaagaggattcggaatctgtccagc

SEQ ID NO: 980838 - DNA, 120 bp, Artificial Sequence
  ENSG00000285747_8 (sequence is synthesized)
ccaactccattatggttaaaggaaagctgtgttcaggaaggtctgctgccccgctcaggatcacacagtggatgcatgacagccttaggcctgacctgtccacctcagcactcgcctact

SEQ ID NO: 980839 - DNA, 120 bp, Artificial Sequence
  ENSG00000285747_9 (sequence is synthesized)
gagagggctcatggctgactcagacagctgccatggaatgaaacccagtgtttactaacatttttaaacaatcaccatcctctaagtcattggcccctcaaaatatggttagacatacaa

SEQ ID NO: 980840 - DNA, 88 bp, Artificial Sequence
  ENSG00000285747_10 (sequence is synthesized)
agacatacaatttctaaagaaaatagcccaatatatactattttgttttcttttttccctttctttctttgtttcttttcttctttcg

SEQ ID NO: 980841 - DNA, 89 bp, Artificial Sequence
  ENSG00000285747_11 (sequence is synthesized)
cagctaattgtcttcactcttattgcccgggctggaatgcaatggcgcaatcttgtctcaccgcaacctctgcctcctgcgttcaagcg

SEQ ID NO: 980842 - DNA, 77 bp, Artificial Sequence
  ENSG00000285747_12 (sequence is synthesized)
accatgttggccagactggtctcaaactcgacctcaagtgatccgcccaccccaacctccagtatatactattttaa

SEQ ID NO: 980843 - DNA, 120 bp, Artificial Sequence
  ENSG00000285747_13 (sequence is synthesized)
tggccccagtatatactattttaatacttagaaatgacaaccccgtaggccgtttgttaaagcacaccccacccgtttttgactcagctgtattggcatctgaagggtaccagcagaggg

SEQ ID NO: 980844 - DNA, 120 bp, Artificial Sequence
  ENSG00000285747_14 (sequence is synthesized)
agggttggaggccaagaaggcagtagctgctgggccttgcccgtcctccaggaatgcgtggaaggagtgcttctccgtcctccatcctccatcccacccacatcagctcctgccagcatc

SEQ ID NO: 980845 - DNA, 120 bp, Artificial Sequence
  ENSG00000285747_15 (sequence is synthesized)
ccaaggacccaagctgtctgccatgattagtatcaaaggccttaaaataactgagtgaccttttttttccactctacacactttgtagtgctttatattctgaatcaagccaaagccaaa

SEQ ID NO: 980846 - DNA, 120 bp, Artificial Sequence
  ENSG00000285747_16 (sequence is synthesized)
atccaagaaaagtgaccatttcaaaaacagaaaatgagcccactaggaagagagcattgctttcaataatgagaacatttgggagtaaactgaataatgaggacatctttgcacctggac

SEQ ID NO: 980847 - DNA, 120 bp, Artificial Sequence
  ENSG00000285747_17 (sequence is synthesized)
tgatgagaaaacgattagatagggcattacaaaaagcaacataaagatctttgatttgcatttgttgtcaactgtgagagaatgggtataattctctaaagacgtagtttagacctcttt

SEQ ID NO: 980848 - DNA, 120 bp, Artificial Sequence
  ENSG00000285747_18 (sequence is synthesized)
gtactaaaatataaagtcaaagtgatgataaatcttatggcagtgggctctgtgagtcatgtttcactctacataaaatgtcttagaggctgaagtgctggggctatcctgatacccaaa

SEQ ID NO: 980849 - DNA, 120 bp, Artificial Sequence
  ENSG00000285740_0 (sequence is synthesized)
ggattacaggcgtgaaccaccatgcctcgctgaatgggtatttccaagccaccatctggccacacttagagaagctctggattaagaagagtttcaggcattcaagaaaagcatcccata

SEQ ID NO: 980850 - DNA, 120 bp, Artificial Sequence
  ENSG00000285740_1 (sequence is synthesized)
catattcatcctctttgacaaattattagatcctggttacctttaaccagtttaacgtaaaatttcagattatgtcttcataagaatttataacaaatttttaaatttcagattccattg

SEQ ID NO: 980851 - DNA, 120 bp, Artificial Sequence
  ENSG00000285740_2 (sequence is synthesized)
aaaagctgatgaacatctaaaaagagagaaggtagggcttatctccaaaatcaaaatggtagttgcttttttatccttgggagactagacttgtctttagggttcttcagtcccttccag

SEQ ID NO: 980852 - DNA, 120 bp, Artificial Sequence
  ENSG00000285740_3 (sequence is synthesized)
aagccagttttgtttttccgtgtttgtgtctgtggtagacagaattttggcccccattaagctgtgaagtgtgtggtaagttgttatatagcactagaaaactaacaaaatctaaatgtt

SEQ ID NO: 980853 - DNA, 70 bp, Artificial Sequence
  ENSG00000285740_4 (sequence is synthesized)
ttgttatatagcactagaaaactaacaaaatctaaatgttttcatttaaaaaaatattgcaaggtgggcg

SEQ ID NO: 980854 - DNA, 89 bp, Artificial Sequence
  ENSG00000285740_5 (sequence is synthesized)
caacatggcgaaactccatctctactaaagatacaaaaaaattagccagacatcgaggctgaggcaggataatttcttgaacctgggag

SEQ ID NO: 980855 - DNA, 120 bp, Artificial Sequence
  ENSG00000285740_6 (sequence is synthesized)
tgcagtgagctgagattgtgccactgcatgccagcctgggcaacagggtgagactctatctcaaaatataaaataaaataaacattttggtctagaattttgttttctgttttggttcag

SEQ ID NO: 980856 - DNA, 120 bp, Artificial Sequence
  ENSG00000285740_7 (sequence is synthesized)
cttcctacaggaagctttccccaagtgctaaagatactctggtgaatatgacagacaaagtttccctctgtctacattgtagaggaggcaagcagataatacagaagtcaacaaataaat

SEQ ID NO: 980857 - DNA, 120 bp, Artificial Sequence
  ENSG00000285740_8 (sequence is synthesized)
aaagaaaattctccagacagcaataagtcctacagggggcaaacttccagtaatacgtgagaaacagaaaaaggaagcccctttagaaacagttactattaaagccttcgctaagaatgt

SEQ ID NO: 980858 - DNA, 120 bp, Artificial Sequence
  ENSG00000285740_9 (sequence is synthesized)
gattgttgagctgaaacttggatgatgagaaggaaaatgtgcccaagaagggaaagagcaattgcaaaagcccagagactggagggaacttgatatgttttctgaacagggtaaaaaagg

SEQ ID NO: 980859 - DNA, 120 bp, Artificial Sequence
  ENSG00000285740_10 (sequence is synthesized)
actatttgacaaagaagcagtaaatgagtgagaaagtacagccgaggtccgattagcagacagaggccaaatcaactaacgtcttgtagatcacaatgaggatgtgggttttattatatg

SEQ ID NO: 980860 - DNA, 120 bp, Artificial Sequence
  ENSG00000285740_11 (sequence is synthesized)
tgtactggacagctagtggatgtggaatattattgcagcttcttccagaccagactcttgcaggagtcagatcttgggaaaggggttgtgtgaggttggagctgtaggaggatgcagctg

SEQ ID NO: 980861 - DNA, 120 bp, Artificial Sequence
  ENSG00000285740_12 (sequence is synthesized)
cagtcagaaccatggcaggctggcagggatgatgggaaggagagaataagtattccaactgctctaatcttgcagtctcttgccagtccctcccgctagctacaaaacagaaagggagag

SEQ ID NO: 980862 - DNA, 120 bp, Artificial Sequence
  ENSG00000285740_13 (sequence is synthesized)
gacaaagccaccttggtgatgcagttatccaagtggtcagcctcacagaaacaggagagaatgtgttggagagggcaaaggagatcattacacacagacttgctgttttaagtacctaca

SEQ ID NO: 980863 - DNA, 120 bp, Artificial Sequence
  ENSG00000285740_14 (sequence is synthesized)
atgtcttctcagctagcagactactagtttatcttcataactacctaccaaaacccacccgggcggagggagataagtggagttaatgtattctaaggttcttccattgtccaggaagta

SEQ ID NO: 980864 - DNA, 120 bp, Artificial Sequence
  ENSG00000285740_15 (sequence is synthesized)
gtaaaagtactaattaatactaaactattataaatcaggaatgcatggtataaattctaaggtgatcacttaaaaaggagataaaagaatatatacctaaaaggccaatagaagggggat

SEQ ID NO: 980865 - DNA, 120 bp, Artificial Sequence
  ENSG00000285741_0 (sequence is synthesized)
cacccaacgtagagtgctccagaaatctttctttcctagctagaaactaacgacttgagaattctgtagaacagcagcaacaaaaatctctttgcagcagcgttgaccacgtgaattgtc

SEQ ID NO: 980866 - DNA, 120 bp, Artificial Sequence
  ENSG00000285741_1 (sequence is synthesized)
ttggacgcagcagcagcgttgggcgttgaattcactttgccgggcacctcgcgggtctgatgtcccacgtgtggtggaaaatgcaatctggagtgttcctggggagctctgctgtgtaaa

SEQ ID NO: 980867 - DNA, 120 bp, Artificial Sequence
  ENSG00000285741_2 (sequence is synthesized)
ccttggctttacagtgagaagacgggctgatcacagatgtgaaccgtcaggtaaccagggctgcagtgagagccacagatttcatgggaagtggaagaggagatggaaagagcatgcatg

SEQ ID NO: 980868 - DNA, 120 bp, Artificial Sequence
  ENSG00000285741_3 (sequence is synthesized)
ctaggcttctctggaaaacacacccaacctcacgtgcattgtcccttgtctccttatgcttccattccagtggagcagatggatgtttaacatggaattgcagaaacttgaaattaaacc

SEQ ID NO: 980869 - DNA, 120 bp, Artificial Sequence
  ENSG00000285741_4 (sequence is synthesized)
taaagaccttattagactcaaatcacatatttttggcaagaaaattgtattgttcatgctatcaattgccttttgtgttatatgagaagctgagtgatatgtcattgtgtgaatatacca

SEQ ID NO: 980870 - DNA, 120 bp, Artificial Sequence
  ENSG00000285741_5 (sequence is synthesized)
catatacaagcagttccttaactaaaggaccaactcagggaagaagttcattggtacaaaccccacaccatgggacccctggaggactataccttagaagcagggatgaaagagagggaa

SEQ ID NO: 980871 - DNA, 120 bp, Artificial Sequence
  ENSG00000285741_6 (sequence is synthesized)
gaggatggaaacgtgcaatcctcttagatggtgaaactaacttgtatcaggaatttataccaggtgcggcattgaactgagctggatttccatacaacaacctgggaagtgagcctgcca

SEQ ID NO: 980872 - DNA, 120 bp, Artificial Sequence
  ENSG00000285741_7 (sequence is synthesized)
agaggatgaacacctagataatggacctacagttcactcagactcaaaataaggatttaggcgagtgttgtgttgctactatttgttttcagttactcccacaaatggacaggtaaccac

SEQ ID NO: 980873 - DNA, 120 bp, Artificial Sequence
  ENSG00000285741_8 (sequence is synthesized)
tcagctagagatcctagggtggctgagaaggacgaggaaggcacaaaaatccctgtggggatggccaaaagagttttcccatgggctcttacactgagaactttactcctttatagtctg

SEQ ID NO: 980874 - DNA, 120 bp, Artificial Sequence
  ENSG00000285741_9 (sequence is synthesized)
aacagcagacagctcagaggtcaaaggaaactgccccttctgtggaaaggactccatgcatgtgtctttgtgcctcttcctggtccttcatctctgtctgtgggtacctttctttccatc

SEQ ID NO: 980875 - DNA, 120 bp, Artificial Sequence
  ENSG00000285741_10 (sequence is synthesized)
acaatcatcctctggatcacatactacacaggactcataagggtgcagagggtcagggatgctggaaatgtcacccaacagcaaggtgatagagttccggacagaatttgaatggtactt

SEQ ID NO: 980876 - DNA, 120 bp, Artificial Sequence
  ENSG00000285741_11 (sequence is synthesized)
tctatggctcatgtctctcggttttctgcagtccttgctgagtttcttaatccagtgtctggagacctccaaggtcaaatgcatgcacatttaaatttaaattctaggtgtaaataaagg

SEQ ID NO: 980877 - DNA, 120 bp, Artificial Sequence
  ENSG00000285741_12 (sequence is synthesized)
taatttctagatttgcttccatcttgattttccatgtcatagttctattcaattagcataagtaactcagaggtgacagtcatgtagagaatgtactgatgggtgattttgatttttgtt

SEQ ID NO: 980878 - DNA, 120 bp, Artificial Sequence
  ENSG00000285742_0 (sequence is synthesized)
acacaattcaacatgagatttgggtgaggaaacagagccaaaccatatcagaggctttgattcctgctttgatcttttacttattattgttccgttcagtttttgtatttgttcctgatt

SEQ ID NO: 980879 - DNA, 120 bp, Artificial Sequence
  ENSG00000285742_1 (sequence is synthesized)
caatcttgaatatttcagaacttctcacatgtatggagatgaggatgatcagtttttcagcagatgtttgccgtttacttttacaaggccacagaactttcctaactaatgcaaaagcct

SEQ ID NO: 980880 - DNA, 120 bp, Artificial Sequence
  ENSG00000285742_2 (sequence is synthesized)
ggatgtcagttgaagatactgtgttctctcccttttcatctgtgtactgcagagaaggtgaactaggcccttaaacttttgttaccacttttatgtcactgttttatcttctccctagaa

SEQ ID NO: 980881 - DNA, 120 bp, Artificial Sequence
  ENSG00000285742_3 (sequence is synthesized)
aagcaaagaattttgaagcacctgttattaccctacatgcttctccttgacctcctacgtcctactattcctcagtaattacatattatttttcctttttatttttaatgtttttgattc

SEQ ID NO: 980882 - DNA, 79 bp, Artificial Sequence
  ENSG00000285742_4 (sequence is synthesized)
catctagtcacttcccttgtcctccaccccaccaaaaggccctagtgggtgatgttcccctccctgtgttcatgtgttg

SEQ ID NO: 980883 - DNA, 120 bp, Artificial Sequence
  ENSG00000285742_5 (sequence is synthesized)
ccaccccaccaaaaggccctagtgggtgatgttcccctccctgtgttcatgtgttgtcattgttcaactcccacttatgtgtgagaagatatggtgtttggctttctgttcctgtgttag

SEQ ID NO: 980884 - DNA, 76 bp, Artificial Sequence
  ENSG00000285742_6 (sequence is synthesized)
gcttccagcttcatccatgtccctgcaaattgacatgatttcattcgtttttattgctgcatagtattccatggta

SEQ ID NO: 980885 - DNA, 65 bp, Artificial Sequence
  ENSG00000285742_7 (sequence is synthesized)
atcattgttgggcatttgggttggttctacatctttgctattgtaaatataagtaattacatgtt

SEQ ID NO: 980886 - DNA, 120 bp, Artificial Sequence
  ENSG00000124915_0 (sequence is synthesized)
cctgagggttaatgggtaatgggcgtagaggccagcccaggagaaggtacagccctgtcctccccaccgtgggactctcctggcctcctgtggacccacacagcactggcatcaggccat

SEQ ID NO: 980887 - DNA, 120 bp, Artificial Sequence
  ENSG00000124915_1 (sequence is synthesized)
aagtgtggccccgggccagggcactagccgagcaggagcagggaacagtggcagaggcccccccggcccccggccccatgccaaccccctgctctgctgcaacctcgacatcaaatttct

SEQ ID NO: 980888 - DNA, 120 bp, Artificial Sequence
  ENSG00000124915_2 (sequence is synthesized)
acccagtccccacctgatgcaaagacattcgaggcagccagcgtgcttctacatccagtttatacacagctctatacaatatacagaaacctttatatacagatatatttatagaataag

SEQ ID NO: 980889 - DNA, 120 bp, Artificial Sequence
  ENSG00000124915_3 (sequence is synthesized)
agggggaggtggggcgggccccactggatgtgccagggaccaggaccaggccacgctgggccagagctgtcatggttcaggccttgcacacagaaccacagaacatgctcaacaagcccc

SEQ ID NO: 980890 - DNA, 120 bp, Artificial Sequence
  ENSG00000124915_4 (sequence is synthesized)
ctaagcttaggggcactgacctaccctggggaccagtaatcttcaagatgagaaagcggaggcacagcggtgccctgatacggccaagagaagcactgtgggtaagcaggagagctagga

SEQ ID NO: 980891 - DNA, 120 bp, Artificial Sequence
  ENSG00000124915_5 (sequence is synthesized)
acagaccccagctgccctcgctggcgaatgcacagaaccattacatcatcctaccccgagacccaaccaagaggtacccacaccccgtggcagccggggctgaaggcctggagataggag

SEQ ID NO: 980892 - DNA, 120 bp, Artificial Sequence
  ENSG00000124915_6 (sequence is synthesized)
gggctgggcagtgagcttcttcagagctgaggttcttctctgccaccccctcctgtcttgcaggtctcaaaccgcgtcaggcccctcgagagctcctatggatcaacagtgtctggggag

SEQ ID NO: 980893 - DNA, 120 bp, Artificial Sequence
  ENSG00000124915_7 (sequence is synthesized)
agccagagccccgggacagatgcagggctgcctaagaccctcagatggcccacctgatgcagagtcaaccattcaatctagtccaagcctgaactcttgggttctgggtctgtggggtgt

SEQ ID NO: 980894 - DNA, 120 bp, Artificial Sequence
  ENSG00000124915_8 (sequence is synthesized)
ccagaatcctggagtgggatgactgaggcttaggggtgcccctgcctgggctgctcagccagcaggtgtgaacaagggttcctgcctcccaagtcacagagggagagaaactgaggcacc

SEQ ID NO: 980895 - DNA, 120 bp, Artificial Sequence
  ENSG00000124915_9 (sequence is synthesized)
ggaagacctgcttctctcctccacaggactccacaggaatctggggcttgaaacttgggccttggttccctgccctgtagccctgataggttcacacatgaagggaaggttctcaatgca

SEQ ID NO: 980896 - DNA, 120 bp, Artificial Sequence
  ENSG00000124915_10 (sequence is synthesized)
ctgccaccccctcctgtcttgcagactcccttaagacaattgttattctccaccctgcccctcctccacccggggtcaggcctgcctgcggacaaagtagacacccgcctacaccacgcg

SEQ ID NO: 980897 - DNA, 120 bp, Artificial Sequence
  ENSG00000124915_11 (sequence is synthesized)
attctgagaaacggatttacattacgagtcgcctgggaccagccacagaaccagcttctctacaagcctccacatacccacggatctttcctccgtatcccacatactgcataactgacc

SEQ ID NO: 980898 - DNA, 120 bp, Artificial Sequence
  ENSG00000124915_12 (sequence is synthesized)
atcatctaagttctcaccaccatccgttgagctacacattgtccctgtcctggtcagcaagggctggaggtagaagggaagactcgtactttgtccctaacgccccaactccattgcatt

SEQ ID NO: 980899 - DNA, 120 bp, Artificial Sequence
  ENSG00000124915_13 (sequence is synthesized)
ataatcaattaagagtatagattattcaatctctagggtagccttgaagttggaaggggtggaatggagcctcctgttaaccctgtagcagctgacctggctaagggagctcaggccctg

SEQ ID NO: 980900 - DNA, 120 bp, Artificial Sequence
  ENSG00000124915_14 (sequence is synthesized)
ccatctcccctgttacactaggtcactgagcaaaggagcaactgtccccagggattttcatctctggactggaggaaagaggtggctgaaatgtcccagactcaagggctcagccaagag

SEQ ID NO: 980901 - DNA, 120 bp, Artificial Sequence
  ENSG00000124915_15 (sequence is synthesized)
ttgaggctgccatctgccaactccataatgaagttgggtcccaagcagcgctggggcagaggctggggcaggaaggtggctgggccggtgaaagtagcccaggggacttgcatacaagga

SEQ ID NO: 980902 - DNA, 120 bp, Artificial Sequence
  ENSG00000124915_16 (sequence is synthesized)
tgagtgaggggctgagatttcagccctagcccagcagacatggctgtcccctgtagccagctccacctagtccccaaggcctgccctctgtcctcagaggcctcatctataaagcacact

SEQ ID NO: 980903 - DNA, 120 bp, Artificial Sequence
  ENSG00000124915_17 (sequence is synthesized)
cagtatccctgccttacagtggaggtaaagtgccaggtcagtgatcagtaaatggtgccctctccagttccaatcagctctcagcacccatcactgtcccttgagtgggagcagggccag

SEQ ID NO: 980904 - DNA, 120 bp, Artificial Sequence
  ENSG00000124915_18 (sequence is synthesized)
aagggtcttctactccctccctgcaactcaaagtgtggccccgggccagggcactagccgagcaggagcaggctttctgttccatccagggaacagtggcagaggcccccccggcccccg

SEQ ID NO: 980905 - DNA, 120 bp, Artificial Sequence
  ENSG00000124915_19 (sequence is synthesized)
ctggggagaatggcacgtaagagagtgcatgagggtctgtggggcccggctgctcgctactgattgcatatggagtcgcccaggcccctgggaggacaggcccgcgcacttgtgctgcag

SEQ ID NO: 980906 - DNA, 120 bp, Artificial Sequence
  ENSG00000124915_20 (sequence is synthesized)
gtctggggatggagtgggggtcggtctgagccgaacggggctgaggggggtggctcagaccccccagtgtggtatggggtggaggagggagacgtgcagcaggcccatccttcaagggcg

SEQ ID NO: 980907 - DNA, 120 bp, Artificial Sequence
  ENSG00000124915_21 (sequence is synthesized)
aggtgggtaggagccaggttaggggtgggctgcccctgggtgcccaggattgagcccaagcctgccccagccccaagcctgaaacatggtgtggctgcagccttgggggtggggggtctg

SEQ ID NO: 980908 - DNA, 120 bp, Artificial Sequence
  ENSG00000285748_0 (sequence is synthesized)
cagtaacccctaagatataaaaccaggatgggctgctttttggggtccctcagctgcagtgtaagtggggcatgggcagacagcagtccctccaccccaggcatctttcctgagcctcgg

SEQ ID NO: 980909 - DNA, 120 bp, Artificial Sequence
  ENSG00000285748_1 (sequence is synthesized)
ggacctgctcattctggatcctagacatctgttgtccctcgctgcctatcttaccgggattttgttggaagtgaaaatccagacagctaaaaaagctacatttcccaatggcatttccag

SEQ ID NO: 980910 - DNA, 120 bp, Artificial Sequence
  ENSG00000285748_2 (sequence is synthesized)
ctttggctggctccaaggctgtggaaaagcagtgattttgtggccacacagcagctatgaggaaaggcgagaaaaatcaaaatgccatggctctgagatccctcagcaatgaaactaaat

SEQ ID NO: 980911 - DNA, 120 bp, Artificial Sequence
  ENSG00000285748_3 (sequence is synthesized)
ccgtgaaccacccaaatccagattcaattcatttaccttaaccactgctttgcagatttctgtttcagcctaaggtgaagaggtgctttccaccgtgattgtcagtttcctgaggcctcc

SEQ ID NO: 980912 - DNA, 82 bp, Artificial Sequence
  ENSG00000285748_4 (sequence is synthesized)
tatgagaatggaccaatacacttagtatttacaagtgagcaagtattacacttagtaattacacttagtatttacaagtggg

SEQ ID NO: 980913 - DNA, 120 bp, Artificial Sequence
  ENSG00000285748_5 (sequence is synthesized)
gtattacacttagtaattacacttagtatttacaagtggggatgctgataaggtacacatggcaggcttctcagttctgctcagaaaaagattttgtaaagaacttaactttgctttttc

SEQ ID NO: 980914 - DNA, 120 bp, Artificial Sequence
  ENSG00000285748_6 (sequence is synthesized)
tctaagtggctctacatgacttgtagatatctttataattgaaaagaaactttttctcttattttcttcattttgtggtgatatagccacaagtttacacctatgtaatcatgagtctat

SEQ ID NO: 980915 - DNA, 120 bp, Artificial Sequence
  ENSG00000285748_7 (sequence is synthesized)
tgatttttgtcatcaaccacctcaggaaaagagttgagggagcaggtcatgaaaagtgatggggaggaagatccaccaggggttccacatcacactctggtcccaaggttgctgtgggtt

SEQ ID NO: 980916 - DNA, 120 bp, Artificial Sequence
  ENSG00000285748_8 (sequence is synthesized)
ctttagagccggctctggggtttccagtcttttttcgtggacttggtcagccctttcccttgatgaggaaaagtggcatagaatggtgaaaatctcgatgttctctttgatgattttcat

SEQ ID NO: 980917 - DNA, 120 bp, Artificial Sequence
  ENSG00000285748_9 (sequence is synthesized)
ttcccttgcacaagttatcattcaatatatgtctactaaacatctatcacttttaaggtatctttgatctcattcacaaacttaattaactatctttacatacattaatctatattttaa

SEQ ID NO: 980918 - DNA, 120 bp, Artificial Sequence
  ENSG00000285748_10 (sequence is synthesized)
aaattctgtttccttttaaagtacttcaattctctgatttttaaacaagtttttcctagatactaaataatttttagaattgaataaattattcatacagatgcagtaaacctcagttct

SEQ ID NO: 980919 - DNA, 120 bp, Artificial Sequence
  ENSG00000285748_11 (sequence is synthesized)
tattatattagagtaacaatgctattactttaaaaggccaaattatttttgctttatataatttaggcatttaaacacatacatttatacagatgaaaagtcttccacatgttttttctg

SEQ ID NO: 980920 - DNA, 120 bp, Artificial Sequence
  ENSG00000285748_12 (sequence is synthesized)
aaagtcttccacatgttttttctgttctctcacaatattttgttattataatatttttaagctatatgaagaagtaaaagactcaacaactatacattttataatttaaaatacctttaa

SEQ ID NO: 980921 - DNA, 120 bp, Artificial Sequence
  ENSG00000285748_13 (sequence is synthesized)
tcattatgaactcaattctttatggattggatatttttcaattaactaaagtctttattcatctttggatgctccaactgtcaacagctcattgaatgggatttcctttgcgtgcacttt

SEQ ID NO: 980922 - DNA, 120 bp, Artificial Sequence
  ENSG00000285748_14 (sequence is synthesized)
tgatatgattccattaaccttggacacatactctgctttgtggcaccagagcatgtttcagcttggagatatggaattaccacaaacttgttcttatattatgatgtgaaatatcttttt

SEQ ID NO: 980923 - DNA, 82 bp, Artificial Sequence
  ENSG00000285748_15 (sequence is synthesized)
cgatcacttgcactcatgaatttgagacaagtctggacaacatagtgagacctcgcctctacaaaaaatacaaaaattagcc

SEQ ID NO: 980924 - DNA, 85 bp, Artificial Sequence
  ENSG00000285748_16 (sequence is synthesized)
tggcatatacttagaacaagacactgtctcaaaaaaaaaattctttcacatttaatgtgttatactattcattatcatgttacag

SEQ ID NO: 980925 - DNA, 120 bp, Artificial Sequence
  ENSG00000285748_17 (sequence is synthesized)
tgttatactattcattatcatgttacagtatttatattgtaccaatggttgctatgtatcactccaaatggttctctcaggtggtcttgtttggatgcaatagcagtcaaaatcttcaga

SEQ ID NO: 980926 - DNA, 120 bp, Artificial Sequence
  ENSG00000285748_18 (sequence is synthesized)
tttcctgaagggaaattcaggagatgatccctctctaggaatttctcatgattagcccagaacagtatatgcaaatatatgctgtagaggtttggtcaaaaatctccttttgactaacgt

SEQ ID NO: 980927 - DNA, 120 bp, Artificial Sequence
  ENSG00000285748_19 (sequence is synthesized)
gacaaatccaactttacttcacaggtctgttttttaagcattctcattttaacgacatgaatccctcttgtgaaatccaaaattttagaggctattggaaattataaatctatttctatg

SEQ ID NO: 980928 - DNA, 120 bp, Artificial Sequence
  ENSG00000285748_20 (sequence is synthesized)
ttagaggctattggaaattataaatctatttctatgacaaattttgacttccaaaaactaactgaacaattttagaaaatgtttacaaggtatacataaatactaaatgtaatattattt

SEQ ID NO: 980929 - DNA, 120 bp, Artificial Sequence
  ENSG00000285748_21 (sequence is synthesized)
ttagagttgtgttaatttacaaaattttaacttaaaccctaaagcctttcaatgacaattctaaattcctctttcatttatttaagattttgtctacatttagttaagaaatgcaaatac

SEQ ID NO: 980930 - DNA, 120 bp, Artificial Sequence
  ENSG00000285748_22 (sequence is synthesized)
ttgcagatttgatatgtcccaaatttccaaatttgtattactagtaacttttcatttccacgaagaaaaacaaaatattcttctaaagcaattaaggtaaaataataaagttttcagttt

SEQ ID NO: 980931 - DNA, 120 bp, Artificial Sequence
  ENSG00000285748_23 (sequence is synthesized)
ttataaattattctttaactaatggataggggactggggaagacattcatccctcgcaactttcttttctttttaaaaattgtttagtaattatttattattattattatcatcattatt

SEQ ID NO: 980932 - DNA, 120 bp, Artificial Sequence
  ENSG00000285748_24 (sequence is synthesized)
attattaagttccggggtacatgtgtaggatgtgcatcagcctcccacctttttaaatctgaacttttgctattggaagatttaatgctgactctttaaaaaataaagacctttttgccc

SEQ ID NO: 980933 - DNA, 120 bp, Artificial Sequence
  ENSG00000248901_0 (sequence is synthesized)
ataaaggttacaaagggaattttttattacaggtgtcctgtttcttaaagataagcagagttaaagctgggtagaaattcagctatgtcatattaccattaaactgtgtaacaaattcct

SEQ ID NO: 980934 - DNA, 120 bp, Artificial Sequence
  ENSG00000248901_1 (sequence is synthesized)
ccttttctctacatttactcctcattcttgaggggtatgaagggatgaaggtccatcttctataacttctttaagctgaatccaggtgttgatatgggacccattagagcagtgaaatct

SEQ ID NO: 980935 - DNA, 120 bp, Artificial Sequence
  ENSG00000248901_2 (sequence is synthesized)
ttcctagctagtcttgggtaggtctagttatctcctgggtataagcctagctgttcatattgctatatggcctcaacttgcttagacacaaaagaaacaaggcagtttaagaaacggggc

SEQ ID NO: 980936 - DNA, 120 bp, Artificial Sequence
  ENSG00000248901_3 (sequence is synthesized)
ccaaagatcaagagaagtaggatatcagctaaagtgcccaggaaggcacaacaggaagtgttggtgactacacacaccctaccttgttctgccaagaggtcatcaagagccggatggtta

SEQ ID NO: 980937 - DNA, 120 bp, Artificial Sequence
  ENSG00000248901_4 (sequence is synthesized)
tacgcgggcccaagctatttttagcctctgtggacagctccatagggagaatgaactattcgtcaacgtcacccatattttactgaagattttgaaggtattccaatgtgactgactact

SEQ ID NO: 980938 - DNA, 120 bp, Artificial Sequence
  ENSG00000248901_5 (sequence is synthesized)
acgtttcctcacatgtgtgctgctgtatctgagatcaccatgttttcaattatctcatatgaacctgtttctgttcagaaaaaatccttccctggtgatcctattgtggtagacataaaa

SEQ ID NO: 980939 - DNA, 120 bp, Artificial Sequence
  ENSG00000248901_6 (sequence is synthesized)
ctgtgccacccagatcccattccagggaagaatatgctgctgagctgttggaagtacaatcagtggaaaaccttggtctgtcagcaacttcaaggtttgcctcctttgcagaaatggtcc

SEQ ID NO: 980940 - DNA, 120 bp, Artificial Sequence
  ENSG00000248901_7 (sequence is synthesized)
attcaaagtcatgcccttcctatagcagtctacattcaaccactgagtgaggcagaaataaaaaagtgctgataattttcaacctacaagggcattaatgagcaatacctgctccagagc

SEQ ID NO: 980941 - DNA, 120 bp, Artificial Sequence
  ENSG00000248901_8 (sequence is synthesized)
tccacagtgggttctcagaagatgtgtcttgcctgcagcacagcttgactccttccactattcattttttcttcttttccttttacttcagaggcattaaaaatgaataaaaatcttgaa

SEQ ID NO: 980942 - DNA, 120 bp, Artificial Sequence
  ENSG00000248908_0 (sequence is synthesized)
gatgtcacaaatgacaacacgttgggaagggtttaaaatataattttggtcacattctttagctcagattgaattttataaaaacctgatcatcaatcctctaattcatcccgagatgaa

SEQ ID NO: 980943 - DNA, 120 bp, Artificial Sequence
  ENSG00000248908_1 (sequence is synthesized)
gagaggcctagacttctcttcattactctagttattcagagtttttttaaagtagccctatgagagttgcaacaagtaaattctcctggagttttcgtgataaagagggcattttttcca

SEQ ID NO: 980944 - DNA, 120 bp, Artificial Sequence
  ENSG00000248908_2 (sequence is synthesized)
caagctgaggacggcttcatagaagagcagatttgaatgaagacatacaaactgatagacatctaaaaacaatatagggaaaaaatgcaacaaagagcaaacaaataaaccacaagcgtt

SEQ ID NO: 980945 - DNA, 120 bp, Artificial Sequence
  ENSG00000248908_3 (sequence is synthesized)
cttggagctttcatggagtttctatcagccttttactttaggcaaatctctgatgaagagttcagatttcatttccgctaccacagcagttttccagagctgtgccatataccatgaggt

SEQ ID NO: 980946 - DNA, 120 bp, Artificial Sequence
  ENSG00000248908_4 (sequence is synthesized)
actcaagatgtttgcagtttcagggagacctggagatcaaaactatttccacaatgatagtaaactgatatatttgccttttttactgtgttgaaatttaaactcatggtacaaaacgag

SEQ ID NO: 980947 - DNA, 120 bp, Artificial Sequence
  ENSG00000248908_5 (sequence is synthesized)
tggtggataaaaccattgatgctttcacaccaatcaagacaagcgaaagcagaccgtactactaaactttttataacttccctctacacaatcagagggagaaaccacaacagcagcaac

SEQ ID NO: 980948 - DNA, 120 bp, Artificial Sequence
  ENSG00000248908_6 (sequence is synthesized)
ttattgccaaagcagtaaaatatgattaattttcataaacaatggcctttgagtatgagtgtatgtacttttgatattctgtgtgataaaatgtaaaattctcatgaagaacttctgctg

SEQ ID NO: 980949 - DNA, 120 bp, Artificial Sequence
  ENSG00000248908_7 (sequence is synthesized)
tctactaaagtatggtggttgatggttgtcttgaaggaaagtacatctgtgattgagtggcaagctgagccagttgatttttttccattcaacagaagttttatttcaaagattggctta

SEQ ID NO: 980950 - DNA, 120 bp, Artificial Sequence
  ENSG00000248908_8 (sequence is synthesized)
caatcttactcttgtcattcaggcttgggcatttagcagacattttctagaaaaatcaacaaagtaagcatgacacttcaaagaacataactaaaagtatttgttgggattcataaaaat

SEQ ID NO: 980951 - DNA, 120 bp, Artificial Sequence
  ENSG00000248908_9 (sequence is synthesized)
gtgaaaagtgaaattttagaaaatgtatgtcaatgactaagcttgacagccttccaactcttggagtcttttctgacaaggtcagtaattatataaatggatgctatttaaaaatatttt

SEQ ID NO: 980952 - DNA, 120 bp, Artificial Sequence
  ENSG00000248908_10 (sequence is synthesized)
ataattaaatgtgccaacatttgagagatttgcataaatcaataaaacaatattttccaattgaaaaatatacagggttataaaatcataggctgggaaaagatccagtcaaattcaaaa

SEQ ID NO: 980953 - DNA, 120 bp, Artificial Sequence
  ENSG00000248908_11 (sequence is synthesized)
tacaccaatggattttaatgtaccagatgataaaaagtttactgatacggtttcagttaacacattgcaactaacttttaatagactacactttgtggagttttggtatagtataaaaga

SEQ ID NO: 980954 - DNA, 120 bp, Artificial Sequence
  ENSG00000248908_12 (sequence is synthesized)
agaatatgcaatattacctaaatatattattgagagattgcctgccataaaaacagcatgagtttgagtgagaaaagtaattccatcagcctcctcttgttccccaaaatggctagctac

SEQ ID NO: 980955 - DNA, 120 bp, Artificial Sequence
  ENSG00000248908_13 (sequence is synthesized)
agagagtttgtcactgaagattaagcaagtttttcctcttttgaaatctccccaaatcgcttatctacccaattgcagccaaccaagtgagagagctgagtataaaggggtcaccagaga

SEQ ID NO: 980956 - DNA, 120 bp, Artificial Sequence
  ENSG00000248908_14 (sequence is synthesized)
acccccaacccacctgtccctgggatgagtgcacactgggatggagcctcgggaagtttgttcatttgcagtggggaggagcttggcccctcctcttcctgggtggaacctggaattcaa

SEQ ID NO: 980957 - DNA, 120 bp, Artificial Sequence
  ENSG00000248908_15 (sequence is synthesized)
tctgtgaggcaggacgcacacttgcaggaccctagctttgcagagagtcctgtttccctttctgtccatttttgctcaaaaattccatttttttcaaccttcaaagtgtctgcgagtcta

SEQ ID NO: 980958 - DNA, 120 bp, Artificial Sequence
  ENSG00000248908_16 (sequence is synthesized)
atatctcatggccatgtgacaagaaactggctcttagctgaactaaggaaaaagtcctacgacacaaggacacaaaaatgtacctgaagaacaattagaaagtctccaccactttcaaaa

SEQ ID NO: 980959 - DNA, 120 bp, Artificial Sequence
  ENSG00000248908_17 (sequence is synthesized)
atcccgtaagagtgttaagaaaacttgctaatcagagtctatctatctcaggacttactccttttcctctataaaaccaaaacttccttcaaatacctttgaatcctgctgaaaagagca

SEQ ID NO: 980960 - DNA, 120 bp, Artificial Sequence
  ENSG00000248908_18 (sequence is synthesized)
tggccacagatagtttcctttaaggctgcatgatcaggaataagtagcatttactaattttgtctcaaatttaattttatctttgacattattaaaataattattccttttcctactata

SEQ ID NO: 980961 - DNA, 120 bp, Artificial Sequence
  ENSG00000241886_0 (sequence is synthesized)
tttacatgcctgaacacacatagtagatcctgttgatagtttgttaattttgaaagtataagcaaagacttcttgtaatacttaaatatatcaagatatatagcctctaggtttcctata

SEQ ID NO: 980962 - DNA, 120 bp, Artificial Sequence
  ENSG00000241886_1 (sequence is synthesized)
gattcactttaagccttttatgaaatttaccctttacttaatatccaggttcagattttcaaagaatatatacagtaaatgaaaatagcaggcgtgagccaccgcgcccggccatagcct

SEQ ID NO: 980963 - DNA, 120 bp, Artificial Sequence
  ENSG00000241886_2 (sequence is synthesized)
ttaggacataattagctgggttaagagacactctggtaacttttaagcacagcaggactaacctgatgaaggcagcaacaatttaagtaagtgaacattagatatctgattcactgtgct

SEQ ID NO: 980964 - DNA, 120 bp, Artificial Sequence
  ENSG00000241886_3 (sequence is synthesized)
aactaagctaagccacaagctgtgatcagcacttttactaaaatgtagtgatgcggttcttaaatttaaataaatgtagaaaaataaggttttatatattagaattggttttataacttt

SEQ ID NO: 980965 - DNA, 120 bp, Artificial Sequence
  ENSG00000241884_0 (sequence is synthesized)
aggattcctcatgggatgacaaggccttgctccagggatgatgtttcccactgtaggagaacagctactgtctttgatgaactgagtctacagggctattgaagggtcttgctgtgctgc

SEQ ID NO: 980966 - DNA, 120 bp, Artificial Sequence
  ENSG00000241884_1 (sequence is synthesized)
actgagtctacagggctattgaagggtcttgctgtgctgcccagcctggagtgtggtggtgcgatcatggctcactgaagcctccacttacaactcctggactcaagtgatcctcccacc

SEQ ID NO: 980967 - DNA, 120 bp, Artificial Sequence
  ENSG00000241884_2 (sequence is synthesized)
acacctggcaaattttttttatcataggatctcgctacattggccaggctggtctcaaacttctggccccaagtgattttcccacctctgcctcccaaagtgctgagactacagtctggc

SEQ ID NO: 980968 - DNA, 120 bp, Artificial Sequence
  ENSG00000241884_3 (sequence is synthesized)
ccttcatgatctctagatattaccaaaagtcccagagaaatgagtgcatggatggcttaatgacaacccactttcttctctggaagaaagaacttagtacagccctaccagaaggtggga

SEQ ID NO: 980969 - DNA, 120 bp, Artificial Sequence
  ENSG00000241884_4 (sequence is synthesized)
tggcaatgccatcttcagacttgagtgttggggaggccttttctgctaaccaacagcaaatgttttacaagagaaacaggacacacagtagatgaaggcagccatggaaaatctgtatga

SEQ ID NO: 980970 - DNA, 120 bp, Artificial Sequence
  ENSG00000241884_5 (sequence is synthesized)
attatccactctgttgatctgtgcttaaaatatagaagggaaagtgaagaataaaaatgtgtccatgagcatcccacctggcttgcatccagattgaacaatttgaatgctaagagcagg

SEQ ID NO: 980971 - DNA, 120 bp, Artificial Sequence
  ENSG00000241884_6 (sequence is synthesized)
attttgatagtatggcagacattgctcattgctcagccaacccattctcccctttgtccttactaacaacatcctgattttgtgtaggcaacaatgctcccagctaaaattacctacttt

SEQ ID NO: 980972 - DNA, 120 bp, Artificial Sequence
  ENSG00000241884_7 (sequence is synthesized)
accagactcctatgcagttagaggtggcccagtaaccctggcaaataagatgcatgcaggcattactggactgagcttccaaaaacagcttttaaaaggggcaagctcaactgcatgacc

SEQ ID NO: 980973 - DNA, 120 bp, Artificial Sequence
  ENSG00000241884_8 (sequence is synthesized)
taaaaatgaaacaactgtcttgttatcatgaggtgactatcatgaagatgaaaacctccacaccaaataagtggaaagaaaagttggaaagaggtggagagaatgactcaatctttgatg

SEQ ID NO: 980974 - DNA, 120 bp, Artificial Sequence
  ENSG00000241884_9 (sequence is synthesized)
tatcagtgctgcattgcctccctcaaaatgtctcaactgttttatgcagctgagcaaattcgtgatctcaaacagcaactcaagcaactccaggaaagaaaaaaaattgaccactggagg

SEQ ID NO: 980975 - DNA, 120 bp, Artificial Sequence
  ENSG00000241884_10 (sequence is synthesized)
agatacctaagataatcctggtgatactttcggtgctacaagaaaaaaataatcctcgcacccaagaagaaacaatgaaaccttatttttcatgtaaatttctactcctgtttggttcaa

SEQ ID NO: 980976 - DNA, 120 bp, Artificial Sequence
  ENSG00000241884_11 (sequence is synthesized)
gcatttgaactgttgcataagatttttttgagtgccgctgagaaaagtattatcaatctagaatgcaccagaaagaaagcagcagaaagattacaaacagcttttctaaacccttgtcca

SEQ ID NO: 980977 - DNA, 120 bp, Artificial Sequence
  ENSG00000241884_12 (sequence is synthesized)
gcatttaccagaaagagcagcatgaattaacaaaagcagaaattttagttaaaaaaaaaaagcaactcaactctgattcctgagacatataatacaggacgtctatcgcccatttaccct

SEQ ID NO: 980978 - DNA, 120 bp, Artificial Sequence
  ENSG00000241884_13 (sequence is synthesized)
catccaactcaaatggctaccaaactctaaaattagcagggcatgtcgggaagacttcttattccttgtattacagatctgttgacgtgtcagtagcattttcctttgcaagttataaaa

SEQ ID NO: 980979 - DNA, 120 bp, Artificial Sequence
  ENSG00000241884_14 (sequence is synthesized)
tttcctttccccagtcttcaaataggcacttccccctccccaaagtctcttttgtcaccaactgccataacccaccaatcagggaaacaaatttcagttcataaaagaaaaccatgggtg

SEQ ID NO: 980980 - DNA, 120 bp, Artificial Sequence
  ENSG00000241884_15 (sequence is synthesized)
acctactgaggaccacagtttcatttccataacaaagactgacatacaacccatgcccaaagtctggaacagctatgaataactgtggctgaatagtctattttctgttgggattcatat

SEQ ID NO: 980981 - DNA, 120 bp, Artificial Sequence
  ENSG00000241884_16 (sequence is synthesized)
caaactctatatttgaacttgagatatcagaacttttgtattataatacataaaacctaggtagtgagtttgaattgtctgcatttattctccatgggtaataaaaactcattgtttctc

SEQ ID NO: 980982 - DNA, 120 bp, Artificial Sequence
  ENSG00000241882_0 (sequence is synthesized)
gaagacatagtgatttgtgaaatttgaacctgaaaaccaatagcaaagggaagaaaagcagttggagtatttgccagatgagggatgtcgcagtgctctttacaaagccagtggtgaggg

SEQ ID NO: 980983 - DNA, 120 bp, Artificial Sequence
  ENSG00000241882_1 (sequence is synthesized)
ccacgtgaaaggaaaagcctcactatatctagtctttcagtatttactcagggcaaagacagacttcagaacagatattgtctttaggagtatcgtagtgatcactgagggacacttgaa

SEQ ID NO: 980984 - DNA, 120 bp, Artificial Sequence
  ENSG00000241882_2 (sequence is synthesized)
ttttggaaaaagggaatgtgacttctgaatacagtaataaattatatccttgcctcagatggaattaaaatgactgcagacgtgaaatttccctgcttctgaaaacttaatttgatattt

SEQ ID NO: 980985 - DNA, 74 bp, Artificial Sequence
  ENSG00000241882_3 (sequence is synthesized)
cgtgaaatttccctgcttctgaaaacttaatttgatattttctcttacacaccaagcagtgattaggcaacaag

SEQ ID NO: 980986 - DNA, 120 bp, Artificial Sequence
  ENSG00000277310_0 (sequence is synthesized)
ggcttgtagatggataactgagttctacaggtagggatttgtctaggtcttaagcttgaggtaaccaaaagaggattagacttggattttcaagcctgtgtaaagcatgcactcataccc

SEQ ID NO: 980987 - DNA, 120 bp, Artificial Sequence
  ENSG00000277310_1 (sequence is synthesized)
aatggtatattagccaagtgactctcaatggaccattcatatattttctactccctagtaaatttatcttaacatattaagaaaacaaaatggttcgtaagtggttgtgcttttaaaatt

SEQ ID NO: 980988 - DNA, 120 bp, Artificial Sequence
  ENSG00000277310_2 (sequence is synthesized)
tatggatttagcaacattttacagatttcacttgtatgactgagtttttgctagttagatgaattgttaaaaatcttaaagaaacgaatgtatcctatagtaatataatttgaaaacaaa

SEQ ID NO: 980989 - DNA, 120 bp, Artificial Sequence
  ENSG00000274954_0 (sequence is synthesized)
attgtaaacaatcaaatttaatttggtgtttataaaaaattatgtatgtgaacatacattctgttatctatatgtgtctgtaatccattagcttatttacaatgatcaaagaatagaagt

SEQ ID NO: 980990 - DNA, 120 bp, Artificial Sequence
  ENSG00000274954_1 (sequence is synthesized)
tttgtgtagtcttgaatttcatttgaaacaaaattgttagtctgtatcttgaagcacattgctactttgtatttttattgatgtataattaacattcaataaaatgcacataatatccag

SEQ ID NO: 980991 - DNA, 120 bp, Artificial Sequence
  ENSG00000241042_0 (sequence is synthesized)
actcccatctagattgctgtatcagaatggactgttatgattgcaaatggcagaaacctaactcaatgcaactataacaatgagggaaatgtcttggcagctcttgaaatccatggaaga

SEQ ID NO: 980992 - DNA, 120 bp, Artificial Sequence
  ENSG00000231672_0 (sequence is synthesized)
cttcatggacacccacacagattcactggagagcaaagcctaccagagtccctgtcagcagcactgtttctagaagcttccacatgagcagacagcatggagtcctgggggctaatgaag

SEQ ID NO: 980993 - DNA, 120 bp, Artificial Sequence
  ENSG00000231672_1 (sequence is synthesized)
cagcaatgtcagcatgagcacaggcagggagaggcaagaggagcagagtaaaggggaacgttctcttcattcttccacctgcctgtcccccagccgacacgtcccttccgttccctgcaa

SEQ ID NO: 980994 - DNA, 120 bp, Artificial Sequence
  ENSG00000231672_2 (sequence is synthesized)
ggccatttccagggaggcttacgaagacagcagatgatggtgatggaaggagtctgggtgctgagctgtgccatggacctggagagaaactgagtccgagggatgtcaacatgccaagtc

SEQ ID NO: 980995 - DNA, 120 bp, Artificial Sequence
  ENSG00000231672_3 (sequence is synthesized)
catggaaatatcagtgggctggaattctagctgcctgaaagaagacattcctcacacaagacctcacaatcatatccatggaattatagcactgggctctccagatggtgctacaggaag

SEQ ID NO: 980996 - DNA, 120 bp, Artificial Sequence
  ENSG00000231672_4 (sequence is synthesized)
acctccagaaatttgacaatcctctattcaaggccctaccacagagacacacaggaacggaactcagaatcacaaacaaagaaactttgatccaagaaagaaaatgatctttaaaaagac

SEQ ID NO: 980997 - DNA, 120 bp, Artificial Sequence
  ENSG00000231672_5 (sequence is synthesized)
cctcgtttcatgctggccgatgctgagaaaatctgctctgaaggatatttggagacactgattaaaaggtagtaccatcaccacatatttaacttccccctctttttcctctgcttctag

SEQ ID NO: 980998 - DNA, 120 bp, Artificial Sequence
  ENSG00000231672_6 (sequence is synthesized)
gagtagagaaaccaacaaaaccaaccggagagagatggtttcaaacaatctgtcccccaccccaccactattcacacctttcacaagggcccagccacaaagccagtgcaacatgacatc

SEQ ID NO: 980999 - DNA, 120 bp, Artificial Sequence
  ENSG00000231672_7 (sequence is synthesized)
aatcatcagcaaagtggagatggttgtcccagtggagggggattcttcgtgttacgtagataggaagcacgatgcaaaagtgttgaagcaggagtgtaaagaataattaaaacacctgcc

SEQ ID NO: 981000 - DNA, 120 bp, Artificial Sequence
  ENSG00000231672_8 (sequence is synthesized)
caagacccaagcaaggataggatttcccagacattcgtgagggagaaaatgccatgtcctttccttctggtgtcacatcagaatctgaaggctgctagagaagggagagaaacatgaaag

SEQ ID NO: 981001 - DNA, 120 bp, Artificial Sequence
  ENSG00000231672_9 (sequence is synthesized)
tgagtcccatgctgattgttgttgaaatacctggaaagaaactggcaaagactatccaagggatgctaagacatgtccgaacttacaaaacagtagaacctgaataggaatttgaagttg

SEQ ID NO: 981002 - DNA, 120 bp, Artificial Sequence
  ENSG00000231672_10 (sequence is synthesized)
tctatactctcctcagccacaccctgccattttacagattgtcttctctggggaagttagctgtcatgttgtgaggatactcaagcagtttataaagaggttcatgtcgcaaggaatgga

SEQ ID NO: 981003 - DNA, 120 bp, Artificial Sequence
  ENSG00000231672_11 (sequence is synthesized)
ggcctcctgccaacagccatgtaaaggagccatctaggaaatagattctccagccccagtcagaccttcagatgattacagcccctaccaaccttctgactgcggtggaaggaaggttcc

SEQ ID NO: 981004 - DNA, 120 bp, Artificial Sequence
  ENSG00000231672_12 (sequence is synthesized)
ctggaagaagaaaattttacctcaagcctgcaatgtagaaattctgcttgagtttcccgcctgctggcctgccctgtggaattcggagtcaagaaggagtcttgtaagcattaactgaga

SEQ ID NO: 981005 - DNA, 120 bp, Artificial Sequence
  ENSG00000231672_13 (sequence is synthesized)
tagtatatgaagagtgcttttgcaccgagtgaaccttcaatcaactgtactagtttgtatgcctggaagagctgctatatgggatcagaaagaaaaataaggtgcatacgccagaaaaaa

SEQ ID NO: 981006 - DNA, 120 bp, Artificial Sequence
  ENSG00000231672_14 (sequence is synthesized)
aatacttgcatatgagtactaggagatgcatgacaatgttcacggcagcagtattcatggcagtgaaaaatgaaaagaactgaaatgcccattgataaaaacgtctacttatttgtgtca

SEQ ID NO: 981007 - DNA, 120 bp, Artificial Sequence
  ENSG00000231672_15 (sequence is synthesized)
tctttgcacagtggaattgtgcgagtggaaatgattgatctacagctaggagaagcagcagagctcaatctcaaaaacataacgttgtgtggaaaaagctaacctcagaacactttgcgg

SEQ ID NO: 981008 - DNA, 120 bp, Artificial Sequence
  ENSG00000231672_16 (sequence is synthesized)
ctctatcttagcaaaccaggagagaaattctcctgatggccttgaagaagcaaacagccacctggttaagcccctgtggatagtgccaagtggcaggaaagtgggagccacctctaggac

SEQ ID NO: 981009 - DNA, 120 bp, Artificial Sequence
  ENSG00000231672_17 (sequence is synthesized)
ctgaggattaaagtcagtaagagctgggacctcactcatgcagactcgaggacatgaattcgaccaacaacttgaatgagcttggaagtggattcttccctagtccagtcttcagaaatt

SEQ ID NO: 981010 - DNA, 120 bp, Artificial Sequence
  ENSG00000231672_18 (sequence is synthesized)
aagaatgttcccaaagaatgatggagacatttcaaaaggatacggaagccagattgtgggcgcttctactggccaactctgggacatcgtggacatcaaaataaatttgtaataataaag

SEQ ID NO: 981011 - DNA, 120 bp, Artificial Sequence
  ENSG00000231672_19 (sequence is synthesized)
gattatagcctattagttaaatcagaaaaatctgatttaactaaatgagtaggaggaaaagaaagctcttccttatattagaaagtcaattaataaatgcagaaaggaatgaaaaaatta

SEQ ID NO: 981012 - DNA, 120 bp, Artificial Sequence
  ENSG00000231672_20 (sequence is synthesized)
gaaaagccaccatttggcaaccatggcaggcagaatggggagtatgcctccagacagtaattcctttcaaactggtttataggaactcactgagcttgctgatcgacctctgagaggcaa

SEQ ID NO: 981013 - DNA, 120 bp, Artificial Sequence
  ENSG00000231672_21 (sequence is synthesized)
agtttctgaattatgaagtactgattatataaacttagacagagacatgcttcattatttaataggactgtgtcaaaagcctactattaggatgatgtgttgggtgtggaacagggtctc

SEQ ID NO: 981014 - DNA, 120 bp, Artificial Sequence
  ENSG00000231672_22 (sequence is synthesized)
ttcctgccaggaacactggtgatttcactccgtgttcaggctgatctttgaagttgaagacaagcagaagaatccttctaaaatttagccatgcccataggctgggagggacactgctcc

SEQ ID NO: 981015 - DNA, 120 bp, Artificial Sequence
  ENSG00000231672_23 (sequence is synthesized)
attcagaggcagcaaagcacattactgtatctcctatagagctttgagcagtccagtgtacatggagaaacttagtaaatgttgttgaattagtgaatgaacaaatcaatggaccaagtc

SEQ ID NO: 981016 - DNA, 120 bp, Artificial Sequence
  ENSG00000231672_24 (sequence is synthesized)
aggggtaagtcttacatttgtcatctaggtgattaagaaaggaaaaagtatctgtttcaagaggattacaatctaactgtactccaatagtaaaatttactcttttggaatctgaagaca

SEQ ID NO: 981017 - DNA, 120 bp, Artificial Sequence
  ENSG00000231672_25 (sequence is synthesized)
atatgtgtccaggtgcctacgcaggtgcctgaccctgggcaagtcgctccgtcatgcggacctcagttttctcatctgtccgacgaaggaatccgggcagaacatgaattctcagaactg

SEQ ID NO: 981018 - DNA, 120 bp, Artificial Sequence
  ENSG00000231672_26 (sequence is synthesized)
gtgggactttccaaccagttgcttctcatgcagaggcagaaaaatgaggggatcaacagcccaggcctcaggggcacccttcttggcccttacagtcctggatcaagaatctgtcattca

SEQ ID NO: 981019 - DNA, 120 bp, Artificial Sequence
  ENSG00000231672_27 (sequence is synthesized)
gggtgaagatgcctctgctactcctagatccttgagccactccctggccaactgtatgatctctgaaaatggattggtttccagattgacagccttggaaactggactcctctgtttttc

SEQ ID NO: 981020 - DNA, 120 bp, Artificial Sequence
  ENSG00000231672_28 (sequence is synthesized)
ctgcaaacaggtatcgcctgtgagctgcaggtggaggcagaacatggtgttcaagcccaactcctgattctccacggcttggggtaggtgtgggagggtgagggaacattgggaatgcca

SEQ ID NO: 981021 - DNA, 120 bp, Artificial Sequence
  ENSG00000231672_29 (sequence is synthesized)
gtgggacaatgtgttaaacataactaatacatgtgattagggaagctcttaataagaggctaacagttgagcagagaccggaatgaaaaaggggaatgagccaggtaaatatatgtatga

SEQ ID NO: 981022 - DNA, 120 bp, Artificial Sequence
  ENSG00000231672_30 (sequence is synthesized)
agaatgcttgaagtagaggggatagaactggtataggtcctgtggttagaacaagcttcatatttttcaagggaaattgcaggacttggaaatgggcaagagatacctaagtatccattc

SEQ ID NO: 981023 - DNA, 120 bp, Artificial Sequence
  ENSG00000231672_31 (sequence is synthesized)
gaaagccctatcttccacctgctttggaggctggagtgatgtggctaatgtagaaaagagatgaggactggaaatatacagcccagtgtgaccactgtagcctcatggctgcagacagca

SEQ ID NO: 981024 - DNA, 120 bp, Artificial Sequence
  ENSG00000231672_32 (sequence is synthesized)
ggagatcagatggaggatggggtgaatgaggcaattgttttccaacatctcaagttgaaattatgaccctggtgagaaccatatatgtactcatactttatgggtacaatgatactttta

SEQ ID NO: 981025 - DNA, 120 bp, Artificial Sequence
  ENSG00000231672_33 (sequence is synthesized)
tttattttaatgagattttctttttctctccttctctcaaaacatttgactaagtttgtataaagaagtagggttaatttattttgagtgaggacaaggaatccagcataatattttttg

SEQ ID NO: 981026 - DNA, 120 bp, Artificial Sequence
  ENSG00000231672_34 (sequence is synthesized)
aacctttgaagggccatgtcatatttcttttcaccctatgcattctcttggtttcaagcaccgctggcatgtgtgttagtcctgagtccacattcctcttgtgggtaccactggttggat

SEQ ID NO: 981027 - DNA, 120 bp, Artificial Sequence
  ENSG00000231672_35 (sequence is synthesized)
agccatcttcacctccttctcccacagtaatctcaaactcaaaataatttttctgtcttgggctgagttttccagaaagtggagcctgggacaaagacttatgtattgtcttagtcacag

SEQ ID NO: 981028 - DNA, 86 bp, Artificial Sequence
  ENSG00000231672_36 (sequence is synthesized)
caaaatctattgtaaggaattggtgcatacaattatagagactggcaagtccagaatctgtaggatgggtcagcaggctgaaggcc

SEQ ID NO: 981029 - DNA, 120 bp, Artificial Sequence
  ENSG00000231672_37 (sequence is synthesized)
aagtccagaatctgtaggatgggtcagcaggctgaaggcccaagcagagttgatgttgcagcttaagtctgactgccatctgctgtcaaattcgcttttgcttgaggaagggcagtcttt

SEQ ID NO: 981030 - DNA, 120 bp, Artificial Sequence
  ENSG00000231672_38 (sequence is synthesized)
tattatatttagtccttcaaccaattagatgaggcccacccacattatggagggcaatctgttttgcccaaatccgctggctttactgtgaatcttatttaagaaatgccttcacagaaa

SEQ ID NO: 981031 - DNA, 120 bp, Artificial Sequence
  ENSG00000231672_39 (sequence is synthesized)
catccaggataatgtttgaccacatgtctgggtaccatgacccagccaagttgacacataatattaaccttcatatatgtgaatatcttatgtaggaaagtgatctcaaggagaagtgag

SEQ ID NO: 981032 - DNA, 120 bp, Artificial Sequence
  ENSG00000231672_40 (sequence is synthesized)
ggaaaaggagcatgaaacaaggaagtggggagatccaaaacaatgaggaattcccaggttggtcatgggaaactggctgattcagaggctgggtggaggaggcatttttttccatcagat

SEQ ID NO: 981033 - DNA, 120 bp, Artificial Sequence
  ENSG00000231672_41 (sequence is synthesized)
ctcagcctctactggttaccttgaaagcagaaatcatatccagtcatctcttcacatgcacatcacagaagtctcagcttgaaccaaaataggtgctcaggaggatatttgcagatgcgg

SEQ ID NO: 981034 - DNA, 120 bp, Artificial Sequence
  ENSG00000231672_42 (sequence is synthesized)
tgcagaagggactatgcttggaccattcatggaaggacctcctacctgataccctgatgcagaaggctggggaatgatcacattatgtcctctggttgagtttcagaacaggagagaaac

SEQ ID NO: 981035 - DNA, 120 bp, Artificial Sequence
  ENSG00000231672_43 (sequence is synthesized)
agagcccagcgtgcgcggccttgcgtgcgtgcacacgcatatgtgtccaggtgcctacgcaggtgcctgaccctgggcaagtcgctccgtcatgcggacctcagttttctcatctgtccg

SEQ ID NO: 981036 - DNA, 120 bp, Artificial Sequence
  ENSG00000231672_44 (sequence is synthesized)
acgaagcatgattttctggtcagactgcatcagctccctcttctccaccaggacagtagggatctacagcccaagaaccaaagactttggacattttgttctacttgggaagtttgtaat

SEQ ID NO: 981037 - DNA, 120 bp, Artificial Sequence
  ENSG00000231672_45 (sequence is synthesized)
gttatcttctgctgtggagcatagtgcaaagaaatagggggaagaaaggtgggtttcttctgtctccaccccaaagaccaaggatactttcttccctgagggttgcctctgcattgcaag

SEQ ID NO: 981038 - DNA, 120 bp, Artificial Sequence
  ENSG00000231672_46 (sequence is synthesized)
ttttttctgacccttcactacacagatggacaactcaggtggccagaggacttcaactgaatggaattacacaatgatttgttgaacatgtattgtgcaccagggagtatgtgaggctat

SEQ ID NO: 981039 - DNA, 120 bp, Artificial Sequence
  ENSG00000231672_47 (sequence is synthesized)
gtggtaggcatgagatgaacaatggaagattcttgccccatggaaggtgaccactggaattagaaatcctagcatcacctaaggaaaggctcagatcttccctggtggaggttggggatc

SEQ ID NO: 981040 - DNA, 120 bp, Artificial Sequence
  ENSG00000231672_48 (sequence is synthesized)
ttcccgaagggaccttttggacccagagctcttgtatcattgcctcttggcaagaggtttagagactcccttcatcatgaagtttcacagactccttcagcctttatctttcctgagttc

SEQ ID NO: 981041 - DNA, 120 bp, Artificial Sequence
  ENSG00000231672_49 (sequence is synthesized)
tatggggaaaagctaggttagatatgtggagtgactcaccgagacctgagaaggcatctgcatgaggctgcgggggtgtccttagagaaaagggaagctgcagtgtggaggctgggggat

SEQ ID NO: 981042 - DNA, 120 bp, Artificial Sequence
  ENSG00000231672_50 (sequence is synthesized)
gcacaagatgatctccagagtctctcagccttcagaagcgcaggctctctgaggccacattccttcctggtctggctcagtggaggctgtgtttccccactgttgctttttgcatggatt

SEQ ID NO: 981043 - DNA, 120 bp, Artificial Sequence
  ENSG00000231672_51 (sequence is synthesized)
ccccacacaaagggtatggaatcatattctcctctacctcatcaaacttctcggaaagctcaaatggagagggatggtgagcagtggctgaggagtagcagctcccaggaagagcactct

SEQ ID NO: 981044 - DNA, 120 bp, Artificial Sequence
  ENSG00000231672_52 (sequence is synthesized)
tggtgttgcgatctttgaatgacgtcttgggctccatggcgcagctggacagacagatgtgtacagatggacggccgcagcggtgcagctgcaatgcccagcggaagcagcaatgttcag

SEQ ID NO: 981045 - DNA, 120 bp, Artificial Sequence
  ENSG00000231672_53 (sequence is synthesized)
cacttcagaagtagcactgccttacctgggtggcactggtggcctctggggcgaagccgctgggcctcctgcaacagtgataaagtctccagcaacctgtggggaaaggccttgcagaag

SEQ ID NO: 981046 - DNA, 120 bp, Artificial Sequence
  ENSG00000231672_54 (sequence is synthesized)
acactctggaaacagaacaattcaggaggccggccagcagtgagaggtcccgcatccactgaggtgaacaacagtgccgtgggatgttaatgtgggtaagtctcatccaatcctttgaag

SEQ ID NO: 981047 - DNA, 120 bp, Artificial Sequence
  ENSG00000231671_0 (sequence is synthesized)
cccacgtgaatcattcaagagttaaacaagagaaatggttcctgtcagtgcaggtgatgaaagagatcattacaacataactgaaggtcaagacaaggataaataccagcaaaatcatgt

SEQ ID NO: 981048 - DNA, 71 bp, Artificial Sequence
  ENSG00000231671_1 (sequence is synthesized)
ctgaaggtcaagacaaggataaataccagcaaaatcatgtaagaatgatgctatcagggaagaggtttaat

SEQ ID NO: 981049 - DNA, 120 bp, Artificial Sequence
  ENSG00000231671_2 (sequence is synthesized)
aagaggatgtctgattcttagtaagccctcaataagcagtagctcctctatgatttcttcatattcttatttccagcagtatgatatgtatgatatgccagttgacccactgaacaggca

SEQ ID NO: 981050 - DNA, 120 bp, Artificial Sequence
  ENSG00000231671_3 (sequence is synthesized)
tcagaggaacactatcacagaaaaagattaaaaagaactttgggacttaaaaggcagaaggagaaaaactattctctggatagtgctggtgaaaagtgagcagacagtgagatatcattg

SEQ ID NO: 981051 - DNA, 120 bp, Artificial Sequence
  ENSG00000231671_4 (sequence is synthesized)
gagcttgtcttctgcatgtttggttgtaactcctgtcttcattcataatgcctcacatctcctcctgacacatggccgggactctgtttgtgatgaatgtttgtacacatggaggaggga

SEQ ID NO: 981052 - DNA, 120 bp, Artificial Sequence
  ENSG00000231671_5 (sequence is synthesized)
ggtacatatgctgtacatgcttagaggtagatacttacagggagcagaagaagtgtgggtggtcagccaaaatgaggaaaatacttctgaaacttaaaacagaccatgaaatcaaataaa

SEQ ID NO: 981053 - DNA, 120 bp, Artificial Sequence
  ENSG00000231671_6 (sequence is synthesized)
acttttaatgttatcttctgttggaaatacccttcctgtgaagttcccctgcttgccagtgagatttggagaactgactgtggcttatgtgtgctttaatcttcagtgccttgcatagtg

SEQ ID NO: 981054 - DNA, 120 bp, Artificial Sequence
  ENSG00000231671_7 (sequence is synthesized)
atcatattggaagaaacatgggatattaatacattggctgcatgtacagagggaagatgatgtgaagacacggagagaagatggccatctacatgctaaggagagaggcctggcctggaa

SEQ ID NO: 981055 - DNA, 120 bp, Artificial Sequence
  ENSG00000231674_0 (sequence is synthesized)
aacactcgggccaagtaaacttgagaggtttaatacgtgcatgtattaagtgctgcaagacttcaaggaagctttcaagccaatgaactctaaattgtatggaaaggaaaatgcaggaaa

SEQ ID NO: 981056 - DNA, 120 bp, Artificial Sequence
  ENSG00000231674_1 (sequence is synthesized)
gtatggaaaggaaaatgcaggaaatgggatctcactccatcactcaggctggagtacagtgctgagatcaaggctcactgcagccttgaacacctggactcaagtgattctcctgcctca

SEQ ID NO: 981057 - DNA, 64 bp, Artificial Sequence
  ENSG00000231674_2 (sequence is synthesized)
atctcagttcactgtactaaagggagccagctttcaacaagtctgctggagtttgctaggggtc

SEQ ID NO: 981058 - DNA, 120 bp, Artificial Sequence
  ENSG00000231674_3 (sequence is synthesized)
cactccagaccctgtttgcctgggtatcgccagtggaggctgcagaacagcaaaaattgctgcctgttcctttctctggaagcttcgtcacagaggggcacctgccagatgccagccgga

SEQ ID NO: 981059 - DNA, 120 bp, Artificial Sequence
  ENSG00000231674_4 (sequence is synthesized)
agcttcgtcacagaggggcacctgccagatgccagccggagctctgctgcgagctgcaaaccagagctgttcctattcaaccatcttgcccacctagcaagacaggccaagattcaaatt

SEQ ID NO: 981060 - DNA, 84 bp, Artificial Sequence
  ENSG00000231674_5 (sequence is synthesized)
ccatcttgcccacctagcaagacaggccaagattcaaattcaaaaattacagagaataccacaaagataatgattcacaaagat

SEQ ID NO: 981061 - DNA, 66 bp, Artificial Sequence
  ENSG00000231674_6 (sequence is synthesized)
taaagggaagcccatcagactgacagcagatctctctacagaaaccctacaagccagaagagactg

SEQ ID NO: 981062 - DNA, 120 bp, Artificial Sequence
  ENSG00000231674_7 (sequence is synthesized)
cccaacatttcgtatccacccaaactaagcttgaaccaggttttctctctggttgtagtacactcttgctgtctgtctttcttgccttctttctgcacattttccttttaggaaatcaag

SEQ ID NO: 981063 - DNA, 120 bp, Artificial Sequence
  ENSG00000231674_8 (sequence is synthesized)
gctctaaccctcctcccttacaagcatgtgtacctatcaaaagaaaacttagaaatttgaatcttgagtttacatttaagtcatagcacggagaggattgagaatgtggcacaatggaat

SEQ ID NO: 981064 - DNA, 120 bp, Artificial Sequence
  ENSG00000231674_9 (sequence is synthesized)
tctcatccctactatttctaaatcactcagcaaactgaagctaggtctctttgcatggtttccagaggcgtcatgatggaatggatacagaaaatggacaaaatactcaaaatttatgtc

SEQ ID NO: 981065 - DNA, 120 bp, Artificial Sequence
  ENSG00000231674_10 (sequence is synthesized)
ttggttctcaccactcactcatggttgagactcattgtctacctgtgcagatacggcattgatggaggctggtgtgtaagtgaaaaagccacaaataatgatacttccctgttgagttct

SEQ ID NO: 981066 - DNA, 120 bp, Artificial Sequence
  ENSG00000231674_11 (sequence is synthesized)
attaatacacagtcaatctgtaagttattcagtaacaccactgagggagcaaaaatgtagctgagacaagagcttttatgcctcccactaagctgcactttcaagggggcaaggtaaccc

SEQ ID NO: 981067 - DNA, 120 bp, Artificial Sequence
  ENSG00000231674_12 (sequence is synthesized)
tgaaggtggagtaggaaattagacattttaactgaggaaccatgcagattgtgcccaagagtcagagaagtacattttctgctaataaagaaatggagacaatgaattagggaaaacaac

SEQ ID NO: 981068 - DNA, 120 bp, Artificial Sequence
  ENSG00000231674_13 (sequence is synthesized)
tgtgatcctgggagctaataaaatcacagactgccagtgctaagacaacatcccacatctttcaacagcctctaaattcatcagcaggaggccacaccaggtacacaggatgagcaaagc

SEQ ID NO: 981069 - DNA, 120 bp, Artificial Sequence
  ENSG00000231674_14 (sequence is synthesized)
cagagacttacactcagaaaatgaactgtgaccacattttcttcttgaaattagatgccatattagggagtaagaaaagttagggagaaacaaccctgataagaacttgaattttaaatg

SEQ ID NO: 981070 - DNA, 120 bp, Artificial Sequence
  ENSG00000231674_15 (sequence is synthesized)
gtttgaatactaatacaaaagagattaagttaaacatttttttaaacaatgattttcactttgtcttatctttcttataggttggtggcctctgatgaaggtattccaaatatagacatt

SEQ ID NO: 981071 - DNA, 120 bp, Artificial Sequence
  ENSG00000231678_0 (sequence is synthesized)
tttgcctgtgccttgcctacctgcgtgtgcatccactgtcatctggaccattcctcccccagaatcttccataatctttataggcctggctggattcatctctgacccttctctgccacc

SEQ ID NO: 981072 - DNA, 120 bp, Artificial Sequence
  ENSG00000231678_1 (sequence is synthesized)
tcttaaatacgaccagctagtgggacagatgttgagtcactgtctgggaaaatagggcctaggggcatctgtgaaagttcatcacgtttcagtggggctttctgctggctttcacagaag

SEQ ID NO: 981073 - DNA, 120 bp, Artificial Sequence
  ENSG00000231678_2 (sequence is synthesized)
aatgcaccaatagtgcaggcccagccacagatcagaaccacagagagcctggaaaagtgtcagtttcatatggttcaatctaatatttgaagcatttgcattaaagtcaacagcaagatc

SEQ ID NO: 981074 - DNA, 120 bp, Artificial Sequence
  ENSG00000237638_0 (sequence is synthesized)
aggacttctccagctccatttacagtctggctcctgggcctttggatcccagcagtgtccgagcaggagctcaaaggacagccccaccatgggggatcagccctagaagctgtcactaca

SEQ ID NO: 981075 - DNA, 120 bp, Artificial Sequence
  ENSG00000237638_1 (sequence is synthesized)
tctccaacggacgcaactattttccaggaacaccgggggagagagccaacaacagcacagtggccccggaccgtgacccttggactgaaggaacctacagatgtggttttttttggtgac

SEQ ID NO: 981076 - DNA, 120 bp, Artificial Sequence
  ENSG00000237638_2 (sequence is synthesized)
attttacatgcaactccagatttcaaactcttttggagaagcaggcaatctggcaacagtcgttttggattctcagaaggcaataaagaacagctgccaccttccgaggggcacggtgga

SEQ ID NO: 981077 - DNA, 120 bp, Artificial Sequence
  ENSG00000237638_3 (sequence is synthesized)
tgccctgttctgccagaattgccaacacgtttatcgtcttagacttgcccaaggtgtcgcagttagagactgcctcccttattcacgctcctgcctggtgcccgtgggcttgaatttgct

SEQ ID NO: 981078 - DNA, 120 bp, Artificial Sequence
  ENSG00000237638_4 (sequence is synthesized)
ccccttggagtggggtgaggctctgcagacacttctcatacacctcccctgcagacagcaagctcctggaacacaagtcacatgcatttcatttcctgctctcttgctaccacccaacat

SEQ ID NO: 981079 - DNA, 120 bp, Artificial Sequence
  ENSG00000237638_5 (sequence is synthesized)
gggctctcaatacatgttgaaagcaaggatcaatgaataaatgggcaactatcagctgtagacttgtatgtgccaggtatggtgctaggcatgctaggcaccaaaagggccacagaggtg

SEQ ID NO: 981080 - DNA, 120 bp, Artificial Sequence
  ENSG00000237638_6 (sequence is synthesized)
ttacatgccaggatatcagggagttcatgacatagtgagggaaagaaaaagcttatgcagtgtgtgtgtgaaactttaagcaaacatggtgcataacaataacaggaatgactttgcctg

SEQ ID NO: 981081 - DNA, 120 bp, Artificial Sequence
  ENSG00000237638_7 (sequence is synthesized)
cccctgatgaaacttcagcagggctatgccctgtcttgccacctttaggaaacagcagtcttatagtcctttgcccctctgagttacaaccactgtctcctttcaggagaatgcccagtg

SEQ ID NO: 981082 - DNA, 120 bp, Artificial Sequence
  ENSG00000237638_8 (sequence is synthesized)
ttatatcataatcaaggctttgaacttgatgtggcattacatgttcttccatctccccagccacctgagaagggagatggggtagcttttctctctcactctctctcccccaacccctcc

SEQ ID NO: 981083 - DNA, 120 bp, Artificial Sequence
  ENSG00000237638_9 (sequence is synthesized)
ttttcccaccggcaggtgaatgagcttcctgcccataggagaaagggtaaaatcacaaggtggtgcccttgtctccaaatctcaaggtcctctggatggcaggtgagtaaaggtgactct

SEQ ID NO: 981084 - DNA, 120 bp, Artificial Sequence
  ENSG00000237638_10 (sequence is synthesized)
tgtgattatgggtgttttgggtgttcctcagagatcccccaaactggggtcttgtccaccattcccaggactctgccatgtggagccatgggaatgtgaagttcacctcacacttccttt

SEQ ID NO: 981085 - DNA, 120 bp, Artificial Sequence
  ENSG00000237638_11 (sequence is synthesized)
cagctgaggtcaccacacagcccctaccagcccggctatattgggtgggatttcagatgcccccacaatggctgccttggagactttccactggtcctcaagaagcaacaacgctcccct

SEQ ID NO: 981086 - DNA, 120 bp, Artificial Sequence
  ENSG00000237638_12 (sequence is synthesized)
ccaggctgcttccactgtctcagaaactggtccccggattcccccagttacagagaaccctcatcaagctctcaagtggccactgaaacccaggctctctaggctctggagtatggaagt

SEQ ID NO: 981087 - DNA, 120 bp, Artificial Sequence
  ENSG00000237638_13 (sequence is synthesized)
gacagctccatttaatttctcctttcctcttgtaggcttacagcatagcactctcccaagaaatcatccaaaaattacctcaaccattctatagaccccaagctgaccaggggagggagg

SEQ ID NO: 981088 - DNA, 120 bp, Artificial Sequence
  ENSG00000237638_14 (sequence is synthesized)
accaagaatcttgaaacgtaaatactacatttgatggtctccttcagacttattttgggatctgatatctctttaacaaaaattataaaaattgaggcaaagagagccccattttttata

SEQ ID NO: 981089 - DNA, 120 bp, Artificial Sequence
  ENSG00000237638_15 (sequence is synthesized)
tactgttctaataaataacaggtacccttagaagaatgcagacaaacactcctatggaaatttaaaggagcataagacttcttgcagtatagggagagaaccaaggaagacttcctggag

SEQ ID NO: 981090 - DNA, 120 bp, Artificial Sequence
  ENSG00000237638_16 (sequence is synthesized)
gaaatggccattgaactgggccttggacatgtggaggtgagggatgagagtattccagatgaagagtccagcatagggaaggcccacaggaaggaattgtgctgtattaatgctgtctta

SEQ ID NO: 981091 - DNA, 120 bp, Artificial Sequence
  ENSG00000237638_17 (sequence is synthesized)
gaggcatttccattgccagacacagatactcaaattacttcagagagagagagagagagtattgaaagggtttctgtgaatacctccacaactgtggttctcaaagtgtaatccctgggc

SEQ ID NO: 981092 - DNA, 90 bp, Artificial Sequence
  ENSG00000237638_18 (sequence is synthesized)
tacctccacaactgtggttctcaaagtgtaatccctgggccagcagcatcggcatcacctgggaacttgttagaaatgcagattccccct

SEQ ID NO: 981093 - DNA, 77 bp, Artificial Sequence
  ENSG00000237638_19 (sequence is synthesized)
accgaagaaagaagagagagagagagggagaaagaaagaaaggagaaagagagaaagaaagaaaaagaaagaaagaa

SEQ ID NO: 981094 - DNA, 120 bp, Artificial Sequence
  ENSG00000237638_20 (sequence is synthesized)
agaaagaaagaaaagaaaagaaaaaagaaaggaaaagaaaaggcaaattcaccagagcctttgaatcagaaaagaacccccaggggctggtggtagcagtccttgcacaggccctccagg

SEQ ID NO: 981095 - DNA, 120 bp, Artificial Sequence
  ENSG00000237638_21 (sequence is synthesized)
gtagcagtccttgcacaggccctccaggtgattctcatccagggaagcctgcgagcccttgaggtggaatattctcaggaatccctgagatatgtgaagaactgatggcataggctattt

SEQ ID NO: 981096 - DNA, 120 bp, Artificial Sequence
  ENSG00000237638_22 (sequence is synthesized)
ctagggaggaaatggggctgctgggtgcacagatgaggggaggtgggagacctctgtaattgtgtaccatgtgcatatattacctattcagagaataataaaacaatgcgtttaatcccc

SEQ ID NO: 981097 - DNA, 120 bp, Artificial Sequence
  ENSG00000237638_23 (sequence is synthesized)
atggggaagaggctcacatgtgaggaactgagggaggcctccagaaaacagccagtgaagaactgagaccctcagtccaatagcctatgaggaactgaatcctgctgacaaccatatgaa

SEQ ID NO: 981098 - DNA, 120 bp, Artificial Sequence
  ENSG00000237638_24 (sequence is synthesized)
tgagcttggaagcagatccttccccagtgaagccttcatgtgagactgcagcccacttgacactttgatttgtagcttgtgacagaccccaagccagaagagtcaggaaatccaagctaa

SEQ ID NO: 981099 - DNA, 120 bp, Artificial Sequence
  ENSG00000237638_25 (sequence is synthesized)
ttcctgtgccaaaggctggcttaagagagggcccacaatgcaattctggcctgtcttcctctgctggatgtcaccttatttgaactggacacttagaaccatgacagccatctgtgtcta

SEQ ID NO: 981100 - DNA, 120 bp, Artificial Sequence
  ENSG00000237638_26 (sequence is synthesized)
tgagggagtgagccagagaaccaagctgacatgttgaatatggacttctttaagggcatgatggcaaacatcctcattgtaattcctttggatggatcattttgtgtcaggaattggtgg

SEQ ID NO: 981101 - DNA, 120 bp, Artificial Sequence
  ENSG00000237638_27 (sequence is synthesized)
cttcaagaatgaagccgcggaccctcgtggaatgggattggcagcaaacaactgtatacctgactaacagtggcctgaacaaataacgacataattttctcaccttatgagaaggctgga

SEQ ID NO: 981102 - DNA, 120 bp, Artificial Sequence
  ENSG00000237638_28 (sequence is synthesized)
aacagacggcatgagcgtaaaatgaacctttattgtaagtcagtgaggctggcgggggcatgttaatgactgtggcatgcccttgactgattatattcttcactgacatgctgcctagca

SEQ ID NO: 981103 - DNA, 120 bp, Artificial Sequence
  ENSG00000237638_29 (sequence is synthesized)
tgcagaggccatgcgacccttggggaggctcctacttgccttggaaaagtagctcctcctcttctcaaatgtaataatggaaaccttacatgggtggatccaggggtaaagctctttgtg

SEQ ID NO: 981104 - DNA, 120 bp, Artificial Sequence
  ENSG00000237638_30 (sequence is synthesized)
gtgtatagcaacagaatgttaagtcaaagtggttgtcaacaaagtttatcgaacagcagctatattttttataatgaacactggtttgcctggaaccttgaagtaaccatgaatttttcc

SEQ ID NO: 981105 - DNA, 120 bp, Artificial Sequence
  ENSG00000237638_31 (sequence is synthesized)
tagaccctaatactatcagaaagaaacaaatcacccaacaataagatcagtaactaaaaccaacaaatcccaaaggcatctcacagtgctggcatatgtctctgccatagctcatgctca

SEQ ID NO: 981106 - DNA, 120 bp, Artificial Sequence
  ENSG00000237638_32 (sequence is synthesized)
taaactgcaatgagccaaccctggcatcatgaaggaccccgattttaaaaatgggtaaagaagttctgaaagcctgggcaacatagtgagaccattctcttaaaaaaaaaaaattagcga

SEQ ID NO: 981107 - DNA, 72 bp, Artificial Sequence
  ENSG00000237638_33 (sequence is synthesized)
acatagtgagaccattctcttaaaaaaaaaaaattagcgaggcatggttggtcatgcatctgtagagtcaag

SEQ ID NO: 981108 - DNA, 120 bp, Artificial Sequence
  ENSG00000237638_34 (sequence is synthesized)
agcttcgcctgcgagctgggttgtgtaaaggctggtcattttggggcgcttaggggtgggtgccggggggcgcgctttccctcgtgaaggtcgctccaggagtcatgcgtacattcgttc

SEQ ID NO: 981109 - DNA, 120 bp, Artificial Sequence
  ENSG00000237638_35 (sequence is synthesized)
attttgctctggacgcactgatgttcccggctcgccgccgtgccgcagtcacgaggctctccgaacgcctttcactgtgtttctgtttacattcgcgtctgcaagacccggcggcgcgac

SEQ ID NO: 981110 - DNA, 120 bp, Artificial Sequence
  ENSG00000237638_36 (sequence is synthesized)
catccttcaatgcctctcacttgccaggagactgcagagatgcgtttatccagagtcaagtctaacaggtataaatttgcttcacaacattcagggcaaaaaaacattccagtccatctc

SEQ ID NO: 981111 - DNA, 120 bp, Artificial Sequence
  ENSG00000237638_37 (sequence is synthesized)
tgagcttaacatgtctggtcctattacacttttaaaaagtaaaaagagaagaaaacaaacaaacaaaatccaacacttggaaacttgcttggcatccagtgtactcattcctggttcatg

SEQ ID NO: 981112 - DNA, 120 bp, Artificial Sequence
  ENSG00000237638_38 (sequence is synthesized)
gagcagtcagaaaacacatatcatctgtgaatcccttctcaggcacaactaaagccagagtgtgagttacaacagtctagcttcccaaaggctcttccgcatctcggacccagcagcagc

SEQ ID NO: 981113 - DNA, 120 bp, Artificial Sequence
  ENSG00000237638_39 (sequence is synthesized)
tcatctctctgccagagcaatctgattgacaatcatcaatcaggaaggacttcagaggtctcgtggcccctttactacagagacttgccacagccacctagccggcgagtgacggcctgg

SEQ ID NO: 981114 - DNA, 120 bp, Artificial Sequence
  ENSG00000237638_40 (sequence is synthesized)
accctccccatttgccaggtctaaggacatttattagaaaggacactgctcaccactggccctggacacctctgagaccactgggcctgtcacgtggggggtgtgagtggggaaacccag

SEQ ID NO: 981115 - DNA, 120 bp, Artificial Sequence
  ENSG00000237638_41 (sequence is synthesized)
ctgtcctgaactttctctggctctttcttcagcatttcatgagcttttatgatgaagcctctgtgtatgtttgtgtgagcagcagaaaaggtgcagaaagacgtttgttaaactgttagc

SEQ ID NO: 981116 - DNA, 120 bp, Artificial Sequence
  ENSG00000237638_42 (sequence is synthesized)
agtggttacctggggcagtgggattacagtcaggcagatggagatgattaacttttccttactatctctgtgttgcttgaacttgttataaccagcatgtattacacatgaaactttaaa

SEQ ID NO: 981117 - DNA, 120 bp, Artificial Sequence
  ENSG00000237638_43 (sequence is synthesized)
gaatccaataaaattagaaagcaagtcgcaaaaggagacacacagtatgatatcatgcccataaaatccgaaatccaaaactcccataaacaatatgttgtgttgtttatggggtatcct

SEQ ID NO: 981118 - DNA, 120 bp, Artificial Sequence
  ENSG00000237638_44 (sequence is synthesized)
atgtattgtttacggggtctaaacctaggggcctagtaaaaagcctaaagcctgctggaagacgccacactggatgggaagagctcatagagaaaggaggtggagtgatgttgaggaagg

SEQ ID NO: 981119 - DNA, 120 bp, Artificial Sequence
  ENSG00000237638_45 (sequence is synthesized)
caacttcaactggacccatggcattttgtttcctaagaaaacaaaaacctcaaagcaaatatggtgaaaagttaatgttcgttggagtggacgatgggtcttttatgactgttatgttat

SEQ ID NO: 981120 - DNA, 120 bp, Artificial Sequence
  ENSG00000237638_46 (sequence is synthesized)
tctccatacttgtccattcgtttgaaatatttcagaaactaaattaactataacaaaggagagataattgaattcatccttatttgtaacttatcttgcacgacacccgatatgtacccc

SEQ ID NO: 981121 - DNA, 120 bp, Artificial Sequence
  ENSG00000237637_0 (sequence is synthesized)
aaaggacacggcggagcagagagagatgctcggccgctcctcctcctccgggtccaggacttgcttcttatttgctggacgctgatctccctgcagccctcggaggcggcggccgcgctg

SEQ ID NO: 981122 - DNA, 120 bp, Artificial Sequence
  ENSG00000237637_1 (sequence is synthesized)
ctttcatttcggggctgtcatcaccagaaacgccggctgccggccgcccaccagctcggctccagccaggcagtggtctctacaaggatgtctgacctagagtggagatggggtgactga

SEQ ID NO: 981123 - DNA, 120 bp, Artificial Sequence
  ENSG00000237637_2 (sequence is synthesized)
ggatggaaatctagtctgaactccactctccaatttggcagaagacctgtgtcttactcagctttgtgttccttacatctctgtagcacacactcccctgcgaaggggttttataaggaa

SEQ ID NO: 981124 - DNA, 120 bp, Artificial Sequence
  ENSG00000237637_3 (sequence is synthesized)
cccagagccaagacaaaggaatcaggaggaattctagcacaatgggaagcccctgaagggtttaagcagaagacaataaaagactccgagaagtggcagcagggagtggaggaaaaaaag

SEQ ID NO: 981125 - DNA, 120 bp, Artificial Sequence
  ENSG00000237637_4 (sequence is synthesized)
aatgccccctccatgtgtccattgtcatccaaggtgttttgacaggtctagagtggggtaaaagaatggtatttattcaggcctaatattgaggcttggggctgggctgtatatcagagg

SEQ ID NO: 981126 - DNA, 120 bp, Artificial Sequence
  ENSG00000237637_5 (sequence is synthesized)
gcatgcatagacaaagctgaacaaaggggcacacctactgggcacctgctgggcacttctctaaaagtggcactgagacatcattaggatgaattagaactagggcaccagttaacccgg

SEQ ID NO: 981127 - DNA, 120 bp, Artificial Sequence
  ENSG00000237637_6 (sequence is synthesized)
cagttaacccgggcctgcatgctagtgaaaggaaaattgcgcctctccctcaaccctgctccagacaactgaatggtgacttcaagaacaaatattcaggctgggtgcggtggctcacac

SEQ ID NO: 981128 - DNA, 71 bp, Artificial Sequence
  ENSG00000237637_7 (sequence is synthesized)
tgccagtaatctcagttgagatggtgccattgcacttcagcctggacgacaagagcataactctgtctcaa

SEQ ID NO: 981129 - DNA, 120 bp, Artificial Sequence
  ENSG00000237633_0 (sequence is synthesized)
gacttgcccaaggacactgccggggcttgagtgttggaggacttgagccttagagtgttgaagatgggagtttgagaactagctctgccatgagctgtgacacagtggccattatcttgt

SEQ ID NO: 981130 - DNA, 120 bp, Artificial Sequence
  ENSG00000237633_1 (sequence is synthesized)
agctattctagcaaatatttactgagcgcttattttccaaatgttctaatccttcacgcaacccaaacgcttctcacagcagtcctgccgattagatcagtcatgaacagaggggatgcc

SEQ ID NO: 981131 - DNA, 120 bp, Artificial Sequence
  ENSG00000237633_2 (sequence is synthesized)
accattacgatgtgtttctttatttgaatgaagacgcaagactgttgtagaaaaagaggccaaatgactgcacttacctgctaaggacaaagtgggagcctctatcatgaagggcaccag

SEQ ID NO: 981132 - DNA, 84 bp, Artificial Sequence
  ENSG00000237633_3 (sequence is synthesized)
tagctgggattacagatgataaagacggagtttcaccacgtctcaaactcctggcttgtctcaaactcctaacctcaggtgatc

SEQ ID NO: 981133 - DNA, 120 bp, Artificial Sequence
  ENSG00000237633_4 (sequence is synthesized)
actcctaacctcaggtgatccgcccgcctatttgacgataaagtttgctgatcctgccctagactgtaagctccaggagagcagagaccgcgtctctttcatctactctgcatctcaata

SEQ ID NO: 981134 - DNA, 120 bp, Artificial Sequence
  ENSG00000237633_5 (sequence is synthesized)
tggaaagcatctgtggaagaattacagcaaaaacttctacaattcaaggttatcatttctgtctagataagaagtttctctatcaggactagctaactgacttttgatcaagacaacagc

SEQ ID NO: 981135 - DNA, 120 bp, Artificial Sequence
  ENSG00000237633_6 (sequence is synthesized)
ctgatttctcatctggactcctggcagagcagccgcaaactgtaggctgtgtccacagaagttgaaaacatcctgacagatgttgttaaaggactccagtagcaaagatcaaagtctccg

SEQ ID NO: 981136 - DNA, 120 bp, Artificial Sequence
  ENSG00000237633_7 (sequence is synthesized)
aattttgcctttggagaagggggtttcatttcagacatcaaagaaatccaacgcagaaatgaccaacaggttttcctaccccctcaggctggtgagctgttcctctgggcttctagagga

SEQ ID NO: 981137 - DNA, 120 bp, Artificial Sequence
  ENSG00000237633_8 (sequence is synthesized)
ttctgtatgactgcaatcattatcaattttcatactatttgcaattgtacatttcacttgcctggctttagggacaaagacttgagactttgatcttgccttgtactatggagccaaatg

SEQ ID NO: 981138 - DNA, 120 bp, Artificial Sequence
  ENSG00000237633_9 (sequence is synthesized)
cagggccttccatccactcagtgctcagtttccatgtctatgtctatgttggacatgtctatgtccaagtctatgtctcagttgagatttactgaataaaatctgaataattttatgcca

SEQ ID NO: 981139 - DNA, 120 bp, Artificial Sequence
  ENSG00000177725_0 (sequence is synthesized)
tttgtctcacacaagtgcatccctgtccatttctaagtgcgcccttgtcctttggggagtgtggcctgtgaaacatggtgcatgcctgcagttatgtgtgtgtttgaaaacacaagatcc

SEQ ID NO: 981140 - DNA, 120 bp, Artificial Sequence
  ENSG00000177725_1 (sequence is synthesized)
tgcacggggaagtggttgagtgtgtgtttgtgcatatgcgtgggtgtgtcgctgccttgtaggcaagcatgttcacctgtgatcggtcttcctgagtacatgcaggcatggaggcaaaca

SEQ ID NO: 981141 - DNA, 120 bp, Artificial Sequence
  ENSG00000177725_2 (sequence is synthesized)
tgcacctctgcagaagtgttcacatgtgatgaagtccatccacatgtttgcaggggtttgagtgtgtcatcccccagctagaagcttgcgtttgtgcagtgggacatgcatcagtcctgc

SEQ ID NO: 981142 - DNA, 120 bp, Artificial Sequence
  ENSG00000177725_3 (sequence is synthesized)
acatatagccttggggctcattacaccagccagcctcctctccccacttccccagaaggggaggccttgccatgccctgggggaggagacggtggagtccagaggttgacctgaaagagt

SEQ ID NO: 981143 - DNA, 120 bp, Artificial Sequence
  ENSG00000177725_4 (sequence is synthesized)
gagattcttcccaggcacaagcacacagatgggctcagccacagtgctcctggcaggtttacagctggaaaacaacacaaaaaatttttatcttgtgttgaaaataactactaccctgac

SEQ ID NO: 981144 - DNA, 120 bp, Artificial Sequence
  ENSG00000177725_5 (sequence is synthesized)
cgtgaccccagggcttcctctgagtaaggagagacctcctagactccttagcatccagattccctcgcttcccagagggcagcccaaaagcacagagccccaaggcccagctcctgcccc

SEQ ID NO: 981145 - DNA, 120 bp, Artificial Sequence
  ENSG00000177725_6 (sequence is synthesized)
taagctctcctgcccatctctctctcccacccccacttggttccacgcattcttcagccatgacatcctcactccaggagctcagcagccagggccatgccctgccctgccttgcacttg

SEQ ID NO: 981146 - DNA, 120 bp, Artificial Sequence
  ENSG00000177725_7 (sequence is synthesized)
ctctgccctggttctacactggccctggacccgcaggccagcacagttctgtggcctctgcaccagggtttcactcaaggaggagtgggggcagagagtgtgggtgagccagcgttccct

SEQ ID NO: 981147 - DNA, 120 bp, Artificial Sequence
  ENSG00000177725_8 (sequence is synthesized)
gaggaggtctagagctgactttgagcttacgggttgtgttgggataatattaaagtggctggtgggtgcgtaccgtgttgcatgctctgtgctgggggttcgtgtatatgtcttatttca

SEQ ID NO: 981148 - DNA, 120 bp, Artificial Sequence
  ENSG00000177725_9 (sequence is synthesized)
acctggattccaagacaggtctgtctgactccaaagaccttgccctttgctctatgtccaaaggtgagtctaaatgtccagccacacctgtatgcggtgatgcctgtgggtttgggtgtg

SEQ ID NO: 981149 - DNA, 87 bp, Artificial Sequence
  ENSG00000177725_10 (sequence is synthesized)
gccacacctgtatgcggtgatgcctgtgggtttgggtgtgggagcctgcaggtacaatgcctgtgaaaggtataatatgtgtgtacg

SEQ ID NO: 981150 - DNA, 81 bp, Artificial Sequence
  ENSG00000177725_11 (sequence is synthesized)
ttgggaggccaaggcaggaggatcacctgtggtcaggagttcaagaacagcctgatcaacaaggtgaaacctaggctgaga

SEQ ID NO: 981151 - DNA, 120 bp, Artificial Sequence
  ENSG00000177725_12 (sequence is synthesized)
gtgagactccatttcaaaaaaaaaaagaaagaaaggtataacacaagcctaagtgtggaggcattcgtgtggcagatgcacatctacgtgaactttggtgagtatgaacccactgcttct

SEQ ID NO: 981152 - DNA, 120 bp, Artificial Sequence
  ENSG00000177725_13 (sequence is synthesized)
catctacgtgaactttggtgagtatgaacccactgcttcttccttggagtgtacctcccatcccatgtccttgttaaggccactcttgcatgtcacctgggaagcatcttctgttgccgt

SEQ ID NO: 981153 - DNA, 120 bp, Artificial Sequence
  ENSG00000177725_14 (sequence is synthesized)
cccatcagttgctgagccaaggccacctgccgaggatggcgattcaagtaagagtagctttctcatgggttggaagagatttggggtcacttactggctggtgaccttgagtgagttatc

SEQ ID NO: 981154 - DNA, 120 bp, Artificial Sequence
  ENSG00000177725_15 (sequence is synthesized)
gcccttcataggctcaagtgttctgatgtctaaagtcagggaggtgggctggaacctaaacctagccacttaggttatctctctctgagagtttctaatgctctgcaagagcatggtgtg

SEQ ID NO: 981155 - DNA, 120 bp, Artificial Sequence
  ENSG00000177725_16 (sequence is synthesized)
gagtgtggcttactgggcatgttgtgggcaggccaggattaaattaattaatgggaaagcactttgccaattggaaagcaccacaaaaatttcaacatttacataaggtgtcattatcac

SEQ ID NO: 981156 - DNA, 120 bp, Artificial Sequence
  ENSG00000177725_17 (sequence is synthesized)
gactattatttgcttaatgggtccagagcttgcagctggtttgtgtatgttggagcttgtgcatgtgtgttttttaaaaaccgtgtgtgactgtgtgtgtattttgttgtggatgtgtcc

SEQ ID NO: 981157 - DNA, 120 bp, Artificial Sequence
  ENSG00000177725_18 (sequence is synthesized)
gtctgagtatctatttttgtatatatgtatttacagtaggggttctagagagtgcagtggttgctgcactgggaatggggaggcctgagttatacgtccagttttccagtgactagcagt

SEQ ID NO: 981158 - DNA, 120 bp, Artificial Sequence
  ENSG00000240596_0 (sequence is synthesized)
ggctggaggaggaaaatccatgtctaagcagaacagctgtgtacgaggaggtccctccttaagcacagtttgcctaaacagctctgaaccgggatggtgccctaaaagggcgtttccgga

SEQ ID NO: 981159 - DNA, 120 bp, Artificial Sequence
  ENSG00000240596_1 (sequence is synthesized)
gtttagggtgagaacttaccactgtgcctgctagtgggggccttgagcctgttacatgaagaggagaatcatttgggagcctgcagcagtgattctgttctttcagagcgtctgtggatt

SEQ ID NO: 981160 - DNA, 120 bp, Artificial Sequence
  ENSG00000240596_2 (sequence is synthesized)
cggttcaactctagttgaaaagaaaataagcctctgaacaaataagcatttgttcctccaggtagcctgtgatgccactgcagtggtggatgttccctgaacacgctgtgcattttctca

SEQ ID NO: 981161 - DNA, 120 bp, Artificial Sequence
  ENSG00000240596_3 (sequence is synthesized)
cctcagggtcttcagtcaagctgctgcatctatgtggaattccctgtctgtctccaccaactgccaaatgcttgctgatctttcaagatggaagtgaaaggacactacctctcctaagct

SEQ ID NO: 981162 - DNA, 120 bp, Artificial Sequence
  ENSG00000240591_0 (sequence is synthesized)
cactaaggaataatggaacctctgtctgtcctattggtcagataaggaatgctaaaagtcagttgctttcttttggtataagacataatgattcaaacagctattgctacttgcatcttg

SEQ ID NO: 981163 - DNA, 120 bp, Artificial Sequence
  ENSG00000240591_1 (sequence is synthesized)
gctaactggtaagttcccaggcaagcagggaacaggaaaaaaagagagaaaactcaatttggtaaatttgctataacttagcaactagaataagtccatgtttatgtttttattattcat

SEQ ID NO: 981164 - DNA, 120 bp, Artificial Sequence
  ENSG00000240591_2 (sequence is synthesized)
atctaccctgcttccacattagtttgtatcaagagatagtgatattaacacataggctatgggtaagaactaccctctcaaaattgttaggacaaagaaccagtatattataaacatttg

SEQ ID NO: 981165 - DNA, 120 bp, Artificial Sequence
  ENSG00000240591_3 (sequence is synthesized)
catttacaaggtgatatgcagttgtgtcaccttgtaacctaacttcatgcctacaagttttgtttttaacttggagccacaactttttccattagtaaattgacagaatgtaattatcct

SEQ ID NO: 981166 - DNA, 64 bp, Artificial Sequence
  ENSG00000240591_4 (sequence is synthesized)
tttcatttcccaggttcaagcagttctcttgtcttggcctcccaagtagctgagattacaggcg

SEQ ID NO: 981167 - DNA, 90 bp, Artificial Sequence
  ENSG00000240591_5 (sequence is synthesized)
ctcggctcactgcaactttcatttcccaggttcaagcagttctcttgtcttgtgcccccacgcctggctaatttttatttttagtagaga

SEQ ID NO: 981168 - DNA, 120 bp, Artificial Sequence
  ENSG00000240591_6 (sequence is synthesized)
gggattacacgcgtgagccactgtgctcagccccatcttagatactttacaaatgatttgtatgactgcaagaatgcaggtaatccctggtatctgggaataattagaagatgtgaataa
